United States Patent Application Publication US 2008/0113351 A1 - sequence listing, part 26

SEQ ID NO: 633347 - DNA, 19 bp, Mus musculus
  siRNA target sequence for Nrp (NM_008737.1,1914-1932).
ggctctgactggaaaacta

SEQ ID NO: 633348 - DNA, 19 bp, Mus musculus
  siRNA target sequence for Nrp (NM_008737.1,1963-1981).
cgttcgaaggcaacaacaa

SEQ ID NO: 633349 - DNA, 19 bp, Mus musculus
  siRNA target sequence for Nrp (NM_008737.1,1971-1989).
ggcaacaacaactatgaca

SEQ ID NO: 633350 - DNA, 19 bp, Mus musculus
  siRNA target sequence for Nrp (NM_008737.1,1992-2010).
cctgagcttcggacgtttt

SEQ ID NO: 633351 - DNA, 19 bp, Mus musculus
  siRNA target sequence for Nrp (NM_008737.1,2016-2034).
ctctccacaaggttcatca

SEQ ID NO: 633352 - DNA, 19 bp, Mus musculus
  siRNA target sequence for Nrp (NM_008737.1,2182-2200).
gtggcacaggtgatgactt

SEQ ID NO: 633353 - DNA, 19 bp, Mus musculus
  siRNA target sequence for Nrp (NM_008737.1,2233-2251).
cagagaagccaaccattat

SEQ ID NO: 633354 - DNA, 19 bp, Mus musculus
  siRNA target sequence for Nrp (NM_008737.1,2277-2295).
ccgacatacggttttaact

SEQ ID NO: 633355 - DNA, 19 bp, Mus musculus
  siRNA target sequence for Nrp (NM_008737.1,2410-2428).
gagatggcaacttcatcta

SEQ ID NO: 633356 - DNA, 19 bp, Mus musculus
  siRNA target sequence for Nrp (NM_008737.1,2412-2430).
gatggcaacttcatctatt

SEQ ID NO: 633357 - DNA, 19 bp, Mus musculus
  siRNA target sequence for Nrp (NM_008737.1,2426-2444).
ctattcccaagctgatgaa

SEQ ID NO: 633358 - DNA, 19 bp, Mus musculus
  siRNA target sequence for Nrp (NM_008737.1,2721-2739).
ggaattgctgtggatgata

SEQ ID NO: 633359 - DNA, 19 bp, Mus musculus
  siRNA target sequence for Nrp (NM_008737.1,2722-2740).
gaattgctgtggatgatat

SEQ ID NO: 633360 - DNA, 19 bp, Mus musculus
  siRNA target sequence for Nrp (NM_008737.1,2730-2748).
gtggatgatatcagtatta

SEQ ID NO: 633361 - DNA, 19 bp, Mus musculus
  siRNA target sequence for Nrp (NM_008737.1,2741-2759).
cagtattaacaaccatatt

SEQ ID NO: 633362 - DNA, 19 bp, Mus musculus
  siRNA target sequence for Nrp (NM_008737.1,2830-2848).
ggagcactccaggatatga

SEQ ID NO: 633363 - DNA, 19 bp, Mus musculus
  siRNA target sequence for Nrp (NM_008737.1,2831-2849).
gagcactccaggatatgaa

SEQ ID NO: 633364 - DNA, 19 bp, Mus musculus
  siRNA target sequence for Nrp (NM_008737.1,2886-2904).
ccaggcaatgtgcttaaga

SEQ ID NO: 633365 - DNA, 19 bp, Mus musculus
  siRNA target sequence for Nrp (NM_008737.1,3000-3018).
cacaatgggatgtcagaaa

SEQ ID NO: 633366 - DNA, 19 bp, Mus musculus
  siRNA target sequence for Nrp (NM_008737.1,3028-3046).
ctgccctggagaactataa

SEQ ID NO: 633367 - DNA, 19 bp, Mus musculus
  siRNA target sequence for Nrp (NM_008737.1,3054-3072).
cttgtggatggtgtaaagt

SEQ ID NO: 633368 - DNA, 19 bp, Mus musculus
  siRNA target sequence for Nrp (NM_008737.1,3066-3084).
gtaaagttgaaaaaagata

SEQ ID NO: 633369 - DNA, 19 bp, Mus musculus
  siRNA target sequence for Nrp (NM_008737.1,3087-3105).
ctgaacccacagagtaatt

SEQ ID NO: 633370 - DNA, 19 bp, Mus musculus
  siRNA target sequence for Plxna4 (NM_175750.2,1166-1184).
ggggctgtcaacagaatct

SEQ ID NO: 633371 - DNA, 19 bp, Mus musculus
  siRNA target sequence for Plxna4 (NM_175750.2,1238-1256).
gaggacaaccccaagtgtt

SEQ ID NO: 633372 - DNA, 19 bp, Mus musculus
  siRNA target sequence for Plxna4 (NM_175750.2,1299-1317).
gcaccaataacgtcaacaa

SEQ ID NO: 633373 - DNA, 19 bp, Mus musculus
  siRNA target sequence for Plxna4 (NM_175750.2,1302-1320).
ccaataacgtcaacaagat

SEQ ID NO: 633374 - DNA, 19 bp, Mus musculus
  siRNA target sequence for Plxna4 (NM_175750.2,1321-1339).
gctgcttatagactacaaa

SEQ ID NO: 633375 - DNA, 19 bp, Mus musculus
  siRNA target sequence for Plxna4 (NM_175750.2,1324-1342).
gcttatagactacaaagaa

SEQ ID NO: 633376 - DNA, 19 bp, Mus musculus
  siRNA target sequence for Plxna4 (NM_175750.2,1462-1480).
cgagagtggctcagtcttt

SEQ ID NO: 633377 - DNA, 19 bp, Mus musculus
  siRNA target sequence for Plxna4 (NM_175750.2,1494-1512).
cctacagcaactttgatga

SEQ ID NO: 633378 - DNA, 19 bp, Mus musculus
  siRNA target sequence for Plxna4 (NM_175750.2,1500-1518).
gcaactttgatgataaact

SEQ ID NO: 633379 - DNA, 19 bp, Mus musculus
  siRNA target sequence for Plxna4 (NM_175750.2,1537-1555).
ggatggcaaacctgaatat

SEQ ID NO: 633380 - DNA, 19 bp, Mus musculus
  siRNA target sequence for Plxna4 (NM_175750.2,1569-1587).
ccagcaggaagctgactaa

SEQ ID NO: 633381 - DNA, 19 bp, Mus musculus
  siRNA target sequence for Plxna4 (NM_175750.2,1598-1616).
gccgatggcatgtttgctt

SEQ ID NO: 633382 - DNA, 19 bp, Mus musculus
  siRNA target sequence for Plxna4 (NM_175750.2,1599-1617).
ccgatggcatgtttgctta

SEQ ID NO: 633383 - DNA, 19 bp, Mus musculus
  siRNA target sequence for Plxna4 (NM_175750.2,1604-1622).
ggcatgtttgcttacgttt

SEQ ID NO: 633384 - DNA, 19 bp, Mus musculus
  siRNA target sequence for Plxna4 (NM_175750.2,1605-1623).
gcatgtttgcttacgtttt

SEQ ID NO: 633385 - DNA, 19 bp, Mus musculus
  siRNA target sequence for Plxna4 (NM_175750.2,1674-1692).
cggttatccccgactttga

SEQ ID NO: 633386 - DNA, 19 bp, Mus musculus
  siRNA target sequence for Plxna4 (NM_175750.2,1676-1694).
gttatccccgactttgaca

SEQ ID NO: 633387 - DNA, 19 bp, Mus musculus
  siRNA target sequence for Plxna4 (NM_175750.2,1719-1737).
gtggcaattttgtctactt

SEQ ID NO: 633388 - DNA, 19 bp, Mus musculus
  siRNA target sequence for Plxna4 (NM_175750.2,1882-1900).
ggtggagtatcgcttgtta

SEQ ID NO: 633389 - DNA, 19 bp, Mus musculus
  siRNA target sequence for Plxna4 (NM_175750.2,1901-1919).
caggctgcctacttgtcta

SEQ ID NO: 633390 - DNA, 19 bp, Mus musculus
  siRNA target sequence for Plxna4 (NM_175750.2,2033-2051).
ctgtgcatcttcatcttga

SEQ ID NO: 633391 - DNA, 19 bp, Mus musculus
  siRNA target sequence for Plxna4 (NM_175750.2,2077-2095).
ccgcctgcagtcctgttat

SEQ ID NO: 633392 - DNA, 19 bp, Mus musculus
  siRNA target sequence for Plxna4 (NM_175750.2,2078-2096).
cgcctgcagtcctgttata

SEQ ID NO: 633393 - DNA, 19 bp, Mus musculus
  siRNA target sequence for Plxna4 (NM_175750.2,2151-2169).
gcagtgcgctccttactat

SEQ ID NO: 633394 - DNA, 19 bp, Mus musculus
  siRNA target sequence for Plxna4 (NM_175750.2,2152-2170).
cagtgcgctccttactatt

SEQ ID NO: 633395 - DNA, 19 bp, Mus musculus
  siRNA target sequence for Plxna4 (NM_175750.2,2154-2172).
gtgcgctccttactattga

SEQ ID NO: 633396 - DNA, 19 bp, Mus musculus
  siRNA target sequence for Plxna4 (NM_175750.2,2157-2175).
cgctccttactattgatga

SEQ ID NO: 633397 - DNA, 19 bp, Mus musculus
  siRNA target sequence for Plxna4 (NM_175750.2,2252-2270).
gacagggaccgcatgactt

SEQ ID NO: 633398 - DNA, 19 bp, Mus musculus
  siRNA target sequence for Plxna4 (NM_175750.2,2362-2380).
gggaaatgccctccaatat

SEQ ID NO: 633399 - DNA, 19 bp, Mus musculus
  siRNA target sequence for Plxna4 (NM_175750.2,2444-2462).
gagcaactctacatcatgt

SEQ ID NO: 633400 - DNA, 19 bp, Mus musculus
  siRNA target sequence for Plxna4 (NM_175750.2,2699-2717).
ctggtcctagagacataca

SEQ ID NO: 633401 - DNA, 19 bp, Mus musculus
  siRNA target sequence for Plxna4 (NM_175750.2,2701-2719).
ggtcctagagacatacaat

SEQ ID NO: 633402 - DNA, 19 bp, Mus musculus
  siRNA target sequence for Plxna4 (NM_175750.2,2743-2761).
caactgtacctttgaagat

SEQ ID NO: 633403 - DNA, 19 bp, Mus musculus
  siRNA target sequence for Plxna4 (NM_175750.2,2770-2788).
gatggatgggctggtaata

SEQ ID NO: 633404 - DNA, 19 bp, Mus musculus
  siRNA target sequence for Plxna4 (NM_175750.2,2870-2888).
cagctgcaactcaagtcaa

SEQ ID NO: 633405 - DNA, 19 bp, Mus musculus
  siRNA target sequence for Plxna4 (NM_175750.2,2916-2934).
ccagctttgtcttctacaa

SEQ ID NO: 633406 - DNA, 19 bp, Mus musculus
  siRNA target sequence for Plxna4 (NM_175750.2,2980-2998).
ccgttgccactggtgtaaa

SEQ ID NO: 633407 - DNA, 19 bp, Mus musculus
  siRNA target sequence for Plxna4 (NM_175750.2,2981-2999).
cgttgccactggtgtaaat

SEQ ID NO: 633408 - DNA, 19 bp, Mus musculus
  siRNA target sequence for Plxna4 (NM_175750.2,3177-3195).
gctacgagtgcatcttgaa

SEQ ID NO: 633409 - DNA, 19 bp, Mus musculus
  siRNA target sequence for Plxna4 (NM_175750.2,3259-3277).
gaacacctcctattcctat

SEQ ID NO: 633410 - DNA, 19 bp, Mus musculus
  siRNA target sequence for Plxna4 (NM_175750.2,3324-3342).
ggaatggacacttcaacat

SEQ ID NO: 633411 - DNA, 19 bp, Mus musculus
  siRNA target sequence for Plxna4 (NM_175750.2,3330-3348).
gacacttcaacattgacaa

SEQ ID NO: 633412 - DNA, 19 bp, Mus musculus
  siRNA target sequence for Plxna4 (NM_175750.2,3354-3372).
ctcagaataaagtttacct

SEQ ID NO: 633413 - DNA, 19 bp, Mus musculus
  siRNA target sequence for Plxna4 (NM_175750.2,3622-3640).
cctggaattccgtgacatt

SEQ ID NO: 633414 - DNA, 19 bp, Mus musculus
  siRNA target sequence for Plxna4 (NM_175750.2,3626-3644).
gaattccgtgacattgcat

SEQ ID NO: 633415 - DNA, 19 bp, Mus musculus
  siRNA target sequence for Plxna4 (NM_175750.2,3800-3818).
cgctcttcgcagctctatt

SEQ ID NO: 633416 - DNA, 19 bp, Mus musculus
  siRNA target sequence for Plxna4 (NM_175750.2,3801-3819).
gctcttcgcagctctatta

SEQ ID NO: 633417 - DNA, 19 bp, Mus musculus
  siRNA target sequence for Plxna4 (NM_175750.2,3804-3822).
cttcgcagctctattactt

SEQ ID NO: 633418 - DNA, 19 bp, Mus musculus
  siRNA target sequence for Plxna4 (NM_175750.2,3809-3827).
cagctctattacttcatga

SEQ ID NO: 633419 - DNA, 19 bp, Mus musculus
  siRNA target sequence for Plxna4 (NM_175750.2,3971-3989).
ccatcctacattatctgta

SEQ ID NO: 633420 - DNA, 19 bp, Mus musculus
  siRNA target sequence for Plxna4 (NM_175750.2,3972-3990).
catcctacattatctgtaa

SEQ ID NO: 633421 - DNA, 19 bp, Mus musculus
  siRNA target sequence for Plxna4 (NM_175750.2,4090-4108).
caccattgtgcggattgaa

SEQ ID NO: 633422 - DNA, 19 bp, Mus musculus
  siRNA target sequence for Plxna4 (NM_175750.2,4109-4127).
ccagaatggagcattgtca

SEQ ID NO: 633423 - DNA, 19 bp, Mus musculus
  siRNA target sequence for Plxna4 (NM_175750.2,4222-4240).
catctgtgaggtcctaaat

SEQ ID NO: 633424 - DNA, 19 bp, Mus musculus
  siRNA target sequence for Plxna4 (NM_175750.2,4305-4323).
ctgagaggcctgaagaatt

SEQ ID NO: 633425 - DNA, 19 bp, Mus musculus
  siRNA target sequence for Plxna4 (NM_175750.2,4309-4327).
gaggcctgaagaatttggt

SEQ ID NO: 633426 - DNA, 19 bp, Mus musculus
  siRNA target sequence for Plxna4 (NM_175750.2,4346-4364).
cagtctctgctaattctca

SEQ ID NO: 633427 - DNA, 19 bp, Mus musculus
  siRNA target sequence for Plxna4 (NM_175750.2,4369-4387).
gaccaacttcacctattat

SEQ ID NO: 633428 - DNA, 19 bp, Mus musculus
  siRNA target sequence for Plxna4 (NM_175750.2,4396-4414).
cgtgtttgaggctttcagt

SEQ ID NO: 633429 - DNA, 19 bp, Mus musculus
  siRNA target sequence for Plxna4 (NM_175750.2,4441-4459).
gggcacccccattatccta

SEQ ID NO: 633430 - DNA, 19 bp, Mus musculus
  siRNA target sequence for Plxna4 (NM_175750.2,4442-4460).
ggcacccccattatcctaa

SEQ ID NO: 633431 - DNA, 19 bp, Mus musculus
  siRNA target sequence for Plxna4 (NM_175750.2,4484-4502).
gtggccggaggcaatgtga

SEQ ID NO: 633432 - DNA, 19 bp, Mus musculus
  siRNA target sequence for Plxna4 (NM_175750.2,4540-4558).
caccgtgacagtatcagat

SEQ ID NO: 633433 - DNA, 19 bp, Mus musculus
  siRNA target sequence for Plxna4 (NM_175750.2,4913-4931).
ctggactacagaacctata

SEQ ID NO: 633434 - DNA, 19 bp, Mus musculus
  siRNA target sequence for Plxna4 (NM_175750.2,4916-4934).
gactacagaacctatacca

SEQ ID NO: 633435 - DNA, 19 bp, Mus musculus
  siRNA target sequence for Plxna4 (NM_175750.2,5087-5105).
gagtctcagcgcagttttt

SEQ ID NO: 633436 - DNA, 19 bp, Mus musculus
  siRNA target sequence for Plxna4 (NM_175750.2,5443-5461).
ccgacagcagattgaatat

SEQ ID NO: 633437 - DNA, 19 bp, Mus musculus
  siRNA target sequence for Plxna4 (NM_175750.2,5444-5462).
cgacagcagattgaatata

SEQ ID NO: 633438 - DNA, 19 bp, Mus musculus
  siRNA target sequence for Plxna4 (NM_175750.2,5479-5497).
ctgtgtcagtccagataat

SEQ ID NO: 633439 - DNA, 19 bp, Mus musculus
  siRNA target sequence for Plxna4 (NM_175750.2,5483-5501).
gtcagtccagataatgtta

SEQ ID NO: 633440 - DNA, 19 bp, Mus musculus
  siRNA target sequence for Plxna4 (NM_175750.2,5567-5585).
ctagatgccatcttcaaga

SEQ ID NO: 633441 - DNA, 19 bp, Mus musculus
  siRNA target sequence for Plxna4 (NM_175750.2,5663-5681).
ctgcaggacgaagatatca

SEQ ID NO: 633442 - DNA, 19 bp, Mus musculus
  siRNA target sequence for Plxna4 (NM_175750.2,5682-5700).
ccaccaagatcgagaatga

SEQ ID NO: 633443 - DNA, 19 bp, Mus musculus
  siRNA target sequence for Plxna4 (NM_175750.2,5683-5701).
caccaagatcgagaatgat

SEQ ID NO: 633444 - DNA, 19 bp, Mus musculus
  siRNA target sequence for Plxna4 (NM_175750.2,5745-5763).
gttctgtggtggctttagt

SEQ ID NO: 633445 - DNA, 19 bp, Mus musculus
  siRNA target sequence for Plxna4 (NM_175750.2,5814-5832).
ggacttcagcaagtaaata

SEQ ID NO: 633446 - DNA, 19 bp, Mus musculus
  siRNA target sequence for Plxna4 (NM_175750.2,5815-5833).
gacttcagcaagtaaatat

SEQ ID NO: 633447 - DNA, 19 bp, Mus musculus
  siRNA target sequence for Plxna4 (NM_175750.2,6203-6221).
ctacggttttgggtgaata

SEQ ID NO: 633448 - DNA, 19 bp, Mus musculus
  siRNA target sequence for Plxna4 (NM_175750.2,6206-6224).
cggttttgggtgaatatga

SEQ ID NO: 633449 - DNA, 19 bp, Mus musculus
  siRNA target sequence for Plxna4 (NM_175750.2,6207-6225).
ggttttgggtgaatatgat

SEQ ID NO: 633450 - DNA, 19 bp, Mus musculus
  siRNA target sequence for Plxna4 (NM_175750.2,6400-6418).
ggtagagaggtattattca

SEQ ID NO: 633451 - DNA, 19 bp, Mus musculus
  siRNA target sequence for Plxna4 (NM_175750.2,6425-6443).
gggaagatgccggcaataa

SEQ ID NO: 633452 - DNA, 19 bp, Mus musculus
  siRNA target sequence for Plxna4 (NM_175750.2,6478-6496).
gtcgcggatgcacatgaat

SEQ ID NO: 633453 - DNA, 19 bp, Mus musculus
  siRNA target sequence for Plxna4 (NM_175750.2,6513-6531).
gtgcgctctcagagatctt

SEQ ID NO: 633454 - DNA, 19 bp, Mus musculus
  siRNA target sequence for Plxna4 (NM_175750.2,6515-6533).
gcgctctcagagatcttct

SEQ ID NO: 633455 - DNA, 19 bp, Mus musculus
  siRNA target sequence for Plxna4 (NM_175750.2,6567-6585).
gacccctggaccatgatga

SEQ ID NO: 633456 - DNA, 19 bp, Mus musculus
  siRNA target sequence for Plxna4 (NM_175750.2,6601-6619).
gaaactggcttacaaacta

SEQ ID NO: 633457 - DNA, 19 bp, Mus musculus
  siRNA target sequence for Plxna4 (NM_175750.2,6613-6631).
caaactagaacaagtcata

SEQ ID NO: 633458 - DNA, 19 bp, Mus musculus
  siRNA target sequence for Lu (NM_020486.1,161-179).
gggagcaccctgagcatta

SEQ ID NO: 633459 - DNA, 19 bp, Mus musculus
  siRNA target sequence for Lu (NM_020486.1,526-544).
cccgtgcctcggatcacat

SEQ ID NO: 633460 - DNA, 19 bp, Mus musculus
  siRNA target sequence for Lu (NM_020486.1,774-792).
ctatcccacggaacatgta

SEQ ID NO: 633461 - DNA, 19 bp, Mus musculus
  siRNA target sequence for Lu (NM_020486.1,880-898).
cccagcccagagtattctt

SEQ ID NO: 633462 - DNA, 19 bp, Mus musculus
  siRNA target sequence for Lu (NM_020486.1,882-900).
cagcccagagtattctttt

SEQ ID NO: 633463 - DNA, 19 bp, Mus musculus
  siRNA target sequence for Lu (NM_020486.1,998-1016).
gctgcagagtggaggatta

SEQ ID NO: 633464 - DNA, 19 bp, Mus musculus
  siRNA target sequence for Lu (NM_020486.1,1001-1019).
gcagagtggaggattacga

SEQ ID NO: 633465 - DNA, 19 bp, Mus musculus
  siRNA target sequence for Lu (NM_020486.1,1002-1020).
cagagtggaggattacgat

SEQ ID NO: 633466 - DNA, 19 bp, Mus musculus
  siRNA target sequence for Lu (NM_020486.1,1036-1054).
caacttgtcaagaagctaa

SEQ ID NO: 633467 - DNA, 19 bp, Mus musculus
  siRNA target sequence for Lu (NM_020486.1,1097-1115).
ctgaggagctcttcgtatt

SEQ ID NO: 633468 - DNA, 19 bp, Mus musculus
  siRNA target sequence for Lu (NM_020486.1,1228-1246).
cagtctgtgacctttgact

SEQ ID NO: 633469 - DNA, 19 bp, Mus musculus
  siRNA target sequence for Lu (NM_020486.1,1326-1344).
ccaaggagcaccagagtta

SEQ ID NO: 633470 - DNA, 19 bp, Mus musculus
  siRNA target sequence for Lu (NM_020486.1,1339-1357).
gagttaaaaccgaatgaga

SEQ ID NO: 633471 - DNA, 19 bp, Mus musculus
  siRNA target sequence for Lu (NM_020486.1,1508-1526).
gctcgctgatggtgaaagt

SEQ ID NO: 633472 - DNA, 19 bp, Mus musculus
  siRNA target sequence for Lu (NM_020486.1,1658-1676).
ctgtcagcgtcggtctttt

SEQ ID NO: 633473 - DNA, 19 bp, Mus musculus
  siRNA target sequence for Lu (NM_020486.1,1662-1680).
cagcgtcggtcttttgcta

SEQ ID NO: 633474 - DNA, 19 bp, Mus musculus
  siRNA target sequence for Lu (NM_020486.1,1683-1701).
cgtggtcgctgctttctat

SEQ ID NO: 633475 - DNA, 19 bp, Mus musculus
  siRNA target sequence for Lu (NM_020486.1,1684-1702).
gtggtcgctgctttctatt

SEQ ID NO: 633476 - DNA, 19 bp, Mus musculus
  siRNA target sequence for Trpv4 (NM_022017.1,504-522).
caccccccatcctcaaagt

SEQ ID NO: 633477 - DNA, 19 bp, Mus musculus
  siRNA target sequence for Trpv4 (NM_022017.1,506-524).
ccccccatcctcaaagtct

SEQ ID NO: 633478 - DNA, 19 bp, Mus musculus
  siRNA target sequence for Trpv4 (NM_022017.1,510-528).
ccatcctcaaagtcttcaa

SEQ ID NO: 633479 - DNA, 19 bp, Mus musculus
  siRNA target sequence for Trpv4 (NM_022017.1,534-552).
ccatcctctttgacattgt

SEQ ID NO: 633480 - DNA, 19 bp, Mus musculus
  siRNA target sequence for Trpv4 (NM_022017.1,672-690).
cgctgctgaacctaagcaa

SEQ ID NO: 633481 - DNA, 19 bp, Mus musculus
  siRNA target sequence for Trpv4 (NM_022017.1,738-756).
ccggcaacatgcgtgaatt

SEQ ID NO: 633482 - DNA, 19 bp, Mus musculus
  siRNA target sequence for Trpv4 (NM_022017.1,740-758).
ggcaacatgcgtgaattca

SEQ ID NO: 633483 - DNA, 19 bp, Mus musculus
  siRNA target sequence for Trpv4 (NM_022017.1,911-929).
gagggaggctacttctact

SEQ ID NO: 633484 - DNA, 19 bp, Mus musculus
  siRNA target sequence for Trpv4 (NM_022017.1,1084-1102).
ccgagagaacaccaagttt

SEQ ID NO: 633485 - DNA, 19 bp, Mus musculus
  siRNA target sequence for Trpv4 (NM_022017.1,1086-1104).
gagagaacaccaagtttgt

SEQ ID NO: 633486 - DNA, 19 bp, Mus musculus
  siRNA target sequence for Trpv4 (NM_022017.1,1188-1206).
gcctttcgcctctcatgat

SEQ ID NO: 633487 - DNA, 19 bp, Mus musculus
  siRNA target sequence for Trpv4 (NM_022017.1,1221-1239).
gcaagatcggggtctttca

SEQ ID NO: 633488 - DNA, 19 bp, Mus musculus
  siRNA target sequence for Trpv4 (NM_022017.1,1230-1248).
gggtctttcagcacatcat

SEQ ID NO: 633489 - DNA, 19 bp, Mus musculus
  siRNA target sequence for Trpv4 (NM_022017.1,1280-1298).
catctgtctcgcaagttca

SEQ ID NO: 633490 - DNA, 19 bp, Mus musculus
  siRNA target sequence for Trpv4 (NM_022017.1,1306-1324).
ggcctatgggcctgtgtat

SEQ ID NO: 633491 - DNA, 19 bp, Mus musculus
  siRNA target sequence for Trpv4 (NM_022017.1,1307-1325).
gcctatgggcctgtgtatt

SEQ ID NO: 633492 - DNA, 19 bp, Mus musculus
  siRNA target sequence for Trpv4 (NM_022017.1,1431-1449).
ctgtagagcccattaacga

SEQ ID NO: 633493 - DNA, 19 bp, Mus musculus
  siRNA target sequence for Trpv4 (NM_022017.1,1458-1476).
gagacaagtggcgtaagtt

SEQ ID NO: 633494 - DNA, 19 bp, Mus musculus
  siRNA target sequence for Trpv4 (NM_022017.1,1534-1552).
caccctcaccgcctactat

SEQ ID NO: 633495 - DNA, 19 bp, Mus musculus
  siRNA target sequence for Trpv4 (NM_022017.1,1536-1554).
ccctcaccgcctactatca

SEQ ID NO: 633496 - DNA, 19 bp, Mus musculus
  siRNA target sequence for Trpv4 (NM_022017.1,1689-1707).
gccctggagtgaattctct

SEQ ID NO: 633497 - DNA, 19 bp, Mus musculus
  siRNA target sequence for Trpv4 (NM_022017.1,1722-1740).
ccttccagttactctactt

SEQ ID NO: 633498 - DNA, 19 bp, Mus musculus
  siRNA target sequence for Trpv4 (NM_022017.1,1727-1745).
cagttactctacttcatct

SEQ ID NO: 633499 - DNA, 19 bp, Mus musculus
  siRNA target sequence for Trpv4 (NM_022017.1,1836-1854).
ggatgaatgcgctgtactt

SEQ ID NO: 633500 - DNA, 19 bp, Mus musculus
  siRNA target sequence for Trpv4 (NM_022017.1,2196-2214).
ccttcgtgctcctgttgaa

SEQ ID NO: 633501 - DNA, 19 bp, Mus musculus
  siRNA target sequence for Trpv4 (NM_022017.1,2204-2222).
ctcctgttgaacatgctta

SEQ ID NO: 633502 - DNA, 19 bp, Mus musculus
  siRNA target sequence for Trpv4 (NM_022017.1,2484-2502).
gtgaaatctaccagtacta

SEQ ID NO: 633503 - DNA, 19 bp, Mus musculus
  siRNA target sequence for Trpv4 (NM_022017.1,2562-2580).
gcgtagtggagctgaacaa

SEQ ID NO: 633504 - DNA, 19 bp, Mus musculus
  siRNA target sequence for A830091I15Rik (NM_172795.2,467-485).
cgctgtccgagctgaaaca

SEQ ID NO: 633505 - DNA, 19 bp, Mus musculus
  siRNA target sequence for A830091I15Rik (NM_172795.2,734-752).
gtctaggcgtgatcttgaa

SEQ ID NO: 633506 - DNA, 19 bp, Mus musculus
  siRNA target sequence for A830091I15Rik (NM_172795.2,800-818).
gcatcttggagcacatgtt

SEQ ID NO: 633507 - DNA, 19 bp, Mus musculus
  siRNA target sequence for A830091I15Rik (NM_172795.2,1369-1387).
cgcctggtttcttactcta

SEQ ID NO: 633508 - DNA, 19 bp, Mus musculus
  siRNA target sequence for A830091I15Rik (NM_172795.2,1374-1392).
ggtttcttactctacgaat

SEQ ID NO: 633509 - DNA, 19 bp, Mus musculus
  siRNA target sequence for A830091I15Rik (NM_172795.2,1523-1541).
cccagtactgcgagaactt

SEQ ID NO: 633510 - DNA, 19 bp, Mus musculus
  siRNA target sequence for A830091I15Rik (NM_172795.2,1524-1542).
ccagtactgcgagaacttt

SEQ ID NO: 633511 - DNA, 19 bp, Mus musculus
  siRNA target sequence for A830091I15Rik (NM_172795.2,1558-1576).
gatggtgacctgcttctaa

SEQ ID NO: 633512 - DNA, 19 bp, Mus musculus
  siRNA target sequence for A830091I15Rik (NM_172795.2,1599-1617).
gacagacctaggcatgaaa

SEQ ID NO: 633513 - DNA, 19 bp, Mus musculus
  siRNA target sequence for A830091I15Rik (NM_172795.2,1626-1644).
cacccgcaagaggttcttt

SEQ ID NO: 633514 - DNA, 19 bp, Mus musculus
  siRNA target sequence for A830091I15Rik (NM_172795.2,1867-1885).
gccagagaaatgctacatt

SEQ ID NO: 633515 - DNA, 19 bp, Mus musculus
  siRNA target sequence for A830091I15Rik (NM_172795.2,2052-2070).
cgaggacaagcttatccaa

SEQ ID NO: 633516 - DNA, 19 bp, Mus musculus
  siRNA target sequence for A830091I15Rik (NM_172795.2,2076-2094).
catagcggctcgcaatttt

SEQ ID NO: 633517 - DNA, 19 bp, Mus musculus
  siRNA target sequence for Cd3d (NM_013487.1,15-33).
gattctggctagtctgata

SEQ ID NO: 633518 - DNA, 19 bp, Mus musculus
  siRNA target sequence for Cd3d (NM_013487.1,21-39).
ggctagtctgatactgatt

SEQ ID NO: 633519 - DNA, 19 bp, Mus musculus
  siRNA target sequence for Cd3d (NM_013487.1,52-70).
caagggagccccttcaaga

SEQ ID NO: 633520 - DNA, 19 bp, Mus musculus
  siRNA target sequence for Cd3d (NM_013487.1,81-99).
cgaatatgaggacaaagta

SEQ ID NO: 633521 - DNA, 19 bp, Mus musculus
  siRNA target sequence for Cd3d (NM_013487.1,82-100).
gaatatgaggacaaagtat

SEQ ID NO: 633522 - DNA, 19 bp, Mus musculus
  siRNA target sequence for Cd3d (NM_013487.1,116-134).
ccagcgtcatgcatctaga

SEQ ID NO: 633523 - DNA, 19 bp, Mus musculus
  siRNA target sequence for Cd3d (NM_013487.1,117-135).
cagcgtcatgcatctagat

SEQ ID NO: 633524 - DNA, 19 bp, Mus musculus
  siRNA target sequence for Cd3d (NM_013487.1,195-213).
ggacccacgagggatatat

SEQ ID NO: 633525 - DNA, 19 bp, Mus musculus
  siRNA target sequence for Cd3d (NM_013487.1,199-217).
ccacgagggatatatctgt

SEQ ID NO: 633526 - DNA, 19 bp, Mus musculus
  siRNA target sequence for Cd3d (NM_013487.1,251-269).
cttctgtgcaagtccatta

SEQ ID NO: 633527 - DNA, 19 bp, Mus musculus
  siRNA target sequence for Cd3d (NM_013487.1,314-332).
ctggtgtcatcttcattga

SEQ ID NO: 633528 - DNA, 19 bp, Mus musculus
  siRNA target sequence for Cd3d (NM_013487.1,454-472).
cttcgagatcgtgaagata

SEQ ID NO: 633529 - DNA, 19 bp, Mus musculus
  siRNA target sequence for Cd3e (NM_007648.1,142-160).
ggacgatgccgagaacatt

SEQ ID NO: 633530 - DNA, 19 bp, Mus musculus
  siRNA target sequence for Cd3e (NM_007648.1,146-164).
gatgccgagaacattgaat

SEQ ID NO: 633531 - DNA, 19 bp, Mus musculus
  siRNA target sequence for Cd3e (NM_007648.1,150-168).
ccgagaacattgaatacaa

SEQ ID NO: 633532 - DNA, 19 bp, Mus musculus
  siRNA target sequence for Cd3e (NM_007648.1,180-198).
caggaaccagtgtagagtt

SEQ ID NO: 633533 - DNA, 19 bp, Mus musculus
  siRNA target sequence for Cd3e (NM_007648.1,212-230).
gacagtgacgagaacttaa

SEQ ID NO: 633534 - DNA, 19 bp, Mus musculus
  siRNA target sequence for Cd3e (NM_007648.1,328-346).
ctacacaccagcctcaaat

SEQ ID NO: 633535 - DNA, 19 bp, Mus musculus
  siRNA target sequence for Cd3e (NM_007648.1,453-471).
gcttgctgatggtcattta

SEQ ID NO: 633536 - DNA, 19 bp, Mus musculus
  siRNA target sequence for Cd3e (NM_007648.1,607-625).
ccagcgggacctgtattct

SEQ ID NO: 633537 - DNA, 19 bp, Mus musculus
  siRNA target sequence for Cd3g (NM_009850.1,198-216).
ctgtagcccagacaaataa

SEQ ID NO: 633538 - DNA, 19 bp, Mus musculus
  siRNA target sequence for Cd3g (NM_009850.1,247-265).
ccgaggagacggttctgta

SEQ ID NO: 633539 - DNA, 19 bp, Mus musculus
  siRNA target sequence for Cd3g (NM_009850.1,252-270).
gagacggttctgtacttct

SEQ ID NO: 633540 - DNA, 19 bp, Mus musculus
  siRNA target sequence for Cd3g (NM_009850.1,305-323).
cttaaagacgggagcataa

SEQ ID NO: 633541 - DNA, 19 bp, Mus musculus
  siRNA target sequence for Cd3g (NM_009850.1,319-337).
cataataagtcctctaaat

SEQ ID NO: 633542 - DNA, 19 bp, Mus musculus
  siRNA target sequence for Cd3g (NM_009850.1,329-347).
cctctaaatgcaactaaaa

SEQ ID NO: 633543 - DNA, 19 bp, Mus musculus
  siRNA target sequence for Cd3g (NM_009850.1,330-348).
ctctaaatgcaactaaaaa

SEQ ID NO: 633544 - DNA, 19 bp, Mus musculus
  siRNA target sequence for Cd3g (NM_009850.1,380-398).
cctcgaggcacgtatcagt

SEQ ID NO: 633545 - DNA, 19 bp, Mus musculus
  siRNA target sequence for Cd3g (NM_009850.1,420-438).
caaaccccctgcaagtgta

SEQ ID NO: 633546 - DNA, 19 bp, Mus musculus
  siRNA target sequence for Cd3g (NM_009850.1,425-443).
cccctgcaagtgtattaca

SEQ ID NO: 633547 - DNA, 19 bp, Mus musculus
  siRNA target sequence for Cd3g (NM_009850.1,431-449).
caagtgtattacagaatgt

SEQ ID NO: 633548 - DNA, 19 bp, Mus musculus
  siRNA target sequence for Cd3g (NM_009850.1,477-495).
gcaccatatccggctttat

SEQ ID NO: 633549 - DNA, 19 bp, Mus musculus
  siRNA target sequence for Cd3g (NM_009850.1,480-498).
ccatatccggctttatctt

SEQ ID NO: 633550 - DNA, 19 bp, Mus musculus
  siRNA target sequence for Cd3z (NM_031162.1,233-251).
gctacttgctagatggaat

SEQ ID NO: 633551 - DNA, 19 bp, Mus musculus
  siRNA target sequence for Cd3z (NM_031162.1,351-369).
ctacaatgagctcaatcta

SEQ ID NO: 633552 - DNA, 19 bp, Mus musculus
  siRNA target sequence for Cd3z (NM_031162.1,454-472).
ccccaggaaggcgtataca

SEQ ID NO: 633553 - DNA, 19 bp, Mus musculus
  siRNA target sequence for Cd3z (NM_031162.1,455-473).
cccaggaaggcgtatacaa

SEQ ID NO: 633554 - DNA, 19 bp, Mus musculus
  siRNA target sequence for Cd3z (NM_031162.1,456-474).
ccaggaaggcgtatacaat

SEQ ID NO: 633555 - DNA, 19 bp, Mus musculus
  siRNA target sequence for Cd3z (NM_031162.1,586-604).
gtgcagttcgggaacagaa

SEQ ID NO: 633556 - DNA, 19 bp, Mus musculus
  siRNA target sequence for Cd79a (NM_007655.1,116-134).
catccctgacggtgaactt

SEQ ID NO: 633557 - DNA, 19 bp, Mus musculus
  siRNA target sequence for Cd79a (NM_007655.1,148-166).
cgcctcacctgtgaaaaca

SEQ ID NO: 633558 - DNA, 19 bp, Mus musculus
  siRNA target sequence for Cd79a (NM_007655.1,169-187).
ggcaggaaccctaatatca

SEQ ID NO: 633559 - DNA, 19 bp, Mus musculus
  siRNA target sequence for Cd79a (NM_007655.1,171-189).
caggaaccctaatatcaca

SEQ ID NO: 633560 - DNA, 19 bp, Mus musculus
  siRNA target sequence for Cd79a (NM_007655.1,194-212).
ggttcagccttcagtctaa

SEQ ID NO: 633561 - DNA, 19 bp, Mus musculus
  siRNA target sequence for Cd79b (NM_008339.1,256-274).
gccggtaccagcaatgaca

SEQ ID NO: 633562 - DNA, 19 bp, Mus musculus
  siRNA target sequence for Cd79b (NM_008339.1,257-275).
ccggtaccagcaatgacaa

SEQ ID NO: 633563 - DNA, 19 bp, Mus musculus
  siRNA target sequence for Cd79b (NM_008339.1,279-297).
gtgacctgccactgaattt

SEQ ID NO: 633564 - DNA, 19 bp, Mus musculus
  siRNA target sequence for Cd79b (NM_008339.1,333-351).
cgaggtttgcagccaaaaa

SEQ ID NO: 633565 - DNA, 19 bp, Mus musculus
  siRNA target sequence for Cd79b (NM_008339.1,486-504).
ctgtctacaccctcactat

SEQ ID NO: 633566 - DNA, 19 bp, Mus musculus
  siRNA target sequence for Cd79b (NM_008339.1,490-508).
ctacaccctcactatccaa

SEQ ID NO: 633567 - DNA, 19 bp, Mus musculus
  siRNA target sequence for Cd79b (NM_008339.1,514-532).
ccagtacgaggataatggt

SEQ ID NO: 633568 - DNA, 19 bp, Mus musculus
  siRNA target sequence for Cd79b (NM_008339.1,515-533).
cagtacgaggataatggta

SEQ ID NO: 633569 - DNA, 19 bp, Mus musculus
  siRNA target sequence for Cd79b (NM_008339.1,524-542).
gataatggtatctacttct

SEQ ID NO: 633570 - DNA, 19 bp, Mus musculus
  siRNA target sequence for Cd79b (NM_008339.1,585-603).
gctgtggcacggaacttct

SEQ ID NO: 633571 - DNA, 19 bp, Mus musculus
  siRNA target sequence for Cd79b (NM_008339.1,586-604).
ctgtggcacggaacttcta

SEQ ID NO: 633572 - DNA, 19 bp, Mus musculus
  siRNA target sequence for Cd79b (NM_008339.1,588-606).
gtggcacggaacttctagt

SEQ ID NO: 633573 - DNA, 19 bp, Mus musculus
  siRNA target sequence for Cd79b (NM_008339.1,591-609).
gcacggaacttctagtctt

SEQ ID NO: 633574 - DNA, 19 bp, Mus musculus
  siRNA target sequence for Cd79b (NM_008339.1,592-610).
cacggaacttctagtctta

SEQ ID NO: 633575 - DNA, 19 bp, Mus musculus
  siRNA target sequence for Cd79b (NM_008339.1,596-614).
gaacttctagtcttaggat

SEQ ID NO: 633576 - DNA, 19 bp, Mus musculus
  siRNA target sequence for Cd79b (NM_008339.1,618-636).
gcacgttggaccaactgaa

SEQ ID NO: 633577 - DNA, 19 bp, Mus musculus
  siRNA target sequence for Cd79b (NM_008339.1,648-666).
cactgaaagatggcattat

SEQ ID NO: 633578 - DNA, 19 bp, Mus musculus
  siRNA target sequence for Cd79b (NM_008339.1,650-668).
ctgaaagatggcattatct

SEQ ID NO: 633579 - DNA, 19 bp, Mus musculus
  siRNA target sequence for Cd79b (NM_008339.1,821-839).
cggacaggggaggtaaagt

SEQ ID NO: 633580 - DNA, 19 bp, Mus musculus
  siRNA target sequence for Col18a1 (NM_009929.2,124-142).
ggcagagccagagaatgtt

SEQ ID NO: 633581 - DNA, 19 bp, Mus musculus
  siRNA target sequence for Col18a1 (NM_009929.2,190-208).
gaagatctcacaaatcgat

SEQ ID NO: 633582 - DNA, 19 bp, Mus musculus
  siRNA target sequence for Col18a1 (NM_009929.2,260-278).
caggtggcccagtatcatt

SEQ ID NO: 633583 - DNA, 19 bp, Mus musculus
  siRNA target sequence for Col18a1 (NM_009929.2,287-305).
ctcttcttccgggactttt

SEQ ID NO: 633584 - DNA, 19 bp, Mus musculus
  siRNA target sequence for Col18a1 (NM_009929.2,416-434).
gatggacagcaaaacatct

SEQ ID NO: 633585 - DNA, 19 bp, Mus musculus
  siRNA target sequence for Col18a1 (NM_009929.2,420-438).
gacagcaaaacatctcatt

SEQ ID NO: 633586 - DNA, 19 bp, Mus musculus
  siRNA target sequence for Col18a1 (NM_009929.2,484-502).
cttccgcctacctgcattt

SEQ ID NO: 633587 - DNA, 19 bp, Mus musculus
  siRNA target sequence for Col18a1 (NM_009929.2,763-781).
ccgggcatctggagatttt

SEQ ID NO: 633588 - DNA, 19 bp, Mus musculus
  siRNA target sequence for Col18a1 (NM_009929.2,766-784).
ggcatctggagattttgga

SEQ ID NO: 633589 - DNA, 19 bp, Mus musculus
  siRNA target sequence for Col18a1 (NM_009929.2,814-832).
caaggaggatacatctcta

SEQ ID NO: 633590 - DNA, 19 bp, Mus musculus
  siRNA target sequence for Col18a1 (NM_009929.2,817-835).
ggaggatacatctctacta

SEQ ID NO: 633591 - DNA, 19 bp, Mus musculus
  siRNA target sequence for Col18a1 (NM_009929.2,1006-1024).
ccccggaaggggcttgata

SEQ ID NO: 633592 - DNA, 19 bp, Mus musculus
  siRNA target sequence for Col18a1 (NM_009929.2,1007-1025).
cccggaaggggcttgataa

SEQ ID NO: 633593 - DNA, 19 bp, Mus musculus
  siRNA target sequence for Col18a1 (NM_009929.2,1008-1026).
ccggaaggggcttgataaa

SEQ ID NO: 633594 - DNA, 19 bp, Mus musculus
  siRNA target sequence for Col18a1 (NM_009929.2,1021-1039).
gataaagggaggtatgaaa

SEQ ID NO: 633595 - DNA, 19 bp, Mus musculus
  siRNA target sequence for Col18a1 (NM_009929.2,1359-1377).
cctccttcagacaagacaa

SEQ ID NO: 633596 - DNA, 19 bp, Mus musculus
  siRNA target sequence for Col18a1 (NM_009929.2,1405-1423).
cggtttcagcggagacata

SEQ ID NO: 633597 - DNA, 19 bp, Mus musculus
  siRNA target sequence for Col18a1 (NM_009929.2,1407-1425).
gtttcagcggagacataga

SEQ ID NO: 633598 - DNA, 19 bp, Mus musculus
  siRNA target sequence for Col18a1 (NM_009929.2,1502-1520).
cgctttgggatcaatggtt

SEQ ID NO: 633599 - DNA, 19 bp, Mus musculus
  siRNA target sequence for Col18a1 (NM_009929.2,1805-1823).
gctgctggattcgatgata

SEQ ID NO: 633600 - DNA, 19 bp, Mus musculus
  siRNA target sequence for Col18a1 (NM_009929.2,1806-1824).
ctgctggattcgatgatat

SEQ ID NO: 633601 - DNA, 19 bp, Mus musculus
  siRNA target sequence for Col18a1 (NM_009929.2,1809-1827).
ctggattcgatgatatgga

SEQ ID NO: 633602 - DNA, 19 bp, Mus musculus
  siRNA target sequence for Col18a1 (NM_009929.2,2130-2148).
caagtgaggataaagcaat

SEQ ID NO: 633603 - DNA, 19 bp, Mus musculus
  siRNA target sequence for Col18a1 (NM_009929.2,2133-2151).
gtgaggataaagcaatagt

SEQ ID NO: 633604 - DNA, 19 bp, Mus musculus
  siRNA target sequence for Col18a1 (NM_009929.2,2275-2293).
gccaggcactatctttagt

SEQ ID NO: 633605 - DNA, 19 bp, Mus musculus
  siRNA target sequence for Col18a1 (NM_009929.2,2535-2553).
ctgggatgcccatctatga

SEQ ID NO: 633606 - DNA, 19 bp, Mus musculus
  siRNA target sequence for Col18a1 (NM_009929.2,2537-2555).
gggatgcccatctatgaca

SEQ ID NO: 633607 - DNA, 19 bp, Mus musculus
  siRNA target sequence for Col18a1 (NM_009929.2,3142-3160).
gagggaagagctctatgta

SEQ ID NO: 633608 - DNA, 19 bp, Mus musculus
  siRNA target sequence for Col18a1 (NM_009929.2,3152-3170).
ctctatgtacgcgttagaa

SEQ ID NO: 633609 - DNA, 19 bp, Mus musculus
  siRNA target sequence for Col18a1 (NM_009929.2,3154-3172).
ctatgtacgcgttagaaat

SEQ ID NO: 633610 - DNA, 19 bp, Mus musculus
  siRNA target sequence for Col18a1 (NM_009929.2,3287-3305).
cggagggagtactcctatt

SEQ ID NO: 633611 - DNA, 19 bp, Mus musculus
  siRNA target sequence for Col18a1 (NM_009929.2,3955-3973).
cgtcctgtgcattgagaat

SEQ ID NO: 633612 - DNA, 19 bp, Mus musculus
  siRNA target sequence for Col18a1 (NM_009929.2,3959-3977).
ctgtgcattgagaatagct

SEQ ID NO: 633613 - DNA, 19 bp, Mus musculus
  siRNA target sequence for Evi2a (NM_010161.1,647-665).
gtcgtcttctggaacaaga

SEQ ID NO: 633614 - DNA, 19 bp, Mus musculus
  siRNA target sequence for Evi2a (NM_010161.1,736-754).
gacatccgagtgacaataa

SEQ ID NO: 633615 - DNA, 19 bp, Mus musculus
  siRNA target sequence for Evi2a (NM_010161.1,741-759).
ccgagtgacaataacacaa

SEQ ID NO: 633616 - DNA, 19 bp, Mus musculus
  siRNA target sequence for Evi2a (NM_010161.1,892-910).
cagcagagatcaaaagtca

SEQ ID NO: 633617 - DNA, 19 bp, Mus musculus
  siRNA target sequence for Evi2a (NM_010161.1,907-925).
gtcagggggaaacgtttaa

SEQ ID NO: 633618 - DNA, 19 bp, Mus musculus
  siRNA target sequence for Evi2a (NM_010161.1,909-927).
cagggggaaacgtttaaaa

SEQ ID NO: 633619 - DNA, 19 bp, Mus musculus
  siRNA target sequence for Evi2a (NM_010161.1,952-970).
gcaacacggccatgctaat

SEQ ID NO: 633620 - DNA, 19 bp, Mus musculus
  siRNA target sequence for Evi2a (NM_010161.1,953-971).
caacacggccatgctaatt

SEQ ID NO: 633621 - DNA, 19 bp, Mus musculus
  siRNA target sequence for Evi2a (NM_010161.1,958-976).
cggccatgctaatttgctt

SEQ ID NO: 633622 - DNA, 19 bp, Mus musculus
  siRNA target sequence for Evi2a (NM_010161.1,959-977).
ggccatgctaatttgctta

SEQ ID NO: 633623 - DNA, 19 bp, Mus musculus
  siRNA target sequence for Evi2a (NM_010161.1,960-978).
gccatgctaatttgcttaa

SEQ ID NO: 633624 - DNA, 19 bp, Mus musculus
  siRNA target sequence for Evi2a (NM_010161.1,965-983).
gctaatttgcttaattgta

SEQ ID NO: 633625 - DNA, 19 bp, Mus musculus
  siRNA target sequence for Evi2a (NM_010161.1,966-984).
ctaatttgcttaattgtaa

SEQ ID NO: 633626 - DNA, 19 bp, Mus musculus
  siRNA target sequence for Evi2a (NM_010161.1,1027-1045).
ctgtggttctggcaaacaa

SEQ ID NO: 633627 - DNA, 19 bp, Mus musculus
  siRNA target sequence for Evi2a (NM_010161.1,1091-1109).
gcggagcaacggtgacttt

SEQ ID NO: 633628 - DNA, 19 bp, Mus musculus
  siRNA target sequence for Evi2a (NM_010161.1,1139-1157).
gtcggacacttggaaaaga

SEQ ID NO: 633629 - DNA, 19 bp, Mus musculus
  siRNA target sequence for Evi2a (NM_010161.1,1171-1189).
caggctccaacctcctatt

SEQ ID NO: 633630 - DNA, 19 bp, Mus musculus
  siRNA target sequence for Evi2a (NM_010161.1,1174-1192).
gctccaacctcctattgca

SEQ ID NO: 633631 - DNA, 19 bp, Mus musculus
  siRNA target sequence for Evi2a (NM_010161.1,1175-1193).
ctccaacctcctattgcaa

SEQ ID NO: 633632 - DNA, 19 bp, Mus musculus
  siRNA target sequence for Gpc1 (NM_016696.1,347-365).
gcgaagtccgccagatcta

SEQ ID NO: 633633 - DNA, 19 bp, Mus musculus
  siRNA target sequence for Gpc1 (NM_016696.1,665-683).
gtgccttccgggacctata

SEQ ID NO: 633634 - DNA, 19 bp, Mus musculus
  siRNA target sequence for Gpc1 (NM_016696.1,669-687).
cttccgggacctatatgct

SEQ ID NO: 633635 - DNA, 19 bp, Mus musculus
  siRNA target sequence for Gpc1 (NM_016696.1,686-704).
ctgagctgcgcctctacta

SEQ ID NO: 633636 - DNA, 19 bp, Mus musculus
  siRNA target sequence for Gpc1 (NM_016696.1,983-1001).
gttctcgggccatcatgaa

SEQ ID NO: 633637 - DNA, 19 bp, Mus musculus
  siRNA target sequence for Gpc1 (NM_016696.1,986-1004).
ctcgggccatcatgaagtt

SEQ ID NO: 633638 - DNA, 19 bp, Mus musculus
  siRNA target sequence for Gpc1 (NM_016696.1,1052-1070).
ccgactattgccgaaatgt

SEQ ID NO: 633639 - DNA, 19 bp, Mus musculus
  siRNA target sequence for Gpc1 (NM_016696.1,1170-1188).
gggtgcggagagtgtcatt

SEQ ID NO: 633640 - DNA, 19 bp, Mus musculus
  siRNA target sequence for Gpc1 (NM_016696.1,1485-1503).
ccgctgctggaatggaatt

SEQ ID NO: 633641 - DNA, 19 bp, Mus musculus
  siRNA target sequence for Gpc1 (NM_016696.1,1486-1504).
cgctgctggaatggaattt

SEQ ID NO: 633642 - DNA, 19 bp, Mus musculus
  siRNA target sequence for Gpc1 (NM_016696.1,1601-1619).
ccatccgccagcagattat

SEQ ID NO: 633643 - DNA, 19 bp, Mus musculus
  siRNA target sequence for Gpc1 (NM_016696.1,1632-1650).
catgaccaaccgtttacgt

SEQ ID NO: 633644 - DNA, 19 bp, Mus musculus
  siRNA target sequence for Gpc1 (NM_016696.1,1677-1695).
cttccaggatgctagtgat

SEQ ID NO: 633645 - DNA, 19 bp, Mus musculus
  siRNA target sequence for Gpc4 (NM_008150.1,536-554).
gcggagctcaagtcgaaaa

SEQ ID NO: 633646 - DNA, 19 bp, Mus musculus
  siRNA target sequence for Gpc4 (NM_008150.1,538-556).
ggagctcaagtcgaaaagt

SEQ ID NO: 633647 - DNA, 19 bp, Mus musculus
  siRNA target sequence for Gpc4 (NM_008150.1,539-557).
gagctcaagtcgaaaagtt

SEQ ID NO: 633648 - DNA, 19 bp, Mus musculus
  siRNA target sequence for Gpc4 (NM_008150.1,581-599).
gtgtccaaaggcttcaaca

SEQ ID NO: 633649 - DNA, 19 bp, Mus musculus
  siRNA target sequence for Gpc4 (NM_008150.1,586-604).
caaaggcttcaacaagaat

SEQ ID NO: 633650 - DNA, 19 bp, Mus musculus
  siRNA target sequence for Gpc4 (NM_008150.1,697-715).
cctgcaaagtaaagatgat

SEQ ID NO: 633651 - DNA, 19 bp, Mus musculus
  siRNA target sequence for Gpc4 (NM_008150.1,732-750).
gcgaacagtgcaaccattt

SEQ ID NO: 633652 - DNA, 19 bp, Mus musculus
  siRNA target sequence for Gpc4 (NM_008150.1,764-782).
gcatcccgttacaagaagt

SEQ ID NO: 633653 - DNA, 19 bp, Mus musculus
  siRNA target sequence for Gpc4 (NM_008150.1,765-783).
catcccgttacaagaagtt

SEQ ID NO: 633654 - DNA, 19 bp, Mus musculus
  siRNA target sequence for Gpc4 (NM_008150.1,768-786).
cccgttacaagaagtttga

SEQ ID NO: 633655 - DNA, 19 bp, Mus musculus
  siRNA target sequence for Gpc4 (NM_008150.1,849-867).
catatggccacttatacat

SEQ ID NO: 633656 - DNA, 19 bp, Mus musculus
  siRNA target sequence for Gpc4 (NM_008150.1,854-872).
ggccacttatacatgcaaa

SEQ ID NO: 633657 - DNA, 19 bp, Mus musculus
  siRNA target sequence for Gpc4 (NM_008150.1,868-886).
gcaaaattcagagctattt

SEQ ID NO: 633658 - DNA, 19 bp, Mus musculus
  siRNA target sequence for Gpc4 (NM_008150.1,869-887).
caaaattcagagctattta

SEQ ID NO: 633659 - DNA, 19 bp, Mus musculus
  siRNA target sequence for Gpc4 (NM_008150.1,876-894).
cagagctatttaaagatct

SEQ ID NO: 633660 - DNA, 19 bp, Mus musculus
  siRNA target sequence for Gpc4 (NM_008150.1,970-988).
ccttctggagcgcatgttt

SEQ ID NO: 633661 - DNA, 19 bp, Mus musculus
  siRNA target sequence for Gpc4 (NM_008150.1,995-1013).
gtgaactcccagtaccatt

SEQ ID NO: 633662 - DNA, 19 bp, Mus musculus
  siRNA target sequence for Gpc4 (NM_008150.1,1035-1053).
gtgtgagcaaatatacaga

SEQ ID NO: 633663 - DNA, 19 bp, Mus musculus
  siRNA target sequence for Gpc4 (NM_008150.1,1073-1091).
gatgtccctcggaaactga

SEQ ID NO: 633664 - DNA, 19 bp, Mus musculus
  siRNA target sequence for Gpc4 (NM_008150.1,1146-1164).
cagttgcaagggatgtagt

SEQ ID NO: 633665 - DNA, 19 bp, Mus musculus
  siRNA target sequence for Gpc4 (NM_008150.1,1152-1170).
caagggatgtagtaagcaa

SEQ ID NO: 633666 - DNA, 19 bp, Mus musculus
  siRNA target sequence for Gpc4 (NM_008150.1,1157-1175).
gatgtagtaagcaaagtgt

SEQ ID NO: 633667 - DNA, 19 bp, Mus musculus
  siRNA target sequence for Gpc4 (NM_008150.1,1209-1227).
cactgctgaagatgatcta

SEQ ID NO: 633668 - DNA, 19 bp, Mus musculus
  siRNA target sequence for Gpc4 (NM_008150.1,1254-1272).
ctgtgaagccctgttacaa

SEQ ID NO: 633669 - DNA, 19 bp, Mus musculus
  siRNA target sequence for Gpc4 (NM_008150.1,1256-1274).
gtgaagccctgttacaact

SEQ ID NO: 633670 - DNA, 19 bp, Mus musculus
  siRNA target sequence for Gpc4 (NM_008150.1,1258-1276).
gaagccctgttacaactat

SEQ ID NO: 633671 - DNA, 19 bp, Mus musculus
  siRNA target sequence for Gpc4 (NM_008150.1,1262-1280).
ccctgttacaactattgct

SEQ ID NO: 633672 - DNA, 19 bp, Mus musculus
  siRNA target sequence for Gpc4 (NM_008150.1,1375-1393).
ggagggtcctttcaacatt

SEQ ID NO: 633673 - DNA, 19 bp, Mus musculus
  siRNA target sequence for Gpc4 (NM_008150.1,1390-1408).
cattgagtccgttatggat

SEQ ID NO: 633674 - DNA, 19 bp, Mus musculus
  siRNA target sequence for Gpc4 (NM_008150.1,1409-1427).
cccatcgatgtgaagattt

SEQ ID NO: 633675 - DNA, 19 bp, Mus musculus
  siRNA target sequence for Gpc4 (NM_008150.1,1411-1429).
catcgatgtgaagatttct

SEQ ID NO: 633676 - DNA, 19 bp, Mus musculus
  siRNA target sequence for Gpc4 (NM_008150.1,1438-1456).
catgaatatgcaggataat

SEQ ID NO: 633677 - DNA, 19 bp, Mus musculus
  siRNA target sequence for Gpc4 (NM_008150.1,1447-1465).
gcaggataatagtgttcaa

SEQ ID NO: 633678 - DNA, 19 bp, Mus musculus
  siRNA target sequence for Gpc4 (NM_008150.1,1468-1486).
gtctcagaaggttttccaa

SEQ ID NO: 633679 - DNA, 19 bp, Mus musculus
  siRNA target sequence for Gpc4 (NM_008150.1,1508-1526).
ctcccagctggacgaattt

SEQ ID NO: 633680 - DNA, 19 bp, Mus musculus
  siRNA target sequence for Gpc4 (NM_008150.1,1510-1528).
cccagctggacgaatttct

SEQ ID NO: 633681 - DNA, 19 bp, Mus musculus
  siRNA target sequence for Gpc4 (NM_008150.1,1557-1575).
ctcgattcagaccttatca

SEQ ID NO: 633682 - DNA, 19 bp, Mus musculus
  siRNA target sequence for Gpc4 (NM_008150.1,1596-1614).
cggcagctggcactagttt

SEQ ID NO: 633683 - DNA, 19 bp, Mus musculus
  siRNA target sequence for Gpc4 (NM_008150.1,1615-1633).
ggaccgactggttactgat

SEQ ID NO: 633684 - DNA, 19 bp, Mus musculus
  siRNA target sequence for Gpc4 (NM_008150.1,1620-1638).
gactggttactgatgtcaa

SEQ ID NO: 633685 - DNA, 19 bp, Mus musculus
  siRNA target sequence for Gpc4 (NM_008150.1,1874-1892).
cgggttatgaccagtaaaa

SEQ ID NO: 633686 - DNA, 19 bp, Mus musculus
  siRNA target sequence for Gpc4 (NM_008150.1,1875-1893).
gggttatgaccagtaaaat

SEQ ID NO: 633687 - DNA, 19 bp, Mus musculus
  siRNA target sequence for Gpc4 (NM_008150.1,1882-1900).
gaccagtaaaatgaagaat

SEQ ID NO: 633688 - DNA, 19 bp, Mus musculus
  siRNA target sequence for Gpc4 (NM_008150.1,1962-1980).
gtggaagcggatgtgaata

SEQ ID NO: 633689 - DNA, 19 bp, Mus musculus
  siRNA target sequence for Gpc4 (NM_008150.1,1992-2010).
cttcggagttcgagtacaa

SEQ ID NO: 633690 - DNA, 19 bp, Mus musculus
  siRNA target sequence for Gpc5 (NM_175500.2,496-514).
gcttgggggagctgtcaaa

SEQ ID NO: 633691 - DNA, 19 bp, Mus musculus
  siRNA target sequence for Gpc5 (NM_175500.2,615-633).
cagctcggcaagatttgca

SEQ ID NO: 633692 - DNA, 19 bp, Mus musculus
  siRNA target sequence for Gpc5 (NM_175500.2,651-669).
ccagctcaacattaaagtt

SEQ ID NO: 633693 - DNA, 19 bp, Mus musculus
  siRNA target sequence for Gpc5 (NM_175500.2,667-685).
gttgctaatatctcgaaat

SEQ ID NO: 633694 - DNA, 19 bp, Mus musculus
  siRNA target sequence for Gpc5 (NM_175500.2,670-688).
gctaatatctcgaaatgca

SEQ ID NO: 633695 - DNA, 19 bp, Mus musculus
  siRNA target sequence for Gpc5 (NM_175500.2,733-751).
gaattacaccagtatcctt

SEQ ID NO: 633696 - DNA, 19 bp, Mus musculus
  siRNA target sequence for Gpc5 (NM_175500.2,791-809).
gcttccattcaggaatttt

SEQ ID NO: 633697 - DNA, 19 bp, Mus musculus
  siRNA target sequence for Gpc5 (NM_175500.2,813-831).
cggatgttggactctattt

SEQ ID NO: 633698 - DNA, 19 bp, Mus musculus
  siRNA target sequence for Gpc5 (NM_175500.2,851-869).
cccgaggaatttgtaaaca

SEQ ID NO: 633699 - DNA, 19 bp, Mus musculus
  siRNA target sequence for Gpc5 (NM_175500.2,853-871).
cgaggaatttgtaaacaga

SEQ ID NO: 633700 - DNA, 19 bp, Mus musculus
  siRNA target sequence for Gpc5 (NM_175500.2,870-888).
gattctttgacagtctttt

SEQ ID NO: 633701 - DNA, 19 bp, Mus musculus
  siRNA target sequence for Gpc5 (NM_175500.2,893-911).
ctggtctacaaccatctta

SEQ ID NO: 633702 - DNA, 19 bp, Mus musculus
  siRNA target sequence for Gpc5 (NM_175500.2,895-913).
ggtctacaaccatcttata

SEQ ID NO: 633703 - DNA, 19 bp, Mus musculus
  siRNA target sequence for Gpc5 (NM_175500.2,896-914).
gtctacaaccatcttataa

SEQ ID NO: 633704 - DNA, 19 bp, Mus musculus
  siRNA target sequence for Gpc5 (NM_175500.2,927-945).
ctgacagttctctgcaata

SEQ ID NO: 633705 - DNA, 19 bp, Mus musculus
  siRNA target sequence for Gpc5 (NM_175500.2,940-958).
gcaatactcagaatgcatt

SEQ ID NO: 633706 - DNA, 19 bp, Mus musculus
  siRNA target sequence for Gpc5 (NM_175500.2,990-1008).
gcaacattcccaaaagagt

SEQ ID NO: 633707 - DNA, 19 bp, Mus musculus
  siRNA target sequence for Gpc5 (NM_175500.2,1034-1052).
ctgcctggccgcacattct

SEQ ID NO: 633708 - DNA, 19 bp, Mus musculus
  siRNA target sequence for Gpc5 (NM_175500.2,1190-1208).
gggtactgcctcaatgtca

SEQ ID NO: 633709 - DNA, 19 bp, Mus musculus
  siRNA target sequence for Gpc5 (NM_175500.2,1191-1209).
ggtactgcctcaatgtcat

SEQ ID NO: 633710 - DNA, 19 bp, Mus musculus
  siRNA target sequence for Gpc5 (NM_175500.2,1224-1242).
cccacatgactgagcttaa

SEQ ID NO: 633711 - DNA, 19 bp, Mus musculus
  siRNA target sequence for Gpc5 (NM_175500.2,1244-1262).
ccacactggcatgcttata

SEQ ID NO: 633712 - DNA, 19 bp, Mus musculus
  siRNA target sequence for Gpc5 (NM_175500.2,1333-1351).
ccacttgcttgttaatgat

SEQ ID NO: 633713 - DNA, 19 bp, Mus musculus
  siRNA target sequence for Gpc5 (NM_175500.2,1390-1408).
ggatcaggtgaatacgatt

SEQ ID NO: 633714 - DNA, 19 bp, Mus musculus
  siRNA target sequence for Gpc5 (NM_175500.2,1391-1409).
gatcaggtgaatacgattt

SEQ ID NO: 633715 - DNA, 19 bp, Mus musculus
  siRNA target sequence for Gpc5 (NM_175500.2,1630-1648).
ctggaatggggaggaaata

SEQ ID NO: 633716 - DNA, 19 bp, Mus musculus
  siRNA target sequence for Gpc5 (NM_175500.2,1642-1660).
ggaaatagtcaaaagctat

SEQ ID NO: 633717 - DNA, 19 bp, Mus musculus
  siRNA target sequence for Gpc5 (NM_175500.2,1672-1690).
ggttgggaatggaatcaaa

SEQ ID NO: 633718 - DNA, 19 bp, Mus musculus
  siRNA target sequence for Gpc5 (NM_175500.2,1725-1743).
gaaccgatcctgtggtaaa

SEQ ID NO: 633719 - DNA, 19 bp, Mus musculus
  siRNA target sequence for Gpc5 (NM_175500.2,1734-1752).
ctgtggtaaatcagatcat

SEQ ID NO: 633720 - DNA, 19 bp, Mus musculus
  siRNA target sequence for Gpc5 (NM_175500.2,1738-1756).
ggtaaatcagatcattgat

SEQ ID NO: 633721 - DNA, 19 bp, Mus musculus
  siRNA target sequence for Gpc5 (NM_175500.2,1841-1859).
ggcatgcttgagaactcta

SEQ ID NO: 633722 - DNA, 19 bp, Mus musculus
  siRNA target sequence for Gpc5 (NM_175500.2,1994-2012).
ggaagtactctggatacaa

SEQ ID NO: 633723 - DNA, 19 bp, Mus musculus
  siRNA target sequence for Gpc5 (NM_175500.2,2028-2046).
cgtcaggaactgagtctat

SEQ ID NO: 633724 - DNA, 19 bp, Mus musculus
  siRNA target sequence for Gpc6 (NM_011821.1,536-554).
catctgccctcaggaatat

SEQ ID NO: 633725 - DNA, 19 bp, Mus musculus
  siRNA target sequence for Gpc6 (NM_011821.1,608-626).
gtttgaaaaccttgtagaa

SEQ ID NO: 633726 - DNA, 19 bp, Mus musculus
  siRNA target sequence for Gpc6 (NM_011821.1,642-660).
gtgaggaccacgtttgtgt

SEQ ID NO: 633727 - DNA, 19 bp, Mus musculus
  siRNA target sequence for Gpc6 (NM_011821.1,657-675).
gtgtcgaggcacaagaaat

SEQ ID NO: 633728 - DNA, 19 bp, Mus musculus
  siRNA target sequence for Gpc6 (NM_011821.1,659-677).
gtcgaggcacaagaaattt

SEQ ID NO: 633729 - DNA, 19 bp, Mus musculus
  siRNA target sequence for Gpc6 (NM_011821.1,664-682).
ggcacaagaaatttgatga

SEQ ID NO: 633730 - DNA, 19 bp, Mus musculus
  siRNA target sequence for Gpc6 (NM_011821.1,707-725).
cgcagaaaagtccctaaat

SEQ ID NO: 633731 - DNA, 19 bp, Mus musculus
  siRNA target sequence for Gpc6 (NM_011821.1,709-727).
cagaaaagtccctaaatga

SEQ ID NO: 633732 - DNA, 19 bp, Mus musculus
  siRNA target sequence for Gpc6 (NM_011821.1,716-734).
gtccctaaatgacatgttt

SEQ ID NO: 633733 - DNA, 19 bp, Mus musculus
  siRNA target sequence for Gpc6 (NM_011821.1,742-760).
cctacgggatgctgtacat

SEQ ID NO: 633734 - DNA, 19 bp, Mus musculus
  siRNA target sequence for Gpc6 (NM_011821.1,752-770).
gctgtacatgcagaattca

SEQ ID NO: 633735 - DNA, 19 bp, Mus musculus
  siRNA target sequence for Gpc6 (NM_011821.1,834-852).
gaagagatgctcaatgact

SEQ ID NO: 633736 - DNA, 19 bp, Mus musculus
  siRNA target sequence for Gpc6 (NM_011821.1,884-902).
gctgattaaccctcagtat

SEQ ID NO: 633737 - DNA, 19 bp, Mus musculus
  siRNA target sequence for Gpc6 (NM_011821.1,924-942).
gagtgtgtaagcaagtaca

SEQ ID NO: 633738 - DNA, 19 bp, Mus musculus
  siRNA target sequence for Gpc6 (NM_011821.1,966-984).
gacgtgccacggaaactga

SEQ ID NO: 633739 - DNA, 19 bp, Mus musculus
  siRNA target sequence for Gpc6 (NM_011821.1,973-991).
cacggaaactgaagattca

SEQ ID NO: 633740 - DNA, 19 bp, Mus musculus
  siRNA target sequence for Gpc6 (NM_011821.1,1093-1111).
gcatccgggctctcatgaa

SEQ ID NO: 633741 - DNA, 19 bp, Mus musculus
  siRNA target sequence for Gpc6 (NM_011821.1,1149-1167).
gtgagaccttgcaacaact

SEQ ID NO: 633742 - DNA, 19 bp, Mus musculus
  siRNA target sequence for Gpc6 (NM_011821.1,1291-1309).
cagtcatggacccaataga

SEQ ID NO: 633743 - DNA, 19 bp, Mus musculus
  siRNA target sequence for Gpc6 (NM_011821.1,1422-1440).
cgctcagctccagaaaatt

SEQ ID NO: 633744 - DNA, 19 bp, Mus musculus
  siRNA target sequence for Gpc6 (NM_011821.1,1508-1526).
ccggctggtcacagacata

SEQ ID NO: 633745 - DNA, 19 bp, Mus musculus
  siRNA target sequence for Gpc6 (NM_011821.1,1509-1527).
cggctggtcacagacataa

SEQ ID NO: 633746 - DNA, 19 bp, Mus musculus
  siRNA target sequence for Gpc6 (NM_011821.1,1674-1692).
gatgggctgaccaaccaaa

SEQ ID NO: 633747 - DNA, 19 bp, Mus musculus
  siRNA target sequence for Gpc6 (NM_011821.1,1765-1783).
gtgtgatgaccaacaaact

SEQ ID NO: 633748 - DNA, 19 bp, Mus musculus
  siRNA target sequence for Gpc6 (NM_011821.1,1818-1836).
caagacacaagcgatgaat

SEQ ID NO: 633749 - DNA, 19 bp, Mus musculus
  siRNA target sequence for Gpc6 (NM_011821.1,1932-1950).
cgcagagaagaggaatctt

SEQ ID NO: 633750 - DNA, 19 bp, Mus musculus
  siRNA target sequence for Il17rd (NM_134437.1,328-346).
ccttggcattgaattccta

SEQ ID NO: 633751 - DNA, 19 bp, Mus musculus
  siRNA target sequence for Il17rd (NM_134437.1,334-352).
cattgaattcctaaaagga

SEQ ID NO: 633752 - DNA, 19 bp, Mus musculus
  siRNA target sequence for Il17rd (NM_134437.1,394-412).
gtgccaacagctgattcta

SEQ ID NO: 633753 - DNA, 19 bp, Mus musculus
  siRNA target sequence for Il17rd (NM_134437.1,396-414).
gccaacagctgattctaaa

SEQ ID NO: 633754 - DNA, 19 bp, Mus musculus
  siRNA target sequence for Il17rd (NM_134437.1,492-510).
cggattactttgtaaagat

SEQ ID NO: 633755 - DNA, 19 bp, Mus musculus
  siRNA target sequence for Il17rd (NM_134437.1,571-589).
ggcctgtgacctgttgtta

SEQ ID NO: 633756 - DNA, 19 bp, Mus musculus
  siRNA target sequence for Il17rd (NM_134437.1,573-591).
cctgtgacctgttgttaca

SEQ ID NO: 633757 - DNA, 19 bp, Mus musculus
  siRNA target sequence for Il17rd (NM_134437.1,574-592).
ctgtgacctgttgttacaa

SEQ ID NO: 633758 - DNA, 19 bp, Mus musculus
  siRNA target sequence for Il17rd (NM_134437.1,708-726).
gcttccatgttctctataa

SEQ ID NO: 633759 - DNA, 19 bp, Mus musculus
  siRNA target sequence for Il17rd (NM_134437.1,763-781).
caggcaggaccagaataca

SEQ ID NO: 633760 - DNA, 19 bp, Mus musculus
  siRNA target sequence for Il17rd (NM_134437.1,809-827).
gtttctccaggggactata

SEQ ID NO: 633761 - DNA, 19 bp, Mus musculus
  siRNA target sequence for Il17rd (NM_134437.1,816-834).
caggggactatatcattga

SEQ ID NO: 633762 - DNA, 19 bp, Mus musculus
  siRNA target sequence for Il17rd (NM_134437.1,861-879).
ggaaagctgctcagtatgt

SEQ ID NO: 633763 - DNA, 19 bp, Mus musculus
  siRNA target sequence for Il17rd (NM_134437.1,937-955).
gcctctggttgtcatatct

SEQ ID NO: 633764 - DNA, 19 bp, Mus musculus
  siRNA target sequence for Il17rd (NM_134437.1,1154-1172).
gcctatttcctgcaagatt

SEQ ID NO: 633765 - DNA, 19 bp, Mus musculus
  siRNA target sequence for Il17rd (NM_134437.1,1193-1211).
ctggacttgtgggaagatt

SEQ ID NO: 633766 - DNA, 19 bp, Mus musculus
  siRNA target sequence for Il17rd (NM_134437.1,1261-1279).
cgagtcccagttcatcatt

SEQ ID NO: 633767 - DNA, 19 bp, Mus musculus
  siRNA target sequence for Il17rd (NM_134437.1,1290-1308).
ccaaaggcatgaagtactt

SEQ ID NO: 633768 - DNA, 19 bp, Mus musculus
  siRNA target sequence for Il17rd (NM_134437.1,1450-1468).
cgccgtctacttcgattat

SEQ ID NO: 633769 - DNA, 19 bp, Mus musculus
  siRNA target sequence for Il17rd (NM_134437.1,1451-1469).
gccgtctacttcgattatt

SEQ ID NO: 633770 - DNA, 19 bp, Mus musculus
  siRNA target sequence for Il17rd (NM_134437.1,1454-1472).
gtctacttcgattattcct

SEQ ID NO: 633771 - DNA, 19 bp, Mus musculus
  siRNA target sequence for Il17rd (NM_134437.1,1660-1678).
catgcaccagtttattgat

SEQ ID NO: 633772 - DNA, 19 bp, Mus musculus
  siRNA target sequence for Il17rd (NM_134437.1,1682-1700).
gagcctgactggtttgaga

SEQ ID NO: 633773 - DNA, 19 bp, Mus musculus
  siRNA target sequence for Il17rd (NM_134437.1,1763-1781).
gactcaggcttggttttaa

SEQ ID NO: 633774 - DNA, 19 bp, Mus musculus
  siRNA target sequence for Il17rd (NM_134437.1,1765-1783).
ctcaggcttggttttaaat

SEQ ID NO: 633775 - DNA, 19 bp, Mus musculus
  siRNA target sequence for Il17rd (NM_134437.1,1854-1872).
ctgggccagccgactctta

SEQ ID NO: 633776 - DNA, 19 bp, Mus musculus
  siRNA target sequence for Il17rd (NM_134437.1,1856-1874).
gggccagccgactcttatt

SEQ ID NO: 633777 - DNA, 19 bp, Mus musculus
  siRNA target sequence for Il17rd (NM_134437.1,1858-1876).
gccagccgactcttattca

SEQ ID NO: 633778 - DNA, 19 bp, Mus musculus
  siRNA target sequence for Il17rd (NM_134437.1,1957-1975).
cctgttacacgcagtgaaa

SEQ ID NO: 633779 - DNA, 19 bp, Mus musculus
  siRNA target sequence for Il17rd (NM_134437.1,2001-2019).
gggactcaggcatatatga

SEQ ID NO: 633780 - DNA, 19 bp, Mus musculus
  siRNA target sequence for Il17rd (NM_134437.1,2003-2021).
gactcaggcatatatgatt

SEQ ID NO: 633781 - DNA, 19 bp, Mus musculus
  siRNA target sequence for Il17rd (NM_134437.1,2005-2023).
ctcaggcatatatgattct

SEQ ID NO: 633782 - DNA, 19 bp, Mus musculus
  siRNA target sequence for Il17rd (NM_134437.1,2064-2082).
gactctctccggatcagat

SEQ ID NO: 633783 - DNA, 19 bp, Mus musculus
  siRNA target sequence for Il17rd (NM_134437.1,2068-2086).
ctctccggatcagatagaa

SEQ ID NO: 633784 - DNA, 19 bp, Mus musculus
  siRNA target sequence for Il17rd (NM_134437.1,2074-2092).
ggatcagatagaaacatct

SEQ ID NO: 633785 - DNA, 19 bp, Mus musculus
  siRNA target sequence for Myd88 (NM_010851.2,143-161).
ccttggtcgcgcttaacgt

SEQ ID NO: 633786 - DNA, 19 bp, Mus musculus
  siRNA target sequence for Myd88 (NM_010851.2,175-193).
cgcctatcgctgttcttga

SEQ ID NO: 633787 - DNA, 19 bp, Mus musculus
  siRNA target sequence for Myd88 (NM_010851.2,286-304).
gaccccactcgcagtttgt

SEQ ID NO: 633788 - DNA, 19 bp, Mus musculus
  siRNA target sequence for Myd88 (NM_010851.2,366-384).
gttagaccgtgaggatata

SEQ ID NO: 633789 - DNA, 19 bp, Mus musculus
  siRNA target sequence for Myd88 (NM_010851.2,370-388).
gaccgtgaggatatactga

SEQ ID NO: 633790 - DNA, 19 bp, Mus musculus
  siRNA target sequence for Myd88 (NM_010851.2,412-430).
gaggactgccagaaatact

SEQ ID NO: 633791 - DNA, 19 bp, Mus musculus
  siRNA target sequence for Myd88 (NM_010851.2,419-437).
gccagaaatacttaggtaa

SEQ ID NO: 633792 - DNA, 19 bp, Mus musculus
  siRNA target sequence for Myd88 (NM_010851.2,544-562).
ggacaaacgccggaacttt

SEQ ID NO: 633793 - DNA, 19 bp, Mus musculus
  siRNA target sequence for Myd88 (NM_010851.2,545-563).
gacaaacgccggaactttt

SEQ ID NO: 633794 - DNA, 19 bp, Mus musculus
  siRNA target sequence for Myd88 (NM_010851.2,578-596).
gctactgccccaacgatat

SEQ ID NO: 633795 - DNA, 19 bp, Mus musculus
  siRNA target sequence for Myd88 (NM_010851.2,587-605).
ccaacgatatcgagtttgt

SEQ ID NO: 633796 - DNA, 19 bp, Mus musculus
  siRNA target sequence for Myd88 (NM_010851.2,612-630).
gatgatccggcaactagaa

SEQ ID NO: 633797 - DNA, 19 bp, Mus musculus
  siRNA target sequence for Myd88 (NM_010851.2,635-653).
cagactatcggcttaagtt

SEQ ID NO: 633798 - DNA, 19 bp, Mus musculus
  siRNA target sequence for Myd88 (NM_010851.2,637-655).
gactatcggcttaagttgt

SEQ ID NO: 633799 - DNA, 19 bp, Mus musculus
  siRNA target sequence for Myd88 (NM_010851.2,703-721).
gccagcgagctaattgaga

SEQ ID NO: 633800 - DNA, 19 bp, Mus musculus
  siRNA target sequence for Myd88 (NM_010851.2,709-727).
gagctaattgagaaaaggt

SEQ ID NO: 633801 - DNA, 19 bp, Mus musculus
  siRNA target sequence for Myd88 (NM_010851.2,822-840).
ccaacagaagcgactgatt

SEQ ID NO: 633802 - DNA, 19 bp, Mus musculus
  siRNA target sequence for Myd88 (NM_010851.2,826-844).
cagaagcgactgattccta

SEQ ID NO: 633803 - DNA, 19 bp, Mus musculus
  siRNA target sequence for Myd88 (NM_010851.2,828-846).
gaagcgactgattcctatt

SEQ ID NO: 633804 - DNA, 19 bp, Mus musculus
  siRNA target sequence for Myd88 (NM_010851.2,831-849).
gcgactgattcctattaaa

SEQ ID NO: 633805 - DNA, 19 bp, Mus musculus
  siRNA target sequence for Myd88 (NM_010851.2,832-850).
cgactgattcctattaaat

SEQ ID NO: 633806 - DNA, 19 bp, Mus musculus
  siRNA target sequence for Myd88 (NM_010851.2,835-853).
ctgattcctattaaataca

SEQ ID NO: 633807 - DNA, 19 bp, Mus musculus
  siRNA target sequence for Myd88 (NM_010851.2,883-901).
ctgcggttcatcactatat

SEQ ID NO: 633808 - DNA, 19 bp, Mus musculus
  siRNA target sequence for Myd88 (NM_010851.2,896-914).
ctatatgcgactataccaa

SEQ ID NO: 633809 - DNA, 19 bp, Mus musculus
  siRNA target sequence for Sfrp1 (NM_013834.1,380-398).
gacatcggctcgtatcaga

SEQ ID NO: 633810 - DNA, 19 bp, Mus musculus
  siRNA target sequence for Sfrp1 (NM_013834.1,461-479).
cacaacgtgggctacaaga

SEQ ID NO: 633811 - DNA, 19 bp, Mus musculus
  siRNA target sequence for Sfrp1 (NM_013834.1,551-569).
ccgctgctcaacaagaact

SEQ ID NO: 633812 - DNA, 19 bp, Mus musculus
  siRNA target sequence for Sfrp1 (NM_013834.1,689-707).
cagttcttcggcttctact

SEQ ID NO: 633813 - DNA, 19 bp, Mus musculus
  siRNA target sequence for Sfrp2 (NM_009144.1,390-408).
gcatcgagtaccagaacat

SEQ ID NO: 633814 - DNA, 19 bp, Mus musculus
  siRNA target sequence for Sfrp2 (NM_009144.1,471-489).
ggattccgctggtcatgaa

SEQ ID NO: 633815 - DNA, 19 bp, Mus musculus
  siRNA target sequence for Sfrp2 (NM_009144.1,543-561).
gtctcgacgacctagatga

SEQ ID NO: 633816 - DNA, 19 bp, Mus musculus
  siRNA target sequence for Sfrp2 (NM_009144.1,746-764).
gtgtgtgaagcctgcaaaa

SEQ ID NO: 633817 - DNA, 19 bp, Mus musculus
  siRNA target sequence for Sfrp2 (NM_009144.1,790-808).
catggaaaccctttgtaaa

SEQ ID NO: 633818 - DNA, 19 bp, Mus musculus
  siRNA target sequence for Sfrp2 (NM_009144.1,814-832).
cttcgcactgaaaatcaaa

SEQ ID NO: 633819 - DNA, 19 bp, Mus musculus
  siRNA target sequence for Sfrp4 (NM_016687.1,438-456).
cctggccatcgaacagtat

SEQ ID NO: 633820 - DNA, 19 bp, Mus musculus
  siRNA target sequence for Sfrp4 (NM_016687.1,598-616).
gagcccctcatgaagatgt

SEQ ID NO: 633821 - DNA, 19 bp, Mus musculus
  siRNA target sequence for Sfrp4 (NM_016687.1,600-618).
gcccctcatgaagatgtat

SEQ ID NO: 633822 - DNA, 19 bp, Mus musculus
  siRNA target sequence for Sfrp4 (NM_016687.1,601-619).
cccctcatgaagatgtata

SEQ ID NO: 633823 - DNA, 19 bp, Mus musculus
  siRNA target sequence for Sfrp4 (NM_016687.1,602-620).
ccctcatgaagatgtataa

SEQ ID NO: 633824 - DNA, 19 bp, Mus musculus
  siRNA target sequence for Sfrp4 (NM_016687.1,667-685).
gaccgtggagtttgtatct

SEQ ID NO: 633825 - DNA, 19 bp, Mus musculus
  siRNA target sequence for Sfrp4 (NM_016687.1,799-817).
gatcggtgcaagtgcaaaa

SEQ ID NO: 633826 - DNA, 19 bp, Mus musculus
  siRNA target sequence for Sfrp4 (NM_016687.1,835-853).
gcaacatacctgagcaaaa

SEQ ID NO: 633827 - DNA, 19 bp, Mus musculus
  siRNA target sequence for Sfrp4 (NM_016687.1,855-873).
ctacagctatgttattcat

SEQ ID NO: 633828 - DNA, 19 bp, Mus musculus
  siRNA target sequence for Sfrp4 (NM_016687.1,891-909).
ccagaggagtggttgcaat

SEQ ID NO: 633829 - DNA, 19 bp, Mus musculus
  siRNA target sequence for Sfrp4 (NM_016687.1,915-933).
cacaactgtggtagatgta

SEQ ID NO: 633830 - DNA, 19 bp, Mus musculus
  siRNA target sequence for Sfrp4 (NM_016687.1,917-935).
caactgtggtagatgtaaa

SEQ ID NO: 633831 - DNA, 19 bp, Mus musculus
  siRNA target sequence for Sfrp4 (NM_016687.1,920-938).
ctgtggtagatgtaaaaga

SEQ ID NO: 633832 - DNA, 19 bp, Mus musculus
  siRNA target sequence for Sfrp4 (NM_016687.1,979-997).
cctctcatcaccaattcct

SEQ ID NO: 633833 - DNA, 19 bp, Mus musculus
  siRNA target sequence for Sfrp4 (NM_016687.1,1001-1019).
gccagtgtccacatatcct

SEQ ID NO: 633834 - DNA, 19 bp, Mus musculus
  siRNA target sequence for Sfrp4 (NM_016687.1,1024-1042).
catcaagatgtcctaatca

SEQ ID NO: 633835 - DNA, 19 bp, Mus musculus
  siRNA target sequence for Sfrp4 (NM_016687.1,1027-1045).
caagatgtcctaatcatgt

SEQ ID NO: 633836 - DNA, 19 bp, Mus musculus
  siRNA target sequence for Sfrp4 (NM_016687.1,1030-1048).
gatgtcctaatcatgtgtt

SEQ ID NO: 633837 - DNA, 19 bp, Mus musculus
  siRNA target sequence for Sfrp4 (NM_016687.1,1036-1054).
ctaatcatgtgttatgagt

SEQ ID NO: 633838 - DNA, 19 bp, Mus musculus
  siRNA target sequence for Sfrp4 (NM_016687.1,1064-1082).
ggatgatgcttcttgaaaa

SEQ ID NO: 633839 - DNA, 19 bp, Mus musculus
  siRNA target sequence for Sfrp4 (NM_016687.1,1065-1083).
gatgatgcttcttgaaaat

SEQ ID NO: 633840 - DNA, 19 bp, Mus musculus
  siRNA target sequence for Sfrp4 (NM_016687.1,1212-1230).
cagtaaccccccaaagtca

SEQ ID NO: 633841 - DNA, 19 bp, Mus musculus
  siRNA target sequence for Sfrp4 (NM_016687.1,1259-1277).
ccagtcctaagaagaacat

SEQ ID NO: 633842 - DNA, 19 bp, Mus musculus
  siRNA target sequence for Sfrp4 (NM_016687.1,1262-1280).
gtcctaagaagaacatcaa

SEQ ID NO: 633843 - DNA, 19 bp, Mus musculus
  siRNA target sequence for Sfrp4 (NM_016687.1,1283-1301).
ctagaagtgcccccaaaaa

SEQ ID NO: 633844 - DNA, 19 bp, Mus musculus
  siRNA target sequence for Sfrp5 (NM_018780.2,756-774).
cggggaccgaaagttgatt

SEQ ID NO: 633845 - DNA, 19 bp, Mus musculus
  siRNA target sequence for Sfrp5 (NM_018780.2,869-887).
gcccttgcccacagttaga

SEQ ID NO: 633846 - DNA, 19 bp, Mus musculus
  siRNA target sequence for Sfrp5 (NM_018780.2,957-975).
ccgctgggacaagaagaat

SEQ ID NO: 633847 - DNA, 19 bp, Mus musculus
  siRNA target sequence for Sfrp5 (NM_018780.2,958-976).
cgctgggacaagaagaata

SEQ ID NO: 633848 - DNA, 19 bp, Mus musculus
  siRNA target sequence for Sfrp5 (NM_018780.2,1022-1040).
ccctctactaccctttttt

SEQ ID NO: 633849 - DNA, 19 bp, Mus musculus
  siRNA target sequence for Sfrp5 (NM_018780.2,1026-1044).
ctactacccttttttctat

SEQ ID NO: 633850 - DNA, 19 bp, Mus musculus
  siRNA target sequence for Smo (NM_176996.3,999-1017).
gcgagggtggcctgacttt

SEQ ID NO: 633851 - DNA, 19 bp, Mus musculus
  siRNA target sequence for Smo (NM_176996.3,1052-1070).
gcccaaacgaggtacaaaa

SEQ ID NO: 633852 - DNA, 19 bp, Mus musculus
  siRNA target sequence for Smo (NM_176996.3,1054-1072).
ccaaacgaggtacaaaaca

SEQ ID NO: 633853 - DNA, 19 bp, Mus musculus
  siRNA target sequence for Smo (NM_176996.3,1301-1319).
gctaccctgcggttattct

SEQ ID NO: 633854 - DNA, 19 bp, Mus musculus
  siRNA target sequence for Smo (NM_176996.3,1310-1328).
cggttattctcttctatgt

SEQ ID NO: 633855 - DNA, 19 bp, Mus musculus
  siRNA target sequence for Smo (NM_176996.3,1451-1469).
ccctgtcctgtgtcatcat

SEQ ID NO: 633856 - DNA, 19 bp, Mus musculus
  siRNA target sequence for Smo (NM_176996.3,1455-1473).
gtcctgtgtcatcatcttt

SEQ ID NO: 633857 - DNA, 19 bp, Mus musculus
  siRNA target sequence for Smo (NM_176996.3,1573-1591).
cctctctcgggcaagacat

SEQ ID NO: 633858 - DNA, 19 bp, Mus musculus
  siRNA target sequence for Smo (NM_176996.3,1578-1596).
ctcgggcaagacatcctat

SEQ ID NO: 633859 - DNA, 19 bp, Mus musculus
  siRNA target sequence for Smo (NM_176996.3,1580-1598).
cgggcaagacatcctattt

SEQ ID NO: 633860 - DNA, 19 bp, Mus musculus
  siRNA target sequence for Smo (NM_176996.3,1583-1601).
gcaagacatcctatttcca

SEQ ID NO: 633861 - DNA, 19 bp, Mus musculus
  siRNA target sequence for Smo (NM_176996.3,1673-1691).
ccgtgagtggcatctgttt

SEQ ID NO: 633862 - DNA, 19 bp, Mus musculus
  siRNA target sequence for Smo (NM_176996.3,1674-1692).
cgtgagtggcatctgtttt

SEQ ID NO: 633863 - DNA, 19 bp, Mus musculus
  siRNA target sequence for Smo (NM_176996.3,2175-2193).
gactgggcacagtgatgat

SEQ ID NO: 633864 - DNA, 19 bp, Mus musculus
  siRNA target sequence for Smo (NM_176996.3,2745-2763).
gcctagtccccatcaagat

SEQ ID NO: 633865 - DNA, 19 bp, Mus musculus
  siRNA target sequence for Smo (NM_176996.3,2833-2851).
cattcccgcactaacctaa

SEQ ID NO: 633866 - DNA, 19 bp, Mus musculus
  siRNA target sequence for Smo (NM_176996.3,2837-2855).
cccgcactaacctaatgga

SEQ ID NO: 633867 - DNA, 19 bp, Mus musculus
  siRNA target sequence for Tirap (NM_054096.1,524-542).
ggaaagccacctctatgat

SEQ ID NO: 633868 - DNA, 19 bp, Mus musculus
  siRNA target sequence for Tirap (NM_054096.1,703-721).
gccgctggagcaaagacta

SEQ ID NO: 633869 - DNA, 19 bp, Mus musculus
  siRNA target sequence for Tirap (NM_054096.1,1030-1048).
cggaactccgattcatgta

SEQ ID NO: 633870 - DNA, 19 bp, Mus musculus
  siRNA target sequence for Tirap (NM_054096.1,1032-1050).
gaactccgattcatgtact

SEQ ID NO: 633871 - DNA, 19 bp, Mus musculus
  siRNA target sequence for Tirap (NM_054096.1,1075-1093).
gaggcttttaccaagtcaa

SEQ ID NO: 633872 - DNA, 19 bp, Mus musculus
  siRNA target sequence for Tirap (NM_054096.1,1094-1112).
ggaggctgttatacactat

SEQ ID NO: 633873 - DNA, 19 bp, Mus musculus
  siRNA target sequence for Tlr9 (NM_031178.1,227-245).
ggcctggtggactgcaatt

SEQ ID NO: 633874 - DNA, 19 bp, Mus musculus
  siRNA target sequence for Tlr9 (NM_031178.1,259-277).
gtctgtaccccgtttctct

SEQ ID NO: 633875 - DNA, 19 bp, Mus musculus
  siRNA target sequence for Tlr9 (NM_031178.1,531-549).
ccagctccctggtgaatct

SEQ ID NO: 633876 - DNA, 19 bp, Mus musculus
  siRNA target sequence for Tlr9 (NM_031178.1,565-583).
caacatcctggttctagat

SEQ ID NO: 633877 - DNA, 19 bp, Mus musculus
  siRNA target sequence for Tlr9 (NM_031178.1,632-650).
gggaactgctactacaaga

SEQ ID NO: 633878 - DNA, 19 bp, Mus musculus
  siRNA target sequence for Tlr9 (NM_031178.1,633-651).
ggaactgctactacaagaa

SEQ ID NO: 633879 - DNA, 19 bp, Mus musculus
  siRNA target sequence for Tlr9 (NM_031178.1,888-906).
cccccaatccctgtataga

SEQ ID NO: 633880 - DNA, 19 bp, Mus musculus
  siRNA target sequence for Tlr9 (NM_031178.1,889-907).
ccccaatccctgtatagaa

SEQ ID NO: 633881 - DNA, 19 bp, Mus musculus
  siRNA target sequence for Tlr9 (NM_031178.1,890-908).
cccaatccctgtatagaat

SEQ ID NO: 633882 - DNA, 19 bp, Mus musculus
  siRNA target sequence for Tlr9 (NM_031178.1,892-910).
caatccctgtatagaatgt

SEQ ID NO: 633883 - DNA, 19 bp, Mus musculus
  siRNA target sequence for Tlr9 (NM_031178.1,1045-1063).
ggacctaagcgagaacttt

SEQ ID NO: 633884 - DNA, 19 bp, Mus musculus
  siRNA target sequence for Tlr9 (NM_031178.1,1053-1071).
gcgagaactttctctatga

SEQ ID NO: 633885 - DNA, 19 bp, Mus musculus
  siRNA target sequence for Tlr9 (NM_031178.1,1054-1072).
cgagaactttctctatgaa

SEQ ID NO: 633886 - DNA, 19 bp, Mus musculus
  siRNA target sequence for Tlr9 (NM_031178.1,1290-1308).
ctctgcatcttcaaatgaa

SEQ ID NO: 633887 - DNA, 19 bp, Mus musculus
  siRNA target sequence for Tlr9 (NM_031178.1,1485-1503).
gcacccctgcttctaagaa

SEQ ID NO: 633888 - DNA, 19 bp, Mus musculus
  siRNA target sequence for Tlr9 (NM_031178.1,1490-1508).
cctgcttctaagaacttca

SEQ ID NO: 633889 - DNA, 19 bp, Mus musculus
  siRNA target sequence for Tlr9 (NM_031178.1,1551-1569).
ggaacaacctggtgactat

SEQ ID NO: 633890 - DNA, 19 bp, Mus musculus
  siRNA target sequence for Tlr9 (NM_031178.1,1657-1675).
gttcctgccgctgactaat

SEQ ID NO: 633891 - DNA, 19 bp, Mus musculus
  siRNA target sequence for Tlr9 (NM_031178.1,1709-1727).
gacttgtaccactggaaat

SEQ ID NO: 633892 - DNA, 19 bp, Mus musculus
  siRNA target sequence for Tlr9 (NM_031178.1,1803-1821).
gccacaatttcagttttgt

SEQ ID NO: 633893 - DNA, 19 bp, Mus musculus
  siRNA target sequence for Tlr9 (NM_031178.1,1900-1918).
caactcagtgaggtttctt

SEQ ID NO: 633894 - DNA, 19 bp, Mus musculus
  siRNA target sequence for Tlr9 (NM_031178.1,2087-2105).
ctccgagacaactacctat

SEQ ID NO: 633895 - DNA, 19 bp, Mus musculus
  siRNA target sequence for Tlr9 (NM_031178.1,2090-2108).
cgagacaactacctatctt

SEQ ID NO: 633896 - DNA, 19 bp, Mus musculus
  siRNA target sequence for Tlr9 (NM_031178.1,2208-2226).
gcaccctcctccagaaact

SEQ ID NO: 633897 - DNA, 19 bp, Mus musculus
  siRNA target sequence for Tlr9 (NM_031178.1,2340-2358).
ggtttgggcccattgtgat

SEQ ID NO: 633898 - DNA, 19 bp, Mus musculus
  siRNA target sequence for Tlr9 (NM_031178.1,2356-2374).
gatgaacctgacagttcta

SEQ ID NO: 633899 - DNA, 19 bp, Mus musculus
  siRNA target sequence for Tlr9 (NM_031178.1,2409-2427).
gggcagccttcgtagactt

SEQ ID NO: 633900 - DNA, 19 bp, Mus musculus
  siRNA target sequence for Tlr9 (NM_031178.1,2410-2428).
ggcagccttcgtagactta

SEQ ID NO: 633901 - DNA, 19 bp, Mus musculus
  siRNA target sequence for Tlr9 (NM_031178.1,2412-2430).
cagccttcgtagacttact

SEQ ID NO: 633902 - DNA, 19 bp, Mus musculus
  siRNA target sequence for Tlr9 (NM_031178.1,2414-2432).
gccttcgtagacttactgt

SEQ ID NO: 633903 - DNA, 19 bp, Mus musculus
  siRNA target sequence for Tlr9 (NM_031178.1,2415-2433).
ccttcgtagacttactgtt

SEQ ID NO: 633904 - DNA, 19 bp, Mus musculus
  siRNA target sequence for Tlr9 (NM_031178.1,2631-2649).
gggacgtctggtactgttt

SEQ ID NO: 633905 - DNA, 19 bp, Mus musculus
  siRNA target sequence for Tlr9 (NM_031178.1,2691-2709).
gacgcagcgcccaaactct

SEQ ID NO: 633906 - DNA, 19 bp, Mus musculus
  siRNA target sequence for Tlr9 (NM_031178.1,2700-2718).
cccaaactctcccttatga

SEQ ID NO: 633907 - DNA, 19 bp, Mus musculus
  siRNA target sequence for Tlr9 (NM_031178.1,2701-2719).
ccaaactctcccttatgat

SEQ ID NO: 633908 - DNA, 19 bp, Mus musculus
  siRNA target sequence for Tlr9 (NM_031178.1,2720-2738).
gccttcgtggtgttcgata

SEQ ID NO: 633909 - DNA, 19 bp, Mus musculus
  siRNA target sequence for Tlr9 (NM_031178.1,2721-2739).
ccttcgtggtgttcgataa

SEQ ID NO: 633910 - DNA, 19 bp, Mus musculus
  siRNA target sequence for Tlr9 (NM_031178.1,2753-2771).
gttgccgactgggtgtata

SEQ ID NO: 633911 - DNA, 19 bp, Mus musculus
  siRNA target sequence for Tlr9 (NM_031178.1,2891-2909).
gggagccgcaagactctat

SEQ ID NO: 633912 - DNA, 19 bp, Mus musculus
  siRNA target sequence for Tlr9 (NM_031178.1,2892-2910).
ggagccgcaagactctatt

SEQ ID NO: 633913 - DNA, 19 bp, Mus musculus
  siRNA target sequence for Tlr9 (NM_031178.1,2893-2911).
gagccgcaagactctattt

SEQ ID NO: 633914 - DNA, 19 bp, Mus musculus
  siRNA target sequence for Tlr9 (NM_031178.1,2895-2913).
gccgcaagactctatttgt

SEQ ID NO: 633915 - DNA, 19 bp, Mus musculus
  siRNA target sequence for Tlr9 (NM_031178.1,3150-3168).
gggacaaccgccacttcta

SEQ ID NO: 633916 - DNA, 19 bp, Mus musculus
  siRNA target sequence for Tlr9 (NM_031178.1,3151-3169).
ggacaaccgccacttctat

SEQ ID NO: 633917 - DNA, 19 bp, Mus musculus
  siRNA target sequence for Tlr9 (NM_031178.1,3152-3170).
gacaaccgccacttctata

SEQ ID NO: 633918 - DNA, 19 bp, Mus musculus
  siRNA target sequence for Tnfrsf14 (NM_178931.2,108-126).
gtgtcttccttttgaactt

SEQ ID NO: 633919 - DNA, 19 bp, Mus musculus
  siRNA target sequence for Tnfrsf14 (NM_178931.2,276-294).
catataccgcccatgcaaa

SEQ ID NO: 633920 - DNA, 19 bp, Mus musculus
  siRNA target sequence for Tnfrsf14 (NM_178931.2,497-515).
cacgaccaggacactgtat

SEQ ID NO: 633921 - DNA, 19 bp, Mus musculus
  siRNA target sequence for Tnfrsf14 (NM_178931.2,590-608).
gcatttcaacaggaagtaa

SEQ ID NO: 633922 - DNA, 19 bp, Mus musculus
  siRNA target sequence for Tnfrsf5 (NM_011611.1,36-54).
ctatggggctgcttgttga

SEQ ID NO: 633923 - DNA, 19 bp, Mus musculus
  siRNA target sequence for Tnfrsf5 (NM_011611.1,63-81).
catctagggcagtgtgtta

SEQ ID NO: 633924 - DNA, 19 bp, Mus musculus
  siRNA target sequence for Tnfrsf5 (NM_011611.1,82-100).
cgtgcagtgacaaacagta

SEQ ID NO: 633925 - DNA, 19 bp, Mus musculus
  siRNA target sequence for Tnfrsf5 (NM_011611.1,108-126).
gatggccagtgctgtgatt

SEQ ID NO: 633926 - DNA, 19 bp, Mus musculus
  siRNA target sequence for Tnfrsf5 (NM_011611.1,267-285).
caagggcttcgggttaaga

SEQ ID NO: 633927 - DNA, 19 bp, Mus musculus
  siRNA target sequence for Tnfrsf5 (NM_011611.1,468-486).
cagtcatcacttttcgaaa

SEQ ID NO: 633928 - DNA, 19 bp, Mus musculus
  siRNA target sequence for Tnfrsf5 (NM_011611.1,499-517).
ggacaagctgtgaggataa

SEQ ID NO: 633929 - DNA, 19 bp, Mus musculus
  siRNA target sequence for Tnfrsf5 (NM_011611.1,502-520).
caagctgtgaggataagaa

SEQ ID NO: 633930 - DNA, 19 bp, Mus musculus
  siRNA target sequence for Tnfrsf5 (NM_011611.1,505-523).
gctgtgaggataagaactt

SEQ ID NO: 633931 - DNA, 19 bp, Mus musculus
  siRNA target sequence for Tnfrsf5 (NM_011611.1,541-559).
gaacgagtcagactaatgt

SEQ ID NO: 633932 - DNA, 19 bp, Mus musculus
  siRNA target sequence for Tnfrsf5 (NM_011611.1,628-646).
ccattttcggggtgtttct

SEQ ID NO: 633933 - DNA, 19 bp, Mus musculus
  siRNA target sequence for Tnfrsf5 (NM_011611.1,732-750).
gattatcccggtcataaca

SEQ ID NO: 633934 - DNA, 19 bp, Mus musculus
  siRNA target sequence for Tnfrsf5 (NM_170703.1,494-512).
cctggacaaggtttaaagt

SEQ ID NO: 633935 - DNA, 19 bp, Mus musculus
  siRNA target sequence for Tnfrsf5 (NM_170704.1,645-663).
ctatatcagtggtcaagaa

SEQ ID NO: 633936 - DNA, 19 bp, Mus musculus
  siRNA target sequence for Tnfrsf6 (NM_007987.1,97-115).
gttaagagttcatactcaa

SEQ ID NO: 633937 - DNA, 19 bp, Mus musculus
  siRNA target sequence for Tnfrsf6 (NM_007987.1,126-144).
gcatctccgagagtttaaa

SEQ ID NO: 633938 - DNA, 19 bp, Mus musculus
  siRNA target sequence for Tnfrsf6 (NM_007987.1,178-196).
ctgctcagaaggattatat

SEQ ID NO: 633939 - DNA, 19 bp, Mus musculus
  siRNA target sequence for Tnfrsf6 (NM_007987.1,180-198).
gctcagaaggattatatca

SEQ ID NO: 633940 - DNA, 19 bp, Mus musculus
  siRNA target sequence for Tnfrsf6 (NM_007987.1,313-331).
ggacaagaaccattatgct

SEQ ID NO: 633941 - DNA, 19 bp, Mus musculus
  siRNA target sequence for Tnfrsf6 (NM_007987.1,319-337).
gaaccattatgctgataaa

SEQ ID NO: 633942 - DNA, 19 bp, Mus musculus
  siRNA target sequence for Tnfrsf6 (NM_007987.1,329-347).
gctgataaatgcagaagat

SEQ ID NO: 633943 - DNA, 19 bp, Mus musculus
  siRNA target sequence for Tnfrsf6 (NM_007987.1,357-375).
gcgatgaagagcatggttt

SEQ ID NO: 633944 - DNA, 19 bp, Mus musculus
  siRNA target sequence for Tnfrsf6 (NM_007987.1,358-376).
cgatgaagagcatggttta

SEQ ID NO: 633945 - DNA, 19 bp, Mus musculus
  siRNA target sequence for Tnfrsf6 (NM_007987.1,512-530).
gcaaccagcaatacaaact

SEQ ID NO: 633946 - DNA, 19 bp, Mus musculus
  siRNA target sequence for Tnfrsf6 (NM_007987.1,546-564).
ccagaaatcgcctatggtt

SEQ ID NO: 633947 - DNA, 19 bp, Mus musculus
  siRNA target sequence for Tnfrsf6 (NM_007987.1,593-611).
cttgtatttatatatcgaa

SEQ ID NO: 633948 - DNA, 19 bp, Mus musculus
  siRNA target sequence for Tnfrsf6 (NM_007987.1,646-664).
ggatgaccctgaatctaga

SEQ ID NO: 633949 - DNA, 19 bp, Mus musculus
  siRNA target sequence for Tnfrsf6 (NM_007987.1,666-684).
cctccagtcgtgaaaccat

SEQ ID NO: 633950 - DNA, 19 bp, Mus musculus
  siRNA target sequence for Tnfrsf6 (NM_007987.1,667-685).
ctccagtcgtgaaaccata

SEQ ID NO: 633951 - DNA, 19 bp, Mus musculus
  siRNA target sequence for Tnfrsf6 (NM_007987.1,672-690).
gtcgtgaaaccataccaat

SEQ ID NO: 633952 - DNA, 19 bp, Mus musculus
  siRNA target sequence for Tnfrsf6 (NM_007987.1,754-772).
ggaagctaaaaaatttgct

SEQ ID NO: 633953 - DNA, 19 bp, Mus musculus
  siRNA target sequence for Tnfrsf6 (NM_007987.1,771-789).
ctcgagaaaataacatcaa

SEQ ID NO: 633954 - DNA, 19 bp, Mus musculus
  siRNA target sequence for Tnfrsf6 (NM_007987.1,787-805).
caaggagggcaagatagat

SEQ ID NO: 633955 - DNA, 19 bp, Mus musculus
  siRNA target sequence for Tnfrsf6 (NM_007987.1,862-880).
gtgctggtaccaatctcat

SEQ ID NO: 633956 - DNA, 19 bp, Mus musculus
  siRNA target sequence for Tnfrsf6 (NM_007987.1,883-901).
gaagagtgatgcatatcaa

SEQ ID NO: 633957 - DNA, 19 bp, Mus musculus
  siRNA target sequence for Tnfrsf6 (NM_007987.1,886-904).
gagtgatgcatatcaagat

SEQ ID NO: 633958 - DNA, 19 bp, Mus musculus
  siRNA target sequence for Tnfrsf6 (NM_007987.1,888-906).
gtgatgcatatcaagattt

SEQ ID NO: 633959 - DNA, 19 bp, Mus musculus
  siRNA target sequence for Tnfrsf6 (NM_007987.1,890-908).
gatgcatatcaagatttaa

SEQ ID NO: 633960 - DNA, 19 bp, Mus musculus
  siRNA target sequence for Tnfrsf6 (NM_007987.1,928-946).
cgaatgtcgcagaacctta

SEQ ID NO: 633961 - DNA, 19 bp, Mus musculus
  siRNA target sequence for Tnfrsf6 (NM_007987.1,933-951).
gtcgcagaaccttagataa

SEQ ID NO: 633962 - DNA, 19 bp, Mus musculus
  siRNA target sequence for Tnfrsf6 (NM_007987.1,937-955).
cagaaccttagataaattt

SEQ ID NO: 633963 - DNA, 19 bp, Mus musculus
  siRNA target sequence for Tnfrsf6 (NM_007987.1,939-957).
gaaccttagataaatttca

SEQ ID NO: 633964 - DNA, 19 bp, Mus musculus
  siRNA target sequence for Tram (NM_173394.2,478-496).
gggtgttgggaagtctaaa

SEQ ID NO: 633965 - DNA, 19 bp, Mus musculus
  siRNA target sequence for Tram (NM_173394.2,480-498).
gtgttgggaagtctaaact

SEQ ID NO: 633966 - DNA, 19 bp, Mus musculus
  siRNA target sequence for Tram (NM_173394.2,485-503).
gggaagtctaaactagata

SEQ ID NO: 633967 - DNA, 19 bp, Mus musculus
  siRNA target sequence for Tram (NM_173394.2,500-518).
gataagtgccccctttctt

SEQ ID NO: 633968 - DNA, 19 bp, Mus musculus
  siRNA target sequence for Tram (NM_173394.2,534-552).
gtgtggatgccgatcaaga

SEQ ID NO: 633969 - DNA, 19 bp, Mus musculus
  siRNA target sequence for Tram (NM_173394.2,764-782).
ctgcaaaacgactttggta

SEQ ID NO: 633970 - DNA, 19 bp, Mus musculus
  siRNA target sequence for Tram (NM_173394.2,813-831).
cgtgcggaagactgcattt

SEQ ID NO: 633971 - DNA, 19 bp, Mus musculus
  siRNA target sequence for Tram (NM_173394.2,816-834).
gcggaagactgcatttgca

SEQ ID NO: 633972 - DNA, 19 bp, Mus musculus
  siRNA target sequence for Tram (NM_173394.2,864-882).
cctggaccatcttgttact

SEQ ID NO: 633973 - DNA, 19 bp, Mus musculus
  siRNA target sequence for Tram (NM_173394.2,900-918).
gagacacctggtgtaactt

SEQ ID NO: 633974 - DNA, 19 bp, Mus musculus
  siRNA target sequence for Tram (NM_173394.2,925-943).
ctacacttccctgatgaat

SEQ ID NO: 633975 - DNA, 19 bp, Mus musculus
  siRNA target sequence for Tram (NM_173394.2,1023-1041).
ccttggcgctgcaaaccat

SEQ ID NO: 633976 - DNA, 19 bp, Mus musculus
  siRNA target sequence for Tram (NM_173394.2,1027-1045).
ggcgctgcaaaccatcaat

SEQ ID NO: 633977 - DNA, 19 bp, Mus musculus
  siRNA target sequence for Tram (NM_173394.2,1074-1092).
ccacacaagtggagagaat

SEQ ID NO: 633978 - DNA, 19 bp, Mus musculus
  siRNA target sequence for Tram (NM_173394.2,1097-1115).
cgggagtctgtatttgaga

SEQ ID NO: 633979 - DNA, 19 bp, Mus musculus
  siRNA target sequence for Tram (NM_173394.2,1117-1135).
gcaacaaagtatatggaaa

SEQ ID NO: 633980 - DNA, 19 bp, Mus musculus
  siRNA target sequence for Tram (NM_173394.2,1121-1139).
caaagtatatggaaagaga

SEQ ID NO: 633981 - DNA, 19 bp, Mus musculus
  siRNA target sequence for Tram (NM_173394.2,1143-1161).
gaagtgtgtcgcagaaaca

SEQ ID NO: 633982 - DNA, 19 bp, Mus musculus
  siRNA target sequence for Ramp1 (NM_016894.1,253-271).
gctatggggagctcactta

SEQ ID NO: 633983 - DNA, 19 bp, Mus musculus
  siRNA target sequence for Ramp1 (NM_016894.1,318-336).
ccggaagtggacagattct

SEQ ID NO: 633984 - DNA, 19 bp, Mus musculus
  siRNA target sequence for Ramp1 (NM_016894.1,345-363).
gtccaccatcgatacttca

SEQ ID NO: 633985 - DNA, 19 bp, Mus musculus
  siRNA target sequence for Ramp2 (NM_019444.1,311-329).
ggtgcaactggactttgat

SEQ ID NO: 633986 - DNA, 19 bp, Mus musculus
  siRNA target sequence for Ramp2 (NM_019444.1,312-330).
gtgcaactggactttgatt

SEQ ID NO: 633987 - DNA, 19 bp, Mus musculus
  siRNA target sequence for Ramp2 (NM_019444.1,349-367).
ctgcagaactgcttggaat

SEQ ID NO: 633988 - DNA, 19 bp, Mus musculus
  siRNA target sequence for Ramp2 (NM_019444.1,354-372).
gaactgcttggaatacaat

SEQ ID NO: 633989 - DNA, 19 bp, Mus musculus
  siRNA target sequence for Ramp2 (NM_019444.1,403-421).
cccttggcagaaaacatca

SEQ ID NO: 633990 - DNA, 19 bp, Mus musculus
  siRNA target sequence for Ramp2 (NM_019444.1,427-445).
gaggctcacctgatacact

SEQ ID NO: 633991 - DNA, 19 bp, Mus musculus
  siRNA target sequence for Ramp2 (NM_019444.1,429-447).
ggctcacctgatacacttt

SEQ ID NO: 633992 - DNA, 19 bp, Mus musculus
  siRNA target sequence for Ramp2 (NM_019444.1,531-549).
catcccgttccttgttact

SEQ ID NO: 633993 - DNA, 19 bp, Mus musculus
  siRNA target sequence for Ramp2 (NM_019444.1,534-552).
cccgttccttgttactctt

SEQ ID NO: 633994 - DNA, 19 bp, Mus musculus
  siRNA target sequence for Ramp3 (NM_019511.1,217-235).
cggagttcatcgtgtatta

SEQ ID NO: 633995 - DNA, 19 bp, Mus musculus
  siRNA target sequence for Ramp3 (NM_019511.1,218-236).
ggagttcatcgtgtattat

SEQ ID NO: 633996 - DNA, 19 bp, Mus musculus
  siRNA target sequence for Ramp3 (NM_019511.1,221-239).
gttcatcgtgtattatgaa

SEQ ID NO: 633997 - DNA, 19 bp, Mus musculus
  siRNA target sequence for Ramp3 (NM_019511.1,322-340).
gaatccacaggcagttctt

SEQ ID NO: 633998 - DNA, 19 bp, Mus musculus
  siRNA target sequence for 1110019O13Rik (NM_134093.1,181-199).
gcggacgtgaagaacttga

SEQ ID NO: 633999 - DNA, 19 bp, Mus musculus
  siRNA target sequence for 1110019O13Rik (NM_134093.1,182-200).
cggacgtgaagaacttgat

SEQ ID NO: 634000 - DNA, 19 bp, Mus musculus
  siRNA target sequence for 1110019O13Rik (NM_134093.1,183-201).
ggacgtgaagaacttgatt

SEQ ID NO: 634001 - DNA, 19 bp, Mus musculus
  siRNA target sequence for 1110019O13Rik (NM_134093.1,186-204).
cgtgaagaacttgatttct

SEQ ID NO: 634002 - DNA, 19 bp, Mus musculus
  siRNA target sequence for 1110019O13Rik (NM_134093.1,215-233).
ccaagacaagagcgattaa

SEQ ID NO: 634003 - DNA, 19 bp, Mus musculus
  siRNA target sequence for 1110019O13Rik (NM_134093.1,236-254).
gatcgtaccatcgtttctt

SEQ ID NO: 634004 - DNA, 19 bp, Mus musculus
  siRNA target sequence for 1110019O13Rik (NM_134093.1,248-266).
gtttcttggggcgtcattt

SEQ ID NO: 634005 - DNA, 19 bp, Mus musculus
  siRNA target sequence for 1110019O13Rik (NM_134093.1,271-289).
cgcttctatgccttataca

SEQ ID NO: 634006 - DNA, 19 bp, Mus musculus
  siRNA target sequence for 1110019O13Rik (NM_134093.1,357-375).
catgtggaaacaaaaccta

SEQ ID NO: 634007 - DNA, 19 bp, Mus musculus
  siRNA target sequence for 1110019O13Rik (NM_134093.1,416-434).
gacagttccgacgagatat

SEQ ID NO: 634008 - DNA, 19 bp, Mus musculus
  siRNA target sequence for 1110019O13Rik (NM_134093.1,418-436).
cagttccgacgagatatca

SEQ ID NO: 634009 - DNA, 19 bp, Mus musculus
  siRNA target sequence for 1110019O13Rik (NM_134093.1,478-496).
gccaactacctggtctttt

SEQ ID NO: 634010 - DNA, 19 bp, Mus musculus
  siRNA target sequence for 1110019O13Rik (NM_134093.1,520-538).
caactgctagtcaagcatt

SEQ ID NO: 634011 - DNA, 19 bp, Mus musculus
  siRNA target sequence for 1110019O13Rik (NM_134093.1,596-614).
ggtcccactcggaagtcat

SEQ ID NO: 634012 - DNA, 19 bp, Mus musculus
  siRNA target sequence for 1110019O13Rik (NM_134093.1,939-957).
gaaatcggcttgctatctt

SEQ ID NO: 634013 - DNA, 19 bp, Mus musculus
  siRNA target sequence for 1110019O13Rik (NM_134093.1,955-973).
cttcgtggcttgaactcta

SEQ ID NO: 634014 - DNA, 19 bp, Mus musculus
  siRNA target sequence for 2210021A15Rik (NM_020000.1,1518-1536).
gcagcttgaggcatcatta

SEQ ID NO: 634015 - DNA, 19 bp, Mus musculus
  siRNA target sequence for 2210021A15Rik (NM_020000.1,1521-1539).
gcttgaggcatcattagat

SEQ ID NO: 634016 - DNA, 19 bp, Mus musculus
  siRNA target sequence for 2210021A15Rik (NM_020000.1,1557-1575).
ggccgatctgaagaattca

SEQ ID NO: 634017 - DNA, 19 bp, Mus musculus
  siRNA target sequence for 2210021A15Rik (NM_020000.1,1559-1577).
ccgatctgaagaattcact

SEQ ID NO: 634018 - DNA, 19 bp, Mus musculus
  siRNA target sequence for 2210021A15Rik (NM_020000.1,1580-1598).
ggagtttcatttacaagtt

SEQ ID NO: 634019 - DNA, 19 bp, Mus musculus
  siRNA target sequence for 2210021A15Rik (NM_020000.1,1663-1681).
cagttgaacagctttgcat

SEQ ID NO: 634020 - DNA, 19 bp, Mus musculus
  siRNA target sequence for 2210021A15Rik (NM_020000.1,1813-1831).
ggacgagtgcctgttttca

SEQ ID NO: 634021 - DNA, 19 bp, Mus musculus
  siRNA target sequence for 2210021A15Rik (NM_020000.1,1945-1963).
cagatccagagcttgaata

SEQ ID NO: 634022 - DNA, 19 bp, Mus musculus
  siRNA target sequence for 2210021A15Rik (NM_020000.1,2030-2048).
ggccaaacaagcagacttt

SEQ ID NO: 634023 - DNA, 19 bp, Mus musculus
  siRNA target sequence for 2210021A15Rik (NM_020000.1,2092-2110).
gggaaggggctatctaatt

SEQ ID NO: 634024 - DNA, 19 bp, Mus musculus
  siRNA target sequence for 2210021A15Rik (NM_020000.1,2186-2204).
gattaccgcaggttcagat

SEQ ID NO: 634025 - DNA, 19 bp, Mus musculus
  siRNA target sequence for 2310006J04Rik (NM_026278.2,234-252).
gcgagaagttgcccaaaaa

SEQ ID NO: 634026 - DNA, 19 bp, Mus musculus
  siRNA target sequence for 2310006J04Rik (NM_026278.2,275-293).
gctgccaaacaacagaaat

SEQ ID NO: 634027 - DNA, 19 bp, Mus musculus
  siRNA target sequence for 2310006J04Rik (NM_026278.2,279-297).
ccaaacaacagaaattctt

SEQ ID NO: 634028 - DNA, 19 bp, Mus musculus
  siRNA target sequence for 2310006J04Rik (NM_026278.2,307-325).
gaaggaaaagcccgattat

SEQ ID NO: 634029 - DNA, 19 bp, Mus musculus
  siRNA target sequence for 2310006J04Rik (NM_026278.2,392-410).
gctatggcatattttctaa

SEQ ID NO: 634030 - DNA, 19 bp, Mus musculus
  siRNA target sequence for 2310006J04Rik (NM_026278.2,407-425).
ctaagaggccaactctatt

SEQ ID NO: 634031 - DNA, 19 bp, Mus musculus
  siRNA target sequence for 2310006J04Rik (NM_026278.2,478-496).
gaaagaccatcaagcaatt

SEQ ID NO: 634032 - DNA, 19 bp, Mus musculus
  siRNA target sequence for 2310006J04Rik (NM_026278.2,500-518).
cagctaggagtgatgtatt

SEQ ID NO: 634033 - DNA, 19 bp, Mus musculus
  siRNA target sequence for 2310006J04Rik (NM_026278.2,502-520).
gctaggagtgatgtattat

SEQ ID NO: 634034 - DNA, 19 bp, Mus musculus
  siRNA target sequence for 2310006J04Rik (NM_026278.2,545-563).
gctgaaaaaggagtgaatt

SEQ ID NO: 634035 - DNA, 19 bp, Mus musculus
  siRNA target sequence for 2310006J04Rik (NM_026278.2,594-612).
cccagacaatgcacttgaa

SEQ ID NO: 634036 - DNA, 19 bp, Mus musculus
  siRNA target sequence for 2310006J04Rik (NM_026278.2,628-646).
caacctcgggagagcttat

SEQ ID NO: 634037 - DNA, 19 bp, Mus musculus
  siRNA target sequence for 2310006J04Rik (NM_026278.2,631-649).
cctcgggagagcttatttt

SEQ ID NO: 634038 - DNA, 19 bp, Mus musculus
  siRNA target sequence for 2310006J04Rik (NM_026278.2,658-676).
gggggtgaagcgatcagat

SEQ ID NO: 634039 - DNA, 19 bp, Mus musculus
  siRNA target sequence for 2310006J04Rik (NM_026278.2,732-750).
gtgtgaaggcgcaaagtat

SEQ ID NO: 634040 - DNA, 19 bp, Mus musculus
  siRNA target sequence for 2310006J04Rik (NM_026278.2,736-754).
gaaggcgcaaagtattcta

SEQ ID NO: 634041 - DNA, 19 bp, Mus musculus
  siRNA target sequence for 2310006J04Rik (NM_026278.2,741-759).
cgcaaagtattctaggatt

SEQ ID NO: 634042 - DNA, 19 bp, Mus musculus
  siRNA target sequence for 2310006J04Rik (NM_026278.2,849-867).
gtgcacttggtctcatgta

SEQ ID NO: 634043 - DNA, 19 bp, Mus musculus
  siRNA target sequence for 2310006J04Rik (NM_026278.2,851-869).
gcacttggtctcatgtact

SEQ ID NO: 634044 - DNA, 19 bp, Mus musculus
  siRNA target sequence for 2310006J04Rik (NM_026278.2,852-870).
cacttggtctcatgtactt

SEQ ID NO: 634045 - DNA, 19 bp, Mus musculus
  siRNA target sequence for 2310006J04Rik (NM_026278.2,930-948).
ctgagcgagggaatgtcta

SEQ ID NO: 634046 - DNA, 19 bp, Mus musculus
  siRNA target sequence for 2310006J04Rik (NM_026278.2,962-980).
cttgtggaatactactaca

SEQ ID NO: 634047 - DNA, 19 bp, Mus musculus
  siRNA target sequence for 2310006J04Rik (NM_026278.2,968-986).
gaatactactacaagatga

SEQ ID NO: 634048 - DNA, 19 bp, Mus musculus
  siRNA target sequence for 2310006J04Rik (NM_026278.2,973-991).
ctactacaagatgaagttt

SEQ ID NO: 634049 - DNA, 19 bp, Mus musculus
  siRNA target sequence for 2310006J04Rik (NM_026278.2,1020-1038).
ggatagcagactatgatga

SEQ ID NO: 634050 - DNA, 19 bp, Mus musculus
  siRNA target sequence for 2310006J04Rik (NM_026278.2,1042-1060).
ccacgacatccccatgata

SEQ ID NO: 634051 - DNA, 19 bp, Mus musculus
  siRNA target sequence for 2310006J04Rik (NM_026278.2,1142-1160).
ctgggcttaggcatcatga

SEQ ID NO: 634052 - DNA, 19 bp, Mus musculus
  siRNA target sequence for 2310006J04Rik (NM_026278.2,1175-1193).
gccaagcactactactcta

SEQ ID NO: 634053 - DNA, 19 bp, Mus musculus
  siRNA target sequence for 2310006J04Rik (NM_026278.2,1176-1194).
ccaagcactactactctaa

SEQ ID NO: 634054 - DNA, 19 bp, Mus musculus
  siRNA target sequence for 2310006J04Rik (NM_026278.2,1200-1218).
gccgtctgaaccctacatt

SEQ ID NO: 634055 - DNA, 19 bp, Mus musculus
  siRNA target sequence for 2310006J04Rik (NM_026278.2,1210-1228).
ccctacattggcagatgaa

SEQ ID NO: 634056 - DNA, 19 bp, Mus musculus
  siRNA target sequence for 2310006J04Rik (NM_026278.2,1212-1230).
ctacattggcagatgaact

SEQ ID NO: 634057 - DNA, 19 bp, Mus musculus
  siRNA target sequence for 2700064H14Rik (NM_026021.1,241-259).
cgggaagaccaaatacaca

SEQ ID NO: 634058 - DNA, 19 bp, Mus musculus
  siRNA target sequence for 2700064H14Rik (NM_026021.1,307-325).
ggctcgaatggaagtagat

SEQ ID NO: 634059 - DNA, 19 bp, Mus musculus
  siRNA target sequence for 2700064H14Rik (NM_026021.1,338-356).
ggtgctaagatatttgcat

SEQ ID NO: 634060 - DNA, 19 bp, Mus musculus
  siRNA target sequence for 2700064H14Rik (NM_026021.1,384-402).
gctctggcaggcttctaca

SEQ ID NO: 634061 - DNA, 19 bp, Mus musculus
  siRNA target sequence for 2700064H14Rik (NM_026021.1,385-403).
ctctggcaggcttctacat

SEQ ID NO: 634062 - DNA, 19 bp, Mus musculus
  siRNA target sequence for 2700064H14Rik (NM_026021.1,387-405).
ctggcaggcttctacatga

SEQ ID NO: 634063 - DNA, 19 bp, Mus musculus
  siRNA target sequence for 2700064H14Rik (NM_026021.1,444-462).
ggtttcaggtggtacatct

SEQ ID NO: 634064 - DNA, 19 bp, Mus musculus
  siRNA target sequence for 2700064H14Rik (NM_026021.1,594-612).
ccacagaccctatagaaga

SEQ ID NO: 634065 - DNA, 19 bp, Mus musculus
  siRNA target sequence for 2700064H14Rik (NM_026021.1,599-617).
gaccctatagaagaacaat

SEQ ID NO: 634066 - DNA, 19 bp, Mus musculus
  siRNA target sequence for 2700064H14Rik (NM_026021.1,628-646).
gaatgtgacccggtactat

SEQ ID NO: 634067 - DNA, 19 bp, Mus musculus
  siRNA target sequence for 2700064H14Rik (NM_026021.1,690-708).
cctactatgagtgtcatta

SEQ ID NO: 634068 - DNA, 19 bp, Mus musculus
  siRNA target sequence for 2700064H14Rik (NM_026021.1,691-709).
ctactatgagtgtcattat

SEQ ID NO: 634069 - DNA, 19 bp, Mus musculus
  siRNA target sequence for 2700064H14Rik (NM_026021.1,711-729).
ctccttgtacggtgattga

SEQ ID NO: 634070 - DNA, 19 bp, Mus musculus
  siRNA target sequence for 2700064H14Rik (NM_026021.1,717-735).
gtacggtgattgaaaagca

SEQ ID NO: 634071 - DNA, 19 bp, Mus musculus
  siRNA target sequence for 2700064H14Rik (NM_026021.1,737-755).
cttcgagagttcaacatct

SEQ ID NO: 634072 - DNA, 19 bp, Mus musculus
  siRNA target sequence for 3110032G18Rik (NM_028443.1,392-410).
cctacgcctcagagagata

SEQ ID NO: 634073 - DNA, 19 bp, Mus musculus
  siRNA target sequence for 3110032G18Rik (NM_028443.1,407-425).
gatacttccgagacaagat

SEQ ID NO: 634074 - DNA, 19 bp, Mus musculus
  siRNA target sequence for 9130019P20Rik (NM_175375.2,111-129).
gcctgcacctactcaagta

SEQ ID NO: 634075 - DNA, 19 bp, Mus musculus
  siRNA target sequence for 9130019P20Rik (NM_175375.2,170-188).
cgcctcccaaagagaaagt

SEQ ID NO: 634076 - DNA, 19 bp, Mus musculus
  siRNA target sequence for 9130019P20Rik (NM_175375.2,172-190).
cctcccaaagagaaagtgt

SEQ ID NO: 634077 - DNA, 19 bp, Mus musculus
  siRNA target sequence for 9130019P20Rik (NM_175375.2,207-225).
cttgacaaacctatgtaca

SEQ ID NO: 634078 - DNA, 19 bp, Mus musculus
  siRNA target sequence for 9130019P20Rik (NM_175375.2,235-253).
gcagctaccagttgtaata

SEQ ID NO: 634079 - DNA, 19 bp, Mus musculus
  siRNA target sequence for 9130019P20Rik (NM_175375.2,238-256).
gctaccagttgtaatagct

SEQ ID NO: 634080 - DNA, 19 bp, Mus musculus
  siRNA target sequence for 9130019P20Rik (NM_175375.2,311-329).
ctcctccgggtaatacaca

SEQ ID NO: 634081 - DNA, 19 bp, Mus musculus
  siRNA target sequence for 9130019P20Rik (NM_175375.2,342-360).
gccgtccaaggcatctgat

SEQ ID NO: 634082 - DNA, 19 bp, Mus musculus
  siRNA target sequence for 9130019P20Rik (NM_175375.2,343-361).
ccgtccaaggcatctgatt

SEQ ID NO: 634083 - DNA, 19 bp, Mus musculus
  siRNA target sequence for 9130019P20Rik (NM_175375.2,397-415).
gaaactgctccattgactt

SEQ ID NO: 634084 - DNA, 19 bp, Mus musculus
  siRNA target sequence for 9130019P20Rik (NM_175375.2,417-435).
ggcatcacccagattggtt

SEQ ID NO: 634085 - DNA, 19 bp, Mus musculus
  siRNA target sequence for 9130019P20Rik (NM_175375.2,428-446).
gattggttgctgctgataa

SEQ ID NO: 634086 - DNA, 19 bp, Mus musculus
  siRNA target sequence for 9130019P20Rik (NM_175375.2,482-500).
cggcacctcgagtttctca

SEQ ID NO: 634087 - DNA, 19 bp, Mus musculus
  siRNA target sequence for 9130019P20Rik (NM_175375.2,483-501).
ggcacctcgagtttctcat

SEQ ID NO: 634088 - DNA, 19 bp, Mus musculus
  siRNA target sequence for 9130019P20Rik (NM_175375.2,488-506).
ctcgagtttctcatcgaat

SEQ ID NO: 634089 - DNA, 19 bp, Mus musculus
  siRNA target sequence for 9130019P20Rik (NM_175375.2,528-546).
ctcagtggtaccaaatgca

SEQ ID NO: 634090 - DNA, 19 bp, Mus musculus
  siRNA target sequence for 9130019P20Rik (NM_175375.2,555-573).
ccaggatccccagtcaatt

SEQ ID NO: 634091 - DNA, 19 bp, Mus musculus
  siRNA target sequence for 9130019P20Rik (NM_175375.2,556-574).
caggatccccagtcaattt

SEQ ID NO: 634092 - DNA, 19 bp, Mus musculus
  siRNA target sequence for 9130019P20Rik (NM_175375.2,558-576).
ggatccccagtcaattttt

SEQ ID NO: 634093 - DNA, 19 bp, Mus musculus
  siRNA target sequence for 9130019P20Rik (NM_175375.2,562-580).
ccccagtcaatttttgtta

SEQ ID NO: 634094 - DNA, 19 bp, Mus musculus
  siRNA target sequence for 9130019P20Rik (NM_175375.2,567-585).
gtcaatttttgttaccaat

SEQ ID NO: 634095 - DNA, 19 bp, Mus musculus
  siRNA target sequence for 9130019P20Rik (NM_175375.2,635-653).
cctcagctgtgaacattat

SEQ ID NO: 634096 - DNA, 19 bp, Mus musculus
  siRNA target sequence for 9130019P20Rik (NM_175375.2,670-688).
cacataaacccagcaaata

SEQ ID NO: 634097 - DNA, 19 bp, Mus musculus
  siRNA target sequence for 9130019P20Rik (NM_175375.2,735-753).
cagtagtctttttgatagt

SEQ ID NO: 634098 - DNA, 19 bp, Mus musculus
  siRNA target sequence for 9130019P20Rik (NM_175375.2,808-826).
gctgcagatgcctctttca

SEQ ID NO: 634099 - DNA, 19 bp, Mus musculus
  siRNA target sequence for 9130019P20Rik (NM_175375.2,913-931).
ccaccgtcacagagagttt

SEQ ID NO: 634100 - DNA, 19 bp, Mus musculus
  siRNA target sequence for 9130019P20Rik (NM_175375.2,988-1006).
gctgctcctctgacaagtt

SEQ ID NO: 634101 - DNA, 19 bp, Mus musculus
  siRNA target sequence for 9130019P20Rik (NM_175375.2,1052-1070).
ctgtcggcactcctagttt

SEQ ID NO: 634102 - DNA, 19 bp, Mus musculus
  siRNA target sequence for 9130019P20Rik (NM_175375.2,1054-1072).
gtcggcactcctagtttca

SEQ ID NO: 634103 - DNA, 19 bp, Mus musculus
  siRNA target sequence for 9130019P20Rik (NM_175375.2,1195-1213).
ggccaacaaccaaaaggaa

SEQ ID NO: 634104 - DNA, 19 bp, Mus musculus
  siRNA target sequence for 9130019P20Rik (NM_175375.2,1217-1235).
gtgccagtcaggatcgaaa

SEQ ID NO: 634105 - DNA, 19 bp, Mus musculus
  siRNA target sequence for 9130019P20Rik (NM_175375.2,1220-1238).
ccagtcaggatcgaaagat

SEQ ID NO: 634106 - DNA, 19 bp, Mus musculus
  siRNA target sequence for 9130019P20Rik (NM_175375.2,1221-1239).
cagtcaggatcgaaagata

SEQ ID NO: 634107 - DNA, 19 bp, Mus musculus
  siRNA target sequence for 9130019P20Rik (NM_175375.2,1304-1322).
ctgtagggaccagttttgt

SEQ ID NO: 634108 - DNA, 19 bp, Mus musculus
  siRNA target sequence for 9130019P20Rik (NM_175375.2,1338-1356).
cggtgggatctggtcattt

SEQ ID NO: 634109 - DNA, 19 bp, Mus musculus
  siRNA target sequence for 9130019P20Rik (NM_175375.2,1347-1365).
ctggtcatttggtgtcaat

SEQ ID NO: 634110 - DNA, 19 bp, Mus musculus
  siRNA target sequence for 9130019P20Rik (NM_175375.2,1387-1405).
ggttggtcacaatctgtta

SEQ ID NO: 634111 - DNA, 19 bp, Mus musculus
  siRNA target sequence for 9130019P20Rik (NM_175375.2,1417-1435).
ccaatgcatcaacagttat

SEQ ID NO: 634112 - DNA, 19 bp, Mus musculus
  siRNA target sequence for 9130019P20Rik (NM_175375.2,1527-1545).
cctgccgatttccatgtat

SEQ ID NO: 634113 - DNA, 19 bp, Mus musculus
  siRNA target sequence for 9130019P20Rik (NM_175375.2,1628-1646).
ctgcttggaatcctatgat

SEQ ID NO: 634114 - DNA, 19 bp, Mus musculus
  siRNA target sequence for 9130019P20Rik (NM_175375.2,1630-1648).
gcttggaatcctatgataa

SEQ ID NO: 634115 - DNA, 19 bp, Mus musculus
  siRNA target sequence for 9130019P20Rik (NM_175375.2,1631-1649).
cttggaatcctatgataaa

SEQ ID NO: 634116 - DNA, 19 bp, Mus musculus
  siRNA target sequence for 9130019P20Rik (NM_175375.2,1634-1652).
ggaatcctatgataaaagt

SEQ ID NO: 634117 - DNA, 19 bp, Mus musculus
  siRNA target sequence for 9130019P20Rik (NM_175375.2,1635-1653).
gaatcctatgataaaagtt

SEQ ID NO: 634118 - DNA, 19 bp, Mus musculus
  siRNA target sequence for 9130019P20Rik (NM_175375.2,1700-1718).
gcacgtgggcacctcatat

SEQ ID NO: 634119 - DNA, 19 bp, Mus musculus
  siRNA target sequence for 9130019P20Rik (NM_175375.2,1701-1719).
cacgtgggcacctcatatt

SEQ ID NO: 634120 - DNA, 19 bp, Mus musculus
  siRNA target sequence for 9130019P20Rik (NM_175375.2,1721-1739).
gaaacatgcatctcaaata

SEQ ID NO: 634121 - DNA, 19 bp, Mus musculus
  siRNA target sequence for 9430060M22Rik (NM_175540.3,185-203).
gattgtcaagagaatgagt

SEQ ID NO: 634122 - DNA, 19 bp, Mus musculus
  siRNA target sequence for 9430060M22Rik (NM_175540.3,254-272).
caggagctctcgaaggatt

SEQ ID NO: 634123 - DNA, 19 bp, Mus musculus
  siRNA target sequence for 9430060M22Rik (NM_175540.3,262-280).
ctcgaaggattgtggttat

SEQ ID NO: 634124 - DNA, 19 bp, Mus musculus
  siRNA target sequence for 9430060M22Rik (NM_175540.3,265-283).
gaaggattgtggttatgga

SEQ ID NO: 634125 - DNA, 19 bp, Mus musculus
  siRNA target sequence for 9430060M22Rik (NM_175540.3,310-328).
ctgccctccccgaaagtat

SEQ ID NO: 634126 - DNA, 19 bp, Mus musculus
  siRNA target sequence for 9430060M22Rik (NM_175540.3,312-330).
gccctccccgaaagtataa

SEQ ID NO: 634127 - DNA, 19 bp, Mus musculus
  siRNA target sequence for 9430060M22Rik (NM_175540.3,314-332).
cctccccgaaagtataaaa

SEQ ID NO: 634128 - DNA, 19 bp, Mus musculus
  siRNA target sequence for 9430060M22Rik (NM_175540.3,317-335).
ccccgaaagtataaaagca

SEQ ID NO: 634129 - DNA, 19 bp, Mus musculus
  siRNA target sequence for 9430060M22Rik (NM_175540.3,367-385).
cacttgtgctgtcatcaat

SEQ ID NO: 634130 - DNA, 19 bp, Mus musculus
  siRNA target sequence for 9430060M22Rik (NM_175540.3,394-412).
gaaggccaactgcacaaat

SEQ ID NO: 634131 - DNA, 19 bp, Mus musculus
  siRNA target sequence for 9430060M22Rik (NM_175540.3,408-426).
caaatacctctaatgctat

SEQ ID NO: 634132 - DNA, 19 bp, Mus musculus
  siRNA target sequence for 9430060M22Rik (NM_175540.3,612-630).
gaagtctgctagtggtatt

SEQ ID NO: 634133 - DNA, 19 bp, Mus musculus
  siRNA target sequence for 9430060M22Rik (NM_175540.3,690-708).
gtcaatgcagagattcgtt

SEQ ID NO: 634134 - DNA, 19 bp, Mus musculus
  siRNA target sequence for 9430060M22Rik (NM_175540.3,696-714).
gcagagattcgttgcaata

SEQ ID NO: 634135 - DNA, 19 bp, Mus musculus
  siRNA target sequence for 9430060M22Rik (NM_175540.3,697-715).
cagagattcgttgcaatat

SEQ ID NO: 634136 - DNA, 19 bp, Mus musculus
  siRNA target sequence for 9430060M22Rik (NM_175540.3,699-717).
gagattcgttgcaatatga

SEQ ID NO: 634137 - DNA, 19 bp, Mus musculus
  siRNA target sequence for 9430060M22Rik (NM_175540.3,731-749).
gtggaggaggattctcttt

SEQ ID NO: 634138 - DNA, 19 bp, Mus musculus
  siRNA target sequence for 9430060M22Rik (NM_175540.3,769-787).
ggagaccagtcctgaattt

SEQ ID NO: 634139 - DNA, 19 bp, Mus musculus
  siRNA target sequence for 9430060M22Rik (NM_175540.3,772-790).
gaccagtcctgaatttcca

SEQ ID NO: 634140 - DNA, 19 bp, Mus musculus
  siRNA target sequence for 9430060M22Rik (NM_175540.3,809-827).
gagatcaaaccacttaact

SEQ ID NO: 634141 - DNA, 19 bp, Mus musculus
  siRNA target sequence for 9430060M22Rik (NM_175540.3,921-939).
gggtccataccccaattga

SEQ ID NO: 634142 - DNA, 19 bp, Mus musculus
  siRNA target sequence for 9430060M22Rik (NM_175540.3,922-940).
ggtccataccccaattgaa

SEQ ID NO: 634143 - DNA, 19 bp, Mus musculus
  siRNA target sequence for 9430060M22Rik (NM_175540.3,923-941).
gtccataccccaattgaat

SEQ ID NO: 634144 - DNA, 19 bp, Mus musculus
  siRNA target sequence for 9430060M22Rik (NM_175540.3,926-944).
cataccccaattgaatgta

SEQ ID NO: 634145 - DNA, 19 bp, Mus musculus
  siRNA target sequence for 9430060M22Rik (NM_175540.3,950-968).
ctggacctgcaaaagtttt

SEQ ID NO: 634146 - DNA, 19 bp, Mus musculus
  siRNA target sequence for 9430060M22Rik (NM_175540.3,984-1002).
ctactggacctgaaacctt

SEQ ID NO: 634147 - DNA, 19 bp, Mus musculus
  siRNA target sequence for 9430060M22Rik (NM_175540.3,1039-1057).
ggagctctatgtacctttt

SEQ ID NO: 634148 - DNA, 19 bp, Mus musculus
  siRNA target sequence for 9430060M22Rik (NM_175540.3,1042-1060).
gctctatgtaccttttgaa

SEQ ID NO: 634149 - DNA, 19 bp, Mus musculus
  siRNA target sequence for A330009E03Rik (NM_145935.2,333-351).
ggtgcacagatgctacaaa

SEQ ID NO: 634150 - DNA, 19 bp, Mus musculus
  siRNA target sequence for A330009E03Rik (NM_145935.2,519-537).
cttgatttctacatcaata

SEQ ID NO: 634151 - DNA, 19 bp, Mus musculus
  siRNA target sequence for A330009E03Rik (NM_145935.2,644-662).
cctgaataagacgatacaa

SEQ ID NO: 634152 - DNA, 19 bp, Mus musculus
  siRNA target sequence for A330009E03Rik (NM_145935.2,645-663).
ctgaataagacgatacaaa

SEQ ID NO: 634153 - DNA, 19 bp, Mus musculus
  siRNA target sequence for A330009E03Rik (NM_145935.2,666-684).
cttgcaagcatccaatctt

SEQ ID NO: 634154 - DNA, 19 bp, Mus musculus
  siRNA target sequence for A330009E03Rik (NM_145935.2,707-725).
catcctctatgtatcatca

SEQ ID NO: 634155 - DNA, 19 bp, Mus musculus
  siRNA target sequence for A330009E03Rik (NM_145935.2,791-809).
gcccaaggccattgatcaa

SEQ ID NO: 634156 - DNA, 19 bp, Mus musculus
  siRNA target sequence for A330009E03Rik (NM_145935.2,799-817).
ccattgatcaagacaagtt

SEQ ID NO: 634157 - DNA, 19 bp, Mus musculus
  siRNA target sequence for A330009E03Rik (NM_145935.2,800-818).
cattgatcaagacaagttt

SEQ ID NO: 634158 - DNA, 19 bp, Mus musculus
  siRNA target sequence for A330009E03Rik (NM_145935.2,810-828).
gacaagtttaaactttcat

SEQ ID NO: 634159 - DNA, 19 bp, Mus musculus
  siRNA target sequence for A330009E03Rik (NM_145935.2,906-924).
gaacgctgcataaagaact

SEQ ID NO: 634160 - DNA, 19 bp, Mus musculus
  siRNA target sequence for A330009E03Rik (NM_145935.2,964-982).
catcttggactctaatgga

SEQ ID NO: 634161 - DNA, 19 bp, Mus musculus
  siRNA target sequence for A330009E03Rik (NM_145935.2,1076-1094).
gacaaagcgtggttatcct

SEQ ID NO: 634162 - DNA, 19 bp, Mus musculus
  siRNA target sequence for A330009E03Rik (NM_145935.2,1082-1100).
gcgtggttatcctgtttat

SEQ ID NO: 634163 - DNA, 19 bp, Mus musculus
  siRNA target sequence for A330009E03Rik (NM_145935.2,1117-1135).
gtaatatcgctatgcaaaa

SEQ ID NO: 634164 - DNA, 19 bp, Mus musculus
  siRNA target sequence for A330009E03Rik (NM_145935.2,1124-1142).
cgctatgcaaaaaatgagt

SEQ ID NO: 634165 - DNA, 19 bp, Mus musculus
  siRNA target sequence for A330009E03Rik (NM_145935.2,1125-1143).
gctatgcaaaaaatgagtt

SEQ ID NO: 634166 - DNA, 19 bp, Mus musculus
  siRNA target sequence for AA691260 (NM_145554.1,375-393).
gagaacgtgtccatttaca

SEQ ID NO: 634167 - DNA, 19 bp, Mus musculus
  siRNA target sequence for AA691260 (NM_145554.1,649-667).
ccccctcactgaaaacctt

SEQ ID NO: 634168 - DNA, 19 bp, Mus musculus
  siRNA target sequence for AA691260 (NM_145554.1,676-694).
ccgggaacctgctggattt

SEQ ID NO: 634169 - DNA, 19 bp, Mus musculus
  siRNA target sequence for AA691260 (NM_145554.1,812-830).
cctggacgaagcattttca

SEQ ID NO: 634170 - DNA, 19 bp, Mus musculus
  siRNA target sequence for AA691260 (NM_145554.1,813-831).
ctggacgaagcattttcaa

SEQ ID NO: 634171 - DNA, 19 bp, Mus musculus
  siRNA target sequence for AA691260 (NM_145554.1,880-898).
cagcacaggacatccatta

SEQ ID NO: 634172 - DNA, 19 bp, Mus musculus
  siRNA target sequence for AA691260 (NM_145554.1,940-958).
gcagtggcattgatcaaga

SEQ ID NO: 634173 - DNA, 19 bp, Mus musculus
  siRNA target sequence for AI481402 (NM_178902.3,179-197).
gaagacccacacatcgatt

SEQ ID NO: 634174 - DNA, 19 bp, Mus musculus
  siRNA target sequence for AI481402 (NM_178902.3,211-229).
ctcagacatccaaagtagt

SEQ ID NO: 634175 - DNA, 19 bp, Mus musculus
  siRNA target sequence for AI481402 (NM_178902.3,451-469).
gaaaggggaaccaacaaat

SEQ ID NO: 634176 - DNA, 19 bp, Mus musculus
  siRNA target sequence for AI481402 (NM_178902.3,561-579).
caccaaacttcaaaaacat

SEQ ID NO: 634177 - DNA, 19 bp, Mus musculus
  siRNA target sequence for AI481402 (NM_178902.3,717-735).
caccaagatctgactttaa

SEQ ID NO: 634178 - DNA, 19 bp, Mus musculus
  siRNA target sequence for AI481402 (NM_178902.3,769-787).
gacacacaagcaacagttt

SEQ ID NO: 634179 - DNA, 19 bp, Mus musculus
  siRNA target sequence for AI481402 (NM_178902.3,808-826).
ggctgcgcaagttacaact

SEQ ID NO: 634180 - DNA, 19 bp, Mus musculus
  siRNA target sequence for AI481402 (NM_178902.3,812-830).
gcgcaagttacaactcatt

SEQ ID NO: 634181 - DNA, 19 bp, Mus musculus
  siRNA target sequence for AI481402 (NM_178902.3,815-833).
caagttacaactcattcta

SEQ ID NO: 634182 - DNA, 19 bp, Mus musculus
  siRNA target sequence for AI481402 (NM_178902.3,845-863).
ctcggggttccaagaacaa

SEQ ID NO: 634183 - DNA, 19 bp, Mus musculus
  siRNA target sequence for AI481402 (NM_178902.3,965-983).
ggcattctccccgtgaaaa

SEQ ID NO: 634184 - DNA, 19 bp, Mus musculus
  siRNA target sequence for AI481402 (NM_178902.3,966-984).
gcattctccccgtgaaaat

SEQ ID NO: 634185 - DNA, 19 bp, Mus musculus
  siRNA target sequence for AI481402 (NM_178902.3,971-989).
ctccccgtgaaaatgaaaa

SEQ ID NO: 634186 - DNA, 19 bp, Mus musculus
  siRNA target sequence for AI481402 (NM_178902.3,1097-1115).
caagccacgaatgagattt

SEQ ID NO: 634187 - DNA, 19 bp, Mus musculus
  siRNA target sequence for AI481402 (NM_178902.3,1101-1119).
ccacgaatgagatttttga

SEQ ID NO: 634188 - DNA, 19 bp, Mus musculus
  siRNA target sequence for AI481402 (NM_178902.3,1102-1120).
cacgaatgagatttttgaa

SEQ ID NO: 634189 - DNA, 19 bp, Mus musculus
  siRNA target sequence for AI481402 (NM_178902.3,1337-1355).
ggtcatgctgccatcaaca

SEQ ID NO: 634190 - DNA, 19 bp, Mus musculus
  siRNA target sequence for AI481402 (NM_178902.3,1340-1358).
catgctgccatcaacaaat

SEQ ID NO: 634191 - DNA, 19 bp, Mus musculus
  siRNA target sequence for AI481402 (NM_178902.3,1436-1454).
cactcgcacttgctcaaaa

SEQ ID NO: 634192 - DNA, 19 bp, Mus musculus
  siRNA target sequence for AI481402 (NM_178902.3,1438-1456).
ctcgcacttgctcaaaact

SEQ ID NO: 634193 - DNA, 19 bp, Mus musculus
  siRNA target sequence for AI481402 (NM_178902.3,1592-1610).
gagttggcccaatacaaga

SEQ ID NO: 634194 - DNA, 19 bp, Mus musculus
  siRNA target sequence for AI481402 (NM_178902.3,1597-1615).
ggcccaatacaagacaaaa

SEQ ID NO: 634195 - DNA, 19 bp, Mus musculus
  siRNA target sequence for AI481402 (NM_178902.3,1598-1616).
gcccaatacaagacaaaat

SEQ ID NO: 634196 - DNA, 19 bp, Mus musculus
  siRNA target sequence for AI481402 (NM_178902.3,1730-1748).
gcactgaagcaacacaaaa

SEQ ID NO: 634197 - DNA, 19 bp, Mus musculus
  siRNA target sequence for AI481402 (NM_178902.3,1834-1852).
cttacagacagcgtatcaa

SEQ ID NO: 634198 - DNA, 19 bp, Mus musculus
  siRNA target sequence for AI481402 (NM_178902.3,1838-1856).
cagacagcgtatcaagaat

SEQ ID NO: 634199 - DNA, 19 bp, Mus musculus
  siRNA target sequence for AI481402 (NM_178902.3,1840-1858).
gacagcgtatcaagaattt

SEQ ID NO: 634200 - DNA, 19 bp, Mus musculus
  siRNA target sequence for AI481402 (NM_178902.3,1842-1860).
cagcgtatcaagaatttgt

SEQ ID NO: 634201 - DNA, 19 bp, Mus musculus
  siRNA target sequence for AI481402 (NM_178902.3,1910-1928).
cggctgaaggacttataca

SEQ ID NO: 634202 - DNA, 19 bp, Mus musculus
  siRNA target sequence for AI481402 (NM_178902.3,2032-2050).
cactaagcttgagattgaa

SEQ ID NO: 634203 - DNA, 19 bp, Mus musculus
  siRNA target sequence for AI481402 (NM_178902.3,2077-2095).
gctgaagaagacctatgaa

SEQ ID NO: 634204 - DNA, 19 bp, Mus musculus
  siRNA target sequence for AI481402 (NM_178902.3,2171-2189).
gaatcgctggagaaacaaa

SEQ ID NO: 634205 - DNA, 19 bp, Mus musculus
  siRNA target sequence for AI481402 (NM_178902.3,2203-2221).
gagtgaaaacgatgcttta

SEQ ID NO: 634206 - DNA, 19 bp, Mus musculus
  siRNA target sequence for AI481402 (NM_178902.3,2264-2282).
gagaaggcgaattcaaaaa

SEQ ID NO: 634207 - DNA, 19 bp, Mus musculus
  siRNA target sequence for AI481402 (NM_178902.3,2319-2337).
gcctgaaggctgtgttaga

SEQ ID NO: 634208 - DNA, 19 bp, Mus musculus
  siRNA target sequence for AI481402 (NM_178902.3,2328-2346).
ctgtgttagagatcaagaa

SEQ ID NO: 634209 - DNA, 19 bp, Mus musculus
  siRNA target sequence for AI481402 (NM_178902.3,2392-2410).
gctggtggacaataacaca

SEQ ID NO: 634210 - DNA, 19 bp, Mus musculus
  siRNA target sequence for AI481402 (NM_178902.3,2462-2480).
gctcgcatggacaaacaca

SEQ ID NO: 634211 - DNA, 19 bp, Mus musculus
  siRNA target sequence for Antxr1 (NM_054041.1,389-407).
gaggattcgacctctactt

SEQ ID NO: 634212 - DNA, 19 bp, Mus musculus
  siRNA target sequence for Antxr1 (NM_054041.1,392-410).
gattcgacctctacttcat

SEQ ID NO: 634213 - DNA, 19 bp, Mus musculus
  siRNA target sequence for Antxr1 (NM_054041.1,443-461).
ggaatgaaatctactactt

SEQ ID NO: 634214 - DNA, 19 bp, Mus musculus
  siRNA target sequence for Antxr1 (NM_054041.1,469-487).
cagttggctcatagattca

SEQ ID NO: 634215 - DNA, 19 bp, Mus musculus
  siRNA target sequence for Antxr1 (NM_054041.1,524-542).
ctactcgagggacaacttt

SEQ ID NO: 634216 - DNA, 19 bp, Mus musculus
  siRNA target sequence for Antxr1 (NM_054041.1,527-545).
ctcgagggacaactttaat

SEQ ID NO: 634217 - DNA, 19 bp, Mus musculus
  siRNA target sequence for Antxr1 (NM_054041.1,529-547).
cgagggacaactttaatga

SEQ ID NO: 634218 - DNA, 19 bp, Mus musculus
  siRNA target sequence for Antxr1 (NM_054041.1,530-548).
gagggacaactttaatgaa

SEQ ID NO: 634219 - DNA, 19 bp, Mus musculus
  siRNA target sequence for Antxr1 (NM_054041.1,539-557).
ctttaatgaaactaactga

SEQ ID NO: 634220 - DNA, 19 bp, Mus musculus
  siRNA target sequence for Antxr1 (NM_054041.1,647-665).
ccagtgagcagatttacta

SEQ ID NO: 634221 - DNA, 19 bp, Mus musculus
  siRNA target sequence for Antxr1 (NM_054041.1,648-666).
cagtgagcagatttactat

SEQ ID NO: 634222 - DNA, 19 bp, Mus musculus
  siRNA target sequence for Antxr1 (NM_054041.1,650-668).
gtgagcagatttactatga

SEQ ID NO: 634223 - DNA, 19 bp, Mus musculus
  siRNA target sequence for Antxr1 (NM_054041.1,686-704).
ggacggcgagcgtcatcat

SEQ ID NO: 634224 - DNA, 19 bp, Mus musculus
  siRNA target sequence for Antxr1 (NM_054041.1,799-817).
gttggcgtgaaggatttca

SEQ ID NO: 634225 - DNA, 19 bp, Mus musculus
  siRNA target sequence for Antxr1 (NM_054041.1,895-913).
ggcattatccactcaattt

SEQ ID NO: 634226 - DNA, 19 bp, Mus musculus
  siRNA target sequence for Antxr1 (NM_054041.1,965-983).
cgggagagtcctttcaagt

SEQ ID NO: 634227 - DNA, 19 bp, Mus musculus
  siRNA target sequence for Antxr1 (NM_054041.1,1058-1076).
cagtcacgctcaatgagaa

SEQ ID NO: 634228 - DNA, 19 bp, Mus musculus
  siRNA target sequence for Antxr1 (NM_054041.1,1084-1102).
gctgtggaagacacttatt

SEQ ID NO: 634229 - DNA, 19 bp, Mus musculus
  siRNA target sequence for Antxr1 (NM_054041.1,1115-1133).
caccaatcttgaaagaagt

SEQ ID NO: 634230 - DNA, 19 bp, Mus musculus
  siRNA target sequence for Antxr1 (NM_054041.1,1168-1186).
gacggcctgtccttcatct

SEQ ID NO: 634231 - DNA, 19 bp, Mus musculus
  siRNA target sequence for Antxr1 (NM_054041.1,1702-1720).
ggacgctgtatcaacttca

SEQ ID NO: 634232 - DNA, 19 bp, Mus musculus
  siRNA target sequence for Antxr1 (NM_054041.1,1734-1752).
cagtcagccagccaagtat

SEQ ID NO: 634233 - DNA, 19 bp, Mus musculus
  siRNA target sequence for AW319595 (NM_146191.2,124-142).
gatgaaagacccaaccttt

SEQ ID NO: 634234 - DNA, 19 bp, Mus musculus
  siRNA target sequence for AW319595 (NM_146191.2,138-156).
cctttgccaccttcatgta

SEQ ID NO: 634235 - DNA, 19 bp, Mus musculus
  siRNA target sequence for AW319595 (NM_146191.2,460-478).
ggcagtacctgttatcaaa

SEQ ID NO: 634236 - DNA, 19 bp, Mus musculus
  siRNA target sequence for AW319595 (NM_146191.2,467-485).
cctgttatcaaaaagaact

SEQ ID NO: 634237 - DNA, 19 bp, Mus musculus
  siRNA target sequence for AW319595 (NM_146191.2,514-532).
cggactcgtggctgtgttt

SEQ ID NO: 634238 - DNA, 19 bp, Mus musculus
  siRNA target sequence for AW319595 (NM_146191.2,540-558).
cacggggcaccccaaaaga

SEQ ID NO: 634239 - DNA, 19 bp, Mus musculus
  siRNA target sequence for AW319595 (NM_146191.2,699-717).
ctggcctcctcgtcattga

SEQ ID NO: 634240 - DNA, 19 bp, Mus musculus
  siRNA target sequence for AW319595 (NM_146191.2,701-719).
ggcctcctcgtcattgact

SEQ ID NO: 634241 - DNA, 19 bp, Mus musculus
  siRNA target sequence for AW319595 (NM_146191.2,832-850).
cgacaaggccaattgctta

SEQ ID NO: 634242 - DNA, 19 bp, Mus musculus
  siRNA target sequence for AW319595 (NM_146191.2,911-929).
cctctcagggacacgtttt

SEQ ID NO: 634243 - DNA, 19 bp, Mus musculus
  siRNA target sequence for AW319595 (NM_146191.2,1004-1022).
gcggatgtgagcatcatgt

SEQ ID NO: 634244 - DNA, 19 bp, Mus musculus
  siRNA target sequence for AW319595 (NM_146191.2,1332-1350).
gacatggaggagatatcat

SEQ ID NO: 634245 - DNA, 19 bp, Mus musculus
  siRNA target sequence for AW319595 (NM_146191.2,1389-1407).
gcagagtcatcgctgtttt

SEQ ID NO: 634246 - DNA, 19 bp, Mus musculus
  siRNA target sequence for AW319595 (NM_146191.2,1589-1607).
gcttgtactcgcaagagaa

SEQ ID NO: 634247 - DNA, 19 bp, Mus musculus
  siRNA target sequence for B930008I02Rik (NM_175430.2,1009-1027).
gacgtggactccattagga

SEQ ID NO: 634248 - DNA, 19 bp, Mus musculus
  siRNA target sequence for B930008I02Rik (NM_175430.2,1026-1044).
gaaggccctccgaggaata

SEQ ID NO: 634249 - DNA, 19 bp, Mus musculus
  siRNA target sequence for B930008I02Rik (NM_175430.2,1030-1048).
gccctccgaggaatagact

SEQ ID NO: 634250 - DNA, 19 bp, Mus musculus
  siRNA target sequence for B930008I02Rik (NM_175430.2,1031-1049).
ccctccgaggaatagactt

SEQ ID NO: 634251 - DNA, 19 bp, Mus musculus
  siRNA target sequence for B930008I02Rik (NM_175430.2,1036-1054).
cgaggaatagacttggaat

SEQ ID NO: 634252 - DNA, 19 bp, Mus musculus
  siRNA target sequence for B930008I02Rik (NM_175430.2,1039-1057).
ggaatagacttggaatcta

SEQ ID NO: 634253 - DNA, 19 bp, Mus musculus
  siRNA target sequence for B930008I02Rik (NM_175430.2,1063-1081).
gttgcctatccgccaaaaa

SEQ ID NO: 634254 - DNA, 19 bp, Mus musculus
  siRNA target sequence for B930008I02Rik (NM_175430.2,1105-1123).
ccccaagcggaagttgaat

SEQ ID NO: 634255 - DNA, 19 bp, Mus musculus
  siRNA target sequence for B930008I02Rik (NM_175430.2,1257-1275).
cttggagatgggtgaagat

SEQ ID NO: 634256 - DNA, 19 bp, Mus musculus
  siRNA target sequence for B930008I02Rik (NM_175430.2,1419-1437).
cccagcgcatccctatcaa

SEQ ID NO: 634257 - DNA, 19 bp, Mus musculus
  siRNA target sequence for B930008I02Rik (NM_175430.2,1424-1442).
cgcatccctatcaaagaga

SEQ ID NO: 634258 - DNA, 19 bp, Mus musculus
  siRNA target sequence for B930008I02Rik (NM_175430.2,1455-1473).
ggcacgacaccgattcaga

SEQ ID NO: 634259 - DNA, 19 bp, Mus musculus
  siRNA target sequence for B930008I02Rik (NM_175430.2,1703-1721).
cagaccatcctctgatgat

SEQ ID NO: 634260 - DNA, 19 bp, Mus musculus
  siRNA target sequence for B930008I02Rik (NM_175430.2,1958-1976).
gcgcacgctccgtctacaa

SEQ ID NO: 634261 - DNA, 19 bp, Mus musculus
  siRNA target sequence for B930008I02Rik (NM_175430.2,1960-1978).
gcacgctccgtctacaaca

SEQ ID NO: 634262 - DNA, 19 bp, Mus musculus
  siRNA target sequence for B930008I02Rik (NM_175430.2,1991-2009).
ccgccaatgaggaacgaaa

SEQ ID NO: 634263 - DNA, 19 bp, Mus musculus
  siRNA target sequence for B930008I02Rik (NM_175430.2,1994-2012).
ccaatgaggaacgaaagaa

SEQ ID NO: 634264 - DNA, 19 bp, Mus musculus
  siRNA target sequence for B930008I02Rik (NM_175430.2,2090-2108).
gcgatgacatccaagtcat

SEQ ID NO: 634265 - DNA, 19 bp, Mus musculus
  siRNA target sequence for B930008I02Rik (NM_175430.2,2201-2219).
ggtcacaccagctagaaga

SEQ ID NO: 634266 - DNA, 19 bp, Mus musculus
  siRNA target sequence for B930008I02Rik (NM_175430.2,2202-2220).
gtcacaccagctagaagaa

SEQ ID NO: 634267 - DNA, 19 bp, Mus musculus
  siRNA target sequence for B930008I02Rik (NM_175430.2,2230-2248).
ctgtttgaggctcaatact

SEQ ID NO: 634268 - DNA, 19 bp, Mus musculus
  siRNA target sequence for B930008I02Rik (NM_175430.2,2265-2283).
cacccgggtcctcaagaaa

SEQ ID NO: 634269 - DNA, 19 bp, Mus musculus
  siRNA target sequence for B930008I02Rik (NM_175430.2,2315-2333).
ccattgccgtggagaagaa

SEQ ID NO: 634270 - DNA, 19 bp, Mus musculus
  siRNA target sequence for B930008I02Rik (NM_175430.2,2325-2343).
ggagaagaagcgaatccta

SEQ ID NO: 634271 - DNA, 19 bp, Mus musculus
  siRNA target sequence for B930008I02Rik (NM_175430.2,2380-2398).
cgtaacgaggcatacaaga

SEQ ID NO: 634272 - DNA, 19 bp, Mus musculus
  siRNA target sequence for B930008I02Rik (NM_175430.2,2540-2558).
ccacactggtgcagaaaat

SEQ ID NO: 634273 - DNA, 19 bp, Mus musculus
  siRNA target sequence for B930008I02Rik (NM_175430.2,2561-2579).
ccgcccagtgcttaagcaa

SEQ ID NO: 634274 - DNA, 19 bp, Mus musculus
  siRNA target sequence for B930008I02Rik (NM_175430.2,2587-2605).
gctctgcagacggagttta

SEQ ID NO: 634275 - DNA, 19 bp, Mus musculus
  siRNA target sequence for B930008I02Rik (NM_175430.2,2588-2606).
ctctgcagacggagtttaa

SEQ ID NO: 634276 - DNA, 19 bp, Mus musculus
  siRNA target sequence for B930008I02Rik (NM_175430.2,2590-2608).
ctgcagacggagtttaaca

SEQ ID NO: 634277 - DNA, 19 bp, Mus musculus
  siRNA target sequence for B930008I02Rik (NM_175430.2,2912-2930).
gcaaaatagacatgcataa

SEQ ID NO: 634278 - DNA, 19 bp, Mus musculus
  siRNA target sequence for B930008I02Rik (NM_175430.2,3134-3152).
cgaagctgacagaagagta

SEQ ID NO: 634279 - DNA, 19 bp, Mus musculus
  siRNA target sequence for B930008I02Rik (NM_175430.2,3245-3263).
ccgtggaccaactgaagaa

SEQ ID NO: 634280 - DNA, 19 bp, Mus musculus
  siRNA target sequence for B930008I02Rik (NM_175430.2,3443-3461).
caactgagacggagtttct

SEQ ID NO: 634281 - DNA, 19 bp, Mus musculus
  siRNA target sequence for B930008I02Rik (NM_175430.2,3559-3577).
gaggcagagcaccaaatca

SEQ ID NO: 634282 - DNA, 19 bp, Mus musculus
  siRNA target sequence for B930008I02Rik (NM_175430.2,3582-3600).
gtgggagaagaaaatccaa

SEQ ID NO: 634283 - DNA, 19 bp, Mus musculus
  siRNA target sequence for B930008I02Rik (NM_175430.2,3975-3993).
gcaggctaccacagatgtt

SEQ ID NO: 634284 - DNA, 19 bp, Mus musculus
  siRNA target sequence for B930008I02Rik (NM_175430.2,3978-3996).
ggctaccacagatgttctt

SEQ ID NO: 634285 - DNA, 19 bp, Mus musculus
  siRNA target sequence for B930008I02Rik (NM_175430.2,3983-4001).
ccacagatgttcttgaaga

SEQ ID NO: 634286 - DNA, 19 bp, Mus musculus
  siRNA target sequence for B930008I02Rik (NM_175430.2,4086-4104).
cgccattgaggggaaatat

SEQ ID NO: 634287 - DNA, 19 bp, Mus musculus
  siRNA target sequence for B930008I02Rik (NM_175430.2,4088-4106).
ccattgaggggaaatatgt

SEQ ID NO: 634288 - DNA, 19 bp, Mus musculus
  siRNA target sequence for BB219290 (NM_145141.1,229-247).
gggctacacattcagtaaa

SEQ ID NO: 634289 - DNA, 19 bp, Mus musculus
  siRNA target sequence for BB219290 (NM_145141.1,257-275).
ctcagcgtgtcctatgact

SEQ ID NO: 634290 - DNA, 19 bp, Mus musculus
  siRNA target sequence for BB219290 (NM_145141.1,287-305).
caaggtccagctacattga

SEQ ID NO: 634291 - DNA, 19 bp, Mus musculus
  siRNA target sequence for BB219290 (NM_145141.1,290-308).
ggtccagctacattgatat

SEQ ID NO: 634292 - DNA, 19 bp, Mus musculus
  siRNA target sequence for BB219290 (NM_145141.1,291-309).
gtccagctacattgatatt

SEQ ID NO: 634293 - DNA, 19 bp, Mus musculus
  siRNA target sequence for BB219290 (NM_145141.1,294-312).
cagctacattgatatttga

SEQ ID NO: 634294 - DNA, 19 bp, Mus musculus
  siRNA target sequence for BB219290 (NM_145141.1,356-374).
ccactgactcaggttatct

SEQ ID NO: 634295 - DNA, 19 bp, Mus musculus
  siRNA target sequence for BB219290 (NM_145141.1,398-416).
ggtcctcctggacctaaaa

SEQ ID NO: 634296 - DNA, 19 bp, Mus musculus
  siRNA target sequence for BB219290 (NM_145141.1,404-422).
cctggacctaaaagtgaat

SEQ ID NO: 634297 - DNA, 19 bp, Mus musculus
  siRNA target sequence for BB219290 (NM_145141.1,529-547).
cactgtccaagagttgttt

SEQ ID NO: 634298 - DNA, 19 bp, Mus musculus
  siRNA target sequence for BB219290 (NM_145141.1,557-575).
gttctcaaagccttacctt

SEQ ID NO: 634299 - DNA, 19 bp, Mus musculus
  siRNA target sequence for BB219290 (NM_145141.1,769-787).
gactgaggacagacagatt

SEQ ID NO: 634300 - DNA, 19 bp, Mus musculus
  siRNA target sequence for BB219290 (NM_145141.1,816-834).
gggtacaggctcttcagaa

SEQ ID NO: 634301 - DNA, 19 bp, Mus musculus
  siRNA target sequence for BB219290 (NM_145141.1,817-835).
ggtacaggctcttcagaaa

SEQ ID NO: 634302 - DNA, 19 bp, Mus musculus
  siRNA target sequence for BB219290 (NM_145141.1,900-918).
ctgctgagcagccaagatt

SEQ ID NO: 634303 - DNA, 19 bp, Mus musculus
  siRNA target sequence for Bcap37 (NM_007531.1,233-251).
cgtggaaggcggtcataga

SEQ ID NO: 634304 - DNA, 19 bp, Mus musculus
  siRNA target sequence for Bcap37 (NM_007531.1,252-270).
gccatcttttttaatcgta

SEQ ID NO: 634305 - DNA, 19 bp, Mus musculus
  siRNA target sequence for Bcap37 (NM_007531.1,253-271).
ccatcttttttaatcgtat

SEQ ID NO: 634306 - DNA, 19 bp, Mus musculus
  siRNA target sequence for Bcap37 (NM_007531.1,257-275).
cttttttaatcgtattggt

SEQ ID NO: 634307 - DNA, 19 bp, Mus musculus
  siRNA target sequence for Bcap37 (NM_007531.1,472-490).
gtctagggctggactatga

SEQ ID NO: 634308 - DNA, 19 bp, Mus musculus
  siRNA target sequence for Bcap37 (NM_007531.1,498-516).
gtgctgccgtccattgtta

SEQ ID NO: 634309 - DNA, 19 bp, Mus musculus
  siRNA target sequence for Brd8 (NM_030147.1,174-192).
cagttagcagagcaatcaa

SEQ ID NO: 634310 - DNA, 19 bp, Mus musculus
  siRNA target sequence for Brd8 (NM_030147.1,223-241).
ctggttctctcaaaaacat

SEQ ID NO: 634311 - DNA, 19 bp, Mus musculus
  siRNA target sequence for Brd8 (NM_030147.1,324-342).
ctgttgaagatgttattgt

SEQ ID NO: 634312 - DNA, 19 bp, Mus musculus
  siRNA target sequence for Brd8 (NM_030147.1,335-353).
gttattgttcgcaaactga

SEQ ID NO: 634313 - DNA, 19 bp, Mus musculus
  siRNA target sequence for Brd8 (NM_030147.1,403-421).
gagatacaggcgtctgaaa

SEQ ID NO: 634314 - DNA, 19 bp, Mus musculus
  siRNA target sequence for Brd8 (NM_030147.1,409-427).
caggcgtctgaaaagagat

SEQ ID NO: 634315 - DNA, 19 bp, Mus musculus
  siRNA target sequence for Brd8 (NM_030147.1,423-441).
gagatgcagaactaatcca

SEQ ID NO: 634316 - DNA, 19 bp, Mus musculus
  siRNA target sequence for Brd8 (NM_030147.1,557-575).
gcgcgacaagcagtgaaaa

SEQ ID NO: 634317 - DNA, 19 bp, Mus musculus
  siRNA target sequence for Brd8 (NM_030147.1,787-805).
catgaccccaataacagat

SEQ ID NO: 634318 - DNA, 19 bp, Mus musculus
  siRNA target sequence for Brd8 (NM_030147.1,790-808).
gaccccaataacagatgat

SEQ ID NO: 634319 - DNA, 19 bp, Mus musculus
  siRNA target sequence for Brd8 (NM_030147.1,984-1002).
gggttcttcccatgataca

SEQ ID NO: 634320 - DNA, 19 bp, Mus musculus
  siRNA target sequence for Brd8 (NM_030147.1,985-1003).
ggttcttcccatgatacat

SEQ ID NO: 634321 - DNA, 19 bp, Mus musculus
  siRNA target sequence for Brd8 (NM_030147.1,1068-1086).
ctctttcccggcttttaga

SEQ ID NO: 634322 - DNA, 19 bp, Mus musculus
  siRNA target sequence for Brd8 (NM_030147.1,1137-1155).
ccagtgagccgccagttaa

SEQ ID NO: 634323 - DNA, 19 bp, Mus musculus
  siRNA target sequence for Brd8 (NM_030147.1,1140-1158).
gtgagccgccagttaagct

SEQ ID NO: 634324 - DNA, 19 bp, Mus musculus
  siRNA target sequence for Brd8 (NM_030147.1,1326-1344).
ctgtttccatggatagcaa

SEQ ID NO: 634325 - DNA, 19 bp, Mus musculus
  siRNA target sequence for Brd8 (NM_030147.1,1457-1475).
ctagcggagaagatggata

SEQ ID NO: 634326 - DNA, 19 bp, Mus musculus
  siRNA target sequence for Brd8 (NM_030147.1,1586-1604).
gtagaagcggcgttatcgt

SEQ ID NO: 634327 - DNA, 19 bp, Mus musculus
  siRNA target sequence for Brd8 (NM_030147.1,1778-1796).
gattccggtgttgagatta

SEQ ID NO: 634328 - DNA, 19 bp, Mus musculus
  siRNA target sequence for Brd8 (NM_030147.1,1782-1800).
ccggtgttgagattaaggt

SEQ ID NO: 634329 - DNA, 19 bp, Mus musculus
  siRNA target sequence for Brd8 (NM_030147.1,1825-1843).
catgtctggggctgagata

SEQ ID NO: 634330 - DNA, 19 bp, Mus musculus
  siRNA target sequence for Brd8 (NM_030147.1,1969-1987).
cgatgagaggccactttca

SEQ ID NO: 634331 - DNA, 19 bp, Mus musculus
  siRNA target sequence for Brd8 (NM_030147.1,2073-2091).
ctcaacacaagtttgaaat

SEQ ID NO: 634332 - DNA, 19 bp, Mus musculus
  siRNA target sequence for Brd8 (NM_030147.1,2087-2105).
gaaatgtcagactcattga

SEQ ID NO: 634333 - DNA, 19 bp, Mus musculus
  siRNA target sequence for Brd8 (NM_030147.1,2108-2126).
gaagaatcagggactattt

SEQ ID NO: 634334 - DNA, 19 bp, Mus musculus
  siRNA target sequence for Brd8 (NM_030147.1,2194-2212).
cctagaggagcctaaggaa

SEQ ID NO: 634335 - DNA, 19 bp, Mus musculus
  siRNA target sequence for Brd8 (NM_030147.1,2276-2294).
gatggctttagtatacata

SEQ ID NO: 634336 - DNA, 19 bp, Mus musculus
  siRNA target sequence for Brd8 (NM_030147.1,2361-2379).
ccgtgtgcagtgaagatca

SEQ ID NO: 634337 - DNA, 19 bp, Mus musculus
  siRNA target sequence for Brd8 (NM_030147.1,2362-2380).
cgtgtgcagtgaagatcaa

SEQ ID NO: 634338 - DNA, 19 bp, Mus musculus
  siRNA target sequence for Brd8 (NM_030147.1,2390-2408).
caggctcagaaaatatgga

SEQ ID NO: 634339 - DNA, 19 bp, Mus musculus
  siRNA target sequence for Brd8 (NM_030147.1,2493-2511).
ctcctggttaccatagcat

SEQ ID NO: 634340 - DNA, 19 bp, Mus musculus
  siRNA target sequence for Brd8 (NM_030147.1,2499-2517).
gttaccatagcattgtaca

SEQ ID NO: 634341 - DNA, 19 bp, Mus musculus
  siRNA target sequence for Brd8 (NM_030147.1,2522-2540).
cctatggatttgtcaacta

SEQ ID NO: 634342 - DNA, 19 bp, Mus musculus
  siRNA target sequence for Brd8 (NM_030147.1,2639-2657).
gaccatgatgtctatcaca

SEQ ID NO: 634343 - DNA, 19 bp, Mus musculus
  siRNA target sequence for Brd8 (NM_030147.1,2709-2727).
ccacacagttgattatgca

SEQ ID NO: 634344 - DNA, 19 bp, Mus musculus
  siRNA target sequence for Brd8 (NM_030147.1,2710-2728).
cacacagttgattatgcaa

SEQ ID NO: 634345 - DNA, 19 bp, Mus musculus
  siRNA target sequence for Brd8 (NM_030147.1,2714-2732).
cagttgattatgcaaacat

SEQ ID NO: 634346 - DNA, 19 bp, Mus musculus
  siRNA target sequence for Brd8 (NM_030147.1,2773-2791).
ctctacccgaaaacaagat

SEQ ID NO: 634347 - DNA, 19 bp, Mus musculus
  siRNA target sequence for Brd8 (NM_030147.1,2877-2895).
ccattgaagcagatatgaa

SEQ ID NO: 634348 - DNA, 19 bp, Mus musculus
  siRNA target sequence for Bzrp (NM_009775.2,122-140).
cttcatgggagcctacttt

SEQ ID NO: 634349 - DNA, 19 bp, Mus musculus
  siRNA target sequence for Bzrp (NM_009775.2,153-171).
ggcctccggtggtatgcta

SEQ ID NO: 634350 - DNA, 19 bp, Mus musculus
  siRNA target sequence for Bzrp (NM_009775.2,245-263).
ggggtatggctcctacata

SEQ ID NO: 634351 - DNA, 19 bp, Mus musculus
  siRNA target sequence for Bzrp (NM_009775.2,247-265).
ggtatggctcctacatagt

SEQ ID NO: 634352 - DNA, 19 bp, Mus musculus
  siRNA target sequence for Bzrp (NM_009775.2,287-305).
cacagaggacgctatggtt

SEQ ID NO: 634353 - DNA, 19 bp, Mus musculus
  siRNA target sequence for Bzrp (NM_009775.2,385-403).
gggccttggccgatcttct

SEQ ID NO: 634354 - DNA, 19 bp, Mus musculus
  siRNA target sequence for Bzrp (NM_009775.2,506-524).
caccgtgctcaactactat

SEQ ID NO: 634355 - DNA, 19 bp, Mus musculus
  siRNA target sequence for Bzrp (NM_009775.2,508-526).
ccgtgctcaactactatgt

SEQ ID NO: 634356 - DNA, 19 bp, Mus musculus
  siRNA target sequence for Bzrp (NM_009775.2,509-527).
cgtgctcaactactatgta

SEQ ID NO: 634357 - DNA, 19 bp, Mus musculus
  siRNA target sequence for Cd244 (NM_018729.1,240-258).
gctgaggccttccaacata

SEQ ID NO: 634358 - DNA, 19 bp, Mus musculus
  siRNA target sequence for Cd244 (NM_018729.1,300-318).
gggctcacacagaaaaatt

SEQ ID NO: 634359 - DNA, 19 bp, Mus musculus
  siRNA target sequence for Cd244 (NM_018729.1,305-323).
cacacagaaaaattgagat

SEQ ID NO: 634360 - DNA, 19 bp, Mus musculus
  siRNA target sequence for Cd244 (NM_018729.1,319-337).
gagatcctgaattggtata

SEQ ID NO: 634361 - DNA, 19 bp, Mus musculus
  siRNA target sequence for Cd244 (NM_018729.1,321-339).
gatcctgaattggtataat

SEQ ID NO: 634362 - DNA, 19 bp, Mus musculus
  siRNA target sequence for Cd244 (NM_018729.1,324-342).
cctgaattggtataatgat

SEQ ID NO: 634363 - DNA, 19 bp, Mus musculus
  siRNA target sequence for Cd244 (NM_018729.1,348-366).
cagttggtcaaatgtatct

SEQ ID NO: 634364 - DNA, 19 bp, Mus musculus
  siRNA target sequence for Cd244 (NM_018729.1,394-412).
ggggattttgctcttagta

SEQ ID NO: 634365 - DNA, 19 bp, Mus musculus
  siRNA target sequence for Cd244 (NM_018729.1,397-415).
gattttgctcttagtatca

SEQ ID NO: 634366 - DNA, 19 bp, Mus musculus
  siRNA target sequence for Cd244 (NM_018729.1,469-487).
ggcggaaaagtgtgcaata

SEQ ID NO: 634367 - DNA, 19 bp, Mus musculus
  siRNA target sequence for Cd244 (NM_018729.1,470-488).
gcggaaaagtgtgcaataa

SEQ ID NO: 634368 - DNA, 19 bp, Mus musculus
  siRNA target sequence for Cd244 (NM_018729.1,543-561).
gtggaagccctggactaat

SEQ ID NO: 634369 - DNA, 19 bp, Mus musculus
  siRNA target sequence for Cd244 (NM_018729.1,555-573).
gactaatgggacttgtcaa

SEQ ID NO: 634370 - DNA, 19 bp, Mus musculus
  siRNA target sequence for Cd244 (NM_018729.1,648-666).
ctccaatcaaaggaatagt

SEQ ID NO: 634371 - DNA, 19 bp, Mus musculus
  siRNA target sequence for Cd244 (NM_018729.1,783-801).
cccttcgaatttcagattt

SEQ ID NO: 634372 - DNA, 19 bp, Mus musculus
  siRNA target sequence for Cd244 (NM_018729.1,785-803).
cttcgaatttcagatttct

SEQ ID NO: 634373 - DNA, 19 bp, Mus musculus
  siRNA target sequence for Cd244 (NM_018729.1,812-830).
gggtgatcatcgtgattct

SEQ ID NO: 634374 - DNA, 19 bp, Mus musculus
  siRNA target sequence for Cd244 (NM_018729.1,813-831).
ggtgatcatcgtgattcta

SEQ ID NO: 634375 - DNA, 19 bp, Mus musculus
  siRNA target sequence for Cd244 (NM_018729.1,816-834).
gatcatcgtgattctagtt

SEQ ID NO: 634376 - DNA, 19 bp, Mus musculus
  siRNA target sequence for Cd244 (NM_018729.1,822-840).
cgtgattctagttacatta

SEQ ID NO: 634377 - DNA, 19 bp, Mus musculus
  siRNA target sequence for Cd244 (NM_018729.1,849-867).
ggccatcatttgtttctgt

SEQ ID NO: 634378 - DNA, 19 bp, Mus musculus
  siRNA target sequence for Cd244 (NM_018729.1,903-921).
ccctaaggaacctttgaca

SEQ ID NO: 634379 - DNA, 19 bp, Mus musculus
  siRNA target sequence for Cd244 (NM_018729.1,909-927).
ggaacctttgacaatatat

SEQ ID NO: 634380 - DNA, 19 bp, Mus musculus
  siRNA target sequence for Cd244 (NM_018729.1,914-932).
ctttgacaatatatgaata

SEQ ID NO: 634381 - DNA, 19 bp, Mus musculus
  siRNA target sequence for Cd244 (NM_018729.1,1016-1034).
ggggacaaagagaattgga

SEQ ID NO: 634382 - DNA, 19 bp, Mus musculus
  siRNA target sequence for Cd244 (NM_018729.1,1087-1105).
gatagaggcaccatgtact

SEQ ID NO: 634383 - DNA, 19 bp, Mus musculus
  siRNA target sequence for Cd244 (NM_018729.1,1094-1112).
gcaccatgtactctatgat

SEQ ID NO: 634384 - DNA, 19 bp, Mus musculus
  siRNA target sequence for Cd36 (NM_007643.2,346-364).
ccagtcggagacatgctta

SEQ ID NO: 634385 - DNA, 19 bp, Mus musculus
  siRNA target sequence for Cd36 (NM_007643.2,347-365).
cagtcggagacatgcttat

SEQ ID NO: 634386 - DNA, 19 bp, Mus musculus
  siRNA target sequence for Cd36 (NM_007643.2,374-392).
caatcaaaagggaagttgt

SEQ ID NO: 634387 - DNA, 19 bp, Mus musculus
  siRNA target sequence for Cd36 (NM_007643.2,461-479).
ggatctttgatgtgcaaaa

SEQ ID NO: 634388 - DNA, 19 bp, Mus musculus
  siRNA target sequence for Cd36 (NM_007643.2,506-524).
gcaaaatcaaggttaaaca

SEQ ID NO: 634389 - DNA, 19 bp, Mus musculus
  siRNA target sequence for Cd36 (NM_007643.2,539-557).
catacagagttcgttatct

SEQ ID NO: 634390 - DNA, 19 bp, Mus musculus
  siRNA target sequence for Cd36 (NM_007643.2,550-568).
cgttatctagccaaggaaa

SEQ ID NO: 634391 - DNA, 19 bp, Mus musculus
  siRNA target sequence for Cd36 (NM_007643.2,551-569).
gttatctagccaaggaaaa

SEQ ID NO: 634392 - DNA, 19 bp, Mus musculus
  siRNA target sequence for Cd36 (NM_007643.2,556-574).
ctagccaaggaaaatataa

SEQ ID NO: 634393 - DNA, 19 bp, Mus musculus
  siRNA target sequence for Cd36 (NM_007643.2,612-630).
gcccaatggagccatcttt

SEQ ID NO: 634394 - DNA, 19 bp, Mus musculus
  siRNA target sequence for Cd36 (NM_007643.2,691-709).
gcagctgcaccacatatct

SEQ ID NO: 634395 - DNA, 19 bp, Mus musculus
  siRNA target sequence for Cd36 (NM_007643.2,692-710).
cagctgcaccacatatcta

SEQ ID NO: 634396 - DNA, 19 bp, Mus musculus
  siRNA target sequence for Cd36 (NM_007643.2,703-721).
catatctaccaaaattcat

SEQ ID NO: 634397 - DNA, 19 bp, Mus musculus
  siRNA target sequence for Cd36 (NM_007643.2,730-748).
gttgtgctcaactctctta

SEQ ID NO: 634398 - DNA, 19 bp, Mus musculus
  siRNA target sequence for Cd36 (NM_007643.2,733-751).
gtgctcaactctcttataa

SEQ ID NO: 634399 - DNA, 19 bp, Mus musculus
  siRNA target sequence for Cd36 (NM_007643.2,803-821).
ggggttacaaagatccatt

SEQ ID NO: 634400 - DNA, 19 bp, Mus musculus
  siRNA target sequence for Cd36 (NM_007643.2,825-843).
cagtttggttccatatcct

SEQ ID NO: 634401 - DNA, 19 bp, Mus musculus
  siRNA target sequence for Cd36 (NM_007643.2,827-845).
gtttggttccatatcctat

SEQ ID NO: 634402 - DNA, 19 bp, Mus musculus
  siRNA target sequence for Cd36 (NM_007643.2,851-869).
ccacagttggtgtgtttta

SEQ ID NO: 634403 - DNA, 19 bp, Mus musculus
  siRNA target sequence for Cd36 (NM_007643.2,882-900).
cactgtagatggagtttat

SEQ ID NO: 634404 - DNA, 19 bp, Mus musculus
  siRNA target sequence for Cd36 (NM_007643.2,884-902).
ctgtagatggagtttataa

SEQ ID NO: 634405 - DNA, 19 bp, Mus musculus
  siRNA target sequence for Cd36 (NM_007643.2,889-907).
gatggagtttataaagttt

SEQ ID NO: 634406 - DNA, 19 bp, Mus musculus
  siRNA target sequence for Cd36 (NM_007643.2,918-936).
ggataacataagcaaagtt

SEQ ID NO: 634407 - DNA, 19 bp, Mus musculus
  siRNA target sequence for Cd36 (NM_007643.2,929-947).
gcaaagttgccataattga

SEQ ID NO: 634408 - DNA, 19 bp, Mus musculus
  siRNA target sequence for Cd36 (NM_007643.2,937-955).
gccataattgagtcctata

SEQ ID NO: 634409 - DNA, 19 bp, Mus musculus
  siRNA target sequence for Cd36 (NM_007643.2,951-969).
ctataaagggaaaaggaat

SEQ ID NO: 634410 - DNA, 19 bp, Mus musculus
  siRNA target sequence for Cd36 (NM_007643.2,983-1001).
caagctattgcgacatgat

SEQ ID NO: 634411 - DNA, 19 bp, Mus musculus
  siRNA target sequence for Cd36 (NM_007643.2,986-1004).
gctattgcgacatgattaa

SEQ ID NO: 634412 - DNA, 19 bp, Mus musculus
  siRNA target sequence for Cd36 (NM_007643.2,987-1005).
ctattgcgacatgattaat

SEQ ID NO: 634413 - DNA, 19 bp, Mus musculus
  siRNA target sequence for Cd36 (NM_007643.2,1048-1066).
cggacattgagattctttt

SEQ ID NO: 634414 - DNA, 19 bp, Mus musculus
  siRNA target sequence for Cd36 (NM_007643.2,1094-1112).
ctgtgttcggatctgaaat

SEQ ID NO: 634415 - DNA, 19 bp, Mus musculus
  siRNA target sequence for Cd36 (NM_007643.2,1108-1126).
gaaatcgaccttaaaggaa

SEQ ID NO: 634416 - DNA, 19 bp, Mus musculus
  siRNA target sequence for Cd36 (NM_007643.2,1124-1142).
gaatccccgtgtacagatt

SEQ ID NO: 634417 - DNA, 19 bp, Mus musculus
  siRNA target sequence for Cd36 (NM_007643.2,1130-1148).
ccgtgtacagatttgttct

SEQ ID NO: 634418 - DNA, 19 bp, Mus musculus
  siRNA target sequence for Cd36 (NM_007643.2,1131-1149).
cgtgtacagatttgttctt

SEQ ID NO: 634419 - DNA, 19 bp, Mus musculus
  siRNA target sequence for Cd36 (NM_007643.2,1218-1236).
ctccaataactgtacatct

SEQ ID NO: 634420 - DNA, 19 bp, Mus musculus
  siRNA target sequence for Cd36 (NM_007643.2,1306-1324).
catgcaagtccagatgttt

SEQ ID NO: 634421 - DNA, 19 bp, Mus musculus
  siRNA target sequence for Cd36 (NM_007643.2,1340-1358).
gcttacatccaaatgaaga

SEQ ID NO: 634422 - DNA, 19 bp, Mus musculus
  siRNA target sequence for Cd36 (NM_007643.2,1357-1375).
gatgagcataggacatact

SEQ ID NO: 634423 - DNA, 19 bp, Mus musculus
  siRNA target sequence for Cd36 (NM_007643.2,1362-1380).
gcataggacatacttagat

SEQ ID NO: 634424 - DNA, 19 bp, Mus musculus
  siRNA target sequence for Cd36 (NM_007643.2,1394-1412).
ctggattcactctacaatt

SEQ ID NO: 634425 - DNA, 19 bp, Mus musculus
  siRNA target sequence for Cd36 (NM_007643.2,1420-1438).
cgactgcaggtcaacatat

SEQ ID NO: 634426 - DNA, 19 bp, Mus musculus
  siRNA target sequence for Cd36 (NM_007643.2,1487-1505).
cttacattgtacctatact

SEQ ID NO: 634427 - DNA, 19 bp, Mus musculus
  siRNA target sequence for Cd36 (NM_007643.2,1523-1541).
ggaccattggtgatgaaaa

SEQ ID NO: 634428 - DNA, 19 bp, Mus musculus
  siRNA target sequence for Cd36 (NM_007643.2,1524-1542).
gaccattggtgatgaaaaa

SEQ ID NO: 634429 - DNA, 19 bp, Mus musculus
  siRNA target sequence for Cd36 (NM_007643.2,1614-1632).
gattggagtggtgatgttt

SEQ ID NO: 634430 - DNA, 19 bp, Mus musculus
  siRNA target sequence for Cd7 (NM_009854.1,179-197).
catcacctgctctacaaga

SEQ ID NO: 634431 - DNA, 19 bp, Mus musculus
  siRNA target sequence for Cd7 (NM_009854.1,204-222).
ctggaagggatcttaatga

SEQ ID NO: 634432 - DNA, 19 bp, Mus musculus
  siRNA target sequence for Cd7 (NM_009854.1,232-250).
ggcctcaggcttacaatgt

SEQ ID NO: 634433 - DNA, 19 bp, Mus musculus
  siRNA target sequence for Cd7 (NM_009854.1,234-252).
cctcaggcttacaatgtga

SEQ ID NO: 634434 - DNA, 19 bp, Mus musculus
  siRNA target sequence for Cd7 (NM_009854.1,235-253).
ctcaggcttacaatgtgat

SEQ ID NO: 634435 - DNA, 19 bp, Mus musculus
  siRNA target sequence for Cd7 (NM_009854.1,245-263).
caatgtgatttactttgaa

SEQ ID NO: 634436 - DNA, 19 bp, Mus musculus
  siRNA target sequence for Cd7 (NM_009854.1,292-310).
ccttctcaggccgaattaa

SEQ ID NO: 634437 - DNA, 19 bp, Mus musculus
  siRNA target sequence for Cd7 (NM_009854.1,293-311).
cttctcaggccgaattaat

SEQ ID NO: 634438 - DNA, 19 bp, Mus musculus
  siRNA target sequence for Cd7 (NM_009854.1,333-351).
ctgaccatcaccataagct

SEQ ID NO: 634439 - DNA, 19 bp, Mus musculus
  siRNA target sequence for Cd80 (NM_009855.1,50-68).
catgtccaaggctcattct

SEQ ID NO: 634440 - DNA, 19 bp, Mus musculus
  siRNA target sequence for Cd80 (NM_009855.1,53-71).
gtccaaggctcattcttct

SEQ ID NO: 634441 - DNA, 19 bp, Mus musculus
  siRNA target sequence for Cd80 (NM_009855.1,81-99).
gctgattcgtctttcacaa

SEQ ID NO: 634442 - DNA, 19 bp, Mus musculus
  siRNA target sequence for Cd80 (NM_009855.1,126-144).
gtccaagtcagtgaaagat

SEQ ID NO: 634443 - DNA, 19 bp, Mus musculus
  siRNA target sequence for Cd80 (NM_009855.1,132-150).
gtcagtgaaagataaggta

SEQ ID NO: 634444 - DNA, 19 bp, Mus musculus
  siRNA target sequence for Cd80 (NM_009855.1,134-152).
cagtgaaagataaggtatt

SEQ ID NO: 634445 - DNA, 19 bp, Mus musculus
  siRNA target sequence for Cd80 (NM_009855.1,154-172).
ctgccttgccgttacaact

SEQ ID NO: 634446 - DNA, 19 bp, Mus musculus
  siRNA target sequence for Cd80 (NM_009855.1,168-186).
caactctcctcatgaagat

SEQ ID NO: 634447 - DNA, 19 bp, Mus musculus
  siRNA target sequence for Cd80 (NM_009855.1,207-225).
ctggcaaaaacatgacaaa

SEQ ID NO: 634448 - DNA, 19 bp, Mus musculus
  siRNA target sequence for Cd80 (NM_009855.1,259-277).
gtgtggcccgagtataaga

SEQ ID NO: 634449 - DNA, 19 bp, Mus musculus
  siRNA target sequence for Cd80 (NM_009855.1,270-288).
gtataagaaccggacttta

SEQ ID NO: 634450 - DNA, 19 bp, Mus musculus
  siRNA target sequence for Cd80 (NM_009855.1,358-376).
gtcgttcaaaagaaggaaa

SEQ ID NO: 634451 - DNA, 19 bp, Mus musculus
  siRNA target sequence for Cd80 (NM_009855.1,372-390).
ggaaagaggaacgtatgaa

SEQ ID NO: 634452 - DNA, 19 bp, Mus musculus
  siRNA target sequence for Cd80 (NM_009855.1,377-395).
gaggaacgtatgaagttaa

SEQ ID NO: 634453 - DNA, 19 bp, Mus musculus
  siRNA target sequence for Cd80 (NM_009855.1,380-398).
gaacgtatgaagttaaaca

SEQ ID NO: 634454 - DNA, 19 bp, Mus musculus
  siRNA target sequence for Cd80 (NM_009855.1,383-401).
cgtatgaagttaaacactt

SEQ ID NO: 634455 - DNA, 19 bp, Mus musculus
  siRNA target sequence for Cd80 (NM_009855.1,397-415).
cacttggctttagtaaagt

SEQ ID NO: 634456 - DNA, 19 bp, Mus musculus
  siRNA target sequence for Cd80 (NM_009855.1,437-455).
ctacccccaacataactga

SEQ ID NO: 634457 - DNA, 19 bp, Mus musculus
  siRNA target sequence for Cd80 (NM_009855.1,470-488).
ctgcagacactaaaaggat

SEQ ID NO: 634458 - DNA, 19 bp, Mus musculus
  siRNA target sequence for Cd80 (NM_009855.1,523-541).
cgcttctcttggttggaaa

SEQ ID NO: 634459 - DNA, 19 bp, Mus musculus
  siRNA target sequence for Cd80 (NM_009855.1,559-577).
ggcatcaatacgacaattt

SEQ ID NO: 634460 - DNA, 19 bp, Mus musculus
  siRNA target sequence for Cd80 (NM_009855.1,586-604).
cctgaatctgaattgtaca

SEQ ID NO: 634461 - DNA, 19 bp, Mus musculus
  siRNA target sequence for Cd80 (NM_009855.1,605-623).
ccattagtagccaactaga

SEQ ID NO: 634462 - DNA, 19 bp, Mus musculus
  siRNA target sequence for Cd80 (NM_009855.1,611-629).
gtagccaactagatttcaa

SEQ ID NO: 634463 - DNA, 19 bp, Mus musculus
  siRNA target sequence for Cd80 (NM_009855.1,616-634).
caactagatttcaatacga

SEQ ID NO: 634464 - DNA, 19 bp, Mus musculus
  siRNA target sequence for Cd80 (NM_009855.1,635-653).
ctcgcaaccacaccattaa

SEQ ID NO: 634465 - DNA, 19 bp, Mus musculus
  siRNA target sequence for Cd80 (NM_009855.1,637-655).
cgcaaccacaccattaagt

SEQ ID NO: 634466 - DNA, 19 bp, Mus musculus
  siRNA target sequence for Cd80 (NM_009855.1,639-657).
caaccacaccattaagtgt

SEQ ID NO: 634467 - DNA, 19 bp, Mus musculus
  siRNA target sequence for Cd80 (NM_009855.1,758-776).
caggattcggcgcagtaat

SEQ ID NO: 634468 - DNA, 19 bp, Mus musculus
  siRNA target sequence for Cd80 (NM_009855.1,760-778).
ggattcggcgcagtaataa

SEQ ID NO: 634469 - DNA, 19 bp, Mus musculus
  siRNA target sequence for Cd80 (NM_009855.1,793-811).
gttgtcatcatcaaatgct

SEQ ID NO: 634470 - DNA, 19 bp, Mus musculus
  siRNA target sequence for Cd80 (NM_009855.1,879-897).
cgggcctgaagaagcatta

SEQ ID NO: 634471 - DNA, 19 bp, Mus musculus
  siRNA target sequence for Cd80 (NM_009855.1,882-900).
gcctgaagaagcattagct

SEQ ID NO: 634472 - DNA, 19 bp, Mus musculus
  siRNA target sequence for Cd86 (NM_019388.2,108-126).
catgggcttggcaatcctt

SEQ ID NO: 634473 - DNA, 19 bp, Mus musculus
  siRNA target sequence for Cd86 (NM_019388.2,113-131).
gcttggcaatccttatctt

SEQ ID NO: 634474 - DNA, 19 bp, Mus musculus
  siRNA target sequence for Cd86 (NM_019388.2,118-136).
gcaatccttatctttgtga

SEQ ID NO: 634475 - DNA, 19 bp, Mus musculus
  siRNA target sequence for Cd86 (NM_019388.2,171-189).
gacgcaagcttatttcaat

SEQ ID NO: 634476 - DNA, 19 bp, Mus musculus
  siRNA target sequence for Cd86 (NM_019388.2,238-256).
ctgagtgagctggtagtat

SEQ ID NO: 634477 - DNA, 19 bp, Mus musculus
  siRNA target sequence for Cd86 (NM_019388.2,260-278).
ggcaggaccagcaaaagtt

SEQ ID NO: 634478 - DNA, 19 bp, Mus musculus
  siRNA target sequence for Cd86 (NM_019388.2,280-298).
gttctgtacgagcactatt

SEQ ID NO: 634479 - DNA, 19 bp, Mus musculus
  siRNA target sequence for Cd86 (NM_019388.2,300-318).
gggcacagagaaacttgat

SEQ ID NO: 634480 - DNA, 19 bp, Mus musculus
  siRNA target sequence for Cd86 (NM_019388.2,368-386).
ggactctacgacttcacaa

SEQ ID NO: 634481 - DNA, 19 bp, Mus musculus
  siRNA target sequence for Cd86 (NM_019388.2,371-389).
ctctacgacttcacaatgt

SEQ ID NO: 634482 - DNA, 19 bp, Mus musculus
  siRNA target sequence for Cd86 (NM_019388.2,435-453).
gccacccacaggatcaatt

SEQ ID NO: 634483 - DNA, 19 bp, Mus musculus
  siRNA target sequence for Cd86 (NM_019388.2,495-513).
cttcagtgaacctgaaata

SEQ ID NO: 634484 - DNA, 19 bp, Mus musculus
  siRNA target sequence for Cd86 (NM_019388.2,523-541).
cagaatgtaacaggaaatt

SEQ ID NO: 634485 - DNA, 19 bp, Mus musculus
  siRNA target sequence for Cd86 (NM_019388.2,525-543).
gaatgtaacaggaaattct

SEQ ID NO: 634486 - DNA, 19 bp, Mus musculus
  siRNA target sequence for Cd86 (NM_019388.2,535-553).
ggaaattctggcataaatt

SEQ ID NO: 634487 - DNA, 19 bp, Mus musculus
  siRNA target sequence for Cd86 (NM_019388.2,571-589).
caaggtcacccgaaaccta

SEQ ID NO: 634488 - DNA, 19 bp, Mus musculus
  siRNA target sequence for Cd86 (NM_019388.2,575-593).
gtcacccgaaacctaagaa

SEQ ID NO: 634489 - DNA, 19 bp, Mus musculus
  siRNA target sequence for Cd86 (NM_019388.2,577-595).
cacccgaaacctaagaaga

SEQ ID NO: 634490 - DNA, 19 bp, Mus musculus
  siRNA target sequence for Cd86 (NM_019388.2,582-600).
gaaacctaagaagatgtat

SEQ ID NO: 634491 - DNA, 19 bp, Mus musculus
  siRNA target sequence for Cd86 (NM_019388.2,611-629).
ctaattcaactaatgagta

SEQ ID NO: 634492 - DNA, 19 bp, Mus musculus
  siRNA target sequence for Cd86 (NM_019388.2,631-649).
ggtgataacatgcagatat

SEQ ID NO: 634493 - DNA, 19 bp, Mus musculus
  siRNA target sequence for Cd86 (NM_019388.2,661-679).
gtcacagaactgttcagta

SEQ ID NO: 634494 - DNA, 19 bp, Mus musculus
  siRNA target sequence for Cd86 (NM_019388.2,767-785).
cctccaaacctctcaattt

SEQ ID NO: 634495 - DNA, 19 bp, Mus musculus
  siRNA target sequence for Cd86 (NM_019388.2,780-798).
caatttcactcaagagttt

SEQ ID NO: 634496 - DNA, 19 bp, Mus musculus
  siRNA target sequence for Cd86 (NM_019388.2,813-831).
gtattggaaggagattaca

SEQ ID NO: 634497 - DNA, 19 bp, Mus musculus
  siRNA target sequence for Cd86 (NM_019388.2,822-840).
ggagattacagcttcagtt

SEQ ID NO: 634498 - DNA, 19 bp, Mus musculus
  siRNA target sequence for Cd86 (NM_019388.2,864-882).
gctgctcatcattgtatgt

SEQ ID NO: 634499 - DNA, 19 bp, Mus musculus
  siRNA target sequence for Cd86 (NM_019388.2,915-933).
caacacagcctctaagtta

SEQ ID NO: 634500 - DNA, 19 bp, Mus musculus
  siRNA target sequence for Cd86 (NM_019388.2,979-997).
cttgaaccccaaattgctt

SEQ ID NO: 634501 - DNA, 19 bp, Mus musculus
  siRNA target sequence for Ceacam1 (NM_011926.1,700-718).
caatcaagctggacataat

SEQ ID NO: 634502 - DNA, 19 bp, Mus musculus
  siRNA target sequence for Ceacam1 (NM_011926.1,782-800).
ggctggggtggctctaata

SEQ ID NO: 634503 - DNA, 19 bp, Mus musculus
  siRNA target sequence for Ceacam1 (NM_011926.1,807-825).
ctggcatatttcctctatt

SEQ ID NO: 634504 - DNA, 19 bp, Mus musculus
  siRNA target sequence for Cr2 (NM_007758.1,118-136).
ggttcgctctgggttttct

SEQ ID NO: 634505 - DNA, 19 bp, Mus musculus
  siRNA target sequence for Cr2 (NM_007758.1,119-137).
gttcgctctgggttttctt

SEQ ID NO: 634506 - DNA, 19 bp, Mus musculus
  siRNA target sequence for Cr2 (NM_007758.1,149-167).
ctccaggagttcttgagat

SEQ ID NO: 634507 - DNA, 19 bp, Mus musculus
  siRNA target sequence for Cr2 (NM_007758.1,179-197).
ctcctcctgaagtcaaaaa

SEQ ID NO: 634508 - DNA, 19 bp, Mus musculus
  siRNA target sequence for Cr2 (NM_007758.1,199-217).
gctcggaaaccctattatt

SEQ ID NO: 634509 - DNA, 19 bp, Mus musculus
  siRNA target sequence for Cr2 (NM_007758.1,331-349).
gataaagctcctcctatat

SEQ ID NO: 634510 - DNA, 19 bp, Mus musculus
  siRNA target sequence for Cr2 (NM_007758.1,337-355).
gctcctcctatatgtgaat

SEQ ID NO: 634511 - DNA, 19 bp, Mus musculus
  siRNA target sequence for Cr2 (NM_007758.1,352-370).
gaatctgtgaataaaacca

SEQ ID NO: 634512 - DNA, 19 bp, Mus musculus
  siRNA target sequence for Cr2 (NM_007758.1,391-409).
gtaccagggggattcatga

SEQ ID NO: 634513 - DNA, 19 bp, Mus musculus
  siRNA target sequence for Cr2 (NM_007758.1,538-556).
ccagtctgtgagagtgatt

SEQ ID NO: 634514 - DNA, 19 bp, Mus musculus
  siRNA target sequence for Cr2 (NM_007758.1,570-588).
cccatcacttccaacgatt

SEQ ID NO: 634515 - DNA, 19 bp, Mus musculus
  siRNA target sequence for Cr2 (NM_007758.1,575-593).
cacttccaacgattcataa

SEQ ID NO: 634516 - DNA, 19 bp, Mus musculus
  siRNA target sequence for Cr2 (NM_007758.1,632-650).
cggggttgtctgtgacata

SEQ ID NO: 634517 - DNA, 19 bp, Mus musculus
  siRNA target sequence for Cr2 (NM_007758.1,752-770).
gtgaacatccaggaaagtt

SEQ ID NO: 634518 - DNA, 19 bp, Mus musculus
  siRNA target sequence for Cr2 (NM_007758.1,811-829).
ggcacaactgtgtacttct

SEQ ID NO: 634519 - DNA, 19 bp, Mus musculus
  siRNA target sequence for Cr2 (NM_007758.1,862-880).
ccctctagtcagtgtgtaa

SEQ ID NO: 634520 - DNA, 19 bp, Mus musculus
  siRNA target sequence for Cr2 (NM_007758.1,866-884).
ctagtcagtgtgtaattgt

SEQ ID NO: 634521 - DNA, 19 bp, Mus musculus
  siRNA target sequence for Cr2 (NM_007758.1,903-921).
gactaagaagccagtatgt

SEQ ID NO: 634522 - DNA, 19 bp, Mus musculus
  siRNA target sequence for Cr2 (NM_007758.1,905-923).
ctaagaagccagtatgtaa

SEQ ID NO: 634523 - DNA, 19 bp, Mus musculus
  siRNA target sequence for Cr2 (NM_007758.1,946-964).
ccacctgttcgtaatggaa

SEQ ID NO: 634524 - DNA, 19 bp, Mus musculus
  siRNA target sequence for Cr2 (NM_007758.1,952-970).
gttcgtaatggaagtcata

SEQ ID NO: 634525 - DNA, 19 bp, Mus musculus
  siRNA target sequence for Cr2 (NM_007758.1,974-992).
gcagcttttcagaaaatgt

SEQ ID NO: 634526 - DNA, 19 bp, Mus musculus
  siRNA target sequence for Cr2 (NM_007758.1,975-993).
cagcttttcagaaaatgta

SEQ ID NO: 634527 - DNA, 19 bp, Mus musculus
  siRNA target sequence for Cr2 (NM_007758.1,1042-1060).
ggcgtgagcttcactctta

SEQ ID NO: 634528 - DNA, 19 bp, Mus musculus
  siRNA target sequence for Cr2 (NM_007758.1,1043-1061).
gcgtgagcttcactcttat

SEQ ID NO: 634529 - DNA, 19 bp, Mus musculus
  siRNA target sequence for Cr2 (NM_007758.1,1044-1062).
cgtgagcttcactcttatt

SEQ ID NO: 634530 - DNA, 19 bp, Mus musculus
  siRNA target sequence for Cr2 (NM_007758.1,1066-1084).
gagaagactatcaattgta

SEQ ID NO: 634531 - DNA, 19 bp, Mus musculus
  siRNA target sequence for Cr2 (NM_007758.1,1071-1089).
gactatcaattgtactact

SEQ ID NO: 634532 - DNA, 19 bp, Mus musculus
  siRNA target sequence for Cr2 (NM_007758.1,1118-1136).
gccctgctccatattgtgt

SEQ ID NO: 634533 - DNA, 19 bp, Mus musculus
  siRNA target sequence for Cr2 (NM_007758.1,1119-1137).
ccctgctccatattgtgta

SEQ ID NO: 634534 - DNA, 19 bp, Mus musculus
  siRNA target sequence for Cr2 (NM_007758.1,1123-1141).
gctccatattgtgtacttt

SEQ ID NO: 634535 - DNA, 19 bp, Mus musculus
  siRNA target sequence for Cr2 (NM_007758.1,1126-1144).
ccatattgtgtactttcaa

SEQ ID NO: 634536 - DNA, 19 bp, Mus musculus
  siRNA target sequence for Cr2 (NM_007758.1,1160-1178).
gtttacaaccgaagatcaa

SEQ ID NO: 634537 - DNA, 19 bp, Mus musculus
  siRNA target sequence for Cr2 (NM_007758.1,1337-1355).
gtcaggctcctcctaaaat

SEQ ID NO: 634538 - DNA, 19 bp, Mus musculus
  siRNA target sequence for Cr2 (NM_007758.1,1339-1357).
caggctcctcctaaaatta

SEQ ID NO: 634539 - DNA, 19 bp, Mus musculus
  siRNA target sequence for Cr2 (NM_007758.1,1342-1360).
gctcctcctaaaattatca

SEQ ID NO: 634540 - DNA, 19 bp, Mus musculus
  siRNA target sequence for Cr2 (NM_007758.1,1396-1414).
gaccctggtacatccataa

SEQ ID NO: 634541 - DNA, 19 bp, Mus musculus
  siRNA target sequence for Cr2 (NM_007758.1,1399-1417).
cctggtacatccataagat

SEQ ID NO: 634542 - DNA, 19 bp, Mus musculus
  siRNA target sequence for Cr2 (NM_007758.1,1400-1418).
ctggtacatccataagata

SEQ ID NO: 634543 - DNA, 19 bp, Mus musculus
  siRNA target sequence for Cr2 (NM_007758.1,1443-1461).
ggtgggagaggacactata

SEQ ID NO: 634544 - DNA, 19 bp, Mus musculus
  siRNA target sequence for Cr2 (NM_007758.1,1505-1523).
gcacagttgcagagtgtaa

SEQ ID NO: 634545 - DNA, 19 bp, Mus musculus
  siRNA target sequence for Cr2 (NM_007758.1,1526-1544).
cagtaggaccacatctctt

SEQ ID NO: 634546 - DNA, 19 bp, Mus musculus
  siRNA target sequence for Cr2 (NM_007758.1,1528-1546).
gtaggaccacatctcttta

SEQ ID NO: 634547 - DNA, 19 bp, Mus musculus
  siRNA target sequence for Cr2 (NM_007758.1,1531-1549).
ggaccacatctctttaaga

SEQ ID NO: 634548 - DNA, 19 bp, Mus musculus
  siRNA target sequence for Cr2 (NM_007758.1,1552-1570).
cctcagaatcagtttatta

SEQ ID NO: 634549 - DNA, 19 bp, Mus musculus
  siRNA target sequence for Cr2 (NM_007758.1,1594-1612).
gatgaagggttccagttaa

SEQ ID NO: 634550 - DNA, 19 bp, Mus musculus
  siRNA target sequence for Cr2 (NM_007758.1,1608-1626).
gttaagtgagagtgcttat

SEQ ID NO: 634551 - DNA, 19 bp, Mus musculus
  siRNA target sequence for Cr2 (NM_007758.1,1639-1657).
ggtacaattccttggttta

SEQ ID NO: 634552 - DNA, 19 bp, Mus musculus
  siRNA target sequence for Cr2 (NM_007758.1,1643-1661).
caattccttggtttataga

SEQ ID NO: 634553 - DNA, 19 bp, Mus musculus
  siRNA target sequence for Cr2 (NM_007758.1,1693-1711).
ccacctcctgttatacaca

SEQ ID NO: 634554 - DNA, 19 bp, Mus musculus
  siRNA target sequence for Cr2 (NM_007758.1,1694-1712).
cacctcctgttatacacaa

SEQ ID NO: 634555 - DNA, 19 bp, Mus musculus
  siRNA target sequence for Cr2 (NM_007758.1,1708-1726).
cacaacgggacacatacat

SEQ ID NO: 634556 - DNA, 19 bp, Mus musculus
  siRNA target sequence for Cr2 (NM_007758.1,1753-1771).
ggaactgtggtcacataca

SEQ ID NO: 634557 - DNA, 19 bp, Mus musculus
  siRNA target sequence for Cr2 (NM_007758.1,1786-1804).
ccagaggaaggcgtaaaat

SEQ ID NO: 634558 - DNA, 19 bp, Mus musculus
  siRNA target sequence for Cr2 (NM_007758.1,1787-1805).
cagaggaaggcgtaaaatt

SEQ ID NO: 634559 - DNA, 19 bp, Mus musculus
  siRNA target sequence for Cr2 (NM_007758.1,1913-1931).
gcacagacgttcatgttga

SEQ ID NO: 634560 - DNA, 19 bp, Mus musculus
  siRNA target sequence for Cr2 (NM_007758.1,1939-1957).
gtcaagctcactgacaata

SEQ ID NO: 634561 - DNA, 19 bp, Mus musculus
  siRNA target sequence for Cr2 (NM_007758.1,1997-2015).
gtgatgatggatatatttt

SEQ ID NO: 634562 - DNA, 19 bp, Mus musculus
  siRNA target sequence for Cr2 (NM_007758.1,2025-2043).
cagtcagatccggtgtaaa

SEQ ID NO: 634563 - DNA, 19 bp, Mus musculus
  siRNA target sequence for Cr2 (NM_007758.1,2035-2053).
cggtgtaaagccaataata

SEQ ID NO: 634564 - DNA, 19 bp, Mus musculus
  siRNA target sequence for Cr2 (NM_007758.1,2119-2137).
ccagatgattcacatataa

SEQ ID NO: 634565 - DNA, 19 bp, Mus musculus
  siRNA target sequence for Cr2 (NM_007758.1,2169-2187).
ccagttgactggatatact

SEQ ID NO: 634566 - DNA, 19 bp, Mus musculus
  siRNA target sequence for Cr2 (NM_007758.1,2170-2188).
cagttgactggatatactt

SEQ ID NO: 634567 - DNA, 19 bp, Mus musculus
  siRNA target sequence for Cr2 (NM_007758.1,2172-2190).
gttgactggatatacttat

SEQ ID NO: 634568 - DNA, 19 bp, Mus musculus
  siRNA target sequence for Cr2 (NM_007758.1,2232-2250).
gattgaagtttgtacagtt

SEQ ID NO: 634569 - DNA, 19 bp, Mus musculus
  siRNA target sequence for Cr2 (NM_007758.1,2264-2282).
ctccaccaaaaattgcaaa

SEQ ID NO: 634570 - DNA, 19 bp, Mus musculus
  siRNA target sequence for Cr2 (NM_007758.1,2345-2363).
gtgatgaagggttctatct

SEQ ID NO: 634571 - DNA, 19 bp, Mus musculus
  siRNA target sequence for Cr2 (NM_007758.1,2382-2400).
gcagtgcgtaaatgattct

SEQ ID NO: 634572 - DNA, 19 bp, Mus musculus
  siRNA target sequence for Cr2 (NM_007758.1,2383-2401).
cagtgcgtaaatgattcta

SEQ ID NO: 634573 - DNA, 19 bp, Mus musculus
  siRNA target sequence for Cr2 (NM_007758.1,2388-2406).
cgtaaatgattctaaaggt

SEQ ID NO: 634574 - DNA, 19 bp, Mus musculus
  siRNA target sequence for Cr2 (NM_007758.1,2428-2446).
ccaccacaatgcttacaat

SEQ ID NO: 634575 - DNA, 19 bp, Mus musculus
  siRNA target sequence for Cr2 (NM_007758.1,2465-2483).
gccccgatccagaagtcaa

SEQ ID NO: 634576 - DNA, 19 bp, Mus musculus
  siRNA target sequence for Cr2 (NM_007758.1,2466-2484).
ccccgatccagaagtcaaa

SEQ ID NO: 634577 - DNA, 19 bp, Mus musculus
  siRNA target sequence for Cr2 (NM_007758.1,2468-2486).
ccgatccagaagtcaaaca

SEQ ID NO: 634578 - DNA, 19 bp, Mus musculus
  siRNA target sequence for Cr2 (NM_007758.1,2488-2506).
ggttacaaactcaataaaa

SEQ ID NO: 634579 - DNA, 19 bp, Mus musculus
  siRNA target sequence for Cr2 (NM_007758.1,2513-2531).
ctgcattttctcataatga

SEQ ID NO: 634580 - DNA, 19 bp, Mus musculus
  siRNA target sequence for Cr2 (NM_007758.1,2524-2542).
cataatgacatagtacatt

SEQ ID NO: 634581 - DNA, 19 bp, Mus musculus
  siRNA target sequence for Cr2 (NM_007758.1,2530-2548).
gacatagtacattttgtct

SEQ ID NO: 634582 - DNA, 19 bp, Mus musculus
  siRNA target sequence for Cr2 (NM_007758.1,2572-2590).
ggcagccacttgataaggt

SEQ ID NO: 634583 - DNA, 19 bp, Mus musculus
  siRNA target sequence for Cr2 (NM_007758.1,2578-2596).
cacttgataaggtgtcata

SEQ ID NO: 634584 - DNA, 19 bp, Mus musculus
  siRNA target sequence for Cr2 (NM_007758.1,2589-2607).
gtgtcatactaataacaca

SEQ ID NO: 634585 - DNA, 19 bp, Mus musculus
  siRNA target sequence for Cr2 (NM_007758.1,2620-2638).
gtaccaacttgtatcagaa

SEQ ID NO: 634586 - DNA, 19 bp, Mus musculus
  siRNA target sequence for Cr2 (NM_007758.1,2673-2691).
ccccaatgggaatcatact

SEQ ID NO: 634587 - DNA, 19 bp, Mus musculus
  siRNA target sequence for Cr2 (NM_007758.1,2719-2737).
ggaatgtcagtcatgtaca

SEQ ID NO: 634588 - DNA, 19 bp, Mus musculus
  siRNA target sequence for Cr2 (NM_007758.1,2762-2780).
ctggagaggcacgtcttat

SEQ ID NO: 634589 - DNA, 19 bp, Mus musculus
  siRNA target sequence for Cr2 (NM_007758.1,2764-2782).
ggagaggcacgtcttatct

SEQ ID NO: 634590 - DNA, 19 bp, Mus musculus
  siRNA target sequence for Cr2 (NM_007758.1,2861-2879).
gaatccagaagggatttca

SEQ ID NO: 634591 - DNA, 19 bp, Mus musculus
  siRNA target sequence for Cr2 (NM_007758.1,2881-2899).
cctgggaaaacctatcgat

SEQ ID NO: 634592 - DNA, 19 bp, Mus musculus
  siRNA target sequence for Cr2 (NM_007758.1,2882-2900).
ctgggaaaacctatcgatt

SEQ ID NO: 634593 - DNA, 19 bp, Mus musculus
  siRNA target sequence for Cr2 (NM_007758.1,2992-3010).
cccttggctctttgcaaat

SEQ ID NO: 634594 - DNA, 19 bp, Mus musculus
  siRNA target sequence for Cr2 (NM_007758.1,3005-3023).
gcaaataccggtcaactat

SEQ ID NO: 634595 - DNA, 19 bp, Mus musculus
  siRNA target sequence for Cr2 (NM_007758.1,3006-3024).
caaataccggtcaactatt

SEQ ID NO: 634596 - DNA, 19 bp, Mus musculus
  siRNA target sequence for Cr2 (NM_007758.1,3014-3032).
ggtcaactattcctcttat

SEQ ID NO: 634597 - DNA, 19 bp, Mus musculus
  siRNA target sequence for Cr2 (NM_007758.1,3046-3064).
gtgggctcagcacttatca

SEQ ID NO: 634598 - DNA, 19 bp, Mus musculus
  siRNA target sequence for Cr2 (NM_007758.1,3048-3066).
gggctcagcacttatcatt

SEQ ID NO: 634599 - DNA, 19 bp, Mus musculus
  siRNA target sequence for Cr2 (NM_007758.1,3074-3092).
gtgtcggcttctgtatgat

SEQ ID NO: 634600 - DNA, 19 bp, Mus musculus
  siRNA target sequence for Cr2 (NM_007758.1,3076-3094).
gtcggcttctgtatgatat

SEQ ID NO: 634601 - DNA, 19 bp, Mus musculus
  siRNA target sequence for Cr2 (NM_007758.1,3078-3096).
cggcttctgtatgatatta

SEQ ID NO: 634602 - DNA, 19 bp, Mus musculus
  siRNA target sequence for Cr2 (NM_007758.1,3079-3097).
ggcttctgtatgatattaa

SEQ ID NO: 634603 - DNA, 19 bp, Mus musculus
  siRNA target sequence for Cr2 (NM_007758.1,3080-3098).
gcttctgtatgatattaaa

SEQ ID NO: 634604 - DNA, 19 bp, Mus musculus
  siRNA target sequence for Cr2 (NM_007758.1,3106-3124).
gaaagcaattattatacaa

SEQ ID NO: 634605 - DNA, 19 bp, Mus musculus
  siRNA target sequence for Cr2 (NM_007758.1,3161-3179).
cacgagaagtatattctat

SEQ ID NO: 634606 - DNA, 19 bp, Mus musculus
  siRNA target sequence for Cr2 (NM_007758.1,3164-3182).
gagaagtatattctattga

SEQ ID NO: 634607 - DNA, 19 bp, Mus musculus
  siRNA target sequence for Crlf1 (NM_018827.1,298-316).
gcaagctacctgctctata

SEQ ID NO: 634608 - DNA, 19 bp, Mus musculus
  siRNA target sequence for Crlf1 (NM_018827.1,389-407).
ctgtcccgcctccttaaca

SEQ ID NO: 634609 - DNA, 19 bp, Mus musculus
  siRNA target sequence for Crlf1 (NM_018827.1,424-442).
ggccctggctaaccttaat

SEQ ID NO: 634610 - DNA, 19 bp, Mus musculus
  siRNA target sequence for Crlf1 (NM_018827.1,558-576).
gctggtcccggaacatgaa

SEQ ID NO: 634611 - DNA, 19 bp, Mus musculus
  siRNA target sequence for Crlf1 (NM_018827.1,605-623).
gcacacggggagacattct

SEQ ID NO: 634612 - DNA, 19 bp, Mus musculus
  siRNA target sequence for Crlf1 (NM_018827.1,630-648).
ccaactactccctcaagta

SEQ ID NO: 634613 - DNA, 19 bp, Mus musculus
  siRNA target sequence for Crlf1 (NM_018827.1,657-675).
ggtggtacggtcaggataa

SEQ ID NO: 634614 - DNA, 19 bp, Mus musculus
  siRNA target sequence for Crlf1 (NM_018827.1,661-679).
gtacggtcaggataacaca

SEQ ID NO: 634615 - DNA, 19 bp, Mus musculus
  siRNA target sequence for Crlf1 (NM_018827.1,908-926).
ccaccagctctcaaggatt

SEQ ID NO: 634616 - DNA, 19 bp, Mus musculus
  siRNA target sequence for Crlf1 (NM_018827.1,909-927).
caccagctctcaaggattt

SEQ ID NO: 634617 - DNA, 19 bp, Mus musculus
  siRNA target sequence for Crlf1 (NM_018827.1,1079-1097).
gggatctatgggtcgaaaa

SEQ ID NO: 634618 - DNA, 19 bp, Mus musculus
  siRNA target sequence for Crlf1 (NM_018827.1,1080-1098).
ggatctatgggtcgaaaaa

SEQ ID NO: 634619 - DNA, 19 bp, Mus musculus
  siRNA target sequence for Crlf1 (NM_018827.1,1262-1280).
gcatactgctcgaacctta

SEQ ID NO: 634620 - DNA, 19 bp, Mus musculus
  siRNA target sequence for Crlf3 (NM_018776.1,248-266).
cccttgggaagctattgga

SEQ ID NO: 634621 - DNA, 19 bp, Mus musculus
  siRNA target sequence for Crlf3 (NM_018776.1,249-267).
ccttgggaagctattggat

SEQ ID NO: 634622 - DNA, 19 bp, Mus musculus
  siRNA target sequence for Crlf3 (NM_018776.1,272-290).
gattggtgacccttttgca

SEQ ID NO: 634623 - DNA, 19 bp, Mus musculus
  siRNA target sequence for Crlf3 (NM_018776.1,430-448).
gataaactgtggaacttta

SEQ ID NO: 634624 - DNA, 19 bp, Mus musculus
  siRNA target sequence for Crlf3 (NM_018776.1,450-468).
caaaaaggcctcacacatt

SEQ ID NO: 634625 - DNA, 19 bp, Mus musculus
  siRNA target sequence for Crlf3 (NM_018776.1,492-510).
gcccttgctagttgatgta

SEQ ID NO: 634626 - DNA, 19 bp, Mus musculus
  siRNA target sequence for Crlf3 (NM_018776.1,524-542).
ctcagttggacgattccat

SEQ ID NO: 634627 - DNA, 19 bp, Mus musculus
  siRNA target sequence for Crlf3 (NM_018776.1,528-546).
gttggacgattccattctt

SEQ ID NO: 634628 - DNA, 19 bp, Mus musculus
  siRNA target sequence for Crlf3 (NM_018776.1,532-550).
gacgattccattcttaaca

SEQ ID NO: 634629 - DNA, 19 bp, Mus musculus
  siRNA target sequence for Crlf3 (NM_018776.1,534-552).
cgattccattcttaacata

SEQ ID NO: 634630 - DNA, 19 bp, Mus musculus
  siRNA target sequence for Crlf3 (NM_018776.1,540-558).
cattcttaacatagtgaaa

SEQ ID NO: 634631 - DNA, 19 bp, Mus musculus
  siRNA target sequence for Crlf3 (NM_018776.1,598-616).
ccagtacagattgaagaat

SEQ ID NO: 634632 - DNA, 19 bp, Mus musculus
  siRNA target sequence for Crlf3 (NM_018776.1,691-709).
cttcagttccgcaaatgta

SEQ ID NO: 634633 - DNA, 19 bp, Mus musculus
  siRNA target sequence for Crlf3 (NM_018776.1,699-717).
ccgcaaatgtactgcaaat

SEQ ID NO: 634634 - DNA, 19 bp, Mus musculus
  siRNA target sequence for Crlf3 (NM_018776.1,740-758).
gttctgaaacggagttcat

SEQ ID NO: 634635 - DNA, 19 bp, Mus musculus
  siRNA target sequence for Crlf3 (NM_018776.1,743-761).
ctgaaacggagttcatagt

SEQ ID NO: 634636 - DNA, 19 bp, Mus musculus
  siRNA target sequence for Crlf3 (NM_018776.1,745-763).
gaaacggagttcatagtgt

SEQ ID NO: 634637 - DNA, 19 bp, Mus musculus
  siRNA target sequence for Crlf3 (NM_018776.1,910-928).
ctgagcagtcgaagaaata

SEQ ID NO: 634638 - DNA, 19 bp, Mus musculus
  siRNA target sequence for Crlf3 (NM_018776.1,1007-1025).
cattcagagttgaaactgt

SEQ ID NO: 634639 - DNA, 19 bp, Mus musculus
  siRNA target sequence for Crlf3 (NM_018776.1,1121-1139).
cgaatggtgcagtctttgt

SEQ ID NO: 634640 - DNA, 19 bp, Mus musculus
  siRNA target sequence for Crlf3 (NM_018776.1,1130-1148).
cagtctttgtcaatggaaa

SEQ ID NO: 634641 - DNA, 19 bp, Mus musculus
  siRNA target sequence for Crlf3 (NM_018776.1,1187-1205).
ccactgtcacatttgatat

SEQ ID NO: 634642 - DNA, 19 bp, Mus musculus
  siRNA target sequence for Crlf3 (NM_018776.1,1190-1208).
ctgtcacatttgatatcga

SEQ ID NO: 634643 - DNA, 19 bp, Mus musculus
  siRNA target sequence for Crlf3 (NM_018776.1,1213-1231).
gtgactctaggaacttcta

SEQ ID NO: 634644 - DNA, 19 bp, Mus musculus
  siRNA target sequence for Crlf3 (NM_018776.1,1285-1303).
cgggaggtggtgtttgact

SEQ ID NO: 634645 - DNA, 19 bp, Mus musculus
  siRNA target sequence for Cxadr (NM_009988.1,189-207).
ccgaacagaggatcgaaaa

SEQ ID NO: 634646 - DNA, 19 bp, Mus musculus
  siRNA target sequence for Cxadr (NM_009988.1,190-208).
cgaacagaggatcgaaaaa

SEQ ID NO: 634647 - DNA, 19 bp, Mus musculus
  siRNA target sequence for Cxadr (NM_009988.1,226-244).
gtatctaccatgcaagttt

SEQ ID NO: 634648 - DNA, 19 bp, Mus musculus
  siRNA target sequence for Cxadr (NM_009988.1,297-315).
cgtctgataaccagatagt

SEQ ID NO: 634649 - DNA, 19 bp, Mus musculus
  siRNA target sequence for Cxadr (NM_009988.1,361-379).
ctactatccggatctgaaa

SEQ ID NO: 634650 - DNA, 19 bp, Mus musculus
  siRNA target sequence for Cxadr (NM_009988.1,380-398).
ggacgggtacattttacga

SEQ ID NO: 634651 - DNA, 19 bp, Mus musculus
  siRNA target sequence for Cxadr (NM_009988.1,417-435).
gcgacgcatctataaatgt

SEQ ID NO: 634652 - DNA, 19 bp, Mus musculus
  siRNA target sequence for Cxadr (NM_009988.1,489-507).
cccctggggttgcaaataa

SEQ ID NO: 634653 - DNA, 19 bp, Mus musculus
  siRNA target sequence for Cxadr (NM_009988.1,491-509).
cctggggttgcaaataaga

SEQ ID NO: 634654 - DNA, 19 bp, Mus musculus
  siRNA target sequence for Cxadr (NM_009988.1,492-510).
ctggggttgcaaataagaa

SEQ ID NO: 634655 - DNA, 19 bp, Mus musculus
  siRNA target sequence for Cxadr (NM_009988.1,567-585).
cggaagagattggaaatga

SEQ ID NO: 634656 - DNA, 19 bp, Mus musculus
  siRNA target sequence for Cxadr (NM_009988.1,569-587).
gaagagattggaaatgact

SEQ ID NO: 634657 - DNA, 19 bp, Mus musculus
  siRNA target sequence for Cxadr (NM_009988.1,615-633).
gctcccttccactacagtt

SEQ ID NO: 634658 - DNA, 19 bp, Mus musculus
  siRNA target sequence for Cxadr (NM_009988.1,619-637).
ccttccactacagtttgaa

SEQ ID NO: 634659 - DNA, 19 bp, Mus musculus
  siRNA target sequence for Cxadr (NM_009988.1,620-638).
cttccactacagtttgaat

SEQ ID NO: 634660 - DNA, 19 bp, Mus musculus
  siRNA target sequence for Cxadr (NM_009988.1,672-690).
cgccatggctggcagaaat

SEQ ID NO: 634661 - DNA, 19 bp, Mus musculus
  siRNA target sequence for Cxadr (NM_009988.1,691-709).
gacgtcaccagttatatct

SEQ ID NO: 634662 - DNA, 19 bp, Mus musculus
  siRNA target sequence for Cxadr (NM_009988.1,693-711).
cgtcaccagttatatctgt

SEQ ID NO: 634663 - DNA, 19 bp, Mus musculus
  siRNA target sequence for Cxadr (NM_009988.1,718-736).
cgccagttctgagtattct

SEQ ID NO: 634664 - DNA, 19 bp, Mus musculus
  siRNA target sequence for Cxadr (NM_009988.1,1026-1044).
ccatgtccccctctaacat

SEQ ID NO: 634665 - DNA, 19 bp, Mus musculus
  siRNA target sequence for Cxadr (NM_009988.1,1056-1074).
ccaagacgcagtataacca

SEQ ID NO: 634666 - DNA, 19 bp, Mus musculus
  siRNA target sequence for Cxadr (NM_009988.1,1121-1139).
gcacccgctaagttcaagt

SEQ ID NO: 634667 - DNA, 19 bp, Mus musculus
  siRNA target sequence for Cxadr (NM_009988.1,1122-1140).
cacccgctaagttcaagta

SEQ ID NO: 634668 - DNA, 19 bp, Mus musculus
  siRNA target sequence for Cxadr (NM_009988.1,1147-1165).
caagaccgatggcattaca

SEQ ID NO: 634669 - DNA, 19 bp, Mus musculus
  siRNA target sequence for D430039N05Rik (NM_175514.1,244-262).
ggctccagtgtccgtattt

SEQ ID NO: 634670 - DNA, 19 bp, Mus musculus
  siRNA target sequence for D430039N05Rik (NM_175514.1,249-267).
cagtgtccgtatttatgct

SEQ ID NO: 634671 - DNA, 19 bp, Mus musculus
  siRNA target sequence for D430039N05Rik (NM_175514.1,255-273).
ccgtatttatgctgaaagt

SEQ ID NO: 634672 - DNA, 19 bp, Mus musculus
  siRNA target sequence for D430039N05Rik (NM_175514.1,323-341).
gaggtgtttgttaactact

SEQ ID NO: 634673 - DNA, 19 bp, Mus musculus
  siRNA target sequence for D430039N05Rik (NM_175514.1,337-355).
ctactcgaagacgaattct

SEQ ID NO: 634674 - DNA, 19 bp, Mus musculus
  siRNA target sequence for D430039N05Rik (NM_175514.1,340-358).
ctcgaagacgaattctaca

SEQ ID NO: 634675 - DNA, 19 bp, Mus musculus
  siRNA target sequence for D430039N05Rik (NM_175514.1,369-387).
gcaatggagcagtattgat

SEQ ID NO: 634676 - DNA, 19 bp, Mus musculus
  siRNA target sequence for D430039N05Rik (NM_175514.1,375-393).
gagcagtattgataaaagt

SEQ ID NO: 634677 - DNA, 19 bp, Mus musculus
  siRNA target sequence for D430039N05Rik (NM_175514.1,401-419).
cagttaggactcagcttaa

SEQ ID NO: 634678 - DNA, 19 bp, Mus musculus
  siRNA target sequence for D430039N05Rik (NM_175514.1,414-432).
gcttaaccatcgttgctta

SEQ ID NO: 634679 - DNA, 19 bp, Mus musculus
  siRNA target sequence for D430039N05Rik (NM_175514.1,437-455).
gatggctacgtcttgacat

SEQ ID NO: 634680 - DNA, 19 bp, Mus musculus
  siRNA target sequence for D430039N05Rik (NM_175514.1,471-489).
ctggaaggatgccaatata

SEQ ID NO: 634681 - DNA, 19 bp, Mus musculus
  siRNA target sequence for D430039N05Rik (NM_175514.1,473-491).
ggaaggatgccaatatatt

SEQ ID NO: 634682 - DNA, 19 bp, Mus musculus
  siRNA target sequence for D430039N05Rik (NM_175514.1,518-536).
caaagccaagcaaatatat

SEQ ID NO: 634683 - DNA, 19 bp, Mus musculus
  siRNA target sequence for D430039N05Rik (NM_175514.1,528-546).
caaatatatggctctttga

SEQ ID NO: 634684 - DNA, 19 bp, Mus musculus
  siRNA target sequence for D430039N05Rik (NM_175514.1,545-563).
gaagacaccgttttgatta

SEQ ID NO: 634685 - DNA, 19 bp, Mus musculus
  siRNA target sequence for D430039N05Rik (NM_175514.1,559-577).
gattacaggaaaattagct

SEQ ID NO: 634686 - DNA, 19 bp, Mus musculus
  siRNA target sequence for D430039N05Rik (NM_175514.1,583-601).
caaatctcaaccaagtgtt

SEQ ID NO: 634687 - DNA, 19 bp, Mus musculus
  siRNA target sequence for D430039N05Rik (NM_175514.1,588-606).
ctcaaccaagtgttcagtt

SEQ ID NO: 634688 - DNA, 19 bp, Mus musculus
  siRNA target sequence for D430039N05Rik (NM_175514.1,649-667).
caacgtgactggctatcta

SEQ ID NO: 634689 - DNA, 19 bp, Mus musculus
  siRNA target sequence for D430039N05Rik (NM_175514.1,652-670).
cgtgactggctatctaaca

SEQ ID NO: 634690 - DNA, 19 bp, Mus musculus
  siRNA target sequence for D430039N05Rik (NM_175514.1,655-673).
gactggctatctaacagtt

SEQ ID NO: 634691 - DNA, 19 bp, Mus musculus
  siRNA target sequence for D430039N05Rik (NM_175514.1,671-689).
gttctacaccagtttttaa

SEQ ID NO: 634692 - DNA, 19 bp, Mus musculus
  siRNA target sequence for D430039N05Rik (NM_175514.1,708-726).
ctgcgactggagtcactta

SEQ ID NO: 634693 - DNA, 19 bp, Mus musculus
  siRNA target sequence for D430039N05Rik (NM_175514.1,710-728).
gcgactggagtcacttata

SEQ ID NO: 634694 - DNA, 19 bp, Mus musculus
  siRNA target sequence for D430039N05Rik (NM_175514.1,711-729).
cgactggagtcacttataa

SEQ ID NO: 634695 - DNA, 19 bp, Mus musculus
  siRNA target sequence for D430039N05Rik (NM_175514.1,754-772).
gactcctcatgctgcaata

SEQ ID NO: 634696 - DNA, 19 bp, Mus musculus
  siRNA target sequence for D430039N05Rik (NM_175514.1,767-785).
gcaatatgtgtgaaaatat

SEQ ID NO: 634697 - DNA, 19 bp, Mus musculus
  siRNA target sequence for D430039N05Rik (NM_175514.1,768-786).
caatatgtgtgaaaatata

SEQ ID NO: 634698 - DNA, 19 bp, Mus musculus
  siRNA target sequence for D430039N05Rik (NM_175514.1,812-830).
gatggctctatccatgttt

SEQ ID NO: 634699 - DNA, 19 bp, Mus musculus
  siRNA target sequence for D430039N05Rik (NM_175514.1,833-851).
cttccccttctacatacaa

SEQ ID NO: 634700 - DNA, 19 bp, Mus musculus
  siRNA target sequence for D430039N05Rik (NM_175514.1,838-856).
ccttctacatacaagtaat

SEQ ID NO: 634701 - DNA, 19 bp, Mus musculus
  siRNA target sequence for D430039N05Rik (NM_175514.1,881-899).
gcttggacatttgatatga

SEQ ID NO: 634702 - DNA, 19 bp, Mus musculus
  siRNA target sequence for D430039N05Rik (NM_175514.1,882-900).
cttggacatttgatatgaa

SEQ ID NO: 634703 - DNA, 19 bp, Mus musculus
  siRNA target sequence for D430039N05Rik (NM_175514.1,941-959).
gagcataacagtcatttga

SEQ ID NO: 634704 - DNA, 19 bp, Mus musculus
  siRNA target sequence for D430039N05Rik (NM_175514.1,966-984).
cctatgatgcaccacattt

SEQ ID NO: 634705 - DNA, 19 bp, Mus musculus
  siRNA target sequence for D430039N05Rik (NM_175514.1,1017-1035).
ctctagatttcggcataaa

SEQ ID NO: 634706 - DNA, 19 bp, Mus musculus
  siRNA target sequence for D430039N05Rik (NM_175514.1,1029-1047).
gcataaatgacgatttcca

SEQ ID NO: 634707 - DNA, 19 bp, Mus musculus
  siRNA target sequence for D430039N05Rik (NM_175514.1,1030-1048).
cataaatgacgatttccaa

SEQ ID NO: 634708 - DNA, 19 bp, Mus musculus
  siRNA target sequence for D430039N05Rik (NM_175514.1,1092-1110).
gggggacgatcgtcatcat

SEQ ID NO: 634709 - DNA, 19 bp, Mus musculus
  siRNA target sequence for D430039N05Rik (NM_175514.1,1096-1114).
gacgatcgtcatcatcatt

SEQ ID NO: 634710 - DNA, 19 bp, Mus musculus
  siRNA target sequence for D430039N05Rik (NM_175514.1,1216-1234).
gacaacctcgacaacacat

SEQ ID NO: 634711 - DNA, 19 bp, Mus musculus
  siRNA target sequence for D430039N05Rik (NM_175514.1,1218-1236).
caacctcgacaacacatat

SEQ ID NO: 634712 - DNA, 19 bp, Mus musculus
  siRNA target sequence for D430039N05Rik (NM_175514.1,1221-1239).
cctcgacaacacatataaa

SEQ ID NO: 634713 - DNA, 19 bp, Mus musculus
  siRNA target sequence for D430039N05Rik (NM_175514.1,1222-1240).
ctcgacaacacatataaat

SEQ ID NO: 634714 - DNA, 19 bp, Mus musculus
  siRNA target sequence for D430039N05Rik (NM_175514.1,1224-1242).
cgacaacacatataaatca

SEQ ID NO: 634715 - DNA, 19 bp, Mus musculus
  siRNA target sequence for D430039N05Rik (NM_175514.1,1225-1243).
gacaacacatataaatcat

SEQ ID NO: 634716 - DNA, 19 bp, Mus musculus
  siRNA target sequence for D430039N05Rik (NM_175514.1,1227-1245).
caacacatataaatcatat

SEQ ID NO: 634717 - DNA, 19 bp, Mus musculus
  siRNA target sequence for D430039N05Rik (NM_175514.1,1288-1306).
gttgttcaatgccaaaact

SEQ ID NO: 634718 - DNA, 19 bp, Mus musculus
  siRNA target sequence for D430039N05Rik (NM_175514.1,1372-1390).
gaaaactcgggacaacttt

SEQ ID NO: 634719 - DNA, 19 bp, Mus musculus
  siRNA target sequence for D430039N05Rik (NM_175514.1,1379-1397).
cgggacaactttaaaatct

SEQ ID NO: 634720 - DNA, 19 bp, Mus musculus
  siRNA target sequence for D430039N05Rik (NM_175514.1,1380-1398).
gggacaactttaaaatcta

SEQ ID NO: 634721 - DNA, 19 bp, Mus musculus
  siRNA target sequence for D430039N05Rik (NM_175514.1,1418-1436).
ctgtcagtcaatcacaatt

SEQ ID NO: 634722 - DNA, 19 bp, Mus musculus
  siRNA target sequence for D430039N05Rik (NM_175514.1,1420-1438).
gtcagtcaatcacaattat

SEQ ID NO: 634723 - DNA, 19 bp, Mus musculus
  siRNA target sequence for D430039N05Rik (NM_175514.1,1424-1442).
gtcaatcacaattattcaa

SEQ ID NO: 634724 - DNA, 19 bp, Mus musculus
  siRNA target sequence for D430039N05Rik (NM_175514.1,1484-1502).
cagcctaagcatattaaca

SEQ ID NO: 634725 - DNA, 19 bp, Mus musculus
  siRNA target sequence for D430039N05Rik (NM_175514.1,1524-1542).
gtgacgctcaagaggaaaa

SEQ ID NO: 634726 - DNA, 19 bp, Mus musculus
  siRNA target sequence for D430039N05Rik (NM_175514.1,1526-1544).
gacgctcaagaggaaaaga

SEQ ID NO: 634727 - DNA, 19 bp, Mus musculus
  siRNA target sequence for D430039N05Rik (NM_175514.1,1666-1684).
gttacatgccgctaagtct

SEQ ID NO: 634728 - DNA, 19 bp, Mus musculus
  siRNA target sequence for D430039N05Rik (NM_175514.1,1675-1693).
cgctaagtctgccacttta

SEQ ID NO: 634729 - DNA, 19 bp, Mus musculus
  siRNA target sequence for D430039N05Rik (NM_175514.1,1695-1713).
caagaaagggacaattggt

SEQ ID NO: 634730 - DNA, 19 bp, Mus musculus
  siRNA target sequence for D430039N05Rik (NM_175514.1,1738-1756).
gaacagagagaactttaca

SEQ ID NO: 634731 - DNA, 19 bp, Mus musculus
  siRNA target sequence for D430039N05Rik (NM_175514.1,1755-1773).
cacaaacattgcccaaaat

SEQ ID NO: 634732 - DNA, 19 bp, Mus musculus
  siRNA target sequence for D430039N05Rik (NM_175514.1,1766-1784).
cccaaaatgccgatgcatt

SEQ ID NO: 634733 - DNA, 19 bp, Mus musculus
  siRNA target sequence for D430039N05Rik (NM_175514.1,1807-1825).
cagagaagaagacattgta

SEQ ID NO: 634734 - DNA, 19 bp, Mus musculus
  siRNA target sequence for D430039N05Rik (NM_175514.1,1862-1880).
gattggagccgatattcca

SEQ ID NO: 634735 - DNA, 19 bp, Mus musculus
  siRNA target sequence for D430039N05Rik (NM_175514.1,2067-2085).
cctttatagacctgaaaaa

SEQ ID NO: 634736 - DNA, 19 bp, Mus musculus
  siRNA target sequence for D430039N05Rik (NM_175514.1,2278-2296).
cgcattgaggcacatctta

SEQ ID NO: 634737 - DNA, 19 bp, Mus musculus
  siRNA target sequence for D430039N05Rik (NM_175514.1,2280-2298).
cattgaggcacatcttaga

SEQ ID NO: 634738 - DNA, 19 bp, Mus musculus
  siRNA target sequence for D430039N05Rik (NM_175514.1,2300-2318).
gggggaagcggggttatta

SEQ ID NO: 634739 - DNA, 19 bp, Mus musculus
  siRNA target sequence for D430039N05Rik (NM_175514.1,2301-2319).
ggggaagcggggttattat

SEQ ID NO: 634740 - DNA, 19 bp, Mus musculus
  siRNA target sequence for D430039N05Rik (NM_175514.1,2304-2322).
gaagcggggttattatcga

SEQ ID NO: 634741 - DNA, 19 bp, Mus musculus
  siRNA target sequence for D430039N05Rik (NM_175514.1,2377-2395).
caacacatcccccactaaa

SEQ ID NO: 634742 - DNA, 19 bp, Mus musculus
  siRNA target sequence for D430039N05Rik (NM_175514.1,2412-2430).
cgccactagccaaaagaga

SEQ ID NO: 634743 - DNA, 19 bp, Mus musculus
  siRNA target sequence for D430039N05Rik (NM_175514.1,2413-2431).
gccactagccaaaagagat

SEQ ID NO: 634744 - DNA, 19 bp, Mus musculus
  siRNA target sequence for D430039N05Rik (NM_175514.1,2414-2432).
ccactagccaaaagagata

SEQ ID NO: 634745 - DNA, 19 bp, Mus musculus
  siRNA target sequence for D430039N05Rik (NM_175514.1,2427-2445).
gagatagcaagactaacat

SEQ ID NO: 634746 - DNA, 19 bp, Mus musculus
  siRNA target sequence for D430039N05Rik (NM_175514.1,2468-2486).
ccactgattcccctaaact

SEQ ID NO: 634747 - DNA, 19 bp, Mus musculus
  siRNA target sequence for D930018N13 (NM_183313.1,689-707).
gcagggcgtgccttgcatt

SEQ ID NO: 634748 - DNA, 19 bp, Mus musculus
  siRNA target sequence for D930018N13 (NM_183313.1,692-710).
gggcgtgccttgcatttct

SEQ ID NO: 634749 - DNA, 19 bp, Mus musculus
  siRNA target sequence for D930018N13 (NM_183313.1,693-711).
ggcgtgccttgcatttctt

SEQ ID NO: 634750 - DNA, 19 bp, Mus musculus
  siRNA target sequence for D930018N13 (NM_183313.1,727-745).
gaaattgtcctggatactt

SEQ ID NO: 634751 - DNA, 19 bp, Mus musculus
  siRNA target sequence for D930018N13 (NM_183313.1,771-789).
gctgggggcaagtttggtt

SEQ ID NO: 634752 - DNA, 19 bp, Mus musculus
  siRNA target sequence for D930018N13 (NM_183313.1,821-839).
catccatgctggcagttaa

SEQ ID NO: 634753 - DNA, 19 bp, Mus musculus
  siRNA target sequence for D930018N13 (NM_183313.1,824-842).
ccatgctggcagttaagct

SEQ ID NO: 634754 - DNA, 19 bp, Mus musculus
  siRNA target sequence for D930018N13 (NM_183313.1,833-851).
cagttaagctagagaatat

SEQ ID NO: 634755 - DNA, 19 bp, Mus musculus
  siRNA target sequence for D930018N13 (NM_183313.1,868-886).
gctacagtggatttggtaa

SEQ ID NO: 634756 - DNA, 19 bp, Mus musculus
  siRNA target sequence for D930018N13 (NM_183313.1,869-887).
ctacagtggatttggtaat

SEQ ID NO: 634757 - DNA, 19 bp, Mus musculus
  siRNA target sequence for D930018N13 (NM_183313.1,907-925).
gtagtggatttgccattta

SEQ ID NO: 634758 - DNA, 19 bp, Mus musculus
  siRNA target sequence for D930018N13 (NM_183313.1,1116-1134).
cctaggccagccttactct

SEQ ID NO: 634759 - DNA, 19 bp, Mus musculus
  siRNA target sequence for D930018N13 (NM_183313.1,1182-1200).
ggtcagaggatgttggtta

SEQ ID NO: 634760 - DNA, 19 bp, Mus musculus
  siRNA target sequence for D930018N13 (NM_183313.1,1250-1268).
gacacaggctacaagagtt

SEQ ID NO: 634761 - DNA, 19 bp, Mus musculus
  siRNA target sequence for D930018N13 (NM_183313.1,1309-1327).
ctggaaaggacgtgcttta

SEQ ID NO: 634762 - DNA, 19 bp, Mus musculus
  siRNA target sequence for D930018N13 (NM_183313.1,1373-1391).
gtgtagcagccattttaat

SEQ ID NO: 634763 - DNA, 19 bp, Mus musculus
  siRNA target sequence for D930018N13 (NM_183313.1,1404-1422).
gaaagttactccagaacat

SEQ ID NO: 634764 - DNA, 19 bp, Mus musculus
  siRNA target sequence for Ebag9 (NM_019480.3,330-348).
cactcagtttcggttattt

SEQ ID NO: 634765 - DNA, 19 bp, Mus musculus
  siRNA target sequence for Ebag9 (NM_019480.3,332-350).
ctcagtttcggttatttaa

SEQ ID NO: 634766 - DNA, 19 bp, Mus musculus
  siRNA target sequence for Ebag9 (NM_019480.3,336-354).
gtttcggttatttaaagtt

SEQ ID NO: 634767 - DNA, 19 bp, Mus musculus
  siRNA target sequence for Ebag9 (NM_019480.3,340-358).
cggttatttaaagtttgta

SEQ ID NO: 634768 - DNA, 19 bp, Mus musculus
  siRNA target sequence for Ebag9 (NM_019480.3,375-393).
gttctcgttcctaaagaga

SEQ ID NO: 634769 - DNA, 19 bp, Mus musculus
  siRNA target sequence for Ebag9 (NM_019480.3,380-398).
cgttcctaaagagattaat

SEQ ID NO: 634770 - DNA, 19 bp, Mus musculus
  siRNA target sequence for Ebag9 (NM_019480.3,420-438).
gaaattaagtggagatcaa

SEQ ID NO: 634771 - DNA, 19 bp, Mus musculus
  siRNA target sequence for Ebag9 (NM_019480.3,447-465).
gcccactacagttgattat

SEQ ID NO: 634772 - DNA, 19 bp, Mus musculus
  siRNA target sequence for Ebag9 (NM_019480.3,448-466).
cccactacagttgattatt

SEQ ID NO: 634773 - DNA, 19 bp, Mus musculus
  siRNA target sequence for Ebag9 (NM_019480.3,517-535).
gatgcacccacaagtgtaa

SEQ ID NO: 634774 - DNA, 19 bp, Mus musculus
  siRNA target sequence for Ebag9 (NM_019480.3,521-539).
cacccacaagtgtaaagat

SEQ ID NO: 634775 - DNA, 19 bp, Mus musculus
  siRNA target sequence for Ebag9 (NM_019480.3,563-581).
ctactcagcagaactcttt

SEQ ID NO: 634776 - DNA, 19 bp, Mus musculus
  siRNA target sequence for Ebag9 (NM_019480.3,609-627).
ggacatgacaccaactata

SEQ ID NO: 634777 - DNA, 19 bp, Mus musculus
  siRNA target sequence for Ebag9 (NM_019480.3,620-638).
caactatacggaaaactca

SEQ ID NO: 634778 - DNA, 19 bp, Mus musculus
  siRNA target sequence for Ebag9 (NM_019480.3,657-675).
gagagaaccattgaatttt

SEQ ID NO: 634779 - DNA, 19 bp, Mus musculus
  siRNA target sequence for Ebag9 (NM_019480.3,688-706).
ggtagcacgggtttttcca

SEQ ID NO: 634780 - DNA, 19 bp, Mus musculus
  siRNA target sequence for Ebag9 (NM_019480.3,695-713).
cgggtttttccagtagatt

SEQ ID NO: 634781 - DNA, 19 bp, Mus musculus
  siRNA target sequence for Ebag9 (NM_019480.3,729-747).
catgccttttattcatcaa

SEQ ID NO: 634782 - DNA, 19 bp, Mus musculus
  siRNA target sequence for Ebag9 (NM_019480.3,732-750).
gccttttattcatcaatct

SEQ ID NO: 634783 - DNA, 19 bp, Mus musculus
  siRNA target sequence for Ebag9 (NM_019480.3,754-772).
gaattaggtgacttagata

SEQ ID NO: 634784 - DNA, 19 bp, Mus musculus
  siRNA target sequence for Ebag9 (NM_019480.3,910-928).
gcgcagcgcctgatgaaga

SEQ ID NO: 634785 - DNA, 19 bp, Mus musculus
  siRNA target sequence for Edar (NM_010100.1,266-284).
cacgtcggggactgcaaat

SEQ ID NO: 634786 - DNA, 19 bp, Mus musculus
  siRNA target sequence for Edar (NM_010100.1,269-287).
gtcggggactgcaaatgga

SEQ ID NO: 634787 - DNA, 19 bp, Mus musculus
  siRNA target sequence for Edar (NM_010100.1,351-369).
gtggtgagaacgaatacca

SEQ ID NO: 634788 - DNA, 19 bp, Mus musculus
  siRNA target sequence for Edar (NM_010100.1,570-588).
caggagacatggaaaacga

SEQ ID NO: 634789 - DNA, 19 bp, Mus musculus
  siRNA target sequence for Edar (NM_010100.1,606-624).
gtctccctggctactacat

SEQ ID NO: 634790 - DNA, 19 bp, Mus musculus
  siRNA target sequence for Edar (NM_010100.1,615-633).
gctactacatgctggaaaa

SEQ ID NO: 634791 - DNA, 19 bp, Mus musculus
  siRNA target sequence for Edar (NM_010100.1,634-652).
cagacccaggaacatctat

SEQ ID NO: 634792 - DNA, 19 bp, Mus musculus
  siRNA target sequence for Edar (NM_010100.1,683-701).
cctcccaacaccaaggaat

SEQ ID NO: 634793 - DNA, 19 bp, Mus musculus
  siRNA target sequence for Edar (NM_010100.1,809-827).
ctggccaccgccctgatta

SEQ ID NO: 634794 - DNA, 19 bp, Mus musculus
  siRNA target sequence for Edar (NM_010100.1,811-829).
ggccaccgccctgattatt

SEQ ID NO: 634795 - DNA, 19 bp, Mus musculus
  siRNA target sequence for Edar (NM_010100.1,830-848).
gccatgtctacgatcttca

SEQ ID NO: 634796 - DNA, 19 bp, Mus musculus
  siRNA target sequence for Edar (NM_010100.1,831-849).
ccatgtctacgatcttcat

SEQ ID NO: 634797 - DNA, 19 bp, Mus musculus
  siRNA target sequence for Edar (NM_010100.1,997-1015).
ggtgacgttccctgagaat

SEQ ID NO: 634798 - DNA, 19 bp, Mus musculus
  siRNA target sequence for Edar (NM_010100.1,1045-1063).
cacaaagacccccaaaagt

SEQ ID NO: 634799 - DNA, 19 bp, Mus musculus
  siRNA target sequence for Edar (NM_010100.1,1051-1069).
gacccccaaaagtgagaat

SEQ ID NO: 634800 - DNA, 19 bp, Mus musculus
  siRNA target sequence for Edar (NM_010100.1,1054-1072).
ccccaaaagtgagaatgat

SEQ ID NO: 634801 - DNA, 19 bp, Mus musculus
  siRNA target sequence for Edar (NM_010100.1,1161-1179).
gtctgctgtcgctagttca

SEQ ID NO: 634802 - DNA, 19 bp, Mus musculus
  siRNA target sequence for Edar (NM_010100.1,1261-1279).
caacgtgtgtggtgttgtt

SEQ ID NO: 634803 - DNA, 19 bp, Mus musculus
  siRNA target sequence for Edar (NM_010100.1,1264-1282).
cgtgtgtggtgttgttgaa

SEQ ID NO: 634804 - DNA, 19 bp, Mus musculus
  siRNA target sequence for Edar (NM_010100.1,1337-1355).
ctcagctctacatacaact

SEQ ID NO: 634805 - DNA, 19 bp, Mus musculus
  siRNA target sequence for Edar (NM_010100.1,1358-1376).
gagaaggcggtcgtgaaaa

SEQ ID NO: 634806 - DNA, 19 bp, Mus musculus
  siRNA target sequence for Edar (NM_010100.1,1360-1378).
gaaggcggtcgtgaaaaca

SEQ ID NO: 634807 - DNA, 19 bp, Mus musculus
  siRNA target sequence for Edar (NM_010100.1,1536-1554).
ccttgtgtgcagacatatt

SEQ ID NO: 634808 - DNA, 19 bp, Mus musculus
  siRNA target sequence for Eps8l3 (NM_133867.1,207-225).
cttgcaccggaaggaatat

SEQ ID NO: 634809 - DNA, 19 bp, Mus musculus
  siRNA target sequence for Eps8l3 (NM_133867.1,268-286).
gtggagcatctgatgacat

SEQ ID NO: 634810 - DNA, 19 bp, Mus musculus
  siRNA target sequence for Eps8l3 (NM_133867.1,446-464).
cttaccgcctggacaacat

SEQ ID NO: 634811 - DNA, 19 bp, Mus musculus
  siRNA target sequence for Eps8l3 (NM_133867.1,999-1017).
gacaaaacttgggagaaaa

SEQ ID NO: 634812 - DNA, 19 bp, Mus musculus
  siRNA target sequence for Eps8l3 (NM_133867.1,1043-1061).
cacaagcagagtacattga

SEQ ID NO: 634813 - DNA, 19 bp, Mus musculus
  siRNA target sequence for Eps8l3 (NM_133867.1,1045-1063).
caagcagagtacattgact

SEQ ID NO: 634814 - DNA, 19 bp, Mus musculus
  siRNA target sequence for Eps8l3 (NM_133867.1,1199-1217).
gccttccagccaaagtgat

SEQ ID NO: 634815 - DNA, 19 bp, Mus musculus
  siRNA target sequence for Eps8l3 (NM_133867.1,1351-1369).
ccctaccaacccacattct

SEQ ID NO: 634816 - DNA, 19 bp, Mus musculus
  siRNA target sequence for Eps8l3 (NM_133867.1,1352-1370).
cctaccaacccacattcta

SEQ ID NO: 634817 - DNA, 19 bp, Mus musculus
  siRNA target sequence for Eps8l3 (NM_133867.1,1398-1416).
ctccatgatgcccataaca

SEQ ID NO: 634818 - DNA, 19 bp, Mus musculus
  siRNA target sequence for Eps8l3 (NM_133867.1,1400-1418).
ccatgatgcccataacaaa

SEQ ID NO: 634819 - DNA, 19 bp, Mus musculus
  siRNA target sequence for Eps8l3 (NM_133867.1,1472-1490).
ctcgggatgagccatacaa

SEQ ID NO: 634820 - DNA, 19 bp, Mus musculus
  siRNA target sequence for Eps8l3 (NM_133867.1,1499-1517).
ctgaatacgaggactcaaa

SEQ ID NO: 634821 - DNA, 19 bp, Mus musculus
  siRNA target sequence for Eps8l3 (NM_133867.1,1543-1561).
ggcagagcagccctgaaaa

SEQ ID NO: 634822 - DNA, 19 bp, Mus musculus
  siRNA target sequence for Eps8l3 (NM_133867.1,1575-1593).
cgagtttgaagcaaggaat

SEQ ID NO: 634823 - DNA, 19 bp, Mus musculus
  siRNA target sequence for Eps8l3 (NM_133867.1,1740-1758).
ccaccgacaaccatccttt

SEQ ID NO: 634824 - DNA, 19 bp, Mus musculus
  siRNA target sequence for Eps8l3 (NM_133867.1,1741-1759).
caccgacaaccatccttta

SEQ ID NO: 634825 - DNA, 19 bp, Mus musculus
  siRNA target sequence for F730004D16Rik (NM_145634.1,250-268).
catgtaagactcttgttga

SEQ ID NO: 634826 - DNA, 19 bp, Mus musculus
  siRNA target sequence for F730004D16Rik (NM_145634.1,440-458).
cattggcccagcaatccaa

SEQ ID NO: 634827 - DNA, 19 bp, Mus musculus
  siRNA target sequence for F730004D16Rik (NM_145634.1,559-577).
ctagctactactctgataa

SEQ ID NO: 634828 - DNA, 19 bp, Mus musculus
  siRNA target sequence for F730004D16Rik (NM_145634.1,750-768).
cccagggaggaggtttcat

SEQ ID NO: 634829 - DNA, 19 bp, Mus musculus
  siRNA target sequence for F730004D16Rik (NM_145634.1,751-769).
ccagggaggaggtttcata

SEQ ID NO: 634830 - DNA, 19 bp, Mus musculus
  siRNA target sequence for F730004D16Rik (NM_145634.1,766-784).
catatgccgctctgacttt

SEQ ID NO: 634831 - DNA, 19 bp, Mus musculus
  siRNA target sequence for Fcrl3 (NM_144559.1,60-78).
ccaacagctctggtactta

SEQ ID NO: 634832 - DNA, 19 bp, Mus musculus
  siRNA target sequence for Fcrl3 (NM_144559.1,193-211).
cccccgaggacaattctat

SEQ ID NO: 634833 - DNA, 19 bp, Mus musculus
  siRNA target sequence for Fcrl3 (NM_144559.1,195-213).
cccgaggacaattctatca

SEQ ID NO: 634834 - DNA, 19 bp, Mus musculus
  siRNA target sequence for Fcrl3 (NM_144559.1,196-214).
ccgaggacaattctatcaa

SEQ ID NO: 634835 - DNA, 19 bp, Mus musculus
  siRNA target sequence for Fcrl3 (NM_144559.1,246-264).
caggatgccaactatgtca

SEQ ID NO: 634836 - DNA, 19 bp, Mus musculus
  siRNA target sequence for Fcrl3 (NM_144559.1,444-462).
gtacggaaggtcacctatt

SEQ ID NO: 634837 - DNA, 19 bp, Mus musculus
  siRNA target sequence for Fcrl3 (NM_144559.1,470-488).
cggcaaaggcaagaagtat

SEQ ID NO: 634838 - DNA, 19 bp, Mus musculus
  siRNA target sequence for Fcrl3 (NM_144559.1,472-490).
gcaaaggcaagaagtattt

SEQ ID NO: 634839 - DNA, 19 bp, Mus musculus
  siRNA target sequence for Fcrl3 (NM_144559.1,559-577).
ggctcattggacacaacaa

SEQ ID NO: 634840 - DNA, 19 bp, Mus musculus
  siRNA target sequence for Fcrl3 (NM_144559.1,639-657).
ccgtggcatcaaatcacat

SEQ ID NO: 634841 - DNA, 19 bp, Mus musculus
  siRNA target sequence for Fcrl3 (NM_144559.1,665-683).
gctgataggactcttgttt

SEQ ID NO: 634842 - DNA, 19 bp, Mus musculus
  siRNA target sequence for Fcrl3 (NM_144559.1,692-710).
cacagtgctgtatttctct

SEQ ID NO: 634843 - DNA, 19 bp, Mus musculus
  siRNA target sequence for Fcrl3 (NM_144559.1,711-729).
gtgcggaggggtcttcaaa

SEQ ID NO: 634844 - DNA, 19 bp, Mus musculus
  siRNA target sequence for Fcrl3 (NM_144559.1,713-731).
gcggaggggtcttcaaagt

SEQ ID NO: 634845 - DNA, 19 bp, Mus musculus
  siRNA target sequence for Fem1b (NM_010193.2,558-576).
cgcttcgacgggtatgtca

SEQ ID NO: 634846 - DNA, 19 bp, Mus musculus
  siRNA target sequence for Fem1b (NM_010193.2,559-577).
gcttcgacgggtatgtcat

SEQ ID NO: 634847 - DNA, 19 bp, Mus musculus
  siRNA target sequence for Fem1b (NM_010193.2,560-578).
cttcgacgggtatgtcatt

SEQ ID NO: 634848 - DNA, 19 bp, Mus musculus
  siRNA target sequence for Fem1b (NM_010193.2,604-622).
ctgcgggagccggacattt

SEQ ID NO: 634849 - DNA, 19 bp, Mus musculus
  siRNA target sequence for Fem1b (NM_010193.2,607-625).
cgggagccggacattttga

SEQ ID NO: 634850 - DNA, 19 bp, Mus musculus
  siRNA target sequence for Fem1b (NM_010193.2,666-684).
cacaccacagtcactaact

SEQ ID NO: 634851 - DNA, 19 bp, Mus musculus
  siRNA target sequence for Fem1b (NM_010193.2,695-713).
gcgggcagcatgctttgat

SEQ ID NO: 634852 - DNA, 19 bp, Mus musculus
  siRNA target sequence for Fem1b (NM_010193.2,791-809).
cctaatgatcgcagcatat

SEQ ID NO: 634853 - DNA, 19 bp, Mus musculus
  siRNA target sequence for Fem1b (NM_010193.2,904-922).
ccgaagctggtcacattga

SEQ ID NO: 634854 - DNA, 19 bp, Mus musculus
  siRNA target sequence for Fem1b (NM_010193.2,912-930).
ggtcacattgacattgtga

SEQ ID NO: 634855 - DNA, 19 bp, Mus musculus
  siRNA target sequence for Fem1b (NM_010193.2,995-1013).
ggccgctgaaagctgtaaa

SEQ ID NO: 634856 - DNA, 19 bp, Mus musculus
  siRNA target sequence for Fem1b (NM_010193.2,1015-1033).
ctgatgtcgttgaactgtt

SEQ ID NO: 634857 - DNA, 19 bp, Mus musculus
  siRNA target sequence for Fem1b (NM_010193.2,1034-1052).
gctctctcatgctgattgt

SEQ ID NO: 634858 - DNA, 19 bp, Mus musculus
  siRNA target sequence for Fem1b (NM_010193.2,1055-1073).
ccgcagaagtcggattgaa

SEQ ID NO: 634859 - DNA, 19 bp, Mus musculus
  siRNA target sequence for Fem1b (NM_010193.2,1088-1106).
gggtgcctcctttgcaaat

SEQ ID NO: 634860 - DNA, 19 bp, Mus musculus
  siRNA target sequence for Fem1b (NM_010193.2,1090-1108).
gtgcctcctttgcaaatga

SEQ ID NO: 634861 - DNA, 19 bp, Mus musculus
  siRNA target sequence for Fem1b (NM_010193.2,1107-1125).
gatcgtgagaactatgaca

SEQ ID NO: 634862 - DNA, 19 bp, Mus musculus
  siRNA target sequence for Fem1b (NM_010193.2,1133-1151).
gacataccactatttatat

SEQ ID NO: 634863 - DNA, 19 bp, Mus musculus
  siRNA target sequence for Fem1b (NM_010193.2,1175-1193).
ggatggtgacaacattctt

SEQ ID NO: 634864 - DNA, 19 bp, Mus musculus
  siRNA target sequence for Fem1b (NM_010193.2,1179-1197).
ggtgacaacattcttgaaa

SEQ ID NO: 634865 - DNA, 19 bp, Mus musculus
  siRNA target sequence for Fem1b (NM_010193.2,1180-1198).
gtgacaacattcttgaaaa

SEQ ID NO: 634866 - DNA, 19 bp, Mus musculus
  siRNA target sequence for Fem1b (NM_010193.2,1218-1236).
catgcttatgggaacagaa

SEQ ID NO: 634867 - DNA, 19 bp, Mus musculus
  siRNA target sequence for Fem1b (NM_010193.2,1295-1313).
catggagggccttatagtt

SEQ ID NO: 634868 - DNA, 19 bp, Mus musculus
  siRNA target sequence for Fem1b (NM_010193.2,1372-1390).
gggctgtctatgctgataa

SEQ ID NO: 634869 - DNA, 19 bp, Mus musculus
  siRNA target sequence for Fem1b (NM_010193.2,1374-1392).
gctgtctatgctgataaca

SEQ ID NO: 634870 - DNA, 19 bp, Mus musculus
  siRNA target sequence for Fem1b (NM_010193.2,1375-1393).
ctgtctatgctgataacat

SEQ ID NO: 634871 - DNA, 19 bp, Mus musculus
  siRNA target sequence for Fem1b (NM_010193.2,1397-1415).
gttcgagcagtgcatcaaa

SEQ ID NO: 634872 - DNA, 19 bp, Mus musculus
  siRNA target sequence for Fem1b (NM_010193.2,1443-1461).
cagaaaggtaacaggaata

SEQ ID NO: 634873 - DNA, 19 bp, Mus musculus
  siRNA target sequence for Fem1b (NM_010193.2,1456-1474).
ggaatacccacaaagatct

SEQ ID NO: 634874 - DNA, 19 bp, Mus musculus
  siRNA target sequence for Fem1b (NM_010193.2,1536-1554).
gacatagagtgcgttttga

SEQ ID NO: 634875 - DNA, 19 bp, Mus musculus
  siRNA target sequence for Fem1b (NM_010193.2,1558-1576).
gcagtgtcttggaaataga

SEQ ID NO: 634876 - DNA, 19 bp, Mus musculus
  siRNA target sequence for Fem1b (NM_010193.2,1620-1638).
cacagtgccatggataact

SEQ ID NO: 634877 - DNA, 19 bp, Mus musculus
  siRNA target sequence for Fem1b (NM_010193.2,1622-1640).
cagtgccatggataactat

SEQ ID NO: 634878 - DNA, 19 bp, Mus musculus
  siRNA target sequence for Fem1b (NM_010193.2,1624-1642).
gtgccatggataactatga

SEQ ID NO: 634879 - DNA, 19 bp, Mus musculus
  siRNA target sequence for Fem1b (NM_010193.2,1641-1659).
gagtgtaacctctatacct

SEQ ID NO: 634880 - DNA, 19 bp, Mus musculus
  siRNA target sequence for Fem1b (NM_010193.2,1643-1661).
gtgtaacctctataccttt

SEQ ID NO: 634881 - DNA, 19 bp, Mus musculus
  siRNA target sequence for Fem1b (NM_010193.2,1690-1708).
cacagtgtagcgaagaaga

SEQ ID NO: 634882 - DNA, 19 bp, Mus musculus
  siRNA target sequence for Fem1b (NM_010193.2,1799-1817).
ctcgaacacaccagttgat

SEQ ID NO: 634883 - DNA, 19 bp, Mus musculus
  siRNA target sequence for Fem1b (NM_010193.2,1801-1819).
cgaacacaccagttgatga

SEQ ID NO: 634884 - DNA, 19 bp, Mus musculus
  siRNA target sequence for Fem1b (NM_010193.2,1802-1820).
gaacacaccagttgatgat

SEQ ID NO: 634885 - DNA, 19 bp, Mus musculus
  siRNA target sequence for Fem1b (NM_010193.2,1812-1830).
gttgatgatttccatacta

SEQ ID NO: 634886 - DNA, 19 bp, Mus musculus
  siRNA target sequence for Fem1b (NM_010193.2,1880-1898).
ctgtggcgctgaggtaaat

SEQ ID NO: 634887 - DNA, 19 bp, Mus musculus
  siRNA target sequence for Fem1b (NM_010193.2,1921-1939).
gtgccctccacattatcgt

SEQ ID NO: 634888 - DNA, 19 bp, Mus musculus
  siRNA target sequence for Fem1b (NM_010193.2,1953-1971).
cccatcagtgattttctga

SEQ ID NO: 634889 - DNA, 19 bp, Mus musculus
  siRNA target sequence for Fem1b (NM_010193.2,2013-2031).
cacaccgacatgacaaaca

SEQ ID NO: 634890 - DNA, 19 bp, Mus musculus
  siRNA target sequence for Fem1b (NM_010193.2,2048-2066).
gctagacaaaagtacaact

SEQ ID NO: 634891 - DNA, 19 bp, Mus musculus
  siRNA target sequence for Fem1b (NM_010193.2,2130-2148).
gcagttcgggctaatgaca

SEQ ID NO: 634892 - DNA, 19 bp, Mus musculus
  siRNA target sequence for Fem1b (NM_010193.2,2131-2149).
cagttcgggctaatgacat

SEQ ID NO: 634893 - DNA, 19 bp, Mus musculus
  siRNA target sequence for Fem1b (NM_010193.2,2136-2154).
cgggctaatgacattaact

SEQ ID NO: 634894 - DNA, 19 bp, Mus musculus
  siRNA target sequence for Fem1b (NM_010193.2,2171-2189).
ccggactcttgaagagttt

SEQ ID NO: 634895 - DNA, 19 bp, Mus musculus
  siRNA target sequence for Fem1b (NM_010193.2,2173-2191).
ggactcttgaagagtttgt

SEQ ID NO: 634896 - DNA, 19 bp, Mus musculus
  siRNA target sequence for Folr4 (NM_022888.1,292-310).
ccttggcaggggacaaact

SEQ ID NO: 634897 - DNA, 19 bp, Mus musculus
  siRNA target sequence for Folr4 (NM_022888.1,311-329).
gctcagcgtctgcatgaat

SEQ ID NO: 634898 - DNA, 19 bp, Mus musculus
  siRNA target sequence for Folr4 (NM_022888.1,312-330).
ctcagcgtctgcatgaatt

SEQ ID NO: 634899 - DNA, 19 bp, Mus musculus
  siRNA target sequence for Folr4 (NM_022888.1,316-334).
gcgtctgcatgaattccaa

SEQ ID NO: 634900 - DNA, 19 bp, Mus musculus
  siRNA target sequence for Folr4 (NM_022888.1,441-459).
gaggagcccttgctcttta

SEQ ID NO: 634901 - DNA, 19 bp, Mus musculus
  siRNA target sequence for Folr4 (NM_022888.1,496-514).
cctgtcgcaagcacttcat

SEQ ID NO: 634902 - DNA, 19 bp, Mus musculus
  siRNA target sequence for Folr4 (NM_022888.1,645-663).
cgagcctgccactcatctt

SEQ ID NO: 634903 - DNA, 19 bp, Mus musculus
  siRNA target sequence for Folr4 (NM_022888.1,646-664).
gagcctgccactcatcttt

SEQ ID NO: 634904 - DNA, 19 bp, Mus musculus
  siRNA target sequence for Folr4 (NM_022888.1,648-666).
gcctgccactcatctttga

SEQ ID NO: 634905 - DNA, 19 bp, Mus musculus
  siRNA target sequence for Folr4 (NM_022888.1,737-755).
ctgcctccctttttcgtat

SEQ ID NO: 634906 - DNA, 19 bp, Mus musculus
  siRNA target sequence for Folr4 (NM_022888.1,741-759).
ctccctttttcgtatcact

SEQ ID NO: 634907 - DNA, 19 bp, Mus musculus
  siRNA target sequence for Folr4 (NM_176807.2,641-659).
ggtcaagggtcttctatca

SEQ ID NO: 634908 - DNA, 19 bp, Mus musculus
  siRNA target sequence for Folr4 (NM_176807.2,642-660).
gtcaagggtcttctatcaa

SEQ ID NO: 634909 - DNA, 19 bp, Mus musculus
  siRNA target sequence for Folr4 (NM_176807.2,662-680).
gagactaccgtttatagaa

SEQ ID NO: 634910 - DNA, 19 bp, Mus musculus
  siRNA target sequence for Gab1 (NM_021356.2,943-961).
cgttatgcgtggaagagaa

SEQ ID NO: 634911 - DNA, 19 bp, Mus musculus
  siRNA target sequence for Gab1 (NM_021356.2,975-993).
gcgcagtggccgtttgact

SEQ ID NO: 634912 - DNA, 19 bp, Mus musculus
  siRNA target sequence for Gab1 (NM_021356.2,1000-1018).
ccggatgtcctggagtatt

SEQ ID NO: 634913 - DNA, 19 bp, Mus musculus
  siRNA target sequence for Gab1 (NM_021356.2,1001-1019).
cggatgtcctggagtatta

SEQ ID NO: 634914 - DNA, 19 bp, Mus musculus
  siRNA target sequence for Gab1 (NM_021356.2,1003-1021).
gatgtcctggagtattaca

SEQ ID NO: 634915 - DNA, 19 bp, Mus musculus
  siRNA target sequence for Gab1 (NM_021356.2,1011-1029).
ggagtattacaaaaacgat

SEQ ID NO: 634916 - DNA, 19 bp, Mus musculus
  siRNA target sequence for Gab1 (NM_021356.2,1038-1056).
gaagcctattcggattatt

SEQ ID NO: 634917 - DNA, 19 bp, Mus musculus
  siRNA target sequence for Gab1 (NM_021356.2,1041-1059).
gcctattcggattattgat

SEQ ID NO: 634918 - DNA, 19 bp, Mus musculus
  siRNA target sequence for Gab1 (NM_021356.2,1042-1060).
cctattcggattattgatt

SEQ ID NO: 634919 - DNA, 19 bp, Mus musculus
  siRNA target sequence for Gab1 (NM_021356.2,1043-1061).
ctattcggattattgattt

SEQ ID NO: 634920 - DNA, 19 bp, Mus musculus
  siRNA target sequence for Gab1 (NM_021356.2,1078-1096).
gttgatgctgggttgacat

SEQ ID NO: 634921 - DNA, 19 bp, Mus musculus
  siRNA target sequence for Gab1 (NM_021356.2,1121-1139).
gctatatctttgatatcaa

SEQ ID NO: 634922 - DNA, 19 bp, Mus musculus
  siRNA target sequence for Gab1 (NM_021356.2,1142-1160).
ccatcgaccggattttcta

SEQ ID NO: 634923 - DNA, 19 bp, Mus musculus
  siRNA target sequence for Gab1 (NM_021356.2,1194-1212).
gtgggtccgttgtatctgt

SEQ ID NO: 634924 - DNA, 19 bp, Mus musculus
  siRNA target sequence for Gab1 (NM_021356.2,1285-1303).
gattcacctttcgctataa

SEQ ID NO: 634925 - DNA, 19 bp, Mus musculus
  siRNA target sequence for Gab1 (NM_021356.2,1557-1575).
gagcaaacacggaatgaat

SEQ ID NO: 634926 - DNA, 19 bp, Mus musculus
  siRNA target sequence for Gab1 (NM_021356.2,1678-1696).
gacgtgttgccaaaggaat

SEQ ID NO: 634927 - DNA, 19 bp, Mus musculus
  siRNA target sequence for Gab1 (NM_021356.2,1778-1796).
gacatgtatccatcagtta

SEQ ID NO: 634928 - DNA, 19 bp, Mus musculus
  siRNA target sequence for Gab1 (NM_021356.2,1808-1826).
caacacctggcaacactta

SEQ ID NO: 634929 - DNA, 19 bp, Mus musculus
  siRNA target sequence for Gab1 (NM_021356.2,2019-2037).
gacgccctcccggagtaat

SEQ ID NO: 634930 - DNA, 19 bp, Mus musculus
  siRNA target sequence for Gab1 (NM_021356.2,2023-2041).
ccctcccggagtaatacca

SEQ ID NO: 634931 - DNA, 19 bp, Mus musculus
  siRNA target sequence for Gab1 (NM_021356.2,2024-2042).
cctcccggagtaataccat

SEQ ID NO: 634932 - DNA, 19 bp, Mus musculus
  siRNA target sequence for Gab1 (NM_021356.2,2025-2043).
ctcccggagtaataccatt

SEQ ID NO: 634933 - DNA, 19 bp, Mus musculus
  siRNA target sequence for Gab1 (NM_021356.2,2029-2047).
cggagtaataccatttcca

SEQ ID NO: 634934 - DNA, 19 bp, Mus musculus
  siRNA target sequence for Gab1 (NM_021356.2,2045-2063).
ccaccgtggatttgaacaa

SEQ ID NO: 634935 - DNA, 19 bp, Mus musculus
  siRNA target sequence for Gab1 (NM_021356.2,2048-2066).
ccgtggatttgaacaagtt

SEQ ID NO: 634936 - DNA, 19 bp, Mus musculus
  siRNA target sequence for Gab1 (NM_021356.2,2058-2076).
gaacaagttgcggaaagat

SEQ ID NO: 634937 - DNA, 19 bp, Mus musculus
  siRNA target sequence for Gab1 (NM_021356.2,2074-2092).
gatgctagttctcaagatt

SEQ ID NO: 634938 - DNA, 19 bp, Mus musculus
  siRNA target sequence for Gab1 (NM_021356.2,2084-2102).
ctcaagattgctatgatat

SEQ ID NO: 634939 - DNA, 19 bp, Mus musculus
  siRNA target sequence for Gab1 (NM_021356.2,2112-2130).
ctttccgagcgatagatct

SEQ ID NO: 634940 - DNA, 19 bp, Mus musculus
  siRNA target sequence for Gab1 (NM_021356.2,2116-2134).
ccgagcgatagatctagtt

SEQ ID NO: 634941 - DNA, 19 bp, Mus musculus
  siRNA target sequence for Gab1 (NM_021356.2,2143-2161).
ggcttccatagccagtata

SEQ ID NO: 634942 - DNA, 19 bp, Mus musculus
  siRNA target sequence for Gab1 (NM_021356.2,2144-2162).
gcttccatagccagtataa

SEQ ID NO: 634943 - DNA, 19 bp, Mus musculus
  siRNA target sequence for Gab1 (NM_021356.2,2238-2256).
ctcgccacctcgacaacat

SEQ ID NO: 634944 - DNA, 19 bp, Mus musculus
  siRNA target sequence for Gab1 (NM_021356.2,2251-2269).
caacattccggcagcttta

SEQ ID NO: 634945 - DNA, 19 bp, Mus musculus
  siRNA target sequence for Gab1 (NM_021356.2,2469-2487).
gccggcacctttagacata

SEQ ID NO: 634946 - DNA, 19 bp, Mus musculus
  siRNA target sequence for Gab1 (NM_021356.2,2470-2488).
ccggcacctttagacataa

SEQ ID NO: 634947 - DNA, 19 bp, Mus musculus
  siRNA target sequence for Gab1 (NM_021356.2,2471-2489).
cggcacctttagacataaa

SEQ ID NO: 634948 - DNA, 19 bp, Mus musculus
  siRNA target sequence for Gab1 (NM_021356.2,2472-2490).
ggcacctttagacataaaa

SEQ ID NO: 634949 - DNA, 19 bp, Mus musculus
  siRNA target sequence for Gab1 (NM_021356.2,2650-2668).
cccatgaatccaaatctgt

SEQ ID NO: 634950 - DNA, 19 bp, Mus musculus
  siRNA target sequence for Gab1 (NM_021356.2,2672-2690).
gcgaagacccgaatctctt

SEQ ID NO: 634951 - DNA, 19 bp, Mus musculus
  siRNA target sequence for Gab1 (NM_021356.2,2673-2691).
cgaagacccgaatctcttt

SEQ ID NO: 634952 - DNA, 19 bp, Mus musculus
  siRNA target sequence for Gab1 (NM_021356.2,2713-2731).
ggaagcagcccgatgaata

SEQ ID NO: 634953 - DNA, 19 bp, Mus musculus
  siRNA target sequence for Gab1 (NM_021356.2,2741-2759).
gagacaaacaagtcgaata

SEQ ID NO: 634954 - DNA, 19 bp, Mus musculus
  siRNA target sequence for Gab1 (NM_021356.2,2792-2810).
cgccaccacggaagcaaaa

SEQ ID NO: 634955 - DNA, 19 bp, Mus musculus
  siRNA target sequence for Gab1 (NM_021356.2,2837-2855).
cagacgagagggtggatta

SEQ ID NO: 634956 - DNA, 19 bp, Mus musculus
  siRNA target sequence for Gab1 (NM_021356.2,2841-2859).
cgagagggtggattacgtt

SEQ ID NO: 634957 - DNA, 19 bp, Mus musculus
  siRNA target sequence for Gabarapl1 (NM_020590.3,285-303).
ccttcgagtatcggaaaaa

SEQ ID NO: 634958 - DNA, 19 bp, Mus musculus
  siRNA target sequence for Gabarapl1 (NM_020590.3,289-307).
cgagtatcggaaaaaggaa

SEQ ID NO: 634959 - DNA, 19 bp, Mus musculus
  siRNA target sequence for Gabarapl1 (NM_020590.3,375-393).
gggtccctgatctggataa

SEQ ID NO: 634960 - DNA, 19 bp, Mus musculus
  siRNA target sequence for Gabarapl1 (NM_020590.3,428-446).
ggccagttctacttcttaa

SEQ ID NO: 634961 - DNA, 19 bp, Mus musculus
  siRNA target sequence for Gabarapl1 (NM_020590.3,429-447).
gccagttctacttcttaat

SEQ ID NO: 634962 - DNA, 19 bp, Mus musculus
  siRNA target sequence for Gabarapl1 (NM_020590.3,468-486).
gacctgaggacgccttatt

SEQ ID NO: 634963 - DNA, 19 bp, Mus musculus
  siRNA target sequence for Gabarapl1 (NM_020590.3,471-489).
ctgaggacgccttattctt

SEQ ID NO: 634964 - DNA, 19 bp, Mus musculus
  siRNA target sequence for Gabarapl1 (NM_020590.3,473-491).
gaggacgccttattcttct

SEQ ID NO: 634965 - DNA, 19 bp, Mus musculus
  siRNA target sequence for Gabarapl1 (NM_020590.3,475-493).
ggacgccttattcttcttt

SEQ ID NO: 634966 - DNA, 19 bp, Mus musculus
  siRNA target sequence for Gabarapl1 (NM_020590.3,547-565).
caaccacgaggaagactat

SEQ ID NO: 634967 - DNA, 19 bp, Mus musculus
  siRNA target sequence for Gfra1 (NM_010279.2,359-377).
cagaagtctctctacaact

SEQ ID NO: 634968 - DNA, 19 bp, Mus musculus
  siRNA target sequence for Gfra1 (NM_010279.2,476-494).
ccatatgagccggttaaca

SEQ ID NO: 634969 - DNA, 19 bp, Mus musculus
  siRNA target sequence for Gfra1 (NM_010279.2,514-532).
ccgggcagtcccgttcata

SEQ ID NO: 634970 - DNA, 19 bp, Mus musculus
  siRNA target sequence for Gfra1 (NM_010279.2,515-533).
cgggcagtcccgttcatat

SEQ ID NO: 634971 - DNA, 19 bp, Mus musculus
  siRNA target sequence for Gfra1 (NM_010279.2,517-535).
ggcagtcccgttcatatca

SEQ ID NO: 634972 - DNA, 19 bp, Mus musculus
  siRNA target sequence for Gfra1 (NM_010279.2,655-673).
caccagcatgtccaatgaa

SEQ ID NO: 634973 - DNA, 19 bp, Mus musculus
  siRNA target sequence for Gfra1 (NM_010279.2,657-675).
ccagcatgtccaatgaagt

SEQ ID NO: 634974 - DNA, 19 bp, Mus musculus
  siRNA target sequence for Gfra1 (NM_010279.2,888-906).
gatctcgccttgcagattt

SEQ ID NO: 634975 - DNA, 19 bp, Mus musculus
  siRNA target sequence for Gfra1 (NM_010279.2,891-909).
ctcgccttgcagatttttt

SEQ ID NO: 634976 - DNA, 19 bp, Mus musculus
  siRNA target sequence for Gfra1 (NM_010279.2,893-911).
cgccttgcagattttttta

SEQ ID NO: 634977 - DNA, 19 bp, Mus musculus
  siRNA target sequence for Gfra1 (NM_010279.2,896-914).
cttgcagatttttttacca

SEQ ID NO: 634978 - DNA, 19 bp, Mus musculus
  siRNA target sequence for Gfra1 (NM_010279.2,979-997).
ggcctactcgggactgatt

SEQ ID NO: 634979 - DNA, 19 bp, Mus musculus
  siRNA target sequence for Gfra1 (NM_010279.2,1002-1020).
cagtcatgactcctaacta

SEQ ID NO: 634980 - DNA, 19 bp, Mus musculus
  siRNA target sequence for Gfra1 (NM_010279.2,1004-1022).
gtcatgactcctaactaca

SEQ ID NO: 634981 - DNA, 19 bp, Mus musculus
  siRNA target sequence for Gfra1 (NM_010279.2,1073-1091).
ggcaatgacctggaagatt

SEQ ID NO: 634982 - DNA, 19 bp, Mus musculus
  siRNA target sequence for Gfra1 (NM_010279.2,1117-1135).
ggacaatacgtgtctcaaa

SEQ ID NO: 634983 - DNA, 19 bp, Mus musculus
  siRNA target sequence for Gfra1 (NM_010279.2,1118-1136).
gacaatacgtgtctcaaaa

SEQ ID NO: 634984 - DNA, 19 bp, Mus musculus
  siRNA target sequence for Gfra1 (NM_010279.2,1227-1245).
ccttccggatcaagaacaa

SEQ ID NO: 634985 - DNA, 19 bp, Mus musculus
  siRNA target sequence for Gfra1 (NM_010279.2,1276-1294).
gattcccacacacgtttta

SEQ ID NO: 634986 - DNA, 19 bp, Mus musculus
  siRNA target sequence for Gfra1 (NM_010279.2,1408-1426).
ccacataaccacaaaatca

SEQ ID NO: 634987 - DNA, 19 bp, Mus musculus
  siRNA target sequence for Gfra1 (NM_010279.2,1409-1427).
cacataaccacaaaatcaa

SEQ ID NO: 634988 - DNA, 19 bp, Mus musculus
  siRNA target sequence for Gfra2 (NM_008115.1,255-273).
gcaggaaagcccattgtat

SEQ ID NO: 634989 - DNA, 19 bp, Mus musculus
  siRNA target sequence for Gfra2 (NM_008115.1,350-368).
cggagggtgaggagttcta

SEQ ID NO: 634990 - DNA, 19 bp, Mus musculus
  siRNA target sequence for Gfra2 (NM_008115.1,628-646).
cgtgtgcccagcgagtata

SEQ ID NO: 634991 - DNA, 19 bp, Mus musculus
  siRNA target sequence for Gfra2 (NM_008115.1,829-847).
gcctcctaccggacaatca

SEQ ID NO: 634992 - DNA, 19 bp, Mus musculus
  siRNA target sequence for Gfra2 (NM_008115.1,885-903).
ctcctatgctggcatgatt

SEQ ID NO: 634993 - DNA, 19 bp, Mus musculus
  siRNA target sequence for Gfra2 (NM_008115.1,896-914).
gcatgattgggtttgatat

SEQ ID NO: 634994 - DNA, 19 bp, Mus musculus
  siRNA target sequence for Gfra2 (NM_008115.1,957-975).
gtctccctggtgcaattgt

SEQ ID NO: 634995 - DNA, 19 bp, Mus musculus
  siRNA target sequence for Gfra2 (NM_008115.1,1041-1059).
cctccggaatgccattcaa

SEQ ID NO: 634996 - DNA, 19 bp, Mus musculus
  siRNA target sequence for Gfra2 (NM_008115.1,1122-1140).
ggcccctcgggtagagaaa

SEQ ID NO: 634997 - DNA, 19 bp, Mus musculus
  siRNA target sequence for Gfra2 (NM_008115.1,1123-1141).
gcccctcgggtagagaaaa

SEQ ID NO: 634998 - DNA, 19 bp, Mus musculus
  siRNA target sequence for Gfra2 (NM_008115.1,1125-1143).
ccctcgggtagagaaaact

SEQ ID NO: 634999 - DNA, 19 bp, Mus musculus
  siRNA target sequence for Gfra2 (NM_008115.1,1225-1243).
gggctgaaggccaacaact

SEQ ID NO: 635000 - DNA, 19 bp, Mus musculus
  siRNA target sequence for Gfra2 (NM_008115.1,1266-1284).
cacagagctcacgacaaat

SEQ ID NO: 635001 - DNA, 19 bp, Mus musculus
  siRNA target sequence for Gfra2 (NM_008115.1,1268-1286).
cagagctcacgacaaatat

SEQ ID NO: 635002 - DNA, 19 bp, Mus musculus
  siRNA target sequence for Gfra2 (NM_008115.1,1270-1288).
gagctcacgacaaatatca

SEQ ID NO: 635003 - DNA, 19 bp, Mus musculus
  siRNA target sequence for Gfra2 (NM_008115.1,1305-1323).
ggtgatcaaactttactca

SEQ ID NO: 635004 - DNA, 19 bp, Mus musculus
  siRNA target sequence for Glmr (NM_139299.1,510-528).
cttttacttcgacagaaat

SEQ ID NO: 635005 - DNA, 19 bp, Mus musculus
  siRNA target sequence for Glmr (NM_139299.1,561-579).
caatgataccagctacatt

SEQ ID NO: 635006 - DNA, 19 bp, Mus musculus
  siRNA target sequence for Glmr (NM_139299.1,573-591).
ctacattgtgactttgact

SEQ ID NO: 635007 - DNA, 19 bp, Mus musculus
  siRNA target sequence for Glmr (NM_139299.1,588-606).
gacttactcctatggaaaa

SEQ ID NO: 635008 - DNA, 19 bp, Mus musculus
  siRNA target sequence for Glmr (NM_139299.1,594-612).
ctcctatggaaaaagcaat

SEQ ID NO: 635009 - DNA, 19 bp, Mus musculus
  siRNA target sequence for Glmr (NM_139299.1,602-620).
gaaaaagcaattatagtga

SEQ ID NO: 635010 - DNA, 19 bp, Mus musculus
  siRNA target sequence for Glmr (NM_139299.1,625-643).
gctacagaggcttcatatt

SEQ ID NO: 635011 - DNA, 19 bp, Mus musculus
  siRNA target sequence for Glmr (NM_139299.1,718-736).
gttaaatctgacatcacat

SEQ ID NO: 635012 - DNA, 19 bp, Mus musculus
  siRNA target sequence for Glmr (NM_139299.1,764-782).
ccgaaccacctataatttt

SEQ ID NO: 635013 - DNA, 19 bp, Mus musculus
  siRNA target sequence for Glmr (NM_139299.1,765-783).
cgaaccacctataatttta

SEQ ID NO: 635014 - DNA, 19 bp, Mus musculus
  siRNA target sequence for Glmr (NM_139299.1,770-788).
cacctataattttaagtgt

SEQ ID NO: 635015 - DNA, 19 bp, Mus musculus
  siRNA target sequence for Glmr (NM_139299.1,787-805).
gtgaatccaatttgtaata

SEQ ID NO: 635016 - DNA, 19 bp, Mus musculus
  siRNA target sequence for Glmr (NM_139299.1,793-811).
ccaatttgtaatagaatgt

SEQ ID NO: 635017 - DNA, 19 bp, Mus musculus
  siRNA target sequence for Glmr (NM_139299.1,810-828).
gttccagatacaatggaaa

SEQ ID NO: 635018 - DNA, 19 bp, Mus musculus
  siRNA target sequence for Glmr (NM_139299.1,825-843).
gaaaccgcgtgaaaagact

SEQ ID NO: 635019 - DNA, 19 bp, Mus musculus
  siRNA target sequence for Glmr (NM_139299.1,840-858).
gactcgtgggtttccttta

SEQ ID NO: 635020 - DNA, 19 bp, Mus musculus
  siRNA target sequence for Glmr (NM_139299.1,842-860).
ctcgtgggtttcctttagt

SEQ ID NO: 635021 - DNA, 19 bp, Mus musculus
  siRNA target sequence for Glmr (NM_139299.1,844-862).
cgtgggtttcctttagtat

SEQ ID NO: 635022 - DNA, 19 bp, Mus musculus
  siRNA target sequence for Glmr (NM_139299.1,897-915).
ctggacggaagtcaatttt

SEQ ID NO: 635023 - DNA, 19 bp, Mus musculus
  siRNA target sequence for Glmr (NM_139299.1,899-917).
ggacggaagtcaattttga

SEQ ID NO: 635024 - DNA, 19 bp, Mus musculus
  siRNA target sequence for Glmr (NM_139299.1,900-918).
gacggaagtcaattttgaa

SEQ ID NO: 635025 - DNA, 19 bp, Mus musculus
  siRNA target sequence for Glmr (NM_139299.1,902-920).
cggaagtcaattttgaaaa

SEQ ID NO: 635026 - DNA, 19 bp, Mus musculus
  siRNA target sequence for Glmr (NM_139299.1,982-1000).
cgattcaggttcaatgact

SEQ ID NO: 635027 - DNA, 19 bp, Mus musculus
  siRNA target sequence for Glmr (NM_139299.1,989-1007).
ggttcaatgactcaagata

SEQ ID NO: 635028 - DNA, 19 bp, Mus musculus
  siRNA target sequence for Glmr (NM_139299.1,990-1008).
gttcaatgactcaagatat

SEQ ID NO: 635029 - DNA, 19 bp, Mus musculus
  siRNA target sequence for Glmr (NM_139299.1,1013-1031).
gcaagtggagcaaagaaga

SEQ ID NO: 635030 - DNA, 19 bp, Mus musculus
  siRNA target sequence for Glmr (NM_139299.1,1150-1168).
cccgtcttggagaaaacat

SEQ ID NO: 635031 - DNA, 19 bp, Mus musculus
  siRNA target sequence for Glmr (NM_139299.1,1173-1191).
ctaccacatacagtacttt

SEQ ID NO: 635032 - DNA, 19 bp, Mus musculus
  siRNA target sequence for Glmr (NM_139299.1,1203-1221).
cactaacctcacagagata

SEQ ID NO: 635033 - DNA, 19 bp, Mus musculus
  siRNA target sequence for Glmr (NM_139299.1,1205-1223).
ctaacctcacagagataaa

SEQ ID NO: 635034 - DNA, 19 bp, Mus musculus
  siRNA target sequence for Glmr (NM_139299.1,1278-1296).
gtccgtgacttcttttaat

SEQ ID NO: 635035 - DNA, 19 bp, Mus musculus
  siRNA target sequence for Glmr (NM_139299.1,1368-1386).
gagcatgaaggcctacata

SEQ ID NO: 635036 - DNA, 19 bp, Mus musculus
  siRNA target sequence for Glmr (NM_139299.1,1523-1541).
ggaccatcgagcaagataa

SEQ ID NO: 635037 - DNA, 19 bp, Mus musculus
  siRNA target sequence for Glmr (NM_139299.1,1524-1542).
gaccatcgagcaagataaa

SEQ ID NO: 635038 - DNA, 19 bp, Mus musculus
  siRNA target sequence for Glmr (NM_139299.1,1526-1544).
ccatcgagcaagataaact

SEQ ID NO: 635039 - DNA, 19 bp, Mus musculus
  siRNA target sequence for Glmr (NM_139299.1,1597-1615).
gttggagagccgtattcaa

SEQ ID NO: 635040 - DNA, 19 bp, Mus musculus
  siRNA target sequence for Glmr (NM_139299.1,1607-1625).
cgtattcaatccaagctta

SEQ ID NO: 635041 - DNA, 19 bp, Mus musculus
  siRNA target sequence for Glmr (NM_139299.1,1700-1718).
catggaaggagattcctaa

SEQ ID NO: 635042 - DNA, 19 bp, Mus musculus
  siRNA target sequence for Glmr (NM_139299.1,1704-1722).
gaaggagattcctaagagt

SEQ ID NO: 635043 - DNA, 19 bp, Mus musculus
  siRNA target sequence for Glmr (NM_139299.1,1783-1801).
ctctccaagactgttaact

SEQ ID NO: 635044 - DNA, 19 bp, Mus musculus
  siRNA target sequence for Glmr (NM_139299.1,1833-1851).
gacacgaaggacctcttat

SEQ ID NO: 635045 - DNA, 19 bp, Mus musculus
  siRNA target sequence for Glmr (NM_139299.1,1838-1856).
gaaggacctcttatactgt

SEQ ID NO: 635046 - DNA, 19 bp, Mus musculus
  siRNA target sequence for Glmr (NM_139299.1,1886-1904).
gtaccaacggggtgagaat

SEQ ID NO: 635047 - DNA, 19 bp, Mus musculus
  siRNA target sequence for Glmr (NM_139299.1,1889-1907).
ccaacggggtgagaataaa

SEQ ID NO: 635048 - DNA, 19 bp, Mus musculus
  siRNA target sequence for Glmr (NM_139299.1,1894-1912).
ggggtgagaataaacttca

SEQ ID NO: 635049 - DNA, 19 bp, Mus musculus
  siRNA target sequence for Glmr (NM_139299.1,1975-1993).
cttctacttagcatcaaaa

SEQ ID NO: 635050 - DNA, 19 bp, Mus musculus
  siRNA target sequence for Glmr (NM_139299.1,2055-2073).
caaccctgctgaaagtagt

SEQ ID NO: 635051 - DNA, 19 bp, Mus musculus
  siRNA target sequence for Glmr (NM_139299.1,2089-2107).
ggagatggtttcaagaagt

SEQ ID NO: 635052 - DNA, 19 bp, Mus musculus
  siRNA target sequence for Glmr (NM_139299.1,2146-2164).
gacgtggtcctaaaaccat

SEQ ID NO: 635053 - DNA, 19 bp, Mus musculus
  siRNA target sequence for Glmr (NM_139299.1,2196-2214).
ggtagtgaactttgagaat

SEQ ID NO: 635054 - DNA, 19 bp, Mus musculus
  siRNA target sequence for Glmr (NM_139299.1,2275-2293).
gaagcgaatgagtatgtga

SEQ ID NO: 635055 - DNA, 19 bp, Mus musculus
  siRNA target sequence for Glmr (NM_139299.1,2313-2331).
cggtcccccagggaaaagt

SEQ ID NO: 635056 - DNA, 19 bp, Mus musculus
  siRNA target sequence for Glmr (NM_139299.1,2315-2333).
gtcccccagggaaaagttt

SEQ ID NO: 635057 - DNA, 19 bp, Mus musculus
  siRNA target sequence for Glmr (NM_139299.1,2401-2419).
gacgaggcgtactcagaat

SEQ ID NO: 635058 - DNA, 19 bp, Mus musculus
  siRNA target sequence for Glmr (NM_139299.1,2511-2529).
gacaaccagggaatttctt

SEQ ID NO: 635059 - DNA, 19 bp, Mus musculus
  siRNA target sequence for Glmr (NM_139299.1,2513-2531).
caaccagggaatttcttgt

SEQ ID NO: 635060 - DNA, 19 bp, Mus musculus
  siRNA target sequence for Gosr1 (NM_016810.2,9-27).
gcggcaggaaccagcaatt

SEQ ID NO: 635061 - DNA, 19 bp, Mus musculus
  siRNA target sequence for Gosr1 (NM_016810.2,32-50).
ggaagatctcaggaaacaa

SEQ ID NO: 635062 - DNA, 19 bp, Mus musculus
  siRNA target sequence for Gosr1 (NM_016810.2,52-70).
ctcggcagctggaaaacga

SEQ ID NO: 635063 - DNA, 19 bp, Mus musculus
  siRNA target sequence for Gosr1 (NM_016810.2,141-159).
ggacgcgataggtacagtt

SEQ ID NO: 635064 - DNA, 19 bp, Mus musculus
  siRNA target sequence for Gosr1 (NM_016810.2,162-180).
gacacaacaccgctattaa

SEQ ID NO: 635065 - DNA, 19 bp, Mus musculus
  siRNA target sequence for Gosr1 (NM_016810.2,164-182).
cacaacaccgctattaaat

SEQ ID NO: 635066 - DNA, 19 bp, Mus musculus
  siRNA target sequence for Gosr1 (NM_016810.2,190-208).
gccaagacagaatgtttga

SEQ ID NO: 635067 - DNA, 19 bp, Mus musculus
  siRNA target sequence for Gosr1 (NM_016810.2,192-210).
caagacagaatgtttgaga

SEQ ID NO: 635068 - DNA, 19 bp, Mus musculus
  siRNA target sequence for Gosr1 (NM_016810.2,209-227).
gacaatggcaattgaaatt

SEQ ID NO: 635069 - DNA, 19 bp, Mus musculus
  siRNA target sequence for Gosr1 (NM_016810.2,211-229).
caatggcaattgaaattga

SEQ ID NO: 635070 - DNA, 19 bp, Mus musculus
  siRNA target sequence for Gosr1 (NM_016810.2,244-262).
ggcttacaggagtaaacga

SEQ ID NO: 635071 - DNA, 19 bp, Mus musculus
  siRNA target sequence for Gosr1 (NM_016810.2,329-347).
gcagcgacacagagacatt

SEQ ID NO: 635072 - DNA, 19 bp, Mus musculus
  siRNA target sequence for Gosr1 (NM_016810.2,340-358).
gagacattctgcaggatta

SEQ ID NO: 635073 - DNA, 19 bp, Mus musculus
  siRNA target sequence for Gosr1 (NM_016810.2,344-362).
cattctgcaggattataca

SEQ ID NO: 635074 - DNA, 19 bp, Mus musculus
  siRNA target sequence for Gosr1 (NM_016810.2,424-442).
gatcagtacggaaagatat

SEQ ID NO: 635075 - DNA, 19 bp, Mus musculus
  siRNA target sequence for Gosr1 (NM_016810.2,427-445).
cagtacggaaagatattga

SEQ ID NO: 635076 - DNA, 19 bp, Mus musculus
  siRNA target sequence for Gosr1 (NM_016810.2,429-447).
gtacggaaagatattgagt

SEQ ID NO: 635077 - DNA, 19 bp, Mus musculus
  siRNA target sequence for Gosr1 (NM_016810.2,433-451).
ggaaagatattgagtcata

SEQ ID NO: 635078 - DNA, 19 bp, Mus musculus
  siRNA target sequence for Gosr1 (NM_016810.2,434-452).
gaaagatattgagtcatat

SEQ ID NO: 635079 - DNA, 19 bp, Mus musculus
  siRNA target sequence for Gosr1 (NM_016810.2,457-475).
gcgggtctggagtaaacaa

SEQ ID NO: 635080 - DNA, 19 bp, Mus musculus
  siRNA target sequence for Gosr1 (NM_016810.2,459-477).
gggtctggagtaaacaaca

SEQ ID NO: 635081 - DNA, 19 bp, Mus musculus
  siRNA target sequence for Gosr1 (NM_016810.2,476-494).
caggagaacggaactgttt

SEQ ID NO: 635082 - DNA, 19 bp, Mus musculus
  siRNA target sequence for Gosr1 (NM_016810.2,478-496).
ggagaacggaactgtttct

SEQ ID NO: 635083 - DNA, 19 bp, Mus musculus
  siRNA target sequence for Gosr1 (NM_016810.2,521-539).
ctctgatcgtctgatagaa

SEQ ID NO: 635084 - DNA, 19 bp, Mus musculus
  siRNA target sequence for Gosr1 (NM_016810.2,523-541).
ctgatcgtctgatagaaga

SEQ ID NO: 635085 - DNA, 19 bp, Mus musculus
  siRNA target sequence for Gosr1 (NM_016810.2,540-558).
gaaacaataagcattgcta

SEQ ID NO: 635086 - DNA, 19 bp, Mus musculus
  siRNA target sequence for Gosr1 (NM_016810.2,646-664).
ccgtgaacagcctgataca

SEQ ID NO: 635087 - DNA, 19 bp, Mus musculus
  siRNA target sequence for Gosr1 (NM_016810.2,647-665).
cgtgaacagcctgatacaa

SEQ ID NO: 635088 - DNA, 19 bp, Mus musculus
  siRNA target sequence for Gosr2 (NM_019650.2,52-70).
gagcccctataccaacaaa

SEQ ID NO: 635089 - DNA, 19 bp, Mus musculus
  siRNA target sequence for Gosr2 (NM_019650.2,164-182).
caagcatagagcaaatatt

SEQ ID NO: 635090 - DNA, 19 bp, Mus musculus
  siRNA target sequence for Gosr2 (NM_019650.2,196-214).
cgcctggagattttgtcaa

SEQ ID NO: 635091 - DNA, 19 bp, Mus musculus
  siRNA target sequence for Gosr2 (NM_019650.2,219-237).
ggagcccttgaatagaaga

SEQ ID NO: 635092 - DNA, 19 bp, Mus musculus
  siRNA target sequence for Gosr2 (NM_019650.2,253-271).
cgtgtcgaccagctaaagt

SEQ ID NO: 635093 - DNA, 19 bp, Mus musculus
  siRNA target sequence for Gosr2 (NM_019650.2,254-272).
gtgtcgaccagctaaagta

SEQ ID NO: 635094 - DNA, 19 bp, Mus musculus
  siRNA target sequence for Gosr2 (NM_019650.2,258-276).
cgaccagctaaagtatgat

SEQ ID NO: 635095 - DNA, 19 bp, Mus musculus
  siRNA target sequence for Gosr2 (NM_019650.2,291-309).
gactgccctcaggaacttt

SEQ ID NO: 635096 - DNA, 19 bp, Mus musculus
  siRNA target sequence for Gosr2 (NM_019650.2,293-311).
ctgccctcaggaactttca

SEQ ID NO: 635097 - DNA, 19 bp, Mus musculus
  siRNA target sequence for Gosr2 (NM_019650.2,412-430).
gaatcactgcagtttaact

SEQ ID NO: 635098 - DNA, 19 bp, Mus musculus
  siRNA target sequence for Gosr2 (NM_019650.2,534-552).
gaagaagatccttgacatt

SEQ ID NO: 635099 - DNA, 19 bp, Mus musculus
  siRNA target sequence for Gosr2 (NM_019650.2,605-623).
ccttccaggacaagtactt

SEQ ID NO: 635100 - DNA, 19 bp, Mus musculus
  siRNA target sequence for Gpr108 (NM_030084.2,142-160).
gagctgacatccaactgaa

SEQ ID NO: 635101 - DNA, 19 bp, Mus musculus
  siRNA target sequence for Gpr108 (NM_030084.2,168-186).
ggattctacaccaatggtt

SEQ ID NO: 635102 - DNA, 19 bp, Mus musculus
  siRNA target sequence for Gpr108 (NM_030084.2,354-372).
gtcctgttcctcatcaata

SEQ ID NO: 635103 - DNA, 19 bp, Mus musculus
  siRNA target sequence for Gpr108 (NM_030084.2,357-375).
ctgttcctcatcaatatca

SEQ ID NO: 635104 - DNA, 19 bp, Mus musculus
  siRNA target sequence for Gpr108 (NM_030084.2,386-404).
ggtccaagtccgaaaatat

SEQ ID NO: 635105 - DNA, 19 bp, Mus musculus
  siRNA target sequence for Gpr108 (NM_030084.2,667-685).
gactgggccacctcaatga

SEQ ID NO: 635106 - DNA, 19 bp, Mus musculus
  siRNA target sequence for Gpr108 (NM_030084.2,850-868).
ccgaaatccccctcttcaa

SEQ ID NO: 635107 - DNA, 19 bp, Mus musculus
  siRNA target sequence for Gpr108 (NM_030084.2,929-947).
ctgcaagaacacatacagt

SEQ ID NO: 635108 - DNA, 19 bp, Mus musculus
  siRNA target sequence for Gpr108 (NM_030084.2,1011-1029).
cacagcatcaactactact

SEQ ID NO: 635109 - DNA, 19 bp, Mus musculus
  siRNA target sequence for Gpr108 (NM_030084.2,1062-1080).
ctcgcggtcatgcactata

SEQ ID NO: 635110 - DNA, 19 bp, Mus musculus
  siRNA target sequence for Gpr108 (NM_030084.2,1065-1083).
gcggtcatgcactatatca

SEQ ID NO: 635111 - DNA, 19 bp, Mus musculus
  siRNA target sequence for Gpr108 (NM_030084.2,1067-1085).
ggtcatgcactatatcaca

SEQ ID NO: 635112 - DNA, 19 bp, Mus musculus
  siRNA target sequence for Gpr108 (NM_030084.2,1139-1157).
ctgggcctttgtgaagtat

SEQ ID NO: 635113 - DNA, 19 bp, Mus musculus
  siRNA target sequence for Gpr108 (NM_030084.2,1205-1223).
gcaggtcctggctaatgta

SEQ ID NO: 635114 - DNA, 19 bp, Mus musculus
  siRNA target sequence for Gpr108 (NM_030084.2,1270-1288).
gactctggaaggagatctt

SEQ ID NO: 635115 - DNA, 19 bp, Mus musculus
  siRNA target sequence for Gpr108 (NM_030084.2,1436-1454).
catctgctatatctacttt

SEQ ID NO: 635116 - DNA, 19 bp, Mus musculus
  siRNA target sequence for Gpr108 (NM_030084.2,1439-1457).
ctgctatatctactttaca

SEQ ID NO: 635117 - DNA, 19 bp, Mus musculus
  siRNA target sequence for Gpr108 (NM_030084.2,1664-1682).
ggaaggcctgtccaaagtt

SEQ ID NO: 635118 - DNA, 19 bp, Mus musculus
  siRNA target sequence for Gpr108 (NM_030084.2,1665-1683).
gaaggcctgtccaaagtta

SEQ ID NO: 635119 - DNA, 19 bp, Mus musculus
  siRNA target sequence for Gpr108 (NM_030084.2,1669-1687).
gcctgtccaaagttaacaa

SEQ ID NO: 635120 - DNA, 19 bp, Mus musculus
  siRNA target sequence for Grb10 (NM_010345.1,54-72).
gcagtctgatactgatact

SEQ ID NO: 635121 - DNA, 19 bp, Mus musculus
  siRNA target sequence for Grb10 (NM_010345.1,145-163).
gcgtccccgaggcagaaaa

SEQ ID NO: 635122 - DNA, 19 bp, Mus musculus
  siRNA target sequence for Grb10 (NM_010345.1,146-164).
cgtccccgaggcagaaaat

SEQ ID NO: 635123 - DNA, 19 bp, Mus musculus
  siRNA target sequence for Grb10 (NM_010345.1,149-167).
ccccgaggcagaaaatgca

SEQ ID NO: 635124 - DNA, 19 bp, Mus musculus
  siRNA target sequence for Grb10 (NM_010345.1,150-168).
cccgaggcagaaaatgcaa

SEQ ID NO: 635125 - DNA, 19 bp, Mus musculus
  siRNA target sequence for Grb10 (NM_010345.1,477-495).
gaccactgcgagattttca

SEQ ID NO: 635126 - DNA, 19 bp, Mus musculus
  siRNA target sequence for Grb10 (NM_010345.1,479-497).
ccactgcgagattttcaaa

SEQ ID NO: 635127 - DNA, 19 bp, Mus musculus
  siRNA target sequence for Grb10 (NM_010345.1,578-596).
ggctcagaaaggatgtcaa

SEQ ID NO: 635128 - DNA, 19 bp, Mus musculus
  siRNA target sequence for Grb10 (NM_010345.1,802-820).
gagagcaaattcttattca

SEQ ID NO: 635129 - DNA, 19 bp, Mus musculus
  siRNA target sequence for Grb10 (NM_010345.1,806-824).
gcaaattcttattcagaaa

SEQ ID NO: 635130 - DNA, 19 bp, Mus musculus
  siRNA target sequence for Grb10 (NM_010345.1,813-831).
cttattcagaaagaattat

SEQ ID NO: 635131 - DNA, 19 bp, Mus musculus
  siRNA target sequence for Grb10 (NM_010345.1,832-850).
gcgaagtacgagttcttta

SEQ ID NO: 635132 - DNA, 19 bp, Mus musculus
  siRNA target sequence for Grb10 (NM_010345.1,833-851).
cgaagtacgagttctttaa

SEQ ID NO: 635133 - DNA, 19 bp, Mus musculus
  siRNA target sequence for Grb10 (NM_010345.1,874-892).
gatcagatggtcaattggt

SEQ ID NO: 635134 - DNA, 19 bp, Mus musculus
  siRNA target sequence for Grb10 (NM_010345.1,968-986).
ggttcttgcaggtgaaaga

SEQ ID NO: 635135 - DNA, 19 bp, Mus musculus
  siRNA target sequence for Grb10 (NM_010345.1,985-1003).
gaggtaggacgcaagtctt

SEQ ID NO: 635136 - DNA, 19 bp, Mus musculus
  siRNA target sequence for Grb10 (NM_010345.1,1001-1019).
cttggaagaagctgtatgt

SEQ ID NO: 635137 - DNA, 19 bp, Mus musculus
  siRNA target sequence for Grb10 (NM_010345.1,1028-1046).
gcagatctggcctctatta

SEQ ID NO: 635138 - DNA, 19 bp, Mus musculus
  siRNA target sequence for Grb10 (NM_010345.1,1052-1070).
ccaaggggacttcaaaaga

SEQ ID NO: 635139 - DNA, 19 bp, Mus musculus
  siRNA target sequence for Grb10 (NM_010345.1,1262-1280).
ccttcagactgctcaagta

SEQ ID NO: 635140 - DNA, 19 bp, Mus musculus
  siRNA target sequence for Grb10 (NM_010345.1,1282-1300).
ggaatgctcctgtaccaaa

SEQ ID NO: 635141 - DNA, 19 bp, Mus musculus
  siRNA target sequence for Grb10 (NM_010345.1,1283-1301).
gaatgctcctgtaccaaaa

SEQ ID NO: 635142 - DNA, 19 bp, Mus musculus
  siRNA target sequence for Grb10 (NM_010345.1,1287-1305).
gctcctgtaccaaaactat

SEQ ID NO: 635143 - DNA, 19 bp, Mus musculus
  siRNA target sequence for Grb10 (NM_010345.1,1345-1363).
gcacctatgcgcagtgttt

SEQ ID NO: 635144 - DNA, 19 bp, Mus musculus
  siRNA target sequence for Grb10 (NM_010345.1,1353-1371).
gcgcagtgtttctgagaat

SEQ ID NO: 635145 - DNA, 19 bp, Mus musculus
  siRNA target sequence for Grb10 (NM_010345.1,1354-1372).
cgcagtgtttctgagaatt

SEQ ID NO: 635146 - DNA, 19 bp, Mus musculus
  siRNA target sequence for Grb10 (NM_010345.1,1375-1393).
cttgtggccatggattttt

SEQ ID NO: 635147 - DNA, 19 bp, Mus musculus
  siRNA target sequence for Grb10 (NM_010345.1,1479-1497).
cacacggatgaatatccta

SEQ ID NO: 635148 - DNA, 19 bp, Mus musculus
  siRNA target sequence for Grb10 (NM_010345.1,1526-1544).
ccctgaatgcagtgattca

SEQ ID NO: 635149 - DNA, 19 bp, Mus musculus
  siRNA target sequence for Grb10 (NM_010345.1,1680-1698).
gtgccatcaccagaagatt

SEQ ID NO: 635150 - DNA, 19 bp, Mus musculus
  siRNA target sequence for Grb10 (NM_010345.1,1682-1700).
gccatcaccagaagattaa

SEQ ID NO: 635151 - DNA, 19 bp, Mus musculus
  siRNA target sequence for Grb10 (NM_010345.1,1683-1701).
ccatcaccagaagattaaa

SEQ ID NO: 635152 - DNA, 19 bp, Mus musculus
  siRNA target sequence for Grb10 (NM_010345.1,1766-1784).
ccaagttctccgatctgat

SEQ ID NO: 635153 - DNA, 19 bp, Mus musculus
  siRNA target sequence for Grip1 (NM_028736.1,128-146).
gagtccctacactaaatct

SEQ ID NO: 635154 - DNA, 19 bp, Mus musculus
  siRNA target sequence for Grip1 (NM_028736.1,1099-1117).
gccctgaccatgtgaaaat

SEQ ID NO: 635155 - DNA, 19 bp, Mus musculus
  siRNA target sequence for Grip1 (NM_028736.1,1100-1118).
ccctgaccatgtgaaaatt

SEQ ID NO: 635156 - DNA, 19 bp, Mus musculus
  siRNA target sequence for Grip1 (NM_028736.1,2806-2824).
ctgacaggcgtgtgtcatt

SEQ ID NO: 635157 - DNA, 19 bp, Mus musculus
  siRNA target sequence for Grip1 (NM_028736.1,2808-2826).
gacaggcgtgtgtcattga

SEQ ID NO: 635158 - DNA, 19 bp, Mus musculus
  siRNA target sequence for Grip1 (NM_028736.1,2836-2854).
ccctcttggcaacaatcat

SEQ ID NO: 635159 - DNA, 19 bp, Mus musculus
  siRNA target sequence for Grip1 (NM_130891.1,114-132).
cttaccaaagaggaattca

SEQ ID NO: 635160 - DNA, 19 bp, Mus musculus
  siRNA target sequence for Igf2r (NM_010515.1,250-268).
gacgccctgtgcagttaca

SEQ ID NO: 635161 - DNA, 19 bp, Mus musculus
  siRNA target sequence for Igf2r (NM_010515.1,309-327).
gatcaacgtctgtggaaat

SEQ ID NO: 635162 - DNA, 19 bp, Mus musculus
  siRNA target sequence for Igf2r (NM_010515.1,322-340).
ggaaatgtgggtatttcca

SEQ ID NO: 635163 - DNA, 19 bp, Mus musculus
  siRNA target sequence for Igf2r (NM_010515.1,350-368).
ctacaagtgctatctgtat

SEQ ID NO: 635164 - DNA, 19 bp, Mus musculus
  siRNA target sequence for Igf2r (NM_010515.1,398-416).
cagtgggtgactcactttt

SEQ ID NO: 635165 - DNA, 19 bp, Mus musculus
  siRNA target sequence for Igf2r (NM_010515.1,400-418).
gtgggtgactcacttttga

SEQ ID NO: 635166 - DNA, 19 bp, Mus musculus
  siRNA target sequence for Igf2r (NM_010515.1,403-421).
ggtgactcacttttgagaa

SEQ ID NO: 635167 - DNA, 19 bp, Mus musculus
  siRNA target sequence for Igf2r (NM_010515.1,431-449).
gatcactcctggaattcaa

SEQ ID NO: 635168 - DNA, 19 bp, Mus musculus
  siRNA target sequence for Igf2r (NM_010515.1,524-542).
ccctgggaactcctgaatt

SEQ ID NO: 635169 - DNA, 19 bp, Mus musculus
  siRNA target sequence for Igf2r (NM_010515.1,525-543).
cctgggaactcctgaattt

SEQ ID NO: 635170 - DNA, 19 bp, Mus musculus
  siRNA target sequence for Igf2r (NM_010515.1,528-546).
gggaactcctgaatttgta

SEQ ID NO: 635171 - DNA, 19 bp, Mus musculus
  siRNA target sequence for Igf2r (NM_010515.1,529-547).
ggaactcctgaatttgtaa

SEQ ID NO: 635172 - DNA, 19 bp, Mus musculus
  siRNA target sequence for Igf2r (NM_010515.1,589-607).
gcagcctgcaagaaagaca

SEQ ID NO: 635173 - DNA, 19 bp, Mus musculus
  siRNA target sequence for Igf2r (NM_010515.1,592-610).
gcctgcaagaaagacatat

SEQ ID NO: 635174 - DNA, 19 bp, Mus musculus
  siRNA target sequence for Igf2r (NM_010515.1,625-643).
gaggtaccatgctatgcat

SEQ ID NO: 635175 - DNA, 19 bp, Mus musculus
  siRNA target sequence for Igf2r (NM_010515.1,627-645).
ggtaccatgctatgcattt

SEQ ID NO: 635176 - DNA, 19 bp, Mus musculus
  siRNA target sequence for Igf2r (NM_010515.1,632-650).
catgctatgcatttgatga

SEQ ID NO: 635177 - DNA, 19 bp, Mus musculus
  siRNA target sequence for Igf2r (NM_010515.1,641-659).
catttgatgacaagttaca

SEQ ID NO: 635178 - DNA, 19 bp, Mus musculus
  siRNA target sequence for Igf2r (NM_010515.1,695-713).
gtggctatctggtagatga

SEQ ID NO: 635179 - DNA, 19 bp, Mus musculus
  siRNA target sequence for Igf2r (NM_010515.1,697-715).
ggctatctggtagatgatt

SEQ ID NO: 635180 - DNA, 19 bp, Mus musculus
  siRNA target sequence for Igf2r (NM_010515.1,699-717).
ctatctggtagatgattct

SEQ ID NO: 635181 - DNA, 19 bp, Mus musculus
  siRNA target sequence for Igf2r (NM_010515.1,892-910).
ctcgttctgacttatgtga

SEQ ID NO: 635182 - DNA, 19 bp, Mus musculus
  siRNA target sequence for Igf2r (NM_010515.1,927-945).
gccagacttctgtaatggt

SEQ ID NO: 635183 - DNA, 19 bp, Mus musculus
  siRNA target sequence for Igf2r (NM_010515.1,958-976).
gtgacagtaacatttgtgt

SEQ ID NO: 635184 - DNA, 19 bp, Mus musculus
  siRNA target sequence for Igf2r (NM_010515.1,987-1005).
gcggagagagggtaccatt

SEQ ID NO: 635185 - DNA, 19 bp, Mus musculus
  siRNA target sequence for Igf2r (NM_010515.1,1023-1041).
gtccaactgccgttatgaa

SEQ ID NO: 635186 - DNA, 19 bp, Mus musculus
  siRNA target sequence for Igf2r (NM_010515.1,1025-1043).
ccaactgccgttatgaagt

SEQ ID NO: 635187 - DNA, 19 bp, Mus musculus
  siRNA target sequence for Igf2r (NM_010515.1,1064-1082).
cctgccacagagattacct

SEQ ID NO: 635188 - DNA, 19 bp, Mus musculus
  siRNA target sequence for Igf2r (NM_010515.1,1106-1124).
gcagtgagcagcatgatat

SEQ ID NO: 635189 - DNA, 19 bp, Mus musculus
  siRNA target sequence for Igf2r (NM_010515.1,1107-1125).
cagtgagcagcatgatatt

SEQ ID NO: 635190 - DNA, 19 bp, Mus musculus
  siRNA target sequence for Igf2r (NM_010515.1,1156-1174).
ggagggtccccctatgttt

SEQ ID NO: 635191 - DNA, 19 bp, Mus musculus
  siRNA target sequence for Igf2r (NM_010515.1,1161-1179).
gtccccctatgtttctgat

SEQ ID NO: 635192 - DNA, 19 bp, Mus musculus
  siRNA target sequence for Igf2r (NM_010515.1,1177-1195).
gatggaagagaatatacgt

SEQ ID NO: 635193 - DNA, 19 bp, Mus musculus
  siRNA target sequence for Igf2r (NM_010515.1,1184-1202).
gagaatatacgttttttat

SEQ ID NO: 635194 - DNA, 19 bp, Mus musculus
  siRNA target sequence for Igf2r (NM_010515.1,1227-1245).
ctcactctgtaataacaaa

SEQ ID NO: 635195 - DNA, 19 bp, Mus musculus
  siRNA target sequence for Igf2r (NM_010515.1,1229-1247).
cactctgtaataacaaaga

SEQ ID NO: 635196 - DNA, 19 bp, Mus musculus
  siRNA target sequence for Igf2r (NM_010515.1,1252-1270).
gctgtttgtcaagagaaaa

SEQ ID NO: 635197 - DNA, 19 bp, Mus musculus
  siRNA target sequence for Igf2r (NM_010515.1,1274-1292).
cggattccactcaagtcaa

SEQ ID NO: 635198 - DNA, 19 bp, Mus musculus
  siRNA target sequence for Igf2r (NM_010515.1,1339-1357).
gacctcaccctcatctatt

SEQ ID NO: 635199 - DNA, 19 bp, Mus musculus
  siRNA target sequence for Igf2r (NM_010515.1,1391-1409).
ggatgagtgtcataaactt

SEQ ID NO: 635200 - DNA, 19 bp, Mus musculus
  siRNA target sequence for Igf2r (NM_010515.1,1392-1410).
gatgagtgtcataaacttt

SEQ ID NO: 635201 - DNA, 19 bp, Mus musculus
  siRNA target sequence for Igf2r (NM_010515.1,1583-1601).
ctcgtcactcagaatcaga

SEQ ID NO: 635202 - DNA, 19 bp, Mus musculus
  siRNA target sequence for Igf2r (NM_010515.1,1626-1644).
cagccaggcagaatcagaa

SEQ ID NO: 635203 - DNA, 19 bp, Mus musculus
  siRNA target sequence for Igf2r (NM_010515.1,1718-1736).
ctgtgtgcgctgtggataa

SEQ ID NO: 635204 - DNA, 19 bp, Mus musculus
  siRNA target sequence for Igf2r (NM_010515.1,1720-1738).
gtgtgcgctgtggataaga

SEQ ID NO: 635205 - DNA, 19 bp, Mus musculus
  siRNA target sequence for Igf2r (NM_010515.1,1731-1749).
ggataagaatgggagtaaa

SEQ ID NO: 635206 - DNA, 19 bp, Mus musculus
  siRNA target sequence for Igf2r (NM_010515.1,1790-1808).
gacacatacagctctctta

SEQ ID NO: 635207 - DNA, 19 bp, Mus musculus
  siRNA target sequence for Igf2r (NM_010515.1,1830-1848).
cagtgataagaaaatatca

SEQ ID NO: 635208 - DNA, 19 bp, Mus musculus
  siRNA target sequence for Igf2r (NM_010515.1,1868-1886).
gcaaaccaggtgatctaga

SEQ ID NO: 635209 - DNA, 19 bp, Mus musculus
  siRNA target sequence for Igf2r (NM_010515.1,2033-2051).
cactcctcacgaagaagaa

SEQ ID NO: 635210 - DNA, 19 bp, Mus musculus
  siRNA target sequence for Igf2r (NM_010515.1,2068-2086).
gagacagagaagtatgact

SEQ ID NO: 635211 - DNA, 19 bp, Mus musculus
  siRNA target sequence for Igf2r (NM_010515.1,2072-2090).
cagagaagtatgacttcta

SEQ ID NO: 635212 - DNA, 19 bp, Mus musculus
  siRNA target sequence for Igf2r (NM_010515.1,2145-2163).
ctgccaggtagcgaaaagt

SEQ ID NO: 635213 - DNA, 19 bp, Mus musculus
  siRNA target sequence for Igf2r (NM_010515.1,2178-2196).
cttggggctgagtagtact

SEQ ID NO: 635214 - DNA, 19 bp, Mus musculus
  siRNA target sequence for Igf2r (NM_010515.1,2204-2222).
cctactacgacggaatgat

SEQ ID NO: 635215 - DNA, 19 bp, Mus musculus
  siRNA target sequence for Igf2r (NM_010515.1,2237-2255).
ggaacggcactccctataa

SEQ ID NO: 635216 - DNA, 19 bp, Mus musculus
  siRNA target sequence for Igf2r (NM_010515.1,2241-2259).
cggcactccctataacaat

SEQ ID NO: 635217 - DNA, 19 bp, Mus musculus
  siRNA target sequence for Igf2r (NM_010515.1,2243-2261).
gcactccctataacaatga

SEQ ID NO: 635218 - DNA, 19 bp, Mus musculus
  siRNA target sequence for Igf2r (NM_010515.1,2244-2262).
cactccctataacaatgaa

SEQ ID NO: 635219 - DNA, 19 bp, Mus musculus
  siRNA target sequence for Igf2r (NM_010515.1,2249-2267).
cctataacaatgaaaagca

SEQ ID NO: 635220 - DNA, 19 bp, Mus musculus
  siRNA target sequence for Igf2r (NM_010515.1,2272-2290).
ccgagagccacactgatta

SEQ ID NO: 635221 - DNA, 19 bp, Mus musculus
  siRNA target sequence for Igf2r (NM_010515.1,2364-2382).
ccggtggtacaccagttat

SEQ ID NO: 635222 - DNA, 19 bp, Mus musculus
  siRNA target sequence for Igf2r (NM_010515.1,2426-2444).
ccatgatggaacagtatga

SEQ ID NO: 635223 - DNA, 19 bp, Mus musculus
  siRNA target sequence for Igf2r (NM_010515.1,2479-2497).
ggaggaaactggtatgcta

SEQ ID NO: 635224 - DNA, 19 bp, Mus musculus
  siRNA target sequence for Igf2r (NM_010515.1,2480-2498).
gaggaaactggtatgctat

SEQ ID NO: 635225 - DNA, 19 bp, Mus musculus
  siRNA target sequence for Igf2r (NM_010515.1,2515-2533).
catgttacacggaggaaat

SEQ ID NO: 635226 - DNA, 19 bp, Mus musculus
  siRNA target sequence for Igf2r (NM_010515.1,2518-2536).
gttacacggaggaaatact

SEQ ID NO: 635227 - DNA, 19 bp, Mus musculus
  siRNA target sequence for Igf2r (NM_010515.1,2568-2586).
gccaggctgcgatcgatat

SEQ ID NO: 635228 - DNA, 19 bp, Mus musculus
  siRNA target sequence for Igf2r (NM_010515.1,2572-2590).
ggctgcgatcgatatgcat

SEQ ID NO: 635229 - DNA, 19 bp, Mus musculus
  siRNA target sequence for Igf2r (NM_010515.1,2588-2606).
catctgcttgccagatgaa

SEQ ID NO: 635230 - DNA, 19 bp, Mus musculus
  siRNA target sequence for Igf2r (NM_010515.1,2594-2612).
cttgccagatgaaatatga

SEQ ID NO: 635231 - DNA, 19 bp, Mus musculus
  siRNA target sequence for Igf2r (NM_010515.1,2655-2673).
cttgggagttgcaaagata

SEQ ID NO: 635232 - DNA, 19 bp, Mus musculus
  siRNA target sequence for Igf2r (NM_010515.1,2695-2713).
ggcagcctcctcttagagt

SEQ ID NO: 635233 - DNA, 19 bp, Mus musculus
  siRNA target sequence for Igf2r (NM_010515.1,2699-2717).
gcctcctcttagagtatgt

SEQ ID NO: 635234 - DNA, 19 bp, Mus musculus
  siRNA target sequence for Igf2r (NM_010515.1,2701-2719).
ctcctcttagagtatgtga

SEQ ID NO: 635235 - DNA, 19 bp, Mus musculus
  siRNA target sequence for Igf2r (NM_010515.1,2765-2783).
gcaccaggatccatcttgt

SEQ ID NO: 635236 - DNA, 19 bp, Mus musculus
  siRNA target sequence for Igf2r (NM_010515.1,2786-2804).
gtggtcgaggatttatgaa

SEQ ID NO: 635237 - DNA, 19 bp, Mus musculus
  siRNA target sequence for Igf2r (NM_010515.1,2788-2806).
ggtcgaggatttatgaact

SEQ ID NO: 635238 - DNA, 19 bp, Mus musculus
  siRNA target sequence for Igf2r (NM_010515.1,2805-2823).
ctcccatcccatattcact

SEQ ID NO: 635239 - DNA, 19 bp, Mus musculus
  siRNA target sequence for Igf2r (NM_010515.1,2833-2851).
gaatgtgtggtcagtttct

SEQ ID NO: 635240 - DNA, 19 bp, Mus musculus
  siRNA target sequence for Igf2r (NM_010515.1,2874-2892).
ccctatccagacaatcaca

SEQ ID NO: 635241 - DNA, 19 bp, Mus musculus
  siRNA target sequence for Igf2r (NM_010515.1,2899-2917).
gaccaggcttgctcaataa

SEQ ID NO: 635242 - DNA, 19 bp, Mus musculus
  siRNA target sequence for Igf2r (NM_010515.1,2947-2965).
cttagcccactcaacgatt

SEQ ID NO: 635243 - DNA, 19 bp, Mus musculus
  siRNA target sequence for Igf2r (NM_010515.1,2985-3003).
cttaggcatcggaaagact

SEQ ID NO: 635244 - DNA, 19 bp, Mus musculus
  siRNA target sequence for Igf2r (NM_010515.1,2996-3014).
gaaagacttttgtgttcaa

SEQ ID NO: 635245 - DNA, 19 bp, Mus musculus
  siRNA target sequence for Igf2r (NM_010515.1,3075-3093).
ggccgaaactcagatagaa

SEQ ID NO: 635246 - DNA, 19 bp, Mus musculus
  siRNA target sequence for Igf2r (NM_010515.1,3078-3096).
cgaaactcagatagaagat

SEQ ID NO: 635247 - DNA, 19 bp, Mus musculus
  siRNA target sequence for Igf2r (NM_010515.1,3083-3101).
ctcagatagaagatattaa

SEQ ID NO: 635248 - DNA, 19 bp, Mus musculus
  siRNA target sequence for Igf2r (NM_010515.1,3211-3229).
gcattcatcatccgtttta

SEQ ID NO: 635249 - DNA, 19 bp, Mus musculus
  siRNA target sequence for Igf2r (NM_010515.1,3212-3230).
cattcatcatccgttttat

SEQ ID NO: 635250 - DNA, 19 bp, Mus musculus
  siRNA target sequence for Igf2r (NM_010515.1,3268-3286).
ctgcatcaggacattgact

SEQ ID NO: 635251 - DNA, 19 bp, Mus musculus
  siRNA target sequence for Igf2r (NM_010515.1,3292-3310).
cgagggatccggaacactt

SEQ ID NO: 635252 - DNA, 19 bp, Mus musculus
  siRNA target sequence for Igf2r (NM_010515.1,3293-3311).
gagggatccggaacactta

SEQ ID NO: 635253 - DNA, 19 bp, Mus musculus
  siRNA target sequence for Igf2r (NM_010515.1,3295-3313).
gggatccggaacacttact

SEQ ID NO: 635254 - DNA, 19 bp, Mus musculus
  siRNA target sequence for Igf2r (NM_010515.1,3296-3314).
ggatccggaacacttactt

SEQ ID NO: 635255 - DNA, 19 bp, Mus musculus
  siRNA target sequence for Igf2r (NM_010515.1,3297-3315).
gatccggaacacttacttt

SEQ ID NO: 635256 - DNA, 19 bp, Mus musculus
  siRNA target sequence for Igf2r (NM_010515.1,3306-3324).
cacttactttgagtttgaa

SEQ ID NO: 635257 - DNA, 19 bp, Mus musculus
  siRNA target sequence for Igf2r (NM_010515.1,3374-3392).
cagctgggaacgagtatga

SEQ ID NO: 635258 - DNA, 19 bp, Mus musculus
  siRNA target sequence for Igf2r (NM_010515.1,3376-3394).
gctgggaacgagtatgact

SEQ ID NO: 635259 - DNA, 19 bp, Mus musculus
  siRNA target sequence for Igf2r (NM_010515.1,3505-3523).
ggctgccacggcattgcat

SEQ ID NO: 635260 - DNA, 19 bp, Mus musculus
  siRNA target sequence for Igf2r (NM_010515.1,3865-3883).
ggcgagtacacctactact

SEQ ID NO: 635261 - DNA, 19 bp, Mus musculus
  siRNA target sequence for Igf2r (NM_010515.1,3894-3912).
cgggaagctgtcatcagat

SEQ ID NO: 635262 - DNA, 19 bp, Mus musculus
  siRNA target sequence for Igf2r (NM_010515.1,4005-4023).
ccagaagctgactttcgaa

SEQ ID NO: 635263 - DNA, 19 bp, Mus musculus
  siRNA target sequence for Igf2r (NM_010515.1,4006-4024).
cagaagctgactttcgaaa

SEQ ID NO: 635264 - DNA, 19 bp, Mus musculus
  siRNA target sequence for Igf2r (NM_010515.1,4020-4038).
cgaaaacggactgttgaaa

SEQ ID NO: 635265 - DNA, 19 bp, Mus musculus
  siRNA target sequence for Igf2r (NM_010515.1,4055-4073).
gggatacctgccataaggt

SEQ ID NO: 635266 - DNA, 19 bp, Mus musculus
  siRNA target sequence for Igf2r (NM_010515.1,4061-4079).
cctgccataaggtgtatca

SEQ ID NO: 635267 - DNA, 19 bp, Mus musculus
  siRNA target sequence for Igf2r (NM_010515.1,4080-4098).
gcgctccacaaccatctat

SEQ ID NO: 635268 - DNA, 19 bp, Mus musculus
  siRNA target sequence for Igf2r (NM_010515.1,4081-4099).
cgctccacaaccatctatt

SEQ ID NO: 635269 - DNA, 19 bp, Mus musculus
  siRNA target sequence for Igf2r (NM_010515.1,4082-4100).
gctccacaaccatctattt

SEQ ID NO: 635270 - DNA, 19 bp, Mus musculus
  siRNA target sequence for Igf2r (NM_010515.1,4148-4166).
cggactgctcctatatgtt

SEQ ID NO: 635271 - DNA, 19 bp, Mus musculus
  siRNA target sequence for Igf2r (NM_010515.1,4301-4319).
gggccactgagcattacct

SEQ ID NO: 635272 - DNA, 19 bp, Mus musculus
  siRNA target sequence for Igf2r (NM_010515.1,4311-4329).
gcattacctcatcaatgta

SEQ ID NO: 635273 - DNA, 19 bp, Mus musculus
  siRNA target sequence for Igf2r (NM_010515.1,4535-4553).
gcagtgacaaccaagtgaa

SEQ ID NO: 635274 - DNA, 19 bp, Mus musculus
  siRNA target sequence for Igf2r (NM_010515.1,4632-4650).
gaagagcaacacacatgat

SEQ ID NO: 635275 - DNA, 19 bp, Mus musculus
  siRNA target sequence for Igf2r (NM_010515.1,4673-4691).
gcacaggccacctgtttga

SEQ ID NO: 635276 - DNA, 19 bp, Mus musculus
  siRNA target sequence for Igf2r (NM_010515.1,4706-4724).
gtggcagagctggtatcaa

SEQ ID NO: 635277 - DNA, 19 bp, Mus musculus
  siRNA target sequence for Igf2r (NM_010515.1,4872-4890).
gcagctggtgtatgagaat

SEQ ID NO: 635278 - DNA, 19 bp, Mus musculus
  siRNA target sequence for Igf2r (NM_010515.1,5071-5089).
cggaatggaagctcgatta

SEQ ID NO: 635279 - DNA, 19 bp, Mus musculus
  siRNA target sequence for Igf2r (NM_010515.1,5073-5091).
gaatggaagctcgattatt

SEQ ID NO: 635280 - DNA, 19 bp, Mus musculus
  siRNA target sequence for Igf2r (NM_010515.1,5117-5135).
ctggtggctacgaagcata

SEQ ID NO: 635281 - DNA, 19 bp, Mus musculus
  siRNA target sequence for Igf2r (NM_010515.1,5127-5145).
cgaagcatacgatgaaagt

SEQ ID NO: 635282 - DNA, 19 bp, Mus musculus
  siRNA target sequence for Igf2r (NM_010515.1,5291-5309).
caggccctccaatattcaa

SEQ ID NO: 635283 - DNA, 19 bp, Mus musculus
  siRNA target sequence for Igf2r (NM_010515.1,5307-5325).
caatcctgtggcgaatgaa

SEQ ID NO: 635284 - DNA, 19 bp, Mus musculus
  siRNA target sequence for Igf2r (NM_010515.1,5326-5344).
gtctacctgaactttgaga

SEQ ID NO: 635285 - DNA, 19 bp, Mus musculus
  siRNA target sequence for Igf2r (NM_010515.1,5357-5375).
gcttagccgacagatatat

SEQ ID NO: 635286 - DNA, 19 bp, Mus musculus
  siRNA target sequence for Igf2r (NM_010515.1,5363-5381).
ccgacagatatatgaacta

SEQ ID NO: 635287 - DNA, 19 bp, Mus musculus
  siRNA target sequence for Igf2r (NM_010515.1,5365-5383).
gacagatatatgaactaca

SEQ ID NO: 635288 - DNA, 19 bp, Mus musculus
  siRNA target sequence for Igf2r (NM_010515.1,5447-5465).
ccaatgactgcgactttgt

SEQ ID NO: 635289 - DNA, 19 bp, Mus musculus
  siRNA target sequence for Igf2r (NM_010515.1,5514-5532).
gggttgtgctgtaacagat

SEQ ID NO: 635290 - DNA, 19 bp, Mus musculus
  siRNA target sequence for Igf2r (NM_010515.1,5533-5551).
gagcagctgctctatagct

SEQ ID NO: 635291 - DNA, 19 bp, Mus musculus
  siRNA target sequence for Igf2r (NM_010515.1,5595-5613).
ggatgcccgcacatacagt

SEQ ID NO: 635292 - DNA, 19 bp, Mus musculus
  siRNA target sequence for Igf2r (NM_010515.1,5596-5614).
gatgcccgcacatacagta

SEQ ID NO: 635293 - DNA, 19 bp, Mus musculus
  siRNA target sequence for Igf2r (NM_010515.1,5717-5735).
catcgatgcagctggatta

SEQ ID NO: 635294 - DNA, 19 bp, Mus musculus
  siRNA target sequence for Igf2r (NM_010515.1,5841-5859).
gaagagctatgatgaatgt

SEQ ID NO: 635295 - DNA, 19 bp, Mus musculus
  siRNA target sequence for Igf2r (NM_010515.1,5846-5864).
gctatgatgaatgtgtatt

SEQ ID NO: 635296 - DNA, 19 bp, Mus musculus
  siRNA target sequence for Igf2r (NM_010515.1,5952-5970).
ccggatgtctgcgatcata

SEQ ID NO: 635297 - DNA, 19 bp, Mus musculus
  siRNA target sequence for Igf2r (NM_010515.1,5953-5971).
cggatgtctgcgatcatat

SEQ ID NO: 635298 - DNA, 19 bp, Mus musculus
  siRNA target sequence for Igf2r (NM_010515.1,5954-5972).
ggatgtctgcgatcatatt

SEQ ID NO: 635299 - DNA, 19 bp, Mus musculus
  siRNA target sequence for Igf2r (NM_010515.1,5955-5973).
gatgtctgcgatcatattt

SEQ ID NO: 635300 - DNA, 19 bp, Mus musculus
  siRNA target sequence for Igf2r (NM_010515.1,5967-5985).
catatttacgtgtgatgaa

SEQ ID NO: 635301 - DNA, 19 bp, Mus musculus
  siRNA target sequence for Igf2r (NM_010515.1,6081-6099).
gatggagtgcaagtttgtt

SEQ ID NO: 635302 - DNA, 19 bp, Mus musculus
  siRNA target sequence for Igf2r (NM_010515.1,6143-6161).
cggggtcctgggactttgt

SEQ ID NO: 635303 - DNA, 19 bp, Mus musculus
  siRNA target sequence for Igf2r (NM_010515.1,6170-6188).
gaaactcgtactttatcaa

SEQ ID NO: 635304 - DNA, 19 bp, Mus musculus
  siRNA target sequence for Igf2r (NM_010515.1,6229-6247).
gaaagagccagcatttgca

SEQ ID NO: 635305 - DNA, 19 bp, Mus musculus
  siRNA target sequence for Igf2r (NM_010515.1,6235-6253).
gccagcatttgcaagaaga

SEQ ID NO: 635306 - DNA, 19 bp, Mus musculus
  siRNA target sequence for Igf2r (NM_010515.1,6273-6291).
ggttttggggcttgttcat

SEQ ID NO: 635307 - DNA, 19 bp, Mus musculus
  siRNA target sequence for Igf2r (NM_010515.1,6279-6297).
ggggcttgttcatacacaa

SEQ ID NO: 635308 - DNA, 19 bp, Mus musculus
  siRNA target sequence for Igf2r (NM_010515.1,6280-6298).
gggcttgttcatacacaaa

SEQ ID NO: 635309 - DNA, 19 bp, Mus musculus
  siRNA target sequence for Igf2r (NM_010515.1,6313-6331).
gatgaaacggtcattgtta

SEQ ID NO: 635310 - DNA, 19 bp, Mus musculus
  siRNA target sequence for Igf2r (NM_010515.1,6368-6386).
ctgcatcgtctgtaatcga

SEQ ID NO: 635311 - DNA, 19 bp, Mus musculus
  siRNA target sequence for Igf2r (NM_010515.1,6370-6388).
gcatcgtctgtaatcgaat

SEQ ID NO: 635312 - DNA, 19 bp, Mus musculus
  siRNA target sequence for Igf2r (NM_010515.1,6371-6389).
catcgtctgtaatcgaatt

SEQ ID NO: 635313 - DNA, 19 bp, Mus musculus
  siRNA target sequence for Igf2r (NM_010515.1,6552-6570).
cagcctcggcgagatttat

SEQ ID NO: 635314 - DNA, 19 bp, Mus musculus
  siRNA target sequence for Igf2r (NM_010515.1,6554-6572).
gcctcggcgagatttattt

SEQ ID NO: 635315 - DNA, 19 bp, Mus musculus
  siRNA target sequence for Igf2r (NM_010515.1,6555-6573).
cctcggcgagatttatttt

SEQ ID NO: 635316 - DNA, 19 bp, Mus musculus
  siRNA target sequence for Igf2r (NM_010515.1,6556-6574).
ctcggcgagatttatttta

SEQ ID NO: 635317 - DNA, 19 bp, Mus musculus
  siRNA target sequence for Igf2r (NM_010515.1,6811-6829).
gataagaccaagtctgttt

SEQ ID NO: 635318 - DNA, 19 bp, Mus musculus
  siRNA target sequence for Igf2r (NM_010515.1,6969-6987).
gagcgcagggccagagtat

SEQ ID NO: 635319 - DNA, 19 bp, Mus musculus
  siRNA target sequence for Igf2r (NM_010515.1,6971-6989).
gcgcagggccagagtataa

SEQ ID NO: 635320 - DNA, 19 bp, Mus musculus
  siRNA target sequence for Igf2r (NM_010515.1,6972-6990).
cgcagggccagagtataaa

SEQ ID NO: 635321 - DNA, 19 bp, Mus musculus
  siRNA target sequence for Igf2r (NM_010515.1,7067-7085).
ccttactgctgcataagaa

SEQ ID NO: 635322 - DNA, 19 bp, Mus musculus
  siRNA target sequence for Igf2r (NM_010515.1,7091-7109).
gaagggaaactgtgataaa

SEQ ID NO: 635323 - DNA, 19 bp, Mus musculus
  siRNA target sequence for Igf2r (NM_010515.1,7139-7157).
cgggcgtgtcctacaagta

SEQ ID NO: 635324 - DNA, 19 bp, Mus musculus
  siRNA target sequence for Igf2r (NM_010515.1,7144-7162).
gtgtcctacaagtactcaa

SEQ ID NO: 635325 - DNA, 19 bp, Mus musculus
  siRNA target sequence for Igf2r (NM_010515.1,7349-7367).
ccgttccagaggtgaaagt

SEQ ID NO: 635326 - DNA, 19 bp, Mus musculus
  siRNA target sequence for Igf2r (NM_010515.1,7556-7574).
gcgacgaagacctcttaca

SEQ ID NO: 635327 - DNA, 19 bp, Mus musculus
  siRNA target sequence for Igf2r (NM_010515.1,7558-7576).
gacgaagacctcttacaca

SEQ ID NO: 635328 - DNA, 19 bp, Mus musculus
  siRNA target sequence for Igsf7 (NM_134158.1,447-465).
gctcagtgtgtcatgtcaa

SEQ ID NO: 635329 - DNA, 19 bp, Mus musculus
  siRNA target sequence for Igsf7 (NM_134158.1,516-534).
gaaggtactctgtaaagat

SEQ ID NO: 635330 - DNA, 19 bp, Mus musculus
  siRNA target sequence for Il12rb1 (NM_008353.1,197-215).
ggacccaggaacttgagtt

SEQ ID NO: 635331 - DNA, 19 bp, Mus musculus
  siRNA target sequence for Il12rb1 (NM_008353.1,213-231).
gttgctacagggtttccaa

SEQ ID NO: 635332 - DNA, 19 bp, Mus musculus
  siRNA target sequence for Il12rb1 (NM_008353.1,223-241).
ggtttccaagacagactat

SEQ ID NO: 635333 - DNA, 19 bp, Mus musculus
  siRNA target sequence for Il12rb1 (NM_008353.1,335-353).
gagcgctgccgctacttct

SEQ ID NO: 635334 - DNA, 19 bp, Mus musculus
  siRNA target sequence for Il12rb1 (NM_008353.1,443-461).
gggaaccgaaccatgaagt

SEQ ID NO: 635335 - DNA, 19 bp, Mus musculus
  siRNA target sequence for Il12rb1 (NM_008353.1,518-536).
cacatcaaggtgtcacaat

SEQ ID NO: 635336 - DNA, 19 bp, Mus musculus
  siRNA target sequence for Il12rb1 (NM_008353.1,520-538).
catcaaggtgtcacaatca

SEQ ID NO: 635337 - DNA, 19 bp, Mus musculus
  siRNA target sequence for Il12rb1 (NM_008353.1,551-569).
cgaatggactggaatgtgt

SEQ ID NO: 635338 - DNA, 19 bp, Mus musculus
  siRNA target sequence for Il12rb1 (NM_008353.1,829-847).
ccttccccaggccaagatt

SEQ ID NO: 635339 - DNA, 19 bp, Mus musculus
  siRNA target sequence for Il12rb1 (NM_008353.1,830-848).
cttccccaggccaagatta

SEQ ID NO: 635340 - DNA, 19 bp, Mus musculus
  siRNA target sequence for Il12rb1 (NM_008353.1,833-851).
ccccaggccaagattaagt

SEQ ID NO: 635341 - DNA, 19 bp, Mus musculus
  siRNA target sequence for Il12rb1 (NM_008353.1,834-852).
cccaggccaagattaagtt

SEQ ID NO: 635342 - DNA, 19 bp, Mus musculus
  siRNA target sequence for Il12rb1 (NM_008353.1,879-897).
gaaggaggcgtctaaccat

SEQ ID NO: 635343 - DNA, 19 bp, Mus musculus
  siRNA target sequence for Il12rb1 (NM_008353.1,1072-1090).
gaatgtgctcgccaaaact

SEQ ID NO: 635344 - DNA, 19 bp, Mus musculus
  siRNA target sequence for Il12rb1 (NM_008353.1,1169-1187).
gtgggaggcaacatgacat

SEQ ID NO: 635345 - DNA, 19 bp, Mus musculus
  siRNA target sequence for Il12rb1 (NM_008353.1,1276-1294).
cctgattgtaccagaagaa

SEQ ID NO: 635346 - DNA, 19 bp, Mus musculus
  siRNA target sequence for Il12rb1 (NM_008353.1,1416-1434).
cagtcctgtccagttacta

SEQ ID NO: 635347 - DNA, 19 bp, Mus musculus
  siRNA target sequence for Il12rb1 (NM_008353.1,1418-1436).
gtcctgtccagttactact

SEQ ID NO: 635348 - DNA, 19 bp, Mus musculus
  siRNA target sequence for Il12rb1 (NM_008353.1,1475-1493).
gtgtcggtgaggaaccaaa

SEQ ID NO: 635349 - DNA, 19 bp, Mus musculus
  siRNA target sequence for Il12rb1 (NM_008353.1,1548-1566).
gggtcctgacgcaatacgt

SEQ ID NO: 635350 - DNA, 19 bp, Mus musculus
  siRNA target sequence for Il12rb1 (NM_008353.1,1609-1627).
gctcgtgccacccactaaa

SEQ ID NO: 635351 - DNA, 19 bp, Mus musculus
  siRNA target sequence for Il12rb1 (NM_008353.1,1718-1736).
catccccagcgctttagct

SEQ ID NO: 635352 - DNA, 19 bp, Mus musculus
  siRNA target sequence for Il12rb1 (NM_008353.1,1742-1760).
gtgcagatttcccgtttat

SEQ ID NO: 635353 - DNA, 19 bp, Mus musculus
  siRNA target sequence for Il12rb1 (NM_008353.1,1752-1770).
cccgtttatccatcatttt

SEQ ID NO: 635354 - DNA, 19 bp, Mus musculus
  siRNA target sequence for Il12rb1 (NM_008353.1,1807-1825).
gggcagtctcggatacatt

SEQ ID NO: 635355 - DNA, 19 bp, Mus musculus
  siRNA target sequence for Il12rb1 (NM_008353.1,1817-1835).
ggatacattggcttaaaca

SEQ ID NO: 635356 - DNA, 19 bp, Mus musculus
  siRNA target sequence for Il15ra (NM_008358.1,107-125).
gtccacctcccgtatctat

SEQ ID NO: 635357 - DNA, 19 bp, Mus musculus
  siRNA target sequence for Il15ra (NM_008358.1,110-128).
cacctcccgtatctattga

SEQ ID NO: 635358 - DNA, 19 bp, Mus musculus
  siRNA target sequence for Il15ra (NM_008358.1,134-152).
ctgacatccgggtcaagaa

SEQ ID NO: 635359 - DNA, 19 bp, Mus musculus
  siRNA target sequence for Il15ra (NM_008358.1,141-159).
ccgggtcaagaattacagt

SEQ ID NO: 635360 - DNA, 19 bp, Mus musculus
  siRNA target sequence for Il15ra (NM_008358.1,170-188).
gggagaggtatgtctgtaa

SEQ ID NO: 635361 - DNA, 19 bp, Mus musculus
  siRNA target sequence for Il15ra (NM_008358.1,172-190).
gagaggtatgtctgtaact

SEQ ID NO: 635362 - DNA, 19 bp, Mus musculus
  siRNA target sequence for Il15ra (NM_008358.1,174-192).
gaggtatgtctgtaactct

SEQ ID NO: 635363 - DNA, 19 bp, Mus musculus
  siRNA target sequence for Il15ra (NM_008358.1,423-441).
gaccacagagacagctatt

SEQ ID NO: 635364 - DNA, 19 bp, Mus musculus
  siRNA target sequence for Il15ra (NM_008358.1,459-477).
gacaccatcccaaacaact

SEQ ID NO: 635365 - DNA, 19 bp, Mus musculus
  siRNA target sequence for Il15ra (NM_008358.1,564-582).
cacctccctcaggataaca

SEQ ID NO: 635366 - DNA, 19 bp, Mus musculus
  siRNA target sequence for Il15ra (NM_008358.1,590-608).
ctccccacagttccaaaat

SEQ ID NO: 635367 - DNA, 19 bp, Mus musculus
  siRNA target sequence for Il15ra (NM_008358.1,672-690).
ggcctggtacatcaaatca

SEQ ID NO: 635368 - DNA, 19 bp, Mus musculus
  siRNA target sequence for Il17r (NM_008359.1,270-288).
cagagtcaagaatagtact

SEQ ID NO: 635369 - DNA, 19 bp, Mus musculus
  siRNA target sequence for Il17r (NM_008359.1,305-323).
ggatccaccccaaaaacct

SEQ ID NO: 635370 - DNA, 19 bp, Mus musculus
  siRNA target sequence for Il17r (NM_008359.1,328-346).
ccgtcttccccaaaaaaca

SEQ ID NO: 635371 - DNA, 19 bp, Mus musculus
  siRNA target sequence for Il17r (NM_008359.1,345-363).
catctatatcaatcttagt

SEQ ID NO: 635372 - DNA, 19 bp, Mus musculus
  siRNA target sequence for Il17r (NM_008359.1,371-389).
ctacccagcacggagaatt

SEQ ID NO: 635373 - DNA, 19 bp, Mus musculus
  siRNA target sequence for Il17r (NM_008359.1,374-392).
cccagcacggagaattagt

SEQ ID NO: 635374 - DNA, 19 bp, Mus musculus
  siRNA target sequence for Il17r (NM_008359.1,497-515).
gtgtcaagttccagtttct

SEQ ID NO: 635375 - DNA, 19 bp, Mus musculus
  siRNA target sequence for Il17r (NM_008359.1,854-872).
gctttgatgtcgttaaaca

SEQ ID NO: 635376 - DNA, 19 bp, Mus musculus
  siRNA target sequence for Il17r (NM_008359.1,855-873).
ctttgatgtcgttaaacaa

SEQ ID NO: 635377 - DNA, 19 bp, Mus musculus
  siRNA target sequence for Il17r (NM_008359.1,901-919).
catcagcgagctaatgtca

SEQ ID NO: 635378 - DNA, 19 bp, Mus musculus
  siRNA target sequence for Il17r (NM_008359.1,986-1004).
gctgcctaaatgactgttt

SEQ ID NO: 635379 - DNA, 19 bp, Mus musculus
  siRNA target sequence for Il17r (NM_008359.1,1021-1039).
gtgccctgcccagtaatct

SEQ ID NO: 635380 - DNA, 19 bp, Mus musculus
  siRNA target sequence for Il17r (NM_008359.1,1024-1042).
ccctgcccagtaatctcaa

SEQ ID NO: 635381 - DNA, 19 bp, Mus musculus
  siRNA target sequence for Il17r (NM_008359.1,1132-1150).
gtcatcgtgctgatcatct

SEQ ID NO: 635382 - DNA, 19 bp, Mus musculus
  siRNA target sequence for Il17r (NM_008359.1,1189-1207).
catggtgatgactccaaaa

SEQ ID NO: 635383 - DNA, 19 bp, Mus musculus
  siRNA target sequence for Il17r (NM_008359.1,1193-1211).
gtgatgactccaaaatcaa

SEQ ID NO: 635384 - DNA, 19 bp, Mus musculus
  siRNA target sequence for Il17r (NM_008359.1,1283-1301).
ccgaccaccccctctatgt

SEQ ID NO: 635385 - DNA, 19 bp, Mus musculus
  siRNA target sequence for Il17r (NM_008359.1,1300-1318).
gtggaggtggtcctaaagt

SEQ ID NO: 635386 - DNA, 19 bp, Mus musculus
  siRNA target sequence for Il17r (NM_008359.1,1435-1453).
gtggagagcaactccaaaa

SEQ ID NO: 635387 - DNA, 19 bp, Mus musculus
  siRNA target sequence for Il17r (NM_008359.1,1619-1637).
gcacctacgttgtttgcta

SEQ ID NO: 635388 - DNA, 19 bp, Mus musculus
  siRNA target sequence for Il17r (NM_008359.1,1700-1718).
cactcatggacagatttga

SEQ ID NO: 635389 - DNA, 19 bp, Mus musculus
  siRNA target sequence for Il17r (NM_008359.1,1928-1946).
ccctggatgaagaagtgtt

SEQ ID NO: 635390 - DNA, 19 bp, Mus musculus
  siRNA target sequence for Il17r (NM_008359.1,1929-1947).
cctggatgaagaagtgttt

SEQ ID NO: 635391 - DNA, 19 bp, Mus musculus
  siRNA target sequence for Il17r (NM_008359.1,1964-1982).
caccagggggaggaattgt

SEQ ID NO: 635392 - DNA, 19 bp, Mus musculus
  siRNA target sequence for Il17r (NM_008359.1,1966-1984).
ccagggggaggaattgtca

SEQ ID NO: 635393 - DNA, 19 bp, Mus musculus
  siRNA target sequence for Il17rb (NM_019583.1,66-84).
gcctcgagagccgactatt

SEQ ID NO: 635394 - DNA, 19 bp, Mus musculus
  siRNA target sequence for Il17rb (NM_019583.1,68-86).
ctcgagagccgactattca

SEQ ID NO: 635395 - DNA, 19 bp, Mus musculus
  siRNA target sequence for Il17rb (NM_019583.1,70-88).
cgagagccgactattcagt

SEQ ID NO: 635396 - DNA, 19 bp, Mus musculus
  siRNA target sequence for Il17rb (NM_019583.1,166-184).
gtggaactcgtcaagacaa

SEQ ID NO: 635397 - DNA, 19 bp, Mus musculus
  siRNA target sequence for Il17rb (NM_019583.1,187-205).
gtggcagcagaggagtttt

SEQ ID NO: 635398 - DNA, 19 bp, Mus musculus
  siRNA target sequence for Il17rb (NM_019583.1,193-211).
gcagaggagttttcaattt

SEQ ID NO: 635399 - DNA, 19 bp, Mus musculus
  siRNA target sequence for Il17rb (NM_019583.1,245-263).
ccagcatccgcttgttgaa

SEQ ID NO: 635400 - DNA, 19 bp, Mus musculus
  siRNA target sequence for Il17rb (NM_019583.1,278-296).
gcgtgagtggcaaaaacaa

SEQ ID NO: 635401 - DNA, 19 bp, Mus musculus
  siRNA target sequence for Il17rb (NM_019583.1,441-459).
ccccaatgctaatatgaat

SEQ ID NO: 635402 - DNA, 19 bp, Mus musculus
  siRNA target sequence for Il17rb (NM_019583.1,497-515).
cagggtgcactcgtgaaaa

SEQ ID NO: 635403 - DNA, 19 bp, Mus musculus
  siRNA target sequence for Il17rb (NM_019583.1,555-573).
ccaggctctccggatttca

SEQ ID NO: 635404 - DNA, 19 bp, Mus musculus
  siRNA target sequence for Il17rb (NM_019583.1,574-592).
gctcctttcccattacaat

SEQ ID NO: 635405 - DNA, 19 bp, Mus musculus
  siRNA target sequence for Il17rb (NM_019583.1,575-593).
ctcctttcccattacaatt

SEQ ID NO: 635406 - DNA, 19 bp, Mus musculus
  siRNA target sequence for Il23r (NM_144548.1,180-198).
gtgtcacggaggaatcaca

SEQ ID NO: 635407 - DNA, 19 bp, Mus musculus
  siRNA target sequence for Il23r (NM_144548.1,184-202).
cacggaggaatcacaagta

SEQ ID NO: 635408 - DNA, 19 bp, Mus musculus
  siRNA target sequence for Il23r (NM_144548.1,226-244).
gttgagcctggtgaaattt

SEQ ID NO: 635409 - DNA, 19 bp, Mus musculus
  siRNA target sequence for Il23r (NM_144548.1,252-270).
gggcatgaatgtttctata

SEQ ID NO: 635410 - DNA, 19 bp, Mus musculus
  siRNA target sequence for Il23r (NM_144548.1,296-314).
gccgaccaaggaatcttta

SEQ ID NO: 635411 - DNA, 19 bp, Mus musculus
  siRNA target sequence for Il23r (NM_144548.1,298-316).
cgaccaaggaatctttact

SEQ ID NO: 635412 - DNA, 19 bp, Mus musculus
  siRNA target sequence for Il23r (NM_144548.1,368-386).
caacagctcggatttggta

SEQ ID NO: 635413 - DNA, 19 bp, Mus musculus
  siRNA target sequence for Il23r (NM_144548.1,371-389).
cagctcggatttggtataa

SEQ ID NO: 635414 - DNA, 19 bp, Mus musculus
  siRNA target sequence for Il23r (NM_144548.1,398-416).
cggaacctcatgcctatat

SEQ ID NO: 635415 - DNA, 19 bp, Mus musculus
  siRNA target sequence for Il23r (NM_144548.1,457-475).
ctgatttgtgggaaagaca

SEQ ID NO: 635416 - DNA, 19 bp, Mus musculus
  siRNA target sequence for Il23r (NM_144548.1,496-514).
gatgcccccagcaatctga

SEQ ID NO: 635417 - DNA, 19 bp, Mus musculus
  siRNA target sequence for Il23r (NM_144548.1,507-525).
caatctgacatgtgtcatt

SEQ ID NO: 635418 - DNA, 19 bp, Mus musculus
  siRNA target sequence for Il23r (NM_144548.1,529-547).
gaatactcaggcaacatga

SEQ ID NO: 635419 - DNA, 19 bp, Mus musculus
  siRNA target sequence for Il23r (NM_144548.1,566-584).
ggaagcctacctacataga

SEQ ID NO: 635420 - DNA, 19 bp, Mus musculus
  siRNA target sequence for Il23r (NM_144548.1,567-585).
gaagcctacctacatagat

SEQ ID NO: 635421 - DNA, 19 bp, Mus musculus
  siRNA target sequence for Il23r (NM_144548.1,579-597).
catagataccaagtatatt

SEQ ID NO: 635422 - DNA, 19 bp, Mus musculus
  siRNA target sequence for Il23r (NM_144548.1,640-658).
cttgcctcaagctatgtta

SEQ ID NO: 635423 - DNA, 19 bp, Mus musculus
  siRNA target sequence for Il23r (NM_144548.1,643-661).
gcctcaagctatgttaaga

SEQ ID NO: 635424 - DNA, 19 bp, Mus musculus
  siRNA target sequence for Il23r (NM_144548.1,683-701).
gcagcaggaagtatttggt

SEQ ID NO: 635425 - DNA, 19 bp, Mus musculus
  siRNA target sequence for Il23r (NM_144548.1,753-771).
cgtccatctggatgatata

SEQ ID NO: 635426 - DNA, 19 bp, Mus musculus
  siRNA target sequence for Il23r (NM_144548.1,778-796).
ccttctgcgtccatcattt

SEQ ID NO: 635427 - DNA, 19 bp, Mus musculus
  siRNA target sequence for Il23r (NM_144548.1,801-819).
ggctgagactacaaacgat

SEQ ID NO: 635428 - DNA, 19 bp, Mus musculus
  siRNA target sequence for Il23r (NM_144548.1,802-820).
gctgagactacaaacgata

SEQ ID NO: 635429 - DNA, 19 bp, Mus musculus
  siRNA target sequence for Il23r (NM_144548.1,807-825).
gactacaaacgatactgta

SEQ ID NO: 635430 - DNA, 19 bp, Mus musculus
  siRNA target sequence for Il23r (NM_144548.1,871-889).
gtattctgtgagatgagat

SEQ ID NO: 635431 - DNA, 19 bp, Mus musculus
  siRNA target sequence for Il23r (NM_144548.1,911-929).
cgtggagtgttaaagaatt

SEQ ID NO: 635432 - DNA, 19 bp, Mus musculus
  siRNA target sequence for Il23r (NM_144548.1,914-932).
ggagtgttaaagaatttga

SEQ ID NO: 635433 - DNA, 19 bp, Mus musculus
  siRNA target sequence for Il23r (NM_144548.1,1214-1232).
ctgcttcaggtaatcatca

SEQ ID NO: 635434 - DNA, 19 bp, Mus musculus
  siRNA target sequence for Il23r (NM_144548.1,1313-1331).
cacttcgaataggaattaa

SEQ ID NO: 635435 - DNA, 19 bp, Mus musculus
  siRNA target sequence for Il23r (NM_144548.1,1315-1333).
cttcgaataggaattaaaa

SEQ ID NO: 635436 - DNA, 19 bp, Mus musculus
  siRNA target sequence for Il23r (NM_144548.1,1471-1489).
cctgtccttacagagataa

SEQ ID NO: 635437 - DNA, 19 bp, Mus musculus
  siRNA target sequence for Il23r (NM_144548.1,1497-1515).
ctctcccctggaacacaaa

SEQ ID NO: 635438 - DNA, 19 bp, Mus musculus
  siRNA target sequence for Il23r (NM_144548.1,1562-1580).
gagactgtcctctaggaat

SEQ ID NO: 635439 - DNA, 19 bp, Mus musculus
  siRNA target sequence for Il23r (NM_144548.1,1570-1588).
cctctaggaatgttgtcta

SEQ ID NO: 635440 - DNA, 19 bp, Mus musculus
  siRNA target sequence for Il23r (NM_144548.1,1584-1602).
gtctaccagttcttctgtt

SEQ ID NO: 635441 - DNA, 19 bp, Mus musculus
  siRNA target sequence for Il23r (NM_144548.1,1617-1635).
cctcaacactggatacaaa

SEQ ID NO: 635442 - DNA, 19 bp, Mus musculus
  siRNA target sequence for Il23r (NM_144548.1,1632-1650).
caaaccccaggtttcaaat

SEQ ID NO: 635443 - DNA, 19 bp, Mus musculus
  siRNA target sequence for Il23r (NM_144548.1,1663-1681).
ggaaaccttttcattaaca

SEQ ID NO: 635444 - DNA, 19 bp, Mus musculus
  siRNA target sequence for Il23r (NM_144548.1,1742-1760).
catatcccaacttccaatt

SEQ ID NO: 635445 - DNA, 19 bp, Mus musculus
  siRNA target sequence for Il23r (NM_144548.1,1769-1787).
caagtatggctttactaaa

SEQ ID NO: 635446 - DNA, 19 bp, Mus musculus
  siRNA target sequence for Il23r (NM_144548.1,1812-1830).
gtgcctcgttttaaatcaa

SEQ ID NO: 635447 - DNA, 19 bp, Mus musculus
  siRNA target sequence for Il23r (NM_144548.1,1880-1898).
gcatcgttttgcaaagtga

SEQ ID NO: 635448 - DNA, 19 bp, Mus musculus
  siRNA target sequence for Il23r (NM_144548.1,1972-1990).
gaagacttgccatctatta

SEQ ID NO: 635449 - DNA, 19 bp, Mus musculus
  siRNA target sequence for Il23r (NM_144548.1,1977-1995).
cttgccatctattaattct

SEQ ID NO: 635450 - DNA, 19 bp, Mus musculus
  siRNA target sequence for Il23r (NM_144548.1,2011-2029).
gttttggaaagccatttca

SEQ ID NO: 635451 - DNA, 19 bp, Mus musculus
  siRNA target sequence for Il2ra (NM_008367.2,176-194).
gggtttctctcattaacca

SEQ ID NO: 635452 - DNA, 19 bp, Mus musculus
  siRNA target sequence for Il2ra (NM_008367.2,211-229).
ggcagaactgtgtctgtat

SEQ ID NO: 635453 - DNA, 19 bp, Mus musculus
  siRNA target sequence for Il2ra (NM_008367.2,244-262).
ccccaatgccacattcaaa

SEQ ID NO: 635454 - DNA, 19 bp, Mus musculus
  siRNA target sequence for Il2ra (NM_008367.2,280-298).
cggcaccatcctaaactgt

SEQ ID NO: 635455 - DNA, 19 bp, Mus musculus
  siRNA target sequence for Il2ra (NM_008367.2,307-325).
gagaggtttccgaagacta

SEQ ID NO: 635456 - DNA, 19 bp, Mus musculus
  siRNA target sequence for Il2ra (NM_008367.2,309-327).
gaggtttccgaagactaaa

SEQ ID NO: 635457 - DNA, 19 bp, Mus musculus
  siRNA target sequence for Il2ra (NM_008367.2,318-336).
gaagactaaaggaattggt

SEQ ID NO: 635458 - DNA, 19 bp, Mus musculus
  siRNA target sequence for Il2ra (NM_008367.2,412-430).
gcaagttacagctcaactt

SEQ ID NO: 635459 - DNA, 19 bp, Mus musculus
  siRNA target sequence for Il2ra (NM_008367.2,579-597).
gtgttcactacgagtgtat

SEQ ID NO: 635460 - DNA, 19 bp, Mus musculus
  siRNA target sequence for Il2ra (NM_008367.2,617-635).
cagagaggtcctgctatta

SEQ ID NO: 635461 - DNA, 19 bp, Mus musculus
  siRNA target sequence for Il2ra (NM_008367.2,621-639).
gaggtcctgctattagcat

SEQ ID NO: 635462 - DNA, 19 bp, Mus musculus
  siRNA target sequence for Il2ra (NM_008367.2,676-694).
gccccagctcacatgtgta

SEQ ID NO: 635463 - DNA, 19 bp, Mus musculus
  siRNA target sequence for Il2ra (NM_008367.2,721-739).
ggctagtgaggaatctcaa

SEQ ID NO: 635464 - DNA, 19 bp, Mus musculus
  siRNA target sequence for Il2ra (NM_008367.2,819-837).
ctgcaatgacggagacatt

SEQ ID NO: 635465 - DNA, 19 bp, Mus musculus
  siRNA target sequence for Il2ra (NM_008367.2,822-840).
caatgacggagacatttgt

SEQ ID NO: 635466 - DNA, 19 bp, Mus musculus
  siRNA target sequence for Il2ra (NM_008367.2,839-857).
gtgctcacaatggagtata

SEQ ID NO: 635467 - DNA, 19 bp, Mus musculus
  siRNA target sequence for Impg1 (NM_022016.1,255-273).
gcttcgaaccaaaagatca

SEQ ID NO: 635468 - DNA, 19 bp, Mus musculus
  siRNA target sequence for Impg1 (NM_022016.1,306-324).
ggaatccttgagacagatt

SEQ ID NO: 635469 - DNA, 19 bp, Mus musculus
  siRNA target sequence for Impg1 (NM_022016.1,372-390).
cgtgtgggaagcatatcgt

SEQ ID NO: 635470 - DNA, 19 bp, Mus musculus
  siRNA target sequence for Impg1 (NM_022016.1,373-391).
gtgtgggaagcatatcgta

SEQ ID NO: 635471 - DNA, 19 bp, Mus musculus
  siRNA target sequence for Impg1 (NM_022016.1,377-395).
gggaagcatatcgtatctt

SEQ ID NO: 635472 - DNA, 19 bp, Mus musculus
  siRNA target sequence for Impg1 (NM_022016.1,378-396).
ggaagcatatcgtatcttt

SEQ ID NO: 635473 - DNA, 19 bp, Mus musculus
  siRNA target sequence for Impg1 (NM_022016.1,695-713).
ccctcaaggacattcaaaa

SEQ ID NO: 635474 - DNA, 19 bp, Mus musculus
  siRNA target sequence for Impg1 (NM_022016.1,728-746).
gtataacagaacctattca

SEQ ID NO: 635475 - DNA, 19 bp, Mus musculus
  siRNA target sequence for Impg1 (NM_022016.1,739-757).
cctattcacgtgtctgaat

SEQ ID NO: 635476 - DNA, 19 bp, Mus musculus
  siRNA target sequence for Impg1 (NM_022016.1,740-758).
ctattcacgtgtctgaatt

SEQ ID NO: 635477 - DNA, 19 bp, Mus musculus
  siRNA target sequence for Impg1 (NM_022016.1,871-889).
ctgcagttgcaaaagatat

SEQ ID NO: 635478 - DNA, 19 bp, Mus musculus
  siRNA target sequence for Impg1 (NM_022016.1,873-891).
gcagttgcaaaagatattt

SEQ ID NO: 635479 - DNA, 19 bp, Mus musculus
  siRNA target sequence for Impg1 (NM_022016.1,874-892).
cagttgcaaaagatattta

SEQ ID NO: 635480 - DNA, 19 bp, Mus musculus
  siRNA target sequence for Impg1 (NM_022016.1,909-927).
cggagaaatccgtgtatta

SEQ ID NO: 635481 - DNA, 19 bp, Mus musculus
  siRNA target sequence for Impg1 (NM_022016.1,913-931).
gaaatccgtgtattaggat

SEQ ID NO: 635482 - DNA, 19 bp, Mus musculus
  siRNA target sequence for Impg1 (NM_022016.1,918-936).
ccgtgtattaggatttaga

SEQ ID NO: 635483 - DNA, 19 bp, Mus musculus
  siRNA target sequence for Impg1 (NM_022016.1,956-974).
gttcaagctccacagaaat

SEQ ID NO: 635484 - DNA, 19 bp, Mus musculus
  siRNA target sequence for Impg1 (NM_022016.1,976-994).
cagcttatggccatcttta

SEQ ID NO: 635485 - DNA, 19 bp, Mus musculus
  siRNA target sequence for Impg1 (NM_022016.1,1000-1018).
gaccatgcagaagcaaaaa

SEQ ID NO: 635486 - DNA, 19 bp, Mus musculus
  siRNA target sequence for Impg1 (NM_022016.1,1045-1063).
gattccaacaaaattgaaa

SEQ ID NO: 635487 - DNA, 19 bp, Mus musculus
  siRNA target sequence for Impg1 (NM_022016.1,1074-1092).
ccatcatggagtcatagaa

SEQ ID NO: 635488 - DNA, 19 bp, Mus musculus
  siRNA target sequence for Impg1 (NM_022016.1,1082-1100).
gagtcatagaagacaaaca

SEQ ID NO: 635489 - DNA, 19 bp, Mus musculus
  siRNA target sequence for Impg1 (NM_022016.1,1124-1142).
cagacctcaaaaaactcat

SEQ ID NO: 635490 - DNA, 19 bp, Mus musculus
  siRNA target sequence for Impg1 (NM_022016.1,1189-1207).
ccattcggtgatgaagtta

SEQ ID NO: 635491 - DNA, 19 bp, Mus musculus
  siRNA target sequence for Impg1 (NM_022016.1,1395-1413).
ctcaatttcccgatcagaa

SEQ ID NO: 635492 - DNA, 19 bp, Mus musculus
  siRNA target sequence for Impg1 (NM_022016.1,1411-1429).
gaaaatctaccttcgttta

SEQ ID NO: 635493 - DNA, 19 bp, Mus musculus
  siRNA target sequence for Impg1 (NM_022016.1,1509-1527).
cactctccccactatcgat

SEQ ID NO: 635494 - DNA, 19 bp, Mus musculus
  siRNA target sequence for Impg1 (NM_022016.1,1511-1529).
ctctccccactatcgatta

SEQ ID NO: 635495 - DNA, 19 bp, Mus musculus
  siRNA target sequence for Impg1 (NM_022016.1,1513-1531).
ctccccactatcgattatt

SEQ ID NO: 635496 - DNA, 19 bp, Mus musculus
  siRNA target sequence for Impg1 (NM_022016.1,1515-1533).
ccccactatcgattattct

SEQ ID NO: 635497 - DNA, 19 bp, Mus musculus
  siRNA target sequence for Impg1 (NM_022016.1,1516-1534).
cccactatcgattattcta

SEQ ID NO: 635498 - DNA, 19 bp, Mus musculus
  siRNA target sequence for Impg1 (NM_022016.1,1652-1670).
cgccagccttgtcagaaat

SEQ ID NO: 635499 - DNA, 19 bp, Mus musculus
  siRNA target sequence for Impg1 (NM_022016.1,1653-1671).
gccagccttgtcagaaata

SEQ ID NO: 635500 - DNA, 19 bp, Mus musculus
  siRNA target sequence for Impg1 (NM_022016.1,1722-1740).
cacacccatcccaacagta

SEQ ID NO: 635501 - DNA, 19 bp, Mus musculus
  siRNA target sequence for Impg1 (NM_022016.1,1732-1750).
ccaacagtacggttcatca

SEQ ID NO: 635502 - DNA, 19 bp, Mus musculus
  siRNA target sequence for Impg1 (NM_022016.1,1781-1799).
gccaggagctagtggtatt

SEQ ID NO: 635503 - DNA, 19 bp, Mus musculus
  siRNA target sequence for Impg1 (NM_022016.1,1783-1801).
caggagctagtggtattct

SEQ ID NO: 635504 - DNA, 19 bp, Mus musculus
  siRNA target sequence for Impg1 (NM_022016.1,1786-1804).
gagctagtggtattcttca

SEQ ID NO: 635505 - DNA, 19 bp, Mus musculus
  siRNA target sequence for Impg1 (NM_022016.1,1805-1823).
gcctgcgtgttgctaacat

SEQ ID NO: 635506 - DNA, 19 bp, Mus musculus
  siRNA target sequence for Impg1 (NM_022016.1,1851-1869).
gagttctctggagtatcaa

SEQ ID NO: 635507 - DNA, 19 bp, Mus musculus
  siRNA target sequence for Impg1 (NM_022016.1,1905-1923).
ctatctacgatcgaatctt

SEQ ID NO: 635508 - DNA, 19 bp, Mus musculus
  siRNA target sequence for Impg1 (NM_022016.1,1916-1934).
cgaatcttacgggatttaa

SEQ ID NO: 635509 - DNA, 19 bp, Mus musculus
  siRNA target sequence for Impg1 (NM_022016.1,1982-2000).
gcaaagtgcggtttgcaaa

SEQ ID NO: 635510 - DNA, 19 bp, Mus musculus
  siRNA target sequence for Impg1 (NM_022016.1,2063-2081).
cagctcaagggctcaatct

SEQ ID NO: 635511 - DNA, 19 bp, Mus musculus
  siRNA target sequence for Impg1 (NM_022016.1,2073-2091).
gctcaatctggaaatcgaa

SEQ ID NO: 635512 - DNA, 19 bp, Mus musculus
  siRNA target sequence for Impg1 (NM_022016.1,2093-2111).
gctactccctcgacattga

SEQ ID NO: 635513 - DNA, 19 bp, Mus musculus
  siRNA target sequence for Impg1 (NM_022016.1,2142-2160).
cctagactgtggcaaattt

SEQ ID NO: 635514 - DNA, 19 bp, Mus musculus
  siRNA target sequence for Impg1 (NM_022016.1,2339-2357).
ctcaggaacctggtgttaa

SEQ ID NO: 635515 - DNA, 19 bp, Mus musculus
  siRNA target sequence for Impg1 (NM_022016.1,2379-2397).
ggtagtcaagaaaagaaat

SEQ ID NO: 635516 - DNA, 19 bp, Mus musculus
  siRNA target sequence for Impg1 (NM_022016.1,2380-2398).
gtagtcaagaaaagaaatt

SEQ ID NO: 635517 - DNA, 19 bp, Mus musculus
  siRNA target sequence for Impg1 (NM_022016.1,2410-2428).
gctataggatttgaagaat

SEQ ID NO: 635518 - DNA, 19 bp, Mus musculus
  siRNA target sequence for Itga2b (NM_010575.1,185-203).
cttctcagtggactttcat

SEQ ID NO: 635519 - DNA, 19 bp, Mus musculus
  siRNA target sequence for Itga2b (NM_010575.1,248-266).
ggccctaaacgcaagtcaa

SEQ ID NO: 635520 - DNA, 19 bp, Mus musculus
  siRNA target sequence for Itga2b (NM_010575.1,344-362).
ggatgagacacgaaaccta

SEQ ID NO: 635521 - DNA, 19 bp, Mus musculus
  siRNA target sequence for Itga2b (NM_010575.1,583-601).
ccgtttacgcagagagttt

SEQ ID NO: 635522 - DNA, 19 bp, Mus musculus
  siRNA target sequence for Itga2b (NM_010575.1,584-602).
cgtttacgcagagagtttt

SEQ ID NO: 635523 - DNA, 19 bp, Mus musculus
  siRNA target sequence for Itga2b (NM_010575.1,605-623).
cggagacaagcgatactgt

SEQ ID NO: 635524 - DNA, 19 bp, Mus musculus
  siRNA target sequence for Itga2b (NM_010575.1,704-722).
cctggctcgcgttccaatt

SEQ ID NO: 635525 - DNA, 19 bp, Mus musculus
  siRNA target sequence for Itga2b (NM_010575.1,708-726).
gctcgcgttccaattgaga

SEQ ID NO: 635526 - DNA, 19 bp, Mus musculus
  siRNA target sequence for Itga2b (NM_010575.1,709-727).
ctcgcgttccaattgagaa

SEQ ID NO: 635527 - DNA, 19 bp, Mus musculus
  siRNA target sequence for Itga2b (NM_010575.1,799-817).
gcaacccagtgtttttcga

SEQ ID NO: 635528 - DNA, 19 bp, Mus musculus
  siRNA target sequence for Itga2b (NM_010575.1,800-818).
caacccagtgtttttcgat

SEQ ID NO: 635529 - DNA, 19 bp, Mus musculus
  siRNA target sequence for Itga2b (NM_010575.1,805-823).
cagtgtttttcgatggtta

SEQ ID NO: 635530 - DNA, 19 bp, Mus musculus
  siRNA target sequence for Itga2b (NM_010575.1,816-834).
gatggttaccggggatatt

SEQ ID NO: 635531 - DNA, 19 bp, Mus musculus
  siRNA target sequence for Itga2b (NM_010575.1,911-929).
cttgggagcggtggaaatt

SEQ ID NO: 635532 - DNA, 19 bp, Mus musculus
  siRNA target sequence for Itga2b (NM_010575.1,1048-1066).
gggctccattgtatatgga

SEQ ID NO: 635533 - DNA, 19 bp, Mus musculus
  siRNA target sequence for Itga2b (NM_010575.1,1175-1193).
gctctatgggagatttgga

SEQ ID NO: 635534 - DNA, 19 bp, Mus musculus
  siRNA target sequence for Itga2b (NM_010575.1,1176-1194).
ctctatgggagatttggat

SEQ ID NO: 635535 - DNA, 19 bp, Mus musculus
  siRNA target sequence for Itga2b (NM_010575.1,1224-1242).
cgagacggctataatgata

SEQ ID NO: 635536 - DNA, 19 bp, Mus musculus
  siRNA target sequence for Itga2b (NM_010575.1,1225-1243).
gagacggctataatgatat

SEQ ID NO: 635537 - DNA, 19 bp, Mus musculus
  siRNA target sequence for Itga2b (NM_010575.1,1229-1247).
cggctataatgatattgct

SEQ ID NO: 635538 - DNA, 19 bp, Mus musculus
  siRNA target sequence for Itga2b (NM_010575.1,1414-1432).
gatacccagacctgattgt

SEQ ID NO: 635539 - DNA, 19 bp, Mus musculus
  siRNA target sequence for Itga2b (NM_010575.1,1424-1442).
cctgattgtgggagcatat

SEQ ID NO: 635540 - DNA, 19 bp, Mus musculus
  siRNA target sequence for Itga2b (NM_010575.1,1861-1879).
gagcccctgccgtggtatt

SEQ ID NO: 635541 - DNA, 19 bp, Mus musculus
  siRNA target sequence for Itga2b (NM_010575.1,1864-1882).
cccctgccgtggtattgca

SEQ ID NO: 635542 - DNA, 19 bp, Mus musculus
  siRNA target sequence for Itga2b (NM_010575.1,1865-1883).
ccctgccgtggtattgcat

SEQ ID NO: 635543 - DNA, 19 bp, Mus musculus
  siRNA target sequence for Itga2b (NM_010575.1,1978-1996).
gggactccccactcctaat

SEQ ID NO: 635544 - DNA, 19 bp, Mus musculus
  siRNA target sequence for Itga2b (NM_010575.1,1991-2009).
cctaatcggtgctgacaat

SEQ ID NO: 635545 - DNA, 19 bp, Mus musculus
  siRNA target sequence for Itga2b (NM_010575.1,2024-2042).
gattgaagcagccaatgat

SEQ ID NO: 635546 - DNA, 19 bp, Mus musculus
  siRNA target sequence for Itga2b (NM_010575.1,2083-2101).
ctccaggtgcccactacat

SEQ ID NO: 635547 - DNA, 19 bp, Mus musculus
  siRNA target sequence for Itga2b (NM_010575.1,2102-2120).
gcgggctctcagcaacatt

SEQ ID NO: 635548 - DNA, 19 bp, Mus musculus
  siRNA target sequence for Itga2b (NM_010575.1,2104-2122).
gggctctcagcaacattga

SEQ ID NO: 635549 - DNA, 19 bp, Mus musculus
  siRNA target sequence for Itga2b (NM_010575.1,2210-2228).
cacccggataggaatcaca

SEQ ID NO: 635550 - DNA, 19 bp, Mus musculus
  siRNA target sequence for Itga2b (NM_010575.1,2471-2489).
ctatgagctccacaacatt

SEQ ID NO: 635551 - DNA, 19 bp, Mus musculus
  siRNA target sequence for Itga2b (NM_010575.1,2548-2566).
cctcggatctgctctacat

SEQ ID NO: 635552 - DNA, 19 bp, Mus musculus
  siRNA target sequence for Itga4 (NM_010576.1,324-342).
cctggggcgatttacagat

SEQ ID NO: 635553 - DNA, 19 bp, Mus musculus
  siRNA target sequence for Itga4 (NM_010576.1,530-548).
catgaagagcgataacaaa

SEQ ID NO: 635554 - DNA, 19 bp, Mus musculus
  siRNA target sequence for Itga4 (NM_010576.1,549-567).
ctccccactggcatttgct

SEQ ID NO: 635555 - DNA, 19 bp, Mus musculus
  siRNA target sequence for Itga4 (NM_010576.1,566-584).
ctacgtcatgccttctgat

SEQ ID NO: 635556 - DNA, 19 bp, Mus musculus
  siRNA target sequence for Itga4 (NM_010576.1,592-610).
cagaactgagtaaaaggat

SEQ ID NO: 635557 - DNA, 19 bp, Mus musculus
  siRNA target sequence for Itga4 (NM_010576.1,614-632).
cccgtgttacaaagattat

SEQ ID NO: 635558 - DNA, 19 bp, Mus musculus
  siRNA target sequence for Itga4 (NM_010576.1,615-633).
ccgtgttacaaagattata

SEQ ID NO: 635559 - DNA, 19 bp, Mus musculus
  siRNA target sequence for Itga4 (NM_010576.1,634-652).
cgagaaaatttggagaaaa

SEQ ID NO: 635560 - DNA, 19 bp, Mus musculus
  siRNA target sequence for Itga4 (NM_010576.1,666-684).
caagctggaatatctagtt

SEQ ID NO: 635561 - DNA, 19 bp, Mus musculus
  siRNA target sequence for Itga4 (NM_010576.1,670-688).
ctggaatatctagttttta

SEQ ID NO: 635562 - DNA, 19 bp, Mus musculus
  siRNA target sequence for Itga4 (NM_010576.1,739-757).
gcaccgtctttgtctacaa

SEQ ID NO: 635563 - DNA, 19 bp, Mus musculus
  siRNA target sequence for Itga4 (NM_010576.1,740-758).
caccgtctttgtctacaat

SEQ ID NO: 635564 - DNA, 19 bp, Mus musculus
  siRNA target sequence for Itga4 (NM_010576.1,742-760).
ccgtctttgtctacaatat

SEQ ID NO: 635565 - DNA, 19 bp, Mus musculus
  siRNA target sequence for Itga4 (NM_010576.1,743-761).
cgtctttgtctacaatata

SEQ ID NO: 635566 - DNA, 19 bp, Mus musculus
  siRNA target sequence for Itga4 (NM_010576.1,750-768).
gtctacaatataactacaa

SEQ ID NO: 635567 - DNA, 19 bp, Mus musculus
  siRNA target sequence for Itga4 (NM_010576.1,766-784).
caaaccaatacaaagcatt

SEQ ID NO: 635568 - DNA, 19 bp, Mus musculus
  siRNA target sequence for Itga4 (NM_010576.1,793-811).
gacagaaccaagtaaaatt

SEQ ID NO: 635569 - DNA, 19 bp, Mus musculus
  siRNA target sequence for Itga4 (NM_010576.1,797-815).
gaaccaagtaaaatttgga

SEQ ID NO: 635570 - DNA, 19 bp, Mus musculus
  siRNA target sequence for Itga4 (NM_010576.1,837-855).
ggagctggacattttcgaa

SEQ ID NO: 635571 - DNA, 19 bp, Mus musculus
  siRNA target sequence for Itga4 (NM_010576.1,886-904).
cccctcaacacgaacagat

SEQ ID NO: 635572 - DNA, 19 bp, Mus musculus
  siRNA target sequence for Itga4 (NM_010576.1,902-920).
gataggaaaagcatatata

SEQ ID NO: 635573 - DNA, 19 bp, Mus musculus
  siRNA target sequence for Itga4 (NM_010576.1,938-956).
cgaactgaacatcgtatat

SEQ ID NO: 635574 - DNA, 19 bp, Mus musculus
  siRNA target sequence for Itga4 (NM_010576.1,947-965).
catcgtatatgaaatgaaa

SEQ ID NO: 635575 - DNA, 19 bp, Mus musculus
  siRNA target sequence for Itga4 (NM_010576.1,1084-1102).
gagtattcgtgtacatcaa

SEQ ID NO: 635576 - DNA, 19 bp, Mus musculus
  siRNA target sequence for Itga4 (NM_010576.1,1086-1104).
gtattcgtgtacatcaact

SEQ ID NO: 635577 - DNA, 19 bp, Mus musculus
  siRNA target sequence for Itga4 (NM_010576.1,1114-1132).
gagctgtgatggttgaaat

SEQ ID NO: 635578 - DNA, 19 bp, Mus musculus
  siRNA target sequence for Itga4 (NM_010576.1,1143-1161).
cttgtcggaagtgacaaat

SEQ ID NO: 635579 - DNA, 19 bp, Mus musculus
  siRNA target sequence for Itga4 (NM_010576.1,1148-1166).
cggaagtgacaaatatgct

SEQ ID NO: 635580 - DNA, 19 bp, Mus musculus
  siRNA target sequence for Itga4 (NM_010576.1,1168-1186).
caagatttggggagtctat

SEQ ID NO: 635581 - DNA, 19 bp, Mus musculus
  siRNA target sequence for Itga4 (NM_010576.1,1178-1196).
ggagtctatagcgaatctt

SEQ ID NO: 635582 - DNA, 19 bp, Mus musculus
  siRNA target sequence for Itga4 (NM_010576.1,1189-1207).
cgaatcttggcgacattga

SEQ ID NO: 635583 - DNA, 19 bp, Mus musculus
  siRNA target sequence for Itga4 (NM_010576.1,1214-1232).
cggctttgaagatattgct

SEQ ID NO: 635584 - DNA, 19 bp, Mus musculus
  siRNA target sequence for Itga4 (NM_010576.1,1309-1327).
cctactcacagagaattga

SEQ ID NO: 635585 - DNA, 19 bp, Mus musculus
  siRNA target sequence for Itga4 (NM_010576.1,1321-1339).
gaattgaaggacagcaaat

SEQ ID NO: 635586 - DNA, 19 bp, Mus musculus
  siRNA target sequence for Itga4 (NM_010576.1,1329-1347).
ggacagcaaatcagcaaat

SEQ ID NO: 635587 - DNA, 19 bp, Mus musculus
  siRNA target sequence for Itga4 (NM_010576.1,1334-1352).
gcaaatcagcaaatcatta

SEQ ID NO: 635588 - DNA, 19 bp, Mus musculus
  siRNA target sequence for Itga4 (NM_010576.1,1343-1361).
caaatcattaaggatgttt

SEQ ID NO: 635589 - DNA, 19 bp, Mus musculus
  siRNA target sequence for Itga4 (NM_010576.1,1390-1408).
cagacaacaatggatatgt

SEQ ID NO: 635590 - DNA, 19 bp, Mus musculus
  siRNA target sequence for Itga4 (NM_010576.1,1397-1415).
caatggatatgttgatgta

SEQ ID NO: 635591 - DNA, 19 bp, Mus musculus
  siRNA target sequence for Itga4 (NM_010576.1,1416-1434).
gccgttggtgcatttcaat

SEQ ID NO: 635592 - DNA, 19 bp, Mus musculus
  siRNA target sequence for Itga4 (NM_010576.1,1418-1436).
cgttggtgcatttcaatct

SEQ ID NO: 635593 - DNA, 19 bp, Mus musculus
  siRNA target sequence for Itga4 (NM_010576.1,1422-1440).
ggtgcatttcaatctgatt

SEQ ID NO: 635594 - DNA, 19 bp, Mus musculus
  siRNA target sequence for Itga4 (NM_010576.1,1437-1455).
gattctgcagtgttgctaa

SEQ ID NO: 635595 - DNA, 19 bp, Mus musculus
  siRNA target sequence for Itga4 (NM_010576.1,1456-1474).
ggacaaggcctgtagtgat

SEQ ID NO: 635596 - DNA, 19 bp, Mus musculus
  siRNA target sequence for Itga4 (NM_010576.1,1457-1475).
gacaaggcctgtagtgatt

SEQ ID NO: 635597 - DNA, 19 bp, Mus musculus
  siRNA target sequence for Itga4 (NM_010576.1,1459-1477).
caaggcctgtagtgattgt

SEQ ID NO: 635598 - DNA, 19 bp, Mus musculus
  siRNA target sequence for Itga4 (NM_010576.1,1472-1490).
gattgttgaagcatcttta

SEQ ID NO: 635599 - DNA, 19 bp, Mus musculus
  siRNA target sequence for Itga4 (NM_010576.1,1504-1522).
ctgtaaataggacaaagtt

SEQ ID NO: 635600 - DNA, 19 bp, Mus musculus
  siRNA target sequence for Itga4 (NM_010576.1,1596-1614).
gtcccaggctacatcgttt

SEQ ID NO: 635601 - DNA, 19 bp, Mus musculus
  siRNA target sequence for Itga4 (NM_010576.1,1599-1617).
ccaggctacatcgttttgt

SEQ ID NO: 635602 - DNA, 19 bp, Mus musculus
  siRNA target sequence for Itga4 (NM_010576.1,1600-1618).
caggctacatcgttttgtt

SEQ ID NO: 635603 - DNA, 19 bp, Mus musculus
  siRNA target sequence for Itga4 (NM_010576.1,1650-1668).
gcagagtctccgtcaagat

SEQ ID NO: 635604 - DNA, 19 bp, Mus musculus
  siRNA target sequence for Itga4 (NM_010576.1,1653-1671).
gagtctccgtcaagatttt

SEQ ID NO: 635605 - DNA, 19 bp, Mus musculus
  siRNA target sequence for Itga4 (NM_010576.1,1655-1673).
gtctccgtcaagattttat

SEQ ID NO: 635606 - DNA, 19 bp, Mus musculus
  siRNA target sequence for Itga4 (NM_010576.1,1657-1675).
ctccgtcaagattttattt

SEQ ID NO: 635607 - DNA, 19 bp, Mus musculus
  siRNA target sequence for Itga4 (NM_010576.1,1686-1704).
gggacttctgacgtgatta

SEQ ID NO: 635608 - DNA, 19 bp, Mus musculus
  siRNA target sequence for Itga4 (NM_010576.1,1707-1725).
ggaagcatacgagtttcaa

SEQ ID NO: 635609 - DNA, 19 bp, Mus musculus
  siRNA target sequence for Itga4 (NM_010576.1,1770-1788).
gacgtgcgagacatcctta

SEQ ID NO: 635610 - DNA, 19 bp, Mus musculus
  siRNA target sequence for Itga4 (NM_010576.1,1827-1845).
catgtgatcaccaaacgaa

SEQ ID NO: 635611 - DNA, 19 bp, Mus musculus
  siRNA target sequence for Itga4 (NM_010576.1,1832-1850).
gatcaccaaacgaaacact

SEQ ID NO: 635612 - DNA, 19 bp, Mus musculus
  siRNA target sequence for Itga4 (NM_010576.1,1899-1917).
gacgttattagaaaaatga

SEQ ID NO: 635613 - DNA, 19 bp, Mus musculus
  siRNA target sequence for Itga4 (NM_010576.1,1901-1919).
cgttattagaaaaatgata

SEQ ID NO: 635614 - DNA, 19 bp, Mus musculus
  siRNA target sequence for Itga4 (NM_010576.1,1916-1934).
gataaactttgcaaggttt

SEQ ID NO: 635615 - DNA, 19 bp, Mus musculus
  siRNA target sequence for Itga4 (NM_010576.1,1930-1948).
ggttttgtgcctatgaaaa

SEQ ID NO: 635616 - DNA, 19 bp, Mus musculus
  siRNA target sequence for Itga4 (NM_010576.1,1931-1949).
gttttgtgcctatgaaaat

SEQ ID NO: 635617 - DNA, 19 bp, Mus musculus
  siRNA target sequence for Itga4 (NM_010576.1,2025-2043).
gggagcatgaagaccataa

SEQ ID NO: 635618 - DNA, 19 bp, Mus musculus
  siRNA target sequence for Itga4 (NM_010576.1,2029-2047).
gcatgaagaccataatgct

SEQ ID NO: 635619 - DNA, 19 bp, Mus musculus
  siRNA target sequence for Itga4 (NM_010576.1,2046-2064).
ctaaacgtgtccttgttca

SEQ ID NO: 635620 - DNA, 19 bp, Mus musculus
  siRNA target sequence for Itga4 (NM_010576.1,2070-2088).
ggcgatgatgcttacgaaa

SEQ ID NO: 635621 - DNA, 19 bp, Mus musculus
  siRNA target sequence for Itga4 (NM_010576.1,2115-2133).
ggcctttatttcattaaga

SEQ ID NO: 635622 - DNA, 19 bp, Mus musculus
  siRNA target sequence for Itga4 (NM_010576.1,2116-2134).
gcctttatttcattaagat

SEQ ID NO: 635623 - DNA, 19 bp, Mus musculus
  siRNA target sequence for Itga4 (NM_010576.1,2206-2224).
gcctaggttacatatatgt

SEQ ID NO: 635624 - DNA, 19 bp, Mus musculus
  siRNA target sequence for Itga4 (NM_010576.1,2225-2243).
ggatcgcctctcaaggata

SEQ ID NO: 635625 - DNA, 19 bp, Mus musculus
  siRNA target sequence for Itga4 (NM_010576.1,2229-2247).
cgcctctcaaggatagaca

SEQ ID NO: 635626 - DNA, 19 bp, Mus musculus
  siRNA target sequence for Itga4 (NM_010576.1,2230-2248).
gcctctcaaggatagacat

SEQ ID NO: 635627 - DNA, 19 bp, Mus musculus
  siRNA target sequence for Itga4 (NM_010576.1,2357-2375).
cagagtgaccttaacgata

SEQ ID NO: 635628 - DNA, 19 bp, Mus musculus
  siRNA target sequence for Itga4 (NM_010576.1,2412-2430).
cttgtgaacccaacttcat

SEQ ID NO: 635629 - DNA, 19 bp, Mus musculus
  siRNA target sequence for Itga4 (NM_010576.1,2420-2438).
cccaacttcatttgtgtat

SEQ ID NO: 635630 - DNA, 19 bp, Mus musculus
  siRNA target sequence for Itga4 (NM_010576.1,2440-2458).
gatctagcgaagaaaacga

SEQ ID NO: 635631 - DNA, 19 bp, Mus musculus
  siRNA target sequence for Itga4 (NM_010576.1,2489-2507).
cctcactttccatgttata

SEQ ID NO: 635632 - DNA, 19 bp, Mus musculus
  siRNA target sequence for Itga4 (NM_010576.1,2516-2534).
gattagcatggctccaaat

SEQ ID NO: 635633 - DNA, 19 bp, Mus musculus
  siRNA target sequence for Itga4 (NM_010576.1,2529-2547).
ccaaatgttagtgtgaaaa

SEQ ID NO: 635634 - DNA, 19 bp, Mus musculus
  siRNA target sequence for Itga4 (NM_010576.1,2543-2561).
gaaaataatggtaccaaat

SEQ ID NO: 635635 - DNA, 19 bp, Mus musculus
  siRNA target sequence for Itga4 (NM_010576.1,2574-2592).
caagatgataagttgttca

SEQ ID NO: 635636 - DNA, 19 bp, Mus musculus
  siRNA target sequence for Itga4 (NM_010576.1,2580-2598).
gataagttgttcaacgttt

SEQ ID NO: 635637 - DNA, 19 bp, Mus musculus
  siRNA target sequence for Itga4 (NM_010576.1,2585-2603).
gttgttcaacgttttggat

SEQ ID NO: 635638 - DNA, 19 bp, Mus musculus
  siRNA target sequence for Itga4 (NM_010576.1,2620-2638).
ggcaatgccattttaaaca

SEQ ID NO: 635639 - DNA, 19 bp, Mus musculus
  siRNA target sequence for Itga4 (NM_010576.1,2622-2640).
caatgccattttaaacact

SEQ ID NO: 635640 - DNA, 19 bp, Mus musculus
  siRNA target sequence for Itga4 (NM_010576.1,2653-2671).
gtacatttgcacagcaaaa

SEQ ID NO: 635641 - DNA, 19 bp, Mus musculus
  siRNA target sequence for Itga4 (NM_010576.1,2683-2701).
ggacgttgaccgatatagt

SEQ ID NO: 635642 - DNA, 19 bp, Mus musculus
  siRNA target sequence for Itga4 (NM_010576.1,2686-2704).
cgttgaccgatatagtcaa

SEQ ID NO: 635643 - DNA, 19 bp, Mus musculus
  siRNA target sequence for Itga4 (NM_010576.1,2687-2705).
gttgaccgatatagtcaaa

SEQ ID NO: 635644 - DNA, 19 bp, Mus musculus
  siRNA target sequence for Itga4 (NM_010576.1,2709-2727).
ctatcaaagactgataaga

SEQ ID NO: 635645 - DNA, 19 bp, Mus musculus
  siRNA target sequence for Itga4 (NM_010576.1,2721-2739).
gataagagactcctgtatt

SEQ ID NO: 635646 - DNA, 19 bp, Mus musculus
  siRNA target sequence for Itga4 (NM_010576.1,2740-2758).
gcatgaaagctgatcaaca

SEQ ID NO: 635647 - DNA, 19 bp, Mus musculus
  siRNA target sequence for Itga4 (NM_010576.1,2754-2772).
caacactgtttagatttct

SEQ ID NO: 635648 - DNA, 19 bp, Mus musculus
  siRNA target sequence for Itga4 (NM_010576.1,2776-2794).
gcaatttcggaaaaatgga

SEQ ID NO: 635649 - DNA, 19 bp, Mus musculus
  siRNA target sequence for Itga4 (NM_010576.1,2861-2879).
gacctcatcactcaagttt

SEQ ID NO: 635650 - DNA, 19 bp, Mus musculus
  siRNA target sequence for Itga4 (NM_010576.1,2864-2882).
ctcatcactcaagtttgaa

SEQ ID NO: 635651 - DNA, 19 bp, Mus musculus
  siRNA target sequence for Itga4 (NM_010576.1,2904-2922).
gagccacacccaaaagtta

SEQ ID NO: 635652 - DNA, 19 bp, Mus musculus
  siRNA target sequence for Itga4 (NM_010576.1,2906-2924).
gccacacccaaaagttatt

SEQ ID NO: 635653 - DNA, 19 bp, Mus musculus
  siRNA target sequence for Itga4 (NM_010576.1,2908-2926).
cacacccaaaagttattga

SEQ ID NO: 635654 - DNA, 19 bp, Mus musculus
  siRNA target sequence for Itga4 (NM_010576.1,2912-2930).
cccaaaagttattgaacta

SEQ ID NO: 635655 - DNA, 19 bp, Mus musculus
  siRNA target sequence for Itga4 (NM_010576.1,2964-2982).
gaagggctccatcatcaaa

SEQ ID NO: 635656 - DNA, 19 bp, Mus musculus
  siRNA target sequence for Itga4 (NM_010576.1,2991-3009).
cgacatttcaccatcatta

SEQ ID NO: 635657 - DNA, 19 bp, Mus musculus
  siRNA target sequence for Itga4 (NM_010576.1,3022-3040).
gcttgctacttggacttat

SEQ ID NO: 635658 - DNA, 19 bp, Mus musculus
  siRNA target sequence for Itga4 (NM_010576.1,3026-3044).
gctacttggacttattgta

SEQ ID NO: 635659 - DNA, 19 bp, Mus musculus
  siRNA target sequence for Itga4 (NM_010576.1,3034-3052).
gacttattgtacttttatt

SEQ ID NO: 635660 - DNA, 19 bp, Mus musculus
  siRNA target sequence for Itga4 (NM_010576.1,3098-3116).
caaatctatcctacaagaa

SEQ ID NO: 635661 - DNA, 19 bp, Mus musculus
  siRNA target sequence for Itga4 (NM_010576.1,3103-3121).
ctatcctacaagaagaaaa

SEQ ID NO: 635662 - DNA, 19 bp, Mus musculus
  siRNA target sequence for Itga5 (NM_010577.2,429-447).
gcttctccgtggagtttta

SEQ ID NO: 635663 - DNA, 19 bp, Mus musculus
  siRNA target sequence for Itga5 (NM_010577.2,568-586).
gtgcaccaccattcaattt

SEQ ID NO: 635664 - DNA, 19 bp, Mus musculus
  siRNA target sequence for Itga5 (NM_010577.2,667-685).
gtggttcggagcaacagtt

SEQ ID NO: 635665 - DNA, 19 bp, Mus musculus
  siRNA target sequence for Itga5 (NM_010577.2,729-747).
gctggcgcacagaaaagga

SEQ ID NO: 635666 - DNA, 19 bp, Mus musculus
  siRNA target sequence for Itga5 (NM_010577.2,914-932).
ggacctggaagctacttct

SEQ ID NO: 635667 - DNA, 19 bp, Mus musculus
  siRNA target sequence for Itga5 (NM_010577.2,965-983).
cagatctcggagtcctatt

SEQ ID NO: 635668 - DNA, 19 bp, Mus musculus
  siRNA target sequence for Itga5 (NM_010577.2,976-994).
gtcctattacccagagtat

SEQ ID NO: 635669 - DNA, 19 bp, Mus musculus
  siRNA target sequence for Itga5 (NM_010577.2,1033-1051).
ggccagctccgtctatgat

SEQ ID NO: 635670 - DNA, 19 bp, Mus musculus
  siRNA target sequence for Itga5 (NM_010577.2,1071-1089).
ctgtggctgtgggtgaatt

SEQ ID NO: 635671 - DNA, 19 bp, Mus musculus
  siRNA target sequence for Itga5 (NM_010577.2,1073-1091).
gtggctgtgggtgaattca

SEQ ID NO: 635672 - DNA, 19 bp, Mus musculus
  siRNA target sequence for Itga5 (NM_010577.2,1139-1157).
ctcacctatggctatgtca

SEQ ID NO: 635673 - DNA, 19 bp, Mus musculus
  siRNA target sequence for Itga5 (NM_010577.2,1150-1168).
ctatgtcaccgtccttaat

SEQ ID NO: 635674 - DNA, 19 bp, Mus musculus
  siRNA target sequence for Itga5 (NM_010577.2,1237-1255).
ggctgccactgataccaat

SEQ ID NO: 635675 - DNA, 19 bp, Mus musculus
  siRNA target sequence for Itga5 (NM_010577.2,1333-1351).
gggcagggtctacatctat

SEQ ID NO: 635676 - DNA, 19 bp, Mus musculus
  siRNA target sequence for Itga5 (NM_010577.2,1357-1375).
gcgcccagcgggcatagat

SEQ ID NO: 635677 - DNA, 19 bp, Mus musculus
  siRNA target sequence for Itga5 (NM_010577.2,1392-1410).
ccctcactgggcaagatga

SEQ ID NO: 635678 - DNA, 19 bp, Mus musculus
  siRNA target sequence for Itga5 (NM_010577.2,1453-1471).
ggaccaagacggctacaat

SEQ ID NO: 635679 - DNA, 19 bp, Mus musculus
  siRNA target sequence for Itga5 (NM_010577.2,1506-1524).
cccagcagggagtcgtatt

SEQ ID NO: 635680 - DNA, 19 bp, Mus musculus
  siRNA target sequence for Itga5 (NM_010577.2,1507-1525).
ccagcagggagtcgtattt

SEQ ID NO: 635681 - DNA, 19 bp, Mus musculus
  siRNA target sequence for Itga5 (NM_010577.2,1656-1674).
gataccctgatctaatcgt

SEQ ID NO: 635682 - DNA, 19 bp, Mus musculus
  siRNA target sequence for Itga5 (NM_010577.2,2014-2032).
ctacctcaggaatgaatca

SEQ ID NO: 635683 - DNA, 19 bp, Mus musculus
  siRNA target sequence for Itga5 (NM_010577.2,2112-2130).
gcctccggccagttctaca

SEQ ID NO: 635684 - DNA, 19 bp, Mus musculus
  siRNA target sequence for Itga5 (NM_010577.2,2275-2293).
gacattccatgcccaaaat

SEQ ID NO: 635685 - DNA, 19 bp, Mus musculus
  siRNA target sequence for Itga5 (NM_010577.2,2502-2520).
ctcatcttcaagacacaaa

SEQ ID NO: 635686 - DNA, 19 bp, Mus musculus
  siRNA target sequence for Itga5 (NM_010577.2,2641-2659).
caagcctgaagctgtgatt

SEQ ID NO: 635687 - DNA, 19 bp, Mus musculus
  siRNA target sequence for Itga5 (NM_010577.2,2811-2829).
gccaacagctcctctatgt

SEQ ID NO: 635688 - DNA, 19 bp, Mus musculus
  siRNA target sequence for Itga5 (NM_010577.2,2813-2831).
caacagctcctctatgtga

SEQ ID NO: 635689 - DNA, 19 bp, Mus musculus
  siRNA target sequence for Itga5 (NM_010577.2,2984-3002).
cctgaagccaagtgtttca

SEQ ID NO: 635690 - DNA, 19 bp, Mus musculus
  siRNA target sequence for Itga5 (NM_010577.2,3045-3063).
gtagtctgcagctgcattt

SEQ ID NO: 635691 - DNA, 19 bp, Mus musculus
  siRNA target sequence for Itga5 (NM_010577.2,3239-3257).
gtcccgttgtggatcatca

SEQ ID NO: 635692 - DNA, 19 bp, Mus musculus
  siRNA target sequence for Itga6 (NM_008397.2,334-352).
ccttgtacacggattgaat

SEQ ID NO: 635693 - DNA, 19 bp, Mus musculus
  siRNA target sequence for Itga6 (NM_008397.2,338-356).
gtacacggattgaatttga

SEQ ID NO: 635694 - DNA, 19 bp, Mus musculus
  siRNA target sequence for Itga6 (NM_008397.2,341-359).
cacggattgaatttgataa

SEQ ID NO: 635695 - DNA, 19 bp, Mus musculus
  siRNA target sequence for Itga6 (NM_008397.2,364-382).
gctgatcctatgtcagaaa

SEQ ID NO: 635696 - DNA, 19 bp, Mus musculus
  siRNA target sequence for Itga6 (NM_008397.2,449-467).
gtgcacatcgatatgagaa

SEQ ID NO: 635697 - DNA, 19 bp, Mus musculus
  siRNA target sequence for Itga6 (NM_008397.2,492-510).
ggagtcgcgggatatcttt

SEQ ID NO: 635698 - DNA, 19 bp, Mus musculus
  siRNA target sequence for Itga6 (NM_008397.2,515-533).
gatgttatgtcctaagtca

SEQ ID NO: 635699 - DNA, 19 bp, Mus musculus
  siRNA target sequence for Itga6 (NM_008397.2,538-556).
ctcagaattgaagatgata

SEQ ID NO: 635700 - DNA, 19 bp, Mus musculus
  siRNA target sequence for Itga6 (NM_008397.2,542-560).
gaattgaagatgatatgga

SEQ ID NO: 635701 - DNA, 19 bp, Mus musculus
  siRNA target sequence for Itga6 (NM_008397.2,589-607).
cggttgagaggccatgaaa

SEQ ID NO: 635702 - DNA, 19 bp, Mus musculus
  siRNA target sequence for Itga6 (NM_008397.2,590-608).
ggttgagaggccatgaaaa

SEQ ID NO: 635703 - DNA, 19 bp, Mus musculus
  siRNA target sequence for Itga6 (NM_008397.2,628-646).
ggagtagcggctactttca

SEQ ID NO: 635704 - DNA, 19 bp, Mus musculus
  siRNA target sequence for Itga6 (NM_008397.2,631-649).
gtagcggctactttcacta

SEQ ID NO: 635705 - DNA, 19 bp, Mus musculus
  siRNA target sequence for Itga6 (NM_008397.2,651-669).
ggactttcattacattgtt

SEQ ID NO: 635706 - DNA, 19 bp, Mus musculus
  siRNA target sequence for Itga6 (NM_008397.2,701-719).
ggatcgtccgtgtagaaca

SEQ ID NO: 635707 - DNA, 19 bp, Mus musculus
  siRNA target sequence for Itga6 (NM_008397.2,702-720).
gatcgtccgtgtagaacaa

SEQ ID NO: 635708 - DNA, 19 bp, Mus musculus
  siRNA target sequence for Itga6 (NM_008397.2,706-724).
gtccgtgtagaacaaaaga

SEQ ID NO: 635709 - DNA, 19 bp, Mus musculus
  siRNA target sequence for Itga6 (NM_008397.2,708-726).
ccgtgtagaacaaaagaat

SEQ ID NO: 635710 - DNA, 19 bp, Mus musculus
  siRNA target sequence for Itga6 (NM_008397.2,824-842).
gttacctaggcttttcact

SEQ ID NO: 635711 - DNA, 19 bp, Mus musculus
  siRNA target sequence for Itga6 (NM_008397.2,850-868).
gggaagggtattgtttcta

SEQ ID NO: 635712 - DNA, 19 bp, Mus musculus
  siRNA target sequence for Itga6 (NM_008397.2,851-869).
ggaagggtattgtttctaa

SEQ ID NO: 635713 - DNA, 19 bp, Mus musculus
  siRNA target sequence for Itga6 (NM_008397.2,910-928).
cacagtggggctgtagttt

SEQ ID NO: 635714 - DNA, 19 bp, Mus musculus
  siRNA target sequence for Itga6 (NM_008397.2,914-932).
gtggggctgtagttttgct

SEQ ID NO: 635715 - DNA, 19 bp, Mus musculus
  siRNA target sequence for Itga6 (NM_008397.2,916-934).
ggggctgtagttttgctaa

SEQ ID NO: 635716 - DNA, 19 bp, Mus musculus
  siRNA target sequence for Itga6 (NM_008397.2,955-973).
catctgctccctgagtata

SEQ ID NO: 635717 - DNA, 19 bp, Mus musculus
  siRNA target sequence for Itga6 (NM_008397.2,958-976).
ctgctccctgagtatatat

SEQ ID NO: 635718 - DNA, 19 bp, Mus musculus
  siRNA target sequence for Itga6 (NM_008397.2,960-978).
gctccctgagtatatattt

SEQ ID NO: 635719 - DNA, 19 bp, Mus musculus
  siRNA target sequence for Itga6 (NM_008397.2,998-1016).
cctcgtttggctatgatgt

SEQ ID NO: 635720 - DNA, 19 bp, Mus musculus
  siRNA target sequence for Itga6 (NM_008397.2,1042-1060).
gggtggcaagacattgtta

SEQ ID NO: 635721 - DNA, 19 bp, Mus musculus
  siRNA target sequence for Itga6 (NM_008397.2,1062-1080).
cggagctccacagtatttt

SEQ ID NO: 635722 - DNA, 19 bp, Mus musculus
  siRNA target sequence for Itga6 (NM_008397.2,1064-1082).
gagctccacagtattttga

SEQ ID NO: 635723 - DNA, 19 bp, Mus musculus
  siRNA target sequence for Itga6 (NM_008397.2,1066-1084).
gctccacagtattttgata

SEQ ID NO: 635724 - DNA, 19 bp, Mus musculus
  siRNA target sequence for Itga6 (NM_008397.2,1103-1121).
gtgcagtttacgtctacat

SEQ ID NO: 635725 - DNA, 19 bp, Mus musculus
  siRNA target sequence for Itga6 (NM_008397.2,1149-1167).
gaagccgattcgtctaaat

SEQ ID NO: 635726 - DNA, 19 bp, Mus musculus
  siRNA target sequence for Itga6 (NM_008397.2,1189-1207).
ggaatctctgtgaaaaata

SEQ ID NO: 635727 - DNA, 19 bp, Mus musculus
  siRNA target sequence for Itga6 (NM_008397.2,1200-1218).
gaaaaatataggtgatatt

SEQ ID NO: 635728 - DNA, 19 bp, Mus musculus
  siRNA target sequence for Itga6 (NM_008397.2,1250-1268).
gagctccctatgatgatct

SEQ ID NO: 635729 - DNA, 19 bp, Mus musculus
  siRNA target sequence for Itga6 (NM_008397.2,1292-1310).
gatccccgactggcataat

SEQ ID NO: 635730 - DNA, 19 bp, Mus musculus
  siRNA target sequence for Itga6 (NM_008397.2,1297-1315).
ccgactggcataattacca

SEQ ID NO: 635731 - DNA, 19 bp, Mus musculus
  siRNA target sequence for Itga6 (NM_008397.2,1344-1362).
gccttacttcggctattca

SEQ ID NO: 635732 - DNA, 19 bp, Mus musculus
  siRNA target sequence for Itga6 (NM_008397.2,1345-1363).
ccttacttcggctattcaa

SEQ ID NO: 635733 - DNA, 19 bp, Mus musculus
  siRNA target sequence for Itga6 (NM_008397.2,1346-1364).
cttacttcggctattcaat

SEQ ID NO: 635734 - DNA, 19 bp, Mus musculus
  siRNA target sequence for Itga6 (NM_008397.2,1361-1379).
caatcgctgggaatatgga

SEQ ID NO: 635735 - DNA, 19 bp, Mus musculus
  siRNA target sequence for Itga6 (NM_008397.2,1378-1396).
gacctggatcggaattcct

SEQ ID NO: 635736 - DNA, 19 bp, Mus musculus
  siRNA target sequence for Itga6 (NM_008397.2,1422-1440).
ctcagactcggtcactatt

SEQ ID NO: 635737 - DNA, 19 bp, Mus musculus
  siRNA target sequence for Itga6 (NM_008397.2,1424-1442).
cagactcggtcactatttt

SEQ ID NO: 635738 - DNA, 19 bp, Mus musculus
  siRNA target sequence for Itga6 (NM_008397.2,1426-1444).
gactcggtcactattttca

SEQ ID NO: 635739 - DNA, 19 bp, Mus musculus
  siRNA target sequence for Itga6 (NM_008397.2,1453-1471).
ccagtgattaacattctaa

SEQ ID NO: 635740 - DNA, 19 bp, Mus musculus
  siRNA target sequence for Itga6 (NM_008397.2,1454-1472).
cagtgattaacattctaaa

SEQ ID NO: 635741 - DNA, 19 bp, Mus musculus
  siRNA target sequence for Itga6 (NM_008397.2,1481-1499).
cagtgactcctaacagaat

SEQ ID NO: 635742 - DNA, 19 bp, Mus musculus
  siRNA target sequence for Itga6 (NM_008397.2,1537-1555).
gggatatgcctcaaggtta

SEQ ID NO: 635743 - DNA, 19 bp, Mus musculus
  siRNA target sequence for Itga6 (NM_008397.2,1538-1556).
ggatatgcctcaaggttaa

SEQ ID NO: 635744 - DNA, 19 bp, Mus musculus
  siRNA target sequence for Itga6 (NM_008397.2,1539-1557).
gatatgcctcaaggttaaa

SEQ ID NO: 635745 - DNA, 19 bp, Mus musculus
  siRNA target sequence for Itga6 (NM_008397.2,1567-1585).
gaatatactgcgaaacctt

SEQ ID NO: 635746 - DNA, 19 bp, Mus musculus
  siRNA target sequence for Itga6 (NM_008397.2,1576-1594).
gcgaaaccttccggttata

SEQ ID NO: 635747 - DNA, 19 bp, Mus musculus
  siRNA target sequence for Itga6 (NM_008397.2,1577-1595).
cgaaaccttccggttataa

SEQ ID NO: 635748 - DNA, 19 bp, Mus musculus
  siRNA target sequence for Itga6 (NM_008397.2,1587-1605).
cggttataaccctccaata

SEQ ID NO: 635749 - DNA, 19 bp, Mus musculus
  siRNA target sequence for Itga6 (NM_008397.2,1588-1606).
ggttataaccctccaatat

SEQ ID NO: 635750 - DNA, 19 bp, Mus musculus
  siRNA target sequence for Itga6 (NM_008397.2,1656-1674).
gtcatcgagagttcagttt

SEQ ID NO: 635751 - DNA, 19 bp, Mus musculus
  siRNA target sequence for Itga6 (NM_008397.2,1661-1679).
cgagagttcagtttcgaaa

SEQ ID NO: 635752 - DNA, 19 bp, Mus musculus
  siRNA target sequence for Itga6 (NM_008397.2,1684-1702).
ggttccgagccaaagtata

SEQ ID NO: 635753 - DNA, 19 bp, Mus musculus
  siRNA target sequence for Itga6 (NM_008397.2,1864-1882).
gttcttcccatcctgaatt

SEQ ID NO: 635754 - DNA, 19 bp, Mus musculus
  siRNA target sequence for Itga6 (NM_008397.2,1871-1889).
ccatcctgaattcaaatga

SEQ ID NO: 635755 - DNA, 19 bp, Mus musculus
  siRNA target sequence for Itga6 (NM_008397.2,1905-1923).
gacagatgtccacttctta

SEQ ID NO: 635756 - DNA, 19 bp, Mus musculus
  siRNA target sequence for Itga6 (NM_008397.2,1931-1949).
gatgtggagacgacaatgt

SEQ ID NO: 635757 - DNA, 19 bp, Mus musculus
  siRNA target sequence for Itga6 (NM_008397.2,1948-1966).
gtctgtaacagcaacctta

SEQ ID NO: 635758 - DNA, 19 bp, Mus musculus
  siRNA target sequence for Itga6 (NM_008397.2,1952-1970).
gtaacagcaaccttaagct

SEQ ID NO: 635759 - DNA, 19 bp, Mus musculus
  siRNA target sequence for Itga6 (NM_008397.2,1958-1976).
gcaaccttaagctagagta

SEQ ID NO: 635760 - DNA, 19 bp, Mus musculus
  siRNA target sequence for Itga6 (NM_008397.2,1963-1981).
cttaagctagagtataaat

SEQ ID NO: 635761 - DNA, 19 bp, Mus musculus
  siRNA target sequence for Itga6 (NM_008397.2,1968-1986).
gctagagtataaatttggt

SEQ ID NO: 635762 - DNA, 19 bp, Mus musculus
  siRNA target sequence for Itga6 (NM_008397.2,1969-1987).
ctagagtataaatttggta

SEQ ID NO: 635763 - DNA, 19 bp, Mus musculus
  siRNA target sequence for Itga6 (NM_008397.2,2013-2031).
ctcttaccttccaattcaa

SEQ ID NO: 635764 - DNA, 19 bp, Mus musculus
  siRNA target sequence for Itga6 (NM_008397.2,2015-2033).
cttaccttccaattcaaaa

SEQ ID NO: 635765 - DNA, 19 bp, Mus musculus
  siRNA target sequence for Itga6 (NM_008397.2,2068-2086).
gatatagctctggaaataa

SEQ ID NO: 635766 - DNA, 19 bp, Mus musculus
  siRNA target sequence for Itga6 (NM_008397.2,2100-2118).
cccttcggatccaaggaat

SEQ ID NO: 635767 - DNA, 19 bp, Mus musculus
  siRNA target sequence for Itga6 (NM_008397.2,2140-2158).
gcccatgaagccaaactca

SEQ ID NO: 635768 - DNA, 19 bp, Mus musculus
  siRNA target sequence for Itga6 (NM_008397.2,2141-2159).
cccatgaagccaaactcat

SEQ ID NO: 635769 - DNA, 19 bp, Mus musculus
  siRNA target sequence for Itga6 (NM_008397.2,2181-2199).
gacatattccgcttacaga

SEQ ID NO: 635770 - DNA, 19 bp, Mus musculus
  siRNA target sequence for Itga6 (NM_008397.2,2265-2283).
ctgtgagctcggaaatcct

SEQ ID NO: 635771 - DNA, 19 bp, Mus musculus
  siRNA target sequence for Itga6 (NM_008397.2,2267-2285).
gtgagctcggaaatccttt

SEQ ID NO: 635772 - DNA, 19 bp, Mus musculus
  siRNA target sequence for Itga6 (NM_008397.2,2272-2290).
ctcggaaatcctttcaaga

SEQ ID NO: 635773 - DNA, 19 bp, Mus musculus
  siRNA target sequence for Itga6 (NM_008397.2,2297-2315).
ccagtgttactttctatct

SEQ ID NO: 635774 - DNA, 19 bp, Mus musculus
  siRNA target sequence for Itga6 (NM_008397.2,2300-2318).
gtgttactttctatctgat

SEQ ID NO: 635775 - DNA, 19 bp, Mus musculus
  siRNA target sequence for Itga6 (NM_008397.2,2310-2328).
ctatctgattttaagtaca

SEQ ID NO: 635776 - DNA, 19 bp, Mus musculus
  siRNA target sequence for Itga6 (NM_008397.2,2348-2366).
ccacagatctggatattaa

SEQ ID NO: 635777 - DNA, 19 bp, Mus musculus
  siRNA target sequence for Itga6 (NM_008397.2,2349-2367).
cacagatctggatattaat

SEQ ID NO: 635778 - DNA, 19 bp, Mus musculus
  siRNA target sequence for Itga6 (NM_008397.2,2737-2755).
gagtctcacaactcaagaa

SEQ ID NO: 635779 - DNA, 19 bp, Mus musculus
  siRNA target sequence for Itga6 (NM_008397.2,2925-2943).
gtggaacagcacatttcta

SEQ ID NO: 635780 - DNA, 19 bp, Mus musculus
  siRNA target sequence for Itga6 (NM_008397.2,2933-2951).
gcacatttctagaggaata

SEQ ID NO: 635781 - DNA, 19 bp, Mus musculus
  siRNA target sequence for Itga6 (NM_008397.2,2934-2952).
cacatttctagaggaatat

SEQ ID NO: 635782 - DNA, 19 bp, Mus musculus
  siRNA target sequence for Itga6 (NM_008397.2,3072-3090).
gactgtagctcagtattca

SEQ ID NO: 635783 - DNA, 19 bp, Mus musculus
  siRNA target sequence for Itga6 (NM_008397.2,3121-3139).
gttcttgccgggattctga

SEQ ID NO: 635784 - DNA, 19 bp, Mus musculus
  siRNA target sequence for Itga6 (NM_008397.2,3141-3159).
gctggctctattagtgttt

SEQ ID NO: 635785 - DNA, 19 bp, Mus musculus
  siRNA target sequence for Itga6 (NM_008397.2,3142-3160).
ctggctctattagtgtttt

SEQ ID NO: 635786 - DNA, 19 bp, Mus musculus
  siRNA target sequence for Itga6 (NM_008397.2,3148-3166).
ctattagtgtttttactgt

SEQ ID NO: 635787 - DNA, 19 bp, Mus musculus
  siRNA target sequence for Itga6 (NM_008397.2,3220-3238).
cacaaggctgagatccata

SEQ ID NO: 635788 - DNA, 19 bp, Mus musculus
  siRNA target sequence for Itga7 (NM_008398.1,183-201).
gattccgaggtgcgatttt

SEQ ID NO: 635789 - DNA, 19 bp, Mus musculus
  siRNA target sequence for Itga7 (NM_008398.1,214-232).
ggaatctactatcttatta

SEQ ID NO: 635790 - DNA, 19 bp, Mus musculus
  siRNA target sequence for Itga7 (NM_008398.1,342-360).
ggccctgcaccgacaatta

SEQ ID NO: 635791 - DNA, 19 bp, Mus musculus
  siRNA target sequence for Itga7 (NM_008398.1,344-362).
ccctgcaccgacaattaca

SEQ ID NO: 635792 - DNA, 19 bp, Mus musculus
  siRNA target sequence for Itga7 (NM_008398.1,636-654).
ggagactcgggatgtgatt

SEQ ID NO: 635793 - DNA, 19 bp, Mus musculus
  siRNA target sequence for Itga7 (NM_008398.1,706-724).
ggtggggagtggaagttct

SEQ ID NO: 635794 - DNA, 19 bp, Mus musculus
  siRNA target sequence for Itga7 (NM_008398.1,817-835).
ggggctccaggaacctata

SEQ ID NO: 635795 - DNA, 19 bp, Mus musculus
  siRNA target sequence for Itga7 (NM_008398.1,818-836).
gggctccaggaacctataa

SEQ ID NO: 635796 - DNA, 19 bp, Mus musculus
  siRNA target sequence for Itga7 (NM_008398.1,820-838).
gctccaggaacctataact

SEQ ID NO: 635797 - DNA, 19 bp, Mus musculus
  siRNA target sequence for Itga7 (NM_008398.1,837-855).
ctggaaggggttgcttttt

SEQ ID NO: 635798 - DNA, 19 bp, Mus musculus
  siRNA target sequence for Itga7 (NM_008398.1,839-857).
ggaaggggttgctttttgt

SEQ ID NO: 635799 - DNA, 19 bp, Mus musculus
  siRNA target sequence for Itga7 (NM_008398.1,883-901).
gaccagctggtgtataaaa

SEQ ID NO: 635800 - DNA, 19 bp, Mus musculus
  siRNA target sequence for Itga7 (NM_008398.1,885-903).
ccagctggtgtataaaact

SEQ ID NO: 635801 - DNA, 19 bp, Mus musculus
  siRNA target sequence for Itga7 (NM_008398.1,886-904).
cagctggtgtataaaactt

SEQ ID NO: 635802 - DNA, 19 bp, Mus musculus
  siRNA target sequence for Itga7 (NM_008398.1,936-954).
cggagacttgaccttgaat

SEQ ID NO: 635803 - DNA, 19 bp, Mus musculus
  siRNA target sequence for Itga7 (NM_008398.1,937-955).
ggagacttgaccttgaata

SEQ ID NO: 635804 - DNA, 19 bp, Mus musculus
  siRNA target sequence for Itga7 (NM_008398.1,940-958).
gacttgaccttgaatagct

SEQ ID NO: 635805 - DNA, 19 bp, Mus musculus
  siRNA target sequence for Itga7 (NM_008398.1,948-966).
cttgaatagctatttaggt

SEQ ID NO: 635806 - DNA, 19 bp, Mus musculus
  siRNA target sequence for Itga7 (NM_008398.1,1057-1075).
gtcattctgcgcaaggata

SEQ ID NO: 635807 - DNA, 19 bp, Mus musculus
  siRNA target sequence for Itga7 (NM_008398.1,1193-1211).
gtgccccctacttctttga

SEQ ID NO: 635808 - DNA, 19 bp, Mus musculus
  siRNA target sequence for Itga7 (NM_008398.1,1263-1281).
ccattgggcagatatctct

SEQ ID NO: 635809 - DNA, 19 bp, Mus musculus
  siRNA target sequence for Itga7 (NM_008398.1,1396-1414).
gatgggaaggtctttatct

SEQ ID NO: 635810 - DNA, 19 bp, Mus musculus
  siRNA target sequence for Itga7 (NM_008398.1,1427-1445).
gccttggggtggttgtcaa

SEQ ID NO: 635811 - DNA, 19 bp, Mus musculus
  siRNA target sequence for Itga7 (NM_008398.1,1428-1446).
ccttggggtggttgtcaaa

SEQ ID NO: 635812 - DNA, 19 bp, Mus musculus
  siRNA target sequence for Itga7 (NM_008398.1,1466-1484).
gcgaggcggtgggtatcaa

SEQ ID NO: 635813 - DNA, 19 bp, Mus musculus
  siRNA target sequence for Itga7 (NM_008398.1,1516-1534).
gatgtggatggaaatcact

SEQ ID NO: 635814 - DNA, 19 bp, Mus musculus
  siRNA target sequence for Itga7 (NM_008398.1,1583-1601).
gggccagacctgttctaca

SEQ ID NO: 635815 - DNA, 19 bp, Mus musculus
  siRNA target sequence for Itga7 (NM_008398.1,1681-1699).
gtggacataaagatctgtt

SEQ ID NO: 635816 - DNA, 19 bp, Mus musculus
  siRNA target sequence for Itga7 (NM_008398.1,1731-1749).
ccctagtgtggccttagat

SEQ ID NO: 635817 - DNA, 19 bp, Mus musculus
  siRNA target sequence for Itga7 (NM_008398.1,1733-1751).
ctagtgtggccttagatta

SEQ ID NO: 635818 - DNA, 19 bp, Mus musculus
  siRNA target sequence for Itga7 (NM_008398.1,1738-1756).
gtggccttagattatatgt

SEQ ID NO: 635819 - DNA, 19 bp, Mus musculus
  siRNA target sequence for Itga7 (NM_008398.1,1740-1758).
ggccttagattatatgtta

SEQ ID NO: 635820 - DNA, 19 bp, Mus musculus
  siRNA target sequence for Itga7 (NM_008398.1,1795-1813).
ccacgtgtgacgtttctga

SEQ ID NO: 635821 - DNA, 19 bp, Mus musculus
  siRNA target sequence for Itga7 (NM_008398.1,1878-1896).
ccgagtctgtggagatact

SEQ ID NO: 635822 - DNA, 19 bp, Mus musculus
  siRNA target sequence for Itga7 (NM_008398.1,1909-1927).
caggaaaacgtcaaagaca

SEQ ID NO: 635823 - DNA, 19 bp, Mus musculus
  siRNA target sequence for Itga7 (NM_008398.1,2196-2214).
cgccctgttcgcattgagt

SEQ ID NO: 635824 - DNA, 19 bp, Mus musculus
  siRNA target sequence for Itga7 (NM_008398.1,2211-2229).
gagtgggcagccgttcata

SEQ ID NO: 635825 - DNA, 19 bp, Mus musculus
  siRNA target sequence for Itga7 (NM_008398.1,2443-2461).
ggcgctcaggtcacttttt

SEQ ID NO: 635826 - DNA, 19 bp, Mus musculus
  siRNA target sequence for Itga7 (NM_008398.1,2444-2462).
gcgctcaggtcacttttta

SEQ ID NO: 635827 - DNA, 19 bp, Mus musculus
  siRNA target sequence for Itga7 (NM_008398.1,2474-2492).
gcacctctgggatcactat

SEQ ID NO: 635828 - DNA, 19 bp, Mus musculus
  siRNA target sequence for Itga7 (NM_008398.1,2475-2493).
cacctctgggatcactatt

SEQ ID NO: 635829 - DNA, 19 bp, Mus musculus
  siRNA target sequence for Itga7 (NM_008398.1,2477-2495).
cctctgggatcactattga

SEQ ID NO: 635830 - DNA, 19 bp, Mus musculus
  siRNA target sequence for Itga7 (NM_008398.1,2561-2579).
ccgttcgggctcatgtctt

SEQ ID NO: 635831 - DNA, 19 bp, Mus musculus
  siRNA target sequence for Itga7 (NM_008398.1,2584-2602).
gaattgccactgtccattt

SEQ ID NO: 635832 - DNA, 19 bp, Mus musculus
  siRNA target sequence for Itga7 (NM_008398.1,2703-2721).
ggtcacggtctccaatcaa

SEQ ID NO: 635833 - DNA, 19 bp, Mus musculus
  siRNA target sequence for Itga7 (NM_008398.1,2723-2741).
gccagtctctcaatactct

SEQ ID NO: 635834 - DNA, 19 bp, Mus musculus
  siRNA target sequence for Itga7 (NM_008398.1,2773-2791).
cacgagatcgccaatggaa

SEQ ID NO: 635835 - DNA, 19 bp, Mus musculus
  siRNA target sequence for Itga7 (NM_008398.1,3127-3145).
gagtacatggccgtgaaat

SEQ ID NO: 635836 - DNA, 19 bp, Mus musculus
  siRNA target sequence for Itgam (NM_008401.1,609-627).
cttgtgtcatggcttcaat

SEQ ID NO: 635837 - DNA, 19 bp, Mus musculus
  siRNA target sequence for Itgam (NM_008401.1,624-642).
caatctggacactgaacat

SEQ ID NO: 635838 - DNA, 19 bp, Mus musculus
  siRNA target sequence for Itgam (NM_008401.1,645-663).
catgaccttccaagagaat

SEQ ID NO: 635839 - DNA, 19 bp, Mus musculus
  siRNA target sequence for Itgam (NM_008401.1,890-908).
gccccacggtgcaccaaaa

SEQ ID NO: 635840 - DNA, 19 bp, Mus musculus
  siRNA target sequence for Itgam (NM_008401.1,892-910).
cccacggtgcaccaaaact

SEQ ID NO: 635841 - DNA, 19 bp, Mus musculus
  siRNA target sequence for Itgam (NM_008401.1,909-927).
ctgcaaggagaatacttat

SEQ ID NO: 635842 - DNA, 19 bp, Mus musculus
  siRNA target sequence for Itgam (NM_008401.1,911-929).
gcaaggagaatacttatgt

SEQ ID NO: 635843 - DNA, 19 bp, Mus musculus
  siRNA target sequence for Itgam (NM_008401.1,1043-1061).
gctccggtagcatcaacaa

SEQ ID NO: 635844 - DNA, 19 bp, Mus musculus
  siRNA target sequence for Itgam (NM_008401.1,1047-1065).
cggtagcatcaacaacatt

SEQ ID NO: 635845 - DNA, 19 bp, Mus musculus
  siRNA target sequence for Itgam (NM_008401.1,1049-1067).
gtagcatcaacaacattga

SEQ ID NO: 635846 - DNA, 19 bp, Mus musculus
  siRNA target sequence for Itgam (NM_008401.1,1153-1171).
gacgagttccggattcact

SEQ ID NO: 635847 - DNA, 19 bp, Mus musculus
  siRNA target sequence for Itgam (NM_008401.1,1197-1215).
ccctagcccaagatcacat

SEQ ID NO: 635848 - DNA, 19 bp, Mus musculus
  siRNA target sequence for Itgam (NM_008401.1,1319-1337).
ctgcgaagatcctagttgt

SEQ ID NO: 635849 - DNA, 19 bp, Mus musculus
  siRNA target sequence for Itgam (NM_008401.1,1322-1340).
cgaagatcctagttgtcat

SEQ ID NO: 635850 - DNA, 19 bp, Mus musculus
  siRNA target sequence for Itgam (NM_008401.1,1359-1377).
cggtgatcccttggattat

SEQ ID NO: 635851 - DNA, 19 bp, Mus musculus
  siRNA target sequence for Itgam (NM_008401.1,1360-1378).
ggtgatcccttggattata

SEQ ID NO: 635852 - DNA, 19 bp, Mus musculus
  siRNA target sequence for Itgam (NM_008401.1,1361-1379).
gtgatcccttggattataa

SEQ ID NO: 635853 - DNA, 19 bp, Mus musculus
  siRNA target sequence for Itgam (NM_008401.1,1408-1426).
ggggtcattcgctacgtaa

SEQ ID NO: 635854 - DNA, 19 bp, Mus musculus
  siRNA target sequence for Itgam (NM_008401.1,1409-1427).
gggtcattcgctacgtaat

SEQ ID NO: 635855 - DNA, 19 bp, Mus musculus
  siRNA target sequence for Itgam (NM_008401.1,1410-1428).
ggtcattcgctacgtaatt

SEQ ID NO: 635856 - DNA, 19 bp, Mus musculus
  siRNA target sequence for Itgam (NM_008401.1,1531-1549).
gccctgaataccattcaga

SEQ ID NO: 635857 - DNA, 19 bp, Mus musculus
  siRNA target sequence for Itgam (NM_008401.1,1532-1550).
ccctgaataccattcagaa

SEQ ID NO: 635858 - DNA, 19 bp, Mus musculus
  siRNA target sequence for Itgam (NM_008401.1,1702-1720).
ggagccttcctgtatacat

SEQ ID NO: 635859 - DNA, 19 bp, Mus musculus
  siRNA target sequence for Itgam (NM_008401.1,1711-1729).
ctgtatacatcgaaggata

SEQ ID NO: 635860 - DNA, 19 bp, Mus musculus
  siRNA target sequence for Itgam (NM_008401.1,1713-1731).
gtatacatcgaaggataaa

SEQ ID NO: 635861 - DNA, 19 bp, Mus musculus
  siRNA target sequence for Itgam (NM_008401.1,1754-1772).
gagtggattcagacatgaa

SEQ ID NO: 635862 - DNA, 19 bp, Mus musculus
  siRNA target sequence for Itgam (NM_008401.1,1777-1795).
gcttacctgggttatgctt

SEQ ID NO: 635863 - DNA, 19 bp, Mus musculus
  siRNA target sequence for Itgam (NM_008401.1,1792-1810).
gcttctgcagtcatcttga

SEQ ID NO: 635864 - DNA, 19 bp, Mus musculus
  siRNA target sequence for Itgam (NM_008401.1,1811-1829).
ggaaccgtgtccaaagctt

SEQ ID NO: 635865 - DNA, 19 bp, Mus musculus
  siRNA target sequence for Itgam (NM_008401.1,1816-1834).
cgtgtccaaagcttggttt

SEQ ID NO: 635866 - DNA, 19 bp, Mus musculus
  siRNA target sequence for Itgam (NM_008401.1,1841-1859).
cacctcggtatcagcatat

SEQ ID NO: 635867 - DNA, 19 bp, Mus musculus
  siRNA target sequence for Itgam (NM_008401.1,1923-1941).
cagccagattggctcttat

SEQ ID NO: 635868 - DNA, 19 bp, Mus musculus
  siRNA target sequence for Itgam (NM_008401.1,1972-1990).
gacgctgatggcaatacca

SEQ ID NO: 635869 - DNA, 19 bp, Mus musculus
  siRNA target sequence for Itgam (NM_008401.1,2218-2236).
cagggcgctgtctacattt

SEQ ID NO: 635870 - DNA, 19 bp, Mus musculus
  siRNA target sequence for Itgam (NM_008401.1,2339-2357).
ggggtaaggatctcacaat

SEQ ID NO: 635871 - DNA, 19 bp, Mus musculus
  siRNA target sequence for Itgam (NM_008401.1,2583-2601).
ccagagcactgtcacttat

SEQ ID NO: 635872 - DNA, 19 bp, Mus musculus
  siRNA target sequence for Itgam (NM_008401.1,2630-2648).
gtatccgtgccttctttga

SEQ ID NO: 635873 - DNA, 19 bp, Mus musculus
  siRNA target sequence for Itgam (NM_008401.1,2705-2723).
gtgaaacactgaagctaat

SEQ ID NO: 635874 - DNA, 19 bp, Mus musculus
  siRNA target sequence for Itgam (NM_008401.1,2760-2778).
catcctgcgcctcaattat

SEQ ID NO: 635875 - DNA, 19 bp, Mus musculus
  siRNA target sequence for Itgam (NM_008401.1,2857-2875).
gctatgtttccctttgaga

SEQ ID NO: 635876 - DNA, 19 bp, Mus musculus
  siRNA target sequence for Itgam (NM_008401.1,3020-3038).
cccaggttaccgtctacta

SEQ ID NO: 635877 - DNA, 19 bp, Mus musculus
  siRNA target sequence for Itgam (NM_008401.1,3036-3054).
ctacccatctggcttatct

SEQ ID NO: 635878 - DNA, 19 bp, Mus musculus
  siRNA target sequence for Itgam (NM_008401.1,3171-3189).
cataaaccatcccatcttt

SEQ ID NO: 635879 - DNA, 19 bp, Mus musculus
  siRNA target sequence for Itgam (NM_008401.1,3181-3199).
cccatctttcctgctaatt

SEQ ID NO: 635880 - DNA, 19 bp, Mus musculus
  siRNA target sequence for Itgam (NM_008401.1,3307-3325).
cacaaaaccaagtttcagt

SEQ ID NO: 635881 - DNA, 19 bp, Mus musculus
  siRNA target sequence for Itgam (NM_008401.1,3342-3360).
gtacgccatctacatgatt

SEQ ID NO: 635882 - DNA, 19 bp, Mus musculus
  siRNA target sequence for Itgam (NM_008401.1,3346-3364).
gccatctacatgattgtca

SEQ ID NO: 635883 - DNA, 19 bp, Mus musculus
  siRNA target sequence for Itgam (NM_008401.1,3377-3395).
gttctatcagatatctcaa

SEQ ID NO: 635884 - DNA, 19 bp, Mus musculus
  siRNA target sequence for Itgam (NM_008401.1,3491-3509).
ggatccctgttcagatcaa

SEQ ID NO: 635885 - DNA, 19 bp, Mus musculus
  siRNA target sequence for Itgam (NM_008401.1,3499-3517).
gttcagatcaacaatgtga

SEQ ID NO: 635886 - DNA, 19 bp, Mus musculus
  siRNA target sequence for Itgam (NM_008401.1,3673-3691).
gaccttccatccttcaaca

SEQ ID NO: 635887 - DNA, 19 bp, Mus musculus
  siRNA target sequence for Itgam (NM_008401.1,3692-3710).
ctcaggaaatattcaatgt

SEQ ID NO: 635888 - DNA, 19 bp, Mus musculus
  siRNA target sequence for Itgam (NM_008401.1,3741-3759).
gtacatcaagacttctcat

SEQ ID NO: 635889 - DNA, 19 bp, Mus musculus
  siRNA target sequence for Itgam (NM_008401.1,3826-3844).
gggcaggagtcgtatgtga

SEQ ID NO: 635890 - DNA, 19 bp, Mus musculus
  siRNA target sequence for Itgam (NM_008401.1,3860-3878).
ccaaagtggagccatatga

SEQ ID NO: 635891 - DNA, 19 bp, Mus musculus
  siRNA target sequence for Itgam (NM_008401.1,3870-3888).
gccatatgaagttcacaat

SEQ ID NO: 635892 - DNA, 19 bp, Mus musculus
  siRNA target sequence for Itgam (NM_008401.1,3885-3903).
caatcctgtaccactcatt

SEQ ID NO: 635893 - DNA, 19 bp, Mus musculus
  siRNA target sequence for Itgam (NM_008401.1,3980-3998).
ggcagtacaaggacatgat

SEQ ID NO: 635894 - DNA, 19 bp, Mus musculus
  siRNA target sequence for Itgav (NM_008402.1,345-363).
cgggtcccgagggaagtta

SEQ ID NO: 635895 - DNA, 19 bp, Mus musculus
  siRNA target sequence for Itgav (NM_008402.1,347-365).
ggtcccgagggaagttact

SEQ ID NO: 635896 - DNA, 19 bp, Mus musculus
  siRNA target sequence for Itgav (NM_008402.1,348-366).
gtcccgagggaagttactt

SEQ ID NO: 635897 - DNA, 19 bp, Mus musculus
  siRNA target sequence for Itgav (NM_008402.1,369-387).
gattcgccgtggacttctt

SEQ ID NO: 635898 - DNA, 19 bp, Mus musculus
  siRNA target sequence for Itgav (NM_008402.1,445-463).
gacccagcctgggattgta

SEQ ID NO: 635899 - DNA, 19 bp, Mus musculus
  siRNA target sequence for Itgav (NM_008402.1,473-491).
caagttctcaaatgtgaat

SEQ ID NO: 635900 - DNA, 19 bp, Mus musculus
  siRNA target sequence for Itgav (NM_008402.1,507-525).
ggtgccagcccattgagtt

SEQ ID NO: 635901 - DNA, 19 bp, Mus musculus
  siRNA target sequence for Itgav (NM_008402.1,508-526).
gtgccagcccattgagttt

SEQ ID NO: 635902 - DNA, 19 bp, Mus musculus
  siRNA target sequence for Itgav (NM_008402.1,514-532).
gcccattgagtttgattca

SEQ ID NO: 635903 - DNA, 19 bp, Mus musculus
  siRNA target sequence for Itgav (NM_008402.1,515-533).
cccattgagtttgattcaa

SEQ ID NO: 635904 - DNA, 19 bp, Mus musculus
  siRNA target sequence for Itgav (NM_008402.1,517-535).
cattgagtttgattcaaca

SEQ ID NO: 635905 - DNA, 19 bp, Mus musculus
  siRNA target sequence for Itgav (NM_008402.1,531-549).
caacaggcaatcgagatta

SEQ ID NO: 635906 - DNA, 19 bp, Mus musculus
  siRNA target sequence for Itgav (NM_008402.1,560-578).
gacccactggagtttaagt

SEQ ID NO: 635907 - DNA, 19 bp, Mus musculus
  siRNA target sequence for Itgav (NM_008402.1,604-622).
gaggtcaaagcaggataaa

SEQ ID NO: 635908 - DNA, 19 bp, Mus musculus
  siRNA target sequence for Itgav (NM_008402.1,708-726).
gcacaaagaccgttgagta

SEQ ID NO: 635909 - DNA, 19 bp, Mus musculus
  siRNA target sequence for Itgav (NM_008402.1,735-753).
gcaggtcaaaaaatattga

SEQ ID NO: 635910 - DNA, 19 bp, Mus musculus
  siRNA target sequence for Itgav (NM_008402.1,823-841).
cggtggtcctggtagcttt

SEQ ID NO: 635911 - DNA, 19 bp, Mus musculus
  siRNA target sequence for Itgav (NM_008402.1,824-842).
ggtggtcctggtagctttt

SEQ ID NO: 635912 - DNA, 19 bp, Mus musculus
  siRNA target sequence for Itgav (NM_008402.1,827-845).
ggtcctggtagcttttatt

SEQ ID NO: 635913 - DNA, 19 bp, Mus musculus
  siRNA target sequence for Itgav (NM_008402.1,864-882).
cggaccaagtggcagaaat

SEQ ID NO: 635914 - DNA, 19 bp, Mus musculus
  siRNA target sequence for Itgav (NM_008402.1,875-893).
gcagaaatcatatctaaat

SEQ ID NO: 635915 - DNA, 19 bp, Mus musculus
  siRNA target sequence for Itgav (NM_008402.1,907-925).
ctacagcatcaaatataat

SEQ ID NO: 635916 - DNA, 19 bp, Mus musculus
  siRNA target sequence for Itgav (NM_008402.1,912-930).
gcatcaaatataataacca

SEQ ID NO: 635917 - DNA, 19 bp, Mus musculus
  siRNA target sequence for Itgav (NM_008402.1,939-957).
cacggactgcacaagcaat

SEQ ID NO: 635918 - DNA, 19 bp, Mus musculus
  siRNA target sequence for Itgav (NM_008402.1,941-959).
cggactgcacaagcaattt

SEQ ID NO: 635919 - DNA, 19 bp, Mus musculus
  siRNA target sequence for Itgav (NM_008402.1,942-960).
ggactgcacaagcaatttt

SEQ ID NO: 635920 - DNA, 19 bp, Mus musculus
  siRNA target sequence for Itgav (NM_008402.1,948-966).
cacaagcaatttttgatga

SEQ ID NO: 635921 - DNA, 19 bp, Mus musculus
  siRNA target sequence for Itgav (NM_008402.1,967-985).
cagttatttgggttactct

SEQ ID NO: 635922 - DNA, 19 bp, Mus musculus
  siRNA target sequence for Itgav (NM_008402.1,988-1006).
ggccgtgggagacttcaat

SEQ ID NO: 635923 - DNA, 19 bp, Mus musculus
  siRNA target sequence for Itgav (NM_008402.1,1003-1021).
caatggtgacggcattgaa

SEQ ID NO: 635924 - DNA, 19 bp, Mus musculus
  siRNA target sequence for Itgav (NM_008402.1,1007-1025).
ggtgacggcattgaagatt

SEQ ID NO: 635925 - DNA, 19 bp, Mus musculus
  siRNA target sequence for Itgav (NM_008402.1,1008-1026).
gtgacggcattgaagattt

SEQ ID NO: 635926 - DNA, 19 bp, Mus musculus
  siRNA target sequence for Itgav (NM_008402.1,1013-1031).
ggcattgaagattttgtct

SEQ ID NO: 635927 - DNA, 19 bp, Mus musculus
  siRNA target sequence for Itgav (NM_008402.1,1096-1114).
ctctttacacaattttact

SEQ ID NO: 635928 - DNA, 19 bp, Mus musculus
  siRNA target sequence for Itgav (NM_008402.1,1126-1144).
ggctgcgtattttggattt

SEQ ID NO: 635929 - DNA, 19 bp, Mus musculus
  siRNA target sequence for Itgav (NM_008402.1,1127-1145).
gctgcgtattttggatttt

SEQ ID NO: 635930 - DNA, 19 bp, Mus musculus
  siRNA target sequence for Itgav (NM_008402.1,1148-1166).
gtagctgctactgacatta

SEQ ID NO: 635931 - DNA, 19 bp, Mus musculus
  siRNA target sequence for Itgav (NM_008402.1,1175-1193).
gattacgcagatgtgttta

SEQ ID NO: 635932 - DNA, 19 bp, Mus musculus
  siRNA target sequence for Itgav (NM_008402.1,1180-1198).
cgcagatgtgtttattgga

SEQ ID NO: 635933 - DNA, 19 bp, Mus musculus
  siRNA target sequence for Itgav (NM_008402.1,1280-1298).
ggagacttccagactacaa

SEQ ID NO: 635934 - DNA, 19 bp, Mus musculus
  siRNA target sequence for Itgav (NM_008402.1,1370-1388).
ggcttcaatgatattgcaa

SEQ ID NO: 635935 - DNA, 19 bp, Mus musculus
  siRNA target sequence for Itgav (NM_008402.1,1371-1389).
gcttcaatgatattgcaat

SEQ ID NO: 635936 - DNA, 19 bp, Mus musculus
  siRNA target sequence for Itgav (NM_008402.1,1459-1477).
gaattcggtgccatctcaa

SEQ ID NO: 635937 - DNA, 19 bp, Mus musculus
  siRNA target sequence for Itgav (NM_008402.1,1464-1482).
cggtgccatctcaaatcct

SEQ ID NO: 635938 - DNA, 19 bp, Mus musculus
  siRNA target sequence for Itgav (NM_008402.1,1513-1531).
cccaagctttggctattca

SEQ ID NO: 635939 - DNA, 19 bp, Mus musculus
  siRNA target sequence for Itgav (NM_008402.1,1514-1532).
ccaagctttggctattcaa

SEQ ID NO: 635940 - DNA, 19 bp, Mus musculus
  siRNA target sequence for Itgav (NM_008402.1,1515-1533).
caagctttggctattcaat

SEQ ID NO: 635941 - DNA, 19 bp, Mus musculus
  siRNA target sequence for Itgav (NM_008402.1,1547-1565).
gatgtagacaggaatggat

SEQ ID NO: 635942 - DNA, 19 bp, Mus musculus
  siRNA target sequence for Itgav (NM_008402.1,1558-1576).
gaatggatatccagactta

SEQ ID NO: 635943 - DNA, 19 bp, Mus musculus
  siRNA target sequence for Itgav (NM_008402.1,1563-1581).
gatatccagacttagttgt

SEQ ID NO: 635944 - DNA, 19 bp, Mus musculus
  siRNA target sequence for Itgav (NM_008402.1,1595-1613).
gtggatcgagctgtcttat

SEQ ID NO: 635945 - DNA, 19 bp, Mus musculus
  siRNA target sequence for Itgav (NM_008402.1,1598-1616).
gatcgagctgtcttataca

SEQ ID NO: 635946 - DNA, 19 bp, Mus musculus
  siRNA target sequence for Itgav (NM_008402.1,1623-1641).
gacccgttgtcactgtaaa

SEQ ID NO: 635947 - DNA, 19 bp, Mus musculus
  siRNA target sequence for Itgav (NM_008402.1,1627-1645).
cgttgtcactgtaaatgct

SEQ ID NO: 635948 - DNA, 19 bp, Mus musculus
  siRNA target sequence for Itgav (NM_008402.1,1652-1670).
gaagtgtaccctagcattt

SEQ ID NO: 635949 - DNA, 19 bp, Mus musculus
  siRNA target sequence for Itgav (NM_008402.1,1655-1673).
gtgtaccctagcattttaa

SEQ ID NO: 635950 - DNA, 19 bp, Mus musculus
  siRNA target sequence for Itgav (NM_008402.1,1657-1675).
gtaccctagcattttaaat

SEQ ID NO: 635951 - DNA, 19 bp, Mus musculus
  siRNA target sequence for Itgav (NM_008402.1,1660-1678).
ccctagcattttaaatcaa

SEQ ID NO: 635952 - DNA, 19 bp, Mus musculus
  siRNA target sequence for Itgav (NM_008402.1,1831-1849).
catccgacgagcactgttt

SEQ ID NO: 635953 - DNA, 19 bp, Mus musculus
  siRNA target sequence for Itgav (NM_008402.1,1841-1859).
gcactgtttctccataaca

SEQ ID NO: 635954 - DNA, 19 bp, Mus musculus
  siRNA target sequence for Itgav (NM_008402.1,1875-1893).
ccaagaccatgactgtttt

SEQ ID NO: 635955 - DNA, 19 bp, Mus musculus
  siRNA target sequence for Itgav (NM_008402.1,1918-1936).
ggaactggtcgcctatctt

SEQ ID NO: 635956 - DNA, 19 bp, Mus musculus
  siRNA target sequence for Itgav (NM_008402.1,1928-1946).
gcctatcttcgggatgaat

SEQ ID NO: 635957 - DNA, 19 bp, Mus musculus
  siRNA target sequence for Itgav (NM_008402.1,2070-2088).
gtcggcaggctcatattct

SEQ ID NO: 635958 - DNA, 19 bp, Mus musculus
  siRNA target sequence for Itgav (NM_008402.1,2073-2091).
ggcaggctcatattctact

SEQ ID NO: 635959 - DNA, 19 bp, Mus musculus
  siRNA target sequence for Itgav (NM_008402.1,2074-2092).
gcaggctcatattctactt

SEQ ID NO: 635960 - DNA, 19 bp, Mus musculus
  siRNA target sequence for Itgav (NM_008402.1,2105-2123).
gacaatgtctgtaaaccta

SEQ ID NO: 635961 - DNA, 19 bp, Mus musculus
  siRNA target sequence for Itgav (NM_008402.1,2113-2131).
ctgtaaacctaaattggaa

SEQ ID NO: 635962 - DNA, 19 bp, Mus musculus
  siRNA target sequence for Itgav (NM_008402.1,2138-2156).
gtaaatagtgatcaaaaga

SEQ ID NO: 635963 - DNA, 19 bp, Mus musculus
  siRNA target sequence for Itgav (NM_008402.1,2228-2246).
gaagctgagctcatcgttt

SEQ ID NO: 635964 - DNA, 19 bp, Mus musculus
  siRNA target sequence for Itgav (NM_008402.1,2304-2322).
gactgtcctgtgcatttaa

SEQ ID NO: 635965 - DNA, 19 bp, Mus musculus
  siRNA target sequence for Itgav (NM_008402.1,2536-2554).
ggagataagaggagtttca

SEQ ID NO: 635966 - DNA, 19 bp, Mus musculus
  siRNA target sequence for Itgav (NM_008402.1,2537-2555).
gagataagaggagtttcaa

SEQ ID NO: 635967 - DNA, 19 bp, Mus musculus
  siRNA target sequence for Itgav (NM_008402.1,2549-2567).
gtttcaagtccagatcata

SEQ ID NO: 635968 - DNA, 19 bp, Mus musculus
  siRNA target sequence for Itgav (NM_008402.1,2553-2571).
caagtccagatcatatctt

SEQ ID NO: 635969 - DNA, 19 bp, Mus musculus
  siRNA target sequence for Itgav (NM_008402.1,2569-2587).
ctttcttccaattccaaat

SEQ ID NO: 635970 - DNA, 19 bp, Mus musculus
  siRNA target sequence for Itgav (NM_008402.1,2630-2648).
cctattgttcagcacatat

SEQ ID NO: 635971 - DNA, 19 bp, Mus musculus
  siRNA target sequence for Itgav (NM_008402.1,2676-2694).
cattcagcaaggcaattct

SEQ ID NO: 635972 - DNA, 19 bp, Mus musculus
  siRNA target sequence for Itgav (NM_008402.1,2682-2700).
gcaaggcaattctaaatct

SEQ ID NO: 635973 - DNA, 19 bp, Mus musculus
  siRNA target sequence for Itgav (NM_008402.1,2770-2788).
gaactgcacggcagataca

SEQ ID NO: 635974 - DNA, 19 bp, Mus musculus
  siRNA target sequence for Itgav (NM_008402.1,2887-2905).
cctcagagagggagatgtt

SEQ ID NO: 635975 - DNA, 19 bp, Mus musculus
  siRNA target sequence for Itgav (NM_008402.1,2981-2999).
gcaatcctgtacgtgaaat

SEQ ID NO: 635976 - DNA, 19 bp, Mus musculus
  siRNA target sequence for Itgav (NM_008402.1,3061-3079).
gtcatctgcttcctttaat

SEQ ID NO: 635977 - DNA, 19 bp, Mus musculus
  siRNA target sequence for Itgav (NM_008402.1,3063-3081).
catctgcttcctttaatat

SEQ ID NO: 635978 - DNA, 19 bp, Mus musculus
  siRNA target sequence for Itgav (NM_008402.1,3134-3152).
ctagtcaccactaacatca

SEQ ID NO: 635979 - DNA, 19 bp, Mus musculus
  siRNA target sequence for Itgav (NM_008402.1,3227-3245).
ctactggctgtgttggtat

SEQ ID NO: 635980 - DNA, 19 bp, Mus musculus
  siRNA target sequence for Itgav (NM_008402.1,3328-3346).
gaatggcgaaggaaactct

SEQ ID NO: 635981 - DNA, 19 bp, Mus musculus
  siRNA target sequence for Itgb2 (NM_008404.1,32-50).
ccctagctggactgttctt

SEQ ID NO: 635982 - DNA, 19 bp, Mus musculus
  siRNA target sequence for Itgb2 (NM_008404.1,70-88).
caggaatgcaccaagtaca

SEQ ID NO: 635983 - DNA, 19 bp, Mus musculus
  siRNA target sequence for Itgb2 (NM_008404.1,95-113).
gcagttgccgggactgtat

SEQ ID NO: 635984 - DNA, 19 bp, Mus musculus
  siRNA target sequence for Itgb2 (NM_008404.1,221-239).
gtccagccgatgatatcat

SEQ ID NO: 635985 - DNA, 19 bp, Mus musculus
  siRNA target sequence for Itgb2 (NM_008404.1,332-350).
gacaggctgccgcattcaa

SEQ ID NO: 635986 - DNA, 19 bp, Mus musculus
  siRNA target sequence for Itgb2 (NM_008404.1,337-355).
gctgccgcattcaatgtga

SEQ ID NO: 635987 - DNA, 19 bp, Mus musculus
  siRNA target sequence for Itgb2 (NM_008404.1,341-359).
ccgcattcaatgtgacttt

SEQ ID NO: 635988 - DNA, 19 bp, Mus musculus
  siRNA target sequence for Itgb2 (NM_008404.1,369-387).
caagggataccccattgat

SEQ ID NO: 635989 - DNA, 19 bp, Mus musculus
  siRNA target sequence for Itgb2 (NM_008404.1,525-543).
gacggtgctgccttttgtt

SEQ ID NO: 635990 - DNA, 19 bp, Mus musculus
  siRNA target sequence for Itgb2 (NM_008404.1,527-545).
cggtgctgccttttgttaa

SEQ ID NO: 635991 - DNA, 19 bp, Mus musculus
  siRNA target sequence for Itgb2 (NM_008404.1,616-634).
cggcacgtgctcaagttaa

SEQ ID NO: 635992 - DNA, 19 bp, Mus musculus
  siRNA target sequence for Itgb2 (NM_008404.1,663-681).
ggtcggcaagcaactgatt

SEQ ID NO: 635993 - DNA, 19 bp, Mus musculus
  siRNA target sequence for Itgb2 (NM_008404.1,664-682).
gtcggcaagcaactgattt

SEQ ID NO: 635994 - DNA, 19 bp, Mus musculus
  siRNA target sequence for Itgb2 (NM_008404.1,710-728).
ggctggatgccataatgca

SEQ ID NO: 635995 - DNA, 19 bp, Mus musculus
  siRNA target sequence for Itgb2 (NM_008404.1,734-752).
ctgcatgtccggaggaaat

SEQ ID NO: 635996 - DNA, 19 bp, Mus musculus
  siRNA target sequence for Itgb2 (NM_008404.1,834-852).
catcctgacccccaatgat

SEQ ID NO: 635997 - DNA, 19 bp, Mus musculus
  siRNA target sequence for Itgb2 (NM_008404.1,860-878).
gccacctggaggataacat

SEQ ID NO: 635998 - DNA, 19 bp, Mus musculus
  siRNA target sequence for Itgb2 (NM_008404.1,868-886).
gaggataacatgtacaaga

SEQ ID NO: 635999 - DNA, 19 bp, Mus musculus
  siRNA target sequence for Itgb2 (NM_008404.1,1126-1144).
ccggacaccctgaaagtca

SEQ ID NO: 636000 - DNA, 19 bp, Mus musculus
  siRNA target sequence for Itgb2 (NM_008404.1,1204-1222).
gatggcgtacagatcaaca

SEQ ID NO: 636001 - DNA, 19 bp, Mus musculus
  siRNA target sequence for Itgb2 (NM_008404.1,1737-1755).
caccacgggctgtctgaat

SEQ ID NO: 636002 - DNA, 19 bp, Mus musculus
  siRNA target sequence for Itgb2 (NM_008404.1,1792-1810).
caatgcaacaggtgcatat

SEQ ID NO: 636003 - DNA, 19 bp, Mus musculus
  siRNA target sequence for Itgb2 (NM_008404.1,1892-1910).
ccgagtgcctgaagtttga

SEQ ID NO: 636004 - DNA, 19 bp, Mus musculus
  siRNA target sequence for Itgb2 (NM_008404.1,1893-1911).
cgagtgcctgaagtttgat

SEQ ID NO: 636005 - DNA, 19 bp, Mus musculus
  siRNA target sequence for Itgb2 (NM_008404.1,1909-1927).
gataagggcccttttgaga

SEQ ID NO: 636006 - DNA, 19 bp, Mus musculus
  siRNA target sequence for Itgb2 (NM_008404.1,1965-1983).
gactatccctttgaagaaa

SEQ ID NO: 636007 - DNA, 19 bp, Mus musculus
  siRNA target sequence for Itgb2 (NM_008404.1,2007-2025).
ggaaggctgttggataact

SEQ ID NO: 636008 - DNA, 19 bp, Mus musculus
  siRNA target sequence for Itgb2 (NM_008404.1,2008-2026).
gaaggctgttggataactt

SEQ ID NO: 636009 - DNA, 19 bp, Mus musculus
  siRNA target sequence for Itgb2 (NM_008404.1,2015-2033).
gttggataacttacacttt

SEQ ID NO: 636010 - DNA, 19 bp, Mus musculus
  siRNA target sequence for Itgb2 (NM_008404.1,2048-2066).
gaaggaacatttacaacat

SEQ ID NO: 636011 - DNA, 19 bp, Mus musculus
  siRNA target sequence for Itgb2 (NM_008404.1,2133-2151).
ggtaggtgtcgtactgatt

SEQ ID NO: 636012 - DNA, 19 bp, Mus musculus
  siRNA target sequence for Itgb2 (NM_008404.1,2240-2258).
cccaatggaacaatgacaa

SEQ ID NO: 636013 - DNA, 19 bp, Mus musculus
  siRNA target sequence for Itgb2 (NM_008404.1,2254-2272).
gacaaccccctcttcaaga

SEQ ID NO: 636014 - DNA, 19 bp, Mus musculus
  siRNA target sequence for Itgb2 (NM_008404.1,2276-2294).
ctacgacaacggtcatgaa

SEQ ID NO: 636015 - DNA, 19 bp, Mus musculus
  siRNA target sequence for Itgb2 (NM_008404.1,2286-2304).
ggtcatgaaccccaagttt

SEQ ID NO: 636016 - DNA, 19 bp, Mus musculus
  siRNA target sequence for Itgb3 (NM_016780.1,106-124).
ggagagtccaacatctgta

SEQ ID NO: 636017 - DNA, 19 bp, Mus musculus
  siRNA target sequence for Itgb3 (NM_016780.1,182-200).
ggtgctcagatgagacttt

SEQ ID NO: 636018 - DNA, 19 bp, Mus musculus
  siRNA target sequence for Itgb3 (NM_016780.1,254-272).
gtgctccagagtctattga

SEQ ID NO: 636019 - DNA, 19 bp, Mus musculus
  siRNA target sequence for Itgb3 (NM_016780.1,256-274).
gctccagagtctattgagt

SEQ ID NO: 636020 - DNA, 19 bp, Mus musculus
  siRNA target sequence for Itgb3 (NM_016780.1,379-397).
cgactacggccagatgatt

SEQ ID NO: 636021 - DNA, 19 bp, Mus musculus
  siRNA target sequence for Itgb3 (NM_016780.1,391-409).
gatgattcgaagatcttct

SEQ ID NO: 636022 - DNA, 19 bp, Mus musculus
  siRNA target sequence for Itgb3 (NM_016780.1,442-460).
gtggacatctactacttga

SEQ ID NO: 636023 - DNA, 19 bp, Mus musculus
  siRNA target sequence for Itgb3 (NM_016780.1,529-547).
cagatgcgcaagcttacta

SEQ ID NO: 636024 - DNA, 19 bp, Mus musculus
  siRNA target sequence for Itgb3 (NM_016780.1,586-604).
cctgtatcgccgtacatgt

SEQ ID NO: 636025 - DNA, 19 bp, Mus musculus
  siRNA target sequence for Itgb3 (NM_016780.1,587-605).
ctgtatcgccgtacatgta

SEQ ID NO: 636026 - DNA, 19 bp, Mus musculus
  siRNA target sequence for Itgb3 (NM_016780.1,589-607).
gtatcgccgtacatgtaca

SEQ ID NO: 636027 - DNA, 19 bp, Mus musculus
  siRNA target sequence for Itgb3 (NM_016780.1,634-652).
ccctgttacaatatgaaga

SEQ ID NO: 636028 - DNA, 19 bp, Mus musculus
  siRNA target sequence for Itgb3 (NM_016780.1,636-654).
ctgttacaatatgaagaat

SEQ ID NO: 636029 - DNA, 19 bp, Mus musculus
  siRNA target sequence for Itgb3 (NM_016780.1,708-726).
gtcccgcttcaatgaagaa

SEQ ID NO: 636030 - DNA, 19 bp, Mus musculus
  siRNA target sequence for Itgb3 (NM_016780.1,738-756).
gagcgtgtcccgtaatcga

SEQ ID NO: 636031 - DNA, 19 bp, Mus musculus
  siRNA target sequence for Itgb3 (NM_016780.1,783-801).
catcatgcaggctacagta

SEQ ID NO: 636032 - DNA, 19 bp, Mus musculus
  siRNA target sequence for Itgb3 (NM_016780.1,789-807).
gcaggctacagtatgtgat

SEQ ID NO: 636033 - DNA, 19 bp, Mus musculus
  siRNA target sequence for Itgb3 (NM_016780.1,792-810).
ggctacagtatgtgatgaa

SEQ ID NO: 636034 - DNA, 19 bp, Mus musculus
  siRNA target sequence for Itgb3 (NM_016780.1,833-851).
catcccatttgctagtgtt

SEQ ID NO: 636035 - DNA, 19 bp, Mus musculus
  siRNA target sequence for Itgb3 (NM_016780.1,858-876).
ggatgccaagacccatatt

SEQ ID NO: 636036 - DNA, 19 bp, Mus musculus
  siRNA target sequence for Itgb3 (NM_016780.1,986-1004).
ggctgatgactgagaaact

SEQ ID NO: 636037 - DNA, 19 bp, Mus musculus
  siRNA target sequence for Itgb3 (NM_016780.1,987-1005).
gctgatgactgagaaacta

SEQ ID NO: 636038 - DNA, 19 bp, Mus musculus
  siRNA target sequence for Itgb3 (NM_016780.1,1029-1047).
ctttgcagtgactgaaaat

SEQ ID NO: 636039 - DNA, 19 bp, Mus musculus
  siRNA target sequence for Itgb3 (NM_016780.1,1056-1074).
cctttaccagaattatagt

SEQ ID NO: 636040 - DNA, 19 bp, Mus musculus
  siRNA target sequence for Itgb3 (NM_016780.1,1125-1143).
cgtcctccagctcattgtt

SEQ ID NO: 636041 - DNA, 19 bp, Mus musculus
  siRNA target sequence for Itgb3 (NM_016780.1,1152-1170).
cgggaaaatccgctctaaa

SEQ ID NO: 636042 - DNA, 19 bp, Mus musculus
  siRNA target sequence for Itgb3 (NM_016780.1,1154-1172).
ggaaaatccgctctaaagt

SEQ ID NO: 636043 - DNA, 19 bp, Mus musculus
  siRNA target sequence for Itgb3 (NM_016780.1,1229-1247).
gcctcaacaacgaggttat

SEQ ID NO: 636044 - DNA, 19 bp, Mus musculus
  siRNA target sequence for Itgb3 (NM_016780.1,1282-1300).
ggagacacggtgagcttta

SEQ ID NO: 636045 - DNA, 19 bp, Mus musculus
  siRNA target sequence for Itgb3 (NM_016780.1,1285-1303).
gacacggtgagctttagta

SEQ ID NO: 636046 - DNA, 19 bp, Mus musculus
  siRNA target sequence for Itgb3 (NM_016780.1,1440-1458).
cagcccacgctgcaacaat

SEQ ID NO: 636047 - DNA, 19 bp, Mus musculus
  siRNA target sequence for Itgb3 (NM_016780.1,1455-1473).
caatgggaacgggactttt

SEQ ID NO: 636048 - DNA, 19 bp, Mus musculus
  siRNA target sequence for Itgb3 (NM_016780.1,1459-1477).
gggaacgggacttttgagt

SEQ ID NO: 636049 - DNA, 19 bp, Mus musculus
  siRNA target sequence for Itgb3 (NM_016780.1,1686-1704).
ctcctgcgtccgctacaaa

SEQ ID NO: 636050 - DNA, 19 bp, Mus musculus
  siRNA target sequence for Itgb3 (NM_016780.1,1718-1736).
ccggccatgggcaatgtaa

SEQ ID NO: 636051 - DNA, 19 bp, Mus musculus
  siRNA target sequence for Itgb3 (NM_016780.1,1762-1780).
gactggactggctactact

SEQ ID NO: 636052 - DNA, 19 bp, Mus musculus
  siRNA target sequence for Itgb3 (NM_016780.1,1973-1991).
ggggaacgctccatgaaga

SEQ ID NO: 636053 - DNA, 19 bp, Mus musculus
  siRNA target sequence for Itgb3 (NM_016780.1,2006-2024).
gctactgccgggatgacat

SEQ ID NO: 636054 - DNA, 19 bp, Mus musculus
  siRNA target sequence for Itgb3 (NM_016780.1,2332-2350).
gcaaacaacccgctgtata

SEQ ID NO: 636055 - DNA, 19 bp, Mus musculus
  siRNA target sequence for Itgb3 (NM_016780.1,2333-2351).
caaacaacccgctgtataa

SEQ ID NO: 636056 - DNA, 19 bp, Mus musculus
  siRNA target sequence for Itgb5 (NM_010580.1,265-283).
ctcgcagggctcaacatat

SEQ ID NO: 636057 - DNA, 19 bp, Mus musculus
  siRNA target sequence for Itgb5 (NM_010580.1,298-316).
gccacctcgtgtgaagaat

SEQ ID NO: 636058 - DNA, 19 bp, Mus musculus
  siRNA target sequence for Itgb5 (NM_010580.1,319-337).
ctgttgatccacccaaaat

SEQ ID NO: 636059 - DNA, 19 bp, Mus musculus
  siRNA target sequence for Itgb5 (NM_010580.1,344-362).
ggtgctccaaagagtactt

SEQ ID NO: 636060 - DNA, 19 bp, Mus musculus
  siRNA target sequence for Itgb5 (NM_010580.1,345-363).
gtgctccaaagagtacttt

SEQ ID NO: 636061 - DNA, 19 bp, Mus musculus
  siRNA target sequence for Itgb5 (NM_010580.1,719-737).
gtaacttccgcttaggttt

SEQ ID NO: 636062 - DNA, 19 bp, Mus musculus
  siRNA target sequence for Itgb5 (NM_010580.1,729-747).
cttaggtttcgggtctttt

SEQ ID NO: 636063 - DNA, 19 bp, Mus musculus
  siRNA target sequence for Itgb5 (NM_010580.1,734-752).
gtttcgggtcttttgttga

SEQ ID NO: 636064 - DNA, 19 bp, Mus musculus
  siRNA target sequence for Itgb5 (NM_010580.1,792-810).
ccagaccaatccgtgtatt

SEQ ID NO: 636065 - DNA, 19 bp, Mus musculus
  siRNA target sequence for Itgb5 (NM_010580.1,795-813).
gaccaatccgtgtattggt

SEQ ID NO: 636066 - DNA, 19 bp, Mus musculus
  siRNA target sequence for Itgb5 (NM_010580.1,797-815).
ccaatccgtgtattggtta

SEQ ID NO: 636067 - DNA, 19 bp, Mus musculus
  siRNA target sequence for Itgb5 (NM_010580.1,987-1005).
gatcggatggcgaaaagat

SEQ ID NO: 636068 - DNA, 19 bp, Mus musculus
  siRNA target sequence for Itgb5 (NM_010580.1,1210-1228).
gtgacgaagaaccactata

SEQ ID NO: 636069 - DNA, 19 bp, Mus musculus
  siRNA target sequence for Itgb5 (NM_010580.1,1214-1232).
cgaagaaccactatatgct

SEQ ID NO: 636070 - DNA, 19 bp, Mus musculus
  siRNA target sequence for Itgb5 (NM_010580.1,1369-1387).
ccagaagaccttaatctct

SEQ ID NO: 636071 - DNA, 19 bp, Mus musculus
  siRNA target sequence for Itgb5 (NM_010580.1,1375-1393).
gaccttaatctcttcttca

SEQ ID NO: 636072 - DNA, 19 bp, Mus musculus
  siRNA target sequence for Itgb5 (NM_010580.1,1458-1476).
ggacacggcatcctttgaa

SEQ ID NO: 636073 - DNA, 19 bp, Mus musculus
  siRNA target sequence for Itgb5 (NM_010580.1,1508-1526).
gacaagcagcacagtcttt

SEQ ID NO: 636074 - DNA, 19 bp, Mus musculus
  siRNA target sequence for Itgb5 (NM_010580.1,1563-1581).
ggtggaagtcgcctacaat

SEQ ID NO: 636075 - DNA, 19 bp, Mus musculus
  siRNA target sequence for Itgb5 (NM_010580.1,1564-1582).
gtggaagtcgcctacaatt

SEQ ID NO: 636076 - DNA, 19 bp, Mus musculus
  siRNA target sequence for Itgb5 (NM_010580.1,1567-1585).
gaagtcgcctacaattgca

SEQ ID NO: 636077 - DNA, 19 bp, Mus musculus
  siRNA target sequence for Itgb5 (NM_010580.1,1936-1954).
ggttacattggggacaatt

SEQ ID NO: 636078 - DNA, 19 bp, Mus musculus
  siRNA target sequence for Itgb5 (NM_010580.1,2098-2116).
gatgcttgcagctctaaga

SEQ ID NO: 636079 - DNA, 19 bp, Mus musculus
  siRNA target sequence for Itgb5 (NM_010580.1,2261-2279).
ctaaggactgcgttatgat

SEQ ID NO: 636080 - DNA, 19 bp, Mus musculus
  siRNA target sequence for Itgb5 (NM_010580.1,2445-2463).
ccacgaccgccgagagttt

SEQ ID NO: 636081 - DNA, 19 bp, Mus musculus
  siRNA target sequence for Itgb5 (NM_010580.1,2519-2537).
gtcgatttcgccttcaaca

SEQ ID NO: 636082 - DNA, 19 bp, Mus musculus
  siRNA target sequence for Itgb5 (NM_010580.1,2539-2557).
gttcaacaaatcctacaat

SEQ ID NO: 636083 - DNA, 19 bp, Mus musculus
  siRNA target sequence for Itgb5 (NM_010580.1,2586-2604).
ctggagggggactaaggat

SEQ ID NO: 636084 - DNA, 19 bp, Mus musculus
  siRNA target sequence for Itgb6 (NM_021359.2,377-395).
cgacaccccagcgaatctt

SEQ ID NO: 636085 - DNA, 19 bp, Mus musculus
  siRNA target sequence for Itgb6 (NM_021359.2,378-396).
gacaccccagcgaatcttt

SEQ ID NO: 636086 - DNA, 19 bp, Mus musculus
  siRNA target sequence for Itgb6 (NM_021359.2,380-398).
caccccagcgaatctttta

SEQ ID NO: 636087 - DNA, 19 bp, Mus musculus
  siRNA target sequence for Itgb6 (NM_021359.2,411-429).
caactacccttcattgaaa

SEQ ID NO: 636088 - DNA, 19 bp, Mus musculus
  siRNA target sequence for Itgb6 (NM_021359.2,431-449).
ccctgtctcccgcatagaa

SEQ ID NO: 636089 - DNA, 19 bp, Mus musculus
  siRNA target sequence for Itgb6 (NM_021359.2,433-451).
ctgtctcccgcatagaagt

SEQ ID NO: 636090 - DNA, 19 bp, Mus musculus
  siRNA target sequence for Itgb6 (NM_021359.2,441-459).
cgcatagaagtccttcaaa

SEQ ID NO: 636091 - DNA, 19 bp, Mus musculus
  siRNA target sequence for Itgb6 (NM_021359.2,442-460).
gcatagaagtccttcaaaa

SEQ ID NO: 636092 - DNA, 19 bp, Mus musculus
  siRNA target sequence for Itgb6 (NM_021359.2,477-495).
ggccgacagaagaacagtt

SEQ ID NO: 636093 - DNA, 19 bp, Mus musculus
  siRNA target sequence for Itgb6 (NM_021359.2,485-503).
gaagaacagttctgacatt

SEQ ID NO: 636094 - DNA, 19 bp, Mus musculus
  siRNA target sequence for Itgb6 (NM_021359.2,516-534).
cctcaaagcttggttctta

SEQ ID NO: 636095 - DNA, 19 bp, Mus musculus
  siRNA target sequence for Itgb6 (NM_021359.2,741-759).
cccgtttctccttttatga

SEQ ID NO: 636096 - DNA, 19 bp, Mus musculus
  siRNA target sequence for Itgb6 (NM_021359.2,742-760).
ccgtttctccttttatgaa

SEQ ID NO: 636097 - DNA, 19 bp, Mus musculus
  siRNA target sequence for Itgb6 (NM_021359.2,743-761).
cgtttctccttttatgaaa

SEQ ID NO: 636098 - DNA, 19 bp, Mus musculus
  siRNA target sequence for Itgb6 (NM_021359.2,781-799).
ccaacccttgcagtagtat

SEQ ID NO: 636099 - DNA, 19 bp, Mus musculus
  siRNA target sequence for Itgb6 (NM_021359.2,790-808).
gcagtagtatcccctattt

SEQ ID NO: 636100 - DNA, 19 bp, Mus musculus
  siRNA target sequence for Itgb6 (NM_021359.2,801-819).
ccctatttctgcttaccta

SEQ ID NO: 636101 - DNA, 19 bp, Mus musculus
  siRNA target sequence for Itgb6 (NM_021359.2,811-829).
gcttacctacatttggatt

SEQ ID NO: 636102 - DNA, 19 bp, Mus musculus
  siRNA target sequence for Itgb6 (NM_021359.2,833-851).
gcacattttgccattaact

SEQ ID NO: 636103 - DNA, 19 bp, Mus musculus
  siRNA target sequence for Itgb6 (NM_021359.2,836-854).
cattttgccattaactgat

SEQ ID NO: 636104 - DNA, 19 bp, Mus musculus
  siRNA target sequence for Itgb6 (NM_021359.2,858-876).
gccgagagattcaatgaaa

SEQ ID NO: 636105 - DNA, 19 bp, Mus musculus
  siRNA target sequence for Itgb6 (NM_021359.2,888-906).
cagaagatttctgctaata

SEQ ID NO: 636106 - DNA, 19 bp, Mus musculus
  siRNA target sequence for Itgb6 (NM_021359.2,985-1003).
cgctccacctcctggtttt

SEQ ID NO: 636107 - DNA, 19 bp, Mus musculus
  siRNA target sequence for Itgb6 (NM_021359.2,1007-1025).
gagtgatgccgattctcat

SEQ ID NO: 636108 - DNA, 19 bp, Mus musculus
  siRNA target sequence for Itgb6 (NM_021359.2,1009-1027).
gtgatgccgattctcattt

SEQ ID NO: 636109 - DNA, 19 bp, Mus musculus
  siRNA target sequence for Itgb6 (NM_021359.2,1014-1032).
gccgattctcattttggaa

SEQ ID NO: 636110 - DNA, 19 bp, Mus musculus
  siRNA target sequence for Itgb6 (NM_021359.2,1015-1033).
ccgattctcattttggaat

SEQ ID NO: 636111 - DNA, 19 bp, Mus musculus
  siRNA target sequence for Itgb6 (NM_021359.2,1085-1103).
ggaccacaggaatgaatat

SEQ ID NO: 636112 - DNA, 19 bp, Mus musculus
  siRNA target sequence for Itgb6 (NM_021359.2,1109-1127).
gtcaactgtcttggaatat

SEQ ID NO: 636113 - DNA, 19 bp, Mus musculus
  siRNA target sequence for Itgb6 (NM_021359.2,1129-1147).
caactatcggccaactcat

SEQ ID NO: 636114 - DNA, 19 bp, Mus musculus
  siRNA target sequence for Itgb6 (NM_021359.2,1132-1150).
ctatcggccaactcattga

SEQ ID NO: 636115 - DNA, 19 bp, Mus musculus
  siRNA target sequence for Itgb6 (NM_021359.2,1136-1154).
cggccaactcattgataaa

SEQ ID NO: 636116 - DNA, 19 bp, Mus musculus
  siRNA target sequence for Itgb6 (NM_021359.2,1200-1218).
caagtccatctgtatgaga

SEQ ID NO: 636117 - DNA, 19 bp, Mus musculus
  siRNA target sequence for Itgb6 (NM_021359.2,1211-1229).
gtatgagaactatgcaaaa

SEQ ID NO: 636118 - DNA, 19 bp, Mus musculus
  siRNA target sequence for Itgb6 (NM_021359.2,1246-1264).
ccgtgggactgcttcagaa

SEQ ID NO: 636119 - DNA, 19 bp, Mus musculus
  siRNA target sequence for Itgb6 (NM_021359.2,1251-1269).
ggactgcttcagaaggatt

SEQ ID NO: 636120 - DNA, 19 bp, Mus musculus
  siRNA target sequence for Itgb6 (NM_021359.2,1289-1307).
gatcatctccgcttatgaa

SEQ ID NO: 636121 - DNA, 19 bp, Mus musculus
  siRNA target sequence for Itgb6 (NM_021359.2,1401-1419).
ccacaccaaaagaaatgct

SEQ ID NO: 636122 - DNA, 19 bp, Mus musculus
  siRNA target sequence for Itgb6 (NM_021359.2,1520-1538).
gggggacaccctagaaata

SEQ ID NO: 636123 - DNA, 19 bp, Mus musculus
  siRNA target sequence for Itgb6 (NM_021359.2,1522-1540).
gggacaccctagaaatact

SEQ ID NO: 636124 - DNA, 19 bp, Mus musculus
  siRNA target sequence for Itgb6 (NM_021359.2,1737-1755).
ggaaggggtgactgctatt

SEQ ID NO: 636125 - DNA, 19 bp, Mus musculus
  siRNA target sequence for Itgb6 (NM_021359.2,1902-1920).
ggctggacaggtgaatact

SEQ ID NO: 636126 - DNA, 19 bp, Mus musculus
  siRNA target sequence for Itgb6 (NM_021359.2,1904-1922).
ctggacaggtgaatactgt

SEQ ID NO: 636127 - DNA, 19 bp, Mus musculus
  siRNA target sequence for Itgb6 (NM_021359.2,1906-1924).
ggacaggtgaatactgtaa

SEQ ID NO: 636128 - DNA, 19 bp, Mus musculus
  siRNA target sequence for Itgb6 (NM_021359.2,2061-2079).
ggcgacccctgtaactcta

SEQ ID NO: 636129 - DNA, 19 bp, Mus musculus
  siRNA target sequence for Itgb6 (NM_021359.2,2130-2148).
gagtgtgctgacaagtgta

SEQ ID NO: 636130 - DNA, 19 bp, Mus musculus
  siRNA target sequence for Itgb6 (NM_021359.2,2168-2186).
cagtgaggaagatttttca

SEQ ID NO: 636131 - DNA, 19 bp, Mus musculus
  siRNA target sequence for Itgb6 (NM_021359.2,2178-2196).
gatttttcaaaggatactt

SEQ ID NO: 636132 - DNA, 19 bp, Mus musculus
  siRNA target sequence for Itgb6 (NM_021359.2,2206-2224).
gctctctacaaggagaaaa

SEQ ID NO: 636133 - DNA, 19 bp, Mus musculus
  siRNA target sequence for Itgb6 (NM_021359.2,2220-2238).
gaaaatgaatgccttatta

SEQ ID NO: 636134 - DNA, 19 bp, Mus musculus
  siRNA target sequence for Itgb6 (NM_021359.2,2230-2248).
gccttattacattcctaat

SEQ ID NO: 636135 - DNA, 19 bp, Mus musculus
  siRNA target sequence for Itgb6 (NM_021359.2,2243-2261).
cctaataactacggataat

SEQ ID NO: 636136 - DNA, 19 bp, Mus musculus
  siRNA target sequence for Itgb6 (NM_021359.2,2256-2274).
gataatgaagggaaaacca

SEQ ID NO: 636137 - DNA, 19 bp, Mus musculus
  siRNA target sequence for Itgb6 (NM_021359.2,2313-2331).
ccaaacattcccatgatca

SEQ ID NO: 636138 - DNA, 19 bp, Mus musculus
  siRNA target sequence for Itgb6 (NM_021359.2,2367-2385).
gttgtgctactgtgcattt

SEQ ID NO: 636139 - DNA, 19 bp, Mus musculus
  siRNA target sequence for Itgb6 (NM_021359.2,2390-2408).
gctgctggtatcatttcat

SEQ ID NO: 636140 - DNA, 19 bp, Mus musculus
  siRNA target sequence for Itgb6 (NM_021359.2,2456-2474).
gtggcaaacgggaaccaat

SEQ ID NO: 636141 - DNA, 19 bp, Mus musculus
  siRNA target sequence for Itgb6 (NM_021359.2,2487-2505).
ggttccaccagcactttta

SEQ ID NO: 636142 - DNA, 19 bp, Mus musculus
  siRNA target sequence for Itgb7 (NM_013566.1,42-60).
ggtggattcatcaactgtt

SEQ ID NO: 636143 - DNA, 19 bp, Mus musculus
  siRNA target sequence for Itgb7 (NM_013566.1,97-115).
gagttagataccaagatta

SEQ ID NO: 636144 - DNA, 19 bp, Mus musculus
  siRNA target sequence for Itgb7 (NM_013566.1,221-239).
gtgcatggtgcaaacaact

SEQ ID NO: 636145 - DNA, 19 bp, Mus musculus
  siRNA target sequence for Itgb7 (NM_013566.1,224-242).
catggtgcaaacaactgaa

SEQ ID NO: 636146 - DNA, 19 bp, Mus musculus
  siRNA target sequence for Itgb7 (NM_013566.1,482-500).
ggtaccccgtggacctata

SEQ ID NO: 636147 - DNA, 19 bp, Mus musculus
  siRNA target sequence for Itgb7 (NM_013566.1,483-501).
gtaccccgtggacctatat

SEQ ID NO: 636148 - DNA, 19 bp, Mus musculus
  siRNA target sequence for Itgb7 (NM_013566.1,488-506).
ccgtggacctatattacct

SEQ ID NO: 636149 - DNA, 19 bp, Mus musculus
  siRNA target sequence for Itgb7 (NM_013566.1,489-507).
cgtggacctatattacctt

SEQ ID NO: 636150 - DNA, 19 bp, Mus musculus
  siRNA target sequence for Itgb7 (NM_013566.1,490-508).
gtggacctatattacctta

SEQ ID NO: 636151 - DNA, 19 bp, Mus musculus
  siRNA target sequence for Itgb7 (NM_013566.1,511-529).
gacctgagctactcaatga

SEQ ID NO: 636152 - DNA, 19 bp, Mus musculus
  siRNA target sequence for Itgb7 (NM_013566.1,580-598).
ctgcaggaggtcacacatt

SEQ ID NO: 636153 - DNA, 19 bp, Mus musculus
  siRNA target sequence for Itgb7 (NM_013566.1,595-613).
cattctgtgcgcataggtt

SEQ ID NO: 636154 - DNA, 19 bp, Mus musculus
  siRNA target sequence for Itgb7 (NM_013566.1,993-1011).
cacgaacagcgcagagttt

SEQ ID NO: 636155 - DNA, 19 bp, Mus musculus
  siRNA target sequence for Itgb7 (NM_013566.1,995-1013).
cgaacagcgcagagtttga

SEQ ID NO: 636156 - DNA, 19 bp, Mus musculus
  siRNA target sequence for Itgb7 (NM_013566.1,1043-1061).
ccctcactgcagcgaatat

SEQ ID NO: 636157 - DNA, 19 bp, Mus musculus
  siRNA target sequence for Itgb7 (NM_013566.1,1047-1065).
cactgcagcgaatatccaa

SEQ ID NO: 636158 - DNA, 19 bp, Mus musculus
  siRNA target sequence for Itgb7 (NM_013566.1,1052-1070).
cagcgaatatccaacctat

SEQ ID NO: 636159 - DNA, 19 bp, Mus musculus
  siRNA target sequence for Itgb7 (NM_013566.1,1055-1073).
cgaatatccaacctatctt

SEQ ID NO: 636160 - DNA, 19 bp, Mus musculus
  siRNA target sequence for Itgb7 (NM_013566.1,1256-1274).
cctttgaatctcactgtaa

SEQ ID NO: 636161 - DNA, 19 bp, Mus musculus
  siRNA target sequence for Itgb7 (NM_013566.1,1308-1326).
ccggggacagtgcaatgat

SEQ ID NO: 636162 - DNA, 19 bp, Mus musculus
  siRNA target sequence for Itgb7 (NM_013566.1,1519-1537).
cttcagtgcgggatatgca

SEQ ID NO: 636163 - DNA, 19 bp, Mus musculus
  siRNA target sequence for Itgb7 (NM_013566.1,2272-2290).
cggctctctgtggaaatct

SEQ ID NO: 636164 - DNA, 19 bp, Mus musculus
  siRNA target sequence for Itpr1 (NM_010585.2,337-355).
caaaatgtcgagtttccta

SEQ ID NO: 636165 - DNA, 19 bp, Mus musculus
  siRNA target sequence for Itpr1 (NM_010585.2,343-361).
gtcgagtttcctacatatt

SEQ ID NO: 636166 - DNA, 19 bp, Mus musculus
  siRNA target sequence for Itpr1 (NM_010585.2,346-364).
gagtttcctacatattgga

SEQ ID NO: 636167 - DNA, 19 bp, Mus musculus
  siRNA target sequence for Itpr1 (NM_010585.2,352-370).
cctacatattggagacatt

SEQ ID NO: 636168 - DNA, 19 bp, Mus musculus
  siRNA target sequence for Itpr1 (NM_010585.2,356-374).
catattggagacatttgtt

SEQ ID NO: 636169 - DNA, 19 bp, Mus musculus
  siRNA target sequence for Itpr1 (NM_010585.2,386-404).
gagggatctacgaatggat

SEQ ID NO: 636170 - DNA, 19 bp, Mus musculus
  siRNA target sequence for Itpr1 (NM_010585.2,388-406).
gggatctacgaatggattt

SEQ ID NO: 636171 - DNA, 19 bp, Mus musculus
  siRNA target sequence for Itpr1 (NM_010585.2,389-407).
ggatctacgaatggattta

SEQ ID NO: 636172 - DNA, 19 bp, Mus musculus
  siRNA target sequence for Itpr1 (NM_010585.2,390-408).
gatctacgaatggatttat

SEQ ID NO: 636173 - DNA, 19 bp, Mus musculus
  siRNA target sequence for Itpr1 (NM_010585.2,414-432).
ccttaggcttggttgatga

SEQ ID NO: 636174 - DNA, 19 bp, Mus musculus
  siRNA target sequence for Itpr1 (NM_010585.2,506-524).
ctatgtcctatgaatcgat

SEQ ID NO: 636175 - DNA, 19 bp, Mus musculus
  siRNA target sequence for Itpr1 (NM_010585.2,589-607).
gctgctcaacaaattgcat

SEQ ID NO: 636176 - DNA, 19 bp, Mus musculus
  siRNA target sequence for Itpr1 (NM_010585.2,661-679).
ggggaccgtcatccaatat

SEQ ID NO: 636177 - DNA, 19 bp, Mus musculus
  siRNA target sequence for Itpr1 (NM_010585.2,863-881).
ggcgacaaggtagttttga

SEQ ID NO: 636178 - DNA, 19 bp, Mus musculus
  siRNA target sequence for Itpr1 (NM_010585.2,864-882).
gcgacaaggtagttttgaa

SEQ ID NO: 636179 - DNA, 19 bp, Mus musculus
  siRNA target sequence for Itpr1 (NM_010585.2,865-883).
cgacaaggtagttttgaat

SEQ ID NO: 636180 - DNA, 19 bp, Mus musculus
  siRNA target sequence for Itpr1 (NM_010585.2,955-973).
caactccgtcaactgtaat

SEQ ID NO: 636181 - DNA, 19 bp, Mus musculus
  siRNA target sequence for Itpr1 (NM_010585.2,958-976).
ctccgtcaactgtaataca

SEQ ID NO: 636182 - DNA, 19 bp, Mus musculus
  siRNA target sequence for Itpr1 (NM_010585.2,981-999).
ggaagatagtgcttttcat

SEQ ID NO: 636183 - DNA, 19 bp, Mus musculus
  siRNA target sequence for Itpr1 (NM_010585.2,1000-1018).
gaaatggagtgataacaaa

SEQ ID NO: 636184 - DNA, 19 bp, Mus musculus
  siRNA target sequence for Itpr1 (NM_010585.2,1250-1268).
ctggctacagggcattact

SEQ ID NO: 636185 - DNA, 19 bp, Mus musculus
  siRNA target sequence for Itpr1 (NM_010585.2,1347-1365).
ctcggagtaggttgagaaa

SEQ ID NO: 636186 - DNA, 19 bp, Mus musculus
  siRNA target sequence for Itpr1 (NM_010585.2,1360-1378).
gagaaacgcgcaagaaaaa

SEQ ID NO: 636187 - DNA, 19 bp, Mus musculus
  siRNA target sequence for Itpr1 (NM_010585.2,1362-1380).
gaaacgcgcaagaaaaaat

SEQ ID NO: 636188 - DNA, 19 bp, Mus musculus
  siRNA target sequence for Itpr1 (NM_010585.2,1367-1385).
gcgcaagaaaaaatggtat

SEQ ID NO: 636189 - DNA, 19 bp, Mus musculus
  siRNA target sequence for Itpr1 (NM_010585.2,1609-1627).
ggaagcatttgccatagtt

SEQ ID NO: 636190 - DNA, 19 bp, Mus musculus
  siRNA target sequence for Itpr1 (NM_010585.2,1740-1758).
ggtctgtcacgaagctttt

SEQ ID NO: 636191 - DNA, 19 bp, Mus musculus
  siRNA target sequence for Itpr1 (NM_010585.2,1743-1761).
ctgtcacgaagcttttgga

SEQ ID NO: 636192 - DNA, 19 bp, Mus musculus
  siRNA target sequence for Itpr1 (NM_010585.2,1778-1796).
gtcacgggtggaactaact

SEQ ID NO: 636193 - DNA, 19 bp, Mus musculus
  siRNA target sequence for Itpr1 (NM_010585.2,1780-1798).
cacgggtggaactaactct

SEQ ID NO: 636194 - DNA, 19 bp, Mus musculus
  siRNA target sequence for Itpr1 (NM_010585.2,2010-2028).
gacactcacagcaagacta

SEQ ID NO: 636195 - DNA, 19 bp, Mus musculus
  siRNA target sequence for Itpr1 (NM_010585.2,2211-2229).
ccaggttcttggattacct

SEQ ID NO: 636196 - DNA, 19 bp, Mus musculus
  siRNA target sequence for Itpr1 (NM_010585.2,2232-2250).
ctgacctctgcgtatccat

SEQ ID NO: 636197 - DNA, 19 bp, Mus musculus
  siRNA target sequence for Itpr1 (NM_010585.2,2237-2255).
ctctgcgtatccatgaaca

SEQ ID NO: 636198 - DNA, 19 bp, Mus musculus
  siRNA target sequence for Itpr1 (NM_010585.2,2243-2261).
gtatccatgaacaagtcaa

SEQ ID NO: 636199 - DNA, 19 bp, Mus musculus
  siRNA target sequence for Itpr1 (NM_010585.2,2339-2357).
gttctttctcgttttgagt

SEQ ID NO: 636200 - DNA, 19 bp, Mus musculus
  siRNA target sequence for Itpr1 (NM_010585.2,2365-2383).
cgtttccactggagagaat

SEQ ID NO: 636201 - DNA, 19 bp, Mus musculus
  siRNA target sequence for Itpr1 (NM_010585.2,2595-2613).
ccgggcagctggatgttga

SEQ ID NO: 636202 - DNA, 19 bp, Mus musculus
  siRNA target sequence for Itpr1 (NM_010585.2,2596-2614).
cgggcagctggatgttgat

SEQ ID NO: 636203 - DNA, 19 bp, Mus musculus
  siRNA target sequence for Itpr1 (NM_010585.2,2598-2616).
ggcagctggatgttgatct

SEQ ID NO: 636204 - DNA, 19 bp, Mus musculus
  siRNA target sequence for Itpr1 (NM_010585.2,2653-2671).
cgacctcagggcatccttt

SEQ ID NO: 636205 - DNA, 19 bp, Mus musculus
  siRNA target sequence for Itpr1 (NM_010585.2,2654-2672).
gacctcagggcatcctttt

SEQ ID NO: 636206 - DNA, 19 bp, Mus musculus
  siRNA target sequence for Itpr1 (NM_010585.2,2761-2779).
ctctgagatcgccattgat

SEQ ID NO: 636207 - DNA, 19 bp, Mus musculus
  siRNA target sequence for Itpr1 (NM_010585.2,2848-2866).
ggaggagtacctaagagat

SEQ ID NO: 636208 - DNA, 19 bp, Mus musculus
  siRNA target sequence for Itpr1 (NM_010585.2,2880-2898).
gattccccttctctgataa

SEQ ID NO: 636209 - DNA, 19 bp, Mus musculus
  siRNA target sequence for Itpr1 (NM_010585.2,2916-2934).
cgtttgaggttgtgaactt

SEQ ID NO: 636210 - DNA, 19 bp, Mus musculus
  siRNA target sequence for Itpr1 (NM_010585.2,2953-2971).
ctttggtttctacaacttt

SEQ ID NO: 636211 - DNA, 19 bp, Mus musculus
  siRNA target sequence for Itpr1 (NM_010585.2,2975-2993).
gaccttctccgattaacca

SEQ ID NO: 636212 - DNA, 19 bp, Mus musculus
  siRNA target sequence for Itpr1 (NM_010585.2,3085-3103).
cgtgatgaggtctatccat

SEQ ID NO: 636213 - DNA, 19 bp, Mus musculus
  siRNA target sequence for Itpr1 (NM_010585.2,3233-3251).
gacaccaagttgaagatca

SEQ ID NO: 636214 - DNA, 19 bp, Mus musculus
  siRNA target sequence for Itpr1 (NM_010585.2,3301-3319).
ctgcctcctgtgtatattt

SEQ ID NO: 636215 - DNA, 19 bp, Mus musculus
  siRNA target sequence for Itpr1 (NM_010585.2,3340-3358).
caattcccagtcatcagaa

SEQ ID NO: 636216 - DNA, 19 bp, Mus musculus
  siRNA target sequence for Itpr1 (NM_010585.2,3378-3396).
gccaggaagggccaagtaa

SEQ ID NO: 636217 - DNA, 19 bp, Mus musculus
  siRNA target sequence for Itpr1 (NM_010585.2,3520-3538).
gctccacttgacaatgcat

SEQ ID NO: 636218 - DNA, 19 bp, Mus musculus
  siRNA target sequence for Itpr1 (NM_010585.2,3604-3622).
ggtccttcaggccttcaaa

SEQ ID NO: 636219 - DNA, 19 bp, Mus musculus
  siRNA target sequence for Itpr1 (NM_010585.2,3626-3644).
gttcaactgctggttacta

SEQ ID NO: 636220 - DNA, 19 bp, Mus musculus
  siRNA target sequence for Itpr1 (NM_010585.2,3645-3663).
gccaagatgtggacaacta

SEQ ID NO: 636221 - DNA, 19 bp, Mus musculus
  siRNA target sequence for Itpr1 (NM_010585.2,3760-3778).
cggagcctccggtgaaaat

SEQ ID NO: 636222 - DNA, 19 bp, Mus musculus
  siRNA target sequence for Itpr1 (NM_010585.2,3768-3786).
ccggtgaaaatgagcataa

SEQ ID NO: 636223 - DNA, 19 bp, Mus musculus
  siRNA target sequence for Itpr1 (NM_010585.2,3770-3788).
ggtgaaaatgagcataaga

SEQ ID NO: 636224 - DNA, 19 bp, Mus musculus
  siRNA target sequence for Itpr1 (NM_010585.2,3848-3866).
cgagtggtgaaagagattt

SEQ ID NO: 636225 - DNA, 19 bp, Mus musculus
  siRNA target sequence for Itpr1 (NM_010585.2,3849-3867).
gagtggtgaaagagatttt

SEQ ID NO: 636226 - DNA, 19 bp, Mus musculus
  siRNA target sequence for Itpr1 (NM_010585.2,4030-4048).
gcggctggctcatgaattt

SEQ ID NO: 636227 - DNA, 19 bp, Mus musculus
  siRNA target sequence for Itpr1 (NM_010585.2,4031-4049).
cggctggctcatgaatttt

SEQ ID NO: 636228 - DNA, 19 bp, Mus musculus
  siRNA target sequence for Itpr1 (NM_010585.2,4032-4050).
ggctggctcatgaattttt

SEQ ID NO: 636229 - DNA, 19 bp, Mus musculus
  siRNA target sequence for Itpr1 (NM_010585.2,4065-4083).
caggcaaccagcagaatca

SEQ ID NO: 636230 - DNA, 19 bp, Mus musculus
  siRNA target sequence for Itpr1 (NM_010585.2,4085-4103).
gctttgctgcataaacaca

SEQ ID NO: 636231 - DNA, 19 bp, Mus musculus
  siRNA target sequence for Itpr1 (NM_010585.2,4235-4253).
ggtcgaaacgtccagtata

SEQ ID NO: 636232 - DNA, 19 bp, Mus musculus
  siRNA target sequence for Itpr1 (NM_010585.2,4236-4254).
gtcgaaacgtccagtatat

SEQ ID NO: 636233 - DNA, 19 bp, Mus musculus
  siRNA target sequence for Itpr1 (NM_010585.2,4238-4256).
cgaaacgtccagtatatca

SEQ ID NO: 636234 - DNA, 19 bp, Mus musculus
  siRNA target sequence for Itpr1 (NM_010585.2,4239-4257).
gaaacgtccagtatatcaa

SEQ ID NO: 636235 - DNA, 19 bp, Mus musculus
  siRNA target sequence for Itpr1 (NM_010585.2,4243-4261).
cgtccagtatatcaagttt

SEQ ID NO: 636236 - DNA, 19 bp, Mus musculus
  siRNA target sequence for Itpr1 (NM_010585.2,4348-4366).
cgtcctcgtgttctacaat

SEQ ID NO: 636237 - DNA, 19 bp, Mus musculus
  siRNA target sequence for Itpr1 (NM_010585.2,4352-4370).
ctcgtgttctacaatgaca

SEQ ID NO: 636238 - DNA, 19 bp, Mus musculus
  siRNA target sequence for Itpr1 (NM_010585.2,4479-4497).
gcacagagggcaagaatgt

SEQ ID NO: 636239 - DNA, 19 bp, Mus musculus
  siRNA target sequence for Itpr1 (NM_010585.2,4569-4587).
gcatccccgaggttaagat

SEQ ID NO: 636240 - DNA, 19 bp, Mus musculus
  siRNA target sequence for Itpr1 (NM_010585.2,4579-4597).
ggttaagatcgcttacatt

SEQ ID NO: 636241 - DNA, 19 bp, Mus musculus
  siRNA target sequence for Itpr1 (NM_010585.2,4580-4598).
gttaagatcgcttacatta

SEQ ID NO: 636242 - DNA, 19 bp, Mus musculus
  siRNA target sequence for Itpr1 (NM_010585.2,4751-4769).
gagaagtacgtcactgaaa

SEQ ID NO: 636243 - DNA, 19 bp, Mus musculus
  siRNA target sequence for Itpr1 (NM_010585.2,4869-4887).
gcgtgttccgagtttacca

SEQ ID NO: 636244 - DNA, 19 bp, Mus musculus
  siRNA target sequence for Itpr1 (NM_010585.2,4897-4915).
gctgatgccgagccaaaaa

SEQ ID NO: 636245 - DNA, 19 bp, Mus musculus
  siRNA target sequence for Itpr1 (NM_010585.2,5024-5042).
cacaacattgtgcagaaaa

SEQ ID NO: 636246 - DNA, 19 bp, Mus musculus
  siRNA target sequence for Itpr1 (NM_010585.2,5109-5127).
gagactaccgaaatatcat

SEQ ID NO: 636247 - DNA, 19 bp, Mus musculus
  siRNA target sequence for Itpr1 (NM_010585.2,5248-5266).
ggatgccaggaggaaatgt

SEQ ID NO: 636248 - DNA, 19 bp, Mus musculus
  siRNA target sequence for Itpr1 (NM_010585.2,5267-5285).
gagagtggaggtttcatct

SEQ ID NO: 636249 - DNA, 19 bp, Mus musculus
  siRNA target sequence for Itpr1 (NM_010585.2,5402-5420).
caaatttccattgatgaat

SEQ ID NO: 636250 - DNA, 19 bp, Mus musculus
  siRNA target sequence for Itpr1 (NM_010585.2,5499-5517).
ggcaactggaagaccataa

SEQ ID NO: 636251 - DNA, 19 bp, Mus musculus
  siRNA target sequence for Itpr1 (NM_010585.2,5523-5541).
gtgaggcactccgacaaat

SEQ ID NO: 636252 - DNA, 19 bp, Mus musculus
  siRNA target sequence for Itpr1 (NM_010585.2,5525-5543).
gaggcactccgacaaattt

SEQ ID NO: 636253 - DNA, 19 bp, Mus musculus
  siRNA target sequence for Itpr1 (NM_010585.2,5529-5547).
cactccgacaaattttggt

SEQ ID NO: 636254 - DNA, 19 bp, Mus musculus
  siRNA target sequence for Itpr1 (NM_010585.2,5546-5564).
gtcaaccgttactatggaa

SEQ ID NO: 636255 - DNA, 19 bp, Mus musculus
  siRNA target sequence for Itpr1 (NM_010585.2,5743-5761).
cctggtcatcgatctcata

SEQ ID NO: 636256 - DNA, 19 bp, Mus musculus
  siRNA target sequence for Itpr1 (NM_010585.2,5747-5765).
gtcatcgatctcataatga

SEQ ID NO: 636257 - DNA, 19 bp, Mus musculus
  siRNA target sequence for Itpr1 (NM_010585.2,5749-5767).
catcgatctcataatgaat

SEQ ID NO: 636258 - DNA, 19 bp, Mus musculus
  siRNA target sequence for Itpr1 (NM_010585.2,5753-5771).
gatctcataatgaatgcat

SEQ ID NO: 636259 - DNA, 19 bp, Mus musculus
  siRNA target sequence for Itpr1 (NM_010585.2,5772-5790).
ccagtgaccgagtattcca

SEQ ID NO: 636260 - DNA, 19 bp, Mus musculus
  siRNA target sequence for Itpr1 (NM_010585.2,5773-5791).
cagtgaccgagtattccat

SEQ ID NO: 636261 - DNA, 19 bp, Mus musculus
  siRNA target sequence for Itpr1 (NM_010585.2,5777-5795).
gaccgagtattccatgaaa

SEQ ID NO: 636262 - DNA, 19 bp, Mus musculus
  siRNA target sequence for Itpr1 (NM_010585.2,5861-5879).
cggctgacagaagataaga

SEQ ID NO: 636263 - DNA, 19 bp, Mus musculus
  siRNA target sequence for Itpr1 (NM_010585.2,5921-5939).
gtggcccagcaggaaatca

SEQ ID NO: 636264 - DNA, 19 bp, Mus musculus
  siRNA target sequence for Itpr1 (NM_010585.2,6034-6052).
gcccacaacacagataaca

SEQ ID NO: 636265 - DNA, 19 bp, Mus musculus
  siRNA target sequence for Itpr1 (NM_010585.2,6126-6144).
ccgaccctgatgaccatta

SEQ ID NO: 636266 - DNA, 19 bp, Mus musculus
  siRNA target sequence for Itpr1 (NM_010585.2,6286-6304).
ccttcgttgccaaaataat

SEQ ID NO: 636267 - DNA, 19 bp, Mus musculus
  siRNA target sequence for Itpr1 (NM_010585.2,6287-6305).
cttcgttgccaaaataata

SEQ ID NO: 636268 - DNA, 19 bp, Mus musculus
  siRNA target sequence for Itpr1 (NM_010585.2,6383-6401).
cttcttggactgtacataa

SEQ ID NO: 636269 - DNA, 19 bp, Mus musculus
  siRNA target sequence for Itpr1 (NM_010585.2,6413-6431).
gtagcacttatcaaccaaa

SEQ ID NO: 636270 - DNA, 19 bp, Mus musculus
  siRNA target sequence for Itpr1 (NM_010585.2,6500-6518).
gagtccaatggcatcgata

SEQ ID NO: 636271 - DNA, 19 bp, Mus musculus
  siRNA target sequence for Itpr1 (NM_010585.2,6567-6585).
ggatggacctggtgttaga

SEQ ID NO: 636272 - DNA, 19 bp, Mus musculus
  siRNA target sequence for Itpr1 (NM_010585.2,6584-6602).
gaactgaagaacaatgctt

SEQ ID NO: 636273 - DNA, 19 bp, Mus musculus
  siRNA target sequence for Itpr1 (NM_010585.2,6611-6629).
ctactggccatcatggaaa

SEQ ID NO: 636274 - DNA, 19 bp, Mus musculus
  siRNA target sequence for Itpr1 (NM_010585.2,6715-6733).
gcaaggtgaagtggaattt

SEQ ID NO: 636275 - DNA, 19 bp, Mus musculus
  siRNA target sequence for Itpr1 (NM_010585.2,6774-6792).
ggaacgtgggccacaacat

SEQ ID NO: 636276 - DNA, 19 bp, Mus musculus
  siRNA target sequence for Itpr1 (NM_010585.2,6809-6827).
cagttggctcggcataaca

SEQ ID NO: 636277 - DNA, 19 bp, Mus musculus
  siRNA target sequence for Itpr1 (NM_010585.2,6811-6829).
gttggctcggcataacaaa

SEQ ID NO: 636278 - DNA, 19 bp, Mus musculus
  siRNA target sequence for Itpr1 (NM_010585.2,6816-6834).
ctcggcataacaaagaact

SEQ ID NO: 636279 - DNA, 19 bp, Mus musculus
  siRNA target sequence for Itpr1 (NM_010585.2,6819-6837).
ggcataacaaagaacttca

SEQ ID NO: 636280 - DNA, 19 bp, Mus musculus
  siRNA target sequence for Itpr1 (NM_010585.2,6820-6838).
gcataacaaagaacttcaa

SEQ ID NO: 636281 - DNA, 19 bp, Mus musculus
  siRNA target sequence for Itpr1 (NM_010585.2,6903-6921).
cagcacaaattgagattgt

SEQ ID NO: 636282 - DNA, 19 bp, Mus musculus
  siRNA target sequence for Itpr1 (NM_010585.2,6905-6923).
gcacaaattgagattgtca

SEQ ID NO: 636283 - DNA, 19 bp, Mus musculus
  siRNA target sequence for Itpr1 (NM_010585.2,6979-6997).
cctgactaaggaatcgaaa

SEQ ID NO: 636284 - DNA, 19 bp, Mus musculus
  siRNA target sequence for Itpr1 (NM_010585.2,6982-7000).
gactaaggaatcgaaactt

SEQ ID NO: 636285 - DNA, 19 bp, Mus musculus
  siRNA target sequence for Itpr1 (NM_010585.2,6988-7006).
ggaatcgaaacttcgaata

SEQ ID NO: 636286 - DNA, 19 bp, Mus musculus
  siRNA target sequence for Itpr1 (NM_010585.2,6989-7007).
gaatcgaaacttcgaatat

SEQ ID NO: 636287 - DNA, 19 bp, Mus musculus
  siRNA target sequence for Itpr1 (NM_010585.2,6993-7011).
cgaaacttcgaatatatta

SEQ ID NO: 636288 - DNA, 19 bp, Mus musculus
  siRNA target sequence for Itpr1 (NM_010585.2,7028-7046).
gagcaaggtagcaagatca

SEQ ID NO: 636289 - DNA, 19 bp, Mus musculus
  siRNA target sequence for Itpr1 (NM_010585.2,7030-7048).
gcaaggtagcaagatcaat

SEQ ID NO: 636290 - DNA, 19 bp, Mus musculus
  siRNA target sequence for Itpr1 (NM_010585.2,7034-7052).
ggtagcaagatcaatgact

SEQ ID NO: 636291 - DNA, 19 bp, Mus musculus
  siRNA target sequence for Itpr1 (NM_010585.2,7035-7053).
gtagcaagatcaatgactt

SEQ ID NO: 636292 - DNA, 19 bp, Mus musculus
  siRNA target sequence for Itpr1 (NM_010585.2,7038-7056).
gcaagatcaatgacttctt

SEQ ID NO: 636293 - DNA, 19 bp, Mus musculus
  siRNA target sequence for Itpr1 (NM_010585.2,7061-7079).
cgctccgaggacctcttta

SEQ ID NO: 636294 - DNA, 19 bp, Mus musculus
  siRNA target sequence for Itpr1 (NM_010585.2,7062-7080).
gctccgaggacctctttaa

SEQ ID NO: 636295 - DNA, 19 bp, Mus musculus
  siRNA target sequence for Itpr1 (NM_010585.2,7065-7083).
ccgaggacctctttaacga

SEQ ID NO: 636296 - DNA, 19 bp, Mus musculus
  siRNA target sequence for Itpr1 (NM_010585.2,7073-7091).
ctctttaacgagatgaact

SEQ ID NO: 636297 - DNA, 19 bp, Mus musculus
  siRNA target sequence for Itpr1 (NM_010585.2,7131-7149).
gtgcccgaaacatgtcttt

SEQ ID NO: 636298 - DNA, 19 bp, Mus musculus
  siRNA target sequence for Itpr1 (NM_010585.2,7190-7208).
ctgctggtggcgtttttct

SEQ ID NO: 636299 - DNA, 19 bp, Mus musculus
  siRNA target sequence for Itpr1 (NM_010585.2,7198-7216).
ggcgtttttctatccattt

SEQ ID NO: 636300 - DNA, 19 bp, Mus musculus
  siRNA target sequence for Itpr1 (NM_010585.2,7199-7217).
gcgtttttctatccattta

SEQ ID NO: 636301 - DNA, 19 bp, Mus musculus
  siRNA target sequence for Itpr1 (NM_010585.2,7200-7218).
cgtttttctatccatttaa

SEQ ID NO: 636302 - DNA, 19 bp, Mus musculus
  siRNA target sequence for Itpr1 (NM_010585.2,7327-7345).
ggccttaattgcttctaca

SEQ ID NO: 636303 - DNA, 19 bp, Mus musculus
  siRNA target sequence for Itpr1 (NM_010585.2,7400-7418).
gctttcaatgtctgcaata

SEQ ID NO: 636304 - DNA, 19 bp, Mus musculus
  siRNA target sequence for Itpr1 (NM_010585.2,7493-7511).
gtggagttcctctatcatt

SEQ ID NO: 636305 - DNA, 19 bp, Mus musculus
  siRNA target sequence for Itpr1 (NM_010585.2,7504-7522).
ctatcatttgctgtatcta

SEQ ID NO: 636306 - DNA, 19 bp, Mus musculus
  siRNA target sequence for Itpr1 (NM_010585.2,7539-7557).
gcctcttcgtacatgagtt

SEQ ID NO: 636307 - DNA, 19 bp, Mus musculus
  siRNA target sequence for Itpr1 (NM_010585.2,7593-7611).
gagaggagactttgcttaa

SEQ ID NO: 636308 - DNA, 19 bp, Mus musculus
  siRNA target sequence for Itpr1 (NM_010585.2,7637-7655).
ggacggtccatcatcttga

SEQ ID NO: 636309 - DNA, 19 bp, Mus musculus
  siRNA target sequence for Itpr1 (NM_010585.2,7668-7686).
ctctgatcctggtttacct

SEQ ID NO: 636310 - DNA, 19 bp, Mus musculus
  siRNA target sequence for Itpr1 (NM_010585.2,7739-7757).
gataggttgcccaatgaaa

SEQ ID NO: 636311 - DNA, 19 bp, Mus musculus
  siRNA target sequence for Itpr1 (NM_010585.2,7767-7785).
cagaaactggcgagagttt

SEQ ID NO: 636312 - DNA, 19 bp, Mus musculus
  siRNA target sequence for Itpr1 (NM_010585.2,7782-7800).
gtttggccaacgatttcct

SEQ ID NO: 636313 - DNA, 19 bp, Mus musculus
  siRNA target sequence for Itpr1 (NM_010585.2,7996-8014).
caaagaggagcctctgttt

SEQ ID NO: 636314 - DNA, 19 bp, Mus musculus
  siRNA target sequence for Itpr1 (NM_010585.2,8541-8559).
ctcctcacatgaatgtcaa

SEQ ID NO: 636315 - DNA, 19 bp, Mus musculus
  siRNA target sequence for Itpr3 (NM_080553.1,93-111).
gcagcatgccgctcatcta

SEQ ID NO: 636316 - DNA, 19 bp, Mus musculus
  siRNA target sequence for Itpr3 (NM_080553.1,161-179).
gctgtgttcatcaatatca

SEQ ID NO: 636317 - DNA, 19 bp, Mus musculus
  siRNA target sequence for Itpr3 (NM_080553.1,237-255).
cgctcatctcgctactctt

SEQ ID NO: 636318 - DNA, 19 bp, Mus musculus
  siRNA target sequence for Itpr3 (NM_080553.1,444-462).
ccttcatccgaggctataa

SEQ ID NO: 636319 - DNA, 19 bp, Mus musculus
  siRNA target sequence for Itpr3 (NM_080553.1,533-551).
gcccatgagctcttctaca

SEQ ID NO: 636320 - DNA, 19 bp, Mus musculus
  siRNA target sequence for Itpr3 (NM_080553.1,588-606).
cgctgtttaatgtcatcaa

SEQ ID NO: 636321 - DNA, 19 bp, Mus musculus
  siRNA target sequence for Itpr3 (NM_080553.1,798-816).
catgtagtggggacaagat

SEQ ID NO: 636322 - DNA, 19 bp, Mus musculus
  siRNA target sequence for Itpr3 (NM_080553.1,887-905).
gcctgtgacactctactta

SEQ ID NO: 636323 - DNA, 19 bp, Mus musculus
  siRNA target sequence for Itpr3 (NM_080553.1,893-911).
gacactctacttatgtgta

SEQ ID NO: 636324 - DNA, 19 bp, Mus musculus
  siRNA target sequence for Itpr3 (NM_080553.1,909-927).
gtatcgtgaccgtcatgaa

SEQ ID NO: 636325 - DNA, 19 bp, Mus musculus
  siRNA target sequence for Itpr3 (NM_080553.1,967-985).
ccgcaagccctccaaagat

SEQ ID NO: 636326 - DNA, 19 bp, Mus musculus
  siRNA target sequence for Itpr3 (NM_080553.1,1048-1066).
cgtgttgaacctcatcttt

SEQ ID NO: 636327 - DNA, 19 bp, Mus musculus
  siRNA target sequence for Itpr3 (NM_080553.1,1228-1246).
ctacctgtacttcattgta

SEQ ID NO: 636328 - DNA, 19 bp, Mus musculus
  siRNA target sequence for Itpr3 (NM_080553.1,1247-1265).
ctggtccgagtcaagaaca

SEQ ID NO: 636329 - DNA, 19 bp, Mus musculus
  siRNA target sequence for Itpr3 (NM_080553.1,1250-1268).
gtccgagtcaagaacaaga

SEQ ID NO: 636330 - DNA, 19 bp, Mus musculus
  siRNA target sequence for Kdelr1 (NM_133950.1,203-221).
cccacctcctagctatcat

SEQ ID NO: 636331 - DNA, 19 bp, Mus musculus
  siRNA target sequence for Kdelr1 (NM_133950.1,208-226).
ctcctagctatcatcttgt

SEQ ID NO: 636332 - DNA, 19 bp, Mus musculus
  siRNA target sequence for Kdelr1 (NM_133950.1,322-340).
ctgttcaccaactacattt

SEQ ID NO: 636333 - DNA, 19 bp, Mus musculus
  siRNA target sequence for Kdelr1 (NM_133950.1,356-374).
gcatgaaggtggtctacat

SEQ ID NO: 636334 - DNA, 19 bp, Mus musculus
  siRNA target sequence for Kdelr1 (NM_133950.1,357-375).
catgaaggtggtctacata

SEQ ID NO: 636335 - DNA, 19 bp, Mus musculus
  siRNA target sequence for Kdelr1 (NM_133950.1,389-407).
ccacggtgtggatgatcta

SEQ ID NO: 636336 - DNA, 19 bp, Mus musculus
  siRNA target sequence for Kdelr1 (NM_133950.1,414-432).
gttcaaagctacttatgat

SEQ ID NO: 636337 - DNA, 19 bp, Mus musculus
  siRNA target sequence for Kdelr2 (NM_025841.1,274-292).
ctcgctacctggacctttt

SEQ ID NO: 636338 - DNA, 19 bp, Mus musculus
  siRNA target sequence for Kdelr2 (NM_025841.1,278-296).
ctacctggaccttttcact

SEQ ID NO: 636339 - DNA, 19 bp, Mus musculus
  siRNA target sequence for Kdelr2 (NM_025841.1,319-337).
cgtctatgaagcttatcta

SEQ ID NO: 636340 - DNA, 19 bp, Mus musculus
  siRNA target sequence for Kdelr2 (NM_025841.1,322-340).
ctatgaagcttatctacat

SEQ ID NO: 636341 - DNA, 19 bp, Mus musculus
  siRNA target sequence for Kdelr2 (NM_025841.1,355-373).
ccacggtgtacctgatcta

SEQ ID NO: 636342 - DNA, 19 bp, Mus musculus
  siRNA target sequence for Kdelr2 (NM_025841.1,386-404).
ggccacctatgatggaaat

SEQ ID NO: 636343 - DNA, 19 bp, Mus musculus
  siRNA target sequence for Kdelr2 (NM_025841.1,480-498).
cctcttgagatcttatgga

SEQ ID NO: 636344 - DNA, 19 bp, Mus musculus
  siRNA target sequence for Kdelr2 (NM_025841.1,690-708).
gtcgtccagaccattctct

SEQ ID NO: 636345 - DNA, 19 bp, Mus musculus
  siRNA target sequence for Kdelr2 (NM_025841.1,722-740).
ctacttgtacattacaaaa

SEQ ID NO: 636346 - DNA, 19 bp, Mus musculus
  siRNA target sequence for Kdelr3 (NM_134090.1,230-248).
gacctcttctcgaacttca

SEQ ID NO: 636347 - DNA, 19 bp, Mus musculus
  siRNA target sequence for Kdelr3 (NM_134090.1,299-317).
gtcacagtgtacatgatct

SEQ ID NO: 636348 - DNA, 19 bp, Mus musculus
  siRNA target sequence for Kdelr3 (NM_134090.1,301-319).
cacagtgtacatgatctat

SEQ ID NO: 636349 - DNA, 19 bp, Mus musculus
  siRNA target sequence for Kdelr3 (NM_134090.1,321-339).
ggaagttccggaaaacgtt

SEQ ID NO: 636350 - DNA, 19 bp, Mus musculus
  siRNA target sequence for Kdelr3 (NM_134090.1,322-340).
gaagttccggaaaacgttt

SEQ ID NO: 636351 - DNA, 19 bp, Mus musculus
  siRNA target sequence for Kdelr3 (NM_134090.1,328-346).
ccggaaaacgtttgacatt

SEQ ID NO: 636352 - DNA, 19 bp, Mus musculus
  siRNA target sequence for Kdelr3 (NM_134090.1,336-354).
cgtttgacattgaaaatga

SEQ ID NO: 636353 - DNA, 19 bp, Mus musculus
  siRNA target sequence for Kdelr3 (NM_134090.1,385-403).
cgtgactggcctttccttt

SEQ ID NO: 636354 - DNA, 19 bp, Mus musculus
  siRNA target sequence for Kdelr3 (NM_134090.1,638-656).
gttcaaaccatcttttact

SEQ ID NO: 636355 - DNA, 19 bp, Mus musculus
  siRNA target sequence for Kir3dl1 (NM_177749.2,997-1015).
gataccaaaacaaataact

SEQ ID NO: 636356 - DNA, 19 bp, Mus musculus
  siRNA target sequence for Lrp5 (NM_008513.1,355-373).
gagcgaggaggccatcaaa

SEQ ID NO: 636357 - DNA, 19 bp, Mus musculus
  siRNA target sequence for Lrp5 (NM_008513.1,399-417).
ctgctgcacagaacattgt

SEQ ID NO: 636358 - DNA, 19 bp, Mus musculus
  siRNA target sequence for Lrp5 (NM_008513.1,401-419).
gctgcacagaacattgtca

SEQ ID NO: 636359 - DNA, 19 bp, Mus musculus
  siRNA target sequence for Lrp5 (NM_008513.1,528-546).
cgtcccgtaaggttctctt

SEQ ID NO: 636360 - DNA, 19 bp, Mus musculus
  siRNA target sequence for Lrp5 (NM_008513.1,656-674).
ggcagtacccggaagatca

SEQ ID NO: 636361 - DNA, 19 bp, Mus musculus
  siRNA target sequence for Lrp5 (NM_008513.1,663-681).
cccggaagatcattgtaga

SEQ ID NO: 636362 - DNA, 19 bp, Mus musculus
  siRNA target sequence for Lrp5 (NM_008513.1,677-695).
gtagactccgacatttact

SEQ ID NO: 636363 - DNA, 19 bp, Mus musculus
  siRNA target sequence for Lrp5 (NM_008513.1,1049-1067).
ccgagggagcctttctact

SEQ ID NO: 636364 - DNA, 19 bp, Mus musculus
  siRNA target sequence for Lrp5 (NM_008513.1,1458-1476).
gaaagatcctggtatctga

SEQ ID NO: 636365 - DNA, 19 bp, Mus musculus
  siRNA target sequence for Lrp5 (NM_008513.1,1487-1505).
gaaccgcgagccattgtgt

SEQ ID NO: 636366 - DNA, 19 bp, Mus musculus
  siRNA target sequence for Lrp5 (NM_008513.1,1512-1530).
ctgtgatgggcctcatgta

SEQ ID NO: 636367 - DNA, 19 bp, Mus musculus
  siRNA target sequence for Lrp5 (NM_008513.1,1514-1532).
gtgatgggcctcatgtact

SEQ ID NO: 636368 - DNA, 19 bp, Mus musculus
  siRNA target sequence for Lrp5 (NM_008513.1,1666-1684).
gggggatgccaaaactgat

SEQ ID NO: 636369 - DNA, 19 bp, Mus musculus
  siRNA target sequence for Lrp5 (NM_008513.1,1667-1685).
ggggatgccaaaactgata

SEQ ID NO: 636370 - DNA, 19 bp, Mus musculus
  siRNA target sequence for Lrp5 (NM_008513.1,1668-1686).
gggatgccaaaactgataa

SEQ ID NO: 636371 - DNA, 19 bp, Mus musculus
  siRNA target sequence for Lrp5 (NM_008513.1,1669-1687).
ggatgccaaaactgataaa

SEQ ID NO: 636372 - DNA, 19 bp, Mus musculus
  siRNA target sequence for Lrp5 (NM_008513.1,1795-1813).
ctggcagagacgcagtatt

SEQ ID NO: 636373 - DNA, 19 bp, Mus musculus
  siRNA target sequence for Lrp5 (NM_008513.1,1798-1816).
gcagagacgcagtattgaa

SEQ ID NO: 636374 - DNA, 19 bp, Mus musculus
  siRNA target sequence for Lrp5 (NM_008513.1,1837-1855).
cagccgggatgtcatcatt

SEQ ID NO: 636375 - DNA, 19 bp, Mus musculus
  siRNA target sequence for Lrp5 (NM_008513.1,1839-1857).
gccgggatgtcatcattga

SEQ ID NO: 636376 - DNA, 19 bp, Mus musculus
  siRNA target sequence for Lrp5 (NM_008513.1,1840-1858).
ccgggatgtcatcattgat

SEQ ID NO: 636377 - DNA, 19 bp, Mus musculus
  siRNA target sequence for Lrp5 (NM_008513.1,2037-2055).
ccgaggccttcctggtatt

SEQ ID NO: 636378 - DNA, 19 bp, Mus musculus
  siRNA target sequence for Lrp5 (NM_008513.1,2079-2097).
ggatctccctggagactaa

SEQ ID NO: 636379 - DNA, 19 bp, Mus musculus
  siRNA target sequence for Lrp5 (NM_008513.1,2407-2425).
ggctctggatcctactaaa

SEQ ID NO: 636380 - DNA, 19 bp, Mus musculus
  siRNA target sequence for Lrp5 (NM_008513.1,2417-2435).
cctactaaaggctacatct

SEQ ID NO: 636381 - DNA, 19 bp, Mus musculus
  siRNA target sequence for Lrp5 (NM_008513.1,2418-2436).
ctactaaaggctacatcta

SEQ ID NO: 636382 - DNA, 19 bp, Mus musculus
  siRNA target sequence for Lrp5 (NM_008513.1,2479-2497).
catggatgggaccaattgt

SEQ ID NO: 636383 - DNA, 19 bp, Mus musculus
  siRNA target sequence for Lrp5 (NM_008513.1,2483-2501).
gatgggaccaattgtatga

SEQ ID NO: 636384 - DNA, 19 bp, Mus musculus
  siRNA target sequence for Lrp5 (NM_008513.1,2527-2545).
caacgacctcaccattgat

SEQ ID NO: 636385 - DNA, 19 bp, Mus musculus
  siRNA target sequence for Lrp5 (NM_008513.1,2530-2548).
cgacctcaccattgattat

SEQ ID NO: 636386 - DNA, 19 bp, Mus musculus
  siRNA target sequence for Lrp5 (NM_008513.1,2651-2669).
ccgtttggcctgactcaat

SEQ ID NO: 636387 - DNA, 19 bp, Mus musculus
  siRNA target sequence for Lrp5 (NM_008513.1,2652-2670).
cgtttggcctgactcaata

SEQ ID NO: 636388 - DNA, 19 bp, Mus musculus
  siRNA target sequence for Lrp5 (NM_008513.1,2664-2682).
ctcaatatagcgattacat

SEQ ID NO: 636389 - DNA, 19 bp, Mus musculus
  siRNA target sequence for Lrp5 (NM_008513.1,2666-2684).
caatatagcgattacatct

SEQ ID NO: 636390 - DNA, 19 bp, Mus musculus
  siRNA target sequence for Lrp5 (NM_008513.1,3043-3061).
cgtcaaagccatcaactat

SEQ ID NO: 636391 - DNA, 19 bp, Mus musculus
  siRNA target sequence for Lrp5 (NM_008513.1,3335-3353).
gctgagcgagggtacatgt

SEQ ID NO: 636392 - DNA, 19 bp, Mus musculus
  siRNA target sequence for Lrp5 (NM_008513.1,3338-3356).
gagcgagggtacatgtact

SEQ ID NO: 636393 - DNA, 19 bp, Mus musculus
  siRNA target sequence for Lrp5 (NM_008513.1,3340-3358).
gcgagggtacatgtacttt

SEQ ID NO: 636394 - DNA, 19 bp, Mus musculus
  siRNA target sequence for Lrp5 (NM_008513.1,3502-3520).
cgacctaaagcgaatcgaa

SEQ ID NO: 636395 - DNA, 19 bp, Mus musculus
  siRNA target sequence for Lrp5 (NM_008513.1,3503-3521).
gacctaaagcgaatcgaaa

SEQ ID NO: 636396 - DNA, 19 bp, Mus musculus
  siRNA target sequence for Lrp5 (NM_008513.1,3882-3900).
cctgctcccctgatcagtt

SEQ ID NO: 636397 - DNA, 19 bp, Mus musculus
  siRNA target sequence for Lrp5 (NM_008513.1,4371-4389).
cctttccccacgagtatgt

SEQ ID NO: 636398 - DNA, 19 bp, Mus musculus
  siRNA target sequence for Lrp5 (NM_008513.1,4642-4660).
caacgtggacgtgttttat

SEQ ID NO: 636399 - DNA, 19 bp, Mus musculus
  siRNA target sequence for Lrp5 (NM_008513.1,4648-4666).
ggacgtgttttattcttca

SEQ ID NO: 636400 - DNA, 19 bp, Mus musculus
  siRNA target sequence for Lrp6 (NM_008514.1,180-198).
gattggttgatgctacaaa

SEQ ID NO: 636401 - DNA, 19 bp, Mus musculus
  siRNA target sequence for Lrp6 (NM_008514.1,202-220).
caaagagaatgcaacgatt

SEQ ID NO: 636402 - DNA, 19 bp, Mus musculus
  siRNA target sequence for Lrp6 (NM_008514.1,246-264).
ctgcggtggactttgtgtt

SEQ ID NO: 636403 - DNA, 19 bp, Mus musculus
  siRNA target sequence for Lrp6 (NM_008514.1,262-280).
gtttggtcatggcttgata

SEQ ID NO: 636404 - DNA, 19 bp, Mus musculus
  siRNA target sequence for Lrp6 (NM_008514.1,298-316).
cgaagaagccattaaacga

SEQ ID NO: 636405 - DNA, 19 bp, Mus musculus
  siRNA target sequence for Lrp6 (NM_008514.1,305-323).
gccattaaacgaacagaat

SEQ ID NO: 636406 - DNA, 19 bp, Mus musculus
  siRNA target sequence for Lrp6 (NM_008514.1,314-332).
cgaacagaatttaacaaaa

SEQ ID NO: 636407 - DNA, 19 bp, Mus musculus
  siRNA target sequence for Lrp6 (NM_008514.1,376-394).
ggatgggctggcatgtgat

SEQ ID NO: 636408 - DNA, 19 bp, Mus musculus
  siRNA target sequence for Lrp6 (NM_008514.1,377-395).
gatgggctggcatgtgatt

SEQ ID NO: 636409 - DNA, 19 bp, Mus musculus
  siRNA target sequence for Lrp6 (NM_008514.1,422-440).
gattctgaaactaatcgta

SEQ ID NO: 636410 - DNA, 19 bp, Mus musculus
  siRNA target sequence for Lrp6 (NM_008514.1,426-444).
ctgaaactaatcgtattga

SEQ ID NO: 636411 - DNA, 19 bp, Mus musculus
  siRNA target sequence for Lrp6 (NM_008514.1,437-455).
cgtattgaagtttctaatt

SEQ ID NO: 636412 - DNA, 19 bp, Mus musculus
  siRNA target sequence for Lrp6 (NM_008514.1,496-514).
ggatcaacccagagctatt

SEQ ID NO: 636413 - DNA, 19 bp, Mus musculus
  siRNA target sequence for Lrp6 (NM_008514.1,524-542).
ccatcaagtgggttcatgt

SEQ ID NO: 636414 - DNA, 19 bp, Mus musculus
  siRNA target sequence for Lrp6 (NM_008514.1,593-611).
ggctcaagtcgcttcgtta

SEQ ID NO: 636415 - DNA, 19 bp, Mus musculus
  siRNA target sequence for Lrp6 (NM_008514.1,594-612).
gctcaagtcgcttcgttat

SEQ ID NO: 636416 - DNA, 19 bp, Mus musculus
  siRNA target sequence for Lrp6 (NM_008514.1,595-613).
ctcaagtcgcttcgttata

SEQ ID NO: 636417 - DNA, 19 bp, Mus musculus
  siRNA target sequence for Lrp6 (NM_008514.1,597-615).
caagtcgcttcgttataat

SEQ ID NO: 636418 - DNA, 19 bp, Mus musculus
  siRNA target sequence for Lrp6 (NM_008514.1,600-618).
gtcgcttcgttataataaa

SEQ ID NO: 636419 - DNA, 19 bp, Mus musculus
  siRNA target sequence for Lrp6 (NM_008514.1,676-694).
ctgggccgatgcaaaactt

SEQ ID NO: 636420 - DNA, 19 bp, Mus musculus
  siRNA target sequence for Lrp6 (NM_008514.1,678-696).
gggccgatgcaaaacttaa

SEQ ID NO: 636421 - DNA, 19 bp, Mus musculus
  siRNA target sequence for Lrp6 (NM_008514.1,679-697).
ggccgatgcaaaacttaat

SEQ ID NO: 636422 - DNA, 19 bp, Mus musculus
  siRNA target sequence for Lrp6 (NM_008514.1,680-698).
gccgatgcaaaacttaatt

SEQ ID NO: 636423 - DNA, 19 bp, Mus musculus
  siRNA target sequence for Lrp6 (NM_008514.1,681-699).
ccgatgcaaaacttaattt

SEQ ID NO: 636424 - DNA, 19 bp, Mus musculus
  siRNA target sequence for Lrp6 (NM_008514.1,730-748).
ccggcaggcagtggttaaa

SEQ ID NO: 636425 - DNA, 19 bp, Mus musculus
  siRNA target sequence for Lrp6 (NM_008514.1,764-782).
ccttttgccttgacgttat

SEQ ID NO: 636426 - DNA, 19 bp, Mus musculus
  siRNA target sequence for Lrp6 (NM_008514.1,765-783).
cttttgccttgacgttatt

SEQ ID NO: 636427 - DNA, 19 bp, Mus musculus
  siRNA target sequence for Lrp6 (NM_008514.1,808-826).
ctggaatacacactctatt

SEQ ID NO: 636428 - DNA, 19 bp, Mus musculus
  siRNA target sequence for Lrp6 (NM_008514.1,829-847).
ggcttgcaacaaatatact

SEQ ID NO: 636429 - DNA, 19 bp, Mus musculus
  siRNA target sequence for Lrp6 (NM_008514.1,849-867).
gcgagggtctgcgtgaaat

SEQ ID NO: 636430 - DNA, 19 bp, Mus musculus
  siRNA target sequence for Lrp6 (NM_008514.1,850-868).
cgagggtctgcgtgaaatt

SEQ ID NO: 636431 - DNA, 19 bp, Mus musculus
  siRNA target sequence for Lrp6 (NM_008514.1,853-871).
gggtctgcgtgaaattcat

SEQ ID NO: 636432 - DNA, 19 bp, Mus musculus
  siRNA target sequence for Lrp6 (NM_008514.1,857-875).
ctgcgtgaaattcattcta

SEQ ID NO: 636433 - DNA, 19 bp, Mus musculus
  siRNA target sequence for Lrp6 (NM_008514.1,860-878).
cgtgaaattcattctaaca

SEQ ID NO: 636434 - DNA, 19 bp, Mus musculus
  siRNA target sequence for Lrp6 (NM_008514.1,914-932).
cagaggcagccaaatgcta

SEQ ID NO: 636435 - DNA, 19 bp, Mus musculus
  siRNA target sequence for Lrp6 (NM_008514.1,933-951).
caaatccatgtggaattga

SEQ ID NO: 636436 - DNA, 19 bp, Mus musculus
  siRNA target sequence for Lrp6 (NM_008514.1,956-974).
ggtggttgttcccatttgt

SEQ ID NO: 636437 - DNA, 19 bp, Mus musculus
  siRNA target sequence for Lrp6 (NM_008514.1,959-977).
ggttgttcccatttgtgtt

SEQ ID NO: 636438 - DNA, 19 bp, Mus musculus
  siRNA target sequence for Lrp6 (NM_008514.1,984-1002).
ctccagtcaagccttttta

SEQ ID NO: 636439 - DNA, 19 bp, Mus musculus
  siRNA target sequence for Lrp6 (NM_008514.1,989-1007).
gtcaagcctttttatcagt

SEQ ID NO: 636440 - DNA, 19 bp, Mus musculus
  siRNA target sequence for Lrp6 (NM_008514.1,1097-1115).
gacttgaggcgaatttctt

SEQ ID NO: 636441 - DNA, 19 bp, Mus musculus
  siRNA target sequence for Lrp6 (NM_008514.1,1102-1120).
gaggcgaatttctttggat

SEQ ID NO: 636442 - DNA, 19 bp, Mus musculus
  siRNA target sequence for Lrp6 (NM_008514.1,1117-1135).
ggatacacccgattttact

SEQ ID NO: 636443 - DNA, 19 bp, Mus musculus
  siRNA target sequence for Lrp6 (NM_008514.1,1237-1255).
ccgtcgctccttcatagat

SEQ ID NO: 636444 - DNA, 19 bp, Mus musculus
  siRNA target sequence for Lrp6 (NM_008514.1,1348-1366).
cactggcacggatcgtata

SEQ ID NO: 636445 - DNA, 19 bp, Mus musculus
  siRNA target sequence for Lrp6 (NM_008514.1,1350-1368).
ctggcacggatcgtataga

SEQ ID NO: 636446 - DNA, 19 bp, Mus musculus
  siRNA target sequence for Lrp6 (NM_008514.1,1353-1371).
gcacggatcgtatagaagt

SEQ ID NO: 636447 - DNA, 19 bp, Mus musculus
  siRNA target sequence for Lrp6 (NM_008514.1,1395-1413).
ggaagatcttgatttcaga

SEQ ID NO: 636448 - DNA, 19 bp, Mus musculus
  siRNA target sequence for Lrp6 (NM_008514.1,1482-1500).
gagaaatcccaaaaataga

SEQ ID NO: 636449 - DNA, 19 bp, Mus musculus
  siRNA target sequence for Lrp6 (NM_008514.1,1516-1534).
cggatctgaccgagtagtt

SEQ ID NO: 636450 - DNA, 19 bp, Mus musculus
  siRNA target sequence for Lrp6 (NM_008514.1,1521-1539).
ctgaccgagtagttcttgt

SEQ ID NO: 636451 - DNA, 19 bp, Mus musculus
  siRNA target sequence for Lrp6 (NM_008514.1,1564-1582).
cggcttagccctggattat

SEQ ID NO: 636452 - DNA, 19 bp, Mus musculus
  siRNA target sequence for Lrp6 (NM_008514.1,1567-1585).
cttagccctggattatgat

SEQ ID NO: 636453 - DNA, 19 bp, Mus musculus
  siRNA target sequence for Lrp6 (NM_008514.1,1583-1601).
gatgaaggcacaatatact

SEQ ID NO: 636454 - DNA, 19 bp, Mus musculus
  siRNA target sequence for Lrp6 (NM_008514.1,1673-1691).
gacaagatccctcacatat

SEQ ID NO: 636455 - DNA, 19 bp, Mus musculus
  siRNA target sequence for Lrp6 (NM_008514.1,1746-1764).
gcatcgagagagtacacaa

SEQ ID NO: 636456 - DNA, 19 bp, Mus musculus
  siRNA target sequence for Lrp6 (NM_008514.1,2005-2023).
ggatatcagacgcatatct

SEQ ID NO: 636457 - DNA, 19 bp, Mus musculus
  siRNA target sequence for Lrp6 (NM_008514.1,2006-2024).
gatatcagacgcatatctt

SEQ ID NO: 636458 - DNA, 19 bp, Mus musculus
  siRNA target sequence for Lrp6 (NM_008514.1,2011-2029).
cagacgcatatctttggaa

SEQ ID NO: 636459 - DNA, 19 bp, Mus musculus
  siRNA target sequence for Lrp6 (NM_008514.1,2072-2090).
gaagcctctgctttggatt

SEQ ID NO: 636460 - DNA, 19 bp, Mus musculus
  siRNA target sequence for Lrp6 (NM_008514.1,2109-2127).
ggatttactggactgatat

SEQ ID NO: 636461 - DNA, 19 bp, Mus musculus
  siRNA target sequence for Lrp6 (NM_008514.1,2110-2128).
gatttactggactgatata

SEQ ID NO: 636462 - DNA, 19 bp, Mus musculus
  siRNA target sequence for Lrp6 (NM_008514.1,2182-2200).
ggtagagtttggcttagat

SEQ ID NO: 636463 - DNA, 19 bp, Mus musculus
  siRNA target sequence for Lrp6 (NM_008514.1,2226-2244).
ggcttgggaagaacttata

SEQ ID NO: 636464 - DNA, 19 bp, Mus musculus
  siRNA target sequence for Lrp6 (NM_008514.1,2292-2310).
gacagcaccgacaggtttt

SEQ ID NO: 636465 - DNA, 19 bp, Mus musculus
  siRNA target sequence for Lrp6 (NM_008514.1,2296-2314).
gcaccgacaggttttggta

SEQ ID NO: 636466 - DNA, 19 bp, Mus musculus
  siRNA target sequence for Lrp6 (NM_008514.1,2297-2315).
caccgacaggttttggtat

SEQ ID NO: 636467 - DNA, 19 bp, Mus musculus
  siRNA target sequence for Lrp6 (NM_008514.1,2355-2373).
ctgctgaagggtttatgta

SEQ ID NO: 636468 - DNA, 19 bp, Mus musculus
  siRNA target sequence for Lrp6 (NM_008514.1,2360-2378).
gaagggtttatgtattgga

SEQ ID NO: 636469 - DNA, 19 bp, Mus musculus
  siRNA target sequence for Lrp6 (NM_008514.1,2388-2406).
gaggcaagcctaagattga

SEQ ID NO: 636470 - DNA, 19 bp, Mus musculus
  siRNA target sequence for Lrp6 (NM_008514.1,2423-2441).
ggaagtgaacgcactacat

SEQ ID NO: 636471 - DNA, 19 bp, Mus musculus
  siRNA target sequence for Lrp6 (NM_008514.1,2424-2442).
gaagtgaacgcactacatt

SEQ ID NO: 636472 - DNA, 19 bp, Mus musculus
  siRNA target sequence for Lrp6 (NM_008514.1,2427-2445).
gtgaacgcactacattagt

SEQ ID NO: 636473 - DNA, 19 bp, Mus musculus
  siRNA target sequence for Lrp6 (NM_008514.1,2433-2451).
gcactacattagttccaaa

SEQ ID NO: 636474 - DNA, 19 bp, Mus musculus
  siRNA target sequence for Lrp6 (NM_008514.1,2434-2452).
cactacattagttccaaat

SEQ ID NO: 636475 - DNA, 19 bp, Mus musculus
  siRNA target sequence for Lrp6 (NM_008514.1,2436-2454).
ctacattagttccaaatgt

SEQ ID NO: 636476 - DNA, 19 bp, Mus musculus
  siRNA target sequence for Lrp6 (NM_008514.1,2473-2491).
caccatcgactatgctaaa

SEQ ID NO: 636477 - DNA, 19 bp, Mus musculus
  siRNA target sequence for Lrp6 (NM_008514.1,2486-2504).
gctaaaaggcggctttact

SEQ ID NO: 636478 - DNA, 19 bp, Mus musculus
  siRNA target sequence for Lrp6 (NM_008514.1,2510-2528).
gacctggacactaacctaa

SEQ ID NO: 636479 - DNA, 19 bp, Mus musculus
  siRNA target sequence for Lrp6 (NM_008514.1,2512-2530).
cctggacactaacctaata

SEQ ID NO: 636480 - DNA, 19 bp, Mus musculus
  siRNA target sequence for Lrp6 (NM_008514.1,2525-2543).
ctaatagaatcctcagata

SEQ ID NO: 636481 - DNA, 19 bp, Mus musculus
  siRNA target sequence for Lrp6 (NM_008514.1,2548-2566).
cggactcaaccgtgaagtt

SEQ ID NO: 636482 - DNA, 19 bp, Mus musculus
  siRNA target sequence for Lrp6 (NM_008514.1,2549-2567).
ggactcaaccgtgaagtta

SEQ ID NO: 636483 - DNA, 19 bp, Mus musculus
  siRNA target sequence for Lrp6 (NM_008514.1,2550-2568).
gactcaaccgtgaagttat

SEQ ID NO: 636484 - DNA, 19 bp, Mus musculus
  siRNA target sequence for Lrp6 (NM_008514.1,2554-2572).
caaccgtgaagttatagca

SEQ ID NO: 636485 - DNA, 19 bp, Mus musculus
  siRNA target sequence for Lrp6 (NM_008514.1,2647-2665).
cattgaacgtgccaacaaa

SEQ ID NO: 636486 - DNA, 19 bp, Mus musculus
  siRNA target sequence for Lrp6 (NM_008514.1,2651-2669).
gaacgtgccaacaaaacca

SEQ ID NO: 636487 - DNA, 19 bp, Mus musculus
  siRNA target sequence for Lrp6 (NM_008514.1,2807-2825).
cccgtcggaggttttgtgt

SEQ ID NO: 636488 - DNA, 19 bp, Mus musculus
  siRNA target sequence for Lrp6 (NM_008514.1,2917-2935).
caaccgcatggtgattgat

SEQ ID NO: 636489 - DNA, 19 bp, Mus musculus
  siRNA target sequence for Lrp6 (NM_008514.1,2922-2940).
gcatggtgattgatgaaca

SEQ ID NO: 636490 - DNA, 19 bp, Mus musculus
  siRNA target sequence for Lrp6 (NM_008514.1,3017-3035).
cagctctactggattgact

SEQ ID NO: 636491 - DNA, 19 bp, Mus musculus
  siRNA target sequence for Lrp6 (NM_008514.1,3027-3045).
ggattgactctcgacaaaa

SEQ ID NO: 636492 - DNA, 19 bp, Mus musculus
  siRNA target sequence for Lrp6 (NM_008514.1,3038-3056).
cgacaaaactccatacgaa

SEQ ID NO: 636493 - DNA, 19 bp, Mus musculus
  siRNA target sequence for Lrp6 (NM_008514.1,3039-3057).
gacaaaactccatacgaaa

SEQ ID NO: 636494 - DNA, 19 bp, Mus musculus
  siRNA target sequence for Lrp6 (NM_008514.1,3049-3067).
catacgaaaggcacatgaa

SEQ ID NO: 636495 - DNA, 19 bp, Mus musculus
  siRNA target sequence for Lrp6 (NM_008514.1,3068-3086).
gatggtggccagggtttta

SEQ ID NO: 636496 - DNA, 19 bp, Mus musculus
  siRNA target sequence for Lrp6 (NM_008514.1,3075-3093).
gccagggttttaatgtagt

SEQ ID NO: 636497 - DNA, 19 bp, Mus musculus
  siRNA target sequence for Lrp6 (NM_008514.1,3137-3155).
gatctcagcattgatattt

SEQ ID NO: 636498 - DNA, 19 bp, Mus musculus
  siRNA target sequence for Lrp6 (NM_008514.1,3196-3214).
cattgatgtgacgagatta

SEQ ID NO: 636499 - DNA, 19 bp, Mus musculus
  siRNA target sequence for Lrp6 (NM_008514.1,3225-3243).
cagttggagtggttctaaa

SEQ ID NO: 636500 - DNA, 19 bp, Mus musculus
  siRNA target sequence for Lrp6 (NM_008514.1,3281-3299).
cccgagaaagggtatatgt

SEQ ID NO: 636501 - DNA, 19 bp, Mus musculus
  siRNA target sequence for Lrp6 (NM_008514.1,3282-3300).
ccgagaaagggtatatgta

SEQ ID NO: 636502 - DNA, 19 bp, Mus musculus
  siRNA target sequence for Lrp6 (NM_008514.1,3314-3332).
caggaaagatctcctaaaa

SEQ ID NO: 636503 - DNA, 19 bp, Mus musculus
  siRNA target sequence for Lrp6 (NM_008514.1,3359-3377).
gaacgagaggtcctctttt

SEQ ID NO: 636504 - DNA, 19 bp, Mus musculus
  siRNA target sequence for Lrp6 (NM_008514.1,3362-3380).
cgagaggtcctctttttca

SEQ ID NO: 636505 - DNA, 19 bp, Mus musculus
  siRNA target sequence for Lrp6 (NM_008514.1,3379-3397).
cagtggcttaagtaaacca

SEQ ID NO: 636506 - DNA, 19 bp, Mus musculus
  siRNA target sequence for Lrp6 (NM_008514.1,3381-3399).
gtggcttaagtaaaccaat

SEQ ID NO: 636507 - DNA, 19 bp, Mus musculus
  siRNA target sequence for Lrp6 (NM_008514.1,3385-3403).
cttaagtaaaccaattgct

SEQ ID NO: 636508 - DNA, 19 bp, Mus musculus
  siRNA target sequence for Lrp6 (NM_008514.1,3447-3465).
cagatctccggcgaattga

SEQ ID NO: 636509 - DNA, 19 bp, Mus musculus
  siRNA target sequence for Lrp6 (NM_008514.1,3449-3467).
gatctccggcgaattgaaa

SEQ ID NO: 636510 - DNA, 19 bp, Mus musculus
  siRNA target sequence for Lrp6 (NM_008514.1,3496-3514).
cgtgctagaagactctaat

SEQ ID NO: 636511 - DNA, 19 bp, Mus musculus
  siRNA target sequence for Lrp6 (NM_008514.1,3497-3515).
gtgctagaagactctaata

SEQ ID NO: 636512 - DNA, 19 bp, Mus musculus
  siRNA target sequence for Lrp6 (NM_008514.1,3499-3517).
gctagaagactctaatata

SEQ ID NO: 636513 - DNA, 19 bp, Mus musculus
  siRNA target sequence for Lrp6 (NM_008514.1,3500-3518).
ctagaagactctaatatat

SEQ ID NO: 636514 - DNA, 19 bp, Mus musculus
  siRNA target sequence for Lrp6 (NM_008514.1,3545-3563).
gaaaactggctctattgga

SEQ ID NO: 636515 - DNA, 19 bp, Mus musculus
  siRNA target sequence for Lrp6 (NM_008514.1,3550-3568).
ctggctctattggattgat

SEQ ID NO: 636516 - DNA, 19 bp, Mus musculus
  siRNA target sequence for Lrp6 (NM_008514.1,3552-3570).
ggctctattggattgataa

SEQ ID NO: 636517 - DNA, 19 bp, Mus musculus
  siRNA target sequence for Lrp6 (NM_008514.1,3553-3571).
gctctattggattgataaa

SEQ ID NO: 636518 - DNA, 19 bp, Mus musculus
  siRNA target sequence for Lrp6 (NM_008514.1,3625-3643).
ggtccaggctcgaattgct

SEQ ID NO: 636519 - DNA, 19 bp, Mus musculus
  siRNA target sequence for Lrp6 (NM_008514.1,3700-3718).
cccttgtgcccaggataat

SEQ ID NO: 636520 - DNA, 19 bp, Mus musculus
  siRNA target sequence for Lrp6 (NM_008514.1,3729-3747).
cacatatctgccttgtaaa

SEQ ID NO: 636521 - DNA, 19 bp, Mus musculus
  siRNA target sequence for Lrp6 (NM_008514.1,3749-3767).
ggagatggtacgacaagat

SEQ ID NO: 636522 - DNA, 19 bp, Mus musculus
  siRNA target sequence for Lrp6 (NM_008514.1,3771-3789).
cctgccccatgcacttagt

SEQ ID NO: 636523 - DNA, 19 bp, Mus musculus
  siRNA target sequence for Lrp6 (NM_008514.1,3772-3790).
ctgccccatgcacttagtt

SEQ ID NO: 636524 - DNA, 19 bp, Mus musculus
  siRNA target sequence for Lrp6 (NM_008514.1,3774-3792).
gccccatgcacttagttct

SEQ ID NO: 636525 - DNA, 19 bp, Mus musculus
  siRNA target sequence for Lrp6 (NM_008514.1,3920-3938).
cacagcgatgaactcaatt

SEQ ID NO: 636526 - DNA, 19 bp, Mus musculus
  siRNA target sequence for Lrp6 (NM_008514.1,3922-3940).
cagcgatgaactcaattgt

SEQ ID NO: 636527 - DNA, 19 bp, Mus musculus
  siRNA target sequence for Lrp6 (NM_008514.1,4099-4117).
cgttggaaagcacaagaaa

SEQ ID NO: 636528 - DNA, 19 bp, Mus musculus
  siRNA target sequence for Lrp6 (NM_008514.1,4149-4167).
ctgacgagctggactgtta

SEQ ID NO: 636529 - DNA, 19 bp, Mus musculus
  siRNA target sequence for Lrp6 (NM_008514.1,4153-4171).
cgagctggactgttatcca

SEQ ID NO: 636530 - DNA, 19 bp, Mus musculus
  siRNA target sequence for Lrp6 (NM_008514.1,4154-4172).
gagctggactgttatccaa

SEQ ID NO: 636531 - DNA, 19 bp, Mus musculus
  siRNA target sequence for Lrp6 (NM_008514.1,4214-4232).
gttattggagtaattgtca

SEQ ID NO: 636532 - DNA, 19 bp, Mus musculus
  siRNA target sequence for Lrp6 (NM_008514.1,4247-4265).
ggaaccatatactttatct

SEQ ID NO: 636533 - DNA, 19 bp, Mus musculus
  siRNA target sequence for Lrp6 (NM_008514.1,4298-4316).
gacggggagaccatgacta

SEQ ID NO: 636534 - DNA, 19 bp, Mus musculus
  siRNA target sequence for Lrp6 (NM_008514.1,4308-4326).
ccatgactaacgactatgt

SEQ ID NO: 636535 - DNA, 19 bp, Mus musculus
  siRNA target sequence for Lrp6 (NM_008514.1,4341-4359).
cgtctgtgccccttggtta

SEQ ID NO: 636536 - DNA, 19 bp, Mus musculus
  siRNA target sequence for Lrp6 (NM_008514.1,4404-4422).
ctcgaggcaaatcaatgat

SEQ ID NO: 636537 - DNA, 19 bp, Mus musculus
  siRNA target sequence for Lrp6 (NM_008514.1,4406-4424).
cgaggcaaatcaatgatca

SEQ ID NO: 636538 - DNA, 19 bp, Mus musculus
  siRNA target sequence for Lrp6 (NM_008514.1,4409-4427).
ggcaaatcaatgatcagtt

SEQ ID NO: 636539 - DNA, 19 bp, Mus musculus
  siRNA target sequence for Lrp6 (NM_008514.1,4572-4590).
cccattataccatggaatt

SEQ ID NO: 636540 - DNA, 19 bp, Mus musculus
  siRNA target sequence for Lrp6 (NM_008514.1,4582-4600).
catggaatttggttattct

SEQ ID NO: 636541 - DNA, 19 bp, Mus musculus
  siRNA target sequence for Lrp6 (NM_008514.1,4753-4771).
caccagtgacgtgaactat

SEQ ID NO: 636542 - DNA, 19 bp, Mus musculus
  siRNA target sequence for Lrp6 (NM_008514.1,4755-4773).
ccagtgacgtgaactatga

SEQ ID NO: 636543 - DNA, 19 bp, Mus musculus
  siRNA target sequence for Lrp6 (NM_008514.1,4802-4820).
ccccgaagccagtacttgt

SEQ ID NO: 636544 - DNA, 19 bp, Mus musculus
  siRNA target sequence for Lrp6 (NM_008514.1,4821-4839).
cagcggaggagaactatga

SEQ ID NO: 636545 - DNA, 19 bp, Mus musculus
  siRNA target sequence for Ltbr (NM_010736.1,268-286).
gcccccttatcgcatagaa

SEQ ID NO: 636546 - DNA, 19 bp, Mus musculus
  siRNA target sequence for Ltbr (NM_010736.1,270-288).
ccccttatcgcatagaaaa

SEQ ID NO: 636547 - DNA, 19 bp, Mus musculus
  siRNA target sequence for Ltbr (NM_010736.1,273-291).
cttatcgcatagaaaacca

SEQ ID NO: 636548 - DNA, 19 bp, Mus musculus
  siRNA target sequence for Ltbr (NM_010736.1,357-375).
ccccaggcgagtttgtctt

SEQ ID NO: 636549 - DNA, 19 bp, Mus musculus
  siRNA target sequence for Ltbr (NM_010736.1,358-376).
cccaggcgagtttgtcttt

SEQ ID NO: 636550 - DNA, 19 bp, Mus musculus
  siRNA target sequence for Ltbr (NM_010736.1,398-416).
gacacggtttgcaagactt

SEQ ID NO: 636551 - DNA, 19 bp, Mus musculus
  siRNA target sequence for Ltbr (NM_010736.1,409-427).
caagacttgcccccataat

SEQ ID NO: 636552 - DNA, 19 bp, Mus musculus
  siRNA target sequence for Ltbr (NM_010736.1,414-432).
cttgcccccataattccta

SEQ ID NO: 636553 - DNA, 19 bp, Mus musculus
  siRNA target sequence for Ltbr (NM_010736.1,417-435).
gcccccataattcctataa

SEQ ID NO: 636554 - DNA, 19 bp, Mus musculus
  siRNA target sequence for Ltbr (NM_010736.1,418-436).
cccccataattcctataat

SEQ ID NO: 636555 - DNA, 19 bp, Mus musculus
  siRNA target sequence for Ltbr (NM_010736.1,421-439).
ccataattcctataatgaa

SEQ ID NO: 636556 - DNA, 19 bp, Mus musculus
  siRNA target sequence for Ltbr (NM_010736.1,636-654).
ccgaggtcacagatgaaat

SEQ ID NO: 636557 - DNA, 19 bp, Mus musculus
  siRNA target sequence for Ltbr (NM_010736.1,637-655).
cgaggtcacagatgaaatt

SEQ ID NO: 636558 - DNA, 19 bp, Mus musculus
  siRNA target sequence for Ltbr (NM_010736.1,793-811).
ggataccatctgtaaaaat

SEQ ID NO: 636559 - DNA, 19 bp, Mus musculus
  siRNA target sequence for Ltbr (NM_010736.1,987-1005).
caagagccgacccacattt

SEQ ID NO: 636560 - DNA, 19 bp, Mus musculus
  siRNA target sequence for Ltbr (NM_010736.1,1214-1232).
gtcaccggcaacatctaca

SEQ ID NO: 636561 - DNA, 19 bp, Mus musculus
  siRNA target sequence for Ltbr (NM_010736.1,1216-1234).
caccggcaacatctacata

SEQ ID NO: 636562 - DNA, 19 bp, Mus musculus
  siRNA target sequence for Ltbr (NM_010736.1,1218-1236).
ccggcaacatctacatata

SEQ ID NO: 636563 - DNA, 19 bp, Mus musculus
  siRNA target sequence for Ly78 (NM_008533.1,122-140).
gacatcagctgcttctttt

SEQ ID NO: 636564 - DNA, 19 bp, Mus musculus
  siRNA target sequence for Ly78 (NM_008533.1,195-213).
gcattgagaaagaagtcaa

SEQ ID NO: 636565 - DNA, 19 bp, Mus musculus
  siRNA target sequence for Ly78 (NM_008533.1,257-275).
ggcactttaccaaactcaa

SEQ ID NO: 636566 - DNA, 19 bp, Mus musculus
  siRNA target sequence for Ly78 (NM_008533.1,266-284).
ccaaactcaacagaatgtt

SEQ ID NO: 636567 - DNA, 19 bp, Mus musculus
  siRNA target sequence for Ly78 (NM_008533.1,267-285).
caaactcaacagaatgttt

SEQ ID NO: 636568 - DNA, 19 bp, Mus musculus
  siRNA target sequence for Ly78 (NM_008533.1,373-391).
ccagatttactggatacat

SEQ ID NO: 636569 - DNA, 19 bp, Mus musculus
  siRNA target sequence for Ly78 (NM_008533.1,382-400).
ctggatacatgaagatact

SEQ ID NO: 636570 - DNA, 19 bp, Mus musculus
  siRNA target sequence for Ly78 (NM_008533.1,389-407).
catgaagatactttccaaa

SEQ ID NO: 636571 - DNA, 19 bp, Mus musculus
  siRNA target sequence for Ly78 (NM_008533.1,417-435).
ggttagacacacttgtact

SEQ ID NO: 636572 - DNA, 19 bp, Mus musculus
  siRNA target sequence for Ly78 (NM_008533.1,418-436).
gttagacacacttgtacta

SEQ ID NO: 636573 - DNA, 19 bp, Mus musculus
  siRNA target sequence for Ly78 (NM_008533.1,438-456).
ccgcaaatcccctgatatt

SEQ ID NO: 636574 - DNA, 19 bp, Mus musculus
  siRNA target sequence for Ly78 (NM_008533.1,439-457).
cgcaaatcccctgatattt

SEQ ID NO: 636575 - DNA, 19 bp, Mus musculus
  siRNA target sequence for Ly78 (NM_008533.1,581-599).
ggaagcaaccatatttcct

SEQ ID NO: 636576 - DNA, 19 bp, Mus musculus
  siRNA target sequence for Ly78 (NM_008533.1,640-658).
ggtcctggattttcagaat

SEQ ID NO: 636577 - DNA, 19 bp, Mus musculus
  siRNA target sequence for Ly78 (NM_008533.1,641-659).
gtcctggattttcagaata

SEQ ID NO: 636578 - DNA, 19 bp, Mus musculus
  siRNA target sequence for Ly78 (NM_008533.1,663-681).
ctatccattacctgtctaa

SEQ ID NO: 636579 - DNA, 19 bp, Mus musculus
  siRNA target sequence for Ly78 (NM_008533.1,667-685).
ccattacctgtctaaagaa

SEQ ID NO: 636580 - DNA, 19 bp, Mus musculus
  siRNA target sequence for Ly78 (NM_008533.1,701-719).
cagcaagccactaatctga

SEQ ID NO: 636581 - DNA, 19 bp, Mus musculus
  siRNA target sequence for Ly78 (NM_008533.1,776-794).
gctgtcttccaaagtttaa

SEQ ID NO: 636582 - DNA, 19 bp, Mus musculus
  siRNA target sequence for Ly78 (NM_008533.1,917-935).
gagggtctctgtgaaatgt

SEQ ID NO: 636583 - DNA, 19 bp, Mus musculus
  siRNA target sequence for Ly78 (NM_008533.1,961-979).
gcattatttcttcaacatt

SEQ ID NO: 636584 - DNA, 19 bp, Mus musculus
  siRNA target sequence for Ly78 (NM_008533.1,962-980).
cattatttcttcaacattt

SEQ ID NO: 636585 - DNA, 19 bp, Mus musculus
  siRNA target sequence for Ly78 (NM_008533.1,1031-1049).
gccactcacctgagtgaat

SEQ ID NO: 636586 - DNA, 19 bp, Mus musculus
  siRNA target sequence for Ly78 (NM_008533.1,1032-1050).
ccactcacctgagtgaatt

SEQ ID NO: 636587 - DNA, 19 bp, Mus musculus
  siRNA target sequence for Ly78 (NM_008533.1,1067-1085).
ggactaagcacacttaaga

SEQ ID NO: 636588 - DNA, 19 bp, Mus musculus
  siRNA target sequence for Ly78 (NM_008533.1,1091-1109).
gttctcagtgcaaataagt

SEQ ID NO: 636589 - DNA, 19 bp, Mus musculus
  siRNA target sequence for Ly78 (NM_008533.1,1112-1130).
gagaatttgtgccaaatca

SEQ ID NO: 636590 - DNA, 19 bp, Mus musculus
  siRNA target sequence for Ly78 (NM_008533.1,1192-1210).
gctcggtactggctgttta

SEQ ID NO: 636591 - DNA, 19 bp, Mus musculus
  siRNA target sequence for Ly78 (NM_008533.1,1288-1306).
ccgaaacctgtctcactta

SEQ ID NO: 636592 - DNA, 19 bp, Mus musculus
  siRNA target sequence for Ly78 (NM_008533.1,1345-1363).
caagacggaggcattcaaa

SEQ ID NO: 636593 - DNA, 19 bp, Mus musculus
  siRNA target sequence for Ly78 (NM_008533.1,1382-1400).
ctcctagatttggcattta

SEQ ID NO: 636594 - DNA, 19 bp, Mus musculus
  siRNA target sequence for Ly78 (NM_008533.1,1384-1402).
cctagatttggcatttact

SEQ ID NO: 636595 - DNA, 19 bp, Mus musculus
  siRNA target sequence for Ly78 (NM_008533.1,1395-1413).
catttactcgactaaaggt

SEQ ID NO: 636596 - DNA, 19 bp, Mus musculus
  siRNA target sequence for Ly78 (NM_008533.1,1401-1419).
ctcgactaaaggtgaaaga

SEQ ID NO: 636597 - DNA, 19 bp, Mus musculus
  siRNA target sequence for Ly78 (NM_008533.1,1602-1620).
gactagaaatcctggtttt

SEQ ID NO: 636598 - DNA, 19 bp, Mus musculus
  siRNA target sequence for Ly78 (NM_008533.1,1656-1674).
ccttcaccagtctgaagat

SEQ ID NO: 636599 - DNA, 19 bp, Mus musculus
  siRNA target sequence for Ly78 (NM_008533.1,1669-1687).
gaagatgatgaatcatgta

SEQ ID NO: 636600 - DNA, 19 bp, Mus musculus
  siRNA target sequence for Ly78 (NM_008533.1,1705-1723).
gctgacatccagtagcatt

SEQ ID NO: 636601 - DNA, 19 bp, Mus musculus
  siRNA target sequence for Ly78 (NM_008533.1,1719-1737).
gcattgaggctcttagtca

SEQ ID NO: 636602 - DNA, 19 bp, Mus musculus
  siRNA target sequence for Ly78 (NM_008533.1,1720-1738).
cattgaggctcttagtcat

SEQ ID NO: 636603 - DNA, 19 bp, Mus musculus
  siRNA target sequence for Ly78 (NM_008533.1,1816-1834).
gcagaggaccattaattta

SEQ ID NO: 636604 - DNA, 19 bp, Mus musculus
  siRNA target sequence for Ly78 (NM_008533.1,1850-1868).
gactgcacttgctcaaaca

SEQ ID NO: 636605 - DNA, 19 bp, Mus musculus
  siRNA target sequence for Ly78 (NM_008533.1,1873-1891).
ctttttagaatggtacaaa

SEQ ID NO: 636606 - DNA, 19 bp, Mus musculus
  siRNA target sequence for Ly78 (NM_008533.1,1921-1939).
ggacactctttgcgaaaat

SEQ ID NO: 636607 - DNA, 19 bp, Mus musculus
  siRNA target sequence for Ly78 (NM_008533.1,2026-2044).
cttgctcgtgtttgctatt

SEQ ID NO: 636608 - DNA, 19 bp, Mus musculus
  siRNA target sequence for Ly78 (NM_008533.1,2076-2094).
gatggaaataccaacacat

SEQ ID NO: 636609 - DNA, 19 bp, Mus musculus
  siRNA target sequence for M6pr (NM_010749.4,44-62).
gcaggttgtagtgtatcta

SEQ ID NO: 636610 - DNA, 19 bp, Mus musculus
  siRNA target sequence for M6pr (NM_010749.4,51-69).
gtagtgtatctatgcaaat

SEQ ID NO: 636611 - DNA, 19 bp, Mus musculus
  siRNA target sequence for M6pr (NM_010749.4,139-157).
gaaggggccttcgaaagaa

SEQ ID NO: 636612 - DNA, 19 bp, Mus musculus
  siRNA target sequence for M6pr (NM_010749.4,145-163).
gccttcgaaagaaatggaa

SEQ ID NO: 636613 - DNA, 19 bp, Mus musculus
  siRNA target sequence for M6pr (NM_010749.4,176-194).
cagaagaaggggaagtaat

SEQ ID NO: 636614 - DNA, 19 bp, Mus musculus
  siRNA target sequence for M6pr (NM_010749.4,184-202).
ggggaagtaattatacttt

SEQ ID NO: 636615 - DNA, 19 bp, Mus musculus
  siRNA target sequence for M6pr (NM_010749.4,185-203).
gggaagtaattatacttta

SEQ ID NO: 636616 - DNA, 19 bp, Mus musculus
  siRNA target sequence for M6pr (NM_010749.4,186-204).
ggaagtaattatactttaa

SEQ ID NO: 636617 - DNA, 19 bp, Mus musculus
  siRNA target sequence for M6pr (NM_010749.4,255-273).
ctacggtgttagcagttta

SEQ ID NO: 636618 - DNA, 19 bp, Mus musculus
  siRNA target sequence for M6pr (NM_010749.4,259-277).
ggtgttagcagtttaagca

SEQ ID NO: 636619 - DNA, 19 bp, Mus musculus
  siRNA target sequence for M6pr (NM_010749.4,280-298).
gttctacctctgacatgaa

SEQ ID NO: 636620 - DNA, 19 bp, Mus musculus
  siRNA target sequence for M6pr (NM_010749.4,320-338).
ggaggtgcatgcaaaagca

SEQ ID NO: 636621 - DNA, 19 bp, Mus musculus
  siRNA target sequence for M6pr (NM_010749.4,418-436).
caggaagccgcaattgttt

SEQ ID NO: 636622 - DNA, 19 bp, Mus musculus
  siRNA target sequence for M6pr (NM_010749.4,420-438).
ggaagccgcaattgtttca

SEQ ID NO: 636623 - DNA, 19 bp, Mus musculus
  siRNA target sequence for M6pr (NM_010749.4,426-444).
cgcaattgtttcaaaccaa

SEQ ID NO: 636624 - DNA, 19 bp, Mus musculus
  siRNA target sequence for M6pr (NM_010749.4,442-460).
caagctctaagaacaacta

SEQ ID NO: 636625 - DNA, 19 bp, Mus musculus
  siRNA target sequence for M6pr (NM_010749.4,463-481).
gcttgagaagtggataata

SEQ ID NO: 636626 - DNA, 19 bp, Mus musculus
  siRNA target sequence for M6pr (NM_010749.4,464-482).
cttgagaagtggataataa

SEQ ID NO: 636627 - DNA, 19 bp, Mus musculus
  siRNA target sequence for M6pr (NM_010749.4,485-503).
ccaaggagtcttcaaatga

SEQ ID NO: 636628 - DNA, 19 bp, Mus musculus
  siRNA target sequence for M6pr (NM_010749.4,529-547).
gtccccccaaactgaagta

SEQ ID NO: 636629 - DNA, 19 bp, Mus musculus
  siRNA target sequence for M6pr (NM_010749.4,572-590).
gggcaggcgcctttgatat

SEQ ID NO: 636630 - DNA, 19 bp, Mus musculus
  siRNA target sequence for M6pr (NM_010749.4,573-591).
ggcaggcgcctttgatata

SEQ ID NO: 636631 - DNA, 19 bp, Mus musculus
  siRNA target sequence for M6pr (NM_010749.4,574-592).
gcaggcgcctttgatatat

SEQ ID NO: 636632 - DNA, 19 bp, Mus musculus
  siRNA target sequence for M6pr (NM_010749.4,593-611).
gcctttgacagtatgctta

SEQ ID NO: 636633 - DNA, 19 bp, Mus musculus
  siRNA target sequence for M6pr (NM_010749.4,594-612).
cctttgacagtatgcttat

SEQ ID NO: 636634 - DNA, 19 bp, Mus musculus
  siRNA target sequence for M6pr (NM_010749.4,613-631).
ctagcaagatgccacaata

SEQ ID NO: 636635 - DNA, 19 bp, Mus musculus
  siRNA target sequence for M6pr (NM_010749.4,616-634).
gcaagatgccacaatagga

SEQ ID NO: 636636 - DNA, 19 bp, Mus musculus
  siRNA target sequence for M6pr (NM_010749.4,620-638).
gatgccacaataggaaaat

SEQ ID NO: 636637 - DNA, 19 bp, Mus musculus
  siRNA target sequence for M6pr (NM_010749.4,649-667).
ggtaacagtaacaatagtt

SEQ ID NO: 636638 - DNA, 19 bp, Mus musculus
  siRNA target sequence for M6pr (NM_010749.4,713-731).
caggcaggacctataacat

SEQ ID NO: 636639 - DNA, 19 bp, Mus musculus
  siRNA target sequence for M6pr (NM_010749.4,824-842).
cagaagagtcctagaaact

SEQ ID NO: 636640 - DNA, 19 bp, Mus musculus
  siRNA target sequence for M6pr (NM_010749.4,862-880).
gggcgagggaactacaact

SEQ ID NO: 636641 - DNA, 19 bp, Mus musculus
  siRNA target sequence for M6pr (NM_010749.4,891-909).
ccaaggagcgacactcttt

SEQ ID NO: 636642 - DNA, 19 bp, Mus musculus
  siRNA target sequence for M6pr (NM_010749.4,896-914).
gagcgacactctttgtagt

SEQ ID NO: 636643 - DNA, 19 bp, Mus musculus
  siRNA target sequence for M6pr (NM_010749.4,1074-1092).
ccgagtgattggagttgat

SEQ ID NO: 636644 - DNA, 19 bp, Mus musculus
  siRNA target sequence for M6pr (NM_010749.4,9848-9866).
cctaacccgtgttttcaat

SEQ ID NO: 636645 - DNA, 19 bp, Mus musculus
  siRNA target sequence for M6pr (NM_010749.4,9883-9901).
cttttgtacaaaaacacaa

SEQ ID NO: 636646 - DNA, 19 bp, Mus musculus
  siRNA target sequence for M6pr (NM_010749.4,9888-9906).
gtacaaaaacacaataatt

SEQ ID NO: 636647 - DNA, 19 bp, Mus musculus
  siRNA target sequence for M6pr (NM_010749.4,9955-9973).
gcagaatgcagtaagacaa

SEQ ID NO: 636648 - DNA, 19 bp, Mus musculus
  siRNA target sequence for Ms4a3 (NM_133246.2,312-330).
gaatggaatactgattcta

SEQ ID NO: 636649 - DNA, 19 bp, Mus musculus
  siRNA target sequence for Ms4a3 (NM_133246.2,422-440).
ggggtgctgtgttttttat

SEQ ID NO: 636650 - DNA, 19 bp, Mus musculus
  siRNA target sequence for Ms4a3 (NM_133246.2,482-500).
cacgaatgctgatgcaaaa

SEQ ID NO: 636651 - DNA, 19 bp, Mus musculus
  siRNA target sequence for Ms4a3 (NM_133246.2,484-502).
cgaatgctgatgcaaaaca

SEQ ID NO: 636652 - DNA, 19 bp, Mus musculus
  siRNA target sequence for Ms4a3 (NM_133246.2,516-534).
cattgccagtactacaatt

SEQ ID NO: 636653 - DNA, 19 bp, Mus musculus
  siRNA target sequence for Ms4a3 (NM_133246.2,524-542).
gtactacaattgcatttgt

SEQ ID NO: 636654 - DNA, 19 bp, Mus musculus
  siRNA target sequence for Ms4a3 (NM_133246.2,536-554).
catttgttgggactgtttt

SEQ ID NO: 636655 - DNA, 19 bp, Mus musculus
  siRNA target sequence for Ms4a3 (NM_133246.2,562-580).
gtgcatttggcattcaata

SEQ ID NO: 636656 - DNA, 19 bp, Mus musculus
  siRNA target sequence for Ms4a3 (NM_133246.2,591-609).
caagggttgccaatcttca

SEQ ID NO: 636657 - DNA, 19 bp, Mus musculus
  siRNA target sequence for Ms4a3 (NM_133246.2,688-706).
gagctgtccgtgaccattt

SEQ ID NO: 636658 - DNA, 19 bp, Mus musculus
  siRNA target sequence for Ms4a3 (NM_133246.2,691-709).
ctgtccgtgaccatttcta

SEQ ID NO: 636659 - DNA, 19 bp, Mus musculus
  siRNA target sequence for Ms4a3 (NM_133246.2,696-714).
cgtgaccatttctatctct

SEQ ID NO: 636660 - DNA, 19 bp, Mus musculus
  siRNA target sequence for Ms4a4d (NM_025658.2,141-159).
ctcggggctatacaagtta

SEQ ID NO: 636661 - DNA, 19 bp, Mus musculus
  siRNA target sequence for Ms4a4d (NM_025658.2,309-327).
cctacaaaagccatgatca

SEQ ID NO: 636662 - DNA, 19 bp, Mus musculus
  siRNA target sequence for Ms4a4d (NM_025658.2,389-407).
cgtcatcagtgtgatttct

SEQ ID NO: 636663 - DNA, 19 bp, Mus musculus
  siRNA target sequence for Ms4a4d (NM_025658.2,408-426).
ggtgtttttcgccaattta

SEQ ID NO: 636664 - DNA, 19 bp, Mus musculus
  siRNA target sequence for Ms4a4d (NM_025658.2,411-429).
gtttttcgccaatttagaa

SEQ ID NO: 636665 - DNA, 19 bp, Mus musculus
  siRNA target sequence for Ms4a4d (NM_025658.2,587-605).
gacagcaccccccatgata

SEQ ID NO: 636666 - DNA, 19 bp, Mus musculus
  siRNA target sequence for Ms4a4d (NM_025658.2,589-607).
cagcaccccccatgatact

SEQ ID NO: 636667 - DNA, 19 bp, Mus musculus
  siRNA target sequence for Ms4a6b (NM_027209.2,155-173).
gtgagactgtggcaatgat

SEQ ID NO: 636668 - DNA, 19 bp, Mus musculus
  siRNA target sequence for Ms4a6b (NM_027209.2,157-175).
gagactgtggcaatgattt

SEQ ID NO: 636669 - DNA, 19 bp, Mus musculus
  siRNA target sequence for Ms4a6b (NM_027209.2,441-459).
cgtcacggagacaaagtca

SEQ ID NO: 636670 - DNA, 19 bp, Mus musculus
  siRNA target sequence for Ms4a6b (NM_027209.2,591-609).
ggagcttagaccaactgaa

SEQ ID NO: 636671 - DNA, 19 bp, Mus musculus
  siRNA target sequence for Ms4a6b (NM_027209.2,592-610).
gagcttagaccaactgaat

SEQ ID NO: 636672 - DNA, 19 bp, Mus musculus
  siRNA target sequence for Ms4a6b (NM_027209.2,599-617).
gaccaactgaatatcatta

SEQ ID NO: 636673 - DNA, 19 bp, Mus musculus
  siRNA target sequence for Ms4a6b (NM_027209.2,602-620).
caactgaatatcattacta

SEQ ID NO: 636674 - DNA, 19 bp, Mus musculus
  siRNA target sequence for Ms4a6b (NM_027209.2,682-700).
ctgatgctgatcagtacta

SEQ ID NO: 636675 - DNA, 19 bp, Mus musculus
  siRNA target sequence for Ms4a6b (NM_027209.2,784-802).
ctgccacatagctcaaata

SEQ ID NO: 636676 - DNA, 19 bp, Mus musculus
  siRNA target sequence for Ms4a6b (NM_027209.2,786-804).
gccacatagctcaaataat

SEQ ID NO: 636677 - DNA, 19 bp, Mus musculus
  siRNA target sequence for Ms4a6b (NM_027209.2,788-806).
cacatagctcaaataatga

SEQ ID NO: 636678 - DNA, 19 bp, Mus musculus
  siRNA target sequence for Ms4a6b (NM_027209.2,805-823).
gactccaacatggaatcaa

SEQ ID NO: 636679 - DNA, 19 bp, Mus musculus
  siRNA target sequence for Ms4a6b (NM_027209.2,810-828).
caacatggaatcaaaggta

SEQ ID NO: 636680 - DNA, 19 bp, Mus musculus
  siRNA target sequence for Mtvr2 (NM_023166.1,182-200).
ggcctcagcggccttctta

SEQ ID NO: 636681 - DNA, 19 bp, Mus musculus
  siRNA target sequence for Mtvr2 (NM_023166.1,183-201).
gcctcagcggccttcttaa

SEQ ID NO: 636682 - DNA, 19 bp, Mus musculus
  siRNA target sequence for Mtvr2 (NM_023166.1,607-625).
gttgcaggatgctttccaa

SEQ ID NO: 636683 - DNA, 19 bp, Mus musculus
  siRNA target sequence for Mtvr2 (NM_181452.1,417-435).
ggctgcgacagctggatat

SEQ ID NO: 636684 - DNA, 19 bp, Mus musculus
  siRNA target sequence for Mug1 (NM_008645.2,581-599).
gcttcctctggcttacatt

SEQ ID NO: 636685 - DNA, 19 bp, Mus musculus
  siRNA target sequence for Mug1 (NM_008645.2,883-901).
gacatgtgaagataaacgt

SEQ ID NO: 636686 - DNA, 19 bp, Mus musculus
  siRNA target sequence for Mug1 (NM_008645.2,1073-1091).
cagtcgatctggaacaact

SEQ ID NO: 636687 - DNA, 19 bp, Mus musculus
  siRNA target sequence for Mug1 (NM_008645.2,1075-1093).
gtcgatctggaacaactaa

SEQ ID NO: 636688 - DNA, 19 bp, Mus musculus
  siRNA target sequence for Mug1 (NM_008645.2,1784-1802).
gcgcttcagcacttctcaa

SEQ ID NO: 636689 - DNA, 19 bp, Mus musculus
  siRNA target sequence for Mug1 (NM_008645.2,1785-1803).
cgcttcagcacttctcaaa

SEQ ID NO: 636690 - DNA, 19 bp, Mus musculus
  siRNA target sequence for Mug1 (NM_008645.2,2212-2230).
ggagtttacgcacaacatt

SEQ ID NO: 636691 - DNA, 19 bp, Mus musculus
  siRNA target sequence for Mug1 (NM_008645.2,2220-2238).
cgcacaacattgagtaaaa

SEQ ID NO: 636692 - DNA, 19 bp, Mus musculus
  siRNA target sequence for Mug1 (NM_008645.2,2222-2240).
cacaacattgagtaaaaga

SEQ ID NO: 636693 - DNA, 19 bp, Mus musculus
  siRNA target sequence for Mug1 (NM_008645.2,2272-2290).
cgaatgatccacttacaga

SEQ ID NO: 636694 - DNA, 19 bp, Mus musculus
  siRNA target sequence for Mug1 (NM_008645.2,3945-3963).
caatctacagggtcatttt

SEQ ID NO: 636695 - DNA, 19 bp, Mus musculus
  siRNA target sequence for Mug1 (NM_008645.2,4142-4160).
gacagtacctctaacttgt

SEQ ID NO: 636696 - DNA, 19 bp, Mus musculus
  siRNA target sequence for Mug1 (NM_008645.2,4332-4350).
gtgagcaacaacaatgtct

SEQ ID NO: 636697 - DNA, 19 bp, Mus musculus
  siRNA target sequence for Ncr1 (NM_010746.2,131-149).
cagcatcatggtcacaaat

SEQ ID NO: 636698 - DNA, 19 bp, Mus musculus
  siRNA target sequence for Ncr1 (NM_010746.2,134-152).
catcatggtcacaaatgga

SEQ ID NO: 636699 - DNA, 19 bp, Mus musculus
  siRNA target sequence for Ncr1 (NM_010746.2,190-208).
cttctgagtatcaactgta

SEQ ID NO: 636700 - DNA, 19 bp, Mus musculus
  siRNA target sequence for Ncr1 (NM_010746.2,193-211).
ctgagtatcaactgtactt

SEQ ID NO: 636701 - DNA, 19 bp, Mus musculus
  siRNA target sequence for Ncr1 (NM_010746.2,197-215).
gtatcaactgtactttgaa

SEQ ID NO: 636702 - DNA, 19 bp, Mus musculus
  siRNA target sequence for Ncr1 (NM_010746.2,245-263).
gccatcgagatcgatgaat

SEQ ID NO: 636703 - DNA, 19 bp, Mus musculus
  siRNA target sequence for Ncr1 (NM_010746.2,246-264).
ccatcgagatcgatgaata

SEQ ID NO: 636704 - DNA, 19 bp, Mus musculus
  siRNA target sequence for Ncr1 (NM_010746.2,247-265).
catcgagatcgatgaataa

SEQ ID NO: 636705 - DNA, 19 bp, Mus musculus
  siRNA target sequence for Ncr1 (NM_010746.2,250-268).
cgagatcgatgaataaagt

SEQ ID NO: 636706 - DNA, 19 bp, Mus musculus
  siRNA target sequence for Ncr1 (NM_010746.2,251-269).
gagatcgatgaataaagtt

SEQ ID NO: 636707 - DNA, 19 bp, Mus musculus
  siRNA target sequence for Ncr1 (NM_010746.2,297-315).
catactgcagggatctaca

SEQ ID NO: 636708 - DNA, 19 bp, Mus musculus
  siRNA target sequence for Ncr1 (NM_010746.2,333-351).
ggagagctctggtcaaagt

SEQ ID NO: 636709 - DNA, 19 bp, Mus musculus
  siRNA target sequence for Ncr1 (NM_010746.2,362-380).
cctgaaactggtagtaact

SEQ ID NO: 636710 - DNA, 19 bp, Mus musculus
  siRNA target sequence for Ncr1 (NM_010746.2,371-389).
ggtagtaactggtctgtat

SEQ ID NO: 636711 - DNA, 19 bp, Mus musculus
  siRNA target sequence for Ncr1 (NM_010746.2,398-416).
caacctctgggtttatcca

SEQ ID NO: 636712 - DNA, 19 bp, Mus musculus
  siRNA target sequence for Ncr1 (NM_010746.2,508-526).
ccaaccacatccagaataa

SEQ ID NO: 636713 - DNA, 19 bp, Mus musculus
  siRNA target sequence for Ncr1 (NM_010746.2,509-527).
caaccacatccagaataaa

SEQ ID NO: 636714 - DNA, 19 bp, Mus musculus
  siRNA target sequence for Ncr1 (NM_010746.2,512-530).
ccacatccagaataaatat

SEQ ID NO: 636715 - DNA, 19 bp, Mus musculus
  siRNA target sequence for Ncr1 (NM_010746.2,533-551).
gaacatccaagcagagttt

SEQ ID NO: 636716 - DNA, 19 bp, Mus musculus
  siRNA target sequence for Ncr1 (NM_010746.2,573-591).
gctcacagagggacataca

SEQ ID NO: 636717 - DNA, 19 bp, Mus musculus
  siRNA target sequence for Ncr1 (NM_010746.2,592-610).
gatgttttggctcttacaa

SEQ ID NO: 636718 - DNA, 19 bp, Mus musculus
  siRNA target sequence for Ncr1 (NM_010746.2,611-629).
cgactatgcatggtctttt

SEQ ID NO: 636719 - DNA, 19 bp, Mus musculus
  siRNA target sequence for Ncr1 (NM_010746.2,687-705).
cctaccgaccctacttctt

SEQ ID NO: 636720 - DNA, 19 bp, Mus musculus
  siRNA target sequence for Ncr1 (NM_010746.2,696-714).
cctacttcttctcttgatt

SEQ ID NO: 636721 - DNA, 19 bp, Mus musculus
  siRNA target sequence for Ncr1 (NM_010746.2,726-744).
gacctttcaaccaatgaat

SEQ ID NO: 636722 - DNA, 19 bp, Mus musculus
  siRNA target sequence for Ncr1 (NM_010746.2,777-795).
cacacaacccagaatctca

SEQ ID NO: 636723 - DNA, 19 bp, Mus musculus
  siRNA target sequence for Ncr1 (NM_010746.2,779-797).
cacaacccagaatctcatt

SEQ ID NO: 636724 - DNA, 19 bp, Mus musculus
  siRNA target sequence for Ncr1 (NM_010746.2,784-802).
cccagaatctcattcgaat

SEQ ID NO: 636725 - DNA, 19 bp, Mus musculus
  siRNA target sequence for Ncr1 (NM_010746.2,788-806).
gaatctcattcgaattggt

SEQ ID NO: 636726 - DNA, 19 bp, Mus musculus
  siRNA target sequence for Ncr1 (NM_010746.2,882-900).
gaggccaacagattaacaa

SEQ ID NO: 636727 - DNA, 19 bp, Mus musculus
  siRNA target sequence for Ncr1 (NM_010746.2,885-903).
gccaacagattaacaaatt

SEQ ID NO: 636728 - DNA, 19 bp, Mus musculus
  siRNA target sequence for Ngfrap1 (NM_009750.1,262-280).
cagcctgctgcaaacaaca

SEQ ID NO: 636729 - DNA, 19 bp, Mus musculus
  siRNA target sequence for Ngfrap1 (NM_009750.1,332-350).
gccgacttgcccctaactt

SEQ ID NO: 636730 - DNA, 19 bp, Mus musculus
  siRNA target sequence for Ngfrap1 (NM_009750.1,403-421).
gatgatatggaaatgttca

SEQ ID NO: 636731 - DNA, 19 bp, Mus musculus
  siRNA target sequence for Ngfrap1 (NM_009750.1,456-474).
ggagctacagctgagaaat

SEQ ID NO: 636732 - DNA, 19 bp, Mus musculus
  siRNA target sequence for Ngfrap1 (NM_009750.1,510-528).
ccacgatcaccatgatgaa

SEQ ID NO: 636733 - DNA, 19 bp, Mus musculus
  siRNA target sequence for Ngfrap1 (NM_009750.1,511-529).
cacgatcaccatgatgaat

SEQ ID NO: 636734 - DNA, 19 bp, Mus musculus
  siRNA target sequence for Nptxr (NM_030689.2,785-803).
ccaagatggacgaactaga

SEQ ID NO: 636735 - DNA, 19 bp, Mus musculus
  siRNA target sequence for Nptxr (NM_030689.2,786-804).
caagatggacgaactagaa

SEQ ID NO: 636736 - DNA, 19 bp, Mus musculus
  siRNA target sequence for Nptxr (NM_030689.2,982-1000).
cccatccgcaacaactaca

SEQ ID NO: 636737 - DNA, 19 bp, Mus musculus
  siRNA target sequence for Nptxr (NM_030689.2,1370-1388).
ccttgggaggccgatttga

SEQ ID NO: 636738 - DNA, 19 bp, Mus musculus
  siRNA target sequence for Nptxr (NM_028763.2,127-145).
gggtgggcgatcaagtaca

SEQ ID NO: 636739 - DNA, 19 bp, Mus musculus
  siRNA target sequence for Nptxr (NM_028763.2,372-390).
ggtgcaccggctcaagaaa

SEQ ID NO: 636740 - DNA, 19 bp, Mus musculus
  siRNA target sequence for Nptxr (NM_028763.2,696-714).
gatccgccacatgaagttt

SEQ ID NO: 636741 - DNA, 19 bp, Mus musculus
  siRNA target sequence for Nptxr (NM_028763.2,705-723).
catgaagtttggcacattt

SEQ ID NO: 636742 - DNA, 19 bp, Mus musculus
  siRNA target sequence for Nptxr (NM_028763.2,716-734).
gcacatttgcgctctacaa

SEQ ID NO: 636743 - DNA, 19 bp, Mus musculus
  siRNA target sequence for Nptxr (NM_028763.2,1036-1054).
gcggaccaggcgctacata

SEQ ID NO: 636744 - DNA, 19 bp, Mus musculus
  siRNA target sequence for Nptxr (NM_028763.2,1038-1056).
ggaccaggcgctacataca

SEQ ID NO: 636745 - DNA, 19 bp, Mus musculus
  siRNA target sequence for Nptxr (NM_028763.2,1119-1137).
gtcgccatgctccaatgta

SEQ ID NO: 636746 - DNA, 19 bp, Mus musculus
  siRNA target sequence for Nptxr (NM_028763.2,1121-1139).
cgccatgctccaatgtagt

SEQ ID NO: 636747 - DNA, 19 bp, Mus musculus
  siRNA target sequence for Nptxr (NM_028763.2,1122-1140).
gccatgctccaatgtagtt

SEQ ID NO: 636748 - DNA, 19 bp, Mus musculus
  siRNA target sequence for Nptxr (NM_028763.2,1124-1142).
catgctccaatgtagttgt

SEQ ID NO: 636749 - DNA, 19 bp, Mus musculus
  siRNA target sequence for Nptxr (NM_028763.2,1169-1187).
ccgtgaccatcaaggaatt

SEQ ID NO: 636750 - DNA, 19 bp, Mus musculus
  siRNA target sequence for Nptxr (NM_028763.2,1188-1206).
ctgcagcccggaggatttt

SEQ ID NO: 636751 - DNA, 19 bp, Mus musculus
  siRNA target sequence for Nptxr (NM_028763.2,1190-1208).
gcagcccggaggattttga

SEQ ID NO: 636752 - DNA, 19 bp, Mus musculus
  siRNA target sequence for Nptxr (NM_028763.2,1193-1211).
gcccggaggattttgagaa

SEQ ID NO: 636753 - DNA, 19 bp, Mus musculus
  siRNA target sequence for Nptxr (NM_028763.2,1252-1270).
ggcactgggccaagtaagt

SEQ ID NO: 636754 - DNA, 19 bp, Mus musculus
  siRNA target sequence for Nrp2 (NM_010939.1,621-639).
ggaggtcggccgaattcca

SEQ ID NO: 636755 - DNA, 19 bp, Mus musculus
  siRNA target sequence for Nrp2 (NM_010939.1,622-640).
gaggtcggccgaattccaa

SEQ ID NO: 636756 - DNA, 19 bp, Mus musculus
  siRNA target sequence for Nrp2 (NM_010939.1,642-660).
gatgctggctacatcactt

SEQ ID NO: 636757 - DNA, 19 bp, Mus musculus
  siRNA target sequence for Nrp2 (NM_010939.1,722-740).
cgaacccaaccagaagatt

SEQ ID NO: 636758 - DNA, 19 bp, Mus musculus
  siRNA target sequence for Nrp2 (NM_010939.1,749-767).
cttcaaccctcactttgaa

SEQ ID NO: 636759 - DNA, 19 bp, Mus musculus
  siRNA target sequence for Nrp2 (NM_010939.1,773-791).
gaaacacgactgcaagtat

SEQ ID NO: 636760 - DNA, 19 bp, Mus musculus
  siRNA target sequence for Nrp2 (NM_010939.1,883-901).
caggctccgtgttatacat

SEQ ID NO: 636761 - DNA, 19 bp, Mus musculus
  siRNA target sequence for Nrp2 (NM_010939.1,885-903).
ggctccgtgttatacatca

SEQ ID NO: 636762 - DNA, 19 bp, Mus musculus
  siRNA target sequence for Nrp2 (NM_010939.1,886-904).
gctccgtgttatacatcaa

SEQ ID NO: 636763 - DNA, 19 bp, Mus musculus
  siRNA target sequence for Nrp2 (NM_010939.1,889-907).
ccgtgttatacatcaagtt

SEQ ID NO: 636764 - DNA, 19 bp, Mus musculus
  siRNA target sequence for Nrp2 (NM_010939.1,891-909).
gtgttatacatcaagttca

SEQ ID NO: 636765 - DNA, 19 bp, Mus musculus
  siRNA target sequence for Nrp2 (NM_010939.1,943-961).
ctctacgctatgagatctt

SEQ ID NO: 636766 - DNA, 19 bp, Mus musculus
  siRNA target sequence for Nrp2 (NM_010939.1,945-963).
ctacgctatgagatcttca

SEQ ID NO: 636767 - DNA, 19 bp, Mus musculus
  siRNA target sequence for Nrp2 (NM_010939.1,978-996).
gattgttccaagaacttta

SEQ ID NO: 636768 - DNA, 19 bp, Mus musculus
  siRNA target sequence for Nrp2 (NM_010939.1,1024-1042).
cagggtttccagagaagta

SEQ ID NO: 636769 - DNA, 19 bp, Mus musculus
  siRNA target sequence for Nrp2 (NM_010939.1,1184-1202).
ggatggcattccacatgtt

SEQ ID NO: 636770 - DNA, 19 bp, Mus musculus
  siRNA target sequence for Nrp2 (NM_010939.1,1312-1330).
gcttctccgcacgttacta

SEQ ID NO: 636771 - DNA, 19 bp, Mus musculus
  siRNA target sequence for Nrp2 (NM_010939.1,1318-1336).
ccgcacgttactatttgat

SEQ ID NO: 636772 - DNA, 19 bp, Mus musculus
  siRNA target sequence for Nrp2 (NM_010939.1,1388-1406).
gtctggccggattgctaat

SEQ ID NO: 636773 - DNA, 19 bp, Mus musculus
  siRNA target sequence for Nrp2 (NM_010939.1,1390-1408).
ctggccggattgctaatga

SEQ ID NO: 636774 - DNA, 19 bp, Mus musculus
  siRNA target sequence for Nrp2 (NM_010939.1,1487-1505).
ctggacacccaatttggat

SEQ ID NO: 636775 - DNA, 19 bp, Mus musculus
  siRNA target sequence for Nrp2 (NM_010939.1,1492-1510).
cacccaatttggattccaa

SEQ ID NO: 636776 - DNA, 19 bp, Mus musculus
  siRNA target sequence for Nrp2 (NM_010939.1,1527-1545).
gtggacctgcgcttcctaa

SEQ ID NO: 636777 - DNA, 19 bp, Mus musculus
  siRNA target sequence for Nrp2 (NM_010939.1,1599-1617).
ggctactacgtcaaatcgt

SEQ ID NO: 636778 - DNA, 19 bp, Mus musculus
  siRNA target sequence for Nrp2 (NM_010939.1,1600-1618).
gctactacgtcaaatcgta

SEQ ID NO: 636779 - DNA, 19 bp, Mus musculus
  siRNA target sequence for Nrp2 (NM_010939.1,1622-1640).
gctggaagtcagcacaaat

SEQ ID NO: 636780 - DNA, 19 bp, Mus musculus
  siRNA target sequence for Nrp2 (NM_010939.1,1625-1643).
ggaagtcagcacaaatggt

SEQ ID NO: 636781 - DNA, 19 bp, Mus musculus
  siRNA target sequence for Nrp2 (NM_010939.1,1708-1726).
ccgaggtggtgctaaacaa

SEQ ID NO: 636782 - DNA, 19 bp, Mus musculus
  siRNA target sequence for Nrp2 (NM_010939.1,2081-2099).
ggaagccagggcgtttgta

SEQ ID NO: 636783 - DNA, 19 bp, Mus musculus
  siRNA target sequence for Nrp2 (NM_010939.1,2091-2109).
gcgtttgtacgcaagttca

SEQ ID NO: 636784 - DNA, 19 bp, Mus musculus
  siRNA target sequence for Nrp2 (NM_010939.1,2092-2110).
cgtttgtacgcaagttcaa

SEQ ID NO: 636785 - DNA, 19 bp, Mus musculus
  siRNA target sequence for Nrp2 (NM_010939.1,2093-2111).
gtttgtacgcaagttcaaa

SEQ ID NO: 636786 - DNA, 19 bp, Mus musculus
  siRNA target sequence for Nrp2 (NM_010939.1,2130-2148).
ggcaaggactgggaatata

SEQ ID NO: 636787 - DNA, 19 bp, Mus musculus
  siRNA target sequence for Nrp2 (NM_010939.1,2187-2205).
gggaacatgcactatgaca

SEQ ID NO: 636788 - DNA, 19 bp, Mus musculus
  siRNA target sequence for Nrp2 (NM_010939.1,2230-2248).
ctgttccagcgcagtatgt

SEQ ID NO: 636789 - DNA, 19 bp, Mus musculus
  siRNA target sequence for Nrp2 (NM_010939.1,2311-2329).
gtgactggacagactcaaa

SEQ ID NO: 636790 - DNA, 19 bp, Mus musculus
  siRNA target sequence for Nrp2 (NM_010939.1,2871-2889).
ggacgatcgggagagattt

SEQ ID NO: 636791 - DNA, 19 bp, Mus musculus
  siRNA target sequence for Nrp2 (NM_010939.1,2885-2903).
gatttccggcgatgacatt

SEQ ID NO: 636792 - DNA, 19 bp, Mus musculus
  siRNA target sequence for Nrp2 (NM_010939.1,2895-2913).
gatgacattcggataagca

SEQ ID NO: 636793 - DNA, 19 bp, Mus musculus
  siRNA target sequence for Nrp2 (NM_010939.1,2991-3009).
gattggagcaactcttctt

SEQ ID NO: 636794 - DNA, 19 bp, Mus musculus
  siRNA target sequence for Nrp2 (NM_010939.1,3239-3257).
caaggtcaagatcaatcat

SEQ ID NO: 636795 - DNA, 19 bp, Mus musculus
  siRNA target sequence for Ntrk3 (NM_008746.4,1604-1622).
ggagagacatcgtgttgaa

SEQ ID NO: 636796 - DNA, 19 bp, Mus musculus
  siRNA target sequence for Ntrk3 (NM_008746.4,1662-1680).
ggctgagtgctacaatcta

SEQ ID NO: 636797 - DNA, 19 bp, Mus musculus
  siRNA target sequence for Ntrk3 (NM_008746.4,1663-1681).
gctgagtgctacaatctaa

SEQ ID NO: 636798 - DNA, 19 bp, Mus musculus
  siRNA target sequence for Ntrk3 (NM_008746.4,2055-2073).
cctggttggagccaatcta

SEQ ID NO: 636799 - DNA, 19 bp, Mus musculus
  siRNA target sequence for Ntrk3 (NM_008746.4,2063-2081).
gagccaatctactagtgaa

SEQ ID NO: 636800 - DNA, 19 bp, Mus musculus
  siRNA target sequence for Ntrk3 (NM_008746.4,2066-2084).
ccaatctactagtgaagat

SEQ ID NO: 636801 - DNA, 19 bp, Mus musculus
  siRNA target sequence for Ntrk3 (NM_008746.4,2067-2085).
caatctactagtgaagatt

SEQ ID NO: 636802 - DNA, 19 bp, Mus musculus
  siRNA target sequence for Ntrk3 (NM_008746.4,2106-2124).
ggacgtctacagtactgat

SEQ ID NO: 636803 - DNA, 19 bp, Mus musculus
  siRNA target sequence for Ntrk3 (NM_008746.4,2110-2128).
gtctacagtactgattact

SEQ ID NO: 636804 - DNA, 19 bp, Mus musculus
  siRNA target sequence for Ntrk3 (NM_008746.4,2170-2188).
ccccctgaaagcataatgt

SEQ ID NO: 636805 - DNA, 19 bp, Mus musculus
  siRNA target sequence for Ntrk3 (NM_008746.4,2171-2189).
cccctgaaagcataatgta

SEQ ID NO: 636806 - DNA, 19 bp, Mus musculus
  siRNA target sequence for Ntrk3 (NM_182809.1,1833-1851).
ggacaatagagatcatcta

SEQ ID NO: 636807 - DNA, 19 bp, Mus musculus
  siRNA target sequence for Ntrk3 (NM_182809.1,1852-1870).
gtcccatcaactcactata

SEQ ID NO: 636808 - DNA, 19 bp, Mus musculus
  siRNA target sequence for Ntrk3 (NM_182809.1,1856-1874).
catcaactcactatatata

SEQ ID NO: 636809 - DNA, 19 bp, Mus musculus
  siRNA target sequence for Ntrk3 (NM_182809.1,1924-1942).
ggtttcagagaaattatgt

SEQ ID NO: 636810 - DNA, 19 bp, Mus musculus
  siRNA target sequence for Ntrk3 (NM_182809.1,1955-1973).
gcctttccggacattccaa

SEQ ID NO: 636811 - DNA, 19 bp, Mus musculus
  siRNA target sequence for Ntrk3 (NM_182809.1,1999-2017).
gaggatgtcaatgtttatt

SEQ ID NO: 636812 - DNA, 19 bp, Mus musculus
  siRNA target sequence for Plxdc1 (NM_028199.2,317-335).
gtggtggaggacaaccata

SEQ ID NO: 636813 - DNA, 19 bp, Mus musculus
  siRNA target sequence for Plxdc1 (NM_028199.2,320-338).
gtggaggacaaccataact

SEQ ID NO: 636814 - DNA, 19 bp, Mus musculus
  siRNA target sequence for Plxdc1 (NM_028199.2,323-341).
gaggacaaccataactact

SEQ ID NO: 636815 - DNA, 19 bp, Mus musculus
  siRNA target sequence for Plxdc1 (NM_028199.2,355-373).
ctacggccctggtgagaaa

SEQ ID NO: 636816 - DNA, 19 bp, Mus musculus
  siRNA target sequence for Plxdc1 (NM_028199.2,358-376).
cggccctggtgagaaacaa

SEQ ID NO: 636817 - DNA, 19 bp, Mus musculus
  siRNA target sequence for Plxdc1 (NM_028199.2,408-426).
ccaaccggagtcatgtgaa

SEQ ID NO: 636818 - DNA, 19 bp, Mus musculus
  siRNA target sequence for Plxdc1 (NM_028199.2,480-498).
cctttgatttccctttcta

SEQ ID NO: 636819 - DNA, 19 bp, Mus musculus
  siRNA target sequence for Plxdc1 (NM_028199.2,512-530).
cggcagatcaccatagcaa

SEQ ID NO: 636820 - DNA, 19 bp, Mus musculus
  siRNA target sequence for Plxdc1 (NM_028199.2,528-546).
caaccggaggcttcatctt

SEQ ID NO: 636821 - DNA, 19 bp, Mus musculus
  siRNA target sequence for Plxdc1 (NM_028199.2,634-652).
ctccacggttgcttacttt

SEQ ID NO: 636822 - DNA, 19 bp, Mus musculus
  siRNA target sequence for Plxdc1 (NM_028199.2,636-654).
ccacggttgcttactttga

SEQ ID NO: 636823 - DNA, 19 bp, Mus musculus
  siRNA target sequence for Plxdc1 (NM_028199.2,746-764).
cgagatggccgcattgtct

SEQ ID NO: 636824 - DNA, 19 bp, Mus musculus
  siRNA target sequence for Plxdc1 (NM_028199.2,747-765).
gagatggccgcattgtctt

SEQ ID NO: 636825 - DNA, 19 bp, Mus musculus
  siRNA target sequence for Plxdc1 (NM_028199.2,831-849).
gcctgtccgacgctttcat

SEQ ID NO: 636826 - DNA, 19 bp, Mus musculus
  siRNA target sequence for Plxdc1 (NM_028199.2,835-853).
gtccgacgctttcatgatt

SEQ ID NO: 636827 - DNA, 19 bp, Mus musculus
  siRNA target sequence for Plxdc1 (NM_028199.2,837-855).
ccgacgctttcatgattct

SEQ ID NO: 636828 - DNA, 19 bp, Mus musculus
  siRNA target sequence for Plxdc1 (NM_028199.2,841-859).
cgctttcatgattctcaat

SEQ ID NO: 636829 - DNA, 19 bp, Mus musculus
  siRNA target sequence for Plxdc1 (NM_028199.2,842-860).
gctttcatgattctcaatt

SEQ ID NO: 636830 - DNA, 19 bp, Mus musculus
  siRNA target sequence for Plxdc1 (NM_028199.2,882-900).
ctcagagacggaccatttt

SEQ ID NO: 636831 - DNA, 19 bp, Mus musculus
  siRNA target sequence for Plxdc1 (NM_028199.2,888-906).
gacggaccattttcgaata

SEQ ID NO: 636832 - DNA, 19 bp, Mus musculus
  siRNA target sequence for Plxdc1 (NM_028199.2,891-909).
ggaccattttcgaatacca

SEQ ID NO: 636833 - DNA, 19 bp, Mus musculus
  siRNA target sequence for Plxdc1 (NM_028199.2,1003-1021).
ctgcgtgtcctcgaatcta

SEQ ID NO: 636834 - DNA, 19 bp, Mus musculus
  siRNA target sequence for Plxdc1 (NM_028199.2,1073-1091).
gaccgataccgccaagaat

SEQ ID NO: 636835 - DNA, 19 bp, Mus musculus
  siRNA target sequence for Plxdc1 (NM_028199.2,1407-1425).
gtggccaccctaattccaa

SEQ ID NO: 636836 - DNA, 19 bp, Mus musculus
  siRNA target sequence for Plxdc1 (NM_028199.2,1466-1484).
ccagccatgaagttccata

SEQ ID NO: 636837 - DNA, 19 bp, Mus musculus
  siRNA target sequence for Plxdc1 (NM_028199.2,1470-1488).
ccatgaagttccataacca

SEQ ID NO: 636838 - DNA, 19 bp, Mus musculus
  siRNA target sequence for Plxdc2 (NM_026162.2,832-850).
gccgcagcaggagttatgt

SEQ ID NO: 636839 - DNA, 19 bp, Mus musculus
  siRNA target sequence for Plxdc2 (NM_026162.2,833-851).
ccgcagcaggagttatgtt

SEQ ID NO: 636840 - DNA, 19 bp, Mus musculus
  siRNA target sequence for Plxdc2 (NM_026162.2,834-852).
cgcagcaggagttatgtta

SEQ ID NO: 636841 - DNA, 19 bp, Mus musculus
  siRNA target sequence for Plxdc2 (NM_026162.2,838-856).
gcaggagttatgttacttt

SEQ ID NO: 636842 - DNA, 19 bp, Mus musculus
  siRNA target sequence for Plxdc2 (NM_026162.2,842-860).
gagttatgttactttgtca

SEQ ID NO: 636843 - DNA, 19 bp, Mus musculus
  siRNA target sequence for Plxdc2 (NM_026162.2,906-924).
ccataccaatgattggatt

SEQ ID NO: 636844 - DNA, 19 bp, Mus musculus
  siRNA target sequence for Plxdc2 (NM_026162.2,907-925).
cataccaatgattggattt

SEQ ID NO: 636845 - DNA, 19 bp, Mus musculus
  siRNA target sequence for Plxdc2 (NM_026162.2,911-929).
ccaatgattggatttatga

SEQ ID NO: 636846 - DNA, 19 bp, Mus musculus
  siRNA target sequence for Plxdc2 (NM_026162.2,912-930).
caatgattggatttatgaa

SEQ ID NO: 636847 - DNA, 19 bp, Mus musculus
  siRNA target sequence for Plxdc2 (NM_026162.2,916-934).
gattggatttatgaagtta

SEQ ID NO: 636848 - DNA, 19 bp, Mus musculus
  siRNA target sequence for Plxdc2 (NM_026162.2,1132-1150).
gacacggatcacaattact

SEQ ID NO: 636849 - DNA, 19 bp, Mus musculus
  siRNA target sequence for Plxdc2 (NM_026162.2,1136-1154).
cggatcacaattactacat

SEQ ID NO: 636850 - DNA, 19 bp, Mus musculus
  siRNA target sequence for Plxdc2 (NM_026162.2,1149-1167).
ctacatttctcggatatat

SEQ ID NO: 636851 - DNA, 19 bp, Mus musculus
  siRNA target sequence for Plxdc2 (NM_026162.2,1152-1170).
catttctcggatatatggt

SEQ ID NO: 636852 - DNA, 19 bp, Mus musculus
  siRNA target sequence for Plxdc2 (NM_026162.2,1189-1207).
cgggatctgtgggttaaca

SEQ ID NO: 636853 - DNA, 19 bp, Mus musculus
  siRNA target sequence for Plxdc2 (NM_026162.2,1190-1208).
gggatctgtgggttaacat

SEQ ID NO: 636854 - DNA, 19 bp, Mus musculus
  siRNA target sequence for Plxdc2 (NM_026162.2,1191-1209).
ggatctgtgggttaacata

SEQ ID NO: 636855 - DNA, 19 bp, Mus musculus
  siRNA target sequence for Plxdc2 (NM_026162.2,1279-1297).
gtgaatctgtccttcgatt

SEQ ID NO: 636856 - DNA, 19 bp, Mus musculus
  siRNA target sequence for Plxdc2 (NM_026162.2,1281-1299).
gaatctgtccttcgatttt

SEQ ID NO: 636857 - DNA, 19 bp, Mus musculus
  siRNA target sequence for Plxdc2 (NM_026162.2,1285-1303).
ctgtccttcgattttccat

SEQ ID NO: 636858 - DNA, 19 bp, Mus musculus
  siRNA target sequence for Plxdc2 (NM_026162.2,1293-1311).
cgattttccattttatggt

SEQ ID NO: 636859 - DNA, 19 bp, Mus musculus
  siRNA target sequence for Plxdc2 (NM_026162.2,1361-1379).
gagaagttgtacatcgaat

SEQ ID NO: 636860 - DNA, 19 bp, Mus musculus
  siRNA target sequence for Plxdc2 (NM_026162.2,1402-1420).
gctcctttaatggcaaatt

SEQ ID NO: 636861 - DNA, 19 bp, Mus musculus
  siRNA target sequence for Plxdc2 (NM_026162.2,1501-1519).
cacctgcaggataattaca

SEQ ID NO: 636862 - DNA, 19 bp, Mus musculus
  siRNA target sequence for Plxdc2 (NM_026162.2,1596-1614).
cttggtcacacagataagt

SEQ ID NO: 636863 - DNA, 19 bp, Mus musculus
  siRNA target sequence for Plxdc2 (NM_026162.2,1599-1617).
ggtcacacagataagttct

SEQ ID NO: 636864 - DNA, 19 bp, Mus musculus
  siRNA target sequence for Plxdc2 (NM_026162.2,1600-1618).
gtcacacagataagttcta

SEQ ID NO: 636865 - DNA, 19 bp, Mus musculus
  siRNA target sequence for Plxdc2 (NM_026162.2,1619-1637).
ccaaccatccagtgaaagt

SEQ ID NO: 636866 - DNA, 19 bp, Mus musculus
  siRNA target sequence for Plxdc2 (NM_026162.2,1638-1656).
cgggttgtctgatgcattt

SEQ ID NO: 636867 - DNA, 19 bp, Mus musculus
  siRNA target sequence for Plxdc2 (NM_026162.2,1665-1683).
ccacaggatccagcaaata

SEQ ID NO: 636868 - DNA, 19 bp, Mus musculus
  siRNA target sequence for Plxdc2 (NM_026162.2,1686-1704).
caatgttcgaagaagaaca

SEQ ID NO: 636869 - DNA, 19 bp, Mus musculus
  siRNA target sequence for Plxdc2 (NM_026162.2,1717-1735).
caccgagtagaactacaaa

SEQ ID NO: 636870 - DNA, 19 bp, Mus musculus
  siRNA target sequence for Plxdc2 (NM_026162.2,1816-1834).
gtgtcctcgcagattggtt

SEQ ID NO: 636871 - DNA, 19 bp, Mus musculus
  siRNA target sequence for Plxdc2 (NM_026162.2,1820-1838).
cctcgcagattggtttcaa

SEQ ID NO: 636872 - DNA, 19 bp, Mus musculus
  siRNA target sequence for Plxdc2 (NM_026162.2,1848-1866).
gtgcagcaaacttcaaaga

SEQ ID NO: 636873 - DNA, 19 bp, Mus musculus
  siRNA target sequence for Plxdc2 (NM_026162.2,1919-1937).
cggaagaggtacagtcaaa

SEQ ID NO: 636874 - DNA, 19 bp, Mus musculus
  siRNA target sequence for Plxdc2 (NM_026162.2,1924-1942).
gaggtacagtcaaaagaga

SEQ ID NO: 636875 - DNA, 19 bp, Mus musculus
  siRNA target sequence for Plxdc2 (NM_026162.2,2087-2105).
cgaagatagccctacatct

SEQ ID NO: 636876 - DNA, 19 bp, Mus musculus
  siRNA target sequence for Plxdc2 (NM_026162.2,2091-2109).
gatagccctacatctcaaa

SEQ ID NO: 636877 - DNA, 19 bp, Mus musculus
  siRNA target sequence for Plxdc2 (NM_026162.2,2163-2181).
ccatgcaggcctcattgtt

SEQ ID NO: 636878 - DNA, 19 bp, Mus musculus
  siRNA target sequence for Plxdc2 (NM_026162.2,2188-2206).
ctcatcttggtcctcatta

SEQ ID NO: 636879 - DNA, 19 bp, Mus musculus
  siRNA target sequence for Plxdc2 (NM_026162.2,2190-2208).
catcttggtcctcattata

SEQ ID NO: 636880 - DNA, 19 bp, Mus musculus
  siRNA target sequence for Plxdc2 (NM_026162.2,2223-2241).
ggtgacagtgtatatgtat

SEQ ID NO: 636881 - DNA, 19 bp, Mus musculus
  siRNA target sequence for Plxdc2 (NM_026162.2,2238-2256).
gtatcaccatccaacatca

SEQ ID NO: 636882 - DNA, 19 bp, Mus musculus
  siRNA target sequence for Plxdc2 (NM_026162.2,2331-2349).
ccctgcctatgcagaagtt

SEQ ID NO: 636883 - DNA, 19 bp, Mus musculus
  siRNA target sequence for Plxna1 (NM_008881.1,435-453).
gacaggagaggtatatgtt

SEQ ID NO: 636884 - DNA, 19 bp, Mus musculus
  siRNA target sequence for Plxna1 (NM_008881.1,454-472).
ggcgctgtgaaccgtattt

SEQ ID NO: 636885 - DNA, 19 bp, Mus musculus
  siRNA target sequence for Plxna1 (NM_008881.1,455-473).
gcgctgtgaaccgtattta

SEQ ID NO: 636886 - DNA, 19 bp, Mus musculus
  siRNA target sequence for Plxna1 (NM_008881.1,457-475).
gctgtgaaccgtatttaca

SEQ ID NO: 636887 - DNA, 19 bp, Mus musculus
  siRNA target sequence for Plxna1 (NM_008881.1,458-476).
ctgtgaaccgtatttacaa

SEQ ID NO: 636888 - DNA, 19 bp, Mus musculus
  siRNA target sequence for Plxna1 (NM_008881.1,587-605).
gcacagacaacgtcaacaa

SEQ ID NO: 636889 - DNA, 19 bp, Mus musculus
  siRNA target sequence for Plxna1 (NM_008881.1,827-845).
ccatcgatggcaaatcaga

SEQ ID NO: 636890 - DNA, 19 bp, Mus musculus
  siRNA target sequence for Plxna1 (NM_008881.1,828-846).
catcgatggcaaatcagaa

SEQ ID NO: 636891 - DNA, 19 bp, Mus musculus
  siRNA target sequence for Plxna1 (NM_008881.1,898-916).
gacatgtttggctttgtgt

SEQ ID NO: 636892 - DNA, 19 bp, Mus musculus
  siRNA target sequence for Plxna1 (NM_008881.1,1009-1027).
cgcagcgagcagttcgtat

SEQ ID NO: 636893 - DNA, 19 bp, Mus musculus
  siRNA target sequence for Plxna1 (NM_008881.1,1010-1028).
gcagcgagcagttcgtata

SEQ ID NO: 636894 - DNA, 19 bp, Mus musculus
  siRNA target sequence for Plxna1 (NM_008881.1,1013-1031).
gcgagcagttcgtatacta

SEQ ID NO: 636895 - DNA, 19 bp, Mus musculus
  siRNA target sequence for Plxna1 (NM_008881.1,1075-1093).
gctggcgagcacttcttca

SEQ ID NO: 636896 - DNA, 19 bp, Mus musculus
  siRNA target sequence for Plxna1 (NM_008881.1,1255-1273).
gatgaggaggtgttgttca

SEQ ID NO: 636897 - DNA, 19 bp, Mus musculus
  siRNA target sequence for Plxna1 (NM_008881.1,1432-1450).
gagctgggctgcatcaact

SEQ ID NO: 636898 - DNA, 19 bp, Mus musculus
  siRNA target sequence for Plxna1 (NM_008881.1,1449-1467).
ctcgcccctgcagattgat

SEQ ID NO: 636899 - DNA, 19 bp, Mus musculus
  siRNA target sequence for Plxna1 (NM_008881.1,1590-1608).
ccgcaccgtggtttttgct

SEQ ID NO: 636900 - DNA, 19 bp, Mus musculus
  siRNA target sequence for Plxna1 (NM_008881.1,1744-1762).
cgccagtacctctatgcta

SEQ ID NO: 636901 - DNA, 19 bp, Mus musculus
  siRNA target sequence for Plxna1 (NM_008881.1,1745-1763).
gccagtacctctatgctat

SEQ ID NO: 636902 - DNA, 19 bp, Mus musculus
  siRNA target sequence for Plxna1 (NM_008881.1,2004-2022).
cgtgctgcaggcttggaat

SEQ ID NO: 636903 - DNA, 19 bp, Mus musculus
  siRNA target sequence for Plxna1 (NM_008881.1,2089-2107).
gaagatggccgcatccatt

SEQ ID NO: 636904 - DNA, 19 bp, Mus musculus
  siRNA target sequence for Plxna1 (NM_008881.1,2307-2325).
ccatgtttgcaccaacaat

SEQ ID NO: 636905 - DNA, 19 bp, Mus musculus
  siRNA target sequence for Plxna1 (NM_008881.1,2347-2365).
gaaggccgagtcaacatgt

SEQ ID NO: 636906 - DNA, 19 bp, Mus musculus
  siRNA target sequence for Plxna1 (NM_008881.1,2388-2406).
gccttctacccacatctat

SEQ ID NO: 636907 - DNA, 19 bp, Mus musculus
  siRNA target sequence for Plxna1 (NM_008881.1,2480-2498).
ggtacgagtgccttttcca

SEQ ID NO: 636908 - DNA, 19 bp, Mus musculus
  siRNA target sequence for Plxna1 (NM_008881.1,2576-2594).
cctatgaggggaatgatgt

SEQ ID NO: 636909 - DNA, 19 bp, Mus musculus
  siRNA target sequence for Plxna1 (NM_008881.1,2838-2856).
ctgcacagaccccaagatt

SEQ ID NO: 636910 - DNA, 19 bp, Mus musculus
  siRNA target sequence for Plxna1 (NM_008881.1,2840-2858).
gcacagaccccaagattct

SEQ ID NO: 636911 - DNA, 19 bp, Mus musculus
  siRNA target sequence for Plxna1 (NM_008881.1,2891-2909).
gagggactcgactaaccat

SEQ ID NO: 636912 - DNA, 19 bp, Mus musculus
  siRNA target sequence for Plxna1 (NM_008881.1,2906-2924).
ccatcaccggtgagaatct

SEQ ID NO: 636913 - DNA, 19 bp, Mus musculus
  siRNA target sequence for Plxna1 (NM_008881.1,2986-3004).
gtggagagcgagtacatca

SEQ ID NO: 636914 - DNA, 19 bp, Mus musculus
  siRNA target sequence for Plxna1 (NM_008881.1,3113-3131).
cccctaaacgcttcacttt

SEQ ID NO: 636915 - DNA, 19 bp, Mus musculus
  siRNA target sequence for Plxna1 (NM_008881.1,3114-3132).
ccctaaacgcttcactttt

SEQ ID NO: 636916 - DNA, 19 bp, Mus musculus
  siRNA target sequence for Plxna1 (NM_008881.1,3216-3234).
gaatgctggcagtgatgta

SEQ ID NO: 636917 - DNA, 19 bp, Mus musculus
  siRNA target sequence for Plxna1 (NM_008881.1,3329-3347).
cccctattgttatcaacat

SEQ ID NO: 636918 - DNA, 19 bp, Mus musculus
  siRNA target sequence for Plxna1 (NM_008881.1,3332-3350).
ctattgttatcaacatcaa

SEQ ID NO: 636919 - DNA, 19 bp, Mus musculus
  siRNA target sequence for Plxna1 (NM_008881.1,3443-3461).
gtgggaccctcctaacagt

SEQ ID NO: 636920 - DNA, 19 bp, Mus musculus
  siRNA target sequence for Plxna1 (NM_008881.1,3536-3554).
gctgcatggtgtacaatga

SEQ ID NO: 636921 - DNA, 19 bp, Mus musculus
  siRNA target sequence for Plxna1 (NM_008881.1,3659-3677).
gcacgctgctggtactcaa

SEQ ID NO: 636922 - DNA, 19 bp, Mus musculus
  siRNA target sequence for Plxna1 (NM_008881.1,3803-3821).
gcaattcccggctcaacta

SEQ ID NO: 636923 - DNA, 19 bp, Mus musculus
  siRNA target sequence for Plxna1 (NM_008881.1,4469-4487).
ccacaggagtgctaaagca

SEQ ID NO: 636924 - DNA, 19 bp, Mus musculus
  siRNA target sequence for Plxna1 (NM_008881.1,4589-4607).
ggttcaccttccttttgta

SEQ ID NO: 636925 - DNA, 19 bp, Mus musculus
  siRNA target sequence for Plxna1 (NM_008881.1,4628-4646).
ctggggagccgctctttat

SEQ ID NO: 636926 - DNA, 19 bp, Mus musculus
  siRNA target sequence for Plxna1 (NM_008881.1,4631-4649).
gggagccgctctttatgct

SEQ ID NO: 636927 - DNA, 19 bp, Mus musculus
  siRNA target sequence for Plxna1 (NM_008881.1,4778-4796).
gcgtgaaccctgaacatga

SEQ ID NO: 636928 - DNA, 19 bp, Mus musculus
  siRNA target sequence for Plxna1 (NM_008881.1,4782-4800).
gaaccctgaacatgagaat

SEQ ID NO: 636929 - DNA, 19 bp, Mus musculus
  siRNA target sequence for Plxna1 (NM_008881.1,4968-4986).
cgaggacgtcaccactaaa

SEQ ID NO: 636930 - DNA, 19 bp, Mus musculus
  siRNA target sequence for Plxna1 (NM_008881.1,4969-4987).
gaggacgtcaccactaaaa

SEQ ID NO: 636931 - DNA, 19 bp, Mus musculus
  siRNA target sequence for Plxna1 (NM_008881.1,4975-4993).
gtcaccactaaaattgaca

SEQ ID NO: 636932 - DNA, 19 bp, Mus musculus
  siRNA target sequence for Plxna1 (NM_008881.1,4977-4995).
caccactaaaattgacaat

SEQ ID NO: 636933 - DNA, 19 bp, Mus musculus
  siRNA target sequence for Plxna1 (NM_008881.1,5043-5061).
gtcatcggtggcactagta

SEQ ID NO: 636934 - DNA, 19 bp, Mus musculus
  siRNA target sequence for Plxna1 (NM_008881.1,5281-5299).
gtctctgagatctacctaa

SEQ ID NO: 636935 - DNA, 19 bp, Mus musculus
  siRNA target sequence for Plxna1 (NM_008881.1,5623-5641).
cacaagctgggcaaagact

SEQ ID NO: 636936 - DNA, 19 bp, Mus musculus
  siRNA target sequence for Plxna1 (NM_008881.1,5807-5825).
gtgccctgcacgagatcta

SEQ ID NO: 636937 - DNA, 19 bp, Mus musculus
  siRNA target sequence for Plxna1 (NM_008881.1,5892-5910).
gcagcggcttcgaagcaaa

SEQ ID NO: 636938 - DNA, 19 bp, Mus musculus
  siRNA target sequence for Plxna2 (NM_008882.1,735-753).
gtatgtgggggctatcaat

SEQ ID NO: 636939 - DNA, 19 bp, Mus musculus
  siRNA target sequence for Plxna2 (NM_008882.1,746-764).
ctatcaatcgtgtctacaa

SEQ ID NO: 636940 - DNA, 19 bp, Mus musculus
  siRNA target sequence for Plxna2 (NM_008882.1,867-885).
gcttacactcaccaacaat

SEQ ID NO: 636941 - DNA, 19 bp, Mus musculus
  siRNA target sequence for Plxna2 (NM_008882.1,903-921).
cattgactactctgagaat

SEQ ID NO: 636942 - DNA, 19 bp, Mus musculus
  siRNA target sequence for Plxna2 (NM_008882.1,1020-1038).
ctacttgtccagtgtcaat

SEQ ID NO: 636943 - DNA, 19 bp, Mus musculus
  siRNA target sequence for Plxna2 (NM_008882.1,1026-1044).
gtccagtgtcaataagaca

SEQ ID NO: 636944 - DNA, 19 bp, Mus musculus
  siRNA target sequence for Plxna2 (NM_008882.1,1215-1233).
ctcctccctcatcaagatt

SEQ ID NO: 636945 - DNA, 19 bp, Mus musculus
  siRNA target sequence for Plxna2 (NM_008882.1,1259-1277).
ctcacttcgacatcttcta

SEQ ID NO: 636946 - DNA, 19 bp, Mus musculus
  siRNA target sequence for Plxna2 (NM_008882.1,1261-1279).
cacttcgacatcttctaca

SEQ ID NO: 636947 - DNA, 19 bp, Mus musculus
  siRNA target sequence for Plxna2 (NM_008882.1,1292-1310).
ccagtggggggtttgtcta

SEQ ID NO: 636948 - DNA, 19 bp, Mus musculus
  siRNA target sequence for Plxna2 (NM_008882.1,1341-1359).
cggcatggccatcaattca

SEQ ID NO: 636949 - DNA, 19 bp, Mus musculus
  siRNA target sequence for Plxna2 (NM_008882.1,1358-1376).
cagctggagacctcttcta

SEQ ID NO: 636950 - DNA, 19 bp, Mus musculus
  siRNA target sequence for Plxna2 (NM_008882.1,1360-1378).
gctggagacctcttctata

SEQ ID NO: 636951 - DNA, 19 bp, Mus musculus
  siRNA target sequence for Plxna2 (NM_008882.1,1451-1469).
cacgtgctggggtggaata

SEQ ID NO: 636952 - DNA, 19 bp, Mus musculus
  siRNA target sequence for Plxna2 (NM_008882.1,1633-1651).
gccatcaacttgcaaatca

SEQ ID NO: 636953 - DNA, 19 bp, Mus musculus
  siRNA target sequence for Plxna2 (NM_008882.1,1734-1752).
ggcgcctgtcccaatcgat

SEQ ID NO: 636954 - DNA, 19 bp, Mus musculus
  siRNA target sequence for Plxna2 (NM_008882.1,1738-1756).
cctgtcccaatcgatgata

SEQ ID NO: 636955 - DNA, 19 bp, Mus musculus
  siRNA target sequence for Plxna2 (NM_008882.1,1739-1757).
ctgtcccaatcgatgataa

SEQ ID NO: 636956 - DNA, 19 bp, Mus musculus
  siRNA target sequence for Plxna2 (NM_008882.1,1741-1759).
gtcccaatcgatgataact

SEQ ID NO: 636957 - DNA, 19 bp, Mus musculus
  siRNA target sequence for Plxna2 (NM_008882.1,1744-1762).
ccaatcgatgataacttct

SEQ ID NO: 636958 - DNA, 19 bp, Mus musculus
  siRNA target sequence for Plxna2 (NM_008882.1,1807-1825).
gagggactgaccctgtata

SEQ ID NO: 636959 - DNA, 19 bp, Mus musculus
  siRNA target sequence for Plxna2 (NM_008882.1,1850-1868).
ctgtggcctcctatgttta

SEQ ID NO: 636960 - DNA, 19 bp, Mus musculus
  siRNA target sequence for Plxna2 (NM_008882.1,1852-1870).
gtggcctcctatgtttaca

SEQ ID NO: 636961 - DNA, 19 bp, Mus musculus
  siRNA target sequence for Plxna2 (NM_008882.1,1854-1872).
ggcctcctatgtttacaat

SEQ ID NO: 636962 - DNA, 19 bp, Mus musculus
  siRNA target sequence for Plxna2 (NM_008882.1,1945-1963).
ggtggggtccagtatgaga

SEQ ID NO: 636963 - DNA, 19 bp, Mus musculus
  siRNA target sequence for Plxna2 (NM_008882.1,1946-1964).
gtggggtccagtatgagat

SEQ ID NO: 636964 - DNA, 19 bp, Mus musculus
  siRNA target sequence for Plxna2 (NM_008882.1,2016-2034).
catcaatcagctataccta

SEQ ID NO: 636965 - DNA, 19 bp, Mus musculus
  siRNA target sequence for Plxna2 (NM_008882.1,2019-2037).
caatcagctatacctatat

SEQ ID NO: 636966 - DNA, 19 bp, Mus musculus
  siRNA target sequence for Plxna2 (NM_008882.1,2061-2079).
cagggtccctgttgaatca

SEQ ID NO: 636967 - DNA, 19 bp, Mus musculus
  siRNA target sequence for Plxna2 (NM_008882.1,2064-2082).
ggtccctgttgaatcatgt

SEQ ID NO: 636968 - DNA, 19 bp, Mus musculus
  siRNA target sequence for Plxna2 (NM_008882.1,2074-2092).
gaatcatgtgaacagtata

SEQ ID NO: 636969 - DNA, 19 bp, Mus musculus
  siRNA target sequence for Plxna2 (NM_008882.1,2184-2202).
ggcctgggaagcaaatcga

SEQ ID NO: 636970 - DNA, 19 bp, Mus musculus
  siRNA target sequence for Plxna2 (NM_008882.1,2186-2204).
cctgggaagcaaatcgatt

SEQ ID NO: 636971 - DNA, 19 bp, Mus musculus
  siRNA target sequence for Plxna2 (NM_008882.1,2190-2208).
ggaagcaaatcgatttgct

SEQ ID NO: 636972 - DNA, 19 bp, Mus musculus
  siRNA target sequence for Plxna2 (NM_008882.1,2200-2218).
cgatttgctgccagtatca

SEQ ID NO: 636973 - DNA, 19 bp, Mus musculus
  siRNA target sequence for Plxna2 (NM_008882.1,2307-2325).
caacctctctgaaggtatt

SEQ ID NO: 636974 - DNA, 19 bp, Mus musculus
  siRNA target sequence for Plxna2 (NM_008882.1,2488-2506).
gtcagcaccgaattcaagt

SEQ ID NO: 636975 - DNA, 19 bp, Mus musculus
  siRNA target sequence for Plxna2 (NM_008882.1,2493-2511).
caccgaattcaagttctat

SEQ ID NO: 636976 - DNA, 19 bp, Mus musculus
  siRNA target sequence for Plxna2 (NM_008882.1,2623-2641).
gaaggcaggatcaatgttt

SEQ ID NO: 636977 - DNA, 19 bp, Mus musculus
  siRNA target sequence for Plxna2 (NM_008882.1,2665-2683).
cccacggaggagattctga

SEQ ID NO: 636978 - DNA, 19 bp, Mus musculus
  siRNA target sequence for Plxna2 (NM_008882.1,2666-2684).
ccacggaggagattctgat

SEQ ID NO: 636979 - DNA, 19 bp, Mus musculus
  siRNA target sequence for Plxna2 (NM_008882.1,2685-2703).
cccagttggggaagtaaaa

SEQ ID NO: 636980 - DNA, 19 bp, Mus musculus
  siRNA target sequence for Plxna2 (NM_008882.1,2803-2821).
gccctgcgtttcaacagtt

SEQ ID NO: 636981 - DNA, 19 bp, Mus musculus
  siRNA target sequence for Plxna2 (NM_008882.1,2841-2859).
cagctcgtaccagtatgat

SEQ ID NO: 636982 - DNA, 19 bp, Mus musculus
  siRNA target sequence for Plxna2 (NM_008882.1,2889-2907).
ctttgctgtagtatggaat

SEQ ID NO: 636983 - DNA, 19 bp, Mus musculus
  siRNA target sequence for Plxna2 (NM_008882.1,3058-3076).
cactgccccagcacttcta

SEQ ID NO: 636984 - DNA, 19 bp, Mus musculus
  siRNA target sequence for Plxna2 (NM_008882.1,3092-3110).
ggtccagccacaatgtcaa

SEQ ID NO: 636985 - DNA, 19 bp, Mus musculus
  siRNA target sequence for Plxna2 (NM_008882.1,3124-3142).
caaatcacagagattttga

SEQ ID NO: 636986 - DNA, 19 bp, Mus musculus
  siRNA target sequence for Plxna2 (NM_008882.1,3257-3275).
ctatcccaggggaatacat

SEQ ID NO: 636987 - DNA, 19 bp, Mus musculus
  siRNA target sequence for Plxna2 (NM_008882.1,3300-3318).
gatgggccatgccgttata

SEQ ID NO: 636988 - DNA, 19 bp, Mus musculus
  siRNA target sequence for Plxna2 (NM_008882.1,3303-3321).
gggccatgccgttataggt

SEQ ID NO: 636989 - DNA, 19 bp, Mus musculus
  siRNA target sequence for Plxna2 (NM_008882.1,3304-3322).
ggccatgccgttataggta

SEQ ID NO: 636990 - DNA, 19 bp, Mus musculus
  siRNA target sequence for Plxna2 (NM_008882.1,3381-3399).
gtcccaccagcagtatact

SEQ ID NO: 636991 - DNA, 19 bp, Mus musculus
  siRNA target sequence for Plxna2 (NM_008882.1,3388-3406).
cagcagtatacttttgtga

SEQ ID NO: 636992 - DNA, 19 bp, Mus musculus
  siRNA target sequence for Plxna2 (NM_008882.1,3468-3486).
catcacaggccattacctt

SEQ ID NO: 636993 - DNA, 19 bp, Mus musculus
  siRNA target sequence for Plxna2 (NM_008882.1,3517-3535).
ggcaatcagacctgtgaat

SEQ ID NO: 636994 - DNA, 19 bp, Mus musculus
  siRNA target sequence for Plxna2 (NM_008882.1,3518-3536).
gcaatcagacctgtgaatt

SEQ ID NO: 636995 - DNA, 19 bp, Mus musculus
  siRNA target sequence for Plxna2 (NM_008882.1,3541-3559).
gggaggtcaatgaatgaga

SEQ ID NO: 636996 - DNA, 19 bp, Mus musculus
  siRNA target sequence for Plxna2 (NM_008882.1,3545-3563).
ggtcaatgaatgagattgt

SEQ ID NO: 636997 - DNA, 19 bp, Mus musculus
  siRNA target sequence for Plxna2 (NM_008882.1,3546-3564).
gtcaatgaatgagattgta

SEQ ID NO: 636998 - DNA, 19 bp, Mus musculus
  siRNA target sequence for Plxna2 (NM_008882.1,3669-3687).
cccacgggtccaacgtatt

SEQ ID NO: 636999 - DNA, 19 bp, Mus musculus
  siRNA target sequence for Plxna2 (NM_008882.1,3671-3689).
cacgggtccaacgtattga

SEQ ID NO: 637000 - DNA, 19 bp, Mus musculus
  siRNA target sequence for Plxna2 (NM_008882.1,3737-3755).
gcttcaacttggatgtcat

SEQ ID NO: 637001 - DNA, 19 bp, Mus musculus
  siRNA target sequence for Plxna2 (NM_008882.1,3738-3756).
cttcaacttggatgtcatt

SEQ ID NO: 637002 - DNA, 19 bp, Mus musculus
  siRNA target sequence for Plxna2 (NM_008882.1,3763-3781).
cccagggtccgagtcaaat

SEQ ID NO: 637003 - DNA, 19 bp, Mus musculus
  siRNA target sequence for Plxna2 (NM_008882.1,3767-3785).
gggtccgagtcaaatttaa

SEQ ID NO: 637004 - DNA, 19 bp, Mus musculus
  siRNA target sequence for Plxna2 (NM_008882.1,3768-3786).
ggtccgagtcaaatttaat

SEQ ID NO: 637005 - DNA, 19 bp, Mus musculus
  siRNA target sequence for Plxna2 (NM_008882.1,3888-3906).
ggaacggccagatgagttt

SEQ ID NO: 637006 - DNA, 19 bp, Mus musculus
  siRNA target sequence for Plxna2 (NM_008882.1,3894-3912).
gccagatgagtttggattt

SEQ ID NO: 637007 - DNA, 19 bp, Mus musculus
  siRNA target sequence for Plxna2 (NM_008882.1,3913-3931).
ctctttaacaatgttcaat

SEQ ID NO: 637008 - DNA, 19 bp, Mus musculus
  siRNA target sequence for Plxna2 (NM_008882.1,3928-3946).
caatccttactcatctata

SEQ ID NO: 637009 - DNA, 19 bp, Mus musculus
  siRNA target sequence for Plxna2 (NM_008882.1,3932-3950).
ccttactcatctataacga

SEQ ID NO: 637010 - DNA, 19 bp, Mus musculus
  siRNA target sequence for Plxna2 (NM_008882.1,3966-3984).
ctaccccaacccaacgttt

SEQ ID NO: 637011 - DNA, 19 bp, Mus musculus
  siRNA target sequence for Plxna2 (NM_008882.1,3971-3989).
ccaacccaacgtttgaact

SEQ ID NO: 637012 - DNA, 19 bp, Mus musculus
  siRNA target sequence for Plxna2 (NM_008882.1,4283-4301).
gtggaagcctccttcttat

SEQ ID NO: 637013 - DNA, 19 bp, Mus musculus
  siRNA target sequence for Plxna2 (NM_008882.1,4324-4342).
gcttacaagcgcaagtcta

SEQ ID NO: 637014 - DNA, 19 bp, Mus musculus
  siRNA target sequence for Plxna2 (NM_008882.1,4332-4350).
gcgcaagtctagggaaaat

SEQ ID NO: 637015 - DNA, 19 bp, Mus musculus
  siRNA target sequence for Plxna2 (NM_008882.1,4362-4380).
caagcggctccaaatgcaa

SEQ ID NO: 637016 - DNA, 19 bp, Mus musculus
  siRNA target sequence for Plxna2 (NM_008882.1,4729-4747).
cttcagggtcgcctagaat

SEQ ID NO: 637017 - DNA, 19 bp, Mus musculus
  siRNA target sequence for Plxna2 (NM_008882.1,4963-4981).
ggccccattgacgctatta

SEQ ID NO: 637018 - DNA, 19 bp, Mus musculus
  siRNA target sequence for Plxna2 (NM_008882.1,4965-4983).
ccccattgacgctattact

SEQ ID NO: 637019 - DNA, 19 bp, Mus musculus
  siRNA target sequence for Plxna2 (NM_008882.1,5087-5105).
cagagatcccagtgaaagt

SEQ ID NO: 637020 - DNA, 19 bp, Mus musculus
  siRNA target sequence for Plxna2 (NM_008882.1,5142-5160).
gatcctcgatgccgtatat

SEQ ID NO: 637021 - DNA, 19 bp, Mus musculus
  siRNA target sequence for Plxna2 (NM_008882.1,5146-5164).
ctcgatgccgtatataaga

SEQ ID NO: 637022 - DNA, 19 bp, Mus musculus
  siRNA target sequence for Plxna2 (NM_008882.1,5148-5166).
cgatgccgtatataagaat

SEQ ID NO: 637023 - DNA, 19 bp, Mus musculus
  siRNA target sequence for Plxna2 (NM_008882.1,5241-5259).
gttgcaggacgaagacatt

SEQ ID NO: 637024 - DNA, 19 bp, Mus musculus
  siRNA target sequence for Plxna2 (NM_008882.1,5290-5308).
cttaacacactgatgcatt

SEQ ID NO: 637025 - DNA, 19 bp, Mus musculus
  siRNA target sequence for Plxna2 (NM_008882.1,5385-5403).
catctctcggacatccatt

SEQ ID NO: 637026 - DNA, 19 bp, Mus musculus
  siRNA target sequence for Plxna2 (NM_008882.1,5394-5412).
gacatccattagcagatat

SEQ ID NO: 637027 - DNA, 19 bp, Mus musculus
  siRNA target sequence for Plxna2 (NM_008882.1,5396-5414).
catccattagcagatatga

SEQ ID NO: 637028 - DNA, 19 bp, Mus musculus
  siRNA target sequence for Plxna2 (NM_008882.1,5952-5970).
caaggatatccccagttat

SEQ ID NO: 637029 - DNA, 19 bp, Mus musculus
  siRNA target sequence for Plxna2 (NM_008882.1,5956-5974).
gatatccccagttataaga

SEQ ID NO: 637030 - DNA, 19 bp, Mus musculus
  siRNA target sequence for Plxna2 (NM_008882.1,6071-6089).
ctacagagttcaatatgct

SEQ ID NO: 637031 - DNA, 19 bp, Mus musculus
  siRNA target sequence for Plxna2 (NM_008882.1,6092-6110).
gcgccctcaacgagatcta

SEQ ID NO: 637032 - DNA, 19 bp, Mus musculus
  siRNA target sequence for Plxna2 (NM_008882.1,6097-6115).
ctcaacgagatctactcat

SEQ ID NO: 637033 - DNA, 19 bp, Mus musculus
  siRNA target sequence for Plxna2 (NM_008882.1,6103-6121).
gagatctactcatatgtca

SEQ ID NO: 637034 - DNA, 19 bp, Mus musculus
  siRNA target sequence for Plxna3 (NM_008883.1,269-287).
gactggggaggtgtttgta

SEQ ID NO: 637035 - DNA, 19 bp, Mus musculus
  siRNA target sequence for Plxna3 (NM_008883.1,289-307).
gtgccgtgaatcgagtttt

SEQ ID NO: 637036 - DNA, 19 bp, Mus musculus
  siRNA target sequence for Plxna3 (NM_008883.1,291-309).
gccgtgaatcgagttttca

SEQ ID NO: 637037 - DNA, 19 bp, Mus musculus
  siRNA target sequence for Plxna3 (NM_008883.1,292-310).
ccgtgaatcgagttttcaa

SEQ ID NO: 637038 - DNA, 19 bp, Mus musculus
  siRNA target sequence for Plxna3 (NM_008883.1,624-642).
caggggcctagcaagttgt

SEQ ID NO: 637039 - DNA, 19 bp, Mus musculus
  siRNA target sequence for Plxna3 (NM_008883.1,626-644).
ggggcctagcaagttgttt

SEQ ID NO: 637040 - DNA, 19 bp, Mus musculus
  siRNA target sequence for Plxna3 (NM_008883.1,714-732).
gaggacagtggagatatgt

SEQ ID NO: 637041 - DNA, 19 bp, Mus musculus
  siRNA target sequence for Plxna3 (NM_008883.1,843-861).
gcctccttcgtgtacttct

SEQ ID NO: 637042 - DNA, 19 bp, Mus musculus
  siRNA target sequence for Plxna3 (NM_008883.1,897-915).
gatacagcaggcgagaaat

SEQ ID NO: 637043 - DNA, 19 bp, Mus musculus
  siRNA target sequence for Plxna3 (NM_008883.1,901-919).
cagcaggcgagaaattctt

SEQ ID NO: 637044 - DNA, 19 bp, Mus musculus
  siRNA target sequence for Plxna3 (NM_008883.1,906-924).
ggcgagaaattcttcacat

SEQ ID NO: 637045 - DNA, 19 bp, Mus musculus
  siRNA target sequence for Plxna3 (NM_008883.1,955-973).
cagagttctactcttatgt

SEQ ID NO: 637046 - DNA, 19 bp, Mus musculus
  siRNA target sequence for Plxna3 (NM_008883.1,1239-1257).
ctaccctggctactgaata

SEQ ID NO: 637047 - DNA, 19 bp, Mus musculus
  siRNA target sequence for Plxna3 (NM_008883.1,1243-1261).
cctggctactgaataagga

SEQ ID NO: 637048 - DNA, 19 bp, Mus musculus
  siRNA target sequence for Plxna3 (NM_008883.1,1437-1455).
ggtacacgcagcggtaatt

SEQ ID NO: 637049 - DNA, 19 bp, Mus musculus
  siRNA target sequence for Plxna3 (NM_008883.1,1438-1456).
gtacacgcagcggtaattt

SEQ ID NO: 637050 - DNA, 19 bp, Mus musculus
  siRNA target sequence for Plxna3 (NM_008883.1,1441-1459).
cacgcagcggtaatttgaa

SEQ ID NO: 637051 - DNA, 19 bp, Mus musculus
  siRNA target sequence for Plxna3 (NM_008883.1,1443-1461).
cgcagcggtaatttgaaga

SEQ ID NO: 637052 - DNA, 19 bp, Mus musculus
  siRNA target sequence for Plxna3 (NM_008883.1,1444-1462).
gcagcggtaatttgaagaa

SEQ ID NO: 637053 - DNA, 19 bp, Mus musculus
  siRNA target sequence for Plxna3 (NM_008883.1,1480-1498).
ctcaggatgcccagctata

SEQ ID NO: 637054 - DNA, 19 bp, Mus musculus
  siRNA target sequence for Plxna3 (NM_008883.1,1484-1502).
ggatgcccagctatatgaa

SEQ ID NO: 637055 - DNA, 19 bp, Mus musculus
  siRNA target sequence for Plxna3 (NM_008883.1,1485-1503).
gatgcccagctatatgaaa

SEQ ID NO: 637056 - DNA, 19 bp, Mus musculus
  siRNA target sequence for Plxna3 (NM_008883.1,1555-1573).
ctgaccaccgacacatcta

SEQ ID NO: 637057 - DNA, 19 bp, Mus musculus
  siRNA target sequence for Plxna3 (NM_008883.1,1772-1790).
gcgggtccgtcccaataat

SEQ ID NO: 637058 - DNA, 19 bp, Mus musculus
  siRNA target sequence for Plxna3 (NM_008883.1,1774-1792).
gggtccgtcccaataatgt

SEQ ID NO: 637059 - DNA, 19 bp, Mus musculus
  siRNA target sequence for Plxna3 (NM_008883.1,1776-1794).
gtccgtcccaataatgtgt

SEQ ID NO: 637060 - DNA, 19 bp, Mus musculus
  siRNA target sequence for Plxna3 (NM_008883.1,1908-1926).
ccctctggagagttacgat

SEQ ID NO: 637061 - DNA, 19 bp, Mus musculus
  siRNA target sequence for Plxna3 (NM_008883.1,1968-1986).
gggcatggggccactcata

SEQ ID NO: 637062 - DNA, 19 bp, Mus musculus
  siRNA target sequence for Plxna3 (NM_008883.1,2035-2053).
gggttgactttgtcttcta

SEQ ID NO: 637063 - DNA, 19 bp, Mus musculus
  siRNA target sequence for Plxna3 (NM_008883.1,2064-2082).
gccctccagtcgtgtatgt

SEQ ID NO: 637064 - DNA, 19 bp, Mus musculus
  siRNA target sequence for Plxna3 (NM_008883.1,2103-2121).
ccctgccactggtgtaagt

SEQ ID NO: 637065 - DNA, 19 bp, Mus musculus
  siRNA target sequence for Plxna3 (NM_008883.1,2104-2122).
cctgccactggtgtaagta

SEQ ID NO: 637066 - DNA, 19 bp, Mus musculus
  siRNA target sequence for Plxna3 (NM_008883.1,2283-2301).
cagtccggacagaagaatt

SEQ ID NO: 637067 - DNA, 19 bp, Mus musculus
  siRNA target sequence for Plxna3 (NM_008883.1,2285-2303).
gtccggacagaagaattat

SEQ ID NO: 637068 - DNA, 19 bp, Mus musculus
  siRNA target sequence for Plxna3 (NM_008883.1,2287-2305).
ccggacagaagaattatga

SEQ ID NO: 637069 - DNA, 19 bp, Mus musculus
  siRNA target sequence for Plxna3 (NM_008883.1,2343-2361).
cctgcagtgcgctttaaca

SEQ ID NO: 637070 - DNA, 19 bp, Mus musculus
  siRNA target sequence for Plxna3 (NM_008883.1,2381-2399).
gaatgcctcgtacttctat

SEQ ID NO: 637071 - DNA, 19 bp, Mus musculus
  siRNA target sequence for Plxna3 (NM_008883.1,2451-2469).
ggagatttccccattgata

SEQ ID NO: 637072 - DNA, 19 bp, Mus musculus
  siRNA target sequence for Plxna3 (NM_008883.1,2452-2470).
gagatttccccattgataa

SEQ ID NO: 637073 - DNA, 19 bp, Mus musculus
  siRNA target sequence for Plxna3 (NM_008883.1,2479-2497).
gcttccgagcccttcttta

SEQ ID NO: 637074 - DNA, 19 bp, Mus musculus
  siRNA target sequence for Plxna3 (NM_008883.1,2484-2502).
cgagcccttctttacaagt

SEQ ID NO: 637075 - DNA, 19 bp, Mus musculus
  siRNA target sequence for Plxna3 (NM_008883.1,2541-2559).
gctgatccccgattcaact

SEQ ID NO: 637076 - DNA, 19 bp, Mus musculus
  siRNA target sequence for Plxna3 (NM_008883.1,2666-2684).
ccgaatcacccagattcat

SEQ ID NO: 637077 - DNA, 19 bp, Mus musculus
  siRNA target sequence for Plxna3 (NM_008883.1,2792-2810).
ctccattcccaccgaatat

SEQ ID NO: 637078 - DNA, 19 bp, Mus musculus
  siRNA target sequence for Plxna3 (NM_008883.1,2818-2836).
ctgaaaggatcgtatgtga

SEQ ID NO: 637079 - DNA, 19 bp, Mus musculus
  siRNA target sequence for Plxna3 (NM_008883.1,2992-3010).
gaggcactcggcttaccat

SEQ ID NO: 637080 - DNA, 19 bp, Mus musculus
  siRNA target sequence for Plxna3 (NM_008883.1,3002-3020).
gcttaccatctctggaatt

SEQ ID NO: 637081 - DNA, 19 bp, Mus musculus
  siRNA target sequence for Plxna3 (NM_008883.1,3003-3021).
cttaccatctctggaattt

SEQ ID NO: 637082 - DNA, 19 bp, Mus musculus
  siRNA target sequence for Plxna3 (NM_008883.1,3035-3053).
cagcagggtcacagtgatt

SEQ ID NO: 637083 - DNA, 19 bp, Mus musculus
  siRNA target sequence for Plxna3 (NM_008883.1,3037-3055).
gcagggtcacagtgattat

SEQ ID NO: 637084 - DNA, 19 bp, Mus musculus
  siRNA target sequence for Plxna3 (NM_008883.1,3038-3056).
cagggtcacagtgattata

SEQ ID NO: 637085 - DNA, 19 bp, Mus musculus
  siRNA target sequence for Plxna3 (NM_008883.1,3091-3109).
ccgaggcaatcgtgtgtat

SEQ ID NO: 637086 - DNA, 19 bp, Mus musculus
  siRNA target sequence for Plxna3 (NM_008883.1,3093-3111).
gaggcaatcgtgtgtatct

SEQ ID NO: 637087 - DNA, 19 bp, Mus musculus
  siRNA target sequence for Plxna3 (NM_008883.1,3095-3113).
ggcaatcgtgtgtatctca

SEQ ID NO: 637088 - DNA, 19 bp, Mus musculus
  siRNA target sequence for Plxna3 (NM_008883.1,3319-3337).
ccaagtaccgtggtattga

SEQ ID NO: 637089 - DNA, 19 bp, Mus musculus
  siRNA target sequence for Plxna3 (NM_008883.1,3330-3348).
ggtattgagaccactaaca

SEQ ID NO: 637090 - DNA, 19 bp, Mus musculus
  siRNA target sequence for Plxna3 (NM_008883.1,3362-3380).
caacgacactgcaatgcta

SEQ ID NO: 637091 - DNA, 19 bp, Mus musculus
  siRNA target sequence for Plxna3 (NM_008883.1,3541-3559).
cctctggtgtgctagatgt

SEQ ID NO: 637092 - DNA, 19 bp, Mus musculus
  siRNA target sequence for Plxna3 (NM_008883.1,3564-3582).
cctggttcacatgttgtat

SEQ ID NO: 637093 - DNA, 19 bp, Mus musculus
  siRNA target sequence for Plxna3 (NM_008883.1,3565-3583).
ctggttcacatgttgtatt

SEQ ID NO: 637094 - DNA, 19 bp, Mus musculus
  siRNA target sequence for Plxna3 (NM_008883.1,3663-3681).
gcactaactgtctcagata

SEQ ID NO: 637095 - DNA, 19 bp, Mus musculus
  siRNA target sequence for Plxna3 (NM_008883.1,3866-3884).
cgcctacaagcgtaagact

SEQ ID NO: 637096 - DNA, 19 bp, Mus musculus
  siRNA target sequence for Plxna3 (NM_008883.1,3888-3906).
gatgcagaccgcacactta

SEQ ID NO: 637097 - DNA, 19 bp, Mus musculus
  siRNA target sequence for Plxna3 (NM_008883.1,3910-3928).
ggcttcagctacaaatgga

SEQ ID NO: 637098 - DNA, 19 bp, Mus musculus
  siRNA target sequence for Plxna3 (NM_008883.1,3980-3998).
gcagactgatatcaatgaa

SEQ ID NO: 637099 - DNA, 19 bp, Mus musculus
  siRNA target sequence for Plxna3 (NM_008883.1,4127-4145).
gaaggccctgcgtctattt

SEQ ID NO: 637100 - DNA, 19 bp, Mus musculus
  siRNA target sequence for Plxna3 (NM_008883.1,4130-4148).
ggccctgcgtctatttgga

SEQ ID NO: 637101 - DNA, 19 bp, Mus musculus
  siRNA target sequence for Plxna3 (NM_008883.1,4262-4280).
gcagagccggcttgactat

SEQ ID NO: 637102 - DNA, 19 bp, Mus musculus
  siRNA target sequence for Plxna3 (NM_008883.1,4392-4410).
ctcaccaactggttcacat

SEQ ID NO: 637103 - DNA, 19 bp, Mus musculus
  siRNA target sequence for Plxna3 (NM_008883.1,4765-4783).
gaatcatcctccaagatga

SEQ ID NO: 637104 - DNA, 19 bp, Mus musculus
  siRNA target sequence for Plxna3 (NM_008883.1,4847-4865).
gactgatggttctttagta

SEQ ID NO: 637105 - DNA, 19 bp, Mus musculus
  siRNA target sequence for Plxna3 (NM_008883.1,4867-4885).
cactggtgcccaaacaagt

SEQ ID NO: 637106 - DNA, 19 bp, Mus musculus
  siRNA target sequence for Plxna3 (NM_008883.1,4916-4934).
cttcacccggtcacttagt

SEQ ID NO: 637107 - DNA, 19 bp, Mus musculus
  siRNA target sequence for Plxna3 (NM_008883.1,5330-5348).
gatcaagaatccgcaattt

SEQ ID NO: 637108 - DNA, 19 bp, Mus musculus
  siRNA target sequence for Plxna3 (NM_008883.1,5336-5354).
gaatccgcaatttgtgttt

SEQ ID NO: 637109 - DNA, 19 bp, Mus musculus
  siRNA target sequence for Plxna3 (NM_008883.1,5375-5393).
cacagacgcctgtttgtca

SEQ ID NO: 637110 - DNA, 19 bp, Mus musculus
  siRNA target sequence for Plxna3 (NM_008883.1,5484-5502).
gatattcccaattacaaga

SEQ ID NO: 637111 - DNA, 19 bp, Mus musculus
  siRNA target sequence for Plxna3 (NM_008883.1,5585-5603).
gtcccgcctccatgctaat

SEQ ID NO: 637112 - DNA, 19 bp, Mus musculus
  siRNA target sequence for Plxna3 (NM_008883.1,5590-5608).
gcctccatgctaatgactt

SEQ ID NO: 637113 - DNA, 19 bp, Mus musculus
  siRNA target sequence for Plxna3 (NM_008883.1,5623-5641).
cactcagcgagctctactt

SEQ ID NO: 637114 - DNA, 19 bp, Mus musculus
  siRNA target sequence for Plxnb1 (NM_172775.1,241-259).
ccacaggtaccctctatgt

SEQ ID NO: 637115 - DNA, 19 bp, Mus musculus
  siRNA target sequence for Plxnb1 (NM_172775.1,242-260).
cacaggtaccctctatgta

SEQ ID NO: 637116 - DNA, 19 bp, Mus musculus
  siRNA target sequence for Plxnb1 (NM_172775.1,379-397).
cccaagcccagcctactaa

SEQ ID NO: 637117 - DNA, 19 bp, Mus musculus
  siRNA target sequence for Plxnb1 (NM_172775.1,381-399).
caagcccagcctactaaca

SEQ ID NO: 637118 - DNA, 19 bp, Mus musculus
  siRNA target sequence for Plxnb1 (NM_172775.1,533-551).
ccagtatgtggctgcaaat

SEQ ID NO: 637119 - DNA, 19 bp, Mus musculus
  siRNA target sequence for Plxnb1 (NM_172775.1,878-896).
ccagcactactactcttat

SEQ ID NO: 637120 - DNA, 19 bp, Mus musculus
  siRNA target sequence for Plxnb1 (NM_172775.1,922-940).
gtggtcgttacggtcttat

SEQ ID NO: 637121 - DNA, 19 bp, Mus musculus
  siRNA target sequence for Plxnb1 (NM_172775.1,925-943).
gtcgttacggtcttatcca

SEQ ID NO: 637122 - DNA, 19 bp, Mus musculus
  siRNA target sequence for Plxnb1 (NM_172775.1,977-995).
ccgtggggacgtactcttt

SEQ ID NO: 637123 - DNA, 19 bp, Mus musculus
  siRNA target sequence for Plxnb1 (NM_172775.1,1034-1052).
gcccctgtcagcatctact

SEQ ID NO: 637124 - DNA, 19 bp, Mus musculus
  siRNA target sequence for Plxnb1 (NM_172775.1,1103-1121).
ccagcttgctaattacact

SEQ ID NO: 637125 - DNA, 19 bp, Mus musculus
  siRNA target sequence for Plxnb1 (NM_172775.1,1118-1136).
cactcgagatgcctgttat

SEQ ID NO: 637126 - DNA, 19 bp, Mus musculus
  siRNA target sequence for Plxnb1 (NM_172775.1,1352-1370).
ggatggacacactattgct

SEQ ID NO: 637127 - DNA, 19 bp, Mus musculus
  siRNA target sequence for Plxnb1 (NM_172775.1,1353-1371).
gatggacacactattgctt

SEQ ID NO: 637128 - DNA, 19 bp, Mus musculus
  siRNA target sequence for Plxnb1 (NM_172775.1,1394-1412).
gttgcatagggtctactta

SEQ ID NO: 637129 - DNA, 19 bp, Mus musculus
  siRNA target sequence for Plxnb1 (NM_172775.1,1429-1447).
ctgccccatattctaaaca

SEQ ID NO: 637130 - DNA, 19 bp, Mus musculus
  siRNA target sequence for Plxnb1 (NM_172775.1,1472-1490).
gaacagagatcttaccttt

SEQ ID NO: 637131 - DNA, 19 bp, Mus musculus
  siRNA target sequence for Plxnb1 (NM_172775.1,1495-1513).
gtacctttgagcatctcta

SEQ ID NO: 637132 - DNA, 19 bp, Mus musculus
  siRNA target sequence for Plxnb1 (NM_172775.1,1590-1608).
gctcacagggacccttatt

SEQ ID NO: 637133 - DNA, 19 bp, Mus musculus
  siRNA target sequence for Plxnb1 (NM_172775.1,1726-1744).
ccgtgagccctgccaatat

SEQ ID NO: 637134 - DNA, 19 bp, Mus musculus
  siRNA target sequence for Plxnb1 (NM_172775.1,1799-1817).
ctggccaggggagtcatat

SEQ ID NO: 637135 - DNA, 19 bp, Mus musculus
  siRNA target sequence for Plxnb1 (NM_172775.1,1801-1819).
ggccaggggagtcatattt

SEQ ID NO: 637136 - DNA, 19 bp, Mus musculus
  siRNA target sequence for Plxnb1 (NM_172775.1,1803-1821).
ccaggggagtcatatttct

SEQ ID NO: 637137 - DNA, 19 bp, Mus musculus
  siRNA target sequence for Plxnb1 (NM_172775.1,1811-1829).
gtcatatttctgctacttt

SEQ ID NO: 637138 - DNA, 19 bp, Mus musculus
  siRNA target sequence for Plxnb1 (NM_172775.1,2572-2590).
ctgttccagacactacttt

SEQ ID NO: 637139 - DNA, 19 bp, Mus musculus
  siRNA target sequence for Plxnb1 (NM_172775.1,3056-3074).
gcatcagttcagctatgaa

SEQ ID NO: 637140 - DNA, 19 bp, Mus musculus
  siRNA target sequence for Plxnb1 (NM_172775.1,3360-3378).
ggcacccgtgtcactatca

SEQ ID NO: 637141 - DNA, 19 bp, Mus musculus
  siRNA target sequence for Plxnb1 (NM_172775.1,3464-3482).
gtatgatgtctctagtagt

SEQ ID NO: 637142 - DNA, 19 bp, Mus musculus
  siRNA target sequence for Plxnb1 (NM_172775.1,3580-3598).
cctatcaggatccaaaagt

SEQ ID NO: 637143 - DNA, 19 bp, Mus musculus
  siRNA target sequence for Plxnb1 (NM_172775.1,3828-3846).
cttcagcacggccaattca

SEQ ID NO: 637144 - DNA, 19 bp, Mus musculus
  siRNA target sequence for Plxnb1 (NM_172775.1,3833-3851).
gcacggccaattcaagtat

SEQ ID NO: 637145 - DNA, 19 bp, Mus musculus
  siRNA target sequence for Plxnb1 (NM_172775.1,3836-3854).
cggccaattcaagtataca

SEQ ID NO: 637146 - DNA, 19 bp, Mus musculus
  siRNA target sequence for Plxnb1 (NM_172775.1,3837-3855).
ggccaattcaagtatacat

SEQ ID NO: 637147 - DNA, 19 bp, Mus musculus
  siRNA target sequence for Plxnb1 (NM_172775.1,3839-3857).
ccaattcaagtatacatca

SEQ ID NO: 637148 - DNA, 19 bp, Mus musculus
  siRNA target sequence for Plxnb1 (NM_172775.1,3882-3900).
ccctccaagagcttcttca

SEQ ID NO: 637149 - DNA, 19 bp, Mus musculus
  siRNA target sequence for Plxnb1 (NM_172775.1,3899-3917).
cagcggaggacgtgagata

SEQ ID NO: 637150 - DNA, 19 bp, Mus musculus
  siRNA target sequence for Plxnb1 (NM_172775.1,4014-4032).
cacgtggtccctgagaaat

SEQ ID NO: 637151 - DNA, 19 bp, Mus musculus
  siRNA target sequence for Plxnb1 (NM_172775.1,4286-4304).
ggacctcgccatgtctaaa

SEQ ID NO: 637152 - DNA, 19 bp, Mus musculus
  siRNA target sequence for Plxnb1 (NM_172775.1,4289-4307).
cctcgccatgtctaaagaa

SEQ ID NO: 637153 - DNA, 19 bp, Mus musculus
  siRNA target sequence for Plxnb1 (NM_172775.1,4334-4352).
gccctgcgtggtaaagaca

SEQ ID NO: 637154 - DNA, 19 bp, Mus musculus
  siRNA target sequence for Plxnb1 (NM_172775.1,4441-4459).
ctgagttcacggtacagat

SEQ ID NO: 637155 - DNA, 19 bp, Mus musculus
  siRNA target sequence for Plxnb1 (NM_172775.1,4671-4689).
gtacgggaccgctgtaaga

SEQ ID NO: 637156 - DNA, 19 bp, Mus musculus
  siRNA target sequence for Plxnb1 (NM_172775.1,4881-4899).
ctctccaacctgctaaaca

SEQ ID NO: 637157 - DNA, 19 bp, Mus musculus
  siRNA target sequence for Plxnb1 (NM_172775.1,4905-4923).
ctcttccttaccaagttca

SEQ ID NO: 637158 - DNA, 19 bp, Mus musculus
  siRNA target sequence for Plxnb1 (NM_172775.1,5101-5119).
cagagaccgtggtagaaaa

SEQ ID NO: 637159 - DNA, 19 bp, Mus musculus
  siRNA target sequence for Plxnb1 (NM_172775.1,5172-5190).
gtgggagagcctctgtata

SEQ ID NO: 637160 - DNA, 19 bp, Mus musculus
  siRNA target sequence for Plxnb1 (NM_172775.1,5176-5194).
gagagcctctgtatatgct

SEQ ID NO: 637161 - DNA, 19 bp, Mus musculus
  siRNA target sequence for Plxnb1 (NM_172775.1,5195-5213).
cttcagagggattaagcat

SEQ ID NO: 637162 - DNA, 19 bp, Mus musculus
  siRNA target sequence for Plxnb1 (NM_172775.1,5464-5482).
cttgcaccttggatgttga

SEQ ID NO: 637163 - DNA, 19 bp, Mus musculus
  siRNA target sequence for Plxnb1 (NM_172775.1,5552-5570).
gtggaggcgtctgaataca

SEQ ID NO: 637164 - DNA, 19 bp, Mus musculus
  siRNA target sequence for Plxnb1 (NM_172775.1,5554-5572).
ggaggcgtctgaatacact

SEQ ID NO: 637165 - DNA, 19 bp, Mus musculus
  siRNA target sequence for Plxnb1 (NM_172775.1,5562-5580).
ctgaatacactgcaacatt

SEQ ID NO: 637166 - DNA, 19 bp, Mus musculus
  siRNA target sequence for Plxnb1 (NM_172775.1,6012-6030).
ctaaggttctggatcaaca

SEQ ID NO: 637167 - DNA, 19 bp, Mus musculus
  siRNA target sequence for Plxnb1 (NM_172775.1,6016-6034).
ggttctggatcaacatcat

SEQ ID NO: 637168 - DNA, 19 bp, Mus musculus
  siRNA target sequence for Plxnb1 (NM_172775.1,6184-6202).
gagatattccccgttacaa

SEQ ID NO: 637169 - DNA, 19 bp, Mus musculus
  siRNA target sequence for Plxnb1 (NM_172775.1,6329-6347).
gcatgaactctacaagtat

SEQ ID NO: 637170 - DNA, 19 bp, Mus musculus
  siRNA target sequence for Plxnb1 (NM_172775.1,6330-6348).
catgaactctacaagtata

SEQ ID NO: 637171 - DNA, 19 bp, Mus musculus
  siRNA target sequence for Plxnb3 (NM_019587.1,133-151).
ccagatcagggcaaactct

SEQ ID NO: 637172 - DNA, 19 bp, Mus musculus
  siRNA target sequence for Plxnb3 (NM_019587.1,134-152).
cagatcagggcaaactcta

SEQ ID NO: 637173 - DNA, 19 bp, Mus musculus
  siRNA target sequence for Plxnb3 (NM_019587.1,279-297).
ggcccagctcactgacaat

SEQ ID NO: 637174 - DNA, 19 bp, Mus musculus
  siRNA target sequence for Plxnb3 (NM_019587.1,389-407).
gggatgtgactcaagtgtt

SEQ ID NO: 637175 - DNA, 19 bp, Mus musculus
  siRNA target sequence for Plxnb3 (NM_019587.1,676-694).
cactctgcctactttgtgt

SEQ ID NO: 637176 - DNA, 19 bp, Mus musculus
  siRNA target sequence for Plxnb3 (NM_019587.1,760-778).
gatgtcaacctttattcct

SEQ ID NO: 637177 - DNA, 19 bp, Mus musculus
  siRNA target sequence for Plxnb3 (NM_019587.1,843-861).
cactttgctaggtgcattt

SEQ ID NO: 637178 - DNA, 19 bp, Mus musculus
  siRNA target sequence for Plxnb3 (NM_019587.1,937-955).
gccaggcgactttgctata

SEQ ID NO: 637179 - DNA, 19 bp, Mus musculus
  siRNA target sequence for Plxnb3 (NM_019587.1,939-957).
caggcgactttgctatact

SEQ ID NO: 637180 - DNA, 19 bp, Mus musculus
  siRNA target sequence for Plxnb3 (NM_019587.1,942-960).
gcgactttgctatactact

SEQ ID NO: 637181 - DNA, 19 bp, Mus musculus
  siRNA target sequence for Plxnb3 (NM_019587.1,1013-1031).
catcccgttgcgtcacttt

SEQ ID NO: 637182 - DNA, 19 bp, Mus musculus
  siRNA target sequence for Plxnb3 (NM_019587.1,1037-1055).
ctgactcccccgagtcata

SEQ ID NO: 637183 - DNA, 19 bp, Mus musculus
  siRNA target sequence for Plxnb3 (NM_019587.1,1199-1217).
cccaaggccagctacataa

SEQ ID NO: 637184 - DNA, 19 bp, Mus musculus
  siRNA target sequence for Plxnb3 (NM_019587.1,1209-1227).
gctacataaggtctttcta

SEQ ID NO: 637185 - DNA, 19 bp, Mus musculus
  siRNA target sequence for Plxnb3 (NM_019587.1,1235-1253).
cccatggccaggtatacca

SEQ ID NO: 637186 - DNA, 19 bp, Mus musculus
  siRNA target sequence for Plxnb3 (NM_019587.1,1236-1254).
ccatggccaggtataccat

SEQ ID NO: 637187 - DNA, 19 bp, Mus musculus
  siRNA target sequence for Plxnb3 (NM_019587.1,1237-1255).
catggccaggtataccatt

SEQ ID NO: 637188 - DNA, 19 bp, Mus musculus
  siRNA target sequence for Plxnb3 (NM_019587.1,1344-1362).
gcaggtagaccggatactt

SEQ ID NO: 637189 - DNA, 19 bp, Mus musculus
  siRNA target sequence for Plxnb3 (NM_019587.1,1407-1425).
ggccagggacccactatgt

SEQ ID NO: 637190 - DNA, 19 bp, Mus musculus
  siRNA target sequence for Plxnb3 (NM_019587.1,1607-1625).
ccctggccatggatgaata

SEQ ID NO: 637191 - DNA, 19 bp, Mus musculus
  siRNA target sequence for Plxnb3 (NM_019587.1,1694-1712).
cccctcctcaagatcagat

SEQ ID NO: 637192 - DNA, 19 bp, Mus musculus
  siRNA target sequence for Plxnb3 (NM_019587.1,1749-1767).
gcccctggccctaatgttt

SEQ ID NO: 637193 - DNA, 19 bp, Mus musculus
  siRNA target sequence for Plxnb3 (NM_019587.1,1893-1911).
gagtagccactgtatatat

SEQ ID NO: 637194 - DNA, 19 bp, Mus musculus
  siRNA target sequence for Plxnb3 (NM_019587.1,2061-2079).
cattcagaaccttcactat

SEQ ID NO: 637195 - DNA, 19 bp, Mus musculus
  siRNA target sequence for Plxnb3 (NM_019587.1,2067-2085).
gaaccttcactatttccaa

SEQ ID NO: 637196 - DNA, 19 bp, Mus musculus
  siRNA target sequence for Plxnb3 (NM_019587.1,2168-2186).
gggactctggcctcattca

SEQ ID NO: 637197 - DNA, 19 bp, Mus musculus
  siRNA target sequence for Plxnb3 (NM_019587.1,2202-2220).
gttctacccctctatgtct

SEQ ID NO: 637198 - DNA, 19 bp, Mus musculus
  siRNA target sequence for Plxnb3 (NM_019587.1,2274-2292).
ggacaatgctggtgatctt

SEQ ID NO: 637199 - DNA, 19 bp, Mus musculus
  siRNA target sequence for Plxnb3 (NM_019587.1,2287-2305).
gatcttcatgtgactctat

SEQ ID NO: 637200 - DNA, 19 bp, Mus musculus
  siRNA target sequence for Plxnb3 (NM_019587.1,2447-2465).
ctatacccagcattgatgt

SEQ ID NO: 637201 - DNA, 19 bp, Mus musculus
  siRNA target sequence for Plxnb3 (NM_019587.1,2529-2547).
gggccaggcctttaatgat

SEQ ID NO: 637202 - DNA, 19 bp, Mus musculus
  siRNA target sequence for Plxnb3 (NM_019587.1,2531-2549).
gccaggcctttaatgatgt

SEQ ID NO: 637203 - DNA, 19 bp, Mus musculus
  siRNA target sequence for Plxnb3 (NM_019587.1,2607-2625).
catctctgctcggattgta

SEQ ID NO: 637204 - DNA, 19 bp, Mus musculus
  siRNA target sequence for Plxnb3 (NM_019587.1,2612-2630).
ctgctcggattgtatgtgt

SEQ ID NO: 637205 - DNA, 19 bp, Mus musculus
  siRNA target sequence for Plxnb3 (NM_019587.1,2663-2681).
cagtccaagtggccattaa

SEQ ID NO: 637206 - DNA, 19 bp, Mus musculus
  siRNA target sequence for Plxnb3 (NM_019587.1,2665-2683).
gtccaagtggccattaaga

SEQ ID NO: 637207 - DNA, 19 bp, Mus musculus
  siRNA target sequence for Plxnb3 (NM_019587.1,2686-2704).
cgtcctcctggcatctcaa

SEQ ID NO: 637208 - DNA, 19 bp, Mus musculus
  siRNA target sequence for Plxnb3 (NM_019587.1,2696-2714).
gcatctcaacccagaactt

SEQ ID NO: 637209 - DNA, 19 bp, Mus musculus
  siRNA target sequence for Plxnb3 (NM_019587.1,2786-2804).
ccatccatgggcagtatct

SEQ ID NO: 637210 - DNA, 19 bp, Mus musculus
  siRNA target sequence for Plxnb3 (NM_019587.1,2961-2979).
gctcaccaccccttttcga

SEQ ID NO: 637211 - DNA, 19 bp, Mus musculus
  siRNA target sequence for Plxnb3 (NM_019587.1,3303-3321).
cccaaagcgagtcttcttt

SEQ ID NO: 637212 - DNA, 19 bp, Mus musculus
  siRNA target sequence for Plxnb3 (NM_019587.1,3330-3348).
caacatgcaagtagacttt

SEQ ID NO: 637213 - DNA, 19 bp, Mus musculus
  siRNA target sequence for Plxnb3 (NM_019587.1,3410-3428).
gtcatgaggggattactca

SEQ ID NO: 637214 - DNA, 19 bp, Mus musculus
  siRNA target sequence for Plxnb3 (NM_019587.1,3446-3464).
caggccatgtcctagatgt

SEQ ID NO: 637215 - DNA, 19 bp, Mus musculus
  siRNA target sequence for Plxnb3 (NM_019587.1,3504-3522).
ggtgcaggtgcatattgga

SEQ ID NO: 637216 - DNA, 19 bp, Mus musculus
  siRNA target sequence for Plxnb3 (NM_019587.1,3795-3813).
gaaggccttgcgagactat

SEQ ID NO: 637217 - DNA, 19 bp, Mus musculus
  siRNA target sequence for Plxnb3 (NM_019587.1,3799-3817).
gccttgcgagactatcaga

SEQ ID NO: 637218 - DNA, 19 bp, Mus musculus
  siRNA target sequence for Plxnb3 (NM_019587.1,3800-3818).
ccttgcgagactatcagaa

SEQ ID NO: 637219 - DNA, 19 bp, Mus musculus
  siRNA target sequence for Plxnb3 (NM_019587.1,4064-4082).
cacaactctccaatttgct

SEQ ID NO: 637220 - DNA, 19 bp, Mus musculus
  siRNA target sequence for Plxnb3 (NM_019587.1,4155-4173).
ctgccatgtggcttcacta

SEQ ID NO: 637221 - DNA, 19 bp, Mus musculus
  siRNA target sequence for Plxnb3 (NM_019587.1,4158-4176).
ccatgtggcttcactactt

SEQ ID NO: 637222 - DNA, 19 bp, Mus musculus
  siRNA target sequence for Plxnb3 (NM_019587.1,4189-4207).
cacagcaagcttgagtatt

SEQ ID NO: 637223 - DNA, 19 bp, Mus musculus
  siRNA target sequence for Plxnb3 (NM_019587.1,4334-4352).
gtctctacaccttcttgaa

SEQ ID NO: 637224 - DNA, 19 bp, Mus musculus
  siRNA target sequence for Plxnb3 (NM_019587.1,4381-4399).
cttttccgagccatcaagt

SEQ ID NO: 637225 - DNA, 19 bp, Mus musculus
  siRNA target sequence for Plxnb3 (NM_019587.1,4431-4449).
gacaggcaaggcaaaacga

SEQ ID NO: 637226 - DNA, 19 bp, Mus musculus
  siRNA target sequence for Plxnb3 (NM_019587.1,4440-4458).
ggcaaaacgaactctgaat

SEQ ID NO: 637227 - DNA, 19 bp, Mus musculus
  siRNA target sequence for Plxnb3 (NM_019587.1,4442-4460).
caaaacgaactctgaatga

SEQ ID NO: 637228 - DNA, 19 bp, Mus musculus
  siRNA target sequence for Plxnb3 (NM_019587.1,4661-4679).
cagtgcactccctagatct

SEQ ID NO: 637229 - DNA, 19 bp, Mus musculus
  siRNA target sequence for Plxnb3 (NM_019587.1,4733-4751).
cctctgtgactcaaaacca

SEQ ID NO: 637230 - DNA, 19 bp, Mus musculus
  siRNA target sequence for Plxnb3 (NM_019587.1,4796-4814).
gagcaacagtggtactcat

SEQ ID NO: 637231 - DNA, 19 bp, Mus musculus
  siRNA target sequence for Plxnb3 (NM_019587.1,5022-5040).
cattcctgaaatctatctt

SEQ ID NO: 637232 - DNA, 19 bp, Mus musculus
  siRNA target sequence for Plxnb3 (NM_019587.1,5038-5056).
cttactcgcttactttcaa

SEQ ID NO: 637233 - DNA, 19 bp, Mus musculus
  siRNA target sequence for Plxnb3 (NM_019587.1,5042-5060).
ctcgcttactttcaatgaa

SEQ ID NO: 637234 - DNA, 19 bp, Mus musculus
  siRNA target sequence for Plxnb3 (NM_019587.1,5097-5115).
ggccattcttagcatgaat

SEQ ID NO: 637235 - DNA, 19 bp, Mus musculus
  siRNA target sequence for Plxnb3 (NM_019587.1,5120-5138).
ctgtgcctattgctgttaa

SEQ ID NO: 637236 - DNA, 19 bp, Mus musculus
  siRNA target sequence for Plxnb3 (NM_019587.1,5122-5140).
gtgcctattgctgttaagt

SEQ ID NO: 637237 - DNA, 19 bp, Mus musculus
  siRNA target sequence for Plxnb3 (NM_019587.1,5132-5150).
ctgttaagtacctatttga

SEQ ID NO: 637238 - DNA, 19 bp, Mus musculus
  siRNA target sequence for Plxnb3 (NM_019587.1,5134-5152).
gttaagtacctatttgact

SEQ ID NO: 637239 - DNA, 19 bp, Mus musculus
  siRNA target sequence for Plxnb3 (NM_019587.1,5256-5274).
gaacccacagctcatcttt

SEQ ID NO: 637240 - DNA, 19 bp, Mus musculus
  siRNA target sequence for Plxnb3 (NM_019587.1,5320-5338).
gcacagactttcatcgatt

SEQ ID NO: 637241 - DNA, 19 bp, Mus musculus
  siRNA target sequence for Plxnb3 (NM_019587.1,5462-5480).
ctccagcaagctatcaaga

SEQ ID NO: 637242 - DNA, 19 bp, Mus musculus
  siRNA target sequence for Plxnb3 (NM_019587.1,5503-5521).
ctctctgggaattattcct

SEQ ID NO: 637243 - DNA, 19 bp, Mus musculus
  siRNA target sequence for Plxnb3 (NM_019587.1,5543-5561).
ctcttcgagaactttacaa

SEQ ID NO: 637244 - DNA, 19 bp, Mus musculus
  siRNA target sequence for Plxnb3 (NM_019587.1,5562-5580).
ccacatccacaggtattat

SEQ ID NO: 637245 - DNA, 19 bp, Mus musculus
  siRNA target sequence for Plxnb3 (NM_019587.1,5660-5678).
ccttggtggaatacaaagt

SEQ ID NO: 637246 - DNA, 19 bp, Mus musculus
  siRNA target sequence for Plxnc1 (NM_018797.1,608-626).
cggctatcgcgctcaagaa

SEQ ID NO: 637247 - DNA, 19 bp, Mus musculus
  siRNA target sequence for Plxnc1 (NM_018797.1,610-628).
gctatcgcgctcaagaaca

SEQ ID NO: 637248 - DNA, 19 bp, Mus musculus
  siRNA target sequence for Plxnc1 (NM_018797.1,1084-1102).
cgggtccagccaattgcat

SEQ ID NO: 637249 - DNA, 19 bp, Mus musculus
  siRNA target sequence for Plxnc1 (NM_018797.1,1121-1139).
ctgacctgacgtctgttta

SEQ ID NO: 637250 - DNA, 19 bp, Mus musculus
  siRNA target sequence for Plxnc1 (NM_018797.1,1181-1199).
ccggagatggccagttact

SEQ ID NO: 637251 - DNA, 19 bp, Mus musculus
  siRNA target sequence for Plxnc1 (NM_018797.1,1184-1202).
gagatggccagttactgaa

SEQ ID NO: 637252 - DNA, 19 bp, Mus musculus
  siRNA target sequence for Plxnc1 (NM_018797.1,1210-1228).
cttggtgagaatttgactt

SEQ ID NO: 637253 - DNA, 19 bp, Mus musculus
  siRNA target sequence for Plxnc1 (NM_018797.1,1233-1251).
ctgtccagaggttatttat

SEQ ID NO: 637254 - DNA, 19 bp, Mus musculus
  siRNA target sequence for Plxnc1 (NM_018797.1,1264-1282).
gaaacgcctgtgttctaca

SEQ ID NO: 637255 - DNA, 19 bp, Mus musculus
  siRNA target sequence for Plxnc1 (NM_018797.1,1419-1437).
ctggtgcctcccgttacaa

SEQ ID NO: 637256 - DNA, 19 bp, Mus musculus
  siRNA target sequence for Plxnc1 (NM_018797.1,1517-1535).
gcccgaaaattcagatact

SEQ ID NO: 637257 - DNA, 19 bp, Mus musculus
  siRNA target sequence for Plxnc1 (NM_018797.1,1595-1613).
cggagtgcgtggtgaagaa

SEQ ID NO: 637258 - DNA, 19 bp, Mus musculus
  siRNA target sequence for Plxnc1 (NM_018797.1,1683-1701).
cagcagacccagctataat

SEQ ID NO: 637259 - DNA, 19 bp, Mus musculus
  siRNA target sequence for Plxnc1 (NM_018797.1,1685-1703).
gcagacccagctataatgt

SEQ ID NO: 637260 - DNA, 19 bp, Mus musculus
  siRNA target sequence for Plxnc1 (NM_018797.1,1688-1706).
gacccagctataatgtctt

SEQ ID NO: 637261 - DNA, 19 bp, Mus musculus
  siRNA target sequence for Plxnc1 (NM_018797.1,1691-1709).
ccagctataatgtcttagt

SEQ ID NO: 637262 - DNA, 19 bp, Mus musculus
  siRNA target sequence for Plxnc1 (NM_018797.1,1692-1710).
cagctataatgtcttagtt

SEQ ID NO: 637263 - DNA, 19 bp, Mus musculus
  siRNA target sequence for Plxnc1 (NM_018797.1,1694-1712).
gctataatgtcttagttgt

SEQ ID NO: 637264 - DNA, 19 bp, Mus musculus
  siRNA target sequence for Plxnc1 (NM_018797.1,1764-1782).
caccaactgtgcgtcatta

SEQ ID NO: 637265 - DNA, 19 bp, Mus musculus
  siRNA target sequence for Plxnc1 (NM_018797.1,1809-1827).
cggctgtgcttggtgtaaa

SEQ ID NO: 637266 - DNA, 19 bp, Mus musculus
  siRNA target sequence for Plxnc1 (NM_018797.1,1820-1838).
ggtgtaaacgggacaagaa

SEQ ID NO: 637267 - DNA, 19 bp, Mus musculus
  siRNA target sequence for Plxnc1 (NM_018797.1,1860-1878).
ctgcgaaccatcagactat

SEQ ID NO: 637268 - DNA, 19 bp, Mus musculus
  siRNA target sequence for Plxnc1 (NM_018797.1,1862-1880).
gcgaaccatcagactatga

SEQ ID NO: 637269 - DNA, 19 bp, Mus musculus
  siRNA target sequence for Plxnc1 (NM_018797.1,1976-1994).
gggctgtgcaggtcttcta

SEQ ID NO: 637270 - DNA, 19 bp, Mus musculus
  siRNA target sequence for Plxnc1 (NM_018797.1,2001-2019).
ggccattgagccacaaaaa

SEQ ID NO: 637271 - DNA, 19 bp, Mus musculus
  siRNA target sequence for Plxnc1 (NM_018797.1,2064-2082).
cttcacccaggcgtcaaat

SEQ ID NO: 637272 - DNA, 19 bp, Mus musculus
  siRNA target sequence for Plxnc1 (NM_018797.1,2146-2164).
ctaaatgacacgcatatga

SEQ ID NO: 637273 - DNA, 19 bp, Mus musculus
  siRNA target sequence for Plxnc1 (NM_018797.1,2176-2194).
ccatcaagccgcaaagaaa

SEQ ID NO: 637274 - DNA, 19 bp, Mus musculus
  siRNA target sequence for Plxnc1 (NM_018797.1,2256-2274).
cattgctctgccacattgt

SEQ ID NO: 637275 - DNA, 19 bp, Mus musculus
  siRNA target sequence for Plxnc1 (NM_018797.1,2267-2285).
cacattgttccctgatagt

SEQ ID NO: 637276 - DNA, 19 bp, Mus musculus
  siRNA target sequence for Plxnc1 (NM_018797.1,2304-2322).
cagcggtgggcaaaacata

SEQ ID NO: 637277 - DNA, 19 bp, Mus musculus
  siRNA target sequence for Plxnc1 (NM_018797.1,2308-2326).
ggtgggcaaaacataacca

SEQ ID NO: 637278 - DNA, 19 bp, Mus musculus
  siRNA target sequence for Plxnc1 (NM_018797.1,2309-2327).
gtgggcaaaacataaccat

SEQ ID NO: 637279 - DNA, 19 bp, Mus musculus
  siRNA target sequence for Plxnc1 (NM_018797.1,2352-2370).
cgacaacctcatcatttca

SEQ ID NO: 637280 - DNA, 19 bp, Mus musculus
  siRNA target sequence for Plxnc1 (NM_018797.1,2384-2402).
gaaacgcaaatgtgaacat

SEQ ID NO: 637281 - DNA, 19 bp, Mus musculus
  siRNA target sequence for Plxnc1 (NM_018797.1,2388-2406).
cgcaaatgtgaacataaat

SEQ ID NO: 637282 - DNA, 19 bp, Mus musculus
  siRNA target sequence for Plxnc1 (NM_018797.1,2462-2480).
gctccaaagtacgtacaaa

SEQ ID NO: 637283 - DNA, 19 bp, Mus musculus
  siRNA target sequence for Plxnc1 (NM_018797.1,2522-2540).
gtggaacgctgcaatacct

SEQ ID NO: 637284 - DNA, 19 bp, Mus musculus
  siRNA target sequence for Plxnc1 (NM_018797.1,2539-2557).
ctcgaggaccccagattta

SEQ ID NO: 637285 - DNA, 19 bp, Mus musculus
  siRNA target sequence for Plxnc1 (NM_018797.1,2567-2585).
gagtggagtcagagattga

SEQ ID NO: 637286 - DNA, 19 bp, Mus musculus
  siRNA target sequence for Plxnc1 (NM_018797.1,2640-2658).
ggatgacattgatattact

SEQ ID NO: 637287 - DNA, 19 bp, Mus musculus
  siRNA target sequence for Plxnc1 (NM_018797.1,2769-2787).
catcgctagctcctctaaa

SEQ ID NO: 637288 - DNA, 19 bp, Mus musculus
  siRNA target sequence for Plxnc1 (NM_018797.1,2772-2790).
cgctagctcctctaaaaaa

SEQ ID NO: 637289 - DNA, 19 bp, Mus musculus
  siRNA target sequence for Plxnc1 (NM_018797.1,2805-2823).
gggaaacctggaactctat

SEQ ID NO: 637290 - DNA, 19 bp, Mus musculus
  siRNA target sequence for Plxnc1 (NM_018797.1,2907-2925).
ggtggtgacgaggtacaaa

SEQ ID NO: 637291 - DNA, 19 bp, Mus musculus
  siRNA target sequence for Plxnc1 (NM_018797.1,2908-2926).
gtggtgacgaggtacaaat

SEQ ID NO: 637292 - DNA, 19 bp, Mus musculus
  siRNA target sequence for Plxnc1 (NM_018797.1,2911-2929).
gtgacgaggtacaaatcca

SEQ ID NO: 637293 - DNA, 19 bp, Mus musculus
  siRNA target sequence for Plxnc1 (NM_018797.1,3007-3025).
gccgagctccagatggata

SEQ ID NO: 637294 - DNA, 19 bp, Mus musculus
  siRNA target sequence for Plxnc1 (NM_018797.1,3008-3026).
ccgagctccagatggataa

SEQ ID NO: 637295 - DNA, 19 bp, Mus musculus
  siRNA target sequence for Plxnc1 (NM_018797.1,3060-3078).
cttccttgactacaaacat

SEQ ID NO: 637296 - DNA, 19 bp, Mus musculus
  siRNA target sequence for Plxnc1 (NM_018797.1,3076-3094).
catttcgctctgagaactt

SEQ ID NO: 637297 - DNA, 19 bp, Mus musculus
  siRNA target sequence for Plxnc1 (NM_018797.1,3181-3199).
gccttggatgccctcatat

SEQ ID NO: 637298 - DNA, 19 bp, Mus musculus
  siRNA target sequence for Plxnc1 (NM_018797.1,3183-3201).
cttggatgccctcatatgt

SEQ ID NO: 637299 - DNA, 19 bp, Mus musculus
  siRNA target sequence for Plxnc1 (NM_018797.1,3186-3204).
ggatgccctcatatgtaat

SEQ ID NO: 637300 - DNA, 19 bp, Mus musculus
  siRNA target sequence for Plxnc1 (NM_018797.1,3187-3205).
gatgccctcatatgtaata

SEQ ID NO: 637301 - DNA, 19 bp, Mus musculus
  siRNA target sequence for Plxnc1 (NM_018797.1,3279-3297).
cgcctccttcctaaccatt

SEQ ID NO: 637302 - DNA, 19 bp, Mus musculus
  siRNA target sequence for Plxnc1 (NM_018797.1,3363-3381).
gcagtgcagtaatatgcaa

SEQ ID NO: 637303 - DNA, 19 bp, Mus musculus
  siRNA target sequence for Plxnc1 (NM_018797.1,3479-3497).
gagagccattctatttgct

SEQ ID NO: 637304 - DNA, 19 bp, Mus musculus
  siRNA target sequence for Plxnc1 (NM_018797.1,3590-3608).
ggcaggtccccgaattcaa

SEQ ID NO: 637305 - DNA, 19 bp, Mus musculus
  siRNA target sequence for Plxnc1 (NM_018797.1,3592-3610).
caggtccccgaattcaaca

SEQ ID NO: 637306 - DNA, 19 bp, Mus musculus
  siRNA target sequence for Plxnc1 (NM_018797.1,3727-3745).
gttttccaagccttcctaa

SEQ ID NO: 637307 - DNA, 19 bp, Mus musculus
  siRNA target sequence for Plxnc1 (NM_018797.1,3732-3750).
ccaagccttcctaagcaaa

SEQ ID NO: 637308 - DNA, 19 bp, Mus musculus
  siRNA target sequence for Plxnc1 (NM_018797.1,3738-3756).
cttcctaagcaaaaatggt

SEQ ID NO: 637309 - DNA, 19 bp, Mus musculus
  siRNA target sequence for Plxnc1 (NM_018797.1,3839-3857).
gttcctctgtgattcttga

SEQ ID NO: 637310 - DNA, 19 bp, Mus musculus
  siRNA target sequence for Plxnc1 (NM_018797.1,3886-3904).
ggccactatgagatatcaa

SEQ ID NO: 637311 - DNA, 19 bp, Mus musculus
  siRNA target sequence for Plxnc1 (NM_018797.1,3888-3906).
ccactatgagatatcaaat

SEQ ID NO: 637312 - DNA, 19 bp, Mus musculus
  siRNA target sequence for Plxnc1 (NM_018797.1,3891-3909).
ctatgagatatcaaatgga

SEQ ID NO: 637313 - DNA, 19 bp, Mus musculus
  siRNA target sequence for Plxnc1 (NM_018797.1,3907-3925).
ggatccactataaaagtct

SEQ ID NO: 637314 - DNA, 19 bp, Mus musculus
  siRNA target sequence for Plxnc1 (NM_018797.1,4028-4046).
gacatcgagggaaacacaa

SEQ ID NO: 637315 - DNA, 19 bp, Mus musculus
  siRNA target sequence for Plxnc1 (NM_018797.1,4085-4103).
cgaccaaggtggcaattca

SEQ ID NO: 637316 - DNA, 19 bp, Mus musculus
  siRNA target sequence for Plxnc1 (NM_018797.1,4116-4134).
gaaactcttccgaagcatt

SEQ ID NO: 637317 - DNA, 19 bp, Mus musculus
  siRNA target sequence for Plxnc1 (NM_018797.1,4120-4138).
ctcttccgaagcatttgga

SEQ ID NO: 637318 - DNA, 19 bp, Mus musculus
  siRNA target sequence for Plxnc1 (NM_018797.1,4160-4178).
catttgctataaaatactt

SEQ ID NO: 637319 - DNA, 19 bp, Mus musculus
  siRNA target sequence for Plxnc1 (NM_018797.1,4218-4236).
cacagaccctgatgttgta

SEQ ID NO: 637320 - DNA, 19 bp, Mus musculus
  siRNA target sequence for Plxnc1 (NM_018797.1,4220-4238).
cagaccctgatgttgtaca

SEQ ID NO: 637321 - DNA, 19 bp, Mus musculus
  siRNA target sequence for Plxnc1 (NM_018797.1,4264-4282).
cttcgattctgggtaaaca

SEQ ID NO: 637322 - DNA, 19 bp, Mus musculus
  siRNA target sequence for Plxnc1 (NM_018797.1,4327-4345).
cacatagacagctgtttgt

SEQ ID NO: 637323 - DNA, 19 bp, Mus musculus
  siRNA target sequence for Plxnc1 (NM_018797.1,4329-4347).
catagacagctgtttgtca

SEQ ID NO: 637324 - DNA, 19 bp, Mus musculus
  siRNA target sequence for Plxnc1 (NM_018797.1,4401-4419).
gaaggaagcaccaaccaat

SEQ ID NO: 637325 - DNA, 19 bp, Mus musculus
  siRNA target sequence for Plxnc1 (NM_018797.1,4409-4427).
caccaaccaataaacttct

SEQ ID NO: 637326 - DNA, 19 bp, Mus musculus
  siRNA target sequence for Plxnc1 (NM_018797.1,4437-4455).
ggatataccaacctacaaa

SEQ ID NO: 637327 - DNA, 19 bp, Mus musculus
  siRNA target sequence for Plxnc1 (NM_018797.1,4459-4477).
gaagtgaagtcttactaca

SEQ ID NO: 637328 - DNA, 19 bp, Mus musculus
  siRNA target sequence for Plxnc1 (NM_018797.1,4488-4506).
ggatttgcctccattgtca

SEQ ID NO: 637329 - DNA, 19 bp, Mus musculus
  siRNA target sequence for Plxnc1 (NM_018797.1,4496-4514).
ctccattgtcatctttaga

SEQ ID NO: 637330 - DNA, 19 bp, Mus musculus
  siRNA target sequence for Plxnc1 (NM_018797.1,4498-4516).
ccattgtcatctttagaaa

SEQ ID NO: 637331 - DNA, 19 bp, Mus musculus
  siRNA target sequence for Plxnc1 (NM_018797.1,4532-4550).
ctcaggaatctaagaaaca

SEQ ID NO: 637332 - DNA, 19 bp, Mus musculus
  siRNA target sequence for Plxnc1 (NM_018797.1,4570-4588).
gaagtggccttgacagaaa

SEQ ID NO: 637333 - DNA, 19 bp, Mus musculus
  siRNA target sequence for Plxnc1 (NM_018797.1,4576-4594).
gccttgacagaaatctaca

SEQ ID NO: 637334 - DNA, 19 bp, Mus musculus
  siRNA target sequence for Plxnc1 (NM_018797.1,4593-4611).
caaatacatcgtaaagtat

SEQ ID NO: 637335 - DNA, 19 bp, Mus musculus
  siRNA target sequence for Procr (NM_011171.1,95-113).
cctggctgcgccctttgta

SEQ ID NO: 637336 - DNA, 19 bp, Mus musculus
  siRNA target sequence for Procr (NM_011171.1,96-114).
ctggctgcgccctttgtaa

SEQ ID NO: 637337 - DNA, 19 bp, Mus musculus
  siRNA target sequence for Procr (NM_011171.1,98-116).
ggctgcgccctttgtaact

SEQ ID NO: 637338 - DNA, 19 bp, Mus musculus
  siRNA target sequence for Procr (NM_011171.1,123-141).
gctcccaaagcctgcatat

SEQ ID NO: 637339 - DNA, 19 bp, Mus musculus
  siRNA target sequence for Procr (NM_011171.1,337-355).
cctggtgaagctggtatat

SEQ ID NO: 637340 - DNA, 19 bp, Mus musculus
  siRNA target sequence for Procr (NM_011171.1,363-381).
gcaaggagaacgtgttctt

SEQ ID NO: 637341 - DNA, 19 bp, Mus musculus
  siRNA target sequence for Procr (NM_011171.1,472-490).
gaatggaagcgcttttgta

SEQ ID NO: 637342 - DNA, 19 bp, Mus musculus
  siRNA target sequence for Procr (NM_011171.1,476-494).
ggaagcgcttttgtaagtt

SEQ ID NO: 637343 - DNA, 19 bp, Mus musculus
  siRNA target sequence for Procr (NM_011171.1,580-598).
caaccggactcggtatgaa

SEQ ID NO: 637344 - DNA, 19 bp, Mus musculus
  siRNA target sequence for Procr (NM_011171.1,591-609).
ggtatgaactgcaggaatt

SEQ ID NO: 637345 - DNA, 19 bp, Mus musculus
  siRNA target sequence for Procr (NM_011171.1,649-667).
caccacgcaaaacatgaaa

SEQ ID NO: 637346 - DNA, 19 bp, Mus musculus
  siRNA target sequence for Procr (NM_011171.1,674-692).
caaacaggtcgctcttaca

SEQ ID NO: 637347 - DNA, 19 bp, Mus musculus
  siRNA target sequence for Psk1 (NM_144926.2,981-999).
gcccagttctgtgcaataa

SEQ ID NO: 637348 - DNA, 19 bp, Mus musculus
  siRNA target sequence for Psk1 (NM_144926.2,1093-1111).
ccatgtctaccctggttat

SEQ ID NO: 637349 - DNA, 19 bp, Mus musculus
  siRNA target sequence for Psk1 (NM_144926.2,1107-1125).
gttatggcattgagattca

SEQ ID NO: 637350 - DNA, 19 bp, Mus musculus
  siRNA target sequence for Psk1 (NM_144926.2,1144-1162).
gtctcaggaggaagaactt

SEQ ID NO: 637351 - DNA, 19 bp, Mus musculus
  siRNA target sequence for Psk1 (NM_144926.2,1457-1475).
ctcatttgcctcaatggta

SEQ ID NO: 637352 - DNA, 19 bp, Mus musculus
  siRNA target sequence for Psk1 (NM_144926.2,1543-1561).
cacactgggtcgcattgta

SEQ ID NO: 637353 - DNA, 19 bp, Mus musculus
  siRNA target sequence for Psk1 (NM_144926.2,1600-1618).
ctgccgctgggtcattgaa

SEQ ID NO: 637354 - DNA, 19 bp, Mus musculus
  siRNA target sequence for Psk1 (NM_144926.2,1973-1991).
ccaggaccccccaatgcta

SEQ ID NO: 637355 - DNA, 19 bp, Mus musculus
  siRNA target sequence for Psk1 (NM_144926.2,1974-1992).
caggaccccccaatgctat

SEQ ID NO: 637356 - DNA, 19 bp, Mus musculus
  siRNA target sequence for Psk1 (NM_144926.2,1979-1997).
ccccccaatgctatcgaat

SEQ ID NO: 637357 - DNA, 19 bp, Mus musculus
  siRNA target sequence for Psk1 (NM_144926.2,1983-2001).
ccaatgctatcgaatgtgt

SEQ ID NO: 637358 - DNA, 19 bp, Mus musculus
  siRNA target sequence for Psk1 (NM_144926.2,2097-2115).
ccgactggccccagagtta

SEQ ID NO: 637359 - DNA, 19 bp, Mus musculus
  siRNA target sequence for Psk1 (NM_144926.2,2167-2185).
catcttgctccaagttgaa

SEQ ID NO: 637360 - DNA, 19 bp, Mus musculus
  siRNA target sequence for Psk1 (NM_144926.2,2174-2192).
ctccaagttgaaatcttga

SEQ ID NO: 637361 - DNA, 19 bp, Mus musculus
  siRNA target sequence for Psk1 (NM_144926.2,2176-2194).
ccaagttgaaatcttgaat

SEQ ID NO: 637362 - DNA, 19 bp, Mus musculus
  siRNA target sequence for Psk1 (NM_144926.2,2198-2216).
cgcgaaggggatatgctaa

SEQ ID NO: 637363 - DNA, 19 bp, Mus musculus
  siRNA target sequence for Psk1 (NM_144926.2,2358-2376).
gccagggtttcgtgttaca

SEQ ID NO: 637364 - DNA, 19 bp, Mus musculus
  siRNA target sequence for Psk1 (NM_144926.2,2359-2377).
ccagggtttcgtgttacat

SEQ ID NO: 637365 - DNA, 19 bp, Mus musculus
  siRNA target sequence for Psk1 (NM_144926.2,2360-2378).
cagggtttcgtgttacatt

SEQ ID NO: 637366 - DNA, 19 bp, Mus musculus
  siRNA target sequence for Psk1 (NM_144926.2,2384-2402).
gaggtcccgagaaacgata

SEQ ID NO: 637367 - DNA, 19 bp, Mus musculus
  siRNA target sequence for Psk1 (NM_144926.2,2445-2463).
catcccacggggaccttat

SEQ ID NO: 637368 - DNA, 19 bp, Mus musculus
  siRNA target sequence for Psk1 (NM_144926.2,2759-2777).
cccaaatgcgccttaaagt

SEQ ID NO: 637369 - DNA, 19 bp, Mus musculus
  siRNA target sequence for Psk1 (NM_144926.2,2794-2812).
ccccggtgttcctgagaat

SEQ ID NO: 637370 - DNA, 19 bp, Mus musculus
  siRNA target sequence for Psk1 (NM_144926.2,2814-2832).
gttaccaaactctgtacaa

SEQ ID NO: 637371 - DNA, 19 bp, Mus musculus
  siRNA target sequence for Psk1 (NM_144926.2,2823-2841).
ctctgtacaagcatcacta

SEQ ID NO: 637372 - DNA, 19 bp, Mus musculus
  siRNA target sequence for Psk1 (NM_144926.2,2852-2870).
gagtcgctacgcttcttct

SEQ ID NO: 637373 - DNA, 19 bp, Mus musculus
  siRNA target sequence for Psk1 (NM_144926.2,3092-3110).
ggcattggcgtttacatat

SEQ ID NO: 637374 - DNA, 19 bp, Mus musculus
  siRNA target sequence for Psk1 (NM_144926.2,3093-3111).
gcattggcgtttacatata

SEQ ID NO: 637375 - DNA, 19 bp, Mus musculus
  siRNA target sequence for Psk1 (NM_144926.2,3098-3116).
ggcgtttacatatactaca

SEQ ID NO: 637376 - DNA, 19 bp, Mus musculus
  siRNA target sequence for Psk1 (NM_144926.2,3106-3124).
catatactacactaagcta

SEQ ID NO: 637377 - DNA, 19 bp, Mus musculus
  siRNA target sequence for Psk1 (NM_144926.2,3216-3234).
gggatacgagggagtatga

SEQ ID NO: 637378 - DNA, 19 bp, Mus musculus
  siRNA target sequence for Ptdsr (NM_033398.1,266-284).
ggacccggcacaactacta

SEQ ID NO: 637379 - DNA, 19 bp, Mus musculus
  siRNA target sequence for Ptdsr (NM_033398.1,374-392).
gctacgagaggccttacaa

SEQ ID NO: 637380 - DNA, 19 bp, Mus musculus
  siRNA target sequence for Ptdsr (NM_033398.1,448-466).
ctggagcgcctcaaaagga

SEQ ID NO: 637381 - DNA, 19 bp, Mus musculus
  siRNA target sequence for Ptdsr (NM_033398.1,486-504).
caagtgcggcgaggataat

SEQ ID NO: 637382 - DNA, 19 bp, Mus musculus
  siRNA target sequence for Ptdsr (NM_033398.1,642-660).
ggtgcccaagtttttcaca

SEQ ID NO: 637383 - DNA, 19 bp, Mus musculus
  siRNA target sequence for Ptdsr (NM_033398.1,648-666).
caagtttttcacagatgat

SEQ ID NO: 637384 - DNA, 19 bp, Mus musculus
  siRNA target sequence for Ptdsr (NM_033398.1,734-752).
ctggaactgggattcacat

SEQ ID NO: 637385 - DNA, 19 bp, Mus musculus
  siRNA target sequence for Ptdsr (NM_033398.1,773-791).
cctggaatgccttagttca

SEQ ID NO: 637386 - DNA, 19 bp, Mus musculus
  siRNA target sequence for Ptdsr (NM_033398.1,806-824).
ggtgcctcttcccaacaaa

SEQ ID NO: 637387 - DNA, 19 bp, Mus musculus
  siRNA target sequence for Ptdsr (NM_033398.1,843-861).
caaggtgacccgagaagaa

SEQ ID NO: 637388 - DNA, 19 bp, Mus musculus
  siRNA target sequence for Ptdsr (NM_033398.1,870-888).
ccaacaggatgaagcaatt

SEQ ID NO: 637389 - DNA, 19 bp, Mus musculus
  siRNA target sequence for Ptdsr (NM_033398.1,874-892).
caggatgaagcaattacct

SEQ ID NO: 637390 - DNA, 19 bp, Mus musculus
  siRNA target sequence for Ptdsr (NM_033398.1,880-898).
gaagcaattacctggttta

SEQ ID NO: 637391 - DNA, 19 bp, Mus musculus
  siRNA target sequence for Ptdsr (NM_033398.1,1122-1140).
gtggtataggatcttgaaa

SEQ ID NO: 637392 - DNA, 19 bp, Mus musculus
  siRNA target sequence for Ptdsr (NM_033398.1,1124-1142).
ggtataggatcttgaaaca

SEQ ID NO: 637393 - DNA, 19 bp, Mus musculus
  siRNA target sequence for Pvrl2 (NM_008990.2,412-430).
catccttcggagtggattt

SEQ ID NO: 637394 - DNA, 19 bp, Mus musculus
  siRNA target sequence for Pvrl2 (NM_008990.2,717-735).
cgaatcacctggatctcat

SEQ ID NO: 637395 - DNA, 19 bp, Mus musculus
  siRNA target sequence for Pvrl2 (NM_008990.2,781-799).
ctggcaccgtcactatcat

SEQ ID NO: 637396 - DNA, 19 bp, Mus musculus
  siRNA target sequence for Pvrl2 (NM_008990.2,783-801).
ggcaccgtcactatcatca

SEQ ID NO: 637397 - DNA, 19 bp, Mus musculus
  siRNA target sequence for Pvrl2 (NM_008990.2,911-929).
gcgctaccctccagaagta

SEQ ID NO: 637398 - DNA, 19 bp, Mus musculus
  siRNA target sequence for Pvrl2 (NM_008990.2,977-995).
catactgacctgtgatgta

SEQ ID NO: 637399 - DNA, 19 bp, Mus musculus
  siRNA target sequence for Pvrl2 (NM_008990.2,1098-1116).
gatcgaatggtcaacacta

SEQ ID NO: 637400 - DNA, 19 bp, Mus musculus
  siRNA target sequence for Pvrl2 (NM_008990.2,1107-1125).
gtcaacactaccttcatct

SEQ ID NO: 637401 - DNA, 19 bp, Mus musculus
  siRNA target sequence for Pvrl2 (NM_008990.2,1218-1236).
ggcatcattggaggtatta

SEQ ID NO: 637402 - DNA, 19 bp, Mus musculus
  siRNA target sequence for Pvrl2 (NM_008990.2,1341-1359).
gaaggacctccctcctata

SEQ ID NO: 637403 - DNA, 19 bp, Mus musculus
  siRNA target sequence for Rhbdf1 (NM_010117.1,760-778).
ggtgaagggtcggtctatt

SEQ ID NO: 637404 - DNA, 19 bp, Mus musculus
  siRNA target sequence for Rhbdf1 (NM_010117.1,761-779).
gtgaagggtcggtctatta

SEQ ID NO: 637405 - DNA, 19 bp, Mus musculus
  siRNA target sequence for Rhbdf1 (NM_010117.1,800-818).
ggacagcgccgaagcttta

SEQ ID NO: 637406 - DNA, 19 bp, Mus musculus
  siRNA target sequence for Rhbdf1 (NM_010117.1,860-878).
gatgagttggatacatctt

SEQ ID NO: 637407 - DNA, 19 bp, Mus musculus
  siRNA target sequence for Rhbdf1 (NM_010117.1,863-881).
gagttggatacatctttct

SEQ ID NO: 637408 - DNA, 19 bp, Mus musculus
  siRNA target sequence for Rhbdf1 (NM_010117.1,865-883).
gttggatacatctttcttt

SEQ ID NO: 637409 - DNA, 19 bp, Mus musculus
  siRNA target sequence for Rhbdf1 (NM_010117.1,923-941).
ccagatgaggtgtttgagt

SEQ ID NO: 637410 - DNA, 19 bp, Mus musculus
  siRNA target sequence for Rhbdf1 (NM_010117.1,1169-1187).
gtgccagtgcgcaaactct

SEQ ID NO: 637411 - DNA, 19 bp, Mus musculus
  siRNA target sequence for Rhbdf1 (NM_010117.1,1256-1274).
cgcatcgacagctatgtca

SEQ ID NO: 637412 - DNA, 19 bp, Mus musculus
  siRNA target sequence for Rhbdf1 (NM_010117.1,1257-1275).
gcatcgacagctatgtcaa

SEQ ID NO: 637413 - DNA, 19 bp, Mus musculus
  siRNA target sequence for Rhbdf1 (NM_010117.1,1425-1443).
ggaagcggggtgtctatga

SEQ ID NO: 637414 - DNA, 19 bp, Mus musculus
  siRNA target sequence for Rhbdf1 (NM_010117.1,1429-1447).
gcggggtgtctatgagaat

SEQ ID NO: 637415 - DNA, 19 bp, Mus musculus
  siRNA target sequence for Rhbdf1 (NM_010117.1,1431-1449).
ggggtgtctatgagaatgt

SEQ ID NO: 637416 - DNA, 19 bp, Mus musculus
  siRNA target sequence for Rhbdf1 (NM_010117.1,1491-1509).
cggaggccctcattcactt

SEQ ID NO: 637417 - DNA, 19 bp, Mus musculus
  siRNA target sequence for Rhbdf1 (NM_010117.1,1790-1808).
gagtggccagaagatatca

SEQ ID NO: 637418 - DNA, 19 bp, Mus musculus
  siRNA target sequence for Rhbdf1 (NM_010117.1,1817-1835).
ccgatctgcaccaaaagca

SEQ ID NO: 637419 - DNA, 19 bp, Mus musculus
  siRNA target sequence for Rhbdf1 (NM_010117.1,2411-2429).
cacatctcgggctttgtca

SEQ ID NO: 637420 - DNA, 19 bp, Mus musculus
  siRNA target sequence for Rhbdf1 (NM_010117.1,2493-2511).
gcaagcgctgccagatcat

SEQ ID NO: 637421 - DNA, 19 bp, Mus musculus
  siRNA target sequence for Rhbdf1 (NM_010117.1,2498-2516).
cgctgccagatcatcatct

SEQ ID NO: 637422 - DNA, 19 bp, Mus musculus
  siRNA target sequence for Rhbdf1 (NM_010117.1,2499-2517).
gctgccagatcatcatctt

SEQ ID NO: 637423 - DNA, 19 bp, Mus musculus
  siRNA target sequence for Rhbdf1 (NM_010117.1,2612-2630).
cctttcacggacaagttct

SEQ ID NO: 637424 - DNA, 19 bp, Mus musculus
  siRNA target sequence for Rhbdf1 (NM_010117.1,2619-2637).
cggacaagttctgtgaaaa

SEQ ID NO: 637425 - DNA, 19 bp, Mus musculus
  siRNA target sequence for Rhbdf1 (NM_010117.1,2621-2639).
gacaagttctgtgaaaagt

SEQ ID NO: 637426 - DNA, 19 bp, Mus musculus
  siRNA target sequence for Rtn4r (NM_022982.1,283-301).
gagcccaaggtaacaacaa

SEQ ID NO: 637427 - DNA, 19 bp, Mus musculus
  siRNA target sequence for Rtn4r (NM_022982.1,347-365).
cctctagccagcgaatctt

SEQ ID NO: 637428 - DNA, 19 bp, Mus musculus
  siRNA target sequence for Rtn4r (NM_022982.1,369-387).
gcatggcaaccgaatctct

SEQ ID NO: 637429 - DNA, 19 bp, Mus musculus
  siRNA target sequence for Rtn4r (NM_022982.1,413-431).
catgccgaaatctcactat

SEQ ID NO: 637430 - DNA, 19 bp, Mus musculus
  siRNA target sequence for Rtn4r (NM_022982.1,496-514).
ctggagcaactagatctta

SEQ ID NO: 637431 - DNA, 19 bp, Mus musculus
  siRNA target sequence for Rtn4r (NM_022982.1,498-516).
ggagcaactagatcttagt

SEQ ID NO: 637432 - DNA, 19 bp, Mus musculus
  siRNA target sequence for Rtn4r (NM_022982.1,501-519).
gcaactagatcttagtgat

SEQ ID NO: 637433 - DNA, 19 bp, Mus musculus
  siRNA target sequence for Rtn4r (NM_022982.1,502-520).
caactagatcttagtgata

SEQ ID NO: 637434 - DNA, 19 bp, Mus musculus
  siRNA target sequence for Rtn4r (NM_022982.1,933-951).
gcagtacctgcgactcaat

SEQ ID NO: 637435 - DNA, 19 bp, Mus musculus
  siRNA target sequence for Rtn4r (NM_022982.1,1053-1071).
cctggcagaccgtgatctt

SEQ ID NO: 637436 - DNA, 19 bp, Mus musculus
  siRNA target sequence for Rtn4r (NM_022982.1,1301-1319).
gccctcggcacatcaatga

SEQ ID NO: 637437 - DNA, 19 bp, Mus musculus
  siRNA target sequence for Rtn4r (NM_022982.1,1303-1321).
cctcggcacatcaatgact

SEQ ID NO: 637438 - DNA, 19 bp, Mus musculus
  siRNA target sequence for Rtn4r (NM_022982.1,1311-1329).
catcaatgactctccattt

SEQ ID NO: 637439 - DNA, 19 bp, Mus musculus
  siRNA target sequence for Rtn4r (NM_022982.1,1314-1332).
caatgactctccatttgga

SEQ ID NO: 637440 - DNA, 19 bp, Mus musculus
  siRNA target sequence for Rtn4rl1 (NM_177708.3,875-893).
cacgccctctacctctata

SEQ ID NO: 637441 - DNA, 19 bp, Mus musculus
  siRNA target sequence for Rtn4rl1 (NM_177708.3,878-896).
gccctctacctctataagt

SEQ ID NO: 637442 - DNA, 19 bp, Mus musculus
  siRNA target sequence for Rtn4rl1 (NM_177708.3,880-898).
cctctacctctataagtgt

SEQ ID NO: 637443 - DNA, 19 bp, Mus musculus
  siRNA target sequence for Rtn4rl1 (NM_177708.3,1356-1374).
ggcaaggccaggatctgaa

SEQ ID NO: 637444 - DNA, 19 bp, Mus musculus
  siRNA target sequence for Rtn4rl1 (NM_177708.3,1536-1554).
gctccaggtcaggttacaa

SEQ ID NO: 637445 - DNA, 19 bp, Mus musculus
  siRNA target sequence for Rtn4rl1 (NM_177708.3,1539-1557).
ccaggtcaggttacaagaa

SEQ ID NO: 637446 - DNA, 19 bp, Mus musculus
  siRNA target sequence for Rtn4rl1 (NM_177708.3,1650-1668).
ccgactatcagcacaagtt

SEQ ID NO: 637447 - DNA, 19 bp, Mus musculus
  siRNA target sequence for Scarb1 (NM_016741.1,257-275).
ctgcgctcggcgttgtcat

SEQ ID NO: 637448 - DNA, 19 bp, Mus musculus
  siRNA target sequence for Scarb1 (NM_016741.1,260-278).
cgctcggcgttgtcatgat

SEQ ID NO: 637449 - DNA, 19 bp, Mus musculus
  siRNA target sequence for Scarb1 (NM_016741.1,454-472).
gagcgtggaccctatgtct

SEQ ID NO: 637450 - DNA, 19 bp, Mus musculus
  siRNA target sequence for Scarb1 (NM_016741.1,687-705).
catgggccagcgtgctttt

SEQ ID NO: 637451 - DNA, 19 bp, Mus musculus
  siRNA target sequence for Scarb1 (NM_016741.1,692-710).
gccagcgtgcttttatgaa

SEQ ID NO: 637452 - DNA, 19 bp, Mus musculus
  siRNA target sequence for Scarb1 (NM_016741.1,744-762).
cgatcccttcgtgcatttt

SEQ ID NO: 637453 - DNA, 19 bp, Mus musculus
  siRNA target sequence for Scarb1 (NM_016741.1,779-797).
cagacatgcttcccataaa

SEQ ID NO: 637454 - DNA, 19 bp, Mus musculus
  siRNA target sequence for Scarb1 (NM_016741.1,811-829).
ctgtttgttgggatgaaca

SEQ ID NO: 637455 - DNA, 19 bp, Mus musculus
  siRNA target sequence for Scarb1 (NM_016741.1,907-925).
ggactcagcaagatcgatt

SEQ ID NO: 637456 - DNA, 19 bp, Mus musculus
  siRNA target sequence for Scarb1 (NM_016741.1,908-926).
gactcagcaagatcgatta

SEQ ID NO: 637457 - DNA, 19 bp, Mus musculus
  siRNA target sequence for Scarb1 (NM_016741.1,910-928).
ctcagcaagatcgattatt

SEQ ID NO: 637458 - DNA, 19 bp, Mus musculus
  siRNA target sequence for Scarb1 (NM_016741.1,935-953).
cagagcagtgtaacatgat

SEQ ID NO: 637459 - DNA, 19 bp, Mus musculus
  siRNA target sequence for Scarb1 (NM_016741.1,995-1013).
ccgaatcctcgctggaatt

SEQ ID NO: 637460 - DNA, 19 bp, Mus musculus
  siRNA target sequence for Scarb1 (NM_016741.1,997-1015).
gaatcctcgctggaattct

SEQ ID NO: 637461 - DNA, 19 bp, Mus musculus
  siRNA target sequence for Scarb1 (NM_016741.1,1045-1063).
ctgacctacaacgaatcaa

SEQ ID NO: 637462 - DNA, 19 bp, Mus musculus
  siRNA target sequence for Scarb1 (NM_016741.1,1056-1074).
cgaatcaagggtgtttgaa

SEQ ID NO: 637463 - DNA, 19 bp, Mus musculus
  siRNA target sequence for Scarb1 (NM_016741.1,1163-1181).
gagagtctggcattcagaa

SEQ ID NO: 637464 - DNA, 19 bp, Mus musculus
  siRNA target sequence for Scarb1 (NM_016741.1,1197-1215).
gtttggtgcgcctctgttt

SEQ ID NO: 637465 - DNA, 19 bp, Mus musculus
  siRNA target sequence for Scarb1 (NM_016741.1,1201-1219).
ggtgcgcctctgtttctct

SEQ ID NO: 637466 - DNA, 19 bp, Mus musculus
  siRNA target sequence for Scarb1 (NM_016741.1,1251-1269).
gttgtcagaagctgttctt

SEQ ID NO: 637467 - DNA, 19 bp, Mus musculus
  siRNA target sequence for Scarb1 (NM_016741.1,1359-1377).
gctgagcctctacatcaaa

SEQ ID NO: 637468 - DNA, 19 bp, Mus musculus
  siRNA target sequence for Scarb1 (NM_016741.1,1360-1378).
ctgagcctctacatcaaat

SEQ ID NO: 637469 - DNA, 19 bp, Mus musculus
  siRNA target sequence for Scarb1 (NM_016741.1,1404-1422).
gaagatcgagccagtagtt

SEQ ID NO: 637470 - DNA, 19 bp, Mus musculus
  siRNA target sequence for Scarb1 (NM_016741.1,1468-1486).
cccctgagcacgttctaca

SEQ ID NO: 637471 - DNA, 19 bp, Mus musculus
  siRNA target sequence for Scarb1 (NM_016741.1,1582-1600).
ctgcgcagccaggagaaat

SEQ ID NO: 637472 - DNA, 19 bp, Mus musculus
  siRNA target sequence for Scarb1 (NM_016741.1,1585-1603).
cgcagccaggagaaatgct

SEQ ID NO: 637473 - DNA, 19 bp, Mus musculus
  siRNA target sequence for Scarb1 (NM_016741.1,1586-1604).
gcagccaggagaaatgctt

SEQ ID NO: 637474 - DNA, 19 bp, Mus musculus
  siRNA target sequence for Scarb2 (NM_007644.2,370-388).
gctagtggctcgagtcttt

SEQ ID NO: 637475 - DNA, 19 bp, Mus musculus
  siRNA target sequence for Scarb2 (NM_007644.2,374-392).
gtggctcgagtctttcaga

SEQ ID NO: 637476 - DNA, 19 bp, Mus musculus
  siRNA target sequence for Scarb2 (NM_007644.2,403-421).
ccagacgatcgagaagaat

SEQ ID NO: 637477 - DNA, 19 bp, Mus musculus
  siRNA target sequence for Scarb2 (NM_007644.2,408-426).
cgatcgagaagaatatggt

SEQ ID NO: 637478 - DNA, 19 bp, Mus musculus
  siRNA target sequence for Scarb2 (NM_007644.2,412-430).
cgagaagaatatggtatta

SEQ ID NO: 637479 - DNA, 19 bp, Mus musculus
  siRNA target sequence for Scarb2 (NM_007644.2,437-455).
ggcaccaaggtctttaatt

SEQ ID NO: 637480 - DNA, 19 bp, Mus musculus
  siRNA target sequence for Scarb2 (NM_007644.2,534-552).
gagaaatccccctactaga

SEQ ID NO: 637481 - DNA, 19 bp, Mus musculus
  siRNA target sequence for Scarb2 (NM_007644.2,583-601).
ccggaacaaggcaaatatt

SEQ ID NO: 637482 - DNA, 19 bp, Mus musculus
  siRNA target sequence for Scarb2 (NM_007644.2,585-603).
ggaacaaggcaaatattca

SEQ ID NO: 637483 - DNA, 19 bp, Mus musculus
  siRNA target sequence for Scarb2 (NM_007644.2,639-657).
ccaataaggcatatgtttt

SEQ ID NO: 637484 - DNA, 19 bp, Mus musculus
  siRNA target sequence for Scarb2 (NM_007644.2,648-666).
catatgtttttgaacgaaa

SEQ ID NO: 637485 - DNA, 19 bp, Mus musculus
  siRNA target sequence for Scarb2 (NM_007644.2,653-671).
gtttttgaacgaaaccaat

SEQ ID NO: 637486 - DNA, 19 bp, Mus musculus
  siRNA target sequence for Scarb2 (NM_007644.2,683-701).
cctaacgttgacttgatta

SEQ ID NO: 637487 - DNA, 19 bp, Mus musculus
  siRNA target sequence for Scarb2 (NM_007644.2,688-706).
cgttgacttgattagaaca

SEQ ID NO: 637488 - DNA, 19 bp, Mus musculus
  siRNA target sequence for Scarb2 (NM_007644.2,689-707).
gttgacttgattagaacaa

SEQ ID NO: 637489 - DNA, 19 bp, Mus musculus
  siRNA target sequence for Scarb2 (NM_007644.2,692-710).
gacttgattagaacaataa

SEQ ID NO: 637490 - DNA, 19 bp, Mus musculus
  siRNA target sequence for Scarb2 (NM_007644.2,750-768).
ccctgctcagggagcttat

SEQ ID NO: 637491 - DNA, 19 bp, Mus musculus
  siRNA target sequence for Scarb2 (NM_007644.2,754-772).
gctcagggagcttatcgaa

SEQ ID NO: 637492 - DNA, 19 bp, Mus musculus
  siRNA target sequence for Scarb2 (NM_007644.2,785-803).
gcctatcagcagaagttgt

SEQ ID NO: 637493 - DNA, 19 bp, Mus musculus
  siRNA target sequence for Scarb2 (NM_007644.2,786-804).
cctatcagcagaagttgtt

SEQ ID NO: 637494 - DNA, 19 bp, Mus musculus
  siRNA target sequence for Scarb2 (NM_007644.2,837-855).
gctacaaagatgagatctt

SEQ ID NO: 637495 - DNA, 19 bp, Mus musculus
  siRNA target sequence for Scarb2 (NM_007644.2,858-876).
ccctcgtccatattttcaa

SEQ ID NO: 637496 - DNA, 19 bp, Mus musculus
  siRNA target sequence for Scarb2 (NM_007644.2,891-909).
cgaatttcggcctgttcta

SEQ ID NO: 637497 - DNA, 19 bp, Mus musculus
  siRNA target sequence for Scarb2 (NM_007644.2,900-918).
gcctgttctatgagagaaa

SEQ ID NO: 637498 - DNA, 19 bp, Mus musculus
  siRNA target sequence for Scarb2 (NM_007644.2,901-919).
cctgttctatgagagaaat

SEQ ID NO: 637499 - DNA, 19 bp, Mus musculus
  siRNA target sequence for Scarb2 (NM_007644.2,932-950).
ggggagtacgtgtttctga

SEQ ID NO: 637500 - DNA, 19 bp, Mus musculus
  siRNA target sequence for Scarb2 (NM_007644.2,956-974).
gaggacaattaccttaact

SEQ ID NO: 637501 - DNA, 19 bp, Mus musculus
  siRNA target sequence for Scarb2 (NM_007644.2,989-1007).
gagtggaatggaaaaacgt

SEQ ID NO: 637502 - DNA, 19 bp, Mus musculus
  siRNA target sequence for Scarb2 (NM_007644.2,1026-1044).
cagacacatgcaatatgat

SEQ ID NO: 637503 - DNA, 19 bp, Mus musculus
  siRNA target sequence for Scarb2 (NM_007644.2,1140-1158).
ctttcagcagctttgagaa

SEQ ID NO: 637504 - DNA, 19 bp, Mus musculus
  siRNA target sequence for Scarb2 (NM_007644.2,1173-1191).
ctgcttttcggtataaggt

SEQ ID NO: 637505 - DNA, 19 bp, Mus musculus
  siRNA target sequence for Scarb2 (NM_007644.2,1259-1277).
gactcaggggtgttgaaca

SEQ ID NO: 637506 - DNA, 19 bp, Mus musculus
  siRNA target sequence for Scarb2 (NM_007644.2,1298-1316).
gcacccattatcatgtctt

SEQ ID NO: 637507 - DNA, 19 bp, Mus musculus
  siRNA target sequence for Scarb2 (NM_007644.2,1299-1317).
cacccattatcatgtcttt

SEQ ID NO: 637508 - DNA, 19 bp, Mus musculus
  siRNA target sequence for Scarb2 (NM_007644.2,1334-1352).
gccgacgagaagttcgttt

SEQ ID NO: 637509 - DNA, 19 bp, Mus musculus
  siRNA target sequence for Scarb2 (NM_007644.2,1345-1363).
gttcgtttctgccataaaa

SEQ ID NO: 637510 - DNA, 19 bp, Mus musculus
  siRNA target sequence for Scarb2 (NM_007644.2,1391-1409).
gagtcgtttgtggacatta

SEQ ID NO: 637511 - DNA, 19 bp, Mus musculus
  siRNA target sequence for Scarb2 (NM_007644.2,1393-1411).
gtcgtttgtggacattaat

SEQ ID NO: 637512 - DNA, 19 bp, Mus musculus
  siRNA target sequence for Scarb2 (NM_007644.2,1417-1435).
gactggaattattttgaga

SEQ ID NO: 637513 - DNA, 19 bp, Mus musculus
  siRNA target sequence for Scarb2 (NM_007644.2,1446-1464).
gattccagatcaacactta

SEQ ID NO: 637514 - DNA, 19 bp, Mus musculus
  siRNA target sequence for Scarb2 (NM_007644.2,1450-1468).
ccagatcaacacttacgtt

SEQ ID NO: 637515 - DNA, 19 bp, Mus musculus
  siRNA target sequence for Scarb2 (NM_007644.2,1456-1474).
caacacttacgttaggaaa

SEQ ID NO: 637516 - DNA, 19 bp, Mus musculus
  siRNA target sequence for Scarb2 (NM_007644.2,1499-1517).
gacatcaggactatggttt

SEQ ID NO: 637517 - DNA, 19 bp, Mus musculus
  siRNA target sequence for Scarb2 (NM_007644.2,1519-1537).
cccagtgatgtatctcaat

SEQ ID NO: 637518 - DNA, 19 bp, Mus musculus
  siRNA target sequence for Scarb2 (NM_007644.2,1555-1573).
caaagagaccgcaaatcaa

SEQ ID NO: 637519 - DNA, 19 bp, Mus musculus
  siRNA target sequence for Scarb2 (NM_007644.2,1574-1592).
ctgaagtctgtgattaaca

SEQ ID NO: 637520 - DNA, 19 bp, Mus musculus
  siRNA target sequence for Scarb2 (NM_007644.2,1585-1603).
gattaacacgactttggtt

SEQ ID NO: 637521 - DNA, 19 bp, Mus musculus
  siRNA target sequence for Scarb2 (NM_007644.2,1608-1626).
ccaacataccctacatcat

SEQ ID NO: 637522 - DNA, 19 bp, Mus musculus
  siRNA target sequence for Scarb2 (NM_007644.2,1609-1627).
caacataccctacatcatt

SEQ ID NO: 637523 - DNA, 19 bp, Mus musculus
  siRNA target sequence for Scarb2 (NM_007644.2,1630-1648).
ggcactgggtgtgttcttt

SEQ ID NO: 637524 - DNA, 19 bp, Mus musculus
  siRNA target sequence for Scarb2 (NM_007644.2,1699-1717).
gggaactgcagatgaaaga

SEQ ID NO: 637525 - DNA, 19 bp, Mus musculus
  siRNA target sequence for Sema4a (NM_013658.2,193-211).
ggagtctcctgcgtgtttt

SEQ ID NO: 637526 - DNA, 19 bp, Mus musculus
  siRNA target sequence for Sema4a (NM_013658.2,278-296).
gcccagagtcaaataccat

SEQ ID NO: 637527 - DNA, 19 bp, Mus musculus
  siRNA target sequence for Sema4a (NM_013658.2,408-426).
gccgtcctggccttgaata

SEQ ID NO: 637528 - DNA, 19 bp, Mus musculus
  siRNA target sequence for Sema4a (NM_013658.2,493-511).
ccgaatgtgcctttaagaa

SEQ ID NO: 637529 - DNA, 19 bp, Mus musculus
  siRNA target sequence for Sema4a (NM_013658.2,552-570).
ctggtctcttacaatgcta

SEQ ID NO: 637530 - DNA, 19 bp, Mus musculus
  siRNA target sequence for Sema4a (NM_013658.2,691-709).
cctttgaccctgttcacaa

SEQ ID NO: 637531 - DNA, 19 bp, Mus musculus
  siRNA target sequence for Sema4a (NM_013658.2,726-744).
gtcgatgggatgctttatt

SEQ ID NO: 637532 - DNA, 19 bp, Mus musculus
  siRNA target sequence for Sema4a (NM_013658.2,880-898).
cccaggtcgtctatttctt

SEQ ID NO: 637533 - DNA, 19 bp, Mus musculus
  siRNA target sequence for Sema4a (NM_013658.2,910-928).
cagccagcgagtttgactt

SEQ ID NO: 637534 - DNA, 19 bp, Mus musculus
  siRNA target sequence for Sema4a (NM_013658.2,929-947).
ctttgaagagctgtatata

SEQ ID NO: 637535 - DNA, 19 bp, Mus musculus
  siRNA target sequence for Sema4a (NM_013658.2,933-951).
gaagagctgtatatatcca

SEQ ID NO: 637536 - DNA, 19 bp, Mus musculus
  siRNA target sequence for Sema4a (NM_013658.2,1095-1113).
gccgattctccctctgttt

SEQ ID NO: 637537 - DNA, 19 bp, Mus musculus
  siRNA target sequence for Sema4a (NM_013658.2,1115-1133).
ccgcatctacgcagtcttt

SEQ ID NO: 637538 - DNA, 19 bp, Mus musculus
  siRNA target sequence for Sema4a (NM_013658.2,1116-1134).
cgcatctacgcagtcttta

SEQ ID NO: 637539 - DNA, 19 bp, Mus musculus
  siRNA target sequence for Sema4a (NM_013658.2,1193-1211).
ggacattgagcgagtcttt

SEQ ID NO: 637540 - DNA, 19 bp, Mus musculus
  siRNA target sequence for Sema4a (NM_013658.2,1194-1212).
gacattgagcgagtcttta

SEQ ID NO: 637541 - DNA, 19 bp, Mus musculus
  siRNA target sequence for Sema4a (NM_013658.2,1196-1214).
cattgagcgagtctttaaa

SEQ ID NO: 637542 - DNA, 19 bp, Mus musculus
  siRNA target sequence for Sema4a (NM_013658.2,1447-1465).
gcagccatgtggtcatgta

SEQ ID NO: 637543 - DNA, 19 bp, Mus musculus
  siRNA target sequence for Sema4a (NM_013658.2,1448-1466).
cagccatgtggtcatgtat

SEQ ID NO: 637544 - DNA, 19 bp, Mus musculus
  siRNA target sequence for Sema4a (NM_013658.2,1450-1468).
gccatgtggtcatgtatct

SEQ ID NO: 637545 - DNA, 19 bp, Mus musculus
  siRNA target sequence for Sema4a (NM_013658.2,1843-1861).
ctcaactaattaaagaagt

SEQ ID NO: 637546 - DNA, 19 bp, Mus musculus
  siRNA target sequence for Sema4a (NM_013658.2,1933-1951).
gtcatggccgagccaaaat

SEQ ID NO: 637547 - DNA, 19 bp, Mus musculus
  siRNA target sequence for Sema4a (NM_013658.2,1935-1953).
catggccgagccaaaatct

SEQ ID NO: 637548 - DNA, 19 bp, Mus musculus
  siRNA target sequence for Sema4a (NM_013658.2,1961-1979).
ctctgctaccgtctacaat

SEQ ID NO: 637549 - DNA, 19 bp, Mus musculus
  siRNA target sequence for Sema4a (NM_013658.2,2038-2056).
ctgagaacggctactcata

SEQ ID NO: 637550 - DNA, 19 bp, Mus musculus
  siRNA target sequence for Sema4a (NM_013658.2,2194-2212).
cctactggccccattttct

SEQ ID NO: 637551 - DNA, 19 bp, Mus musculus
  siRNA target sequence for Sema4a (NM_013658.2,2288-2306).
gcgggctcggggtaaggtt

SEQ ID NO: 637552 - DNA, 19 bp, Mus musculus
  siRNA target sequence for Sema4d (NM_013660.1,77-95).
ccgttagggggctgttctt

SEQ ID NO: 637553 - DNA, 19 bp, Mus musculus
  siRNA target sequence for Sema4d (NM_013660.1,172-190).
ggtctggtgcagtttcaca

SEQ ID NO: 637554 - DNA, 19 bp, Mus musculus
  siRNA target sequence for Sema4d (NM_013660.1,173-191).
gtctggtgcagtttcacaa

SEQ ID NO: 637555 - DNA, 19 bp, Mus musculus
  siRNA target sequence for Sema4d (NM_013660.1,373-391).
cagacggaatgcctaaact

SEQ ID NO: 637556 - DNA, 19 bp, Mus musculus
  siRNA target sequence for Sema4d (NM_013660.1,377-395).
cggaatgcctaaactacat

SEQ ID NO: 637557 - DNA, 19 bp, Mus musculus
  siRNA target sequence for Sema4d (NM_013660.1,378-396).
ggaatgcctaaactacatt

SEQ ID NO: 637558 - DNA, 19 bp, Mus musculus
  siRNA target sequence for Sema4d (NM_013660.1,416-434).
gcagcacttccctctatgt

SEQ ID NO: 637559 - DNA, 19 bp, Mus musculus
  siRNA target sequence for Sema4d (NM_013660.1,466-484).
gaccacctgaacttgacat

SEQ ID NO: 637560 - DNA, 19 bp, Mus musculus
  siRNA target sequence for Sema4d (NM_013660.1,582-600).
ctctgggacgtcctataat

SEQ ID NO: 637561 - DNA, 19 bp, Mus musculus
  siRNA target sequence for Sema4d (NM_013660.1,584-602).
ctgggacgtcctataattt

SEQ ID NO: 637562 - DNA, 19 bp, Mus musculus
  siRNA target sequence for Sema4d (NM_013660.1,587-605).
ggacgtcctataatttctt

SEQ ID NO: 637563 - DNA, 19 bp, Mus musculus
  siRNA target sequence for Sema4d (NM_013660.1,607-625).
ggcagtgaacccatcatct

SEQ ID NO: 637564 - DNA, 19 bp, Mus musculus
  siRNA target sequence for Sema4d (NM_013660.1,618-636).
catcatctctcgaaactct

SEQ ID NO: 637565 - DNA, 19 bp, Mus musculus
  siRNA target sequence for Sema4d (NM_013660.1,728-746).
gtccggagggtgaagatga

SEQ ID NO: 637566 - DNA, 19 bp, Mus musculus
  siRNA target sequence for Sema4d (NM_013660.1,776-794).
ccgtggagtacgaattcgt

SEQ ID NO: 637567 - DNA, 19 bp, Mus musculus
  siRNA target sequence for Sema4d (NM_013660.1,787-805).
gaattcgtcttcaagttga

SEQ ID NO: 637568 - DNA, 19 bp, Mus musculus
  siRNA target sequence for Sema4d (NM_013660.1,847-865).
ggcctgcggactttgcaaa

SEQ ID NO: 637569 - DNA, 19 bp, Mus musculus
  siRNA target sequence for Sema4d (NM_013660.1,848-866).
gcctgcggactttgcaaaa

SEQ ID NO: 637570 - DNA, 19 bp, Mus musculus
  siRNA target sequence for Sema4d (NM_013660.1,853-871).
cggactttgcaaaaaaagt

SEQ ID NO: 637571 - DNA, 19 bp, Mus musculus
  siRNA target sequence for Sema4d (NM_013660.1,999-1017).
caccccacagctgaacaat

SEQ ID NO: 637572 - DNA, 19 bp, Mus musculus
  siRNA target sequence for Sema4d (NM_013660.1,1001-1019).
ccccacagctgaacaatgt

SEQ ID NO: 637573 - DNA, 19 bp, Mus musculus
  siRNA target sequence for Sema4d (NM_013660.1,1392-1410).
ccggggagctctgcataaa

SEQ ID NO: 637574 - DNA, 19 bp, Mus musculus
  siRNA target sequence for Sema4d (NM_013660.1,1486-1504).
ctgctgctatcgtcaaaga

SEQ ID NO: 637575 - DNA, 19 bp, Mus musculus
  siRNA target sequence for Sema4d (NM_013660.1,1713-1731).
ctcatgcctggataagagt

SEQ ID NO: 637576 - DNA, 19 bp, Mus musculus
  siRNA target sequence for Sema4d (NM_013660.1,1718-1736).
gcctggataagagtaaaga

SEQ ID NO: 637577 - DNA, 19 bp, Mus musculus
  siRNA target sequence for Sema4d (NM_013660.1,1719-1737).
cctggataagagtaaagaa

SEQ ID NO: 637578 - DNA, 19 bp, Mus musculus
  siRNA target sequence for Sema4d (NM_013660.1,1739-1757).
gtttcaaccagcatttttt

SEQ ID NO: 637579 - DNA, 19 bp, Mus musculus
  siRNA target sequence for Sema4d (NM_013660.1,1767-1785).
cggcacagcggaactcaaa

SEQ ID NO: 637580 - DNA, 19 bp, Mus musculus
  siRNA target sequence for Sema4d (NM_013660.1,1768-1786).
ggcacagcggaactcaaat

SEQ ID NO: 637581 - DNA, 19 bp, Mus musculus
  siRNA target sequence for Sema4d (NM_013660.1,1770-1788).
cacagcggaactcaaatgt

SEQ ID NO: 637582 - DNA, 19 bp, Mus musculus
  siRNA target sequence for Sema4d (NM_013660.1,2335-2353).
ctgcccggacagtgcttaa

SEQ ID NO: 637583 - DNA, 19 bp, Mus musculus
  siRNA target sequence for Sema4d (NM_013660.1,2338-2356).
cccggacagtgcttaaaat

SEQ ID NO: 637584 - DNA, 19 bp, Mus musculus
  siRNA target sequence for Sema4d (NM_013660.1,2582-2600).
gggacaaaccgtttgatgt

SEQ ID NO: 637585 - DNA, 19 bp, Mus musculus
  siRNA target sequence for Sema4f (NM_011350.2,272-290).
cccctcatacgtacaatta

SEQ ID NO: 637586 - DNA, 19 bp, Mus musculus
  siRNA target sequence for Sema4f (NM_011350.2,274-292).
cctcatacgtacaattact

SEQ ID NO: 637587 - DNA, 19 bp, Mus musculus
  siRNA target sequence for Sema4f (NM_011350.2,311-329).
ctgcttctcacacacttta

SEQ ID NO: 637588 - DNA, 19 bp, Mus musculus
  siRNA target sequence for Sema4f (NM_011350.2,314-332).
cttctcacacactttacgt

SEQ ID NO: 637589 - DNA, 19 bp, Mus musculus
  siRNA target sequence for Sema4f (NM_011350.2,451-469).
gaggacgaatgtcacaatt

SEQ ID NO: 637590 - DNA, 19 bp, Mus musculus
  siRNA target sequence for Sema4f (NM_011350.2,453-471).
ggacgaatgtcacaatttt

SEQ ID NO: 637591 - DNA, 19 bp, Mus musculus
  siRNA target sequence for Sema4f (NM_011350.2,515-533).
gtggcaccttcgcttttga

SEQ ID NO: 637592 - DNA, 19 bp, Mus musculus
  siRNA target sequence for Sema4f (NM_011350.2,536-554).
cgaagtgcggggttattga

SEQ ID NO: 637593 - DNA, 19 bp, Mus musculus
  siRNA target sequence for Sema4f (NM_011350.2,537-555).
gaagtgcggggttattgat

SEQ ID NO: 637594 - DNA, 19 bp, Mus musculus
  siRNA target sequence for Sema4f (NM_011350.2,567-585).
ccagcaggttgaaagactt

SEQ ID NO: 637595 - DNA, 19 bp, Mus musculus
  siRNA target sequence for Sema4f (NM_011350.2,657-675).
ctacaccgccactgtgaaa

SEQ ID NO: 637596 - DNA, 19 bp, Mus musculus
  siRNA target sequence for Sema4f (NM_011350.2,662-680).
ccgccactgtgaaaaactt

SEQ ID NO: 637597 - DNA, 19 bp, Mus musculus
  siRNA target sequence for Sema4f (NM_011350.2,721-739).
gctgaggactggattcgaa

SEQ ID NO: 637598 - DNA, 19 bp, Mus musculus
  siRNA target sequence for Sema4f (NM_011350.2,736-754).
cgaacagagaccttgtcat

SEQ ID NO: 637599 - DNA, 19 bp, Mus musculus
  siRNA target sequence for Sema4f (NM_011350.2,747-765).
cttgtcatcctggcttaat

SEQ ID NO: 637600 - DNA, 19 bp, Mus musculus
  siRNA target sequence for Sema4f (NM_011350.2,823-841).
ggagacgatgaaatcttct

SEQ ID NO: 637601 - DNA, 19 bp, Mus musculus
  siRNA target sequence for Sema4f (NM_011350.2,824-842).
gagacgatgaaatcttctt

SEQ ID NO: 637602 - DNA, 19 bp, Mus musculus
  siRNA target sequence for Sema4f (NM_011350.2,860-878).
cccgagtcttggactcata

SEQ ID NO: 637603 - DNA, 19 bp, Mus musculus
  siRNA target sequence for Sema4f (NM_011350.2,861-879).
ccgagtcttggactcatat

SEQ ID NO: 637604 - DNA, 19 bp, Mus musculus
  siRNA target sequence for Sema4f (NM_011350.2,863-881).
gagtcttggactcatatga

SEQ ID NO: 637605 - DNA, 19 bp, Mus musculus
  siRNA target sequence for Sema4f (NM_011350.2,1015-1033).
ggggttctgcaggatatga

SEQ ID NO: 637606 - DNA, 19 bp, Mus musculus
  siRNA target sequence for Sema4f (NM_011350.2,1017-1035).
ggttctgcaggatatgaca

SEQ ID NO: 637607 - DNA, 19 bp, Mus musculus
  siRNA target sequence for Sema4f (NM_011350.2,1068-1086).
cctcttttatggcatcttt

SEQ ID NO: 637608 - DNA, 19 bp, Mus musculus
  siRNA target sequence for Sema4f (NM_011350.2,1127-1145).
ccttccgaccccaagacat

SEQ ID NO: 637609 - DNA, 19 bp, Mus musculus
  siRNA target sequence for Sema4f (NM_011350.2,1155-1173).
gctgaatggtccctttaga

SEQ ID NO: 637610 - DNA, 19 bp, Mus musculus
  siRNA target sequence for Sema4f (NM_011350.2,1163-1181).
gtccctttagagagctaaa

SEQ ID NO: 637611 - DNA, 19 bp, Mus musculus
  siRNA target sequence for Sema4f (NM_011350.2,1300-1318).
gaccgtgtgctcaccttta

SEQ ID NO: 637612 - DNA, 19 bp, Mus musculus
  siRNA target sequence for Sema4f (NM_011350.2,1427-1445).
gcctctcagggaaagaata

SEQ ID NO: 637613 - DNA, 19 bp, Mus musculus
  siRNA target sequence for Sema4f (NM_011350.2,1552-1570).
ccggttgagagcatgaaat

SEQ ID NO: 637614 - DNA, 19 bp, Mus musculus
  siRNA target sequence for Sema4f (NM_011350.2,1553-1571).
cggttgagagcatgaaatt

SEQ ID NO: 637615 - DNA, 19 bp, Mus musculus
  siRNA target sequence for Sema4f (NM_011350.2,1604-1622).
ctgaggtgacacaagtgaa

SEQ ID NO: 637616 - DNA, 19 bp, Mus musculus
  siRNA target sequence for Sema4f (NM_011350.2,1736-1754).
gtgggatggttcaagacat

SEQ ID NO: 637617 - DNA, 19 bp, Mus musculus
  siRNA target sequence for Sema4f (NM_011350.2,1739-1757).
ggatggttcaagacataga

SEQ ID NO: 637618 - DNA, 19 bp, Mus musculus
  siRNA target sequence for Sema4f (NM_011350.2,2004-2022).
ccgtgtggtggctgcttat

SEQ ID NO: 637619 - DNA, 19 bp, Mus musculus
  siRNA target sequence for Sema4g (NM_011976.1,413-431).
ctcctcttcagctttctca

SEQ ID NO: 637620 - DNA, 19 bp, Mus musculus
  siRNA target sequence for Sema4g (NM_011976.1,522-540).
cccagattcggcacttcaa

SEQ ID NO: 637621 - DNA, 19 bp, Mus musculus
  siRNA target sequence for Sema4g (NM_011976.1,542-560).
ggccaaacccagaactatt

SEQ ID NO: 637622 - DNA, 19 bp, Mus musculus
  siRNA target sequence for Sema4g (NM_011976.1,630-648).
gtgcccgtgacataagaga

SEQ ID NO: 637623 - DNA, 19 bp, Mus musculus
  siRNA target sequence for Sema4g (NM_011976.1,632-650).
gcccgtgacataagagata

SEQ ID NO: 637624 - DNA, 19 bp, Mus musculus
  siRNA target sequence for Sema4g (NM_011976.1,645-663).
gagataggactcacaaaga

SEQ ID NO: 637625 - DNA, 19 bp, Mus musculus
  siRNA target sequence for Sema4g (NM_011976.1,647-665).
gataggactcacaaagaga

SEQ ID NO: 637626 - DNA, 19 bp, Mus musculus
  siRNA target sequence for Sema4g (NM_011976.1,739-757).
caaccacgtgcgatttcta

SEQ ID NO: 637627 - DNA, 19 bp, Mus musculus
  siRNA target sequence for Sema4g (NM_011976.1,770-788).
gccacccacttctatgcat

SEQ ID NO: 637628 - DNA, 19 bp, Mus musculus
  siRNA target sequence for Sema4g (NM_011976.1,822-840).
ctattgatgctgaaacctt

SEQ ID NO: 637629 - DNA, 19 bp, Mus musculus
  siRNA target sequence for Sema4g (NM_011976.1,838-856).
cttcatcttgcctactagt

SEQ ID NO: 637630 - DNA, 19 bp, Mus musculus
  siRNA target sequence for Sema4g (NM_011976.1,900-918).
gcttcacaggccttatcat

SEQ ID NO: 637631 - DNA, 19 bp, Mus musculus
  siRNA target sequence for Sema4g (NM_011976.1,901-919).
cttcacaggccttatcatt

SEQ ID NO: 637632 - DNA, 19 bp, Mus musculus
  siRNA target sequence for Sema4g (NM_011976.1,936-954).
cagccacccggtatgaatt

SEQ ID NO: 637633 - DNA, 19 bp, Mus musculus
  siRNA target sequence for Sema4g (NM_011976.1,1061-1079).
gtgcgggagagcaagacaa

SEQ ID NO: 637634 - DNA, 19 bp, Mus musculus
  siRNA target sequence for Sema4g (NM_011976.1,1089-1107).
gtgatgatgacaagattta

SEQ ID NO: 637635 - DNA, 19 bp, Mus musculus
  siRNA target sequence for Sema4g (NM_011976.1,1091-1109).
gatgatgacaagatttatt

SEQ ID NO: 637636 - DNA, 19 bp, Mus musculus
  siRNA target sequence for Sema4g (NM_011976.1,1165-1183).
ccaccgtgtggctagagta

SEQ ID NO: 637637 - DNA, 19 bp, Mus musculus
  siRNA target sequence for Sema4g (NM_011976.1,1508-1526).
ggctcgtgcatcacagatt

SEQ ID NO: 637638 - DNA, 19 bp, Mus musculus
  siRNA target sequence for Sema4g (NM_011976.1,1510-1528).
ctcgtgcatcacagattca

SEQ ID NO: 637639 - DNA, 19 bp, Mus musculus
  siRNA target sequence for Sema4g (NM_011976.1,1532-1550).
cgcagccgaggctacaact

SEQ ID NO: 637640 - DNA, 19 bp, Mus musculus
  siRNA target sequence for Sema4g (NM_011976.1,1770-1788).
gctctgggatgcacataat

SEQ ID NO: 637641 - DNA, 19 bp, Mus musculus
  siRNA target sequence for Sema4g (NM_011976.1,1771-1789).
ctctgggatgcacataatt

SEQ ID NO: 637642 - DNA, 19 bp, Mus musculus
  siRNA target sequence for Sema4g (NM_011976.1,1783-1801).
cataattgaagagatacaa

SEQ ID NO: 637643 - DNA, 19 bp, Mus musculus
  siRNA target sequence for Sema4g (NM_011976.1,1821-1839).
ctgtggacaatctagttat

SEQ ID NO: 637644 - DNA, 19 bp, Mus musculus
  siRNA target sequence for Sema4g (NM_011976.1,1823-1841).
gtggacaatctagttatct

SEQ ID NO: 637645 - DNA, 19 bp, Mus musculus
  siRNA target sequence for Sema4g (NM_011976.1,1825-1843).
ggacaatctagttatctca

SEQ ID NO: 637646 - DNA, 19 bp, Mus musculus
  siRNA target sequence for Sema4g (NM_011976.1,2007-2025).
ccaacaggacagaattgat

SEQ ID NO: 637647 - DNA, 19 bp, Mus musculus
  siRNA target sequence for Sema4g (NM_011976.1,2161-2179).
ggctttgtggctactcaat

SEQ ID NO: 637648 - DNA, 19 bp, Mus musculus
  siRNA target sequence for Sema4g (NM_011976.1,2396-2414).
catgacatgaggatgttct

SEQ ID NO: 637649 - DNA, 19 bp, Mus musculus
  siRNA target sequence for Sema4g (NM_011976.1,2501-2519).
cgaggtcgaagacgaaaat

SEQ ID NO: 637650 - DNA, 19 bp, Mus musculus
  siRNA target sequence for Sema4g (NM_011976.1,2502-2520).
gaggtcgaagacgaaaata

SEQ ID NO: 637651 - DNA, 19 bp, Mus musculus
  siRNA target sequence for Sema4g (NM_011976.1,2504-2522).
ggtcgaagacgaaaatact

SEQ ID NO: 637652 - DNA, 19 bp, Mus musculus
  siRNA target sequence for Sema4g (NM_011976.1,2507-2525).
cgaagacgaaaatactcat

SEQ ID NO: 637653 - DNA, 19 bp, Mus musculus
  siRNA target sequence for Sema4g (NM_011976.1,2508-2526).
gaagacgaaaatactcatt

SEQ ID NO: 637654 - DNA, 19 bp, Mus musculus
  siRNA target sequence for Sema5b (NM_013661.1,464-482).
gtacgagtcctgattgttt

SEQ ID NO: 637655 - DNA, 19 bp, Mus musculus
  siRNA target sequence for Sema5b (NM_013661.1,496-514).
gttcatgtgcggtaccaat

SEQ ID NO: 637656 - DNA, 19 bp, Mus musculus
  siRNA target sequence for Sema5b (NM_013661.1,550-568).
gaacctcagccggactatt

SEQ ID NO: 637657 - DNA, 19 bp, Mus musculus
  siRNA target sequence for Sema5b (NM_013661.1,554-572).
ctcagccggactattgaga

SEQ ID NO: 637658 - DNA, 19 bp, Mus musculus
  siRNA target sequence for Sema5b (NM_013661.1,558-576).
gccggactattgagaagat

SEQ ID NO: 637659 - DNA, 19 bp, Mus musculus
  siRNA target sequence for Sema5b (NM_013661.1,602-620).
gacccacgccacaactcta

SEQ ID NO: 637660 - DNA, 19 bp, Mus musculus
  siRNA target sequence for Sema5b (NM_013661.1,722-740).
cttcgcactgcccagtata

SEQ ID NO: 637661 - DNA, 19 bp, Mus musculus
  siRNA target sequence for Sema5b (NM_013661.1,725-743).
cgcactgcccagtataact

SEQ ID NO: 637662 - DNA, 19 bp, Mus musculus
  siRNA target sequence for Sema5b (NM_013661.1,788-806).
gggctgtttgcgtatttct

SEQ ID NO: 637663 - DNA, 19 bp, Mus musculus
  siRNA target sequence for Sema5b (NM_013661.1,789-807).
ggctgtttgcgtatttctt

SEQ ID NO: 637664 - DNA, 19 bp, Mus musculus
  siRNA target sequence for Sema5b (NM_013661.1,908-926).
gacacgtggaccacattca

SEQ ID NO: 637665 - DNA, 19 bp, Mus musculus
  siRNA target sequence for Sema5b (NM_013661.1,912-930).
cgtggaccacattcatgaa

SEQ ID NO: 637666 - DNA, 19 bp, Mus musculus
  siRNA target sequence for Sema5b (NM_013661.1,1005-1023).
ccgagcaggacctcatcta

SEQ ID NO: 637667 - DNA, 19 bp, Mus musculus
  siRNA target sequence for Sema5b (NM_013661.1,1027-1045).
cgtcttcaccactaacgta

SEQ ID NO: 637668 - DNA, 19 bp, Mus musculus
  siRNA target sequence for Sema5b (NM_013661.1,1028-1046).
gtcttcaccactaacgtaa

SEQ ID NO: 637669 - DNA, 19 bp, Mus musculus
  siRNA target sequence for Sema5b (NM_013661.1,1090-1108).
catctccaaggctttcaat

SEQ ID NO: 637670 - DNA, 19 bp, Mus musculus
  siRNA target sequence for Sema5b (NM_013661.1,1113-1131).
catttcgttaccaggaaaa

SEQ ID NO: 637671 - DNA, 19 bp, Mus musculus
  siRNA target sequence for Sema5b (NM_013661.1,1350-1368).
ctaaggacacgctctatca

SEQ ID NO: 637672 - DNA, 19 bp, Mus musculus
  siRNA target sequence for Sema5b (NM_013661.1,1359-1377).
cgctctatcacgtactcta

SEQ ID NO: 637673 - DNA, 19 bp, Mus musculus
  siRNA target sequence for Sema5b (NM_013661.1,1570-1588).
gaggtgttcggcctatcat

SEQ ID NO: 637674 - DNA, 19 bp, Mus musculus
  siRNA target sequence for Sema5b (NM_013661.1,1664-1682).
gaagacagttccaacatga

SEQ ID NO: 637675 - DNA, 19 bp, Mus musculus
  siRNA target sequence for Sema5b (NM_013661.1,1704-1722).
caacctgtcctgtacgaaa

SEQ ID NO: 637676 - DNA, 19 bp, Mus musculus
  siRNA target sequence for Sema5b (NM_013661.1,1707-1725).
cctgtcctgtacgaaatgt

SEQ ID NO: 637677 - DNA, 19 bp, Mus musculus
  siRNA target sequence for Sema5b (NM_013661.1,2030-2048).
cgggaggagcggttctgta

SEQ ID NO: 637678 - DNA, 19 bp, Mus musculus
  siRNA target sequence for Sema5b (NM_013661.1,2031-2049).
gggaggagcggttctgtaa

SEQ ID NO: 637679 - DNA, 19 bp, Mus musculus
  siRNA target sequence for Sema5b (NM_013661.1,2035-2053).
ggagcggttctgtaatgaa

SEQ ID NO: 637680 - DNA, 19 bp, Mus musculus
  siRNA target sequence for Sema5b (NM_013661.1,2036-2054).
gagcggttctgtaatgaaa

SEQ ID NO: 637681 - DNA, 19 bp, Mus musculus
  siRNA target sequence for Sema5b (NM_013661.1,2038-2056).
gcggttctgtaatgaaaat

SEQ ID NO: 637682 - DNA, 19 bp, Mus musculus
  siRNA target sequence for Sema5b (NM_013661.1,2039-2057).
cggttctgtaatgaaaata

SEQ ID NO: 637683 - DNA, 19 bp, Mus musculus
  siRNA target sequence for Sema5b (NM_013661.1,2178-2196).
gttgcggcgtggagttcaa

SEQ ID NO: 637684 - DNA, 19 bp, Mus musculus
  siRNA target sequence for Sema5b (NM_013661.1,2528-2546).
cgcgtccgcaagagaactt

SEQ ID NO: 637685 - DNA, 19 bp, Mus musculus
  siRNA target sequence for Sema5b (NM_013661.1,2531-2549).
gtccgcaagagaacttgta

SEQ ID NO: 637686 - DNA, 19 bp, Mus musculus
  siRNA target sequence for Sema5b (NM_013661.1,2994-3012).
gtggagggttcaatctcat

SEQ ID NO: 637687 - DNA, 19 bp, Mus musculus
  siRNA target sequence for Sema5b (NM_013661.1,3008-3026).
ctcatccacctgatagtca

SEQ ID NO: 637688 - DNA, 19 bp, Mus musculus
  siRNA target sequence for Sema5b (NM_013661.1,3181-3199).
gaagtacacccctatggaa

SEQ ID NO: 637689 - DNA, 19 bp, Mus musculus
  siRNA target sequence for Sema5b (NM_013661.1,3207-3225).
cactgaacaagaacaactt

SEQ ID NO: 637690 - DNA, 19 bp, Mus musculus
  siRNA target sequence for Sh2d3c (NM_013781.2,191-209).
cttcagcctctgctagtat

SEQ ID NO: 637691 - DNA, 19 bp, Mus musculus
  siRNA target sequence for Sh2d3c (NM_013781.2,292-310).
cgttctagtgacatgtaca

SEQ ID NO: 637692 - DNA, 19 bp, Mus musculus
  siRNA target sequence for Sh2d3c (NM_013781.2,489-507).
ggcaccttcagcagtagaa

SEQ ID NO: 637693 - DNA, 19 bp, Mus musculus
  siRNA target sequence for Sh2d3c (NM_013781.2,607-625).
gccgctggggactatgtga

SEQ ID NO: 637694 - DNA, 19 bp, Mus musculus
  siRNA target sequence for Sh2d3c (NM_013781.2,608-626).
ccgctggggactatgtgaa

SEQ ID NO: 637695 - DNA, 19 bp, Mus musculus
  siRNA target sequence for Sh2d3c (NM_013781.2,611-629).
ctggggactatgtgaagtt

SEQ ID NO: 637696 - DNA, 19 bp, Mus musculus
  siRNA target sequence for Sh2d3c (NM_013781.2,613-631).
ggggactatgtgaagttct

SEQ ID NO: 637697 - DNA, 19 bp, Mus musculus
  siRNA target sequence for Sh2d3c (NM_013781.2,836-854).
cgtgccgctggcacaatca

SEQ ID NO: 637698 - DNA, 19 bp, Mus musculus
  siRNA target sequence for Sh2d3c (NM_013781.2,853-871).
caggccttgcacttcaaga

SEQ ID NO: 637699 - DNA, 19 bp, Mus musculus
  siRNA target sequence for Sh2d3c (NM_013781.2,856-874).
gccttgcacttcaagatca

SEQ ID NO: 637700 - DNA, 19 bp, Mus musculus
  siRNA target sequence for Sh2d3c (NM_013781.2,857-875).
ccttgcacttcaagatcaa

SEQ ID NO: 637701 - DNA, 19 bp, Mus musculus
  siRNA target sequence for Sh2d3c (NM_013781.2,1203-1221).
ccccaacagcacctcatta

SEQ ID NO: 637702 - DNA, 19 bp, Mus musculus
  siRNA target sequence for Sh2d3c (NM_013781.2,1321-1339).
cctgcctatagcactgtaa

SEQ ID NO: 637703 - DNA, 19 bp, Mus musculus
  siRNA target sequence for Sh2d3c (NM_013781.2,1420-1438).
cagctatgtcctggaaata

SEQ ID NO: 637704 - DNA, 19 bp, Mus musculus
  siRNA target sequence for Sh2d3c (NM_013781.2,1631-1649).
ccggagagaggcaaaagga

SEQ ID NO: 637705 - DNA, 19 bp, Mus musculus
  siRNA target sequence for Sh2d3c (NM_013781.2,2098-2116).
gggacgatgggcaacatgt

SEQ ID NO: 637706 - DNA, 19 bp, Mus musculus
  siRNA target sequence for Sh2d3c (NM_013781.2,2099-2117).
ggacgatgggcaacatgtt

SEQ ID NO: 637707 - DNA, 19 bp, Mus musculus
  siRNA target sequence for Sh2d3c (NM_013781.2,2204-2222).
cggagggtgccattctgta

SEQ ID NO: 637708 - DNA, 19 bp, Mus musculus
  siRNA target sequence for Sh2d3c (NM_013781.2,2302-2320).
cacgtacttcctttcatta

SEQ ID NO: 637709 - DNA, 19 bp, Mus musculus
  siRNA target sequence for Sh2d3c (NM_013781.2,2304-2322).
cgtacttcctttcattact

SEQ ID NO: 637710 - DNA, 19 bp, Mus musculus
  siRNA target sequence for Sh2d3c (NM_013781.2,2570-2588).
cctggcgctatgagaagtt

SEQ ID NO: 637711 - DNA, 19 bp, Mus musculus
  siRNA target sequence for Sh2d3c (NM_013781.2,2573-2591).
ggcgctatgagaagtttga

SEQ ID NO: 637712 - DNA, 19 bp, Mus musculus
  siRNA target sequence for Sh2d3c (NM_013781.2,2576-2594).
gctatgagaagtttgacaa

SEQ ID NO: 637713 - DNA, 19 bp, Mus musculus
  siRNA target sequence for Sh2d3c (NM_013781.2,2577-2595).
ctatgagaagtttgacaaa

SEQ ID NO: 637714 - DNA, 19 bp, Mus musculus
  siRNA target sequence for Slamf1 (NM_013730.2,147-165).
ggtggaggtgtgatggatt

SEQ ID NO: 637715 - DNA, 19 bp, Mus musculus
  siRNA target sequence for Slamf1 (NM_013730.2,158-176).
gatggattgcccagtgatt

SEQ ID NO: 637716 - DNA, 19 bp, Mus musculus
  siRNA target sequence for Slamf1 (NM_013730.2,203-221).
gctgcccctgacgaatgaa

SEQ ID NO: 637717 - DNA, 19 bp, Mus musculus
  siRNA target sequence for Slamf1 (NM_013730.2,206-224).
gcccctgacgaatgaacat

SEQ ID NO: 637718 - DNA, 19 bp, Mus musculus
  siRNA target sequence for Slamf1 (NM_013730.2,212-230).
gacgaatgaacatcagata

SEQ ID NO: 637719 - DNA, 19 bp, Mus musculus
  siRNA target sequence for Slamf1 (NM_013730.2,214-232).
cgaatgaacatcagataaa

SEQ ID NO: 637720 - DNA, 19 bp, Mus musculus
  siRNA target sequence for Slamf1 (NM_013730.2,215-233).
gaatgaacatcagataaat

SEQ ID NO: 637721 - DNA, 19 bp, Mus musculus
  siRNA target sequence for Slamf1 (NM_013730.2,353-371).
ggatggctaccactttcaa

SEQ ID NO: 637722 - DNA, 19 bp, Mus musculus
  siRNA target sequence for Slamf1 (NM_013730.2,354-372).
gatggctaccactttcaat

SEQ ID NO: 637723 - DNA, 19 bp, Mus musculus
  siRNA target sequence for Slamf1 (NM_013730.2,469-487).
gcaagcagctgaagcttta

SEQ ID NO: 637724 - DNA, 19 bp, Mus musculus
  siRNA target sequence for Slamf1 (NM_013730.2,509-527).
gattaaagtgctaaacaaa

SEQ ID NO: 637725 - DNA, 19 bp, Mus musculus
  siRNA target sequence for Slamf1 (NM_013730.2,585-603).
ggggaccatgtgacttaca

SEQ ID NO: 637726 - DNA, 19 bp, Mus musculus
  siRNA target sequence for Slamf1 (NM_013730.2,657-675).
ctcctgcacatcactctta

SEQ ID NO: 637727 - DNA, 19 bp, Mus musculus
  siRNA target sequence for Slamf1 (NM_013730.2,687-705).
caagacagcatctacaact

SEQ ID NO: 637728 - DNA, 19 bp, Mus musculus
  siRNA target sequence for Slamf1 (NM_013730.2,790-808).
cgagtccatggatgcaata

SEQ ID NO: 637729 - DNA, 19 bp, Mus musculus
  siRNA target sequence for Slamf1 (NM_013730.2,796-814).
catggatgcaatatactct

SEQ ID NO: 637730 - DNA, 19 bp, Mus musculus
  siRNA target sequence for Slamf1 (NM_013730.2,800-818).
gatgcaatatactcttgta

SEQ ID NO: 637731 - DNA, 19 bp, Mus musculus
  siRNA target sequence for Slamf1 (NM_013730.2,820-838).
cactgggggtcgttataat

SEQ ID NO: 637732 - DNA, 19 bp, Mus musculus
  siRNA target sequence for Slamf1 (NM_013730.2,822-840).
ctgggggtcgttataatct

SEQ ID NO: 637733 - DNA, 19 bp, Mus musculus
  siRNA target sequence for Slamf1 (NM_013730.2,846-864).
ctggttttcacggcaataa

SEQ ID NO: 637734 - DNA, 19 bp, Mus musculus
  siRNA target sequence for Slamf1 (NM_013730.2,879-897).
caaggtaaatcaaatcact

SEQ ID NO: 637735 - DNA, 19 bp, Mus musculus
  siRNA target sequence for Slamf1 (NM_013730.2,900-918).
cagccaccagtggaagaaa

SEQ ID NO: 637736 - DNA, 19 bp, Mus musculus
  siRNA target sequence for Slamf1 (NM_013730.2,955-973).
ggcctcaagagaagaaact

SEQ ID NO: 637737 - DNA, 19 bp, Mus musculus
  siRNA target sequence for Slamf1 (NM_013730.2,995-1013).
ggacccctgcacaaccatt

SEQ ID NO: 637738 - DNA, 19 bp, Mus musculus
  siRNA target sequence for Slamf1 (NM_013730.2,996-1014).
gacccctgcacaaccattt

SEQ ID NO: 637739 - DNA, 19 bp, Mus musculus
  siRNA target sequence for Slamf1 (NM_013730.2,998-1016).
cccctgcacaaccatttat

SEQ ID NO: 637740 - DNA, 19 bp, Mus musculus
  siRNA target sequence for Slamf1 (NM_013730.2,1057-1075).
caaaccccaccacagttta

SEQ ID NO: 637741 - DNA, 19 bp, Mus musculus
  siRNA target sequence for Slc20a1 (NM_015747.1,476-494).
gtggcaacgattactagta

SEQ ID NO: 637742 - DNA, 19 bp, Mus musculus
  siRNA target sequence for Slc20a1 (NM_015747.1,516-534).
ccgctccaccgaagtatga

SEQ ID NO: 637743 - DNA, 19 bp, Mus musculus
  siRNA target sequence for Slc20a1 (NM_015747.1,518-536).
gctccaccgaagtatgaca

SEQ ID NO: 637744 - DNA, 19 bp, Mus musculus
  siRNA target sequence for Slc20a1 (NM_015747.1,519-537).
ctccaccgaagtatgacaa

SEQ ID NO: 637745 - DNA, 19 bp, Mus musculus
  siRNA target sequence for Slc20a1 (NM_015747.1,524-542).
ccgaagtatgacaatctat

SEQ ID NO: 637746 - DNA, 19 bp, Mus musculus
  siRNA target sequence for Slc20a1 (NM_015747.1,586-604).
ctccgtgggagccaatgat

SEQ ID NO: 637747 - DNA, 19 bp, Mus musculus
  siRNA target sequence for Slc20a1 (NM_015747.1,588-606).
ccgtgggagccaatgatgt

SEQ ID NO: 637748 - DNA, 19 bp, Mus musculus
  siRNA target sequence for Slc20a1 (NM_015747.1,589-607).
cgtgggagccaatgatgta

SEQ ID NO: 637749 - DNA, 19 bp, Mus musculus
  siRNA target sequence for Slc20a1 (NM_015747.1,596-614).
gccaatgatgtagcaaatt

SEQ ID NO: 637750 - DNA, 19 bp, Mus musculus
  siRNA target sequence for Slc20a1 (NM_015747.1,711-729).
ccaaagtgagcgaaaccat

SEQ ID NO: 637751 - DNA, 19 bp, Mus musculus
  siRNA target sequence for Slc20a1 (NM_015747.1,727-745).
catccggaacggcttgata

SEQ ID NO: 637752 - DNA, 19 bp, Mus musculus
  siRNA target sequence for Slc20a1 (NM_015747.1,730-748).
ccggaacggcttgatagat

SEQ ID NO: 637753 - DNA, 19 bp, Mus musculus
  siRNA target sequence for Slc20a1 (NM_015747.1,732-750).
ggaacggcttgatagatgt

SEQ ID NO: 637754 - DNA, 19 bp, Mus musculus
  siRNA target sequence for Slc20a1 (NM_015747.1,754-772).
gctgtacaacgaaactcaa

SEQ ID NO: 637755 - DNA, 19 bp, Mus musculus
  siRNA target sequence for Slc20a1 (NM_015747.1,757-775).
gtacaacgaaactcaagat

SEQ ID NO: 637756 - DNA, 19 bp, Mus musculus
  siRNA target sequence for Slc20a1 (NM_015747.1,789-807).
gctccgtcagtgctatgtt

SEQ ID NO: 637757 - DNA, 19 bp, Mus musculus
  siRNA target sequence for Slc20a1 (NM_015747.1,827-845).
ctcgtggcttcgtttttga

SEQ ID NO: 637758 - DNA, 19 bp, Mus musculus
  siRNA target sequence for Slc20a1 (NM_015747.1,875-893).
gtcggtgcaaccattggtt

SEQ ID NO: 637759 - DNA, 19 bp, Mus musculus
  siRNA target sequence for Slc20a1 (NM_015747.1,930-948).
ggtctgaactgataaaaat

SEQ ID NO: 637760 - DNA, 19 bp, Mus musculus
  siRNA target sequence for Slc20a1 (NM_015747.1,931-949).
gtctgaactgataaaaatt

SEQ ID NO: 637761 - DNA, 19 bp, Mus musculus
  siRNA target sequence for Slc20a1 (NM_015747.1,971-989).
ccgctgctttctggtatta

SEQ ID NO: 637762 - DNA, 19 bp, Mus musculus
  siRNA target sequence for Slc20a1 (NM_015747.1,976-994).
gctttctggtattatgtct

SEQ ID NO: 637763 - DNA, 19 bp, Mus musculus
  siRNA target sequence for Slc20a1 (NM_015747.1,983-1001).
ggtattatgtctggaattt

SEQ ID NO: 637764 - DNA, 19 bp, Mus musculus
  siRNA target sequence for Slc20a1 (NM_015747.1,1036-1054).
ggcagatccggttcctaat

SEQ ID NO: 637765 - DNA, 19 bp, Mus musculus
  siRNA target sequence for Slc20a1 (NM_015747.1,1055-1073).
ggcttacgagctttaccaa

SEQ ID NO: 637766 - DNA, 19 bp, Mus musculus
  siRNA target sequence for Slc20a1 (NM_015747.1,1056-1074).
gcttacgagctttaccaat

SEQ ID NO: 637767 - DNA, 19 bp, Mus musculus
  siRNA target sequence for Slc20a1 (NM_015747.1,1057-1075).
cttacgagctttaccaatt

SEQ ID NO: 637768 - DNA, 19 bp, Mus musculus
  siRNA target sequence for Slc20a1 (NM_015747.1,1130-1148).
ccgttgctgggctttgaca

SEQ ID NO: 637769 - DNA, 19 bp, Mus musculus
  siRNA target sequence for Slc20a1 (NM_015747.1,1344-1362).
gagacgttgagcataggaa

SEQ ID NO: 637770 - DNA, 19 bp, Mus musculus
  siRNA target sequence for Slc20a1 (NM_015747.1,1419-1437).
ggacggtgtcattcaaact

SEQ ID NO: 637771 - DNA, 19 bp, Mus musculus
  siRNA target sequence for Slc20a1 (NM_015747.1,1420-1438).
gacggtgtcattcaaactt

SEQ ID NO: 637772 - DNA, 19 bp, Mus musculus
  siRNA target sequence for Slc20a1 (NM_015747.1,1536-1554).
ctaatgggaaccttgttca

SEQ ID NO: 637773 - DNA, 19 bp, Mus musculus
  siRNA target sequence for Slc20a1 (NM_015747.1,1566-1584).
ctgtcagcaaccagatcaa

SEQ ID NO: 637774 - DNA, 19 bp, Mus musculus
  siRNA target sequence for Slc20a1 (NM_015747.1,1590-1608).
gtggccactatcagtatca

SEQ ID NO: 637775 - DNA, 19 bp, Mus musculus
  siRNA target sequence for Slc20a1 (NM_015747.1,1639-1657).
ggagctgctccataagtta

SEQ ID NO: 637776 - DNA, 19 bp, Mus musculus
  siRNA target sequence for Slc20a1 (NM_015747.1,1642-1660).
gctgctccataagttacat

SEQ ID NO: 637777 - DNA, 19 bp, Mus musculus
  siRNA target sequence for Slc20a1 (NM_015747.1,1703-1721).
cccttgagacgcaacaaca

SEQ ID NO: 637778 - DNA, 19 bp, Mus musculus
  siRNA target sequence for Slc20a1 (NM_015747.1,1732-1750).
ctacactatggcaatatgt

SEQ ID NO: 637779 - DNA, 19 bp, Mus musculus
  siRNA target sequence for Slc20a1 (NM_015747.1,1751-1769).
ggcatgcccctggattcat

SEQ ID NO: 637780 - DNA, 19 bp, Mus musculus
  siRNA target sequence for Slc20a1 (NM_015747.1,1821-1839).
ggcctaatgcagataccaa

SEQ ID NO: 637781 - DNA, 19 bp, Mus musculus
  siRNA target sequence for Slc20a1 (NM_015747.1,1836-1854).
ccaagaagcggattcgaat

SEQ ID NO: 637782 - DNA, 19 bp, Mus musculus
  siRNA target sequence for Slc20a1 (NM_015747.1,1936-1954).
gggcctgggtgacagaaaa

SEQ ID NO: 637783 - DNA, 19 bp, Mus musculus
  siRNA target sequence for Slc20a1 (NM_015747.1,1965-1983).
gctctcttgaagaatggta

SEQ ID NO: 637784 - DNA, 19 bp, Mus musculus
  siRNA target sequence for Slc20a1 (NM_015747.1,2151-2169).
ccatatggcttctgcttta

SEQ ID NO: 637785 - DNA, 19 bp, Mus musculus
  siRNA target sequence for Slc20a1 (NM_015747.1,2152-2170).
catatggcttctgctttat

SEQ ID NO: 637786 - DNA, 19 bp, Mus musculus
  siRNA target sequence for Slc20a1 (NM_015747.1,2257-2275).
ctccagtggtttcagtatt

SEQ ID NO: 637787 - DNA, 19 bp, Mus musculus
  siRNA target sequence for Slc20a1 (NM_015747.1,2260-2278).
cagtggtttcagtattgaa

SEQ ID NO: 637788 - DNA, 19 bp, Mus musculus
  siRNA target sequence for Slc20a1 (NM_015747.1,2297-2315).
gtggtcatcgcatcaaaca

SEQ ID NO: 637789 - DNA, 19 bp, Mus musculus
  siRNA target sequence for Slc20a1 (NM_015747.1,2299-2317).
ggtcatcgcatcaaacatt

SEQ ID NO: 637790 - DNA, 19 bp, Mus musculus
  siRNA target sequence for Slc20a1 (NM_015747.1,2324-2342).
cccatcagcacaacacatt

SEQ ID NO: 637791 - DNA, 19 bp, Mus musculus
  siRNA target sequence for Slc20a1 (NM_015747.1,2329-2347).
cagcacaacacattgcaaa

SEQ ID NO: 637792 - DNA, 19 bp, Mus musculus
  siRNA target sequence for Slc20a1 (NM_015747.1,2369-2387).
ggctggctccgatcaaaga

SEQ ID NO: 637793 - DNA, 19 bp, Mus musculus
  siRNA target sequence for Slc20a1 (NM_015747.1,2370-2388).
gctggctccgatcaaagaa

SEQ ID NO: 637794 - DNA, 19 bp, Mus musculus
  siRNA target sequence for Slc20a1 (NM_015747.1,2396-2414).
gactggcgactgtttcgaa

SEQ ID NO: 637795 - DNA, 19 bp, Mus musculus
  siRNA target sequence for Slc20a1 (NM_015747.1,2400-2418).
ggcgactgtttcgaaacat

SEQ ID NO: 637796 - DNA, 19 bp, Mus musculus
  siRNA target sequence for Slc20a1 (NM_015747.1,2401-2419).
gcgactgtttcgaaacatt

SEQ ID NO: 637797 - DNA, 19 bp, Mus musculus
  siRNA target sequence for Slc20a1 (NM_015747.1,2402-2420).
cgactgtttcgaaacattt

SEQ ID NO: 637798 - DNA, 19 bp, Mus musculus
  siRNA target sequence for Slc20a1 (NM_015747.1,2403-2421).
gactgtttcgaaacatttt

SEQ ID NO: 637799 - DNA, 19 bp, Mus musculus
  siRNA target sequence for Slc20a1 (NM_015747.1,2405-2423).
ctgtttcgaaacattttta

SEQ ID NO: 637800 - DNA, 19 bp, Mus musculus
  siRNA target sequence for Slc20a1 (NM_015747.1,2466-2484).
ccgctatcatggcagtatt

SEQ ID NO: 637801 - DNA, 19 bp, Mus musculus
  siRNA target sequence for Slc20a1 (NM_015747.1,2477-2495).
gcagtattcaagtacatca

SEQ ID NO: 637802 - DNA, 19 bp, Mus musculus
  siRNA target sequence for Slc20a1 (NM_015747.1,2478-2496).
cagtattcaagtacatcat

SEQ ID NO: 637803 - DNA, 19 bp, Mus musculus
  siRNA target sequence for Slc20a2 (NM_011394.1,621-639).
cattcggaaaggcatcatt

SEQ ID NO: 637804 - DNA, 19 bp, Mus musculus
  siRNA target sequence for Slc20a2 (NM_011394.1,824-842).
ggatggagctcgtcaagat

SEQ ID NO: 637805 - DNA, 19 bp, Mus musculus
  siRNA target sequence for Slc20a2 (NM_011394.1,825-843).
gatggagctcgtcaagatt

SEQ ID NO: 637806 - DNA, 19 bp, Mus musculus
  siRNA target sequence for Slc20a2 (NM_011394.1,844-862).
gtcgcctcctggtttatat

SEQ ID NO: 637807 - DNA, 19 bp, Mus musculus
  siRNA target sequence for Slc20a2 (NM_011394.1,855-873).
gtttatatcgccacttctt

SEQ ID NO: 637808 - DNA, 19 bp, Mus musculus
  siRNA target sequence for Slc20a2 (NM_011394.1,885-903).
gtccggcgtgctgttcata

SEQ ID NO: 637809 - DNA, 19 bp, Mus musculus
  siRNA target sequence for Slc20a2 (NM_011394.1,887-905).
ccggcgtgctgttcatact

SEQ ID NO: 637810 - DNA, 19 bp, Mus musculus
  siRNA target sequence for Slc20a2 (NM_011394.1,888-906).
cggcgtgctgttcatacta

SEQ ID NO: 637811 - DNA, 19 bp, Mus musculus
  siRNA target sequence for Slc20a2 (NM_011394.1,889-907).
ggcgtgctgttcatactaa

SEQ ID NO: 637812 - DNA, 19 bp, Mus musculus
  siRNA target sequence for Slc20a2 (NM_011394.1,890-908).
gcgtgctgttcatactaat

SEQ ID NO: 637813 - DNA, 19 bp, Mus musculus
  siRNA target sequence for Slc20a2 (NM_011394.1,892-910).
gtgctgttcatactaatca

SEQ ID NO: 637814 - DNA, 19 bp, Mus musculus
  siRNA target sequence for Slc20a2 (NM_011394.1,894-912).
gctgttcatactaatcaga

SEQ ID NO: 637815 - DNA, 19 bp, Mus musculus
  siRNA target sequence for Slc20a2 (NM_011394.1,957-975).
ggcactgcctctgttttat

SEQ ID NO: 637816 - DNA, 19 bp, Mus musculus
  siRNA target sequence for Slc20a2 (NM_011394.1,976-994).
gctgctaccatagcaataa

SEQ ID NO: 637817 - DNA, 19 bp, Mus musculus
  siRNA target sequence for Slc20a2 (NM_011394.1,1054-1072).
gcaatagcgctcatatcct

SEQ ID NO: 637818 - DNA, 19 bp, Mus musculus
  siRNA target sequence for Slc20a2 (NM_011394.1,1055-1073).
caatagcgctcatatcctt

SEQ ID NO: 637819 - DNA, 19 bp, Mus musculus
  siRNA target sequence for Slc20a2 (NM_011394.1,1388-1406).
ccatctccaatggtacatt

SEQ ID NO: 637820 - DNA, 19 bp, Mus musculus
  siRNA target sequence for Slc20a2 (NM_011394.1,1427-1445).
ggaatgacggtcacgttta

SEQ ID NO: 637821 - DNA, 19 bp, Mus musculus
  siRNA target sequence for Slc20a2 (NM_011394.1,1428-1446).
gaatgacggtcacgtttat

SEQ ID NO: 637822 - DNA, 19 bp, Mus musculus
  siRNA target sequence for Slc20a2 (NM_011394.1,1432-1450).
gacggtcacgtttatcata

SEQ ID NO: 637823 - DNA, 19 bp, Mus musculus
  siRNA target sequence for Slc20a2 (NM_011394.1,1434-1452).
cggtcacgtttatcatact

SEQ ID NO: 637824 - DNA, 19 bp, Mus musculus
  siRNA target sequence for Slc20a2 (NM_011394.1,1436-1454).
gtcacgtttatcatactgt

SEQ ID NO: 637825 - DNA, 19 bp, Mus musculus
  siRNA target sequence for Slc20a2 (NM_011394.1,1466-1484).
cggggctctacaaagactt

SEQ ID NO: 637826 - DNA, 19 bp, Mus musculus
  siRNA target sequence for Slc20a2 (NM_011394.1,1549-1567).
ctgcttcggaggaacaaca

SEQ ID NO: 637827 - DNA, 19 bp, Mus musculus
  siRNA target sequence for Slc20a2 (NM_011394.1,1552-1570).
cttcggaggaacaacagtt

SEQ ID NO: 637828 - DNA, 19 bp, Mus musculus
  siRNA target sequence for Slc20a2 (NM_011394.1,1603-1621).
ccggtgcacaccactttca

SEQ ID NO: 637829 - DNA, 19 bp, Mus musculus
  siRNA target sequence for Slc20a2 (NM_011394.1,1678-1696).
gtgtcctattccaagaaga

SEQ ID NO: 637830 - DNA, 19 bp, Mus musculus
  siRNA target sequence for Slc20a2 (NM_011394.1,1935-1953).
cgtgagcaatgctattggt

SEQ ID NO: 637831 - DNA, 19 bp, Mus musculus
  siRNA target sequence for Slc20a2 (NM_011394.1,1962-1980).
ggctttgtggctgatatat

SEQ ID NO: 637832 - DNA, 19 bp, Mus musculus
  siRNA target sequence for Slc20a2 (NM_011394.1,2120-2138).
cgtccagtggcttcactat

SEQ ID NO: 637833 - DNA, 19 bp, Mus musculus
  siRNA target sequence for Slc20a2 (NM_011394.1,2121-2139).
gtccagtggcttcactatt

SEQ ID NO: 637834 - DNA, 19 bp, Mus musculus
  siRNA target sequence for Slc20a2 (NM_011394.1,2265-2283).
gcgcctcttccggaacatt

SEQ ID NO: 637835 - DNA, 19 bp, Mus musculus
  siRNA target sequence for Slc20a2 (NM_011394.1,2266-2284).
cgcctcttccggaacattt

SEQ ID NO: 637836 - DNA, 19 bp, Mus musculus
  siRNA target sequence for Slc20a2 (NM_011394.1,2267-2285).
gcctcttccggaacatttt

SEQ ID NO: 637837 - DNA, 19 bp, Mus musculus
  siRNA target sequence for Slc20a2 (NM_011394.1,2268-2286).
cctcttccggaacattttt

SEQ ID NO: 637838 - DNA, 19 bp, Mus musculus
  siRNA target sequence for Slc7a1 (NM_007513.1,333-351).
cttgggcgctggtgtctat

SEQ ID NO: 637839 - DNA, 19 bp, Mus musculus
  siRNA target sequence for Slc7a1 (NM_007513.1,362-380).
gtgccgtggcccgtgaaaa

SEQ ID NO: 637840 - DNA, 19 bp, Mus musculus
  siRNA target sequence for Slc7a1 (NM_007513.1,366-384).
cgtggcccgtgaaaatgct

SEQ ID NO: 637841 - DNA, 19 bp, Mus musculus
  siRNA target sequence for Slc7a1 (NM_007513.1,558-576).
ctacatcatcggtacttca

SEQ ID NO: 637842 - DNA, 19 bp, Mus musculus
  siRNA target sequence for Slc7a1 (NM_007513.1,679-697).
gcccaaaccccggacatat

SEQ ID NO: 637843 - DNA, 19 bp, Mus musculus
  siRNA target sequence for Slc7a1 (NM_007513.1,681-699).
ccaaaccccggacatattt

SEQ ID NO: 637844 - DNA, 19 bp, Mus musculus
  siRNA target sequence for Slc7a1 (NM_007513.1,720-738).
cttaacaggactgttaact

SEQ ID NO: 637845 - DNA, 19 bp, Mus musculus
  siRNA target sequence for Slc7a1 (NM_007513.1,755-773).
cagccatggtcaacaaaat

SEQ ID NO: 637846 - DNA, 19 bp, Mus musculus
  siRNA target sequence for Slc7a1 (NM_007513.1,826-844).
gtgaaaggctccattaaaa

SEQ ID NO: 637847 - DNA, 19 bp, Mus musculus
  siRNA target sequence for Slc7a1 (NM_007513.1,850-868).
cagctcacggagaaaaatt

SEQ ID NO: 637848 - DNA, 19 bp, Mus musculus
  siRNA target sequence for Slc7a1 (NM_007513.1,913-931).
gggtttatgccctttggat

SEQ ID NO: 637849 - DNA, 19 bp, Mus musculus
  siRNA target sequence for Slc7a1 (NM_007513.1,914-932).
ggtttatgccctttggatt

SEQ ID NO: 637850 - DNA, 19 bp, Mus musculus
  siRNA target sequence for Slc7a1 (NM_007513.1,949-967).
ggggcagcgacctgctttt

SEQ ID NO: 637851 - DNA, 19 bp, Mus musculus
  siRNA target sequence for Slc7a1 (NM_007513.1,950-968).
gggcagcgacctgctttta

SEQ ID NO: 637852 - DNA, 19 bp, Mus musculus
  siRNA target sequence for Slc7a1 (NM_007513.1,951-969).
ggcagcgacctgcttttat

SEQ ID NO: 637853 - DNA, 19 bp, Mus musculus
  siRNA target sequence for Slc7a1 (NM_007513.1,1051-1069).
gcgtccctcctcatttgct

SEQ ID NO: 637854 - DNA, 19 bp, Mus musculus
  siRNA target sequence for Slc7a1 (NM_007513.1,1052-1070).
cgtccctcctcatttgctt

SEQ ID NO: 637855 - DNA, 19 bp, Mus musculus
  siRNA target sequence for Slc7a1 (NM_007513.1,1248-1266).
catgccccgagttatctat

SEQ ID NO: 637856 - DNA, 19 bp, Mus musculus
  siRNA target sequence for Slc7a1 (NM_007513.1,1303-1321).
gccaaaatcaacaatagga

SEQ ID NO: 637857 - DNA, 19 bp, Mus musculus
  siRNA target sequence for Slc7a1 (NM_007513.1,1473-1491).
ccagccagaacaacctaat

SEQ ID NO: 637858 - DNA, 19 bp, Mus musculus
  siRNA target sequence for Slc7a1 (NM_007513.1,1521-1539).
ggagctagatcgagtagat

SEQ ID NO: 637859 - DNA, 19 bp, Mus musculus
  siRNA target sequence for Slc7a1 (NM_007513.1,1585-1603).
ccggtagccgagaagtttt

SEQ ID NO: 637860 - DNA, 19 bp, Mus musculus
  siRNA target sequence for Slc7a1 (NM_007513.1,1587-1605).
ggtagccgagaagttttct

SEQ ID NO: 637861 - DNA, 19 bp, Mus musculus
  siRNA target sequence for Slc7a1 (NM_007513.1,1593-1611).
cgagaagttttctctgaaa

SEQ ID NO: 637862 - DNA, 19 bp, Mus musculus
  siRNA target sequence for Slc7a1 (NM_007513.1,1644-1662).
caaattctcagggctaatt

SEQ ID NO: 637863 - DNA, 19 bp, Mus musculus
  siRNA target sequence for Slc7a1 (NM_007513.1,1652-1670).
cagggctaattgtgaacat

SEQ ID NO: 637864 - DNA, 19 bp, Mus musculus
  siRNA target sequence for Slc7a1 (NM_007513.1,1656-1674).
gctaattgtgaacatttca

SEQ ID NO: 637865 - DNA, 19 bp, Mus musculus
  siRNA target sequence for Slc7a1 (NM_007513.1,1679-1697).
gcctcctagccgctcttat

SEQ ID NO: 637866 - DNA, 19 bp, Mus musculus
  siRNA target sequence for Slc7a1 (NM_007513.1,1681-1699).
ctcctagccgctcttatca

SEQ ID NO: 637867 - DNA, 19 bp, Mus musculus
  siRNA target sequence for Slc7a1 (NM_007513.1,1684-1702).
ctagccgctcttatcatca

SEQ ID NO: 637868 - DNA, 19 bp, Mus musculus
  siRNA target sequence for Slc7a1 (NM_007513.1,1832-1850).
gcaagaccaagctctcatt

SEQ ID NO: 637869 - DNA, 19 bp, Mus musculus
  siRNA target sequence for Sort1 (NM_019972.2,302-320).
cgcaccagcatgtctttga

SEQ ID NO: 637870 - DNA, 19 bp, Mus musculus
  siRNA target sequence for Sort1 (NM_019972.2,393-411).
ccaagtgcctctggtaatt

SEQ ID NO: 637871 - DNA, 19 bp, Mus musculus
  siRNA target sequence for Sort1 (NM_019972.2,424-442).
cagtccaagttgtatcgaa

SEQ ID NO: 637872 - DNA, 19 bp, Mus musculus
  siRNA target sequence for Sort1 (NM_019972.2,435-453).
gtatcgaagtgaggattat

SEQ ID NO: 637873 - DNA, 19 bp, Mus musculus
  siRNA target sequence for Sort1 (NM_019972.2,440-458).
gaagtgaggattatggaaa

SEQ ID NO: 637874 - DNA, 19 bp, Mus musculus
  siRNA target sequence for Sort1 (NM_019972.2,443-461).
gtgaggattatggaaagaa

SEQ ID NO: 637875 - DNA, 19 bp, Mus musculus
  siRNA target sequence for Sort1 (NM_019972.2,445-463).
gaggattatggaaagaact

SEQ ID NO: 637876 - DNA, 19 bp, Mus musculus
  siRNA target sequence for Sort1 (NM_019972.2,459-477).
gaactttaaggatattaca

SEQ ID NO: 637877 - DNA, 19 bp, Mus musculus
  siRNA target sequence for Sort1 (NM_019972.2,495-513).
cttcattcggacggaattt

SEQ ID NO: 637878 - DNA, 19 bp, Mus musculus
  siRNA target sequence for Sort1 (NM_019972.2,537-555).
ctctggaaaggtgatacta

SEQ ID NO: 637879 - DNA, 19 bp, Mus musculus
  siRNA target sequence for Sort1 (NM_019972.2,618-636).
gaactttgtgcaaacagat

SEQ ID NO: 637880 - DNA, 19 bp, Mus musculus
  siRNA target sequence for Sort1 (NM_019972.2,649-667).
cctctgacgcagatgatgt

SEQ ID NO: 637881 - DNA, 19 bp, Mus musculus
  siRNA target sequence for Sort1 (NM_019972.2,650-668).
ctctgacgcagatgatgta

SEQ ID NO: 637882 - DNA, 19 bp, Mus musculus
  siRNA target sequence for Sort1 (NM_019972.2,674-692).
ctcagaattctgattacct

SEQ ID NO: 637883 - DNA, 19 bp, Mus musculus
  siRNA target sequence for Sort1 (NM_019972.2,720-738).
gtgggtgtccaagaatttt

SEQ ID NO: 637884 - DNA, 19 bp, Mus musculus
  siRNA target sequence for Sort1 (NM_019972.2,807-825).
ctttaccacccatgtgaat

SEQ ID NO: 637885 - DNA, 19 bp, Mus musculus
  siRNA target sequence for Sort1 (NM_019972.2,958-976).
gctgataaggacacaacaa

SEQ ID NO: 637886 - DNA, 19 bp, Mus musculus
  siRNA target sequence for Sort1 (NM_019972.2,1116-1134).
cgggtttggcaccatcttt

SEQ ID NO: 637887 - DNA, 19 bp, Mus musculus
  siRNA target sequence for Sort1 (NM_019972.2,1171-1189).
ctggacagacatctctata

SEQ ID NO: 637888 - DNA, 19 bp, Mus musculus
  siRNA target sequence for Sort1 (NM_019972.2,1174-1192).
gacagacatctctatacca

SEQ ID NO: 637889 - DNA, 19 bp, Mus musculus
  siRNA target sequence for Sort1 (NM_019972.2,1231-1249).
ctccgtggggtctatataa

SEQ ID NO: 637890 - DNA, 19 bp, Mus musculus
  siRNA target sequence for Sort1 (NM_019972.2,1233-1251).
ccgtggggtctatataaca

SEQ ID NO: 637891 - DNA, 19 bp, Mus musculus
  siRNA target sequence for Sort1 (NM_019972.2,1234-1252).
cgtggggtctatataacaa

SEQ ID NO: 637892 - DNA, 19 bp, Mus musculus
  siRNA target sequence for Sort1 (NM_019972.2,1258-1276).
ctctcagaagataactcta

SEQ ID NO: 637893 - DNA, 19 bp, Mus musculus
  siRNA target sequence for Sort1 (NM_019972.2,1264-1282).
gaagataactctattcaga

SEQ ID NO: 637894 - DNA, 19 bp, Mus musculus
  siRNA target sequence for Sort1 (NM_019972.2,1346-1364).
gcgacgctaccgcaaagaa

SEQ ID NO: 637895 - DNA, 19 bp, Mus musculus
  siRNA target sequence for Sort1 (NM_019972.2,1351-1369).
gctaccgcaaagaacaaga

SEQ ID NO: 637896 - DNA, 19 bp, Mus musculus
  siRNA target sequence for Sort1 (NM_019972.2,1384-1402).
catatccatgcttcttata

SEQ ID NO: 637897 - DNA, 19 bp, Mus musculus
  siRNA target sequence for Sort1 (NM_019972.2,1407-1425).
ctcccagaagctaaacgtt

SEQ ID NO: 637898 - DNA, 19 bp, Mus musculus
  siRNA target sequence for Sort1 (NM_019972.2,1558-1576).
ctagaaggaccacattact

SEQ ID NO: 637899 - DNA, 19 bp, Mus musculus
  siRNA target sequence for Sort1 (NM_019972.2,1561-1579).
gaaggaccacattactata

SEQ ID NO: 637900 - DNA, 19 bp, Mus musculus
  siRNA target sequence for Sort1 (NM_019972.2,1564-1582).
ggaccacattactatacca

SEQ ID NO: 637901 - DNA, 19 bp, Mus musculus
  siRNA target sequence for Sort1 (NM_019972.2,1565-1583).
gaccacattactataccat

SEQ ID NO: 637902 - DNA, 19 bp, Mus musculus
  siRNA target sequence for Sort1 (NM_019972.2,1630-1648).
cctatcaatgtgattaagt

SEQ ID NO: 637903 - DNA, 19 bp, Mus musculus
  siRNA target sequence for Sort1 (NM_019972.2,1631-1649).
ctatcaatgtgattaagtt

SEQ ID NO: 637904 - DNA, 19 bp, Mus musculus
  siRNA target sequence for Sort1 (NM_019972.2,1760-1778).
ggggattcacagagtcttt

SEQ ID NO: 637905 - DNA, 19 bp, Mus musculus
  siRNA target sequence for Sort1 (NM_019972.2,1763-1781).
gattcacagagtctttcat

SEQ ID NO: 637906 - DNA, 19 bp, Mus musculus
  siRNA target sequence for Sort1 (NM_019972.2,1799-1817).
cctacacagtcgatttcaa

SEQ ID NO: 637907 - DNA, 19 bp, Mus musculus
  siRNA target sequence for Sort1 (NM_019972.2,1824-1842).
ccttgagcggaattgtgaa

SEQ ID NO: 637908 - DNA, 19 bp, Mus musculus
  siRNA target sequence for Sort1 (NM_019972.2,1901-1919).
gctgcattttgggctataa

SEQ ID NO: 637909 - DNA, 19 bp, Mus musculus
  siRNA target sequence for Sort1 (NM_019972.2,1902-1920).
ctgcattttgggctataaa

SEQ ID NO: 637910 - DNA, 19 bp, Mus musculus
  siRNA target sequence for Sort1 (NM_019972.2,1904-1922).
gcattttgggctataaaga

SEQ ID NO: 637911 - DNA, 19 bp, Mus musculus
  siRNA target sequence for Sort1 (NM_019972.2,1905-1923).
cattttgggctataaagaa

SEQ ID NO: 637912 - DNA, 19 bp, Mus musculus
  siRNA target sequence for Sort1 (NM_019972.2,1930-1948).
ctacggctacggaagtcat

SEQ ID NO: 637913 - DNA, 19 bp, Mus musculus
  siRNA target sequence for Sort1 (NM_019972.2,1944-1962).
gtcatccgtctgtcagaat

SEQ ID NO: 637914 - DNA, 19 bp, Mus musculus
  siRNA target sequence for Sort1 (NM_019972.2,1959-1977).
gaatggtcgagactatgtt

SEQ ID NO: 637915 - DNA, 19 bp, Mus musculus
  siRNA target sequence for Sort1 (NM_019972.2,2124-2142).
ggagcacctgacaacaaat

SEQ ID NO: 637916 - DNA, 19 bp, Mus musculus
  siRNA target sequence for Sort1 (NM_019972.2,2138-2156).
caaatgggtaccggaaaat

SEQ ID NO: 637917 - DNA, 19 bp, Mus musculus
  siRNA target sequence for Sort1 (NM_019972.2,2151-2169).
gaaaatcccaggagacaaa

SEQ ID NO: 637918 - DNA, 19 bp, Mus musculus
  siRNA target sequence for Sort1 (NM_019972.2,2192-2210).
ccagagaagtaaaagactt

SEQ ID NO: 637919 - DNA, 19 bp, Mus musculus
  siRNA target sequence for Sort1 (NM_019972.2,2250-2268).
gcagaattccaagtcaaat

SEQ ID NO: 637920 - DNA, 19 bp, Mus musculus
  siRNA target sequence for Sort1 (NM_019972.2,2264-2282).
caaattctgtccctattat

SEQ ID NO: 637921 - DNA, 19 bp, Mus musculus
  siRNA target sequence for Sort1 (NM_019972.2,2320-2338).
gcaggagtcctcattgtga

SEQ ID NO: 637922 - DNA, 19 bp, Mus musculus
  siRNA target sequence for Sort1 (NM_019972.2,2321-2339).
caggagtcctcattgtgaa

SEQ ID NO: 637923 - DNA, 19 bp, Mus musculus
  siRNA target sequence for Ssr4 (NM_009279.1,218-236).
ctgctgtctggcctatctt

SEQ ID NO: 637924 - DNA, 19 bp, Mus musculus
  siRNA target sequence for Ssr4 (NM_009279.1,261-279).
cacagatcaccccttctta

SEQ ID NO: 637925 - DNA, 19 bp, Mus musculus
  siRNA target sequence for Ssr4 (NM_009279.1,265-283).
gatcaccccttcttactat

SEQ ID NO: 637926 - DNA, 19 bp, Mus musculus
  siRNA target sequence for Ssr4 (NM_009279.1,358-376).
ccagaacatggctctttat

SEQ ID NO: 637927 - DNA, 19 bp, Mus musculus
  siRNA target sequence for Ssr4 (NM_009279.1,378-396).
ccgacgttagtggaaaaca

SEQ ID NO: 637928 - DNA, 19 bp, Mus musculus
  siRNA target sequence for Ssr4 (NM_009279.1,415-433).
ccaggatgtgggtcgatat

SEQ ID NO: 637929 - DNA, 19 bp, Mus musculus
  siRNA target sequence for Ssr4 (NM_009279.1,474-492).
gcacctatgaggtcagatt

SEQ ID NO: 637930 - DNA, 19 bp, Mus musculus
  siRNA target sequence for Ssr4 (NM_009279.1,625-643).
ggtgctggctgcagtaatt

SEQ ID NO: 637931 - DNA, 19 bp, Mus musculus
  siRNA target sequence for Ssr4 (NM_009279.1,655-673).
ctactacctagctttcagt

SEQ ID NO: 637932 - DNA, 19 bp, Mus musculus
  siRNA target sequence for Thrap3 (NM_146153.2,106-124).
ggtctcgttcgttttcaaa

SEQ ID NO: 637933 - DNA, 19 bp, Mus musculus
  siRNA target sequence for Thrap3 (NM_146153.2,1248-1266).
cagtcgcccaaaaggtata

SEQ ID NO: 637934 - DNA, 19 bp, Mus musculus
  siRNA target sequence for Thrap3 (NM_146153.2,1770-1788).
gcacgacctagtggtttat

SEQ ID NO: 637935 - DNA, 19 bp, Mus musculus
  siRNA target sequence for Thrap3 (NM_146153.2,1771-1789).
cacgacctagtggtttatt

SEQ ID NO: 637936 - DNA, 19 bp, Mus musculus
  siRNA target sequence for Thrap3 (NM_146153.2,1891-1909).
gtagcccctcagaactgtt

SEQ ID NO: 637937 - DNA, 19 bp, Mus musculus
  siRNA target sequence for Thrap3 (NM_146153.2,1916-1934).
gcacatagtgaccattgtt

SEQ ID NO: 637938 - DNA, 19 bp, Mus musculus
  siRNA target sequence for Thrap3 (NM_146153.2,1959-1977).
ggatcctctggaatgacat

SEQ ID NO: 637939 - DNA, 19 bp, Mus musculus
  siRNA target sequence for Thrap3 (NM_146153.2,1960-1978).
gatcctctggaatgacatt

SEQ ID NO: 637940 - DNA, 19 bp, Mus musculus
  siRNA target sequence for Thrap3 (NM_146153.2,1979-1997).
gcatgaacgctttactaaa

SEQ ID NO: 637941 - DNA, 19 bp, Mus musculus
  siRNA target sequence for Thrap3 (NM_146153.2,1980-1998).
catgaacgctttactaaat

SEQ ID NO: 637942 - DNA, 19 bp, Mus musculus
  siRNA target sequence for Thrap3 (NM_146153.2,1986-2004).
cgctttactaaatacctaa

SEQ ID NO: 637943 - DNA, 19 bp, Mus musculus
  siRNA target sequence for Thrap3 (NM_146153.2,1987-2005).
gctttactaaatacctaaa

SEQ ID NO: 637944 - DNA, 19 bp, Mus musculus
  siRNA target sequence for Thrap3 (NM_146153.2,2083-2101).
cattcagaaagcatggttt

SEQ ID NO: 637945 - DNA, 19 bp, Mus musculus
  siRNA target sequence for Thrap3 (NM_146153.2,2102-2120).
gactcatgaggaattgaaa

SEQ ID NO: 637946 - DNA, 19 bp, Mus musculus
  siRNA target sequence for Thrap3 (NM_146153.2,2144-2162).
ggtgaactgttgctttgat

SEQ ID NO: 637947 - DNA, 19 bp, Mus musculus
  siRNA target sequence for Thrap4 (NM_011869.1,347-365).
cctgaagtacgccattagt

SEQ ID NO: 637948 - DNA, 19 bp, Mus musculus
  siRNA target sequence for Thrap4 (NM_011869.1,348-366).
ctgaagtacgccattagtt

SEQ ID NO: 637949 - DNA, 19 bp, Mus musculus
  siRNA target sequence for Thrap4 (NM_011869.1,390-408).
gtgctcaccgccatcagta

SEQ ID NO: 637950 - DNA, 19 bp, Mus musculus
  siRNA target sequence for Thrap4 (NM_011869.1,393-411).
ctcaccgccatcagtaagt

SEQ ID NO: 637951 - DNA, 19 bp, Mus musculus
  siRNA target sequence for Thrap4 (NM_011869.1,398-416).
cgccatcagtaagtttgat

SEQ ID NO: 637952 - DNA, 19 bp, Mus musculus
  siRNA target sequence for Thrap4 (NM_011869.1,545-563).
ctggctgcttcgatgtaca

SEQ ID NO: 637953 - DNA, 19 bp, Mus musculus
  siRNA target sequence for Thrap4 (NM_011869.1,689-707).
gctacacatcgccaaacta

SEQ ID NO: 637954 - DNA, 19 bp, Mus musculus
  siRNA target sequence for Thrap4 (NM_011869.1,708-726).
gaggaggcctcattgcata

SEQ ID NO: 637955 - DNA, 19 bp, Mus musculus
  siRNA target sequence for Thrap4 (NM_011869.1,711-729).
gaggcctcattgcatacat

SEQ ID NO: 637956 - DNA, 19 bp, Mus musculus
  siRNA target sequence for Thrap4 (NM_011869.1,784-802).
ctgccatagagcattctct

SEQ ID NO: 637957 - DNA, 19 bp, Mus musculus
  siRNA target sequence for Thrap4 (NM_011869.1,1081-1099).
gctttgtgggactcattga

SEQ ID NO: 637958 - DNA, 19 bp, Mus musculus
  siRNA target sequence for Thrap4 (NM_011869.1,1135-1153).
ctttcacctacctcaagat

SEQ ID NO: 637959 - DNA, 19 bp, Mus musculus
  siRNA target sequence for Thrap4 (NM_011869.1,1161-1179).
gtcttggtgaagttgaaga

SEQ ID NO: 637960 - DNA, 19 bp, Mus musculus
  siRNA target sequence for Thrap4 (NM_011869.1,1215-1233).
gtcaactgtgcttttgagt

SEQ ID NO: 637961 - DNA, 19 bp, Mus musculus
  siRNA target sequence for Thrap4 (NM_011869.1,1266-1284).
gctgaccagcgctgcaatt

SEQ ID NO: 637962 - DNA, 19 bp, Mus musculus
  siRNA target sequence for Thrap4 (NM_011869.1,1380-1398).
cgggacccgcagctaaaat

SEQ ID NO: 637963 - DNA, 19 bp, Mus musculus
  siRNA target sequence for Thrap4 (NM_011869.1,1382-1400).
ggacccgcagctaaaatca

SEQ ID NO: 637964 - DNA, 19 bp, Mus musculus
  siRNA target sequence for Thrap4 (NM_011869.1,1383-1401).
gacccgcagctaaaatcat

SEQ ID NO: 637965 - DNA, 19 bp, Mus musculus
  siRNA target sequence for Thrap4 (NM_011869.1,1449-1467).
gagcccacggtcacaaaca

SEQ ID NO: 637966 - DNA, 19 bp, Mus musculus
  siRNA target sequence for Thrap4 (NM_011869.1,1453-1471).
ccacggtcacaaacattct

SEQ ID NO: 637967 - DNA, 19 bp, Mus musculus
  siRNA target sequence for Thrap4 (NM_011869.1,1577-1595).
cgccactgggaagcttaaa

SEQ ID NO: 637968 - DNA, 19 bp, Mus musculus
  siRNA target sequence for Thrap4 (NM_011869.1,1674-1692).
cgagccttgctctttgaca

SEQ ID NO: 637969 - DNA, 19 bp, Mus musculus
  siRNA target sequence for Thrap4 (NM_011869.1,1809-1827).
cccgaggagggcaagattt

SEQ ID NO: 637970 - DNA, 19 bp, Mus musculus
  siRNA target sequence for Thrap4 (NM_011869.1,1810-1828).
ccgaggagggcaagatttt

SEQ ID NO: 637971 - DNA, 19 bp, Mus musculus
  siRNA target sequence for Thrap4 (NM_011869.1,1812-1830).
gaggagggcaagattttga

SEQ ID NO: 637972 - DNA, 19 bp, Mus musculus
  siRNA target sequence for Thrap4 (NM_011869.1,1957-1975).
cagccattttggaaatcct

SEQ ID NO: 637973 - DNA, 19 bp, Mus musculus
  siRNA target sequence for Thrap4 (NM_011869.1,1992-2010).
ggggttctggcatttgagt

SEQ ID NO: 637974 - DNA, 19 bp, Mus musculus
  siRNA target sequence for Thrap4 (NM_011869.1,2171-2189).
caccctgcagttctacaat

SEQ ID NO: 637975 - DNA, 19 bp, Mus musculus
  siRNA target sequence for Thrap4 (NM_011869.1,2251-2269).
cagccacgcagatcaagtt

SEQ ID NO: 637976 - DNA, 19 bp, Mus musculus
  siRNA target sequence for Thrap4 (NM_011869.1,2478-2496).
cgcaaggagcacacgttaa

SEQ ID NO: 637977 - DNA, 19 bp, Mus musculus
  siRNA target sequence for Thrap4 (NM_011869.1,2497-2515).
gggcggtccagcttctcta

SEQ ID NO: 637978 - DNA, 19 bp, Mus musculus
  siRNA target sequence for Thrap4 (NM_011869.1,2658-2676).
gccctgagctcttactctt

SEQ ID NO: 637979 - DNA, 19 bp, Mus musculus
  siRNA target sequence for Thrap4 (NM_011869.1,2692-2710).
cgtcctcccgccagaagaa

SEQ ID NO: 637980 - DNA, 19 bp, Mus musculus
  siRNA target sequence for Thrap4 (NM_011869.1,3042-3060).
cagttcatgcccttcacta

SEQ ID NO: 637981 - DNA, 19 bp, Mus musculus
  siRNA target sequence for Tnfrsf10b (NM_020275.3,212-230).
cccgaagcgcagacttcta

SEQ ID NO: 637982 - DNA, 19 bp, Mus musculus
  siRNA target sequence for Tnfrsf10b (NM_020275.3,213-231).
ccgaagcgcagacttctat

SEQ ID NO: 637983 - DNA, 19 bp, Mus musculus
  siRNA target sequence for Tnfrsf10b (NM_020275.3,214-232).
cgaagcgcagacttctata

SEQ ID NO: 637984 - DNA, 19 bp, Mus musculus
  siRNA target sequence for Tnfrsf10b (NM_020275.3,215-233).
gaagcgcagacttctatat

SEQ ID NO: 637985 - DNA, 19 bp, Mus musculus
  siRNA target sequence for Tnfrsf10b (NM_020275.3,219-237).
cgcagacttctatatagct

SEQ ID NO: 637986 - DNA, 19 bp, Mus musculus
  siRNA target sequence for Tnfrsf10b (NM_020275.3,220-238).
gcagacttctatatagctt

SEQ ID NO: 637987 - DNA, 19 bp, Mus musculus
  siRNA target sequence for Tnfrsf10b (NM_020275.3,221-239).
cagacttctatatagcttt

SEQ ID NO: 637988 - DNA, 19 bp, Mus musculus
  siRNA target sequence for Tnfrsf10b (NM_020275.3,326-344).
ggaggagagcccatcaaga

SEQ ID NO: 637989 - DNA, 19 bp, Mus musculus
  siRNA target sequence for Tnfrsf10b (NM_020275.3,391-409).
cttgcagagagggtattga

SEQ ID NO: 637990 - DNA, 19 bp, Mus musculus
  siRNA target sequence for Tnfrsf10b (NM_020275.3,452-470).
ctgcacagtctgtaaggaa

SEQ ID NO: 637991 - DNA, 19 bp, Mus musculus
  siRNA target sequence for Tnfrsf10b (NM_020275.3,468-486).
gaagataaagtcgtagaaa

SEQ ID NO: 637992 - DNA, 19 bp, Mus musculus
  siRNA target sequence for Tnfrsf10b (NM_020275.3,483-501).
gaaacccgatgcaacataa

SEQ ID NO: 637993 - DNA, 19 bp, Mus musculus
  siRNA target sequence for Tnfrsf10b (NM_020275.3,528-546).
ccaggcacctttgaagata

SEQ ID NO: 637994 - DNA, 19 bp, Mus musculus
  siRNA target sequence for Tnfrsf10b (NM_020275.3,529-547).
caggcacctttgaagataa

SEQ ID NO: 637995 - DNA, 19 bp, Mus musculus
  siRNA target sequence for Tnfrsf10b (NM_020275.3,655-673).
gggcatcttggcataagct

SEQ ID NO: 637996 - DNA, 19 bp, Mus musculus
  siRNA target sequence for Tnfrsf10b (NM_020275.3,751-769).
ggcaatggttgctctgtat

SEQ ID NO: 637997 - DNA, 19 bp, Mus musculus
  siRNA target sequence for Tnfrsf10b (NM_020275.3,752-770).
gcaatggttgctctgtata

SEQ ID NO: 637998 - DNA, 19 bp, Mus musculus
  siRNA target sequence for Tnfrsf10b (NM_020275.3,758-776).
gttgctctgtataaaaaga

SEQ ID NO: 637999 - DNA, 19 bp, Mus musculus
  siRNA target sequence for Tnfrsf10b (NM_020275.3,836-854).
gacatctagcacgacaaat

SEQ ID NO: 638000 - DNA, 19 bp, Mus musculus
  siRNA target sequence for Tnfrsf10b (NM_020275.3,838-856).
catctagcacgacaaatga

SEQ ID NO: 638001 - DNA, 19 bp, Mus musculus
  siRNA target sequence for Tnfrsf10b (NM_020275.3,844-862).
gcacgacaaatgactctaa

SEQ ID NO: 638002 - DNA, 19 bp, Mus musculus
  siRNA target sequence for Tnfrsf10b (NM_020275.3,876-894).
cctggcaagactcagaaaa

SEQ ID NO: 638003 - DNA, 19 bp, Mus musculus
  siRNA target sequence for Tnfrsf10b (NM_020275.3,934-952).
cagctgacgacctgaagtt

SEQ ID NO: 638004 - DNA, 19 bp, Mus musculus
  siRNA target sequence for Tnfrsf10b (NM_020275.3,939-957).
gacgacctgaagtttatct

SEQ ID NO: 638005 - DNA, 19 bp, Mus musculus
  siRNA target sequence for Tnfrsf10b (NM_020275.3,1024-1042).
cagacaatcaaatccaaat

SEQ ID NO: 638006 - DNA, 19 bp, Mus musculus
  siRNA target sequence for Tnfrsf10b (NM_020275.3,1200-1218).
gtgaaatccgggaggttta

SEQ ID NO: 638007 - DNA, 19 bp, Mus musculus
  siRNA target sequence for Tnfrsf10b (NM_020275.3,1202-1220).
gaaatccgggaggtttact

SEQ ID NO: 638008 - DNA, 19 bp, Mus musculus
  siRNA target sequence for Tnfrsf10b (NM_020275.3,1210-1228).
ggaggtttacttatcagaa

SEQ ID NO: 638009 - DNA, 19 bp, Mus musculus
  siRNA target sequence for Tnfrsf11a (NM_009399.2,175-193).
gatgcgaaccaggaaagta

SEQ ID NO: 638010 - DNA, 19 bp, Mus musculus
  siRNA target sequence for Tnfrsf11a (NM_009399.2,515-533).
cttttcgtccacagacaaa

SEQ ID NO: 638011 - DNA, 19 bp, Mus musculus
  siRNA target sequence for Tnfrsf11a (NM_009399.2,520-538).
cgtccacagacaaatgcaa

SEQ ID NO: 638012 - DNA, 19 bp, Mus musculus
  siRNA target sequence for Tnfrsf11a (NM_009399.2,521-539).
gtccacagacaaatgcaaa

SEQ ID NO: 638013 - DNA, 19 bp, Mus musculus
  siRNA target sequence for Tnfrsf11a (NM_009399.2,750-768).
gcgctgacagctaatttgt

SEQ ID NO: 638014 - DNA, 19 bp, Mus musculus
  siRNA target sequence for Tnfrsf11a (NM_009399.2,767-785).
gtggaattgggtcaatgat

SEQ ID NO: 638015 - DNA, 19 bp, Mus musculus
  siRNA target sequence for Tnfrsf11a (NM_009399.2,872-890).
gtgtgaaggtatcttacta

SEQ ID NO: 638016 - DNA, 19 bp, Mus musculus
  siRNA target sequence for Tnfrsf11a (NM_009399.2,874-892).
gtgaaggtatcttactaat

SEQ ID NO: 638017 - DNA, 19 bp, Mus musculus
  siRNA target sequence for Tnfrsf11a (NM_009399.2,876-894).
gaaggtatcttactaatga

SEQ ID NO: 638018 - DNA, 19 bp, Mus musculus
  siRNA target sequence for Tnfrsf11a (NM_009399.2,1109-1127).
gcagggaagcaaatctata

SEQ ID NO: 638019 - DNA, 19 bp, Mus musculus
  siRNA target sequence for Tnfrsf11a (NM_009399.2,1154-1172).
gggggagaacgacagttta

SEQ ID NO: 638020 - DNA, 19 bp, Mus musculus
  siRNA target sequence for Tnfrsf11a (NM_009399.2,1155-1173).
ggggagaacgacagtttaa

SEQ ID NO: 638021 - DNA, 19 bp, Mus musculus
  siRNA target sequence for Tnfrsf11a (NM_009399.2,1559-1577).
gaacgtgactggaaacagt

SEQ ID NO: 638022 - DNA, 19 bp, Mus musculus
  siRNA target sequence for Tnfrsf11a (NM_009399.2,1594-1612).
ctagcgggcaggtgatgaa

SEQ ID NO: 638023 - DNA, 19 bp, Mus musculus
  siRNA target sequence for Tnfrsf11b (NM_008764.2,568-586).
cgttacctggagatcgaat

SEQ ID NO: 638024 - DNA, 19 bp, Mus musculus
  siRNA target sequence for Tnfrsf11b (NM_008764.2,569-587).
gttacctggagatcgaatt

SEQ ID NO: 638025 - DNA, 19 bp, Mus musculus
  siRNA target sequence for Tnfrsf11b (NM_008764.2,740-758).
catttggcctcctgctaat

SEQ ID NO: 638026 - DNA, 19 bp, Mus musculus
  siRNA target sequence for Tnfrsf11b (NM_008764.2,745-763).
ggcctcctgctaattcaga

SEQ ID NO: 638027 - DNA, 19 bp, Mus musculus
  siRNA target sequence for Tnfrsf11b (NM_008764.2,746-764).
gcctcctgctaattcagaa

SEQ ID NO: 638028 - DNA, 19 bp, Mus musculus
  siRNA target sequence for Tnfrsf11b (NM_008764.2,747-765).
cctcctgctaattcagaaa

SEQ ID NO: 638029 - DNA, 19 bp, Mus musculus
  siRNA target sequence for Tnfrsf11b (NM_008764.2,786-804).
cgtgtgttccggaaacaga

SEQ ID NO: 638030 - DNA, 19 bp, Mus musculus
  siRNA target sequence for Tnfrsf11b (NM_008764.2,810-828).
cacgcaaaagtgtggaata

SEQ ID NO: 638031 - DNA, 19 bp, Mus musculus
  siRNA target sequence for Tnfrsf11b (NM_008764.2,813-831).
gcaaaagtgtggaatagat

SEQ ID NO: 638032 - DNA, 19 bp, Mus musculus
  siRNA target sequence for Tnfrsf11b (NM_008764.2,865-883).
gctgttcctaccaagatta

SEQ ID NO: 638033 - DNA, 19 bp, Mus musculus
  siRNA target sequence for Tnfrsf11b (NM_008764.2,866-884).
ctgttcctaccaagattat

SEQ ID NO: 638034 - DNA, 19 bp, Mus musculus
  siRNA target sequence for Tnfrsf11b (NM_008764.2,871-889).
cctaccaagattataccaa

SEQ ID NO: 638035 - DNA, 19 bp, Mus musculus
  siRNA target sequence for Tnfrsf11b (NM_008764.2,1213-1231).
ctgaagctactcagtttat

SEQ ID NO: 638036 - DNA, 19 bp, Mus musculus
  siRNA target sequence for Tnfrsf11b (NM_008764.2,1260-1278).
cttgaagggcctgatgtat

SEQ ID NO: 638037 - DNA, 19 bp, Mus musculus
  siRNA target sequence for Tnfrsf11b (NM_008764.2,1364-1382).
caatgtacagactgtatca

SEQ ID NO: 638038 - DNA, 19 bp, Mus musculus
  siRNA target sequence for Tnfrsf11b (NM_008764.2,1423-1441).
gtgaaaataagctgcttat

SEQ ID NO: 638039 - DNA, 19 bp, Mus musculus
  siRNA target sequence for Tnfrsf12a (NM_013749.1,295-313).
gttttggcgctggtttcta

SEQ ID NO: 638040 - DNA, 19 bp, Mus musculus
  siRNA target sequence for Tnfrsf12a (NM_013749.1,340-358).
cggagagaaaagtttacta

SEQ ID NO: 638041 - DNA, 19 bp, Mus musculus
  siRNA target sequence for Tnfrsf13c (NM_028075.1,153-171).
gccggacactggacataca

SEQ ID NO: 638042 - DNA, 19 bp, Mus musculus
  siRNA target sequence for Tnfrsf13c (NM_028075.1,154-172).
ccggacactggacatacaa

SEQ ID NO: 638043 - DNA, 19 bp, Mus musculus
  siRNA target sequence for Tnfrsf13c (NM_028075.1,257-275).
cactcctgggactgatact

SEQ ID NO: 638044 - DNA, 19 bp, Mus musculus
  siRNA target sequence for Tnfrsf13c (NM_028075.1,369-387).
gcaagagtccctggaaaat

SEQ ID NO: 638045 - DNA, 19 bp, Mus musculus
  siRNA target sequence for Tnfrsf13c (NM_028075.1,373-391).
gagtccctggaaaatgtct

SEQ ID NO: 638046 - DNA, 19 bp, Mus musculus
  siRNA target sequence for Tnfrsf13c (NM_028075.1,434-452).
ggcctccgctcaaagaaga

SEQ ID NO: 638047 - DNA, 19 bp, Mus musculus
  siRNA target sequence for Tnfrsf13c (NM_028075.1,435-453).
gcctccgctcaaagaagat

SEQ ID NO: 638048 - DNA, 19 bp, Mus musculus
  siRNA target sequence for Tnfrsf17 (NM_011608.1,261-279).
cgtgaccagttcagtgaaa

SEQ ID NO: 638049 - DNA, 19 bp, Mus musculus
  siRNA target sequence for Tnfrsf17 (NM_011608.1,334-352).
gcacttttcacaatctcat

SEQ ID NO: 638050 - DNA, 19 bp, Mus musculus
  siRNA target sequence for Tnfrsf17 (NM_011608.1,335-353).
cacttttcacaatctcatt

SEQ ID NO: 638051 - DNA, 19 bp, Mus musculus
  siRNA target sequence for Tnfrsf17 (NM_011608.1,337-355).
cttttcacaatctcattct

SEQ ID NO: 638052 - DNA, 19 bp, Mus musculus
  siRNA target sequence for Tnfrsf17 (NM_011608.1,489-507).
ccgaagcctggagtataca

SEQ ID NO: 638053 - DNA, 19 bp, Mus musculus
  siRNA target sequence for Tnfrsf17 (NM_011608.1,491-509).
gaagcctggagtatacagt

SEQ ID NO: 638054 - DNA, 19 bp, Mus musculus
  siRNA target sequence for Tnfrsf17 (NM_011608.1,591-609).
ggagggggcaaccattctt

SEQ ID NO: 638055 - DNA, 19 bp, Mus musculus
  siRNA target sequence for Tnfrsf17 (NM_011608.1,625-643).
ggtgactacggcaagtcaa

SEQ ID NO: 638056 - DNA, 19 bp, Mus musculus
  siRNA target sequence for Tnfrsf18 (NM_009400.1,134-152).
gccctggcaaggttcagaa

SEQ ID NO: 638057 - DNA, 19 bp, Mus musculus
  siRNA target sequence for Tnfrsf18 (NM_009400.1,211-229).
ccaaaagaaaggtgcatat

SEQ ID NO: 638058 - DNA, 19 bp, Mus musculus
  siRNA target sequence for Tnfrsf18 (NM_009400.1,309-327).
ggagtctcaaggggatatt

SEQ ID NO: 638059 - DNA, 19 bp, Mus musculus
  siRNA target sequence for Tnfrsf18 (NM_009400.1,314-332).
ctcaaggggatattgtgtt

SEQ ID NO: 638060 - DNA, 19 bp, Mus musculus
  siRNA target sequence for Tnfrsf18 (NM_009400.1,382-400).
gacggtcactgcagacttt

SEQ ID NO: 638061 - DNA, 19 bp, Mus musculus
  siRNA target sequence for Tnfrsf18 (NM_009400.1,402-420).
gaccaactgttctcagttt

SEQ ID NO: 638062 - DNA, 19 bp, Mus musculus
  siRNA target sequence for Tnfrsf18 (NM_009400.1,490-508).
gagcaatacggccatttga

SEQ ID NO: 638063 - DNA, 19 bp, Mus musculus
  siRNA target sequence for Tnfrsf18 (NM_009400.1,523-541).
gtcatggctgcatgcattt

SEQ ID NO: 638064 - DNA, 19 bp, Mus musculus
  siRNA target sequence for Tnfrsf18 (NM_009400.1,559-577).
cagctcggcctgcacatat

SEQ ID NO: 638065 - DNA, 19 bp, Mus musculus
  siRNA target sequence for Tnfrsf19 (NM_013869.3,500-518).
ggatcgatctggaaactgt

SEQ ID NO: 638066 - DNA, 19 bp, Mus musculus
  siRNA target sequence for Tnfrsf19 (NM_013869.3,631-649).
ggggtttccagaagtgtaa

SEQ ID NO: 638067 - DNA, 19 bp, Mus musculus
  siRNA target sequence for Tnfrsf19 (NM_013869.3,725-743).
ggactgcctgccaggattt

SEQ ID NO: 638068 - DNA, 19 bp, Mus musculus
  siRNA target sequence for Tnfrsf19 (NM_013869.3,999-1017).
cggtcacaggacattcagt

SEQ ID NO: 638069 - DNA, 19 bp, Mus musculus
  siRNA target sequence for Tnfrsf19 (NM_013869.3,1075-1093).
gagcatgctgtcagtatca

SEQ ID NO: 638070 - DNA, 19 bp, Mus musculus
  siRNA target sequence for Tnfrsf19 (NM_013869.3,1096-1114).
gggactcagccccaatgta

SEQ ID NO: 638071 - DNA, 19 bp, Mus musculus
  siRNA target sequence for Tnfrsf19 (NM_013869.3,1097-1115).
ggactcagccccaatgtat

SEQ ID NO: 638072 - DNA, 19 bp, Mus musculus
  siRNA target sequence for Tnfrsf19 (NM_013869.3,1273-1291).
gttccatctgcgctgaatt

SEQ ID NO: 638073 - DNA, 19 bp, Mus musculus
  siRNA target sequence for Tnfrsf19 (NM_013869.3,1280-1298).
ctgcgctgaattttctgat

SEQ ID NO: 638074 - DNA, 19 bp, Mus musculus
  siRNA target sequence for Tnfrsf19 (NM_013869.3,1359-1377).
gaactcactggagaagata

SEQ ID NO: 638075 - DNA, 19 bp, Mus musculus
  siRNA target sequence for Tnfrsf19 (NM_013869.3,1384-1402).
ccctcaatcccgaaaacga

SEQ ID NO: 638076 - DNA, 19 bp, Mus musculus
  siRNA target sequence for Tnfrsf19 (NM_013869.3,1385-1403).
cctcaatcccgaaaacgaa

SEQ ID NO: 638077 - DNA, 19 bp, Mus musculus
  siRNA target sequence for Tnfrsf19 (NM_013869.3,1386-1404).
ctcaatcccgaaaacgaaa

SEQ ID NO: 638078 - DNA, 19 bp, Mus musculus
  siRNA target sequence for Tnfrsf19 (NM_013869.3,1470-1488).
gggaatgtttcagaatcta

SEQ ID NO: 638079 - DNA, 19 bp, Mus musculus
  siRNA target sequence for Tnfrsf19 (NM_013869.3,1472-1490).
gaatgtttcagaatctact

SEQ ID NO: 638080 - DNA, 19 bp, Mus musculus
  siRNA target sequence for Tnfrsf19 (NM_013869.3,1583-1601).
cagggaaaacctgaatcta

SEQ ID NO: 638081 - DNA, 19 bp, Mus musculus
  siRNA target sequence for Tnfrsf19l (NM_177073.3,192-210).
gccactccaacaccaataa

SEQ ID NO: 638082 - DNA, 19 bp, Mus musculus
  siRNA target sequence for Tnfrsf19l (NM_177073.3,252-270).
ccaggacagggcacattat

SEQ ID NO: 638083 - DNA, 19 bp, Mus musculus
  siRNA target sequence for Tnfrsf19l (NM_177073.3,255-273).
ggacagggcacattatgca

SEQ ID NO: 638084 - DNA, 19 bp, Mus musculus
  siRNA target sequence for Tnfrsf19l (NM_177073.3,336-354).
cgatgcagccttcaaaaga

SEQ ID NO: 638085 - DNA, 19 bp, Mus musculus
  siRNA target sequence for Tnfrsf19l (NM_177073.3,376-394).
cagcaactcatgatacaat

SEQ ID NO: 638086 - DNA, 19 bp, Mus musculus
  siRNA target sequence for Tnfrsf19l (NM_177073.3,378-396).
gcaactcatgatacaatgt

SEQ ID NO: 638087 - DNA, 19 bp, Mus musculus
  siRNA target sequence for Tnfrsf19l (NM_177073.3,1134-1152).
ggacgtcagggcgagatta

SEQ ID NO: 638088 - DNA, 19 bp, Mus musculus
  siRNA target sequence for Tnfrsf19l (NM_177073.3,1137-1155).
cgtcagggcgagattacca

SEQ ID NO: 638089 - DNA, 19 bp, Mus musculus
  siRNA target sequence for Tnfrsf19l (NM_177073.3,1172-1190).
gttccgtgtggctcgtatt

SEQ ID NO: 638090 - DNA, 19 bp, Mus musculus
  siRNA target sequence for Tnfrsf19l (NM_177073.3,1175-1193).
ccgtgtggctcgtattcct

SEQ ID NO: 638091 - DNA, 19 bp, Mus musculus
  siRNA target sequence for Tnfrsf19l (NM_177073.3,1194-1212).
gagcagcggaccagttcat

SEQ ID NO: 638092 - DNA, 19 bp, Mus musculus
  siRNA target sequence for Tnfrsf19l (NM_177073.3,1197-1215).
cagcggaccagttcattgt

SEQ ID NO: 638093 - DNA, 19 bp, Mus musculus
  siRNA target sequence for Tnfrsf19l (NM_177073.3,1200-1218).
cggaccagttcattgttat

SEQ ID NO: 638094 - DNA, 19 bp, Mus musculus
  siRNA target sequence for Tnfrsf19l (NM_177073.3,1202-1220).
gaccagttcattgttatct

SEQ ID NO: 638095 - DNA, 19 bp, Mus musculus
  siRNA target sequence for Tnfrsf19l (NM_177073.3,1318-1336).
gtggtgggagccatactaa

SEQ ID NO: 638096 - DNA, 19 bp, Mus musculus
  siRNA target sequence for Tnfrsf19l (NM_177073.3,1320-1338).
ggtgggagccatactaagt

SEQ ID NO: 638097 - DNA, 19 bp, Mus musculus
  siRNA target sequence for Tnfrsf1a (NM_011609.2,382-400).
gggagaagagggatagctt

SEQ ID NO: 638098 - DNA, 19 bp, Mus musculus
  siRNA target sequence for Tnfrsf1a (NM_011609.2,401-419).
gtgtccccaaggaaagtat

SEQ ID NO: 638099 - DNA, 19 bp, Mus musculus
  siRNA target sequence for Tnfrsf1a (NM_011609.2,411-429).
ggaaagtatgtccattcta

SEQ ID NO: 638100 - DNA, 19 bp, Mus musculus
  siRNA target sequence for Tnfrsf1a (NM_011609.2,510-528).
gtctgcagggagtgtgaaa

SEQ ID NO: 638101 - DNA, 19 bp, Mus musculus
  siRNA target sequence for Tnfrsf1a (NM_011609.2,541-559).
cggcttcccagaattacct

SEQ ID NO: 638102 - DNA, 19 bp, Mus musculus
  siRNA target sequence for Tnfrsf1a (NM_011609.2,578-596).
caagacatgtcggaaagaa

SEQ ID NO: 638103 - DNA, 19 bp, Mus musculus
  siRNA target sequence for Tnfrsf1a (NM_011609.2,754-772).
ctcagaacaccgtgtgtaa

SEQ ID NO: 638104 - DNA, 19 bp, Mus musculus
  siRNA target sequence for Tnfrsf1a (NM_011609.2,756-774).
cagaacaccgtgtgtaact

SEQ ID NO: 638105 - DNA, 19 bp, Mus musculus
  siRNA target sequence for Tnfrsf1a (NM_011609.2,837-855).
gaggagtgtatgaagttgt

SEQ ID NO: 638106 - DNA, 19 bp, Mus musculus
  siRNA target sequence for Tnfrsf1a (NM_011609.2,862-880).
ctcctccgcttgcaaatgt

SEQ ID NO: 638107 - DNA, 19 bp, Mus musculus
  siRNA target sequence for Tnfrsf1a (NM_011609.2,864-882).
cctccgcttgcaaatgtca

SEQ ID NO: 638108 - DNA, 19 bp, Mus musculus
  siRNA target sequence for Tnfrsf1a (NM_011609.2,868-886).
cgcttgcaaatgtcacaaa

SEQ ID NO: 638109 - DNA, 19 bp, Mus musculus
  siRNA target sequence for Tnfrsf1a (NM_011609.2,912-930).
ctgttgcccctggttatct

SEQ ID NO: 638110 - DNA, 19 bp, Mus musculus
  siRNA target sequence for Tnfrsf1a (NM_011609.2,933-951).
ctaggtctttgccttctat

SEQ ID NO: 638111 - DNA, 19 bp, Mus musculus
  siRNA target sequence for Tnfrsf1a (NM_011609.2,988-1006).
ggtggaggcccgaagtcta

SEQ ID NO: 638112 - DNA, 19 bp, Mus musculus
  siRNA target sequence for Tnfrsf1a (NM_011609.2,999-1017).
gaagtctactccatcattt

SEQ ID NO: 638113 - DNA, 19 bp, Mus musculus
  siRNA target sequence for Tnfrsf1a (NM_011609.2,1171-1189).
ccatcttcggtcctagtaa

SEQ ID NO: 638114 - DNA, 19 bp, Mus musculus
  siRNA target sequence for Tnfrsf1a (NM_011609.2,1243-1261).
ctctgctctacgaatcact

SEQ ID NO: 638115 - DNA, 19 bp, Mus musculus
  siRNA target sequence for Tnfrsf1a (NM_011609.2,1313-1331).
cccgcaacgtcctgacaat

SEQ ID NO: 638116 - DNA, 19 bp, Mus musculus
  siRNA target sequence for Tnfrsf1a (NM_011609.2,1333-1351).
cagaccttgcgattctgta

SEQ ID NO: 638117 - DNA, 19 bp, Mus musculus
  siRNA target sequence for Tnfrsf1a (NM_011609.2,1378-1396).
cgcgctggaaggagttcat

SEQ ID NO: 638118 - DNA, 19 bp, Mus musculus
  siRNA target sequence for Tnfrsf1a (NM_011609.2,1563-1581).
gctgggtgcctggagaata

SEQ ID NO: 638119 - DNA, 19 bp, Mus musculus
  siRNA target sequence for Tnfrsf1b (NM_011610.1,209-227).
gatctcacaggaatactat

SEQ ID NO: 638120 - DNA, 19 bp, Mus musculus
  siRNA target sequence for Tnfrsf1b (NM_011610.1,242-260).
gatgtgctgtgctaagtgt

SEQ ID NO: 638121 - DNA, 19 bp, Mus musculus
  siRNA target sequence for Tnfrsf1b (NM_011610.1,262-280).
ctcctggccaatatgtgaa

SEQ ID NO: 638122 - DNA, 19 bp, Mus musculus
  siRNA target sequence for Tnfrsf1b (NM_011610.1,267-285).
ggccaatatgtgaaacatt

SEQ ID NO: 638123 - DNA, 19 bp, Mus musculus
  siRNA target sequence for Tnfrsf1b (NM_011610.1,341-359).
ctgtgaggcaagcatgtat

SEQ ID NO: 638124 - DNA, 19 bp, Mus musculus
  siRNA target sequence for Tnfrsf1b (NM_011610.1,366-384).
gtctggaaccagtttcgta

SEQ ID NO: 638125 - DNA, 19 bp, Mus musculus
  siRNA target sequence for Tnfrsf1b (NM_011610.1,371-389).
gaaccagtttcgtacatgt

SEQ ID NO: 638126 - DNA, 19 bp, Mus musculus
  siRNA target sequence for Tnfrsf1b (NM_011610.1,375-393).
cagtttcgtacatgtttga

SEQ ID NO: 638127 - DNA, 19 bp, Mus musculus
  siRNA target sequence for Tnfrsf1b (NM_011610.1,479-497).
caggtactgcgccttgaaa

SEQ ID NO: 638128 - DNA, 19 bp, Mus musculus
  siRNA target sequence for Tnfrsf1b (NM_011610.1,554-572).
cggagtggccagttcaaga

SEQ ID NO: 638129 - DNA, 19 bp, Mus musculus
  siRNA target sequence for Tnfrsf1b (NM_011610.1,717-735).
cccgagtccccaactctaa

SEQ ID NO: 638130 - DNA, 19 bp, Mus musculus
  siRNA target sequence for Tnfrsf1b (NM_011610.1,719-737).
cgagtccccaactctaagt

SEQ ID NO: 638131 - DNA, 19 bp, Mus musculus
  siRNA target sequence for Tnfrsf1b (NM_011610.1,748-766).
ggacactctacgtatctca

SEQ ID NO: 638132 - DNA, 19 bp, Mus musculus
  siRNA target sequence for Tnfrsf1b (NM_011610.1,816-834).
caaactccaagcatcctta

SEQ ID NO: 638133 - DNA, 19 bp, Mus musculus
  siRNA target sequence for Tnfrsf1b (NM_011610.1,842-860).
gggttcaacccccattatt

SEQ ID NO: 638134 - DNA, 19 bp, Mus musculus
  siRNA target sequence for Tnfrsf1b (NM_011610.1,844-862).
gttcaacccccattattga

SEQ ID NO: 638135 - DNA, 19 bp, Mus musculus
  siRNA target sequence for Tnfrsf1b (NM_011610.1,847-865).
caacccccattattgaaca

SEQ ID NO: 638136 - DNA, 19 bp, Mus musculus
  siRNA target sequence for Tnfrsf1b (NM_011610.1,851-869).
ccccattattgaacaaagt

SEQ ID NO: 638137 - DNA, 19 bp, Mus musculus
  siRNA target sequence for Tnfrsf1b (NM_011610.1,881-899).
catctctcttccaattggt

SEQ ID NO: 638138 - DNA, 19 bp, Mus musculus
  siRNA target sequence for Tnfrsf1b (NM_011610.1,919-937).
cactgggtctgctgatgtt

SEQ ID NO: 638139 - DNA, 19 bp, Mus musculus
  siRNA target sequence for Tnfrsf1b (NM_011610.1,1352-1370).
ctcagcgtccccaaaggat

SEQ ID NO: 638140 - DNA, 19 bp, Mus musculus
  siRNA target sequence for Tnfrsf1b (NM_011610.1,1493-1511).
ccaagctggctggtttgat

SEQ ID NO: 638141 - DNA, 19 bp, Mus musculus
  siRNA target sequence for Tnfrsf21 (NM_178589.2,565-583).
gctcaaccagaacaaaaga

SEQ ID NO: 638142 - DNA, 19 bp, Mus musculus
  siRNA target sequence for Tnfrsf21 (NM_178589.2,676-694).
gagcactgtaccaacatga

SEQ ID NO: 638143 - DNA, 19 bp, Mus musculus
  siRNA target sequence for Tnfrsf21 (NM_178589.2,739-757).
cacgagaacggcatagaga

SEQ ID NO: 638144 - DNA, 19 bp, Mus musculus
  siRNA target sequence for Tnfrsf21 (NM_178589.2,782-800).
gtccatggccgatgattga

SEQ ID NO: 638145 - DNA, 19 bp, Mus musculus
  siRNA target sequence for Tnfrsf21 (NM_178589.2,788-806).
ggccgatgattgagagatt

SEQ ID NO: 638146 - DNA, 19 bp, Mus musculus
  siRNA target sequence for Tnfrsf21 (NM_178589.2,789-807).
gccgatgattgagagatta

SEQ ID NO: 638147 - DNA, 19 bp, Mus musculus
  siRNA target sequence for Tnfrsf21 (NM_178589.2,792-810).
gatgattgagagattacct

SEQ ID NO: 638148 - DNA, 19 bp, Mus musculus
  siRNA target sequence for Tnfrsf21 (NM_178589.2,1078-1096).
ggcatgcgcctgttcttct

SEQ ID NO: 638149 - DNA, 19 bp, Mus musculus
  siRNA target sequence for Tnfrsf21 (NM_178589.2,1220-1238).
ctgcctctgttagaactaa

SEQ ID NO: 638150 - DNA, 19 bp, Mus musculus
  siRNA target sequence for Tnfrsf21 (NM_178589.2,1320-1338).
gccaaacccaccacaagtt

SEQ ID NO: 638151 - DNA, 19 bp, Mus musculus
  siRNA target sequence for Tnfrsf21 (NM_178589.2,1456-1474).
cagaacgctcacaagcatt

SEQ ID NO: 638152 - DNA, 19 bp, Mus musculus
  siRNA target sequence for Tnfrsf21 (NM_178589.2,1648-1666).
cagaaccgggagaaatgga

SEQ ID NO: 638153 - DNA, 19 bp, Mus musculus
  siRNA target sequence for Tnfrsf21 (NM_178589.2,1654-1672).
cgggagaaatggatctact

SEQ ID NO: 638154 - DNA, 19 bp, Mus musculus
  siRNA target sequence for Tnfrsf21 (NM_178589.2,1674-1692).
ccgcaacggccatggtatt

SEQ ID NO: 638155 - DNA, 19 bp, Mus musculus
  siRNA target sequence for Tnfrsf21 (NM_178589.2,1676-1694).
gcaacggccatggtattga

SEQ ID NO: 638156 - DNA, 19 bp, Mus musculus
  siRNA target sequence for Tnfrsf21 (NM_178589.2,1733-1751).
ggaaggacatctatcagtt

SEQ ID NO: 638157 - DNA, 19 bp, Mus musculus
  siRNA target sequence for Tnfrsf21 (NM_178589.2,1737-1755).
ggacatctatcagtttctt

SEQ ID NO: 638158 - DNA, 19 bp, Mus musculus
  siRNA target sequence for Tnfrsf21 (NM_178589.2,1785-1803).
cttctccaatggatacact

SEQ ID NO: 638159 - DNA, 19 bp, Mus musculus
  siRNA target sequence for Tnfrsf21 (NM_178589.2,1893-1911).
ccagcaccgacgcaatgat

SEQ ID NO: 638160 - DNA, 19 bp, Mus musculus
  siRNA target sequence for Tnfrsf21 (NM_178589.2,1896-1914).
gcaccgacgcaatgatgtt

SEQ ID NO: 638161 - DNA, 19 bp, Mus musculus
  siRNA target sequence for Tnfrsf21 (NM_178589.2,2015-2033).
ccagtcctaacgtgaaact

SEQ ID NO: 638162 - DNA, 19 bp, Mus musculus
  siRNA target sequence for Tnfrsf21 (NM_178589.2,2016-2034).
cagtcctaacgtgaaactt

SEQ ID NO: 638163 - DNA, 19 bp, Mus musculus
  siRNA target sequence for Tnfrsf21 (NM_178589.2,2018-2036).
gtcctaacgtgaaacttga

SEQ ID NO: 638164 - DNA, 19 bp, Mus musculus
  siRNA target sequence for Tnfrsf21 (NM_178589.2,2021-2039).
ctaacgtgaaacttgagaa

SEQ ID NO: 638165 - DNA, 19 bp, Mus musculus
  siRNA target sequence for Tnfrsf21 (NM_178589.2,2157-2175).
cagaaacggctcctttatt

SEQ ID NO: 638166 - DNA, 19 bp, Mus musculus
  siRNA target sequence for Tnfrsf21 (NM_178589.2,2163-2181).
cggctcctttattaccaaa

SEQ ID NO: 638167 - DNA, 19 bp, Mus musculus
  siRNA target sequence for Tnfrsf25 (NM_033042.2,287-305).
gaggtatggcccgttttgt

SEQ ID NO: 638168 - DNA, 19 bp, Mus musculus
  siRNA target sequence for Tnfrsf25 (NM_033042.2,316-334).
gcccaaagggacactacat

SEQ ID NO: 638169 - DNA, 19 bp, Mus musculus
  siRNA target sequence for Tnfrsf25 (NM_033042.2,384-402).
ccctcggacaccttcttga

SEQ ID NO: 638170 - DNA, 19 bp, Mus musculus
  siRNA target sequence for Tnfrsf25 (NM_033042.2,635-653).
gcctggcttctatatacgt

SEQ ID NO: 638171 - DNA, 19 bp, Mus musculus
  siRNA target sequence for Tnfrsf25 (NM_033042.2,723-741).
ggctggaagcagatgtttt

SEQ ID NO: 638172 - DNA, 19 bp, Mus musculus
  siRNA target sequence for Tnfrsf25 (NM_033042.2,756-774).
ctaggagtcgcgttccttt

SEQ ID NO: 638173 - DNA, 19 bp, Mus musculus
  siRNA target sequence for Tnfrsf25 (NM_033042.2,802-820).
gtcgatggcagccttgtaa

SEQ ID NO: 638174 - DNA, 19 bp, Mus musculus
  siRNA target sequence for Tnfrsf25 (NM_033042.2,1031-1049).
ggatcagctgccaaacaga

SEQ ID NO: 638175 - DNA, 19 bp, Mus musculus
  siRNA target sequence for Tnfrsf25 (NM_033042.2,1032-1050).
gatcagctgccaaacagaa

SEQ ID NO: 638176 - DNA, 19 bp, Mus musculus
  siRNA target sequence for Tnfrsf25 (NM_033042.2,1037-1055).
gctgccaaacagaactctt

SEQ ID NO: 638177 - DNA, 19 bp, Mus musculus
  siRNA target sequence for Tnfrsf25 (NM_033042.2,1129-1147).
cgcagctctacgatgtgat

SEQ ID NO: 638178 - DNA, 19 bp, Mus musculus
  siRNA target sequence for Tnfrsf26 (NM_175649.2,71-89).
ctataaccctgtgtaagat

SEQ ID NO: 638179 - DNA, 19 bp, Mus musculus
  siRNA target sequence for Tnfrsf26 (NM_175649.2,83-101).
gtaagattggtgagttcaa

SEQ ID NO: 638180 - DNA, 19 bp, Mus musculus
  siRNA target sequence for Tnfrsf26 (NM_175649.2,92-110).
gtgagttcaaacatgagaa

SEQ ID NO: 638181 - DNA, 19 bp, Mus musculus
  siRNA target sequence for Tnfrsf26 (NM_175649.2,162-180).
ggagaaccataataagagt

SEQ ID NO: 638182 - DNA, 19 bp, Mus musculus
  siRNA target sequence for Tnfrsf26 (NM_175649.2,185-203).
gtgctccatgtgattctga

SEQ ID NO: 638183 - DNA, 19 bp, Mus musculus
  siRNA target sequence for Tnfrsf26 (NM_175649.2,257-275).
gccgggacgaccaagaaga

SEQ ID NO: 638184 - DNA, 19 bp, Mus musculus
  siRNA target sequence for Tnfrsf26 (NM_175649.2,388-406).
ggcagagtcgtcaggaaat

SEQ ID NO: 638185 - DNA, 19 bp, Mus musculus
  siRNA target sequence for Tnfrsf26 (NM_175649.2,423-441).
cactgtgtgtgacaagttt

SEQ ID NO: 638186 - DNA, 19 bp, Mus musculus
  siRNA target sequence for Tnfrsf26 (NM_175649.2,495-513).
gggtattgtggttatcata

SEQ ID NO: 638187 - DNA, 19 bp, Mus musculus
  siRNA target sequence for Tnfrsf26 (NM_175649.2,535-553).
ggcgctgtcatcattttga

SEQ ID NO: 638188 - DNA, 19 bp, Mus musculus
  siRNA target sequence for Tnfrsf26 (NM_175649.2,536-554).
gcgctgtcatcattttgat

SEQ ID NO: 638189 - DNA, 19 bp, Mus musculus
  siRNA target sequence for Tnfrsf26 (NM_175649.2,537-555).
cgctgtcatcattttgatt

SEQ ID NO: 638190 - DNA, 19 bp, Mus musculus
  siRNA target sequence for Tnfrsf26 (NM_175649.2,575-593).
gtaaaagaggagagaatat

SEQ ID NO: 638191 - DNA, 19 bp, Mus musculus
  siRNA target sequence for Tnfrsf4 (NM_011659.1,304-322).
gccagccaggccatggtat

SEQ ID NO: 638192 - DNA, 19 bp, Mus musculus
  siRNA target sequence for Tnfrsf4 (NM_011659.1,323-341).
ggtgagccgctgtgatcat

SEQ ID NO: 638193 - DNA, 19 bp, Mus musculus
  siRNA target sequence for Tnfrsf4 (NM_011659.1,339-357).
cataccagggatactctat

SEQ ID NO: 638194 - DNA, 19 bp, Mus musculus
  siRNA target sequence for Tnfrsf4 (NM_011659.1,344-362).
cagggatactctatgtcat

SEQ ID NO: 638195 - DNA, 19 bp, Mus musculus
  siRNA target sequence for Tnfrsf4 (NM_011659.1,367-385).
gtgagactggcttctacaa

SEQ ID NO: 638196 - DNA, 19 bp, Mus musculus
  siRNA target sequence for Tnfrsf4 (NM_011659.1,596-614).
caagccctggaccaattgt

SEQ ID NO: 638197 - DNA, 19 bp, Mus musculus
  siRNA target sequence for Tnfrsf4 (NM_011659.1,602-620).
ctggaccaattgtacctta

SEQ ID NO: 638198 - DNA, 19 bp, Mus musculus
  siRNA target sequence for Tnfrsf4 (NM_011659.1,605-623).
gaccaattgtaccttatct

SEQ ID NO: 638199 - DNA, 19 bp, Mus musculus
  siRNA target sequence for Tnfrsf4 (NM_011659.1,965-983).
cacagacgcacactttact

SEQ ID NO: 638200 - DNA, 19 bp, Mus musculus
  siRNA target sequence for Tnfrsf4 (NM_011659.1,967-985).
cagacgcacactttactct

SEQ ID NO: 638201 - DNA, 19 bp, Mus musculus
  siRNA target sequence for Tnfrsf8 (NM_009401.1,275-293).
ctgactactacgtcaatga

SEQ ID NO: 638202 - DNA, 19 bp, Mus musculus
  siRNA target sequence for Tnfrsf8 (NM_009401.1,360-378).
gaactctcctcgaatctgt

SEQ ID NO: 638203 - DNA, 19 bp, Mus musculus
  siRNA target sequence for Tnfrsf8 (NM_009401.1,481-499).
gcaaagaaggacactatct

SEQ ID NO: 638204 - DNA, 19 bp, Mus musculus
  siRNA target sequence for Tnfrsf8 (NM_009401.1,547-565).
gaccgcaagacacttacta

SEQ ID NO: 638205 - DNA, 19 bp, Mus musculus
  siRNA target sequence for Tnfrsf8 (NM_009401.1,720-738).
cagtccagatccaggtaat

SEQ ID NO: 638206 - DNA, 19 bp, Mus musculus
  siRNA target sequence for Tnfrsf8 (NM_009401.1,894-912).
gtccacgggaacaccattt

SEQ ID NO: 638207 - DNA, 19 bp, Mus musculus
  siRNA target sequence for Tnfrsf8 (NM_009401.1,1080-1098).
ctgtcctactgaaaagcta

SEQ ID NO: 638208 - DNA, 19 bp, Mus musculus
  siRNA target sequence for Tnfrsf8 (NM_009401.1,1133-1151).
ccagcacgggacacaagtt

SEQ ID NO: 638209 - DNA, 19 bp, Mus musculus
  siRNA target sequence for Tnfrsf8 (NM_009401.1,1289-1307).
ccacggaacacaccaataa

SEQ ID NO: 638210 - DNA, 19 bp, Mus musculus
  siRNA target sequence for Tnfrsf8 (NM_009401.1,1301-1319).
ccaataacaggattgagaa

SEQ ID NO: 638211 - DNA, 19 bp, Mus musculus
  siRNA target sequence for Tnfrsf8 (NM_009401.1,1347-1365).
gatcgtgggctctgtaaaa

SEQ ID NO: 638212 - DNA, 19 bp, Mus musculus
  siRNA target sequence for Tnfrsf9 (NM_011612.1,220-238).
gaactcctgtgataactgt

SEQ ID NO: 638213 - DNA, 19 bp, Mus musculus
  siRNA target sequence for Tnfrsf9 (NM_011612.1,311-329).
ggtggacagccgaactgta

SEQ ID NO: 638214 - DNA, 19 bp, Mus musculus
  siRNA target sequence for Tnfrsf9 (NM_011612.1,314-332).
ggacagccgaactgtaaca

SEQ ID NO: 638215 - DNA, 19 bp, Mus musculus
  siRNA target sequence for Tnfrsf9 (NM_011612.1,315-333).
gacagccgaactgtaacat

SEQ ID NO: 638216 - DNA, 19 bp, Mus musculus
  siRNA target sequence for Tnfrsf9 (NM_011612.1,339-357).
gagtgtgtgcaggctattt

SEQ ID NO: 638217 - DNA, 19 bp, Mus musculus
  siRNA target sequence for Tnfrsf9 (NM_011612.1,403-421).
gtgcattgaaggattccat

SEQ ID NO: 638218 - DNA, 19 bp, Mus musculus
  siRNA target sequence for Tnfrsf9 (NM_011612.1,438-456).
gcaccagatgtgaaaagga

SEQ ID NO: 638219 - DNA, 19 bp, Mus musculus
  siRNA target sequence for Tnfrsf9 (NM_011612.1,465-483).
ctggccaggagctaacgaa

SEQ ID NO: 638220 - DNA, 19 bp, Mus musculus
  siRNA target sequence for Tnfrsf9 (NM_011612.1,742-760).
ggccctgatcttcattact

SEQ ID NO: 638221 - DNA, 19 bp, Mus musculus
  siRNA target sequence for Tpra40 (NM_011906.1,276-294).
ccgcccacagcatccaata

SEQ ID NO: 638222 - DNA, 19 bp, Mus musculus
  siRNA target sequence for Tpra40 (NM_011906.1,277-295).
cgcccacagcatccaatat

SEQ ID NO: 638223 - DNA, 19 bp, Mus musculus
  siRNA target sequence for Tpra40 (NM_011906.1,320-338).
gctgctatatgaggatatt

SEQ ID NO: 638224 - DNA, 19 bp, Mus musculus
  siRNA target sequence for Tpra40 (NM_011906.1,381-399).
cccaatgtgctcttcttca

SEQ ID NO: 638225 - DNA, 19 bp, Mus musculus
  siRNA target sequence for Tpra40 (NM_011906.1,511-529).
ccagggctgtggtttctat

SEQ ID NO: 638226 - DNA, 19 bp, Mus musculus
  siRNA target sequence for Tpra40 (NM_011906.1,681-699).
gctatcaccacagtattgt

SEQ ID NO: 638227 - DNA, 19 bp, Mus musculus
  siRNA target sequence for Tpra40 (NM_011906.1,1034-1052).
ctttgcaccactcatctat

SEQ ID NO: 638228 - DNA, 19 bp, Mus musculus
  siRNA target sequence for Trem2b (NM_031254.2,169-187).
gacctctccaccagtttct

SEQ ID NO: 638229 - DNA, 19 bp, Mus musculus
  siRNA target sequence for Trem2b (NM_031254.2,257-275).
cttgagggtgtcatgtact

SEQ ID NO: 638230 - DNA, 19 bp, Mus musculus
  siRNA target sequence for Trem2b (NM_031254.2,262-280).
gggtgtcatgtacttatga

SEQ ID NO: 638231 - DNA, 19 bp, Mus musculus
  siRNA target sequence for Trem2b (NM_031254.2,698-716).
cgttctcctgagcaagttt

SEQ ID NO: 638232 - DNA, 19 bp, Mus musculus
  siRNA target sequence for Trem2b (NM_031254.2,805-823).
ctgggcaccaacttcagat

SEQ ID NO: 638233 - DNA, 19 bp, Mus musculus
  siRNA target sequence for Trip10 (NM_134125.1,113-131).
ccgagttgtgggatcagtt

SEQ ID NO: 638234 - DNA, 19 bp, Mus musculus
  siRNA target sequence for Trip10 (NM_134125.1,238-256).
cggagcctggtgaaaaagt

SEQ ID NO: 638235 - DNA, 19 bp, Mus musculus
  siRNA target sequence for Trip10 (NM_134125.1,240-258).
gagcctggtgaaaaagtat

SEQ ID NO: 638236 - DNA, 19 bp, Mus musculus
  siRNA target sequence for Trip10 (NM_134125.1,242-260).
gcctggtgaaaaagtatct

SEQ ID NO: 638237 - DNA, 19 bp, Mus musculus
  siRNA target sequence for Trip10 (NM_134125.1,243-261).
cctggtgaaaaagtatctt

SEQ ID NO: 638238 - DNA, 19 bp, Mus musculus
  siRNA target sequence for Trip10 (NM_134125.1,328-346).
ctccaggaggtcaatgact

SEQ ID NO: 638239 - DNA, 19 bp, Mus musculus
  siRNA target sequence for Trip10 (NM_134125.1,397-415).
ctggagctggctaagtatt

SEQ ID NO: 638240 - DNA, 19 bp, Mus musculus
  siRNA target sequence for Trip10 (NM_134125.1,568-586).
cgcctagatcaggacatta

SEQ ID NO: 638241 - DNA, 19 bp, Mus musculus
  siRNA target sequence for Trip10 (NM_134125.1,569-587).
gcctagatcaggacattaa

SEQ ID NO: 638242 - DNA, 19 bp, Mus musculus
  siRNA target sequence for Trip10 (NM_134125.1,719-737).
cacagatgccccagatatt

SEQ ID NO: 638243 - DNA, 19 bp, Mus musculus
  siRNA target sequence for Trip10 (NM_134125.1,723-741).
gatgccccagatattcgat

SEQ ID NO: 638244 - DNA, 19 bp, Mus musculus
  siRNA target sequence for Trip10 (NM_134125.1,728-746).
cccagatattcgataagct

SEQ ID NO: 638245 - DNA, 19 bp, Mus musculus
  siRNA target sequence for Trip10 (NM_134125.1,786-804).
cgggtatgggctcttatca

SEQ ID NO: 638246 - DNA, 19 bp, Mus musculus
  siRNA target sequence for Trip10 (NM_134125.1,816-834).
gcaggtggttcccattatt

SEQ ID NO: 638247 - DNA, 19 bp, Mus musculus
  siRNA target sequence for Trip10 (NM_134125.1,826-844).
cccattattggcaaatgct

SEQ ID NO: 638248 - DNA, 19 bp, Mus musculus
  siRNA target sequence for Trip10 (NM_134125.1,827-845).
ccattattggcaaatgctt

SEQ ID NO: 638249 - DNA, 19 bp, Mus musculus
  siRNA target sequence for Trip10 (NM_134125.1,893-911).
cacaggtcctcatcgaatt

SEQ ID NO: 638250 - DNA, 19 bp, Mus musculus
  siRNA target sequence for Trip10 (NM_134125.1,898-916).
gtcctcatcgaattacaca

SEQ ID NO: 638251 - DNA, 19 bp, Mus musculus
  siRNA target sequence for Trip10 (NM_134125.1,1085-1103).
ccgtggctaccgaagattt

SEQ ID NO: 638252 - DNA, 19 bp, Mus musculus
  siRNA target sequence for Trip10 (NM_134125.1,1087-1105).
gtggctaccgaagatttca

SEQ ID NO: 638253 - DNA, 19 bp, Mus musculus
  siRNA target sequence for Trip10 (NM_134125.1,1454-1472).
gatcccaggacaataagga

SEQ ID NO: 638254 - DNA, 19 bp, Mus musculus
  siRNA target sequence for Trip10 (NM_134125.1,1504-1522).
caggacacccccatctata

SEQ ID NO: 638255 - DNA, 19 bp, Mus musculus
  siRNA target sequence for Trip10 (NM_134125.1,1575-1593).
ggctatctaccattttgaa

SEQ ID NO: 638256 - DNA, 19 bp, Mus musculus
  siRNA target sequence for Trip4 (NM_019797.2,923-941).
gatgtcagcgaggaaatca

SEQ ID NO: 638257 - DNA, 19 bp, Mus musculus
  siRNA target sequence for Trip4 (NM_019797.2,930-948).
gcgaggaaatcatacaata

SEQ ID NO: 638258 - DNA, 19 bp, Mus musculus
  siRNA target sequence for Trip4 (NM_019797.2,974-992).
gaaatacgagaatatgtga

SEQ ID NO: 638259 - DNA, 19 bp, Mus musculus
  siRNA target sequence for Trip4 (NM_019797.2,1016-1034).
ggcaaaaagggtcaattca

SEQ ID NO: 638260 - DNA, 19 bp, Mus musculus
  siRNA target sequence for Trip4 (NM_019797.2,1018-1036).
caaaaagggtcaattcata

SEQ ID NO: 638261 - DNA, 19 bp, Mus musculus
  siRNA target sequence for Trip4 (NM_019797.2,1024-1042).
gggtcaattcatagaagat

SEQ ID NO: 638262 - DNA, 19 bp, Mus musculus
  siRNA target sequence for Trip4 (NM_019797.2,1026-1044).
gtcaattcatagaagatct

SEQ ID NO: 638263 - DNA, 19 bp, Mus musculus
  siRNA target sequence for Trip4 (NM_019797.2,1028-1046).
caattcatagaagatctta

SEQ ID NO: 638264 - DNA, 19 bp, Mus musculus
  siRNA target sequence for Trip4 (NM_019797.2,1051-1069).
caaatggcaaaagaatgat

SEQ ID NO: 638265 - DNA, 19 bp, Mus musculus
  siRNA target sequence for Trip4 (NM_019797.2,1134-1152).
gatcagtggaccagctaaa

SEQ ID NO: 638266 - DNA, 19 bp, Mus musculus
  siRNA target sequence for Trip4 (NM_019797.2,1164-1182).
ggaaaggacgaaacaaaca

SEQ ID NO: 638267 - DNA, 19 bp, Mus musculus
  siRNA target sequence for Trip4 (NM_019797.2,1222-1240).
ggtcaaaacacctttagat

SEQ ID NO: 638268 - DNA, 19 bp, Mus musculus
  siRNA target sequence for Trip4 (NM_019797.2,1260-1278).
gcaacaactccgtaaagaa

SEQ ID NO: 638269 - DNA, 19 bp, Mus musculus
  siRNA target sequence for Trip4 (NM_019797.2,1343-1361).
ggtcgtcacccgtgtgatt

SEQ ID NO: 638270 - DNA, 19 bp, Mus musculus
  siRNA target sequence for Trip4 (NM_019797.2,1400-1418).
gtctgtgggcggatcgttt

SEQ ID NO: 638271 - DNA, 19 bp, Mus musculus
  siRNA target sequence for Trip4 (NM_019797.2,1404-1422).
gtgggcggatcgtttgtga

SEQ ID NO: 638272 - DNA, 19 bp, Mus musculus
  siRNA target sequence for Trip4 (NM_019797.2,1454-1472).
ggctctttggtgtgtacta

SEQ ID NO: 638273 - DNA, 19 bp, Mus musculus
  siRNA target sequence for Trip4 (NM_019797.2,1455-1473).
gctctttggtgtgtactaa

SEQ ID NO: 638274 - DNA, 19 bp, Mus musculus
  siRNA target sequence for Trip4 (NM_019797.2,1493-1511).
cagcgggactcaaacaaaa

SEQ ID NO: 638275 - DNA, 19 bp, Mus musculus
  siRNA target sequence for Trip4 (NM_019797.2,1495-1513).
gcgggactcaaacaaaagt

SEQ ID NO: 638276 - DNA, 19 bp, Mus musculus
  siRNA target sequence for Trip4 (NM_019797.2,1595-1613).
caagaatcccgaatgaagt

SEQ ID NO: 638277 - DNA, 19 bp, Mus musculus
  siRNA target sequence for Trip4 (NM_019797.2,1622-1640).
gagaaggctatcaagcata

SEQ ID NO: 638278 - DNA, 19 bp, Mus musculus
  siRNA target sequence for Trip4 (NM_019797.2,1627-1645).
ggctatcaagcataaggaa

SEQ ID NO: 638279 - DNA, 19 bp, Mus musculus
  siRNA target sequence for Trip4 (NM_019797.2,1628-1646).
gctatcaagcataaggaaa

SEQ ID NO: 638280 - DNA, 19 bp, Mus musculus
  siRNA target sequence for Trip4 (NM_019797.2,1629-1647).
ctatcaagcataaggaaaa

SEQ ID NO: 638281 - DNA, 19 bp, Mus musculus
  siRNA target sequence for Trip4 (NM_019797.2,1675-1693).
ccgaaggacccaagttatt

SEQ ID NO: 638282 - DNA, 19 bp, Mus musculus
  siRNA target sequence for Trip4 (NM_019797.2,1685-1703).
caagttattgacgatgaat

SEQ ID NO: 638283 - DNA, 19 bp, Mus musculus
  siRNA target sequence for Trip4 (NM_019797.2,1694-1712).
gacgatgaatcagattact

SEQ ID NO: 638284 - DNA, 19 bp, Mus musculus
  siRNA target sequence for Trip4 (NM_019797.2,1696-1714).
cgatgaatcagattacttt

SEQ ID NO: 638285 - DNA, 19 bp, Mus musculus
  siRNA target sequence for Trip4 (NM_019797.2,1706-1724).
gattactttgccagtgatt

SEQ ID NO: 638286 - DNA, 19 bp, Mus musculus
  siRNA target sequence for Trip4 (NM_019797.2,1876-1894).
gtatcacagcagactagat

SEQ ID NO: 638287 - DNA, 19 bp, Mus musculus
  siRNA target sequence for Trip4 (NM_019797.2,1937-1955).
ctggtcacgttggatagat

SEQ ID NO: 638288 - DNA, 19 bp, Mus musculus
  siRNA target sequence for Trip4 (NM_019797.2,1939-1957).
ggtcacgttggatagatct

SEQ ID NO: 638289 - DNA, 19 bp, Mus musculus
  siRNA target sequence for Trip4 (NM_019797.2,1940-1958).
gtcacgttggatagatctt

SEQ ID NO: 638290 - DNA, 19 bp, Mus musculus
  siRNA target sequence for Trip4 (NM_019797.2,1942-1960).
cacgttggatagatcttgt

SEQ ID NO: 638291 - DNA, 19 bp, Mus musculus
  siRNA target sequence for Trip4 (NM_019797.2,1968-1986).
ctttgggagttctggtaaa

SEQ ID NO: 638292 - DNA, 19 bp, Mus musculus
  siRNA target sequence for Trip4 (NM_019797.2,2059-2077).
ctcggcaggaccaagacta

SEQ ID NO: 638293 - DNA, 19 bp, Mus musculus
  siRNA target sequence for Trip4 (NM_019797.2,2073-2091).
gactagagcccagtttaca

SEQ ID NO: 638294 - DNA, 19 bp, Mus musculus
  siRNA target sequence for Trip4 (NM_019797.2,2105-2123).
cgaatccaggaccaagaat

SEQ ID NO: 638295 - DNA, 19 bp, Mus musculus
  siRNA target sequence for Trip4 (NM_019797.2,2207-2225).
gagggcagatcctggtata

SEQ ID NO: 638296 - DNA, 19 bp, Mus musculus
  siRNA target sequence for Trip4 (NM_019797.2,2299-2317).
ggctacctatcgtcttctt

SEQ ID NO: 638297 - DNA, 19 bp, Mus musculus
  siRNA target sequence for Trip4 (NM_019797.2,2347-2365).
ctatccgtcgggttgtctt

SEQ ID NO: 638298 - DNA, 19 bp, Mus musculus
  siRNA target sequence for Trip4 (NM_019797.2,2368-2386).
gggctgtgtggaccttatt

SEQ ID NO: 638299 - DNA, 19 bp, Mus musculus
  siRNA target sequence for Trip4 (NM_019797.2,2370-2388).
gctgtgtggaccttattga

SEQ ID NO: 638300 - DNA, 19 bp, Mus musculus
  siRNA target sequence for Trip4 (NM_019797.2,2491-2509).
gaagttccctattaaagga

SEQ ID NO: 638301 - DNA, 19 bp, Mus musculus
  siRNA target sequence for Trip4 (NM_019797.2,2550-2568).
gagcaaagaaggggttaat

SEQ ID NO: 638302 - DNA, 19 bp, Mus musculus
  siRNA target sequence for Trip4 (NM_019797.2,2552-2570).
gcaaagaaggggttaatga

SEQ ID NO: 638303 - DNA, 19 bp, Mus musculus
  siRNA target sequence for Trpm8 (NM_134252.2,482-500).
gccgcagaaatggtactat

SEQ ID NO: 638304 - DNA, 19 bp, Mus musculus
  siRNA target sequence for Trpm8 (NM_134252.2,551-569).
cctacagtgacagtgattt

SEQ ID NO: 638305 - DNA, 19 bp, Mus musculus
  siRNA target sequence for Trpm8 (NM_134252.2,685-703).
ggcacccagatcaaccaaa

SEQ ID NO: 638306 - DNA, 19 bp, Mus musculus
  siRNA target sequence for Trpm8 (NM_134252.2,686-704).
gcacccagatcaaccaaaa

SEQ ID NO: 638307 - DNA, 19 bp, Mus musculus
  siRNA target sequence for Trpm8 (NM_134252.2,711-729).
gtggaactacaaaaaacat

SEQ ID NO: 638308 - DNA, 19 bp, Mus musculus
  siRNA target sequence for Trpm8 (NM_134252.2,852-870).
gcactggcacctcaaaaca

SEQ ID NO: 638309 - DNA, 19 bp, Mus musculus
  siRNA target sequence for Trpm8 (NM_134252.2,893-911).
cgggtggagccaaaaactt

SEQ ID NO: 638310 - DNA, 19 bp, Mus musculus
  siRNA target sequence for Trpm8 (NM_134252.2,922-940).
ccacgcatgcgcaagatct

SEQ ID NO: 638311 - DNA, 19 bp, Mus musculus
  siRNA target sequence for Trpm8 (NM_134252.2,923-941).
cacgcatgcgcaagatctt

SEQ ID NO: 638312 - DNA, 19 bp, Mus musculus
  siRNA target sequence for Trpm8 (NM_134252.2,957-975).
catcgcacagtctaaaggt

SEQ ID NO: 638313 - DNA, 19 bp, Mus musculus
  siRNA target sequence for Trpm8 (NM_134252.2,998-1016).
ctcactacggcctgatgaa

SEQ ID NO: 638314 - DNA, 19 bp, Mus musculus
  siRNA target sequence for Trpm8 (NM_134252.2,1000-1018).
cactacggcctgatgaagt

SEQ ID NO: 638315 - DNA, 19 bp, Mus musculus
  siRNA target sequence for Trpm8 (NM_134252.2,1125-1143).
catcaggagctgtgatgat

SEQ ID NO: 638316 - DNA, 19 bp, Mus musculus
  siRNA target sequence for Trpm8 (NM_134252.2,1136-1154).
gtgatgatgagggacattt

SEQ ID NO: 638317 - DNA, 19 bp, Mus musculus
  siRNA target sequence for Trpm8 (NM_134252.2,1148-1166).
gacatttttcagctcaata

SEQ ID NO: 638318 - DNA, 19 bp, Mus musculus
  siRNA target sequence for Trpm8 (NM_134252.2,1150-1168).
catttttcagctcaataca

SEQ ID NO: 638319 - DNA, 19 bp, Mus musculus
  siRNA target sequence for Trpm8 (NM_134252.2,1279-1297).
cggaatcagctggaaaagt

SEQ ID NO: 638320 - DNA, 19 bp, Mus musculus
  siRNA target sequence for Trpm8 (NM_134252.2,1280-1298).
ggaatcagctggaaaagta

SEQ ID NO: 638321 - DNA, 19 bp, Mus musculus
  siRNA target sequence for Trpm8 (NM_134252.2,1306-1324).
gagcgcaccagtcaagatt

SEQ ID NO: 638322 - DNA, 19 bp, Mus musculus
  siRNA target sequence for Trpm8 (NM_134252.2,1325-1343).
ccaactatggtggtaagat

SEQ ID NO: 638323 - DNA, 19 bp, Mus musculus
  siRNA target sequence for Trpm8 (NM_134252.2,1341-1359).
gatccccatcgtgtgtttt

SEQ ID NO: 638324 - DNA, 19 bp, Mus musculus
  siRNA target sequence for Trpm8 (NM_134252.2,1518-1536).
gctggtacgctttttacca

SEQ ID NO: 638325 - DNA, 19 bp, Mus musculus
  siRNA target sequence for Trpm8 (NM_134252.2,1686-1704).
caaagccttcagcactaat

SEQ ID NO: 638326 - DNA, 19 bp, Mus musculus
  siRNA target sequence for Trpm8 (NM_134252.2,1697-1715).
gcactaatgagcaagacaa

SEQ ID NO: 638327 - DNA, 19 bp, Mus musculus
  siRNA target sequence for Trpm8 (NM_134252.2,1830-1848).
catgttcacggctctcata

SEQ ID NO: 638328 - DNA, 19 bp, Mus musculus
  siRNA target sequence for Trpm8 (NM_134252.2,2126-2144).
cgctgcaagctctcttcat

SEQ ID NO: 638329 - DNA, 19 bp, Mus musculus
  siRNA target sequence for Trpm8 (NM_134252.2,2139-2157).
cttcatctgggccattctt

SEQ ID NO: 638330 - DNA, 19 bp, Mus musculus
  siRNA target sequence for Trpm8 (NM_134252.2,2251-2269).
gccaaagttaagaatgata

SEQ ID NO: 638331 - DNA, 19 bp, Mus musculus
  siRNA target sequence for Trpm8 (NM_134252.2,2292-2310).
ggaactggccaatgaatat

SEQ ID NO: 638332 - DNA, 19 bp, Mus musculus
  siRNA target sequence for Trpm8 (NM_134252.2,2317-2335).
cgagcagtggagttgttca

SEQ ID NO: 638333 - DNA, 19 bp, Mus musculus
  siRNA target sequence for Trpm8 (NM_134252.2,2337-2355).
cgagtgttacagcaatgat

SEQ ID NO: 638334 - DNA, 19 bp, Mus musculus
  siRNA target sequence for Trpm8 (NM_134252.2,2340-2358).
gtgttacagcaatgatgaa

SEQ ID NO: 638335 - DNA, 19 bp, Mus musculus
  siRNA target sequence for Trpm8 (NM_134252.2,2435-2453).
ctacagatcagcatttcat

SEQ ID NO: 638336 - DNA, 19 bp, Mus musculus
  siRNA target sequence for Trpm8 (NM_134252.2,2478-2496).
cctttctaagcaatggtat

SEQ ID NO: 638337 - DNA, 19 bp, Mus musculus
  siRNA target sequence for Trpm8 (NM_134252.2,2563-2581).
ggctgtggcctcgtatcat

SEQ ID NO: 638338 - DNA, 19 bp, Mus musculus
  siRNA target sequence for Trpm8 (NM_134252.2,2564-2582).
gctgtggcctcgtatcatt

SEQ ID NO: 638339 - DNA, 19 bp, Mus musculus
  siRNA target sequence for Trpm8 (NM_134252.2,2569-2587).
ggcctcgtatcatttagga

SEQ ID NO: 638340 - DNA, 19 bp, Mus musculus
  siRNA target sequence for Trpm8 (NM_134252.2,2570-2588).
gcctcgtatcatttaggaa

SEQ ID NO: 638341 - DNA, 19 bp, Mus musculus
  siRNA target sequence for Trpm8 (NM_134252.2,2574-2592).
cgtatcatttaggaagaaa

SEQ ID NO: 638342 - DNA, 19 bp, Mus musculus
  siRNA target sequence for Trpm8 (NM_134252.2,2666-2684).
ggaacgtggtcttctacat

SEQ ID NO: 638343 - DNA, 19 bp, Mus musculus
  siRNA target sequence for Trpm8 (NM_134252.2,2805-2823).
gtacatgaacggagtgaat

SEQ ID NO: 638344 - DNA, 19 bp, Mus musculus
  siRNA target sequence for Trpm8 (NM_134252.2,2808-2826).
catgaacggagtgaattat

SEQ ID NO: 638345 - DNA, 19 bp, Mus musculus
  siRNA target sequence for Trpm8 (NM_134252.2,2831-2849).
ccgacctatggaacgttat

SEQ ID NO: 638346 - DNA, 19 bp, Mus musculus
  siRNA target sequence for Trpm8 (NM_134252.2,2859-2877).
gggactcttctacttcata

SEQ ID NO: 638347 - DNA, 19 bp, Mus musculus
  siRNA target sequence for Trpm8 (NM_134252.2,2871-2889).
cttcatagcgggtattgta

SEQ ID NO: 638348 - DNA, 19 bp, Mus musculus
  siRNA target sequence for Trpm8 (NM_134252.2,2893-2911).
cggctccactcttctaata

SEQ ID NO: 638349 - DNA, 19 bp, Mus musculus
  siRNA target sequence for Trpm8 (NM_134252.2,2895-2913).
gctccactcttctaataaa

SEQ ID NO: 638350 - DNA, 19 bp, Mus musculus
  siRNA target sequence for Trpm8 (NM_134252.2,2896-2914).
ctccactcttctaataaaa

SEQ ID NO: 638351 - DNA, 19 bp, Mus musculus
  siRNA target sequence for Trpm8 (NM_134252.2,3032-3050).
ggatgctgatcgacgtttt

SEQ ID NO: 638352 - DNA, 19 bp, Mus musculus
  siRNA target sequence for Trpm8 (NM_134252.2,3037-3055).
ctgatcgacgttttcttct

SEQ ID NO: 638353 - DNA, 19 bp, Mus musculus
  siRNA target sequence for Trpm8 (NM_134252.2,3097-3115).
gccagacaggggatcctaa

SEQ ID NO: 638354 - DNA, 19 bp, Mus musculus
  siRNA target sequence for Trpm8 (NM_134252.2,3105-3123).
ggggatcctaaggcaaaat

SEQ ID NO: 638355 - DNA, 19 bp, Mus musculus
  siRNA target sequence for Trpm8 (NM_134252.2,3107-3125).
ggatcctaaggcaaaatga

SEQ ID NO: 638356 - DNA, 19 bp, Mus musculus
  siRNA target sequence for Trpm8 (NM_134252.2,3193-3211).
cccagtgacgtggatagta

SEQ ID NO: 638357 - DNA, 19 bp, Mus musculus
  siRNA target sequence for Trpm8 (NM_134252.2,3205-3223).
gatagtaccacatatgact

SEQ ID NO: 638358 - DNA, 19 bp, Mus musculus
  siRNA target sequence for Trpm8 (NM_134252.2,3319-3337).
ccgctggtgtgcatctaca

SEQ ID NO: 638359 - DNA, 19 bp, Mus musculus
  siRNA target sequence for Trpm8 (NM_134252.2,3320-3338).
cgctggtgtgcatctacat

SEQ ID NO: 638360 - DNA, 19 bp, Mus musculus
  siRNA target sequence for Trpm8 (NM_134252.2,3387-3405).
ctacacggtaggcattgta

SEQ ID NO: 638361 - DNA, 19 bp, Mus musculus
  siRNA target sequence for Trpm8 (NM_134252.2,3482-3500).
ccttccccttcgttgtctt

SEQ ID NO: 638362 - DNA, 19 bp, Mus musculus
  siRNA target sequence for Trpm8 (NM_134252.2,3678-3696).
gatgaggcatcggtttaga

SEQ ID NO: 638363 - DNA, 19 bp, Mus musculus
  siRNA target sequence for Trpm8 (NM_134252.2,3681-3699).
gaggcatcggtttagacaa

SEQ ID NO: 638364 - DNA, 19 bp, Mus musculus
  siRNA target sequence for Trpm8 (NM_134252.2,3711-3729).
gcttaacgacctcaaaagt

SEQ ID NO: 638365 - DNA, 19 bp, Mus musculus
  siRNA target sequence for Trpm8 (NM_134252.2,3730-3748).
cttctgaaagagattgcta

SEQ ID NO: 638366 - DNA, 19 bp, Mus musculus
  siRNA target sequence for Trpv2 (NM_011706.1,493-511).
gacgtccgatggagatgaa

SEQ ID NO: 638367 - DNA, 19 bp, Mus musculus
  siRNA target sequence for Trpv2 (NM_011706.1,495-513).
cgtccgatggagatgaaga

SEQ ID NO: 638368 - DNA, 19 bp, Mus musculus
  siRNA target sequence for Trpv2 (NM_011706.1,517-535).
cagtgctgaggtgaacaaa

SEQ ID NO: 638369 - DNA, 19 bp, Mus musculus
  siRNA target sequence for Trpv2 (NM_011706.1,595-613).
ccctcagattaaagtgaat

SEQ ID NO: 638370 - DNA, 19 bp, Mus musculus
  siRNA target sequence for Trpv2 (NM_011706.1,757-775).
cactgactcggcatacaca

SEQ ID NO: 638371 - DNA, 19 bp, Mus musculus
  siRNA target sequence for Trpv2 (NM_011706.1,903-921).
cccagtgcaccgatgagtt

SEQ ID NO: 638372 - DNA, 19 bp, Mus musculus
  siRNA target sequence for Trpv2 (NM_011706.1,941-959).
ctgcacatcgccatagaga

SEQ ID NO: 638373 - DNA, 19 bp, Mus musculus
  siRNA target sequence for Trpv2 (NM_011706.1,1233-1251).
cgctggtgatccacatgta

SEQ ID NO: 638374 - DNA, 19 bp, Mus musculus
  siRNA target sequence for Trpv2 (NM_011706.1,1347-1365).
ccaaggaaggtaaaattga

SEQ ID NO: 638375 - DNA, 19 bp, Mus musculus
  siRNA target sequence for Trpv2 (NM_011706.1,1412-1430).
cccctttcccgaaagttca

SEQ ID NO: 638376 - DNA, 19 bp, Mus musculus
  siRNA target sequence for Trpv2 (NM_011706.1,1481-1499).
gtggacagttgggaaaaga

SEQ ID NO: 638377 - DNA, 19 bp, Mus musculus
  siRNA target sequence for Trpv2 (NM_011706.1,1601-1619).
cggctcatcccaagattct

SEQ ID NO: 638378 - DNA, 19 bp, Mus musculus
  siRNA target sequence for Trpv2 (NM_011706.1,1635-1653).
gttacttggtctacatgat

SEQ ID NO: 638379 - DNA, 19 bp, Mus musculus
  siRNA target sequence for Trpv2 (NM_011706.1,1698-1716).
cagccattccctcatcaaa

SEQ ID NO: 638380 - DNA, 19 bp, Mus musculus
  siRNA target sequence for Trpv2 (NM_011706.1,1770-1788).
ggggtatttacctcttact

SEQ ID NO: 638381 - DNA, 19 bp, Mus musculus
  siRNA target sequence for Trpv2 (NM_011706.1,1836-1854).
cgttcatggacagttactt

SEQ ID NO: 638382 - DNA, 19 bp, Mus musculus
  siRNA target sequence for Trpv2 (NM_011706.1,1837-1855).
gttcatggacagttacttt

SEQ ID NO: 638383 - DNA, 19 bp, Mus musculus
  siRNA target sequence for Trpv2 (NM_011706.1,1907-1925).
cgcttcgtggagactgaat

SEQ ID NO: 638384 - DNA, 19 bp, Mus musculus
  siRNA target sequence for Trpv2 (NM_011706.1,1926-1944).
ggtacctccccctgttagt

SEQ ID NO: 638385 - DNA, 19 bp, Mus musculus
  siRNA target sequence for Trpv2 (NM_011706.1,1963-1981).
ctggctgaacctgctttat

SEQ ID NO: 638386 - DNA, 19 bp, Mus musculus
  siRNA target sequence for Trpv2 (NM_011706.1,1965-1983).
ggctgaacctgctttatta

SEQ ID NO: 638387 - DNA, 19 bp, Mus musculus
  siRNA target sequence for Trpv2 (NM_011706.1,2066-2084).
gtctacctagtcttccttt

SEQ ID NO: 638388 - DNA, 19 bp, Mus musculus
  siRNA target sequence for Trpv2 (NM_011706.1,2229-2247).
ccctagagctgttcaagtt

SEQ ID NO: 638389 - DNA, 19 bp, Mus musculus
  siRNA target sequence for Trpv2 (NM_011706.1,2514-2532).
gcaccaaaggggatggtat

SEQ ID NO: 638390 - DNA, 19 bp, Mus musculus
  siRNA target sequence for Trpv2 (NM_011706.1,2515-2533).
caccaaaggggatggtata

SEQ ID NO: 638391 - DNA, 19 bp, Mus musculus
  siRNA target sequence for Trpv2 (NM_011706.1,2518-2536).
caaaggggatggtatacct

SEQ ID NO: 638392 - DNA, 19 bp, Mus musculus
  siRNA target sequence for Trpv2 (NM_011706.1,2627-2645).
ggcatcactggttataaaa

SEQ ID NO: 638393 - DNA, 19 bp, Mus musculus
  siRNA target sequence for Trpv6 (NM_022413.2,247-265).
gagaaggggttaatactct

SEQ ID NO: 638394 - DNA, 19 bp, Mus musculus
  siRNA target sequence for Trpv6 (NM_022413.2,357-375).
ctgggaatcacctcttctt

SEQ ID NO: 638395 - DNA, 19 bp, Mus musculus
  siRNA target sequence for Trpv6 (NM_022413.2,359-377).
gggaatcacctcttcttct

SEQ ID NO: 638396 - DNA, 19 bp, Mus musculus
  siRNA target sequence for Trpv6 (NM_022413.2,360-378).
ggaatcacctcttcttcta

SEQ ID NO: 638397 - DNA, 19 bp, Mus musculus
  siRNA target sequence for Trpv6 (NM_022413.2,522-540).
ggaggctgccccagaacta

SEQ ID NO: 638398 - DNA, 19 bp, Mus musculus
  siRNA target sequence for Trpv6 (NM_022413.2,541-559).
gtctttgagcccatgactt

SEQ ID NO: 638399 - DNA, 19 bp, Mus musculus
  siRNA target sequence for Trpv6 (NM_022413.2,551-569).
ccatgacttcggagctata

SEQ ID NO: 638400 - DNA, 19 bp, Mus musculus
  siRNA target sequence for Trpv6 (NM_022413.2,552-570).
catgacttcggagctatat

SEQ ID NO: 638401 - DNA, 19 bp, Mus musculus
  siRNA target sequence for Trpv6 (NM_022413.2,555-573).
gacttcggagctatatgaa

SEQ ID NO: 638402 - DNA, 19 bp, Mus musculus
  siRNA target sequence for Trpv6 (NM_022413.2,691-709).
cctcacaacctcatttact

SEQ ID NO: 638403 - DNA, 19 bp, Mus musculus
  siRNA target sequence for Trpv6 (NM_022413.2,916-934).
ctggaacttgtgccaaata

SEQ ID NO: 638404 - DNA, 19 bp, Mus musculus
  siRNA target sequence for Trpv6 (NM_022413.2,1096-1114).
ctactggaacttattgtta

SEQ ID NO: 638405 - DNA, 19 bp, Mus musculus
  siRNA target sequence for Trpv6 (NM_022413.2,1099-1117).
ctggaacttattgttacta

SEQ ID NO: 638406 - DNA, 19 bp, Mus musculus
  siRNA target sequence for Trpv6 (NM_022413.2,1212-1230).
cgtgctgggtgccatctat

SEQ ID NO: 638407 - DNA, 19 bp, Mus musculus
  siRNA target sequence for Trpv6 (NM_022413.2,1223-1241).
ccatctatgtgctgtacat

SEQ ID NO: 638408 - DNA, 19 bp, Mus musculus
  siRNA target sequence for Trpv6 (NM_022413.2,1234-1252).
ctgtacatcatctgcttta

SEQ ID NO: 638409 - DNA, 19 bp, Mus musculus
  siRNA target sequence for Trpv6 (NM_022413.2,1339-1357).
cttcaggaggcctatgtga

SEQ ID NO: 638410 - DNA, 19 bp, Mus musculus
  siRNA target sequence for Trpv6 (NM_022413.2,1350-1368).
ctatgtgacccctaaggat

SEQ ID NO: 638411 - DNA, 19 bp, Mus musculus
  siRNA target sequence for Trpv6 (NM_022413.2,1772-1790).
ccgatgagctgggtcattt

SEQ ID NO: 638412 - DNA, 19 bp, Mus musculus
  siRNA target sequence for Trpv6 (NM_022413.2,1845-1863).
cgatggccctgccaactat

SEQ ID NO: 638413 - DNA, 19 bp, Mus musculus
  siRNA target sequence for Trpv6 (NM_022413.2,2016-2034).
ggccaccactgtgatgtta

SEQ ID NO: 638414 - DNA, 19 bp, Mus musculus
  siRNA target sequence for Trpv6 (NM_022413.2,2018-2036).
ccaccactgtgatgttaga

SEQ ID NO: 638415 - DNA, 19 bp, Mus musculus
  siRNA target sequence for Trpv6 (NM_022413.2,2073-2091).
gatatgtgggcgagagtat

SEQ ID NO: 638416 - DNA, 19 bp, Mus musculus
  siRNA target sequence for Trpv6 (NM_022413.2,2098-2116).
ggcgaccgctggttcttga

SEQ ID NO: 638417 - DNA, 19 bp, Mus musculus
  siRNA target sequence for Trpv6 (NM_022413.2,2254-2272).
gcctatctgtcctttccta

SEQ ID NO: 638418 - DNA, 19 bp, Mus musculus
  siRNA target sequence for Tslpr (NM_016715.2,859-877).
ggcttcgcagggtgaaaga

SEQ ID NO: 638419 - DNA, 19 bp, Mus musculus
  siRNA target sequence for Tslpr (NM_016715.2,860-878).
gcttcgcagggtgaaagat

SEQ ID NO: 638420 - DNA, 19 bp, Mus musculus
  siRNA target sequence for Ttrap (NM_019551.1,317-335).
caagtccgaggcctatgtt

SEQ ID NO: 638421 - DNA, 19 bp, Mus musculus
  siRNA target sequence for Ttrap (NM_019551.1,322-340).
ccgaggcctatgttgatct

SEQ ID NO: 638422 - DNA, 19 bp, Mus musculus
  siRNA target sequence for Ttrap (NM_019551.1,328-346).
cctatgttgatctaaccaa

SEQ ID NO: 638423 - DNA, 19 bp, Mus musculus
  siRNA target sequence for Ttrap (NM_019551.1,347-365).
cgaggatgcaaatgataca

SEQ ID NO: 638424 - DNA, 19 bp, Mus musculus
  siRNA target sequence for Ttrap (NM_019551.1,405-423).
gatagcagcactatttctt

SEQ ID NO: 638425 - DNA, 19 bp, Mus musculus
  siRNA target sequence for Ttrap (NM_019551.1,409-427).
gcagcactatttctttcat

SEQ ID NO: 638426 - DNA, 19 bp, Mus musculus
  siRNA target sequence for Ttrap (NM_019551.1,430-448).
cctggaatattgatggatt

SEQ ID NO: 638427 - DNA, 19 bp, Mus musculus
  siRNA target sequence for Ttrap (NM_019551.1,431-449).
ctggaatattgatggatta

SEQ ID NO: 638428 - DNA, 19 bp, Mus musculus
  siRNA target sequence for Ttrap (NM_019551.1,508-526).
gtccagatgtggtatttct

SEQ ID NO: 638429 - DNA, 19 bp, Mus musculus
  siRNA target sequence for Ttrap (NM_019551.1,511-529).
cagatgtggtatttctaca

SEQ ID NO: 638430 - DNA, 19 bp, Mus musculus
  siRNA target sequence for Ttrap (NM_019551.1,543-561).
ccatactgtgcctacctaa

SEQ ID NO: 638431 - DNA, 19 bp, Mus musculus
  siRNA target sequence for Ttrap (NM_019551.1,544-562).
catactgtgcctacctaaa

SEQ ID NO: 638432 - DNA, 19 bp, Mus musculus
  siRNA target sequence for Ttrap (NM_019551.1,566-584).
gagagcagccagttacaca

SEQ ID NO: 638433 - DNA, 19 bp, Mus musculus
  siRNA target sequence for Ttrap (NM_019551.1,583-601).
caattattacaggtaatga

SEQ ID NO: 638434 - DNA, 19 bp, Mus musculus
  siRNA target sequence for Ttrap (NM_019551.1,594-612).
ggtaatgaagaaggatatt

SEQ ID NO: 638435 - DNA, 19 bp, Mus musculus
  siRNA target sequence for Ttrap (NM_019551.1,758-776).
ggagagcaccagagaacat

SEQ ID NO: 638436 - DNA, 19 bp, Mus musculus
  siRNA target sequence for Ttrap (NM_019551.1,774-792).
cattctgcggaacgaataa

SEQ ID NO: 638437 - DNA, 19 bp, Mus musculus
  siRNA target sequence for Ttrap (NM_019551.1,778-796).
ctgcggaacgaataagaca

SEQ ID NO: 638438 - DNA, 19 bp, Mus musculus
  siRNA target sequence for Ttrap (NM_019551.1,780-798).
gcggaacgaataagacaat

SEQ ID NO: 638439 - DNA, 19 bp, Mus musculus
  siRNA target sequence for Ttrap (NM_019551.1,781-799).
cggaacgaataagacaatt

SEQ ID NO: 638440 - DNA, 19 bp, Mus musculus
  siRNA target sequence for Ttrap (NM_019551.1,782-800).
ggaacgaataagacaatta

SEQ ID NO: 638441 - DNA, 19 bp, Mus musculus
  siRNA target sequence for Ttrap (NM_019551.1,834-852).
gattcaaccacggttatat

SEQ ID NO: 638442 - DNA, 19 bp, Mus musculus
  siRNA target sequence for Ttrap (NM_019551.1,855-873).
gcaggagatacaaatttaa

SEQ ID NO: 638443 - DNA, 19 bp, Mus musculus
  siRNA target sequence for Ttrap (NM_019551.1,865-883).
caaatttaagagatcaaga

SEQ ID NO: 638444 - DNA, 19 bp, Mus musculus
  siRNA target sequence for Ttrap (NM_019551.1,901-919).
gtttacctgacaacgtttt

SEQ ID NO: 638445 - DNA, 19 bp, Mus musculus
  siRNA target sequence for Ttrap (NM_019551.1,959-977).
gtatacatgggatacgaaa

SEQ ID NO: 638446 - DNA, 19 bp, Mus musculus
  siRNA target sequence for Ttrap (NM_019551.1,967-985).
gggatacgaaagcaaataa

SEQ ID NO: 638447 - DNA, 19 bp, Mus musculus
  siRNA target sequence for Ttrap (NM_019551.1,1013-1031).
gcatcgttttgatcgaata

SEQ ID NO: 638448 - DNA, 19 bp, Mus musculus
  siRNA target sequence for Ttrap (NM_019551.1,1014-1032).
catcgttttgatcgaatat

SEQ ID NO: 638449 - DNA, 19 bp, Mus musculus
  siRNA target sequence for Ttrap (NM_019551.1,1017-1035).
cgttttgatcgaatatttt

SEQ ID NO: 638450 - DNA, 19 bp, Mus musculus
  siRNA target sequence for Ttrap (NM_019551.1,1018-1036).
gttttgatcgaatattttt

SEQ ID NO: 638451 - DNA, 19 bp, Mus musculus
  siRNA target sequence for Ttrap (NM_019551.1,1042-1060).
cagaagaggggcaccttat

SEQ ID NO: 638452 - DNA, 19 bp, Mus musculus
  siRNA target sequence for Ttrap (NM_019551.1,1052-1070).
gcaccttattcctcaaagt

SEQ ID NO: 638453 - DNA, 19 bp, Mus musculus
  siRNA target sequence for Ttrap (NM_019551.1,1053-1071).
caccttattcctcaaagtt

SEQ ID NO: 638454 - DNA, 19 bp, Mus musculus
  siRNA target sequence for Ttrap (NM_019551.1,1055-1073).
ccttattcctcaaagttta

SEQ ID NO: 638455 - DNA, 19 bp, Mus musculus
  siRNA target sequence for Ttrap (NM_019551.1,1074-1092).
gaccttgttgggttggaaa

SEQ ID NO: 638456 - DNA, 19 bp, Mus musculus
  siRNA target sequence for Ttrap (NM_019551.1,1076-1094).
ccttgttgggttggaaaaa

SEQ ID NO: 638457 - DNA, 19 bp, Mus musculus
  siRNA target sequence for Ttrap (NM_019551.1,1136-1154).
gtgcaccttgaatgtagta

SEQ ID NO: 638458 - DNA, 19 bp, Mus musculus
  siRNA target sequence for Unc5a (NM_153131.1,378-396).
gccggaggacgtgtacatt

SEQ ID NO: 638459 - DNA, 19 bp, Mus musculus
  siRNA target sequence for Unc5a (NM_153131.1,380-398).
cggaggacgtgtacattgt

SEQ ID NO: 638460 - DNA, 19 bp, Mus musculus
  siRNA target sequence for Unc5a (NM_153131.1,538-556).
gaggtccggatcaacgtat

SEQ ID NO: 638461 - DNA, 19 bp, Mus musculus
  siRNA target sequence for Unc5a (NM_153131.1,541-559).
gtccggatcaacgtatcaa

SEQ ID NO: 638462 - DNA, 19 bp, Mus musculus
  siRNA target sequence for Unc5a (NM_153131.1,560-578).
ggcagcaggtcgagaaagt

SEQ ID NO: 638463 - DNA, 19 bp, Mus musculus
  siRNA target sequence for Unc5a (NM_153131.1,562-580).
cagcaggtcgagaaagtgt

SEQ ID NO: 638464 - DNA, 19 bp, Mus musculus
  siRNA target sequence for Unc5a (NM_153131.1,564-582).
gcaggtcgagaaagtgttt

SEQ ID NO: 638465 - DNA, 19 bp, Mus musculus
  siRNA target sequence for Unc5a (NM_153131.1,809-827).
ccctcgaccccaatgtgta

SEQ ID NO: 638466 - DNA, 19 bp, Mus musculus
  siRNA target sequence for Unc5a (NM_153131.1,871-889).
gccgacactgccaactaca

SEQ ID NO: 638467 - DNA, 19 bp, Mus musculus
  siRNA target sequence for Unc5a (NM_153131.1,1461-1479).
gcccagcaaagcagacaat

SEQ ID NO: 638468 - DNA, 19 bp, Mus musculus
  siRNA target sequence for Unc5a (NM_153131.1,1568-1586).
ccaagttccagctctctaa

SEQ ID NO: 638469 - DNA, 19 bp, Mus musculus
  siRNA target sequence for Unc5a (NM_153131.1,1572-1590).
gttccagctctctaatggt

SEQ ID NO: 638470 - DNA, 19 bp, Mus musculus
  siRNA target sequence for Unc5a (NM_153131.1,1673-1691).
gcctctccacccaaaacta

SEQ ID NO: 638471 - DNA, 19 bp, Mus musculus
  siRNA target sequence for Unc5a (NM_153131.1,1805-1823).
ccatcccccgaggaaagat

SEQ ID NO: 638472 - DNA, 19 bp, Mus musculus
  siRNA target sequence for Unc5a (NM_153131.1,1817-1835).
gaaagatctacgagatcta

SEQ ID NO: 638473 - DNA, 19 bp, Mus musculus
  siRNA target sequence for Unc5a (NM_153131.1,1890-1908).
cctgctgagtcctatcgtt

SEQ ID NO: 638474 - DNA, 19 bp, Mus musculus
  siRNA target sequence for Unc5a (NM_153131.1,1891-1909).
ctgctgagtcctatcgtta

SEQ ID NO: 638475 - DNA, 19 bp, Mus musculus
  siRNA target sequence for Unc5a (NM_153131.1,1991-2009).
ggagcctgcgcctcaaaaa

SEQ ID NO: 638476 - DNA, 19 bp, Mus musculus
  siRNA target sequence for Unc5a (NM_153131.1,1994-2012).
gcctgcgcctcaaaaagca

SEQ ID NO: 638477 - DNA, 19 bp, Mus musculus
  siRNA target sequence for Unc5a (NM_153131.1,2060-2078).
cgccctctcatctctacta

SEQ ID NO: 638478 - DNA, 19 bp, Mus musculus
  siRNA target sequence for Unc5a (NM_153131.1,2207-2225).
gtacgtccctcgagtacaa

SEQ ID NO: 638479 - DNA, 19 bp, Mus musculus
  siRNA target sequence for Unc5a (NM_153131.1,2210-2228).
cgtccctcgagtacaacat

SEQ ID NO: 638480 - DNA, 19 bp, Mus musculus
  siRNA target sequence for Unc5a (NM_153131.1,2545-2563).
gatggacagagcttcaaca

SEQ ID NO: 638481 - DNA, 19 bp, Mus musculus
  siRNA target sequence for Unc5a (NM_153131.1,2548-2566).
ggacagagcttcaacatca

SEQ ID NO: 638482 - DNA, 19 bp, Mus musculus
  siRNA target sequence for Unc5a (NM_153131.1,2549-2567).
gacagagcttcaacatcaa

SEQ ID NO: 638483 - DNA, 19 bp, Mus musculus
  siRNA target sequence for Unc5a (NM_153131.1,2752-2770).
cacctggacagccatctta

SEQ ID NO: 638484 - DNA, 19 bp, Mus musculus
  siRNA target sequence for Unc5b (NM_029770.1,552-570).
cagctgccgtacttcctat

SEQ ID NO: 638485 - DNA, 19 bp, Mus musculus
  siRNA target sequence for Unc5b (NM_029770.1,579-597).
caggacgcctacatcgtaa

SEQ ID NO: 638486 - DNA, 19 bp, Mus musculus
  siRNA target sequence for Unc5b (NM_029770.1,582-600).
gacgcctacatcgtaaaga

SEQ ID NO: 638487 - DNA, 19 bp, Mus musculus
  siRNA target sequence for Unc5b (NM_029770.1,585-603).
gcctacatcgtaaagaaca

SEQ ID NO: 638488 - DNA, 19 bp, Mus musculus
  siRNA target sequence for Unc5b (NM_029770.1,586-604).
cctacatcgtaaagaacaa

SEQ ID NO: 638489 - DNA, 19 bp, Mus musculus
  siRNA target sequence for Unc5b (NM_029770.1,1002-1020).
cccgctcaggacactaact

SEQ ID NO: 638490 - DNA, 19 bp, Mus musculus
  siRNA target sequence for Unc5b (NM_029770.1,1003-1021).
ccgctcaggacactaactt

SEQ ID NO: 638491 - DNA, 19 bp, Mus musculus
  siRNA target sequence for Unc5b (NM_029770.1,1135-1153).
cagtcatcgtctatgtgaa

SEQ ID NO: 638492 - DNA, 19 bp, Mus musculus
  siRNA target sequence for Unc5b (NM_029770.1,1178-1196).
gtggtcaccctgttccaat

SEQ ID NO: 638493 - DNA, 19 bp, Mus musculus
  siRNA target sequence for Unc5b (NM_029770.1,1429-1447).
gcagcgggacgctacttga

SEQ ID NO: 638494 - DNA, 19 bp, Mus musculus
  siRNA target sequence for Unc5b (NM_029770.1,1440-1458).
ctacttgactccaagaact

SEQ ID NO: 638495 - DNA, 19 bp, Mus musculus
  siRNA target sequence for Unc5b (NM_029770.1,1470-1488).
ctgtgcgtgctgaatcaga

SEQ ID NO: 638496 - DNA, 19 bp, Mus musculus
  siRNA target sequence for Unc5b (NM_029770.1,1675-1693).
gcttccaccctgtcaactt

SEQ ID NO: 638497 - DNA, 19 bp, Mus musculus
  siRNA target sequence for Unc5b (NM_029770.1,1806-1824).
gacaagatccccatgacta

SEQ ID NO: 638498 - DNA, 19 bp, Mus musculus
  siRNA target sequence for Unc5b (NM_029770.1,1854-1872).
ctcaagatcaaggtctata

SEQ ID NO: 638499 - DNA, 19 bp, Mus musculus
  siRNA target sequence for Unc5b (NM_029770.1,1963-1981).
cccgggacacccatttcct

SEQ ID NO: 638500 - DNA, 19 bp, Mus musculus
  siRNA target sequence for Unc5b (NM_029770.1,2049-2067).
gtcagcggcacctttggtt

SEQ ID NO: 638501 - DNA, 19 bp, Mus musculus
  siRNA target sequence for Unc5b (NM_029770.1,2105-2123).
cagcctgttggtaccaaat

SEQ ID NO: 638502 - DNA, 19 bp, Mus musculus
  siRNA target sequence for Unc5b (NM_029770.1,2108-2126).
cctgttggtaccaaatgga

SEQ ID NO: 638503 - DNA, 19 bp, Mus musculus
  siRNA target sequence for Unc5b (NM_029770.1,2144-2162).
gttctatgacctgtatcta

SEQ ID NO: 638504 - DNA, 19 bp, Mus musculus
  siRNA target sequence for Unc5b (NM_029770.1,2147-2165).
ctatgacctgtatctacat

SEQ ID NO: 638505 - DNA, 19 bp, Mus musculus
  siRNA target sequence for Unc5b (NM_029770.1,2202-2220).
ggttcccagacagtattga

SEQ ID NO: 638506 - DNA, 19 bp, Mus musculus
  siRNA target sequence for Unc5b (NM_029770.1,2303-2321).
cgctggagactggatcttt

SEQ ID NO: 638507 - DNA, 19 bp, Mus musculus
  siRNA target sequence for Unc5b (NM_029770.1,2305-2323).
ctggagactggatctttca

SEQ ID NO: 638508 - DNA, 19 bp, Mus musculus
  siRNA target sequence for Unc5b (NM_029770.1,2708-2726).
ccactggaggagcaaacta

SEQ ID NO: 638509 - DNA, 19 bp, Mus musculus
  siRNA target sequence for Unc5b (NM_029770.1,2862-2880).
gaaggggaaggccagattt

SEQ ID NO: 638510 - DNA, 19 bp, Mus musculus
  siRNA target sequence for Unc5b (NM_029770.1,3079-3097).
ccatggaccggtacctaaa

SEQ ID NO: 638511 - DNA, 19 bp, Mus musculus
  siRNA target sequence for Unc5b (NM_029770.1,3084-3102).
gaccggtacctaaactact

SEQ ID NO: 638512 - DNA, 19 bp, Mus musculus
  siRNA target sequence for Unc5d (NM_153135.1,347-365).
cccatggctaggactcttt

SEQ ID NO: 638513 - DNA, 19 bp, Mus musculus
  siRNA target sequence for Unc5d (NM_153135.1,348-366).
ccatggctaggactctttt

SEQ ID NO: 638514 - DNA, 19 bp, Mus musculus
  siRNA target sequence for Unc5d (NM_153135.1,349-367).
catggctaggactcttttt

SEQ ID NO: 638515 - DNA, 19 bp, Mus musculus
  siRNA target sequence for Unc5d (NM_153135.1,397-415).
gagccgatggcagtgaaat

SEQ ID NO: 638516 - DNA, 19 bp, Mus musculus
  siRNA target sequence for Unc5d (NM_153135.1,401-419).
cgatggcagtgaaattctt

SEQ ID NO: 638517 - DNA, 19 bp, Mus musculus
  siRNA target sequence for Unc5d (NM_153135.1,445-463).
gaacgctgcctcatttcat

SEQ ID NO: 638518 - DNA, 19 bp, Mus musculus
  siRNA target sequence for Unc5d (NM_153135.1,507-525).
gcactcaggtgcaaagcaa

SEQ ID NO: 638519 - DNA, 19 bp, Mus musculus
  siRNA target sequence for Unc5d (NM_153135.1,626-644).
ccgggaagtgtttatcaat

SEQ ID NO: 638520 - DNA, 19 bp, Mus musculus
  siRNA target sequence for Unc5d (NM_153135.1,628-646).
gggaagtgtttatcaatgt

SEQ ID NO: 638521 - DNA, 19 bp, Mus musculus
  siRNA target sequence for Unc5d (NM_153135.1,717-735).
ctgggaacgtccaagagta

SEQ ID NO: 638522 - DNA, 19 bp, Mus musculus
  siRNA target sequence for Unc5d (NM_153135.1,745-763).
ctgtgcgcatagcctattt

SEQ ID NO: 638523 - DNA, 19 bp, Mus musculus
  siRNA target sequence for Unc5d (NM_153135.1,756-774).
gcctatttacggaaaaact

SEQ ID NO: 638524 - DNA, 19 bp, Mus musculus
  siRNA target sequence for Unc5d (NM_153135.1,757-775).
cctatttacggaaaaactt

SEQ ID NO: 638525 - DNA, 19 bp, Mus musculus
  siRNA target sequence for Unc5d (NM_153135.1,898-916).
ccgaacaggatgagaacat

SEQ ID NO: 638526 - DNA, 19 bp, Mus musculus
  siRNA target sequence for Unc5d (NM_153135.1,925-943).
gggctgaccataacttgat

SEQ ID NO: 638527 - DNA, 19 bp, Mus musculus
  siRNA target sequence for Unc5d (NM_153135.1,930-948).
gaccataacttgatcatca

SEQ ID NO: 638528 - DNA, 19 bp, Mus musculus
  siRNA target sequence for Unc5d (NM_153135.1,1073-1091).
gtggtcagcctgcaatgtt

SEQ ID NO: 638529 - DNA, 19 bp, Mus musculus
  siRNA target sequence for Unc5d (NM_153135.1,1133-1151).
caaccccgctcctctcaat

SEQ ID NO: 638530 - DNA, 19 bp, Mus musculus
  siRNA target sequence for Unc5d (NM_153135.1,1362-1380).
ggtctctgcattctagata

SEQ ID NO: 638531 - DNA, 19 bp, Mus musculus
  siRNA target sequence for Unc5d (NM_153135.1,1363-1381).
gtctctgcattctagataa

SEQ ID NO: 638532 - DNA, 19 bp, Mus musculus
  siRNA target sequence for Unc5d (NM_153135.1,1370-1388).
cattctagataaaaaacct

SEQ ID NO: 638533 - DNA, 19 bp, Mus musculus
  siRNA target sequence for Unc5d (NM_153135.1,1438-1456).
ccagcgacattgctttgta

SEQ ID NO: 638534 - DNA, 19 bp, Mus musculus
  siRNA target sequence for Unc5d (NM_153135.1,1535-1553).
ctacggagtggatgtcatt

SEQ ID NO: 638535 - DNA, 19 bp, Mus musculus
  siRNA target sequence for Unc5d (NM_153135.1,1853-1871).
ccgcggattcagtacaata

SEQ ID NO: 638536 - DNA, 19 bp, Mus musculus
  siRNA target sequence for Unc5d (NM_153135.1,1855-1873).
gcggattcagtacaataca

SEQ ID NO: 638537 - DNA, 19 bp, Mus musculus
  siRNA target sequence for Unc5d (NM_153135.1,1856-1874).
cggattcagtacaatacat

SEQ ID NO: 638538 - DNA, 19 bp, Mus musculus
  siRNA target sequence for Unc5d (NM_153135.1,1888-1906).
cgccgtacatccaaaatct

SEQ ID NO: 638539 - DNA, 19 bp, Mus musculus
  siRNA target sequence for Unc5d (NM_153135.1,1890-1908).
ccgtacatccaaaatctgt

SEQ ID NO: 638540 - DNA, 19 bp, Mus musculus
  siRNA target sequence for Unc5d (NM_153135.1,1934-1952).
gaggacaactggtgtcttt

SEQ ID NO: 638541 - DNA, 19 bp, Mus musculus
  siRNA target sequence for Unc5d (NM_153135.1,1968-1986).
cgcttagtaatgccaaata

SEQ ID NO: 638542 - DNA, 19 bp, Mus musculus
  siRNA target sequence for Unc5d (NM_153135.1,1970-1988).
cttagtaatgccaaataca

SEQ ID NO: 638543 - DNA, 19 bp, Mus musculus
  siRNA target sequence for Unc5d (NM_153135.1,1987-2005).
caggggtgagtctactcat

SEQ ID NO: 638544 - DNA, 19 bp, Mus musculus
  siRNA target sequence for Unc5d (NM_153135.1,2309-2327).
cgtgctgcttgatagcttt

SEQ ID NO: 638545 - DNA, 19 bp, Mus musculus
  siRNA target sequence for Unc5d (NM_153135.1,2397-2415).
ggctgcatgtcctgtaact

SEQ ID NO: 638546 - DNA, 19 bp, Mus musculus
  siRNA target sequence for Unc5d (NM_153135.1,2426-2444).
caacctgagagtttactgt

SEQ ID NO: 638547 - DNA, 19 bp, Mus musculus
  siRNA target sequence for Unc5d (NM_153135.1,2436-2454).
gtttactgtgtggacaata

SEQ ID NO: 638548 - DNA, 19 bp, Mus musculus
  siRNA target sequence for Unc5d (NM_153135.1,2793-2811).
cgagaaaccatcactttct

SEQ ID NO: 638549 - DNA, 19 bp, Mus musculus
  siRNA target sequence for Unc5d (NM_153135.1,2888-2906).
gatctgcgccacgtttgat

SEQ ID NO: 638550 - DNA, 19 bp, Mus musculus
  siRNA target sequence for Unc5d (NM_153135.1,2993-3011).
cagcccttccgctgtcatt

SEQ ID NO: 638551 - DNA, 19 bp, Mus musculus
  siRNA target sequence for Unc5d (NM_153135.1,2997-3015).
ccttccgctgtcattttga

SEQ ID NO: 638552 - DNA, 19 bp, Mus musculus
  siRNA target sequence for Unc5d (NM_153135.1,3091-3109).
cacacacgaaactatccaa

SEQ ID NO: 638553 - DNA, 19 bp, Mus musculus
  siRNA target sequence for Unc5d (NM_153135.1,3110-3128).
catcacagagccacagatt

SEQ ID NO: 638554 - DNA, 19 bp, Mus musculus
  siRNA target sequence for Unc5d (NM_153135.1,3115-3133).
cagagccacagattgatga

SEQ ID NO: 638555 - DNA, 19 bp, Mus musculus
  siRNA target sequence for Unc5d (NM_153135.1,3129-3147).
gatgatgctgacttcaact

SEQ ID NO: 638556 - DNA, 19 bp, Mus musculus
  siRNA target sequence for Unc5d (NM_153135.1,3146-3164).
ctacagcaggcaaaatgga

SEQ ID NO: 638557 - DNA, 19 bp, Mus musculus
  siRNA target sequence for V2r16 (NM_009491.1,199-217).
gacctactgacgactctta

SEQ ID NO: 638558 - DNA, 19 bp, Mus musculus
  siRNA target sequence for V2r16 (NM_009491.1,201-219).
cctactgacgactcttata

SEQ ID NO: 638559 - DNA, 19 bp, Mus musculus
  siRNA target sequence for V2r16 (NM_009491.1,202-220).
ctactgacgactcttataa

SEQ ID NO: 638560 - DNA, 19 bp, Mus musculus
  siRNA target sequence for V2r16 (NM_009491.1,205-223).
ctgacgactcttataatat

SEQ ID NO: 638561 - DNA, 19 bp, Mus musculus
  siRNA target sequence for V2r16 (NM_009491.1,207-225).
gacgactcttataatatct

SEQ ID NO: 638562 - DNA, 19 bp, Mus musculus
  siRNA target sequence for V2r16 (NM_009491.1,209-227).
cgactcttataatatctct

SEQ ID NO: 638563 - DNA, 19 bp, Mus musculus
  siRNA target sequence for Xpr1 (NM_011273.1,197-215).
ccaggcaccttcagttgaa

SEQ ID NO: 638564 - DNA, 19 bp, Mus musculus
  siRNA target sequence for Xpr1 (NM_011273.1,200-218).
ggcaccttcagttgaagtt

SEQ ID NO: 638565 - DNA, 19 bp, Mus musculus
  siRNA target sequence for Xpr1 (NM_011273.1,201-219).
gcaccttcagttgaagtta

SEQ ID NO: 638566 - DNA, 19 bp, Mus musculus
  siRNA target sequence for Xpr1 (NM_011273.1,227-245).
ggatacagttaagagatat

SEQ ID NO: 638567 - DNA, 19 bp, Mus musculus
  siRNA target sequence for Xpr1 (NM_011273.1,338-356).
gcgcaggtttgctacactt

SEQ ID NO: 638568 - DNA, 19 bp, Mus musculus
  siRNA target sequence for Xpr1 (NM_011273.1,344-362).
gtttgctacacttcagaat

SEQ ID NO: 638569 - DNA, 19 bp, Mus musculus
  siRNA target sequence for Xpr1 (NM_011273.1,453-471).
gaggagcgtgtccaacata

SEQ ID NO: 638570 - DNA, 19 bp, Mus musculus
  siRNA target sequence for Xpr1 (NM_011273.1,472-490).
ggaacattaaagaccttaa

SEQ ID NO: 638571 - DNA, 19 bp, Mus musculus
  siRNA target sequence for Xpr1 (NM_011273.1,521-539).
catcctgctgcagaactat

SEQ ID NO: 638572 - DNA, 19 bp, Mus musculus
  siRNA target sequence for Xpr1 (NM_011273.1,566-584).
gaaaatcctcaaaaagcat

SEQ ID NO: 638573 - DNA, 19 bp, Mus musculus
  siRNA target sequence for Xpr1 (NM_011273.1,585-603).
gacaagatcctggaaacat

SEQ ID NO: 638574 - DNA, 19 bp, Mus musculus
  siRNA target sequence for Xpr1 (NM_011273.1,619-637).
ggcgagtgattcatgtaga

SEQ ID NO: 638575 - DNA, 19 bp, Mus musculus
  siRNA target sequence for Xpr1 (NM_011273.1,638-656).
ggtggccccattttataca

SEQ ID NO: 638576 - DNA, 19 bp, Mus musculus
  siRNA target sequence for Xpr1 (NM_011273.1,694-712).
ctgtggtcaccaatgaact

SEQ ID NO: 638577 - DNA, 19 bp, Mus musculus
  siRNA target sequence for Xpr1 (NM_011273.1,836-854).
gaatattacccttgtgttt

SEQ ID NO: 638578 - DNA, 19 bp, Mus musculus
  siRNA target sequence for Xpr1 (NM_011273.1,892-910).
ggcccttgataagaatcta

SEQ ID NO: 638579 - DNA, 19 bp, Mus musculus
  siRNA target sequence for Xpr1 (NM_011273.1,893-911).
gcccttgataagaatctat

SEQ ID NO: 638580 - DNA, 19 bp, Mus musculus
  siRNA target sequence for Xpr1 (NM_011273.1,908-926).
ctatcggggtggctttctt

SEQ ID NO: 638581 - DNA, 19 bp, Mus musculus
  siRNA target sequence for Xpr1 (NM_011273.1,916-934).
gtggctttcttctgattga

SEQ ID NO: 638582 - DNA, 19 bp, Mus musculus
  siRNA target sequence for Xpr1 (NM_011273.1,950-968).
gggcatcaacacatatggt

SEQ ID NO: 638583 - DNA, 19 bp, Mus musculus
  siRNA target sequence for Xpr1 (NM_011273.1,951-969).
ggcatcaacacatatggtt

SEQ ID NO: 638584 - DNA, 19 bp, Mus musculus
  siRNA target sequence for Xpr1 (NM_011273.1,971-989).
gagacaagctggagtaaat

SEQ ID NO: 638585 - DNA, 19 bp, Mus musculus
  siRNA target sequence for Xpr1 (NM_011273.1,993-1011).
gtcctcatctttgaactta

SEQ ID NO: 638586 - DNA, 19 bp, Mus musculus
  siRNA target sequence for Xpr1 (NM_011273.1,995-1013).
cctcatctttgaacttaat

SEQ ID NO: 638587 - DNA, 19 bp, Mus musculus
  siRNA target sequence for Xpr1 (NM_011273.1,1179-1197).
cccaccaaaactttctact

SEQ ID NO: 638588 - DNA, 19 bp, Mus musculus
  siRNA target sequence for Xpr1 (NM_011273.1,1180-1198).
ccaccaaaactttctacta

SEQ ID NO: 638589 - DNA, 19 bp, Mus musculus
  siRNA target sequence for Xpr1 (NM_011273.1,1181-1199).
caccaaaactttctactat

SEQ ID NO: 638590 - DNA, 19 bp, Mus musculus
  siRNA target sequence for Xpr1 (NM_011273.1,1207-1225).
gattttggctgctcaaact

SEQ ID NO: 638591 - DNA, 19 bp, Mus musculus
  siRNA target sequence for Xpr1 (NM_011273.1,1243-1261).
ctgctcccttccataaggt

SEQ ID NO: 638592 - DNA, 19 bp, Mus musculus
  siRNA target sequence for Xpr1 (NM_011273.1,1320-1338).
gacctggaatatatgatct

SEQ ID NO: 638593 - DNA, 19 bp, Mus musculus
  siRNA target sequence for Xpr1 (NM_011273.1,1376-1394).
gggcctgttgccaaatgat

SEQ ID NO: 638594 - DNA, 19 bp, Mus musculus
  siRNA target sequence for Xpr1 (NM_011273.1,1432-1450).
gtgtgcgagccattgttca

SEQ ID NO: 638595 - DNA, 19 bp, Mus musculus
  siRNA target sequence for Xpr1 (NM_011273.1,1434-1452).
gtgcgagccattgttcaat

SEQ ID NO: 638596 - DNA, 19 bp, Mus musculus
  siRNA target sequence for Xpr1 (NM_011273.1,1436-1454).
gcgagccattgttcaatgt

SEQ ID NO: 638597 - DNA, 19 bp, Mus musculus
  siRNA target sequence for Xpr1 (NM_011273.1,1437-1455).
cgagccattgttcaatgta

SEQ ID NO: 638598 - DNA, 19 bp, Mus musculus
  siRNA target sequence for Xpr1 (NM_011273.1,1438-1456).
gagccattgttcaatgtat

SEQ ID NO: 638599 - DNA, 19 bp, Mus musculus
  siRNA target sequence for Xpr1 (NM_011273.1,1508-1526).
gagggcttttcctcatcta

SEQ ID NO: 638600 - DNA, 19 bp, Mus musculus
  siRNA target sequence for Xpr1 (NM_011273.1,1513-1531).
cttttcctcatctagtaaa

SEQ ID NO: 638601 - DNA, 19 bp, Mus musculus
  siRNA target sequence for Xpr1 (NM_011273.1,1552-1570).
ctttcttcaccgtgacatt

SEQ ID NO: 638602 - DNA, 19 bp, Mus musculus
  siRNA target sequence for Xpr1 (NM_011273.1,1609-1627).
ctgacaccgtggtgttctt

SEQ ID NO: 638603 - DNA, 19 bp, Mus musculus
  siRNA target sequence for Xpr1 (NM_011273.1,1611-1629).
gacaccgtggtgttctttt

SEQ ID NO: 638604 - DNA, 19 bp, Mus musculus
  siRNA target sequence for Xpr1 (NM_011273.1,1615-1633).
ccgtggtgttcttttacct

SEQ ID NO: 638605 - DNA, 19 bp, Mus musculus
  siRNA target sequence for Xpr1 (NM_011273.1,1691-1709).
ggactggggtctctttgat

SEQ ID NO: 638606 - DNA, 19 bp, Mus musculus
  siRNA target sequence for Xpr1 (NM_011273.1,1692-1710).
gactggggtctctttgata

SEQ ID NO: 638607 - DNA, 19 bp, Mus musculus
  siRNA target sequence for Xpr1 (NM_011273.1,1696-1714).
ggggtctctttgataagaa

SEQ ID NO: 638608 - DNA, 19 bp, Mus musculus
  siRNA target sequence for Xpr1 (NM_011273.1,1697-1715).
gggtctctttgataagaat

SEQ ID NO: 638609 - DNA, 19 bp, Mus musculus
  siRNA target sequence for Xpr1 (NM_011273.1,1712-1730).
gaatgcaggagaaaacact

SEQ ID NO: 638610 - DNA, 19 bp, Mus musculus
  siRNA target sequence for Xpr1 (NM_011273.1,1729-1747).
ctttcctccgggaagaaat

SEQ ID NO: 638611 - DNA, 19 bp, Mus musculus
  siRNA target sequence for Xpr1 (NM_011273.1,1734-1752).
ctccgggaagaaattgtat

SEQ ID NO: 638612 - DNA, 19 bp, Mus musculus
  siRNA target sequence for Xpr1 (NM_011273.1,1755-1773).
cctcaaaaggcctattact

SEQ ID NO: 638613 - DNA, 19 bp, Mus musculus
  siRNA target sequence for Xpr1 (NM_011273.1,1756-1774).
ctcaaaaggcctattacta

SEQ ID NO: 638614 - DNA, 19 bp, Mus musculus
  siRNA target sequence for Xpr1 (NM_011273.1,1758-1776).
caaaaggcctattactact

SEQ ID NO: 638615 - DNA, 19 bp, Mus musculus
  siRNA target sequence for Xpr1 (NM_011273.1,1777-1795).
gtgccatcatagaagatgt

SEQ ID NO: 638616 - DNA, 19 bp, Mus musculus
  siRNA target sequence for Xpr1 (NM_011273.1,1805-1823).
cttcgcttggactatccaa

SEQ ID NO: 638617 - DNA, 19 bp, Mus musculus
  siRNA target sequence for Xpr1 (NM_011273.1,1828-1846).
ctattactgctacgtttaa

SEQ ID NO: 638618 - DNA, 19 bp, Mus musculus
  siRNA target sequence for Xpr1 (NM_011273.1,1848-1866).
cctcatgttgggaacatca

SEQ ID NO: 638619 - DNA, 19 bp, Mus musculus
  siRNA target sequence for Xpr1 (NM_011273.1,1902-1920).
cgatttgtgtggaacttct

SEQ ID NO: 638620 - DNA, 19 bp, Mus musculus
  siRNA target sequence for Xpr1 (NM_011273.1,1934-1952).
cgagcatctaaataactgt

SEQ ID NO: 638621 - DNA, 19 bp, Mus musculus
  siRNA target sequence for Xpr1 (NM_011273.1,2066-2084).
ccggtcgtggaagtacaat

SEQ ID NO: 638622 - DNA, 19 bp, Mus musculus
  siRNA target sequence for Xpr1 (NM_011273.1,2068-2086).
ggtcgtggaagtacaatca

SEQ ID NO: 638623 - DNA, 19 bp, Mus musculus
  siRNA target sequence for Xpr1 (NM_011273.1,2110-2128).
gcctggcttcccaatccaa

SEQ ID NO: 638624 - DNA, 19 bp, Mus musculus
  siRNA target sequence for Xpr1 (NM_011273.1,2125-2143).
ccaaggctcgcgacactaa

SEQ ID NO: 638625 - DNA, 19 bp, Mus musculus
  siRNA target sequence for Xpr1 (NM_011273.1,2129-2147).
ggctcgcgacactaaggta

SEQ ID NO: 638626 - DNA, 19 bp, Mus musculus
  siRNA target sequence for Xpr1 (NM_011273.1,2130-2148).
gctcgcgacactaaggtat

SEQ ID NO: 638627 - DNA, 19 bp, Mus musculus
  siRNA target sequence for Xpr1 (NM_011273.1,2131-2149).
ctcgcgacactaaggtatt

SEQ ID NO: 638628 - DNA, 19 bp, Mus musculus
  siRNA target sequence for Xpr1 (NM_011273.1,2133-2151).
cgcgacactaaggtattga

SEQ ID NO: 638629 - DNA, 19 bp, Mus musculus
  siRNA target sequence for Xpr1 (NM_011273.1,2134-2152).
gcgacactaaggtattgat

SEQ ID NO: 638630 - DNA, 19 bp, Mus musculus
  siRNA target sequence for Xpr1 (NM_011273.1,2138-2156).
cactaaggtattgatagaa

SEQ ID NO: 638631 - DNA, 19 bp, Mus musculus
  siRNA target sequence for Xpr1 (NM_011273.1,2163-2181).
gatgacgaagctaacactt

SEQ ID NO: 638632 - DNA, 19 bp, Mus musculus
  siRNA target sequence for Zp1 (NM_009580.1,130-148).
ctcgagcctggctttgaat

SEQ ID NO: 638633 - DNA, 19 bp, Mus musculus
  siRNA target sequence for Zp1 (NM_009580.1,200-218).
caaaccagactgtccaatt

SEQ ID NO: 638634 - DNA, 19 bp, Mus musculus
  siRNA target sequence for Zp1 (NM_009580.1,244-262).
cggtttgaggtgaataact

SEQ ID NO: 638635 - DNA, 19 bp, Mus musculus
  siRNA target sequence for Zp1 (NM_009580.1,253-271).
gtgaataactgctctatct

SEQ ID NO: 638636 - DNA, 19 bp, Mus musculus
  siRNA target sequence for Zp1 (NM_009580.1,332-350).
gctgccacgttctagagaa

SEQ ID NO: 638637 - DNA, 19 bp, Mus musculus
  siRNA target sequence for Zp1 (NM_009580.1,366-384).
cctgagggtgttcatacaa

SEQ ID NO: 638638 - DNA, 19 bp, Mus musculus
  siRNA target sequence for Zp1 (NM_009580.1,395-413).
ccaatggccgtgtggatat

SEQ ID NO: 638639 - DNA, 19 bp, Mus musculus
  siRNA target sequence for Zp1 (NM_009580.1,396-414).
caatggccgtgtggatata

SEQ ID NO: 638640 - DNA, 19 bp, Mus musculus
  siRNA target sequence for Zp1 (NM_009580.1,757-775).
cacatcccatgcatggtaa

SEQ ID NO: 638641 - DNA, 19 bp, Mus musculus
  siRNA target sequence for Zp1 (NM_009580.1,813-831).
ctgctatgacagtaccaaa

SEQ ID NO: 638642 - DNA, 19 bp, Mus musculus
  siRNA target sequence for Zp1 (NM_009580.1,897-915).
ggtcatgtcacaagaaaca

SEQ ID NO: 638643 - DNA, 19 bp, Mus musculus
  siRNA target sequence for Zp1 (NM_009580.1,1053-1071).
cggcgaacaactcatctat

SEQ ID NO: 638644 - DNA, 19 bp, Mus musculus
  siRNA target sequence for Zp1 (NM_009580.1,1055-1073).
gcgaacaactcatctatga

SEQ ID NO: 638645 - DNA, 19 bp, Mus musculus
  siRNA target sequence for Zp1 (NM_009580.1,1150-1168).
catgttcgctgcatcttca

SEQ ID NO: 638646 - DNA, 19 bp, Mus musculus
  siRNA target sequence for Zp1 (NM_009580.1,1156-1174).
cgctgcatcttcaatgcta

SEQ ID NO: 638647 - DNA, 19 bp, Mus musculus
  siRNA target sequence for Zp1 (NM_009580.1,1186-1204).
cccatccaggcatctatct

SEQ ID NO: 638648 - DNA, 19 bp, Mus musculus
  siRNA target sequence for Zp1 (NM_009580.1,1263-1281).
gattgccacggataagact

SEQ ID NO: 638649 - DNA, 19 bp, Mus musculus
  siRNA target sequence for Zp1 (NM_009580.1,1267-1285).
gccacggataagactttca

SEQ ID NO: 638650 - DNA, 19 bp, Mus musculus
  siRNA target sequence for Zp1 (NM_009580.1,1329-1347).
ccgggaaccagtctatgta

SEQ ID NO: 638651 - DNA, 19 bp, Mus musculus
  siRNA target sequence for Zp1 (NM_009580.1,1469-1487).
ctttcaagggtgacaacta

SEQ ID NO: 638652 - DNA, 19 bp, Mus musculus
  siRNA target sequence for Zp1 (NM_009580.1,1482-1500).
caactacagaacacaagta

SEQ ID NO: 638653 - DNA, 19 bp, Mus musculus
  siRNA target sequence for Zp1 (NM_009580.1,1526-1544).
ccttctggtcccactatca

SEQ ID NO: 638654 - DNA, 19 bp, Mus musculus
  siRNA target sequence for Zp1 (NM_009580.1,1597-1615).
cttaggggacaggtctatt

SEQ ID NO: 638655 - DNA, 19 bp, Mus musculus
  siRNA target sequence for Zp1 (NM_009580.1,1601-1619).
ggggacaggtctatttctt

SEQ ID NO: 638656 - DNA, 19 bp, Mus musculus
  siRNA target sequence for Zp1 (NM_009580.1,1639-1657).
caccctctggggtctgata

SEQ ID NO: 638657 - DNA, 19 bp, Mus musculus
  siRNA target sequence for Zp1 (NM_009580.1,1642-1660).
cctctggggtctgatacat

SEQ ID NO: 638658 - DNA, 19 bp, Mus musculus
  siRNA target sequence for Zp1 (NM_009580.1,1908-1926).
ctgggaaggcatcagatat

SEQ ID NO: 638659 - DNA, 19 bp, Mus musculus
  siRNA target sequence for Zp3 (NM_011776.1,332-350).
ggtgcagatgacgaaagat

SEQ ID NO: 638660 - DNA, 19 bp, Mus musculus
  siRNA target sequence for Zp3 (NM_011776.1,770-788).
gagcttttcggcatttcaa

SEQ ID NO: 638661 - DNA, 19 bp, Mus musculus
  siRNA target sequence for Zp3 (NM_011776.1,772-790).
gcttttcggcatttcaagt

SEQ ID NO: 638662 - DNA, 19 bp, Mus musculus
  siRNA target sequence for Zp3 (NM_011776.1,816-834).
cagttcacggtggatgtat

SEQ ID NO: 638663 - DNA, 19 bp, Mus musculus
  siRNA target sequence for Zp3 (NM_011776.1,821-839).
cacggtggatgtattccat

SEQ ID NO: 638664 - DNA, 19 bp, Mus musculus
  siRNA target sequence for Zp3 (NM_011776.1,824-842).
ggtggatgtattccatttt

SEQ ID NO: 638665 - DNA, 19 bp, Mus musculus
  siRNA target sequence for Zp3 (NM_011776.1,853-871).
ccagaaatacgctctacat

SEQ ID NO: 638666 - DNA, 19 bp, Mus musculus
  siRNA target sequence for Zp3 (NM_011776.1,908-926).
ccccgataagctcaacaaa

SEQ ID NO: 638667 - DNA, 19 bp, Mus musculus
  siRNA target sequence for Zp3 (NM_011776.1,927-945).
gcctgttcgttcaacaaga

SEQ ID NO: 638668 - DNA, 19 bp, Mus musculus
  siRNA target sequence for Zp3 (NM_011776.1,975-993).
gatgctgacatctgtgatt

SEQ ID NO: 638669 - DNA, 19 bp, Mus musculus
  siRNA target sequence for Zp3 (NM_011776.1,1002-1020).
catggcaactgtagtaatt

SEQ ID NO: 638670 - DNA, 19 bp, Mus musculus
  siRNA target sequence for Zp3 (NM_011776.1,1056-1074).
cagtggtccaagctagttt

SEQ ID NO: 638671 - DNA, 19 bp, Mus musculus
  siRNA target sequence for Zp3 (NM_011776.1,1058-1076).
gtggtccaagctagtttct

SEQ ID NO: 638672 - DNA, 19 bp, Mus musculus
  siRNA target sequence for Zp3 (NM_011776.1,1226-1244).
cctgaccctggcagctata

SEQ ID NO: 638673 - DNA, 19 bp, Mus musculus
  siRNA target sequence for Grb14 (NM_016719.1,288-306).
ctccgcggtgccatagaca

SEQ ID NO: 638674 - DNA, 19 bp, Mus musculus
  siRNA target sequence for Grb14 (NM_016719.1,298-316).
ccatagacaggagaaaaat

SEQ ID NO: 638675 - DNA, 19 bp, Mus musculus
  siRNA target sequence for Grb14 (NM_016719.1,410-428).
gtttcccagggccaattca

SEQ ID NO: 638676 - DNA, 19 bp, Mus musculus
  siRNA target sequence for Grb14 (NM_016719.1,497-515).
catcacagcccgagatgtt

SEQ ID NO: 638677 - DNA, 19 bp, Mus musculus
  siRNA target sequence for Grb14 (NM_016719.1,576-594).
cacctatctcacataggtt

SEQ ID NO: 638678 - DNA, 19 bp, Mus musculus
  siRNA target sequence for Grb14 (NM_016719.1,578-596).
cctatctcacataggttta

SEQ ID NO: 638679 - DNA, 19 bp, Mus musculus
  siRNA target sequence for Grb14 (NM_016719.1,614-632).
ccacgagctgccaactgaa

SEQ ID NO: 638680 - DNA, 19 bp, Mus musculus
  siRNA target sequence for Grb14 (NM_016719.1,649-667).
gagtggaagaagacaataa

SEQ ID NO: 638681 - DNA, 19 bp, Mus musculus
  siRNA target sequence for Grb14 (NM_016719.1,662-680).
caataagctgtatcttaga

SEQ ID NO: 638682 - DNA, 19 bp, Mus musculus
  siRNA target sequence for Grb14 (NM_016719.1,808-826).
ccagcacgtatcctgaaat

SEQ ID NO: 638683 - DNA, 19 bp, Mus musculus
  siRNA target sequence for Grb14 (NM_016719.1,811-829).
gcacgtatcctgaaatcca

SEQ ID NO: 638684 - DNA, 19 bp, Mus musculus
  siRNA target sequence for Grb14 (NM_016719.1,812-830).
cacgtatcctgaaatccat

SEQ ID NO: 638685 - DNA, 19 bp, Mus musculus
  siRNA target sequence for Grb14 (NM_016719.1,937-955).
cacggcatttgcagctttt

SEQ ID NO: 638686 - DNA, 19 bp, Mus musculus
  siRNA target sequence for Grb14 (NM_016719.1,965-983).
cagcactagtcacgtttat

SEQ ID NO: 638687 - DNA, 19 bp, Mus musculus
  siRNA target sequence for Grb14 (NM_016719.1,967-985).
gcactagtcacgtttatat

SEQ ID NO: 638688 - DNA, 19 bp, Mus musculus
  siRNA target sequence for Grb14 (NM_016719.1,1014-1032).
gcgccaactccctatggat

SEQ ID NO: 638689 - DNA, 19 bp, Mus musculus
  siRNA target sequence for Grb14 (NM_016719.1,1015-1033).
cgccaactccctatggatt

SEQ ID NO: 638690 - DNA, 19 bp, Mus musculus
  siRNA target sequence for Grb14 (NM_016719.1,1024-1042).
cctatggattctgcttaaa

SEQ ID NO: 638691 - DNA, 19 bp, Mus musculus
  siRNA target sequence for Grb14 (NM_016719.1,1143-1161).
ggcatgcagctgtatcaga

SEQ ID NO: 638692 - DNA, 19 bp, Mus musculus
  siRNA target sequence for Grb14 (NM_016719.1,1144-1162).
gcatgcagctgtatcagaa

SEQ ID NO: 638693 - DNA, 19 bp, Mus musculus
  siRNA target sequence for Grb14 (NM_016719.1,1154-1172).
gtatcagaattatatgcat

SEQ ID NO: 638694 - DNA, 19 bp, Mus musculus
  siRNA target sequence for Grb14 (NM_016719.1,1182-1200).
ggtagaagcgcctgcaatt

SEQ ID NO: 638695 - DNA, 19 bp, Mus musculus
  siRNA target sequence for Grb14 (NM_016719.1,1186-1204).
gaagcgcctgcaattctca

SEQ ID NO: 638696 - DNA, 19 bp, Mus musculus
  siRNA target sequence for Grb14 (NM_016719.1,1216-1234).
ccatgagaagcgtatcaga

SEQ ID NO: 638697 - DNA, 19 bp, Mus musculus
  siRNA target sequence for Grb14 (NM_016719.1,1523-1541).
gagtaaccccagaactttt

SEQ ID NO: 638698 - DNA, 19 bp, Mus musculus
  siRNA target sequence for Grb14 (NM_016719.1,1525-1543).
gtaaccccagaacttttgt

SEQ ID NO: 638699 - DNA, 19 bp, Mus musculus
  siRNA target sequence for Grb14 (NM_016719.1,1534-1552).
gaacttttgtactgtcaat

SEQ ID NO: 638700 - DNA, 19 bp, Mus musculus
  siRNA target sequence for Grb14 (NM_016719.1,1549-1567).
caatgagtcatggacaaaa

SEQ ID NO: 638701 - DNA, 19 bp, Mus musculus
  siRNA target sequence for Grb14 (NM_016719.1,1553-1571).
gagtcatggacaaaagata

SEQ ID NO: 638702 - DNA, 19 bp, Mus musculus
  siRNA target sequence for Grb14 (NM_016719.1,1568-1586).
gataaaacactatcaaatt

SEQ ID NO: 638703 - DNA, 19 bp, Mus musculus
  siRNA target sequence for Grb14 (NM_016719.1,1606-1624).
gtgagctgttccatactct

SEQ ID NO: 638704 - DNA, 19 bp, Mus musculus
  siRNA target sequence for Grb14 (NM_016719.1,1698-1716).
ccttgcaagctgaagcatt

SEQ ID NO: 638705 - DNA, 19 bp, Mus musculus
  siRNA target sequence for Grb14 (NM_016719.1,1699-1717).
cttgcaagctgaagcatta

SEQ ID NO: 638706 - DNA, 19 bp, Mus musculus
  siRNA target sequence for Akap2 (NM_009649.1,526-544).
gtgtccgtggcagaatgta

SEQ ID NO: 638707 - DNA, 19 bp, Mus musculus
  siRNA target sequence for Akap2 (NM_009649.1,528-546).
gtccgtggcagaatgtaaa

SEQ ID NO: 638708 - DNA, 19 bp, Mus musculus
  siRNA target sequence for Akap2 (NM_009649.1,534-552).
ggcagaatgtaaaagtgta

SEQ ID NO: 638709 - DNA, 19 bp, Mus musculus
  siRNA target sequence for Akap2 (NM_009649.1,563-581).
cctctaccccccattccaa

SEQ ID NO: 638710 - DNA, 19 bp, Mus musculus
  siRNA target sequence for Akap2 (NM_009649.1,600-618).
ctattcgccctcacacaat

SEQ ID NO: 638711 - DNA, 19 bp, Mus musculus
  siRNA target sequence for Akap2 (NM_009649.1,1142-1160).
ggccctccgaggagatgat

SEQ ID NO: 638712 - DNA, 19 bp, Mus musculus
  siRNA target sequence for Akap2 (NM_009649.1,1525-1543).
gtcactgagcagattgact

SEQ ID NO: 638713 - DNA, 19 bp, Mus musculus
  siRNA target sequence for Akap2 (NM_009649.1,1628-1646).
ctatcaagccttactacaa

SEQ ID NO: 638714 - DNA, 19 bp, Mus musculus
  siRNA target sequence for Akap2 (NM_009649.1,1749-1767).
gaaagctccctgtgtatct

SEQ ID NO: 638715 - DNA, 19 bp, Mus musculus
  siRNA target sequence for Akap2 (NM_009649.1,2180-2198).
gccgagaaggggtctctaa

SEQ ID NO: 638716 - DNA, 19 bp, Mus musculus
  siRNA target sequence for Akap2 (NM_009649.1,2182-2200).
cgagaaggggtctctaagt

SEQ ID NO: 638717 - DNA, 19 bp, Mus musculus
  siRNA target sequence for Akap2 (NM_009649.1,2185-2203).
gaaggggtctctaagtcat

SEQ ID NO: 638718 - DNA, 19 bp, Mus musculus
  siRNA target sequence for Akap2 (NM_009649.1,2188-2206).
ggggtctctaagtcattca

SEQ ID NO: 638719 - DNA, 19 bp, Mus musculus
  siRNA target sequence for Akap2 (NM_009649.1,2190-2208).
ggtctctaagtcattcagt

SEQ ID NO: 638720 - DNA, 19 bp, Mus musculus
  siRNA target sequence for Akap2 (NM_009649.1,2232-2250).
ctccacattgggagattct

SEQ ID NO: 638721 - DNA, 19 bp, Mus musculus
  siRNA target sequence for Akap2 (NM_009649.1,2457-2475).
ggtgtcctctcctgttcaa

SEQ ID NO: 638722 - DNA, 19 bp, Mus musculus
  siRNA target sequence for Akap2 (NM_009649.1,2567-2585).
ccagcggtccagtcaacat

SEQ ID NO: 638723 - DNA, 19 bp, Mus musculus
  siRNA target sequence for Akap2 (NM_009649.1,2608-2626).
gggtacttcagcaagtatt

SEQ ID NO: 638724 - DNA, 19 bp, Mus musculus
  siRNA target sequence for Akap2 (NM_009649.1,2610-2628).
gtacttcagcaagtattca

SEQ ID NO: 638725 - DNA, 19 bp, Mus musculus
  siRNA target sequence for Akap2 (NM_009649.1,2685-2703).
catggttgggcccttcaaa

SEQ ID NO: 638726 - DNA, 19 bp, Mus musculus
  siRNA target sequence for Rgs13 (NM_153171.2,192-210).
caggcatatctgttggatt

SEQ ID NO: 638727 - DNA, 19 bp, Mus musculus
  siRNA target sequence for Rgs13 (NM_153171.2,216-234).
gctatgcagagatgaatct

SEQ ID NO: 638728 - DNA, 19 bp, Mus musculus
  siRNA target sequence for Rgs13 (NM_153171.2,217-235).
ctatgcagagatgaatcta

SEQ ID NO: 638729 - DNA, 19 bp, Mus musculus
  siRNA target sequence for Rgs13 (NM_153171.2,233-251).
ctaagaggctcccttcaaa

SEQ ID NO: 638730 - DNA, 19 bp, Mus musculus
  siRNA target sequence for Rgs13 (NM_153171.2,308-326).
caaaatatggcccaatagt

SEQ ID NO: 638731 - DNA, 19 bp, Mus musculus
  siRNA target sequence for Rgs13 (NM_153171.2,377-395).
ggatggcatgtgaaaccta

SEQ ID NO: 638732 - DNA, 19 bp, Mus musculus
  siRNA target sequence for Rgs13 (NM_153171.2,382-400).
gcatgtgaaacctacaaga

SEQ ID NO: 638733 - DNA, 19 bp, Mus musculus
  siRNA target sequence for Rgs13 (NM_153171.2,422-440).
gaatttctagggcaaaaaa

SEQ ID NO: 638734 - DNA, 19 bp, Mus musculus
  siRNA target sequence for Rgs13 (NM_153171.2,470-488).
ctcctagagagattaacat

SEQ ID NO: 638735 - DNA, 19 bp, Mus musculus
  siRNA target sequence for Rgs13 (NM_153171.2,494-512).
gtacaacacgggaagctat

SEQ ID NO: 638736 - DNA, 19 bp, Mus musculus
  siRNA target sequence for Rgs13 (NM_153171.2,526-544).
cgtgaacccactcaaacat

SEQ ID NO: 638737 - DNA, 19 bp, Mus musculus
  siRNA target sequence for Rgs13 (NM_153171.2,588-606).
ggattcttaccccagattt

SEQ ID NO: 638738 - DNA, 19 bp, Mus musculus
  siRNA target sequence for Rgs18 (NM_022881.2,279-297).
caagcatcgaggccaaaat

SEQ ID NO: 638739 - DNA, 19 bp, Mus musculus
  siRNA target sequence for Rgs18 (NM_022881.2,308-326).
gaaaaaaggaatagactaa

SEQ ID NO: 638740 - DNA, 19 bp, Mus musculus
  siRNA target sequence for Rgs18 (NM_022881.2,361-379).
gactcaagccagtagatct

SEQ ID NO: 638741 - DNA, 19 bp, Mus musculus
  siRNA target sequence for Rgs18 (NM_022881.2,383-401).
ctcttggccaaagaaacaa

SEQ ID NO: 638742 - DNA, 19 bp, Mus musculus
  siRNA target sequence for Rgs18 (NM_022881.2,422-440).
gtgaaatgggctgaatcat

SEQ ID NO: 638743 - DNA, 19 bp, Mus musculus
  siRNA target sequence for Rgs18 (NM_022881.2,443-461).
gacaaattgctctctcata

SEQ ID NO: 638744 - DNA, 19 bp, Mus musculus
  siRNA target sequence for Rgs18 (NM_022881.2,464-482).
gatggagtggatgctttta

SEQ ID NO: 638745 - DNA, 19 bp, Mus musculus
  siRNA target sequence for Rgs18 (NM_022881.2,472-490).
ggatgcttttaccagattt

SEQ ID NO: 638746 - DNA, 19 bp, Mus musculus
  siRNA target sequence for Rgs18 (NM_022881.2,584-602).
gcaaaggcaatctatgaga

SEQ ID NO: 638747 - DNA, 19 bp, Mus musculus
  siRNA target sequence for Rgs18 (NM_022881.2,585-603).
caaaggcaatctatgagaa

SEQ ID NO: 638748 - DNA, 19 bp, Mus musculus
  siRNA target sequence for Rgs18 (NM_022881.2,590-608).
gcaatctatgagaaattca

SEQ ID NO: 638749 - DNA, 19 bp, Mus musculus
  siRNA target sequence for Rgs18 (NM_022881.2,685-703).
cactctccacagttttgat

SEQ ID NO: 638750 - DNA, 19 bp, Mus musculus
  siRNA target sequence for Rgs18 (NM_022881.2,730-748).
catggaacatgacagttat

SEQ ID NO: 638751 - DNA, 19 bp, Mus musculus
  siRNA target sequence for Rgs18 (NM_022881.2,733-751).
ggaacatgacagttataaa

SEQ ID NO: 638752 - DNA, 19 bp, Mus musculus
  siRNA target sequence for Rgs18 (NM_022881.2,767-785).
gagacctacttacatttga

SEQ ID NO: 638753 - DNA, 19 bp, Mus musculus
  siRNA target sequence for Rgs18 (NM_022881.2,769-787).
gacctacttacatttgata

SEQ ID NO: 638754 - DNA, 19 bp, Mus musculus
  siRNA target sequence for Rgs18 (NM_022881.2,819-837).
ggagacgatcacgatcatt

SEQ ID NO: 638755 - DNA, 19 bp, Mus musculus
  siRNA target sequence for Rgs18 (NM_022881.2,824-842).
cgatcacgatcatttactt

SEQ ID NO: 638756 - DNA, 19 bp, Mus musculus
  siRNA target sequence for Rgs18 (NM_022881.2,825-843).
gatcacgatcatttactta

SEQ ID NO: 638757 - DNA, 19 bp, Mus musculus
  siRNA target sequence for Rgs18 (NM_022881.2,828-846).
cacgatcatttacttacaa

SEQ ID NO: 638758 - DNA, 19 bp, Mus musculus
  siRNA target sequence for Rgs18 (NM_022881.2,834-852).
catttacttacaatgattt

SEQ ID NO: 638759 - DNA, 19 bp, Mus musculus
  siRNA target sequence for Rgs18 (NM_022881.2,867-885).
cagatgttgccatttggtt

SEQ ID NO: 638760 - DNA, 19 bp, Mus musculus
  siRNA target sequence for Rgs12 (NM_173402.1,319-337).
ggggcagccctgcagattt

SEQ ID NO: 638761 - DNA, 19 bp, Mus musculus
  siRNA target sequence for Rgs12 (NM_173402.1,366-384).
cttgccatcaacgaaatca

SEQ ID NO: 638762 - DNA, 19 bp, Mus musculus
  siRNA target sequence for Rgs12 (NM_173402.1,526-544).
gctggctgcggccaaaact

SEQ ID NO: 638763 - DNA, 19 bp, Mus musculus
  siRNA target sequence for Rgs12 (NM_173402.1,527-545).
ctggctgcggccaaaactt

SEQ ID NO: 638764 - DNA, 19 bp, Mus musculus
  siRNA target sequence for Rgs12 (NM_173402.1,529-547).
ggctgcggccaaaacttga

SEQ ID NO: 638765 - DNA, 19 bp, Mus musculus
  siRNA target sequence for Rgs12 (NM_173402.1,530-548).
gctgcggccaaaacttgat

SEQ ID NO: 638766 - DNA, 19 bp, Mus musculus
  siRNA target sequence for Rgs12 (NM_173402.1,531-549).
ctgcggccaaaacttgatt

SEQ ID NO: 638767 - DNA, 19 bp, Mus musculus
  siRNA target sequence for Rgs12 (NM_173402.1,533-551).
gcggccaaaacttgattct

SEQ ID NO: 638768 - DNA, 19 bp, Mus musculus
  siRNA target sequence for Rgs12 (NM_173402.1,534-552).
cggccaaaacttgattcta

SEQ ID NO: 638769 - DNA, 19 bp, Mus musculus
  siRNA target sequence for Rgs12 (NM_173402.1,535-553).
ggccaaaacttgattctaa

SEQ ID NO: 638770 - DNA, 19 bp, Mus musculus
  siRNA target sequence for Rgs12 (NM_173402.1,550-568).
ctaaggctttgggtataaa

SEQ ID NO: 638771 - DNA, 19 bp, Mus musculus
  siRNA target sequence for Rgs12 (NM_173402.1,604-622).
gtgggattttcaacatgat

SEQ ID NO: 638772 - DNA, 19 bp, Mus musculus
  siRNA target sequence for Rgs12 (NM_173402.1,762-780).
gaagacatatcaaaagtta

SEQ ID NO: 638773 - DNA, 19 bp, Mus musculus
  siRNA target sequence for Rgs12 (NM_173402.1,812-830).
ggacagtcacgatgacttt

SEQ ID NO: 638774 - DNA, 19 bp, Mus musculus
  siRNA target sequence for Rgs12 (NM_173402.1,831-849).
ggactagatgcgagtattt

SEQ ID NO: 638775 - DNA, 19 bp, Mus musculus
  siRNA target sequence for Rgs12 (NM_173402.1,832-850).
gactagatgcgagtatttt

SEQ ID NO: 638776 - DNA, 19 bp, Mus musculus
  siRNA target sequence for Rgs12 (NM_173402.1,834-852).
ctagatgcgagtattttaa

SEQ ID NO: 638777 - DNA, 19 bp, Mus musculus
  siRNA target sequence for Rgs12 (NM_173402.1,911-929).
cctggagcatgacagttta

SEQ ID NO: 638778 - DNA, 19 bp, Mus musculus
  siRNA target sequence for Rgs12 (NM_173402.1,1061-1079).
cgagaagctggcattcagt

SEQ ID NO: 638779 - DNA, 19 bp, Mus musculus
  siRNA target sequence for Rgs12 (NM_173402.1,1118-1136).
gaccatgcagaccaatgat

SEQ ID NO: 638780 - DNA, 19 bp, Mus musculus
  siRNA target sequence for Rgs12 (NM_173402.1,1174-1192).
ggacgtcctgccatgtgtt

SEQ ID NO: 638781 - DNA, 19 bp, Mus musculus
  siRNA target sequence for Rgs12 (NM_173402.1,1193-1211).
catggtggacccagactta

SEQ ID NO: 638782 - DNA, 19 bp, Mus musculus
  siRNA target sequence for Rgs12 (NM_173402.1,1279-1297).
cgagtggctgtttggaatt

SEQ ID NO: 638783 - DNA, 19 bp, Mus musculus
  siRNA target sequence for Rgs12 (NM_173402.1,1444-1462).
gcggcatcggcaatttcaa

SEQ ID NO: 638784 - DNA, 19 bp, Mus musculus
  siRNA target sequence for Rgs12 (NM_173402.1,1653-1671).
gacaggttctgggacttaa

SEQ ID NO: 638785 - DNA, 19 bp, Mus musculus
  siRNA target sequence for Rgs12 (NM_173402.1,1657-1675).
ggttctgggacttaacaaa

SEQ ID NO: 638786 - DNA, 19 bp, Mus musculus
  siRNA target sequence for Rgs12 (NM_173402.1,1997-2015).
cggaatgcagaaccttttt

SEQ ID NO: 638787 - DNA, 19 bp, Mus musculus
  siRNA target sequence for Rgs12 (NM_173402.1,2016-2034).
ggaccccatcgaaatgtta

SEQ ID NO: 638788 - DNA, 19 bp, Mus musculus
  siRNA target sequence for Rgs12 (NM_173402.1,2112-2130).
gctcgcaggtcctttggaa

SEQ ID NO: 638789 - DNA, 19 bp, Mus musculus
  siRNA target sequence for Rgs12 (NM_173402.1,2346-2364).
gttggtgttcgctacttct

SEQ ID NO: 638790 - DNA, 19 bp, Mus musculus
  siRNA target sequence for Rgs12 (NM_173402.1,2352-2370).
gttcgctacttctctgatt

SEQ ID NO: 638791 - DNA, 19 bp, Mus musculus
  siRNA target sequence for Rgs12 (NM_173402.1,2367-2385).
gattttctacgtaaggaat

SEQ ID NO: 638792 - DNA, 19 bp, Mus musculus
  siRNA target sequence for Rgs12 (NM_173402.1,2569-2587).
cccaccctgacatgttcaa

SEQ ID NO: 638793 - DNA, 19 bp, Mus musculus
  siRNA target sequence for Rgs12 (NM_173402.1,2629-2647).
gctacactcgctttctgaa

SEQ ID NO: 638794 - DNA, 19 bp, Mus musculus
  siRNA target sequence for Rgs12 (NM_173402.1,2766-2784).
gtgtccacaccaaaaaagt

SEQ ID NO: 638795 - DNA, 19 bp, Mus musculus
  siRNA target sequence for Rgs12 (NM_173402.1,2771-2789).
cacaccaaaaaagttaagt

SEQ ID NO: 638796 - DNA, 19 bp, Mus musculus
  siRNA target sequence for Rgs12 (NM_173402.1,2973-2991).
gagtcccaaggctctgtat

SEQ ID NO: 638797 - DNA, 19 bp, Mus musculus
  siRNA target sequence for Rgs12 (NM_173402.1,3031-3049).
cctcagcactcgagaaaga

SEQ ID NO: 638798 - DNA, 19 bp, Mus musculus
  siRNA target sequence for Rgs12 (NM_173402.1,3048-3066).
gataaggctgccaaacatt

SEQ ID NO: 638799 - DNA, 19 bp, Mus musculus
  siRNA target sequence for Rgs12 (NM_173402.1,3113-3131).
gtccgggttctccatcaaa

SEQ ID NO: 638800 - DNA, 19 bp, Mus musculus
  siRNA target sequence for Rgs12 (NM_173402.1,3250-3268).
gggacctacgcttggaaaa

SEQ ID NO: 638801 - DNA, 19 bp, Mus musculus
  siRNA target sequence for Rgs12 (NM_173402.1,3435-3453).
cttggtgcccctatctcaa

SEQ ID NO: 638802 - DNA, 19 bp, Mus musculus
  siRNA target sequence for Rgs12 (NM_173402.1,3528-3546).
ggtgctcctgtcaaacaaa

SEQ ID NO: 638803 - DNA, 19 bp, Mus musculus
  siRNA target sequence for Rgs12 (NM_173402.1,3531-3549).
gctcctgtcaaacaaaact

SEQ ID NO: 638804 - DNA, 19 bp, Mus musculus
  siRNA target sequence for Rgs12 (NM_173402.1,3607-3625).
gcaagtctaactctattaa

SEQ ID NO: 638805 - DNA, 19 bp, Mus musculus
  siRNA target sequence for Rgs12 (NM_173402.1,3741-3759).
gagttttttgagctcattt

SEQ ID NO: 638806 - DNA, 19 bp, Mus musculus
  siRNA target sequence for Rgs12 (NM_173402.1,3882-3900).
ccagtcaagggctatagca

SEQ ID NO: 638807 - DNA, 19 bp, Mus musculus
  siRNA target sequence for Rgs12 (NM_173402.1,3883-3901).
cagtcaagggctatagcaa

SEQ ID NO: 638808 - DNA, 19 bp, Mus musculus
  siRNA target sequence for Rgs14 (NM_016758.2,358-376).
cggggtctggcttacttca

SEQ ID NO: 638809 - DNA, 19 bp, Mus musculus
  siRNA target sequence for Rgs14 (NM_016758.2,401-419).
gcgcagagaacgtaacttt

SEQ ID NO: 638810 - DNA, 19 bp, Mus musculus
  siRNA target sequence for Rgs14 (NM_016758.2,476-494).
ctcaggaggcccacaacat

SEQ ID NO: 638811 - DNA, 19 bp, Mus musculus
  siRNA target sequence for Rgs14 (NM_016758.2,602-620).
cacagcagcttcagatctt

SEQ ID NO: 638812 - DNA, 19 bp, Mus musculus
  siRNA target sequence for Rgs14 (NM_016758.2,607-625).
cagcttcagatcttcaatt

SEQ ID NO: 638813 - DNA, 19 bp, Mus musculus
  siRNA target sequence for Rgs14 (NM_016758.2,791-809).
cgctgggcgtggaagagtt

SEQ ID NO: 638814 - DNA, 19 bp, Mus musculus
  siRNA target sequence for Rgs14 (NM_016758.2,850-868).
ctccgcaagtcctttcgta

SEQ ID NO: 638815 - DNA, 19 bp, Mus musculus
  siRNA target sequence for Rgs14 (NM_016758.2,952-970).
ggtttccttgcctttgtga

SEQ ID NO: 638816 - DNA, 19 bp, Mus musculus
  siRNA target sequence for Rgs14 (NM_016758.2,1041-1059).
gtattgctgcgtgtatcta

SEQ ID NO: 638817 - DNA, 19 bp, Mus musculus
  siRNA target sequence for Rgs14 (NM_016758.2,1341-1359).
gcccatcctggctaagcat

SEQ ID NO: 638818 - DNA, 19 bp, Mus musculus
  siRNA target sequence for Rgs14 (NM_016758.2,1466-1484).
ctcctccggatgcaaagat

SEQ ID NO: 638819 - DNA, 19 bp, Mus musculus
  siRNA target sequence for Rgs14 (NM_016758.2,1575-1593).
cagtttgctggtagaagat

SEQ ID NO: 638820 - DNA, 19 bp, Mus musculus
  siRNA target sequence for Rgs14 (NM_016758.2,1588-1606).
gaagatgccagtagttcta

SEQ ID NO: 638821 - DNA, 19 bp, Mus musculus
  siRNA target sequence for Rgs14 (NM_016758.2,1614-1632).
ccggcagacctgtgacatt

SEQ ID NO: 638822 - DNA, 19 bp, Mus musculus
  siRNA target sequence for Rgs14 (NM_016758.2,1680-1698).
cgatcagagaggacttctt

SEQ ID NO: 638823 - DNA, 19 bp, Mus musculus
  siRNA target sequence for Tiam1 (NM_009384.1,515-533).
cgcagaaagccaaaatgta

SEQ ID NO: 638824 - DNA, 19 bp, Mus musculus
  siRNA target sequence for Tiam1 (NM_009384.1,542-560).
gttttatggagaaaagcat

SEQ ID NO: 638825 - DNA, 19 bp, Mus musculus
  siRNA target sequence for Tiam1 (NM_009384.1,773-791).
ctgggtggaccgagtagat

SEQ ID NO: 638826 - DNA, 19 bp, Mus musculus
  siRNA target sequence for Tiam1 (NM_009384.1,775-793).
gggtggaccgagtagatat

SEQ ID NO: 638827 - DNA, 19 bp, Mus musculus
  siRNA target sequence for Tiam1 (NM_009384.1,807-825).
gtatcttacaccgattctt

SEQ ID NO: 638828 - DNA, 19 bp, Mus musculus
  siRNA target sequence for Tiam1 (NM_009384.1,947-965).
gaggcagtgtccctataca

SEQ ID NO: 638829 - DNA, 19 bp, Mus musculus
  siRNA target sequence for Tiam1 (NM_009384.1,953-971).
gtgtccctatacatccaat

SEQ ID NO: 638830 - DNA, 19 bp, Mus musculus
  siRNA target sequence for Tiam1 (NM_009384.1,967-985).
ccaatgggcccacattcat

SEQ ID NO: 638831 - DNA, 19 bp, Mus musculus
  siRNA target sequence for Tiam1 (NM_009384.1,987-1005).
gagacagcgagctttaaga

SEQ ID NO: 638832 - DNA, 19 bp, Mus musculus
  siRNA target sequence for Tiam1 (NM_009384.1,1063-1081).
cagatctgagccaagaaca

SEQ ID NO: 638833 - DNA, 19 bp, Mus musculus
  siRNA target sequence for Tiam1 (NM_009384.1,1065-1083).
gatctgagccaagaacatt

SEQ ID NO: 638834 - DNA, 19 bp, Mus musculus
  siRNA target sequence for Tiam1 (NM_009384.1,1134-1152).
gaggctcgggggatggaaa

SEQ ID NO: 638835 - DNA, 19 bp, Mus musculus
  siRNA target sequence for Tiam1 (NM_009384.1,1138-1156).
ctcgggggatggaaacaga

SEQ ID NO: 638836 - DNA, 19 bp, Mus musculus
  siRNA target sequence for Tiam1 (NM_009384.1,1211-1229).
gtatgctcagaaaaactct

SEQ ID NO: 638837 - DNA, 19 bp, Mus musculus
  siRNA target sequence for Tiam1 (NM_009384.1,1251-1269).
ccgaggaacagattctcaa

SEQ ID NO: 638838 - DNA, 19 bp, Mus musculus
  siRNA target sequence for Tiam1 (NM_009384.1,1267-1285).
caagctactgccggaattt

SEQ ID NO: 638839 - DNA, 19 bp, Mus musculus
  siRNA target sequence for Tiam1 (NM_009384.1,1270-1288).
gctactgccggaatttggt

SEQ ID NO: 638840 - DNA, 19 bp, Mus musculus
  siRNA target sequence for Tiam1 (NM_009384.1,1280-1298).
gaatttggtgtcggatatt

SEQ ID NO: 638841 - DNA, 19 bp, Mus musculus
  siRNA target sequence for Tiam1 (NM_009384.1,1299-1317).
cccgatcttgcaaagcata

SEQ ID NO: 638842 - DNA, 19 bp, Mus musculus
  siRNA target sequence for Tiam1 (NM_009384.1,1300-1318).
ccgatcttgcaaagcataa

SEQ ID NO: 638843 - DNA, 19 bp, Mus musculus
  siRNA target sequence for Tiam1 (NM_009384.1,1341-1359).
gagactcctccgtacagta

SEQ ID NO: 638844 - DNA, 19 bp, Mus musculus
  siRNA target sequence for Tiam1 (NM_009384.1,1343-1361).
gactcctccgtacagtaat

SEQ ID NO: 638845 - DNA, 19 bp, Mus musculus
  siRNA target sequence for Tiam1 (NM_009384.1,1348-1366).
ctccgtacagtaattacaa

SEQ ID NO: 638846 - DNA, 19 bp, Mus musculus
  siRNA target sequence for Tiam1 (NM_009384.1,1350-1368).
ccgtacagtaattacaaca

SEQ ID NO: 638847 - DNA, 19 bp, Mus musculus
  siRNA target sequence for Tiam1 (NM_009384.1,1442-1460).
gcaaggcagaagagcaaaa

SEQ ID NO: 638848 - DNA, 19 bp, Mus musculus
  siRNA target sequence for Tiam1 (NM_009384.1,1463-1481).
cacccaggatgttaacaca

SEQ ID NO: 638849 - DNA, 19 bp, Mus musculus
  siRNA target sequence for Tiam1 (NM_009384.1,1541-1559).
cttgtccaggagatccaat

SEQ ID NO: 638850 - DNA, 19 bp, Mus musculus
  siRNA target sequence for Tiam1 (NM_009384.1,1650-1668).
ggggtgtacgagaacttca

SEQ ID NO: 638851 - DNA, 19 bp, Mus musculus
  siRNA target sequence for Tiam1 (NM_009384.1,1819-1837).
gagcgctggcagtcaagaa

SEQ ID NO: 638852 - DNA, 19 bp, Mus musculus
  siRNA target sequence for Tiam1 (NM_009384.1,1821-1839).
gcgctggcagtcaagaact

SEQ ID NO: 638853 - DNA, 19 bp, Mus musculus
  siRNA target sequence for Tiam1 (NM_009384.1,1822-1840).
cgctggcagtcaagaactt

SEQ ID NO: 638854 - DNA, 19 bp, Mus musculus
  siRNA target sequence for Tiam1 (NM_009384.1,1917-1935).
ggttgcacgctctttttct

SEQ ID NO: 638855 - DNA, 19 bp, Mus musculus
  siRNA target sequence for Tiam1 (NM_009384.1,1918-1936).
gttgcacgctctttttcta

SEQ ID NO: 638856 - DNA, 19 bp, Mus musculus
  siRNA target sequence for Tiam1 (NM_009384.1,1921-1939).
gcacgctctttttctatga

SEQ ID NO: 638857 - DNA, 19 bp, Mus musculus
  siRNA target sequence for Tiam1 (NM_009384.1,2190-2208).
ctcctcaagtcggaaatca

SEQ ID NO: 638858 - DNA, 19 bp, Mus musculus
  siRNA target sequence for Tiam1 (NM_009384.1,2281-2299).
ccgactcgaagaagaagaa

SEQ ID NO: 638859 - DNA, 19 bp, Mus musculus
  siRNA target sequence for Tiam1 (NM_009384.1,2307-2325).
ctagaccagatcttcgttt

SEQ ID NO: 638860 - DNA, 19 bp, Mus musculus
  siRNA target sequence for Tiam1 (NM_009384.1,2477-2495).
ctccgtgtcatcttttcat

SEQ ID NO: 638861 - DNA, 19 bp, Mus musculus
  siRNA target sequence for Tiam1 (NM_009384.1,2570-2588).
gcgaaggagcaggttttct

SEQ ID NO: 638862 - DNA, 19 bp, Mus musculus
  siRNA target sequence for Tiam1 (NM_009384.1,2571-2589).
cgaaggagcaggttttctt

SEQ ID NO: 638863 - DNA, 19 bp, Mus musculus
  siRNA target sequence for Tiam1 (NM_009384.1,2663-2681).
gactgatgctgtaaagaga

SEQ ID NO: 638864 - DNA, 19 bp, Mus musculus
  siRNA target sequence for Tiam1 (NM_009384.1,2671-2689).
ctgtaaagagatctttaga

SEQ ID NO: 638865 - DNA, 19 bp, Mus musculus
  siRNA target sequence for Tiam1 (NM_009384.1,2680-2698).
gatctttagagggaatatt

SEQ ID NO: 638866 - DNA, 19 bp, Mus musculus
  siRNA target sequence for Tiam1 (NM_009384.1,2775-2793).
gacatttgggtccatgaat

SEQ ID NO: 638867 - DNA, 19 bp, Mus musculus
  siRNA target sequence for Tiam1 (NM_009384.1,2925-2943).
ctgcgcctgaaattcctaa

SEQ ID NO: 638868 - DNA, 19 bp, Mus musculus
  siRNA target sequence for Tiam1 (NM_009384.1,2973-2991).
cagcccgaggaggacattt

SEQ ID NO: 638869 - DNA, 19 bp, Mus musculus
  siRNA target sequence for Tiam1 (NM_009384.1,2993-3011).
cgagctgctttacaaagaa

SEQ ID NO: 638870 - DNA, 19 bp, Mus musculus
  siRNA target sequence for Tiam1 (NM_009384.1,3015-3033).
gaaatctgtccaaaagtca

SEQ ID NO: 638871 - DNA, 19 bp, Mus musculus
  siRNA target sequence for Tiam1 (NM_009384.1,3149-3167).
cgggttagcttccaagaaa

SEQ ID NO: 638872 - DNA, 19 bp, Mus musculus
  siRNA target sequence for Tiam1 (NM_009384.1,3232-3250).
ctatgctcaaagatttcct

SEQ ID NO: 638873 - DNA, 19 bp, Mus musculus
  siRNA target sequence for Tiam1 (NM_009384.1,3663-3681).
cgcacctatgtgaaagact

SEQ ID NO: 638874 - DNA, 19 bp, Mus musculus
  siRNA target sequence for Tiam1 (NM_009384.1,3740-3758).
ggatgagcttgatgtactt

SEQ ID NO: 638875 - DNA, 19 bp, Mus musculus
  siRNA target sequence for Tiam1 (NM_009384.1,3746-3764).
gcttgatgtactttttgga

SEQ ID NO: 638876 - DNA, 19 bp, Mus musculus
  siRNA target sequence for Tiam1 (NM_009384.1,3763-3781).
gaaatttaaccgaaatggt

SEQ ID NO: 638877 - DNA, 19 bp, Mus musculus
  siRNA target sequence for Tiam1 (NM_009384.1,3789-3807).
caagtcgagttccttaaga

SEQ ID NO: 638878 - DNA, 19 bp, Mus musculus
  siRNA target sequence for Tiam1 (NM_009384.1,3943-3961).
gtgcgagccacacaaaagt

SEQ ID NO: 638879 - DNA, 19 bp, Mus musculus
  siRNA target sequence for Tiam1 (NM_009384.1,4132-4150).
cggagagcgaggaacacta

SEQ ID NO: 638880 - DNA, 19 bp, Mus musculus
  siRNA target sequence for Tiam1 (NM_009384.1,4360-4378).
ggaaaaaggagccagaatt

SEQ ID NO: 638881 - DNA, 19 bp, Mus musculus
  siRNA target sequence for Tiam1 (NM_009384.1,4400-4418).
ggccgtggtccttgtatat

SEQ ID NO: 638882 - DNA, 19 bp, Mus musculus
  siRNA target sequence for Tiam1 (NM_009384.1,4402-4420).
ccgtggtccttgtatataa

SEQ ID NO: 638883 - DNA, 19 bp, Mus musculus
  siRNA target sequence for Tiam1 (NM_009384.1,4403-4421).
cgtggtccttgtatataaa

SEQ ID NO: 638884 - DNA, 19 bp, Mus musculus
  siRNA target sequence for Tiam1 (NM_009384.1,4453-4471).
gctctcacaggctgtcaat

SEQ ID NO: 638885 - DNA, 19 bp, Mus musculus
  siRNA target sequence for Tiam1 (NM_009384.1,4575-4593).
gaaattgtccacgtgaaat

SEQ ID NO: 638886 - DNA, 19 bp, Mus musculus
  siRNA target sequence for Tiam1 (NM_009384.1,4609-4627).
ggcccgagcgggttttcca

SEQ ID NO: 638887 - DNA, 19 bp, Mus musculus
  siRNA target sequence for Tiam1 (NM_009384.1,4681-4699).
cgatcctgcgagataaaca

SEQ ID NO: 638888 - DNA, 19 bp, Mus musculus
  siRNA target sequence for Tiam1 (NM_009384.1,4732-4750).
cgtcagcccagcagtatgt

SEQ ID NO: 638889 - DNA, 19 bp, Mus musculus
  siRNA target sequence for Tiam1 (NM_009384.1,4766-4784).
gagattgtgtgcgcttaaa

SEQ ID NO: 638890 - DNA, 19 bp, Mus musculus
  siRNA target sequence for Tiam1 (NM_009384.1,4857-4875).
gcccgaaacaggtttacca

SEQ ID NO: 638891 - DNA, 19 bp, Mus musculus
  siRNA target sequence for Tiam1 (NM_009384.1,4858-4876).
cccgaaacaggtttaccat

SEQ ID NO: 638892 - DNA, 19 bp, Mus musculus
  siRNA target sequence for Tiam1 (NM_009384.1,4951-4969).
gatgggtagaggaacagtt

SEQ ID NO: 638893 - DNA, 19 bp, Mus musculus
  siRNA target sequence for Tiam1 (NM_009384.1,5209-5227).
gtgcgagcgaggaagtcat

SEQ ID NO: 638894 - DNA, 19 bp, Mus musculus
  siRNA target sequence for Tiam1 (NM_009384.1,5211-5229).
gcgagcgaggaagtcattt

SEQ ID NO: 638895 - DNA, 19 bp, Mus musculus
  siRNA target sequence for Tiam1 (NM_009384.1,5230-5248).
gggtcaggcgcgaagactt

SEQ ID NO: 638896 - DNA, 19 bp, Mus musculus
  siRNA target sequence for Tiam1 (NM_009384.1,5231-5249).
ggtcaggcgcgaagacttt

SEQ ID NO: 638897 - DNA, 19 bp, Mus musculus
  siRNA target sequence for Traip (NM_011634.2,778-796).
gacaggttgaagaaggatt

SEQ ID NO: 638898 - DNA, 19 bp, Mus musculus
  siRNA target sequence for Traip (NM_011634.2,803-821).
cctctaggagcaagttgaa

SEQ ID NO: 638899 - DNA, 19 bp, Mus musculus
  siRNA target sequence for Traip (NM_011634.2,972-990).
ggtcagccgcctggttttt

SEQ ID NO: 638900 - DNA, 19 bp, Mus musculus
  siRNA target sequence for Traip (NM_011634.2,1037-1055).
cacccttcggtgatgagat

SEQ ID NO: 638901 - DNA, 19 bp, Mus musculus
  siRNA target sequence for Traip (NM_011634.2,1062-1080).
caataccacctttgatgta

SEQ ID NO: 638902 - DNA, 19 bp, Mus musculus
  siRNA target sequence for 2310014B11Rik (NM_027144.1,278-296).
gtggcacacagtctactat

SEQ ID NO: 638903 - DNA, 19 bp, Mus musculus
  siRNA target sequence for 2310014B11Rik (NM_027144.1,329-347).
ggcatggaagtattttgaa

SEQ ID NO: 638904 - DNA, 19 bp, Mus musculus
  siRNA target sequence for 2310014B11Rik (NM_027144.1,348-366).
ccgagagtcaccaacagat

SEQ ID NO: 638905 - DNA, 19 bp, Mus musculus
  siRNA target sequence for 2310014B11Rik (NM_027144.1,349-367).
cgagagtcaccaacagata

SEQ ID NO: 638906 - DNA, 19 bp, Mus musculus
  siRNA target sequence for 2310014B11Rik (NM_027144.1,352-370).
gagtcaccaacagataaga

SEQ ID NO: 638907 - DNA, 19 bp, Mus musculus
  siRNA target sequence for 2310014B11Rik (NM_027144.1,385-403).
cgcagttcatcgcatgatt

SEQ ID NO: 638908 - DNA, 19 bp, Mus musculus
  siRNA target sequence for 2310014B11Rik (NM_027144.1,386-404).
gcagttcatcgcatgattt

SEQ ID NO: 638909 - DNA, 19 bp, Mus musculus
  siRNA target sequence for 2310014B11Rik (NM_027144.1,429-447).
gaagacaaagtctagttca

SEQ ID NO: 638910 - DNA, 19 bp, Mus musculus
  siRNA target sequence for 2310014B11Rik (NM_027144.1,462-480).
cgagatctatggtcttgtt

SEQ ID NO: 638911 - DNA, 19 bp, Mus musculus
  siRNA target sequence for 2310014B11Rik (NM_027144.1,488-506).
gtgtgatcatccagaaaga

SEQ ID NO: 638912 - DNA, 19 bp, Mus musculus
  siRNA target sequence for 2310014B11Rik (NM_027144.1,545-563).
cggtcttcgtacaatctgt

SEQ ID NO: 638913 - DNA, 19 bp, Mus musculus
  siRNA target sequence for 2310014B11Rik (NM_027144.1,549-567).
cttcgtacaatctgtcaaa

SEQ ID NO: 638914 - DNA, 19 bp, Mus musculus
  siRNA target sequence for 2310014B11Rik (NM_027144.1,552-570).
cgtacaatctgtcaaagaa

SEQ ID NO: 638915 - DNA, 19 bp, Mus musculus
  siRNA target sequence for 2310014B11Rik (NM_027144.1,582-600).
catgcgtgctggagtacaa

SEQ ID NO: 638916 - DNA, 19 bp, Mus musculus
  siRNA target sequence for 2310014B11Rik (NM_027144.1,585-603).
gcgtgctggagtacaaaca

SEQ ID NO: 638917 - DNA, 19 bp, Mus musculus
  siRNA target sequence for 2310014B11Rik (NM_027144.1,636-654).
ggtgactcattcaaatcat

SEQ ID NO: 638918 - DNA, 19 bp, Mus musculus
  siRNA target sequence for 2310014B11Rik (NM_027144.1,773-791).
gacatatgtctcccattat

SEQ ID NO: 638919 - DNA, 19 bp, Mus musculus
  siRNA target sequence for 2310014B11Rik (NM_027144.1,809-827).
ctggagcagccgggaatat

SEQ ID NO: 638920 - DNA, 19 bp, Mus musculus
  siRNA target sequence for 2310014B11Rik (NM_027144.1,852-870).
cgtgggggaggaaaacaat

SEQ ID NO: 638921 - DNA, 19 bp, Mus musculus
  siRNA target sequence for 2310014B11Rik (NM_027144.1,1056-1074).
ggacggagctgtaattgca

SEQ ID NO: 638922 - DNA, 19 bp, Mus musculus
  siRNA target sequence for 2310014B11Rik (NM_027144.1,1192-1210).
gctgatagtcccaagagta

SEQ ID NO: 638923 - DNA, 19 bp, Mus musculus
  siRNA target sequence for 2310014B11Rik (NM_027144.1,1476-1494).
gctctgttatctctattca

SEQ ID NO: 638924 - DNA, 19 bp, Mus musculus
  siRNA target sequence for 2310014B11Rik (NM_027144.1,1486-1504).
ctctattcagacctgtata

SEQ ID NO: 638925 - DNA, 19 bp, Mus musculus
  siRNA target sequence for 2310014B11Rik (NM_027144.1,1608-1626).
cgtggatctagaaaagaga

SEQ ID NO: 638926 - DNA, 19 bp, Mus musculus
  siRNA target sequence for 2310014B11Rik (NM_027144.1,1609-1627).
gtggatctagaaaagagaa

SEQ ID NO: 638927 - DNA, 19 bp, Mus musculus
  siRNA target sequence for 2310014B11Rik (NM_027144.1,1654-1672).
catcgcctctacattcaga

SEQ ID NO: 638928 - DNA, 19 bp, Mus musculus
  siRNA target sequence for 2310014B11Rik (NM_027144.1,1658-1676).
gcctctacattcagacaat

SEQ ID NO: 638929 - DNA, 19 bp, Mus musculus
  siRNA target sequence for 2310014B11Rik (NM_027144.1,1713-1731).
ggaggatttccgacagaaa

SEQ ID NO: 638930 - DNA, 19 bp, Mus musculus
  siRNA target sequence for 2310014B11Rik (NM_027144.1,1754-1772).
ctgagagtgagctgactaa

SEQ ID NO: 638931 - DNA, 19 bp, Mus musculus
  siRNA target sequence for 2310014B11Rik (NM_027144.1,1758-1776).
gagtgagctgactaaactt

SEQ ID NO: 638932 - DNA, 19 bp, Mus musculus
  siRNA target sequence for 2310014B11Rik (NM_027144.1,1760-1778).
gtgagctgactaaacttga

SEQ ID NO: 638933 - DNA, 19 bp, Mus musculus
  siRNA target sequence for 2310014B11Rik (NM_027144.1,1829-1847).
cggaacagatcgttaccaa

SEQ ID NO: 638934 - DNA, 19 bp, Mus musculus
  siRNA target sequence for 2310014B11Rik (NM_027144.1,1831-1849).
gaacagatcgttaccaaaa

SEQ ID NO: 638935 - DNA, 19 bp, Mus musculus
  siRNA target sequence for 2310014B11Rik (NM_027144.1,1836-1854).
gatcgttaccaaaattgaa

SEQ ID NO: 638936 - DNA, 19 bp, Mus musculus
  siRNA target sequence for 2310014B11Rik (NM_027144.1,1839-1857).
cgttaccaaaattgaagaa

SEQ ID NO: 638937 - DNA, 19 bp, Mus musculus
  siRNA target sequence for 2310014B11Rik (NM_027144.1,1898-1916).
ccacaatgcagtatgtaat

SEQ ID NO: 638938 - DNA, 19 bp, Mus musculus
  siRNA target sequence for 2310014B11Rik (NM_027144.1,1899-1917).
cacaatgcagtatgtaatt

SEQ ID NO: 638939 - DNA, 19 bp, Mus musculus
  siRNA target sequence for 2310014B11Rik (NM_027144.1,1901-1919).
caatgcagtatgtaattct

SEQ ID NO: 638940 - DNA, 19 bp, Mus musculus
  siRNA target sequence for 2310014B11Rik (NM_027144.1,1908-1926).
gtatgtaattctcatgtat

SEQ ID NO: 638941 - DNA, 19 bp, Mus musculus
  siRNA target sequence for 2310014B11Rik (NM_027144.1,2026-2044).
gatagagagggcgaagaaa

SEQ ID NO: 638942 - DNA, 19 bp, Mus musculus
  siRNA target sequence for 2310014B11Rik (NM_027144.1,2100-2118).
ccacgacaacagtgcaatt

SEQ ID NO: 638943 - DNA, 19 bp, Mus musculus
  siRNA target sequence for 2310014B11Rik (NM_027144.1,2146-2164).
cgccacccgaagcacttat

SEQ ID NO: 638944 - DNA, 19 bp, Mus musculus
  siRNA target sequence for 2310014B11Rik (NM_027144.1,2149-2167).
cacccgaagcacttatcca

SEQ ID NO: 638945 - DNA, 19 bp, Mus musculus
  siRNA target sequence for 2310014B11Rik (NM_027144.1,2217-2235).
gagtggagtagccaatgaa

SEQ ID NO: 638946 - DNA, 19 bp, Mus musculus
  siRNA target sequence for 2310014B11Rik (NM_027144.1,2386-2404).
cgagtccccactactgttt

SEQ ID NO: 638947 - DNA, 19 bp, Mus musculus
  siRNA target sequence for 2310014B11Rik (NM_027144.1,2412-2430).
ccctcctcctctattagat

SEQ ID NO: 638948 - DNA, 19 bp, Mus musculus
  siRNA target sequence for 2310014B11Rik (NM_027144.1,2414-2432).
ctcctcctctattagatca

SEQ ID NO: 638949 - DNA, 19 bp, Mus musculus
  siRNA target sequence for 2310014B11Rik (NM_027144.1,2417-2435).
ctcctctattagatcaagt

SEQ ID NO: 638950 - DNA, 19 bp, Mus musculus
  siRNA target sequence for 2310014B11Rik (NM_027144.1,2638-2656).
caggaagtgattaatgaat

SEQ ID NO: 638951 - DNA, 19 bp, Mus musculus
  siRNA target sequence for 2310014B11Rik (NM_027144.1,2641-2659).
gaagtgattaatgaattgt

SEQ ID NO: 638952 - DNA, 19 bp, Mus musculus
  siRNA target sequence for 2310014B11Rik (NM_027144.1,2644-2662).
gtgattaatgaattgttct

SEQ ID NO: 638953 - DNA, 19 bp, Mus musculus
  siRNA target sequence for 2310014B11Rik (NM_027144.1,2684-2702).
ggacactgaaggttcttga

SEQ ID NO: 638954 - DNA, 19 bp, Mus musculus
  siRNA target sequence for 2310014B11Rik (NM_027144.1,2695-2713).
gttcttgaccaagtattct

SEQ ID NO: 638955 - DNA, 19 bp, Mus musculus
  siRNA target sequence for 2310014B11Rik (NM_027144.1,2736-2754).
gattctatcaccttcagaa

SEQ ID NO: 638956 - DNA, 19 bp, Mus musculus
  siRNA target sequence for 2310014B11Rik (NM_027144.1,2752-2770).
gaactacgcaagatttttt

SEQ ID NO: 638957 - DNA, 19 bp, Mus musculus
  siRNA target sequence for 2310014B11Rik (NM_027144.1,2755-2773).
ctacgcaagattttttcaa

SEQ ID NO: 638958 - DNA, 19 bp, Mus musculus
  siRNA target sequence for 2310014B11Rik (NM_027144.1,2758-2776).
cgcaagattttttcaaact

SEQ ID NO: 638959 - DNA, 19 bp, Mus musculus
  siRNA target sequence for 2310014B11Rik (NM_027144.1,2759-2777).
gcaagattttttcaaactt

SEQ ID NO: 638960 - DNA, 19 bp, Mus musculus
  siRNA target sequence for 2310014B11Rik (NM_027144.1,2778-2796).
ggaagatatccttcaactt

SEQ ID NO: 638961 - DNA, 19 bp, Mus musculus
  siRNA target sequence for 2310014B11Rik (NM_027144.1,2803-2821).
gggttgaatgagcaaatga

SEQ ID NO: 638962 - DNA, 19 bp, Mus musculus
  siRNA target sequence for 2310014B11Rik (NM_027144.1,2827-2845).
gtccgaaaaaggaatgaaa

SEQ ID NO: 638963 - DNA, 19 bp, Mus musculus
  siRNA target sequence for 2310014B11Rik (NM_027144.1,2970-2988).
gtctcgccagaaaaaggat

SEQ ID NO: 638964 - DNA, 19 bp, Mus musculus
  siRNA target sequence for 2310014B11Rik (NM_027144.1,3086-3104).
ctaagtacccgcttctttt

SEQ ID NO: 638965 - DNA, 19 bp, Mus musculus
  siRNA target sequence for 2310014B11Rik (NM_027144.1,3090-3108).
gtacccgcttcttttggat

SEQ ID NO: 638966 - DNA, 19 bp, Mus musculus
  siRNA target sequence for 2310014B11Rik (NM_027144.1,3095-3113).
cgcttcttttggataacat

SEQ ID NO: 638967 - DNA, 19 bp, Mus musculus
  siRNA target sequence for 2310014B11Rik (NM_027144.1,3106-3124).
gataacattgccaagtaca

SEQ ID NO: 638968 - DNA, 19 bp, Mus musculus
  siRNA target sequence for 2310014B11Rik (NM_027144.1,3168-3186).
ccattgtcgtcagatctta

SEQ ID NO: 638969 - DNA, 19 bp, Mus musculus
  siRNA target sequence for 2310014B11Rik (NM_027144.1,3169-3187).
cattgtcgtcagatcttaa

SEQ ID NO: 638970 - DNA, 19 bp, Mus musculus
  siRNA target sequence for 2310014B11Rik (NM_027144.1,3276-3294).
gtccgagtacccaaatgtt

SEQ ID NO: 638971 - DNA, 19 bp, Mus musculus
  siRNA target sequence for 2310014B11Rik (NM_027144.1,3297-3315).
cgagctcaggaatttggat

SEQ ID NO: 638972 - DNA, 19 bp, Mus musculus
  siRNA target sequence for 2310014B11Rik (NM_027144.1,3298-3316).
gagctcaggaatttggatt

SEQ ID NO: 638973 - DNA, 19 bp, Mus musculus
  siRNA target sequence for 2310014B11Rik (NM_027144.1,3357-3375).
gaaggtgaatagagataaa

SEQ ID NO: 638974 - DNA, 19 bp, Mus musculus
  siRNA target sequence for 2310014B11Rik (NM_027144.1,3370-3388).
gataaaagcatcgatcttt

SEQ ID NO: 638975 - DNA, 19 bp, Mus musculus
  siRNA target sequence for 2310014B11Rik (NM_027144.1,3377-3395).
gcatcgatctttatacact

SEQ ID NO: 638976 - DNA, 19 bp, Mus musculus
  siRNA target sequence for 2310014B11Rik (NM_027144.1,3452-3470).
ggtgccacagcaagattct

SEQ ID NO: 638977 - DNA, 19 bp, Mus musculus
  siRNA target sequence for 2310014B11Rik (NM_027144.1,3497-3515).
ccttcagccctgtcattaa

SEQ ID NO: 638978 - DNA, 19 bp, Mus musculus
  siRNA target sequence for 2310014B11Rik (NM_027144.1,3535-3553).
cggcaggtggcgacagata

SEQ ID NO: 638979 - DNA, 19 bp, Mus musculus
  siRNA target sequence for 2310014B11Rik (NM_027144.1,3538-3556).
caggtggcgacagataaca

SEQ ID NO: 638980 - DNA, 19 bp, Mus musculus
  siRNA target sequence for 2310014B11Rik (NM_027144.1,3544-3562).
gcgacagataacaaagctt

SEQ ID NO: 638981 - DNA, 19 bp, Mus musculus
  siRNA target sequence for 2310014B11Rik (NM_027144.1,3583-3601).
gataatggagcccaaattt

SEQ ID NO: 638982 - DNA, 19 bp, Mus musculus
  siRNA target sequence for 2310014B11Rik (NM_027144.1,3590-3608).
gagcccaaatttatgaatt

SEQ ID NO: 638983 - DNA, 19 bp, Mus musculus
  siRNA target sequence for 2310014B11Rik (NM_027144.1,3593-3611).
cccaaatttatgaattggt

SEQ ID NO: 638984 - DNA, 19 bp, Mus musculus
  siRNA target sequence for 2310014B11Rik (NM_027144.1,3613-3631).
gcacagacggtttctgaaa

SEQ ID NO: 638985 - DNA, 19 bp, Mus musculus
  siRNA target sequence for 2310014B11Rik (NM_027144.1,3673-3691).
gtgaaggagcagtctacaa

SEQ ID NO: 638986 - DNA, 19 bp, Mus musculus
  siRNA target sequence for 2310014B11Rik (NM_027144.1,3719-3737).
cttgcgaaggagacaatga

SEQ ID NO: 638987 - DNA, 19 bp, Mus musculus
  siRNA target sequence for 2310014B11Rik (NM_027144.1,3722-3740).
gcgaaggagacaatgatga

SEQ ID NO: 638988 - DNA, 19 bp, Mus musculus
  siRNA target sequence for 2310014B11Rik (NM_027144.1,3723-3741).
cgaaggagacaatgatgaa

SEQ ID NO: 638989 - DNA, 19 bp, Mus musculus
  siRNA target sequence for 2310014B11Rik (NM_027144.1,3765-3783).
ggagcaccatgatctttca

SEQ ID NO: 638990 - DNA, 19 bp, Mus musculus
  siRNA target sequence for 2310014B11Rik (NM_027144.1,3818-3836).
gattagaatctcccttaat

SEQ ID NO: 638991 - DNA, 19 bp, Mus musculus
  siRNA target sequence for 2310014B11Rik (NM_027144.1,3864-3882).
gaatacccctggcaaatca

SEQ ID NO: 638992 - DNA, 19 bp, Mus musculus
  siRNA target sequence for 2310014B11Rik (NM_027144.1,3876-3894).
caaatcagcggcagaacat

SEQ ID NO: 638993 - DNA, 19 bp, Mus musculus
  siRNA target sequence for 2310014B11Rik (NM_027144.1,3881-3899).
cagcggcagaacatctctt

SEQ ID NO: 638994 - DNA, 19 bp, Mus musculus
  siRNA target sequence for 2310014B11Rik (NM_027144.1,3884-3902).
cggcagaacatctctttgt

SEQ ID NO: 638995 - DNA, 19 bp, Mus musculus
  siRNA target sequence for 2310014B11Rik (NM_027144.1,3962-3980).
gcgggtatccagtcacaat

SEQ ID NO: 638996 - DNA, 19 bp, Mus musculus
  siRNA target sequence for 2310014B11Rik (NM_027144.1,4034-4052).
gaaatttgggcttgttgaa

SEQ ID NO: 638997 - DNA, 19 bp, Mus musculus
  siRNA target sequence for 2310014B11Rik (NM_027144.1,4075-4093).
ggtctcaccgagaagagta

SEQ ID NO: 638998 - DNA, 19 bp, Mus musculus
  siRNA target sequence for 2310014B11Rik (NM_027144.1,4159-4177).
ggcatccgggacttggaaa

SEQ ID NO: 638999 - DNA, 19 bp, Mus musculus
  siRNA target sequence for 2310014B11Rik (NM_027144.1,4164-4182).
ccgggacttggaaaatgtt

SEQ ID NO: 639000 - DNA, 19 bp, Mus musculus
  siRNA target sequence for 2310014B11Rik (NM_027144.1,4283-4301).
cacaggattcagtgatact

SEQ ID NO: 639001 - DNA, 19 bp, Mus musculus
  siRNA target sequence for 2310014B11Rik (NM_027144.1,4316-4334).
gccaggcaagtaacgtttt

SEQ ID NO: 639002 - DNA, 19 bp, Mus musculus
  siRNA target sequence for 2310014B11Rik (NM_027144.1,4317-4335).
ccaggcaagtaacgtttta

SEQ ID NO: 639003 - DNA, 19 bp, Mus musculus
  siRNA target sequence for 2310014B11Rik (NM_027144.1,4325-4343).
gtaacgttttagtaatgga

SEQ ID NO: 639004 - DNA, 19 bp, Mus musculus
  siRNA target sequence for 2310014B11Rik (NM_027144.1,4424-4442).
cccgtgaagcacatagtga

SEQ ID NO: 639005 - DNA, 19 bp, Mus musculus
  siRNA target sequence for 2310014B11Rik (NM_027144.1,4425-4443).
ccgtgaagcacatagtgat

SEQ ID NO: 639006 - DNA, 19 bp, Mus musculus
  siRNA target sequence for 2310014B11Rik (NM_027144.1,4429-4447).
gaagcacatagtgatgata

SEQ ID NO: 639007 - DNA, 19 bp, Mus musculus
  siRNA target sequence for 2310014B11Rik (NM_027144.1,4635-4653).
gcaacattcccctcagaat

SEQ ID NO: 639008 - DNA, 19 bp, Mus musculus
  siRNA target sequence for 2310014B11Rik (NM_027144.1,4676-4694).
caccattcaccccagaatt

SEQ ID NO: 639009 - DNA, 19 bp, Mus musculus
  siRNA target sequence for 2310014B11Rik (NM_027144.1,4723-4741).
gaggatacctgttttgaga

SEQ ID NO: 639010 - DNA, 19 bp, Mus musculus
  siRNA target sequence for 2310014B11Rik (NM_027144.1,4779-4797).
cctggagtacattcataaa

SEQ ID NO: 639011 - DNA, 19 bp, Mus musculus
  siRNA target sequence for 2310014B11Rik (NM_027144.1,4834-4852).
gaaagttacgctcttcttt

SEQ ID NO: 639012 - DNA, 19 bp, Mus musculus
  siRNA target sequence for 2310014B11Rik (NM_027144.1,4879-4897).
cccgacaagctctcagata

SEQ ID NO: 639013 - DNA, 19 bp, Mus musculus
  siRNA target sequence for 2310014B11Rik (NM_027144.1,4880-4898).
ccgacaagctctcagataa

SEQ ID NO: 639014 - DNA, 19 bp, Mus musculus
  siRNA target sequence for 2310014B11Rik (NM_027144.1,4882-4900).
gacaagctctcagataaaa

SEQ ID NO: 639015 - DNA, 19 bp, Mus musculus
  siRNA target sequence for 2310014B11Rik (NM_027144.1,4884-4902).
caagctctcagataaaagt

SEQ ID NO: 639016 - DNA, 19 bp, Mus musculus
  siRNA target sequence for 9630020G10Rik (NM_177137.2,661-679).
gcgatcgtgacaatcgttt

SEQ ID NO: 639017 - DNA, 19 bp, Mus musculus
  siRNA target sequence for 9630020G10Rik (NM_177137.2,676-694).
gtttcagcaatgagtacta

SEQ ID NO: 639018 - DNA, 19 bp, Mus musculus
  siRNA target sequence for 9630020G10Rik (NM_177137.2,680-698).
cagcaatgagtactatcat

SEQ ID NO: 639019 - DNA, 19 bp, Mus musculus
  siRNA target sequence for 9630020G10Rik (NM_177137.2,729-747).
ccagttccggtcagattat

SEQ ID NO: 639020 - DNA, 19 bp, Mus musculus
  siRNA target sequence for 9630020G10Rik (NM_177137.2,730-748).
cagttccggtcagattata

SEQ ID NO: 639021 - DNA, 19 bp, Mus musculus
  siRNA target sequence for 9630020G10Rik (NM_177137.2,762-780).
ccctatcactgactttgaa

SEQ ID NO: 639022 - DNA, 19 bp, Mus musculus
  siRNA target sequence for 9630020G10Rik (NM_177137.2,763-781).
cctatcactgactttgaat

SEQ ID NO: 639023 - DNA, 19 bp, Mus musculus
  siRNA target sequence for 9630020G10Rik (NM_177137.2,764-782).
ctatcactgactttgaata

SEQ ID NO: 639024 - DNA, 19 bp, Mus musculus
  siRNA target sequence for 9630020G10Rik (NM_177137.2,832-850).
gtgaaggcctgctttgaga

SEQ ID NO: 639025 - DNA, 19 bp, Mus musculus
  siRNA target sequence for Ahrr (NM_009644.1,98-116).
cgtctggagagtgtacata

SEQ ID NO: 639026 - DNA, 19 bp, Mus musculus
  siRNA target sequence for Ahrr (NM_009644.1,198-216).
ccgggaccgcctcaataca

SEQ ID NO: 639027 - DNA, 19 bp, Mus musculus
  siRNA target sequence for Ahrr (NM_009644.1,244-262).
ccattttcacctgatatca

SEQ ID NO: 639028 - DNA, 19 bp, Mus musculus
  siRNA target sequence for Ahrr (NM_009644.1,374-392).
cacctgaagaacactcata

SEQ ID NO: 639029 - DNA, 19 bp, Mus musculus
  siRNA target sequence for Ahrr (NM_009644.1,461-479).
gtgccgaagggatgatctt

SEQ ID NO: 639030 - DNA, 19 bp, Mus musculus
  siRNA target sequence for Ahrr (NM_009644.1,491-509).
caacaattgtggactatct

SEQ ID NO: 639031 - DNA, 19 bp, Mus musculus
  siRNA target sequence for Ahrr (NM_009644.1,501-519).
ggactatctgggctttcat

SEQ ID NO: 639032 - DNA, 19 bp, Mus musculus
  siRNA target sequence for Ahrr (NM_009644.1,640-658).
catgctgacacagacaata

SEQ ID NO: 639033 - DNA, 19 bp, Mus musculus
  siRNA target sequence for Ahrr (NM_009644.1,729-747).
gacacgctgcttcatttgt

SEQ ID NO: 639034 - DNA, 19 bp, Mus musculus
  siRNA target sequence for Ahrr (NM_009644.1,892-910).
ccagtcttgccttctgtaa

SEQ ID NO: 639035 - DNA, 19 bp, Mus musculus
  siRNA target sequence for Ahrr (NM_009644.1,984-1002).
ggcaaaagctgttacaagt

SEQ ID NO: 639036 - DNA, 19 bp, Mus musculus
  siRNA target sequence for Ahrr (NM_009644.1,994-1012).
gttacaagtctatgtgaat

SEQ ID NO: 639037 - DNA, 19 bp, Mus musculus
  siRNA target sequence for Ahrr (NM_009644.1,998-1016).
caagtctatgtgaatcaga

SEQ ID NO: 639038 - DNA, 19 bp, Mus musculus
  siRNA target sequence for Ahrr (NM_009644.1,1001-1019).
gtctatgtgaatcagaatt

SEQ ID NO: 639039 - DNA, 19 bp, Mus musculus
  siRNA target sequence for Ahrr (NM_009644.1,1021-1039).
catcccaaactcaattact

SEQ ID NO: 639040 - DNA, 19 bp, Mus musculus
  siRNA target sequence for Ahrr (NM_009644.1,1249-1267).
gagatgcacaagtacagtt

SEQ ID NO: 639041 - DNA, 19 bp, Mus musculus
  siRNA target sequence for Ahrr (NM_009644.1,1251-1269).
gatgcacaagtacagttat

SEQ ID NO: 639042 - DNA, 19 bp, Mus musculus
  siRNA target sequence for Ahrr (NM_009644.1,1349-1367).
ctcggcagcccagtaagaa

SEQ ID NO: 639043 - DNA, 19 bp, Mus musculus
  siRNA target sequence for Ahrr (NM_009644.1,1352-1370).
ggcagcccagtaagaatga

SEQ ID NO: 639044 - DNA, 19 bp, Mus musculus
  siRNA target sequence for Ahrr (NM_009644.1,1417-1435).
ggaagccagggcatgctta

SEQ ID NO: 639045 - DNA, 19 bp, Mus musculus
  siRNA target sequence for Ahrr (NM_009644.1,1440-1458).
cagcaacatggcttctttt

SEQ ID NO: 639046 - DNA, 19 bp, Mus musculus
  siRNA target sequence for Ahrr (NM_009644.1,1451-1469).
cttcttttagagattcact

SEQ ID NO: 639047 - DNA, 19 bp, Mus musculus
  siRNA target sequence for Ahrr (NM_009644.1,1508-1526).
gacccttgtcggatatcca

SEQ ID NO: 639048 - DNA, 19 bp, Mus musculus
  siRNA target sequence for Ahrr (NM_009644.1,1611-1629).
cacagctcggggattttct

SEQ ID NO: 639049 - DNA, 19 bp, Mus musculus
  siRNA target sequence for Ahrr (NM_009644.1,1696-1714).
ctggatgtgccaatcaaga

SEQ ID NO: 639050 - DNA, 19 bp, Mus musculus
  siRNA target sequence for Ahrr (NM_009644.1,1730-1748).
ggtcccaggatatagttga

SEQ ID NO: 639051 - DNA, 19 bp, Mus musculus
  siRNA target sequence for Ahrr (NM_009644.1,1731-1749).
gtcccaggatatagttgaa

SEQ ID NO: 639052 - DNA, 19 bp, Mus musculus
  siRNA target sequence for Ahrr (NM_009644.1,1744-1762).
gttgaagctagcacaacta

SEQ ID NO: 639053 - DNA, 19 bp, Mus musculus
  siRNA target sequence for Ahrr (NM_009644.1,1796-1814).
gaggacatctggttggttt

SEQ ID NO: 639054 - DNA, 19 bp, Mus musculus
  siRNA target sequence for Ahrr (NM_009644.1,1905-1923).
ctacagcagagatactgtt

SEQ ID NO: 639055 - DNA, 19 bp, Mus musculus
  siRNA target sequence for Ahrr (NM_009644.1,1934-1952).
gggagcatgctcctcttta

SEQ ID NO: 639056 - DNA, 19 bp, Mus musculus
  siRNA target sequence for Ahrr (NM_009644.1,1936-1954).
gagcatgctcctctttact

SEQ ID NO: 639057 - DNA, 19 bp, Mus musculus
  siRNA target sequence for Ahrr (NM_009644.1,2131-2149).
cctaagagtgcctctaaaa

SEQ ID NO: 639058 - DNA, 19 bp, Mus musculus
  siRNA target sequence for Ahrr (NM_009644.1,2168-2186).
gctctgatggaattttcct

SEQ ID NO: 639059 - DNA, 19 bp, Mus musculus
  siRNA target sequence for Arhgef1 (NM_008488.1,194-212).
gcgaactcagaagatcaaa

SEQ ID NO: 639060 - DNA, 19 bp, Mus musculus
  siRNA target sequence for Arhgef1 (NM_008488.1,195-213).
cgaactcagaagatcaaaa

SEQ ID NO: 639061 - DNA, 19 bp, Mus musculus
  siRNA target sequence for Arhgef1 (NM_008488.1,367-385).
ggccttccttgacttctat

SEQ ID NO: 639062 - DNA, 19 bp, Mus musculus
  siRNA target sequence for Arhgef1 (NM_008488.1,429-447).
ctcccagtgtcgcttttga

SEQ ID NO: 639063 - DNA, 19 bp, Mus musculus
  siRNA target sequence for Arhgef1 (NM_008488.1,456-474).
gtactcgacctgatctgat

SEQ ID NO: 639064 - DNA, 19 bp, Mus musculus
  siRNA target sequence for Arhgef1 (NM_008488.1,487-505).
ccagaggcggttcatacaa

SEQ ID NO: 639065 - DNA, 19 bp, Mus musculus
  siRNA target sequence for Arhgef1 (NM_008488.1,744-762).
ctgccatcagcctgtatat

SEQ ID NO: 639066 - DNA, 19 bp, Mus musculus
  siRNA target sequence for Arhgef1 (NM_008488.1,851-869).
gacgaacccccaaagacaa

SEQ ID NO: 639067 - DNA, 19 bp, Mus musculus
  siRNA target sequence for Arhgef1 (NM_008488.1,929-947).
ccagattgtcgacatctaa

SEQ ID NO: 639068 - DNA, 19 bp, Mus musculus
  siRNA target sequence for Arhgef1 (NM_008488.1,930-948).
cagattgtcgacatctaaa

SEQ ID NO: 639069 - DNA, 19 bp, Mus musculus
  siRNA target sequence for Arhgef1 (NM_008488.1,988-1006).
gggaggcctgggtatgtct

SEQ ID NO: 639070 - DNA, 19 bp, Mus musculus
  siRNA target sequence for Arhgef1 (NM_008488.1,1207-1225).
ccctgagcccggagatgat

SEQ ID NO: 639071 - DNA, 19 bp, Mus musculus
  siRNA target sequence for Arhgef1 (NM_008488.1,1448-1466).
gacgagctgcagaacatct

SEQ ID NO: 639072 - DNA, 19 bp, Mus musculus
  siRNA target sequence for Arhgef1 (NM_008488.1,2009-2027).
gacatcactaagaagaagt

SEQ ID NO: 639073 - DNA, 19 bp, Mus musculus
  siRNA target sequence for Arhgef1 (NM_008488.1,2240-2258).
gccactgatcacaaagctt

SEQ ID NO: 639074 - DNA, 19 bp, Mus musculus
  siRNA target sequence for Arhgef1 (NM_008488.1,2281-2299).
ccaggaggcccagatatat

SEQ ID NO: 639075 - DNA, 19 bp, Mus musculus
  siRNA target sequence for Arhgef1 (NM_008488.1,2687-2705).
caggagattgaggaaaact

SEQ ID NO: 639076 - DNA, 19 bp, Mus musculus
  siRNA target sequence for C330035N22Rik (NM_172926.1,261-279).
caggtatctgcatgtctta

SEQ ID NO: 639077 - DNA, 19 bp, Mus musculus
  siRNA target sequence for C330035N22Rik (NM_172926.1,263-281).
ggtatctgcatgtcttaat

SEQ ID NO: 639078 - DNA, 19 bp, Mus musculus
  siRNA target sequence for C330035N22Rik (NM_172926.1,268-286).
ctgcatgtcttaatgatct

SEQ ID NO: 639079 - DNA, 19 bp, Mus musculus
  siRNA target sequence for C330035N22Rik (NM_172926.1,271-289).
catgtcttaatgatcttct

SEQ ID NO: 639080 - DNA, 19 bp, Mus musculus
  siRNA target sequence for C330035N22Rik (NM_172926.1,282-300).
gatcttctggtcgtttgtt

SEQ ID NO: 639081 - DNA, 19 bp, Mus musculus
  siRNA target sequence for C330035N22Rik (NM_172926.1,302-320).
ctggagttgtgacattcta

SEQ ID NO: 639082 - DNA, 19 bp, Mus musculus
  siRNA target sequence for C330035N22Rik (NM_172926.1,304-322).
ggagttgtgacattctact

SEQ ID NO: 639083 - DNA, 19 bp, Mus musculus
  siRNA target sequence for C330035N22Rik (NM_172926.1,307-325).
gttgtgacattctactgtt

SEQ ID NO: 639084 - DNA, 19 bp, Mus musculus
  siRNA target sequence for C330035N22Rik (NM_172926.1,310-328).
gtgacattctactgttcat

SEQ ID NO: 639085 - DNA, 19 bp, Mus musculus
  siRNA target sequence for C330035N22Rik (NM_172926.1,312-330).
gacattctactgttcatta

SEQ ID NO: 639086 - DNA, 19 bp, Mus musculus
  siRNA target sequence for C330035N22Rik (NM_172926.1,334-352).
cccgattccctcttaccaa

SEQ ID NO: 639087 - DNA, 19 bp, Mus musculus
  siRNA target sequence for C330035N22Rik (NM_172926.1,335-353).
ccgattccctcttaccaaa

SEQ ID NO: 639088 - DNA, 19 bp, Mus musculus
  siRNA target sequence for C330035N22Rik (NM_172926.1,375-393).
caaacccaagcaattagga

SEQ ID NO: 639089 - DNA, 19 bp, Mus musculus
  siRNA target sequence for C330035N22Rik (NM_172926.1,381-399).
caagcaattaggacttcaa

SEQ ID NO: 639090 - DNA, 19 bp, Mus musculus
  siRNA target sequence for C330035N22Rik (NM_172926.1,464-482).
cttccttgctccttgaaaa

SEQ ID NO: 639091 - DNA, 19 bp, Mus musculus
  siRNA target sequence for C330035N22Rik (NM_172926.1,468-486).
cttgctccttgaaaactat

SEQ ID NO: 639092 - DNA, 19 bp, Mus musculus
  siRNA target sequence for C330035N22Rik (NM_172926.1,538-556).
gaggttcttgaattagtgt

SEQ ID NO: 639093 - DNA, 19 bp, Mus musculus
  siRNA target sequence for C330035N22Rik (NM_172926.1,544-562).
cttgaattagtgttggaaa

SEQ ID NO: 639094 - DNA, 19 bp, Mus musculus
  siRNA target sequence for C330035N22Rik (NM_172926.1,547-565).
gaattagtgttggaaaact

SEQ ID NO: 639095 - DNA, 19 bp, Mus musculus
  siRNA target sequence for C330035N22Rik (NM_172926.1,584-602).
gggatgtgacggatgatga

SEQ ID NO: 639096 - DNA, 19 bp, Mus musculus
  siRNA target sequence for C330035N22Rik (NM_172926.1,594-612).
ggatgatgagtcctttgtt

SEQ ID NO: 639097 - DNA, 19 bp, Mus musculus
  siRNA target sequence for C330035N22Rik (NM_172926.1,623-641).
ggatcaccttacggttttt

SEQ ID NO: 639098 - DNA, 19 bp, Mus musculus
  siRNA target sequence for C330035N22Rik (NM_172926.1,624-642).
gatcaccttacggtttttt

SEQ ID NO: 639099 - DNA, 19 bp, Mus musculus
  siRNA target sequence for C330035N22Rik (NM_172926.1,667-685).
cacaaggtggatattccat

SEQ ID NO: 639100 - DNA, 19 bp, Mus musculus
  siRNA target sequence for C330035N22Rik (NM_172926.1,672-690).
ggtggatattccatctatt

SEQ ID NO: 639101 - DNA, 19 bp, Mus musculus
  siRNA target sequence for C330035N22Rik (NM_172926.1,675-693).
ggatattccatctattata

SEQ ID NO: 639102 - DNA, 19 bp, Mus musculus
  siRNA target sequence for C330035N22Rik (NM_172926.1,686-704).
ctattataaccaagaaact

SEQ ID NO: 639103 - DNA, 19 bp, Mus musculus
  siRNA target sequence for C330035N22Rik (NM_172926.1,713-731).
cagcaatgaaacatataga

SEQ ID NO: 639104 - DNA, 19 bp, Mus musculus
  siRNA target sequence for C330035N22Rik (NM_172926.1,781-799).
caagccgctttagaagaat

SEQ ID NO: 639105 - DNA, 19 bp, Mus musculus
  siRNA target sequence for C330035N22Rik (NM_172926.1,861-879).
gcttactgagttacttttt

SEQ ID NO: 639106 - DNA, 19 bp, Mus musculus
  siRNA target sequence for C330035N22Rik (NM_172926.1,914-932).
ggtccctgacattactcat

SEQ ID NO: 639107 - DNA, 19 bp, Mus musculus
  siRNA target sequence for C330035N22Rik (NM_172926.1,915-933).
gtccctgacattactcata

SEQ ID NO: 639108 - DNA, 19 bp, Mus musculus
  siRNA target sequence for C330035N22Rik (NM_172926.1,978-996).
cctagctgatccagatact

SEQ ID NO: 639109 - DNA, 19 bp, Mus musculus
  siRNA target sequence for C330035N22Rik (NM_172926.1,988-1006).
ccagatactgtcaatcatt

SEQ ID NO: 639110 - DNA, 19 bp, Mus musculus
  siRNA target sequence for C330035N22Rik (NM_172926.1,995-1013).
ctgtcaatcatttgcttat

SEQ ID NO: 639111 - DNA, 19 bp, Mus musculus
  siRNA target sequence for C330035N22Rik (NM_172926.1,1110-1128).
gccatccgtgctgaagtta

SEQ ID NO: 639112 - DNA, 19 bp, Mus musculus
  siRNA target sequence for C330035N22Rik (NM_172926.1,1122-1140).
gaagttagagctgaaacaa

SEQ ID NO: 639113 - DNA, 19 bp, Mus musculus
  siRNA target sequence for C330035N22Rik (NM_172926.1,1147-1165).
gaacagcaggaccttttgt

SEQ ID NO: 639114 - DNA, 19 bp, Mus musculus
  siRNA target sequence for C330035N22Rik (NM_172926.1,1159-1177).
cttttgttccgctttatga

SEQ ID NO: 639115 - DNA, 19 bp, Mus musculus
  siRNA target sequence for C330035N22Rik (NM_172926.1,1222-1240).
ctgacagtcgaggaattta

SEQ ID NO: 639116 - DNA, 19 bp, Mus musculus
  siRNA target sequence for C330035N22Rik (NM_172926.1,1228-1246).
gtcgaggaatttaatgata

SEQ ID NO: 639117 - DNA, 19 bp, Mus musculus
  siRNA target sequence for C330035N22Rik (NM_172926.1,1254-1272).
gcgtccagagttatcaaat

SEQ ID NO: 639118 - DNA, 19 bp, Mus musculus
  siRNA target sequence for C330035N22Rik (NM_172926.1,1256-1274).
gtccagagttatcaaatga

SEQ ID NO: 639119 - DNA, 19 bp, Mus musculus
  siRNA target sequence for C330035N22Rik (NM_172926.1,1352-1370).
gctttgatcccttcattgt

SEQ ID NO: 639120 - DNA, 19 bp, Mus musculus
  siRNA target sequence for C330035N22Rik (NM_172926.1,1362-1380).
cttcattgtcgaagagatt

SEQ ID NO: 639121 - DNA, 19 bp, Mus musculus
  siRNA target sequence for C330035N22Rik (NM_172926.1,1369-1387).
gtcgaagagattcaaagaa

SEQ ID NO: 639122 - DNA, 19 bp, Mus musculus
  siRNA target sequence for C330035N22Rik (NM_172926.1,1371-1389).
cgaagagattcaaagaatt

SEQ ID NO: 639123 - DNA, 19 bp, Mus musculus
  siRNA target sequence for C330035N22Rik (NM_172926.1,1391-1409).
ctgaaggcccatacataga

SEQ ID NO: 639124 - DNA, 19 bp, Mus musculus
  siRNA target sequence for C330035N22Rik (NM_172926.1,1397-1415).
gcccatacatagatgttgt

SEQ ID NO: 639125 - DNA, 19 bp, Mus musculus
  siRNA target sequence for C330035N22Rik (NM_172926.1,1423-1441).
caaactatgaggtgtcttt

SEQ ID NO: 639126 - DNA, 19 bp, Mus musculus
  siRNA target sequence for C330035N22Rik (NM_172926.1,1552-1570).
cgcaattccaaattcaaca

SEQ ID NO: 639127 - DNA, 19 bp, Mus musculus
  siRNA target sequence for C330035N22Rik (NM_172926.1,1600-1618).
ggaatcagcagaataggta

SEQ ID NO: 639128 - DNA, 19 bp, Mus musculus
  siRNA target sequence for C330035N22Rik (NM_172926.1,1607-1625).
gcagaataggtagcaaaat

SEQ ID NO: 639129 - DNA, 19 bp, Mus musculus
  siRNA target sequence for C330035N22Rik (NM_172926.1,1691-1709).
gcgaagatgactttattga

SEQ ID NO: 639130 - DNA, 19 bp, Mus musculus
  siRNA target sequence for C330035N22Rik (NM_172926.1,1784-1802).
ctgcctggaaaattagcat

SEQ ID NO: 639131 - DNA, 19 bp, Mus musculus
  siRNA target sequence for C330035N22Rik (NM_172926.1,1799-1817).
gcattccgtatgtagactt

SEQ ID NO: 639132 - DNA, 19 bp, Mus musculus
  siRNA target sequence for C330035N22Rik (NM_172926.1,1800-1818).
cattccgtatgtagacttt

SEQ ID NO: 639133 - DNA, 19 bp, Mus musculus
  siRNA target sequence for C330035N22Rik (NM_172926.1,1805-1823).
cgtatgtagacttttttga

SEQ ID NO: 639134 - DNA, 19 bp, Mus musculus
  siRNA target sequence for C330035N22Rik (NM_172926.1,1855-1873).
gagagaattcctgtgtttt

SEQ ID NO: 639135 - DNA, 19 bp, Mus musculus
  siRNA target sequence for C330035N22Rik (NM_172926.1,1859-1877).
gaattcctgtgttttgtat

SEQ ID NO: 639136 - DNA, 19 bp, Mus musculus
  siRNA target sequence for C330035N22Rik (NM_172926.1,1921-1939).
gagcattggtctgtctata

SEQ ID NO: 639137 - DNA, 19 bp, Mus musculus
  siRNA target sequence for C330035N22Rik (NM_172926.1,1928-1946).
ggtctgtctatagaagata

SEQ ID NO: 639138 - DNA, 19 bp, Mus musculus
  siRNA target sequence for C330035N22Rik (NM_172926.1,1929-1947).
gtctgtctatagaagatat

SEQ ID NO: 639139 - DNA, 19 bp, Mus musculus
  siRNA target sequence for C330035N22Rik (NM_172926.1,1931-1949).
ctgtctatagaagatatct

SEQ ID NO: 639140 - DNA, 19 bp, Mus musculus
  siRNA target sequence for C330035N22Rik (NM_172926.1,2032-2050).
ggccccaaaaactatgagt

SEQ ID NO: 639141 - DNA, 19 bp, Mus musculus
  siRNA target sequence for C330035N22Rik (NM_172926.1,2033-2051).
gccccaaaaactatgagtt

SEQ ID NO: 639142 - DNA, 19 bp, Mus musculus
  siRNA target sequence for C330035N22Rik (NM_172926.1,2034-2052).
ccccaaaaactatgagttt

SEQ ID NO: 639143 - DNA, 19 bp, Mus musculus
  siRNA target sequence for C330035N22Rik (NM_172926.1,2154-2172).
cggtggggagacacagttt

SEQ ID NO: 639144 - DNA, 19 bp, Mus musculus
  siRNA target sequence for C330035N22Rik (NM_172926.1,2165-2183).
cacagtttctagataagat

SEQ ID NO: 639145 - DNA, 19 bp, Mus musculus
  siRNA target sequence for C330035N22Rik (NM_172926.1,2181-2199).
gatacttccagatgtaaat

SEQ ID NO: 639146 - DNA, 19 bp, Mus musculus
  siRNA target sequence for C330035N22Rik (NM_172926.1,2217-2235).
gtctgttcctgggaaacta

SEQ ID NO: 639147 - DNA, 19 bp, Mus musculus
  siRNA target sequence for C330035N22Rik (NM_172926.1,2254-2272).
catttggagccattcatca

SEQ ID NO: 639148 - DNA, 19 bp, Mus musculus
  siRNA target sequence for C330035N22Rik (NM_172926.1,2260-2278).
gagccattcatcatgagtt

SEQ ID NO: 639149 - DNA, 19 bp, Mus musculus
  siRNA target sequence for C330035N22Rik (NM_172926.1,2291-2309).
gcgaatctcccaaacctaa

SEQ ID NO: 639150 - DNA, 19 bp, Mus musculus
  siRNA target sequence for C330035N22Rik (NM_172926.1,2292-2310).
cgaatctcccaaacctaaa

SEQ ID NO: 639151 - DNA, 19 bp, Mus musculus
  siRNA target sequence for C330035N22Rik (NM_172926.1,2320-2338).
ccagaactgacgattctca

SEQ ID NO: 639152 - DNA, 19 bp, Mus musculus
  siRNA target sequence for C330035N22Rik (NM_172926.1,2373-2391).
cgatctgtttaagaataat

SEQ ID NO: 639153 - DNA, 19 bp, Mus musculus
  siRNA target sequence for C330035N22Rik (NM_172926.1,2377-2395).
ctgtttaagaataatgcaa

SEQ ID NO: 639154 - DNA, 19 bp, Mus musculus
  siRNA target sequence for C330035N22Rik (NM_172926.1,2411-2429).
cagagcgaaagcaaaatca

SEQ ID NO: 639155 - DNA, 19 bp, Mus musculus
  siRNA target sequence for C330035N22Rik (NM_172926.1,2413-2431).
gagcgaaagcaaaatcaga

SEQ ID NO: 639156 - DNA, 19 bp, Mus musculus
  siRNA target sequence for C330035N22Rik (NM_172926.1,2455-2473).
gtggacggagtctatgatt

SEQ ID NO: 639157 - DNA, 19 bp, Mus musculus
  siRNA target sequence for C330035N22Rik (NM_172926.1,2481-2499).
gtatgtagggcgagtagtt

SEQ ID NO: 639158 - DNA, 19 bp, Mus musculus
  siRNA target sequence for C330035N22Rik (NM_172926.1,2489-2507).
ggcgagtagtttttcaagt

SEQ ID NO: 639159 - DNA, 19 bp, Mus musculus
  siRNA target sequence for C330035N22Rik (NM_172926.1,2536-2554).
ggaactcgaatcctcttta

SEQ ID NO: 639160 - DNA, 19 bp, Mus musculus
  siRNA target sequence for C330035N22Rik (NM_172926.1,2540-2558).
ctcgaatcctctttaagaa

SEQ ID NO: 639161 - DNA, 19 bp, Mus musculus
  siRNA target sequence for C330035N22Rik (NM_172926.1,2542-2560).
cgaatcctctttaagaaca

SEQ ID NO: 639162 - DNA, 19 bp, Mus musculus
  siRNA target sequence for C330035N22Rik (NM_172926.1,2644-2662).
cttctcagagatgctatat

SEQ ID NO: 639163 - DNA, 19 bp, Mus musculus
  siRNA target sequence for C330035N22Rik (NM_172926.1,2684-2702).
gctctctccaagataagca

SEQ ID NO: 639164 - DNA, 19 bp, Mus musculus
  siRNA target sequence for C330035N22Rik (NM_172926.1,2687-2705).
ctctccaagataagcaaaa

SEQ ID NO: 639165 - DNA, 19 bp, Mus musculus
  siRNA target sequence for C330035N22Rik (NM_172926.1,2749-2767).
gatctgatagtcaagtgta

SEQ ID NO: 639166 - DNA, 19 bp, Mus musculus
  siRNA target sequence for C330035N22Rik (NM_172926.1,2760-2778).
caagtgtatcggtgaagaa

SEQ ID NO: 639167 - DNA, 19 bp, Mus musculus
  siRNA target sequence for C330035N22Rik (NM_172926.1,2765-2783).
gtatcggtgaagaaaccaa

SEQ ID NO: 639168 - DNA, 19 bp, Mus musculus
  siRNA target sequence for C330035N22Rik (NM_172926.1,2877-2895).
gctgtttccagagctaaat

SEQ ID NO: 639169 - DNA, 19 bp, Mus musculus
  siRNA target sequence for C330035N22Rik (NM_172926.1,2887-2905).
gagctaaataaggtacaaa

SEQ ID NO: 639170 - DNA, 19 bp, Mus musculus
  siRNA target sequence for C330035N22Rik (NM_172926.1,2908-2926).
gaagctacctccatgacat

SEQ ID NO: 639171 - DNA, 19 bp, Mus musculus
  siRNA target sequence for Cblc (NM_023224.3,338-356).
gacgtgaaccaggatgttt

SEQ ID NO: 639172 - DNA, 19 bp, Mus musculus
  siRNA target sequence for Cblc (NM_023224.3,837-855).
ggcagtgggccattggata

SEQ ID NO: 639173 - DNA, 19 bp, Mus musculus
  siRNA target sequence for Cblc (NM_023224.3,1189-1207).
ctgccgttgtgagatcaaa

SEQ ID NO: 639174 - DNA, 19 bp, Mus musculus
  siRNA target sequence for Cblc (NM_023224.3,1209-1227).
gtcgagaggccgtgagtat

SEQ ID NO: 639175 - DNA, 19 bp, Mus musculus
  siRNA target sequence for Cblc (NM_023224.3,1211-1229).
cgagaggccgtgagtatct

SEQ ID NO: 639176 - DNA, 19 bp, Mus musculus
  siRNA target sequence for Cblc (NM_023224.3,1344-1362).
cactactccctgaagatca

SEQ ID NO: 639177 - DNA, 19 bp, Mus musculus
  siRNA target sequence for Dvl1 (NM_010091.1,4-22).
gcggagaccaaaatcatct

SEQ ID NO: 639178 - DNA, 19 bp, Mus musculus
  siRNA target sequence for Dvl1 (NM_010091.1,121-139).
ccggtgcacgcctacaaat

SEQ ID NO: 639179 - DNA, 19 bp, Mus musculus
  siRNA target sequence for Dvl1 (NM_010091.1,122-140).
cggtgcacgcctacaaatt

SEQ ID NO: 639180 - DNA, 19 bp, Mus musculus
  siRNA target sequence for Dvl1 (NM_010091.1,124-142).
gtgcacgcctacaaattct

SEQ ID NO: 639181 - DNA, 19 bp, Mus musculus
  siRNA target sequence for Dvl1 (NM_010091.1,371-389).
gggacggaatggacaatga

SEQ ID NO: 639182 - DNA, 19 bp, Mus musculus
  siRNA target sequence for Dvl1 (NM_010091.1,373-391).
gacggaatggacaatgaga

SEQ ID NO: 639183 - DNA, 19 bp, Mus musculus
  siRNA target sequence for Dvl1 (NM_010091.1,571-589).
gatgaggaggacaatacga

SEQ ID NO: 639184 - DNA, 19 bp, Mus musculus
  siRNA target sequence for Dvl1 (NM_010091.1,1438-1456).
gtgaacaagatcacctttt

SEQ ID NO: 639185 - DNA, 19 bp, Mus musculus
  siRNA target sequence for Dvl1 (NM_010091.1,1777-1795).
gggggtagtggcagtgaat

SEQ ID NO: 639186 - DNA, 19 bp, Mus musculus
  siRNA target sequence for Dvl1 (NM_010091.1,1779-1797).
gggtagtggcagtgaatca

SEQ ID NO: 639187 - DNA, 19 bp, Mus musculus
  siRNA target sequence for Dvl2 (NM_007888.1,255-273).
ggcgagacgaaggtgattt

SEQ ID NO: 639188 - DNA, 19 bp, Mus musculus
  siRNA target sequence for Dvl2 (NM_007888.1,256-274).
gcgagacgaaggtgattta

SEQ ID NO: 639189 - DNA, 19 bp, Mus musculus
  siRNA target sequence for Dvl2 (NM_007888.1,260-278).
gacgaaggtgatttaccat

SEQ ID NO: 639190 - DNA, 19 bp, Mus musculus
  siRNA target sequence for Dvl2 (NM_007888.1,679-697).
ccgaatctgtcgtatcact

SEQ ID NO: 639191 - DNA, 19 bp, Mus musculus
  siRNA target sequence for Dvl2 (NM_007888.1,987-1005).
gtcaccgattccacaatgt

SEQ ID NO: 639192 - DNA, 19 bp, Mus musculus
  siRNA target sequence for Dvl2 (NM_007888.1,989-1007).
caccgattccacaatgtct

SEQ ID NO: 639193 - DNA, 19 bp, Mus musculus
  siRNA target sequence for Dvl2 (NM_007888.1,1565-1583).
catcccaaacgcctttcta

SEQ ID NO: 639194 - DNA, 19 bp, Mus musculus
  siRNA target sequence for Dvl2 (NM_007888.1,1610-1628).
ccatcacgtggaaggtttt

SEQ ID NO: 639195 - DNA, 19 bp, Mus musculus
  siRNA target sequence for Dvl2 (NM_007888.1,1691-1709).
caccgtcaacaagattact

SEQ ID NO: 639196 - DNA, 19 bp, Mus musculus
  siRNA target sequence for Dvl2 (NM_007888.1,1697-1715).
caacaagattactttctct

SEQ ID NO: 639197 - DNA, 19 bp, Mus musculus
  siRNA target sequence for Dvl2 (NM_007888.1,2176-2194).
caggcgctcctcctaatct

SEQ ID NO: 639198 - DNA, 19 bp, Mus musculus
  siRNA target sequence for Dvl2 (NM_007888.1,2236-2254).
gcatggctctcccctataa

SEQ ID NO: 639199 - DNA, 19 bp, Mus musculus
  siRNA target sequence for Dvl2 (NM_007888.1,2256-2274).
cccatgatggtagttatga

SEQ ID NO: 639200 - DNA, 19 bp, Mus musculus
  siRNA target sequence for Dvl3 (NM_007889.1,354-372).
gtctatggacgacgatttt

SEQ ID NO: 639201 - DNA, 19 bp, Mus musculus
  siRNA target sequence for Dvl3 (NM_007889.1,672-690).
gcacgcagcccgactcaat

SEQ ID NO: 639202 - DNA, 19 bp, Mus musculus
  siRNA target sequence for Dvl3 (NM_007889.1,718-736).
gagccaggcggctatgaca

SEQ ID NO: 639203 - DNA, 19 bp, Mus musculus
  siRNA target sequence for Dvl3 (NM_007889.1,768-786).
gactaccagtttctttgat

SEQ ID NO: 639204 - DNA, 19 bp, Mus musculus
  siRNA target sequence for Dvl3 (NM_007889.1,901-919).
gagcggtcctcgtctttca

SEQ ID NO: 639205 - DNA, 19 bp, Mus musculus
  siRNA target sequence for Dvl3 (NM_007889.1,1108-1126).
ctactgcaggtaaatgaga

SEQ ID NO: 639206 - DNA, 19 bp, Mus musculus
  siRNA target sequence for Dvl3 (NM_007889.1,1163-1181).
gagtccttcgggagattgt

SEQ ID NO: 639207 - DNA, 19 bp, Mus musculus
  siRNA target sequence for Dvl3 (NM_007889.1,1234-1252).
cctcgcggctgcttcacat

SEQ ID NO: 639208 - DNA, 19 bp, Mus musculus
  siRNA target sequence for Dvl3 (NM_007889.1,1673-1691).
ccgagcagtgctactacat

SEQ ID NO: 639209 - DNA, 19 bp, Mus musculus
  siRNA target sequence for Dvl3 (NM_007889.1,1708-1726).
ggtaacatggccaacctat

SEQ ID NO: 639210 - DNA, 19 bp, Mus musculus
  siRNA target sequence for Dvl3 (NM_007889.1,2181-2199).
cggagtgccccctctctat

SEQ ID NO: 639211 - DNA, 19 bp, Mus musculus
  siRNA target sequence for Npas3 (NM_013780.1,89-107).
ctctgcccaaccaatcaga

SEQ ID NO: 639212 - DNA, 19 bp, Mus musculus
  siRNA target sequence for Npas3 (NM_013780.1,91-109).
ctgcccaaccaatcagaat

SEQ ID NO: 639213 - DNA, 19 bp, Mus musculus
  siRNA target sequence for Npas3 (NM_013780.1,93-111).
gcccaaccaatcagaatgt

SEQ ID NO: 639214 - DNA, 19 bp, Mus musculus
  siRNA target sequence for Npas3 (NM_013780.1,94-112).
cccaaccaatcagaatgta

SEQ ID NO: 639215 - DNA, 19 bp, Mus musculus
  siRNA target sequence for Npas3 (NM_013780.1,100-118).
caatcagaatgtaggaaaa

SEQ ID NO: 639216 - DNA, 19 bp, Mus musculus
  siRNA target sequence for Npas3 (NM_013780.1,132-150).
cggaatctactgtgaatct

SEQ ID NO: 639217 - DNA, 19 bp, Mus musculus
  siRNA target sequence for Npas3 (NM_013780.1,133-151).
ggaatctactgtgaatcta

SEQ ID NO: 639218 - DNA, 19 bp, Mus musculus
  siRNA target sequence for Npas3 (NM_013780.1,149-167).
ctacctaccagaatttaca

SEQ ID NO: 639219 - DNA, 19 bp, Mus musculus
  siRNA target sequence for Npas3 (NM_013780.1,296-314).
ccatcatccgacttacaat

SEQ ID NO: 639220 - DNA, 19 bp, Mus musculus
  siRNA target sequence for Npas3 (NM_013780.1,297-315).
catcatccgacttacaatt

SEQ ID NO: 639221 - DNA, 19 bp, Mus musculus
  siRNA target sequence for Npas3 (NM_013780.1,300-318).
catccgacttacaattagt

SEQ ID NO: 639222 - DNA, 19 bp, Mus musculus
  siRNA target sequence for Npas3 (NM_013780.1,303-321).
ccgacttacaattagttat

SEQ ID NO: 639223 - DNA, 19 bp, Mus musculus
  siRNA target sequence for Npas3 (NM_013780.1,305-323).
gacttacaattagttatct

SEQ ID NO: 639224 - DNA, 19 bp, Mus musculus
  siRNA target sequence for Npas3 (NM_013780.1,307-325).
cttacaattagttatctca

SEQ ID NO: 639225 - DNA, 19 bp, Mus musculus
  siRNA target sequence for Npas3 (NM_013780.1,311-329).
caattagttatctcaagat

SEQ ID NO: 639226 - DNA, 19 bp, Mus musculus
  siRNA target sequence for Npas3 (NM_013780.1,386-404).
caccaaacacctcagtaaa

SEQ ID NO: 639227 - DNA, 19 bp, Mus musculus
  siRNA target sequence for Npas3 (NM_013780.1,486-504).
cctggatggcttcgtattt

SEQ ID NO: 639228 - DNA, 19 bp, Mus musculus
  siRNA target sequence for Npas3 (NM_013780.1,489-507).
ggatggcttcgtatttgca

SEQ ID NO: 639229 - DNA, 19 bp, Mus musculus
  siRNA target sequence for Npas3 (NM_013780.1,494-512).
gcttcgtatttgcactaaa

SEQ ID NO: 639230 - DNA, 19 bp, Mus musculus
  siRNA target sequence for Npas3 (NM_013780.1,498-516).
cgtatttgcactaaatcaa

SEQ ID NO: 639231 - DNA, 19 bp, Mus musculus
  siRNA target sequence for Npas3 (NM_013780.1,508-526).
ctaaatcaagaaggaaaat

SEQ ID NO: 639232 - DNA, 19 bp, Mus musculus
  siRNA target sequence for Npas3 (NM_013780.1,539-557).
ctgaaaccgtctctatcta

SEQ ID NO: 639233 - DNA, 19 bp, Mus musculus
  siRNA target sequence for Npas3 (NM_013780.1,788-806).
cccttgaacggtccttttt

SEQ ID NO: 639234 - DNA, 19 bp, Mus musculus
  siRNA target sequence for Npas3 (NM_013780.1,835-853).
cgtggagtccacatcaagt

SEQ ID NO: 639235 - DNA, 19 bp, Mus musculus
  siRNA target sequence for Npas3 (NM_013780.1,838-856).
ggagtccacatcaagtcat

SEQ ID NO: 639236 - DNA, 19 bp, Mus musculus
  siRNA target sequence for Npas3 (NM_013780.1,857-875).
ctgggtataaggtgattca

SEQ ID NO: 639237 - DNA, 19 bp, Mus musculus
  siRNA target sequence for Npas3 (NM_013780.1,859-877).
gggtataaggtgattcaca

SEQ ID NO: 639238 - DNA, 19 bp, Mus musculus
  siRNA target sequence for Npas3 (NM_013780.1,860-878).
ggtataaggtgattcacat

SEQ ID NO: 639239 - DNA, 19 bp, Mus musculus
  siRNA target sequence for Npas3 (NM_013780.1,861-879).
gtataaggtgattcacata

SEQ ID NO: 639240 - DNA, 19 bp, Mus musculus
  siRNA target sequence for Npas3 (NM_013780.1,923-941).
ccgtccccagccaaatcat

SEQ ID NO: 639241 - DNA, 19 bp, Mus musculus
  siRNA target sequence for Npas3 (NM_013780.1,969-987).
gcctccccctacgatcaat

SEQ ID NO: 639242 - DNA, 19 bp, Mus musculus
  siRNA target sequence for Npas3 (NM_013780.1,971-989).
ctccccctacgatcaatga

SEQ ID NO: 639243 - DNA, 19 bp, Mus musculus
  siRNA target sequence for Npas3 (NM_013780.1,974-992).
cccctacgatcaatgaagt

SEQ ID NO: 639244 - DNA, 19 bp, Mus musculus
  siRNA target sequence for Npas3 (NM_013780.1,980-998).
cgatcaatgaagtcagaat

SEQ ID NO: 639245 - DNA, 19 bp, Mus musculus
  siRNA target sequence for Npas3 (NM_013780.1,1052-1070).
gtgaaaataggattagtga

SEQ ID NO: 639246 - DNA, 19 bp, Mus musculus
  siRNA target sequence for Npas3 (NM_013780.1,1093-1111).
gacatcgtagggaaaagat

SEQ ID NO: 639247 - DNA, 19 bp, Mus musculus
  siRNA target sequence for Npas3 (NM_013780.1,1122-1140).
catccatgccgaagatgta

SEQ ID NO: 639248 - DNA, 19 bp, Mus musculus
  siRNA target sequence for Npas3 (NM_013780.1,1244-1262).
ctagtgccaccatagctat

SEQ ID NO: 639249 - DNA, 19 bp, Mus musculus
  siRNA target sequence for Npas3 (NM_013780.1,1290-1308).
catcatctgggtgaattat

SEQ ID NO: 639250 - DNA, 19 bp, Mus musculus
  siRNA target sequence for Npas3 (NM_013780.1,1465-1483).
gacgagaagggcaatcagt

SEQ ID NO: 639251 - DNA, 19 bp, Mus musculus
  siRNA target sequence for Npas3 (NM_013780.1,1611-1629).
cgagcactcggactttgaa

SEQ ID NO: 639252 - DNA, 19 bp, Mus musculus
  siRNA target sequence for Npas3 (NM_013780.1,1665-1683).
gggccctatgcagatcaaa

SEQ ID NO: 639253 - DNA, 19 bp, Mus musculus
  siRNA target sequence for Npas3 (NM_013780.1,2026-2044).
gagatctccaggaacgaat

SEQ ID NO: 639254 - DNA, 19 bp, Mus musculus
  siRNA target sequence for Npas3 (NM_013780.1,2513-2531).
ccaacgcgcatgctgttaa

SEQ ID NO: 639255 - DNA, 19 bp, Mus musculus
  siRNA target sequence for Npas3 (NM_013780.1,2602-2620).
gtgcaccgactcaacatgt

SEQ ID NO: 639256 - DNA, 19 bp, Mus musculus
  siRNA target sequence for Nxf (NM_153553.1,199-217).
ctcgcaagggtgtcttctt

SEQ ID NO: 639257 - DNA, 19 bp, Mus musculus
  siRNA target sequence for Nxf (NM_153553.1,294-312).
cctggatttctccttgtat

SEQ ID NO: 639258 - DNA, 19 bp, Mus musculus
  siRNA target sequence for Nxf (NM_153553.1,318-336).
gctgaggggaagttgctat

SEQ ID NO: 639259 - DNA, 19 bp, Mus musculus
  siRNA target sequence for Nxf (NM_153553.1,319-337).
ctgaggggaagttgctata

SEQ ID NO: 639260 - DNA, 19 bp, Mus musculus
  siRNA target sequence for Nxf (NM_153553.1,390-408).
gcccagggcgacagtatct

SEQ ID NO: 639261 - DNA, 19 bp, Mus musculus
  siRNA target sequence for Nxf (NM_153553.1,391-409).
cccagggcgacagtatcta

SEQ ID NO: 639262 - DNA, 19 bp, Mus musculus
  siRNA target sequence for Nxf (NM_153553.1,396-414).
ggcgacagtatctacgata

SEQ ID NO: 639263 - DNA, 19 bp, Mus musculus
  siRNA target sequence for Nxf (NM_153553.1,397-415).
gcgacagtatctacgatat

SEQ ID NO: 639264 - DNA, 19 bp, Mus musculus
  siRNA target sequence for Nxf (NM_153553.1,403-421).
gtatctacgatatcattga

SEQ ID NO: 639265 - DNA, 19 bp, Mus musculus
  siRNA target sequence for Nxf (NM_153553.1,542-560).
caaactggtgcttattcga

SEQ ID NO: 639266 - DNA, 19 bp, Mus musculus
  siRNA target sequence for Nxf (NM_153553.1,735-753).
ctactggacgtttctgaaa

SEQ ID NO: 639267 - DNA, 19 bp, Mus musculus
  siRNA target sequence for Nxf (NM_153553.1,791-809).
gctctgtaaatcatggtat

SEQ ID NO: 639268 - DNA, 19 bp, Mus musculus
  siRNA target sequence for Nxf (NM_153553.1,857-875).
ccgcctgttggctgaaagt

SEQ ID NO: 639269 - DNA, 19 bp, Mus musculus
  siRNA target sequence for Nxf (NM_153553.1,922-940).
gaggctggacatggattta

SEQ ID NO: 639270 - DNA, 19 bp, Mus musculus
  siRNA target sequence for Nxf (NM_153553.1,924-942).
ggctggacatggatttact

SEQ ID NO: 639271 - DNA, 19 bp, Mus musculus
  siRNA target sequence for Nxf (NM_153553.1,934-952).
ggatttactgcatgctata

SEQ ID NO: 639272 - DNA, 19 bp, Mus musculus
  siRNA target sequence for Nxf (NM_153553.1,960-978).
ggtccagaaggccctttta

SEQ ID NO: 639273 - DNA, 19 bp, Mus musculus
  siRNA target sequence for Nxf (NM_153553.1,972-990).
ccttttactgccaataact

SEQ ID NO: 639274 - DNA, 19 bp, Mus musculus
  siRNA target sequence for Nxf (NM_153553.1,1020-1038).
ctccgccagcagctaaact

SEQ ID NO: 639275 - DNA, 19 bp, Mus musculus
  siRNA target sequence for Nxf (NM_153553.1,1077-1095).
gctgtgctaccctcattct

SEQ ID NO: 639276 - DNA, 19 bp, Mus musculus
  siRNA target sequence for Nxf (NM_153553.1,1112-1130).
ccaggagcaatgctctaat

SEQ ID NO: 639277 - DNA, 19 bp, Mus musculus
  siRNA target sequence for Nxf (NM_153553.1,1148-1166).
cctggggactcctagaagt

SEQ ID NO: 639278 - DNA, 19 bp, Mus musculus
  siRNA target sequence for Nxf (NM_153553.1,1188-1206).
gaactaggtgtgatctcaa

SEQ ID NO: 639279 - DNA, 19 bp, Mus musculus
  siRNA target sequence for Nxf (NM_153553.1,1313-1331).
gtgtactccaccttacaca

SEQ ID NO: 639280 - DNA, 19 bp, Mus musculus
  siRNA target sequence for Nxf (NM_153553.1,1487-1505).
cccactaaccagttcacta

SEQ ID NO: 639281 - DNA, 19 bp, Mus musculus
  siRNA target sequence for Nxf (NM_153553.1,1704-1722).
caactgagccccaatccta

SEQ ID NO: 639282 - DNA, 19 bp, Mus musculus
  siRNA target sequence for Nxf (NM_153553.1,1713-1731).
cccaatcctaccaagactt

SEQ ID NO: 639283 - DNA, 19 bp, Mus musculus
  siRNA target sequence for Nxf (NM_153553.1,1714-1732).
ccaatcctaccaagactta

SEQ ID NO: 639284 - DNA, 19 bp, Mus musculus
  siRNA target sequence for Nxf (NM_153553.1,1750-1768).
gcagttttctctatgagaa

SEQ ID NO: 639285 - DNA, 19 bp, Mus musculus
  siRNA target sequence for Nxf (NM_153553.1,1896-1914).
ccagtcaagcaaagtttct

SEQ ID NO: 639286 - DNA, 19 bp, Mus musculus
  siRNA target sequence for Nxf (NM_153553.1,2091-2109).
gtgcttagcctggatctta

SEQ ID NO: 639287 - DNA, 19 bp, Mus musculus
  siRNA target sequence for Nxf (NM_153553.1,2093-2111).
gcttagcctggatcttaaa

SEQ ID NO: 639288 - DNA, 19 bp, Mus musculus
  siRNA target sequence for Nxf (NM_153553.1,2138-2156).
cctggttgaccctgataat

SEQ ID NO: 639289 - DNA, 19 bp, Mus musculus
  siRNA target sequence for Nxf (NM_153553.1,2139-2157).
ctggttgaccctgataatt

SEQ ID NO: 639290 - DNA, 19 bp, Mus musculus
  siRNA target sequence for Nxf (NM_153553.1,2141-2159).
ggttgaccctgataattta

SEQ ID NO: 639291 - DNA, 19 bp, Mus musculus
  siRNA target sequence for Nxf (NM_153553.1,2380-2398).
ctgatgagttgcatcaact

SEQ ID NO: 639292 - DNA, 19 bp, Mus musculus
  siRNA target sequence for Omp (NM_011010.1,152-170).
ccgtctaccgcctcgattt

SEQ ID NO: 639293 - DNA, 19 bp, Mus musculus
  siRNA target sequence for Omp (NM_011010.1,154-172).
gtctaccgcctcgatttca

SEQ ID NO: 639294 - DNA, 19 bp, Mus musculus
  siRNA target sequence for Omp (NM_011010.1,331-349).
gactccgacgccatggatt

SEQ ID NO: 639295 - DNA, 19 bp, Mus musculus
  siRNA target sequence for Omp (NM_011010.1,335-353).
ccgacgccatggattggaa

SEQ ID NO: 639296 - DNA, 19 bp, Mus musculus
  siRNA target sequence for Omp (NM_011010.1,336-354).
cgacgccatggattggaat

SEQ ID NO: 639297 - DNA, 19 bp, Mus musculus
  siRNA target sequence for Omp (NM_011010.1,467-485).
cctctgtggtgtttaacca

SEQ ID NO: 639298 - DNA, 19 bp, Mus musculus
  siRNA target sequence for Per1 (NM_011065.2,492-510).
cagcaagagtacaaactca

SEQ ID NO: 639299 - DNA, 19 bp, Mus musculus
  siRNA target sequence for Per1 (NM_011065.2,623-641).
ggacccagaaagaactcat

SEQ ID NO: 639300 - DNA, 19 bp, Mus musculus
  siRNA target sequence for Per1 (NM_011065.2,647-665).
cacttcgggagctcaaact

SEQ ID NO: 639301 - DNA, 19 bp, Mus musculus
  siRNA target sequence for Per1 (NM_011065.2,751-769).
caggctaaccaggaatatt

SEQ ID NO: 639302 - DNA, 19 bp, Mus musculus
  siRNA target sequence for Per1 (NM_011065.2,805-823).
gccatggacatgtctactt

SEQ ID NO: 639303 - DNA, 19 bp, Mus musculus
  siRNA target sequence for Per1 (NM_011065.2,834-852).
ggaattggagcatatcaca

SEQ ID NO: 639304 - DNA, 19 bp, Mus musculus
  siRNA target sequence for Per1 (NM_011065.2,835-853).
gaattggagcatatcacat

SEQ ID NO: 639305 - DNA, 19 bp, Mus musculus
  siRNA target sequence for Per1 (NM_011065.2,844-862).
catatcacatccgaataca

SEQ ID NO: 639306 - DNA, 19 bp, Mus musculus
  siRNA target sequence for Per1 (NM_011065.2,854-872).
ccgaatacacacttcgaaa

SEQ ID NO: 639307 - DNA, 19 bp, Mus musculus
  siRNA target sequence for Per1 (NM_011065.2,904-922).
ctgacaggccggattgtct

SEQ ID NO: 639308 - DNA, 19 bp, Mus musculus
  siRNA target sequence for Per1 (NM_011065.2,906-924).
gacaggccggattgtctat

SEQ ID NO: 639309 - DNA, 19 bp, Mus musculus
  siRNA target sequence for Per1 (NM_011065.2,908-926).
caggccggattgtctatat

SEQ ID NO: 639310 - DNA, 19 bp, Mus musculus
  siRNA target sequence for Per1 (NM_011065.2,910-928).
ggccggattgtctatattt

SEQ ID NO: 639311 - DNA, 19 bp, Mus musculus
  siRNA target sequence for Per1 (NM_011065.2,953-971).
gttgcaaacgggatgtgtt

SEQ ID NO: 639312 - DNA, 19 bp, Mus musculus
  siRNA target sequence for Per1 (NM_011065.2,1018-1036).
gtcttctatggctctacta

SEQ ID NO: 639313 - DNA, 19 bp, Mus musculus
  siRNA target sequence for Per1 (NM_011065.2,1020-1038).
cttctatggctctactaca

SEQ ID NO: 639314 - DNA, 19 bp, Mus musculus
  siRNA target sequence for Per1 (NM_011065.2,1174-1192).
cgcctaaccccatatgtga

SEQ ID NO: 639315 - DNA, 19 bp, Mus musculus
  siRNA target sequence for Per1 (NM_011065.2,1394-1412).
gggctccagtacttctctt

SEQ ID NO: 639316 - DNA, 19 bp, Mus musculus
  siRNA target sequence for Per1 (NM_011065.2,1435-1453).
ctcatgctggccattcata

SEQ ID NO: 639317 - DNA, 19 bp, Mus musculus
  siRNA target sequence for Per1 (NM_011065.2,1443-1461).
ggccattcataagaagata

SEQ ID NO: 639318 - DNA, 19 bp, Mus musculus
  siRNA target sequence for Per1 (NM_011065.2,1511-1529).
ctcggaacggggaatatgt

SEQ ID NO: 639319 - DNA, 19 bp, Mus musculus
  siRNA target sequence for Per1 (NM_011065.2,1513-1531).
cggaacggggaatatgtca

SEQ ID NO: 639320 - DNA, 19 bp, Mus musculus
  siRNA target sequence for Per1 (NM_011065.2,1587-1605).
cgtgttgggtcgccataaa

SEQ ID NO: 639321 - DNA, 19 bp, Mus musculus
  siRNA target sequence for Per1 (NM_011065.2,1610-1628).
gcacggcacccctgaatga

SEQ ID NO: 639322 - DNA, 19 bp, Mus musculus
  siRNA target sequence for Per1 (NM_011065.2,1664-1682).
cgtccctggactctgatat

SEQ ID NO: 639323 - DNA, 19 bp, Mus musculus
  siRNA target sequence for Per1 (NM_011065.2,1694-1712).
cagagcagatccatcgatt

SEQ ID NO: 639324 - DNA, 19 bp, Mus musculus
  siRNA target sequence for Per1 (NM_011065.2,1859-1877).
ctttccagcagatctgtaa

SEQ ID NO: 639325 - DNA, 19 bp, Mus musculus
  siRNA target sequence for Per1 (NM_011065.2,1902-1920).
gggacaacagctcttcatt

SEQ ID NO: 639326 - DNA, 19 bp, Mus musculus
  siRNA target sequence for Per1 (NM_011065.2,1904-1922).
gacaacagctcttcattga

SEQ ID NO: 639327 - DNA, 19 bp, Mus musculus
  siRNA target sequence for Per1 (NM_011065.2,1957-1975).
cttgctacaggtacattca

SEQ ID NO: 639328 - DNA, 19 bp, Mus musculus
  siRNA target sequence for Per1 (NM_011065.2,2123-2141).
gcatcctcaggtatttgga

SEQ ID NO: 639329 - DNA, 19 bp, Mus musculus
  siRNA target sequence for Per1 (NM_011065.2,2339-2357).
cgctcgccctggccaataa

SEQ ID NO: 639330 - DNA, 19 bp, Mus musculus
  siRNA target sequence for Per1 (NM_011065.2,2434-2452).
ccggagtcggacatcatca

SEQ ID NO: 639331 - DNA, 19 bp, Mus musculus
  siRNA target sequence for Per1 (NM_011065.2,2435-2453).
cggagtcggacatcatcat

SEQ ID NO: 639332 - DNA, 19 bp, Mus musculus
  siRNA target sequence for Per1 (NM_011065.2,2437-2455).
gagtcggacatcatcatga

SEQ ID NO: 639333 - DNA, 19 bp, Mus musculus
  siRNA target sequence for Per1 (NM_011065.2,2610-2628).
caaccgcttcagagatctt

SEQ ID NO: 639334 - DNA, 19 bp, Mus musculus
  siRNA target sequence for Per1 (NM_011065.2,2711-2729).
gacaccactgccgatctaa

SEQ ID NO: 639335 - DNA, 19 bp, Mus musculus
  siRNA target sequence for Per1 (NM_011065.2,2715-2733).
ccactgccgatctaaagca

SEQ ID NO: 639336 - DNA, 19 bp, Mus musculus
  siRNA target sequence for Per1 (NM_011065.2,2716-2734).
cactgccgatctaaagcaa

SEQ ID NO: 639337 - DNA, 19 bp, Mus musculus
  siRNA target sequence for Per1 (NM_011065.2,2773-2791).
gaaactccctgctatgtct

SEQ ID NO: 639338 - DNA, 19 bp, Mus musculus
  siRNA target sequence for Per1 (NM_011065.2,2981-2999).
ccttggtgctccctaacta

SEQ ID NO: 639339 - DNA, 19 bp, Mus musculus
  siRNA target sequence for Per1 (NM_011065.2,2985-3003).
ggtgctccctaactatcta

SEQ ID NO: 639340 - DNA, 19 bp, Mus musculus
  siRNA target sequence for Per1 (NM_011065.2,3006-3024).
ccctaccccacctagttat

SEQ ID NO: 639341 - DNA, 19 bp, Mus musculus
  siRNA target sequence for Per1 (NM_011065.2,3128-3146).
cagactccccactgttcaa

SEQ ID NO: 639342 - DNA, 19 bp, Mus musculus
  siRNA target sequence for Per1 (NM_011065.2,3497-3515).
gccatacaagcaagtactt

SEQ ID NO: 639343 - DNA, 19 bp, Mus musculus
  siRNA target sequence for Per1 (NM_011065.2,3498-3516).
ccatacaagcaagtacttt

SEQ ID NO: 639344 - DNA, 19 bp, Mus musculus
  siRNA target sequence for Per1 (NM_011065.2,3571-3589).
cctggggaccaggtcatta

SEQ ID NO: 639345 - DNA, 19 bp, Mus musculus
  siRNA target sequence for Per1 (NM_011065.2,3574-3592).
ggggaccaggtcattaagt

SEQ ID NO: 639346 - DNA, 19 bp, Mus musculus
  siRNA target sequence for Per1 (NM_011065.2,3576-3594).
ggaccaggtcattaagtgt

SEQ ID NO: 639347 - DNA, 19 bp, Mus musculus
  siRNA target sequence for Per2 (NM_011066.1,447-465).
caaagctgacgcacacaaa

SEQ ID NO: 639348 - DNA, 19 bp, Mus musculus
  siRNA target sequence for Per2 (NM_011066.1,456-474).
cgcacacaaagaactgata

SEQ ID NO: 639349 - DNA, 19 bp, Mus musculus
  siRNA target sequence for Per2 (NM_011066.1,667-685).
caggttgagggcattacct

SEQ ID NO: 639350 - DNA, 19 bp, Mus musculus
  siRNA target sequence for Per2 (NM_011066.1,676-694).
ggcattacctccgagtata

SEQ ID NO: 639351 - DNA, 19 bp, Mus musculus
  siRNA target sequence for Per2 (NM_011066.1,677-695).
gcattacctccgagtatat

SEQ ID NO: 639352 - DNA, 19 bp, Mus musculus
  siRNA target sequence for Per2 (NM_011066.1,686-704).
ccgagtatatcgtgaagaa

SEQ ID NO: 639353 - DNA, 19 bp, Mus musculus
  siRNA target sequence for Per2 (NM_011066.1,697-715).
gtgaagaacgcggatatgt

SEQ ID NO: 639354 - DNA, 19 bp, Mus musculus
  siRNA target sequence for Per2 (NM_011066.1,699-717).
gaagaacgcggatatgttt

SEQ ID NO: 639355 - DNA, 19 bp, Mus musculus
  siRNA target sequence for Per2 (NM_011066.1,860-878).
gctacaccaccccttacaa

SEQ ID NO: 639356 - DNA, 19 bp, Mus musculus
  siRNA target sequence for Per2 (NM_011066.1,897-915).
gtgcagcggcttagattct

SEQ ID NO: 639357 - DNA, 19 bp, Mus musculus
  siRNA target sequence for Per2 (NM_011066.1,899-917).
gcagcggcttagattcttt

SEQ ID NO: 639358 - DNA, 19 bp, Mus musculus
  siRNA target sequence for Per2 (NM_011066.1,903-921).
cggcttagattctttcact

SEQ ID NO: 639359 - DNA, 19 bp, Mus musculus
  siRNA target sequence for Per2 (NM_011066.1,1097-1115).
gctatgaagcgcctagaat

SEQ ID NO: 639360 - DNA, 19 bp, Mus musculus
  siRNA target sequence for Per2 (NM_011066.1,1191-1209).
ccccctcctgggctatcta

SEQ ID NO: 639361 - DNA, 19 bp, Mus musculus
  siRNA target sequence for Per2 (NM_011066.1,1273-1291).
ctcgccatccacaagaaga

SEQ ID NO: 639362 - DNA, 19 bp, Mus musculus
  siRNA target sequence for Per2 (NM_011066.1,1302-1320).
cggtggacagcctttcgat

SEQ ID NO: 639363 - DNA, 19 bp, Mus musculus
  siRNA target sequence for Per2 (NM_011066.1,1304-1322).
gtggacagcctttcgatta

SEQ ID NO: 639364 - DNA, 19 bp, Mus musculus
  siRNA target sequence for Per2 (NM_011066.1,1318-1336).
gattattctcccattcgat

SEQ ID NO: 639365 - DNA, 19 bp, Mus musculus
  siRNA target sequence for Per2 (NM_011066.1,1343-1361).
cccgcaacggggagtacat

SEQ ID NO: 639366 - DNA, 19 bp, Mus musculus
  siRNA target sequence for Per2 (NM_011066.1,1345-1363).
cgcaacggggagtacatca

SEQ ID NO: 639367 - DNA, 19 bp, Mus musculus
  siRNA target sequence for Per2 (NM_011066.1,1396-1414).
ccgtggagcaggaagatat

SEQ ID NO: 639368 - DNA, 19 bp, Mus musculus
  siRNA target sequence for Per2 (NM_011066.1,1406-1424).
ggaagatatctttcatcat

SEQ ID NO: 639369 - DNA, 19 bp, Mus musculus
  siRNA target sequence for Per2 (NM_011066.1,1440-1458).
cagggtaggccctttgaat

SEQ ID NO: 639370 - DNA, 19 bp, Mus musculus
  siRNA target sequence for Per2 (NM_011066.1,1442-1460).
gggtaggccctttgaatga

SEQ ID NO: 639371 - DNA, 19 bp, Mus musculus
  siRNA target sequence for Per2 (NM_011066.1,1618-1636).
ctcatgagccagacatcat

SEQ ID NO: 639372 - DNA, 19 bp, Mus musculus
  siRNA target sequence for Per2 (NM_011066.1,1673-1691).
ggagatccggaatttttaa

SEQ ID NO: 639373 - DNA, 19 bp, Mus musculus
  siRNA target sequence for Per2 (NM_011066.1,1674-1692).
gagatccggaatttttaaa

SEQ ID NO: 639374 - DNA, 19 bp, Mus musculus
  siRNA target sequence for Per2 (NM_011066.1,1713-1731).
caaaagtcacgtttctcat

SEQ ID NO: 639375 - DNA, 19 bp, Mus musculus
  siRNA target sequence for Per2 (NM_011066.1,1754-1772).
catctgttgcagaaatgca

SEQ ID NO: 639376 - DNA, 19 bp, Mus musculus
  siRNA target sequence for Per2 (NM_011066.1,1856-1874).
cagaggaactagcctataa

SEQ ID NO: 639377 - DNA, 19 bp, Mus musculus
  siRNA target sequence for Per2 (NM_011066.1,1858-1876).
gaggaactagcctataaga

SEQ ID NO: 639378 - DNA, 19 bp, Mus musculus
  siRNA target sequence for Per2 (NM_011066.1,2164-2182).
gtgcatgtgggcgacaaaa

SEQ ID NO: 639379 - DNA, 19 bp, Mus musculus
  siRNA target sequence for Per2 (NM_011066.1,2196-2214).
gctagagacggtagaagat

SEQ ID NO: 639380 - DNA, 19 bp, Mus musculus
  siRNA target sequence for Per2 (NM_011066.1,2197-2215).
ctagagacggtagaagata

SEQ ID NO: 639381 - DNA, 19 bp, Mus musculus
  siRNA target sequence for Per2 (NM_011066.1,2387-2405).
ctcactgccagaactatct

SEQ ID NO: 639382 - DNA, 19 bp, Mus musculus
  siRNA target sequence for Per2 (NM_011066.1,2432-2450).
gtgatcgaggactaagaaa

SEQ ID NO: 639383 - DNA, 19 bp, Mus musculus
  siRNA target sequence for Per2 (NM_011066.1,2434-2452).
gatcgaggactaagaaata

SEQ ID NO: 639384 - DNA, 19 bp, Mus musculus
  siRNA target sequence for Per2 (NM_011066.1,2685-2703).
ccaggcacccggaatagta

SEQ ID NO: 639385 - DNA, 19 bp, Mus musculus
  siRNA target sequence for Per2 (NM_011066.1,2686-2704).
caggcacccggaatagtat

SEQ ID NO: 639386 - DNA, 19 bp, Mus musculus
  siRNA target sequence for Per2 (NM_011066.1,2931-2949).
cacacttgcctccgaaata

SEQ ID NO: 639387 - DNA, 19 bp, Mus musculus
  siRNA target sequence for Per2 (NM_011066.1,3080-3098).
gcagtagtcccctacaact

SEQ ID NO: 639388 - DNA, 19 bp, Mus musculus
  siRNA target sequence for Per2 (NM_011066.1,3081-3099).
cagtagtcccctacaactt

SEQ ID NO: 639389 - DNA, 19 bp, Mus musculus
  siRNA target sequence for Per2 (NM_011066.1,3083-3101).
gtagtcccctacaacttaa

SEQ ID NO: 639390 - DNA, 19 bp, Mus musculus
  siRNA target sequence for Per2 (NM_011066.1,3086-3104).
gtcccctacaacttaacct

SEQ ID NO: 639391 - DNA, 19 bp, Mus musculus
  siRNA target sequence for Per2 (NM_011066.1,3334-3352).
ggctcagccctgtctagaa

SEQ ID NO: 639392 - DNA, 19 bp, Mus musculus
  siRNA target sequence for Per2 (NM_011066.1,3465-3483).
cattgactcttcagagaat

SEQ ID NO: 639393 - DNA, 19 bp, Mus musculus
  siRNA target sequence for Per2 (NM_011066.1,3516-3534).
ggaaagcgagcagttcatt

SEQ ID NO: 639394 - DNA, 19 bp, Mus musculus
  siRNA target sequence for Per2 (NM_011066.1,3517-3535).
gaaagcgagcagttcatta

SEQ ID NO: 639395 - DNA, 19 bp, Mus musculus
  siRNA target sequence for Per2 (NM_011066.1,3521-3539).
gcgagcagttcattaagta

SEQ ID NO: 639396 - DNA, 19 bp, Mus musculus
  siRNA target sequence for Per2 (NM_011066.1,3578-3596).
cagacgacagcatcatgat

SEQ ID NO: 639397 - DNA, 19 bp, Mus musculus
  siRNA target sequence for Per3 (NM_011067.1,525-543).
ggttgtccaagaaatgaaa

SEQ ID NO: 639398 - DNA, 19 bp, Mus musculus
  siRNA target sequence for Per3 (NM_011067.1,526-544).
gttgtccaagaaatgaaaa

SEQ ID NO: 639399 - DNA, 19 bp, Mus musculus
  siRNA target sequence for Per3 (NM_011067.1,554-572).
cagccgagaggcacactaa

SEQ ID NO: 639400 - DNA, 19 bp, Mus musculus
  siRNA target sequence for Per3 (NM_011067.1,578-596).
gtaccctagatgctcttaa

SEQ ID NO: 639401 - DNA, 19 bp, Mus musculus
  siRNA target sequence for Per3 (NM_011067.1,581-599).
ccctagatgctcttaacta

SEQ ID NO: 639402 - DNA, 19 bp, Mus musculus
  siRNA target sequence for Per3 (NM_011067.1,624-642).
gcaagcaaacagtgacttt

SEQ ID NO: 639403 - DNA, 19 bp, Mus musculus
  siRNA target sequence for Per3 (NM_011067.1,718-736).
gcttctgaacatacttcta

SEQ ID NO: 639404 - DNA, 19 bp, Mus musculus
  siRNA target sequence for Per3 (NM_011067.1,719-737).
cttctgaacatacttctaa

SEQ ID NO: 639405 - DNA, 19 bp, Mus musculus
  siRNA target sequence for Per3 (NM_011067.1,734-752).
ctaagaacacagatacctt

SEQ ID NO: 639406 - DNA, 19 bp, Mus musculus
  siRNA target sequence for Per3 (NM_011067.1,782-800).
ggttagtgcacatttctga

SEQ ID NO: 639407 - DNA, 19 bp, Mus musculus
  siRNA target sequence for Per3 (NM_011067.1,1037-1055).
ggatcctcccctatttggt

SEQ ID NO: 639408 - DNA, 19 bp, Mus musculus
  siRNA target sequence for Per3 (NM_011067.1,1038-1056).
gatcctcccctatttggtt

SEQ ID NO: 639409 - DNA, 19 bp, Mus musculus
  siRNA target sequence for Per3 (NM_011067.1,1044-1062).
cccctatttggttcatgta

SEQ ID NO: 639410 - DNA, 19 bp, Mus musculus
  siRNA target sequence for Per3 (NM_011067.1,1047-1065).
ctatttggttcatgtacat

SEQ ID NO: 639411 - DNA, 19 bp, Mus musculus
  siRNA target sequence for Per3 (NM_011067.1,1084-1102).
ccagagccttgctgtctaa

SEQ ID NO: 639412 - DNA, 19 bp, Mus musculus
  siRNA target sequence for Per3 (NM_011067.1,1097-1115).
gtctaacactggttgaaaa

SEQ ID NO: 639413 - DNA, 19 bp, Mus musculus
  siRNA target sequence for Per3 (NM_011067.1,1099-1117).
ctaacactggttgaaaaga

SEQ ID NO: 639414 - DNA, 19 bp, Mus musculus
  siRNA target sequence for Per3 (NM_011067.1,1103-1121).
cactggttgaaaagattca

SEQ ID NO: 639415 - DNA, 19 bp, Mus musculus
  siRNA target sequence for Per3 (NM_011067.1,1105-1123).
ctggttgaaaagattcact

SEQ ID NO: 639416 - DNA, 19 bp, Mus musculus
  siRNA target sequence for Per3 (NM_011067.1,1116-1134).
gattcactctggttacgaa

SEQ ID NO: 639417 - DNA, 19 bp, Mus musculus
  siRNA target sequence for Per3 (NM_011067.1,1138-1156).
cctcgaatccctgtagata

SEQ ID NO: 639418 - DNA, 19 bp, Mus musculus
  siRNA target sequence for Per3 (NM_011067.1,1139-1157).
ctcgaatccctgtagataa

SEQ ID NO: 639419 - DNA, 19 bp, Mus musculus
  siRNA target sequence for Per3 (NM_011067.1,1141-1159).
cgaatccctgtagataaaa

SEQ ID NO: 639420 - DNA, 19 bp, Mus musculus
  siRNA target sequence for Per3 (NM_011067.1,1240-1258).
cctcaggatctgattggaa

SEQ ID NO: 639421 - DNA, 19 bp, Mus musculus
  siRNA target sequence for Per3 (NM_011067.1,1251-1269).
gattggaacatcgatctta

SEQ ID NO: 639422 - DNA, 19 bp, Mus musculus
  siRNA target sequence for Per3 (NM_011067.1,1255-1273).
ggaacatcgatcttaacat

SEQ ID NO: 639423 - DNA, 19 bp, Mus musculus
  siRNA target sequence for Per3 (NM_011067.1,1256-1274).
gaacatcgatcttaacata

SEQ ID NO: 639424 - DNA, 19 bp, Mus musculus
  siRNA target sequence for Per3 (NM_011067.1,1259-1277).
catcgatcttaacatactt

SEQ ID NO: 639425 - DNA, 19 bp, Mus musculus
  siRNA target sequence for Per3 (NM_011067.1,1302-1320).
ggttgccatacaccaaaaa

SEQ ID NO: 639426 - DNA, 19 bp, Mus musculus
  siRNA target sequence for Per3 (NM_011067.1,1354-1372).
cactcgcccgtcagattct

SEQ ID NO: 639427 - DNA, 19 bp, Mus musculus
  siRNA target sequence for Per3 (NM_011067.1,1376-1394).
ctcagaacggagagtatgt

SEQ ID NO: 639428 - DNA, 19 bp, Mus musculus
  siRNA target sequence for Per3 (NM_011067.1,1440-1458).
gaaggtctccttcatcatt

SEQ ID NO: 639429 - DNA, 19 bp, Mus musculus
  siRNA target sequence for Per3 (NM_011067.1,1452-1470).
catcattggtcgacataaa

SEQ ID NO: 639430 - DNA, 19 bp, Mus musculus
  siRNA target sequence for Per3 (NM_011067.1,1471-1489).
gtccgaacgagtccattaa

SEQ ID NO: 639431 - DNA, 19 bp, Mus musculus
  siRNA target sequence for Per3 (NM_011067.1,1473-1491).
ccgaacgagtccattaaat

SEQ ID NO: 639432 - DNA, 19 bp, Mus musculus
  siRNA target sequence for Per3 (NM_011067.1,1475-1493).
gaacgagtccattaaatga

SEQ ID NO: 639433 - DNA, 19 bp, Mus musculus
  siRNA target sequence for Per3 (NM_011067.1,1498-1516).
gtttttgccaccagaataa

SEQ ID NO: 639434 - DNA, 19 bp, Mus musculus
  siRNA target sequence for Per3 (NM_011067.1,1523-1541).
cagccagtaacgacaaaga

SEQ ID NO: 639435 - DNA, 19 bp, Mus musculus
  siRNA target sequence for Per3 (NM_011067.1,1525-1543).
gccagtaacgacaaagaca

SEQ ID NO: 639436 - DNA, 19 bp, Mus musculus
  siRNA target sequence for Per3 (NM_011067.1,1526-1544).
ccagtaacgacaaagacat

SEQ ID NO: 639437 - DNA, 19 bp, Mus musculus
  siRNA target sequence for Per3 (NM_011067.1,1527-1545).
cagtaacgacaaagacata

SEQ ID NO: 639438 - DNA, 19 bp, Mus musculus
  siRNA target sequence for Per3 (NM_011067.1,1940-1958).
cgtcctatcagcagatgaa

SEQ ID NO: 639439 - DNA, 19 bp, Mus musculus
  siRNA target sequence for Per3 (NM_011067.1,2252-2270).
ccctacagtcagaaagtgt

SEQ ID NO: 639440 - DNA, 19 bp, Mus musculus
  siRNA target sequence for Per3 (NM_011067.1,2253-2271).
cctacagtcagaaagtgtt

SEQ ID NO: 639441 - DNA, 19 bp, Mus musculus
  siRNA target sequence for Per3 (NM_011067.1,2401-2419).
gacaggttccgggaaaaga

SEQ ID NO: 639442 - DNA, 19 bp, Mus musculus
  siRNA target sequence for Per3 (NM_011067.1,2427-2445).
ctcgccctacggttgctat

SEQ ID NO: 639443 - DNA, 19 bp, Mus musculus
  siRNA target sequence for Per3 (NM_011067.1,2430-2448).
gccctacggttgctatctt

SEQ ID NO: 639444 - DNA, 19 bp, Mus musculus
  siRNA target sequence for Per3 (NM_011067.1,2665-2683).
ctcggcgcaggcttagcat

SEQ ID NO: 639445 - DNA, 19 bp, Mus musculus
  siRNA target sequence for Per3 (NM_011067.1,2732-2750).
cttttcccctccaagatat

SEQ ID NO: 639446 - DNA, 19 bp, Mus musculus
  siRNA target sequence for Per3 (NM_011067.1,3058-3076).
gagcttccgttcattagct

SEQ ID NO: 639447 - DNA, 19 bp, Mus musculus
  siRNA target sequence for Per3 (NM_011067.1,3083-3101).
gcagttcaccgttacagtt

SEQ ID NO: 639448 - DNA, 19 bp, Mus musculus
  siRNA target sequence for Per3 (NM_011067.1,3084-3102).
cagttcaccgttacagtta

SEQ ID NO: 639449 - DNA, 19 bp, Mus musculus
  siRNA target sequence for Per3 (NM_011067.1,3086-3104).
gttcaccgttacagttaaa

SEQ ID NO: 639450 - DNA, 19 bp, Mus musculus
  siRNA target sequence for Per3 (NM_011067.1,3303-3321).
cttcagtagcactgactat

SEQ ID NO: 639451 - DNA, 19 bp, Mus musculus
  siRNA target sequence for Per3 (NM_011067.1,3397-3415).
gagtccatctggagaatga

SEQ ID NO: 639452 - DNA, 19 bp, Mus musculus
  siRNA target sequence for Per3 (NM_011067.1,3399-3417).
gtccatctggagaatgata

SEQ ID NO: 639453 - DNA, 19 bp, Mus musculus
  siRNA target sequence for Per3 (NM_011067.1,3401-3419).
ccatctggagaatgataga

SEQ ID NO: 639454 - DNA, 19 bp, Mus musculus
  siRNA target sequence for Rgs1 (NM_015811.1,60-78).
ctagcccaaaggattcgaa

SEQ ID NO: 639455 - DNA, 19 bp, Mus musculus
  siRNA target sequence for Rgs1 (NM_015811.1,93-111).
ctcttctagacgacaaaaa

SEQ ID NO: 639456 - DNA, 19 bp, Mus musculus
  siRNA target sequence for Rgs1 (NM_015811.1,138-156).
gaatggacgtgaaaacata

SEQ ID NO: 639457 - DNA, 19 bp, Mus musculus
  siRNA target sequence for Rgs1 (NM_015811.1,179-197).
ctggaatctgggatgaaat

SEQ ID NO: 639458 - DNA, 19 bp, Mus musculus
  siRNA target sequence for Rgs1 (NM_015811.1,198-216).
cggccaagtccaaagacat

SEQ ID NO: 639459 - DNA, 19 bp, Mus musculus
  siRNA target sequence for Rgs1 (NM_015811.1,270-288).
ccaaccagacaggtcaaaa

SEQ ID NO: 639460 - DNA, 19 bp, Mus musculus
  siRNA target sequence for Rgs1 (NM_015811.1,271-289).
caaccagacaggtcaaaat

SEQ ID NO: 639461 - DNA, 19 bp, Mus musculus
  siRNA target sequence for Rgs1 (NM_015811.1,371-389).
gagactgatcttttgcata

SEQ ID NO: 639462 - DNA, 19 bp, Mus musculus
  siRNA target sequence for Rgs1 (NM_015811.1,431-449).
gctgtgaaacaaatcaata

SEQ ID NO: 639463 - DNA, 19 bp, Mus musculus
  siRNA target sequence for Rgs1 (NM_015811.1,518-536).
gcacaaaaagtcatatatt

SEQ ID NO: 639464 - DNA, 19 bp, Mus musculus
  siRNA target sequence for Rgs10 (NM_026418.1,141-159).
ggccaccagagccttaaga

SEQ ID NO: 639465 - DNA, 19 bp, Mus musculus
  siRNA target sequence for Rgs10 (NM_026418.1,205-223).
cagaaggggtgcagagatt

SEQ ID NO: 639466 - DNA, 19 bp, Mus musculus
  siRNA target sequence for Rgs10 (NM_026418.1,207-225).
gaaggggtgcagagattca

SEQ ID NO: 639467 - DNA, 19 bp, Mus musculus
  siRNA target sequence for Rgs10 (NM_026418.1,220-238).
gattcagggagtttctgaa

SEQ ID NO: 639468 - DNA, 19 bp, Mus musculus
  siRNA target sequence for Rgs10 (NM_026418.1,251-269).
cgaagagaatgtcttgttt

SEQ ID NO: 639469 - DNA, 19 bp, Mus musculus
  siRNA target sequence for Rgs10 (NM_026418.1,394-412).
ctcggctcactgaaaagat

SEQ ID NO: 639470 - DNA, 19 bp, Mus musculus
  siRNA target sequence for Rgs10 (NM_026418.1,579-597).
cgagcctccagaatttaca

SEQ ID NO: 639471 - DNA, 19 bp, Mus musculus
  siRNA target sequence for Rgs16 (NM_011267.1,180-198).
gacgcggctgggaatcttt

SEQ ID NO: 639472 - DNA, 19 bp, Mus musculus
  siRNA target sequence for Rgs16 (NM_011267.1,223-241).
gatactgggggtattagca

SEQ ID NO: 639473 - DNA, 19 bp, Mus musculus
  siRNA target sequence for Rgs16 (NM_011267.1,227-245).
ctgggggtattagcaaatt

SEQ ID NO: 639474 - DNA, 19 bp, Mus musculus
  siRNA target sequence for Rgs16 (NM_011267.1,251-269).
gggccagtaagcataacaa

SEQ ID NO: 639475 - DNA, 19 bp, Mus musculus
  siRNA target sequence for Rgs16 (NM_011267.1,363-381).
cctaaagacggaattcagt

SEQ ID NO: 639476 - DNA, 19 bp, Mus musculus
  siRNA target sequence for Rgs16 (NM_011267.1,452-470).
ccagggctcaccacatctt

SEQ ID NO: 639477 - DNA, 19 bp, Mus musculus
  siRNA target sequence for Rgs16 (NM_011267.1,453-471).
cagggctcaccacatcttt

SEQ ID NO: 639478 - DNA, 19 bp, Mus musculus
  siRNA target sequence for Rgs17 (NM_019958.1,151-169).
ggcagcagtcacaaaatga

SEQ ID NO: 639479 - DNA, 19 bp, Mus musculus
  siRNA target sequence for Rgs17 (NM_019958.1,204-222).
caaaggcccaacaatacct

SEQ ID NO: 639480 - DNA, 19 bp, Mus musculus
  siRNA target sequence for Rgs17 (NM_019958.1,377-395).
gtcctggtctcagaatttt

SEQ ID NO: 639481 - DNA, 19 bp, Mus musculus
  siRNA target sequence for Rgs17 (NM_019958.1,387-405).
cagaattttgacaagatga

SEQ ID NO: 639482 - DNA, 19 bp, Mus musculus
  siRNA target sequence for Rgs17 (NM_019958.1,541-559).
ggatgatatacgaggatta

SEQ ID NO: 639483 - DNA, 19 bp, Mus musculus
  siRNA target sequence for Rgs17 (NM_019958.1,545-563).
gatatacgaggattacatt

SEQ ID NO: 639484 - DNA, 19 bp, Mus musculus
  siRNA target sequence for Rgs17 (NM_019958.1,590-608).
cctggattctcgagttaga

SEQ ID NO: 639485 - DNA, 19 bp, Mus musculus
  siRNA target sequence for Rgs17 (NM_019958.1,601-619).
gagttagagaggtgatcaa

SEQ ID NO: 639486 - DNA, 19 bp, Mus musculus
  siRNA target sequence for Rgs17 (NM_019958.1,603-621).
gttagagaggtgatcaaca

SEQ ID NO: 639487 - DNA, 19 bp, Mus musculus
  siRNA target sequence for Rgs17 (NM_019958.1,718-736).
cacagatctataaagcttt

SEQ ID NO: 639488 - DNA, 19 bp, Mus musculus
  siRNA target sequence for Rgs2 (NM_009061.2,136-154).
cggacactcttaaaggatt

SEQ ID NO: 639489 - DNA, 19 bp, Mus musculus
  siRNA target sequence for Rgs2 (NM_009061.2,289-307).
gaactgctggccagtaaat

SEQ ID NO: 639490 - DNA, 19 bp, Mus musculus
  siRNA target sequence for Rgs2 (NM_009061.2,317-335).
ctgcattcagggcgttttt

SEQ ID NO: 639491 - DNA, 19 bp, Mus musculus
  siRNA target sequence for Rgs2 (NM_009061.2,463-481).
gctcccaaagagataaaca

SEQ ID NO: 639492 - DNA, 19 bp, Mus musculus
  siRNA target sequence for Rgs2 (NM_009061.2,480-498).
catagacttccaaacgaaa

SEQ ID NO: 639493 - DNA, 19 bp, Mus musculus
  siRNA target sequence for Rgs2 (NM_009061.2,500-518).
ctctgattgcccaaaatat

SEQ ID NO: 639494 - DNA, 19 bp, Mus musculus
  siRNA target sequence for Rgs2 (NM_009061.2,610-628).
gaattctaccaggacttat

SEQ ID NO: 639495 - DNA, 19 bp, Mus musculus
  siRNA target sequence for Rgs2 (NM_009061.2,615-633).
ctaccaggacttatgtaaa

SEQ ID NO: 639496 - DNA, 19 bp, Mus musculus
  siRNA target sequence for Rgs20 (NM_021374.1,379-397).
gggcccagtcttttgataa

SEQ ID NO: 639497 - DNA, 19 bp, Mus musculus
  siRNA target sequence for Rgs20 (NM_021374.1,382-400).
cccagtcttttgataacct

SEQ ID NO: 639498 - DNA, 19 bp, Mus musculus
  siRNA target sequence for Rgs20 (NM_021374.1,411-429).
ccagccggaagaaatgcat

SEQ ID NO: 639499 - DNA, 19 bp, Mus musculus
  siRNA target sequence for Rgs20 (NM_021374.1,434-452).
ggaatttcttcgaacagaa

SEQ ID NO: 639500 - DNA, 19 bp, Mus musculus
  siRNA target sequence for Rgs20 (NM_021374.1,435-453).
gaatttcttcgaacagaat

SEQ ID NO: 639501 - DNA, 19 bp, Mus musculus
  siRNA target sequence for Rgs20 (NM_021374.1,478-496).
ggatggcctgtgaagaact

SEQ ID NO: 639502 - DNA, 19 bp, Mus musculus
  siRNA target sequence for Rgs20 (NM_021374.1,497-515).
gaaaagggaagctaataaa

SEQ ID NO: 639503 - DNA, 19 bp, Mus musculus
  siRNA target sequence for Rgs20 (NM_021374.1,528-546).
gagaaagcaaggataatct

SEQ ID NO: 639504 - DNA, 19 bp, Mus musculus
  siRNA target sequence for Rgs20 (NM_021374.1,595-613).
cccgagtacgagaggttat

SEQ ID NO: 639505 - DNA, 19 bp, Mus musculus
  siRNA target sequence for Rgs20 (NM_021374.1,597-615).
cgagtacgagaggttatca

SEQ ID NO: 639506 - DNA, 19 bp, Mus musculus
  siRNA target sequence for Rgs20 (NM_021374.1,600-618).
gtacgagaggttatcaaca

SEQ ID NO: 639507 - DNA, 19 bp, Mus musculus
  siRNA target sequence for Rgs20 (NM_021374.1,634-652).
catcccagcacatattcga

SEQ ID NO: 639508 - DNA, 19 bp, Mus musculus
  siRNA target sequence for Rgs20 (NM_021374.1,715-733).
ccacagtctataaggattt

SEQ ID NO: 639509 - DNA, 19 bp, Mus musculus
  siRNA target sequence for Rgs20 (NM_021374.1,720-738).
gtctataaggatttgctta

SEQ ID NO: 639510 - DNA, 19 bp, Mus musculus
  siRNA target sequence for Rgs20 (NM_021374.1,742-760).
ccttagctgagaaaacagt

SEQ ID NO: 639511 - DNA, 19 bp, Mus musculus
  siRNA target sequence for Rgs3 (NM_019492.1,676-694).
gatcagtggctggtactat

SEQ ID NO: 639512 - DNA, 19 bp, Mus musculus
  siRNA target sequence for Rgs3 (NM_019492.1,940-958).
cacagtgctacaactgaat

SEQ ID NO: 639513 - DNA, 19 bp, Mus musculus
  siRNA target sequence for Rgs3 (NM_019492.1,944-962).
gtgctacaactgaatgaga

SEQ ID NO: 639514 - DNA, 19 bp, Mus musculus
  siRNA target sequence for Rgs3 (NM_019492.1,1011-1029).
gctgtcctagcgagatcat

SEQ ID NO: 639515 - DNA, 19 bp, Mus musculus
  siRNA target sequence for Rgs3 (NM_019492.1,1373-1391).
gtgtaccaggaggatacaa

SEQ ID NO: 639516 - DNA, 19 bp, Mus musculus
  siRNA target sequence for Rgs3 (NM_019492.1,1397-1415).
gaagaaccggggactacta

SEQ ID NO: 639517 - DNA, 19 bp, Mus musculus
  siRNA target sequence for Rgs3 (NM_019492.1,1400-1418).
gaaccggggactactacta

SEQ ID NO: 639518 - DNA, 19 bp, Mus musculus
  siRNA target sequence for Rgs3 (NM_019492.1,1413-1431).
ctactaaagggaaatcgta

SEQ ID NO: 639519 - DNA, 19 bp, Mus musculus
  siRNA target sequence for Rgs3 (NM_019492.1,1741-1759).
ctgcgacgtcctgagaaat

SEQ ID NO: 639520 - DNA, 19 bp, Mus musculus
  siRNA target sequence for Rgs3 (NM_019492.1,1840-1858).
ggcagagtgcttattcact

SEQ ID NO: 639521 - DNA, 19 bp, Mus musculus
  siRNA target sequence for Rgs3 (NM_019492.1,1899-1917).
ggtgcctgtcggagaacat

SEQ ID NO: 639522 - DNA, 19 bp, Mus musculus
  siRNA target sequence for Rgs4 (NM_009062.2,220-238).
gaaggacaaagtagtaact

SEQ ID NO: 639523 - DNA, 19 bp, Mus musculus
  siRNA target sequence for Rgs4 (NM_009062.2,246-264).
gggtaagccaagaagaagt

SEQ ID NO: 639524 - DNA, 19 bp, Mus musculus
  siRNA target sequence for Rgs4 (NM_009062.2,273-291).
gggctgaatcgttggaaaa

SEQ ID NO: 639525 - DNA, 19 bp, Mus musculus
  siRNA target sequence for Rgs4 (NM_009062.2,276-294).
ctgaatcgttggaaaacct

SEQ ID NO: 639526 - DNA, 19 bp, Mus musculus
  siRNA target sequence for Rgs4 (NM_009062.2,292-310).
cctgattcaccatgaatgt

SEQ ID NO: 639527 - DNA, 19 bp, Mus musculus
  siRNA target sequence for Rgs4 (NM_009062.2,454-472).
ctcagtgcaagcaacaaaa

SEQ ID NO: 639528 - DNA, 19 bp, Mus musculus
  siRNA target sequence for Rgs4 (NM_009062.2,503-521).
gagacaagccggaacatgt

SEQ ID NO: 639529 - DNA, 19 bp, Mus musculus
  siRNA target sequence for Rgs4 (NM_009062.2,507-525).
caagccggaacatgttaca

SEQ ID NO: 639530 - DNA, 19 bp, Mus musculus
  siRNA target sequence for Rgs4 (NM_009062.2,528-546).
ccacaataacctgttttga

SEQ ID NO: 639531 - DNA, 19 bp, Mus musculus
  siRNA target sequence for Rgs4 (NM_009062.2,601-619).
cctcaagtctcgattctat

SEQ ID NO: 639532 - DNA, 19 bp, Mus musculus
  siRNA target sequence for Rgs5 (NM_009063.2,298-316).
ggatttgccagcttcaaaa

SEQ ID NO: 639533 - DNA, 19 bp, Mus musculus
  siRNA target sequence for Rgs5 (NM_009063.2,361-379).
gttgcctgtgagaattaca

SEQ ID NO: 639534 - DNA, 19 bp, Mus musculus
  siRNA target sequence for Rgs5 (NM_009063.2,364-382).
gcctgtgagaattacaaga

SEQ ID NO: 639535 - DNA, 19 bp, Mus musculus
  siRNA target sequence for Rgs5 (NM_009063.2,468-486).
cattgaccacttcactaaa

SEQ ID NO: 639536 - DNA, 19 bp, Mus musculus
  siRNA target sequence for Rgs5 (NM_009063.2,472-490).
gaccacttcactaaagaca

SEQ ID NO: 639537 - DNA, 19 bp, Mus musculus
  siRNA target sequence for Rgs5 (NM_009063.2,537-555).
ggcccagaaaaggatctat

SEQ ID NO: 639538 - DNA, 19 bp, Mus musculus
  siRNA target sequence for Rgs5 (NM_009063.2,583-601).
cgctttgtgcgctctgaat

SEQ ID NO: 639539 - DNA, 19 bp, Mus musculus
  siRNA target sequence for Rgs5 (NM_009063.2,584-602).
gctttgtgcgctctgaatt

SEQ ID NO: 639540 - DNA, 19 bp, Mus musculus
  siRNA target sequence for Rgs5 (NM_009063.2,589-607).
gtgcgctctgaattttata

SEQ ID NO: 639541 - DNA, 19 bp, Mus musculus
  siRNA target sequence for Sitpec (NM_012029.1,642-660).
gcgcaagatgccagagttt

SEQ ID NO: 639542 - DNA, 19 bp, Mus musculus
  siRNA target sequence for Sitpec (NM_012029.1,667-685).
gagcgggacttgtcagtat

SEQ ID NO: 639543 - DNA, 19 bp, Mus musculus
  siRNA target sequence for Sitpec (NM_012029.1,670-688).
cgggacttgtcagtataca

SEQ ID NO: 639544 - DNA, 19 bp, Mus musculus
  siRNA target sequence for Sitpec (NM_012029.1,671-689).
gggacttgtcagtatacaa

SEQ ID NO: 639545 - DNA, 19 bp, Mus musculus
  siRNA target sequence for Sitpec (NM_012029.1,872-890).
gttaccccatgctcaagtt

SEQ ID NO: 639546 - DNA, 19 bp, Mus musculus
  siRNA target sequence for Sitpec (NM_012029.1,939-957).
cccagtgccccgagatctt

SEQ ID NO: 639547 - DNA, 19 bp, Mus musculus
  siRNA target sequence for Sitpec (NM_012029.1,1140-1158).
cccatccaggcctgttttt

SEQ ID NO: 639548 - DNA, 19 bp, Mus musculus
  siRNA target sequence for Sitpec (NM_012029.1,1142-1160).
catccaggcctgtttttgt

SEQ ID NO: 639549 - DNA, 19 bp, Mus musculus
  siRNA target sequence for Sitpec (NM_012029.1,1174-1192).
cctctctggcttcgtaata

SEQ ID NO: 639550 - DNA, 19 bp, Mus musculus
  siRNA target sequence for Sitpec (NM_012029.1,1175-1193).
ctctctggcttcgtaataa

SEQ ID NO: 639551 - DNA, 19 bp, Mus musculus
  siRNA target sequence for Sitpec (NM_012029.1,1177-1195).
ctctggcttcgtaataagt

SEQ ID NO: 639552 - DNA, 19 bp, Mus musculus
  siRNA target sequence for Sitpec (NM_012029.1,1198-1216).
gtctactatcacatcctaa

SEQ ID NO: 639553 - DNA, 19 bp, Mus musculus
  siRNA target sequence for Sitpec (NM_012029.1,1316-1334).
gtggttgggacgactatga

SEQ ID NO: 639554 - DNA, 19 bp, Mus musculus
  siRNA target sequence for Sitpec (NM_012029.1,1318-1336).
ggttgggacgactatgagt

SEQ ID NO: 639555 - DNA, 19 bp, Mus musculus
  siRNA target sequence for Sitpec (NM_012029.1,1391-1409).
cccatgatcaggcaacatt

SEQ ID NO: 639556 - DNA, 19 bp, Mus musculus
  siRNA target sequence for Sitpec (NM_012029.1,1492-1510).
ggggagctcctgacaactt

SEQ ID NO: 639557 - DNA, 19 bp, Mus musculus
  siRNA target sequence for Wnt1 (NM_021279.1,370-388).
ctgcccagctgggtttcta

SEQ ID NO: 639558 - DNA, 19 bp, Mus musculus
  siRNA target sequence for Wnt1 (NM_021279.1,1185-1203).
gctgtgcgagagtgcaaat

SEQ ID NO: 639559 - DNA, 19 bp, Mus musculus
  siRNA target sequence for Wnt1 (NM_021279.1,1858-1876).
gagaaacagcgttcatctt

SEQ ID NO: 639560 - DNA, 19 bp, Mus musculus
  siRNA target sequence for Wnt1 (NM_021279.1,2807-2825).
ctcacgacctcgtctactt

SEQ ID NO: 639561 - DNA, 19 bp, Mus musculus
  siRNA target sequence for Wnt10a (NM_009518.1,1028-1046).
cttcagccgaggttttcga

SEQ ID NO: 639562 - DNA, 19 bp, Mus musculus
  siRNA target sequence for Wnt10a (NM_009518.1,1661-1679).
ctccgacctggtctacttt

SEQ ID NO: 639563 - DNA, 19 bp, Mus musculus
  siRNA target sequence for Wnt10a (NM_009518.1,1663-1681).
ccgacctggtctactttga

SEQ ID NO: 639564 - DNA, 19 bp, Mus musculus
  siRNA target sequence for Wnt10b (NM_011718.1,400-418).
cagtcgggctctaagcaat

SEQ ID NO: 639565 - DNA, 19 bp, Mus musculus
  siRNA target sequence for Wnt10b (NM_011718.1,404-422).
cgggctctaagcaatgaga

SEQ ID NO: 639566 - DNA, 19 bp, Mus musculus
  siRNA target sequence for Wnt10b (NM_011718.1,1008-1026).
gaatgcggatccacaacaa

SEQ ID NO: 639567 - DNA, 19 bp, Mus musculus
  siRNA target sequence for Wnt10b (NM_011718.1,1058-1076).
ctgaagcggaagtgcaaat

SEQ ID NO: 639568 - DNA, 19 bp, Mus musculus
  siRNA target sequence for Wnt10b (NM_011718.1,1166-1184).
ctgagcagagccatcttta

SEQ ID NO: 639569 - DNA, 19 bp, Mus musculus
  siRNA target sequence for Wnt10b (NM_011718.1,1170-1188).
gcagagccatctttatcga

SEQ ID NO: 639570 - DNA, 19 bp, Mus musculus
  siRNA target sequence for Wnt10b (NM_011718.1,1171-1189).
cagagccatctttatcgat

SEQ ID NO: 639571 - DNA, 19 bp, Mus musculus
  siRNA target sequence for Wnt11 (NM_009519.1,331-349).
gtgtgctatggcatcaagt

SEQ ID NO: 639572 - DNA, 19 bp, Mus musculus
  siRNA target sequence for Wnt11 (NM_009519.1,790-808).
gctcctatgaaggtgaaaa

SEQ ID NO: 639573 - DNA, 19 bp, Mus musculus
  siRNA target sequence for Wnt11 (NM_009519.1,791-809).
ctcctatgaaggtgaaaaa

SEQ ID NO: 639574 - DNA, 19 bp, Mus musculus
  siRNA target sequence for Wnt11 (NM_009519.1,812-830).
caggatcccaagccaataa

SEQ ID NO: 639575 - DNA, 19 bp, Mus musculus
  siRNA target sequence for Wnt11 (NM_009519.1,875-893).
gtgcctccctggaaacgaa

SEQ ID NO: 639576 - DNA, 19 bp, Mus musculus
  siRNA target sequence for Wnt11 (NM_009519.1,1080-1098).
ctcagaacttgtgtatcta

SEQ ID NO: 639577 - DNA, 19 bp, Mus musculus
  siRNA target sequence for Wnt11 (NM_009519.1,1082-1100).
cagaacttgtgtatctaca

SEQ ID NO: 639578 - DNA, 19 bp, Mus musculus
  siRNA target sequence for Wnt16 (NM_053116.2,803-821).
gtggttcagcagaaagttt

SEQ ID NO: 639579 - DNA, 19 bp, Mus musculus
  siRNA target sequence for Wnt16 (NM_053116.2,866-884).
cctgctagccatgaatcta

SEQ ID NO: 639580 - DNA, 19 bp, Mus musculus
  siRNA target sequence for Wnt16 (NM_053116.2,909-927).
gctgtcgccaagttaatgt

SEQ ID NO: 639581 - DNA, 19 bp, Mus musculus
  siRNA target sequence for Wnt16 (NM_053116.2,1099-1117).
ggcagacccccattctcaa

SEQ ID NO: 639582 - DNA, 19 bp, Mus musculus
  siRNA target sequence for Wnt16 (NM_053116.2,1122-1140).
gacttgctgtacgttcata

SEQ ID NO: 639583 - DNA, 19 bp, Mus musculus
  siRNA target sequence for Wnt16 (NM_053116.2,1127-1145).
gctgtacgttcataagtct

SEQ ID NO: 639584 - DNA, 19 bp, Mus musculus
  siRNA target sequence for Wnt16 (NM_053116.2,1156-1174).
gcgtggagaacaagaaact

SEQ ID NO: 639585 - DNA, 19 bp, Mus musculus
  siRNA target sequence for Wnt16 (NM_053116.2,1258-1276).
gctacaacacccatgtagt

SEQ ID NO: 639586 - DNA, 19 bp, Mus musculus
  siRNA target sequence for Wnt16 (NM_053116.2,1326-1344).
cgctgcaggaggtgtgaaa

SEQ ID NO: 639587 - DNA, 19 bp, Mus musculus
  siRNA target sequence for Wnt16 (NM_053116.2,1328-1346).
ctgcaggaggtgtgaaagt

SEQ ID NO: 639588 - DNA, 19 bp, Mus musculus
  siRNA target sequence for Wnt2 (NM_023653.3,367-385).
ggtcctcctccgaagtagt

SEQ ID NO: 639589 - DNA, 19 bp, Mus musculus
  siRNA target sequence for Wnt2 (NM_023653.3,386-404).
cgggaatcggcctttgttt

SEQ ID NO: 639590 - DNA, 19 bp, Mus musculus
  siRNA target sequence for Wnt2 (NM_023653.3,387-405).
gggaatcggcctttgttta

SEQ ID NO: 639591 - DNA, 19 bp, Mus musculus
  siRNA target sequence for Wnt2 (NM_023653.3,540-558).
gcagtgacaatattgacta

SEQ ID NO: 639592 - DNA, 19 bp, Mus musculus
  siRNA target sequence for Wnt2 (NM_023653.3,568-586).
gtttgcccgtgcctttgta

SEQ ID NO: 639593 - DNA, 19 bp, Mus musculus
  siRNA target sequence for Wnt2 (NM_023653.3,659-677).
gctgtaaagcgcttcttga

SEQ ID NO: 639594 - DNA, 19 bp, Mus musculus
  siRNA target sequence for Wnt2 (NM_023653.3,660-678).
ctgtaaagcgcttcttgaa

SEQ ID NO: 639595 - DNA, 19 bp, Mus musculus
  siRNA target sequence for Wnt2 (NM_023653.3,668-686).
cgcttcttgaaacaagaat

SEQ ID NO: 639596 - DNA, 19 bp, Mus musculus
  siRNA target sequence for Wnt2 (NM_023653.3,792-810).
ccatccaggtagtcatgaa

SEQ ID NO: 639597 - DNA, 19 bp, Mus musculus
  siRNA target sequence for Wnt2 (NM_023653.3,833-851).
gtagccaataagaggttta

SEQ ID NO: 639598 - DNA, 19 bp, Mus musculus
  siRNA target sequence for Wnt2 (NM_023653.3,836-854).
gccaataagaggtttaaga

SEQ ID NO: 639599 - DNA, 19 bp, Mus musculus
  siRNA target sequence for Wnt2 (NM_023653.3,1033-1051).
gaccaagtgtgagtgtaaa

SEQ ID NO: 639600 - DNA, 19 bp, Mus musculus
  siRNA target sequence for Wnt2b (NM_009520.2,566-584).
cgtcaccaccgctggaatt

SEQ ID NO: 639601 - DNA, 19 bp, Mus musculus
  siRNA target sequence for Wnt2b (NM_009520.2,647-665).
gcagcgttcgtctatgcta

SEQ ID NO: 639602 - DNA, 19 bp, Mus musculus
  siRNA target sequence for Wnt2b (NM_009520.2,648-666).
cagcgttcgtctatgctat

SEQ ID NO: 639603 - DNA, 19 bp, Mus musculus
  siRNA target sequence for Wnt2b (NM_009520.2,751-769).
cggtcggcaccatgatcaa

SEQ ID NO: 639604 - DNA, 19 bp, Mus musculus
  siRNA target sequence for Wnt2b (NM_009520.2,767-785).
caacgaggggactttgact

SEQ ID NO: 639605 - DNA, 19 bp, Mus musculus
  siRNA target sequence for Wnt2b (NM_009520.2,1111-1129).
cgccacccggactgatctt

SEQ ID NO: 639606 - DNA, 19 bp, Mus musculus
  siRNA target sequence for Wnt2b (NM_009520.2,1113-1131).
ccacccggactgatcttgt

SEQ ID NO: 639607 - DNA, 19 bp, Mus musculus
  siRNA target sequence for Wnt2b (NM_009520.2,1116-1134).
cccggactgatcttgtcta

SEQ ID NO: 639608 - DNA, 19 bp, Mus musculus
  siRNA target sequence for Wnt2b (NM_009520.2,1119-1137).
ggactgatcttgtctactt

SEQ ID NO: 639609 - DNA, 19 bp, Mus musculus
  siRNA target sequence for Wnt2b (NM_009520.2,1120-1138).
gactgatcttgtctacttt

SEQ ID NO: 639610 - DNA, 19 bp, Mus musculus
  siRNA target sequence for Wnt2b (NM_009520.2,1122-1140).
ctgatcttgtctactttga

SEQ ID NO: 639611 - DNA, 19 bp, Mus musculus
  siRNA target sequence for Wnt2b (NM_009520.2,1199-1217).
cgcgtctgcagcaagactt

SEQ ID NO: 639612 - DNA, 19 bp, Mus musculus
  siRNA target sequence for Wnt2b (NM_009520.2,1224-1242).
gaacagatgggtgtgaaat

SEQ ID NO: 639613 - DNA, 19 bp, Mus musculus
  siRNA target sequence for Wnt3 (NM_009521.1,103-121).
ctcgctggctacccaattt

SEQ ID NO: 639614 - DNA, 19 bp, Mus musculus
  siRNA target sequence for Wnt3 (NM_009521.1,214-232).
cgcttctgccgcaattaca

SEQ ID NO: 639615 - DNA, 19 bp, Mus musculus
  siRNA target sequence for Wnt3 (NM_009521.1,215-233).
gcttctgccgcaattacat

SEQ ID NO: 639616 - DNA, 19 bp, Mus musculus
  siRNA target sequence for Wnt3 (NM_009521.1,224-242).
gcaattacatcgagatcat

SEQ ID NO: 639617 - DNA, 19 bp, Mus musculus
  siRNA target sequence for Wnt3 (NM_009521.1,312-330).
gaactgtaccaccatagat

SEQ ID NO: 639618 - DNA, 19 bp, Mus musculus
  siRNA target sequence for Wnt3 (NM_009521.1,463-481).
ggctgtgactcacatcata

SEQ ID NO: 639619 - DNA, 19 bp, Mus musculus
  siRNA target sequence for Wnt3 (NM_009521.1,464-482).
gctgtgactcacatcataa

SEQ ID NO: 639620 - DNA, 19 bp, Mus musculus
  siRNA target sequence for Wnt3 (NM_009521.1,590-608).
cccgctcagctatgaacaa

SEQ ID NO: 639621 - DNA, 19 bp, Mus musculus
  siRNA target sequence for Wnt3 (NM_009521.1,643-661).
gaccacatgcacctaaagt

SEQ ID NO: 639622 - DNA, 19 bp, Mus musculus
  siRNA target sequence for Wnt3 (NM_009521.1,645-663).
ccacatgcacctaaagtgt

SEQ ID NO: 639623 - DNA, 19 bp, Mus musculus
  siRNA target sequence for Wnt3 (NM_009521.1,827-845).
ctaagtacgcgctcttcaa

SEQ ID NO: 639624 - DNA, 19 bp, Mus musculus
  siRNA target sequence for Wnt3 (NM_009521.1,876-894).
cgagaactcccccaacttt

SEQ ID NO: 639625 - DNA, 19 bp, Mus musculus
  siRNA target sequence for Wnt3 (NM_009521.1,877-895).
gagaactcccccaactttt

SEQ ID NO: 639626 - DNA, 19 bp, Mus musculus
  siRNA target sequence for Wnt3 (NM_009521.1,910-928).
gagacgggctcctttggta

SEQ ID NO: 639627 - DNA, 19 bp, Mus musculus
  siRNA target sequence for Wnt3 (NM_009521.1,930-948).
cagggaccggacttgcaat

SEQ ID NO: 639628 - DNA, 19 bp, Mus musculus
  siRNA target sequence for Wnt3 (NM_009521.1,934-952).
gaccggacttgcaatgtca

SEQ ID NO: 639629 - DNA, 19 bp, Mus musculus
  siRNA target sequence for Wnt3a (NM_009522.1,136-154).
ctctcggatacctcttagt

SEQ ID NO: 639630 - DNA, 19 bp, Mus musculus
  siRNA target sequence for Wnt3a (NM_009522.1,298-316).
ggaactacgtggagatcat

SEQ ID NO: 639631 - DNA, 19 bp, Mus musculus
  siRNA target sequence for Wnt3a (NM_009522.1,592-610).
gtagtgaggacattgaatt

SEQ ID NO: 639632 - DNA, 19 bp, Mus musculus
  siRNA target sequence for Wnt3a (NM_009522.1,802-820).
gcaccatcggggatttcct

SEQ ID NO: 639633 - DNA, 19 bp, Mus musculus
  siRNA target sequence for Wnt3a (NM_009522.1,900-918).
ccacgttacacgtacttca

SEQ ID NO: 639634 - DNA, 19 bp, Mus musculus
  siRNA target sequence for Wnt3a (NM_009522.1,901-919).
cacgttacacgtacttcaa

SEQ ID NO: 639635 - DNA, 19 bp, Mus musculus
  siRNA target sequence for Wnt3a (NM_009522.1,951-969).
gaggcctcacccaacttct

SEQ ID NO: 639636 - DNA, 19 bp, Mus musculus
  siRNA target sequence for Wnt3a (NM_009522.1,1025-1043).
gagctcgcatggcatagat

SEQ ID NO: 639637 - DNA, 19 bp, Mus musculus
  siRNA target sequence for Wnt3a (NM_009522.1,1089-1107).
gagcgacggagggagaaat

SEQ ID NO: 639638 - DNA, 19 bp, Mus musculus
  siRNA target sequence for Wnt3a (NM_009522.1,1101-1119).
gagaaatgccactgtgttt

SEQ ID NO: 639639 - DNA, 19 bp, Mus musculus
  siRNA target sequence for Wnt3a (NM_009522.1,1148-1166).
ggagtgcacacgtgtctat

SEQ ID NO: 639640 - DNA, 19 bp, Mus musculus
  siRNA target sequence for Wnt4 (NM_009523.1,166-184).
gagacgtgcgagaaactca

SEQ ID NO: 639641 - DNA, 19 bp, Mus musculus
  siRNA target sequence for Wnt4 (NM_009523.1,168-186).
gacgtgcgagaaactcaaa

SEQ ID NO: 639642 - DNA, 19 bp, Mus musculus
  siRNA target sequence for Wnt4 (NM_009523.1,503-521).
caggatgctcggacaacat

SEQ ID NO: 639643 - DNA, 19 bp, Mus musculus
  siRNA target sequence for Wnt4 (NM_009523.1,593-611).
gggcactcatgaatcttca

SEQ ID NO: 639644 - DNA, 19 bp, Mus musculus
  siRNA target sequence for Wnt4 (NM_009523.1,596-614).
cactcatgaatcttcacaa

SEQ ID NO: 639645 - DNA, 19 bp, Mus musculus
  siRNA target sequence for Wnt4 (NM_009523.1,815-833).
ctcggaatgcacagttcaa

SEQ ID NO: 639646 - DNA, 19 bp, Mus musculus
  siRNA target sequence for Wnt4 (NM_009523.1,925-943).
cgcacgtgcaacaagacat

SEQ ID NO: 639647 - DNA, 19 bp, Mus musculus
  siRNA target sequence for Wnt4 (NM_009523.1,929-947).
cgtgcaacaagacatctaa

SEQ ID NO: 639648 - DNA, 19 bp, Mus musculus
  siRNA target sequence for Wnt4 (NM_009523.1,930-948).
gtgcaacaagacatctaaa

SEQ ID NO: 639649 - DNA, 19 bp, Mus musculus
  siRNA target sequence for Wnt5a (NM_009524.1,635-653).
gctttggccacgtttttct

SEQ ID NO: 639650 - DNA, 19 bp, Mus musculus
  siRNA target sequence for Wnt5a (NM_009524.1,654-672).
ccttcgcccaggttgttat

SEQ ID NO: 639651 - DNA, 19 bp, Mus musculus
  siRNA target sequence for Wnt5a (NM_009524.1,655-673).
cttcgcccaggttgttata

SEQ ID NO: 639652 - DNA, 19 bp, Mus musculus
  siRNA target sequence for Wnt5a (NM_009524.1,665-683).
gttgttatagaagctaatt

SEQ ID NO: 639653 - DNA, 19 bp, Mus musculus
  siRNA target sequence for Wnt5a (NM_009524.1,668-686).
gttatagaagctaattctt

SEQ ID NO: 639654 - DNA, 19 bp, Mus musculus
  siRNA target sequence for Wnt5a (NM_009524.1,684-702).
cttggtggtctctaggtat

SEQ ID NO: 639655 - DNA, 19 bp, Mus musculus
  siRNA target sequence for Wnt5a (NM_009524.1,688-706).
gtggtctctaggtatgaat

SEQ ID NO: 639656 - DNA, 19 bp, Mus musculus
  siRNA target sequence for Wnt5a (NM_009524.1,690-708).
ggtctctaggtatgaataa

SEQ ID NO: 639657 - DNA, 19 bp, Mus musculus
  siRNA target sequence for Wnt5a (NM_009524.1,721-739).
gtcagaagtatatatcata

SEQ ID NO: 639658 - DNA, 19 bp, Mus musculus
  siRNA target sequence for Wnt5a (NM_009524.1,1132-1150).
gttcgtggacgctagagaa

SEQ ID NO: 639659 - DNA, 19 bp, Mus musculus
  siRNA target sequence for Wnt5a (NM_009524.1,1143-1161).
ctagagaaagggaacgaat

SEQ ID NO: 639660 - DNA, 19 bp, Mus musculus
  siRNA target sequence for Wnt5a (NM_009524.1,1162-1180).
ccacgctaagggttcctat

SEQ ID NO: 639661 - DNA, 19 bp, Mus musculus
  siRNA target sequence for Wnt5a (NM_009524.1,1166-1184).
gctaagggttcctatgaga

SEQ ID NO: 639662 - DNA, 19 bp, Mus musculus
  siRNA target sequence for Wnt5a (NM_009524.1,1185-1203).
gcgcacgcatcctcatgaa

SEQ ID NO: 639663 - DNA, 19 bp, Mus musculus
  siRNA target sequence for Wnt5a (NM_009524.1,1187-1205).
gcacgcatcctcatgaact

SEQ ID NO: 639664 - DNA, 19 bp, Mus musculus
  siRNA target sequence for Wnt5a (NM_009524.1,1188-1206).
cacgcatcctcatgaactt

SEQ ID NO: 639665 - DNA, 19 bp, Mus musculus
  siRNA target sequence for Wnt5a (NM_009524.1,1201-1219).
gaacttacacaacaatgaa

SEQ ID NO: 639666 - DNA, 19 bp, Mus musculus
  siRNA target sequence for Wnt5a (NM_009524.1,1220-1238).
gcaggccgtaggacagtat

SEQ ID NO: 639667 - DNA, 19 bp, Mus musculus
  siRNA target sequence for Wnt5a (NM_009524.1,1221-1239).
caggccgtaggacagtata

SEQ ID NO: 639668 - DNA, 19 bp, Mus musculus
  siRNA target sequence for Wnt5a (NM_009524.1,1223-1241).
ggccgtaggacagtataca

SEQ ID NO: 639669 - DNA, 19 bp, Mus musculus
  siRNA target sequence for Wnt5a (NM_009524.1,1224-1242).
gccgtaggacagtatacaa

SEQ ID NO: 639670 - DNA, 19 bp, Mus musculus
  siRNA target sequence for Wnt5a (NM_009524.1,1247-1265).
gcagatgtagcctgtaagt

SEQ ID NO: 639671 - DNA, 19 bp, Mus musculus
  siRNA target sequence for Wnt5a (NM_009524.1,1571-1589).
cgtggctatgaccagttta

SEQ ID NO: 639672 - DNA, 19 bp, Mus musculus
  siRNA target sequence for Wnt5a (NM_009524.1,1572-1590).
gtggctatgaccagtttaa

SEQ ID NO: 639673 - DNA, 19 bp, Mus musculus
  siRNA target sequence for Wnt5a (NM_009524.1,1574-1592).
ggctatgaccagtttaaga

SEQ ID NO: 639674 - DNA, 19 bp, Mus musculus
  siRNA target sequence for Wnt5a (NM_009524.1,1576-1594).
ctatgaccagtttaagaca

SEQ ID NO: 639675 - DNA, 19 bp, Mus musculus
  siRNA target sequence for Wnt5a (NM_009524.1,1598-1616).
cagaccgaacgctgtcatt

SEQ ID NO: 639676 - DNA, 19 bp, Mus musculus
  siRNA target sequence for Wnt5a (NM_009524.1,1608-1626).
gctgtcattgcaagtttca

SEQ ID NO: 639677 - DNA, 19 bp, Mus musculus
  siRNA target sequence for Wnt5a (NM_009524.1,1670-1688).
gatcagttcgtgtgcaaat

SEQ ID NO: 639678 - DNA, 19 bp, Mus musculus
  siRNA target sequence for Wnt5b (NM_009525.2,277-295).
gaccggagatgttcatcat

SEQ ID NO: 639679 - DNA, 19 bp, Mus musculus
  siRNA target sequence for Wnt5b (NM_009525.2,346-364).
gaaagctgtgtcagttgta

SEQ ID NO: 639680 - DNA, 19 bp, Mus musculus
  siRNA target sequence for Wnt5b (NM_009525.2,705-723).
cgagagcgtgagaagaact

SEQ ID NO: 639681 - DNA, 19 bp, Mus musculus
  siRNA target sequence for Wnt5b (NM_009525.2,706-724).
gagagcgtgagaagaactt

SEQ ID NO: 639682 - DNA, 19 bp, Mus musculus
  siRNA target sequence for Wnt5b (NM_009525.2,807-825).
gctgatgtcgcctgcaaat

SEQ ID NO: 639683 - DNA, 19 bp, Mus musculus
  siRNA target sequence for Wnt5b (NM_009525.2,1134-1152).
ggctatgaccgcttcaaga

SEQ ID NO: 639684 - DNA, 19 bp, Mus musculus
  siRNA target sequence for Wnt5b (NM_009525.2,1200-1218).
gtcagatgcaaaaaatgca

SEQ ID NO: 639685 - DNA, 19 bp, Mus musculus
  siRNA target sequence for Wnt5b (NM_009525.2,1230-1248).
gaccagtatgtctgtaagt

SEQ ID NO: 639686 - DNA, 19 bp, Mus musculus
  siRNA target sequence for Wnt6 (NM_009526.2,726-744).
gagaagtcaagactcttta

SEQ ID NO: 639687 - DNA, 19 bp, Mus musculus
  siRNA target sequence for Wnt7a (NM_009527.2,301-319).
ctcagcctgggcatagtct

SEQ ID NO: 639688 - DNA, 19 bp, Mus musculus
  siRNA target sequence for Wnt7a (NM_009527.2,325-343).
cggatcggtggcttctctt

SEQ ID NO: 639689 - DNA, 19 bp, Mus musculus
  siRNA target sequence for Wnt7a (NM_009527.2,355-373).
ctgggtgcgagcatcatct

SEQ ID NO: 639690 - DNA, 19 bp, Mus musculus
  siRNA target sequence for Wnt7a (NM_009527.2,358-376).
ggtgcgagcatcatctgta

SEQ ID NO: 639691 - DNA, 19 bp, Mus musculus
  siRNA target sequence for Wnt7a (NM_009527.2,359-377).
gtgcgagcatcatctgtaa

SEQ ID NO: 639692 - DNA, 19 bp, Mus musculus
  siRNA target sequence for Wnt7a (NM_009527.2,361-379).
gcgagcatcatctgtaaca

SEQ ID NO: 639693 - DNA, 19 bp, Mus musculus
  siRNA target sequence for Wnt7a (NM_009527.2,468-486).
cctggacgagtgtcagttt

SEQ ID NO: 639694 - DNA, 19 bp, Mus musculus
  siRNA target sequence for Wnt7a (NM_009527.2,575-593).
ccttcacctatgcgattat

SEQ ID NO: 639695 - DNA, 19 bp, Mus musculus
  siRNA target sequence for Wnt7a (NM_009527.2,940-958).
gtgctcaaggacaaataca

SEQ ID NO: 639696 - DNA, 19 bp, Mus musculus
  siRNA target sequence for Wnt7a (NM_009527.2,1006-1024).
cccacctttctgaagatca

SEQ ID NO: 639697 - DNA, 19 bp, Mus musculus
  siRNA target sequence for Wnt7a (NM_009527.2,1129-1147).
cagggccgagcctgcaata

SEQ ID NO: 639698 - DNA, 19 bp, Mus musculus
  siRNA target sequence for Wnt7a (NM_009527.2,1132-1150).
ggccgagcctgcaataaga

SEQ ID NO: 639699 - DNA, 19 bp, Mus musculus
  siRNA target sequence for Wnt7a (NM_009527.2,1253-1271).
gctgctacgtcaagtgtaa

SEQ ID NO: 639700 - DNA, 19 bp, Mus musculus
  siRNA target sequence for Wnt7a (NM_009527.2,1281-1299).
cgagcgcacggagatgtat

SEQ ID NO: 639701 - DNA, 19 bp, Mus musculus
  siRNA target sequence for Wnt7a (NM_009527.2,1282-1300).
gagcgcacggagatgtata

SEQ ID NO: 639702 - DNA, 19 bp, Mus musculus
  siRNA target sequence for Wnt7a (NM_009527.2,1285-1303).
cgcacggagatgtatacgt

SEQ ID NO: 639703 - DNA, 19 bp, Mus musculus
  siRNA target sequence for Wnt7b (NM_009528.2,149-167).
gaaagtggatcttttacgt

SEQ ID NO: 639704 - DNA, 19 bp, Mus musculus
  siRNA target sequence for Wnt7b (NM_009528.2,155-173).
ggatcttttacgtgtttct

SEQ ID NO: 639705 - DNA, 19 bp, Mus musculus
  siRNA target sequence for Wnt7b (NM_009528.2,195-213).
gaagctcggagcattgtca

SEQ ID NO: 639706 - DNA, 19 bp, Mus musculus
  siRNA target sequence for Wnt7b (NM_009528.2,294-312).
ccgacccgatgccatcatt

SEQ ID NO: 639707 - DNA, 19 bp, Mus musculus
  siRNA target sequence for Wnt7b (NM_009528.2,296-314).
gacccgatgccatcattgt

SEQ ID NO: 639708 - DNA, 19 bp, Mus musculus
  siRNA target sequence for Wnt7b (NM_009528.2,298-316).
cccgatgccatcattgtga

SEQ ID NO: 639709 - DNA, 19 bp, Mus musculus
  siRNA target sequence for Wnt7b (NM_009528.2,404-422).
ccgtcttcgggcaagaact

SEQ ID NO: 639710 - DNA, 19 bp, Mus musculus
  siRNA target sequence for Wnt7b (NM_009528.2,507-525).
gggcaatctgagcaattgt

SEQ ID NO: 639711 - DNA, 19 bp, Mus musculus
  siRNA target sequence for Wnt7b (NM_009528.2,601-619).
cgctacggcatcgactttt

SEQ ID NO: 639712 - DNA, 19 bp, Mus musculus
  siRNA target sequence for Wnt7b (NM_009528.2,603-621).
ctacggcatcgacttttct

SEQ ID NO: 639713 - DNA, 19 bp, Mus musculus
  siRNA target sequence for Wnt7b (NM_009528.2,634-652).
gatgcccgtgagatcaaaa

SEQ ID NO: 639714 - DNA, 19 bp, Mus musculus
  siRNA target sequence for Wnt7b (NM_009528.2,638-656).
cccgtgagatcaaaaagaa

SEQ ID NO: 639715 - DNA, 19 bp, Mus musculus
  siRNA target sequence for Wnt7b (NM_009528.2,753-771).
ctcctgtaccaccaaaact

SEQ ID NO: 639716 - DNA, 19 bp, Mus musculus
  siRNA target sequence for Wnt7b (NM_009528.2,773-791).
gctggaccacgctacctaa

SEQ ID NO: 639717 - DNA, 19 bp, Mus musculus
  siRNA target sequence for Wnt7b (NM_009528.2,776-794).
ggaccacgctacctaagtt

SEQ ID NO: 639718 - DNA, 19 bp, Mus musculus
  siRNA target sequence for Wnt8a (NM_009290.1,204-222).
ggcatcgaagagtgtaagt

SEQ ID NO: 639719 - DNA, 19 bp, Mus musculus
  siRNA target sequence for Wnt8a (NM_009290.1,205-223).
gcatcgaagagtgtaagtt

SEQ ID NO: 639720 - DNA, 19 bp, Mus musculus
  siRNA target sequence for Wnt8a (NM_009290.1,231-249).
gcctgggaacggtggaatt

SEQ ID NO: 639721 - DNA, 19 bp, Mus musculus
  siRNA target sequence for Wnt8a (NM_009290.1,255-273).
gagcatgcttttcagtttt

SEQ ID NO: 639722 - DNA, 19 bp, Mus musculus
  siRNA target sequence for Wnt8a (NM_009290.1,330-348).
cgctctgctgccatcatgt

SEQ ID NO: 639723 - DNA, 19 bp, Mus musculus
  siRNA target sequence for Wnt8a (NM_009290.1,331-349).
gctctgctgccatcatgta

SEQ ID NO: 639724 - DNA, 19 bp, Mus musculus
  siRNA target sequence for Wnt8a (NM_009290.1,370-388).
gcatgggtgacttggaaaa

SEQ ID NO: 639725 - DNA, 19 bp, Mus musculus
  siRNA target sequence for Wnt8a (NM_009290.1,393-411).
ggctgtgacgagtcacaaa

SEQ ID NO: 639726 - DNA, 19 bp, Mus musculus
  siRNA target sequence for Wnt8a (NM_009290.1,399-417).
gacgagtcacaaaatggaa

SEQ ID NO: 639727 - DNA, 19 bp, Mus musculus
  siRNA target sequence for Wnt8a (NM_009290.1,401-419).
cgagtcacaaaatggaaaa

SEQ ID NO: 639728 - DNA, 19 bp, Mus musculus
  siRNA target sequence for Wnt8a (NM_009290.1,465-483).
gagttcggggaaaaaatct

SEQ ID NO: 639729 - DNA, 19 bp, Mus musculus
  siRNA target sequence for Wnt8a (NM_009290.1,661-679).
ggcagatgggaaattacct

SEQ ID NO: 639730 - DNA, 19 bp, Mus musculus
  siRNA target sequence for Wnt8a (NM_009290.1,662-680).
gcagatgggaaattaccta

SEQ ID NO: 639731 - DNA, 19 bp, Mus musculus
  siRNA target sequence for Wnt8a (NM_009290.1,663-681).
cagatgggaaattacctaa

SEQ ID NO: 639732 - DNA, 19 bp, Mus musculus
  siRNA target sequence for Wnt8a (NM_009290.1,794-812).
ggctgagctgatcttctta

SEQ ID NO: 639733 - DNA, 19 bp, Mus musculus
  siRNA target sequence for Wnt8a (NM_009290.1,986-1004).
cagctgtgactgcaacttt

SEQ ID NO: 639734 - DNA, 19 bp, Mus musculus
  siRNA target sequence for Wnt8b (NM_011720.1,149-167).
gcccgtgtgcgttcttcta

SEQ ID NO: 639735 - DNA, 19 bp, Mus musculus
  siRNA target sequence for Wnt8b (NM_011720.1,151-169).
ccgtgtgcgttcttctagt

SEQ ID NO: 639736 - DNA, 19 bp, Mus musculus
  siRNA target sequence for Wnt8b (NM_011720.1,271-289).
cccagagtggtattgaaga

SEQ ID NO: 639737 - DNA, 19 bp, Mus musculus
  siRNA target sequence for Wnt8b (NM_011720.1,272-290).
ccagagtggtattgaagaa

SEQ ID NO: 639738 - DNA, 19 bp, Mus musculus
  siRNA target sequence for Wnt8b (NM_011720.1,273-291).
cagagtggtattgaagaat

SEQ ID NO: 639739 - DNA, 19 bp, Mus musculus
  siRNA target sequence for Wnt8b (NM_011720.1,279-297).
ggtattgaagaatgtaaat

SEQ ID NO: 639740 - DNA, 19 bp, Mus musculus
  siRNA target sequence for Wnt8b (NM_011720.1,306-324).
gcttgggaccgttggaatt

SEQ ID NO: 639741 - DNA, 19 bp, Mus musculus
  siRNA target sequence for Wnt8b (NM_011720.1,442-460).
gcagcctcggagactttga

SEQ ID NO: 639742 - DNA, 19 bp, Mus musculus
  siRNA target sequence for Wnt8b (NM_011720.1,578-596).
cctcgagacaggacaagat

SEQ ID NO: 639743 - DNA, 19 bp, Mus musculus
  siRNA target sequence for Wnt8b (NM_011720.1,752-770).
cttgaaggagaagtatcat

SEQ ID NO: 639744 - DNA, 19 bp, Mus musculus
  siRNA target sequence for Wnt8b (NM_011720.1,1110-1128).
cgggtcaccaagtacttct

SEQ ID NO: 639745 - DNA, 19 bp, Mus musculus
  siRNA target sequence for Wnt8b (NM_011720.1,1162-1180).
cgcacaaaccgggaaagaa

SEQ ID NO: 639746 - DNA, 19 bp, Mus musculus
  siRNA target sequence for Wnt8b (NM_011720.1,1164-1182).
cacaaaccgggaaagaact

SEQ ID NO: 639747 - DNA, 19 bp, Mus musculus
  siRNA target sequence for Wnt9a (NM_139298.1,111-129).
gcagtgaacccctgactat

SEQ ID NO: 639748 - DNA, 19 bp, Mus musculus
  siRNA target sequence for Wnt9a (NM_139298.1,510-528).
gcggggacaacctcaagta

SEQ ID NO: 639749 - DNA, 19 bp, Mus musculus
  siRNA target sequence for Wnt9a (NM_139298.1,512-530).
ggggacaacctcaagtaca

SEQ ID NO: 639750 - DNA, 19 bp, Mus musculus
  siRNA target sequence for Wnt9a (NM_139298.1,730-748).
gcacctaaaacacaaatat

SEQ ID NO: 639751 - DNA, 19 bp, Mus musculus
  siRNA target sequence for Wnt9a (NM_139298.1,766-784).
gggcagcactaccaatgaa

SEQ ID NO: 639752 - DNA, 19 bp, Mus musculus
  siRNA target sequence for Wnt9a (NM_139298.1,958-976).
gaactgtgagagtatttgt

SEQ ID NO: 639753 - DNA, 19 bp, Mus musculus
  siRNA target sequence for Wnt9b (NM_011719.2,536-554).
gggtgtgtgtggtgacaat

SEQ ID NO: 639754 - DNA, 19 bp, Mus musculus
  siRNA target sequence for Wnt9b (NM_011719.2,540-558).
gtgtgtggtgacaatctga

SEQ ID NO: 639755 - DNA, 19 bp, Mus musculus
  siRNA target sequence for Wnt9b (NM_011719.2,544-562).
gtggtgacaatctgaagta

SEQ ID NO: 639756 - DNA, 19 bp, Mus musculus
  siRNA target sequence for Wnt9b (NM_011719.2,1101-1119).
cagcaggagctcgtgtata

SEQ ID NO: 639757 - DNA, 19 bp, Mus musculus
  siRNA target sequence for Wnt9b (NM_011719.2,1104-1122).
caggagctcgtgtatacct

SEQ ID NO: 639758 - DNA, 19 bp, Mus musculus
  siRNA target sequence for Fxc1 (NM_019502.2,112-130).
ggatgacagaactgtgttt

SEQ ID NO: 639759 - DNA, 19 bp, Mus musculus
  siRNA target sequence for Sec61a1 (NM_016906.2,180-198).
gaaagattcagtttaagga

SEQ ID NO: 639760 - DNA, 19 bp, Mus musculus
  siRNA target sequence for Sec61a1 (NM_016906.2,308-326).
gtgattctggcctctaaca

SEQ ID NO: 639761 - DNA, 19 bp, Mus musculus
  siRNA target sequence for Sec61a1 (NM_016906.2,310-328).
gattctggcctctaacaga

SEQ ID NO: 639762 - DNA, 19 bp, Mus musculus
  siRNA target sequence for Sec61a1 (NM_016906.2,319-337).
ctctaacagaggtacctta

SEQ ID NO: 639763 - DNA, 19 bp, Mus musculus
  siRNA target sequence for Sec61a1 (NM_016906.2,343-361).
gctgggcatctctcctatt

SEQ ID NO: 639764 - DNA, 19 bp, Mus musculus
  siRNA target sequence for Sec61a1 (NM_016906.2,347-365).
ggcatctctcctattgtca

SEQ ID NO: 639765 - DNA, 19 bp, Mus musculus
  siRNA target sequence for Sec61a1 (NM_016906.2,362-380).
gtcacctccggtcttatca

SEQ ID NO: 639766 - DNA, 19 bp, Mus musculus
  siRNA target sequence for Sec61a1 (NM_016906.2,463-481).
gtttggaatgatcattact

SEQ ID NO: 639767 - DNA, 19 bp, Mus musculus
  siRNA target sequence for Sec61a1 (NM_016906.2,484-502).
cggtcagtccattgtgtat

SEQ ID NO: 639768 - DNA, 19 bp, Mus musculus
  siRNA target sequence for Sec61a1 (NM_016906.2,486-504).
gtcagtccattgtgtatgt

SEQ ID NO: 639769 - DNA, 19 bp, Mus musculus
  siRNA target sequence for Sec61a1 (NM_016906.2,584-602).
ggcttaattgtcctacttt

SEQ ID NO: 639770 - DNA, 19 bp, Mus musculus
  siRNA target sequence for Sec61a1 (NM_016906.2,595-613).
cctacttttggatgaactt

SEQ ID NO: 639771 - DNA, 19 bp, Mus musculus
  siRNA target sequence for Sec61a1 (NM_016906.2,650-668).
ctcttcattgcgactaaca

SEQ ID NO: 639772 - DNA, 19 bp, Mus musculus
  siRNA target sequence for Sec61a1 (NM_016906.2,720-738).
gccgagggatggaattcga

SEQ ID NO: 639773 - DNA, 19 bp, Mus musculus
  siRNA target sequence for Sec61a1 (NM_016906.2,721-739).
ccgagggatggaattcgaa

SEQ ID NO: 639774 - DNA, 19 bp, Mus musculus
  siRNA target sequence for Sec61a1 (NM_016906.2,744-762).
ccatcatagcgctattcca

SEQ ID NO: 639775 - DNA, 19 bp, Mus musculus
  siRNA target sequence for Sec61a1 (NM_016906.2,867-885).
ccgttgtcatctatttcca

SEQ ID NO: 639776 - DNA, 19 bp, Mus musculus
  siRNA target sequence for Sec61a1 (NM_016906.2,896-914).
gtggaccttccaatcaagt

SEQ ID NO: 639777 - DNA, 19 bp, Mus musculus
  siRNA target sequence for Sec61a1 (NM_016906.2,921-939).
gttaccgaggccagtacaa

SEQ ID NO: 639778 - DNA, 19 bp, Mus musculus
  siRNA target sequence for Sec61a1 (NM_016906.2,1001-1019).
gtgtccaacctgtatgtca

SEQ ID NO: 639779 - DNA, 19 bp, Mus musculus
  siRNA target sequence for Sec61a1 (NM_016906.2,1075-1093).
cacctggtcggatacatca

SEQ ID NO: 639780 - DNA, 19 bp, Mus musculus
  siRNA target sequence for Sec61a1 (NM_016906.2,1078-1096).
ctggtcggatacatcatct

SEQ ID NO: 639781 - DNA, 19 bp, Mus musculus
  siRNA target sequence for Sec61a1 (NM_016906.2,1249-1267).
cgaagtctcaggttcttct

SEQ ID NO: 639782 - DNA, 19 bp, Mus musculus
  siRNA target sequence for Sec61a1 (NM_016906.2,1464-1482).
ccatcatctaccagtactt

SEQ ID NO: 639783 - DNA, 19 bp, Mus musculus
  siRNA target sequence for Sec61a2 (NM_021305.2,183-201).
ggtactatggactgctata

SEQ ID NO: 639784 - DNA, 19 bp, Mus musculus
  siRNA target sequence for Sec61a2 (NM_021305.2,184-202).
gtactatggactgctataa

SEQ ID NO: 639785 - DNA, 19 bp, Mus musculus
  siRNA target sequence for Sec61a2 (NM_021305.2,327-345).
gggtatttccccaattgta

SEQ ID NO: 639786 - DNA, 19 bp, Mus musculus
  siRNA target sequence for Sec61a2 (NM_021305.2,347-365).
cgtctggtttgattatgca

SEQ ID NO: 639787 - DNA, 19 bp, Mus musculus
  siRNA target sequence for Sec61a2 (NM_021305.2,377-395).
gagccaaaatcattgaagt

SEQ ID NO: 639788 - DNA, 19 bp, Mus musculus
  siRNA target sequence for Sec61a2 (NM_021305.2,433-451).
gcccagaaattatttggta

SEQ ID NO: 639789 - DNA, 19 bp, Mus musculus
  siRNA target sequence for Sec61a2 (NM_021305.2,469-487).
caagccattgtgtatgtca

SEQ ID NO: 639790 - DNA, 19 bp, Mus musculus
  siRNA target sequence for Sec61a2 (NM_021305.2,535-553).
ctccttatcattattcagt

SEQ ID NO: 639791 - DNA, 19 bp, Mus musculus
  siRNA target sequence for Sec61a2 (NM_021305.2,675-693).
ctttagtcccactaccatt

SEQ ID NO: 639792 - DNA, 19 bp, Mus musculus
  siRNA target sequence for Sec61a2 (NM_021305.2,701-719).
gcagaggtacggagtttga

SEQ ID NO: 639793 - DNA, 19 bp, Mus musculus
  siRNA target sequence for Sec61a2 (NM_021305.2,702-720).
cagaggtacggagtttgaa

SEQ ID NO: 639794 - DNA, 19 bp, Mus musculus
  siRNA target sequence for Sec61a2 (NM_021305.2,714-732).
gtttgaaggtgcagtcata

SEQ ID NO: 639795 - DNA, 19 bp, Mus musculus
  siRNA target sequence for Sec61a2 (NM_021305.2,776-794).
ccttgagggaggctttcta

SEQ ID NO: 639796 - DNA, 19 bp, Mus musculus
  siRNA target sequence for Sec61a2 (NM_021305.2,877-895).
gttgacttgcccattaagt

SEQ ID NO: 639797 - DNA, 19 bp, Mus musculus
  siRNA target sequence for Sec61a2 (NM_021305.2,913-931).
cagtacagtagctatccta

SEQ ID NO: 639798 - DNA, 19 bp, Mus musculus
  siRNA target sequence for Sec61a2 (NM_021305.2,939-957).
cttctacacgtcgaatatt

SEQ ID NO: 639799 - DNA, 19 bp, Mus musculus
  siRNA target sequence for Sec61a2 (NM_021305.2,947-965).
cgtcgaatattcccataat

SEQ ID NO: 639800 - DNA, 19 bp, Mus musculus
  siRNA target sequence for Sec61a2 (NM_021305.2,950-968).
cgaatattcccataatcct

SEQ ID NO: 639801 - DNA, 19 bp, Mus musculus
  siRNA target sequence for Sec61a2 (NM_021305.2,1011-1029).
gctgtctgttcgatttagt

SEQ ID NO: 639802 - DNA, 19 bp, Mus musculus
  siRNA target sequence for Sec61a2 (NM_021305.2,1021-1039).
cgatttagtggcaacttct

SEQ ID NO: 639803 - DNA, 19 bp, Mus musculus
  siRNA target sequence for Sec61a2 (NM_021305.2,1022-1040).
gatttagtggcaacttctt

SEQ ID NO: 639804 - DNA, 19 bp, Mus musculus
  siRNA target sequence for Sec61a2 (NM_021305.2,1158-1176).
ggatcctgttcatgtagtt

SEQ ID NO: 639805 - DNA, 19 bp, Mus musculus
  siRNA target sequence for Sec61a2 (NM_021305.2,1162-1180).
cctgttcatgtagttgtat

SEQ ID NO: 639806 - DNA, 19 bp, Mus musculus
  siRNA target sequence for Sec61a2 (NM_021305.2,1171-1189).
gtagttgtatatattatct

SEQ ID NO: 639807 - DNA, 19 bp, Mus musculus
  siRNA target sequence for Sec61a2 (NM_021305.2,1374-1392).
cggtgccctgtcagtacta

SEQ ID NO: 639808 - DNA, 19 bp, Mus musculus
  siRNA target sequence for Sec61a2 (NM_021305.2,1432-1450).
ctgcttgcagtcactatta

SEQ ID NO: 639809 - DNA, 19 bp, Mus musculus
  siRNA target sequence for Sec61a2 (NM_021305.2,1439-1457).
cagtcactattatttatca

SEQ ID NO: 639810 - DNA, 19 bp, Mus musculus
  siRNA target sequence for Timm10 (NM_013896.2,358-376).
ccggaatctgaccagataa

SEQ ID NO: 639811 - DNA, 19 bp, Mus musculus
  siRNA target sequence for Timm10 (NM_013896.2,359-377).
cggaatctgaccagataaa

SEQ ID NO: 639812 - DNA, 19 bp, Mus musculus
  siRNA target sequence for Timm10 (NM_013896.2,360-378).
ggaatctgaccagataaaa

SEQ ID NO: 639813 - DNA, 19 bp, Mus musculus
  siRNA target sequence for Timm10 (NM_013896.2,365-383).
ctgaccagataaaacagtt

SEQ ID NO: 639814 - DNA, 19 bp, Mus musculus
  siRNA target sequence for Timm10 (NM_013896.2,401-419).
cctacaataaacttacaga

SEQ ID NO: 639815 - DNA, 19 bp, Mus musculus
  siRNA target sequence for Timm17a (NM_011590.1,515-533).
gactaccgacagtatcagt

SEQ ID NO: 639816 - DNA, 19 bp, Mus musculus
  siRNA target sequence for Timm17b (NM_011591.2,188-206).
gttcagaggtagtgtcaat

SEQ ID NO: 639817 - DNA, 19 bp, Mus musculus
  siRNA target sequence for Timm17b (NM_011591.2,290-308).
ccggctacggggcaaagaa

SEQ ID NO: 639818 - DNA, 19 bp, Mus musculus
  siRNA target sequence for Timm22 (NM_019818.2,203-221).
gagagggcaatggaaagtt

SEQ ID NO: 639819 - DNA, 19 bp, Mus musculus
  siRNA target sequence for Timm22 (NM_019818.2,246-264).
gtgtaggagggtttgtctt

SEQ ID NO: 639820 - DNA, 19 bp, Mus musculus
  siRNA target sequence for Timm22 (NM_019818.2,267-285).
gaggcgcgtttggtatctt

SEQ ID NO: 639821 - DNA, 19 bp, Mus musculus
  siRNA target sequence for Timm22 (NM_019818.2,269-287).
ggcgcgtttggtatcttta

SEQ ID NO: 639822 - DNA, 19 bp, Mus musculus
  siRNA target sequence for Timm22 (NM_019818.2,271-289).
cgcgtttggtatctttact

SEQ ID NO: 639823 - DNA, 19 bp, Mus musculus
  siRNA target sequence for Timm22 (NM_019818.2,288-306).
ctgctggcattgataccaa

SEQ ID NO: 639824 - DNA, 19 bp, Mus musculus
  siRNA target sequence for Timm22 (NM_019818.2,334-352).
ccggacaccaactgcaaaa

SEQ ID NO: 639825 - DNA, 19 bp, Mus musculus
  siRNA target sequence for Timm22 (NM_019818.2,415-433).
cgccatgttttcatgtact

SEQ ID NO: 639826 - DNA, 19 bp, Mus musculus
  siRNA target sequence for Timm22 (NM_019818.2,516-534).
gcttccgagctggagtaaa

SEQ ID NO: 639827 - DNA, 19 bp, Mus musculus
  siRNA target sequence for Timm22 (NM_019818.2,576-594).
ctgcaatcgattattacct

SEQ ID NO: 639828 - DNA, 19 bp, Mus musculus
  siRNA target sequence for Timm8a (NM_013898.1,90-108).
cctcagttgcagcatttca

SEQ ID NO: 639829 - DNA, 19 bp, Mus musculus
  siRNA target sequence for Timm8b (NM_013897.1,64-82).
cggacgaagcggagttaca

SEQ ID NO: 639830 - DNA, 19 bp, Mus musculus
  siRNA target sequence for Timm8b (NM_013897.1,65-83).
ggacgaagcggagttacaa

SEQ ID NO: 639831 - DNA, 19 bp, Mus musculus
  siRNA target sequence for Timm8b (NM_013897.1,104-122).
gcagaaggcgcaattcact

SEQ ID NO: 639832 - DNA, 19 bp, Mus musculus
  siRNA target sequence for Timm8b (NM_013897.1,121-139).
ctgcgcaggtgcatcactt

SEQ ID NO: 639833 - DNA, 19 bp, Mus musculus
  siRNA target sequence for Timm8b (NM_013897.1,124-142).
cgcaggtgcatcacttcat

SEQ ID NO: 639834 - DNA, 19 bp, Mus musculus
  siRNA target sequence for Timm8b (NM_013897.1,135-153).
cacttcatggaactatgtt

SEQ ID NO: 639835 - DNA, 19 bp, Mus musculus
  siRNA target sequence for Slc6a4 (NM_010484.1,303-321).
gcctggacaaatatccaat

SEQ ID NO: 639836 - DNA, 19 bp, Mus musculus
  siRNA target sequence for Slc6a4 (NM_010484.1,492-510).
ctggcgttttccctacata

SEQ ID NO: 639837 - DNA, 19 bp, Mus musculus
  siRNA target sequence for Slc6a4 (NM_010484.1,615-633).
ccgaaatgggtgcatttct

SEQ ID NO: 639838 - DNA, 19 bp, Mus musculus
  siRNA target sequence for Slc6a4 (NM_010484.1,645-663).
gatctgcccgattttcaaa

SEQ ID NO: 639839 - DNA, 19 bp, Mus musculus
  siRNA target sequence for Slc6a4 (NM_010484.1,805-823).
ggcaactgcaccaactact

SEQ ID NO: 639840 - DNA, 19 bp, Mus musculus
  siRNA target sequence for Slc6a4 (NM_010484.1,806-824).
gcaactgcaccaactactt

SEQ ID NO: 639841 - DNA, 19 bp, Mus musculus
  siRNA target sequence for Slc6a4 (NM_010484.1,1040-1058).
ccaccttcccttacattgt

SEQ ID NO: 639842 - DNA, 19 bp, Mus musculus
  siRNA target sequence for Slc6a4 (NM_010484.1,1109-1127).
gggttgtcttttacttgaa

SEQ ID NO: 639843 - DNA, 19 bp, Mus musculus
  siRNA target sequence for Slc6a4 (NM_010484.1,1171-1189).
gctgcggctcagatctttt

SEQ ID NO: 639844 - DNA, 19 bp, Mus musculus
  siRNA target sequence for Slc6a4 (NM_010484.1,1172-1190).
ctgcggctcagatcttttt

SEQ ID NO: 639845 - DNA, 19 bp, Mus musculus
  siRNA target sequence for Slc6a4 (NM_010484.1,1222-1240).
gcgtttgctagctacaaca

SEQ ID NO: 639846 - DNA, 19 bp, Mus musculus
  siRNA target sequence for Slc6a4 (NM_010484.1,1223-1241).
cgtttgctagctacaacaa

SEQ ID NO: 639847 - DNA, 19 bp, Mus musculus
  siRNA target sequence for Slc6a4 (NM_010484.1,1228-1246).
gctagctacaacaagttca

SEQ ID NO: 639848 - DNA, 19 bp, Mus musculus
  siRNA target sequence for Slc6a4 (NM_010484.1,1716-1734).
cgtcgtgtcttggttctat

SEQ ID NO: 639849 - DNA, 19 bp, Mus musculus
  siRNA target sequence for Slc6a4 (NM_010484.1,1751-1769).
gcagcgacgtgaaggaaat

SEQ ID NO: 639850 - DNA, 19 bp, Mus musculus
  siRNA target sequence for Slc6a4 (NM_010484.1,1754-1772).
gcgacgtgaaggaaatgct

SEQ ID NO: 639851 - DNA, 19 bp, Mus musculus
  siRNA target sequence for Slc6a4 (NM_010484.1,1831-1849).
ctcctgttcatcatttgca

SEQ ID NO: 639852 - DNA, 19 bp, Mus musculus
  siRNA target sequence for Slc6a4 (NM_010484.1,1898-1916).
cccactggagtatcatctt

SEQ ID NO: 639853 - DNA, 19 bp, Mus musculus
  siRNA target sequence for Slc6a4 (NM_010484.1,1949-1967).
gcatccctatatacatcat

SEQ ID NO: 639854 - DNA, 19 bp, Mus musculus
  siRNA target sequence for Slc6a4 (NM_010484.1,1953-1971).
ccctatatacatcatttat

SEQ ID NO: 639855 - DNA, 19 bp, Mus musculus
  siRNA target sequence for Slc6a4 (NM_010484.1,1982-2000).
gcactccagggacacttaa

SEQ ID NO: 639856 - DNA, 19 bp, Mus musculus
  siRNA target sequence for Slc6a4 (NM_010484.1,1996-2014).
cttaaggagcgcattatta

SEQ ID NO: 639857 - DNA, 19 bp, Mus musculus
  siRNA target sequence for Slc6a4 (NM_010484.1,2001-2019).
ggagcgcattattaaaagt

SEQ ID NO: 639858 - DNA, 19 bp, Mus musculus
  siRNA target sequence for Slc6a4 (NM_010484.1,2002-2020).
gagcgcattattaaaagta

SEQ ID NO: 639859 - DNA, 19 bp, Mus musculus
  siRNA target sequence for Slc6a4 (NM_010484.1,2005-2023).
cgcattattaaaagtatca

SEQ ID NO: 639860 - DNA, 19 bp, Mus musculus
  siRNA target sequence for A730081N20Rik (NM_139142.1,636-654).
cgcatcgatgccttactgt

SEQ ID NO: 639861 - DNA, 19 bp, Mus musculus
  siRNA target sequence for A730081N20Rik (NM_139142.1,642-660).
gatgccttactgtgttctt

SEQ ID NO: 639862 - DNA, 19 bp, Mus musculus
  siRNA target sequence for A730081N20Rik (NM_139142.1,645-663).
gccttactgtgttcttatt

SEQ ID NO: 639863 - DNA, 19 bp, Mus musculus
  siRNA target sequence for A730081N20Rik (NM_139142.1,701-719).
ccaatggcctgatgtacat

SEQ ID NO: 639864 - DNA, 19 bp, Mus musculus
  siRNA target sequence for A730081N20Rik (NM_139142.1,706-724).
ggcctgatgtacatgttca

SEQ ID NO: 639865 - DNA, 19 bp, Mus musculus
  siRNA target sequence for A730081N20Rik (NM_139142.1,1672-1690).
cagttggtgaccaaggatt

SEQ ID NO: 639866 - DNA, 19 bp, Mus musculus
  siRNA target sequence for D130012J15Rik (NM_172271.1,679-697).
cggccagcctggaatagca

SEQ ID NO: 639867 - DNA, 19 bp, Mus musculus
  siRNA target sequence for D130012J15Rik (NM_172271.1,957-975).
cgttgggctgtactacaat

SEQ ID NO: 639868 - DNA, 19 bp, Mus musculus
  siRNA target sequence for D130012J15Rik (NM_172271.1,961-979).
gggctgtactacaatgtga

SEQ ID NO: 639869 - DNA, 19 bp, Mus musculus
  siRNA target sequence for D130012J15Rik (NM_172271.1,962-980).
ggctgtactacaatgtgat

SEQ ID NO: 639870 - DNA, 19 bp, Mus musculus
  siRNA target sequence for D130012J15Rik (NM_172271.1,985-1003).
gggtggagcgtcttctatt

SEQ ID NO: 639871 - DNA, 19 bp, Mus musculus
  siRNA target sequence for D130012J15Rik (NM_172271.1,986-1004).
ggtggagcgtcttctattt

SEQ ID NO: 639872 - DNA, 19 bp, Mus musculus
  siRNA target sequence for D130012J15Rik (NM_172271.1,989-1007).
ggagcgtcttctatttctt

SEQ ID NO: 639873 - DNA, 19 bp, Mus musculus
  siRNA target sequence for D130012J15Rik (NM_172271.1,1102-1120).
gctactacctacttttggt

SEQ ID NO: 639874 - DNA, 19 bp, Mus musculus
  siRNA target sequence for D130012J15Rik (NM_172271.1,1137-1155).
catctccaactcgatttca

SEQ ID NO: 639875 - DNA, 19 bp, Mus musculus
  siRNA target sequence for D130012J15Rik (NM_172271.1,1444-1462).
ggcgtcatcgccttttcca

SEQ ID NO: 639876 - DNA, 19 bp, Mus musculus
  siRNA target sequence for D130012J15Rik (NM_172271.1,1454-1472).
ccttttccagctacaacaa

SEQ ID NO: 639877 - DNA, 19 bp, Mus musculus
  siRNA target sequence for D130012J15Rik (NM_172271.1,1455-1473).
cttttccagctacaacaaa

SEQ ID NO: 639878 - DNA, 19 bp, Mus musculus
  siRNA target sequence for D130012J15Rik (NM_172271.1,1666-1684).
ccacctcacgtcaacttct

SEQ ID NO: 639879 - DNA, 19 bp, Mus musculus
  siRNA target sequence for D130012J15Rik (NM_172271.1,1721-1739).
gcgtcatcatgactgttaa

SEQ ID NO: 639880 - DNA, 19 bp, Mus musculus
  siRNA target sequence for D130012J15Rik (NM_172271.1,2031-2049).
gcgctccggaaactacttt

SEQ ID NO: 639881 - DNA, 19 bp, Mus musculus
  siRNA target sequence for D130012J15Rik (NM_172271.1,2033-2051).
gctccggaaactactttgt

SEQ ID NO: 639882 - DNA, 19 bp, Mus musculus
  siRNA target sequence for D130012J15Rik (NM_172271.1,2173-2191).
ggcttccagccgtatcgat

SEQ ID NO: 639883 - DNA, 19 bp, Mus musculus
  siRNA target sequence for D130012J15Rik (NM_172271.1,2174-2192).
gcttccagccgtatcgatt

SEQ ID NO: 639884 - DNA, 19 bp, Mus musculus
  siRNA target sequence for D130012J15Rik (NM_172271.1,2178-2196).
ccagccgtatcgattctat

SEQ ID NO: 639885 - DNA, 19 bp, Mus musculus
  siRNA target sequence for D130012J15Rik (NM_172271.1,2179-2197).
cagccgtatcgattctatt

SEQ ID NO: 639886 - DNA, 19 bp, Mus musculus
  siRNA target sequence for D130012J15Rik (NM_172271.1,2182-2200).
ccgtatcgattctatttct

SEQ ID NO: 639887 - DNA, 19 bp, Mus musculus
  siRNA target sequence for D130012J15Rik (NM_172271.1,2309-2327).
ctgctgagcgctacttgta

SEQ ID NO: 639888 - DNA, 19 bp, Mus musculus
  siRNA target sequence for D130012J15Rik (NM_172271.1,2311-2329).
gctgagcgctacttgtact

SEQ ID NO: 639889 - DNA, 19 bp, Mus musculus
  siRNA target sequence for Gabt4 (NM_172890.1,278-296).
ggggcattcctgattcctt

SEQ ID NO: 639890 - DNA, 19 bp, Mus musculus
  siRNA target sequence for Gabt4 (NM_172890.1,279-297).
gggcattcctgattcctta

SEQ ID NO: 639891 - DNA, 19 bp, Mus musculus
  siRNA target sequence for Gabt4 (NM_172890.1,294-312).
cttacgtggtgtttttcat

SEQ ID NO: 639892 - DNA, 19 bp, Mus musculus
  siRNA target sequence for Gabt4 (NM_172890.1,394-412).
ggtctgccctttatttgaa

SEQ ID NO: 639893 - DNA, 19 bp, Mus musculus
  siRNA target sequence for Gabt4 (NM_172890.1,695-713).
cgttgggaactggcattat

SEQ ID NO: 639894 - DNA, 19 bp, Mus musculus
  siRNA target sequence for Gabt4 (NM_172890.1,699-717).
gggaactggcattatgtct

SEQ ID NO: 639895 - DNA, 19 bp, Mus musculus
  siRNA target sequence for Gabt4 (NM_172890.1,747-765).
gcatatggaagggtactaa

SEQ ID NO: 639896 - DNA, 19 bp, Mus musculus
  siRNA target sequence for Gabt4 (NM_172890.1,771-789).
ctggaaaggtcgtgtatgt

SEQ ID NO: 639897 - DNA, 19 bp, Mus musculus
  siRNA target sequence for Gabt4 (NM_172890.1,773-791).
ggaaaggtcgtgtatgtca

SEQ ID NO: 639898 - DNA, 19 bp, Mus musculus
  siRNA target sequence for Gabt4 (NM_172890.1,794-812).
gcaaccttcccctacatca

SEQ ID NO: 639899 - DNA, 19 bp, Mus musculus
  siRNA target sequence for Gabt4 (NM_172890.1,795-813).
caaccttcccctacatcat

SEQ ID NO: 639900 - DNA, 19 bp, Mus musculus
  siRNA target sequence for Gabt4 (NM_172890.1,925-943).
cgctgggacgcagatcttt

SEQ ID NO: 639901 - DNA, 19 bp, Mus musculus
  siRNA target sequence for Gabt4 (NM_172890.1,926-944).
gctgggacgcagatctttt

SEQ ID NO: 639902 - DNA, 19 bp, Mus musculus
  siRNA target sequence for Gabt4 (NM_172890.1,978-996).
ctctggggagttacaacaa

SEQ ID NO: 639903 - DNA, 19 bp, Mus musculus
  siRNA target sequence for Gabt4 (NM_172890.1,982-1000).
ggggagttacaacaactat

SEQ ID NO: 639904 - DNA, 19 bp, Mus musculus
  siRNA target sequence for Gabt4 (NM_172890.1,983-1001).
gggagttacaacaactata

SEQ ID NO: 639905 - DNA, 19 bp, Mus musculus
  siRNA target sequence for Gabt4 (NM_172890.1,984-1002).
ggagttacaacaactataa

SEQ ID NO: 639906 - DNA, 19 bp, Mus musculus
  siRNA target sequence for Gabt4 (NM_172890.1,987-1005).
gttacaacaactataacaa

SEQ ID NO: 639907 - DNA, 19 bp, Mus musculus
  siRNA target sequence for Gabt4 (NM_172890.1,1011-1029).
gctacagggactgcattat

SEQ ID NO: 639908 - DNA, 19 bp, Mus musculus
  siRNA target sequence for Gabt4 (NM_172890.1,1206-1224).
gggccaccttgttcttcat

SEQ ID NO: 639909 - DNA, 19 bp, Mus musculus
  siRNA target sequence for Gabt4 (NM_172890.1,1389-1407).
ccgagggaggcatgtacat

SEQ ID NO: 639910 - DNA, 19 bp, Mus musculus
  siRNA target sequence for Gabt4 (NM_172890.1,1497-1515).
gaagcaaccggttctatga

SEQ ID NO: 639911 - DNA, 19 bp, Mus musculus
  siRNA target sequence for Gabt4 (NM_172890.1,1544-1562).
ccactgtcactcatcaagt

SEQ ID NO: 639912 - DNA, 19 bp, Mus musculus
  siRNA target sequence for Gabt4 (NM_172890.1,1593-1611).
gtgcgggcatcttcatctt

SEQ ID NO: 639913 - DNA, 19 bp, Mus musculus
  siRNA target sequence for Gabt4 (NM_172890.1,1717-1735).
cccactctggatcttcatt

SEQ ID NO: 639914 - DNA, 19 bp, Mus musculus
  siRNA target sequence for Gabt4 (NM_172890.1,1718-1736).
ccactctggatcttcatta

SEQ ID NO: 639915 - DNA, 19 bp, Mus musculus
  siRNA target sequence for Gabt4 (NM_172890.1,1754-1772).
ggcacactgcccgagaaat

SEQ ID NO: 639916 - DNA, 19 bp, Mus musculus
  siRNA target sequence for Gabt4 (NM_172890.1,1755-1773).
gcacactgcccgagaaatt

SEQ ID NO: 639917 - DNA, 19 bp, Mus musculus
  siRNA target sequence for Gabt4 (NM_172890.1,1756-1774).
cacactgcccgagaaatta

SEQ ID NO: 639918 - DNA, 19 bp, Mus musculus
  siRNA target sequence for Gabt4 (NM_172890.1,1758-1776).
cactgcccgagaaattaca

SEQ ID NO: 639919 - DNA, 19 bp, Mus musculus
  siRNA target sequence for Gabt4 (NM_172890.1,1789-1807).
ccccagcgccgatctgaaa

SEQ ID NO: 639920 - DNA, 19 bp, Mus musculus
  siRNA target sequence for Gabt4 (NM_172890.1,1790-1808).
cccagcgccgatctgaaaa

SEQ ID NO: 639921 - DNA, 19 bp, Mus musculus
  siRNA target sequence for Gabt4 (NM_172890.1,1836-1854).
ggacggtgaccgttaatga

SEQ ID NO: 639922 - DNA, 19 bp, Mus musculus
  siRNA target sequence for Slc6a1 (NM_178703.2,709-727).
cacgaccctgccatggaaa

SEQ ID NO: 639923 - DNA, 19 bp, Mus musculus
  siRNA target sequence for Slc6a1 (NM_178703.2,755-773).
cgctgcttctccaactaca

SEQ ID NO: 639924 - DNA, 19 bp, Mus musculus
  siRNA target sequence for Slc6a1 (NM_178703.2,902-920).
gcctgggtgctcgtgtatt

SEQ ID NO: 639925 - DNA, 19 bp, Mus musculus
  siRNA target sequence for Slc6a1 (NM_178703.2,903-921).
cctgggtgctcgtgtattt

SEQ ID NO: 639926 - DNA, 19 bp, Mus musculus
  siRNA target sequence for Slc6a1 (NM_178703.2,980-998).
ccctacatcatgcttatca

SEQ ID NO: 639927 - DNA, 19 bp, Mus musculus
  siRNA target sequence for Slc6a1 (NM_178703.2,1069-1087).
ccgaaagctgtctgattct

SEQ ID NO: 639928 - DNA, 19 bp, Mus musculus
  siRNA target sequence for Slc6a1 (NM_178703.2,1157-1175).
ctgggaagctacaactctt

SEQ ID NO: 639929 - DNA, 19 bp, Mus musculus
  siRNA target sequence for Slc6a1 (NM_178703.2,1409-1427).
ctgatgctgggcattgaca

SEQ ID NO: 639930 - DNA, 19 bp, Mus musculus
  siRNA target sequence for Slc6a1 (NM_178703.2,1491-1509).
gcaatcgccgtgaactctt

SEQ ID NO: 639931 - DNA, 19 bp, Mus musculus
  siRNA target sequence for Slc6a1 (NM_178703.2,1538-1556).
ctgattggcctgtctaaca

SEQ ID NO: 639932 - DNA, 19 bp, Mus musculus
  siRNA target sequence for Slc6a1 (NM_178703.2,1668-1686).
gtgtcaaccggttctatga

SEQ ID NO: 639933 - DNA, 19 bp, Mus musculus
  siRNA target sequence for Slc6a1 (NM_178703.2,1890-1908).
ggtacatggcttacatgtt

SEQ ID NO: 639934 - DNA, 19 bp, Mus musculus
  siRNA target sequence for Slc6a1 (NM_178703.2,1936-1954).
gcgtctccaggtcatgatt

SEQ ID NO: 639935 - DNA, 19 bp, Mus musculus
  siRNA target sequence for Slc6a1 (NM_178703.2,1951-1969).
gattcagcccagtgaagat

SEQ ID NO: 639936 - DNA, 19 bp, Mus musculus
  siRNA target sequence for Slc6a12 (NM_133661.1,430-448).
ggccaatggaccaacaaga

SEQ ID NO: 639937 - DNA, 19 bp, Mus musculus
  siRNA target sequence for Slc6a12 (NM_133661.1,431-449).
gccaatggaccaacaagat

SEQ ID NO: 639938 - DNA, 19 bp, Mus musculus
  siRNA target sequence for Slc6a12 (NM_133661.1,604-622).
gcactgggccagtatagca

SEQ ID NO: 639939 - DNA, 19 bp, Mus musculus
  siRNA target sequence for Slc6a12 (NM_133661.1,686-704).
ctgtggtcatcgagtctta

SEQ ID NO: 639940 - DNA, 19 bp, Mus musculus
  siRNA target sequence for Slc6a12 (NM_133661.1,691-709).
gtcatcgagtcttatttga

SEQ ID NO: 639941 - DNA, 19 bp, Mus musculus
  siRNA target sequence for Slc6a12 (NM_133661.1,701-719).
cttatttgaacatctacta

SEQ ID NO: 639942 - DNA, 19 bp, Mus musculus
  siRNA target sequence for Slc6a12 (NM_133661.1,814-832).
cactgcgtggactttctga

SEQ ID NO: 639943 - DNA, 19 bp, Mus musculus
  siRNA target sequence for Slc6a12 (NM_133661.1,818-836).
gcgtggactttctgaatca

SEQ ID NO: 639944 - DNA, 19 bp, Mus musculus
  siRNA target sequence for Slc6a12 (NM_133661.1,904-922).
cgggttttgggtattacat

SEQ ID NO: 639945 - DNA, 19 bp, Mus musculus
  siRNA target sequence for Slc6a12 (NM_133661.1,1362-1380).
gcagggaatacccatttct

SEQ ID NO: 639946 - DNA, 19 bp, Mus musculus
  siRNA target sequence for Slc6a12 (NM_133661.1,1535-1553).
ccgcttccatggatatgtt

SEQ ID NO: 639947 - DNA, 19 bp, Mus musculus
  siRNA target sequence for Slc6a12 (NM_133661.1,1691-1709).
gcggcatatgcctactctt

SEQ ID NO: 639948 - DNA, 19 bp, Mus musculus
  siRNA target sequence for Slc6a12 (NM_133661.1,1753-1771).
gccgaccgtttctatgaca

SEQ ID NO: 639949 - DNA, 19 bp, Mus musculus
  siRNA target sequence for Slc6a12 (NM_133661.1,1754-1772).
ccgaccgtttctatgacaa

SEQ ID NO: 639950 - DNA, 19 bp, Mus musculus
  siRNA target sequence for Slc6a12 (NM_133661.1,1770-1788).
caacgtggaagacatgatt

SEQ ID NO: 639951 - DNA, 19 bp, Mus musculus
  siRNA target sequence for Slc6a12 (NM_133661.1,1863-1881).
cttctccttgagcaagtat

SEQ ID NO: 639952 - DNA, 19 bp, Mus musculus
  siRNA target sequence for Slc6a12 (NM_133661.1,1875-1893).
caagtatacacctctcaaa

SEQ ID NO: 639953 - DNA, 19 bp, Mus musculus
  siRNA target sequence for Slc6a12 (NM_133661.1,1964-1982).
cctgtgtcccactctttat

SEQ ID NO: 639954 - DNA, 19 bp, Mus musculus
  siRNA target sequence for Slc6a12 (NM_133661.1,1969-1987).
gtcccactctttatcatca

SEQ ID NO: 639955 - DNA, 19 bp, Mus musculus
  siRNA target sequence for Slc6a12 (NM_133661.1,2112-2130).
gtcctctccagccaaacaa

SEQ ID NO: 639956 - DNA, 19 bp, Mus musculus
  siRNA target sequence for Slc6a12 (NM_133661.1,2114-2132).
cctctccagccaaacaaga

SEQ ID NO: 639957 - DNA, 19 bp, Mus musculus
  siRNA target sequence for Slc6a13 (NM_144512.1,57-75).
gggaacaaccagtaatgga

SEQ ID NO: 639958 - DNA, 19 bp, Mus musculus
  siRNA target sequence for Slc6a13 (NM_144512.1,403-421).
gtcagcctcctcaatgtct

SEQ ID NO: 639959 - DNA, 19 bp, Mus musculus
  siRNA target sequence for Slc6a13 (NM_144512.1,407-425).
gcctcctcaatgtctacta

SEQ ID NO: 639960 - DNA, 19 bp, Mus musculus
  siRNA target sequence for Slc6a13 (NM_144512.1,540-558).
ggccaatgattccatgaat

SEQ ID NO: 639961 - DNA, 19 bp, Mus musculus
  siRNA target sequence for Slc6a13 (NM_144512.1,807-825).
cggagcagcccaaggaatt

SEQ ID NO: 639962 - DNA, 19 bp, Mus musculus
  siRNA target sequence for Slc6a13 (NM_144512.1,1127-1145).
ctcgagctgtggtgatgtt

SEQ ID NO: 639963 - DNA, 19 bp, Mus musculus
  siRNA target sequence for Slc6a13 (NM_144512.1,1229-1247).
gccttgtgacagcattagt

SEQ ID NO: 639964 - DNA, 19 bp, Mus musculus
  siRNA target sequence for Slc6a13 (NM_144512.1,1286-1304).
gggaggtcctcatccttat

SEQ ID NO: 639965 - DNA, 19 bp, Mus musculus
  siRNA target sequence for Slc6a13 (NM_144512.1,1564-1582).
ctgttctccctgatcaaat

SEQ ID NO: 639966 - DNA, 19 bp, Mus musculus
  siRNA target sequence for Slc6a13 (NM_144512.1,1586-1604).
cgccactgacctacaacaa

SEQ ID NO: 639967 - DNA, 19 bp, Mus musculus
  siRNA target sequence for Slc6a13 (NM_144512.1,1591-1609).
ctgacctacaacaagaagt

SEQ ID NO: 639968 - DNA, 19 bp, Mus musculus
  siRNA target sequence for Slc6a13 (NM_144512.1,1676-1694).
ctgcctggagcatctacaa

SEQ ID NO: 639969 - DNA, 19 bp, Mus musculus
  siRNA target sequence for Slc6a14 (NM_020049.2,227-245).
gcagacagaaggagaaagt

SEQ ID NO: 639970 - DNA, 19 bp, Mus musculus
  siRNA target sequence for Slc6a14 (NM_020049.2,248-266).
cagcttcatccgagaactt

SEQ ID NO: 639971 - DNA, 19 bp, Mus musculus
  siRNA target sequence for Slc6a14 (NM_020049.2,298-316).
cgtggtaactggtccaaaa

SEQ ID NO: 639972 - DNA, 19 bp, Mus musculus
  siRNA target sequence for Slc6a14 (NM_020049.2,299-317).
gtggtaactggtccaaaaa

SEQ ID NO: 639973 - DNA, 19 bp, Mus musculus
  siRNA target sequence for Slc6a14 (NM_020049.2,309-327).
gtccaaaaagtcagattat

SEQ ID NO: 639974 - DNA, 19 bp, Mus musculus
  siRNA target sequence for Slc6a14 (NM_020049.2,401-419).
gcggaggtgctttcttgat

SEQ ID NO: 639975 - DNA, 19 bp, Mus musculus
  siRNA target sequence for Slc6a14 (NM_020049.2,402-420).
cggaggtgctttcttgata

SEQ ID NO: 639976 - DNA, 19 bp, Mus musculus
  siRNA target sequence for Slc6a14 (NM_020049.2,480-498).
gggacaatttgctagctta

SEQ ID NO: 639977 - DNA, 19 bp, Mus musculus
  siRNA target sequence for Slc6a14 (NM_020049.2,494-512).
gcttaggtccagtttcagt

SEQ ID NO: 639978 - DNA, 19 bp, Mus musculus
  siRNA target sequence for Slc6a14 (NM_020049.2,495-513).
cttaggtccagtttcagtt

SEQ ID NO: 639979 - DNA, 19 bp, Mus musculus
  siRNA target sequence for Slc6a14 (NM_020049.2,518-536).
ggattttgccactgtttca

SEQ ID NO: 639980 - DNA, 19 bp, Mus musculus
  siRNA target sequence for Slc6a14 (NM_020049.2,555-573).
ggtcctgatatccgttttt

SEQ ID NO: 639981 - DNA, 19 bp, Mus musculus
  siRNA target sequence for Slc6a14 (NM_020049.2,566-584).
ccgtttttgtggcaatcta

SEQ ID NO: 639982 - DNA, 19 bp, Mus musculus
  siRNA target sequence for Slc6a14 (NM_020049.2,568-586).
gtttttgtggcaatctatt

SEQ ID NO: 639983 - DNA, 19 bp, Mus musculus
  siRNA target sequence for Slc6a14 (NM_020049.2,601-619).
gcctacagcctttactact

SEQ ID NO: 639984 - DNA, 19 bp, Mus musculus
  siRNA target sequence for Slc6a14 (NM_020049.2,610-628).
ctttactacttgtttgctt

SEQ ID NO: 639985 - DNA, 19 bp, Mus musculus
  siRNA target sequence for Slc6a14 (NM_020049.2,640-658).
gtattgccgtgggcaaatt

SEQ ID NO: 639986 - DNA, 19 bp, Mus musculus
  siRNA target sequence for Slc6a14 (NM_020049.2,646-664).
ccgtgggcaaattgttctt

SEQ ID NO: 639987 - DNA, 19 bp, Mus musculus
  siRNA target sequence for Slc6a14 (NM_020049.2,683-701).
gtagcagaacaccaatagt

SEQ ID NO: 639988 - DNA, 19 bp, Mus musculus
  siRNA target sequence for Slc6a14 (NM_020049.2,700-718).
gtaactggctgtaatgtga

SEQ ID NO: 639989 - DNA, 19 bp, Mus musculus
  siRNA target sequence for Slc6a14 (NM_020049.2,725-743).
gggcaggagagatgtttat

SEQ ID NO: 639990 - DNA, 19 bp, Mus musculus
  siRNA target sequence for Slc6a14 (NM_020049.2,730-748).
ggagagatgtttatgaata

SEQ ID NO: 639991 - DNA, 19 bp, Mus musculus
  siRNA target sequence for Slc6a14 (NM_020049.2,731-749).
gagagatgtttatgaatat

SEQ ID NO: 639992 - DNA, 19 bp, Mus musculus
  siRNA target sequence for Slc6a14 (NM_020049.2,772-790).
ctcacctgcttgaatggta

SEQ ID NO: 639993 - DNA, 19 bp, Mus musculus
  siRNA target sequence for Slc6a14 (NM_020049.2,780-798).
cttgaatggtagtgaagtt

SEQ ID NO: 639994 - DNA, 19 bp, Mus musculus
  siRNA target sequence for Slc6a14 (NM_020049.2,783-801).
gaatggtagtgaagttttt

SEQ ID NO: 639995 - DNA, 19 bp, Mus musculus
  siRNA target sequence for Slc6a14 (NM_020049.2,826-844).
cagtattgggataaagtga

SEQ ID NO: 639996 - DNA, 19 bp, Mus musculus
  siRNA target sequence for Slc6a14 (NM_020049.2,995-1013).
catatgtggtccttctcat

SEQ ID NO: 639997 - DNA, 19 bp, Mus musculus
  siRNA target sequence for Slc6a14 (NM_020049.2,1002-1020).
ggtccttctcattctgtta

SEQ ID NO: 639998 - DNA, 19 bp, Mus musculus
  siRNA target sequence for Slc6a14 (NM_020049.2,1005-1023).
ccttctcattctgttaata

SEQ ID NO: 639999 - DNA, 19 bp, Mus musculus
  siRNA target sequence for Slc6a14 (NM_020049.2,1034-1052).
ctttggagggtgcatcaaa

SEQ ID NO: 640000 - DNA, 19 bp, Mus musculus
  siRNA target sequence for Slc6a14 (NM_020049.2,1174-1192).
gctctgtcatcttacaaca

SEQ ID NO: 640001 - DNA, 19 bp, Mus musculus
  siRNA target sequence for Slc6a14 (NM_020049.2,1177-1195).
ctgtcatcttacaacaagt

SEQ ID NO: 640002 - DNA, 19 bp, Mus musculus
  siRNA target sequence for Slc6a14 (NM_020049.2,1208-1226).
gttactctgatgccattat

SEQ ID NO: 640003 - DNA, 19 bp, Mus musculus
  siRNA target sequence for Slc6a14 (NM_020049.2,1212-1230).
ctctgatgccattatagtt

SEQ ID NO: 640004 - DNA, 19 bp, Mus musculus
  siRNA target sequence for Slc6a14 (NM_020049.2,1242-1260).
ctgcctcactagtgtgttt

SEQ ID NO: 640005 - DNA, 19 bp, Mus musculus
  siRNA target sequence for Slc6a14 (NM_020049.2,1257-1275).
gtttgctggatttgctata

SEQ ID NO: 640006 - DNA, 19 bp, Mus musculus
  siRNA target sequence for Slc6a14 (NM_020049.2,1298-1316).
ctcatatatctggaaaaga

SEQ ID NO: 640007 - DNA, 19 bp, Mus musculus
  siRNA target sequence for Slc6a14 (NM_020049.2,1393-1411).
ggtccattctggtccatat

SEQ ID NO: 640008 - DNA, 19 bp, Mus musculus
  siRNA target sequence for Slc6a14 (NM_020049.2,1394-1412).
gtccattctggtccatatt

SEQ ID NO: 640009 - DNA, 19 bp, Mus musculus
  siRNA target sequence for Slc6a14 (NM_020049.2,1448-1466).
ctcagtttgcttctattga

SEQ ID NO: 640010 - DNA, 19 bp, Mus musculus
  siRNA target sequence for Slc6a14 (NM_020049.2,1598-1616).
gggttcatttgattgatca

SEQ ID NO: 640011 - DNA, 19 bp, Mus musculus
  siRNA target sequence for Slc6a14 (NM_020049.2,1622-1640).
gtgctggatggggaatttt

SEQ ID NO: 640012 - DNA, 19 bp, Mus musculus
  siRNA target sequence for Slc6a14 (NM_020049.2,1625-1643).
ctggatggggaattttaat

SEQ ID NO: 640013 - DNA, 19 bp, Mus musculus
  siRNA target sequence for Slc6a14 (NM_020049.2,1663-1681).
gcaggaatcatctggattt

SEQ ID NO: 640014 - DNA, 19 bp, Mus musculus
  siRNA target sequence for Slc6a14 (NM_020049.2,1723-1741).
ggagcaaaaagatggatat

SEQ ID NO: 640015 - DNA, 19 bp, Mus musculus
  siRNA target sequence for Slc6a14 (NM_020049.2,1767-1785).
gtttgtcatcactcctatt

SEQ ID NO: 640016 - DNA, 19 bp, Mus musculus
  siRNA target sequence for Slc6a14 (NM_020049.2,1804-1822).
gtctggtcactggtgaaat

SEQ ID NO: 640017 - DNA, 19 bp, Mus musculus
  siRNA target sequence for Slc6a14 (NM_020049.2,1806-1824).
ctggtcactggtgaaattt

SEQ ID NO: 640018 - DNA, 19 bp, Mus musculus
  siRNA target sequence for Slc6a14 (NM_020049.2,1808-1826).
ggtcactggtgaaatttca

SEQ ID NO: 640019 - DNA, 19 bp, Mus musculus
  siRNA target sequence for Slc6a14 (NM_020049.2,1834-1852).
gattatgctgatattccat

SEQ ID NO: 640020 - DNA, 19 bp, Mus musculus
  siRNA target sequence for Slc6a14 (NM_020049.2,1871-1889).
ctcttggctggtgtatgat

SEQ ID NO: 640021 - DNA, 19 bp, Mus musculus
  siRNA target sequence for Slc6a14 (NM_020049.2,1873-1891).
cttggctggtgtatgatca

SEQ ID NO: 640022 - DNA, 19 bp, Mus musculus
  siRNA target sequence for Slc6a14 (NM_020049.2,1899-1917).
cattatttggataccaatt

SEQ ID NO: 640023 - DNA, 19 bp, Mus musculus
  siRNA target sequence for Slc6a14 (NM_020049.2,1913-1931).
caattatggctatcataaa

SEQ ID NO: 640024 - DNA, 19 bp, Mus musculus
  siRNA target sequence for Slc6a14 (NM_020049.2,1941-1959).
ggcagaaggaaacatactt

SEQ ID NO: 640025 - DNA, 19 bp, Mus musculus
  siRNA target sequence for Slc6a14 (NM_020049.2,1957-1975).
cttcagcgtatcataagct

SEQ ID NO: 640026 - DNA, 19 bp, Mus musculus
  siRNA target sequence for Slc6a14 (NM_020049.2,2058-2076).
ggagactgaccacgaaata

SEQ ID NO: 640027 - DNA, 19 bp, Mus musculus
  siRNA target sequence for Slc6a14 (NM_020049.2,2061-2079).
gactgaccacgaaatacct

SEQ ID NO: 640028 - DNA, 19 bp, Mus musculus
  siRNA target sequence for Slc6a14 (NM_020049.2,2067-2085).
ccacgaaatacctactatt

SEQ ID NO: 640029 - DNA, 19 bp, Mus musculus
  siRNA target sequence for Slc6a14 (NM_020049.2,2068-2086).
cacgaaatacctactatta

SEQ ID NO: 640030 - DNA, 19 bp, Mus musculus
  siRNA target sequence for Slc6a14 (NM_020049.2,2070-2088).
cgaaatacctactattagt

SEQ ID NO: 640031 - DNA, 19 bp, Mus musculus
  siRNA target sequence for Slc6a15 (NM_175328.1,455-473).
ggtaaagagagatttggat

SEQ ID NO: 640032 - DNA, 19 bp, Mus musculus
  siRNA target sequence for Slc6a15 (NM_175328.1,535-553).
ctaagaagagtgaactaat

SEQ ID NO: 640033 - DNA, 19 bp, Mus musculus
  siRNA target sequence for Slc6a15 (NM_175328.1,629-647).
cagtaagctgcaatacatt

SEQ ID NO: 640034 - DNA, 19 bp, Mus musculus
  siRNA target sequence for Slc6a15 (NM_175328.1,631-649).
gtaagctgcaatacattct

SEQ ID NO: 640035 - DNA, 19 bp, Mus musculus
  siRNA target sequence for Slc6a15 (NM_175328.1,697-715).
catacctctgccaaaagaa

SEQ ID NO: 640036 - DNA, 19 bp, Mus musculus
  siRNA target sequence for Slc6a15 (NM_175328.1,727-745).
catatcttttgccgtattt

SEQ ID NO: 640037 - DNA, 19 bp, Mus musculus
  siRNA target sequence for Slc6a15 (NM_175328.1,737-755).
gccgtatttaatactactt

SEQ ID NO: 640038 - DNA, 19 bp, Mus musculus
  siRNA target sequence for Slc6a15 (NM_175328.1,739-757).
cgtatttaatactacttct

SEQ ID NO: 640039 - DNA, 19 bp, Mus musculus
  siRNA target sequence for Slc6a15 (NM_175328.1,761-779).
gataggaattccactcttt

SEQ ID NO: 640040 - DNA, 19 bp, Mus musculus
  siRNA target sequence for Slc6a15 (NM_175328.1,820-838).
gcattggggtttggaatta

SEQ ID NO: 640041 - DNA, 19 bp, Mus musculus
  siRNA target sequence for Slc6a15 (NM_175328.1,921-939).
ggctggacattattttact

SEQ ID NO: 640042 - DNA, 19 bp, Mus musculus
  siRNA target sequence for Slc6a15 (NM_175328.1,986-1004).
ggtgaaaaacgcatctcat

SEQ ID NO: 640043 - DNA, 19 bp, Mus musculus
  siRNA target sequence for Slc6a15 (NM_175328.1,987-1005).
gtgaaaaacgcatctcata

SEQ ID NO: 640044 - DNA, 19 bp, Mus musculus
  siRNA target sequence for Slc6a15 (NM_175328.1,989-1007).
gaaaaacgcatctcatact

SEQ ID NO: 640045 - DNA, 19 bp, Mus musculus
  siRNA target sequence for Slc6a15 (NM_175328.1,995-1013).
cgcatctcatacttatgtt

SEQ ID NO: 640046 - DNA, 19 bp, Mus musculus
  siRNA target sequence for Slc6a15 (NM_175328.1,1033-1051).
gttctgccaccacctatta

SEQ ID NO: 640047 - DNA, 19 bp, Mus musculus
  siRNA target sequence for Slc6a15 (NM_175328.1,1059-1077).
cgggaagcactggatatca

SEQ ID NO: 640048 - DNA, 19 bp, Mus musculus
  siRNA target sequence for Slc6a15 (NM_175328.1,1214-1232).
cccctacgtggtccttata

SEQ ID NO: 640049 - DNA, 19 bp, Mus musculus
  siRNA target sequence for Slc6a15 (NM_175328.1,1215-1233).
ccctacgtggtccttatat

SEQ ID NO: 640050 - DNA, 19 bp, Mus musculus
  siRNA target sequence for Slc6a15 (NM_175328.1,1217-1235).
ctacgtggtccttatatgt

SEQ ID NO: 640051 - DNA, 19 bp, Mus musculus
  siRNA target sequence for Slc6a15 (NM_175328.1,1380-1398).
ggagtcatcgcgttttcaa

SEQ ID NO: 640052 - DNA, 19 bp, Mus musculus
  siRNA target sequence for Slc6a15 (NM_175328.1,1383-1401).
gtcatcgcgttttcaagtt

SEQ ID NO: 640053 - DNA, 19 bp, Mus musculus
  siRNA target sequence for Slc6a15 (NM_175328.1,1385-1403).
catcgcgttttcaagttat

SEQ ID NO: 640054 - DNA, 19 bp, Mus musculus
  siRNA target sequence for Slc6a15 (NM_175328.1,1389-1407).
gcgttttcaagttataaca

SEQ ID NO: 640055 - DNA, 19 bp, Mus musculus
  siRNA target sequence for Slc6a15 (NM_175328.1,1390-1408).
cgttttcaagttataacaa

SEQ ID NO: 640056 - DNA, 19 bp, Mus musculus
  siRNA target sequence for Slc6a15 (NM_175328.1,1434-1452).
gctgtcctagtgtctttca

SEQ ID NO: 640057 - DNA, 19 bp, Mus musculus
  siRNA target sequence for Slc6a15 (NM_175328.1,1454-1472).
caactttttcacttcagtt

SEQ ID NO: 640058 - DNA, 19 bp, Mus musculus
  siRNA target sequence for Slc6a15 (NM_175328.1,1504-1522).
ggttcaaagccaatatcgt

SEQ ID NO: 640059 - DNA, 19 bp, Mus musculus
  siRNA target sequence for Slc6a15 (NM_175328.1,1505-1523).
gttcaaagccaatatcgta

SEQ ID NO: 640060 - DNA, 19 bp, Mus musculus
  siRNA target sequence for Slc6a15 (NM_175328.1,1514-1532).
caatatcgtaaatgaaaaa

SEQ ID NO: 640061 - DNA, 19 bp, Mus musculus
  siRNA target sequence for Slc6a15 (NM_175328.1,1540-1558).
cacaaaactccgagatgat

SEQ ID NO: 640062 - DNA, 19 bp, Mus musculus
  siRNA target sequence for Slc6a15 (NM_175328.1,1542-1560).
caaaactccgagatgatct

SEQ ID NO: 640063 - DNA, 19 bp, Mus musculus
  siRNA target sequence for Slc6a15 (NM_175328.1,1549-1567).
ccgagatgatcttgaaact

SEQ ID NO: 640064 - DNA, 19 bp, Mus musculus
  siRNA target sequence for Slc6a15 (NM_175328.1,1583-1601).
cattagttgggatgtcatt

SEQ ID NO: 640065 - DNA, 19 bp, Mus musculus
  siRNA target sequence for Slc6a15 (NM_175328.1,1628-1646).
cactgtggaagattatcgt

SEQ ID NO: 640066 - DNA, 19 bp, Mus musculus
  siRNA target sequence for Slc6a15 (NM_175328.1,1634-1652).
ggaagattatcgtttagtt

SEQ ID NO: 640067 - DNA, 19 bp, Mus musculus
  siRNA target sequence for Slc6a15 (NM_175328.1,1635-1653).
gaagattatcgtttagttt

SEQ ID NO: 640068 - DNA, 19 bp, Mus musculus
  siRNA target sequence for Slc6a15 (NM_175328.1,1645-1663).
gtttagtttacgacatcat

SEQ ID NO: 640069 - DNA, 19 bp, Mus musculus
  siRNA target sequence for Slc6a15 (NM_175328.1,1650-1668).
gtttacgacatcattcaaa

SEQ ID NO: 640070 - DNA, 19 bp, Mus musculus
  siRNA target sequence for Slc6a15 (NM_175328.1,1757-1775).
ggctttcattgcctttaca

SEQ ID NO: 640071 - DNA, 19 bp, Mus musculus
  siRNA target sequence for Slc6a15 (NM_175328.1,1844-1862).
cggcctcggcagcatgttt

SEQ ID NO: 640072 - DNA, 19 bp, Mus musculus
  siRNA target sequence for Slc6a15 (NM_175328.1,1848-1866).
ctcggcagcatgtttggaa

SEQ ID NO: 640073 - DNA, 19 bp, Mus musculus
  siRNA target sequence for Slc6a15 (NM_175328.1,1852-1870).
gcagcatgtttggaacaat

SEQ ID NO: 640074 - DNA, 19 bp, Mus musculus
  siRNA target sequence for Slc6a15 (NM_175328.1,1876-1894).
ggatcatcactcctattgt

SEQ ID NO: 640075 - DNA, 19 bp, Mus musculus
  siRNA target sequence for Slc6a15 (NM_175328.1,1939-1957).
gcctcctggcattttgtat

SEQ ID NO: 640076 - DNA, 19 bp, Mus musculus
  siRNA target sequence for Slc6a15 (NM_175328.1,1954-1972).
gtattggcttgatattcgt

SEQ ID NO: 640077 - DNA, 19 bp, Mus musculus
  siRNA target sequence for Slc6a15 (NM_175328.1,2023-2041).
cattgcctctgctaattgt

SEQ ID NO: 640078 - DNA, 19 bp, Mus musculus
  siRNA target sequence for Slc6a15 (NM_175328.1,2069-2087).
ctttgtttatggcatagat

SEQ ID NO: 640079 - DNA, 19 bp, Mus musculus
  siRNA target sequence for Slc6a15 (NM_175328.1,2103-2121).
ctcacagacatgttaggat

SEQ ID NO: 640080 - DNA, 19 bp, Mus musculus
  siRNA target sequence for Slc6a15 (NM_175328.1,2105-2123).
cacagacatgttaggattt

SEQ ID NO: 640081 - DNA, 19 bp, Mus musculus
  siRNA target sequence for Slc6a15 (NM_175328.1,2124-2142).
gctccaagcaaatattact

SEQ ID NO: 640082 - DNA, 19 bp, Mus musculus
  siRNA target sequence for Slc6a15 (NM_175328.1,2125-2143).
ctccaagcaaatattacta

SEQ ID NO: 640083 - DNA, 19 bp, Mus musculus
  siRNA target sequence for Slc6a15 (NM_175328.1,2167-2185).
ctctaatgctactaacgtt

SEQ ID NO: 640084 - DNA, 19 bp, Mus musculus
  siRNA target sequence for Slc6a15 (NM_175328.1,2174-2192).
gctactaacgttgctaata

SEQ ID NO: 640085 - DNA, 19 bp, Mus musculus
  siRNA target sequence for Slc6a15 (NM_175328.1,2178-2196).
ctaacgttgctaatagcta

SEQ ID NO: 640086 - DNA, 19 bp, Mus musculus
  siRNA target sequence for Slc6a15 (NM_175328.1,2183-2201).
gttgctaatagctagcatt

SEQ ID NO: 640087 - DNA, 19 bp, Mus musculus
  siRNA target sequence for Slc6a15 (NM_175328.1,2284-2302).
gggggatggtcgtctgttt

SEQ ID NO: 640088 - DNA, 19 bp, Mus musculus
  siRNA target sequence for Slc6a15 (NM_175328.1,2288-2306).
gatggtcgtctgtttctct

SEQ ID NO: 640089 - DNA, 19 bp, Mus musculus
  siRNA target sequence for Slc6a15 (NM_175328.1,2353-2371).
gtcgctgcaacctcataga

SEQ ID NO: 640090 - DNA, 19 bp, Mus musculus
  siRNA target sequence for Slc6a15 (NM_175328.1,2356-2374).
gctgcaacctcatagatga

SEQ ID NO: 640091 - DNA, 19 bp, Mus musculus
  siRNA target sequence for Slc6a15 (NM_175328.1,2357-2375).
ctgcaacctcatagatgat

SEQ ID NO: 640092 - DNA, 19 bp, Mus musculus
  siRNA target sequence for Slc6a15 (NM_175328.1,2360-2378).
caacctcatagatgatagt

SEQ ID NO: 640093 - DNA, 19 bp, Mus musculus
  siRNA target sequence for Slc6a15 (NM_175328.1,2363-2381).
cctcatagatgatagttct

SEQ ID NO: 640094 - DNA, 19 bp, Mus musculus
  siRNA target sequence for Slc6a15 (NM_175328.1,2391-2409).
gcctccgtgacctataaga

SEQ ID NO: 640095 - DNA, 19 bp, Mus musculus
  siRNA target sequence for Slc6a15 (NM_175328.1,2393-2411).
ctccgtgacctataagaga

SEQ ID NO: 640096 - DNA, 19 bp, Mus musculus
  siRNA target sequence for Slc6a15 (NM_175328.1,2458-2476).
gcctcattcatggaaagat

SEQ ID NO: 640097 - DNA, 19 bp, Mus musculus
  siRNA target sequence for Slc6a15 (NM_175328.1,2459-2477).
cctcattcatggaaagata

SEQ ID NO: 640098 - DNA, 19 bp, Mus musculus
  siRNA target sequence for Slc6a15 (NM_175328.1,2470-2488).
gaaagataccgagtgaaat

SEQ ID NO: 640099 - DNA, 19 bp, Mus musculus
  siRNA target sequence for Slc6a15 (NM_175328.1,2474-2492).
gataccgagtgaaatgtca

SEQ ID NO: 640100 - DNA, 19 bp, Mus musculus
  siRNA target sequence for Slc6a15 (NM_175328.1,2491-2509).
catctccaaattttggtaa

SEQ ID NO: 640101 - DNA, 19 bp, Mus musculus
  siRNA target sequence for Slc6a15 (NM_175328.1,2494-2512).
ctccaaattttggtaaaaa

SEQ ID NO: 640102 - DNA, 19 bp, Mus musculus
  siRNA target sequence for Slc6a15 (NM_175328.1,2566-2584).
gctatgggattgggtattt

SEQ ID NO: 640103 - DNA, 19 bp, Mus musculus
  siRNA target sequence for Slc6a2 (NM_009209.2,21-39).
gcttctggcgcgaatgaat

SEQ ID NO: 640104 - DNA, 19 bp, Mus musculus
  siRNA target sequence for Slc6a2 (NM_009209.2,101-119).
gcaaaaccgccgatctact

SEQ ID NO: 640105 - DNA, 19 bp, Mus musculus
  siRNA target sequence for Slc6a2 (NM_009209.2,102-120).
caaaaccgccgatctacta

SEQ ID NO: 640106 - DNA, 19 bp, Mus musculus
  siRNA target sequence for Slc6a2 (NM_009209.2,332-350).
ctgggatgcctctgtttta

SEQ ID NO: 640107 - DNA, 19 bp, Mus musculus
  siRNA target sequence for Slc6a2 (NM_009209.2,335-353).
ggatgcctctgttttacat

SEQ ID NO: 640108 - DNA, 19 bp, Mus musculus
  siRNA target sequence for Slc6a2 (NM_009209.2,452-470).
ccctctatgtcggctttta

SEQ ID NO: 640109 - DNA, 19 bp, Mus musculus
  siRNA target sequence for Slc6a2 (NM_009209.2,454-472).
ctctatgtcggcttttact

SEQ ID NO: 640110 - DNA, 19 bp, Mus musculus
  siRNA target sequence for Slc6a2 (NM_009209.2,496-514).
ctctactacctctttgcat

SEQ ID NO: 640111 - DNA, 19 bp, Mus musculus
  siRNA target sequence for Slc6a2 (NM_009209.2,603-621).
gctgggtgaccataccaaa

SEQ ID NO: 640112 - DNA, 19 bp, Mus musculus
  siRNA target sequence for Slc6a2 (NM_009209.2,604-622).
ctgggtgaccataccaaat

SEQ ID NO: 640113 - DNA, 19 bp, Mus musculus
  siRNA target sequence for Slc6a2 (NM_009209.2,607-625).
ggtgaccataccaaatact

SEQ ID NO: 640114 - DNA, 19 bp, Mus musculus
  siRNA target sequence for Slc6a2 (NM_009209.2,825-843).
gccttactttgtcttgttt

SEQ ID NO: 640115 - DNA, 19 bp, Mus musculus
  siRNA target sequence for Slc6a2 (NM_009209.2,1115-1133).
gttatatggcccatgaaca

SEQ ID NO: 640116 - DNA, 19 bp, Mus musculus
  siRNA target sequence for Slc6a2 (NM_009209.2,1258-1276).
gctctggggctagatagtt

SEQ ID NO: 640117 - DNA, 19 bp, Mus musculus
  siRNA target sequence for Slc6a2 (NM_009209.2,1261-1279).
ctggggctagatagttcaa

SEQ ID NO: 640118 - DNA, 19 bp, Mus musculus
  siRNA target sequence for Slc6a2 (NM_009209.2,1381-1399).
cttctggcattgttttgca

SEQ ID NO: 640119 - DNA, 19 bp, Mus musculus
  siRNA target sequence for Slc6a2 (NM_009209.2,1386-1404).
ggcattgttttgcataaca

SEQ ID NO: 640120 - DNA, 19 bp, Mus musculus
  siRNA target sequence for Slc6a2 (NM_009209.2,1403-1421).
caaagggagggatttatgt

SEQ ID NO: 640121 - DNA, 19 bp, Mus musculus
  siRNA target sequence for Slc6a2 (NM_009209.2,1448-1466).
caggcacctccattctgtt

SEQ ID NO: 640122 - DNA, 19 bp, Mus musculus
  siRNA target sequence for Slc6a2 (NM_009209.2,1473-1491).
gcttatggaagctattgga

SEQ ID NO: 640123 - DNA, 19 bp, Mus musculus
  siRNA target sequence for Slc6a2 (NM_009209.2,1727-1745).
ctgcctatgtcatctacaa

SEQ ID NO: 640124 - DNA, 19 bp, Mus musculus
  siRNA target sequence for Slc6a2 (NM_009209.2,1729-1747).
gcctatgtcatctacaagt

SEQ ID NO: 640125 - DNA, 19 bp, Mus musculus
  siRNA target sequence for Slc6a2 (NM_009209.2,1790-1808).
gaatcaccccggagaatga

SEQ ID NO: 640126 - DNA, 19 bp, Mus musculus
  siRNA target sequence for Slc6a3 (NM_010020.2,175-193).
ctccgtgggaccaatgtct

SEQ ID NO: 640127 - DNA, 19 bp, Mus musculus
  siRNA target sequence for Slc6a3 (NM_010020.2,315-333).
caccagtggaggttcaaga

SEQ ID NO: 640128 - DNA, 19 bp, Mus musculus
  siRNA target sequence for Slc6a3 (NM_010020.2,512-530).
gctctcgggcagttcaaca

SEQ ID NO: 640129 - DNA, 19 bp, Mus musculus
  siRNA target sequence for Slc6a3 (NM_010020.2,784-802).
cacacccgctgctgagtat

SEQ ID NO: 640130 - DNA, 19 bp, Mus musculus
  siRNA target sequence for Slc6a3 (NM_010020.2,789-807).
ccgctgctgagtattttga

SEQ ID NO: 640131 - DNA, 19 bp, Mus musculus
  siRNA target sequence for Slc6a3 (NM_010020.2,1168-1186).
caccaataactgctataga

SEQ ID NO: 640132 - DNA, 19 bp, Mus musculus
  siRNA target sequence for Slc6a3 (NM_010020.2,1230-1248).
cctctggcttcgttgtctt

SEQ ID NO: 640133 - DNA, 19 bp, Mus musculus
  siRNA target sequence for Slc6a3 (NM_010020.2,1313-1331).
cctgggttgatcttcatca

SEQ ID NO: 640134 - DNA, 19 bp, Mus musculus
  siRNA target sequence for Slc6a3 (NM_010020.2,1314-1332).
ctgggttgatcttcatcat

SEQ ID NO: 640135 - DNA, 19 bp, Mus musculus
  siRNA target sequence for Slc6a3 (NM_010020.2,1449-1467).
ctgggcttgtcgatgagtt

SEQ ID NO: 640136 - DNA, 19 bp, Mus musculus
  siRNA target sequence for Slc6a3 (NM_010020.2,1548-1566).
ccaacggtggcatctatgt

SEQ ID NO: 640137 - DNA, 19 bp, Mus musculus
  siRNA target sequence for Slc6a3 (NM_010020.2,1760-1778).
gtcgtggtcagcattgtga

SEQ ID NO: 640138 - DNA, 19 bp, Mus musculus
  siRNA target sequence for Slc6a3 (NM_010020.2,1871-1889).
cccatttatgccacctata

SEQ ID NO: 640139 - DNA, 19 bp, Mus musculus
  siRNA target sequence for Slc6a3 (NM_010020.2,1872-1890).
ccatttatgccacctataa

SEQ ID NO: 640140 - DNA, 19 bp, Mus musculus
  siRNA target sequence for Slc6a3 (NM_010020.2,1908-1926).
ggtccttccgagagaaact

SEQ ID NO: 640141 - DNA, 19 bp, Mus musculus
  siRNA target sequence for Slc6a3 (NM_010020.2,1973-1991).
ggggaggtgcgccaattca

SEQ ID NO: 640142 - DNA, 19 bp, Mus musculus
  siRNA target sequence for Slc6a6 (NM_009320.3,284-302).
gaagctgcaatgtctgaaa

SEQ ID NO: 640143 - DNA, 19 bp, Mus musculus
  siRNA target sequence for Slc6a6 (NM_009320.3,349-367).
gcacacggcctgaagatga

SEQ ID NO: 640144 - DNA, 19 bp, Mus musculus
  siRNA target sequence for Slc6a6 (NM_009320.3,403-421).
ccagcaagatcgactttgt

SEQ ID NO: 640145 - DNA, 19 bp, Mus musculus
  siRNA target sequence for Slc6a6 (NM_009320.3,470-488).
cccgtacctctgctacaaa

SEQ ID NO: 640146 - DNA, 19 bp, Mus musculus
  siRNA target sequence for Slc6a6 (NM_009320.3,502-520).
cgttcctcataccgtattt

SEQ ID NO: 640147 - DNA, 19 bp, Mus musculus
  siRNA target sequence for Slc6a6 (NM_009320.3,645-663).
gcatccatcgtcattgtgt

SEQ ID NO: 640148 - DNA, 19 bp, Mus musculus
  siRNA target sequence for Slc6a6 (NM_009320.3,700-718).
gggccacatactacctatt

SEQ ID NO: 640149 - DNA, 19 bp, Mus musculus
  siRNA target sequence for Slc6a6 (NM_009320.3,703-721).
ccacatactacctattcca

SEQ ID NO: 640150 - DNA, 19 bp, Mus musculus
  siRNA target sequence for Slc6a6 (NM_009320.3,825-843).
cttagcactgccaacttca

SEQ ID NO: 640151 - DNA, 19 bp, Mus musculus
  siRNA target sequence for Slc6a6 (NM_009320.3,1077-1095).
gctggtgaaggcatcaaat

SEQ ID NO: 640152 - DNA, 19 bp, Mus musculus
  siRNA target sequence for Slc6a6 (NM_009320.3,1078-1096).
ctggtgaaggcatcaaatt

SEQ ID NO: 640153 - DNA, 19 bp, Mus musculus
  siRNA target sequence for Slc6a6 (NM_009320.3,1146-1164).
gacgctggaactcagatat

SEQ ID NO: 640154 - DNA, 19 bp, Mus musculus
  siRNA target sequence for Slc6a6 (NM_009320.3,1198-1216).
cctcactgggaagctataa

SEQ ID NO: 640155 - DNA, 19 bp, Mus musculus
  siRNA target sequence for Slc6a6 (NM_009320.3,1265-1283).
gaacagtggtaccagtttt

SEQ ID NO: 640156 - DNA, 19 bp, Mus musculus
  siRNA target sequence for Slc6a6 (NM_009320.3,1284-1302).
gtgtctggcttcgcaattt

SEQ ID NO: 640157 - DNA, 19 bp, Mus musculus
  siRNA target sequence for Slc6a6 (NM_009320.3,1290-1308).
ggcttcgcaattttttcca

SEQ ID NO: 640158 - DNA, 19 bp, Mus musculus
  siRNA target sequence for Slc6a6 (NM_009320.3,1291-1309).
gcttcgcaattttttccat

SEQ ID NO: 640159 - DNA, 19 bp, Mus musculus
  siRNA target sequence for Slc6a6 (NM_009320.3,1424-1442).
cttttggtctattctgttt

SEQ ID NO: 640160 - DNA, 19 bp, Mus musculus
  siRNA target sequence for Slc6a6 (NM_009320.3,1469-1487).
ggacagccagtttgttgaa

SEQ ID NO: 640161 - DNA, 19 bp, Mus musculus
  siRNA target sequence for Slc6a6 (NM_009320.3,1488-1506).
gtcgaaggacagatcacat

SEQ ID NO: 640162 - DNA, 19 bp, Mus musculus
  siRNA target sequence for Slc6a6 (NM_009320.3,1532-1550).
cctaaggaagggttatcgt

SEQ ID NO: 640163 - DNA, 19 bp, Mus musculus
  siRNA target sequence for Slc6a6 (NM_009320.3,1542-1560).
ggttatcgtcgggaaatct

SEQ ID NO: 640164 - DNA, 19 bp, Mus musculus
  siRNA target sequence for Slc6a6 (NM_009320.3,1543-1561).
gttatcgtcgggaaatctt

SEQ ID NO: 640165 - DNA, 19 bp, Mus musculus
  siRNA target sequence for Slc6a6 (NM_009320.3,1610-1628).
gacggagggtggcatgtat

SEQ ID NO: 640166 - DNA, 19 bp, Mus musculus
  siRNA target sequence for Slc6a6 (NM_009320.3,1612-1630).
cggagggtggcatgtatgt

SEQ ID NO: 640167 - DNA, 19 bp, Mus musculus
  siRNA target sequence for Slc6a6 (NM_009320.3,1679-1697).
ggttgcattctttgaatgt

SEQ ID NO: 640168 - DNA, 19 bp, Mus musculus
  siRNA target sequence for Slc6a6 (NM_009320.3,1711-1729).
ggatatatggcggtgataa

SEQ ID NO: 640169 - DNA, 19 bp, Mus musculus
  siRNA target sequence for Slc6a6 (NM_009320.3,1720-1738).
gcggtgataacttatatga

SEQ ID NO: 640170 - DNA, 19 bp, Mus musculus
  siRNA target sequence for Slc6a6 (NM_009320.3,1832-1850).
cttctcgcttgtcaagtat

SEQ ID NO: 640171 - DNA, 19 bp, Mus musculus
  siRNA target sequence for Slc6a6 (NM_009320.3,1835-1853).
ctcgcttgtcaagtatgta

SEQ ID NO: 640172 - DNA, 19 bp, Mus musculus
  siRNA target sequence for Slc6a6 (NM_009320.3,1851-1869).
gtacccctgacctacaaca

SEQ ID NO: 640173 - DNA, 19 bp, Mus musculus
  siRNA target sequence for Slc6a6 (NM_009320.3,1936-1954).
gtatccccttggtcattgt

SEQ ID NO: 640174 - DNA, 19 bp, Mus musculus
  siRNA target sequence for Slc6a6 (NM_009320.3,1978-1996).
gaccgctccgcgtgagaat

SEQ ID NO: 640175 - DNA, 19 bp, Mus musculus
  siRNA target sequence for Slc6a6 (NM_009320.3,1981-1999).
cgctccgcgtgagaatcaa

SEQ ID NO: 640176 - DNA, 19 bp, Mus musculus
  siRNA target sequence for Slc6a6 (NM_009320.3,1982-2000).
gctccgcgtgagaatcaaa

SEQ ID NO: 640177 - DNA, 19 bp, Mus musculus
  siRNA target sequence for Slc6a6 (NM_009320.3,1983-2001).
ctccgcgtgagaatcaaat

SEQ ID NO: 640178 - DNA, 19 bp, Mus musculus
  siRNA target sequence for Slc6a6 (NM_009320.3,1987-2005).
gcgtgagaatcaaatacct

SEQ ID NO: 640179 - DNA, 19 bp, Mus musculus
  siRNA target sequence for Slc6a6 (NM_009320.3,2049-2067).
ggggccacaccctttcact

SEQ ID NO: 640180 - DNA, 19 bp, Mus musculus
  siRNA target sequence for Slc6a6 (NM_009320.3,2084-2102).
gaacggcgcactcatgaaa

SEQ ID NO: 640181 - DNA, 19 bp, Mus musculus
  siRNA target sequence for Slc6a9 (NM_008135.1,332-350).
gcaaccagatcgagtttgt

SEQ ID NO: 640182 - DNA, 19 bp, Mus musculus
  siRNA target sequence for Slc6a9 (NM_008135.1,333-351).
caaccagatcgagtttgta

SEQ ID NO: 640183 - DNA, 19 bp, Mus musculus
  siRNA target sequence for Slc6a9 (NM_008135.1,467-485).
gcgggattcctctcttctt

SEQ ID NO: 640184 - DNA, 19 bp, Mus musculus
  siRNA target sequence for Slc6a9 (NM_008135.1,538-556).
cggatcagccccatgttca

SEQ ID NO: 640185 - DNA, 19 bp, Mus musculus
  siRNA target sequence for Slc6a9 (NM_008135.1,539-557).
ggatcagccccatgttcaa

SEQ ID NO: 640186 - DNA, 19 bp, Mus musculus
  siRNA target sequence for Slc6a9 (NM_008135.1,540-558).
gatcagccccatgttcaaa

SEQ ID NO: 640187 - DNA, 19 bp, Mus musculus
  siRNA target sequence for Slc6a9 (NM_008135.1,560-578).
gcgtgggctatggtatgat

SEQ ID NO: 640188 - DNA, 19 bp, Mus musculus
  siRNA target sequence for Slc6a9 (NM_008135.1,590-608).
catacattggcatctacta

SEQ ID NO: 640189 - DNA, 19 bp, Mus musculus
  siRNA target sequence for Slc6a9 (NM_008135.1,851-869).
cagacgacattggaaactt

SEQ ID NO: 640190 - DNA, 19 bp, Mus musculus
  siRNA target sequence for Slc6a9 (NM_008135.1,956-974).
cagggaaagtggtgtactt

SEQ ID NO: 640191 - DNA, 19 bp, Mus musculus
  siRNA target sequence for Slc6a9 (NM_008135.1,1037-1055).
gagccttcacgggtatcat

SEQ ID NO: 640192 - DNA, 19 bp, Mus musculus
  siRNA target sequence for Slc6a9 (NM_008135.1,1040-1058).
ccttcacgggtatcatgta

SEQ ID NO: 640193 - DNA, 19 bp, Mus musculus
  siRNA target sequence for Slc6a9 (NM_008135.1,1163-1181).
ccatggcgtcctacaacaa

SEQ ID NO: 640194 - DNA, 19 bp, Mus musculus
  siRNA target sequence for Slc6a9 (NM_008135.1,1164-1182).
catggcgtcctacaacaaa

SEQ ID NO: 640195 - DNA, 19 bp, Mus musculus
  siRNA target sequence for Slc6a9 (NM_008135.1,1169-1187).
cgtcctacaacaaatttca

SEQ ID NO: 640196 - DNA, 19 bp, Mus musculus
  siRNA target sequence for Slc6a9 (NM_008135.1,1203-1221).
ggacagcgtcattatcagt

SEQ ID NO: 640197 - DNA, 19 bp, Mus musculus
  siRNA target sequence for Slc6a9 (NM_008135.1,1384-1402).
ccactctggtccttattgt

SEQ ID NO: 640198 - DNA, 19 bp, Mus musculus
  siRNA target sequence for Slc6a9 (NM_008135.1,1477-1495).
gatgaggtagggaatgagt

SEQ ID NO: 640199 - DNA, 19 bp, Mus musculus
  siRNA target sequence for Slc6a9 (NM_008135.1,1643-1661).
gtatcatgtgtgtatccat

SEQ ID NO: 640200 - DNA, 19 bp, Mus musculus
  siRNA target sequence for Slc6a9 (NM_008135.1,1652-1670).
gtgtatccatcatgtacat

SEQ ID NO: 640201 - DNA, 19 bp, Mus musculus
  siRNA target sequence for Slc6a9 (NM_008135.1,1654-1672).
gtatccatcatgtacatct

SEQ ID NO: 640202 - DNA, 19 bp, Mus musculus
  siRNA target sequence for Slc6a9 (NM_008135.1,1740-1758).
gatctgttggcgctttgtt

SEQ ID NO: 640203 - DNA, 19 bp, Mus musculus
  siRNA target sequence for Slc6a9 (NM_008135.1,1760-1778).
ctccggctatcatcttttt

SEQ ID NO: 640204 - DNA, 19 bp, Mus musculus
  siRNA target sequence for Slc6a9 (NM_008135.1,1762-1780).
ccggctatcatctttttca

SEQ ID NO: 640205 - DNA, 19 bp, Mus musculus
  siRNA target sequence for Slc6a9 (NM_008135.1,1763-1781).
cggctatcatctttttcat

SEQ ID NO: 640206 - DNA, 19 bp, Mus musculus
  siRNA target sequence for Slc6a9 (NM_008135.1,1937-1955).
cacttcttcagcgtttgaa

SEQ ID NO: 640207 - DNA, 19 bp, Mus musculus
  siRNA target sequence for Slc6a9 (NM_008135.1,2014-2032).
cgctacgctcccactacaa

SEQ ID NO: 640208 - DNA, 19 bp, Mus musculus
  siRNA target sequence for Xtrp2 (NM_011730.1,155-173).
gagctgcatcggttttgct

SEQ ID NO: 640209 - DNA, 19 bp, Mus musculus
  siRNA target sequence for Xtrp2 (NM_011730.1,267-285).
gagggtatcccgcttttct

SEQ ID NO: 640210 - DNA, 19 bp, Mus musculus
  siRNA target sequence for Xtrp2 (NM_011730.1,270-288).
ggtatcccgcttttctaca

SEQ ID NO: 640211 - DNA, 19 bp, Mus musculus
  siRNA target sequence for Xtrp2 (NM_011730.1,271-289).
gtatcccgcttttctacat

SEQ ID NO: 640212 - DNA, 19 bp, Mus musculus
  siRNA target sequence for Xtrp2 (NM_011730.1,311-329).
cctacggaggggaagcatt

SEQ ID NO: 640213 - DNA, 19 bp, Mus musculus
  siRNA target sequence for Xtrp2 (NM_011730.1,399-417).
gtcagtttgtactacaaca

SEQ ID NO: 640214 - DNA, 19 bp, Mus musculus
  siRNA target sequence for Xtrp2 (NM_011730.1,481-499).
catgtccgctggatctcaa

SEQ ID NO: 640215 - DNA, 19 bp, Mus musculus
  siRNA target sequence for Xtrp2 (NM_011730.1,534-552).
ggcaccgtgagctacttct

SEQ ID NO: 640216 - DNA, 19 bp, Mus musculus
  siRNA target sequence for Xtrp2 (NM_011730.1,554-572).
gtaccggcagactctgaat

SEQ ID NO: 640217 - DNA, 19 bp, Mus musculus
  siRNA target sequence for Xtrp2 (NM_011730.1,558-576).
cggcagactctgaatatca

SEQ ID NO: 640218 - DNA, 19 bp, Mus musculus
  siRNA target sequence for Xtrp2 (NM_011730.1,686-704).
gaaggtgatctactttaca

SEQ ID NO: 640219 - DNA, 19 bp, Mus musculus
  siRNA target sequence for Xtrp2 (NM_011730.1,774-792).
ggcctgatctacctgttta

SEQ ID NO: 640220 - DNA, 19 bp, Mus musculus
  siRNA target sequence for Xtrp2 (NM_011730.1,776-794).
cctgatctacctgtttact

SEQ ID NO: 640221 - DNA, 19 bp, Mus musculus
  siRNA target sequence for Xtrp2 (NM_011730.1,786-804).
ctgtttactcccaatatga

SEQ ID NO: 640222 - DNA, 19 bp, Mus musculus
  siRNA target sequence for Xtrp2 (NM_011730.1,902-920).
caacccacccaggaacaat

SEQ ID NO: 640223 - DNA, 19 bp, Mus musculus
  siRNA target sequence for Xtrp2 (NM_011730.1,1001-1019).
ggggttcaaggcatccaat

SEQ ID NO: 640224 - DNA, 19 bp, Mus musculus
  siRNA target sequence for Xtrp2 (NM_011730.1,1030-1048).
ggtgcctggacagaaatat

SEQ ID NO: 640225 - DNA, 19 bp, Mus musculus
  siRNA target sequence for Xtrp2 (NM_011730.1,1033-1051).
gcctggacagaaatatctt

SEQ ID NO: 640226 - DNA, 19 bp, Mus musculus
  siRNA target sequence for Xtrp2 (NM_011730.1,1087-1105).
gcatctccagggatgagta

SEQ ID NO: 640227 - DNA, 19 bp, Mus musculus
  siRNA target sequence for Xtrp2 (NM_011730.1,1304-1322).
gggatcttacccaaaggta

SEQ ID NO: 640228 - DNA, 19 bp, Mus musculus
  siRNA target sequence for Xtrp2 (NM_011730.1,1305-1323).
ggatcttacccaaaggtat

SEQ ID NO: 640229 - DNA, 19 bp, Mus musculus
  siRNA target sequence for Xtrp2 (NM_011730.1,1306-1324).
gatcttacccaaaggtata

SEQ ID NO: 640230 - DNA, 19 bp, Mus musculus
  siRNA target sequence for Xtrp3 (NM_011731.2,278-296).
ccctgcagttcctacttgt

SEQ ID NO: 640231 - DNA, 19 bp, Mus musculus
  siRNA target sequence for Xtrp3 (NM_011731.2,518-536).
gcttggtggtctcgttttt

SEQ ID NO: 640232 - DNA, 19 bp, Mus musculus
  siRNA target sequence for Xtrp3 (NM_011731.2,539-557).
cctctgtgtacttcaatgt

SEQ ID NO: 640233 - DNA, 19 bp, Mus musculus
  siRNA target sequence for Xtrp3 (NM_011731.2,623-641).
gcccactgaatagtaatca

SEQ ID NO: 640234 - DNA, 19 bp, Mus musculus
  siRNA target sequence for Xtrp3 (NM_011731.2,625-643).
ccactgaatagtaatcaca

SEQ ID NO: 640235 - DNA, 19 bp, Mus musculus
  siRNA target sequence for Xtrp3 (NM_011731.2,842-860).
ccacgtcactgccttactt

SEQ ID NO: 640236 - DNA, 19 bp, Mus musculus
  siRNA target sequence for Xtrp3 (NM_011731.2,845-863).
cgtcactgccttactttgt

SEQ ID NO: 640237 - DNA, 19 bp, Mus musculus
  siRNA target sequence for Xtrp3 (NM_011731.2,1013-1031).
gtggtggcctgattgcttt

SEQ ID NO: 640238 - DNA, 19 bp, Mus musculus
  siRNA target sequence for Xtrp3 (NM_011731.2,1083-1101).
gtctgtcatcaatagtact

SEQ ID NO: 640239 - DNA, 19 bp, Mus musculus
  siRNA target sequence for Xtrp3 (NM_011731.2,1620-1638).
cctattcaatgactataca

SEQ ID NO: 640240 - DNA, 19 bp, Mus musculus
  siRNA target sequence for Xtrp3 (NM_011731.2,1878-1896).
ccacgtggtgactaaggat

SEQ ID NO: 640241 - DNA, 19 bp, Mus musculus
  siRNA target sequence for Xtrp3 (NM_011731.2,1879-1897).
cacgtggtgactaaggatt

SEQ ID NO: 640242 - DNA, 19 bp, Mus musculus
  siRNA target sequence for Xtrp3 (NM_011731.2,1881-1899).
cgtggtgactaaggattat

SEQ ID NO: 640243 - DNA, 19 bp, Mus musculus
  siRNA target sequence for Xtrp3 (NM_011731.2,1889-1907).
ctaaggattatcctacata

SEQ ID NO: 640244 - DNA, 19 bp, Mus musculus
  siRNA target sequence for Xtrp3 (NM_011731.2,1981-1999).
gtcacacgccacttcaaga

SEQ ID NO: 640245 - DNA, 19 bp, Mus musculus
  siRNA target sequence for 8430417G17Rik (NM_029415.1,244-262).
ggagggccatgcgaatcta

SEQ ID NO: 640246 - DNA, 19 bp, Mus musculus
  siRNA target sequence for 8430417G17Rik (NM_029415.1,245-263).
gagggccatgcgaatctaa

SEQ ID NO: 640247 - DNA, 19 bp, Mus musculus
  siRNA target sequence for 8430417G17Rik (NM_029415.1,249-267).
gccatgcgaatctaaagct

SEQ ID NO: 640248 - DNA, 19 bp, Mus musculus
  siRNA target sequence for 8430417G17Rik (NM_029415.1,410-428).
cctctgacagcttatctgt

SEQ ID NO: 640249 - DNA, 19 bp, Mus musculus
  siRNA target sequence for 8430417G17Rik (NM_029415.1,411-429).
ctctgacagcttatctgtt

SEQ ID NO: 640250 - DNA, 19 bp, Mus musculus
  siRNA target sequence for 8430417G17Rik (NM_029415.1,438-456).
gcttcggtctgaaaccatt

SEQ ID NO: 640251 - DNA, 19 bp, Mus musculus
  siRNA target sequence for 8430417G17Rik (NM_029415.1,442-460).
cggtctgaaaccattccaa

SEQ ID NO: 640252 - DNA, 19 bp, Mus musculus
  siRNA target sequence for 8430417G17Rik (NM_029415.1,448-466).
gaaaccattccaagctatt

SEQ ID NO: 640253 - DNA, 19 bp, Mus musculus
  siRNA target sequence for 8430417G17Rik (NM_029415.1,496-514).
gggcaccatctctaatgtt

SEQ ID NO: 640254 - DNA, 19 bp, Mus musculus
  siRNA target sequence for 8430417G17Rik (NM_029415.1,526-544).
ggttgatggagatatggat

SEQ ID NO: 640255 - DNA, 19 bp, Mus musculus
  siRNA target sequence for 8430417G17Rik (NM_029415.1,545-563).
ctcagcatcagtatgacaa

SEQ ID NO: 640256 - DNA, 19 bp, Mus musculus
  siRNA target sequence for 8430417G17Rik (NM_029415.1,644-662).
ctcgtcattccgtatcaga

SEQ ID NO: 640257 - DNA, 19 bp, Mus musculus
  siRNA target sequence for 8430417G17Rik (NM_029415.1,705-723).
ctggcgtctatgtgaatta

SEQ ID NO: 640258 - DNA, 19 bp, Mus musculus
  siRNA target sequence for 8430417G17Rik (NM_029415.1,707-725).
ggcgtctatgtgaattata

SEQ ID NO: 640259 - DNA, 19 bp, Mus musculus
  siRNA target sequence for 8430417G17Rik (NM_029415.1,737-755).
caagcaacggtcattctca

SEQ ID NO: 640260 - DNA, 19 bp, Mus musculus
  siRNA target sequence for 8430417G17Rik (NM_029415.1,848-866).
ctggtcatcagctgcattt

SEQ ID NO: 640261 - DNA, 19 bp, Mus musculus
  siRNA target sequence for 8430417G17Rik (NM_029415.1,931-949).
gtgcaggaccatttccata

SEQ ID NO: 640262 - DNA, 19 bp, Mus musculus
  siRNA target sequence for 8430417G17Rik (NM_029415.1,1016-1034).
ctggtccagctgctaaact

SEQ ID NO: 640263 - DNA, 19 bp, Mus musculus
  siRNA target sequence for 8430417G17Rik (NM_029415.1,1018-1036).
ggtccagctgctaaacttt

SEQ ID NO: 640264 - DNA, 19 bp, Mus musculus
  siRNA target sequence for 8430417G17Rik (NM_029415.1,1075-1093).
gctcattgtcgcagcatat

SEQ ID NO: 640265 - DNA, 19 bp, Mus musculus
  siRNA target sequence for 8430417G17Rik (NM_029415.1,1086-1104).
cagcatatcaggcatacaa

SEQ ID NO: 640266 - DNA, 19 bp, Mus musculus
  siRNA target sequence for 8430417G17Rik (NM_029415.1,1088-1106).
gcatatcaggcatacaaga

SEQ ID NO: 640267 - DNA, 19 bp, Mus musculus
  siRNA target sequence for 8430417G17Rik (NM_029415.1,1265-1283).
ctgactagccacattcctt

SEQ ID NO: 640268 - DNA, 19 bp, Mus musculus
  siRNA target sequence for E130304D01 (NM_173403.1,470-488).
ccacgggctgaatgtgttt

SEQ ID NO: 640269 - DNA, 19 bp, Mus musculus
  siRNA target sequence for Slc10a1 (NM_011387.1,444-462).
ctctcctcttatacatcta

SEQ ID NO: 640270 - DNA, 19 bp, Mus musculus
  siRNA target sequence for Slc10a1 (NM_011387.1,503-521).
ccctacaaaggcattatgt

SEQ ID NO: 640271 - DNA, 19 bp, Mus musculus
  siRNA target sequence for Slc10a1 (NM_011387.1,504-522).
cctacaaaggcattatgtt

SEQ ID NO: 640272 - DNA, 19 bp, Mus musculus
  siRNA target sequence for Slc10a1 (NM_011387.1,508-526).
caaaggcattatgttatca

SEQ ID NO: 640273 - DNA, 19 bp, Mus musculus
  siRNA target sequence for Slc10a1 (NM_011387.1,525-543).
cactcgtcatggttctcat

SEQ ID NO: 640274 - DNA, 19 bp, Mus musculus
  siRNA target sequence for Slc10a1 (NM_011387.1,574-592).
caaaaggccacactatgta

SEQ ID NO: 640275 - DNA, 19 bp, Mus musculus
  siRNA target sequence for Slc10a1 (NM_011387.1,608-626).
gcaggcatgatcatcactt

SEQ ID NO: 640276 - DNA, 19 bp, Mus musculus
  siRNA target sequence for Slc10a1 (NM_011387.1,688-706).
cgtcatgacaccacactta

SEQ ID NO: 640277 - DNA, 19 bp, Mus musculus
  siRNA target sequence for Slc10a1 (NM_011387.1,739-757).
cttcctgatgggctacatt

SEQ ID NO: 640278 - DNA, 19 bp, Mus musculus
  siRNA target sequence for Slc10a1 (NM_011387.1,767-785).
ctcttccgactaaatccaa

SEQ ID NO: 640279 - DNA, 19 bp, Mus musculus
  siRNA target sequence for Slc10a1 (NM_011387.1,859-877).
cttcccccctgaagtcatt

SEQ ID NO: 640280 - DNA, 19 bp, Mus musculus
  siRNA target sequence for Slc10a1 (NM_011387.1,953-971).
cggtgctatttgaaaatca

SEQ ID NO: 640281 - DNA, 19 bp, Mus musculus
  siRNA target sequence for Slc10a1 (NM_011387.1,974-992).
cctcagaagggtaagtatt

SEQ ID NO: 640282 - DNA, 19 bp, Mus musculus
  siRNA target sequence for Slc10a2 (NM_011388.1,118-136).
gagcaacttcaatgcaatt

SEQ ID NO: 640283 - DNA, 19 bp, Mus musculus
  siRNA target sequence for Slc10a2 (NM_011388.1,172-190).
cttagccatggtgatgttt

SEQ ID NO: 640284 - DNA, 19 bp, Mus musculus
  siRNA target sequence for Slc10a2 (NM_011388.1,177-195).
ccatggtgatgttttctat

SEQ ID NO: 640285 - DNA, 19 bp, Mus musculus
  siRNA target sequence for Slc10a2 (NM_011388.1,217-235).
caagttcctaggacatata

SEQ ID NO: 640286 - DNA, 19 bp, Mus musculus
  siRNA target sequence for Slc10a2 (NM_011388.1,223-241).
cctaggacatataaagaga

SEQ ID NO: 640287 - DNA, 19 bp, Mus musculus
  siRNA target sequence for Slc10a2 (NM_011388.1,391-409).
cctggcctattggatagat

SEQ ID NO: 640288 - DNA, 19 bp, Mus musculus
  siRNA target sequence for Slc10a2 (NM_011388.1,505-523).
ggttgactcgggaacgatt

SEQ ID NO: 640289 - DNA, 19 bp, Mus musculus
  siRNA target sequence for Slc10a2 (NM_011388.1,509-527).
gactcgggaacgattgtga

SEQ ID NO: 640290 - DNA, 19 bp, Mus musculus
  siRNA target sequence for Slc10a2 (NM_011388.1,511-529).
ctcgggaacgattgtgatt

SEQ ID NO: 640291 - DNA, 19 bp, Mus musculus
  siRNA target sequence for Slc10a2 (NM_011388.1,520-538).
gattgtgattccctatgat

SEQ ID NO: 640292 - DNA, 19 bp, Mus musculus
  siRNA target sequence for Slc10a2 (NM_011388.1,530-548).
ccctatgatagcattggta

SEQ ID NO: 640293 - DNA, 19 bp, Mus musculus
  siRNA target sequence for Slc10a2 (NM_011388.1,532-550).
ctatgatagcattggtatt

SEQ ID NO: 640294 - DNA, 19 bp, Mus musculus
  siRNA target sequence for Slc10a2 (NM_011388.1,585-603).
gaatgtttgtaaatcacaa

SEQ ID NO: 640295 - DNA, 19 bp, Mus musculus
  siRNA target sequence for Slc10a2 (NM_011388.1,607-625).
gccacaaaaagcgaagatt

SEQ ID NO: 640296 - DNA, 19 bp, Mus musculus
  siRNA target sequence for Slc10a2 (NM_011388.1,608-626).
ccacaaaaagcgaagatta

SEQ ID NO: 640297 - DNA, 19 bp, Mus musculus
  siRNA target sequence for Slc10a2 (NM_011388.1,609-627).
cacaaaaagcgaagattat

SEQ ID NO: 640298 - DNA, 19 bp, Mus musculus
  siRNA target sequence for Slc10a2 (NM_011388.1,617-635).
gcgaagattatacttaaaa

SEQ ID NO: 640299 - DNA, 19 bp, Mus musculus
  siRNA target sequence for Slc10a2 (NM_011388.1,618-636).
cgaagattatacttaaaat

SEQ ID NO: 640300 - DNA, 19 bp, Mus musculus
  siRNA target sequence for Slc10a2 (NM_011388.1,639-657).
gatccatcacaggtgtaat

SEQ ID NO: 640301 - DNA, 19 bp, Mus musculus
  siRNA target sequence for Slc10a2 (NM_011388.1,697-715).
ccaaagtgcctggatcatt

SEQ ID NO: 640302 - DNA, 19 bp, Mus musculus
  siRNA target sequence for Slc10a2 (NM_011388.1,716-734).
gaacccaaactgtggatta

SEQ ID NO: 640303 - DNA, 19 bp, Mus musculus
  siRNA target sequence for Slc10a2 (NM_011388.1,727-745).
gtggattataggaacaata

SEQ ID NO: 640304 - DNA, 19 bp, Mus musculus
  siRNA target sequence for Slc10a2 (NM_011388.1,729-747).
ggattataggaacaatatt

SEQ ID NO: 640305 - DNA, 19 bp, Mus musculus
  siRNA target sequence for Slc10a2 (NM_011388.1,815-833).
cgaacagtagccttggaaa

SEQ ID NO: 640306 - DNA, 19 bp, Mus musculus
  siRNA target sequence for Slc10a2 (NM_011388.1,853-871).
gctgtgctccaccattgta

SEQ ID NO: 640307 - DNA, 19 bp, Mus musculus
  siRNA target sequence for Slc10a2 (NM_011388.1,917-935).
ccactcatctatactgttt

SEQ ID NO: 640308 - DNA, 19 bp, Mus musculus
  siRNA target sequence for Slc10a2 (NM_011388.1,918-936).
cactcatctatactgtttt

SEQ ID NO: 640309 - DNA, 19 bp, Mus musculus
  siRNA target sequence for Slc10a2 (NM_011388.1,943-961).
cgtctttgcagcagtaata

SEQ ID NO: 640310 - DNA, 19 bp, Mus musculus
  siRNA target sequence for Slc10a2 (NM_011388.1,944-962).
gtctttgcagcagtaatat

SEQ ID NO: 640311 - DNA, 19 bp, Mus musculus
  siRNA target sequence for Slc10a2 (NM_011388.1,951-969).
cagcagtaatattaggaat

SEQ ID NO: 640312 - DNA, 19 bp, Mus musculus
  siRNA target sequence for Slc10a2 (NM_011388.1,953-971).
gcagtaatattaggaattt

SEQ ID NO: 640313 - DNA, 19 bp, Mus musculus
  siRNA target sequence for Slc10a2 (NM_011388.1,1063-1081).
gacaaacaagggatttcaa

SEQ ID NO: 640314 - DNA, 19 bp, Mus musculus
  siRNA target sequence for Slc10a3 (NM_145406.1,333-351).
gtggttgtacaggttttgt

SEQ ID NO: 640315 - DNA, 19 bp, Mus musculus
  siRNA target sequence for Slc10a3 (NM_145406.1,363-381).
gaactgccctgctgttcat

SEQ ID NO: 640316 - DNA, 19 bp, Mus musculus
  siRNA target sequence for Slc10a3 (NM_145406.1,390-408).
catggggagctcaagtgat

SEQ ID NO: 640317 - DNA, 19 bp, Mus musculus
  siRNA target sequence for Slc10a3 (NM_145406.1,439-457).
ccacacaagtggtcactat

SEQ ID NO: 640318 - DNA, 19 bp, Mus musculus
  siRNA target sequence for Slc10a3 (NM_145406.1,440-458).
cacacaagtggtcactatt

SEQ ID NO: 640319 - DNA, 19 bp, Mus musculus
  siRNA target sequence for Slc10a3 (NM_145406.1,447-465).
gtggtcactatttgagtat

SEQ ID NO: 640320 - DNA, 19 bp, Mus musculus
  siRNA target sequence for Slc10a3 (NM_145406.1,475-493).
ctcagtgacagaatttgat

SEQ ID NO: 640321 - DNA, 19 bp, Mus musculus
  siRNA target sequence for Slc10a3 (NM_145406.1,502-520).
gaagagtgagggtatcatt

SEQ ID NO: 640322 - DNA, 19 bp, Mus musculus
  siRNA target sequence for Slc10a3 (NM_145406.1,507-525).
gtgagggtatcattgtgat

SEQ ID NO: 640323 - DNA, 19 bp, Mus musculus
  siRNA target sequence for Slc10a3 (NM_145406.1,512-530).
ggtatcattgtgatctcta

SEQ ID NO: 640324 - DNA, 19 bp, Mus musculus
  siRNA target sequence for Slc10a3 (NM_145406.1,567-585).
gccccatacttaaggttat

SEQ ID NO: 640325 - DNA, 19 bp, Mus musculus
  siRNA target sequence for Slc10a3 (NM_145406.1,568-586).
ccccatacttaaggttata

SEQ ID NO: 640326 - DNA, 19 bp, Mus musculus
  siRNA target sequence for Slc10a3 (NM_145406.1,701-719).
ctccagctcatggatttct

SEQ ID NO: 640327 - DNA, 19 bp, Mus musculus
  siRNA target sequence for Slc10a3 (NM_145406.1,703-721).
ccagctcatggatttctat

SEQ ID NO: 640328 - DNA, 19 bp, Mus musculus
  siRNA target sequence for Slc10a3 (NM_145406.1,874-892).
gtgttcatttggttgcaaa

SEQ ID NO: 640329 - DNA, 19 bp, Mus musculus
  siRNA target sequence for Slc10a3 (NM_145406.1,1123-1141).
gactttcatctcaacagta

SEQ ID NO: 640330 - DNA, 19 bp, Mus musculus
  siRNA target sequence for Slc10a3 (NM_145406.1,1266-1284).
cagcgggtgtggtgatcaa

SEQ ID NO: 640331 - DNA, 19 bp, Mus musculus
  siRNA target sequence for Slc10a3 (NM_145406.1,1272-1290).
gtgtggtgatcaaatctaa

SEQ ID NO: 640332 - DNA, 19 bp, Mus musculus
  siRNA target sequence for Slc10a3 (NM_145406.1,1300-1318).
gttctctgaactactgtta

SEQ ID NO: 640333 - DNA, 19 bp, Mus musculus
  siRNA target sequence for Slc10a3 (NM_145406.1,1520-1538).
gaggtaggggtgcaaaaca

SEQ ID NO: 640334 - DNA, 19 bp, Mus musculus
  siRNA target sequence for Slc10a3 (NM_145406.1,1626-1644).
gtggtacctccgagatgtt

SEQ ID NO: 640335 - DNA, 19 bp, Mus musculus
  siRNA target sequence for Slc10a3 (NM_145406.1,1652-1670).
gttattggccagttcatct

SEQ ID NO: 640336 - DNA, 19 bp, Mus musculus
  siRNA target sequence for Slc10a3 (NM_145406.1,1666-1684).
catctatagcatcttgttt

SEQ ID NO: 640337 - DNA, 19 bp, Mus musculus
  siRNA target sequence for Slc13a3 (NM_054055.1,150-168).
ggccgatgcctctatgtca

SEQ ID NO: 640338 - DNA, 19 bp, Mus musculus
  siRNA target sequence for Slc13a3 (NM_054055.1,151-169).
gccgatgcctctatgtcat

SEQ ID NO: 640339 - DNA, 19 bp, Mus musculus
  siRNA target sequence for Slc13a3 (NM_054055.1,337-355).
gcgccatagaggaatggaa

SEQ ID NO: 640340 - DNA, 19 bp, Mus musculus
  siRNA target sequence for Slc13a3 (NM_054055.1,469-487).
cggcctccaccgcaatgat

SEQ ID NO: 640341 - DNA, 19 bp, Mus musculus
  siRNA target sequence for Slc13a3 (NM_054055.1,702-720).
gaacaccgcagaaacatct

SEQ ID NO: 640342 - DNA, 19 bp, Mus musculus
  siRNA target sequence for Slc13a3 (NM_054055.1,807-825).
ctcggccagctcaagagtt

SEQ ID NO: 640343 - DNA, 19 bp, Mus musculus
  siRNA target sequence for Slc13a3 (NM_054055.1,811-829).
gccagctcaagagtttctt

SEQ ID NO: 640344 - DNA, 19 bp, Mus musculus
  siRNA target sequence for Slc13a3 (NM_054055.1,834-852).
cagtgtgatgtggtgaatt

SEQ ID NO: 640345 - DNA, 19 bp, Mus musculus
  siRNA target sequence for Slc13a3 (NM_054055.1,1053-1071).
gaacaggccgtcttcatct

SEQ ID NO: 640346 - DNA, 19 bp, Mus musculus
  siRNA target sequence for Slc13a3 (NM_054055.1,1102-1120).
cccgggaccccaagttcat

SEQ ID NO: 640347 - DNA, 19 bp, Mus musculus
  siRNA target sequence for Slc13a3 (NM_054055.1,1224-1242).
ctcaagtggtggtttgact

SEQ ID NO: 640348 - DNA, 19 bp, Mus musculus
  siRNA target sequence for Slc13a3 (NM_054055.1,1298-1316).
gacagtgccctggaacatt

SEQ ID NO: 640349 - DNA, 19 bp, Mus musculus
  siRNA target sequence for Slc13a3 (NM_054055.1,1304-1322).
gccctggaacattatcctt

SEQ ID NO: 640350 - DNA, 19 bp, Mus musculus
  siRNA target sequence for Slc13a3 (NM_054055.1,1639-1657).
gacacttgctggtcaaaga

SEQ ID NO: 640351 - DNA, 19 bp, Mus musculus
  siRNA target sequence for Slc23a2 (NM_018824.1,231-249).
cccagaggtcggatatgat

SEQ ID NO: 640352 - DNA, 19 bp, Mus musculus
  siRNA target sequence for Slc23a2 (NM_018824.1,233-251).
cagaggtcggatatgatct

SEQ ID NO: 640353 - DNA, 19 bp, Mus musculus
  siRNA target sequence for Slc23a2 (NM_018824.1,250-268).
ctacactatagaagatgtt

SEQ ID NO: 640354 - DNA, 19 bp, Mus musculus
  siRNA target sequence for Slc23a2 (NM_018824.1,266-284).
gttcctccctggtacttgt

SEQ ID NO: 640355 - DNA, 19 bp, Mus musculus
  siRNA target sequence for Slc23a2 (NM_018824.1,276-294).
ggtacttgtgcatattcct

SEQ ID NO: 640356 - DNA, 19 bp, Mus musculus
  siRNA target sequence for Slc23a2 (NM_018824.1,330-348).
cgatcgcggtgcccttttt

SEQ ID NO: 640357 - DNA, 19 bp, Mus musculus
  siRNA target sequence for Slc23a2 (NM_018824.1,420-438).
gcgtgggaatcactacatt

SEQ ID NO: 640358 - DNA, 19 bp, Mus musculus
  siRNA target sequence for Slc23a2 (NM_018824.1,459-477).
gcaggttacccctgtttca

SEQ ID NO: 640359 - DNA, 19 bp, Mus musculus
  siRNA target sequence for Slc23a2 (NM_018824.1,510-528).
gagccatcctgtctttaga

SEQ ID NO: 640360 - DNA, 19 bp, Mus musculus
  siRNA target sequence for Slc23a2 (NM_018824.1,512-530).
gccatcctgtctttagata

SEQ ID NO: 640361 - DNA, 19 bp, Mus musculus
  siRNA target sequence for Slc23a2 (NM_018824.1,634-652).
catgtcctcactgatagaa

SEQ ID NO: 640362 - DNA, 19 bp, Mus musculus
  siRNA target sequence for Slc23a2 (NM_018824.1,680-698).
ggggctctgctgaggtata

SEQ ID NO: 640363 - DNA, 19 bp, Mus musculus
  siRNA target sequence for Slc23a2 (NM_018824.1,681-699).
gggctctgctgaggtatat

SEQ ID NO: 640364 - DNA, 19 bp, Mus musculus
  siRNA target sequence for Slc23a2 (NM_018824.1,682-700).
ggctctgctgaggtatatt

SEQ ID NO: 640365 - DNA, 19 bp, Mus musculus
  siRNA target sequence for Slc23a2 (NM_018824.1,792-810).
ccatgctgacgattttcct

SEQ ID NO: 640366 - DNA, 19 bp, Mus musculus
  siRNA target sequence for Slc23a2 (NM_018824.1,799-817).
gacgattttcctagtgtta

SEQ ID NO: 640367 - DNA, 19 bp, Mus musculus
  siRNA target sequence for Slc23a2 (NM_018824.1,801-819).
cgattttcctagtgttact

SEQ ID NO: 640368 - DNA, 19 bp, Mus musculus
  siRNA target sequence for Slc23a2 (NM_018824.1,878-896).
ggatggacggcatacaagt

SEQ ID NO: 640369 - DNA, 19 bp, Mus musculus
  siRNA target sequence for Slc23a2 (NM_018824.1,879-897).
gatggacggcatacaagtt

SEQ ID NO: 640370 - DNA, 19 bp, Mus musculus
  siRNA target sequence for Slc23a2 (NM_018824.1,888-906).
catacaagttccagctttt

SEQ ID NO: 640371 - DNA, 19 bp, Mus musculus
  siRNA target sequence for Slc23a2 (NM_018824.1,1043-1061).
ctggtagccccatggttta

SEQ ID NO: 640372 - DNA, 19 bp, Mus musculus
  siRNA target sequence for Slc23a2 (NM_018824.1,1130-1148).
gccgtcgtagccagtatca

SEQ ID NO: 640373 - DNA, 19 bp, Mus musculus
  siRNA target sequence for Slc23a2 (NM_018824.1,1132-1150).
cgtcgtagccagtatcatt

SEQ ID NO: 640374 - DNA, 19 bp, Mus musculus
  siRNA target sequence for Slc23a2 (NM_018824.1,1203-1221).
cgcctatccatgcaataaa

SEQ ID NO: 640375 - DNA, 19 bp, Mus musculus
  siRNA target sequence for Slc23a2 (NM_018824.1,1205-1223).
cctatccatgcaataaaca

SEQ ID NO: 640376 - DNA, 19 bp, Mus musculus
  siRNA target sequence for Slc23a2 (NM_018824.1,1256-1274).
cttgatggcatatttggta

SEQ ID NO: 640377 - DNA, 19 bp, Mus musculus
  siRNA target sequence for Slc23a2 (NM_018824.1,1483-1501).
ctcgaacctgcagttcatt

SEQ ID NO: 640378 - DNA, 19 bp, Mus musculus
  siRNA target sequence for Slc23a2 (NM_018824.1,1492-1510).
gcagttcattgacttgaat

SEQ ID NO: 640379 - DNA, 19 bp, Mus musculus
  siRNA target sequence for Slc23a2 (NM_018824.1,1493-1511).
cagttcattgacttgaatt

SEQ ID NO: 640380 - DNA, 19 bp, Mus musculus
  siRNA target sequence for Slc23a2 (NM_018824.1,1585-1603).
ccctctggttacaggaata

SEQ ID NO: 640381 - DNA, 19 bp, Mus musculus
  siRNA target sequence for Slc23a2 (NM_018824.1,1586-1604).
cctctggttacaggaataa

SEQ ID NO: 640382 - DNA, 19 bp, Mus musculus
  siRNA target sequence for Slc23a2 (NM_018824.1,1605-1623).
caggaatcgaccaaatcct

SEQ ID NO: 640383 - DNA, 19 bp, Mus musculus
  siRNA target sequence for Slc23a2 (NM_018824.1,1636-1654).
caccaccgctatgtttgta

SEQ ID NO: 640384 - DNA, 19 bp, Mus musculus
  siRNA target sequence for Slc23a2 (NM_018824.1,1762-1780).
cggcatggagtcctacaat

SEQ ID NO: 640385 - DNA, 19 bp, Mus musculus
  siRNA target sequence for Slc23a2 (NM_018824.1,1784-1802).
ccatttggcatgaacatta

SEQ ID NO: 640386 - DNA, 19 bp, Mus musculus
  siRNA target sequence for Slc23a2 (NM_018824.1,1790-1808).
ggcatgaacattattaaaa

SEQ ID NO: 640387 - DNA, 19 bp, Mus musculus
  siRNA target sequence for Slc23a2 (NM_018824.1,1888-1906).
cagccggagttcagacaaa

SEQ ID NO: 640388 - DNA, 19 bp, Mus musculus
  siRNA target sequence for Slc23a2 (NM_018824.1,1890-1908).
gccggagttcagacaaaga

SEQ ID NO: 640389 - DNA, 19 bp, Mus musculus
  siRNA target sequence for Slc23a2 (NM_018824.1,1891-1909).
ccggagttcagacaaagat

SEQ ID NO: 640390 - DNA, 19 bp, Mus musculus
  siRNA target sequence for Slc23a2 (NM_018824.1,1907-1925).
gattcccaggccacagtat

SEQ ID NO: 640391 - DNA, 19 bp, Mus musculus
  siRNA target sequence for Slc5a5 (NM_053248.1,188-206).
gcagcgccgacgacttctt

SEQ ID NO: 640392 - DNA, 19 bp, Mus musculus
  siRNA target sequence for Slc5a5 (NM_053248.1,250-268).
ctggccgctagcttcatgt

SEQ ID NO: 640393 - DNA, 19 bp, Mus musculus
  siRNA target sequence for Slc5a5 (NM_053248.1,305-323).
cgcgctacggtctcaagtt

SEQ ID NO: 640394 - DNA, 19 bp, Mus musculus
  siRNA target sequence for Slc5a5 (NM_053248.1,306-324).
gcgctacggtctcaagttt

SEQ ID NO: 640395 - DNA, 19 bp, Mus musculus
  siRNA target sequence for Slc5a5 (NM_053248.1,308-326).
gctacggtctcaagtttct

SEQ ID NO: 640396 - DNA, 19 bp, Mus musculus
  siRNA target sequence for Slc5a5 (NM_053248.1,373-391).
ctcttcttgccgatcttct

SEQ ID NO: 640397 - DNA, 19 bp, Mus musculus
  siRNA target sequence for Slc5a5 (NM_053248.1,413-431).
cctaccagtacctagaact

SEQ ID NO: 640398 - DNA, 19 bp, Mus musculus
  siRNA target sequence for Slc5a5 (NM_053248.1,480-498).
ggccacgatgctgtatact

SEQ ID NO: 640399 - DNA, 19 bp, Mus musculus
  siRNA target sequence for Slc5a5 (NM_053248.1,599-617).
cgaccgtgggtggtatgaa

SEQ ID NO: 640400 - DNA, 19 bp, Mus musculus
  siRNA target sequence for Slc5a5 (NM_053248.1,786-804).
ctacaccttctggacattt

SEQ ID NO: 640401 - DNA, 19 bp, Mus musculus
  siRNA target sequence for Slc5a5 (NM_053248.1,792-810).
cttctggacatttgtagta

SEQ ID NO: 640402 - DNA, 19 bp, Mus musculus
  siRNA target sequence for Slc5a5 (NM_053248.1,952-970).
gcttgctgtggaattgtca

SEQ ID NO: 640403 - DNA, 19 bp, Mus musculus
  siRNA target sequence for Slc5a5 (NM_053248.1,956-974).
gctgtggaattgtcatgtt

SEQ ID NO: 640404 - DNA, 19 bp, Mus musculus
  siRNA target sequence for Slc5a5 (NM_053248.1,957-975).
ctgtggaattgtcatgttt

SEQ ID NO: 640405 - DNA, 19 bp, Mus musculus
  siRNA target sequence for Slc5a5 (NM_053248.1,1124-1142).
ccgcgtccaccagtatcaa

SEQ ID NO: 640406 - DNA, 19 bp, Mus musculus
  siRNA target sequence for Slc5a5 (NM_053248.1,1209-1227).
gctggttttcatctctaaa

SEQ ID NO: 640407 - DNA, 19 bp, Mus musculus
  siRNA target sequence for Slc5a5 (NM_053248.1,1600-1618).
gcctttgccgacacctttt

SEQ ID NO: 640408 - DNA, 19 bp, Mus musculus
  siRNA target sequence for Slc5a5 (NM_053248.1,1601-1619).
cctttgccgacacctttta

SEQ ID NO: 640409 - DNA, 19 bp, Mus musculus
  siRNA target sequence for Slc5a5 (NM_053248.1,1602-1620).
ctttgccgacaccttttat

SEQ ID NO: 640410 - DNA, 19 bp, Mus musculus
  siRNA target sequence for Slc28a3 (NM_022317.2,70-88).
ggcagacccgggaaagaat

SEQ ID NO: 640411 - DNA, 19 bp, Mus musculus
  siRNA target sequence for Slc28a3 (NM_022317.2,71-89).
gcagacccgggaaagaatt

SEQ ID NO: 640412 - DNA, 19 bp, Mus musculus
  siRNA target sequence for Slc28a3 (NM_022317.2,217-235).
caggaacagagttgtacaa

SEQ ID NO: 640413 - DNA, 19 bp, Mus musculus
  siRNA target sequence for Slc28a3 (NM_022317.2,328-346).
cgaagatgagcatcagaaa

SEQ ID NO: 640414 - DNA, 19 bp, Mus musculus
  siRNA target sequence for Slc28a3 (NM_022317.2,355-373).
ggagaggaagtatgataca

SEQ ID NO: 640415 - DNA, 19 bp, Mus musculus
  siRNA target sequence for Slc28a3 (NM_022317.2,356-374).
gagaggaagtatgatacaa

SEQ ID NO: 640416 - DNA, 19 bp, Mus musculus
  siRNA target sequence for Slc28a3 (NM_022317.2,415-433).
caccatctgggccgtttta

SEQ ID NO: 640417 - DNA, 19 bp, Mus musculus
  siRNA target sequence for Slc28a3 (NM_022317.2,417-435).
ccatctgggccgttttact

SEQ ID NO: 640418 - DNA, 19 bp, Mus musculus
  siRNA target sequence for Slc28a3 (NM_022317.2,544-562).
cttgatggccaaatatgaa

SEQ ID NO: 640419 - DNA, 19 bp, Mus musculus
  siRNA target sequence for Slc28a3 (NM_022317.2,686-704).
gccaaactgggccaacaaa

SEQ ID NO: 640420 - DNA, 19 bp, Mus musculus
  siRNA target sequence for Slc28a3 (NM_022317.2,695-713).
ggccaacaaaacttggtat

SEQ ID NO: 640421 - DNA, 19 bp, Mus musculus
  siRNA target sequence for Slc28a3 (NM_022317.2,714-732).
cctttggcggactcatcat

SEQ ID NO: 640422 - DNA, 19 bp, Mus musculus
  siRNA target sequence for Slc28a3 (NM_022317.2,764-782).
catcccaccagagtttact

SEQ ID NO: 640423 - DNA, 19 bp, Mus musculus
  siRNA target sequence for Slc28a3 (NM_022317.2,840-858).
gaactaggcctggatttgt

SEQ ID NO: 640424 - DNA, 19 bp, Mus musculus
  siRNA target sequence for Slc28a3 (NM_022317.2,870-888).
ggatggggagacaagttca

SEQ ID NO: 640425 - DNA, 19 bp, Mus musculus
  siRNA target sequence for Slc28a3 (NM_022317.2,945-963).
cagaccacttctttgcatt

SEQ ID NO: 640426 - DNA, 19 bp, Mus musculus
  siRNA target sequence for Slc28a3 (NM_022317.2,947-965).
gaccacttctttgcattta

SEQ ID NO: 640427 - DNA, 19 bp, Mus musculus
  siRNA target sequence for Slc28a3 (NM_022317.2,1048-1066).
ggtcgggtggctaatgctt

SEQ ID NO: 640428 - DNA, 19 bp, Mus musculus
  siRNA target sequence for Slc28a3 (NM_022317.2,1100-1118).
gttgctgctggcaacatat

SEQ ID NO: 640429 - DNA, 19 bp, Mus musculus
  siRNA target sequence for Slc28a3 (NM_022317.2,1140-1158).
cactactggtccaaccata

SEQ ID NO: 640430 - DNA, 19 bp, Mus musculus
  siRNA target sequence for Slc28a3 (NM_022317.2,1142-1160).
ctactggtccaaccatatt

SEQ ID NO: 640431 - DNA, 19 bp, Mus musculus
  siRNA target sequence for Slc28a3 (NM_022317.2,1147-1165).
ggtccaaccatatttacca

SEQ ID NO: 640432 - DNA, 19 bp, Mus musculus
  siRNA target sequence for Slc28a3 (NM_022317.2,1181-1199).
gaactccataccatcatga

SEQ ID NO: 640433 - DNA, 19 bp, Mus musculus
  siRNA target sequence for Slc28a3 (NM_022317.2,1213-1231).
cacgattgctggaagtgta

SEQ ID NO: 640434 - DNA, 19 bp, Mus musculus
  siRNA target sequence for Slc28a3 (NM_022317.2,1215-1233).
cgattgctggaagtgtatt

SEQ ID NO: 640435 - DNA, 19 bp, Mus musculus
  siRNA target sequence for Slc28a3 (NM_022317.2,1227-1245).
gtgtattgggcgcatatat

SEQ ID NO: 640436 - DNA, 19 bp, Mus musculus
  siRNA target sequence for Slc28a3 (NM_022317.2,1229-1247).
gtattgggcgcatatatct

SEQ ID NO: 640437 - DNA, 19 bp, Mus musculus
  siRNA target sequence for Slc28a3 (NM_022317.2,1234-1252).
gggcgcatatatctctttt

SEQ ID NO: 640438 - DNA, 19 bp, Mus musculus
  siRNA target sequence for Slc28a3 (NM_022317.2,1258-1276).
gtcgtccacgcatttgcta

SEQ ID NO: 640439 - DNA, 19 bp, Mus musculus
  siRNA target sequence for Slc28a3 (NM_022317.2,1556-1574).
ctcatttgttcctacatct

SEQ ID NO: 640440 - DNA, 19 bp, Mus musculus
  siRNA target sequence for Slc28a3 (NM_022317.2,1608-1626).
ggcaagacagctttatggt

SEQ ID NO: 640441 - DNA, 19 bp, Mus musculus
  siRNA target sequence for Slc28a3 (NM_022317.2,1625-1643).
gtcgccaaactcataggtt

SEQ ID NO: 640442 - DNA, 19 bp, Mus musculus
  siRNA target sequence for Slc28a3 (NM_022317.2,1629-1647).
ccaaactcataggttacaa

SEQ ID NO: 640443 - DNA, 19 bp, Mus musculus
  siRNA target sequence for Slc28a3 (NM_022317.2,1641-1659).
gttacaagacattcttcaa

SEQ ID NO: 640444 - DNA, 19 bp, Mus musculus
  siRNA target sequence for Slc28a3 (NM_022317.2,1681-1699).
cctctcaaaattaatcaat

SEQ ID NO: 640445 - DNA, 19 bp, Mus musculus
  siRNA target sequence for Slc28a3 (NM_022317.2,1705-1723).
gaaagcggctggacctaaa

SEQ ID NO: 640446 - DNA, 19 bp, Mus musculus
  siRNA target sequence for Slc28a3 (NM_022317.2,1710-1728).
cggctggacctaaatttgt

SEQ ID NO: 640447 - DNA, 19 bp, Mus musculus
  siRNA target sequence for Slc28a3 (NM_022317.2,1712-1730).
gctggacctaaatttgtga

SEQ ID NO: 640448 - DNA, 19 bp, Mus musculus
  siRNA target sequence for Slc28a3 (NM_022317.2,1713-1731).
ctggacctaaatttgtgaa

SEQ ID NO: 640449 - DNA, 19 bp, Mus musculus
  siRNA target sequence for Slc28a3 (NM_022317.2,1729-1747).
gaatggcgtgcagcaatat

SEQ ID NO: 640450 - DNA, 19 bp, Mus musculus
  siRNA target sequence for Slc28a3 (NM_022317.2,1733-1751).
ggcgtgcagcaatatatgt

SEQ ID NO: 640451 - DNA, 19 bp, Mus musculus
  siRNA target sequence for Slc28a3 (NM_022317.2,1735-1753).
cgtgcagcaatatatgtca

SEQ ID NO: 640452 - DNA, 19 bp, Mus musculus
  siRNA target sequence for Slc28a3 (NM_022317.2,1777-1795).
ctatgccctctgtggtttt

SEQ ID NO: 640453 - DNA, 19 bp, Mus musculus
  siRNA target sequence for Slc28a3 (NM_022317.2,1819-1837).
cgtgatcggtggacttaca

SEQ ID NO: 640454 - DNA, 19 bp, Mus musculus
  siRNA target sequence for Slc28a3 (NM_022317.2,1825-1843).
cggtggacttacatccata

SEQ ID NO: 640455 - DNA, 19 bp, Mus musculus
  siRNA target sequence for Slc28a3 (NM_022317.2,1944-1962).
ctgataccccggtggatat

SEQ ID NO: 640456 - DNA, 19 bp, Mus musculus
  siRNA target sequence for Slc28a3 (NM_022317.2,1968-1986).
gccatcacgttctagagaa

SEQ ID NO: 640457 - DNA, 19 bp, Mus musculus
  siRNA target sequence for Slc28a2 (NM_172980.1,1788-1806).
cgtaggactctctgttgtt

SEQ ID NO: 640458 - DNA, 19 bp, Mus musculus
  siRNA target sequence for Slc28a2 (NM_172980.1,2463-2481).
gtccaaactggtatatcca

SEQ ID NO: 640459 - DNA, 19 bp, Mus musculus
  siRNA target sequence for Slc28a2 (NM_172980.1,2485-2503).
gtcgaagagtccaagttca

SEQ ID NO: 640460 - DNA, 19 bp, Mus musculus
  siRNA target sequence for Slc28a2 (NM_172980.1,2766-2784).
cccactggtggctgagata

SEQ ID NO: 640461 - DNA, 19 bp, Mus musculus
  siRNA target sequence for Tramd1 (NM_153170.1,174-192).
ggtagccacccctctcaat

SEQ ID NO: 640462 - DNA, 19 bp, Mus musculus
  siRNA target sequence for Tramd1 (NM_153170.1,970-988).
gtcctgcctctggaaaaca

SEQ ID NO: 640463 - DNA, 19 bp, Mus musculus
  siRNA target sequence for Tramd1 (NM_153170.1,1148-1166).
cagtcaagctcctgtatgt

SEQ ID NO: 640464 - DNA, 19 bp, Mus musculus
  siRNA target sequence for Tramd1 (NM_153170.1,1551-1569).
gtccaactccaccatgttt

SEQ ID NO: 640465 - DNA, 19 bp, Mus musculus
  siRNA target sequence for Tramd1 (NM_153170.1,1554-1572).
caactccaccatgtttatt

SEQ ID NO: 640466 - DNA, 19 bp, Mus musculus
  siRNA target sequence for Slc12a5 (NM_020333.1,238-256).
gacaccagccccatggtat

SEQ ID NO: 640467 - DNA, 19 bp, Mus musculus
  siRNA target sequence for Slc12a5 (NM_020333.1,647-665).
cctttgctggggctatgta

SEQ ID NO: 640468 - DNA, 19 bp, Mus musculus
  siRNA target sequence for Slc12a5 (NM_020333.1,717-735).
catcttcaaggcagaagat

SEQ ID NO: 640469 - DNA, 19 bp, Mus musculus
  siRNA target sequence for Slc12a5 (NM_020333.1,963-981).
gtctcgccatggctttgat

SEQ ID NO: 640470 - DNA, 19 bp, Mus musculus
  siRNA target sequence for Slc12a5 (NM_020333.1,965-983).
ctcgccatggctttgatgt

SEQ ID NO: 640471 - DNA, 19 bp, Mus musculus
  siRNA target sequence for Slc12a5 (NM_020333.1,1080-1098).
gtacttcacccgaaacaat

SEQ ID NO: 640472 - DNA, 19 bp, Mus musculus
  siRNA target sequence for Slc12a5 (NM_020333.1,1249-1267).
ccctatgtcttcagtgata

SEQ ID NO: 640473 - DNA, 19 bp, Mus musculus
  siRNA target sequence for Slc12a5 (NM_020333.1,1250-1268).
cctatgtcttcagtgatat

SEQ ID NO: 640474 - DNA, 19 bp, Mus musculus
  siRNA target sequence for Slc12a5 (NM_020333.1,1264-1282).
gatatgacctcctacttca

SEQ ID NO: 640475 - DNA, 19 bp, Mus musculus
  siRNA target sequence for Slc12a5 (NM_020333.1,1283-1301).
ccctgctcgttggtatcta

SEQ ID NO: 640476 - DNA, 19 bp, Mus musculus
  siRNA target sequence for Slc12a5 (NM_020333.1,1285-1303).
ctgctcgttggtatctact

SEQ ID NO: 640477 - DNA, 19 bp, Mus musculus
  siRNA target sequence for Slc12a5 (NM_020333.1,1747-1765).
gaggtcgcccctatacttt

SEQ ID NO: 640478 - DNA, 19 bp, Mus musculus
  siRNA target sequence for Slc12a5 (NM_020333.1,1847-1865).
cacgatttcgctattacca

SEQ ID NO: 640479 - DNA, 19 bp, Mus musculus
  siRNA target sequence for Slc12a5 (NM_020333.1,1947-1965).
gctcattgccggactcatt

SEQ ID NO: 640480 - DNA, 19 bp, Mus musculus
  siRNA target sequence for Slc12a5 (NM_020333.1,1948-1966).
ctcattgccggactcattt

SEQ ID NO: 640481 - DNA, 19 bp, Mus musculus
  siRNA target sequence for Slc12a5 (NM_020333.1,1954-1972).
gccggactcatttataagt

SEQ ID NO: 640482 - DNA, 19 bp, Mus musculus
  siRNA target sequence for Slc12a5 (NM_020333.1,1955-1973).
ccggactcatttataagta

SEQ ID NO: 640483 - DNA, 19 bp, Mus musculus
  siRNA target sequence for Slc12a5 (NM_020333.1,1957-1975).
ggactcatttataagtaca

SEQ ID NO: 640484 - DNA, 19 bp, Mus musculus
  siRNA target sequence for Slc12a5 (NM_020333.1,2071-2089).
cctccgcatacgaagaact

SEQ ID NO: 640485 - DNA, 19 bp, Mus musculus
  siRNA target sequence for Slc12a5 (NM_020333.1,2251-2269).
cgggcagaggagtctatca

SEQ ID NO: 640486 - DNA, 19 bp, Mus musculus
  siRNA target sequence for Slc12a5 (NM_020333.1,2370-2388).
cgggggattgcaacacaat

SEQ ID NO: 640487 - DNA, 19 bp, Mus musculus
  siRNA target sequence for Slc12a5 (NM_020333.1,2458-2476).
gaactggtccgggaaacta

SEQ ID NO: 640488 - DNA, 19 bp, Mus musculus
  siRNA target sequence for Slc12a5 (NM_020333.1,2628-2646).
ggtctggaggaaatgcaaa

SEQ ID NO: 640489 - DNA, 19 bp, Mus musculus
  siRNA target sequence for Slc12a5 (NM_020333.1,2667-2685).
ccagatggacgataacagt

SEQ ID NO: 640490 - DNA, 19 bp, Mus musculus
  siRNA target sequence for Slc12a5 (NM_020333.1,2668-2686).
cagatggacgataacagta

SEQ ID NO: 640491 - DNA, 19 bp, Mus musculus
  siRNA target sequence for Slc12a5 (NM_020333.1,2701-2719).
gacctgaccacgtttctgt

SEQ ID NO: 640492 - DNA, 19 bp, Mus musculus
  siRNA target sequence for Slc12a5 (NM_020333.1,2718-2736).
gtaccacttacgcattact

SEQ ID NO: 640493 - DNA, 19 bp, Mus musculus
  siRNA target sequence for Slc12a5 (NM_020333.1,2784-2802).
cacctacgagaagacatta

SEQ ID NO: 640494 - DNA, 19 bp, Mus musculus
  siRNA target sequence for Slc12a5 (NM_020333.1,2786-2804).
cctacgagaagacattagt

SEQ ID NO: 640495 - DNA, 19 bp, Mus musculus
  siRNA target sequence for Slc12a5 (NM_020333.1,2787-2805).
ctacgagaagacattagta

SEQ ID NO: 640496 - DNA, 19 bp, Mus musculus
  siRNA target sequence for Slc12a5 (NM_020333.1,2898-2916).
ctccattcggaggaagaat

SEQ ID NO: 640497 - DNA, 19 bp, Mus musculus
  siRNA target sequence for Slc12a5 (NM_020333.1,3079-3097).
gacccagaggtgcatctta

SEQ ID NO: 640498 - DNA, 19 bp, Mus musculus
  siRNA target sequence for Slc12a5 (NM_020333.1,3094-3112).
cttacctggaccaaggata

SEQ ID NO: 640499 - DNA, 19 bp, Mus musculus
  siRNA target sequence for Slc12a5 (NM_020333.1,3249-3267).
cgaggtcatcgtgaataaa

SEQ ID NO: 640500 - DNA, 19 bp, Mus musculus
  siRNA target sequence for Slc12a5 (NM_020333.1,3252-3270).
ggtcatcgtgaataaatct

SEQ ID NO: 640501 - DNA, 19 bp, Mus musculus
  siRNA target sequence for Slc12a5 (NM_020333.1,3271-3289).
cgggatgccaagctagttt

SEQ ID NO: 640502 - DNA, 19 bp, Mus musculus
  siRNA target sequence for Slc12a5 (NM_020333.1,3272-3290).
gggatgccaagctagtttt

SEQ ID NO: 640503 - DNA, 19 bp, Mus musculus
  siRNA target sequence for Slc12a5 (NM_020333.1,3319-3337).
cgcaatggggatgaaaact

SEQ ID NO: 640504 - DNA, 19 bp, Mus musculus
  siRNA target sequence for Slc12a1 (NM_011389.1,507-525).
ggacgccgtccccaagatt

SEQ ID NO: 640505 - DNA, 19 bp, Mus musculus
  siRNA target sequence for Slc12a1 (NM_011389.1,510-528).
cgccgtccccaagattgaa

SEQ ID NO: 640506 - DNA, 19 bp, Mus musculus
  siRNA target sequence for Slc12a1 (NM_011389.1,511-529).
gccgtccccaagattgaat

SEQ ID NO: 640507 - DNA, 19 bp, Mus musculus
  siRNA target sequence for Slc12a1 (NM_011389.1,512-530).
ccgtccccaagattgaata

SEQ ID NO: 640508 - DNA, 19 bp, Mus musculus
  siRNA target sequence for Slc12a1 (NM_011389.1,594-612).
cgagcagctggctaagaat

SEQ ID NO: 640509 - DNA, 19 bp, Mus musculus
  siRNA target sequence for Slc12a1 (NM_011389.1,764-782).
ggggagtcatgctcttcat

SEQ ID NO: 640510 - DNA, 19 bp, Mus musculus
  siRNA target sequence for Slc12a1 (NM_011389.1,765-783).
gggagtcatgctcttcatt

SEQ ID NO: 640511 - DNA, 19 bp, Mus musculus
  siRNA target sequence for Slc12a1 (NM_011389.1,817-835).
ggtcttggagttcttataa

SEQ ID NO: 640512 - DNA, 19 bp, Mus musculus
  siRNA target sequence for Slc12a1 (NM_011389.1,864-882).
cactgggttgtcaacttct

SEQ ID NO: 640513 - DNA, 19 bp, Mus musculus
  siRNA target sequence for Slc12a1 (NM_011389.1,870-888).
gttgtcaacttctgcaata

SEQ ID NO: 640514 - DNA, 19 bp, Mus musculus
  siRNA target sequence for Slc12a1 (NM_011389.1,961-979).
gggtcaataggcttgatct

SEQ ID NO: 640515 - DNA, 19 bp, Mus musculus
  siRNA target sequence for Slc12a1 (NM_011389.1,962-980).
ggtcaataggcttgatctt

SEQ ID NO: 640516 - DNA, 19 bp, Mus musculus
  siRNA target sequence for Slc12a1 (NM_011389.1,963-981).
gtcaataggcttgatcttt

SEQ ID NO: 640517 - DNA, 19 bp, Mus musculus
  siRNA target sequence for Slc12a1 (NM_011389.1,995-1013).
cagtggctgtcgctatgta

SEQ ID NO: 640518 - DNA, 19 bp, Mus musculus
  siRNA target sequence for Slc12a1 (NM_011389.1,1032-1050).
gactgtcgtggatcttctt

SEQ ID NO: 640519 - DNA, 19 bp, Mus musculus
  siRNA target sequence for Slc12a1 (NM_011389.1,1034-1052).
ctgtcgtggatcttcttaa

SEQ ID NO: 640520 - DNA, 19 bp, Mus musculus
  siRNA target sequence for Slc12a1 (NM_011389.1,1048-1066).
cttaaggagagcgattcaa

SEQ ID NO: 640521 - DNA, 19 bp, Mus musculus
  siRNA target sequence for Slc12a1 (NM_011389.1,1068-1086).
gatggtggatccaaccaat

SEQ ID NO: 640522 - DNA, 19 bp, Mus musculus
  siRNA target sequence for Slc12a1 (NM_011389.1,1106-1124).
ccatcaccgtggtgattct

SEQ ID NO: 640523 - DNA, 19 bp, Mus musculus
  siRNA target sequence for Slc12a1 (NM_011389.1,1107-1125).
catcaccgtggtgattctt

SEQ ID NO: 640524 - DNA, 19 bp, Mus musculus
  siRNA target sequence for Slc12a1 (NM_011389.1,1110-1128).
caccgtggtgattcttcta

SEQ ID NO: 640525 - DNA, 19 bp, Mus musculus
  siRNA target sequence for Slc12a1 (NM_011389.1,1160-1178).
caaaggctcaagtcattct

SEQ ID NO: 640526 - DNA, 19 bp, Mus musculus
  siRNA target sequence for Slc12a1 (NM_011389.1,1463-1481).
cctacataggtgttgctat

SEQ ID NO: 640527 - DNA, 19 bp, Mus musculus
  siRNA target sequence for Slc12a1 (NM_011389.1,1464-1482).
ctacataggtgttgctatt

SEQ ID NO: 640528 - DNA, 19 bp, Mus musculus
  siRNA target sequence for Slc12a1 (NM_011389.1,1511-1529).
ccactggcagcatgaatga

SEQ ID NO: 640529 - DNA, 19 bp, Mus musculus
  siRNA target sequence for Slc12a1 (NM_011389.1,1581-1599).
ctacgacttctcaagatgt

SEQ ID NO: 640530 - DNA, 19 bp, Mus musculus
  siRNA target sequence for Slc12a1 (NM_011389.1,1584-1602).
cgacttctcaagatgtcaa

SEQ ID NO: 640531 - DNA, 19 bp, Mus musculus
  siRNA target sequence for Slc12a1 (NM_011389.1,1613-1631).
gtcagtatgggctgatgaa

SEQ ID NO: 640532 - DNA, 19 bp, Mus musculus
  siRNA target sequence for Slc12a1 (NM_011389.1,1617-1635).
gtatgggctgatgaacaat

SEQ ID NO: 640533 - DNA, 19 bp, Mus musculus
  siRNA target sequence for Slc12a1 (NM_011389.1,1730-1748).
gtgcgcccaaagtattcca

SEQ ID NO: 640534 - DNA, 19 bp, Mus musculus
  siRNA target sequence for Slc12a1 (NM_011389.1,1829-1847).
ggtacttcctcacttttgt

SEQ ID NO: 640535 - DNA, 19 bp, Mus musculus
  siRNA target sequence for Slc12a1 (NM_011389.1,1833-1851).
cttcctcacttttgtgata

SEQ ID NO: 640536 - DNA, 19 bp, Mus musculus
  siRNA target sequence for Slc12a1 (NM_011389.1,1872-1890).
cgccgagctgaatgtcatt

SEQ ID NO: 640537 - DNA, 19 bp, Mus musculus
  siRNA target sequence for Slc12a1 (NM_011389.1,1917-1935).
ggcctcatatgcgcttatt

SEQ ID NO: 640538 - DNA, 19 bp, Mus musculus
  siRNA target sequence for Slc12a1 (NM_011389.1,1918-1936).
gcctcatatgcgcttatta

SEQ ID NO: 640539 - DNA, 19 bp, Mus musculus
  siRNA target sequence for Slc12a1 (NM_011389.1,1919-1937).
cctcatatgcgcttattaa

SEQ ID NO: 640540 - DNA, 19 bp, Mus musculus
  siRNA target sequence for Slc12a1 (NM_011389.1,1920-1938).
ctcatatgcgcttattaat

SEQ ID NO: 640541 - DNA, 19 bp, Mus musculus
  siRNA target sequence for Slc12a1 (NM_011389.1,1922-1940).
catatgcgcttattaattt

SEQ ID NO: 640542 - DNA, 19 bp, Mus musculus
  siRNA target sequence for Slc12a1 (NM_011389.1,1987-2005).
gcatatgggatttacaaca

SEQ ID NO: 640543 - DNA, 19 bp, Mus musculus
  siRNA target sequence for Slc12a1 (NM_011389.1,2001-2019).
caacatgtgggtatctctt

SEQ ID NO: 640544 - DNA, 19 bp, Mus musculus
  siRNA target sequence for Slc12a1 (NM_011389.1,2017-2035).
ctttttggagcgattttgt

SEQ ID NO: 640545 - DNA, 19 bp, Mus musculus
  siRNA target sequence for Slc12a1 (NM_011389.1,2066-2084).
gggcagctgtcatcactta

SEQ ID NO: 640546 - DNA, 19 bp, Mus musculus
  siRNA target sequence for Slc12a1 (NM_011389.1,2067-2085).
ggcagctgtcatcacttat

SEQ ID NO: 640547 - DNA, 19 bp, Mus musculus
  siRNA target sequence for Slc12a1 (NM_011389.1,2094-2112).
gttattcctctatatctat

SEQ ID NO: 640548 - DNA, 19 bp, Mus musculus
  siRNA target sequence for Slc12a1 (NM_011389.1,2163-2181).
gtcctatgtgagtgcttta

SEQ ID NO: 640549 - DNA, 19 bp, Mus musculus
  siRNA target sequence for Slc12a1 (NM_011389.1,2165-2183).
cctatgtgagtgctttaga

SEQ ID NO: 640550 - DNA, 19 bp, Mus musculus
  siRNA target sequence for Slc12a1 (NM_011389.1,2182-2200).
gacaacgctctggaattaa

SEQ ID NO: 640551 - DNA, 19 bp, Mus musculus
  siRNA target sequence for Slc12a1 (NM_011389.1,2384-2402).
gttcacagtgggtaatgtt

SEQ ID NO: 640552 - DNA, 19 bp, Mus musculus
  siRNA target sequence for Slc12a1 (NM_011389.1,2458-2476).
gagttcacctccttgaaaa

SEQ ID NO: 640553 - DNA, 19 bp, Mus musculus
  siRNA target sequence for Slc12a1 (NM_183354.1,2603-2621).
ctacgtgggaatcatacat

SEQ ID NO: 640554 - DNA, 19 bp, Mus musculus
  siRNA target sequence for Slc12a1 (NM_183354.1,2644-2662).
gcgtggtcatagtcagaat

SEQ ID NO: 640555 - DNA, 19 bp, Mus musculus
  siRNA target sequence for Slc12a1 (NM_183354.1,2742-2760).
gaggccgcaatcaaagaca

SEQ ID NO: 640556 - DNA, 19 bp, Mus musculus
  siRNA target sequence for Slc12a1 (NM_183354.1,2783-2801).
gggcatccgaggcttgttt

SEQ ID NO: 640557 - DNA, 19 bp, Mus musculus
  siRNA target sequence for Slc12a1 (NM_183354.1,2784-2802).
ggcatccgaggcttgttta

SEQ ID NO: 640558 - DNA, 19 bp, Mus musculus
  siRNA target sequence for Slc12a1 (NM_183354.1,2785-2803).
gcatccgaggcttgtttaa

SEQ ID NO: 640559 - DNA, 19 bp, Mus musculus
  siRNA target sequence for Slc12a1 (NM_183354.1,2876-2894).
gcacgtcggggagttcaat

SEQ ID NO: 640560 - DNA, 19 bp, Mus musculus
  siRNA target sequence for Slc12a1 (NM_183354.1,2880-2898).
gtcggggagttcaatcaga

SEQ ID NO: 640561 - DNA, 19 bp, Mus musculus
  siRNA target sequence for Slc12a1 (NM_183354.1,2882-2900).
cggggagttcaatcagaaa

SEQ ID NO: 640562 - DNA, 19 bp, Mus musculus
  siRNA target sequence for Slc12a1 (NM_183354.1,2910-2928).
gccagcgctcagtttaaaa

SEQ ID NO: 640563 - DNA, 19 bp, Mus musculus
  siRNA target sequence for Slc12a1 (NM_183354.1,2914-2932).
gcgctcagtttaaaaagaa

SEQ ID NO: 640564 - DNA, 19 bp, Mus musculus
  siRNA target sequence for Slc12a1 (NM_183354.1,2938-2956).
gaaaaggcacgattgatgt

SEQ ID NO: 640565 - DNA, 19 bp, Mus musculus
  siRNA target sequence for Slc12a1 (NM_183354.1,2977-2995).
gagggttaacactgcttat

SEQ ID NO: 640566 - DNA, 19 bp, Mus musculus
  siRNA target sequence for Slc12a1 (NM_183354.1,3030-3048).
gattgtaagttaagaatct

SEQ ID NO: 640567 - DNA, 19 bp, Mus musculus
  siRNA target sequence for Slc12a1 (NM_183354.1,3068-3086).
ccgcatcgaagaggaaaaa

SEQ ID NO: 640568 - DNA, 19 bp, Mus musculus
  siRNA target sequence for Slc12a1 (NM_183354.1,3069-3087).
cgcatcgaagaggaaaaaa

SEQ ID NO: 640569 - DNA, 19 bp, Mus musculus
  siRNA target sequence for Slc12a1 (NM_183354.1,3105-3123).
ctcagcaaatttagaataa

SEQ ID NO: 640570 - DNA, 19 bp, Mus musculus
  siRNA target sequence for Slc12a1 (NM_183354.1,3207-3225).
ccttatcggcttcatgaaa

SEQ ID NO: 640571 - DNA, 19 bp, Mus musculus
  siRNA target sequence for Slc12a1 (NM_183354.1,3219-3237).
catgaaagccacaaagatt

SEQ ID NO: 640572 - DNA, 19 bp, Mus musculus
  siRNA target sequence for Slc12a1 (NM_183354.1,3239-3257).
gaccactgctgagaaatta

SEQ ID NO: 640573 - DNA, 19 bp, Mus musculus
  siRNA target sequence for Slc12a1 (NM_183354.1,3331-3349).
gactgaacgagctcttaca

SEQ ID NO: 640574 - DNA, 19 bp, Mus musculus
  siRNA target sequence for Slc12a1 (NM_183354.1,3385-3403).
gccttccagtggcaagaaa

SEQ ID NO: 640575 - DNA, 19 bp, Mus musculus
  siRNA target sequence for Slc12a1 (NM_183354.1,3405-3423).
ggatctatttcggatttgt

SEQ ID NO: 640576 - DNA, 19 bp, Mus musculus
  siRNA target sequence for Slc12a1 (NM_183354.1,3406-3424).
gatctatttcggatttgtt

SEQ ID NO: 640577 - DNA, 19 bp, Mus musculus
  siRNA target sequence for Slc12a1 (NM_183354.1,3409-3427).
ctatttcggatttgttgta

SEQ ID NO: 640578 - DNA, 19 bp, Mus musculus
  siRNA target sequence for Slc12a2 (NM_009194.1,689-707).
gacaccaccagcagtacta

SEQ ID NO: 640579 - DNA, 19 bp, Mus musculus
  siRNA target sequence for Slc12a2 (NM_009194.1,929-947).
catacactgccgagagtaa

SEQ ID NO: 640580 - DNA, 19 bp, Mus musculus
  siRNA target sequence for Slc12a2 (NM_009194.1,933-951).
cactgccgagagtaaagga

SEQ ID NO: 640581 - DNA, 19 bp, Mus musculus
  siRNA target sequence for Slc12a2 (NM_009194.1,939-957).
cgagagtaaaggagttgta

SEQ ID NO: 640582 - DNA, 19 bp, Mus musculus
  siRNA target sequence for Slc12a2 (NM_009194.1,940-958).
gagagtaaaggagttgtaa

SEQ ID NO: 640583 - DNA, 19 bp, Mus musculus
  siRNA target sequence for Slc12a2 (NM_009194.1,944-962).
gtaaaggagttgtaaagtt

SEQ ID NO: 640584 - DNA, 19 bp, Mus musculus
  siRNA target sequence for Slc12a2 (NM_009194.1,965-983).
gctggatcaagggtgtatt

SEQ ID NO: 640585 - DNA, 19 bp, Mus musculus
  siRNA target sequence for Slc12a2 (NM_009194.1,966-984).
ctggatcaagggtgtatta

SEQ ID NO: 640586 - DNA, 19 bp, Mus musculus
  siRNA target sequence for Slc12a2 (NM_009194.1,968-986).
ggatcaagggtgtattagt

SEQ ID NO: 640587 - DNA, 19 bp, Mus musculus
  siRNA target sequence for Slc12a2 (NM_009194.1,985-1003).
gtccgctgcatgttaaaca

SEQ ID NO: 640588 - DNA, 19 bp, Mus musculus
  siRNA target sequence for Slc12a2 (NM_009194.1,987-1005).
ccgctgcatgttaaacatt

SEQ ID NO: 640589 - DNA, 19 bp, Mus musculus
  siRNA target sequence for Slc12a2 (NM_009194.1,988-1006).
cgctgcatgttaaacattt

SEQ ID NO: 640590 - DNA, 19 bp, Mus musculus
  siRNA target sequence for Slc12a2 (NM_009194.1,1009-1027).
ggtgtgatgctctttatta

SEQ ID NO: 640591 - DNA, 19 bp, Mus musculus
  siRNA target sequence for Slc12a2 (NM_009194.1,1012-1030).
gtgatgctctttattagat

SEQ ID NO: 640592 - DNA, 19 bp, Mus musculus
  siRNA target sequence for Slc12a2 (NM_009194.1,1018-1036).
ctctttattagattgtcat

SEQ ID NO: 640593 - DNA, 19 bp, Mus musculus
  siRNA target sequence for Slc12a2 (NM_009194.1,1065-1083).
ctctgtcgtcgtaatagca

SEQ ID NO: 640594 - DNA, 19 bp, Mus musculus
  siRNA target sequence for Slc12a2 (NM_009194.1,1067-1085).
ctgtcgtcgtaatagcaat

SEQ ID NO: 640595 - DNA, 19 bp, Mus musculus
  siRNA target sequence for Slc12a2 (NM_009194.1,1088-1106).
ccactgttgtgacaactat

SEQ ID NO: 640596 - DNA, 19 bp, Mus musculus
  siRNA target sequence for Slc12a2 (NM_009194.1,1153-1171).
ggaggaggagcgtactatt

SEQ ID NO: 640597 - DNA, 19 bp, Mus musculus
  siRNA target sequence for Slc12a2 (NM_009194.1,1156-1174).
ggaggagcgtactatttaa

SEQ ID NO: 640598 - DNA, 19 bp, Mus musculus
  siRNA target sequence for Slc12a2 (NM_009194.1,1157-1175).
gaggagcgtactatttaat

SEQ ID NO: 640599 - DNA, 19 bp, Mus musculus
  siRNA target sequence for Slc12a2 (NM_009194.1,1159-1177).
ggagcgtactatttaatct

SEQ ID NO: 640600 - DNA, 19 bp, Mus musculus
  siRNA target sequence for Slc12a2 (NM_009194.1,1162-1180).
gcgtactatttaatctcta

SEQ ID NO: 640601 - DNA, 19 bp, Mus musculus
  siRNA target sequence for Slc12a2 (NM_009194.1,1167-1185).
ctatttaatctctagaagt

SEQ ID NO: 640602 - DNA, 19 bp, Mus musculus
  siRNA target sequence for Slc12a2 (NM_009194.1,1194-1212).
ggaatttggtggtgcaatt

SEQ ID NO: 640603 - DNA, 19 bp, Mus musculus
  siRNA target sequence for Slc12a2 (NM_009194.1,1204-1222).
ggtgcaattggcttgatct

SEQ ID NO: 640604 - DNA, 19 bp, Mus musculus
  siRNA target sequence for Slc12a2 (NM_009194.1,1205-1223).
gtgcaattggcttgatctt

SEQ ID NO: 640605 - DNA, 19 bp, Mus musculus
  siRNA target sequence for Slc12a2 (NM_009194.1,1238-1256).
cggtggccgttgctatgta

SEQ ID NO: 640606 - DNA, 19 bp, Mus musculus
  siRNA target sequence for Slc12a2 (NM_009194.1,1239-1257).
ggtggccgttgctatgtat

SEQ ID NO: 640607 - DNA, 19 bp, Mus musculus
  siRNA target sequence for Slc12a2 (NM_009194.1,1304-1322).
ccatacttatgatagatga

SEQ ID NO: 640608 - DNA, 19 bp, Mus musculus
  siRNA target sequence for Slc12a2 (NM_009194.1,1305-1323).
catacttatgatagatgaa

SEQ ID NO: 640609 - DNA, 19 bp, Mus musculus
  siRNA target sequence for Slc12a2 (NM_009194.1,1314-1332).
gatagatgaaatcaatgat

SEQ ID NO: 640610 - DNA, 19 bp, Mus musculus
  siRNA target sequence for Slc12a2 (NM_009194.1,1326-1344).
caatgatatccgaattatt

SEQ ID NO: 640611 - DNA, 19 bp, Mus musculus
  siRNA target sequence for Slc12a2 (NM_009194.1,1349-1367).
ccattacagtcgtgattct

SEQ ID NO: 640612 - DNA, 19 bp, Mus musculus
  siRNA target sequence for Slc12a2 (NM_009194.1,1458-1476).
catagggacgtttatctca

SEQ ID NO: 640613 - DNA, 19 bp, Mus musculus
  siRNA target sequence for Slc12a2 (NM_009194.1,1507-1525).
ggctataaatctgaaatat

SEQ ID NO: 640614 - DNA, 19 bp, Mus musculus
  siRNA target sequence for Slc12a2 (NM_009194.1,1552-1570).
cgagaagaagagactttct

SEQ ID NO: 640615 - DNA, 19 bp, Mus musculus
  siRNA target sequence for Slc12a2 (NM_009194.1,1673-1691).
cactcttagccattttgat

SEQ ID NO: 640616 - DNA, 19 bp, Mus musculus
  siRNA target sequence for Slc12a2 (NM_009194.1,1697-1715).
cagtggtttacataggaat

SEQ ID NO: 640617 - DNA, 19 bp, Mus musculus
  siRNA target sequence for Slc12a2 (NM_009194.1,1746-1764).
ggatgccactggcaatgtt

SEQ ID NO: 640618 - DNA, 19 bp, Mus musculus
  siRNA target sequence for Slc12a2 (NM_009194.1,1751-1769).
ccactggcaatgttaatga

SEQ ID NO: 640619 - DNA, 19 bp, Mus musculus
  siRNA target sequence for Slc12a2 (NM_009194.1,1752-1770).
cactggcaatgttaatgat

SEQ ID NO: 640620 - DNA, 19 bp, Mus musculus
  siRNA target sequence for Slc12a2 (NM_009194.1,1762-1780).
gttaatgataccattacaa

SEQ ID NO: 640621 - DNA, 19 bp, Mus musculus
  siRNA target sequence for Slc12a2 (NM_009194.1,1804-1822).
gcagcctgcaaactaaact

SEQ ID NO: 640622 - DNA, 19 bp, Mus musculus
  siRNA target sequence for Slc12a2 (NM_009194.1,1853-1871).
gttcttacgggctaatgaa

SEQ ID NO: 640623 - DNA, 19 bp, Mus musculus
  siRNA target sequence for Slc12a2 (NM_009194.1,1856-1874).
cttacgggctaatgaacaa

SEQ ID NO: 640624 - DNA, 19 bp, Mus musculus
  siRNA target sequence for Slc12a2 (NM_009194.1,1860-1878).
cgggctaatgaacaacttt

SEQ ID NO: 640625 - DNA, 19 bp, Mus musculus
  siRNA target sequence for Slc12a2 (NM_009194.1,1900-1918).
ggatttgcacccttgatct

SEQ ID NO: 640626 - DNA, 19 bp, Mus musculus
  siRNA target sequence for Slc12a2 (NM_009194.1,1968-1986).
gagtgctcccaaaatattt

SEQ ID NO: 640627 - DNA, 19 bp, Mus musculus
  siRNA target sequence for Slc12a2 (NM_009194.1,1990-2008).
gctctatgtaaggacaata

SEQ ID NO: 640628 - DNA, 19 bp, Mus musculus
  siRNA target sequence for Slc12a2 (NM_009194.1,2018-2036).
ctttccagatgtttgctaa

SEQ ID NO: 640629 - DNA, 19 bp, Mus musculus
  siRNA target sequence for Slc12a2 (NM_009194.1,2025-2043).
gatgtttgctaaaggttat

SEQ ID NO: 640630 - DNA, 19 bp, Mus musculus
  siRNA target sequence for Slc12a2 (NM_009194.1,2061-2079).
gcttcgtggttacatctta

SEQ ID NO: 640631 - DNA, 19 bp, Mus musculus
  siRNA target sequence for Slc12a2 (NM_009194.1,2062-2080).
cttcgtggttacatcttaa

SEQ ID NO: 640632 - DNA, 19 bp, Mus musculus
  siRNA target sequence for Slc12a2 (NM_009194.1,2065-2083).
cgtggttacatcttaacat

SEQ ID NO: 640633 - DNA, 19 bp, Mus musculus
  siRNA target sequence for Slc12a2 (NM_009194.1,2121-2139).
gaacgttattgctccaatt

SEQ ID NO: 640634 - DNA, 19 bp, Mus musculus
  siRNA target sequence for Slc12a2 (NM_009194.1,2125-2143).
gttattgctccaattatct

SEQ ID NO: 640635 - DNA, 19 bp, Mus musculus
  siRNA target sequence for Slc12a2 (NM_009194.1,2134-2152).
ccaattatctctaatttct

SEQ ID NO: 640636 - DNA, 19 bp, Mus musculus
  siRNA target sequence for Slc12a2 (NM_009194.1,2158-2176).
gcatcgtatgccttaatca

SEQ ID NO: 640637 - DNA, 19 bp, Mus musculus
  siRNA target sequence for Slc12a2 (NM_009194.1,2159-2177).
catcgtatgccttaatcaa

SEQ ID NO: 640638 - DNA, 19 bp, Mus musculus
  siRNA target sequence for Slc12a2 (NM_009194.1,2162-2180).
cgtatgccttaatcaactt

SEQ ID NO: 640639 - DNA, 19 bp, Mus musculus
  siRNA target sequence for Slc12a2 (NM_009194.1,2163-2181).
gtatgccttaatcaacttt

SEQ ID NO: 640640 - DNA, 19 bp, Mus musculus
  siRNA target sequence for Slc12a2 (NM_009194.1,2168-2186).
ccttaatcaacttttcagt

SEQ ID NO: 640641 - DNA, 19 bp, Mus musculus
  siRNA target sequence for Slc12a2 (NM_009194.1,2190-2208).
ccatgcatcacttgcaaaa

SEQ ID NO: 640642 - DNA, 19 bp, Mus musculus
  siRNA target sequence for Slc12a2 (NM_009194.1,2191-2209).
catgcatcacttgcaaaat

SEQ ID NO: 640643 - DNA, 19 bp, Mus musculus
  siRNA target sequence for Slc12a2 (NM_009194.1,2219-2237).
ggcgtcctgcattcaaata

SEQ ID NO: 640644 - DNA, 19 bp, Mus musculus
  siRNA target sequence for Slc12a2 (NM_009194.1,2221-2239).
cgtcctgcattcaaatact

SEQ ID NO: 640645 - DNA, 19 bp, Mus musculus
  siRNA target sequence for Slc12a2 (NM_009194.1,2222-2240).
gtcctgcattcaaatacta

SEQ ID NO: 640646 - DNA, 19 bp, Mus musculus
  siRNA target sequence for Slc12a2 (NM_009194.1,2247-2265).
gtggatctcccttattgga

SEQ ID NO: 640647 - DNA, 19 bp, Mus musculus
  siRNA target sequence for Slc12a2 (NM_009194.1,2253-2271).
ctcccttattggagcaatt

SEQ ID NO: 640648 - DNA, 19 bp, Mus musculus
  siRNA target sequence for Slc12a2 (NM_009194.1,2276-2294).
gttgcatagtgatgtttgt

SEQ ID NO: 640649 - DNA, 19 bp, Mus musculus
  siRNA target sequence for Slc12a2 (NM_009194.1,2279-2297).
gcatagtgatgtttgtcat

SEQ ID NO: 640650 - DNA, 19 bp, Mus musculus
  siRNA target sequence for Slc12a2 (NM_009194.1,2280-2298).
catagtgatgtttgtcatt

SEQ ID NO: 640651 - DNA, 19 bp, Mus musculus
  siRNA target sequence for Slc12a2 (NM_009194.1,2306-2324).
gggctgcgttgctcacata

SEQ ID NO: 640652 - DNA, 19 bp, Mus musculus
  siRNA target sequence for Slc12a2 (NM_009194.1,2307-2325).
ggctgcgttgctcacatat

SEQ ID NO: 640653 - DNA, 19 bp, Mus musculus
  siRNA target sequence for Slc12a2 (NM_009194.1,2311-2329).
gcgttgctcacatatgtga

SEQ ID NO: 640654 - DNA, 19 bp, Mus musculus
  siRNA target sequence for Slc12a2 (NM_009194.1,2312-2330).
cgttgctcacatatgtgat

SEQ ID NO: 640655 - DNA, 19 bp, Mus musculus
  siRNA target sequence for Slc12a2 (NM_009194.1,2313-2331).
gttgctcacatatgtgata

SEQ ID NO: 640656 - DNA, 19 bp, Mus musculus
  siRNA target sequence for Slc12a2 (NM_009194.1,2338-2356).
gggctgtacatttatgtta

SEQ ID NO: 640657 - DNA, 19 bp, Mus musculus
  siRNA target sequence for Slc12a2 (NM_009194.1,2390-2408).
ccacacaagcgctgactta

SEQ ID NO: 640658 - DNA, 19 bp, Mus musculus
  siRNA target sequence for Slc12a2 (NM_009194.1,2424-2442).
gcattcaatccgtctttct

SEQ ID NO: 640659 - DNA, 19 bp, Mus musculus
  siRNA target sequence for Slc12a2 (NM_009194.1,2471-2489).
gaccacagtgccttgtaat

SEQ ID NO: 640660 - DNA, 19 bp, Mus musculus
  siRNA target sequence for Slc12a2 (NM_009194.1,2513-2531).
ctgctttacttcatcttgt

SEQ ID NO: 640661 - DNA, 19 bp, Mus musculus
  siRNA target sequence for Slc12a2 (NM_009194.1,2541-2559).
cacgaaaaatgttggttta

SEQ ID NO: 640662 - DNA, 19 bp, Mus musculus
  siRNA target sequence for Slc12a2 (NM_009194.1,2543-2561).
cgaaaaatgttggtttaat

SEQ ID NO: 640663 - DNA, 19 bp, Mus musculus
  siRNA target sequence for Slc12a2 (NM_009194.1,2635-2653).
cagcgatggctcattaaaa

SEQ ID NO: 640664 - DNA, 19 bp, Mus musculus
  siRNA target sequence for Slc12a2 (NM_009194.1,2638-2656).
cgatggctcattaaaaaca

SEQ ID NO: 640665 - DNA, 19 bp, Mus musculus
  siRNA target sequence for Slc12a2 (NM_009194.1,2678-2696).
cggttcacgcagatgactt

SEQ ID NO: 640666 - DNA, 19 bp, Mus musculus
  siRNA target sequence for Slc12a2 (NM_009194.1,2698-2716).
cgagaaggtgcacaatact

SEQ ID NO: 640667 - DNA, 19 bp, Mus musculus
  siRNA target sequence for Slc12a2 (NM_009194.1,2729-2747).
ctggacttggtcgtatgaa

SEQ ID NO: 640668 - DNA, 19 bp, Mus musculus
  siRNA target sequence for Slc12a2 (NM_009194.1,2768-2786).
gatttaagaaagattggtt

SEQ ID NO: 640669 - DNA, 19 bp, Mus musculus
  siRNA target sequence for Slc12a2 (NM_009194.1,2799-2817).
gagggatgtggatatgtat

SEQ ID NO: 640670 - DNA, 19 bp, Mus musculus
  siRNA target sequence for Slc12a2 (NM_009194.1,2806-2824).
gtggatatgtatataaact

SEQ ID NO: 640671 - DNA, 19 bp, Mus musculus
  siRNA target sequence for Slc12a2 (NM_009194.1,2902-2920).
caaggtcaggaagaattat

SEQ ID NO: 640672 - DNA, 19 bp, Mus musculus
  siRNA target sequence for Slc12a2 (NM_009194.1,2989-3007).
gatcaagatacttgcaaat

SEQ ID NO: 640673 - DNA, 19 bp, Mus musculus
  siRNA target sequence for Slc12a2 (NM_009194.1,3002-3020).
gcaaatcatctggtgaaaa

SEQ ID NO: 640674 - DNA, 19 bp, Mus musculus
  siRNA target sequence for Slc12a2 (NM_009194.1,3096-3114).
ccctattgtgcctttaaat

SEQ ID NO: 640675 - DNA, 19 bp, Mus musculus
  siRNA target sequence for Slc12a2 (NM_009194.1,3119-3137).
ctgaccaaaagcttcttga

SEQ ID NO: 640676 - DNA, 19 bp, Mus musculus
  siRNA target sequence for Slc12a2 (NM_009194.1,3167-3185).
ggaagaatactatagatgt

SEQ ID NO: 640677 - DNA, 19 bp, Mus musculus
  siRNA target sequence for Slc12a2 (NM_009194.1,3202-3220).
gatggaggtttgacattgt

SEQ ID NO: 640678 - DNA, 19 bp, Mus musculus
  siRNA target sequence for Slc12a2 (NM_009194.1,3263-3281).
gtaagatccgagtattcat

SEQ ID NO: 640679 - DNA, 19 bp, Mus musculus
  siRNA target sequence for Slc12a2 (NM_009194.1,3315-3333).
gagagcgatggctacttta

SEQ ID NO: 640680 - DNA, 19 bp, Mus musculus
  siRNA target sequence for Slc12a2 (NM_009194.1,3317-3335).
gagcgatggctactttatt

SEQ ID NO: 640681 - DNA, 19 bp, Mus musculus
  siRNA target sequence for Slc12a2 (NM_009194.1,3319-3337).
gcgatggctactttattga

SEQ ID NO: 640682 - DNA, 19 bp, Mus musculus
  siRNA target sequence for Slc12a2 (NM_009194.1,3321-3339).
gatggctactttattgagt

SEQ ID NO: 640683 - DNA, 19 bp, Mus musculus
  siRNA target sequence for Slc12a2 (NM_009194.1,3324-3342).
ggctactttattgagtaaa

SEQ ID NO: 640684 - DNA, 19 bp, Mus musculus
  siRNA target sequence for Slc12a2 (NM_009194.1,3338-3356).
gtaaattccggatagactt

SEQ ID NO: 640685 - DNA, 19 bp, Mus musculus
  siRNA target sequence for Slc12a2 (NM_009194.1,3346-3364).
cggatagacttctctgata

SEQ ID NO: 640686 - DNA, 19 bp, Mus musculus
  siRNA target sequence for Slc12a2 (NM_009194.1,3347-3365).
ggatagacttctctgatat

SEQ ID NO: 640687 - DNA, 19 bp, Mus musculus
  siRNA target sequence for Slc12a2 (NM_009194.1,3443-3461).
gacttcacgaagatgataa

SEQ ID NO: 640688 - DNA, 19 bp, Mus musculus
  siRNA target sequence for Slc12a2 (NM_009194.1,3476-3494).
cagataagatgaaagaaga

SEQ ID NO: 640689 - DNA, 19 bp, Mus musculus
  siRNA target sequence for Slc12a2 (NM_009194.1,3499-3517).
ccttggcgaatcacagata

SEQ ID NO: 640690 - DNA, 19 bp, Mus musculus
  siRNA target sequence for Slc12a2 (NM_009194.1,3500-3518).
cttggcgaatcacagataa

SEQ ID NO: 640691 - DNA, 19 bp, Mus musculus
  siRNA target sequence for Slc12a2 (NM_009194.1,3503-3521).
ggcgaatcacagataatga

SEQ ID NO: 640692 - DNA, 19 bp, Mus musculus
  siRNA target sequence for Slc12a2 (NM_009194.1,3526-3544).
gagctttataagactaaga

SEQ ID NO: 640693 - DNA, 19 bp, Mus musculus
  siRNA target sequence for Slc12a2 (NM_009194.1,3528-3546).
gctttataagactaagaca

SEQ ID NO: 640694 - DNA, 19 bp, Mus musculus
  siRNA target sequence for Slc12a2 (NM_009194.1,3529-3547).
ctttataagactaagacat

SEQ ID NO: 640695 - DNA, 19 bp, Mus musculus
  siRNA target sequence for Slc12a2 (NM_009194.1,3590-3608).
gcacagctaacattattgt

SEQ ID NO: 640696 - DNA, 19 bp, Mus musculus
  siRNA target sequence for Slc12a2 (NM_009194.1,3640-3658).
gtgtccagtgctctgtata

SEQ ID NO: 640697 - DNA, 19 bp, Mus musculus
  siRNA target sequence for Slc12a2 (NM_009194.1,3702-3720).
cctggttcgtgggaatcat

SEQ ID NO: 640698 - DNA, 19 bp, Mus musculus
  siRNA target sequence for Slc12a3 (NM_019415.1,202-220).
gcctacgaacactatgcta

SEQ ID NO: 640699 - DNA, 19 bp, Mus musculus
  siRNA target sequence for Slc12a3 (NM_019415.1,203-221).
cctacgaacactatgctaa

SEQ ID NO: 640700 - DNA, 19 bp, Mus musculus
  siRNA target sequence for Slc12a3 (NM_019415.1,416-434).
gggtcaagggggtgatgat

SEQ ID NO: 640701 - DNA, 19 bp, Mus musculus
  siRNA target sequence for Slc12a3 (NM_019415.1,604-622).
ggtggcacctatttcctta

SEQ ID NO: 640702 - DNA, 19 bp, Mus musculus
  siRNA target sequence for Slc12a3 (NM_019415.1,605-623).
gtggcacctatttccttat

SEQ ID NO: 640703 - DNA, 19 bp, Mus musculus
  siRNA target sequence for Slc12a3 (NM_019415.1,759-777).
catcgtagaccccatcaat

SEQ ID NO: 640704 - DNA, 19 bp, Mus musculus
  siRNA target sequence for Slc12a3 (NM_019415.1,763-781).
gtagaccccatcaatgaca

SEQ ID NO: 640705 - DNA, 19 bp, Mus musculus
  siRNA target sequence for Slc12a3 (NM_019415.1,851-869).
ccaaggcccaggtgctatt

SEQ ID NO: 640706 - DNA, 19 bp, Mus musculus
  siRNA target sequence for Slc12a3 (NM_019415.1,855-873).
ggcccaggtgctattcttt

SEQ ID NO: 640707 - DNA, 19 bp, Mus musculus
  siRNA target sequence for Slc12a3 (NM_019415.1,996-1014).
cgactggagaggcattgat

SEQ ID NO: 640708 - DNA, 19 bp, Mus musculus
  siRNA target sequence for Slc12a3 (NM_019415.1,1008-1026).
cattgatggtagcttcttt

SEQ ID NO: 640709 - DNA, 19 bp, Mus musculus
  siRNA target sequence for Slc12a3 (NM_019415.1,1310-1328).
gccgctatggcctcatcaa

SEQ ID NO: 640710 - DNA, 19 bp, Mus musculus
  siRNA target sequence for Slc12a3 (NM_019415.1,1313-1331).
gctatggcctcatcaacta

SEQ ID NO: 640711 - DNA, 19 bp, Mus musculus
  siRNA target sequence for Slc12a3 (NM_019415.1,1371-1389).
gatcacagccggcatcttt

SEQ ID NO: 640712 - DNA, 19 bp, Mus musculus
  siRNA target sequence for Slc12a3 (NM_019415.1,1616-1634).
gctcctacgccctcatcaa

SEQ ID NO: 640713 - DNA, 19 bp, Mus musculus
  siRNA target sequence for Slc12a3 (NM_019415.1,1617-1635).
ctcctacgccctcatcaat

SEQ ID NO: 640714 - DNA, 19 bp, Mus musculus
  siRNA target sequence for Slc12a3 (NM_019415.1,1619-1637).
cctacgccctcatcaattt

SEQ ID NO: 640715 - DNA, 19 bp, Mus musculus
  siRNA target sequence for Slc12a3 (NM_019415.1,1679-1697).
gaccctccttccgatacta

SEQ ID NO: 640716 - DNA, 19 bp, Mus musculus
  siRNA target sequence for Slc12a3 (NM_019415.1,1681-1699).
ccctccttccgatactaca

SEQ ID NO: 640717 - DNA, 19 bp, Mus musculus
  siRNA target sequence for Slc12a3 (NM_019415.1,2002-2020).
cagaacctaagcctaatga

SEQ ID NO: 640718 - DNA, 19 bp, Mus musculus
  siRNA target sequence for Slc12a3 (NM_019415.1,2007-2025).
cctaagcctaatgatttgt

SEQ ID NO: 640719 - DNA, 19 bp, Mus musculus
  siRNA target sequence for Slc12a3 (NM_019415.1,2156-2174).
gcagtggcgtccagattct

SEQ ID NO: 640720 - DNA, 19 bp, Mus musculus
  siRNA target sequence for Slc12a3 (NM_019415.1,2186-2204).
cagggcttgggagaatgaa

SEQ ID NO: 640721 - DNA, 19 bp, Mus musculus
  siRNA target sequence for Slc12a3 (NM_019415.1,2215-2233).
ctggtggttggattcaaga

SEQ ID NO: 640722 - DNA, 19 bp, Mus musculus
  siRNA target sequence for Slc12a3 (NM_019415.1,2332-2350).
cgcgaggggctcaatgtct

SEQ ID NO: 640723 - DNA, 19 bp, Mus musculus
  siRNA target sequence for Slc12a3 (NM_019415.1,2528-2546).
gcaagatccgagtgtttgt

SEQ ID NO: 640724 - DNA, 19 bp, Mus musculus
  siRNA target sequence for Slc12a3 (NM_019415.1,2607-2625).
gttcagactgggattccat

SEQ ID NO: 640725 - DNA, 19 bp, Mus musculus
  siRNA target sequence for Slc12a3 (NM_019415.1,2612-2630).
gactgggattccatgaagt

SEQ ID NO: 640726 - DNA, 19 bp, Mus musculus
  siRNA target sequence for Slc12a3 (NM_019415.1,2772-2790).
gatctcagatgaagagatt

SEQ ID NO: 640727 - DNA, 19 bp, Mus musculus
  siRNA target sequence for Slc12a3 (NM_019415.1,2831-2849).
gtgagatactgctggatta

SEQ ID NO: 640728 - DNA, 19 bp, Mus musculus
  siRNA target sequence for Slc12a3 (NM_019415.1,2835-2853).
gatactgctggattactct

SEQ ID NO: 640729 - DNA, 19 bp, Mus musculus
  siRNA target sequence for Slc12a3 (NM_019415.1,2860-2878).
gctgctctgatcatcctta

SEQ ID NO: 640730 - DNA, 19 bp, Mus musculus
  siRNA target sequence for Slc12a3 (NM_019415.1,2906-2924).
gccccagttcgctgtacat

SEQ ID NO: 640731 - DNA, 19 bp, Mus musculus
  siRNA target sequence for Slc12a3 (NM_019415.1,2989-3007).
gagaatgtgctcacctttt

SEQ ID NO: 640732 - DNA, 19 bp, Mus musculus
  siRNA target sequence for Slc12a4 (NM_009195.1,120-138).
gggtaaccacagagagaat

SEQ ID NO: 640733 - DNA, 19 bp, Mus musculus
  siRNA target sequence for Slc12a4 (NM_009195.1,121-139).
ggtaaccacagagagaata

SEQ ID NO: 640734 - DNA, 19 bp, Mus musculus
  siRNA target sequence for Slc12a4 (NM_009195.1,163-181).
gcctccagaggaaatgact

SEQ ID NO: 640735 - DNA, 19 bp, Mus musculus
  siRNA target sequence for Slc12a4 (NM_009195.1,189-207).
ccggaacttggcactgttt

SEQ ID NO: 640736 - DNA, 19 bp, Mus musculus
  siRNA target sequence for Slc12a4 (NM_009195.1,688-706).
ccgccagctgccatctttt

SEQ ID NO: 640737 - DNA, 19 bp, Mus musculus
  siRNA target sequence for Slc12a4 (NM_009195.1,689-707).
cgccagctgccatctttta

SEQ ID NO: 640738 - DNA, 19 bp, Mus musculus
  siRNA target sequence for Slc12a4 (NM_009195.1,710-728).
catcgggcacccatgacat

SEQ ID NO: 640739 - DNA, 19 bp, Mus musculus
  siRNA target sequence for Slc12a4 (NM_009195.1,731-749).
caagcgccaccttgaataa

SEQ ID NO: 640740 - DNA, 19 bp, Mus musculus
  siRNA target sequence for Slc12a4 (NM_009195.1,734-752).
gcgccaccttgaataacat

SEQ ID NO: 640741 - DNA, 19 bp, Mus musculus
  siRNA target sequence for Slc12a4 (NM_009195.1,744-762).
gaataacatgagagtgtat

SEQ ID NO: 640742 - DNA, 19 bp, Mus musculus
  siRNA target sequence for Slc12a4 (NM_009195.1,755-773).
gagtgtatgggaccatttt

SEQ ID NO: 640743 - DNA, 19 bp, Mus musculus
  siRNA target sequence for Slc12a4 (NM_009195.1,880-898).
ggaggcatcaagtccattt

SEQ ID NO: 640744 - DNA, 19 bp, Mus musculus
  siRNA target sequence for Slc12a4 (NM_009195.1,908-926).
ccgtgtttccggtgtgtat

SEQ ID NO: 640745 - DNA, 19 bp, Mus musculus
  siRNA target sequence for Slc12a4 (NM_009195.1,977-995).
cagtcgtggtggacaatga

SEQ ID NO: 640746 - DNA, 19 bp, Mus musculus
  siRNA target sequence for Slc12a4 (NM_009195.1,1007-1025).
cccggctgtggactttctt

SEQ ID NO: 640747 - DNA, 19 bp, Mus musculus
  siRNA target sequence for Slc12a4 (NM_009195.1,1263-1281).
cgtgctggttggcatcttt

SEQ ID NO: 640748 - DNA, 19 bp, Mus musculus
  siRNA target sequence for Slc12a4 (NM_009195.1,1264-1282).
gtgctggttggcatctttt

SEQ ID NO: 640749 - DNA, 19 bp, Mus musculus
  siRNA target sequence for Slc12a4 (NM_009195.1,1382-1400).
ccacttcgctggtgtactt

SEQ ID NO: 640750 - DNA, 19 bp, Mus musculus
  siRNA target sequence for Slc12a4 (NM_009195.1,1828-1846).
cggttcaagtactatcact

SEQ ID NO: 640751 - DNA, 19 bp, Mus musculus
  siRNA target sequence for Slc12a4 (NM_009195.1,1927-1945).
ctcatcgcaggcatgatct

SEQ ID NO: 640752 - DNA, 19 bp, Mus musculus
  siRNA target sequence for Slc12a4 (NM_009195.1,2080-2098).
ctcctggtgctgcttaagt

SEQ ID NO: 640753 - DNA, 19 bp, Mus musculus
  siRNA target sequence for Slc12a4 (NM_009195.1,2097-2115).
gttagacgaagatcttcat

SEQ ID NO: 640754 - DNA, 19 bp, Mus musculus
  siRNA target sequence for Slc12a4 (NM_009195.1,2163-2181).
gaagggcctgacaatcgtt

SEQ ID NO: 640755 - DNA, 19 bp, Mus musculus
  siRNA target sequence for Slc12a4 (NM_009195.1,2253-2271).
catgatggacattgagaaa

SEQ ID NO: 640756 - DNA, 19 bp, Mus musculus
  siRNA target sequence for Slc12a4 (NM_009195.1,2416-2434).
cgtgcctggaagaccttta

SEQ ID NO: 640757 - DNA, 19 bp, Mus musculus
  siRNA target sequence for Slc12a4 (NM_009195.1,2417-2435).
gtgcctggaagacctttat

SEQ ID NO: 640758 - DNA, 19 bp, Mus musculus
  siRNA target sequence for Slc12a4 (NM_009195.1,2473-2491).
ctgctggtgccaaagaaca

SEQ ID NO: 640759 - DNA, 19 bp, Mus musculus
  siRNA target sequence for Slc12a4 (NM_009195.1,2475-2493).
gctggtgccaaagaacata

SEQ ID NO: 640760 - DNA, 19 bp, Mus musculus
  siRNA target sequence for Slc12a4 (NM_009195.1,2479-2497).
gtgccaaagaacatagctt

SEQ ID NO: 640761 - DNA, 19 bp, Mus musculus
  siRNA target sequence for Slc12a4 (NM_009195.1,2597-2615).
gccagcataaggtttggaa

SEQ ID NO: 640762 - DNA, 19 bp, Mus musculus
  siRNA target sequence for Slc12a4 (NM_009195.1,2602-2620).
cataaggtttggaagaagt

SEQ ID NO: 640763 - DNA, 19 bp, Mus musculus
  siRNA target sequence for Slc12a4 (NM_009195.1,2948-2966).
cgtggaccagagacaagta

SEQ ID NO: 640764 - DNA, 19 bp, Mus musculus
  siRNA target sequence for Slc12a4 (NM_009195.1,2990-3008).
gccacgcccctgacaactt

SEQ ID NO: 640765 - DNA, 19 bp, Mus musculus
  siRNA target sequence for Slc12a4 (NM_009195.1,3110-3128).
gtctggttttgctgaacat

SEQ ID NO: 640766 - DNA, 19 bp, Mus musculus
  siRNA target sequence for Slc12a4 (NM_009195.1,3149-3167).
gcgagggcgacgagaacta

SEQ ID NO: 640767 - DNA, 19 bp, Mus musculus
  siRNA target sequence for Slc12a4 (NM_009195.1,3197-3215).
gccttgaacgggtgttgtt

SEQ ID NO: 640768 - DNA, 19 bp, Mus musculus
  siRNA target sequence for Slc12a6 (NM_133648.1,159-177).
gttagatgacggccataaa

SEQ ID NO: 640769 - DNA, 19 bp, Mus musculus
  siRNA target sequence for Slc12a6 (NM_133648.1,190-208).
gcttatctcaataattcca

SEQ ID NO: 640770 - DNA, 19 bp, Mus musculus
  siRNA target sequence for Slc12a6 (NM_133648.1,220-238).
ggagacgaatattttgata

SEQ ID NO: 640771 - DNA, 19 bp, Mus musculus
  siRNA target sequence for Slc12a6 (NM_133648.1,221-239).
gagacgaatattttgataa

SEQ ID NO: 640772 - DNA, 19 bp, Mus musculus
  siRNA target sequence for Slc12a6 (NM_133648.1,297-315).
caaccgcatggccaactat

SEQ ID NO: 640773 - DNA, 19 bp, Mus musculus
  siRNA target sequence for Slc12a6 (NM_133648.1,300-318).
ccgcatggccaactataca

SEQ ID NO: 640774 - DNA, 19 bp, Mus musculus
  siRNA target sequence for Slc12a6 (NM_133648.1,301-319).
cgcatggccaactatacaa

SEQ ID NO: 640775 - DNA, 19 bp, Mus musculus
  siRNA target sequence for Slc12a6 (NM_133648.1,528-546).
ctgctgctgtacaatgtta

SEQ ID NO: 640776 - DNA, 19 bp, Mus musculus
  siRNA target sequence for Slc12a6 (NM_133648.1,852-870).
cggcgtacgctatgtgaat

SEQ ID NO: 640777 - DNA, 19 bp, Mus musculus
  siRNA target sequence for Slc12a6 (NM_133648.1,853-871).
ggcgtacgctatgtgaata

SEQ ID NO: 640778 - DNA, 19 bp, Mus musculus
  siRNA target sequence for Slc12a6 (NM_133648.1,854-872).
gcgtacgctatgtgaataa

SEQ ID NO: 640779 - DNA, 19 bp, Mus musculus
  siRNA target sequence for Slc12a6 (NM_133648.1,856-874).
gtacgctatgtgaataagt

SEQ ID NO: 640780 - DNA, 19 bp, Mus musculus
  siRNA target sequence for Slc12a6 (NM_133648.1,906-924).
gtcgatcttggctatctat

SEQ ID NO: 640781 - DNA, 19 bp, Mus musculus
  siRNA target sequence for Slc12a6 (NM_133648.1,956-974).
cacacttcccggtctgtat

SEQ ID NO: 640782 - DNA, 19 bp, Mus musculus
  siRNA target sequence for Slc12a6 (NM_133648.1,995-1013).
catcaagacaccttgacat

SEQ ID NO: 640783 - DNA, 19 bp, Mus musculus
  siRNA target sequence for Slc12a6 (NM_133648.1,1076-1094).
gcaactcgagtcagttctt

SEQ ID NO: 640784 - DNA, 19 bp, Mus musculus
  siRNA target sequence for Slc12a6 (NM_133648.1,1077-1095).
caactcgagtcagttcttt

SEQ ID NO: 640785 - DNA, 19 bp, Mus musculus
  siRNA target sequence for Slc12a6 (NM_133648.1,1157-1175).
ggttggctagtggtatcat

SEQ ID NO: 640786 - DNA, 19 bp, Mus musculus
  siRNA target sequence for Slc12a6 (NM_133648.1,1163-1181).
ctagtggtatcattactga

SEQ ID NO: 640787 - DNA, 19 bp, Mus musculus
  siRNA target sequence for Slc12a6 (NM_133648.1,1190-1208).
ggagtaattatttaccaaa

SEQ ID NO: 640788 - DNA, 19 bp, Mus musculus
  siRNA target sequence for Slc12a6 (NM_133648.1,1235-1253).
ccaagtcatctgatgtctt

SEQ ID NO: 640789 - DNA, 19 bp, Mus musculus
  siRNA target sequence for Slc12a6 (NM_133648.1,1246-1264).
gatgtcttaggcaacttaa

SEQ ID NO: 640790 - DNA, 19 bp, Mus musculus
  siRNA target sequence for Slc12a6 (NM_133648.1,1251-1269).
cttaggcaacttaaaccat

SEQ ID NO: 640791 - DNA, 19 bp, Mus musculus
  siRNA target sequence for Slc12a6 (NM_133648.1,1260-1278).
cttaaaccatgaatatgtt

SEQ ID NO: 640792 - DNA, 19 bp, Mus musculus
  siRNA target sequence for Slc12a6 (NM_133648.1,1416-1434).
catcctgaccacatccttt

SEQ ID NO: 640793 - DNA, 19 bp, Mus musculus
  siRNA target sequence for Slc12a6 (NM_133648.1,1480-1498).
gtcgttctcagagacaaat

SEQ ID NO: 640794 - DNA, 19 bp, Mus musculus
  siRNA target sequence for Slc12a6 (NM_133648.1,1525-1543).
gttgtaggcaccttatcct

SEQ ID NO: 640795 - DNA, 19 bp, Mus musculus
  siRNA target sequence for Slc12a6 (NM_133648.1,1550-1568).
ccccgtgggtgatcgttat

SEQ ID NO: 640796 - DNA, 19 bp, Mus musculus
  siRNA target sequence for Slc12a6 (NM_133648.1,1551-1569).
cccgtgggtgatcgttatt

SEQ ID NO: 640797 - DNA, 19 bp, Mus musculus
  siRNA target sequence for Slc12a6 (NM_133648.1,1563-1581).
cgttattggctccttcttt

SEQ ID NO: 640798 - DNA, 19 bp, Mus musculus
  siRNA target sequence for Slc12a6 (NM_133648.1,1703-1721).
ctacctgggctttacttct

SEQ ID NO: 640799 - DNA, 19 bp, Mus musculus
  siRNA target sequence for Slc12a6 (NM_133648.1,1735-1753).
gcagagctgggaattctca

SEQ ID NO: 640800 - DNA, 19 bp, Mus musculus
  siRNA target sequence for Slc12a6 (NM_133648.1,1825-1843).
gcttgtgccttgcaaacat

SEQ ID NO: 640801 - DNA, 19 bp, Mus musculus
  siRNA target sequence for Slc12a6 (NM_133648.1,1826-1844).
cttgtgccttgcaaacatt

SEQ ID NO: 640802 - DNA, 19 bp, Mus musculus
  siRNA target sequence for Slc12a6 (NM_133648.1,1866-1884).
gcctcgattccgctattat

SEQ ID NO: 640803 - DNA, 19 bp, Mus musculus
  siRNA target sequence for Slc12a6 (NM_133648.1,1868-1886).
ctcgattccgctattatca

SEQ ID NO: 640804 - DNA, 19 bp, Mus musculus
  siRNA target sequence for Slc12a6 (NM_133648.1,1919-1937).
gtctagctctgatgttcat

SEQ ID NO: 640805 - DNA, 19 bp, Mus musculus
  siRNA target sequence for Slc12a6 (NM_133648.1,1954-1972).
gccattgtagctatggtaa

SEQ ID NO: 640806 - DNA, 19 bp, Mus musculus
  siRNA target sequence for Slc12a6 (NM_133648.1,1955-1973).
ccattgtagctatggtaat

SEQ ID NO: 640807 - DNA, 19 bp, Mus musculus
  siRNA target sequence for Slc12a6 (NM_133648.1,1956-1974).
cattgtagctatggtaata

SEQ ID NO: 640808 - DNA, 19 bp, Mus musculus
  siRNA target sequence for Slc12a6 (NM_133648.1,2090-2108).
gacctcctcacactaaaaa

SEQ ID NO: 640809 - DNA, 19 bp, Mus musculus
  siRNA target sequence for Slc12a6 (NM_133648.1,2272-2290).
gcggcagagcagaccatta

SEQ ID NO: 640810 - DNA, 19 bp, Mus musculus
  siRNA target sequence for Slc12a6 (NM_133648.1,2273-2291).
cggcagagcagaccattaa

SEQ ID NO: 640811 - DNA, 19 bp, Mus musculus
  siRNA target sequence for Slc12a6 (NM_133648.1,2436-2454).
ctggcgtcagagtgaagat

SEQ ID NO: 640812 - DNA, 19 bp, Mus musculus
  siRNA target sequence for Slc12a6 (NM_133648.1,2455-2473).
gctcgcgcttggaagactt

SEQ ID NO: 640813 - DNA, 19 bp, Mus musculus
  siRNA target sequence for Slc12a6 (NM_133648.1,2456-2474).
ctcgcgcttggaagacttt

SEQ ID NO: 640814 - DNA, 19 bp, Mus musculus
  siRNA target sequence for Slc12a6 (NM_133648.1,2458-2476).
cgcgcttggaagactttca

SEQ ID NO: 640815 - DNA, 19 bp, Mus musculus
  siRNA target sequence for Slc12a6 (NM_133648.1,2459-2477).
gcgcttggaagactttcat

SEQ ID NO: 640816 - DNA, 19 bp, Mus musculus
  siRNA target sequence for Slc12a6 (NM_133648.1,2460-2478).
cgcttggaagactttcatt

SEQ ID NO: 640817 - DNA, 19 bp, Mus musculus
  siRNA target sequence for Slc12a6 (NM_133648.1,2567-2585).
ctgagggcaacattgatgt

SEQ ID NO: 640818 - DNA, 19 bp, Mus musculus
  siRNA target sequence for Slc12a6 (NM_133648.1,2607-2625).
gggcatgctcatgctatta

SEQ ID NO: 640819 - DNA, 19 bp, Mus musculus
  siRNA target sequence for Slc12a6 (NM_133648.1,2679-2697).
cacagtagcccaactagaa

SEQ ID NO: 640820 - DNA, 19 bp, Mus musculus
  siRNA target sequence for Slc12a6 (NM_133648.1,2889-2907).
ggcacagctggtgaaagat

SEQ ID NO: 640821 - DNA, 19 bp, Mus musculus
  siRNA target sequence for Slc12a6 (NM_133648.1,2898-2916).
ggtgaaagatcgaaactca

SEQ ID NO: 640822 - DNA, 19 bp, Mus musculus
  siRNA target sequence for Slc12a6 (NM_133648.1,3022-3040).
gggcaaaaggtcaagtcaa

SEQ ID NO: 640823 - DNA, 19 bp, Mus musculus
  siRNA target sequence for Slc12a6 (NM_133648.1,3046-3064).
ggattccaggacctactta

SEQ ID NO: 640824 - DNA, 19 bp, Mus musculus
  siRNA target sequence for Slc12a6 (NM_133648.1,3228-3246).
gctcactgagggattagaa

SEQ ID NO: 640825 - DNA, 19 bp, Mus musculus
  siRNA target sequence for Slc12a7 (NM_011390.1,219-237).
cagccctttcatcaataat

SEQ ID NO: 640826 - DNA, 19 bp, Mus musculus
  siRNA target sequence for Slc12a7 (NM_011390.1,221-239).
gccctttcatcaataatgt

SEQ ID NO: 640827 - DNA, 19 bp, Mus musculus
  siRNA target sequence for Slc12a7 (NM_011390.1,509-527).
gggcagctggtgttatgga

SEQ ID NO: 640828 - DNA, 19 bp, Mus musculus
  siRNA target sequence for Slc12a7 (NM_011390.1,867-885).
ggtctttgttggtgtcaaa

SEQ ID NO: 640829 - DNA, 19 bp, Mus musculus
  siRNA target sequence for Slc12a7 (NM_011390.1,1014-1032).
gctggcaaatcgcaacttt

SEQ ID NO: 640830 - DNA, 19 bp, Mus musculus
  siRNA target sequence for Slc12a7 (NM_011390.1,1017-1035).
ggcaaatcgcaactttgat

SEQ ID NO: 640831 - DNA, 19 bp, Mus musculus
  siRNA target sequence for Slc12a7 (NM_011390.1,1018-1036).
gcaaatcgcaactttgata

SEQ ID NO: 640832 - DNA, 19 bp, Mus musculus
  siRNA target sequence for Slc12a7 (NM_011390.1,1142-1160).
cacagaacaacgttactga

SEQ ID NO: 640833 - DNA, 19 bp, Mus musculus
  siRNA target sequence for Slc12a7 (NM_011390.1,1350-1368).
ctacttcccgtctgtaact

SEQ ID NO: 640834 - DNA, 19 bp, Mus musculus
  siRNA target sequence for Slc12a7 (NM_011390.1,1443-1461).
ggccatcgtgactacatct

SEQ ID NO: 640835 - DNA, 19 bp, Mus musculus
  siRNA target sequence for Slc12a7 (NM_011390.1,1508-1526).
gtgtagtcctgcgagataa

SEQ ID NO: 640836 - DNA, 19 bp, Mus musculus
  siRNA target sequence for Slc12a7 (NM_011390.1,1510-1528).
gtagtcctgcgagataagt

SEQ ID NO: 640837 - DNA, 19 bp, Mus musculus
  siRNA target sequence for Slc12a7 (NM_011390.1,1835-1853).
gctacatgttcgtcaatct

SEQ ID NO: 640838 - DNA, 19 bp, Mus musculus
  siRNA target sequence for Slc12a7 (NM_011390.1,1892-1910).
ggcgtccacgcttcaagtt

SEQ ID NO: 640839 - DNA, 19 bp, Mus musculus
  siRNA target sequence for Slc12a7 (NM_011390.1,1894-1912).
cgtccacgcttcaagttct

SEQ ID NO: 640840 - DNA, 19 bp, Mus musculus
  siRNA target sequence for Slc12a7 (NM_011390.1,1895-1913).
gtccacgcttcaagttcta

SEQ ID NO: 640841 - DNA, 19 bp, Mus musculus
  siRNA target sequence for Slc12a7 (NM_011390.1,1949-1967).
gcctcgcgctgatgttcat

SEQ ID NO: 640842 - DNA, 19 bp, Mus musculus
  siRNA target sequence for Slc12a7 (NM_011390.1,1951-1969).
ctcgcgctgatgttcatct

SEQ ID NO: 640843 - DNA, 19 bp, Mus musculus
  siRNA target sequence for Slc12a7 (NM_011390.1,2005-2023).
gccggctgcatctacaagt

SEQ ID NO: 640844 - DNA, 19 bp, Mus musculus
  siRNA target sequence for Slc12a7 (NM_011390.1,2262-2280).
gctagagggcacctactta

SEQ ID NO: 640845 - DNA, 19 bp, Mus musculus
  siRNA target sequence for Slc12a7 (NM_011390.1,2547-2565).
gttggtggccaagaacatt

SEQ ID NO: 640846 - DNA, 19 bp, Mus musculus
  siRNA target sequence for Slc12a7 (NM_011390.1,2555-2573).
ccaagaacattgacttatt

SEQ ID NO: 640847 - DNA, 19 bp, Mus musculus
  siRNA target sequence for Slc12a7 (NM_011390.1,2884-2902).
cagatgcagttgtcaaaga

SEQ ID NO: 640848 - DNA, 19 bp, Mus musculus
  siRNA target sequence for Slc12a7 (NM_011390.1,3062-3080).
gcccatcaggcttcaaaga

SEQ ID NO: 640849 - DNA, 19 bp, Mus musculus
  siRNA target sequence for Slc12a7 (NM_011390.1,3145-3163).
ggcgtagttctcaacaagt

SEQ ID NO: 640850 - DNA, 19 bp, Mus musculus
  siRNA target sequence for Slc12a7 (NM_011390.1,3175-3193).
caactggtcctgctgaata

SEQ ID NO: 640851 - DNA, 19 bp, Mus musculus
  siRNA target sequence for Slc12a7 (NM_011390.1,3215-3233).
ggcagggggacgagaacta

SEQ ID NO: 640852 - DNA, 19 bp, Mus musculus
  siRNA target sequence for Slc13a1 (NM_019481.1,31-49).
gaagctcctcaattatgct

SEQ ID NO: 640853 - DNA, 19 bp, Mus musculus
  siRNA target sequence for Slc13a1 (NM_019481.1,76-94).
ggttttcactattttggtt

SEQ ID NO: 640854 - DNA, 19 bp, Mus musculus
  siRNA target sequence for Slc13a1 (NM_019481.1,204-222).
ctctactgcctgggttaat

SEQ ID NO: 640855 - DNA, 19 bp, Mus musculus
  siRNA target sequence for Slc13a1 (NM_019481.1,206-224).
ctactgcctgggttaatgt

SEQ ID NO: 640856 - DNA, 19 bp, Mus musculus
  siRNA target sequence for Slc13a1 (NM_019481.1,217-235).
gttaatgttccccatgttt

SEQ ID NO: 640857 - DNA, 19 bp, Mus musculus
  siRNA target sequence for Slc13a1 (NM_019481.1,293-311).
ctaattggagtcatctgtt

SEQ ID NO: 640858 - DNA, 19 bp, Mus musculus
  siRNA target sequence for Slc13a1 (NM_019481.1,307-325).
ctgtttagcaacatcaata

SEQ ID NO: 640859 - DNA, 19 bp, Mus musculus
  siRNA target sequence for Slc13a1 (NM_019481.1,309-327).
gtttagcaacatcaataga

SEQ ID NO: 640860 - DNA, 19 bp, Mus musculus
  siRNA target sequence for Slc13a1 (NM_019481.1,488-506).
gtggcgcagcagatcatca

SEQ ID NO: 640861 - DNA, 19 bp, Mus musculus
  siRNA target sequence for Slc13a1 (NM_019481.1,538-556).
gacttatttcaatgaatct

SEQ ID NO: 640862 - DNA, 19 bp, Mus musculus
  siRNA target sequence for Slc13a1 (NM_019481.1,561-579).
cccacggactggacattga

SEQ ID NO: 640863 - DNA, 19 bp, Mus musculus
  siRNA target sequence for Slc13a1 (NM_019481.1,565-583).
cggactggacattgatgaa

SEQ ID NO: 640864 - DNA, 19 bp, Mus musculus
  siRNA target sequence for Slc13a1 (NM_019481.1,566-584).
ggactggacattgatgaaa

SEQ ID NO: 640865 - DNA, 19 bp, Mus musculus
  siRNA target sequence for Slc13a1 (NM_019481.1,572-590).
gacattgatgaaactgtta

SEQ ID NO: 640866 - DNA, 19 bp, Mus musculus
  siRNA target sequence for Slc13a1 (NM_019481.1,587-605).
gttattggacaagaaacaa

SEQ ID NO: 640867 - DNA, 19 bp, Mus musculus
  siRNA target sequence for Slc13a1 (NM_019481.1,717-735).
caaggaaggaccacatgat

SEQ ID NO: 640868 - DNA, 19 bp, Mus musculus
  siRNA target sequence for Slc13a1 (NM_019481.1,779-797).
ggtgggctgacaacaatca

SEQ ID NO: 640869 - DNA, 19 bp, Mus musculus
  siRNA target sequence for Slc13a1 (NM_019481.1,895-913).
cccggttgctctaattctt

SEQ ID NO: 640870 - DNA, 19 bp, Mus musculus
  siRNA target sequence for Slc13a1 (NM_019481.1,950-968).
ctaggattcgactttaaga

SEQ ID NO: 640871 - DNA, 19 bp, Mus musculus
  siRNA target sequence for Slc13a1 (NM_019481.1,953-971).
ggattcgactttaagatgt

SEQ ID NO: 640872 - DNA, 19 bp, Mus musculus
  siRNA target sequence for Slc13a1 (NM_019481.1,973-991).
caagtgtggcaaaaccaaa

SEQ ID NO: 640873 - DNA, 19 bp, Mus musculus
  siRNA target sequence for Slc13a1 (NM_019481.1,978-996).
gtggcaaaaccaaaacact

SEQ ID NO: 640874 - DNA, 19 bp, Mus musculus
  siRNA target sequence for Slc13a1 (NM_019481.1,1011-1029).
gtgcaaaggtgatcaaaca

SEQ ID NO: 640875 - DNA, 19 bp, Mus musculus
  siRNA target sequence for Slc13a1 (NM_019481.1,1048-1066).
gccaatgaggtatcaagaa

SEQ ID NO: 640876 - DNA, 19 bp, Mus musculus
  siRNA target sequence for Slc13a1 (NM_019481.1,1075-1093).
cttggtgatcttcattgta

SEQ ID NO: 640877 - DNA, 19 bp, Mus musculus
  siRNA target sequence for Slc13a1 (NM_019481.1,1140-1158).
ggtcggtcctgttttcaga

SEQ ID NO: 640878 - DNA, 19 bp, Mus musculus
  siRNA target sequence for Slc13a1 (NM_019481.1,1159-1177).
gtacccgggttatgttaca

SEQ ID NO: 640879 - DNA, 19 bp, Mus musculus
  siRNA target sequence for Slc13a1 (NM_019481.1,1162-1180).
cccgggttatgttacagat

SEQ ID NO: 640880 - DNA, 19 bp, Mus musculus
  siRNA target sequence for Slc13a1 (NM_019481.1,1163-1181).
ccgggttatgttacagatt

SEQ ID NO: 640881 - DNA, 19 bp, Mus musculus
  siRNA target sequence for Slc13a1 (NM_019481.1,1165-1183).
gggttatgttacagattca

SEQ ID NO: 640882 - DNA, 19 bp, Mus musculus
  siRNA target sequence for Slc13a1 (NM_019481.1,1166-1184).
ggttatgttacagattcaa

SEQ ID NO: 640883 - DNA, 19 bp, Mus musculus
  siRNA target sequence for Slc13a1 (NM_019481.1,1176-1194).
cagattcaacggttgcttt

SEQ ID NO: 640884 - DNA, 19 bp, Mus musculus
  siRNA target sequence for Slc13a1 (NM_019481.1,1246-1264).
gacatctgcaggagaaatt

SEQ ID NO: 640885 - DNA, 19 bp, Mus musculus
  siRNA target sequence for Slc13a1 (NM_019481.1,1248-1266).
catctgcaggagaaattat

SEQ ID NO: 640886 - DNA, 19 bp, Mus musculus
  siRNA target sequence for Slc13a1 (NM_019481.1,1254-1272).
caggagaaattattgcttt

SEQ ID NO: 640887 - DNA, 19 bp, Mus musculus
  siRNA target sequence for Slc13a1 (NM_019481.1,1373-1391).
caggtatcaggactatcta

SEQ ID NO: 640888 - DNA, 19 bp, Mus musculus
  siRNA target sequence for Slc13a1 (NM_019481.1,1376-1394).
gtatcaggactatctaact

SEQ ID NO: 640889 - DNA, 19 bp, Mus musculus
  siRNA target sequence for Slc13a1 (NM_019481.1,1396-1414).
gatagggagtaaattatct

SEQ ID NO: 640890 - DNA, 19 bp, Mus musculus
  siRNA target sequence for Slc13a1 (NM_019481.1,1489-1507).
cagcaacccagctaccatt

SEQ ID NO: 640891 - DNA, 19 bp, Mus musculus
  siRNA target sequence for Slc13a1 (NM_019481.1,1499-1517).
gctaccattaccattctgt

SEQ ID NO: 640892 - DNA, 19 bp, Mus musculus
  siRNA target sequence for Slc13a1 (NM_019481.1,1588-1606).
ctgtacctcatttgcattt

SEQ ID NO: 640893 - DNA, 19 bp, Mus musculus
  siRNA target sequence for Slc13a1 (NM_019481.1,1619-1637).
gcaaatccacccaatgcta

SEQ ID NO: 640894 - DNA, 19 bp, Mus musculus
  siRNA target sequence for Slc13a1 (NM_019481.1,1620-1638).
caaatccacccaatgctat

SEQ ID NO: 640895 - DNA, 19 bp, Mus musculus
  siRNA target sequence for Slc13a1 (NM_019481.1,1666-1684).
cattgacatggttaaagct

SEQ ID NO: 640896 - DNA, 19 bp, Mus musculus
  siRNA target sequence for Slc13a1 (NM_019481.1,1685-1703).
ggacttggagtgaatattt

SEQ ID NO: 640897 - DNA, 19 bp, Mus musculus
  siRNA target sequence for Slc13a1 (NM_019481.1,1738-1756).
ctggatcgagccgatgttt

SEQ ID NO: 640898 - DNA, 19 bp, Mus musculus
  siRNA target sequence for Slc13a2 (NM_022411.1,101-119).
cactcattgtccaaactaa

SEQ ID NO: 640899 - DNA, 19 bp, Mus musculus
  siRNA target sequence for Slc13a2 (NM_022411.1,105-123).
cattgtccaaactaaggaa

SEQ ID NO: 640900 - DNA, 19 bp, Mus musculus
  siRNA target sequence for Slc13a2 (NM_022411.1,245-263).
ccaaggtctgcttagagta

SEQ ID NO: 640901 - DNA, 19 bp, Mus musculus
  siRNA target sequence for Slc13a2 (NM_022411.1,250-268).
gtctgcttagagtacttca

SEQ ID NO: 640902 - DNA, 19 bp, Mus musculus
  siRNA target sequence for Slc13a2 (NM_022411.1,264-282).
cttcaaggacaccaacata

SEQ ID NO: 640903 - DNA, 19 bp, Mus musculus
  siRNA target sequence for Slc13a2 (NM_022411.1,349-367).
cttggagtgctccttatca

SEQ ID NO: 640904 - DNA, 19 bp, Mus musculus
  siRNA target sequence for Slc13a2 (NM_022411.1,591-609).
cggtcaggctgtatctgtt

SEQ ID NO: 640905 - DNA, 19 bp, Mus musculus
  siRNA target sequence for Slc13a2 (NM_022411.1,592-610).
ggtcaggctgtatctgttt

SEQ ID NO: 640906 - DNA, 19 bp, Mus musculus
  siRNA target sequence for Slc13a2 (NM_022411.1,756-774).
ctcgatcttccctgaaaat

SEQ ID NO: 640907 - DNA, 19 bp, Mus musculus
  siRNA target sequence for Slc13a2 (NM_022411.1,786-804).
gaactttgcttcatggttt

SEQ ID NO: 640908 - DNA, 19 bp, Mus musculus
  siRNA target sequence for Slc13a2 (NM_022411.1,879-897).
caacttccggaagaacttt

SEQ ID NO: 640909 - DNA, 19 bp, Mus musculus
  siRNA target sequence for Slc13a2 (NM_022411.1,1073-1091).
cagctttcgccaataaaaa

SEQ ID NO: 640910 - DNA, 19 bp, Mus musculus
  siRNA target sequence for Slc13a2 (NM_022411.1,1095-1113).
gcaaagcatggtatcagat

SEQ ID NO: 640911 - DNA, 19 bp, Mus musculus
  siRNA target sequence for Slc13a2 (NM_022411.1,1114-1132).
gggacagtggccatcttta

SEQ ID NO: 640912 - DNA, 19 bp, Mus musculus
  siRNA target sequence for Slc13a2 (NM_022411.1,1115-1133).
ggacagtggccatctttat

SEQ ID NO: 640913 - DNA, 19 bp, Mus musculus
  siRNA target sequence for Slc13a2 (NM_022411.1,1232-1250).
ggaagacagtgaacgataa

SEQ ID NO: 640914 - DNA, 19 bp, Mus musculus
  siRNA target sequence for Slc13a2 (NM_022411.1,1246-1264).
gataagatgccctggaata

SEQ ID NO: 640915 - DNA, 19 bp, Mus musculus
  siRNA target sequence for Slc13a2 (NM_022411.1,1434-1452).
ggccaccactacactattt

SEQ ID NO: 640916 - DNA, 19 bp, Mus musculus
  siRNA target sequence for Slc13a2 (NM_022411.1,1591-1609).
ggcctcaaagtgtctgata

SEQ ID NO: 640917 - DNA, 19 bp, Mus musculus
  siRNA target sequence for Slc13a2 (NM_022411.1,1618-1636).
gcaggattcctgctcaata

SEQ ID NO: 640918 - DNA, 19 bp, Mus musculus
  siRNA target sequence for Slc13a2 (NM_022411.1,1619-1637).
caggattcctgctcaatat

SEQ ID NO: 640919 - DNA, 19 bp, Mus musculus
  siRNA target sequence for Slc13a2 (NM_022411.1,1641-1659).
cggagtgctgactatcaca

SEQ ID NO: 640920 - DNA, 19 bp, Mus musculus
  siRNA target sequence for Slc13a2 (NM_022411.1,1642-1660).
ggagtgctgactatcacat

SEQ ID NO: 640921 - DNA, 19 bp, Mus musculus
  siRNA target sequence for Slc13a2 (NM_022411.1,1643-1661).
gagtgctgactatcacatt

SEQ ID NO: 640922 - DNA, 19 bp, Mus musculus
  siRNA target sequence for Slc13a2 (NM_022411.1,1645-1663).
gtgctgactatcacattat

SEQ ID NO: 640923 - DNA, 19 bp, Mus musculus
  siRNA target sequence for Slc13a2 (NM_022411.1,1652-1670).
ctatcacattatccataaa

SEQ ID NO: 640924 - DNA, 19 bp, Mus musculus
  siRNA target sequence for Slc13a2 (NM_022411.1,1673-1691).
gctggagtatccctatctt

SEQ ID NO: 640925 - DNA, 19 bp, Mus musculus
  siRNA target sequence for Slc13a2 (NM_022411.1,1676-1694).
ggagtatccctatcttcaa

SEQ ID NO: 640926 - DNA, 19 bp, Mus musculus
  siRNA target sequence for Slc13a2 (NM_022411.1,1730-1748).
caagccagtgccttctcaa

SEQ ID NO: 640927 - DNA, 19 bp, Mus musculus
  siRNA target sequence for Slc13a2 (NM_022411.1,1741-1759).
cttctcaatccgcctaatt

SEQ ID NO: 640928 - DNA, 19 bp, Mus musculus
  siRNA target sequence for Slc13a2 (NM_022411.1,1744-1762).
ctcaatccgcctaattcca

SEQ ID NO: 640929 - DNA, 19 bp, Mus musculus
  siRNA target sequence for Slc16a1 (NM_009196.2,257-275).
ctgggggtgggcagtgtta

SEQ ID NO: 640930 - DNA, 19 bp, Mus musculus
  siRNA target sequence for Slc16a1 (NM_009196.2,259-277).
gggggtgggcagtgttagt

SEQ ID NO: 640931 - DNA, 19 bp, Mus musculus
  siRNA target sequence for Slc16a1 (NM_009196.2,272-290).
gttagtcggagccttcatt

SEQ ID NO: 640932 - DNA, 19 bp, Mus musculus
  siRNA target sequence for Slc16a1 (NM_009196.2,276-294).
gtcggagccttcatttcta

SEQ ID NO: 640933 - DNA, 19 bp, Mus musculus
  siRNA target sequence for Slc16a1 (NM_009196.2,344-362).
gatagaagttatattcagt

SEQ ID NO: 640934 - DNA, 19 bp, Mus musculus
  siRNA target sequence for Slc16a1 (NM_009196.2,363-381).
gcaacgaccagtgaagtat

SEQ ID NO: 640935 - DNA, 19 bp, Mus musculus
  siRNA target sequence for Slc16a1 (NM_009196.2,371-389).
cagtgaagtatcatggata

SEQ ID NO: 640936 - DNA, 19 bp, Mus musculus
  siRNA target sequence for Slc16a1 (NM_009196.2,375-393).
gaagtatcatggatatcat

SEQ ID NO: 640937 - DNA, 19 bp, Mus musculus
  siRNA target sequence for Slc16a1 (NM_009196.2,385-403).
ggatatcatctataatgtt

SEQ ID NO: 640938 - DNA, 19 bp, Mus musculus
  siRNA target sequence for Slc16a1 (NM_009196.2,456-474).
ggcagccgtccagtaatga

SEQ ID NO: 640939 - DNA, 19 bp, Mus musculus
  siRNA target sequence for Slc16a1 (NM_009196.2,457-475).
gcagccgtccagtaatgat

SEQ ID NO: 640940 - DNA, 19 bp, Mus musculus
  siRNA target sequence for Slc16a1 (NM_009196.2,545-563).
cttgtgcattggtgttatt

SEQ ID NO: 640941 - DNA, 19 bp, Mus musculus
  siRNA target sequence for Slc16a1 (NM_009196.2,565-583).
gaggtcttgggcttgcttt

SEQ ID NO: 640942 - DNA, 19 bp, Mus musculus
  siRNA target sequence for Slc16a1 (NM_009196.2,602-620).
gactatgattggcaagtat

SEQ ID NO: 640943 - DNA, 19 bp, Mus musculus
  siRNA target sequence for Slc16a1 (NM_009196.2,612-630).
ggcaagtatttctacaaga

SEQ ID NO: 640944 - DNA, 19 bp, Mus musculus
  siRNA target sequence for Slc16a1 (NM_009196.2,727-745).
ggagaggaagcttcctaat

SEQ ID NO: 640945 - DNA, 19 bp, Mus musculus
  siRNA target sequence for Slc16a1 (NM_009196.2,730-748).
gaggaagcttcctaattct

SEQ ID NO: 640946 - DNA, 19 bp, Mus musculus
  siRNA target sequence for Slc16a1 (NM_009196.2,914-932).
gtccgtcttccaaacaatt

SEQ ID NO: 640947 - DNA, 19 bp, Mus musculus
  siRNA target sequence for Slc16a1 (NM_009196.2,916-934).
ccgtcttccaaacaattaa

SEQ ID NO: 640948 - DNA, 19 bp, Mus musculus
  siRNA target sequence for Slc16a1 (NM_009196.2,918-936).
gtcttccaaacaattaaca

SEQ ID NO: 640949 - DNA, 19 bp, Mus musculus
  siRNA target sequence for Slc16a1 (NM_009196.2,961-979).
cccataggggctttttact

SEQ ID NO: 640950 - DNA, 19 bp, Mus musculus
  siRNA target sequence for Slc16a1 (NM_009196.2,963-981).
cataggggctttttactgt

SEQ ID NO: 640951 - DNA, 19 bp, Mus musculus
  siRNA target sequence for Slc16a1 (NM_009196.2,1001-1019).
catgttttttggactcttt

SEQ ID NO: 640952 - DNA, 19 bp, Mus musculus
  siRNA target sequence for Slc16a1 (NM_009196.2,1022-1040).
ccctttggtctttcttagt

SEQ ID NO: 640953 - DNA, 19 bp, Mus musculus
  siRNA target sequence for Slc16a1 (NM_009196.2,1039-1057).
gtagttatggtaagagtaa

SEQ ID NO: 640954 - DNA, 19 bp, Mus musculus
  siRNA target sequence for Slc16a1 (NM_009196.2,1047-1065).
ggtaagagtaaggattttt

SEQ ID NO: 640955 - DNA, 19 bp, Mus musculus
  siRNA target sequence for Slc16a1 (NM_009196.2,1164-1182).
cctcggatccagtactttt

SEQ ID NO: 640956 - DNA, 19 bp, Mus musculus
  siRNA target sequence for Slc16a1 (NM_009196.2,1165-1183).
ctcggatccagtacttttt

SEQ ID NO: 640957 - DNA, 19 bp, Mus musculus
  siRNA target sequence for Slc16a1 (NM_009196.2,1169-1187).
gatccagtacttttttgct

SEQ ID NO: 640958 - DNA, 19 bp, Mus musculus
  siRNA target sequence for Slc16a1 (NM_009196.2,1262-1280).
cgccggagtctttggattt

SEQ ID NO: 640959 - DNA, 19 bp, Mus musculus
  siRNA target sequence for Slc16a1 (NM_009196.2,1287-1305).
ggttggctcagctctgtat

SEQ ID NO: 640960 - DNA, 19 bp, Mus musculus
  siRNA target sequence for Slc16a1 (NM_009196.2,1291-1309).
ggctcagctctgtattatt

SEQ ID NO: 640961 - DNA, 19 bp, Mus musculus
  siRNA target sequence for Slc16a1 (NM_009196.2,1475-1493).
catcatcgcgggtatctat

SEQ ID NO: 640962 - DNA, 19 bp, Mus musculus
  siRNA target sequence for Slc16a1 (NM_009196.2,1483-1501).
cgggtatctatctcttcat

SEQ ID NO: 640963 - DNA, 19 bp, Mus musculus
  siRNA target sequence for Slc16a2 (NM_009197.1,222-240).
ggaggcaaaccaggaatat

SEQ ID NO: 640964 - DNA, 19 bp, Mus musculus
  siRNA target sequence for Slc16a2 (NM_009197.1,727-745).
cccattgtgagtatattca

SEQ ID NO: 640965 - DNA, 19 bp, Mus musculus
  siRNA target sequence for Slc16a2 (NM_009197.1,832-850).
ctaagcctgcgctacttca

SEQ ID NO: 640966 - DNA, 19 bp, Mus musculus
  siRNA target sequence for Slc16a2 (NM_009197.1,876-894).
ctgctcattcgcctttcaa

SEQ ID NO: 640967 - DNA, 19 bp, Mus musculus
  siRNA target sequence for Slc16a2 (NM_009197.1,1047-1065).
gctgagtaccttcatgttt

SEQ ID NO: 640968 - DNA, 19 bp, Mus musculus
  siRNA target sequence for Slc16a2 (NM_009197.1,1073-1091).
cgctgctctcactcactta

SEQ ID NO: 640969 - DNA, 19 bp, Mus musculus
  siRNA target sequence for Slc16a2 (NM_009197.1,1241-1259).
ctgctgcccttggttactt

SEQ ID NO: 640970 - DNA, 19 bp, Mus musculus
  siRNA target sequence for Slc16a2 (NM_009197.1,1269-1287).
cgtgcacctgatgaaatat

SEQ ID NO: 640971 - DNA, 19 bp, Mus musculus
  siRNA target sequence for Slc16a2 (NM_009197.1,1395-1413).
ccctggacttaagaagata

SEQ ID NO: 640972 - DNA, 19 bp, Mus musculus
  siRNA target sequence for Slc16a2 (NM_009197.1,1396-1414).
cctggacttaagaagatat

SEQ ID NO: 640973 - DNA, 19 bp, Mus musculus
  siRNA target sequence for Slc16a2 (NM_009197.1,1397-1415).
ctggacttaagaagatata

SEQ ID NO: 640974 - DNA, 19 bp, Mus musculus
  siRNA target sequence for Slc16a2 (NM_009197.1,1399-1417).
ggacttaagaagatatact

SEQ ID NO: 640975 - DNA, 19 bp, Mus musculus
  siRNA target sequence for Slc16a2 (NM_009197.1,1614-1632).
gatggccctgccaatgatt

SEQ ID NO: 640976 - DNA, 19 bp, Mus musculus
  siRNA target sequence for Slc16a2 (NM_009197.1,1700-1718).
cgggtgtccccccaatcat

SEQ ID NO: 640977 - DNA, 19 bp, Mus musculus
  siRNA target sequence for Slc16a2 (NM_009197.1,1701-1719).
gggtgtccccccaatcatt

SEQ ID NO: 640978 - DNA, 19 bp, Mus musculus
  siRNA target sequence for Slc16a2 (NM_009197.1,1745-1763).
ctctgatgcatcaaaggat

SEQ ID NO: 640979 - DNA, 19 bp, Mus musculus
  siRNA target sequence for Slc16a3 (NM_030696.2,281-299).
cgtcctctttggctgtttt

SEQ ID NO: 640980 - DNA, 19 bp, Mus musculus
  siRNA target sequence for Slc16a3 (NM_030696.2,333-351).
gcggtcagcgtctttttca

SEQ ID NO: 640981 - DNA, 19 bp, Mus musculus
  siRNA target sequence for Slc16a3 (NM_030696.2,334-352).
cggtcagcgtctttttcaa

SEQ ID NO: 640982 - DNA, 19 bp, Mus musculus
  siRNA target sequence for Slc16a3 (NM_030696.2,612-630).
ctcatcatgctcaatcgat

SEQ ID NO: 640983 - DNA, 19 bp, Mus musculus
  siRNA target sequence for Slc16a3 (NM_030696.2,621-639).
ctcaatcgatacttcaaca

SEQ ID NO: 640984 - DNA, 19 bp, Mus musculus
  siRNA target sequence for Slc16a3 (NM_030696.2,720-738).
ctgcaggatcactatggtt

SEQ ID NO: 640985 - DNA, 19 bp, Mus musculus
  siRNA target sequence for Slc16a3 (NM_030696.2,1058-1076).
gcccacggctggtttcata

SEQ ID NO: 640986 - DNA, 19 bp, Mus musculus
  siRNA target sequence for Slc16a3 (NM_030696.2,1059-1077).
cccacggctggtttcataa

SEQ ID NO: 640987 - DNA, 19 bp, Mus musculus
  siRNA target sequence for Slc16a3 (NM_030696.2,1061-1079).
cacggctggtttcataaca

SEQ ID NO: 640988 - DNA, 19 bp, Mus musculus
  siRNA target sequence for Slc16a3 (NM_030696.2,1366-1384).
ccaaagtttacaagtatgt

SEQ ID NO: 640989 - DNA, 19 bp, Mus musculus
  siRNA target sequence for Slc16a7 (NM_011391.1,504-522).
gtagtctgtgcgtccttta

SEQ ID NO: 640990 - DNA, 19 bp, Mus musculus
  siRNA target sequence for Slc16a7 (NM_011391.1,507-525).
gtctgtgcgtcctttatct

SEQ ID NO: 640991 - DNA, 19 bp, Mus musculus
  siRNA target sequence for Slc16a7 (NM_011391.1,605-623).
cagtcagatcgcttggata

SEQ ID NO: 640992 - DNA, 19 bp, Mus musculus
  siRNA target sequence for Slc16a7 (NM_011391.1,609-627).
cagatcgcttggatatcgt

SEQ ID NO: 640993 - DNA, 19 bp, Mus musculus
  siRNA target sequence for Slc16a7 (NM_011391.1,651-669).
gcgggaggtcccatcagta

SEQ ID NO: 640994 - DNA, 19 bp, Mus musculus
  siRNA target sequence for Slc16a7 (NM_011391.1,667-685).
gtagtgtgttggtgaataa

SEQ ID NO: 640995 - DNA, 19 bp, Mus musculus
  siRNA target sequence for Slc16a7 (NM_011391.1,670-688).
gtgtgttggtgaataacta

SEQ ID NO: 640996 - DNA, 19 bp, Mus musculus
  siRNA target sequence for Slc16a7 (NM_011391.1,707-725).
gatagtgggaggactatta

SEQ ID NO: 640997 - DNA, 19 bp, Mus musculus
  siRNA target sequence for Slc16a7 (NM_011391.1,711-729).
gtgggaggactattatgct

SEQ ID NO: 640998 - DNA, 19 bp, Mus musculus
  siRNA target sequence for Slc16a7 (NM_011391.1,727-745).
gctgcattggaatgatctt

SEQ ID NO: 640999 - DNA, 19 bp, Mus musculus
  siRNA target sequence for Slc16a7 (NM_011391.1,761-779).
cagcgtgatagagctttat

SEQ ID NO: 641000 - DNA, 19 bp, Mus musculus
  siRNA target sequence for Slc16a7 (NM_011391.1,763-781).
gcgtgatagagctttatct

SEQ ID NO: 641001 - DNA, 19 bp, Mus musculus
  siRNA target sequence for Slc16a7 (NM_011391.1,791-809).
cttcattggaggtttagga

SEQ ID NO: 641002 - DNA, 19 bp, Mus musculus
  siRNA target sequence for Slc16a7 (NM_011391.1,798-816).
ggaggtttaggattagcat

SEQ ID NO: 641003 - DNA, 19 bp, Mus musculus
  siRNA target sequence for Slc16a7 (NM_011391.1,799-817).
gaggtttaggattagcatt

SEQ ID NO: 641004 - DNA, 19 bp, Mus musculus
  siRNA target sequence for Slc16a7 (NM_011391.1,821-839).
cctgcaaccagccttaaca

SEQ ID NO: 641005 - DNA, 19 bp, Mus musculus
  siRNA target sequence for Slc16a7 (NM_011391.1,824-842).
gcaaccagccttaacaata

SEQ ID NO: 641006 - DNA, 19 bp, Mus musculus
  siRNA target sequence for Slc16a7 (NM_011391.1,846-864).
ggaaaatacttctatagaa

SEQ ID NO: 641007 - DNA, 19 bp, Mus musculus
  siRNA target sequence for Slc16a7 (NM_011391.1,862-880).
gaagacgaccacttgcaaa

SEQ ID NO: 641008 - DNA, 19 bp, Mus musculus
  siRNA target sequence for Slc16a7 (NM_011391.1,919-937).
cactggctcctttcaatca

SEQ ID NO: 641009 - DNA, 19 bp, Mus musculus
  siRNA target sequence for Slc16a7 (NM_011391.1,927-945).
cctttcaatcagtacctat

SEQ ID NO: 641010 - DNA, 19 bp, Mus musculus
  siRNA target sequence for Slc16a7 (NM_011391.1,936-954).
cagtacctatttaacaact

SEQ ID NO: 641011 - DNA, 19 bp, Mus musculus
  siRNA target sequence for Slc16a7 (NM_011391.1,961-979).
ggaaggggagttttttgat

SEQ ID NO: 641012 - DNA, 19 bp, Mus musculus
  siRNA target sequence for Slc16a7 (NM_011391.1,962-980).
gaaggggagttttttgatt

SEQ ID NO: 641013 - DNA, 19 bp, Mus musculus
  siRNA target sequence for Slc16a7 (NM_011391.1,1032-1050).
gttgggccaagtccaaata

SEQ ID NO: 641014 - DNA, 19 bp, Mus musculus
  siRNA target sequence for Slc16a7 (NM_011391.1,1035-1053).
gggccaagtccaaatacta

SEQ ID NO: 641015 - DNA, 19 bp, Mus musculus
  siRNA target sequence for Slc16a7 (NM_011391.1,1036-1054).
ggccaagtccaaatactaa

SEQ ID NO: 641016 - DNA, 19 bp, Mus musculus
  siRNA target sequence for Slc16a7 (NM_011391.1,1038-1056).
ccaagtccaaatactaaga

SEQ ID NO: 641017 - DNA, 19 bp, Mus musculus
  siRNA target sequence for Slc16a7 (NM_011391.1,1044-1062).
ccaaatactaagaagtcta

SEQ ID NO: 641018 - DNA, 19 bp, Mus musculus
  siRNA target sequence for Slc16a7 (NM_011391.1,1074-1092).
ggctcaagacatgattcaa

SEQ ID NO: 641019 - DNA, 19 bp, Mus musculus
  siRNA target sequence for Slc16a7 (NM_011391.1,1117-1135).
caacagcacaaaaggttaa

SEQ ID NO: 641020 - DNA, 19 bp, Mus musculus
  siRNA target sequence for Slc16a7 (NM_011391.1,1164-1182).
catagaggatttttgatct

SEQ ID NO: 641021 - DNA, 19 bp, Mus musculus
  siRNA target sequence for Slc16a7 (NM_011391.1,1185-1203).
ctatctggaaacgtcatat

SEQ ID NO: 641022 - DNA, 19 bp, Mus musculus
  siRNA target sequence for Slc16a7 (NM_011391.1,1189-1207).
ctggaaacgtcatattgtt

SEQ ID NO: 641023 - DNA, 19 bp, Mus musculus
  siRNA target sequence for Slc16a7 (NM_011391.1,1192-1210).
gaaacgtcatattgttttt

SEQ ID NO: 641024 - DNA, 19 bp, Mus musculus
  siRNA target sequence for Slc16a7 (NM_011391.1,1212-1230).
gggatttttgcccctatta

SEQ ID NO: 641025 - DNA, 19 bp, Mus musculus
  siRNA target sequence for Slc16a7 (NM_011391.1,1214-1232).
gatttttgcccctattata

SEQ ID NO: 641026 - DNA, 19 bp, Mus musculus
  siRNA target sequence for Slc16a7 (NM_011391.1,1239-1257).
gctcagtacgctaaacaca

SEQ ID NO: 641027 - DNA, 19 bp, Mus musculus
  siRNA target sequence for Slc16a7 (NM_011391.1,1240-1258).
ctcagtacgctaaacacat

SEQ ID NO: 641028 - DNA, 19 bp, Mus musculus
  siRNA target sequence for Slc16a7 (NM_011391.1,1256-1274).
cataggagtggatgactat

SEQ ID NO: 641029 - DNA, 19 bp, Mus musculus
  siRNA target sequence for Slc16a7 (NM_011391.1,1260-1278).
ggagtggatgactataact

SEQ ID NO: 641030 - DNA, 19 bp, Mus musculus
  siRNA target sequence for Slc16a7 (NM_011391.1,1323-1341).
cggccttctgtaggattaa

SEQ ID NO: 641031 - DNA, 19 bp, Mus musculus
  siRNA target sequence for Slc16a7 (NM_011391.1,1324-1342).
ggccttctgtaggattaat

SEQ ID NO: 641032 - DNA, 19 bp, Mus musculus
  siRNA target sequence for Slc16a7 (NM_011391.1,1325-1343).
gccttctgtaggattaata

SEQ ID NO: 641033 - DNA, 19 bp, Mus musculus
  siRNA target sequence for Slc16a7 (NM_011391.1,1335-1353).
ggattaatagccaacacta

SEQ ID NO: 641034 - DNA, 19 bp, Mus musculus
  siRNA target sequence for Slc16a7 (NM_011391.1,1385-1403).
cagctctgcaatcatcttt

SEQ ID NO: 641035 - DNA, 19 bp, Mus musculus
  siRNA target sequence for Slc16a7 (NM_011391.1,1388-1406).
ctctgcaatcatctttact

SEQ ID NO: 641036 - DNA, 19 bp, Mus musculus
  siRNA target sequence for Slc16a7 (NM_011391.1,1454-1472).
ggtggtctacgttgtattt

SEQ ID NO: 641037 - DNA, 19 bp, Mus musculus
  siRNA target sequence for Slc16a7 (NM_011391.1,1455-1473).
gtggtctacgttgtatttt

SEQ ID NO: 641038 - DNA, 19 bp, Mus musculus
  siRNA target sequence for Slc16a7 (NM_011391.1,1457-1475).
ggtctacgttgtatttttt

SEQ ID NO: 641039 - DNA, 19 bp, Mus musculus
  siRNA target sequence for Slc16a7 (NM_011391.1,1554-1572).
gctgtgggactcacaacaa

SEQ ID NO: 641040 - DNA, 19 bp, Mus musculus
  siRNA target sequence for Slc16a7 (NM_011391.1,1555-1573).
ctgtgggactcacaacaat

SEQ ID NO: 641041 - DNA, 19 bp, Mus musculus
  siRNA target sequence for Slc16a7 (NM_011391.1,1577-1595).
ggagtgttgtccagttctt

SEQ ID NO: 641042 - DNA, 19 bp, Mus musculus
  siRNA target sequence for Slc16a7 (NM_011391.1,1611-1629).
gctggtaaattgcttgata

SEQ ID NO: 641043 - DNA, 19 bp, Mus musculus
  siRNA target sequence for Slc16a7 (NM_011391.1,1612-1630).
ctggtaaattgcttgatat

SEQ ID NO: 641044 - DNA, 19 bp, Mus musculus
  siRNA target sequence for Slc16a7 (NM_011391.1,1633-1651).
ctggagaatataaatacct

SEQ ID NO: 641045 - DNA, 19 bp, Mus musculus
  siRNA target sequence for Slc16a7 (NM_011391.1,1663-1681).
gcggaacagtcgtgttagt

SEQ ID NO: 641046 - DNA, 19 bp, Mus musculus
  siRNA target sequence for Slc16a7 (NM_011391.1,1664-1682).
cggaacagtcgtgttagta

SEQ ID NO: 641047 - DNA, 19 bp, Mus musculus
  siRNA target sequence for Slc16a7 (NM_011391.1,1665-1683).
ggaacagtcgtgttagtat

SEQ ID NO: 641048 - DNA, 19 bp, Mus musculus
  siRNA target sequence for Slc16a7 (NM_011391.1,1697-1715).
cctgattggcaatgctata

SEQ ID NO: 641049 - DNA, 19 bp, Mus musculus
  siRNA target sequence for Slc16a7 (NM_011391.1,1698-1716).
ctgattggcaatgctataa

SEQ ID NO: 641050 - DNA, 19 bp, Mus musculus
  siRNA target sequence for Slc16a7 (NM_011391.1,1797-1815).
gaggccctgaacagatcta

SEQ ID NO: 641051 - DNA, 19 bp, Mus musculus
  siRNA target sequence for Slc16a7 (NM_011391.1,1799-1817).
ggccctgaacagatctaaa

SEQ ID NO: 641052 - DNA, 19 bp, Mus musculus
  siRNA target sequence for Slc16a7 (NM_011391.1,1801-1819).
ccctgaacagatctaaaca

SEQ ID NO: 641053 - DNA, 19 bp, Mus musculus
  siRNA target sequence for Slc16a7 (NM_011391.1,1820-1838).
ggacgaagttactgtcaaa

SEQ ID NO: 641054 - DNA, 19 bp, Mus musculus
  siRNA target sequence for Slc16a7 (NM_011391.1,1871-1889).
ggacaaagagagtaatatt

SEQ ID NO: 641055 - DNA, 19 bp, Mus musculus
  siRNA target sequence for Slc16a8 (NM_020516.2,347-365).
ctttggggcaggttacagt

SEQ ID NO: 641056 - DNA, 19 bp, Mus musculus
  siRNA target sequence for Slc16a8 (NM_020516.2,376-394).
gggtgtcctccatcatgtt

SEQ ID NO: 641057 - DNA, 19 bp, Mus musculus
  siRNA target sequence for Slc16a8 (NM_020516.2,484-502).
cttcagcaggcatgattct

SEQ ID NO: 641058 - DNA, 19 bp, Mus musculus
  siRNA target sequence for Slc16a8 (NM_020516.2,654-672).
ggcagtcccgtgtttctgt

SEQ ID NO: 641059 - DNA, 19 bp, Mus musculus
  siRNA target sequence for Slc16a8 (NM_020516.2,1119-1137).
gggctcacggacctgatta

SEQ ID NO: 641060 - DNA, 19 bp, Mus musculus
  siRNA target sequence for Slc17a1 (NM_009198.2,165-183).
gtgcctccccaagaaagtt

SEQ ID NO: 641061 - DNA, 19 bp, Mus musculus
  siRNA target sequence for Slc17a1 (NM_009198.2,204-222).
gtatggactggctatcctt

SEQ ID NO: 641062 - DNA, 19 bp, Mus musculus
  siRNA target sequence for Slc17a1 (NM_009198.2,334-352).
gagatgttggacaatgtaa

SEQ ID NO: 641063 - DNA, 19 bp, Mus musculus
  siRNA target sequence for Slc17a1 (NM_009198.2,349-367).
gtaaagaaccctgtgtatt

SEQ ID NO: 641064 - DNA, 19 bp, Mus musculus
  siRNA target sequence for Slc17a1 (NM_009198.2,433-451).
gctcctgtcgggtacctat

SEQ ID NO: 641065 - DNA, 19 bp, Mus musculus
  siRNA target sequence for Slc17a1 (NM_009198.2,441-459).
cgggtacctatctggaata

SEQ ID NO: 641066 - DNA, 19 bp, Mus musculus
  siRNA target sequence for Slc17a1 (NM_009198.2,538-556).
gtcggagctgctttagtca

SEQ ID NO: 641067 - DNA, 19 bp, Mus musculus
  siRNA target sequence for Slc17a1 (NM_009198.2,540-558).
cggagctgctttagtcatt

SEQ ID NO: 641068 - DNA, 19 bp, Mus musculus
  siRNA target sequence for Slc17a1 (NM_009198.2,610-628).
catgaaatatgggtcaaat

SEQ ID NO: 641069 - DNA, 19 bp, Mus musculus
  siRNA target sequence for Slc17a1 (NM_009198.2,651-669).
cagacttacctctatgact

SEQ ID NO: 641070 - DNA, 19 bp, Mus musculus
  siRNA target sequence for Slc17a1 (NM_009198.2,666-684).
gactctatcagggtttgta

SEQ ID NO: 641071 - DNA, 19 bp, Mus musculus
  siRNA target sequence for Slc17a1 (NM_009198.2,818-836).
ccaaggaccacccgtatat

SEQ ID NO: 641072 - DNA, 19 bp, Mus musculus
  siRNA target sequence for Slc17a1 (NM_009198.2,847-865).
gagaaggactacatcatat

SEQ ID NO: 641073 - DNA, 19 bp, Mus musculus
  siRNA target sequence for Slc17a1 (NM_009198.2,906-924).
gccaatcaaagctatgctt

SEQ ID NO: 641074 - DNA, 19 bp, Mus musculus
  siRNA target sequence for Slc17a1 (NM_009198.2,943-961).
gccattatcctcaatagct

SEQ ID NO: 641075 - DNA, 19 bp, Mus musculus
  siRNA target sequence for Slc17a1 (NM_009198.2,944-962).
ccattatcctcaatagctt

SEQ ID NO: 641076 - DNA, 19 bp, Mus musculus
  siRNA target sequence for Slc17a1 (NM_009198.2,995-1013).
catacacgccgacatttat

SEQ ID NO: 641077 - DNA, 19 bp, Mus musculus
  siRNA target sequence for Slc17a1 (NM_009198.2,1021-1039).
gtgcttcatgttaatgtta

SEQ ID NO: 641078 - DNA, 19 bp, Mus musculus
  siRNA target sequence for Slc17a1 (NM_009198.2,1080-1098).
ctacatctgtggtatccta

SEQ ID NO: 641079 - DNA, 19 bp, Mus musculus
  siRNA target sequence for Slc17a1 (NM_009198.2,1119-1137).
cttcctgaccaggaagatt

SEQ ID NO: 641080 - DNA, 19 bp, Mus musculus
  siRNA target sequence for Slc17a1 (NM_009198.2,1147-1165).
gttaccgtccggaaactct

SEQ ID NO: 641081 - DNA, 19 bp, Mus musculus
  siRNA target sequence for Slc17a1 (NM_009198.2,1170-1188).
cacactagggagtttctgt

SEQ ID NO: 641082 - DNA, 19 bp, Mus musculus
  siRNA target sequence for Slc17a1 (NM_009198.2,1181-1199).
gtttctgtcccgtgatctt

SEQ ID NO: 641083 - DNA, 19 bp, Mus musculus
  siRNA target sequence for Slc17a1 (NM_009198.2,1187-1205).
gtcccgtgatcttcatcat

SEQ ID NO: 641084 - DNA, 19 bp, Mus musculus
  siRNA target sequence for Slc17a1 (NM_009198.2,1189-1207).
cccgtgatcttcatcatgt

SEQ ID NO: 641085 - DNA, 19 bp, Mus musculus
  siRNA target sequence for Slc17a1 (NM_009198.2,1252-1270).
ctgacacttgccaactcaa

SEQ ID NO: 641086 - DNA, 19 bp, Mus musculus
  siRNA target sequence for Slc17a1 (NM_009198.2,1258-1276).
cttgccaactcaacactta

SEQ ID NO: 641087 - DNA, 19 bp, Mus musculus
  siRNA target sequence for Slc17a1 (NM_009198.2,1262-1280).
ccaactcaacacttagctt

SEQ ID NO: 641088 - DNA, 19 bp, Mus musculus
  siRNA target sequence for Slc17a1 (NM_009198.2,1263-1281).
caactcaacacttagcttt

SEQ ID NO: 641089 - DNA, 19 bp, Mus musculus
  siRNA target sequence for Slc17a1 (NM_009198.2,1283-1301).
cctactgcggacaacttat

SEQ ID NO: 641090 - DNA, 19 bp, Mus musculus
  siRNA target sequence for Slc17a1 (NM_009198.2,1287-1305).
ctgcggacaacttatcaat

SEQ ID NO: 641091 - DNA, 19 bp, Mus musculus
  siRNA target sequence for Slc17a1 (NM_009198.2,1302-1320).
caatgccttggatattgct

SEQ ID NO: 641092 - DNA, 19 bp, Mus musculus
  siRNA target sequence for Slc17a1 (NM_009198.2,1319-1337).
ctcccagatattatggatt

SEQ ID NO: 641093 - DNA, 19 bp, Mus musculus
  siRNA target sequence for Slc17a1 (NM_009198.2,1322-1340).
ccagatattatggatttct

SEQ ID NO: 641094 - DNA, 19 bp, Mus musculus
  siRNA target sequence for Slc17a1 (NM_009198.2,1344-1362).
ggcagtcacagctttaatt

SEQ ID NO: 641095 - DNA, 19 bp, Mus musculus
  siRNA target sequence for Slc17a1 (NM_009198.2,1391-1409).
ctcttgctgggttgattct

SEQ ID NO: 641096 - DNA, 19 bp, Mus musculus
  siRNA target sequence for Slc17a1 (NM_009198.2,1397-1415).
ctgggttgattcttaatca

SEQ ID NO: 641097 - DNA, 19 bp, Mus musculus
  siRNA target sequence for Slc17a1 (NM_009198.2,1414-1432).
caggatccggaatatgctt

SEQ ID NO: 641098 - DNA, 19 bp, Mus musculus
  siRNA target sequence for Slc17a1 (NM_009198.2,1449-1467).
cttgatggcaggcattaat

SEQ ID NO: 641099 - DNA, 19 bp, Mus musculus
  siRNA target sequence for Slc1a1 (NM_009199.1,113-131).
cgcttcctacggaatcact

SEQ ID NO: 641100 - DNA, 19 bp, Mus musculus
  siRNA target sequence for Slc1a1 (NM_009199.1,205-223).
gctctcaaatctggataaa

SEQ ID NO: 641101 - DNA, 19 bp, Mus musculus
  siRNA target sequence for Slc1a1 (NM_009199.1,206-224).
ctctcaaatctggataaat

SEQ ID NO: 641102 - DNA, 19 bp, Mus musculus
  siRNA target sequence for Slc1a1 (NM_009199.1,313-331).
cgctgcactggattccaat

SEQ ID NO: 641103 - DNA, 19 bp, Mus musculus
  siRNA target sequence for Slc1a1 (NM_009199.1,348-366).
gtctgcgcgctgtagtata

SEQ ID NO: 641104 - DNA, 19 bp, Mus musculus
  siRNA target sequence for Slc1a1 (NM_009199.1,353-371).
cgcgctgtagtatattatt

SEQ ID NO: 641105 - DNA, 19 bp, Mus musculus
  siRNA target sequence for Slc1a1 (NM_009199.1,354-372).
gcgctgtagtatattattt

SEQ ID NO: 641106 - DNA, 19 bp, Mus musculus
  siRNA target sequence for Slc1a1 (NM_009199.1,356-374).
gctgtagtatattatttct

SEQ ID NO: 641107 - DNA, 19 bp, Mus musculus
  siRNA target sequence for Slc1a1 (NM_009199.1,378-396).
ccaccgtcattgctgtaat

SEQ ID NO: 641108 - DNA, 19 bp, Mus musculus
  siRNA target sequence for Slc1a1 (NM_009199.1,390-408).
ctgtaatcctaggtattgt

SEQ ID NO: 641109 - DNA, 19 bp, Mus musculus
  siRNA target sequence for Slc1a1 (NM_009199.1,392-410).
gtaatcctaggtattgtgt

SEQ ID NO: 641110 - DNA, 19 bp, Mus musculus
  siRNA target sequence for Slc1a1 (NM_009199.1,517-535).
gaacatgttccctgagaat

SEQ ID NO: 641111 - DNA, 19 bp, Mus musculus
  siRNA target sequence for Slc1a1 (NM_009199.1,688-706).
gtactcagacggcatcaat

SEQ ID NO: 641112 - DNA, 19 bp, Mus musculus
  siRNA target sequence for Slc1a1 (NM_009199.1,804-822).
gtgacgccaccatgaaaat

SEQ ID NO: 641113 - DNA, 19 bp, Mus musculus
  siRNA target sequence for Slc1a1 (NM_009199.1,890-908).
gttgaagactgggaaatat

SEQ ID NO: 641114 - DNA, 19 bp, Mus musculus
  siRNA target sequence for Slc1a1 (NM_009199.1,954-972).
caatccactccctcatagt

SEQ ID NO: 641115 - DNA, 19 bp, Mus musculus
  siRNA target sequence for Slc1a1 (NM_009199.1,1075-1093).
ggcaaccctgccagttaca

SEQ ID NO: 641116 - DNA, 19 bp, Mus musculus
  siRNA target sequence for Slc1a1 (NM_009199.1,1076-1094).
gcaaccctgccagttacat

SEQ ID NO: 641117 - DNA, 19 bp, Mus musculus
  siRNA target sequence for Slc1a1 (NM_009199.1,1077-1095).
caaccctgccagttacatt

SEQ ID NO: 641118 - DNA, 19 bp, Mus musculus
  siRNA target sequence for Slc1a1 (NM_009199.1,1196-1214).
gctgtggcagccgtgttta

SEQ ID NO: 641119 - DNA, 19 bp, Mus musculus
  siRNA target sequence for Slc1a1 (NM_009199.1,1210-1228).
gtttattgcgcaactgaat

SEQ ID NO: 641120 - DNA, 19 bp, Mus musculus
  siRNA target sequence for Slc1a1 (NM_009199.1,1255-1273).
cgtcaccatcagcattaca

SEQ ID NO: 641121 - DNA, 19 bp, Mus musculus
  siRNA target sequence for Slc1a1 (NM_009199.1,1446-1464).
ggacgggcatcgtagagaa

SEQ ID NO: 641122 - DNA, 19 bp, Mus musculus
  siRNA target sequence for Slc1a1 (NM_009199.1,1570-1588).
caagaagtcttatgtcaat

SEQ ID NO: 641123 - DNA, 19 bp, Mus musculus
  siRNA target sequence for Slc1a1 (NM_009199.1,1590-1608).
ggggcttcgcggtagacaa

SEQ ID NO: 641124 - DNA, 19 bp, Mus musculus
  siRNA target sequence for Slc1a1 (NM_009199.1,1592-1610).
ggcttcgcggtagacaaat

SEQ ID NO: 641125 - DNA, 19 bp, Mus musculus
  siRNA target sequence for Slc1a1 (NM_009199.1,1594-1612).
cttcgcggtagacaaatct

SEQ ID NO: 641126 - DNA, 19 bp, Mus musculus
  siRNA target sequence for Slc1a2 (NM_011393.1,142-160).
gcgacaagctggggaaaaa

SEQ ID NO: 641127 - DNA, 19 bp, Mus musculus
  siRNA target sequence for Slc1a2 (NM_011393.1,143-161).
cgacaagctggggaaaaat

SEQ ID NO: 641128 - DNA, 19 bp, Mus musculus
  siRNA target sequence for Slc1a2 (NM_011393.1,167-185).
gctctcactgactgtgttt

SEQ ID NO: 641129 - DNA, 19 bp, Mus musculus
  siRNA target sequence for Slc1a2 (NM_011393.1,320-338).
catctccagtttaatcaca

SEQ ID NO: 641130 - DNA, 19 bp, Mus musculus
  siRNA target sequence for Slc1a2 (NM_011393.1,344-362).
gtcaggcctggatgctaaa

SEQ ID NO: 641131 - DNA, 19 bp, Mus musculus
  siRNA target sequence for Slc1a2 (NM_011393.1,382-400).
cgagagctatggtgtatta

SEQ ID NO: 641132 - DNA, 19 bp, Mus musculus
  siRNA target sequence for Slc1a2 (NM_011393.1,459-477).
ccaggcaatcccaaactca

SEQ ID NO: 641133 - DNA, 19 bp, Mus musculus
  siRNA target sequence for Slc1a2 (NM_011393.1,463-481).
gcaatcccaaactcaagaa

SEQ ID NO: 641134 - DNA, 19 bp, Mus musculus
  siRNA target sequence for Slc1a2 (NM_011393.1,696-714).
gaagaaactaagatcgtta

SEQ ID NO: 641135 - DNA, 19 bp, Mus musculus
  siRNA target sequence for Slc1a2 (NM_011393.1,703-721).
ctaagatcgttatcaagaa

SEQ ID NO: 641136 - DNA, 19 bp, Mus musculus
  siRNA target sequence for Slc1a2 (NM_011393.1,756-774).
ggtctgatcggattcttta

SEQ ID NO: 641137 - DNA, 19 bp, Mus musculus
  siRNA target sequence for Slc1a2 (NM_011393.1,757-775).
gtctgatcggattctttat

SEQ ID NO: 641138 - DNA, 19 bp, Mus musculus
  siRNA target sequence for Slc1a2 (NM_011393.1,761-779).
gatcggattctttattgct

SEQ ID NO: 641139 - DNA, 19 bp, Mus musculus
  siRNA target sequence for Slc1a2 (NM_011393.1,830-848).
gttcttcaacattctgaat

SEQ ID NO: 641140 - DNA, 19 bp, Mus musculus
  siRNA target sequence for Slc1a2 (NM_011393.1,896-914).
gggtatcgcctgcttgatt

SEQ ID NO: 641141 - DNA, 19 bp, Mus musculus
  siRNA target sequence for Slc1a2 (NM_011393.1,897-915).
ggtatcgcctgcttgattt

SEQ ID NO: 641142 - DNA, 19 bp, Mus musculus
  siRNA target sequence for Slc1a2 (NM_011393.1,1041-1059).
gtgaccagaaaaaatccat

SEQ ID NO: 641143 - DNA, 19 bp, Mus musculus
  siRNA target sequence for Slc1a2 (NM_011393.1,1155-1173).
gataatctagggattgaca

SEQ ID NO: 641144 - DNA, 19 bp, Mus musculus
  siRNA target sequence for Slc1a2 (NM_011393.1,1197-1215).
ccagtcggagcaaccatta

SEQ ID NO: 641145 - DNA, 19 bp, Mus musculus
  siRNA target sequence for Slc1a2 (NM_011393.1,1198-1216).
cagtcggagcaaccattaa

SEQ ID NO: 641146 - DNA, 19 bp, Mus musculus
  siRNA target sequence for Slc1a2 (NM_011393.1,1200-1218).
gtcggagcaaccattaaca

SEQ ID NO: 641147 - DNA, 19 bp, Mus musculus
  siRNA target sequence for Slc1a2 (NM_011393.1,1399-1417).
gcctgccaacggaggatat

SEQ ID NO: 641148 - DNA, 19 bp, Mus musculus
  siRNA target sequence for Slc1a2 (NM_011393.1,1401-1419).
ctgccaacggaggatatca

SEQ ID NO: 641149 - DNA, 19 bp, Mus musculus
  siRNA target sequence for Slc1a2 (NM_011393.1,1403-1421).
gccaacggaggatatcagt

SEQ ID NO: 641150 - DNA, 19 bp, Mus musculus
  siRNA target sequence for Slc1a2 (NM_011393.1,1442-1460).
gctgctggatagaatgaga

SEQ ID NO: 641151 - DNA, 19 bp, Mus musculus
  siRNA target sequence for Slc1a2 (NM_011393.1,1446-1464).
ctggatagaatgagaactt

SEQ ID NO: 641152 - DNA, 19 bp, Mus musculus
  siRNA target sequence for Slc1a2 (NM_011393.1,1492-1510).
gggctgggattgtctatca

SEQ ID NO: 641153 - DNA, 19 bp, Mus musculus
  siRNA target sequence for Slc1a2 (NM_011393.1,1576-1594).
ccaagacgcagtccattta

SEQ ID NO: 641154 - DNA, 19 bp, Mus musculus
  siRNA target sequence for Slc1a2 (NM_011393.1,1588-1606).
ccatttacgacgacaagaa

SEQ ID NO: 641155 - DNA, 19 bp, Mus musculus
  siRNA target sequence for Slc1a2 (NM_011393.1,1608-1626).
cacagggaaagcaactcta

SEQ ID NO: 641156 - DNA, 19 bp, Mus musculus
  siRNA target sequence for Slc1a2 (NM_011393.1,1622-1640).
ctctaatcagtgtgtctat

SEQ ID NO: 641157 - DNA, 19 bp, Mus musculus
  siRNA target sequence for Slc1a2 (NM_011393.1,1645-1663).
cacacaactctgtcgtaat

SEQ ID NO: 641158 - DNA, 19 bp, Mus musculus
  siRNA target sequence for Slc1a2 (NM_011393.1,1649-1667).
caactctgtcgtaatagat

SEQ ID NO: 641159 - DNA, 19 bp, Mus musculus
  siRNA target sequence for Slc1a2 (NM_011393.1,1695-1713).
gatatcgagacctgcatat

SEQ ID NO: 641160 - DNA, 19 bp, Mus musculus
  siRNA target sequence for Slc1a3 (NM_148938.2,595-613).
ctcaccaaggaagatgtta

SEQ ID NO: 641161 - DNA, 19 bp, Mus musculus
  siRNA target sequence for Slc1a3 (NM_148938.2,669-687).
gggtacaatccttggattt

SEQ ID NO: 641162 - DNA, 19 bp, Mus musculus
  siRNA target sequence for Slc1a3 (NM_148938.2,688-706).
gccctccgaccgtataaaa

SEQ ID NO: 641163 - DNA, 19 bp, Mus musculus
  siRNA target sequence for Slc1a3 (NM_148938.2,689-707).
ccctccgaccgtataaaat

SEQ ID NO: 641164 - DNA, 19 bp, Mus musculus
  siRNA target sequence for Slc1a3 (NM_148938.2,691-709).
ctccgaccgtataaaatga

SEQ ID NO: 641165 - DNA, 19 bp, Mus musculus
  siRNA target sequence for Slc1a3 (NM_148938.2,710-728).
gctaccgggaggtgaagta

SEQ ID NO: 641166 - DNA, 19 bp, Mus musculus
  siRNA target sequence for Slc1a3 (NM_148938.2,714-732).
ccgggaggtgaagtacttt

SEQ ID NO: 641167 - DNA, 19 bp, Mus musculus
  siRNA target sequence for Slc1a3 (NM_148938.2,715-733).
cgggaggtgaagtactttt

SEQ ID NO: 641168 - DNA, 19 bp, Mus musculus
  siRNA target sequence for Slc1a3 (NM_148938.2,718-736).
gaggtgaagtacttttcgt

SEQ ID NO: 641169 - DNA, 19 bp, Mus musculus
  siRNA target sequence for Slc1a3 (NM_148938.2,775-793).
gtcttgcccctgatcatct

SEQ ID NO: 641170 - DNA, 19 bp, Mus musculus
  siRNA target sequence for Slc1a3 (NM_148938.2,848-866).
ggatgcgcgctgtagtcta

SEQ ID NO: 641171 - DNA, 19 bp, Mus musculus
  siRNA target sequence for Slc1a3 (NM_148938.2,849-867).
gatgcgcgctgtagtctat

SEQ ID NO: 641172 - DNA, 19 bp, Mus musculus
  siRNA target sequence for Slc1a3 (NM_148938.2,853-871).
cgcgctgtagtctattaca

SEQ ID NO: 641173 - DNA, 19 bp, Mus musculus
  siRNA target sequence for Slc1a3 (NM_148938.2,854-872).
gcgctgtagtctattacat

SEQ ID NO: 641174 - DNA, 19 bp, Mus musculus
  siRNA target sequence for Slc1a3 (NM_148938.2,856-874).
gctgtagtctattacatga

SEQ ID NO: 641175 - DNA, 19 bp, Mus musculus
  siRNA target sequence for Slc1a3 (NM_148938.2,859-877).
gtagtctattacatgacta

SEQ ID NO: 641176 - DNA, 19 bp, Mus musculus
  siRNA target sequence for Slc1a3 (NM_148938.2,892-910).
gtggtgattggcataatca

SEQ ID NO: 641177 - DNA, 19 bp, Mus musculus
  siRNA target sequence for Slc1a3 (NM_148938.2,930-948).
cggaaagggcacaaaggaa

SEQ ID NO: 641178 - DNA, 19 bp, Mus musculus
  siRNA target sequence for Slc1a3 (NM_148938.2,951-969).
catgtacagagaaggtaaa

SEQ ID NO: 641179 - DNA, 19 bp, Mus musculus
  siRNA target sequence for Slc1a3 (NM_148938.2,1035-1053).
ggtagaagcctgctttaaa

SEQ ID NO: 641180 - DNA, 19 bp, Mus musculus
  siRNA target sequence for Slc1a3 (NM_148938.2,1093-1111).
cctatccagtccaacgaaa

SEQ ID NO: 641181 - DNA, 19 bp, Mus musculus
  siRNA target sequence for Slc1a3 (NM_148938.2,1098-1116).
ccagtccaacgaaacactt

SEQ ID NO: 641182 - DNA, 19 bp, Mus musculus
  siRNA target sequence for Slc1a3 (NM_148938.2,1217-1235).
ccctgggcctagttgtctt

SEQ ID NO: 641183 - DNA, 19 bp, Mus musculus
  siRNA target sequence for Slc1a3 (NM_148938.2,1250-1268).
gtttcgtgatcggaaacat

SEQ ID NO: 641184 - DNA, 19 bp, Mus musculus
  siRNA target sequence for Slc1a3 (NM_148938.2,1299-1317).
ctttgattctcttaacgaa

SEQ ID NO: 641185 - DNA, 19 bp, Mus musculus
  siRNA target sequence for Slc1a3 (NM_148938.2,1327-1345).
cgattggtcgcggtgataa

SEQ ID NO: 641186 - DNA, 19 bp, Mus musculus
  siRNA target sequence for Slc1a3 (NM_148938.2,1328-1346).
gattggtcgcggtgataat

SEQ ID NO: 641187 - DNA, 19 bp, Mus musculus
  siRNA target sequence for Slc1a3 (NM_148938.2,1374-1392).
cttgatcgcagggaagatt

SEQ ID NO: 641188 - DNA, 19 bp, Mus musculus
  siRNA target sequence for Slc1a3 (NM_148938.2,1377-1395).
gatcgcagggaagattgtt

SEQ ID NO: 641189 - DNA, 19 bp, Mus musculus
  siRNA target sequence for Slc1a3 (NM_148938.2,1437-1455).
gtacaccgtgacagtcatt

SEQ ID NO: 641190 - DNA, 19 bp, Mus musculus
  siRNA target sequence for Slc1a3 (NM_148938.2,1589-1607).
ccaccctacccatcacttt

SEQ ID NO: 641191 - DNA, 19 bp, Mus musculus
  siRNA target sequence for Slc1a3 (NM_148938.2,1638-1656).
caaacgcatcaccagattt

SEQ ID NO: 641192 - DNA, 19 bp, Mus musculus
  siRNA target sequence for Slc1a3 (NM_148938.2,1759-1777).
ggacagattataacaataa

SEQ ID NO: 641193 - DNA, 19 bp, Mus musculus
  siRNA target sequence for Slc1a3 (NM_148938.2,1974-1992).
gcacttgtcccgacatgaa

SEQ ID NO: 641194 - DNA, 19 bp, Mus musculus
  siRNA target sequence for Slc1a3 (NM_148938.2,1995-2013).
gaagaaccgagatgttgaa

SEQ ID NO: 641195 - DNA, 19 bp, Mus musculus
  siRNA target sequence for Slc1a3 (NM_148938.2,2026-2044).
gtgattgaggagaacgaaa

SEQ ID NO: 641196 - DNA, 19 bp, Mus musculus
  siRNA target sequence for Slc1a4 (NM_018861.2,298-316).
gcgctgtgctagctttttt

SEQ ID NO: 641197 - DNA, 19 bp, Mus musculus
  siRNA target sequence for Slc1a4 (NM_018861.2,402-420).
cccgcacccagatcactta

SEQ ID NO: 641198 - DNA, 19 bp, Mus musculus
  siRNA target sequence for Slc1a4 (NM_018861.2,449-467).
cgcatgctgcgcatgatca

SEQ ID NO: 641199 - DNA, 19 bp, Mus musculus
  siRNA target sequence for Slc1a4 (NM_018861.2,450-468).
gcatgctgcgcatgatcat

SEQ ID NO: 641200 - DNA, 19 bp, Mus musculus
  siRNA target sequence for Slc1a4 (NM_018861.2,543-561).
gcatcgctgttgcttactt

SEQ ID NO: 641201 - DNA, 19 bp, Mus musculus
  siRNA target sequence for Slc1a4 (NM_018861.2,600-618).
ctctggcgttcatcatcaa

SEQ ID NO: 641202 - DNA, 19 bp, Mus musculus
  siRNA target sequence for Slc1a4 (NM_018861.2,703-721).
ggactctttcctcgattta

SEQ ID NO: 641203 - DNA, 19 bp, Mus musculus
  siRNA target sequence for Slc1a4 (NM_018861.2,749-767).
gtggttgccgcattcacta

SEQ ID NO: 641204 - DNA, 19 bp, Mus musculus
  siRNA target sequence for Slc1a4 (NM_018861.2,769-787).
gtctgcaaccgattacaca

SEQ ID NO: 641205 - DNA, 19 bp, Mus musculus
  siRNA target sequence for Slc1a4 (NM_018861.2,827-845).
gagaagatccccgttgtaa

SEQ ID NO: 641206 - DNA, 19 bp, Mus musculus
  siRNA target sequence for Slc1a4 (NM_018861.2,829-847).
gaagatccccgttgtaaca

SEQ ID NO: 641207 - DNA, 19 bp, Mus musculus
  siRNA target sequence for Slc1a4 (NM_018861.2,832-850).
gatccccgttgtaacagat

SEQ ID NO: 641208 - DNA, 19 bp, Mus musculus
  siRNA target sequence for Slc1a4 (NM_018861.2,851-869).
gtggaagggatgaacattt

SEQ ID NO: 641209 - DNA, 19 bp, Mus musculus
  siRNA target sequence for Slc1a4 (NM_018861.2,937-955).
cctcatccgattcttcaat

SEQ ID NO: 641210 - DNA, 19 bp, Mus musculus
  siRNA target sequence for Slc1a4 (NM_018861.2,938-956).
ctcatccgattcttcaatt

SEQ ID NO: 641211 - DNA, 19 bp, Mus musculus
  siRNA target sequence for Slc1a4 (NM_018861.2,994-1012).
catgtggtatgttcctata

SEQ ID NO: 641212 - DNA, 19 bp, Mus musculus
  siRNA target sequence for Slc1a4 (NM_018861.2,1004-1022).
gttcctataggcatcatgt

SEQ ID NO: 641213 - DNA, 19 bp, Mus musculus
  siRNA target sequence for Slc1a4 (NM_018861.2,1024-1042).
cctgatcggaagcaagatt

SEQ ID NO: 641214 - DNA, 19 bp, Mus musculus
  siRNA target sequence for Slc1a4 (NM_018861.2,1074-1092).
ccagtctcgggaaatacat

SEQ ID NO: 641215 - DNA, 19 bp, Mus musculus
  siRNA target sequence for Slc1a4 (NM_018861.2,1077-1095).
gtctcgggaaatacatctt

SEQ ID NO: 641216 - DNA, 19 bp, Mus musculus
  siRNA target sequence for Slc1a4 (NM_018861.2,1138-1156).
gcctcttgtgtattttgct

SEQ ID NO: 641217 - DNA, 19 bp, Mus musculus
  siRNA target sequence for Slc1a4 (NM_018861.2,1201-1219).
cccatttgcgacagctttt

SEQ ID NO: 641218 - DNA, 19 bp, Mus musculus
  siRNA target sequence for Slc1a4 (NM_018861.2,1239-1257).
caacccttccgtctatgat

SEQ ID NO: 641219 - DNA, 19 bp, Mus musculus
  siRNA target sequence for Slc1a4 (NM_018861.2,1242-1260).
cccttccgtctatgatgaa

SEQ ID NO: 641220 - DNA, 19 bp, Mus musculus
  siRNA target sequence for Slc1a4 (NM_018861.2,1261-1279).
gtgcattgaggagaacaat

SEQ ID NO: 641221 - DNA, 19 bp, Mus musculus
  siRNA target sequence for Slc1a4 (NM_018861.2,1399-1417).
cctgaacgcaggacagatt

SEQ ID NO: 641222 - DNA, 19 bp, Mus musculus
  siRNA target sequence for Slc1a4 (NM_018861.2,1400-1418).
ctgaacgcaggacagattt

SEQ ID NO: 641223 - DNA, 19 bp, Mus musculus
  siRNA target sequence for Slc1a4 (NM_018861.2,1572-1590).
ccaccactgtggtgaatgt

SEQ ID NO: 641224 - DNA, 19 bp, Mus musculus
  siRNA target sequence for Slc1a4 (NM_018861.2,1756-1774).
ggccattgctcctgaactt

SEQ ID NO: 641225 - DNA, 19 bp, Mus musculus
  siRNA target sequence for Slc1a4 (NM_018861.2,1764-1782).
ctcctgaacttgaatccaa

SEQ ID NO: 641226 - DNA, 19 bp, Mus musculus
  siRNA target sequence for Slc1a6 (NM_009200.1,428-446).
cgccagatcaagtacttct

SEQ ID NO: 641227 - DNA, 19 bp, Mus musculus
  siRNA target sequence for Slc1a6 (NM_009200.1,488-506).
gtgttacccctcattgtct

SEQ ID NO: 641228 - DNA, 19 bp, Mus musculus
  siRNA target sequence for Slc1a6 (NM_009200.1,567-585).
gggcagctgtgtactacat

SEQ ID NO: 641229 - DNA, 19 bp, Mus musculus
  siRNA target sequence for Slc1a6 (NM_009200.1,583-601).
catggtgactacagtcatt

SEQ ID NO: 641230 - DNA, 19 bp, Mus musculus
  siRNA target sequence for Slc1a6 (NM_009200.1,594-612).
cagtcattgcagttttcat

SEQ ID NO: 641231 - DNA, 19 bp, Mus musculus
  siRNA target sequence for Slc1a6 (NM_009200.1,605-623).
gttttcatcggcatcctaa

SEQ ID NO: 641232 - DNA, 19 bp, Mus musculus
  siRNA target sequence for Slc1a6 (NM_009200.1,610-628).
catcggcatcctaatggtt

SEQ ID NO: 641233 - DNA, 19 bp, Mus musculus
  siRNA target sequence for Slc1a6 (NM_009200.1,671-689).
cgtgagggccgaattgaga

SEQ ID NO: 641234 - DNA, 19 bp, Mus musculus
  siRNA target sequence for Slc1a6 (NM_009200.1,760-778).
cttcaaacagtttaagaca

SEQ ID NO: 641235 - DNA, 19 bp, Mus musculus
  siRNA target sequence for Slc1a6 (NM_009200.1,796-814).
ggtgacaaggacaattgta

SEQ ID NO: 641236 - DNA, 19 bp, Mus musculus
  siRNA target sequence for Slc1a6 (NM_009200.1,812-830).
gtaaggacagacaatggtt

SEQ ID NO: 641237 - DNA, 19 bp, Mus musculus
  siRNA target sequence for Slc1a6 (NM_009200.1,1047-1065).
gtgtcctgagggacttctt

SEQ ID NO: 641238 - DNA, 19 bp, Mus musculus
  siRNA target sequence for Slc1a6 (NM_009200.1,1073-1091).
ctcaatgaggctattatga

SEQ ID NO: 641239 - DNA, 19 bp, Mus musculus
  siRNA target sequence for Slc1a6 (NM_009200.1,1212-1230).
ctgtcatcgttggcttatt

SEQ ID NO: 641240 - DNA, 19 bp, Mus musculus
  siRNA target sequence for Slc1a6 (NM_009200.1,1216-1234).
catcgttggcttattcctt

SEQ ID NO: 641241 - DNA, 19 bp, Mus musculus
  siRNA target sequence for Slc1a6 (NM_009200.1,1245-1263).
gtgtgttgccccttatcta

SEQ ID NO: 641242 - DNA, 19 bp, Mus musculus
  siRNA target sequence for Slc1a6 (NM_009200.1,1247-1265).
gtgttgccccttatctact

SEQ ID NO: 641243 - DNA, 19 bp, Mus musculus
  siRNA target sequence for Slc1a6 (NM_009200.1,1294-1312).
cttcattggtggtatgcta

SEQ ID NO: 641244 - DNA, 19 bp, Mus musculus
  siRNA target sequence for Slc1a6 (NM_009200.1,1477-1495).
ggcagccatctttattgct

SEQ ID NO: 641245 - DNA, 19 bp, Mus musculus
  siRNA target sequence for Slc1a6 (NM_009200.1,1523-1541).
ggtcagatcaccacaatca

SEQ ID NO: 641246 - DNA, 19 bp, Mus musculus
  siRNA target sequence for Slc1a6 (NM_009200.1,1642-1660).
ggacatcacactgatcata

SEQ ID NO: 641247 - DNA, 19 bp, Mus musculus
  siRNA target sequence for Slc1a6 (NM_009200.1,1679-1697).
gaccgacttcgtacaatga

SEQ ID NO: 641248 - DNA, 19 bp, Mus musculus
  siRNA target sequence for Slc1a6 (NM_009200.1,1689-1707).
gtacaatgaccaatgtact

SEQ ID NO: 641249 - DNA, 19 bp, Mus musculus
  siRNA target sequence for Slc1a6 (NM_009200.1,1725-1743).
cggctgtcattgagcattt

SEQ ID NO: 641250 - DNA, 19 bp, Mus musculus
  siRNA target sequence for Slc1a6 (NM_009200.1,1795-1813).
ggggaaaccctataagtca

SEQ ID NO: 641251 - DNA, 19 bp, Mus musculus
  siRNA target sequence for Slc1a7 (NM_009201.1,983-1001).
catcaacgactctgttgta

SEQ ID NO: 641252 - DNA, 19 bp, Mus musculus
  siRNA target sequence for Slc1a7 (NM_009201.1,1050-1068).
ctagatctcgtgaggaata

SEQ ID NO: 641253 - DNA, 19 bp, Mus musculus
  siRNA target sequence for Slc1a7 (NM_009201.1,1095-1113).
gccttccgctcttttgcta

SEQ ID NO: 641254 - DNA, 19 bp, Mus musculus
  siRNA target sequence for Slc1a7 (NM_009201.1,1105-1123).
cttttgctacctcatatga

SEQ ID NO: 641255 - DNA, 19 bp, Mus musculus
  siRNA target sequence for Slc1a7 (NM_009201.1,1125-1143).
cccaaagacaactcatgta

SEQ ID NO: 641256 - DNA, 19 bp, Mus musculus
  siRNA target sequence for Slc1a7 (NM_009201.1,1126-1144).
ccaaagacaactcatgtaa

SEQ ID NO: 641257 - DNA, 19 bp, Mus musculus
  siRNA target sequence for Slc1a7 (NM_009201.1,1159-1177).
gtatccagcgggagatcaa

SEQ ID NO: 641258 - DNA, 19 bp, Mus musculus
  siRNA target sequence for Slc1a7 (NM_009201.1,1163-1181).
ccagcgggagatcaattca

SEQ ID NO: 641259 - DNA, 19 bp, Mus musculus
  siRNA target sequence for Slc1a7 (NM_009201.1,1164-1182).
cagcgggagatcaattcaa

SEQ ID NO: 641260 - DNA, 19 bp, Mus musculus
  siRNA target sequence for Slc1a7 (NM_009201.1,1293-1311).
ctcattcgtttcttcaact

SEQ ID NO: 641261 - DNA, 19 bp, Mus musculus
  siRNA target sequence for Slc1a7 (NM_009201.1,1332-1350).
gtcctggtctcctggatta

SEQ ID NO: 641262 - DNA, 19 bp, Mus musculus
  siRNA target sequence for Slc1a7 (NM_009201.1,1354-1372).
ggtacgcacccgttggaat

SEQ ID NO: 641263 - DNA, 19 bp, Mus musculus
  siRNA target sequence for Slc1a7 (NM_009201.1,1413-1431).
gtccgccagctcttcatca

SEQ ID NO: 641264 - DNA, 19 bp, Mus musculus
  siRNA target sequence for Slc1a7 (NM_009201.1,1430-1448).
cagcctcggcaaatacatt

SEQ ID NO: 641265 - DNA, 19 bp, Mus musculus
  siRNA target sequence for Slc1a7 (NM_009201.1,1434-1452).
ctcggcaaatacattctgt

SEQ ID NO: 641266 - DNA, 19 bp, Mus musculus
  siRNA target sequence for Slc1a7 (NM_009201.1,1508-1526).
cctcttcacccgcaaaaat

SEQ ID NO: 641267 - DNA, 19 bp, Mus musculus
  siRNA target sequence for Slc1a7 (NM_009201.1,1725-1743).
gtgttcatcgcacaactaa

SEQ ID NO: 641268 - DNA, 19 bp, Mus musculus
  siRNA target sequence for Slc1a7 (NM_009201.1,2008-2026).
gctcagagcccgaattgat

SEQ ID NO: 641269 - DNA, 19 bp, Mus musculus
  siRNA target sequence for Slc1a7 (NM_009201.1,2125-2143).
gtgccacgttcgaaaagga

SEQ ID NO: 641270 - DNA, 19 bp, Mus musculus
  siRNA target sequence for Slc1a7 (NM_009201.1,2127-2145).
gccacgttcgaaaaggaat

SEQ ID NO: 641271 - DNA, 19 bp, Mus musculus
  siRNA target sequence for Slc1a7 (NM_009201.1,2131-2149).
cgttcgaaaaggaatctgt

SEQ ID NO: 641272 - DNA, 19 bp, Mus musculus
  siRNA target sequence for Slc23a1 (NM_011397.2,100-118).
cggagcccaagtttgacat

SEQ ID NO: 641273 - DNA, 19 bp, Mus musculus
  siRNA target sequence for Slc23a1 (NM_011397.2,105-123).
cccaagtttgacatgttgt

SEQ ID NO: 641274 - DNA, 19 bp, Mus musculus
  siRNA target sequence for Slc23a1 (NM_011397.2,261-279).
gtcagtcagctcattggta

SEQ ID NO: 641275 - DNA, 19 bp, Mus musculus
  siRNA target sequence for Slc23a1 (NM_011397.2,593-611).
ccccactgtctcccttatt

SEQ ID NO: 641276 - DNA, 19 bp, Mus musculus
  siRNA target sequence for Slc23a1 (NM_011397.2,606-624).
cttattgggctctctgttt

SEQ ID NO: 641277 - DNA, 19 bp, Mus musculus
  siRNA target sequence for Slc23a1 (NM_011397.2,639-657).
gaccgagctggctctcatt

SEQ ID NO: 641278 - DNA, 19 bp, Mus musculus
  siRNA target sequence for Slc23a1 (NM_011397.2,648-666).
ggctctcattggggtattt

SEQ ID NO: 641279 - DNA, 19 bp, Mus musculus
  siRNA target sequence for Slc23a1 (NM_011397.2,676-694).
ccattctcctgatagtctt

SEQ ID NO: 641280 - DNA, 19 bp, Mus musculus
  siRNA target sequence for Slc23a1 (NM_011397.2,771-789).
gtccagatctttaagatgt

SEQ ID NO: 641281 - DNA, 19 bp, Mus musculus
  siRNA target sequence for Slc23a1 (NM_011397.2,881-899).
cttccaggctcgaactgat

SEQ ID NO: 641282 - DNA, 19 bp, Mus musculus
  siRNA target sequence for Slc23a1 (NM_011397.2,1094-1112).
caacaggggaattttcact

SEQ ID NO: 641283 - DNA, 19 bp, Mus musculus
  siRNA target sequence for Slc23a1 (NM_011397.2,1185-1203).
ggggtcctagggattacca

SEQ ID NO: 641284 - DNA, 19 bp, Mus musculus
  siRNA target sequence for Slc23a1 (NM_011397.2,1186-1204).
gggtcctagggattaccaa

SEQ ID NO: 641285 - DNA, 19 bp, Mus musculus
  siRNA target sequence for Slc23a1 (NM_011397.2,1233-1251).
ggtgcaggtatcatgctaa

SEQ ID NO: 641286 - DNA, 19 bp, Mus musculus
  siRNA target sequence for Slc23a1 (NM_011397.2,1234-1252).
gtgcaggtatcatgctaat

SEQ ID NO: 641287 - DNA, 19 bp, Mus musculus
  siRNA target sequence for Slc23a1 (NM_011397.2,1237-1255).
caggtatcatgctaatcct

SEQ ID NO: 641288 - DNA, 19 bp, Mus musculus
  siRNA target sequence for Slc23a1 (NM_011397.2,1257-1275).
ggtgccattggcaaattca

SEQ ID NO: 641289 - DNA, 19 bp, Mus musculus
  siRNA target sequence for Slc23a1 (NM_011397.2,1303-1321).
ccatcctgggaggaatgtt

SEQ ID NO: 641290 - DNA, 19 bp, Mus musculus
  siRNA target sequence for Slc23a1 (NM_011397.2,1314-1332).
ggaatgttctgcactcttt

SEQ ID NO: 641291 - DNA, 19 bp, Mus musculus
  siRNA target sequence for Slc23a1 (NM_011397.2,1324-1342).
gcactctttttggtatgat

SEQ ID NO: 641292 - DNA, 19 bp, Mus musculus
  siRNA target sequence for Slc23a1 (NM_011397.2,1387-1405).
cttctcgcaacctctttgt

SEQ ID NO: 641293 - DNA, 19 bp, Mus musculus
  siRNA target sequence for Slc23a1 (NM_011397.2,1390-1408).
ctcgcaacctctttgtatt

SEQ ID NO: 641294 - DNA, 19 bp, Mus musculus
  siRNA target sequence for Slc23a1 (NM_011397.2,1456-1474).
ccaacccaggtgctatcaa

SEQ ID NO: 641295 - DNA, 19 bp, Mus musculus
  siRNA target sequence for Slc23a1 (NM_011397.2,1671-1689).
gggatgggcatggtaaaaa

SEQ ID NO: 641296 - DNA, 19 bp, Mus musculus
  siRNA target sequence for Slc23a1 (NM_011397.2,1690-1708).
ggaccacctttttcagata

SEQ ID NO: 641297 - DNA, 19 bp, Mus musculus
  siRNA target sequence for Slc23a1 (NM_011397.2,1693-1711).
ccacctttttcagatacat

SEQ ID NO: 641298 - DNA, 19 bp, Mus musculus
  siRNA target sequence for Slc24a3 (NM_053195.1,63-81).
ctcattggggaagatagaa

SEQ ID NO: 641299 - DNA, 19 bp, Mus musculus
  siRNA target sequence for Slc24a3 (NM_053195.1,104-122).
gatgcaggtgaatgataca

SEQ ID NO: 641300 - DNA, 19 bp, Mus musculus
  siRNA target sequence for Slc24a3 (NM_053195.1,243-261).
gtgctctgtgccatgtaca

SEQ ID NO: 641301 - DNA, 19 bp, Mus musculus
  siRNA target sequence for Slc24a3 (NM_053195.1,250-268).
gtgccatgtacatgttcta

SEQ ID NO: 641302 - DNA, 19 bp, Mus musculus
  siRNA target sequence for Slc24a3 (NM_053195.1,403-421).
cggtcataggagtcttcat

SEQ ID NO: 641303 - DNA, 19 bp, Mus musculus
  siRNA target sequence for Slc24a3 (NM_053195.1,405-423).
gtcataggagtcttcatca

SEQ ID NO: 641304 - DNA, 19 bp, Mus musculus
  siRNA target sequence for Slc24a3 (NM_053195.1,569-587).
gtctgtggtcgcactcatt

SEQ ID NO: 641305 - DNA, 19 bp, Mus musculus
  siRNA target sequence for Slc24a3 (NM_053195.1,571-589).
ctgtggtcgcactcattgt

SEQ ID NO: 641306 - DNA, 19 bp, Mus musculus
  siRNA target sequence for Slc24a3 (NM_053195.1,588-606).
gtgttcatttacgatgaaa

SEQ ID NO: 641307 - DNA, 19 bp, Mus musculus
  siRNA target sequence for Slc24a3 (NM_053195.1,590-608).
gttcatttacgatgaaaaa

SEQ ID NO: 641308 - DNA, 19 bp, Mus musculus
  siRNA target sequence for Slc24a3 (NM_053195.1,593-611).
catttacgatgaaaaagtt

SEQ ID NO: 641309 - DNA, 19 bp, Mus musculus
  siRNA target sequence for Slc24a3 (NM_053195.1,638-656).
gctgatgtacctcatctat

SEQ ID NO: 641310 - DNA, 19 bp, Mus musculus
  siRNA target sequence for Slc24a3 (NM_053195.1,639-657).
ctgatgtacctcatctata

SEQ ID NO: 641311 - DNA, 19 bp, Mus musculus
  siRNA target sequence for Slc24a3 (NM_053195.1,659-677).
cgtcatcatgaaatacaat

SEQ ID NO: 641312 - DNA, 19 bp, Mus musculus
  siRNA target sequence for Slc24a3 (NM_053195.1,784-802).
ctgtggtgctactcaagaa

SEQ ID NO: 641313 - DNA, 19 bp, Mus musculus
  siRNA target sequence for Slc24a3 (NM_053195.1,817-835).
gcaaagcgtccgtgatcat

SEQ ID NO: 641314 - DNA, 19 bp, Mus musculus
  siRNA target sequence for Slc24a3 (NM_053195.1,882-900).
gaggctggccttcgaatta

SEQ ID NO: 641315 - DNA, 19 bp, Mus musculus
  siRNA target sequence for Slc24a3 (NM_053195.1,885-903).
gctggccttcgaattatga

SEQ ID NO: 641316 - DNA, 19 bp, Mus musculus
  siRNA target sequence for Slc24a3 (NM_053195.1,886-904).
ctggccttcgaattatgat

SEQ ID NO: 641317 - DNA, 19 bp, Mus musculus
  siRNA target sequence for Slc24a3 (NM_053195.1,888-906).
ggccttcgaattatgatca

SEQ ID NO: 641318 - DNA, 19 bp, Mus musculus
  siRNA target sequence for Slc24a3 (NM_053195.1,891-909).
cttcgaattatgatcacaa

SEQ ID NO: 641319 - DNA, 19 bp, Mus musculus
  siRNA target sequence for Slc24a3 (NM_053195.1,938-956).
catggccagtcgcatgtta

SEQ ID NO: 641320 - DNA, 19 bp, Mus musculus
  siRNA target sequence for Slc24a3 (NM_053195.1,944-962).
cagtcgcatgttaatcaat

SEQ ID NO: 641321 - DNA, 19 bp, Mus musculus
  siRNA target sequence for Slc24a3 (NM_053195.1,946-964).
gtcgcatgttaatcaatga

SEQ ID NO: 641322 - DNA, 19 bp, Mus musculus
  siRNA target sequence for Slc24a3 (NM_053195.1,948-966).
cgcatgttaatcaatgaga

SEQ ID NO: 641323 - DNA, 19 bp, Mus musculus
  siRNA target sequence for Slc24a3 (NM_053195.1,983-1001).
cagcagggcctataccaat

SEQ ID NO: 641324 - DNA, 19 bp, Mus musculus
  siRNA target sequence for Slc24a3 (NM_053195.1,1096-1114).
cccggagggacgacatagt

SEQ ID NO: 641325 - DNA, 19 bp, Mus musculus
  siRNA target sequence for Slc24a3 (NM_053195.1,1097-1115).
ccggagggacgacatagtt

SEQ ID NO: 641326 - DNA, 19 bp, Mus musculus
  siRNA target sequence for Slc24a3 (NM_053195.1,1323-1341).
cactgggagaagtggttta

SEQ ID NO: 641327 - DNA, 19 bp, Mus musculus
  siRNA target sequence for Slc24a3 (NM_053195.1,1354-1372).
cttcctctacgctatggat

SEQ ID NO: 641328 - DNA, 19 bp, Mus musculus
  siRNA target sequence for Slc24a3 (NM_053195.1,1614-1632).
gtagactacggatcctata

SEQ ID NO: 641329 - DNA, 19 bp, Mus musculus
  siRNA target sequence for Slc24a3 (NM_053195.1,1696-1714).
cggtctttggtgttcactt

SEQ ID NO: 641330 - DNA, 19 bp, Mus musculus
  siRNA target sequence for Slc24a3 (NM_053195.1,1704-1722).
ggtgttcacttgaacaagt

SEQ ID NO: 641331 - DNA, 19 bp, Mus musculus
  siRNA target sequence for Slc24a3 (NM_053195.1,1767-1785).
ggcgtgttcctctgtttct

SEQ ID NO: 641332 - DNA, 19 bp, Mus musculus
  siRNA target sequence for Slc24a3 (NM_053195.1,1786-1804).
ccatcatgacggagttcaa

SEQ ID NO: 641333 - DNA, 19 bp, Mus musculus
  siRNA target sequence for Slc34a1 (NM_011392.1,126-144).
catggggcaacctttgctt

SEQ ID NO: 641334 - DNA, 19 bp, Mus musculus
  siRNA target sequence for Slc34a1 (NM_011392.1,130-148).
gggcaacctttgcttatgt

SEQ ID NO: 641335 - DNA, 19 bp, Mus musculus
  siRNA target sequence for Slc34a1 (NM_011392.1,843-861).
cccgaccttctcaaagtca

SEQ ID NO: 641336 - DNA, 19 bp, Mus musculus
  siRNA target sequence for Slc34a1 (NM_011392.1,941-959).
gaggaatcacagtctcatt

SEQ ID NO: 641337 - DNA, 19 bp, Mus musculus
  siRNA target sequence for Slc34a1 (NM_011392.1,1018-1036).
ccatcggcagccttgcaaa

SEQ ID NO: 641338 - DNA, 19 bp, Mus musculus
  siRNA target sequence for Slc34a1 (NM_011392.1,1039-1057).
ccaccatggagaaatgcaa

SEQ ID NO: 641339 - DNA, 19 bp, Mus musculus
  siRNA target sequence for Slc34a1 (NM_011392.1,1241-1259).
ctgggtcacgggctacttt

SEQ ID NO: 641340 - DNA, 19 bp, Mus musculus
  siRNA target sequence for Slc34a1 (NM_011392.1,1446-1464).
ctatccagctcatttcaga

SEQ ID NO: 641341 - DNA, 19 bp, Mus musculus
  siRNA target sequence for Slc34a1 (NM_011392.1,1704-1722).
gcctttgtggtgcttgtta

SEQ ID NO: 641342 - DNA, 19 bp, Mus musculus
  siRNA target sequence for Slc34a1 (NM_011392.1,1705-1723).
cctttgtggtgcttgttaa

SEQ ID NO: 641343 - DNA, 19 bp, Mus musculus
  siRNA target sequence for Slc34a1 (NM_011392.1,1706-1724).
ctttgtggtgcttgttaat

SEQ ID NO: 641344 - DNA, 19 bp, Mus musculus
  siRNA target sequence for Slc34a1 (NM_011392.1,1809-1827).
cccctggatggccttatca

SEQ ID NO: 641345 - DNA, 19 bp, Mus musculus
  siRNA target sequence for Slc34a1 (NM_011392.1,1812-1830).
ctggatggccttatcacaa

SEQ ID NO: 641346 - DNA, 19 bp, Mus musculus
  siRNA target sequence for Slc34a1 (NM_011392.1,1828-1846).
caagagccaccttgtgtta

SEQ ID NO: 641347 - DNA, 19 bp, Mus musculus
  siRNA target sequence for Slc5a4a (NM_133184.1,135-153).
ctgtcaaataacatcaata

SEQ ID NO: 641348 - DNA, 19 bp, Mus musculus
  siRNA target sequence for Slc5a4a (NM_133184.1,258-276).
ctggcaggtcgatctatga

SEQ ID NO: 641349 - DNA, 19 bp, Mus musculus
  siRNA target sequence for Slc5a4a (NM_133184.1,260-278).
ggcaggtcgatctatgact

SEQ ID NO: 641350 - DNA, 19 bp, Mus musculus
  siRNA target sequence for Slc5a4a (NM_133184.1,261-279).
gcaggtcgatctatgactt

SEQ ID NO: 641351 - DNA, 19 bp, Mus musculus
  siRNA target sequence for Slc5a4a (NM_133184.1,369-387).
gctgtcacggcgtttgaat

SEQ ID NO: 641352 - DNA, 19 bp, Mus musculus
  siRNA target sequence for Slc5a4a (NM_133184.1,374-392).
cacggcgtttgaatcacat

SEQ ID NO: 641353 - DNA, 19 bp, Mus musculus
  siRNA target sequence for Slc5a4a (NM_133184.1,379-397).
cgtttgaatcacattcgtt

SEQ ID NO: 641354 - DNA, 19 bp, Mus musculus
  siRNA target sequence for Slc5a4a (NM_133184.1,528-546).
cttttcatctgcgtgatat

SEQ ID NO: 641355 - DNA, 19 bp, Mus musculus
  siRNA target sequence for Slc5a4a (NM_133184.1,533-551).
catctgcgtgatattgaca

SEQ ID NO: 641356 - DNA, 19 bp, Mus musculus
  siRNA target sequence for Slc5a4a (NM_133184.1,539-557).
cgtgatattgacaatctca

SEQ ID NO: 641357 - DNA, 19 bp, Mus musculus
  siRNA target sequence for Slc5a4a (NM_133184.1,574-592).
gagccatcttcataaagct

SEQ ID NO: 641358 - DNA, 19 bp, Mus musculus
  siRNA target sequence for Slc5a4a (NM_133184.1,594-612).
gctttgggactgaaccttt

SEQ ID NO: 641359 - DNA, 19 bp, Mus musculus
  siRNA target sequence for Slc5a4a (NM_133184.1,666-684).
ggcttggcatccgtgattt

SEQ ID NO: 641360 - DNA, 19 bp, Mus musculus
  siRNA target sequence for Slc5a4a (NM_133184.1,667-685).
gcttggcatccgtgattta

SEQ ID NO: 641361 - DNA, 19 bp, Mus musculus
  siRNA target sequence for Slc5a4a (NM_133184.1,910-928).
cgggaactgcgtttggaat

SEQ ID NO: 641362 - DNA, 19 bp, Mus musculus
  siRNA target sequence for Slc5a4a (NM_133184.1,918-936).
gcgtttggaatgcctatta

SEQ ID NO: 641363 - DNA, 19 bp, Mus musculus
  siRNA target sequence for Slc5a4a (NM_133184.1,920-938).
gtttggaatgcctattaca

SEQ ID NO: 641364 - DNA, 19 bp, Mus musculus
  siRNA target sequence for Slc5a4a (NM_133184.1,946-964).
ggtactggtgcataaacca

SEQ ID NO: 641365 - DNA, 19 bp, Mus musculus
  siRNA target sequence for Slc5a4a (NM_133184.1,1086-1104).
cgcattctgtacacagata

SEQ ID NO: 641366 - DNA, 19 bp, Mus musculus
  siRNA target sequence for Slc5a4a (NM_133184.1,1087-1105).
gcattctgtacacagatat

SEQ ID NO: 641367 - DNA, 19 bp, Mus musculus
  siRNA target sequence for Slc5a4a (NM_133184.1,1353-1371).
gccggacggctgtttgtct

SEQ ID NO: 641368 - DNA, 19 bp, Mus musculus
  siRNA target sequence for Slc5a4a (NM_133184.1,1364-1382).
gtttgtctctgtgctaatt

SEQ ID NO: 641369 - DNA, 19 bp, Mus musculus
  siRNA target sequence for Slc5a4a (NM_133184.1,1405-1423).
ccatagtagaagtatctca

SEQ ID NO: 641370 - DNA, 19 bp, Mus musculus
  siRNA target sequence for Slc5a4a (NM_133184.1,1406-1424).
catagtagaagtatctcaa

SEQ ID NO: 641371 - DNA, 19 bp, Mus musculus
  siRNA target sequence for Slc5a4a (NM_133184.1,1426-1444).
gtggacaactggtccatta

SEQ ID NO: 641372 - DNA, 19 bp, Mus musculus
  siRNA target sequence for Slc5a4a (NM_133184.1,1428-1446).
ggacaactggtccattata

SEQ ID NO: 641373 - DNA, 19 bp, Mus musculus
  siRNA target sequence for Slc5a4a (NM_133184.1,1439-1457).
ccattatacagaagcaatt

SEQ ID NO: 641374 - DNA, 19 bp, Mus musculus
  siRNA target sequence for Slc5a4a (NM_133184.1,1496-1514).
ggtcgccgtcttctgtaaa

SEQ ID NO: 641375 - DNA, 19 bp, Mus musculus
  siRNA target sequence for Slc5a4a (NM_133184.1,1497-1515).
gtcgccgtcttctgtaaaa

SEQ ID NO: 641376 - DNA, 19 bp, Mus musculus
  siRNA target sequence for Slc5a4a (NM_133184.1,1540-1558).
ggggtctgatggttggatt

SEQ ID NO: 641377 - DNA, 19 bp, Mus musculus
  siRNA target sequence for Slc5a4a (NM_133184.1,1575-1593).
cgaatgatcgcagagtttt

SEQ ID NO: 641378 - DNA, 19 bp, Mus musculus
  siRNA target sequence for Slc5a4a (NM_133184.1,1706-1724).
gggagtttcctacttaaca

SEQ ID NO: 641379 - DNA, 19 bp, Mus musculus
  siRNA target sequence for Slc5a4a (NM_133184.1,1707-1725).
ggagtttcctacttaacaa

SEQ ID NO: 641380 - DNA, 19 bp, Mus musculus
  siRNA target sequence for Slc5a4a (NM_133184.1,1820-1838).
gaacggagctgatgataga

SEQ ID NO: 641381 - DNA, 19 bp, Mus musculus
  siRNA target sequence for Slc5a4a (NM_133184.1,1864-1882).
ctcgtggatgtctcaagaa

SEQ ID NO: 641382 - DNA, 19 bp, Mus musculus
  siRNA target sequence for Slc5a4a (NM_133184.1,1866-1884).
cgtggatgtctcaagaaga

SEQ ID NO: 641383 - DNA, 19 bp, Mus musculus
  siRNA target sequence for Slc5a4a (NM_133184.1,1883-1901).
gacgtgtgacctattctgt

SEQ ID NO: 641384 - DNA, 19 bp, Mus musculus
  siRNA target sequence for Slc5a4a (NM_133184.1,1984-2002).
cggtcatgaacgtcaatgt

SEQ ID NO: 641385 - DNA, 19 bp, Mus musculus
  siRNA target sequence for Slc5a4a (NM_133184.1,2017-2035).
ctgtagcagcgtttttcta

SEQ ID NO: 641386 - DNA, 19 bp, Mus musculus
  siRNA target sequence for Slc5a4a (NM_133184.1,2026-2044).
cgtttttctatggctattt

SEQ ID NO: 641387 - DNA, 19 bp, Mus musculus
  siRNA target sequence for Slc7a11 (NM_011990.1,576-594).
gtggagtactgtcactttt

SEQ ID NO: 641388 - DNA, 19 bp, Mus musculus
  siRNA target sequence for Slc7a11 (NM_011990.1,601-619).
cctgtcctatgcagaatta

SEQ ID NO: 641389 - DNA, 19 bp, Mus musculus
  siRNA target sequence for Slc7a11 (NM_011990.1,604-622).
gtcctatgcagaattaggt

SEQ ID NO: 641390 - DNA, 19 bp, Mus musculus
  siRNA target sequence for Slc7a11 (NM_011990.1,641-659).
ggtggtcattacacataca

SEQ ID NO: 641391 - DNA, 19 bp, Mus musculus
  siRNA target sequence for Slc7a11 (NM_011990.1,642-660).
gtggtcattacacatacat

SEQ ID NO: 641392 - DNA, 19 bp, Mus musculus
  siRNA target sequence for Slc7a11 (NM_011990.1,645-663).
gtcattacacatacattct

SEQ ID NO: 641393 - DNA, 19 bp, Mus musculus
  siRNA target sequence for Slc7a11 (NM_011990.1,702-720).
gggtggaactgctcgtaat

SEQ ID NO: 641394 - DNA, 19 bp, Mus musculus
  siRNA target sequence for Slc7a11 (NM_011990.1,703-721).
ggtggaactgctcgtaata

SEQ ID NO: 641395 - DNA, 19 bp, Mus musculus
  siRNA target sequence for Slc7a11 (NM_011990.1,742-760).
gatatccctggcatttgga

SEQ ID NO: 641396 - DNA, 19 bp, Mus musculus
  siRNA target sequence for Slc7a11 (NM_011990.1,762-780).
gctacatcctggaaccatt

SEQ ID NO: 641397 - DNA, 19 bp, Mus musculus
  siRNA target sequence for Slc7a11 (NM_011990.1,763-781).
ctacatcctggaaccattt

SEQ ID NO: 641398 - DNA, 19 bp, Mus musculus
  siRNA target sequence for Slc7a11 (NM_011990.1,766-784).
catcctggaaccatttttt

SEQ ID NO: 641399 - DNA, 19 bp, Mus musculus
  siRNA target sequence for Slc7a11 (NM_011990.1,840-858).
ctgtggtgatggtcctaaa

SEQ ID NO: 641400 - DNA, 19 bp, Mus musculus
  siRNA target sequence for Slc7a11 (NM_011990.1,842-860).
gtggtgatggtcctaaata

SEQ ID NO: 641401 - DNA, 19 bp, Mus musculus
  siRNA target sequence for Slc7a11 (NM_011990.1,879-897).
gtgcccggatccagatttt

SEQ ID NO: 641402 - DNA, 19 bp, Mus musculus
  siRNA target sequence for Slc7a11 (NM_011990.1,884-902).
cggatccagattttcctaa

SEQ ID NO: 641403 - DNA, 19 bp, Mus musculus
  siRNA target sequence for Slc7a11 (NM_011990.1,914-932).
ctcacagcaattctgataa

SEQ ID NO: 641404 - DNA, 19 bp, Mus musculus
  siRNA target sequence for Slc7a11 (NM_011990.1,942-960).
ctggagttatacagctaat

SEQ ID NO: 641405 - DNA, 19 bp, Mus musculus
  siRNA target sequence for Slc7a11 (NM_011990.1,944-962).
ggagttatacagctaatta

SEQ ID NO: 641406 - DNA, 19 bp, Mus musculus
  siRNA target sequence for Slc7a11 (NM_011990.1,965-983).
gggcaaacacatcacttta

SEQ ID NO: 641407 - DNA, 19 bp, Mus musculus
  siRNA target sequence for Slc7a11 (NM_011990.1,1168-1186).
gacaaacgtggcctatttt

SEQ ID NO: 641408 - DNA, 19 bp, Mus musculus
  siRNA target sequence for Slc7a11 (NM_011990.1,1255-1273).
gggaaaattctcattagca

SEQ ID NO: 641409 - DNA, 19 bp, Mus musculus
  siRNA target sequence for Slc7a11 (NM_011990.1,1365-1383).
ggcaccttccggaaatcct

SEQ ID NO: 641410 - DNA, 19 bp, Mus musculus
  siRNA target sequence for Slc7a11 (NM_011990.1,1373-1391).
ccggaaatcctctctatga

SEQ ID NO: 641411 - DNA, 19 bp, Mus musculus
  siRNA target sequence for Slc7a11 (NM_011990.1,1374-1392).
cggaaatcctctctatgat

SEQ ID NO: 641412 - DNA, 19 bp, Mus musculus
  siRNA target sequence for Slc7a11 (NM_011990.1,1413-1431).
ctctgccagctgttattgt

SEQ ID NO: 641413 - DNA, 19 bp, Mus musculus
  siRNA target sequence for Slc7a11 (NM_011990.1,1462-1480).
ctccggagacctctatagt

SEQ ID NO: 641414 - DNA, 19 bp, Mus musculus
  siRNA target sequence for Slc7a11 (NM_011990.1,1464-1482).
ccggagacctctatagtct

SEQ ID NO: 641415 - DNA, 19 bp, Mus musculus
  siRNA target sequence for Slc7a11 (NM_011990.1,1465-1483).
cggagacctctatagtctt

SEQ ID NO: 641416 - DNA, 19 bp, Mus musculus
  siRNA target sequence for Slc7a11 (NM_011990.1,1536-1554).
gactgatttatcttcgata

SEQ ID NO: 641417 - DNA, 19 bp, Mus musculus
  siRNA target sequence for Slc7a11 (NM_011990.1,1540-1558).
gatttatcttcgatacaaa

SEQ ID NO: 641418 - DNA, 19 bp, Mus musculus
  siRNA target sequence for Slc7a11 (NM_011990.1,1555-1573).
caaacgcccagatatgcat

SEQ ID NO: 641419 - DNA, 19 bp, Mus musculus
  siRNA target sequence for Slc7a11 (NM_011990.1,1666-1684).
caccggggtcggttttctt

SEQ ID NO: 641420 - DNA, 19 bp, Mus musculus
  siRNA target sequence for Slc7a11 (NM_011990.1,1668-1686).
ccggggtcggttttcttat

SEQ ID NO: 641421 - DNA, 19 bp, Mus musculus
  siRNA target sequence for Slc7a11 (NM_011990.1,1670-1688).
ggggtcggttttcttatca

SEQ ID NO: 641422 - DNA, 19 bp, Mus musculus
  siRNA target sequence for Slc7a11 (NM_011990.1,1693-1711).
gactggggtccctgcatat

SEQ ID NO: 641423 - DNA, 19 bp, Mus musculus
  siRNA target sequence for Slc7a11 (NM_011990.1,1695-1713).
ctggggtccctgcatatta

SEQ ID NO: 641424 - DNA, 19 bp, Mus musculus
  siRNA target sequence for Slc7a11 (NM_011990.1,1700-1718).
gtccctgcatattatctct

SEQ ID NO: 641425 - DNA, 19 bp, Mus musculus
  siRNA target sequence for Slc7a11 (NM_011990.1,1704-1722).
ctgcatattatctcttcat

SEQ ID NO: 641426 - DNA, 19 bp, Mus musculus
  siRNA target sequence for Slc7a11 (NM_011990.1,1707-1725).
catattatctcttcattgt

SEQ ID NO: 641427 - DNA, 19 bp, Mus musculus
  siRNA target sequence for Slc7a11 (NM_011990.1,1741-1759).
caagtggttcagacgatta

SEQ ID NO: 641428 - DNA, 19 bp, Mus musculus
  siRNA target sequence for Slc7a11 (NM_011990.1,1746-1764).
ggttcagacgattatcaga

SEQ ID NO: 641429 - DNA, 19 bp, Mus musculus
  siRNA target sequence for Slc7a11 (NM_011990.1,1765-1783).
cagaataaccagaacatta

SEQ ID NO: 641430 - DNA, 19 bp, Mus musculus
  siRNA target sequence for Slc7a11 (NM_011990.1,1767-1785).
gaataaccagaacattaca

SEQ ID NO: 641431 - DNA, 19 bp, Mus musculus
  siRNA target sequence for Slc7a11 (NM_011990.1,1808-1826).
gaagactctaaagaattat

SEQ ID NO: 641432 - DNA, 19 bp, Mus musculus
  siRNA target sequence for Slc7a2 (NM_007514.1,543-561).
gcagagcagtgctgacttt

SEQ ID NO: 641433 - DNA, 19 bp, Mus musculus
  siRNA target sequence for Slc7a2 (NM_007514.1,605-623).
cttgaagattccaaactct

SEQ ID NO: 641434 - DNA, 19 bp, Mus musculus
  siRNA target sequence for Slc7a2 (NM_007514.1,620-638).
ctctgccgctgcttaacca

SEQ ID NO: 641435 - DNA, 19 bp, Mus musculus
  siRNA target sequence for Slc7a2 (NM_007514.1,729-747).
cgagtatcgtggtgtcttt

SEQ ID NO: 641436 - DNA, 19 bp, Mus musculus
  siRNA target sequence for Slc7a2 (NM_007514.1,817-835).
gactggatctgcgtatcta

SEQ ID NO: 641437 - DNA, 19 bp, Mus musculus
  siRNA target sequence for Slc7a2 (NM_007514.1,819-837).
ctggatctgcgtatctata

SEQ ID NO: 641438 - DNA, 19 bp, Mus musculus
  siRNA target sequence for Slc7a2 (NM_007514.1,821-839).
ggatctgcgtatctataca

SEQ ID NO: 641439 - DNA, 19 bp, Mus musculus
  siRNA target sequence for Slc7a2 (NM_007514.1,882-900).
ggaatctcatcctgtcata

SEQ ID NO: 641440 - DNA, 19 bp, Mus musculus
  siRNA target sequence for Slc7a2 (NM_007514.1,883-901).
gaatctcatcctgtcatat

SEQ ID NO: 641441 - DNA, 19 bp, Mus musculus
  siRNA target sequence for Slc7a2 (NM_007514.1,893-911).
ctgtcatatgtcataggta

SEQ ID NO: 641442 - DNA, 19 bp, Mus musculus
  siRNA target sequence for Slc7a2 (NM_007514.1,972-990).
gccagtttttcaaaacgta

SEQ ID NO: 641443 - DNA, 19 bp, Mus musculus
  siRNA target sequence for Slc7a2 (NM_007514.1,987-1005).
cgtacttcaaaatgaatta

SEQ ID NO: 641444 - DNA, 19 bp, Mus musculus
  siRNA target sequence for Slc7a2 (NM_007514.1,1038-1056).
ccgtgtgccttgtattact

SEQ ID NO: 641445 - DNA, 19 bp, Mus musculus
  siRNA target sequence for Slc7a2 (NM_007514.1,1058-1076).
ctggcaggtcttttatctt

SEQ ID NO: 641446 - DNA, 19 bp, Mus musculus
  siRNA target sequence for Slc7a2 (NM_007514.1,1088-1106).
gagtctgcttgggtgaata

SEQ ID NO: 641447 - DNA, 19 bp, Mus musculus
  siRNA target sequence for Slc7a2 (NM_007514.1,1150-1168).
ggtggctgggtttgtgaaa

SEQ ID NO: 641448 - DNA, 19 bp, Mus musculus
  siRNA target sequence for Slc7a2 (NM_007514.1,1311-1329).
gtgctgcaacgtgctttta

SEQ ID NO: 641449 - DNA, 19 bp, Mus musculus
  siRNA target sequence for Slc7a2 (NM_007514.1,1392-1410).
cgatccccatcggaatagt

SEQ ID NO: 641450 - DNA, 19 bp, Mus musculus
  siRNA target sequence for Slc7a2 (NM_007514.1,1445-1463).
ggggtttctgcagctttaa

SEQ ID NO: 641451 - DNA, 19 bp, Mus musculus
  siRNA target sequence for Slc7a2 (NM_007514.1,1454-1472).
gcagctttaacgcttatga

SEQ ID NO: 641452 - DNA, 19 bp, Mus musculus
  siRNA target sequence for Slc7a2 (NM_007514.1,1455-1473).
cagctttaacgcttatgat

SEQ ID NO: 641453 - DNA, 19 bp, Mus musculus
  siRNA target sequence for Slc7a2 (NM_007514.1,1483-1501).
cctcctggatgagaaaagt

SEQ ID NO: 641454 - DNA, 19 bp, Mus musculus
  siRNA target sequence for Slc7a2 (NM_007514.1,1511-1529).
gtcgcgtttgagtatgtca

SEQ ID NO: 641455 - DNA, 19 bp, Mus musculus
  siRNA target sequence for Slc7a2 (NM_007514.1,1564-1582).
ctccctctgcgccttatca

SEQ ID NO: 641456 - DNA, 19 bp, Mus musculus
  siRNA target sequence for Slc7a2 (NM_007514.1,1568-1586).
ctctgcgccttatcaacaa

SEQ ID NO: 641457 - DNA, 19 bp, Mus musculus
  siRNA target sequence for Slc7a2 (NM_007514.1,1570-1588).
ctgcgccttatcaacaagt

SEQ ID NO: 641458 - DNA, 19 bp, Mus musculus
  siRNA target sequence for Slc7a2 (NM_007514.1,1573-1591).
cgccttatcaacaagtctt

SEQ ID NO: 641459 - DNA, 19 bp, Mus musculus
  siRNA target sequence for Slc7a2 (NM_007514.1,1587-1605).
gtcttctgggttctatgtt

SEQ ID NO: 641460 - DNA, 19 bp, Mus musculus
  siRNA target sequence for Slc7a2 (NM_007514.1,1607-1625).
cccttaccccgaattctgt

SEQ ID NO: 641461 - DNA, 19 bp, Mus musculus
  siRNA target sequence for Slc7a2 (NM_007514.1,1608-1626).
ccttaccccgaattctgtt

SEQ ID NO: 641462 - DNA, 19 bp, Mus musculus
  siRNA target sequence for Slc7a2 (NM_007514.1,1609-1627).
cttaccccgaattctgttt

SEQ ID NO: 641463 - DNA, 19 bp, Mus musculus
  siRNA target sequence for Slc7a2 (NM_007514.1,1637-1655).
cgggatggcttactgttta

SEQ ID NO: 641464 - DNA, 19 bp, Mus musculus
  siRNA target sequence for Slc7a2 (NM_007514.1,1705-1723).
gactgcaggggtcatttct

SEQ ID NO: 641465 - DNA, 19 bp, Mus musculus
  siRNA target sequence for Slc7a2 (NM_007514.1,1757-1775).
ctcgtggacatgatgtcta

SEQ ID NO: 641466 - DNA, 19 bp, Mus musculus
  siRNA target sequence for Slc7a2 (NM_007514.1,1858-1876).
caaatacacccctgagaaa

SEQ ID NO: 641467 - DNA, 19 bp, Mus musculus
  siRNA target sequence for Slc7a2 (NM_007514.1,1866-1884).
cccctgagaaagaaactct

SEQ ID NO: 641468 - DNA, 19 bp, Mus musculus
  siRNA target sequence for Slc7a2 (NM_007514.1,1893-1911).
gtaccaatgcgactttgaa

SEQ ID NO: 641469 - DNA, 19 bp, Mus musculus
  siRNA target sequence for Slc7a2 (NM_007514.1,2045-2063).
ctgggcttgagtattctaa

SEQ ID NO: 641470 - DNA, 19 bp, Mus musculus
  siRNA target sequence for Slc7a2 (NM_007514.1,2144-2162).
gccgtcattctgaccattt

SEQ ID NO: 641471 - DNA, 19 bp, Mus musculus
  siRNA target sequence for Slc7a2 (NM_007514.1,2147-2165).
gtcattctgaccatttgga

SEQ ID NO: 641472 - DNA, 19 bp, Mus musculus
  siRNA target sequence for Slc7a2 (NM_007514.1,2194-2212).
cttcatggtcccgttctta

SEQ ID NO: 641473 - DNA, 19 bp, Mus musculus
  siRNA target sequence for Slc7a2 (NM_007514.1,2230-2248).
cagcatcctggtcaacatt

SEQ ID NO: 641474 - DNA, 19 bp, Mus musculus
  siRNA target sequence for Slc7a2 (NM_007514.1,2232-2250).
gcatcctggtcaacattta

SEQ ID NO: 641475 - DNA, 19 bp, Mus musculus
  siRNA target sequence for Slc7a2 (NM_007514.1,2304-2322).
cgcttggctttctgatcta

SEQ ID NO: 641476 - DNA, 19 bp, Mus musculus
  siRNA target sequence for Slc7a2 (NM_007514.1,2377-2395).
cgatgaggatgccttttca

SEQ ID NO: 641477 - DNA, 19 bp, Mus musculus
  siRNA target sequence for Slc7a2 (NM_007514.1,2464-2482).
cagcttacctttcatactt

SEQ ID NO: 641478 - DNA, 19 bp, Mus musculus
  siRNA target sequence for Slc7a2 (NM_007514.1,2466-2484).
gcttacctttcatacttca

SEQ ID NO: 641479 - DNA, 19 bp, Mus musculus
  siRNA target sequence for Slc7a2 (NM_007514.1,2472-2490).
ctttcatacttcatgaaaa

SEQ ID NO: 641480 - DNA, 19 bp, Mus musculus
  siRNA target sequence for Slc7a2 (NM_007514.1,2476-2494).
catacttcatgaaaagaca

SEQ ID NO: 641481 - DNA, 19 bp, Mus musculus
  siRNA target sequence for Slc7a3 (NM_007515.1,281-299).
ggcaggcacttcgaagatt

SEQ ID NO: 641482 - DNA, 19 bp, Mus musculus
  siRNA target sequence for Slc7a3 (NM_007515.1,282-300).
gcaggcacttcgaagattt

SEQ ID NO: 641483 - DNA, 19 bp, Mus musculus
  siRNA target sequence for Slc7a3 (NM_007515.1,285-303).
ggcacttcgaagatttggt

SEQ ID NO: 641484 - DNA, 19 bp, Mus musculus
  siRNA target sequence for Slc7a3 (NM_007515.1,293-311).
gaagatttggtcaaaagct

SEQ ID NO: 641485 - DNA, 19 bp, Mus musculus
  siRNA target sequence for Slc7a3 (NM_007515.1,458-476).
caggaccatccattgtgat

SEQ ID NO: 641486 - DNA, 19 bp, Mus musculus
  siRNA target sequence for Slc7a3 (NM_007515.1,519-537).
gtgttatgctgaatttggt

SEQ ID NO: 641487 - DNA, 19 bp, Mus musculus
  siRNA target sequence for Slc7a3 (NM_007515.1,549-567).
cggctctggttctgcatat

SEQ ID NO: 641488 - DNA, 19 bp, Mus musculus
  siRNA target sequence for Slc7a3 (NM_007515.1,798-816).
cactggattgctggtttta

SEQ ID NO: 641489 - DNA, 19 bp, Mus musculus
  siRNA target sequence for Slc7a3 (NM_007515.1,810-828).
ggttttaggggcaagtaaa

SEQ ID NO: 641490 - DNA, 19 bp, Mus musculus
  siRNA target sequence for Slc7a3 (NM_007515.1,811-829).
gttttaggggcaagtaaat

SEQ ID NO: 641491 - DNA, 19 bp, Mus musculus
  siRNA target sequence for Slc7a3 (NM_007515.1,832-850).
gccctggttaccaaagtgt

SEQ ID NO: 641492 - DNA, 19 bp, Mus musculus
  siRNA target sequence for Slc7a3 (NM_007515.1,833-851).
ccctggttaccaaagtgtt

SEQ ID NO: 641493 - DNA, 19 bp, Mus musculus
  siRNA target sequence for Slc7a3 (NM_007515.1,928-946).
ctcacgaaagaggactatt

SEQ ID NO: 641494 - DNA, 19 bp, Mus musculus
  siRNA target sequence for Slc7a3 (NM_007515.1,961-979).
gaatccaacggcacttgta

SEQ ID NO: 641495 - DNA, 19 bp, Mus musculus
  siRNA target sequence for Slc7a3 (NM_007515.1,1039-1057).
ggcgctgctacctgtttct

SEQ ID NO: 641496 - DNA, 19 bp, Mus musculus
  siRNA target sequence for Slc7a3 (NM_007515.1,1040-1058).
gcgctgctacctgtttcta

SEQ ID NO: 641497 - DNA, 19 bp, Mus musculus
  siRNA target sequence for Slc7a3 (NM_007515.1,1041-1059).
cgctgctacctgtttctat

SEQ ID NO: 641498 - DNA, 19 bp, Mus musculus
  siRNA target sequence for Slc7a3 (NM_007515.1,1065-1083).
cgttggttttgactgtatt

SEQ ID NO: 641499 - DNA, 19 bp, Mus musculus
  siRNA target sequence for Slc7a3 (NM_007515.1,1092-1110).
cggagaagaggctcagaat

SEQ ID NO: 641500 - DNA, 19 bp, Mus musculus
  siRNA target sequence for Slc7a3 (NM_007515.1,1184-1202).
cagcacttaccctcatgat

SEQ ID NO: 641501 - DNA, 19 bp, Mus musculus
  siRNA target sequence for Slc7a3 (NM_007515.1,1229-1247).
gccctctgcctgaagcatt

SEQ ID NO: 641502 - DNA, 19 bp, Mus musculus
  siRNA target sequence for Slc7a3 (NM_007515.1,1236-1254).
gcctgaagcattttcctat

SEQ ID NO: 641503 - DNA, 19 bp, Mus musculus
  siRNA target sequence for Slc7a3 (NM_007515.1,1297-1315).
ctctgtgcactttctacta

SEQ ID NO: 641504 - DNA, 19 bp, Mus musculus
  siRNA target sequence for Slc7a3 (NM_007515.1,1383-1401).
ccgtgtccttgctaaggtt

SEQ ID NO: 641505 - DNA, 19 bp, Mus musculus
  siRNA target sequence for Slc7a3 (NM_007515.1,1437-1455).
ggtatctggtgttattgca

SEQ ID NO: 641506 - DNA, 19 bp, Mus musculus
  siRNA target sequence for Slc7a3 (NM_007515.1,1445-1463).
gtgttattgcagcattcat

SEQ ID NO: 641507 - DNA, 19 bp, Mus musculus
  siRNA target sequence for Slc7a3 (NM_007515.1,1638-1656).
gactgtccaggctctattt

SEQ ID NO: 641508 - DNA, 19 bp, Mus musculus
  siRNA target sequence for Slc7a3 (NM_007515.1,1688-1706).
ctggccgagttgtctatgt

SEQ ID NO: 641509 - DNA, 19 bp, Mus musculus
  siRNA target sequence for Slc7a3 (NM_007515.1,1690-1708).
ggccgagttgtctatgttt

SEQ ID NO: 641510 - DNA, 19 bp, Mus musculus
  siRNA target sequence for Slc7a3 (NM_007515.1,1715-1733).
cactgcttgccgtactact

SEQ ID NO: 641511 - DNA, 19 bp, Mus musculus
  siRNA target sequence for Slc7a3 (NM_007515.1,1717-1735).
ctgcttgccgtactactaa

SEQ ID NO: 641512 - DNA, 19 bp, Mus musculus
  siRNA target sequence for Slc7a3 (NM_007515.1,1719-1737).
gcttgccgtactactaact

SEQ ID NO: 641513 - DNA, 19 bp, Mus musculus
  siRNA target sequence for Slc7a3 (NM_007515.1,1725-1743).
cgtactactaactgttctt

SEQ ID NO: 641514 - DNA, 19 bp, Mus musculus
  siRNA target sequence for Slc7a3 (NM_007515.1,1726-1744).
gtactactaactgttcttt

SEQ ID NO: 641515 - DNA, 19 bp, Mus musculus
  siRNA target sequence for Slc7a3 (NM_007515.1,1815-1833).
gatcctggggctcattctt

SEQ ID NO: 641516 - DNA, 19 bp, Mus musculus
  siRNA target sequence for Slc7a3 (NM_007515.1,1821-1839).
ggggctcattcttgcaatt

SEQ ID NO: 641517 - DNA, 19 bp, Mus musculus
  siRNA target sequence for Slc7a3 (NM_007515.1,1822-1840).
gggctcattcttgcaattt

SEQ ID NO: 641518 - DNA, 19 bp, Mus musculus
  siRNA target sequence for Slc7a3 (NM_007515.1,1869-1887).
ccgcactccccttcacttt

SEQ ID NO: 641519 - DNA, 19 bp, Mus musculus
  siRNA target sequence for Slc7a3 (NM_007515.1,1920-1938).
gagcatctttgtgaatgtt

SEQ ID NO: 641520 - DNA, 19 bp, Mus musculus
  siRNA target sequence for Slc7a3 (NM_007515.1,2036-2054).
gtatgaaagaagttaagaa

SEQ ID NO: 641521 - DNA, 19 bp, Mus musculus
  siRNA target sequence for Slc7a3 (NM_007515.1,2044-2062).
gaagttaagaatcatcaaa

SEQ ID NO: 641522 - DNA, 19 bp, Mus musculus
  siRNA target sequence for Slc7a5 (NM_011404.2,494-512).
gatcgagctgctcatcatt

SEQ ID NO: 641523 - DNA, 19 bp, Mus musculus
  siRNA target sequence for Slc7a5 (NM_011404.2,514-532).
ggccctcctcgcagtacat

SEQ ID NO: 641524 - DNA, 19 bp, Mus musculus
  siRNA target sequence for Slc7a5 (NM_011404.2,819-837).
gacgtggggaacattgtgt

SEQ ID NO: 641525 - DNA, 19 bp, Mus musculus
  siRNA target sequence for Slc7a5 (NM_011404.2,863-881).
ctacggaggatggaactat

SEQ ID NO: 641526 - DNA, 19 bp, Mus musculus
  siRNA target sequence for Slc7a5 (NM_011404.2,1335-1353).
gccatcatcggtatgatgt

SEQ ID NO: 641527 - DNA, 19 bp, Mus musculus
  siRNA target sequence for Slc7a5 (NM_011404.2,1384-1402).
gtcccatcaaggtgaatct

SEQ ID NO: 641528 - DNA, 19 bp, Mus musculus
  siRNA target sequence for Slc7a5 (NM_011404.2,1440-1458).
ctcattgccgtgtcattct

SEQ ID NO: 641529 - DNA, 19 bp, Mus musculus
  siRNA target sequence for Slc7a5 (NM_011404.2,1504-1522).
gcgggctgcctgtctactt

SEQ ID NO: 641530 - DNA, 19 bp, Mus musculus
  siRNA target sequence for Slc7a5 (NM_011404.2,1555-1573).
ggattctgcaggctatctt

SEQ ID NO: 641531 - DNA, 19 bp, Mus musculus
  siRNA target sequence for Slc7a8 (NM_016972.2,651-669).
gcggagtagccctgaagaa

SEQ ID NO: 641532 - DNA, 19 bp, Mus musculus
  siRNA target sequence for Slc7a8 (NM_016972.2,652-670).
cggagtagccctgaagaaa

SEQ ID NO: 641533 - DNA, 19 bp, Mus musculus
  siRNA target sequence for Slc7a8 (NM_016972.2,685-703).
cagcgcctgtggtatcatt

SEQ ID NO: 641534 - DNA, 19 bp, Mus musculus
  siRNA target sequence for Slc7a8 (NM_016972.2,687-705).
gcgcctgtggtatcattgt

SEQ ID NO: 641535 - DNA, 19 bp, Mus musculus
  siRNA target sequence for Slc7a8 (NM_016972.2,688-706).
cgcctgtggtatcattgta

SEQ ID NO: 641536 - DNA, 19 bp, Mus musculus
  siRNA target sequence for Slc7a8 (NM_016972.2,715-733).
cattggctccggaatcttt

SEQ ID NO: 641537 - DNA, 19 bp, Mus musculus
  siRNA target sequence for Slc7a8 (NM_016972.2,862-880).
gtctggaggtgattactct

SEQ ID NO: 641538 - DNA, 19 bp, Mus musculus
  siRNA target sequence for Slc7a8 (NM_016972.2,864-882).
ctggaggtgattactctta

SEQ ID NO: 641539 - DNA, 19 bp, Mus musculus
  siRNA target sequence for Slc7a8 (NM_016972.2,867-885).
gaggtgattactcttatgt

SEQ ID NO: 641540 - DNA, 19 bp, Mus musculus
  siRNA target sequence for Slc7a8 (NM_016972.2,1107-1125).
cccgggttcaagatatctt

SEQ ID NO: 641541 - DNA, 19 bp, Mus musculus
  siRNA target sequence for Slc7a8 (NM_016972.2,1169-1187).
ggtattgtgcagatatgca

SEQ ID NO: 641542 - DNA, 19 bp, Mus musculus
  siRNA target sequence for Slc7a8 (NM_016972.2,1170-1188).
gtattgtgcagatatgcaa

SEQ ID NO: 641543 - DNA, 19 bp, Mus musculus
  siRNA target sequence for Slc7a8 (NM_016972.2,1201-1219).
ctggctggagccaaagaat

SEQ ID NO: 641544 - DNA, 19 bp, Mus musculus
  siRNA target sequence for Slc7a8 (NM_016972.2,1328-1346).
cttgtggatccttacaaga

SEQ ID NO: 641545 - DNA, 19 bp, Mus musculus
  siRNA target sequence for Slc7a8 (NM_016972.2,1391-1409).
gtgtacgtctttgctaata

SEQ ID NO: 641546 - DNA, 19 bp, Mus musculus
  siRNA target sequence for Slc7a8 (NM_016972.2,1393-1411).
gtacgtctttgctaatatt

SEQ ID NO: 641547 - DNA, 19 bp, Mus musculus
  siRNA target sequence for Slc7a8 (NM_016972.2,1396-1414).
cgtctttgctaatattgca

SEQ ID NO: 641548 - DNA, 19 bp, Mus musculus
  siRNA target sequence for Slc7a8 (NM_016972.2,1397-1415).
gtctttgctaatattgcat

SEQ ID NO: 641549 - DNA, 19 bp, Mus musculus
  siRNA target sequence for Slc7a8 (NM_016972.2,1531-1549).
cacgtttggtggagtcaat

SEQ ID NO: 641550 - DNA, 19 bp, Mus musculus
  siRNA target sequence for Slc7a8 (NM_016972.2,1761-1779).
cggttgcaggacagatagt

SEQ ID NO: 641551 - DNA, 19 bp, Mus musculus
  siRNA target sequence for Slc7a8 (NM_016972.2,1905-1923).
gcattggcctggccattat

SEQ ID NO: 641552 - DNA, 19 bp, Mus musculus
  siRNA target sequence for Slc7a8 (NM_016972.2,1953-1971).
gtgtctactggcaacacaa

SEQ ID NO: 641553 - DNA, 19 bp, Mus musculus
  siRNA target sequence for Slc7a8 (NM_016972.2,2068-2086).
ggaaacaactgatgactta

SEQ ID NO: 641554 - DNA, 19 bp, Mus musculus
  siRNA target sequence for 1810073N04Rik (NM_024249.3,515-533).
cttggggtccaacttcttt

SEQ ID NO: 641555 - DNA, 19 bp, Mus musculus
  siRNA target sequence for 1810073N04Rik (NM_024249.3,661-679).
ccatggcgctcctcttcta

SEQ ID NO: 641556 - DNA, 19 bp, Mus musculus
  siRNA target sequence for 1810073N04Rik (NM_024249.3,714-732).
cttaaacatggcctcttta

SEQ ID NO: 641557 - DNA, 19 bp, Mus musculus
  siRNA target sequence for 1810073N04Rik (NM_024249.3,746-764).
gcgacaggtcagctacatt

SEQ ID NO: 641558 - DNA, 19 bp, Mus musculus
  siRNA target sequence for 1810073N04Rik (NM_024249.3,869-887).
gaccatgagctccatcttt

SEQ ID NO: 641559 - DNA, 19 bp, Mus musculus
  siRNA target sequence for 1810073N04Rik (NM_024249.3,902-920).
cgtggtcaccgccttctat

SEQ ID NO: 641560 - DNA, 19 bp, Mus musculus
  siRNA target sequence for 1810073N04Rik (NM_024249.3,906-924).
gtcaccgccttctatgtca

SEQ ID NO: 641561 - DNA, 19 bp, Mus musculus
  siRNA target sequence for 1810073N04Rik (NM_024249.3,1044-1062).
gtgggcttccccatgatga

SEQ ID NO: 641562 - DNA, 19 bp, Mus musculus
  siRNA target sequence for 1810073N04Rik (NM_024249.3,1109-1127).
gcaaaaagatggaaccttt

SEQ ID NO: 641563 - DNA, 19 bp, Mus musculus
  siRNA target sequence for 1810073N04Rik (NM_024249.3,1145-1163).
gcccccactccggtttaaa

SEQ ID NO: 641564 - DNA, 19 bp, Mus musculus
  siRNA target sequence for 1810073N04Rik (NM_024249.3,1147-1165).
ccccactccggtttaaagt

SEQ ID NO: 641565 - DNA, 19 bp, Mus musculus
  siRNA target sequence for 1810073N04Rik (NM_024249.3,1283-1301).
ggctctgatctataagaaa

SEQ ID NO: 641566 - DNA, 19 bp, Mus musculus
  siRNA target sequence for 1810073N04Rik (NM_024249.3,1487-1505).
ccaggatcccgttgtagtt

SEQ ID NO: 641567 - DNA, 19 bp, Mus musculus
  siRNA target sequence for 1810073N04Rik (NM_024249.3,1571-1589).
gatcaagggtcctgtagat

SEQ ID NO: 641568 - DNA, 19 bp, Mus musculus
  siRNA target sequence for 1810073N04Rik (NM_024249.3,1692-1710).
cctcccatccctcatgata

SEQ ID NO: 641569 - DNA, 19 bp, Mus musculus
  siRNA target sequence for 1810073N04Rik (NM_024249.3,1693-1711).
ctcccatccctcatgataa

SEQ ID NO: 641570 - DNA, 19 bp, Mus musculus
  siRNA target sequence for 1810073N04Rik (NM_024249.3,2516-2534).
cccttcacagcctttgcaa

SEQ ID NO: 641571 - DNA, 19 bp, Mus musculus
  siRNA target sequence for 1810073N04Rik (NM_024249.3,2640-2658).
cctgctggtggctctgaaa

SEQ ID NO: 641572 - DNA, 19 bp, Mus musculus
  siRNA target sequence for 1810073N04Rik (NM_024249.3,2946-2964).
gctaaggacacaaaatcca

SEQ ID NO: 641573 - DNA, 19 bp, Mus musculus
  siRNA target sequence for 1810073N04Rik (NM_024249.3,3152-3170).
gagaccagatcctaactct

SEQ ID NO: 641574 - DNA, 19 bp, Mus musculus
  siRNA target sequence for 1810073N04Rik (NM_024249.3,3307-3325).
caaaggatggcgtcatcat

SEQ ID NO: 641575 - DNA, 19 bp, Mus musculus
  siRNA target sequence for 1810073N04Rik (NM_024249.3,3312-3330).
gatggcgtcatcattagct

SEQ ID NO: 641576 - DNA, 19 bp, Mus musculus
  siRNA target sequence for 1810073N04Rik (NM_024249.3,3315-3333).
ggcgtcatcattagcttta

SEQ ID NO: 641577 - DNA, 19 bp, Mus musculus
  siRNA target sequence for 1810073N04Rik (NM_024249.3,3316-3334).
gcgtcatcattagctttaa

SEQ ID NO: 641578 - DNA, 19 bp, Mus musculus
  siRNA target sequence for 1810073N04Rik (NM_024249.3,3427-3445).
gccgacagattaaacagtt

SEQ ID NO: 641579 - DNA, 19 bp, Mus musculus
  siRNA target sequence for 9030221C07 (NM_177802.2,539-557).
gtcaatggggggttcttca

SEQ ID NO: 641580 - DNA, 19 bp, Mus musculus
  siRNA target sequence for 9030221C07 (NM_177802.2,594-612).
gtcacatgccgcagcttat

SEQ ID NO: 641581 - DNA, 19 bp, Mus musculus
  siRNA target sequence for 9030221C07 (NM_177802.2,663-681).
ccacggctgtggctttact

SEQ ID NO: 641582 - DNA, 19 bp, Mus musculus
  siRNA target sequence for 9030221C07 (NM_177802.2,686-704).
gtcatcccgggaaacttca

SEQ ID NO: 641583 - DNA, 19 bp, Mus musculus
  siRNA target sequence for 9030221C07 (NM_177802.2,767-785).
cttctgtatttgcgaataa

SEQ ID NO: 641584 - DNA, 19 bp, Mus musculus
  siRNA target sequence for 9030221C07 (NM_177802.2,862-880).
ggtgttggcacccatcatt

SEQ ID NO: 641585 - DNA, 19 bp, Mus musculus
  siRNA target sequence for 9030221C07 (NM_177802.2,881-899).
gaccacccgcagatagaat

SEQ ID NO: 641586 - DNA, 19 bp, Mus musculus
  siRNA target sequence for 9030221C07 (NM_177802.2,886-904).
cccgcagatagaattccta

SEQ ID NO: 641587 - DNA, 19 bp, Mus musculus
  siRNA target sequence for 9030221C07 (NM_177802.2,887-905).
ccgcagatagaattcctat

SEQ ID NO: 641588 - DNA, 19 bp, Mus musculus
  siRNA target sequence for 9030221C07 (NM_177802.2,890-908).
cagatagaattcctataca

SEQ ID NO: 641589 - DNA, 19 bp, Mus musculus
  siRNA target sequence for 9030221C07 (NM_177802.2,966-984).
gtcagttcaagtgtataca

SEQ ID NO: 641590 - DNA, 19 bp, Mus musculus
  siRNA target sequence for 9030221C07 (NM_177802.2,1023-1041).
ctccaaccactaaagatca

SEQ ID NO: 641591 - DNA, 19 bp, Mus musculus
  siRNA target sequence for 9030221C07 (NM_177802.2,1025-1043).
ccaaccactaaagatcatt

SEQ ID NO: 641592 - DNA, 19 bp, Mus musculus
  siRNA target sequence for 9130023D20Rik (NM_178746.3,204-222).
gaacatccagtttgattca

SEQ ID NO: 641593 - DNA, 19 bp, Mus musculus
  siRNA target sequence for 9130023D20Rik (NM_178746.3,207-225).
catccagtttgattcatca

SEQ ID NO: 641594 - DNA, 19 bp, Mus musculus
  siRNA target sequence for 9130023D20Rik (NM_178746.3,221-239).
catcagatctgagatctaa

SEQ ID NO: 641595 - DNA, 19 bp, Mus musculus
  siRNA target sequence for 9130023D20Rik (NM_178746.3,236-254).
ctaaaaggcctttctatat

SEQ ID NO: 641596 - DNA, 19 bp, Mus musculus
  siRNA target sequence for 9130023D20Rik (NM_178746.3,267-285).
cattgtcaatgtgaatgat

SEQ ID NO: 641597 - DNA, 19 bp, Mus musculus
  siRNA target sequence for 9130023D20Rik (NM_178746.3,398-416).
ctgctccagaggaatgcta

SEQ ID NO: 641598 - DNA, 19 bp, Mus musculus
  siRNA target sequence for 9130023D20Rik (NM_178746.3,428-446).
cattgggctctgcctataa

SEQ ID NO: 641599 - DNA, 19 bp, Mus musculus
  siRNA target sequence for 9130023D20Rik (NM_178746.3,433-451).
ggctctgcctataaactca

SEQ ID NO: 641600 - DNA, 19 bp, Mus musculus
  siRNA target sequence for 9130023D20Rik (NM_178746.3,434-452).
gctctgcctataaactcaa

SEQ ID NO: 641601 - DNA, 19 bp, Mus musculus
  siRNA target sequence for 9130023D20Rik (NM_178746.3,440-458).
cctataaactcaagagtta

SEQ ID NO: 641602 - DNA, 19 bp, Mus musculus
  siRNA target sequence for 9130023D20Rik (NM_178746.3,461-479).
ctgaaggctatggtaaaaa

SEQ ID NO: 641603 - DNA, 19 bp, Mus musculus
  siRNA target sequence for 9130023D20Rik (NM_178746.3,480-498).
caccagcttagttactatt

SEQ ID NO: 641604 - DNA, 19 bp, Mus musculus
  siRNA target sequence for 9130023D20Rik (NM_178746.3,482-500).
ccagcttagttactatttt

SEQ ID NO: 641605 - DNA, 19 bp, Mus musculus
  siRNA target sequence for 9130023D20Rik (NM_178746.3,523-541).
ggaacatctatactaagta

SEQ ID NO: 641606 - DNA, 19 bp, Mus musculus
  siRNA target sequence for 9130023D20Rik (NM_178746.3,524-542).
gaacatctatactaagtat

SEQ ID NO: 641607 - DNA, 19 bp, Mus musculus
  siRNA target sequence for 9130023D20Rik (NM_178746.3,592-610).
gtgctgatgggccttctaa

SEQ ID NO: 641608 - DNA, 19 bp, Mus musculus
  siRNA target sequence for 9130023D20Rik (NM_178746.3,594-612).
gctgatgggccttctaaca

SEQ ID NO: 641609 - DNA, 19 bp, Mus musculus
  siRNA target sequence for 9130023D20Rik (NM_178746.3,597-615).
gatgggccttctaacactt

SEQ ID NO: 641610 - DNA, 19 bp, Mus musculus
  siRNA target sequence for 9130023D20Rik (NM_178746.3,601-619).
ggccttctaacactttact

SEQ ID NO: 641611 - DNA, 19 bp, Mus musculus
  siRNA target sequence for 9130023D20Rik (NM_178746.3,636-654).
gaagtcacggagtacgata

SEQ ID NO: 641612 - DNA, 19 bp, Mus musculus
  siRNA target sequence for 9130023D20Rik (NM_178746.3,639-657).
gtcacggagtacgataagt

SEQ ID NO: 641613 - DNA, 19 bp, Mus musculus
  siRNA target sequence for 9130023D20Rik (NM_178746.3,643-661).
cggagtacgataagtacat

SEQ ID NO: 641614 - DNA, 19 bp, Mus musculus
  siRNA target sequence for 9130023D20Rik (NM_178746.3,666-684).
cacgagtacctgggaatat

SEQ ID NO: 641615 - DNA, 19 bp, Mus musculus
  siRNA target sequence for 9130023D20Rik (NM_178746.3,669-687).
gagtacctgggaatatcca

SEQ ID NO: 641616 - DNA, 19 bp, Mus musculus
  siRNA target sequence for 9130023D20Rik (NM_178746.3,752-770).
cgctcattggagcaatgat

SEQ ID NO: 641617 - DNA, 19 bp, Mus musculus
  siRNA target sequence for 9130023D20Rik (NM_178746.3,780-798).
ggtgcttatgtctaatttt

SEQ ID NO: 641618 - DNA, 19 bp, Mus musculus
  siRNA target sequence for 9130023D20Rik (NM_178746.3,857-875).
ctgtactgagcaccaataa

SEQ ID NO: 641619 - DNA, 19 bp, Mus musculus
  siRNA target sequence for 9130023D20Rik (NM_178746.3,859-877).
gtactgagcaccaataata

SEQ ID NO: 641620 - DNA, 19 bp, Mus musculus
  siRNA target sequence for 9130023D20Rik (NM_178746.3,862-880).
ctgagcaccaataatagca

SEQ ID NO: 641621 - DNA, 19 bp, Mus musculus
  siRNA target sequence for 9130023D20Rik (NM_178746.3,922-940).
gacaacagttccatgattt

SEQ ID NO: 641622 - DNA, 19 bp, Mus musculus
  siRNA target sequence for 9130023D20Rik (NM_178746.3,929-947).
gttccatgattttctacaa

SEQ ID NO: 641623 - DNA, 19 bp, Mus musculus
  siRNA target sequence for 9130023D20Rik (NM_178746.3,932-950).
ccatgattttctacaacaa

SEQ ID NO: 641624 - DNA, 19 bp, Mus musculus
  siRNA target sequence for 9130023D20Rik (NM_178746.3,1030-1048).
ccgctgctcaacttcaagt

SEQ ID NO: 641625 - DNA, 19 bp, Mus musculus
  siRNA target sequence for 9130023D20Rik (NM_178746.3,1089-1107).
gtctgtcctctatttgatt

SEQ ID NO: 641626 - DNA, 19 bp, Mus musculus
  siRNA target sequence for 9130023D20Rik (NM_178746.3,1095-1113).
cctctatttgattttcgtt

SEQ ID NO: 641627 - DNA, 19 bp, Mus musculus
  siRNA target sequence for 9130023D20Rik (NM_178746.3,1160-1178).
ggtttgtgccaacagaatt

SEQ ID NO: 641628 - DNA, 19 bp, Mus musculus
  siRNA target sequence for 9130023D20Rik (NM_178746.3,1225-1243).
cttactctggccttcttta

SEQ ID NO: 641629 - DNA, 19 bp, Mus musculus
  siRNA target sequence for 9130023D20Rik (NM_178746.3,1253-1271).
gcatcatcacactcttgaa

SEQ ID NO: 641630 - DNA, 19 bp, Mus musculus
  siRNA target sequence for 9130023D20Rik (NM_178746.3,1254-1272).
catcatcacactcttgaaa

SEQ ID NO: 641631 - DNA, 19 bp, Mus musculus
  siRNA target sequence for 9130023D20Rik (NM_178746.3,1316-1334).
cttatatgctggtgacatt

SEQ ID NO: 641632 - DNA, 19 bp, Mus musculus
  siRNA target sequence for 9130023D20Rik (NM_178746.3,1323-1341).
gctggtgacattgacttat

SEQ ID NO: 641633 - DNA, 19 bp, Mus musculus
  siRNA target sequence for 9130023D20Rik (NM_178746.3,1335-1353).
gacttatctctatattggt

SEQ ID NO: 641634 - DNA, 19 bp, Mus musculus
  siRNA target sequence for 9130023D20Rik (NM_178746.3,1384-1402).
ccattacccaaagattgta

SEQ ID NO: 641635 - DNA, 19 bp, Mus musculus
  siRNA target sequence for 9130023D20Rik (NM_178746.3,1391-1409).
ccaaagattgtattgaaca

SEQ ID NO: 641636 - DNA, 19 bp, Mus musculus
  siRNA target sequence for 9130023D20Rik (NM_178746.3,1446-1464).
gtccttcattgcaaggata

SEQ ID NO: 641637 - DNA, 19 bp, Mus musculus
  siRNA target sequence for 9130023D20Rik (NM_178746.3,1448-1466).
ccttcattgcaaggatatt

SEQ ID NO: 641638 - DNA, 19 bp, Mus musculus
  siRNA target sequence for 9130023D20Rik (NM_178746.3,1476-1494).
ccagatgatgactgtatat

SEQ ID NO: 641639 - DNA, 19 bp, Mus musculus
  siRNA target sequence for 9130023D20Rik (NM_178746.3,1534-1552).
catatcttcggtgacattt

SEQ ID NO: 641640 - DNA, 19 bp, Mus musculus
  siRNA target sequence for 9130023D20Rik (NM_178746.3,1572-1590).
gctgattcttaacttagtt

SEQ ID NO: 641641 - DNA, 19 bp, Mus musculus
  siRNA target sequence for 9130023D20Rik (NM_178746.3,1636-1654).
ggagggatcataaggtatt

SEQ ID NO: 641642 - DNA, 19 bp, Mus musculus
  siRNA target sequence for 9130023D20Rik (NM_178746.3,1671-1689).
cctggctttcgtgttcata

SEQ ID NO: 641643 - DNA, 19 bp, Mus musculus
  siRNA target sequence for 9130023D20Rik (NM_178746.3,1672-1690).
ctggctttcgtgttcatat

SEQ ID NO: 641644 - DNA, 19 bp, Mus musculus
  siRNA target sequence for 9130023D20Rik (NM_178746.3,1693-1711).
ccgtctctcatctatataa

SEQ ID NO: 641645 - DNA, 19 bp, Mus musculus
  siRNA target sequence for 9130023D20Rik (NM_178746.3,1694-1712).
cgtctctcatctatataat

SEQ ID NO: 641646 - DNA, 19 bp, Mus musculus
  siRNA target sequence for 9130023D20Rik (NM_178746.3,1742-1760).
ggcctaagttggtgtttca

SEQ ID NO: 641647 - DNA, 19 bp, Mus musculus
  siRNA target sequence for 9330158F14Rik (NM_177074.1,74-92).
cctgatctccggacatgaa

SEQ ID NO: 641648 - DNA, 19 bp, Mus musculus
  siRNA target sequence for 9330158F14Rik (NM_177074.1,90-108).
gaacacggagggaaatcta

SEQ ID NO: 641649 - DNA, 19 bp, Mus musculus
  siRNA target sequence for 9330158F14Rik (NM_177074.1,109-127).
gtcagtctgccgctgtttt

SEQ ID NO: 641650 - DNA, 19 bp, Mus musculus
  siRNA target sequence for 9330158F14Rik (NM_177074.1,111-129).
cagtctgccgctgttttca

SEQ ID NO: 641651 - DNA, 19 bp, Mus musculus
  siRNA target sequence for 9330158F14Rik (NM_177074.1,113-131).
gtctgccgctgttttcaat

SEQ ID NO: 641652 - DNA, 19 bp, Mus musculus
  siRNA target sequence for 9330158F14Rik (NM_177074.1,115-133).
ctgccgctgttttcaatgt

SEQ ID NO: 641653 - DNA, 19 bp, Mus musculus
  siRNA target sequence for 9330158F14Rik (NM_177074.1,150-168).
ggatctgggataataggat

SEQ ID NO: 641654 - DNA, 19 bp, Mus musculus
  siRNA target sequence for 9330158F14Rik (NM_177074.1,151-169).
gatctgggataataggatt

SEQ ID NO: 641655 - DNA, 19 bp, Mus musculus
  siRNA target sequence for 9330158F14Rik (NM_177074.1,193-211).
gatttcccttgggaatact

SEQ ID NO: 641656 - DNA, 19 bp, Mus musculus
  siRNA target sequence for 9330158F14Rik (NM_177074.1,199-217).
ccttgggaatactgctttt

SEQ ID NO: 641657 - DNA, 19 bp, Mus musculus
  siRNA target sequence for 9330158F14Rik (NM_177074.1,200-218).
cttgggaatactgctttta

SEQ ID NO: 641658 - DNA, 19 bp, Mus musculus
  siRNA target sequence for 9330158F14Rik (NM_177074.1,247-265).
ccctagttttattgataaa

SEQ ID NO: 641659 - DNA, 19 bp, Mus musculus
  siRNA target sequence for 9330158F14Rik (NM_177074.1,286-304).
cagactcctaccagtcttt

SEQ ID NO: 641660 - DNA, 19 bp, Mus musculus
  siRNA target sequence for 9330158F14Rik (NM_177074.1,371-389).
catagattaccaaggaaat

SEQ ID NO: 641661 - DNA, 19 bp, Mus musculus
  siRNA target sequence for 9330158F14Rik (NM_177074.1,391-409).
ccaccaaagaacatttagt

SEQ ID NO: 641662 - DNA, 19 bp, Mus musculus
  siRNA target sequence for A930013N06 (NM_172861.2,326-344).
ggagccgcctggtatgcaa

SEQ ID NO: 641663 - DNA, 19 bp, Mus musculus
  siRNA target sequence for A930013N06 (NM_172861.2,327-345).
gagccgcctggtatgcaat

SEQ ID NO: 641664 - DNA, 19 bp, Mus musculus
  siRNA target sequence for A930013N06 (NM_172861.2,662-680).
ggggagttcgtggcatttt

SEQ ID NO: 641665 - DNA, 19 bp, Mus musculus
  siRNA target sequence for A930013N06 (NM_172861.2,663-681).
gggagttcgtggcattttt

SEQ ID NO: 641666 - DNA, 19 bp, Mus musculus
  siRNA target sequence for A930013N06 (NM_172861.2,665-683).
gagttcgtggcatttttca

SEQ ID NO: 641667 - DNA, 19 bp, Mus musculus
  siRNA target sequence for A930013N06 (NM_172861.2,682-700).
catcggctggaacttgatt

SEQ ID NO: 641668 - DNA, 19 bp, Mus musculus
  siRNA target sequence for A930013N06 (NM_172861.2,735-753).
gtgctctgagcagtatgtt

SEQ ID NO: 641669 - DNA, 19 bp, Mus musculus
  siRNA target sequence for A930013N06 (NM_172861.2,738-756).
ctctgagcagtatgtttga

SEQ ID NO: 641670 - DNA, 19 bp, Mus musculus
  siRNA target sequence for A930013N06 (NM_172861.2,868-886).
cgtcatcgtgaccatcatt

SEQ ID NO: 641671 - DNA, 19 bp, Mus musculus
  siRNA target sequence for A930013N06 (NM_172861.2,1002-1020).
gggctgaaggccagttctt

SEQ ID NO: 641672 - DNA, 19 bp, Mus musculus
  siRNA target sequence for A930013N06 (NM_172861.2,1059-1077).
cgtgcttctatgctttcat

SEQ ID NO: 641673 - DNA, 19 bp, Mus musculus
  siRNA target sequence for A930013N06 (NM_172861.2,1060-1078).
gtgcttctatgctttcatt

SEQ ID NO: 641674 - DNA, 19 bp, Mus musculus
  siRNA target sequence for A930013N06 (NM_172861.2,1214-1232).
ccatattacgccattgaca

SEQ ID NO: 641675 - DNA, 19 bp, Mus musculus
  siRNA target sequence for A930013N06 (NM_172861.2,1239-1257).
ccccgctcatggagatgtt

SEQ ID NO: 641676 - DNA, 19 bp, Mus musculus
  siRNA target sequence for A930013N06 (NM_172861.2,1240-1258).
cccgctcatggagatgttt

SEQ ID NO: 641677 - DNA, 19 bp, Mus musculus
  siRNA target sequence for A930013N06 (NM_172861.2,1270-1288).
cttctatgctgcgaagttt

SEQ ID NO: 641678 - DNA, 19 bp, Mus musculus
  siRNA target sequence for A930013N06 (NM_172861.2,1273-1291).
ctatgctgcgaagtttgta

SEQ ID NO: 641679 - DNA, 19 bp, Mus musculus
  siRNA target sequence for A930013N06 (NM_172861.2,1374-1392).
ctggcgatgggctgctttt

SEQ ID NO: 641680 - DNA, 19 bp, Mus musculus
  siRNA target sequence for A930013N06 (NM_172861.2,1558-1576).
cttgcttcttcggtatcaa

SEQ ID NO: 641681 - DNA, 19 bp, Mus musculus
  siRNA target sequence for A930013N06 (NM_172861.2,1582-1600).
gagcgacatcgatggtttt

SEQ ID NO: 641682 - DNA, 19 bp, Mus musculus
  siRNA target sequence for A930013N06 (NM_172861.2,1719-1737).
cctgtggggccaaaaacct

SEQ ID NO: 641683 - DNA, 19 bp, Mus musculus
  siRNA target sequence for A930013N06 (NM_172861.2,1740-1758).
cgtccttgggagacaatga

SEQ ID NO: 641684 - DNA, 19 bp, Mus musculus
  siRNA target sequence for A930013N06 (NM_172861.2,1762-1780).
gctcatagggaaatcagat

SEQ ID NO: 641685 - DNA, 19 bp, Mus musculus
  siRNA target sequence for A930013N06 (NM_172861.2,1763-1781).
ctcatagggaaatcagata

SEQ ID NO: 641686 - DNA, 19 bp, Mus musculus
  siRNA target sequence for A930013N06 (NM_172861.2,1835-1853).
ggcatagaagccgatgaat

SEQ ID NO: 641687 - DNA, 19 bp, Mus musculus
  siRNA target sequence for A930013N06 (NM_172861.2,1837-1855).
catagaagccgatgaatca

SEQ ID NO: 641688 - DNA, 19 bp, Mus musculus
  siRNA target sequence for A930013N06 (NM_172861.2,1898-1916).
cgttactacaccatgagaa

SEQ ID NO: 641689 - DNA, 19 bp, Mus musculus
  siRNA target sequence for A930013N06 (NM_172861.2,1899-1917).
gttactacaccatgagaat

SEQ ID NO: 641690 - DNA, 19 bp, Mus musculus
  siRNA target sequence for A930013N06 (NM_172861.2,2106-2124).
gtgtgctggtgtttgtaat

SEQ ID NO: 641691 - DNA, 19 bp, Mus musculus
  siRNA target sequence for A930013N06 (NM_172861.2,2195-2213).
gccatgttggtgaatatct

SEQ ID NO: 641692 - DNA, 19 bp, Mus musculus
  siRNA target sequence for A930013N06 (NM_172861.2,2196-2214).
ccatgttggtgaatatcta

SEQ ID NO: 641693 - DNA, 19 bp, Mus musculus
  siRNA target sequence for A930013N06 (NM_172861.2,2270-2288).
gtgggtatgctcatttatt

SEQ ID NO: 641694 - DNA, 19 bp, Mus musculus
  siRNA target sequence for A930013N06 (NM_172861.2,2458-2476).
caaaggcttctattaccaa

SEQ ID NO: 641695 - DNA, 19 bp, Mus musculus
  siRNA target sequence for A930013N06 (NM_172861.2,2500-2518).
cagccggacgagtagcaaa

SEQ ID NO: 641696 - DNA, 19 bp, Mus musculus
  siRNA target sequence for A930013N06 (NM_172861.2,2511-2529).
gtagcaaagcgaaaagcaa

SEQ ID NO: 641697 - DNA, 19 bp, Mus musculus
  siRNA target sequence for A930013N06 (NM_172861.2,2550-2568).
cggaggccctgattgcaaa

SEQ ID NO: 641698 - DNA, 19 bp, Mus musculus
  siRNA target sequence for A930013N06 (NM_172861.2,2564-2582).
gcaaatgacgagttagatt

SEQ ID NO: 641699 - DNA, 19 bp, Mus musculus
  siRNA target sequence for AI643885 (NM_178798.2,145-163).
cacccacctaccatcttct

SEQ ID NO: 641700 - DNA, 19 bp, Mus musculus
  siRNA target sequence for AI643885 (NM_178798.2,316-334).
cgaagggtgtcctcaagta

SEQ ID NO: 641701 - DNA, 19 bp, Mus musculus
  siRNA target sequence for AI643885 (NM_178798.2,329-347).
caagtacactgcttcctat

SEQ ID NO: 641702 - DNA, 19 bp, Mus musculus
  siRNA target sequence for AI643885 (NM_178798.2,343-361).
cctatgggttgtcacttat

SEQ ID NO: 641703 - DNA, 19 bp, Mus musculus
  siRNA target sequence for AI643885 (NM_178798.2,344-362).
ctatgggttgtcacttata

SEQ ID NO: 641704 - DNA, 19 bp, Mus musculus
  siRNA target sequence for AI643885 (NM_178798.2,348-366).
gggttgtcacttatagtgt

SEQ ID NO: 641705 - DNA, 19 bp, Mus musculus
  siRNA target sequence for AI643885 (NM_178798.2,392-410).
cgtgggtgccctttgctat

SEQ ID NO: 641706 - DNA, 19 bp, Mus musculus
  siRNA target sequence for AI643885 (NM_178798.2,434-452).
caaatcaggggctagctat

SEQ ID NO: 641707 - DNA, 19 bp, Mus musculus
  siRNA target sequence for AI643885 (NM_178798.2,500-518).
gtgggtctcacttctaatt

SEQ ID NO: 641708 - DNA, 19 bp, Mus musculus
  siRNA target sequence for AI643885 (NM_178798.2,503-521).
ggtctcacttctaattgtt

SEQ ID NO: 641709 - DNA, 19 bp, Mus musculus
  siRNA target sequence for AI643885 (NM_178798.2,634-652).
gcgtatgtctgctgacatt

SEQ ID NO: 641710 - DNA, 19 bp, Mus musculus
  siRNA target sequence for AI643885 (NM_178798.2,635-653).
cgtatgtctgctgacattt

SEQ ID NO: 641711 - DNA, 19 bp, Mus musculus
  siRNA target sequence for AI643885 (NM_178798.2,674-692).
gtggggcacacgagtacaa

SEQ ID NO: 641712 - DNA, 19 bp, Mus musculus
  siRNA target sequence for AI643885 (NM_178798.2,684-702).
cgagtacaagacacattca

SEQ ID NO: 641713 - DNA, 19 bp, Mus musculus
  siRNA target sequence for AI643885 (NM_178798.2,766-784).
gacacactgagcactttca

SEQ ID NO: 641714 - DNA, 19 bp, Mus musculus
  siRNA target sequence for AI643885 (NM_178798.2,779-797).
ctttcaggacgcctttaaa

SEQ ID NO: 641715 - DNA, 19 bp, Mus musculus
  siRNA target sequence for AI643885 (NM_178798.2,862-880).
gttgggacacccttaattt

SEQ ID NO: 641716 - DNA, 19 bp, Mus musculus
  siRNA target sequence for AI643885 (NM_178798.2,866-884).
ggacacccttaattttgta

SEQ ID NO: 641717 - DNA, 19 bp, Mus musculus
  siRNA target sequence for AI643885 (NM_178798.2,867-885).
gacacccttaattttgtaa

SEQ ID NO: 641718 - DNA, 19 bp, Mus musculus
  siRNA target sequence for AI643885 (NM_178798.2,871-889).
cccttaattttgtaacaga

SEQ ID NO: 641719 - DNA, 19 bp, Mus musculus
  siRNA target sequence for AI643885 (NM_178798.2,872-890).
ccttaattttgtaacagaa

SEQ ID NO: 641720 - DNA, 19 bp, Mus musculus
  siRNA target sequence for AI643885 (NM_178798.2,1022-1040).
cgctgtggctgtgacattt

SEQ ID NO: 641721 - DNA, 19 bp, Mus musculus
  siRNA target sequence for AI643885 (NM_178798.2,1036-1054).
catttgctgaccagacatt

SEQ ID NO: 641722 - DNA, 19 bp, Mus musculus
  siRNA target sequence for AI643885 (NM_178798.2,1047-1065).
cagacattcggcatgttca

SEQ ID NO: 641723 - DNA, 19 bp, Mus musculus
  siRNA target sequence for AI643885 (NM_178798.2,1193-1211).
ccatattgagcgctttaca

SEQ ID NO: 641724 - DNA, 19 bp, Mus musculus
  siRNA target sequence for AI643885 (NM_178798.2,1212-1230).
cccgtgcctgcgttactgt

SEQ ID NO: 641725 - DNA, 19 bp, Mus musculus
  siRNA target sequence for AI643885 (NM_178798.2,1213-1231).
ccgtgcctgcgttactgtt

SEQ ID NO: 641726 - DNA, 19 bp, Mus musculus
  siRNA target sequence for AI643885 (NM_178798.2,1217-1235).
gcctgcgttactgttcaat

SEQ ID NO: 641727 - DNA, 19 bp, Mus musculus
  siRNA target sequence for AI643885 (NM_178798.2,1218-1236).
cctgcgttactgttcaatt

SEQ ID NO: 641728 - DNA, 19 bp, Mus musculus
  siRNA target sequence for AI643885 (NM_178798.2,1221-1239).
gcgttactgttcaattgca

SEQ ID NO: 641729 - DNA, 19 bp, Mus musculus
  siRNA target sequence for AI643885 (NM_178798.2,1237-1255).
gcaccatgacacttatcta

SEQ ID NO: 641730 - DNA, 19 bp, Mus musculus
  siRNA target sequence for AI643885 (NM_178798.2,1414-1432).
gcgtctgctccttgtttct

SEQ ID NO: 641731 - DNA, 19 bp, Mus musculus
  siRNA target sequence for AI643885 (NM_178798.2,1535-1553).
gtcccggagaccactcttt

SEQ ID NO: 641732 - DNA, 19 bp, Mus musculus
  siRNA target sequence for AI643885 (NM_178798.2,1537-1555).
cccggagaccactctttat

SEQ ID NO: 641733 - DNA, 19 bp, Mus musculus
  siRNA target sequence for AI643885 (NM_178798.2,1538-1556).
ccggagaccactctttatt

SEQ ID NO: 641734 - DNA, 19 bp, Mus musculus
  siRNA target sequence for AI643885 (NM_178798.2,1539-1557).
cggagaccactctttatta

SEQ ID NO: 641735 - DNA, 19 bp, Mus musculus
  siRNA target sequence for AI643885 (NM_178798.2,1543-1561).
gaccactctttattaggaa

SEQ ID NO: 641736 - DNA, 19 bp, Mus musculus
  siRNA target sequence for AI643885 (NM_178798.2,1610-1628).
cttgactgagctagatgta

SEQ ID NO: 641737 - DNA, 19 bp, Mus musculus
  siRNA target sequence for AI643885 (NM_178798.2,1613-1631).
gactgagctagatgtaact

SEQ ID NO: 641738 - DNA, 19 bp, Mus musculus
  siRNA target sequence for AI643885 (NM_178798.2,1615-1633).
ctgagctagatgtaactga

SEQ ID NO: 641739 - DNA, 19 bp, Mus musculus
  siRNA target sequence for BC031853 (NM_172758.1,334-352).
gtgtggatgtggtacctaa

SEQ ID NO: 641740 - DNA, 19 bp, Mus musculus
  siRNA target sequence for BC031853 (NM_172758.1,403-421).
cgcttggagccgtcttcat

SEQ ID NO: 641741 - DNA, 19 bp, Mus musculus
  siRNA target sequence for BC031853 (NM_172758.1,442-460).
gtgcgggtctgctcaactt

SEQ ID NO: 641742 - DNA, 19 bp, Mus musculus
  siRNA target sequence for BC031853 (NM_172758.1,516-534).
ggcatgctggtttttatca

SEQ ID NO: 641743 - DNA, 19 bp, Mus musculus
  siRNA target sequence for BC031853 (NM_172758.1,642-660).
gtagccattgcggtctata

SEQ ID NO: 641744 - DNA, 19 bp, Mus musculus
  siRNA target sequence for BC031853 (NM_172758.1,645-663).
gccattgcggtctatacct

SEQ ID NO: 641745 - DNA, 19 bp, Mus musculus
  siRNA target sequence for BC031853 (NM_172758.1,646-664).
ccattgcggtctatacctt

SEQ ID NO: 641746 - DNA, 19 bp, Mus musculus
  siRNA target sequence for BC031853 (NM_172758.1,704-722).
gcaggacaagattatagct

SEQ ID NO: 641747 - DNA, 19 bp, Mus musculus
  siRNA target sequence for BC031853 (NM_172758.1,836-854).
gattggcttccagaaatat

SEQ ID NO: 641748 - DNA, 19 bp, Mus musculus
  siRNA target sequence for BC031853 (NM_172758.1,883-901).
ggtacgtcaccgccattat

SEQ ID NO: 641749 - DNA, 19 bp, Mus musculus
  siRNA target sequence for BC031853 (NM_172758.1,884-902).
gtacgtcaccgccattata

SEQ ID NO: 641750 - DNA, 19 bp, Mus musculus
  siRNA target sequence for BC031853 (NM_172758.1,993-1011).
cccaccatctgctttggat

SEQ ID NO: 641751 - DNA, 19 bp, Mus musculus
  siRNA target sequence for BC031853 (NM_172758.1,994-1012).
ccaccatctgctttggatt

SEQ ID NO: 641752 - DNA, 19 bp, Mus musculus
  siRNA target sequence for BC031853 (NM_172758.1,1016-1034).
gtgtcatgtgagtagtgta

SEQ ID NO: 641753 - DNA, 19 bp, Mus musculus
  siRNA target sequence for BC031853 (NM_172758.1,1027-1045).
gtagtgtacccgtcttcaa

SEQ ID NO: 641754 - DNA, 19 bp, Mus musculus
  siRNA target sequence for BC031853 (NM_172758.1,1136-1154).
ctgtggcttcctaaccttt

SEQ ID NO: 641755 - DNA, 19 bp, Mus musculus
  siRNA target sequence for BC031853 (NM_172758.1,1242-1260).
gtgctcacctcctatccaa

SEQ ID NO: 641756 - DNA, 19 bp, Mus musculus
  siRNA target sequence for BC031853 (NM_172758.1,1403-1421).
gctctttatccctgacatt

SEQ ID NO: 641757 - DNA, 19 bp, Mus musculus
  siRNA target sequence for BC031853 (NM_172758.1,1488-1506).
ctcattcaagccaaactat

SEQ ID NO: 641758 - DNA, 19 bp, Mus musculus
  siRNA target sequence for BC031853 (NM_172758.1,1490-1508).
cattcaagccaaactatca

SEQ ID NO: 641759 - DNA, 19 bp, Mus musculus
  siRNA target sequence for BC031853 (NM_172758.1,1558-1576).
gagtccttctggtcacatt

SEQ ID NO: 641760 - DNA, 19 bp, Mus musculus
  siRNA target sequence for C81234 (NM_172479.1,419-437).
gacctgtgccagtgttgta

SEQ ID NO: 641761 - DNA, 19 bp, Mus musculus
  siRNA target sequence for C81234 (NM_172479.1,478-496).
gacctgccgggaaagtagt

SEQ ID NO: 641762 - DNA, 19 bp, Mus musculus
  siRNA target sequence for C81234 (NM_172479.1,606-624).
gagggagactggttcttga

SEQ ID NO: 641763 - DNA, 19 bp, Mus musculus
  siRNA target sequence for C81234 (NM_172479.1,645-663).
ctggtcagcttgttaatca

SEQ ID NO: 641764 - DNA, 19 bp, Mus musculus
  siRNA target sequence for C81234 (NM_172479.1,723-741).
ctgacctgcatgctgtttt

SEQ ID NO: 641765 - DNA, 19 bp, Mus musculus
  siRNA target sequence for C81234 (NM_172479.1,744-762).
ctcatttcggtcatctata

SEQ ID NO: 641766 - DNA, 19 bp, Mus musculus
  siRNA target sequence for C81234 (NM_172479.1,781-799).
gtgatgtgagccacaatga

SEQ ID NO: 641767 - DNA, 19 bp, Mus musculus
  siRNA target sequence for C81234 (NM_172479.1,825-843).
cctttgcaggcgtttaaca

SEQ ID NO: 641768 - DNA, 19 bp, Mus musculus
  siRNA target sequence for C81234 (NM_172479.1,870-888).
gttgactcgcagatgtctt

SEQ ID NO: 641769 - DNA, 19 bp, Mus musculus
  siRNA target sequence for C81234 (NM_172479.1,873-891).
gactcgcagatgtcttaca

SEQ ID NO: 641770 - DNA, 19 bp, Mus musculus
  siRNA target sequence for C81234 (NM_172479.1,875-893).
ctcgcagatgtcttacaca

SEQ ID NO: 641771 - DNA, 19 bp, Mus musculus
  siRNA target sequence for C81234 (NM_172479.1,938-956).
gcccatctacacagaactt

SEQ ID NO: 641772 - DNA, 19 bp, Mus musculus
  siRNA target sequence for C81234 (NM_172479.1,1000-1018).
ccatcggagctatgttcat

SEQ ID NO: 641773 - DNA, 19 bp, Mus musculus
  siRNA target sequence for C81234 (NM_172479.1,1005-1023).
ggagctatgttcatcatgt

SEQ ID NO: 641774 - DNA, 19 bp, Mus musculus
  siRNA target sequence for C81234 (NM_172479.1,1006-1024).
gagctatgttcatcatgta

SEQ ID NO: 641775 - DNA, 19 bp, Mus musculus
  siRNA target sequence for C81234 (NM_172479.1,1029-1047).
ctcacagcgacctttggat

SEQ ID NO: 641776 - DNA, 19 bp, Mus musculus
  siRNA target sequence for C81234 (NM_172479.1,1074-1092).
gcagagatgctggaaatgt

SEQ ID NO: 641777 - DNA, 19 bp, Mus musculus
  siRNA target sequence for C81234 (NM_172479.1,1100-1118).
ggaggacatgcttatcctt

SEQ ID NO: 641778 - DNA, 19 bp, Mus musculus
  siRNA target sequence for C81234 (NM_172479.1,1294-1312).
caaccatccgcgatatctt

SEQ ID NO: 641779 - DNA, 19 bp, Mus musculus
  siRNA target sequence for C81234 (NM_172479.1,1303-1321).
gcgatatctttgggtttat

SEQ ID NO: 641780 - DNA, 19 bp, Mus musculus
  siRNA target sequence for C81234 (NM_172479.1,1304-1322).
cgatatctttgggtttatt

SEQ ID NO: 641781 - DNA, 19 bp, Mus musculus
  siRNA target sequence for C81234 (NM_172479.1,1336-1354).
cccctagcctcatcttcat

SEQ ID NO: 641782 - DNA, 19 bp, Mus musculus
  siRNA target sequence for C81234 (NM_172479.1,1367-1385).
cttctacctccgtattgta

SEQ ID NO: 641783 - DNA, 19 bp, Mus musculus
  siRNA target sequence for C81234 (NM_172479.1,1392-1410).
gaggtggaacctttgtttt

SEQ ID NO: 641784 - DNA, 19 bp, Mus musculus
  siRNA target sequence for C81234 (NM_172479.1,1395-1413).
gtggaacctttgttttcct

SEQ ID NO: 641785 - DNA, 19 bp, Mus musculus
  siRNA target sequence for Slc12a8 (NM_134251.1,304-322).
ggtgtctactccatgatct

SEQ ID NO: 641786 - DNA, 19 bp, Mus musculus
  siRNA target sequence for Slc12a8 (NM_134251.1,355-373).
gtggggctgctctatgtat

SEQ ID NO: 641787 - DNA, 19 bp, Mus musculus
  siRNA target sequence for Slc12a8 (NM_134251.1,360-378).
gctgctctatgtatttgga

SEQ ID NO: 641788 - DNA, 19 bp, Mus musculus
  siRNA target sequence for Slc12a8 (NM_134251.1,385-403).
gttgcaggtgctatgtaca

SEQ ID NO: 641789 - DNA, 19 bp, Mus musculus
  siRNA target sequence for Slc12a8 (NM_134251.1,388-406).
gcaggtgctatgtacatca

SEQ ID NO: 641790 - DNA, 19 bp, Mus musculus
  siRNA target sequence for Slc12a8 (NM_134251.1,456-474).
ggcagtgcgtggaatttca

SEQ ID NO: 641791 - DNA, 19 bp, Mus musculus
  siRNA target sequence for Slc12a8 (NM_134251.1,511-529).
gcaggtgtcaagtggatta

SEQ ID NO: 641792 - DNA, 19 bp, Mus musculus
  siRNA target sequence for Slc12a8 (NM_134251.1,512-530).
caggtgtcaagtggattat

SEQ ID NO: 641793 - DNA, 19 bp, Mus musculus
  siRNA target sequence for Slc12a8 (NM_134251.1,808-826).
ggcgtctcgtggtttctct

SEQ ID NO: 641794 - DNA, 19 bp, Mus musculus
  siRNA target sequence for Slc12a8 (NM_134251.1,809-827).
gcgtctcgtggtttctcta

SEQ ID NO: 641795 - DNA, 19 bp, Mus musculus
  siRNA target sequence for Slc12a8 (NM_134251.1,815-833).
cgtggtttctctacatcat

SEQ ID NO: 641796 - DNA, 19 bp, Mus musculus
  siRNA target sequence for Slc12a8 (NM_134251.1,928-946).
ctattgggcctgtacatct

SEQ ID NO: 641797 - DNA, 19 bp, Mus musculus
  siRNA target sequence for Slc12a8 (NM_134251.1,960-978).
ctgtatggggggactctat

SEQ ID NO: 641798 - DNA, 19 bp, Mus musculus
  siRNA target sequence for Slc12a8 (NM_134251.1,1001-1019).
gcatcgcccaggacaaagt

SEQ ID NO: 641799 - DNA, 19 bp, Mus musculus
  siRNA target sequence for Slc12a8 (NM_134251.1,1119-1137).
ggtgggtcaggtgaatgtt

SEQ ID NO: 641800 - DNA, 19 bp, Mus musculus
  siRNA target sequence for Slc12a8 (NM_134251.1,1145-1163).
ccgttgtcaccatcaattt

SEQ ID NO: 641801 - DNA, 19 bp, Mus musculus
  siRNA target sequence for Slc12a8 (NM_134251.1,1455-1473).
gaagcgcaagggtaagaaa

SEQ ID NO: 641802 - DNA, 19 bp, Mus musculus
  siRNA target sequence for Slc12a8 (NM_134251.1,1576-1594).
gagcaagagtcctatcaga

SEQ ID NO: 641803 - DNA, 19 bp, Mus musculus
  siRNA target sequence for Slc12a8 (NM_134251.1,1600-1618).
cagacttctaggagtgaat

SEQ ID NO: 641804 - DNA, 19 bp, Mus musculus
  siRNA target sequence for Slc12a8 (NM_134251.1,1602-1620).
gacttctaggagtgaatca

SEQ ID NO: 641805 - DNA, 19 bp, Mus musculus
  siRNA target sequence for Slc12a8 (NM_134251.1,1660-1678).
gtgaacagagaagatttct

SEQ ID NO: 641806 - DNA, 19 bp, Mus musculus
  siRNA target sequence for Slc12a8 (NM_134251.1,1715-1733).
gaagaccaagtgttttcta

SEQ ID NO: 641807 - DNA, 19 bp, Mus musculus
  siRNA target sequence for Slc12a8 (NM_134251.1,1777-1795).
gcatccctgctcatcatgt

SEQ ID NO: 641808 - DNA, 19 bp, Mus musculus
  siRNA target sequence for Slc12a8 (NM_134251.1,1832-1850).
gtgttgctgcccttgtgta

SEQ ID NO: 641809 - DNA, 19 bp, Mus musculus
  siRNA target sequence for Slc12a8 (NM_134251.1,1840-1858).
gcccttgtgtatttctaca

SEQ ID NO: 641810 - DNA, 19 bp, Mus musculus
  siRNA target sequence for Slc12a8 (NM_134251.1,1841-1859).
cccttgtgtatttctacat

SEQ ID NO: 641811 - DNA, 19 bp, Mus musculus
  siRNA target sequence for Slc12a8 (NM_134251.1,1842-1860).
ccttgtgtatttctacatt

SEQ ID NO: 641812 - DNA, 19 bp, Mus musculus
  siRNA target sequence for Slc12a8 (NM_134251.1,1888-1906).
ggatcagcatcaaacttca

SEQ ID NO: 641813 - DNA, 19 bp, Mus musculus
  siRNA target sequence for Slc12a8 (NM_134251.1,1898-1916).
caaacttcagctttttcca

SEQ ID NO: 641814 - DNA, 19 bp, Mus musculus
  siRNA target sequence for Slc12a8 (NM_134251.1,1958-1976).
ggtccgcccaggagcaaat

SEQ ID NO: 641815 - DNA, 19 bp, Mus musculus
  siRNA target sequence for Slc12a8 (NM_134251.1,1961-1979).
ccgcccaggagcaaatcat

SEQ ID NO: 641816 - DNA, 19 bp, Mus musculus
  siRNA target sequence for Slc12a8 (NM_134251.1,1963-1981).
gcccaggagcaaatcatct

SEQ ID NO: 641817 - DNA, 19 bp, Mus musculus
  siRNA target sequence for Slc12a8 (NM_134251.1,1964-1982).
cccaggagcaaatcatctt

SEQ ID NO: 641818 - DNA, 19 bp, Mus musculus
  siRNA target sequence for Slc12a8 (NM_134251.1,2001-2019).
ggttgacatggcaatgact

SEQ ID NO: 641819 - DNA, 19 bp, Mus musculus
  siRNA target sequence for Slc12a9 (NM_031406.2,166-184).
caatggagctggagtatct

SEQ ID NO: 641820 - DNA, 19 bp, Mus musculus
  siRNA target sequence for Slc12a9 (NM_031406.2,337-355).
catcattctggcactaaca

SEQ ID NO: 641821 - DNA, 19 bp, Mus musculus
  siRNA target sequence for Slc12a9 (NM_031406.2,508-526).
gggactggtggagtctata

SEQ ID NO: 641822 - DNA, 19 bp, Mus musculus
  siRNA target sequence for Slc12a9 (NM_031406.2,510-528).
gactggtggagtctatact

SEQ ID NO: 641823 - DNA, 19 bp, Mus musculus
  siRNA target sequence for Slc12a9 (NM_031406.2,668-686).
cgagcctcctttcttacat

SEQ ID NO: 641824 - DNA, 19 bp, Mus musculus
  siRNA target sequence for Slc12a9 (NM_031406.2,767-785).
cgaccgggcaccaatgctt

SEQ ID NO: 641825 - DNA, 19 bp, Mus musculus
  siRNA target sequence for Slc12a9 (NM_031406.2,831-849).
gcaccctaagggacaactt

SEQ ID NO: 641826 - DNA, 19 bp, Mus musculus
  siRNA target sequence for Slc12a9 (NM_031406.2,1013-1031).
gtcgcctataccttcttca

SEQ ID NO: 641827 - DNA, 19 bp, Mus musculus
  siRNA target sequence for Slc12a9 (NM_031406.2,1132-1150).
cgtgttgatcggcatctat

SEQ ID NO: 641828 - DNA, 19 bp, Mus musculus
  siRNA target sequence for Slc12a9 (NM_031406.2,1501-1519).
gatgatgtttctcattagt

SEQ ID NO: 641829 - DNA, 19 bp, Mus musculus
  siRNA target sequence for Slc12a9 (NM_031406.2,1590-1608).
ccagcagttggggttatgt

SEQ ID NO: 641830 - DNA, 19 bp, Mus musculus
  siRNA target sequence for Slc12a9 (NM_031406.2,1664-1682).
cgcaaggagcacgtaaagt

SEQ ID NO: 641831 - DNA, 19 bp, Mus musculus
  siRNA target sequence for Slc12a9 (NM_031406.2,1665-1683).
gcaaggagcacgtaaagtt

SEQ ID NO: 641832 - DNA, 19 bp, Mus musculus
  siRNA target sequence for Slc12a9 (NM_031406.2,1743-1761).
gcctggccaaccagctaaa

SEQ ID NO: 641833 - DNA, 19 bp, Mus musculus
  siRNA target sequence for Slc12a9 (NM_031406.2,1802-1820).
gaccttgactccttaccat

SEQ ID NO: 641834 - DNA, 19 bp, Mus musculus
  siRNA target sequence for Slc36a1 (NM_153139.3,139-157).
gcttcggaacgaagactat

SEQ ID NO: 641835 - DNA, 19 bp, Mus musculus
  siRNA target sequence for Slc36a1 (NM_153139.3,144-162).
ggaacgaagactatcatga

SEQ ID NO: 641836 - DNA, 19 bp, Mus musculus
  siRNA target sequence for Slc36a1 (NM_153139.3,152-170).
gactatcatgactacagtt

SEQ ID NO: 641837 - DNA, 19 bp, Mus musculus
  siRNA target sequence for Slc36a1 (NM_153139.3,369-387).
gcctgctggtgattggtat

SEQ ID NO: 641838 - DNA, 19 bp, Mus musculus
  siRNA target sequence for Slc36a1 (NM_153139.3,478-496).
ggtgatgtatggactagaa

SEQ ID NO: 641839 - DNA, 19 bp, Mus musculus
  siRNA target sequence for Slc36a1 (NM_153139.3,479-497).
gtgatgtatggactagaat

SEQ ID NO: 641840 - DNA, 19 bp, Mus musculus
  siRNA target sequence for Slc36a1 (NM_153139.3,540-558).
ggcgcatcgtggacttctt

SEQ ID NO: 641841 - DNA, 19 bp, Mus musculus
  siRNA target sequence for Slc36a1 (NM_153139.3,588-606).
gtgtctacttcgtgtttct

SEQ ID NO: 641842 - DNA, 19 bp, Mus musculus
  siRNA target sequence for Slc36a1 (NM_153139.3,808-826).
cgtcagcctgatcatgata

SEQ ID NO: 641843 - DNA, 19 bp, Mus musculus
  siRNA target sequence for Slc36a1 (NM_153139.3,809-827).
gtcagcctgatcatgatat

SEQ ID NO: 641844 - DNA, 19 bp, Mus musculus
  siRNA target sequence for Slc36a1 (NM_153139.3,908-926).
ggcacagcgatttttgctt

SEQ ID NO: 641845 - DNA, 19 bp, Mus musculus
  siRNA target sequence for Slc36a1 (NM_153139.3,909-927).
gcacagcgatttttgcttt

SEQ ID NO: 641846 - DNA, 19 bp, Mus musculus
  siRNA target sequence for Slc36a1 (NM_153139.3,912-930).
cagcgatttttgcttttga

SEQ ID NO: 641847 - DNA, 19 bp, Mus musculus
  siRNA target sequence for Slc36a1 (NM_153139.3,1011-1029).
ctatcatcactgtactcta

SEQ ID NO: 641848 - DNA, 19 bp, Mus musculus
  siRNA target sequence for Slc36a1 (NM_153139.3,1048-1066).
ggggtacctgcaatttgga

SEQ ID NO: 641849 - DNA, 19 bp, Mus musculus
  siRNA target sequence for Slc36a1 (NM_153139.3,1054-1072).
cctgcaatttggagctaat

SEQ ID NO: 641850 - DNA, 19 bp, Mus musculus
  siRNA target sequence for Slc36a1 (NM_153139.3,1055-1073).
ctgcaatttggagctaata

SEQ ID NO: 641851 - DNA, 19 bp, Mus musculus
  siRNA target sequence for Slc36a1 (NM_153139.3,1058-1076).
caatttggagctaatatca

SEQ ID NO: 641852 - DNA, 19 bp, Mus musculus
  siRNA target sequence for Slc36a1 (NM_153139.3,1517-1535).
gactcctctaccaattcca

SEQ ID NO: 641853 - DNA, 19 bp, Mus musculus
  siRNA target sequence for Slc36a3 (NM_172258.2,286-304).
gcaagtgtcagcggaatat

SEQ ID NO: 641854 - DNA, 19 bp, Mus musculus
  siRNA target sequence for Slc36a3 (NM_172258.2,358-376).
gcagtacctccccaaagaa

SEQ ID NO: 641855 - DNA, 19 bp, Mus musculus
  siRNA target sequence for Slc36a3 (NM_172258.2,393-411).
gctgatgcgctaatgttta

SEQ ID NO: 641856 - DNA, 19 bp, Mus musculus
  siRNA target sequence for Slc36a3 (NM_172258.2,394-412).
ctgatgcgctaatgtttat

SEQ ID NO: 641857 - DNA, 19 bp, Mus musculus
  siRNA target sequence for Slc36a3 (NM_172258.2,399-417).
gcgctaatgtttatacaga

SEQ ID NO: 641858 - DNA, 19 bp, Mus musculus
  siRNA target sequence for Slc36a3 (NM_172258.2,529-547).
cgctcacagtgcactgtat

SEQ ID NO: 641859 - DNA, 19 bp, Mus musculus
  siRNA target sequence for Slc36a3 (NM_172258.2,595-613).
ggagttttgtgaactatga

SEQ ID NO: 641860 - DNA, 19 bp, Mus musculus
  siRNA target sequence for Slc36a3 (NM_172258.2,727-745).
gcagcgtgtacttcatgtt

SEQ ID NO: 641861 - DNA, 19 bp, Mus musculus
  siRNA target sequence for Slc36a3 (NM_172258.2,728-746).
cagcgtgtacttcatgttt

SEQ ID NO: 641862 - DNA, 19 bp, Mus musculus
  siRNA target sequence for Slc36a3 (NM_172258.2,836-854).
cctggacactcgcttctat

SEQ ID NO: 641863 - DNA, 19 bp, Mus musculus
  siRNA target sequence for Slc36a3 (NM_172258.2,837-855).
ctggacactcgcttctata

SEQ ID NO: 641864 - DNA, 19 bp, Mus musculus
  siRNA target sequence for Slc36a3 (NM_172258.2,1079-1097).
gatggttctgcctctcaaa

SEQ ID NO: 641865 - DNA, 19 bp, Mus musculus
  siRNA target sequence for Slc36a3 (NM_172258.2,1592-1610).
cctcttagggtgtgtactt

SEQ ID NO: 641866 - DNA, 19 bp, Mus musculus
  siRNA target sequence for Slc36a4 (NM_172289.3,56-74).
gatgcgaggagctcgatat

SEQ ID NO: 641867 - DNA, 19 bp, Mus musculus
  siRNA target sequence for Slc36a4 (NM_172289.3,78-96).
cgtgatgaggcccttaata

SEQ ID NO: 641868 - DNA, 19 bp, Mus musculus
  siRNA target sequence for Slc36a4 (NM_172289.3,143-161).
cgcttgtgcccatacagaa

SEQ ID NO: 641869 - DNA, 19 bp, Mus musculus
  siRNA target sequence for Slc36a4 (NM_172289.3,178-196).
gggcagcacgggatttcgt

SEQ ID NO: 641870 - DNA, 19 bp, Mus musculus
  siRNA target sequence for Slc36a4 (NM_172289.3,231-249).
catcgggactggcctttta

SEQ ID NO: 641871 - DNA, 19 bp, Mus musculus
  siRNA target sequence for Slc36a4 (NM_172289.3,250-268).
gggctccccttggctataa

SEQ ID NO: 641872 - DNA, 19 bp, Mus musculus
  siRNA target sequence for Slc36a4 (NM_172289.3,251-269).
ggctccccttggctataaa

SEQ ID NO: 641873 - DNA, 19 bp, Mus musculus
  siRNA target sequence for Slc36a4 (NM_172289.3,325-343).
gtccactgtatgcacatat

SEQ ID NO: 641874 - DNA, 19 bp, Mus musculus
  siRNA target sequence for Slc36a4 (NM_172289.3,345-363).
ggtacgttgcagtcacttt

SEQ ID NO: 641875 - DNA, 19 bp, Mus musculus
  siRNA target sequence for Slc36a4 (NM_172289.3,353-371).
gcagtcactttctatgtca

SEQ ID NO: 641876 - DNA, 19 bp, Mus musculus
  siRNA target sequence for Slc36a4 (NM_172289.3,470-488).
ggagcgtggtcgacttctt

SEQ ID NO: 641877 - DNA, 19 bp, Mus musculus
  siRNA target sequence for Slc36a4 (NM_172289.3,471-489).
gagcgtggtcgacttcttt

SEQ ID NO: 641878 - DNA, 19 bp, Mus musculus
  siRNA target sequence for Slc36a4 (NM_172289.3,483-501).
cttctttctggtgataaca

SEQ ID NO: 641879 - DNA, 19 bp, Mus musculus
  siRNA target sequence for Slc36a4 (NM_172289.3,515-533).
gcagcgtctacattgtctt

SEQ ID NO: 641880 - DNA, 19 bp, Mus musculus
  siRNA target sequence for Slc36a4 (NM_172289.3,573-591).
ggggagcacgccgattgtt

SEQ ID NO: 641881 - DNA, 19 bp, Mus musculus
  siRNA target sequence for Slc36a4 (NM_172289.3,574-592).
gggagcacgccgattgttt

SEQ ID NO: 641882 - DNA, 19 bp, Mus musculus
  siRNA target sequence for Slc36a4 (NM_172289.3,576-594).
gagcacgccgattgtttca

SEQ ID NO: 641883 - DNA, 19 bp, Mus musculus
  siRNA target sequence for Slc36a4 (NM_172289.3,578-596).
gcacgccgattgtttcaaa

SEQ ID NO: 641884 - DNA, 19 bp, Mus musculus
  siRNA target sequence for Slc36a4 (NM_172289.3,659-677).
gctttctcccacttataat

SEQ ID NO: 641885 - DNA, 19 bp, Mus musculus
  siRNA target sequence for Slc36a4 (NM_172289.3,660-678).
ctttctcccacttataatt

SEQ ID NO: 641886 - DNA, 19 bp, Mus musculus
  siRNA target sequence for Slc36a4 (NM_172289.3,690-708).
cattcgcgagctgaagaat

SEQ ID NO: 641887 - DNA, 19 bp, Mus musculus
  siRNA target sequence for Slc36a4 (NM_172289.3,694-712).
cgcgagctgaagaatctct

SEQ ID NO: 641888 - DNA, 19 bp, Mus musculus
  siRNA target sequence for Slc36a4 (NM_172289.3,745-763).
gctgccagtcttgtgataa

SEQ ID NO: 641889 - DNA, 19 bp, Mus musculus
  siRNA target sequence for Slc36a4 (NM_172289.3,748-766).
gccagtcttgtgataattt

SEQ ID NO: 641890 - DNA, 19 bp, Mus musculus
  siRNA target sequence for Slc36a4 (NM_172289.3,797-815).
cccacaaccttccaatagt

SEQ ID NO: 641891 - DNA, 19 bp, Mus musculus
  siRNA target sequence for Slc36a4 (NM_172289.3,885-903).
gctaccactggaaaaccaa

SEQ ID NO: 641892 - DNA, 19 bp, Mus musculus
  siRNA target sequence for Slc36a4 (NM_172289.3,889-907).
ccactggaaaaccaaatga

SEQ ID NO: 641893 - DNA, 19 bp, Mus musculus
  siRNA target sequence for Slc36a4 (NM_172289.3,920-938).
gcttccctcaggcattgaa

SEQ ID NO: 641894 - DNA, 19 bp, Mus musculus
  siRNA target sequence for Slc36a4 (NM_172289.3,969-987).
catcagcctagccacttta

SEQ ID NO: 641895 - DNA, 19 bp, Mus musculus
  siRNA target sequence for Slc36a4 (NM_172289.3,979-997).
gccactttaggctacatgt

SEQ ID NO: 641896 - DNA, 19 bp, Mus musculus
  siRNA target sequence for Slc36a4 (NM_172289.3,983-1001).
ctttaggctacatgtgttt

SEQ ID NO: 641897 - DNA, 19 bp, Mus musculus
  siRNA target sequence for Slc36a4 (NM_172289.3,998-1016).
gtttccgtgacgagatcaa

SEQ ID NO: 641898 - DNA, 19 bp, Mus musculus
  siRNA target sequence for Slc36a4 (NM_172289.3,1041-1059).
ccaggacatgtggttgtat

SEQ ID NO: 641899 - DNA, 19 bp, Mus musculus
  siRNA target sequence for Slc36a4 (NM_172289.3,1045-1063).
gacatgtggttgtatcagt

SEQ ID NO: 641900 - DNA, 19 bp, Mus musculus
  siRNA target sequence for Slc36a4 (NM_172289.3,1089-1107).
catttttgtgacctattca

SEQ ID NO: 641901 - DNA, 19 bp, Mus musculus
  siRNA target sequence for Slc36a4 (NM_172289.3,1096-1114).
gtgacctattcaattcagt

SEQ ID NO: 641902 - DNA, 19 bp, Mus musculus
  siRNA target sequence for Slc36a4 (NM_172289.3,1101-1119).
ctattcaattcagttctat

SEQ ID NO: 641903 - DNA, 19 bp, Mus musculus
  siRNA target sequence for Slc36a4 (NM_172289.3,1157-1175).
gacttcatgccaaatggaa

SEQ ID NO: 641904 - DNA, 19 bp, Mus musculus
  siRNA target sequence for Slc36a4 (NM_172289.3,1167-1185).
caaatggaagcgcatttgt

SEQ ID NO: 641905 - DNA, 19 bp, Mus musculus
  siRNA target sequence for Slc36a4 (NM_172289.3,1172-1190).
ggaagcgcatttgtgaatt

SEQ ID NO: 641906 - DNA, 19 bp, Mus musculus
  siRNA target sequence for Slc36a4 (NM_172289.3,1173-1191).
gaagcgcatttgtgaattt

SEQ ID NO: 641907 - DNA, 19 bp, Mus musculus
  siRNA target sequence for Slc36a4 (NM_172289.3,1198-1216).
cggtccctcttggttagta

SEQ ID NO: 641908 - DNA, 19 bp, Mus musculus
  siRNA target sequence for Slc36a4 (NM_172289.3,1199-1217).
ggtccctcttggttagtat

SEQ ID NO: 641909 - DNA, 19 bp, Mus musculus
  siRNA target sequence for Slc36a4 (NM_172289.3,1223-1241).
gtgctggggcgattctcat

SEQ ID NO: 641910 - DNA, 19 bp, Mus musculus
  siRNA target sequence for Slc36a4 (NM_172289.3,1239-1257).
cattcctcgcctagacatt

SEQ ID NO: 641911 - DNA, 19 bp, Mus musculus
  siRNA target sequence for Slc36a4 (NM_172289.3,1243-1261).
cctcgcctagacattgtga

SEQ ID NO: 641912 - DNA, 19 bp, Mus musculus
  siRNA target sequence for Slc36a4 (NM_172289.3,1244-1262).
ctcgcctagacattgtgat

SEQ ID NO: 641913 - DNA, 19 bp, Mus musculus
  siRNA target sequence for Slc36a4 (NM_172289.3,1310-1328).
ccccacttgtggaaatcct

SEQ ID NO: 641914 - DNA, 19 bp, Mus musculus
  siRNA target sequence for Slc36a4 (NM_172289.3,1315-1333).
cttgtggaaatccttacat

SEQ ID NO: 641915 - DNA, 19 bp, Mus musculus
  siRNA target sequence for Slc36a4 (NM_172289.3,1342-1360).
gaccactacaacatatgga

SEQ ID NO: 641916 - DNA, 19 bp, Mus musculus
  siRNA target sequence for Slc36a4 (NM_172289.3,1394-1412).
gagtcgtgggcttcttgtt

SEQ ID NO: 641917 - DNA, 19 bp, Mus musculus
  siRNA target sequence for Slc36a4 (NM_172289.3,1425-1443).
cactgttgaagaaattatt

SEQ ID NO: 641918 - DNA, 19 bp, Mus musculus
  siRNA target sequence for Slc36a4 (NM_172289.3,1500-1518).
ctctacatgcataacaagt

SEQ ID NO: 641919 - DNA, 19 bp, Mus musculus
  siRNA target sequence for Slc38a1 (NM_134086.2,70-88).
cggtgcccgaagatgacaa

SEQ ID NO: 641920 - DNA, 19 bp, Mus musculus
  siRNA target sequence for Slc38a1 (NM_134086.2,89-107).
cgtcagcaacgactctaat

SEQ ID NO: 641921 - DNA, 19 bp, Mus musculus
  siRNA target sequence for Slc38a1 (NM_134086.2,94-112).
gcaacgactctaatgactt

SEQ ID NO: 641922 - DNA, 19 bp, Mus musculus
  siRNA target sequence for Slc38a1 (NM_134086.2,120-138).
gtagaaaacggccagataa

SEQ ID NO: 641923 - DNA, 19 bp, Mus musculus
  siRNA target sequence for Slc38a1 (NM_134086.2,123-141).
gaaaacggccagataaata

SEQ ID NO: 641924 - DNA, 19 bp, Mus musculus
  siRNA target sequence for Slc38a1 (NM_134086.2,202-220).
ggaaatgcgacgagtatat

SEQ ID NO: 641925 - DNA, 19 bp, Mus musculus
  siRNA target sequence for Slc38a1 (NM_134086.2,203-221).
gaaatgcgacgagtatatt

SEQ ID NO: 641926 - DNA, 19 bp, Mus musculus
  siRNA target sequence for Slc38a1 (NM_134086.2,320-338).
gatcctcctctttctgata

SEQ ID NO: 641927 - DNA, 19 bp, Mus musculus
  siRNA target sequence for Slc38a1 (NM_134086.2,349-367).
cggtgacactgctgtctat

SEQ ID NO: 641928 - DNA, 19 bp, Mus musculus
  siRNA target sequence for Slc38a1 (NM_134086.2,406-424).
ccggctgcatggtgtatga

SEQ ID NO: 641929 - DNA, 19 bp, Mus musculus
  siRNA target sequence for Slc38a1 (NM_134086.2,454-472).
cggggaagctggtgatctt

SEQ ID NO: 641930 - DNA, 19 bp, Mus musculus
  siRNA target sequence for Slc38a1 (NM_134086.2,656-674).
gaagaacctggggtatctt

SEQ ID NO: 641931 - DNA, 19 bp, Mus musculus
  siRNA target sequence for Slc38a1 (NM_134086.2,704-722).
catgatgtttttcctaata

SEQ ID NO: 641932 - DNA, 19 bp, Mus musculus
  siRNA target sequence for Slc38a1 (NM_134086.2,717-735).
ctaatagtggtcatctaca

SEQ ID NO: 641933 - DNA, 19 bp, Mus musculus
  siRNA target sequence for Slc38a1 (NM_134086.2,725-743).
ggtcatctacaagaaattt

SEQ ID NO: 641934 - DNA, 19 bp, Mus musculus
  siRNA target sequence for Slc38a1 (NM_134086.2,773-791).
ctcgacagtcagtgctaat

SEQ ID NO: 641935 - DNA, 19 bp, Mus musculus
  siRNA target sequence for Slc38a1 (NM_134086.2,775-793).
cgacagtcagtgctaatgt

SEQ ID NO: 641936 - DNA, 19 bp, Mus musculus
  siRNA target sequence for Slc38a1 (NM_134086.2,800-818).
cgcgtgcacaccaaagtat

SEQ ID NO: 641937 - DNA, 19 bp, Mus musculus
  siRNA target sequence for Slc38a1 (NM_134086.2,802-820).
cgtgcacaccaaagtatgt

SEQ ID NO: 641938 - DNA, 19 bp, Mus musculus
  siRNA target sequence for Slc38a1 (NM_134086.2,883-901).
cgtccgtcctgccaatcta

SEQ ID NO: 641939 - DNA, 19 bp, Mus musculus
  siRNA target sequence for Slc38a1 (NM_134086.2,915-933).
gaccggtcacagaagaaaa

SEQ ID NO: 641940 - DNA, 19 bp, Mus musculus
  siRNA target sequence for Slc38a1 (NM_134086.2,936-954).
cagatggtttccaacatct

SEQ ID NO: 641941 - DNA, 19 bp, Mus musculus
  siRNA target sequence for Slc38a1 (NM_134086.2,953-971).
ctccttctttgctatgttt

SEQ ID NO: 641942 - DNA, 19 bp, Mus musculus
  siRNA target sequence for Slc38a1 (NM_134086.2,955-973).
ccttctttgctatgtttgt

SEQ ID NO: 641943 - DNA, 19 bp, Mus musculus
  siRNA target sequence for Slc38a1 (NM_134086.2,964-982).
ctatgtttgtcatgtactt

SEQ ID NO: 641944 - DNA, 19 bp, Mus musculus
  siRNA target sequence for Slc38a1 (NM_134086.2,1001-1019).
gtacttgacgttttatgaa

SEQ ID NO: 641945 - DNA, 19 bp, Mus musculus
  siRNA target sequence for Slc38a1 (NM_134086.2,1054-1072).
gcacaggcgacattctcat

SEQ ID NO: 641946 - DNA, 19 bp, Mus musculus
  siRNA target sequence for Slc38a1 (NM_134086.2,1059-1077).
ggcgacattctcatcctaa

SEQ ID NO: 641947 - DNA, 19 bp, Mus musculus
  siRNA target sequence for Slc38a1 (NM_134086.2,1114-1132).
ccgtgcctgtgctgttttt

SEQ ID NO: 641948 - DNA, 19 bp, Mus musculus
  siRNA target sequence for Slc38a1 (NM_134086.2,1133-1151).
cacagttcgatcatcgtta

SEQ ID NO: 641949 - DNA, 19 bp, Mus musculus
  siRNA target sequence for Slc38a1 (NM_134086.2,1135-1153).
cagttcgatcatcgttatt

SEQ ID NO: 641950 - DNA, 19 bp, Mus musculus
  siRNA target sequence for Slc38a1 (NM_134086.2,1278-1296).
ggagtcacgtctgctaata

SEQ ID NO: 641951 - DNA, 19 bp, Mus musculus
  siRNA target sequence for Slc38a1 (NM_134086.2,1279-1297).
gagtcacgtctgctaatat

SEQ ID NO: 641952 - DNA, 19 bp, Mus musculus
  siRNA target sequence for Slc38a1 (NM_134086.2,1290-1308).
gctaatatgctcattttca

SEQ ID NO: 641953 - DNA, 19 bp, Mus musculus
  siRNA target sequence for Slc38a1 (NM_134086.2,1314-1332).
ccttcgtctctttatttaa

SEQ ID NO: 641954 - DNA, 19 bp, Mus musculus
  siRNA target sequence for Slc38a1 (NM_134086.2,1315-1333).
cttcgtctctttatttaaa

SEQ ID NO: 641955 - DNA, 19 bp, Mus musculus
  siRNA target sequence for Slc38a1 (NM_134086.2,1350-1368).
ggagataaaggcactcaaa

SEQ ID NO: 641956 - DNA, 19 bp, Mus musculus
  siRNA target sequence for Slc38a1 (NM_134086.2,1401-1419).
gtgttgttctccttgatca

SEQ ID NO: 641957 - DNA, 19 bp, Mus musculus
  siRNA target sequence for Slc38a3 (NM_023805.2,419-437).
gcaagggcttccttcagaa

SEQ ID NO: 641958 - DNA, 19 bp, Mus musculus
  siRNA target sequence for Slc38a3 (NM_023805.2,455-473).
cacacttcaccgatttcga

SEQ ID NO: 641959 - DNA, 19 bp, Mus musculus
  siRNA target sequence for Slc38a3 (NM_023805.2,598-616).
gcggtcgccctgttgtcta

SEQ ID NO: 641960 - DNA, 19 bp, Mus musculus
  siRNA target sequence for Slc38a3 (NM_023805.2,603-621).
cgccctgttgtctagctat

SEQ ID NO: 641961 - DNA, 19 bp, Mus musculus
  siRNA target sequence for Slc38a3 (NM_023805.2,604-622).
gccctgttgtctagctatt

SEQ ID NO: 641962 - DNA, 19 bp, Mus musculus
  siRNA target sequence for Slc38a3 (NM_023805.2,607-625).
ctgttgtctagctattcca

SEQ ID NO: 641963 - DNA, 19 bp, Mus musculus
  siRNA target sequence for Slc38a3 (NM_023805.2,729-747).
cattacgcttcagaacatt

SEQ ID NO: 641964 - DNA, 19 bp, Mus musculus
  siRNA target sequence for Slc38a3 (NM_023805.2,752-770).
ccatgtccagctacctata

SEQ ID NO: 641965 - DNA, 19 bp, Mus musculus
  siRNA target sequence for Slc38a3 (NM_023805.2,966-984).
cttgatcgcagtcatctat

SEQ ID NO: 641966 - DNA, 19 bp, Mus musculus
  siRNA target sequence for Slc38a3 (NM_023805.2,1263-1281).
gtccattgctgtcatgtat

SEQ ID NO: 641967 - DNA, 19 bp, Mus musculus
  siRNA target sequence for Slc38a3 (NM_023805.2,1265-1283).
ccattgctgtcatgtatgt

SEQ ID NO: 641968 - DNA, 19 bp, Mus musculus
  siRNA target sequence for Slc38a3 (NM_023805.2,1362-1380).
caaggtggacccgtttgat

SEQ ID NO: 641969 - DNA, 19 bp, Mus musculus
  siRNA target sequence for Slc38a3 (NM_023805.2,1411-1429).
ctgatagcggtcacactta

SEQ ID NO: 641970 - DNA, 19 bp, Mus musculus
  siRNA target sequence for Slc38a3 (NM_023805.2,1413-1431).
gatagcggtcacacttaca

SEQ ID NO: 641971 - DNA, 19 bp, Mus musculus
  siRNA target sequence for Slc38a3 (NM_023805.2,1430-1448).
cagttccgattgttctgtt

SEQ ID NO: 641972 - DNA, 19 bp, Mus musculus
  siRNA target sequence for Slc38a3 (NM_023805.2,1530-1548).
cctgcttacgtgcatcaat

SEQ ID NO: 641973 - DNA, 19 bp, Mus musculus
  siRNA target sequence for Slc38a3 (NM_023805.2,1578-1596).
gggcatatttgggatcatt

SEQ ID NO: 641974 - DNA, 19 bp, Mus musculus
  siRNA target sequence for Slc38a3 (NM_023805.2,1609-1627).
gctccgtgcctcatcttca

SEQ ID NO: 641975 - DNA, 19 bp, Mus musculus
  siRNA target sequence for Slc38a4 (NM_027052.2,199-217).
gctacaccggcatggaaaa

SEQ ID NO: 641976 - DNA, 19 bp, Mus musculus
  siRNA target sequence for Slc38a4 (NM_027052.2,230-248).
cgccatgaacagccaattt

SEQ ID NO: 641977 - DNA, 19 bp, Mus musculus
  siRNA target sequence for Slc38a4 (NM_027052.2,233-251).
catgaacagccaatttgct

SEQ ID NO: 641978 - DNA, 19 bp, Mus musculus
  siRNA target sequence for Slc38a4 (NM_027052.2,236-254).
gaacagccaatttgctaat

SEQ ID NO: 641979 - DNA, 19 bp, Mus musculus
  siRNA target sequence for Slc38a4 (NM_027052.2,239-257).
cagccaatttgctaatgaa

SEQ ID NO: 641980 - DNA, 19 bp, Mus musculus
  siRNA target sequence for Slc38a4 (NM_027052.2,278-296).
cctgacaaatgggttttta

SEQ ID NO: 641981 - DNA, 19 bp, Mus musculus
  siRNA target sequence for Slc38a4 (NM_027052.2,288-306).
gggtttttagggaagaaga

SEQ ID NO: 641982 - DNA, 19 bp, Mus musculus
  siRNA target sequence for Slc38a4 (NM_027052.2,329-347).
gcatcaccctggaatgact

SEQ ID NO: 641983 - DNA, 19 bp, Mus musculus
  siRNA target sequence for Slc38a4 (NM_027052.2,350-368).
ctttggaatgtcctcattt

SEQ ID NO: 641984 - DNA, 19 bp, Mus musculus
  siRNA target sequence for Slc38a4 (NM_027052.2,355-373).
gaatgtcctcatttaacct

SEQ ID NO: 641985 - DNA, 19 bp, Mus musculus
  siRNA target sequence for Slc38a4 (NM_027052.2,431-449).
cgggatcatcctttttata

SEQ ID NO: 641986 - DNA, 19 bp, Mus musculus
  siRNA target sequence for Slc38a4 (NM_027052.2,459-477).
cttactgtggcaatactct

SEQ ID NO: 641987 - DNA, 19 bp, Mus musculus
  siRNA target sequence for Slc38a4 (NM_027052.2,520-538).
gagggtctctaatctatga

SEQ ID NO: 641988 - DNA, 19 bp, Mus musculus
  siRNA target sequence for Slc38a4 (NM_027052.2,546-564).
ggcgagaaagcatttggat

SEQ ID NO: 641989 - DNA, 19 bp, Mus musculus
  siRNA target sequence for Slc38a4 (NM_027052.2,583-601).
ccttcatctctattacaat

SEQ ID NO: 641990 - DNA, 19 bp, Mus musculus
  siRNA target sequence for Slc38a4 (NM_027052.2,592-610).
ctattacaatgcagaacat

SEQ ID NO: 641991 - DNA, 19 bp, Mus musculus
  siRNA target sequence for Slc38a4 (NM_027052.2,625-643).
gctacctcttcatcattaa

SEQ ID NO: 641992 - DNA, 19 bp, Mus musculus
  siRNA target sequence for Slc38a4 (NM_027052.2,644-662).
gtacgaactgcctgaagta

SEQ ID NO: 641993 - DNA, 19 bp, Mus musculus
  siRNA target sequence for Slc38a4 (NM_027052.2,648-666).
gaactgcctgaagtaatca

SEQ ID NO: 641994 - DNA, 19 bp, Mus musculus
  siRNA target sequence for Slc38a4 (NM_027052.2,714-732).
ggcaactacctcgtcttat

SEQ ID NO: 641995 - DNA, 19 bp, Mus musculus
  siRNA target sequence for Slc38a4 (NM_027052.2,715-733).
gcaactacctcgtcttatt

SEQ ID NO: 641996 - DNA, 19 bp, Mus musculus
  siRNA target sequence for Slc38a4 (NM_027052.2,716-734).
caactacctcgtcttattt

SEQ ID NO: 641997 - DNA, 19 bp, Mus musculus
  siRNA target sequence for Slc38a4 (NM_027052.2,756-774).
ccgctctctctccttaaaa

SEQ ID NO: 641998 - DNA, 19 bp, Mus musculus
  siRNA target sequence for Slc38a4 (NM_027052.2,757-775).
cgctctctctccttaaaaa

SEQ ID NO: 641999 - DNA, 19 bp, Mus musculus
  siRNA target sequence for Slc38a4 (NM_027052.2,814-832).
cctgcatggtgtttttcgt

SEQ ID NO: 642000 - DNA, 19 bp, Mus musculus
  siRNA target sequence for Slc38a4 (NM_027052.2,888-906).
cacaacaacggaaatctga

SEQ ID NO: 642001 - DNA, 19 bp, Mus musculus
  siRNA target sequence for Slc38a4 (NM_027052.2,919-937).
cacttccgattcacatgat

SEQ ID NO: 642002 - DNA, 19 bp, Mus musculus
  siRNA target sequence for Slc38a4 (NM_027052.2,921-939).
cttccgattcacatgatct

SEQ ID NO: 642003 - DNA, 19 bp, Mus musculus
  siRNA target sequence for Slc38a4 (NM_027052.2,1084-1102).
gccaaccaaaatactttgt

SEQ ID NO: 642004 - DNA, 19 bp, Mus musculus
  siRNA target sequence for Slc38a4 (NM_027052.2,1111-1129).
cccggacggcctatgcaat

SEQ ID NO: 642005 - DNA, 19 bp, Mus musculus
  siRNA target sequence for Slc38a4 (NM_027052.2,1194-1212).
gatcgatcccgcagaaaga

SEQ ID NO: 642006 - DNA, 19 bp, Mus musculus
  siRNA target sequence for Slc38a4 (NM_027052.2,1214-1232).
gcagacggtgtccaacatt

SEQ ID NO: 642007 - DNA, 19 bp, Mus musculus
  siRNA target sequence for Slc38a4 (NM_027052.2,1215-1233).
cagacggtgtccaacattt

SEQ ID NO: 642008 - DNA, 19 bp, Mus musculus
  siRNA target sequence for Slc38a4 (NM_027052.2,1219-1237).
cggtgtccaacatttccat

SEQ ID NO: 642009 - DNA, 19 bp, Mus musculus
  siRNA target sequence for Slc38a4 (NM_027052.2,1331-1349).
caaggtctacacatttgat

SEQ ID NO: 642010 - DNA, 19 bp, Mus musculus
  siRNA target sequence for Slc38a4 (NM_027052.2,1485-1503).
gggatcgctgcaatcatca

SEQ ID NO: 642011 - DNA, 19 bp, Mus musculus
  siRNA target sequence for Slc38a4 (NM_027052.2,1486-1504).
ggatcgctgcaatcatcat

SEQ ID NO: 642012 - DNA, 19 bp, Mus musculus
  siRNA target sequence for Slc38a4 (NM_027052.2,1529-1547).
cctcgtgcctaccatcaaa

SEQ ID NO: 642013 - DNA, 19 bp, Mus musculus
  siRNA target sequence for Slc38a4 (NM_027052.2,1530-1548).
ctcgtgcctaccatcaaat

SEQ ID NO: 642014 - DNA, 19 bp, Mus musculus
  siRNA target sequence for Slc38a4 (NM_027052.2,1533-1551).
gtgcctaccatcaaataca

SEQ ID NO: 642015 - DNA, 19 bp, Mus musculus
  siRNA target sequence for Slc38a4 (NM_027052.2,1578-1596).
gccactatgctgattttca

SEQ ID NO: 642016 - DNA, 19 bp, Mus musculus
  siRNA target sequence for Slc38a4 (NM_027052.2,1579-1597).
ccactatgctgattttcat

SEQ ID NO: 642017 - DNA, 19 bp, Mus musculus
  siRNA target sequence for Slc38a4 (NM_027052.2,1602-1620).
ccggctgcgttttatctca

SEQ ID NO: 642018 - DNA, 19 bp, Mus musculus
  siRNA target sequence for Slc38a4 (NM_027052.2,1603-1621).
cggctgcgttttatctcaa

SEQ ID NO: 642019 - DNA, 19 bp, Mus musculus
  siRNA target sequence for Slc38a4 (NM_027052.2,1676-1694).
ccttgtgactggaattatt

SEQ ID NO: 642020 - DNA, 19 bp, Mus musculus
  siRNA target sequence for Slc38a4 (NM_027052.2,1677-1695).
cttgtgactggaattattt

SEQ ID NO: 642021 - DNA, 19 bp, Mus musculus
  siRNA target sequence for Slc38a4 (NM_027052.2,1708-1726).
gcatggcgctcattatact

SEQ ID NO: 642022 - DNA, 19 bp, Mus musculus
  siRNA target sequence for Slc7a12 (NM_080852.1,134-152).
ctaggagtcttccatgtaa

SEQ ID NO: 642023 - DNA, 19 bp, Mus musculus
  siRNA target sequence for Slc7a12 (NM_080852.1,145-163).
ccatgtaagcatgatctta

SEQ ID NO: 642024 - DNA, 19 bp, Mus musculus
  siRNA target sequence for Slc7a12 (NM_080852.1,146-164).
catgtaagcatgatcttat

SEQ ID NO: 642025 - DNA, 19 bp, Mus musculus
  siRNA target sequence for Slc7a12 (NM_080852.1,149-167).
gtaagcatgatcttattta

SEQ ID NO: 642026 - DNA, 19 bp, Mus musculus
  siRNA target sequence for Slc7a12 (NM_080852.1,196-214).
gactcctaaagcagtatta

SEQ ID NO: 642027 - DNA, 19 bp, Mus musculus
  siRNA target sequence for Slc7a12 (NM_080852.1,198-216).
ctcctaaagcagtattaaa

SEQ ID NO: 642028 - DNA, 19 bp, Mus musculus
  siRNA target sequence for Slc7a12 (NM_080852.1,283-301).
gagtgcgctctgtaatgca

SEQ ID NO: 642029 - DNA, 19 bp, Mus musculus
  siRNA target sequence for Slc7a12 (NM_080852.1,321-339).
ctttgagtggagcatctta

SEQ ID NO: 642030 - DNA, 19 bp, Mus musculus
  siRNA target sequence for Slc7a12 (NM_080852.1,327-345).
gtggagcatcttattattt

SEQ ID NO: 642031 - DNA, 19 bp, Mus musculus
  siRNA target sequence for Slc7a12 (NM_080852.1,382-400).
cagtctctggattaaactt

SEQ ID NO: 642032 - DNA, 19 bp, Mus musculus
  siRNA target sequence for Slc7a12 (NM_080852.1,436-454).
gctaatagctacttctgta

SEQ ID NO: 642033 - DNA, 19 bp, Mus musculus
  siRNA target sequence for Slc7a12 (NM_080852.1,437-455).
ctaatagctacttctgtaa

SEQ ID NO: 642034 - DNA, 19 bp, Mus musculus
  siRNA target sequence for Slc7a12 (NM_080852.1,452-470).
gtaatccagtgtttctatt

SEQ ID NO: 642035 - DNA, 19 bp, Mus musculus
  siRNA target sequence for Slc7a12 (NM_080852.1,485-503).
ccagagctaccaacgaaat

SEQ ID NO: 642036 - DNA, 19 bp, Mus musculus
  siRNA target sequence for Slc7a12 (NM_080852.1,546-564).
ctcgagggataaaaacagt

SEQ ID NO: 642037 - DNA, 19 bp, Mus musculus
  siRNA target sequence for Slc7a12 (NM_080852.1,682-700).
ggatgctgaacttcctaat

SEQ ID NO: 642038 - DNA, 19 bp, Mus musculus
  siRNA target sequence for Slc7a12 (NM_080852.1,727-745).
ccaagtgtcctactcatat

SEQ ID NO: 642039 - DNA, 19 bp, Mus musculus
  siRNA target sequence for Slc7a12 (NM_080852.1,739-757).
ctcatatctaggatcatca

SEQ ID NO: 642040 - DNA, 19 bp, Mus musculus
  siRNA target sequence for Slc7a12 (NM_080852.1,790-808).
gccaactgaaacaattcca

SEQ ID NO: 642041 - DNA, 19 bp, Mus musculus
  siRNA target sequence for Slc7a12 (NM_080852.1,844-862).
gttatacttactgactaat

SEQ ID NO: 642042 - DNA, 19 bp, Mus musculus
  siRNA target sequence for Slc7a12 (NM_080852.1,850-868).
cttactgactaatatatca

SEQ ID NO: 642043 - DNA, 19 bp, Mus musculus
  siRNA target sequence for Slc7a12 (NM_080852.1,854-872).
ctgactaatatatcatact

SEQ ID NO: 642044 - DNA, 19 bp, Mus musculus
  siRNA target sequence for Slc7a12 (NM_080852.1,949-967).
catacaatggataagttca

SEQ ID NO: 642045 - DNA, 19 bp, Mus musculus
  siRNA target sequence for Slc7a12 (NM_080852.1,957-975).
ggataagttcattcttgat

SEQ ID NO: 642046 - DNA, 19 bp, Mus musculus
  siRNA target sequence for Slc7a12 (NM_080852.1,996-1014).
ccgtttcttgtggaatagt

SEQ ID NO: 642047 - DNA, 19 bp, Mus musculus
  siRNA target sequence for Slc7a12 (NM_080852.1,1013-1031).
gtttctgcatcaagagtat

SEQ ID NO: 642048 - DNA, 19 bp, Mus musculus
  siRNA target sequence for Slc7a12 (NM_080852.1,1017-1035).
ctgcatcaagagtattcta

SEQ ID NO: 642049 - DNA, 19 bp, Mus musculus
  siRNA target sequence for Slc7a12 (NM_080852.1,1041-1059).
caagtcaagagggagaatt

SEQ ID NO: 642050 - DNA, 19 bp, Mus musculus
  siRNA target sequence for Slc7a12 (NM_080852.1,1052-1070).
ggagaatttccttctatct

SEQ ID NO: 642051 - DNA, 19 bp, Mus musculus
  siRNA target sequence for Slc7a12 (NM_080852.1,1053-1071).
gagaatttccttctatcta

SEQ ID NO: 642052 - DNA, 19 bp, Mus musculus
  siRNA target sequence for Slc7a12 (NM_080852.1,1065-1083).
ctatctactcaatgcttaa

SEQ ID NO: 642053 - DNA, 19 bp, Mus musculus
  siRNA target sequence for Slc7a12 (NM_080852.1,1069-1087).
ctactcaatgcttaatgat

SEQ ID NO: 642054 - DNA, 19 bp, Mus musculus
  siRNA target sequence for Slc7a12 (NM_080852.1,1072-1090).
ctcaatgcttaatgatcat

SEQ ID NO: 642055 - DNA, 19 bp, Mus musculus
  siRNA target sequence for Slc7a12 (NM_080852.1,1074-1092).
caatgcttaatgatcatca

SEQ ID NO: 642056 - DNA, 19 bp, Mus musculus
  siRNA target sequence for Slc7a12 (NM_080852.1,1106-1124).
gctgacatccagattgtta

SEQ ID NO: 642057 - DNA, 19 bp, Mus musculus
  siRNA target sequence for Slc7a12 (NM_080852.1,1109-1127).
gacatccagattgttattt

SEQ ID NO: 642058 - DNA, 19 bp, Mus musculus
  siRNA target sequence for Slc7a12 (NM_080852.1,1136-1154).
gttgcaataatatcttcaa

SEQ ID NO: 642059 - DNA, 19 bp, Mus musculus
  siRNA target sequence for Slc7a12 (NM_080852.1,1178-1196).
gttagtctaggatcatttt

SEQ ID NO: 642060 - DNA, 19 bp, Mus musculus
  siRNA target sequence for Slc7a12 (NM_080852.1,1211-1229).
caaatgatcgggttgctta

SEQ ID NO: 642061 - DNA, 19 bp, Mus musculus
  siRNA target sequence for Slc7a12 (NM_080852.1,1221-1239).
ggttgcttaagataaggta

SEQ ID NO: 642062 - DNA, 19 bp, Mus musculus
  siRNA target sequence for Slc7a12 (NM_080852.1,1237-1255).
gtaccagaaccctgatata

SEQ ID NO: 642063 - DNA, 19 bp, Mus musculus
  siRNA target sequence for Slc7a12 (NM_080852.1,1240-1258).
ccagaaccctgatatacca

SEQ ID NO: 642064 - DNA, 19 bp, Mus musculus
  siRNA target sequence for Slc7a12 (NM_080852.1,1250-1268).
gatataccaagaccttata

SEQ ID NO: 642065 - DNA, 19 bp, Mus musculus
  siRNA target sequence for Slc7a12 (NM_080852.1,1270-1288).
ggtgtggctgccatttata

SEQ ID NO: 642066 - DNA, 19 bp, Mus musculus
  siRNA target sequence for Slc7a12 (NM_080852.1,1344-1362).
ctagtatagagcatgtcta

SEQ ID NO: 642067 - DNA, 19 bp, Mus musculus
  siRNA target sequence for Slc7a12 (NM_080852.1,1347-1365).
gtatagagcatgtctatca

SEQ ID NO: 642068 - DNA, 19 bp, Mus musculus
  siRNA target sequence for Slc7a12 (NM_080852.1,1395-1413).
gttattggcttcaagctaa

SEQ ID NO: 642069 - DNA, 19 bp, Mus musculus
  siRNA target sequence for Slc7a12 (NM_080852.1,1402-1420).
gcttcaagctaaccttaat

SEQ ID NO: 642070 - DNA, 19 bp, Mus musculus
  siRNA target sequence for Slc7a12 (NM_080852.1,1422-1440).
gacatgctacttgttttga

SEQ ID NO: 642071 - DNA, 19 bp, Mus musculus
  siRNA target sequence for Slc7a12 (NM_080852.1,1424-1442).
catgctacttgttttgaca

SEQ ID NO: 642072 - DNA, 19 bp, Mus musculus
  siRNA target sequence for Slc7a12 (NM_080852.1,1428-1446).
ctacttgttttgacacaat

SEQ ID NO: 642073 - DNA, 19 bp, Mus musculus
  siRNA target sequence for Slc7a12 (NM_080852.1,1458-1476).
gccaattacttttcaatat

SEQ ID NO: 642074 - DNA, 19 bp, Mus musculus
  siRNA target sequence for Slc7a13 (NM_028746.2,79-97).
ggaaatccgtcttaagaga

SEQ ID NO: 642075 - DNA, 19 bp, Mus musculus
  siRNA target sequence for Slc7a13 (NM_028746.2,112-130).
ctgggggacaaacttttta

SEQ ID NO: 642076 - DNA, 19 bp, Mus musculus
  siRNA target sequence for Slc7a13 (NM_028746.2,294-312).
gtggggctcactattattt

SEQ ID NO: 642077 - DNA, 19 bp, Mus musculus
  siRNA target sequence for Slc7a13 (NM_028746.2,296-314).
ggggctcactattattttt

SEQ ID NO: 642078 - DNA, 19 bp, Mus musculus
  siRNA target sequence for Slc7a13 (NM_028746.2,373-391).
cggcccaggcttaattgct

SEQ ID NO: 642079 - DNA, 19 bp, Mus musculus
  siRNA target sequence for Slc7a13 (NM_028746.2,374-392).
ggcccaggcttaattgcta

SEQ ID NO: 642080 - DNA, 19 bp, Mus musculus
  siRNA target sequence for Slc7a13 (NM_028746.2,454-472).
gattctaccaagaaaatgt

SEQ ID NO: 642081 - DNA, 19 bp, Mus musculus
  siRNA target sequence for Slc7a13 (NM_028746.2,508-526).
gaattctcgtggtgtaaaa

SEQ ID NO: 642082 - DNA, 19 bp, Mus musculus
  siRNA target sequence for Slc7a13 (NM_028746.2,568-586).
gggcatactcggtgtcatt

SEQ ID NO: 642083 - DNA, 19 bp, Mus musculus
  siRNA target sequence for Slc7a13 (NM_028746.2,569-587).
ggcatactcggtgtcattt

SEQ ID NO: 642084 - DNA, 19 bp, Mus musculus
  siRNA target sequence for Slc7a13 (NM_028746.2,588-606).
ccctcagcggcctgttctt

SEQ ID NO: 642085 - DNA, 19 bp, Mus musculus
  siRNA target sequence for Slc7a13 (NM_028746.2,667-685).
cccagaggtctctcagtta

SEQ ID NO: 642086 - DNA, 19 bp, Mus musculus
  siRNA target sequence for Slc7a13 (NM_028746.2,669-687).
cagaggtctctcagttaat

SEQ ID NO: 642087 - DNA, 19 bp, Mus musculus
  siRNA target sequence for Slc7a13 (NM_028746.2,673-691).
ggtctctcagttaatagaa

SEQ ID NO: 642088 - DNA, 19 bp, Mus musculus
  siRNA target sequence for Slc7a13 (NM_028746.2,678-696).
ctcagttaatagaagctat

SEQ ID NO: 642089 - DNA, 19 bp, Mus musculus
  siRNA target sequence for Slc7a13 (NM_028746.2,693-711).
ctattttccaaggatactt

SEQ ID NO: 642090 - DNA, 19 bp, Mus musculus
  siRNA target sequence for Slc7a13 (NM_028746.2,726-744).
ggggatgctttacatgtat

SEQ ID NO: 642091 - DNA, 19 bp, Mus musculus
  siRNA target sequence for Slc7a13 (NM_028746.2,727-745).
gggatgctttacatgtata

SEQ ID NO: 642092 - DNA, 19 bp, Mus musculus
  siRNA target sequence for Slc7a13 (NM_028746.2,764-782).
cccagtaaaacaattccta

SEQ ID NO: 642093 - DNA, 19 bp, Mus musculus
  siRNA target sequence for Slc7a13 (NM_028746.2,798-816).
gactgcctctggtaactgt

SEQ ID NO: 642094 - DNA, 19 bp, Mus musculus
  siRNA target sequence for Slc7a13 (NM_028746.2,808-826).
ggtaactgtcgtgtactta

SEQ ID NO: 642095 - DNA, 19 bp, Mus musculus
  siRNA target sequence for Slc7a13 (NM_028746.2,881-899).
gatgctgttgctcttacat

SEQ ID NO: 642096 - DNA, 19 bp, Mus musculus
  siRNA target sequence for Slc7a13 (NM_028746.2,991-1009).
gacatcaagagtgttatat

SEQ ID NO: 642097 - DNA, 19 bp, Mus musculus
  siRNA target sequence for Slc7a13 (NM_028746.2,1079-1097).
gctgtgctactaattatca

SEQ ID NO: 642098 - DNA, 19 bp, Mus musculus
  siRNA target sequence for Slc7a13 (NM_028746.2,1096-1114).
cagtatggcatccatttta

SEQ ID NO: 642099 - DNA, 19 bp, Mus musculus
  siRNA target sequence for Slc7a13 (NM_028746.2,1125-1143).
caaacctaattgatctgat

SEQ ID NO: 642100 - DNA, 19 bp, Mus musculus
  siRNA target sequence for Slc7a13 (NM_028746.2,1130-1148).
ctaattgatctgataaact

SEQ ID NO: 642101 - DNA, 19 bp, Mus musculus
  siRNA target sequence for Slc7a13 (NM_028746.2,1136-1154).
gatctgataaactatctct

SEQ ID NO: 642102 - DNA, 19 bp, Mus musculus
  siRNA target sequence for Slc7a13 (NM_028746.2,1139-1157).
ctgataaactatctctatt

SEQ ID NO: 642103 - DNA, 19 bp, Mus musculus
  siRNA target sequence for Slc7a13 (NM_028746.2,1174-1192).
gactgccttatcaataata

SEQ ID NO: 642104 - DNA, 19 bp, Mus musculus
  siRNA target sequence for Slc7a13 (NM_028746.2,1179-1197).
ccttatcaataataggaat

SEQ ID NO: 642105 - DNA, 19 bp, Mus musculus
  siRNA target sequence for Slc7a13 (NM_028746.2,1210-1228).
gtaccaagagcccaatcta

SEQ ID NO: 642106 - DNA, 19 bp, Mus musculus
  siRNA target sequence for Slc7a13 (NM_028746.2,1222-1240).
caatctacacagaccatat

SEQ ID NO: 642107 - DNA, 19 bp, Mus musculus
  siRNA target sequence for Slc7a13 (NM_028746.2,1244-1262).
gtgtttttaccgttcacat

SEQ ID NO: 642108 - DNA, 19 bp, Mus musculus
  siRNA target sequence for Slc7a13 (NM_028746.2,1314-1332).
ctccaaagttgcattatat

SEQ ID NO: 642109 - DNA, 19 bp, Mus musculus
  siRNA target sequence for Slc7a13 (NM_028746.2,1316-1334).
ccaaagttgcattatatct

SEQ ID NO: 642110 - DNA, 19 bp, Mus musculus
  siRNA target sequence for Slc7a13 (NM_028746.2,1317-1335).
caaagttgcattatatcta

SEQ ID NO: 642111 - DNA, 19 bp, Mus musculus
  siRNA target sequence for Slc7a13 (NM_028746.2,1366-1384).
gttttacgtgccattgata

SEQ ID NO: 642112 - DNA, 19 bp, Mus musculus
  siRNA target sequence for Slc7a13 (NM_028746.2,1403-1421).
gtttggtttcagaagttga

SEQ ID NO: 642113 - DNA, 19 bp, Mus musculus
  siRNA target sequence for Slc7a13 (NM_028746.2,1430-1448).
ctgcagttactgtttaata

SEQ ID NO: 642114 - DNA, 19 bp, Mus musculus
  siRNA target sequence for Slc7a13 (NM_028746.2,1467-1485).
ctgatgaccacatacatga

SEQ ID NO: 642115 - DNA, 19 bp, Mus musculus
  siRNA target sequence for Slc7a4 (NM_144852.1,193-211).
cacgcttctgccagaaact

SEQ ID NO: 642116 - DNA, 19 bp, Mus musculus
  siRNA target sequence for Slc7a4 (NM_144852.1,366-384).
gctgtgctcttgtcctttt

SEQ ID NO: 642117 - DNA, 19 bp, Mus musculus
  siRNA target sequence for Slc7a4 (NM_144852.1,456-474).
ggctcagcatacctattca

SEQ ID NO: 642118 - DNA, 19 bp, Mus musculus
  siRNA target sequence for Slc7a4 (NM_144852.1,514-532).
gctggaatgtgcttctaga

SEQ ID NO: 642119 - DNA, 19 bp, Mus musculus
  siRNA target sequence for Slc7a4 (NM_144852.1,515-533).
ctggaatgtgcttctagaa

SEQ ID NO: 642120 - DNA, 19 bp, Mus musculus
  siRNA target sequence for Slc7a4 (NM_144852.1,517-535).
ggaatgtgcttctagaata

SEQ ID NO: 642121 - DNA, 19 bp, Mus musculus
  siRNA target sequence for Slc7a4 (NM_144852.1,566-584).
ctggagtggctatttggat

SEQ ID NO: 642122 - DNA, 19 bp, Mus musculus
  siRNA target sequence for Slc7a4 (NM_144852.1,754-772).
cagccatcagtctgattgt

SEQ ID NO: 642123 - DNA, 19 bp, Mus musculus
  siRNA target sequence for Slc7a4 (NM_144852.1,756-774).
gccatcagtctgattgtga

SEQ ID NO: 642124 - DNA, 19 bp, Mus musculus
  siRNA target sequence for Slc7a4 (NM_144852.1,899-917).
cttcgtgggatttgatgtt

SEQ ID NO: 642125 - DNA, 19 bp, Mus musculus
  siRNA target sequence for Slc7a4 (NM_144852.1,902-920).
cgtgggatttgatgttatt

SEQ ID NO: 642126 - DNA, 19 bp, Mus musculus
  siRNA target sequence for Slc7a4 (NM_144852.1,994-1012).
cagctggtgcctatattct

SEQ ID NO: 642127 - DNA, 19 bp, Mus musculus
  siRNA target sequence for Slc7a4 (NM_144852.1,1011-1029).
ctggtctccactgtgttaa

SEQ ID NO: 642128 - DNA, 19 bp, Mus musculus
  siRNA target sequence for Slc7a4 (NM_144852.1,1066-1084).
cggcgcttgctgatgcttt

SEQ ID NO: 642129 - DNA, 19 bp, Mus musculus
  siRNA target sequence for Slc7a4 (NM_144852.1,1069-1087).
cgcttgctgatgctttcta

SEQ ID NO: 642130 - DNA, 19 bp, Mus musculus
  siRNA target sequence for Slc7a4 (NM_144852.1,1201-1219).
ctgccgatgggctcttctt

SEQ ID NO: 642131 - DNA, 19 bp, Mus musculus
  siRNA target sequence for Slc7a4 (NM_144852.1,1270-1288).
gctcatcagcagcaaaaga

SEQ ID NO: 642132 - DNA, 19 bp, Mus musculus
  siRNA target sequence for Slc7a4 (NM_144852.1,1382-1400).
cctggctacgctttatctt

SEQ ID NO: 642133 - DNA, 19 bp, Mus musculus
  siRNA target sequence for Slc7a4 (NM_144852.1,1411-1429).
gtcggacttgtcgtgtatt

SEQ ID NO: 642134 - DNA, 19 bp, Mus musculus
  siRNA target sequence for Slc7a4 (NM_144852.1,1413-1431).
cggacttgtcgtgtatttt

SEQ ID NO: 642135 - DNA, 19 bp, Mus musculus
  siRNA target sequence for Slc7a4 (NM_144852.1,1487-1505).
cagcacactacgtggtatt

SEQ ID NO: 642136 - DNA, 19 bp, Mus musculus
  siRNA target sequence for Slc7a7 (NM_011405.1,428-446).
ctaagggtgtgctcatgta

SEQ ID NO: 642137 - DNA, 19 bp, Mus musculus
  siRNA target sequence for Slc7a7 (NM_011405.1,529-547).
ctgggtaccaccattaaga

SEQ ID NO: 642138 - DNA, 19 bp, Mus musculus
  siRNA target sequence for Slc7a7 (NM_011405.1,531-549).
gggtaccaccattaagaaa

SEQ ID NO: 642139 - DNA, 19 bp, Mus musculus
  siRNA target sequence for Slc7a7 (NM_011405.1,532-550).
ggtaccaccattaagaaat

SEQ ID NO: 642140 - DNA, 19 bp, Mus musculus
  siRNA target sequence for Slc7a7 (NM_011405.1,750-768).
ctgtctcttaaccttcatt

SEQ ID NO: 642141 - DNA, 19 bp, Mus musculus
  siRNA target sequence for Slc7a7 (NM_011405.1,833-851).
cgctgattgcagtcatcat

SEQ ID NO: 642142 - DNA, 19 bp, Mus musculus
  siRNA target sequence for Slc7a7 (NM_011405.1,876-894).
gggagccacagctaacttt

SEQ ID NO: 642143 - DNA, 19 bp, Mus musculus
  siRNA target sequence for Slc7a7 (NM_011405.1,878-896).
gagccacagctaactttga

SEQ ID NO: 642144 - DNA, 19 bp, Mus musculus
  siRNA target sequence for Slc7a7 (NM_011405.1,880-898).
gccacagctaactttgaga

SEQ ID NO: 642145 - DNA, 19 bp, Mus musculus
  siRNA target sequence for Slc7a7 (NM_011405.1,907-925).
gagggctcatcctttgcaa

SEQ ID NO: 642146 - DNA, 19 bp, Mus musculus
  siRNA target sequence for Slc7a7 (NM_011405.1,918-936).
ctttgcaatgggtgacatt

SEQ ID NO: 642147 - DNA, 19 bp, Mus musculus
  siRNA target sequence for Slc7a7 (NM_011405.1,974-992).
gctgggacacccttaacta

SEQ ID NO: 642148 - DNA, 19 bp, Mus musculus
  siRNA target sequence for Slc7a7 (NM_011405.1,975-993).
ctgggacacccttaactat

SEQ ID NO: 642149 - DNA, 19 bp, Mus musculus
  siRNA target sequence for Slc7a7 (NM_011405.1,1083-1101).
caatgtggcctattacagt

SEQ ID NO: 642150 - DNA, 19 bp, Mus musculus
  siRNA target sequence for Slc7a7 (NM_011405.1,1159-1177).
caaatttttggagtattca

SEQ ID NO: 642151 - DNA, 19 bp, Mus musculus
  siRNA target sequence for Slc7a7 (NM_011405.1,1168-1186).
ggagtattcaattggataa

SEQ ID NO: 642152 - DNA, 19 bp, Mus musculus
  siRNA target sequence for Slc7a7 (NM_011405.1,1169-1187).
gagtattcaattggataat

SEQ ID NO: 642153 - DNA, 19 bp, Mus musculus
  siRNA target sequence for Slc7a7 (NM_011405.1,1240-1258).
gctgcttccaggcttttat

SEQ ID NO: 642154 - DNA, 19 bp, Mus musculus
  siRNA target sequence for Slc7a7 (NM_011405.1,1292-1310).
ccatctgtatggttcatgt

SEQ ID NO: 642155 - DNA, 19 bp, Mus musculus
  siRNA target sequence for Slc7a7 (NM_011405.1,1293-1311).
catctgtatggttcatgtt

SEQ ID NO: 642156 - DNA, 19 bp, Mus musculus
  siRNA target sequence for Slc7a7 (NM_011405.1,1390-1408).
cagctcattaactactata

SEQ ID NO: 642157 - DNA, 19 bp, Mus musculus
  siRNA target sequence for Slc7a7 (NM_011405.1,1546-1564).
gtggctgttccactttaca

SEQ ID NO: 642158 - DNA, 19 bp, Mus musculus
  siRNA target sequence for Slc7a7 (NM_011405.1,1662-1680).
gttcctccgcaggattgta

SEQ ID NO: 642159 - DNA, 19 bp, Mus musculus
  siRNA target sequence for Slc7a7 (NM_011405.1,1701-1719).
ccagatcctctgtatgtca

SEQ ID NO: 642160 - DNA, 19 bp, Mus musculus
  siRNA target sequence for Slc7a9 (NM_021291.1,373-391).
cccacagtactgaactcaa

SEQ ID NO: 642161 - DNA, 19 bp, Mus musculus
  siRNA target sequence for Slc7a9 (NM_021291.1,423-441).
ctcagtggcatctgtatca

SEQ ID NO: 642162 - DNA, 19 bp, Mus musculus
  siRNA target sequence for Slc7a9 (NM_021291.1,425-443).
cagtggcatctgtatcatt

SEQ ID NO: 642163 - DNA, 19 bp, Mus musculus
  siRNA target sequence for Slc7a9 (NM_021291.1,579-597).
gagcttggcacaatgatta

SEQ ID NO: 642164 - DNA, 19 bp, Mus musculus
  siRNA target sequence for Slc7a9 (NM_021291.1,582-600).
cttggcacaatgattacca

SEQ ID NO: 642165 - DNA, 19 bp, Mus musculus
  siRNA target sequence for Slc7a9 (NM_021291.1,610-628).
gtgagtacccctatctgat

SEQ ID NO: 642166 - DNA, 19 bp, Mus musculus
  siRNA target sequence for Slc7a9 (NM_021291.1,670-688).
ccagcctgatcgtcatgaa

SEQ ID NO: 642167 - DNA, 19 bp, Mus musculus
  siRNA target sequence for Slc7a9 (NM_021291.1,734-752).
gtgtgcagccttttactca

SEQ ID NO: 642168 - DNA, 19 bp, Mus musculus
  siRNA target sequence for Slc7a9 (NM_021291.1,792-810).
gctgctgccatcttgttta

SEQ ID NO: 642169 - DNA, 19 bp, Mus musculus
  siRNA target sequence for Slc7a9 (NM_021291.1,921-939).
ctggcccaaggaaatgtaa

SEQ ID NO: 642170 - DNA, 19 bp, Mus musculus
  siRNA target sequence for Slc7a9 (NM_021291.1,924-942).
gcccaaggaaatgtaaaga

SEQ ID NO: 642171 - DNA, 19 bp, Mus musculus
  siRNA target sequence for Slc7a9 (NM_021291.1,984-1002).
gccatcagtctggcatttt

SEQ ID NO: 642172 - DNA, 19 bp, Mus musculus
  siRNA target sequence for Slc7a9 (NM_021291.1,1231-1249).
cttgggtagtcccactttt

SEQ ID NO: 642173 - DNA, 19 bp, Mus musculus
  siRNA target sequence for Slc7a9 (NM_021291.1,1294-1312).
cagccggcaggctcatcta

SEQ ID NO: 642174 - DNA, 19 bp, Mus musculus
  siRNA target sequence for Slc7a9 (NM_021291.1,1297-1315).
ccggcaggctcatctatgt

SEQ ID NO: 642175 - DNA, 19 bp, Mus musculus
  siRNA target sequence for Slc7a9 (NM_021291.1,1325-1343).
ggaaggccacatgcttaaa

SEQ ID NO: 642176 - DNA, 19 bp, Mus musculus
  siRNA target sequence for Slc7a9 (NM_021291.1,1378-1396).
cagcccctgccctcatatt

SEQ ID NO: 642177 - DNA, 19 bp, Mus musculus
  siRNA target sequence for Slc7a9 (NM_021291.1,1380-1398).
gcccctgccctcatatttt

SEQ ID NO: 642178 - DNA, 19 bp, Mus musculus
  siRNA target sequence for Slc7a9 (NM_021291.1,1381-1399).
cccctgccctcatatttta

SEQ ID NO: 642179 - DNA, 19 bp, Mus musculus
  siRNA target sequence for Slc7a9 (NM_021291.1,1386-1404).
gccctcatattttatggta

SEQ ID NO: 642180 - DNA, 19 bp, Mus musculus
  siRNA target sequence for Slc7a9 (NM_021291.1,1387-1405).
ccctcatattttatggtat

SEQ ID NO: 642181 - DNA, 19 bp, Mus musculus
  siRNA target sequence for Slc7a9 (NM_021291.1,1388-1406).
cctcatattttatggtata

SEQ ID NO: 642182 - DNA, 19 bp, Mus musculus
  siRNA target sequence for Slc7a9 (NM_021291.1,1389-1407).
ctcatattttatggtataa

SEQ ID NO: 642183 - DNA, 19 bp, Mus musculus
  siRNA target sequence for Slc7a9 (NM_021291.1,1391-1409).
catattttatggtataata

SEQ ID NO: 642184 - DNA, 19 bp, Mus musculus
  siRNA target sequence for Slc7a9 (NM_021291.1,1436-1454).
catcaactccttagtcaat

SEQ ID NO: 642185 - DNA, 19 bp, Mus musculus
  siRNA target sequence for Slc7a9 (NM_021291.1,1439-1457).
caactccttagtcaattat

SEQ ID NO: 642186 - DNA, 19 bp, Mus musculus
  siRNA target sequence for Slc7a9 (NM_021291.1,1470-1488).
gcatggctgttttatggta

SEQ ID NO: 642187 - DNA, 19 bp, Mus musculus
  siRNA target sequence for Slc7a9 (NM_021291.1,1471-1489).
catggctgttttatggtat

SEQ ID NO: 642188 - DNA, 19 bp, Mus musculus
  siRNA target sequence for Slc7a9 (NM_021291.1,1475-1493).
gctgttttatggtatgaca

SEQ ID NO: 642189 - DNA, 19 bp, Mus musculus
  siRNA target sequence for Slc7a9 (NM_021291.1,1505-1523).
cgttgtgatgcgattcaca

SEQ ID NO: 642190 - DNA, 19 bp, Mus musculus
  siRNA target sequence for Slc7a9 (NM_021291.1,1506-1524).
gttgtgatgcgattcacaa

SEQ ID NO: 642191 - DNA, 19 bp, Mus musculus
  siRNA target sequence for Slc7a9 (NM_021291.1,1511-1529).
gatgcgattcacaaggaaa

SEQ ID NO: 642192 - DNA, 19 bp, Mus musculus
  siRNA target sequence for Slc7a9 (NM_021291.1,1514-1532).
gcgattcacaaggaaagat

SEQ ID NO: 642193 - DNA, 19 bp, Mus musculus
  siRNA target sequence for Slc7a9 (NM_021291.1,1562-1580).
catccctatcattgtgatt

SEQ ID NO: 642194 - DNA, 19 bp, Mus musculus
  siRNA target sequence for Slc7a9 (NM_021291.1,1575-1593).
gtgattctcgtatctcttt

SEQ ID NO: 642195 - DNA, 19 bp, Mus musculus
  siRNA target sequence for Slc7a9 (NM_021291.1,1581-1599).
ctcgtatctcttttcttga

SEQ ID NO: 642196 - DNA, 19 bp, Mus musculus
  siRNA target sequence for Slc7a9 (NM_021291.1,1655-1673).
catactgagtggacttata

SEQ ID NO: 642197 - DNA, 19 bp, Mus musculus
  siRNA target sequence for 0610009O03Rik (NM_026660.2,266-284).
ccgagcgtcgcgtgatcat

SEQ ID NO: 642198 - DNA, 19 bp, Mus musculus
  siRNA target sequence for 0610009O03Rik (NM_026660.2,442-460).
gcggaaaagaggtacaaca

SEQ ID NO: 642199 - DNA, 19 bp, Mus musculus
  siRNA target sequence for 0610009O03Rik (NM_026660.2,611-629).
ctacctctcggagctttaa

SEQ ID NO: 642200 - DNA, 19 bp, Mus musculus
  siRNA target sequence for 0610009O03Rik (NM_026660.2,665-683).
gcaaggggaacgttaacct

SEQ ID NO: 642201 - DNA, 19 bp, Mus musculus
  siRNA target sequence for 0610009O03Rik (NM_026660.2,817-835).
ccctggatcagcctacttt

SEQ ID NO: 642202 - DNA, 19 bp, Mus musculus
  siRNA target sequence for 0610009O03Rik (NM_026660.2,818-836).
cctggatcagcctactttt

SEQ ID NO: 642203 - DNA, 19 bp, Mus musculus
  siRNA target sequence for 0610009O03Rik (NM_026660.2,838-856).
gccatctccgacatgttgt

SEQ ID NO: 642204 - DNA, 19 bp, Mus musculus
  siRNA target sequence for 0610009O03Rik (NM_026660.2,839-857).
ccatctccgacatgttgtt

SEQ ID NO: 642205 - DNA, 19 bp, Mus musculus
  siRNA target sequence for 0610009O03Rik (NM_026660.2,845-863).
ccgacatgttgttcatctt

SEQ ID NO: 642206 - DNA, 19 bp, Mus musculus
  siRNA target sequence for 0610009O03Rik (NM_026660.2,1025-1043).
gccgtttgggtcttgtcta

SEQ ID NO: 642207 - DNA, 19 bp, Mus musculus
  siRNA target sequence for 0610009O03Rik (NM_026660.2,1246-1264).
gtaccagccttcctcttaa

SEQ ID NO: 642208 - DNA, 19 bp, Mus musculus
  siRNA target sequence for 0610009O03Rik (NM_026660.2,1379-1397).
ggcaaaaaggcacaatcat

SEQ ID NO: 642209 - DNA, 19 bp, Mus musculus
  siRNA target sequence for 4931419K03Rik (NM_172499.1,242-260).
ccgtagtggctggaatagt

SEQ ID NO: 642210 - DNA, 19 bp, Mus musculus
  siRNA target sequence for 4931419K03Rik (NM_172499.1,243-261).
cgtagtggctggaatagta

SEQ ID NO: 642211 - DNA, 19 bp, Mus musculus
  siRNA target sequence for 4931419K03Rik (NM_172499.1,266-284).
cctcatacggcgttttgca

SEQ ID NO: 642212 - DNA, 19 bp, Mus musculus
  siRNA target sequence for 4931419K03Rik (NM_172499.1,267-285).
ctcatacggcgttttgcaa

SEQ ID NO: 642213 - DNA, 19 bp, Mus musculus
  siRNA target sequence for 4931419K03Rik (NM_172499.1,374-392).
gctatctcctccttggaat

SEQ ID NO: 642214 - DNA, 19 bp, Mus musculus
  siRNA target sequence for 4931419K03Rik (NM_172499.1,388-406).
ggaatgtccaccaatgtgt

SEQ ID NO: 642215 - DNA, 19 bp, Mus musculus
  siRNA target sequence for 4931419K03Rik (NM_172499.1,389-407).
gaatgtccaccaatgtgtt

SEQ ID NO: 642216 - DNA, 19 bp, Mus musculus
  siRNA target sequence for 4931419K03Rik (NM_172499.1,425-443).
gagtccccgtgggtgtttt

SEQ ID NO: 642217 - DNA, 19 bp, Mus musculus
  siRNA target sequence for 4931419K03Rik (NM_172499.1,660-678).
gttaccttggagagaaaca

SEQ ID NO: 642218 - DNA, 19 bp, Mus musculus
  siRNA target sequence for 4931419K03Rik (NM_172499.1,671-689).
gagaaacaagcctcaacat

SEQ ID NO: 642219 - DNA, 19 bp, Mus musculus
  siRNA target sequence for 4931419K03Rik (NM_172499.1,809-827).
caccctgggttgaagtcat

SEQ ID NO: 642220 - DNA, 19 bp, Mus musculus
  siRNA target sequence for 4931419K03Rik (NM_172499.1,863-881).
ctgctctgtgggatgtatt

SEQ ID NO: 642221 - DNA, 19 bp, Mus musculus
  siRNA target sequence for 4931419K03Rik (NM_172499.1,866-884).
ctctgtgggatgtattcct

SEQ ID NO: 642222 - DNA, 19 bp, Mus musculus
  siRNA target sequence for 4931419K03Rik (NM_172499.1,910-928).
gtcatgctgtactacagta

SEQ ID NO: 642223 - DNA, 19 bp, Mus musculus
  siRNA target sequence for 4931419K03Rik (NM_172499.1,1037-1055).
ccattctacggctgtacaa

SEQ ID NO: 642224 - DNA, 19 bp, Mus musculus
  siRNA target sequence for 5730414C17Rik (NM_133680.2,455-473).
gccacccaagtgtttacca

SEQ ID NO: 642225 - DNA, 19 bp, Mus musculus
  siRNA target sequence for 5730414C17Rik (NM_133680.2,456-474).
ccacccaagtgtttaccat

SEQ ID NO: 642226 - DNA, 19 bp, Mus musculus
  siRNA target sequence for 5730414C17Rik (NM_133680.2,505-523).
gcgtggggcctgttaacaa

SEQ ID NO: 642227 - DNA, 19 bp, Mus musculus
  siRNA target sequence for 5730414C17Rik (NM_133680.2,581-599).
ggctcattcaaggtgtaaa

SEQ ID NO: 642228 - DNA, 19 bp, Mus musculus
  siRNA target sequence for 5730414C17Rik (NM_133680.2,673-691).
cttggcacggtcttcttta

SEQ ID NO: 642229 - DNA, 19 bp, Mus musculus
  siRNA target sequence for 5730414C17Rik (NM_133680.2,676-694).
ggcacggtcttctttacct

SEQ ID NO: 642230 - DNA, 19 bp, Mus musculus
  siRNA target sequence for 5730414C17Rik (NM_133680.2,695-713).
gcttccctatcccactaat

SEQ ID NO: 642231 - DNA, 19 bp, Mus musculus
  siRNA target sequence for 5730414C17Rik (NM_133680.2,893-911).
catacctctctgcaaacta

SEQ ID NO: 642232 - DNA, 19 bp, Mus musculus
  siRNA target sequence for 5730414C17Rik (NM_133680.2,1050-1068).
ggacccttttgcgtcatta

SEQ ID NO: 642233 - DNA, 19 bp, Mus musculus
  siRNA target sequence for 5730414C17Rik (NM_133680.2,1051-1069).
gacccttttgcgtcattaa

SEQ ID NO: 642234 - DNA, 19 bp, Mus musculus
  siRNA target sequence for 5730414C17Rik (NM_133680.2,1054-1072).
ccttttgcgtcattaaaga

SEQ ID NO: 642235 - DNA, 19 bp, Mus musculus
  siRNA target sequence for 5730414C17Rik (NM_133680.2,1071-1089).
gaaagttggaaaagattct

SEQ ID NO: 642236 - DNA, 19 bp, Mus musculus
  siRNA target sequence for 5730414C17Rik (NM_133680.2,1084-1102).
gattctactgtcttactga

SEQ ID NO: 642237 - DNA, 19 bp, Mus musculus
  siRNA target sequence for 5730414C17Rik (NM_133680.2,1110-1128).
cacagtgtttctctcatat

SEQ ID NO: 642238 - DNA, 19 bp, Mus musculus
  siRNA target sequence for 5730414C17Rik (NM_133680.2,1132-1150).
cctgaagctgggcaatatt

SEQ ID NO: 642239 - DNA, 19 bp, Mus musculus
  siRNA target sequence for 5730414C17Rik (NM_133680.2,1142-1160).
ggcaatattcaagcttttt

SEQ ID NO: 642240 - DNA, 19 bp, Mus musculus
  siRNA target sequence for 5730414C17Rik (NM_133680.2,1170-1188).
caggcaggttataggtttt

SEQ ID NO: 642241 - DNA, 19 bp, Mus musculus
  siRNA target sequence for 5730414C17Rik (NM_133680.2,1174-1192).
caggttataggttttggat

SEQ ID NO: 642242 - DNA, 19 bp, Mus musculus
  siRNA target sequence for 5730414C17Rik (NM_133680.2,1193-1211).
ctgtgaaaattgtagcatt

SEQ ID NO: 642243 - DNA, 19 bp, Mus musculus
  siRNA target sequence for 5730414C17Rik (NM_133680.2,1212-1230).
catagctatggtaggaatt

SEQ ID NO: 642244 - DNA, 19 bp, Mus musculus
  siRNA target sequence for 5730414C17Rik (NM_133680.2,1248-1266).
gacagtcttccttagcaaa

SEQ ID NO: 642245 - DNA, 19 bp, Mus musculus
  siRNA target sequence for 5730414C17Rik (NM_133680.2,1252-1270).
gtcttccttagcaaattga

SEQ ID NO: 642246 - DNA, 19 bp, Mus musculus
  siRNA target sequence for 5730414C17Rik (NM_133680.2,1329-1347).
gcttgcctggtatggtttt

SEQ ID NO: 642247 - DNA, 19 bp, Mus musculus
  siRNA target sequence for 5730414C17Rik (NM_133680.2,1390-1408).
gccatgtccagcattacat

SEQ ID NO: 642248 - DNA, 19 bp, Mus musculus
  siRNA target sequence for 5730414C17Rik (NM_133680.2,1391-1409).
ccatgtccagcattacatt

SEQ ID NO: 642249 - DNA, 19 bp, Mus musculus
  siRNA target sequence for 5730414C17Rik (NM_133680.2,1462-1480).
gttgcccaggggatcgtaa

SEQ ID NO: 642250 - DNA, 19 bp, Mus musculus
  siRNA target sequence for 5730414C17Rik (NM_133680.2,1470-1488).
ggggatcgtaactggaata

SEQ ID NO: 642251 - DNA, 19 bp, Mus musculus
  siRNA target sequence for 5730414C17Rik (NM_133680.2,1473-1491).
gatcgtaactggaatacga

SEQ ID NO: 642252 - DNA, 19 bp, Mus musculus
  siRNA target sequence for 5730414C17Rik (NM_133680.2,1504-1522).
ggcctagggccagcattat

SEQ ID NO: 642253 - DNA, 19 bp, Mus musculus
  siRNA target sequence for 5730414C17Rik (NM_133680.2,1505-1523).
gcctagggccagcattata

SEQ ID NO: 642254 - DNA, 19 bp, Mus musculus
  siRNA target sequence for 5730414C17Rik (NM_133680.2,1506-1524).
cctagggccagcattatat

SEQ ID NO: 642255 - DNA, 19 bp, Mus musculus
  siRNA target sequence for 5730414C17Rik (NM_133680.2,1516-1534).
gcattatatggcttcatat

SEQ ID NO: 642256 - DNA, 19 bp, Mus musculus
  siRNA target sequence for 5730414C17Rik (NM_133680.2,1517-1535).
cattatatggcttcatatt

SEQ ID NO: 642257 - DNA, 19 bp, Mus musculus
  siRNA target sequence for 5730414C17Rik (NM_133680.2,1525-1543).
ggcttcatattctacatgt

SEQ ID NO: 642258 - DNA, 19 bp, Mus musculus
  siRNA target sequence for 5730414C17Rik (NM_133680.2,1526-1544).
gcttcatattctacatgtt

SEQ ID NO: 642259 - DNA, 19 bp, Mus musculus
  siRNA target sequence for 5730414C17Rik (NM_133680.2,1559-1577).
gtgagttgggcccaaaatt

SEQ ID NO: 642260 - DNA, 19 bp, Mus musculus
  siRNA target sequence for 5730414C17Rik (NM_133680.2,1563-1581).
gttgggcccaaaattgaat

SEQ ID NO: 642261 - DNA, 19 bp, Mus musculus
  siRNA target sequence for 5730414C17Rik (NM_133680.2,1636-1654).
ggagcatgtatagttctta

SEQ ID NO: 642262 - DNA, 19 bp, Mus musculus
  siRNA target sequence for 5730414C17Rik (NM_133680.2,1637-1655).
gagcatgtatagttcttat

SEQ ID NO: 642263 - DNA, 19 bp, Mus musculus
  siRNA target sequence for 5730414C17Rik (NM_133680.2,1670-1688).
ccttattcatccctgaata

SEQ ID NO: 642264 - DNA, 19 bp, Mus musculus
  siRNA target sequence for 5730414C17Rik (NM_133680.2,1773-1791).
cattgagccgttactacaa

SEQ ID NO: 642265 - DNA, 19 bp, Mus musculus
  siRNA target sequence for Hiat1 (NM_008246.1,149-167).
gaggcacgcctcaaggaat

SEQ ID NO: 642266 - DNA, 19 bp, Mus musculus
  siRNA target sequence for Hiat1 (NM_008246.1,170-188).
gctcccctagtgtgtatca

SEQ ID NO: 642267 - DNA, 19 bp, Mus musculus
  siRNA target sequence for Hiat1 (NM_008246.1,190-208).
gcggttattgtcatctttt

SEQ ID NO: 642268 - DNA, 19 bp, Mus musculus
  siRNA target sequence for Hiat1 (NM_008246.1,191-209).
cggttattgtcatcttttt

SEQ ID NO: 642269 - DNA, 19 bp, Mus musculus
  siRNA target sequence for Hiat1 (NM_008246.1,239-257).
cacccacattggtggtatt

SEQ ID NO: 642270 - DNA, 19 bp, Mus musculus
  siRNA target sequence for Hiat1 (NM_008246.1,242-260).
ccacattggtggtattgca

SEQ ID NO: 642271 - DNA, 19 bp, Mus musculus
  siRNA target sequence for Hiat1 (NM_008246.1,243-261).
cacattggtggtattgcat

SEQ ID NO: 642272 - DNA, 19 bp, Mus musculus
  siRNA target sequence for Hiat1 (NM_008246.1,262-280).
gaaaccttccctaaacata

SEQ ID NO: 642273 - DNA, 19 bp, Mus musculus
  siRNA target sequence for Hiat1 (NM_008246.1,271-289).
cctaaacatacatttctga

SEQ ID NO: 642274 - DNA, 19 bp, Mus musculus
  siRNA target sequence for Hiat1 (NM_008246.1,272-290).
ctaaacatacatttctgat

SEQ ID NO: 642275 - DNA, 19 bp, Mus musculus
  siRNA target sequence for Hiat1 (NM_008246.1,288-306).
gatgaatggcctaattcaa

SEQ ID NO: 642276 - DNA, 19 bp, Mus musculus
  siRNA target sequence for Hiat1 (NM_008246.1,333-351).
cagtgccccacttattggt

SEQ ID NO: 642277 - DNA, 19 bp, Mus musculus
  siRNA target sequence for Hiat1 (NM_008246.1,385-403).
ctgctgctaacagtgtttt

SEQ ID NO: 642278 - DNA, 19 bp, Mus musculus
  siRNA target sequence for Hiat1 (NM_008246.1,405-423).
cacgtgtgcccctattcct

SEQ ID NO: 642279 - DNA, 19 bp, Mus musculus
  siRNA target sequence for Hiat1 (NM_008246.1,413-431).
cccctattcctctgatgaa

SEQ ID NO: 642280 - DNA, 19 bp, Mus musculus
  siRNA target sequence for Hiat1 (NM_008246.1,435-453).
cagcccgtggtggtacttt

SEQ ID NO: 642281 - DNA, 19 bp, Mus musculus
  siRNA target sequence for Hiat1 (NM_008246.1,473-491).
gggtttttgcagtaacctt

SEQ ID NO: 642282 - DNA, 19 bp, Mus musculus
  siRNA target sequence for Hiat1 (NM_008246.1,494-512).
ctgtggtatttgcatatgt

SEQ ID NO: 642283 - DNA, 19 bp, Mus musculus
  siRNA target sequence for Hiat1 (NM_008246.1,570-588).
gttcgctgccagcttagtt

SEQ ID NO: 642284 - DNA, 19 bp, Mus musculus
  siRNA target sequence for Hiat1 (NM_008246.1,645-663).
ggtccttgctacagcaata

SEQ ID NO: 642285 - DNA, 19 bp, Mus musculus
  siRNA target sequence for Hiat1 (NM_008246.1,648-666).
ccttgctacagcaatagct

SEQ ID NO: 642286 - DNA, 19 bp, Mus musculus
  siRNA target sequence for Hiat1 (NM_008246.1,659-677).
caatagctctgctagacat

SEQ ID NO: 642287 - DNA, 19 bp, Mus musculus
  siRNA target sequence for Hiat1 (NM_008246.1,766-784).
gacccctttgcatctttaa

SEQ ID NO: 642288 - DNA, 19 bp, Mus musculus
  siRNA target sequence for Hiat1 (NM_008246.1,937-955).
cttggcattctgtccatta

SEQ ID NO: 642289 - DNA, 19 bp, Mus musculus
  siRNA target sequence for Hiat1 (NM_008246.1,961-979).
cagaccatagtcttgagtt

SEQ ID NO: 642290 - DNA, 19 bp, Mus musculus
  siRNA target sequence for Hiat1 (NM_008246.1,989-1007).
ggtcaattggaaataagaa

SEQ ID NO: 642291 - DNA, 19 bp, Mus musculus
  siRNA target sequence for Hiat1 (NM_008246.1,1020-1038).
gggtctgggatttcaaata

SEQ ID NO: 642292 - DNA, 19 bp, Mus musculus
  siRNA target sequence for Hiat1 (NM_008246.1,1129-1147).
gctgttagcgcccttgttt

SEQ ID NO: 642293 - DNA, 19 bp, Mus musculus
  siRNA target sequence for Hiat1 (NM_008246.1,1164-1182).
ggatcaacagggtgttgtt

SEQ ID NO: 642294 - DNA, 19 bp, Mus musculus
  siRNA target sequence for Hiat1 (NM_008246.1,1313-1331).
caagccctcagcatcactt

SEQ ID NO: 642295 - DNA, 19 bp, Mus musculus
  siRNA target sequence for Hiat1 (NM_008246.1,1316-1334).
gccctcagcatcactttga

SEQ ID NO: 642296 - DNA, 19 bp, Mus musculus
  siRNA target sequence for Hiat1 (NM_008246.1,1323-1341).
gcatcactttgaacagaat

SEQ ID NO: 642297 - DNA, 19 bp, Mus musculus
  siRNA target sequence for Hiat1 (NM_008246.1,1417-1435).
ccggaacacactaatttaa

SEQ ID NO: 642298 - DNA, 19 bp, Mus musculus
  siRNA target sequence for Hiat1 (NM_008246.1,1525-1543).
ctccaggacacgaatgtgt

SEQ ID NO: 642299 - DNA, 19 bp, Mus musculus
  siRNA target sequence for Tscot (NM_021053.2,184-202).
ccgggtgaggacttggatt

SEQ ID NO: 642300 - DNA, 19 bp, Mus musculus
  siRNA target sequence for Tscot (NM_021053.2,252-270).
gactactcctggtagtgaa

SEQ ID NO: 642301 - DNA, 19 bp, Mus musculus
  siRNA target sequence for Tscot (NM_021053.2,289-307).
ggctggaggctcctctaat

SEQ ID NO: 642302 - DNA, 19 bp, Mus musculus
  siRNA target sequence for Tscot (NM_021053.2,291-309).
ctggaggctcctctaatta

SEQ ID NO: 642303 - DNA, 19 bp, Mus musculus
  siRNA target sequence for Tscot (NM_021053.2,293-311).
ggaggctcctctaattaca

SEQ ID NO: 642304 - DNA, 19 bp, Mus musculus
  siRNA target sequence for Tscot (NM_021053.2,359-377).
gctatctccaatttcaaca

SEQ ID NO: 642305 - DNA, 19 bp, Mus musculus
  siRNA target sequence for Tscot (NM_021053.2,446-464).
cgctaccaccgtaagatct

SEQ ID NO: 642306 - DNA, 19 bp, Mus musculus
  siRNA target sequence for Tscot (NM_021053.2,452-470).
caccgtaagatctctatct

SEQ ID NO: 642307 - DNA, 19 bp, Mus musculus
  siRNA target sequence for Tscot (NM_021053.2,496-514).
gtcccgcatcggactctta

SEQ ID NO: 642308 - DNA, 19 bp, Mus musculus
  siRNA target sequence for Tscot (NM_021053.2,498-516).
cccgcatcggactcttact

SEQ ID NO: 642309 - DNA, 19 bp, Mus musculus
  siRNA target sequence for Tscot (NM_021053.2,502-520).
catcggactcttactcaaa

SEQ ID NO: 642310 - DNA, 19 bp, Mus musculus
  siRNA target sequence for Tscot (NM_021053.2,506-524).
ggactcttactcaaagtga

SEQ ID NO: 642311 - DNA, 19 bp, Mus musculus
  siRNA target sequence for Tscot (NM_021053.2,507-525).
gactcttactcaaagtgat

SEQ ID NO: 642312 - DNA, 19 bp, Mus musculus
  siRNA target sequence for Tscot (NM_021053.2,534-552).
ggccagtggaggtgatgta

SEQ ID NO: 642313 - DNA, 19 bp, Mus musculus
  siRNA target sequence for Tscot (NM_021053.2,581-599).
gggagcttctccgcttatt

SEQ ID NO: 642314 - DNA, 19 bp, Mus musculus
  siRNA target sequence for Tscot (NM_021053.2,656-674).
cgcctcatcctcatcgatt

SEQ ID NO: 642315 - DNA, 19 bp, Mus musculus
  siRNA target sequence for Tscot (NM_021053.2,657-675).
gcctcatcctcatcgattt

SEQ ID NO: 642316 - DNA, 19 bp, Mus musculus
  siRNA target sequence for Tscot (NM_021053.2,658-676).
cctcatcctcatcgattta

SEQ ID NO: 642317 - DNA, 19 bp, Mus musculus
  siRNA target sequence for Tscot (NM_021053.2,711-729).
cttcggggcatctcttcaa

SEQ ID NO: 642318 - DNA, 19 bp, Mus musculus
  siRNA target sequence for Tscot (NM_021053.2,751-769).
gcaaggcctcctgttaact

SEQ ID NO: 642319 - DNA, 19 bp, Mus musculus
  siRNA target sequence for Tscot (NM_021053.2,850-868).
ggtgcaccccactgtagat

SEQ ID NO: 642320 - DNA, 19 bp, Mus musculus
  siRNA target sequence for Tscot (NM_021053.2,851-869).
gtgcaccccactgtagata

SEQ ID NO: 642321 - DNA, 19 bp, Mus musculus
  siRNA target sequence for Tscot (NM_021053.2,1053-1071).
ccctttttgtgcttaagga

SEQ ID NO: 642322 - DNA, 19 bp, Mus musculus
  siRNA target sequence for Tscot (NM_021053.2,1108-1126).
gatggcttctgggtacata

SEQ ID NO: 642323 - DNA, 19 bp, Mus musculus
  siRNA target sequence for Tscot (NM_021053.2,1118-1136).
gggtacataatcttcataa

SEQ ID NO: 642324 - DNA, 19 bp, Mus musculus
  siRNA target sequence for Tscot (NM_021053.2,1175-1193).
cgggacaccacgatgatca

SEQ ID NO: 642325 - DNA, 19 bp, Mus musculus
  siRNA target sequence for Tscot (NM_021053.2,1215-1233).
ggtccggagcccttctctt

SEQ ID NO: 642326 - DNA, 19 bp, Mus musculus
  siRNA target sequence for Tscot (NM_021053.2,1249-1267).
gacatacatgttctacatt

SEQ ID NO: 642327 - DNA, 19 bp, Mus musculus
  siRNA target sequence for Tscot (NM_021053.2,1279-1297).
catgctgtttgcgcttatt

SEQ ID NO: 642328 - DNA, 19 bp, Mus musculus
  siRNA target sequence for Tscot (NM_021053.2,1320-1338).
ccatgtccaaactcataaa

SEQ ID NO: 642329 - DNA, 19 bp, Mus musculus
  siRNA target sequence for Tscot (NM_021053.2,1344-1362).
cttcctatggaaagatttt

SEQ ID NO: 642330 - DNA, 19 bp, Mus musculus
  siRNA target sequence for Tscot (NM_021053.2,1347-1365).
cctatggaaagattttcgt

SEQ ID NO: 642331 - DNA, 19 bp, Mus musculus
  siRNA target sequence for Tscot (NM_021053.2,1353-1371).
gaaagattttcgtcatact

SEQ ID NO: 642332 - DNA, 19 bp, Mus musculus
  siRNA target sequence for Tscot (NM_021053.2,1404-1422).
catccaccatatataacaa

SEQ ID NO: 642333 - DNA, 19 bp, Mus musculus
  siRNA target sequence for Tscot (NM_021053.2,1492-1510).
ggccattgtcccaattggt

SEQ ID NO: 642334 - DNA, 19 bp, Mus musculus
  siRNA target sequence for 4933425K02Rik (NM_028946.1,518-536).
cacgacgtagaatcaaaca

SEQ ID NO: 642335 - DNA, 19 bp, Mus musculus
  siRNA target sequence for 4933425K02Rik (NM_028946.1,577-595).
gtccaaagatcctgatagt

SEQ ID NO: 642336 - DNA, 19 bp, Mus musculus
  siRNA target sequence for 4933425K02Rik (NM_028946.1,907-925).
ggcccttataggtcaagaa

SEQ ID NO: 642337 - DNA, 19 bp, Mus musculus
  siRNA target sequence for 4933425K02Rik (NM_028946.1,909-927).
cccttataggtcaagaagt

SEQ ID NO: 642338 - DNA, 19 bp, Mus musculus
  siRNA target sequence for 4933425K02Rik (NM_028946.1,931-949).
ccctggtggaaatttgttt

SEQ ID NO: 642339 - DNA, 19 bp, Mus musculus
  siRNA target sequence for 4933425K02Rik (NM_028946.1,946-964).
gtttggacttgtagttatt

SEQ ID NO: 642340 - DNA, 19 bp, Mus musculus
  siRNA target sequence for 4933425K02Rik (NM_028946.1,986-1004).
ggtaaaattttagaattca

SEQ ID NO: 642341 - DNA, 19 bp, Mus musculus
  siRNA target sequence for 4933425K02Rik (NM_028946.1,987-1005).
gtaaaattttagaattcat

SEQ ID NO: 642342 - DNA, 19 bp, Mus musculus
  siRNA target sequence for 4933425K02Rik (NM_028946.1,1035-1053).
ctctcattgggatgttact

SEQ ID NO: 642343 - DNA, 19 bp, Mus musculus
  siRNA target sequence for 4933425K02Rik (NM_028946.1,1071-1089).
ggaatgttccgattattta

SEQ ID NO: 642344 - DNA, 19 bp, Mus musculus
  siRNA target sequence for 4933425K02Rik (NM_028946.1,1072-1090).
gaatgttccgattatttat

SEQ ID NO: 642345 - DNA, 19 bp, Mus musculus
  siRNA target sequence for 4933425K02Rik (NM_028946.1,1131-1149).
gaaacactgcccttactat

SEQ ID NO: 642346 - DNA, 19 bp, Mus musculus
  siRNA target sequence for 4933425K02Rik (NM_028946.1,1137-1155).
ctgcccttactattatcct

SEQ ID NO: 642347 - DNA, 19 bp, Mus musculus
  siRNA target sequence for 4933425K02Rik (NM_028946.1,1208-1226).
gtctgtctgcgcttgtcat

SEQ ID NO: 642348 - DNA, 19 bp, Mus musculus
  siRNA target sequence for 4933425K02Rik (NM_028946.1,1210-1228).
ctgtctgcgcttgtcattt

SEQ ID NO: 642349 - DNA, 19 bp, Mus musculus
  siRNA target sequence for 4933425K02Rik (NM_028946.1,1299-1317).
gggggttcctactaggttt

SEQ ID NO: 642350 - DNA, 19 bp, Mus musculus
  siRNA target sequence for 4933425K02Rik (NM_028946.1,1302-1320).
ggttcctactaggttttgt

SEQ ID NO: 642351 - DNA, 19 bp, Mus musculus
  siRNA target sequence for 4933425K02Rik (NM_028946.1,1349-1367).
gtccccaacatgctaatgt

SEQ ID NO: 642352 - DNA, 19 bp, Mus musculus
  siRNA target sequence for 4933425K02Rik (NM_028946.1,1488-1506).
cgggtagtgtgattagcaa

SEQ ID NO: 642353 - DNA, 19 bp, Mus musculus
  siRNA target sequence for 4933425K02Rik (NM_028946.1,1496-1514).
gtgattagcaacatcctat

SEQ ID NO: 642354 - DNA, 19 bp, Mus musculus
  siRNA target sequence for 4933425K02Rik (NM_028946.1,1519-1537).
cttgcgggacgttcttatt

SEQ ID NO: 642355 - DNA, 19 bp, Mus musculus
  siRNA target sequence for 4933425K02Rik (NM_028946.1,1540-1558).
ggtgctggtaggaattgtt

SEQ ID NO: 642356 - DNA, 19 bp, Mus musculus
  siRNA target sequence for 4933425K02Rik (NM_028946.1,1541-1559).
gtgctggtaggaattgtta

SEQ ID NO: 642357 - DNA, 19 bp, Mus musculus
  siRNA target sequence for 4933425K02Rik (NM_028946.1,1551-1569).
gaattgttatgggagtttt

SEQ ID NO: 642358 - DNA, 19 bp, Mus musculus
  siRNA target sequence for 4933425K02Rik (NM_028946.1,1561-1579).
gggagtttttgttcagtat

SEQ ID NO: 642359 - DNA, 19 bp, Mus musculus
  siRNA target sequence for 4933425K02Rik (NM_028946.1,1562-1580).
ggagtttttgttcagtatt

SEQ ID NO: 642360 - DNA, 19 bp, Mus musculus
  siRNA target sequence for 4933425K02Rik (NM_028946.1,1602-1620).
ccagcacattggcttacat

SEQ ID NO: 642361 - DNA, 19 bp, Mus musculus
  siRNA target sequence for A530087D17Rik (NM_177353.2,364-382).
gggtgcgtttccttcatga

SEQ ID NO: 642362 - DNA, 19 bp, Mus musculus
  siRNA target sequence for A530087D17Rik (NM_177353.2,386-404).
cgggctggccatgatttat

SEQ ID NO: 642363 - DNA, 19 bp, Mus musculus
  siRNA target sequence for A530087D17Rik (NM_177353.2,445-463).
ctaccagcggtcatgacaa

SEQ ID NO: 642364 - DNA, 19 bp, Mus musculus
  siRNA target sequence for A530087D17Rik (NM_177353.2,493-511).
cctttagcactttattagt

SEQ ID NO: 642365 - DNA, 19 bp, Mus musculus
  siRNA target sequence for A530087D17Rik (NM_177353.2,644-662).
gcctccaattattttccat

SEQ ID NO: 642366 - DNA, 19 bp, Mus musculus
  siRNA target sequence for A530087D17Rik (NM_177353.2,660-678).
catgctggatacagcttaa

SEQ ID NO: 642367 - DNA, 19 bp, Mus musculus
  siRNA target sequence for A530087D17Rik (NM_177353.2,663-681).
gctggatacagcttaaaga

SEQ ID NO: 642368 - DNA, 19 bp, Mus musculus
  siRNA target sequence for A530087D17Rik (NM_177353.2,709-727).
cgattctggcctatgcttt

SEQ ID NO: 642369 - DNA, 19 bp, Mus musculus
  siRNA target sequence for A530087D17Rik (NM_177353.2,745-763).
cttgcttcattattggaaa

SEQ ID NO: 642370 - DNA, 19 bp, Mus musculus
  siRNA target sequence for A530087D17Rik (NM_177353.2,748-766).
gcttcattattggaaatct

SEQ ID NO: 642371 - DNA, 19 bp, Mus musculus
  siRNA target sequence for A530087D17Rik (NM_177353.2,749-767).
cttcattattggaaatctt

SEQ ID NO: 642372 - DNA, 19 bp, Mus musculus
  siRNA target sequence for A530087D17Rik (NM_177353.2,779-797).
ggtgaaactcatgaagatt

SEQ ID NO: 642373 - DNA, 19 bp, Mus musculus
  siRNA target sequence for A530087D17Rik (NM_177353.2,824-842).
ctacacagattgtctcttt

SEQ ID NO: 642374 - DNA, 19 bp, Mus musculus
  siRNA target sequence for A530087D17Rik (NM_177353.2,875-893).
gactgtgctggcaatcttt

SEQ ID NO: 642375 - DNA, 19 bp, Mus musculus
  siRNA target sequence for A530087D17Rik (NM_177353.2,886-904).
caatctttaacgaactaca

SEQ ID NO: 642376 - DNA, 19 bp, Mus musculus
  siRNA target sequence for A530087D17Rik (NM_177353.2,980-998).
gtctattgttgcctatcaa

SEQ ID NO: 642377 - DNA, 19 bp, Mus musculus
  siRNA target sequence for A530087D17Rik (NM_177353.2,996-1014).
caaccagcaggactaaaca

SEQ ID NO: 642378 - DNA, 19 bp, Mus musculus
  siRNA target sequence for A530087D17Rik (NM_177353.2,1046-1064).
gtcagttggcattttccta

SEQ ID NO: 642379 - DNA, 19 bp, Mus musculus
  siRNA target sequence for A530087D17Rik (NM_177353.2,1116-1134).
gctctagtgaccaagttta

SEQ ID NO: 642380 - DNA, 19 bp, Mus musculus
  siRNA target sequence for A530087D17Rik (NM_177353.2,1208-1226).
ggaagcctgtgggtttaca

SEQ ID NO: 642381 - DNA, 19 bp, Mus musculus
  siRNA target sequence for A530087D17Rik (NM_177353.2,1228-1246).
gtgttgtagctgtcctttt

SEQ ID NO: 642382 - DNA, 19 bp, Mus musculus
  siRNA target sequence for A530087D17Rik (NM_177353.2,1446-1464).
ggaagagctgcacatatct

SEQ ID NO: 642383 - DNA, 19 bp, Mus musculus
  siRNA target sequence for A530087D17Rik (NM_177353.2,1500-1518).
cataagattggctggaatt

SEQ ID NO: 642384 - DNA, 19 bp, Mus musculus
  siRNA target sequence for A530087D17Rik (NM_177353.2,1505-1523).
gattggctggaattttcaa

SEQ ID NO: 642385 - DNA, 19 bp, Mus musculus
  siRNA target sequence for A530087D17Rik (NM_177353.2,1577-1595).
ccgtgacacggcatcgtat

SEQ ID NO: 642386 - DNA, 19 bp, Mus musculus
  siRNA target sequence for A530087D17Rik (NM_177353.2,1599-1617).
cgccagatgatgttcacaa

SEQ ID NO: 642387 - DNA, 19 bp, Mus musculus
  siRNA target sequence for A530087D17Rik (NM_177353.2,1662-1680).
ggcacgacacccatgttgt

SEQ ID NO: 642388 - DNA, 19 bp, Mus musculus
  siRNA target sequence for A530087D17Rik (NM_177353.2,1676-1694).
gttgtcatggctcaatata

SEQ ID NO: 642389 - DNA, 19 bp, Mus musculus
  siRNA target sequence for A530087D17Rik (NM_177353.2,1762-1780).
gtgttgacccagatcaaga

SEQ ID NO: 642390 - DNA, 19 bp, Mus musculus
  siRNA target sequence for A530087D17Rik (NM_177353.2,1782-1800).
ccaccacctaacaatgaca

SEQ ID NO: 642391 - DNA, 19 bp, Mus musculus
  siRNA target sequence for A530087D17Rik (NM_177353.2,1799-1817).
cagctttcaagtcttacaa

SEQ ID NO: 642392 - DNA, 19 bp, Mus musculus
  siRNA target sequence for A530087D17Rik (NM_177353.2,1860-1878).
gaaagtgcatggatattca

SEQ ID NO: 642393 - DNA, 19 bp, Mus musculus
  siRNA target sequence for A530087D17Rik (NM_177353.2,1879-1897).
ggctgtggtacatctttga

SEQ ID NO: 642394 - DNA, 19 bp, Mus musculus
  siRNA target sequence for A530087D17Rik (NM_177353.2,1880-1898).
gctgtggtacatctttgat

SEQ ID NO: 642395 - DNA, 19 bp, Mus musculus
  siRNA target sequence for A530087D17Rik (NM_177353.2,1993-2011).
gtcctcaggtgtatgataa

SEQ ID NO: 642396 - DNA, 19 bp, Mus musculus
  siRNA target sequence for A530087D17Rik (NM_177353.2,1996-2014).
ctcaggtgtatgataatca

SEQ ID NO: 642397 - DNA, 19 bp, Mus musculus
  siRNA target sequence for A530087D17Rik (NM_177353.2,2162-2180).
cagctctgaggaagtactt

SEQ ID NO: 642398 - DNA, 19 bp, Mus musculus
  siRNA target sequence for B230339H12Rik (NM_172282.1,388-406).
gtggtcctcaacaaactga

SEQ ID NO: 642399 - DNA, 19 bp, Mus musculus
  siRNA target sequence for B230339H12Rik (NM_172282.1,469-487).
gtgcacacattcgagattt

SEQ ID NO: 642400 - DNA, 19 bp, Mus musculus
  siRNA target sequence for B230339H12Rik (NM_172282.1,795-813).
cgccttcgacgacaataaa

SEQ ID NO: 642401 - DNA, 19 bp, Mus musculus
  siRNA target sequence for B230339H12Rik (NM_172282.1,796-814).
gccttcgacgacaataaat

SEQ ID NO: 642402 - DNA, 19 bp, Mus musculus
  siRNA target sequence for B230339H12Rik (NM_172282.1,936-954).
ccagaacaaccagtacatt

SEQ ID NO: 642403 - DNA, 19 bp, Mus musculus
  siRNA target sequence for B230339H12Rik (NM_172282.1,955-973).
ctgaccaagcccagagatt

SEQ ID NO: 642404 - DNA, 19 bp, Mus musculus
  siRNA target sequence for B230339H12Rik (NM_172282.1,987-1005).
cgcagaccaccacttcata

SEQ ID NO: 642405 - DNA, 19 bp, Mus musculus
  siRNA target sequence for B230339H12Rik (NM_172282.1,988-1006).
gcagaccaccacttcataa

SEQ ID NO: 642406 - DNA, 19 bp, Mus musculus
  siRNA target sequence for B230339H12Rik (NM_172282.1,1050-1068).
gctgtgtacagcaataggt

SEQ ID NO: 642407 - DNA, 19 bp, Mus musculus
  siRNA target sequence for B230339H12Rik (NM_172282.1,1073-1091).
ctacgatgtttgggtatat

SEQ ID NO: 642408 - DNA, 19 bp, Mus musculus
  siRNA target sequence for B230339H12Rik (NM_172282.1,1076-1094).
cgatgtttgggtatataat

SEQ ID NO: 642409 - DNA, 19 bp, Mus musculus
  siRNA target sequence for B230339H12Rik (NM_172282.1,1080-1098).
gtttgggtatataatttgt

SEQ ID NO: 642410 - DNA, 19 bp, Mus musculus
  siRNA target sequence for B230339H12Rik (NM_172282.1,1123-1141).
ctgaacagtattaagtcta

SEQ ID NO: 642411 - DNA, 19 bp, Mus musculus
  siRNA target sequence for B230339H12Rik (NM_172282.1,1125-1143).
gaacagtattaagtctatt

SEQ ID NO: 642412 - DNA, 19 bp, Mus musculus
  siRNA target sequence for B230339H12Rik (NM_172282.1,1230-1248).
ggtgtggaggatatcctta

SEQ ID NO: 642413 - DNA, 19 bp, Mus musculus
  siRNA target sequence for B230339H12Rik (NM_172282.1,1233-1251).
gtggaggatatccttacaa

SEQ ID NO: 642414 - DNA, 19 bp, Mus musculus
  siRNA target sequence for B230339H12Rik (NM_172282.1,1249-1267).
caaggaccctgctatatga

SEQ ID NO: 642415 - DNA, 19 bp, Mus musculus
  siRNA target sequence for B230339H12Rik (NM_172282.1,1494-1512).
cgtcatgccaactctcata

SEQ ID NO: 642416 - DNA, 19 bp, Mus musculus
  siRNA target sequence for B230339H12Rik (NM_172282.1,1538-1556).
gcgttgtcatggaagtatt

SEQ ID NO: 642417 - DNA, 19 bp, Mus musculus
  siRNA target sequence for B230339H12Rik (NM_172282.1,1549-1567).
gaagtattgcgcatactgt

SEQ ID NO: 642418 - DNA, 19 bp, Mus musculus
  siRNA target sequence for B230339H12Rik (NM_172282.1,1557-1575).
gcgcatactgtttctgatt

SEQ ID NO: 642419 - DNA, 19 bp, Mus musculus
  siRNA target sequence for B230339H12Rik (NM_172282.1,1566-1584).
gtttctgattggacaaatt

SEQ ID NO: 642420 - DNA, 19 bp, Mus musculus
  siRNA target sequence for B230339H12Rik (NM_172282.1,1572-1590).
gattggacaaattctcttt

SEQ ID NO: 642421 - DNA, 19 bp, Mus musculus
  siRNA target sequence for B230339H12Rik (NM_172282.1,1623-1641).
catgaagacgtatctcata

SEQ ID NO: 642422 - DNA, 19 bp, Mus musculus
  siRNA target sequence for B230339H12Rik (NM_172282.1,1638-1656).
cataggaccgtattatcga

SEQ ID NO: 642423 - DNA, 19 bp, Mus musculus
  siRNA target sequence for B230339H12Rik (NM_172282.1,1817-1835).
ccgaggagatcatgactta

SEQ ID NO: 642424 - DNA, 19 bp, Mus musculus
  siRNA target sequence for B230339H12Rik (NM_172282.1,1866-1884).
catcttcttcgcatccata

SEQ ID NO: 642425 - DNA, 19 bp, Mus musculus
  siRNA target sequence for B230339H12Rik (NM_172282.1,1901-1919).
ccacctttgtgatctatga

SEQ ID NO: 642426 - DNA, 19 bp, Mus musculus
  siRNA target sequence for B230339H12Rik (NM_172282.1,1943-1961).
ccctgtccgtggtcatcat

SEQ ID NO: 642427 - DNA, 19 bp, Mus musculus
  siRNA target sequence for B230339H12Rik (NM_172282.1,1949-1967).
ccgtggtcatcatgaagtt

SEQ ID NO: 642428 - DNA, 19 bp, Mus musculus
  siRNA target sequence for B230339H12Rik (NM_172282.1,1950-1968).
cgtggtcatcatgaagttt

SEQ ID NO: 642429 - DNA, 19 bp, Mus musculus
  siRNA target sequence for B230339H12Rik (NM_172282.1,2115-2133).
ggtgtacctccttatccta

SEQ ID NO: 642430 - DNA, 19 bp, Mus musculus
  siRNA target sequence for B230339H12Rik (NM_172282.1,2116-2134).
gtgtacctccttatcctaa

SEQ ID NO: 642431 - DNA, 19 bp, Mus musculus
  siRNA target sequence for C80638 (NM_178877.3,459-477).
gaggctacggtgttggaaa

SEQ ID NO: 642432 - DNA, 19 bp, Mus musculus
  siRNA target sequence for C80638 (NM_178877.3,479-497).
ggtatcccaaccttactca

SEQ ID NO: 642433 - DNA, 19 bp, Mus musculus
  siRNA target sequence for C80638 (NM_178877.3,562-580).
cttttccacaggatctaca

SEQ ID NO: 642434 - DNA, 19 bp, Mus musculus
  siRNA target sequence for C80638 (NM_178877.3,568-586).
cacaggatctacagttttt

SEQ ID NO: 642435 - DNA, 19 bp, Mus musculus
  siRNA target sequence for C80638 (NM_178877.3,604-622).
cttggaggtggtaattggt

SEQ ID NO: 642436 - DNA, 19 bp, Mus musculus
  siRNA target sequence for C80638 (NM_178877.3,645-663).
ggttttttatccagtactt

SEQ ID NO: 642437 - DNA, 19 bp, Mus musculus
  siRNA target sequence for C80638 (NM_178877.3,958-976).
cagcatcgcagtgcttata

SEQ ID NO: 642438 - DNA, 19 bp, Mus musculus
  siRNA target sequence for C80638 (NM_178877.3,961-979).
catcgcagtgcttatacga

SEQ ID NO: 642439 - DNA, 19 bp, Mus musculus
  siRNA target sequence for C80638 (NM_178877.3,964-982).
cgcagtgcttatacgaatt

SEQ ID NO: 642440 - DNA, 19 bp, Mus musculus
  siRNA target sequence for C80638 (NM_178877.3,966-984).
cagtgcttatacgaattct

SEQ ID NO: 642441 - DNA, 19 bp, Mus musculus
  siRNA target sequence for C80638 (NM_178877.3,968-986).
gtgcttatacgaattctga

SEQ ID NO: 642442 - DNA, 19 bp, Mus musculus
  siRNA target sequence for C80638 (NM_178877.3,1005-1023).
gtttcgctggctttaacat

SEQ ID NO: 642443 - DNA, 19 bp, Mus musculus
  siRNA target sequence for Slc9a1 (NM_016981.1,332-350).
ccggcgtctggggatttca

SEQ ID NO: 642444 - DNA, 19 bp, Mus musculus
  siRNA target sequence for Slc9a1 (NM_016981.1,333-351).
cggcgtctggggatttcat

SEQ ID NO: 642445 - DNA, 19 bp, Mus musculus
  siRNA target sequence for Slc9a1 (NM_016981.1,526-544).
cgcccagatgaccacaatt

SEQ ID NO: 642446 - DNA, 19 bp, Mus musculus
  siRNA target sequence for Slc9a1 (NM_016981.1,537-555).
ccacaatttgaccaactta

SEQ ID NO: 642447 - DNA, 19 bp, Mus musculus
  siRNA target sequence for Slc9a1 (NM_016981.1,538-556).
cacaatttgaccaacttaa

SEQ ID NO: 642448 - DNA, 19 bp, Mus musculus
  siRNA target sequence for Slc9a1 (NM_016981.1,549-567).
caacttaatcattgaacat

SEQ ID NO: 642449 - DNA, 19 bp, Mus musculus
  siRNA target sequence for Slc9a1 (NM_016981.1,596-614).
cagtcctggacattgacta

SEQ ID NO: 642450 - DNA, 19 bp, Mus musculus
  siRNA target sequence for Slc9a1 (NM_016981.1,975-993).
cgagcagatcaacaacatt

SEQ ID NO: 642451 - DNA, 19 bp, Mus musculus
  siRNA target sequence for Slc9a1 (NM_016981.1,1618-1636).
gtcctgacctggttcatca

SEQ ID NO: 642452 - DNA, 19 bp, Mus musculus
  siRNA target sequence for Slc9a1 (NM_016981.1,1839-1857).
cctgttggccgtgaagaaa

SEQ ID NO: 642453 - DNA, 19 bp, Mus musculus
  siRNA target sequence for Slc9a1 (NM_016981.1,1840-1858).
ctgttggccgtgaagaaaa

SEQ ID NO: 642454 - DNA, 19 bp, Mus musculus
  siRNA target sequence for Slc9a1 (NM_016981.1,1932-1950).
ggacatctgtggtcattat

SEQ ID NO: 642455 - DNA, 19 bp, Mus musculus
  siRNA target sequence for Slc9a1 (NM_016981.1,1969-1987).
gacaagctcaaccgtttta

SEQ ID NO: 642456 - DNA, 19 bp, Mus musculus
  siRNA target sequence for Slc9a1 (NM_016981.1,1971-1989).
caagctcaaccgttttaat

SEQ ID NO: 642457 - DNA, 19 bp, Mus musculus
  siRNA target sequence for Slc9a1 (NM_016981.1,1975-1993).
ctcaaccgttttaataaga

SEQ ID NO: 642458 - DNA, 19 bp, Mus musculus
  siRNA target sequence for Slc9a1 (NM_016981.1,1980-1998).
ccgttttaataagaagtat

SEQ ID NO: 642459 - DNA, 19 bp, Mus musculus
  siRNA target sequence for Slc9a1 (NM_016981.1,2212-2230).
gaagagatccgcaaaatct

SEQ ID NO: 642460 - DNA, 19 bp, Mus musculus
  siRNA target sequence for Slc9a1 (NM_016981.1,2215-2233).
gagatccgcaaaatcttga

SEQ ID NO: 642461 - DNA, 19 bp, Mus musculus
  siRNA target sequence for Slc9a1 (NM_016981.1,2257-2275).
caacggctgcggtcctata

SEQ ID NO: 642462 - DNA, 19 bp, Mus musculus
  siRNA target sequence for Slc9a1 (NM_016981.1,2260-2278).
cggctgcggtcctataaca

SEQ ID NO: 642463 - DNA, 19 bp, Mus musculus
  siRNA target sequence for Slc9a1 (NM_016981.1,2262-2280).
gctgcggtcctataacaga

SEQ ID NO: 642464 - DNA, 19 bp, Mus musculus
  siRNA target sequence for Slc9a6 (NM_172780.1,102-120).
cttcgcagtgagcttcttt

SEQ ID NO: 642465 - DNA, 19 bp, Mus musculus
  siRNA target sequence for Slc9a6 (NM_172780.1,314-332).
ccggccttgctatgattta

SEQ ID NO: 642466 - DNA, 19 bp, Mus musculus
  siRNA target sequence for Slc9a6 (NM_172780.1,315-333).
cggccttgctatgatttat

SEQ ID NO: 642467 - DNA, 19 bp, Mus musculus
  siRNA target sequence for Slc9a6 (NM_172780.1,373-391).
gttccaagcgatgtgaata

SEQ ID NO: 642468 - DNA, 19 bp, Mus musculus
  siRNA target sequence for Slc9a6 (NM_172780.1,377-395).
caagcgatgtgaataatgt

SEQ ID NO: 642469 - DNA, 19 bp, Mus musculus
  siRNA target sequence for Slc9a6 (NM_172780.1,438-456).
ggtcaacgtcagtggaaaa

SEQ ID NO: 642470 - DNA, 19 bp, Mus musculus
  siRNA target sequence for Slc9a6 (NM_172780.1,439-457).
gtcaacgtcagtggaaaat

SEQ ID NO: 642471 - DNA, 19 bp, Mus musculus
  siRNA target sequence for Slc9a6 (NM_172780.1,441-459).
caacgtcagtggaaaattt

SEQ ID NO: 642472 - DNA, 19 bp, Mus musculus
  siRNA target sequence for Slc9a6 (NM_172780.1,444-462).
cgtcagtggaaaattttat

SEQ ID NO: 642473 - DNA, 19 bp, Mus musculus
  siRNA target sequence for Slc9a6 (NM_172780.1,488-506).
gctcacatgaactcaacaa

SEQ ID NO: 642474 - DNA, 19 bp, Mus musculus
  siRNA target sequence for Slc9a6 (NM_172780.1,595-613).
gggtacagtctcaaaagga

SEQ ID NO: 642475 - DNA, 19 bp, Mus musculus
  siRNA target sequence for Slc9a6 (NM_172780.1,625-643).
cggaaccttgggtctatct

SEQ ID NO: 642476 - DNA, 19 bp, Mus musculus
  siRNA target sequence for Slc9a6 (NM_172780.1,627-645).
gaaccttgggtctatctta

SEQ ID NO: 642477 - DNA, 19 bp, Mus musculus
  siRNA target sequence for Slc9a6 (NM_172780.1,631-649).
cttgggtctatcttagcat

SEQ ID NO: 642478 - DNA, 19 bp, Mus musculus
  siRNA target sequence for Slc9a6 (NM_172780.1,667-685).
gcaatttcttgtttcgtta

SEQ ID NO: 642479 - DNA, 19 bp, Mus musculus
  siRNA target sequence for Slc9a6 (NM_172780.1,668-686).
caatttcttgtttcgttat

SEQ ID NO: 642480 - DNA, 19 bp, Mus musculus
  siRNA target sequence for Slc9a6 (NM_172780.1,682-700).
gttattgggtccatcatgt

SEQ ID NO: 642481 - DNA, 19 bp, Mus musculus
  siRNA target sequence for Slc9a6 (NM_172780.1,731-749).
ggcagctcgcgggagattt

SEQ ID NO: 642482 - DNA, 19 bp, Mus musculus
  siRNA target sequence for Slc9a6 (NM_172780.1,732-750).
gcagctcgcgggagatttt

SEQ ID NO: 642483 - DNA, 19 bp, Mus musculus
  siRNA target sequence for Slc9a6 (NM_172780.1,733-751).
cagctcgcgggagattttt

SEQ ID NO: 642484 - DNA, 19 bp, Mus musculus
  siRNA target sequence for Slc9a6 (NM_172780.1,736-754).
ctcgcgggagatttttact

SEQ ID NO: 642485 - DNA, 19 bp, Mus musculus
  siRNA target sequence for Slc9a6 (NM_172780.1,738-756).
cgcgggagatttttacttt

SEQ ID NO: 642486 - DNA, 19 bp, Mus musculus
  siRNA target sequence for Slc9a6 (NM_172780.1,768-786).
gctgtttggtgccattgtt

SEQ ID NO: 642487 - DNA, 19 bp, Mus musculus
  siRNA target sequence for Slc9a6 (NM_172780.1,769-787).
ctgtttggtgccattgttt

SEQ ID NO: 642488 - DNA, 19 bp, Mus musculus
  siRNA target sequence for Slc9a6 (NM_172780.1,771-789).
gtttggtgccattgtttca

SEQ ID NO: 642489 - DNA, 19 bp, Mus musculus
  siRNA target sequence for Slc9a6 (NM_172780.1,966-984).
catgttcaaatctattgga

SEQ ID NO: 642490 - DNA, 19 bp, Mus musculus
  siRNA target sequence for Slc9a6 (NM_172780.1,995-1013).
ggatcttcagtggatcttt

SEQ ID NO: 642491 - DNA, 19 bp, Mus musculus
  siRNA target sequence for Slc9a6 (NM_172780.1,996-1014).
gatcttcagtggatctttt

SEQ ID NO: 642492 - DNA, 19 bp, Mus musculus
  siRNA target sequence for Slc9a6 (NM_172780.1,999-1017).
cttcagtggatcttttgca

SEQ ID NO: 642493 - DNA, 19 bp, Mus musculus
  siRNA target sequence for Slc9a6 (NM_172780.1,1154-1172).
caggtgtggttgcagtatt

SEQ ID NO: 642494 - DNA, 19 bp, Mus musculus
  siRNA target sequence for Slc9a6 (NM_172780.1,1156-1174).
ggtgtggttgcagtattgt

SEQ ID NO: 642495 - DNA, 19 bp, Mus musculus
  siRNA target sequence for Slc9a6 (NM_172780.1,1157-1175).
gtgtggttgcagtattgtt

SEQ ID NO: 642496 - DNA, 19 bp, Mus musculus
  siRNA target sequence for Slc9a6 (NM_172780.1,1181-1199).
gcatcacacaagcacatta

SEQ ID NO: 642497 - DNA, 19 bp, Mus musculus
  siRNA target sequence for Slc9a6 (NM_172780.1,1195-1213).
cattacacgtacaataatt

SEQ ID NO: 642498 - DNA, 19 bp, Mus musculus
  siRNA target sequence for Slc9a6 (NM_172780.1,1200-1218).
cacgtacaataatttgtct

SEQ ID NO: 642499 - DNA, 19 bp, Mus musculus
  siRNA target sequence for Slc9a6 (NM_172780.1,1222-1240).
gagtctcagcatagaacaa

SEQ ID NO: 642500 - DNA, 19 bp, Mus musculus
  siRNA target sequence for Slc9a6 (NM_172780.1,1235-1253).
gaacaaagcagttgtttga

SEQ ID NO: 642501 - DNA, 19 bp, Mus musculus
  siRNA target sequence for Slc9a6 (NM_172780.1,1245-1263).
gttgtttgagcttctcaat

SEQ ID NO: 642502 - DNA, 19 bp, Mus musculus
  siRNA target sequence for Slc9a6 (NM_172780.1,1326-1344).
cgtctttaacccaacattt

SEQ ID NO: 642503 - DNA, 19 bp, Mus musculus
  siRNA target sequence for Slc9a6 (NM_172780.1,1351-1369).
ggagcattcattgctattt

SEQ ID NO: 642504 - DNA, 19 bp, Mus musculus
  siRNA target sequence for Slc9a6 (NM_172780.1,1355-1373).
cattcattgctattttctt

SEQ ID NO: 642505 - DNA, 19 bp, Mus musculus
  siRNA target sequence for Slc9a6 (NM_172780.1,1411-1429).
cttaatttgggtagaagaa

SEQ ID NO: 642506 - DNA, 19 bp, Mus musculus
  siRNA target sequence for Slc9a6 (NM_172780.1,1430-1448).
gtaagattggatcaaattt

SEQ ID NO: 642507 - DNA, 19 bp, Mus musculus
  siRNA target sequence for Slc9a6 (NM_172780.1,1517-1535).
ccacttatgcacgacaaat

SEQ ID NO: 642508 - DNA, 19 bp, Mus musculus
  siRNA target sequence for Slc9a6 (NM_172780.1,1525-1543).
gcacgacaaatgatgttca

SEQ ID NO: 642509 - DNA, 19 bp, Mus musculus
  siRNA target sequence for Slc9a6 (NM_172780.1,1552-1570).
cttctgatcgtgtttttta

SEQ ID NO: 642510 - DNA, 19 bp, Mus musculus
  siRNA target sequence for Slc9a6 (NM_172780.1,1605-1623).
gctgtcatgcctgcatata

SEQ ID NO: 642511 - DNA, 19 bp, Mus musculus
  siRNA target sequence for Slc9a6 (NM_172780.1,1606-1624).
ctgtcatgcctgcatataa

SEQ ID NO: 642512 - DNA, 19 bp, Mus musculus
  siRNA target sequence for Slc9a6 (NM_172780.1,1722-1740).
caacttcgatcataactat

SEQ ID NO: 642513 - DNA, 19 bp, Mus musculus
  siRNA target sequence for Slc9a6 (NM_172780.1,1823-1841).
ccagcccccaagcatatga

SEQ ID NO: 642514 - DNA, 19 bp, Mus musculus
  siRNA target sequence for Slc9a6 (NM_172780.1,1824-1842).
cagcccccaagcatatgaa

SEQ ID NO: 642515 - DNA, 19 bp, Mus musculus
  siRNA target sequence for Slc9a6 (NM_172780.1,1826-1844).
gcccccaagcatatgaaaa

SEQ ID NO: 642516 - DNA, 19 bp, Mus musculus
  siRNA target sequence for Slc9a6 (NM_172780.1,1892-1910).
gtgatatcagtctgacata

SEQ ID NO: 642517 - DNA, 19 bp, Mus musculus
  siRNA target sequence for Slc9a6 (NM_172780.1,1992-2010).
ggaccgggagcttacattt

SEQ ID NO: 642518 - DNA, 19 bp, Mus musculus
  siRNA target sequence for Slc9a6 (NM_172780.1,2012-2030).
gggaccacgaactagtcat

SEQ ID NO: 642519 - DNA, 19 bp, Mus musculus
  siRNA target sequence for Slc9a6 (NM_172780.1,2013-2031).
ggaccacgaactagtcatt

SEQ ID NO: 642520 - DNA, 19 bp, Mus musculus
  siRNA target sequence for Slc9a6 (NM_172780.1,2047-2065).
gttcttccgatggatgatt

SEQ ID NO: 642521 - DNA, 19 bp, Mus musculus
  siRNA target sequence for Slc9a6 (NM_172780.1,2068-2086).
gaacctgcgttaaattcat

SEQ ID NO: 642522 - DNA, 19 bp, Mus musculus
  siRNA target sequence for Slc9a8 (NM_148929.1,45-63).
gaggagttctccaacacaa

SEQ ID NO: 642523 - DNA, 19 bp, Mus musculus
  siRNA target sequence for Slc9a8 (NM_148929.1,190-208).
cgagcggcatgaccatttt

SEQ ID NO: 642524 - DNA, 19 bp, Mus musculus
  siRNA target sequence for Slc9a8 (NM_148929.1,193-211).
gcggcatgaccattttctt

SEQ ID NO: 642525 - DNA, 19 bp, Mus musculus
  siRNA target sequence for Slc9a8 (NM_148929.1,262-280).
ggtaccgcctgcactttct

SEQ ID NO: 642526 - DNA, 19 bp, Mus musculus
  siRNA target sequence for Slc9a8 (NM_148929.1,290-308).
cgtggctgtggtttctcta

SEQ ID NO: 642527 - DNA, 19 bp, Mus musculus
  siRNA target sequence for Slc9a8 (NM_148929.1,295-313).
ctgtggtttctctaggtat

SEQ ID NO: 642528 - DNA, 19 bp, Mus musculus
  siRNA target sequence for Slc9a8 (NM_148929.1,300-318).
gtttctctaggtattctca

SEQ ID NO: 642529 - DNA, 19 bp, Mus musculus
  siRNA target sequence for Slc9a8 (NM_148929.1,315-333).
ctcatgggagcagtaataa

SEQ ID NO: 642530 - DNA, 19 bp, Mus musculus
  siRNA target sequence for Slc9a8 (NM_148929.1,385-403).
gccccaacatgtttttcct

SEQ ID NO: 642531 - DNA, 19 bp, Mus musculus
  siRNA target sequence for Slc9a8 (NM_148929.1,405-423).
ctcttgctcccacctatta

SEQ ID NO: 642532 - DNA, 19 bp, Mus musculus
  siRNA target sequence for Slc9a8 (NM_148929.1,410-428).
gctcccacctattatcttt

SEQ ID NO: 642533 - DNA, 19 bp, Mus musculus
  siRNA target sequence for Slc9a8 (NM_148929.1,414-432).
ccacctattatctttgagt

SEQ ID NO: 642534 - DNA, 19 bp, Mus musculus
  siRNA target sequence for Slc9a8 (NM_148929.1,486-504).
ctcttcgctgtctttggaa

SEQ ID NO: 642535 - DNA, 19 bp, Mus musculus
  siRNA target sequence for Slc9a8 (NM_148929.1,505-523).
cggcaatctcggcttttgt

SEQ ID NO: 642536 - DNA, 19 bp, Mus musculus
  siRNA target sequence for Slc9a8 (NM_148929.1,506-524).
ggcaatctcggcttttgta

SEQ ID NO: 642537 - DNA, 19 bp, Mus musculus
  siRNA target sequence for Slc9a8 (NM_148929.1,508-526).
caatctcggcttttgtagt

SEQ ID NO: 642538 - DNA, 19 bp, Mus musculus
  siRNA target sequence for Slc9a8 (NM_148929.1,549-567).
ggtcaggctgatgtaatct

SEQ ID NO: 642539 - DNA, 19 bp, Mus musculus
  siRNA target sequence for Slc9a8 (NM_148929.1,552-570).
caggctgatgtaatctcta

SEQ ID NO: 642540 - DNA, 19 bp, Mus musculus
  siRNA target sequence for Slc9a8 (NM_148929.1,554-572).
ggctgatgtaatctctaaa

SEQ ID NO: 642541 - DNA, 19 bp, Mus musculus
  siRNA target sequence for Slc9a8 (NM_148929.1,594-612).
gcatttggctccctgatat

SEQ ID NO: 642542 - DNA, 19 bp, Mus musculus
  siRNA target sequence for Slc9a8 (NM_148929.1,620-638).
cgacccagtcgccactatt

SEQ ID NO: 642543 - DNA, 19 bp, Mus musculus
  siRNA target sequence for Slc9a8 (NM_148929.1,630-648).
gccactattgcgattttca

SEQ ID NO: 642544 - DNA, 19 bp, Mus musculus
  siRNA target sequence for Slc9a8 (NM_148929.1,631-649).
ccactattgcgattttcaa

SEQ ID NO: 642545 - DNA, 19 bp, Mus musculus
  siRNA target sequence for Slc9a8 (NM_148929.1,734-752).
cacggctgaaggtctaaca

SEQ ID NO: 642546 - DNA, 19 bp, Mus musculus
  siRNA target sequence for Slc9a8 (NM_148929.1,745-763).
gtctaacaagaaaacatat

SEQ ID NO: 642547 - DNA, 19 bp, Mus musculus
  siRNA target sequence for Slc9a8 (NM_148929.1,912-930).
gagtttggcatgatgatca

SEQ ID NO: 642548 - DNA, 19 bp, Mus musculus
  siRNA target sequence for Slc9a8 (NM_148929.1,1004-1022).
catcgtgatgtcacactat

SEQ ID NO: 642549 - DNA, 19 bp, Mus musculus
  siRNA target sequence for Slc9a8 (NM_148929.1,1007-1025).
cgtgatgtcacactataca

SEQ ID NO: 642550 - DNA, 19 bp, Mus musculus
  siRNA target sequence for Slc9a8 (NM_148929.1,1116-1134).
cttggcctctccattttta

SEQ ID NO: 642551 - DNA, 19 bp, Mus musculus
  siRNA target sequence for Slc9a8 (NM_148929.1,1119-1137).
ggcctctccatttttagtt

SEQ ID NO: 642552 - DNA, 19 bp, Mus musculus
  siRNA target sequence for Slc9a8 (NM_148929.1,1194-1212).
ggcagagccgtcaacatct

SEQ ID NO: 642553 - DNA, 19 bp, Mus musculus
  siRNA target sequence for Slc9a8 (NM_148929.1,1195-1213).
gcagagccgtcaacatctt

SEQ ID NO: 642554 - DNA, 19 bp, Mus musculus
  siRNA target sequence for Slc9a8 (NM_148929.1,1587-1605).
gacctcaaaggcttcatgt

SEQ ID NO: 642555 - DNA, 19 bp, Mus musculus
  siRNA target sequence for Slc9a8 (NM_178371.2,212-230).
cctcctcgtcctaggtatt

SEQ ID NO: 642556 - DNA, 19 bp, Mus musculus
  siRNA target sequence for Slc9a9 (NM_177909.2,161-179).
gggcagcttcggtttacgt

SEQ ID NO: 642557 - DNA, 19 bp, Mus musculus
  siRNA target sequence for Slc9a9 (NM_177909.2,183-201).
ggaaggatgaagatcattt

SEQ ID NO: 642558 - DNA, 19 bp, Mus musculus
  siRNA target sequence for Slc9a9 (NM_177909.2,221-239).
gagctactcgcgtttaatt

SEQ ID NO: 642559 - DNA, 19 bp, Mus musculus
  siRNA target sequence for Slc9a9 (NM_177909.2,223-241).
gctactcgcgtttaatttt

SEQ ID NO: 642560 - DNA, 19 bp, Mus musculus
  siRNA target sequence for Slc9a9 (NM_177909.2,244-262).
gctcatccttaccatttta

SEQ ID NO: 642561 - DNA, 19 bp, Mus musculus
  siRNA target sequence for Slc9a9 (NM_177909.2,330-348).
gcctcataatgggactaat

SEQ ID NO: 642562 - DNA, 19 bp, Mus musculus
  siRNA target sequence for Slc9a9 (NM_177909.2,331-349).
cctcataatgggactaatt

SEQ ID NO: 642563 - DNA, 19 bp, Mus musculus
  siRNA target sequence for Slc9a9 (NM_177909.2,360-378).
ccacagcgccgactgatat

SEQ ID NO: 642564 - DNA, 19 bp, Mus musculus
  siRNA target sequence for Slc9a9 (NM_177909.2,361-379).
cacagcgccgactgatatt

SEQ ID NO: 642565 - DNA, 19 bp, Mus musculus
  siRNA target sequence for Slc9a9 (NM_177909.2,365-383).
gcgccgactgatattgata

SEQ ID NO: 642566 - DNA, 19 bp, Mus musculus
  siRNA target sequence for Slc9a9 (NM_177909.2,367-385).
gccgactgatattgatagt

SEQ ID NO: 642567 - DNA, 19 bp, Mus musculus
  siRNA target sequence for Slc9a9 (NM_177909.2,426-444).
caactctactagtcaacat

SEQ ID NO: 642568 - DNA, 19 bp, Mus musculus
  siRNA target sequence for Slc9a9 (NM_177909.2,447-465).
ccgaccaagtttatgagta

SEQ ID NO: 642569 - DNA, 19 bp, Mus musculus
  siRNA target sequence for Slc9a9 (NM_177909.2,448-466).
cgaccaagtttatgagtat

SEQ ID NO: 642570 - DNA, 19 bp, Mus musculus
  siRNA target sequence for Slc9a9 (NM_177909.2,449-467).
gaccaagtttatgagtata

SEQ ID NO: 642571 - DNA, 19 bp, Mus musculus
  siRNA target sequence for Slc9a9 (NM_177909.2,452-470).
caagtttatgagtataagt

SEQ ID NO: 642572 - DNA, 19 bp, Mus musculus
  siRNA target sequence for Slc9a9 (NM_177909.2,631-649).
gggatccattttaacatat

SEQ ID NO: 642573 - DNA, 19 bp, Mus musculus
  siRNA target sequence for Slc9a9 (NM_177909.2,675-693).
gtgtggtcatagggttaat

SEQ ID NO: 642574 - DNA, 19 bp, Mus musculus
  siRNA target sequence for Slc9a9 (NM_177909.2,895-913).
catagtcctcacatactct

SEQ ID NO: 642575 - DNA, 19 bp, Mus musculus
  siRNA target sequence for Slc9a9 (NM_177909.2,899-917).
gtcctcacatactctatat

SEQ ID NO: 642576 - DNA, 19 bp, Mus musculus
  siRNA target sequence for Slc9a9 (NM_177909.2,1046-1064).
ctgttgaccaaatttacca

SEQ ID NO: 642577 - DNA, 19 bp, Mus musculus
  siRNA target sequence for Slc9a9 (NM_177909.2,1144-1162).
cggcttaacaggcatagtt

SEQ ID NO: 642578 - DNA, 19 bp, Mus musculus
  siRNA target sequence for Slc9a9 (NM_177909.2,1155-1173).
gcatagttgctgttctctt

SEQ ID NO: 642579 - DNA, 19 bp, Mus musculus
  siRNA target sequence for Slc9a9 (NM_177909.2,1348-1366).
cggagcctttctagcaatt

SEQ ID NO: 642580 - DNA, 19 bp, Mus musculus
  siRNA target sequence for Slc9a9 (NM_177909.2,1349-1367).
ggagcctttctagcaattt

SEQ ID NO: 642581 - DNA, 19 bp, Mus musculus
  siRNA target sequence for Slc9a9 (NM_177909.2,1350-1368).
gagcctttctagcaatttt

SEQ ID NO: 642582 - DNA, 19 bp, Mus musculus
  siRNA target sequence for Slc9a9 (NM_177909.2,1518-1536).
ctcagcccaaacagatgat

SEQ ID NO: 642583 - DNA, 19 bp, Mus musculus
  siRNA target sequence for Slc9a9 (NM_177909.2,1523-1541).
cccaaacagatgatgttca

SEQ ID NO: 642584 - DNA, 19 bp, Mus musculus
  siRNA target sequence for Slc9a9 (NM_177909.2,1666-1684).
ctcacagcaggaagcaaat

SEQ ID NO: 642585 - DNA, 19 bp, Mus musculus
  siRNA target sequence for Slc9a9 (NM_177909.2,1729-1747).
cagaatgtggtatggattt

SEQ ID NO: 642586 - DNA, 19 bp, Mus musculus
  siRNA target sequence for Slc9a9 (NM_177909.2,1743-1761).
gatttgaccacaaatacct

SEQ ID NO: 642587 - DNA, 19 bp, Mus musculus
  siRNA target sequence for Slc9a9 (NM_177909.2,1854-1872).
cctatggggaacaactgaa

SEQ ID NO: 642588 - DNA, 19 bp, Mus musculus
  siRNA target sequence for Slc9a9 (NM_177909.2,1890-1908).
gtatcgtcaaccaagatga

SEQ ID NO: 642589 - DNA, 19 bp, Mus musculus
  siRNA target sequence for Slc9a9 (NM_177909.2,1904-1922).
gatgaactggccatgaatt

SEQ ID NO: 642590 - DNA, 19 bp, Mus musculus
  siRNA target sequence for Slc9a9 (NM_177909.2,1967-1985).
gctctggaccagaagtctt

SEQ ID NO: 642591 - DNA, 19 bp, Mus musculus
  siRNA target sequence for Slc9a9 (NM_177909.2,1998-2016).
caggcaaggagaatatcta

SEQ ID NO: 642592 - DNA, 19 bp, Mus musculus
  siRNA target sequence for Slc9a9 (NM_177909.2,2031-2049).
gcctgggaggctatgatct

SEQ ID NO: 642593 - DNA, 19 bp, Mus musculus
  siRNA target sequence for Slc9a9 (NM_177909.2,2035-2053).
gggaggctatgatctcaaa

SEQ ID NO: 642594 - DNA, 19 bp, Mus musculus
  siRNA target sequence for Slc8a2 (NM_148946.2,387-405).
cctgggtgtgtctatcatt

SEQ ID NO: 642595 - DNA, 19 bp, Mus musculus
  siRNA target sequence for Slc8a2 (NM_148946.2,514-532).
gagacggtgtccaacctta

SEQ ID NO: 642596 - DNA, 19 bp, Mus musculus
  siRNA target sequence for Slc8a2 (NM_148946.2,518-536).
cggtgtccaaccttacact

SEQ ID NO: 642597 - DNA, 19 bp, Mus musculus
  siRNA target sequence for Slc8a2 (NM_148946.2,554-572).
cagcgcctgagattctgtt

SEQ ID NO: 642598 - DNA, 19 bp, Mus musculus
  siRNA target sequence for Slc8a2 (NM_148946.2,695-713).
ctggcgagagccgtaagat

SEQ ID NO: 642599 - DNA, 19 bp, Mus musculus
  siRNA target sequence for Slc8a2 (NM_148946.2,697-715).
ggcgagagccgtaagatca

SEQ ID NO: 642600 - DNA, 19 bp, Mus musculus
  siRNA target sequence for Slc8a2 (NM_148946.2,698-716).
gcgagagccgtaagatcaa

SEQ ID NO: 642601 - DNA, 19 bp, Mus musculus
  siRNA target sequence for Slc8a2 (NM_148946.2,928-946).
cctcgcagtggaatcatca

SEQ ID NO: 642602 - DNA, 19 bp, Mus musculus
  siRNA target sequence for Slc8a2 (NM_148946.2,1143-1161).
gggcatcgccaagtactat

SEQ ID NO: 642603 - DNA, 19 bp, Mus musculus
  siRNA target sequence for Slc8a2 (NM_148946.2,1312-1330).
ggtgccagtcgcatcttct

SEQ ID NO: 642604 - DNA, 19 bp, Mus musculus
  siRNA target sequence for Slc8a2 (NM_148946.2,1333-1351).
gagcccagcctctatcact

SEQ ID NO: 642605 - DNA, 19 bp, Mus musculus
  siRNA target sequence for Slc8a2 (NM_148946.2,1456-1474).
gcaggctccgattatgagt

SEQ ID NO: 642606 - DNA, 19 bp, Mus musculus
  siRNA target sequence for Slc8a2 (NM_148946.2,1457-1475).
caggctccgattatgagta

SEQ ID NO: 642607 - DNA, 19 bp, Mus musculus
  siRNA target sequence for Slc8a2 (NM_148946.2,1837-1855).
cgtggcggtggtgtacatt

SEQ ID NO: 642608 - DNA, 19 bp, Mus musculus
  siRNA target sequence for Slc8a2 (NM_148946.2,1841-1859).
gcggtggtgtacattacga

SEQ ID NO: 642609 - DNA, 19 bp, Mus musculus
  siRNA target sequence for Slc8a2 (NM_148946.2,1888-1906).
gatgatgagaccatgaaaa

SEQ ID NO: 642610 - DNA, 19 bp, Mus musculus
  siRNA target sequence for Slc8a2 (NM_148946.2,1907-1925).
ctcttcaggtcaagatagt

SEQ ID NO: 642611 - DNA, 19 bp, Mus musculus
  siRNA target sequence for Slc8a2 (NM_148946.2,2121-2139).
catcatcgaggagtcttat

SEQ ID NO: 642612 - DNA, 19 bp, Mus musculus
  siRNA target sequence for Slc8a2 (NM_148946.2,2131-2149).
gagtcttatgactttaaga

SEQ ID NO: 642613 - DNA, 19 bp, Mus musculus
  siRNA target sequence for Slc8a2 (NM_148946.2,2151-2169).
cacggtggataaactcata

SEQ ID NO: 642614 - DNA, 19 bp, Mus musculus
  siRNA target sequence for Slc8a2 (NM_148946.2,2153-2171).
cggtggataaactcataaa

SEQ ID NO: 642615 - DNA, 19 bp, Mus musculus
  siRNA target sequence for Slc8a2 (NM_148946.2,2744-2762).
gcatcgcagtgctgttgta

SEQ ID NO: 642616 - DNA, 19 bp, Mus musculus
  siRNA target sequence for Slc8a3 (NM_080440.1,825-843).
gccagggtcattgtctatt

SEQ ID NO: 642617 - DNA, 19 bp, Mus musculus
  siRNA target sequence for Slc8a3 (NM_080440.1,973-991).
ctacaattcgggtatggaa

SEQ ID NO: 642618 - DNA, 19 bp, Mus musculus
  siRNA target sequence for Slc8a3 (NM_080440.1,1145-1163).
cattggcatctgtgtctat

SEQ ID NO: 642619 - DNA, 19 bp, Mus musculus
  siRNA target sequence for Slc8a3 (NM_080440.1,1150-1168).
gcatctgtgtctatgtgat

SEQ ID NO: 642620 - DNA, 19 bp, Mus musculus
  siRNA target sequence for Slc8a3 (NM_080440.1,1176-1194).
ggggagactcgaaagatca

SEQ ID NO: 642621 - DNA, 19 bp, Mus musculus
  siRNA target sequence for Slc8a3 (NM_080440.1,1239-1257).
gcctacatttggctctata

SEQ ID NO: 642622 - DNA, 19 bp, Mus musculus
  siRNA target sequence for Slc8a3 (NM_080440.1,1240-1258).
cctacatttggctctatat

SEQ ID NO: 642623 - DNA, 19 bp, Mus musculus
  siRNA target sequence for Slc8a3 (NM_080440.1,1361-1379).
gcgactgctcttctacaaa

SEQ ID NO: 642624 - DNA, 19 bp, Mus musculus
  siRNA target sequence for Slc8a3 (NM_080440.1,1363-1381).
gactgctcttctacaaata

SEQ ID NO: 642625 - DNA, 19 bp, Mus musculus
  siRNA target sequence for Slc8a3 (NM_080440.1,1404-1422).
gataaacaccgaggaatta

SEQ ID NO: 642626 - DNA, 19 bp, Mus musculus
  siRNA target sequence for Slc8a3 (NM_080440.1,1443-1461).
caccctaagggcattgaga

SEQ ID NO: 642627 - DNA, 19 bp, Mus musculus
  siRNA target sequence for Slc8a3 (NM_080440.1,1463-1481).
ggatgggaaaatgatgaat

SEQ ID NO: 642628 - DNA, 19 bp, Mus musculus
  siRNA target sequence for Slc8a3 (NM_080440.1,1475-1493).
gatgaattctcactttcta

SEQ ID NO: 642629 - DNA, 19 bp, Mus musculus
  siRNA target sequence for Slc8a3 (NM_080440.1,1533-1551).
gaatctcgcagggaaatga

SEQ ID NO: 642630 - DNA, 19 bp, Mus musculus
  siRNA target sequence for Slc8a3 (NM_080440.1,1544-1562).
ggaaatgatccggattcta

SEQ ID NO: 642631 - DNA, 19 bp, Mus musculus
  siRNA target sequence for Slc8a3 (NM_080440.1,1545-1563).
gaaatgatccggattctaa

SEQ ID NO: 642632 - DNA, 19 bp, Mus musculus
  siRNA target sequence for Slc8a3 (NM_080440.1,1550-1568).
gatccggattctaaaggat

SEQ ID NO: 642633 - DNA, 19 bp, Mus musculus
  siRNA target sequence for Slc8a3 (NM_080440.1,1630-1648).
ctctttcccatcaacagaa

SEQ ID NO: 642634 - DNA, 19 bp, Mus musculus
  siRNA target sequence for Slc8a3 (NM_080440.1,1688-1706).
gactggtgcgggcaatata

SEQ ID NO: 642635 - DNA, 19 bp, Mus musculus
  siRNA target sequence for Slc8a3 (NM_080440.1,1690-1708).
ctggtgcgggcaatatact

SEQ ID NO: 642636 - DNA, 19 bp, Mus musculus
  siRNA target sequence for Slc8a3 (NM_080440.1,1692-1710).
ggtgcgggcaatatactta

SEQ ID NO: 642637 - DNA, 19 bp, Mus musculus
  siRNA target sequence for Slc8a3 (NM_080440.1,1693-1711).
gtgcgggcaatatacttaa

SEQ ID NO: 642638 - DNA, 19 bp, Mus musculus
  siRNA target sequence for Slc8a3 (NM_080440.1,1695-1713).
gcgggcaatatacttaaga

SEQ ID NO: 642639 - DNA, 19 bp, Mus musculus
  siRNA target sequence for Slc8a3 (NM_080440.1,1786-1804).
cctctaaggtcttctttga

SEQ ID NO: 642640 - DNA, 19 bp, Mus musculus
  siRNA target sequence for Slc8a3 (NM_080440.1,1803-1821).
gacccatgttcttatcagt

SEQ ID NO: 642641 - DNA, 19 bp, Mus musculus
  siRNA target sequence for Slc8a3 (NM_080440.1,1889-1907).
gtacgtggactacaaaaca

SEQ ID NO: 642642 - DNA, 19 bp, Mus musculus
  siRNA target sequence for Slc8a3 (NM_080440.1,1991-2009).
gttctctgtgggcatcatt

SEQ ID NO: 642643 - DNA, 19 bp, Mus musculus
  siRNA target sequence for Slc8a3 (NM_080440.1,1996-2014).
ctgtgggcatcattgatga

SEQ ID NO: 642644 - DNA, 19 bp, Mus musculus
  siRNA target sequence for Slc8a3 (NM_080440.1,2054-2072).
gagcaatgtccgtgtagaa

SEQ ID NO: 642645 - DNA, 19 bp, Mus musculus
  siRNA target sequence for Slc8a3 (NM_080440.1,2056-2074).
gcaatgtccgtgtagaaga

SEQ ID NO: 642646 - DNA, 19 bp, Mus musculus
  siRNA target sequence for Slc8a3 (NM_080440.1,2090-2108).
ggggatgctcccagcaata

SEQ ID NO: 642647 - DNA, 19 bp, Mus musculus
  siRNA target sequence for Slc8a3 (NM_080440.1,2092-2110).
ggatgctcccagcaatact

SEQ ID NO: 642648 - DNA, 19 bp, Mus musculus
  siRNA target sequence for Slc8a3 (NM_080440.1,2097-2115).
ctcccagcaatactcaata

SEQ ID NO: 642649 - DNA, 19 bp, Mus musculus
  siRNA target sequence for Slc8a3 (NM_080440.1,2099-2117).
cccagcaatactcaatagt

SEQ ID NO: 642650 - DNA, 19 bp, Mus musculus
  siRNA target sequence for Slc8a3 (NM_080440.1,2101-2119).
cagcaatactcaatagtct

SEQ ID NO: 642651 - DNA, 19 bp, Mus musculus
  siRNA target sequence for Slc8a3 (NM_080440.1,2241-2259).
gttatggaagtcaaggttt

SEQ ID NO: 642652 - DNA, 19 bp, Mus musculus
  siRNA target sequence for Slc8a3 (NM_080440.1,2286-2304).
gtcatcgtcccttttagga

SEQ ID NO: 642653 - DNA, 19 bp, Mus musculus
  siRNA target sequence for Slc8a3 (NM_080440.1,2294-2312).
cccttttaggacagtagaa

SEQ ID NO: 642654 - DNA, 19 bp, Mus musculus
  siRNA target sequence for Slc8a3 (NM_080440.1,2383-2401).
cagtcaaaacaattcacat

SEQ ID NO: 642655 - DNA, 19 bp, Mus musculus
  siRNA target sequence for Slc8a3 (NM_080440.1,2399-2417).
catcaaggtaattgatgat

SEQ ID NO: 642656 - DNA, 19 bp, Mus musculus
  siRNA target sequence for Slc8a3 (NM_080440.1,2412-2430).
gatgataaggcgtatgaga

SEQ ID NO: 642657 - DNA, 19 bp, Mus musculus
  siRNA target sequence for Slc8a3 (NM_080440.1,2465-2483).
ccgcatggtggatatgagt

SEQ ID NO: 642658 - DNA, 19 bp, Mus musculus
  siRNA target sequence for Slc8a3 (NM_080440.1,2474-2492).
ggatatgagtgttcagaaa

SEQ ID NO: 642659 - DNA, 19 bp, Mus musculus
  siRNA target sequence for Slc8a3 (NM_080440.1,2489-2507).
gaaagcgctcctgttatct

SEQ ID NO: 642660 - DNA, 19 bp, Mus musculus
  siRNA target sequence for Slc8a3 (NM_080440.1,2585-2603).
gggtgaacaccccaaacta

SEQ ID NO: 642661 - DNA, 19 bp, Mus musculus
  siRNA target sequence for Slc8a3 (NM_080440.1,2597-2615).
caaactagaggtcatcatt

SEQ ID NO: 642662 - DNA, 19 bp, Mus musculus
  siRNA target sequence for Slc8a3 (NM_080440.1,2641-2659).
cagtggataagctgatcaa

SEQ ID NO: 642663 - DNA, 19 bp, Mus musculus
  siRNA target sequence for Slc8a3 (NM_080440.1,2663-2681).
gacaaacctggcattggtt

SEQ ID NO: 642664 - DNA, 19 bp, Mus musculus
  siRNA target sequence for Slc8a3 (NM_080440.1,3050-3068).
gtatgcagatgcttccatt

SEQ ID NO: 642665 - DNA, 19 bp, Mus musculus
  siRNA target sequence for Slc8a3 (NM_080440.1,3071-3089).
caacgtcacaggcagtaat

SEQ ID NO: 642666 - DNA, 19 bp, Mus musculus
  siRNA target sequence for Slc8a3 (NM_080440.1,3085-3103).
gtaatgccgtcaatgtctt

SEQ ID NO: 642667 - DNA, 19 bp, Mus musculus
  siRNA target sequence for Slc8a3 (NM_080440.1,3331-3349).
ggctcctctacatactatt

SEQ ID NO: 642668 - DNA, 19 bp, Mus musculus
  siRNA target sequence for Slc8a3 (NM_080440.1,3332-3350).
gctcctctacatactattt

SEQ ID NO: 642669 - DNA, 19 bp, Mus musculus
  siRNA target sequence for Slc24a1 (NM_144813.1,2843-2861).
cgacactgaggtgaaagat

SEQ ID NO: 642670 - DNA, 19 bp, Mus musculus
  siRNA target sequence for Slc24a1 (NM_144813.1,2880-2898).
gccaatgctgaagatcaat

SEQ ID NO: 642671 - DNA, 19 bp, Mus musculus
  siRNA target sequence for Slc24a1 (NM_144813.1,3110-3128).
cccactgtggctgacaata

SEQ ID NO: 642672 - DNA, 19 bp, Mus musculus
  siRNA target sequence for Slc24a1 (NM_144813.1,3119-3137).
gctgacaatacctgatgta

SEQ ID NO: 642673 - DNA, 19 bp, Mus musculus
  siRNA target sequence for Slc24a1 (NM_144813.1,3143-3161).
gcaggagtccaggaagttt

SEQ ID NO: 642674 - DNA, 19 bp, Mus musculus
  siRNA target sequence for Slc24a1 (NM_144813.1,3144-3162).
caggagtccaggaagtttt

SEQ ID NO: 642675 - DNA, 19 bp, Mus musculus
  siRNA target sequence for Slc24a1 (NM_144813.1,3146-3164).
ggagtccaggaagtttttt

SEQ ID NO: 642676 - DNA, 19 bp, Mus musculus
  siRNA target sequence for Slc24a1 (NM_144813.1,3233-3251).
ccaggttggcgaaaccatt

SEQ ID NO: 642677 - DNA, 19 bp, Mus musculus
  siRNA target sequence for Slc24a1 (NM_144813.1,3264-3282).
gagattatgggtttgacaa

SEQ ID NO: 642678 - DNA, 19 bp, Mus musculus
  siRNA target sequence for Slc24a1 (NM_144813.1,3370-3388).
cagtgggcagtaacatatt

SEQ ID NO: 642679 - DNA, 19 bp, Mus musculus
  siRNA target sequence for Slc24a1 (NM_144813.1,3376-3394).
gcagtaacatatttgacat

SEQ ID NO: 642680 - DNA, 19 bp, Mus musculus
  siRNA target sequence for Slc24a1 (NM_144813.1,3524-3542).
ctcaattgcatcgtgtaaa

SEQ ID NO: 642681 - DNA, 19 bp, Mus musculus
  siRNA target sequence for Slc24a1 (NM_144813.1,3571-3589).
cgatgttccttctttactt

SEQ ID NO: 642682 - DNA, 19 bp, Mus musculus
  siRNA target sequence for Slc24a1 (NM_144813.1,3614-3632).
gttagaagatcgaatcata

SEQ ID NO: 642683 - DNA, 19 bp, Mus musculus
  siRNA target sequence for D630024F24Rik (NM_172830.1,523-541).
gcagagagtccaatgcttt

SEQ ID NO: 642684 - DNA, 19 bp, Mus musculus
  siRNA target sequence for D630024F24Rik (NM_172830.1,663-681).
ccactaggggccttcgtaa

SEQ ID NO: 642685 - DNA, 19 bp, Mus musculus
  siRNA target sequence for D630024F24Rik (NM_172830.1,678-696).
gtaagactgcggaatccta

SEQ ID NO: 642686 - DNA, 19 bp, Mus musculus
  siRNA target sequence for D630024F24Rik (NM_172830.1,682-700).
gactgcggaatcctatagt

SEQ ID NO: 642687 - DNA, 19 bp, Mus musculus
  siRNA target sequence for D630024F24Rik (NM_172830.1,709-727).
ctcttacagagatgatctt

SEQ ID NO: 642688 - DNA, 19 bp, Mus musculus
  siRNA target sequence for D630024F24Rik (NM_172830.1,960-978).
ctaccatctcagcacaaaa

SEQ ID NO: 642689 - DNA, 19 bp, Mus musculus
  siRNA target sequence for D630024F24Rik (NM_172830.1,963-981).
ccatctcagcacaaaagat

SEQ ID NO: 642690 - DNA, 19 bp, Mus musculus
  siRNA target sequence for D630024F24Rik (NM_172830.1,1290-1308).
cgctacttcaccagattca

SEQ ID NO: 642691 - DNA, 19 bp, Mus musculus
  siRNA target sequence for D630024F24Rik (NM_172830.1,1292-1310).
ctacttcaccagattcaca

SEQ ID NO: 642692 - DNA, 19 bp, Mus musculus
  siRNA target sequence for D630024F24Rik (NM_172830.1,1382-1400).
ccgtgcctatccaatccaa

SEQ ID NO: 642693 - DNA, 19 bp, Mus musculus
  siRNA target sequence for D630024F24Rik (NM_172830.1,1383-1401).
cgtgcctatccaatccaaa

SEQ ID NO: 642694 - DNA, 19 bp, Mus musculus
  siRNA target sequence for D630024F24Rik (NM_172830.1,1492-1510).
cagaggacatcttaagtgt

SEQ ID NO: 642695 - DNA, 19 bp, Mus musculus
  siRNA target sequence for D630024F24Rik (NM_172830.1,1512-1530).
ccaggtctagtcaatgctt

SEQ ID NO: 642696 - DNA, 19 bp, Mus musculus
  siRNA target sequence for D630024F24Rik (NM_172830.1,1599-1617).
ccagacatcgccttcttct

SEQ ID NO: 642697 - DNA, 19 bp, Mus musculus
  siRNA target sequence for D630024F24Rik (NM_172830.1,1656-1674).
gctctcaagcacataaaga

SEQ ID NO: 642698 - DNA, 19 bp, Mus musculus
  siRNA target sequence for D630024F24Rik (NM_172830.1,1657-1675).
ctctcaagcacataaagaa

SEQ ID NO: 642699 - DNA, 19 bp, Mus musculus
  siRNA target sequence for D630024F24Rik (NM_172830.1,1659-1677).
ctcaagcacataaagaaca

SEQ ID NO: 642700 - DNA, 19 bp, Mus musculus
  siRNA target sequence for D630024F24Rik (NM_172830.1,1896-1914).
ctactgctgtcaatcctta

SEQ ID NO: 642701 - DNA, 19 bp, Mus musculus
  siRNA target sequence for D630024F24Rik (NM_172830.1,1899-1917).
ctgctgtcaatccttatct

SEQ ID NO: 642702 - DNA, 19 bp, Mus musculus
  siRNA target sequence for D630024F24Rik (NM_172830.1,1947-1965).
ctcaaccgtgcagaataca

SEQ ID NO: 642703 - DNA, 19 bp, Mus musculus
  siRNA target sequence for D630024F24Rik (NM_172830.1,1949-1967).
caaccgtgcagaatacaga

SEQ ID NO: 642704 - DNA, 19 bp, Mus musculus
  siRNA target sequence for D630024F24Rik (NM_172830.1,2416-2434).
gtctgctttgggtagtcaa

SEQ ID NO: 642705 - DNA, 19 bp, Mus musculus
  siRNA target sequence for D630024F24Rik (NM_172830.1,2586-2604).
gagccagagcacttgttca

SEQ ID NO: 642706 - DNA, 19 bp, Mus musculus
  siRNA target sequence for Slc4a1 (NM_011403.1,195-213).
gaacataataggacagata

SEQ ID NO: 642707 - DNA, 19 bp, Mus musculus
  siRNA target sequence for Slc4a1 (NM_011403.1,206-224).
gacagatagcatatagaga

SEQ ID NO: 642708 - DNA, 19 bp, Mus musculus
  siRNA target sequence for Slc4a1 (NM_011403.1,215-233).
catatagagacctaaccat

SEQ ID NO: 642709 - DNA, 19 bp, Mus musculus
  siRNA target sequence for Slc4a1 (NM_011403.1,326-344).
gctccggtcaggtctatgt

SEQ ID NO: 642710 - DNA, 19 bp, Mus musculus
  siRNA target sequence for Slc4a1 (NM_011403.1,450-468).
gggtcgcccacatctatct

SEQ ID NO: 642711 - DNA, 19 bp, Mus musculus
  siRNA target sequence for Slc4a1 (NM_011403.1,451-469).
ggtcgcccacatctatctt

SEQ ID NO: 642712 - DNA, 19 bp, Mus musculus
  siRNA target sequence for Slc4a1 (NM_011403.1,452-470).
gtcgcccacatctatctta

SEQ ID NO: 642713 - DNA, 19 bp, Mus musculus
  siRNA target sequence for Slc4a1 (NM_011403.1,477-495).
cttctggagccttctagaa

SEQ ID NO: 642714 - DNA, 19 bp, Mus musculus
  siRNA target sequence for Slc4a1 (NM_011403.1,498-516).
gcagaaggtcttctcaaaa

SEQ ID NO: 642715 - DNA, 19 bp, Mus musculus
  siRNA target sequence for Slc4a1 (NM_011403.1,819-837).
gaagatccccccagattca

SEQ ID NO: 642716 - DNA, 19 bp, Mus musculus
  siRNA target sequence for Slc4a1 (NM_011403.1,982-1000).
gctccgcatgtcgactata

SEQ ID NO: 642717 - DNA, 19 bp, Mus musculus
  siRNA target sequence for Slc4a1 (NM_011403.1,1025-1043).
ctctcatgacagaaagagt

SEQ ID NO: 642718 - DNA, 19 bp, Mus musculus
  siRNA target sequence for Slc4a1 (NM_011403.1,1134-1152).
cacagacgccccttcagaa

SEQ ID NO: 642719 - DNA, 19 bp, Mus musculus
  siRNA target sequence for Slc4a1 (NM_011403.1,1136-1154).
cagacgccccttcagaaaa

SEQ ID NO: 642720 - DNA, 19 bp, Mus musculus
  siRNA target sequence for Slc4a1 (NM_011403.1,1140-1158).
cgccccttcagaaaaagct

SEQ ID NO: 642721 - DNA, 19 bp, Mus musculus
  siRNA target sequence for Slc4a1 (NM_011403.1,1148-1166).
cagaaaaagctctgcttaa

SEQ ID NO: 642722 - DNA, 19 bp, Mus musculus
  siRNA target sequence for Slc4a1 (NM_011403.1,1225-1243).
ccagaccccaacttgtaca

SEQ ID NO: 642723 - DNA, 19 bp, Mus musculus
  siRNA target sequence for Slc4a1 (NM_011403.1,1226-1244).
cagaccccaacttgtacaa

SEQ ID NO: 642724 - DNA, 19 bp, Mus musculus
  siRNA target sequence for Slc4a1 (NM_011403.1,1322-1340).
gaggcctgatccgtgatat

SEQ ID NO: 642725 - DNA, 19 bp, Mus musculus
  siRNA target sequence for Slc4a1 (NM_011403.1,1468-1486).
gaaaagacccggaacttga

SEQ ID NO: 642726 - DNA, 19 bp, Mus musculus
  siRNA target sequence for Slc4a1 (NM_011403.1,1611-1629).
ctcgttctgtgaaagcaat

SEQ ID NO: 642727 - DNA, 19 bp, Mus musculus
  siRNA target sequence for Slc4a1 (NM_011403.1,1709-1727).
gcagcttcctcgtccaata

SEQ ID NO: 642728 - DNA, 19 bp, Mus musculus
  siRNA target sequence for Slc4a1 (NM_011403.1,1794-1812).
ctccaagctgatcaagatt

SEQ ID NO: 642729 - DNA, 19 bp, Mus musculus
  siRNA target sequence for Slc4a1 (NM_011403.1,1796-1814).
ccaagctgatcaagatttt

SEQ ID NO: 642730 - DNA, 19 bp, Mus musculus
  siRNA target sequence for Slc4a1 (NM_011403.1,1934-1952).
ccatgacgctacgaaagtt

SEQ ID NO: 642731 - DNA, 19 bp, Mus musculus
  siRNA target sequence for Slc4a1 (NM_011403.1,1940-1958).
cgctacgaaagttcaagaa

SEQ ID NO: 642732 - DNA, 19 bp, Mus musculus
  siRNA target sequence for Slc4a1 (NM_011403.1,1977-1995).
caagctgcgtagagtcatt

SEQ ID NO: 642733 - DNA, 19 bp, Mus musculus
  siRNA target sequence for Slc4a1 (NM_011403.1,2083-2101).
cctgatggcctcaaagtgt

SEQ ID NO: 642734 - DNA, 19 bp, Mus musculus
  siRNA target sequence for Slc4a1 (NM_011403.1,2131-2149).
caccctctggggctgtata

SEQ ID NO: 642735 - DNA, 19 bp, Mus musculus
  siRNA target sequence for Slc4a1 (NM_011403.1,2133-2151).
ccctctggggctgtataga

SEQ ID NO: 642736 - DNA, 19 bp, Mus musculus
  siRNA target sequence for Slc4a1 (NM_011403.1,2157-2175).
ccccacgtggatgatgttt

SEQ ID NO: 642737 - DNA, 19 bp, Mus musculus
  siRNA target sequence for Slc4a1 (NM_011403.1,2234-2252).
ccacgctgattgtcagtaa

SEQ ID NO: 642738 - DNA, 19 bp, Mus musculus
  siRNA target sequence for Slc4a1 (NM_011403.1,2235-2253).
cacgctgattgtcagtaaa

SEQ ID NO: 642739 - DNA, 19 bp, Mus musculus
  siRNA target sequence for Slc4a1 (NM_011403.1,2255-2273).
cagaacggaagatgatcaa

SEQ ID NO: 642740 - DNA, 19 bp, Mus musculus
  siRNA target sequence for Slc4a1 (NM_011403.1,2350-2368).
ctcagtgccaccactgtaa

SEQ ID NO: 642741 - DNA, 19 bp, Mus musculus
  siRNA target sequence for Slc4a1 (NM_011403.1,2638-2656).
ccggatgtgccctttgtca

SEQ ID NO: 642742 - DNA, 19 bp, Mus musculus
  siRNA target sequence for Slc4a1 (NM_011403.1,2832-2850).
gtgtctggacggtgatgat

SEQ ID NO: 642743 - DNA, 19 bp, Mus musculus
  siRNA target sequence for Slc4a1 (NM_011403.1,2842-2860).
ggtgatgatgccaaagtga

SEQ ID NO: 642744 - DNA, 19 bp, Mus musculus
  siRNA target sequence for Slc4a2 (NM_009207.1,407-425).
gtcctcccaccatatccat

SEQ ID NO: 642745 - DNA, 19 bp, Mus musculus
  siRNA target sequence for Slc4a2 (NM_009207.1,526-544).
gagagacccccactattga

SEQ ID NO: 642746 - DNA, 19 bp, Mus musculus
  siRNA target sequence for Slc4a2 (NM_009207.1,852-870).
cctggacatcgaagttaca

SEQ ID NO: 642747 - DNA, 19 bp, Mus musculus
  siRNA target sequence for Slc4a2 (NM_009207.1,853-871).
ctggacatcgaagttacaa

SEQ ID NO: 642748 - DNA, 19 bp, Mus musculus
  siRNA target sequence for Slc4a2 (NM_009207.1,926-944).
gcctagggtccctactgat

SEQ ID NO: 642749 - DNA, 19 bp, Mus musculus
  siRNA target sequence for Slc4a2 (NM_009207.1,973-991).
ccgaccttgacctcatgaa

SEQ ID NO: 642750 - DNA, 19 bp, Mus musculus
  siRNA target sequence for Slc4a2 (NM_009207.1,974-992).
cgaccttgacctcatgaaa

SEQ ID NO: 642751 - DNA, 19 bp, Mus musculus
  siRNA target sequence for Slc4a2 (NM_009207.1,977-995).
ccttgacctcatgaaaagt

SEQ ID NO: 642752 - DNA, 19 bp, Mus musculus
  siRNA target sequence for Slc4a2 (NM_009207.1,1196-1214).
gacagcccgctggataaaa

SEQ ID NO: 642753 - DNA, 19 bp, Mus musculus
  siRNA target sequence for Slc4a2 (NM_009207.1,1201-1219).
cccgctggataaaattcga

SEQ ID NO: 642754 - DNA, 19 bp, Mus musculus
  siRNA target sequence for Slc4a2 (NM_009207.1,1458-1476).
ccaagtgacgagaaagagt

SEQ ID NO: 642755 - DNA, 19 bp, Mus musculus
  siRNA target sequence for Slc4a2 (NM_009207.1,1459-1477).
caagtgacgagaaagagtt

SEQ ID NO: 642756 - DNA, 19 bp, Mus musculus
  siRNA target sequence for Slc4a2 (NM_009207.1,1910-1928).
gtctgacaagcaatttcat

SEQ ID NO: 642757 - DNA, 19 bp, Mus musculus
  siRNA target sequence for Slc4a2 (NM_009207.1,1912-1930).
ctgacaagcaatttcatga

SEQ ID NO: 642758 - DNA, 19 bp, Mus musculus
  siRNA target sequence for Slc4a2 (NM_009207.1,1961-1979).
cttgctgactgctatcaat

SEQ ID NO: 642759 - DNA, 19 bp, Mus musculus
  siRNA target sequence for Slc4a2 (NM_009207.1,2058-2076).
caacgccagatgctaaaga

SEQ ID NO: 642760 - DNA, 19 bp, Mus musculus
  siRNA target sequence for Slc4a2 (NM_009207.1,2244-2262).
cgctacccccactacctaa

SEQ ID NO: 642761 - DNA, 19 bp, Mus musculus
  siRNA target sequence for Slc4a2 (NM_009207.1,2507-2525).
ctcgttctgcagtagcaat

SEQ ID NO: 642762 - DNA, 19 bp, Mus musculus
  siRNA target sequence for Slc4a2 (NM_009207.1,2609-2627).
cttcctggtccgctttgta

SEQ ID NO: 642763 - DNA, 19 bp, Mus musculus
  siRNA target sequence for Slc4a2 (NM_009207.1,2861-2879).
gcccaacacagctttgcta

SEQ ID NO: 642764 - DNA, 19 bp, Mus musculus
  siRNA target sequence for Slc4a2 (NM_009207.1,2992-3010).
ccatcgcgatcctcatcat

SEQ ID NO: 642765 - DNA, 19 bp, Mus musculus
  siRNA target sequence for Slc4a2 (NM_009207.1,3272-3290).
cgacctgttgctcattgta

SEQ ID NO: 642766 - DNA, 19 bp, Mus musculus
  siRNA target sequence for Slc4a2 (NM_009207.1,3618-3636).
ccagatgtcacctatgtca

SEQ ID NO: 642767 - DNA, 19 bp, Mus musculus
  siRNA target sequence for Slc4a2 (NM_009207.1,3777-3795).
gtacttacccgaatcttca

SEQ ID NO: 642768 - DNA, 19 bp, Mus musculus
  siRNA target sequence for Slc4a3 (NM_009208.1,386-404).
gcgagcgggactttgagtt

SEQ ID NO: 642769 - DNA, 19 bp, Mus musculus
  siRNA target sequence for Slc4a3 (NM_009208.1,387-405).
cgagcgggactttgagttt

SEQ ID NO: 642770 - DNA, 19 bp, Mus musculus
  siRNA target sequence for Slc4a3 (NM_009208.1,661-679).
ggtcccccacagaaagcaa

SEQ ID NO: 642771 - DNA, 19 bp, Mus musculus
  siRNA target sequence for Slc4a3 (NM_009208.1,684-702).
ctccattggaagtgatgaa

SEQ ID NO: 642772 - DNA, 19 bp, Mus musculus
  siRNA target sequence for Slc4a3 (NM_009208.1,1090-1108).
cccatcttgcgcaggaaaa

SEQ ID NO: 642773 - DNA, 19 bp, Mus musculus
  siRNA target sequence for Slc4a3 (NM_009208.1,1091-1109).
ccatcttgcgcaggaaaaa

SEQ ID NO: 642774 - DNA, 19 bp, Mus musculus
  siRNA target sequence for Slc4a3 (NM_009208.1,1205-1223).
cagcacgctggatcaagtt

SEQ ID NO: 642775 - DNA, 19 bp, Mus musculus
  siRNA target sequence for Slc4a3 (NM_009208.1,1288-1306).
cgtagcctgctggaactta

SEQ ID NO: 642776 - DNA, 19 bp, Mus musculus
  siRNA target sequence for Slc4a3 (NM_009208.1,1380-1398).
ggtggagaccatgattgta

SEQ ID NO: 642777 - DNA, 19 bp, Mus musculus
  siRNA target sequence for Slc4a3 (NM_009208.1,1381-1399).
gtggagaccatgattgtat

SEQ ID NO: 642778 - DNA, 19 bp, Mus musculus
  siRNA target sequence for Slc4a3 (NM_009208.1,1383-1401).
ggagaccatgattgtatct

SEQ ID NO: 642779 - DNA, 19 bp, Mus musculus
  siRNA target sequence for Slc4a3 (NM_009208.1,1439-1457).
ggactctactcctgaaaca

SEQ ID NO: 642780 - DNA, 19 bp, Mus musculus
  siRNA target sequence for Slc4a3 (NM_009208.1,1460-1478).
gccatcccaacgatgacaa

SEQ ID NO: 642781 - DNA, 19 bp, Mus musculus
  siRNA target sequence for Slc4a3 (NM_009208.1,1837-1855).
gttcgcttcctctttgtga

SEQ ID NO: 642782 - DNA, 19 bp, Mus musculus
  siRNA target sequence for Slc4a3 (NM_009208.1,1877-1895).
gcactgactatcacgaatt

SEQ ID NO: 642783 - DNA, 19 bp, Mus musculus
  siRNA target sequence for Slc4a3 (NM_009208.1,1878-1896).
cactgactatcacgaatta

SEQ ID NO: 642784 - DNA, 19 bp, Mus musculus
  siRNA target sequence for Slc4a3 (NM_009208.1,1978-1996).
ggtgccatcagcgagtttt

SEQ ID NO: 642785 - DNA, 19 bp, Mus musculus
  siRNA target sequence for Slc4a3 (NM_009208.1,1979-1997).
gtgccatcagcgagttttt

SEQ ID NO: 642786 - DNA, 19 bp, Mus musculus
  siRNA target sequence for Slc4a3 (NM_009208.1,1983-2001).
catcagcgagtttttggat

SEQ ID NO: 642787 - DNA, 19 bp, Mus musculus
  siRNA target sequence for Slc4a3 (NM_009208.1,1992-2010).
gtttttggatggtagcatt

SEQ ID NO: 642788 - DNA, 19 bp, Mus musculus
  siRNA target sequence for Slc4a3 (NM_009208.1,2234-2252).
ggctagtgcgagatgtgaa

SEQ ID NO: 642789 - DNA, 19 bp, Mus musculus
  siRNA target sequence for Slc4a3 (NM_009208.1,2314-2332).
gctgtgctctttatctatt

SEQ ID NO: 642790 - DNA, 19 bp, Mus musculus
  siRNA target sequence for Slc4a3 (NM_009208.1,2399-2417).
gcgtgtcagagctgattgt

SEQ ID NO: 642791 - DNA, 19 bp, Mus musculus
  siRNA target sequence for Slc4a3 (NM_009208.1,2671-2689).
ctcatctcgctaattttca

SEQ ID NO: 642792 - DNA, 19 bp, Mus musculus
  siRNA target sequence for Slc4a3 (NM_009208.1,2676-2694).
ctcgctaattttcatctat

SEQ ID NO: 642793 - DNA, 19 bp, Mus musculus
  siRNA target sequence for Slc4a3 (NM_009208.1,2678-2696).
cgctaattttcatctatga

SEQ ID NO: 642794 - DNA, 19 bp, Mus musculus
  siRNA target sequence for Slc4a3 (NM_009208.1,2778-2796).
cttggaactgaatagtagt

SEQ ID NO: 642795 - DNA, 19 bp, Mus musculus
  siRNA target sequence for Slc4a3 (NM_009208.1,2943-2961).
gcgcatcatcggggatttt

SEQ ID NO: 642796 - DNA, 19 bp, Mus musculus
  siRNA target sequence for Slc4a3 (NM_009208.1,2985-3003).
gatggtccttgtggattat

SEQ ID NO: 642797 - DNA, 19 bp, Mus musculus
  siRNA target sequence for Slc4a3 (NM_009208.1,3440-3458).
gcctcgtgggcctgtctat

SEQ ID NO: 642798 - DNA, 19 bp, Mus musculus
  siRNA target sequence for Slc4a3 (NM_009208.1,3535-3553).
ctgtctggtatccaattgt

SEQ ID NO: 642799 - DNA, 19 bp, Mus musculus
  siRNA target sequence for Slc4a3 (NM_009208.1,3556-3574).
caacgtctgctgctcattt

SEQ ID NO: 642800 - DNA, 19 bp, Mus musculus
  siRNA target sequence for Slc4a3 (NM_009208.1,3559-3577).
cgtctgctgctcattttca

SEQ ID NO: 642801 - DNA, 19 bp, Mus musculus
  siRNA target sequence for Slc4a3 (NM_009208.1,3789-3807).
ggcgctggactctgaagat

SEQ ID NO: 642802 - DNA, 19 bp, Mus musculus
  siRNA target sequence for Slc4a4 (NM_018760.1,55-73).
gaggggcttccttccttaa

SEQ ID NO: 642803 - DNA, 19 bp, Mus musculus
  siRNA target sequence for Slc4a4 (NM_018760.1,102-120).
ggtcaccacacgatctaca

SEQ ID NO: 642804 - DNA, 19 bp, Mus musculus
  siRNA target sequence for Slc4a4 (NM_018760.1,103-121).
gtcaccacacgatctacat

SEQ ID NO: 642805 - DNA, 19 bp, Mus musculus
  siRNA target sequence for Slc4a4 (NM_018760.1,201-219).
gagagaatctccgagaatt

SEQ ID NO: 642806 - DNA, 19 bp, Mus musculus
  siRNA target sequence for Slc4a4 (NM_018760.1,213-231).
gagaattactccgacaaat

SEQ ID NO: 642807 - DNA, 19 bp, Mus musculus
  siRNA target sequence for Slc4a4 (NM_018760.1,215-233).
gaattactccgacaaatct

SEQ ID NO: 642808 - DNA, 19 bp, Mus musculus
  siRNA target sequence for Slc4a4 (NM_018760.1,237-255).
gtggagaatgcggatgaat

SEQ ID NO: 642809 - DNA, 19 bp, Mus musculus
  siRNA target sequence for Slc4a4 (NM_018760.1,295-313).
cagaacgcatccgattcat

SEQ ID NO: 642810 - DNA, 19 bp, Mus musculus
  siRNA target sequence for Slc4a4 (NM_018760.1,297-315).
gaacgcatccgattcatct

SEQ ID NO: 642811 - DNA, 19 bp, Mus musculus
  siRNA target sequence for Slc4a4 (NM_018760.1,412-430).
cagcgaggtggattaagtt

SEQ ID NO: 642812 - DNA, 19 bp, Mus musculus
  siRNA target sequence for Slc4a4 (NM_018760.1,416-434).
gaggtggattaagtttgaa

SEQ ID NO: 642813 - DNA, 19 bp, Mus musculus
  siRNA target sequence for Slc4a4 (NM_018760.1,656-674).
ccggaaacatcgacatcaa

SEQ ID NO: 642814 - DNA, 19 bp, Mus musculus
  siRNA target sequence for Slc4a4 (NM_018760.1,666-684).
cgacatcaaaccaagaaat

SEQ ID NO: 642815 - DNA, 19 bp, Mus musculus
  siRNA target sequence for Slc4a4 (NM_018760.1,730-748).
caagtaggatgtttagcaa

SEQ ID NO: 642816 - DNA, 19 bp, Mus musculus
  siRNA target sequence for Slc4a4 (NM_018760.1,740-758).
gtttagcaaccctgataat

SEQ ID NO: 642817 - DNA, 19 bp, Mus musculus
  siRNA target sequence for Slc4a4 (NM_018760.1,1056-1074).
gctatcgccaccttgatgt

SEQ ID NO: 642818 - DNA, 19 bp, Mus musculus
  siRNA target sequence for Slc4a4 (NM_018760.1,1434-1452).
gctctctctgcgattctct

SEQ ID NO: 642819 - DNA, 19 bp, Mus musculus
  siRNA target sequence for Slc4a4 (NM_018760.1,1439-1457).
ctctgcgattctcttcatt

SEQ ID NO: 642820 - DNA, 19 bp, Mus musculus
  siRNA target sequence for Slc4a4 (NM_018760.1,1441-1459).
ctgcgattctcttcattta

SEQ ID NO: 642821 - DNA, 19 bp, Mus musculus
  siRNA target sequence for Slc4a4 (NM_018760.1,1444-1462).
cgattctcttcatttatct

SEQ ID NO: 642822 - DNA, 19 bp, Mus musculus
  siRNA target sequence for Slc4a4 (NM_018760.1,1844-1862).
caagctagcagattactat

SEQ ID NO: 642823 - DNA, 19 bp, Mus musculus
  siRNA target sequence for Slc4a4 (NM_018760.1,1854-1872).
gattactatcccatcaact

SEQ ID NO: 642824 - DNA, 19 bp, Mus musculus
  siRNA target sequence for Slc4a4 (NM_018760.1,1877-1895).
cttcaaagtgggttacaat

SEQ ID NO: 642825 - DNA, 19 bp, Mus musculus
  siRNA target sequence for Slc4a4 (NM_018760.1,1919-1937).
gccacccgacccagttaat

SEQ ID NO: 642826 - DNA, 19 bp, Mus musculus
  siRNA target sequence for Slc4a4 (NM_018760.1,1921-1939).
cacccgacccagttaatct

SEQ ID NO: 642827 - DNA, 19 bp, Mus musculus
  siRNA target sequence for Slc4a4 (NM_018760.1,1923-1941).
cccgacccagttaatctct

SEQ ID NO: 642828 - DNA, 19 bp, Mus musculus
  siRNA target sequence for Slc4a4 (NM_018760.1,1929-1947).
ccagttaatctctcagtat

SEQ ID NO: 642829 - DNA, 19 bp, Mus musculus
  siRNA target sequence for Slc4a4 (NM_018760.1,1973-1991).
ggacctgccgaccatttct

SEQ ID NO: 642830 - DNA, 19 bp, Mus musculus
  siRNA target sequence for Slc4a4 (NM_018760.1,1974-1992).
gacctgccgaccatttctt

SEQ ID NO: 642831 - DNA, 19 bp, Mus musculus
  siRNA target sequence for Slc4a4 (NM_018760.1,1979-1997).
gccgaccatttcttctact

SEQ ID NO: 642832 - DNA, 19 bp, Mus musculus
  siRNA target sequence for Slc4a4 (NM_018760.1,1993-2011).
ctactgacatgtaccataa

SEQ ID NO: 642833 - DNA, 19 bp, Mus musculus
  siRNA target sequence for Slc4a4 (NM_018760.1,2007-2025).
cataatgtcacctttgact

SEQ ID NO: 642834 - DNA, 19 bp, Mus musculus
  siRNA target sequence for Slc4a4 (NM_018760.1,2017-2035).
cctttgactgggcctattt

SEQ ID NO: 642835 - DNA, 19 bp, Mus musculus
  siRNA target sequence for Slc4a4 (NM_018760.1,2022-2040).
gactgggcctatttgtcaa

SEQ ID NO: 642836 - DNA, 19 bp, Mus musculus
  siRNA target sequence for Slc4a4 (NM_018760.1,2086-2104).
gtgacttcgtgcctgatat

SEQ ID NO: 642837 - DNA, 19 bp, Mus musculus
  siRNA target sequence for Slc4a4 (NM_018760.1,2153-2171).
ggctatgaagaaattcaaa

SEQ ID NO: 642838 - DNA, 19 bp, Mus musculus
  siRNA target sequence for Slc4a4 (NM_018760.1,2168-2186).
caaaaccagtcgctatttt

SEQ ID NO: 642839 - DNA, 19 bp, Mus musculus
  siRNA target sequence for Slc4a4 (NM_018760.1,2333-2351).
gtttgtcccgccatttgga

SEQ ID NO: 642840 - DNA, 19 bp, Mus musculus
  siRNA target sequence for Slc4a4 (NM_018760.1,3106-3124).
gtttggatagcgacaatga

SEQ ID NO: 642841 - DNA, 19 bp, Mus musculus
  siRNA target sequence for Slc4a4 (NM_018760.1,3115-3133).
gcgacaatgacgattctga

SEQ ID NO: 642842 - DNA, 19 bp, Mus musculus
  siRNA target sequence for Slc4a4 (NM_018760.1,3136-3154).
gcccatactcagaaaaggt

SEQ ID NO: 642843 - DNA, 19 bp, Mus musculus
  siRNA target sequence for Slc4a4 (NM_018760.1,3185-3203).
ggaacagcaacctttccta

SEQ ID NO: 642844 - DNA, 19 bp, Mus musculus
  siRNA target sequence for Slc4a4 (NM_018760.1,3191-3209).
gcaacctttcctaagtgat

SEQ ID NO: 642845 - DNA, 19 bp, Mus musculus
  siRNA target sequence for Slc4a4 (NM_018760.1,3192-3210).
caacctttcctaagtgata

SEQ ID NO: 642846 - DNA, 19 bp, Mus musculus
  siRNA target sequence for Slc4a4 (NM_018760.1,3196-3214).
ctttcctaagtgataacaa

SEQ ID NO: 642847 - DNA, 19 bp, Mus musculus
  siRNA target sequence for Slc4a4 (NM_018760.1,3246-3264).
ctcgaacgccacacatcat

SEQ ID NO: 642848 - DNA, 19 bp, Mus musculus
  siRNA target sequence for Slc4a8 (NM_021530.1,157-175).
ggcgtcctcagctatcaga

SEQ ID NO: 642849 - DNA, 19 bp, Mus musculus
  siRNA target sequence for Slc4a8 (NM_021530.1,204-222).
gggtgggaccagcacaatt

SEQ ID NO: 642850 - DNA, 19 bp, Mus musculus
  siRNA target sequence for Slc4a8 (NM_021530.1,212-230).
ccagcacaattctcaacat

SEQ ID NO: 642851 - DNA, 19 bp, Mus musculus
  siRNA target sequence for Slc4a8 (NM_021530.1,249-267).
gttggaaggtcatagaact

SEQ ID NO: 642852 - DNA, 19 bp, Mus musculus
  siRNA target sequence for Slc4a8 (NM_021530.1,413-431).
cgtctcagcgtgttcagtt

SEQ ID NO: 642853 - DNA, 19 bp, Mus musculus
  siRNA target sequence for Slc4a8 (NM_021530.1,420-438).
gcgtgttcagttcattctt

SEQ ID NO: 642854 - DNA, 19 bp, Mus musculus
  siRNA target sequence for Slc4a8 (NM_021530.1,672-690).
catgcgtgcaagtagcata

SEQ ID NO: 642855 - DNA, 19 bp, Mus musculus
  siRNA target sequence for Slc4a8 (NM_021530.1,744-762).
cgacagcgtgagggttaaa

SEQ ID NO: 642856 - DNA, 19 bp, Mus musculus
  siRNA target sequence for Slc4a8 (NM_021530.1,914-932).
cagctacaaaccttgaagt

SEQ ID NO: 642857 - DNA, 19 bp, Mus musculus
  siRNA target sequence for Slc4a8 (NM_021530.1,917-935).
ctacaaaccttgaagtgaa

SEQ ID NO: 642858 - DNA, 19 bp, Mus musculus
  siRNA target sequence for Slc4a8 (NM_021530.1,920-938).
caaaccttgaagtgaagaa

SEQ ID NO: 642859 - DNA, 19 bp, Mus musculus
  siRNA target sequence for Slc4a8 (NM_021530.1,974-992).
gcaaggtggatcttcactt

SEQ ID NO: 642860 - DNA, 19 bp, Mus musculus
  siRNA target sequence for Slc4a8 (NM_021530.1,979-997).
gtggatcttcacttcatga

SEQ ID NO: 642861 - DNA, 19 bp, Mus musculus
  siRNA target sequence for Slc4a8 (NM_021530.1,1129-1147).
ccaacgaggtttttgttta

SEQ ID NO: 642862 - DNA, 19 bp, Mus musculus
  siRNA target sequence for Slc4a8 (NM_021530.1,1130-1148).
caacgaggtttttgtttat

SEQ ID NO: 642863 - DNA, 19 bp, Mus musculus
  siRNA target sequence for Slc4a8 (NM_021530.1,1319-1337).
gggagtgggacccatctat

SEQ ID NO: 642864 - DNA, 19 bp, Mus musculus
  siRNA target sequence for Slc4a8 (NM_021530.1,1320-1338).
ggagtgggacccatctatt

SEQ ID NO: 642865 - DNA, 19 bp, Mus musculus
  siRNA target sequence for Slc4a8 (NM_021530.1,1321-1339).
gagtgggacccatctatta

SEQ ID NO: 642866 - DNA, 19 bp, Mus musculus
  siRNA target sequence for Slc4a8 (NM_021530.1,1323-1341).
gtgggacccatctattaga

SEQ ID NO: 642867 - DNA, 19 bp, Mus musculus
  siRNA target sequence for Slc4a8 (NM_021530.1,1393-1411).
gttccaaacggaaacgttt

SEQ ID NO: 642868 - DNA, 19 bp, Mus musculus
  siRNA target sequence for Slc4a8 (NM_021530.1,1403-1421).
gaaacgtttgccacataga

SEQ ID NO: 642869 - DNA, 19 bp, Mus musculus
  siRNA target sequence for Slc4a8 (NM_021530.1,1642-1660).
cgcataagtgcgattgagt

SEQ ID NO: 642870 - DNA, 19 bp, Mus musculus
  siRNA target sequence for Slc4a8 (NM_021530.1,1909-1927).
gcgtttgcctccctgattt

SEQ ID NO: 642871 - DNA, 19 bp, Mus musculus
  siRNA target sequence for Slc4a8 (NM_021530.1,1911-1929).
gtttgcctccctgatttgt

SEQ ID NO: 642872 - DNA, 19 bp, Mus musculus
  siRNA target sequence for Slc4a8 (NM_021530.1,1919-1937).
ccctgatttgtatcatctt

SEQ ID NO: 642873 - DNA, 19 bp, Mus musculus
  siRNA target sequence for Slc4a8 (NM_021530.1,2008-2026).
gaccacctgagcctctatt

SEQ ID NO: 642874 - DNA, 19 bp, Mus musculus
  siRNA target sequence for Slc4a8 (NM_021530.1,2011-2029).
cacctgagcctctattact

SEQ ID NO: 642875 - DNA, 19 bp, Mus musculus
  siRNA target sequence for Slc4a8 (NM_021530.1,2038-2056).
gtgctcccggagaatccaa

SEQ ID NO: 642876 - DNA, 19 bp, Mus musculus
  siRNA target sequence for Slc4a8 (NM_021530.1,2058-2076).
caaccacaccttacagtat

SEQ ID NO: 642877 - DNA, 19 bp, Mus musculus
  siRNA target sequence for Slc4a8 (NM_021530.1,2245-2263).
gtccccagcaccttaaaga

SEQ ID NO: 642878 - DNA, 19 bp, Mus musculus
  siRNA target sequence for Slc4a8 (NM_021530.1,2248-2266).
cccagcaccttaaagacat

SEQ ID NO: 642879 - DNA, 19 bp, Mus musculus
  siRNA target sequence for Slc4a8 (NM_021530.1,2370-2388).
cgtcccgtcgccaaagctt

SEQ ID NO: 642880 - DNA, 19 bp, Mus musculus
  siRNA target sequence for Slc4a8 (NM_021530.1,2418-2436).
ggacgatcgaggatggttt

SEQ ID NO: 642881 - DNA, 19 bp, Mus musculus
  siRNA target sequence for Slc4a8 (NM_021530.1,2419-2437).
gacgatcgaggatggttta

SEQ ID NO: 642882 - DNA, 19 bp, Mus musculus
  siRNA target sequence for Slc4a8 (NM_021530.1,2421-2439).
cgatcgaggatggtttatt

SEQ ID NO: 642883 - DNA, 19 bp, Mus musculus
  siRNA target sequence for Slc4a8 (NM_021530.1,2422-2440).
gatcgaggatggtttatta

SEQ ID NO: 642884 - DNA, 19 bp, Mus musculus
  siRNA target sequence for Slc4a8 (NM_021530.1,2468-2486).
ctgtgatagccgcaattat

SEQ ID NO: 642885 - DNA, 19 bp, Mus musculus
  siRNA target sequence for Slc4a8 (NM_021530.1,2497-2515).
ctgtgcactatcctgatat

SEQ ID NO: 642886 - DNA, 19 bp, Mus musculus
  siRNA target sequence for Slc4a8 (NM_021530.1,2501-2519).
gcactatcctgatattcat

SEQ ID NO: 642887 - DNA, 19 bp, Mus musculus
  siRNA target sequence for Slc4a8 (NM_021530.1,3047-3065).
ccattgttttcccaatgat

SEQ ID NO: 642888 - DNA, 19 bp, Mus musculus
  siRNA target sequence for Slc4a8 (NM_021530.1,3079-3097).
gtcttcgtcaggaaagtca

SEQ ID NO: 642889 - DNA, 19 bp, Mus musculus
  siRNA target sequence for Slc4a8 (NM_021530.1,3219-3237).
cattgggggtgacaagttt

SEQ ID NO: 642890 - DNA, 19 bp, Mus musculus
  siRNA target sequence for Slc4a8 (NM_021530.1,3249-3267).
caggaagctgctaagtagt

SEQ ID NO: 642891 - DNA, 19 bp, Mus musculus
  siRNA target sequence for Slc4a8 (NM_021530.1,3297-3315).
cccttctgagattaatata

SEQ ID NO: 642892 - DNA, 19 bp, Mus musculus
  siRNA target sequence for Slc4a8 (NM_021530.1,3298-3316).
ccttctgagattaatatat

SEQ ID NO: 642893 - DNA, 19 bp, Mus musculus
  siRNA target sequence for Slc4a8 (NM_021530.1,3319-3337).
gatgaaatgcctaaaacca

SEQ ID NO: 642894 - DNA, 19 bp, Mus musculus
  siRNA target sequence for Slc4a8 (NM_021530.1,3344-3362).
ggaaggctctcagcataaa

SEQ ID NO: 642895 - DNA, 19 bp, Mus musculus
  siRNA target sequence for Slc4a8 (NM_021530.1,3379-3397).
gaaaaaagccccttcaact

SEQ ID NO: 642896 - DNA, 19 bp, Mus musculus
  siRNA target sequence for Slc26a3 (NM_021353.1,141-159).
ccatagggaatcagtatgt

SEQ ID NO: 642897 - DNA, 19 bp, Mus musculus
  siRNA target sequence for Slc26a3 (NM_021353.1,170-188).
ccggtgtactccacaaaga

SEQ ID NO: 642898 - DNA, 19 bp, Mus musculus
  siRNA target sequence for Slc26a3 (NM_021353.1,172-190).
ggtgtactccacaaagact

SEQ ID NO: 642899 - DNA, 19 bp, Mus musculus
  siRNA target sequence for Slc26a3 (NM_021353.1,318-336).
ggttgccagcctacaagat

SEQ ID NO: 642900 - DNA, 19 bp, Mus musculus
  siRNA target sequence for Slc26a3 (NM_021353.1,326-344).
gcctacaagataaaggaat

SEQ ID NO: 642901 - DNA, 19 bp, Mus musculus
  siRNA target sequence for Slc26a3 (NM_021353.1,444-462).
ggttgtacgcagccttttt

SEQ ID NO: 642902 - DNA, 19 bp, Mus musculus
  siRNA target sequence for Slc26a3 (NM_021353.1,487-505).
gggcacatctagacacata

SEQ ID NO: 642903 - DNA, 19 bp, Mus musculus
  siRNA target sequence for Slc26a3 (NM_021353.1,488-506).
ggcacatctagacacatat

SEQ ID NO: 642904 - DNA, 19 bp, Mus musculus
  siRNA target sequence for Slc26a3 (NM_021353.1,490-508).
cacatctagacacatatct

SEQ ID NO: 642905 - DNA, 19 bp, Mus musculus
  siRNA target sequence for Slc26a3 (NM_021353.1,539-557).
gtgggagttgtcgttacaa

SEQ ID NO: 642906 - DNA, 19 bp, Mus musculus
  siRNA target sequence for Slc26a3 (NM_021353.1,563-581).
gtctcggaccccaatgctt

SEQ ID NO: 642907 - DNA, 19 bp, Mus musculus
  siRNA target sequence for Slc26a3 (NM_021353.1,640-658).
ggtggctgcatcagtaact

SEQ ID NO: 642908 - DNA, 19 bp, Mus musculus
  siRNA target sequence for Slc26a3 (NM_021353.1,701-719).
gtcggctttgtggtgatat

SEQ ID NO: 642909 - DNA, 19 bp, Mus musculus
  siRNA target sequence for Slc26a3 (NM_021353.1,705-723).
gctttgtggtgatatacct

SEQ ID NO: 642910 - DNA, 19 bp, Mus musculus
  siRNA target sequence for Slc26a3 (NM_021353.1,722-740).
ctatccgagtccctaatca

SEQ ID NO: 642911 - DNA, 19 bp, Mus musculus
  siRNA target sequence for Slc26a3 (NM_021353.1,820-838).
cagcgacccattctctata

SEQ ID NO: 642912 - DNA, 19 bp, Mus musculus
  siRNA target sequence for Slc26a3 (NM_021353.1,822-840).
gcgacccattctctatatt

SEQ ID NO: 642913 - DNA, 19 bp, Mus musculus
  siRNA target sequence for Slc26a3 (NM_021353.1,826-844).
cccattctctatattcaaa

SEQ ID NO: 642914 - DNA, 19 bp, Mus musculus
  siRNA target sequence for Slc26a3 (NM_021353.1,851-869).
gagtcggtcttcacacaaa

SEQ ID NO: 642915 - DNA, 19 bp, Mus musculus
  siRNA target sequence for Slc26a3 (NM_021353.1,853-871).
gtcggtcttcacacaaatt

SEQ ID NO: 642916 - DNA, 19 bp, Mus musculus
  siRNA target sequence for Slc26a3 (NM_021353.1,855-873).
cggtcttcacacaaattca

SEQ ID NO: 642917 - DNA, 19 bp, Mus musculus
  siRNA target sequence for Slc26a3 (NM_021353.1,900-918).
catctgtgattattctagt

SEQ ID NO: 642918 - DNA, 19 bp, Mus musculus
  siRNA target sequence for Slc26a3 (NM_021353.1,975-993).
ccatccccatcgaactcat

SEQ ID NO: 642919 - DNA, 19 bp, Mus musculus
  siRNA target sequence for Slc26a3 (NM_021353.1,1016-1034).
gtgtcctatggctgtaact

SEQ ID NO: 642920 - DNA, 19 bp, Mus musculus
  siRNA target sequence for Slc26a3 (NM_021353.1,1018-1036).
gtcctatggctgtaacttt

SEQ ID NO: 642921 - DNA, 19 bp, Mus musculus
  siRNA target sequence for Slc26a3 (NM_021353.1,1065-1083).
ggaacatgagtcttggatt

SEQ ID NO: 642922 - DNA, 19 bp, Mus musculus
  siRNA target sequence for Slc26a3 (NM_021353.1,1079-1097).
ggatttcaaccccctatta

SEQ ID NO: 642923 - DNA, 19 bp, Mus musculus
  siRNA target sequence for Slc26a3 (NM_021353.1,1098-1116).
cacccagcgtggaagtttt

SEQ ID NO: 642924 - DNA, 19 bp, Mus musculus
  siRNA target sequence for Slc26a3 (NM_021353.1,1101-1119).
ccagcgtggaagttttcca

SEQ ID NO: 642925 - DNA, 19 bp, Mus musculus
  siRNA target sequence for Slc26a3 (NM_021353.1,1189-1207).
gtactccctcaaatacgat

SEQ ID NO: 642926 - DNA, 19 bp, Mus musculus
  siRNA target sequence for Slc26a3 (NM_021353.1,1192-1210).
ctccctcaaatacgattat

SEQ ID NO: 642927 - DNA, 19 bp, Mus musculus
  siRNA target sequence for Slc26a3 (NM_021353.1,1263-1281).
ctggagcattcaaaggatt

SEQ ID NO: 642928 - DNA, 19 bp, Mus musculus
  siRNA target sequence for Slc26a3 (NM_021353.1,1369-1387).
cgtgttgatcgtcatagtt

SEQ ID NO: 642929 - DNA, 19 bp, Mus musculus
  siRNA target sequence for Slc26a3 (NM_021353.1,1400-1418).
cttctgcagccgctacaaa

SEQ ID NO: 642930 - DNA, 19 bp, Mus musculus
  siRNA target sequence for Slc26a3 (NM_021353.1,1403-1421).
ctgcagccgctacaaaagt

SEQ ID NO: 642931 - DNA, 19 bp, Mus musculus
  siRNA target sequence for Slc26a3 (NM_021353.1,1405-1423).
gcagccgctacaaaagtct

SEQ ID NO: 642932 - DNA, 19 bp, Mus musculus
  siRNA target sequence for Slc26a3 (NM_021353.1,1435-1453).
gctagcactcggaaactta

SEQ ID NO: 642933 - DNA, 19 bp, Mus musculus
  siRNA target sequence for Slc26a3 (NM_021353.1,1436-1454).
ctagcactcggaaacttaa

SEQ ID NO: 642934 - DNA, 19 bp, Mus musculus
  siRNA target sequence for Slc26a3 (NM_021353.1,1488-1506).
gattgtggaaaaaggataa

SEQ ID NO: 642935 - DNA, 19 bp, Mus musculus
  siRNA target sequence for Slc26a3 (NM_021353.1,1573-1591).
ggcggcaagtgtagcattt

SEQ ID NO: 642936 - DNA, 19 bp, Mus musculus
  siRNA target sequence for Slc26a3 (NM_021353.1,1575-1593).
cggcaagtgtagcatttca

SEQ ID NO: 642937 - DNA, 19 bp, Mus musculus
  siRNA target sequence for Slc26a3 (NM_021353.1,1576-1594).
ggcaagtgtagcatttcaa

SEQ ID NO: 642938 - DNA, 19 bp, Mus musculus
  siRNA target sequence for Slc26a3 (NM_021353.1,1578-1596).
caagtgtagcatttcaact

SEQ ID NO: 642939 - DNA, 19 bp, Mus musculus
  siRNA target sequence for Slc26a3 (NM_021353.1,1586-1604).
gcatttcaactcctaacta

SEQ ID NO: 642940 - DNA, 19 bp, Mus musculus
  siRNA target sequence for Slc26a3 (NM_021353.1,1592-1610).
caactcctaactattgtgt

SEQ ID NO: 642941 - DNA, 19 bp, Mus musculus
  siRNA target sequence for Slc26a3 (NM_021353.1,1649-1667).
gttggaaggagcaacatct

SEQ ID NO: 642942 - DNA, 19 bp, Mus musculus
  siRNA target sequence for Slc26a3 (NM_021353.1,1657-1675).
gagcaacatctacaagaat

SEQ ID NO: 642943 - DNA, 19 bp, Mus musculus
  siRNA target sequence for Slc26a3 (NM_021353.1,1681-1699).
gaattatgccgaagtgtat

SEQ ID NO: 642944 - DNA, 19 bp, Mus musculus
  siRNA target sequence for Slc26a3 (NM_021353.1,1737-1755).
caatctacttcgcaaacat

SEQ ID NO: 642945 - DNA, 19 bp, Mus musculus
  siRNA target sequence for Slc26a3 (NM_021353.1,1791-1809).
gctttagcccacttcgaat

SEQ ID NO: 642946 - DNA, 19 bp, Mus musculus
  siRNA target sequence for Slc26a3 (NM_021353.1,1814-1832).
cggaagcgcaacaaagctt

SEQ ID NO: 642947 - DNA, 19 bp, Mus musculus
  siRNA target sequence for Slc26a3 (NM_021353.1,1820-1838).
cgcaacaaagctttgaaga

SEQ ID NO: 642948 - DNA, 19 bp, Mus musculus
  siRNA target sequence for Slc26a3 (NM_021353.1,1821-1839).
gcaacaaagctttgaagaa

SEQ ID NO: 642949 - DNA, 19 bp, Mus musculus
  siRNA target sequence for Slc26a3 (NM_021353.1,1852-1870).
gcagaaacgaggtctgata

SEQ ID NO: 642950 - DNA, 19 bp, Mus musculus
  siRNA target sequence for Slc26a3 (NM_021353.1,1867-1885).
gatacagatgacacctaaa

SEQ ID NO: 642951 - DNA, 19 bp, Mus musculus
  siRNA target sequence for Slc26a3 (NM_021353.1,1880-1898).
cctaaagggtttatatgca

SEQ ID NO: 642952 - DNA, 19 bp, Mus musculus
  siRNA target sequence for Slc26a3 (NM_021353.1,2159-2177).
gtgggaaccgatgatgatt

SEQ ID NO: 642953 - DNA, 19 bp, Mus musculus
  siRNA target sequence for Slc26a3 (NM_021353.1,2163-2181).
gaaccgatgatgatttcat

SEQ ID NO: 642954 - DNA, 19 bp, Mus musculus
  siRNA target sequence for Slc26a3 (NM_021353.1,2166-2184).
ccgatgatgatttcattga

SEQ ID NO: 642955 - DNA, 19 bp, Mus musculus
  siRNA target sequence for Slc26a3 (NM_021353.1,2189-2207).
cttgctcggtgtgaattct

SEQ ID NO: 642956 - DNA, 19 bp, Mus musculus
  siRNA target sequence for Slc26a3 (NM_021353.1,2199-2217).
gtgaattcttcgatgatga

SEQ ID NO: 642957 - DNA, 19 bp, Mus musculus
  siRNA target sequence for Slc26a3 (NM_021353.1,2219-2237).
gtcacagactcaatatttt

SEQ ID NO: 642958 - DNA, 19 bp, Mus musculus
  siRNA target sequence for Slc26a3 (NM_021353.1,2244-2262).
caatccatgatgctatttt

SEQ ID NO: 642959 - DNA, 19 bp, Mus musculus
  siRNA target sequence for Slc26a3 (NM_021353.1,2249-2267).
catgatgctattttgcata

SEQ ID NO: 642960 - DNA, 19 bp, Mus musculus
  siRNA target sequence for Slc26a3 (NM_021353.1,2282-2300).
gactacagcacttcaaagt

SEQ ID NO: 642961 - DNA, 19 bp, Mus musculus
  siRNA target sequence for Slc26a3 (NM_021353.1,2384-2402).
ccagttgaaacgaaattct

SEQ ID NO: 642962 - DNA, 19 bp, Mus musculus
  siRNA target sequence for Slc26a6 (NM_134420.2,367-385).
gctcctgggtgatctgtta

SEQ ID NO: 642963 - DNA, 19 bp, Mus musculus
  siRNA target sequence for Slc26a6 (NM_134420.2,368-386).
ctcctgggtgatctgttat

SEQ ID NO: 642964 - DNA, 19 bp, Mus musculus
  siRNA target sequence for Slc26a6 (NM_134420.2,370-388).
cctgggtgatctgttatct

SEQ ID NO: 642965 - DNA, 19 bp, Mus musculus
  siRNA target sequence for Slc26a6 (NM_134420.2,444-462).
cgggattgcctcctatgtt

SEQ ID NO: 642966 - DNA, 19 bp, Mus musculus
  siRNA target sequence for Slc26a6 (NM_134420.2,445-463).
gggattgcctcctatgttt

SEQ ID NO: 642967 - DNA, 19 bp, Mus musculus
  siRNA target sequence for Slc26a6 (NM_134420.2,560-578).
gtgggcagtgtgacagaat

SEQ ID NO: 642968 - DNA, 19 bp, Mus musculus
  siRNA target sequence for Slc26a6 (NM_134420.2,562-580).
gggcagtgtgacagaatct

SEQ ID NO: 642969 - DNA, 19 bp, Mus musculus
  siRNA target sequence for Slc26a6 (NM_134420.2,598-616).
cttcgtgcaaggcttgaat

SEQ ID NO: 642970 - DNA, 19 bp, Mus musculus
  siRNA target sequence for Slc26a6 (NM_134420.2,613-631).
gaatgccacagctgatgat

SEQ ID NO: 642971 - DNA, 19 bp, Mus musculus
  siRNA target sequence for Slc26a6 (NM_134420.2,687-705).
ggctgggcctggtacactt

SEQ ID NO: 642972 - DNA, 19 bp, Mus musculus
  siRNA target sequence for Slc26a6 (NM_134420.2,737-755).
ctggtccgcagctatacca

SEQ ID NO: 642973 - DNA, 19 bp, Mus musculus
  siRNA target sequence for Slc26a6 (NM_134420.2,778-796).
cgtctctcagctcaagtat

SEQ ID NO: 642974 - DNA, 19 bp, Mus musculus
  siRNA target sequence for Slc26a6 (NM_134420.2,783-801).
ctcagctcaagtatgtgtt

SEQ ID NO: 642975 - DNA, 19 bp, Mus musculus
  siRNA target sequence for Slc26a6 (NM_134420.2,827-845).
gggccactgtccgttatct

SEQ ID NO: 642976 - DNA, 19 bp, Mus musculus
  siRNA target sequence for Slc26a6 (NM_134420.2,828-846).
ggccactgtccgttatcta

SEQ ID NO: 642977 - DNA, 19 bp, Mus musculus
  siRNA target sequence for Slc26a6 (NM_134420.2,829-847).
gccactgtccgttatctat

SEQ ID NO: 642978 - DNA, 19 bp, Mus musculus
  siRNA target sequence for Slc26a6 (NM_134420.2,830-848).
ccactgtccgttatctata

SEQ ID NO: 642979 - DNA, 19 bp, Mus musculus
  siRNA target sequence for Slc26a6 (NM_134420.2,929-947).
gtactggtgaagctactta

SEQ ID NO: 642980 - DNA, 19 bp, Mus musculus
  siRNA target sequence for Slc26a6 (NM_134420.2,935-953).
gtgaagctacttaatgaga

SEQ ID NO: 642981 - DNA, 19 bp, Mus musculus
  siRNA target sequence for Slc26a6 (NM_134420.2,1007-1025).
ggggccactggtatttcct

SEQ ID NO: 642982 - DNA, 19 bp, Mus musculus
  siRNA target sequence for Slc26a6 (NM_134420.2,1008-1026).
gggccactggtatttccta

SEQ ID NO: 642983 - DNA, 19 bp, Mus musculus
  siRNA target sequence for Slc26a6 (NM_134420.2,1009-1027).
ggccactggtatttcctat

SEQ ID NO: 642984 - DNA, 19 bp, Mus musculus
  siRNA target sequence for Slc26a6 (NM_134420.2,1028-1046).
ggtgtgaagctgaatgaca

SEQ ID NO: 642985 - DNA, 19 bp, Mus musculus
  siRNA target sequence for Slc26a6 (NM_134420.2,1177-1195).
ctcactggggaagatcttt

SEQ ID NO: 642986 - DNA, 19 bp, Mus musculus
  siRNA target sequence for Slc26a6 (NM_134420.2,1209-1227).
gctaccgtgtggacagtaa

SEQ ID NO: 642987 - DNA, 19 bp, Mus musculus
  siRNA target sequence for Slc26a6 (NM_134420.2,1345-1363).
ggttgctggagctgtatct

SEQ ID NO: 642988 - DNA, 19 bp, Mus musculus
  siRNA target sequence for Slc26a6 (NM_134420.2,1439-1457).
gtcattattgtgaacctaa

SEQ ID NO: 642989 - DNA, 19 bp, Mus musculus
  siRNA target sequence for Slc26a6 (NM_134420.2,1574-1592).
ctggcagtttccatagtct

SEQ ID NO: 642990 - DNA, 19 bp, Mus musculus
  siRNA target sequence for Slc26a6 (NM_134420.2,1651-1669).
ggtgccagatacggatatt

SEQ ID NO: 642991 - DNA, 19 bp, Mus musculus
  siRNA target sequence for Slc26a6 (NM_134420.2,1655-1673).
ccagatacggatatttata

SEQ ID NO: 642992 - DNA, 19 bp, Mus musculus
  siRNA target sequence for Slc26a6 (NM_134420.2,1702-1720).
ggaggtcccgggtgtgaaa

SEQ ID NO: 642993 - DNA, 19 bp, Mus musculus
  siRNA target sequence for Slc26a6 (NM_134420.2,1895-1913).
gatgcttcttccaagatct

SEQ ID NO: 642994 - DNA, 19 bp, Mus musculus
  siRNA target sequence for Slc26a6 (NM_134420.2,2020-2038).
ctccagcaatcaagaagat

SEQ ID NO: 642995 - DNA, 19 bp, Mus musculus
  siRNA target sequence for Slc26a6 (NM_134420.2,2132-2150).
gtggacactgtgtgcatta

SEQ ID NO: 642996 - DNA, 19 bp, Mus musculus
  siRNA target sequence for Slc26a6 (NM_134420.2,2203-2221).
catcgcagcctgttacagt

SEQ ID NO: 642997 - DNA, 19 bp, Mus musculus
  siRNA target sequence for Slc26a6 (NM_134420.2,2244-2262).
ctggacacttctttgatga

SEQ ID NO: 642998 - DNA, 19 bp, Mus musculus
  siRNA target sequence for Slc26a6 (NM_134420.2,2246-2264).
ggacacttctttgatgaat

SEQ ID NO: 642999 - DNA, 19 bp, Mus musculus
  siRNA target sequence for Slc26a6 (NM_134420.2,2351-2369).
gttttggccaccaaactct

SEQ ID NO: 643000 - DNA, 19 bp, Mus musculus
  siRNA target sequence for 1300013J15Rik (NM_026183.2,930-948).
catcgttctgcctcagatt

SEQ ID NO: 643001 - DNA, 19 bp, Mus musculus
  siRNA target sequence for 1300013J15Rik (NM_026183.2,975-993).
caacgccctggccaactat

SEQ ID NO: 643002 - DNA, 19 bp, Mus musculus
  siRNA target sequence for 1300013J15Rik (NM_026183.2,1267-1285).
cagtccatcacctatgaat

SEQ ID NO: 643003 - DNA, 19 bp, Mus musculus
  siRNA target sequence for 1300013J15Rik (NM_026183.2,1277-1295).
cctatgaattggctatcat

SEQ ID NO: 643004 - DNA, 19 bp, Mus musculus
  siRNA target sequence for 1300013J15Rik (NM_026183.2,1278-1296).
ctatgaattggctatcatt

SEQ ID NO: 643005 - DNA, 19 bp, Mus musculus
  siRNA target sequence for 1300013J15Rik (NM_026183.2,1282-1300).
gaattggctatcattgtat

SEQ ID NO: 643006 - DNA, 19 bp, Mus musculus
  siRNA target sequence for 1300013J15Rik (NM_026183.2,1288-1306).
gctatcattgtatacatga

SEQ ID NO: 643007 - DNA, 19 bp, Mus musculus
  siRNA target sequence for 1300013J15Rik (NM_026183.2,1352-1370).
cactgggcgcaggaaacat

SEQ ID NO: 643008 - DNA, 19 bp, Mus musculus
  siRNA target sequence for 1300013J15Rik (NM_026183.2,1443-1461).
gctgctaggctgtaaggat

SEQ ID NO: 643009 - DNA, 19 bp, Mus musculus
  siRNA target sequence for 1300013J15Rik (NM_026183.2,1458-1476).
ggatctcgtgggctacatt

SEQ ID NO: 643010 - DNA, 19 bp, Mus musculus
  siRNA target sequence for 1300013J15Rik (NM_026183.2,1459-1477).
gatctcgtgggctacattt

SEQ ID NO: 643011 - DNA, 19 bp, Mus musculus
  siRNA target sequence for 1300013J15Rik (NM_026183.2,1462-1480).
ctcgtgggctacattttca

SEQ ID NO: 643012 - DNA, 19 bp, Mus musculus
  siRNA target sequence for 1300013J15Rik (NM_026183.2,1481-1499).
ctaccgatcgggatatcgt

SEQ ID NO: 643013 - DNA, 19 bp, Mus musculus
  siRNA target sequence for 1300013J15Rik (NM_026183.2,1502-1520).
ccttggtggctcaagtgat

SEQ ID NO: 643014 - DNA, 19 bp, Mus musculus
  siRNA target sequence for 1300013J15Rik (NM_026183.2,1511-1529).
ctcaagtgatccccattta

SEQ ID NO: 643015 - DNA, 19 bp, Mus musculus
  siRNA target sequence for 1300013J15Rik (NM_026183.2,1602-1620).
ggttggagccatcgttaat

SEQ ID NO: 643016 - DNA, 19 bp, Mus musculus
  siRNA target sequence for 1300013J15Rik (NM_026183.2,1621-1639).
gccatcgggtattatgtca

SEQ ID NO: 643017 - DNA, 19 bp, Mus musculus
  siRNA target sequence for 1300013J15Rik (NM_026183.2,1622-1640).
ccatcgggtattatgtcat

SEQ ID NO: 643018 - DNA, 19 bp, Mus musculus
  siRNA target sequence for 1300013J15Rik (NM_026183.2,1623-1641).
catcgggtattatgtcatt

SEQ ID NO: 643019 - DNA, 19 bp, Mus musculus
  siRNA target sequence for 1300013J15Rik (NM_026183.2,1653-1671).
cgggatcgcgctgatgttt

SEQ ID NO: 643020 - DNA, 19 bp, Mus musculus
  siRNA target sequence for 1300013J15Rik (NM_026183.2,1736-1754).
cgtgcttcctggcttttat

SEQ ID NO: 643021 - DNA, 19 bp, Mus musculus
  siRNA target sequence for 1300013J15Rik (NM_026183.2,1740-1758).
cttcctggcttttattgct

SEQ ID NO: 643022 - DNA, 19 bp, Mus musculus
  siRNA target sequence for 1300013J15Rik (NM_026183.2,1779-1797).
ctgtcaacaggctcaagta

SEQ ID NO: 643023 - DNA, 19 bp, Mus musculus
  siRNA target sequence for 1300013J15Rik (NM_026183.2,1792-1810).
caagtacatgccaatttga

SEQ ID NO: 643024 - DNA, 19 bp, Mus musculus
  siRNA target sequence for 1300013J15Rik (NM_026183.2,1798-1816).
catgccaatttgaaggtaa

SEQ ID NO: 643025 - DNA, 19 bp, Mus musculus
  siRNA target sequence for 1300013J15Rik (NM_026183.2,1802-1820).
ccaatttgaaggtaaacgt

SEQ ID NO: 643026 - DNA, 19 bp, Mus musculus
  siRNA target sequence for 1300013J15Rik (NM_026183.2,1874-1892).
gccatggagaaattatgat

SEQ ID NO: 643027 - DNA, 19 bp, Mus musculus
  siRNA target sequence for 1300013J15Rik (NM_026183.2,1876-1894).
catggagaaattatgatga

SEQ ID NO: 643028 - DNA, 19 bp, Mus musculus
  siRNA target sequence for 1300013J15Rik (NM_026183.2,1890-1908).
gatgacggatcttgaaaaa

SEQ ID NO: 643029 - DNA, 19 bp, Mus musculus
  siRNA target sequence for 1300013J15Rik (NM_026183.2,1963-1981).
cgtccaaaggacagcaata

SEQ ID NO: 643030 - DNA, 19 bp, Mus musculus
  siRNA target sequence for 1300013J15Rik (NM_026183.2,2022-2040).
gctcctaggggtagtctta

SEQ ID NO: 643031 - DNA, 19 bp, Mus musculus
  siRNA target sequence for 1300013J15Rik (NM_026183.2,2026-2044).
ctaggggtagtcttagtct

SEQ ID NO: 643032 - DNA, 19 bp, Mus musculus
  siRNA target sequence for 1300013J15Rik (NM_026183.2,2047-2065).
gtgggtgggattttagtga

SEQ ID NO: 643033 - DNA, 19 bp, Mus musculus
  siRNA target sequence for 1300013J15Rik (NM_026183.2,2064-2082).
gagagtctatatcagaatt

SEQ ID NO: 643034 - DNA, 19 bp, Mus musculus
  siRNA target sequence for 1300013J15Rik (NM_026183.2,2066-2084).
gagtctatatcagaattga

SEQ ID NO: 643035 - DNA, 19 bp, Mus musculus
  siRNA target sequence for 5830434P21Rik (NM_172661.2,195-213).
cgatcgtttggggcaaata

SEQ ID NO: 643036 - DNA, 19 bp, Mus musculus
  siRNA target sequence for 5830434P21Rik (NM_172661.2,196-214).
gatcgtttggggcaaataa

SEQ ID NO: 643037 - DNA, 19 bp, Mus musculus
  siRNA target sequence for 5830434P21Rik (NM_172661.2,254-272).
gcctgtttgacaagtataa

SEQ ID NO: 643038 - DNA, 19 bp, Mus musculus
  siRNA target sequence for 5830434P21Rik (NM_172661.2,300-318).
ctcagttattcctagacat

SEQ ID NO: 643039 - DNA, 19 bp, Mus musculus
  siRNA target sequence for 5830434P21Rik (NM_172661.2,310-328).
cctagacatggcttacaga

SEQ ID NO: 643040 - DNA, 19 bp, Mus musculus
  siRNA target sequence for 5830434P21Rik (NM_172661.2,411-429).
ccccaacatcgtgatagtt

SEQ ID NO: 643041 - DNA, 19 bp, Mus musculus
  siRNA target sequence for 5830434P21Rik (NM_172661.2,466-484).
cagcaagacccaaagagtt

SEQ ID NO: 643042 - DNA, 19 bp, Mus musculus
  siRNA target sequence for 5830434P21Rik (NM_172661.2,576-594).
cagtcaggagaacacaaat

SEQ ID NO: 643043 - DNA, 19 bp, Mus musculus
  siRNA target sequence for 5830434P21Rik (NM_172661.2,645-663).
cggacacgaaggtggttta

SEQ ID NO: 643044 - DNA, 19 bp, Mus musculus
  siRNA target sequence for 5830434P21Rik (NM_172661.2,646-664).
ggacacgaaggtggtttaa

SEQ ID NO: 643045 - DNA, 19 bp, Mus musculus
  siRNA target sequence for 5830434P21Rik (NM_172661.2,671-689).
caagccgactgttatcctt

SEQ ID NO: 643046 - DNA, 19 bp, Mus musculus
  siRNA target sequence for 5830434P21Rik (NM_172661.2,687-705).
cttctctcccgaggaattt

SEQ ID NO: 643047 - DNA, 19 bp, Mus musculus
  siRNA target sequence for 5830434P21Rik (NM_172661.2,790-808).
ctccgccctcagaatgtga

SEQ ID NO: 643048 - DNA, 19 bp, Mus musculus
  siRNA target sequence for 5830434P21Rik (NM_172661.2,823-841).
ggcggtgggcggaacatca

SEQ ID NO: 643049 - DNA, 19 bp, Mus musculus
  siRNA target sequence for 5830434P21Rik (NM_172661.2,824-842).
gcggtgggcggaacatcat

SEQ ID NO: 643050 - DNA, 19 bp, Mus musculus
  siRNA target sequence for 5830434P21Rik (NM_172661.2,825-843).
cggtgggcggaacatcatt

SEQ ID NO: 643051 - DNA, 19 bp, Mus musculus
  siRNA target sequence for 5830434P21Rik (NM_172661.2,826-844).
ggtgggcggaacatcattt

SEQ ID NO: 643052 - DNA, 19 bp, Mus musculus
  siRNA target sequence for 5830434P21Rik (NM_172661.2,923-941).
catgcaccagcgattctaa

SEQ ID NO: 643053 - DNA, 19 bp, Mus musculus
  siRNA target sequence for 5830434P21Rik (NM_172661.2,977-995).
gaggggcctcccaattcat

SEQ ID NO: 643054 - DNA, 19 bp, Mus musculus
  siRNA target sequence for 5830434P21Rik (NM_172661.2,1013-1031).
cacccacgtaccatgacat

SEQ ID NO: 643055 - DNA, 19 bp, Mus musculus
  siRNA target sequence for 5830434P21Rik (NM_172661.2,1032-1050).
gctcccagcgtttatgtgt

SEQ ID NO: 643056 - DNA, 19 bp, Mus musculus
  siRNA target sequence for 5830434P21Rik (NM_172661.2,1033-1051).
ctcccagcgtttatgtgtt

SEQ ID NO: 643057 - DNA, 19 bp, Mus musculus
  siRNA target sequence for 5830434P21Rik (NM_172661.2,1080-1098).
ggtggaacgaagctctttt

SEQ ID NO: 643058 - DNA, 19 bp, Mus musculus
  siRNA target sequence for 5830434P21Rik (NM_172661.2,1229-1247).
caaggcccaccatcatcaa

SEQ ID NO: 643059 - DNA, 19 bp, Mus musculus
  siRNA target sequence for 5830434P21Rik (NM_172661.2,1978-1996).
gtcgctcagagcaatagca

SEQ ID NO: 643060 - DNA, 19 bp, Mus musculus
  siRNA target sequence for 5830434P21Rik (NM_172661.2,2306-2324).
ggacgcccgtggacttcta

SEQ ID NO: 643061 - DNA, 19 bp, Mus musculus
  siRNA target sequence for 5830434P21Rik (NM_172661.2,2396-2414).
gtcgctctgaagatcaaaa

SEQ ID NO: 643062 - DNA, 19 bp, Mus musculus
  siRNA target sequence for 5830434P21Rik (NM_172661.2,2398-2416).
cgctctgaagatcaaaact

SEQ ID NO: 643063 - DNA, 19 bp, Mus musculus
  siRNA target sequence for 5830434P21Rik (NM_172661.2,2651-2669).
ctgaaacccccagtaagaa

SEQ ID NO: 643064 - DNA, 19 bp, Mus musculus
  siRNA target sequence for 5830434P21Rik (NM_172661.2,2745-2763).
ctatggaaatgctctcatt

SEQ ID NO: 643065 - DNA, 19 bp, Mus musculus
  siRNA target sequence for 5830434P21Rik (NM_172661.2,2936-2954).
ctcctcggtttgctaaaaa

SEQ ID NO: 643066 - DNA, 19 bp, Mus musculus
  siRNA target sequence for 5830434P21Rik (NM_172661.2,2939-2957).
ctcggtttgctaaaaagca

SEQ ID NO: 643067 - DNA, 19 bp, Mus musculus
  siRNA target sequence for 5830434P21Rik (NM_172661.2,3143-3161).
gagatagtggcgttgactt

SEQ ID NO: 643068 - DNA, 19 bp, Mus musculus
  siRNA target sequence for 5830434P21Rik (NM_172661.2,3247-3265).
cctggcctggcggaatcta

SEQ ID NO: 643069 - DNA, 19 bp, Mus musculus
  siRNA target sequence for 5830434P21Rik (NM_172661.2,3248-3266).
ctggcctggcggaatctaa

SEQ ID NO: 643070 - DNA, 19 bp, Mus musculus
  siRNA target sequence for 5830434P21Rik (NM_172661.2,3306-3324).
gcacaaggactcagaacaa

SEQ ID NO: 643071 - DNA, 19 bp, Mus musculus
  siRNA target sequence for 5830434P21Rik (NM_172661.2,3425-3443).
ccgttgtcccgcctgttaa

SEQ ID NO: 643072 - DNA, 19 bp, Mus musculus
  siRNA target sequence for 5830434P21Rik (NM_172661.2,3426-3444).
cgttgtcccgcctgttaat

SEQ ID NO: 643073 - DNA, 19 bp, Mus musculus
  siRNA target sequence for 5830434P21Rik (NM_172661.2,3492-3510).
gttcggagtcagtccaaaa

SEQ ID NO: 643074 - DNA, 19 bp, Mus musculus
  siRNA target sequence for 5830434P21Rik (NM_172661.2,3496-3514).
ggagtcagtccaaaagact

SEQ ID NO: 643075 - DNA, 19 bp, Mus musculus
  siRNA target sequence for 5830434P21Rik (NM_172661.2,3526-3544).
ctgccacccgggtctgttt

SEQ ID NO: 643076 - DNA, 19 bp, Mus musculus
  siRNA target sequence for 5830434P21Rik (NM_172661.2,3582-3600).
cgtcttggctagtaatgca

SEQ ID NO: 643077 - DNA, 19 bp, Mus musculus
  siRNA target sequence for 5830434P21Rik (NM_172661.2,3658-3676).
ggcctctctcccatgtctt

SEQ ID NO: 643078 - DNA, 19 bp, Mus musculus
  siRNA target sequence for 5830434P21Rik (NM_172661.2,3683-3701).
ccgcagacctcacactaaa

SEQ ID NO: 643079 - DNA, 19 bp, Mus musculus
  siRNA target sequence for 5830434P21Rik (NM_172661.2,3806-3824).
cctccaatggggtcaacta

SEQ ID NO: 643080 - DNA, 19 bp, Mus musculus
  siRNA target sequence for 5830434P21Rik (NM_172661.2,3855-3873).
catgcccgtggcttctgta

SEQ ID NO: 643081 - DNA, 19 bp, Mus musculus
  siRNA target sequence for 5830434P21Rik (NM_172661.2,3950-3968).
gactggttcctcaaacgat

SEQ ID NO: 643082 - DNA, 19 bp, Mus musculus
  siRNA target sequence for 5830434P21Rik (NM_172661.2,4520-4538).
ccgctccgatggagttgaa

SEQ ID NO: 643083 - DNA, 19 bp, Mus musculus
  siRNA target sequence for 5830434P21Rik (NM_172661.2,4545-4563).
ccactttgccgacagtaaa

SEQ ID NO: 643084 - DNA, 19 bp, Mus musculus
  siRNA target sequence for 5830434P21Rik (NM_172661.2,4554-4572).
cgacagtaaacagaatgtt

SEQ ID NO: 643085 - DNA, 19 bp, Mus musculus
  siRNA target sequence for 9630015D15Rik (NM_181401.2,440-458).
gggtggccgaggtgagaaa

SEQ ID NO: 643086 - DNA, 19 bp, Mus musculus
  siRNA target sequence for 9630015D15Rik (NM_181401.2,442-460).
gtggccgaggtgagaaact

SEQ ID NO: 643087 - DNA, 19 bp, Mus musculus
  siRNA target sequence for 9630015D15Rik (NM_181401.2,662-680).
ggggctacatcgtgcttaa

SEQ ID NO: 643088 - DNA, 19 bp, Mus musculus
  siRNA target sequence for 9630015D15Rik (NM_181401.2,663-681).
gggctacatcgtgcttaat

SEQ ID NO: 643089 - DNA, 19 bp, Mus musculus
  siRNA target sequence for 9630015D15Rik (NM_181401.2,665-683).
gctacatcgtgcttaatgt

SEQ ID NO: 643090 - DNA, 19 bp, Mus musculus
  siRNA target sequence for 9630015D15Rik (NM_181401.2,886-904).
cggctgactcccatacctt

SEQ ID NO: 643091 - DNA, 19 bp, Mus musculus
  siRNA target sequence for 9630015D15Rik (NM_181401.2,1017-1035).
cacactacggactatggaa

SEQ ID NO: 643092 - DNA, 19 bp, Mus musculus
  siRNA target sequence for 9630015D15Rik (NM_181401.2,1041-1059).
catcgcagaacaaagtctt

SEQ ID NO: 643093 - DNA, 19 bp, Mus musculus
  siRNA target sequence for 9630015D15Rik (NM_181401.2,1055-1073).
gtcttagtggctattttgt

SEQ ID NO: 643094 - DNA, 19 bp, Mus musculus
  siRNA target sequence for 9630015D15Rik (NM_181401.2,1057-1075).
cttagtggctattttgtct

SEQ ID NO: 643095 - DNA, 19 bp, Mus musculus
  siRNA target sequence for 9630015D15Rik (NM_181401.2,1103-1121).
gcctcatgttttatgtagt

SEQ ID NO: 643096 - DNA, 19 bp, Mus musculus
  siRNA target sequence for 9630015D15Rik (NM_181401.2,1127-1145).
gcgctcaagtggaattgaa

SEQ ID NO: 643097 - DNA, 19 bp, Mus musculus
  siRNA target sequence for 9630015D15Rik (NM_181401.2,1128-1146).
cgctcaagtggaattgaat

SEQ ID NO: 643098 - DNA, 19 bp, Mus musculus
  siRNA target sequence for 9630015D15Rik (NM_181401.2,1176-1194).
gaaaacctctctggttaaa

SEQ ID NO: 643099 - DNA, 19 bp, Mus musculus
  siRNA target sequence for 9630015D15Rik (NM_181401.2,1186-1204).
ctggttaaaggcaatcaat

SEQ ID NO: 643100 - DNA, 19 bp, Mus musculus
  siRNA target sequence for 9630015D15Rik (NM_181401.2,1214-1232).
gtggctcttccttctacaa

SEQ ID NO: 643101 - DNA, 19 bp, Mus musculus
  siRNA target sequence for 9630015D15Rik (NM_181401.2,1236-1254).
gaggaccctcacgttttct

SEQ ID NO: 643102 - DNA, 19 bp, Mus musculus
  siRNA target sequence for 9630015D15Rik (NM_181401.2,1256-1274).
gaggtggaatcaatattgt

SEQ ID NO: 643103 - DNA, 19 bp, Mus musculus
  siRNA target sequence for 9630015D15Rik (NM_181401.2,1258-1276).
ggtggaatcaatattgtat

SEQ ID NO: 643104 - DNA, 19 bp, Mus musculus
  siRNA target sequence for B430219L04Rik (NM_178769.2,582-600).
gtgtctccttggaaagtct

SEQ ID NO: 643105 - DNA, 19 bp, Mus musculus
  siRNA target sequence for B430219L04Rik (NM_178769.2,639-657).
gagggtctcagaagctatt

SEQ ID NO: 643106 - DNA, 19 bp, Mus musculus
  siRNA target sequence for B430219L04Rik (NM_178769.2,641-659).
gggtctcagaagctatttt

SEQ ID NO: 643107 - DNA, 19 bp, Mus musculus
  siRNA target sequence for B430219L04Rik (NM_178769.2,746-764).
cagcaattaggcattcaaa

SEQ ID NO: 643108 - DNA, 19 bp, Mus musculus
  siRNA target sequence for B430219L04Rik (NM_178769.2,781-799).
ctgcgcagtccttacagaa

SEQ ID NO: 643109 - DNA, 19 bp, Mus musculus
  siRNA target sequence for B430219L04Rik (NM_178769.2,783-801).
gcgcagtccttacagaaaa

SEQ ID NO: 643110 - DNA, 19 bp, Mus musculus
  siRNA target sequence for B430219L04Rik (NM_178769.2,856-874).
cctggaatctctaatgttt

SEQ ID NO: 643111 - DNA, 19 bp, Mus musculus
  siRNA target sequence for B430219L04Rik (NM_178769.2,892-910).
cccgtatatccccattctt

SEQ ID NO: 643112 - DNA, 19 bp, Mus musculus
  siRNA target sequence for B430219L04Rik (NM_178769.2,920-938).
ctcctagaagttttgagtt

SEQ ID NO: 643113 - DNA, 19 bp, Mus musculus
  siRNA target sequence for B430219L04Rik (NM_178769.2,960-978).
gcgtacactccatctttaa

SEQ ID NO: 643114 - DNA, 19 bp, Mus musculus
  siRNA target sequence for B430219L04Rik (NM_178769.2,1022-1040).
gatggaggcactattaaaa

SEQ ID NO: 643115 - DNA, 19 bp, Mus musculus
  siRNA target sequence for B430219L04Rik (NM_178769.2,1066-1084).
cctcccggagcctcttctt

SEQ ID NO: 643116 - DNA, 19 bp, Mus musculus
  siRNA target sequence for B430219L04Rik (NM_178769.2,1114-1132).
cttgcacccggatttggaa

SEQ ID NO: 643117 - DNA, 19 bp, Mus musculus
  siRNA target sequence for B430219L04Rik (NM_178769.2,1166-1184).
gctttatcccactcaaaaa

SEQ ID NO: 643118 - DNA, 19 bp, Mus musculus
  siRNA target sequence for B430219L04Rik (NM_178769.2,1167-1185).
ctttatcccactcaaaaat

SEQ ID NO: 643119 - DNA, 19 bp, Mus musculus
  siRNA target sequence for B430219L04Rik (NM_178769.2,1199-1217).
gttcgagcagttttcctta

SEQ ID NO: 643120 - DNA, 19 bp, Mus musculus
  siRNA target sequence for B430219L04Rik (NM_178769.2,1218-1236).
ggttatttgcacaactgtt

SEQ ID NO: 643121 - DNA, 19 bp, Mus musculus
  siRNA target sequence for B430219L04Rik (NM_178769.2,1273-1291).
ccatgccgagcctgtgata

SEQ ID NO: 643122 - DNA, 19 bp, Mus musculus
  siRNA target sequence for B430219L04Rik (NM_178769.2,1278-1296).
ccgagcctgtgatacactt

SEQ ID NO: 643123 - DNA, 19 bp, Mus musculus
  siRNA target sequence for B430219L04Rik (NM_178769.2,1279-1297).
cgagcctgtgatacacttt

SEQ ID NO: 643124 - DNA, 19 bp, Mus musculus
  siRNA target sequence for B430219L04Rik (NM_178769.2,1326-1344).
gcttggttgagaatgattt

SEQ ID NO: 643125 - DNA, 19 bp, Mus musculus
  siRNA target sequence for B430219L04Rik (NM_178769.2,1508-1526).
cttgctgagcagctattca

SEQ ID NO: 643126 - DNA, 19 bp, Mus musculus
  siRNA target sequence for B430219L04Rik (NM_178769.2,1635-1653).
gggttcaagaactaataca

SEQ ID NO: 643127 - DNA, 19 bp, Mus musculus
  siRNA target sequence for B430219L04Rik (NM_178769.2,1683-1701).
ctcctgctacacgaataga

SEQ ID NO: 643128 - DNA, 19 bp, Mus musculus
  siRNA target sequence for B430219L04Rik (NM_178769.2,1685-1703).
cctgctacacgaatagaaa

SEQ ID NO: 643129 - DNA, 19 bp, Mus musculus
  siRNA target sequence for B430219L04Rik (NM_178769.2,1724-1742).
ggtccacccgttgtttcaa

SEQ ID NO: 643130 - DNA, 19 bp, Mus musculus
  siRNA target sequence for B430219L04Rik (NM_178769.2,1725-1743).
gtccacccgttgtttcaat

SEQ ID NO: 643131 - DNA, 19 bp, Mus musculus
  siRNA target sequence for B430219L04Rik (NM_178769.2,1727-1745).
ccacccgttgtttcaataa

SEQ ID NO: 643132 - DNA, 19 bp, Mus musculus
  siRNA target sequence for B430219L04Rik (NM_178769.2,1731-1749).
ccgttgtttcaataatgga

SEQ ID NO: 643133 - DNA, 19 bp, Mus musculus
  siRNA target sequence for B430219L04Rik (NM_178769.2,1733-1751).
gttgtttcaataatggaaa

SEQ ID NO: 643134 - DNA, 19 bp, Mus musculus
  siRNA target sequence for B430219L04Rik (NM_178769.2,1793-1811).
gttagaaactgcatctcat

SEQ ID NO: 643135 - DNA, 19 bp, Mus musculus
  siRNA target sequence for B430219L04Rik (NM_178769.2,1861-1879).
cttgagggcccttaaagga

SEQ ID NO: 643136 - DNA, 19 bp, Mus musculus
  siRNA target sequence for B430219L04Rik (NM_178769.2,1952-1970).
caacagtttgactacataa

SEQ ID NO: 643137 - DNA, 19 bp, Mus musculus
  siRNA target sequence for B430219L04Rik (NM_178769.2,1955-1973).
cagtttgactacataataa

SEQ ID NO: 643138 - DNA, 19 bp, Mus musculus
  siRNA target sequence for B430219L04Rik (NM_178769.2,1991-2009).
ctacaggattgttcaagtt

SEQ ID NO: 643139 - DNA, 19 bp, Mus musculus
  siRNA target sequence for B430219L04Rik (NM_178769.2,1996-2014).
ggattgttcaagtttagaa

SEQ ID NO: 643140 - DNA, 19 bp, Mus musculus
  siRNA target sequence for B430219L04Rik (NM_178769.2,2108-2126).
caggaccaccccatttgga

SEQ ID NO: 643141 - DNA, 19 bp, Mus musculus
  siRNA target sequence for B430219L04Rik (NM_178769.2,2142-2160).
gggagacaactttttacaa

SEQ ID NO: 643142 - DNA, 19 bp, Mus musculus
  siRNA target sequence for B430219L04Rik (NM_178769.2,2199-2217).
caaaggacgacaatcatat

SEQ ID NO: 643143 - DNA, 19 bp, Mus musculus
  siRNA target sequence for B430219L04Rik (NM_178769.2,2264-2282).
gtgtgcttaggattgactt

SEQ ID NO: 643144 - DNA, 19 bp, Mus musculus
  siRNA target sequence for Dlgh4 (NM_007864.1,61-79).
gactgtctctgtatagtga

SEQ ID NO: 643145 - DNA, 19 bp, Mus musculus
  siRNA target sequence for Dlgh4 (NM_007864.1,156-174).
caattctccccctgtgatt

SEQ ID NO: 643146 - DNA, 19 bp, Mus musculus
  siRNA target sequence for Dlgh4 (NM_007864.1,161-179).
ctccccctgtgattgtcaa

SEQ ID NO: 643147 - DNA, 19 bp, Mus musculus
  siRNA target sequence for Dlgh4 (NM_007864.1,193-211).
gaagccccaggatatgagt

SEQ ID NO: 643148 - DNA, 19 bp, Mus musculus
  siRNA target sequence for Dlgh4 (NM_007864.1,247-265).
gaggagatcacattggaaa

SEQ ID NO: 643149 - DNA, 19 bp, Mus musculus
  siRNA target sequence for Dlgh4 (NM_007864.1,325-343).
gacgacccatccatcttta

SEQ ID NO: 643150 - DNA, 19 bp, Mus musculus
  siRNA target sequence for Dlgh4 (NM_007864.1,601-619).
cacatccctggagataata

SEQ ID NO: 643151 - DNA, 19 bp, Mus musculus
  siRNA target sequence for Dlgh4 (NM_007864.1,958-976).
ctgctaggggaggaagata

SEQ ID NO: 643152 - DNA, 19 bp, Mus musculus
  siRNA target sequence for Dlgh4 (NM_007864.1,960-978).
gctaggggaggaagatatt

SEQ ID NO: 643153 - DNA, 19 bp, Mus musculus
  siRNA target sequence for Dlgh4 (NM_007864.1,1546-1564).
cgagagtggtcaaggttaa

SEQ ID NO: 643154 - DNA, 19 bp, Mus musculus
  siRNA target sequence for Dlgh4 (NM_007864.1,1547-1565).
gagagtggtcaaggttaaa

SEQ ID NO: 643155 - DNA, 19 bp, Mus musculus
  siRNA target sequence for Dlgh4 (NM_007864.1,1692-1710).
ccgtgccaacgatgatctt

SEQ ID NO: 643156 - DNA, 19 bp, Mus musculus
  siRNA target sequence for Dlgh4 (NM_007864.1,1694-1712).
gtgccaacgatgatcttct

SEQ ID NO: 643157 - DNA, 19 bp, Mus musculus
  siRNA target sequence for Dlgh4 (NM_007864.1,1715-1733).
ccgagttccccgacaagtt

SEQ ID NO: 643158 - DNA, 19 bp, Mus musculus
  siRNA target sequence for Dlgh4 (NM_007864.1,1716-1734).
cgagttccccgacaagttt

SEQ ID NO: 643159 - DNA, 19 bp, Mus musculus
  siRNA target sequence for Dlgh4 (NM_007864.1,1760-1778).
gtcctaagcgggaatatga

SEQ ID NO: 643160 - DNA, 19 bp, Mus musculus
  siRNA target sequence for Dlgh4 (NM_007864.1,1762-1780).
cctaagcgggaatatgaga

SEQ ID NO: 643161 - DNA, 19 bp, Mus musculus
  siRNA target sequence for Dlgh4 (NM_007864.1,1789-1807).
cgcgattaccactttgtct

SEQ ID NO: 643162 - DNA, 19 bp, Mus musculus
  siRNA target sequence for Dlgh4 (NM_007864.1,1804-1822).
gtctcctcccgggagaaaa

SEQ ID NO: 643163 - DNA, 19 bp, Mus musculus
  siRNA target sequence for Dlgh4 (NM_007864.1,1987-2005).
caccctatcgccatcttca

SEQ ID NO: 643164 - DNA, 19 bp, Mus musculus
  siRNA target sequence for Dlgh4 (NM_007864.1,2025-2043).
gaatgtgctagagatcaat

SEQ ID NO: 643165 - DNA, 19 bp, Mus musculus
  siRNA target sequence for Dp1 (NM_007874.2,151-169).
cggactggtggctttgtat

SEQ ID NO: 643166 - DNA, 19 bp, Mus musculus
  siRNA target sequence for Dp1 (NM_007874.2,218-236).
ggatacccagcctacatct

SEQ ID NO: 643167 - DNA, 19 bp, Mus musculus
  siRNA target sequence for Dp1 (NM_007874.2,247-265).
catcgagagtcccaacaaa

SEQ ID NO: 643168 - DNA, 19 bp, Mus musculus
  siRNA target sequence for Dp1 (NM_007874.2,250-268).
cgagagtcccaacaaagat

SEQ ID NO: 643169 - DNA, 19 bp, Mus musculus
  siRNA target sequence for Dp1 (NM_007874.2,286-304).
gacgtactgggtggtatat

SEQ ID NO: 643170 - DNA, 19 bp, Mus musculus
  siRNA target sequence for Dp1 (NM_007874.2,441-459).
gaatcatccgtcctatctt

SEQ ID NO: 643171 - DNA, 19 bp, Mus musculus
  siRNA target sequence for Gemin5 (NM_172558.1,218-236).
gagtatctggtttcacttt

SEQ ID NO: 643172 - DNA, 19 bp, Mus musculus
  siRNA target sequence for Gemin5 (NM_172558.1,340-358).
ctccatcagcatacaatat

SEQ ID NO: 643173 - DNA, 19 bp, Mus musculus
  siRNA target sequence for Gemin5 (NM_172558.1,342-360).
ccatcagcatacaatatca

SEQ ID NO: 643174 - DNA, 19 bp, Mus musculus
  siRNA target sequence for Gemin5 (NM_172558.1,367-385).
cattggtctccgacagtta

SEQ ID NO: 643175 - DNA, 19 bp, Mus musculus
  siRNA target sequence for Gemin5 (NM_172558.1,371-389).
ggtctccgacagttaagga

SEQ ID NO: 643176 - DNA, 19 bp, Mus musculus
  siRNA target sequence for Gemin5 (NM_172558.1,376-394).
ccgacagttaaggacttaa

SEQ ID NO: 643177 - DNA, 19 bp, Mus musculus
  siRNA target sequence for Gemin5 (NM_172558.1,409-427).
gaaaaaggagtcgttttct

SEQ ID NO: 643178 - DNA, 19 bp, Mus musculus
  siRNA target sequence for Gemin5 (NM_172558.1,415-433).
ggagtcgttttctgttact

SEQ ID NO: 643179 - DNA, 19 bp, Mus musculus
  siRNA target sequence for Gemin5 (NM_172558.1,426-444).
ctgttactggcttaacaga

SEQ ID NO: 643180 - DNA, 19 bp, Mus musculus
  siRNA target sequence for Gemin5 (NM_172558.1,428-446).
gttactggcttaacagaaa

SEQ ID NO: 643181 - DNA, 19 bp, Mus musculus
  siRNA target sequence for Gemin5 (NM_172558.1,503-521).
ctcatcacgaaaatctagt

SEQ ID NO: 643182 - DNA, 19 bp, Mus musculus
  siRNA target sequence for Gemin5 (NM_172558.1,542-560).
gcatagtggttatcattga

SEQ ID NO: 643183 - DNA, 19 bp, Mus musculus
  siRNA target sequence for Gemin5 (NM_172558.1,643-661).
ggtgaagactgcttatcca

SEQ ID NO: 643184 - DNA, 19 bp, Mus musculus
  siRNA target sequence for Gemin5 (NM_172558.1,644-662).
gtgaagactgcttatccat

SEQ ID NO: 643185 - DNA, 19 bp, Mus musculus
  siRNA target sequence for Gemin5 (NM_172558.1,678-696).
ctcggaagaacctgacatt

SEQ ID NO: 643186 - DNA, 19 bp, Mus musculus
  siRNA target sequence for Gemin5 (NM_172558.1,800-818).
ggggtgtaatggttttgaa

SEQ ID NO: 643187 - DNA, 19 bp, Mus musculus
  siRNA target sequence for Gemin5 (NM_172558.1,801-819).
gggtgtaatggttttgaaa

SEQ ID NO: 643188 - DNA, 19 bp, Mus musculus
  siRNA target sequence for Gemin5 (NM_172558.1,802-820).
ggtgtaatggttttgaaat

SEQ ID NO: 643189 - DNA, 19 bp, Mus musculus
  siRNA target sequence for Gemin5 (NM_172558.1,846-864).
gggtgtggacccaacagtt

SEQ ID NO: 643190 - DNA, 19 bp, Mus musculus
  siRNA target sequence for Gemin5 (NM_172558.1,847-865).
ggtgtggacccaacagtta

SEQ ID NO: 643191 - DNA, 19 bp, Mus musculus
  siRNA target sequence for Gemin5 (NM_172558.1,848-866).
gtgtggacccaacagttaa

SEQ ID NO: 643192 - DNA, 19 bp, Mus musculus
  siRNA target sequence for Gemin5 (NM_172558.1,884-902).
cacttcattggcctaagaa

SEQ ID NO: 643193 - DNA, 19 bp, Mus musculus
  siRNA target sequence for Gemin5 (NM_172558.1,913-931).
cagctggtatccagttgtt

SEQ ID NO: 643194 - DNA, 19 bp, Mus musculus
  siRNA target sequence for Gemin5 (NM_172558.1,918-936).
ggtatccagttgttttgga

SEQ ID NO: 643195 - DNA, 19 bp, Mus musculus
  siRNA target sequence for Gemin5 (NM_172558.1,1001-1019).
cagcagaagggcacaatca

SEQ ID NO: 643196 - DNA, 19 bp, Mus musculus
  siRNA target sequence for Gemin5 (NM_172558.1,1082-1100).
ccacatccatggatagaga

SEQ ID NO: 643197 - DNA, 19 bp, Mus musculus
  siRNA target sequence for Gemin5 (NM_172558.1,1230-1248).
gatccgggtgtggaataca

SEQ ID NO: 643198 - DNA, 19 bp, Mus musculus
  siRNA target sequence for Gemin5 (NM_172558.1,1355-1373).
ggaccgatgacggaaaagt

SEQ ID NO: 643199 - DNA, 19 bp, Mus musculus
  siRNA target sequence for Gemin5 (NM_172558.1,1395-1413).
caacaaacctccacagatt

SEQ ID NO: 643200 - DNA, 19 bp, Mus musculus
  siRNA target sequence for Gemin5 (NM_172558.1,1410-1428).
gatttcaagcacgtatcat

SEQ ID NO: 643201 - DNA, 19 bp, Mus musculus
  siRNA target sequence for Gemin5 (NM_172558.1,1415-1433).
caagcacgtatcataagaa

SEQ ID NO: 643202 - DNA, 19 bp, Mus musculus
  siRNA target sequence for Gemin5 (NM_172558.1,1535-1553).
gcgttgtgctacagcataa

SEQ ID NO: 643203 - DNA, 19 bp, Mus musculus
  siRNA target sequence for Gemin5 (NM_172558.1,1573-1591).
gaggccttcgacatcaaca

SEQ ID NO: 643204 - DNA, 19 bp, Mus musculus
  siRNA target sequence for Gemin5 (NM_172558.1,1694-1712).
gatcaatagaaatattcca

SEQ ID NO: 643205 - DNA, 19 bp, Mus musculus
  siRNA target sequence for Gemin5 (NM_172558.1,1881-1899).
caatcctgagtctccaata

SEQ ID NO: 643206 - DNA, 19 bp, Mus musculus
  siRNA target sequence for Gemin5 (NM_172558.1,1933-1951).
cacacagccaagattacca

SEQ ID NO: 643207 - DNA, 19 bp, Mus musculus
  siRNA target sequence for Gemin5 (NM_172558.1,2032-2050).
cgggaagaacctttgttca

SEQ ID NO: 643208 - DNA, 19 bp, Mus musculus
  siRNA target sequence for Gemin5 (NM_172558.1,2227-2245).
caatttaagccaaagctta

SEQ ID NO: 643209 - DNA, 19 bp, Mus musculus
  siRNA target sequence for Gemin5 (NM_172558.1,2264-2282).
ccttgcgactgcctgtaaa

SEQ ID NO: 643210 - DNA, 19 bp, Mus musculus
  siRNA target sequence for Gemin5 (NM_172558.1,2275-2293).
cctgtaaagcaggattcat

SEQ ID NO: 643211 - DNA, 19 bp, Mus musculus
  siRNA target sequence for Gemin5 (NM_172558.1,2400-2418).
ctctcctgtagtttgtgta

SEQ ID NO: 643212 - DNA, 19 bp, Mus musculus
  siRNA target sequence for Gemin5 (NM_172558.1,2445-2463).
ctcaggctttgaaaagtca

SEQ ID NO: 643213 - DNA, 19 bp, Mus musculus
  siRNA target sequence for Gemin5 (NM_172558.1,2447-2465).
caggctttgaaaagtcaaa

SEQ ID NO: 643214 - DNA, 19 bp, Mus musculus
  siRNA target sequence for Gemin5 (NM_172558.1,2640-2658).
cgccaaagcagagctaaat

SEQ ID NO: 643215 - DNA, 19 bp, Mus musculus
  siRNA target sequence for Gemin5 (NM_172558.1,2672-2690).
ccgaccttgaggaacgatt

SEQ ID NO: 643216 - DNA, 19 bp, Mus musculus
  siRNA target sequence for Gemin5 (NM_172558.1,2708-2726).
cagacagggctactctata

SEQ ID NO: 643217 - DNA, 19 bp, Mus musculus
  siRNA target sequence for Gemin5 (NM_172558.1,2710-2728).
gacagggctactctataca

SEQ ID NO: 643218 - DNA, 19 bp, Mus musculus
  siRNA target sequence for Gemin5 (NM_172558.1,2746-2764).
gggaaaggtcacttggaaa

SEQ ID NO: 643219 - DNA, 19 bp, Mus musculus
  siRNA target sequence for Gemin5 (NM_172558.1,2765-2783).
gtggccaccccgagctttt

SEQ ID NO: 643220 - DNA, 19 bp, Mus musculus
  siRNA target sequence for Gemin5 (NM_172558.1,2768-2786).
gccaccccgagctttttca

SEQ ID NO: 643221 - DNA, 19 bp, Mus musculus
  siRNA target sequence for Gemin5 (NM_172558.1,2952-2970).
cgtcaaggctgcctcttat

SEQ ID NO: 643222 - DNA, 19 bp, Mus musculus
  siRNA target sequence for Gemin5 (NM_172558.1,2963-2981).
cctcttatctgctatccat

SEQ ID NO: 643223 - DNA, 19 bp, Mus musculus
  siRNA target sequence for Gemin5 (NM_172558.1,2974-2992).
ctatccatccacaaagtgt

SEQ ID NO: 643224 - DNA, 19 bp, Mus musculus
  siRNA target sequence for Gemin5 (NM_172558.1,3271-3289).
gcttccctggctcttagat

SEQ ID NO: 643225 - DNA, 19 bp, Mus musculus
  siRNA target sequence for Gemin5 (NM_172558.1,3318-3336).
ctgggtgggtgcacaagaa

SEQ ID NO: 643226 - DNA, 19 bp, Mus musculus
  siRNA target sequence for Gemin5 (NM_172558.1,3337-3355).
gcattgggactgcatgaaa

SEQ ID NO: 643227 - DNA, 19 bp, Mus musculus
  siRNA target sequence for Gemin5 (NM_172558.1,3437-3455).
gaggcccctcttccattta

SEQ ID NO: 643228 - DNA, 19 bp, Mus musculus
  siRNA target sequence for Gemin5 (NM_172558.1,3582-3600).
gtacccatcagcaacaagt

SEQ ID NO: 643229 - DNA, 19 bp, Mus musculus
  siRNA target sequence for Gemin5 (NM_172558.1,3745-3763).
ctcatgcaggaaatctact

SEQ ID NO: 643230 - DNA, 19 bp, Mus musculus
  siRNA target sequence for Gemin5 (NM_172558.1,3828-3846).
ggcagcttacaaaagctta

SEQ ID NO: 643231 - DNA, 19 bp, Mus musculus
  siRNA target sequence for Gemin5 (NM_172558.1,3857-3875).
gtatttatgggcaactgta

SEQ ID NO: 643232 - DNA, 19 bp, Mus musculus
  siRNA target sequence for Gemin5 (NM_172558.1,3937-3955).
gaaagcacggtctctgata

SEQ ID NO: 643233 - DNA, 19 bp, Mus musculus
  siRNA target sequence for Gemin5 (NM_172558.1,3941-3959).
gcacggtctctgataaaca

SEQ ID NO: 643234 - DNA, 19 bp, Mus musculus
  siRNA target sequence for Gemin5 (NM_172558.1,4052-4070).
gtgcctgcaaggagctttt

SEQ ID NO: 643235 - DNA, 19 bp, Mus musculus
  siRNA target sequence for Gemin5 (NM_172558.1,4146-4164).
ccgccagcaccaaaagagt

SEQ ID NO: 643236 - DNA, 19 bp, Mus musculus
  siRNA target sequence for Gemin5 (NM_172558.1,4168-4186).
ctctgcaaggccacaacaa

SEQ ID NO: 643237 - DNA, 19 bp, Mus musculus
  siRNA target sequence for Gemin5 (NM_172558.1,4258-4276).
ccgagcccaacagaagaaa

SEQ ID NO: 643238 - DNA, 19 bp, Mus musculus
  siRNA target sequence for Gemin5 (NM_172558.1,4260-4278).
gagcccaacagaagaaaga

SEQ ID NO: 643239 - DNA, 19 bp, Mus musculus
  siRNA target sequence for Gemin5 (NM_172558.1,4313-4331).
ggctcacagaggcaaatga

SEQ ID NO: 643240 - DNA, 19 bp, Mus musculus
  siRNA target sequence for Gemin5 (NM_172558.1,4394-4412).
gtctcgtcttgcttcacat

SEQ ID NO: 643241 - DNA, 19 bp, Mus musculus
  siRNA target sequence for Gemin5 (NM_172558.1,4464-4482).
ggagctccttcacaagtat

SEQ ID NO: 643242 - DNA, 19 bp, Mus musculus
  siRNA target sequence for Nalp10 (NM_175532.2,115-133).
gaccttgaggagaacagtt

SEQ ID NO: 643243 - DNA, 19 bp, Mus musculus
  siRNA target sequence for Nalp10 (NM_175532.2,131-149).
gtttcaagacgctgaagtt

SEQ ID NO: 643244 - DNA, 19 bp, Mus musculus
  siRNA target sequence for Nalp10 (NM_175532.2,224-242).
caaaactgatttcaatgta

SEQ ID NO: 643245 - DNA, 19 bp, Mus musculus
  siRNA target sequence for Nalp10 (NM_175532.2,318-336).
caaccaggtttgtctgaat

SEQ ID NO: 643246 - DNA, 19 bp, Mus musculus
  siRNA target sequence for Nalp10 (NM_175532.2,384-402).
gcaagattggggtgttaat

SEQ ID NO: 643247 - DNA, 19 bp, Mus musculus
  siRNA target sequence for Nalp10 (NM_175532.2,385-403).
caagattggggtgttaata

SEQ ID NO: 643248 - DNA, 19 bp, Mus musculus
  siRNA target sequence for Nalp10 (NM_175532.2,388-406).
gattggggtgttaatagca

SEQ ID NO: 643249 - DNA, 19 bp, Mus musculus
  siRNA target sequence for Nalp10 (NM_175532.2,496-514).
gtcgatgtggagactttat

SEQ ID NO: 643250 - DNA, 19 bp, Mus musculus
  siRNA target sequence for Nalp10 (NM_175532.2,523-541).
gaggcggagtcctactcaa

SEQ ID NO: 643251 - DNA, 19 bp, Mus musculus
  siRNA target sequence for Nalp10 (NM_175532.2,633-651).
gtacccaggccagtttgat

SEQ ID NO: 643252 - DNA, 19 bp, Mus musculus
  siRNA target sequence for Nalp10 (NM_175532.2,743-761).
ccccagtcacagagattct

SEQ ID NO: 643253 - DNA, 19 bp, Mus musculus
  siRNA target sequence for Nalp10 (NM_175532.2,824-842).
gtgccgagtgcgtacttca

SEQ ID NO: 643254 - DNA, 19 bp, Mus musculus
  siRNA target sequence for Nalp10 (NM_175532.2,828-846).
cgagtgcgtacttcacatt

SEQ ID NO: 643255 - DNA, 19 bp, Mus musculus
  siRNA target sequence for Nalp10 (NM_175532.2,833-851).
gcgtacttcacattctgat

SEQ ID NO: 643256 - DNA, 19 bp, Mus musculus
  siRNA target sequence for Nalp10 (NM_175532.2,935-953).
ggcgacatgtccttgtctt

SEQ ID NO: 643257 - DNA, 19 bp, Mus musculus
  siRNA target sequence for Nalp10 (NM_175532.2,936-954).
gcgacatgtccttgtctta

SEQ ID NO: 643258 - DNA, 19 bp, Mus musculus
  siRNA target sequence for Nalp10 (NM_175532.2,992-1010).
cctgttttacggataagga

SEQ ID NO: 643259 - DNA, 19 bp, Mus musculus
  siRNA target sequence for Nalp10 (NM_175532.2,1001-1019).
cggataaggagcaattgaa

SEQ ID NO: 643260 - DNA, 19 bp, Mus musculus
  siRNA target sequence for Nalp10 (NM_175532.2,1025-1043).
cccttgagtttgtgcaaaa

SEQ ID NO: 643261 - DNA, 19 bp, Mus musculus
  siRNA target sequence for Nalp10 (NM_175532.2,1544-1562).
gtttgcagttcttattcga

SEQ ID NO: 643262 - DNA, 19 bp, Mus musculus
  siRNA target sequence for Nalp10 (NM_175532.2,1554-1572).
cttattcgacatgttgaaa

SEQ ID NO: 643263 - DNA, 19 bp, Mus musculus
  siRNA target sequence for Nalp10 (NM_175532.2,1764-1782).
caatgtgcaacatttggat

SEQ ID NO: 643264 - DNA, 19 bp, Mus musculus
  siRNA target sequence for Nalp10 (NM_175532.2,1816-1834).
gtgacaagcagctttagta

SEQ ID NO: 643265 - DNA, 19 bp, Mus musculus
  siRNA target sequence for Nalp10 (NM_175532.2,1971-1989).
gggtcatatggagatgaat

SEQ ID NO: 643266 - DNA, 19 bp, Mus musculus
  siRNA target sequence for Nalp10 (NM_175532.2,1975-1993).
catatggagatgaatgata

SEQ ID NO: 643267 - DNA, 19 bp, Mus musculus
  siRNA target sequence for Slc2a1 (NM_011400.1,257-275).
cactgcagttcggctataa

SEQ ID NO: 643268 - DNA, 19 bp, Mus musculus
  siRNA target sequence for Slc2a1 (NM_011400.1,261-279).
gcagttcggctataacact

SEQ ID NO: 643269 - DNA, 19 bp, Mus musculus
  siRNA target sequence for Slc2a1 (NM_011400.1,310-328).
gaggagttctacaatcaaa

SEQ ID NO: 643270 - DNA, 19 bp, Mus musculus
  siRNA target sequence for Slc2a1 (NM_011400.1,313-331).
gagttctacaatcaaacat

SEQ ID NO: 643271 - DNA, 19 bp, Mus musculus
  siRNA target sequence for Slc2a1 (NM_011400.1,434-452).
ctgtcggcctctttgttaa

SEQ ID NO: 643272 - DNA, 19 bp, Mus musculus
  siRNA target sequence for Slc2a1 (NM_011400.1,1559-1577).
gccgaaccttcgatgagat

SEQ ID NO: 643273 - DNA, 19 bp, Mus musculus
  siRNA target sequence for Slc2a10 (NM_130451.1,374-392).
gctcctgggccgtttatct

SEQ ID NO: 643274 - DNA, 19 bp, Mus musculus
  siRNA target sequence for Slc2a10 (NM_130451.1,377-395).
cctgggccgtttatctgtt

SEQ ID NO: 643275 - DNA, 19 bp, Mus musculus
  siRNA target sequence for Slc2a10 (NM_130451.1,430-448).
gtatctacgtgtcagaatt

SEQ ID NO: 643276 - DNA, 19 bp, Mus musculus
  siRNA target sequence for Slc2a10 (NM_130451.1,504-522).
gtgggcattctgttctctt

SEQ ID NO: 643277 - DNA, 19 bp, Mus musculus
  siRNA target sequence for Slc2a10 (NM_130451.1,1288-1306).
ggtctgcgctggtttgcat

SEQ ID NO: 643278 - DNA, 19 bp, Mus musculus
  siRNA target sequence for Slc2a10 (NM_130451.1,1531-1549).
ctttcatctacctacttgt

SEQ ID NO: 643279 - DNA, 19 bp, Mus musculus
  siRNA target sequence for Slc2a10 (NM_130451.1,1603-1621).
gcaggttccctctaaactt

SEQ ID NO: 643280 - DNA, 19 bp, Mus musculus
  siRNA target sequence for Slc2a10 (NM_130451.1,1630-1648).
ggcagcgcatcggtattca

SEQ ID NO: 643281 - DNA, 19 bp, Mus musculus
  siRNA target sequence for Slc2a10 (NM_130451.1,1632-1650).
cagcgcatcggtattcagt

SEQ ID NO: 643282 - DNA, 19 bp, Mus musculus
  siRNA target sequence for Slc2a12 (NM_178934.2,72-90).
ggtacctgttgaaaacaca

SEQ ID NO: 643283 - DNA, 19 bp, Mus musculus
  siRNA target sequence for Slc2a12 (NM_178934.2,180-198).
gggaggtcccagcatgttt

SEQ ID NO: 643284 - DNA, 19 bp, Mus musculus
  siRNA target sequence for Slc2a12 (NM_178934.2,184-202).
ggtcccagcatgtttacgt

SEQ ID NO: 643285 - DNA, 19 bp, Mus musculus
  siRNA target sequence for Slc2a12 (NM_178934.2,185-203).
gtcccagcatgtttacgtt

SEQ ID NO: 643286 - DNA, 19 bp, Mus musculus
  siRNA target sequence for Slc2a12 (NM_178934.2,237-255).
cctggtgggttatgaactt

SEQ ID NO: 643287 - DNA, 19 bp, Mus musculus
  siRNA target sequence for Slc2a12 (NM_178934.2,305-323).
cctgccacgagcaggaaat

SEQ ID NO: 643288 - DNA, 19 bp, Mus musculus
  siRNA target sequence for Slc2a12 (NM_178934.2,368-386).
caggaggcgtgctcataga

SEQ ID NO: 643289 - DNA, 19 bp, Mus musculus
  siRNA target sequence for Slc2a12 (NM_178934.2,370-388).
ggaggcgtgctcatagaca

SEQ ID NO: 643290 - DNA, 19 bp, Mus musculus
  siRNA target sequence for Slc2a12 (NM_178934.2,395-413).
gaagaaggctcgccataat

SEQ ID NO: 643291 - DNA, 19 bp, Mus musculus
  siRNA target sequence for Slc2a12 (NM_178934.2,398-416).
gaaggctcgccataatcct

SEQ ID NO: 643292 - DNA, 19 bp, Mus musculus
  siRNA target sequence for Slc2a12 (NM_178934.2,439-457).
ggaagcttggtcttgataa

SEQ ID NO: 643293 - DNA, 19 bp, Mus musculus
  siRNA target sequence for Slc2a12 (NM_178934.2,440-458).
gaagcttggtcttgataat

SEQ ID NO: 643294 - DNA, 19 bp, Mus musculus
  siRNA target sequence for Slc2a12 (NM_178934.2,448-466).
gtcttgataatgagtttgt

SEQ ID NO: 643295 - DNA, 19 bp, Mus musculus
  siRNA target sequence for Slc2a12 (NM_178934.2,465-483).
gtcctacacgctccttata

SEQ ID NO: 643296 - DNA, 19 bp, Mus musculus
  siRNA target sequence for Slc2a12 (NM_178934.2,467-485).
cctacacgctccttataat

SEQ ID NO: 643297 - DNA, 19 bp, Mus musculus
  siRNA target sequence for Slc2a12 (NM_178934.2,495-513).
ggctataggggtttccata

SEQ ID NO: 643298 - DNA, 19 bp, Mus musculus
  siRNA target sequence for Slc2a12 (NM_178934.2,600-618).
gatgattgtcactggtatt

SEQ ID NO: 643299 - DNA, 19 bp, Mus musculus
  siRNA target sequence for Slc2a12 (NM_178934.2,649-667).
gccaacatctccaatggtt

SEQ ID NO: 643300 - DNA, 19 bp, Mus musculus
  siRNA target sequence for Slc2a12 (NM_178934.2,659-677).
ccaatggttggaagtatat

SEQ ID NO: 643301 - DNA, 19 bp, Mus musculus
  siRNA target sequence for Slc2a12 (NM_178934.2,709-727).
caagcaatagcgatgtact

SEQ ID NO: 643302 - DNA, 19 bp, Mus musculus
  siRNA target sequence for Slc2a12 (NM_178934.2,821-839).
ctgaagaactcactttgat

SEQ ID NO: 643303 - DNA, 19 bp, Mus musculus
  siRNA target sequence for Slc2a12 (NM_178934.2,829-847).
ctcactttgatcaaatctt

SEQ ID NO: 643304 - DNA, 19 bp, Mus musculus
  siRNA target sequence for Slc2a12 (NM_178934.2,840-858).
caaatcttccttgaaagat

SEQ ID NO: 643305 - DNA, 19 bp, Mus musculus
  siRNA target sequence for Slc2a12 (NM_178934.2,956-974).
ctgggcagccaaacatact

SEQ ID NO: 643306 - DNA, 19 bp, Mus musculus
  siRNA target sequence for Slc2a12 (NM_178934.2,958-976).
gggcagccaaacatactat

SEQ ID NO: 643307 - DNA, 19 bp, Mus musculus
  siRNA target sequence for Slc2a12 (NM_178934.2,959-977).
ggcagccaaacatactatt

SEQ ID NO: 643308 - DNA, 19 bp, Mus musculus
  siRNA target sequence for Slc2a12 (NM_178934.2,1166-1184).
gcattgtgaacctcaacat

SEQ ID NO: 643309 - DNA, 19 bp, Mus musculus
  siRNA target sequence for Slc2a12 (NM_178934.2,1171-1189).
gtgaacctcaacatcaata

SEQ ID NO: 643310 - DNA, 19 bp, Mus musculus
  siRNA target sequence for Slc2a12 (NM_178934.2,1211-1229).
gaagccatagtcttcttaa

SEQ ID NO: 643311 - DNA, 19 bp, Mus musculus
  siRNA target sequence for Slc2a12 (NM_178934.2,1264-1282).
ggaaacctgtcaattagca

SEQ ID NO: 643312 - DNA, 19 bp, Mus musculus
  siRNA target sequence for Slc2a12 (NM_178934.2,1265-1283).
gaaacctgtcaattagcaa

SEQ ID NO: 643313 - DNA, 19 bp, Mus musculus
  siRNA target sequence for Slc2a12 (NM_178934.2,1270-1288).
ctgtcaattagcaatagca

SEQ ID NO: 643314 - DNA, 19 bp, Mus musculus
  siRNA target sequence for Slc2a12 (NM_178934.2,1293-1311).
cagggagcactttaaaaga

SEQ ID NO: 643315 - DNA, 19 bp, Mus musculus
  siRNA target sequence for Slc2a12 (NM_178934.2,1377-1395).
gaccttcacgtcgtcttta

SEQ ID NO: 643316 - DNA, 19 bp, Mus musculus
  siRNA target sequence for Slc2a12 (NM_178934.2,1380-1398).
cttcacgtcgtctttacca

SEQ ID NO: 643317 - DNA, 19 bp, Mus musculus
  siRNA target sequence for Slc2a12 (NM_178934.2,1383-1401).
cacgtcgtctttaccaaat

SEQ ID NO: 643318 - DNA, 19 bp, Mus musculus
  siRNA target sequence for Slc2a12 (NM_178934.2,1500-1518).
ggctgcattttcaattggt

SEQ ID NO: 643319 - DNA, 19 bp, Mus musculus
  siRNA target sequence for Slc2a12 (NM_178934.2,1551-1569).
gatctttcccggtggaatt

SEQ ID NO: 643320 - DNA, 19 bp, Mus musculus
  siRNA target sequence for Slc2a12 (NM_178934.2,1554-1572).
ctttcccggtggaattaga

SEQ ID NO: 643321 - DNA, 19 bp, Mus musculus
  siRNA target sequence for Slc2a12 (NM_178934.2,1588-1606).
ctgacatctagcatgaact

SEQ ID NO: 643322 - DNA, 19 bp, Mus musculus
  siRNA target sequence for Slc2a12 (NM_178934.2,1667-1685).
catgggtatgcttcatata

SEQ ID NO: 643323 - DNA, 19 bp, Mus musculus
  siRNA target sequence for Slc2a12 (NM_178934.2,1671-1689).
ggtatgcttcatatacaca

SEQ ID NO: 643324 - DNA, 19 bp, Mus musculus
  siRNA target sequence for Slc2a12 (NM_178934.2,1676-1694).
gcttcatatacacaatcat

SEQ ID NO: 643325 - DNA, 19 bp, Mus musculus
  siRNA target sequence for Slc2a12 (NM_178934.2,1706-1724).
cgctggcttttgttgttct

SEQ ID NO: 643326 - DNA, 19 bp, Mus musculus
  siRNA target sequence for Slc2a12 (NM_178934.2,1773-1791).
gctagcaaaggcgaactat

SEQ ID NO: 643327 - DNA, 19 bp, Mus musculus
  siRNA target sequence for Slc2a12 (NM_178934.2,1777-1795).
gcaaaggcgaactatgtga

SEQ ID NO: 643328 - DNA, 19 bp, Mus musculus
  siRNA target sequence for Slc2a12 (NM_178934.2,1792-1810).
gtgaaaaacaacatttgtt

SEQ ID NO: 643329 - DNA, 19 bp, Mus musculus
  siRNA target sequence for Slc2a12 (NM_178934.2,1837-1855).
gtgccaacacagcttcaaa

SEQ ID NO: 643330 - DNA, 19 bp, Mus musculus
  siRNA target sequence for Slc2a2 (NM_031197.1,160-178).
gcacctcaagaggtaataa

SEQ ID NO: 643331 - DNA, 19 bp, Mus musculus
  siRNA target sequence for Slc2a2 (NM_031197.1,161-179).
cacctcaagaggtaataat

SEQ ID NO: 643332 - DNA, 19 bp, Mus musculus
  siRNA target sequence for Slc2a2 (NM_031197.1,163-181).
cctcaagaggtaataatat

SEQ ID NO: 643333 - DNA, 19 bp, Mus musculus
  siRNA target sequence for Slc2a2 (NM_031197.1,182-200).
cccattatcgacatgtttt

SEQ ID NO: 643334 - DNA, 19 bp, Mus musculus
  siRNA target sequence for Slc2a2 (NM_031197.1,222-240).
gaaagctgccattaactat

SEQ ID NO: 643335 - DNA, 19 bp, Mus musculus
  siRNA target sequence for Slc2a2 (NM_031197.1,322-340).
ggatctgctcacatagtca

SEQ ID NO: 643336 - DNA, 19 bp, Mus musculus
  siRNA target sequence for Slc2a2 (NM_031197.1,382-400).
ggaatggtcgcctcattct

SEQ ID NO: 643337 - DNA, 19 bp, Mus musculus
  siRNA target sequence for Slc2a2 (NM_031197.1,383-401).
gaatggtcgcctcattctt

SEQ ID NO: 643338 - DNA, 19 bp, Mus musculus
  siRNA target sequence for Slc2a2 (NM_031197.1,408-426).
gtggctcggggacaaactt

SEQ ID NO: 643339 - DNA, 19 bp, Mus musculus
  siRNA target sequence for Slc2a2 (NM_031197.1,428-446).
gaaggatcaaagcaatgtt

SEQ ID NO: 643340 - DNA, 19 bp, Mus musculus
  siRNA target sequence for Slc2a2 (NM_031197.1,483-501).
gatgggatgttccaaattt

SEQ ID NO: 643341 - DNA, 19 bp, Mus musculus
  siRNA target sequence for Slc2a2 (NM_031197.1,486-504).
gggatgttccaaatttgga

SEQ ID NO: 643342 - DNA, 19 bp, Mus musculus
  siRNA target sequence for Slc2a2 (NM_031197.1,506-524).
cggcacacgccctcatcat

SEQ ID NO: 643343 - DNA, 19 bp, Mus musculus
  siRNA target sequence for Slc2a2 (NM_031197.1,507-525).
ggcacacgccctcatcatt

SEQ ID NO: 643344 - DNA, 19 bp, Mus musculus
  siRNA target sequence for Slc2a2 (NM_031197.1,549-567).
gtattgtgggctaatttca

SEQ ID NO: 643345 - DNA, 19 bp, Mus musculus
  siRNA target sequence for Slc2a2 (NM_031197.1,568-586).
ggactggttccaatgtaca

SEQ ID NO: 643346 - DNA, 19 bp, Mus musculus
  siRNA target sequence for Slc2a2 (NM_031197.1,651-669).
cacaggcattcttattagt

SEQ ID NO: 643347 - DNA, 19 bp, Mus musculus
  siRNA target sequence for Slc2a2 (NM_031197.1,653-671).
caggcattcttattagtca

SEQ ID NO: 643348 - DNA, 19 bp, Mus musculus
  siRNA target sequence for Slc2a2 (NM_031197.1,657-675).
cattcttattagtcagatt

SEQ ID NO: 643349 - DNA, 19 bp, Mus musculus
  siRNA target sequence for Slc2a2 (NM_031197.1,694-712).
ctgggcaatcaggatcatt

SEQ ID NO: 643350 - DNA, 19 bp, Mus musculus
  siRNA target sequence for Slc2a2 (NM_031197.1,786-804).
ccccagatacctttatata

SEQ ID NO: 643351 - DNA, 19 bp, Mus musculus
  siRNA target sequence for Slc2a2 (NM_031197.1,787-805).
cccagatacctttatataa

SEQ ID NO: 643352 - DNA, 19 bp, Mus musculus
  siRNA target sequence for Slc2a2 (NM_031197.1,788-806).
ccagatacctttatataaa

SEQ ID NO: 643353 - DNA, 19 bp, Mus musculus
  siRNA target sequence for Slc2a2 (NM_031197.1,820-838).
gtcagggcaaagaaaagct

SEQ ID NO: 643354 - DNA, 19 bp, Mus musculus
  siRNA target sequence for Slc2a2 (NM_031197.1,1021-1039).
gggatattttactattcaa

SEQ ID NO: 643355 - DNA, 19 bp, Mus musculus
  siRNA target sequence for Slc2a2 (NM_031197.1,1091-1109).
gtgttggggccatcaacat

SEQ ID NO: 643356 - DNA, 19 bp, Mus musculus
  siRNA target sequence for Slc2a2 (NM_031197.1,1093-1111).
gttggggccatcaacatga

SEQ ID NO: 643357 - DNA, 19 bp, Mus musculus
  siRNA target sequence for Slc2a2 (NM_031197.1,1096-1114).
ggggccatcaacatgatct

SEQ ID NO: 643358 - DNA, 19 bp, Mus musculus
  siRNA target sequence for Slc2a2 (NM_031197.1,1097-1115).
gggccatcaacatgatctt

SEQ ID NO: 643359 - DNA, 19 bp, Mus musculus
  siRNA target sequence for Slc2a2 (NM_031197.1,1164-1182).
gttcctaaccgggatgatt

SEQ ID NO: 643360 - DNA, 19 bp, Mus musculus
  siRNA target sequence for Slc2a2 (NM_031197.1,1173-1191).
cgggatgattggcatgttt

SEQ ID NO: 643361 - DNA, 19 bp, Mus musculus
  siRNA target sequence for Slc2a2 (NM_031197.1,1174-1192).
gggatgattggcatgtttt

SEQ ID NO: 643362 - DNA, 19 bp, Mus musculus
  siRNA target sequence for Slc2a2 (NM_031197.1,1175-1193).
ggatgattggcatgttttt

SEQ ID NO: 643363 - DNA, 19 bp, Mus musculus
  siRNA target sequence for Slc2a2 (NM_031197.1,1219-1237).
cttgtgctgctggataaat

SEQ ID NO: 643364 - DNA, 19 bp, Mus musculus
  siRNA target sequence for Slc2a2 (NM_031197.1,1319-1337).
ggttcatggttgctgaatt

SEQ ID NO: 643365 - DNA, 19 bp, Mus musculus
  siRNA target sequence for Slc2a2 (NM_031197.1,1320-1338).
gttcatggttgctgaattt

SEQ ID NO: 643366 - DNA, 19 bp, Mus musculus
  siRNA target sequence for Slc2a2 (NM_031197.1,1585-1603).
cgcaaagctgctgtacaaa

SEQ ID NO: 643367 - DNA, 19 bp, Mus musculus
  siRNA target sequence for Slc2a3 (NM_011401.2,228-246).
gcacctgagacaatcctaa

SEQ ID NO: 643368 - DNA, 19 bp, Mus musculus
  siRNA target sequence for Slc2a3 (NM_011401.2,229-247).
cacctgagacaatcctaaa

SEQ ID NO: 643369 - DNA, 19 bp, Mus musculus
  siRNA target sequence for Slc2a3 (NM_011401.2,249-267).
gactttcttaactacactt

SEQ ID NO: 643370 - DNA, 19 bp, Mus musculus
  siRNA target sequence for Slc2a3 (NM_011401.2,313-331).
ccctctggtccttatgtgt

SEQ ID NO: 643371 - DNA, 19 bp, Mus musculus
  siRNA target sequence for Slc2a3 (NM_011401.2,356-374).
gattggctctttttctgtt

SEQ ID NO: 643372 - DNA, 19 bp, Mus musculus
  siRNA target sequence for Slc2a3 (NM_011401.2,398-416).
cagacgcaactctatgctt

SEQ ID NO: 643373 - DNA, 19 bp, Mus musculus
  siRNA target sequence for Slc2a3 (NM_011401.2,403-421).
gcaactctatgcttctagt

SEQ ID NO: 643374 - DNA, 19 bp, Mus musculus
  siRNA target sequence for Slc2a3 (NM_011401.2,409-427).
ctatgcttctagtcaactt

SEQ ID NO: 643375 - DNA, 19 bp, Mus musculus
  siRNA target sequence for Slc2a3 (NM_011401.2,502-520).
gcttactcattggcatttt

SEQ ID NO: 643376 - DNA, 19 bp, Mus musculus
  siRNA target sequence for Slc2a3 (NM_011401.2,537-555).
ggctttgtgcctatgtaca

SEQ ID NO: 643377 - DNA, 19 bp, Mus musculus
  siRNA target sequence for Slc2a3 (NM_011401.2,585-603).
ggtgcatttggcacactaa

SEQ ID NO: 643378 - DNA, 19 bp, Mus musculus
  siRNA target sequence for Slc2a3 (NM_011401.2,745-763).
gccctgagagtccaagatt

SEQ ID NO: 643379 - DNA, 19 bp, Mus musculus
  siRNA target sequence for Slc2a3 (NM_011401.2,747-765).
cctgagagtccaagattct

SEQ ID NO: 643380 - DNA, 19 bp, Mus musculus
  siRNA target sequence for Slc2a3 (NM_011401.2,756-774).
ccaagattcttgctcatta

SEQ ID NO: 643381 - DNA, 19 bp, Mus musculus
  siRNA target sequence for Slc2a3 (NM_011401.2,757-775).
caagattcttgctcattaa

SEQ ID NO: 643382 - DNA, 19 bp, Mus musculus
  siRNA target sequence for Slc2a3 (NM_011401.2,760-778).
gattcttgctcattaacaa

SEQ ID NO: 643383 - DNA, 19 bp, Mus musculus
  siRNA target sequence for Slc2a3 (NM_011401.2,1062-1080).
gcaggcgtggtcaatacta

SEQ ID NO: 643384 - DNA, 19 bp, Mus musculus
  siRNA target sequence for Slc2a3 (NM_011401.2,1063-1081).
caggcgtggtcaatactat

SEQ ID NO: 643385 - DNA, 19 bp, Mus musculus
  siRNA target sequence for Slc2a3 (NM_011401.2,1065-1083).
ggcgtggtcaatactatct

SEQ ID NO: 643386 - DNA, 19 bp, Mus musculus
  siRNA target sequence for Slc2a3 (NM_011401.2,1066-1084).
gcgtggtcaatactatctt

SEQ ID NO: 643387 - DNA, 19 bp, Mus musculus
  siRNA target sequence for Slc2a3 (NM_011401.2,1178-1196).
gacgatttcgctgttacta

SEQ ID NO: 643388 - DNA, 19 bp, Mus musculus
  siRNA target sequence for Slc2a3 (NM_011401.2,1180-1198).
cgatttcgctgttactaaa

SEQ ID NO: 643389 - DNA, 19 bp, Mus musculus
  siRNA target sequence for Slc2a3 (NM_011401.2,1213-1231).
ccatgagctttgtctgtat

SEQ ID NO: 643390 - DNA, 19 bp, Mus musculus
  siRNA target sequence for Slc2a3 (NM_011401.2,1214-1232).
catgagctttgtctgtatt

SEQ ID NO: 643391 - DNA, 19 bp, Mus musculus
  siRNA target sequence for Slc2a3 (NM_011401.2,1413-1431).
ggagcctacgtttttatca

SEQ ID NO: 643392 - DNA, 19 bp, Mus musculus
  siRNA target sequence for Slc2a3 (NM_011401.2,1414-1432).
gagcctacgtttttatcat

SEQ ID NO: 643393 - DNA, 19 bp, Mus musculus
  siRNA target sequence for Slc2a3 (NM_011401.2,1555-1573).
ctgccggtgtggagttgaa

SEQ ID NO: 643394 - DNA, 19 bp, Mus musculus
  siRNA target sequence for Slc2a4 (NM_009204.1,229-247).
ctggtcctagctgtattct

SEQ ID NO: 643395 - DNA, 19 bp, Mus musculus
  siRNA target sequence for Slc2a4 (NM_009204.1,255-273).
gcttggctcccttcagttt

SEQ ID NO: 643396 - DNA, 19 bp, Mus musculus
  siRNA target sequence for Slc2a4 (NM_009204.1,263-281).
cccttcagtttggctataa

SEQ ID NO: 643397 - DNA, 19 bp, Mus musculus
  siRNA target sequence for Slc2a4 (NM_009204.1,489-507).
ggctatgctggccaacaat

SEQ ID NO: 643398 - DNA, 19 bp, Mus musculus
  siRNA target sequence for Slc2a4 (NM_009204.1,558-576).
ctcctatgagatactcatt

SEQ ID NO: 643399 - DNA, 19 bp, Mus musculus
  siRNA target sequence for Slc2a4 (NM_009204.1,598-616).
gcctactcagggctaacat

SEQ ID NO: 643400 - DNA, 19 bp, Mus musculus
  siRNA target sequence for Slc2a4 (NM_009204.1,600-618).
ctactcagggctaacatca

SEQ ID NO: 643401 - DNA, 19 bp, Mus musculus
  siRNA target sequence for Slc2a4 (NM_009204.1,620-638).
ggctggtgcccatgtatgt

SEQ ID NO: 643402 - DNA, 19 bp, Mus musculus
  siRNA target sequence for Slc2a4 (NM_009204.1,838-856).
cccagatacctctacatca

SEQ ID NO: 643403 - DNA, 19 bp, Mus musculus
  siRNA target sequence for Slc2a4 (NM_009204.1,874-892).
cctgcccgaaagagtctaa

SEQ ID NO: 643404 - DNA, 19 bp, Mus musculus
  siRNA target sequence for Slc2a4 (NM_009204.1,875-893).
ctgcccgaaagagtctaaa

SEQ ID NO: 643405 - DNA, 19 bp, Mus musculus
  siRNA target sequence for Slc2a4 (NM_009204.1,1173-1191).
ggtctcggtgctcttagta

SEQ ID NO: 643406 - DNA, 19 bp, Mus musculus
  siRNA target sequence for Slc2a4 (NM_009204.1,1176-1194).
ctcggtgctcttagtagaa

SEQ ID NO: 643407 - DNA, 19 bp, Mus musculus
  siRNA target sequence for Slc2a4 (NM_009204.1,1205-1223).
gacggacactccatctgtt

SEQ ID NO: 643408 - DNA, 19 bp, Mus musculus
  siRNA target sequence for Slc2a5 (NM_019741.2,786-804).
catgcagcagttttacaat

SEQ ID NO: 643409 - DNA, 19 bp, Mus musculus
  siRNA target sequence for Slc2a5 (NM_019741.2,807-825).
cacctactacgacagaaat

SEQ ID NO: 643410 - DNA, 19 bp, Mus musculus
  siRNA target sequence for Slc2a5 (NM_019741.2,916-934).
gttggaaccttggtgaata

SEQ ID NO: 643411 - DNA, 19 bp, Mus musculus
  siRNA target sequence for Slc2a5 (NM_019741.2,955-973).
ctgctgttcaacaacatat

SEQ ID NO: 643412 - DNA, 19 bp, Mus musculus
  siRNA target sequence for Slc2a5 (NM_019741.2,1007-1025).
gccaaattgcccaatcgtt

SEQ ID NO: 643413 - DNA, 19 bp, Mus musculus
  siRNA target sequence for Slc2a5 (NM_019741.2,1008-1026).
ccaaattgcccaatcgttt

SEQ ID NO: 643414 - DNA, 19 bp, Mus musculus
  siRNA target sequence for Slc2a5 (NM_019741.2,1016-1034).
cccaatcgtttgagctaat

SEQ ID NO: 643415 - DNA, 19 bp, Mus musculus
  siRNA target sequence for Slc2a5 (NM_019741.2,1022-1040).
cgtttgagctaataattat

SEQ ID NO: 643416 - DNA, 19 bp, Mus musculus
  siRNA target sequence for Slc2a5 (NM_019741.2,1027-1045).
gagctaataattatttcca

SEQ ID NO: 643417 - DNA, 19 bp, Mus musculus
  siRNA target sequence for Slc2a5 (NM_019741.2,1083-1101).
cgtggtccctatgtactta

SEQ ID NO: 643418 - DNA, 19 bp, Mus musculus
  siRNA target sequence for Slc2a5 (NM_019741.2,1144-1162).
gtcccgcaactcttcatca

SEQ ID NO: 643419 - DNA, 19 bp, Mus musculus
  siRNA target sequence for Slc2a5 (NM_019741.2,1199-1217).
ggagtctcttggcaaatga

SEQ ID NO: 643420 - DNA, 19 bp, Mus musculus
  siRNA target sequence for Slc2a5 (NM_019741.2,1444-1462).
gtgtggaagttgttcacta

SEQ ID NO: 643421 - DNA, 19 bp, Mus musculus
  siRNA target sequence for Slc2a5 (NM_019741.2,1469-1487).
ctctccgttggcaactcat

SEQ ID NO: 643422 - DNA, 19 bp, Mus musculus
  siRNA target sequence for Slc2a5 (NM_019741.2,1479-1497).
gcaactcatctccatgatt

SEQ ID NO: 643423 - DNA, 19 bp, Mus musculus
  siRNA target sequence for Slc2a5 (NM_019741.2,1525-1543).
ggagtgaacgcgatctact

SEQ ID NO: 643424 - DNA, 19 bp, Mus musculus
  siRNA target sequence for Slc2a5 (NM_019741.2,1526-1544).
gagtgaacgcgatctacta

SEQ ID NO: 643425 - DNA, 19 bp, Mus musculus
  siRNA target sequence for Slc2a5 (NM_019741.2,1528-1546).
gtgaacgcgatctactact

SEQ ID NO: 643426 - DNA, 19 bp, Mus musculus
  siRNA target sequence for Slc2a5 (NM_019741.2,1564-1582).
ctcagcgcaggcgtgaaaa

SEQ ID NO: 643427 - DNA, 19 bp, Mus musculus
  siRNA target sequence for Slc2a5 (NM_019741.2,1583-1601).
gcgacgacgtccagtatgt

SEQ ID NO: 643428 - DNA, 19 bp, Mus musculus
  siRNA target sequence for Slc2a5 (NM_019741.2,1585-1603).
gacgacgtccagtatgtga

SEQ ID NO: 643429 - DNA, 19 bp, Mus musculus
  siRNA target sequence for Slc2a5 (NM_019741.2,1635-1653).
gaccatcctcacgatcttt

SEQ ID NO: 643430 - DNA, 19 bp, Mus musculus
  siRNA target sequence for Slc2a5 (NM_019741.2,1637-1655).
ccatcctcacgatctttgt

SEQ ID NO: 643431 - DNA, 19 bp, Mus musculus
  siRNA target sequence for Slc2a5 (NM_019741.2,1768-1786).
ccctatatcagcattgtct

SEQ ID NO: 643432 - DNA, 19 bp, Mus musculus
  siRNA target sequence for Slc2a5 (NM_019741.2,1778-1796).
gcattgtctgtgtcattgt

SEQ ID NO: 643433 - DNA, 19 bp, Mus musculus
  siRNA target sequence for Slc2a5 (NM_019741.2,1962-1980).
cggtccctacagcttcatt

SEQ ID NO: 643434 - DNA, 19 bp, Mus musculus
  siRNA target sequence for Slc2a5 (NM_019741.2,1963-1981).
ggtccctacagcttcatta

SEQ ID NO: 643435 - DNA, 19 bp, Mus musculus
  siRNA target sequence for Slc2a5 (NM_019741.2,2044-2062).
ggcaggacattcattgaga

SEQ ID NO: 643436 - DNA, 19 bp, Mus musculus
  siRNA target sequence for Slc2a5 (NM_019741.2,2045-2063).
gcaggacattcattgagat

SEQ ID NO: 643437 - DNA, 19 bp, Mus musculus
  siRNA target sequence for Slc2a5 (NM_019741.2,2088-2106).
caaggtgtcagacgtatat

SEQ ID NO: 643438 - DNA, 19 bp, Mus musculus
  siRNA target sequence for Slc2a6 (NM_172659.1,108-126).
ccgagggactcgactatga

SEQ ID NO: 643439 - DNA, 19 bp, Mus musculus
  siRNA target sequence for Slc2a6 (NM_172659.1,109-127).
cgagggactcgactatgat

SEQ ID NO: 643440 - DNA, 19 bp, Mus musculus
  siRNA target sequence for Slc2a6 (NM_172659.1,110-128).
gagggactcgactatgata

SEQ ID NO: 643441 - DNA, 19 bp, Mus musculus
  siRNA target sequence for Slc2a6 (NM_172659.1,114-132).
gactcgactatgatacctt

SEQ ID NO: 643442 - DNA, 19 bp, Mus musculus
  siRNA target sequence for Slc2a6 (NM_172659.1,299-317).
gcactacacctggacaaaa

SEQ ID NO: 643443 - DNA, 19 bp, Mus musculus
  siRNA target sequence for Slc2a6 (NM_172659.1,369-387).
gcctcagtgctatgttact

SEQ ID NO: 643444 - DNA, 19 bp, Mus musculus
  siRNA target sequence for Slc2a6 (NM_172659.1,404-422).
cggaagctcagcatcatgt

SEQ ID NO: 643445 - DNA, 19 bp, Mus musculus
  siRNA target sequence for Slc2a6 (NM_172659.1,441-459).
ccattggctatgcaatcat

SEQ ID NO: 643446 - DNA, 19 bp, Mus musculus
  siRNA target sequence for Slc2a6 (NM_172659.1,559-577).
gattgcaccccctgatgtt

SEQ ID NO: 643447 - DNA, 19 bp, Mus musculus
  siRNA target sequence for Slc2a6 (NM_172659.1,605-623).
ctcatggccgtgtttggat

SEQ ID NO: 643448 - DNA, 19 bp, Mus musculus
  siRNA target sequence for Slc2a6 (NM_172659.1,895-913).
gtaccggcctgttctcatt

SEQ ID NO: 643449 - DNA, 19 bp, Mus musculus
  siRNA target sequence for Slc2a6 (NM_172659.1,1015-1033).
gcaggatgcagcgatagtt

SEQ ID NO: 643450 - DNA, 19 bp, Mus musculus
  siRNA target sequence for Slc2a6 (NM_172659.1,1092-1110).
gaaaagttctgctctatgt

SEQ ID NO: 643451 - DNA, 19 bp, Mus musculus
  siRNA target sequence for Slc2a6 (NM_172659.1,1111-1129).
gtcagcatccgtcatgttt

SEQ ID NO: 643452 - DNA, 19 bp, Mus musculus
  siRNA target sequence for Slc2a6 (NM_172659.1,1215-1233).
gggacacagccttcaacta

SEQ ID NO: 643453 - DNA, 19 bp, Mus musculus
  siRNA target sequence for Slc2a6 (NM_172659.1,1216-1234).
ggacacagccttcaactat

SEQ ID NO: 643454 - DNA, 19 bp, Mus musculus
  siRNA target sequence for Slc2a6 (NM_172659.1,1219-1237).
cacagccttcaactatctt

SEQ ID NO: 643455 - DNA, 19 bp, Mus musculus
  siRNA target sequence for Slc2a6 (NM_172659.1,1256-1274).
gccaccatgctcttcatta

SEQ ID NO: 643456 - DNA, 19 bp, Mus musculus
  siRNA target sequence for Slc2a6 (NM_172659.1,1386-1404).
cagccttcgtcctcactaa

SEQ ID NO: 643457 - DNA, 19 bp, Mus musculus
  siRNA target sequence for Slc2a9 (NM_145559.1,252-270).
gaaagccagcggaaatggt

SEQ ID NO: 643458 - DNA, 19 bp, Mus musculus
  siRNA target sequence for Slc2a9 (NM_145559.1,361-379).
cgtatatcaaggcctttta

SEQ ID NO: 643459 - DNA, 19 bp, Mus musculus
  siRNA target sequence for Slc2a9 (NM_145559.1,497-515).
gaagatgattggaaagttt

SEQ ID NO: 643460 - DNA, 19 bp, Mus musculus
  siRNA target sequence for Slc2a9 (NM_145559.1,536-554).
gctggtcaacaatggattt

SEQ ID NO: 643461 - DNA, 19 bp, Mus musculus
  siRNA target sequence for Slc2a9 (NM_145559.1,592-610).
gggcaggaacctttgagat

SEQ ID NO: 643462 - DNA, 19 bp, Mus musculus
  siRNA target sequence for Slc2a9 (NM_145559.1,659-677).
cagcgcgctccccatgtat

SEQ ID NO: 643463 - DNA, 19 bp, Mus musculus
  siRNA target sequence for Slc2a9 (NM_145559.1,832-850).
ggatccctcaggacaagat

SEQ ID NO: 643464 - DNA, 19 bp, Mus musculus
  siRNA target sequence for Slc2a9 (NM_145559.1,863-881).
cctgagcacgggaggaatt

SEQ ID NO: 643465 - DNA, 19 bp, Mus musculus
  siRNA target sequence for Slc2a9 (NM_145559.1,866-884).
gagcacgggaggaattgaa

SEQ ID NO: 643466 - DNA, 19 bp, Mus musculus
  siRNA target sequence for Slc2a9 (NM_145559.1,869-887).
cacgggaggaattgaaaca

SEQ ID NO: 643467 - DNA, 19 bp, Mus musculus
  siRNA target sequence for Slc2a9 (NM_145559.1,871-889).
cgggaggaattgaaacact

SEQ ID NO: 643468 - DNA, 19 bp, Mus musculus
  siRNA target sequence for Slc2a9 (NM_145559.1,912-930).
gtcattgagcgcttaggaa

SEQ ID NO: 643469 - DNA, 19 bp, Mus musculus
  siRNA target sequence for Slc2a9 (NM_145559.1,1081-1099).
caggtgggatcccattcat

SEQ ID NO: 643470 - DNA, 19 bp, Mus musculus
  siRNA target sequence for Slc2a9 (NM_145559.1,1131-1149).
cgaccggcagccttcatga

SEQ ID NO: 643471 - DNA, 19 bp, Mus musculus
  siRNA target sequence for Slc2a9 (NM_145559.1,1132-1150).
gaccggcagccttcatgat

SEQ ID NO: 643472 - DNA, 19 bp, Mus musculus
  siRNA target sequence for Slc2a9 (NM_145559.1,1236-1254).
ctcgtcttcgccacaatat

SEQ ID NO: 643473 - DNA, 19 bp, Mus musculus
  siRNA target sequence for Slc2a9 (NM_145559.1,1238-1256).
cgtcttcgccacaatatgt

SEQ ID NO: 643474 - DNA, 19 bp, Mus musculus
  siRNA target sequence for Slc2a9 (NM_145559.1,1239-1257).
gtcttcgccacaatatgta

SEQ ID NO: 643475 - DNA, 19 bp, Mus musculus
  siRNA target sequence for Slc2a9 (NM_145559.1,1260-1278).
gcaggtgctacctacttct

SEQ ID NO: 643476 - DNA, 19 bp, Mus musculus
  siRNA target sequence for Slc2a9 (NM_145559.1,1263-1281).
ggtgctacctacttctatt

SEQ ID NO: 643477 - DNA, 19 bp, Mus musculus
  siRNA target sequence for Slc2a9 (NM_145559.1,1264-1282).
gtgctacctacttctattt

SEQ ID NO: 643478 - DNA, 19 bp, Mus musculus
  siRNA target sequence for Slc35a1 (NM_011895.2,99-117).
ctccggcgagagaaaatgt

SEQ ID NO: 643479 - DNA, 19 bp, Mus musculus
  siRNA target sequence for Slc35a1 (NM_011895.2,101-119).
ccggcgagagaaaatgtca

SEQ ID NO: 643480 - DNA, 19 bp, Mus musculus
  siRNA target sequence for Slc35a1 (NM_011895.2,168-186).
ccgcttacaccgtagcttt

SEQ ID NO: 643481 - DNA, 19 bp, Mus musculus
  siRNA target sequence for Slc35a1 (NM_011895.2,169-187).
cgcttacaccgtagcttta

SEQ ID NO: 643482 - DNA, 19 bp, Mus musculus
  siRNA target sequence for Slc35a1 (NM_011895.2,178-196).
cgtagctttaagatacaca

SEQ ID NO: 643483 - DNA, 19 bp, Mus musculus
  siRNA target sequence for Slc35a1 (NM_011895.2,198-216).
ggacaacagctgaagaact

SEQ ID NO: 643484 - DNA, 19 bp, Mus musculus
  siRNA target sequence for Slc35a1 (NM_011895.2,229-247).
cactgccgtgtgtatcaca

SEQ ID NO: 643485 - DNA, 19 bp, Mus musculus
  siRNA target sequence for Slc35a1 (NM_011895.2,238-256).
gtgtatcacagaagtgata

SEQ ID NO: 643486 - DNA, 19 bp, Mus musculus
  siRNA target sequence for Slc35a1 (NM_011895.2,294-312).
ctggcagtttgggtagatt

SEQ ID NO: 643487 - DNA, 19 bp, Mus musculus
  siRNA target sequence for Slc35a1 (NM_011895.2,296-314).
ggcagtttgggtagattta

SEQ ID NO: 643488 - DNA, 19 bp, Mus musculus
  siRNA target sequence for Slc35a1 (NM_011895.2,364-382).
gttgagtgtgccatcacta

SEQ ID NO: 643489 - DNA, 19 bp, Mus musculus
  siRNA target sequence for Slc35a1 (NM_011895.2,369-387).
gtgtgccatcactagtgta

SEQ ID NO: 643490 - DNA, 19 bp, Mus musculus
  siRNA target sequence for Slc35a1 (NM_011895.2,442-460).
gtaccaggtgacctatcaa

SEQ ID NO: 643491 - DNA, 19 bp, Mus musculus
  siRNA target sequence for Slc35a1 (NM_011895.2,466-484).
gatcccctgcactgcttta

SEQ ID NO: 643492 - DNA, 19 bp, Mus musculus
  siRNA target sequence for Slc35a1 (NM_011895.2,472-490).
ctgcactgctttatgtact

SEQ ID NO: 643493 - DNA, 19 bp, Mus musculus
  siRNA target sequence for Slc35a1 (NM_011895.2,491-509).
gttttaatgttaaatcgaa

SEQ ID NO: 643494 - DNA, 19 bp, Mus musculus
  siRNA target sequence for Slc35a1 (NM_011895.2,599-617).
gtggtagcgcagaatccat

SEQ ID NO: 643495 - DNA, 19 bp, Mus musculus
  siRNA target sequence for Slc35a1 (NM_011895.2,619-637).
gttaggctttggtgctata

SEQ ID NO: 643496 - DNA, 19 bp, Mus musculus
  siRNA target sequence for Slc35a1 (NM_011895.2,625-643).
ctttggtgctatagctatt

SEQ ID NO: 643497 - DNA, 19 bp, Mus musculus
  siRNA target sequence for Slc35a1 (NM_011895.2,811-829).
ctatggctacacgtattat

SEQ ID NO: 643498 - DNA, 19 bp, Mus musculus
  siRNA target sequence for Slc35a1 (NM_011895.2,815-833).
ggctacacgtattatgtct

SEQ ID NO: 643499 - DNA, 19 bp, Mus musculus
  siRNA target sequence for Slc35a1 (NM_011895.2,873-891).
cgtcagtggtggtgaagta

SEQ ID NO: 643500 - DNA, 19 bp, Mus musculus
  siRNA target sequence for Slc35a1 (NM_011895.2,874-892).
gtcagtggtggtgaagtat

SEQ ID NO: 643501 - DNA, 19 bp, Mus musculus
  siRNA target sequence for Slc35a1 (NM_011895.2,959-977).
ctactgtttggattacaga

SEQ ID NO: 643502 - DNA, 19 bp, Mus musculus
  siRNA target sequence for Slc35a1 (NM_011895.2,964-982).
gtttggattacagataaca

SEQ ID NO: 643503 - DNA, 19 bp, Mus musculus
  siRNA target sequence for Slc35a1 (NM_011895.2,1014-1032).
gtgtttccatatatctcta

SEQ ID NO: 643504 - DNA, 19 bp, Mus musculus
  siRNA target sequence for Slc35a1 (NM_011895.2,1034-1052).
gggttacccagacaagata

SEQ ID NO: 643505 - DNA, 19 bp, Mus musculus
  siRNA target sequence for Slc35a1 (NM_011895.2,1036-1054).
gttacccagacaagatact

SEQ ID NO: 643506 - DNA, 19 bp, Mus musculus
  siRNA target sequence for Slc35a1 (NM_011895.2,1040-1058).
cccagacaagatactacat

SEQ ID NO: 643507 - DNA, 19 bp, Mus musculus
  siRNA target sequence for Slc35a1 (NM_011895.2,1077-1095).
cttcaaaagagagaatcat

SEQ ID NO: 643508 - DNA, 19 bp, Mus musculus
  siRNA target sequence for Slc35a2 (NM_078484.1,199-217).
cgcctcaagtatatatcct

SEQ ID NO: 643509 - DNA, 19 bp, Mus musculus
  siRNA target sequence for Slc35a2 (NM_078484.1,201-219).
cctcaagtatatatcctta

SEQ ID NO: 643510 - DNA, 19 bp, Mus musculus
  siRNA target sequence for Slc35a2 (NM_078484.1,352-370).
ctgctcttcgcacaaaaga

SEQ ID NO: 643511 - DNA, 19 bp, Mus musculus
  siRNA target sequence for Slc35a2 (NM_078484.1,362-380).
cacaaaagaggggtaatgt

SEQ ID NO: 643512 - DNA, 19 bp, Mus musculus
  siRNA target sequence for Slc35a2 (NM_078484.1,408-426).
ggctgtcctggtccaatat

SEQ ID NO: 643513 - DNA, 19 bp, Mus musculus
  siRNA target sequence for Slc35a2 (NM_078484.1,448-466).
gtgccctctctcatctata

SEQ ID NO: 643514 - DNA, 19 bp, Mus musculus
  siRNA target sequence for Slc35a2 (NM_078484.1,674-692).
cacggccactggatcagaa

SEQ ID NO: 643515 - DNA, 19 bp, Mus musculus
  siRNA target sequence for Slc35a2 (NM_078484.1,741-759).
cttcgctggggtctacttt

SEQ ID NO: 643516 - DNA, 19 bp, Mus musculus
  siRNA target sequence for Slc35a2 (NM_078484.1,745-763).
gctggggtctactttgaga

SEQ ID NO: 643517 - DNA, 19 bp, Mus musculus
  siRNA target sequence for Slc35a2 (NM_078484.1,785-803).
gttctgtgtggcttcgtaa

SEQ ID NO: 643518 - DNA, 19 bp, Mus musculus
  siRNA target sequence for Slc35a2 (NM_078484.1,908-926).
ctgtctggggtgtagtact

SEQ ID NO: 643519 - DNA, 19 bp, Mus musculus
  siRNA target sequence for Slc35a2 (NM_078484.1,914-932).
ggggtgtagtactaaacca

SEQ ID NO: 643520 - DNA, 19 bp, Mus musculus
  siRNA target sequence for Slc35a2 (NM_078484.1,915-933).
gggtgtagtactaaaccaa

SEQ ID NO: 643521 - DNA, 19 bp, Mus musculus
  siRNA target sequence for Slc35a2 (NM_078484.1,954-972).
ggctgttgttgtcaagtat

SEQ ID NO: 643522 - DNA, 19 bp, Mus musculus
  siRNA target sequence for Slc35a2 (NM_078484.1,1053-1071).
ccacctggacccattattt

SEQ ID NO: 643523 - DNA, 19 bp, Mus musculus
  siRNA target sequence for E030002L01Rik (NM_177243.2,164-182).
ccctcttcgatgatgagtt

SEQ ID NO: 643524 - DNA, 19 bp, Mus musculus
  siRNA target sequence for E030002L01Rik (NM_177243.2,165-183).
cctcttcgatgatgagttt

SEQ ID NO: 643525 - DNA, 19 bp, Mus musculus
  siRNA target sequence for E030002L01Rik (NM_177243.2,214-232).
gagaagcttcgcaacactt

SEQ ID NO: 643526 - DNA, 19 bp, Mus musculus
  siRNA target sequence for E030002L01Rik (NM_177243.2,293-311).
ggctccctaaatacaagat

SEQ ID NO: 643527 - DNA, 19 bp, Mus musculus
  siRNA target sequence for E030002L01Rik (NM_177243.2,439-457).
cccctcctgacctatttct

SEQ ID NO: 643528 - DNA, 19 bp, Mus musculus
  siRNA target sequence for E030002L01Rik (NM_177243.2,477-495).
gatggtgccaggtaccttt

SEQ ID NO: 643529 - DNA, 19 bp, Mus musculus
  siRNA target sequence for E030002L01Rik (NM_177243.2,487-505).
ggtacctttgccgttatca

SEQ ID NO: 643530 - DNA, 19 bp, Mus musculus
  siRNA target sequence for E030002L01Rik (NM_177243.2,535-553).
ctggccccagagtcgaaat

SEQ ID NO: 643531 - DNA, 19 bp, Mus musculus
  siRNA target sequence for E030002L01Rik (NM_177243.2,764-782).
ctgtgctcaagtacatctt

SEQ ID NO: 643532 - DNA, 19 bp, Mus musculus
  siRNA target sequence for E030002L01Rik (NM_177243.2,789-807).
gaccattccctcctataca

SEQ ID NO: 643533 - DNA, 19 bp, Mus musculus
  siRNA target sequence for E030002L01Rik (NM_177243.2,932-950).
ctcggtacatgcacaagat

SEQ ID NO: 643534 - DNA, 19 bp, Mus musculus
  siRNA target sequence for E030002L01Rik (NM_177243.2,960-978).
catccctacagagatgatt

SEQ ID NO: 643535 - DNA, 19 bp, Mus musculus
  siRNA target sequence for E030002L01Rik (NM_177243.2,1075-1093).
ccggtggcaccgatggttt

SEQ ID NO: 643536 - DNA, 19 bp, Mus musculus
  siRNA target sequence for E030002L01Rik (NM_177243.2,1132-1150).
gcaattgtgggctatgtca

SEQ ID NO: 643537 - DNA, 19 bp, Mus musculus
  siRNA target sequence for E030002L01Rik (NM_177243.2,1181-1199).
gcaagcatggctatgatgt

SEQ ID NO: 643538 - DNA, 19 bp, Mus musculus
  siRNA target sequence for E030002L01Rik (NM_177243.2,1418-1436).
ccctgatcgctgtcaatct

SEQ ID NO: 643539 - DNA, 19 bp, Mus musculus
  siRNA target sequence for E030002L01Rik (NM_177243.2,1420-1438).
ctgatcgctgtcaatctca

SEQ ID NO: 643540 - DNA, 19 bp, Mus musculus
  siRNA target sequence for E030002L01Rik (NM_177243.2,1426-1444).
gctgtcaatctcaagaact

SEQ ID NO: 643541 - DNA, 19 bp, Mus musculus
  siRNA target sequence for E030002L01Rik (NM_177243.2,1596-1614).
ccagacccagtttcgaaat

SEQ ID NO: 643542 - DNA, 19 bp, Mus musculus
  siRNA target sequence for E030002L01Rik (NM_177243.2,1960-1978).
gcggctgaggctcacatat

SEQ ID NO: 643543 - DNA, 19 bp, Mus musculus
  siRNA target sequence for E030002L01Rik (NM_177243.2,1963-1981).
gctgaggctcacatatcct

SEQ ID NO: 643544 - DNA, 19 bp, Mus musculus
  siRNA target sequence for E030002L01Rik (NM_177243.2,1969-1987).
gctcacatatcctacatca

SEQ ID NO: 643545 - DNA, 19 bp, Mus musculus
  siRNA target sequence for E030002L01Rik (NM_177243.2,2125-2143).
gtcagctttgtggatttga

SEQ ID NO: 643546 - DNA, 19 bp, Mus musculus
  siRNA target sequence for E030002L01Rik (NM_177243.2,2167-2185).
ctaagctccacctatgaga

SEQ ID NO: 643547 - DNA, 19 bp, Mus musculus
  siRNA target sequence for E030002L01Rik (NM_177243.2,2222-2240).
cccaggtgtataatgacat

SEQ ID NO: 643548 - DNA, 19 bp, Mus musculus
  siRNA target sequence for E030002L01Rik (NM_177243.2,2316-2334).
ctttgcccaagcaaatgct

SEQ ID NO: 643549 - DNA, 19 bp, Mus musculus
  siRNA target sequence for E030002L01Rik (NM_177243.2,2363-2381).
gggctccaggggatactga

SEQ ID NO: 643550 - DNA, 19 bp, Mus musculus
  siRNA target sequence for E030002L01Rik (NM_177243.2,2414-2432).
ccagctattgggacttaga

SEQ ID NO: 643551 - DNA, 19 bp, Mus musculus
  siRNA target sequence for E030002L01Rik (NM_177243.2,2415-2433).
cagctattgggacttagaa

SEQ ID NO: 643552 - DNA, 19 bp, Mus musculus
  siRNA target sequence for F630021I08Rik (NM_178743.2,846-864).
ccccttgccgtgaagttca

SEQ ID NO: 643553 - DNA, 19 bp, Mus musculus
  siRNA target sequence for F630021I08Rik (NM_178743.2,955-973).
gatcccatccctttgttct

SEQ ID NO: 643554 - DNA, 19 bp, Mus musculus
  siRNA target sequence for F630021I08Rik (NM_178743.2,1024-1042).
cagtgaccagggacaataa

SEQ ID NO: 643555 - DNA, 19 bp, Mus musculus
  siRNA target sequence for F630021I08Rik (NM_178743.2,1138-1156).
ccttcgcgtctcagaataa

SEQ ID NO: 643556 - DNA, 19 bp, Mus musculus
  siRNA target sequence for F630021I08Rik (NM_178743.2,1151-1169).
gaataactaccgcattgat

SEQ ID NO: 643557 - DNA, 19 bp, Mus musculus
  siRNA target sequence for F630021I08Rik (NM_178743.2,1405-1423).
ccccactctttgatgtcaa

SEQ ID NO: 643558 - DNA, 19 bp, Mus musculus
  siRNA target sequence for F630021I08Rik (NM_178743.2,1581-1599).
gtgtcagaaggacaaattt

SEQ ID NO: 643559 - DNA, 19 bp, Mus musculus
  siRNA target sequence for F630021I08Rik (NM_178743.2,1622-1640).
cctgtacttccctgcaatt

SEQ ID NO: 643560 - DNA, 19 bp, Mus musculus
  siRNA target sequence for F630021I08Rik (NM_178743.2,1704-1722).
ctggagtgcacgcatatca

SEQ ID NO: 643561 - DNA, 19 bp, Mus musculus
  siRNA target sequence for Pres (NM_030727.3,331-349).
cacgtcaaggacaaagtca

SEQ ID NO: 643562 - DNA, 19 bp, Mus musculus
  siRNA target sequence for Pres (NM_030727.3,384-402).
cacgtgtactcctaaaaaa

SEQ ID NO: 643563 - DNA, 19 bp, Mus musculus
  siRNA target sequence for Pres (NM_030727.3,386-404).
cgtgtactcctaaaaaaat

SEQ ID NO: 643564 - DNA, 19 bp, Mus musculus
  siRNA target sequence for Pres (NM_030727.3,443-461).
ggctgccagcatataaatt

SEQ ID NO: 643565 - DNA, 19 bp, Mus musculus
  siRNA target sequence for Pres (NM_030727.3,445-463).
ctgccagcatataaattca

SEQ ID NO: 643566 - DNA, 19 bp, Mus musculus
  siRNA target sequence for Pres (NM_030727.3,568-586).
ggcctgtactcatcgtttt

SEQ ID NO: 643567 - DNA, 19 bp, Mus musculus
  siRNA target sequence for Pres (NM_030727.3,569-587).
gcctgtactcatcgtttta

SEQ ID NO: 643568 - DNA, 19 bp, Mus musculus
  siRNA target sequence for Pres (NM_030727.3,581-599).
cgttttaccccgttatcat

SEQ ID NO: 643569 - DNA, 19 bp, Mus musculus
  siRNA target sequence for Pres (NM_030727.3,589-607).
cccgttatcatgtactgtt

SEQ ID NO: 643570 - DNA, 19 bp, Mus musculus
  siRNA target sequence for Pres (NM_030727.3,590-608).
ccgttatcatgtactgttt

SEQ ID NO: 643571 - DNA, 19 bp, Mus musculus
  siRNA target sequence for Pres (NM_030727.3,592-610).
gttatcatgtactgtttct

SEQ ID NO: 643572 - DNA, 19 bp, Mus musculus
  siRNA target sequence for Pres (NM_030727.3,618-636).
ctcaagacacatatctata

SEQ ID NO: 643573 - DNA, 19 bp, Mus musculus
  siRNA target sequence for Pres (NM_030727.3,647-665).
ctgttattagcttgatgat

SEQ ID NO: 643574 - DNA, 19 bp, Mus musculus
  siRNA target sequence for Pres (NM_030727.3,681-699).
ccggttagtaccagatgat

SEQ ID NO: 643575 - DNA, 19 bp, Mus musculus
  siRNA target sequence for Pres (NM_030727.3,682-700).
cggttagtaccagatgata

SEQ ID NO: 643576 - DNA, 19 bp, Mus musculus
  siRNA target sequence for Pres (NM_030727.3,810-828).
cctaggtgtctgtaggttt

SEQ ID NO: 643577 - DNA, 19 bp, Mus musculus
  siRNA target sequence for Pres (NM_030727.3,894-912).
cgtgttcacgtccatgtta

SEQ ID NO: 643578 - DNA, 19 bp, Mus musculus
  siRNA target sequence for Pres (NM_030727.3,895-913).
gtgttcacgtccatgttaa

SEQ ID NO: 643579 - DNA, 19 bp, Mus musculus
  siRNA target sequence for Pres (NM_030727.3,897-915).
gttcacgtccatgttaaaa

SEQ ID NO: 643580 - DNA, 19 bp, Mus musculus
  siRNA target sequence for Pres (NM_030727.3,902-920).
cgtccatgttaaaatacct

SEQ ID NO: 643581 - DNA, 19 bp, Mus musculus
  siRNA target sequence for Pres (NM_030727.3,918-936).
cctgtttggggtcaaaaca

SEQ ID NO: 643582 - DNA, 19 bp, Mus musculus
  siRNA target sequence for Pres (NM_030727.3,939-957).
gcggtacagtggaatcttt

SEQ ID NO: 643583 - DNA, 19 bp, Mus musculus
  siRNA target sequence for Pres (NM_030727.3,940-958).
cggtacagtggaatctttt

SEQ ID NO: 643584 - DNA, 19 bp, Mus musculus
  siRNA target sequence for Pres (NM_030727.3,942-960).
gtacagtggaatcttttca

SEQ ID NO: 643585 - DNA, 19 bp, Mus musculus
  siRNA target sequence for Pres (NM_030727.3,980-998).
ctgtgttgcagaatgttaa

SEQ ID NO: 643586 - DNA, 19 bp, Mus musculus
  siRNA target sequence for Pres (NM_030727.3,1021-1039).
ggcgtcggcctgatggttt

SEQ ID NO: 643587 - DNA, 19 bp, Mus musculus
  siRNA target sequence for Pres (NM_030727.3,1022-1040).
gcgtcggcctgatggtttt

SEQ ID NO: 643588 - DNA, 19 bp, Mus musculus
  siRNA target sequence for Pres (NM_030727.3,1023-1041).
cgtcggcctgatggttttt

SEQ ID NO: 643589 - DNA, 19 bp, Mus musculus
  siRNA target sequence for Pres (NM_030727.3,1048-1066).
ctgttgggtggcaaggaat

SEQ ID NO: 643590 - DNA, 19 bp, Mus musculus
  siRNA target sequence for Pres (NM_030727.3,1053-1071).
gggtggcaaggaatttaat

SEQ ID NO: 643591 - DNA, 19 bp, Mus musculus
  siRNA target sequence for Pres (NM_030727.3,1179-1197).
ggatgtcgttggaacactt

SEQ ID NO: 643592 - DNA, 19 bp, Mus musculus
  siRNA target sequence for Pres (NM_030727.3,1268-1286).
ccatcgccatcgttggatt

SEQ ID NO: 643593 - DNA, 19 bp, Mus musculus
  siRNA target sequence for Pres (NM_030727.3,1269-1287).
catcgccatcgttggattt

SEQ ID NO: 643594 - DNA, 19 bp, Mus musculus
  siRNA target sequence for Pres (NM_030727.3,1272-1290).
cgccatcgttggattttca

SEQ ID NO: 643595 - DNA, 19 bp, Mus musculus
  siRNA target sequence for Pres (NM_030727.3,1306-1324).
gccaaaaccttggcaaata

SEQ ID NO: 643596 - DNA, 19 bp, Mus musculus
  siRNA target sequence for Pres (NM_030727.3,1307-1325).
ccaaaaccttggcaaataa

SEQ ID NO: 643597 - DNA, 19 bp, Mus musculus
  siRNA target sequence for Pres (NM_030727.3,1399-1417).
caaaccttctcgatttcct

SEQ ID NO: 643598 - DNA, 19 bp, Mus musculus
  siRNA target sequence for Pres (NM_030727.3,1463-1481).
cacagcttgcaggttgttt

SEQ ID NO: 643599 - DNA, 19 bp, Mus musculus
  siRNA target sequence for Pres (NM_030727.3,1478-1496).
gtttggcctcgttgatgat

SEQ ID NO: 643600 - DNA, 19 bp, Mus musculus
  siRNA target sequence for Pres (NM_030727.3,1483-1501).
gcctcgttgatgattctgt

SEQ ID NO: 643601 - DNA, 19 bp, Mus musculus
  siRNA target sequence for Pres (NM_030727.3,1617-1635).
ctggagaaccagcaaaata

SEQ ID NO: 643602 - DNA, 19 bp, Mus musculus
  siRNA target sequence for Pres (NM_030727.3,1683-1701).
cttggactacggactgatt

SEQ ID NO: 643603 - DNA, 19 bp, Mus musculus
  siRNA target sequence for Pres (NM_030727.3,1698-1716).
gattaccgccgtgatcatt

SEQ ID NO: 643604 - DNA, 19 bp, Mus musculus
  siRNA target sequence for Pres (NM_030727.3,1722-1740).
gctcacagtgatttataga

SEQ ID NO: 643605 - DNA, 19 bp, Mus musculus
  siRNA target sequence for Pres (NM_030727.3,1723-1741).
ctcacagtgatttatagaa

SEQ ID NO: 643606 - DNA, 19 bp, Mus musculus
  siRNA target sequence for Pres (NM_030727.3,1778-1796).
ctgacacggatgtgtacat

SEQ ID NO: 643607 - DNA, 19 bp, Mus musculus
  siRNA target sequence for Pres (NM_030727.3,1784-1802).
cggatgtgtacattgacat

SEQ ID NO: 643608 - DNA, 19 bp, Mus musculus
  siRNA target sequence for Pres (NM_030727.3,1858-1876).
gccccaatttactatgcaa

SEQ ID NO: 643609 - DNA, 19 bp, Mus musculus
  siRNA target sequence for Pres (NM_030727.3,1859-1877).
ccccaatttactatgcaaa

SEQ ID NO: 643610 - DNA, 19 bp, Mus musculus
  siRNA target sequence for Pres (NM_030727.3,1887-1905).
gtatagcagcgctttaaaa

SEQ ID NO: 643611 - DNA, 19 bp, Mus musculus
  siRNA target sequence for Pres (NM_030727.3,1892-1910).
gcagcgctttaaaaagaaa

SEQ ID NO: 643612 - DNA, 19 bp, Mus musculus
  siRNA target sequence for Pres (NM_030727.3,1987-2005).
gccaacgtggccaatgcta

SEQ ID NO: 643613 - DNA, 19 bp, Mus musculus
  siRNA target sequence for Pres (NM_030727.3,1992-2010).
cgtggccaatgctactgtt

SEQ ID NO: 643614 - DNA, 19 bp, Mus musculus
  siRNA target sequence for Pres (NM_030727.3,1998-2016).
caatgctactgttgtcaaa

SEQ ID NO: 643615 - DNA, 19 bp, Mus musculus
  siRNA target sequence for Pres (NM_030727.3,2029-2047).
gtagacggagaaaatgcta

SEQ ID NO: 643616 - DNA, 19 bp, Mus musculus
  siRNA target sequence for Pres (NM_030727.3,2167-2185).
gactttacgcaggtcaatt

SEQ ID NO: 643617 - DNA, 19 bp, Mus musculus
  siRNA target sequence for Pres (NM_030727.3,2169-2187).
ctttacgcaggtcaatttt

SEQ ID NO: 643618 - DNA, 19 bp, Mus musculus
  siRNA target sequence for Pres (NM_030727.3,2190-2208).
ggattctgttggagtgaaa

SEQ ID NO: 643619 - DNA, 19 bp, Mus musculus
  siRNA target sequence for Pres (NM_030727.3,2191-2209).
gattctgttggagtgaaaa

SEQ ID NO: 643620 - DNA, 19 bp, Mus musculus
  siRNA target sequence for Pres (NM_030727.3,2217-2235).
cgggattgtgaaagaatat

SEQ ID NO: 643621 - DNA, 19 bp, Mus musculus
  siRNA target sequence for Pres (NM_030727.3,2267-2285).
gatgcagcccacaagttgt

SEQ ID NO: 643622 - DNA, 19 bp, Mus musculus
  siRNA target sequence for Pres (NM_030727.3,2271-2289).
cagcccacaagttgtgaat

SEQ ID NO: 643623 - DNA, 19 bp, Mus musculus
  siRNA target sequence for Pres (NM_030727.3,2273-2291).
gcccacaagttgtgaatga

SEQ ID NO: 643624 - DNA, 19 bp, Mus musculus
  siRNA target sequence for Pres (NM_030727.3,2292-2310).
cctcacccgcaacaacttt

SEQ ID NO: 643625 - DNA, 19 bp, Mus musculus
  siRNA target sequence for Pres (NM_030727.3,2295-2313).
cacccgcaacaactttttt

SEQ ID NO: 643626 - DNA, 19 bp, Mus musculus
  siRNA target sequence for Pres (NM_030727.3,2297-2315).
cccgcaacaacttttttga

SEQ ID NO: 643627 - DNA, 19 bp, Mus musculus
  siRNA target sequence for Pres (NM_030727.3,2298-2316).
ccgcaacaacttttttgaa

SEQ ID NO: 643628 - DNA, 19 bp, Mus musculus
  siRNA target sequence for Pres (NM_030727.3,2304-2322).
caacttttttgaaaatcct

SEQ ID NO: 643629 - DNA, 19 bp, Mus musculus
  siRNA target sequence for Pres (NM_030727.3,2414-2432).
cacttccccaggaggatat

SEQ ID NO: 643630 - DNA, 19 bp, Mus musculus
  siRNA target sequence for Slc26a1 (NM_174870.2,540-558).
cccagtaccgccttaagga

SEQ ID NO: 643631 - DNA, 19 bp, Mus musculus
  siRNA target sequence for Slc26a1 (NM_174870.2,541-559).
ccagtaccgccttaaggaa

SEQ ID NO: 643632 - DNA, 19 bp, Mus musculus
  siRNA target sequence for Slc26a1 (NM_174870.2,542-560).
cagtaccgccttaaggaat

SEQ ID NO: 643633 - DNA, 19 bp, Mus musculus
  siRNA target sequence for Slc26a1 (NM_174870.2,547-565).
ccgccttaaggaataccta

SEQ ID NO: 643634 - DNA, 19 bp, Mus musculus
  siRNA target sequence for Slc26a1 (NM_174870.2,585-603).
gattggtcattggcattat

SEQ ID NO: 643635 - DNA, 19 bp, Mus musculus
  siRNA target sequence for Slc26a1 (NM_174870.2,641-659).
gggttacaacccatctata

SEQ ID NO: 643636 - DNA, 19 bp, Mus musculus
  siRNA target sequence for Slc26a1 (NM_174870.2,708-726).
cctcccgccatgttaatgt

SEQ ID NO: 643637 - DNA, 19 bp, Mus musculus
  siRNA target sequence for Slc26a1 (NM_174870.2,813-831).
ctctagggcccaagaacaa

SEQ ID NO: 643638 - DNA, 19 bp, Mus musculus
  siRNA target sequence for Slc26a1 (NM_174870.2,818-836).
gggcccaagaacaatgaca

SEQ ID NO: 643639 - DNA, 19 bp, Mus musculus
  siRNA target sequence for Slc26a1 (NM_174870.2,973-991).
gggcttcgtgtctacctat

SEQ ID NO: 643640 - DNA, 19 bp, Mus musculus
  siRNA target sequence for Slc26a1 (NM_174870.2,1139-1157).
gtgggacaggccaacatat

SEQ ID NO: 643641 - DNA, 19 bp, Mus musculus
  siRNA target sequence for Slc26a1 (NM_174870.2,1141-1159).
gggacaggccaacatatgt

SEQ ID NO: 643642 - DNA, 19 bp, Mus musculus
  siRNA target sequence for Slc26a1 (NM_174870.2,1143-1161).
gacaggccaacatatgtga

SEQ ID NO: 643643 - DNA, 19 bp, Mus musculus
  siRNA target sequence for Slc26a1 (NM_174870.2,1245-1263).
caatacccacagagttatt

SEQ ID NO: 643644 - DNA, 19 bp, Mus musculus
  siRNA target sequence for Slc26a1 (NM_174870.2,1271-1289).
gtggtggccacaattgtgt

SEQ ID NO: 643645 - DNA, 19 bp, Mus musculus
  siRNA target sequence for Slc26a1 (NM_174870.2,1336-1354).
caacattcccactggtttt

SEQ ID NO: 643646 - DNA, 19 bp, Mus musculus
  siRNA target sequence for Slc26a1 (NM_174870.2,1366-1384).
ggtaccagaccctaagata

SEQ ID NO: 643647 - DNA, 19 bp, Mus musculus
  siRNA target sequence for Slc26a1 (NM_174870.2,1367-1385).
gtaccagaccctaagataa

SEQ ID NO: 643648 - DNA, 19 bp, Mus musculus
  siRNA target sequence for Slc26a1 (NM_174870.2,1440-1458).
ccatctccttggcagaaat

SEQ ID NO: 643649 - DNA, 19 bp, Mus musculus
  siRNA target sequence for Slc26a1 (NM_174870.2,1657-1675).
ggtgctggctccactgttt

SEQ ID NO: 643650 - DNA, 19 bp, Mus musculus
  siRNA target sequence for Slc26a1 (NM_174870.2,1660-1678).
gctggctccactgtttcat

SEQ ID NO: 643651 - DNA, 19 bp, Mus musculus
  siRNA target sequence for Slc26a1 (NM_174870.2,1665-1683).
ctccactgtttcatgatct

SEQ ID NO: 643652 - DNA, 19 bp, Mus musculus
  siRNA target sequence for Slc26a1 (NM_174870.2,1689-1707).
gatgtgtgctagcttgtat

SEQ ID NO: 643653 - DNA, 19 bp, Mus musculus
  siRNA target sequence for Slc26a1 (NM_174870.2,1692-1710).
gtgtgctagcttgtatcat

SEQ ID NO: 643654 - DNA, 19 bp, Mus musculus
  siRNA target sequence for Slc26a1 (NM_174870.2,1828-1846).
caccgaggctggactatta

SEQ ID NO: 643655 - DNA, 19 bp, Mus musculus
  siRNA target sequence for Slc26a1 (NM_174870.2,1831-1849).
cgaggctggactattagct

SEQ ID NO: 643656 - DNA, 19 bp, Mus musculus
  siRNA target sequence for Slc26a1 (NM_174870.2,1906-1924).
ccttcttgcccgaattgga

SEQ ID NO: 643657 - DNA, 19 bp, Mus musculus
  siRNA target sequence for Slc26a1 (NM_174870.2,1984-2002).
gcgagtgttccgtttcaca

SEQ ID NO: 643658 - DNA, 19 bp, Mus musculus
  siRNA target sequence for Slc26a2 (NM_007885.1,283-301).
gagggacttacctgaagaa

SEQ ID NO: 643659 - DNA, 19 bp, Mus musculus
  siRNA target sequence for Slc26a2 (NM_007885.1,326-344).
cccctggagactcaaagaa

SEQ ID NO: 643660 - DNA, 19 bp, Mus musculus
  siRNA target sequence for Slc26a2 (NM_007885.1,499-517).
cagagacggggcttttgat

SEQ ID NO: 643661 - DNA, 19 bp, Mus musculus
  siRNA target sequence for Slc26a2 (NM_007885.1,501-519).
gagacggggcttttgattt

SEQ ID NO: 643662 - DNA, 19 bp, Mus musculus
  siRNA target sequence for Slc26a2 (NM_007885.1,503-521).
gacggggcttttgatttct

SEQ ID NO: 643663 - DNA, 19 bp, Mus musculus
  siRNA target sequence for Slc26a2 (NM_007885.1,534-552).
ggtggctcccaaaatatga

SEQ ID NO: 643664 - DNA, 19 bp, Mus musculus
  siRNA target sequence for Slc26a2 (NM_007885.1,611-629).
gtgccccagtccattgctt

SEQ ID NO: 643665 - DNA, 19 bp, Mus musculus
  siRNA target sequence for Slc26a2 (NM_007885.1,675-693).
cattttttgccagcattat

SEQ ID NO: 643666 - DNA, 19 bp, Mus musculus
  siRNA target sequence for Slc26a2 (NM_007885.1,766-784).
ggttgttgaccgagaacta

SEQ ID NO: 643667 - DNA, 19 bp, Mus musculus
  siRNA target sequence for Slc26a2 (NM_007885.1,770-788).
gttgaccgagaactacata

SEQ ID NO: 643668 - DNA, 19 bp, Mus musculus
  siRNA target sequence for Slc26a2 (NM_007885.1,823-841).
gatagcagtgttttcaagt

SEQ ID NO: 643669 - DNA, 19 bp, Mus musculus
  siRNA target sequence for Slc26a2 (NM_007885.1,843-861).
gatgtgtggttgtaaacca

SEQ ID NO: 643670 - DNA, 19 bp, Mus musculus
  siRNA target sequence for Slc26a2 (NM_007885.1,869-887).
gacggactctgtgataaaa

SEQ ID NO: 643671 - DNA, 19 bp, Mus musculus
  siRNA target sequence for Slc26a2 (NM_007885.1,881-899).
gataaaagctgctatgcaa

SEQ ID NO: 643672 - DNA, 19 bp, Mus musculus
  siRNA target sequence for Slc26a2 (NM_007885.1,1088-1106).
ggtgtcggctcagtcatta

SEQ ID NO: 643673 - DNA, 19 bp, Mus musculus
  siRNA target sequence for Slc26a2 (NM_007885.1,1091-1109).
gtcggctcagtcattacta

SEQ ID NO: 643674 - DNA, 19 bp, Mus musculus
  siRNA target sequence for Slc26a2 (NM_007885.1,1113-1131).
ggatccacatcttcagaaa

SEQ ID NO: 643675 - DNA, 19 bp, Mus musculus
  siRNA target sequence for Slc26a2 (NM_007885.1,1143-1161).
ccaacatctgtgatctcat

SEQ ID NO: 643676 - DNA, 19 bp, Mus musculus
  siRNA target sequence for Slc26a2 (NM_007885.1,1183-1201).
ggtcctcgtgccatccaaa

SEQ ID NO: 643677 - DNA, 19 bp, Mus musculus
  siRNA target sequence for Slc26a2 (NM_007885.1,1186-1204).
cctcgtgccatccaaagaa

SEQ ID NO: 643678 - DNA, 19 bp, Mus musculus
  siRNA target sequence for Slc26a2 (NM_007885.1,1192-1210).
gccatccaaagaactcaat

SEQ ID NO: 643679 - DNA, 19 bp, Mus musculus
  siRNA target sequence for Slc26a2 (NM_007885.1,1298-1316).
ctaaatgggaattacaatt

SEQ ID NO: 643680 - DNA, 19 bp, Mus musculus
  siRNA target sequence for Slc26a2 (NM_007885.1,1306-1324).
gaattacaattccagtatt

SEQ ID NO: 643681 - DNA, 19 bp, Mus musculus
  siRNA target sequence for Slc26a2 (NM_007885.1,1318-1336).
cagtattgctggacacatt

SEQ ID NO: 643682 - DNA, 19 bp, Mus musculus
  siRNA target sequence for Slc26a2 (NM_007885.1,1369-1387).
ctggagcctcattcctaat

SEQ ID NO: 643683 - DNA, 19 bp, Mus musculus
  siRNA target sequence for Slc26a2 (NM_007885.1,1390-1408).
ggctgtagatgcaatagct

SEQ ID NO: 643684 - DNA, 19 bp, Mus musculus
  siRNA target sequence for Slc26a2 (NM_007885.1,1394-1412).
gtagatgcaatagctattt

SEQ ID NO: 643685 - DNA, 19 bp, Mus musculus
  siRNA target sequence for Slc26a2 (NM_007885.1,1400-1418).
gcaatagctatttctatca

SEQ ID NO: 643686 - DNA, 19 bp, Mus musculus
  siRNA target sequence for Slc26a2 (NM_007885.1,1406-1424).
gctatttctatcattggtt

SEQ ID NO: 643687 - DNA, 19 bp, Mus musculus
  siRNA target sequence for Slc26a2 (NM_007885.1,1469-1487).
ggctacacggtcaaagcaa

SEQ ID NO: 643688 - DNA, 19 bp, Mus musculus
  siRNA target sequence for Slc26a2 (NM_007885.1,1470-1488).
gctacacggtcaaagcaaa

SEQ ID NO: 643689 - DNA, 19 bp, Mus musculus
  siRNA target sequence for Slc26a2 (NM_007885.1,1474-1492).
cacggtcaaagcaaaccaa

SEQ ID NO: 643690 - DNA, 19 bp, Mus musculus
  siRNA target sequence for Slc26a2 (NM_007885.1,1562-1580).
cttgcaaagacattggtta

SEQ ID NO: 643691 - DNA, 19 bp, Mus musculus
  siRNA target sequence for Slc26a2 (NM_007885.1,1600-1618).
gacgcagctgtcagctata

SEQ ID NO: 643692 - DNA, 19 bp, Mus musculus
  siRNA target sequence for Slc26a2 (NM_007885.1,1602-1620).
cgcagctgtcagctatagt

SEQ ID NO: 643693 - DNA, 19 bp, Mus musculus
  siRNA target sequence for Slc26a2 (NM_007885.1,1604-1622).
cagctgtcagctatagtga

SEQ ID NO: 643694 - DNA, 19 bp, Mus musculus
  siRNA target sequence for Slc26a2 (NM_007885.1,1639-1657).
gttggtccttctggtaata

SEQ ID NO: 643695 - DNA, 19 bp, Mus musculus
  siRNA target sequence for Slc26a2 (NM_007885.1,1649-1667).
ctggtaatagctcctttat

SEQ ID NO: 643696 - DNA, 19 bp, Mus musculus
  siRNA target sequence for Slc26a2 (NM_007885.1,1669-1687).
ctattcccttcaaaaatgt

SEQ ID NO: 643697 - DNA, 19 bp, Mus musculus
  siRNA target sequence for Slc26a2 (NM_007885.1,1690-1708).
ccttggtgtgatcactatt

SEQ ID NO: 643698 - DNA, 19 bp, Mus musculus
  siRNA target sequence for Slc26a2 (NM_007885.1,1695-1713).
gtgtgatcactattgtaaa

SEQ ID NO: 643699 - DNA, 19 bp, Mus musculus
  siRNA target sequence for Slc26a2 (NM_007885.1,1723-1741).
cgcacttctgaaatttaga

SEQ ID NO: 643700 - DNA, 19 bp, Mus musculus
  siRNA target sequence for Slc26a2 (NM_007885.1,1725-1743).
cacttctgaaatttagaga

SEQ ID NO: 643701 - DNA, 19 bp, Mus musculus
  siRNA target sequence for Slc26a2 (NM_007885.1,1767-1785).
gcagaatggatacagttat

SEQ ID NO: 643702 - DNA, 19 bp, Mus musculus
  siRNA target sequence for Slc26a2 (NM_007885.1,1802-1820).
ctgtcctccgctctgttaa

SEQ ID NO: 643703 - DNA, 19 bp, Mus musculus
  siRNA target sequence for Slc26a2 (NM_007885.1,1938-1956).
ccatttccacttacaagaa

SEQ ID NO: 643704 - DNA, 19 bp, Mus musculus
  siRNA target sequence for Slc26a2 (NM_007885.1,1978-1996).
caaggttttccgcttcata

SEQ ID NO: 643705 - DNA, 19 bp, Mus musculus
  siRNA target sequence for Slc26a2 (NM_007885.1,1997-2015).
gcccctctctactacataa

SEQ ID NO: 643706 - DNA, 19 bp, Mus musculus
  siRNA target sequence for Slc26a2 (NM_007885.1,2069-2087).
gtaaaggcagcttggaaaa

SEQ ID NO: 643707 - DNA, 19 bp, Mus musculus
  siRNA target sequence for Slc26a2 (NM_007885.1,2130-2148).
gtggggacccggatgaagt

SEQ ID NO: 643708 - DNA, 19 bp, Mus musculus
  siRNA target sequence for Slc26a2 (NM_007885.1,2132-2150).
ggggacccggatgaagttt

SEQ ID NO: 643709 - DNA, 19 bp, Mus musculus
  siRNA target sequence for Slc26a2 (NM_007885.1,2172-2190).
ccttggaggtgcacactat

SEQ ID NO: 643710 - DNA, 19 bp, Mus musculus
  siRNA target sequence for Slc26a2 (NM_007885.1,2198-2216).
gactgtagtgccatacagt

SEQ ID NO: 643711 - DNA, 19 bp, Mus musculus
  siRNA target sequence for Slc26a2 (NM_007885.1,2200-2218).
ctgtagtgccatacagttt

SEQ ID NO: 643712 - DNA, 19 bp, Mus musculus
  siRNA target sequence for Slc26a2 (NM_007885.1,2207-2225).
gccatacagtttttagaca

SEQ ID NO: 643713 - DNA, 19 bp, Mus musculus
  siRNA target sequence for Slc26a2 (NM_007885.1,2271-2289).
ccgttgggatccaggtttt

SEQ ID NO: 643714 - DNA, 19 bp, Mus musculus
  siRNA target sequence for Slc26a2 (NM_007885.1,2272-2290).
cgttgggatccaggtttta

SEQ ID NO: 643715 - DNA, 19 bp, Mus musculus
  siRNA target sequence for Slc26a2 (NM_007885.1,2307-2325).
cttctgtgagggattcctt

SEQ ID NO: 643716 - DNA, 19 bp, Mus musculus
  siRNA target sequence for Slc26a2 (NM_007885.1,2328-2346).
ccagaggagaatattgcaa

SEQ ID NO: 643717 - DNA, 19 bp, Mus musculus
  siRNA target sequence for Slc26a2 (NM_007885.1,2331-2349).
gaggagaatattgcaaaaa

SEQ ID NO: 643718 - DNA, 19 bp, Mus musculus
  siRNA target sequence for Slc26a4 (NM_011867.1,582-600).
ccctatcctgacgtatttt

SEQ ID NO: 643719 - DNA, 19 bp, Mus musculus
  siRNA target sequence for Slc26a4 (NM_011867.1,635-653).
ctttccccgtggtcagttt

SEQ ID NO: 643720 - DNA, 19 bp, Mus musculus
  siRNA target sequence for Slc26a4 (NM_011867.1,683-701).
ctccagatgaccactttct

SEQ ID NO: 643721 - DNA, 19 bp, Mus musculus
  siRNA target sequence for Slc26a4 (NM_011867.1,713-731).
gtaacggaagtgcattgaa

SEQ ID NO: 643722 - DNA, 19 bp, Mus musculus
  siRNA target sequence for Slc26a4 (NM_011867.1,785-803).
gcacactcactcttctagt

SEQ ID NO: 643723 - DNA, 19 bp, Mus musculus
  siRNA target sequence for Slc26a4 (NM_011867.1,786-804).
cacactcactcttctagtt

SEQ ID NO: 643724 - DNA, 19 bp, Mus musculus
  siRNA target sequence for Slc26a4 (NM_011867.1,826-844).
ggaggtttgcagattggat

SEQ ID NO: 643725 - DNA, 19 bp, Mus musculus
  siRNA target sequence for Slc26a4 (NM_011867.1,835-853).
cagattggattcatagtga

SEQ ID NO: 643726 - DNA, 19 bp, Mus musculus
  siRNA target sequence for Slc26a4 (NM_011867.1,870-888).
cttggttggcggattcaca

SEQ ID NO: 643727 - DNA, 19 bp, Mus musculus
  siRNA target sequence for Slc26a4 (NM_011867.1,1290-1308).
ggtggcttacgctattgca

SEQ ID NO: 643728 - DNA, 19 bp, Mus musculus
  siRNA target sequence for Slc26a4 (NM_011867.1,1329-1347).
cgccaccaagcatgactat

SEQ ID NO: 643729 - DNA, 19 bp, Mus musculus
  siRNA target sequence for Slc26a4 (NM_011867.1,1661-1679).
gggtgtttacatgcataat

SEQ ID NO: 643730 - DNA, 19 bp, Mus musculus
  siRNA target sequence for Slc26a4 (NM_011867.1,1928-1946).
gatttgatgccattagagt

SEQ ID NO: 643731 - DNA, 19 bp, Mus musculus
  siRNA target sequence for Slc26a4 (NM_011867.1,2022-2040).
cgggatcataagtgatatt

SEQ ID NO: 643732 - DNA, 19 bp, Mus musculus
  siRNA target sequence for Slc26a4 (NM_011867.1,2033-2051).
gtgatattggctcatcaaa

SEQ ID NO: 643733 - DNA, 19 bp, Mus musculus
  siRNA target sequence for Slc26a4 (NM_011867.1,2035-2053).
gatattggctcatcaaata

SEQ ID NO: 643734 - DNA, 19 bp, Mus musculus
  siRNA target sequence for Slc26a4 (NM_011867.1,2058-2076).
cttcgagcctgatgaagat

SEQ ID NO: 643735 - DNA, 19 bp, Mus musculus
  siRNA target sequence for Slc26a4 (NM_011867.1,2141-2159).
ccgaactcccggtgaaagt

SEQ ID NO: 643736 - DNA, 19 bp, Mus musculus
  siRNA target sequence for Slc26a4 (NM_011867.1,2235-2253).
gaggtcattgcgaatgatt

SEQ ID NO: 643737 - DNA, 19 bp, Mus musculus
  siRNA target sequence for Slc26a4 (NM_011867.1,2244-2262).
gcgaatgattgtcaaagaa

SEQ ID NO: 643738 - DNA, 19 bp, Mus musculus
  siRNA target sequence for Slc26a4 (NM_011867.1,2245-2263).
cgaatgattgtcaaagaat

SEQ ID NO: 643739 - DNA, 19 bp, Mus musculus
  siRNA target sequence for Slc26a4 (NM_011867.1,2270-2288).
gaattgatgtgaatgtgta

SEQ ID NO: 643740 - DNA, 19 bp, Mus musculus
  siRNA target sequence for Slc26a4 (NM_011867.1,2298-2316).
gcttcaagatgatgtgtta

SEQ ID NO: 643741 - DNA, 19 bp, Mus musculus
  siRNA target sequence for Slc26a4 (NM_011867.1,2333-2351).
gtgggttctttgatgacaa

SEQ ID NO: 643742 - DNA, 19 bp, Mus musculus
  siRNA target sequence for Slc26a4 (NM_011867.1,2336-2354).
ggttctttgatgacaacat

SEQ ID NO: 643743 - DNA, 19 bp, Mus musculus
  siRNA target sequence for Slc26a4 (NM_011867.1,2340-2358).
ctttgatgacaacattaga

SEQ ID NO: 643744 - DNA, 19 bp, Mus musculus
  siRNA target sequence for Slc26a4 (NM_011867.1,2370-2388).
ctttctgacggttcatgat

SEQ ID NO: 643745 - DNA, 19 bp, Mus musculus
  siRNA target sequence for Slc26a4 (NM_011867.1,2456-2474).
ctcgcattcgggactgtaa

SEQ ID NO: 643746 - DNA, 19 bp, Mus musculus
  siRNA target sequence for Slc26a4 (NM_011867.1,2459-2477).
gcattcgggactgtaaaga

SEQ ID NO: 643747 - DNA, 19 bp, Mus musculus
  siRNA target sequence for Slc26a4 (NM_011867.1,2469-2487).
ctgtaaagaccctcttgat

SEQ ID NO: 643748 - DNA, 19 bp, Mus musculus
  siRNA target sequence for Slc26a4 (NM_011867.1,2510-2528).
cagaagagctcgatgttca

SEQ ID NO: 643749 - DNA, 19 bp, Mus musculus
  siRNA target sequence for Slc26a7 (NM_145947.1,162-180).
ccccccaccgagaagacat

SEQ ID NO: 643750 - DNA, 19 bp, Mus musculus
  siRNA target sequence for Slc26a7 (NM_145947.1,164-182).
ccccaccgagaagacatta

SEQ ID NO: 643751 - DNA, 19 bp, Mus musculus
  siRNA target sequence for Slc26a7 (NM_145947.1,165-183).
cccaccgagaagacattaa

SEQ ID NO: 643752 - DNA, 19 bp, Mus musculus
  siRNA target sequence for Slc26a7 (NM_145947.1,192-210).
gtaagaggcgcctacctat

SEQ ID NO: 643753 - DNA, 19 bp, Mus musculus
  siRNA target sequence for Slc26a7 (NM_145947.1,200-218).
cgcctacctatcttggaat

SEQ ID NO: 643754 - DNA, 19 bp, Mus musculus
  siRNA target sequence for Slc26a7 (NM_145947.1,221-239).
gcaccgcagtacaatctga

SEQ ID NO: 643755 - DNA, 19 bp, Mus musculus
  siRNA target sequence for Slc26a7 (NM_145947.1,222-240).
caccgcagtacaatctgaa

SEQ ID NO: 643756 - DNA, 19 bp, Mus musculus
  siRNA target sequence for Slc26a7 (NM_145947.1,271-289).
gataatgttggcagttcaa

SEQ ID NO: 643757 - DNA, 19 bp, Mus musculus
  siRNA target sequence for Slc26a7 (NM_145947.1,304-322).
gctgtccttcgctatgctt

SEQ ID NO: 643758 - DNA, 19 bp, Mus musculus
  siRNA target sequence for Slc26a7 (NM_145947.1,313-331).
cgctatgctttcatctgta

SEQ ID NO: 643759 - DNA, 19 bp, Mus musculus
  siRNA target sequence for Slc26a7 (NM_145947.1,332-350).
cacccagtttttggtttat

SEQ ID NO: 643760 - DNA, 19 bp, Mus musculus
  siRNA target sequence for Slc26a7 (NM_145947.1,334-352).
cccagtttttggtttatat

SEQ ID NO: 643761 - DNA, 19 bp, Mus musculus
  siRNA target sequence for Slc26a7 (NM_145947.1,365-383).
ccagccatcatttatgcta

SEQ ID NO: 643762 - DNA, 19 bp, Mus musculus
  siRNA target sequence for Slc26a7 (NM_145947.1,366-384).
cagccatcatttatgctat

SEQ ID NO: 643763 - DNA, 19 bp, Mus musculus
  siRNA target sequence for Slc26a7 (NM_145947.1,368-386).
gccatcatttatgctatat

SEQ ID NO: 643764 - DNA, 19 bp, Mus musculus
  siRNA target sequence for Slc26a7 (NM_145947.1,413-431).
ggcacctttgccttgacat

SEQ ID NO: 643765 - DNA, 19 bp, Mus musculus
  siRNA target sequence for Slc26a7 (NM_145947.1,422-440).
gccttgacatccttgatat

SEQ ID NO: 643766 - DNA, 19 bp, Mus musculus
  siRNA target sequence for Slc26a7 (NM_145947.1,424-442).
cttgacatccttgatatca

SEQ ID NO: 643767 - DNA, 19 bp, Mus musculus
  siRNA target sequence for Slc26a7 (NM_145947.1,580-598).
gattcagctggtcatgttt

SEQ ID NO: 643768 - DNA, 19 bp, Mus musculus
  siRNA target sequence for Slc26a7 (NM_145947.1,618-636).
ccacattcctgcttacaga

SEQ ID NO: 643769 - DNA, 19 bp, Mus musculus
  siRNA target sequence for Slc26a7 (NM_145947.1,673-691).
ccatgtcgtgacatcacaa

SEQ ID NO: 643770 - DNA, 19 bp, Mus musculus
  siRNA target sequence for Slc26a7 (NM_145947.1,682-700).
gacatcacaagtcaagtat

SEQ ID NO: 643771 - DNA, 19 bp, Mus musculus
  siRNA target sequence for Slc26a7 (NM_145947.1,684-702).
catcacaagtcaagtatct

SEQ ID NO: 643772 - DNA, 19 bp, Mus musculus
  siRNA target sequence for Slc26a7 (NM_145947.1,687-705).
cacaagtcaagtatctctt

SEQ ID NO: 643773 - DNA, 19 bp, Mus musculus
  siRNA target sequence for Slc26a7 (NM_145947.1,729-747).
ccggaccactgggattctt

SEQ ID NO: 643774 - DNA, 19 bp, Mus musculus
  siRNA target sequence for Slc26a7 (NM_145947.1,759-777).
cgtatgtctttgagaacat

SEQ ID NO: 643775 - DNA, 19 bp, Mus musculus
  siRNA target sequence for Slc26a7 (NM_145947.1,838-856).
cgttaaagagctgaatgaa

SEQ ID NO: 643776 - DNA, 19 bp, Mus musculus
  siRNA target sequence for Slc26a7 (NM_145947.1,884-902).
cttcctgtcgacttagttt

SEQ ID NO: 643777 - DNA, 19 bp, Mus musculus
  siRNA target sequence for Slc26a7 (NM_145947.1,888-906).
ctgtcgacttagttttgat

SEQ ID NO: 643778 - DNA, 19 bp, Mus musculus
  siRNA target sequence for Slc26a7 (NM_145947.1,890-908).
gtcgacttagttttgatca

SEQ ID NO: 643779 - DNA, 19 bp, Mus musculus
  siRNA target sequence for Slc26a7 (NM_145947.1,892-910).
cgacttagttttgatcatt

SEQ ID NO: 643780 - DNA, 19 bp, Mus musculus
  siRNA target sequence for Slc26a7 (NM_145947.1,904-922).
gatcattgccgcctcattt

SEQ ID NO: 643781 - DNA, 19 bp, Mus musculus
  siRNA target sequence for Slc26a7 (NM_145947.1,913-931).
cgcctcatttgcttgctat

SEQ ID NO: 643782 - DNA, 19 bp, Mus musculus
  siRNA target sequence for Slc26a7 (NM_145947.1,951-969).
catacggattagaagtagt

SEQ ID NO: 643783 - DNA, 19 bp, Mus musculus
  siRNA target sequence for Slc26a7 (NM_145947.1,965-983).
gtagttgggcacattccaa

SEQ ID NO: 643784 - DNA, 19 bp, Mus musculus
  siRNA target sequence for Slc26a7 (NM_145947.1,999-1017).
cccgtgctcccccaatgaa

SEQ ID NO: 643785 - DNA, 19 bp, Mus musculus
  siRNA target sequence for Slc26a7 (NM_145947.1,1001-1019).
cgtgctcccccaatgaaca

SEQ ID NO: 643786 - DNA, 19 bp, Mus musculus
  siRNA target sequence for Slc26a7 (NM_145947.1,1100-1118).
gccaagaagttcaaatatt

SEQ ID NO: 643787 - DNA, 19 bp, Mus musculus
  siRNA target sequence for Slc26a7 (NM_145947.1,1158-1176).
gcaacgtgatcccttcatt

SEQ ID NO: 643788 - DNA, 19 bp, Mus musculus
  siRNA target sequence for Slc26a7 (NM_145947.1,1159-1177).
caacgtgatcccttcattt

SEQ ID NO: 643789 - DNA, 19 bp, Mus musculus
  siRNA target sequence for Slc26a7 (NM_145947.1,1243-1261).
gacgcaggtggcttgtcta

SEQ ID NO: 643790 - DNA, 19 bp, Mus musculus
  siRNA target sequence for Slc26a7 (NM_145947.1,1245-1263).
cgcaggtggcttgtctaat

SEQ ID NO: 643791 - DNA, 19 bp, Mus musculus
  siRNA target sequence for Slc26a7 (NM_145947.1,1246-1264).
gcaggtggcttgtctaata

SEQ ID NO: 643792 - DNA, 19 bp, Mus musculus
  siRNA target sequence for Slc26a7 (NM_145947.1,1247-1265).
caggtggcttgtctaatat

SEQ ID NO: 643793 - DNA, 19 bp, Mus musculus
  siRNA target sequence for Slc26a7 (NM_145947.1,1249-1267).
ggtggcttgtctaatatct

SEQ ID NO: 643794 - DNA, 19 bp, Mus musculus
  siRNA target sequence for Slc26a7 (NM_145947.1,1257-1275).
gtctaatatcttgcatttt

SEQ ID NO: 643795 - DNA, 19 bp, Mus musculus
  siRNA target sequence for Slc26a7 (NM_145947.1,1266-1284).
cttgcattttcgtccttat

SEQ ID NO: 643796 - DNA, 19 bp, Mus musculus
  siRNA target sequence for Slc26a7 (NM_145947.1,1280-1298).
cttattgtcatctatgcaa

SEQ ID NO: 643797 - DNA, 19 bp, Mus musculus
  siRNA target sequence for Slc26a7 (NM_145947.1,1327-1345).
gtgcgttcttgcaagtatt

SEQ ID NO: 643798 - DNA, 19 bp, Mus musculus
  siRNA target sequence for Slc26a7 (NM_145947.1,1329-1347).
gcgttcttgcaagtattat

SEQ ID NO: 643799 - DNA, 19 bp, Mus musculus
  siRNA target sequence for Slc26a7 (NM_145947.1,1354-1372).
gggcctgaagggaatgtta

SEQ ID NO: 643800 - DNA, 19 bp, Mus musculus
  siRNA target sequence for Slc26a7 (NM_145947.1,1355-1373).
ggcctgaagggaatgttaa

SEQ ID NO: 643801 - DNA, 19 bp, Mus musculus
  siRNA target sequence for Slc26a7 (NM_145947.1,1356-1374).
gcctgaagggaatgttaat

SEQ ID NO: 643802 - DNA, 19 bp, Mus musculus
  siRNA target sequence for Slc26a7 (NM_145947.1,1357-1375).
cctgaagggaatgttaata

SEQ ID NO: 643803 - DNA, 19 bp, Mus musculus
  siRNA target sequence for Slc26a7 (NM_145947.1,1431-1449).
ggatcagtacttacatttt

SEQ ID NO: 643804 - DNA, 19 bp, Mus musculus
  siRNA target sequence for Slc26a7 (NM_145947.1,1432-1450).
gatcagtacttacattttt

SEQ ID NO: 643805 - DNA, 19 bp, Mus musculus
  siRNA target sequence for Slc26a7 (NM_145947.1,1464-1482).
ctgccaatgtgggattgtt

SEQ ID NO: 643806 - DNA, 19 bp, Mus musculus
  siRNA target sequence for Slc26a7 (NM_145947.1,1490-1508).
gttatctgcaccatagcta

SEQ ID NO: 643807 - DNA, 19 bp, Mus musculus
  siRNA target sequence for Slc26a7 (NM_145947.1,1598-1616).
gaaacctcgcaacagataa

SEQ ID NO: 643808 - DNA, 19 bp, Mus musculus
  siRNA target sequence for Slc26a7 (NM_145947.1,1607-1625).
caacagataaaaatcatct

SEQ ID NO: 643809 - DNA, 19 bp, Mus musculus
  siRNA target sequence for Slc26a7 (NM_145947.1,1806-1824).
ccagcgagaagtgttcttt

SEQ ID NO: 643810 - DNA, 19 bp, Mus musculus
  siRNA target sequence for Slc26a7 (NM_145947.1,1839-1857).
gtggcttgaccttttttga

SEQ ID NO: 643811 - DNA, 19 bp, Mus musculus
  siRNA target sequence for Slc26a7 (NM_145947.1,1841-1859).
ggcttgaccttttttgact

SEQ ID NO: 643812 - DNA, 19 bp, Mus musculus
  siRNA target sequence for Slc26a7 (NM_145947.1,1842-1860).
gcttgaccttttttgacta

SEQ ID NO: 643813 - DNA, 19 bp, Mus musculus
  siRNA target sequence for Slc26a7 (NM_145947.1,1866-1884).
gagtctccacgcttgttga

SEQ ID NO: 643814 - DNA, 19 bp, Mus musculus
  siRNA target sequence for Slc26a7 (NM_145947.1,1880-1898).
gttgagctctaccttgatt

SEQ ID NO: 643815 - DNA, 19 bp, Mus musculus
  siRNA target sequence for Slc26a7 (NM_145947.1,1919-1937).
gtgttcttagccaactgta

SEQ ID NO: 643816 - DNA, 19 bp, Mus musculus
  siRNA target sequence for Slc26a7 (NM_145947.1,1933-1951).
ctgtactgcatccttgata

SEQ ID NO: 643817 - DNA, 19 bp, Mus musculus
  siRNA target sequence for Slc26a7 (NM_145947.1,1935-1953).
gtactgcatccttgataaa

SEQ ID NO: 643818 - DNA, 19 bp, Mus musculus
  siRNA target sequence for Slc26a7 (NM_145947.1,1940-1958).
gcatccttgataaaagcaa

SEQ ID NO: 643819 - DNA, 19 bp, Mus musculus
  siRNA target sequence for Slc26a7 (NM_145947.1,1975-1993).
cctagacaccgaaaaacca

SEQ ID NO: 643820 - DNA, 19 bp, Mus musculus
  siRNA target sequence for Slc26a7 (NM_145947.1,1976-1994).
ctagacaccgaaaaaccaa

SEQ ID NO: 643821 - DNA, 19 bp, Mus musculus
  siRNA target sequence for Slc26a7 (NM_145947.1,1979-1997).
gacaccgaaaaaccaattt

SEQ ID NO: 643822 - DNA, 19 bp, Mus musculus
  siRNA target sequence for Slc26a8 (NM_146076.1,317-335).
gcaacagatacacacaaat

SEQ ID NO: 643823 - DNA, 19 bp, Mus musculus
  siRNA target sequence for Slc26a8 (NM_146076.1,337-355).
ccttttgtgtacgatgtta

SEQ ID NO: 643824 - DNA, 19 bp, Mus musculus
  siRNA target sequence for Slc26a8 (NM_146076.1,338-356).
cttttgtgtacgatgttaa

SEQ ID NO: 643825 - DNA, 19 bp, Mus musculus
  siRNA target sequence for Slc26a8 (NM_146076.1,364-382).
gtgtacaacgaggagaatt

SEQ ID NO: 643826 - DNA, 19 bp, Mus musculus
  siRNA target sequence for Slc26a8 (NM_146076.1,419-437).
ggaacgtggacatcgatat

SEQ ID NO: 643827 - DNA, 19 bp, Mus musculus
  siRNA target sequence for Slc26a8 (NM_146076.1,517-535).
ctggagtggatatgtttgt

SEQ ID NO: 643828 - DNA, 19 bp, Mus musculus
  siRNA target sequence for Slc26a8 (NM_146076.1,524-542).
ggatatgtttgtatcgatt

SEQ ID NO: 643829 - DNA, 19 bp, Mus musculus
  siRNA target sequence for Slc26a8 (NM_146076.1,552-570).
gcttcttggagacttactt

SEQ ID NO: 643830 - DNA, 19 bp, Mus musculus
  siRNA target sequence for Slc26a8 (NM_146076.1,603-621).
ccaaggcctgatacttagt

SEQ ID NO: 643831 - DNA, 19 bp, Mus musculus
  siRNA target sequence for Slc26a8 (NM_146076.1,608-626).
gcctgatacttagtttact

SEQ ID NO: 643832 - DNA, 19 bp, Mus musculus
  siRNA target sequence for Slc26a8 (NM_146076.1,644-662).
ctcccctcaacgtcactta

SEQ ID NO: 643833 - DNA, 19 bp, Mus musculus
  siRNA target sequence for Slc26a8 (NM_146076.1,741-759).
gagtgctctgatgatcaat

SEQ ID NO: 643834 - DNA, 19 bp, Mus musculus
  siRNA target sequence for Slc26a8 (NM_146076.1,743-761).
gtgctctgatgatcaatgt

SEQ ID NO: 643835 - DNA, 19 bp, Mus musculus
  siRNA target sequence for Slc26a8 (NM_146076.1,801-819).
gggaacttttgtcaaagat

SEQ ID NO: 643836 - DNA, 19 bp, Mus musculus
  siRNA target sequence for Slc26a8 (NM_146076.1,803-821).
gaacttttgtcaaagatga

SEQ ID NO: 643837 - DNA, 19 bp, Mus musculus
  siRNA target sequence for Slc26a8 (NM_146076.1,827-845).
ctgtccccacattctactt

SEQ ID NO: 643838 - DNA, 19 bp, Mus musculus
  siRNA target sequence for Slc26a8 (NM_146076.1,846-864).
gagctacaacagatcctta

SEQ ID NO: 643839 - DNA, 19 bp, Mus musculus
  siRNA target sequence for Slc26a8 (NM_146076.1,884-902).
ctttcctgactgggattat

SEQ ID NO: 643840 - DNA, 19 bp, Mus musculus
  siRNA target sequence for Slc26a8 (NM_146076.1,896-914).
ggattattcagctgtcaat

SEQ ID NO: 643841 - DNA, 19 bp, Mus musculus
  siRNA target sequence for Slc26a8 (NM_146076.1,932-950).
gcttcatggccacatatct

SEQ ID NO: 643842 - DNA, 19 bp, Mus musculus
  siRNA target sequence for Slc26a8 (NM_146076.1,933-951).
cttcatggccacatatctt

SEQ ID NO: 643843 - DNA, 19 bp, Mus musculus
  siRNA target sequence for Slc26a8 (NM_146076.1,1016-1034).
catgcatcttggggattat

SEQ ID NO: 643844 - DNA, 19 bp, Mus musculus
  siRNA target sequence for Slc26a8 (NM_146076.1,1052-1070).
ggcccatctccttcatcta

SEQ ID NO: 643845 - DNA, 19 bp, Mus musculus
  siRNA target sequence for Slc26a8 (NM_146076.1,1059-1077).
ctccttcatctacaacata

SEQ ID NO: 643846 - DNA, 19 bp, Mus musculus
  siRNA target sequence for Slc26a8 (NM_146076.1,1225-1243).
cttggcttcagcttactta

SEQ ID NO: 643847 - DNA, 19 bp, Mus musculus
  siRNA target sequence for Slc26a8 (NM_146076.1,1228-1246).
ggcttcagcttacttacaa

SEQ ID NO: 643848 - DNA, 19 bp, Mus musculus
  siRNA target sequence for Slc26a8 (NM_146076.1,1236-1254).
cttacttacaagcaagata

SEQ ID NO: 643849 - DNA, 19 bp, Mus musculus
  siRNA target sequence for Slc26a8 (NM_146076.1,1240-1258).
cttacaagcaagataacca

SEQ ID NO: 643850 - DNA, 19 bp, Mus musculus
  siRNA target sequence for Slc26a8 (NM_146076.1,1305-1323).
cttcgtgttccctgagaat

SEQ ID NO: 643851 - DNA, 19 bp, Mus musculus
  siRNA target sequence for Slc26a8 (NM_146076.1,1324-1342).
ccagagttcggcattctta

SEQ ID NO: 643852 - DNA, 19 bp, Mus musculus
  siRNA target sequence for Slc26a8 (NM_146076.1,1380-1398).
gagctcctttctgcttata

SEQ ID NO: 643853 - DNA, 19 bp, Mus musculus
  siRNA target sequence for Slc26a8 (NM_146076.1,1425-1443).
ccataactacagaaccaat

SEQ ID NO: 643854 - DNA, 19 bp, Mus musculus
  siRNA target sequence for Slc26a8 (NM_146076.1,1426-1444).
cataactacagaaccaatt

SEQ ID NO: 643855 - DNA, 19 bp, Mus musculus
  siRNA target sequence for Slc26a8 (NM_146076.1,1505-1523).
gtgtgttcaccggtagttt

SEQ ID NO: 643856 - DNA, 19 bp, Mus musculus
  siRNA target sequence for Slc26a8 (NM_146076.1,1507-1525).
gtgttcaccggtagtttgt

SEQ ID NO: 643857 - DNA, 19 bp, Mus musculus
  siRNA target sequence for Slc26a8 (NM_146076.1,1533-1551).
gactatccaggacaaatct

SEQ ID NO: 643858 - DNA, 19 bp, Mus musculus
  siRNA target sequence for Slc26a8 (NM_146076.1,1650-1668).
gctggctgggatcatctta

SEQ ID NO: 643859 - DNA, 19 bp, Mus musculus
  siRNA target sequence for Slc26a8 (NM_146076.1,1654-1672).
gctgggatcatcttaagca

SEQ ID NO: 643860 - DNA, 19 bp, Mus musculus
  siRNA target sequence for Slc26a8 (NM_146076.1,1655-1673).
ctgggatcatcttaagcaa

SEQ ID NO: 643861 - DNA, 19 bp, Mus musculus
  siRNA target sequence for Slc34a2 (NM_011402.1,51-69).
ccttggcccgagttggaaa

SEQ ID NO: 643862 - DNA, 19 bp, Mus musculus
  siRNA target sequence for Slc34a2 (NM_011402.1,75-93).
cagcccaaccccggtaaat

SEQ ID NO: 643863 - DNA, 19 bp, Mus musculus
  siRNA target sequence for Slc34a2 (NM_011402.1,78-96).
cccaaccccggtaaattca

SEQ ID NO: 643864 - DNA, 19 bp, Mus musculus
  siRNA target sequence for Slc34a2 (NM_011402.1,79-97).
ccaaccccggtaaattcat

SEQ ID NO: 643865 - DNA, 19 bp, Mus musculus
  siRNA target sequence for Slc34a2 (NM_011402.1,147-165).
gccagcaaaacaaatgaca

SEQ ID NO: 643866 - DNA, 19 bp, Mus musculus
  siRNA target sequence for Slc34a2 (NM_011402.1,208-226).
ccgccctggttctcataga

SEQ ID NO: 643867 - DNA, 19 bp, Mus musculus
  siRNA target sequence for Slc34a2 (NM_011402.1,330-348).
cagggggttgggaagttca

SEQ ID NO: 643868 - DNA, 19 bp, Mus musculus
  siRNA target sequence for Slc34a2 (NM_011402.1,334-352).
gggttgggaagttcattct

SEQ ID NO: 643869 - DNA, 19 bp, Mus musculus
  siRNA target sequence for Slc34a2 (NM_011402.1,351-369).
cttctcctggggtttctct

SEQ ID NO: 643870 - DNA, 19 bp, Mus musculus
  siRNA target sequence for Slc34a2 (NM_011402.1,452-470).
caactccatcatgtctaat

SEQ ID NO: 643871 - DNA, 19 bp, Mus musculus
  siRNA target sequence for Slc34a2 (NM_011402.1,455-473).
ctccatcatgtctaatcct

SEQ ID NO: 643872 - DNA, 19 bp, Mus musculus
  siRNA target sequence for Slc34a2 (NM_011402.1,634-652).
cgatcgtggcgcttatgca

SEQ ID NO: 643873 - DNA, 19 bp, Mus musculus
  siRNA target sequence for Slc34a2 (NM_011402.1,688-706).
caggagccactgttcatga

SEQ ID NO: 643874 - DNA, 19 bp, Mus musculus
  siRNA target sequence for Slc34a2 (NM_011402.1,691-709).
gagccactgttcatgactt

SEQ ID NO: 643875 - DNA, 19 bp, Mus musculus
  siRNA target sequence for Slc34a2 (NM_011402.1,944-962).
gatctggtgtaaaagtata

SEQ ID NO: 643876 - DNA, 19 bp, Mus musculus
  siRNA target sequence for Slc34a2 (NM_011402.1,949-967).
ggtgtaaaagtataaccaa

SEQ ID NO: 643877 - DNA, 19 bp, Mus musculus
  siRNA target sequence for Slc34a2 (NM_011402.1,950-968).
gtgtaaaagtataaccaat

SEQ ID NO: 643878 - DNA, 19 bp, Mus musculus
  siRNA target sequence for Slc34a2 (NM_011402.1,988-1006).
ccgtcccctcgactgataa

SEQ ID NO: 643879 - DNA, 19 bp, Mus musculus
  siRNA target sequence for Slc34a2 (NM_011402.1,990-1008).
gtcccctcgactgataact

SEQ ID NO: 643880 - DNA, 19 bp, Mus musculus
  siRNA target sequence for Slc34a2 (NM_011402.1,1098-1116).
cacatcttcgtgaacttca

SEQ ID NO: 643881 - DNA, 19 bp, Mus musculus
  siRNA target sequence for Slc34a2 (NM_011402.1,1134-1152).
gtgggcatcatcttgctta

SEQ ID NO: 643882 - DNA, 19 bp, Mus musculus
  siRNA target sequence for Slc34a2 (NM_011402.1,1177-1195).
gctgtctgatcatgatagt

SEQ ID NO: 643883 - DNA, 19 bp, Mus musculus
  siRNA target sequence for Slc34a2 (NM_011402.1,1180-1198).
gtctgatcatgatagtcaa

SEQ ID NO: 643884 - DNA, 19 bp, Mus musculus
  siRNA target sequence for Slc34a2 (NM_011402.1,1227-1245).
gtcgctactgtcatcaaga

SEQ ID NO: 643885 - DNA, 19 bp, Mus musculus
  siRNA target sequence for Slc34a2 (NM_011402.1,1394-1412).
cattgagagggcatatcca

SEQ ID NO: 643886 - DNA, 19 bp, Mus musculus
  siRNA target sequence for Slc34a2 (NM_011402.1,1448-1466).
cgccattctggctgcttta

SEQ ID NO: 643887 - DNA, 19 bp, Mus musculus
  siRNA target sequence for Slc34a2 (NM_011402.1,1529-1547).
catctctggaatattgctt

SEQ ID NO: 643888 - DNA, 19 bp, Mus musculus
  siRNA target sequence for Slc34a2 (NM_011402.1,1621-1639).
gctggttcgcagtcttcta

SEQ ID NO: 643889 - DNA, 19 bp, Mus musculus
  siRNA target sequence for Slc34a2 (NM_011402.1,1622-1640).
ctggttcgcagtcttctat

SEQ ID NO: 643890 - DNA, 19 bp, Mus musculus
  siRNA target sequence for Slc34a2 (NM_011402.1,1624-1642).
ggttcgcagtcttctatct

SEQ ID NO: 643891 - DNA, 19 bp, Mus musculus
  siRNA target sequence for Slc34a2 (NM_011402.1,1805-1823).
ccgggactggaatttccta

SEQ ID NO: 643892 - DNA, 19 bp, Mus musculus
  siRNA target sequence for Slc34a3 (NM_080854.1,137-155).
ggaccggagtctgagaaat

SEQ ID NO: 643893 - DNA, 19 bp, Mus musculus
  siRNA target sequence for Slc34a3 (NM_080854.1,227-245).
gaacgctgaccaactgaaa

SEQ ID NO: 643894 - DNA, 19 bp, Mus musculus
  siRNA target sequence for Slc34a3 (NM_080854.1,363-381).
cagctactaggcagcaaaa

SEQ ID NO: 643895 - DNA, 19 bp, Mus musculus
  siRNA target sequence for Slc34a3 (NM_080854.1,612-630).
gaccgggatgaatttcaga

SEQ ID NO: 643896 - DNA, 19 bp, Mus musculus
  siRNA target sequence for Slc34a3 (NM_080854.1,649-667).
ccgtgcatggcatcttcaa

SEQ ID NO: 643897 - DNA, 19 bp, Mus musculus
  siRNA target sequence for Slc34a3 (NM_080854.1,670-688).
ggctcacagtattggtatt

SEQ ID NO: 643898 - DNA, 19 bp, Mus musculus
  siRNA target sequence for Slc34a3 (NM_080854.1,701-719).
gagtgccaccgcagcatta

SEQ ID NO: 643899 - DNA, 19 bp, Mus musculus
  siRNA target sequence for Slc34a3 (NM_080854.1,705-723).
gccaccgcagcattagaga

SEQ ID NO: 643900 - DNA, 19 bp, Mus musculus
  siRNA target sequence for Slc34a3 (NM_080854.1,831-849).
gatagcagtgtgataacca

SEQ ID NO: 643901 - DNA, 19 bp, Mus musculus
  siRNA target sequence for Slc34a3 (NM_080854.1,840-858).
gtgataaccagcggtatta

SEQ ID NO: 643902 - DNA, 19 bp, Mus musculus
  siRNA target sequence for Slc34a3 (NM_080854.1,1013-1031).
cctgtttgccggctcaaaa

SEQ ID NO: 643903 - DNA, 19 bp, Mus musculus
  siRNA target sequence for Slc34a3 (NM_080854.1,1159-1177).
ctgttatcaatgcagattt

SEQ ID NO: 643904 - DNA, 19 bp, Mus musculus
  siRNA target sequence for Slc15a2 (NM_021301.1,195-213).
gagccagccatgaatcctt

SEQ ID NO: 643905 - DNA, 19 bp, Mus musculus
  siRNA target sequence for Slc15a2 (NM_021301.1,210-228).
cctttccagaaaaatgagt

SEQ ID NO: 643906 - DNA, 19 bp, Mus musculus
  siRNA target sequence for Slc15a2 (NM_021301.1,360-378).
gaattctgcgagcgatttt

SEQ ID NO: 643907 - DNA, 19 bp, Mus musculus
  siRNA target sequence for Slc15a2 (NM_021301.1,365-383).
ctgcgagcgattttcctat

SEQ ID NO: 643908 - DNA, 19 bp, Mus musculus
  siRNA target sequence for Slc15a2 (NM_021301.1,367-385).
gcgagcgattttcctatta

SEQ ID NO: 643909 - DNA, 19 bp, Mus musculus
  siRNA target sequence for Slc15a2 (NM_021301.1,368-386).
cgagcgattttcctattat

SEQ ID NO: 643910 - DNA, 19 bp, Mus musculus
  siRNA target sequence for Slc15a2 (NM_021301.1,397-415).
ctgtgttgaccttgtattt

SEQ ID NO: 643911 - DNA, 19 bp, Mus musculus
  siRNA target sequence for Slc15a2 (NM_021301.1,520-538).
cctggctgggaaaattcaa

SEQ ID NO: 643912 - DNA, 19 bp, Mus musculus
  siRNA target sequence for Slc15a2 (NM_021301.1,570-588).
cttggccatgtattcaagt

SEQ ID NO: 643913 - DNA, 19 bp, Mus musculus
  siRNA target sequence for Slc15a2 (NM_021301.1,573-591).
ggccatgtattcaagtctt

SEQ ID NO: 643914 - DNA, 19 bp, Mus musculus
  siRNA target sequence for Slc15a2 (NM_021301.1,612-630).
ggaggaaaaatgctacata

SEQ ID NO: 643915 - DNA, 19 bp, Mus musculus
  siRNA target sequence for Slc15a2 (NM_021301.1,616-634).
gaaaaatgctacatacaat

SEQ ID NO: 643916 - DNA, 19 bp, Mus musculus
  siRNA target sequence for Slc15a2 (NM_021301.1,623-641).
gctacatacaatcttatca

SEQ ID NO: 643917 - DNA, 19 bp, Mus musculus
  siRNA target sequence for Slc15a2 (NM_021301.1,624-642).
ctacatacaatcttatcat

SEQ ID NO: 643918 - DNA, 19 bp, Mus musculus
  siRNA target sequence for Slc15a2 (NM_021301.1,668-686).
gggaacaggaggtatcaaa

SEQ ID NO: 643919 - DNA, 19 bp, Mus musculus
  siRNA target sequence for Slc15a2 (NM_021301.1,733-751).
cagaggcacggactagata

SEQ ID NO: 643920 - DNA, 19 bp, Mus musculus
  siRNA target sequence for Slc15a2 (NM_021301.1,735-753).
gaggcacggactagatact

SEQ ID NO: 643921 - DNA, 19 bp, Mus musculus
  siRNA target sequence for Slc15a2 (NM_021301.1,738-756).
gcacggactagatacttct

SEQ ID NO: 643922 - DNA, 19 bp, Mus musculus
  siRNA target sequence for Slc15a2 (NM_021301.1,748-766).
gatacttctcggtcttcta

SEQ ID NO: 643923 - DNA, 19 bp, Mus musculus
  siRNA target sequence for Slc15a2 (NM_021301.1,776-794).
caatgcagggagcttgatt

SEQ ID NO: 643924 - DNA, 19 bp, Mus musculus
  siRNA target sequence for Slc15a2 (NM_021301.1,820-838).
gaggggatgtgaagtgttt

SEQ ID NO: 643925 - DNA, 19 bp, Mus musculus
  siRNA target sequence for Slc15a2 (NM_021301.1,841-859).
gcgaagactgctatgcatt

SEQ ID NO: 643926 - DNA, 19 bp, Mus musculus
  siRNA target sequence for Slc15a2 (NM_021301.1,884-902).
catggtgctggcacttgtt

SEQ ID NO: 643927 - DNA, 19 bp, Mus musculus
  siRNA target sequence for Slc15a2 (NM_021301.1,957-975).
gtggctcaagttaccaaat

SEQ ID NO: 643928 - DNA, 19 bp, Mus musculus
  siRNA target sequence for Slc15a2 (NM_021301.1,966-984).
gttaccaaatgtatatggt

SEQ ID NO: 643929 - DNA, 19 bp, Mus musculus
  siRNA target sequence for Slc15a2 (NM_021301.1,1022-1040).
cattccaaagcgacaacat

SEQ ID NO: 643930 - DNA, 19 bp, Mus musculus
  siRNA target sequence for Slc15a2 (NM_021301.1,1069-1087).
caaagcacctcattatgga

SEQ ID NO: 643931 - DNA, 19 bp, Mus musculus
  siRNA target sequence for Slc15a2 (NM_021301.1,1172-1190).
gactctgcaagctaacaaa

SEQ ID NO: 643932 - DNA, 19 bp, Mus musculus
  siRNA target sequence for Slc15a2 (NM_021301.1,1194-1212).
gatggcgatttgggatttt

SEQ ID NO: 643933 - DNA, 19 bp, Mus musculus
  siRNA target sequence for Slc15a2 (NM_021301.1,1277-1295).
gtttgaccttgtcatttat

SEQ ID NO: 643934 - DNA, 19 bp, Mus musculus
  siRNA target sequence for Slc15a2 (NM_021301.1,1306-1324).
ccaagtgcggagttaactt

SEQ ID NO: 643935 - DNA, 19 bp, Mus musculus
  siRNA target sequence for Slc15a2 (NM_021301.1,1378-1396).
cagttgcagcgcttgtaga

SEQ ID NO: 643936 - DNA, 19 bp, Mus musculus
  siRNA target sequence for Slc15a2 (NM_021301.1,1383-1401).
gcagcgcttgtagagataa

SEQ ID NO: 643937 - DNA, 19 bp, Mus musculus
  siRNA target sequence for Slc15a2 (NM_021301.1,1384-1402).
cagcgcttgtagagataaa

SEQ ID NO: 643938 - DNA, 19 bp, Mus musculus
  siRNA target sequence for Slc15a2 (NM_021301.1,1487-1505).
gacagtgcagggaaacaga

SEQ ID NO: 643939 - DNA, 19 bp, Mus musculus
  siRNA target sequence for Slc15a2 (NM_021301.1,1493-1511).
gcagggaaacagaaataat

SEQ ID NO: 643940 - DNA, 19 bp, Mus musculus
  siRNA target sequence for Slc15a2 (NM_021301.1,1547-1565).
cacaacacactattcgaaa

SEQ ID NO: 643941 - DNA, 19 bp, Mus musculus
  siRNA target sequence for Slc15a2 (NM_021301.1,1577-1595).
gacaaaaagccaagactta

SEQ ID NO: 643942 - DNA, 19 bp, Mus musculus
  siRNA target sequence for Slc15a2 (NM_021301.1,1602-1620).
catctgaagtacaacaact

SEQ ID NO: 643943 - DNA, 19 bp, Mus musculus
  siRNA target sequence for Slc15a2 (NM_021301.1,1812-1830).
ctcagcgtgggcaaagact

SEQ ID NO: 643944 - DNA, 19 bp, Mus musculus
  siRNA target sequence for Slc15a2 (NM_021301.1,1814-1832).
cagcgtgggcaaagactat

SEQ ID NO: 643945 - DNA, 19 bp, Mus musculus
  siRNA target sequence for Slc15a2 (NM_021301.1,1887-1905).
gaaacggaagacaatgtct

SEQ ID NO: 643946 - DNA, 19 bp, Mus musculus
  siRNA target sequence for Slc15a2 (NM_021301.1,1904-1922).
cttttctctcaatttaggt

SEQ ID NO: 643947 - DNA, 19 bp, Mus musculus
  siRNA target sequence for Slc15a2 (NM_021301.1,1920-1938).
ggtcaactagactttggta

SEQ ID NO: 643948 - DNA, 19 bp, Mus musculus
  siRNA target sequence for Slc15a2 (NM_021301.1,1929-1947).
gactttggtacaacatatt

SEQ ID NO: 643949 - DNA, 19 bp, Mus musculus
  siRNA target sequence for Slc15a2 (NM_021301.1,2003-2021).
cattccagccaataaacta

SEQ ID NO: 643950 - DNA, 19 bp, Mus musculus
  siRNA target sequence for Slc15a2 (NM_021301.1,2112-2130).
gcaccatctagcatgaaat

SEQ ID NO: 643951 - DNA, 19 bp, Mus musculus
  siRNA target sequence for Slc15a2 (NM_021301.1,2116-2134).
catctagcatgaaatctgt

SEQ ID NO: 643952 - DNA, 19 bp, Mus musculus
  siRNA target sequence for Slc15a2 (NM_021301.1,2158-2176).
ccgttgcagttgggaatat

SEQ ID NO: 643953 - DNA, 19 bp, Mus musculus
  siRNA target sequence for Slc15a2 (NM_021301.1,2159-2177).
cgttgcagttgggaatatt

SEQ ID NO: 643954 - DNA, 19 bp, Mus musculus
  siRNA target sequence for Slc15a2 (NM_021301.1,2160-2178).
gttgcagttgggaatatta

SEQ ID NO: 643955 - DNA, 19 bp, Mus musculus
  siRNA target sequence for Slc15a2 (NM_021301.1,2164-2182).
cagttgggaatattattgt

SEQ ID NO: 643956 - DNA, 19 bp, Mus musculus
  siRNA target sequence for Slc15a2 (NM_021301.1,2272-2290).
ccgtcatgggctactacta

SEQ ID NO: 643957 - DNA, 19 bp, Mus musculus
  siRNA target sequence for Slc15a2 (NM_021301.1,2273-2291).
cgtcatgggctactactat

SEQ ID NO: 643958 - DNA, 19 bp, Mus musculus
  siRNA target sequence for Slc15a2 (NM_021301.1,2341-2359).
ctcacatccaggggaatat

SEQ ID NO: 643959 - DNA, 19 bp, Mus musculus
  siRNA target sequence for Slc15a1 (NM_053079.1,88-106).
cgtggtcaatgaattctgt

SEQ ID NO: 643960 - DNA, 19 bp, Mus musculus
  siRNA target sequence for Slc15a1 (NM_053079.1,132-150).
gagcactcctggttctgta

SEQ ID NO: 643961 - DNA, 19 bp, Mus musculus
  siRNA target sequence for Slc15a1 (NM_053079.1,135-153).
cactcctggttctgtactt

SEQ ID NO: 643962 - DNA, 19 bp, Mus musculus
  siRNA target sequence for Slc15a1 (NM_053079.1,167-185).
ggctgggacgacaatctct

SEQ ID NO: 643963 - DNA, 19 bp, Mus musculus
  siRNA target sequence for Slc15a1 (NM_053079.1,184-202).
ctccacggccatttaccat

SEQ ID NO: 643964 - DNA, 19 bp, Mus musculus
  siRNA target sequence for Slc15a1 (NM_053079.1,189-207).
cggccatttaccatacgtt

SEQ ID NO: 643965 - DNA, 19 bp, Mus musculus
  siRNA target sequence for Slc15a1 (NM_053079.1,217-235).
ctgctacctgactccaatt

SEQ ID NO: 643966 - DNA, 19 bp, Mus musculus
  siRNA target sequence for Slc15a1 (NM_053079.1,219-237).
gctacctgactccaattct

SEQ ID NO: 643967 - DNA, 19 bp, Mus musculus
  siRNA target sequence for Slc15a1 (NM_053079.1,265-283).
ggggaagttcaagacaatt

SEQ ID NO: 643968 - DNA, 19 bp, Mus musculus
  siRNA target sequence for Slc15a1 (NM_053079.1,271-289).
gttcaagacaattgtttca

SEQ ID NO: 643969 - DNA, 19 bp, Mus musculus
  siRNA target sequence for Slc15a1 (NM_053079.1,279-297).
caattgtttcactatccat

SEQ ID NO: 643970 - DNA, 19 bp, Mus musculus
  siRNA target sequence for Slc15a1 (NM_053079.1,322-340).
catctcggtgagctcaatt

SEQ ID NO: 643971 - DNA, 19 bp, Mus musculus
  siRNA target sequence for Slc15a1 (NM_053079.1,325-343).
ctcggtgagctcaattaat

SEQ ID NO: 643972 - DNA, 19 bp, Mus musculus
  siRNA target sequence for Slc15a1 (NM_053079.1,327-345).
cggtgagctcaattaatga

SEQ ID NO: 643973 - DNA, 19 bp, Mus musculus
  siRNA target sequence for Slc15a1 (NM_053079.1,465-483).
cgtttggtggcgatcagtt

SEQ ID NO: 643974 - DNA, 19 bp, Mus musculus
  siRNA target sequence for Slc15a1 (NM_053079.1,503-521).
cagcgaaaccggttctttt

SEQ ID NO: 643975 - DNA, 19 bp, Mus musculus
  siRNA target sequence for Slc15a1 (NM_053079.1,506-524).
cgaaaccggttcttttcca

SEQ ID NO: 643976 - DNA, 19 bp, Mus musculus
  siRNA target sequence for Slc15a1 (NM_053079.1,554-572).
ctgctctccacgatcatca

SEQ ID NO: 643977 - DNA, 19 bp, Mus musculus
  siRNA target sequence for Slc15a1 (NM_053079.1,598-616).
cggaatccacagtcaacaa

SEQ ID NO: 643978 - DNA, 19 bp, Mus musculus
  siRNA target sequence for Slc15a1 (NM_053079.1,655-673).
catggctgttgccctaatt

SEQ ID NO: 643979 - DNA, 19 bp, Mus musculus
  siRNA target sequence for Slc15a1 (NM_053079.1,660-678).
ctgttgccctaattgtgtt

SEQ ID NO: 643980 - DNA, 19 bp, Mus musculus
  siRNA target sequence for Slc15a1 (NM_053079.1,687-705).
gcagtggaatgtacaagaa

SEQ ID NO: 643981 - DNA, 19 bp, Mus musculus
  siRNA target sequence for Slc15a1 (NM_053079.1,690-708).
gtggaatgtacaagaagtt

SEQ ID NO: 643982 - DNA, 19 bp, Mus musculus
  siRNA target sequence for Slc15a1 (NM_053079.1,710-728).
cagccccagggcaacatca

SEQ ID NO: 643983 - DNA, 19 bp, Mus musculus
  siRNA target sequence for Slc15a1 (NM_053079.1,737-755).
gtggccaagtgcattggtt

SEQ ID NO: 643984 - DNA, 19 bp, Mus musculus
  siRNA target sequence for Slc15a1 (NM_053079.1,739-757).
ggccaagtgcattggtttt

SEQ ID NO: 643985 - DNA, 19 bp, Mus musculus
  siRNA target sequence for Slc15a1 (NM_053079.1,771-789).
ggtttcggcaccgaagtaa

SEQ ID NO: 643986 - DNA, 19 bp, Mus musculus
  siRNA target sequence for Slc15a1 (NM_053079.1,846-864).
ggctcatctcacagattaa

SEQ ID NO: 643987 - DNA, 19 bp, Mus musculus
  siRNA target sequence for Slc15a1 (NM_053079.1,848-866).
ctcatctcacagattaaga

SEQ ID NO: 643988 - DNA, 19 bp, Mus musculus
  siRNA target sequence for Slc15a1 (NM_053079.1,949-967).
gcaagcaacgaccatgaat

SEQ ID NO: 643989 - DNA, 19 bp, Mus musculus
  siRNA target sequence for Slc15a1 (NM_053079.1,957-975).
cgaccatgaatgggaaaat

SEQ ID NO: 643990 - DNA, 19 bp, Mus musculus
  siRNA target sequence for Slc15a1 (NM_053079.1,958-976).
gaccatgaatgggaaaatt

SEQ ID NO: 643991 - DNA, 19 bp, Mus musculus
  siRNA target sequence for Slc15a1 (NM_053079.1,1158-1176).
caattgtgcaggtggaaat

SEQ ID NO: 643992 - DNA, 19 bp, Mus musculus
  siRNA target sequence for Slc15a1 (NM_053079.1,1165-1183).
gcaggtggaaatcgataaa

SEQ ID NO: 643993 - DNA, 19 bp, Mus musculus
  siRNA target sequence for Slc15a1 (NM_053079.1,1166-1184).
caggtggaaatcgataaaa

SEQ ID NO: 643994 - DNA, 19 bp, Mus musculus
  siRNA target sequence for Slc15a1 (NM_053079.1,1168-1186).
ggtggaaatcgataaaact

SEQ ID NO: 643995 - DNA, 19 bp, Mus musculus
  siRNA target sequence for Slc15a1 (NM_053079.1,1203-1221).
gtggaaatcaagtccaaat

SEQ ID NO: 643996 - DNA, 19 bp, Mus musculus
  siRNA target sequence for Slc15a1 (NM_053079.1,1249-1267).
catgaccgtgcattttcct

SEQ ID NO: 643997 - DNA, 19 bp, Mus musculus
  siRNA target sequence for Slc15a1 (NM_053079.1,1279-1297).
gacgcttgcccaaatgtct

SEQ ID NO: 643998 - DNA, 19 bp, Mus musculus
  siRNA target sequence for Slc15a1 (NM_053079.1,1298-1316).
cagacagacacgttcatga

SEQ ID NO: 643999 - DNA, 19 bp, Mus musculus
  siRNA target sequence for Slc15a1 (NM_053079.1,1306-1324).
cacgttcatgactttcgat

SEQ ID NO: 644000 - DNA, 19 bp, Mus musculus
  siRNA target sequence for Slc15a1 (NM_053079.1,1308-1326).
cgttcatgactttcgatat

SEQ ID NO: 644001 - DNA, 19 bp, Mus musculus
  siRNA target sequence for Slc15a1 (NM_053079.1,1309-1327).
gttcatgactttcgatata

SEQ ID NO: 644002 - DNA, 19 bp, Mus musculus
  siRNA target sequence for Slc15a1 (NM_053079.1,1333-1351).
gctgacaagcataaacata

SEQ ID NO: 644003 - DNA, 19 bp, Mus musculus
  siRNA target sequence for Slc15a1 (NM_053079.1,1375-1393).
caccacagtagctcatgat

SEQ ID NO: 644004 - DNA, 19 bp, Mus musculus
  siRNA target sequence for Slc15a1 (NM_053079.1,1534-1552).
caaaatgagtgggaaagta

SEQ ID NO: 644005 - DNA, 19 bp, Mus musculus
  siRNA target sequence for Slc15a1 (NM_053079.1,1607-1625).
gaaaagcagtacacaataa

SEQ ID NO: 644006 - DNA, 19 bp, Mus musculus
  siRNA target sequence for Slc15a1 (NM_053079.1,1637-1655).
gtggcaccaacctgtctaa

SEQ ID NO: 644007 - DNA, 19 bp, Mus musculus
  siRNA target sequence for Slc15a1 (NM_053079.1,1639-1657).
ggcaccaacctgtctaact

SEQ ID NO: 644008 - DNA, 19 bp, Mus musculus
  siRNA target sequence for Slc15a1 (NM_053079.1,1641-1659).
caccaacctgtctaactga

SEQ ID NO: 644009 - DNA, 19 bp, Mus musculus
  siRNA target sequence for Slc15a1 (NM_053079.1,1643-1661).
ccaacctgtctaactgatt

SEQ ID NO: 644010 - DNA, 19 bp, Mus musculus
  siRNA target sequence for Slc15a1 (NM_053079.1,1644-1662).
caacctgtctaactgattt

SEQ ID NO: 644011 - DNA, 19 bp, Mus musculus
  siRNA target sequence for Slc15a1 (NM_053079.1,1647-1665).
cctgtctaactgattttaa

SEQ ID NO: 644012 - DNA, 19 bp, Mus musculus
  siRNA target sequence for Slc15a1 (NM_053079.1,1648-1666).
ctgtctaactgattttaaa

SEQ ID NO: 644013 - DNA, 19 bp, Mus musculus
  siRNA target sequence for Slc15a1 (NM_053079.1,1758-1776).
cacccaacactgtgaacat

SEQ ID NO: 644014 - DNA, 19 bp, Mus musculus
  siRNA target sequence for Slc15a1 (NM_053079.1,1838-1856).
ggactggagttctcttatt

SEQ ID NO: 644015 - DNA, 19 bp, Mus musculus
  siRNA target sequence for Slc15a1 (NM_053079.1,1857-1875).
cccaggctccgtctaacat

SEQ ID NO: 644016 - DNA, 19 bp, Mus musculus
  siRNA target sequence for Slc15a1 (NM_053079.1,1859-1877).
caggctccgtctaacatga

SEQ ID NO: 644017 - DNA, 19 bp, Mus musculus
  siRNA target sequence for Slc15a1 (NM_053079.1,1862-1880).
gctccgtctaacatgaagt

SEQ ID NO: 644018 - DNA, 19 bp, Mus musculus
  siRNA target sequence for Slc15a1 (NM_053079.1,1908-1926).
ctgtggcggtcggcaatat

SEQ ID NO: 644019 - DNA, 19 bp, Mus musculus
  siRNA target sequence for Slc15a1 (NM_053079.1,1910-1928).
gtggcggtcggcaatatca

SEQ ID NO: 644020 - DNA, 19 bp, Mus musculus
  siRNA target sequence for Slc15a1 (NM_053079.1,1912-1930).
ggcggtcggcaatatcatt

SEQ ID NO: 644021 - DNA, 19 bp, Mus musculus
  siRNA target sequence for Slc15a1 (NM_053079.1,1914-1932).
cggtcggcaatatcattgt

SEQ ID NO: 644022 - DNA, 19 bp, Mus musculus
  siRNA target sequence for Slc15a1 (NM_053079.1,1952-1970).
gggcacttccccaaacagt

SEQ ID NO: 644023 - DNA, 19 bp, Mus musculus
  siRNA target sequence for Slc15a1 (NM_053079.1,2025-2043).
ccatcatggctcgattcta

SEQ ID NO: 644024 - DNA, 19 bp, Mus musculus
  siRNA target sequence for Slc15a1 (NM_053079.1,2036-2054).
cgattctacacctacatca

SEQ ID NO: 644025 - DNA, 19 bp, Mus musculus
  siRNA target sequence for Slc15a1 (NM_053079.1,2037-2055).
gattctacacctacatcaa

SEQ ID NO: 644026 - DNA, 19 bp, Mus musculus
  siRNA target sequence for Slc15a1 (NM_053079.1,2053-2071).
caacccagcagagattgaa

SEQ ID NO: 644027 - DNA, 19 bp, Mus musculus
  siRNA target sequence for Slc15a1 (NM_053079.1,2141-2159).
gtctcacagacaaatatgt

SEQ ID NO: 644028 - DNA, 19 bp, Mus musculus
  siRNA target sequence for 6720430O15 (NM_183180.1,468-486).
ccggcttccgagaaatcgt

SEQ ID NO: 644029 - DNA, 19 bp, Mus musculus
  siRNA target sequence for 6720430O15 (NM_183180.1,686-704).
ctcacccgagagttcttca

SEQ ID NO: 644030 - DNA, 19 bp, Mus musculus
  siRNA target sequence for 6720430O15 (NM_183180.1,724-742).
ctaccaaggcgataacgat

SEQ ID NO: 644031 - DNA, 19 bp, Mus musculus
  siRNA target sequence for 6720430O15 (NM_183180.1,739-757).
cgatacggatgttttctct

SEQ ID NO: 644032 - DNA, 19 bp, Mus musculus
  siRNA target sequence for 6720430O15 (NM_183180.1,940-958).
gggacggaatccgttcata

SEQ ID NO: 644033 - DNA, 19 bp, Mus musculus
  siRNA target sequence for 6720430O15 (NM_183180.1,941-959).
ggacggaatccgttcataa

SEQ ID NO: 644034 - DNA, 19 bp, Mus musculus
  siRNA target sequence for 6720430O15 (NM_183180.1,942-960).
gacggaatccgttcataaa

SEQ ID NO: 644035 - DNA, 19 bp, Mus musculus
  siRNA target sequence for 6720430O15 (NM_183180.1,944-962).
cggaatccgttcataaaca

SEQ ID NO: 644036 - DNA, 19 bp, Mus musculus
  siRNA target sequence for 6720430O15 (NM_183180.1,945-963).
ggaatccgttcataaacaa

SEQ ID NO: 644037 - DNA, 19 bp, Mus musculus
  siRNA target sequence for 6720430O15 (NM_183180.1,993-1011).
ccttcgaaacctatgtcta

SEQ ID NO: 644038 - DNA, 19 bp, Mus musculus
  siRNA target sequence for Ecm1 (NM_007899.1,237-255).
ccagcacctccatgaagta

SEQ ID NO: 644039 - DNA, 19 bp, Mus musculus
  siRNA target sequence for Ecm1 (NM_007899.1,246-264).
ccatgaagtaggttatgca

SEQ ID NO: 644040 - DNA, 19 bp, Mus musculus
  siRNA target sequence for Ecm1 (NM_007899.1,301-319).
gttgaccactctgtaactt

SEQ ID NO: 644041 - DNA, 19 bp, Mus musculus
  siRNA target sequence for Ecm1 (NM_007899.1,417-435).
cctaaaccctaatgtagat

SEQ ID NO: 644042 - DNA, 19 bp, Mus musculus
  siRNA target sequence for Ecm1 (NM_007899.1,418-436).
ctaaaccctaatgtagata

SEQ ID NO: 644043 - DNA, 19 bp, Mus musculus
  siRNA target sequence for Ecm1 (NM_007899.1,423-441).
ccctaatgtagataaagct

SEQ ID NO: 644044 - DNA, 19 bp, Mus musculus
  siRNA target sequence for Ecm1 (NM_007899.1,689-707).
ggccttctccagacaatct

SEQ ID NO: 644045 - DNA, 19 bp, Mus musculus
  siRNA target sequence for Ecm1 (NM_007899.1,725-743).
ctgagcgtcagcatgtgat

SEQ ID NO: 644046 - DNA, 19 bp, Mus musculus
  siRNA target sequence for Ecm1 (NM_007899.1,891-909).
ggatgcaatgacccaattt

SEQ ID NO: 644047 - DNA, 19 bp, Mus musculus
  siRNA target sequence for Ecm1 (NM_007899.1,964-982).
ggggaggagcgattctctt

SEQ ID NO: 644048 - DNA, 19 bp, Mus musculus
  siRNA target sequence for Ecm1 (NM_007899.1,1088-1106).
ccacaccggacaatgtcaa

SEQ ID NO: 644049 - DNA, 19 bp, Mus musculus
  siRNA target sequence for Ecm1 (NM_007899.1,1089-1107).
cacaccggacaatgtcaaa

SEQ ID NO: 644050 - DNA, 19 bp, Mus musculus
  siRNA target sequence for Ecm1 (NM_007899.1,1091-1109).
caccggacaatgtcaaaaa

SEQ ID NO: 644051 - DNA, 19 bp, Mus musculus
  siRNA target sequence for Ecm1 (NM_007899.1,1093-1111).
ccggacaatgtcaaaaaca

SEQ ID NO: 644052 - DNA, 19 bp, Mus musculus
  siRNA target sequence for Ecm1 (NM_007899.1,1094-1112).
cggacaatgtcaaaaacat

SEQ ID NO: 644053 - DNA, 19 bp, Mus musculus
  siRNA target sequence for Ecm1 (NM_007899.1,1096-1114).
gacaatgtcaaaaacatct

SEQ ID NO: 644054 - DNA, 19 bp, Mus musculus
  siRNA target sequence for Ecm1 (NM_007899.1,1291-1309).
cgggagctggctataaaga

SEQ ID NO: 644055 - DNA, 19 bp, Mus musculus
  siRNA target sequence for Ecm1 (NM_007899.1,1466-1484).
gggtccttagcaagcataa

SEQ ID NO: 644056 - DNA, 19 bp, Mus musculus
  siRNA target sequence for Ecm1 (NM_007899.1,1521-1539).
ctgctgcgagcttccatat

SEQ ID NO: 644057 - DNA, 19 bp, Mus musculus
  siRNA target sequence for Ecm1 (NM_007899.1,1524-1542).
ctgcgagcttccatatcca

SEQ ID NO: 644058 - DNA, 19 bp, Mus musculus
  siRNA target sequence for Ecm1 (NM_007899.1,1597-1615).
ggtccccggaggaattcgt

SEQ ID NO: 644059 - DNA, 19 bp, Mus musculus
  siRNA target sequence for Ecm1 (NM_007899.1,1648-1666).
cctgaagataagcaaatca

SEQ ID NO: 644060 - DNA, 19 bp, Mus musculus
  siRNA target sequence for Ecm1 (NM_007899.1,1649-1667).
ctgaagataagcaaatcaa

SEQ ID NO: 644061 - DNA, 19 bp, Mus musculus
  siRNA target sequence for Ecm1 (NM_007899.1,1659-1677).
gcaaatcaactgcttcaat

SEQ ID NO: 644062 - DNA, 19 bp, Mus musculus
  siRNA target sequence for Ecm1 (NM_007899.1,1660-1678).
caaatcaactgcttcaata

SEQ ID NO: 644063 - DNA, 19 bp, Mus musculus
  siRNA target sequence for Kcnj6 (NM_010606.1,1725-1743).
cgtggcaaacctagagaat

SEQ ID NO: 644064 - DNA, 19 bp, Mus musculus
  siRNA target sequence for Kcnj11 (NM_010602.2,465-483).
gcaacgtcgcccacaagaa

SEQ ID NO: 644065 - DNA, 19 bp, Mus musculus
  siRNA target sequence for Kcnj11 (NM_010602.2,469-487).
cgtcgcccacaagaacatt

SEQ ID NO: 644066 - DNA, 19 bp, Mus musculus
  siRNA target sequence for Kcnj11 (NM_010602.2,719-737).
gtccaggtgaccattggtt

SEQ ID NO: 644067 - DNA, 19 bp, Mus musculus
  siRNA target sequence for Kcnj11 (NM_010602.2,870-888).
gggcagaaaccctcatctt

SEQ ID NO: 644068 - DNA, 19 bp, Mus musculus
  siRNA target sequence for Kcnj11 (NM_010602.2,953-971).
ctccgaaagagcatgatca

SEQ ID NO: 644069 - DNA, 19 bp, Mus musculus
  siRNA target sequence for Kcnj11 (NM_010602.2,1252-1270).
cctagctgacgagattcta

SEQ ID NO: 644070 - DNA, 19 bp, Mus musculus
  siRNA target sequence for Kcnj11 (NM_010602.2,1253-1271).
ctagctgacgagattctat

SEQ ID NO: 644071 - DNA, 19 bp, Mus musculus
  siRNA target sequence for Kcnj12 (NM_010603.3,541-559).
ccctacagcatcgtatcat

SEQ ID NO: 644072 - DNA, 19 bp, Mus musculus
  siRNA target sequence for Kcnj12 (NM_010603.3,572-590).
ggctgcacctggttaccat

SEQ ID NO: 644073 - DNA, 19 bp, Mus musculus
  siRNA target sequence for Kcnj12 (NM_010603.3,663-681).
gaacggtcagtgcaacatt

SEQ ID NO: 644074 - DNA, 19 bp, Mus musculus
  siRNA target sequence for Kcnj12 (NM_010603.3,666-684).
cggtcagtgcaacattgaa

SEQ ID NO: 644075 - DNA, 19 bp, Mus musculus
  siRNA target sequence for Kcnj12 (NM_010603.3,667-685).
ggtcagtgcaacattgaat

SEQ ID NO: 644076 - DNA, 19 bp, Mus musculus
  siRNA target sequence for Kcnj12 (NM_010603.3,668-686).
gtcagtgcaacattgaatt

SEQ ID NO: 644077 - DNA, 19 bp, Mus musculus
  siRNA target sequence for Kcnj12 (NM_010603.3,1322-1340).
ccatcttgcacgagattga

SEQ ID NO: 644078 - DNA, 19 bp, Mus musculus
  siRNA target sequence for Kcnj12 (NM_010603.3,1323-1341).
catcttgcacgagattgat

SEQ ID NO: 644079 - DNA, 19 bp, Mus musculus
  siRNA target sequence for Kcnj12 (NM_010603.3,1524-1542).
ccagtacaagattgactat

SEQ ID NO: 644080 - DNA, 19 bp, Mus musculus
  siRNA target sequence for Kcnj12 (NM_010603.3,1525-1543).
cagtacaagattgactatt

SEQ ID NO: 644081 - DNA, 19 bp, Mus musculus
  siRNA target sequence for Kcnj14 (NM_145963.1,329-347).
gcgcttcgtcaaaaaagat

SEQ ID NO: 644082 - DNA, 19 bp, Mus musculus
  siRNA target sequence for Kcnj14 (NM_145963.1,760-778).
gcaacgagacactagtctt

SEQ ID NO: 644083 - DNA, 19 bp, Mus musculus
  siRNA target sequence for Kcnj14 (NM_145963.1,904-922).
cccccgagggtgagtacat

SEQ ID NO: 644084 - DNA, 19 bp, Mus musculus
  siRNA target sequence for Kcnj14 (NM_145963.1,929-947).
ggaccaccaggatgtagat

SEQ ID NO: 644085 - DNA, 19 bp, Mus musculus
  siRNA target sequence for Kcnj14 (NM_145963.1,981-999).
ctcgtctcccccattacca

SEQ ID NO: 644086 - DNA, 19 bp, Mus musculus
  siRNA target sequence for Kcnj14 (NM_145963.1,983-1001).
cgtctcccccattaccatt

SEQ ID NO: 644087 - DNA, 19 bp, Mus musculus
  siRNA target sequence for Kcnj14 (NM_145963.1,1018-1036).
ctgccagtccactgtatga

SEQ ID NO: 644088 - DNA, 19 bp, Mus musculus
  siRNA target sequence for Kcnj14 (NM_145963.1,1082-1100).
cattcttgaaggtatggtt

SEQ ID NO: 644089 - DNA, 19 bp, Mus musculus
  siRNA target sequence for Kcnj14 (NM_145963.1,1120-1138).
cacagtgccgctcatctta

SEQ ID NO: 644090 - DNA, 19 bp, Mus musculus
  siRNA target sequence for Kcnj14 (NM_145963.1,1198-1216).
cccagtatgaggttgacta

SEQ ID NO: 644091 - DNA, 19 bp, Mus musculus
  siRNA target sequence for Kcnj14 (NM_145963.1,1220-1238).
ccacttccatcgaacatat

SEQ ID NO: 644092 - DNA, 19 bp, Mus musculus
  siRNA target sequence for Kcnj14 (NM_145963.1,1326-1344).
ggctccctcactgcatttt

SEQ ID NO: 644093 - DNA, 19 bp, Mus musculus
  siRNA target sequence for Kcnj14 (NM_145963.1,1330-1348).
ccctcactgcattttgtta

SEQ ID NO: 644094 - DNA, 19 bp, Mus musculus
  siRNA target sequence for Kcnj14 (NM_145963.1,1442-1460).
cagcccccaagctcttaca

SEQ ID NO: 644095 - DNA, 19 bp, Mus musculus
  siRNA target sequence for Kcnj15 (NM_019664.3,252-270).
gccccactggtgaagcata

SEQ ID NO: 644096 - DNA, 19 bp, Mus musculus
  siRNA target sequence for Kcnj15 (NM_019664.3,298-316).
gaccccgagtcatgtcaaa

SEQ ID NO: 644097 - DNA, 19 bp, Mus musculus
  siRNA target sequence for Kcnj15 (NM_019664.3,300-318).
ccccgagtcatgtcaaaga

SEQ ID NO: 644098 - DNA, 19 bp, Mus musculus
  siRNA target sequence for Kcnj15 (NM_019664.3,302-320).
ccgagtcatgtcaaagagt

SEQ ID NO: 644099 - DNA, 19 bp, Mus musculus
  siRNA target sequence for Kcnj15 (NM_019664.3,313-331).
caaagagtgggcacagtaa

SEQ ID NO: 644100 - DNA, 19 bp, Mus musculus
  siRNA target sequence for Kcnj15 (NM_019664.3,326-344).
cagtaatgtgagaatcgat

SEQ ID NO: 644101 - DNA, 19 bp, Mus musculus
  siRNA target sequence for Kcnj15 (NM_019664.3,347-365).
ggtagacggaatctattta

SEQ ID NO: 644102 - DNA, 19 bp, Mus musculus
  siRNA target sequence for Kcnj15 (NM_019664.3,351-369).
gacggaatctatttactct

SEQ ID NO: 644103 - DNA, 19 bp, Mus musculus
  siRNA target sequence for Kcnj15 (NM_019664.3,388-406).
caaccgtcatcgacatgaa

SEQ ID NO: 644104 - DNA, 19 bp, Mus musculus
  siRNA target sequence for Kcnj15 (NM_019664.3,446-464).
gatgacctggtttctgttt

SEQ ID NO: 644105 - DNA, 19 bp, Mus musculus
  siRNA target sequence for Kcnj15 (NM_019664.3,476-494).
ctatgccatagcctttatt

SEQ ID NO: 644106 - DNA, 19 bp, Mus musculus
  siRNA target sequence for Kcnj15 (NM_019664.3,488-506).
ctttattcatggtgactta

SEQ ID NO: 644107 - DNA, 19 bp, Mus musculus
  siRNA target sequence for Kcnj15 (NM_019664.3,533-551).
cacaccctgcattatgaaa

SEQ ID NO: 644108 - DNA, 19 bp, Mus musculus
  siRNA target sequence for Kcnj15 (NM_019664.3,535-553).
caccctgcattatgaaagt

SEQ ID NO: 644109 - DNA, 19 bp, Mus musculus
  siRNA target sequence for Kcnj15 (NM_019664.3,679-697).
ccacattgattgagatctt

SEQ ID NO: 644110 - DNA, 19 bp, Mus musculus
  siRNA target sequence for Kcnj15 (NM_019664.3,705-723).
gggacctttctggctaaaa

SEQ ID NO: 644111 - DNA, 19 bp, Mus musculus
  siRNA target sequence for Kcnj15 (NM_019664.3,741-759).
cgagccgagaccattaagt

SEQ ID NO: 644112 - DNA, 19 bp, Mus musculus
  siRNA target sequence for Kcnj15 (NM_019664.3,829-847).
ggaagagtctcctgattca

SEQ ID NO: 644113 - DNA, 19 bp, Mus musculus
  siRNA target sequence for Kcnj15 (NM_019664.3,911-929).
caaccaggccactgtcaaa

SEQ ID NO: 644114 - DNA, 19 bp, Mus musculus
  siRNA target sequence for Kcnj15 (NM_019664.3,1136-1154).
ctactggggctttgagttt

SEQ ID NO: 644115 - DNA, 19 bp, Mus musculus
  siRNA target sequence for Kcnj15 (NM_019664.3,1183-1201).
gaaagtatgtggctgattt

SEQ ID NO: 644116 - DNA, 19 bp, Mus musculus
  siRNA target sequence for Kcnj15 (NM_019664.3,1193-1211).
ggctgatttcagtcaattt

SEQ ID NO: 644117 - DNA, 19 bp, Mus musculus
  siRNA target sequence for Kcnj2 (NM_008425.2,541-559).
gccgctttgtgaagaaaga

SEQ ID NO: 644118 - DNA, 19 bp, Mus musculus
  siRNA target sequence for Kcnj2 (NM_008425.2,542-560).
ccgctttgtgaagaaagat

SEQ ID NO: 644119 - DNA, 19 bp, Mus musculus
  siRNA target sequence for Kcnj2 (NM_008425.2,568-586).
gcaatgttcagtttatcaa

SEQ ID NO: 644120 - DNA, 19 bp, Mus musculus
  siRNA target sequence for Kcnj2 (NM_008425.2,611-629).
cctggcagacatctttact

SEQ ID NO: 644121 - DNA, 19 bp, Mus musculus
  siRNA target sequence for Kcnj2 (NM_008425.2,612-630).
ctggcagacatctttacta

SEQ ID NO: 644122 - DNA, 19 bp, Mus musculus
  siRNA target sequence for Kcnj2 (NM_008425.2,731-749).
gctccatggggatctagat

SEQ ID NO: 644123 - DNA, 19 bp, Mus musculus
  siRNA target sequence for Kcnj2 (NM_008425.2,732-750).
ctccatggggatctagata

SEQ ID NO: 644124 - DNA, 19 bp, Mus musculus
  siRNA target sequence for Kcnj2 (NM_008425.2,734-752).
ccatggggatctagatact

SEQ ID NO: 644125 - DNA, 19 bp, Mus musculus
  siRNA target sequence for Kcnj2 (NM_008425.2,735-753).
catggggatctagatactt

SEQ ID NO: 644126 - DNA, 19 bp, Mus musculus
  siRNA target sequence for Kcnj2 (NM_008425.2,890-908).
ggtattccagtcaatcgta

SEQ ID NO: 644127 - DNA, 19 bp, Mus musculus
  siRNA target sequence for Kcnj2 (NM_008425.2,973-991).
gaaatgagactcttgtctt

SEQ ID NO: 644128 - DNA, 19 bp, Mus musculus
  siRNA target sequence for Kcnj2 (NM_008425.2,1040-1058).
gtggagagtgggtaacctt

SEQ ID NO: 644129 - DNA, 19 bp, Mus musculus
  siRNA target sequence for Kcnj2 (NM_008425.2,1045-1063).
gagtgggtaaccttcgaaa

SEQ ID NO: 644130 - DNA, 19 bp, Mus musculus
  siRNA target sequence for Kcnj2 (NM_008425.2,1088-1106).
ccgggcacagcttctcaaa

SEQ ID NO: 644131 - DNA, 19 bp, Mus musculus
  siRNA target sequence for Kcnj2 (NM_008425.2,1089-1107).
cgggcacagcttctcaaat

SEQ ID NO: 644132 - DNA, 19 bp, Mus musculus
  siRNA target sequence for Kcnj2 (NM_008425.2,1101-1119).
ctcaaatctaggatcactt

SEQ ID NO: 644133 - DNA, 19 bp, Mus musculus
  siRNA target sequence for Kcnj2 (NM_008425.2,1145-1163).
ccagatagacatcaatgtt

SEQ ID NO: 644134 - DNA, 19 bp, Mus musculus
  siRNA target sequence for Kcnj2 (NM_008425.2,1174-1192).
gtggaattgaccgcatatt

SEQ ID NO: 644135 - DNA, 19 bp, Mus musculus
  siRNA target sequence for Kcnj2 (NM_008425.2,1177-1195).
gaattgaccgcatatttct

SEQ ID NO: 644136 - DNA, 19 bp, Mus musculus
  siRNA target sequence for Kcnj2 (NM_008425.2,1199-1217).
gtcccccatcactatcgtt

SEQ ID NO: 644137 - DNA, 19 bp, Mus musculus
  siRNA target sequence for Kcnj2 (NM_008425.2,1208-1226).
cactatcgttcacgaaata

SEQ ID NO: 644138 - DNA, 19 bp, Mus musculus
  siRNA target sequence for Kcnj2 (NM_008425.2,1210-1228).
ctatcgttcacgaaataga

SEQ ID NO: 644139 - DNA, 19 bp, Mus musculus
  siRNA target sequence for Kcnj2 (NM_008425.2,1214-1232).
cgttcacgaaatagatgaa

SEQ ID NO: 644140 - DNA, 19 bp, Mus musculus
  siRNA target sequence for Kcnj2 (NM_008425.2,1233-1251).
gacagccctttatatgact

SEQ ID NO: 644141 - DNA, 19 bp, Mus musculus
  siRNA target sequence for Kcnj2 (NM_008425.2,1239-1257).
cctttatatgacttgagta

SEQ ID NO: 644142 - DNA, 19 bp, Mus musculus
  siRNA target sequence for Kcnj2 (NM_008425.2,1314-1332).
gaggcgactgccatgacaa

SEQ ID NO: 644143 - DNA, 19 bp, Mus musculus
  siRNA target sequence for Kcnj2 (NM_008425.2,1319-1337).
gactgccatgacaactcaa

SEQ ID NO: 644144 - DNA, 19 bp, Mus musculus
  siRNA target sequence for Kcnj2 (NM_008425.2,1348-1366).
cgtatctggccaatgaaat

SEQ ID NO: 644145 - DNA, 19 bp, Mus musculus
  siRNA target sequence for Kcnj2 (NM_008425.2,1349-1367).
gtatctggccaatgaaatt

SEQ ID NO: 644146 - DNA, 19 bp, Mus musculus
  siRNA target sequence for Kcnj2 (NM_008425.2,1412-1430).
ctactataaagtagactat

SEQ ID NO: 644147 - DNA, 19 bp, Mus musculus
  siRNA target sequence for Kcnj2 (NM_008425.2,1425-1443).
gactattcaagattccata

SEQ ID NO: 644148 - DNA, 19 bp, Mus musculus
  siRNA target sequence for Kcnj2 (NM_008425.2,1439-1457).
ccataagacttatgaagta

SEQ ID NO: 644149 - DNA, 19 bp, Mus musculus
  siRNA target sequence for Kcnj2 (NM_008425.2,1458-1476).
cctaacacccccctttgta

SEQ ID NO: 644150 - DNA, 19 bp, Mus musculus
  siRNA target sequence for Kcnj2 (NM_008425.2,1613-1631).
ctcacctcctggcatagat

SEQ ID NO: 644151 - DNA, 19 bp, Mus musculus
  siRNA target sequence for Kcnj3 (NM_008426.1,48-66).
gtctgcactccgaaggaaa

SEQ ID NO: 644152 - DNA, 19 bp, Mus musculus
  siRNA target sequence for Kcnj3 (NM_008426.1,50-68).
ctgcactccgaaggaaatt

SEQ ID NO: 644153 - DNA, 19 bp, Mus musculus
  siRNA target sequence for Kcnj3 (NM_008426.1,62-80).
ggaaatttggggacgatta

SEQ ID NO: 644154 - DNA, 19 bp, Mus musculus
  siRNA target sequence for Kcnj3 (NM_008426.1,232-250).
gagaccagtcgctaccttt

SEQ ID NO: 644155 - DNA, 19 bp, Mus musculus
  siRNA target sequence for Kcnj3 (NM_008426.1,247-265).
ctttcggacctcttcacta

SEQ ID NO: 644156 - DNA, 19 bp, Mus musculus
  siRNA target sequence for Kcnj3 (NM_008426.1,284-302).
ggcgttggaacctctttat

SEQ ID NO: 644157 - DNA, 19 bp, Mus musculus
  siRNA target sequence for Kcnj3 (NM_008426.1,286-304).
cgttggaacctctttatct

SEQ ID NO: 644158 - DNA, 19 bp, Mus musculus
  siRNA target sequence for Kcnj3 (NM_008426.1,287-305).
gttggaacctctttatctt

SEQ ID NO: 644159 - DNA, 19 bp, Mus musculus
  siRNA target sequence for Kcnj3 (NM_008426.1,413-431).
gtgtggccaatgtctataa

SEQ ID NO: 644160 - DNA, 19 bp, Mus musculus
  siRNA target sequence for Kcnj3 (NM_008426.1,490-508).
cgctacatcacagataagt

SEQ ID NO: 644161 - DNA, 19 bp, Mus musculus
  siRNA target sequence for Kcnj3 (NM_008426.1,730-748).
cgctgcaagctgctcaaat

SEQ ID NO: 644162 - DNA, 19 bp, Mus musculus
  siRNA target sequence for Kcnj3 (NM_008426.1,796-814).
ctggatgtaggttttagta

SEQ ID NO: 644163 - DNA, 19 bp, Mus musculus
  siRNA target sequence for Kcnj3 (NM_008426.1,798-816).
ggatgtaggttttagtaca

SEQ ID NO: 644164 - DNA, 19 bp, Mus musculus
  siRNA target sequence for Kcnj3 (NM_008426.1,821-839).
ccgatcaactttttcttgt

SEQ ID NO: 644165 - DNA, 19 bp, Mus musculus
  siRNA target sequence for Kcnj3 (NM_008426.1,905-923).
gcatgcaaactgaacagtt

SEQ ID NO: 644166 - DNA, 19 bp, Mus musculus
  siRNA target sequence for Kcnj3 (NM_008426.1,974-992).
gtcaagctcgaacatcata

SEQ ID NO: 644167 - DNA, 19 bp, Mus musculus
  siRNA target sequence for Kcnj3 (NM_008426.1,976-994).
caagctcgaacatcataca

SEQ ID NO: 644168 - DNA, 19 bp, Mus musculus
  siRNA target sequence for Kcnj3 (NM_008426.1,1021-1039).
cgttttttccctgtaattt

SEQ ID NO: 644169 - DNA, 19 bp, Mus musculus
  siRNA target sequence for Kcnj3 (NM_008426.1,1040-1058).
ctttagaagaaggattctt

SEQ ID NO: 644170 - DNA, 19 bp, Mus musculus
  siRNA target sequence for Kcnj3 (NM_008426.1,1052-1070).
gattctttaaagtcgatta

SEQ ID NO: 644171 - DNA, 19 bp, Mus musculus
  siRNA target sequence for Kcnj3 (NM_008426.1,1080-1098).
ccatgcaacctttgaagtt

SEQ ID NO: 644172 - DNA, 19 bp, Mus musculus
  siRNA target sequence for Kcnj3 (NM_008426.1,1146-1164).
gtcctcccctttaatagca

SEQ ID NO: 644173 - DNA, 19 bp, Mus musculus
  siRNA target sequence for Kcnj3 (NM_008426.1,1335-1353).
gggtgatttgcccatgaaa

SEQ ID NO: 644174 - DNA, 19 bp, Mus musculus
  siRNA target sequence for Kcnj3 (NM_008426.1,1337-1355).
gtgatttgcccatgaaact

SEQ ID NO: 644175 - DNA, 19 bp, Mus musculus
  siRNA target sequence for Kcnj3 (NM_008426.1,1346-1364).
ccatgaaactccaacgaat

SEQ ID NO: 644176 - DNA, 19 bp, Mus musculus
  siRNA target sequence for Kcnj3 (NM_008426.1,1347-1365).
catgaaactccaacgaata

SEQ ID NO: 644177 - DNA, 19 bp, Mus musculus
  siRNA target sequence for Kcnj3 (NM_008426.1,1350-1368).
gaaactccaacgaataagt

SEQ ID NO: 644178 - DNA, 19 bp, Mus musculus
  siRNA target sequence for Kcnj3 (NM_008426.1,1356-1374).
ccaacgaataagttcagtt

SEQ ID NO: 644179 - DNA, 19 bp, Mus musculus
  siRNA target sequence for Kcnj3 (NM_008426.1,1375-1393).
cctggcaactcggaagaaa

SEQ ID NO: 644180 - DNA, 19 bp, Mus musculus
  siRNA target sequence for Kcnj3 (NM_008426.1,1403-1421).
ctaaaaccaccaagatgtt

SEQ ID NO: 644181 - DNA, 19 bp, Mus musculus
  siRNA target sequence for Kcnj3 (NM_008426.1,1457-1475).
caccaaagcttcaaaagat

SEQ ID NO: 644182 - DNA, 19 bp, Mus musculus
  siRNA target sequence for Kcnj3 (NM_008426.1,1507-1525).
cttccagccaaactaagaa

SEQ ID NO: 644183 - DNA, 19 bp, Mus musculus
  siRNA target sequence for Kcnj3 (NM_008426.1,1530-1548).
gaactctgaccgtttcaca

SEQ ID NO: 644184 - DNA, 19 bp, Mus musculus
  siRNA target sequence for Kcnj5 (NM_010605.2,3-21).
ggccggtgattctaggaat

SEQ ID NO: 644185 - DNA, 19 bp, Mus musculus
  siRNA target sequence for Kcnj5 (NM_010605.2,7-25).
ggtgattctaggaatgcta

SEQ ID NO: 644186 - DNA, 19 bp, Mus musculus
  siRNA target sequence for Kcnj5 (NM_010605.2,168-186).
gactggcaagtgcaatgta

SEQ ID NO: 644187 - DNA, 19 bp, Mus musculus
  siRNA target sequence for Kcnj5 (NM_010605.2,170-188).
ctggcaagtgcaatgtaca

SEQ ID NO: 644188 - DNA, 19 bp, Mus musculus
  siRNA target sequence for Kcnj5 (NM_010605.2,377-395).
ggatcccttgtgttgaaaa

SEQ ID NO: 644189 - DNA, 19 bp, Mus musculus
  siRNA target sequence for Kcnj5 (NM_010605.2,381-399).
cccttgtgttgaaaacctt

SEQ ID NO: 644190 - DNA, 19 bp, Mus musculus
  siRNA target sequence for Kcnj5 (NM_010605.2,382-400).
ccttgtgttgaaaacctta

SEQ ID NO: 644191 - DNA, 19 bp, Mus musculus
  siRNA target sequence for Kcnj5 (NM_010605.2,480-498).
gtgtccagaagggatcata

SEQ ID NO: 644192 - DNA, 19 bp, Mus musculus
  siRNA target sequence for Kcnj5 (NM_010605.2,482-500).
gtccagaagggatcatact

SEQ ID NO: 644193 - DNA, 19 bp, Mus musculus
  siRNA target sequence for Kcnj5 (NM_010605.2,547-565).
gtggggtgcatgtttgtaa

SEQ ID NO: 644194 - DNA, 19 bp, Mus musculus
  siRNA target sequence for Kcnj5 (NM_010605.2,589-607).
gcagagaccctaatgtttt

SEQ ID NO: 644195 - DNA, 19 bp, Mus musculus
  siRNA target sequence for Kcnj5 (NM_010605.2,592-610).
gagaccctaatgttttcca

SEQ ID NO: 644196 - DNA, 19 bp, Mus musculus
  siRNA target sequence for Kcnj5 (NM_010605.2,756-774).
gaaccagaccgacattaat

SEQ ID NO: 644197 - DNA, 19 bp, Mus musculus
  siRNA target sequence for Kcnj5 (NM_010605.2,909-927).
catactagaaggaatggta

SEQ ID NO: 644198 - DNA, 19 bp, Mus musculus
  siRNA target sequence for Kcnj5 (NM_010605.2,955-973).
cggagctcttacatggata

SEQ ID NO: 644199 - DNA, 19 bp, Mus musculus
  siRNA target sequence for Kcnj5 (NM_010605.2,984-1002).
ctggggtcaccgattcaca

SEQ ID NO: 644200 - DNA, 19 bp, Mus musculus
  siRNA target sequence for Kcnj5 (NM_010605.2,1003-1021).
ccagttctcaccttggaaa

SEQ ID NO: 644201 - DNA, 19 bp, Mus musculus
  siRNA target sequence for Kcnj5 (NM_010605.2,1014-1032).
cttggaaaagggcttctat

SEQ ID NO: 644202 - DNA, 19 bp, Mus musculus
  siRNA target sequence for Kcnj5 (NM_010605.2,1033-1051).
gaggtggactacaacactt

SEQ ID NO: 644203 - DNA, 19 bp, Mus musculus
  siRNA target sequence for Kcnj5 (NM_010605.2,1240-1258).
gccaccaggggctcaatgt

SEQ ID NO: 644204 - DNA, 19 bp, Mus musculus
  siRNA target sequence for Kcnj8 (NM_008428.2,412-430).
gcaacctggcacacaagaa

SEQ ID NO: 644205 - DNA, 19 bp, Mus musculus
  siRNA target sequence for Kcnj8 (NM_008428.2,572-590).
cgcccacggggacatctat

SEQ ID NO: 644206 - DNA, 19 bp, Mus musculus
  siRNA target sequence for Kcnj8 (NM_008428.2,576-594).
cacggggacatctatgctt

SEQ ID NO: 644207 - DNA, 19 bp, Mus musculus
  siRNA target sequence for Kcnj8 (NM_008428.2,746-764).
ggccatcacggttttgatt

SEQ ID NO: 644208 - DNA, 19 bp, Mus musculus
  siRNA target sequence for Kcnj8 (NM_008428.2,844-862).
gggcagagacgctgatttt

SEQ ID NO: 644209 - DNA, 19 bp, Mus musculus
  siRNA target sequence for Kcnj8 (NM_008428.2,863-881).
cagccgccatgctgtgatt

SEQ ID NO: 644210 - DNA, 19 bp, Mus musculus
  siRNA target sequence for Kcnj8 (NM_008428.2,961-979).
gcatccaggtggtcaagaa

SEQ ID NO: 644211 - DNA, 19 bp, Mus musculus
  siRNA target sequence for Kcnj8 (NM_008428.2,966-984).
caggtggtcaagaaaacca

SEQ ID NO: 644212 - DNA, 19 bp, Mus musculus
  siRNA target sequence for Kcnj8 (NM_008428.2,1041-1059).
cccatcgagagcaataata

SEQ ID NO: 644213 - DNA, 19 bp, Mus musculus
  siRNA target sequence for Kcnj8 (NM_008428.2,1042-1060).
ccatcgagagcaataatat

SEQ ID NO: 644214 - DNA, 19 bp, Mus musculus
  siRNA target sequence for Kcnj8 (NM_008428.2,1103-1121).
gcgtagccccctgtatgat

SEQ ID NO: 644215 - DNA, 19 bp, Mus musculus
  siRNA target sequence for Kcnj8 (NM_008428.2,1104-1122).
cgtagccccctgtatgata

SEQ ID NO: 644216 - DNA, 19 bp, Mus musculus
  siRNA target sequence for Kcnj8 (NM_008428.2,1105-1123).
gtagccccctgtatgatat

SEQ ID NO: 644217 - DNA, 19 bp, Mus musculus
  siRNA target sequence for Kcnj8 (NM_008428.2,1109-1127).
ccccctgtatgatatctca

SEQ ID NO: 644218 - DNA, 19 bp, Mus musculus
  siRNA target sequence for Kcnj8 (NM_008428.2,1246-1264).
gacaccgcttcgtgtcaat

SEQ ID NO: 644219 - DNA, 19 bp, Mus musculus
  siRNA target sequence for Kcnj8 (NM_008428.2,1251-1269).
cgcttcgtgtcaattgtga

SEQ ID NO: 644220 - DNA, 19 bp, Mus musculus
  siRNA target sequence for Kcnj8 (NM_008428.2,1401-1419).
gaactgtcgcaccagaatt

SEQ ID NO: 644221 - DNA, 19 bp, Mus musculus
  siRNA target sequence for Kcnj9 (NM_008429.1,316-334).
ggagaacgccgctttctct

SEQ ID NO: 644222 - DNA, 19 bp, Mus musculus
  siRNA target sequence for Kcnj9 (NM_008429.1,513-531).
cgctcacttggctcttctt

SEQ ID NO: 644223 - DNA, 19 bp, Mus musculus
  siRNA target sequence for Kcnj9 (NM_008429.1,597-615).
ggaccccgtgcgtcaacaa

SEQ ID NO: 644224 - DNA, 19 bp, Mus musculus
  siRNA target sequence for Kcnj9 (NM_008429.1,951-969).
cgctcgagggcgagttcat

SEQ ID NO: 644225 - DNA, 19 bp, Mus musculus
  siRNA target sequence for Kcnj9 (NM_008429.1,1114-1132).
cttcgagatcgtagtcatt

SEQ ID NO: 644226 - DNA, 19 bp, Mus musculus
  siRNA target sequence for Kcnj9 (NM_008429.1,1182-1200).
cgtacctggtggatgaagt

SEQ ID NO: 644227 - DNA, 19 bp, Mus musculus
  siRNA target sequence for Kcnj9 (NM_008429.1,1267-1285).
cagcttccacgaaaccttt

SEQ ID NO: 644228 - DNA, 19 bp, Mus musculus
  siRNA target sequence for 4922504H04 (NM_177791.2,229-247).
ggcatgtgcactattacct

SEQ ID NO: 644229 - DNA, 19 bp, Mus musculus
  siRNA target sequence for 4922504H04 (NM_177791.2,274-292).
gttgtgcagaactgaactt

SEQ ID NO: 644230 - DNA, 19 bp, Mus musculus
  siRNA target sequence for 4922504H04 (NM_177791.2,427-445).
ggcggacatggaagtgtat

SEQ ID NO: 644231 - DNA, 19 bp, Mus musculus
  siRNA target sequence for 4922504H04 (NM_177791.2,429-447).
cggacatggaagtgtatca

SEQ ID NO: 644232 - DNA, 19 bp, Mus musculus
  siRNA target sequence for 4922504H04 (NM_177791.2,449-467).
caagccctcggattttcca

SEQ ID NO: 644233 - DNA, 19 bp, Mus musculus
  siRNA target sequence for 4922504H04 (NM_177791.2,452-470).
gccctcggattttccaata

SEQ ID NO: 644234 - DNA, 19 bp, Mus musculus
  siRNA target sequence for 4922504H04 (NM_177791.2,453-471).
ccctcggattttccaataa

SEQ ID NO: 644235 - DNA, 19 bp, Mus musculus
  siRNA target sequence for 4922504H04 (NM_177791.2,479-497).
cgccttcacaggtcttcat

SEQ ID NO: 644236 - DNA, 19 bp, Mus musculus
  siRNA target sequence for 4922504H04 (NM_177791.2,598-616).
gcctagtgaccgaagacaa

SEQ ID NO: 644237 - DNA, 19 bp, Mus musculus
  siRNA target sequence for 4922504H04 (NM_177791.2,662-680).
cagcgagttccgcttcatt

SEQ ID NO: 644238 - DNA, 19 bp, Mus musculus
  siRNA target sequence for 4922504H04 (NM_177791.2,664-682).
gcgagttccgcttcattgt

SEQ ID NO: 644239 - DNA, 19 bp, Mus musculus
  siRNA target sequence for 4922504H04 (NM_177791.2,671-689).
ccgcttcattgtgaatttt

SEQ ID NO: 644240 - DNA, 19 bp, Mus musculus
  siRNA target sequence for 4922504H04 (NM_177791.2,690-708).
ctacgctcacacaagattt

SEQ ID NO: 644241 - DNA, 19 bp, Mus musculus
  siRNA target sequence for 4922504H04 (NM_177791.2,694-712).
gctcacacaagattttact

SEQ ID NO: 644242 - DNA, 19 bp, Mus musculus
  siRNA target sequence for 4922504H04 (NM_177791.2,725-743).
ctccaacatagatgtgtta

SEQ ID NO: 644243 - DNA, 19 bp, Mus musculus
  siRNA target sequence for 4922504H04 (NM_177791.2,727-745).
ccaacatagatgtgttaga

SEQ ID NO: 644244 - DNA, 19 bp, Mus musculus
  siRNA target sequence for 4922504H04 (NM_177791.2,728-746).
caacatagatgtgttagaa

SEQ ID NO: 644245 - DNA, 19 bp, Mus musculus
  siRNA target sequence for 4922504H04 (NM_177791.2,792-810).
cggttgtaccggatgaata

SEQ ID NO: 644246 - DNA, 19 bp, Mus musculus
  siRNA target sequence for 4922504H04 (NM_177791.2,980-998).
gggcctgctggtcaagtat

SEQ ID NO: 644247 - DNA, 19 bp, Mus musculus
  siRNA target sequence for 4922504H04 (NM_177791.2,1038-1056).
ctggacggaagcagactat

SEQ ID NO: 644248 - DNA, 19 bp, Mus musculus
  siRNA target sequence for 4922504H04 (NM_177791.2,1181-1199).
cacctacgagccaatgaaa

SEQ ID NO: 644249 - DNA, 19 bp, Mus musculus
  siRNA target sequence for 4922504H04 (NM_177791.2,1317-1335).
ggaagccattggtatgcaa

SEQ ID NO: 644250 - DNA, 19 bp, Mus musculus
  siRNA target sequence for 4922504H04 (NM_177791.2,1408-1426).
gacagaccttgctcattca

SEQ ID NO: 644251 - DNA, 19 bp, Mus musculus
  siRNA target sequence for 4922504H04 (NM_177791.2,1425-1443).
cacggggacggccaaatgt

SEQ ID NO: 644252 - DNA, 19 bp, Mus musculus
  siRNA target sequence for 4922504H04 (NM_177791.2,1436-1454).
ccaaatgttccgacacatt

SEQ ID NO: 644253 - DNA, 19 bp, Mus musculus
  siRNA target sequence for 4922504H04 (NM_177791.2,1524-1542).
gaggtggaggagtatcata

SEQ ID NO: 644254 - DNA, 19 bp, Mus musculus
  siRNA target sequence for 4922504H04 (NM_177791.2,1567-1585).
cacaatgcgaagcatacaa

SEQ ID NO: 644255 - DNA, 19 bp, Mus musculus
  siRNA target sequence for 4922504H04 (NM_177791.2,1569-1587).
caatgcgaagcatacaagt

SEQ ID NO: 644256 - DNA, 19 bp, Mus musculus
  siRNA target sequence for 4922504H04 (NM_177791.2,1588-1606).
catggactcaggagaaaga

SEQ ID NO: 644257 - DNA, 19 bp, Mus musculus
  siRNA target sequence for 4922504H04 (NM_177791.2,1592-1610).
gactcaggagaaagaatct

SEQ ID NO: 644258 - DNA, 19 bp, Mus musculus
  siRNA target sequence for 4922504H04 (NM_177791.2,1794-1812).
gaagaggctgagcagtata

SEQ ID NO: 644259 - DNA, 19 bp, Mus musculus
  siRNA target sequence for 4922504H04 (NM_177791.2,1805-1823).
gcagtatacccggactatt

SEQ ID NO: 644260 - DNA, 19 bp, Mus musculus
  siRNA target sequence for 4922504H04 (NM_177791.2,1999-2017).
cccccatgcaaaaactcat

SEQ ID NO: 644261 - DNA, 19 bp, Mus musculus
  siRNA target sequence for 4922504H04 (NM_177791.2,2000-2018).
ccccatgcaaaaactcata

SEQ ID NO: 644262 - DNA, 19 bp, Mus musculus
  siRNA target sequence for 4922504H04 (NM_177791.2,2006-2024).
gcaaaaactcatatcttta

SEQ ID NO: 644263 - DNA, 19 bp, Mus musculus
  siRNA target sequence for 4922504H04 (NM_177791.2,2218-2236).
ccggagctggagtgaaaga

SEQ ID NO: 644264 - DNA, 19 bp, Mus musculus
  siRNA target sequence for 4922504H04 (NM_177791.2,2240-2258).
gggtccagagccaaccttt

SEQ ID NO: 644265 - DNA, 19 bp, Mus musculus
  siRNA target sequence for 4922504H04 (NM_177791.2,2241-2259).
ggtccagagccaaccttta

SEQ ID NO: 644266 - DNA, 19 bp, Mus musculus
  siRNA target sequence for 4922504H04 (NM_177791.2,2242-2260).
gtccagagccaacctttaa

SEQ ID NO: 644267 - DNA, 19 bp, Mus musculus
  siRNA target sequence for 4922504H04 (NM_177791.2,2271-2289).
cctacaaaaagagctatta

SEQ ID NO: 644268 - DNA, 19 bp, Mus musculus
  siRNA target sequence for 4922504H04 (NM_177791.2,2281-2299).
gagctattaccctaaagga

SEQ ID NO: 644269 - DNA, 19 bp, Mus musculus
  siRNA target sequence for 4922504H04 (NM_177791.2,2346-2364).
cagcctctgcctaatgcta

SEQ ID NO: 644270 - DNA, 19 bp, Mus musculus
  siRNA target sequence for 4922504H04 (NM_177791.2,2380-2398).
caggggccatcctcaaagt

SEQ ID NO: 644271 - DNA, 19 bp, Mus musculus
  siRNA target sequence for 4922504H04 (NM_177791.2,2467-2485).
cccaaatggataacatcaa

SEQ ID NO: 644272 - DNA, 19 bp, Mus musculus
  siRNA target sequence for 4922504H04 (NM_177791.2,2475-2493).
gataacatcaagcatacat

SEQ ID NO: 644273 - DNA, 19 bp, Mus musculus
  siRNA target sequence for 4922504H04 (NM_177791.2,2552-2570).
ggaggagatgttttatgca

SEQ ID NO: 644274 - DNA, 19 bp, Mus musculus
  siRNA target sequence for 4922504H04 (NM_177791.2,2619-2637).
caaaaggatcccaaagcta

SEQ ID NO: 644275 - DNA, 19 bp, Mus musculus
  siRNA target sequence for 4922504H04 (NM_177791.2,2668-2686).
gactgtggacactgaacat

SEQ ID NO: 644276 - DNA, 19 bp, Mus musculus
  siRNA target sequence for 4922504H04 (NM_177791.2,2784-2802).
ctgcctttcgccagaaaat

SEQ ID NO: 644277 - DNA, 19 bp, Mus musculus
  siRNA target sequence for 4922504H04 (NM_177791.2,2786-2804).
gcctttcgccagaaaatat

SEQ ID NO: 644278 - DNA, 19 bp, Mus musculus
  siRNA target sequence for Kcnab1 (NM_010597.2,404-422).
gcctgcacagagcacaatt

SEQ ID NO: 644279 - DNA, 19 bp, Mus musculus
  siRNA target sequence for Kcnab1 (NM_010597.2,547-565).
cacccctcagcatcacatt

SEQ ID NO: 644280 - DNA, 19 bp, Mus musculus
  siRNA target sequence for Kcnab1 (NM_010597.2,560-578).
cacatttctctcaaagagt

SEQ ID NO: 644281 - DNA, 19 bp, Mus musculus
  siRNA target sequence for Kcnab1 (NM_010597.2,695-713).
gctgaacggctgatgacaa

SEQ ID NO: 644282 - DNA, 19 bp, Mus musculus
  siRNA target sequence for Kcnab1 (NM_010597.2,696-714).
ctgaacggctgatgacaat

SEQ ID NO: 644283 - DNA, 19 bp, Mus musculus
  siRNA target sequence for Kcnab1 (NM_010597.2,826-844).
cttggtcatcacaaccaaa

SEQ ID NO: 644284 - DNA, 19 bp, Mus musculus
  siRNA target sequence for Kcnab1 (NM_010597.2,830-848).
gtcatcacaaccaaactct

SEQ ID NO: 644285 - DNA, 19 bp, Mus musculus
  siRNA target sequence for Kcnab1 (NM_010597.2,981-999).
ctcccatggaagaaatcgt

SEQ ID NO: 644286 - DNA, 19 bp, Mus musculus
  siRNA target sequence for Kcnab1 (NM_010597.2,1005-1023).
ccatgacgcacgtgatcaa

SEQ ID NO: 644287 - DNA, 19 bp, Mus musculus
  siRNA target sequence for Kcnab1 (NM_010597.2,1089-1107).
ctgtcgcacggcagttcaa

SEQ ID NO: 644288 - DNA, 19 bp, Mus musculus
  siRNA target sequence for Kcnab1 (NM_010597.2,1091-1109).
gtcgcacggcagttcaaca

SEQ ID NO: 644289 - DNA, 19 bp, Mus musculus
  siRNA target sequence for Kcnab1 (NM_010597.2,1183-1201).
gctctaccataaaatagga

SEQ ID NO: 644290 - DNA, 19 bp, Mus musculus
  siRNA target sequence for Kcnab1 (NM_010597.2,1199-1217).
ggagttggtgcaatgacat

SEQ ID NO: 644291 - DNA, 19 bp, Mus musculus
  siRNA target sequence for Kcnab1 (NM_010597.2,1223-1241).
ccacttgcttgtggaatta

SEQ ID NO: 644292 - DNA, 19 bp, Mus musculus
  siRNA target sequence for Kcnab1 (NM_010597.2,1224-1242).
cacttgcttgtggaattat

SEQ ID NO: 644293 - DNA, 19 bp, Mus musculus
  siRNA target sequence for Kcnab1 (NM_010597.2,1226-1244).
cttgcttgtggaattattt

SEQ ID NO: 644294 - DNA, 19 bp, Mus musculus
  siRNA target sequence for Kcnab1 (NM_010597.2,1414-1432).
ggcgtggtgcctgagaaat

SEQ ID NO: 644295 - DNA, 19 bp, Mus musculus
  siRNA target sequence for Kcnab1 (NM_010597.2,1461-1479).
catccactccggaacaact

SEQ ID NO: 644296 - DNA, 19 bp, Mus musculus
  siRNA target sequence for Kcnab1 (NM_010597.2,1464-1482).
ccactccggaacaactcat

SEQ ID NO: 644297 - DNA, 19 bp, Mus musculus
  siRNA target sequence for Kcnab1 (NM_010597.2,1465-1483).
cactccggaacaactcatt

SEQ ID NO: 644298 - DNA, 19 bp, Mus musculus
  siRNA target sequence for Kcnab1 (NM_010597.2,1467-1485).
ctccggaacaactcattga

SEQ ID NO: 644299 - DNA, 19 bp, Mus musculus
  siRNA target sequence for Kcnab1 (NM_010597.2,1469-1487).
ccggaacaactcattgaaa

SEQ ID NO: 644300 - DNA, 19 bp, Mus musculus
  siRNA target sequence for Kcnab1 (NM_010597.2,1502-1520).
caggtcctccctaagatga

SEQ ID NO: 644301 - DNA, 19 bp, Mus musculus
  siRNA target sequence for Kcnab1 (NM_010597.2,1505-1523).
gtcctccctaagatgacat

SEQ ID NO: 644302 - DNA, 19 bp, Mus musculus
  siRNA target sequence for Kcnab1 (NM_010597.2,1528-1546).
cgtggtgaacgagattgat

SEQ ID NO: 644303 - DNA, 19 bp, Mus musculus
  siRNA target sequence for Kcnab1 (NM_010597.2,1529-1547).
gtggtgaacgagattgata

SEQ ID NO: 644304 - DNA, 19 bp, Mus musculus
  siRNA target sequence for Kcnab1 (NM_010597.2,1532-1550).
gtgaacgagattgataaca

SEQ ID NO: 644305 - DNA, 19 bp, Mus musculus
  siRNA target sequence for Kcnab2 (NM_010598.2,204-222).
gatctacagtactcgttat

SEQ ID NO: 644306 - DNA, 19 bp, Mus musculus
  siRNA target sequence for Kcnab2 (NM_010598.2,354-372).
gaccttggcctacgataat

SEQ ID NO: 644307 - DNA, 19 bp, Mus musculus
  siRNA target sequence for Kcnab2 (NM_010598.2,373-391).
ggcatcaacctgttcgata

SEQ ID NO: 644308 - DNA, 19 bp, Mus musculus
  siRNA target sequence for Kcnab2 (NM_010598.2,461-479).
gacggtccagccttgtcat

SEQ ID NO: 644309 - DNA, 19 bp, Mus musculus
  siRNA target sequence for Kcnab2 (NM_010598.2,489-507).
gatcttctggggtggaaaa

SEQ ID NO: 644310 - DNA, 19 bp, Mus musculus
  siRNA target sequence for Kcnab2 (NM_010598.2,531-549).
caggaagcacataattgaa

SEQ ID NO: 644311 - DNA, 19 bp, Mus musculus
  siRNA target sequence for Kcnab2 (NM_010598.2,734-752).
cggtggctcggcagttcaa

SEQ ID NO: 644312 - DNA, 19 bp, Mus musculus
  siRNA target sequence for Kcnab2 (NM_010598.2,768-786).
ctgcgagcaagcggaatat

SEQ ID NO: 644313 - DNA, 19 bp, Mus musculus
  siRNA target sequence for Kcnab2 (NM_010598.2,770-788).
gcgagcaagcggaatatca

SEQ ID NO: 644314 - DNA, 19 bp, Mus musculus
  siRNA target sequence for Kcnab2 (NM_010598.2,772-790).
gagcaagcggaatatcaca

SEQ ID NO: 644315 - DNA, 19 bp, Mus musculus
  siRNA target sequence for Kcnab2 (NM_010598.2,824-842).
cagagctgttccacaagat

SEQ ID NO: 644316 - DNA, 19 bp, Mus musculus
  siRNA target sequence for Kcnab2 (NM_010598.2,882-900).
catcgtctcagggaagtat

SEQ ID NO: 644317 - DNA, 19 bp, Mus musculus
  siRNA target sequence for Kcnab2 (NM_010598.2,886-904).
gtctcagggaagtatgaca

SEQ ID NO: 644318 - DNA, 19 bp, Mus musculus
  siRNA target sequence for Kcnab2 (NM_010598.2,1095-1113).
gcttctgggtgcttccaat

SEQ ID NO: 644319 - DNA, 19 bp, Mus musculus
  siRNA target sequence for Kcnab2 (NM_010598.2,1128-1146).
ggagaacattggagcaata

SEQ ID NO: 644320 - DNA, 19 bp, Mus musculus
  siRNA target sequence for Kcnab3 (NM_010599.2,786-804).
ggcgtaaacctgtttgaca

SEQ ID NO: 644321 - DNA, 19 bp, Mus musculus
  siRNA target sequence for Kcnab3 (NM_010599.2,841-859).
cccttggcaatattctcaa

SEQ ID NO: 644322 - DNA, 19 bp, Mus musculus
  siRNA target sequence for Kcnab3 (NM_010599.2,874-892).
ggagatcaagctatgttat

SEQ ID NO: 644323 - DNA, 19 bp, Mus musculus
  siRNA target sequence for Kcnab3 (NM_010599.2,936-954).
ggcttgagtcgcaaacaca

SEQ ID NO: 644324 - DNA, 19 bp, Mus musculus
  siRNA target sequence for Kcnab3 (NM_010599.2,941-959).
gagtcgcaaacacatcatt

SEQ ID NO: 644325 - DNA, 19 bp, Mus musculus
  siRNA target sequence for Kcnab3 (NM_010599.2,985-1003).
gcctccagctggaatacgt

SEQ ID NO: 644326 - DNA, 19 bp, Mus musculus
  siRNA target sequence for Kcnab3 (NM_010599.2,986-1004).
cctccagctggaatacgtt

SEQ ID NO: 644327 - DNA, 19 bp, Mus musculus
  siRNA target sequence for Kcnab3 (NM_010599.2,990-1008).
cagctggaatacgttgata

SEQ ID NO: 644328 - DNA, 19 bp, Mus musculus
  siRNA target sequence for Kcnab3 (NM_010599.2,992-1010).
gctggaatacgttgatata

SEQ ID NO: 644329 - DNA, 19 bp, Mus musculus
  siRNA target sequence for Kcnab3 (NM_010599.2,995-1013).
ggaatacgttgatatagta

SEQ ID NO: 644330 - DNA, 19 bp, Mus musculus
  siRNA target sequence for Kcnab3 (NM_010599.2,996-1014).
gaatacgttgatatagtat

SEQ ID NO: 644331 - DNA, 19 bp, Mus musculus
  siRNA target sequence for Kcnab3 (NM_010599.2,1018-1036).
ccaatcgttcagatcctaa

SEQ ID NO: 644332 - DNA, 19 bp, Mus musculus
  siRNA target sequence for Kcnab3 (NM_010599.2,1019-1037).
caatcgttcagatcctaat

SEQ ID NO: 644333 - DNA, 19 bp, Mus musculus
  siRNA target sequence for Kcnab3 (NM_010599.2,1117-1135).
ggagtgctgcagaaatcat

SEQ ID NO: 644334 - DNA, 19 bp, Mus musculus
  siRNA target sequence for Kcnab3 (NM_010599.2,1287-1305).
gcgtgcggcctcattacta

SEQ ID NO: 644335 - DNA, 19 bp, Mus musculus
  siRNA target sequence for Kcnab3 (NM_010599.2,1298-1316).
cattactagcaagtatgat

SEQ ID NO: 644336 - DNA, 19 bp, Mus musculus
  siRNA target sequence for Kcnab3 (NM_010599.2,1317-1335).
gggcgagttccggatactt

SEQ ID NO: 644337 - DNA, 19 bp, Mus musculus
  siRNA target sequence for Kcnab3 (NM_010599.2,1354-1372).
gctaccagtggctcaaaga

SEQ ID NO: 644338 - DNA, 19 bp, Mus musculus
  siRNA target sequence for Kcnab3 (NM_010599.2,1408-1426).
ccagagtgatggatcttct

SEQ ID NO: 644339 - DNA, 19 bp, Mus musculus
  siRNA target sequence for Kcnab3 (NM_010599.2,1615-1633).
ggaacaaatcgcattccaa

SEQ ID NO: 644340 - DNA, 19 bp, Mus musculus
  siRNA target sequence for Kcne1 (NM_008424.2,286-304).
cggcctggctcgtaagtct

SEQ ID NO: 644341 - DNA, 19 bp, Mus musculus
  siRNA target sequence for Kcne1 (NM_008424.2,519-537).
gctatgtcattgaaaacca

SEQ ID NO: 644342 - DNA, 19 bp, Mus musculus
  siRNA target sequence for Kcne2 (NM_134110.1,152-170).
gccacattagccaatttga

SEQ ID NO: 644343 - DNA, 19 bp, Mus musculus
  siRNA target sequence for Kcne2 (NM_134110.1,267-285).
gagtggatgccgagaactt

SEQ ID NO: 644344 - DNA, 19 bp, Mus musculus
  siRNA target sequence for Kcne2 (NM_134110.1,404-422).
cagtacatcgtggaagatt

SEQ ID NO: 644345 - DNA, 19 bp, Mus musculus
  siRNA target sequence for Kcne3 (NM_020574.3,441-459).
ggccagacaatcaaactga

SEQ ID NO: 644346 - DNA, 19 bp, Mus musculus
  siRNA target sequence for Kcne3 (NM_020574.3,474-492).
gccttcctggtcgtaatga

SEQ ID NO: 644347 - DNA, 19 bp, Mus musculus
  siRNA target sequence for Kcne3 (NM_020574.3,476-494).
cttcctggtcgtaatgaca

SEQ ID NO: 644348 - DNA, 19 bp, Mus musculus
  siRNA target sequence for Kcne3 (NM_020574.3,591-609).
gtagtgacccctatcatgt

SEQ ID NO: 644349 - DNA, 19 bp, Mus musculus
  siRNA target sequence for Kcne3 (NM_020574.3,599-617).
ccctatcatgtgtacatca

SEQ ID NO: 644350 - DNA, 19 bp, Mus musculus
  siRNA target sequence for Kcne4 (NM_021342.1,163-181).
gtggtaatggcaatgaata

SEQ ID NO: 644351 - DNA, 19 bp, Mus musculus
  siRNA target sequence for Kcne4 (NM_021342.1,166-184).
gtaatggcaatgaatactt

SEQ ID NO: 644352 - DNA, 19 bp, Mus musculus
  siRNA target sequence for Kcne4 (NM_021342.1,194-212).
ggtcgttatgtccttctat

SEQ ID NO: 644353 - DNA, 19 bp, Mus musculus
  siRNA target sequence for Kcne4 (NM_021342.1,322-340).
ctatgaagccgctacctat

SEQ ID NO: 644354 - DNA, 19 bp, Mus musculus
  siRNA target sequence for Kcne4 (NM_021342.1,408-426).
gcactgtcctgcactcttt

SEQ ID NO: 644355 - DNA, 19 bp, Mus musculus
  siRNA target sequence for Kcnh7 (NM_133207.1,36-54).
catgtggcaccgcaaaaca

SEQ ID NO: 644356 - DNA, 19 bp, Mus musculus
  siRNA target sequence for Kcnh7 (NM_133207.1,64-82).
ggaccatcatacggaaatt

SEQ ID NO: 644357 - DNA, 19 bp, Mus musculus
  siRNA target sequence for Kcnh7 (NM_133207.1,65-83).
gaccatcatacggaaattt

SEQ ID NO: 644358 - DNA, 19 bp, Mus musculus
  siRNA target sequence for Kcnh7 (NM_133207.1,305-323).
cacctactatcacaagaat

SEQ ID NO: 644359 - DNA, 19 bp, Mus musculus
  siRNA target sequence for Kcnh7 (NM_133207.1,348-366).
cacataatcccagtaaaga

SEQ ID NO: 644360 - DNA, 19 bp, Mus musculus
  siRNA target sequence for Kcnh7 (NM_133207.1,372-390).
gagggtgtggctatgatgt

SEQ ID NO: 644361 - DNA, 19 bp, Mus musculus
  siRNA target sequence for Kcnh7 (NM_133207.1,375-393).
ggtgtggctatgatgttca

SEQ ID NO: 644362 - DNA, 19 bp, Mus musculus
  siRNA target sequence for Kcnh7 (NM_133207.1,443-461).
gagggtcaacccgatatta

SEQ ID NO: 644363 - DNA, 19 bp, Mus musculus
  siRNA target sequence for Kcnh7 (NM_133207.1,470-488).
gactgtaaaccggaaactt

SEQ ID NO: 644364 - DNA, 19 bp, Mus musculus
  siRNA target sequence for Kcnh7 (NM_133207.1,472-490).
ctgtaaaccggaaactttt

SEQ ID NO: 644365 - DNA, 19 bp, Mus musculus
  siRNA target sequence for Kcnh7 (NM_133207.1,504-522).
cctggactgagagttctaa

SEQ ID NO: 644366 - DNA, 19 bp, Mus musculus
  siRNA target sequence for Kcnh7 (NM_133207.1,514-532).
gagttctaacatacagaaa

SEQ ID NO: 644367 - DNA, 19 bp, Mus musculus
  siRNA target sequence for Kcnh7 (NM_133207.1,552-570).
gacccggatgtggtagtta

SEQ ID NO: 644368 - DNA, 19 bp, Mus musculus
  siRNA target sequence for Kcnh7 (NM_133207.1,554-572).
cccggatgtggtagttatt

SEQ ID NO: 644369 - DNA, 19 bp, Mus musculus
  siRNA target sequence for Kcnh7 (NM_133207.1,556-574).
cggatgtggtagttattga

SEQ ID NO: 644370 - DNA, 19 bp, Mus musculus
  siRNA target sequence for Kcnh7 (NM_133207.1,561-579).
gtggtagttattgattctt

SEQ ID NO: 644371 - DNA, 19 bp, Mus musculus
  siRNA target sequence for Kcnh7 (NM_133207.1,603-621).
gccatgaagcactttaagt

SEQ ID NO: 644372 - DNA, 19 bp, Mus musculus
  siRNA target sequence for Kcnh7 (NM_133207.1,645-663).
ccctctgaagcagatgata

SEQ ID NO: 644373 - DNA, 19 bp, Mus musculus
  siRNA target sequence for Kcnh7 (NM_133207.1,649-667).
ctgaagcagatgatacgaa

SEQ ID NO: 644374 - DNA, 19 bp, Mus musculus
  siRNA target sequence for Kcnh7 (NM_133207.1,691-709).
gttctcccttagtgaacat

SEQ ID NO: 644375 - DNA, 19 bp, Mus musculus
  siRNA target sequence for Kcnh7 (NM_133207.1,774-792).
cagtcaagttcccaactaa

SEQ ID NO: 644376 - DNA, 19 bp, Mus musculus
  siRNA target sequence for Kcnh7 (NM_133207.1,778-796).
caagttcccaactaacaca

SEQ ID NO: 644377 - DNA, 19 bp, Mus musculus
  siRNA target sequence for Kcnh7 (NM_133207.1,809-827).
ggagagcctctgtagcata

SEQ ID NO: 644378 - DNA, 19 bp, Mus musculus
  siRNA target sequence for Kcnh7 (NM_133207.1,830-848).
gagggcatcttcagttcat

SEQ ID NO: 644379 - DNA, 19 bp, Mus musculus
  siRNA target sequence for Kcnh7 (NM_133207.1,911-929).
caatggtcgaaatgtcaaa

SEQ ID NO: 644380 - DNA, 19 bp, Mus musculus
  siRNA target sequence for Kcnh7 (NM_133207.1,933-951).
ccttttaatcatatcaagt

SEQ ID NO: 644381 - DNA, 19 bp, Mus musculus
  siRNA target sequence for Kcnh7 (NM_133207.1,960-978).
ctgggatccacatcagatt

SEQ ID NO: 644382 - DNA, 19 bp, Mus musculus
  siRNA target sequence for Kcnh7 (NM_133207.1,963-981).
ggatccacatcagattcaa

SEQ ID NO: 644383 - DNA, 19 bp, Mus musculus
  siRNA target sequence for Kcnh7 (NM_133207.1,1067-1085).
ccctccttcttcagacaaa

SEQ ID NO: 644384 - DNA, 19 bp, Mus musculus
  siRNA target sequence for Kcnh7 (NM_133207.1,1095-1113).
gcacccaaggttaaagaaa

SEQ ID NO: 644385 - DNA, 19 bp, Mus musculus
  siRNA target sequence for Kcnh7 (NM_133207.1,1121-1139).
caacgtgaccgagaaagta

SEQ ID NO: 644386 - DNA, 19 bp, Mus musculus
  siRNA target sequence for Kcnh7 (NM_133207.1,1153-1171).
ctttgggagcagatgtctt

SEQ ID NO: 644387 - DNA, 19 bp, Mus musculus
  siRNA target sequence for Kcnh7 (NM_133207.1,1162-1180).
cagatgtcttgccagaata

SEQ ID NO: 644388 - DNA, 19 bp, Mus musculus
  siRNA target sequence for Kcnh7 (NM_133207.1,1197-1215).
cgcatcaacaaatttacaa

SEQ ID NO: 644389 - DNA, 19 bp, Mus musculus
  siRNA target sequence for Kcnh7 (NM_133207.1,1198-1216).
gcatcaacaaatttacaat

SEQ ID NO: 644390 - DNA, 19 bp, Mus musculus
  siRNA target sequence for Kcnh7 (NM_133207.1,1244-1262).
ctgggattggcttatttta

SEQ ID NO: 644391 - DNA, 19 bp, Mus musculus
  siRNA target sequence for Kcnh7 (NM_133207.1,1268-1286).
ggtcatttatactgctata

SEQ ID NO: 644392 - DNA, 19 bp, Mus musculus
  siRNA target sequence for Kcnh7 (NM_133207.1,1269-1287).
gtcatttatactgctatat

SEQ ID NO: 644393 - DNA, 19 bp, Mus musculus
  siRNA target sequence for Kcnh7 (NM_133207.1,1305-1323).
gcatttctcctcaatgaca

SEQ ID NO: 644394 - DNA, 19 bp, Mus musculus
  siRNA target sequence for Kcnh7 (NM_133207.1,1340-1358).
gcgagaatgtggctattct

SEQ ID NO: 644395 - DNA, 19 bp, Mus musculus
  siRNA target sequence for Kcnh7 (NM_133207.1,1341-1359).
cgagaatgtggctattctt

SEQ ID NO: 644396 - DNA, 19 bp, Mus musculus
  siRNA target sequence for Kcnh7 (NM_133207.1,1366-1384).
ctttgaatgtggtagactt

SEQ ID NO: 644397 - DNA, 19 bp, Mus musculus
  siRNA target sequence for Kcnh7 (NM_133207.1,1370-1388).
gaatgtggtagacttgatt

SEQ ID NO: 644398 - DNA, 19 bp, Mus musculus
  siRNA target sequence for Kcnh7 (NM_133207.1,1380-1398).
gacttgattgtggatatta

SEQ ID NO: 644399 - DNA, 19 bp, Mus musculus
  siRNA target sequence for Kcnh7 (NM_133207.1,1385-1403).
gattgtggatattatgttt

SEQ ID NO: 644400 - DNA, 19 bp, Mus musculus
  siRNA target sequence for Kcnh7 (NM_133207.1,1410-1428).
gacattctaataaacttca

SEQ ID NO: 644401 - DNA, 19 bp, Mus musculus
  siRNA target sequence for Kcnh7 (NM_133207.1,1471-1489).
ctgccaaaatagcaataca

SEQ ID NO: 644402 - DNA, 19 bp, Mus musculus
  siRNA target sequence for Kcnh7 (NM_133207.1,1566-1584).
gatgagacaacgacactaa

SEQ ID NO: 644403 - DNA, 19 bp, Mus musculus
  siRNA target sequence for Kcnh7 (NM_133207.1,1571-1589).
gacaacgacactaattggt

SEQ ID NO: 644404 - DNA, 19 bp, Mus musculus
  siRNA target sequence for Kcnh7 (NM_133207.1,1576-1594).
cgacactaattggtctttt

SEQ ID NO: 644405 - DNA, 19 bp, Mus musculus
  siRNA target sequence for Kcnh7 (NM_133207.1,1581-1599).
ctaattggtcttttgaaga

SEQ ID NO: 644406 - DNA, 19 bp, Mus musculus
  siRNA target sequence for Kcnh7 (NM_133207.1,1634-1652).
gaaactggaccgatactca

SEQ ID NO: 644407 - DNA, 19 bp, Mus musculus
  siRNA target sequence for Kcnh7 (NM_133207.1,1638-1656).
ctggaccgatactcagaat

SEQ ID NO: 644408 - DNA, 19 bp, Mus musculus
  siRNA target sequence for Kcnh7 (NM_133207.1,1640-1658).
ggaccgatactcagaatat

SEQ ID NO: 644409 - DNA, 19 bp, Mus musculus
  siRNA target sequence for Kcnh7 (NM_133207.1,1643-1661).
ccgatactcagaatatggt

SEQ ID NO: 644410 - DNA, 19 bp, Mus musculus
  siRNA target sequence for Kcnh7 (NM_133207.1,1660-1678).
gtgcggctgttctaatgct

SEQ ID NO: 644411 - DNA, 19 bp, Mus musculus
  siRNA target sequence for Kcnh7 (NM_133207.1,1727-1745).
gtatgcgattgggaatgta

SEQ ID NO: 644412 - DNA, 19 bp, Mus musculus
  siRNA target sequence for Kcnh7 (NM_133207.1,1753-1771).
cctatctgactgacaaaat

SEQ ID NO: 644413 - DNA, 19 bp, Mus musculus
  siRNA target sequence for Kcnh7 (NM_133207.1,1795-1813).
cacaaattgggaaacgtta

SEQ ID NO: 644414 - DNA, 19 bp, Mus musculus
  siRNA target sequence for Kcnh7 (NM_133207.1,1831-1849).
gttctggaccgtccattaa

SEQ ID NO: 644415 - DNA, 19 bp, Mus musculus
  siRNA target sequence for Kcnh7 (NM_133207.1,1834-1852).
ctggaccgtccattaaaga

SEQ ID NO: 644416 - DNA, 19 bp, Mus musculus
  siRNA target sequence for Kcnh7 (NM_133207.1,1836-1854).
ggaccgtccattaaagaca

SEQ ID NO: 644417 - DNA, 19 bp, Mus musculus
  siRNA target sequence for Kcnh7 (NM_133207.1,1837-1855).
gaccgtccattaaagacaa

SEQ ID NO: 644418 - DNA, 19 bp, Mus musculus
  siRNA target sequence for Kcnh7 (NM_133207.1,1839-1857).
ccgtccattaaagacaaat

SEQ ID NO: 644419 - DNA, 19 bp, Mus musculus
  siRNA target sequence for Kcnh7 (NM_133207.1,1840-1858).
cgtccattaaagacaaata

SEQ ID NO: 644420 - DNA, 19 bp, Mus musculus
  siRNA target sequence for Kcnh7 (NM_133207.1,1843-1861).
ccattaaagacaaatacgt

SEQ ID NO: 644421 - DNA, 19 bp, Mus musculus
  siRNA target sequence for Kcnh7 (NM_133207.1,1859-1877).
cgtcacggcactttatttt

SEQ ID NO: 644422 - DNA, 19 bp, Mus musculus
  siRNA target sequence for Kcnh7 (NM_133207.1,1888-1906).
gtctaaccagtgtaggatt

SEQ ID NO: 644423 - DNA, 19 bp, Mus musculus
  siRNA target sequence for Kcnh7 (NM_133207.1,1914-1932).
gtgtctcctaacaccaatt

SEQ ID NO: 644424 - DNA, 19 bp, Mus musculus
  siRNA target sequence for Kcnh7 (NM_133207.1,1927-1945).
ccaattcggagaaaatctt

SEQ ID NO: 644425 - DNA, 19 bp, Mus musculus
  siRNA target sequence for Kcnh7 (NM_133207.1,1928-1946).
caattcggagaaaatcttt

SEQ ID NO: 644426 - DNA, 19 bp, Mus musculus
  siRNA target sequence for Kcnh7 (NM_133207.1,1995-2013).
gggaacgtttctgcaatta

SEQ ID NO: 644427 - DNA, 19 bp, Mus musculus
  siRNA target sequence for Kcnh7 (NM_133207.1,1996-2014).
ggaacgtttctgcaattat

SEQ ID NO: 644428 - DNA, 19 bp, Mus musculus
  siRNA target sequence for Kcnh7 (NM_133207.1,1997-2015).
gaacgtttctgcaattatt

SEQ ID NO: 644429 - DNA, 19 bp, Mus musculus
  siRNA target sequence for Kcnh7 (NM_133207.1,2000-2018).
cgtttctgcaattattcaa

SEQ ID NO: 644430 - DNA, 19 bp, Mus musculus
  siRNA target sequence for Kcnh7 (NM_133207.1,2001-2019).
gtttctgcaattattcaaa

SEQ ID NO: 644431 - DNA, 19 bp, Mus musculus
  siRNA target sequence for Kcnh7 (NM_133207.1,2109-2127).
caacggcttgaggagtatt

SEQ ID NO: 644432 - DNA, 19 bp, Mus musculus
  siRNA target sequence for Kcnh7 (NM_133207.1,2113-2131).
ggcttgaggagtatttcca

SEQ ID NO: 644433 - DNA, 19 bp, Mus musculus
  siRNA target sequence for Kcnh7 (NM_133207.1,2149-2167).
ctaacggcatagacatgaa

SEQ ID NO: 644434 - DNA, 19 bp, Mus musculus
  siRNA target sequence for Kcnh7 (NM_133207.1,2171-2189).
ggtcttaaagggatttcca

SEQ ID NO: 644435 - DNA, 19 bp, Mus musculus
  siRNA target sequence for Kcnh7 (NM_133207.1,2281-2299).
gagctctggcaatgaagtt

SEQ ID NO: 644436 - DNA, 19 bp, Mus musculus
  siRNA target sequence for Kcnh7 (NM_133207.1,2358-2376).
gcactgtacttcttatcca

SEQ ID NO: 644437 - DNA, 19 bp, Mus musculus
  siRNA target sequence for Kcnh7 (NM_133207.1,2388-2406).
gaaatcctcaaggatgata

SEQ ID NO: 644438 - DNA, 19 bp, Mus musculus
  siRNA target sequence for Kcnh7 (NM_133207.1,2444-2462).
ggaaatggttcatctttat

SEQ ID NO: 644439 - DNA, 19 bp, Mus musculus
  siRNA target sequence for Kcnh7 (NM_133207.1,2465-2483).
caaacctggcaagtctaat

SEQ ID NO: 644440 - DNA, 19 bp, Mus musculus
  siRNA target sequence for Kcnh7 (NM_133207.1,2572-2590).
ctgatcactttctgacaaa

SEQ ID NO: 644441 - DNA, 19 bp, Mus musculus
  siRNA target sequence for Kcnh7 (NM_133207.1,2579-2597).
ctttctgacaaatctagaa

SEQ ID NO: 644442 - DNA, 19 bp, Mus musculus
  siRNA target sequence for Kcnh7 (NM_133207.1,2623-2641).
gtgccaagtcccaatctgt

SEQ ID NO: 644443 - DNA, 19 bp, Mus musculus
  siRNA target sequence for Kcnh7 (NM_133207.1,2625-2643).
gccaagtcccaatctgtaa

SEQ ID NO: 644444 - DNA, 19 bp, Mus musculus
  siRNA target sequence for Kcnh7 (NM_133207.1,2626-2644).
ccaagtcccaatctgtaaa

SEQ ID NO: 644445 - DNA, 19 bp, Mus musculus
  siRNA target sequence for Kcnh7 (NM_133207.1,2627-2645).
caagtcccaatctgtaaat

SEQ ID NO: 644446 - DNA, 19 bp, Mus musculus
  siRNA target sequence for Kcnh7 (NM_133207.1,2681-2699).
gcgattgtcctttgaaagt

SEQ ID NO: 644447 - DNA, 19 bp, Mus musculus
  siRNA target sequence for Kcnh7 (NM_133207.1,2741-2759).
cgctgacgactctacagat

SEQ ID NO: 644448 - DNA, 19 bp, Mus musculus
  siRNA target sequence for Kcnh7 (NM_133207.1,2747-2765).
cgactctacagatacaata

SEQ ID NO: 644449 - DNA, 19 bp, Mus musculus
  siRNA target sequence for Kcnh7 (NM_133207.1,2858-2876).
cttcttaggaacagtagat

SEQ ID NO: 644450 - DNA, 19 bp, Mus musculus
  siRNA target sequence for Kcnh7 (NM_133207.1,2964-2982).
cactcctgcagagatatca

SEQ ID NO: 644451 - DNA, 19 bp, Mus musculus
  siRNA target sequence for Kcnh7 (NM_133207.1,2966-2984).
ctcctgcagagatatcact

SEQ ID NO: 644452 - DNA, 19 bp, Mus musculus
  siRNA target sequence for Kcnh7 (NM_133207.1,3018-3036).
gctcaacctgaagaatgta

SEQ ID NO: 644453 - DNA, 19 bp, Mus musculus
  siRNA target sequence for Kcnh7 (NM_133207.1,3105-3123).
gtggagcaaagattagatt

SEQ ID NO: 644454 - DNA, 19 bp, Mus musculus
  siRNA target sequence for Kcnh7 (NM_133207.1,3110-3128).
gcaaagattagatttactt

SEQ ID NO: 644455 - DNA, 19 bp, Mus musculus
  siRNA target sequence for Kcnh7 (NM_133207.1,3134-3152).
gcaacttaacagacttgaa

SEQ ID NO: 644456 - DNA, 19 bp, Mus musculus
  siRNA target sequence for Kcnh7 (NM_133207.1,3135-3153).
caacttaacagacttgaat

SEQ ID NO: 644457 - DNA, 19 bp, Mus musculus
  siRNA target sequence for Kcnh7 (NM_133207.1,3291-3309).
cccagagcatccattaaga

SEQ ID NO: 644458 - DNA, 19 bp, Mus musculus
  siRNA target sequence for Kcnh7 (NM_133207.1,3351-3369).
ctcgacctcgaaaaatcca

SEQ ID NO: 644459 - DNA, 19 bp, Mus musculus
  siRNA target sequence for Kcnh7 (NM_133207.1,3353-3371).
cgacctcgaaaaatccaaa

SEQ ID NO: 644460 - DNA, 19 bp, Mus musculus
  siRNA target sequence for Kcnh7 (NM_133207.1,3477-3495).
gaccctcggcaaaggaaaa

SEQ ID NO: 644461 - DNA, 19 bp, Mus musculus
  siRNA target sequence for Kcnh7 (NM_133207.1,3479-3497).
ccctcggcaaaggaaaact

SEQ ID NO: 644462 - DNA, 19 bp, Mus musculus
  siRNA target sequence for Kcnh7 (NM_133207.1,3481-3499).
ctcggcaaaggaaaactta

SEQ ID NO: 644463 - DNA, 19 bp, Mus musculus
  siRNA target sequence for Kcnk2 (NM_010607.1,585-603).
gagtgactcggccattaat

SEQ ID NO: 644464 - DNA, 19 bp, Mus musculus
  siRNA target sequence for Kcnk2 (NM_010607.1,587-605).
gtgactcggccattaatgt

SEQ ID NO: 644465 - DNA, 19 bp, Mus musculus
  siRNA target sequence for Kcnk2 (NM_010607.1,589-607).
gactcggccattaatgtta

SEQ ID NO: 644466 - DNA, 19 bp, Mus musculus
  siRNA target sequence for Kcnk2 (NM_010607.1,593-611).
cggccattaatgttatgaa

SEQ ID NO: 644467 - DNA, 19 bp, Mus musculus
  siRNA target sequence for Kcnk2 (NM_010607.1,620-638).
cagtctccacgattttcct

SEQ ID NO: 644468 - DNA, 19 bp, Mus musculus
  siRNA target sequence for Kcnk2 (NM_010607.1,783-801).
cgaactcatccagcaaata

SEQ ID NO: 644469 - DNA, 19 bp, Mus musculus
  siRNA target sequence for Kcnk2 (NM_010607.1,934-952).
cgaactgaaggtggaaaaa

SEQ ID NO: 644470 - DNA, 19 bp, Mus musculus
  siRNA target sequence for Kcnk2 (NM_010607.1,1016-1034).
gtgatcagctaggaactat

SEQ ID NO: 644471 - DNA, 19 bp, Mus musculus
  siRNA target sequence for Kcnk2 (NM_010607.1,1018-1036).
gatcagctaggaactatat

SEQ ID NO: 644472 - DNA, 19 bp, Mus musculus
  siRNA target sequence for Kcnk2 (NM_010607.1,1023-1041).
gctaggaactatatttgga

SEQ ID NO: 644473 - DNA, 19 bp, Mus musculus
  siRNA target sequence for Kcnk2 (NM_010607.1,1024-1042).
ctaggaactatatttggaa

SEQ ID NO: 644474 - DNA, 19 bp, Mus musculus
  siRNA target sequence for Kcnk2 (NM_010607.1,1088-1106).
gtcagacgaagattcgtat

SEQ ID NO: 644475 - DNA, 19 bp, Mus musculus
  siRNA target sequence for Kcnk2 (NM_010607.1,1153-1171).
gctctccctgcggtcatat

SEQ ID NO: 644476 - DNA, 19 bp, Mus musculus
  siRNA target sequence for Kcnk2 (NM_010607.1,1154-1172).
ctctccctgcggtcatatt

SEQ ID NO: 644477 - DNA, 19 bp, Mus musculus
  siRNA target sequence for Kcnk2 (NM_010607.1,1156-1174).
ctccctgcggtcatattca

SEQ ID NO: 644478 - DNA, 19 bp, Mus musculus
  siRNA target sequence for Kcnk2 (NM_010607.1,1193-1211).
gcgccctggacgctatcta

SEQ ID NO: 644479 - DNA, 19 bp, Mus musculus
  siRNA target sequence for Kcnk2 (NM_010607.1,1194-1212).
cgccctggacgctatctat

SEQ ID NO: 644480 - DNA, 19 bp, Mus musculus
  siRNA target sequence for Kcnk2 (NM_010607.1,1195-1213).
gccctggacgctatctatt

SEQ ID NO: 644481 - DNA, 19 bp, Mus musculus
  siRNA target sequence for Kcnk2 (NM_010607.1,1196-1214).
ccctggacgctatctattt

SEQ ID NO: 644482 - DNA, 19 bp, Mus musculus
  siRNA target sequence for Kcnk2 (NM_010607.1,1205-1223).
ctatctattttgtggttat

SEQ ID NO: 644483 - DNA, 19 bp, Mus musculus
  siRNA target sequence for Kcnk2 (NM_010607.1,1226-1244).
ctctgacgaccattggatt

SEQ ID NO: 644484 - DNA, 19 bp, Mus musculus
  siRNA target sequence for Kcnk2 (NM_010607.1,1230-1248).
gacgaccattggatttgga

SEQ ID NO: 644485 - DNA, 19 bp, Mus musculus
  siRNA target sequence for Kcnk2 (NM_010607.1,1261-1279).
ggtggatcagacattgaat

SEQ ID NO: 644486 - DNA, 19 bp, Mus musculus
  siRNA target sequence for Kcnk2 (NM_010607.1,1320-1338).
cgttgggctggcctacttt

SEQ ID NO: 644487 - DNA, 19 bp, Mus musculus
  siRNA target sequence for Kcnk2 (NM_010607.1,1367-1385).
ggctacgggtgatctctaa

SEQ ID NO: 644488 - DNA, 19 bp, Mus musculus
  siRNA target sequence for Kcnk2 (NM_010607.1,1369-1387).
ctacgggtgatctctaaga

SEQ ID NO: 644489 - DNA, 19 bp, Mus musculus
  siRNA target sequence for Kcnk2 (NM_010607.1,1372-1390).
cgggtgatctctaagaaga

SEQ ID NO: 644490 - DNA, 19 bp, Mus musculus
  siRNA target sequence for Kcnk2 (NM_010607.1,1642-1660).
gctgagagcatctatctga

SEQ ID NO: 644491 - DNA, 19 bp, Mus musculus
  siRNA target sequence for Kcnq1 (NM_008434.1,227-245).
cagggccgagtctacaact

SEQ ID NO: 644492 - DNA, 19 bp, Mus musculus
  siRNA target sequence for Kcnq1 (NM_008434.1,257-275).
cccacgggttggaagtgtt

SEQ ID NO: 644493 - DNA, 19 bp, Mus musculus
  siRNA target sequence for Kcnq1 (NM_008434.1,325-343).
cagtgtcctgtccactatt

SEQ ID NO: 644494 - DNA, 19 bp, Mus musculus
  siRNA target sequence for Kcnq1 (NM_008434.1,403-421).
gttctttgggacagaatat

SEQ ID NO: 644495 - DNA, 19 bp, Mus musculus
  siRNA target sequence for Kcnq1 (NM_008434.1,1337-1355).
ccccatttcttgagaacaa

SEQ ID NO: 644496 - DNA, 19 bp, Mus musculus
  siRNA target sequence for Kcnq1 (NM_008434.1,1551-1569).
gccacctgaaccttatggt

SEQ ID NO: 644497 - DNA, 19 bp, Mus musculus
  siRNA target sequence for Kcnq1 (NM_008434.1,1561-1579).
ccttatggtgcgcattaaa

SEQ ID NO: 644498 - DNA, 19 bp, Mus musculus
  siRNA target sequence for Kcnq1 (NM_008434.1,1567-1585).
ggtgcgcattaaagaacta

SEQ ID NO: 644499 - DNA, 19 bp, Mus musculus
  siRNA target sequence for Kcnq1 (NM_008434.1,1611-1629).
ggaagccatctttgttcat

SEQ ID NO: 644500 - DNA, 19 bp, Mus musculus
  siRNA target sequence for Kcnq1 (NM_008434.1,1718-1736).
cagagactggtgatcatca

SEQ ID NO: 644501 - DNA, 19 bp, Mus musculus
  siRNA target sequence for Kcnq1 (NM_008434.1,1789-1807).
cagcaggtcacaagttgta

SEQ ID NO: 644502 - DNA, 19 bp, Mus musculus
  siRNA target sequence for Kcnq3 (NM_152923.1,317-335).
ggcgcatccaaactttgat

SEQ ID NO: 644503 - DNA, 19 bp, Mus musculus
  siRNA target sequence for Kcnq3 (NM_152923.1,321-339).
catccaaactttgatctat

SEQ ID NO: 644504 - DNA, 19 bp, Mus musculus
  siRNA target sequence for Kcnq3 (NM_152923.1,481-499).
gaaacctttgctattttca

SEQ ID NO: 644505 - DNA, 19 bp, Mus musculus
  siRNA target sequence for Kcnq3 (NM_152923.1,539-557).
gatgttgctgtcgatacaa

SEQ ID NO: 644506 - DNA, 19 bp, Mus musculus
  siRNA target sequence for Kcnq3 (NM_152923.1,563-581).
ggcgtggacggctaaagtt

SEQ ID NO: 644507 - DNA, 19 bp, Mus musculus
  siRNA target sequence for Kcnq3 (NM_152923.1,564-582).
gcgtggacggctaaagttt

SEQ ID NO: 644508 - DNA, 19 bp, Mus musculus
  siRNA target sequence for Kcnq3 (NM_152923.1,708-726).
gcgcatgcttcgaatggat

SEQ ID NO: 644509 - DNA, 19 bp, Mus musculus
  siRNA target sequence for Kcnq3 (NM_152923.1,709-727).
cgcatgcttcgaatggata

SEQ ID NO: 644510 - DNA, 19 bp, Mus musculus
  siRNA target sequence for Kcnq3 (NM_152923.1,813-831).
gacactcatcctttcttca

SEQ ID NO: 644511 - DNA, 19 bp, Mus musculus
  siRNA target sequence for Kcnq3 (NM_152923.1,941-959).
cactggccaccattggtta

SEQ ID NO: 644512 - DNA, 19 bp, Mus musculus
  siRNA target sequence for Kcnq3 (NM_152923.1,1147-1165).
gcctggagatattatgcta

SEQ ID NO: 644513 - DNA, 19 bp, Mus musculus
  siRNA target sequence for Kcnq3 (NM_152923.1,1191-1209).
ggcaacctggagattttat

SEQ ID NO: 644514 - DNA, 19 bp, Mus musculus
  siRNA target sequence for Kcnq3 (NM_152923.1,1197-1215).
ctggagattttatgaatca

SEQ ID NO: 644515 - DNA, 19 bp, Mus musculus
  siRNA target sequence for Kcnq3 (NM_152923.1,1199-1217).
ggagattttatgaatcagt

SEQ ID NO: 644516 - DNA, 19 bp, Mus musculus
  siRNA target sequence for Kcnq3 (NM_152923.1,1200-1218).
gagattttatgaatcagtt

SEQ ID NO: 644517 - DNA, 19 bp, Mus musculus
  siRNA target sequence for Kcnq3 (NM_152923.1,1227-1245).
cccattcttcaggaaagaa

SEQ ID NO: 644518 - DNA, 19 bp, Mus musculus
  siRNA target sequence for Kcnq3 (NM_152923.1,1285-1303).
gatcgggttcgcctttcta

SEQ ID NO: 644519 - DNA, 19 bp, Mus musculus
  siRNA target sequence for Kcnq3 (NM_152923.1,1306-1324).
cctcgtggtagcaatacta

SEQ ID NO: 644520 - DNA, 19 bp, Mus musculus
  siRNA target sequence for Kcnq3 (NM_152923.1,1307-1325).
ctcgtggtagcaatactaa

SEQ ID NO: 644521 - DNA, 19 bp, Mus musculus
  siRNA target sequence for Kcnq3 (NM_152923.1,1332-1350).
gctatttacccctctgaat

SEQ ID NO: 644522 - DNA, 19 bp, Mus musculus
  siRNA target sequence for Kcnq3 (NM_152923.1,1347-1365).
gaatgtagatgccatagaa

SEQ ID NO: 644523 - DNA, 19 bp, Mus musculus
  siRNA target sequence for Kcnq3 (NM_152923.1,1560-1578).
ccgagctgtcagaattcta

SEQ ID NO: 644524 - DNA, 19 bp, Mus musculus
  siRNA target sequence for Kcnq3 (NM_152923.1,1576-1594).
ctacagttccgtctatata

SEQ ID NO: 644525 - DNA, 19 bp, Mus musculus
  siRNA target sequence for Kcnq3 (NM_152923.1,1579-1597).
cagttccgtctatataaaa

SEQ ID NO: 644526 - DNA, 19 bp, Mus musculus
  siRNA target sequence for Kcnq3 (NM_152923.1,1611-1629).
gacgttgaggccttatgat

SEQ ID NO: 644527 - DNA, 19 bp, Mus musculus
  siRNA target sequence for Kcnq3 (NM_152923.1,1613-1631).
cgttgaggccttatgatgt

SEQ ID NO: 644528 - DNA, 19 bp, Mus musculus
  siRNA target sequence for Kcnq3 (NM_152923.1,1617-1635).
gaggccttatgatgtgaaa

SEQ ID NO: 644529 - DNA, 19 bp, Mus musculus
  siRNA target sequence for Kcnq3 (NM_152923.1,1693-1711).
ctacagacaagaatagata

SEQ ID NO: 644530 - DNA, 19 bp, Mus musculus
  siRNA target sequence for Kcnq3 (NM_152923.1,1698-1716).
gacaagaatagatatgatt

SEQ ID NO: 644531 - DNA, 19 bp, Mus musculus
  siRNA target sequence for Kcnq3 (NM_152923.1,1788-1806).
ccagcagtctccaaggaat

SEQ ID NO: 644532 - DNA, 19 bp, Mus musculus
  siRNA target sequence for Kcnq3 (NM_152923.1,1854-1872).
catgatggggaagtttgta

SEQ ID NO: 644533 - DNA, 19 bp, Mus musculus
  siRNA target sequence for Kcnq3 (NM_152923.1,1929-1947).
gcatatgcagcatatggaa

SEQ ID NO: 644534 - DNA, 19 bp, Mus musculus
  siRNA target sequence for Kcnq3 (NM_152923.1,1967-1985).
ctgagtactacccaactaa

SEQ ID NO: 644535 - DNA, 19 bp, Mus musculus
  siRNA target sequence for Kcnq3 (NM_152923.1,2023-2041).
gacaacaggtactctgatt

SEQ ID NO: 644536 - DNA, 19 bp, Mus musculus
  siRNA target sequence for Kcnq3 (NM_152923.1,2038-2056).
gatttgaaaaccatcatct

SEQ ID NO: 644537 - DNA, 19 bp, Mus musculus
  siRNA target sequence for Kcnq3 (NM_152923.1,2127-2145).
cccttacgggttttttgca

SEQ ID NO: 644538 - DNA, 19 bp, Mus musculus
  siRNA target sequence for Kcnq3 (NM_152923.1,2133-2151).
cgggttttttgcacatgat

SEQ ID NO: 644539 - DNA, 19 bp, Mus musculus
  siRNA target sequence for Kcnq3 (NM_152923.1,2167-2185).
cgagggggacccagttcta

SEQ ID NO: 644540 - DNA, 19 bp, Mus musculus
  siRNA target sequence for Kcnq3 (NM_152923.1,2183-2201).
ctacaaaggctcaagctaa

SEQ ID NO: 644541 - DNA, 19 bp, Mus musculus
  siRNA target sequence for Kcnq3 (NM_152923.1,2208-2226).
ctcctcgggaagtacatat

SEQ ID NO: 644542 - DNA, 19 bp, Mus musculus
  siRNA target sequence for Kcnq3 (NM_152923.1,2211-2229).
ctcgggaagtacatatgca

SEQ ID NO: 644543 - DNA, 19 bp, Mus musculus
  siRNA target sequence for Kcnq3 (NM_152923.1,2335-2353).
cagagacgcagcatcacta

SEQ ID NO: 644544 - DNA, 19 bp, Mus musculus
  siRNA target sequence for Kcnq3 (NM_152923.1,2375-2393).
ccctcatgtccgtcaatca

SEQ ID NO: 644545 - DNA, 19 bp, Mus musculus
  siRNA target sequence for Kcnq3 (NM_152923.1,2437-2455).
gacagagatgattatgtat

SEQ ID NO: 644546 - DNA, 19 bp, Mus musculus
  siRNA target sequence for Kcnq3 (NM_152923.1,2564-2582).
catccactggggatggtat

SEQ ID NO: 644547 - DNA, 19 bp, Mus musculus
  siRNA target sequence for Kcnq3 (NM_152923.1,2572-2590).
ggggatggtatttcagatt

SEQ ID NO: 644548 - DNA, 19 bp, Mus musculus
  siRNA target sequence for Kcnv2 (NM_183179.1,296-314).
ccgagggcaactacaatta

SEQ ID NO: 644549 - DNA, 19 bp, Mus musculus
  siRNA target sequence for Kcnv2 (NM_183179.1,298-316).
gagggcaactacaattact

SEQ ID NO: 644550 - DNA, 19 bp, Mus musculus
  siRNA target sequence for Kcnv2 (NM_183179.1,303-321).
caactacaattactacatt

SEQ ID NO: 644551 - DNA, 19 bp, Mus musculus
  siRNA target sequence for Kcnv2 (NM_183179.1,412-430).
ctggatggccacaacgata

SEQ ID NO: 644552 - DNA, 19 bp, Mus musculus
  siRNA target sequence for Kcnv2 (NM_183179.1,427-445).
gatactccagcccaaatgt

SEQ ID NO: 644553 - DNA, 19 bp, Mus musculus
  siRNA target sequence for Kcnv2 (NM_183179.1,719-737).
ggggagtgaggctcaaata

SEQ ID NO: 644554 - DNA, 19 bp, Mus musculus
  siRNA target sequence for Kcnv2 (NM_183179.1,721-739).
ggagtgaggctcaaataca

SEQ ID NO: 644555 - DNA, 19 bp, Mus musculus
  siRNA target sequence for Kcnv2 (NM_183179.1,1584-1602).
ccacctgggcaggcttttt

SEQ ID NO: 644556 - DNA, 19 bp, Mus musculus
  siRNA target sequence for Kcnv2 (NM_183179.1,1613-1631).
gcatcgcttttggcattat

SEQ ID NO: 644557 - DNA, 19 bp, Mus musculus
  siRNA target sequence for Kcnv2 (NM_183179.1,1618-1636).
gcttttggcattattctca

SEQ ID NO: 644558 - DNA, 19 bp, Mus musculus
  siRNA target sequence for Kcnv2 (NM_183179.1,1619-1637).
cttttggcattattctcaa

SEQ ID NO: 644559 - DNA, 19 bp, Mus musculus
  siRNA target sequence for Kcnv2 (NM_183179.1,1730-1748).
gaaaggtcaactttatgca

SEQ ID NO: 644560 - DNA, 19 bp, Mus musculus
  siRNA target sequence for Kctd11 (NM_153143.2,1228-1246).
ctaatgccagccaacctta

SEQ ID NO: 644561 - DNA, 19 bp, Mus musculus
  siRNA target sequence for Kctd11 (NM_153143.2,1296-1314).
ccggcacatcctcaatttt

SEQ ID NO: 644562 - DNA, 19 bp, Mus musculus
  siRNA target sequence for Kctd11 (NM_153143.2,1297-1315).
cggcacatcctcaattttt

SEQ ID NO: 644563 - DNA, 19 bp, Mus musculus
  siRNA target sequence for Kctd11 (NM_153143.2,1298-1316).
ggcacatcctcaatttttt

SEQ ID NO: 644564 - DNA, 19 bp, Mus musculus
  siRNA target sequence for Kctd11 (NM_153143.2,1341-1359).
ccgtgggtacggagaaact

SEQ ID NO: 644565 - DNA, 19 bp, Mus musculus
  siRNA target sequence for Kctd11 (NM_153143.2,1600-1618).
gctgccatgcgcaacagat

SEQ ID NO: 644566 - DNA, 19 bp, Mus musculus
  siRNA target sequence for Kctd11 (NM_153143.2,1601-1619).
ctgccatgcgcaacagatt

SEQ ID NO: 644567 - DNA, 19 bp, Mus musculus
  siRNA target sequence for Kctd11 (NM_153143.2,1605-1623).
catgcgcaacagatttggt

SEQ ID NO: 644568 - DNA, 19 bp, Mus musculus
  siRNA target sequence for Kctd11 (NM_153143.2,1695-1713).
ccctgaagtagagtatcaa

SEQ ID NO: 644569 - DNA, 19 bp, Mus musculus
  siRNA target sequence for Kctd11 (NM_153143.2,1696-1714).
cctgaagtagagtatcaaa

SEQ ID NO: 644570 - DNA, 19 bp, Mus musculus
  siRNA target sequence for Kctd11 (NM_153143.2,1855-1873).
gaccttctgaactctagat

SEQ ID NO: 644571 - DNA, 19 bp, Mus musculus
  siRNA target sequence for Kctd12 (NM_177715.2,319-337).
ggagggcaggtgtatgtga

SEQ ID NO: 644572 - DNA, 19 bp, Mus musculus
  siRNA target sequence for Kctd12 (NM_177715.2,371-389).
cgctgctctggcgtatgtt

SEQ ID NO: 644573 - DNA, 19 bp, Mus musculus
  siRNA target sequence for Kctd12 (NM_177715.2,425-443).
gcaaaggccgcttctttct

SEQ ID NO: 644574 - DNA, 19 bp, Mus musculus
  siRNA target sequence for Kcnma3 (NM_008432.1,11-29).
cattgctagacagtttaaa

SEQ ID NO: 644575 - DNA, 19 bp, Mus musculus
  siRNA target sequence for Kcnma3 (NM_008432.1,16-34).
ctagacagtttaaatcaga

SEQ ID NO: 644576 - DNA, 19 bp, Mus musculus
  siRNA target sequence for Kcnma3 (NM_008432.1,42-60).
gacggaaacgtcatgtaca

SEQ ID NO: 644577 - DNA, 19 bp, Mus musculus
  siRNA target sequence for Kcnma3 (NM_008432.1,44-62).
cggaaacgtcatgtacaat

SEQ ID NO: 644578 - DNA, 19 bp, Mus musculus
  siRNA target sequence for Kcnma3 (NM_008432.1,53-71).
catgtacaatcgaaatcca

SEQ ID NO: 644579 - DNA, 19 bp, Mus musculus
  siRNA target sequence for Kcnma3 (NM_008432.1,110-128).
ggggactcatcatcttatt

SEQ ID NO: 644580 - DNA, 19 bp, Mus musculus
  siRNA target sequence for Kcnma3 (NM_008432.1,113-131).
gactcatcatcttattcct

SEQ ID NO: 644581 - DNA, 19 bp, Mus musculus
  siRNA target sequence for Kcnma3 (NM_008432.1,115-133).
ctcatcatcttattccttt

SEQ ID NO: 644582 - DNA, 19 bp, Mus musculus
  siRNA target sequence for Kcnma3 (NM_008432.1,187-205).
ggactcttggaactattct

SEQ ID NO: 644583 - DNA, 19 bp, Mus musculus
  siRNA target sequence for Kcnma3 (NM_008432.1,190-208).
ctcttggaactattctcat

SEQ ID NO: 644584 - DNA, 19 bp, Mus musculus
  siRNA target sequence for Kcnma3 (NM_008432.1,215-233).
gaatcgaggctaatccttt

SEQ ID NO: 644585 - DNA, 19 bp, Mus musculus
  siRNA target sequence for Kcnma3 (NM_008432.1,234-252).
gaggaaactttactttcat

SEQ ID NO: 644586 - DNA, 19 bp, Mus musculus
  siRNA target sequence for Kcnma3 (NM_008432.1,296-314).
ccgtcgtggggcaagtgtt

SEQ ID NO: 644587 - DNA, 19 bp, Mus musculus
  siRNA target sequence for Kcnma3 (NM_008432.1,315-333).
ggtgatccttgtctttgta

SEQ ID NO: 644588 - DNA, 19 bp, Mus musculus
  siRNA target sequence for Kcnma3 (NM_008432.1,342-360).
cgggtctcttgtgatctat

SEQ ID NO: 644589 - DNA, 19 bp, Mus musculus
  siRNA target sequence for Kcnma3 (NM_008432.1,352-370).
gtgatctatttcatcaatt

SEQ ID NO: 644590 - DNA, 19 bp, Mus musculus
  siRNA target sequence for Kcnma3 (NM_008432.1,354-372).
gatctatttcatcaattca

SEQ ID NO: 644591 - DNA, 19 bp, Mus musculus
  siRNA target sequence for Kcnma3 (NM_008432.1,379-397).
cctgttcgaaggtgttctt

SEQ ID NO: 644592 - DNA, 19 bp, Mus musculus
  siRNA target sequence for Kcnma3 (NM_008432.1,382-400).
gttcgaaggtgttcttcat

SEQ ID NO: 644593 - DNA, 19 bp, Mus musculus
  siRNA target sequence for Kcnma3 (NM_008432.1,392-410).
gttcttcatatgaagacaa

SEQ ID NO: 644594 - DNA, 19 bp, Mus musculus
  siRNA target sequence for Kcnma3 (NM_008432.1,498-516).
ctggttggagatgaattca

SEQ ID NO: 644595 - DNA, 19 bp, Mus musculus
  siRNA target sequence for Kcnma3 (NM_008432.1,504-522).
ggagatgaattcaattgta

SEQ ID NO: 644596 - DNA, 19 bp, Mus musculus
  siRNA target sequence for Kcnma3 (NM_008432.1,534-552).
catcccgccaacctttatt

SEQ ID NO: 644597 - DNA, 19 bp, Mus musculus
  siRNA target sequence for Kcnma3 (NM_008432.1,537-555).
cccgccaacctttatttct

SEQ ID NO: 644598 - DNA, 19 bp, Mus musculus
  siRNA target sequence for Kcnma3 (NM_008432.1,576-594).
gctaggtttgagatttcta

SEQ ID NO: 644599 - DNA, 19 bp, Mus musculus
  siRNA target sequence for Kcnma3 (NM_008432.1,577-595).
ctaggtttgagatttctaa

SEQ ID NO: 644600 - DNA, 19 bp, Mus musculus
  siRNA target sequence for Kcnma3 (NM_008432.1,612-630).
cgaactccctaaaatctta

SEQ ID NO: 644601 - DNA, 19 bp, Mus musculus
  siRNA target sequence for Kcnma3 (NM_008432.1,643-661).
gtcatcaagaccagcaatt

SEQ ID NO: 644602 - DNA, 19 bp, Mus musculus
  siRNA target sequence for Kcnma3 (NM_008432.1,664-682).
gtgaagctttccaaactgt

SEQ ID NO: 644603 - DNA, 19 bp, Mus musculus
  siRNA target sequence for Kcnma3 (NM_008432.1,679-697).
ctgttgtcaatagttatca

SEQ ID NO: 644604 - DNA, 19 bp, Mus musculus
  siRNA target sequence for Kcnma3 (NM_008432.1,681-699).
gttgtcaatagttatcagt

SEQ ID NO: 644605 - DNA, 19 bp, Mus musculus
  siRNA target sequence for Kcnma3 (NM_008432.1,752-770).
cctggctcaacggaagaaa

SEQ ID NO: 644606 - DNA, 19 bp, Mus musculus
  siRNA target sequence for Kcnma3 (NM_008432.1,783-801).
gtcatactttgagtctatt

SEQ ID NO: 644607 - DNA, 19 bp, Mus musculus
  siRNA target sequence for Kcnma3 (NM_008432.1,785-803).
catactttgagtctattta

SEQ ID NO: 644608 - DNA, 19 bp, Mus musculus
  siRNA target sequence for Kcnma3 (NM_008432.1,841-859).
gacgtggtggccaagacat

SEQ ID NO: 644609 - DNA, 19 bp, Mus musculus
  siRNA target sequence for Kcnma3 (NM_008432.1,866-884).
gacggattttcattgtttt

SEQ ID NO: 644610 - DNA, 19 bp, Mus musculus
  siRNA target sequence for Kcnma3 (NM_008432.1,888-906).
cacccttgggagtttgata

SEQ ID NO: 644611 - DNA, 19 bp, Mus musculus
  siRNA target sequence for Kcnma3 (NM_008432.1,928-946).
gaaatggtggagctctttt

SEQ ID NO: 644612 - DNA, 19 bp, Mus musculus
  siRNA target sequence for Kcnma3 (NM_008432.1,1064-1082).
ggaagtccggggaaatcaa

SEQ ID NO: 644613 - DNA, 19 bp, Mus musculus
  siRNA target sequence for Kcnma3 (NM_008432.1,1068-1086).
gtccggggaaatcaatatt

SEQ ID NO: 644614 - DNA, 19 bp, Mus musculus
  siRNA target sequence for Kcnma3 (NM_008432.1,1070-1088).
ccggggaaatcaatattga

SEQ ID NO: 644615 - DNA, 19 bp, Mus musculus
  siRNA target sequence for Kcnma3 (NM_008432.1,1073-1091).
gggaaatcaatattgagat

SEQ ID NO: 644616 - DNA, 19 bp, Mus musculus
  siRNA target sequence for Kcnma3 (NM_008432.1,1223-1241).
cggaggcgtgcctgattct

SEQ ID NO: 644617 - DNA, 19 bp, Mus musculus
  siRNA target sequence for Kcnma3 (NM_008432.1,1224-1242).
ggaggcgtgcctgattcta

SEQ ID NO: 644618 - DNA, 19 bp, Mus musculus
  siRNA target sequence for Kcnma3 (NM_008432.1,1234-1252).
ctgattctagccaaccatt

SEQ ID NO: 644619 - DNA, 19 bp, Mus musculus
  siRNA target sequence for Kcnma3 (NM_008432.1,1248-1266).
ccatttctgtagtgactta

SEQ ID NO: 644620 - DNA, 19 bp, Mus musculus
  siRNA target sequence for Kcnma3 (NM_008432.1,1270-1288).
gacgaagacaactcaaaca

SEQ ID NO: 644621 - DNA, 19 bp, Mus musculus
  siRNA target sequence for Kcnma3 (NM_008432.1,1272-1290).
cgaagacaactcaaacatt

SEQ ID NO: 644622 - DNA, 19 bp, Mus musculus
  siRNA target sequence for Kcnma3 (NM_008432.1,1276-1294).
gacaactcaaacattatga

SEQ ID NO: 644623 - DNA, 19 bp, Mus musculus
  siRNA target sequence for Kcnma3 (NM_008432.1,1297-1315).
gtgctctcgatcaagaact

SEQ ID NO: 644624 - DNA, 19 bp, Mus musculus
  siRNA target sequence for Kcnma3 (NM_008432.1,1299-1317).
gctctcgatcaagaactat

SEQ ID NO: 644625 - DNA, 19 bp, Mus musculus
  siRNA target sequence for Kcnma3 (NM_008432.1,1300-1318).
ctctcgatcaagaactatt

SEQ ID NO: 644626 - DNA, 19 bp, Mus musculus
  siRNA target sequence for Kcnma3 (NM_008432.1,1302-1320).
ctcgatcaagaactattat

SEQ ID NO: 644627 - DNA, 19 bp, Mus musculus
  siRNA target sequence for Kcnma3 (NM_008432.1,1305-1323).
gatcaagaactattatcca

SEQ ID NO: 644628 - DNA, 19 bp, Mus musculus
  siRNA target sequence for Kcnma3 (NM_008432.1,1322-1340).
cacagaccagagtcatcat

SEQ ID NO: 644629 - DNA, 19 bp, Mus musculus
  siRNA target sequence for Kcnma3 (NM_008432.1,1329-1347).
cagagtcatcattcagata

SEQ ID NO: 644630 - DNA, 19 bp, Mus musculus
  siRNA target sequence for Kcnma3 (NM_008432.1,1351-1369).
cagtctcaaaacaaggttt

SEQ ID NO: 644631 - DNA, 19 bp, Mus musculus
  siRNA target sequence for Kcnma3 (NM_008432.1,1397-1415).
ggagtgctggagacaatat

SEQ ID NO: 644632 - DNA, 19 bp, Mus musculus
  siRNA target sequence for Kcnma3 (NM_008432.1,1597-1615).
gacttcgtggggatgacat

SEQ ID NO: 644633 - DNA, 19 bp, Mus musculus
  siRNA target sequence for Kcnma3 (NM_008432.1,1635-1653).
ctgctttgtgaagctaaat

SEQ ID NO: 644634 - DNA, 19 bp, Mus musculus
  siRNA target sequence for Kcnma3 (NM_008432.1,1671-1689).
ccaacacaagcccttcttt

SEQ ID NO: 644635 - DNA, 19 bp, Mus musculus
  siRNA target sequence for Kcnma3 (NM_008432.1,1692-1710).
cagttgttgcactctgata

SEQ ID NO: 644636 - DNA, 19 bp, Mus musculus
  siRNA target sequence for Kcnma3 (NM_008432.1,1694-1712).
gttgttgcactctgatact

SEQ ID NO: 644637 - DNA, 19 bp, Mus musculus
  siRNA target sequence for Kcnma3 (NM_008432.1,1724-1742).
cccaagtgaggctgaataa

SEQ ID NO: 644638 - DNA, 19 bp, Mus musculus
  siRNA target sequence for Kcnma3 (NM_008432.1,1781-1799).
ccgtcaaaagggctttctt

SEQ ID NO: 644639 - DNA, 19 bp, Mus musculus
  siRNA target sequence for Kcnma3 (NM_008432.1,1837-1855).
gagctaattggaaagtgta

SEQ ID NO: 644640 - DNA, 19 bp, Mus musculus
  siRNA target sequence for Kcnma3 (NM_008432.1,1869-1887).
gagccgacaacaactcata

SEQ ID NO: 644641 - DNA, 19 bp, Mus musculus
  siRNA target sequence for Kcnma3 (NM_008432.1,1940-1958).
cacacatccacgcttctat

SEQ ID NO: 644642 - DNA, 19 bp, Mus musculus
  siRNA target sequence for Kcnma3 (NM_008432.1,1950-1968).
cgcttctatgtcaacagaa

SEQ ID NO: 644643 - DNA, 19 bp, Mus musculus
  siRNA target sequence for Kcnma3 (NM_008432.1,1951-1969).
gcttctatgtcaacagaaa

SEQ ID NO: 644644 - DNA, 19 bp, Mus musculus
  siRNA target sequence for Kcnma3 (NM_008432.1,1955-1973).
ctatgtcaacagaaattca

SEQ ID NO: 644645 - DNA, 19 bp, Mus musculus
  siRNA target sequence for Kcnma3 (NM_008432.1,1964-1982).
cagaaattcacacttgttt

SEQ ID NO: 644646 - DNA, 19 bp, Mus musculus
  siRNA target sequence for Kcnma3 (NM_008432.1,1974-1992).
cacttgtttttcaagagaa

SEQ ID NO: 644647 - DNA, 19 bp, Mus musculus
  siRNA target sequence for Kcnma3 (NM_008432.1,2137-2155).
gcaaaacacgagtttcaga

SEQ ID NO: 644648 - DNA, 19 bp, Mus musculus
  siRNA target sequence for Kcnma3 (NM_008432.1,2148-2166).
gtttcagaaccacattgta

SEQ ID NO: 644649 - DNA, 19 bp, Mus musculus
  siRNA target sequence for Kcnma3 (NM_008432.1,2306-2324).
ggcgatttctccgaaactt

SEQ ID NO: 644650 - DNA, 19 bp, Mus musculus
  siRNA target sequence for Kcnma3 (NM_008432.1,2307-2325).
gcgatttctccgaaacttt

SEQ ID NO: 644651 - DNA, 19 bp, Mus musculus
  siRNA target sequence for Kcnma3 (NM_008432.1,2316-2334).
ccgaaactttcccaagata

SEQ ID NO: 644652 - DNA, 19 bp, Mus musculus
  siRNA target sequence for Kcnma3 (NM_008432.1,2549-2567).
ctgcctttgatagtaaaga

SEQ ID NO: 644653 - DNA, 19 bp, Mus musculus
  siRNA target sequence for Kcnma3 (NM_008432.1,2594-2612).
ccattctcactgaactgaa

SEQ ID NO: 644654 - DNA, 19 bp, Mus musculus
  siRNA target sequence for Kcnma3 (NM_008432.1,2617-2635).
ccctccaacatccacttta

SEQ ID NO: 644655 - DNA, 19 bp, Mus musculus
  siRNA target sequence for Kcnma3 (NM_008432.1,2621-2639).
ccaacatccactttattga

SEQ ID NO: 644656 - DNA, 19 bp, Mus musculus
  siRNA target sequence for Kcnma3 (NM_008432.1,2700-2718).
ctccaccggtgctgtcttt

SEQ ID NO: 644657 - DNA, 19 bp, Mus musculus
  siRNA target sequence for Kcnma3 (NM_008432.1,2703-2721).
caccggtgctgtcttttca

SEQ ID NO: 644658 - DNA, 19 bp, Mus musculus
  siRNA target sequence for Kcnma3 (NM_008432.1,2705-2723).
ccggtgctgtcttttcaga

SEQ ID NO: 644659 - DNA, 19 bp, Mus musculus
  siRNA target sequence for Kcnma3 (NM_008432.1,2743-2761).
ctggccacgtccttctaca

SEQ ID NO: 644660 - DNA, 19 bp, Mus musculus
  siRNA target sequence for Kcnma3 (NM_008432.1,2745-2763).
ggccacgtccttctacaat

SEQ ID NO: 644661 - DNA, 19 bp, Mus musculus
  siRNA target sequence for Kcnma3 (NM_008432.1,2746-2764).
gccacgtccttctacaatt

SEQ ID NO: 644662 - DNA, 19 bp, Mus musculus
  siRNA target sequence for Kcnma3 (NM_008432.1,2747-2765).
ccacgtccttctacaatta

SEQ ID NO: 644663 - DNA, 19 bp, Mus musculus
  siRNA target sequence for Kcnma3 (NM_008432.1,2751-2769).
gtccttctacaattaccat

SEQ ID NO: 644664 - DNA, 19 bp, Mus musculus
  siRNA target sequence for Kcnma3 (NM_008432.1,2766-2784).
ccatgtcgtggaattactt

SEQ ID NO: 644665 - DNA, 19 bp, Mus musculus
  siRNA target sequence for Kcnma3 (NM_008432.1,2794-2812).
gtgactggaggcataagct

SEQ ID NO: 644666 - DNA, 19 bp, Mus musculus
  siRNA target sequence for Kcnma3 (NM_008432.1,2838-2856).
ggagaagccctataagaca

SEQ ID NO: 644667 - DNA, 19 bp, Mus musculus
  siRNA target sequence for Kcnma3 (NM_008432.1,2928-2946).
cgttctatcaggcattaat

SEQ ID NO: 644668 - DNA, 19 bp, Mus musculus
  siRNA target sequence for Kcnma3 (NM_008432.1,2936-2954).
caggcattaatccaagaaa

SEQ ID NO: 644669 - DNA, 19 bp, Mus musculus
  siRNA target sequence for Kcnma3 (NM_008432.1,3009-3027).
cggcttataccgtatgatt

SEQ ID NO: 644670 - DNA, 19 bp, Mus musculus
  siRNA target sequence for Kcnma3 (NM_008432.1,3011-3029).
gcttataccgtatgattga

SEQ ID NO: 644671 - DNA, 19 bp, Mus musculus
  siRNA target sequence for Kcnma3 (NM_008432.1,3012-3030).
cttataccgtatgattgat

SEQ ID NO: 644672 - DNA, 19 bp, Mus musculus
  siRNA target sequence for Kcnma3 (NM_008432.1,3213-3231).
gcccaggggtcgaatttct

SEQ ID NO: 644673 - DNA, 19 bp, Mus musculus
  siRNA target sequence for Kcnma3 (NM_008432.1,3214-3232).
cccaggggtcgaatttctt

SEQ ID NO: 644674 - DNA, 19 bp, Mus musculus
  siRNA target sequence for Kcnma3 (NM_008432.1,3219-3237).
gggtcgaatttcttcgatt

SEQ ID NO: 644675 - DNA, 19 bp, Mus musculus
  siRNA target sequence for Kcnma3 (NM_008432.1,3249-3267).
gacgagtcccacgatcttt

SEQ ID NO: 644676 - DNA, 19 bp, Mus musculus
  siRNA target sequence for Kcnma3 (NM_008432.1,3309-3327).
cactcccgagtctatcctt

SEQ ID NO: 644677 - DNA, 19 bp, Mus musculus
  siRNA target sequence for Kcnmb1 (NM_031169.2,159-177).
ctacgtcctgggtacaact

SEQ ID NO: 644678 - DNA, 19 bp, Mus musculus
  siRNA target sequence for Kcnmb1 (NM_031169.2,183-201).
gcccctctaccagaaaagt

SEQ ID NO: 644679 - DNA, 19 bp, Mus musculus
  siRNA target sequence for Kcnmb1 (NM_031169.2,204-222).
gtggacccaggaatccata

SEQ ID NO: 644680 - DNA, 19 bp, Mus musculus
  siRNA target sequence for Kcnmb1 (NM_031169.2,207-225).
gacccaggaatccatatgt

SEQ ID NO: 644681 - DNA, 19 bp, Mus musculus
  siRNA target sequence for Kcnmb1 (NM_031169.2,218-236).
ccatatgtcacttgattga

SEQ ID NO: 644682 - DNA, 19 bp, Mus musculus
  siRNA target sequence for Kcnmb1 (NM_031169.2,290-308).
catgcctttgggtcaatgt

SEQ ID NO: 644683 - DNA, 19 bp, Mus musculus
  siRNA target sequence for Kcnmb1 (NM_031169.2,294-312).
cctttgggtcaatgtatca

SEQ ID NO: 644684 - DNA, 19 bp, Mus musculus
  siRNA target sequence for Kcnmb1 (NM_031169.2,386-404).
ccaggaacctggacaacta

SEQ ID NO: 644685 - DNA, 19 bp, Mus musculus
  siRNA target sequence for Kcnmb4 (NM_021452.1,431-449).
ccagccattcacttgctat

SEQ ID NO: 644686 - DNA, 19 bp, Mus musculus
  siRNA target sequence for Kcnmb4 (NM_021452.1,432-450).
cagccattcacttgctatt

SEQ ID NO: 644687 - DNA, 19 bp, Mus musculus
  siRNA target sequence for 1700024D23Rik (NM_029911.1,517-535).
caatcgagacgccaagaaa

SEQ ID NO: 644688 - DNA, 19 bp, Mus musculus
  siRNA target sequence for 1700024D23Rik (NM_029911.1,539-557).
ggtgaactgggatcctaaa

SEQ ID NO: 644689 - DNA, 19 bp, Mus musculus
  siRNA target sequence for 1700024D23Rik (NM_029911.1,624-642).
gttcctcgactctccattt

SEQ ID NO: 644690 - DNA, 19 bp, Mus musculus
  siRNA target sequence for 1700024D23Rik (NM_029911.1,686-704).
gggaggcctgcaaacagtt

SEQ ID NO: 644691 - DNA, 19 bp, Mus musculus
  siRNA target sequence for 1700024D23Rik (NM_029911.1,687-705).
ggaggcctgcaaacagtta

SEQ ID NO: 644692 - DNA, 19 bp, Mus musculus
  siRNA target sequence for 1700024D23Rik (NM_029911.1,690-708).
ggcctgcaaacagttatga

SEQ ID NO: 644693 - DNA, 19 bp, Mus musculus
  siRNA target sequence for 1700024D23Rik (NM_029911.1,802-820).
gcagtcagaagaacacaat

SEQ ID NO: 644694 - DNA, 19 bp, Mus musculus
  siRNA target sequence for 1700024D23Rik (NM_029911.1,823-841).
ccttggagaaggcagaatt

SEQ ID NO: 644695 - DNA, 19 bp, Mus musculus
  siRNA target sequence for 1700024D23Rik (NM_029911.1,919-937).
gagtcagcccagtaggaaa

SEQ ID NO: 644696 - DNA, 19 bp, Mus musculus
  siRNA target sequence for 1700024D23Rik (NM_029911.1,987-1005).
gctgggacagtcatcacaa

SEQ ID NO: 644697 - DNA, 19 bp, Mus musculus
  siRNA target sequence for 1700024D23Rik (NM_029911.1,1041-1059).
ggaggcaaaatcttttgta

SEQ ID NO: 644698 - DNA, 19 bp, Mus musculus
  siRNA target sequence for 1700024D23Rik (NM_029911.1,1042-1060).
gaggcaaaatcttttgtat

SEQ ID NO: 644699 - DNA, 19 bp, Mus musculus
  siRNA target sequence for 1700024D23Rik (NM_029911.1,1077-1095).
gggatcccgctttttggtt

SEQ ID NO: 644700 - DNA, 19 bp, Mus musculus
  siRNA target sequence for 1700024D23Rik (NM_029911.1,1078-1096).
ggatcccgctttttggttt

SEQ ID NO: 644701 - DNA, 19 bp, Mus musculus
  siRNA target sequence for 1700024D23Rik (NM_029911.1,1082-1100).
cccgctttttggtttctta

SEQ ID NO: 644702 - DNA, 19 bp, Mus musculus
  siRNA target sequence for 1700024D23Rik (NM_029911.1,1097-1115).
cttattggctggaattgga

SEQ ID NO: 644703 - DNA, 19 bp, Mus musculus
  siRNA target sequence for 1700024D23Rik (NM_029911.1,1144-1162).
gcattgcaagagtggaaaa

SEQ ID NO: 644704 - DNA, 19 bp, Mus musculus
  siRNA target sequence for C030030G16Rik (NM_175462.2,180-198).
gggtccaggtggagttcta

SEQ ID NO: 644705 - DNA, 19 bp, Mus musculus
  siRNA target sequence for C030030G16Rik (NM_175462.2,185-203).
caggtggagttctatgtca

SEQ ID NO: 644706 - DNA, 19 bp, Mus musculus
  siRNA target sequence for C030030G16Rik (NM_175462.2,187-205).
ggtggagttctatgtcaat

SEQ ID NO: 644707 - DNA, 19 bp, Mus musculus
  siRNA target sequence for C030030G16Rik (NM_175462.2,267-285).
ggatccggctgttcaactt

SEQ ID NO: 644708 - DNA, 19 bp, Mus musculus
  siRNA target sequence for C030030G16Rik (NM_175462.2,363-381).
ggggctgcacgaagtataa

SEQ ID NO: 644709 - DNA, 19 bp, Mus musculus
  siRNA target sequence for C030030G16Rik (NM_175462.2,365-383).
ggctgcacgaagtataact

SEQ ID NO: 644710 - DNA, 19 bp, Mus musculus
  siRNA target sequence for C030030G16Rik (NM_175462.2,366-384).
gctgcacgaagtataacta

SEQ ID NO: 644711 - DNA, 19 bp, Mus musculus
  siRNA target sequence for C030030G16Rik (NM_175462.2,477-495).
ccacaataagcttcttaga

SEQ ID NO: 644712 - DNA, 19 bp, Mus musculus
  siRNA target sequence for C030030G16Rik (NM_175462.2,674-692).
gagaacatgattaatgact

SEQ ID NO: 644713 - DNA, 19 bp, Mus musculus
  siRNA target sequence for C030030G16Rik (NM_175462.2,806-824).
cgagcaggtggcaacttga

SEQ ID NO: 644714 - DNA, 19 bp, Mus musculus
  siRNA target sequence for C030030G16Rik (NM_175462.2,807-825).
gagcaggtggcaacttgaa

SEQ ID NO: 644715 - DNA, 19 bp, Mus musculus
  siRNA target sequence for C030030G16Rik (NM_175462.2,847-865).
ctgcatcgtgactttctca

SEQ ID NO: 644716 - DNA, 19 bp, Mus musculus
  siRNA target sequence for Cnga2 (NM_007724.2,373-391).
ctctccagctaataaccat

SEQ ID NO: 644717 - DNA, 19 bp, Mus musculus
  siRNA target sequence for Cnga2 (NM_007724.2,375-393).
ctccagctaataaccataa

SEQ ID NO: 644718 - DNA, 19 bp, Mus musculus
  siRNA target sequence for Cnga2 (NM_007724.2,378-396).
cagctaataaccataacca

SEQ ID NO: 644719 - DNA, 19 bp, Mus musculus
  siRNA target sequence for Cnga2 (NM_007724.2,460-478).
gtctgtggcagctgatgat

SEQ ID NO: 644720 - DNA, 19 bp, Mus musculus
  siRNA target sequence for Cnga2 (NM_007724.2,486-504).
cctcagaactgcaaaggtt

SEQ ID NO: 644721 - DNA, 19 bp, Mus musculus
  siRNA target sequence for Cnga2 (NM_007724.2,535-553).
gggtggcttccgaaggatt

SEQ ID NO: 644722 - DNA, 19 bp, Mus musculus
  siRNA target sequence for Cnga2 (NM_007724.2,574-592).
cagagactgggccaacaaa

SEQ ID NO: 644723 - DNA, 19 bp, Mus musculus
  siRNA target sequence for Cnga2 (NM_007724.2,749-767).
ccagctggagactggtatt

SEQ ID NO: 644724 - DNA, 19 bp, Mus musculus
  siRNA target sequence for Cnga2 (NM_007724.2,750-768).
cagctggagactggtatta

SEQ ID NO: 644725 - DNA, 19 bp, Mus musculus
  siRNA target sequence for Cnga2 (NM_007724.2,763-781).
gtattaccgttggttgttt

SEQ ID NO: 644726 - DNA, 19 bp, Mus musculus
  siRNA target sequence for Cnga2 (NM_007724.2,870-888).
ggctggtgctggattactt

SEQ ID NO: 644727 - DNA, 19 bp, Mus musculus
  siRNA target sequence for Cnga2 (NM_007724.2,959-977).
gtcaaagaccccaagaaat

SEQ ID NO: 644728 - DNA, 19 bp, Mus musculus
  siRNA target sequence for Cnga2 (NM_007724.2,973-991).
gaaattgcgagacaactat

SEQ ID NO: 644729 - DNA, 19 bp, Mus musculus
  siRNA target sequence for Cnga2 (NM_007724.2,999-1017).
ctttgcagttcaaattgga

SEQ ID NO: 644730 - DNA, 19 bp, Mus musculus
  siRNA target sequence for Cnga2 (NM_007724.2,1034-1052).
cccactgacctcatttatt

SEQ ID NO: 644731 - DNA, 19 bp, Mus musculus
  siRNA target sequence for Cnga2 (NM_007724.2,1071-1089).
gccctgaggtacgctttaa

SEQ ID NO: 644732 - DNA, 19 bp, Mus musculus
  siRNA target sequence for Cnga2 (NM_007724.2,1083-1101).
gctttaatcgtctgttaca

SEQ ID NO: 644733 - DNA, 19 bp, Mus musculus
  siRNA target sequence for Cnga2 (NM_007724.2,1173-1191).
gcaacctggtcctctacat

SEQ ID NO: 644734 - DNA, 19 bp, Mus musculus
  siRNA target sequence for Cnga2 (NM_007724.2,1205-1223).
cactggaatgcttgtattt

SEQ ID NO: 644735 - DNA, 19 bp, Mus musculus
  siRNA target sequence for Cnga2 (NM_007724.2,1209-1227).
ggaatgcttgtatttacta

SEQ ID NO: 644736 - DNA, 19 bp, Mus musculus
  siRNA target sequence for Cnga2 (NM_007724.2,1210-1228).
gaatgcttgtatttactat

SEQ ID NO: 644737 - DNA, 19 bp, Mus musculus
  siRNA target sequence for Cnga2 (NM_007724.2,1214-1232).
gcttgtatttactatgcta

SEQ ID NO: 644738 - DNA, 19 bp, Mus musculus
  siRNA target sequence for Cnga2 (NM_007724.2,1267-1285).
ggtttaccccaacattact

SEQ ID NO: 644739 - DNA, 19 bp, Mus musculus
  siRNA target sequence for Cnga2 (NM_007724.2,1279-1297).
cattactgaccctgaatat

SEQ ID NO: 644740 - DNA, 19 bp, Mus musculus
  siRNA target sequence for Cnga2 (NM_007724.2,1304-1322).
ctggctagggagtacattt

SEQ ID NO: 644741 - DNA, 19 bp, Mus musculus
  siRNA target sequence for Cnga2 (NM_007724.2,1368-1386).
caccaccccctgtaaagga

SEQ ID NO: 644742 - DNA, 19 bp, Mus musculus
  siRNA target sequence for Cnga2 (NM_007724.2,1384-1402).
ggatgaggagtacctattt

SEQ ID NO: 644743 - DNA, 19 bp, Mus musculus
  siRNA target sequence for Cnga2 (NM_007724.2,1388-1406).
gaggagtacctatttgtca

SEQ ID NO: 644744 - DNA, 19 bp, Mus musculus
  siRNA target sequence for Cnga2 (NM_007724.2,1420-1438).
gattggtgtcctcatcttt

SEQ ID NO: 644745 - DNA, 19 bp, Mus musculus
  siRNA target sequence for Cnga2 (NM_007724.2,1507-1525).
caagattgatgctgtcaaa

SEQ ID NO: 644746 - DNA, 19 bp, Mus musculus
  siRNA target sequence for Cnga2 (NM_007724.2,1541-1559).
cgaaaggtcagtaaagaca

SEQ ID NO: 644747 - DNA, 19 bp, Mus musculus
  siRNA target sequence for Cnga2 (NM_007724.2,1565-1583).
gccaaggtcatcaaatggt

SEQ ID NO: 644748 - DNA, 19 bp, Mus musculus
  siRNA target sequence for Cnga2 (NM_007724.2,1566-1584).
ccaaggtcatcaaatggtt

SEQ ID NO: 644749 - DNA, 19 bp, Mus musculus
  siRNA target sequence for Cnga2 (NM_007724.2,1619-1637).
gaacgagaagtcctaaaga

SEQ ID NO: 644750 - DNA, 19 bp, Mus musculus
  siRNA target sequence for Cnga2 (NM_007724.2,1663-1681).
gatagccattaatgttcat

SEQ ID NO: 644751 - DNA, 19 bp, Mus musculus
  siRNA target sequence for Cnga2 (NM_007724.2,1705-1723).
catattccaggattgtgaa

SEQ ID NO: 644752 - DNA, 19 bp, Mus musculus
  siRNA target sequence for Cnga2 (NM_007724.2,1799-1817).
ggggacattggcaaggaaa

SEQ ID NO: 644753 - DNA, 19 bp, Mus musculus
  siRNA target sequence for Cnga2 (NM_007724.2,1843-1861).
ggcagtggtagctgatgat

SEQ ID NO: 644754 - DNA, 19 bp, Mus musculus
  siRNA target sequence for Cnga2 (NM_007724.2,1894-1912).
gagctgctttggtgagatt

SEQ ID NO: 644755 - DNA, 19 bp, Mus musculus
  siRNA target sequence for Cnga2 (NM_007724.2,1897-1915).
ctgctttggtgagattagt

SEQ ID NO: 644756 - DNA, 19 bp, Mus musculus
  siRNA target sequence for Cnga2 (NM_007724.2,1899-1917).
gctttggtgagattagtat

SEQ ID NO: 644757 - DNA, 19 bp, Mus musculus
  siRNA target sequence for Cnga2 (NM_007724.2,1909-1927).
gattagtatccttaacatt

SEQ ID NO: 644758 - DNA, 19 bp, Mus musculus
  siRNA target sequence for Cnga2 (NM_007724.2,2121-2139).
gtatggaggtagatgttca

SEQ ID NO: 644759 - DNA, 19 bp, Mus musculus
  siRNA target sequence for Cnga2 (NM_007724.2,2173-2191).
gaccttgtacactcgtttt

SEQ ID NO: 644760 - DNA, 19 bp, Mus musculus
  siRNA target sequence for Cnga2 (NM_007724.2,2220-2238).
cccagcagaagctcaaaca

SEQ ID NO: 644761 - DNA, 19 bp, Mus musculus
  siRNA target sequence for Cnga2 (NM_007724.2,2276-2294).
catgaggatgattacctat

SEQ ID NO: 644762 - DNA, 19 bp, Mus musculus
  siRNA target sequence for Cnga2 (NM_007724.2,2291-2309).
ctatcagatgggataaaca

SEQ ID NO: 644763 - DNA, 19 bp, Mus musculus
  siRNA target sequence for Kcnk1 (NM_008430.1,575-593).
cgcctcgggaaattggaat

SEQ ID NO: 644764 - DNA, 19 bp, Mus musculus
  siRNA target sequence for Kcnk1 (NM_008430.1,576-594).
gcctcgggaaattggaatt

SEQ ID NO: 644765 - DNA, 19 bp, Mus musculus
  siRNA target sequence for Kcnk1 (NM_008430.1,775-793).
gcagaccagtcctctactt

SEQ ID NO: 644766 - DNA, 19 bp, Mus musculus
  siRNA target sequence for Kcnk1 (NM_008430.1,862-880).
ccgtttcctgcttcttctt

SEQ ID NO: 644767 - DNA, 19 bp, Mus musculus
  siRNA target sequence for Kcnk1 (NM_008430.1,919-937).
ggaacttcctcgagtcttt

SEQ ID NO: 644768 - DNA, 19 bp, Mus musculus
  siRNA target sequence for Kcnk1 (NM_008430.1,920-938).
gaacttcctcgagtctttt

SEQ ID NO: 644769 - DNA, 19 bp, Mus musculus
  siRNA target sequence for Kcnk1 (NM_008430.1,930-948).
gagtctttttacttctgtt

SEQ ID NO: 644770 - DNA, 19 bp, Mus musculus
  siRNA target sequence for Kcnk13 (NM_146037.1,410-428).
cacaacgggagggaagatt

SEQ ID NO: 644771 - DNA, 19 bp, Mus musculus
  siRNA target sequence for Kcnk13 (NM_146037.1,412-430).
caacgggagggaagatttt

SEQ ID NO: 644772 - DNA, 19 bp, Mus musculus
  siRNA target sequence for Kcnk13 (NM_146037.1,415-433).
cgggagggaagatttttct

SEQ ID NO: 644773 - DNA, 19 bp, Mus musculus
  siRNA target sequence for Kcnk13 (NM_146037.1,714-732).
ggctggagctactttgact

SEQ ID NO: 644774 - DNA, 19 bp, Mus musculus
  siRNA target sequence for Kcnk13 (NM_146037.1,816-834).
ggactctaccgcttcttca

SEQ ID NO: 644775 - DNA, 19 bp, Mus musculus
  siRNA target sequence for Kcnk13 (NM_146037.1,817-835).
gactctaccgcttcttcaa

SEQ ID NO: 644776 - DNA, 19 bp, Mus musculus
  siRNA target sequence for Kcnk13 (NM_146037.1,819-837).
ctctaccgcttcttcaatt

SEQ ID NO: 644777 - DNA, 19 bp, Mus musculus
  siRNA target sequence for Kcnk13 (NM_146037.1,1011-1029).
cggaacaggtgcaacatct

SEQ ID NO: 644778 - DNA, 19 bp, Mus musculus
  siRNA target sequence for Kcnk13 (NM_146037.1,1186-1204).
cctcccgggatgatgagtt

SEQ ID NO: 644779 - DNA, 19 bp, Mus musculus
  siRNA target sequence for Kcnk4 (NM_008431.1,314-332).
gcactggtgctgctttact

SEQ ID NO: 644780 - DNA, 19 bp, Mus musculus
  siRNA target sequence for Kcnk4 (NM_008431.1,509-527).
gaaaccagctggaccaata

SEQ ID NO: 644781 - DNA, 19 bp, Mus musculus
  siRNA target sequence for Kcnk4 (NM_008431.1,595-613).
catcggctatggcaatata

SEQ ID NO: 644782 - DNA, 19 bp, Mus musculus
  siRNA target sequence for Kcnk4 (NM_008431.1,599-617).
ggctatggcaatatagtct

SEQ ID NO: 644783 - DNA, 19 bp, Mus musculus
  siRNA target sequence for Kcnk4 (NM_008431.1,600-618).
gctatggcaatatagtctt

SEQ ID NO: 644784 - DNA, 19 bp, Mus musculus
  siRNA target sequence for Kcnk4 (NM_008431.1,635-653).
cgtctcttttgtatcttct

SEQ ID NO: 644785 - DNA, 19 bp, Mus musculus
  siRNA target sequence for Kcnk4 (NM_008431.1,738-756).
gccacatcgaagcaatctt

SEQ ID NO: 644786 - DNA, 19 bp, Mus musculus
  siRNA target sequence for Kcnk4 (NM_008431.1,740-758).
cacatcgaagcaatcttct

SEQ ID NO: 644787 - DNA, 19 bp, Mus musculus
  siRNA target sequence for Kcnk4 (NM_008431.1,1309-1327).
ggattaccccagtgagaat

SEQ ID NO: 644788 - DNA, 19 bp, Mus musculus
  siRNA target sequence for Kcnk4 (NM_008431.1,1405-1423).
ccgacccaacccatccaaa

SEQ ID NO: 644789 - DNA, 19 bp, Mus musculus
  siRNA target sequence for Kcnk4 (NM_008431.1,1406-1424).
cgacccaacccatccaaaa

SEQ ID NO: 644790 - DNA, 19 bp, Mus musculus
  siRNA target sequence for Kcnk4 (NM_008431.1,1407-1425).
gacccaacccatccaaaaa

SEQ ID NO: 644791 - DNA, 19 bp, Mus musculus
  siRNA target sequence for Kcnk5 (NM_021542.2,334-352).
ggtggaccggggtccttta

SEQ ID NO: 644792 - DNA, 19 bp, Mus musculus
  siRNA target sequence for Kcnk5 (NM_021542.2,338-356).
gaccggggtcctttactca

SEQ ID NO: 644793 - DNA, 19 bp, Mus musculus
  siRNA target sequence for Kcnk5 (NM_021542.2,353-371).
ctcacctcggccatcatat

SEQ ID NO: 644794 - DNA, 19 bp, Mus musculus
  siRNA target sequence for Kcnk5 (NM_021542.2,357-375).
cctcggccatcatattcta

SEQ ID NO: 644795 - DNA, 19 bp, Mus musculus
  siRNA target sequence for Kcnk5 (NM_021542.2,428-446).
gaggccaagaaaaactact

SEQ ID NO: 644796 - DNA, 19 bp, Mus musculus
  siRNA target sequence for Kcnk5 (NM_021542.2,430-448).
ggccaagaaaaactactat

SEQ ID NO: 644797 - DNA, 19 bp, Mus musculus
  siRNA target sequence for Kcnk5 (NM_021542.2,431-449).
gccaagaaaaactactata

SEQ ID NO: 644798 - DNA, 19 bp, Mus musculus
  siRNA target sequence for Kcnk5 (NM_021542.2,579-597).
ggaactggcccaatgcaat

SEQ ID NO: 644799 - DNA, 19 bp, Mus musculus
  siRNA target sequence for Kcnk5 (NM_021542.2,589-607).
caatgcaatgatttttgct

SEQ ID NO: 644800 - DNA, 19 bp, Mus musculus
  siRNA target sequence for Kcnk5 (NM_021542.2,813-831).
cgtgtacagccatcttcat

SEQ ID NO: 644801 - DNA, 19 bp, Mus musculus
  siRNA target sequence for Kcnk5 (NM_021542.2,905-923).
gagggcctctactattcct

SEQ ID NO: 644802 - DNA, 19 bp, Mus musculus
  siRNA target sequence for Kcnk5 (NM_021542.2,911-929).
ctctactattccttcatca

SEQ ID NO: 644803 - DNA, 19 bp, Mus musculus
  siRNA target sequence for Kcnk5 (NM_021542.2,991-1009).
cgccctataccgatacttt

SEQ ID NO: 644804 - DNA, 19 bp, Mus musculus
  siRNA target sequence for Kcnk5 (NM_021542.2,1182-1200).
catccaaggacgtcaacat

SEQ ID NO: 644805 - DNA, 19 bp, Mus musculus
  siRNA target sequence for Kcnk5 (NM_021542.2,1185-1203).
ccaaggacgtcaacatctt

SEQ ID NO: 644806 - DNA, 19 bp, Mus musculus
  siRNA target sequence for Kcnk5 (NM_021542.2,1230-1248).
cctacaatgacctcatcaa

SEQ ID NO: 644807 - DNA, 19 bp, Mus musculus
  siRNA target sequence for Kcnk5 (NM_021542.2,1231-1249).
ctacaatgacctcatcaaa

SEQ ID NO: 644808 - DNA, 19 bp, Mus musculus
  siRNA target sequence for Kcnk5 (NM_021542.2,1361-1379).
gcacctttggtggtctatt

SEQ ID NO: 644809 - DNA, 19 bp, Mus musculus
  siRNA target sequence for Kcnk5 (NM_021542.2,1365-1383).
ctttggtggtctattccaa

SEQ ID NO: 644810 - DNA, 19 bp, Mus musculus
  siRNA target sequence for Kcnk5 (NM_021542.2,1369-1387).
ggtggtctattccaagaat

SEQ ID NO: 644811 - DNA, 19 bp, Mus musculus
  siRNA target sequence for Kcnk5 (NM_021542.2,1398-1416).
gcttggaagaggtatctca

SEQ ID NO: 644812 - DNA, 19 bp, Mus musculus
  siRNA target sequence for Kcnk5 (NM_021542.2,1492-1510).
ccaaacctctgaagtgttt

SEQ ID NO: 644813 - DNA, 19 bp, Mus musculus
  siRNA target sequence for Kcnk5 (NM_021542.2,1493-1511).
caaacctctgaagtgttta

SEQ ID NO: 644814 - DNA, 19 bp, Mus musculus
  siRNA target sequence for Kcnk5 (NM_021542.2,1497-1515).
cctctgaagtgtttattaa

SEQ ID NO: 644815 - DNA, 19 bp, Mus musculus
  siRNA target sequence for Kcnk5 (NM_021542.2,1500-1518).
ctgaagtgtttattaacca

SEQ ID NO: 644816 - DNA, 19 bp, Mus musculus
  siRNA target sequence for Kcnk5 (NM_021542.2,1516-1534).
ccaactggaccgtatcagt

SEQ ID NO: 644817 - DNA, 19 bp, Mus musculus
  siRNA target sequence for Kcnk5 (NM_021542.2,1570-1588).
cccgctcatcttccaaaat

SEQ ID NO: 644818 - DNA, 19 bp, Mus musculus
  siRNA target sequence for Kcnk5 (NM_021542.2,1591-1609).
caacattacctttgaaaat

SEQ ID NO: 644819 - DNA, 19 bp, Mus musculus
  siRNA target sequence for Kcnk5 (NM_021542.2,1628-1646).
gacgaggagacctctaagt

SEQ ID NO: 644820 - DNA, 19 bp, Mus musculus
  siRNA target sequence for Kcnk5 (NM_021542.2,1630-1648).
cgaggagacctctaagtct

SEQ ID NO: 644821 - DNA, 19 bp, Mus musculus
  siRNA target sequence for Kcnk5 (NM_021542.2,1631-1649).
gaggagacctctaagtctt

SEQ ID NO: 644822 - DNA, 19 bp, Mus musculus
  siRNA target sequence for Kcnk5 (NM_021542.2,1790-1808).
gagcagctgatgaacgaat

SEQ ID NO: 644823 - DNA, 19 bp, Mus musculus
  siRNA target sequence for Kcnk5 (NM_021542.2,1796-1814).
ctgatgaacgaatacaaca

SEQ ID NO: 644824 - DNA, 19 bp, Mus musculus
  siRNA target sequence for Kcnk7 (NM_010609.1,895-913).
gtccgtgccatggtgaaat

SEQ ID NO: 644825 - DNA, 19 bp, Mus musculus
  siRNA target sequence for Kcnk7 (NM_010609.1,898-916).
cgtgccatggtgaaattct

SEQ ID NO: 644826 - DNA, 19 bp, Mus musculus
  siRNA target sequence for Kcnk7 (NM_010609.1,899-917).
gtgccatggtgaaattctt

SEQ ID NO: 644827 - DNA, 19 bp, Mus musculus
  siRNA target sequence for Kcnk7 (NM_010609.1,929-947).
gctctagaaccgatgaaga

SEQ ID NO: 644828 - DNA, 19 bp, Mus musculus
  siRNA target sequence for Kcnk7 (NM_010609.1,956-974).
gcatcctaggccaagatga

SEQ ID NO: 644829 - DNA, 19 bp, Mus musculus
  siRNA target sequence for Kcnk7 (NM_010609.1,1026-1044).
cccagcctcagtatcagaa

SEQ ID NO: 644830 - DNA, 19 bp, Mus musculus
  siRNA target sequence for Cacna1g (NM_009783.1,569-587).
ggcttgacttttttatcgt

SEQ ID NO: 644831 - DNA, 19 bp, Mus musculus
  siRNA target sequence for Cacna1g (NM_009783.1,665-683).
gaccgctcagggccattaa

SEQ ID NO: 644832 - DNA, 19 bp, Mus musculus
  siRNA target sequence for Cacna1g (NM_009783.1,699-717).
gcgcattctcgtcacatta

SEQ ID NO: 644833 - DNA, 19 bp, Mus musculus
  siRNA target sequence for Cacna1g (NM_009783.1,701-719).
gcattctcgtcacattact

SEQ ID NO: 644834 - DNA, 19 bp, Mus musculus
  siRNA target sequence for Cacna1g (NM_009783.1,713-731).
cattactgctggatacctt

SEQ ID NO: 644835 - DNA, 19 bp, Mus musculus
  siRNA target sequence for Cacna1g (NM_009783.1,998-1016).
cctgcggtctggactatga

SEQ ID NO: 644836 - DNA, 19 bp, Mus musculus
  siRNA target sequence for Cacna1g (NM_009783.1,1011-1029).
ctatgaggcctataacagt

SEQ ID NO: 644837 - DNA, 19 bp, Mus musculus
  siRNA target sequence for Cacna1g (NM_009783.1,1046-1064).
gtgtcaactggaaccaata

SEQ ID NO: 644838 - DNA, 19 bp, Mus musculus
  siRNA target sequence for Cacna1g (NM_009783.1,1055-1073).
ggaaccaatactataccaa

SEQ ID NO: 644839 - DNA, 19 bp, Mus musculus
  siRNA target sequence for Cacna1g (NM_009783.1,1176-1194).
ggtcgacatcatgtacttt

SEQ ID NO: 644840 - DNA, 19 bp, Mus musculus
  siRNA target sequence for Cacna1g (NM_009783.1,1337-1355).
gggagcagcgtgtacgatt

SEQ ID NO: 644841 - DNA, 19 bp, Mus musculus
  siRNA target sequence for Cacna1g (NM_009783.1,1351-1369).
cgattcctgtccaatgcta

SEQ ID NO: 644842 - DNA, 19 bp, Mus musculus
  siRNA target sequence for Cacna1g (NM_009783.1,2039-2057).
gccatagctcctgcaaaat

SEQ ID NO: 644843 - DNA, 19 bp, Mus musculus
  siRNA target sequence for Cacna1g (NM_009783.1,2041-2059).
catagctcctgcaaaatct

SEQ ID NO: 644844 - DNA, 19 bp, Mus musculus
  siRNA target sequence for Cacna1g (NM_009783.1,2318-2336).
ggaagatcgtagatagcaa

SEQ ID NO: 644845 - DNA, 19 bp, Mus musculus
  siRNA target sequence for Cacna1g (NM_009783.1,2319-2337).
gaagatcgtagatagcaaa

SEQ ID NO: 644846 - DNA, 19 bp, Mus musculus
  siRNA target sequence for Cacna1g (NM_009783.1,2500-2518).
ggtcccttcggctacatta

SEQ ID NO: 644847 - DNA, 19 bp, Mus musculus
  siRNA target sequence for Cacna1g (NM_009783.1,2501-2519).
gtcccttcggctacattaa

SEQ ID NO: 644848 - DNA, 19 bp, Mus musculus
  siRNA target sequence for Cacna1g (NM_009783.1,2503-2521).
cccttcggctacattaaga

SEQ ID NO: 644849 - DNA, 19 bp, Mus musculus
  siRNA target sequence for Cacna1g (NM_009783.1,2504-2522).
ccttcggctacattaagaa

SEQ ID NO: 644850 - DNA, 19 bp, Mus musculus
  siRNA target sequence for Cacna1g (NM_009783.1,2505-2523).
cttcggctacattaagaat

SEQ ID NO: 644851 - DNA, 19 bp, Mus musculus
  siRNA target sequence for Cacna1g (NM_009783.1,2805-2823).
gttgccagaccggaagaat

SEQ ID NO: 644852 - DNA, 19 bp, Mus musculus
  siRNA target sequence for Cacna1g (NM_009783.1,2918-2936).
catcttgggctgctcttta

SEQ ID NO: 644853 - DNA, 19 bp, Mus musculus
  siRNA target sequence for Cacna1g (NM_009783.1,2959-2977).
ggcaactacgtgctcttta

SEQ ID NO: 644854 - DNA, 19 bp, Mus musculus
  siRNA target sequence for Cacna1g (NM_009783.1,2960-2978).
gcaactacgtgctctttaa

SEQ ID NO: 644855 - DNA, 19 bp, Mus musculus
  siRNA target sequence for Cacna1g (NM_009783.1,3037-3055).
gatacgagtggacagttaa

SEQ ID NO: 644856 - DNA, 19 bp, Mus musculus
  siRNA target sequence for Cacna1g (NM_009783.1,3604-3622).
gaacgtgaggccaagagtt

SEQ ID NO: 644857 - DNA, 19 bp, Mus musculus
  siRNA target sequence for Cacna1g (NM_009783.1,3692-3710).
ctgaacaccaagactgtaa

SEQ ID NO: 644858 - DNA, 19 bp, Mus musculus
  siRNA target sequence for Cacna1g (NM_009783.1,3923-3941).
ggatcatcacccacaagat

SEQ ID NO: 644859 - DNA, 19 bp, Mus musculus
  siRNA target sequence for Cacna1g (NM_009783.1,4448-4466).
ccaggaacatcactaacaa

SEQ ID NO: 644860 - DNA, 19 bp, Mus musculus
  siRNA target sequence for Cacna1g (NM_009783.1,4493-4511).
ggtgggtccggcacaagta

SEQ ID NO: 644861 - DNA, 19 bp, Mus musculus
  siRNA target sequence for Cacna1g (NM_009783.1,4496-4514).
gggtccggcacaagtacaa

SEQ ID NO: 644862 - DNA, 19 bp, Mus musculus
  siRNA target sequence for Cacna1g (NM_009783.1,4828-4846).
cagatggccgatctaatgt

SEQ ID NO: 644863 - DNA, 19 bp, Mus musculus
  siRNA target sequence for Cacna1g (NM_009783.1,4845-4863).
gttggacgatgtaattgct

SEQ ID NO: 644864 - DNA, 19 bp, Mus musculus
  siRNA target sequence for Cacna1g (NM_009783.1,5012-5030).
cgatggccatggaacatta

SEQ ID NO: 644865 - DNA, 19 bp, Mus musculus
  siRNA target sequence for Cacna1g (NM_009783.1,5050-5068).
gacgaggctctgaagatct

SEQ ID NO: 644866 - DNA, 19 bp, Mus musculus
  siRNA target sequence for Cacna1g (NM_009783.1,5059-5077).
ctgaagatctgcaactaca

SEQ ID NO: 644867 - DNA, 19 bp, Mus musculus
  siRNA target sequence for Cacna1g (NM_009783.1,5100-5118).
ggagtcagtattcaaactt

SEQ ID NO: 644868 - DNA, 19 bp, Mus musculus
  siRNA target sequence for Cacna1g (NM_009783.1,5212-5230).
gagattgaggtcaatgctt

SEQ ID NO: 644869 - DNA, 19 bp, Mus musculus
  siRNA target sequence for Cacna1g (NM_009783.1,5372-5390).
gacttctcttcatgctatt

SEQ ID NO: 644870 - DNA, 19 bp, Mus musculus
  siRNA target sequence for Cacna1g (NM_009783.1,5473-5491).
cggcatgccacctttagga

SEQ ID NO: 644871 - DNA, 19 bp, Mus musculus
  siRNA target sequence for Cacna1g (NM_009783.1,5474-5492).
ggcatgccacctttaggaa

SEQ ID NO: 644872 - DNA, 19 bp, Mus musculus
  siRNA target sequence for Cacna1g (NM_009783.1,5584-5602).
gagtccacctgctacaaca

SEQ ID NO: 644873 - DNA, 19 bp, Mus musculus
  siRNA target sequence for Cacna1g (NM_009783.1,6255-6273).
caggcgccaggcagcaata

SEQ ID NO: 644874 - DNA, 19 bp, Mus musculus
  siRNA target sequence for Cacna1g (NM_009783.1,6259-6277).
cgccaggcagcaataagga

SEQ ID NO: 644875 - DNA, 19 bp, Mus musculus
  siRNA target sequence for Cacna1g (NM_009783.1,6576-6594).
gtccccacgggacttgaaa

SEQ ID NO: 644876 - DNA, 19 bp, Mus musculus
  siRNA target sequence for Cacna1g (NM_009783.1,6580-6598).
ccacgggacttgaaaaaat

SEQ ID NO: 644877 - DNA, 19 bp, Mus musculus
  siRNA target sequence for Cacna1g (NM_009783.1,6583-6601).
cgggacttgaaaaaatgct

SEQ ID NO: 644878 - DNA, 19 bp, Mus musculus
  siRNA target sequence for Cacna1g (NM_009783.1,6778-6796).
ctcagcccacccagtatct

SEQ ID NO: 644879 - DNA, 19 bp, Mus musculus
  siRNA target sequence for Cacna1g (NM_009783.1,6782-6800).
gcccacccagtatctctat

SEQ ID NO: 644880 - DNA, 19 bp, Mus musculus
  siRNA target sequence for Cacna1g (NM_009783.1,6785-6803).
cacccagtatctctataga

SEQ ID NO: 644881 - DNA, 19 bp, Mus musculus
  siRNA target sequence for Cacna1g (NM_009783.1,6924-6942).
ctcaccctccccaaagaaa

SEQ ID NO: 644882 - DNA, 19 bp, Mus musculus
  siRNA target sequence for Cacna2d2 (NM_020263.2,698-716).
cggtgtgatgcggattttt

SEQ ID NO: 644883 - DNA, 19 bp, Mus musculus
  siRNA target sequence for Cacna2d2 (NM_020263.2,863-881).
ggctgacgctgcagagaat

SEQ ID NO: 644884 - DNA, 19 bp, Mus musculus
  siRNA target sequence for Cacna2d2 (NM_020263.2,865-883).
ctgacgctgcagagaattt

SEQ ID NO: 644885 - DNA, 19 bp, Mus musculus
  siRNA target sequence for Cacna2d2 (NM_020263.2,897-915).
cgctggcaggacaacatca

SEQ ID NO: 644886 - DNA, 19 bp, Mus musculus
  siRNA target sequence for Cacna2d2 (NM_020263.2,1105-1123).
ctaccgtcatcctcaatga

SEQ ID NO: 644887 - DNA, 19 bp, Mus musculus
  siRNA target sequence for Cacna2d2 (NM_020263.2,1213-1231).
cgggagtcactcgctatta

SEQ ID NO: 644888 - DNA, 19 bp, Mus musculus
  siRNA target sequence for Cacna2d2 (NM_020263.2,1246-1264).
ggcgagcccccaagaagat

SEQ ID NO: 644889 - DNA, 19 bp, Mus musculus
  siRNA target sequence for Cacna2d2 (NM_020263.2,1247-1265).
gcgagcccccaagaagatt

SEQ ID NO: 644890 - DNA, 19 bp, Mus musculus
  siRNA target sequence for Cacna2d2 (NM_020263.2,1249-1267).
gagcccccaagaagattga

SEQ ID NO: 644891 - DNA, 19 bp, Mus musculus
  siRNA target sequence for Cacna2d2 (NM_020263.2,1411-1429).
cgctctctgatgatgacta

SEQ ID NO: 644892 - DNA, 19 bp, Mus musculus
  siRNA target sequence for Cacna2d2 (NM_020263.2,1412-1430).
gctctctgatgatgactat

SEQ ID NO: 644893 - DNA, 19 bp, Mus musculus
  siRNA target sequence for Cacna2d2 (NM_020263.2,1495-1513).
ccaatgtgcgtaacaagaa

SEQ ID NO: 644894 - DNA, 19 bp, Mus musculus
  siRNA target sequence for Cacna2d2 (NM_020263.2,1504-1522).
gtaacaagaaggtgttcaa

SEQ ID NO: 644895 - DNA, 19 bp, Mus musculus
  siRNA target sequence for Cacna2d2 (NM_020263.2,1671-1689).
gtgcaggatgtcttcgaaa

SEQ ID NO: 644896 - DNA, 19 bp, Mus musculus
  siRNA target sequence for Cacna2d2 (NM_020263.2,1674-1692).
caggatgtcttcgaaaagt

SEQ ID NO: 644897 - DNA, 19 bp, Mus musculus
  siRNA target sequence for Cacna2d2 (NM_020263.2,1732-1750).
ccgtaggacagcataacta

SEQ ID NO: 644898 - DNA, 19 bp, Mus musculus
  siRNA target sequence for Cacna2d2 (NM_020263.2,1733-1751).
cgtaggacagcataactat

SEQ ID NO: 644899 - DNA, 19 bp, Mus musculus
  siRNA target sequence for Cacna2d2 (NM_020263.2,1767-1785).
cagtggatggcctgtacta

SEQ ID NO: 644900 - DNA, 19 bp, Mus musculus
  siRNA target sequence for Cacna2d2 (NM_020263.2,1776-1794).
gcctgtactaacaaaggtt

SEQ ID NO: 644901 - DNA, 19 bp, Mus musculus
  siRNA target sequence for Cacna2d2 (NM_020263.2,1777-1795).
cctgtactaacaaaggtta

SEQ ID NO: 644902 - DNA, 19 bp, Mus musculus
  siRNA target sequence for Cacna2d2 (NM_020263.2,1818-1836).
ggagccatccgcatcaaca

SEQ ID NO: 644903 - DNA, 19 bp, Mus musculus
  siRNA target sequence for Cacna2d2 (NM_020263.2,1828-1846).
gcatcaacacacaggaata

SEQ ID NO: 644904 - DNA, 19 bp, Mus musculus
  siRNA target sequence for Cacna2d2 (NM_020263.2,1906-1924).
ggacaaacgtgtatgaaga

SEQ ID NO: 644905 - DNA, 19 bp, Mus musculus
  siRNA target sequence for Cacna2d2 (NM_020263.2,1907-1925).
gacaaacgtgtatgaagat

SEQ ID NO: 644906 - DNA, 19 bp, Mus musculus
  siRNA target sequence for Cacna2d2 (NM_020263.2,2034-2052).
gatgtggccttgaatgaca

SEQ ID NO: 644907 - DNA, 19 bp, Mus musculus
  siRNA target sequence for Cacna2d2 (NM_020263.2,2039-2057).
ggccttgaatgacatcaaa

SEQ ID NO: 644908 - DNA, 19 bp, Mus musculus
  siRNA target sequence for Cacna2d2 (NM_020263.2,2225-2243).
gatccgtcgcagcatgatt

SEQ ID NO: 644909 - DNA, 19 bp, Mus musculus
  siRNA target sequence for Cacna2d2 (NM_020263.2,2299-2317).
ggtacatagacgaagtgat

SEQ ID NO: 644910 - DNA, 19 bp, Mus musculus
  siRNA target sequence for Cacna2d2 (NM_020263.2,2310-2328).
gaagtgattcggaactaca

SEQ ID NO: 644911 - DNA, 19 bp, Mus musculus
  siRNA target sequence for Cacna2d2 (NM_020263.2,2511-2529).
gctccgagagagtattgca

SEQ ID NO: 644912 - DNA, 19 bp, Mus musculus
  siRNA target sequence for Cacna2d2 (NM_020263.2,2512-2530).
ctccgagagagtattgcaa

SEQ ID NO: 644913 - DNA, 19 bp, Mus musculus
  siRNA target sequence for Cacna2d2 (NM_020263.2,2602-2620).
cggactccaagcagtgtaa

SEQ ID NO: 644914 - DNA, 19 bp, Mus musculus
  siRNA target sequence for Cacna2d2 (NM_020263.2,2604-2622).
gactccaagcagtgtaata

SEQ ID NO: 644915 - DNA, 19 bp, Mus musculus
  siRNA target sequence for Cacna2d2 (NM_020263.2,2608-2626).
ccaagcagtgtaataactt

SEQ ID NO: 644916 - DNA, 19 bp, Mus musculus
  siRNA target sequence for Cacna2d2 (NM_020263.2,2686-2704).
ggcgggaccaagatctcaa

SEQ ID NO: 644917 - DNA, 19 bp, Mus musculus
  siRNA target sequence for Cacna2d2 (NM_020263.2,2711-2729).
cagcctgctagccgtattt

SEQ ID NO: 644918 - DNA, 19 bp, Mus musculus
  siRNA target sequence for Cacna2d2 (NM_020263.2,2714-2732).
cctgctagccgtatttgct

SEQ ID NO: 644919 - DNA, 19 bp, Mus musculus
  siRNA target sequence for Cacna2d2 (NM_020263.2,2824-2842).
gtcgcagcctggataacca

SEQ ID NO: 644920 - DNA, 19 bp, Mus musculus
  siRNA target sequence for Cacna2d2 (NM_020263.2,2832-2850).
ctggataaccatggttata

SEQ ID NO: 644921 - DNA, 19 bp, Mus musculus
  siRNA target sequence for Cacna2d2 (NM_020263.2,2997-3015).
gaggcttgggctgaaaagt

SEQ ID NO: 644922 - DNA, 19 bp, Mus musculus
  siRNA target sequence for Cacna2d2 (NM_020263.2,3000-3018).
gcttgggctgaaaagttca

SEQ ID NO: 644923 - DNA, 19 bp, Mus musculus
  siRNA target sequence for Cacna2d2 (NM_020263.2,3001-3019).
cttgggctgaaaagttcaa

SEQ ID NO: 644924 - DNA, 19 bp, Mus musculus
  siRNA target sequence for Cacna2d2 (NM_020263.2,3142-3160).
ggttcctggtgctgtcaaa

SEQ ID NO: 644925 - DNA, 19 bp, Mus musculus
  siRNA target sequence for Cacna2d2 (NM_020263.2,3222-3240).
ctggcactgtacaataact

SEQ ID NO: 644926 - DNA, 19 bp, Mus musculus
  siRNA target sequence for Cacna2d2 (NM_020263.2,3242-3260).
cttctacacccgaaaggaa

SEQ ID NO: 644927 - DNA, 19 bp, Mus musculus
  siRNA target sequence for Cacna2d2 (NM_020263.2,3248-3266).
cacccgaaaggaatcctat

SEQ ID NO: 644928 - DNA, 19 bp, Mus musculus
  siRNA target sequence for Cacna2d2 (NM_020263.2,3337-3355).
ccaccattgcagatttcct

SEQ ID NO: 644929 - DNA, 19 bp, Mus musculus
  siRNA target sequence for Cacna2d2 (NM_020263.2,3378-3396).
gctgccgcctggtccttat

SEQ ID NO: 644930 - DNA, 19 bp, Mus musculus
  siRNA target sequence for Cacna2d2 (NM_020263.2,3379-3397).
ctgccgcctggtccttatt

SEQ ID NO: 644931 - DNA, 19 bp, Mus musculus
  siRNA target sequence for Cacna2d2 (NM_020263.2,3482-3500).
gagcagctgcgtcatgaaa

SEQ ID NO: 644932 - DNA, 19 bp, Mus musculus
  siRNA target sequence for Cacna2d2 (NM_020263.2,3523-3541).
cggtgaacgcatcctataa

SEQ ID NO: 644933 - DNA, 19 bp, Mus musculus
  siRNA target sequence for Cacna2d2 (NM_020263.2,3524-3542).
ggtgaacgcatcctataat

SEQ ID NO: 644934 - DNA, 19 bp, Mus musculus
  siRNA target sequence for Cacna2d2 (NM_020263.2,3736-3754).
gaggtccgcacatctgttt

SEQ ID NO: 644935 - DNA, 19 bp, Mus musculus
  siRNA target sequence for Cacnb2 (NM_023116.1,246-264).
ggagcacagtcctatggaa

SEQ ID NO: 644936 - DNA, 19 bp, Mus musculus
  siRNA target sequence for Cacnb2 (NM_023116.1,247-265).
gagcacagtcctatggaaa

SEQ ID NO: 644937 - DNA, 19 bp, Mus musculus
  siRNA target sequence for Cacnb2 (NM_023116.1,320-338).
cactacctcaaacagtttt

SEQ ID NO: 644938 - DNA, 19 bp, Mus musculus
  siRNA target sequence for Cacnb2 (NM_023116.1,379-397).
ccgattcagatgtgtcttt

SEQ ID NO: 644939 - DNA, 19 bp, Mus musculus
  siRNA target sequence for Cacnb2 (NM_023116.1,410-428).
ggaggcagtacgtagagaa

SEQ ID NO: 644940 - DNA, 19 bp, Mus musculus
  siRNA target sequence for Cacnb2 (NM_023116.1,467-485).
gacaaaacctgttgcattt

SEQ ID NO: 644941 - DNA, 19 bp, Mus musculus
  siRNA target sequence for Cacnb2 (NM_023116.1,486-504).
gcagttcggaccaatgtca

SEQ ID NO: 644942 - DNA, 19 bp, Mus musculus
  siRNA target sequence for Cacnb2 (NM_023116.1,610-628).
ggataggacggctggttaa

SEQ ID NO: 644943 - DNA, 19 bp, Mus musculus
  siRNA target sequence for Cacnb2 (NM_023116.1,633-651).
ggctgtgaaatcggattta

SEQ ID NO: 644944 - DNA, 19 bp, Mus musculus
  siRNA target sequence for Cacnb2 (NM_023116.1,634-652).
gctgtgaaatcggatttat

SEQ ID NO: 644945 - DNA, 19 bp, Mus musculus
  siRNA target sequence for Cacnb2 (NM_023116.1,639-657).
gaaatcggatttattccaa

SEQ ID NO: 644946 - DNA, 19 bp, Mus musculus
  siRNA target sequence for Cacnb2 (NM_023116.1,661-679).
cagtcaaactagagaacat

SEQ ID NO: 644947 - DNA, 19 bp, Mus musculus
  siRNA target sequence for Cacnb2 (NM_023116.1,663-681).
gtcaaactagagaacatga

SEQ ID NO: 644948 - DNA, 19 bp, Mus musculus
  siRNA target sequence for Cacnb2 (NM_023116.1,751-769).
ccagtttgggtgacatagt

SEQ ID NO: 644949 - DNA, 19 bp, Mus musculus
  siRNA target sequence for Cacnb2 (NM_023116.1,768-786).
gtgcccagttccagaaaat

SEQ ID NO: 644950 - DNA, 19 bp, Mus musculus
  siRNA target sequence for Cacnb2 (NM_023116.1,793-811).
cgccgtcatctgctataga

SEQ ID NO: 644951 - DNA, 19 bp, Mus musculus
  siRNA target sequence for Cacnb2 (NM_023116.1,797-815).
gtcatctgctatagacata

SEQ ID NO: 644952 - DNA, 19 bp, Mus musculus
  siRNA target sequence for Cacnb2 (NM_023116.1,799-817).
catctgctatagacataga

SEQ ID NO: 644953 - DNA, 19 bp, Mus musculus
  siRNA target sequence for Cacnb2 (NM_023116.1,944-962).
gcacactcctccttatgat

SEQ ID NO: 644954 - DNA, 19 bp, Mus musculus
  siRNA target sequence for Cacnb2 (NM_023116.1,1020-1038).
gtcacagatatgatgcaaa

SEQ ID NO: 644955 - DNA, 19 bp, Mus musculus
  siRNA target sequence for Cacnb2 (NM_023116.1,1031-1049).
gatgcaaaaagcactgttt

SEQ ID NO: 644956 - DNA, 19 bp, Mus musculus
  siRNA target sequence for Cacnb2 (NM_023116.1,1041-1059).
gcactgtttgattttctaa

SEQ ID NO: 644957 - DNA, 19 bp, Mus musculus
  siRNA target sequence for Cacnb2 (NM_023116.1,1074-1092).
gggcggatatccatcacaa

SEQ ID NO: 644958 - DNA, 19 bp, Mus musculus
  siRNA target sequence for Cacnb2 (NM_023116.1,1141-1159).
ccagtaagcatgcaatcat

SEQ ID NO: 644959 - DNA, 19 bp, Mus musculus
  siRNA target sequence for Cacnb2 (NM_023116.1,1142-1160).
cagtaagcatgcaatcata

SEQ ID NO: 644960 - DNA, 19 bp, Mus musculus
  siRNA target sequence for Cacnb2 (NM_023116.1,1144-1162).
gtaagcatgcaatcataga

SEQ ID NO: 644961 - DNA, 19 bp, Mus musculus
  siRNA target sequence for Cacnb2 (NM_023116.1,1228-1246).
caagaacactgcaattggt

SEQ ID NO: 644962 - DNA, 19 bp, Mus musculus
  siRNA target sequence for Cacnb2 (NM_023116.1,1248-1266).
gtccttgacgcggatacaa

SEQ ID NO: 644963 - DNA, 19 bp, Mus musculus
  siRNA target sequence for Cacnb2 (NM_023116.1,1251-1269).
cttgacgcggatacaatta

SEQ ID NO: 644964 - DNA, 19 bp, Mus musculus
  siRNA target sequence for Cacnb2 (NM_023116.1,1295-1313).
ctctttggcccctatcata

SEQ ID NO: 644965 - DNA, 19 bp, Mus musculus
  siRNA target sequence for Cacnb2 (NM_023116.1,1297-1315).
ctttggcccctatcatagt

SEQ ID NO: 644966 - DNA, 19 bp, Mus musculus
  siRNA target sequence for Cacnb2 (NM_023116.1,1305-1323).
cctatcatagtgtacgtaa

SEQ ID NO: 644967 - DNA, 19 bp, Mus musculus
  siRNA target sequence for Cacnb2 (NM_023116.1,1306-1324).
ctatcatagtgtacgtaaa

SEQ ID NO: 644968 - DNA, 19 bp, Mus musculus
  siRNA target sequence for Cacnb2 (NM_023116.1,1310-1328).
catagtgtacgtaaagatt

SEQ ID NO: 644969 - DNA, 19 bp, Mus musculus
  siRNA target sequence for Cacnb2 (NM_023116.1,1314-1332).
gtgtacgtaaagatttctt

SEQ ID NO: 644970 - DNA, 19 bp, Mus musculus
  siRNA target sequence for Cacnb2 (NM_023116.1,1316-1334).
gtacgtaaagatttcttct

SEQ ID NO: 644971 - DNA, 19 bp, Mus musculus
  siRNA target sequence for Cacnb2 (NM_023116.1,1336-1354).
ccaaggttttacaaaggtt

SEQ ID NO: 644972 - DNA, 19 bp, Mus musculus
  siRNA target sequence for Cacnb2 (NM_023116.1,1429-1447).
gtcctccgcaggaatcatt

SEQ ID NO: 644973 - DNA, 19 bp, Mus musculus
  siRNA target sequence for Cacnb2 (NM_023116.1,1432-1450).
ctccgcaggaatcatttga

SEQ ID NO: 644974 - DNA, 19 bp, Mus musculus
  siRNA target sequence for Cacnb2 (NM_023116.1,1435-1453).
cgcaggaatcatttgatgt

SEQ ID NO: 644975 - DNA, 19 bp, Mus musculus
  siRNA target sequence for Cacnb2 (NM_023116.1,1601-1619).
ccccaccctcgcctctaat

SEQ ID NO: 644976 - DNA, 19 bp, Mus musculus
  siRNA target sequence for Cacnb2 (NM_023116.1,1604-1622).
caccctcgcctctaattca

SEQ ID NO: 644977 - DNA, 19 bp, Mus musculus
  siRNA target sequence for Cacnb2 (NM_023116.1,1829-1847).
ctacgtggagccaaaggaa

SEQ ID NO: 644978 - DNA, 19 bp, Mus musculus
  siRNA target sequence for Cacnb2 (NM_023116.1,1882-1900).
cacaccgcgagcataacca

SEQ ID NO: 644979 - DNA, 19 bp, Mus musculus
  siRNA target sequence for Cacnb2 (NM_023116.1,1974-1992).
gaccaggaccacaatgagt

SEQ ID NO: 644980 - DNA, 19 bp, Mus musculus
  siRNA target sequence for Cacnb2 (NM_023116.1,1982-2000).
ccacaatgagtgcatcaaa

SEQ ID NO: 644981 - DNA, 19 bp, Mus musculus
  siRNA target sequence for Cacnb2 (NM_023116.1,2001-2019).
caacgaagccggcataaat

SEQ ID NO: 644982 - DNA, 19 bp, Mus musculus
  siRNA target sequence for Cacnb2 (NM_023116.1,2004-2022).
cgaagccggcataaatcta

SEQ ID NO: 644983 - DNA, 19 bp, Mus musculus
  siRNA target sequence for Cacnb2 (NM_023116.1,2009-2027).
ccggcataaatctaaggat

SEQ ID NO: 644984 - DNA, 19 bp, Mus musculus
  siRNA target sequence for Cacnb2 (NM_023116.1,2043-2061).
gagggggaagtaatatcca

SEQ ID NO: 644985 - DNA, 19 bp, Mus musculus
  siRNA target sequence for Cacnb3 (NM_007581.1,299-317).
ggcctctggagtcaacttt

SEQ ID NO: 644986 - DNA, 19 bp, Mus musculus
  siRNA target sequence for Cacnb3 (NM_007581.1,367-385).
ggatcgggaggctagtgaa

SEQ ID NO: 644987 - DNA, 19 bp, Mus musculus
  siRNA target sequence for Cacnb3 (NM_007581.1,368-386).
gatcgggaggctagtgaaa

SEQ ID NO: 644988 - DNA, 19 bp, Mus musculus
  siRNA target sequence for Cacnb3 (NM_007581.1,371-389).
cgggaggctagtgaaagaa

SEQ ID NO: 644989 - DNA, 19 bp, Mus musculus
  siRNA target sequence for Cacnb3 (NM_007581.1,651-669).
gcgctcttcgacttcctta

SEQ ID NO: 644990 - DNA, 19 bp, Mus musculus
  siRNA target sequence for Cacnb3 (NM_007581.1,652-670).
cgctcttcgacttccttaa

SEQ ID NO: 644991 - DNA, 19 bp, Mus musculus
  siRNA target sequence for Cacnb3 (NM_007581.1,913-931).
ctcccatcatcgtctttgt

SEQ ID NO: 644992 - DNA, 19 bp, Mus musculus
  siRNA target sequence for Cacnb3 (NM_007581.1,968-986).
ccgatccaggggaaagtca

SEQ ID NO: 644993 - DNA, 19 bp, Mus musculus
  siRNA target sequence for Cacnb3 (NM_007581.1,1008-1026).
cagatgatggcgtacgata

SEQ ID NO: 644994 - DNA, 19 bp, Mus musculus
  siRNA target sequence for Cacnb3 (NM_007581.1,1107-1125).
gaatacttagaggtttact

SEQ ID NO: 644995 - DNA, 19 bp, Mus musculus
  siRNA target sequence for Cacnb4 (NM_146123.1,128-146).
ctgggtcagcagattccta

SEQ ID NO: 644996 - DNA, 19 bp, Mus musculus
  siRNA target sequence for Cacnb4 (NM_146123.1,132-150).
gtcagcagattcctataca

SEQ ID NO: 644997 - DNA, 19 bp, Mus musculus
  siRNA target sequence for Cacnb4 (NM_146123.1,262-280).
gcttttgcggtgaaaacga

SEQ ID NO: 644998 - DNA, 19 bp, Mus musculus
  siRNA target sequence for Cacnb4 (NM_146123.1,263-281).
cttttgcggtgaaaacgaa

SEQ ID NO: 644999 - DNA, 19 bp, Mus musculus
  siRNA target sequence for Cacnb4 (NM_146123.1,453-471).
ggagaatattcggattcaa

SEQ ID NO: 645000 - DNA, 19 bp, Mus musculus
  siRNA target sequence for Cacnb4 (NM_146123.1,504-522).
gaaatcgagtggaaactct

SEQ ID NO: 645001 - DNA, 19 bp, Mus musculus
  siRNA target sequence for Cacnb4 (NM_146123.1,528-546).
cagtctgggagaaatggta

SEQ ID NO: 645002 - DNA, 19 bp, Mus musculus
  siRNA target sequence for Cacnb4 (NM_146123.1,559-577).
cgagcaactcccacaacaa

SEQ ID NO: 645003 - DNA, 19 bp, Mus musculus
  siRNA target sequence for Cacnb4 (NM_146123.1,659-677).
ggccatcactgaaaggtta

SEQ ID NO: 645004 - DNA, 19 bp, Mus musculus
  siRNA target sequence for Cacnb4 (NM_146123.1,729-747).
gtttgatgggaggatatca

SEQ ID NO: 645005 - DNA, 19 bp, Mus musculus
  siRNA target sequence for Cacnb4 (NM_146123.1,733-751).
gatgggaggatatcaataa

SEQ ID NO: 645006 - DNA, 19 bp, Mus musculus
  siRNA target sequence for Cacnb4 (NM_146123.1,768-786).
catttctcttgctaagaga

SEQ ID NO: 645007 - DNA, 19 bp, Mus musculus
  siRNA target sequence for Cacnb4 (NM_146123.1,807-825).
caagagagcaataattgaa

SEQ ID NO: 645008 - DNA, 19 bp, Mus musculus
  siRNA target sequence for Cacnb4 (NM_146123.1,885-903).
gttggcaagatctttgcaa

SEQ ID NO: 645009 - DNA, 19 bp, Mus musculus
  siRNA target sequence for Cacnb4 (NM_146123.1,945-963).
gctgataaagacatcctta

SEQ ID NO: 645010 - DNA, 19 bp, Mus musculus
  siRNA target sequence for Cacnb4 (NM_146123.1,988-1006).
gtctcgtccccaaaggttt

SEQ ID NO: 645011 - DNA, 19 bp, Mus musculus
  siRNA target sequence for Cacnb4 (NM_146123.1,990-1008).
ctcgtccccaaaggtttta

SEQ ID NO: 645012 - DNA, 19 bp, Mus musculus
  siRNA target sequence for Cacnb4 (NM_146123.1,992-1010).
cgtccccaaaggttttaca

SEQ ID NO: 645013 - DNA, 19 bp, Mus musculus
  siRNA target sequence for Cacnb4 (NM_146123.1,1003-1021).
gttttacagcggctgatta

SEQ ID NO: 645014 - DNA, 19 bp, Mus musculus
  siRNA target sequence for Cacnb4 (NM_146123.1,1037-1055).
cccaaagcaaacacttgaa

SEQ ID NO: 645015 - DNA, 19 bp, Mus musculus
  siRNA target sequence for Cacnb4 (NM_146123.1,1094-1112).
cgcctgaaatgtttgatgt

SEQ ID NO: 645016 - DNA, 19 bp, Mus musculus
  siRNA target sequence for Cacnb4 (NM_146123.1,1099-1117).
gaaatgtttgatgttatat

SEQ ID NO: 645017 - DNA, 19 bp, Mus musculus
  siRNA target sequence for Cacnb4 (NM_146123.1,1104-1122).
gtttgatgttatattagat

SEQ ID NO: 645018 - DNA, 19 bp, Mus musculus
  siRNA target sequence for Cacnb4 (NM_146123.1,1242-1260).
cacagccctctcaccatat

SEQ ID NO: 645019 - DNA, 19 bp, Mus musculus
  siRNA target sequence for Cacnb4 (NM_146123.1,1265-1283).
cagcaatctctggattaca

SEQ ID NO: 645020 - DNA, 19 bp, Mus musculus
  siRNA target sequence for Cacnb4 (NM_146123.1,1316-1334).
cagagaattctccaattga

SEQ ID NO: 645021 - DNA, 19 bp, Mus musculus
  siRNA target sequence for Cacnb4 (NM_146123.1,1333-1351).
gaaagacgaagcctaatga

SEQ ID NO: 645022 - DNA, 19 bp, Mus musculus
  siRNA target sequence for Cacnb4 (NM_146123.1,1352-1370).
cctcggatgaaaattacca

SEQ ID NO: 645023 - DNA, 19 bp, Mus musculus
  siRNA target sequence for Cacnb4 (NM_146123.1,1464-1482).
ctcgtaccaggacacttat

SEQ ID NO: 645024 - DNA, 19 bp, Mus musculus
  siRNA target sequence for Cacng1 (NM_007582.1,310-328).
gggttgccgtgcacaacaa

SEQ ID NO: 645025 - DNA, 19 bp, Mus musculus
  siRNA target sequence for Cacng1 (NM_007582.1,311-329).
ggttgccgtgcacaacaaa

SEQ ID NO: 645026 - DNA, 19 bp, Mus musculus
  siRNA target sequence for Cacng1 (NM_007582.1,354-372).
ccatcaggggaaaagaact

SEQ ID NO: 645027 - DNA, 19 bp, Mus musculus
  siRNA target sequence for Cacng1 (NM_007582.1,399-417).
ggggagagctcggaaatct

SEQ ID NO: 645028 - DNA, 19 bp, Mus musculus
  siRNA target sequence for Cacng1 (NM_007582.1,400-418).
gggagagctcggaaatctt

SEQ ID NO: 645029 - DNA, 19 bp, Mus musculus
  siRNA target sequence for Cacng1 (NM_007582.1,401-419).
ggagagctcggaaatcttt

SEQ ID NO: 645030 - DNA, 19 bp, Mus musculus
  siRNA target sequence for Cacng1 (NM_007582.1,496-514).
gttccatctgcgcatttct

SEQ ID NO: 645031 - DNA, 19 bp, Mus musculus
  siRNA target sequence for Cacng1 (NM_007582.1,523-541).
ggaataagcgtgattacct

SEQ ID NO: 645032 - DNA, 19 bp, Mus musculus
  siRNA target sequence for Cacng1 (NM_007582.1,545-563).
gaggccagcatccatgttt

SEQ ID NO: 645033 - DNA, 19 bp, Mus musculus
  siRNA target sequence for Cacng1 (NM_007582.1,547-565).
ggccagcatccatgtttta

SEQ ID NO: 645034 - DNA, 19 bp, Mus musculus
  siRNA target sequence for Cacng1 (NM_007582.1,548-566).
gccagcatccatgttttat

SEQ ID NO: 645035 - DNA, 19 bp, Mus musculus
  siRNA target sequence for Cacng1 (NM_007582.1,614-632).
gtcggtgaagcgtatgatt

SEQ ID NO: 645036 - DNA, 19 bp, Mus musculus
  siRNA target sequence for Cacng1 (NM_007582.1,616-634).
cggtgaagcgtatgattga

SEQ ID NO: 645037 - DNA, 19 bp, Mus musculus
  siRNA target sequence for Cacng1 (NM_007582.1,618-636).
gtgaagcgtatgattgaca

SEQ ID NO: 645038 - DNA, 19 bp, Mus musculus
  siRNA target sequence for Cacng1 (NM_007582.1,650-668).
ctggatagagcactactat

SEQ ID NO: 645039 - DNA, 19 bp, Mus musculus
  siRNA target sequence for Cacng1 (NM_007582.1,687-705).
gcatgtgccgcgttcatct

SEQ ID NO: 645040 - DNA, 19 bp, Mus musculus
  siRNA target sequence for Cacng2 (NM_007583.1,398-416).
gtttgatcgaggtgttcaa

SEQ ID NO: 645041 - DNA, 19 bp, Mus musculus
  siRNA target sequence for Cacng2 (NM_007583.1,405-423).
cgaggtgttcaaatgcttt

SEQ ID NO: 645042 - DNA, 19 bp, Mus musculus
  siRNA target sequence for Cacng2 (NM_007583.1,408-426).
ggtgttcaaatgcttttaa

SEQ ID NO: 645043 - DNA, 19 bp, Mus musculus
  siRNA target sequence for Cacng2 (NM_007583.1,468-486).
gctgtgggaaccgactatt

SEQ ID NO: 645044 - DNA, 19 bp, Mus musculus
  siRNA target sequence for Cacng2 (NM_007583.1,592-610).
gcctcgaagggaacttcaa

SEQ ID NO: 645045 - DNA, 19 bp, Mus musculus
  siRNA target sequence for Cacng2 (NM_007583.1,593-611).
cctcgaagggaacttcaaa

SEQ ID NO: 645046 - DNA, 19 bp, Mus musculus
  siRNA target sequence for Cacng2 (NM_007583.1,613-631).
gtctgtgcaagcaaatcga

SEQ ID NO: 645047 - DNA, 19 bp, Mus musculus
  siRNA target sequence for Cacng2 (NM_007583.1,660-678).
gctgacaccgcagagtatt

SEQ ID NO: 645048 - DNA, 19 bp, Mus musculus
  siRNA target sequence for Cacng2 (NM_007583.1,661-679).
ctgacaccgcagagtattt

SEQ ID NO: 645049 - DNA, 19 bp, Mus musculus
  siRNA target sequence for Cacng2 (NM_007583.1,815-833).
cgtgtctgcaggtcttagt

SEQ ID NO: 645050 - DNA, 19 bp, Mus musculus
  siRNA target sequence for Cacng2 (NM_007583.1,816-834).
gtgtctgcaggtcttagta

SEQ ID NO: 645051 - DNA, 19 bp, Mus musculus
  siRNA target sequence for Cacng2 (NM_007583.1,818-836).
gtctgcaggtcttagtaat

SEQ ID NO: 645052 - DNA, 19 bp, Mus musculus
  siRNA target sequence for Cacng2 (NM_007583.1,820-838).
ctgcaggtcttagtaatat

SEQ ID NO: 645053 - DNA, 19 bp, Mus musculus
  siRNA target sequence for Cacng2 (NM_007583.1,842-860).
cgggatcatcgtgtatata

SEQ ID NO: 645054 - DNA, 19 bp, Mus musculus
  siRNA target sequence for Cacng2 (NM_007583.1,845-863).
gatcatcgtgtatatatca

SEQ ID NO: 645055 - DNA, 19 bp, Mus musculus
  siRNA target sequence for Cacng2 (NM_007583.1,974-992).
gctggccgtgcacatgttt

SEQ ID NO: 645056 - DNA, 19 bp, Mus musculus
  siRNA target sequence for Cacng4 (NM_019431.1,213-231).
catcgaaggcatctataga

SEQ ID NO: 645057 - DNA, 19 bp, Mus musculus
  siRNA target sequence for Cacng4 (NM_019431.1,376-394).
ggcgctgggaggatctaca

SEQ ID NO: 645058 - DNA, 19 bp, Mus musculus
  siRNA target sequence for Cacng4 (NM_019431.1,393-411).
cagccgcaagaacaatatt

SEQ ID NO: 645059 - DNA, 19 bp, Mus musculus
  siRNA target sequence for Cacng4 (NM_019431.1,395-413).
gccgcaagaacaatattgt

SEQ ID NO: 645060 - DNA, 19 bp, Mus musculus
  siRNA target sequence for Cacng4 (NM_019431.1,438-456).
ggcggcaggcctcagtaat

SEQ ID NO: 645061 - DNA, 19 bp, Mus musculus
  siRNA target sequence for Cacng4 (NM_019431.1,439-457).
gcggcaggcctcagtaata

SEQ ID NO: 645062 - DNA, 19 bp, Mus musculus
  siRNA target sequence for Cacng4 (NM_019431.1,440-458).
cggcaggcctcagtaatat

SEQ ID NO: 645063 - DNA, 19 bp, Mus musculus
  siRNA target sequence for Cacng4 (NM_019431.1,462-480).
cggtatcatcgtctacatt

SEQ ID NO: 645064 - DNA, 19 bp, Mus musculus
  siRNA target sequence for Cacng4 (NM_019431.1,492-510).
gggcgaccccagtgacaaa

SEQ ID NO: 645065 - DNA, 19 bp, Mus musculus
  siRNA target sequence for Cacng4 (NM_019431.1,507-525).
caaacgtgacgaagacaaa

SEQ ID NO: 645066 - DNA, 19 bp, Mus musculus
  siRNA target sequence for Cacng4 (NM_019431.1,517-535).
gaagacaaaaagaaccatt

SEQ ID NO: 645067 - DNA, 19 bp, Mus musculus
  siRNA target sequence for Cacng4 (NM_019431.1,537-555).
caactacggctggtctttt

SEQ ID NO: 645068 - DNA, 19 bp, Mus musculus
  siRNA target sequence for Cacng4 (NM_019431.1,605-623).
ctgtaaacatttacattga

SEQ ID NO: 645069 - DNA, 19 bp, Mus musculus
  siRNA target sequence for Cacng4 (NM_019431.1,650-668).
ccaagcgggagttccttaa

SEQ ID NO: 645070 - DNA, 19 bp, Mus musculus
  siRNA target sequence for Cacng4 (NM_019431.1,778-796).
cccgtgggcctgaagatca

SEQ ID NO: 645071 - DNA, 19 bp, Mus musculus
  siRNA target sequence for Trpc6 (NM_013838.1,451-469).
ccagcttccggggtaatga

SEQ ID NO: 645072 - DNA, 19 bp, Mus musculus
  siRNA target sequence for Trpc6 (NM_013838.1,452-470).
cagcttccggggtaatgaa

SEQ ID NO: 645073 - DNA, 19 bp, Mus musculus
  siRNA target sequence for Trpc6 (NM_013838.1,531-549).
cgaggaccagcatacatgt

SEQ ID NO: 645074 - DNA, 19 bp, Mus musculus
  siRNA target sequence for Trpc6 (NM_013838.1,562-580).
caacaagcctgtctattga

SEQ ID NO: 645075 - DNA, 19 bp, Mus musculus
  siRNA target sequence for Trpc6 (NM_013838.1,647-665).
gtgtcattccctcaatgtt

SEQ ID NO: 645076 - DNA, 19 bp, Mus musculus
  siRNA target sequence for Trpc6 (NM_013838.1,649-667).
gtcattccctcaatgttaa

SEQ ID NO: 645077 - DNA, 19 bp, Mus musculus
  siRNA target sequence for Trpc6 (NM_013838.1,791-809).
cattagtaaaggttatgta

SEQ ID NO: 645078 - DNA, 19 bp, Mus musculus
  siRNA target sequence for Trpc6 (NM_013838.1,964-982).
ctgcacattgccaggaata

SEQ ID NO: 645079 - DNA, 19 bp, Mus musculus
  siRNA target sequence for Trpc6 (NM_013838.1,967-985).
cacattgccaggaatatga

SEQ ID NO: 645080 - DNA, 19 bp, Mus musculus
  siRNA target sequence for Trpc6 (NM_013838.1,1019-1037).
gattgagcggcctcatgat

SEQ ID NO: 645081 - DNA, 19 bp, Mus musculus
  siRNA target sequence for Trpc6 (NM_013838.1,1145-1163).
gtcattgtccagtgaagat

SEQ ID NO: 645082 - DNA, 19 bp, Mus musculus
  siRNA target sequence for Trpc6 (NM_013838.1,1256-1274).
gcagtgcaaggatttcgtt

SEQ ID NO: 645083 - DNA, 19 bp, Mus musculus
  siRNA target sequence for Trpc6 (NM_013838.1,1355-1373).
ggacttcggccgtccaaat

SEQ ID NO: 645084 - DNA, 19 bp, Mus musculus
  siRNA target sequence for Trpc6 (NM_013838.1,1368-1386).
ccaaatctcagccgtttaa

SEQ ID NO: 645085 - DNA, 19 bp, Mus musculus
  siRNA target sequence for Trpc6 (NM_013838.1,1378-1396).
gccgtttaaaacttgctat

SEQ ID NO: 645086 - DNA, 19 bp, Mus musculus
  siRNA target sequence for Trpc6 (NM_013838.1,1379-1397).
ccgtttaaaacttgctatt

SEQ ID NO: 645087 - DNA, 19 bp, Mus musculus
  siRNA target sequence for Trpc6 (NM_013838.1,1445-1463).
gctcctgtccatatggtat

SEQ ID NO: 645088 - DNA, 19 bp, Mus musculus
  siRNA target sequence for Trpc6 (NM_013838.1,1576-1594).
gcaagatggggaagatatt

SEQ ID NO: 645089 - DNA, 19 bp, Mus musculus
  siRNA target sequence for Trpc6 (NM_013838.1,1649-1667).
ggggctgctcgtcatgaat

SEQ ID NO: 645090 - DNA, 19 bp, Mus musculus
  siRNA target sequence for Trpc6 (NM_013838.1,1770-1788).
gagatgctcattatatcct

SEQ ID NO: 645091 - DNA, 19 bp, Mus musculus
  siRNA target sequence for Trpc6 (NM_013838.1,1778-1796).
cattatatcctgggtaata

SEQ ID NO: 645092 - DNA, 19 bp, Mus musculus
  siRNA target sequence for Trpc6 (NM_013838.1,1787-1805).
ctgggtaataggcatgata

SEQ ID NO: 645093 - DNA, 19 bp, Mus musculus
  siRNA target sequence for Trpc6 (NM_013838.1,1799-1817).
catgatatgggctgaatgt

SEQ ID NO: 645094 - DNA, 19 bp, Mus musculus
  siRNA target sequence for Trpc6 (NM_013838.1,1802-1820).
gatatgggctgaatgtaaa

SEQ ID NO: 645095 - DNA, 19 bp, Mus musculus
  siRNA target sequence for Trpc6 (NM_013838.1,1833-1851).
caaggccccaaagaatact

SEQ ID NO: 645096 - DNA, 19 bp, Mus musculus
  siRNA target sequence for Trpc6 (NM_013838.1,1891-1909).
caatctttgcagcatcatt

SEQ ID NO: 645097 - DNA, 19 bp, Mus musculus
  siRNA target sequence for Trpc6 (NM_013838.1,1903-1921).
catcattcattgcaagatt

SEQ ID NO: 645098 - DNA, 19 bp, Mus musculus
  siRNA target sequence for Trpc6 (NM_013838.1,1952-1970).
gagcatcattgatgcaaat

SEQ ID NO: 645099 - DNA, 19 bp, Mus musculus
  siRNA target sequence for Trpc6 (NM_013838.1,2004-2022).
ggggacaacgttaaatact

SEQ ID NO: 645100 - DNA, 19 bp, Mus musculus
  siRNA target sequence for Trpc6 (NM_013838.1,2005-2023).
gggacaacgttaaatacta

SEQ ID NO: 645101 - DNA, 19 bp, Mus musculus
  siRNA target sequence for Trpc6 (NM_013838.1,2007-2025).
gacaacgttaaatactaca

SEQ ID NO: 645102 - DNA, 19 bp, Mus musculus
  siRNA target sequence for Trpc6 (NM_013838.1,2009-2027).
caacgttaaatactacaat

SEQ ID NO: 645103 - DNA, 19 bp, Mus musculus
  siRNA target sequence for Trpc6 (NM_013838.1,2050-2068).
ctactgatcctcagatcat

SEQ ID NO: 645104 - DNA, 19 bp, Mus musculus
  siRNA target sequence for Trpc6 (NM_013838.1,2066-2084).
catctctgaaggtctttat

SEQ ID NO: 645105 - DNA, 19 bp, Mus musculus
  siRNA target sequence for Trpc6 (NM_013838.1,2108-2126).
ctccagaatagcttacatt

SEQ ID NO: 645106 - DNA, 19 bp, Mus musculus
  siRNA target sequence for Trpc6 (NM_013838.1,2272-2290).
caaaacagaatgaagcatt

SEQ ID NO: 645107 - DNA, 19 bp, Mus musculus
  siRNA target sequence for Trpc6 (NM_013838.1,2327-2345).
ggctatctttggtctttct

SEQ ID NO: 645108 - DNA, 19 bp, Mus musculus
  siRNA target sequence for Trpc6 (NM_013838.1,2361-2379).
gtcattaactacaatcaca

SEQ ID NO: 645109 - DNA, 19 bp, Mus musculus
  siRNA target sequence for Trpc6 (NM_013838.1,2376-2394).
cacaagttcattgaaaaca

SEQ ID NO: 645110 - DNA, 19 bp, Mus musculus
  siRNA target sequence for Trpc6 (NM_013838.1,2393-2411).
catcggctacgttctgtat

SEQ ID NO: 645111 - DNA, 19 bp, Mus musculus
  siRNA target sequence for Trpc6 (NM_013838.1,2402-2420).
cgttctgtatggtgtctat

SEQ ID NO: 645112 - DNA, 19 bp, Mus musculus
  siRNA target sequence for Trpc6 (NM_013838.1,2403-2421).
gttctgtatggtgtctata

SEQ ID NO: 645113 - DNA, 19 bp, Mus musculus
  siRNA target sequence for Trpc6 (NM_013838.1,2413-2431).
gtgtctataatgtcacaat

SEQ ID NO: 645114 - DNA, 19 bp, Mus musculus
  siRNA target sequence for Trpc6 (NM_013838.1,2432-2450).
ggtcattgttttgctaaat

SEQ ID NO: 645115 - DNA, 19 bp, Mus musculus
  siRNA target sequence for Trpc6 (NM_013838.1,2460-2478).
gcgatgatcaatagttcat

SEQ ID NO: 645116 - DNA, 19 bp, Mus musculus
  siRNA target sequence for Trpc6 (NM_013838.1,2461-2479).
cgatgatcaatagttcatt

SEQ ID NO: 645117 - DNA, 19 bp, Mus musculus
  siRNA target sequence for Trpc6 (NM_013838.1,2586-2604).
gtaccaagtccaaaatcct

SEQ ID NO: 645118 - DNA, 19 bp, Mus musculus
  siRNA target sequence for Trpc6 (NM_013838.1,2596-2614).
caaaatccttgctttatct

SEQ ID NO: 645119 - DNA, 19 bp, Mus musculus
  siRNA target sequence for Trpc6 (NM_013838.1,2615-2633).
cctattgaaatttaagaaa

SEQ ID NO: 645120 - DNA, 19 bp, Mus musculus
  siRNA target sequence for Trpc6 (NM_013838.1,2735-2753).
cgaagacctttcaaaattt

SEQ ID NO: 645121 - DNA, 19 bp, Mus musculus
  siRNA target sequence for Trpc6 (NM_013838.1,2780-2798).
caacaaacaatcaagtaca

SEQ ID NO: 645122 - DNA, 19 bp, Mus musculus
  siRNA target sequence for Trpc6 (NM_013838.1,2800-2818).
ggagctcagaagattatca

SEQ ID NO: 645123 - DNA, 19 bp, Mus musculus
  siRNA target sequence for Trpc6 (NM_013838.1,2831-2849).
cagtaaccctccaagacaa

SEQ ID NO: 645124 - DNA, 19 bp, Mus musculus
  siRNA target sequence for Trpc6 (NM_013838.1,2833-2851).
gtaaccctccaagacaata

SEQ ID NO: 645125 - DNA, 19 bp, Mus musculus
  siRNA target sequence for Trpc6 (NM_013838.1,2861-2879).
catgaagagactcattaaa

SEQ ID NO: 645126 - DNA, 19 bp, Mus musculus
  siRNA target sequence for Trpc6 (NM_013838.1,2867-2885).
gagactcattaaaagatat

SEQ ID NO: 645127 - DNA, 19 bp, Mus musculus
  siRNA target sequence for Trpc6 (NM_013838.1,2960-2978).
ctcaagtctccgttatgaa

SEQ ID NO: 645128 - DNA, 19 bp, Mus musculus
  siRNA target sequence for Trpc6 (NM_013838.1,2962-2980).
caagtctccgttatgaact

SEQ ID NO: 645129 - DNA, 19 bp, Mus musculus
  siRNA target sequence for Cacna2d1 (NM_009784.1,563-581).
ccaatggagggaagatttt

SEQ ID NO: 645130 - DNA, 19 bp, Mus musculus
  siRNA target sequence for Cacna2d1 (NM_009784.1,586-604).
gcaatgaagttgtctacta

SEQ ID NO: 645131 - DNA, 19 bp, Mus musculus
  siRNA target sequence for Cacna2d1 (NM_009784.1,594-612).
gttgtctactataatgcta

SEQ ID NO: 645132 - DNA, 19 bp, Mus musculus
  siRNA target sequence for Cacna2d1 (NM_009784.1,649-667).
caggcagccaacggattaa

SEQ ID NO: 645133 - DNA, 19 bp, Mus musculus
  siRNA target sequence for Cacna2d1 (NM_009784.1,653-671).
cagccaacggattaaacct

SEQ ID NO: 645134 - DNA, 19 bp, Mus musculus
  siRNA target sequence for Cacna2d1 (NM_009784.1,660-678).
cggattaaacctgttttta

SEQ ID NO: 645135 - DNA, 19 bp, Mus musculus
  siRNA target sequence for Cacna2d1 (NM_009784.1,661-679).
ggattaaacctgtttttat

SEQ ID NO: 645136 - DNA, 19 bp, Mus musculus
  siRNA target sequence for Cacna2d1 (NM_009784.1,716-734).
gcatgcagcggtccatatt

SEQ ID NO: 645137 - DNA, 19 bp, Mus musculus
  siRNA target sequence for Cacna2d1 (NM_009784.1,746-764).
ctatgagggctcaaccata

SEQ ID NO: 645138 - DNA, 19 bp, Mus musculus
  siRNA target sequence for Cacna2d1 (NM_009784.1,750-768).
gagggctcaaccatagtgt

SEQ ID NO: 645139 - DNA, 19 bp, Mus musculus
  siRNA target sequence for Cacna2d1 (NM_009784.1,753-771).
ggctcaaccatagtgttaa

SEQ ID NO: 645140 - DNA, 19 bp, Mus musculus
  siRNA target sequence for Cacna2d1 (NM_009784.1,754-772).
gctcaaccatagtgttaaa

SEQ ID NO: 645141 - DNA, 19 bp, Mus musculus
  siRNA target sequence for Cacna2d1 (NM_009784.1,782-800).
ctggacaagtgccttagat

SEQ ID NO: 645142 - DNA, 19 bp, Mus musculus
  siRNA target sequence for Cacna2d1 (NM_009784.1,784-802).
ggacaagtgccttagatga

SEQ ID NO: 645143 - DNA, 19 bp, Mus musculus
  siRNA target sequence for Cacna2d1 (NM_009784.1,785-803).
gacaagtgccttagatgaa

SEQ ID NO: 645144 - DNA, 19 bp, Mus musculus
  siRNA target sequence for Cacna2d1 (NM_009784.1,787-805).
caagtgccttagatgaagt

SEQ ID NO: 645145 - DNA, 19 bp, Mus musculus
  siRNA target sequence for Cacna2d1 (NM_009784.1,865-883).
ctggcctggcccgatatta

SEQ ID NO: 645146 - DNA, 19 bp, Mus musculus
  siRNA target sequence for Cacna2d1 (NM_009784.1,869-887).
cctggcccgatattatcca

SEQ ID NO: 645147 - DNA, 19 bp, Mus musculus
  siRNA target sequence for Cacna2d1 (NM_009784.1,889-907).
cttctccatgggtggataa

SEQ ID NO: 645148 - DNA, 19 bp, Mus musculus
  siRNA target sequence for Cacna2d1 (NM_009784.1,894-912).
ccatgggtggataatagta

SEQ ID NO: 645149 - DNA, 19 bp, Mus musculus
  siRNA target sequence for Cacna2d1 (NM_009784.1,899-917).
ggtggataatagtagaact

SEQ ID NO: 645150 - DNA, 19 bp, Mus musculus
  siRNA target sequence for Cacna2d1 (NM_009784.1,916-934).
ctccaaacaagattgatct

SEQ ID NO: 645151 - DNA, 19 bp, Mus musculus
  siRNA target sequence for Cacna2d1 (NM_009784.1,918-936).
ccaaacaagattgatctat

SEQ ID NO: 645152 - DNA, 19 bp, Mus musculus
  siRNA target sequence for Cacna2d1 (NM_009784.1,926-944).
gattgatctatatgatgta

SEQ ID NO: 645153 - DNA, 19 bp, Mus musculus
  siRNA target sequence for Cacna2d1 (NM_009784.1,1022-1040).
gagcggattgactctgaaa

SEQ ID NO: 645154 - DNA, 19 bp, Mus musculus
  siRNA target sequence for Cacna2d1 (NM_009784.1,1024-1042).
gcggattgactctgaaact

SEQ ID NO: 645155 - DNA, 19 bp, Mus musculus
  siRNA target sequence for Cacna2d1 (NM_009784.1,1027-1045).
gattgactctgaaactcat

SEQ ID NO: 645156 - DNA, 19 bp, Mus musculus
  siRNA target sequence for Cacna2d1 (NM_009784.1,1037-1055).
gaaactcatccgaacatct

SEQ ID NO: 645157 - DNA, 19 bp, Mus musculus
  siRNA target sequence for Cacna2d1 (NM_009784.1,1056-1074).
gtctccgagatgttagaaa

SEQ ID NO: 645158 - DNA, 19 bp, Mus musculus
  siRNA target sequence for Cacna2d1 (NM_009784.1,1094-1112).
cgtgaatgtagcttcattt

SEQ ID NO: 645159 - DNA, 19 bp, Mus musculus
  siRNA target sequence for Cacna2d1 (NM_009784.1,1148-1166).
cctggttcaagcgaatgta

SEQ ID NO: 645160 - DNA, 19 bp, Mus musculus
  siRNA target sequence for Cacna2d1 (NM_009784.1,1149-1167).
ctggttcaagcgaatgtaa

SEQ ID NO: 645161 - DNA, 19 bp, Mus musculus
  siRNA target sequence for Cacna2d1 (NM_009784.1,1151-1169).
ggttcaagcgaatgtaaga

SEQ ID NO: 645162 - DNA, 19 bp, Mus musculus
  siRNA target sequence for Cacna2d1 (NM_009784.1,1152-1170).
gttcaagcgaatgtaagaa

SEQ ID NO: 645163 - DNA, 19 bp, Mus musculus
  siRNA target sequence for Cacna2d1 (NM_009784.1,1155-1173).
caagcgaatgtaagaaata

SEQ ID NO: 645164 - DNA, 19 bp, Mus musculus
  siRNA target sequence for Cacna2d1 (NM_009784.1,1188-1206).
gatgccgtgaataacatta

SEQ ID NO: 645165 - DNA, 19 bp, Mus musculus
  siRNA target sequence for Cacna2d1 (NM_009784.1,1210-1228).
caaaggggatcacagatta

SEQ ID NO: 645166 - DNA, 19 bp, Mus musculus
  siRNA target sequence for Cacna2d1 (NM_009784.1,1248-1266).
gccttcgaacagctactta

SEQ ID NO: 645167 - DNA, 19 bp, Mus musculus
  siRNA target sequence for Cacna2d1 (NM_009784.1,1249-1267).
ccttcgaacagctacttaa

SEQ ID NO: 645168 - DNA, 19 bp, Mus musculus
  siRNA target sequence for Cacna2d1 (NM_009784.1,1250-1268).
cttcgaacagctacttaat

SEQ ID NO: 645169 - DNA, 19 bp, Mus musculus
  siRNA target sequence for Cacna2d1 (NM_009784.1,1253-1271).
cgaacagctacttaattat

SEQ ID NO: 645170 - DNA, 19 bp, Mus musculus
  siRNA target sequence for Cacna2d1 (NM_009784.1,1331-1349).
gagagcccaggagatattt

SEQ ID NO: 645171 - DNA, 19 bp, Mus musculus
  siRNA target sequence for Cacna2d1 (NM_009784.1,1393-1411).
ccgtcggtcaacataatta

SEQ ID NO: 645172 - DNA, 19 bp, Mus musculus
  siRNA target sequence for Cacna2d1 (NM_009784.1,1394-1412).
cgtcggtcaacataattat

SEQ ID NO: 645173 - DNA, 19 bp, Mus musculus
  siRNA target sequence for Cacna2d1 (NM_009784.1,1398-1416).
ggtcaacataattatgaca

SEQ ID NO: 645174 - DNA, 19 bp, Mus musculus
  siRNA target sequence for Cacna2d1 (NM_009784.1,1413-1431).
gacagaggacctattcagt

SEQ ID NO: 645175 - DNA, 19 bp, Mus musculus
  siRNA target sequence for Cacna2d1 (NM_009784.1,1470-1488).
ccctccattggtgcaataa

SEQ ID NO: 645176 - DNA, 19 bp, Mus musculus
  siRNA target sequence for Cacna2d1 (NM_009784.1,1472-1490).
ctccattggtgcaataaga

SEQ ID NO: 645177 - DNA, 19 bp, Mus musculus
  siRNA target sequence for Cacna2d1 (NM_009784.1,1483-1501).
caataagaatcaatactca

SEQ ID NO: 645178 - DNA, 19 bp, Mus musculus
  siRNA target sequence for Cacna2d1 (NM_009784.1,1489-1507).
gaatcaatactcaggaata

SEQ ID NO: 645179 - DNA, 19 bp, Mus musculus
  siRNA target sequence for Cacna2d1 (NM_009784.1,1493-1511).
caatactcaggaatatcta

SEQ ID NO: 645180 - DNA, 19 bp, Mus musculus
  siRNA target sequence for Cacna2d1 (NM_009784.1,1857-1875).
ctcgatgctgagttagaga

SEQ ID NO: 645181 - DNA, 19 bp, Mus musculus
  siRNA target sequence for Cacna2d1 (NM_009784.1,1859-1877).
cgatgctgagttagagaat

SEQ ID NO: 645182 - DNA, 19 bp, Mus musculus
  siRNA target sequence for Cacna2d1 (NM_009784.1,1863-1881).
gctgagttagagaatgaaa

SEQ ID NO: 645183 - DNA, 19 bp, Mus musculus
  siRNA target sequence for Cacna2d1 (NM_009784.1,1980-1998).
ggaaatcgaacatacacat

SEQ ID NO: 645184 - DNA, 19 bp, Mus musculus
  siRNA target sequence for Cacna2d1 (NM_009784.1,1994-2012).
cacatggacgcctgtcaat

SEQ ID NO: 645185 - DNA, 19 bp, Mus musculus
  siRNA target sequence for Cacna2d1 (NM_009784.1,2004-2022).
cctgtcaatggcacagatt

SEQ ID NO: 645186 - DNA, 19 bp, Mus musculus
  siRNA target sequence for Cacna2d1 (NM_009784.1,2005-2023).
ctgtcaatggcacagatta

SEQ ID NO: 645187 - DNA, 19 bp, Mus musculus
  siRNA target sequence for Cacna2d1 (NM_009784.1,2007-2025).
gtcaatggcacagattaca

SEQ ID NO: 645188 - DNA, 19 bp, Mus musculus
  siRNA target sequence for Cacna2d1 (NM_009784.1,2136-2154).
gaatctggctatactttca

SEQ ID NO: 645189 - DNA, 19 bp, Mus musculus
  siRNA target sequence for Cacna2d1 (NM_009784.1,2165-2183).
ggaatactgcaatgatctt

SEQ ID NO: 645190 - DNA, 19 bp, Mus musculus
  siRNA target sequence for Cacna2d1 (NM_009784.1,2252-2270).
caacccctcctgtaataca

SEQ ID NO: 645191 - DNA, 19 bp, Mus musculus
  siRNA target sequence for Cacna2d1 (NM_009784.1,2255-2273).
cccctcctgtaatacagat

SEQ ID NO: 645192 - DNA, 19 bp, Mus musculus
  siRNA target sequence for Cacna2d1 (NM_009784.1,2256-2274).
ccctcctgtaatacagatt

SEQ ID NO: 645193 - DNA, 19 bp, Mus musculus
  siRNA target sequence for Cacna2d1 (NM_009784.1,2260-2278).
cctgtaatacagatttgat

SEQ ID NO: 645194 - DNA, 19 bp, Mus musculus
  siRNA target sequence for Cacna2d1 (NM_009784.1,2269-2287).
cagatttgattaatagaat

SEQ ID NO: 645195 - DNA, 19 bp, Mus musculus
  siRNA target sequence for Cacna2d1 (NM_009784.1,2292-2310).
ctggatgcaggttttacaa

SEQ ID NO: 645196 - DNA, 19 bp, Mus musculus
  siRNA target sequence for Cacna2d1 (NM_009784.1,2294-2312).
ggatgcaggttttacaaat

SEQ ID NO: 645197 - DNA, 19 bp, Mus musculus
  siRNA target sequence for Cacna2d1 (NM_009784.1,2385-2403).
ggtgggattacgagagttt

SEQ ID NO: 645198 - DNA, 19 bp, Mus musculus
  siRNA target sequence for Cacna2d1 (NM_009784.1,2386-2404).
gtgggattacgagagttta

SEQ ID NO: 645199 - DNA, 19 bp, Mus musculus
  siRNA target sequence for Cacna2d1 (NM_009784.1,2469-2487).
cggagcctagataacgata

SEQ ID NO: 645200 - DNA, 19 bp, Mus musculus
  siRNA target sequence for Cacna2d1 (NM_009784.1,2470-2488).
ggagcctagataacgataa

SEQ ID NO: 645201 - DNA, 19 bp, Mus musculus
  siRNA target sequence for Cacna2d1 (NM_009784.1,2473-2491).
gcctagataacgataacta

SEQ ID NO: 645202 - DNA, 19 bp, Mus musculus
  siRNA target sequence for Cacna2d1 (NM_009784.1,2478-2496).
gataacgataactacgttt

SEQ ID NO: 645203 - DNA, 19 bp, Mus musculus
  siRNA target sequence for Cacna2d1 (NM_009784.1,2483-2501).
cgataactacgttttcact

SEQ ID NO: 645204 - DNA, 19 bp, Mus musculus
  siRNA target sequence for Cacna2d1 (NM_009784.1,2500-2518).
ctgcgccctactttaacaa

SEQ ID NO: 645205 - DNA, 19 bp, Mus musculus
  siRNA target sequence for Cacna2d1 (NM_009784.1,2502-2520).
gcgccctactttaacaaaa

SEQ ID NO: 645206 - DNA, 19 bp, Mus musculus
  siRNA target sequence for Cacna2d1 (NM_009784.1,2504-2522).
gccctactttaacaaaagt

SEQ ID NO: 645207 - DNA, 19 bp, Mus musculus
  siRNA target sequence for Cacna2d1 (NM_009784.1,2532-2550).
gcgtatgaatctggaatta

SEQ ID NO: 645208 - DNA, 19 bp, Mus musculus
  siRNA target sequence for Cacna2d1 (NM_009784.1,2542-2560).
ctggaattatggtaagcaa

SEQ ID NO: 645209 - DNA, 19 bp, Mus musculus
  siRNA target sequence for Cacna2d1 (NM_009784.1,2558-2576).
caaagcagtagaactgtat

SEQ ID NO: 645210 - DNA, 19 bp, Mus musculus
  siRNA target sequence for Cacna2d1 (NM_009784.1,2563-2581).
cagtagaactgtatatcca

SEQ ID NO: 645211 - DNA, 19 bp, Mus musculus
  siRNA target sequence for Cacna2d1 (NM_009784.1,2598-2616).
cccgcagttgtgggaatta

SEQ ID NO: 645212 - DNA, 19 bp, Mus musculus
  siRNA target sequence for Cacna2d1 (NM_009784.1,2599-2617).
ccgcagttgtgggaattaa

SEQ ID NO: 645213 - DNA, 19 bp, Mus musculus
  siRNA target sequence for Cacna2d1 (NM_009784.1,2757-2775).
gcaaatcacgatgattaca

SEQ ID NO: 645214 - DNA, 19 bp, Mus musculus
  siRNA target sequence for Cacna2d1 (NM_009784.1,2783-2801).
gattggacgtttttttgga

SEQ ID NO: 645215 - DNA, 19 bp, Mus musculus
  siRNA target sequence for Cacna2d1 (NM_009784.1,2819-2837).
gatgagacacctggttaat

SEQ ID NO: 645216 - DNA, 19 bp, Mus musculus
  siRNA target sequence for Cacna2d1 (NM_009784.1,2842-2860).
cactttatgcattcaacaa

SEQ ID NO: 645217 - DNA, 19 bp, Mus musculus
  siRNA target sequence for Cacna2d1 (NM_009784.1,2917-2935).
gacatcgctcagcatatgt

SEQ ID NO: 645218 - DNA, 19 bp, Mus musculus
  siRNA target sequence for Cacna2d1 (NM_009784.1,2938-2956).
catcgattgcagatatact

SEQ ID NO: 645219 - DNA, 19 bp, Mus musculus
  siRNA target sequence for Cacna2d1 (NM_009784.1,2980-2998).
ctgccgcctggtctattct

SEQ ID NO: 645220 - DNA, 19 bp, Mus musculus
  siRNA target sequence for Cacna2d1 (NM_009784.1,3089-3107).
gagctgcatcacagaacaa

SEQ ID NO: 645221 - DNA, 19 bp, Mus musculus
  siRNA target sequence for Cacna2d1 (NM_009784.1,3100-3118).
cagaacaaacccagtactt

SEQ ID NO: 645222 - DNA, 19 bp, Mus musculus
  siRNA target sequence for Cacna2d1 (NM_009784.1,3105-3123).
caaacccagtacttcttca

SEQ ID NO: 645223 - DNA, 19 bp, Mus musculus
  siRNA target sequence for Cacna2d1 (NM_009784.1,3122-3140).
caagaacgatactaaatca

SEQ ID NO: 645224 - DNA, 19 bp, Mus musculus
  siRNA target sequence for Cacna2d1 (NM_009784.1,3128-3146).
cgatactaaatcattcagt

SEQ ID NO: 645225 - DNA, 19 bp, Mus musculus
  siRNA target sequence for Cacna2d1 (NM_009784.1,3167-3185).
ctgttccaggatctttcat

SEQ ID NO: 645226 - DNA, 19 bp, Mus musculus
  siRNA target sequence for Cacna2d1 (NM_009784.1,3183-3201).
catgtagagaaacttatga

SEQ ID NO: 645227 - DNA, 19 bp, Mus musculus
  siRNA target sequence for Cacna2d1 (NM_009784.1,3203-3221).
caccaacttagtattcata

SEQ ID NO: 645228 - DNA, 19 bp, Mus musculus
  siRNA target sequence for Cacna2d1 (NM_009784.1,3320-3338).
gcccagataccgaaaagga

SEQ ID NO: 645229 - DNA, 19 bp, Mus musculus
  siRNA target sequence for Cacna2d1 (NM_009784.1,3339-3357).
cctgatgtctgctttgata

SEQ ID NO: 645230 - DNA, 19 bp, Mus musculus
  siRNA target sequence for Cacna2d1 (NM_009784.1,3340-3358).
ctgatgtctgctttgataa

SEQ ID NO: 645231 - DNA, 19 bp, Mus musculus
  siRNA target sequence for Cacna2d1 (NM_009784.1,3388-3406).
gtggtgtttctgggttaaa

SEQ ID NO: 645232 - DNA, 19 bp, Mus musculus
  siRNA target sequence for Cacna2d1 (NM_009784.1,3399-3417).
gggttaaacccttccttat

SEQ ID NO: 645233 - DNA, 19 bp, Mus musculus
  siRNA target sequence for Cacna2d1 (NM_009784.1,3408-3426).
ccttccttatggtctatct

SEQ ID NO: 645234 - DNA, 19 bp, Mus musculus
  siRNA target sequence for Cacng3 (NM_019430.1,17-35).
gaggtatccagatgttgat

SEQ ID NO: 645235 - DNA, 19 bp, Mus musculus
  siRNA target sequence for Cacng3 (NM_019430.1,19-37).
ggtatccagatgttgatca

SEQ ID NO: 645236 - DNA, 19 bp, Mus musculus
  siRNA target sequence for Cacng3 (NM_019430.1,27-45).
gatgttgatcactactgta

SEQ ID NO: 645237 - DNA, 19 bp, Mus musculus
  siRNA target sequence for Cacng3 (NM_019430.1,46-64).
ggagccttcgcagctttta

SEQ ID NO: 645238 - DNA, 19 bp, Mus musculus
  siRNA target sequence for Cacng3 (NM_019430.1,49-67).
gccttcgcagcttttagtt

SEQ ID NO: 645239 - DNA, 19 bp, Mus musculus
  siRNA target sequence for Cacng3 (NM_019430.1,50-68).
ccttcgcagcttttagttt

SEQ ID NO: 645240 - DNA, 19 bp, Mus musculus
  siRNA target sequence for Cacng3 (NM_019430.1,51-69).
cttcgcagcttttagttta

SEQ ID NO: 645241 - DNA, 19 bp, Mus musculus
  siRNA target sequence for Cacng3 (NM_019430.1,112-130).
ggtgtgtgcaggactaaat

SEQ ID NO: 645242 - DNA, 19 bp, Mus musculus
  siRNA target sequence for Cacng3 (NM_019430.1,115-133).
gtgtgcaggactaaatcta

SEQ ID NO: 645243 - DNA, 19 bp, Mus musculus
  siRNA target sequence for Cacng3 (NM_019430.1,117-135).
gtgcaggactaaatctaca

SEQ ID NO: 645244 - DNA, 19 bp, Mus musculus
  siRNA target sequence for Cacng3 (NM_019430.1,120-138).
caggactaaatctacaagt

SEQ ID NO: 645245 - DNA, 19 bp, Mus musculus
  siRNA target sequence for Cacng3 (NM_019430.1,219-237).
ccgaggcgtgtgcaagaaa

SEQ ID NO: 645246 - DNA, 19 bp, Mus musculus
  siRNA target sequence for Cacng3 (NM_019430.1,220-238).
cgaggcgtgtgcaagaaaa

SEQ ID NO: 645247 - DNA, 19 bp, Mus musculus
  siRNA target sequence for Cacng3 (NM_019430.1,221-239).
gaggcgtgtgcaagaaaat

SEQ ID NO: 645248 - DNA, 19 bp, Mus musculus
  siRNA target sequence for Cacng3 (NM_019430.1,224-242).
gcgtgtgcaagaaaatcga

SEQ ID NO: 645249 - DNA, 19 bp, Mus musculus
  siRNA target sequence for Cacng3 (NM_019430.1,225-243).
cgtgtgcaagaaaatcgat

SEQ ID NO: 645250 - DNA, 19 bp, Mus musculus
  siRNA target sequence for Cacng3 (NM_019430.1,332-350).
gcgtcactctgctgttttt

SEQ ID NO: 645251 - DNA, 19 bp, Mus musculus
  siRNA target sequence for Cacng3 (NM_019430.1,433-451).
gcagggctaagcaacatca

SEQ ID NO: 645252 - DNA, 19 bp, Mus musculus
  siRNA target sequence for Cacng3 (NM_019430.1,434-452).
cagggctaagcaacatcat

SEQ ID NO: 645253 - DNA, 19 bp, Mus musculus
  siRNA target sequence for Cacng3 (NM_019430.1,447-465).
catcatcggcatcatagtt

SEQ ID NO: 645254 - DNA, 19 bp, Mus musculus
  siRNA target sequence for Cacng3 (NM_019430.1,450-468).
catcggcatcatagtttat

SEQ ID NO: 645255 - DNA, 19 bp, Mus musculus
  siRNA target sequence for Cacng3 (NM_019430.1,454-472).
ggcatcatagtttatatct

SEQ ID NO: 645256 - DNA, 19 bp, Mus musculus
  siRNA target sequence for Cacng3 (NM_019430.1,496-514).
cagagggactctaaaaaga

SEQ ID NO: 645257 - DNA, 19 bp, Mus musculus
  siRNA target sequence for Cacng3 (NM_019430.1,544-562).
ggagccttctctttcatca

SEQ ID NO: 645258 - DNA, 19 bp, Mus musculus
  siRNA target sequence for Cacng3 (NM_019430.1,582-600).
ggtcgccgtgcacatctat

SEQ ID NO: 645259 - DNA, 19 bp, Mus musculus
  siRNA target sequence for Cacng3 (NM_019430.1,583-601).
gtcgccgtgcacatctata

SEQ ID NO: 645260 - DNA, 19 bp, Mus musculus
  siRNA target sequence for Cacng3 (NM_019430.1,623-641).
gtgccagatcccattcaga

SEQ ID NO: 645261 - DNA, 19 bp, Mus musculus
  siRNA target sequence for Cacng3 (NM_019430.1,693-711).
ccgaagacggtcaagttct

SEQ ID NO: 645262 - DNA, 19 bp, Mus musculus
  siRNA target sequence for Cacng3 (NM_019430.1,804-822).
ccgggacccctctaagctt

SEQ ID NO: 645263 - DNA, 19 bp, Mus musculus
  siRNA target sequence for Cacng3 (NM_019430.1,805-823).
cgggacccctctaagctta

SEQ ID NO: 645264 - DNA, 19 bp, Mus musculus
  siRNA target sequence for Cacng5 (NM_080644.2,305-323).
ggagcgaggacgctgtttt

SEQ ID NO: 645265 - DNA, 19 bp, Mus musculus
  siRNA target sequence for Cacng5 (NM_080644.2,306-324).
gagcgaggacgctgtttta

SEQ ID NO: 645266 - DNA, 19 bp, Mus musculus
  siRNA target sequence for Cacng5 (NM_080644.2,315-333).
cgctgttttaccatagagt

SEQ ID NO: 645267 - DNA, 19 bp, Mus musculus
  siRNA target sequence for Cacng5 (NM_080644.2,319-337).
gttttaccatagagtatgt

SEQ ID NO: 645268 - DNA, 19 bp, Mus musculus
  siRNA target sequence for Cacng5 (NM_080644.2,362-380).
gtcagaatccactgtcaat

SEQ ID NO: 645269 - DNA, 19 bp, Mus musculus
  siRNA target sequence for Cacng5 (NM_080644.2,501-519).
gtctccggcatcttcttta

SEQ ID NO: 645270 - DNA, 19 bp, Mus musculus
  siRNA target sequence for Cacng5 (NM_080644.2,576-594).
gacgagatgctcaacagaa

SEQ ID NO: 645271 - DNA, 19 bp, Mus musculus
  siRNA target sequence for Cacng5 (NM_080644.2,600-618).
gatgcagagacctatttca

SEQ ID NO: 645272 - DNA, 19 bp, Mus musculus
  siRNA target sequence for Cacng5 (NM_080644.2,623-641).
caagtatggatggtcattt

SEQ ID NO: 645273 - DNA, 19 bp, Mus musculus
  siRNA target sequence for Cacng5 (NM_080644.2,785-803).
ctctggccagtttctacat

SEQ ID NO: 645274 - DNA, 19 bp, Mus musculus
  siRNA target sequence for Cacng5 (NM_080644.2,847-865).
gcgacgcctcgctacagat

SEQ ID NO: 645275 - DNA, 19 bp, Mus musculus
  siRNA target sequence for Cacng5 (NM_080644.2,852-870).
gcctcgctacagatgaaca

SEQ ID NO: 645276 - DNA, 19 bp, Mus musculus
  siRNA target sequence for Cacng5 (NM_080644.2,900-918).
gactatgaccagatgtcat

SEQ ID NO: 645277 - DNA, 19 bp, Mus musculus
  siRNA target sequence for Cacng6 (NM_133183.1,183-201).
ctgggtggaactcaataca

SEQ ID NO: 645278 - DNA, 19 bp, Mus musculus
  siRNA target sequence for Cacng6 (NM_133183.1,185-203).
gggtggaactcaatacata

SEQ ID NO: 645279 - DNA, 19 bp, Mus musculus
  siRNA target sequence for Cacng6 (NM_133183.1,190-208).
gaactcaatacatacaaga

SEQ ID NO: 645280 - DNA, 19 bp, Mus musculus
  siRNA target sequence for Cacng6 (NM_133183.1,335-353).
caaactgcacctacttcaa

SEQ ID NO: 645281 - DNA, 19 bp, Mus musculus
  siRNA target sequence for Cacng6 (NM_133183.1,341-359).
gcacctacttcaaattctt

SEQ ID NO: 645282 - DNA, 19 bp, Mus musculus
  siRNA target sequence for Cacng6 (NM_133183.1,357-375).
cttcaccacgggggaaaat

SEQ ID NO: 645283 - DNA, 19 bp, Mus musculus
  siRNA target sequence for Cacng6 (NM_133183.1,387-405).
ccagcgaaccaccaagaaa

SEQ ID NO: 645284 - DNA, 19 bp, Mus musculus
  siRNA target sequence for Cacng6 (NM_133183.1,480-498).
catggtgctcagtaaaggt

SEQ ID NO: 645285 - DNA, 19 bp, Mus musculus
  siRNA target sequence for Cacng6 (NM_133183.1,632-650).
cacgcctggcctatgagta

SEQ ID NO: 645286 - DNA, 19 bp, Mus musculus
  siRNA target sequence for Cacng6 (NM_133183.1,634-652).
cgcctggcctatgagtatt

SEQ ID NO: 645287 - DNA, 19 bp, Mus musculus
  siRNA target sequence for Cacng8 (NM_133190.1,232-250).
gactactggctctacacaa

SEQ ID NO: 645288 - DNA, 19 bp, Mus musculus
  siRNA target sequence for Cacng8 (NM_133190.1,400-418).
ggtgtctgcgtgaagatca

SEQ ID NO: 645289 - DNA, 19 bp, Mus musculus
  siRNA target sequence for Cacng8 (NM_133190.1,480-498).
ccgggcttccagcatcttt

SEQ ID NO: 645290 - DNA, 19 bp, Mus musculus
  siRNA target sequence for Cacng8 (NM_133190.1,545-563).
ctgcctcccgcgtctacaa

SEQ ID NO: 645291 - DNA, 19 bp, Mus musculus
  siRNA target sequence for Cacng8 (NM_133190.1,547-565).
gcctcccgcgtctacaagt

SEQ ID NO: 645292 - DNA, 19 bp, Mus musculus
  siRNA target sequence for Cacng8 (NM_133190.1,610-628).
gcaggcttgagcaacatca

SEQ ID NO: 645293 - DNA, 19 bp, Mus musculus
  siRNA target sequence for Cacng8 (NM_133190.1,611-629).
caggcttgagcaacatcat

SEQ ID NO: 645294 - DNA, 19 bp, Mus musculus
  siRNA target sequence for Cacng8 (NM_133190.1,631-649).
ggggtgattgtgtacatat

SEQ ID NO: 645295 - DNA, 19 bp, Mus musculus
  siRNA target sequence for Cacng8 (NM_133190.1,764-782).
gagtactggccgtcaacat

SEQ ID NO: 645296 - DNA, 19 bp, Mus musculus
  siRNA target sequence for Cacng8 (NM_133190.1,766-784).
gtactggccgtcaacatct

SEQ ID NO: 645297 - DNA, 19 bp, Mus musculus
  siRNA target sequence for Pr1 (NM_019432.2,95-113).
ggccccaccggtctttctt

SEQ ID NO: 645298 - DNA, 19 bp, Mus musculus
  siRNA target sequence for Pr1 (NM_019432.2,98-116).
cccaccggtctttctttga

SEQ ID NO: 645299 - DNA, 19 bp, Mus musculus
  siRNA target sequence for Pr1 (NM_019432.2,100-118).
caccggtctttctttgagt

SEQ ID NO: 645300 - DNA, 19 bp, Mus musculus
  siRNA target sequence for Pr1 (NM_019432.2,387-405).
gtcccaggtgtgtgaagat

SEQ ID NO: 645301 - DNA, 19 bp, Mus musculus
  siRNA target sequence for Pr1 (NM_019432.2,489-507).
catcatcctgctcaagaat

SEQ ID NO: 645302 - DNA, 19 bp, Mus musculus
  siRNA target sequence for Pr1 (NM_019432.2,537-555).
gttctggtgtgaattcact

SEQ ID NO: 645303 - DNA, 19 bp, Mus musculus
  siRNA target sequence for Pr1 (NM_019432.2,581-599).
ccgccagcggccttcacat

SEQ ID NO: 645304 - DNA, 19 bp, Mus musculus
  siRNA target sequence for Trpc1 (NM_011643.1,596-614).
cgtcgcccaacgaagtgat

SEQ ID NO: 645305 - DNA, 19 bp, Mus musculus
  siRNA target sequence for Trpc1 (NM_011643.1,681-699).
gtgcgacaagggtgactat

SEQ ID NO: 645306 - DNA, 19 bp, Mus musculus
  siRNA target sequence for Trpc1 (NM_011643.1,683-701).
gcgacaagggtgactatta

SEQ ID NO: 645307 - DNA, 19 bp, Mus musculus
  siRNA target sequence for Trpc1 (NM_011643.1,684-702).
cgacaagggtgactattat

SEQ ID NO: 645308 - DNA, 19 bp, Mus musculus
  siRNA target sequence for Trpc1 (NM_011643.1,685-703).
gacaagggtgactattata

SEQ ID NO: 645309 - DNA, 19 bp, Mus musculus
  siRNA target sequence for Trpc1 (NM_011643.1,691-709).
ggtgactattatatggtta

SEQ ID NO: 645310 - DNA, 19 bp, Mus musculus
  siRNA target sequence for Trpc1 (NM_011643.1,694-712).
gactattatatggttaaaa

SEQ ID NO: 645311 - DNA, 19 bp, Mus musculus
  siRNA target sequence for Trpc1 (NM_011643.1,731-749).
gttcaggtgacttgaacat

SEQ ID NO: 645312 - DNA, 19 bp, Mus musculus
  siRNA target sequence for Trpc1 (NM_011643.1,785-803).
ccataactattgaaaacga

SEQ ID NO: 645313 - DNA, 19 bp, Mus musculus
  siRNA target sequence for Trpc1 (NM_011643.1,867-885).
ggcaatcgactctgaagta

SEQ ID NO: 645314 - DNA, 19 bp, Mus musculus
  siRNA target sequence for Trpc1 (NM_011643.1,869-887).
caatcgactctgaagtagt

SEQ ID NO: 645315 - DNA, 19 bp, Mus musculus
  siRNA target sequence for Trpc1 (NM_011643.1,883-901).
gtagtgggagctgttgata

SEQ ID NO: 645316 - DNA, 19 bp, Mus musculus
  siRNA target sequence for Trpc1 (NM_011643.1,888-906).
gggagctgttgatatacta

SEQ ID NO: 645317 - DNA, 19 bp, Mus musculus
  siRNA target sequence for Trpc1 (NM_011643.1,893-911).
ctgttgatatactacttaa

SEQ ID NO: 645318 - DNA, 19 bp, Mus musculus
  siRNA target sequence for Trpc1 (NM_011643.1,916-934).
cggccaaaacgatcatcaa

SEQ ID NO: 645319 - DNA, 19 bp, Mus musculus
  siRNA target sequence for Trpc1 (NM_011643.1,932-950).
caagaccaaccattgtaaa

SEQ ID NO: 645320 - DNA, 19 bp, Mus musculus
  siRNA target sequence for Trpc1 (NM_011643.1,935-953).
gaccaaccattgtaaaact

SEQ ID NO: 645321 - DNA, 19 bp, Mus musculus
  siRNA target sequence for Trpc1 (NM_011643.1,937-955).
ccaaccattgtaaaactta

SEQ ID NO: 645322 - DNA, 19 bp, Mus musculus
  siRNA target sequence for Trpc1 (NM_011643.1,938-956).
caaccattgtaaaacttat

SEQ ID NO: 645323 - DNA, 19 bp, Mus musculus
  siRNA target sequence for Trpc1 (NM_011643.1,952-970).
cttatggaacgaattcaga

SEQ ID NO: 645324 - DNA, 19 bp, Mus musculus
  siRNA target sequence for Trpc1 (NM_011643.1,967-985).
cagaatccagaatattcaa

SEQ ID NO: 645325 - DNA, 19 bp, Mus musculus
  siRNA target sequence for Trpc1 (NM_011643.1,969-987).
gaatccagaatattcaaca

SEQ ID NO: 645326 - DNA, 19 bp, Mus musculus
  siRNA target sequence for Trpc1 (NM_011643.1,993-1011).
ggatgtcgcacctgttatt

SEQ ID NO: 645327 - DNA, 19 bp, Mus musculus
  siRNA target sequence for Trpc1 (NM_011643.1,1015-1033).
gctgctcatcgtaacaact

SEQ ID NO: 645328 - DNA, 19 bp, Mus musculus
  siRNA target sequence for Trpc1 (NM_011643.1,1016-1034).
ctgctcatcgtaacaacta

SEQ ID NO: 645329 - DNA, 19 bp, Mus musculus
  siRNA target sequence for Trpc1 (NM_011643.1,1021-1039).
catcgtaacaactatgaaa

SEQ ID NO: 645330 - DNA, 19 bp, Mus musculus
  siRNA target sequence for Trpc1 (NM_011643.1,1084-1102).
catgctgttggctgtgaat

SEQ ID NO: 645331 - DNA, 19 bp, Mus musculus
  siRNA target sequence for Trpc1 (NM_011643.1,1148-1166).
ccaggtttcgtcttgatat

SEQ ID NO: 645332 - DNA, 19 bp, Mus musculus
  siRNA target sequence for Trpc1 (NM_011643.1,1152-1170).
gtttcgtcttgatatctat

SEQ ID NO: 645333 - DNA, 19 bp, Mus musculus
  siRNA target sequence for Trpc1 (NM_011643.1,1156-1174).
cgtcttgatatctatagat

SEQ ID NO: 645334 - DNA, 19 bp, Mus musculus
  siRNA target sequence for Trpc1 (NM_011643.1,1184-1202).
gtccagctctgataatgtt

SEQ ID NO: 645335 - DNA, 19 bp, Mus musculus
  siRNA target sequence for Trpc1 (NM_011643.1,1186-1204).
ccagctctgataatgttaa

SEQ ID NO: 645336 - DNA, 19 bp, Mus musculus
  siRNA target sequence for Trpc1 (NM_011643.1,1222-1240).
ctgagagcgtttgaactta

SEQ ID NO: 645337 - DNA, 19 bp, Mus musculus
  siRNA target sequence for Trpc1 (NM_011643.1,1234-1252).
gaacttagtgctgacttaa

SEQ ID NO: 645338 - DNA, 19 bp, Mus musculus
  siRNA target sequence for Trpc1 (NM_011643.1,1300-1318).
ctagcccgtcagtgcaaaa

SEQ ID NO: 645339 - DNA, 19 bp, Mus musculus
  siRNA target sequence for Trpc1 (NM_011643.1,1303-1321).
gcccgtcagtgcaaaatgt

SEQ ID NO: 645340 - DNA, 19 bp, Mus musculus
  siRNA target sequence for Trpc1 (NM_011643.1,1304-1322).
cccgtcagtgcaaaatgtt

SEQ ID NO: 645341 - DNA, 19 bp, Mus musculus
  siRNA target sequence for Trpc1 (NM_011643.1,1305-1323).
ccgtcagtgcaaaatgttt

SEQ ID NO: 645342 - DNA, 19 bp, Mus musculus
  siRNA target sequence for Trpc1 (NM_011643.1,1338-1356).
cgcacaagcccggaattct

SEQ ID NO: 645343 - DNA, 19 bp, Mus musculus
  siRNA target sequence for Trpc1 (NM_011643.1,1369-1387).
gttatcctgaaccatacat

SEQ ID NO: 645344 - DNA, 19 bp, Mus musculus
  siRNA target sequence for Trpc1 (NM_011643.1,1391-1409).
gcgatgagcctcttgacaa

SEQ ID NO: 645345 - DNA, 19 bp, Mus musculus
  siRNA target sequence for Trpc1 (NM_011643.1,1392-1410).
cgatgagcctcttgacaaa

SEQ ID NO: 645346 - DNA, 19 bp, Mus musculus
  siRNA target sequence for Trpc1 (NM_011643.1,1434-1452).
gaacttaagtcgtctgaaa

SEQ ID NO: 645347 - DNA, 19 bp, Mus musculus
  siRNA target sequence for Trpc1 (NM_011643.1,1437-1455).
cttaagtcgtctgaaactt

SEQ ID NO: 645348 - DNA, 19 bp, Mus musculus
  siRNA target sequence for Trpc1 (NM_011643.1,1447-1465).
ctgaaacttgctatcaaat

SEQ ID NO: 645349 - DNA, 19 bp, Mus musculus
  siRNA target sequence for Trpc1 (NM_011643.1,1509-1527).
cctgaacacggtttggttt

SEQ ID NO: 645350 - DNA, 19 bp, Mus musculus
  siRNA target sequence for Trpc1 (NM_011643.1,1549-1567).
cgtaagcccacctgtaaga

SEQ ID NO: 645351 - DNA, 19 bp, Mus musculus
  siRNA target sequence for Trpc1 (NM_011643.1,1550-1568).
gtaagcccacctgtaagaa

SEQ ID NO: 645352 - DNA, 19 bp, Mus musculus
  siRNA target sequence for Trpc1 (NM_011643.1,1554-1572).
gcccacctgtaagaagata

SEQ ID NO: 645353 - DNA, 19 bp, Mus musculus
  siRNA target sequence for Trpc1 (NM_011643.1,1569-1587).
gataatgactgttttgaca

SEQ ID NO: 645354 - DNA, 19 bp, Mus musculus
  siRNA target sequence for Trpc1 (NM_011643.1,1604-1622).
cagttttgtcactatgcta

SEQ ID NO: 645355 - DNA, 19 bp, Mus musculus
  siRNA target sequence for Trpc1 (NM_011643.1,1606-1624).
gttttgtcactatgctatt

SEQ ID NO: 645356 - DNA, 19 bp, Mus musculus
  siRNA target sequence for Trpc1 (NM_011643.1,1664-1682).
cacctttcatgaaattcat

SEQ ID NO: 645357 - DNA, 19 bp, Mus musculus
  siRNA target sequence for Trpc1 (NM_011643.1,1666-1684).
cctttcatgaaattcatta

SEQ ID NO: 645358 - DNA, 19 bp, Mus musculus
  siRNA target sequence for Trpc1 (NM_011643.1,1687-1705).
catggagcatcgtatttca

SEQ ID NO: 645359 - DNA, 19 bp, Mus musculus
  siRNA target sequence for Trpc1 (NM_011643.1,1690-1708).
ggagcatcgtatttcacat

SEQ ID NO: 645360 - DNA, 19 bp, Mus musculus
  siRNA target sequence for Trpc1 (NM_011643.1,1691-1709).
gagcatcgtatttcacatt

SEQ ID NO: 645361 - DNA, 19 bp, Mus musculus
  siRNA target sequence for Trpc1 (NM_011643.1,1693-1711).
gcatcgtatttcacattct

SEQ ID NO: 645362 - DNA, 19 bp, Mus musculus
  siRNA target sequence for Trpc1 (NM_011643.1,1694-1712).
catcgtatttcacattctt

SEQ ID NO: 645363 - DNA, 19 bp, Mus musculus
  siRNA target sequence for Trpc1 (NM_011643.1,1775-1793).
ccctggagagaatagatta

SEQ ID NO: 645364 - DNA, 19 bp, Mus musculus
  siRNA target sequence for Trpc1 (NM_011643.1,1806-1824).
gtggattattgggatgatt

SEQ ID NO: 645365 - DNA, 19 bp, Mus musculus
  siRNA target sequence for Trpc1 (NM_011643.1,1891-1909).
ctcagctttgttatgaatt

SEQ ID NO: 645366 - DNA, 19 bp, Mus musculus
  siRNA target sequence for Trpc1 (NM_011643.1,1922-1940).
caacctttgccctcaaagt

SEQ ID NO: 645367 - DNA, 19 bp, Mus musculus
  siRNA target sequence for Trpc1 (NM_011643.1,1976-1994).
ggaaggactgggatgcatt

SEQ ID NO: 645368 - DNA, 19 bp, Mus musculus
  siRNA target sequence for Trpc1 (NM_011643.1,2043-2061).
gagttaccttcgactcttt

SEQ ID NO: 645369 - DNA, 19 bp, Mus musculus
  siRNA target sequence for Trpc1 (NM_011643.1,2132-2150).
ggaaatttctgggaatgtt

SEQ ID NO: 645370 - DNA, 19 bp, Mus musculus
  siRNA target sequence for Trpc1 (NM_011643.1,2180-2198).
gactgactcagctctatga

SEQ ID NO: 645371 - DNA, 19 bp, Mus musculus
  siRNA target sequence for Trpc1 (NM_011643.1,2182-2200).
ctgactcagctctatgaca

SEQ ID NO: 645372 - DNA, 19 bp, Mus musculus
  siRNA target sequence for Trpc1 (NM_011643.1,2387-2405).
ctgtgattgttggaactta

SEQ ID NO: 645373 - DNA, 19 bp, Mus musculus
  siRNA target sequence for Trpc1 (NM_011643.1,2389-2407).
gtgattgttggaacttaca

SEQ ID NO: 645374 - DNA, 19 bp, Mus musculus
  siRNA target sequence for Trpc1 (NM_011643.1,2406-2424).
caatgttgtggttgtgatt

SEQ ID NO: 645375 - DNA, 19 bp, Mus musculus
  siRNA target sequence for Trpc1 (NM_011643.1,2487-2505).
ggataaagaatggaagttt

SEQ ID NO: 645376 - DNA, 19 bp, Mus musculus
  siRNA target sequence for Trpc1 (NM_011643.1,2513-2531).
caaagctatggcttagcta

SEQ ID NO: 645377 - DNA, 19 bp, Mus musculus
  siRNA target sequence for Trpc1 (NM_011643.1,2522-2540).
ggcttagctactttgatga

SEQ ID NO: 645378 - DNA, 19 bp, Mus musculus
  siRNA target sequence for Trpc1 (NM_011643.1,2549-2567).
cactgcccccacctttcaa

SEQ ID NO: 645379 - DNA, 19 bp, Mus musculus
  siRNA target sequence for Trpc1 (NM_011643.1,2601-2619).
gatcagtagcctcagtaaa

SEQ ID NO: 645380 - DNA, 19 bp, Mus musculus
  siRNA target sequence for Trpc1 (NM_011643.1,2606-2624).
gtagcctcagtaaatggat

SEQ ID NO: 645381 - DNA, 19 bp, Mus musculus
  siRNA target sequence for Trpc1 (NM_011643.1,2645-2663).
gcaaggtcaaacgtcaaaa

SEQ ID NO: 645382 - DNA, 19 bp, Mus musculus
  siRNA target sequence for Trpc1 (NM_011643.1,2649-2667).
ggtcaaacgtcaaaacagt

SEQ ID NO: 645383 - DNA, 19 bp, Mus musculus
  siRNA target sequence for Trpc1 (NM_011643.1,2652-2670).
caaacgtcaaaacagttta

SEQ ID NO: 645384 - DNA, 19 bp, Mus musculus
  siRNA target sequence for Trpc1 (NM_011643.1,2811-2829).
gcgccaagatctgtcaaaa

SEQ ID NO: 645385 - DNA, 19 bp, Mus musculus
  siRNA target sequence for Trpc1 (NM_011643.1,2812-2830).
cgccaagatctgtcaaaat

SEQ ID NO: 645386 - DNA, 19 bp, Mus musculus
  siRNA target sequence for Trpc1 (NM_011643.1,2863-2881).
cggacttctaaatatgcta

SEQ ID NO: 645387 - DNA, 19 bp, Mus musculus
  siRNA target sequence for Trpc1 (NM_011643.1,2864-2882).
ggacttctaaatatgctat

SEQ ID NO: 645388 - DNA, 19 bp, Mus musculus
  siRNA target sequence for Trpc3 (NM_019510.1,149-167).
ctcgcacgctcaatgtcaa

SEQ ID NO: 645389 - DNA, 19 bp, Mus musculus
  siRNA target sequence for Trpc3 (NM_019510.1,371-389).
gcccttgcgagcaagaact

SEQ ID NO: 645390 - DNA, 19 bp, Mus musculus
  siRNA target sequence for Trpc3 (NM_019510.1,463-481).
gctgcacactgccataagt

SEQ ID NO: 645391 - DNA, 19 bp, Mus musculus
  siRNA target sequence for Trpc3 (NM_019510.1,464-482).
ctgcacactgccataagta

SEQ ID NO: 645392 - DNA, 19 bp, Mus musculus
  siRNA target sequence for Trpc3 (NM_019510.1,594-612).
ctcaaggtctaggatcaat

SEQ ID NO: 645393 - DNA, 19 bp, Mus musculus
  siRNA target sequence for Trpc3 (NM_019510.1,845-863).
ccgagcccctggaaagaca

SEQ ID NO: 645394 - DNA, 19 bp, Mus musculus
  siRNA target sequence for Trpc3 (NM_019510.1,876-894).
gtcactgagtcgtgtcaaa

SEQ ID NO: 645395 - DNA, 19 bp, Mus musculus
  siRNA target sequence for Trpc3 (NM_019510.1,887-905).
gtgtcaaacttgccattaa

SEQ ID NO: 645396 - DNA, 19 bp, Mus musculus
  siRNA target sequence for Trpc3 (NM_019510.1,942-960).
ccaacagcagcttttgaca

SEQ ID NO: 645397 - DNA, 19 bp, Mus musculus
  siRNA target sequence for Trpc3 (NM_019510.1,1099-1117).
cttcgaagccccttcatga

SEQ ID NO: 645398 - DNA, 19 bp, Mus musculus
  siRNA target sequence for Trpc3 (NM_019510.1,1170-1188).
caacgcctcggacagattt

SEQ ID NO: 645399 - DNA, 19 bp, Mus musculus
  siRNA target sequence for Trpc3 (NM_019510.1,1208-1226).
caaacatcactgttatcga

SEQ ID NO: 645400 - DNA, 19 bp, Mus musculus
  siRNA target sequence for Trpc3 (NM_019510.1,1268-1286).
cgtggacggaaatgttaat

SEQ ID NO: 645401 - DNA, 19 bp, Mus musculus
  siRNA target sequence for Trpc3 (NM_019510.1,1269-1287).
gtggacggaaatgttaatt

SEQ ID NO: 645402 - DNA, 19 bp, Mus musculus
  siRNA target sequence for Trpc3 (NM_019510.1,1274-1292).
cggaaatgttaattatggt

SEQ ID NO: 645403 - DNA, 19 bp, Mus musculus
  siRNA target sequence for Trpc3 (NM_019510.1,1448-1466).
cgaaggcgcagcagtatgt

SEQ ID NO: 645404 - DNA, 19 bp, Mus musculus
  siRNA target sequence for Trpc3 (NM_019510.1,1507-1525).
ctcccacctgaggttcaat

SEQ ID NO: 645405 - DNA, 19 bp, Mus musculus
  siRNA target sequence for Trpc3 (NM_019510.1,1509-1527).
cccacctgaggttcaatat

SEQ ID NO: 645406 - DNA, 19 bp, Mus musculus
  siRNA target sequence for Trpc3 (NM_019510.1,1510-1528).
ccacctgaggttcaatatt

SEQ ID NO: 645407 - DNA, 19 bp, Mus musculus
  siRNA target sequence for Trpc3 (NM_019510.1,1511-1529).
cacctgaggttcaatattt

SEQ ID NO: 645408 - DNA, 19 bp, Mus musculus
  siRNA target sequence for Trpc3 (NM_019510.1,1770-1788).
ccttggggccaaagtaaat

SEQ ID NO: 645409 - DNA, 19 bp, Mus musculus
  siRNA target sequence for Trpc3 (NM_019510.1,1783-1801).
gtaaatcctgcttttacca

SEQ ID NO: 645410 - DNA, 19 bp, Mus musculus
  siRNA target sequence for Trpc3 (NM_019510.1,1802-1820).
cggttgaagaaagtttcaa

SEQ ID NO: 645411 - DNA, 19 bp, Mus musculus
  siRNA target sequence for Trpc3 (NM_019510.1,1862-1880).
ctgttgtcctcaaatatga

SEQ ID NO: 645412 - DNA, 19 bp, Mus musculus
  siRNA target sequence for Trpc3 (NM_019510.1,1934-1952).
ctatggtggtcgttttact

SEQ ID NO: 645413 - DNA, 19 bp, Mus musculus
  siRNA target sequence for Trpc3 (NM_019510.1,1971-1989).
gattaatagctcataccaa

SEQ ID NO: 645414 - DNA, 19 bp, Mus musculus
  siRNA target sequence for Trpc3 (NM_019510.1,2048-2066).
cctacttcgatgatggaaa

SEQ ID NO: 645415 - DNA, 19 bp, Mus musculus
  siRNA target sequence for Trpc3 (NM_019510.1,2089-2107).
ctggtccctagtccaaaat

SEQ ID NO: 645416 - DNA, 19 bp, Mus musculus
  siRNA target sequence for Trpc3 (NM_019510.1,2091-2109).
ggtccctagtccaaaatca

SEQ ID NO: 645417 - DNA, 19 bp, Mus musculus
  siRNA target sequence for Trpc3 (NM_019510.1,2092-2110).
gtccctagtccaaaatcat

SEQ ID NO: 645418 - DNA, 19 bp, Mus musculus
  siRNA target sequence for Trpc3 (NM_019510.1,2094-2112).
ccctagtccaaaatcattt

SEQ ID NO: 645419 - DNA, 19 bp, Mus musculus
  siRNA target sequence for Trpc3 (NM_019510.1,2182-2200).
ctgggcatgggtaactcaa

SEQ ID NO: 645420 - DNA, 19 bp, Mus musculus
  siRNA target sequence for Trpc3 (NM_019510.1,2185-2203).
ggcatgggtaactcaaagt

SEQ ID NO: 645421 - DNA, 19 bp, Mus musculus
  siRNA target sequence for Trpc3 (NM_019510.1,2215-2233).
ctcttcacacagtctaact

SEQ ID NO: 645422 - DNA, 19 bp, Mus musculus
  siRNA target sequence for Trpc3 (NM_019510.1,2224-2242).
cagtctaactcgagagttt

SEQ ID NO: 645423 - DNA, 19 bp, Mus musculus
  siRNA target sequence for Trpc3 (NM_019510.1,2232-2250).
ctcgagagtttttgaatca

SEQ ID NO: 645424 - DNA, 19 bp, Mus musculus
  siRNA target sequence for Trpc3 (NM_019510.1,2234-2252).
cgagagtttttgaatcaca

SEQ ID NO: 645425 - DNA, 19 bp, Mus musculus
  siRNA target sequence for Trpc3 (NM_019510.1,2255-2273).
gttttaacagcattctcaa

SEQ ID NO: 645426 - DNA, 19 bp, Mus musculus
  siRNA target sequence for Trpc3 (NM_019510.1,2271-2289).
caatcagccaacacgatat

SEQ ID NO: 645427 - DNA, 19 bp, Mus musculus
  siRNA target sequence for Trpc3 (NM_019510.1,2284-2302).
cgatatcagcagataatga

SEQ ID NO: 645428 - DNA, 19 bp, Mus musculus
  siRNA target sequence for Trpc3 (NM_019510.1,2308-2326).
ctcataaaacggtatgttt

SEQ ID NO: 645429 - DNA, 19 bp, Mus musculus
  siRNA target sequence for Trpc3 (NM_019510.1,2368-2386).
ggtgaactgaaagaaatca

SEQ ID NO: 645430 - DNA, 19 bp, Mus musculus
  siRNA target sequence for Trpc3 (NM_019510.1,2380-2398).
gaaatcaagcaggatatct

SEQ ID NO: 645431 - DNA, 19 bp, Mus musculus
  siRNA target sequence for Trpc3 (NM_019510.1,2400-2418).
cagccttcgttatgaactt

SEQ ID NO: 645432 - DNA, 19 bp, Mus musculus
  siRNA target sequence for Trpc3 (NM_019510.1,2402-2420).
gccttcgttatgaactttt

SEQ ID NO: 645433 - DNA, 19 bp, Mus musculus
  siRNA target sequence for Trpc3 (NM_019510.1,2432-2450).
gccaagcgacggaggaatt

SEQ ID NO: 645434 - DNA, 19 bp, Mus musculus
  siRNA target sequence for Trpc3 (NM_019510.1,2433-2451).
ccaagcgacggaggaatta

SEQ ID NO: 645435 - DNA, 19 bp, Mus musculus
  siRNA target sequence for Trpc3 (NM_019510.1,2443-2461).
gaggaattagccatcttga

SEQ ID NO: 645436 - DNA, 19 bp, Mus musculus
  siRNA target sequence for Trpc3 (NM_019510.1,2453-2471).
ccatcttgattcataaact

SEQ ID NO: 645437 - DNA, 19 bp, Mus musculus
  siRNA target sequence for Trpc4 (NM_016984.1,189-207).
ggctcagttctattacaaa

SEQ ID NO: 645438 - DNA, 19 bp, Mus musculus
  siRNA target sequence for Trpc4 (NM_016984.1,190-208).
gctcagttctattacaaaa

SEQ ID NO: 645439 - DNA, 19 bp, Mus musculus
  siRNA target sequence for Trpc4 (NM_016984.1,249-267).
gattgtcagagcagaatct

SEQ ID NO: 645440 - DNA, 19 bp, Mus musculus
  siRNA target sequence for Trpc4 (NM_016984.1,270-288).
gctctcaccatcagagaaa

SEQ ID NO: 645441 - DNA, 19 bp, Mus musculus
  siRNA target sequence for Trpc4 (NM_016984.1,433-451).
ctggagcttattgaactat

SEQ ID NO: 645442 - DNA, 19 bp, Mus musculus
  siRNA target sequence for Trpc4 (NM_016984.1,436-454).
gagcttattgaactattgt

SEQ ID NO: 645443 - DNA, 19 bp, Mus musculus
  siRNA target sequence for Trpc4 (NM_016984.1,453-471).
gttgagtttcaatgtctat

SEQ ID NO: 645444 - DNA, 19 bp, Mus musculus
  siRNA target sequence for Trpc4 (NM_016984.1,486-504).
gcttcacgccatcagaaaa

SEQ ID NO: 645445 - DNA, 19 bp, Mus musculus
  siRNA target sequence for Trpc4 (NM_016984.1,627-645).
cttggctgcacatacaaat

SEQ ID NO: 645446 - DNA, 19 bp, Mus musculus
  siRNA target sequence for Trpc4 (NM_016984.1,641-659).
caaataattacgagataat

SEQ ID NO: 645447 - DNA, 19 bp, Mus musculus
  siRNA target sequence for Trpc4 (NM_016984.1,654-672).
gataatcaaacttttggtt

SEQ ID NO: 645448 - DNA, 19 bp, Mus musculus
  siRNA target sequence for Trpc4 (NM_016984.1,700-718).
cacgaggtccgctgtaact

SEQ ID NO: 645449 - DNA, 19 bp, Mus musculus
  siRNA target sequence for Trpc4 (NM_016984.1,702-720).
cgaggtccgctgtaactgt

SEQ ID NO: 645450 - DNA, 19 bp, Mus musculus
  siRNA target sequence for Trpc4 (NM_016984.1,764-782).
cacggtccaggctcaacat

SEQ ID NO: 645451 - DNA, 19 bp, Mus musculus
  siRNA target sequence for Trpc4 (NM_016984.1,766-784).
cggtccaggctcaacatct

SEQ ID NO: 645452 - DNA, 19 bp, Mus musculus
  siRNA target sequence for Trpc4 (NM_016984.1,857-875).
gttgggagctgcaagaact

SEQ ID NO: 645453 - DNA, 19 bp, Mus musculus
  siRNA target sequence for Trpc4 (NM_016984.1,883-901).
gtggagaacgaattcaagt

SEQ ID NO: 645454 - DNA, 19 bp, Mus musculus
  siRNA target sequence for Trpc4 (NM_016984.1,1020-1038).
cgaagaacagagtggaaat

SEQ ID NO: 645455 - DNA, 19 bp, Mus musculus
  siRNA target sequence for Trpc4 (NM_016984.1,1039-1057).
gatcttgcaaggctaaaat

SEQ ID NO: 645456 - DNA, 19 bp, Mus musculus
  siRNA target sequence for Trpc4 (NM_016984.1,1051-1069).
ctaaaattagccattaagt

SEQ ID NO: 645457 - DNA, 19 bp, Mus musculus
  siRNA target sequence for Trpc4 (NM_016984.1,1061-1079).
ccattaagtaccgtcaaaa

SEQ ID NO: 645458 - DNA, 19 bp, Mus musculus
  siRNA target sequence for Trpc4 (NM_016984.1,1062-1080).
cattaagtaccgtcaaaaa

SEQ ID NO: 645459 - DNA, 19 bp, Mus musculus
  siRNA target sequence for Trpc4 (NM_016984.1,1068-1086).
gtaccgtcaaaaagagttt

SEQ ID NO: 645460 - DNA, 19 bp, Mus musculus
  siRNA target sequence for Trpc4 (NM_016984.1,1121-1139).
cccgctggtacgatgagtt

SEQ ID NO: 645461 - DNA, 19 bp, Mus musculus
  siRNA target sequence for Trpc4 (NM_016984.1,1157-1175).
gacactgggcggtgaagat

SEQ ID NO: 645462 - DNA, 19 bp, Mus musculus
  siRNA target sequence for Trpc4 (NM_016984.1,1244-1262).
gcccacttggactgttcat

SEQ ID NO: 645463 - DNA, 19 bp, Mus musculus
  siRNA target sequence for Trpc4 (NM_016984.1,1246-1264).
ccacttggactgttcatca

SEQ ID NO: 645464 - DNA, 19 bp, Mus musculus
  siRNA target sequence for Trpc4 (NM_016984.1,1265-1283).
gaaagccatttatcaagtt

SEQ ID NO: 645465 - DNA, 19 bp, Mus musculus
  siRNA target sequence for Trpc4 (NM_016984.1,1297-1315).
gcctcctatctgacctttt

SEQ ID NO: 645466 - DNA, 19 bp, Mus musculus
  siRNA target sequence for Trpc4 (NM_016984.1,1298-1316).
cctcctatctgaccttttt

SEQ ID NO: 645467 - DNA, 19 bp, Mus musculus
  siRNA target sequence for Trpc4 (NM_016984.1,1302-1320).
ctatctgacctttttgttt

SEQ ID NO: 645468 - DNA, 19 bp, Mus musculus
  siRNA target sequence for Trpc4 (NM_016984.1,1348-1366).
gacaggtcagacttgaaca

SEQ ID NO: 645469 - DNA, 19 bp, Mus musculus
  siRNA target sequence for Trpc4 (NM_016984.1,1386-1404).
catcgtggagtggatgata

SEQ ID NO: 645470 - DNA, 19 bp, Mus musculus
  siRNA target sequence for Trpc4 (NM_016984.1,1389-1407).
cgtggagtggatgatatta

SEQ ID NO: 645471 - DNA, 19 bp, Mus musculus
  siRNA target sequence for Trpc4 (NM_016984.1,1430-1448).
ggggagagattaaacagat

SEQ ID NO: 645472 - DNA, 19 bp, Mus musculus
  siRNA target sequence for Trpc4 (NM_016984.1,1456-1474).
ggcggactccaggattaca

SEQ ID NO: 645473 - DNA, 19 bp, Mus musculus
  siRNA target sequence for Trpc4 (NM_016984.1,1457-1475).
gcggactccaggattacat

SEQ ID NO: 645474 - DNA, 19 bp, Mus musculus
  siRNA target sequence for Trpc4 (NM_016984.1,1477-1495).
catgactggtggaatctaa

SEQ ID NO: 645475 - DNA, 19 bp, Mus musculus
  siRNA target sequence for Trpc4 (NM_016984.1,1514-1532).
ccttgtatctggcaacaat

SEQ ID NO: 645476 - DNA, 19 bp, Mus musculus
  siRNA target sequence for Trpc4 (NM_016984.1,1529-1547).
caatctccttgaagattgt

SEQ ID NO: 645477 - DNA, 19 bp, Mus musculus
  siRNA target sequence for Trpc4 (NM_016984.1,1539-1557).
gaagattgtcgcgtttgta

SEQ ID NO: 645478 - DNA, 19 bp, Mus musculus
  siRNA target sequence for Trpc4 (NM_016984.1,1546-1564).
gtcgcgtttgtaaagtaca

SEQ ID NO: 645479 - DNA, 19 bp, Mus musculus
  siRNA target sequence for Trpc4 (NM_016984.1,1609-1627).
ctggtggcagaggcattat

SEQ ID NO: 645480 - DNA, 19 bp, Mus musculus
  siRNA target sequence for Trpc4 (NM_016984.1,1616-1634).
cagaggcattatttgctat

SEQ ID NO: 645481 - DNA, 19 bp, Mus musculus
  siRNA target sequence for Trpc4 (NM_016984.1,1620-1638).
ggcattatttgctattgca

SEQ ID NO: 645482 - DNA, 19 bp, Mus musculus
  siRNA target sequence for Trpc4 (NM_016984.1,1735-1753).
ctgaagttcttgttcatct

SEQ ID NO: 645483 - DNA, 19 bp, Mus musculus
  siRNA target sequence for Trpc4 (NM_016984.1,1757-1775).
gcctcgtgctgctagcttt

SEQ ID NO: 645484 - DNA, 19 bp, Mus musculus
  siRNA target sequence for Trpc4 (NM_016984.1,1758-1776).
cctcgtgctgctagctttt

SEQ ID NO: 645485 - DNA, 19 bp, Mus musculus
  siRNA target sequence for Trpc4 (NM_016984.1,1785-1803).
cctaaatcagctgtacttt

SEQ ID NO: 645486 - DNA, 19 bp, Mus musculus
  siRNA target sequence for Trpc4 (NM_016984.1,1786-1804).
ctaaatcagctgtactttt

SEQ ID NO: 645487 - DNA, 19 bp, Mus musculus
  siRNA target sequence for Trpc4 (NM_016984.1,1838-1856).
gcatccggtgcgagaaaca

SEQ ID NO: 645488 - DNA, 19 bp, Mus musculus
  siRNA target sequence for Trpc4 (NM_016984.1,1865-1883).
cgttttccacgttattcga

SEQ ID NO: 645489 - DNA, 19 bp, Mus musculus
  siRNA target sequence for Trpc4 (NM_016984.1,1888-1906).
ctacagtccctgttttggt

SEQ ID NO: 645490 - DNA, 19 bp, Mus musculus
  siRNA target sequence for Trpc4 (NM_016984.1,1907-1925).
caatatttggactcatcaa

SEQ ID NO: 645491 - DNA, 19 bp, Mus musculus
  siRNA target sequence for Trpc4 (NM_016984.1,1916-1934).
gactcatcaatctctatgt

SEQ ID NO: 645492 - DNA, 19 bp, Mus musculus
  siRNA target sequence for Trpc4 (NM_016984.1,1980-1998).
caccatgtttggcacatat

SEQ ID NO: 645493 - DNA, 19 bp, Mus musculus
  siRNA target sequence for Trpc4 (NM_016984.1,1983-2001).
catgtttggcacatataat

SEQ ID NO: 645494 - DNA, 19 bp, Mus musculus
  siRNA target sequence for Trpc4 (NM_016984.1,2017-2035).
gtcctgctgaacatgttaa

SEQ ID NO: 645495 - DNA, 19 bp, Mus musculus
  siRNA target sequence for Trpc4 (NM_016984.1,2142-2160).
cctgcctacacctttcaat

SEQ ID NO: 645496 - DNA, 19 bp, Mus musculus
  siRNA target sequence for Trpc4 (NM_016984.1,2147-2165).
ctacacctttcaatgtcat

SEQ ID NO: 645497 - DNA, 19 bp, Mus musculus
  siRNA target sequence for Trpc4 (NM_016984.1,2199-2217).
gtggatatggacacactta

SEQ ID NO: 645498 - DNA, 19 bp, Mus musculus
  siRNA target sequence for Trpc4 (NM_016984.1,2376-2394).
cttgacggaggagaatgtt

SEQ ID NO: 645499 - DNA, 19 bp, Mus musculus
  siRNA target sequence for Trpc4 (NM_016984.1,2381-2399).
cggaggagaatgttaagga

SEQ ID NO: 645500 - DNA, 19 bp, Mus musculus
  siRNA target sequence for Trpc4 (NM_016984.1,2456-2474).
gcaagctctctacaataca

SEQ ID NO: 645501 - DNA, 19 bp, Mus musculus
  siRNA target sequence for Trpc4 (NM_016984.1,2606-2624).
cctccgagagacataacct

SEQ ID NO: 645502 - DNA, 19 bp, Mus musculus
  siRNA target sequence for Trpc4 (NM_016984.1,2607-2625).
ctccgagagacataaccta

SEQ ID NO: 645503 - DNA, 19 bp, Mus musculus
  siRNA target sequence for Trpc4 (NM_016984.1,2617-2635).
cataacctaagcaatggtt

SEQ ID NO: 645504 - DNA, 19 bp, Mus musculus
  siRNA target sequence for Trpc4 (NM_016984.1,2700-2718).
caaaaacttcgggttattt

SEQ ID NO: 645505 - DNA, 19 bp, Mus musculus
  siRNA target sequence for Trpc4 (NM_016984.1,2706-2724).
cttcgggttatttcataga

SEQ ID NO: 645506 - DNA, 19 bp, Mus musculus
  siRNA target sequence for Trpc4 (NM_016984.1,2719-2737).
catagacggtcaaaacaaa

SEQ ID NO: 645507 - DNA, 19 bp, Mus musculus
  siRNA target sequence for Trpc4 (NM_016984.1,2806-2824).
ggagcacttgagcgaaata

SEQ ID NO: 645508 - DNA, 19 bp, Mus musculus
  siRNA target sequence for Trpc4 (NM_016984.1,2807-2825).
gagcacttgagcgaaatat

SEQ ID NO: 645509 - DNA, 19 bp, Mus musculus
  siRNA target sequence for Trpc4 (NM_016984.1,2810-2828).
cacttgagcgaaatatcga

SEQ ID NO: 645510 - DNA, 19 bp, Mus musculus
  siRNA target sequence for Trpc4 (NM_016984.1,2833-2851).
gaatccaaaggattagctt

SEQ ID NO: 645511 - DNA, 19 bp, Mus musculus
  siRNA target sequence for Trpc4 (NM_016984.1,2868-2886).
cattcctggtctcaatgaa

SEQ ID NO: 645512 - DNA, 19 bp, Mus musculus
  siRNA target sequence for Trpc4 (NM_016984.1,2895-2913).
gctagtagaccatagagaa

SEQ ID NO: 645513 - DNA, 19 bp, Mus musculus
  siRNA target sequence for Trpc4 (NM_016984.1,2989-3007).
gaagacaccgtccctatta

SEQ ID NO: 645514 - DNA, 19 bp, Mus musculus
  siRNA target sequence for Trpc4 (NM_016984.1,2994-3012).
caccgtccctattatacca

SEQ ID NO: 645515 - DNA, 19 bp, Mus musculus
  siRNA target sequence for Trpc4 (NM_016984.1,2996-3014).
ccgtccctattataccaaa

SEQ ID NO: 645516 - DNA, 19 bp, Mus musculus
  siRNA target sequence for Trpc4 (NM_016984.1,3034-3052).
gaggactcgagcatagact

SEQ ID NO: 645517 - DNA, 19 bp, Mus musculus
  siRNA target sequence for Trpc4 (NM_016984.1,3036-3054).
ggactcgagcatagactat

SEQ ID NO: 645518 - DNA, 19 bp, Mus musculus
  siRNA target sequence for Trpc4 (NM_016984.1,3074-3092).
cagctgcccacgaagatta

SEQ ID NO: 645519 - DNA, 19 bp, Mus musculus
  siRNA target sequence for Trpc4 (NM_016984.1,3088-3106).
gattatgtgaccacaagat

SEQ ID NO: 645520 - DNA, 19 bp, Mus musculus
  siRNA target sequence for Trpc5 (NM_009428.1,429-447).
caattactcaccatacaga

SEQ ID NO: 645521 - DNA, 19 bp, Mus musculus
  siRNA target sequence for Trpc5 (NM_009428.1,566-584).
ccgagatctactacaatgt

SEQ ID NO: 645522 - DNA, 19 bp, Mus musculus
  siRNA target sequence for Trpc5 (NM_009428.1,568-586).
gagatctactacaatgtca

SEQ ID NO: 645523 - DNA, 19 bp, Mus musculus
  siRNA target sequence for Trpc5 (NM_009428.1,684-702).
gtatgtgggcgatgcatta

SEQ ID NO: 645524 - DNA, 19 bp, Mus musculus
  siRNA target sequence for Trpc5 (NM_009428.1,688-706).
gtgggcgatgcattactct

SEQ ID NO: 645525 - DNA, 19 bp, Mus musculus
  siRNA target sequence for Trpc5 (NM_009428.1,826-844).
gacatcactcccattatgt

SEQ ID NO: 645526 - DNA, 19 bp, Mus musculus
  siRNA target sequence for Trpc5 (NM_009428.1,951-969).
cagttcggaggtagatagt

SEQ ID NO: 645527 - DNA, 19 bp, Mus musculus
  siRNA target sequence for Trpc5 (NM_009428.1,953-971).
gttcggaggtagatagtct

SEQ ID NO: 645528 - DNA, 19 bp, Mus musculus
  siRNA target sequence for Trpc5 (NM_009428.1,980-998).
ctaggtcccgactgaatat

SEQ ID NO: 645529 - DNA, 19 bp, Mus musculus
  siRNA target sequence for Trpc5 (NM_009428.1,983-1001).
ggtcccgactgaatatata

SEQ ID NO: 645530 - DNA, 19 bp, Mus musculus
  siRNA target sequence for Trpc5 (NM_009428.1,1117-1135).
gctgagtacgaggaacttt

SEQ ID NO: 645531 - DNA, 19 bp, Mus musculus
  siRNA target sequence for Trpc5 (NM_009428.1,1129-1147).
gaactttcccagcaatgta

SEQ ID NO: 645532 - DNA, 19 bp, Mus musculus
  siRNA target sequence for Trpc5 (NM_009428.1,1270-1288).
ctgaaggtggcaatcaaat

SEQ ID NO: 645533 - DNA, 19 bp, Mus musculus
  siRNA target sequence for Trpc5 (NM_009428.1,1272-1290).
gaaggtggcaatcaaatat

SEQ ID NO: 645534 - DNA, 19 bp, Mus musculus
  siRNA target sequence for Trpc5 (NM_009428.1,1312-1330).
cagccaaactgccaacaat

SEQ ID NO: 645535 - DNA, 19 bp, Mus musculus
  siRNA target sequence for Trpc5 (NM_009428.1,1359-1377).
ccctggatggcggagaaaa

SEQ ID NO: 645536 - DNA, 19 bp, Mus musculus
  siRNA target sequence for Trpc5 (NM_009428.1,1373-1391).
gaaaacactgggtagtcaa

SEQ ID NO: 645537 - DNA, 19 bp, Mus musculus
  siRNA target sequence for Trpc5 (NM_009428.1,1675-1693).
ggtggattcacggaataca

SEQ ID NO: 645538 - DNA, 19 bp, Mus musculus
  siRNA target sequence for Trpc5 (NM_009428.1,1676-1694).
gtggattcacggaatacat

SEQ ID NO: 645539 - DNA, 19 bp, Mus musculus
  siRNA target sequence for Trpc5 (NM_009428.1,1815-1833).
gtggcacccgactctgatt

SEQ ID NO: 645540 - DNA, 19 bp, Mus musculus
  siRNA target sequence for Trpc5 (NM_009428.1,1837-1855).
gaagcactcttcgcaatat

SEQ ID NO: 645541 - DNA, 19 bp, Mus musculus
  siRNA target sequence for Trpc5 (NM_009428.1,1840-1858).
gcactcttcgcaatatcca

SEQ ID NO: 645542 - DNA, 19 bp, Mus musculus
  siRNA target sequence for Trpc5 (NM_009428.1,1841-1859).
cactcttcgcaatatccaa

SEQ ID NO: 645543 - DNA, 19 bp, Mus musculus
  siRNA target sequence for Trpc5 (NM_009428.1,1848-1866).
cgcaatatccaacatttta

SEQ ID NO: 645544 - DNA, 19 bp, Mus musculus
  siRNA target sequence for Trpc5 (NM_009428.1,1871-1889).
ccttgcgtctcatatcctt

SEQ ID NO: 645545 - DNA, 19 bp, Mus musculus
  siRNA target sequence for Trpc5 (NM_009428.1,1876-1894).
cgtctcatatccttgttca

SEQ ID NO: 645546 - DNA, 19 bp, Mus musculus
  siRNA target sequence for Trpc5 (NM_009428.1,1933-1951).
ggacgaatgctgcttgata

SEQ ID NO: 645547 - DNA, 19 bp, Mus musculus
  siRNA target sequence for Trpc5 (NM_009428.1,1934-1952).
gacgaatgctgcttgatat

SEQ ID NO: 645548 - DNA, 19 bp, Mus musculus
  siRNA target sequence for Trpc5 (NM_009428.1,1937-1955).
gaatgctgcttgatatact

SEQ ID NO: 645549 - DNA, 19 bp, Mus musculus
  siRNA target sequence for Trpc5 (NM_009428.1,1942-1960).
ctgcttgatatactcaaat

SEQ ID NO: 645550 - DNA, 19 bp, Mus musculus
  siRNA target sequence for Trpc5 (NM_009428.1,1944-1962).
gcttgatatactcaaattt

SEQ ID NO: 645551 - DNA, 19 bp, Mus musculus
  siRNA target sequence for Trpc5 (NM_009428.1,1948-1966).
gatatactcaaatttctct

SEQ ID NO: 645552 - DNA, 19 bp, Mus musculus
  siRNA target sequence for Trpc5 (NM_009428.1,2031-2049).
gaccagagctattgatgaa

SEQ ID NO: 645553 - DNA, 19 bp, Mus musculus
  siRNA target sequence for Trpc5 (NM_009428.1,2039-2057).
ctattgatgaacctaacaa

SEQ ID NO: 645554 - DNA, 19 bp, Mus musculus
  siRNA target sequence for Trpc5 (NM_009428.1,2064-2082).
ggggatccgatgtgaaaaa

SEQ ID NO: 645555 - DNA, 19 bp, Mus musculus
  siRNA target sequence for Trpc5 (NM_009428.1,2066-2084).
ggatccgatgtgaaaaaca

SEQ ID NO: 645556 - DNA, 19 bp, Mus musculus
  siRNA target sequence for Trpc5 (NM_009428.1,2144-2162).
gcctcctaaatctctatgt

SEQ ID NO: 645557 - DNA, 19 bp, Mus musculus
  siRNA target sequence for Trpc5 (NM_009428.1,2210-2228).
cgatgtttgggacatacaa

SEQ ID NO: 645558 - DNA, 19 bp, Mus musculus
  siRNA target sequence for Trpc5 (NM_009428.1,2297-2315).
ccgatcatgctgatattga

SEQ ID NO: 645559 - DNA, 19 bp, Mus musculus
  siRNA target sequence for Trpc5 (NM_009428.1,2299-2317).
gatcatgctgatattgagt

SEQ ID NO: 645560 - DNA, 19 bp, Mus musculus
  siRNA target sequence for Trpc5 (NM_009428.1,2340-2358).
ctggatgagttactttgat

SEQ ID NO: 645561 - DNA, 19 bp, Mus musculus
  siRNA target sequence for Trpc5 (NM_009428.1,2471-2489).
gacgaaggaggcacaactt

SEQ ID NO: 645562 - DNA, 19 bp, Mus musculus
  siRNA target sequence for Trpc5 (NM_009428.1,2473-2491).
cgaaggaggcacaacttga

SEQ ID NO: 645563 - DNA, 19 bp, Mus musculus
  siRNA target sequence for Trpc5 (NM_009428.1,2519-2537).
gcctgatacaaaatcaaca

SEQ ID NO: 645564 - DNA, 19 bp, Mus musculus
  siRNA target sequence for Trpc5 (NM_009428.1,2533-2551).
caacattatcaggaagtta

SEQ ID NO: 645565 - DNA, 19 bp, Mus musculus
  siRNA target sequence for Trpc5 (NM_009428.1,2570-2588).
gatatgtggctgcaatgat

SEQ ID NO: 645566 - DNA, 19 bp, Mus musculus
  siRNA target sequence for Trpc5 (NM_009428.1,2603-2621).
caaatgaggggctaacaga

SEQ ID NO: 645567 - DNA, 19 bp, Mus musculus
  siRNA target sequence for Trpc5 (NM_009428.1,2612-2630).
ggctaacagaagaaaattt

SEQ ID NO: 645568 - DNA, 19 bp, Mus musculus
  siRNA target sequence for Trpc5 (NM_009428.1,2613-2631).
gctaacagaagaaaatttt

SEQ ID NO: 645569 - DNA, 19 bp, Mus musculus
  siRNA target sequence for Trpc5 (NM_009428.1,2647-2665).
gacatttccagctttcgat

SEQ ID NO: 645570 - DNA, 19 bp, Mus musculus
  siRNA target sequence for Trpc5 (NM_009428.1,2654-2672).
ccagctttcgatatgaagt

SEQ ID NO: 645571 - DNA, 19 bp, Mus musculus
  siRNA target sequence for Trpc5 (NM_009428.1,2738-2756).
ctcaaagggatgataccaa

SEQ ID NO: 645572 - DNA, 19 bp, Mus musculus
  siRNA target sequence for Trpc5 (NM_009428.1,2771-2789).
gggctcgggccaagtctaa

SEQ ID NO: 645573 - DNA, 19 bp, Mus musculus
  siRNA target sequence for Trpc5 (NM_009428.1,2773-2791).
gctcgggccaagtctaaga

SEQ ID NO: 645574 - DNA, 19 bp, Mus musculus
  siRNA target sequence for Trpc5 (NM_009428.1,2786-2804).
ctaagagtgtctctttcaa

SEQ ID NO: 645575 - DNA, 19 bp, Mus musculus
  siRNA target sequence for Trpc5 (NM_009428.1,2790-2808).
gagtgtctctttcaatgta

SEQ ID NO: 645576 - DNA, 19 bp, Mus musculus
  siRNA target sequence for Trpc5 (NM_009428.1,2833-2851).
ggtgcaccgctcatcagaa

SEQ ID NO: 645577 - DNA, 19 bp, Mus musculus
  siRNA target sequence for Trpc5 (NM_009428.1,2872-2890).
gcccaaggaaagccaaaat

SEQ ID NO: 645578 - DNA, 19 bp, Mus musculus
  siRNA target sequence for Trpc5 (NM_009428.1,2921-2939).
gtccgtctttcaagaaatt

SEQ ID NO: 645579 - DNA, 19 bp, Mus musculus
  siRNA target sequence for Trpc5 (NM_009428.1,2961-2979).
caatggtcaaacatctgaa

SEQ ID NO: 645580 - DNA, 19 bp, Mus musculus
  siRNA target sequence for Trpc5 (NM_009428.1,2987-3005).
cggagccaatgtacacaat

SEQ ID NO: 645581 - DNA, 19 bp, Mus musculus
  siRNA target sequence for Trpc5 (NM_009428.1,3019-3037).
gcacagcagcattgtatgt

SEQ ID NO: 645582 - DNA, 19 bp, Mus musculus
  siRNA target sequence for Trpc5 (NM_009428.1,3039-3057).
gcaggacatccgctattct

SEQ ID NO: 645583 - DNA, 19 bp, Mus musculus
  siRNA target sequence for Trpc5 (NM_009428.1,3198-3216).
cggcatctgctcctcaaat

SEQ ID NO: 645584 - DNA, 19 bp, Mus musculus
  siRNA target sequence for Trpc5 (NM_009428.1,3199-3217).
ggcatctgctcctcaaatt

SEQ ID NO: 645585 - DNA, 19 bp, Mus musculus
  siRNA target sequence for Trpc5 (NM_009428.1,3204-3222).
ctgctcctcaaattcgaaa

SEQ ID NO: 645586 - DNA, 19 bp, Mus musculus
  siRNA target sequence for Trpc5 (NM_009428.1,3207-3225).
ctcctcaaattcgaaactt

SEQ ID NO: 645587 - DNA, 19 bp, Mus musculus
  siRNA target sequence for Trpc5 (NM_009428.1,3209-3227).
cctcaaattcgaaactttt

SEQ ID NO: 645588 - DNA, 19 bp, Mus musculus
  siRNA target sequence for Trpc5 (NM_009428.1,3212-3230).
caaattcgaaacttttgga

SEQ ID NO: 645589 - DNA, 19 bp, Mus musculus
  siRNA target sequence for Trpc5 (NM_009428.1,3231-3249).
ctcgtcagaggacgtattt

SEQ ID NO: 645590 - DNA, 19 bp, Mus musculus
  siRNA target sequence for Trpc5 (NM_009428.1,3233-3251).
cgtcagaggacgtatttga

SEQ ID NO: 645591 - DNA, 19 bp, Mus musculus
  siRNA target sequence for Trpc5 (NM_009428.1,3234-3252).
gtcagaggacgtatttgaa

SEQ ID NO: 645592 - DNA, 19 bp, Mus musculus
  siRNA target sequence for Trpc5 (NM_009428.1,3298-3316).
ggacaggaagaacaagtta

SEQ ID NO: 645593 - DNA, 19 bp, Mus musculus
  siRNA target sequence for Trpc7 (NM_012035.1,173-191).
cggggtcctgcctacatgt

SEQ ID NO: 645594 - DNA, 19 bp, Mus musculus
  siRNA target sequence for Trpc7 (NM_012035.1,174-192).
ggggtcctgcctacatgtt

SEQ ID NO: 645595 - DNA, 19 bp, Mus musculus
  siRNA target sequence for Trpc7 (NM_012035.1,235-253).
cctggactcggctgagtat

SEQ ID NO: 645596 - DNA, 19 bp, Mus musculus
  siRNA target sequence for Trpc7 (NM_012035.1,264-282).
cagtggtcagaaaaatgct

SEQ ID NO: 645597 - DNA, 19 bp, Mus musculus
  siRNA target sequence for Trpc7 (NM_012035.1,291-309).
ccaagaccctcaatttcaa

SEQ ID NO: 645598 - DNA, 19 bp, Mus musculus
  siRNA target sequence for Trpc7 (NM_012035.1,736-754).
ctcgcgctcccggatgaat

SEQ ID NO: 645599 - DNA, 19 bp, Mus musculus
  siRNA target sequence for Trpc7 (NM_012035.1,745-763).
ccggatgaatgcctacaaa

SEQ ID NO: 645600 - DNA, 19 bp, Mus musculus
  siRNA target sequence for Trpc7 (NM_012035.1,843-861).
cccgactggccaacattga

SEQ ID NO: 645601 - DNA, 19 bp, Mus musculus
  siRNA target sequence for Trpc7 (NM_012035.1,845-863).
cgactggccaacattgaga

SEQ ID NO: 645602 - DNA, 19 bp, Mus musculus
  siRNA target sequence for Trpc7 (NM_012035.1,852-870).
ccaacattgagactgaatt

SEQ ID NO: 645603 - DNA, 19 bp, Mus musculus
  siRNA target sequence for Trpc7 (NM_012035.1,883-901).
caggaagttatctatgcaa

SEQ ID NO: 645604 - DNA, 19 bp, Mus musculus
  siRNA target sequence for Trpc7 (NM_012035.1,947-965).
gaagaggtggaagcaattt

SEQ ID NO: 645605 - DNA, 19 bp, Mus musculus
  siRNA target sequence for Trpc7 (NM_012035.1,1011-1029).
caagtctgagccgaatcaa

SEQ ID NO: 645606 - DNA, 19 bp, Mus musculus
  siRNA target sequence for Trpc7 (NM_012035.1,1014-1032).
gtctgagccgaatcaaact

SEQ ID NO: 645607 - DNA, 19 bp, Mus musculus
  siRNA target sequence for Trpc7 (NM_012035.1,1060-1078).
cgttgctcaccctaactgt

SEQ ID NO: 645608 - DNA, 19 bp, Mus musculus
  siRNA target sequence for Trpc7 (NM_012035.1,1090-1108).
gcttaccatgtggtatgaa

SEQ ID NO: 645609 - DNA, 19 bp, Mus musculus
  siRNA target sequence for Trpc7 (NM_012035.1,1119-1137).
gcttacggcaacagtctat

SEQ ID NO: 645610 - DNA, 19 bp, Mus musculus
  siRNA target sequence for Trpc7 (NM_012035.1,1235-1253).
ctgaggagccctttcatga

SEQ ID NO: 645611 - DNA, 19 bp, Mus musculus
  siRNA target sequence for Trpc7 (NM_012035.1,1261-1279).
ggcccatgcagtgtctttt

SEQ ID NO: 645612 - DNA, 19 bp, Mus musculus
  siRNA target sequence for Trpc7 (NM_012035.1,1262-1280).
gcccatgcagtgtctttta

SEQ ID NO: 645613 - DNA, 19 bp, Mus musculus
  siRNA target sequence for Trpc7 (NM_012035.1,1319-1337).
cggtttgagggcgttaaga

SEQ ID NO: 645614 - DNA, 19 bp, Mus musculus
  siRNA target sequence for Trpc7 (NM_012035.1,1359-1377).
cagactaccccaaacagat

SEQ ID NO: 645615 - DNA, 19 bp, Mus musculus
  siRNA target sequence for Trpc7 (NM_012035.1,1410-1428).
cggagatgctcatcatgaa

SEQ ID NO: 645616 - DNA, 19 bp, Mus musculus
  siRNA target sequence for Trpc7 (NM_012035.1,1485-1503).
gggagtacgtgctacactt

SEQ ID NO: 645617 - DNA, 19 bp, Mus musculus
  siRNA target sequence for Trpc7 (NM_012035.1,1844-1862).
gtcatttttatcatggtat

SEQ ID NO: 645618 - DNA, 19 bp, Mus musculus
  siRNA target sequence for Trpc7 (NM_012035.1,2044-2062).
cgtgctgtatggggtttat

SEQ ID NO: 645619 - DNA, 19 bp, Mus musculus
  siRNA target sequence for Trpc7 (NM_012035.1,2047-2065).
gctgtatggggtttataat

SEQ ID NO: 645620 - DNA, 19 bp, Mus musculus
  siRNA target sequence for Trpc7 (NM_012035.1,2068-2086).
caccatggtggttgtacta

SEQ ID NO: 645621 - DNA, 19 bp, Mus musculus
  siRNA target sequence for Trpc7 (NM_012035.1,2070-2088).
ccatggtggttgtactact

SEQ ID NO: 645622 - DNA, 19 bp, Mus musculus
  siRNA target sequence for Trpc7 (NM_012035.1,2225-2243).
ctggtgccgagccctaaat

SEQ ID NO: 645623 - DNA, 19 bp, Mus musculus
  siRNA target sequence for Trpc7 (NM_012035.1,2228-2246).
gtgccgagccctaaatcct

SEQ ID NO: 645624 - DNA, 19 bp, Mus musculus
  siRNA target sequence for Trpc7 (NM_012035.1,2232-2250).
cgagccctaaatcctttta

SEQ ID NO: 645625 - DNA, 19 bp, Mus musculus
  siRNA target sequence for Trpc7 (NM_012035.1,2233-2251).
gagccctaaatccttttat

SEQ ID NO: 645626 - DNA, 19 bp, Mus musculus
  siRNA target sequence for Trpc7 (NM_012035.1,2238-2256).
ctaaatccttttattatct

SEQ ID NO: 645627 - DNA, 19 bp, Mus musculus
  siRNA target sequence for Trpc7 (NM_012035.1,2304-2322).
ccaaacgctgtgaaaacga

SEQ ID NO: 645628 - DNA, 19 bp, Mus musculus
  siRNA target sequence for Trpc7 (NM_012035.1,2373-2391).
ctggcatgaggaattctga

SEQ ID NO: 645629 - DNA, 19 bp, Mus musculus
  siRNA target sequence for Scn5a (NM_021544.1,128-146).
gcgcatggctgaaaaacaa

SEQ ID NO: 645630 - DNA, 19 bp, Mus musculus
  siRNA target sequence for Scn5a (NM_021544.1,423-441).
gtgaagattttggtacatt

SEQ ID NO: 645631 - DNA, 19 bp, Mus musculus
  siRNA target sequence for Scn5a (NM_021544.1,508-526).
ctccgccttggaccaaata

SEQ ID NO: 645632 - DNA, 19 bp, Mus musculus
  siRNA target sequence for Scn5a (NM_021544.1,511-529).
cgccttggaccaaatatgt

SEQ ID NO: 645633 - DNA, 19 bp, Mus musculus
  siRNA target sequence for Scn5a (NM_021544.1,650-668).
gatcgtcatggcatacaca

SEQ ID NO: 645634 - DNA, 19 bp, Mus musculus
  siRNA target sequence for Scn5a (NM_021544.1,656-674).
catggcatacacaactgaa

SEQ ID NO: 645635 - DNA, 19 bp, Mus musculus
  siRNA target sequence for Scn5a (NM_021544.1,659-677).
ggcatacacaactgaattt

SEQ ID NO: 645636 - DNA, 19 bp, Mus musculus
  siRNA target sequence for Scn5a (NM_021544.1,884-902).
caagtgcgtgcgtaacttt

SEQ ID NO: 645637 - DNA, 19 bp, Mus musculus
  siRNA target sequence for Scn5a (NM_021544.1,887-905).
gtgcgtgcgtaactttact

SEQ ID NO: 645638 - DNA, 19 bp, Mus musculus
  siRNA target sequence for Scn5a (NM_021544.1,889-907).
gcgtgcgtaactttactga

SEQ ID NO: 645639 - DNA, 19 bp, Mus musculus
  siRNA target sequence for Scn5a (NM_021544.1,933-951).
gaggccgatggcatagtct

SEQ ID NO: 645640 - DNA, 19 bp, Mus musculus
  siRNA target sequence for Scn5a (NM_021544.1,985-1003).
ccaattacctactcaagaa

SEQ ID NO: 645641 - DNA, 19 bp, Mus musculus
  siRNA target sequence for Scn5a (NM_021544.1,986-1004).
caattacctactcaagaat

SEQ ID NO: 645642 - DNA, 19 bp, Mus musculus
  siRNA target sequence for Scn5a (NM_021544.1,1168-1186).
gctgggaacgtctatacca

SEQ ID NO: 645643 - DNA, 19 bp, Mus musculus
  siRNA target sequence for Scn5a (NM_021544.1,1553-1571).
cggtcccagagcattgaat

SEQ ID NO: 645644 - DNA, 19 bp, Mus musculus
  siRNA target sequence for Scn5a (NM_021544.1,1555-1573).
gtcccagagcattgaatca

SEQ ID NO: 645645 - DNA, 19 bp, Mus musculus
  siRNA target sequence for Scn5a (NM_021544.1,1625-1643).
ccgagggagcattttcaca

SEQ ID NO: 645646 - DNA, 19 bp, Mus musculus
  siRNA target sequence for Scn5a (NM_021544.1,1664-1682).
ctccgaggcagattttgca

SEQ ID NO: 645647 - DNA, 19 bp, Mus musculus
  siRNA target sequence for Scn5a (NM_021544.1,2081-2099).
ggagtcccaccgtaagtgt

SEQ ID NO: 645648 - DNA, 19 bp, Mus musculus
  siRNA target sequence for Scn5a (NM_021544.1,2253-2271).
gctctggagcactacaaca

SEQ ID NO: 645649 - DNA, 19 bp, Mus musculus
  siRNA target sequence for Scn5a (NM_021544.1,2254-2272).
ctctggagcactacaacat

SEQ ID NO: 645650 - DNA, 19 bp, Mus musculus
  siRNA target sequence for Scn5a (NM_021544.1,2628-2646).
ctcttcggcaagaactact

SEQ ID NO: 645651 - DNA, 19 bp, Mus musculus
  siRNA target sequence for Scn5a (NM_021544.1,2940-2958).
gccctggctcgcatccaaa

SEQ ID NO: 645652 - DNA, 19 bp, Mus musculus
  siRNA target sequence for Scn5a (NM_021544.1,2959-2977).
ggggccttcgctttgtcaa

SEQ ID NO: 645653 - DNA, 19 bp, Mus musculus
  siRNA target sequence for Scn5a (NM_021544.1,3133-3151).
cacggttcgaggaagacaa

SEQ ID NO: 645654 - DNA, 19 bp, Mus musculus
  siRNA target sequence for Scn5a (NM_021544.1,4162-4180).
gggacctgcctctgaacta

SEQ ID NO: 645655 - DNA, 19 bp, Mus musculus
  siRNA target sequence for Scn5a (NM_021544.1,4240-4258).
ggaccaaggtgaaagtcaa

SEQ ID NO: 645656 - DNA, 19 bp, Mus musculus
  siRNA target sequence for Scn5a (NM_021544.1,4295-4313).
gcaggtggcgacatttaaa

SEQ ID NO: 645657 - DNA, 19 bp, Mus musculus
  siRNA target sequence for Scn5a (NM_021544.1,4714-4732).
gccctgaaaaagtcaacat

SEQ ID NO: 645658 - DNA, 19 bp, Mus musculus
  siRNA target sequence for Scn5a (NM_021544.1,4873-4891).
ctgtcctctccgacatcat

SEQ ID NO: 645659 - DNA, 19 bp, Mus musculus
  siRNA target sequence for Scn5a (NM_021544.1,5473-5491).
cccagttcattgagtattt

SEQ ID NO: 645660 - DNA, 19 bp, Mus musculus
  siRNA target sequence for Scn5a (NM_021544.1,5550-5568).
cagataagcctcatcaata

SEQ ID NO: 645661 - DNA, 19 bp, Mus musculus
  siRNA target sequence for Scn5a (NM_021544.1,5590-5608).
gggaccgcatccactgtat

SEQ ID NO: 645662 - DNA, 19 bp, Mus musculus
  siRNA target sequence for Scn5a (NM_021544.1,5700-5718).
gccaatccttccaagatct

SEQ ID NO: 645663 - DNA, 19 bp, Mus musculus
  siRNA target sequence for Scn5a (NM_021544.1,5737-5755).
ccaccctgcggcgaaaaca

SEQ ID NO: 645664 - DNA, 19 bp, Mus musculus
  siRNA target sequence for Scn5a (NM_021544.1,5738-5756).
caccctgcggcgaaaacat

SEQ ID NO: 645665 - DNA, 19 bp, Mus musculus
  siRNA target sequence for Scn5a (NM_021544.1,5885-5903).
cgagcgagagggactcatt

SEQ ID NO: 645666 - DNA, 19 bp, Mus musculus
  siRNA target sequence for Scn5a (NM_021544.1,5896-5914).
gactcattgcctacatgat

SEQ ID NO: 645667 - DNA, 19 bp, Mus musculus
  siRNA target sequence for Scn5a (NM_021544.1,5900-5918).
cattgcctacatgatgaat

SEQ ID NO: 645668 - DNA, 19 bp, Mus musculus
  siRNA target sequence for Scn5a (NM_021544.1,6004-6022).
gggccaccagtgataacct

SEQ ID NO: 645669 - DNA, 19 bp, Mus musculus
  siRNA target sequence for Scn5a (NM_021544.1,6044-6062).
cagccgcagcgaagatctt

SEQ ID NO: 645670 - DNA, 19 bp, Mus musculus
  siRNA target sequence for Scn5a (NM_021544.1,6088-6106).
gggaccgagagtctatagt

SEQ ID NO: 645671 - DNA, 19 bp, Mus musculus
  siRNA target sequence for Scn5a (NM_021544.1,6090-6108).
gaccgagagtctatagtgt

SEQ ID NO: 645672 - DNA, 19 bp, Mus musculus
  siRNA target sequence for Scn7a (NM_009135.1,255-273).
gggccttgtcccatttaca

SEQ ID NO: 645673 - DNA, 19 bp, Mus musculus
  siRNA target sequence for Scn7a (NM_009135.1,256-274).
ggccttgtcccatttacaa

SEQ ID NO: 645674 - DNA, 19 bp, Mus musculus
  siRNA target sequence for Scn7a (NM_009135.1,275-293).
cagagtcacttgaacttat

SEQ ID NO: 645675 - DNA, 19 bp, Mus musculus
  siRNA target sequence for Scn7a (NM_009135.1,279-297).
gtcacttgaacttatagaa

SEQ ID NO: 645676 - DNA, 19 bp, Mus musculus
  siRNA target sequence for Scn7a (NM_009135.1,286-304).
gaacttatagaaaatcaca

SEQ ID NO: 645677 - DNA, 19 bp, Mus musculus
  siRNA target sequence for Scn7a (NM_009135.1,295-313).
gaaaatcacattgctaaaa

SEQ ID NO: 645678 - DNA, 19 bp, Mus musculus
  siRNA target sequence for Scn7a (NM_009135.1,337-355).
gaagaaggtttaaaaccaa

SEQ ID NO: 645679 - DNA, 19 bp, Mus musculus
  siRNA target sequence for Scn7a (NM_009135.1,371-389).
ctggcaaaagacttccaat

SEQ ID NO: 645680 - DNA, 19 bp, Mus musculus
  siRNA target sequence for Scn7a (NM_009135.1,382-400).
cttccaattccctatggaa

SEQ ID NO: 645681 - DNA, 19 bp, Mus musculus
  siRNA target sequence for Scn7a (NM_009135.1,422-440).
cagagcccttggaagatgt

SEQ ID NO: 645682 - DNA, 19 bp, Mus musculus
  siRNA target sequence for Scn7a (NM_009135.1,441-459).
ggatccatactactatgtt

SEQ ID NO: 645683 - DNA, 19 bp, Mus musculus
  siRNA target sequence for Scn7a (NM_009135.1,442-460).
gatccatactactatgtta

SEQ ID NO: 645684 - DNA, 19 bp, Mus musculus
  siRNA target sequence for Scn7a (NM_009135.1,445-463).
ccatactactatgttaaga

SEQ ID NO: 645685 - DNA, 19 bp, Mus musculus
  siRNA target sequence for Scn7a (NM_009135.1,506-524).
ggttcaatgcggtttccat

SEQ ID NO: 645686 - DNA, 19 bp, Mus musculus
  siRNA target sequence for Scn7a (NM_009135.1,595-613).
cgcctgctgattttaatca

SEQ ID NO: 645687 - DNA, 19 bp, Mus musculus
  siRNA target sequence for Scn7a (NM_009135.1,619-637).
ctcactgacagcatactta

SEQ ID NO: 645688 - DNA, 19 bp, Mus musculus
  siRNA target sequence for Scn7a (NM_009135.1,662-680).
ggatattggcaatagagaa

SEQ ID NO: 645689 - DNA, 19 bp, Mus musculus
  siRNA target sequence for Scn7a (NM_009135.1,663-681).
gatattggcaatagagaat

SEQ ID NO: 645690 - DNA, 19 bp, Mus musculus
  siRNA target sequence for Scn7a (NM_009135.1,692-710).
ggatttacgcatttgaaat

SEQ ID NO: 645691 - DNA, 19 bp, Mus musculus
  siRNA target sequence for Scn7a (NM_009135.1,700-718).
gcatttgaaatacttgtaa

SEQ ID NO: 645692 - DNA, 19 bp, Mus musculus
  siRNA target sequence for Scn7a (NM_009135.1,734-752).
gtatctgggcaggttcatt

SEQ ID NO: 645693 - DNA, 19 bp, Mus musculus
  siRNA target sequence for Scn7a (NM_009135.1,740-758).
gggcaggttcattttcctt

SEQ ID NO: 645694 - DNA, 19 bp, Mus musculus
  siRNA target sequence for Scn7a (NM_009135.1,769-787).
ctttggaactggcttgatt

SEQ ID NO: 645695 - DNA, 19 bp, Mus musculus
  siRNA target sequence for Scn7a (NM_009135.1,780-798).
gcttgatttcagtgtaact

SEQ ID NO: 645696 - DNA, 19 bp, Mus musculus
  siRNA target sequence for Scn7a (NM_009135.1,784-802).
gatttcagtgtaactttgt

SEQ ID NO: 645697 - DNA, 19 bp, Mus musculus
  siRNA target sequence for Scn7a (NM_009135.1,804-822).
cgagctaatcacaaggttt

SEQ ID NO: 645698 - DNA, 19 bp, Mus musculus
  siRNA target sequence for Scn7a (NM_009135.1,805-823).
gagctaatcacaaggtttt

SEQ ID NO: 645699 - DNA, 19 bp, Mus musculus
  siRNA target sequence for Scn7a (NM_009135.1,824-842).
cacctctaagctccttttt

SEQ ID NO: 645700 - DNA, 19 bp, Mus musculus
  siRNA target sequence for Scn7a (NM_009135.1,827-845).
ctctaagctcctttttaat

SEQ ID NO: 645701 - DNA, 19 bp, Mus musculus
  siRNA target sequence for Scn7a (NM_009135.1,860-878).
gaactttccgaattttgaa

SEQ ID NO: 645702 - DNA, 19 bp, Mus musculus
  siRNA target sequence for Scn7a (NM_009135.1,954-972).
cattgccctagctctgttt

SEQ ID NO: 645703 - DNA, 19 bp, Mus musculus
  siRNA target sequence for Scn7a (NM_009135.1,1109-1127).
gaataaacttctactacat

SEQ ID NO: 645704 - DNA, 19 bp, Mus musculus
  siRNA target sequence for Scn7a (NM_009135.1,1125-1143).
catggaaggagcgaaatat

SEQ ID NO: 645705 - DNA, 19 bp, Mus musculus
  siRNA target sequence for Scn7a (NM_009135.1,1176-1194).
ccagtgtccggaaggttat

SEQ ID NO: 645706 - DNA, 19 bp, Mus musculus
  siRNA target sequence for Scn7a (NM_009135.1,1219-1237).
cctgacaatggcttcacaa

SEQ ID NO: 645707 - DNA, 19 bp, Mus musculus
  siRNA target sequence for Scn7a (NM_009135.1,1224-1242).
caatggcttcacaagtttt

SEQ ID NO: 645708 - DNA, 19 bp, Mus musculus
  siRNA target sequence for Scn7a (NM_009135.1,1229-1247).
gcttcacaagttttgacaa

SEQ ID NO: 645709 - DNA, 19 bp, Mus musculus
  siRNA target sequence for Scn7a (NM_009135.1,1233-1251).
cacaagttttgacaacttt

SEQ ID NO: 645710 - DNA, 19 bp, Mus musculus
  siRNA target sequence for Scn7a (NM_009135.1,1256-1274).
ggtcccttcttgctatgtt

SEQ ID NO: 645711 - DNA, 19 bp, Mus musculus
  siRNA target sequence for Scn7a (NM_009135.1,1261-1279).
cttcttgctatgtttcgat

SEQ ID NO: 645712 - DNA, 19 bp, Mus musculus
  siRNA target sequence for Scn7a (NM_009135.1,1267-1285).
gctatgtttcgattgatga

SEQ ID NO: 645713 - DNA, 19 bp, Mus musculus
  siRNA target sequence for Scn7a (NM_009135.1,1286-1304).
cacaggattaccctgaatt

SEQ ID NO: 645714 - DNA, 19 bp, Mus musculus
  siRNA target sequence for Scn7a (NM_009135.1,1290-1308).
ggattaccctgaattactt

SEQ ID NO: 645715 - DNA, 19 bp, Mus musculus
  siRNA target sequence for Scn7a (NM_009135.1,1306-1324).
ctttatcaccagatccttt

SEQ ID NO: 645716 - DNA, 19 bp, Mus musculus
  siRNA target sequence for Scn7a (NM_009135.1,1312-1330).
caccagatcctttatgctt

SEQ ID NO: 645717 - DNA, 19 bp, Mus musculus
  siRNA target sequence for Scn7a (NM_009135.1,1378-1396).
gccttctatttgacaagtt

SEQ ID NO: 645718 - DNA, 19 bp, Mus musculus
  siRNA target sequence for Scn7a (NM_009135.1,1411-1429).
ctcactatgacctatgaaa

SEQ ID NO: 645719 - DNA, 19 bp, Mus musculus
  siRNA target sequence for Scn7a (NM_009135.1,1415-1433).
ctatgacctatgaaaagga

SEQ ID NO: 645720 - DNA, 19 bp, Mus musculus
  siRNA target sequence for Scn7a (NM_009135.1,1478-1496).
gtcaacagacagtgaaaga

SEQ ID NO: 645721 - DNA, 19 bp, Mus musculus
  siRNA target sequence for Scn7a (NM_009135.1,1522-1540).
gagatggaaactacacaaa

SEQ ID NO: 645722 - DNA, 19 bp, Mus musculus
  siRNA target sequence for Scn7a (NM_009135.1,1638-1656).
gaagaaatgcccaatatgt

SEQ ID NO: 645723 - DNA, 19 bp, Mus musculus
  siRNA target sequence for Scn7a (NM_009135.1,1648-1666).
ccaatatgttggcataagt

SEQ ID NO: 645724 - DNA, 19 bp, Mus musculus
  siRNA target sequence for Scn7a (NM_009135.1,1649-1667).
caatatgttggcataagtt

SEQ ID NO: 645725 - DNA, 19 bp, Mus musculus
  siRNA target sequence for Scn7a (NM_009135.1,1719-1737).
cgagtttgctgatagagtt

SEQ ID NO: 645726 - DNA, 19 bp, Mus musculus
  siRNA target sequence for Scn7a (NM_009135.1,1768-1786).
gtcatctgcatcgttttaa

SEQ ID NO: 645727 - DNA, 19 bp, Mus musculus
  siRNA target sequence for Scn7a (NM_009135.1,1797-1815).
cctcgccctagaacatttt

SEQ ID NO: 645728 - DNA, 19 bp, Mus musculus
  siRNA target sequence for Scn7a (NM_009135.1,1800-1818).
cgccctagaacattttcca

SEQ ID NO: 645729 - DNA, 19 bp, Mus musculus
  siRNA target sequence for Scn7a (NM_009135.1,1801-1819).
gccctagaacattttccaa

SEQ ID NO: 645730 - DNA, 19 bp, Mus musculus
  siRNA target sequence for Scn7a (NM_009135.1,1802-1820).
ccctagaacattttccaat

SEQ ID NO: 645731 - DNA, 19 bp, Mus musculus
  siRNA target sequence for Scn7a (NM_009135.1,1838-1856).
ctctccttcacgttggaaa

SEQ ID NO: 645732 - DNA, 19 bp, Mus musculus
  siRNA target sequence for Scn7a (NM_009135.1,1840-1858).
ctccttcacgttggaaatt

SEQ ID NO: 645733 - DNA, 19 bp, Mus musculus
  siRNA target sequence for Scn7a (NM_009135.1,1896-1914).
gaagataatcgctatgcat

SEQ ID NO: 645734 - DNA, 19 bp, Mus musculus
  siRNA target sequence for Scn7a (NM_009135.1,1915-1933).
ccatatgggtattttcaaa

SEQ ID NO: 645735 - DNA, 19 bp, Mus musculus
  siRNA target sequence for Scn7a (NM_009135.1,1960-1978).
cttgtggttttggagttaa

SEQ ID NO: 645736 - DNA, 19 bp, Mus musculus
  siRNA target sequence for Scn7a (NM_009135.1,2005-2023).
ggactagctgttttaataa

SEQ ID NO: 645737 - DNA, 19 bp, Mus musculus
  siRNA target sequence for Scn7a (NM_009135.1,2052-2070).
gaagtacggaccaccattt

SEQ ID NO: 645738 - DNA, 19 bp, Mus musculus
  siRNA target sequence for Scn7a (NM_009135.1,2058-2076).
cggaccaccatttaagagt

SEQ ID NO: 645739 - DNA, 19 bp, Mus musculus
  siRNA target sequence for Scn7a (NM_009135.1,2060-2078).
gaccaccatttaagagttt

SEQ ID NO: 645740 - DNA, 19 bp, Mus musculus
  siRNA target sequence for Scn7a (NM_009135.1,2127-2145).
gttgctctgcatattcgtt

SEQ ID NO: 645741 - DNA, 19 bp, Mus musculus
  siRNA target sequence for Scn7a (NM_009135.1,2173-2191).
ctgtttggtcgaagttaca

SEQ ID NO: 645742 - DNA, 19 bp, Mus musculus
  siRNA target sequence for Scn7a (NM_009135.1,2179-2197).
ggtcgaagttacaaggatt

SEQ ID NO: 645743 - DNA, 19 bp, Mus musculus
  siRNA target sequence for Scn7a (NM_009135.1,2183-2201).
gaagttacaaggattgtgt

SEQ ID NO: 645744 - DNA, 19 bp, Mus musculus
  siRNA target sequence for Scn7a (NM_009135.1,2198-2216).
gtgtctgccacataaagga

SEQ ID NO: 645745 - DNA, 19 bp, Mus musculus
  siRNA target sequence for Scn7a (NM_009135.1,2361-2379).
gatggtcattttaattgga

SEQ ID NO: 645746 - DNA, 19 bp, Mus musculus
  siRNA target sequence for Scn7a (NM_009135.1,2475-2493).
gcttgccatggcaaggata

SEQ ID NO: 645747 - DNA, 19 bp, Mus musculus
  siRNA target sequence for Scn7a (NM_009135.1,2476-2494).
cttgccatggcaaggataa

SEQ ID NO: 645748 - DNA, 19 bp, Mus musculus
  siRNA target sequence for Scn7a (NM_009135.1,2479-2497).
gccatggcaaggataaagt

SEQ ID NO: 645749 - DNA, 19 bp, Mus musculus
  siRNA target sequence for Scn7a (NM_009135.1,2510-2528).
ccatgcttcttaaattaat

SEQ ID NO: 645750 - DNA, 19 bp, Mus musculus
  siRNA target sequence for Scn7a (NM_009135.1,2554-2572).
gaagcaacagaccaaatat

SEQ ID NO: 645751 - DNA, 19 bp, Mus musculus
  siRNA target sequence for Scn7a (NM_009135.1,2575-2593).
gatccaagtgttaaagaga

SEQ ID NO: 645752 - DNA, 19 bp, Mus musculus
  siRNA target sequence for Scn7a (NM_009135.1,2578-2596).
ccaagtgttaaagagaata

SEQ ID NO: 645753 - DNA, 19 bp, Mus musculus
  siRNA target sequence for Scn7a (NM_009135.1,2631-2649).
ccaaactttcctcagatat

SEQ ID NO: 645754 - DNA, 19 bp, Mus musculus
  siRNA target sequence for Scn7a (NM_009135.1,2632-2650).
caaactttcctcagatata

SEQ ID NO: 645755 - DNA, 19 bp, Mus musculus
  siRNA target sequence for Scn7a (NM_009135.1,2731-2749).
gaaactgtgccgattgctt

SEQ ID NO: 645756 - DNA, 19 bp, Mus musculus
  siRNA target sequence for Scn7a (NM_009135.1,2929-2947).
ggttatgaacgcaaatctt

SEQ ID NO: 645757 - DNA, 19 bp, Mus musculus
  siRNA target sequence for Scn7a (NM_009135.1,2953-2971).
ggtcaaatcagtagagaat

SEQ ID NO: 645758 - DNA, 19 bp, Mus musculus
  siRNA target sequence for Scn7a (NM_009135.1,3084-3102).
ggctcttgaagacatatat

SEQ ID NO: 645759 - DNA, 19 bp, Mus musculus
  siRNA target sequence for Scn7a (NM_009135.1,3122-3140).
ctaaaatcttactggaata

SEQ ID NO: 645760 - DNA, 19 bp, Mus musculus
  siRNA target sequence for Scn7a (NM_009135.1,3135-3153).
ggaatatgcggacatgata

SEQ ID NO: 645761 - DNA, 19 bp, Mus musculus
  siRNA target sequence for Scn7a (NM_009135.1,3136-3154).
gaatatgcggacatgatat

SEQ ID NO: 645762 - DNA, 19 bp, Mus musculus
  siRNA target sequence for Scn7a (NM_009135.1,3142-3160).
gcggacatgatatttgcat

SEQ ID NO: 645763 - DNA, 19 bp, Mus musculus
  siRNA target sequence for Scn7a (NM_009135.1,3234-3252).
caaactggactttatggtt

SEQ ID NO: 645764 - DNA, 19 bp, Mus musculus
  siRNA target sequence for Scn7a (NM_009135.1,3253-3271).
gttatcgtgttttgtctta

SEQ ID NO: 645765 - DNA, 19 bp, Mus musculus
  siRNA target sequence for Scn7a (NM_009135.1,3259-3277).
gtgttttgtcttagcttaa

SEQ ID NO: 645766 - DNA, 19 bp, Mus musculus
  siRNA target sequence for Scn7a (NM_009135.1,3281-3299).
gcaaaactcgagaagatct

SEQ ID NO: 645767 - DNA, 19 bp, Mus musculus
  siRNA target sequence for Scn7a (NM_009135.1,3321-3339).
gttccttcgagcactaaga

SEQ ID NO: 645768 - DNA, 19 bp, Mus musculus
  siRNA target sequence for Scn7a (NM_009135.1,3338-3356).
gagttctgtcgcagtttga

SEQ ID NO: 645769 - DNA, 19 bp, Mus musculus
  siRNA target sequence for Scn7a (NM_009135.1,3340-3358).
gttctgtcgcagtttgaaa

SEQ ID NO: 645770 - DNA, 19 bp, Mus musculus
  siRNA target sequence for Scn7a (NM_009135.1,3373-3391).
ctgagagctttgataaaaa

SEQ ID NO: 645771 - DNA, 19 bp, Mus musculus
  siRNA target sequence for Scn7a (NM_009135.1,3401-3419).
ccactgtgagcgtgtttct

SEQ ID NO: 645772 - DNA, 19 bp, Mus musculus
  siRNA target sequence for Scn7a (NM_009135.1,3404-3422).
ctgtgagcgtgtttctagt

SEQ ID NO: 645773 - DNA, 19 bp, Mus musculus
  siRNA target sequence for Scn7a (NM_009135.1,3418-3436).
ctagtctgcctaatgatct

SEQ ID NO: 645774 - DNA, 19 bp, Mus musculus
  siRNA target sequence for Scn7a (NM_009135.1,3451-3469).
gttattggagtgcagttat

SEQ ID NO: 645775 - DNA, 19 bp, Mus musculus
  siRNA target sequence for Scn7a (NM_009135.1,3545-3563).
gtcagtgtgaaaaactgtt

SEQ ID NO: 645776 - DNA, 19 bp, Mus musculus
  siRNA target sequence for Scn7a (NM_009135.1,3547-3565).
cagtgtgaaaaactgttat

SEQ ID NO: 645777 - DNA, 19 bp, Mus musculus
  siRNA target sequence for Scn7a (NM_009135.1,3551-3569).
gtgaaaaactgttattcaa

SEQ ID NO: 645778 - DNA, 19 bp, Mus musculus
  siRNA target sequence for Scn7a (NM_009135.1,3581-3599).
cgtgggagaatgcaaaact

SEQ ID NO: 645779 - DNA, 19 bp, Mus musculus
  siRNA target sequence for Scn7a (NM_009135.1,3588-3606).
gaatgcaaaactgaacttt

SEQ ID NO: 645780 - DNA, 19 bp, Mus musculus
  siRNA target sequence for Scn7a (NM_009135.1,3592-3610).
gcaaaactgaactttgata

SEQ ID NO: 645781 - DNA, 19 bp, Mus musculus
  siRNA target sequence for Scn7a (NM_009135.1,3637-3655).
ctccaagtggcaacattta

SEQ ID NO: 645782 - DNA, 19 bp, Mus musculus
  siRNA target sequence for Scn7a (NM_009135.1,3639-3657).
ccaagtggcaacatttaat

SEQ ID NO: 645783 - DNA, 19 bp, Mus musculus
  siRNA target sequence for Scn7a (NM_009135.1,3658-3676).
ggatggatcagtattatga

SEQ ID NO: 645784 - DNA, 19 bp, Mus musculus
  siRNA target sequence for Scn7a (NM_009135.1,3663-3681).
gatcagtattatgaattca

SEQ ID NO: 645785 - DNA, 19 bp, Mus musculus
  siRNA target sequence for Scn7a (NM_009135.1,3675-3693).
gaattcagcaattgattct

SEQ ID NO: 645786 - DNA, 19 bp, Mus musculus
  siRNA target sequence for Scn7a (NM_009135.1,3726-3744).
caacctctacatgtatagt

SEQ ID NO: 645787 - DNA, 19 bp, Mus musculus
  siRNA target sequence for Scn7a (NM_009135.1,3732-3750).
ctacatgtatagttacttt

SEQ ID NO: 645788 - DNA, 19 bp, Mus musculus
  siRNA target sequence for Scn7a (NM_009135.1,3743-3761).
gttactttatcatctttgt

SEQ ID NO: 645789 - DNA, 19 bp, Mus musculus
  siRNA target sequence for Scn7a (NM_009135.1,3792-3810).
gctgattggtgttattatt

SEQ ID NO: 645790 - DNA, 19 bp, Mus musculus
  siRNA target sequence for Scn7a (NM_009135.1,3800-3818).
gtgttattattcgcaattt

SEQ ID NO: 645791 - DNA, 19 bp, Mus musculus
  siRNA target sequence for Scn7a (NM_009135.1,3840-3858).
gggaggatcaaacatcttt

SEQ ID NO: 645792 - DNA, 19 bp, Mus musculus
  siRNA target sequence for Scn7a (NM_009135.1,3841-3859).
ggaggatcaaacatcttta

SEQ ID NO: 645793 - DNA, 19 bp, Mus musculus
  siRNA target sequence for Scn7a (NM_009135.1,3842-3860).
gaggatcaaacatctttat

SEQ ID NO: 645794 - DNA, 19 bp, Mus musculus
  siRNA target sequence for Scn7a (NM_009135.1,3844-3862).
ggatcaaacatctttataa

SEQ ID NO: 645795 - DNA, 19 bp, Mus musculus
  siRNA target sequence for Scn7a (NM_009135.1,3891-3909).
cctgaagaagctcttgtat

SEQ ID NO: 645796 - DNA, 19 bp, Mus musculus
  siRNA target sequence for Scn7a (NM_009135.1,3960-3978).
cctttttgacctagtaaca

SEQ ID NO: 645797 - DNA, 19 bp, Mus musculus
  siRNA target sequence for Scn7a (NM_009135.1,3973-3991).
gtaacacaccgtgtcttta

SEQ ID NO: 645798 - DNA, 19 bp, Mus musculus
  siRNA target sequence for Scn7a (NM_009135.1,3977-3995).
cacaccgtgtctttaatgt

SEQ ID NO: 645799 - DNA, 19 bp, Mus musculus
  siRNA target sequence for Scn7a (NM_009135.1,3979-3997).
caccgtgtctttaatgtta

SEQ ID NO: 645800 - DNA, 19 bp, Mus musculus
  siRNA target sequence for Scn7a (NM_009135.1,3987-4005).
ctttaatgttatcatcata

SEQ ID NO: 645801 - DNA, 19 bp, Mus musculus
  siRNA target sequence for Scn7a (NM_009135.1,4110-4128).
gttcactctggaatgcata

SEQ ID NO: 645802 - DNA, 19 bp, Mus musculus
  siRNA target sequence for Scn7a (NM_009135.1,4172-4190).
ggaatgttcatgactttat

SEQ ID NO: 645803 - DNA, 19 bp, Mus musculus
  siRNA target sequence for Scn7a (NM_009135.1,4218-4236).
gctgctacccttgacaata

SEQ ID NO: 645804 - DNA, 19 bp, Mus musculus
  siRNA target sequence for Scn7a (NM_009135.1,4226-4244).
ccttgacaataggacaata

SEQ ID NO: 645805 - DNA, 19 bp, Mus musculus
  siRNA target sequence for Scn7a (NM_009135.1,4230-4248).
gacaataggacaatacttt

SEQ ID NO: 645806 - DNA, 19 bp, Mus musculus
  siRNA target sequence for Scn7a (NM_009135.1,4232-4250).
caataggacaatactttgt

SEQ ID NO: 645807 - DNA, 19 bp, Mus musculus
  siRNA target sequence for Scn7a (NM_009135.1,4335-4353).
cctgatgcttcccttgatt

SEQ ID NO: 645808 - DNA, 19 bp, Mus musculus
  siRNA target sequence for Scn7a (NM_009135.1,4367-4385).
cattgctgaacattagtct

SEQ ID NO: 645809 - DNA, 19 bp, Mus musculus
  siRNA target sequence for Scn7a (NM_009135.1,4468-4486).
gatgtgtccaactttgaga

SEQ ID NO: 645810 - DNA, 19 bp, Mus musculus
  siRNA target sequence for Scn7a (NM_009135.1,4512-4530).
cttccaagttacaacgttt

SEQ ID NO: 645811 - DNA, 19 bp, Mus musculus
  siRNA target sequence for Scn7a (NM_009135.1,4544-4562).
ggatgctggatgcaatttt

SEQ ID NO: 645812 - DNA, 19 bp, Mus musculus
  siRNA target sequence for Scn7a (NM_009135.1,4577-4595).
ctgactgcgatcctgataa

SEQ ID NO: 645813 - DNA, 19 bp, Mus musculus
  siRNA target sequence for Scn7a (NM_009135.1,4579-4597).
gactgcgatcctgataaaa

SEQ ID NO: 645814 - DNA, 19 bp, Mus musculus
  siRNA target sequence for Scn7a (NM_009135.1,4581-4599).
ctgcgatcctgataaaatt

SEQ ID NO: 645815 - DNA, 19 bp, Mus musculus
  siRNA target sequence for Scn7a (NM_009135.1,4584-4602).
cgatcctgataaaattaat

SEQ ID NO: 645816 - DNA, 19 bp, Mus musculus
  siRNA target sequence for Scn7a (NM_009135.1,4679-4697).
catggttgatcattgttaa

SEQ ID NO: 645817 - DNA, 19 bp, Mus musculus
  siRNA target sequence for Scn7a (NM_009135.1,4682-4700).
ggttgatcattgttaacat

SEQ ID NO: 645818 - DNA, 19 bp, Mus musculus
  siRNA target sequence for Scn7a (NM_009135.1,4713-4731).
gatcatggagttcttaagt

SEQ ID NO: 645819 - DNA, 19 bp, Mus musculus
  siRNA target sequence for Scn7a (NM_009135.1,4752-4770).
caggaccttgagtgaagat

SEQ ID NO: 645820 - DNA, 19 bp, Mus musculus
  siRNA target sequence for Scn7a (NM_009135.1,4811-4829).
ctgataggacccagtacat

SEQ ID NO: 645821 - DNA, 19 bp, Mus musculus
  siRNA target sequence for Scn7a (NM_009135.1,4835-4853).
ctagcaagctttctgattt

SEQ ID NO: 645822 - DNA, 19 bp, Mus musculus
  siRNA target sequence for Scn7a (NM_009135.1,4950-4968).
ctgcctcgacattttactt

SEQ ID NO: 645823 - DNA, 19 bp, Mus musculus
  siRNA target sequence for Scn7a (NM_009135.1,5001-5019).
gagggtggagaaaatcctt

SEQ ID NO: 645824 - DNA, 19 bp, Mus musculus
  siRNA target sequence for Scn7a (NM_009135.1,5043-5061).
gttagcgaaccctttcaaa

SEQ ID NO: 645825 - DNA, 19 bp, Mus musculus
  siRNA target sequence for Scn7a (NM_009135.1,5047-5065).
gcgaaccctttcaaaatca

SEQ ID NO: 645826 - DNA, 19 bp, Mus musculus
  siRNA target sequence for Scn7a (NM_009135.1,5071-5089).
gagccgattacaactactt

SEQ ID NO: 645827 - DNA, 19 bp, Mus musculus
  siRNA target sequence for Scn7a (NM_009135.1,5074-5092).
ccgattacaactactttga

SEQ ID NO: 645828 - DNA, 19 bp, Mus musculus
  siRNA target sequence for Scn7a (NM_009135.1,5124-5142).
catccagcgtgcatataaa

SEQ ID NO: 645829 - DNA, 19 bp, Mus musculus
  siRNA target sequence for Scn7a (NM_009135.1,5166-5184).
caagaatgtatcagatact

SEQ ID NO: 645830 - DNA, 19 bp, Mus musculus
  siRNA target sequence for Scn7a (NM_009135.1,5197-5215).
gaccgcagagatgatctta

SEQ ID NO: 645831 - DNA, 19 bp, Mus musculus
  siRNA target sequence for Scn7a (NM_009135.1,5199-5217).
ccgcagagatgatcttact

SEQ ID NO: 645832 - DNA, 19 bp, Mus musculus
  siRNA target sequence for Scn7a (NM_009135.1,5200-5218).
cgcagagatgatcttactt

SEQ ID NO: 645833 - DNA, 19 bp, Mus musculus
  siRNA target sequence for Scn7a (NM_009135.1,5225-5243).
gtgctcactctggcaaaat

SEQ ID NO: 645834 - DNA, 19 bp, Mus musculus
  siRNA target sequence for Scn7a (NM_009135.1,5228-5246).
ctcactctggcaaaatcga

SEQ ID NO: 645835 - DNA, 19 bp, Mus musculus
  siRNA target sequence for Scn7a (NM_009135.1,5244-5262).
cgaggagaaggcatctatt

SEQ ID NO: 645836 - DNA, 19 bp, Mus musculus
  siRNA target sequence for Scn9a (NM_018852.1,172-190).
ggggactgtggaaatccat

SEQ ID NO: 645837 - DNA, 19 bp, Mus musculus
  siRNA target sequence for Scn9a (NM_018852.1,594-612).
gtcagccaatccttctaaa

SEQ ID NO: 645838 - DNA, 19 bp, Mus musculus
  siRNA target sequence for Scn9a (NM_018852.1,646-664).
cgaaaacaagaggatgtat

SEQ ID NO: 645839 - DNA, 19 bp, Mus musculus
  siRNA target sequence for Scn9a (NM_018852.1,658-676).
gatgtatctgcgactatca

SEQ ID NO: 645840 - DNA, 19 bp, Mus musculus
  siRNA target sequence for Scn9a (NM_018852.1,714-732).
cgtcaagaatatatcaagt

SEQ ID NO: 645841 - DNA, 19 bp, Mus musculus
  siRNA target sequence for Scn9a (NM_018852.1,715-733).
gtcaagaatatatcaagta

SEQ ID NO: 645842 - DNA, 19 bp, Mus musculus
  siRNA target sequence for Scn9a (NM_018852.1,717-735).
caagaatatatcaagtata

SEQ ID NO: 645843 - DNA, 19 bp, Mus musculus
  siRNA target sequence for Scn9a (NM_018852.1,762-780).
cgatttgcccaataaagaa

SEQ ID NO: 645844 - DNA, 19 bp, Mus musculus
  siRNA target sequence for Scn9a (NM_018852.1,768-786).
gcccaataaagaagatata

SEQ ID NO: 645845 - DNA, 19 bp, Mus musculus
  siRNA target sequence for Accn1 (NM_007384.1,615-633).
gtccctgagtcgcactaaa

SEQ ID NO: 645846 - DNA, 19 bp, Mus musculus
  siRNA target sequence for Accn1 (NM_007384.1,878-896).
ccaagggggacctctacta

SEQ ID NO: 645847 - DNA, 19 bp, Mus musculus
  siRNA target sequence for Accn1 (NM_007384.1,1142-1160).
cctcagtgtttacaaaata

SEQ ID NO: 645848 - DNA, 19 bp, Mus musculus
  siRNA target sequence for Accn1 (NM_007384.1,1293-1311).
gacagaggaaacaacgttt

SEQ ID NO: 645849 - DNA, 19 bp, Mus musculus
  siRNA target sequence for Accn1 (NM_007384.1,1316-1334).
caggagtgaaggttcagat

SEQ ID NO: 645850 - DNA, 19 bp, Mus musculus
  siRNA target sequence for Accn1 (NM_007384.1,1686-1704).
cctgacccgctacaacaaa

SEQ ID NO: 645851 - DNA, 19 bp, Mus musculus
  siRNA target sequence for Accn1 (NM_007384.1,1785-1803).
ctccgagaacattcttgtt

SEQ ID NO: 645852 - DNA, 19 bp, Mus musculus
  siRNA target sequence for Accn1 (NM_007384.1,1823-1841).
cgctcaattacgagacaat

SEQ ID NO: 645853 - DNA, 19 bp, Mus musculus
  siRNA target sequence for Accn1 (NM_007384.1,1824-1842).
gctcaattacgagacaatt

SEQ ID NO: 645854 - DNA, 19 bp, Mus musculus
  siRNA target sequence for Accn1 (NM_007384.1,1827-1845).
caattacgagacaattgaa

SEQ ID NO: 645855 - DNA, 19 bp, Mus musculus
  siRNA target sequence for Accn1 (NM_007384.1,1889-1907).
gtggtcaaatgggattgtt

SEQ ID NO: 645856 - DNA, 19 bp, Mus musculus
  siRNA target sequence for Accn1 (NM_007384.1,1908-1926).
cattggtgctagtatcctt

SEQ ID NO: 645857 - DNA, 19 bp, Mus musculus
  siRNA target sequence for Accn1 (NM_007384.1,1912-1930).
ggtgctagtatccttacaa

SEQ ID NO: 645858 - DNA, 19 bp, Mus musculus
  siRNA target sequence for Accn1 (NM_007384.1,1913-1931).
gtgctagtatccttacaat

SEQ ID NO: 645859 - DNA, 19 bp, Mus musculus
  siRNA target sequence for Accn1 (NM_007384.1,1919-1937).
gtatccttacaatactaga

SEQ ID NO: 645860 - DNA, 19 bp, Mus musculus
  siRNA target sequence for Accn1 (NM_007384.1,1928-1946).
caatactagagctctttga

SEQ ID NO: 645861 - DNA, 19 bp, Mus musculus
  siRNA target sequence for Accn1 (NM_007384.1,1950-1968).
catttacgagctgatcaaa

SEQ ID NO: 645862 - DNA, 19 bp, Mus musculus
  siRNA target sequence for Accn1 (NM_007384.1,1960-1978).
ctgatcaaagagaagctat

SEQ ID NO: 645863 - DNA, 19 bp, Mus musculus
  siRNA target sequence for Accn1 (NM_007384.1,1962-1980).
gatcaaagagaagctatta

SEQ ID NO: 645864 - DNA, 19 bp, Mus musculus
  siRNA target sequence for Accn1 (NM_007384.1,2048-2066).
caaaccactccgaaaccat

SEQ ID NO: 645865 - DNA, 19 bp, Mus musculus
  siRNA target sequence for Scnn1a (NM_011324.1,105-123).
ccatgaagggcaacaattt

SEQ ID NO: 645866 - DNA, 19 bp, Mus musculus
  siRNA target sequence for Scnn1a (NM_011324.1,174-192).
gggacaagcgtgaagaaca

SEQ ID NO: 645867 - DNA, 19 bp, Mus musculus
  siRNA target sequence for Scnn1a (NM_011324.1,414-432).
ctttgctgttcgaggaata

SEQ ID NO: 645868 - DNA, 19 bp, Mus musculus
  siRNA target sequence for Scnn1a (NM_011324.1,419-437).
ctgttcgaggaatacttca

SEQ ID NO: 645869 - DNA, 19 bp, Mus musculus
  siRNA target sequence for Scnn1a (NM_011324.1,443-461).
cccgtgagtctcaacatca

SEQ ID NO: 645870 - DNA, 19 bp, Mus musculus
  siRNA target sequence for Scnn1a (NM_011324.1,444-462).
ccgtgagtctcaacatcaa

SEQ ID NO: 645871 - DNA, 19 bp, Mus musculus
  siRNA target sequence for Scnn1a (NM_011324.1,496-514).
cactgtgtgcacccttaat

SEQ ID NO: 645872 - DNA, 19 bp, Mus musculus
  siRNA target sequence for Scnn1a (NM_011324.1,500-518).
gtgtgcacccttaatcctt

SEQ ID NO: 645873 - DNA, 19 bp, Mus musculus
  siRNA target sequence for Scnn1a (NM_011324.1,515-533).
ccttacagatacactgaaa

SEQ ID NO: 645874 - DNA, 19 bp, Mus musculus
  siRNA target sequence for Scnn1a (NM_011324.1,565-583).
cacggaacagacgcttttt

SEQ ID NO: 645875 - DNA, 19 bp, Mus musculus
  siRNA target sequence for Scnn1a (NM_011324.1,567-585).
cggaacagacgctttttga

SEQ ID NO: 645876 - DNA, 19 bp, Mus musculus
  siRNA target sequence for Scnn1a (NM_011324.1,576-594).
cgctttttgacctgtacaa

SEQ ID NO: 645877 - DNA, 19 bp, Mus musculus
  siRNA target sequence for Scnn1a (NM_011324.1,584-602).
gacctgtacaaatacaact

SEQ ID NO: 645878 - DNA, 19 bp, Mus musculus
  siRNA target sequence for Scnn1a (NM_011324.1,735-753).
ccagtgtacgcgacaacaa

SEQ ID NO: 645879 - DNA, 19 bp, Mus musculus
  siRNA target sequence for Scnn1a (NM_011324.1,736-754).
cagtgtacgcgacaacaat

SEQ ID NO: 645880 - DNA, 19 bp, Mus musculus
  siRNA target sequence for Scnn1a (NM_011324.1,864-882).
ggtaccgcttccattacat

SEQ ID NO: 645881 - DNA, 19 bp, Mus musculus
  siRNA target sequence for Scnn1a (NM_011324.1,875-893).
cattacatcaacattctgt

SEQ ID NO: 645882 - DNA, 19 bp, Mus musculus
  siRNA target sequence for Scnn1a (NM_011324.1,979-997).
caatcaggcgaattattct

SEQ ID NO: 645883 - DNA, 19 bp, Mus musculus
  siRNA target sequence for Scnn1a (NM_011324.1,1071-1089).
ccatgcctggagtcaacaa

SEQ ID NO: 645884 - DNA, 19 bp, Mus musculus
  siRNA target sequence for Scnn1a (NM_011324.1,1076-1094).
cctggagtcaacaatggtt

SEQ ID NO: 645885 - DNA, 19 bp, Mus musculus
  siRNA target sequence for Scnn1a (NM_011324.1,1234-1252).
gacctccatcagtatgaga

SEQ ID NO: 645886 - DNA, 19 bp, Mus musculus
  siRNA target sequence for Scnn1a (NM_011324.1,1236-1254).
cctccatcagtatgagaaa

SEQ ID NO: 645887 - DNA, 19 bp, Mus musculus
  siRNA target sequence for Scnn1a (NM_011324.1,1285-1303).
cggagactgcactgagaat

SEQ ID NO: 645888 - DNA, 19 bp, Mus musculus
  siRNA target sequence for Scnn1a (NM_011324.1,1349-1367).
cagcaggtgtgcattcact

SEQ ID NO: 645889 - DNA, 19 bp, Mus musculus
  siRNA target sequence for Scnn1a (NM_011324.1,1371-1389).
gcttccaggagaacatgat

SEQ ID NO: 645890 - DNA, 19 bp, Mus musculus
  siRNA target sequence for Scnn1a (NM_011324.1,1439-1457).
gagttctgtgactacctaa

SEQ ID NO: 645891 - DNA, 19 bp, Mus musculus
  siRNA target sequence for Scnn1a (NM_011324.1,1470-1488).
ggggctactgctactataa

SEQ ID NO: 645892 - DNA, 19 bp, Mus musculus
  siRNA target sequence for Scnn1a (NM_011324.1,1471-1489).
gggctactgctactataaa

SEQ ID NO: 645893 - DNA, 19 bp, Mus musculus
  siRNA target sequence for Scnn1a (NM_011324.1,1473-1491).
gctactgctactataaact

SEQ ID NO: 645894 - DNA, 19 bp, Mus musculus
  siRNA target sequence for Scnn1a (NM_011324.1,1548-1566).
gcagtgtgaccaactacaa

SEQ ID NO: 645895 - DNA, 19 bp, Mus musculus
  siRNA target sequence for Scnn1a (NM_011324.1,1627-1645).
gctatccttgcagaataat

SEQ ID NO: 645896 - DNA, 19 bp, Mus musculus
  siRNA target sequence for Scnn1a (NM_011324.1,1628-1646).
ctatccttgcagaataatt

SEQ ID NO: 645897 - DNA, 19 bp, Mus musculus
  siRNA target sequence for Scnn1a (NM_011324.1,1650-1668).
cgatcaacaacaaaagaaa

SEQ ID NO: 645898 - DNA, 19 bp, Mus musculus
  siRNA target sequence for Scnn1a (NM_011324.1,1671-1689).
gagttgctaaactcaacat

SEQ ID NO: 645899 - DNA, 19 bp, Mus musculus
  siRNA target sequence for Scnn1a (NM_011324.1,1700-1718).
gagctgaactataaaacta

SEQ ID NO: 645900 - DNA, 19 bp, Mus musculus
  siRNA target sequence for Scnn1a (NM_011324.1,1844-1862).
gtcatcacactcatcatgt

SEQ ID NO: 645901 - DNA, 19 bp, Mus musculus
  siRNA target sequence for Scnn1a (NM_011324.1,1846-1864).
catcacactcatcatgtta

SEQ ID NO: 645902 - DNA, 19 bp, Mus musculus
  siRNA target sequence for Scnn1b (NM_011325.1,229-247).
ggcagtggggagtcttcat

SEQ ID NO: 645903 - DNA, 19 bp, Mus musculus
  siRNA target sequence for Scnn1b (NM_011325.1,291-309).
ggcttcaagacgatgaact

SEQ ID NO: 645904 - DNA, 19 bp, Mus musculus
  siRNA target sequence for Scnn1b (NM_011325.1,315-333).
gcggtcaccgtctgcaatt

SEQ ID NO: 645905 - DNA, 19 bp, Mus musculus
  siRNA target sequence for Scnn1b (NM_011325.1,512-530).
ccacccggtggttctcaat

SEQ ID NO: 645906 - DNA, 19 bp, Mus musculus
  siRNA target sequence for Scnn1b (NM_011325.1,513-531).
cacccggtggttctcaatt

SEQ ID NO: 645907 - DNA, 19 bp, Mus musculus
  siRNA target sequence for Scnn1b (NM_011325.1,518-536).
ggtggttctcaatttgttt

SEQ ID NO: 645908 - DNA, 19 bp, Mus musculus
  siRNA target sequence for Scnn1b (NM_011325.1,612-630).
ctgtgcagtgccaatggaa

SEQ ID NO: 645909 - DNA, 19 bp, Mus musculus
  siRNA target sequence for Scnn1b (NM_011325.1,751-769).
cccctgatcgcataatcct

SEQ ID NO: 645910 - DNA, 19 bp, Mus musculus
  siRNA target sequence for Scnn1b (NM_011325.1,752-770).
ccctgatcgcataatccta

SEQ ID NO: 645911 - DNA, 19 bp, Mus musculus
  siRNA target sequence for Scnn1b (NM_011325.1,768-786).
ctagcttgcctgtttggaa

SEQ ID NO: 645912 - DNA, 19 bp, Mus musculus
  siRNA target sequence for Scnn1b (NM_011325.1,805-823).
ggaacttcacgcctatctt

SEQ ID NO: 645913 - DNA, 19 bp, Mus musculus
  siRNA target sequence for Scnn1b (NM_011325.1,837-855).
ggcaactgctacatcttca

SEQ ID NO: 645914 - DNA, 19 bp, Mus musculus
  siRNA target sequence for Scnn1b (NM_011325.1,838-856).
gcaactgctacatcttcaa

SEQ ID NO: 645915 - DNA, 19 bp, Mus musculus
  siRNA target sequence for Scnn1b (NM_011325.1,890-908).
caaccctgggactgaattt

SEQ ID NO: 645916 - DNA, 19 bp, Mus musculus
  siRNA target sequence for Scnn1b (NM_011325.1,893-911).
ccctgggactgaatttggt

SEQ ID NO: 645917 - DNA, 19 bp, Mus musculus
  siRNA target sequence for Scnn1b (NM_011325.1,976-994).
ctaggctgatgcttcatga

SEQ ID NO: 645918 - DNA, 19 bp, Mus musculus
  siRNA target sequence for Scnn1b (NM_011325.1,998-1016).
gaggacgtaccccttcatt

SEQ ID NO: 645919 - DNA, 19 bp, Mus musculus
  siRNA target sequence for Scnn1b (NM_011325.1,1003-1021).
cgtaccccttcattagaga

SEQ ID NO: 645920 - DNA, 19 bp, Mus musculus
  siRNA target sequence for Scnn1b (NM_011325.1,1123-1141).
gctccgatgttgccataaa

SEQ ID NO: 645921 - DNA, 19 bp, Mus musculus
  siRNA target sequence for Scnn1b (NM_011325.1,1126-1144).
ccgatgttgccataaagaa

SEQ ID NO: 645922 - DNA, 19 bp, Mus musculus
  siRNA target sequence for Scnn1b (NM_011325.1,1155-1173).
gtctacaacaccacctatt

SEQ ID NO: 645923 - DNA, 19 bp, Mus musculus
  siRNA target sequence for Scnn1b (NM_011325.1,1225-1243).
gcagttgtggccactactt

SEQ ID NO: 645924 - DNA, 19 bp, Mus musculus
  siRNA target sequence for Scnn1b (NM_011325.1,1226-1244).
cagttgtggccactactta

SEQ ID NO: 645925 - DNA, 19 bp, Mus musculus
  siRNA target sequence for Scnn1b (NM_011325.1,1254-1272).
cctgaaggagagaaatact

SEQ ID NO: 645926 - DNA, 19 bp, Mus musculus
  siRNA target sequence for Scnn1b (NM_011325.1,1290-1308).
ccagactgggcctattgct

SEQ ID NO: 645927 - DNA, 19 bp, Mus musculus
  siRNA target sequence for Scnn1b (NM_011325.1,1291-1309).
cagactgggcctattgcta

SEQ ID NO: 645928 - DNA, 19 bp, Mus musculus
  siRNA target sequence for Scnn1b (NM_011325.1,1295-1313).
ctgggcctattgctatcta

SEQ ID NO: 645929 - DNA, 19 bp, Mus musculus
  siRNA target sequence for Scnn1b (NM_011325.1,1297-1315).
gggcctattgctatctaaa

SEQ ID NO: 645930 - DNA, 19 bp, Mus musculus
  siRNA target sequence for Scnn1b (NM_011325.1,1300-1318).
cctattgctatctaaacct

SEQ ID NO: 645931 - DNA, 19 bp, Mus musculus
  siRNA target sequence for Scnn1b (NM_011325.1,1372-1390).
gcaatgacacccagtataa

SEQ ID NO: 645932 - DNA, 19 bp, Mus musculus
  siRNA target sequence for Scnn1b (NM_011325.1,1377-1395).
gacacccagtataagatga

SEQ ID NO: 645933 - DNA, 19 bp, Mus musculus
  siRNA target sequence for Scnn1b (NM_011325.1,1427-1445).
ctctgaggattggatctta

SEQ ID NO: 645934 - DNA, 19 bp, Mus musculus
  siRNA target sequence for Scnn1b (NM_011325.1,1429-1447).
ctgaggattggatcttaca

SEQ ID NO: 645935 - DNA, 19 bp, Mus musculus
  siRNA target sequence for Scnn1b (NM_011325.1,1465-1483).
gggaccagagctcgaatat

SEQ ID NO: 645936 - DNA, 19 bp, Mus musculus
  siRNA target sequence for Scnn1b (NM_011325.1,1467-1485).
gaccagagctcgaatatca

SEQ ID NO: 645937 - DNA, 19 bp, Mus musculus
  siRNA target sequence for Scnn1b (NM_011325.1,1501-1519).
gtattgtcaagctcaatat

SEQ ID NO: 645938 - DNA, 19 bp, Mus musculus
  siRNA target sequence for Scnn1b (NM_011325.1,1506-1524).
gtcaagctcaatatctact

SEQ ID NO: 645939 - DNA, 19 bp, Mus musculus
  siRNA target sequence for Scnn1b (NM_011325.1,1532-1550).
gttcaactaccgtaccatt

SEQ ID NO: 645940 - DNA, 19 bp, Mus musculus
  siRNA target sequence for Scnn1b (NM_011325.1,1554-1572).
gaatctccagccaacaata

SEQ ID NO: 645941 - DNA, 19 bp, Mus musculus
  siRNA target sequence for Scnn1b (NM_011325.1,1558-1576).
ctccagccaacaatattgt

SEQ ID NO: 645942 - DNA, 19 bp, Mus musculus
  siRNA target sequence for Scnn1b (NM_011325.1,1629-1647).
gtgctgtgcctcattgagt

SEQ ID NO: 645943 - DNA, 19 bp, Mus musculus
  siRNA target sequence for Scnn1b (NM_011325.1,1655-1673).
gatcattatcgacttcatt

SEQ ID NO: 645944 - DNA, 19 bp, Mus musculus
  siRNA target sequence for Scnn1g (NM_011326.1,127-145).
ccccaggcaccgaccatta

SEQ ID NO: 645945 - DNA, 19 bp, Mus musculus
  siRNA target sequence for Scnn1g (NM_011326.1,128-146).
cccaggcaccgaccattaa

SEQ ID NO: 645946 - DNA, 19 bp, Mus musculus
  siRNA target sequence for Scnn1g (NM_011326.1,254-272).
cagcagtggccctcattat

SEQ ID NO: 645947 - DNA, 19 bp, Mus musculus
  siRNA target sequence for Scnn1g (NM_011326.1,358-376).
gtcactatctgcaatatca

SEQ ID NO: 645948 - DNA, 19 bp, Mus musculus
  siRNA target sequence for Scnn1g (NM_011326.1,449-467).
ccttgtatggggtcaaaga

SEQ ID NO: 645949 - DNA, 19 bp, Mus musculus
  siRNA target sequence for Scnn1g (NM_011326.1,450-468).
cttgtatggggtcaaagat

SEQ ID NO: 645950 - DNA, 19 bp, Mus musculus
  siRNA target sequence for Scnn1g (NM_011326.1,533-551).
caccacccagatttctcaa

SEQ ID NO: 645951 - DNA, 19 bp, Mus musculus
  siRNA target sequence for Scnn1g (NM_011326.1,558-576).
cccattgttggtcttcaat

SEQ ID NO: 645952 - DNA, 19 bp, Mus musculus
  siRNA target sequence for Scnn1g (NM_011326.1,611-629).
ctggtcggaagcggaaaat

SEQ ID NO: 645953 - DNA, 19 bp, Mus musculus
  siRNA target sequence for Scnn1g (NM_011326.1,642-660).
catacacaaggcttctaat

SEQ ID NO: 645954 - DNA, 19 bp, Mus musculus
  siRNA target sequence for Scnn1g (NM_011326.1,646-664).
cacaaggcttctaatgtca

SEQ ID NO: 645955 - DNA, 19 bp, Mus musculus
  siRNA target sequence for Scnn1g (NM_011326.1,669-687).
cgttcatgagtcgaagaaa

SEQ ID NO: 645956 - DNA, 19 bp, Mus musculus
  siRNA target sequence for Scnn1g (NM_011326.1,700-718).
cagttgtgctcaaatgaca

SEQ ID NO: 645957 - DNA, 19 bp, Mus musculus
  siRNA target sequence for Scnn1g (NM_011326.1,741-759).
cttcagctcaggaatcaat

SEQ ID NO: 645958 - DNA, 19 bp, Mus musculus
  siRNA target sequence for Scnn1g (NM_011326.1,773-791).
ggtacaaacttcactacat

SEQ ID NO: 645959 - DNA, 19 bp, Mus musculus
  siRNA target sequence for Scnn1g (NM_011326.1,803-821).
cacaggtgcctctagagaa

SEQ ID NO: 645960 - DNA, 19 bp, Mus musculus
  siRNA target sequence for Scnn1g (NM_011326.1,836-854).
gctattctgccgaagaact

SEQ ID NO: 645961 - DNA, 19 bp, Mus musculus
  siRNA target sequence for Scnn1g (NM_011326.1,896-914).
ggaacttcactcttttcca

SEQ ID NO: 645962 - DNA, 19 bp, Mus musculus
  siRNA target sequence for Scnn1g (NM_011326.1,941-959).
cgttcaacaacagagaaaa

SEQ ID NO: 645963 - DNA, 19 bp, Mus musculus
  siRNA target sequence for Scnn1g (NM_011326.1,981-999).
catgggaggcagtgagtat

SEQ ID NO: 645964 - DNA, 19 bp, Mus musculus
  siRNA target sequence for Scnn1g (NM_011326.1,1005-1023).
gcaagtcatcttatacata

SEQ ID NO: 645965 - DNA, 19 bp, Mus musculus
  siRNA target sequence for Scnn1g (NM_011326.1,1217-1235).
gcgatgtgcccgtcacaaa

SEQ ID NO: 645966 - DNA, 19 bp, Mus musculus
  siRNA target sequence for Scnn1g (NM_011326.1,1219-1237).
gatgtgcccgtcacaaaca

SEQ ID NO: 645967 - DNA, 19 bp, Mus musculus
  siRNA target sequence for Scnn1g (NM_011326.1,1227-1245).
cgtcacaaacatctacaat

SEQ ID NO: 645968 - DNA, 19 bp, Mus musculus
  siRNA target sequence for Scnn1g (NM_011326.1,1258-1276).
ctccagatctgcctttact

SEQ ID NO: 645969 - DNA, 19 bp, Mus musculus
  siRNA target sequence for Scnn1g (NM_011326.1,1369-1387).
caccccaactggatgtatt

SEQ ID NO: 645970 - DNA, 19 bp, Mus musculus
  siRNA target sequence for Scnn1g (NM_011326.1,1372-1390).
cccaactggatgtattgct

SEQ ID NO: 645971 - DNA, 19 bp, Mus musculus
  siRNA target sequence for Scnn1g (NM_011326.1,1373-1391).
ccaactggatgtattgcta

SEQ ID NO: 645972 - DNA, 19 bp, Mus musculus
  siRNA target sequence for Scnn1g (NM_011326.1,1518-1536).
gaaatggttgctgaatgtt

SEQ ID NO: 645973 - DNA, 19 bp, Mus musculus
  siRNA target sequence for Scnn1g (NM_011326.1,1587-1605).
cctggccaagctcttgata

SEQ ID NO: 645974 - DNA, 19 bp, Mus musculus
  siRNA target sequence for Scnn1g (NM_011326.1,1588-1606).
ctggccaagctcttgatat

SEQ ID NO: 645975 - DNA, 19 bp, Mus musculus
  siRNA target sequence for Scnn1g (NM_011326.1,1592-1610).
ccaagctcttgatattcta

SEQ ID NO: 645976 - DNA, 19 bp, Mus musculus
  siRNA target sequence for Scnn1g (NM_011326.1,1596-1614).
gctcttgatattctacaaa

SEQ ID NO: 645977 - DNA, 19 bp, Mus musculus
  siRNA target sequence for Scnn1g (NM_011326.1,1660-1678).
gagatgctcctgtctaact

SEQ ID NO: 645978 - DNA, 19 bp, Mus musculus
  siRNA target sequence for Scnn1g (NM_011326.1,1662-1680).
gatgctcctgtctaacttt

SEQ ID NO: 645979 - DNA, 19 bp, Mus musculus
  siRNA target sequence for Scnn1g (NM_011326.1,1714-1732).
gtcgtctgtgtcatcgaaa

SEQ ID NO: 645980 - DNA, 19 bp, Mus musculus
  siRNA target sequence for Scnn1g (NM_011326.1,1717-1735).
gtctgtgtcatcgaaatca

SEQ ID NO: 645981 - DNA, 19 bp, Mus musculus
  siRNA target sequence for Scnn1g (NM_011326.1,1738-1756).
gaagtcttcttcattgatt

SEQ ID NO: 645982 - DNA, 19 bp, Mus musculus
  siRNA target sequence for Scnn1g (NM_011326.1,1741-1759).
gtcttcttcattgatttct

SEQ ID NO: 645983 - DNA, 19 bp, Mus musculus
  siRNA target sequence for Scnn1g (NM_011326.1,1884-1902).
cgatgatctgcccactttt

SEQ ID NO: 645984 - DNA, 19 bp, Mus musculus
  siRNA target sequence for Scnn1g (NM_011326.1,1885-1903).
gatgatctgcccactttta

SEQ ID NO: 645985 - DNA, 19 bp, Mus musculus
  siRNA target sequence for Scnn1g (NM_011326.1,1957-1975).
ccccccagatacaatacct

SEQ ID NO: 645986 - DNA, 19 bp, Mus musculus
  siRNA target sequence for Scnn1g (NM_011326.1,1958-1976).
cccccagatacaatacctt

SEQ ID NO: 645987 - DNA, 19 bp, Mus musculus
  siRNA target sequence for Scnn1g (NM_011326.1,2015-2033).
ctcagttgaccaatgagtt

SEQ ID NO: 645988 - DNA, 19 bp, Mus musculus
  siRNA target sequence for Accn4 (NM_183022.1,151-169).
gtgcaaaatcaaatttgct

SEQ ID NO: 645989 - DNA, 19 bp, Mus musculus
  siRNA target sequence for Accn4 (NM_183022.1,363-381).
cactggctgcctttctgta

SEQ ID NO: 645990 - DNA, 19 bp, Mus musculus
  siRNA target sequence for Accn4 (NM_183022.1,513-531).
cactcagcgatgctgatat

SEQ ID NO: 645991 - DNA, 19 bp, Mus musculus
  siRNA target sequence for Accn4 (NM_183022.1,662-680).
ctcaagagctgcaacttca

SEQ ID NO: 645992 - DNA, 19 bp, Mus musculus
  siRNA target sequence for Accn4 (NM_183022.1,723-741).
ctcgctatgggaagtgtta

SEQ ID NO: 645993 - DNA, 19 bp, Mus musculus
  siRNA target sequence for Accn4 (NM_183022.1,977-995).
caggaacagcggctaactt

SEQ ID NO: 645994 - DNA, 19 bp, Mus musculus
  siRNA target sequence for Accn4 (NM_183022.1,979-997).
ggaacagcggctaacttat

SEQ ID NO: 645995 - DNA, 19 bp, Mus musculus
  siRNA target sequence for Accn4 (NM_183022.1,1057-1075).
gggctactcagcctatagt

SEQ ID NO: 645996 - DNA, 19 bp, Mus musculus
  siRNA target sequence for Accn4 (NM_183022.1,1059-1077).
gctactcagcctatagtgt

SEQ ID NO: 645997 - DNA, 19 bp, Mus musculus
  siRNA target sequence for Accn4 (NM_183022.1,1159-1177).
gaccatctgcccaccaaat

SEQ ID NO: 645998 - DNA, 19 bp, Mus musculus
  siRNA target sequence for Accn4 (NM_183022.1,1172-1190).
ccaaatatctacattgaat

SEQ ID NO: 645999 - DNA, 19 bp, Mus musculus
  siRNA target sequence for Accn4 (NM_183022.1,1266-1284).
ctcgttacggcaaagagat

SEQ ID NO: 646000 - DNA, 19 bp, Mus musculus
  siRNA target sequence for Accn4 (NM_183022.1,1342-1360).
ccgcaatgagacctatata

SEQ ID NO: 646001 - DNA, 19 bp, Mus musculus
  siRNA target sequence for Accn4 (NM_183022.1,1343-1361).
cgcaatgagacctatataa

SEQ ID NO: 646002 - DNA, 19 bp, Mus musculus
  siRNA target sequence for Accn4 (NM_183022.1,1378-1396).
cctggatgtctttttcgaa

SEQ ID NO: 646003 - DNA, 19 bp, Mus musculus
  siRNA target sequence for Accn5 (NM_021370.1,31-49).
ggaacatactgagaaatca

SEQ ID NO: 646004 - DNA, 19 bp, Mus musculus
  siRNA target sequence for Accn5 (NM_021370.1,58-76).
cgcggagaaaggactctta

SEQ ID NO: 646005 - DNA, 19 bp, Mus musculus
  siRNA target sequence for Accn5 (NM_021370.1,119-137).
ccaactgaccggaagaagt

SEQ ID NO: 646006 - DNA, 19 bp, Mus musculus
  siRNA target sequence for Accn5 (NM_021370.1,120-138).
caactgaccggaagaagtt

SEQ ID NO: 646007 - DNA, 19 bp, Mus musculus
  siRNA target sequence for Accn5 (NM_021370.1,251-269).
ctcttggtgtggcaaatct

SEQ ID NO: 646008 - DNA, 19 bp, Mus musculus
  siRNA target sequence for Accn5 (NM_021370.1,297-315).
ggccaacgacaacatctat

SEQ ID NO: 646009 - DNA, 19 bp, Mus musculus
  siRNA target sequence for Accn5 (NM_021370.1,298-316).
gccaacgacaacatctata

SEQ ID NO: 646010 - DNA, 19 bp, Mus musculus
  siRNA target sequence for Accn5 (NM_021370.1,300-318).
caacgacaacatctataga

SEQ ID NO: 646011 - DNA, 19 bp, Mus musculus
  siRNA target sequence for Accn5 (NM_021370.1,303-321).
cgacaacatctatagaagt

SEQ ID NO: 646012 - DNA, 19 bp, Mus musculus
  siRNA target sequence for Accn5 (NM_021370.1,320-338).
gttcagtatgtggaaaaaa

SEQ ID NO: 646013 - DNA, 19 bp, Mus musculus
  siRNA target sequence for Accn5 (NM_021370.1,359-377).
ctctgtaacttgaacagat

SEQ ID NO: 646014 - DNA, 19 bp, Mus musculus
  siRNA target sequence for Accn5 (NM_021370.1,384-402).
cagaagcagtatctagatt

SEQ ID NO: 646015 - DNA, 19 bp, Mus musculus
  siRNA target sequence for Accn5 (NM_021370.1,443-461).
ctccgccttcaggaaatca

SEQ ID NO: 646016 - DNA, 19 bp, Mus musculus
  siRNA target sequence for Accn5 (NM_021370.1,445-463).
ccgccttcaggaaatcagt

SEQ ID NO: 646017 - DNA, 19 bp, Mus musculus
  siRNA target sequence for Accn5 (NM_021370.1,478-496).
ctctccagagaccttagat

SEQ ID NO: 646018 - DNA, 19 bp, Mus musculus
  siRNA target sequence for Accn5 (NM_021370.1,485-503).
gagaccttagattttgtta

SEQ ID NO: 646019 - DNA, 19 bp, Mus musculus
  siRNA target sequence for Accn5 (NM_021370.1,489-507).
ccttagattttgttacgaa

SEQ ID NO: 646020 - DNA, 19 bp, Mus musculus
  siRNA target sequence for Accn5 (NM_021370.1,544-562).
caatggtttttatctcaat

SEQ ID NO: 646021 - DNA, 19 bp, Mus musculus
  siRNA target sequence for Accn5 (NM_021370.1,584-602).
gagttctttggcaaaacat

SEQ ID NO: 646022 - DNA, 19 bp, Mus musculus
  siRNA target sequence for Accn5 (NM_021370.1,603-621).
gcagtccaaaggatttcaa

SEQ ID NO: 646023 - DNA, 19 bp, Mus musculus
  siRNA target sequence for Accn5 (NM_021370.1,606-624).
gtccaaaggatttcaaaca

SEQ ID NO: 646024 - DNA, 19 bp, Mus musculus
  siRNA target sequence for Accn5 (NM_021370.1,614-632).
gatttcaaacacgtcttta

SEQ ID NO: 646025 - DNA, 19 bp, Mus musculus
  siRNA target sequence for Accn5 (NM_021370.1,619-637).
caaacacgtctttactgaa

SEQ ID NO: 646026 - DNA, 19 bp, Mus musculus
  siRNA target sequence for Accn5 (NM_021370.1,661-679).
ctacggtgagaatatccaa

SEQ ID NO: 646027 - DNA, 19 bp, Mus musculus
  siRNA target sequence for Accn5 (NM_021370.1,731-749).
gtccatcaggaggaattca

SEQ ID NO: 646028 - DNA, 19 bp, Mus musculus
  siRNA target sequence for Accn5 (NM_021370.1,733-751).
ccatcaggaggaattcact

SEQ ID NO: 646029 - DNA, 19 bp, Mus musculus
  siRNA target sequence for Accn5 (NM_021370.1,827-845).
gatggcttaggtttgtctt

SEQ ID NO: 646030 - DNA, 19 bp, Mus musculus
  siRNA target sequence for Accn5 (NM_021370.1,907-925).
cccatggggagaatgcaat

SEQ ID NO: 646031 - DNA, 19 bp, Mus musculus
  siRNA target sequence for Accn5 (NM_021370.1,917-935).
gaatgcaatcccaacatca

SEQ ID NO: 646032 - DNA, 19 bp, Mus musculus
  siRNA target sequence for Accn5 (NM_021370.1,927-945).
ccaacatcaagctgagaaa

SEQ ID NO: 646033 - DNA, 19 bp, Mus musculus
  siRNA target sequence for Accn5 (NM_021370.1,938-956).
ctgagaaacttcattacct

SEQ ID NO: 646034 - DNA, 19 bp, Mus musculus
  siRNA target sequence for Accn5 (NM_021370.1,1053-1071).
gtgacctactagaatacta

SEQ ID NO: 646035 - DNA, 19 bp, Mus musculus
  siRNA target sequence for Accn5 (NM_021370.1,1055-1073).
gacctactagaatactaca

SEQ ID NO: 646036 - DNA, 19 bp, Mus musculus
  siRNA target sequence for Accn5 (NM_021370.1,1058-1076).
ctactagaatactacaact

SEQ ID NO: 646037 - DNA, 19 bp, Mus musculus
  siRNA target sequence for Accn5 (NM_021370.1,1178-1196).
gctactgtttcttattcta

SEQ ID NO: 646038 - DNA, 19 bp, Mus musculus
  siRNA target sequence for Accn5 (NM_021370.1,1221-1239).
ggtttcttgccaagaaatt

SEQ ID NO: 646039 - DNA, 19 bp, Mus musculus
  siRNA target sequence for Accn5 (NM_021370.1,1267-1285).
gaatctcgtgaacattgaa

SEQ ID NO: 646040 - DNA, 19 bp, Mus musculus
  siRNA target sequence for Accn5 (NM_021370.1,1271-1289).
ctcgtgaacattgaaataa

SEQ ID NO: 646041 - DNA, 19 bp, Mus musculus
  siRNA target sequence for Accn5 (NM_021370.1,1291-1309).
ctatagcgacttaaactat

SEQ ID NO: 646042 - DNA, 19 bp, Mus musculus
  siRNA target sequence for Accn5 (NM_021370.1,1296-1314).
gcgacttaaactataagat

SEQ ID NO: 646043 - DNA, 19 bp, Mus musculus
  siRNA target sequence for Accn5 (NM_021370.1,1297-1315).
cgacttaaactataagata

SEQ ID NO: 646044 - DNA, 19 bp, Mus musculus
  siRNA target sequence for Accn5 (NM_021370.1,1298-1316).
gacttaaactataagataa

SEQ ID NO: 646045 - DNA, 19 bp, Mus musculus
  siRNA target sequence for Accn5 (NM_021370.1,1333-1351).
cgtgagtgtgcctgagtta

SEQ ID NO: 646046 - DNA, 19 bp, Mus musculus
  siRNA target sequence for Accn5 (NM_021370.1,1384-1402).
ctgtggagctagtttgatt

SEQ ID NO: 646047 - DNA, 19 bp, Mus musculus
  siRNA target sequence for Accn5 (NM_021370.1,1388-1406).
ggagctagtttgattacaa

SEQ ID NO: 646048 - DNA, 19 bp, Mus musculus
  siRNA target sequence for Accn5 (NM_021370.1,1389-1407).
gagctagtttgattacaat

SEQ ID NO: 646049 - DNA, 19 bp, Mus musculus
  siRNA target sequence for Accn5 (NM_021370.1,1391-1409).
gctagtttgattacaatta

SEQ ID NO: 646050 - DNA, 19 bp, Mus musculus
  siRNA target sequence for Accn5 (NM_021370.1,1392-1410).
ctagtttgattacaattat

SEQ ID NO: 646051 - DNA, 19 bp, Mus musculus
  siRNA target sequence for Accn5 (NM_021370.1,1395-1413).
gtttgattacaattataga

SEQ ID NO: 646052 - DNA, 19 bp, Mus musculus
  siRNA target sequence for Accn5 (NM_021370.1,1421-1439).
gaatattttttcaccaatt

SEQ ID NO: 646053 - DNA, 19 bp, Mus musculus
  siRNA target sequence for Accn5 (NM_021370.1,1459-1477).
ctttttgctgaaaatactt

SEQ ID NO: 646054 - DNA, 19 bp, Mus musculus
  siRNA target sequence for 0610039P13Rik (NM_028752.1,328-346).
cgtggaatgtcaactacaa

SEQ ID NO: 646055 - DNA, 19 bp, Mus musculus
  siRNA target sequence for 0610039P13Rik (NM_028752.1,567-585).
ctcctggatttgaagatca

SEQ ID NO: 646056 - DNA, 19 bp, Mus musculus
  siRNA target sequence for 0610039P13Rik (NM_028752.1,875-893).
ctcagaacggcagatctta

SEQ ID NO: 646057 - DNA, 19 bp, Mus musculus
  siRNA target sequence for 0610039P13Rik (NM_028752.1,986-1004).
caagctgttgaaacagaat

SEQ ID NO: 646058 - DNA, 19 bp, Mus musculus
  siRNA target sequence for 4921522D01Rik (NM_029772.1,205-223).
gcttacttcaggaaggtta

SEQ ID NO: 646059 - DNA, 19 bp, Mus musculus
  siRNA target sequence for 4921522D01Rik (NM_029772.1,206-224).
cttacttcaggaaggttat

SEQ ID NO: 646060 - DNA, 19 bp, Mus musculus
  siRNA target sequence for 4921522D01Rik (NM_029772.1,262-280).
gtcaccaccaactcctttt

SEQ ID NO: 646061 - DNA, 19 bp, Mus musculus
  siRNA target sequence for 4921522D01Rik (NM_029772.1,266-284).
ccaccaactcctttttact

SEQ ID NO: 646062 - DNA, 19 bp, Mus musculus
  siRNA target sequence for 4921522D01Rik (NM_029772.1,293-311).
ggactaattatgacataca

SEQ ID NO: 646063 - DNA, 19 bp, Mus musculus
  siRNA target sequence for 4921522D01Rik (NM_029772.1,310-328).
caattcgagtttttcagaa

SEQ ID NO: 646064 - DNA, 19 bp, Mus musculus
  siRNA target sequence for 4921522D01Rik (NM_029772.1,315-333).
cgagtttttcagaaccttt

SEQ ID NO: 646065 - DNA, 19 bp, Mus musculus
  siRNA target sequence for 4921522D01Rik (NM_029772.1,351-369).
ctatgtggaccccattaca

SEQ ID NO: 646066 - DNA, 19 bp, Mus musculus
  siRNA target sequence for 4921522D01Rik (NM_029772.1,496-514).
ctacgaatcctcaagctta

SEQ ID NO: 646067 - DNA, 19 bp, Mus musculus
  siRNA target sequence for 4921522D01Rik (NM_029772.1,499-517).
cgaatcctcaagcttatct

SEQ ID NO: 646068 - DNA, 19 bp, Mus musculus
  siRNA target sequence for 4921522D01Rik (NM_029772.1,624-642).
cctgggattctgcctattt

SEQ ID NO: 646069 - DNA, 19 bp, Mus musculus
  siRNA target sequence for 4921522D01Rik (NM_029772.1,751-769).
ctggacaagaggaagttta

SEQ ID NO: 646070 - DNA, 19 bp, Mus musculus
  siRNA target sequence for 4921522D01Rik (NM_029772.1,782-800).
cgtttactatcctcttcat

SEQ ID NO: 646071 - DNA, 19 bp, Mus musculus
  siRNA target sequence for 4921522D01Rik (NM_029772.1,857-875).
cggaggattccatgaaaaa

SEQ ID NO: 646072 - DNA, 19 bp, Mus musculus
  siRNA target sequence for 4921522D01Rik (NM_029772.1,859-877).
gaggattccatgaaaaagt

SEQ ID NO: 646073 - DNA, 19 bp, Mus musculus
  siRNA target sequence for 4921522D01Rik (NM_029772.1,989-1007).
gtagcatgaacttcattga

SEQ ID NO: 646074 - DNA, 19 bp, Mus musculus
  siRNA target sequence for 4921522D01Rik (NM_029772.1,1108-1126).
ctggacaaccaagatgtta

SEQ ID NO: 646075 - DNA, 19 bp, Mus musculus
  siRNA target sequence for 4921522D01Rik (NM_029772.1,1110-1128).
ggacaaccaagatgttatt

SEQ ID NO: 646076 - DNA, 19 bp, Mus musculus
  siRNA target sequence for 4921522D01Rik (NM_029772.1,1143-1161).
ggagctctactgtgagatt

SEQ ID NO: 646077 - DNA, 19 bp, Mus musculus
  siRNA target sequence for 4921522D01Rik (NM_029772.1,1175-1193).
gcctgatgttggaagacat

SEQ ID NO: 646078 - DNA, 19 bp, Mus musculus
  siRNA target sequence for 4921522D01Rik (NM_029772.1,1212-1230).
cagcctctcgggactaagt

SEQ ID NO: 646079 - DNA, 19 bp, Mus musculus
  siRNA target sequence for 4933412L05 (NM_177866.2,85-103).
cacctgggccctaagagaa

SEQ ID NO: 646080 - DNA, 19 bp, Mus musculus
  siRNA target sequence for 4933412L05 (NM_177866.2,87-105).
cctgggccctaagagaaaa

SEQ ID NO: 646081 - DNA, 19 bp, Mus musculus
  siRNA target sequence for 4933412L05 (NM_177866.2,182-200).
gggatgtacaggaattcat

SEQ ID NO: 646082 - DNA, 19 bp, Mus musculus
  siRNA target sequence for 4933412L05 (NM_177866.2,289-307).
gcccttcgcaccaactctt

SEQ ID NO: 646083 - DNA, 19 bp, Mus musculus
  siRNA target sequence for 4933412L05 (NM_177866.2,305-323).
cttatctcggtcagaaaca

SEQ ID NO: 646084 - DNA, 19 bp, Mus musculus
  siRNA target sequence for 4933412L05 (NM_177866.2,330-348).
gctattctcgaccatagat

SEQ ID NO: 646085 - DNA, 19 bp, Mus musculus
  siRNA target sequence for 4933412L05 (NM_177866.2,336-354).
ctcgaccatagatgacatt

SEQ ID NO: 646086 - DNA, 19 bp, Mus musculus
  siRNA target sequence for 4933412L05 (NM_177866.2,338-356).
cgaccatagatgacattgt

SEQ ID NO: 646087 - DNA, 19 bp, Mus musculus
  siRNA target sequence for 4933412L05 (NM_177866.2,355-373).
gtgttgacgatccttatct

SEQ ID NO: 646088 - DNA, 19 bp, Mus musculus
  siRNA target sequence for 4933412L05 (NM_177866.2,394-412).
cttaacggcttctggattt

SEQ ID NO: 646089 - DNA, 19 bp, Mus musculus
  siRNA target sequence for 4933412L05 (NM_177866.2,436-454).
ctcaacttcgcaattgtct

SEQ ID NO: 646090 - DNA, 19 bp, Mus musculus
  siRNA target sequence for 4933412L05 (NM_177866.2,445-463).
gcaattgtctttatcttgt

SEQ ID NO: 646091 - DNA, 19 bp, Mus musculus
  siRNA target sequence for 4933412L05 (NM_177866.2,446-464).
caattgtctttatcttgtt

SEQ ID NO: 646092 - DNA, 19 bp, Mus musculus
  siRNA target sequence for 4933412L05 (NM_177866.2,462-480).
gtttatggggttcttcata

SEQ ID NO: 646093 - DNA, 19 bp, Mus musculus
  siRNA target sequence for 4933412L05 (NM_177866.2,553-571).
gaacccctggccagaatca

SEQ ID NO: 646094 - DNA, 19 bp, Mus musculus
  siRNA target sequence for 4933412L05 (NM_177866.2,562-580).
gccagaatcatcaaggtta

SEQ ID NO: 646095 - DNA, 19 bp, Mus musculus
  siRNA target sequence for 4933412L05 (NM_177866.2,563-581).
ccagaatcatcaaggttat

SEQ ID NO: 646096 - DNA, 19 bp, Mus musculus
  siRNA target sequence for 4933412L05 (NM_177866.2,630-648).
cttcatgctggtattctct

SEQ ID NO: 646097 - DNA, 19 bp, Mus musculus
  siRNA target sequence for 4933412L05 (NM_177866.2,660-678).
cacgctcttcggtgcattt

SEQ ID NO: 646098 - DNA, 19 bp, Mus musculus
  siRNA target sequence for 4933412L05 (NM_177866.2,662-680).
cgctcttcggtgcatttgt

SEQ ID NO: 646099 - DNA, 19 bp, Mus musculus
  siRNA target sequence for 4933412L05 (NM_177866.2,710-728).
ccctgtacacgctcttcat

SEQ ID NO: 646100 - DNA, 19 bp, Mus musculus
  siRNA target sequence for 4933412L05 (NM_177866.2,712-730).
ctgtacacgctcttcatct

SEQ ID NO: 646101 - DNA, 19 bp, Mus musculus
  siRNA target sequence for 4933412L05 (NM_177866.2,768-786).
cttccagatggatgaaaga

SEQ ID NO: 646102 - DNA, 19 bp, Mus musculus
  siRNA target sequence for 4933412L05 (NM_177866.2,834-852).
caccctcggtgccttcatt

SEQ ID NO: 646103 - DNA, 19 bp, Mus musculus
  siRNA target sequence for 4933412L05 (NM_177866.2,881-899).
ccacaaacctggaacaaat

SEQ ID NO: 646104 - DNA, 19 bp, Mus musculus
  siRNA target sequence for 4933412L05 (NM_177866.2,884-902).
caaacctggaacaaatgat

SEQ ID NO: 646105 - DNA, 19 bp, Mus musculus
  siRNA target sequence for 4933412L05 (NM_177866.2,919-937).
gagggacacctgaacataa

SEQ ID NO: 646106 - DNA, 19 bp, Mus musculus
  siRNA target sequence for 4933412L05 (NM_177866.2,922-940).
ggacacctgaacataaagt

SEQ ID NO: 646107 - DNA, 19 bp, Mus musculus
  siRNA target sequence for 4933412L05 (NM_177866.2,923-941).
gacacctgaacataaagtt

SEQ ID NO: 646108 - DNA, 19 bp, Mus musculus
  siRNA target sequence for 4933412L05 (NM_177866.2,925-943).
cacctgaacataaagttta

SEQ ID NO: 646109 - DNA, 19 bp, Mus musculus
  siRNA target sequence for 4933412L05 (NM_177866.2,981-999).
gccactggtgcattgtaca

SEQ ID NO: 646110 - DNA, 19 bp, Mus musculus
  siRNA target sequence for 4933412L05 (NM_177866.2,1054-1072).
ctgagtaacctcacagaaa

SEQ ID NO: 646111 - DNA, 19 bp, Mus musculus
  siRNA target sequence for 4933412L05 (NM_177866.2,1142-1160).
gagaggaactcaacatgat

SEQ ID NO: 646112 - DNA, 19 bp, Mus musculus
  siRNA target sequence for 4933412L05 (NM_177866.2,1207-1225).
gtgatcctacacaagtata

SEQ ID NO: 646113 - DNA, 19 bp, Mus musculus
  siRNA target sequence for 4933412L05 (NM_177866.2,1265-1283).
gggctaacaagcaagactt

SEQ ID NO: 646114 - DNA, 19 bp, Mus musculus
  siRNA target sequence for 4933412L05 (NM_177866.2,1336-1354).
gttaacaaacacaagttca

SEQ ID NO: 646115 - DNA, 19 bp, Mus musculus
  siRNA target sequence for A530023G15Rik (NM_177393.2,216-234).
ggaagcccagccagttact

SEQ ID NO: 646116 - DNA, 19 bp, Mus musculus
  siRNA target sequence for A530023G15Rik (NM_177393.2,222-240).
ccagccagttactgacttt

SEQ ID NO: 646117 - DNA, 19 bp, Mus musculus
  siRNA target sequence for A530023G15Rik (NM_177393.2,235-253).
gactttggtcctgatgaat

SEQ ID NO: 646118 - DNA, 19 bp, Mus musculus
  siRNA target sequence for A530023G15Rik (NM_177393.2,237-255).
ctttggtcctgatgaatct

SEQ ID NO: 646119 - DNA, 19 bp, Mus musculus
  siRNA target sequence for A530023G15Rik (NM_177393.2,271-289).
gacatactctggattaata

SEQ ID NO: 646120 - DNA, 19 bp, Mus musculus
  siRNA target sequence for A530023G15Rik (NM_177393.2,313-331).
cgcatctgtgccatcatca

SEQ ID NO: 646121 - DNA, 19 bp, Mus musculus
  siRNA target sequence for A530023G15Rik (NM_177393.2,375-393).
ctatcctcctcttcagtat

SEQ ID NO: 646122 - DNA, 19 bp, Mus musculus
  siRNA target sequence for A530023G15Rik (NM_177393.2,399-417).
cttcaccttggacacttta

SEQ ID NO: 646123 - DNA, 19 bp, Mus musculus
  siRNA target sequence for A530023G15Rik (NM_177393.2,457-475).
cacatacggggaattgtca

SEQ ID NO: 646124 - DNA, 19 bp, Mus musculus
  siRNA target sequence for A530023G15Rik (NM_177393.2,479-497).
gtgatagctcctatgtgaa

SEQ ID NO: 646125 - DNA, 19 bp, Mus musculus
  siRNA target sequence for A530023G15Rik (NM_177393.2,498-516).
ggatcgctggtgtgttttt

SEQ ID NO: 646126 - DNA, 19 bp, Mus musculus
  siRNA target sequence for A530023G15Rik (NM_177393.2,517-535).
gatggattcatggtctttt

SEQ ID NO: 646127 - DNA, 19 bp, Mus musculus
  siRNA target sequence for A530023G15Rik (NM_177393.2,542-560).
gggtatctcttgtgttaca

SEQ ID NO: 646128 - DNA, 19 bp, Mus musculus
  siRNA target sequence for A530023G15Rik (NM_177393.2,555-573).
gttacaggtgtttgaaata

SEQ ID NO: 646129 - DNA, 19 bp, Mus musculus
  siRNA target sequence for A530023G15Rik (NM_177393.2,564-582).
gtttgaaatagctgacata

SEQ ID NO: 646130 - DNA, 19 bp, Mus musculus
  siRNA target sequence for A530023G15Rik (NM_177393.2,615-633).
gatcccacggccactcatt

SEQ ID NO: 646131 - DNA, 19 bp, Mus musculus
  siRNA target sequence for A530023G15Rik (NM_177393.2,619-637).
ccacggccactcattatga

SEQ ID NO: 646132 - DNA, 19 bp, Mus musculus
  siRNA target sequence for A530023G15Rik (NM_177393.2,620-638).
cacggccactcattatgat

SEQ ID NO: 646133 - DNA, 19 bp, Mus musculus
  siRNA target sequence for A530023G15Rik (NM_177393.2,639-657).
ccgggctttcaggatttat

SEQ ID NO: 646134 - DNA, 19 bp, Mus musculus
  siRNA target sequence for A530023G15Rik (NM_177393.2,640-658).
cgggctttcaggatttatt

SEQ ID NO: 646135 - DNA, 19 bp, Mus musculus
  siRNA target sequence for A530023G15Rik (NM_177393.2,651-669).
gatttatttccgattcgaa

SEQ ID NO: 646136 - DNA, 19 bp, Mus musculus
  siRNA target sequence for A530023G15Rik (NM_177393.2,672-690).
gccaaggacaagaattaca

SEQ ID NO: 646137 - DNA, 19 bp, Mus musculus
  siRNA target sequence for A530023G15Rik (NM_177393.2,712-730).
gaacaaatatggagtgttt

SEQ ID NO: 646138 - DNA, 19 bp, Mus musculus
  siRNA target sequence for A530023G15Rik (NM_177393.2,772-790).
ggagttcaaatgtttggaa

SEQ ID NO: 646139 - DNA, 19 bp, Mus musculus
  siRNA target sequence for A530023G15Rik (NM_177393.2,798-816).
ctaccactgtgtagtcaat

SEQ ID NO: 646140 - DNA, 19 bp, Mus musculus
  siRNA target sequence for A530023G15Rik (NM_177393.2,839-857).
cctggaatagcttagctat

SEQ ID NO: 646141 - DNA, 19 bp, Mus musculus
  siRNA target sequence for A530023G15Rik (NM_177393.2,840-858).
ctggaatagcttagctatt

SEQ ID NO: 646142 - DNA, 19 bp, Mus musculus
  siRNA target sequence for A530023G15Rik (NM_177393.2,843-861).
gaatagcttagctattcca

SEQ ID NO: 646143 - DNA, 19 bp, Mus musculus
  siRNA target sequence for A530023G15Rik (NM_177393.2,872-890).
gctccccagagctagaaga

SEQ ID NO: 646144 - DNA, 19 bp, Mus musculus
  siRNA target sequence for A530023G15Rik (NM_177393.2,883-901).
ctagaagaaggctatcaat

SEQ ID NO: 646145 - DNA, 19 bp, Mus musculus
  siRNA target sequence for A530023G15Rik (NM_177393.2,905-923).
cgccaggatttaaatgcat

SEQ ID NO: 646146 - DNA, 19 bp, Mus musculus
  siRNA target sequence for A530023G15Rik (NM_177393.2,979-997).
gagataggtctgtcttact

SEQ ID NO: 646147 - DNA, 19 bp, Mus musculus
  siRNA target sequence for AI118078 (NM_172923.1,152-170).
gctttggttacatctttca

SEQ ID NO: 646148 - DNA, 19 bp, Mus musculus
  siRNA target sequence for AI118078 (NM_172923.1,153-171).
ctttggttacatctttcaa

SEQ ID NO: 646149 - DNA, 19 bp, Mus musculus
  siRNA target sequence for AI118078 (NM_172923.1,220-238).
gattatctcccaacaagta

SEQ ID NO: 646150 - DNA, 19 bp, Mus musculus
  siRNA target sequence for AI118078 (NM_172923.1,333-351).
cacagctcctgtcgaattt

SEQ ID NO: 646151 - DNA, 19 bp, Mus musculus
  siRNA target sequence for AI118078 (NM_172923.1,411-429).
cagccgtatggcaggtatt

SEQ ID NO: 646152 - DNA, 19 bp, Mus musculus
  siRNA target sequence for AI118078 (NM_172923.1,413-431).
gccgtatggcaggtatttt

SEQ ID NO: 646153 - DNA, 19 bp, Mus musculus
  siRNA target sequence for AI118078 (NM_172923.1,499-517).
ggagcttctcatagataca

SEQ ID NO: 646154 - DNA, 19 bp, Mus musculus
  siRNA target sequence for AI118078 (NM_172923.1,567-585).
ggatcagtctggtcattct

SEQ ID NO: 646155 - DNA, 19 bp, Mus musculus
  siRNA target sequence for AI118078 (NM_172923.1,637-655).
ggattacatcgaaaacaaa

SEQ ID NO: 646156 - DNA, 19 bp, Mus musculus
  siRNA target sequence for AI118078 (NM_172923.1,836-854).
gtcacccagcagtatgaga

SEQ ID NO: 646157 - DNA, 19 bp, Mus musculus
  siRNA target sequence for AI118078 (NM_172923.1,884-902).
gaaagactgacgcaaatct

SEQ ID NO: 646158 - DNA, 19 bp, Mus musculus
  siRNA target sequence for AI118078 (NM_172923.1,1090-1108).
gctgaggccctctcaagaa

SEQ ID NO: 646159 - DNA, 19 bp, Mus musculus
  siRNA target sequence for AI118078 (NM_172923.1,1134-1152).
gctacatcagccaatacta

SEQ ID NO: 646160 - DNA, 19 bp, Mus musculus
  siRNA target sequence for AI118078 (NM_172923.1,1714-1732).
cagatctttggaatccaaa

SEQ ID NO: 646161 - DNA, 19 bp, Mus musculus
  siRNA target sequence for Catsper1 (NM_139301.1,14-32).
caaggagggacgagtctta

SEQ ID NO: 646162 - DNA, 19 bp, Mus musculus
  siRNA target sequence for Catsper1 (NM_139301.1,18-36).
gagggacgagtcttaccat

SEQ ID NO: 646163 - DNA, 19 bp, Mus musculus
  siRNA target sequence for Catsper1 (NM_139301.1,39-57).
gacacaccccggtagctta

SEQ ID NO: 646164 - DNA, 19 bp, Mus musculus
  siRNA target sequence for Catsper1 (NM_139301.1,102-120).
cctgcataggccaaaccaa

SEQ ID NO: 646165 - DNA, 19 bp, Mus musculus
  siRNA target sequence for Catsper1 (NM_139301.1,121-139).
ggtggcgtctattacgatt

SEQ ID NO: 646166 - DNA, 19 bp, Mus musculus
  siRNA target sequence for Catsper1 (NM_139301.1,156-174).
gttccaacaaccataccaa

SEQ ID NO: 646167 - DNA, 19 bp, Mus musculus
  siRNA target sequence for Catsper1 (NM_139301.1,229-247).
gactcccatgacaatgctt

SEQ ID NO: 646168 - DNA, 19 bp, Mus musculus
  siRNA target sequence for Catsper1 (NM_139301.1,283-301).
gtctctaccttacctaata

SEQ ID NO: 646169 - DNA, 19 bp, Mus musculus
  siRNA target sequence for Catsper1 (NM_139301.1,287-305).
ctaccttacctaataacat

SEQ ID NO: 646170 - DNA, 19 bp, Mus musculus
  siRNA target sequence for Catsper1 (NM_139301.1,303-321).
catctctcacgcttatggt

SEQ ID NO: 646171 - DNA, 19 bp, Mus musculus
  siRNA target sequence for Catsper1 (NM_139301.1,377-395).
gtattgacccgaatcatca

SEQ ID NO: 646172 - DNA, 19 bp, Mus musculus
  siRNA target sequence for Catsper1 (NM_139301.1,466-484).
gggacaacccatcaacaat

SEQ ID NO: 646173 - DNA, 19 bp, Mus musculus
  siRNA target sequence for Catsper1 (NM_139301.1,467-485).
ggacaacccatcaacaata

SEQ ID NO: 646174 - DNA, 19 bp, Mus musculus
  siRNA target sequence for Catsper1 (NM_139301.1,490-508).
gagaggtctcaccatctta

SEQ ID NO: 646175 - DNA, 19 bp, Mus musculus
  siRNA target sequence for Catsper1 (NM_139301.1,552-570).
ctccagtacgcggttctat

SEQ ID NO: 646176 - DNA, 19 bp, Mus musculus
  siRNA target sequence for Catsper1 (NM_139301.1,635-653).
gccatcatgcccattctca

SEQ ID NO: 646177 - DNA, 19 bp, Mus musculus
  siRNA target sequence for Catsper1 (NM_139301.1,687-705).
gcactatcacggagatcat

SEQ ID NO: 646178 - DNA, 19 bp, Mus musculus
  siRNA target sequence for Catsper1 (NM_139301.1,790-808).
catgtgggatcgaaaagca

SEQ ID NO: 646179 - DNA, 19 bp, Mus musculus
  siRNA target sequence for Catsper1 (NM_139301.1,835-853).
ggagctcgctctcaaattt

SEQ ID NO: 646180 - DNA, 19 bp, Mus musculus
  siRNA target sequence for Catsper1 (NM_139301.1,836-854).
gagctcgctctcaaatttt

SEQ ID NO: 646181 - DNA, 19 bp, Mus musculus
  siRNA target sequence for Catsper1 (NM_139301.1,908-926).
gggaggatcacgttcagaa

SEQ ID NO: 646182 - DNA, 19 bp, Mus musculus
  siRNA target sequence for Catsper1 (NM_139301.1,958-976).
gcacacaccgggaatatct

SEQ ID NO: 646183 - DNA, 19 bp, Mus musculus
  siRNA target sequence for Catsper1 (NM_139301.1,965-983).
ccgggaatatcttccaatt

SEQ ID NO: 646184 - DNA, 19 bp, Mus musculus
  siRNA target sequence for Catsper1 (NM_139301.1,969-987).
gaatatcttccaattgcta

SEQ ID NO: 646185 - DNA, 19 bp, Mus musculus
  siRNA target sequence for Catsper1 (NM_139301.1,1014-1032).
gggtcttcagcaaatgata

SEQ ID NO: 646186 - DNA, 19 bp, Mus musculus
  siRNA target sequence for Catsper1 (NM_139301.1,1015-1033).
ggtcttcagcaaatgatat

SEQ ID NO: 646187 - DNA, 19 bp, Mus musculus
  siRNA target sequence for Catsper1 (NM_139301.1,1018-1036).
cttcagcaaatgatattgt

SEQ ID NO: 646188 - DNA, 19 bp, Mus musculus
  siRNA target sequence for Catsper1 (NM_139301.1,1135-1153).
cgaggtgaatggtacttca

SEQ ID NO: 646189 - DNA, 19 bp, Mus musculus
  siRNA target sequence for Catsper1 (NM_139301.1,1173-1191).
cctctccatctatgtacta

SEQ ID NO: 646190 - DNA, 19 bp, Mus musculus
  siRNA target sequence for Catsper1 (NM_139301.1,1291-1309).
gtgctccttcagataaact

SEQ ID NO: 646191 - DNA, 19 bp, Mus musculus
  siRNA target sequence for Catsper1 (NM_139301.1,1302-1320).
gataaactcgctctcatat

SEQ ID NO: 646192 - DNA, 19 bp, Mus musculus
  siRNA target sequence for Catsper1 (NM_139301.1,1310-1328).
cgctctcatattcattcta

SEQ ID NO: 646193 - DNA, 19 bp, Mus musculus
  siRNA target sequence for Catsper1 (NM_139301.1,1337-1355).
gcctgttccggattctcaa

SEQ ID NO: 646194 - DNA, 19 bp, Mus musculus
  siRNA target sequence for Catsper1 (NM_139301.1,1347-1365).
gattctcaaagtcttcaaa

SEQ ID NO: 646195 - DNA, 19 bp, Mus musculus
  siRNA target sequence for Catsper1 (NM_139301.1,1477-1495).
ctcaccctcatgtttacct

SEQ ID NO: 646196 - DNA, 19 bp, Mus musculus
  siRNA target sequence for Catsper1 (NM_139301.1,1609-1627).
gactggtccctcatctaca

SEQ ID NO: 646197 - DNA, 19 bp, Mus musculus
  siRNA target sequence for Catsper1 (NM_139301.1,1613-1631).
ggtccctcatctacataga

SEQ ID NO: 646198 - DNA, 19 bp, Mus musculus
  siRNA target sequence for Catsper1 (NM_139301.1,1659-1677).
cataccgatcctcatgatt

SEQ ID NO: 646199 - DNA, 19 bp, Mus musculus
  siRNA target sequence for Catsper1 (NM_139301.1,1664-1682).
cgatcctcatgatttacat

SEQ ID NO: 646200 - DNA, 19 bp, Mus musculus
  siRNA target sequence for Catsper1 (NM_139301.1,1665-1683).
gatcctcatgatttacatt

SEQ ID NO: 646201 - DNA, 19 bp, Mus musculus
  siRNA target sequence for Catsper1 (NM_139301.1,1669-1687).
ctcatgatttacattgtca

SEQ ID NO: 646202 - DNA, 19 bp, Mus musculus
  siRNA target sequence for Catsper1 (NM_139301.1,1684-1702).
gtcatccagtacttcatct

SEQ ID NO: 646203 - DNA, 19 bp, Mus musculus
  siRNA target sequence for Catsper1 (NM_139301.1,1792-1810).
cgggtccatgagaagttgt

SEQ ID NO: 646204 - DNA, 19 bp, Mus musculus
  siRNA target sequence for Catsper1 (NM_139301.1,1793-1811).
gggtccatgagaagttgtt

SEQ ID NO: 646205 - DNA, 19 bp, Mus musculus
  siRNA target sequence for Catsper1 (NM_139301.1,1841-1859).
cagacgccaatgcacaaat

SEQ ID NO: 646206 - DNA, 19 bp, Mus musculus
  siRNA target sequence for Catsper1 (NM_139301.1,1884-1902).
gcttattgagggaatgttt

SEQ ID NO: 646207 - DNA, 19 bp, Mus musculus
  siRNA target sequence for Catsper1 (NM_139301.1,1972-1990).
catcaacagaagtttcgtt

SEQ ID NO: 646208 - DNA, 19 bp, Mus musculus
  siRNA target sequence for Catsper2 (NM_153075.1,160-178).
ctgatgctatccgttcaaa

SEQ ID NO: 646209 - DNA, 19 bp, Mus musculus
  siRNA target sequence for Catsper2 (NM_153075.1,171-189).
cgttcaaagctcattgaca

SEQ ID NO: 646210 - DNA, 19 bp, Mus musculus
  siRNA target sequence for Catsper2 (NM_153075.1,196-214).
cgctcatagagcatttgca

SEQ ID NO: 646211 - DNA, 19 bp, Mus musculus
  siRNA target sequence for Catsper2 (NM_153075.1,242-260).
cactctccgggagatactt

SEQ ID NO: 646212 - DNA, 19 bp, Mus musculus
  siRNA target sequence for Catsper2 (NM_153075.1,306-324).
ctagtgcgcttctccataa

SEQ ID NO: 646213 - DNA, 19 bp, Mus musculus
  siRNA target sequence for Catsper2 (NM_153075.1,394-412).
gaatgccccctctttcctt

SEQ ID NO: 646214 - DNA, 19 bp, Mus musculus
  siRNA target sequence for Catsper2 (NM_153075.1,417-435).
gctggatgggtccttgata

SEQ ID NO: 646215 - DNA, 19 bp, Mus musculus
  siRNA target sequence for Catsper2 (NM_153075.1,436-454).
gttctgtcttctcgaaatt

SEQ ID NO: 646216 - DNA, 19 bp, Mus musculus
  siRNA target sequence for Catsper2 (NM_153075.1,439-457).
ctgtcttctcgaaattcat

SEQ ID NO: 646217 - DNA, 19 bp, Mus musculus
  siRNA target sequence for Catsper2 (NM_153075.1,441-459).
gtcttctcgaaattcatca

SEQ ID NO: 646218 - DNA, 19 bp, Mus musculus
  siRNA target sequence for Catsper2 (NM_153075.1,509-527).
gatggaatccacaaatact

SEQ ID NO: 646219 - DNA, 19 bp, Mus musculus
  siRNA target sequence for Catsper2 (NM_153075.1,575-593).
cttgcttagcttcattgta

SEQ ID NO: 646220 - DNA, 19 bp, Mus musculus
  siRNA target sequence for Catsper2 (NM_153075.1,610-628).
ggttggccagtttttctct

SEQ ID NO: 646221 - DNA, 19 bp, Mus musculus
  siRNA target sequence for Catsper2 (NM_153075.1,780-798).
gcacgattccgtcaaatta

SEQ ID NO: 646222 - DNA, 19 bp, Mus musculus
  siRNA target sequence for Catsper2 (NM_153075.1,781-799).
cacgattccgtcaaattaa

SEQ ID NO: 646223 - DNA, 19 bp, Mus musculus
  siRNA target sequence for Catsper2 (NM_153075.1,784-802).
gattccgtcaaattaaagt

SEQ ID NO: 646224 - DNA, 19 bp, Mus musculus
  siRNA target sequence for Catsper2 (NM_153075.1,788-806).
ccgtcaaattaaagttatt

SEQ ID NO: 646225 - DNA, 19 bp, Mus musculus
  siRNA target sequence for Catsper2 (NM_153075.1,835-853).
gcatgacgttcctcttgat

SEQ ID NO: 646226 - DNA, 19 bp, Mus musculus
  siRNA target sequence for Catsper2 (NM_153075.1,885-903).
gtgactggtgtctacttct

SEQ ID NO: 646227 - DNA, 19 bp, Mus musculus
  siRNA target sequence for Catsper2 (NM_153075.1,896-914).
ctacttcttcagagaatat

SEQ ID NO: 646228 - DNA, 19 bp, Mus musculus
  siRNA target sequence for Catsper2 (NM_153075.1,909-927).
gaatattcccgatcaacta

SEQ ID NO: 646229 - DNA, 19 bp, Mus musculus
  siRNA target sequence for Catsper2 (NM_153075.1,933-951).
ggcctggagtacaacatgt

SEQ ID NO: 646230 - DNA, 19 bp, Mus musculus
  siRNA target sequence for Catsper2 (NM_153075.1,936-954).
ctggagtacaacatgttct

SEQ ID NO: 646231 - DNA, 19 bp, Mus musculus
  siRNA target sequence for Catsper2 (NM_153075.1,956-974).
ctcggacctactaaattca

SEQ ID NO: 646232 - DNA, 19 bp, Mus musculus
  siRNA target sequence for Catsper2 (NM_153075.1,958-976).
cggacctactaaattcact

SEQ ID NO: 646233 - DNA, 19 bp, Mus musculus
  siRNA target sequence for Catsper2 (NM_153075.1,998-1016).
caccttggatcattggtat

SEQ ID NO: 646234 - DNA, 19 bp, Mus musculus
  siRNA target sequence for Catsper2 (NM_153075.1,1047-1065).
gaatctagccgtgtcttta

SEQ ID NO: 646235 - DNA, 19 bp, Mus musculus
  siRNA target sequence for Catsper2 (NM_153075.1,1066-1084).
gcagcatctatgttatcct

SEQ ID NO: 646236 - DNA, 19 bp, Mus musculus
  siRNA target sequence for Catsper2 (NM_153075.1,1094-1112).
gcttggctccataatcttt

SEQ ID NO: 646237 - DNA, 19 bp, Mus musculus
  siRNA target sequence for Catsper2 (NM_153075.1,1099-1117).
gctccataatctttcgaaa

SEQ ID NO: 646238 - DNA, 19 bp, Mus musculus
  siRNA target sequence for Catsper2 (NM_153075.1,1100-1118).
ctccataatctttcgaaat

SEQ ID NO: 646239 - DNA, 19 bp, Mus musculus
  siRNA target sequence for Catsper2 (NM_153075.1,1102-1120).
ccataatctttcgaaatat

SEQ ID NO: 646240 - DNA, 19 bp, Mus musculus
  siRNA target sequence for Catsper2 (NM_153075.1,1129-1147).
ccatgatggttactaactt

SEQ ID NO: 646241 - DNA, 19 bp, Mus musculus
  siRNA target sequence for Catsper2 (NM_153075.1,1136-1154).
ggttactaactttcagaat

SEQ ID NO: 646242 - DNA, 19 bp, Mus musculus
  siRNA target sequence for Catsper2 (NM_153075.1,1137-1155).
gttactaactttcagaata

SEQ ID NO: 646243 - DNA, 19 bp, Mus musculus
  siRNA target sequence for Catsper2 (NM_153075.1,1185-1203).
cacctggaggttcagtata

SEQ ID NO: 646244 - DNA, 19 bp, Mus musculus
  siRNA target sequence for Catsper2 (NM_153075.1,1187-1205).
cctggaggttcagtataaa

SEQ ID NO: 646245 - DNA, 19 bp, Mus musculus
  siRNA target sequence for Catsper2 (NM_153075.1,1261-1279).
gagggaccagtcttggaaa

SEQ ID NO: 646246 - DNA, 19 bp, Mus musculus
  siRNA target sequence for Catsper2 (NM_153075.1,1373-1391).
caaaagcgatgctactgaa

SEQ ID NO: 646247 - DNA, 19 bp, Mus musculus
  siRNA target sequence for Catsper2 (NM_153075.1,1403-1421).
ggaaagcgatagtgagaat

SEQ ID NO: 646248 - DNA, 19 bp, Mus musculus
  siRNA target sequence for Catsper2 (NM_153075.1,1408-1426).
gcgatagtgagaatagtga

SEQ ID NO: 646249 - DNA, 19 bp, Mus musculus
  siRNA target sequence for Catsper2 (NM_153075.1,1438-1456).
gcgagagcgagaaaattga

SEQ ID NO: 646250 - DNA, 19 bp, Mus musculus
  siRNA target sequence for Catsper2 (NM_153075.1,1439-1457).
cgagagcgagaaaattgat

SEQ ID NO: 646251 - DNA, 19 bp, Mus musculus
  siRNA target sequence for Catsper2 (NM_153075.1,1776-1794).
gactcactcttccgatatt

SEQ ID NO: 646252 - DNA, 19 bp, Mus musculus
  siRNA target sequence for Catsper2 (NM_153075.1,1780-1798).
cactcttccgatatttcga

SEQ ID NO: 646253 - DNA, 19 bp, Mus musculus
  siRNA target sequence for Catsper2 (NM_153075.1,1833-1851).
cgcaagaagttacaagaat

SEQ ID NO: 646254 - DNA, 19 bp, Mus musculus
  siRNA target sequence for Catsper2 (NM_153075.1,1862-1880).
ggccctgatgagttttgaa

SEQ ID NO: 646255 - DNA, 19 bp, Mus musculus
  siRNA target sequence for Catsper2 (NM_153075.1,1864-1882).
ccctgatgagttttgaaga

SEQ ID NO: 646256 - DNA, 19 bp, Mus musculus
  siRNA target sequence for Mcoln2 (NM_026656.2,220-238).
ctgaagttctacttcatga

SEQ ID NO: 646257 - DNA, 19 bp, Mus musculus
  siRNA target sequence for Mcoln2 (NM_026656.2,328-346).
gttcggtttggcttaagta

SEQ ID NO: 646258 - DNA, 19 bp, Mus musculus
  siRNA target sequence for Mcoln2 (NM_026656.2,354-372).
ggtggtggctttcaaagaa

SEQ ID NO: 646259 - DNA, 19 bp, Mus musculus
  siRNA target sequence for Mcoln2 (NM_026656.2,373-391).
gataacactgttgctttta

SEQ ID NO: 646260 - DNA, 19 bp, Mus musculus
  siRNA target sequence for Mcoln2 (NM_026656.2,385-403).
gcttttaagcacttgtttt

SEQ ID NO: 646261 - DNA, 19 bp, Mus musculus
  siRNA target sequence for Mcoln2 (NM_026656.2,394-412).
cacttgtttttgaaaggat

SEQ ID NO: 646262 - DNA, 19 bp, Mus musculus
  siRNA target sequence for Mcoln2 (NM_026656.2,433-451).
gactacagctgtagcatat

SEQ ID NO: 646263 - DNA, 19 bp, Mus musculus
  siRNA target sequence for Mcoln2 (NM_026656.2,438-456).
cagctgtagcatatacact

SEQ ID NO: 646264 - DNA, 19 bp, Mus musculus
  siRNA target sequence for Mcoln2 (NM_026656.2,498-516).
gtatcgtcatctgaagaat

SEQ ID NO: 646265 - DNA, 19 bp, Mus musculus
  siRNA target sequence for Mcoln2 (NM_026656.2,521-539).
ccctggcaacccttggtta

SEQ ID NO: 646266 - DNA, 19 bp, Mus musculus
  siRNA target sequence for Mcoln2 (NM_026656.2,522-540).
cctggcaacccttggttat

SEQ ID NO: 646267 - DNA, 19 bp, Mus musculus
  siRNA target sequence for Mcoln2 (NM_026656.2,598-616).
ggggccatgttttcttcta

SEQ ID NO: 646268 - DNA, 19 bp, Mus musculus
  siRNA target sequence for Mcoln2 (NM_026656.2,736-754).
cggctcgtgcaagttgata

SEQ ID NO: 646269 - DNA, 19 bp, Mus musculus
  siRNA target sequence for Mcoln2 (NM_026656.2,737-755).
ggctcgtgcaagttgatat

SEQ ID NO: 646270 - DNA, 19 bp, Mus musculus
  siRNA target sequence for Mcoln2 (NM_026656.2,739-757).
ctcgtgcaagttgatatct

SEQ ID NO: 646271 - DNA, 19 bp, Mus musculus
  siRNA target sequence for Mcoln2 (NM_026656.2,800-818).
gagagataccggactgtta

SEQ ID NO: 646272 - DNA, 19 bp, Mus musculus
  siRNA target sequence for Mcoln2 (NM_026656.2,809-827).
cggactgttacctctttca

SEQ ID NO: 646273 - DNA, 19 bp, Mus musculus
  siRNA target sequence for Mcoln2 (NM_026656.2,851-869).
cagcccacagtgggaaaat

SEQ ID NO: 646274 - DNA, 19 bp, Mus musculus
  siRNA target sequence for Mcoln2 (NM_026656.2,860-878).
gtgggaaaatcaaaatcta

SEQ ID NO: 646275 - DNA, 19 bp, Mus musculus
  siRNA target sequence for Mcoln2 (NM_026656.2,893-911).
ccaacatcgaagagtgtaa

SEQ ID NO: 646276 - DNA, 19 bp, Mus musculus
  siRNA target sequence for Mcoln2 (NM_026656.2,894-912).
caacatcgaagagtgtaaa

SEQ ID NO: 646277 - DNA, 19 bp, Mus musculus
  siRNA target sequence for Mcoln2 (NM_026656.2,904-922).
gagtgtaaaaacatgaaca

SEQ ID NO: 646278 - DNA, 19 bp, Mus musculus
  siRNA target sequence for Mcoln2 (NM_026656.2,967-985).
gatgtgttcgtcattatga

SEQ ID NO: 646279 - DNA, 19 bp, Mus musculus
  siRNA target sequence for Mcoln2 (NM_026656.2,970-988).
gtgttcgtcattatgatct

SEQ ID NO: 646280 - DNA, 19 bp, Mus musculus
  siRNA target sequence for Mcoln2 (NM_026656.2,1005-1023).
cctgtgcacgagatccatt

SEQ ID NO: 646281 - DNA, 19 bp, Mus musculus
  siRNA target sequence for Mcoln2 (NM_026656.2,1008-1026).
gtgcacgagatccattgtt

SEQ ID NO: 646282 - DNA, 19 bp, Mus musculus
  siRNA target sequence for Mcoln2 (NM_026656.2,1010-1028).
gcacgagatccattgttct

SEQ ID NO: 646283 - DNA, 19 bp, Mus musculus
  siRNA target sequence for Mcoln2 (NM_026656.2,1011-1029).
cacgagatccattgttctt

SEQ ID NO: 646284 - DNA, 19 bp, Mus musculus
  siRNA target sequence for Mcoln2 (NM_026656.2,1097-1115).
ctgaccagtgggaattcgt

SEQ ID NO: 646285 - DNA, 19 bp, Mus musculus
  siRNA target sequence for Mcoln2 (NM_026656.2,1124-1142).
ggtacgtcctggtcactat

SEQ ID NO: 646286 - DNA, 19 bp, Mus musculus
  siRNA target sequence for Mcoln2 (NM_026656.2,1143-1161).
cagcgacctcatgacaata

SEQ ID NO: 646287 - DNA, 19 bp, Mus musculus
  siRNA target sequence for Mcoln2 (NM_026656.2,1145-1163).
gcgacctcatgacaataat

SEQ ID NO: 646288 - DNA, 19 bp, Mus musculus
  siRNA target sequence for Mcoln2 (NM_026656.2,1146-1164).
cgacctcatgacaataatt

SEQ ID NO: 646289 - DNA, 19 bp, Mus musculus
  siRNA target sequence for Mcoln2 (NM_026656.2,1155-1173).
gacaataattggatccata

SEQ ID NO: 646290 - DNA, 19 bp, Mus musculus
  siRNA target sequence for Mcoln2 (NM_026656.2,1157-1175).
caataattggatccatatt

SEQ ID NO: 646291 - DNA, 19 bp, Mus musculus
  siRNA target sequence for Mcoln2 (NM_026656.2,1235-1253).
ggacgtcgacgctctttgt

SEQ ID NO: 646292 - DNA, 19 bp, Mus musculus
  siRNA target sequence for Mcoln2 (NM_026656.2,1256-1274).
gggttggagtcatcagata

SEQ ID NO: 646293 - DNA, 19 bp, Mus musculus
  siRNA target sequence for Mcoln2 (NM_026656.2,1257-1275).
ggttggagtcatcagatat

SEQ ID NO: 646294 - DNA, 19 bp, Mus musculus
  siRNA target sequence for Mcoln2 (NM_026656.2,1269-1287).
cagatatctgggttacttt

SEQ ID NO: 646295 - DNA, 19 bp, Mus musculus
  siRNA target sequence for Mcoln2 (NM_026656.2,1292-1310).
cgtacaacgtgctcatttt

SEQ ID NO: 646296 - DNA, 19 bp, Mus musculus
  siRNA target sequence for Mcoln2 (NM_026656.2,1351-1369).
gcttgcgctggcatgatct

SEQ ID NO: 646297 - DNA, 19 bp, Mus musculus
  siRNA target sequence for Mcoln2 (NM_026656.2,1352-1370).
cttgcgctggcatgatcta

SEQ ID NO: 646298 - DNA, 19 bp, Mus musculus
  siRNA target sequence for Mcoln2 (NM_026656.2,1386-1404).
ctgcggctggattgtctta

SEQ ID NO: 646299 - DNA, 19 bp, Mus musculus
  siRNA target sequence for Mcoln2 (NM_026656.2,1406-1424).
gaccgtaccacgagaagtt

SEQ ID NO: 646300 - DNA, 19 bp, Mus musculus
  siRNA target sequence for Mcoln2 (NM_026656.2,1409-1427).
cgtaccacgagaagtttga

SEQ ID NO: 646301 - DNA, 19 bp, Mus musculus
  siRNA target sequence for Mcoln2 (NM_026656.2,1609-1627).
gactcttaccacaccatta

SEQ ID NO: 646302 - DNA, 19 bp, Mus musculus
  siRNA target sequence for Mcoln2 (NM_026656.2,1760-1778).
gcaatgaccacttgattct

SEQ ID NO: 646303 - DNA, 19 bp, Mus musculus
  siRNA target sequence for Mcoln3 (NM_134160.1,86-104).
gtcagagcagcttctctta

SEQ ID NO: 646304 - DNA, 19 bp, Mus musculus
  siRNA target sequence for Mcoln3 (NM_134160.1,88-106).
cagagcagcttctcttaga

SEQ ID NO: 646305 - DNA, 19 bp, Mus musculus
  siRNA target sequence for Mcoln3 (NM_134160.1,118-136).
ggcggaaactcaagttctt

SEQ ID NO: 646306 - DNA, 19 bp, Mus musculus
  siRNA target sequence for Mcoln3 (NM_134160.1,119-137).
gcggaaactcaagttcttt

SEQ ID NO: 646307 - DNA, 19 bp, Mus musculus
  siRNA target sequence for Mcoln3 (NM_134160.1,120-138).
cggaaactcaagttctttt

SEQ ID NO: 646308 - DNA, 19 bp, Mus musculus
  siRNA target sequence for Mcoln3 (NM_134160.1,233-251).
ggttctgtttggactaagt

SEQ ID NO: 646309 - DNA, 19 bp, Mus musculus
  siRNA target sequence for Mcoln3 (NM_134160.1,234-252).
gttctgtttggactaagta

SEQ ID NO: 646310 - DNA, 19 bp, Mus musculus
  siRNA target sequence for Mcoln3 (NM_134160.1,257-275).
gatggtagtagctttcaaa

SEQ ID NO: 646311 - DNA, 19 bp, Mus musculus
  siRNA target sequence for Mcoln3 (NM_134160.1,366-384).
gtgtatgaccagatcatct

SEQ ID NO: 646312 - DNA, 19 bp, Mus musculus
  siRNA target sequence for Mcoln3 (NM_134160.1,368-386).
gtatgaccagatcatcttt

SEQ ID NO: 646313 - DNA, 19 bp, Mus musculus
  siRNA target sequence for Mcoln3 (NM_134160.1,426-444).
ggcaatcacgcttatgaga

SEQ ID NO: 646314 - DNA, 19 bp, Mus musculus
  siRNA target sequence for Mcoln3 (NM_134160.1,427-445).
gcaatcacgcttatgagaa

SEQ ID NO: 646315 - DNA, 19 bp, Mus musculus
  siRNA target sequence for Mcoln3 (NM_134160.1,461-479).
gtcggcgatggcaatctgt

SEQ ID NO: 646316 - DNA, 19 bp, Mus musculus
  siRNA target sequence for Mcoln3 (NM_134160.1,472-490).
caatctgtcagcacttcta

SEQ ID NO: 646317 - DNA, 19 bp, Mus musculus
  siRNA target sequence for Mcoln3 (NM_134160.1,530-548).
catcgatccagaagttgaa

SEQ ID NO: 646318 - DNA, 19 bp, Mus musculus
  siRNA target sequence for Mcoln3 (NM_134160.1,646-664).
cggtggagctccagtttaa

SEQ ID NO: 646319 - DNA, 19 bp, Mus musculus
  siRNA target sequence for Mcoln3 (NM_134160.1,719-737).
cgactttacgctgactata

SEQ ID NO: 646320 - DNA, 19 bp, Mus musculus
  siRNA target sequence for Mcoln3 (NM_134160.1,720-738).
gactttacgctgactataa

SEQ ID NO: 646321 - DNA, 19 bp, Mus musculus
  siRNA target sequence for Mcoln3 (NM_134160.1,722-740).
ctttacgctgactataaca

SEQ ID NO: 646322 - DNA, 19 bp, Mus musculus
  siRNA target sequence for Mcoln3 (NM_134160.1,783-801).
gacaacgacatttctatca

SEQ ID NO: 646323 - DNA, 19 bp, Mus musculus
  siRNA target sequence for Mcoln3 (NM_134160.1,785-803).
caacgacatttctatcaaa

SEQ ID NO: 646324 - DNA, 19 bp, Mus musculus
  siRNA target sequence for Mcoln3 (NM_134160.1,817-835).
ggcatgtgtctggatcaat

SEQ ID NO: 646325 - DNA, 19 bp, Mus musculus
  siRNA target sequence for Mcoln3 (NM_134160.1,828-846).
ggatcaattcagaagaaca

SEQ ID NO: 646326 - DNA, 19 bp, Mus musculus
  siRNA target sequence for Mcoln3 (NM_134160.1,847-865).
cacactacatgatgatctt

SEQ ID NO: 646327 - DNA, 19 bp, Mus musculus
  siRNA target sequence for Mcoln3 (NM_134160.1,945-963).
caggagtttgtcaacttct

SEQ ID NO: 646328 - DNA, 19 bp, Mus musculus
  siRNA target sequence for Mcoln3 (NM_134160.1,1013-1031).
catcaacgggtggtacatt

SEQ ID NO: 646329 - DNA, 19 bp, Mus musculus
  siRNA target sequence for Mcoln3 (NM_134160.1,1020-1038).
gggtggtacattatgatca

SEQ ID NO: 646330 - DNA, 19 bp, Mus musculus
  siRNA target sequence for Mcoln3 (NM_134160.1,1021-1039).
ggtggtacattatgatcat

SEQ ID NO: 646331 - DNA, 19 bp, Mus musculus
  siRNA target sequence for Mcoln3 (NM_134160.1,1034-1052).
gatcatcattagtgacata

SEQ ID NO: 646332 - DNA, 19 bp, Mus musculus
  siRNA target sequence for Mcoln3 (NM_134160.1,1055-1073).
gacaatcgttggatcagtt

SEQ ID NO: 646333 - DNA, 19 bp, Mus musculus
  siRNA target sequence for Mcoln3 (NM_134160.1,1061-1079).
cgttggatcagttctgaaa

SEQ ID NO: 646334 - DNA, 19 bp, Mus musculus
  siRNA target sequence for Mcoln3 (NM_134160.1,1128-1146).
cttctcgggacgtcaacta

SEQ ID NO: 646335 - DNA, 19 bp, Mus musculus
  siRNA target sequence for Mcoln3 (NM_134160.1,1189-1207).
cgaagtacaatctccttat

SEQ ID NO: 646336 - DNA, 19 bp, Mus musculus
  siRNA target sequence for Mcoln3 (NM_134160.1,1249-1267).
gttgctgcgctgctatgat

SEQ ID NO: 646337 - DNA, 19 bp, Mus musculus
  siRNA target sequence for Mcoln3 (NM_134160.1,1252-1270).
gctgcgctgctatgatcta

SEQ ID NO: 646338 - DNA, 19 bp, Mus musculus
  siRNA target sequence for Mcoln3 (NM_134160.1,1253-1271).
ctgcgctgctatgatctat

SEQ ID NO: 646339 - DNA, 19 bp, Mus musculus
  siRNA target sequence for Mcoln3 (NM_134160.1,1255-1273).
gcgctgctatgatctatct

SEQ ID NO: 646340 - DNA, 19 bp, Mus musculus
  siRNA target sequence for Mcoln3 (NM_134160.1,1256-1274).
cgctgctatgatctatcta

SEQ ID NO: 646341 - DNA, 19 bp, Mus musculus
  siRNA target sequence for Mcoln3 (NM_134160.1,1268-1286).
ctatctaggctattgcttt

SEQ ID NO: 646342 - DNA, 19 bp, Mus musculus
  siRNA target sequence for Mcoln3 (NM_134160.1,1306-1324).
gcccttaccatgagaagtt

SEQ ID NO: 646343 - DNA, 19 bp, Mus musculus
  siRNA target sequence for Mcoln3 (NM_134160.1,1371-1389).
ggagacgatatgttttcca

SEQ ID NO: 646344 - DNA, 19 bp, Mus musculus
  siRNA target sequence for Mcoln3 (NM_134160.1,1498-1516).
cgctcatcacagacacata

SEQ ID NO: 646345 - DNA, 19 bp, Mus musculus
  siRNA target sequence for Mcoln3 (NM_134160.1,1507-1525).
cagacacatacgaaacaat

SEQ ID NO: 646346 - DNA, 19 bp, Mus musculus
  siRNA target sequence for Mcoln3 (NM_134160.1,1558-1576).
cggaacttcgaaagtttat

SEQ ID NO: 646347 - DNA, 19 bp, Mus musculus
  siRNA target sequence for Mcoln3 (NM_134160.1,1559-1577).
ggaacttcgaaagtttata

SEQ ID NO: 646348 - DNA, 19 bp, Mus musculus
  siRNA target sequence for Mcoln3 (NM_134160.1,1571-1589).
gtttatagcggaatgcaaa

SEQ ID NO: 646349 - DNA, 19 bp, Mus musculus
  siRNA target sequence for Mcoln3 (NM_134160.1,1596-1614).
cccaactccggaaaataca

SEQ ID NO: 646350 - DNA, 19 bp, Mus musculus
  siRNA target sequence for Mcoln3 (NM_134160.1,1598-1616).
caactccggaaaatacaga

SEQ ID NO: 646351 - DNA, 19 bp, Mus musculus
  siRNA target sequence for Mcoln3 (NM_134160.1,1601-1619).
ctccggaaaatacagatta

SEQ ID NO: 646352 - DNA, 19 bp, Mus musculus
  siRNA target sequence for Mcoln3 (NM_134160.1,1603-1621).
ccggaaaatacagattaga

SEQ ID NO: 646353 - DNA, 19 bp, Mus musculus
  siRNA target sequence for Mcoln3 (NM_134160.1,1629-1647).
cctccgggttctttactct

SEQ ID NO: 646354 - DNA, 19 bp, Mus musculus
  siRNA target sequence for Nsccn1 (NM_010940.1,334-352).
ctggaactggtttaatggt

SEQ ID NO: 646355 - DNA, 19 bp, Mus musculus
  siRNA target sequence for Nsccn1 (NM_010940.1,401-419).
gagctaccagaccacttaa

SEQ ID NO: 646356 - DNA, 19 bp, Mus musculus
  siRNA target sequence for Nsccn1 (NM_010940.1,403-421).
gctaccagaccacttaact

SEQ ID NO: 646357 - DNA, 19 bp, Mus musculus
  siRNA target sequence for Nsccn1 (NM_010940.1,439-457).
gctcagggagggtttttct

SEQ ID NO: 646358 - DNA, 19 bp, Mus musculus
  siRNA target sequence for Nsccn1 (NM_010940.1,761-779).
cccttagttggtaacagta

SEQ ID NO: 646359 - DNA, 19 bp, Mus musculus
  siRNA target sequence for Nsccn1 (NM_010940.1,767-785).
gttggtaacagtacatact

SEQ ID NO: 646360 - DNA, 19 bp, Mus musculus
  siRNA target sequence for Nsccn1 (NM_010940.1,815-833).
ccatcggtcacacattcta

SEQ ID NO: 646361 - DNA, 19 bp, Mus musculus
  siRNA target sequence for Nsccn1 (NM_010940.1,819-837).
cggtcacacattctagata

SEQ ID NO: 646362 - DNA, 19 bp, Mus musculus
  siRNA target sequence for Nsccn1 (NM_010940.1,820-838).
ggtcacacattctagatat

SEQ ID NO: 646363 - DNA, 19 bp, Mus musculus
  siRNA target sequence for Nsccn1 (NM_010940.1,823-841).
cacacattctagatatggt

SEQ ID NO: 646364 - DNA, 19 bp, Mus musculus
  siRNA target sequence for Nsccn1 (NM_010940.1,897-915).
ctgacaagccagggtataa

SEQ ID NO: 646365 - DNA, 19 bp, Mus musculus
  siRNA target sequence for Nsccn1 (NM_010940.1,919-937).
ggcaaacttcagttctagt

SEQ ID NO: 646366 - DNA, 19 bp, Mus musculus
  siRNA target sequence for Nsccn1 (NM_010940.1,955-973).
gagtgagagagtacaacaa

SEQ ID NO: 646367 - DNA, 19 bp, Mus musculus
  siRNA target sequence for Nsccn1 (NM_010940.1,965-983).
gtacaacaatgggagatat

SEQ ID NO: 646368 - DNA, 19 bp, Mus musculus
  siRNA target sequence for Nsccn1 (NM_010940.1,968-986).
caacaatgggagatatcca

SEQ ID NO: 646369 - DNA, 19 bp, Mus musculus
  siRNA target sequence for Nsccn1 (NM_010940.1,1052-1070).
ctgcttttaaggaattaca

SEQ ID NO: 646370 - DNA, 19 bp, Mus musculus
  siRNA target sequence for Nsccn1 (NM_010940.1,1179-1197).
gtaatcttatagtttttat

SEQ ID NO: 646371 - DNA, 19 bp, Mus musculus
  siRNA target sequence for Nsccn1 (NM_010940.1,1383-1401).
ggtcccaggctttattctt

SEQ ID NO: 646372 - DNA, 19 bp, Mus musculus
  siRNA target sequence for Nsccn1 (NM_010940.1,1528-1546).
gagttgggatagttataga

SEQ ID NO: 646373 - DNA, 19 bp, Mus musculus
  siRNA target sequence for Nsccn1 (NM_010940.1,1530-1548).
gttgggatagttatagaca

SEQ ID NO: 646374 - DNA, 19 bp, Mus musculus
  siRNA target sequence for Scn1a (NM_018733.1,533-551).
ggacgtgcttccgaatagt

SEQ ID NO: 646375 - DNA, 19 bp, Mus musculus
  siRNA target sequence for Scn1a (NM_018733.1,534-552).
gacgtgcttccgaatagtt

SEQ ID NO: 646376 - DNA, 19 bp, Mus musculus
  siRNA target sequence for Scn1a (NM_018733.1,536-554).
cgtgcttccgaatagttga

SEQ ID NO: 646377 - DNA, 19 bp, Mus musculus
  siRNA target sequence for Scn1a (NM_018733.1,537-555).
gtgcttccgaatagttgaa

SEQ ID NO: 646378 - DNA, 19 bp, Mus musculus
  siRNA target sequence for Scn1a (NM_018733.1,637-655).
cagcgaaagacgatcaaaa

SEQ ID NO: 646379 - DNA, 19 bp, Mus musculus
  siRNA target sequence for Scn1a (NM_018733.1,723-741).
ggcctatggctatcaaaca

SEQ ID NO: 646380 - DNA, 19 bp, Mus musculus
  siRNA target sequence for Scn1a (NM_018733.1,724-742).
gcctatggctatcaaacat

SEQ ID NO: 646381 - DNA, 19 bp, Mus musculus
  siRNA target sequence for Scn1a (NM_018733.1,725-743).
cctatggctatcaaacata

SEQ ID NO: 646382 - DNA, 19 bp, Mus musculus
  siRNA target sequence for Scn1a (NM_018733.1,730-748).
ggctatcaaacatacttca

SEQ ID NO: 646383 - DNA, 19 bp, Mus musculus
  siRNA target sequence for Scn1a (NM_018733.1,758-776).
ggtgttggctagacttctt

SEQ ID NO: 646384 - DNA, 19 bp, Mus musculus
  siRNA target sequence for Scn1a (NM_018733.1,759-777).
gtgttggctagacttctta

SEQ ID NO: 646385 - DNA, 19 bp, Mus musculus
  siRNA target sequence for Scn1a (NM_018733.1,787-805).
gtttcattggtcagtttaa

SEQ ID NO: 646386 - DNA, 19 bp, Mus musculus
  siRNA target sequence for Scn1a (NM_018733.1,795-813).
ggtcagtttaacagcaaat

SEQ ID NO: 646387 - DNA, 19 bp, Mus musculus
  siRNA target sequence for Scn1a (NM_018733.1,924-942).
cctgttaggagcaattcca

SEQ ID NO: 646388 - DNA, 19 bp, Mus musculus
  siRNA target sequence for Scn1a (NM_018733.1,969-987).
ccttatattctggctaatt

SEQ ID NO: 646389 - DNA, 19 bp, Mus musculus
  siRNA target sequence for Scn1a (NM_018733.1,992-1010).
gcatcatgggcgtaaattt

SEQ ID NO: 646390 - DNA, 19 bp, Mus musculus
  siRNA target sequence for Scn1a (NM_018733.1,996-1014).
catgggcgtaaatttgttt

SEQ ID NO: 646391 - DNA, 19 bp, Mus musculus
  siRNA target sequence for Scn1a (NM_018733.1,1041-1059).
caccacaactggtgacata

SEQ ID NO: 646392 - DNA, 19 bp, Mus musculus
  siRNA target sequence for Scn1a (NM_018733.1,1049-1067).
ctggtgacatatttgagat

SEQ ID NO: 646393 - DNA, 19 bp, Mus musculus
  siRNA target sequence for Scn1a (NM_018733.1,1159-1177).
gtaggatttgggtatcttt

SEQ ID NO: 646394 - DNA, 19 bp, Mus musculus
  siRNA target sequence for Scn1a (NM_018733.1,1162-1180).
ggatttgggtatctttctt

SEQ ID NO: 646395 - DNA, 19 bp, Mus musculus
  siRNA target sequence for Scn1a (NM_018733.1,1182-1200).
gcttcaagttgccacattt

SEQ ID NO: 646396 - DNA, 19 bp, Mus musculus
  siRNA target sequence for Scn1a (NM_018733.1,1238-1256).
ccagaaatgttgaactaca

SEQ ID NO: 646397 - DNA, 19 bp, Mus musculus
  siRNA target sequence for Scn3a (NM_018732.1,1280-1298).
gctgctacggacgatgata

SEQ ID NO: 646398 - DNA, 19 bp, Mus musculus
  siRNA target sequence for Scn3a (NM_018732.1,1281-1299).
ctgctacggacgatgataa

SEQ ID NO: 646399 - DNA, 19 bp, Mus musculus
  siRNA target sequence for Scn3a (NM_018732.1,1284-1302).
ctacggacgatgataacga

SEQ ID NO: 646400 - DNA, 19 bp, Mus musculus
  siRNA target sequence for Scn3a (NM_018732.1,1287-1305).
cggacgatgataacgaaat

SEQ ID NO: 646401 - DNA, 19 bp, Mus musculus
  siRNA target sequence for Scn3a (NM_018732.1,1398-1416).
gaaagccgaaagtgataga

SEQ ID NO: 646402 - DNA, 19 bp, Mus musculus
  siRNA target sequence for Scn3a (NM_018732.1,1459-1477).
cacgggcgtagttgaaata

SEQ ID NO: 646403 - DNA, 19 bp, Mus musculus
  siRNA target sequence for Scn3a (NM_018732.1,1463-1481).
ggcgtagttgaaataagca

SEQ ID NO: 646404 - DNA, 19 bp, Mus musculus
  siRNA target sequence for Scn3a (NM_018732.1,1464-1482).
gcgtagttgaaataagcaa

SEQ ID NO: 646405 - DNA, 19 bp, Mus musculus
  siRNA target sequence for Scn3a (NM_018732.1,1542-1560).
gtgtggagaaatacgtaat

SEQ ID NO: 646406 - DNA, 19 bp, Mus musculus
  siRNA target sequence for Tpcn1 (NM_145853.2,488-506).
gtcagaacaacgacaagtt

SEQ ID NO: 646407 - DNA, 19 bp, Mus musculus
  siRNA target sequence for Tpcn1 (NM_145853.2,666-684).
cgccacgctggaactcttt

SEQ ID NO: 646408 - DNA, 19 bp, Mus musculus
  siRNA target sequence for Tpcn1 (NM_145853.2,686-704).
ccctcatggtggtggtatt

SEQ ID NO: 646409 - DNA, 19 bp, Mus musculus
  siRNA target sequence for Tpcn1 (NM_145853.2,687-705).
cctcatggtggtggtattt

SEQ ID NO: 646410 - DNA, 19 bp, Mus musculus
  siRNA target sequence for Tpcn1 (NM_145853.2,690-708).
catggtggtggtatttgaa

SEQ ID NO: 646411 - DNA, 19 bp, Mus musculus
  siRNA target sequence for Tpcn1 (NM_145853.2,854-872).
cactacgctgcattttcct

SEQ ID NO: 646412 - DNA, 19 bp, Mus musculus
  siRNA target sequence for Tpcn1 (NM_145853.2,905-923).
gcaacctgcggcagatctt

SEQ ID NO: 646413 - DNA, 19 bp, Mus musculus
  siRNA target sequence for Tpcn1 (NM_145853.2,961-979).
ctgctcttctttatgatca

SEQ ID NO: 646414 - DNA, 19 bp, Mus musculus
  siRNA target sequence for Tpcn1 (NM_145853.2,1074-1092).
cctgaccacagccaacttt

SEQ ID NO: 646415 - DNA, 19 bp, Mus musculus
  siRNA target sequence for Tpcn1 (NM_145853.2,1127-1145).
cctggtcctgcgtcttctt

SEQ ID NO: 646416 - DNA, 19 bp, Mus musculus
  siRNA target sequence for Tpcn1 (NM_145853.2,1134-1152).
ctgcgtcttcttcattgta

SEQ ID NO: 646417 - DNA, 19 bp, Mus musculus
  siRNA target sequence for Tpcn1 (NM_145853.2,1165-1183).
gagctgtacttcatcatga

SEQ ID NO: 646418 - DNA, 19 bp, Mus musculus
  siRNA target sequence for Tpcn1 (NM_145853.2,1209-1227).
caccttcaacgacattgaa

SEQ ID NO: 646419 - DNA, 19 bp, Mus musculus
  siRNA target sequence for Tpcn1 (NM_145853.2,1328-1346).
ggcagttcgaaggcttaat

SEQ ID NO: 646420 - DNA, 19 bp, Mus musculus
  siRNA target sequence for Tpcn1 (NM_145853.2,1339-1357).
ggcttaatgcgcttctaca

SEQ ID NO: 646421 - DNA, 19 bp, Mus musculus
  siRNA target sequence for Tpcn1 (NM_145853.2,1340-1358).
gcttaatgcgcttctacaa

SEQ ID NO: 646422 - DNA, 19 bp, Mus musculus
  siRNA target sequence for Tpcn1 (NM_145853.2,1431-1449).
cctgaaggacttctatgat

SEQ ID NO: 646423 - DNA, 19 bp, Mus musculus
  siRNA target sequence for Tpcn1 (NM_145853.2,1440-1458).
cttctatgatatttacgaa

SEQ ID NO: 646424 - DNA, 19 bp, Mus musculus
  siRNA target sequence for Tpcn1 (NM_145853.2,1491-1509).
cagacagcattggtttgat

SEQ ID NO: 646425 - DNA, 19 bp, Mus musculus
  siRNA target sequence for Tpcn1 (NM_145853.2,1493-1511).
gacagcattggtttgatga

SEQ ID NO: 646426 - DNA, 19 bp, Mus musculus
  siRNA target sequence for Tpcn1 (NM_145853.2,1616-1634).
ggatcctggtggagacatt

SEQ ID NO: 646427 - DNA, 19 bp, Mus musculus
  siRNA target sequence for Tpcn1 (NM_145853.2,1626-1644).
ggagacattcatgttgaaa

SEQ ID NO: 646428 - DNA, 19 bp, Mus musculus
  siRNA target sequence for Tpcn1 (NM_145853.2,1676-1694).
ggagttacctcgtgtttct

SEQ ID NO: 646429 - DNA, 19 bp, Mus musculus
  siRNA target sequence for Tpcn1 (NM_145853.2,1677-1695).
gagttacctcgtgtttctt

SEQ ID NO: 646430 - DNA, 19 bp, Mus musculus
  siRNA target sequence for Tpcn1 (NM_145853.2,1686-1704).
cgtgtttcttaccatctat

SEQ ID NO: 646431 - DNA, 19 bp, Mus musculus
  siRNA target sequence for Tpcn1 (NM_145853.2,1706-1724).
gagttgaactgttcatgaa

SEQ ID NO: 646432 - DNA, 19 bp, Mus musculus
  siRNA target sequence for Tpcn1 (NM_145853.2,1762-1780).
ggatggaacctgttcgatt

SEQ ID NO: 646433 - DNA, 19 bp, Mus musculus
  siRNA target sequence for Tpcn1 (NM_145853.2,1763-1781).
gatggaacctgttcgattt

SEQ ID NO: 646434 - DNA, 19 bp, Mus musculus
  siRNA target sequence for Tpcn1 (NM_145853.2,1827-1845).
caacatggaacccttctat

SEQ ID NO: 646435 - DNA, 19 bp, Mus musculus
  siRNA target sequence for Tpcn1 (NM_145853.2,1867-1885).
cttcagctgctgaggttat

SEQ ID NO: 646436 - DNA, 19 bp, Mus musculus
  siRNA target sequence for Tpcn1 (NM_145853.2,1876-1894).
ctgaggttatttaaactga

SEQ ID NO: 646437 - DNA, 19 bp, Mus musculus
  siRNA target sequence for Tpcn1 (NM_145853.2,1969-1987).
ctcaccttctactattcct

SEQ ID NO: 646438 - DNA, 19 bp, Mus musculus
  siRNA target sequence for Tpcn1 (NM_145853.2,2059-2077).
gacgcctaccggttcatca

SEQ ID NO: 646439 - DNA, 19 bp, Mus musculus
  siRNA target sequence for Tpcn1 (NM_145853.2,2080-2098).
cacactgtgggcaataaga

SEQ ID NO: 646440 - DNA, 19 bp, Mus musculus
  siRNA target sequence for Tpcn1 (NM_145853.2,2110-2128).
gaaggctactactatctca

SEQ ID NO: 646441 - DNA, 19 bp, Mus musculus
  siRNA target sequence for Tpcn1 (NM_145853.2,2118-2136).
ctactatctcaacaacttt

SEQ ID NO: 646442 - DNA, 19 bp, Mus musculus
  siRNA target sequence for Tpcn1 (NM_145853.2,2153-2171).
gcttcgtgaccttgtttga

SEQ ID NO: 646443 - DNA, 19 bp, Mus musculus
  siRNA target sequence for Tpcn1 (NM_145853.2,2172-2190).
gctcaccgttgtcaacaat

SEQ ID NO: 646444 - DNA, 19 bp, Mus musculus
  siRNA target sequence for Tpcn1 (NM_145853.2,2173-2191).
ctcaccgttgtcaacaatt

SEQ ID NO: 646445 - DNA, 19 bp, Mus musculus
  siRNA target sequence for Tpcn1 (NM_145853.2,2177-2195).
ccgttgtcaacaattggta

SEQ ID NO: 646446 - DNA, 19 bp, Mus musculus
  siRNA target sequence for Tpcn1 (NM_145853.2,2524-2542).
cggcgatcgagaaccaaaa

SEQ ID NO: 646447 - DNA, 19 bp, Mus musculus
  siRNA target sequence for Tpcn1 (NM_145853.2,2526-2544).
gcgatcgagaaccaaaagt

SEQ ID NO: 646448 - DNA, 19 bp, Mus musculus
  siRNA target sequence for Tpcn1 (NM_145853.2,2528-2546).
gatcgagaaccaaaagtga

SEQ ID NO: 646449 - DNA, 19 bp, Mus musculus
  siRNA target sequence for Tpcn1 (NM_145853.2,2545-2563).
gacctgagtctgaagatgt

SEQ ID NO: 646450 - DNA, 19 bp, Mus musculus
  siRNA target sequence for Tpcn2 (NM_146206.2,184-202).
ggctttaccgctggtatta

SEQ ID NO: 646451 - DNA, 19 bp, Mus musculus
  siRNA target sequence for Tpcn2 (NM_146206.2,186-204).
ctttaccgctggtattact

SEQ ID NO: 646452 - DNA, 19 bp, Mus musculus
  siRNA target sequence for Tpcn2 (NM_146206.2,219-237).
cgtgtgctgggcttcatca

SEQ ID NO: 646453 - DNA, 19 bp, Mus musculus
  siRNA target sequence for Tpcn2 (NM_146206.2,598-616).
ggtggtcgctaccagaaat

SEQ ID NO: 646454 - DNA, 19 bp, Mus musculus
  siRNA target sequence for Tpcn2 (NM_146206.2,890-908).
gacagccatcatctataat

SEQ ID NO: 646455 - DNA, 19 bp, Mus musculus
  siRNA target sequence for Tpcn2 (NM_146206.2,909-927).
cagttccgtggctacctaa

SEQ ID NO: 646456 - DNA, 19 bp, Mus musculus
  siRNA target sequence for Tpcn2 (NM_146206.2,915-933).
cgtggctacctaatgaaat

SEQ ID NO: 646457 - DNA, 19 bp, Mus musculus
  siRNA target sequence for Tpcn2 (NM_146206.2,919-937).
gctacctaatgaaatctct

SEQ ID NO: 646458 - DNA, 19 bp, Mus musculus
  siRNA target sequence for Tpcn2 (NM_146206.2,920-938).
ctacctaatgaaatctcta

SEQ ID NO: 646459 - DNA, 19 bp, Mus musculus
  siRNA target sequence for Tpcn2 (NM_146206.2,1112-1130).
gaaggtgcagtcctatgaa

SEQ ID NO: 646460 - DNA, 19 bp, Mus musculus
  siRNA target sequence for Tpcn2 (NM_146206.2,1138-1156).
caatgctggctgatgagtt

SEQ ID NO: 646461 - DNA, 19 bp, Mus musculus
  siRNA target sequence for Tpcn2 (NM_146206.2,1149-1167).
gatgagttccagaaactct

SEQ ID NO: 646462 - DNA, 19 bp, Mus musculus
  siRNA target sequence for Tpcn2 (NM_146206.2,1170-1188).
gatgaggttgacaaaggtt

SEQ ID NO: 646463 - DNA, 19 bp, Mus musculus
  siRNA target sequence for Tpcn2 (NM_146206.2,1214-1232).
ccaataccagtctccattt

SEQ ID NO: 646464 - DNA, 19 bp, Mus musculus
  siRNA target sequence for Tpcn2 (NM_146206.2,1378-1396).
ggattcttgactacatctt

SEQ ID NO: 646465 - DNA, 19 bp, Mus musculus
  siRNA target sequence for Tpcn2 (NM_146206.2,1452-1470).
ggctacctgtcctaccata

SEQ ID NO: 646466 - DNA, 19 bp, Mus musculus
  siRNA target sequence for Tpcn2 (NM_146206.2,1506-1524).
ctggtttcggagatttgca

SEQ ID NO: 646467 - DNA, 19 bp, Mus musculus
  siRNA target sequence for Tpcn2 (NM_146206.2,1638-1656).
cgcatcatccccaacataa

SEQ ID NO: 646468 - DNA, 19 bp, Mus musculus
  siRNA target sequence for Tpcn2 (NM_146206.2,1689-1707).
ggcctaatccctaacttga

SEQ ID NO: 646469 - DNA, 19 bp, Mus musculus
  siRNA target sequence for Tpcn2 (NM_146206.2,1724-1742).
cctggtggtggcatactat

SEQ ID NO: 646470 - DNA, 19 bp, Mus musculus
  siRNA target sequence for Tpcn2 (NM_146206.2,1728-1746).
gtggtggcatactatgtgt

SEQ ID NO: 646471 - DNA, 19 bp, Mus musculus
  siRNA target sequence for Tpcn2 (NM_146206.2,1730-1748).
ggtggcatactatgtgttt

SEQ ID NO: 646472 - DNA, 19 bp, Mus musculus
  siRNA target sequence for Tpcn2 (NM_146206.2,1840-1858).
gctttgagcagctaggtta

SEQ ID NO: 646473 - DNA, 19 bp, Mus musculus
  siRNA target sequence for Tpcn2 (NM_146206.2,1968-1986).
ccgtggtcaatggtgtatt

SEQ ID NO: 646474 - DNA, 19 bp, Mus musculus
  siRNA target sequence for Tpcn2 (NM_146206.2,1972-1990).
ggtcaatggtgtattttgt

SEQ ID NO: 646475 - DNA, 19 bp, Mus musculus
  siRNA target sequence for Tpcn2 (NM_146206.2,1999-2017).
ggctggtgtcctctgttat

SEQ ID NO: 646476 - DNA, 19 bp, Mus musculus
  siRNA target sequence for Tpcn2 (NM_146206.2,2068-2086).
gggaccctcaaggtcataa

SEQ ID NO: 646477 - DNA, 19 bp, Mus musculus
  siRNA target sequence for Trpm3 (NM_177341.2,647-665).
gaaattactcatagaaaat

SEQ ID NO: 646478 - DNA, 19 bp, Mus musculus
  siRNA target sequence for Trpm3 (NM_177341.2,705-723).
gaggaactgtacaatacga

SEQ ID NO: 646479 - DNA, 19 bp, Mus musculus
  siRNA target sequence for Trpm3 (NM_177341.2,722-740).
gagacatgggccctcaaat

SEQ ID NO: 646480 - DNA, 19 bp, Mus musculus
  siRNA target sequence for Trpm3 (NM_177341.2,729-747).
gggccctcaaatacattgt

SEQ ID NO: 646481 - DNA, 19 bp, Mus musculus
  siRNA target sequence for Trpm3 (NM_177341.2,916-934).
ggaccctctaccacaatct

SEQ ID NO: 646482 - DNA, 19 bp, Mus musculus
  siRNA target sequence for Trpm3 (NM_177341.2,971-989).
gggaatggaggatgatatt

SEQ ID NO: 646483 - DNA, 19 bp, Mus musculus
  siRNA target sequence for Trpm3 (NM_177341.2,1000-1018).
gaggacggaagacaactaa

SEQ ID NO: 646484 - DNA, 19 bp, Mus musculus
  siRNA target sequence for Trpm3 (NM_177341.2,1002-1020).
ggacggaagacaactaaga

SEQ ID NO: 646485 - DNA, 19 bp, Mus musculus
  siRNA target sequence for Trpm3 (NM_177341.2,1003-1021).
gacggaagacaactaagaa

SEQ ID NO: 646486 - DNA, 19 bp, Mus musculus
  siRNA target sequence for Trpm3 (NM_177341.2,1059-1077).
gagatcaaccactttccat

SEQ ID NO: 646487 - DNA, 19 bp, Mus musculus
  siRNA target sequence for Trpm3 (NM_177341.2,1227-1245).
gacatggtcgatgacattt

SEQ ID NO: 646488 - DNA, 19 bp, Mus musculus
  siRNA target sequence for Trpm3 (NM_177341.2,1427-1445).
cacgtgcagccagatgtta

SEQ ID NO: 646489 - DNA, 19 bp, Mus musculus
  siRNA target sequence for Trpm3 (NM_177341.2,1465-1483).
gacggctccggatgagaaa

SEQ ID NO: 646490 - DNA, 19 bp, Mus musculus
  siRNA target sequence for Trpm3 (NM_177341.2,1467-1485).
cggctccggatgagaaaga

SEQ ID NO: 646491 - DNA, 19 bp, Mus musculus
  siRNA target sequence for Trpm3 (NM_177341.2,1499-1517).
ggtaattctgggaattcta

SEQ ID NO: 646492 - DNA, 19 bp, Mus musculus
  siRNA target sequence for Trpm3 (NM_177341.2,1557-1575).
gatgacatgccctatatga

SEQ ID NO: 646493 - DNA, 19 bp, Mus musculus
  siRNA target sequence for Trpm3 (NM_177341.2,1680-1698).
cgaagcaatggggaatcat

SEQ ID NO: 646494 - DNA, 19 bp, Mus musculus
  siRNA target sequence for Trpm3 (NM_177341.2,1746-1764).
cccgtgggccgaaaaatct

SEQ ID NO: 646495 - DNA, 19 bp, Mus musculus
  siRNA target sequence for Trpm3 (NM_177341.2,1747-1765).
ccgtgggccgaaaaatcta

SEQ ID NO: 646496 - DNA, 19 bp, Mus musculus
  siRNA target sequence for Trpm3 (NM_177341.2,1748-1766).
cgtgggccgaaaaatctat

SEQ ID NO: 646497 - DNA, 19 bp, Mus musculus
  siRNA target sequence for Trpm3 (NM_177341.2,1752-1770).
ggccgaaaaatctatgagt

SEQ ID NO: 646498 - DNA, 19 bp, Mus musculus
  siRNA target sequence for Trpm3 (NM_177341.2,1753-1771).
gccgaaaaatctatgagtt

SEQ ID NO: 646499 - DNA, 19 bp, Mus musculus
  siRNA target sequence for Trpm3 (NM_177341.2,1802-1820).
ctacactctggcgtatatt

SEQ ID NO: 646500 - DNA, 19 bp, Mus musculus
  siRNA target sequence for Trpm3 (NM_177341.2,1805-1823).
cactctggcgtatattgga

SEQ ID NO: 646501 - DNA, 19 bp, Mus musculus
  siRNA target sequence for Trpm3 (NM_177341.2,1807-1825).
ctctggcgtatattggata

SEQ ID NO: 646502 - DNA, 19 bp, Mus musculus
  siRNA target sequence for Trpm3 (NM_177341.2,1822-1840).
gatacctgatgctcttcaa

SEQ ID NO: 646503 - DNA, 19 bp, Mus musculus
  siRNA target sequence for Trpm3 (NM_177341.2,1873-1891).
cttccactcaggaatggat

SEQ ID NO: 646504 - DNA, 19 bp, Mus musculus
  siRNA target sequence for Trpm3 (NM_177341.2,2045-2063).
gatccttcgtcttcaagat

SEQ ID NO: 646505 - DNA, 19 bp, Mus musculus
  siRNA target sequence for Trpm3 (NM_177341.2,2077-2095).
gtgacgggagggtcatcta

SEQ ID NO: 646506 - DNA, 19 bp, Mus musculus
  siRNA target sequence for Trpm3 (NM_177341.2,2079-2097).
gacgggagggtcatctact

SEQ ID NO: 646507 - DNA, 19 bp, Mus musculus
  siRNA target sequence for Trpm3 (NM_177341.2,2093-2111).
ctactgtgtgaacatcatt

SEQ ID NO: 646508 - DNA, 19 bp, Mus musculus
  siRNA target sequence for Trpm3 (NM_177341.2,2100-2118).
gtgaacatcatttattggt

SEQ ID NO: 646509 - DNA, 19 bp, Mus musculus
  siRNA target sequence for Trpm3 (NM_177341.2,2102-2120).
gaacatcatttattggtat

SEQ ID NO: 646510 - DNA, 19 bp, Mus musculus
  siRNA target sequence for Trpm3 (NM_177341.2,2138-2156).
cttcggcgtgaacaagtat

SEQ ID NO: 646511 - DNA, 19 bp, Mus musculus
  siRNA target sequence for Trpm3 (NM_177341.2,2192-2210).
gatagacatgatgtacttt

SEQ ID NO: 646512 - DNA, 19 bp, Mus musculus
  siRNA target sequence for Trpm3 (NM_177341.2,2298-2316).
gccaagaatatcttctaca

SEQ ID NO: 646513 - DNA, 19 bp, Mus musculus
  siRNA target sequence for Trpm3 (NM_177341.2,2299-2317).
ccaagaatatcttctacat

SEQ ID NO: 646514 - DNA, 19 bp, Mus musculus
  siRNA target sequence for Trpm3 (NM_177341.2,2499-2517).
cttattgccgtcttcaaca

SEQ ID NO: 646515 - DNA, 19 bp, Mus musculus
  siRNA target sequence for Trpm3 (NM_177341.2,2505-2523).
gccgtcttcaacaatacat

SEQ ID NO: 646516 - DNA, 19 bp, Mus musculus
  siRNA target sequence for Trpm3 (NM_177341.2,2506-2524).
ccgtcttcaacaatacatt

SEQ ID NO: 646517 - DNA, 19 bp, Mus musculus
  siRNA target sequence for Trpm3 (NM_177341.2,2507-2525).
cgtcttcaacaatacattt

SEQ ID NO: 646518 - DNA, 19 bp, Mus musculus
  siRNA target sequence for Trpm3 (NM_177341.2,2545-2563).
ccaaccaagtatggaaatt

SEQ ID NO: 646519 - DNA, 19 bp, Mus musculus
  siRNA target sequence for Trpm3 (NM_177341.2,2546-2564).
caaccaagtatggaaattt

SEQ ID NO: 646520 - DNA, 19 bp, Mus musculus
  siRNA target sequence for Trpm3 (NM_177341.2,2613-2631).
ccaccgctcatcatcttca

SEQ ID NO: 646521 - DNA, 19 bp, Mus musculus
  siRNA target sequence for Trpm3 (NM_177341.2,2632-2650).
gtcacatgaccatgatctt

SEQ ID NO: 646522 - DNA, 19 bp, Mus musculus
  siRNA target sequence for Trpm3 (NM_177341.2,2701-2719).
gggactacggcctgaaact

SEQ ID NO: 646523 - DNA, 19 bp, Mus musculus
  siRNA target sequence for Trpm3 (NM_177341.2,2703-2721).
gactacggcctgaaactct

SEQ ID NO: 646524 - DNA, 19 bp, Mus musculus
  siRNA target sequence for Trpm3 (NM_177341.2,2711-2729).
cctgaaactcttcataact

SEQ ID NO: 646525 - DNA, 19 bp, Mus musculus
  siRNA target sequence for Trpm3 (NM_177341.2,2728-2746).
ctgacgatgagctcaagaa

SEQ ID NO: 646526 - DNA, 19 bp, Mus musculus
  siRNA target sequence for Trpm3 (NM_177341.2,2732-2750).
cgatgagctcaagaaagta

SEQ ID NO: 646527 - DNA, 19 bp, Mus musculus
  siRNA target sequence for Trpm3 (NM_177341.2,2766-2784).
cagtgcatagaggaatatt

SEQ ID NO: 646528 - DNA, 19 bp, Mus musculus
  siRNA target sequence for Trpm3 (NM_177341.2,2796-2814).
gatgatcgcttcaattcgt

SEQ ID NO: 646529 - DNA, 19 bp, Mus musculus
  siRNA target sequence for Trpm3 (NM_177341.2,2823-2841).
gagaggatacgtgttacat

SEQ ID NO: 646530 - DNA, 19 bp, Mus musculus
  siRNA target sequence for Trpm3 (NM_177341.2,2825-2843).
gaggatacgtgttacatca

SEQ ID NO: 646531 - DNA, 19 bp, Mus musculus
  siRNA target sequence for Trpm3 (NM_177341.2,2997-3015).
gagcgggcagagtctaaca

SEQ ID NO: 646532 - DNA, 19 bp, Mus musculus
  siRNA target sequence for Trpm3 (NM_177341.2,3000-3018).
cgggcagagtctaacaaaa

SEQ ID NO: 646533 - DNA, 19 bp, Mus musculus
  siRNA target sequence for Trpm3 (NM_177341.2,3094-3112).
ggaacaccttcaaacttca

SEQ ID NO: 646534 - DNA, 19 bp, Mus musculus
  siRNA target sequence for Trpm3 (NM_177341.2,3095-3113).
gaacaccttcaaacttcaa

SEQ ID NO: 646535 - DNA, 19 bp, Mus musculus
  siRNA target sequence for Trpm4 (NM_175130.2,349-367).
ccccctggactataactat

SEQ ID NO: 646536 - DNA, 19 bp, Mus musculus
  siRNA target sequence for Trpm4 (NM_175130.2,350-368).
cccctggactataactatt

SEQ ID NO: 646537 - DNA, 19 bp, Mus musculus
  siRNA target sequence for Trpm4 (NM_175130.2,688-706).
gcgatacttccctaaagga

SEQ ID NO: 646538 - DNA, 19 bp, Mus musculus
  siRNA target sequence for Trpm4 (NM_175130.2,755-773).
gagttgctgacggtctatt

SEQ ID NO: 646539 - DNA, 19 bp, Mus musculus
  siRNA target sequence for Trpm4 (NM_175130.2,757-775).
gttgctgacggtctattca

SEQ ID NO: 646540 - DNA, 19 bp, Mus musculus
  siRNA target sequence for Trpm4 (NM_175130.2,760-778).
gctgacggtctattcatca

SEQ ID NO: 646541 - DNA, 19 bp, Mus musculus
  siRNA target sequence for Trpm4 (NM_175130.2,763-781).
gacggtctattcatcagaa

SEQ ID NO: 646542 - DNA, 19 bp, Mus musculus
  siRNA target sequence for Trpm4 (NM_175130.2,793-811).
ggagtttgagactatcgtt

SEQ ID NO: 646543 - DNA, 19 bp, Mus musculus
  siRNA target sequence for Trpm4 (NM_175130.2,794-812).
gagtttgagactatcgttt

SEQ ID NO: 646544 - DNA, 19 bp, Mus musculus
  siRNA target sequence for Trpm4 (NM_175130.2,898-916).
ggacatcgcccaaagtgaa

SEQ ID NO: 646545 - DNA, 19 bp, Mus musculus
  siRNA target sequence for Trpm4 (NM_175130.2,1075-1093).
cgcggtgtcccctaactca

SEQ ID NO: 646546 - DNA, 19 bp, Mus musculus
  siRNA target sequence for Trpm4 (NM_175130.2,1090-1108).
ctcactgatccgaaatctt

SEQ ID NO: 646547 - DNA, 19 bp, Mus musculus
  siRNA target sequence for Trpm4 (NM_175130.2,1092-1110).
cactgatccgaaatcttct

SEQ ID NO: 646548 - DNA, 19 bp, Mus musculus
  siRNA target sequence for Trpm4 (NM_175130.2,1124-1142).
catgctagtagcagcaaat

SEQ ID NO: 646549 - DNA, 19 bp, Mus musculus
  siRNA target sequence for Trpm4 (NM_175130.2,1138-1156).
caaatcccctcctgtaaat

SEQ ID NO: 646550 - DNA, 19 bp, Mus musculus
  siRNA target sequence for Trpm4 (NM_175130.2,1326-1344).
cggatgcaagctttgaaca

SEQ ID NO: 646551 - DNA, 19 bp, Mus musculus
  siRNA target sequence for Trpm4 (NM_175130.2,1351-1369).
ctggagtgacctgcttatt

SEQ ID NO: 646552 - DNA, 19 bp, Mus musculus
  siRNA target sequence for Trpm4 (NM_175130.2,1391-1409).
gcccagatggctatctatt

SEQ ID NO: 646553 - DNA, 19 bp, Mus musculus
  siRNA target sequence for Trpm4 (NM_175130.2,1394-1412).
cagatggctatctatttct

SEQ ID NO: 646554 - DNA, 19 bp, Mus musculus
  siRNA target sequence for Trpm4 (NM_175130.2,1443-1461).
ctcttggggcttgtctttt

SEQ ID NO: 646555 - DNA, 19 bp, Mus musculus
  siRNA target sequence for Trpm4 (NM_175130.2,1520-1538).
cttgctgccacgtttgaaa

SEQ ID NO: 646556 - DNA, 19 bp, Mus musculus
  siRNA target sequence for Trpm4 (NM_175130.2,2478-2496).
gcgtgtggcttgtagctta

SEQ ID NO: 646557 - DNA, 19 bp, Mus musculus
  siRNA target sequence for Trpm4 (NM_175130.2,2479-2497).
cgtgtggcttgtagcttat

SEQ ID NO: 646558 - DNA, 19 bp, Mus musculus
  siRNA target sequence for Trpm4 (NM_175130.2,2571-2589).
gaccgtatctgcagatctt

SEQ ID NO: 646559 - DNA, 19 bp, Mus musculus
  siRNA target sequence for Trpm4 (NM_175130.2,2581-2599).
gcagatcttcggacaaatt

SEQ ID NO: 646560 - DNA, 19 bp, Mus musculus
  siRNA target sequence for Trpm4 (NM_175130.2,2857-2875).
cctcatccgggaattccat

SEQ ID NO: 646561 - DNA, 19 bp, Mus musculus
  siRNA target sequence for Trpm4 (NM_175130.2,2858-2876).
ctcatccgggaattccatt

SEQ ID NO: 646562 - DNA, 19 bp, Mus musculus
  siRNA target sequence for Trpm4 (NM_175130.2,2894-2912).
ccacccctcatcatcatct

SEQ ID NO: 646563 - DNA, 19 bp, Mus musculus
  siRNA target sequence for Trpm5 (NM_020277.1,52-70).
ggctgggagcccatcctat

SEQ ID NO: 646564 - DNA, 19 bp, Mus musculus
  siRNA target sequence for Trpm5 (NM_020277.1,71-89).
gcaggggagagatcaactt

SEQ ID NO: 646565 - DNA, 19 bp, Mus musculus
  siRNA target sequence for Trpm5 (NM_020277.1,420-438).
ctctctggatcgaatcctt

SEQ ID NO: 646566 - DNA, 19 bp, Mus musculus
  siRNA target sequence for Trpm5 (NM_020277.1,779-797).
gtggcattgctgatgtact

SEQ ID NO: 646567 - DNA, 19 bp, Mus musculus
  siRNA target sequence for Trpm5 (NM_020277.1,867-885).
ccccagcgagtgtttctct

SEQ ID NO: 646568 - DNA, 19 bp, Mus musculus
  siRNA target sequence for Trpm5 (NM_020277.1,937-955).
ccccacctgctcacagtat

SEQ ID NO: 646569 - DNA, 19 bp, Mus musculus
  siRNA target sequence for Trpm5 (NM_020277.1,938-956).
cccacctgctcacagtata

SEQ ID NO: 646570 - DNA, 19 bp, Mus musculus
  siRNA target sequence for Trpm5 (NM_020277.1,999-1017).
cctcaaggcacttgtgaaa

SEQ ID NO: 646571 - DNA, 19 bp, Mus musculus
  siRNA target sequence for Trpm5 (NM_020277.1,1093-1111).
gacattgccaagagtgaaa

SEQ ID NO: 646572 - DNA, 19 bp, Mus musculus
  siRNA target sequence for Trpm5 (NM_020277.1,1178-1196).
gcaacaagcctgactttgt

SEQ ID NO: 646573 - DNA, 19 bp, Mus musculus
  siRNA target sequence for Trpm5 (NM_020277.1,1220-1238).
ctgacatggccgagttctt

SEQ ID NO: 646574 - DNA, 19 bp, Mus musculus
  siRNA target sequence for Trpm5 (NM_020277.1,1222-1240).
gacatggccgagttcttga

SEQ ID NO: 646575 - DNA, 19 bp, Mus musculus
  siRNA target sequence for Trpm5 (NM_020277.1,1404-1422).
ggtctcccgcgtactcaaa

SEQ ID NO: 646576 - DNA, 19 bp, Mus musculus
  siRNA target sequence for Trpm5 (NM_020277.1,1409-1427).
cccgcgtactcaaagactt

SEQ ID NO: 646577 - DNA, 19 bp, Mus musculus
  siRNA target sequence for Trpm5 (NM_020277.1,1576-1594).
ctgcagaatcgttatgaga

SEQ ID NO: 646578 - DNA, 19 bp, Mus musculus
  siRNA target sequence for Trpm5 (NM_020277.1,1644-1662).
ggctgcctgcaagatcata

SEQ ID NO: 646579 - DNA, 19 bp, Mus musculus
  siRNA target sequence for Trpm5 (NM_020277.1,1645-1663).
gctgcctgcaagatcataa

SEQ ID NO: 646580 - DNA, 19 bp, Mus musculus
  siRNA target sequence for Trpm5 (NM_020277.1,1646-1664).
ctgcctgcaagatcataaa

SEQ ID NO: 646581 - DNA, 19 bp, Mus musculus
  siRNA target sequence for Trpm5 (NM_020277.1,1967-1985).
cagccctcatctacacaaa

SEQ ID NO: 646582 - DNA, 19 bp, Mus musculus
  siRNA target sequence for Trpm5 (NM_020277.1,2018-2036).
ggatggacctagaagatct

SEQ ID NO: 646583 - DNA, 19 bp, Mus musculus
  siRNA target sequence for Trpm5 (NM_020277.1,2041-2059).
gagccagacagcttggata

SEQ ID NO: 646584 - DNA, 19 bp, Mus musculus
  siRNA target sequence for Trpm5 (NM_020277.1,2089-2107).
ggccaattggagaagctaa

SEQ ID NO: 646585 - DNA, 19 bp, Mus musculus
  siRNA target sequence for Trpm5 (NM_020277.1,2207-2225).
ggaatgtggtcatgtactt

SEQ ID NO: 646586 - DNA, 19 bp, Mus musculus
  siRNA target sequence for Trpm5 (NM_020277.1,2297-2315).
ccgaggttaccctctattt

SEQ ID NO: 646587 - DNA, 19 bp, Mus musculus
  siRNA target sequence for Trpm5 (NM_020277.1,2299-2317).
gaggttaccctctatttct

SEQ ID NO: 646588 - DNA, 19 bp, Mus musculus
  siRNA target sequence for Trpm5 (NM_020277.1,2455-2473).
gtgggagtcacctgtagaa

SEQ ID NO: 646589 - DNA, 19 bp, Mus musculus
  siRNA target sequence for Trpm5 (NM_020277.1,2544-2562).
catccacatctttgctatt

SEQ ID NO: 646590 - DNA, 19 bp, Mus musculus
  siRNA target sequence for Trpm5 (NM_020277.1,2548-2566).
cacatctttgctattcaca

SEQ ID NO: 646591 - DNA, 19 bp, Mus musculus
  siRNA target sequence for Trpm5 (NM_020277.1,2576-2594).
gtcctaagatcatcattgt

SEQ ID NO: 646592 - DNA, 19 bp, Mus musculus
  siRNA target sequence for Trpm5 (NM_020277.1,2695-2713).
ggccgtttggagtggattt

SEQ ID NO: 646593 - DNA, 19 bp, Mus musculus
  siRNA target sequence for Trpm5 (NM_020277.1,2779-2797).
gaggctcgtgtgaactgtt

SEQ ID NO: 646594 - DNA, 19 bp, Mus musculus
  siRNA target sequence for Trpm5 (NM_020277.1,2880-2898).
cttcctgcttgtcactaat

SEQ ID NO: 646595 - DNA, 19 bp, Mus musculus
  siRNA target sequence for Trpm5 (NM_020277.1,2894-2912).
ctaatgtgctgctcatgaa

SEQ ID NO: 646596 - DNA, 19 bp, Mus musculus
  siRNA target sequence for Trpm5 (NM_020277.1,2994-3012).
cctcatcgttgaataccat

SEQ ID NO: 646597 - DNA, 19 bp, Mus musculus
  siRNA target sequence for Trpm5 (NM_020277.1,3083-3101).
ggaaggaagcccagcataa

SEQ ID NO: 646598 - DNA, 19 bp, Mus musculus
  siRNA target sequence for Trpm5 (NM_020277.1,3093-3111).
ccagcataagcgacaacat

SEQ ID NO: 646599 - DNA, 19 bp, Mus musculus
  siRNA target sequence for Trpm5 (NM_020277.1,3155-3173).
cctgggaaacggttcaaaa

SEQ ID NO: 646600 - DNA, 19 bp, Mus musculus
  siRNA target sequence for Trpm5 (NM_020277.1,3164-3182).
cggttcaaaaggagaactt

SEQ ID NO: 646601 - DNA, 19 bp, Mus musculus
  siRNA target sequence for Trpm5 (NM_020277.1,3313-3331).
gaatcacaggccaactact

SEQ ID NO: 646602 - DNA, 19 bp, Mus musculus
  siRNA target sequence for Trpm5 (NM_020277.1,3337-3355).
ctcctcttgtcctctatga

SEQ ID NO: 646603 - DNA, 19 bp, Mus musculus
  siRNA target sequence for Trpm5 (NM_020277.1,3347-3365).
cctctatgacggatacact

SEQ ID NO: 646604 - DNA, 19 bp, Mus musculus
  siRNA target sequence for Trpv3 (NM_145099.1,91-109).
gcccctcatgggcaaaaga

SEQ ID NO: 646605 - DNA, 19 bp, Mus musculus
  siRNA target sequence for Trpv3 (NM_145099.1,123-141).
gcgggaaccctgttgtact

SEQ ID NO: 646606 - DNA, 19 bp, Mus musculus
  siRNA target sequence for Trpv3 (NM_145099.1,343-361).
gacagagaccccatccaat

SEQ ID NO: 646607 - DNA, 19 bp, Mus musculus
  siRNA target sequence for Trpv3 (NM_145099.1,708-726).
ggcagacagcgctgaacat

SEQ ID NO: 646608 - DNA, 19 bp, Mus musculus
  siRNA target sequence for Trpv3 (NM_145099.1,751-769).
catcacagcagtgcttata

SEQ ID NO: 646609 - DNA, 19 bp, Mus musculus
  siRNA target sequence for Trpv3 (NM_145099.1,829-847).
gcatgaaggcttctatttt

SEQ ID NO: 646610 - DNA, 19 bp, Mus musculus
  siRNA target sequence for Trpv3 (NM_145099.1,978-996).
cagtggctgaggacttcaa

SEQ ID NO: 646611 - DNA, 19 bp, Mus musculus
  siRNA target sequence for Trpv3 (NM_145099.1,1250-1268).
gacacaacgacggataact

SEQ ID NO: 646612 - DNA, 19 bp, Mus musculus
  siRNA target sequence for Trpv3 (NM_145099.1,1252-1270).
cacaacgacggataactct

SEQ ID NO: 646613 - DNA, 19 bp, Mus musculus
  siRNA target sequence for Trpv3 (NM_145099.1,1277-1295).
gaaatcatcgtctacaaca

SEQ ID NO: 646614 - DNA, 19 bp, Mus musculus
  siRNA target sequence for Trpv3 (NM_145099.1,1346-1364).
ctgctacacacgaaatgga

SEQ ID NO: 646615 - DNA, 19 bp, Mus musculus
  siRNA target sequence for Trpv3 (NM_145099.1,1486-1504).
cctgacacacaaaatgagt

SEQ ID NO: 646616 - DNA, 19 bp, Mus musculus
  siRNA target sequence for Trpv3 (NM_145099.1,1487-1505).
ctgacacacaaaatgagtt

SEQ ID NO: 646617 - DNA, 19 bp, Mus musculus
  siRNA target sequence for Trpv3 (NM_145099.1,1648-1666).
ccaagctgtacttgtgata

SEQ ID NO: 646618 - DNA, 19 bp, Mus musculus
  siRNA target sequence for Trpv3 (NM_145099.1,1772-1790).
cagtctatgggcatgtaca

SEQ ID NO: 646619 - DNA, 19 bp, Mus musculus
  siRNA target sequence for Trpv3 (NM_145099.1,1825-1843).
cctcaagttcttgtttgtt

SEQ ID NO: 646620 - DNA, 19 bp, Mus musculus
  siRNA target sequence for Trpv3 (NM_145099.1,1852-1870).
gttcttacttggatttgga

SEQ ID NO: 646621 - DNA, 19 bp, Mus musculus
  siRNA target sequence for Trpv3 (NM_145099.1,1875-1893).
cgctggcctcactgattga

SEQ ID NO: 646622 - DNA, 19 bp, Mus musculus
  siRNA target sequence for Trpv3 (NM_145099.1,1877-1895).
ctggcctcactgattgaga

SEQ ID NO: 646623 - DNA, 19 bp, Mus musculus
  siRNA target sequence for Trpv3 (NM_145099.1,2215-2233).
gggcgagctgtgcaaagta

SEQ ID NO: 646624 - DNA, 19 bp, Mus musculus
  siRNA target sequence for Trpv3 (NM_145099.1,2280-2298).
ggacggaatggaaaacaca

SEQ ID NO: 646625 - DNA, 19 bp, Mus musculus
  siRNA target sequence for Trpv3 (NM_145099.1,2299-2317).
cgtgtccttccttaatgaa

SEQ ID NO: 646626 - DNA, 19 bp, Mus musculus
  siRNA target sequence for Trpv3 (NM_145099.1,2334-2352).
gacggacagcagatttaaa

SEQ ID NO: 646627 - DNA, 19 bp, Mus musculus
  siRNA target sequence for Trpv3 (NM_145099.1,2336-2354).
cggacagcagatttaaaca

SEQ ID NO: 646628 - DNA, 19 bp, Mus musculus
  siRNA target sequence for Trpv3 (NM_145099.1,2340-2358).
cagcagatttaaacaagat

SEQ ID NO: 646629 - DNA, 19 bp, Mus musculus
  siRNA target sequence for Trpv3 (NM_145099.1,2363-2381).
gattcttccaggagcaata

SEQ ID NO: 646630 - DNA, 19 bp, Mus musculus
  siRNA target sequence for Trpv3 (NM_145099.1,2367-2385).
cttccaggagcaatagcaa

SEQ ID NO: 646631 - DNA, 19 bp, Mus musculus
  siRNA target sequence for Trpv3 (NM_145099.1,2389-2407).
caccctctatgcgtttgat

SEQ ID NO: 646632 - DNA, 19 bp, Mus musculus
  siRNA target sequence for Trpv3 (NM_145099.1,2391-2409).
ccctctatgcgtttgatga

SEQ ID NO: 646633 - DNA, 19 bp, Mus musculus
  siRNA target sequence for Trpv3 (NM_145099.1,2392-2410).
cctctatgcgtttgatgaa

SEQ ID NO: 646634 - DNA, 19 bp, Mus musculus
  siRNA target sequence for Trpv3 (NM_145099.1,2393-2411).
ctctatgcgtttgatgaat

SEQ ID NO: 646635 - DNA, 19 bp, Mus musculus
  siRNA target sequence for Trpv3 (NM_145099.1,2395-2413).
ctatgcgtttgatgaatta

SEQ ID NO: 646636 - DNA, 19 bp, Mus musculus
  siRNA target sequence for AI586120 (NM_178697.3,104-122).
ctgtcatcgggctgaaact

SEQ ID NO: 646637 - DNA, 19 bp, Mus musculus
  siRNA target sequence for AI586120 (NM_178697.3,237-255).
ggatctgaagctgattaca

SEQ ID NO: 646638 - DNA, 19 bp, Mus musculus
  siRNA target sequence for AI586120 (NM_178697.3,249-267).
gattacaaacattaaggaa

SEQ ID NO: 646639 - DNA, 19 bp, Mus musculus
  siRNA target sequence for AI586120 (NM_178697.3,275-293).
ccgaagcttccttttacct

SEQ ID NO: 646640 - DNA, 19 bp, Mus musculus
  siRNA target sequence for AI586120 (NM_178697.3,351-369).
cacttggacggatcataat

SEQ ID NO: 646641 - DNA, 19 bp, Mus musculus
  siRNA target sequence for AI586120 (NM_178697.3,353-371).
cttggacggatcataatta

SEQ ID NO: 646642 - DNA, 19 bp, Mus musculus
  siRNA target sequence for AI586120 (NM_178697.3,357-375).
gacggatcataattacagt

SEQ ID NO: 646643 - DNA, 19 bp, Mus musculus
  siRNA target sequence for AI586120 (NM_178697.3,475-493).
gggcaagaggggagataca

SEQ ID NO: 646644 - DNA, 19 bp, Mus musculus
  siRNA target sequence for AI586120 (NM_178697.3,513-531).
cctactcaacgatgagtta

SEQ ID NO: 646645 - DNA, 19 bp, Mus musculus
  siRNA target sequence for AI586120 (NM_178697.3,590-608).
ggggtgtgttcgatgaata

SEQ ID NO: 646646 - DNA, 19 bp, Mus musculus
  siRNA target sequence for AI586120 (NM_178697.3,591-609).
gggtgtgttcgatgaatat

SEQ ID NO: 646647 - DNA, 19 bp, Mus musculus
  siRNA target sequence for AI586120 (NM_178697.3,592-610).
ggtgtgttcgatgaatata

SEQ ID NO: 646648 - DNA, 19 bp, Mus musculus
  siRNA target sequence for AI586120 (NM_178697.3,593-611).
gtgtgttcgatgaatataa

SEQ ID NO: 646649 - DNA, 19 bp, Mus musculus
  siRNA target sequence for AI586120 (NM_178697.3,595-613).
gtgttcgatgaatataaca

SEQ ID NO: 646650 - DNA, 19 bp, Mus musculus
  siRNA target sequence for AI586120 (NM_178697.3,631-649).
gtgaatggacggaatgaga

SEQ ID NO: 646651 - DNA, 19 bp, Mus musculus
  siRNA target sequence for AI586120 (NM_178697.3,633-651).
gaatggacggaatgagatt

SEQ ID NO: 646652 - DNA, 19 bp, Mus musculus
  siRNA target sequence for AI586120 (NM_178697.3,638-656).
gacggaatgagattcaagt

SEQ ID NO: 646653 - DNA, 19 bp, Mus musculus
  siRNA target sequence for AI586120 (NM_178697.3,663-681).
gtgttcatctgacattaca

SEQ ID NO: 646654 - DNA, 19 bp, Mus musculus
  siRNA target sequence for AI586120 (NM_178697.3,682-700).
ggcgtttttgtgtgtgaaa

SEQ ID NO: 646655 - DNA, 19 bp, Mus musculus
  siRNA target sequence for AI586120 (NM_178697.3,752-770).
gatgcacattcctctacaa

SEQ ID NO: 646656 - DNA, 19 bp, Mus musculus
  siRNA target sequence for AI586120 (NM_178697.3,780-798).
gaatgcaactggatcaata

SEQ ID NO: 646657 - DNA, 19 bp, Mus musculus
  siRNA target sequence for AI586120 (NM_178697.3,784-802).
gcaactggatcaataatgt

SEQ ID NO: 646658 - DNA, 19 bp, Mus musculus
  siRNA target sequence for AI586120 (NM_178697.3,801-819).
gttcatgccaagtttacct

SEQ ID NO: 646659 - DNA, 19 bp, Mus musculus
  siRNA target sequence for AI586120 (NM_178697.3,1011-1029).
ggtctgcttagtgattgat

SEQ ID NO: 646660 - DNA, 19 bp, Mus musculus
  siRNA target sequence for AI586120 (NM_178697.3,1056-1074).
cagactgctccgacttcaa

SEQ ID NO: 646661 - DNA, 19 bp, Mus musculus
  siRNA target sequence for AI586120 (NM_178697.3,1058-1076).
gactgctccgacttcaaca

SEQ ID NO: 646662 - DNA, 19 bp, Mus musculus
  siRNA target sequence for AI586120 (NM_178697.3,1160-1178).
gagcctcgctgcagcaaat

SEQ ID NO: 646663 - DNA, 19 bp, Mus musculus
  siRNA target sequence for AI586120 (NM_178697.3,1162-1180).
gcctcgctgcagcaaattt

SEQ ID NO: 646664 - DNA, 19 bp, Mus musculus
  siRNA target sequence for AI586120 (NM_178697.3,1232-1250).
ccactgacgcagaaacgaa

SEQ ID NO: 646665 - DNA, 19 bp, Mus musculus
  siRNA target sequence for AI586120 (NM_178697.3,1237-1255).
gacgcagaaacgaacatct

SEQ ID NO: 646666 - DNA, 19 bp, Mus musculus
  siRNA target sequence for AI586120 (NM_178697.3,1366-1384).
ctgctcacctcgatgaaca

SEQ ID NO: 646667 - DNA, 19 bp, Mus musculus
  siRNA target sequence for AI586120 (NM_178697.3,1418-1436).
cctctgcagccagaaaagt

SEQ ID NO: 646668 - DNA, 19 bp, Mus musculus
  siRNA target sequence for AI586120 (NM_178697.3,1440-1458).
ggaattatcacgtcttaca

SEQ ID NO: 646669 - DNA, 19 bp, Mus musculus
  siRNA target sequence for AI586120 (NM_178697.3,1451-1469).
gtcttacaggaggtctaaa

SEQ ID NO: 646670 - DNA, 19 bp, Mus musculus
  siRNA target sequence for AI586120 (NM_178697.3,1459-1477).
ggaggtctaaagttcttca

SEQ ID NO: 646671 - DNA, 19 bp, Mus musculus
  siRNA target sequence for AI586120 (NM_178697.3,1460-1478).
gaggtctaaagttcttcat

SEQ ID NO: 646672 - DNA, 19 bp, Mus musculus
  siRNA target sequence for AI586120 (NM_178697.3,1480-1498).
ccagataaatttacttcta

SEQ ID NO: 646673 - DNA, 19 bp, Mus musculus
  siRNA target sequence for AI586120 (NM_178697.3,1508-1526).
ctgaagctttcgttcgaat

SEQ ID NO: 646674 - DNA, 19 bp, Mus musculus
  siRNA target sequence for AI586120 (NM_178697.3,1513-1531).
gctttcgttcgaatctctt

SEQ ID NO: 646675 - DNA, 19 bp, Mus musculus
  siRNA target sequence for AI586120 (NM_178697.3,1600-1618).
caccagctggcggatacta

SEQ ID NO: 646676 - DNA, 19 bp, Mus musculus
  siRNA target sequence for AI586120 (NM_178697.3,1605-1623).
gctggcggatactatgact

SEQ ID NO: 646677 - DNA, 19 bp, Mus musculus
  siRNA target sequence for AI586120 (NM_178697.3,1636-1654).
gtgggcaatgacacacttt

SEQ ID NO: 646678 - DNA, 19 bp, Mus musculus
  siRNA target sequence for AI586120 (NM_178697.3,1701-1719).
ggatcctagcggaagaaaa

SEQ ID NO: 646679 - DNA, 19 bp, Mus musculus
  siRNA target sequence for AI586120 (NM_178697.3,1702-1720).
gatcctagcggaagaaaat

SEQ ID NO: 646680 - DNA, 19 bp, Mus musculus
  siRNA target sequence for AI586120 (NM_178697.3,1705-1723).
cctagcggaagaaaataca

SEQ ID NO: 646681 - DNA, 19 bp, Mus musculus
  siRNA target sequence for AI586120 (NM_178697.3,1706-1724).
ctagcggaagaaaatacaa

SEQ ID NO: 646682 - DNA, 19 bp, Mus musculus
  siRNA target sequence for AI586120 (NM_178697.3,1756-1774).
cggacagccagccttaaga

SEQ ID NO: 646683 - DNA, 19 bp, Mus musculus
  siRNA target sequence for AI586120 (NM_178697.3,1757-1775).
ggacagccagccttaagat

SEQ ID NO: 646684 - DNA, 19 bp, Mus musculus
  siRNA target sequence for AI586120 (NM_178697.3,1758-1776).
gacagccagccttaagatt

SEQ ID NO: 646685 - DNA, 19 bp, Mus musculus
  siRNA target sequence for AI586120 (NM_178697.3,1802-1820).
ggacttacacgctgaacaa

SEQ ID NO: 646686 - DNA, 19 bp, Mus musculus
  siRNA target sequence for AI586120 (NM_178697.3,1834-1852).
ccccaagctctgaaagtga

SEQ ID NO: 646687 - DNA, 19 bp, Mus musculus
  siRNA target sequence for AI586120 (NM_178697.3,1912-1930).
gaaagagacagcacctatt

SEQ ID NO: 646688 - DNA, 19 bp, Mus musculus
  siRNA target sequence for AI586120 (NM_178697.3,1933-1951).
cctcagccagtgatcattt

SEQ ID NO: 646689 - DNA, 19 bp, Mus musculus
  siRNA target sequence for AI586120 (NM_178697.3,2021-2039).
ctggagatcccgttgtact

SEQ ID NO: 646690 - DNA, 19 bp, Mus musculus
  siRNA target sequence for AI586120 (NM_178697.3,2029-2047).
cccgttgtactgcaacttt

SEQ ID NO: 646691 - DNA, 19 bp, Mus musculus
  siRNA target sequence for AI586120 (NM_178697.3,2030-2048).
ccgttgtactgcaactttt

SEQ ID NO: 646692 - DNA, 19 bp, Mus musculus
  siRNA target sequence for AI586120 (NM_178697.3,2086-2104).
gggatttactccaggtatt

SEQ ID NO: 646693 - DNA, 19 bp, Mus musculus
  siRNA target sequence for AI586120 (NM_178697.3,2116-2134).
gctgtaagtggtagctata

SEQ ID NO: 646694 - DNA, 19 bp, Mus musculus
  siRNA target sequence for AI586120 (NM_178697.3,2195-2213).
gaaaccatgctatgtatgt

SEQ ID NO: 646695 - DNA, 19 bp, Mus musculus
  siRNA target sequence for AI586120 (NM_178697.3,2212-2230).
gtaccaggttacataacaa

SEQ ID NO: 646696 - DNA, 19 bp, Mus musculus
  siRNA target sequence for AI586120 (NM_178697.3,2218-2236).
ggttacataacaaacgata

SEQ ID NO: 646697 - DNA, 19 bp, Mus musculus
  siRNA target sequence for AI586120 (NM_178697.3,2219-2237).
gttacataacaaacgataa

SEQ ID NO: 646698 - DNA, 19 bp, Mus musculus
  siRNA target sequence for AI586120 (NM_178697.3,2232-2250).
cgataatattcaaatgaat

SEQ ID NO: 646699 - DNA, 19 bp, Mus musculus
  siRNA target sequence for AI586120 (NM_178697.3,2364-2382).
gtttccaccgtgcaaaatt

SEQ ID NO: 646700 - DNA, 19 bp, Mus musculus
  siRNA target sequence for AI586120 (NM_178697.3,2451-2469).
cgatcaggggcaaactaca

SEQ ID NO: 646701 - DNA, 19 bp, Mus musculus
  siRNA target sequence for AI586120 (NM_178697.3,2452-2470).
gatcaggggcaaactacaa

SEQ ID NO: 646702 - DNA, 19 bp, Mus musculus
  siRNA target sequence for AI586120 (NM_178697.3,2457-2475).
ggggcaaactacaagctat

SEQ ID NO: 646703 - DNA, 19 bp, Mus musculus
  siRNA target sequence for AI586120 (NM_178697.3,2460-2478).
gcaaactacaagctatgaa

SEQ ID NO: 646704 - DNA, 19 bp, Mus musculus
  siRNA target sequence for AI586120 (NM_178697.3,2461-2479).
caaactacaagctatgaaa

SEQ ID NO: 646705 - DNA, 19 bp, Mus musculus
  siRNA target sequence for AI586120 (NM_178697.3,2527-2545).
gccatcttggtgaattcgt

SEQ ID NO: 646706 - DNA, 19 bp, Mus musculus
  siRNA target sequence for AI586120 (NM_178697.3,2607-2625).
cacccatgaacttgatcat

SEQ ID NO: 646707 - DNA, 19 bp, Mus musculus
  siRNA target sequence for AI586120 (NM_178697.3,2644-2662).
caagaaccctacatagtgt

SEQ ID NO: 646708 - DNA, 19 bp, Mus musculus
  siRNA target sequence for AI586120 (NM_178697.3,2671-2689).
ctgagagccatggatagaa

SEQ ID NO: 646709 - DNA, 19 bp, Mus musculus
  siRNA target sequence for AI586120 (NM_178697.3,2700-2718).
gtcagctgtgtcaaacatt

SEQ ID NO: 646710 - DNA, 19 bp, Mus musculus
  siRNA target sequence for AI586120 (NM_178697.3,2778-2796).
gatcctgaaaggagtttta

SEQ ID NO: 646711 - DNA, 19 bp, Mus musculus
  siRNA target sequence for AI586120 (NM_178697.3,2781-2799).
cctgaaaggagttttaaca

SEQ ID NO: 646712 - DNA, 19 bp, Mus musculus
  siRNA target sequence for AI586120 (NM_178697.3,2801-2819).
cagtaggtttgatagcaat

SEQ ID NO: 646713 - DNA, 19 bp, Mus musculus
  siRNA target sequence for AI586120 (NM_178697.3,2806-2824).
ggtttgatagcaatccttt

SEQ ID NO: 646714 - DNA, 19 bp, Mus musculus
  siRNA target sequence for AI586120 (NM_178697.3,2835-2853).
ggttgtagcacactgtatt

SEQ ID NO: 646715 - DNA, 19 bp, Mus musculus
  siRNA target sequence for AI586120 (NM_178697.3,2836-2854).
gttgtagcacactgtattt

SEQ ID NO: 646716 - DNA, 19 bp, Mus musculus
  siRNA target sequence for Clca1 (NM_009899.2,284-302).
gtacttaatgccaaaacga

SEQ ID NO: 646717 - DNA, 19 bp, Mus musculus
  siRNA target sequence for Clca1 (NM_009899.2,1412-1430).
cctaaacagccttatcgat

SEQ ID NO: 646718 - DNA, 19 bp, Mus musculus
  siRNA target sequence for Clca1 (NM_009899.2,2057-2075).
gcgtgtccaggcacaaaga

SEQ ID NO: 646719 - DNA, 19 bp, Mus musculus
  siRNA target sequence for Clca2 (NM_030601.2,2059-2077).
gcgtgtccaggcaagaaaa

SEQ ID NO: 646720 - DNA, 19 bp, Mus musculus
  siRNA target sequence for Clca3 (NM_017474.1,82-100).
ccctcatccaactgaacaa

SEQ ID NO: 646721 - DNA, 19 bp, Mus musculus
  siRNA target sequence for Clca3 (NM_017474.1,137-155).
cgacgtgccggaagatgaa

SEQ ID NO: 646722 - DNA, 19 bp, Mus musculus
  siRNA target sequence for Clca3 (NM_017474.1,156-174).
gccctcattcaacacataa

SEQ ID NO: 646723 - DNA, 19 bp, Mus musculus
  siRNA target sequence for Clca3 (NM_017474.1,157-175).
ccctcattcaacacataaa

SEQ ID NO: 646724 - DNA, 19 bp, Mus musculus
  siRNA target sequence for Clca3 (NM_017474.1,269-287).
gaaggcaaagcctgaatat

SEQ ID NO: 646725 - DNA, 19 bp, Mus musculus
  siRNA target sequence for Clca3 (NM_017474.1,273-291).
gcaaagcctgaatatacga

SEQ ID NO: 646726 - DNA, 19 bp, Mus musculus
  siRNA target sequence for Clca3 (NM_017474.1,317-335).
cgctgatgtccttgtatca

SEQ ID NO: 646727 - DNA, 19 bp, Mus musculus
  siRNA target sequence for Clca3 (NM_017474.1,360-378).
gagccctacaccgaacata

SEQ ID NO: 646728 - DNA, 19 bp, Mus musculus
  siRNA target sequence for Clca3 (NM_017474.1,362-380).
gccctacaccgaacatata

SEQ ID NO: 646729 - DNA, 19 bp, Mus musculus
  siRNA target sequence for Clca3 (NM_017474.1,365-383).
ctacaccgaacatatagga

SEQ ID NO: 646730 - DNA, 19 bp, Mus musculus
  siRNA target sequence for Clca3 (NM_017474.1,494-512).
cttccgatggggagtgttt

SEQ ID NO: 646731 - DNA, 19 bp, Mus musculus
  siRNA target sequence for Clca3 (NM_017474.1,497-515).
ccgatggggagtgtttaat

SEQ ID NO: 646732 - DNA, 19 bp, Mus musculus
  siRNA target sequence for Clca3 (NM_017474.1,499-517).
gatggggagtgtttaatga

SEQ ID NO: 646733 - DNA, 19 bp, Mus musculus
  siRNA target sequence for Clca3 (NM_017474.1,528-546).
gacgagaagttctacttat

SEQ ID NO: 646734 - DNA, 19 bp, Mus musculus
  siRNA target sequence for Clca3 (NM_017474.1,531-549).
gagaagttctacttatcca

SEQ ID NO: 646735 - DNA, 19 bp, Mus musculus
  siRNA target sequence for Clca3 (NM_017474.1,580-598).
cagccattaccggtaaaaa

SEQ ID NO: 646736 - DNA, 19 bp, Mus musculus
  siRNA target sequence for Clca3 (NM_017474.1,615-633).
cagggaggcagttgtatca

SEQ ID NO: 646737 - DNA, 19 bp, Mus musculus
  siRNA target sequence for Clca3 (NM_017474.1,617-635).
gggaggcagttgtatcact

SEQ ID NO: 646738 - DNA, 19 bp, Mus musculus
  siRNA target sequence for Clca3 (NM_017474.1,619-637).
gaggcagttgtatcactaa

SEQ ID NO: 646739 - DNA, 19 bp, Mus musculus
  siRNA target sequence for Clca3 (NM_017474.1,634-652).
ctaacggaaagtgtgtaat

SEQ ID NO: 646740 - DNA, 19 bp, Mus musculus
  siRNA target sequence for Clca3 (NM_017474.1,656-674).
cagagtaacgggactgtat

SEQ ID NO: 646741 - DNA, 19 bp, Mus musculus
  siRNA target sequence for Clca3 (NM_017474.1,658-676).
gagtaacgggactgtataa

SEQ ID NO: 646742 - DNA, 19 bp, Mus musculus
  siRNA target sequence for Clca3 (NM_017474.1,664-682).
cgggactgtataaagacaa

SEQ ID NO: 646743 - DNA, 19 bp, Mus musculus
  siRNA target sequence for Clca3 (NM_017474.1,665-683).
gggactgtataaagacaat

SEQ ID NO: 646744 - DNA, 19 bp, Mus musculus
  siRNA target sequence for Clca3 (NM_017474.1,666-684).
ggactgtataaagacaatt

SEQ ID NO: 646745 - DNA, 19 bp, Mus musculus
  siRNA target sequence for Clca3 (NM_017474.1,731-749).
gtttaaccaaaatatcaat

SEQ ID NO: 646746 - DNA, 19 bp, Mus musculus
  siRNA target sequence for Clca3 (NM_017474.1,803-821).
ccaaaaccaacgatgcaat

SEQ ID NO: 646747 - DNA, 19 bp, Mus musculus
  siRNA target sequence for Clca3 (NM_017474.1,908-926).
ctcactgctgcaaattgga

SEQ ID NO: 646748 - DNA, 19 bp, Mus musculus
  siRNA target sequence for Clca3 (NM_017474.1,915-933).
ctgcaaattggacaaagaa

SEQ ID NO: 646749 - DNA, 19 bp, Mus musculus
  siRNA target sequence for Clca3 (NM_017474.1,1067-1085).
cagtgctgcctatgtacaa

SEQ ID NO: 646750 - DNA, 19 bp, Mus musculus
  siRNA target sequence for Clca3 (NM_017474.1,1087-1105).
gcgaactcaaacagttaaa

SEQ ID NO: 646751 - DNA, 19 bp, Mus musculus
  siRNA target sequence for Clca3 (NM_017474.1,1136-1154).
gcacttacccacagtatct

SEQ ID NO: 646752 - DNA, 19 bp, Mus musculus
  siRNA target sequence for Clca3 (NM_017474.1,1179-1197).
ggccttcggacagcattta

SEQ ID NO: 646753 - DNA, 19 bp, Mus musculus
  siRNA target sequence for Clca3 (NM_017474.1,1187-1205).
gacagcatttacagtgata

SEQ ID NO: 646754 - DNA, 19 bp, Mus musculus
  siRNA target sequence for Clca3 (NM_017474.1,1191-1209).
gcatttacagtgataaaga

SEQ ID NO: 646755 - DNA, 19 bp, Mus musculus
  siRNA target sequence for Clca3 (NM_017474.1,1208-1226).
gaagaagtatccaactgat

SEQ ID NO: 646756 - DNA, 19 bp, Mus musculus
  siRNA target sequence for Clca3 (NM_017474.1,1219-1237).
caactgatggatctgaaat

SEQ ID NO: 646757 - DNA, 19 bp, Mus musculus
  siRNA target sequence for Clca3 (NM_017474.1,1257-1275).
gaggacaacaccattagca

SEQ ID NO: 646758 - DNA, 19 bp, Mus musculus
  siRNA target sequence for Clca3 (NM_017474.1,1330-1348).
gaccggctgccgctaaaga

SEQ ID NO: 646759 - DNA, 19 bp, Mus musculus
  siRNA target sequence for Clca3 (NM_017474.1,1374-1392).
ggaggcctgcagacatact

SEQ ID NO: 646760 - DNA, 19 bp, Mus musculus
  siRNA target sequence for Clca3 (NM_017474.1,1377-1395).
ggcctgcagacatactctt

SEQ ID NO: 646761 - DNA, 19 bp, Mus musculus
  siRNA target sequence for Clca3 (NM_017474.1,1397-1415).
ggatcaggttcagaacaat

SEQ ID NO: 646762 - DNA, 19 bp, Mus musculus
  siRNA target sequence for Clca3 (NM_017474.1,1409-1427).
gaacaatggtcttgttgat

SEQ ID NO: 646763 - DNA, 19 bp, Mus musculus
  siRNA target sequence for Clca3 (NM_017474.1,1553-1571).
gggcaaggacaccttgttt

SEQ ID NO: 646764 - DNA, 19 bp, Mus musculus
  siRNA target sequence for Clca3 (NM_017474.1,1555-1573).
gcaaggacaccttgtttct

SEQ ID NO: 646765 - DNA, 19 bp, Mus musculus
  siRNA target sequence for Clca3 (NM_017474.1,1588-1606).
cgcatcctcctacaatatt

SEQ ID NO: 646766 - DNA, 19 bp, Mus musculus
  siRNA target sequence for Clca3 (NM_017474.1,1590-1608).
catcctcctacaatattta

SEQ ID NO: 646767 - DNA, 19 bp, Mus musculus
  siRNA target sequence for Clca3 (NM_017474.1,1617-1635).
cccagcggagtggaacaaa

SEQ ID NO: 646768 - DNA, 19 bp, Mus musculus
  siRNA target sequence for Clca3 (NM_017474.1,1682-1700).
cccaggcacggctaaggtt

SEQ ID NO: 646769 - DNA, 19 bp, Mus musculus
  siRNA target sequence for Clca3 (NM_017474.1,1792-1810).
cagtgaccccggtagtgaa

SEQ ID NO: 646770 - DNA, 19 bp, Mus musculus
  siRNA target sequence for Clca3 (NM_017474.1,1794-1812).
gtgaccccggtagtgaata

SEQ ID NO: 646771 - DNA, 19 bp, Mus musculus
  siRNA target sequence for Clca3 (NM_017474.1,1889-1907).
cagcgtcacagccttgatt

SEQ ID NO: 646772 - DNA, 19 bp, Mus musculus
  siRNA target sequence for Clca3 (NM_017474.1,1927-1945).
cagtaaccctggaattact

SEQ ID NO: 646773 - DNA, 19 bp, Mus musculus
  siRNA target sequence for Clca3 (NM_017474.1,1983-2001).
ggtgtctactcaaggtttt

SEQ ID NO: 646774 - DNA, 19 bp, Mus musculus
  siRNA target sequence for Clca3 (NM_017474.1,1988-2006).
ctactcaaggttttttaca

SEQ ID NO: 646775 - DNA, 19 bp, Mus musculus
  siRNA target sequence for Clca3 (NM_017474.1,2023-2041).
gtagatacagcgttaaaat

SEQ ID NO: 646776 - DNA, 19 bp, Mus musculus
  siRNA target sequence for Clca3 (NM_017474.1,2096-2114).
cagagccatgtacatagat

SEQ ID NO: 646777 - DNA, 19 bp, Mus musculus
  siRNA target sequence for Clca3 (NM_017474.1,2120-2138).
gattgaggatggtgaagta

SEQ ID NO: 646778 - DNA, 19 bp, Mus musculus
  siRNA target sequence for Clca3 (NM_017474.1,2127-2145).
gatggtgaagtaagaatga

SEQ ID NO: 646779 - DNA, 19 bp, Mus musculus
  siRNA target sequence for Clca3 (NM_017474.1,2148-2166).
ccaccacgtcctgaaacta

SEQ ID NO: 646780 - DNA, 19 bp, Mus musculus
  siRNA target sequence for Clca3 (NM_017474.1,2151-2169).
ccacgtcctgaaactagtt

SEQ ID NO: 646781 - DNA, 19 bp, Mus musculus
  siRNA target sequence for Clca3 (NM_017474.1,2152-2170).
cacgtcctgaaactagtta

SEQ ID NO: 646782 - DNA, 19 bp, Mus musculus
  siRNA target sequence for Clca3 (NM_017474.1,2164-2182).
ctagttatgttcaagacaa

SEQ ID NO: 646783 - DNA, 19 bp, Mus musculus
  siRNA target sequence for Clca3 (NM_017474.1,2192-2210).
cttcagcaggacatcttca

SEQ ID NO: 646784 - DNA, 19 bp, Mus musculus
  siRNA target sequence for Clca3 (NM_017474.1,2361-2379).
gggagagcttccaactaca

SEQ ID NO: 646785 - DNA, 19 bp, Mus musculus
  siRNA target sequence for Clca3 (NM_017474.1,2362-2380).
ggagagcttccaactacat

SEQ ID NO: 646786 - DNA, 19 bp, Mus musculus
  siRNA target sequence for Clca3 (NM_017474.1,2392-2410).
gcaccagtatcgttgatct

SEQ ID NO: 646787 - DNA, 19 bp, Mus musculus
  siRNA target sequence for Clca3 (NM_017474.1,2501-2519).
gggaggcaacacttttgga

SEQ ID NO: 646788 - DNA, 19 bp, Mus musculus
  siRNA target sequence for Clca3 (NM_017474.1,2502-2520).
ggaggcaacacttttggaa

SEQ ID NO: 646789 - DNA, 19 bp, Mus musculus
  siRNA target sequence for Clca3 (NM_017474.1,2542-2560).
ctatccaggctgtggataa

SEQ ID NO: 646790 - DNA, 19 bp, Mus musculus
  siRNA target sequence for Clca3 (NM_017474.1,2553-2571).
gtggataagtccaatctga

SEQ ID NO: 646791 - DNA, 19 bp, Mus musculus
  siRNA target sequence for Clca3 (NM_017474.1,2556-2574).
gataagtccaatctgaaat

SEQ ID NO: 646792 - DNA, 19 bp, Mus musculus
  siRNA target sequence for Clca3 (NM_017474.1,2690-2708).
catccacgtgctgaagata

SEQ ID NO: 646793 - DNA, 19 bp, Mus musculus
  siRNA target sequence for Clca3 (NM_017474.1,2694-2712).
cacgtgctgaagataatgt

SEQ ID NO: 646794 - DNA, 19 bp, Mus musculus
  siRNA target sequence for Clca4 (NM_139148.1,193-211).
cctccacttacctgtttga

SEQ ID NO: 646795 - DNA, 19 bp, Mus musculus
  siRNA target sequence for Clca4 (NM_139148.1,236-254).
cagaaacgtgagcatttta

SEQ ID NO: 646796 - DNA, 19 bp, Mus musculus
  siRNA target sequence for Clca4 (NM_139148.1,238-256).
gaaacgtgagcattttagt

SEQ ID NO: 646797 - DNA, 19 bp, Mus musculus
  siRNA target sequence for Clca4 (NM_139148.1,643-661).
gatgtcgtcgagatgcaaa

SEQ ID NO: 646798 - DNA, 19 bp, Mus musculus
  siRNA target sequence for Clca4 (NM_139148.1,672-690).
caggaagccaagtgtacat

SEQ ID NO: 646799 - DNA, 19 bp, Mus musculus
  siRNA target sequence for Clca4 (NM_139148.1,714-732).
gcgaggggctccatcatgt

SEQ ID NO: 646800 - DNA, 19 bp, Mus musculus
  siRNA target sequence for Clca4 (NM_139148.1,715-733).
cgaggggctccatcatgtt

SEQ ID NO: 646801 - DNA, 19 bp, Mus musculus
  siRNA target sequence for Clca4 (NM_139148.1,994-1012).
ctcgtctgaccctaatgaa

SEQ ID NO: 646802 - DNA, 19 bp, Mus musculus
  siRNA target sequence for Clca4 (NM_139148.1,1021-1039).
cagagctatacttaattca

SEQ ID NO: 646803 - DNA, 19 bp, Mus musculus
  siRNA target sequence for Clca4 (NM_139148.1,1023-1041).
gagctatacttaattcaaa

SEQ ID NO: 646804 - DNA, 19 bp, Mus musculus
  siRNA target sequence for Clca4 (NM_139148.1,1061-1079).
ggtcggcctggtgacattt

SEQ ID NO: 646805 - DNA, 19 bp, Mus musculus
  siRNA target sequence for Clca4 (NM_139148.1,1065-1083).
ggcctggtgacatttgata

SEQ ID NO: 646806 - DNA, 19 bp, Mus musculus
  siRNA target sequence for Clca4 (NM_139148.1,1091-1109).
cacaatccaaactaaccta

SEQ ID NO: 646807 - DNA, 19 bp, Mus musculus
  siRNA target sequence for Clca4 (NM_139148.1,1093-1111).
caatccaaactaacctaat

SEQ ID NO: 646808 - DNA, 19 bp, Mus musculus
  siRNA target sequence for Clca4 (NM_139148.1,1098-1116).
caaactaacctaataagga

SEQ ID NO: 646809 - DNA, 19 bp, Mus musculus
  siRNA target sequence for Clca4 (NM_139148.1,1106-1124).
cctaataaggatcatcaat

SEQ ID NO: 646810 - DNA, 19 bp, Mus musculus
  siRNA target sequence for Clca4 (NM_139148.1,1147-1165).
gcacaaagctgcctcaata

SEQ ID NO: 646811 - DNA, 19 bp, Mus musculus
  siRNA target sequence for Clca4 (NM_139148.1,1167-1185).
ccaaatggcggaacttcaa

SEQ ID NO: 646812 - DNA, 19 bp, Mus musculus
  siRNA target sequence for Clca4 (NM_139148.1,1168-1186).
caaatggcggaacttcaat

SEQ ID NO: 646813 - DNA, 19 bp, Mus musculus
  siRNA target sequence for Clca4 (NM_139148.1,1421-1439).
cgtgaatggcctgattgat

SEQ ID NO: 646814 - DNA, 19 bp, Mus musculus
  siRNA target sequence for Clca4 (NM_139148.1,1729-1747).
ggacttacagcctcttaaa

SEQ ID NO: 646815 - DNA, 19 bp, Mus musculus
  siRNA target sequence for Clca4 (NM_139148.1,1755-1773).
gccacatctcagttgctaa

SEQ ID NO: 646816 - DNA, 19 bp, Mus musculus
  siRNA target sequence for Clca4 (NM_139148.1,1942-1960).
ctgagagtggaaatcaagt

SEQ ID NO: 646817 - DNA, 19 bp, Mus musculus
  siRNA target sequence for Clca4 (NM_139148.1,1993-2011).
ctgacacactcaaaaatga

SEQ ID NO: 646818 - DNA, 19 bp, Mus musculus
  siRNA target sequence for Clca4 (NM_139148.1,2012-2030).
cggcatctactcaagatat

SEQ ID NO: 646819 - DNA, 19 bp, Mus musculus
  siRNA target sequence for Clca4 (NM_139148.1,2056-2074).
gatacagcttaaaagtcaa

SEQ ID NO: 646820 - DNA, 19 bp, Mus musculus
  siRNA target sequence for Clca4 (NM_139148.1,2090-2108).
gaacatggctaaactaaat

SEQ ID NO: 646821 - DNA, 19 bp, Mus musculus
  siRNA target sequence for Clca4 (NM_139148.1,2144-2162).
ctacgttgaaaatgatcaa

SEQ ID NO: 646822 - DNA, 19 bp, Mus musculus
  siRNA target sequence for Clca4 (NM_139148.1,2456-2474).
ctctactttagtgaatact

SEQ ID NO: 646823 - DNA, 19 bp, Mus musculus
  siRNA target sequence for Clca4 (NM_139148.1,2476-2494).
ccagtgtaatgcctaaaga

SEQ ID NO: 646824 - DNA, 19 bp, Mus musculus
  siRNA target sequence for Clca4 (NM_139148.1,2624-2642).
ggctgtgaagtttattcct

SEQ ID NO: 646825 - DNA, 19 bp, Mus musculus
  siRNA target sequence for Clca4 (NM_139148.1,2633-2651).
gtttattcctccacaagtt

SEQ ID NO: 646826 - DNA, 19 bp, Mus musculus
  siRNA target sequence for Clca4 (NM_139148.1,2640-2658).
cctccacaagtttatttga

SEQ ID NO: 646827 - DNA, 19 bp, Mus musculus
  siRNA target sequence for Clcn1 (NM_013491.1,183-201).
cggactgccctcagagaat

SEQ ID NO: 646828 - DNA, 19 bp, Mus musculus
  siRNA target sequence for Clcn1 (NM_013491.1,250-268).
gcccacccaacacagatat

SEQ ID NO: 646829 - DNA, 19 bp, Mus musculus
  siRNA target sequence for Clcn1 (NM_013491.1,271-289).
ggccatcaaaaagaacaat

SEQ ID NO: 646830 - DNA, 19 bp, Mus musculus
  siRNA target sequence for Clcn1 (NM_013491.1,274-292).
catcaaaaagaacaatatt

SEQ ID NO: 646831 - DNA, 19 bp, Mus musculus
  siRNA target sequence for Clcn1 (NM_013491.1,310-328).
gggggaatgcccaagaaga

SEQ ID NO: 646832 - DNA, 19 bp, Mus musculus
  siRNA target sequence for Clcn1 (NM_013491.1,311-329).
ggggaatgcccaagaagat

SEQ ID NO: 646833 - DNA, 19 bp, Mus musculus
  siRNA target sequence for Clcn1 (NM_013491.1,357-375).
ggatgaggaccactattct

SEQ ID NO: 646834 - DNA, 19 bp, Mus musculus
  siRNA target sequence for Clcn1 (NM_013491.1,363-381).
ggaccactattctaaatgt

SEQ ID NO: 646835 - DNA, 19 bp, Mus musculus
  siRNA target sequence for Clcn1 (NM_013491.1,429-447).
ggaagattggatctttctt

SEQ ID NO: 646836 - DNA, 19 bp, Mus musculus
  siRNA target sequence for Clcn1 (NM_013491.1,479-497).
gctggtgcatggactatgt

SEQ ID NO: 646837 - DNA, 19 bp, Mus musculus
  siRNA target sequence for Clcn1 (NM_013491.1,575-593).
gggtcaccttcccacttat

SEQ ID NO: 646838 - DNA, 19 bp, Mus musculus
  siRNA target sequence for Clcn1 (NM_013491.1,726-744).
caaggtggtagctttgaca

SEQ ID NO: 646839 - DNA, 19 bp, Mus musculus
  siRNA target sequence for Clcn1 (NM_013491.1,774-792).
gaaagagggtccctttgtt

SEQ ID NO: 646840 - DNA, 19 bp, Mus musculus
  siRNA target sequence for Clcn1 (NM_013491.1,814-832).
gctgtcctcagcaagttta

SEQ ID NO: 646841 - DNA, 19 bp, Mus musculus
  siRNA target sequence for Clcn1 (NM_013491.1,815-833).
ctgtcctcagcaagtttat

SEQ ID NO: 646842 - DNA, 19 bp, Mus musculus
  siRNA target sequence for Clcn1 (NM_013491.1,817-835).
gtcctcagcaagtttatgt

SEQ ID NO: 646843 - DNA, 19 bp, Mus musculus
  siRNA target sequence for Clcn1 (NM_013491.1,837-855).
catgttctctggtgtctat

SEQ ID NO: 646844 - DNA, 19 bp, Mus musculus
  siRNA target sequence for Clcn1 (NM_013491.1,858-876).
gcagccatactattacact

SEQ ID NO: 646845 - DNA, 19 bp, Mus musculus
  siRNA target sequence for Clcn1 (NM_013491.1,1138-1156).
gctgtcattgggatttgct

SEQ ID NO: 646846 - DNA, 19 bp, Mus musculus
  siRNA target sequence for Clcn1 (NM_013491.1,1167-1185).
gggagctgttttcgtttat

SEQ ID NO: 646847 - DNA, 19 bp, Mus musculus
  siRNA target sequence for Clcn1 (NM_013491.1,1224-1242).
gtgtctcagccaatttctt

SEQ ID NO: 646848 - DNA, 19 bp, Mus musculus
  siRNA target sequence for Clcn1 (NM_013491.1,1244-1262).
ctaagcaccgcctgctata

SEQ ID NO: 646849 - DNA, 19 bp, Mus musculus
  siRNA target sequence for Clcn1 (NM_013491.1,1248-1266).
gcaccgcctgctatatcct

SEQ ID NO: 646850 - DNA, 19 bp, Mus musculus
  siRNA target sequence for Clcn1 (NM_013491.1,1267-1285).
ggaattgttacctttgtca

SEQ ID NO: 646851 - DNA, 19 bp, Mus musculus
  siRNA target sequence for Clcn1 (NM_013491.1,1287-1305).
cgcctcgctcacatttcca

SEQ ID NO: 646852 - DNA, 19 bp, Mus musculus
  siRNA target sequence for Clcn1 (NM_013491.1,1304-1322).
caccaggaatgggtcaatt

SEQ ID NO: 646853 - DNA, 19 bp, Mus musculus
  siRNA target sequence for Clcn1 (NM_013491.1,1307-1325).
caggaatgggtcaattcat

SEQ ID NO: 646854 - DNA, 19 bp, Mus musculus
  siRNA target sequence for Clcn1 (NM_013491.1,1485-1503).
gttttggatgtccattgta

SEQ ID NO: 646855 - DNA, 19 bp, Mus musculus
  siRNA target sequence for Clcn1 (NM_013491.1,1551-1569).
gctaggagctgcatttgga

SEQ ID NO: 646856 - DNA, 19 bp, Mus musculus
  siRNA target sequence for Clcn1 (NM_013491.1,1624-1642).
gatatcatctataagatct

SEQ ID NO: 646857 - DNA, 19 bp, Mus musculus
  siRNA target sequence for Clcn1 (NM_013491.1,1702-1720).
gtctccacagccgtcattt

SEQ ID NO: 646858 - DNA, 19 bp, Mus musculus
  siRNA target sequence for Clcn1 (NM_013491.1,1711-1729).
gccgtcatttgcttcgaat

SEQ ID NO: 646859 - DNA, 19 bp, Mus musculus
  siRNA target sequence for Clcn1 (NM_013491.1,1712-1730).
ccgtcatttgcttcgaatt

SEQ ID NO: 646860 - DNA, 19 bp, Mus musculus
  siRNA target sequence for Clcn1 (NM_013491.1,1725-1743).
cgaattaaccggtcagatt

SEQ ID NO: 646861 - DNA, 19 bp, Mus musculus
  siRNA target sequence for Clcn1 (NM_013491.1,1872-1890).
ccagctcagcaaatttaca

SEQ ID NO: 646862 - DNA, 19 bp, Mus musculus
  siRNA target sequence for Clcn1 (NM_013491.1,1873-1891).
cagctcagcaaatttacaa

SEQ ID NO: 646863 - DNA, 19 bp, Mus musculus
  siRNA target sequence for Clcn1 (NM_013491.1,1915-1933).
cgtgatgtgaagttcgttt

SEQ ID NO: 646864 - DNA, 19 bp, Mus musculus
  siRNA target sequence for Clcn1 (NM_013491.1,1926-1944).
gttcgtttcagcttcttgt

SEQ ID NO: 646865 - DNA, 19 bp, Mus musculus
  siRNA target sequence for Clcn1 (NM_013491.1,1929-1947).
cgtttcagcttcttgtaca

SEQ ID NO: 646866 - DNA, 19 bp, Mus musculus
  siRNA target sequence for Clcn1 (NM_013491.1,1982-2000).
cagtcaagactttaccatt

SEQ ID NO: 646867 - DNA, 19 bp, Mus musculus
  siRNA target sequence for Clcn1 (NM_013491.1,1986-2004).
caagactttaccattggtt

SEQ ID NO: 646868 - DNA, 19 bp, Mus musculus
  siRNA target sequence for Clcn1 (NM_013491.1,2109-2127).
ggacatggctcgaaagtta

SEQ ID NO: 646869 - DNA, 19 bp, Mus musculus
  siRNA target sequence for Clcn1 (NM_013491.1,2110-2128).
gacatggctcgaaagttat

SEQ ID NO: 646870 - DNA, 19 bp, Mus musculus
  siRNA target sequence for Clcn1 (NM_013491.1,2112-2130).
catggctcgaaagttatca

SEQ ID NO: 646871 - DNA, 19 bp, Mus musculus
  siRNA target sequence for Clcn1 (NM_013491.1,2195-2213).
cctttgccttcgtagatga

SEQ ID NO: 646872 - DNA, 19 bp, Mus musculus
  siRNA target sequence for Clcn1 (NM_013491.1,2196-2214).
ctttgccttcgtagatgaa

SEQ ID NO: 646873 - DNA, 19 bp, Mus musculus
  siRNA target sequence for Clcn1 (NM_013491.1,2373-2391).
ctcagactctgcagatcaa

SEQ ID NO: 646874 - DNA, 19 bp, Mus musculus
  siRNA target sequence for Clcn1 (NM_013491.1,2421-2439).
ctgcttgctaggaaaagct

SEQ ID NO: 646875 - DNA, 19 bp, Mus musculus
  siRNA target sequence for Clcn1 (NM_013491.1,2432-2450).
gaaaagctcactccaaaaa

SEQ ID NO: 646876 - DNA, 19 bp, Mus musculus
  siRNA target sequence for Clcn1 (NM_013491.1,2471-2489).
caacagatttagtggataa

SEQ ID NO: 646877 - DNA, 19 bp, Mus musculus
  siRNA target sequence for Clcn1 (NM_013491.1,2601-2619).
cctgcacaagactcataca

SEQ ID NO: 646878 - DNA, 19 bp, Mus musculus
  siRNA target sequence for Clcn2 (NM_009900.1,351-369).
gccagatgtcgcatttgtt

SEQ ID NO: 646879 - DNA, 19 bp, Mus musculus
  siRNA target sequence for Clcn2 (NM_009900.1,370-388).
ctgtacgctgccacaagtt

SEQ ID NO: 646880 - DNA, 19 bp, Mus musculus
  siRNA target sequence for Clcn2 (NM_009900.1,516-534).
ggcttaaacaccaacatct

SEQ ID NO: 646881 - DNA, 19 bp, Mus musculus
  siRNA target sequence for Clcn2 (NM_009900.1,517-535).
gcttaaacaccaacatctt

SEQ ID NO: 646882 - DNA, 19 bp, Mus musculus
  siRNA target sequence for Clcn2 (NM_009900.1,564-582).
cccgtggtcctcatcactt

SEQ ID NO: 646883 - DNA, 19 bp, Mus musculus
  siRNA target sequence for Clcn2 (NM_009900.1,628-646).
ctggcatccccgaaatgaa

SEQ ID NO: 646884 - DNA, 19 bp, Mus musculus
  siRNA target sequence for Clcn2 (NM_009900.1,630-648).
ggcatccccgaaatgaaaa

SEQ ID NO: 646885 - DNA, 19 bp, Mus musculus
  siRNA target sequence for Clcn2 (NM_009900.1,917-935).
ggtcctattcagcattgaa

SEQ ID NO: 646886 - DNA, 19 bp, Mus musculus
  siRNA target sequence for Clcn2 (NM_009900.1,1075-1093).
gactcgacttcccatttga

SEQ ID NO: 646887 - DNA, 19 bp, Mus musculus
  siRNA target sequence for Clcn2 (NM_009900.1,1182-1200).
caggtgatgcggaagcaaa

SEQ ID NO: 646888 - DNA, 19 bp, Mus musculus
  siRNA target sequence for Clcn2 (NM_009900.1,1184-1202).
ggtgatgcggaagcaaaaa

SEQ ID NO: 646889 - DNA, 19 bp, Mus musculus
  siRNA target sequence for Clcn2 (NM_009900.1,1185-1203).
gtgatgcggaagcaaaaaa

SEQ ID NO: 646890 - DNA, 19 bp, Mus musculus
  siRNA target sequence for Clcn2 (NM_009900.1,1330-1348).
ccctagtcactctgtttga

SEQ ID NO: 646891 - DNA, 19 bp, Mus musculus
  siRNA target sequence for Clcn2 (NM_009900.1,1332-1350).
ctagtcactctgtttgaca

SEQ ID NO: 646892 - DNA, 19 bp, Mus musculus
  siRNA target sequence for Clcn2 (NM_009900.1,1372-1390).
gcctggttgaggatctaga

SEQ ID NO: 646893 - DNA, 19 bp, Mus musculus
  siRNA target sequence for Clcn2 (NM_009900.1,1419-1437).
ccaccacgtgccaatgtct

SEQ ID NO: 646894 - DNA, 19 bp, Mus musculus
  siRNA target sequence for Clcn2 (NM_009900.1,1420-1438).
caccacgtgccaatgtctt

SEQ ID NO: 646895 - DNA, 19 bp, Mus musculus
  siRNA target sequence for Clcn2 (NM_009900.1,1609-1627).
gcagcacctaccgaattgt

SEQ ID NO: 646896 - DNA, 19 bp, Mus musculus
  siRNA target sequence for Clcn2 (NM_009900.1,1718-1736).
gggccagatcgctcacatt

SEQ ID NO: 646897 - DNA, 19 bp, Mus musculus
  siRNA target sequence for Clcn2 (NM_009900.1,1720-1738).
gccagatcgctcacattct

SEQ ID NO: 646898 - DNA, 19 bp, Mus musculus
  siRNA target sequence for Clcn2 (NM_009900.1,1807-1825).
gtatcatccgcatcaagaa

SEQ ID NO: 646899 - DNA, 19 bp, Mus musculus
  siRNA target sequence for Clcn2 (NM_009900.1,1960-1978).
gaaccaagggccgtatgtt

SEQ ID NO: 646900 - DNA, 19 bp, Mus musculus
  siRNA target sequence for Clcn2 (NM_009900.1,2081-2099).
gcagcacatgcaaaagcta

SEQ ID NO: 646901 - DNA, 19 bp, Mus musculus
  siRNA target sequence for Clcn2 (NM_009900.1,2085-2103).
cacatgcaaaagctaagaa

SEQ ID NO: 646902 - DNA, 19 bp, Mus musculus
  siRNA target sequence for Clcn2 (NM_009900.1,2087-2105).
catgcaaaagctaagaaaa

SEQ ID NO: 646903 - DNA, 19 bp, Mus musculus
  siRNA target sequence for Clcn2 (NM_009900.1,2343-2361).
ctggaggcaacatcagaat

SEQ ID NO: 646904 - DNA, 19 bp, Mus musculus
  siRNA target sequence for Clcn2 (NM_009900.1,2348-2366).
ggcaacatcagaattggaa

SEQ ID NO: 646905 - DNA, 19 bp, Mus musculus
  siRNA target sequence for Clcn2 (NM_009900.1,2349-2367).
gcaacatcagaattggaaa

SEQ ID NO: 646906 - DNA, 19 bp, Mus musculus
  siRNA target sequence for Clcn2 (NM_009900.1,2487-2505).
gatgagccagtcaacttca

SEQ ID NO: 646907 - DNA, 19 bp, Mus musculus
  siRNA target sequence for Clcn2 (NM_009900.1,2588-2606).
gggagtggaccatgcttat

SEQ ID NO: 646908 - DNA, 19 bp, Mus musculus
  siRNA target sequence for Clcn2 (NM_009900.1,2590-2608).
gagtggaccatgcttatgt

SEQ ID NO: 646909 - DNA, 19 bp, Mus musculus
  siRNA target sequence for Clcn2 (NM_009900.1,2632-2650).
ggattgtcaccctaaagga

SEQ ID NO: 646910 - DNA, 19 bp, Mus musculus
  siRNA target sequence for Clcn2 (NM_009900.1,2678-2696).
cacagcacagggtgttaaa

SEQ ID NO: 646911 - DNA, 19 bp, Mus musculus
  siRNA target sequence for Clcn2 (NM_009900.1,2682-2700).
gcacagggtgttaaagtca

SEQ ID NO: 646912 - DNA, 19 bp, Mus musculus
  siRNA target sequence for Clcn3 (NM_007711.1,385-403).
ggaggcagcattaatagct

SEQ ID NO: 646913 - DNA, 19 bp, Mus musculus
  siRNA target sequence for Clcn3 (NM_007711.1,445-463).
gtcggtacctacgatgatt

SEQ ID NO: 646914 - DNA, 19 bp, Mus musculus
  siRNA target sequence for Clcn3 (NM_007711.1,449-467).
gtacctacgatgatttcca

SEQ ID NO: 646915 - DNA, 19 bp, Mus musculus
  siRNA target sequence for Clcn3 (NM_007711.1,456-474).
cgatgatttccatactatt

SEQ ID NO: 646916 - DNA, 19 bp, Mus musculus
  siRNA target sequence for Clcn3 (NM_007711.1,460-478).
gatttccatactattgact

SEQ ID NO: 646917 - DNA, 19 bp, Mus musculus
  siRNA target sequence for Clcn3 (NM_007711.1,511-529).
cacagacggatcaacagta

SEQ ID NO: 646918 - DNA, 19 bp, Mus musculus
  siRNA target sequence for Clcn3 (NM_007711.1,513-531).
cagacggatcaacagtaaa

SEQ ID NO: 646919 - DNA, 19 bp, Mus musculus
  siRNA target sequence for Clcn3 (NM_007711.1,515-533).
gacggatcaacagtaaaaa

SEQ ID NO: 646920 - DNA, 19 bp, Mus musculus
  siRNA target sequence for Clcn3 (NM_007711.1,620-638).
gggcactagctggattgat

SEQ ID NO: 646921 - DNA, 19 bp, Mus musculus
  siRNA target sequence for Clcn3 (NM_007711.1,621-639).
ggcactagctggattgata

SEQ ID NO: 646922 - DNA, 19 bp, Mus musculus
  siRNA target sequence for Clcn3 (NM_007711.1,625-643).
ctagctggattgatagaca

SEQ ID NO: 646923 - DNA, 19 bp, Mus musculus
  siRNA target sequence for Clcn3 (NM_007711.1,714-732).
gtgttgttggggctctaat

SEQ ID NO: 646924 - DNA, 19 bp, Mus musculus
  siRNA target sequence for Clcn3 (NM_007711.1,716-734).
gttgttggggctctaatga

SEQ ID NO: 646925 - DNA, 19 bp, Mus musculus
  siRNA target sequence for Clcn3 (NM_007711.1,726-744).
ctctaatgagacaacgttt

SEQ ID NO: 646926 - DNA, 19 bp, Mus musculus
  siRNA target sequence for Clcn3 (NM_007711.1,776-794).
catgggcagagttaatcat

SEQ ID NO: 646927 - DNA, 19 bp, Mus musculus
  siRNA target sequence for Clcn3 (NM_007711.1,809-827).
gccctggatcttatatcat

SEQ ID NO: 646928 - DNA, 19 bp, Mus musculus
  siRNA target sequence for Clcn3 (NM_007711.1,814-832).
ggatcttatatcatgaact

SEQ ID NO: 646929 - DNA, 19 bp, Mus musculus
  siRNA target sequence for Clcn3 (NM_007711.1,969-987).
cttgggaaaatggacttta

SEQ ID NO: 646930 - DNA, 19 bp, Mus musculus
  siRNA target sequence for Clcn3 (NM_007711.1,981-999).
gactttaatgattaaaact

SEQ ID NO: 646931 - DNA, 19 bp, Mus musculus
  siRNA target sequence for Clcn3 (NM_007711.1,1020-1038).
ggcatcaggtttgagttta

SEQ ID NO: 646932 - DNA, 19 bp, Mus musculus
  siRNA target sequence for Clcn3 (NM_007711.1,1112-1130).
gcaccaatgaagctaaaaa

SEQ ID NO: 646933 - DNA, 19 bp, Mus musculus
  siRNA target sequence for Clcn3 (NM_007711.1,1186-1204).
ccgatcggaggagttcttt

SEQ ID NO: 646934 - DNA, 19 bp, Mus musculus
  siRNA target sequence for Clcn3 (NM_007711.1,1187-1205).
cgatcggaggagttctttt

SEQ ID NO: 646935 - DNA, 19 bp, Mus musculus
  siRNA target sequence for Clcn3 (NM_007711.1,1188-1206).
gatcggaggagttcttttt

SEQ ID NO: 646936 - DNA, 19 bp, Mus musculus
  siRNA target sequence for Clcn3 (NM_007711.1,1212-1230).
ggaggaggttagctattat

SEQ ID NO: 646937 - DNA, 19 bp, Mus musculus
  siRNA target sequence for Clcn3 (NM_007711.1,1213-1231).
gaggaggttagctattatt

SEQ ID NO: 646938 - DNA, 19 bp, Mus musculus
  siRNA target sequence for Clcn3 (NM_007711.1,1215-1233).
ggaggttagctattatttt

SEQ ID NO: 646939 - DNA, 19 bp, Mus musculus
  siRNA target sequence for Clcn3 (NM_007711.1,1218-1236).
ggttagctattattttcct

SEQ ID NO: 646940 - DNA, 19 bp, Mus musculus
  siRNA target sequence for Clcn3 (NM_007711.1,1349-1367).
caccatggtacctttttga

SEQ ID NO: 646941 - DNA, 19 bp, Mus musculus
  siRNA target sequence for Clcn3 (NM_007711.1,1450-1468).
cgacgcaagtccaccaaat

SEQ ID NO: 646942 - DNA, 19 bp, Mus musculus
  siRNA target sequence for Clcn3 (NM_007711.1,1451-1469).
gacgcaagtccaccaaatt

SEQ ID NO: 646943 - DNA, 19 bp, Mus musculus
  siRNA target sequence for Clcn3 (NM_007711.1,1455-1473).
caagtccaccaaatttgga

SEQ ID NO: 646944 - DNA, 19 bp, Mus musculus
  siRNA target sequence for Clcn3 (NM_007711.1,1480-1498).
cctgttctcgaagtcatta

SEQ ID NO: 646945 - DNA, 19 bp, Mus musculus
  siRNA target sequence for Clcn3 (NM_007711.1,1630-1648).
gacatgaatgccagtaaaa

SEQ ID NO: 646946 - DNA, 19 bp, Mus musculus
  siRNA target sequence for Clcn3 (NM_007711.1,1675-1693).
gcaggcgttggagtatatt

SEQ ID NO: 646947 - DNA, 19 bp, Mus musculus
  siRNA target sequence for Clcn3 (NM_007711.1,1710-1728).
gtgcctagcgctcatattt

SEQ ID NO: 646948 - DNA, 19 bp, Mus musculus
  siRNA target sequence for Clcn3 (NM_007711.1,1740-1758).
gacagtattcacttttggt

SEQ ID NO: 646949 - DNA, 19 bp, Mus musculus
  siRNA target sequence for Clcn3 (NM_007711.1,1742-1760).
cagtattcacttttggtat

SEQ ID NO: 646950 - DNA, 19 bp, Mus musculus
  siRNA target sequence for Clcn3 (NM_007711.1,1764-1782).
ggtcccgtcaggcttgttt

SEQ ID NO: 646951 - DNA, 19 bp, Mus musculus
  siRNA target sequence for Clcn3 (NM_007711.1,1765-1783).
gtcccgtcaggcttgttta

SEQ ID NO: 646952 - DNA, 19 bp, Mus musculus
  siRNA target sequence for Clcn3 (NM_007711.1,1855-1873).
caccacgactggtttatct

SEQ ID NO: 646953 - DNA, 19 bp, Mus musculus
  siRNA target sequence for Clcn3 (NM_007711.1,1858-1876).
cacgactggtttatcttca

SEQ ID NO: 646954 - DNA, 19 bp, Mus musculus
  siRNA target sequence for Clcn3 (NM_007711.1,1951-1969).
ggtggtgtgacaagaatga

SEQ ID NO: 646955 - DNA, 19 bp, Mus musculus
  siRNA target sequence for Clcn3 (NM_007711.1,2027-2045).
ctcttatggctgcagtaat

SEQ ID NO: 646956 - DNA, 19 bp, Mus musculus
  siRNA target sequence for Clcn3 (NM_007711.1,2038-2056).
gcagtaatgaccagtaaat

SEQ ID NO: 646957 - DNA, 19 bp, Mus musculus
  siRNA target sequence for Clcn3 (NM_007711.1,2069-2087).
cctttggtagggaaggtat

SEQ ID NO: 646958 - DNA, 19 bp, Mus musculus
  siRNA target sequence for Clcn3 (NM_007711.1,2217-2235).
ggacaatatgacagtagat

SEQ ID NO: 646959 - DNA, 19 bp, Mus musculus
  siRNA target sequence for Clcn3 (NM_007711.1,2238-2256).
catagaaaacatgattaat

SEQ ID NO: 646960 - DNA, 19 bp, Mus musculus
  siRNA target sequence for Clcn3 (NM_007711.1,2437-2455).
ccacggccattaaaactga

SEQ ID NO: 646961 - DNA, 19 bp, Mus musculus
  siRNA target sequence for Clcn3 (NM_007711.1,2512-2530).
gtggtagacatctttcgaa

SEQ ID NO: 646962 - DNA, 19 bp, Mus musculus
  siRNA target sequence for Clcn3 (NM_007711.1,2543-2561).
ggcagtgccttgtaactca

SEQ ID NO: 646963 - DNA, 19 bp, Mus musculus
  siRNA target sequence for Clcn3 (NM_007711.1,2569-2587).
cgcctccttggcattataa

SEQ ID NO: 646964 - DNA, 19 bp, Mus musculus
  siRNA target sequence for Clcn3 (NM_007711.1,2628-2646).
ccaagaccccgcttcaata

SEQ ID NO: 646965 - DNA, 19 bp, Mus musculus
  siRNA target sequence for Clcn3 (NM_007711.1,2629-2647).
caagaccccgcttcaataa

SEQ ID NO: 646966 - DNA, 19 bp, Mus musculus
  siRNA target sequence for Clcn3 (NM_007711.1,2632-2650).
gaccccgcttcaataatgt

SEQ ID NO: 646967 - DNA, 19 bp, Mus musculus
  siRNA target sequence for Clcn3 (NM_007711.1,2638-2656).
gcttcaataatgttcaact

SEQ ID NO: 646968 - DNA, 19 bp, Mus musculus
  siRNA target sequence for Clcn4-2 (NM_011334.2,208-226).
gaagatcaccagcaaaagt

SEQ ID NO: 646969 - DNA, 19 bp, Mus musculus
  siRNA target sequence for Clcn4-2 (NM_011334.2,234-252).
ctatttgggagttcatcaa

SEQ ID NO: 646970 - DNA, 19 bp, Mus musculus
  siRNA target sequence for Clcn4-2 (NM_011334.2,279-297).
gggtggtgatgctactcat

SEQ ID NO: 646971 - DNA, 19 bp, Mus musculus
  siRNA target sequence for Clcn4-2 (NM_011334.2,280-298).
ggtggtgatgctactcatt

SEQ ID NO: 646972 - DNA, 19 bp, Mus musculus
  siRNA target sequence for Clcn4-2 (NM_011334.2,900-918).
gtctagaggaggtcagtta

SEQ ID NO: 646973 - DNA, 19 bp, Mus musculus
  siRNA target sequence for Clcn4-2 (NM_011334.2,937-955).
cttgtggaggtcattcttt

SEQ ID NO: 646974 - DNA, 19 bp, Mus musculus
  siRNA target sequence for Clcn4-2 (NM_011334.2,988-1006).
catcaacccctttggaaat

SEQ ID NO: 646975 - DNA, 19 bp, Mus musculus
  siRNA target sequence for Clcn4-2 (NM_011334.2,1082-1100).
ggagtctttgggggtttat

SEQ ID NO: 646976 - DNA, 19 bp, Mus musculus
  siRNA target sequence for Clcn4-2 (NM_011334.2,1111-1129).
cttcacacgctgcaacatt

SEQ ID NO: 646977 - DNA, 19 bp, Mus musculus
  siRNA target sequence for Clcn4-2 (NM_011334.2,1365-1383).
cggctggggttggagttta

SEQ ID NO: 646978 - DNA, 19 bp, Mus musculus
  siRNA target sequence for Clcn4-2 (NM_011334.2,1404-1422).
ccttggcactgatcttcaa

SEQ ID NO: 646979 - DNA, 19 bp, Mus musculus
  siRNA target sequence for Clcn4-2 (NM_011334.2,1668-1686).
ctctagtggtcattatgtt

SEQ ID NO: 646980 - DNA, 19 bp, Mus musculus
  siRNA target sequence for Clcn4-2 (NM_011334.2,1695-1713).
ctggaggtctggagtatat

SEQ ID NO: 646981 - DNA, 19 bp, Mus musculus
  siRNA target sequence for Clcn4-2 (NM_011334.2,1698-1716).
gaggtctggagtatattgt

SEQ ID NO: 646982 - DNA, 19 bp, Mus musculus
  siRNA target sequence for Clcn4-2 (NM_011334.2,1848-1866).
cgctggccactgatgtgat

SEQ ID NO: 646983 - DNA, 19 bp, Mus musculus
  siRNA target sequence for Clcn4-2 (NM_011334.2,1886-1904).
ccgccattatcggtactaa

SEQ ID NO: 646984 - DNA, 19 bp, Mus musculus
  siRNA target sequence for Clcn4-2 (NM_011334.2,2024-2042).
gagctaatcttggctataa

SEQ ID NO: 646985 - DNA, 19 bp, Mus musculus
  siRNA target sequence for Clcn4-2 (NM_011334.2,2027-2045).
ctaatcttggctataaaaa

SEQ ID NO: 646986 - DNA, 19 bp, Mus musculus
  siRNA target sequence for Clcn4-2 (NM_011334.2,2066-2084).
ggcattgtgagcaattcca

SEQ ID NO: 646987 - DNA, 19 bp, Mus musculus
  siRNA target sequence for Clcn4-2 (NM_011334.2,2067-2085).
gcattgtgagcaattccat

SEQ ID NO: 646988 - DNA, 19 bp, Mus musculus
  siRNA target sequence for Clcn4-2 (NM_011334.2,2324-2342).
gaccctgaatccatcatgt

SEQ ID NO: 646989 - DNA, 19 bp, Mus musculus
  siRNA target sequence for Clcn4-2 (NM_011334.2,2326-2344).
ccctgaatccatcatgttt

SEQ ID NO: 646990 - DNA, 19 bp, Mus musculus
  siRNA target sequence for Clcn4-2 (NM_011334.2,2327-2345).
cctgaatccatcatgttta

SEQ ID NO: 646991 - DNA, 19 bp, Mus musculus
  siRNA target sequence for Clcn4-2 (NM_011334.2,2328-2346).
ctgaatccatcatgtttaa

SEQ ID NO: 646992 - DNA, 19 bp, Mus musculus
  siRNA target sequence for Clcn5 (NM_016691.2,233-251).
gtagggacctatgatgatt

SEQ ID NO: 646993 - DNA, 19 bp, Mus musculus
  siRNA target sequence for Clcn5 (NM_016691.2,237-255).
ggacctatgatgatttcaa

SEQ ID NO: 646994 - DNA, 19 bp, Mus musculus
  siRNA target sequence for Clcn5 (NM_016691.2,297-315).
ggcaccgagagattaccaa

SEQ ID NO: 646995 - DNA, 19 bp, Mus musculus
  siRNA target sequence for Clcn5 (NM_016691.2,299-317).
caccgagagattaccaata

SEQ ID NO: 646996 - DNA, 19 bp, Mus musculus
  siRNA target sequence for Clcn5 (NM_016691.2,301-319).
ccgagagattaccaataaa

SEQ ID NO: 646997 - DNA, 19 bp, Mus musculus
  siRNA target sequence for Clcn5 (NM_016691.2,305-323).
gagattaccaataaaagca

SEQ ID NO: 646998 - DNA, 19 bp, Mus musculus
  siRNA target sequence for Clcn5 (NM_016691.2,328-346).
gtcaacatgggccttaatt

SEQ ID NO: 646999 - DNA, 19 bp, Mus musculus
  siRNA target sequence for Clcn5 (NM_016691.2,330-348).
caacatgggccttaattca

SEQ ID NO: 647000 - DNA, 19 bp, Mus musculus
  siRNA target sequence for Clcn5 (NM_016691.2,375-393).
ggttgttaatgctccttat

SEQ ID NO: 647001 - DNA, 19 bp, Mus musculus
  siRNA target sequence for Clcn5 (NM_016691.2,385-403).
gctccttattggcctttta

SEQ ID NO: 647002 - DNA, 19 bp, Mus musculus
  siRNA target sequence for Clcn5 (NM_016691.2,445-463).
gatgacagacttaaaagaa

SEQ ID NO: 647003 - DNA, 19 bp, Mus musculus
  siRNA target sequence for Clcn5 (NM_016691.2,477-495).
gggggttctggtttaacca

SEQ ID NO: 647004 - DNA, 19 bp, Mus musculus
  siRNA target sequence for Clcn5 (NM_016691.2,478-496).
ggggttctggtttaaccat

SEQ ID NO: 647005 - DNA, 19 bp, Mus musculus
  siRNA target sequence for Clcn5 (NM_016691.2,497-515).
gagcactgttgctggaatt

SEQ ID NO: 647006 - DNA, 19 bp, Mus musculus
  siRNA target sequence for Clcn5 (NM_016691.2,574-592).
gctcatcatcaatacagat

SEQ ID NO: 647007 - DNA, 19 bp, Mus musculus
  siRNA target sequence for Clcn5 (NM_016691.2,595-613).
gggagcctttgcctacata

SEQ ID NO: 647008 - DNA, 19 bp, Mus musculus
  siRNA target sequence for Clcn5 (NM_016691.2,730-748).
cctgagtggtttcattatt

SEQ ID NO: 647009 - DNA, 19 bp, Mus musculus
  siRNA target sequence for Clcn5 (NM_016691.2,766-784).
gtggacccttgtcatcaaa

SEQ ID NO: 647010 - DNA, 19 bp, Mus musculus
  siRNA target sequence for Clcn5 (NM_016691.2,769-787).
gacccttgtcatcaaaact

SEQ ID NO: 647011 - DNA, 19 bp, Mus musculus
  siRNA target sequence for Clcn5 (NM_016691.2,771-789).
cccttgtcatcaaaactat

SEQ ID NO: 647012 - DNA, 19 bp, Mus musculus
  siRNA target sequence for Clcn5 (NM_016691.2,776-794).
gtcatcaaaactatcactt

SEQ ID NO: 647013 - DNA, 19 bp, Mus musculus
  siRNA target sequence for Clcn5 (NM_016691.2,879-897).
gccactgcttcaacaaata

SEQ ID NO: 647014 - DNA, 19 bp, Mus musculus
  siRNA target sequence for Clcn5 (NM_016691.2,972-990).
cccctattggtggagtatt

SEQ ID NO: 647015 - DNA, 19 bp, Mus musculus
  siRNA target sequence for Clcn5 (NM_016691.2,975-993).
ctattggtggagtattatt

SEQ ID NO: 647016 - DNA, 19 bp, Mus musculus
  siRNA target sequence for Clcn5 (NM_016691.2,1032-1050).
cactatggcgttctttctt

SEQ ID NO: 647017 - DNA, 19 bp, Mus musculus
  siRNA target sequence for Clcn5 (NM_016691.2,1098-1116).
gaaacagccgcttagttct

SEQ ID NO: 647018 - DNA, 19 bp, Mus musculus
  siRNA target sequence for Clcn5 (NM_016691.2,1102-1120).
cagccgcttagttctgttt

SEQ ID NO: 647019 - DNA, 19 bp, Mus musculus
  siRNA target sequence for Clcn5 (NM_016691.2,1104-1122).
gccgcttagttctgtttta

SEQ ID NO: 647020 - DNA, 19 bp, Mus musculus
  siRNA target sequence for Clcn5 (NM_016691.2,1105-1123).
ccgcttagttctgttttat

SEQ ID NO: 647021 - DNA, 19 bp, Mus musculus
  siRNA target sequence for Clcn5 (NM_016691.2,1137-1155).
ccccgtggcatctctttga

SEQ ID NO: 647022 - DNA, 19 bp, Mus musculus
  siRNA target sequence for Clcn5 (NM_016691.2,1156-1174).
gctcgtgccattcattgta

SEQ ID NO: 647023 - DNA, 19 bp, Mus musculus
  siRNA target sequence for Clcn5 (NM_016691.2,1207-1225).
gtttatccgcacaaacatt

SEQ ID NO: 647024 - DNA, 19 bp, Mus musculus
  siRNA target sequence for Clcn5 (NM_016691.2,1249-1267).
cacacagttgggcaagtat

SEQ ID NO: 647025 - DNA, 19 bp, Mus musculus
  siRNA target sequence for Clcn5 (NM_016691.2,1269-1287).
ctgtcgtcgaggtactcat

SEQ ID NO: 647026 - DNA, 19 bp, Mus musculus
  siRNA target sequence for Clcn5 (NM_016691.2,1274-1292).
gtcgaggtactcattgtga

SEQ ID NO: 647027 - DNA, 19 bp, Mus musculus
  siRNA target sequence for Clcn5 (NM_016691.2,1313-1331).
gctttccccaatgaatata

SEQ ID NO: 647028 - DNA, 19 bp, Mus musculus
  siRNA target sequence for Clcn5 (NM_016691.2,1496-1514).
gctctgacactcatactga

SEQ ID NO: 647029 - DNA, 19 bp, Mus musculus
  siRNA target sequence for Clcn5 (NM_016691.2,1505-1523).
ctcatactgaaaatagtca

SEQ ID NO: 647030 - DNA, 19 bp, Mus musculus
  siRNA target sequence for Clcn5 (NM_016691.2,1507-1525).
catactgaaaatagtcatt

SEQ ID NO: 647031 - DNA, 19 bp, Mus musculus
  siRNA target sequence for Clcn5 (NM_016691.2,1579-1597).
ggctgtcggtgctatagca

SEQ ID NO: 647032 - DNA, 19 bp, Mus musculus
  siRNA target sequence for Clcn5 (NM_016691.2,1590-1608).
ctatagcaggccgtctttt

SEQ ID NO: 647033 - DNA, 19 bp, Mus musculus
  siRNA target sequence for Clcn5 (NM_016691.2,1645-1663).
cgactggggcatcttcaat

SEQ ID NO: 647034 - DNA, 19 bp, Mus musculus
  siRNA target sequence for Clcn5 (NM_016691.2,1646-1664).
gactggggcatcttcaata

SEQ ID NO: 647035 - DNA, 19 bp, Mus musculus
  siRNA target sequence for Clcn5 (NM_016691.2,1676-1694).
cagggagctgattgtatca

SEQ ID NO: 647036 - DNA, 19 bp, Mus musculus
  siRNA target sequence for Clcn5 (NM_016691.2,1744-1762).
gactcggatgactgtttct

SEQ ID NO: 647037 - DNA, 19 bp, Mus musculus
  siRNA target sequence for Clcn5 (NM_016691.2,1746-1764).
ctcggatgactgtttctct

SEQ ID NO: 647038 - DNA, 19 bp, Mus musculus
  siRNA target sequence for Clcn5 (NM_016691.2,1860-1878).
ggcgagagggcatttatga

SEQ ID NO: 647039 - DNA, 19 bp, Mus musculus
  siRNA target sequence for Clcn5 (NM_016691.2,1861-1879).
gcgagagggcatttatgat

SEQ ID NO: 647040 - DNA, 19 bp, Mus musculus
  siRNA target sequence for Clcn5 (NM_016691.2,1894-1912).
caatggatacccctttctt

SEQ ID NO: 647041 - DNA, 19 bp, Mus musculus
  siRNA target sequence for Clcn5 (NM_016691.2,1994-2012).
cttactcaggacagtatga

SEQ ID NO: 647042 - DNA, 19 bp, Mus musculus
  siRNA target sequence for Clcn5 (NM_016691.2,2021-2039).
gatgtcgagaccataatca

SEQ ID NO: 647043 - DNA, 19 bp, Mus musculus
  siRNA target sequence for Clcn5 (NM_016691.2,2076-2094).
cccgagagtcgcaaagact

SEQ ID NO: 647044 - DNA, 19 bp, Mus musculus
  siRNA target sequence for Clcn5 (NM_016691.2,2077-2095).
ccgagagtcgcaaagactt

SEQ ID NO: 647045 - DNA, 19 bp, Mus musculus
  siRNA target sequence for Clcn5 (NM_016691.2,2091-2109).
gacttgtaggctttgttct

SEQ ID NO: 647046 - DNA, 19 bp, Mus musculus
  siRNA target sequence for Clcn5 (NM_016691.2,2111-2129).
cgaagagatctcattattt

SEQ ID NO: 647047 - DNA, 19 bp, Mus musculus
  siRNA target sequence for Clcn5 (NM_016691.2,2169-2187).
gcacttccatcatttattt

SEQ ID NO: 647048 - DNA, 19 bp, Mus musculus
  siRNA target sequence for Clcn5 (NM_016691.2,2328-2346).
gccagtgcctggttacaca

SEQ ID NO: 647049 - DNA, 19 bp, Mus musculus
  siRNA target sequence for Clcn5 (NM_016691.2,2354-2372).
cgcttacttggaatcatca

SEQ ID NO: 647050 - DNA, 19 bp, Mus musculus
  siRNA target sequence for Clcn5 (NM_016691.2,2371-2389).
caccaaaaaggatgtgtta

SEQ ID NO: 647051 - DNA, 19 bp, Mus musculus
  siRNA target sequence for Clcn5 (NM_016691.2,2373-2391).
ccaaaaaggatgtgttaaa

SEQ ID NO: 647052 - DNA, 19 bp, Mus musculus
  siRNA target sequence for Clcn5 (NM_016691.2,2380-2398).
ggatgtgttaaagcatata

SEQ ID NO: 647053 - DNA, 19 bp, Mus musculus
  siRNA target sequence for Clcn6 (NM_011929.1,130-148).
ccaaggaaagactatgaga

SEQ ID NO: 647054 - DNA, 19 bp, Mus musculus
  siRNA target sequence for Clcn6 (NM_011929.1,192-210).
gttggagaccatggataat

SEQ ID NO: 647055 - DNA, 19 bp, Mus musculus
  siRNA target sequence for Clcn6 (NM_011929.1,198-216).
gaccatggataataagaaa

SEQ ID NO: 647056 - DNA, 19 bp, Mus musculus
  siRNA target sequence for Clcn6 (NM_011929.1,431-449).
caagccttcttgtcttgat

SEQ ID NO: 647057 - DNA, 19 bp, Mus musculus
  siRNA target sequence for Clcn6 (NM_011929.1,667-685).
cggaagatccagtttaact

SEQ ID NO: 647058 - DNA, 19 bp, Mus musculus
  siRNA target sequence for Clcn6 (NM_011929.1,705-723).
cagagacaagcgtgacttt

SEQ ID NO: 647059 - DNA, 19 bp, Mus musculus
  siRNA target sequence for Clcn6 (NM_011929.1,1251-1269).
cacatcagaagatgtgaat

SEQ ID NO: 647060 - DNA, 19 bp, Mus musculus
  siRNA target sequence for Clcn6 (NM_011929.1,1271-1289).
caactatcaaggctttttt

SEQ ID NO: 647061 - DNA, 19 bp, Mus musculus
  siRNA target sequence for Clcn6 (NM_011929.1,1292-1310).
gtcccaatgacacttacaa

SEQ ID NO: 647062 - DNA, 19 bp, Mus musculus
  siRNA target sequence for Clcn6 (NM_011929.1,1425-1443).
gctcgcatgctggactttt

SEQ ID NO: 647063 - DNA, 19 bp, Mus musculus
  siRNA target sequence for Clcn6 (NM_011929.1,1632-1650).
cctgatcgagtctacaaat

SEQ ID NO: 647064 - DNA, 19 bp, Mus musculus
  siRNA target sequence for Clcn6 (NM_011929.1,1703-1721).
ctggagacttgttcaacaa

SEQ ID NO: 647065 - DNA, 19 bp, Mus musculus
  siRNA target sequence for Clcn6 (NM_011929.1,1713-1731).
gttcaacaagggcatttat

SEQ ID NO: 647066 - DNA, 19 bp, Mus musculus
  siRNA target sequence for Clcn6 (NM_011929.1,1925-1943).
gcaacgagaaggagttcat

SEQ ID NO: 647067 - DNA, 19 bp, Mus musculus
  siRNA target sequence for Clcn6 (NM_011929.1,1954-1972).
cagctcataagcaacaaca

SEQ ID NO: 647068 - DNA, 19 bp, Mus musculus
  siRNA target sequence for Clcn6 (NM_011929.1,2266-2284).
gtccgaggagtgtgctatt

SEQ ID NO: 647069 - DNA, 19 bp, Mus musculus
  siRNA target sequence for Clcn6 (NM_011929.1,2348-2366).
cgcgatacccggacataca

SEQ ID NO: 647070 - DNA, 19 bp, Mus musculus
  siRNA target sequence for Clcn6 (NM_011929.1,2349-2367).
gcgatacccggacatacat

SEQ ID NO: 647071 - DNA, 19 bp, Mus musculus
  siRNA target sequence for Clcn6 (NM_011929.1,2385-2403).
gctgaatccccgaatgatt

SEQ ID NO: 647072 - DNA, 19 bp, Mus musculus
  siRNA target sequence for Clcn6 (NM_011929.1,2404-2422).
gtggatgtcaccccatata

SEQ ID NO: 647073 - DNA, 19 bp, Mus musculus
  siRNA target sequence for Clcn6 (NM_011929.1,2407-2425).
gatgtcaccccatatatga

SEQ ID NO: 647074 - DNA, 19 bp, Mus musculus
  siRNA target sequence for Clcn6 (NM_011929.1,2448-2466).
ccccaacacccatgtttct

SEQ ID NO: 647075 - DNA, 19 bp, Mus musculus
  siRNA target sequence for Clcn6 (NM_011929.1,2450-2468).
ccaacacccatgtttctca

SEQ ID NO: 647076 - DNA, 19 bp, Mus musculus
  siRNA target sequence for Clcn6 (NM_011929.1,2549-2567).
cacggcacaacctgacaaa

SEQ ID NO: 647077 - DNA, 19 bp, Mus musculus
  siRNA target sequence for Clcn6 (NM_011929.1,2552-2570).
ggcacaacctgacaaatga

SEQ ID NO: 647078 - DNA, 19 bp, Mus musculus
  siRNA target sequence for Clcn6 (NM_011929.1,2553-2571).
gcacaacctgacaaatgaa

SEQ ID NO: 647079 - DNA, 19 bp, Mus musculus
  siRNA target sequence for Clcn6 (NM_011929.1,2554-2572).
cacaacctgacaaatgaat

SEQ ID NO: 647080 - DNA, 19 bp, Mus musculus
  siRNA target sequence for Clcn7 (NM_011930.2,241-259).
cgaatcggacagatgaaca

SEQ ID NO: 647081 - DNA, 19 bp, Mus musculus
  siRNA target sequence for Clcn7 (NM_011930.2,242-260).
gaatcggacagatgaacaa

SEQ ID NO: 647082 - DNA, 19 bp, Mus musculus
  siRNA target sequence for Clcn7 (NM_011930.2,496-514).
gtagcctgcttcattgaca

SEQ ID NO: 647083 - DNA, 19 bp, Mus musculus
  siRNA target sequence for Clcn7 (NM_011930.2,501-519).
ctgcttcattgacattgta

SEQ ID NO: 647084 - DNA, 19 bp, Mus musculus
  siRNA target sequence for Clcn7 (NM_011930.2,689-707).
gcggaatccctcagatcaa

SEQ ID NO: 647085 - DNA, 19 bp, Mus musculus
  siRNA target sequence for Clcn7 (NM_011930.2,881-899).
cactcaagcgagatttcaa

SEQ ID NO: 647086 - DNA, 19 bp, Mus musculus
  siRNA target sequence for Clcn7 (NM_011930.2,888-906).
gcgagatttcaagatcttt

SEQ ID NO: 647087 - DNA, 19 bp, Mus musculus
  siRNA target sequence for Clcn7 (NM_011930.2,907-925).
gaatatttccgcagagata

SEQ ID NO: 647088 - DNA, 19 bp, Mus musculus
  siRNA target sequence for Clcn7 (NM_011930.2,1041-1059).
gttcctgacttggagaatt

SEQ ID NO: 647089 - DNA, 19 bp, Mus musculus
  siRNA target sequence for Clcn7 (NM_011930.2,1271-1289).
ggctaaccatgtttcgaat

SEQ ID NO: 647090 - DNA, 19 bp, Mus musculus
  siRNA target sequence for Clcn7 (NM_011930.2,1360-1378).
gcgtttgtcttgatttact

SEQ ID NO: 647091 - DNA, 19 bp, Mus musculus
  siRNA target sequence for Clcn7 (NM_011930.2,1439-1457).
gtgcagatggcgaatacaa

SEQ ID NO: 647092 - DNA, 19 bp, Mus musculus
  siRNA target sequence for Clcn7 (NM_011930.2,1441-1459).
gcagatggcgaatacaact

SEQ ID NO: 647093 - DNA, 19 bp, Mus musculus
  siRNA target sequence for Clcn7 (NM_011930.2,1516-1534).
gacccaccaggctcctata

SEQ ID NO: 647094 - DNA, 19 bp, Mus musculus
  siRNA target sequence for Clcn7 (NM_011930.2,1518-1536).
cccaccaggctcctataat

SEQ ID NO: 647095 - DNA, 19 bp, Mus musculus
  siRNA target sequence for Clcn7 (NM_011930.2,1590-1608).
ctatggcctcacagtatct

SEQ ID NO: 647096 - DNA, 19 bp, Mus musculus
  siRNA target sequence for Clcn7 (NM_011930.2,1700-1718).
gggcagatccgggtaaata

SEQ ID NO: 647097 - DNA, 19 bp, Mus musculus
  siRNA target sequence for Clcn7 (NM_011930.2,1747-1765).
ggtgggatcgtgagaatga

SEQ ID NO: 647098 - DNA, 19 bp, Mus musculus
  siRNA target sequence for Clcn7 (NM_011930.2,1836-1854).
gctgatgactgccaagatt

SEQ ID NO: 647099 - DNA, 19 bp, Mus musculus
  siRNA target sequence for Clcn7 (NM_011930.2,1951-1969).
ctcacggccagggaagtaa

SEQ ID NO: 647100 - DNA, 19 bp, Mus musculus
  siRNA target sequence for Clcn7 (NM_011930.2,2033-2051).
gcgacacagcgtctaatca

SEQ ID NO: 647101 - DNA, 19 bp, Mus musculus
  siRNA target sequence for Clcn7 (NM_011930.2,2035-2053).
gacacagcgtctaatcaca

SEQ ID NO: 647102 - DNA, 19 bp, Mus musculus
  siRNA target sequence for Clcn7 (NM_011930.2,2123-2141).
cccagcttatcgttctctt

SEQ ID NO: 647103 - DNA, 19 bp, Mus musculus
  siRNA target sequence for Clcn7 (NM_011930.2,2235-2253).
cccaatccagtccattcat

SEQ ID NO: 647104 - DNA, 19 bp, Mus musculus
  siRNA target sequence for Clcn7 (NM_011930.2,2322-2340).
gcctcaggaggcatctctt

SEQ ID NO: 647105 - DNA, 19 bp, Mus musculus
  siRNA target sequence for Clcn7 (NM_011930.2,2378-2396).
ggcacctggtagtagtaga

SEQ ID NO: 647106 - DNA, 19 bp, Mus musculus
  siRNA target sequence for Clcn7 (NM_011930.2,2429-2447).
ggaaggacctagcaagata

SEQ ID NO: 647107 - DNA, 19 bp, Mus musculus
  siRNA target sequence for Clcn7 (NM_011930.2,2441-2459).
caagataccgcctaggaaa

SEQ ID NO: 647108 - DNA, 19 bp, Mus musculus
  siRNA target sequence for Clcnk1 (NM_024412.2,894-912).
ctgcctgaaatcttcttct

SEQ ID NO: 647109 - DNA, 19 bp, Mus musculus
  siRNA target sequence for Clcnk1 (NM_024412.2,957-975).
ctgttctgtcagcgaaatt

SEQ ID NO: 647110 - DNA, 19 bp, Mus musculus
  siRNA target sequence for Clcnk1 (NM_024412.2,959-977).
gttctgtcagcgaaatttt

SEQ ID NO: 647111 - DNA, 19 bp, Mus musculus
  siRNA target sequence for Clcnk1 (NM_024412.2,1329-1347).
ggctacttcatgcctatat

SEQ ID NO: 647112 - DNA, 19 bp, Mus musculus
  siRNA target sequence for Clcnk1 (NM_024412.2,1330-1348).
gctacttcatgcctatatt

SEQ ID NO: 647113 - DNA, 19 bp, Mus musculus
  siRNA target sequence for Clcnk1 (NM_024412.2,1690-1708).
ctgtaacggtggaacattt

SEQ ID NO: 647114 - DNA, 19 bp, Mus musculus
  siRNA target sequence for Clcnk1 (NM_024412.2,1778-1796).
cacagatgtgtctcagtat

SEQ ID NO: 647115 - DNA, 19 bp, Mus musculus
  siRNA target sequence for Clcnk1 (NM_024412.2,1906-1924).
gatttctccaggacatctt

SEQ ID NO: 647116 - DNA, 19 bp, Mus musculus
  siRNA target sequence for Clcnk1 (NM_024412.2,1969-1987).
cagagacctccctatatca

SEQ ID NO: 647117 - DNA, 19 bp, Mus musculus
  siRNA target sequence for Clic1 (NM_033444.1,250-268).
cagtgatggtgccaagatt

SEQ ID NO: 647118 - DNA, 19 bp, Mus musculus
  siRNA target sequence for Clic1 (NM_033444.1,317-335).
ggagtcaccttcaacgtta

SEQ ID NO: 647119 - DNA, 19 bp, Mus musculus
  siRNA target sequence for Clic1 (NM_033444.1,519-537).
cctcgggactggacatatt

SEQ ID NO: 647120 - DNA, 19 bp, Mus musculus
  siRNA target sequence for Clic1 (NM_033444.1,520-538).
ctcgggactggacatattt

SEQ ID NO: 647121 - DNA, 19 bp, Mus musculus
  siRNA target sequence for Clic1 (NM_033444.1,614-632).
ctgaaggttctagacaatt

SEQ ID NO: 647122 - DNA, 19 bp, Mus musculus
  siRNA target sequence for Clic1 (NM_033444.1,745-763).
gctgccaaagcttcacata

SEQ ID NO: 647123 - DNA, 19 bp, Mus musculus
  siRNA target sequence for Clic1 (NM_033444.1,767-785).
caggtggtgtgcaaaaagt

SEQ ID NO: 647124 - DNA, 19 bp, Mus musculus
  siRNA target sequence for Clic1 (NM_033444.1,770-788).
gtggtgtgcaaaaagtaca

SEQ ID NO: 647125 - DNA, 19 bp, Mus musculus
  siRNA target sequence for Clic1 (NM_033444.1,818-836).
ggagtgcatcggtacttga

SEQ ID NO: 647126 - DNA, 19 bp, Mus musculus
  siRNA target sequence for Clic3 (NM_027085.1,176-194).
cactcgaagggcattggat

SEQ ID NO: 647127 - DNA, 19 bp, Mus musculus
  siRNA target sequence for Clic4 (NM_013885.1,336-354).
ccgttgacctgaaaaggaa

SEQ ID NO: 647128 - DNA, 19 bp, Mus musculus
  siRNA target sequence for Clic4 (NM_013885.1,385-403).
gacccacccgccatttata

SEQ ID NO: 647129 - DNA, 19 bp, Mus musculus
  siRNA target sequence for Clic4 (NM_013885.1,389-407).
cacccgccatttataacct

SEQ ID NO: 647130 - DNA, 19 bp, Mus musculus
  siRNA target sequence for Clic4 (NM_013885.1,405-423).
ccttcaacagcgaagtcaa

SEQ ID NO: 647131 - DNA, 19 bp, Mus musculus
  siRNA target sequence for Clic4 (NM_013885.1,468-486).
gcccacccaagtacctaaa

SEQ ID NO: 647132 - DNA, 19 bp, Mus musculus
  siRNA target sequence for Clic4 (NM_013885.1,471-489).
cacccaagtacctaaagct

SEQ ID NO: 647133 - DNA, 19 bp, Mus musculus
  siRNA target sequence for Clic4 (NM_013885.1,473-491).
cccaagtacctaaagcttt

SEQ ID NO: 647134 - DNA, 19 bp, Mus musculus
  siRNA target sequence for Clic4 (NM_013885.1,516-534).
ctgctggaatggacatctt

SEQ ID NO: 647135 - DNA, 19 bp, Mus musculus
  siRNA target sequence for Clic4 (NM_013885.1,529-547).
catctttgccaaattctct

SEQ ID NO: 647136 - DNA, 19 bp, Mus musculus
  siRNA target sequence for Clic5 (NM_172621.1,321-339).
cggactcagcgacaactaa

SEQ ID NO: 647137 - DNA, 19 bp, Mus musculus
  siRNA target sequence for Clic5 (NM_172621.1,322-340).
ggactcagcgacaactaat

SEQ ID NO: 647138 - DNA, 19 bp, Mus musculus
  siRNA target sequence for Clic5 (NM_172621.1,384-402).
ggatcgacggggaaagcat

SEQ ID NO: 647139 - DNA, 19 bp, Mus musculus
  siRNA target sequence for Clic5 (NM_172621.1,385-403).
gatcgacggggaaagcatt

SEQ ID NO: 647140 - DNA, 19 bp, Mus musculus
  siRNA target sequence for Clic5 (NM_172621.1,469-487).
caccaccgtggatctgaaa

SEQ ID NO: 647141 - DNA, 19 bp, Mus musculus
  siRNA target sequence for Clic5 (NM_172621.1,489-507).
gaaagccagccgatctaca

SEQ ID NO: 647142 - DNA, 19 bp, Mus musculus
  siRNA target sequence for Clic5 (NM_172621.1,543-561).
ccttcaatggggatgtgaa

SEQ ID NO: 647143 - DNA, 19 bp, Mus musculus
  siRNA target sequence for Clic5 (NM_172621.1,600-618).
ccctaacccccgagaagta

SEQ ID NO: 647144 - DNA, 19 bp, Mus musculus
  siRNA target sequence for Clic5 (NM_172621.1,632-650).
gcaaaacaccgggaatcta

SEQ ID NO: 647145 - DNA, 19 bp, Mus musculus
  siRNA target sequence for Clic6 (NM_172469.1,814-832).
cgctagggttgcagatcaa

SEQ ID NO: 647146 - DNA, 19 bp, Mus musculus
  siRNA target sequence for Clic6 (NM_172469.1,951-969).
gaggcgattgagattgtaa

SEQ ID NO: 647147 - DNA, 19 bp, Mus musculus
  siRNA target sequence for Clic6 (NM_172469.1,1079-1097).
cgaggatgcgagagtagat

SEQ ID NO: 647148 - DNA, 19 bp, Mus musculus
  siRNA target sequence for Clic6 (NM_172469.1,1403-1421).
cttcgtcaaggctggttat

SEQ ID NO: 647149 - DNA, 19 bp, Mus musculus
  siRNA target sequence for Clic6 (NM_172469.1,1475-1493).
ctggctaaagggtgttata

SEQ ID NO: 647150 - DNA, 19 bp, Mus musculus
  siRNA target sequence for Clic6 (NM_172469.1,1479-1497).
ctaaagggtgttatattca

SEQ ID NO: 647151 - DNA, 19 bp, Mus musculus
  siRNA target sequence for Clic6 (NM_172469.1,1485-1503).
ggtgttatattcaatgtga

SEQ ID NO: 647152 - DNA, 19 bp, Mus musculus
  siRNA target sequence for Clic6 (NM_172469.1,1502-1520).
gacaacggtggacctaaaa

SEQ ID NO: 647153 - DNA, 19 bp, Mus musculus
  siRNA target sequence for Clic6 (NM_172469.1,1555-1573).
ggacgaaccctcctttcat

SEQ ID NO: 647154 - DNA, 19 bp, Mus musculus
  siRNA target sequence for Clic6 (NM_172469.1,1707-1725).
gccaaattctcagcattta

SEQ ID NO: 647155 - DNA, 19 bp, Mus musculus
  siRNA target sequence for Clic6 (NM_172469.1,1708-1726).
ccaaattctcagcatttat

SEQ ID NO: 647156 - DNA, 19 bp, Mus musculus
  siRNA target sequence for Clic6 (NM_172469.1,1791-1809).
ctggacagttacttaaaca

SEQ ID NO: 647157 - DNA, 19 bp, Mus musculus
  siRNA target sequence for Clic6 (NM_172469.1,1810-1828).
gcccgctgccagacgaaat

SEQ ID NO: 647158 - DNA, 19 bp, Mus musculus
  siRNA target sequence for Clic6 (NM_172469.1,1813-1831).
cgctgccagacgaaatcga

SEQ ID NO: 647159 - DNA, 19 bp, Mus musculus
  siRNA target sequence for Clic6 (NM_172469.1,1847-1865).
ggatgtcactgtttcacaa

SEQ ID NO: 647160 - DNA, 19 bp, Mus musculus
  siRNA target sequence for Clic6 (NM_172469.1,1917-1935).
cccaagctccatatcatta

SEQ ID NO: 647161 - DNA, 19 bp, Mus musculus
  siRNA target sequence for Clic6 (NM_172469.1,1918-1936).
ccaagctccatatcattaa

SEQ ID NO: 647162 - DNA, 19 bp, Mus musculus
  siRNA target sequence for Clic6 (NM_172469.1,1922-1940).
gctccatatcattaagatt

SEQ ID NO: 647163 - DNA, 19 bp, Mus musculus
  siRNA target sequence for Clic6 (NM_172469.1,1943-1961).
cgccaagaaatatagagat

SEQ ID NO: 647164 - DNA, 19 bp, Mus musculus
  siRNA target sequence for Clic6 (NM_172469.1,1987-2005).
gcatttggaggtacttgaa

SEQ ID NO: 647165 - DNA, 19 bp, Mus musculus
  siRNA target sequence for Clic6 (NM_172469.1,2047-2065).
ccgaccgggagattgaaca

SEQ ID NO: 647166 - DNA, 19 bp, Mus musculus
  siRNA target sequence for Clic6 (NM_172469.1,2055-2073).
gagattgaacacgcatatt

SEQ ID NO: 647167 - DNA, 19 bp, Mus musculus
  siRNA target sequence for Clic6 (NM_172469.1,2074-2092).
ccgatgcagcgaaaaggat

SEQ ID NO: 647168 - DNA, 19 bp, Mus musculus
  siRNA target sequence for Scn1b (NM_011322.2,318-336).
cgataccgaggctgtgtat

SEQ ID NO: 647169 - DNA, 19 bp, Mus musculus
  siRNA target sequence for Scn1b (NM_011322.2,338-356).
ggatgaccttcaaaatcct

SEQ ID NO: 647170 - DNA, 19 bp, Mus musculus
  siRNA target sequence for Scn1b (NM_011322.2,428-446).
ggacagaggaatttgtcaa

SEQ ID NO: 647171 - DNA, 19 bp, Mus musculus
  siRNA target sequence for Scn1b (NM_011322.2,447-465).
gatcctacgctatgagaat

SEQ ID NO: 647172 - DNA, 19 bp, Mus musculus
  siRNA target sequence for Scn1b (NM_011322.2,583-601).
cactctggcgactacgaat

SEQ ID NO: 647173 - DNA, 19 bp, Mus musculus
  siRNA target sequence for Scn1b (NM_011322.2,587-605).
ctggcgactacgaatgtca

SEQ ID NO: 647174 - DNA, 19 bp, Mus musculus
  siRNA target sequence for Scn1b (NM_011322.2,647-665).
ccagcgtcgtcaagaagat

SEQ ID NO: 647175 - DNA, 19 bp, Mus musculus
  siRNA target sequence for Scn1b (NM_011322.2,707-725).
ccatcgtgtcagagatcat

SEQ ID NO: 647176 - DNA, 19 bp, Mus musculus
  siRNA target sequence for Scn1b (NM_011322.2,835-853).
gaatacctggccattacat

SEQ ID NO: 647177 - DNA, 19 bp, Mus musculus
  siRNA target sequence for Tomm40 (NM_016871.1,297-315).
ggaaggtgtcaaacttaca

SEQ ID NO: 647178 - DNA, 19 bp, Mus musculus
  siRNA target sequence for Tomm40 (NM_016871.1,512-530).
caggcctcaggtccaaaat

SEQ ID NO: 647179 - DNA, 19 bp, Mus musculus
  siRNA target sequence for Tomm40 (NM_016871.1,624-642).
caactggttggctacagta

SEQ ID NO: 647180 - DNA, 19 bp, Mus musculus
  siRNA target sequence for Tomm40 (NM_016871.1,658-676).
ggcatgcatgcgacgtatt

SEQ ID NO: 647181 - DNA, 19 bp, Mus musculus
  siRNA target sequence for Tomm40 (NM_016871.1,886-904).
ctgaaccaccgcaagaata

SEQ ID NO: 647182 - DNA, 19 bp, Mus musculus
  siRNA target sequence for Vdac1 (NM_011694.1,224-242).
gtacagatggactgagtat

SEQ ID NO: 647183 - DNA, 19 bp, Mus musculus
  siRNA target sequence for Vdac2 (NM_011695.1,158-176).
gcccacggccgatgtgtat

SEQ ID NO: 647184 - DNA, 19 bp, Mus musculus
  siRNA target sequence for Vdac2 (NM_011695.1,390-408).
gtggaacaccgataacact

SEQ ID NO: 647185 - DNA, 19 bp, Mus musculus
  siRNA target sequence for Vdac3 (NM_011696.1,669-687).
gttaacgagaggattgaaa

SEQ ID NO: 647186 - DNA, 19 bp, Mus musculus
  siRNA target sequence for Vdac3 (NM_011696.1,758-776).
ggattgtagaacttctcta

SEQ ID NO: 647187 - DNA, 19 bp, Mus musculus
  siRNA target sequence for Vdac3 (NM_011696.1,759-777).
gattgtagaacttctctat

SEQ ID NO: 647188 - DNA, 19 bp, Mus musculus
  siRNA target sequence for Fxyd1 (NM_019503.2,177-195).
cacaggaaccggatccatt

SEQ ID NO: 647189 - DNA, 19 bp, Mus musculus
  siRNA target sequence for Fxyd1 (NM_019503.2,188-206).
gatccattcacctacgatt

SEQ ID NO: 647190 - DNA, 19 bp, Mus musculus
  siRNA target sequence for Fxyd2 (NM_007503.2,36-54).
ggctggggaaatatcagat

SEQ ID NO: 647191 - DNA, 19 bp, Mus musculus
  siRNA target sequence for Fxyd2 (NM_007503.2,98-116).
ccttcgagtacgactatga

SEQ ID NO: 647192 - DNA, 19 bp, Mus musculus
  siRNA target sequence for Fxyd2 (NM_007503.2,99-117).
cttcgagtacgactatgaa

SEQ ID NO: 647193 - DNA, 19 bp, Mus musculus
  siRNA target sequence for Fxyd2 (NM_007503.2,125-143).
gcaaaggaggcctgatctt

SEQ ID NO: 647194 - DNA, 19 bp, Mus musculus
  siRNA target sequence for Fxyd2 (NM_007503.2,162-180).
cgtgggcctcctcatcatt

SEQ ID NO: 647195 - DNA, 19 bp, Mus musculus
  siRNA target sequence for Fxyd3 (NM_008557.1,169-187).
gatcctttctactatgatt

SEQ ID NO: 647196 - DNA, 19 bp, Mus musculus
  siRNA target sequence for Fxyd3 (NM_008557.1,173-191).
ctttctactatgattggta

SEQ ID NO: 647197 - DNA, 19 bp, Mus musculus
  siRNA target sequence for Fxyd3 (NM_008557.1,231-249).
ctgtgccctgggcattata

SEQ ID NO: 647198 - DNA, 19 bp, Mus musculus
  siRNA target sequence for Fxyd3 (NM_008557.1,243-261).
cattatagtccttatgagt

SEQ ID NO: 647199 - DNA, 19 bp, Mus musculus
  siRNA target sequence for Fxyd3 (NM_008557.1,253-271).
cttatgagtggcaaatgca

SEQ ID NO: 647200 - DNA, 19 bp, Mus musculus
  siRNA target sequence for Fxyd4 (NM_033648.1,175-193).
gccagtgacccagttgata

SEQ ID NO: 647201 - DNA, 19 bp, Mus musculus
  siRNA target sequence for Fxyd4 (NM_033648.1,176-194).
ccagtgacccagttgataa

SEQ ID NO: 647202 - DNA, 19 bp, Mus musculus
  siRNA target sequence for Fxyd4 (NM_033648.1,177-195).
cagtgacccagttgataaa

SEQ ID NO: 647203 - DNA, 19 bp, Mus musculus
  siRNA target sequence for Fxyd4 (NM_033648.1,234-252).
gggaggattgatttttgga

SEQ ID NO: 647204 - DNA, 19 bp, Mus musculus
  siRNA target sequence for Fxyd4 (NM_033648.1,258-276).
cctgtgcatcgctggaatt

SEQ ID NO: 647205 - DNA, 19 bp, Mus musculus
  siRNA target sequence for Fxyd4 (NM_033648.1,315-333).
ccataagcccagttcctta

SEQ ID NO: 647206 - DNA, 19 bp, Mus musculus
  siRNA target sequence for Fxyd5 (NM_008761.2,80-98).
ctattgtcgccctgattct

SEQ ID NO: 647207 - DNA, 19 bp, Mus musculus
  siRNA target sequence for Fxyd5 (NM_008761.2,161-179).
cgactactcgtgacaatgt

SEQ ID NO: 647208 - DNA, 19 bp, Mus musculus
  siRNA target sequence for Fxyd5 (NM_008761.2,276-294).
gacccagcaactgacaaaa

SEQ ID NO: 647209 - DNA, 19 bp, Mus musculus
  siRNA target sequence for Fxyd5 (NM_008761.2,278-296).
cccagcaactgacaaaaat

SEQ ID NO: 647210 - DNA, 19 bp, Mus musculus
  siRNA target sequence for Fxyd5 (NM_008761.2,376-394).
cctctcagcccatccaaaa

SEQ ID NO: 647211 - DNA, 19 bp, Mus musculus
  siRNA target sequence for Fxyd5 (NM_008761.2,383-401).
gcccatccaaaaacttcat

SEQ ID NO: 647212 - DNA, 19 bp, Mus musculus
  siRNA target sequence for Fxyd5 (NM_008761.2,399-417).
catgcctccatcctacatt

SEQ ID NO: 647213 - DNA, 19 bp, Mus musculus
  siRNA target sequence for Fxyd5 (NM_008761.2,425-443).
cactggattcgaatgagaa

SEQ ID NO: 647214 - DNA, 19 bp, Mus musculus
  siRNA target sequence for Fxyd5 (NM_008761.2,439-457).
gagaacaaccccttctact

SEQ ID NO: 647215 - DNA, 19 bp, Mus musculus
  siRNA target sequence for Fxyd5 (NM_008761.2,448-466).
cccttctactacgatgata

SEQ ID NO: 647216 - DNA, 19 bp, Mus musculus
  siRNA target sequence for Fxyd5 (NM_008761.2,450-468).
cttctactacgatgatact

SEQ ID NO: 647217 - DNA, 19 bp, Mus musculus
  siRNA target sequence for Fxyd5 (NM_008761.2,505-523).
ctgttcatcacgggaatta

SEQ ID NO: 647218 - DNA, 19 bp, Mus musculus
  siRNA target sequence for Fxyd5 (NM_008761.2,545-563).
gtaggcagttgtctcaatt

SEQ ID NO: 647219 - DNA, 19 bp, Mus musculus
  siRNA target sequence for Fxyd6 (NM_022004.5,215-233).
ccgttgggatacttctcat

SEQ ID NO: 647220 - DNA, 19 bp, Mus musculus
  siRNA target sequence for Fxyd6 (NM_022004.5,245-263).
ggtgcaagtgcagtttcaa

SEQ ID NO: 647221 - DNA, 19 bp, Mus musculus
  siRNA target sequence for Fxyd6 (NM_022004.5,246-264).
gtgcaagtgcagtttcaat

SEQ ID NO: 647222 - DNA, 19 bp, Mus musculus
  siRNA target sequence for Fxyd6 (NM_022004.5,248-266).
gcaagtgcagtttcaatca

SEQ ID NO: 647223 - DNA, 19 bp, Mus musculus
  siRNA target sequence for Fxyd6 (NM_022004.5,304-322).
gagaacctcatcactacaa

SEQ ID NO: 647224 - DNA, 19 bp, Mus musculus
  siRNA target sequence for Fxyd7 (NM_022007.1,83-101).
ccagagccccacaaacgtt

SEQ ID NO: 647225 - DNA, 19 bp, Mus musculus
  siRNA target sequence for Fxyd7 (NM_022007.1,112-130).
cagatccttttttctatga

SEQ ID NO: 647226 - DNA, 19 bp, Mus musculus
  siRNA target sequence for Scn3b (NM_153522.1,38-56).
gcttcccctagcttctcta

SEQ ID NO: 647227 - DNA, 19 bp, Mus musculus
  siRNA target sequence for Scn3b (NM_153522.1,121-139).
ccgtgcagggcaattccat

SEQ ID NO: 647228 - DNA, 19 bp, Mus musculus
  siRNA target sequence for Scn3b (NM_153522.1,192-210).
gtagtggagtggttctaca

SEQ ID NO: 647229 - DNA, 19 bp, Mus musculus
  siRNA target sequence for Scn3b (NM_153522.1,211-229).
ggcctgagggcggtaaaga

SEQ ID NO: 647230 - DNA, 19 bp, Mus musculus
  siRNA target sequence for Scn3b (NM_153522.1,212-230).
gcctgagggcggtaaagat

SEQ ID NO: 647231 - DNA, 19 bp, Mus musculus
  siRNA target sequence for Scn3b (NM_153522.1,213-231).
cctgagggcggtaaagatt

SEQ ID NO: 647232 - DNA, 19 bp, Mus musculus
  siRNA target sequence for Scn3b (NM_153522.1,214-232).
ctgagggcggtaaagattt

SEQ ID NO: 647233 - DNA, 19 bp, Mus musculus
  siRNA target sequence for Scn3b (NM_153522.1,218-236).
gggcggtaaagatttcctt

SEQ ID NO: 647234 - DNA, 19 bp, Mus musculus
  siRNA target sequence for Scn3b (NM_153522.1,219-237).
ggcggtaaagatttcctta

SEQ ID NO: 647235 - DNA, 19 bp, Mus musculus
  siRNA target sequence for Scn3b (NM_153522.1,220-238).
gcggtaaagatttccttat

SEQ ID NO: 647236 - DNA, 19 bp, Mus musculus
  siRNA target sequence for Scn3b (NM_153522.1,221-239).
cggtaaagatttccttata

SEQ ID NO: 647237 - DNA, 19 bp, Mus musculus
  siRNA target sequence for Scn3b (NM_153522.1,222-240).
ggtaaagatttccttatat

SEQ ID NO: 647238 - DNA, 19 bp, Mus musculus
  siRNA target sequence for Scn3b (NM_153522.1,223-241).
gtaaagatttccttatata

SEQ ID NO: 647239 - DNA, 19 bp, Mus musculus
  siRNA target sequence for Scn3b (NM_153522.1,234-252).
cttatatatgagtatcgaa

SEQ ID NO: 647240 - DNA, 19 bp, Mus musculus
  siRNA target sequence for Scn3b (NM_153522.1,420-438).
gtgaagaccacaagactaa

SEQ ID NO: 647241 - DNA, 19 bp, Mus musculus
  siRNA target sequence for Scn3b (NM_153522.1,481-499).
ccgtggtctcggaaatcat

SEQ ID NO: 647242 - DNA, 19 bp, Mus musculus
  siRNA target sequence for Scn3b (NM_153522.1,483-501).
gtggtctcggaaatcatga

SEQ ID NO: 647243 - DNA, 19 bp, Mus musculus
  siRNA target sequence for Scn3b (NM_153522.1,486-504).
gtctcggaaatcatgatgt

SEQ ID NO: 647244 - DNA, 19 bp, Mus musculus
  siRNA target sequence for Scn3b (NM_153522.1,490-508).
cggaaatcatgatgtacat

SEQ ID NO: 647245 - DNA, 19 bp, Mus musculus
  siRNA target sequence for Scn3b (NM_153522.1,524-542).
caccttgtggctgtttatt

SEQ ID NO: 647246 - DNA, 19 bp, Mus musculus
  siRNA target sequence for Scn3b (NM_153522.1,526-544).
ccttgtggctgtttattga

SEQ ID NO: 647247 - DNA, 19 bp, Mus musculus
  siRNA target sequence for Scn3b (NM_153522.1,536-554).
gtttattgagatgatctat

SEQ ID NO: 647248 - DNA, 19 bp, Mus musculus
  siRNA target sequence for Scn3b (NM_153522.1,601-619).
cgtctgactaccttgctat

SEQ ID NO: 647249 - DNA, 19 bp, Mus musculus
  siRNA target sequence for Tm4sf11 (NM_026385.3,80-98).
gagttcccgtcgaaagtga

SEQ ID NO: 647250 - DNA, 19 bp, Mus musculus
  siRNA target sequence for Tm4sf11 (NM_026385.3,267-285).
cctatggctgggtcatgtt

SEQ ID NO: 647251 - DNA, 19 bp, Mus musculus
  siRNA target sequence for Tm4sf11 (NM_026385.3,268-286).
ctatggctgggtcatgttt

SEQ ID NO: 647252 - DNA, 19 bp, Mus musculus
  siRNA target sequence for Tm4sf11 (NM_026385.3,308-326).
gtgacaatcgtcttcttca

SEQ ID NO: 647253 - DNA, 19 bp, Mus musculus
  siRNA target sequence for Tm4sf11 (NM_026385.3,312-330).
caatcgtcttcttcatcat

SEQ ID NO: 647254 - DNA, 19 bp, Mus musculus
  siRNA target sequence for Tm4sf11 (NM_026385.3,341-359).
caactgcacatgaagttgt

SEQ ID NO: 647255 - DNA, 19 bp, Mus musculus
  siRNA target sequence for Tm4sf11 (NM_026385.3,344-362).
ctgcacatgaagttgtaca

SEQ ID NO: 647256 - DNA, 19 bp, Mus musculus
  siRNA target sequence for Tm4sf11 (NM_026385.3,372-390).
ggccgttggtgttactgat

SEQ ID NO: 647257 - DNA, 19 bp, Mus musculus
  siRNA target sequence for Tm4sf11 (NM_026385.3,375-393).
cgttggtgttactgatctt

SEQ ID NO: 647258 - DNA, 19 bp, Mus musculus
  siRNA target sequence for Tm4sf11 (NM_026385.3,376-394).
gttggtgttactgatcttt

SEQ ID NO: 647259 - DNA, 19 bp, Mus musculus
  siRNA target sequence for Tm4sf11 (NM_026385.3,404-422).
gccacggttctctacatta

SEQ ID NO: 647260 - DNA, 19 bp, Mus musculus
  siRNA target sequence for Tm4sf11 (NM_026385.3,406-424).
cacggttctctacattact

SEQ ID NO: 647261 - DNA, 19 bp, Mus musculus
  siRNA target sequence for 9430022F06Rik (NM_153086.3,220-238).
ctcatcatcaccttaaact

SEQ ID NO: 647262 - DNA, 19 bp, Mus musculus
  siRNA target sequence for 9430022F06Rik (NM_153086.3,367-385).
ccaggatgtgccaacgttt

SEQ ID NO: 647263 - DNA, 19 bp, Mus musculus
  siRNA target sequence for 9430022F06Rik (NM_153086.3,371-389).
gatgtgccaacgtttgcta

SEQ ID NO: 647264 - DNA, 19 bp, Mus musculus
  siRNA target sequence for 9430022F06Rik (NM_153086.3,734-752).
cagtgagtgcgctatcctt

SEQ ID NO: 647265 - DNA, 19 bp, Mus musculus
  siRNA target sequence for 9430022F06Rik (NM_153086.3,863-881).
ccccttgcctcttacaaaa

SEQ ID NO: 647266 - DNA, 19 bp, Mus musculus
  siRNA target sequence for 9430022F06Rik (NM_153086.3,1252-1270).
ccccatttgagaaccaaaa

SEQ ID NO: 647267 - DNA, 19 bp, Mus musculus
  siRNA target sequence for 9430022F06Rik (NM_153086.3,1253-1271).
cccatttgagaaccaaaaa

SEQ ID NO: 647268 - DNA, 19 bp, Mus musculus
  siRNA target sequence for 9430022F06Rik (NM_153086.3,1254-1272).
ccatttgagaaccaaaaaa

SEQ ID NO: 647269 - DNA, 19 bp, Mus musculus
  siRNA target sequence for Gja1 (NM_010288.2,965-983).
cggatctccaaaatatgct

SEQ ID NO: 647270 - DNA, 19 bp, Mus musculus
  siRNA target sequence for Gja1 (NM_010288.2,966-984).
ggatctccaaaatatgctt

SEQ ID NO: 647271 - DNA, 19 bp, Mus musculus
  siRNA target sequence for Gja1 (NM_010288.2,967-985).
gatctccaaaatatgctta

SEQ ID NO: 647272 - DNA, 19 bp, Mus musculus
  siRNA target sequence for Gja1 (NM_010288.2,1072-1090).
cctcctgccgcaattacaa

SEQ ID NO: 647273 - DNA, 19 bp, Mus musculus
  siRNA target sequence for Gja1 (NM_010288.2,1075-1093).
cctgccgcaattacaacaa

SEQ ID NO: 647274 - DNA, 19 bp, Mus musculus
  siRNA target sequence for Gja1 (NM_010288.2,1095-1113).
caagccagcgagcaaaact

SEQ ID NO: 647275 - DNA, 19 bp, Mus musculus
  siRNA target sequence for Gja1 (NM_010288.2,1107-1125).
caaaactgggcgaattaca

SEQ ID NO: 647276 - DNA, 19 bp, Mus musculus
  siRNA target sequence for Gja1 (NM_010288.2,1124-1142).
cagcgcagagcaaaatcga

SEQ ID NO: 647277 - DNA, 19 bp, Mus musculus
  siRNA target sequence for Gja1 (NM_010288.2,1176-1194).
cacgcccagccgtttgatt

SEQ ID NO: 647278 - DNA, 19 bp, Mus musculus
  siRNA target sequence for Gja1 (NM_010288.2,1314-1332).
cctgatgacctggagattt

SEQ ID NO: 647279 - DNA, 19 bp, Mus musculus
  siRNA target sequence for Gja12 (NM_080454.2,206-224).
cggtggtgagtccatctat

SEQ ID NO: 647280 - DNA, 19 bp, Mus musculus
  siRNA target sequence for Gja12 (NM_080454.2,207-225).
ggtggtgagtccatctatt

SEQ ID NO: 647281 - DNA, 19 bp, Mus musculus
  siRNA target sequence for Gja12 (NM_080454.2,228-246).
gatgagcaatccaagttca

SEQ ID NO: 647282 - DNA, 19 bp, Mus musculus
  siRNA target sequence for Gja12 (NM_080454.2,508-526).
gagaggcggagcccatatt

SEQ ID NO: 647283 - DNA, 19 bp, Mus musculus
  siRNA target sequence for Gja12 (NM_080454.2,791-809).
cgaggtgccacccttcttt

SEQ ID NO: 647284 - DNA, 19 bp, Mus musculus
  siRNA target sequence for Gja12 (NM_080454.2,832-850).
cccacgtagtggattgctt

SEQ ID NO: 647285 - DNA, 19 bp, Mus musculus
  siRNA target sequence for Gja12 (NM_080454.2,1111-1129).
gagcgcacgaccagaactt

SEQ ID NO: 647286 - DNA, 19 bp, Mus musculus
  siRNA target sequence for Gja12 (NM_080454.2,1312-1330).
cgggagctcaggaacaact

SEQ ID NO: 647287 - DNA, 19 bp, Mus musculus
  siRNA target sequence for Gja3 (NM_016975.1,74-92).
ggctgaccgtgctgttcat

SEQ ID NO: 647288 - DNA, 19 bp, Mus musculus
  siRNA target sequence for Gja3 (NM_016975.1,76-94).
ctgaccgtgctgttcatct

SEQ ID NO: 647289 - DNA, 19 bp, Mus musculus
  siRNA target sequence for Gja3 (NM_016975.1,257-275).
ctacgcccaccctcatcta

SEQ ID NO: 647290 - DNA, 19 bp, Mus musculus
  siRNA target sequence for Gja3 (NM_016975.1,458-476).
ggacctacgtcttcaacat

SEQ ID NO: 647291 - DNA, 19 bp, Mus musculus
  siRNA target sequence for Gja3 (NM_016975.1,653-671).
gtgcgtcactggtactcaa

SEQ ID NO: 647292 - DNA, 19 bp, Mus musculus
  siRNA target sequence for Gja3 (NM_016975.1,716-734).
gagttactaaccacttcaa

SEQ ID NO: 647293 - DNA, 19 bp, Mus musculus
  siRNA target sequence for Gja3 (NM_016975.1,911-929).
cagtggtgactctaaacga

SEQ ID NO: 647294 - DNA, 19 bp, Mus musculus
  siRNA target sequence for Gja4 (NM_008120.2,137-155).
gtgggcaagatctggttaa

SEQ ID NO: 647295 - DNA, 19 bp, Mus musculus
  siRNA target sequence for Gja4 (NM_008120.2,218-236).
gagcagtctgattttgagt

SEQ ID NO: 647296 - DNA, 19 bp, Mus musculus
  siRNA target sequence for Gja4 (NM_008120.2,333-351).
gcacacccaccctgatcta

SEQ ID NO: 647297 - DNA, 19 bp, Mus musculus
  siRNA target sequence for Gja4 (NM_008120.2,470-488).
catcagatggccaagatct

SEQ ID NO: 647298 - DNA, 19 bp, Mus musculus
  siRNA target sequence for Gja4 (NM_008120.2,545-563).
gtcagcgtgctgtgtaaga

SEQ ID NO: 647299 - DNA, 19 bp, Mus musculus
  siRNA target sequence for Gja4 (NM_008120.2,547-565).
cagcgtgctgtgtaagagt

SEQ ID NO: 647300 - DNA, 19 bp, Mus musculus
  siRNA target sequence for Gja4 (NM_008120.2,680-698).
cgacccactgagaagacta

SEQ ID NO: 647301 - DNA, 19 bp, Mus musculus
  siRNA target sequence for Gja4 (NM_008120.2,780-798).
gtgtcagccgggagataaa

SEQ ID NO: 647302 - DNA, 19 bp, Mus musculus
  siRNA target sequence for Gja4 (NM_008120.2,855-873).
ctgaacaggttttcttcta

SEQ ID NO: 647303 - DNA, 19 bp, Mus musculus
  siRNA target sequence for Gja4 (NM_008120.2,984-1002).
ccagacctcccccatttgt

SEQ ID NO: 647304 - DNA, 19 bp, Mus musculus
  siRNA target sequence for Gja4 (NM_008120.2,985-1003).
cagacctcccccatttgta

SEQ ID NO: 647305 - DNA, 19 bp, Mus musculus
  siRNA target sequence for Gja4 (NM_008120.2,987-1005).
gacctcccccatttgtaaa

SEQ ID NO: 647306 - DNA, 19 bp, Mus musculus
  siRNA target sequence for Gja5 (NM_008121.1,153-171).
cttccggtgcgataccatt

SEQ ID NO: 647307 - DNA, 19 bp, Mus musculus
  siRNA target sequence for Gja5 (NM_008121.1,260-278).
cgccttctctagtgtacat

SEQ ID NO: 647308 - DNA, 19 bp, Mus musculus
  siRNA target sequence for Gja5 (NM_008121.1,296-314).
ctgtgcgcatgcaggaaaa

SEQ ID NO: 647309 - DNA, 19 bp, Mus musculus
  siRNA target sequence for Gja5 (NM_008121.1,325-343).
cgggatgctgagaaagcta

SEQ ID NO: 647310 - DNA, 19 bp, Mus musculus
  siRNA target sequence for Gja5 (NM_008121.1,356-374).
gcactggtgcctatgagta

SEQ ID NO: 647311 - DNA, 19 bp, Mus musculus
  siRNA target sequence for Gja5 (NM_008121.1,572-590).
cccacccagtcaactgtta

SEQ ID NO: 647312 - DNA, 19 bp, Mus musculus
  siRNA target sequence for Gja5 (NM_008121.1,576-594).
cccagtcaactgttatgtt

SEQ ID NO: 647313 - DNA, 19 bp, Mus musculus
  siRNA target sequence for Gja5 (NM_008121.1,577-595).
ccagtcaactgttatgttt

SEQ ID NO: 647314 - DNA, 19 bp, Mus musculus
  siRNA target sequence for Gja5 (NM_008121.1,842-860).
gcgacttcagtaataacat

SEQ ID NO: 647315 - DNA, 19 bp, Mus musculus
  siRNA target sequence for Gja5 (NM_008121.1,858-876).
catgggctcccggaagaat

SEQ ID NO: 647316 - DNA, 19 bp, Mus musculus
  siRNA target sequence for Gja5 (NM_008121.1,997-1015).
cttcctcagggctaccata

SEQ ID NO: 647317 - DNA, 19 bp, Mus musculus
  siRNA target sequence for Gja5 (NM_008121.1,1001-1019).
ctcagggctaccatagtga

SEQ ID NO: 647318 - DNA, 19 bp, Mus musculus
  siRNA target sequence for Gja5 (NM_008121.1,1005-1023).
gggctaccatagtgacaaa

SEQ ID NO: 647319 - DNA, 19 bp, Mus musculus
  siRNA target sequence for Gja7 (NM_008122.1,495-513).
ccacaaccattcgacattt

SEQ ID NO: 647320 - DNA, 19 bp, Mus musculus
  siRNA target sequence for Gja7 (NM_008122.1,498-516).
caaccattcgacatttgta

SEQ ID NO: 647321 - DNA, 19 bp, Mus musculus
  siRNA target sequence for Gja7 (NM_008122.1,535-553).
gtgctgattgtctttcgaa

SEQ ID NO: 647322 - DNA, 19 bp, Mus musculus
  siRNA target sequence for Gja7 (NM_008122.1,537-555).
gctgattgtctttcgaatt

SEQ ID NO: 647323 - DNA, 19 bp, Mus musculus
  siRNA target sequence for Gja7 (NM_008122.1,575-593).
gagagtccatctactatga

SEQ ID NO: 647324 - DNA, 19 bp, Mus musculus
  siRNA target sequence for Gja7 (NM_008122.1,723-741).
gatgtacctgggatatgct

SEQ ID NO: 647325 - DNA, 19 bp, Mus musculus
  siRNA target sequence for Gja7 (NM_008122.1,726-744).
gtacctgggatatgctatt

SEQ ID NO: 647326 - DNA, 19 bp, Mus musculus
  siRNA target sequence for Gja7 (NM_008122.1,733-751).
ggatatgctattcataaga

SEQ ID NO: 647327 - DNA, 19 bp, Mus musculus
  siRNA target sequence for Gja7 (NM_008122.1,734-752).
gatatgctattcataagat

SEQ ID NO: 647328 - DNA, 19 bp, Mus musculus
  siRNA target sequence for Gja7 (NM_008122.1,826-844).
caccgggctctggaagaaa

SEQ ID NO: 647329 - DNA, 19 bp, Mus musculus
  siRNA target sequence for Gja7 (NM_008122.1,859-877).
gaagaggatcctatgatgt

SEQ ID NO: 647330 - DNA, 19 bp, Mus musculus
  siRNA target sequence for Gja7 (NM_008122.1,918-936).
gcagagccaaccaaaacct

SEQ ID NO: 647331 - DNA, 19 bp, Mus musculus
  siRNA target sequence for Gja7 (NM_008122.1,1059-1077).
ccaagtccacccattttat

SEQ ID NO: 647332 - DNA, 19 bp, Mus musculus
  siRNA target sequence for Gja7 (NM_008122.1,1094-1112).
cttgccctcataagataga

SEQ ID NO: 647333 - DNA, 19 bp, Mus musculus
  siRNA target sequence for Gja7 (NM_008122.1,1140-1158).
gaccatcttccttctgata

SEQ ID NO: 647334 - DNA, 19 bp, Mus musculus
  siRNA target sequence for Gja7 (NM_008122.1,1174-1192).
ggcctctgcctattgctta

SEQ ID NO: 647335 - DNA, 19 bp, Mus musculus
  siRNA target sequence for Gja7 (NM_008122.1,1175-1193).
gcctctgcctattgcttaa

SEQ ID NO: 647336 - DNA, 19 bp, Mus musculus
  siRNA target sequence for Gja7 (NM_008122.1,1177-1195).
ctctgcctattgcttaaca

SEQ ID NO: 647337 - DNA, 19 bp, Mus musculus
  siRNA target sequence for Gja7 (NM_008122.1,1226-1244).
caattcgagactcactaaa

SEQ ID NO: 647338 - DNA, 19 bp, Mus musculus
  siRNA target sequence for Gja7 (NM_008122.1,1231-1249).
cgagactcactaaacagta

SEQ ID NO: 647339 - DNA, 19 bp, Mus musculus
  siRNA target sequence for Gja7 (NM_008122.1,1232-1250).
gagactcactaaacagtaa

SEQ ID NO: 647340 - DNA, 19 bp, Mus musculus
  siRNA target sequence for Gja7 (NM_008122.1,1264-1282).
gatgatccgggtgcttata

SEQ ID NO: 647341 - DNA, 19 bp, Mus musculus
  siRNA target sequence for Gja7 (NM_008122.1,1267-1285).
gatccgggtgcttataatt

SEQ ID NO: 647342 - DNA, 19 bp, Mus musculus
  siRNA target sequence for Gja7 (NM_008122.1,1272-1290).
gggtgcttataattatcct

SEQ ID NO: 647343 - DNA, 19 bp, Mus musculus
  siRNA target sequence for Gja7 (NM_008122.1,1273-1291).
ggtgcttataattatcctt

SEQ ID NO: 647344 - DNA, 19 bp, Mus musculus
  siRNA target sequence for Gja7 (NM_008122.1,1274-1292).
gtgcttataattatccttt

SEQ ID NO: 647345 - DNA, 19 bp, Mus musculus
  siRNA target sequence for Gja7 (NM_008122.1,1312-1330).
gctccccctggctataaca

SEQ ID NO: 647346 - DNA, 19 bp, Mus musculus
  siRNA target sequence for Gja7 (NM_008122.1,1313-1331).
ctccccctggctataacat

SEQ ID NO: 647347 - DNA, 19 bp, Mus musculus
  siRNA target sequence for Gja7 (NM_008122.1,1519-1537).
gcctaccatcaccaaaaca

SEQ ID NO: 647348 - DNA, 19 bp, Mus musculus
  siRNA target sequence for Gja7 (NM_008122.1,1543-1561).
catggtcctcgggaaaaga

SEQ ID NO: 647349 - DNA, 19 bp, Mus musculus
  siRNA target sequence for Gja7 (NM_008122.1,1587-1605).
gtccaacaaaagcagtatt

SEQ ID NO: 647350 - DNA, 19 bp, Mus musculus
  siRNA target sequence for Gja7 (NM_008122.1,1590-1608).
caacaaaagcagtattagt

SEQ ID NO: 647351 - DNA, 19 bp, Mus musculus
  siRNA target sequence for Gja8 (NM_008123.1,14-32).
gtttcctgggaaacatctt

SEQ ID NO: 647352 - DNA, 19 bp, Mus musculus
  siRNA target sequence for Gja8 (NM_008123.1,113-131).
ggacagcagcggagtttgt

SEQ ID NO: 647353 - DNA, 19 bp, Mus musculus
  siRNA target sequence for Gja8 (NM_008123.1,257-275).
ccactccatcgctgatgta

SEQ ID NO: 647354 - DNA, 19 bp, Mus musculus
  siRNA target sequence for Gja8 (NM_008123.1,592-610).
gtggtagactgctttgtat

SEQ ID NO: 647355 - DNA, 19 bp, Mus musculus
  siRNA target sequence for Gja8 (NM_008123.1,815-833).
gctaccagcttctagaaga

SEQ ID NO: 647356 - DNA, 19 bp, Mus musculus
  siRNA target sequence for Gja8 (NM_008123.1,895-913).
ctttcggccaagcctttta

SEQ ID NO: 647357 - DNA, 19 bp, Mus musculus
  siRNA target sequence for Gja8 (NM_008123.1,940-958).
ggacccctggcagatatgt

SEQ ID NO: 647358 - DNA, 19 bp, Mus musculus
  siRNA target sequence for Gja8 (NM_008123.1,1019-1037).
gggaagagccgcctataga

SEQ ID NO: 647359 - DNA, 19 bp, Mus musculus
  siRNA target sequence for Gja8 (NM_008123.1,1176-1194).
gctgcaagctgaaaaggta

SEQ ID NO: 647360 - DNA, 19 bp, Mus musculus
  siRNA target sequence for Gja8 (NM_008123.1,1242-1260).
gctgacaaccgatgacaat

SEQ ID NO: 647361 - DNA, 19 bp, Mus musculus
  siRNA target sequence for Gja8 (NM_008123.1,1295-1313).
gggccaggtcagatgatct

SEQ ID NO: 647362 - DNA, 19 bp, Mus musculus
  siRNA target sequence for Gja9 (NM_010290.2,576-594).
gtgatcttccggatactca

SEQ ID NO: 647363 - DNA, 19 bp, Mus musculus
  siRNA target sequence for Gja9 (NM_010290.2,578-596).
gatcttccggatactcatt

SEQ ID NO: 647364 - DNA, 19 bp, Mus musculus
  siRNA target sequence for Gja9 (NM_010290.2,695-713).
ctttcccatctcccatata

SEQ ID NO: 647365 - DNA, 19 bp, Mus musculus
  siRNA target sequence for Gja9 (NM_010290.2,721-739).
gggtcttccagatcataat

SEQ ID NO: 647366 - DNA, 19 bp, Mus musculus
  siRNA target sequence for Gja9 (NM_010290.2,758-776).
ctgttttatcacctattct

SEQ ID NO: 647367 - DNA, 19 bp, Mus musculus
  siRNA target sequence for Gja9 (NM_010290.2,798-816).
cgagaacgccggtactcta

SEQ ID NO: 647368 - DNA, 19 bp, Mus musculus
  siRNA target sequence for Gja9 (NM_010290.2,838-856).
gagaccctgctgagtctat

SEQ ID NO: 647369 - DNA, 19 bp, Mus musculus
  siRNA target sequence for Gja9 (NM_010290.2,898-916).
gcaaacgagaagataagaa

SEQ ID NO: 647370 - DNA, 19 bp, Mus musculus
  siRNA target sequence for Gja9 (NM_010290.2,974-992).
gacagaaccagattgctta

SEQ ID NO: 647371 - DNA, 19 bp, Mus musculus
  siRNA target sequence for Gja9 (NM_010290.2,1065-1083).
ggtatctcccgcttctaca

SEQ ID NO: 647372 - DNA, 19 bp, Mus musculus
  siRNA target sequence for Gja9 (NM_010290.2,1066-1084).
gtatctcccgcttctacat

SEQ ID NO: 647373 - DNA, 19 bp, Mus musculus
  siRNA target sequence for Gja9 (NM_010290.2,1154-1172).
cagtgttccagggttgtat

SEQ ID NO: 647374 - DNA, 19 bp, Mus musculus
  siRNA target sequence for Gja9 (NM_010290.2,1200-1218).
gaggtagaatgttatgtgt

SEQ ID NO: 647375 - DNA, 19 bp, Mus musculus
  siRNA target sequence for Gja9 (NM_010290.2,1283-1301).
gctcaatctggctgaactt

SEQ ID NO: 647376 - DNA, 19 bp, Mus musculus
  siRNA target sequence for Gja9 (NM_010290.2,1284-1302).
ctcaatctggctgaactta

SEQ ID NO: 647377 - DNA, 19 bp, Mus musculus
  siRNA target sequence for Gja9 (NM_010290.2,1352-1370).
caagaggaagtcagtctat

SEQ ID NO: 647378 - DNA, 19 bp, Mus musculus
  siRNA target sequence for Gja9 (NM_010290.2,1358-1376).
gaagtcagtctatgagata

SEQ ID NO: 647379 - DNA, 19 bp, Mus musculus
  siRNA target sequence for Gja9 (NM_010290.2,1363-1381).
cagtctatgagatacgtaa

SEQ ID NO: 647380 - DNA, 19 bp, Mus musculus
  siRNA target sequence for Gja9 (NM_010290.2,1367-1385).
ctatgagatacgtaacaaa

SEQ ID NO: 647381 - DNA, 19 bp, Mus musculus
  siRNA target sequence for Gjb1 (NM_008124.2,178-196).
gagaagtcctctttcatct

SEQ ID NO: 647382 - DNA, 19 bp, Mus musculus
  siRNA target sequence for Gjb1 (NM_008124.2,274-292).
ctgcagcttatcttggttt

SEQ ID NO: 647383 - DNA, 19 bp, Mus musculus
  siRNA target sequence for Gjb1 (NM_008124.2,430-448).
ctgtggtggacctatgtca

SEQ ID NO: 647384 - DNA, 19 bp, Mus musculus
  siRNA target sequence for Gjb1 (NM_008124.2,474-492).
cgaggctgtcttcatgtat

SEQ ID NO: 647385 - DNA, 19 bp, Mus musculus
  siRNA target sequence for Gjb1 (NM_008124.2,602-620).
ccgtcttcactgtctttat

SEQ ID NO: 647386 - DNA, 19 bp, Mus musculus
  siRNA target sequence for Gjb1 (NM_008124.2,629-647).
cctccggcatctgcattat

SEQ ID NO: 647387 - DNA, 19 bp, Mus musculus
  siRNA target sequence for Gjb1 (NM_008124.2,751-769).
cgcctctcacctgaataca

SEQ ID NO: 647388 - DNA, 19 bp, Mus musculus
  siRNA target sequence for Gjb1 (NM_008124.2,752-770).
gcctctcacctgaatacaa

SEQ ID NO: 647389 - DNA, 19 bp, Mus musculus
  siRNA target sequence for Gjb1 (NM_008124.2,801-819).
gcaggatggctctctgaaa

SEQ ID NO: 647390 - DNA, 19 bp, Mus musculus
  siRNA target sequence for Gjb2 (NM_008125.2,258-276).
cctcgggggtgtcaacaaa

SEQ ID NO: 647391 - DNA, 19 bp, Mus musculus
  siRNA target sequence for Gjb2 (NM_008125.2,262-280).
gggggtgtcaacaaacact

SEQ ID NO: 647392 - DNA, 19 bp, Mus musculus
  siRNA target sequence for Gjb2 (NM_008125.2,370-388).
gagcaagccgattttgtct

SEQ ID NO: 647393 - DNA, 19 bp, Mus musculus
  siRNA target sequence for Gjb2 (NM_008125.2,399-417).
ccagcctggctgcaagaat

SEQ ID NO: 647394 - DNA, 19 bp, Mus musculus
  siRNA target sequence for Gjb2 (NM_008125.2,407-425).
gctgcaagaatgtatgcta

SEQ ID NO: 647395 - DNA, 19 bp, Mus musculus
  siRNA target sequence for Gjb2 (NM_008125.2,516-534).
ggcctaccggagacatgaa

SEQ ID NO: 647396 - DNA, 19 bp, Mus musculus
  siRNA target sequence for Gjb2 (NM_008125.2,517-535).
gcctaccggagacatgaaa

SEQ ID NO: 647397 - DNA, 19 bp, Mus musculus
  siRNA target sequence for Gjb2 (NM_008125.2,546-564).
gttcatgaagggagagata

SEQ ID NO: 647398 - DNA, 19 bp, Mus musculus
  siRNA target sequence for Gjb2 (NM_008125.2,579-597).
ggacatcgaagagatcaaa

SEQ ID NO: 647399 - DNA, 19 bp, Mus musculus
  siRNA target sequence for Gjb2 (NM_008125.2,580-598).
gacatcgaagagatcaaaa

SEQ ID NO: 647400 - DNA, 19 bp, Mus musculus
  siRNA target sequence for Gjb2 (NM_008125.2,600-618).
ccagaaggtccgtatcgaa

SEQ ID NO: 647401 - DNA, 19 bp, Mus musculus
  siRNA target sequence for Gjb2 (NM_008125.2,721-739).
caacgtctggtgaaatgca

SEQ ID NO: 647402 - DNA, 19 bp, Mus musculus
  siRNA target sequence for Gjb2 (NM_008125.2,797-815).
ctgtcttcaccgtgtttat

SEQ ID NO: 647403 - DNA, 19 bp, Mus musculus
  siRNA target sequence for Gjb2 (NM_008125.2,801-819).
cttcaccgtgtttatgatt

SEQ ID NO: 647404 - DNA, 19 bp, Mus musculus
  siRNA target sequence for Gjb2 (NM_008125.2,859-877).
ctgtgctatttgttcgtta

SEQ ID NO: 647405 - DNA, 19 bp, Mus musculus
  siRNA target sequence for Gjb2 (NM_008125.2,863-881).
gctatttgttcgttaggta

SEQ ID NO: 647406 - DNA, 19 bp, Mus musculus
  siRNA target sequence for Gjb2 (NM_008125.2,864-882).
ctatttgttcgttaggtat

SEQ ID NO: 647407 - DNA, 19 bp, Mus musculus
  siRNA target sequence for Gjb3 (NM_008126.1,134-152).
gctccaagacctattgagt

SEQ ID NO: 647408 - DNA, 19 bp, Mus musculus
  siRNA target sequence for Gjb3 (NM_008126.1,248-266).
gtggggtgacgagcaaaaa

SEQ ID NO: 647409 - DNA, 19 bp, Mus musculus
  siRNA target sequence for Gjb3 (NM_008126.1,252-270).
ggtgacgagcaaaaagact

SEQ ID NO: 647410 - DNA, 19 bp, Mus musculus
  siRNA target sequence for Gjb3 (NM_008126.1,631-649).
ccaacaccgtggattgcta

SEQ ID NO: 647411 - DNA, 19 bp, Mus musculus
  siRNA target sequence for Gjb3 (NM_008126.1,705-723).
gccgtctgcattattctca

SEQ ID NO: 647412 - DNA, 19 bp, Mus musculus
  siRNA target sequence for Gjb3 (NM_008126.1,876-894).
gcagacccagccagtgaaa

SEQ ID NO: 647413 - DNA, 19 bp, Mus musculus
  siRNA target sequence for Gjb4 (NM_008127.1,28-46).
ctgagtggtgtgaacaagt

SEQ ID NO: 647414 - DNA, 19 bp, Mus musculus
  siRNA target sequence for Gjb4 (NM_008127.1,127-145).
gtgtgggacgacgatcaaa

SEQ ID NO: 647415 - DNA, 19 bp, Mus musculus
  siRNA target sequence for Gjb4 (NM_008127.1,131-149).
gggacgacgatcaaaagga

SEQ ID NO: 647416 - DNA, 19 bp, Mus musculus
  siRNA target sequence for Gjb4 (NM_008127.1,132-150).
ggacgacgatcaaaaggat

SEQ ID NO: 647417 - DNA, 19 bp, Mus musculus
  siRNA target sequence for Gjb4 (NM_008127.1,133-151).
gacgacgatcaaaaggatt

SEQ ID NO: 647418 - DNA, 19 bp, Mus musculus
  siRNA target sequence for Gjb4 (NM_008127.1,452-470).
gcatttacaaggactatga

SEQ ID NO: 647419 - DNA, 19 bp, Mus musculus
  siRNA target sequence for Gjb4 (NM_008127.1,533-551).
cccgacccacagagaagaa

SEQ ID NO: 647420 - DNA, 19 bp, Mus musculus
  siRNA target sequence for Gjb4 (NM_008127.1,584-602).
ccatttgtattctactcaa

SEQ ID NO: 647421 - DNA, 19 bp, Mus musculus
  siRNA target sequence for Gjb4 (NM_008127.1,698-716).
cgtgcccaccgtatgtgat

SEQ ID NO: 647422 - DNA, 19 bp, Mus musculus
  siRNA target sequence for Gjb4 (NM_008127.1,739-757).
gatgagagcgtgatcctaa

SEQ ID NO: 647423 - DNA, 19 bp, Mus musculus
  siRNA target sequence for Gjb4 (NM_008127.1,742-760).
gagagcgtgatcctaacaa

SEQ ID NO: 647424 - DNA, 19 bp, Mus musculus
  siRNA target sequence for Gjb4 (NM_008127.1,781-799).
gatgcaggtgtgtatccat

SEQ ID NO: 647425 - DNA, 19 bp, Mus musculus
  siRNA target sequence for Gjb5 (NM_010291.2,298-316).
gagacgaccagaaggattt

SEQ ID NO: 647426 - DNA, 19 bp, Mus musculus
  siRNA target sequence for Gjb5 (NM_010291.2,488-506).
gattggtgaaggttacctt

SEQ ID NO: 647427 - DNA, 19 bp, Mus musculus
  siRNA target sequence for Gjb5 (NM_010291.2,608-626).
cgcattctatcccagatat

SEQ ID NO: 647428 - DNA, 19 bp, Mus musculus
  siRNA target sequence for Gjb5 (NM_010291.2,622-640).
gatataccctcccttctat

SEQ ID NO: 647429 - DNA, 19 bp, Mus musculus
  siRNA target sequence for Gjb5 (NM_010291.2,690-708).
gccaagccctccgagaaaa

SEQ ID NO: 647430 - DNA, 19 bp, Mus musculus
  siRNA target sequence for Gjb5 (NM_010291.2,691-709).
ccaagccctccgagaaaaa

SEQ ID NO: 647431 - DNA, 19 bp, Mus musculus
  siRNA target sequence for Gjb5 (NM_010291.2,770-788).
gctgatctacctagtgatt

SEQ ID NO: 647432 - DNA, 19 bp, Mus musculus
  siRNA target sequence for Gjb5 (NM_010291.2,920-938).
cgctcacccgcctctgtta

SEQ ID NO: 647433 - DNA, 19 bp, Mus musculus
  siRNA target sequence for Gjb5 (NM_010291.2,949-967).
ctcgagcccacgtgaagaa

SEQ ID NO: 647434 - DNA, 19 bp, Mus musculus
  siRNA target sequence for Gjb6 (NM_008128.2,349-367).
gtggatcacggtcatcttt

SEQ ID NO: 647435 - DNA, 19 bp, Mus musculus
  siRNA target sequence for Gjb6 (NM_008128.2,351-369).
ggatcacggtcatctttat

SEQ ID NO: 647436 - DNA, 19 bp, Mus musculus
  siRNA target sequence for Gjb6 (NM_008128.2,565-583).
ggcctactacagacatgaa

SEQ ID NO: 647437 - DNA, 19 bp, Mus musculus
  siRNA target sequence for Gjb6 (NM_008128.2,581-599).
gaaactgcccgaaagttta

SEQ ID NO: 647438 - DNA, 19 bp, Mus musculus
  siRNA target sequence for Gjb6 (NM_008128.2,610-628).
gaagagaaacgagtttaaa

SEQ ID NO: 647439 - DNA, 19 bp, Mus musculus
  siRNA target sequence for Gjb6 (NM_008128.2,718-736).
cgaagccgccttcatgtat

SEQ ID NO: 647440 - DNA, 19 bp, Mus musculus
  siRNA target sequence for Gjb6 (NM_008128.2,722-740).
gccgccttcatgtatgtgt

SEQ ID NO: 647441 - DNA, 19 bp, Mus musculus
  siRNA target sequence for Gjb6 (NM_008128.2,723-741).
ccgccttcatgtatgtgtt

SEQ ID NO: 647442 - DNA, 19 bp, Mus musculus
  siRNA target sequence for Gjb6 (NM_008128.2,846-864).
cggtgttcactgtttttat

SEQ ID NO: 647443 - DNA, 19 bp, Mus musculus
  siRNA target sequence for Gjb6 (NM_008128.2,920-938).
ctgcttaaattgtgcttta

SEQ ID NO: 647444 - DNA, 19 bp, Mus musculus
  siRNA target sequence for Gjb6 (NM_008128.2,931-949).
gtgctttaggagatccaaa

SEQ ID NO: 647445 - DNA, 19 bp, Mus musculus
  siRNA target sequence for Gjb6 (NM_008128.2,934-952).
ctttaggagatccaaaaga

SEQ ID NO: 647446 - DNA, 19 bp, Mus musculus
  siRNA target sequence for Gje1 (NM_080450.1,94-112).
cgtctcctgatcttggttt

SEQ ID NO: 647447 - DNA, 19 bp, Mus musculus
  siRNA target sequence for Gje1 (NM_080450.1,125-143).
gggttttcggcaatgatga

SEQ ID NO: 647448 - DNA, 19 bp, Mus musculus
  siRNA target sequence for Gje1 (NM_080450.1,144-162).
gaatgaattcatatgtcat

SEQ ID NO: 647449 - DNA, 19 bp, Mus musculus
  siRNA target sequence for Gje1 (NM_080450.1,267-285).
catttatgtggctttcact

SEQ ID NO: 647450 - DNA, 19 bp, Mus musculus
  siRNA target sequence for Gje1 (NM_080450.1,309-327).
ggaggtaccaggaaaggaa

SEQ ID NO: 647451 - DNA, 19 bp, Mus musculus
  siRNA target sequence for Gje1 (NM_080450.1,353-371).
gcaaaggggatcatagcaa

SEQ ID NO: 647452 - DNA, 19 bp, Mus musculus
  siRNA target sequence for Gje1 (NM_080450.1,461-479).
gtgttcagtacaatctgta

SEQ ID NO: 647453 - DNA, 19 bp, Mus musculus
  siRNA target sequence for Gje1 (NM_080450.1,466-484).
cagtacaatctgtatggtt

SEQ ID NO: 647454 - DNA, 19 bp, Mus musculus
  siRNA target sequence for Gje1 (NM_080450.1,489-507).
gatgtccagcacttttata

SEQ ID NO: 647455 - DNA, 19 bp, Mus musculus
  siRNA target sequence for Gje1 (NM_080450.1,509-527).
gtcgtgaggatccttgtat

SEQ ID NO: 647456 - DNA, 19 bp, Mus musculus
  siRNA target sequence for Gje1 (NM_080450.1,603-621).
ggcctgtttcttatttatt

SEQ ID NO: 647457 - DNA, 19 bp, Mus musculus
  siRNA target sequence for Gje1 (NM_080450.1,653-671).
ggttttggaggatatacaa

SEQ ID NO: 647458 - DNA, 19 bp, Mus musculus
  siRNA target sequence for Gje1 (NM_080450.1,662-680).
ggatatacaagcacaaact

SEQ ID NO: 647459 - DNA, 19 bp, Mus musculus
  siRNA target sequence for Gje1 (NM_080450.1,663-681).
gatatacaagcacaaactt

SEQ ID NO: 647460 - DNA, 19 bp, Mus musculus
  siRNA target sequence for Gje1 (NM_080450.1,730-748).
gacacaaccgatgaattgt

SEQ ID NO: 647461 - DNA, 19 bp, Mus musculus
  siRNA target sequence for Gje1 (NM_080450.1,732-750).
cacaaccgatgaattgtca

SEQ ID NO: 647462 - DNA, 19 bp, Mus musculus
  siRNA target sequence for Slc14a1 (NM_028122.2,155-173).
gatagtcccaccatggtta

SEQ ID NO: 647463 - DNA, 19 bp, Mus musculus
  siRNA target sequence for Slc14a1 (NM_028122.2,159-177).
gtcccaccatggttaaagt

SEQ ID NO: 647464 - DNA, 19 bp, Mus musculus
  siRNA target sequence for Slc14a1 (NM_028122.2,216-234).
gaaggtgtggcttcaaagt

SEQ ID NO: 647465 - DNA, 19 bp, Mus musculus
  siRNA target sequence for Slc14a1 (NM_028122.2,219-237).
ggtgtggcttcaaagtact

SEQ ID NO: 647466 - DNA, 19 bp, Mus musculus
  siRNA target sequence for Slc14a1 (NM_028122.2,291-309).
ccgtggtgctccagttcat

SEQ ID NO: 647467 - DNA, 19 bp, Mus musculus
  siRNA target sequence for Slc14a1 (NM_028122.2,578-596).
cctgtatctgctatgtcta

SEQ ID NO: 647468 - DNA, 19 bp, Mus musculus
  siRNA target sequence for Slc14a1 (NM_028122.2,581-599).
gtatctgctatgtctatga

SEQ ID NO: 647469 - DNA, 19 bp, Mus musculus
  siRNA target sequence for Slc14a1 (NM_028122.2,705-723).
caggacactacaatacgtt

SEQ ID NO: 647470 - DNA, 19 bp, Mus musculus
  siRNA target sequence for Slc14a1 (NM_028122.2,707-725).
ggacactacaatacgtttt

SEQ ID NO: 647471 - DNA, 19 bp, Mus musculus
  siRNA target sequence for Slc14a1 (NM_028122.2,708-726).
gacactacaatacgttttt

SEQ ID NO: 647472 - DNA, 19 bp, Mus musculus
  siRNA target sequence for Slc14a1 (NM_028122.2,720-738).
cgtttttcccaagtaaact

SEQ ID NO: 647473 - DNA, 19 bp, Mus musculus
  siRNA target sequence for Slc14a1 (NM_028122.2,786-804).
gcgccctggagctattgaa

SEQ ID NO: 647474 - DNA, 19 bp, Mus musculus
  siRNA target sequence for Slc14a1 (NM_028122.2,788-806).
gccctggagctattgaagt

SEQ ID NO: 647475 - DNA, 19 bp, Mus musculus
  siRNA target sequence for Slc14a1 (NM_028122.2,814-832).
ggtgggagtcggtcagata

SEQ ID NO: 647476 - DNA, 19 bp, Mus musculus
  siRNA target sequence for Slc14a1 (NM_028122.2,815-833).
gtgggagtcggtcagatat

SEQ ID NO: 647477 - DNA, 19 bp, Mus musculus
  siRNA target sequence for Slc14a1 (NM_028122.2,817-835).
gggagtcggtcagatatat

SEQ ID NO: 647478 - DNA, 19 bp, Mus musculus
  siRNA target sequence for Slc14a1 (NM_028122.2,849-867).
cgtggacaggcggcatttt

SEQ ID NO: 647479 - DNA, 19 bp, Mus musculus
  siRNA target sequence for Slc14a1 (NM_028122.2,852-870).
ggacaggcggcattttcct

SEQ ID NO: 647480 - DNA, 19 bp, Mus musculus
  siRNA target sequence for Slc14a1 (NM_028122.2,853-871).
gacaggcggcattttccta

SEQ ID NO: 647481 - DNA, 19 bp, Mus musculus
  siRNA target sequence for Slc14a1 (NM_028122.2,901-919).
gtgcctgcacgctgctatt

SEQ ID NO: 647482 - DNA, 19 bp, Mus musculus
  siRNA target sequence for Slc14a1 (NM_028122.2,904-922).
cctgcacgctgctattgga

SEQ ID NO: 647483 - DNA, 19 bp, Mus musculus
  siRNA target sequence for Slc14a1 (NM_028122.2,905-923).
ctgcacgctgctattggat

SEQ ID NO: 647484 - DNA, 19 bp, Mus musculus
  siRNA target sequence for Slc14a1 (NM_028122.2,960-978).
ctccatttgaagacatcta

SEQ ID NO: 647485 - DNA, 19 bp, Mus musculus
  siRNA target sequence for Slc14a1 (NM_028122.2,962-980).
ccatttgaagacatctact

SEQ ID NO: 647486 - DNA, 19 bp, Mus musculus
  siRNA target sequence for Slc14a1 (NM_028122.2,963-981).
catttgaagacatctactt

SEQ ID NO: 647487 - DNA, 19 bp, Mus musculus
  siRNA target sequence for Slc14a1 (NM_028122.2,1146-1164).
gtacctggtccttctgttt

SEQ ID NO: 647488 - DNA, 19 bp, Mus musculus
  siRNA target sequence for Slc14a1 (NM_028122.2,1161-1179).
gtttggccacactactctt

SEQ ID NO: 647489 - DNA, 19 bp, Mus musculus
  siRNA target sequence for Slc14a1 (NM_028122.2,1167-1185).
ccacactactctttctctt

SEQ ID NO: 647490 - DNA, 19 bp, Mus musculus
  siRNA target sequence for Slc14a1 (NM_028122.2,1181-1199).
ctcttgctgaccacgaaaa

SEQ ID NO: 647491 - DNA, 19 bp, Mus musculus
  siRNA target sequence for Aqp4 (NM_009700.1,117-135).
catcatggtggctttcaaa

SEQ ID NO: 647492 - DNA, 19 bp, Mus musculus
  siRNA target sequence for Aqp4 (NM_009700.1,208-226).
ggtgtgggatccaccataa

SEQ ID NO: 647493 - DNA, 19 bp, Mus musculus
  siRNA target sequence for Aqp4 (NM_009700.1,209-227).
gtgtgggatccaccataaa

SEQ ID NO: 647494 - DNA, 19 bp, Mus musculus
  siRNA target sequence for Aqp4 (NM_009700.1,211-229).
gtgggatccaccataaact

SEQ ID NO: 647495 - DNA, 19 bp, Mus musculus
  siRNA target sequence for Aqp4 (NM_009700.1,392-410).
ctaagtccgtcttctacat

SEQ ID NO: 647496 - DNA, 19 bp, Mus musculus
  siRNA target sequence for Aqp4 (NM_009700.1,396-414).
gtccgtcttctacatcatt

SEQ ID NO: 647497 - DNA, 19 bp, Mus musculus
  siRNA target sequence for Aqp4 (NM_009700.1,532-550).
ctcctggtggagttaataa

SEQ ID NO: 647498 - DNA, 19 bp, Mus musculus
  siRNA target sequence for Aqp4 (NM_009700.1,537-555).
ggtggagttaataatcact

SEQ ID NO: 647499 - DNA, 19 bp, Mus musculus
  siRNA target sequence for Aqp4 (NM_009700.1,594-612).
caaacgaactgatgttact

SEQ ID NO: 647500 - DNA, 19 bp, Mus musculus
  siRNA target sequence for Aqp4 (NM_009700.1,607-625).
gttactggttcaatagctt

SEQ ID NO: 647501 - DNA, 19 bp, Mus musculus
  siRNA target sequence for Aqp4 (NM_009700.1,613-631).
ggttcaatagctttagcaa

SEQ ID NO: 647502 - DNA, 19 bp, Mus musculus
  siRNA target sequence for Aqp4 (NM_009700.1,641-659).
ccgttgcaattggacattt

SEQ ID NO: 647503 - DNA, 19 bp, Mus musculus
  siRNA target sequence for Aqp4 (NM_009700.1,660-678).
gtttgcaatcaattatact

SEQ ID NO: 647504 - DNA, 19 bp, Mus musculus
  siRNA target sequence for Aqp4 (NM_009700.1,690-708).
gaatccagctcgatctttt

SEQ ID NO: 647505 - DNA, 19 bp, Mus musculus
  siRNA target sequence for Aqp4 (NM_009700.1,704-722).
cttttggacccgcagttat

SEQ ID NO: 647506 - DNA, 19 bp, Mus musculus
  siRNA target sequence for Aqp4 (NM_009700.1,784-802).
gcaggtgccctttatgagt

SEQ ID NO: 647507 - DNA, 19 bp, Mus musculus
  siRNA target sequence for Aqp4 (NM_009700.1,790-808).
gccctttatgagtatgtct

SEQ ID NO: 647508 - DNA, 19 bp, Mus musculus
  siRNA target sequence for Aqp4 (NM_009700.1,828-846).
caaacgtcgccttaaggaa

SEQ ID NO: 647509 - DNA, 19 bp, Mus musculus
  siRNA target sequence for Aqp4 (NM_009700.1,942-960).
cggagtggtgcatgtgatt

SEQ ID NO: 647510 - DNA, 19 bp, Mus musculus
  siRNA target sequence for Aqp4 (NM_009700.1,944-962).
gagtggtgcatgtgattga

SEQ ID NO: 647511 - DNA, 19 bp, Mus musculus
  siRNA target sequence for Aqp4 (NM_009700.1,948-966).
ggtgcatgtgattgacatt

SEQ ID NO: 647512 - DNA, 19 bp, Mus musculus
  siRNA target sequence for AB084104 (NM_177587.1,192-210).
ggctagaagggcatctaaa

SEQ ID NO: 647513 - DNA, 19 bp, Mus musculus
  siRNA target sequence for AB084104 (NM_177587.1,216-234).
gcttccagcaggtacctat

SEQ ID NO: 647514 - DNA, 19 bp, Mus musculus
  siRNA target sequence for AB084104 (NM_177587.1,536-554).
gggagctcagcgaactaca

SEQ ID NO: 647515 - DNA, 19 bp, Mus musculus
  siRNA target sequence for AB084104 (NM_177587.1,540-558).
gctcagcgaactacactta

SEQ ID NO: 647516 - DNA, 19 bp, Mus musculus
  siRNA target sequence for AB084104 (NM_177587.1,545-563).
gcgaactacacttactaca

SEQ ID NO: 647517 - DNA, 19 bp, Mus musculus
  siRNA target sequence for AB084104 (NM_177587.1,921-939).
ctaccggcagaaaagcaaa

SEQ ID NO: 647518 - DNA, 19 bp, Mus musculus
  siRNA target sequence for Aqp1 (NM_007472.1,213-231).
gtgtcgctggcctttggtt

SEQ ID NO: 647519 - DNA, 19 bp, Mus musculus
  siRNA target sequence for Aqp1 (NM_007472.1,336-354).
cgggctgtcatgtacatca

SEQ ID NO: 647520 - DNA, 19 bp, Mus musculus
  siRNA target sequence for Aqp1 (NM_007472.1,337-355).
gggctgtcatgtacatcat

SEQ ID NO: 647521 - DNA, 19 bp, Mus musculus
  siRNA target sequence for Aqp1 (NM_007472.1,378-396).
gtcgccacggccattctct

SEQ ID NO: 647522 - DNA, 19 bp, Mus musculus
  siRNA target sequence for Aqp1 (NM_007472.1,410-428).
ctccctagtcgacaattca

SEQ ID NO: 647523 - DNA, 19 bp, Mus musculus
  siRNA target sequence for Aqp1 (NM_007472.1,412-430).
ccctagtcgacaattcact

SEQ ID NO: 647524 - DNA, 19 bp, Mus musculus
  siRNA target sequence for Aqp1 (NM_007472.1,413-431).
cctagtcgacaattcactt

SEQ ID NO: 647525 - DNA, 19 bp, Mus musculus
  siRNA target sequence for Aqp3 (NM_016689.1,101-119).
gtggggagatgcttcacat

SEQ ID NO: 647526 - DNA, 19 bp, Mus musculus
  siRNA target sequence for Aqp3 (NM_016689.1,408-426).
cttgggcgctgggattgtt

SEQ ID NO: 647527 - DNA, 19 bp, Mus musculus
  siRNA target sequence for Aqp3 (NM_016689.1,411-429).
gggcgctgggattgttttt

SEQ ID NO: 647528 - DNA, 19 bp, Mus musculus
  siRNA target sequence for Aqp3 (NM_016689.1,431-449).
ggctgtactacgatgcaat

SEQ ID NO: 647529 - DNA, 19 bp, Mus musculus
  siRNA target sequence for Aqp3 (NM_016689.1,461-479).
ccaacaatgagcttttcgt

SEQ ID NO: 647530 - DNA, 19 bp, Mus musculus
  siRNA target sequence for Aqp3 (NM_016689.1,540-558).
ggtcaatggcttctttgat

SEQ ID NO: 647531 - DNA, 19 bp, Mus musculus
  siRNA target sequence for Aqp3 (NM_016689.1,548-566).
gcttctttgatcagttcat

SEQ ID NO: 647532 - DNA, 19 bp, Mus musculus
  siRNA target sequence for Aqp3 (NM_016689.1,595-613).
gccatcgttgacccttata

SEQ ID NO: 647533 - DNA, 19 bp, Mus musculus
  siRNA target sequence for Aqp3 (NM_016689.1,596-614).
ccatcgttgacccttataa

SEQ ID NO: 647534 - DNA, 19 bp, Mus musculus
  siRNA target sequence for Aqp3 (NM_016689.1,658-676).
gtggtcctggtcattggaa

SEQ ID NO: 647535 - DNA, 19 bp, Mus musculus
  siRNA target sequence for Aqp3 (NM_016689.1,678-696).
ctccatgggcttcaattct

SEQ ID NO: 647536 - DNA, 19 bp, Mus musculus
  siRNA target sequence for Aqp8 (NM_007474.1,145-163).
gagcagacaccaatgtgta

SEQ ID NO: 647537 - DNA, 19 bp, Mus musculus
  siRNA target sequence for Aqp8 (NM_007474.1,148-166).
cagacaccaatgtgtagta

SEQ ID NO: 647538 - DNA, 19 bp, Mus musculus
  siRNA target sequence for Aqp8 (NM_007474.1,222-240).
ctggtatgagcaatacgta

SEQ ID NO: 647539 - DNA, 19 bp, Mus musculus
  siRNA target sequence for Aqp8 (NM_007474.1,266-284).
gctccgctctcttcatctt

SEQ ID NO: 647540 - DNA, 19 bp, Mus musculus
  siRNA target sequence for Aqp8 (NM_007474.1,279-297).
catcttcatcggatgtcta

SEQ ID NO: 647541 - DNA, 19 bp, Mus musculus
  siRNA target sequence for Aqp8 (NM_007474.1,290-308).
gatgtctatcggtcattga

SEQ ID NO: 647542 - DNA, 19 bp, Mus musculus
  siRNA target sequence for Aqp8 (NM_007474.1,295-313).
ctatcggtcattgagaata

SEQ ID NO: 647543 - DNA, 19 bp, Mus musculus
  siRNA target sequence for Aqp8 (NM_007474.1,538-556).
gaaagattctggaatgcat

SEQ ID NO: 647544 - DNA, 19 bp, Mus musculus
  siRNA target sequence for Aqp8 (NM_007474.1,605-623).
ccctggggatagagatcat

SEQ ID NO: 647545 - DNA, 19 bp, Mus musculus
  siRNA target sequence for Aqp8 (NM_007474.1,702-720).
cattggcttctctgtcatt

SEQ ID NO: 647546 - DNA, 19 bp, Mus musculus
  siRNA target sequence for Aqp8 (NM_007474.1,808-826).
gacttccattggatctact

SEQ ID NO: 647547 - DNA, 19 bp, Mus musculus
  siRNA target sequence for Aqp8 (NM_007474.1,876-894).
cctcatcggagatgagaaa

SEQ ID NO: 647548 - DNA, 19 bp, Mus musculus
  siRNA target sequence for Aqp8 (NM_007474.1,877-895).
ctcatcggagatgagaaaa

SEQ ID NO: 647549 - DNA, 19 bp, Mus musculus
  siRNA target sequence for Aqp9 (NM_022026.2,651-669).
gcgacatacccaaaaccat

SEQ ID NO: 647550 - DNA, 19 bp, Mus musculus
  siRNA target sequence for Aqp9 (NM_022026.2,652-670).
cgacatacccaaaaccatt

SEQ ID NO: 647551 - DNA, 19 bp, Mus musculus
  siRNA target sequence for Aqp9 (NM_022026.2,655-673).
catacccaaaaccatttgt

SEQ ID NO: 647552 - DNA, 19 bp, Mus musculus
  siRNA target sequence for Aqp9 (NM_022026.2,713-731).
catgttcctccttctgatt

SEQ ID NO: 647553 - DNA, 19 bp, Mus musculus
  siRNA target sequence for Aqp9 (NM_022026.2,791-809).
cattggcctcctaatcatt

SEQ ID NO: 647554 - DNA, 19 bp, Mus musculus
  siRNA target sequence for Aqp9 (NM_022026.2,796-814).
gcctcctaatcattgtcat

SEQ ID NO: 647555 - DNA, 19 bp, Mus musculus
  siRNA target sequence for Aqp9 (NM_022026.2,903-921).
ggatttgaggtcttcacat

SEQ ID NO: 647556 - DNA, 19 bp, Mus musculus
  siRNA target sequence for Aqp9 (NM_022026.2,977-995).
gggaggtctcatctatgtt

SEQ ID NO: 647557 - DNA, 19 bp, Mus musculus
  siRNA target sequence for Aqp9 (NM_022026.2,979-997).
gaggtctcatctatgttct

SEQ ID NO: 647558 - DNA, 19 bp, Mus musculus
  siRNA target sequence for Ropn1 (NM_030744.2,112-130).
cggagctgccggaattgct

SEQ ID NO: 647559 - DNA, 19 bp, Mus musculus
  siRNA target sequence for Ropn1 (NM_030744.2,160-178).
cccagcctcctgatctcat

SEQ ID NO: 647560 - DNA, 19 bp, Mus musculus
  siRNA target sequence for Ropn1 (NM_030744.2,161-179).
ccagcctcctgatctcata

SEQ ID NO: 647561 - DNA, 19 bp, Mus musculus
  siRNA target sequence for Ropn1 (NM_030744.2,180-198).
cagtgggcagccgaatatt

SEQ ID NO: 647562 - DNA, 19 bp, Mus musculus
  siRNA target sequence for Ropn1 (NM_030744.2,206-224).
catgtcccgtggagagatt

SEQ ID NO: 647563 - DNA, 19 bp, Mus musculus
  siRNA target sequence for Ropn1 (NM_030744.2,233-251).
gagagagaggtctgaacaa

SEQ ID NO: 647564 - DNA, 19 bp, Mus musculus
  siRNA target sequence for Ropn1 (NM_030744.2,425-443).
gatcgagtggctgaagttt

SEQ ID NO: 647565 - DNA, 19 bp, Mus musculus
  siRNA target sequence for Ropn1 (NM_030744.2,428-446).
cgagtggctgaagttttta

SEQ ID NO: 647566 - DNA, 19 bp, Mus musculus
  siRNA target sequence for Ropn1 (NM_030744.2,460-478).
gctctcttggagttaccat

SEQ ID NO: 647567 - DNA, 19 bp, Mus musculus
  siRNA target sequence for Ropn1 (NM_030744.2,461-479).
ctctcttggagttaccatt

SEQ ID NO: 647568 - DNA, 19 bp, Mus musculus
  siRNA target sequence for Ropn1 (NM_030744.2,481-499).
ccaaaactctcaagatagt

SEQ ID NO: 647569 - DNA, 19 bp, Mus musculus
  siRNA target sequence for Ropn1 (NM_030744.2,494-512).
gatagtgtgtgaagtttta

SEQ ID NO: 647570 - DNA, 19 bp, Mus musculus
  siRNA target sequence for Ropn1 (NM_030744.2,531-549).
ggaccaccccggattcctt

SEQ ID NO: 647571 - DNA, 19 bp, Mus musculus
  siRNA target sequence for Ropn1 (NM_030744.2,532-550).
gaccaccccggattccttt

SEQ ID NO: 647572 - DNA, 19 bp, Mus musculus
  siRNA target sequence for Ropn1 (NM_030744.2,561-579).
cagtttctgtacacgtata

SEQ ID NO: 647573 - DNA, 19 bp, Mus musculus
  siRNA target sequence for Ropn1 (NM_030744.2,591-609).
gatggggaaatctcttcat

SEQ ID NO: 647574 - DNA, 19 bp, Mus musculus
  siRNA target sequence for Ropn1 (NM_030744.2,611-629).
ccacgttagcaggatgtta

SEQ ID NO: 647575 - DNA, 19 bp, Mus musculus
  siRNA target sequence for Ropn1 (NM_030744.2,612-630).
cacgttagcaggatgttaa

SEQ ID NO: 647576 - DNA, 19 bp, Mus musculus
  siRNA target sequence for Ropn1 (NM_030744.2,619-637).
gcaggatgttaaactacat

SEQ ID NO: 647577 - DNA, 19 bp, Mus musculus
  siRNA target sequence for Ropn1 (NM_030744.2,622-640).
ggatgttaaactacattga

SEQ ID NO: 647578 - DNA, 19 bp, Mus musculus
  siRNA target sequence for Ropn1 (NM_030744.2,623-641).
gatgttaaactacattgaa

SEQ ID NO: 647579 - DNA, 19 bp, Mus musculus
  siRNA target sequence for Ropn1 (NM_030744.2,664-682).
gcttaatcaaggtgaatga

SEQ ID NO: 647580 - DNA, 19 bp, Mus musculus
  siRNA target sequence for Ropn1 (NM_030744.2,674-692).
ggtgaatgactttactcaa

SEQ ID NO: 647581 - DNA, 19 bp, Mus musculus
  siRNA target sequence for 0610025L06Rik (NM_172397.1,173-191).
ggccaccccctctcatgaa

SEQ ID NO: 647582 - DNA, 19 bp, Mus musculus
  siRNA target sequence for 0610025L06Rik (NM_172397.1,222-240).
cagcggtctaagtccttta

SEQ ID NO: 647583 - DNA, 19 bp, Mus musculus
  siRNA target sequence for 0610025L06Rik (NM_172397.1,225-243).
cggtctaagtcctttagct

SEQ ID NO: 647584 - DNA, 19 bp, Mus musculus
  siRNA target sequence for 0610025L06Rik (NM_172397.1,309-327).
gtggcagacaagctcattt

SEQ ID NO: 647585 - DNA, 19 bp, Mus musculus
  siRNA target sequence for 0610025L06Rik (NM_172397.1,371-389).
cagcctgggcagttatgct

SEQ ID NO: 647586 - DNA, 19 bp, Mus musculus
  siRNA target sequence for 0610025L06Rik (NM_172397.1,388-406).
ctgcaatgcacggtgaatt

SEQ ID NO: 647587 - DNA, 19 bp, Mus musculus
  siRNA target sequence for 0610025L06Rik (NM_172397.1,390-408).
gcaatgcacggtgaatttt

SEQ ID NO: 647588 - DNA, 19 bp, Mus musculus
  siRNA target sequence for 0610025L06Rik (NM_172397.1,391-409).
caatgcacggtgaatttta

SEQ ID NO: 647589 - DNA, 19 bp, Mus musculus
  siRNA target sequence for 0610025L06Rik (NM_172397.1,420-438).
cactttcagcagctgttta

SEQ ID NO: 647590 - DNA, 19 bp, Mus musculus
  siRNA target sequence for 0610025L06Rik (NM_172397.1,426-444).
cagcagctgtttaagagta

SEQ ID NO: 647591 - DNA, 19 bp, Mus musculus
  siRNA target sequence for 0610025L06Rik (NM_172397.1,428-446).
gcagctgtttaagagtaaa

SEQ ID NO: 647592 - DNA, 19 bp, Mus musculus
  siRNA target sequence for 0610039D01Rik (NM_026307.2,141-159).
cccgagctctgctgtcaat

SEQ ID NO: 647593 - DNA, 19 bp, Mus musculus
  siRNA target sequence for 0610039D01Rik (NM_026307.2,239-257).
gtcacttgtcccaacgaaa

SEQ ID NO: 647594 - DNA, 19 bp, Mus musculus
  siRNA target sequence for 0610039D01Rik (NM_026307.2,317-335).
ctcatcccgcagatcacat

SEQ ID NO: 647595 - DNA, 19 bp, Mus musculus
  siRNA target sequence for 0610039D01Rik (NM_026307.2,328-346).
gatcacatccatctatgaa

SEQ ID NO: 647596 - DNA, 19 bp, Mus musculus
  siRNA target sequence for 0610039D01Rik (NM_026307.2,353-371).
ggaaagatcgaggaagata

SEQ ID NO: 647597 - DNA, 19 bp, Mus musculus
  siRNA target sequence for 0610039D01Rik (NM_026307.2,374-392).
gaggtgctgatgatgatta

SEQ ID NO: 647598 - DNA, 19 bp, Mus musculus
  siRNA target sequence for 0610039D01Rik (NM_026307.2,435-453).
gatctgtgcacccttatga

SEQ ID NO: 647599 - DNA, 19 bp, Mus musculus
  siRNA target sequence for 0610039D01Rik (NM_026307.2,521-539).
gtcacagaatcggtttcaa

SEQ ID NO: 647600 - DNA, 19 bp, Mus musculus
  siRNA target sequence for 0610040B21Rik (NM_025334.2,279-297).
gtggagcctgcaaagcttt

SEQ ID NO: 647601 - DNA, 19 bp, Mus musculus
  siRNA target sequence for 0610040B21Rik (NM_025334.2,282-300).
gagcctgcaaagctttaaa

SEQ ID NO: 647602 - DNA, 19 bp, Mus musculus
  siRNA target sequence for 0610040B21Rik (NM_025334.2,302-320).
cccaaatttgcagaatcta

SEQ ID NO: 647603 - DNA, 19 bp, Mus musculus
  siRNA target sequence for 0610040B21Rik (NM_025334.2,304-322).
caaatttgcagaatctaca

SEQ ID NO: 647604 - DNA, 19 bp, Mus musculus
  siRNA target sequence for 0610040B21Rik (NM_025334.2,339-357).
cccataattttgttatggt

SEQ ID NO: 647605 - DNA, 19 bp, Mus musculus
  siRNA target sequence for 0610040B21Rik (NM_025334.2,399-417).
gccctgatgggggttatat

SEQ ID NO: 647606 - DNA, 19 bp, Mus musculus
  siRNA target sequence for 0610040B21Rik (NM_025334.2,447-465).
gcaaggtgcgtcctgaaat

SEQ ID NO: 647607 - DNA, 19 bp, Mus musculus
  siRNA target sequence for 0610040B21Rik (NM_025334.2,452-470).
gtgcgtcctgaaatcatca

SEQ ID NO: 647608 - DNA, 19 bp, Mus musculus
  siRNA target sequence for 0610040B21Rik (NM_025334.2,454-472).
gcgtcctgaaatcatcaat

SEQ ID NO: 647609 - DNA, 19 bp, Mus musculus
  siRNA target sequence for 0610040B21Rik (NM_025334.2,508-526).
cagtgctgagcaagttgtt

SEQ ID NO: 647610 - DNA, 19 bp, Mus musculus
  siRNA target sequence for 0610040B21Rik (NM_025334.2,510-528).
gtgctgagcaagttgttca

SEQ ID NO: 647611 - DNA, 19 bp, Mus musculus
  siRNA target sequence for 0610040B21Rik (NM_025334.2,562-580).
cgacgccttcagagagaaa

SEQ ID NO: 647612 - DNA, 19 bp, Mus musculus
  siRNA target sequence for 0610040B21Rik (NM_025334.2,568-586).
cttcagagagaaacacttt

SEQ ID NO: 647613 - DNA, 19 bp, Mus musculus
  siRNA target sequence for 1200003G01Rik (NM_025811.1,690-708).
ctgcataaactgcattcat

SEQ ID NO: 647614 - DNA, 19 bp, Mus musculus
  siRNA target sequence for 1200003G01Rik (NM_025811.1,729-747).
cctggagcgcagattctct

SEQ ID NO: 647615 - DNA, 19 bp, Mus musculus
  siRNA target sequence for 1200003G01Rik (NM_025811.1,735-753).
gcgcagattctctgataaa

SEQ ID NO: 647616 - DNA, 19 bp, Mus musculus
  siRNA target sequence for 1200003G01Rik (NM_025811.1,737-755).
gcagattctctgataaaga

SEQ ID NO: 647617 - DNA, 19 bp, Mus musculus
  siRNA target sequence for 1200003G01Rik (NM_025811.1,773-791).
gtgttcactcggctaagtt

SEQ ID NO: 647618 - DNA, 19 bp, Mus musculus
  siRNA target sequence for 1200003G01Rik (NM_025811.1,849-867).
ccaccctgtggttaacgat

SEQ ID NO: 647619 - DNA, 19 bp, Mus musculus
  siRNA target sequence for 1200003G01Rik (NM_025811.1,908-926).
ggccaacactggtcatact

SEQ ID NO: 647620 - DNA, 19 bp, Mus musculus
  siRNA target sequence for 1200003G01Rik (NM_025811.1,966-984).
gggacacagagataaacta

SEQ ID NO: 647621 - DNA, 19 bp, Mus musculus
  siRNA target sequence for 1200003G01Rik (NM_025811.1,967-985).
ggacacagagataaactat

SEQ ID NO: 647622 - DNA, 19 bp, Mus musculus
  siRNA target sequence for 1200003G01Rik (NM_025811.1,989-1007).
catatacgtctattgcttt

SEQ ID NO: 647623 - DNA, 19 bp, Mus musculus
  siRNA target sequence for 1200003G01Rik (NM_025811.1,995-1013).
cgtctattgctttaaagta

SEQ ID NO: 647624 - DNA, 19 bp, Mus musculus
  siRNA target sequence for 1200003G01Rik (NM_025811.1,996-1014).
gtctattgctttaaagtat

SEQ ID NO: 647625 - DNA, 19 bp, Mus musculus
  siRNA target sequence for 1200003G01Rik (NM_025811.1,1308-1326).
cactgagaaccaccttata

SEQ ID NO: 647626 - DNA, 19 bp, Mus musculus
  siRNA target sequence for 1200003G01Rik (NM_025811.1,1365-1383).
ggctggtgtcggtattcaa

SEQ ID NO: 647627 - DNA, 19 bp, Mus musculus
  siRNA target sequence for 1200003G01Rik (NM_025811.1,1503-1521).
ggcagggactcatcagata

SEQ ID NO: 647628 - DNA, 19 bp, Mus musculus
  siRNA target sequence for 1200003G01Rik (NM_025811.1,1504-1522).
gcagggactcatcagatat

SEQ ID NO: 647629 - DNA, 19 bp, Mus musculus
  siRNA target sequence for 1200003G01Rik (NM_025811.1,1617-1635).
ccgaaacaacgcatatcct

SEQ ID NO: 647630 - DNA, 19 bp, Mus musculus
  siRNA target sequence for 1200003G01Rik (NM_025811.1,1783-1801).
cgagaccccatgaatttat

SEQ ID NO: 647631 - DNA, 19 bp, Mus musculus
  siRNA target sequence for 1200003G01Rik (NM_025811.1,1893-1911).
cgtggccgactcctacaat

SEQ ID NO: 647632 - DNA, 19 bp, Mus musculus
  siRNA target sequence for 1200003G01Rik (NM_025811.1,1897-1915).
gccgactcctacaatcaca

SEQ ID NO: 647633 - DNA, 19 bp, Mus musculus
  siRNA target sequence for 1200003G01Rik (NM_025811.1,1898-1916).
ccgactcctacaatcacaa

SEQ ID NO: 647634 - DNA, 19 bp, Mus musculus
  siRNA target sequence for 1200003G01Rik (NM_025811.1,1908-1926).
caatcacaagattaaagtt

SEQ ID NO: 647635 - DNA, 19 bp, Mus musculus
  siRNA target sequence for 1200003G01Rik (NM_025811.1,2000-2018).
cggagtcagcctttaatga

SEQ ID NO: 647636 - DNA, 19 bp, Mus musculus
  siRNA target sequence for 1200003G01Rik (NM_025811.1,2017-2035).
gagcccggaggcttgtgta

SEQ ID NO: 647637 - DNA, 19 bp, Mus musculus
  siRNA target sequence for 1200003G01Rik (NM_025811.1,2041-2059).
gagagtggtcggctgttat

SEQ ID NO: 647638 - DNA, 19 bp, Mus musculus
  siRNA target sequence for 1200003G01Rik (NM_025811.1,2043-2061).
gagtggtcggctgttatat

SEQ ID NO: 647639 - DNA, 19 bp, Mus musculus
  siRNA target sequence for 1200003G01Rik (NM_025811.1,2045-2063).
gtggtcggctgttatatgt

SEQ ID NO: 647640 - DNA, 19 bp, Mus musculus
  siRNA target sequence for 1200003G01Rik (NM_025811.1,2072-2090).
ctaataatcaccaaattaa

SEQ ID NO: 647641 - DNA, 19 bp, Mus musculus
  siRNA target sequence for 1200003G01Rik (NM_025811.1,2083-2101).
caaattaaagtgatggatt

SEQ ID NO: 647642 - DNA, 19 bp, Mus musculus
  siRNA target sequence for 1200003G01Rik (NM_025811.1,2097-2115).
ggatttagaagcaagaaca

SEQ ID NO: 647643 - DNA, 19 bp, Mus musculus
  siRNA target sequence for 1200003G01Rik (NM_025811.1,2345-2363).
gcaatgaatggctacttca

SEQ ID NO: 647644 - DNA, 19 bp, Mus musculus
  siRNA target sequence for 1200003G01Rik (NM_025811.1,2346-2364).
caatgaatggctacttcaa

SEQ ID NO: 647645 - DNA, 19 bp, Mus musculus
  siRNA target sequence for 1200003G01Rik (NM_025811.1,2464-2482).
gtcgtcgtgtttctttatt

SEQ ID NO: 647646 - DNA, 19 bp, Mus musculus
  siRNA target sequence for 1200003G01Rik (NM_025811.1,2492-2510).
cagacagcagcgcatgtat

SEQ ID NO: 647647 - DNA, 19 bp, Mus musculus
  siRNA target sequence for 1200003G01Rik (NM_025811.1,2494-2512).
gacagcagcgcatgtatga

SEQ ID NO: 647648 - DNA, 19 bp, Mus musculus
  siRNA target sequence for 1200003G01Rik (NM_025811.1,2533-2551).
cagcctttgcagataacca

SEQ ID NO: 647649 - DNA, 19 bp, Mus musculus
  siRNA target sequence for 1200006L06Rik (NM_024181.1,169-187).
gagtctggttaaacaaaga

SEQ ID NO: 647650 - DNA, 19 bp, Mus musculus
  siRNA target sequence for 1200006L06Rik (NM_024181.1,332-350).
gaaattagcactgaagtta

SEQ ID NO: 647651 - DNA, 19 bp, Mus musculus
  siRNA target sequence for 1200006L06Rik (NM_024181.1,344-362).
gaagttacatcctgataaa

SEQ ID NO: 647652 - DNA, 19 bp, Mus musculus
  siRNA target sequence for 1200006L06Rik (NM_024181.1,355-373).
ctgataaaaacccgaataa

SEQ ID NO: 647653 - DNA, 19 bp, Mus musculus
  siRNA target sequence for 1200006L06Rik (NM_024181.1,365-383).
cccgaataacccaaatgca

SEQ ID NO: 647654 - DNA, 19 bp, Mus musculus
  siRNA target sequence for 1200006L06Rik (NM_024181.1,376-394).
caaatgcacatggtgattt

SEQ ID NO: 647655 - DNA, 19 bp, Mus musculus
  siRNA target sequence for 1200006L06Rik (NM_024181.1,432-450).
gaagatctacggaaaaagt

SEQ ID NO: 647656 - DNA, 19 bp, Mus musculus
  siRNA target sequence for 1200006L06Rik (NM_024181.1,438-456).
ctacggaaaaagtatgaca

SEQ ID NO: 647657 - DNA, 19 bp, Mus musculus
  siRNA target sequence for 1200006L06Rik (NM_024181.1,441-459).
cggaaaaagtatgacaaat

SEQ ID NO: 647658 - DNA, 19 bp, Mus musculus
  siRNA target sequence for 1200006L06Rik (NM_024181.1,509-527).
gagctactaccgttacgat

SEQ ID NO: 647659 - DNA, 19 bp, Mus musculus
  siRNA target sequence for 1200006L06Rik (NM_024181.1,511-529).
gctactaccgttacgattt

SEQ ID NO: 647660 - DNA, 19 bp, Mus musculus
  siRNA target sequence for 1200006L06Rik (NM_024181.1,519-537).
cgttacgatttcggtattt

SEQ ID NO: 647661 - DNA, 19 bp, Mus musculus
  siRNA target sequence for 1200006L06Rik (NM_024181.1,520-538).
gttacgatttcggtattta

SEQ ID NO: 647662 - DNA, 19 bp, Mus musculus
  siRNA target sequence for 1200006L06Rik (NM_024181.1,524-542).
cgatttcggtatttacgat

SEQ ID NO: 647663 - DNA, 19 bp, Mus musculus
  siRNA target sequence for 1200006L06Rik (NM_024181.1,530-548).
cggtatttacgatgatgat

SEQ ID NO: 647664 - DNA, 19 bp, Mus musculus
  siRNA target sequence for 1200006L06Rik (NM_024181.1,546-564).
gatcctgaaatcataacat

SEQ ID NO: 647665 - DNA, 19 bp, Mus musculus
  siRNA target sequence for 1200006L06Rik (NM_024181.1,600-618).
ggagaactgtggtttgtaa

SEQ ID NO: 647666 - DNA, 19 bp, Mus musculus
  siRNA target sequence for 1200006L06Rik (NM_024181.1,657-675).
gcccccacttggagagaat

SEQ ID NO: 647667 - DNA, 19 bp, Mus musculus
  siRNA target sequence for 1200006L06Rik (NM_024181.1,658-676).
cccccacttggagagaatt

SEQ ID NO: 647668 - DNA, 19 bp, Mus musculus
  siRNA target sequence for 1200006L06Rik (NM_024181.1,793-811).
gaatggctgcagtgaagta

SEQ ID NO: 647669 - DNA, 19 bp, Mus musculus
  siRNA target sequence for 1200006L06Rik (NM_024181.1,797-815).
ggctgcagtgaagtacaat

SEQ ID NO: 647670 - DNA, 19 bp, Mus musculus
  siRNA target sequence for 1200006L06Rik (NM_024181.1,958-976).
ctaaaggagaagattgttt

SEQ ID NO: 647671 - DNA, 19 bp, Mus musculus
  siRNA target sequence for 1200006L06Rik (NM_024181.1,1141-1159).
ccagtgtgttgtttcttaa

SEQ ID NO: 647672 - DNA, 19 bp, Mus musculus
  siRNA target sequence for 1200006L06Rik (NM_024181.1,1241-1259).
ggatcgtttggcacatcat

SEQ ID NO: 647673 - DNA, 19 bp, Mus musculus
  siRNA target sequence for 1200006L06Rik (NM_024181.1,1254-1272).
catcatcgctggcttgtat

SEQ ID NO: 647674 - DNA, 19 bp, Mus musculus
  siRNA target sequence for 1200006L06Rik (NM_024181.1,1385-1403).
gggcatctgctctgatctt

SEQ ID NO: 647675 - DNA, 19 bp, Mus musculus
  siRNA target sequence for 1200006L06Rik (NM_024181.1,1475-1493).
gaagattctatacgatata

SEQ ID NO: 647676 - DNA, 19 bp, Mus musculus
  siRNA target sequence for 1200006L06Rik (NM_024181.1,1478-1496).
gattctatacgatatactt

SEQ ID NO: 647677 - DNA, 19 bp, Mus musculus
  siRNA target sequence for 1200006L06Rik (NM_024181.1,1573-1591).
catggcttgttgacttctt

SEQ ID NO: 647678 - DNA, 19 bp, Mus musculus
  siRNA target sequence for 1200006L06Rik (NM_024181.1,1626-1644).
ccagagttacggaaagcat

SEQ ID NO: 647679 - DNA, 19 bp, Mus musculus
  siRNA target sequence for 1200006L06Rik (NM_024181.1,1631-1649).
gttacggaaagcatcaaca

SEQ ID NO: 647680 - DNA, 19 bp, Mus musculus
  siRNA target sequence for 1200006L06Rik (NM_024181.1,1652-1670).
gctctacggtcaactcaaa

SEQ ID NO: 647681 - DNA, 19 bp, Mus musculus
  siRNA target sequence for 1200006L06Rik (NM_024181.1,1655-1673).
ctacggtcaactcaaagtt

SEQ ID NO: 647682 - DNA, 19 bp, Mus musculus
  siRNA target sequence for 1200006L06Rik (NM_024181.1,1674-1692).
ggtaccttagactgtacaa

SEQ ID NO: 647683 - DNA, 19 bp, Mus musculus
  siRNA target sequence for 1200006L06Rik (NM_024181.1,1675-1693).
gtaccttagactgtacaat

SEQ ID NO: 647684 - DNA, 19 bp, Mus musculus
  siRNA target sequence for 1200006L06Rik (NM_024181.1,1715-1733).
gtataacatccaagcttat

SEQ ID NO: 647685 - DNA, 19 bp, Mus musculus
  siRNA target sequence for 1200006L06Rik (NM_024181.1,1734-1752).
ccaacgacagtggtattca

SEQ ID NO: 647686 - DNA, 19 bp, Mus musculus
  siRNA target sequence for 1200006L06Rik (NM_024181.1,1735-1753).
caacgacagtggtattcaa

SEQ ID NO: 647687 - DNA, 19 bp, Mus musculus
  siRNA target sequence for 1200006L06Rik (NM_024181.1,1738-1756).
cgacagtggtattcaatca

SEQ ID NO: 647688 - DNA, 19 bp, Mus musculus
  siRNA target sequence for 1200006L06Rik (NM_024181.1,1751-1769).
caatcagtccagtattcat

SEQ ID NO: 647689 - DNA, 19 bp, Mus musculus
  siRNA target sequence for 1200006L06Rik (NM_024181.1,1849-1867).
cacccagcactttcaatga

SEQ ID NO: 647690 - DNA, 19 bp, Mus musculus
  siRNA target sequence for 1200006L06Rik (NM_024181.1,1858-1876).
ctttcaatgagctggttaa

SEQ ID NO: 647691 - DNA, 19 bp, Mus musculus
  siRNA target sequence for 1200006L06Rik (NM_024181.1,1901-1919).
gatggtcgatttctattct

SEQ ID NO: 647692 - DNA, 19 bp, Mus musculus
  siRNA target sequence for 1200006L06Rik (NM_024181.1,1975-1993).
cgttaactggactgatcaa

SEQ ID NO: 647693 - DNA, 19 bp, Mus musculus
  siRNA target sequence for 1200006L06Rik (NM_024181.1,1976-1994).
gttaactggactgatcaat

SEQ ID NO: 647694 - DNA, 19 bp, Mus musculus
  siRNA target sequence for 1200006L06Rik (NM_024181.1,2002-2020).
gtgtggactgccaacagta

SEQ ID NO: 647695 - DNA, 19 bp, Mus musculus
  siRNA target sequence for 1200006L06Rik (NM_024181.1,2006-2024).
ggactgccaacagtatcat

SEQ ID NO: 647696 - DNA, 19 bp, Mus musculus
  siRNA target sequence for 1200006L06Rik (NM_024181.1,2009-2027).
ctgccaacagtatcattct

SEQ ID NO: 647697 - DNA, 19 bp, Mus musculus
  siRNA target sequence for 1200006L06Rik (NM_024181.1,2011-2029).
gccaacagtatcattcttt

SEQ ID NO: 647698 - DNA, 19 bp, Mus musculus
  siRNA target sequence for 1200006L06Rik (NM_024181.1,2018-2036).
gtatcattctttttgtact

SEQ ID NO: 647699 - DNA, 19 bp, Mus musculus
  siRNA target sequence for 1200006L06Rik (NM_024181.1,2049-2067).
caaagataccccgagataa

SEQ ID NO: 647700 - DNA, 19 bp, Mus musculus
  siRNA target sequence for 1200006L06Rik (NM_024181.1,2053-2071).
gataccccgagataagatt

SEQ ID NO: 647701 - DNA, 19 bp, Mus musculus
  siRNA target sequence for 1200006L06Rik (NM_024181.1,2057-2075).
ccccgagataagattttat

SEQ ID NO: 647702 - DNA, 19 bp, Mus musculus
  siRNA target sequence for 1200006L06Rik (NM_024181.1,2086-2104).
caagtaaagcctatcagta

SEQ ID NO: 647703 - DNA, 19 bp, Mus musculus
  siRNA target sequence for 1200006L06Rik (NM_024181.1,2089-2107).
gtaaagcctatcagtatca

SEQ ID NO: 647704 - DNA, 19 bp, Mus musculus
  siRNA target sequence for 1200006L06Rik (NM_024181.1,2094-2112).
gcctatcagtatcatagtt

SEQ ID NO: 647705 - DNA, 19 bp, Mus musculus
  siRNA target sequence for 1200006L06Rik (NM_024181.1,2095-2113).
cctatcagtatcatagtta

SEQ ID NO: 647706 - DNA, 19 bp, Mus musculus
  siRNA target sequence for 1200006L06Rik (NM_024181.1,2236-2254).
ctcactgggtggttgattt

SEQ ID NO: 647707 - DNA, 19 bp, Mus musculus
  siRNA target sequence for 1200006L06Rik (NM_024181.1,2488-2506).
ccttaatttatggaaaatt

SEQ ID NO: 647708 - DNA, 19 bp, Mus musculus
  siRNA target sequence for 1200006L06Rik (NM_024181.1,2512-2530).
cgctccaaagccaagtaaa

SEQ ID NO: 647709 - DNA, 19 bp, Mus musculus
  siRNA target sequence for 1200006L06Rik (NM_024181.1,2517-2535).
caaagccaagtaaaaagaa

SEQ ID NO: 647710 - DNA, 19 bp, Mus musculus
  siRNA target sequence for 1700023B02Rik (NM_025854.1,754-772).
gttacagaagagcaaaaat

SEQ ID NO: 647711 - DNA, 19 bp, Mus musculus
  siRNA target sequence for 1700023B02Rik (NM_025854.1,868-886).
ctcctcggagacatcagat

SEQ ID NO: 647712 - DNA, 19 bp, Mus musculus
  siRNA target sequence for 1700023B02Rik (NM_025854.1,894-912).
gtgagagtgataacaaaga

SEQ ID NO: 647713 - DNA, 19 bp, Mus musculus
  siRNA target sequence for 1700023B02Rik (NM_025854.1,969-987).
gtaaatccagtgactgtaa

SEQ ID NO: 647714 - DNA, 19 bp, Mus musculus
  siRNA target sequence for 1700023B02Rik (NM_025854.1,1006-1024).
catgctttacgaagaactt

SEQ ID NO: 647715 - DNA, 19 bp, Mus musculus
  siRNA target sequence for 1700023B02Rik (NM_025854.1,1052-1070).
gcccaggaaaaattaaggt

SEQ ID NO: 647716 - DNA, 19 bp, Mus musculus
  siRNA target sequence for 1700023B02Rik (NM_025854.1,1058-1076).
gaaaaattaaggtttccaa

SEQ ID NO: 647717 - DNA, 19 bp, Mus musculus
  siRNA target sequence for 1700023B02Rik (NM_025854.1,1082-1100).
gagagttctggggagaata

SEQ ID NO: 647718 - DNA, 19 bp, Mus musculus
  siRNA target sequence for 1700023B02Rik (NM_025854.1,1162-1180).
gaaagggtctgacagaaat

SEQ ID NO: 647719 - DNA, 19 bp, Mus musculus
  siRNA target sequence for 1810031K17Rik (NM_026977.1,553-571).
cgccgactccagaaaaaat

SEQ ID NO: 647720 - DNA, 19 bp, Mus musculus
  siRNA target sequence for 1810031K17Rik (NM_026977.1,554-572).
gccgactccagaaaaaata

SEQ ID NO: 647721 - DNA, 19 bp, Mus musculus
  siRNA target sequence for 1810031K17Rik (NM_026977.1,555-573).
ccgactccagaaaaaatat

SEQ ID NO: 647722 - DNA, 19 bp, Mus musculus
  siRNA target sequence for 1810031K17Rik (NM_026977.1,557-575).
gactccagaaaaaatatgt

SEQ ID NO: 647723 - DNA, 19 bp, Mus musculus
  siRNA target sequence for 1810031K17Rik (NM_026977.1,651-669).
gcaccgaaacccagattat

SEQ ID NO: 647724 - DNA, 19 bp, Mus musculus
  siRNA target sequence for 1810031K17Rik (NM_026977.1,675-693).
gcacgtgtcgtcttctgat

SEQ ID NO: 647725 - DNA, 19 bp, Mus musculus
  siRNA target sequence for 1810031K17Rik (NM_026977.1,676-694).
cacgtgtcgtcttctgatt

SEQ ID NO: 647726 - DNA, 19 bp, Mus musculus
  siRNA target sequence for 1810031K17Rik (NM_026977.1,679-697).
gtgtcgtcttctgatttgt

SEQ ID NO: 647727 - DNA, 19 bp, Mus musculus
  siRNA target sequence for 1810031K17Rik (NM_026977.1,708-726).
catgatggtggccagtaaa

SEQ ID NO: 647728 - DNA, 19 bp, Mus musculus
  siRNA target sequence for 1810031K17Rik (NM_026977.1,715-733).
gtggccagtaaataccttt

SEQ ID NO: 647729 - DNA, 19 bp, Mus musculus
  siRNA target sequence for 1810031K17Rik (NM_026977.1,1192-1210).
cagtgcctgactaatgtct

SEQ ID NO: 647730 - DNA, 19 bp, Mus musculus
  siRNA target sequence for 2310047H23Rik (NM_175150.2,351-369).
gtcccccaaggtgaattgt

SEQ ID NO: 647731 - DNA, 19 bp, Mus musculus
  siRNA target sequence for 2410043F08Rik (NM_133754.1,428-446).
ccagggaagtcgctcattt

SEQ ID NO: 647732 - DNA, 19 bp, Mus musculus
  siRNA target sequence for 2410043F08Rik (NM_133754.1,492-510).
cgccacaggctccatcaaa

SEQ ID NO: 647733 - DNA, 19 bp, Mus musculus
  siRNA target sequence for 2410043F08Rik (NM_133754.1,777-795).
cctgctaccaggatactct

SEQ ID NO: 647734 - DNA, 19 bp, Mus musculus
  siRNA target sequence for 2510027N19Rik (NM_026330.2,321-339).
gtcctggagtctctgtata

SEQ ID NO: 647735 - DNA, 19 bp, Mus musculus
  siRNA target sequence for 2510027N19Rik (NM_026330.2,392-410).
ggtgaatcttgctacaact

SEQ ID NO: 647736 - DNA, 19 bp, Mus musculus
  siRNA target sequence for 2510027N19Rik (NM_026330.2,395-413).
gaatcttgctacaacttca

SEQ ID NO: 647737 - DNA, 19 bp, Mus musculus
  siRNA target sequence for 2510027N19Rik (NM_026330.2,419-437).
caaaatggctacggatttt

SEQ ID NO: 647738 - DNA, 19 bp, Mus musculus
  siRNA target sequence for 2510027N19Rik (NM_026330.2,446-464).
cgagctggatctgtttaga

SEQ ID NO: 647739 - DNA, 19 bp, Mus musculus
  siRNA target sequence for 2510027N19Rik (NM_026330.2,447-465).
gagctggatctgtttagaa

SEQ ID NO: 647740 - DNA, 19 bp, Mus musculus
  siRNA target sequence for 2510027N19Rik (NM_026330.2,504-522).
gcttcttctacaaacattt

SEQ ID NO: 647741 - DNA, 19 bp, Mus musculus
  siRNA target sequence for 2510027N19Rik (NM_026330.2,596-614).
gcagagcaagtggttgatt

SEQ ID NO: 647742 - DNA, 19 bp, Mus musculus
  siRNA target sequence for 2510027N19Rik (NM_026330.2,726-744).
ctcatccagggtcaaagtt

SEQ ID NO: 647743 - DNA, 19 bp, Mus musculus
  siRNA target sequence for 2510027N19Rik (NM_026330.2,747-765).
gagacgtgtggaattagga

SEQ ID NO: 647744 - DNA, 19 bp, Mus musculus
  siRNA target sequence for 2510027N19Rik (NM_026330.2,774-792).
ccttgtgtggccaaatact

SEQ ID NO: 647745 - DNA, 19 bp, Mus musculus
  siRNA target sequence for 2510027N19Rik (NM_026330.2,817-835).
gcccccactgtaatgacta

SEQ ID NO: 647746 - DNA, 19 bp, Mus musculus
  siRNA target sequence for 2510027N19Rik (NM_026330.2,833-851).
ctactggccccacgatata

SEQ ID NO: 647747 - DNA, 19 bp, Mus musculus
  siRNA target sequence for 2510027N19Rik (NM_026330.2,836-854).
ctggccccacgatatacca

SEQ ID NO: 647748 - DNA, 19 bp, Mus musculus
  siRNA target sequence for 2610529C04Rik (NM_025952.2,190-208).
caagttccgtcgtcttgtt

SEQ ID NO: 647749 - DNA, 19 bp, Mus musculus
  siRNA target sequence for 2610529C04Rik (NM_025952.2,193-211).
gttccgtcgtcttgttaaa

SEQ ID NO: 647750 - DNA, 19 bp, Mus musculus
  siRNA target sequence for 2610529C04Rik (NM_025952.2,212-230).
gctccaccgagaaattact

SEQ ID NO: 647751 - DNA, 19 bp, Mus musculus
  siRNA target sequence for 2610529C04Rik (NM_025952.2,229-247).
ctcagttgtcgtcatgttt

SEQ ID NO: 647752 - DNA, 19 bp, Mus musculus
  siRNA target sequence for 2610529C04Rik (NM_025952.2,267-285).
gacaatgtgtcgtttgcaa

SEQ ID NO: 647753 - DNA, 19 bp, Mus musculus
  siRNA target sequence for 2610529C04Rik (NM_025952.2,283-301).
caagcaagctgatgaagaa

SEQ ID NO: 647754 - DNA, 19 bp, Mus musculus
  siRNA target sequence for 2610529C04Rik (NM_025952.2,324-342).
ggcgatactccaatgcatt

SEQ ID NO: 647755 - DNA, 19 bp, Mus musculus
  siRNA target sequence for 2610529C04Rik (NM_025952.2,325-343).
gcgatactccaatgcattt

SEQ ID NO: 647756 - DNA, 19 bp, Mus musculus
  siRNA target sequence for 2610529C04Rik (NM_025952.2,326-344).
cgatactccaatgcattta

SEQ ID NO: 647757 - DNA, 19 bp, Mus musculus
  siRNA target sequence for 2610529C04Rik (NM_025952.2,338-356).
gcatttaccaacaggatat

SEQ ID NO: 647758 - DNA, 19 bp, Mus musculus
  siRNA target sequence for 2610529C04Rik (NM_025952.2,417-435).
cagctccaactttcatcaa

SEQ ID NO: 647759 - DNA, 19 bp, Mus musculus
  siRNA target sequence for 2610529C04Rik (NM_025952.2,419-437).
gctccaactttcatcaact

SEQ ID NO: 647760 - DNA, 19 bp, Mus musculus
  siRNA target sequence for 2610529C04Rik (NM_025952.2,420-438).
ctccaactttcatcaactt

SEQ ID NO: 647761 - DNA, 19 bp, Mus musculus
  siRNA target sequence for 2610529C04Rik (NM_025952.2,520-538).
gattgcagacagaactgat

SEQ ID NO: 647762 - DNA, 19 bp, Mus musculus
  siRNA target sequence for 2610529C04Rik (NM_025952.2,534-552).
ctgatgtcaacattagagt

SEQ ID NO: 647763 - DNA, 19 bp, Mus musculus
  siRNA target sequence for 2610529C04Rik (NM_025952.2,536-554).
gatgtcaacattagagtaa

SEQ ID NO: 647764 - DNA, 19 bp, Mus musculus
  siRNA target sequence for 2610529C04Rik (NM_025952.2,539-557).
gtcaacattagagtaatta

SEQ ID NO: 647765 - DNA, 19 bp, Mus musculus
  siRNA target sequence for 2610529C04Rik (NM_025952.2,551-569).
gtaattagacctccaaatt

SEQ ID NO: 647766 - DNA, 19 bp, Mus musculus
  siRNA target sequence for 2610529C04Rik (NM_025952.2,646-664).
gttcctctttaataaaact

SEQ ID NO: 647767 - DNA, 19 bp, Mus musculus
  siRNA target sequence for 2610529C04Rik (NM_025952.2,671-689).
gcttttgcagctttgtgtt

SEQ ID NO: 647768 - DNA, 19 bp, Mus musculus
  siRNA target sequence for 2610529C04Rik (NM_025952.2,765-783).
caggacacgtgaattacat

SEQ ID NO: 647769 - DNA, 19 bp, Mus musculus
  siRNA target sequence for 2610529C04Rik (NM_025952.2,819-837).
cccacatcgttcttctatt

SEQ ID NO: 647770 - DNA, 19 bp, Mus musculus
  siRNA target sequence for 2610529C04Rik (NM_025952.2,821-839).
cacatcgttcttctattca

SEQ ID NO: 647771 - DNA, 19 bp, Mus musculus
  siRNA target sequence for 2610529C04Rik (NM_025952.2,823-841).
catcgttcttctattcaat

SEQ ID NO: 647772 - DNA, 19 bp, Mus musculus
  siRNA target sequence for 2610529C04Rik (NM_025952.2,842-860).
ggtggggttaccttaggaa

SEQ ID NO: 647773 - DNA, 19 bp, Mus musculus
  siRNA target sequence for 2610529C04Rik (NM_025952.2,843-861).
gtggggttaccttaggaat

SEQ ID NO: 647774 - DNA, 19 bp, Mus musculus
  siRNA target sequence for 2610529C04Rik (NM_025952.2,852-870).
ccttaggaatggtgctttt

SEQ ID NO: 647775 - DNA, 19 bp, Mus musculus
  siRNA target sequence for 2610529C04Rik (NM_025952.2,881-899).
gctacctctgacatggata

SEQ ID NO: 647776 - DNA, 19 bp, Mus musculus
  siRNA target sequence for 2610529C04Rik (NM_025952.2,907-925).
gcgaaggatgatgtgtatt

SEQ ID NO: 647777 - DNA, 19 bp, Mus musculus
  siRNA target sequence for 2610529C04Rik (NM_025952.2,935-953).
ggactcgttgtgttattct

SEQ ID NO: 647778 - DNA, 19 bp, Mus musculus
  siRNA target sequence for 2610529C04Rik (NM_025952.2,936-954).
gactcgttgtgttattctt

SEQ ID NO: 647779 - DNA, 19 bp, Mus musculus
  siRNA target sequence for 2610529C04Rik (NM_025952.2,938-956).
ctcgttgtgttattcttca

SEQ ID NO: 647780 - DNA, 19 bp, Mus musculus
  siRNA target sequence for 2610529C04Rik (NM_025952.2,973-991).
ctttcgatcaaaataccat

SEQ ID NO: 647781 - DNA, 19 bp, Mus musculus
  siRNA target sequence for 2810038K19Rik (NM_023684.1,1108-1126).
gctgcaggacagtttggta

SEQ ID NO: 647782 - DNA, 19 bp, Mus musculus
  siRNA target sequence for 2810038K19Rik (NM_023684.1,1119-1137).
gtttggtaccagtggaaat

SEQ ID NO: 647783 - DNA, 19 bp, Mus musculus
  siRNA target sequence for 2810038K19Rik (NM_023684.1,1586-1604).
cagatggacgtcctatact

SEQ ID NO: 647784 - DNA, 19 bp, Mus musculus
  siRNA target sequence for 2810038K19Rik (NM_023684.1,1588-1606).
gatggacgtcctatactct

SEQ ID NO: 647785 - DNA, 19 bp, Mus musculus
  siRNA target sequence for 2810038K19Rik (NM_023684.1,1745-1763).
gggcccttagaaaatgtgt

SEQ ID NO: 647786 - DNA, 19 bp, Mus musculus
  siRNA target sequence for 2810038K19Rik (NM_023684.1,1746-1764).
ggcccttagaaaatgtgta

SEQ ID NO: 647787 - DNA, 19 bp, Mus musculus
  siRNA target sequence for 2810408E11Rik (NM_029582.1,257-275).
cacttgcagtcgagcaaaa

SEQ ID NO: 647788 - DNA, 19 bp, Mus musculus
  siRNA target sequence for 2810408E11Rik (NM_029582.1,259-277).
cttgcagtcgagcaaaaga

SEQ ID NO: 647789 - DNA, 19 bp, Mus musculus
  siRNA target sequence for 2810408E11Rik (NM_029582.1,267-285).
cgagcaaaagacgtgataa

SEQ ID NO: 647790 - DNA, 19 bp, Mus musculus
  siRNA target sequence for 2810408E11Rik (NM_029582.1,268-286).
gagcaaaagacgtgataat

SEQ ID NO: 647791 - DNA, 19 bp, Mus musculus
  siRNA target sequence for 2810408E11Rik (NM_029582.1,569-587).
gtatcatcggagttttgga

SEQ ID NO: 647792 - DNA, 19 bp, Mus musculus
  siRNA target sequence for 2810408E11Rik (NM_029582.1,578-596).
gagttttggaccaatcgaa

SEQ ID NO: 647793 - DNA, 19 bp, Mus musculus
  siRNA target sequence for 2810408E11Rik (NM_029582.1,580-598).
gttttggaccaatcgaata

SEQ ID NO: 647794 - DNA, 19 bp, Mus musculus
  siRNA target sequence for 2810408E11Rik (NM_029582.1,646-664).
cgatgaagccgcttctcta

SEQ ID NO: 647795 - DNA, 19 bp, Mus musculus
  siRNA target sequence for 2810408E11Rik (NM_029582.1,660-678).
ctctacatcccgtctcaat

SEQ ID NO: 647796 - DNA, 19 bp, Mus musculus
  siRNA target sequence for 2810408E11Rik (NM_029582.1,671-689).
gtctcaatcagcattgcta

SEQ ID NO: 647797 - DNA, 19 bp, Mus musculus
  siRNA target sequence for 2810408E11Rik (NM_029582.1,679-697).
cagcattgctagactttct

SEQ ID NO: 647798 - DNA, 19 bp, Mus musculus
  siRNA target sequence for 2810408E11Rik (NM_029582.1,712-730).
ctggagtactcggatactt

SEQ ID NO: 647799 - DNA, 19 bp, Mus musculus
  siRNA target sequence for 2810408E11Rik (NM_029582.1,715-733).
gagtactcggatactttga

SEQ ID NO: 647800 - DNA, 19 bp, Mus musculus
  siRNA target sequence for 2810408E11Rik (NM_029582.1,750-768).
cagcctcctggttacttga

SEQ ID NO: 647801 - DNA, 19 bp, Mus musculus
  siRNA target sequence for 2810408E11Rik (NM_029582.1,759-777).
ggttacttgaccttcttca

SEQ ID NO: 647802 - DNA, 19 bp, Mus musculus
  siRNA target sequence for 2810408E11Rik (NM_029582.1,783-801).
gcactgcattcgttaaaga

SEQ ID NO: 647803 - DNA, 19 bp, Mus musculus
  siRNA target sequence for 2810408E11Rik (NM_029582.1,784-802).
cactgcattcgttaaagaa

SEQ ID NO: 647804 - DNA, 19 bp, Mus musculus
  siRNA target sequence for 2810408E11Rik (NM_029582.1,794-812).
gttaaagaaagattaccta

SEQ ID NO: 647805 - DNA, 19 bp, Mus musculus
  siRNA target sequence for 2810408E11Rik (NM_029582.1,821-839).
gcgatttggggttatcaca

SEQ ID NO: 647806 - DNA, 19 bp, Mus musculus
  siRNA target sequence for 2810408E11Rik (NM_029582.1,948-966).
gctgagaacatctataagt

SEQ ID NO: 647807 - DNA, 19 bp, Mus musculus
  siRNA target sequence for 2810408E11Rik (NM_029582.1,1269-1287).
gcatccccctgctgtaaca

SEQ ID NO: 647808 - DNA, 19 bp, Mus musculus
  siRNA target sequence for 2810408E11Rik (NM_029582.1,1419-1437).
gccgctctggattctttct

SEQ ID NO: 647809 - DNA, 19 bp, Mus musculus
  siRNA target sequence for 2810408E11Rik (NM_029582.1,1420-1438).
ccgctctggattctttcta

SEQ ID NO: 647810 - DNA, 19 bp, Mus musculus
  siRNA target sequence for 2810408E11Rik (NM_029582.1,1445-1463).
ggagcagactttttatcat

SEQ ID NO: 647811 - DNA, 19 bp, Mus musculus
  siRNA target sequence for 2810408E11Rik (NM_029582.1,1466-1484).
ggtgtcgggcagcatagaa

SEQ ID NO: 647812 - DNA, 19 bp, Mus musculus
  siRNA target sequence for 2810408E11Rik (NM_029582.1,1467-1485).
gtgtcgggcagcatagaat

SEQ ID NO: 647813 - DNA, 19 bp, Mus musculus
  siRNA target sequence for 2810408E11Rik (NM_029582.1,1477-1495).
gcatagaatgcagcaattt

SEQ ID NO: 647814 - DNA, 19 bp, Mus musculus
  siRNA target sequence for 2810408E11Rik (NM_029582.1,1478-1496).
catagaatgcagcaatttt

SEQ ID NO: 647815 - DNA, 19 bp, Mus musculus
  siRNA target sequence for 2810408E11Rik (NM_029582.1,1530-1548).
gcatgttgcaggaccatat

SEQ ID NO: 647816 - DNA, 19 bp, Mus musculus
  siRNA target sequence for 2810408E11Rik (NM_029582.1,1553-1571).
gggcatggcaagctttact

SEQ ID NO: 647817 - DNA, 19 bp, Mus musculus
  siRNA target sequence for 2810408E11Rik (NM_029582.1,1651-1669).
gctccattcctcacattga

SEQ ID NO: 647818 - DNA, 19 bp, Mus musculus
  siRNA target sequence for 2810408E11Rik (NM_029582.1,1767-1785).
gattccaatttattttggt

SEQ ID NO: 647819 - DNA, 19 bp, Mus musculus
  siRNA target sequence for 2810408E11Rik (NM_029582.1,1783-1801).
ggttatatgcagaaagact

SEQ ID NO: 647820 - DNA, 19 bp, Mus musculus
  siRNA target sequence for 2810408E11Rik (NM_029582.1,1829-1847).
ggagtttgccacaattgtt

SEQ ID NO: 647821 - DNA, 19 bp, Mus musculus
  siRNA target sequence for 2810408E11Rik (NM_029582.1,1840-1858).
caattgttgatgtgaaaga

SEQ ID NO: 647822 - DNA, 19 bp, Mus musculus
  siRNA target sequence for 2810408E11Rik (NM_029582.1,1911-1929).
gagtcttttattcaaaact

SEQ ID NO: 647823 - DNA, 19 bp, Mus musculus
  siRNA target sequence for 2810408E11Rik (NM_029582.1,1989-2007).
cccactcagcatttgatca

SEQ ID NO: 647824 - DNA, 19 bp, Mus musculus
  siRNA target sequence for 2810408E11Rik (NM_029582.1,2022-2040).
gataccttctgggaagtaa

SEQ ID NO: 647825 - DNA, 19 bp, Mus musculus
  siRNA target sequence for 2810408E11Rik (NM_029582.1,2135-2153).
cctgccagaggacacattt

SEQ ID NO: 647826 - DNA, 19 bp, Mus musculus
  siRNA target sequence for 2810408E11Rik (NM_029582.1,2138-2156).
gccagaggacacatttact

SEQ ID NO: 647827 - DNA, 19 bp, Mus musculus
  siRNA target sequence for 2810408E11Rik (NM_029582.1,2184-2202).
gatcttccttgggaattca

SEQ ID NO: 647828 - DNA, 19 bp, Mus musculus
  siRNA target sequence for 2810408E11Rik (NM_029582.1,2211-2229).
cgtcttcctaccgttttgt

SEQ ID NO: 647829 - DNA, 19 bp, Mus musculus
  siRNA target sequence for 2810408E11Rik (NM_029582.1,2294-2312).
gaatctgctgcggttcatt

SEQ ID NO: 647830 - DNA, 19 bp, Mus musculus
  siRNA target sequence for 2810408E11Rik (NM_029582.1,2714-2732).
ccaaggtggggctaaggaa

SEQ ID NO: 647831 - DNA, 19 bp, Mus musculus
  siRNA target sequence for 2810408E11Rik (NM_029582.1,2774-2792).
catgggtacaactcagtta

SEQ ID NO: 647832 - DNA, 19 bp, Mus musculus
  siRNA target sequence for 2810408E11Rik (NM_134105.1,433-451).
gatcgacgtgtctcagaat

SEQ ID NO: 647833 - DNA, 19 bp, Mus musculus
  siRNA target sequence for 2810408E11Rik (NM_134105.1,436-454).
cgacgtgtctcagaatgat

SEQ ID NO: 647834 - DNA, 19 bp, Mus musculus
  siRNA target sequence for 3732412P20 (NM_183156.1,1268-1286).
gtcttaaaacacttatact

SEQ ID NO: 647835 - DNA, 19 bp, Mus musculus
  siRNA target sequence for 4632434I11Rik (NM_028729.1,224-242).
gtacttgctgtccagaatt

SEQ ID NO: 647836 - DNA, 19 bp, Mus musculus
  siRNA target sequence for 4632434I11Rik (NM_028729.1,230-248).
gctgtccagaattggaatt

SEQ ID NO: 647837 - DNA, 19 bp, Mus musculus
  siRNA target sequence for 4632434I11Rik (NM_028729.1,290-308).
cttgagtccaaaaggttta

SEQ ID NO: 647838 - DNA, 19 bp, Mus musculus
  siRNA target sequence for 4632434I11Rik (NM_028729.1,293-311).
gagtccaaaaggtttactt

SEQ ID NO: 647839 - DNA, 19 bp, Mus musculus
  siRNA target sequence for 4632434I11Rik (NM_028729.1,295-313).
gtccaaaaggtttacttgt

SEQ ID NO: 647840 - DNA, 19 bp, Mus musculus
  siRNA target sequence for 4632434I11Rik (NM_028729.1,342-360).
gaagtaccaattacagata

SEQ ID NO: 647841 - DNA, 19 bp, Mus musculus
  siRNA target sequence for 4632434I11Rik (NM_028729.1,348-366).
ccaattacagatacaaact

SEQ ID NO: 647842 - DNA, 19 bp, Mus musculus
  siRNA target sequence for 4632434I11Rik (NM_028729.1,380-398).
gcagaatccagcaaactat

SEQ ID NO: 647843 - DNA, 19 bp, Mus musculus
  siRNA target sequence for 4632434I11Rik (NM_028729.1,381-399).
cagaatccagcaaactatt

SEQ ID NO: 647844 - DNA, 19 bp, Mus musculus
  siRNA target sequence for 4632434I11Rik (NM_028729.1,387-405).
ccagcaaactatttttcat

SEQ ID NO: 647845 - DNA, 19 bp, Mus musculus
  siRNA target sequence for 4632434I11Rik (NM_028729.1,395-413).
ctatttttcattactgtat

SEQ ID NO: 647846 - DNA, 19 bp, Mus musculus
  siRNA target sequence for 4632434I11Rik (NM_028729.1,465-483).
ggtaccttgaagattctat

SEQ ID NO: 647847 - DNA, 19 bp, Mus musculus
  siRNA target sequence for 4632434I11Rik (NM_028729.1,466-484).
gtaccttgaagattctatt

SEQ ID NO: 647848 - DNA, 19 bp, Mus musculus
  siRNA target sequence for 4632434I11Rik (NM_028729.1,499-517).
cctggacagtggtagaact

SEQ ID NO: 647849 - DNA, 19 bp, Mus musculus
  siRNA target sequence for 4632434I11Rik (NM_028729.1,549-567).
gttttgttggacaaagctt

SEQ ID NO: 647850 - DNA, 19 bp, Mus musculus
  siRNA target sequence for 4632434I11Rik (NM_028729.1,569-587).
gtatttggagtaacgaatt

SEQ ID NO: 647851 - DNA, 19 bp, Mus musculus
  siRNA target sequence for 4632434I11Rik (NM_028729.1,583-601).
gaattttggagatgtatgt

SEQ ID NO: 647852 - DNA, 19 bp, Mus musculus
  siRNA target sequence for 4632434I11Rik (NM_028729.1,608-626).
gattcagattccagtaact

SEQ ID NO: 647853 - DNA, 19 bp, Mus musculus
  siRNA target sequence for 4632434I11Rik (NM_028729.1,612-630).
cagattccagtaactttca

SEQ ID NO: 647854 - DNA, 19 bp, Mus musculus
  siRNA target sequence for 4632434I11Rik (NM_028729.1,668-686).
cttgtagcttcccagatta

SEQ ID NO: 647855 - DNA, 19 bp, Mus musculus
  siRNA target sequence for 4632434I11Rik (NM_028729.1,689-707).
ctgcctagcccacatgtta

SEQ ID NO: 647856 - DNA, 19 bp, Mus musculus
  siRNA target sequence for 4632434I11Rik (NM_028729.1,696-714).
gcccacatgttaaaggatt

SEQ ID NO: 647857 - DNA, 19 bp, Mus musculus
  siRNA target sequence for 4632434I11Rik (NM_028729.1,697-715).
cccacatgttaaaggattt

SEQ ID NO: 647858 - DNA, 19 bp, Mus musculus
  siRNA target sequence for 4632434I11Rik (NM_028729.1,717-735).
cagtcattgcctatttgca

SEQ ID NO: 647859 - DNA, 19 bp, Mus musculus
  siRNA target sequence for 4632434I11Rik (NM_028729.1,809-827).
gacagtgatcttaacaaca

SEQ ID NO: 647860 - DNA, 19 bp, Mus musculus
  siRNA target sequence for 4632434I11Rik (NM_028729.1,813-831).
gtgatcttaacaacataca

SEQ ID NO: 647861 - DNA, 19 bp, Mus musculus
  siRNA target sequence for 4632434I11Rik (NM_028729.1,830-848).
cagggctctgggaatacat

SEQ ID NO: 647862 - DNA, 19 bp, Mus musculus
  siRNA target sequence for 4632434I11Rik (NM_028729.1,864-882).
ctagtgtcggagaggattt

SEQ ID NO: 647863 - DNA, 19 bp, Mus musculus
  siRNA target sequence for 4632434I11Rik (NM_028729.1,869-887).
gtcggagaggattttttca

SEQ ID NO: 647864 - DNA, 19 bp, Mus musculus
  siRNA target sequence for 4632434I11Rik (NM_028729.1,872-890).
ggagaggattttttcagat

SEQ ID NO: 647865 - DNA, 19 bp, Mus musculus
  siRNA target sequence for 4632434I11Rik (NM_028729.1,873-891).
gagaggattttttcagatt

SEQ ID NO: 647866 - DNA, 19 bp, Mus musculus
  siRNA target sequence for 4632434I11Rik (NM_028729.1,923-941).
gactcacaagtaacatcta

SEQ ID NO: 647867 - DNA, 19 bp, Mus musculus
  siRNA target sequence for 4632434I11Rik (NM_028729.1,976-994).
cagtggtactcctaaccaa

SEQ ID NO: 647868 - DNA, 19 bp, Mus musculus
  siRNA target sequence for 4632434I11Rik (NM_028729.1,1013-1031).
gtttccgaggtcactagtt

SEQ ID NO: 647869 - DNA, 19 bp, Mus musculus
  siRNA target sequence for 4632434I11Rik (NM_028729.1,1019-1037).
gaggtcactagttctaaga

SEQ ID NO: 647870 - DNA, 19 bp, Mus musculus
  siRNA target sequence for 4632434I11Rik (NM_028729.1,1065-1083).
ggagccttcattcttgtat

SEQ ID NO: 647871 - DNA, 19 bp, Mus musculus
  siRNA target sequence for 4632434I11Rik (NM_028729.1,1144-1162).
caacagttgccatgaaagt

SEQ ID NO: 647872 - DNA, 19 bp, Mus musculus
  siRNA target sequence for 4632434I11Rik (NM_028729.1,1153-1171).
ccatgaaagtagattgtct

SEQ ID NO: 647873 - DNA, 19 bp, Mus musculus
  siRNA target sequence for 4632434I11Rik (NM_028729.1,1164-1182).
gattgtctgactctcattt

SEQ ID NO: 647874 - DNA, 19 bp, Mus musculus
  siRNA target sequence for 4632434I11Rik (NM_028729.1,1205-1223).
cccttcgaggaacataatt

SEQ ID NO: 647875 - DNA, 19 bp, Mus musculus
  siRNA target sequence for 4632434I11Rik (NM_028729.1,1206-1224).
ccttcgaggaacataattt

SEQ ID NO: 647876 - DNA, 19 bp, Mus musculus
  siRNA target sequence for 4632434I11Rik (NM_028729.1,1210-1228).
cgaggaacataatttagaa

SEQ ID NO: 647877 - DNA, 19 bp, Mus musculus
  siRNA target sequence for 4632434I11Rik (NM_028729.1,1211-1229).
gaggaacataatttagaat

SEQ ID NO: 647878 - DNA, 19 bp, Mus musculus
  siRNA target sequence for 4632434I11Rik (NM_028729.1,1217-1235).
cataatttagaatgctata

SEQ ID NO: 647879 - DNA, 19 bp, Mus musculus
  siRNA target sequence for 4632434I11Rik (NM_028729.1,1283-1301).
cagcattatgaagtaaata

SEQ ID NO: 647880 - DNA, 19 bp, Mus musculus
  siRNA target sequence for 4632434I11Rik (NM_028729.1,1285-1303).
gcattatgaagtaaatact

SEQ ID NO: 647881 - DNA, 19 bp, Mus musculus
  siRNA target sequence for 4632434I11Rik (NM_028729.1,1381-1399).
gaactctgactccttgatt

SEQ ID NO: 647882 - DNA, 19 bp, Mus musculus
  siRNA target sequence for 4632434I11Rik (NM_028729.1,1392-1410).
ccttgatttgggatgatct

SEQ ID NO: 647883 - DNA, 19 bp, Mus musculus
  siRNA target sequence for 4632434I11Rik (NM_028729.1,1393-1411).
cttgatttgggatgatcta

SEQ ID NO: 647884 - DNA, 19 bp, Mus musculus
  siRNA target sequence for 4632434I11Rik (NM_028729.1,1406-1424).
gatctaccactctctgaaa

SEQ ID NO: 647885 - DNA, 19 bp, Mus musculus
  siRNA target sequence for 4632434I11Rik (NM_028729.1,1419-1437).
ctgaaagtctgaacaagtt

SEQ ID NO: 647886 - DNA, 19 bp, Mus musculus
  siRNA target sequence for 4732437J24Rik (NM_172338.1,152-170).
ggattttgacccatacaga

SEQ ID NO: 647887 - DNA, 19 bp, Mus musculus
  siRNA target sequence for 4732437J24Rik (NM_172338.1,413-431).
ccacgagaacttctatttt

SEQ ID NO: 647888 - DNA, 19 bp, Mus musculus
  siRNA target sequence for 4732437J24Rik (NM_172338.1,416-434).
cgagaacttctattttgat

SEQ ID NO: 647889 - DNA, 19 bp, Mus musculus
  siRNA target sequence for 4732437J24Rik (NM_172338.1,506-524).
ctcacactacgtgaatgaa

SEQ ID NO: 647890 - DNA, 19 bp, Mus musculus
  siRNA target sequence for 4732437J24Rik (NM_172338.1,528-546).
cttcccgagagcttcaaaa

SEQ ID NO: 647891 - DNA, 19 bp, Mus musculus
  siRNA target sequence for 4732437J24Rik (NM_172338.1,547-565).
gaccctacctcatcaagat

SEQ ID NO: 647892 - DNA, 19 bp, Mus musculus
  siRNA target sequence for 4732437J24Rik (NM_172338.1,549-567).
ccctacctcatcaagatca

SEQ ID NO: 647893 - DNA, 19 bp, Mus musculus
  siRNA target sequence for 4732437J24Rik (NM_172338.1,660-678).
gtccacgctgggtacgaaa

SEQ ID NO: 647894 - DNA, 19 bp, Mus musculus
  siRNA target sequence for 4732437J24Rik (NM_172338.1,763-781).
cagtggtccatgaaaacct

SEQ ID NO: 647895 - DNA, 19 bp, Mus musculus
  siRNA target sequence for 4732437J24Rik (NM_172338.1,818-836).
ggtagagaaggtcacaaat

SEQ ID NO: 647896 - DNA, 19 bp, Mus musculus
  siRNA target sequence for 4732437J24Rik (NM_172338.1,819-837).
gtagagaaggtcacaaata

SEQ ID NO: 647897 - DNA, 19 bp, Mus musculus
  siRNA target sequence for 4732437J24Rik (NM_172338.1,939-957).
gccttcgcatacaaggatt

SEQ ID NO: 647898 - DNA, 19 bp, Mus musculus
  siRNA target sequence for 4732437J24Rik (NM_172338.1,940-958).
ccttcgcatacaaggatta

SEQ ID NO: 647899 - DNA, 19 bp, Mus musculus
  siRNA target sequence for 4732437J24Rik (NM_172338.1,945-963).
gcatacaaggattatgtgt

SEQ ID NO: 647900 - DNA, 19 bp, Mus musculus
  siRNA target sequence for 4732437J24Rik (NM_172338.1,954-972).
gattatgtgtcgtttggat

SEQ ID NO: 647901 - DNA, 19 bp, Mus musculus
  siRNA target sequence for 4732437J24Rik (NM_172338.1,1122-1140).
gacttcatcgcccaaaaca

SEQ ID NO: 647902 - DNA, 19 bp, Mus musculus
  siRNA target sequence for 4732437J24Rik (NM_172338.1,1204-1222).
ggtctcaccgacagagaaa

SEQ ID NO: 647903 - DNA, 19 bp, Mus musculus
  siRNA target sequence for 4732437J24Rik (NM_172338.1,1207-1225).
ctcaccgacagagaaaata

SEQ ID NO: 647904 - DNA, 19 bp, Mus musculus
  siRNA target sequence for 4732437J24Rik (NM_172338.1,1241-1259).
gacagctgagactaacaaa

SEQ ID NO: 647905 - DNA, 19 bp, Mus musculus
  siRNA target sequence for 4732437J24Rik (NM_172338.1,1355-1373).
gtttgccagcacattgcta

SEQ ID NO: 647906 - DNA, 19 bp, Mus musculus
  siRNA target sequence for 4732437J24Rik (NM_172338.1,1435-1453).
cggggagggtggtgttcaa

SEQ ID NO: 647907 - DNA, 19 bp, Mus musculus
  siRNA target sequence for 4732437J24Rik (NM_172338.1,1437-1455).
gggagggtggtgttcaaaa

SEQ ID NO: 647908 - DNA, 19 bp, Mus musculus
  siRNA target sequence for 4732437J24Rik (NM_172338.1,1476-1494).
ggcagtgagagcgataagt

SEQ ID NO: 647909 - DNA, 19 bp, Mus musculus
  siRNA target sequence for 4732437J24Rik (NM_172338.1,1477-1495).
gcagtgagagcgataagtt

SEQ ID NO: 647910 - DNA, 19 bp, Mus musculus
  siRNA target sequence for 4732437J24Rik (NM_172338.1,1486-1504).
gcgataagttcgtcctttt

SEQ ID NO: 647911 - DNA, 19 bp, Mus musculus
  siRNA target sequence for 4732437J24Rik (NM_172338.1,1496-1514).
cgtccttttgggttatctt

SEQ ID NO: 647912 - DNA, 19 bp, Mus musculus
  siRNA target sequence for 4732437J24Rik (NM_172338.1,1602-1620).
cggtggctctactctgttt

SEQ ID NO: 647913 - DNA, 19 bp, Mus musculus
  siRNA target sequence for 4732437J24Rik (NM_172338.1,1604-1622).
gtggctctactctgtttct

SEQ ID NO: 647914 - DNA, 19 bp, Mus musculus
  siRNA target sequence for 4732437J24Rik (NM_172338.1,1660-1678).
gtaactggcgggagatgat

SEQ ID NO: 647915 - DNA, 19 bp, Mus musculus
  siRNA target sequence for 4732437J24Rik (NM_172338.1,1730-1748).
catggtccaggctttcagt

SEQ ID NO: 647916 - DNA, 19 bp, Mus musculus
  siRNA target sequence for 4732437J24Rik (NM_172338.1,1739-1757).
ggctttcagtgactcaaat

SEQ ID NO: 647917 - DNA, 19 bp, Mus musculus
  siRNA target sequence for 4732437J24Rik (NM_172338.1,1769-1787).
gtcgcaccctgcagacaaa

SEQ ID NO: 647918 - DNA, 19 bp, Mus musculus
  siRNA target sequence for 4732437J24Rik (NM_172338.1,1893-1911).
gtgacgtacaccagcaatt

SEQ ID NO: 647919 - DNA, 19 bp, Mus musculus
  siRNA target sequence for 4732437J24Rik (NM_172338.1,1897-1915).
cgtacaccagcaatttggt

SEQ ID NO: 647920 - DNA, 19 bp, Mus musculus
  siRNA target sequence for 4732437J24Rik (NM_172338.1,1898-1916).
gtacaccagcaatttggta

SEQ ID NO: 647921 - DNA, 19 bp, Mus musculus
  siRNA target sequence for 4732437J24Rik (NM_172338.1,1944-1962).
gtcctgatcctgtccaatt

SEQ ID NO: 647922 - DNA, 19 bp, Mus musculus
  siRNA target sequence for 4732437J24Rik (NM_172338.1,1953-1971).
ctgtccaattccactaaga

SEQ ID NO: 647923 - DNA, 19 bp, Mus musculus
  siRNA target sequence for 4732437J24Rik (NM_172338.1,1955-1973).
gtccaattccactaagaca

SEQ ID NO: 647924 - DNA, 19 bp, Mus musculus
  siRNA target sequence for 4732437J24Rik (NM_172338.1,2066-2084).
gtggctggagtatttgcta

SEQ ID NO: 647925 - DNA, 19 bp, Mus musculus
  siRNA target sequence for 4732437J24Rik (NM_172338.1,2072-2090).
ggagtatttgctagagttt

SEQ ID NO: 647926 - DNA, 19 bp, Mus musculus
  siRNA target sequence for 4732437J24Rik (NM_172338.1,2167-2185).
ccctgaacggtcacaagaa

SEQ ID NO: 647927 - DNA, 19 bp, Mus musculus
  siRNA target sequence for 4833446K15Rik (NM_178636.2,941-959).
cgcgtggagttcttttcca

SEQ ID NO: 647928 - DNA, 19 bp, Mus musculus
  siRNA target sequence for 4833446K15Rik (NM_178636.2,1122-1140).
ccgacgacgatgtctacat

SEQ ID NO: 647929 - DNA, 19 bp, Mus musculus
  siRNA target sequence for 4833446K15Rik (NM_178636.2,1126-1144).
cgacgatgtctacatcaaa

SEQ ID NO: 647930 - DNA, 19 bp, Mus musculus
  siRNA target sequence for 4833446K15Rik (NM_178636.2,1171-1189).
ccctgcccacctcctaatt

SEQ ID NO: 647931 - DNA, 19 bp, Mus musculus
  siRNA target sequence for 4833446K15Rik (NM_178636.2,1293-1311).
ctcgcatccgcccatcatt

SEQ ID NO: 647932 - DNA, 19 bp, Mus musculus
  siRNA target sequence for 4833446K15Rik (NM_178636.2,1295-1313).
cgcatccgcccatcattct

SEQ ID NO: 647933 - DNA, 19 bp, Mus musculus
  siRNA target sequence for 4833446K15Rik (NM_178636.2,1297-1315).
catccgcccatcattctta

SEQ ID NO: 647934 - DNA, 19 bp, Mus musculus
  siRNA target sequence for 4922503E23 (NM_177677.2,125-143).
cgcaacccagcgactatct

SEQ ID NO: 647935 - DNA, 19 bp, Mus musculus
  siRNA target sequence for 4922503E23 (NM_177677.2,194-212).
gactgcagacatcaaaaaa

SEQ ID NO: 647936 - DNA, 19 bp, Mus musculus
  siRNA target sequence for 4922503E23 (NM_177677.2,220-238).
ggaaactggccttgcaata

SEQ ID NO: 647937 - DNA, 19 bp, Mus musculus
  siRNA target sequence for 4922503E23 (NM_177677.2,221-239).
gaaactggccttgcaatat

SEQ ID NO: 647938 - DNA, 19 bp, Mus musculus
  siRNA target sequence for 4922503E23 (NM_177677.2,264-282).
cctttagcagcagaaatct

SEQ ID NO: 647939 - DNA, 19 bp, Mus musculus
  siRNA target sequence for 4922503E23 (NM_177677.2,265-283).
ctttagcagcagaaatctt

SEQ ID NO: 647940 - DNA, 19 bp, Mus musculus
  siRNA target sequence for 4922503E23 (NM_177677.2,312-330).
ctcaccgaccctacaaaaa

SEQ ID NO: 647941 - DNA, 19 bp, Mus musculus
  siRNA target sequence for 4922503E23 (NM_177677.2,346-364).
ggcacggctcactaggatt

SEQ ID NO: 647942 - DNA, 19 bp, Mus musculus
  siRNA target sequence for 4922503E23 (NM_177677.2,347-365).
gcacggctcactaggatta

SEQ ID NO: 647943 - DNA, 19 bp, Mus musculus
  siRNA target sequence for 4922503E23 (NM_177677.2,348-366).
cacggctcactaggattat

SEQ ID NO: 647944 - DNA, 19 bp, Mus musculus
  siRNA target sequence for 4922503E23 (NM_177677.2,352-370).
gctcactaggattatacct

SEQ ID NO: 647945 - DNA, 19 bp, Mus musculus
  siRNA target sequence for 4922503E23 (NM_177677.2,390-408).
gaaggtgtccgattctatt

SEQ ID NO: 647946 - DNA, 19 bp, Mus musculus
  siRNA target sequence for 4922503E23 (NM_177677.2,393-411).
ggtgtccgattctatttta

SEQ ID NO: 647947 - DNA, 19 bp, Mus musculus
  siRNA target sequence for 4922503E23 (NM_177677.2,394-412).
gtgtccgattctattttat

SEQ ID NO: 647948 - DNA, 19 bp, Mus musculus
  siRNA target sequence for 4922503E23 (NM_177677.2,399-417).
cgattctattttatagtga

SEQ ID NO: 647949 - DNA, 19 bp, Mus musculus
  siRNA target sequence for 4930429J24Rik (NM_026132.1,191-209).
gtggcccctgcaaaacaat

SEQ ID NO: 647950 - DNA, 19 bp, Mus musculus
  siRNA target sequence for 4930429J24Rik (NM_026132.1,206-224).
caattgctcctgttttcca

SEQ ID NO: 647951 - DNA, 19 bp, Mus musculus
  siRNA target sequence for 4930429J24Rik (NM_026132.1,273-291).
ggactcatctaaggaatta

SEQ ID NO: 647952 - DNA, 19 bp, Mus musculus
  siRNA target sequence for 4930429J24Rik (NM_026132.1,403-421).
ccgaagagcaagatgattt

SEQ ID NO: 647953 - DNA, 19 bp, Mus musculus
  siRNA target sequence for 4930429J24Rik (NM_026132.1,434-452).
gagctgatgctaaacaact

SEQ ID NO: 647954 - DNA, 19 bp, Mus musculus
  siRNA target sequence for 4930519N16Rik (NM_029173.1,380-398).
ggtggtagctttgtacttt

SEQ ID NO: 647955 - DNA, 19 bp, Mus musculus
  siRNA target sequence for 4930519N16Rik (NM_029173.1,490-508).
ccttcgaggtggttttcgt

SEQ ID NO: 647956 - DNA, 19 bp, Mus musculus
  siRNA target sequence for 4930519N16Rik (NM_029173.1,520-538).
gcagtgcggaggagatgtt

SEQ ID NO: 647957 - DNA, 19 bp, Mus musculus
  siRNA target sequence for 4930519N16Rik (NM_029173.1,592-610).
cctaccggcatgaactgaa

SEQ ID NO: 647958 - DNA, 19 bp, Mus musculus
  siRNA target sequence for 4930519N16Rik (NM_029173.1,732-750).
gtggaagcagccgatgttt

SEQ ID NO: 647959 - DNA, 19 bp, Mus musculus
  siRNA target sequence for 4930519N16Rik (NM_029173.1,738-756).
gcagccgatgttttccaaa

SEQ ID NO: 647960 - DNA, 19 bp, Mus musculus
  siRNA target sequence for 4931408L03Rik (NM_030074.1,158-176).
gaagacccctgatttcgat

SEQ ID NO: 647961 - DNA, 19 bp, Mus musculus
  siRNA target sequence for 4931408L03Rik (NM_030074.1,372-390).
ccacaaccaccggatactt

SEQ ID NO: 647962 - DNA, 19 bp, Mus musculus
  siRNA target sequence for 4931408L03Rik (NM_030074.1,375-393).
caaccaccggatacttcta

SEQ ID NO: 647963 - DNA, 19 bp, Mus musculus
  siRNA target sequence for 4931408L03Rik (NM_030074.1,391-409).
ctacagtcagcgtcattgt

SEQ ID NO: 647964 - DNA, 19 bp, Mus musculus
  siRNA target sequence for 4931408L03Rik (NM_030074.1,799-817).
ctcaaggggccttgaaaca

SEQ ID NO: 647965 - DNA, 19 bp, Mus musculus
  siRNA target sequence for 4931408L03Rik (NM_030074.1,977-995).
caaggcacccagctgtaaa

SEQ ID NO: 647966 - DNA, 19 bp, Mus musculus
  siRNA target sequence for 4931408L03Rik (NM_030074.1,1128-1146).
ctcaaggtgcggatcaaga

SEQ ID NO: 647967 - DNA, 19 bp, Mus musculus
  siRNA target sequence for 4931408L03Rik (NM_030074.1,1133-1151).
ggtgcggatcaagactatt

SEQ ID NO: 647968 - DNA, 19 bp, Mus musculus
  siRNA target sequence for 4931408L03Rik (NM_030074.1,1134-1152).
gtgcggatcaagactatta

SEQ ID NO: 647969 - DNA, 19 bp, Mus musculus
  siRNA target sequence for 4931408L03Rik (NM_030074.1,1442-1460).
cagccccaaaactatgact

SEQ ID NO: 647970 - DNA, 19 bp, Mus musculus
  siRNA target sequence for 4931408L03Rik (NM_030074.1,1448-1466).
caaaactatgactaagagt

SEQ ID NO: 647971 - DNA, 19 bp, Mus musculus
  siRNA target sequence for 4931408L03Rik (NM_030074.1,1474-1492).
gtctggtgccccaaactct

SEQ ID NO: 647972 - DNA, 19 bp, Mus musculus
  siRNA target sequence for 4931408L03Rik (NM_030074.1,1670-1688).
gaacctgctgcctgcttat

SEQ ID NO: 647973 - DNA, 19 bp, Mus musculus
  siRNA target sequence for 4931408L03Rik (NM_030074.1,1786-1804).
gcctggcacggcactatga

SEQ ID NO: 647974 - DNA, 19 bp, Mus musculus
  siRNA target sequence for 4931408L03Rik (NM_030074.1,1807-1825).
gaaggagcatgcgtataga

SEQ ID NO: 647975 - DNA, 19 bp, Mus musculus
  siRNA target sequence for 4931408L03Rik (NM_030074.1,1843-1861).
gtgcccgtcgcctggtttt

SEQ ID NO: 647976 - DNA, 19 bp, Mus musculus
  siRNA target sequence for 4931408L03Rik (NM_030074.1,1845-1863).
gcccgtcgcctggttttct

SEQ ID NO: 647977 - DNA, 19 bp, Mus musculus
  siRNA target sequence for 4931408L03Rik (NM_030074.1,1846-1864).
cccgtcgcctggttttctt

SEQ ID NO: 647978 - DNA, 19 bp, Mus musculus
  siRNA target sequence for 4931408L03Rik (NM_030074.1,1857-1875).
gttttcttcaacaagtgta

SEQ ID NO: 647979 - DNA, 19 bp, Mus musculus
  siRNA target sequence for 4931408L03Rik (NM_030074.1,2136-2154).
ccccctactgcctctgttt

SEQ ID NO: 647980 - DNA, 19 bp, Mus musculus
  siRNA target sequence for 4931408L03Rik (NM_030074.1,2310-2328).
gcccaccagcgcacacata

SEQ ID NO: 647981 - DNA, 19 bp, Mus musculus
  siRNA target sequence for 4931408L03Rik (NM_030074.1,2311-2329).
cccaccagcgcacacataa

SEQ ID NO: 647982 - DNA, 19 bp, Mus musculus
  siRNA target sequence for 4931408L03Rik (NM_030074.1,2353-2371).
ccgagtgtgggggtaactt

SEQ ID NO: 647983 - DNA, 19 bp, Mus musculus
  siRNA target sequence for 4931408L03Rik (NM_030074.1,2469-2487).
ggtgtgaactccatcaagt

SEQ ID NO: 647984 - DNA, 19 bp, Mus musculus
  siRNA target sequence for 4931408L03Rik (NM_030074.1,2499-2517).
gcatcacactgcgaagttt

SEQ ID NO: 647985 - DNA, 19 bp, Mus musculus
  siRNA target sequence for 4931408L03Rik (NM_030074.1,2500-2518).
catcacactgcgaagtttt

SEQ ID NO: 647986 - DNA, 19 bp, Mus musculus
  siRNA target sequence for 4931408L03Rik (NM_030074.1,2615-2633).
caagctgatctataagtgt

SEQ ID NO: 647987 - DNA, 19 bp, Mus musculus
  siRNA target sequence for 4931408L03Rik (NM_030074.1,2706-2724).
cgtgtcagtgtctttaagt

SEQ ID NO: 647988 - DNA, 19 bp, Mus musculus
  siRNA target sequence for 4931408L03Rik (NM_030074.1,2741-2759).
gctttttgcccaaaaaaga

SEQ ID NO: 647989 - DNA, 19 bp, Mus musculus
  siRNA target sequence for 4931408L03Rik (NM_030074.1,2829-2847).
gctggaggtgcccttttga

SEQ ID NO: 647990 - DNA, 19 bp, Mus musculus
  siRNA target sequence for 4931408L03Rik (NM_030074.1,3067-3085).
ctgagcgtgacgagtatgt

SEQ ID NO: 647991 - DNA, 19 bp, Mus musculus
  siRNA target sequence for 4931408L03Rik (NM_030074.1,3069-3087).
gagcgtgacgagtatgtga

SEQ ID NO: 647992 - DNA, 19 bp, Mus musculus
  siRNA target sequence for 4931408L03Rik (NM_030074.1,3138-3156).
ctgtgtgagcgctcctttt

SEQ ID NO: 647993 - DNA, 19 bp, Mus musculus
  siRNA target sequence for 4931408L03Rik (NM_030074.1,3240-3258).
ggaaagcgcaccttcagta

SEQ ID NO: 647994 - DNA, 19 bp, Mus musculus
  siRNA target sequence for 4931408L03Rik (NM_030074.1,3411-3429).
gaggagcctgacagtacaa

SEQ ID NO: 647995 - DNA, 19 bp, Mus musculus
  siRNA target sequence for 4931408L03Rik (NM_030074.1,3413-3431).
ggagcctgacagtacaaca

SEQ ID NO: 647996 - DNA, 19 bp, Mus musculus
  siRNA target sequence for 4931408L03Rik (NM_030074.1,3476-3494).
cggtcctctgcgctataga

SEQ ID NO: 647997 - DNA, 19 bp, Mus musculus
  siRNA target sequence for 4931408L03Rik (NM_030074.1,3477-3495).
ggtcctctgcgctatagaa

SEQ ID NO: 647998 - DNA, 19 bp, Mus musculus
  siRNA target sequence for 4931408L03Rik (NM_030074.1,3596-3614).
gagccgccaccggttcatt

SEQ ID NO: 647999 - DNA, 19 bp, Mus musculus
  siRNA target sequence for 4931408L03Rik (NM_030074.1,3607-3625).
ggttcattagccacaagaa

SEQ ID NO: 648000 - DNA, 19 bp, Mus musculus
  siRNA target sequence for 4931408L03Rik (NM_030074.1,3735-3753).
ggagaccctctgacttgta

SEQ ID NO: 648001 - DNA, 19 bp, Mus musculus
  siRNA target sequence for 4931408L03Rik (NM_030074.1,3769-3787).
gctgtgacagccctctaaa

SEQ ID NO: 648002 - DNA, 19 bp, Mus musculus
  siRNA target sequence for 5031434M05Rik (NM_172870.1,135-153).
ctccaaattgcctcagtta

SEQ ID NO: 648003 - DNA, 19 bp, Mus musculus
  siRNA target sequence for 5031434M05Rik (NM_172870.1,137-155).
ccaaattgcctcagttaca

SEQ ID NO: 648004 - DNA, 19 bp, Mus musculus
  siRNA target sequence for 5031434M05Rik (NM_172870.1,182-200).
gactggcaagcacatttta

SEQ ID NO: 648005 - DNA, 19 bp, Mus musculus
  siRNA target sequence for 5031434M05Rik (NM_172870.1,217-235).
ggttgatccatctcaactt

SEQ ID NO: 648006 - DNA, 19 bp, Mus musculus
  siRNA target sequence for 5031434M05Rik (NM_172870.1,241-259).
catccgctgcacattggta

SEQ ID NO: 648007 - DNA, 19 bp, Mus musculus
  siRNA target sequence for 5031434M05Rik (NM_172870.1,245-263).
cgctgcacattggtaaact

SEQ ID NO: 648008 - DNA, 19 bp, Mus musculus
  siRNA target sequence for 5031434M05Rik (NM_172870.1,303-321).
ggacgtgtgatcagtgtaa

SEQ ID NO: 648009 - DNA, 19 bp, Mus musculus
  siRNA target sequence for 5031434M05Rik (NM_172870.1,304-322).
gacgtgtgatcagtgtaaa

SEQ ID NO: 648010 - DNA, 19 bp, Mus musculus
  siRNA target sequence for 5031434M05Rik (NM_172870.1,338-356).
catgccttggataaactca

SEQ ID NO: 648011 - DNA, 19 bp, Mus musculus
  siRNA target sequence for 5031434M05Rik (NM_172870.1,378-396).
ccactcaagtggagattgt

SEQ ID NO: 648012 - DNA, 19 bp, Mus musculus
  siRNA target sequence for 5031434M05Rik (NM_172870.1,452-470).
gtgcctgtgcggctaaaga

SEQ ID NO: 648013 - DNA, 19 bp, Mus musculus
  siRNA target sequence for 5031434M05Rik (NM_172870.1,454-472).
gcctgtgcggctaaagata

SEQ ID NO: 648014 - DNA, 19 bp, Mus musculus
  siRNA target sequence for 5031434M05Rik (NM_172870.1,540-558).
ggaccctgagggactatgt

SEQ ID NO: 648015 - DNA, 19 bp, Mus musculus
  siRNA target sequence for 5031434M05Rik (NM_172870.1,620-638).
cgggaagaagaaatcatca

SEQ ID NO: 648016 - DNA, 19 bp, Mus musculus
  siRNA target sequence for 5031434M05Rik (NM_172870.1,722-740).
gctgtaccatcttcaaaga

SEQ ID NO: 648017 - DNA, 19 bp, Mus musculus
  siRNA target sequence for 5031434M05Rik (NM_172870.1,747-765).
cggatataaggactttcat

SEQ ID NO: 648018 - DNA, 19 bp, Mus musculus
  siRNA target sequence for 5031434M05Rik (NM_172870.1,748-766).
ggatataaggactttcatt

SEQ ID NO: 648019 - DNA, 19 bp, Mus musculus
  siRNA target sequence for 5031434M05Rik (NM_172870.1,759-777).
ctttcattgagagcaataa

SEQ ID NO: 648020 - DNA, 19 bp, Mus musculus
  siRNA target sequence for 5031434M05Rik (NM_172870.1,835-853).
ccatcattttgaaaacata

SEQ ID NO: 648021 - DNA, 19 bp, Mus musculus
  siRNA target sequence for 5031434M05Rik (NM_172870.1,855-873).
caaacagccttgcatttct

SEQ ID NO: 648022 - DNA, 19 bp, Mus musculus
  siRNA target sequence for 5031434M05Rik (NM_172870.1,875-893).
cttccattccagtatataa

SEQ ID NO: 648023 - DNA, 19 bp, Mus musculus
  siRNA target sequence for 5031434M05Rik (NM_172870.1,898-916).
cgtgtctgccccactgtta

SEQ ID NO: 648024 - DNA, 19 bp, Mus musculus
  siRNA target sequence for 5031434M05Rik (NM_172870.1,964-982).
gagggaaccgagcatttca

SEQ ID NO: 648025 - DNA, 19 bp, Mus musculus
  siRNA target sequence for 5031434M05Rik (NM_172870.1,967-985).
ggaaccgagcatttcaact

SEQ ID NO: 648026 - DNA, 19 bp, Mus musculus
  siRNA target sequence for 5031434M05Rik (NM_172870.1,981-999).
caactcagaatgagtacaa

SEQ ID NO: 648027 - DNA, 19 bp, Mus musculus
  siRNA target sequence for 5031434M05Rik (NM_172870.1,986-1004).
cagaatgagtacaatgaga

SEQ ID NO: 648028 - DNA, 19 bp, Mus musculus
  siRNA target sequence for 5031434M05Rik (NM_172870.1,1019-1037).
gtatcgcctacaccatata

SEQ ID NO: 648029 - DNA, 19 bp, Mus musculus
  siRNA target sequence for 5031434M05Rik (NM_172870.1,1043-1061).
gatcagacgcccaatagaa

SEQ ID NO: 648030 - DNA, 19 bp, Mus musculus
  siRNA target sequence for 5031434M05Rik (NM_172870.1,1064-1082).
gccctgactagcatcacta

SEQ ID NO: 648031 - DNA, 19 bp, Mus musculus
  siRNA target sequence for 5031434M05Rik (NM_172870.1,1066-1084).
cctgactagcatcactaat

SEQ ID NO: 648032 - DNA, 19 bp, Mus musculus
  siRNA target sequence for 5031434M05Rik (NM_172870.1,1112-1130).
gtctcccccattcagaatt

SEQ ID NO: 648033 - DNA, 19 bp, Mus musculus
  siRNA target sequence for 5031434M05Rik (NM_172870.1,1114-1132).
ctcccccattcagaattct

SEQ ID NO: 648034 - DNA, 19 bp, Mus musculus
  siRNA target sequence for 5031434M05Rik (NM_172870.1,1141-1159).
cagtgacctaagcaaaact

SEQ ID NO: 648035 - DNA, 19 bp, Mus musculus
  siRNA target sequence for 5031434M05Rik (NM_172870.1,1143-1161).
gtgacctaagcaaaactga

SEQ ID NO: 648036 - DNA, 19 bp, Mus musculus
  siRNA target sequence for 5031434M05Rik (NM_172870.1,1180-1198).
ccggattcaccgtatgaga

SEQ ID NO: 648037 - DNA, 19 bp, Mus musculus
  siRNA target sequence for 5031434M05Rik (NM_172870.1,1181-1199).
cggattcaccgtatgagaa

SEQ ID NO: 648038 - DNA, 19 bp, Mus musculus
  siRNA target sequence for 5031434M05Rik (NM_172870.1,1264-1282).
caaagggactctcaaaatt

SEQ ID NO: 648039 - DNA, 19 bp, Mus musculus
  siRNA target sequence for 5031434M05Rik (NM_172870.1,1268-1286).
gggactctcaaaattcact

SEQ ID NO: 648040 - DNA, 19 bp, Mus musculus
  siRNA target sequence for 5031434M05Rik (NM_172870.1,1269-1287).
ggactctcaaaattcacta

SEQ ID NO: 648041 - DNA, 19 bp, Mus musculus
  siRNA target sequence for 5031434M05Rik (NM_172870.1,1270-1288).
gactctcaaaattcactat

SEQ ID NO: 648042 - DNA, 19 bp, Mus musculus
  siRNA target sequence for 5031434M05Rik (NM_172870.1,1276-1294).
caaaattcactataatgct

SEQ ID NO: 648043 - DNA, 19 bp, Mus musculus
  siRNA target sequence for 5031434M05Rik (NM_172870.1,1292-1310).
gctgttcacctgaagatta

SEQ ID NO: 648044 - DNA, 19 bp, Mus musculus
  siRNA target sequence for 5031434M05Rik (NM_172870.1,1331-1349).
ggttgcaacatggtcttta

SEQ ID NO: 648045 - DNA, 19 bp, Mus musculus
  siRNA target sequence for 5031434M05Rik (NM_172870.1,1396-1414).
ccttcatatgcctatgcta

SEQ ID NO: 648046 - DNA, 19 bp, Mus musculus
  siRNA target sequence for 5031434M05Rik (NM_172870.1,1416-1434).
ggaataaccgagacaaaga

SEQ ID NO: 648047 - DNA, 19 bp, Mus musculus
  siRNA target sequence for 5031434M05Rik (NM_172870.1,1417-1435).
gaataaccgagacaaagat

SEQ ID NO: 648048 - DNA, 19 bp, Mus musculus
  siRNA target sequence for 5031434M05Rik (NM_172870.1,1467-1485).
cagtcatagcaagtacaaa

SEQ ID NO: 648049 - DNA, 19 bp, Mus musculus
  siRNA target sequence for 5031434M05Rik (NM_172870.1,1469-1487).
gtcatagcaagtacaaaat

SEQ ID NO: 648050 - DNA, 19 bp, Mus musculus
  siRNA target sequence for 5031434M05Rik (NM_172870.1,1609-1627).
gccagttcctcctttttat

SEQ ID NO: 648051 - DNA, 19 bp, Mus musculus
  siRNA target sequence for 5031434M05Rik (NM_172870.1,1898-1916).
gggaccgtggtcaatgaca

SEQ ID NO: 648052 - DNA, 19 bp, Mus musculus
  siRNA target sequence for 5031434M05Rik (NM_172870.1,1935-1953).
gtcattcccaagatgagat

SEQ ID NO: 648053 - DNA, 19 bp, Mus musculus
  siRNA target sequence for 5031434M05Rik (NM_172870.1,1993-2011).
caggacccggtgcatttca

SEQ ID NO: 648054 - DNA, 19 bp, Mus musculus
  siRNA target sequence for 5031434M05Rik (NM_172870.1,1996-2014).
gacccggtgcatttcaaga

SEQ ID NO: 648055 - DNA, 19 bp, Mus musculus
  siRNA target sequence for 5031434M05Rik (NM_172870.1,1999-2017).
ccggtgcatttcaagaact

SEQ ID NO: 648056 - DNA, 19 bp, Mus musculus
  siRNA target sequence for 5031434M05Rik (NM_172870.1,2004-2022).
gcatttcaagaactgaaat

SEQ ID NO: 648057 - DNA, 19 bp, Mus musculus
  siRNA target sequence for 5031434M05Rik (NM_172870.1,2213-2231).
caggacgtcatcaaggtaa

SEQ ID NO: 648058 - DNA, 19 bp, Mus musculus
  siRNA target sequence for 5031434M05Rik (NM_172870.1,2218-2236).
cgtcatcaaggtaaaggaa

SEQ ID NO: 648059 - DNA, 19 bp, Mus musculus
  siRNA target sequence for 5031434M05Rik (NM_172870.1,2253-2271).
cttacgacatgttctacat

SEQ ID NO: 648060 - DNA, 19 bp, Mus musculus
  siRNA target sequence for 5031434M05Rik (NM_172870.1,2274-2292).
gccagtacggactatacaa

SEQ ID NO: 648061 - DNA, 19 bp, Mus musculus
  siRNA target sequence for 5031434M05Rik (NM_172870.1,2311-2329).
ggctgccctgcatgaaagt

SEQ ID NO: 648062 - DNA, 19 bp, Mus musculus
  siRNA target sequence for 5031434M05Rik (NM_172870.1,2391-2409).
ctagtccagaccccaaaat

SEQ ID NO: 648063 - DNA, 19 bp, Mus musculus
  siRNA target sequence for 5031434M05Rik (NM_172870.1,2547-2565).
gacacagtgccaatataaa

SEQ ID NO: 648064 - DNA, 19 bp, Mus musculus
  siRNA target sequence for 5031434M05Rik (NM_172870.1,2619-2637).
cgcagccctcccttagcaa

SEQ ID NO: 648065 - DNA, 19 bp, Mus musculus
  siRNA target sequence for 5031434M05Rik (NM_172870.1,2639-2657).
gacctccgggatgaatttt

SEQ ID NO: 648066 - DNA, 19 bp, Mus musculus
  siRNA target sequence for 5031434M05Rik (NM_172870.1,2645-2663).
cgggatgaatttttgatga

SEQ ID NO: 648067 - DNA, 19 bp, Mus musculus
  siRNA target sequence for 5031434M05Rik (NM_172870.1,2859-2877).
gcgatgaggggattcttct

SEQ ID NO: 648068 - DNA, 19 bp, Mus musculus
  siRNA target sequence for 5031434M05Rik (NM_172870.1,2950-2968).
cctcggggctgaagtttca

SEQ ID NO: 648069 - DNA, 19 bp, Mus musculus
  siRNA target sequence for 5031434M05Rik (NM_172870.1,2960-2978).
gaagtttcaggatctctta

SEQ ID NO: 648070 - DNA, 19 bp, Mus musculus
  siRNA target sequence for 5031434M05Rik (NM_172870.1,3058-3076).
gcgggtccactacaaaact

SEQ ID NO: 648071 - DNA, 19 bp, Mus musculus
  siRNA target sequence for 5031434M05Rik (NM_172870.1,3163-3181).
gaaccccaatcttcacaaa

SEQ ID NO: 648072 - DNA, 19 bp, Mus musculus
  siRNA target sequence for 5031434M05Rik (NM_172870.1,3184-3202).
cattcccttcacttcaata

SEQ ID NO: 648073 - DNA, 19 bp, Mus musculus
  siRNA target sequence for 5430400N05Rik (NM_175433.3,293-311).
ctatcagctggcctgtaat

SEQ ID NO: 648074 - DNA, 19 bp, Mus musculus
  siRNA target sequence for 5430400N05Rik (NM_175433.3,734-752).
gcccactgaatgtagtttt

SEQ ID NO: 648075 - DNA, 19 bp, Mus musculus
  siRNA target sequence for 5430400N05Rik (NM_175433.3,1007-1025).
gtcctacacatctaagtat

SEQ ID NO: 648076 - DNA, 19 bp, Mus musculus
  siRNA target sequence for 5430400N05Rik (NM_175433.3,1009-1027).
cctacacatctaagtataa

SEQ ID NO: 648077 - DNA, 19 bp, Mus musculus
  siRNA target sequence for 5430400N05Rik (NM_175433.3,1949-1967).
ccctgacccctctgaactt

SEQ ID NO: 648078 - DNA, 19 bp, Mus musculus
  siRNA target sequence for 5430401O09Rik (NM_176923.2,121-139).
cctgtacatcgtcaatcta

SEQ ID NO: 648079 - DNA, 19 bp, Mus musculus
  siRNA target sequence for 5430401O09Rik (NM_176923.2,124-142).
gtacatcgtcaatctagat

SEQ ID NO: 648080 - DNA, 19 bp, Mus musculus
  siRNA target sequence for 5430401O09Rik (NM_176923.2,152-170).
gaaggtcaccggaagatct

SEQ ID NO: 648081 - DNA, 19 bp, Mus musculus
  siRNA target sequence for 5430401O09Rik (NM_176923.2,254-272).
caacgggtcgacctttata

SEQ ID NO: 648082 - DNA, 19 bp, Mus musculus
  siRNA target sequence for 5430401O09Rik (NM_176923.2,257-275).
cgggtcgacctttataagt

SEQ ID NO: 648083 - DNA, 19 bp, Mus musculus
  siRNA target sequence for 5430401O09Rik (NM_176923.2,289-307).
cggggaagttggtacaact

SEQ ID NO: 648084 - DNA, 19 bp, Mus musculus
  siRNA target sequence for 5430401O09Rik (NM_176923.2,291-309).
gggaagttggtacaacttt

SEQ ID NO: 648085 - DNA, 19 bp, Mus musculus
  siRNA target sequence for 5430401O09Rik (NM_176923.2,292-310).
ggaagttggtacaacttta

SEQ ID NO: 648086 - DNA, 19 bp, Mus musculus
  siRNA target sequence for 5430401O09Rik (NM_176923.2,314-332).
gggcacactcgagttatca

SEQ ID NO: 648087 - DNA, 19 bp, Mus musculus
  siRNA target sequence for 5430401O09Rik (NM_176923.2,549-567).
gtacagctgtggaatatct

SEQ ID NO: 648088 - DNA, 19 bp, Mus musculus
  siRNA target sequence for 5430401O09Rik (NM_176923.2,629-647).
gccacctccagtcaagata

SEQ ID NO: 648089 - DNA, 19 bp, Mus musculus
  siRNA target sequence for 5430401O09Rik (NM_176923.2,630-648).
ccacctccagtcaagataa

SEQ ID NO: 648090 - DNA, 19 bp, Mus musculus
  siRNA target sequence for 5430401O09Rik (NM_176923.2,634-652).
ctccagtcaagataactct

SEQ ID NO: 648091 - DNA, 19 bp, Mus musculus
  siRNA target sequence for 5430401O09Rik (NM_176923.2,672-690).
gccagcctcggaaatacct

SEQ ID NO: 648092 - DNA, 19 bp, Mus musculus
  siRNA target sequence for 5430401O09Rik (NM_176923.2,716-734).
gtctggaaagccagataca

SEQ ID NO: 648093 - DNA, 19 bp, Mus musculus
  siRNA target sequence for 5430401O09Rik (NM_176923.2,835-853).
cacctttgtgggtcatgat

SEQ ID NO: 648094 - DNA, 19 bp, Mus musculus
  siRNA target sequence for 5430401O09Rik (NM_176923.2,837-855).
cctttgtgggtcatgatga

SEQ ID NO: 648095 - DNA, 19 bp, Mus musculus
  siRNA target sequence for 5430401O09Rik (NM_176923.2,902-920).
gactatcaactggttacat

SEQ ID NO: 648096 - DNA, 19 bp, Mus musculus
  siRNA target sequence for 5430401O09Rik (NM_176923.2,926-944).
cgtgatcagaccttgagaa

SEQ ID NO: 648097 - DNA, 19 bp, Mus musculus
  siRNA target sequence for 5430401O09Rik (NM_176923.2,927-945).
gtgatcagaccttgagaat

SEQ ID NO: 648098 - DNA, 19 bp, Mus musculus
  siRNA target sequence for 5430401O09Rik (NM_176923.2,948-966).
ggcgagtggactatcaaat

SEQ ID NO: 648099 - DNA, 19 bp, Mus musculus
  siRNA target sequence for 5430401O09Rik (NM_176923.2,951-969).
gagtggactatcaaatgca

SEQ ID NO: 648100 - DNA, 19 bp, Mus musculus
  siRNA target sequence for 5430401O09Rik (NM_176923.2,973-991).
gctctgtgccaatgacata

SEQ ID NO: 648101 - DNA, 19 bp, Mus musculus
  siRNA target sequence for 5430401O09Rik (NM_176923.2,1050-1068).
ccccacatcctcaagacat

SEQ ID NO: 648102 - DNA, 19 bp, Mus musculus
  siRNA target sequence for 5430401O09Rik (NM_176923.2,1051-1069).
cccacatcctcaagacata

SEQ ID NO: 648103 - DNA, 19 bp, Mus musculus
  siRNA target sequence for 5430401O09Rik (NM_176923.2,1205-1223).
gtgcagatccggaatgtca

SEQ ID NO: 648104 - DNA, 19 bp, Mus musculus
  siRNA target sequence for 5430401O09Rik (NM_176923.2,1207-1225).
gcagatccggaatgtcaat

SEQ ID NO: 648105 - DNA, 19 bp, Mus musculus
  siRNA target sequence for 5430401O09Rik (NM_176923.2,1471-1489).
ctcgtgccttgagtctttt

SEQ ID NO: 648106 - DNA, 19 bp, Mus musculus
  siRNA target sequence for 5430401O09Rik (NM_176923.2,1520-1538).
ccatttgcactccaaaact

SEQ ID NO: 648107 - DNA, 19 bp, Mus musculus
  siRNA target sequence for 5430401O09Rik (NM_176923.2,1647-1665).
caggttacctggtgtactt

SEQ ID NO: 648108 - DNA, 19 bp, Mus musculus
  siRNA target sequence for 5430401O09Rik (NM_176923.2,1730-1748).
gccctgtctgcttatcata

SEQ ID NO: 648109 - DNA, 19 bp, Mus musculus
  siRNA target sequence for 5430401O09Rik (NM_176923.2,1740-1758).
cttatcatactggtttgat

SEQ ID NO: 648110 - DNA, 19 bp, Mus musculus
  siRNA target sequence for 5430401O09Rik (NM_176923.2,1818-1836).
caactcgcagtgagaaaga

SEQ ID NO: 648111 - DNA, 19 bp, Mus musculus
  siRNA target sequence for 5430401O09Rik (NM_176923.2,1843-1861).
ctccatcagttccttctat

SEQ ID NO: 648112 - DNA, 19 bp, Mus musculus
  siRNA target sequence for 5430401O09Rik (NM_176923.2,1845-1863).
ccatcagttccttctatta

SEQ ID NO: 648113 - DNA, 19 bp, Mus musculus
  siRNA target sequence for 5430401O09Rik (NM_176923.2,1970-1988).
ctccttcccgttcataagt

SEQ ID NO: 648114 - DNA, 19 bp, Mus musculus
  siRNA target sequence for 5430401O09Rik (NM_176923.2,1994-2012).
ggagagctgtacatattga

SEQ ID NO: 648115 - DNA, 19 bp, Mus musculus
  siRNA target sequence for 5430401O09Rik (NM_176923.2,1995-2013).
gagagctgtacatattgaa

SEQ ID NO: 648116 - DNA, 19 bp, Mus musculus
  siRNA target sequence for 5430401O09Rik (NM_176923.2,2133-2151).
cgaagtctgacccagattt

SEQ ID NO: 648117 - DNA, 19 bp, Mus musculus
  siRNA target sequence for 5430401O09Rik (NM_176923.2,2137-2155).
gtctgacccagatttggaa

SEQ ID NO: 648118 - DNA, 19 bp, Mus musculus
  siRNA target sequence for 5430401O09Rik (NM_176923.2,2160-2178).
cttgggctcgacatccatt

SEQ ID NO: 648119 - DNA, 19 bp, Mus musculus
  siRNA target sequence for 5430401O09Rik (NM_176923.2,2252-2270).
gctagactggctcactatt

SEQ ID NO: 648120 - DNA, 19 bp, Mus musculus
  siRNA target sequence for 5430401O09Rik (NM_176923.2,2302-2320).
gctctgtagcgtgtttgaa

SEQ ID NO: 648121 - DNA, 19 bp, Mus musculus
  siRNA target sequence for 5430401O09Rik (NM_176923.2,2357-2375).
gggcctttccctaatcgtt

SEQ ID NO: 648122 - DNA, 19 bp, Mus musculus
  siRNA target sequence for 5430401O09Rik (NM_176923.2,2365-2383).
ccctaatcgttcttctaat

SEQ ID NO: 648123 - DNA, 19 bp, Mus musculus
  siRNA target sequence for 5430401O09Rik (NM_176923.2,2367-2385).
ctaatcgttcttctaatct

SEQ ID NO: 648124 - DNA, 19 bp, Mus musculus
  siRNA target sequence for 5430401O09Rik (NM_176923.2,2461-2479).
caccggtggctggaacata

SEQ ID NO: 648125 - DNA, 19 bp, Mus musculus
  siRNA target sequence for 5430401O09Rik (NM_176923.2,2580-2598).
gagaccagcatgataaaaa

SEQ ID NO: 648126 - DNA, 19 bp, Mus musculus
  siRNA target sequence for 5430401O09Rik (NM_176923.2,2630-2648).
cagtttgacgactttaaga

SEQ ID NO: 648127 - DNA, 19 bp, Mus musculus
  siRNA target sequence for 5430401O09Rik (NM_176923.2,2699-2717).
gaagtgctgaagtttgtgt

SEQ ID NO: 648128 - DNA, 19 bp, Mus musculus
  siRNA target sequence for 5430401O09Rik (NM_176923.2,2852-2870).
cggggttcatccaacttct

SEQ ID NO: 648129 - DNA, 19 bp, Mus musculus
  siRNA target sequence for 5430401O09Rik (NM_176923.2,2892-2910).
gccacacgagccacatgat

SEQ ID NO: 648130 - DNA, 19 bp, Mus musculus
  siRNA target sequence for 5730419I09Rik (NM_029081.1,624-642).
caggtgaattacagagaaa

SEQ ID NO: 648131 - DNA, 19 bp, Mus musculus
  siRNA target sequence for 5730419I09Rik (NM_029081.1,627-645).
gtgaattacagagaaagat

SEQ ID NO: 648132 - DNA, 19 bp, Mus musculus
  siRNA target sequence for 5730419I09Rik (NM_029081.1,747-765).
cggcgtgcactctggataa

SEQ ID NO: 648133 - DNA, 19 bp, Mus musculus
  siRNA target sequence for 5730419I09Rik (NM_029081.1,748-766).
ggcgtgcactctggataaa

SEQ ID NO: 648134 - DNA, 19 bp, Mus musculus
  siRNA target sequence for 5730419I09Rik (NM_029081.1,804-822).
ccccatccagagaactgaa

SEQ ID NO: 648135 - DNA, 19 bp, Mus musculus
  siRNA target sequence for 5730419I09Rik (NM_029081.1,841-859).
ggatcccaaccccaatact

SEQ ID NO: 648136 - DNA, 19 bp, Mus musculus
  siRNA target sequence for 5730419I09Rik (NM_029081.1,881-899).
cctctgaaaaaccaaactt

SEQ ID NO: 648137 - DNA, 19 bp, Mus musculus
  siRNA target sequence for 5730419I09Rik (NM_029081.1,884-902).
ctgaaaaaccaaacttatt

SEQ ID NO: 648138 - DNA, 19 bp, Mus musculus
  siRNA target sequence for 5730419I09Rik (NM_029081.1,1133-1151).
gcacgctctgtgaagcttt

SEQ ID NO: 648139 - DNA, 19 bp, Mus musculus
  siRNA target sequence for 5730419I09Rik (NM_029081.1,1134-1152).
cacgctctgtgaagctttt

SEQ ID NO: 648140 - DNA, 19 bp, Mus musculus
  siRNA target sequence for 5730419I09Rik (NM_029081.1,1193-1211).
gcatggtgggcagaaatca

SEQ ID NO: 648141 - DNA, 19 bp, Mus musculus
  siRNA target sequence for 5730419I09Rik (NM_029081.1,1411-1429).
cggattctgccatatacca

SEQ ID NO: 648142 - DNA, 19 bp, Mus musculus
  siRNA target sequence for 5730419I09Rik (NM_029081.1,1412-1430).
ggattctgccatataccat

SEQ ID NO: 648143 - DNA, 19 bp, Mus musculus
  siRNA target sequence for 5730419I09Rik (NM_029081.1,1413-1431).
gattctgccatataccata

SEQ ID NO: 648144 - DNA, 19 bp, Mus musculus
  siRNA target sequence for 5730419I09Rik (NM_029081.1,1428-1446).
catatgatgaactgaacat

SEQ ID NO: 648145 - DNA, 19 bp, Mus musculus
  siRNA target sequence for 5730419I09Rik (NM_029081.1,1457-1475).
gctcatctcacatattgct

SEQ ID NO: 648146 - DNA, 19 bp, Mus musculus
  siRNA target sequence for 5730419I09Rik (NM_029081.1,1458-1476).
ctcatctcacatattgcta

SEQ ID NO: 648147 - DNA, 19 bp, Mus musculus
  siRNA target sequence for 5730419I09Rik (NM_029081.1,1460-1478).
catctcacatattgctata

SEQ ID NO: 648148 - DNA, 19 bp, Mus musculus
  siRNA target sequence for 5730419I09Rik (NM_029081.1,1463-1481).
ctcacatattgctataact

SEQ ID NO: 648149 - DNA, 19 bp, Mus musculus
  siRNA target sequence for 5730419I09Rik (NM_029081.1,1489-1507).
gcaaaaagtccctgatgtt

SEQ ID NO: 648150 - DNA, 19 bp, Mus musculus
  siRNA target sequence for 5730419I09Rik (NM_029081.1,1502-1520).
gatgttctcttcacaacta

SEQ ID NO: 648151 - DNA, 19 bp, Mus musculus
  siRNA target sequence for 5730419I09Rik (NM_029081.1,1537-1555).
cgcagtggttgttggtaaa

SEQ ID NO: 648152 - DNA, 19 bp, Mus musculus
  siRNA target sequence for 5730419I09Rik (NM_029081.1,1562-1580).
cttattcaggcaaggttat

SEQ ID NO: 648153 - DNA, 19 bp, Mus musculus
  siRNA target sequence for 5730419I09Rik (NM_029081.1,1570-1588).
ggcaaggttatgtcgatta

SEQ ID NO: 648154 - DNA, 19 bp, Mus musculus
  siRNA target sequence for 5730419I09Rik (NM_029081.1,1571-1589).
gcaaggttatgtcgattaa

SEQ ID NO: 648155 - DNA, 19 bp, Mus musculus
  siRNA target sequence for 5730419I09Rik (NM_029081.1,1617-1635).
ccacagctatcagtaatct

SEQ ID NO: 648156 - DNA, 19 bp, Mus musculus
  siRNA target sequence for 5730419I09Rik (NM_029081.1,1634-1652).
ctcttgccgtttatggaat

SEQ ID NO: 648157 - DNA, 19 bp, Mus musculus
  siRNA target sequence for 5730419I09Rik (NM_029081.1,1636-1654).
cttgccgtttatggaatat

SEQ ID NO: 648158 - DNA, 19 bp, Mus musculus
  siRNA target sequence for 5730419I09Rik (NM_029081.1,1675-1693).
gaacaagctcaaactcaaa

SEQ ID NO: 648159 - DNA, 19 bp, Mus musculus
  siRNA target sequence for 5730419I09Rik (NM_029081.1,1764-1782).
cggccacaggagtctactt

SEQ ID NO: 648160 - DNA, 19 bp, Mus musculus
  siRNA target sequence for 5730419I09Rik (NM_029081.1,1765-1783).
ggccacaggagtctactta

SEQ ID NO: 648161 - DNA, 19 bp, Mus musculus
  siRNA target sequence for 5730419I09Rik (NM_029081.1,1818-1836).
ctgggaagacccctaatga

SEQ ID NO: 648162 - DNA, 19 bp, Mus musculus
  siRNA target sequence for 5730419I09Rik (NM_029081.1,1860-1878).
cccacatgcagaagagaat

SEQ ID NO: 648163 - DNA, 19 bp, Mus musculus
  siRNA target sequence for 5730419I09Rik (NM_029081.1,1862-1880).
cacatgcagaagagaataa

SEQ ID NO: 648164 - DNA, 19 bp, Mus musculus
  siRNA target sequence for 5730419I09Rik (NM_029081.1,1975-1993).
gcgctccagacttctaaga

SEQ ID NO: 648165 - DNA, 19 bp, Mus musculus
  siRNA target sequence for 5730419I09Rik (NM_029081.1,1976-1994).
cgctccagacttctaagat

SEQ ID NO: 648166 - DNA, 19 bp, Mus musculus
  siRNA target sequence for 5730419I09Rik (NM_029081.1,1999-2017).
gtcggaaagttctgatgaa

SEQ ID NO: 648167 - DNA, 19 bp, Mus musculus
  siRNA target sequence for 5730419I09Rik (NM_029081.1,2018-2036).
gttacagagttagatcttt

SEQ ID NO: 648168 - DNA, 19 bp, Mus musculus
  siRNA target sequence for 5730419I09Rik (NM_029081.1,2125-2143).
cccttcaggtttttatagt

SEQ ID NO: 648169 - DNA, 19 bp, Mus musculus
  siRNA target sequence for 5730419I09Rik (NM_029081.1,2130-2148).
caggtttttatagttgtaa

SEQ ID NO: 648170 - DNA, 19 bp, Mus musculus
  siRNA target sequence for 5730419I09Rik (NM_029081.1,2192-2210).
cagatgttcacgtcagtaa

SEQ ID NO: 648171 - DNA, 19 bp, Mus musculus
  siRNA target sequence for 5730419I09Rik (NM_029081.1,2194-2212).
gatgttcacgtcagtaaga

SEQ ID NO: 648172 - DNA, 19 bp, Mus musculus
  siRNA target sequence for 5730419I09Rik (NM_029081.1,2207-2225).
gtaagagtggtcagactaa

SEQ ID NO: 648173 - DNA, 19 bp, Mus musculus
  siRNA target sequence for 5730419I09Rik (NM_029081.1,2222-2240).
ctaagtagcctcaacttga

SEQ ID NO: 648174 - DNA, 19 bp, Mus musculus
  siRNA target sequence for 5730419I09Rik (NM_029081.1,2226-2244).
gtagcctcaacttgactaa

SEQ ID NO: 648175 - DNA, 19 bp, Mus musculus
  siRNA target sequence for 5730419I09Rik (NM_029081.1,2239-2257).
gactaaccaagctctcaat

SEQ ID NO: 648176 - DNA, 19 bp, Mus musculus
  siRNA target sequence for 5730419I09Rik (NM_029081.1,2241-2259).
ctaaccaagctctcaataa

SEQ ID NO: 648177 - DNA, 19 bp, Mus musculus
  siRNA target sequence for 5730419I09Rik (NM_029081.1,2288-2306).
ctcaagagcctgtatttca

SEQ ID NO: 648178 - DNA, 19 bp, Mus musculus
  siRNA target sequence for 5730419I09Rik (NM_029081.1,2333-2351).
ctctgccatgtgaacttta

SEQ ID NO: 648179 - DNA, 19 bp, Mus musculus
  siRNA target sequence for 5730419I09Rik (NM_029081.1,2335-2353).
ctgccatgtgaactttaca

SEQ ID NO: 648180 - DNA, 19 bp, Mus musculus
  siRNA target sequence for 5730419I09Rik (NM_029081.1,2337-2355).
gccatgtgaactttacagt

SEQ ID NO: 648181 - DNA, 19 bp, Mus musculus
  siRNA target sequence for 5730419I09Rik (NM_029081.1,2390-2408).
gtcacagcagttgcaataa

SEQ ID NO: 648182 - DNA, 19 bp, Mus musculus
  siRNA target sequence for 5730419I09Rik (NM_029081.1,2465-2483).
caaagagcctccacagata

SEQ ID NO: 648183 - DNA, 19 bp, Mus musculus
  siRNA target sequence for 5730419I09Rik (NM_029081.1,2564-2582).
ctggagagtgcgaactcta

SEQ ID NO: 648184 - DNA, 19 bp, Mus musculus
  siRNA target sequence for 5730419I09Rik (NM_029081.1,2567-2585).
gagagtgcgaactctaact

SEQ ID NO: 648185 - DNA, 19 bp, Mus musculus
  siRNA target sequence for 5730419I09Rik (NM_029081.1,2578-2596).
ctctaactcaggtatacca

SEQ ID NO: 648186 - DNA, 19 bp, Mus musculus
  siRNA target sequence for 5730419I09Rik (NM_029081.1,2612-2630).
gtgactgttgaaaaagcaa

SEQ ID NO: 648187 - DNA, 19 bp, Mus musculus
  siRNA target sequence for 5730419I09Rik (NM_029081.1,2633-2651).
gccatgggtgatggaaatt

SEQ ID NO: 648188 - DNA, 19 bp, Mus musculus
  siRNA target sequence for 5730419I09Rik (NM_029081.1,2743-2761).
caagtacctcggcatcatt

SEQ ID NO: 648189 - DNA, 19 bp, Mus musculus
  siRNA target sequence for 5730419I09Rik (NM_029081.1,2752-2770).
cggcatcattaacatgttt

SEQ ID NO: 648190 - DNA, 19 bp, Mus musculus
  siRNA target sequence for 5730419I09Rik (NM_029081.1,2753-2771).
ggcatcattaacatgtttt

SEQ ID NO: 648191 - DNA, 19 bp, Mus musculus
  siRNA target sequence for 5730419I09Rik (NM_029081.1,2754-2772).
gcatcattaacatgttttt

SEQ ID NO: 648192 - DNA, 19 bp, Mus musculus
  siRNA target sequence for 5730419I09Rik (NM_029081.1,2817-2835).
gttttctccacgctttcat

SEQ ID NO: 648193 - DNA, 19 bp, Mus musculus
  siRNA target sequence for 5730419I09Rik (NM_029081.1,2889-2907).
ctgttgtgtcctacatcat

SEQ ID NO: 648194 - DNA, 19 bp, Mus musculus
  siRNA target sequence for 5730419I09Rik (NM_029081.1,2891-2909).
gttgtgtcctacatcatga

SEQ ID NO: 648195 - DNA, 19 bp, Mus musculus
  siRNA target sequence for 5730419I09Rik (NM_029081.1,2944-2962).
ccaggcacagtgtctcata

SEQ ID NO: 648196 - DNA, 19 bp, Mus musculus
  siRNA target sequence for 5730419I09Rik (NM_029081.1,3002-3020).
gacttagaggtcatgtcat

SEQ ID NO: 648197 - DNA, 19 bp, Mus musculus
  siRNA target sequence for 5730419I09Rik (NM_029081.1,3049-3067).
ctcatgtaccggagaagtt

SEQ ID NO: 648198 - DNA, 19 bp, Mus musculus
  siRNA target sequence for 5730420B22Rik (NM_172597.1,344-362).
gtgttgcattggttttgat

SEQ ID NO: 648199 - DNA, 19 bp, Mus musculus
  siRNA target sequence for 5730420B22Rik (NM_172597.1,403-421).
ctgactcctcagcaatatt

SEQ ID NO: 648200 - DNA, 19 bp, Mus musculus
  siRNA target sequence for 5730420B22Rik (NM_172597.1,435-453).
gccaggaaaagcctcatta

SEQ ID NO: 648201 - DNA, 19 bp, Mus musculus
  siRNA target sequence for 5730420B22Rik (NM_172597.1,437-455).
caggaaaagcctcattagt

SEQ ID NO: 648202 - DNA, 19 bp, Mus musculus
  siRNA target sequence for 5730420B22Rik (NM_172597.1,439-457).
ggaaaagcctcattagttt

SEQ ID NO: 648203 - DNA, 19 bp, Mus musculus
  siRNA target sequence for 5730420B22Rik (NM_172597.1,465-483).
ccaagttggttctctaagt

SEQ ID NO: 648204 - DNA, 19 bp, Mus musculus
  siRNA target sequence for 5730420B22Rik (NM_172597.1,466-484).
caagttggttctctaagta

SEQ ID NO: 648205 - DNA, 19 bp, Mus musculus
  siRNA target sequence for 5730420B22Rik (NM_172597.1,469-487).
gttggttctctaagtaact

SEQ ID NO: 648206 - DNA, 19 bp, Mus musculus
  siRNA target sequence for 5730420B22Rik (NM_172597.1,482-500).
gtaactctgtgtttcttga

SEQ ID NO: 648207 - DNA, 19 bp, Mus musculus
  siRNA target sequence for 5730420B22Rik (NM_172597.1,612-630).
gaaagcgtatttattcaga

SEQ ID NO: 648208 - DNA, 19 bp, Mus musculus
  siRNA target sequence for 5730420B22Rik (NM_172597.1,707-725).
ctctgctttttaatgaagt

SEQ ID NO: 648209 - DNA, 19 bp, Mus musculus
  siRNA target sequence for 5730420B22Rik (NM_172597.1,721-739).
gaagtaaaatatattacca

SEQ ID NO: 648210 - DNA, 19 bp, Mus musculus
  siRNA target sequence for 5730420B22Rik (NM_172597.1,843-861).
ggaagctgcttttgtgtat

SEQ ID NO: 648211 - DNA, 19 bp, Mus musculus
  siRNA target sequence for 5730420B22Rik (NM_172597.1,915-933).
cggctctgagagtatagaa

SEQ ID NO: 648212 - DNA, 19 bp, Mus musculus
  siRNA target sequence for 5730420B22Rik (NM_172597.1,917-935).
gctctgagagtatagaaca

SEQ ID NO: 648213 - DNA, 19 bp, Mus musculus
  siRNA target sequence for 5730420B22Rik (NM_172597.1,918-936).
ctctgagagtatagaacat

SEQ ID NO: 648214 - DNA, 19 bp, Mus musculus
  siRNA target sequence for 5730420B22Rik (NM_172597.1,1098-1116).
ctcaaccgttcatctacaa

SEQ ID NO: 648215 - DNA, 19 bp, Mus musculus
  siRNA target sequence for 5730420B22Rik (NM_172597.1,1100-1118).
caaccgttcatctacaact

SEQ ID NO: 648216 - DNA, 19 bp, Mus musculus
  siRNA target sequence for 5730420B22Rik (NM_172597.1,1161-1179).
ggaggctgacagaagaact

SEQ ID NO: 648217 - DNA, 19 bp, Mus musculus
  siRNA target sequence for 5730420B22Rik (NM_172597.1,1267-1285).
gctaatgtggccttcagaa

SEQ ID NO: 648218 - DNA, 19 bp, Mus musculus
  siRNA target sequence for 5730420B22Rik (NM_172597.1,1320-1338).
gttgaatgatgttgagtta

SEQ ID NO: 648219 - DNA, 19 bp, Mus musculus
  siRNA target sequence for 5730420B22Rik (NM_172597.1,1327-1345).
gatgttgagttaatcattt

SEQ ID NO: 648220 - DNA, 19 bp, Mus musculus
  siRNA target sequence for 5730420B22Rik (NM_172597.1,1346-1364).
cccacgtgaaaaataatat

SEQ ID NO: 648221 - DNA, 19 bp, Mus musculus
  siRNA target sequence for 5730420B22Rik (NM_172597.1,1539-1557).
cagcatagtgctcttctat

SEQ ID NO: 648222 - DNA, 19 bp, Mus musculus
  siRNA target sequence for 5730420B22Rik (NM_172597.1,1571-1589).
cagtatccatggcatttct

SEQ ID NO: 648223 - DNA, 19 bp, Mus musculus
  siRNA target sequence for 5730420B22Rik (NM_172597.1,1581-1599).
ggcatttctacaatcctat

SEQ ID NO: 648224 - DNA, 19 bp, Mus musculus
  siRNA target sequence for 5730420B22Rik (NM_172597.1,1582-1600).
gcatttctacaatcctata

SEQ ID NO: 648225 - DNA, 19 bp, Mus musculus
  siRNA target sequence for 5730420B22Rik (NM_172597.1,1635-1653).
catccttctcaccagaata

SEQ ID NO: 648226 - DNA, 19 bp, Mus musculus
  siRNA target sequence for 5730420B22Rik (NM_172597.1,1639-1657).
cttctcaccagaataaatt

SEQ ID NO: 648227 - DNA, 19 bp, Mus musculus
  siRNA target sequence for 5730420B22Rik (NM_172597.1,1658-1676).
gtgcagattggtctgatat

SEQ ID NO: 648228 - DNA, 19 bp, Mus musculus
  siRNA target sequence for 5730420B22Rik (NM_172597.1,1660-1678).
gcagattggtctgatatat

SEQ ID NO: 648229 - DNA, 19 bp, Mus musculus
  siRNA target sequence for 5730420B22Rik (NM_172597.1,1663-1681).
gattggtctgatatatgta

SEQ ID NO: 648230 - DNA, 19 bp, Mus musculus
  siRNA target sequence for 5730420B22Rik (NM_172597.1,1672-1690).
gatatatgtacgaagcaaa

SEQ ID NO: 648231 - DNA, 19 bp, Mus musculus
  siRNA target sequence for 5730420B22Rik (NM_172597.1,1686-1704).
gcaaaatgttactgcattt

SEQ ID NO: 648232 - DNA, 19 bp, Mus musculus
  siRNA target sequence for 5730420B22Rik (NM_172597.1,1697-1715).
ctgcatttcccgtggtaaa

SEQ ID NO: 648233 - DNA, 19 bp, Mus musculus
  siRNA target sequence for 5730420B22Rik (NM_172597.1,1699-1717).
gcatttcccgtggtaaagt

SEQ ID NO: 648234 - DNA, 19 bp, Mus musculus
  siRNA target sequence for 5730420B22Rik (NM_172597.1,1700-1718).
catttcccgtggtaaagtt

SEQ ID NO: 648235 - DNA, 19 bp, Mus musculus
  siRNA target sequence for 5730420B22Rik (NM_172597.1,1705-1723).
cccgtggtaaagttgtata

SEQ ID NO: 648236 - DNA, 19 bp, Mus musculus
  siRNA target sequence for 5730420B22Rik (NM_172597.1,1706-1724).
ccgtggtaaagttgtataa

SEQ ID NO: 648237 - DNA, 19 bp, Mus musculus
  siRNA target sequence for 5730420B22Rik (NM_172597.1,1710-1728).
ggtaaagttgtataaggaa

SEQ ID NO: 648238 - DNA, 19 bp, Mus musculus
  siRNA target sequence for 5730420B22Rik (NM_172597.1,1730-1748).
gcgagagcccagtgtctta

SEQ ID NO: 648239 - DNA, 19 bp, Mus musculus
  siRNA target sequence for 5730420B22Rik (NM_172597.1,1751-1769).
ctggtatgttggcaactaa

SEQ ID NO: 648240 - DNA, 19 bp, Mus musculus
  siRNA target sequence for 5730420B22Rik (NM_172597.1,1754-1772).
gtatgttggcaactaaaga

SEQ ID NO: 648241 - DNA, 19 bp, Mus musculus
  siRNA target sequence for 5730420B22Rik (NM_172597.1,1811-1829).
cagtgaacatagcatctat

SEQ ID NO: 648242 - DNA, 19 bp, Mus musculus
  siRNA target sequence for 5730420B22Rik (NM_172597.1,1848-1866).
cctgcgtggggaattatat

SEQ ID NO: 648243 - DNA, 19 bp, Mus musculus
  siRNA target sequence for 5730420B22Rik (NM_172597.1,1849-1867).
ctgcgtggggaattatata

SEQ ID NO: 648244 - DNA, 19 bp, Mus musculus
  siRNA target sequence for 5730420B22Rik (NM_172597.1,1851-1869).
gcgtggggaattatataaa

SEQ ID NO: 648245 - DNA, 19 bp, Mus musculus
  siRNA target sequence for 5730420B22Rik (NM_172597.1,1924-1942).
gcatcagcaaaagaacttt

SEQ ID NO: 648246 - DNA, 19 bp, Mus musculus
  siRNA target sequence for 5730420B22Rik (NM_172597.1,1925-1943).
catcagcaaaagaactttt

SEQ ID NO: 648247 - DNA, 19 bp, Mus musculus
  siRNA target sequence for 5730420B22Rik (NM_172597.1,1962-1980).
gctgagaggctctgtcatt

SEQ ID NO: 648248 - DNA, 19 bp, Mus musculus
  siRNA target sequence for 5730420B22Rik (NM_172597.1,2007-2025).
gtggatactgtcaaataaa

SEQ ID NO: 648249 - DNA, 19 bp, Mus musculus
  siRNA target sequence for 5730420B22Rik (NM_172597.1,2009-2027).
ggatactgtcaaataaata

SEQ ID NO: 648250 - DNA, 19 bp, Mus musculus
  siRNA target sequence for 5730420B22Rik (NM_172597.1,2203-2221).
ccgctacttctcttgttta

SEQ ID NO: 648251 - DNA, 19 bp, Mus musculus
  siRNA target sequence for 5730420B22Rik (NM_172597.1,2205-2223).
gctacttctcttgtttagt

SEQ ID NO: 648252 - DNA, 19 bp, Mus musculus
  siRNA target sequence for 5730420B22Rik (NM_172597.1,2277-2295).
gaagcagctggattcgttt

SEQ ID NO: 648253 - DNA, 19 bp, Mus musculus
  siRNA target sequence for 5730420B22Rik (NM_172597.1,2297-2315).
ccccttgctggttaaatct

SEQ ID NO: 648254 - DNA, 19 bp, Mus musculus
  siRNA target sequence for 5730420B22Rik (NM_172597.1,2299-2317).
ccttgctggttaaatctga

SEQ ID NO: 648255 - DNA, 19 bp, Mus musculus
  siRNA target sequence for 5730420B22Rik (NM_172597.1,2300-2318).
cttgctggttaaatctgaa

SEQ ID NO: 648256 - DNA, 19 bp, Mus musculus
  siRNA target sequence for 5730420B22Rik (NM_172597.1,2437-2455).
cagtctgtgacggaacaaa

SEQ ID NO: 648257 - DNA, 19 bp, Mus musculus
  siRNA target sequence for 5730420B22Rik (NM_172597.1,2466-2484).
gtggctgaaacatttacaa

SEQ ID NO: 648258 - DNA, 19 bp, Mus musculus
  siRNA target sequence for 5730420B22Rik (NM_172597.1,2491-2509).
ctagaaaatcccatcatct

SEQ ID NO: 648259 - DNA, 19 bp, Mus musculus
  siRNA target sequence for 5730420B22Rik (NM_172597.1,2580-2598).
ccaagctcccacgaagaaa

SEQ ID NO: 648260 - DNA, 19 bp, Mus musculus
  siRNA target sequence for 5730420B22Rik (NM_172597.1,2585-2603).
ctcccacgaagaaagttct

SEQ ID NO: 648261 - DNA, 19 bp, Mus musculus
  siRNA target sequence for 5730420B22Rik (NM_172597.1,2672-2690).
ggagagagccggtcgaaat

SEQ ID NO: 648262 - DNA, 19 bp, Mus musculus
  siRNA target sequence for 5730420B22Rik (NM_172597.1,2675-2693).
gagagccggtcgaaatgct

SEQ ID NO: 648263 - DNA, 19 bp, Mus musculus
  siRNA target sequence for 5730420B22Rik (NM_172597.1,2681-2699).
cggtcgaaatgctgagaat

SEQ ID NO: 648264 - DNA, 19 bp, Mus musculus
  siRNA target sequence for 5730420B22Rik (NM_172597.1,2749-2767).
caccacgacaaggagttat

SEQ ID NO: 648265 - DNA, 19 bp, Mus musculus
  siRNA target sequence for 6030441H18 (NM_177893.2,406-424).
gccgtcacaaaggaaatca

SEQ ID NO: 648266 - DNA, 19 bp, Mus musculus
  siRNA target sequence for 6030441H18 (NM_177893.2,417-435).
ggaaatcacctgatcaaaa

SEQ ID NO: 648267 - DNA, 19 bp, Mus musculus
  siRNA target sequence for 6030441H18 (NM_177893.2,440-458).
ccccgtagaagcttatcta

SEQ ID NO: 648268 - DNA, 19 bp, Mus musculus
  siRNA target sequence for 6030441H18 (NM_177893.2,451-469).
cttatctaccagcaaaact

SEQ ID NO: 648269 - DNA, 19 bp, Mus musculus
  siRNA target sequence for 6030441H18 (NM_177893.2,478-496).
ccagtgtcattcgattact

SEQ ID NO: 648270 - DNA, 19 bp, Mus musculus
  siRNA target sequence for 6030441H18 (NM_177893.2,479-497).
cagtgtcattcgattactt

SEQ ID NO: 648271 - DNA, 19 bp, Mus musculus
  siRNA target sequence for 6030441H18 (NM_177893.2,485-503).
cattcgattacttcgtatt

SEQ ID NO: 648272 - DNA, 19 bp, Mus musculus
  siRNA target sequence for 6030441H18 (NM_177893.2,489-507).
cgattacttcgtattttaa

SEQ ID NO: 648273 - DNA, 19 bp, Mus musculus
  siRNA target sequence for 6030441H18 (NM_177893.2,521-539).
gctaaacttgcatgttcaa

SEQ ID NO: 648274 - DNA, 19 bp, Mus musculus
  siRNA target sequence for 6030441H18 (NM_177893.2,631-649).
gcctgctcaggctggatta

SEQ ID NO: 648275 - DNA, 19 bp, Mus musculus
  siRNA target sequence for 6030441H18 (NM_177893.2,633-651).
ctgctcaggctggattaat

SEQ ID NO: 648276 - DNA, 19 bp, Mus musculus
  siRNA target sequence for 6030441H18 (NM_177893.2,635-653).
gctcaggctggattaatga

SEQ ID NO: 648277 - DNA, 19 bp, Mus musculus
  siRNA target sequence for 6030441H18 (NM_177893.2,660-678).
ctgtgcctacatcagattt

SEQ ID NO: 648278 - DNA, 19 bp, Mus musculus
  siRNA target sequence for 6030441H18 (NM_177893.2,778-796).
gcagaccagtccctacttt

SEQ ID NO: 648279 - DNA, 19 bp, Mus musculus
  siRNA target sequence for 6030441H18 (NM_177893.2,779-797).
cagaccagtccctacttta

SEQ ID NO: 648280 - DNA, 19 bp, Mus musculus
  siRNA target sequence for 6030441H18 (NM_177893.2,781-799).
gaccagtccctactttaaa

SEQ ID NO: 648281 - DNA, 19 bp, Mus musculus
  siRNA target sequence for 6030441H18 (NM_177893.2,804-822).
ccttagtgtccaaagatca

SEQ ID NO: 648282 - DNA, 19 bp, Mus musculus
  siRNA target sequence for 6030441H18 (NM_177893.2,863-881).
ggaagtctgacatcgaaat

SEQ ID NO: 648283 - DNA, 19 bp, Mus musculus
  siRNA target sequence for 6030441H18 (NM_177893.2,864-882).
gaagtctgacatcgaaatt

SEQ ID NO: 648284 - DNA, 19 bp, Mus musculus
  siRNA target sequence for 6030441H18 (NM_177893.2,890-908).
cgatacttaaacgctaaaa

SEQ ID NO: 648285 - DNA, 19 bp, Mus musculus
  siRNA target sequence for 6030441H18 (NM_177893.2,895-913).
cttaaacgctaaaaaatca

SEQ ID NO: 648286 - DNA, 19 bp, Mus musculus
  siRNA target sequence for 6030441H18 (NM_177893.2,971-989).
ggcaccagcctgactgata

SEQ ID NO: 648287 - DNA, 19 bp, Mus musculus
  siRNA target sequence for 6030441H18 (NM_177893.2,1013-1031).
gatgaggttttgaacagtt

SEQ ID NO: 648288 - DNA, 19 bp, Mus musculus
  siRNA target sequence for 6030441H18 (NM_177893.2,1053-1071).
catgtgcacctctaaaaga

SEQ ID NO: 648289 - DNA, 19 bp, Mus musculus
  siRNA target sequence for 6030441H18 (NM_177893.2,1059-1077).
cacctctaaaagaagagaa

SEQ ID NO: 648290 - DNA, 19 bp, Mus musculus
  siRNA target sequence for 6030441H18 (NM_177893.2,1170-1188).
cagagcatgcttccatatt

SEQ ID NO: 648291 - DNA, 19 bp, Mus musculus
  siRNA target sequence for 6030441H18 (NM_177893.2,1211-1229).
gtcagtaacacgaaatcct

SEQ ID NO: 648292 - DNA, 19 bp, Mus musculus
  siRNA target sequence for 6030441H18 (NM_177893.2,1232-1250).
ccgggagacactcttgtaa

SEQ ID NO: 648293 - DNA, 19 bp, Mus musculus
  siRNA target sequence for 6030441H18 (NM_177893.2,1233-1251).
cgggagacactcttgtaaa

SEQ ID NO: 648294 - DNA, 19 bp, Mus musculus
  siRNA target sequence for 6030441H18 (NM_177893.2,1236-1254).
gagacactcttgtaaagca

SEQ ID NO: 648295 - DNA, 19 bp, Mus musculus
  siRNA target sequence for 6030441H18 (NM_177893.2,1297-1315).
cgaggtgcgcagtcacaaa

SEQ ID NO: 648296 - DNA, 19 bp, Mus musculus
  siRNA target sequence for 6030441H18 (NM_177893.2,1300-1318).
ggtgcgcagtcacaaagaa

SEQ ID NO: 648297 - DNA, 19 bp, Mus musculus
  siRNA target sequence for 6030441H18 (NM_177893.2,1303-1321).
gcgcagtcacaaagaagta

SEQ ID NO: 648298 - DNA, 19 bp, Mus musculus
  siRNA target sequence for 6030441H18 (NM_177893.2,1380-1398).
gtcctaccgatgttgacat

SEQ ID NO: 648299 - DNA, 19 bp, Mus musculus
  siRNA target sequence for 6030441H18 (NM_177893.2,1575-1593).
ggaacgaagaggacatgaa

SEQ ID NO: 648300 - DNA, 19 bp, Mus musculus
  siRNA target sequence for 6030441H18 (NM_177893.2,1607-1625).
caggagaaggcgattatca

SEQ ID NO: 648301 - DNA, 19 bp, Mus musculus
  siRNA target sequence for 6030441H18 (NM_177893.2,1616-1634).
gcgattatcaccaggtttt

SEQ ID NO: 648302 - DNA, 19 bp, Mus musculus
  siRNA target sequence for 6030441H18 (NM_177893.2,1644-1662).
cagctagtggtcaaaagtt

SEQ ID NO: 648303 - DNA, 19 bp, Mus musculus
  siRNA target sequence for 6030441H18 (NM_177893.2,1646-1664).
gctagtggtcaaaagttgt

SEQ ID NO: 648304 - DNA, 19 bp, Mus musculus
  siRNA target sequence for 6030441H18 (NM_177893.2,1647-1665).
ctagtggtcaaaagttgta

SEQ ID NO: 648305 - DNA, 19 bp, Mus musculus
  siRNA target sequence for 6030441H18 (NM_177893.2,1669-1687).
gaggctctttcaacgtaaa

SEQ ID NO: 648306 - DNA, 19 bp, Mus musculus
  siRNA target sequence for 6030441H18 (NM_177893.2,1672-1690).
gctctttcaacgtaaatta

SEQ ID NO: 648307 - DNA, 19 bp, Mus musculus
  siRNA target sequence for 6030441H18 (NM_177893.2,1673-1691).
ctctttcaacgtaaattaa

SEQ ID NO: 648308 - DNA, 19 bp, Mus musculus
  siRNA target sequence for 6030441H18 (NM_177893.2,1682-1700).
cgtaaattaacctggatta

SEQ ID NO: 648309 - DNA, 19 bp, Mus musculus
  siRNA target sequence for 6030441H18 (NM_177893.2,1683-1701).
gtaaattaacctggattaa

SEQ ID NO: 648310 - DNA, 19 bp, Mus musculus
  siRNA target sequence for 6030441H18 (NM_177893.2,1724-1742).
gagattgcctccgacttaa

SEQ ID NO: 648311 - DNA, 19 bp, Mus musculus
  siRNA target sequence for 6030441H18 (NM_177893.2,1745-1763).
cctgtggttgaagaattga

SEQ ID NO: 648312 - DNA, 19 bp, Mus musculus
  siRNA target sequence for 6330406L22Rik (NM_027521.2,269-287).
cctttcattatgaatgcaa

SEQ ID NO: 648313 - DNA, 19 bp, Mus musculus
  siRNA target sequence for 6330406L22Rik (NM_027521.2,474-492).
cgtggaggaatgtgaagaa

SEQ ID NO: 648314 - DNA, 19 bp, Mus musculus
  siRNA target sequence for 6330406L22Rik (NM_027521.2,554-572).
ctgcactgcagtatgcaaa

SEQ ID NO: 648315 - DNA, 19 bp, Mus musculus
  siRNA target sequence for 6330406L22Rik (NM_027521.2,623-641).
ccaccctggagatggaatt

SEQ ID NO: 648316 - DNA, 19 bp, Mus musculus
  siRNA target sequence for 6330406L22Rik (NM_027521.2,840-858).
gcgcaggaaggagatcaaa

SEQ ID NO: 648317 - DNA, 19 bp, Mus musculus
  siRNA target sequence for 6330406L22Rik (NM_027521.2,1256-1274).
caccgctgcccgtgaactt

SEQ ID NO: 648318 - DNA, 19 bp, Mus musculus
  siRNA target sequence for 6330406L22Rik (NM_027521.2,1384-1402).
ccttatgtctctaacaact

SEQ ID NO: 648319 - DNA, 19 bp, Mus musculus
  siRNA target sequence for 6330406L22Rik (NM_027521.2,1537-1555).
cgaggtcaccaggttcata

SEQ ID NO: 648320 - DNA, 19 bp, Mus musculus
  siRNA target sequence for 6330406L22Rik (NM_027521.2,1540-1558).
ggtcaccaggttcataagt

SEQ ID NO: 648321 - DNA, 19 bp, Mus musculus
  siRNA target sequence for 6330406L22Rik (NM_027521.2,1620-1638).
gaagttcgatcgaacatct

SEQ ID NO: 648322 - DNA, 19 bp, Mus musculus
  siRNA target sequence for 6330406L22Rik (NM_027521.2,1693-1711).
gtagcttccgcctttgatt

SEQ ID NO: 648323 - DNA, 19 bp, Mus musculus
  siRNA target sequence for 6330406L22Rik (NM_027521.2,1847-1865).
gtaacagctatgtgtactt

SEQ ID NO: 648324 - DNA, 19 bp, Mus musculus
  siRNA target sequence for 6330406L22Rik (NM_027521.2,1896-1914).
ggcttgtcacaaaaagtgt

SEQ ID NO: 648325 - DNA, 19 bp, Mus musculus
  siRNA target sequence for 6330406L22Rik (NM_027521.2,1897-1915).
gcttgtcacaaaaagtgtt

SEQ ID NO: 648326 - DNA, 19 bp, Mus musculus
  siRNA target sequence for 6330406L22Rik (NM_027521.2,1898-1916).
cttgtcacaaaaagtgttt

SEQ ID NO: 648327 - DNA, 19 bp, Mus musculus
  siRNA target sequence for 6330406L22Rik (NM_027521.2,2014-2032).
ggggtgcccttcattgtca

SEQ ID NO: 648328 - DNA, 19 bp, Mus musculus
  siRNA target sequence for 6330406L22Rik (NM_027521.2,2015-2033).
gggtgcccttcattgtcaa

SEQ ID NO: 648329 - DNA, 19 bp, Mus musculus
  siRNA target sequence for 6330406L22Rik (NM_027521.2,2019-2037).
gcccttcattgtcaaaaaa

SEQ ID NO: 648330 - DNA, 19 bp, Mus musculus
  siRNA target sequence for 6330406L22Rik (NM_027521.2,2086-2104).
cgggtcaatggcgtgaaaa

SEQ ID NO: 648331 - DNA, 19 bp, Mus musculus
  siRNA target sequence for 6330406L22Rik (NM_027521.2,2184-2202).
cagcaacgtcctaaagcta

SEQ ID NO: 648332 - DNA, 19 bp, Mus musculus
  siRNA target sequence for 6330406L22Rik (NM_027521.2,2186-2204).
gcaacgtcctaaagctata

SEQ ID NO: 648333 - DNA, 19 bp, Mus musculus
  siRNA target sequence for 6330406L22Rik (NM_027521.2,2215-2233).
ctaccggagccccttatct

SEQ ID NO: 648334 - DNA, 19 bp, Mus musculus
  siRNA target sequence for 6330406L22Rik (NM_027521.2,2218-2236).
ccggagccccttatctctt

SEQ ID NO: 648335 - DNA, 19 bp, Mus musculus
  siRNA target sequence for 6330406L22Rik (NM_027521.2,2438-2456).
gaaggatcgtggaaatgga

SEQ ID NO: 648336 - DNA, 19 bp, Mus musculus
  siRNA target sequence for 6330406L22Rik (NM_027521.2,2568-2586).
ccaccaggcccgagttatt

SEQ ID NO: 648337 - DNA, 19 bp, Mus musculus
  siRNA target sequence for 6330406L22Rik (NM_027521.2,2727-2745).
ggacggaagccgagaatct

SEQ ID NO: 648338 - DNA, 19 bp, Mus musculus
  siRNA target sequence for 6330406L22Rik (NM_027521.2,2819-2837).
ctctacaccgcctcagttt

SEQ ID NO: 648339 - DNA, 19 bp, Mus musculus
  siRNA target sequence for 6330406L22Rik (NM_027521.2,2930-2948).
cgtggctgtgtcacttcaa

SEQ ID NO: 648340 - DNA, 19 bp, Mus musculus
  siRNA target sequence for 6430527G18Rik (NM_145836.1,1018-1036).
gccgtggttgcgtcaatta

SEQ ID NO: 648341 - DNA, 19 bp, Mus musculus
  siRNA target sequence for 6430527G18Rik (NM_145836.1,1021-1039).
gtggttgcgtcaattacga

SEQ ID NO: 648342 - DNA, 19 bp, Mus musculus
  siRNA target sequence for 6430527G18Rik (NM_145836.1,1045-1063).
ccgaccgcatagaattcgt

SEQ ID NO: 648343 - DNA, 19 bp, Mus musculus
  siRNA target sequence for 6430527G18Rik (NM_145836.1,1491-1509).
cgccagagccccaactcat

SEQ ID NO: 648344 - DNA, 19 bp, Mus musculus
  siRNA target sequence for 6430527G18Rik (NM_145836.1,1761-1779).
ggtgtgtcagccactgtat

SEQ ID NO: 648345 - DNA, 19 bp, Mus musculus
  siRNA target sequence for 6430527G18Rik (NM_145836.1,2062-2080).
ccttcgacgcggtctctaa

SEQ ID NO: 648346 - DNA, 19 bp, Mus musculus
  siRNA target sequence for 6430527G18Rik (NM_145836.1,2100-2118).
ctgaagctgttcattgagt

SEQ ID NO: 648347 - DNA, 19 bp, Mus musculus
  siRNA target sequence for 6430527G18Rik (NM_145836.1,2102-2120).
gaagctgttcattgagtat

SEQ ID NO: 648348 - DNA, 19 bp, Mus musculus
  siRNA target sequence for 6430527G18Rik (NM_145836.1,2208-2226).
ctgtcctctggcttcaagt

SEQ ID NO: 648349 - DNA, 19 bp, Mus musculus
  siRNA target sequence for 6430527G18Rik (NM_145836.1,2656-2674).
ctctgggacctcattccaa

SEQ ID NO: 648350 - DNA, 19 bp, Mus musculus
  siRNA target sequence for 6430527G18Rik (NM_145836.1,2874-2892).
cgcaatggggacctgaatt

SEQ ID NO: 648351 - DNA, 19 bp, Mus musculus
  siRNA target sequence for 6430527G18Rik (NM_145836.1,2876-2894).
caatggggacctgaattta

SEQ ID NO: 648352 - DNA, 19 bp, Mus musculus
  siRNA target sequence for 6430601A21Rik (NM_175466.2,215-233).
ctaggaacaggccatatat

SEQ ID NO: 648353 - DNA, 19 bp, Mus musculus
  siRNA target sequence for 6430601A21Rik (NM_175466.2,222-240).
caggccatatatttgcaat

SEQ ID NO: 648354 - DNA, 19 bp, Mus musculus
  siRNA target sequence for 6430601A21Rik (NM_175466.2,226-244).
ccatatatttgcaatatct

SEQ ID NO: 648355 - DNA, 19 bp, Mus musculus
  siRNA target sequence for 6430601A21Rik (NM_175466.2,278-296).
ctaggcattatctcattca

SEQ ID NO: 648356 - DNA, 19 bp, Mus musculus
  siRNA target sequence for 6430601A21Rik (NM_175466.2,329-347).
gccataaaaactttagaca

SEQ ID NO: 648357 - DNA, 19 bp, Mus musculus
  siRNA target sequence for 6430601A21Rik (NM_175466.2,330-348).
ccataaaaactttagacaa

SEQ ID NO: 648358 - DNA, 19 bp, Mus musculus
  siRNA target sequence for 6430601A21Rik (NM_175466.2,360-378).
ggagaggcatcagttaact

SEQ ID NO: 648359 - DNA, 19 bp, Mus musculus
  siRNA target sequence for 6430601A21Rik (NM_175466.2,387-405).
gcctttcagttgtaatatt

SEQ ID NO: 648360 - DNA, 19 bp, Mus musculus
  siRNA target sequence for 6430601A21Rik (NM_175466.2,407-425).
gccaacgccactttaaaaa

SEQ ID NO: 648361 - DNA, 19 bp, Mus musculus
  siRNA target sequence for 6430601A21Rik (NM_175466.2,408-426).
ccaacgccactttaaaaat

SEQ ID NO: 648362 - DNA, 19 bp, Mus musculus
  siRNA target sequence for 6430601A21Rik (NM_175466.2,409-427).
caacgccactttaaaaatt

SEQ ID NO: 648363 - DNA, 19 bp, Mus musculus
  siRNA target sequence for 6430601A21Rik (NM_175466.2,459-477).
caatgaatcctaccataat

SEQ ID NO: 648364 - DNA, 19 bp, Mus musculus
  siRNA target sequence for 6430601A21Rik (NM_175466.2,467-485).
cctaccataatgatgttaa

SEQ ID NO: 648365 - DNA, 19 bp, Mus musculus
  siRNA target sequence for 6430601A21Rik (NM_175466.2,468-486).
ctaccataatgatgttaaa

SEQ ID NO: 648366 - DNA, 19 bp, Mus musculus
  siRNA target sequence for 6430601A21Rik (NM_175466.2,472-490).
cataatgatgttaaagtca

SEQ ID NO: 648367 - DNA, 19 bp, Mus musculus
  siRNA target sequence for 6430601A21Rik (NM_175466.2,510-528).
gcaagagaagccggtatat

SEQ ID NO: 648368 - DNA, 19 bp, Mus musculus
  siRNA target sequence for 6430601A21Rik (NM_175466.2,519-537).
gccggtatatggaatgtgt

SEQ ID NO: 648369 - DNA, 19 bp, Mus musculus
  siRNA target sequence for 6430601A21Rik (NM_175466.2,521-539).
cggtatatggaatgtgtaa

SEQ ID NO: 648370 - DNA, 19 bp, Mus musculus
  siRNA target sequence for 6430601A21Rik (NM_175466.2,568-586).
ctacacccatgctctaagt

SEQ ID NO: 648371 - DNA, 19 bp, Mus musculus
  siRNA target sequence for 6430601A21Rik (NM_175466.2,635-653).
gtacgatctgtggcaaaat

SEQ ID NO: 648372 - DNA, 19 bp, Mus musculus
  siRNA target sequence for 6430601A21Rik (NM_175466.2,638-656).
cgatctgtggcaaaatgtt

SEQ ID NO: 648373 - DNA, 19 bp, Mus musculus
  siRNA target sequence for 6430601A21Rik (NM_175466.2,654-672).
gtttccgtcacaatcaaaa

SEQ ID NO: 648374 - DNA, 19 bp, Mus musculus
  siRNA target sequence for 6430601A21Rik (NM_175466.2,659-677).
cgtcacaatcaaaacttga

SEQ ID NO: 648375 - DNA, 19 bp, Mus musculus
  siRNA target sequence for 6430601A21Rik (NM_175466.2,660-678).
gtcacaatcaaaacttgat

SEQ ID NO: 648376 - DNA, 19 bp, Mus musculus
  siRNA target sequence for 6430601A21Rik (NM_175466.2,698-716).
ccgggcagaggccttttaa

SEQ ID NO: 648377 - DNA, 19 bp, Mus musculus
  siRNA target sequence for 6430601A21Rik (NM_175466.2,699-717).
cgggcagaggccttttaaa

SEQ ID NO: 648378 - DNA, 19 bp, Mus musculus
  siRNA target sequence for 6430601A21Rik (NM_175466.2,700-718).
gggcagaggccttttaaat

SEQ ID NO: 648379 - DNA, 19 bp, Mus musculus
  siRNA target sequence for 6430601A21Rik (NM_175466.2,742-760).
cgacagtcaacccacttaa

SEQ ID NO: 648380 - DNA, 19 bp, Mus musculus
  siRNA target sequence for 6430601A21Rik (NM_175466.2,772-790).
ctcacacattcagaagaaa

SEQ ID NO: 648381 - DNA, 19 bp, Mus musculus
  siRNA target sequence for 6430601A21Rik (NM_175466.2,855-873).
gcaaatccacactaggaat

SEQ ID NO: 648382 - DNA, 19 bp, Mus musculus
  siRNA target sequence for 6430601A21Rik (NM_175466.2,861-879).
ccacactaggaataagact

SEQ ID NO: 648383 - DNA, 19 bp, Mus musculus
  siRNA target sequence for 6430601A21Rik (NM_175466.2,869-887).
ggaataagactcttcagaa

SEQ ID NO: 648384 - DNA, 19 bp, Mus musculus
  siRNA target sequence for 6430601A21Rik (NM_175466.2,870-888).
gaataagactcttcagaat

SEQ ID NO: 648385 - DNA, 19 bp, Mus musculus
  siRNA target sequence for 6430601A21Rik (NM_175466.2,915-933).
gtcatgtcccctacctaat

SEQ ID NO: 648386 - DNA, 19 bp, Mus musculus
  siRNA target sequence for 6430601A21Rik (NM_175466.2,917-935).
catgtcccctacctaataa

SEQ ID NO: 648387 - DNA, 19 bp, Mus musculus
  siRNA target sequence for 6430601A21Rik (NM_175466.2,922-940).
cccctacctaataaattaa

SEQ ID NO: 648388 - DNA, 19 bp, Mus musculus
  siRNA target sequence for 6430601A21Rik (NM_175466.2,968-986).
gtgatatgggtgaatctga

SEQ ID NO: 648389 - DNA, 19 bp, Mus musculus
  siRNA target sequence for 6430601A21Rik (NM_175466.2,998-1016).
ctcttgatgtccactcaat

SEQ ID NO: 648390 - DNA, 19 bp, Mus musculus
  siRNA target sequence for 6430601A21Rik (NM_175466.2,1035-1053).
gtgttcggagtgtgaagaa

SEQ ID NO: 648391 - DNA, 19 bp, Mus musculus
  siRNA target sequence for 6430601A21Rik (NM_175466.2,1114-1132).
gttccaagcagactcaaaa

SEQ ID NO: 648392 - DNA, 19 bp, Mus musculus
  siRNA target sequence for 6430601A21Rik (NM_175466.2,1164-1182).
gctcttggctaaacttaaa

SEQ ID NO: 648393 - DNA, 19 bp, Mus musculus
  siRNA target sequence for 6430601A21Rik (NM_175466.2,1167-1185).
cttggctaaacttaaacgt

SEQ ID NO: 648394 - DNA, 19 bp, Mus musculus
  siRNA target sequence for 6430601A21Rik (NM_175466.2,1183-1201).
cgtgctgggggtaaaaaat

SEQ ID NO: 648395 - DNA, 19 bp, Mus musculus
  siRNA target sequence for 6430601A21Rik (NM_175466.2,1193-1211).
gtaaaaaatcagatgatct

SEQ ID NO: 648396 - DNA, 19 bp, Mus musculus
  siRNA target sequence for 6430601A21Rik (NM_175466.2,1242-1260).
caactacctgaaaaattgt

SEQ ID NO: 648397 - DNA, 19 bp, Mus musculus
  siRNA target sequence for 6430601A21Rik (NM_175466.2,1271-1289).
ctggtaagccgaacataga

SEQ ID NO: 648398 - DNA, 19 bp, Mus musculus
  siRNA target sequence for 6430601A21Rik (NM_175466.2,1274-1292).
gtaagccgaacatagaaca

SEQ ID NO: 648399 - DNA, 19 bp, Mus musculus
  siRNA target sequence for 6430601A21Rik (NM_175466.2,1278-1296).
gccgaacatagaacaaact

SEQ ID NO: 648400 - DNA, 19 bp, Mus musculus
  siRNA target sequence for 6430601A21Rik (NM_175466.2,1334-1352).
catacaagacagttagcaa

SEQ ID NO: 648401 - DNA, 19 bp, Mus musculus
  siRNA target sequence for 6430601A21Rik (NM_175466.2,1385-1403).
cttggcaaaagcaattcca

SEQ ID NO: 648402 - DNA, 19 bp, Mus musculus
  siRNA target sequence for 6430601A21Rik (NM_175466.2,1395-1413).
gcaattccagagccaaaat

SEQ ID NO: 648403 - DNA, 19 bp, Mus musculus
  siRNA target sequence for 6430601A21Rik (NM_175466.2,1396-1414).
caattccagagccaaaata

SEQ ID NO: 648404 - DNA, 19 bp, Mus musculus
  siRNA target sequence for 6430601A21Rik (NM_175466.2,1407-1425).
ccaaaatacgggtaagagt

SEQ ID NO: 648405 - DNA, 19 bp, Mus musculus
  siRNA target sequence for 6430601A21Rik (NM_175466.2,1408-1426).
caaaatacgggtaagagtt

SEQ ID NO: 648406 - DNA, 19 bp, Mus musculus
  siRNA target sequence for 6430601A21Rik (NM_175466.2,1445-1463).
cgggaagcatattatctat

SEQ ID NO: 648407 - DNA, 19 bp, Mus musculus
  siRNA target sequence for 6430601A21Rik (NM_175466.2,1464-1482).
ggatggttccgtcaataat

SEQ ID NO: 648408 - DNA, 19 bp, Mus musculus
  siRNA target sequence for 6430601A21Rik (NM_175466.2,1469-1487).
gttccgtcaataataaaga

SEQ ID NO: 648409 - DNA, 19 bp, Mus musculus
  siRNA target sequence for 6430601A21Rik (NM_175466.2,1502-1520).
gttcgtcaggtgaggaata

SEQ ID NO: 648410 - DNA, 19 bp, Mus musculus
  siRNA target sequence for 6430601A21Rik (NM_175466.2,1505-1523).
cgtcaggtgaggaatactt

SEQ ID NO: 648411 - DNA, 19 bp, Mus musculus
  siRNA target sequence for 6430601A21Rik (NM_175466.2,1506-1524).
gtcaggtgaggaatactta

SEQ ID NO: 648412 - DNA, 19 bp, Mus musculus
  siRNA target sequence for 6430601A21Rik (NM_175466.2,1635-1653).
gctacaaaggcactattta

SEQ ID NO: 648413 - DNA, 19 bp, Mus musculus
  siRNA target sequence for 6430601A21Rik (NM_175466.2,1670-1688).
gacctttcgactgtaatgt

SEQ ID NO: 648414 - DNA, 19 bp, Mus musculus
  siRNA target sequence for 6430601A21Rik (NM_175466.2,1672-1690).
cctttcgactgtaatgttt

SEQ ID NO: 648415 - DNA, 19 bp, Mus musculus
  siRNA target sequence for 6430601A21Rik (NM_175466.2,1719-1737).
cttaaaaaggcataaacta

SEQ ID NO: 648416 - DNA, 19 bp, Mus musculus
  siRNA target sequence for 6430601A21Rik (NM_175466.2,1728-1746).
gcataaactaactcatatt

SEQ ID NO: 648417 - DNA, 19 bp, Mus musculus
  siRNA target sequence for 6430601A21Rik (NM_175466.2,1735-1753).
ctaactcatattgaaaaga

SEQ ID NO: 648418 - DNA, 19 bp, Mus musculus
  siRNA target sequence for 6430601A21Rik (NM_175466.2,1772-1790).
ggcgagtggactttggaaa

SEQ ID NO: 648419 - DNA, 19 bp, Mus musculus
  siRNA target sequence for 6430601A21Rik (NM_175466.2,1773-1791).
gcgagtggactttggaaat

SEQ ID NO: 648420 - DNA, 19 bp, Mus musculus
  siRNA target sequence for 6430601A21Rik (NM_175466.2,1775-1793).
gagtggactttggaaatgt

SEQ ID NO: 648421 - DNA, 19 bp, Mus musculus
  siRNA target sequence for 6430601A21Rik (NM_175466.2,1786-1804).
ggaaatgtgaaccaacttt

SEQ ID NO: 648422 - DNA, 19 bp, Mus musculus
  siRNA target sequence for 6430601A21Rik (NM_175466.2,1787-1805).
gaaatgtgaaccaactttt

SEQ ID NO: 648423 - DNA, 19 bp, Mus musculus
  siRNA target sequence for 6430601A21Rik (NM_175466.2,1809-1827).
ccatccaagtgatgatgtt

SEQ ID NO: 648424 - DNA, 19 bp, Mus musculus
  siRNA target sequence for 6430601A21Rik (NM_175466.2,1810-1828).
catccaagtgatgatgtta

SEQ ID NO: 648425 - DNA, 19 bp, Mus musculus
  siRNA target sequence for 6430601A21Rik (NM_175466.2,1814-1832).
caagtgatgatgttagcta

SEQ ID NO: 648426 - DNA, 19 bp, Mus musculus
  siRNA target sequence for 6430601A21Rik (NM_175466.2,1817-1835).
gtgatgatgttagctataa

SEQ ID NO: 648427 - DNA, 19 bp, Mus musculus
  siRNA target sequence for 6430601A21Rik (NM_175466.2,1889-1907).
ccagtcaggtatcagaaat

SEQ ID NO: 648428 - DNA, 19 bp, Mus musculus
  siRNA target sequence for 6430601A21Rik (NM_175466.2,2001-2019).
gagccatcattgttacagt

SEQ ID NO: 648429 - DNA, 19 bp, Mus musculus
  siRNA target sequence for 6430601A21Rik (NM_175466.2,2003-2021).
gccatcattgttacagtta

SEQ ID NO: 648430 - DNA, 19 bp, Mus musculus
  siRNA target sequence for 6430601A21Rik (NM_175466.2,2022-2040).
cttaggccgtcctgaaaga

SEQ ID NO: 648431 - DNA, 19 bp, Mus musculus
  siRNA target sequence for 6430601A21Rik (NM_175466.2,2039-2057).
gaagtgacgggctccttta

SEQ ID NO: 648432 - DNA, 19 bp, Mus musculus
  siRNA target sequence for 6430601A21Rik (NM_175466.2,2063-2081).
gcagtgtttgttgtaaaca

SEQ ID NO: 648433 - DNA, 19 bp, Mus musculus
  siRNA target sequence for 6430601A21Rik (NM_175466.2,2085-2103).
ccgatctccgtccaaacta

SEQ ID NO: 648434 - DNA, 19 bp, Mus musculus
  siRNA target sequence for 6430601A21Rik (NM_175466.2,2087-2105).
gatctccgtccaaactaga

SEQ ID NO: 648435 - DNA, 19 bp, Mus musculus
  siRNA target sequence for 6430601A21Rik (NM_175466.2,2093-2111).
cgtccaaactagaaagaca

SEQ ID NO: 648436 - DNA, 19 bp, Mus musculus
  siRNA target sequence for 6430601A21Rik (NM_175466.2,2145-2163).
gtgctcagtctgtggtaaa

SEQ ID NO: 648437 - DNA, 19 bp, Mus musculus
  siRNA target sequence for 6430601A21Rik (NM_175466.2,2148-2166).
ctcagtctgtggtaaaaca

SEQ ID NO: 648438 - DNA, 19 bp, Mus musculus
  siRNA target sequence for 6430601A21Rik (NM_175466.2,2171-2189).
gacaagcacctcattggaa

SEQ ID NO: 648439 - DNA, 19 bp, Mus musculus
  siRNA target sequence for 6430601A21Rik (NM_175466.2,2194-2212).
catcagctcactcacttta

SEQ ID NO: 648440 - DNA, 19 bp, Mus musculus
  siRNA target sequence for 9430067K14Rik (NM_175509.3,400-418).
gaggttactgaggatttct

SEQ ID NO: 648441 - DNA, 19 bp, Mus musculus
  siRNA target sequence for 9430067K14Rik (NM_175509.3,402-420).
ggttactgaggatttcttt

SEQ ID NO: 648442 - DNA, 19 bp, Mus musculus
  siRNA target sequence for 9430067K14Rik (NM_175509.3,500-518).
ggcatgaggtacttggtaa

SEQ ID NO: 648443 - DNA, 19 bp, Mus musculus
  siRNA target sequence for 9430067K14Rik (NM_175509.3,558-576).
gggcaaggggacaatgatt

SEQ ID NO: 648444 - DNA, 19 bp, Mus musculus
  siRNA target sequence for 9430067K14Rik (NM_175509.3,659-677).
ggacagccccagataatct

SEQ ID NO: 648445 - DNA, 19 bp, Mus musculus
  siRNA target sequence for 9430067K14Rik (NM_175509.3,696-714).
ggaagcgtcaaccttcaat

SEQ ID NO: 648446 - DNA, 19 bp, Mus musculus
  siRNA target sequence for 9430067K14Rik (NM_175509.3,697-715).
gaagcgtcaaccttcaatt

SEQ ID NO: 648447 - DNA, 19 bp, Mus musculus
  siRNA target sequence for 9430067K14Rik (NM_175509.3,700-718).
gcgtcaaccttcaattttt

SEQ ID NO: 648448 - DNA, 19 bp, Mus musculus
  siRNA target sequence for 9430067K14Rik (NM_175509.3,701-719).
cgtcaaccttcaatttttt

SEQ ID NO: 648449 - DNA, 19 bp, Mus musculus
  siRNA target sequence for 9430067K14Rik (NM_175509.3,744-762).
cagacctcgttctgtgaat

SEQ ID NO: 648450 - DNA, 19 bp, Mus musculus
  siRNA target sequence for 9430067K14Rik (NM_175509.3,746-764).
gacctcgttctgtgaatga

SEQ ID NO: 648451 - DNA, 19 bp, Mus musculus
  siRNA target sequence for 9430067K14Rik (NM_175509.3,751-769).
cgttctgtgaatgacttat

SEQ ID NO: 648452 - DNA, 19 bp, Mus musculus
  siRNA target sequence for 9430067K14Rik (NM_175509.3,805-823).
cggtcaaggtccgatgtta

SEQ ID NO: 648453 - DNA, 19 bp, Mus musculus
  siRNA target sequence for 9430067K14Rik (NM_175509.3,1044-1062).
ctggcagagctgttatgca

SEQ ID NO: 648454 - DNA, 19 bp, Mus musculus
  siRNA target sequence for 9430067K14Rik (NM_175509.3,1073-1091).
cctacaacttaaacttcta

SEQ ID NO: 648455 - DNA, 19 bp, Mus musculus
  siRNA target sequence for 9430067K14Rik (NM_175509.3,1289-1307).
ctgctgtacccaattacat

SEQ ID NO: 648456 - DNA, 19 bp, Mus musculus
  siRNA target sequence for 9430067K14Rik (NM_175509.3,1317-1335).
gggtgagatggcaaactct

SEQ ID NO: 648457 - DNA, 19 bp, Mus musculus
  siRNA target sequence for 9430067K14Rik (NM_175509.3,1426-1444).
cccaaacagtaccaaaata

SEQ ID NO: 648458 - DNA, 19 bp, Mus musculus
  siRNA target sequence for 9430067K14Rik (NM_175509.3,1471-1489).
ctgactgtccaaaacaact

SEQ ID NO: 648459 - DNA, 19 bp, Mus musculus
  siRNA target sequence for 9430067K14Rik (NM_175509.3,1510-1528).
ctgagcaaggcctatctta

SEQ ID NO: 648460 - DNA, 19 bp, Mus musculus
  siRNA target sequence for 9430067K14Rik (NM_175509.3,1799-1817).
gcgagctgcggaagaacaa

SEQ ID NO: 648461 - DNA, 19 bp, Mus musculus
  siRNA target sequence for 9430067K14Rik (NM_175509.3,1877-1895).
gactcactgctcagagttt

SEQ ID NO: 648462 - DNA, 19 bp, Mus musculus
  siRNA target sequence for 9430067K14Rik (NM_175509.3,1879-1897).
ctcactgctcagagtttca

SEQ ID NO: 648463 - DNA, 19 bp, Mus musculus
  siRNA target sequence for 9430067K14Rik (NM_175509.3,1904-1922).
cagggtgccagcgatctat

SEQ ID NO: 648464 - DNA, 19 bp, Mus musculus
  siRNA target sequence for 9430067K14Rik (NM_175509.3,1908-1926).
gtgccagcgatctattggt

SEQ ID NO: 648465 - DNA, 19 bp, Mus musculus
  siRNA target sequence for 9430067K14Rik (NM_175509.3,1941-1959).
ggccaaggtgtgcaattat

SEQ ID NO: 648466 - DNA, 19 bp, Mus musculus
  siRNA target sequence for 9430067K14Rik (NM_175509.3,1942-1960).
gccaaggtgtgcaattata

SEQ ID NO: 648467 - DNA, 19 bp, Mus musculus
  siRNA target sequence for 9430067K14Rik (NM_175509.3,2007-2025).
catcccagcacgcatagtt

SEQ ID NO: 648468 - DNA, 19 bp, Mus musculus
  siRNA target sequence for 9430067K14Rik (NM_175509.3,2012-2030).
cagcacgcatagttcacaa

SEQ ID NO: 648469 - DNA, 19 bp, Mus musculus
  siRNA target sequence for 9430067K14Rik (NM_175509.3,2071-2089).
gagtttctggagtatgtgt

SEQ ID NO: 648470 - DNA, 19 bp, Mus musculus
  siRNA target sequence for 9430067K14Rik (NM_175509.3,2170-2188).
cttcgacagcggttgaagt

SEQ ID NO: 648471 - DNA, 19 bp, Mus musculus
  siRNA target sequence for 9430067K14Rik (NM_175509.3,2442-2460).
ccccttcgaggacatttca

SEQ ID NO: 648472 - DNA, 19 bp, Mus musculus
  siRNA target sequence for 9430076C15Rik (NM_177095.2,159-177).
caacagaggaccatctgat

SEQ ID NO: 648473 - DNA, 19 bp, Mus musculus
  siRNA target sequence for 9430076C15Rik (NM_177095.2,162-180).
cagaggaccatctgatgat

SEQ ID NO: 648474 - DNA, 19 bp, Mus musculus
  siRNA target sequence for 9430076C15Rik (NM_177095.2,167-185).
gaccatctgatgattcata

SEQ ID NO: 648475 - DNA, 19 bp, Mus musculus
  siRNA target sequence for 9430076C15Rik (NM_177095.2,194-212).
cacgagatgactttgaagt

SEQ ID NO: 648476 - DNA, 19 bp, Mus musculus
  siRNA target sequence for 9430076C15Rik (NM_177095.2,477-495).
cccactcaggggaaaccaa

SEQ ID NO: 648477 - DNA, 19 bp, Mus musculus
  siRNA target sequence for 9530046H09Rik (NM_145486.2,328-346).
gtcatccgggctttggatt

SEQ ID NO: 648478 - DNA, 19 bp, Mus musculus
  siRNA target sequence for 9530046H09Rik (NM_145486.2,375-393).
ctgccacgagggagcaaat

SEQ ID NO: 648479 - DNA, 19 bp, Mus musculus
  siRNA target sequence for 9530046H09Rik (NM_145486.2,598-616).
gacatggtgtgctttgtgt

SEQ ID NO: 648480 - DNA, 19 bp, Mus musculus
  siRNA target sequence for 9530046H09Rik (NM_145486.2,726-744).
cgccctctttaccatctat

SEQ ID NO: 648481 - DNA, 19 bp, Mus musculus
  siRNA target sequence for 9530046H09Rik (NM_145486.2,759-777).
ggtctctttccgataccat

SEQ ID NO: 648482 - DNA, 19 bp, Mus musculus
  siRNA target sequence for 9530046H09Rik (NM_145486.2,760-778).
gtctctttccgataccatt

SEQ ID NO: 648483 - DNA, 19 bp, Mus musculus
  siRNA target sequence for 9530046H09Rik (NM_145486.2,791-809).
cggaatggaggaagacaaa

SEQ ID NO: 648484 - DNA, 19 bp, Mus musculus
  siRNA target sequence for 9530046H09Rik (NM_145486.2,792-810).
ggaatggaggaagacaaat

SEQ ID NO: 648485 - DNA, 19 bp, Mus musculus
  siRNA target sequence for 9530046H09Rik (NM_145486.2,873-891).
ggctactggactcttaaaa

SEQ ID NO: 648486 - DNA, 19 bp, Mus musculus
  siRNA target sequence for 9530046H09Rik (NM_145486.2,878-896).
ctggactcttaaaaaagct

SEQ ID NO: 648487 - DNA, 19 bp, Mus musculus
  siRNA target sequence for 9830132G07Rik (NM_172643.1,980-998).
ggggatgggtcagacaatt

SEQ ID NO: 648488 - DNA, 19 bp, Mus musculus
  siRNA target sequence for 9830132G07Rik (NM_172643.1,981-999).
gggatgggtcagacaattt

SEQ ID NO: 648489 - DNA, 19 bp, Mus musculus
  siRNA target sequence for 9830132G07Rik (NM_172643.1,1046-1064).
gaggaccctggcagtgaat

SEQ ID NO: 648490 - DNA, 19 bp, Mus musculus
  siRNA target sequence for 9830132G07Rik (NM_172643.1,1049-1067).
gaccctggcagtgaatata

SEQ ID NO: 648491 - DNA, 19 bp, Mus musculus
  siRNA target sequence for 9830132G07Rik (NM_172643.1,1194-1212).
ggttagctcccgtcatcat

SEQ ID NO: 648492 - DNA, 19 bp, Mus musculus
  siRNA target sequence for 9830132G07Rik (NM_172643.1,1195-1213).
gttagctcccgtcatcatt

SEQ ID NO: 648493 - DNA, 19 bp, Mus musculus
  siRNA target sequence for 9830132G07Rik (NM_172643.1,1199-1217).
gctcccgtcatcattcaga

SEQ ID NO: 648494 - DNA, 19 bp, Mus musculus
  siRNA target sequence for 9830132G07Rik (NM_172643.1,1200-1218).
ctcccgtcatcattcagaa

SEQ ID NO: 648495 - DNA, 19 bp, Mus musculus
  siRNA target sequence for 9830132G07Rik (NM_172643.1,1237-1255).
gcagtgtcccaaatgtgat

SEQ ID NO: 648496 - DNA, 19 bp, Mus musculus
  siRNA target sequence for 9830132G07Rik (NM_172643.1,1245-1263).
ccaaatgtgataagacatt

SEQ ID NO: 648497 - DNA, 19 bp, Mus musculus
  siRNA target sequence for 9830132G07Rik (NM_172643.1,1315-1333).
gccttttgagtgtgatatt

SEQ ID NO: 648498 - DNA, 19 bp, Mus musculus
  siRNA target sequence for 9830132G07Rik (NM_172643.1,1340-1358).
cagcgttattcgacaaagt

SEQ ID NO: 648499 - DNA, 19 bp, Mus musculus
  siRNA target sequence for 9830132G07Rik (NM_172643.1,1342-1360).
gcgttattcgacaaagtct

SEQ ID NO: 648500 - DNA, 19 bp, Mus musculus
  siRNA target sequence for 9830132G07Rik (NM_172643.1,1343-1361).
cgttattcgacaaagtcta

SEQ ID NO: 648501 - DNA, 19 bp, Mus musculus
  siRNA target sequence for 9830132G07Rik (NM_172643.1,1344-1362).
gttattcgacaaagtctaa

SEQ ID NO: 648502 - DNA, 19 bp, Mus musculus
  siRNA target sequence for 9830132G07Rik (NM_172643.1,1387-1405).
cagtaacgaagtagagttt

SEQ ID NO: 648503 - DNA, 19 bp, Mus musculus
  siRNA target sequence for 9830132G07Rik (NM_172643.1,1418-1436).
cacaagtgcccttactgta

SEQ ID NO: 648504 - DNA, 19 bp, Mus musculus
  siRNA target sequence for 9830132G07Rik (NM_172643.1,1466-1484).
gccaagcacgtcaagagat

SEQ ID NO: 648505 - DNA, 19 bp, Mus musculus
  siRNA target sequence for 9830132G07Rik (NM_172643.1,1467-1485).
ccaagcacgtcaagagatt

SEQ ID NO: 648506 - DNA, 19 bp, Mus musculus
  siRNA target sequence for 9830132G07Rik (NM_172643.1,1471-1489).
gcacgtcaagagattccat

SEQ ID NO: 648507 - DNA, 19 bp, Mus musculus
  siRNA target sequence for 9830132G07Rik (NM_172643.1,1516-1534).
catcaagaagactaagagt

SEQ ID NO: 648508 - DNA, 19 bp, Mus musculus
  siRNA target sequence for 9830132G07Rik (NM_172643.1,1522-1540).
gaagactaagagtgaaagt

SEQ ID NO: 648509 - DNA, 19 bp, Mus musculus
  siRNA target sequence for 9830132G07Rik (NM_172643.1,1531-1549).
gagtgaaagttggaaatgt

SEQ ID NO: 648510 - DNA, 19 bp, Mus musculus
  siRNA target sequence for 9830132G07Rik (NM_172643.1,1535-1553).
gaaagttggaaatgtgata

SEQ ID NO: 648511 - DNA, 19 bp, Mus musculus
  siRNA target sequence for 9830132G07Rik (NM_172643.1,1632-1650).
gtacctattgtgaagaaca

SEQ ID NO: 648512 - DNA, 19 bp, Mus musculus
  siRNA target sequence for 9830132G07Rik (NM_172643.1,1659-1677).
cccggtttgcacggttaaa

SEQ ID NO: 648513 - DNA, 19 bp, Mus musculus
  siRNA target sequence for 9830132G07Rik (NM_172643.1,1663-1681).
gtttgcacggttaaagcat

SEQ ID NO: 648514 - DNA, 19 bp, Mus musculus
  siRNA target sequence for 9830132G07Rik (NM_172643.1,1668-1686).
cacggttaaagcatcaaga

SEQ ID NO: 648515 - DNA, 19 bp, Mus musculus
  siRNA target sequence for 9830132G07Rik (NM_172643.1,1671-1689).
ggttaaagcatcaagagaa

SEQ ID NO: 648516 - DNA, 19 bp, Mus musculus
  siRNA target sequence for 9830132G07Rik (NM_172643.1,1699-1717).
gggaccctttccatgtgat

SEQ ID NO: 648517 - DNA, 19 bp, Mus musculus
  siRNA target sequence for 9830132G07Rik (NM_172643.1,1700-1718).
ggaccctttccatgtgata

SEQ ID NO: 648518 - DNA, 19 bp, Mus musculus
  siRNA target sequence for 9830132G07Rik (NM_172643.1,1701-1719).
gaccctttccatgtgatat

SEQ ID NO: 648519 - DNA, 19 bp, Mus musculus
  siRNA target sequence for 9830132G07Rik (NM_172643.1,1703-1721).
ccctttccatgtgatatat

SEQ ID NO: 648520 - DNA, 19 bp, Mus musculus
  siRNA target sequence for 9830132G07Rik (NM_172643.1,1722-1740).
gtggtcgtcagttcaatga

SEQ ID NO: 648521 - DNA, 19 bp, Mus musculus
  siRNA target sequence for 9830132G07Rik (NM_172643.1,1786-1804).
gagaaaatggacttgcttt

SEQ ID NO: 648522 - DNA, 19 bp, Mus musculus
  siRNA target sequence for 9830132G07Rik (NM_172643.1,1823-1841).
cgagaaagaactactttga

SEQ ID NO: 648523 - DNA, 19 bp, Mus musculus
  siRNA target sequence for 9830132G07Rik (NM_172643.1,1917-1935).
gctcatacaggcttcactt

SEQ ID NO: 648524 - DNA, 19 bp, Mus musculus
  siRNA target sequence for 9830132G07Rik (NM_172643.1,1938-1956).
gagtgcatcacgatgacaa

SEQ ID NO: 648525 - DNA, 19 bp, Mus musculus
  siRNA target sequence for 9830132G07Rik (NM_172643.1,1943-1961).
catcacgatgacaagagat

SEQ ID NO: 648526 - DNA, 19 bp, Mus musculus
  siRNA target sequence for 9830132G07Rik (NM_172643.1,1957-1975).
gagatatgagtgtgatgaa

SEQ ID NO: 648527 - DNA, 19 bp, Mus musculus
  siRNA target sequence for 9830132G07Rik (NM_172643.1,1994-2012).
cgccatgaccaccttacaa

SEQ ID NO: 648528 - DNA, 19 bp, Mus musculus
  siRNA target sequence for 9830132G07Rik (NM_172643.1,1995-2013).
gccatgaccaccttacaaa

SEQ ID NO: 648529 - DNA, 19 bp, Mus musculus
  siRNA target sequence for 9830132G07Rik (NM_172643.1,2114-2132).
catctgggagagaaggttt

SEQ ID NO: 648530 - DNA, 19 bp, Mus musculus
  siRNA target sequence for 9830132G07Rik (NM_172643.1,2128-2146).
ggtttggcagaaatataaa

SEQ ID NO: 648531 - DNA, 19 bp, Mus musculus
  siRNA target sequence for 9830132G07Rik (NM_172643.1,2256-2274).
gcaatcagtcgtttagaat

SEQ ID NO: 648532 - DNA, 19 bp, Mus musculus
  siRNA target sequence for 9830132G07Rik (NM_172643.1,2257-2275).
caatcagtcgtttagaatt

SEQ ID NO: 648533 - DNA, 19 bp, Mus musculus
  siRNA target sequence for 9830132G07Rik (NM_172643.1,2261-2279).
cagtcgtttagaattaaga

SEQ ID NO: 648534 - DNA, 19 bp, Mus musculus
  siRNA target sequence for 9830132G07Rik (NM_172643.1,2320-2338).
gcctttcaattgtcaacat

SEQ ID NO: 648535 - DNA, 19 bp, Mus musculus
  siRNA target sequence for 9830132G07Rik (NM_172643.1,2349-2367).
catttaagcggaaagataa

SEQ ID NO: 648536 - DNA, 19 bp, Mus musculus
  siRNA target sequence for 9830132G07Rik (NM_172643.1,2411-2429).
gatgattctctcagtactt

SEQ ID NO: 648537 - DNA, 19 bp, Mus musculus
  siRNA target sequence for 9830132G07Rik (NM_172643.1,2432-2450).
gaggaaaaactcatgtctt

SEQ ID NO: 648538 - DNA, 19 bp, Mus musculus
  siRNA target sequence for 9830132G07Rik (NM_172643.1,2458-2476).
ggagtactcatctgatgat

SEQ ID NO: 648539 - DNA, 19 bp, Mus musculus
  siRNA target sequence for 9830132G07Rik (NM_172643.1,2513-2531).
cagcccaaagtttatcagt

SEQ ID NO: 648540 - DNA, 19 bp, Mus musculus
  siRNA target sequence for 9830132G07Rik (NM_172643.1,2528-2546).
cagtcggaagccaagacta

SEQ ID NO: 648541 - DNA, 19 bp, Mus musculus
  siRNA target sequence for 9830132G07Rik (NM_172643.1,2554-2572).
gaacgtgtctgcagaagta

SEQ ID NO: 648542 - DNA, 19 bp, Mus musculus
  siRNA target sequence for 9830132G07Rik (NM_172643.1,2570-2588).
gtatgtgttccagtaacat

SEQ ID NO: 648543 - DNA, 19 bp, Mus musculus
  siRNA target sequence for 9830132G07Rik (NM_172643.1,2649-2667).
ccacatcgtcccatgagat

SEQ ID NO: 648544 - DNA, 19 bp, Mus musculus
  siRNA target sequence for 9830132G07Rik (NM_172643.1,2703-2721).
gtgcagcagacttagcatt

SEQ ID NO: 648545 - DNA, 19 bp, Mus musculus
  siRNA target sequence for 9830132G07Rik (NM_172643.1,2769-2787).
ccgtccgacccgaacagat

SEQ ID NO: 648546 - DNA, 19 bp, Mus musculus
  siRNA target sequence for 9830132G07Rik (NM_172643.1,2785-2803).
gatgctagatcctagagaa

SEQ ID NO: 648547 - DNA, 19 bp, Mus musculus
  siRNA target sequence for 9830132G07Rik (NM_172643.1,2808-2826).
cttatctcgggacattact

SEQ ID NO: 648548 - DNA, 19 bp, Mus musculus
  siRNA target sequence for A130038L21Rik (NM_172588.2,220-238).
cggaccacccgcttcatgt

SEQ ID NO: 648549 - DNA, 19 bp, Mus musculus
  siRNA target sequence for A130038L21Rik (NM_172588.2,224-242).
ccacccgcttcatgtattt

SEQ ID NO: 648550 - DNA, 19 bp, Mus musculus
  siRNA target sequence for A130038L21Rik (NM_172588.2,225-243).
cacccgcttcatgtattta

SEQ ID NO: 648551 - DNA, 19 bp, Mus musculus
  siRNA target sequence for A130038L21Rik (NM_172588.2,229-247).
cgcttcatgtatttattct

SEQ ID NO: 648552 - DNA, 19 bp, Mus musculus
  siRNA target sequence for A130038L21Rik (NM_172588.2,375-393).
gaacctggtagggtattct

SEQ ID NO: 648553 - DNA, 19 bp, Mus musculus
  siRNA target sequence for A130038L21Rik (NM_172588.2,443-461).
gcctgctgaccttaaaagt

SEQ ID NO: 648554 - DNA, 19 bp, Mus musculus
  siRNA target sequence for A130038L21Rik (NM_172588.2,539-557).
gctcaggagcgttcttcat

SEQ ID NO: 648555 - DNA, 19 bp, Mus musculus
  siRNA target sequence for A130038L21Rik (NM_172588.2,540-558).
ctcaggagcgttcttcatt

SEQ ID NO: 648556 - DNA, 19 bp, Mus musculus
  siRNA target sequence for A130038L21Rik (NM_172588.2,568-586).
gagacctttctgaaagtct

SEQ ID NO: 648557 - DNA, 19 bp, Mus musculus
  siRNA target sequence for A130038L21Rik (NM_172588.2,682-700).
gcaggcaccgtccgtaata

SEQ ID NO: 648558 - DNA, 19 bp, Mus musculus
  siRNA target sequence for A130038L21Rik (NM_172588.2,683-701).
caggcaccgtccgtaataa

SEQ ID NO: 648559 - DNA, 19 bp, Mus musculus
  siRNA target sequence for A130038L21Rik (NM_172588.2,686-704).
gcaccgtccgtaataagct

SEQ ID NO: 648560 - DNA, 19 bp, Mus musculus
  siRNA target sequence for A130038L21Rik (NM_172588.2,726-744).
ggtgacactcatcatgtat

SEQ ID NO: 648561 - DNA, 19 bp, Mus musculus
  siRNA target sequence for A130038L21Rik (NM_172588.2,836-854).
gtggcctatgcgtgctaat

SEQ ID NO: 648562 - DNA, 19 bp, Mus musculus
  siRNA target sequence for A130038L21Rik (NM_172588.2,838-856).
ggcctatgcgtgctaatct

SEQ ID NO: 648563 - DNA, 19 bp, Mus musculus
  siRNA target sequence for A130038L21Rik (NM_172588.2,840-858).
cctatgcgtgctaatctct

SEQ ID NO: 648564 - DNA, 19 bp, Mus musculus
  siRNA target sequence for A130038L21Rik (NM_172588.2,922-940).
ctcataagctgttatgtca

SEQ ID NO: 648565 - DNA, 19 bp, Mus musculus
  siRNA target sequence for A130038L21Rik (NM_172588.2,1014-1032).
catatgtgcgcctgacttt

SEQ ID NO: 648566 - DNA, 19 bp, Mus musculus
  siRNA target sequence for A130038L21Rik (NM_172588.2,1074-1092).
gggcacccttcttctaatt

SEQ ID NO: 648567 - DNA, 19 bp, Mus musculus
  siRNA target sequence for A130038L21Rik (NM_172588.2,1076-1094).
gcacccttcttctaattgt

SEQ ID NO: 648568 - DNA, 19 bp, Mus musculus
  siRNA target sequence for A130038L21Rik (NM_172588.2,1248-1266).
gggacccagggtgatttat

SEQ ID NO: 648569 - DNA, 19 bp, Mus musculus
  siRNA target sequence for A130038L21Rik (NM_172588.2,1285-1303).
gtgtacagctactcctatt

SEQ ID NO: 648570 - DNA, 19 bp, Mus musculus
  siRNA target sequence for A130038L21Rik (NM_172588.2,1356-1374).
ctggttccactatgaaaat

SEQ ID NO: 648571 - DNA, 19 bp, Mus musculus
  siRNA target sequence for A530081L18Rik (NM_177115.2,480-498).
cccagagccccttcaatga

SEQ ID NO: 648572 - DNA, 19 bp, Mus musculus
  siRNA target sequence for A530081L18Rik (NM_177115.2,611-629).
ctgtcatcctcaaatacca

SEQ ID NO: 648573 - DNA, 19 bp, Mus musculus
  siRNA target sequence for A530081L18Rik (NM_177115.2,809-827).
gtggatcacctgcacttta

SEQ ID NO: 648574 - DNA, 19 bp, Mus musculus
  siRNA target sequence for A530081L18Rik (NM_177115.2,812-830).
gatcacctgcactttagta

SEQ ID NO: 648575 - DNA, 19 bp, Mus musculus
  siRNA target sequence for A530081L18Rik (NM_177115.2,870-888).
cactcttcaccatttacct

SEQ ID NO: 648576 - DNA, 19 bp, Mus musculus
  siRNA target sequence for A530081L18Rik (NM_177115.2,895-913).
gacactaaggcgttatgga

SEQ ID NO: 648577 - DNA, 19 bp, Mus musculus
  siRNA target sequence for A530081L18Rik (NM_177115.2,905-923).
cgttatggacaccaaagta

SEQ ID NO: 648578 - DNA, 19 bp, Mus musculus
  siRNA target sequence for A530081L18Rik (NM_177115.2,906-924).
gttatggacaccaaagtaa

SEQ ID NO: 648579 - DNA, 19 bp, Mus musculus
  siRNA target sequence for A530081L18Rik (NM_177115.2,911-929).
ggacaccaaagtaaaccat

SEQ ID NO: 648580 - DNA, 19 bp, Mus musculus
  siRNA target sequence for A930031O08Rik (NM_145598.1,98-116).
ctgagccgtaggttagaga

SEQ ID NO: 648581 - DNA, 19 bp, Mus musculus
  siRNA target sequence for A930031O08Rik (NM_145598.1,100-118).
gagccgtaggttagagaat

SEQ ID NO: 648582 - DNA, 19 bp, Mus musculus
  siRNA target sequence for A930031O08Rik (NM_145598.1,177-195).
cagtcctcaaagacttctt

SEQ ID NO: 648583 - DNA, 19 bp, Mus musculus
  siRNA target sequence for A930031O08Rik (NM_145598.1,322-340).
cctgccgttccatgatgaa

SEQ ID NO: 648584 - DNA, 19 bp, Mus musculus
  siRNA target sequence for A930031O08Rik (NM_145598.1,383-401).
ccagcggttgtggtactta

SEQ ID NO: 648585 - DNA, 19 bp, Mus musculus
  siRNA target sequence for A930031O08Rik (NM_145598.1,384-402).
cagcggttgtggtacttaa

SEQ ID NO: 648586 - DNA, 19 bp, Mus musculus
  siRNA target sequence for A930031O08Rik (NM_145598.1,514-532).
gcaaccggaggatttggat

SEQ ID NO: 648587 - DNA, 19 bp, Mus musculus
  siRNA target sequence for AA407930 (NM_133349.1,194-212).
cttgcaaacagctagattt

SEQ ID NO: 648588 - DNA, 19 bp, Mus musculus
  siRNA target sequence for AA407930 (NM_133349.1,197-215).
gcaaacagctagattttct

SEQ ID NO: 648589 - DNA, 19 bp, Mus musculus
  siRNA target sequence for AA407930 (NM_133349.1,224-242).
catgcgacgcctgtaaaca

SEQ ID NO: 648590 - DNA, 19 bp, Mus musculus
  siRNA target sequence for AA407930 (NM_133349.1,227-245).
gcgacgcctgtaaacaaga

SEQ ID NO: 648591 - DNA, 19 bp, Mus musculus
  siRNA target sequence for AA407930 (NM_133349.1,228-246).
cgacgcctgtaaacaagat

SEQ ID NO: 648592 - DNA, 19 bp, Mus musculus
  siRNA target sequence for AA407930 (NM_133349.1,229-247).
gacgcctgtaaacaagatt

SEQ ID NO: 648593 - DNA, 19 bp, Mus musculus
  siRNA target sequence for AA407930 (NM_133349.1,232-250).
gcctgtaaacaagatttct

SEQ ID NO: 648594 - DNA, 19 bp, Mus musculus
  siRNA target sequence for AA407930 (NM_133349.1,267-285).
ctacgtgggtcataagtgt

SEQ ID NO: 648595 - DNA, 19 bp, Mus musculus
  siRNA target sequence for AA407930 (NM_133349.1,284-302).
gtccctttgcgttcaagaa

SEQ ID NO: 648596 - DNA, 19 bp, Mus musculus
  siRNA target sequence for AI098020 (NM_172054.2,182-200).
ctaagctggtggagaatca

SEQ ID NO: 648597 - DNA, 19 bp, Mus musculus
  siRNA target sequence for AI098020 (NM_172054.2,414-432).
caccacattcaggtgtaaa

SEQ ID NO: 648598 - DNA, 19 bp, Mus musculus
  siRNA target sequence for AI098020 (NM_172054.2,416-434).
ccacattcaggtgtaaaat

SEQ ID NO: 648599 - DNA, 19 bp, Mus musculus
  siRNA target sequence for AI098020 (NM_172054.2,672-690).
caattacagtggaaattta

SEQ ID NO: 648600 - DNA, 19 bp, Mus musculus
  siRNA target sequence for AL033326 (NM_019705.2,277-295).
gaacaggctgctatcaagt

SEQ ID NO: 648601 - DNA, 19 bp, Mus musculus
  siRNA target sequence for AL033326 (NM_019705.2,325-343).
cccctcagggtgcaagtaa

SEQ ID NO: 648602 - DNA, 19 bp, Mus musculus
  siRNA target sequence for AL033326 (NM_019705.2,326-344).
ccctcagggtgcaagtaaa

SEQ ID NO: 648603 - DNA, 19 bp, Mus musculus
  siRNA target sequence for AL033326 (NM_019705.2,327-345).
cctcagggtgcaagtaaaa

SEQ ID NO: 648604 - DNA, 19 bp, Mus musculus
  siRNA target sequence for AL033326 (NM_019705.2,574-592).
ggagacggtgcctatctct

SEQ ID NO: 648605 - DNA, 19 bp, Mus musculus
  siRNA target sequence for AL033326 (NM_019705.2,575-593).
gagacggtgcctatctcta

SEQ ID NO: 648606 - DNA, 19 bp, Mus musculus
  siRNA target sequence for AL033326 (NM_019705.2,652-670).
ctgcgaatgttggaagatt

SEQ ID NO: 648607 - DNA, 19 bp, Mus musculus
  siRNA target sequence for AL033326 (NM_019705.2,802-820).
ggctgcactttcatcaaca

SEQ ID NO: 648608 - DNA, 19 bp, Mus musculus
  siRNA target sequence for AL033326 (NM_019705.2,1329-1347).
caggggttggtgcttcttt

SEQ ID NO: 648609 - DNA, 19 bp, Mus musculus
  siRNA target sequence for AL033326 (NM_019705.2,1340-1358).
gcttctttgaggatgatgt

SEQ ID NO: 648610 - DNA, 19 bp, Mus musculus
  siRNA target sequence for AL033326 (NM_019705.2,1412-1430).
ccatccatgagcacatgaa

SEQ ID NO: 648611 - DNA, 19 bp, Mus musculus
  siRNA target sequence for AL033326 (NM_019705.2,1493-1511).
cgacagagatgctaaaggt

SEQ ID NO: 648612 - DNA, 19 bp, Mus musculus
  siRNA target sequence for AL033326 (NM_019705.2,1494-1512).
gacagagatgctaaaggta

SEQ ID NO: 648613 - DNA, 19 bp, Mus musculus
  siRNA target sequence for AL033326 (NM_019705.2,1687-1705).
cgggtcaatgggattccat

SEQ ID NO: 648614 - DNA, 19 bp, Mus musculus
  siRNA target sequence for AW240854 (NM_146028.2,567-585).
ccaagctccagcgatttaa

SEQ ID NO: 648615 - DNA, 19 bp, Mus musculus
  siRNA target sequence for AW240854 (NM_146028.2,615-633).
gaagtaagagcgtagagaa

SEQ ID NO: 648616 - DNA, 19 bp, Mus musculus
  siRNA target sequence for AW240854 (NM_146028.2,890-908).
cagggcttgcgatgtaaga

SEQ ID NO: 648617 - DNA, 19 bp, Mus musculus
  siRNA target sequence for AW240854 (NM_146028.2,892-910).
gggcttgcgatgtaagact

SEQ ID NO: 648618 - DNA, 19 bp, Mus musculus
  siRNA target sequence for AW240854 (NM_146028.2,898-916).
gcgatgtaagacttgcaaa

SEQ ID NO: 648619 - DNA, 19 bp, Mus musculus
  siRNA target sequence for AW240854 (NM_146028.2,973-991).
gacatccacatcttttcga

SEQ ID NO: 648620 - DNA, 19 bp, Mus musculus
  siRNA target sequence for AW240854 (NM_146028.2,1077-1095).
ggaaggtggacccagttta

SEQ ID NO: 648621 - DNA, 19 bp, Mus musculus
  siRNA target sequence for AW240854 (NM_146028.2,1186-1204).
gcgtgacgagctaacagaa

SEQ ID NO: 648622 - DNA, 19 bp, Mus musculus
  siRNA target sequence for AW240854 (NM_146028.2,1260-1278).
cagctccagcagaaagtga

SEQ ID NO: 648623 - DNA, 19 bp, Mus musculus
  siRNA target sequence for AW240854 (NM_146028.2,1359-1377).
cctacgtcgccctctacaa

SEQ ID NO: 648624 - DNA, 19 bp, Mus musculus
  siRNA target sequence for AW240854 (NM_146028.2,1488-1506).
gcttcttcccagccaattt

SEQ ID NO: 648625 - DNA, 19 bp, Mus musculus
  siRNA target sequence for BC008163 (NM_145553.1,702-720).
caggcactgaccactttgt

SEQ ID NO: 648626 - DNA, 19 bp, Mus musculus
  siRNA target sequence for BC008163 (NM_145553.1,770-788).
catcagaaggatcaaatga

SEQ ID NO: 648627 - DNA, 19 bp, Mus musculus
  siRNA target sequence for BC008163 (NM_145553.1,848-866).
cagactcgggccaaaatga

SEQ ID NO: 648628 - DNA, 19 bp, Mus musculus
  siRNA target sequence for BC008163 (NM_145553.1,854-872).
cgggccaaaatgaaccaaa

SEQ ID NO: 648629 - DNA, 19 bp, Mus musculus
  siRNA target sequence for BC008163 (NM_145553.1,855-873).
gggccaaaatgaaccaaat

SEQ ID NO: 648630 - DNA, 19 bp, Mus musculus
  siRNA target sequence for BC026502 (NM_172287.2,921-939).
gtgccaggaactataagct

SEQ ID NO: 648631 - DNA, 19 bp, Mus musculus
  siRNA target sequence for BC026502 (NM_172287.2,979-997).
gaagaaggacgcacatgaa

SEQ ID NO: 648632 - DNA, 19 bp, Mus musculus
  siRNA target sequence for BC026502 (NM_172287.2,1366-1384).
gaagcgggaccgctctttt

SEQ ID NO: 648633 - DNA, 19 bp, Mus musculus
  siRNA target sequence for BC026502 (NM_172287.2,1854-1872).
cttcctgtagcgtaaagat

SEQ ID NO: 648634 - DNA, 19 bp, Mus musculus
  siRNA target sequence for BC026502 (NM_172287.2,1857-1875).
cctgtagcgtaaagatgaa

SEQ ID NO: 648635 - DNA, 19 bp, Mus musculus
  siRNA target sequence for BC026502 (NM_172287.2,1860-1878).
gtagcgtaaagatgaagat

SEQ ID NO: 648636 - DNA, 19 bp, Mus musculus
  siRNA target sequence for BC026502 (NM_172287.2,1936-1954).
gagggtgccaactaccaaa

SEQ ID NO: 648637 - DNA, 19 bp, Mus musculus
  siRNA target sequence for BC026502 (NM_172287.2,2043-2061).
cccacggctgtgtcctaaa

SEQ ID NO: 648638 - DNA, 19 bp, Mus musculus
  siRNA target sequence for BC026502 (NM_172287.2,2047-2065).
cggctgtgtcctaaaggat

SEQ ID NO: 648639 - DNA, 19 bp, Mus musculus
  siRNA target sequence for BC034753 (NM_146208.1,249-267).
cctcggctgctccaatgaa

SEQ ID NO: 648640 - DNA, 19 bp, Mus musculus
  siRNA target sequence for BC034753 (NM_146208.1,250-268).
ctcggctgctccaatgaat

SEQ ID NO: 648641 - DNA, 19 bp, Mus musculus
  siRNA target sequence for BC034753 (NM_146208.1,292-310).
cttgagactgtttaatgga

SEQ ID NO: 648642 - DNA, 19 bp, Mus musculus
  siRNA target sequence for BC034753 (NM_146208.1,295-313).
gagactgtttaatggatat

SEQ ID NO: 648643 - DNA, 19 bp, Mus musculus
  siRNA target sequence for BC034753 (NM_146208.1,319-337).
cagtggcgtggaaacctta

SEQ ID NO: 648644 - DNA, 19 bp, Mus musculus
  siRNA target sequence for BC034753 (NM_146208.1,358-376).
ctttggccccagagcttta

SEQ ID NO: 648645 - DNA, 19 bp, Mus musculus
  siRNA target sequence for BC034753 (NM_146208.1,367-385).
cagagctttacggattcat

SEQ ID NO: 648646 - DNA, 19 bp, Mus musculus
  siRNA target sequence for BC034753 (NM_146208.1,369-387).
gagctttacggattcattt

SEQ ID NO: 648647 - DNA, 19 bp, Mus musculus
  siRNA target sequence for BC034753 (NM_146208.1,379-397).
gattcatttcggaatgaaa

SEQ ID NO: 648648 - DNA, 19 bp, Mus musculus
  siRNA target sequence for BC034753 (NM_146208.1,394-412).
gaaaggctccatcttgatt

SEQ ID NO: 648649 - DNA, 19 bp, Mus musculus
  siRNA target sequence for BC034753 (NM_146208.1,487-505).
cttctatgactcttcagta

SEQ ID NO: 648650 - DNA, 19 bp, Mus musculus
  siRNA target sequence for BC034753 (NM_146208.1,662-680).
cctggcgtgggcaacatca

SEQ ID NO: 648651 - DNA, 19 bp, Mus musculus
  siRNA target sequence for BC034753 (NM_146208.1,708-726).
gtcttcatccggctgttaa

SEQ ID NO: 648652 - DNA, 19 bp, Mus musculus
  siRNA target sequence for BC034753 (NM_146208.1,722-740).
gttaaggtgtgtcaactat

SEQ ID NO: 648653 - DNA, 19 bp, Mus musculus
  siRNA target sequence for BC034753 (NM_146208.1,793-811).
cttctacaggtgctgtaaa

SEQ ID NO: 648654 - DNA, 19 bp, Mus musculus
  siRNA target sequence for BC034753 (NM_146208.1,796-814).
ctacaggtgctgtaaagca

SEQ ID NO: 648655 - DNA, 19 bp, Mus musculus
  siRNA target sequence for BC034753 (NM_146208.1,828-846).
ctaaacactgtaaggttta

SEQ ID NO: 648656 - DNA, 19 bp, Mus musculus
  siRNA target sequence for BC034753 (NM_146208.1,863-881).
gatcagtgccacagcaaaa

SEQ ID NO: 648657 - DNA, 19 bp, Mus musculus
  siRNA target sequence for BC034753 (NM_146208.1,868-886).
gtgccacagcaaaattact

SEQ ID NO: 648658 - DNA, 19 bp, Mus musculus
  siRNA target sequence for BC034753 (NM_146208.1,870-888).
gccacagcaaaattactgt

SEQ ID NO: 648659 - DNA, 19 bp, Mus musculus
  siRNA target sequence for BC034753 (NM_146208.1,904-922).
gaacagcaggatgacatat

SEQ ID NO: 648660 - DNA, 19 bp, Mus musculus
  siRNA target sequence for BC034753 (NM_146208.1,950-968).
cctcaatgtgttcaagtat

SEQ ID NO: 648661 - DNA, 19 bp, Mus musculus
  siRNA target sequence for BC034753 (NM_146208.1,1008-1026).
ctaggggagaggattgctt

SEQ ID NO: 648662 - DNA, 19 bp, Mus musculus
  siRNA target sequence for BC034753 (NM_146208.1,1070-1088).
gtggtttgtactctcataa

SEQ ID NO: 648663 - DNA, 19 bp, Mus musculus
  siRNA target sequence for BC034753 (NM_146208.1,1147-1165).
gctcaagaatagagaaaat

SEQ ID NO: 648664 - DNA, 19 bp, Mus musculus
  siRNA target sequence for BC034753 (NM_146208.1,1153-1171).
gaatagagaaaattccatt

SEQ ID NO: 648665 - DNA, 19 bp, Mus musculus
  siRNA target sequence for BC034753 (NM_146208.1,1187-1205).
gtgaagtacccttgtaata

SEQ ID NO: 648666 - DNA, 19 bp, Mus musculus
  siRNA target sequence for BC034753 (NM_146208.1,1192-1210).
gtacccttgtaataacttt

SEQ ID NO: 648667 - DNA, 19 bp, Mus musculus
  siRNA target sequence for BC034753 (NM_146208.1,1220-1238).
cacactgaagtaaagatca

SEQ ID NO: 648668 - DNA, 19 bp, Mus musculus
  siRNA target sequence for BC034753 (NM_146208.1,1242-1260).
ggaaaactgcgtttggaaa

SEQ ID NO: 648669 - DNA, 19 bp, Mus musculus
  siRNA target sequence for BC034753 (NM_146208.1,1256-1274).
ggaaatacgacccttgttt

SEQ ID NO: 648670 - DNA, 19 bp, Mus musculus
  siRNA target sequence for BC034753 (NM_146208.1,1257-1275).
gaaatacgacccttgtttt

SEQ ID NO: 648671 - DNA, 19 bp, Mus musculus
  siRNA target sequence for BC034753 (NM_146208.1,1271-1289).
gttttgactgatttaagca

SEQ ID NO: 648672 - DNA, 19 bp, Mus musculus
  siRNA target sequence for BC034753 (NM_146208.1,1320-1338).
gagcaaaccacacaataga

SEQ ID NO: 648673 - DNA, 19 bp, Mus musculus
  siRNA target sequence for BC034753 (NM_146208.1,1332-1350).
caatagatggggaatctca

SEQ ID NO: 648674 - DNA, 19 bp, Mus musculus
  siRNA target sequence for BC034753 (NM_146208.1,1354-1372).
gtttctccctacagacata

SEQ ID NO: 648675 - DNA, 19 bp, Mus musculus
  siRNA target sequence for BC034753 (NM_146208.1,1358-1376).
ctccctacagacataggtt

SEQ ID NO: 648676 - DNA, 19 bp, Mus musculus
  siRNA target sequence for BC034753 (NM_146208.1,1365-1383).
cagacataggttttagtga

SEQ ID NO: 648677 - DNA, 19 bp, Mus musculus
  siRNA target sequence for BC034753 (NM_146208.1,1369-1387).
cataggttttagtgattca

SEQ ID NO: 648678 - DNA, 19 bp, Mus musculus
  siRNA target sequence for BC034753 (NM_146208.1,1422-1440).
ctcaaccatccaataaggt

SEQ ID NO: 648679 - DNA, 19 bp, Mus musculus
  siRNA target sequence for BC034753 (NM_146208.1,1432-1450).
caataaggtaaacatatca

SEQ ID NO: 648680 - DNA, 19 bp, Mus musculus
  siRNA target sequence for BC034753 (NM_146208.1,1455-1473).
cagtttgtgcccagtctaa

SEQ ID NO: 648681 - DNA, 19 bp, Mus musculus
  siRNA target sequence for BC034753 (NM_146208.1,1457-1475).
gtttgtgcccagtctaaat

SEQ ID NO: 648682 - DNA, 19 bp, Mus musculus
  siRNA target sequence for BC034753 (NM_146208.1,1461-1479).
gtgcccagtctaaattatt

SEQ ID NO: 648683 - DNA, 19 bp, Mus musculus
  siRNA target sequence for BC034753 (NM_146208.1,1465-1483).
ccagtctaaattatttagt

SEQ ID NO: 648684 - DNA, 19 bp, Mus musculus
  siRNA target sequence for BC034753 (NM_146208.1,1468-1486).
gtctaaattatttagttca

SEQ ID NO: 648685 - DNA, 19 bp, Mus musculus
  siRNA target sequence for BC034753 (NM_146208.1,1526-1544).
gaacttaaaagttacaact

SEQ ID NO: 648686 - DNA, 19 bp, Mus musculus
  siRNA target sequence for BC034753 (NM_146208.1,1583-1601).
cgtggccatcattccaaaa

SEQ ID NO: 648687 - DNA, 19 bp, Mus musculus
  siRNA target sequence for BC034753 (NM_146208.1,1627-1645).
gcaccaccgccgttgtgtt

SEQ ID NO: 648688 - DNA, 19 bp, Mus musculus
  siRNA target sequence for BC034753 (NM_146208.1,1675-1693).
caaggggaggcagttttat

SEQ ID NO: 648689 - DNA, 19 bp, Mus musculus
  siRNA target sequence for BC034753 (NM_146208.1,1718-1736).
cagtgcggattttttgaat

SEQ ID NO: 648690 - DNA, 19 bp, Mus musculus
  siRNA target sequence for BC034753 (NM_146208.1,1766-1784).
catggcaagcgctccatta

SEQ ID NO: 648691 - DNA, 19 bp, Mus musculus
  siRNA target sequence for BC034753 (NM_146208.1,1771-1789).
caagcgctccattatgaaa

SEQ ID NO: 648692 - DNA, 19 bp, Mus musculus
  siRNA target sequence for BC034753 (NM_146208.1,1776-1794).
gctccattatgaaaactgt

SEQ ID NO: 648693 - DNA, 19 bp, Mus musculus
  siRNA target sequence for BC034753 (NM_146208.1,1795-1813).
gctgaagattggacctaat

SEQ ID NO: 648694 - DNA, 19 bp, Mus musculus
  siRNA target sequence for BC034753 (NM_146208.1,1796-1814).
ctgaagattggacctaata

SEQ ID NO: 648695 - DNA, 19 bp, Mus musculus
  siRNA target sequence for BC034753 (NM_146208.1,1870-1888).
ccagtgggccgaaaatgga

SEQ ID NO: 648696 - DNA, 19 bp, Mus musculus
  siRNA target sequence for BC037651 (NM_173741.2,631-649).
gcaggccgaagcatcttca

SEQ ID NO: 648697 - DNA, 19 bp, Mus musculus
  siRNA target sequence for BC037651 (NM_173741.2,632-650).
caggccgaagcatcttcaa

SEQ ID NO: 648698 - DNA, 19 bp, Mus musculus
  siRNA target sequence for BC037651 (NM_173741.2,636-654).
ccgaagcatcttcaagatt

SEQ ID NO: 648699 - DNA, 19 bp, Mus musculus
  siRNA target sequence for BC037651 (NM_173741.2,678-696).
cgtagagaagctgaattta

SEQ ID NO: 648700 - DNA, 19 bp, Mus musculus
  siRNA target sequence for BC037651 (NM_173741.2,862-880).
cgcacagtgaacaaagtct

SEQ ID NO: 648701 - DNA, 19 bp, Mus musculus
  siRNA target sequence for BC037651 (NM_173741.2,866-884).
cagtgaacaaagtctgttt

SEQ ID NO: 648702 - DNA, 19 bp, Mus musculus
  siRNA target sequence for BC037651 (NM_173741.2,1000-1018).
cgggatgtgcagttcagta

SEQ ID NO: 648703 - DNA, 19 bp, Mus musculus
  siRNA target sequence for BC037651 (NM_173741.2,1014-1032).
cagtatccgtgactacttt

SEQ ID NO: 648704 - DNA, 19 bp, Mus musculus
  siRNA target sequence for BC037651 (NM_173741.2,1181-1199).
gacgtgacaagatggtaaa

SEQ ID NO: 648705 - DNA, 19 bp, Mus musculus
  siRNA target sequence for BC037651 (NM_173741.2,1184-1202).
gtgacaagatggtaaaggt

SEQ ID NO: 648706 - DNA, 19 bp, Mus musculus
  siRNA target sequence for BC037651 (NM_173741.2,1222-1240).
cgtgccaaagagatacact

SEQ ID NO: 648707 - DNA, 19 bp, Mus musculus
  siRNA target sequence for BC037651 (NM_173741.2,1323-1341).
ggaccacaacatctatgta

SEQ ID NO: 648708 - DNA, 19 bp, Mus musculus
  siRNA target sequence for BC037651 (NM_173741.2,1362-1380).
cgtgccagctgctatgttt

SEQ ID NO: 648709 - DNA, 19 bp, Mus musculus
  siRNA target sequence for BC037651 (NM_173741.2,1365-1383).
gccagctgctatgtttgaa

SEQ ID NO: 648710 - DNA, 19 bp, Mus musculus
  siRNA target sequence for BC037651 (NM_173741.2,1555-1573).
gcctttgctgttaaggaaa

SEQ ID NO: 648711 - DNA, 19 bp, Mus musculus
  siRNA target sequence for BC037651 (NM_173741.2,1575-1593).
cctggtggctgctgaatct

SEQ ID NO: 648712 - DNA, 19 bp, Mus musculus
  siRNA target sequence for BC037651 (NM_173741.2,1622-1640).
gccaccccatcttcttcaa

SEQ ID NO: 648713 - DNA, 19 bp, Mus musculus
  siRNA target sequence for BC037651 (NM_173741.2,1685-1703).
gtgcactgagcgtctttga

SEQ ID NO: 648714 - DNA, 19 bp, Mus musculus
  siRNA target sequence for BC037651 (NM_173741.2,1687-1705).
gcactgagcgtctttgaga

SEQ ID NO: 648715 - DNA, 19 bp, Mus musculus
  siRNA target sequence for BC037651 (NM_173741.2,1740-1758).
ggatacagctgaacgttat

SEQ ID NO: 648716 - DNA, 19 bp, Mus musculus
  siRNA target sequence for BC037651 (NM_173741.2,1745-1763).
cagctgaacgttatgttct

SEQ ID NO: 648717 - DNA, 19 bp, Mus musculus
  siRNA target sequence for BC037651 (NM_173741.2,1788-1806).
ctgtgatcacaatgcaaaa

SEQ ID NO: 648718 - DNA, 19 bp, Mus musculus
  siRNA target sequence for BC037651 (NM_173741.2,1790-1808).
gtgatcacaatgcaaaagt

SEQ ID NO: 648719 - DNA, 19 bp, Mus musculus
  siRNA target sequence for BC037651 (NM_173741.2,1847-1865).
ggaccatgttacggattat

SEQ ID NO: 648720 - DNA, 19 bp, Mus musculus
  siRNA target sequence for BC037651 (NM_173741.2,1850-1868).
ccatgttacggattatcta

SEQ ID NO: 648721 - DNA, 19 bp, Mus musculus
  siRNA target sequence for BC037651 (NM_173741.2,1885-1903).
gtatcctctgccaatctca

SEQ ID NO: 648722 - DNA, 19 bp, Mus musculus
  siRNA target sequence for BC037651 (NM_173741.2,1931-1949).
gcggcctaccgctcatgaa

SEQ ID NO: 648723 - DNA, 19 bp, Mus musculus
  siRNA target sequence for BC037651 (NM_173741.2,1933-1951).
ggcctaccgctcatgaaca

SEQ ID NO: 648724 - DNA, 19 bp, Mus musculus
  siRNA target sequence for BC037651 (NM_173741.2,1952-1970).
gcttcaatctgaaggatat

SEQ ID NO: 648725 - DNA, 19 bp, Mus musculus
  siRNA target sequence for BC037651 (NM_173741.2,2061-2079).
cgtcaccaatgaggataat

SEQ ID NO: 648726 - DNA, 19 bp, Mus musculus
  siRNA target sequence for BC037651 (NM_173741.2,2219-2237).
cactgcgccatgaaattgt

SEQ ID NO: 648727 - DNA, 19 bp, Mus musculus
  siRNA target sequence for BC037651 (NM_173741.2,2355-2373).
cgtctcacatgcactctat

SEQ ID NO: 648728 - DNA, 19 bp, Mus musculus
  siRNA target sequence for BC037651 (NM_173741.2,2381-2399).
gcctgccacctgacttctt

SEQ ID NO: 648729 - DNA, 19 bp, Mus musculus
  siRNA target sequence for BC037651 (NM_173741.2,2526-2544).
ctggtacacatcctacata

SEQ ID NO: 648730 - DNA, 19 bp, Mus musculus
  siRNA target sequence for BC037651 (NM_173741.2,2528-2546).
ggtacacatcctacataga

SEQ ID NO: 648731 - DNA, 19 bp, Mus musculus
  siRNA target sequence for BC037651 (NM_173741.2,2529-2547).
gtacacatcctacatagat

SEQ ID NO: 648732 - DNA, 19 bp, Mus musculus
  siRNA target sequence for BC037651 (NM_173741.2,2797-2815).
cttcagcacatcatgaaat

SEQ ID NO: 648733 - DNA, 19 bp, Mus musculus
  siRNA target sequence for BC037651 (NM_173741.2,2849-2867).
gcggccacctctgtgaata

SEQ ID NO: 648734 - DNA, 19 bp, Mus musculus
  siRNA target sequence for C87860 (NM_133787.1,137-155).
gaatgtggtgtcccaatta

SEQ ID NO: 648735 - DNA, 19 bp, Mus musculus
  siRNA target sequence for C87860 (NM_133787.1,158-176).
ccaaatcctgccaatattt

SEQ ID NO: 648736 - DNA, 19 bp, Mus musculus
  siRNA target sequence for C87860 (NM_133787.1,181-199).
ggcctgtttacgaagtaaa

SEQ ID NO: 648737 - DNA, 19 bp, Mus musculus
  siRNA target sequence for C87860 (NM_133787.1,186-204).
gtttacgaagtaaagttga

SEQ ID NO: 648738 - DNA, 19 bp, Mus musculus
  siRNA target sequence for C87860 (NM_133787.1,221-239).
ccaaagcaggtctccattt

SEQ ID NO: 648739 - DNA, 19 bp, Mus musculus
  siRNA target sequence for C87860 (NM_133787.1,285-303).
gggtacagtgtgctttaga

SEQ ID NO: 648740 - DNA, 19 bp, Mus musculus
  siRNA target sequence for C87860 (NM_133787.1,287-305).
gtacagtgtgctttagagt

SEQ ID NO: 648741 - DNA, 19 bp, Mus musculus
  siRNA target sequence for C87860 (NM_133787.1,387-405).
ggactgagccccattccaa

SEQ ID NO: 648742 - DNA, 19 bp, Mus musculus
  siRNA target sequence for C87860 (NM_133787.1,396-414).
cccattccaagagacttaa

SEQ ID NO: 648743 - DNA, 19 bp, Mus musculus
  siRNA target sequence for C87860 (NM_133787.1,397-415).
ccattccaagagacttaaa

SEQ ID NO: 648744 - DNA, 19 bp, Mus musculus
  siRNA target sequence for C87860 (NM_133787.1,553-571).
ccaagtcaggcaaaagact

SEQ ID NO: 648745 - DNA, 19 bp, Mus musculus
  siRNA target sequence for C87860 (NM_133787.1,596-614).
ctggaacagttgattttaa

SEQ ID NO: 648746 - DNA, 19 bp, Mus musculus
  siRNA target sequence for C87860 (NM_133787.1,640-658).
gcgtatcaaggagattcat

SEQ ID NO: 648747 - DNA, 19 bp, Mus musculus
  siRNA target sequence for C87860 (NM_133787.1,642-660).
gtatcaaggagattcatga

SEQ ID NO: 648748 - DNA, 19 bp, Mus musculus
  siRNA target sequence for C87860 (NM_133787.1,722-740).
ggtatagttccctgtagat

SEQ ID NO: 648749 - DNA, 19 bp, Mus musculus
  siRNA target sequence for C87860 (NM_133787.1,723-741).
gtatagttccctgtagata

SEQ ID NO: 648750 - DNA, 19 bp, Mus musculus
  siRNA target sequence for C87860 (NM_133787.1,765-783).
ctcaggatattcatagtaa

SEQ ID NO: 648751 - DNA, 19 bp, Mus musculus
  siRNA target sequence for C87860 (NM_133787.1,767-785).
caggatattcatagtaaca

SEQ ID NO: 648752 - DNA, 19 bp, Mus musculus
  siRNA target sequence for C87860 (NM_133787.1,769-787).
ggatattcatagtaacaca

SEQ ID NO: 648753 - DNA, 19 bp, Mus musculus
  siRNA target sequence for C87860 (NM_133787.1,770-788).
gatattcatagtaacacat

SEQ ID NO: 648754 - DNA, 19 bp, Mus musculus
  siRNA target sequence for C87860 (NM_133787.1,780-798).
gtaacacatacaattacaa

SEQ ID NO: 648755 - DNA, 19 bp, Mus musculus
  siRNA target sequence for C87860 (NM_133787.1,812-830).
gtggaaattgttccaatat

SEQ ID NO: 648756 - DNA, 19 bp, Mus musculus
  siRNA target sequence for C87860 (NM_133787.1,815-833).
gaaattgttccaatatgca

SEQ ID NO: 648757 - DNA, 19 bp, Mus musculus
  siRNA target sequence for C87860 (NM_133787.1,821-839).
gttccaatatgcaaggata

SEQ ID NO: 648758 - DNA, 19 bp, Mus musculus
  siRNA target sequence for C87860 (NM_133787.1,836-854).
gataatgttgtctgtctat

SEQ ID NO: 648759 - DNA, 19 bp, Mus musculus
  siRNA target sequence for C87860 (NM_133787.1,878-896).
ggaaatatgagtcagatat

SEQ ID NO: 648760 - DNA, 19 bp, Mus musculus
  siRNA target sequence for C87860 (NM_133787.1,937-955).
cccaaataccctacaagtt

SEQ ID NO: 648761 - DNA, 19 bp, Mus musculus
  siRNA target sequence for C87860 (NM_133787.1,959-977).
gatattgatggaaacactt

SEQ ID NO: 648762 - DNA, 19 bp, Mus musculus
  siRNA target sequence for C87860 (NM_133787.1,979-997).
ctggagtcatcctttcaat

SEQ ID NO: 648763 - DNA, 19 bp, Mus musculus
  siRNA target sequence for C87860 (NM_133787.1,982-1000).
gagtcatcctttcaatagt

SEQ ID NO: 648764 - DNA, 19 bp, Mus musculus
  siRNA target sequence for C87860 (NM_133787.1,984-1002).
gtcatcctttcaatagttt

SEQ ID NO: 648765 - DNA, 19 bp, Mus musculus
  siRNA target sequence for C87860 (NM_133787.1,1021-1039).
cgaagagtttattgtgata

SEQ ID NO: 648766 - DNA, 19 bp, Mus musculus
  siRNA target sequence for C87860 (NM_133787.1,1083-1101).
gagtgatatcaaaaaagca

SEQ ID NO: 648767 - DNA, 19 bp, Mus musculus
  siRNA target sequence for C87860 (NM_133787.1,1174-1192).
cttgggacatcttttaaat

SEQ ID NO: 648768 - DNA, 19 bp, Mus musculus
  siRNA target sequence for C87860 (NM_133787.1,1177-1195).
gggacatcttttaaatcct

SEQ ID NO: 648769 - DNA, 19 bp, Mus musculus
  siRNA target sequence for C87860 (NM_133787.1,1222-1240).
ggccaactgtaacttaaat

SEQ ID NO: 648770 - DNA, 19 bp, Mus musculus
  siRNA target sequence for C87860 (NM_133787.1,1224-1242).
ccaactgtaacttaaatga

SEQ ID NO: 648771 - DNA, 19 bp, Mus musculus
  siRNA target sequence for C87860 (NM_133787.1,1230-1248).
gtaacttaaatgatgagta

SEQ ID NO: 648772 - DNA, 19 bp, Mus musculus
  siRNA target sequence for C87860 (NM_133787.1,1274-1292).
gttccagatgtggtgttaa

SEQ ID NO: 648773 - DNA, 19 bp, Mus musculus
  siRNA target sequence for C87860 (NM_133787.1,1280-1298).
gatgtggtgttaattaaga

SEQ ID NO: 648774 - DNA, 19 bp, Mus musculus
  siRNA target sequence for C87860 (NM_133787.1,1283-1301).
gtggtgttaattaagaaga

SEQ ID NO: 648775 - DNA, 19 bp, Mus musculus
  siRNA target sequence for C87860 (NM_133787.1,1319-1337).
cgccagcgccgtagaaact

SEQ ID NO: 648776 - DNA, 19 bp, Mus musculus
  siRNA target sequence for C87860 (NM_133787.1,1499-1517).
gaaggagcacctcgaatta

SEQ ID NO: 648777 - DNA, 19 bp, Mus musculus
  siRNA target sequence for C87860 (NM_133787.1,1503-1521).
gagcacctcgaattagtct

SEQ ID NO: 648778 - DNA, 19 bp, Mus musculus
  siRNA target sequence for C87860 (NM_133787.1,1571-1589).
gaaggtgcatcaatgatgt

SEQ ID NO: 648779 - DNA, 19 bp, Mus musculus
  siRNA target sequence for C87860 (NM_133787.1,1574-1592).
ggtgcatcaatgatgtcat

SEQ ID NO: 648780 - DNA, 19 bp, Mus musculus
  siRNA target sequence for Cyc1 (NM_025567.1,262-280).
ctagctgtggcccttcatt

SEQ ID NO: 648781 - DNA, 19 bp, Mus musculus
  siRNA target sequence for Cyc1 (NM_025567.1,410-428).
cctgccacagcatggatta

SEQ ID NO: 648782 - DNA, 19 bp, Mus musculus
  siRNA target sequence for Cyc1 (NM_025567.1,504-522).
ccaggatggccctaatgat

SEQ ID NO: 648783 - DNA, 19 bp, Mus musculus
  siRNA target sequence for Cyc1 (NM_025567.1,507-525).
ggatggccctaatgatgat

SEQ ID NO: 648784 - DNA, 19 bp, Mus musculus
  siRNA target sequence for Cyc1 (NM_025567.1,547-565).
gggaagttgtctgactatt

SEQ ID NO: 648785 - DNA, 19 bp, Mus musculus
  siRNA target sequence for Cyc1 (NM_025567.1,548-566).
ggaagttgtctgactattt

SEQ ID NO: 648786 - DNA, 19 bp, Mus musculus
  siRNA target sequence for Cyc1 (NM_025567.1,559-577).
gactattttccaaaaccat

SEQ ID NO: 648787 - DNA, 19 bp, Mus musculus
  siRNA target sequence for Cyc1 (NM_025567.1,658-676).
ggtggtgaggactacgtat

SEQ ID NO: 648788 - DNA, 19 bp, Mus musculus
  siRNA target sequence for Cyc1 (NM_025567.1,659-677).
gtggtgaggactacgtatt

SEQ ID NO: 648789 - DNA, 19 bp, Mus musculus
  siRNA target sequence for Cyc1 (NM_025567.1,661-679).
ggtgaggactacgtatttt

SEQ ID NO: 648790 - DNA, 19 bp, Mus musculus
  siRNA target sequence for Cyc1 (NM_025567.1,724-742).
cgagaaggcctctatttca

SEQ ID NO: 648791 - DNA, 19 bp, Mus musculus
  siRNA target sequence for Cyc1 (NM_025567.1,735-753).
ctatttcaacccttacttt

SEQ ID NO: 648792 - DNA, 19 bp, Mus musculus
  siRNA target sequence for Cyc1 (NM_025567.1,881-899).
cagagcatgaccatcgaaa

SEQ ID NO: 648793 - DNA, 19 bp, Mus musculus
  siRNA target sequence for Cyc1 (NM_025567.1,901-919).
cgcatgggtctcaagatgt

SEQ ID NO: 648794 - DNA, 19 bp, Mus musculus
  siRNA target sequence for Cyc1 (NM_025567.1,902-920).
gcatgggtctcaagatgtt

SEQ ID NO: 648795 - DNA, 19 bp, Mus musculus
  siRNA target sequence for Cyc1 (NM_025567.1,907-925).
ggtctcaagatgttgttga

SEQ ID NO: 648796 - DNA, 19 bp, Mus musculus
  siRNA target sequence for Cyc1 (NM_025567.1,908-926).
gtctcaagatgttgttgat

SEQ ID NO: 648797 - DNA, 19 bp, Mus musculus
  siRNA target sequence for Cyc1 (NM_025567.1,955-973).
gccatgaagcggcataagt

SEQ ID NO: 648798 - DNA, 19 bp, Mus musculus
  siRNA target sequence for Cyct (NM_009989.1,294-312).
cctctttggtcgaaagaca

SEQ ID NO: 648799 - DNA, 19 bp, Mus musculus
  siRNA target sequence for Cyct (NM_009989.1,396-414).
ggagaacccgaagaaatat

SEQ ID NO: 648800 - DNA, 19 bp, Mus musculus
  siRNA target sequence for Cyct (NM_009989.1,397-415).
gagaacccgaagaaatata

SEQ ID NO: 648801 - DNA, 19 bp, Mus musculus
  siRNA target sequence for Cyct (NM_009989.1,458-476).
gtgagagagaagatctcat

SEQ ID NO: 648802 - DNA, 19 bp, Mus musculus
  siRNA target sequence for D030051N19Rik (NM_172669.2,451-469).
cacgctcgaccttcttact

SEQ ID NO: 648803 - DNA, 19 bp, Mus musculus
  siRNA target sequence for D030051N19Rik (NM_172669.2,507-525).
catgtgaaccataacatct

SEQ ID NO: 648804 - DNA, 19 bp, Mus musculus
  siRNA target sequence for D030051N19Rik (NM_172669.2,510-528).
gtgaaccataacatctata

SEQ ID NO: 648805 - DNA, 19 bp, Mus musculus
  siRNA target sequence for D030051N19Rik (NM_172669.2,586-604).
catggtgtgtcacttttca

SEQ ID NO: 648806 - DNA, 19 bp, Mus musculus
  siRNA target sequence for D030051N19Rik (NM_172669.2,733-751).
ctacggctcagcttctact

SEQ ID NO: 648807 - DNA, 19 bp, Mus musculus
  siRNA target sequence for D030051N19Rik (NM_172669.2,736-754).
cggctcagcttctactaat

SEQ ID NO: 648808 - DNA, 19 bp, Mus musculus
  siRNA target sequence for D030051N19Rik (NM_172669.2,760-778).
ctgcaaatgagatccattt

SEQ ID NO: 648809 - DNA, 19 bp, Mus musculus
  siRNA target sequence for D030051N19Rik (NM_172669.2,838-856).
gtgtccgcctggtgagatt

SEQ ID NO: 648810 - DNA, 19 bp, Mus musculus
  siRNA target sequence for D030051N19Rik (NM_172669.2,862-880).
cacttggacactacttact

SEQ ID NO: 648811 - DNA, 19 bp, Mus musculus
  siRNA target sequence for D030051N19Rik (NM_172669.2,864-882).
cttggacactacttactta

SEQ ID NO: 648812 - DNA, 19 bp, Mus musculus
  siRNA target sequence for D030051N19Rik (NM_172669.2,875-893).
cttacttacagctattgtt

SEQ ID NO: 648813 - DNA, 19 bp, Mus musculus
  siRNA target sequence for D030051N19Rik (NM_172669.2,913-931).
gtgatgacgaaccagaaat

SEQ ID NO: 648814 - DNA, 19 bp, Mus musculus
  siRNA target sequence for D030051N19Rik (NM_172669.2,1138-1156).
ccaggacttccgcttacat

SEQ ID NO: 648815 - DNA, 19 bp, Mus musculus
  siRNA target sequence for D030051N19Rik (NM_172669.2,1302-1320).
gctactaccccttcctttt

SEQ ID NO: 648816 - DNA, 19 bp, Mus musculus
  siRNA target sequence for D030051N19Rik (NM_172669.2,1500-1518).
cacccttctaggtatcaca

SEQ ID NO: 648817 - DNA, 19 bp, Mus musculus
  siRNA target sequence for D030051N19Rik (NM_172669.2,1582-1600).
gttctgaggtagaatctat

SEQ ID NO: 648818 - DNA, 19 bp, Mus musculus
  siRNA target sequence for D030051N19Rik (NM_172669.2,1622-1640).
ctcctcagtgagtttgctt

SEQ ID NO: 648819 - DNA, 19 bp, Mus musculus
  siRNA target sequence for D030051N19Rik (NM_172669.2,1800-1818).
gacctgagacgcttctttt

SEQ ID NO: 648820 - DNA, 19 bp, Mus musculus
  siRNA target sequence for D030051N19Rik (NM_172669.2,1898-1916).
caacaataatattgaatct

SEQ ID NO: 648821 - DNA, 19 bp, Mus musculus
  siRNA target sequence for D030051N19Rik (NM_172669.2,1950-1968).
cacagcagtgagaacaact

SEQ ID NO: 648822 - DNA, 19 bp, Mus musculus
  siRNA target sequence for D030051N19Rik (NM_172669.2,1999-2017).
gccgtgcttgccataatct

SEQ ID NO: 648823 - DNA, 19 bp, Mus musculus
  siRNA target sequence for D030051N19Rik (NM_172669.2,2004-2022).
gcttgccataatcttctaa

SEQ ID NO: 648824 - DNA, 19 bp, Mus musculus
  siRNA target sequence for D030051N19Rik (NM_172669.2,2008-2026).
gccataatcttctaacctt

SEQ ID NO: 648825 - DNA, 19 bp, Mus musculus
  siRNA target sequence for D030051N19Rik (NM_172669.2,2096-2114).
gcacgtctccactaccttt

SEQ ID NO: 648826 - DNA, 19 bp, Mus musculus
  siRNA target sequence for D030051N19Rik (NM_172669.2,2201-2219).
cagctctgctagttcacaa

SEQ ID NO: 648827 - DNA, 19 bp, Mus musculus
  siRNA target sequence for D030051N19Rik (NM_172669.2,2260-2278).
gccactgggaacgcattta

SEQ ID NO: 648828 - DNA, 19 bp, Mus musculus
  siRNA target sequence for D030051N19Rik (NM_172669.2,2261-2279).
ccactgggaacgcatttat

SEQ ID NO: 648829 - DNA, 19 bp, Mus musculus
  siRNA target sequence for D030051N19Rik (NM_172669.2,2312-2330).
ggaggccttacatcaagat

SEQ ID NO: 648830 - DNA, 19 bp, Mus musculus
  siRNA target sequence for D030051N19Rik (NM_172669.2,2313-2331).
gaggccttacatcaagata

SEQ ID NO: 648831 - DNA, 19 bp, Mus musculus
  siRNA target sequence for D030051N19Rik (NM_172669.2,2379-2397).
gagtcttccctcatttcat

SEQ ID NO: 648832 - DNA, 19 bp, Mus musculus
  siRNA target sequence for D030051N19Rik (NM_172669.2,2422-2440).
ccagagagcacccaattta

SEQ ID NO: 648833 - DNA, 19 bp, Mus musculus
  siRNA target sequence for D030051N19Rik (NM_172669.2,2530-2548).
ccatgcgctaccaacagaa

SEQ ID NO: 648834 - DNA, 19 bp, Mus musculus
  siRNA target sequence for D030051N19Rik (NM_172669.2,2669-2687).
ccgaaatgcccgaatgtct

SEQ ID NO: 648835 - DNA, 19 bp, Mus musculus
  siRNA target sequence for D030051N19Rik (NM_172669.2,2692-2710).
cttcacttggacgatttgt

SEQ ID NO: 648836 - DNA, 19 bp, Mus musculus
  siRNA target sequence for D11Ertd672e (NM_026559.2,134-152).
catgagggcaagaccattt

SEQ ID NO: 648837 - DNA, 19 bp, Mus musculus
  siRNA target sequence for D11Ertd672e (NM_026559.2,156-174).
cctacttcagcggttctaa

SEQ ID NO: 648838 - DNA, 19 bp, Mus musculus
  siRNA target sequence for D11Ertd672e (NM_026559.2,160-178).
cttcagcggttctaaggat

SEQ ID NO: 648839 - DNA, 19 bp, Mus musculus
  siRNA target sequence for D11Ertd672e (NM_026559.2,252-270).
ccgaagactgtgtgttcat

SEQ ID NO: 648840 - DNA, 19 bp, Mus musculus
  siRNA target sequence for D11Ertd672e (NM_026559.2,257-275).
gactgtgtgttcatctact

SEQ ID NO: 648841 - DNA, 19 bp, Mus musculus
  siRNA target sequence for D11Ertd672e (NM_026559.2,343-361).
cgcagtgcctacactactt

SEQ ID NO: 648842 - DNA, 19 bp, Mus musculus
  siRNA target sequence for D19Wsu162e (NM_146099.1,455-473).
ctttgctacctccttatga

SEQ ID NO: 648843 - DNA, 19 bp, Mus musculus
  siRNA target sequence for D19Wsu162e (NM_146099.1,952-970).
gacgatgacctcaaagagt

SEQ ID NO: 648844 - DNA, 19 bp, Mus musculus
  siRNA target sequence for D19Wsu162e (NM_146099.1,969-987).
gtttaacacgctcatagat

SEQ ID NO: 648845 - DNA, 19 bp, Mus musculus
  siRNA target sequence for D19Wsu162e (NM_146099.1,1121-1139).
ctgcgtgtctgctgctaaa

SEQ ID NO: 648846 - DNA, 19 bp, Mus musculus
  siRNA target sequence for D19Wsu162e (NM_146099.1,1123-1141).
gcgtgtctgctgctaaaca

SEQ ID NO: 648847 - DNA, 19 bp, Mus musculus
  siRNA target sequence for D4Ertd196e (NM_025667.1,119-137).
ctcggatggcggaagtaga

SEQ ID NO: 648848 - DNA, 19 bp, Mus musculus
  siRNA target sequence for D4Ertd196e (NM_025667.1,121-139).
cggatggcggaagtagaaa

SEQ ID NO: 648849 - DNA, 19 bp, Mus musculus
  siRNA target sequence for D4Ertd196e (NM_025667.1,179-197).
ggtccggtggcgttgtcat

SEQ ID NO: 648850 - DNA, 19 bp, Mus musculus
  siRNA target sequence for D4Ertd196e (NM_025667.1,246-264).
ccggtgctcacgtggtttt

SEQ ID NO: 648851 - DNA, 19 bp, Mus musculus
  siRNA target sequence for D4Ertd196e (NM_025667.1,247-265).
cggtgctcacgtggttttt

SEQ ID NO: 648852 - DNA, 19 bp, Mus musculus
  siRNA target sequence for D4Ertd196e (NM_025667.1,317-335).
cttcgctggcccctatttt

SEQ ID NO: 648853 - DNA, 19 bp, Mus musculus
  siRNA target sequence for D4Ertd196e (NM_025667.1,320-338).
cgctggcccctattttgtt

SEQ ID NO: 648854 - DNA, 19 bp, Mus musculus
  siRNA target sequence for D4Ertd196e (NM_025667.1,405-423).
gcgagtgggcccaatgcat

SEQ ID NO: 648855 - DNA, 19 bp, Mus musculus
  siRNA target sequence for D4Ertd196e (NM_025667.1,440-458).
cgatgcctccgaagagtat

SEQ ID NO: 648856 - DNA, 19 bp, Mus musculus
  siRNA target sequence for D4Ertd196e (NM_025667.1,441-459).
gatgcctccgaagagtata

SEQ ID NO: 648857 - DNA, 19 bp, Mus musculus
  siRNA target sequence for D4Ertd196e (NM_025667.1,462-480).
caccgaatgcacaatctct

SEQ ID NO: 648858 - DNA, 19 bp, Mus musculus
  siRNA target sequence for D4Ertd196e (NM_025667.1,522-540).
ctgatgcgttacaacaaca

SEQ ID NO: 648859 - DNA, 19 bp, Mus musculus
  siRNA target sequence for D4Ertd196e (NM_025667.1,578-596).
cctcatttatgggaagtat

SEQ ID NO: 648860 - DNA, 19 bp, Mus musculus
  siRNA target sequence for D4Ertd196e (NM_025667.1,661-679).
ccgtcagtctcgtcttcaa

SEQ ID NO: 648861 - DNA, 19 bp, Mus musculus
  siRNA target sequence for D4Ertd196e (NM_025667.1,662-680).
cgtcagtctcgtcttcaat

SEQ ID NO: 648862 - DNA, 19 bp, Mus musculus
  siRNA target sequence for D530025J19Rik (NM_175646.2,175-193).
gtagaccaggcgatcaaaa

SEQ ID NO: 648863 - DNA, 19 bp, Mus musculus
  siRNA target sequence for D530025J19Rik (NM_175646.2,278-296).
cttcagccgacctgagtaa

SEQ ID NO: 648864 - DNA, 19 bp, Mus musculus
  siRNA target sequence for D530025J19Rik (NM_175646.2,281-299).
cagccgacctgagtaaaat

SEQ ID NO: 648865 - DNA, 19 bp, Mus musculus
  siRNA target sequence for D530025J19Rik (NM_175646.2,325-343).
gaccacacgccggtttaca

SEQ ID NO: 648866 - DNA, 19 bp, Mus musculus
  siRNA target sequence for D530025J19Rik (NM_175646.2,327-345).
ccacacgccggtttacaca

SEQ ID NO: 648867 - DNA, 19 bp, Mus musculus
  siRNA target sequence for D530025J19Rik (NM_175646.2,333-351).
gccggtttacacacagtat

SEQ ID NO: 648868 - DNA, 19 bp, Mus musculus
  siRNA target sequence for D530025J19Rik (NM_175646.2,334-352).
ccggtttacacacagtatt

SEQ ID NO: 648869 - DNA, 19 bp, Mus musculus
  siRNA target sequence for D530025J19Rik (NM_175646.2,335-353).
cggtttacacacagtattt

SEQ ID NO: 648870 - DNA, 19 bp, Mus musculus
  siRNA target sequence for D530025J19Rik (NM_175646.2,366-384).
cattccctctaccgtattt

SEQ ID NO: 648871 - DNA, 19 bp, Mus musculus
  siRNA target sequence for D530025J19Rik (NM_175646.2,371-389).
cctctaccgtatttttctt

SEQ ID NO: 648872 - DNA, 19 bp, Mus musculus
  siRNA target sequence for D530025J19Rik (NM_175646.2,419-437).
ggtctccggatcacactaa

SEQ ID NO: 648873 - DNA, 19 bp, Mus musculus
  siRNA target sequence for D530025J19Rik (NM_175646.2,420-438).
gtctccggatcacactaaa

SEQ ID NO: 648874 - DNA, 19 bp, Mus musculus
  siRNA target sequence for D530025J19Rik (NM_175646.2,422-440).
ctccggatcacactaaatt

SEQ ID NO: 648875 - DNA, 19 bp, Mus musculus
  siRNA target sequence for D530025J19Rik (NM_175646.2,425-443).
cggatcacactaaattcgt

SEQ ID NO: 648876 - DNA, 19 bp, Mus musculus
  siRNA target sequence for D530025J19Rik (NM_175646.2,426-444).
ggatcacactaaattcgta

SEQ ID NO: 648877 - DNA, 19 bp, Mus musculus
  siRNA target sequence for D530025J19Rik (NM_175646.2,500-518).
gagcgatgaggggaaaact

SEQ ID NO: 648878 - DNA, 19 bp, Mus musculus
  siRNA target sequence for D530025J19Rik (NM_175646.2,502-520).
gcgatgaggggaaaactta

SEQ ID NO: 648879 - DNA, 19 bp, Mus musculus
  siRNA target sequence for D530025J19Rik (NM_175646.2,503-521).
cgatgaggggaaaacttat

SEQ ID NO: 648880 - DNA, 19 bp, Mus musculus
  siRNA target sequence for D530025J19Rik (NM_175646.2,504-522).
gatgaggggaaaacttatt

SEQ ID NO: 648881 - DNA, 19 bp, Mus musculus
  siRNA target sequence for D530025J19Rik (NM_175646.2,542-560).
ccaagaacgtgcccaaata

SEQ ID NO: 648882 - DNA, 19 bp, Mus musculus
  siRNA target sequence for D530025J19Rik (NM_175646.2,543-561).
caagaacgtgcccaaatat

SEQ ID NO: 648883 - DNA, 19 bp, Mus musculus
  siRNA target sequence for D530025J19Rik (NM_175646.2,564-582).
cctcctctatcaagacatt

SEQ ID NO: 648884 - DNA, 19 bp, Mus musculus
  siRNA target sequence for D630042P16Rik (NM_175525.2,116-134).
gggttgcccagctatgact

SEQ ID NO: 648885 - DNA, 19 bp, Mus musculus
  siRNA target sequence for D630042P16Rik (NM_175525.2,150-168).
gtgaaaggcaggtcttctt

SEQ ID NO: 648886 - DNA, 19 bp, Mus musculus
  siRNA target sequence for D630042P16Rik (NM_175525.2,411-429).
catttcagcctgtaaccaa

SEQ ID NO: 648887 - DNA, 19 bp, Mus musculus
  siRNA target sequence for D630042P16Rik (NM_175525.2,487-505).
ccaggtgcctccgatgttt

SEQ ID NO: 648888 - DNA, 19 bp, Mus musculus
  siRNA target sequence for D630042P16Rik (NM_175525.2,543-561).
ccctggtcaaggaatgtca

SEQ ID NO: 648889 - DNA, 19 bp, Mus musculus
  siRNA target sequence for D630042P16Rik (NM_175525.2,572-590).
gggcgtggtcgctacaagt

SEQ ID NO: 648890 - DNA, 19 bp, Mus musculus
  siRNA target sequence for D630042P16Rik (NM_175525.2,776-794).
gtccagctggtcatcatgt

SEQ ID NO: 648891 - DNA, 19 bp, Mus musculus
  siRNA target sequence for Dtna (NM_010087.1,3-21).
gattgaagatagtggaaaa

SEQ ID NO: 648892 - DNA, 19 bp, Mus musculus
  siRNA target sequence for Dtna (NM_010087.1,113-131).
catgcaagctgagatttgt

SEQ ID NO: 648893 - DNA, 19 bp, Mus musculus
  siRNA target sequence for Dtna (NM_010087.1,167-185).
ggaacgtcattgaagcatt

SEQ ID NO: 648894 - DNA, 19 bp, Mus musculus
  siRNA target sequence for Dtna (NM_010087.1,186-204).
gcgcgaaaacgctttgaat

SEQ ID NO: 648895 - DNA, 19 bp, Mus musculus
  siRNA target sequence for Dtna (NM_010087.1,187-205).
cgcgaaaacgctttgaata

SEQ ID NO: 648896 - DNA, 19 bp, Mus musculus
  siRNA target sequence for Dtna (NM_010087.1,188-206).
gcgaaaacgctttgaataa

SEQ ID NO: 648897 - DNA, 19 bp, Mus musculus
  siRNA target sequence for Dtna (NM_010087.1,246-264).
ggcggtgctctccactatt

SEQ ID NO: 648898 - DNA, 19 bp, Mus musculus
  siRNA target sequence for Dtna (NM_010087.1,247-265).
gcggtgctctccactattt

SEQ ID NO: 648899 - DNA, 19 bp, Mus musculus
  siRNA target sequence for Dtna (NM_010087.1,248-266).
cggtgctctccactatttt

SEQ ID NO: 648900 - DNA, 19 bp, Mus musculus
  siRNA target sequence for Dtna (NM_010087.1,249-267).
ggtgctctccactattttt

SEQ ID NO: 648901 - DNA, 19 bp, Mus musculus
  siRNA target sequence for Dtna (NM_010087.1,290-308).
caaccactcaccaaatcca

SEQ ID NO: 648902 - DNA, 19 bp, Mus musculus
  siRNA target sequence for Dtna (NM_010087.1,381-399).
ctcagtatttgctgtcaaa

SEQ ID NO: 648903 - DNA, 19 bp, Mus musculus
  siRNA target sequence for Dtna (NM_010087.1,429-447).
gatcatggacaagttaaga

SEQ ID NO: 648904 - DNA, 19 bp, Mus musculus
  siRNA target sequence for Dtna (NM_010087.1,473-491).
ccagtggagtgatggtata

SEQ ID NO: 648905 - DNA, 19 bp, Mus musculus
  siRNA target sequence for Dtna (NM_010087.1,478-496).
ggagtgatggtatatggaa

SEQ ID NO: 648906 - DNA, 19 bp, Mus musculus
  siRNA target sequence for Dtna (NM_010087.1,601-619).
cagaaaaaggtcaccttaa

SEQ ID NO: 648907 - DNA, 19 bp, Mus musculus
  siRNA target sequence for Dtna (NM_010087.1,603-621).
gaaaaaggtcaccttaaat

SEQ ID NO: 648908 - DNA, 19 bp, Mus musculus
  siRNA target sequence for Dtna (NM_010087.1,687-705).
ccgactggcaaatgtagaa

SEQ ID NO: 648909 - DNA, 19 bp, Mus musculus
  siRNA target sequence for Dtna (NM_010087.1,688-706).
cgactggcaaatgtagaaa

SEQ ID NO: 648910 - DNA, 19 bp, Mus musculus
  siRNA target sequence for Dtna (NM_010087.1,689-707).
gactggcaaatgtagaaaa

SEQ ID NO: 648911 - DNA, 19 bp, Mus musculus
  siRNA target sequence for Dtna (NM_010087.1,773-791).
gtcaacagtgtcacaacta

SEQ ID NO: 648912 - DNA, 19 bp, Mus musculus
  siRNA target sequence for Dtna (NM_010087.1,823-841).
catgcaggaggttctcata

SEQ ID NO: 648913 - DNA, 19 bp, Mus musculus
  siRNA target sequence for Dtna (NM_010087.1,862-880).
gagtatacgtcgtggaaat

SEQ ID NO: 648914 - DNA, 19 bp, Mus musculus
  siRNA target sequence for Dtna (NM_010087.1,864-882).
gtatacgtcgtggaaatca

SEQ ID NO: 648915 - DNA, 19 bp, Mus musculus
  siRNA target sequence for Dtna (NM_010087.1,884-902).
ctgctaagaagctaacgaa

SEQ ID NO: 648916 - DNA, 19 bp, Mus musculus
  siRNA target sequence for Dtna (NM_010087.1,891-909).
gaagctaacgaatgcatta

SEQ ID NO: 648917 - DNA, 19 bp, Mus musculus
  siRNA target sequence for Dtna (NM_010087.1,895-913).
ctaacgaatgcattaagca

SEQ ID NO: 648918 - DNA, 19 bp, Mus musculus
  siRNA target sequence for Dtna (NM_010087.1,929-947).
cttcaagccgtgaaccttt

SEQ ID NO: 648919 - DNA, 19 bp, Mus musculus
  siRNA target sequence for Dtnb (NM_007886.1,168-186).
gaagaggcagctcttcata

SEQ ID NO: 648920 - DNA, 19 bp, Mus musculus
  siRNA target sequence for Dtnb (NM_007886.1,187-205).
gaaatgcgtgctcagaatt

SEQ ID NO: 648921 - DNA, 19 bp, Mus musculus
  siRNA target sequence for Dtnb (NM_007886.1,192-210).
gcgtgctcagaattttgat

SEQ ID NO: 648922 - DNA, 19 bp, Mus musculus
  siRNA target sequence for Dtnb (NM_007886.1,194-212).
gtgctcagaattttgatgt

SEQ ID NO: 648923 - DNA, 19 bp, Mus musculus
  siRNA target sequence for Dtnb (NM_007886.1,208-226).
gatgtcatacgactatcaa

SEQ ID NO: 648924 - DNA, 19 bp, Mus musculus
  siRNA target sequence for Dtnb (NM_007886.1,236-254).
cagcttgcaagttacgatt

SEQ ID NO: 648925 - DNA, 19 bp, Mus musculus
  siRNA target sequence for Dtnb (NM_007886.1,242-260).
gcaagttacgatttgtaca

SEQ ID NO: 648926 - DNA, 19 bp, Mus musculus
  siRNA target sequence for Dtnb (NM_007886.1,264-282).
gcgatgcaaccttcatctt

SEQ ID NO: 648927 - DNA, 19 bp, Mus musculus
  siRNA target sequence for Dtnb (NM_007886.1,266-284).
gatgcaaccttcatcttgt

SEQ ID NO: 648928 - DNA, 19 bp, Mus musculus
  siRNA target sequence for Dtnb (NM_007886.1,293-311).
ggaatatgatcgaagcttt

SEQ ID NO: 648929 - DNA, 19 bp, Mus musculus
  siRNA target sequence for Dtnb (NM_007886.1,303-321).
cgaagctttccgagacaat

SEQ ID NO: 648930 - DNA, 19 bp, Mus musculus
  siRNA target sequence for Dtnb (NM_007886.1,313-331).
cgagacaatggccttaaca

SEQ ID NO: 648931 - DNA, 19 bp, Mus musculus
  siRNA target sequence for Dtnb (NM_007886.1,378-396).
catctcgtccatctactat

SEQ ID NO: 648932 - DNA, 19 bp, Mus musculus
  siRNA target sequence for Dtnb (NM_007886.1,386-404).
ccatctactatcagttgaa

SEQ ID NO: 648933 - DNA, 19 bp, Mus musculus
  siRNA target sequence for Dtnb (NM_007886.1,405-423).
caagcgccttccttctact

SEQ ID NO: 648934 - DNA, 19 bp, Mus musculus
  siRNA target sequence for Dtnb (NM_007886.1,490-508).
gagggccgaggcaagttga

SEQ ID NO: 648935 - DNA, 19 bp, Mus musculus
  siRNA target sequence for Dtnb (NM_007886.1,499-517).
ggcaagttgaccgtgtttt

SEQ ID NO: 648936 - DNA, 19 bp, Mus musculus
  siRNA target sequence for Dtnb (NM_007886.1,507-525).
gaccgtgttttcagttaaa

SEQ ID NO: 648937 - DNA, 19 bp, Mus musculus
  siRNA target sequence for Dtnb (NM_007886.1,510-528).
cgtgttttcagttaaagct

SEQ ID NO: 648938 - DNA, 19 bp, Mus musculus
  siRNA target sequence for Dtnb (NM_007886.1,520-538).
gttaaagctatgttagcaa

SEQ ID NO: 648939 - DNA, 19 bp, Mus musculus
  siRNA target sequence for Dtnb (NM_007886.1,585-603).
ccagatgtcagattccaat

SEQ ID NO: 648940 - DNA, 19 bp, Mus musculus
  siRNA target sequence for Dtnb (NM_007886.1,595-613).
gattccaatggcttaatga

SEQ ID NO: 648941 - DNA, 19 bp, Mus musculus
  siRNA target sequence for Dtnb (NM_007886.1,604-622).
ggcttaatgatgtttggaa

SEQ ID NO: 648942 - DNA, 19 bp, Mus musculus
  siRNA target sequence for Dtnb (NM_007886.1,716-734).
gttttccgcagcagaagaa

SEQ ID NO: 648943 - DNA, 19 bp, Mus musculus
  siRNA target sequence for Dtnb (NM_007886.1,735-753).
gataatgctgaatatgttt

SEQ ID NO: 648944 - DNA, 19 bp, Mus musculus
  siRNA target sequence for Dtnb (NM_007886.1,820-838).
gcccatgttgagaatgtct

SEQ ID NO: 648945 - DNA, 19 bp, Mus musculus
  siRNA target sequence for Dtnb (NM_007886.1,1017-1035).
gaagctgagccatgcaatt

SEQ ID NO: 648946 - DNA, 19 bp, Mus musculus
  siRNA target sequence for Dtnb (NM_007886.1,1020-1038).
gctgagccatgcaattagt

SEQ ID NO: 648947 - DNA, 19 bp, Mus musculus
  siRNA target sequence for Dtnb (NM_007886.1,1021-1039).
ctgagccatgcaattagta

SEQ ID NO: 648948 - DNA, 19 bp, Mus musculus
  siRNA target sequence for Dtnb (NM_007886.1,1071-1089).
cccacatcctgtttttcct

SEQ ID NO: 648949 - DNA, 19 bp, Mus musculus
  siRNA target sequence for Dtnb (NM_007886.1,1132-1150).
cctcgccctctgaccaata

SEQ ID NO: 648950 - DNA, 19 bp, Mus musculus
  siRNA target sequence for Dtnb (NM_007886.1,1133-1151).
ctcgccctctgaccaatat

SEQ ID NO: 648951 - DNA, 19 bp, Mus musculus
  siRNA target sequence for Dtnb (NM_007886.1,1135-1153).
cgccctctgaccaatatga

SEQ ID NO: 648952 - DNA, 19 bp, Mus musculus
  siRNA target sequence for Dtnb (NM_007886.1,1136-1154).
gccctctgaccaatatgaa

SEQ ID NO: 648953 - DNA, 19 bp, Mus musculus
  siRNA target sequence for Dtnb (NM_007886.1,1195-1213).
cccaccaagaggttacagt

SEQ ID NO: 648954 - DNA, 19 bp, Mus musculus
  siRNA target sequence for Dtnb (NM_007886.1,1196-1214).
ccaccaagaggttacagta

SEQ ID NO: 648955 - DNA, 19 bp, Mus musculus
  siRNA target sequence for Dtnb (NM_007886.1,1197-1215).
caccaagaggttacagtat

SEQ ID NO: 648956 - DNA, 19 bp, Mus musculus
  siRNA target sequence for Dtnb (NM_007886.1,1219-1237).
caagacatgcccaatctct

SEQ ID NO: 648957 - DNA, 19 bp, Mus musculus
  siRNA target sequence for Dtnb (NM_007886.1,1574-1592).
gcttgctgaggcaaaggaa

SEQ ID NO: 648958 - DNA, 19 bp, Mus musculus
  siRNA target sequence for Dtnb (NM_007886.1,1761-1779).
catgcctgtgcgttctaca

SEQ ID NO: 648959 - DNA, 19 bp, Mus musculus
  siRNA target sequence for Dtnb (NM_007886.1,1764-1782).
gcctgtgcgttctacatct

SEQ ID NO: 648960 - DNA, 19 bp, Mus musculus
  siRNA target sequence for Dtnb (NM_007886.1,1871-1889).
gaaacctccgcaatgactt

SEQ ID NO: 648961 - DNA, 19 bp, Mus musculus
  siRNA target sequence for E130114P18Rik (NM_177023.2,248-266).
gcttctctgtctaaagttt

SEQ ID NO: 648962 - DNA, 19 bp, Mus musculus
  siRNA target sequence for E130114P18Rik (NM_177023.2,377-395).
gcaggttaccagaaaataa

SEQ ID NO: 648963 - DNA, 19 bp, Mus musculus
  siRNA target sequence for E130114P18Rik (NM_177023.2,380-398).
ggttaccagaaaataacta

SEQ ID NO: 648964 - DNA, 19 bp, Mus musculus
  siRNA target sequence for E130114P18Rik (NM_177023.2,431-449).
gtcctacccagttgtgata

SEQ ID NO: 648965 - DNA, 19 bp, Mus musculus
  siRNA target sequence for E130114P18Rik (NM_177023.2,439-457).
cagttgtgatacctttcaa

SEQ ID NO: 648966 - DNA, 19 bp, Mus musculus
  siRNA target sequence for E4f1 (NM_007893.1,299-317).
caggcagtcctaatcatca

SEQ ID NO: 648967 - DNA, 19 bp, Mus musculus
  siRNA target sequence for E4f1 (NM_007893.1,341-359).
gcgagcaggcccatgtcaa

SEQ ID NO: 648968 - DNA, 19 bp, Mus musculus
  siRNA target sequence for E4f1 (NM_007893.1,382-400).
cgctacgtgtgcatgctat

SEQ ID NO: 648969 - DNA, 19 bp, Mus musculus
  siRNA target sequence for E4f1 (NM_007893.1,480-498).
gctctgtggggcctctttt

SEQ ID NO: 648970 - DNA, 19 bp, Mus musculus
  siRNA target sequence for E4f1 (NM_007893.1,791-809).
gtactgtcatccatgaagt

SEQ ID NO: 648971 - DNA, 19 bp, Mus musculus
  siRNA target sequence for E4f1 (NM_007893.1,905-923).
gtgagaacctgctacatca

SEQ ID NO: 648972 - DNA, 19 bp, Mus musculus
  siRNA target sequence for E4f1 (NM_007893.1,1374-1392).
gtgcggcaagcgttacaaa

SEQ ID NO: 648973 - DNA, 19 bp, Mus musculus
  siRNA target sequence for E4f1 (NM_007893.1,1378-1396).
ggcaagcgttacaaaacca

SEQ ID NO: 648974 - DNA, 19 bp, Mus musculus
  siRNA target sequence for E4f1 (NM_007893.1,1383-1401).
gcgttacaaaaccaagaat

SEQ ID NO: 648975 - DNA, 19 bp, Mus musculus
  siRNA target sequence for E4f1 (NM_007893.1,1578-1596).
ccggcacctgcgcactaaa

SEQ ID NO: 648976 - DNA, 19 bp, Mus musculus
  siRNA target sequence for E4f1 (NM_007893.1,1598-1616).
ggggctgcctgctagaagt

SEQ ID NO: 648977 - DNA, 19 bp, Mus musculus
  siRNA target sequence for E4f1 (NM_007893.1,1715-1733).
ctgatacccaagagtacat

SEQ ID NO: 648978 - DNA, 19 bp, Mus musculus
  siRNA target sequence for E4f1 (NM_007893.1,1717-1735).
gatacccaagagtacatta

SEQ ID NO: 648979 - DNA, 19 bp, Mus musculus
  siRNA target sequence for E4f1 (NM_007893.1,1721-1739).
cccaagagtacattattga

SEQ ID NO: 648980 - DNA, 19 bp, Mus musculus
  siRNA target sequence for E4f1 (NM_007893.1,1945-1963).
gccactcctgagagtctta

SEQ ID NO: 648981 - DNA, 19 bp, Mus musculus
  siRNA target sequence for E4f1 (NM_007893.1,1947-1965).
cactcctgagagtcttact

SEQ ID NO: 648982 - DNA, 19 bp, Mus musculus
  siRNA target sequence for E4f1 (NM_007893.1,1949-1967).
ctcctgagagtcttactga

SEQ ID NO: 648983 - DNA, 19 bp, Mus musculus
  siRNA target sequence for E4f1 (NM_007893.1,2140-2158).
gtacagacggtcatcgtat

SEQ ID NO: 648984 - DNA, 19 bp, Mus musculus
  siRNA target sequence for Etfa (NM_145615.2,471-489).
ctcagaagcagttcagtta

SEQ ID NO: 648985 - DNA, 19 bp, Mus musculus
  siRNA target sequence for Etfa (NM_145615.2,473-491).
cagaagcagttcagttaca

SEQ ID NO: 648986 - DNA, 19 bp, Mus musculus
  siRNA target sequence for Etfa (NM_145615.2,538-556).
cagagtagctgccaaactt

SEQ ID NO: 648987 - DNA, 19 bp, Mus musculus
  siRNA target sequence for Etfa (NM_145615.2,540-558).
gagtagctgccaaacttaa

SEQ ID NO: 648988 - DNA, 19 bp, Mus musculus
  siRNA target sequence for Etfa (NM_145615.2,567-585).
cagtttctgacatcattga

SEQ ID NO: 648989 - DNA, 19 bp, Mus musculus
  siRNA target sequence for Etfa (NM_145615.2,599-617).
gacacatttgtgagaacta

SEQ ID NO: 648990 - DNA, 19 bp, Mus musculus
  siRNA target sequence for Etfa (NM_145615.2,623-641).
gcaggaaatgcgttgtgta

SEQ ID NO: 648991 - DNA, 19 bp, Mus musculus
  siRNA target sequence for Etfa (NM_145615.2,632-650).
gcgttgtgtacagtaaagt

SEQ ID NO: 648992 - DNA, 19 bp, Mus musculus
  siRNA target sequence for Etfa (NM_145615.2,642-660).
cagtaaagtgtgatgagaa

SEQ ID NO: 648993 - DNA, 19 bp, Mus musculus
  siRNA target sequence for Evi3 (NM_145492.1,433-451).
gccgcctcagctacctaaa

SEQ ID NO: 648994 - DNA, 19 bp, Mus musculus
  siRNA target sequence for Evi3 (NM_145492.1,500-518).
ctgcagtcggctgttcaaa

SEQ ID NO: 648995 - DNA, 19 bp, Mus musculus
  siRNA target sequence for Evi3 (NM_145492.1,502-520).
gcagtcggctgttcaaaca

SEQ ID NO: 648996 - DNA, 19 bp, Mus musculus
  siRNA target sequence for Evi3 (NM_145492.1,529-547).
gccgtgaccgccacataaa

SEQ ID NO: 648997 - DNA, 19 bp, Mus musculus
  siRNA target sequence for Evi3 (NM_145492.1,532-550).
gtgaccgccacataaagct

SEQ ID NO: 648998 - DNA, 19 bp, Mus musculus
  siRNA target sequence for Evi3 (NM_145492.1,601-619).
cccggagcgatcatctcaa

SEQ ID NO: 648999 - DNA, 19 bp, Mus musculus
  siRNA target sequence for Evi3 (NM_145492.1,604-622).
ggagcgatcatctcaagat

SEQ ID NO: 649000 - DNA, 19 bp, Mus musculus
  siRNA target sequence for Evi3 (NM_145492.1,694-712).
gctccttgcacggacatat

SEQ ID NO: 649001 - DNA, 19 bp, Mus musculus
  siRNA target sequence for Evi3 (NM_145492.1,859-877).
ccgagtgctcccctaatga

SEQ ID NO: 649002 - DNA, 19 bp, Mus musculus
  siRNA target sequence for Evi3 (NM_145492.1,1212-1230).
cagcagacctccgatatga

SEQ ID NO: 649003 - DNA, 19 bp, Mus musculus
  siRNA target sequence for Evi3 (NM_145492.1,1214-1232).
gcagacctccgatatgact

SEQ ID NO: 649004 - DNA, 19 bp, Mus musculus
  siRNA target sequence for Evi3 (NM_145492.1,1306-1324).
cggttctgcagattcactt

SEQ ID NO: 649005 - DNA, 19 bp, Mus musculus
  siRNA target sequence for Evi3 (NM_145492.1,1311-1329).
ctgcagattcacttgaaaa

SEQ ID NO: 649006 - DNA, 19 bp, Mus musculus
  siRNA target sequence for Evi3 (NM_145492.1,1347-1365).
cctgagcaggctcatatct

SEQ ID NO: 649007 - DNA, 19 bp, Mus musculus
  siRNA target sequence for Evi3 (NM_145492.1,1356-1374).
gctcatatctgtcagtatt

SEQ ID NO: 649008 - DNA, 19 bp, Mus musculus
  siRNA target sequence for Evi3 (NM_145492.1,1359-1377).
catatctgtcagtattgct

SEQ ID NO: 649009 - DNA, 19 bp, Mus musculus
  siRNA target sequence for Evi3 (NM_145492.1,1383-1401).
gtcttaccctcactctata

SEQ ID NO: 649010 - DNA, 19 bp, Mus musculus
  siRNA target sequence for Evi3 (NM_145492.1,1391-1409).
ctcactctataacctaaat

SEQ ID NO: 649011 - DNA, 19 bp, Mus musculus
  siRNA target sequence for Evi3 (NM_145492.1,1476-1494).
gtttaccagtgcaacttct

SEQ ID NO: 649012 - DNA, 19 bp, Mus musculus
  siRNA target sequence for Evi3 (NM_145492.1,1493-1511).
ctgttccgaagttgtcaat

SEQ ID NO: 649013 - DNA, 19 bp, Mus musculus
  siRNA target sequence for Evi3 (NM_145492.1,1495-1513).
gttccgaagttgtcaatga

SEQ ID NO: 649014 - DNA, 19 bp, Mus musculus
  siRNA target sequence for Evi3 (NM_145492.1,1529-1547).
ggagcacatccgatgttct

SEQ ID NO: 649015 - DNA, 19 bp, Mus musculus
  siRNA target sequence for Evi3 (NM_145492.1,1532-1550).
gcacatccgatgttctcat

SEQ ID NO: 649016 - DNA, 19 bp, Mus musculus
  siRNA target sequence for Evi3 (NM_145492.1,1574-1592).
ggacagcaatgcgttcttt

SEQ ID NO: 649017 - DNA, 19 bp, Mus musculus
  siRNA target sequence for Evi3 (NM_145492.1,1577-1595).
cagcaatgcgttcttttgt

SEQ ID NO: 649018 - DNA, 19 bp, Mus musculus
  siRNA target sequence for Evi3 (NM_145492.1,1725-1743).
gtctactcctgttcctatt

SEQ ID NO: 649019 - DNA, 19 bp, Mus musculus
  siRNA target sequence for Evi3 (NM_145492.1,1733-1751).
ctgttcctattgtacaaat

SEQ ID NO: 649020 - DNA, 19 bp, Mus musculus
  siRNA target sequence for Evi3 (NM_145492.1,1815-1833).
cccttggccctgaattata

SEQ ID NO: 649021 - DNA, 19 bp, Mus musculus
  siRNA target sequence for Evi3 (NM_145492.1,1816-1834).
ccttggccctgaattatat

SEQ ID NO: 649022 - DNA, 19 bp, Mus musculus
  siRNA target sequence for Evi3 (NM_145492.1,1817-1835).
cttggccctgaattatatt

SEQ ID NO: 649023 - DNA, 19 bp, Mus musculus
  siRNA target sequence for Evi3 (NM_145492.1,1821-1839).
gccctgaattatattcaca

SEQ ID NO: 649024 - DNA, 19 bp, Mus musculus
  siRNA target sequence for Evi3 (NM_145492.1,1822-1840).
ccctgaattatattcacaa

SEQ ID NO: 649025 - DNA, 19 bp, Mus musculus
  siRNA target sequence for Evi3 (NM_145492.1,1871-1889).
gtcccctgtggctatagaa

SEQ ID NO: 649026 - DNA, 19 bp, Mus musculus
  siRNA target sequence for Evi3 (NM_145492.1,1878-1896).
gtggctatagaacaaacaa

SEQ ID NO: 649027 - DNA, 19 bp, Mus musculus
  siRNA target sequence for Evi3 (NM_145492.1,1880-1898).
ggctatagaacaaacaact

SEQ ID NO: 649028 - DNA, 19 bp, Mus musculus
  siRNA target sequence for Evi3 (NM_145492.1,1962-1980).
cagtgtggtgctaagtaca

SEQ ID NO: 649029 - DNA, 19 bp, Mus musculus
  siRNA target sequence for Evi3 (NM_145492.1,2044-2062).
cctgccctcagtgtaacaa

SEQ ID NO: 649030 - DNA, 19 bp, Mus musculus
  siRNA target sequence for Evi3 (NM_145492.1,2224-2242).
cactctgccaggaagtgtt

SEQ ID NO: 649031 - DNA, 19 bp, Mus musculus
  siRNA target sequence for Evi3 (NM_145492.1,2690-2708).
cagctctgaacccatgtat

SEQ ID NO: 649032 - DNA, 19 bp, Mus musculus
  siRNA target sequence for Evi3 (NM_145492.1,2766-2784).
ctccgagaccacaacatca

SEQ ID NO: 649033 - DNA, 19 bp, Mus musculus
  siRNA target sequence for Evi3 (NM_145492.1,2834-2852).
gaattacaagtgtaacgtt

SEQ ID NO: 649034 - DNA, 19 bp, Mus musculus
  siRNA target sequence for Evi3 (NM_145492.1,3002-3020).
cctggataccggaaactgt

SEQ ID NO: 649035 - DNA, 19 bp, Mus musculus
  siRNA target sequence for Evi3 (NM_145492.1,3011-3029).
cggaaactgtcgtatttgt

SEQ ID NO: 649036 - DNA, 19 bp, Mus musculus
  siRNA target sequence for Evi3 (NM_145492.1,3220-3238).
gtggccagcacgttcagaa

SEQ ID NO: 649037 - DNA, 19 bp, Mus musculus
  siRNA target sequence for Evi3 (NM_145492.1,3223-3241).
gccagcacgttcagaaact

SEQ ID NO: 649038 - DNA, 19 bp, Mus musculus
  siRNA target sequence for Evi3 (NM_145492.1,3225-3243).
cagcacgttcagaaactgt

SEQ ID NO: 649039 - DNA, 19 bp, Mus musculus
  siRNA target sequence for Evi3 (NM_145492.1,3227-3245).
gcacgttcagaaactgtat

SEQ ID NO: 649040 - DNA, 19 bp, Mus musculus
  siRNA target sequence for Evi3 (NM_145492.1,3305-3323).
caacggcctgccatatggt

SEQ ID NO: 649041 - DNA, 19 bp, Mus musculus
  siRNA target sequence for Evi3 (NM_145492.1,3328-3346).
gtgccggctgtgtgaatct

SEQ ID NO: 649042 - DNA, 19 bp, Mus musculus
  siRNA target sequence for Evi3 (NM_145492.1,3330-3348).
gccggctgtgtgaatctca

SEQ ID NO: 649043 - DNA, 19 bp, Mus musculus
  siRNA target sequence for Evi3 (NM_145492.1,3397-3415).
caggcttgggccagaatga

SEQ ID NO: 649044 - DNA, 19 bp, Mus musculus
  siRNA target sequence for Evi3 (NM_145492.1,3456-3474).
ctgaagacgcgctgttcaa

SEQ ID NO: 649045 - DNA, 19 bp, Mus musculus
  siRNA target sequence for Evi3 (NM_145492.1,3472-3490).
caagctgcaatgtcaagtt

SEQ ID NO: 649046 - DNA, 19 bp, Mus musculus
  siRNA target sequence for Evi3 (NM_145492.1,3607-3625).
cctcccagtccgatgagaa

SEQ ID NO: 649047 - DNA, 19 bp, Mus musculus
  siRNA target sequence for Evi3 (NM_145492.1,3610-3628).
cccagtccgatgagaagaa

SEQ ID NO: 649048 - DNA, 19 bp, Mus musculus
  siRNA target sequence for Evi3 (NM_145492.1,3673-3691).
gggacatccaggttcatgt

SEQ ID NO: 649049 - DNA, 19 bp, Mus musculus
  siRNA target sequence for Evi3 (NM_145492.1,3827-3845).
cgtctgtttcacagtgttt

SEQ ID NO: 649050 - DNA, 19 bp, Mus musculus
  siRNA target sequence for Evi3 (NM_145492.1,3838-3856).
cagtgtttgttcaagctaa

SEQ ID NO: 649051 - DNA, 19 bp, Mus musculus
  siRNA target sequence for Evi3 (NM_145492.1,3889-3907).
gacaagaagacaagatcta

SEQ ID NO: 649052 - DNA, 19 bp, Mus musculus
  siRNA target sequence for Fbxl2 (NM_178624.2,107-125).
ggagctcctcttgagaata

SEQ ID NO: 649053 - DNA, 19 bp, Mus musculus
  siRNA target sequence for Fbxl2 (NM_178624.2,108-126).
gagctcctcttgagaatat

SEQ ID NO: 649054 - DNA, 19 bp, Mus musculus
  siRNA target sequence for Fbxl2 (NM_178624.2,111-129).
ctcctcttgagaatattct

SEQ ID NO: 649055 - DNA, 19 bp, Mus musculus
  siRNA target sequence for Fbxl2 (NM_178624.2,134-152).
cttggacatcgtaactcta

SEQ ID NO: 649056 - DNA, 19 bp, Mus musculus
  siRNA target sequence for Fbxl2 (NM_178624.2,173-191).
caaggcctggaacatctta

SEQ ID NO: 649057 - DNA, 19 bp, Mus musculus
  siRNA target sequence for Fbxl2 (NM_178624.2,211-229).
ggcaacgggtggatctttt

SEQ ID NO: 649058 - DNA, 19 bp, Mus musculus
  siRNA target sequence for Fbxl2 (NM_178624.2,212-230).
gcaacgggtggatcttttt

SEQ ID NO: 649059 - DNA, 19 bp, Mus musculus
  siRNA target sequence for Fbxl2 (NM_178624.2,213-231).
caacgggtggatcttttta

SEQ ID NO: 649060 - DNA, 19 bp, Mus musculus
  siRNA target sequence for Fbxl2 (NM_178624.2,216-234).
cgggtggatctttttaact

SEQ ID NO: 649061 - DNA, 19 bp, Mus musculus
  siRNA target sequence for Fbxl2 (NM_178624.2,252-270).
ggccgagtggtggaaaaca

SEQ ID NO: 649062 - DNA, 19 bp, Mus musculus
  siRNA target sequence for Fbxl2 (NM_178624.2,253-271).
gccgagtggtggaaaacat

SEQ ID NO: 649063 - DNA, 19 bp, Mus musculus
  siRNA target sequence for Fbxl2 (NM_178624.2,255-273).
cgagtggtggaaaacatct

SEQ ID NO: 649064 - DNA, 19 bp, Mus musculus
  siRNA target sequence for Fbxl2 (NM_178624.2,283-301).
gcggtggcttccttagaaa

SEQ ID NO: 649065 - DNA, 19 bp, Mus musculus
  siRNA target sequence for Fbxl2 (NM_178624.2,327-345).
gtcggggactcctctttga

SEQ ID NO: 649066 - DNA, 19 bp, Mus musculus
  siRNA target sequence for Fbxl2 (NM_178624.2,359-377).
gaactgccggaacattgaa

SEQ ID NO: 649067 - DNA, 19 bp, Mus musculus
  siRNA target sequence for Fbxl2 (NM_178624.2,364-382).
gccggaacattgaacattt

SEQ ID NO: 649068 - DNA, 19 bp, Mus musculus
  siRNA target sequence for Fbxl2 (NM_178624.2,365-383).
ccggaacattgaacattta

SEQ ID NO: 649069 - DNA, 19 bp, Mus musculus
  siRNA target sequence for Fbxl2 (NM_178624.2,366-384).
cggaacattgaacatttaa

SEQ ID NO: 649070 - DNA, 19 bp, Mus musculus
  siRNA target sequence for Fbxl2 (NM_178624.2,367-385).
ggaacattgaacatttaaa

SEQ ID NO: 649071 - DNA, 19 bp, Mus musculus
  siRNA target sequence for Fbxl2 (NM_178624.2,617-635).
gctcctgaggggttgtaca

SEQ ID NO: 649072 - DNA, 19 bp, Mus musculus
  siRNA target sequence for Fbxl2 (NM_178624.2,623-641).
gaggggttgtacacagtta

SEQ ID NO: 649073 - DNA, 19 bp, Mus musculus
  siRNA target sequence for Fbxl2 (NM_178624.2,645-663).
gacgaagctctgaaacaca

SEQ ID NO: 649074 - DNA, 19 bp, Mus musculus
  siRNA target sequence for Fbxl2 (NM_178624.2,647-665).
cgaagctctgaaacacatt

SEQ ID NO: 649075 - DNA, 19 bp, Mus musculus
  siRNA target sequence for Fbxl2 (NM_178624.2,827-845).
gaactgccccagactacaa

SEQ ID NO: 649076 - DNA, 19 bp, Mus musculus
  siRNA target sequence for Fbxl2 (NM_178624.2,832-850).
gccccagactacaagtttt

SEQ ID NO: 649077 - DNA, 19 bp, Mus musculus
  siRNA target sequence for Fbxl2 (NM_178624.2,875-893).
gaccgacgcaggctttaca

SEQ ID NO: 649078 - DNA, 19 bp, Mus musculus
  siRNA target sequence for Fdx1 (NM_007996.1,264-282).
ctcagaagataagataaca

SEQ ID NO: 649079 - DNA, 19 bp, Mus musculus
  siRNA target sequence for Fdx1 (NM_007996.1,335-353).
gcgactctctgctagatgt

SEQ ID NO: 649080 - DNA, 19 bp, Mus musculus
  siRNA target sequence for Fdx1 (NM_007996.1,336-354).
cgactctctgctagatgtt

SEQ ID NO: 649081 - DNA, 19 bp, Mus musculus
  siRNA target sequence for Fdx1 (NM_007996.1,346-364).
ctagatgttgtgattgaga

SEQ ID NO: 649082 - DNA, 19 bp, Mus musculus
  siRNA target sequence for Fdx1 (NM_007996.1,352-370).
gttgtgattgagaacaact

SEQ ID NO: 649083 - DNA, 19 bp, Mus musculus
  siRNA target sequence for Fdx1 (NM_007996.1,357-375).
gattgagaacaacttagat

SEQ ID NO: 649084 - DNA, 19 bp, Mus musculus
  siRNA target sequence for Fdx1 (NM_007996.1,405-423).
gttggcttgctctacttgt

SEQ ID NO: 649085 - DNA, 19 bp, Mus musculus
  siRNA target sequence for Fdx1 (NM_007996.1,413-431).
gctctacttgtcatcttat

SEQ ID NO: 649086 - DNA, 19 bp, Mus musculus
  siRNA target sequence for Fdx1 (NM_007996.1,444-462).
catctatgagaagttagat

SEQ ID NO: 649087 - DNA, 19 bp, Mus musculus
  siRNA target sequence for Fdx1 (NM_007996.1,552-570).
ggctatggacaatatgact

SEQ ID NO: 649088 - DNA, 19 bp, Mus musculus
  siRNA target sequence for Fdx1 (NM_007996.1,613-631).
gacatgagcaagaattcct

SEQ ID NO: 649089 - DNA, 19 bp, Mus musculus
  siRNA target sequence for Fhl4 (NM_010214.2,785-803).
gcattgtgccaatatctgt

SEQ ID NO: 649090 - DNA, 19 bp, Mus musculus
  siRNA target sequence for Fhl4 (NM_010214.2,820-838).
ccataggtgcagattccaa

SEQ ID NO: 649091 - DNA, 19 bp, Mus musculus
  siRNA target sequence for Fhl4 (NM_010214.2,867-885).
cacaacacctgcttcaaat

SEQ ID NO: 649092 - DNA, 19 bp, Mus musculus
  siRNA target sequence for Fhl4 (NM_010214.2,985-1003).
gcaaagggtgcctcaaaga

SEQ ID NO: 649093 - DNA, 19 bp, Mus musculus
  siRNA target sequence for Fhl4 (NM_010214.2,1029-1047).
gaatacaaaggtagtatct

SEQ ID NO: 649094 - DNA, 19 bp, Mus musculus
  siRNA target sequence for Fhl4 (NM_010214.2,1038-1056).
ggtagtatctggcataaaa

SEQ ID NO: 649095 - DNA, 19 bp, Mus musculus
  siRNA target sequence for Fhl4 (NM_010214.2,1082-1100).
ggacatcattggaaccaaa

SEQ ID NO: 649096 - DNA, 19 bp, Mus musculus
  siRNA target sequence for Fhl4 (NM_010214.2,1085-1103).
catcattggaaccaaaaat

SEQ ID NO: 649097 - DNA, 19 bp, Mus musculus
  siRNA target sequence for Fhl4 (NM_010214.2,1277-1295).
gcgtttcactgctatggat

SEQ ID NO: 649098 - DNA, 19 bp, Mus musculus
  siRNA target sequence for Fhl4 (NM_010214.2,1438-1456).
gcaaaacctgttctgtaaa

SEQ ID NO: 649099 - DNA, 19 bp, Mus musculus
  siRNA target sequence for Fhl4 (NM_010214.2,1450-1468).
ctgtaaatctagccaataa

SEQ ID NO: 649100 - DNA, 19 bp, Mus musculus
  siRNA target sequence for Fhl4 (NM_010214.2,1462-1480).
ccaataagcactttgtgtt

SEQ ID NO: 649101 - DNA, 19 bp, Mus musculus
  siRNA target sequence for Fhl4 (NM_010214.2,1469-1487).
gcactttgtgtttcatgat

SEQ ID NO: 649102 - DNA, 19 bp, Mus musculus
  siRNA target sequence for Fhl4 (NM_010214.2,1506-1524).
gactgtgccagaaatctat

SEQ ID NO: 649103 - DNA, 19 bp, Mus musculus
  siRNA target sequence for Fiz1 (NM_011813.2,251-269).
cctcgggtcccctttcact

SEQ ID NO: 649104 - DNA, 19 bp, Mus musculus
  siRNA target sequence for Fiz1 (NM_011813.2,640-658).
ctccccctgctcagtatgt

SEQ ID NO: 649105 - DNA, 19 bp, Mus musculus
  siRNA target sequence for Fiz1 (NM_011813.2,775-793).
ctcgctgcccccatttgca

SEQ ID NO: 649106 - DNA, 19 bp, Mus musculus
  siRNA target sequence for Fiz1 (NM_011813.2,801-819).
cctgtgccaggcgttttga

SEQ ID NO: 649107 - DNA, 19 bp, Mus musculus
  siRNA target sequence for Fiz1 (NM_011813.2,849-867).
ccgcacacaccgatgtgaa

SEQ ID NO: 649108 - DNA, 19 bp, Mus musculus
  siRNA target sequence for Fiz1 (NM_011813.2,1410-1428).
ccagccgtagcaagaagat

SEQ ID NO: 649109 - DNA, 19 bp, Mus musculus
  siRNA target sequence for Fiz1 (NM_011813.2,1413-1431).
gccgtagcaagaagatctt

SEQ ID NO: 649110 - DNA, 19 bp, Mus musculus
  siRNA target sequence for Fiz1 (NM_011813.2,1414-1432).
ccgtagcaagaagatcttt

SEQ ID NO: 649111 - DNA, 19 bp, Mus musculus
  siRNA target sequence for Fiz1 (NM_011813.2,1623-1641).
gcttcatcacgcttagcaa

SEQ ID NO: 649112 - DNA, 19 bp, Mus musculus
  siRNA target sequence for Fras1 (NM_175473.2,891-909).
cctagcgctggcggaattt

SEQ ID NO: 649113 - DNA, 19 bp, Mus musculus
  siRNA target sequence for Fras1 (NM_175473.2,958-976).
cttgcggatgctacaattt

SEQ ID NO: 649114 - DNA, 19 bp, Mus musculus
  siRNA target sequence for Fras1 (NM_175473.2,961-979).
gcggatgctacaatttgga

SEQ ID NO: 649115 - DNA, 19 bp, Mus musculus
  siRNA target sequence for Fras1 (NM_175473.2,962-980).
cggatgctacaatttggaa

SEQ ID NO: 649116 - DNA, 19 bp, Mus musculus
  siRNA target sequence for Fras1 (NM_175473.2,1001-1019).
gtcgttgccatggtgatat

SEQ ID NO: 649117 - DNA, 19 bp, Mus musculus
  siRNA target sequence for Fras1 (NM_175473.2,1007-1025).
gccatggtgatattgtgat

SEQ ID NO: 649118 - DNA, 19 bp, Mus musculus
  siRNA target sequence for Fras1 (NM_175473.2,1051-1069).
cctcggtgtgcctttgaga

SEQ ID NO: 649119 - DNA, 19 bp, Mus musculus
  siRNA target sequence for Fras1 (NM_175473.2,1052-1070).
ctcggtgtgcctttgagaa

SEQ ID NO: 649120 - DNA, 19 bp, Mus musculus
  siRNA target sequence for Fras1 (NM_175473.2,1237-1255).
caacaatgcaccccattat

SEQ ID NO: 649121 - DNA, 19 bp, Mus musculus
  siRNA target sequence for Fras1 (NM_175473.2,1334-1352).
cctacgatggccatgtgtt

SEQ ID NO: 649122 - DNA, 19 bp, Mus musculus
  siRNA target sequence for Fras1 (NM_175473.2,1338-1356).
cgatggccatgtgtttcaa

SEQ ID NO: 649123 - DNA, 19 bp, Mus musculus
  siRNA target sequence for Fras1 (NM_175473.2,1407-1425).
cgggctcactcaatgcttt

SEQ ID NO: 649124 - DNA, 19 bp, Mus musculus
  siRNA target sequence for Fras1 (NM_175473.2,1520-1538).
ctacagctggccaagtgta

SEQ ID NO: 649125 - DNA, 19 bp, Mus musculus
  siRNA target sequence for Fras1 (NM_175473.2,1726-1744).
ctgcggtaccaggatgaaa

SEQ ID NO: 649126 - DNA, 19 bp, Mus musculus
  siRNA target sequence for Fras1 (NM_175473.2,1729-1747).
cggtaccaggatgaaatgt

SEQ ID NO: 649127 - DNA, 19 bp, Mus musculus
  siRNA target sequence for Fras1 (NM_175473.2,1880-1898).
gcatttcaaggaatggtta

SEQ ID NO: 649128 - DNA, 19 bp, Mus musculus
  siRNA target sequence for Fras1 (NM_175473.2,1881-1899).
catttcaaggaatggttat

SEQ ID NO: 649129 - DNA, 19 bp, Mus musculus
  siRNA target sequence for Fras1 (NM_175473.2,1886-1904).
caaggaatggttattgtat

SEQ ID NO: 649130 - DNA, 19 bp, Mus musculus
  siRNA target sequence for Fras1 (NM_175473.2,1889-1907).
ggaatggttattgtattta

SEQ ID NO: 649131 - DNA, 19 bp, Mus musculus
  siRNA target sequence for Fras1 (NM_175473.2,2004-2022).
gtgccgggaggctcaagtt

SEQ ID NO: 649132 - DNA, 19 bp, Mus musculus
  siRNA target sequence for Fras1 (NM_175473.2,2007-2025).
ccgggaggctcaagttact

SEQ ID NO: 649133 - DNA, 19 bp, Mus musculus
  siRNA target sequence for Fras1 (NM_175473.2,2008-2026).
cgggaggctcaagttactt

SEQ ID NO: 649134 - DNA, 19 bp, Mus musculus
  siRNA target sequence for Fras1 (NM_175473.2,2013-2031).
ggctcaagttacttgctat

SEQ ID NO: 649135 - DNA, 19 bp, Mus musculus
  siRNA target sequence for Fras1 (NM_175473.2,2216-2234).
gtggcctgggcttttacca

SEQ ID NO: 649136 - DNA, 19 bp, Mus musculus
  siRNA target sequence for Fras1 (NM_175473.2,2233-2251).
caagcaggcagtctttgtt

SEQ ID NO: 649137 - DNA, 19 bp, Mus musculus
  siRNA target sequence for Fras1 (NM_175473.2,2708-2726).
ctacagctgctcactgtat

SEQ ID NO: 649138 - DNA, 19 bp, Mus musculus
  siRNA target sequence for Fras1 (NM_175473.2,2721-2739).
ctgtatagcctgtatccat

SEQ ID NO: 649139 - DNA, 19 bp, Mus musculus
  siRNA target sequence for Fras1 (NM_175473.2,2860-2878).
cactgtacccagtgtaaga

SEQ ID NO: 649140 - DNA, 19 bp, Mus musculus
  siRNA target sequence for Fras1 (NM_175473.2,2948-2966).
ggtgtggaacccactttta

SEQ ID NO: 649141 - DNA, 19 bp, Mus musculus
  siRNA target sequence for Fras1 (NM_175473.2,2951-2969).
gtggaacccacttttactt

SEQ ID NO: 649142 - DNA, 19 bp, Mus musculus
  siRNA target sequence for Fras1 (NM_175473.2,3008-3026).
gcctcacgtgtgaaggaaa

SEQ ID NO: 649143 - DNA, 19 bp, Mus musculus
  siRNA target sequence for Fras1 (NM_175473.2,3095-3113).
gtcccgagacccactttaa

SEQ ID NO: 649144 - DNA, 19 bp, Mus musculus
  siRNA target sequence for Fras1 (NM_175473.2,3098-3116).
ccgagacccactttaacct

SEQ ID NO: 649145 - DNA, 19 bp, Mus musculus
  siRNA target sequence for Fras1 (NM_175473.2,3118-3136).
gaaggtacttgtacagaat

SEQ ID NO: 649146 - DNA, 19 bp, Mus musculus
  siRNA target sequence for Fras1 (NM_175473.2,3122-3140).
gtacttgtacagaatgtca

SEQ ID NO: 649147 - DNA, 19 bp, Mus musculus
  siRNA target sequence for Fras1 (NM_175473.2,3191-3209).
gccaccctcaccttactct

SEQ ID NO: 649148 - DNA, 19 bp, Mus musculus
  siRNA target sequence for Fras1 (NM_175473.2,3233-3251).
gctgcaaggaagagcaatt

SEQ ID NO: 649149 - DNA, 19 bp, Mus musculus
  siRNA target sequence for Fras1 (NM_175473.2,3236-3254).
gcaaggaagagcaattcct

SEQ ID NO: 649150 - DNA, 19 bp, Mus musculus
  siRNA target sequence for Fras1 (NM_175473.2,3544-3562).
gggcattacctggatgata

SEQ ID NO: 649151 - DNA, 19 bp, Mus musculus
  siRNA target sequence for Fras1 (NM_175473.2,3545-3563).
ggcattacctggatgataa

SEQ ID NO: 649152 - DNA, 19 bp, Mus musculus
  siRNA target sequence for Fras1 (NM_175473.2,3553-3571).
ctggatgataaccaagttt

SEQ ID NO: 649153 - DNA, 19 bp, Mus musculus
  siRNA target sequence for Fras1 (NM_175473.2,3686-3704).
cccagtactaccttgacat

SEQ ID NO: 649154 - DNA, 19 bp, Mus musculus
  siRNA target sequence for Fras1 (NM_175473.2,3700-3718).
gacatcgccacgaagactt

SEQ ID NO: 649155 - DNA, 19 bp, Mus musculus
  siRNA target sequence for Fras1 (NM_175473.2,3705-3723).
cgccacgaagacttgcaaa

SEQ ID NO: 649156 - DNA, 19 bp, Mus musculus
  siRNA target sequence for Fras1 (NM_175473.2,3780-3798).
gtgcatggacggctatgtt

SEQ ID NO: 649157 - DNA, 19 bp, Mus musculus
  siRNA target sequence for Fras1 (NM_175473.2,3782-3800).
gcatggacggctatgttct

SEQ ID NO: 649158 - DNA, 19 bp, Mus musculus
  siRNA target sequence for Fras1 (NM_175473.2,4116-4134).
ctctggccactcatctaat

SEQ ID NO: 649159 - DNA, 19 bp, Mus musculus
  siRNA target sequence for Fras1 (NM_175473.2,4118-4136).
ctggccactcatctaatga

SEQ ID NO: 649160 - DNA, 19 bp, Mus musculus
  siRNA target sequence for Fras1 (NM_175473.2,4120-4138).
ggccactcatctaatgaaa

SEQ ID NO: 649161 - DNA, 19 bp, Mus musculus
  siRNA target sequence for Fras1 (NM_175473.2,4121-4139).
gccactcatctaatgaaaa

SEQ ID NO: 649162 - DNA, 19 bp, Mus musculus
  siRNA target sequence for Fras1 (NM_175473.2,4155-4173).
gtacactccaagtcttcat

SEQ ID NO: 649163 - DNA, 19 bp, Mus musculus
  siRNA target sequence for Fras1 (NM_175473.2,4185-4203).
cttgacccttggaattggt

SEQ ID NO: 649164 - DNA, 19 bp, Mus musculus
  siRNA target sequence for Fras1 (NM_175473.2,4192-4210).
cttggaattggttcaatga

SEQ ID NO: 649165 - DNA, 19 bp, Mus musculus
  siRNA target sequence for Fras1 (NM_175473.2,4209-4227).
gaagccactggacttttct

SEQ ID NO: 649166 - DNA, 19 bp, Mus musculus
  siRNA target sequence for Fras1 (NM_175473.2,4469-4487).
cacagctgatcaacataca

SEQ ID NO: 649167 - DNA, 19 bp, Mus musculus
  siRNA target sequence for Fras1 (NM_175473.2,4479-4497).
caacatacaggccttttca

SEQ ID NO: 649168 - DNA, 19 bp, Mus musculus
  siRNA target sequence for Fras1 (NM_175473.2,4505-4523).
ctccgtatgtgctgagaaa

SEQ ID NO: 649169 - DNA, 19 bp, Mus musculus
  siRNA target sequence for Fras1 (NM_175473.2,4508-4526).
cgtatgtgctgagaaatga

SEQ ID NO: 649170 - DNA, 19 bp, Mus musculus
  siRNA target sequence for Fras1 (NM_175473.2,4634-4652).
ctcttcatggccaattgct

SEQ ID NO: 649171 - DNA, 19 bp, Mus musculus
  siRNA target sequence for Fras1 (NM_175473.2,4668-4686).
ccctgcagcctctatttat

SEQ ID NO: 649172 - DNA, 19 bp, Mus musculus
  siRNA target sequence for Fras1 (NM_175473.2,4672-4690).
gcagcctctatttatcagt

SEQ ID NO: 649173 - DNA, 19 bp, Mus musculus
  siRNA target sequence for Fras1 (NM_175473.2,4673-4691).
cagcctctatttatcagtt

SEQ ID NO: 649174 - DNA, 19 bp, Mus musculus
  siRNA target sequence for Fras1 (NM_175473.2,4744-4762).
gacagcacatctgatatta

SEQ ID NO: 649175 - DNA, 19 bp, Mus musculus
  siRNA target sequence for Fras1 (NM_175473.2,4751-4769).
catctgatattatagtctt

SEQ ID NO: 649176 - DNA, 19 bp, Mus musculus
  siRNA target sequence for Fras1 (NM_175473.2,4754-4772).
ctgatattatagtctttca

SEQ ID NO: 649177 - DNA, 19 bp, Mus musculus
  siRNA target sequence for Fras1 (NM_175473.2,4804-4822).
ctgtttcacgtgaagaaca

SEQ ID NO: 649178 - DNA, 19 bp, Mus musculus
  siRNA target sequence for Fras1 (NM_175473.2,4846-4864).
cgacttgtgaccaactcta

SEQ ID NO: 649179 - DNA, 19 bp, Mus musculus
  siRNA target sequence for Fras1 (NM_175473.2,4847-4865).
gacttgtgaccaactctat

SEQ ID NO: 649180 - DNA, 19 bp, Mus musculus
  siRNA target sequence for Fras1 (NM_175473.2,4937-4955).
gagccgacgacatcatcta

SEQ ID NO: 649181 - DNA, 19 bp, Mus musculus
  siRNA target sequence for Fras1 (NM_175473.2,4940-4958).
ccgacgacatcatctacaa

SEQ ID NO: 649182 - DNA, 19 bp, Mus musculus
  siRNA target sequence for Fras1 (NM_175473.2,4945-4963).
gacatcatctacaagatta

SEQ ID NO: 649183 - DNA, 19 bp, Mus musculus
  siRNA target sequence for Fras1 (NM_175473.2,4947-4965).
catcatctacaagattaca

SEQ ID NO: 649184 - DNA, 19 bp, Mus musculus
  siRNA target sequence for Fras1 (NM_175473.2,4989-5007).
ggtggtcctcctgatgaat

SEQ ID NO: 649185 - DNA, 19 bp, Mus musculus
  siRNA target sequence for Fras1 (NM_175473.2,5217-5235).
gttcaacattgcaatctta

SEQ ID NO: 649186 - DNA, 19 bp, Mus musculus
  siRNA target sequence for Fras1 (NM_175473.2,5294-5312).
gtgaagatggcctaagtgt

SEQ ID NO: 649187 - DNA, 19 bp, Mus musculus
  siRNA target sequence for Fras1 (NM_175473.2,5381-5399).
ccgtacctctgcatccaaa

SEQ ID NO: 649188 - DNA, 19 bp, Mus musculus
  siRNA target sequence for Fras1 (NM_175473.2,5520-5538).
gatcatggccttctcattt

SEQ ID NO: 649189 - DNA, 19 bp, Mus musculus
  siRNA target sequence for Fras1 (NM_175473.2,5523-5541).
catggccttctcatttgct

SEQ ID NO: 649190 - DNA, 19 bp, Mus musculus
  siRNA target sequence for Fras1 (NM_175473.2,5540-5558).
ctggtctcccagaatcagt

SEQ ID NO: 649191 - DNA, 19 bp, Mus musculus
  siRNA target sequence for Fras1 (NM_175473.2,5545-5563).
ctcccagaatcagtgaaat

SEQ ID NO: 649192 - DNA, 19 bp, Mus musculus
  siRNA target sequence for Fras1 (NM_175473.2,5547-5565).
cccagaatcagtgaaattt

SEQ ID NO: 649193 - DNA, 19 bp, Mus musculus
  siRNA target sequence for Fras1 (NM_175473.2,5548-5566).
ccagaatcagtgaaatttt

SEQ ID NO: 649194 - DNA, 19 bp, Mus musculus
  siRNA target sequence for Fras1 (NM_175473.2,5551-5569).
gaatcagtgaaattttact

SEQ ID NO: 649195 - DNA, 19 bp, Mus musculus
  siRNA target sequence for Fras1 (NM_175473.2,5830-5848).
gcaggtgacacttttacat

SEQ ID NO: 649196 - DNA, 19 bp, Mus musculus
  siRNA target sequence for Fras1 (NM_175473.2,5831-5849).
caggtgacacttttacata

SEQ ID NO: 649197 - DNA, 19 bp, Mus musculus
  siRNA target sequence for Fras1 (NM_175473.2,5935-5953).
ggcctgacagtgacaacat

SEQ ID NO: 649198 - DNA, 19 bp, Mus musculus
  siRNA target sequence for Fras1 (NM_175473.2,6024-6042).
catgacggttgctagtcaa

SEQ ID NO: 649199 - DNA, 19 bp, Mus musculus
  siRNA target sequence for Fras1 (NM_175473.2,6038-6056).
gtcaacacacggccataat

SEQ ID NO: 649200 - DNA, 19 bp, Mus musculus
  siRNA target sequence for Fras1 (NM_175473.2,6070-6088).
cttgcctatgtggatgatt

SEQ ID NO: 649201 - DNA, 19 bp, Mus musculus
  siRNA target sequence for Fras1 (NM_175473.2,6073-6091).
gcctatgtggatgattctt

SEQ ID NO: 649202 - DNA, 19 bp, Mus musculus
  siRNA target sequence for Fras1 (NM_175473.2,6105-6123).
gatctggattcggttaagt

SEQ ID NO: 649203 - DNA, 19 bp, Mus musculus
  siRNA target sequence for Fras1 (NM_175473.2,6108-6126).
ctggattcggttaagttct

SEQ ID NO: 649204 - DNA, 19 bp, Mus musculus
  siRNA target sequence for Fras1 (NM_175473.2,6131-6149).
cactgtatggcgtactctt

SEQ ID NO: 649205 - DNA, 19 bp, Mus musculus
  siRNA target sequence for Fras1 (NM_175473.2,6255-6273).
cgggcattcggttacagat

SEQ ID NO: 649206 - DNA, 19 bp, Mus musculus
  siRNA target sequence for Fras1 (NM_175473.2,6313-6331).
gtggacaaccaggtcttta

SEQ ID NO: 649207 - DNA, 19 bp, Mus musculus
  siRNA target sequence for Fras1 (NM_175473.2,6354-6372).
gaaccctccacacatcatt

SEQ ID NO: 649208 - DNA, 19 bp, Mus musculus
  siRNA target sequence for Fras1 (NM_175473.2,6463-6481).
caggacgacgctgtcatta

SEQ ID NO: 649209 - DNA, 19 bp, Mus musculus
  siRNA target sequence for Fras1 (NM_175473.2,6468-6486).
cgacgctgtcattaaacta

SEQ ID NO: 649210 - DNA, 19 bp, Mus musculus
  siRNA target sequence for Fras1 (NM_175473.2,6469-6487).
gacgctgtcattaaactaa

SEQ ID NO: 649211 - DNA, 19 bp, Mus musculus
  siRNA target sequence for Fras1 (NM_175473.2,6567-6585).
ggcgtcattccctattcaa

SEQ ID NO: 649212 - DNA, 19 bp, Mus musculus
  siRNA target sequence for Fras1 (NM_175473.2,6569-6587).
cgtcattccctattcaaga

SEQ ID NO: 649213 - DNA, 19 bp, Mus musculus
  siRNA target sequence for Fras1 (NM_175473.2,6595-6613).
gaaaactacatttattact

SEQ ID NO: 649214 - DNA, 19 bp, Mus musculus
  siRNA target sequence for Fras1 (NM_175473.2,6639-6657).
gccgacccacgatgtgttt

SEQ ID NO: 649215 - DNA, 19 bp, Mus musculus
  siRNA target sequence for Fras1 (NM_175473.2,6640-6658).
ccgacccacgatgtgttta

SEQ ID NO: 649216 - DNA, 19 bp, Mus musculus
  siRNA target sequence for Fras1 (NM_175473.2,6642-6660).
gacccacgatgtgtttagt

SEQ ID NO: 649217 - DNA, 19 bp, Mus musculus
  siRNA target sequence for Fras1 (NM_175473.2,6644-6662).
cccacgatgtgtttagttt

SEQ ID NO: 649218 - DNA, 19 bp, Mus musculus
  siRNA target sequence for Fras1 (NM_175473.2,6646-6664).
cacgatgtgtttagttttt

SEQ ID NO: 649219 - DNA, 19 bp, Mus musculus
  siRNA target sequence for Fras1 (NM_175473.2,6648-6666).
cgatgtgtttagtttttat

SEQ ID NO: 649220 - DNA, 19 bp, Mus musculus
  siRNA target sequence for Fras1 (NM_175473.2,6691-6709).
gaaatccacagcatcaata

SEQ ID NO: 649221 - DNA, 19 bp, Mus musculus
  siRNA target sequence for Fras1 (NM_175473.2,6779-6797).
cgggagtggcgataagcaa

SEQ ID NO: 649222 - DNA, 19 bp, Mus musculus
  siRNA target sequence for Fras1 (NM_175473.2,6780-6798).
gggagtggcgataagcaat

SEQ ID NO: 649223 - DNA, 19 bp, Mus musculus
  siRNA target sequence for Fras1 (NM_175473.2,6781-6799).
ggagtggcgataagcaatt

SEQ ID NO: 649224 - DNA, 19 bp, Mus musculus
  siRNA target sequence for Fras1 (NM_175473.2,6830-6848).
cagataacgagctgatctt

SEQ ID NO: 649225 - DNA, 19 bp, Mus musculus
  siRNA target sequence for Fras1 (NM_175473.2,6841-6859).
ctgatctttgtattgatga

SEQ ID NO: 649226 - DNA, 19 bp, Mus musculus
  siRNA target sequence for Fras1 (NM_175473.2,6843-6861).
gatctttgtattgatgaaa

SEQ ID NO: 649227 - DNA, 19 bp, Mus musculus
  siRNA target sequence for Fras1 (NM_175473.2,6980-6998).
gctacttacctggtgatat

SEQ ID NO: 649228 - DNA, 19 bp, Mus musculus
  siRNA target sequence for Fras1 (NM_175473.2,7034-7052).
cggatggcctccatgtaga

SEQ ID NO: 649229 - DNA, 19 bp, Mus musculus
  siRNA target sequence for Fras1 (NM_175473.2,7201-7219).
caggttgtatacatcatga

SEQ ID NO: 649230 - DNA, 19 bp, Mus musculus
  siRNA target sequence for Fras1 (NM_175473.2,7263-7281).
caacctagagcaaatctct

SEQ ID NO: 649231 - DNA, 19 bp, Mus musculus
  siRNA target sequence for Fras1 (NM_175473.2,7267-7285).
ctagagcaaatctctgtta

SEQ ID NO: 649232 - DNA, 19 bp, Mus musculus
  siRNA target sequence for Fras1 (NM_175473.2,7317-7335).
cgttagccaaggtcagata

SEQ ID NO: 649233 - DNA, 19 bp, Mus musculus
  siRNA target sequence for Fras1 (NM_175473.2,7363-7381).
ggtgggagctttgctttta

SEQ ID NO: 649234 - DNA, 19 bp, Mus musculus
  siRNA target sequence for Fras1 (NM_175473.2,7366-7384).
gggagctttgcttttaaat

SEQ ID NO: 649235 - DNA, 19 bp, Mus musculus
  siRNA target sequence for Fras1 (NM_175473.2,7503-7521).
ctcggtggagaaaatcact

SEQ ID NO: 649236 - DNA, 19 bp, Mus musculus
  siRNA target sequence for Fras1 (NM_175473.2,7548-7566).
ggacagcaaacctacagaa

SEQ ID NO: 649237 - DNA, 19 bp, Mus musculus
  siRNA target sequence for Fras1 (NM_175473.2,7558-7576).
cctacagaactcatctaca

SEQ ID NO: 649238 - DNA, 19 bp, Mus musculus
  siRNA target sequence for Fras1 (NM_175473.2,7664-7682).
cttcacgcaatgttcaata

SEQ ID NO: 649239 - DNA, 19 bp, Mus musculus
  siRNA target sequence for Fras1 (NM_175473.2,7667-7685).
cacgcaatgttcaatatgt

SEQ ID NO: 649240 - DNA, 19 bp, Mus musculus
  siRNA target sequence for Fras1 (NM_175473.2,7975-7993).
caaacctcctccttcacta

SEQ ID NO: 649241 - DNA, 19 bp, Mus musculus
  siRNA target sequence for Fras1 (NM_175473.2,8008-8026).
cagaaccgtgtcagctata

SEQ ID NO: 649242 - DNA, 19 bp, Mus musculus
  siRNA target sequence for Fras1 (NM_175473.2,8047-8065).
ctcaaagaccgatttacct

SEQ ID NO: 649243 - DNA, 19 bp, Mus musculus
  siRNA target sequence for Fras1 (NM_175473.2,8080-8098).
gggaccaaccccttcttta

SEQ ID NO: 649244 - DNA, 19 bp, Mus musculus
  siRNA target sequence for Fras1 (NM_175473.2,8401-8419).
gggttgattcgttatgtgt

SEQ ID NO: 649245 - DNA, 19 bp, Mus musculus
  siRNA target sequence for Fras1 (NM_175473.2,8402-8420).
ggttgattcgttatgtgtt

SEQ ID NO: 649246 - DNA, 19 bp, Mus musculus
  siRNA target sequence for Fras1 (NM_175473.2,8406-8424).
gattcgttatgtgttgtat

SEQ ID NO: 649247 - DNA, 19 bp, Mus musculus
  siRNA target sequence for Fras1 (NM_175473.2,8488-8506).
gtggtcagcgacaatgtct

SEQ ID NO: 649248 - DNA, 19 bp, Mus musculus
  siRNA target sequence for Fras1 (NM_175473.2,8625-8643).
cctgtgtcgcactgaacaa

SEQ ID NO: 649249 - DNA, 19 bp, Mus musculus
  siRNA target sequence for Fras1 (NM_175473.2,8770-8788).
gagaatatcgaaagtttca

SEQ ID NO: 649250 - DNA, 19 bp, Mus musculus
  siRNA target sequence for Fras1 (NM_175473.2,8872-8890).
cctacgttggagtttgata

SEQ ID NO: 649251 - DNA, 19 bp, Mus musculus
  siRNA target sequence for Fras1 (NM_175473.2,8873-8891).
ctacgttggagtttgataa

SEQ ID NO: 649252 - DNA, 19 bp, Mus musculus
  siRNA target sequence for Fras1 (NM_175473.2,8928-8946).
ctttgcacccatcaaaaga

SEQ ID NO: 649253 - DNA, 19 bp, Mus musculus
  siRNA target sequence for Fras1 (NM_175473.2,8982-9000).
ctacacagtccctaagtca

SEQ ID NO: 649254 - DNA, 19 bp, Mus musculus
  siRNA target sequence for Fras1 (NM_175473.2,9028-9046).
gaatccggatccgacttta

SEQ ID NO: 649255 - DNA, 19 bp, Mus musculus
  siRNA target sequence for Fras1 (NM_175473.2,9064-9082).
gctgagagtcgtgtgatat

SEQ ID NO: 649256 - DNA, 19 bp, Mus musculus
  siRNA target sequence for Fras1 (NM_175473.2,9065-9083).
ctgagagtcgtgtgatatt

SEQ ID NO: 649257 - DNA, 19 bp, Mus musculus
  siRNA target sequence for Fras1 (NM_175473.2,9169-9187).
ctggctgatgcttctaaca

SEQ ID NO: 649258 - DNA, 19 bp, Mus musculus
  siRNA target sequence for Fras1 (NM_175473.2,9213-9231).
ggccaaggtcctcattagt

SEQ ID NO: 649259 - DNA, 19 bp, Mus musculus
  siRNA target sequence for Fras1 (NM_175473.2,9392-9410).
ctccaggagttgactatgt

SEQ ID NO: 649260 - DNA, 19 bp, Mus musculus
  siRNA target sequence for Fras1 (NM_175473.2,9442-9460).
ggtatcactgaacaatact

SEQ ID NO: 649261 - DNA, 19 bp, Mus musculus
  siRNA target sequence for Fras1 (NM_175473.2,9451-9469).
gaacaatactgcactttga

SEQ ID NO: 649262 - DNA, 19 bp, Mus musculus
  siRNA target sequence for Fras1 (NM_175473.2,9454-9472).
caatactgcactttgacta

SEQ ID NO: 649263 - DNA, 19 bp, Mus musculus
  siRNA target sequence for Fras1 (NM_175473.2,9570-9588).
ggctgtcattgcaattaat

SEQ ID NO: 649264 - DNA, 19 bp, Mus musculus
  siRNA target sequence for Fras1 (NM_175473.2,9574-9592).
gtcattgcaattaatgaca

SEQ ID NO: 649265 - DNA, 19 bp, Mus musculus
  siRNA target sequence for Fras1 (NM_175473.2,9623-9641).
ccaaggatttgcttctagt

SEQ ID NO: 649266 - DNA, 19 bp, Mus musculus
  siRNA target sequence for Fras1 (NM_175473.2,9777-9795).
ctcctccaggattacgttt

SEQ ID NO: 649267 - DNA, 19 bp, Mus musculus
  siRNA target sequence for Fras1 (NM_175473.2,9782-9800).
ccaggattacgtttctgaa

SEQ ID NO: 649268 - DNA, 19 bp, Mus musculus
  siRNA target sequence for Fras1 (NM_175473.2,9934-9952).
gtggccactgtcaccatat

SEQ ID NO: 649269 - DNA, 19 bp, Mus musculus
  siRNA target sequence for Fras1 (NM_175473.2,9964-9982).
gatgcccccaccattgagt

SEQ ID NO: 649270 - DNA, 19 bp, Mus musculus
  siRNA target sequence for Fras1 (NM_175473.2,10165-10183).
cctggcgttgatcatatct

SEQ ID NO: 649271 - DNA, 19 bp, Mus musculus
  siRNA target sequence for Fras1 (NM_175473.2,10166-10184).
ctggcgttgatcatatctt

SEQ ID NO: 649272 - DNA, 19 bp, Mus musculus
  siRNA target sequence for Fras1 (NM_175473.2,10168-10186).
ggcgttgatcatatcttct

SEQ ID NO: 649273 - DNA, 19 bp, Mus musculus
  siRNA target sequence for Fras1 (NM_175473.2,10169-10187).
gcgttgatcatatcttctt

SEQ ID NO: 649274 - DNA, 19 bp, Mus musculus
  siRNA target sequence for Fras1 (NM_175473.2,10224-10242).
gcatgagtccttttctcta

SEQ ID NO: 649275 - DNA, 19 bp, Mus musculus
  siRNA target sequence for Fras1 (NM_175473.2,10295-10313).
ctacagtgaccattctaga

SEQ ID NO: 649276 - DNA, 19 bp, Mus musculus
  siRNA target sequence for Fras1 (NM_175473.2,10504-10522).
gaggctggtatcaaccaaa

SEQ ID NO: 649277 - DNA, 19 bp, Mus musculus
  siRNA target sequence for Fras1 (NM_175473.2,10588-10606).
gagaccatcacggataaca

SEQ ID NO: 649278 - DNA, 19 bp, Mus musculus
  siRNA target sequence for Fras1 (NM_175473.2,10590-10608).
gaccatcacggataacaca

SEQ ID NO: 649279 - DNA, 19 bp, Mus musculus
  siRNA target sequence for Fras1 (NM_175473.2,10632-10650).
ggtcctagacagcatttat

SEQ ID NO: 649280 - DNA, 19 bp, Mus musculus
  siRNA target sequence for Fras1 (NM_175473.2,10716-10734).
ccccttgaggagcaatgtt

SEQ ID NO: 649281 - DNA, 19 bp, Mus musculus
  siRNA target sequence for Fras1 (NM_175473.2,10718-10736).
ccttgaggagcaatgttgt

SEQ ID NO: 649282 - DNA, 19 bp, Mus musculus
  siRNA target sequence for Fras1 (NM_175473.2,10839-10857).
cgtcaaacacaaagaacat

SEQ ID NO: 649283 - DNA, 19 bp, Mus musculus
  siRNA target sequence for Fras1 (NM_175473.2,10848-10866).
caaagaacatccaaacaga

SEQ ID NO: 649284 - DNA, 19 bp, Mus musculus
  siRNA target sequence for Fras1 (NM_175473.2,10900-10918).
ggaatgctgccccttatct

SEQ ID NO: 649285 - DNA, 19 bp, Mus musculus
  siRNA target sequence for Fras1 (NM_175473.2,11110-11128).
gtacgggagcccaaaacca

SEQ ID NO: 649286 - DNA, 19 bp, Mus musculus
  siRNA target sequence for Fras1 (NM_175473.2,11176-11194).
gatgcgtactacgatatga

SEQ ID NO: 649287 - DNA, 19 bp, Mus musculus
  siRNA target sequence for Fras1 (NM_175473.2,11233-11251).
gacttccaggtgagagatt

SEQ ID NO: 649288 - DNA, 19 bp, Mus musculus
  siRNA target sequence for Fras1 (NM_175473.2,11235-11253).
cttccaggtgagagattct

SEQ ID NO: 649289 - DNA, 19 bp, Mus musculus
  siRNA target sequence for Fras1 (NM_175473.2,11261-11279).
cgttcctgacggttcatgt

SEQ ID NO: 649290 - DNA, 19 bp, Mus musculus
  siRNA target sequence for Fras1 (NM_175473.2,11284-11302).
ctctacgtgtcctacatct

SEQ ID NO: 649291 - DNA, 19 bp, Mus musculus
  siRNA target sequence for Fras1 (NM_175473.2,11286-11304).
ctacgtgtcctacatctat

SEQ ID NO: 649292 - DNA, 19 bp, Mus musculus
  siRNA target sequence for Fras1 (NM_175473.2,11423-11441).
ggcttcagataataaggat

SEQ ID NO: 649293 - DNA, 19 bp, Mus musculus
  siRNA target sequence for Fras1 (NM_175473.2,11428-11446).
cagataataaggatctaca

SEQ ID NO: 649294 - DNA, 19 bp, Mus musculus
  siRNA target sequence for Fras1 (NM_175473.2,11430-11448).
gataataaggatctacatt

SEQ ID NO: 649295 - DNA, 19 bp, Mus musculus
  siRNA target sequence for Fras1 (NM_175473.2,11458-11476).
ggccgtctcgtcattgagt

SEQ ID NO: 649296 - DNA, 19 bp, Mus musculus
  siRNA target sequence for Fras1 (NM_175473.2,11462-11480).
gtctcgtcattgagttcaa

SEQ ID NO: 649297 - DNA, 19 bp, Mus musculus
  siRNA target sequence for Fras1 (NM_175473.2,11464-11482).
ctcgtcattgagttcaaga

SEQ ID NO: 649298 - DNA, 19 bp, Mus musculus
  siRNA target sequence for Fras1 (NM_175473.2,11481-11499).
gacccatgccaaattcaga

SEQ ID NO: 649299 - DNA, 19 bp, Mus musculus
  siRNA target sequence for Fras1 (NM_175473.2,11498-11516).
gagggcagtttgtgataga

SEQ ID NO: 649300 - DNA, 19 bp, Mus musculus
  siRNA target sequence for Fras1 (NM_175473.2,11527-11545).
ctcccggatgtgaagtctt

SEQ ID NO: 649301 - DNA, 19 bp, Mus musculus
  siRNA target sequence for Fras1 (NM_175473.2,11538-11556).
gaagtctttcatattgact

SEQ ID NO: 649302 - DNA, 19 bp, Mus musculus
  siRNA target sequence for Fras1 (NM_175473.2,11600-11618).
ggagtgctcagacatttga

SEQ ID NO: 649303 - DNA, 19 bp, Mus musculus
  siRNA target sequence for Fras1 (NM_175473.2,11601-11619).
gagtgctcagacatttgat

SEQ ID NO: 649304 - DNA, 19 bp, Mus musculus
  siRNA target sequence for Fras1 (NM_175473.2,11639-11657).
gagccacgagctcttacaa

SEQ ID NO: 649305 - DNA, 19 bp, Mus musculus
  siRNA target sequence for Fras1 (NM_175473.2,11645-11663).
cgagctcttacaatcgaaa

SEQ ID NO: 649306 - DNA, 19 bp, Mus musculus
  siRNA target sequence for Fras1 (NM_175473.2,11813-11831).
gccctgtgccggttgtgta

SEQ ID NO: 649307 - DNA, 19 bp, Mus musculus
  siRNA target sequence for Fras1 (NM_175473.2,11815-11833).
cctgtgccggttgtgtatt

SEQ ID NO: 649308 - DNA, 19 bp, Mus musculus
  siRNA target sequence for Fras1 (NM_175473.2,11824-11842).
gttgtgtattcgctcaata

SEQ ID NO: 649309 - DNA, 19 bp, Mus musculus
  siRNA target sequence for Fras1 (NM_175473.2,11834-11852).
cgctcaatactgagtttca

SEQ ID NO: 649310 - DNA, 19 bp, Mus musculus
  siRNA target sequence for Fras1 (NM_175473.2,11845-11863).
gagtttcagctctgcaata

SEQ ID NO: 649311 - DNA, 19 bp, Mus musculus
  siRNA target sequence for Fras1 (NM_175473.2,11884-11902).
gatcccaacacgtctgata

SEQ ID NO: 649312 - DNA, 19 bp, Mus musculus
  siRNA target sequence for Fras1 (NM_175473.2,11889-11907).
caacacgtctgatatgtca

SEQ ID NO: 649313 - DNA, 19 bp, Mus musculus
  siRNA target sequence for Fras1 (NM_175473.2,11906-11924).
cactggcagagatggatta

SEQ ID NO: 649314 - DNA, 19 bp, Mus musculus
  siRNA target sequence for Fras1 (NM_175473.2,11958-11976).
cggccgagtcctttggaat

SEQ ID NO: 649315 - DNA, 19 bp, Mus musculus
  siRNA target sequence for Fras1 (NM_175473.2,11972-11990).
ggaatccagaacaaaacct

SEQ ID NO: 649316 - DNA, 19 bp, Mus musculus
  siRNA target sequence for Fras1 (NM_175473.2,11973-11991).
gaatccagaacaaaacctt

SEQ ID NO: 649317 - DNA, 19 bp, Mus musculus
  siRNA target sequence for Fras1 (NM_175473.2,12067-12085).
cctacggggacgatctaca

SEQ ID NO: 649318 - DNA, 19 bp, Mus musculus
  siRNA target sequence for Fras1 (NM_175473.2,12068-12086).
ctacggggacgatctacaa

SEQ ID NO: 649319 - DNA, 19 bp, Mus musculus
  siRNA target sequence for Fras1 (NM_175473.2,12093-12111).
gccacagtacggatgcatt

SEQ ID NO: 649320 - DNA, 19 bp, Mus musculus
  siRNA target sequence for Fras1 (NM_175473.2,12104-12122).
gatgcattcagccaaataa

SEQ ID NO: 649321 - DNA, 19 bp, Mus musculus
  siRNA target sequence for Fras1 (NM_175473.2,12107-12125).
gcattcagccaaataaaca

SEQ ID NO: 649322 - DNA, 19 bp, Mus musculus
  siRNA target sequence for Fras1 (NM_175473.2,12195-12213).
gcctttcgaggctcacttt

SEQ ID NO: 649323 - DNA, 19 bp, Mus musculus
  siRNA target sequence for Fras1 (NM_175473.2,12266-12284).
gattcaccctcaaagtaga

SEQ ID NO: 649324 - DNA, 19 bp, Mus musculus
  siRNA target sequence for Fras1 (NM_175473.2,12317-12335).
ggtatctccaggtgatcta

SEQ ID NO: 649325 - DNA, 19 bp, Mus musculus
  siRNA target sequence for Fras1 (NM_175473.2,12519-12537).
gatgcaggagcccgttata

SEQ ID NO: 649326 - DNA, 19 bp, Mus musculus
  siRNA target sequence for Fras1 (NM_175473.2,12575-12593).
gcgcgttggcagctatcat

SEQ ID NO: 649327 - DNA, 19 bp, Mus musculus
  siRNA target sequence for Fras1 (NM_175473.2,12587-12605).
ctatcatgcttctcctatt

SEQ ID NO: 649328 - DNA, 19 bp, Mus musculus
  siRNA target sequence for Fras1 (NM_175473.2,12609-12627).
gtttctggtggcctgtttt

SEQ ID NO: 649329 - DNA, 19 bp, Mus musculus
  siRNA target sequence for Fras1 (NM_175473.2,12681-12699).
ggaggaataccctctgaat

SEQ ID NO: 649330 - DNA, 19 bp, Mus musculus
  siRNA target sequence for Fras1 (NM_175473.2,12764-12782).
gtaccgtgcgcaatgtcaa

SEQ ID NO: 649331 - DNA, 19 bp, Mus musculus
  siRNA target sequence for Fras1 (NM_175473.2,12767-12785).
ccgtgcgcaatgtcaacat

SEQ ID NO: 649332 - DNA, 19 bp, Mus musculus
  siRNA target sequence for Fras1 (NM_175473.2,12768-12786).
cgtgcgcaatgtcaacata

SEQ ID NO: 649333 - DNA, 19 bp, Mus musculus
  siRNA target sequence for Fras1 (NM_175473.2,12791-12809).
gtgacaatgaagggtatta

SEQ ID NO: 649334 - DNA, 19 bp, Mus musculus
  siRNA target sequence for Fras1 (NM_175473.2,12793-12811).
gacaatgaagggtattata

SEQ ID NO: 649335 - DNA, 19 bp, Mus musculus
  siRNA target sequence for Fras1 (NM_175473.2,12812-12830).
cgttcaaaggtgctaaagt

SEQ ID NO: 649336 - DNA, 19 bp, Mus musculus
  siRNA target sequence for Fras1 (NM_175473.2,12823-12841).
gctaaagtcaaaaaactga

SEQ ID NO: 649337 - DNA, 19 bp, Mus musculus
  siRNA target sequence for Fras1 (NM_175473.2,12854-12872).
gagtccacaacaatttaca

SEQ ID NO: 649338 - DNA, 19 bp, Mus musculus
  siRNA target sequence for Glrx1 (NM_053108.2,140-158).
gaaagacccaagaaatcct

SEQ ID NO: 649339 - DNA, 19 bp, Mus musculus
  siRNA target sequence for Glrx1 (NM_053108.2,161-179).
gtcaactgcctttcaaaca

SEQ ID NO: 649340 - DNA, 19 bp, Mus musculus
  siRNA target sequence for Glrx1 (NM_053108.2,216-234).
caacaccagtgcgattcaa

SEQ ID NO: 649341 - DNA, 19 bp, Mus musculus
  siRNA target sequence for Glrx1 (NM_053108.2,219-237).
caccagtgcgattcaagat

SEQ ID NO: 649342 - DNA, 19 bp, Mus musculus
  siRNA target sequence for Glrx1 (NM_053108.2,221-239).
ccagtgcgattcaagatta

SEQ ID NO: 649343 - DNA, 19 bp, Mus musculus
  siRNA target sequence for Glrx1 (NM_053108.2,222-240).
cagtgcgattcaagattat

SEQ ID NO: 649344 - DNA, 19 bp, Mus musculus
  siRNA target sequence for Glrx1 (NM_053108.2,224-242).
gtgcgattcaagattattt

SEQ ID NO: 649345 - DNA, 19 bp, Mus musculus
  siRNA target sequence for Glrx1 (NM_053108.2,227-245).
cgattcaagattatttaca

SEQ ID NO: 649346 - DNA, 19 bp, Mus musculus
  siRNA target sequence for Glrx1 (NM_053108.2,271-289).
cctcgggtcttcataggta

SEQ ID NO: 649347 - DNA, 19 bp, Mus musculus
  siRNA target sequence for Glrx1 (NM_053108.2,275-293).
gggtcttcataggtaaaga

SEQ ID NO: 649348 - DNA, 19 bp, Mus musculus
  siRNA target sequence for Glrx1 (NM_053108.2,277-295).
gtcttcataggtaaagact

SEQ ID NO: 649349 - DNA, 19 bp, Mus musculus
  siRNA target sequence for Glrx1 (NM_053108.2,301-319).
ggcggatgcagtgatctaa

SEQ ID NO: 649350 - DNA, 19 bp, Mus musculus
  siRNA target sequence for Glrx1 (NM_053108.2,302-320).
gcggatgcagtgatctaat

SEQ ID NO: 649351 - DNA, 19 bp, Mus musculus
  siRNA target sequence for Glrx2 (NM_023505.1,65-83).
ggggaagtctacaactact

SEQ ID NO: 649352 - DNA, 19 bp, Mus musculus
  siRNA target sequence for Glrx2 (NM_023505.1,106-124).
caatttctaacaattgtgt

SEQ ID NO: 649353 - DNA, 19 bp, Mus musculus
  siRNA target sequence for Glrx2 (NM_023505.1,125-143).
ggtgatcttctcaaaaaca

SEQ ID NO: 649354 - DNA, 19 bp, Mus musculus
  siRNA target sequence for Glrx2 (NM_023505.1,126-144).
gtgatcttctcaaaaacat

SEQ ID NO: 649355 - DNA, 19 bp, Mus musculus
  siRNA target sequence for Glrx2 (NM_023505.1,274-292).
gaaccgttcccaggatatt

SEQ ID NO: 649356 - DNA, 19 bp, Mus musculus
  siRNA target sequence for Glrx2 (NM_023505.1,277-295).
ccgttcccaggatatttgt

SEQ ID NO: 649357 - DNA, 19 bp, Mus musculus
  siRNA target sequence for Glrx2 (NM_023505.1,360-378).
ctctggttcatcagtgtta

SEQ ID NO: 649358 - DNA, 19 bp, Mus musculus
  siRNA target sequence for Glrx2 (NM_023505.1,362-380).
ctggttcatcagtgttatt

SEQ ID NO: 649359 - DNA, 19 bp, Mus musculus
  siRNA target sequence for Gp2 (NM_025989.1,211-229).
ctacaatacatcaaggtta

SEQ ID NO: 649360 - DNA, 19 bp, Mus musculus
  siRNA target sequence for Gp2 (NM_025989.1,306-324).
gatccctgccagaatcaca

SEQ ID NO: 649361 - DNA, 19 bp, Mus musculus
  siRNA target sequence for Gp2 (NM_025989.1,356-374).
gaacaacgattcatcagtt

SEQ ID NO: 649362 - DNA, 19 bp, Mus musculus
  siRNA target sequence for Gp2 (NM_025989.1,372-390).
gttgcatggtgtgatgata

SEQ ID NO: 649363 - DNA, 19 bp, Mus musculus
  siRNA target sequence for Gp2 (NM_025989.1,615-633).
gaatatcacgtgtacaagt

SEQ ID NO: 649364 - DNA, 19 bp, Mus musculus
  siRNA target sequence for Gp2 (NM_025989.1,680-698).
cactgcacccaagaattgt

SEQ ID NO: 649365 - DNA, 19 bp, Mus musculus
  siRNA target sequence for Gp2 (NM_025989.1,682-700).
ctgcacccaagaattgtga

SEQ ID NO: 649366 - DNA, 19 bp, Mus musculus
  siRNA target sequence for Gp2 (NM_025989.1,687-705).
cccaagaattgtgagatta

SEQ ID NO: 649367 - DNA, 19 bp, Mus musculus
  siRNA target sequence for Gp2 (NM_025989.1,692-710).
gaattgtgagattacttgt

SEQ ID NO: 649368 - DNA, 19 bp, Mus musculus
  siRNA target sequence for Gp2 (NM_025989.1,958-976).
gccctgttgtggctaatta

SEQ ID NO: 649369 - DNA, 19 bp, Mus musculus
  siRNA target sequence for Gp2 (NM_025989.1,960-978).
cctgttgtggctaattact

SEQ ID NO: 649370 - DNA, 19 bp, Mus musculus
  siRNA target sequence for Gp2 (NM_025989.1,1002-1020).
gggacccatgccatctaca

SEQ ID NO: 649371 - DNA, 19 bp, Mus musculus
  siRNA target sequence for Gp2 (NM_025989.1,1055-1073).
cagggactttcgtgtcaat

SEQ ID NO: 649372 - DNA, 19 bp, Mus musculus
  siRNA target sequence for Gp2 (NM_025989.1,1213-1231).
gctacacaaacccttatga

SEQ ID NO: 649373 - DNA, 19 bp, Mus musculus
  siRNA target sequence for Gp2 (NM_025989.1,1272-1290).
gtgggtgtcctcttaaata

SEQ ID NO: 649374 - DNA, 19 bp, Mus musculus
  siRNA target sequence for Gp2 (NM_025989.1,1274-1292).
gggtgtcctcttaaataga

SEQ ID NO: 649375 - DNA, 19 bp, Mus musculus
  siRNA target sequence for Gp2 (NM_025989.1,1295-1313).
ggatacctccaggttcaaa

SEQ ID NO: 649376 - DNA, 19 bp, Mus musculus
  siRNA target sequence for Gp2 (NM_025989.1,1354-1372).
ggcatgaccctgtgaagta

SEQ ID NO: 649377 - DNA, 19 bp, Mus musculus
  siRNA target sequence for Gp2 (NM_025989.1,1356-1374).
catgaccctgtgaagtact

SEQ ID NO: 649378 - DNA, 19 bp, Mus musculus
  siRNA target sequence for Gp2 (NM_025989.1,1385-1403).
gaacagatgcccaaaccaa

SEQ ID NO: 649379 - DNA, 19 bp, Mus musculus
  siRNA target sequence for Gp2 (NM_025989.1,1442-1460).
ctcagaaagccgattttca

SEQ ID NO: 649380 - DNA, 19 bp, Mus musculus
  siRNA target sequence for Gp2 (NM_025989.1,1523-1541).
gtgtgactccactactgaa

SEQ ID NO: 649381 - DNA, 19 bp, Mus musculus
  siRNA target sequence for Gp2 (NM_025989.1,1548-1566).
caaccatcttgctctacaa

SEQ ID NO: 649382 - DNA, 19 bp, Mus musculus
  siRNA target sequence for Gp2 (NM_025989.1,1582-1600).
gtagaccagccattgacta

SEQ ID NO: 649383 - DNA, 19 bp, Mus musculus
  siRNA target sequence for Gp2 (NM_025989.1,1585-1603).
gaccagccattgactataa

SEQ ID NO: 649384 - DNA, 19 bp, Mus musculus
  siRNA target sequence for Gp2 (NM_025989.1,1614-1632).
gatttaggacccatcacta

SEQ ID NO: 649385 - DNA, 19 bp, Mus musculus
  siRNA target sequence for Gp2 (NM_025989.1,1620-1638).
ggacccatcactaaaagaa

SEQ ID NO: 649386 - DNA, 19 bp, Mus musculus
  siRNA target sequence for Gtf2e1 (NM_028812.1,1106-1124).
catgcgagctctactcatt

SEQ ID NO: 649387 - DNA, 19 bp, Mus musculus
  siRNA target sequence for Gtf2e1 (NM_028812.1,1109-1127).
gcgagctctactcattcat

SEQ ID NO: 649388 - DNA, 19 bp, Mus musculus
  siRNA target sequence for Gtf2e1 (NM_028812.1,1119-1137).
ctcattcatgagaagaaga

SEQ ID NO: 649389 - DNA, 19 bp, Mus musculus
  siRNA target sequence for Gtf2e1 (NM_028812.1,1216-1234).
ccagcgagtcagatgatga

SEQ ID NO: 649390 - DNA, 19 bp, Mus musculus
  siRNA target sequence for Gtf2e1 (NM_028812.1,1429-1447).
ccatgggccagcgtatgtt

SEQ ID NO: 649391 - DNA, 19 bp, Mus musculus
  siRNA target sequence for Gtf2e1 (NM_028812.1,1430-1448).
catgggccagcgtatgttt

SEQ ID NO: 649392 - DNA, 19 bp, Mus musculus
  siRNA target sequence for Lamb3 (NM_008484.1,219-237).
ctcccgaggggcctgttat

SEQ ID NO: 649393 - DNA, 19 bp, Mus musculus
  siRNA target sequence for Lamb3 (NM_008484.1,222-240).
ccgaggggcctgttatcca

SEQ ID NO: 649394 - DNA, 19 bp, Mus musculus
  siRNA target sequence for Lamb3 (NM_008484.1,274-292).
cttcttcgagcctcatcta

SEQ ID NO: 649395 - DNA, 19 bp, Mus musculus
  siRNA target sequence for Lamb3 (NM_008484.1,334-352).
ggacagtggcagatgaaat

SEQ ID NO: 649396 - DNA, 19 bp, Mus musculus
  siRNA target sequence for Lamb3 (NM_008484.1,337-355).
cagtggcagatgaaatgct

SEQ ID NO: 649397 - DNA, 19 bp, Mus musculus
  siRNA target sequence for Lamb3 (NM_008484.1,366-384).
ctccaggctgcctcgaaat

SEQ ID NO: 649398 - DNA, 19 bp, Mus musculus
  siRNA target sequence for Lamb3 (NM_008484.1,373-391).
ctgcctcgaaattacaaca

SEQ ID NO: 649399 - DNA, 19 bp, Mus musculus
  siRNA target sequence for Lamb3 (NM_008484.1,438-456).
gtggcagtcacagaatgat

SEQ ID NO: 649400 - DNA, 19 bp, Mus musculus
  siRNA target sequence for Lamb3 (NM_008484.1,712-730).
gggggaaaggtccaactta

SEQ ID NO: 649401 - DNA, 19 bp, Mus musculus
  siRNA target sequence for Lamb3 (NM_008484.1,713-731).
ggggaaaggtccaacttaa

SEQ ID NO: 649402 - DNA, 19 bp, Mus musculus
  siRNA target sequence for Lamb3 (NM_008484.1,723-741).
ccaacttaaccttatggat

SEQ ID NO: 649403 - DNA, 19 bp, Mus musculus
  siRNA target sequence for Lamb3 (NM_008484.1,770-788).
gtaaaaagattcaagaact

SEQ ID NO: 649404 - DNA, 19 bp, Mus musculus
  siRNA target sequence for Lamb3 (NM_008484.1,787-805).
cttggggacatcacaaact

SEQ ID NO: 649405 - DNA, 19 bp, Mus musculus
  siRNA target sequence for Lamb3 (NM_008484.1,1022-1040).
gctgtgcccctttctacaa

SEQ ID NO: 649406 - DNA, 19 bp, Mus musculus
  siRNA target sequence for Lamb3 (NM_008484.1,1250-1268).
ccagcgctcccattcatga

SEQ ID NO: 649407 - DNA, 19 bp, Mus musculus
  siRNA target sequence for Lamb3 (NM_008484.1,1452-1470).
cttaggtgcccggaaagat

SEQ ID NO: 649408 - DNA, 19 bp, Mus musculus
  siRNA target sequence for Lamb3 (NM_008484.1,1500-1518).
cttgtgtctgcccaatgta

SEQ ID NO: 649409 - DNA, 19 bp, Mus musculus
  siRNA target sequence for Lamb3 (NM_008484.1,1620-1638).
ccagtgcaaccagtttaca

SEQ ID NO: 649410 - DNA, 19 bp, Mus musculus
  siRNA target sequence for Lamb3 (NM_008484.1,2115-2133).
gtctatcaggagaactctt

SEQ ID NO: 649411 - DNA, 19 bp, Mus musculus
  siRNA target sequence for Lamb3 (NM_008484.1,2216-2234).
gtcggctcctccttatgta

SEQ ID NO: 649412 - DNA, 19 bp, Mus musculus
  siRNA target sequence for Lamb3 (NM_008484.1,2653-2671).
gagcagctacgaaacttca

SEQ ID NO: 649413 - DNA, 19 bp, Mus musculus
  siRNA target sequence for Lamb3 (NM_008484.1,2686-2704).
cagaccaggcaaatgatca

SEQ ID NO: 649414 - DNA, 19 bp, Mus musculus
  siRNA target sequence for Lamb3 (NM_008484.1,2988-3006).
gctatcccagaccaaacaa

SEQ ID NO: 649415 - DNA, 19 bp, Mus musculus
  siRNA target sequence for Lamb3 (NM_008484.1,3366-3384).
ccaggagggctttaagaga

SEQ ID NO: 649416 - DNA, 19 bp, Mus musculus
  siRNA target sequence for Lamb3 (NM_008484.1,3370-3388).
gagggctttaagagactta

SEQ ID NO: 649417 - DNA, 19 bp, Mus musculus
  siRNA target sequence for Lamb3 (NM_008484.1,3440-3458).
gcgagcaaggcaatcgaat

SEQ ID NO: 649418 - DNA, 19 bp, Mus musculus
  siRNA target sequence for Lamb3 (NM_008484.1,3548-3566).
gagggagtcaggctatcat

SEQ ID NO: 649419 - DNA, 19 bp, Mus musculus
  siRNA target sequence for Lamb3 (NM_008484.1,3607-3625).
gagcagatccgcagttaca

SEQ ID NO: 649420 - DNA, 19 bp, Mus musculus
  siRNA target sequence for Lamb3 (NM_008484.1,3612-3630).
gatccgcagttacatcaat

SEQ ID NO: 649421 - DNA, 19 bp, Mus musculus
  siRNA target sequence for Ldb3 (NM_011918.1,418-436).
gaaggtggtagccaattct

SEQ ID NO: 649422 - DNA, 19 bp, Mus musculus
  siRNA target sequence for Ldb3 (NM_011918.1,499-517).
cacccacaagcccattgaa

SEQ ID NO: 649423 - DNA, 19 bp, Mus musculus
  siRNA target sequence for Ldb3 (NM_011918.1,876-894).
ggtttgaaacggaacgtaa

SEQ ID NO: 649424 - DNA, 19 bp, Mus musculus
  siRNA target sequence for Ldb3 (NM_011918.1,897-915).
gcccacgttttgccaaatt

SEQ ID NO: 649425 - DNA, 19 bp, Mus musculus
  siRNA target sequence for Ldb3 (NM_011918.1,934-952).
cctttcagcccaaatcctt

SEQ ID NO: 649426 - DNA, 19 bp, Mus musculus
  siRNA target sequence for Ldb3 (NM_011918.1,935-953).
ctttcagcccaaatcctta

SEQ ID NO: 649427 - DNA, 19 bp, Mus musculus
  siRNA target sequence for Ldb3 (NM_011918.1,941-959).
gcccaaatccttaatgtta

SEQ ID NO: 649428 - DNA, 19 bp, Mus musculus
  siRNA target sequence for Ldb3 (NM_011918.1,942-960).
cccaaatccttaatgttaa

SEQ ID NO: 649429 - DNA, 19 bp, Mus musculus
  siRNA target sequence for Ldb3 (NM_011918.1,943-961).
ccaaatccttaatgttaaa

SEQ ID NO: 649430 - DNA, 19 bp, Mus musculus
  siRNA target sequence for Lpp (NM_178665.3,569-587).
ccaagtataacccatacaa

SEQ ID NO: 649431 - DNA, 19 bp, Mus musculus
  siRNA target sequence for Lpp (NM_178665.3,747-765).
ggaaaggcgctctagtcta

SEQ ID NO: 649432 - DNA, 19 bp, Mus musculus
  siRNA target sequence for Lpp (NM_178665.3,987-1005).
cccagtgactccaattgga

SEQ ID NO: 649433 - DNA, 19 bp, Mus musculus
  siRNA target sequence for Lpp (NM_178665.3,988-1006).
ccagtgactccaattggaa

SEQ ID NO: 649434 - DNA, 19 bp, Mus musculus
  siRNA target sequence for Lpp (NM_178665.3,1061-1079).
cttcaaggcccacctttaa

SEQ ID NO: 649435 - DNA, 19 bp, Mus musculus
  siRNA target sequence for Lpp (NM_178665.3,1064-1082).
caaggcccacctttaatgt

SEQ ID NO: 649436 - DNA, 19 bp, Mus musculus
  siRNA target sequence for Lpp (NM_178665.3,1097-1115).
ctcagcccagcccacatta

SEQ ID NO: 649437 - DNA, 19 bp, Mus musculus
  siRNA target sequence for Lpp (NM_178665.3,1124-1142).
gtccatcctctggacaaat

SEQ ID NO: 649438 - DNA, 19 bp, Mus musculus
  siRNA target sequence for Lpp (NM_178665.3,1127-1145).
catcctctggacaaatata

SEQ ID NO: 649439 - DNA, 19 bp, Mus musculus
  siRNA target sequence for Lpp (NM_178665.3,1153-1171).
gggcctcgtggctataaca

SEQ ID NO: 649440 - DNA, 19 bp, Mus musculus
  siRNA target sequence for Lpp (NM_178665.3,1219-1237).
gttggtaccgactatgcat

SEQ ID NO: 649441 - DNA, 19 bp, Mus musculus
  siRNA target sequence for Lpp (NM_178665.3,1222-1240).
ggtaccgactatgcatata

SEQ ID NO: 649442 - DNA, 19 bp, Mus musculus
  siRNA target sequence for Lpp (NM_178665.3,1223-1241).
gtaccgactatgcatatat

SEQ ID NO: 649443 - DNA, 19 bp, Mus musculus
  siRNA target sequence for Lpp (NM_178665.3,1227-1245).
cgactatgcatatattcca

SEQ ID NO: 649444 - DNA, 19 bp, Mus musculus
  siRNA target sequence for Lpp (NM_178665.3,1286-1304).
ccaaccaaggacgctatta

SEQ ID NO: 649445 - DNA, 19 bp, Mus musculus
  siRNA target sequence for Lpp (NM_178665.3,1287-1305).
caaccaaggacgctattat

SEQ ID NO: 649446 - DNA, 19 bp, Mus musculus
  siRNA target sequence for Lpp (NM_178665.3,1290-1308).
ccaaggacgctattatgaa

SEQ ID NO: 649447 - DNA, 19 bp, Mus musculus
  siRNA target sequence for Lpp (NM_178665.3,1295-1313).
gacgctattatgaacctta

SEQ ID NO: 649448 - DNA, 19 bp, Mus musculus
  siRNA target sequence for Lpp (NM_178665.3,1341-1359).
ccgaagtgaaggtgatact

SEQ ID NO: 649449 - DNA, 19 bp, Mus musculus
  siRNA target sequence for Lpp (NM_178665.3,1368-1386).
gcaacaggttcaacctaat

SEQ ID NO: 649450 - DNA, 19 bp, Mus musculus
  siRNA target sequence for Lpp (NM_178665.3,1369-1387).
caacaggttcaacctaata

SEQ ID NO: 649451 - DNA, 19 bp, Mus musculus
  siRNA target sequence for Lpp (NM_178665.3,1372-1390).
caggttcaacctaatacct

SEQ ID NO: 649452 - DNA, 19 bp, Mus musculus
  siRNA target sequence for Lpp (NM_178665.3,1465-1483).
cccaagaagacctatatca

SEQ ID NO: 649453 - DNA, 19 bp, Mus musculus
  siRNA target sequence for Lpp (NM_178665.3,1467-1485).
caagaagacctatatcaca

SEQ ID NO: 649454 - DNA, 19 bp, Mus musculus
  siRNA target sequence for Lpp (NM_178665.3,1633-1651).
ccacccgctgacgattact

SEQ ID NO: 649455 - DNA, 19 bp, Mus musculus
  siRNA target sequence for Lpp (NM_178665.3,1634-1652).
cacccgctgacgattactt

SEQ ID NO: 649456 - DNA, 19 bp, Mus musculus
  siRNA target sequence for Lpp (NM_178665.3,1806-1824).
ctgcgagccctgctacatt

SEQ ID NO: 649457 - DNA, 19 bp, Mus musculus
  siRNA target sequence for Lpp (NM_178665.3,1809-1827).
cgagccctgctacattaat

SEQ ID NO: 649458 - DNA, 19 bp, Mus musculus
  siRNA target sequence for Lpp (NM_178665.3,1810-1828).
gagccctgctacattaata

SEQ ID NO: 649459 - DNA, 19 bp, Mus musculus
  siRNA target sequence for Lpp (NM_178665.3,1939-1957).
ctggacggcatcccattta

SEQ ID NO: 649460 - DNA, 19 bp, Mus musculus
  siRNA target sequence for Lpp (NM_178665.3,1941-1959).
ggacggcatcccatttact

SEQ ID NO: 649461 - DNA, 19 bp, Mus musculus
  siRNA target sequence for Lpp (NM_178665.3,1966-1984).
gcttgcggtctcattcact

SEQ ID NO: 649462 - DNA, 19 bp, Mus musculus
  siRNA target sequence for Lpp (NM_178665.3,2171-2189).
ccttggatggacacattct

SEQ ID NO: 649463 - DNA, 19 bp, Mus musculus
  siRNA target sequence for Ndufs2 (NM_153064.3,133-151).
gtggcagccagatattgaa

SEQ ID NO: 649464 - DNA, 19 bp, Mus musculus
  siRNA target sequence for Ndufs2 (NM_153064.3,415-433).
gcaggcccttccatacttt

SEQ ID NO: 649465 - DNA, 19 bp, Mus musculus
  siRNA target sequence for Ndufs2 (NM_153064.3,434-452).
gaccggttggactatgtgt

SEQ ID NO: 649466 - DNA, 19 bp, Mus musculus
  siRNA target sequence for Ndufs2 (NM_153064.3,451-469).
gtccatgatgtgtaatgaa

SEQ ID NO: 649467 - DNA, 19 bp, Mus musculus
  siRNA target sequence for Ndufs2 (NM_153064.3,453-471).
ccatgatgtgtaatgaaca

SEQ ID NO: 649468 - DNA, 19 bp, Mus musculus
  siRNA target sequence for Ndufs2 (NM_153064.3,549-567).
gagagatcacacggatttt

SEQ ID NO: 649469 - DNA, 19 bp, Mus musculus
  siRNA target sequence for Ndufs2 (NM_153064.3,551-569).
gagatcacacggattttaa

SEQ ID NO: 649470 - DNA, 19 bp, Mus musculus
  siRNA target sequence for Ndufs2 (NM_153064.3,556-574).
cacacggattttaaaccat

SEQ ID NO: 649471 - DNA, 19 bp, Mus musculus
  siRNA target sequence for Ndufs2 (NM_153064.3,558-576).
cacggattttaaaccatat

SEQ ID NO: 649472 - DNA, 19 bp, Mus musculus
  siRNA target sequence for Ndufs2 (NM_153064.3,560-578).
cggattttaaaccatatca

SEQ ID NO: 649473 - DNA, 19 bp, Mus musculus
  siRNA target sequence for Ndufs2 (NM_153064.3,561-579).
ggattttaaaccatatcat

SEQ ID NO: 649474 - DNA, 19 bp, Mus musculus
  siRNA target sequence for Ndufs2 (NM_153064.3,609-627).
gtgccatgactcctttctt

SEQ ID NO: 649475 - DNA, 19 bp, Mus musculus
  siRNA target sequence for Ndufs2 (NM_153064.3,740-758).
gggcttctggatgacattt

SEQ ID NO: 649476 - DNA, 19 bp, Mus musculus
  siRNA target sequence for Ndufs2 (NM_153064.3,775-793).
cttctctcttcggattgat

SEQ ID NO: 649477 - DNA, 19 bp, Mus musculus
  siRNA target sequence for Ndufs2 (NM_153064.3,805-823).
gatgctgaccaacaataga

SEQ ID NO: 649478 - DNA, 19 bp, Mus musculus
  siRNA target sequence for Ndufs2 (NM_153064.3,842-860).
gtcgacattggggttgtaa

SEQ ID NO: 649479 - DNA, 19 bp, Mus musculus
  siRNA target sequence for Ndufs2 (NM_153064.3,844-862).
cgacattggggttgtaaca

SEQ ID NO: 649480 - DNA, 19 bp, Mus musculus
  siRNA target sequence for Ndufs2 (NM_153064.3,861-879).
cagcggaagacgcacttaa

SEQ ID NO: 649481 - DNA, 19 bp, Mus musculus
  siRNA target sequence for Ndufs2 (NM_153064.3,863-881).
gcggaagacgcacttaact

SEQ ID NO: 649482 - DNA, 19 bp, Mus musculus
  siRNA target sequence for Ndufs2 (NM_153064.3,864-882).
cggaagacgcacttaacta

SEQ ID NO: 649483 - DNA, 19 bp, Mus musculus
  siRNA target sequence for Ndufs2 (NM_153064.3,865-883).
ggaagacgcacttaactat

SEQ ID NO: 649484 - DNA, 19 bp, Mus musculus
  siRNA target sequence for Ndufs2 (NM_153064.3,939-957).
cccagccctatgacgttta

SEQ ID NO: 649485 - DNA, 19 bp, Mus musculus
  siRNA target sequence for Ndufs2 (NM_153064.3,992-1010).
cgaggggactgctacgata

SEQ ID NO: 649486 - DNA, 19 bp, Mus musculus
  siRNA target sequence for Ndufs2 (NM_153064.3,996-1014).
gggactgctacgataggta

SEQ ID NO: 649487 - DNA, 19 bp, Mus musculus
  siRNA target sequence for Ndufs2 (NM_153064.3,1038-1056).
gccagtccctgcgaatcat

SEQ ID NO: 649488 - DNA, 19 bp, Mus musculus
  siRNA target sequence for Ndufs2 (NM_153064.3,1039-1057).
ccagtccctgcgaatcatt

SEQ ID NO: 649489 - DNA, 19 bp, Mus musculus
  siRNA target sequence for Ndufs2 (NM_153064.3,1058-1076).
gagcagtgtctgaacaaga

SEQ ID NO: 649490 - DNA, 19 bp, Mus musculus
  siRNA target sequence for Ndufs2 (NM_153064.3,1155-1173).
cactaattcatcactttaa

SEQ ID NO: 649491 - DNA, 19 bp, Mus musculus
  siRNA target sequence for Ndufs2 (NM_153064.3,1163-1181).
catcactttaagctgtata

SEQ ID NO: 649492 - DNA, 19 bp, Mus musculus
  siRNA target sequence for Ndufs2 (NM_153064.3,1238-1256).
ggagagtttggggtatact

SEQ ID NO: 649493 - DNA, 19 bp, Mus musculus
  siRNA target sequence for Ndufs2 (NM_153064.3,1278-1296).
gcccttatcggtgtaagat

SEQ ID NO: 649494 - DNA, 19 bp, Mus musculus
  siRNA target sequence for Ndufs2 (NM_153064.3,1280-1298).
ccttatcggtgtaagatca

SEQ ID NO: 649495 - DNA, 19 bp, Mus musculus
  siRNA target sequence for Ndufs2 (NM_153064.3,1281-1299).
cttatcggtgtaagatcaa

SEQ ID NO: 649496 - DNA, 19 bp, Mus musculus
  siRNA target sequence for Ndufs2 (NM_153064.3,1375-1393).
cataggtacccaggatatt

SEQ ID NO: 649497 - DNA, 19 bp, Mus musculus
  siRNA target sequence for Ndufs2 (NM_153064.3,1379-1397).
ggtacccaggatattgtgt

SEQ ID NO: 649498 - DNA, 19 bp, Mus musculus
  siRNA target sequence for Ndufs2 (NM_153064.3,1380-1398).
gtacccaggatattgtgtt

SEQ ID NO: 649499 - DNA, 19 bp, Mus musculus
  siRNA target sequence for Osr2 (NM_054049.1,845-863).
gcaagaagatcctcctaaa

SEQ ID NO: 649500 - DNA, 19 bp, Mus musculus
  siRNA target sequence for Osr2 (NM_054049.1,904-922).
ccatctcgggcctcagtaa

SEQ ID NO: 649501 - DNA, 19 bp, Mus musculus
  siRNA target sequence for Osr2 (NM_054049.1,910-928).
cgggcctcagtaaactgaa

SEQ ID NO: 649502 - DNA, 19 bp, Mus musculus
  siRNA target sequence for Osr2 (NM_054049.1,955-973).
gattgccctccaaaacgaa

SEQ ID NO: 649503 - DNA, 19 bp, Mus musculus
  siRNA target sequence for Osr2 (NM_054049.1,1003-1021).
gacactttaccaaatcata

SEQ ID NO: 649504 - DNA, 19 bp, Mus musculus
  siRNA target sequence for Osr2 (NM_054049.1,1007-1025).
ctttaccaaatcatacaat

SEQ ID NO: 649505 - DNA, 19 bp, Mus musculus
  siRNA target sequence for Osr2 (NM_054049.1,1018-1036).
catacaatttgctcattca

SEQ ID NO: 649506 - DNA, 19 bp, Mus musculus
  siRNA target sequence for Osr2 (NM_054049.1,1090-1108).
catttcggaggcaagatca

SEQ ID NO: 649507 - DNA, 19 bp, Mus musculus
  siRNA target sequence for Osr2 (NM_054049.1,1115-1133).
ggatcacaggtatatccat

SEQ ID NO: 649508 - DNA, 19 bp, Mus musculus
  siRNA target sequence for Osr2 (NM_054049.1,1121-1139).
caggtatatccattccaaa

SEQ ID NO: 649509 - DNA, 19 bp, Mus musculus
  siRNA target sequence for Osr2 (NM_054049.1,1124-1142).
gtatatccattccaaagaa

SEQ ID NO: 649510 - DNA, 19 bp, Mus musculus
  siRNA target sequence for Osr2 (NM_054049.1,1193-1211).
cctagcagttcacaaaact

SEQ ID NO: 649511 - DNA, 19 bp, Mus musculus
  siRNA target sequence for Osr2 (NM_054049.1,1194-1212).
ctagcagttcacaaaactt

SEQ ID NO: 649512 - DNA, 19 bp, Mus musculus
  siRNA target sequence for Osr2 (NM_054049.1,1244-1262).
gagcagtgcggcaaagtgt

SEQ ID NO: 649513 - DNA, 19 bp, Mus musculus
  siRNA target sequence for Pdc (NM_024458.1,424-442).
gagttttgggcctaggtat

SEQ ID NO: 649514 - DNA, 19 bp, Mus musculus
  siRNA target sequence for Pdc (NM_024458.1,434-452).
cctaggtatgggtttgtgt

SEQ ID NO: 649515 - DNA, 19 bp, Mus musculus
  siRNA target sequence for Pdc (NM_024458.1,576-594).
cgtgccttgcagtagagta

SEQ ID NO: 649516 - DNA, 19 bp, Mus musculus
  siRNA target sequence for Pdc (NM_024458.1,596-614).
ccaatggtcaagttctgta

SEQ ID NO: 649517 - DNA, 19 bp, Mus musculus
  siRNA target sequence for Pdc (NM_024458.1,601-619).
ggtcaagttctgtaaaata

SEQ ID NO: 649518 - DNA, 19 bp, Mus musculus
  siRNA target sequence for Pdc (NM_024458.1,669-687).
ctacgttgctggtgtacaa

SEQ ID NO: 649519 - DNA, 19 bp, Mus musculus
  siRNA target sequence for Pdc (NM_024458.1,685-703).
caaaggtggggaactcata

SEQ ID NO: 649520 - DNA, 19 bp, Mus musculus
  siRNA target sequence for Pdc (NM_024458.1,690-708).
gtggggaactcataagcaa

SEQ ID NO: 649521 - DNA, 19 bp, Mus musculus
  siRNA target sequence for Pdc (NM_024458.1,692-710).
ggggaactcataagcaatt

SEQ ID NO: 649522 - DNA, 19 bp, Mus musculus
  siRNA target sequence for Pdc (NM_024458.1,693-711).
gggaactcataagcaattt

SEQ ID NO: 649523 - DNA, 19 bp, Mus musculus
  siRNA target sequence for Pdc (NM_024458.1,755-773).
gatgtggagtctttcctaa

SEQ ID NO: 649524 - DNA, 19 bp, Mus musculus
  siRNA target sequence for Pdc (NM_024458.1,783-801).
gattactaccagaaagaga

SEQ ID NO: 649525 - DNA, 19 bp, Mus musculus
  siRNA target sequence for Pdc (NM_024458.1,792-810).
cagaaagagagatacatga

SEQ ID NO: 649526 - DNA, 19 bp, Mus musculus
  siRNA target sequence for Pdcl (NM_026176.2,100-118).
caaccctggatgataagtt

SEQ ID NO: 649527 - DNA, 19 bp, Mus musculus
  siRNA target sequence for Pdcl (NM_026176.2,103-121).
ccctggatgataagttact

SEQ ID NO: 649528 - DNA, 19 bp, Mus musculus
  siRNA target sequence for Pdcl (NM_026176.2,126-144).
gagaaattacagtactact

SEQ ID NO: 649529 - DNA, 19 bp, Mus musculus
  siRNA target sequence for Pdcl (NM_026176.2,257-275).
catcaatacaggtccaaaa

SEQ ID NO: 649530 - DNA, 19 bp, Mus musculus
  siRNA target sequence for Pdcl (NM_026176.2,260-278).
caatacaggtccaaaaggt

SEQ ID NO: 649531 - DNA, 19 bp, Mus musculus
  siRNA target sequence for Pdcl (NM_026176.2,268-286).
gtccaaaaggtgtgatcaa

SEQ ID NO: 649532 - DNA, 19 bp, Mus musculus
  siRNA target sequence for Pdcl (NM_026176.2,271-289).
caaaaggtgtgatcaatga

SEQ ID NO: 649533 - DNA, 19 bp, Mus musculus
  siRNA target sequence for Pdcl (NM_026176.2,469-487).
gtacaaaggacaagaactt

SEQ ID NO: 649534 - DNA, 19 bp, Mus musculus
  siRNA target sequence for Pdcl (NM_026176.2,536-554).
gatgcggcagcagtttcat

SEQ ID NO: 649535 - DNA, 19 bp, Mus musculus
  siRNA target sequence for Pdcl (NM_026176.2,539-557).
gcggcagcagtttcataaa

SEQ ID NO: 649536 - DNA, 19 bp, Mus musculus
  siRNA target sequence for Pdcl (NM_026176.2,594-612).
ggagaagggtttttagata

SEQ ID NO: 649537 - DNA, 19 bp, Mus musculus
  siRNA target sequence for Pdcl (NM_026176.2,597-615).
gaagggtttttagatatga

SEQ ID NO: 649538 - DNA, 19 bp, Mus musculus
  siRNA target sequence for Pdcl (NM_026176.2,627-645).
caaaaaagcacacttatca

SEQ ID NO: 649539 - DNA, 19 bp, Mus musculus
  siRNA target sequence for Pdcl (NM_026176.2,637-655).
cacttatcatggttcatat

SEQ ID NO: 649540 - DNA, 19 bp, Mus musculus
  siRNA target sequence for Pdcl (NM_026176.2,742-760).
gggtgaggagctcagttat

SEQ ID NO: 649541 - DNA, 19 bp, Mus musculus
  siRNA target sequence for Pdcl (NM_026176.2,743-761).
ggtgaggagctcagttatt

SEQ ID NO: 649542 - DNA, 19 bp, Mus musculus
  siRNA target sequence for Pdcl (NM_026176.2,762-780).
ggggccagtagtcgtttta

SEQ ID NO: 649543 - DNA, 19 bp, Mus musculus
  siRNA target sequence for Pdcl (NM_026176.2,820-838).
gtgaattgattggcaattt

SEQ ID NO: 649544 - DNA, 19 bp, Mus musculus
  siRNA target sequence for Pdcl (NM_026176.2,877-895).
ctgtagaccttgaagcttt

SEQ ID NO: 649545 - DNA, 19 bp, Mus musculus
  siRNA target sequence for Pdcl (NM_026176.2,941-959).
gacatctgtgcgaaactct

SEQ ID NO: 649546 - DNA, 19 bp, Mus musculus
  siRNA target sequence for Pdcl (NM_026176.2,980-998).
cagcgatctggaaatagat

SEQ ID NO: 649547 - DNA, 19 bp, Mus musculus
  siRNA target sequence for Prdm16 (NM_027504.2,46-64).
gacggtgacgttgtaaata

SEQ ID NO: 649548 - DNA, 19 bp, Mus musculus
  siRNA target sequence for Prdm16 (NM_027504.2,48-66).
cggtgacgttgtaaataat

SEQ ID NO: 649549 - DNA, 19 bp, Mus musculus
  siRNA target sequence for Prdm16 (NM_027504.2,54-72).
cgttgtaaataatatgtat

SEQ ID NO: 649550 - DNA, 19 bp, Mus musculus
  siRNA target sequence for Prdm16 (NM_027504.2,500-518).
ctggcagctggctcaagta

SEQ ID NO: 649551 - DNA, 19 bp, Mus musculus
  siRNA target sequence for Prdm16 (NM_027504.2,536-554).
cctgtgatgaccaaaacct

SEQ ID NO: 649552 - DNA, 19 bp, Mus musculus
  siRNA target sequence for Prdm16 (NM_027504.2,563-581).
gtcagatcaacgaacagat

SEQ ID NO: 649553 - DNA, 19 bp, Mus musculus
  siRNA target sequence for Prdm16 (NM_027504.2,565-583).
cagatcaacgaacagattt

SEQ ID NO: 649554 - DNA, 19 bp, Mus musculus
  siRNA target sequence for Prdm16 (NM_027504.2,570-588).
caacgaacagatttactat

SEQ ID NO: 649555 - DNA, 19 bp, Mus musculus
  siRNA target sequence for Prdm16 (NM_027504.2,847-865).
gcgcatgagtgcaaggatt

SEQ ID NO: 649556 - DNA, 19 bp, Mus musculus
  siRNA target sequence for Prdm16 (NM_027504.2,871-889).
cggatgttccccaacaagt

SEQ ID NO: 649557 - DNA, 19 bp, Mus musculus
  siRNA target sequence for Prdm16 (NM_027504.2,893-911).
gcttggagcaacacatgat

SEQ ID NO: 649558 - DNA, 19 bp, Mus musculus
  siRNA target sequence for Prdm16 (NM_027504.2,1015-1033).
cgcttcgaatgtgaaaact

SEQ ID NO: 649559 - DNA, 19 bp, Mus musculus
  siRNA target sequence for Prdm16 (NM_027504.2,1175-1193).
gcacggtgaagccattcat

SEQ ID NO: 649560 - DNA, 19 bp, Mus musculus
  siRNA target sequence for Prdm16 (NM_027504.2,1176-1194).
cacggtgaagccattcata

SEQ ID NO: 649561 - DNA, 19 bp, Mus musculus
  siRNA target sequence for Prdm16 (NM_027504.2,1410-1428).
catgatggacaagacaaaa

SEQ ID NO: 649562 - DNA, 19 bp, Mus musculus
  siRNA target sequence for Prdm16 (NM_027504.2,1684-1702).
gtctccgcggtcagcaata

SEQ ID NO: 649563 - DNA, 19 bp, Mus musculus
  siRNA target sequence for Prdm16 (NM_027504.2,1727-1745).
ccgggtcagaggagaaatt

SEQ ID NO: 649564 - DNA, 19 bp, Mus musculus
  siRNA target sequence for Prdm16 (NM_027504.2,1771-1789).
gcggagaaggtcaaaaata

SEQ ID NO: 649565 - DNA, 19 bp, Mus musculus
  siRNA target sequence for Prdm16 (NM_027504.2,1972-1990).
ccccctggggccatgaaca

SEQ ID NO: 649566 - DNA, 19 bp, Mus musculus
  siRNA target sequence for Prdm16 (NM_027504.2,2099-2117).
cgtccatcgcggagaaata

SEQ ID NO: 649567 - DNA, 19 bp, Mus musculus
  siRNA target sequence for Prdm16 (NM_027504.2,2102-2120).
ccatcgcggagaaatactt

SEQ ID NO: 649568 - DNA, 19 bp, Mus musculus
  siRNA target sequence for Prdm16 (NM_027504.2,2560-2578).
ccctccttgcattatgcta

SEQ ID NO: 649569 - DNA, 19 bp, Mus musculus
  siRNA target sequence for Prdm16 (NM_027504.2,2561-2579).
cctccttgcattatgctaa

SEQ ID NO: 649570 - DNA, 19 bp, Mus musculus
  siRNA target sequence for Prdm16 (NM_027504.2,2782-2800).
cctcaccacccgttcaact

SEQ ID NO: 649571 - DNA, 19 bp, Mus musculus
  siRNA target sequence for Prdm16 (NM_027504.2,2887-2905).
cccagatctgcaaatctca

SEQ ID NO: 649572 - DNA, 19 bp, Mus musculus
  siRNA target sequence for Prdm16 (NM_027504.2,2938-2956).
ccatacaggtgcaagtact

SEQ ID NO: 649573 - DNA, 19 bp, Mus musculus
  siRNA target sequence for Prdm16 (NM_027504.2,3182-3200).
cggacaaccatgcactttt

SEQ ID NO: 649574 - DNA, 19 bp, Mus musculus
  siRNA target sequence for Prdm16 (NM_027504.2,3183-3201).
ggacaaccatgcactttta

SEQ ID NO: 649575 - DNA, 19 bp, Mus musculus
  siRNA target sequence for Prdm16 (NM_027504.2,3186-3204).
caaccatgcacttttagat

SEQ ID NO: 649576 - DNA, 19 bp, Mus musculus
  siRNA target sequence for Prdm16 (NM_027504.2,3227-3245).
ccgagatccgaaacttcat

SEQ ID NO: 649577 - DNA, 19 bp, Mus musculus
  siRNA target sequence for Prdm16 (NM_027504.2,3450-3468).
gccccaaggagtctatgaa

SEQ ID NO: 649578 - DNA, 19 bp, Mus musculus
  siRNA target sequence for Prdm16 (NM_027504.2,3452-3470).
cccaaggagtctatgaaga

SEQ ID NO: 649579 - DNA, 19 bp, Mus musculus
  siRNA target sequence for Prdm16 (NM_027504.2,3763-3781).
ctggatgcttggttgaaca

SEQ ID NO: 649580 - DNA, 19 bp, Mus musculus
  siRNA target sequence for Prdm16 (NM_027504.2,3766-3784).
gatgcttggttgaacatca

SEQ ID NO: 649581 - DNA, 19 bp, Mus musculus
  siRNA target sequence for Prom2 (NM_138750.1,357-375).
cctctccgtggttcaactt

SEQ ID NO: 649582 - DNA, 19 bp, Mus musculus
  siRNA target sequence for Prom2 (NM_138750.1,358-376).
ctctccgtggttcaactta

SEQ ID NO: 649583 - DNA, 19 bp, Mus musculus
  siRNA target sequence for Prom2 (NM_138750.1,380-398).
ccttcccggcagagttgat

SEQ ID NO: 649584 - DNA, 19 bp, Mus musculus
  siRNA target sequence for Prom2 (NM_138750.1,381-399).
cttcccggcagagttgata

SEQ ID NO: 649585 - DNA, 19 bp, Mus musculus
  siRNA target sequence for Prom2 (NM_138750.1,598-616).
cgtggtaccctcatgatct

SEQ ID NO: 649586 - DNA, 19 bp, Mus musculus
  siRNA target sequence for Prom2 (NM_138750.1,599-617).
gtggtaccctcatgatctt

SEQ ID NO: 649587 - DNA, 19 bp, Mus musculus
  siRNA target sequence for Prom2 (NM_138750.1,634-652).
ctcgtgcttctgattggta

SEQ ID NO: 649588 - DNA, 19 bp, Mus musculus
  siRNA target sequence for Prom2 (NM_138750.1,838-856).
gagaaccttgggaacgtaa

SEQ ID NO: 649589 - DNA, 19 bp, Mus musculus
  siRNA target sequence for Prom2 (NM_138750.1,840-858).
gaaccttgggaacgtaatt

SEQ ID NO: 649590 - DNA, 19 bp, Mus musculus
  siRNA target sequence for Prom2 (NM_138750.1,843-861).
ccttgggaacgtaattcat

SEQ ID NO: 649591 - DNA, 19 bp, Mus musculus
  siRNA target sequence for Prom2 (NM_138750.1,844-862).
cttgggaacgtaattcata

SEQ ID NO: 649592 - DNA, 19 bp, Mus musculus
  siRNA target sequence for Prom2 (NM_138750.1,1102-1120).
caactgggcgctgacttta

SEQ ID NO: 649593 - DNA, 19 bp, Mus musculus
  siRNA target sequence for Prom2 (NM_138750.1,1247-1265).
cggtcagtgtggtcaaaga

SEQ ID NO: 649594 - DNA, 19 bp, Mus musculus
  siRNA target sequence for Prom2 (NM_138750.1,1399-1417).
gaggtgcaacaatatgaga

SEQ ID NO: 649595 - DNA, 19 bp, Mus musculus
  siRNA target sequence for Prom2 (NM_138750.1,1730-1748).
catccatgaacctatccta

SEQ ID NO: 649596 - DNA, 19 bp, Mus musculus
  siRNA target sequence for Prom2 (NM_138750.1,1734-1752).
catgaacctatcctatctt

SEQ ID NO: 649597 - DNA, 19 bp, Mus musculus
  siRNA target sequence for Prom2 (NM_138750.1,1737-1755).
gaacctatcctatcttctt

SEQ ID NO: 649598 - DNA, 19 bp, Mus musculus
  siRNA target sequence for Prom2 (NM_138750.1,1844-1862).
cgtatgacctggataagca

SEQ ID NO: 649599 - DNA, 19 bp, Mus musculus
  siRNA target sequence for Prom2 (NM_138750.1,1855-1873).
gataagcacctggatatca

SEQ ID NO: 649600 - DNA, 19 bp, Mus musculus
  siRNA target sequence for Prom2 (NM_138750.1,1861-1879).
cacctggatatcaaacagt

SEQ ID NO: 649601 - DNA, 19 bp, Mus musculus
  siRNA target sequence for Prom2 (NM_138750.1,1863-1881).
cctggatatcaaacagtat

SEQ ID NO: 649602 - DNA, 19 bp, Mus musculus
  siRNA target sequence for Prom2 (NM_138750.1,1985-2003).
gcgggctggagaaaatcca

SEQ ID NO: 649603 - DNA, 19 bp, Mus musculus
  siRNA target sequence for Prom2 (NM_138750.1,2091-2109).
ggcccaaaatgactcttta

SEQ ID NO: 649604 - DNA, 19 bp, Mus musculus
  siRNA target sequence for Prom2 (NM_138750.1,2355-2373).
gggctacttctctcagtat

SEQ ID NO: 649605 - DNA, 19 bp, Mus musculus
  siRNA target sequence for Prom2 (NM_138750.1,2608-2626).
gagacacaacttttccata

SEQ ID NO: 649606 - DNA, 19 bp, Mus musculus
  siRNA target sequence for Prom2 (NM_138750.1,2635-2653).
gtcacctctctgaagctat

SEQ ID NO: 649607 - DNA, 19 bp, Mus musculus
  siRNA target sequence for Prom2 (NM_178047.2,2200-2218).
cagtgtcactcgtctaaaa

SEQ ID NO: 649608 - DNA, 19 bp, Mus musculus
  siRNA target sequence for Qscn6 (NM_023268.1,196-214).
cctgggcggtggagttctt

SEQ ID NO: 649609 - DNA, 19 bp, Mus musculus
  siRNA target sequence for Qscn6 (NM_023268.1,253-271).
cgtggaaggagcttgctaa

SEQ ID NO: 649610 - DNA, 19 bp, Mus musculus
  siRNA target sequence for Qscn6 (NM_023268.1,267-285).
gctaacgacgtgaaagact

SEQ ID NO: 649611 - DNA, 19 bp, Mus musculus
  siRNA target sequence for Qscn6 (NM_023268.1,284-302).
ctggaggccagcactcaat

SEQ ID NO: 649612 - DNA, 19 bp, Mus musculus
  siRNA target sequence for Qscn6 (NM_023268.1,371-389).
cccgactgtgaggtttttt

SEQ ID NO: 649613 - DNA, 19 bp, Mus musculus
  siRNA target sequence for Qscn6 (NM_023268.1,373-391).
cgactgtgaggttttttca

SEQ ID NO: 649614 - DNA, 19 bp, Mus musculus
  siRNA target sequence for Qscn6 (NM_023268.1,427-445).
caggtgctggcgctaatgt

SEQ ID NO: 649615 - DNA, 19 bp, Mus musculus
  siRNA target sequence for Qscn6 (NM_023268.1,526-544).
ctgccaagctgaatgatat

SEQ ID NO: 649616 - DNA, 19 bp, Mus musculus
  siRNA target sequence for Qscn6 (NM_023268.1,540-558).
gatatcgacggattcttta

SEQ ID NO: 649617 - DNA, 19 bp, Mus musculus
  siRNA target sequence for Qscn6 (NM_023268.1,545-563).
cgacggattctttacaaga

SEQ ID NO: 649618 - DNA, 19 bp, Mus musculus
  siRNA target sequence for Qscn6 (NM_023268.1,546-564).
gacggattctttacaagaa

SEQ ID NO: 649619 - DNA, 19 bp, Mus musculus
  siRNA target sequence for Qscn6 (NM_023268.1,658-676).
cagtgcgcagggtcttgaa

SEQ ID NO: 649620 - DNA, 19 bp, Mus musculus
  siRNA target sequence for Qscn6 (NM_023268.1,660-678).
gtgcgcagggtcttgaata

SEQ ID NO: 649621 - DNA, 19 bp, Mus musculus
  siRNA target sequence for Qscn6 (NM_023268.1,662-680).
gcgcagggtcttgaataca

SEQ ID NO: 649622 - DNA, 19 bp, Mus musculus
  siRNA target sequence for Qscn6 (NM_023268.1,779-797).
gtccaggtctttctataca

SEQ ID NO: 649623 - DNA, 19 bp, Mus musculus
  siRNA target sequence for Qscn6 (NM_023268.1,785-803).
gtctttctatacatcctat

SEQ ID NO: 649624 - DNA, 19 bp, Mus musculus
  siRNA target sequence for Qscn6 (NM_023268.1,898-916).
cagaccgctccaagatcta

SEQ ID NO: 649625 - DNA, 19 bp, Mus musculus
  siRNA target sequence for Qscn6 (NM_023268.1,944-962).
ctacatcttgcgtgtagaa

SEQ ID NO: 649626 - DNA, 19 bp, Mus musculus
  siRNA target sequence for Qscn6 (NM_023268.1,993-1011).
cgcctggtggccctgaaaa

SEQ ID NO: 649627 - DNA, 19 bp, Mus musculus
  siRNA target sequence for Qscn6 (NM_023268.1,994-1012).
gcctggtggccctgaaaaa

SEQ ID NO: 649628 - DNA, 19 bp, Mus musculus
  siRNA target sequence for Qscn6 (NM_023268.1,1111-1129).
ggatcccctacagtttctt

SEQ ID NO: 649629 - DNA, 19 bp, Mus musculus
  siRNA target sequence for Qscn6 (NM_023268.1,1115-1133).
cccctacagtttcttcaaa

SEQ ID NO: 649630 - DNA, 19 bp, Mus musculus
  siRNA target sequence for Qscn6 (NM_023268.1,1263-1281).
gtgcaggcaaaccgatata

SEQ ID NO: 649631 - DNA, 19 bp, Mus musculus
  siRNA target sequence for Qscn6 (NM_023268.1,1425-1443).
cccagtaatgcgattcttt

SEQ ID NO: 649632 - DNA, 19 bp, Mus musculus
  siRNA target sequence for Qscn6 (NM_023268.1,1541-1559).
gtgttctgcctgccataat

SEQ ID NO: 649633 - DNA, 19 bp, Mus musculus
  siRNA target sequence for Qscn6 (NM_023268.1,1597-1615).
ccaccctcaactttctcaa

SEQ ID NO: 649634 - DNA, 19 bp, Mus musculus
  siRNA target sequence for Qscn6 (NM_023268.1,1632-1650).
gcaaacatcgtcatagact

SEQ ID NO: 649635 - DNA, 19 bp, Mus musculus
  siRNA target sequence for Sall4 (NM_175303.2,319-337).
ctgtgccgagttctttagt

SEQ ID NO: 649636 - DNA, 19 bp, Mus musculus
  siRNA target sequence for Sall4 (NM_175303.2,358-376).
caagaaaagttgcactaaa

SEQ ID NO: 649637 - DNA, 19 bp, Mus musculus
  siRNA target sequence for Sall4 (NM_175303.2,381-399).
ctcctgtcctcatcatgaa

SEQ ID NO: 649638 - DNA, 19 bp, Mus musculus
  siRNA target sequence for Sall4 (NM_175303.2,533-551).
gactccatcctgtacttga

SEQ ID NO: 649639 - DNA, 19 bp, Mus musculus
  siRNA target sequence for Sall4 (NM_175303.2,579-597).
cccaggacataagctattt

SEQ ID NO: 649640 - DNA, 19 bp, Mus musculus
  siRNA target sequence for Sall4 (NM_175303.2,580-598).
ccaggacataagctattta

SEQ ID NO: 649641 - DNA, 19 bp, Mus musculus
  siRNA target sequence for Sall4 (NM_175303.2,611-629).
gtagccaacaccaatgtga

SEQ ID NO: 649642 - DNA, 19 bp, Mus musculus
  siRNA target sequence for Sall4 (NM_175303.2,772-790).
ccagcttacggaacagatt

SEQ ID NO: 649643 - DNA, 19 bp, Mus musculus
  siRNA target sequence for Sall4 (NM_175303.2,957-975).
cgctcgatgccttgaaaca

SEQ ID NO: 649644 - DNA, 19 bp, Mus musculus
  siRNA target sequence for Sall4 (NM_175303.2,1206-1224).
cctctgcctcggtgttaga

SEQ ID NO: 649645 - DNA, 19 bp, Mus musculus
  siRNA target sequence for Sall4 (NM_175303.2,1209-1227).
ctgcctcggtgttagatgt

SEQ ID NO: 649646 - DNA, 19 bp, Mus musculus
  siRNA target sequence for Sall4 (NM_175303.2,1212-1230).
cctcggtgttagatgtcaa

SEQ ID NO: 649647 - DNA, 19 bp, Mus musculus
  siRNA target sequence for Sall4 (NM_175303.2,1468-1486).
gagtgccgcttctcactat

SEQ ID NO: 649648 - DNA, 19 bp, Mus musculus
  siRNA target sequence for Sall4 (NM_175303.2,1499-1517).
cccgtccctgccgatgaat

SEQ ID NO: 649649 - DNA, 19 bp, Mus musculus
  siRNA target sequence for Sall4 (NM_175303.2,1552-1570).
cacgggaaccccttctcta

SEQ ID NO: 649650 - DNA, 19 bp, Mus musculus
  siRNA target sequence for Sall4 (NM_175303.2,1586-1604).
ctcacgtcagggcctaatt

SEQ ID NO: 649651 - DNA, 19 bp, Mus musculus
  siRNA target sequence for Sall4 (NM_175303.2,1754-1772).
gggtccgagaccctgaaat

SEQ ID NO: 649652 - DNA, 19 bp, Mus musculus
  siRNA target sequence for Sall4 (NM_175303.2,1755-1773).
ggtccgagaccctgaaatt

SEQ ID NO: 649653 - DNA, 19 bp, Mus musculus
  siRNA target sequence for Sall4 (NM_175303.2,1814-1832).
cccaacgagtgtctcattt

SEQ ID NO: 649654 - DNA, 19 bp, Mus musculus
  siRNA target sequence for Sall4 (NM_175303.2,1819-1837).
cgagtgtctcatttgtcat

SEQ ID NO: 649655 - DNA, 19 bp, Mus musculus
  siRNA target sequence for Sall4 (NM_175303.2,2026-2044).
caccaacgccgtcatgtta

SEQ ID NO: 649656 - DNA, 19 bp, Mus musculus
  siRNA target sequence for Sall4 (NM_175303.2,2028-2046).
ccaacgccgtcatgttaca

SEQ ID NO: 649657 - DNA, 19 bp, Mus musculus
  siRNA target sequence for Sall4 (NM_175303.2,2131-2149).
cgtggccgtcagtgagaat

SEQ ID NO: 649658 - DNA, 19 bp, Mus musculus
  siRNA target sequence for Sall4 (NM_175303.2,2683-2701).
gggtatgccgcctttgcta

SEQ ID NO: 649659 - DNA, 19 bp, Mus musculus
  siRNA target sequence for Sall4 (NM_175303.2,2748-2766).
cacggtgtggaaagaactt

SEQ ID NO: 649660 - DNA, 19 bp, Mus musculus
  siRNA target sequence for Sall4 (NM_175303.2,2750-2768).
cggtgtggaaagaacttct

SEQ ID NO: 649661 - DNA, 19 bp, Mus musculus
  siRNA target sequence for Sall4 (NM_175303.2,2867-2885).
ctgaaggtacactacatga

SEQ ID NO: 649662 - DNA, 19 bp, Mus musculus
  siRNA target sequence for Sall4 (NM_175303.2,2884-2902).
gactcatggggccaacaat

SEQ ID NO: 649663 - DNA, 19 bp, Mus musculus
  siRNA target sequence for Sall4 (NM_175303.2,2888-2906).
catggggccaacaataact

SEQ ID NO: 649664 - DNA, 19 bp, Mus musculus
  siRNA target sequence for Sall4 (NM_175303.2,3152-3170).
gtgagcaatggcacgattt

SEQ ID NO: 649665 - DNA, 19 bp, Mus musculus
  siRNA target sequence for Sall4 (NM_175303.2,3156-3174).
gcaatggcacgatttccaa

SEQ ID NO: 649666 - DNA, 19 bp, Mus musculus
  siRNA target sequence for Smyd4 (NM_177009.1,600-618).
gatgatggtgcgtaagaca

SEQ ID NO: 649667 - DNA, 19 bp, Mus musculus
  siRNA target sequence for Smyd4 (NM_177009.1,806-824).
ccaatgccttcgaggatat

SEQ ID NO: 649668 - DNA, 19 bp, Mus musculus
  siRNA target sequence for Smyd4 (NM_177009.1,807-825).
caatgccttcgaggatata

SEQ ID NO: 649669 - DNA, 19 bp, Mus musculus
  siRNA target sequence for Smyd4 (NM_177009.1,959-977).
cttttgtaagtgtccttat

SEQ ID NO: 649670 - DNA, 19 bp, Mus musculus
  siRNA target sequence for Smyd4 (NM_177009.1,1003-1021).
cattgccttgagaacaagt

SEQ ID NO: 649671 - DNA, 19 bp, Mus musculus
  siRNA target sequence for Smyd4 (NM_177009.1,1061-1079).
gatgtctgaagcacacttt

SEQ ID NO: 649672 - DNA, 19 bp, Mus musculus
  siRNA target sequence for Smyd4 (NM_177009.1,1101-1119).
ctgcagctatgccaagtat

SEQ ID NO: 649673 - DNA, 19 bp, Mus musculus
  siRNA target sequence for Smyd4 (NM_177009.1,1219-1237).
gccctgagaatgactcttt

SEQ ID NO: 649674 - DNA, 19 bp, Mus musculus
  siRNA target sequence for Smyd4 (NM_177009.1,1220-1238).
ccctgagaatgactctttt

SEQ ID NO: 649675 - DNA, 19 bp, Mus musculus
  siRNA target sequence for Smyd4 (NM_177009.1,1221-1239).
cctgagaatgactctttta

SEQ ID NO: 649676 - DNA, 19 bp, Mus musculus
  siRNA target sequence for Smyd4 (NM_177009.1,1330-1348).
gtcaaggcatttgattaca

SEQ ID NO: 649677 - DNA, 19 bp, Mus musculus
  siRNA target sequence for Smyd4 (NM_177009.1,1411-1429).
gtcaatggaaagtatggaa

SEQ ID NO: 649678 - DNA, 19 bp, Mus musculus
  siRNA target sequence for Smyd4 (NM_177009.1,1422-1440).
gtatggaagtaattataat

SEQ ID NO: 649679 - DNA, 19 bp, Mus musculus
  siRNA target sequence for Smyd4 (NM_177009.1,1426-1444).
ggaagtaattataatgcta

SEQ ID NO: 649680 - DNA, 19 bp, Mus musculus
  siRNA target sequence for Smyd4 (NM_177009.1,1458-1476).
gccccatactgaaaagcat

SEQ ID NO: 649681 - DNA, 19 bp, Mus musculus
  siRNA target sequence for Smyd4 (NM_177009.1,1459-1477).
ccccatactgaaaagcata

SEQ ID NO: 649682 - DNA, 19 bp, Mus musculus
  siRNA target sequence for Smyd4 (NM_177009.1,1478-1496).
gcccagaacacagattcat

SEQ ID NO: 649683 - DNA, 19 bp, Mus musculus
  siRNA target sequence for Smyd4 (NM_177009.1,1545-1563).
cgtgcaggcccaaacctta

SEQ ID NO: 649684 - DNA, 19 bp, Mus musculus
  siRNA target sequence for Smyd4 (NM_177009.1,1546-1564).
gtgcaggcccaaaccttaa

SEQ ID NO: 649685 - DNA, 19 bp, Mus musculus
  siRNA target sequence for Smyd4 (NM_177009.1,1644-1662).
gctacagctgcagtgtaat

SEQ ID NO: 649686 - DNA, 19 bp, Mus musculus
  siRNA target sequence for Smyd4 (NM_177009.1,1668-1686).
ggcaataacatccatatgt

SEQ ID NO: 649687 - DNA, 19 bp, Mus musculus
  siRNA target sequence for Smyd4 (NM_177009.1,1695-1713).
gtctaacgagagcatcatt

SEQ ID NO: 649688 - DNA, 19 bp, Mus musculus
  siRNA target sequence for Smyd4 (NM_177009.1,2005-2023).
gccttctgttgtaagactt

SEQ ID NO: 649689 - DNA, 19 bp, Mus musculus
  siRNA target sequence for Smyd4 (NM_177009.1,2030-2048).
cgctcatgcagggaaatga

SEQ ID NO: 649690 - DNA, 19 bp, Mus musculus
  siRNA target sequence for Smyd4 (NM_177009.1,2031-2049).
gctcatgcagggaaatgat

SEQ ID NO: 649691 - DNA, 19 bp, Mus musculus
  siRNA target sequence for Smyd4 (NM_177009.1,2067-2085).
cgaatcttgcacaaactct

SEQ ID NO: 649692 - DNA, 19 bp, Mus musculus
  siRNA target sequence for Smyd4 (NM_177009.1,2238-2256).
caccgtactgggggaaatt

SEQ ID NO: 649693 - DNA, 19 bp, Mus musculus
  siRNA target sequence for Smyd4 (NM_177009.1,2240-2258).
ccgtactgggggaaattga

SEQ ID NO: 649694 - DNA, 19 bp, Mus musculus
  siRNA target sequence for Smyd4 (NM_177009.1,2241-2259).
cgtactgggggaaattgaa

SEQ ID NO: 649695 - DNA, 19 bp, Mus musculus
  siRNA target sequence for Smyd4 (NM_177009.1,2271-2289).
ccaggcccatgctacctta

SEQ ID NO: 649696 - DNA, 19 bp, Mus musculus
  siRNA target sequence for Smyd4 (NM_177009.1,2353-2371).
gggccatccagtgttgaaa

SEQ ID NO: 649697 - DNA, 19 bp, Mus musculus
  siRNA target sequence for Smyd4 (NM_177009.1,2392-2410).
ctggcccaagtcctattca

SEQ ID NO: 649698 - DNA, 19 bp, Mus musculus
  siRNA target sequence for Smyd4 (NM_177009.1,2394-2412).
ggcccaagtcctattcaat

SEQ ID NO: 649699 - DNA, 19 bp, Mus musculus
  siRNA target sequence for Sytl5 (NM_177704.2,111-129).
cctaaagagagatgaatat

SEQ ID NO: 649700 - DNA, 19 bp, Mus musculus
  siRNA target sequence for Sytl5 (NM_177704.2,152-170).
ggataaggaagctgaaaaa

SEQ ID NO: 649701 - DNA, 19 bp, Mus musculus
  siRNA target sequence for Sytl5 (NM_177704.2,364-382).
gtcgcgcagctaaggatta

SEQ ID NO: 649702 - DNA, 19 bp, Mus musculus
  siRNA target sequence for Sytl5 (NM_177704.2,366-384).
cgcgcagctaaggattata

SEQ ID NO: 649703 - DNA, 19 bp, Mus musculus
  siRNA target sequence for Sytl5 (NM_177704.2,367-385).
gcgcagctaaggattataa

SEQ ID NO: 649704 - DNA, 19 bp, Mus musculus
  siRNA target sequence for Sytl5 (NM_177704.2,417-435).
gcgtttcaagcaagtcaat

SEQ ID NO: 649705 - DNA, 19 bp, Mus musculus
  siRNA target sequence for Sytl5 (NM_177704.2,453-471).
cgttcgacagtccatctta

SEQ ID NO: 649706 - DNA, 19 bp, Mus musculus
  siRNA target sequence for Sytl5 (NM_177704.2,454-472).
gttcgacagtccatcttaa

SEQ ID NO: 649707 - DNA, 19 bp, Mus musculus
  siRNA target sequence for Sytl5 (NM_177704.2,515-533).
cacaacaatgtgtagacaa

SEQ ID NO: 649708 - DNA, 19 bp, Mus musculus
  siRNA target sequence for Sytl5 (NM_177704.2,526-544).
gtagacaagtcagatactt

SEQ ID NO: 649709 - DNA, 19 bp, Mus musculus
  siRNA target sequence for Sytl5 (NM_177704.2,529-547).
gacaagtcagatactttgt

SEQ ID NO: 649710 - DNA, 19 bp, Mus musculus
  siRNA target sequence for Sytl5 (NM_177704.2,531-549).
caagtcagatactttgtct

SEQ ID NO: 649711 - DNA, 19 bp, Mus musculus
  siRNA target sequence for Sytl5 (NM_177704.2,652-670).
gaaagcggaaggagctata

SEQ ID NO: 649712 - DNA, 19 bp, Mus musculus
  siRNA target sequence for Sytl5 (NM_177704.2,656-674).
gcggaaggagctatagctt

SEQ ID NO: 649713 - DNA, 19 bp, Mus musculus
  siRNA target sequence for Sytl5 (NM_177704.2,686-704).
gtcaaaatcttcagagttt

SEQ ID NO: 649714 - DNA, 19 bp, Mus musculus
  siRNA target sequence for Sytl5 (NM_177704.2,688-706).
caaaatcttcagagtttca

SEQ ID NO: 649715 - DNA, 19 bp, Mus musculus
  siRNA target sequence for Sytl5 (NM_177704.2,763-781).
gaggctggacgaagaacat

SEQ ID NO: 649716 - DNA, 19 bp, Mus musculus
  siRNA target sequence for Sytl5 (NM_177704.2,766-784).
gctggacgaagaacatcaa

SEQ ID NO: 649717 - DNA, 19 bp, Mus musculus
  siRNA target sequence for Sytl5 (NM_177704.2,801-819).
cggtggaatcccagttact

SEQ ID NO: 649718 - DNA, 19 bp, Mus musculus
  siRNA target sequence for Sytl5 (NM_177704.2,803-821).
gtggaatcccagttactca

SEQ ID NO: 649719 - DNA, 19 bp, Mus musculus
  siRNA target sequence for Sytl5 (NM_177704.2,894-912).
ggctttggctaccattgaa

SEQ ID NO: 649720 - DNA, 19 bp, Mus musculus
  siRNA target sequence for Sytl5 (NM_177704.2,895-913).
gctttggctaccattgaaa

SEQ ID NO: 649721 - DNA, 19 bp, Mus musculus
  siRNA target sequence for Sytl5 (NM_177704.2,1007-1025).
gtcgatctgaggtagattt

SEQ ID NO: 649722 - DNA, 19 bp, Mus musculus
  siRNA target sequence for Sytl5 (NM_177704.2,1009-1027).
cgatctgaggtagatttga

SEQ ID NO: 649723 - DNA, 19 bp, Mus musculus
  siRNA target sequence for Sytl5 (NM_177704.2,1032-1050).
gtcatttgcggaagactta

SEQ ID NO: 649724 - DNA, 19 bp, Mus musculus
  siRNA target sequence for Sytl5 (NM_177704.2,1034-1052).
catttgcggaagacttaga

SEQ ID NO: 649725 - DNA, 19 bp, Mus musculus
  siRNA target sequence for Sytl5 (NM_177704.2,1088-1106).
gggctttagacaaagactt

SEQ ID NO: 649726 - DNA, 19 bp, Mus musculus
  siRNA target sequence for Sytl5 (NM_177704.2,1091-1109).
ctttagacaaagacttgaa

SEQ ID NO: 649727 - DNA, 19 bp, Mus musculus
  siRNA target sequence for Sytl5 (NM_177704.2,1129-1147).
gacggtgttgacttagtgt

SEQ ID NO: 649728 - DNA, 19 bp, Mus musculus
  siRNA target sequence for Sytl5 (NM_177704.2,1249-1267).
gccgattcagacactacta

SEQ ID NO: 649729 - DNA, 19 bp, Mus musculus
  siRNA target sequence for Sytl5 (NM_177704.2,1258-1276).
gacactactagccttaaca

SEQ ID NO: 649730 - DNA, 19 bp, Mus musculus
  siRNA target sequence for Sytl5 (NM_177704.2,1293-1311).
cagtgaaacgggagactat

SEQ ID NO: 649731 - DNA, 19 bp, Mus musculus
  siRNA target sequence for Sytl5 (NM_177704.2,1372-1390).
gggctatacatttttgtca

SEQ ID NO: 649732 - DNA, 19 bp, Mus musculus
  siRNA target sequence for Sytl5 (NM_177704.2,1373-1391).
ggctatacatttttgtcaa

SEQ ID NO: 649733 - DNA, 19 bp, Mus musculus
  siRNA target sequence for Sytl5 (NM_177704.2,1438-1456).
gatgcttatgtcaagtcat

SEQ ID NO: 649734 - DNA, 19 bp, Mus musculus
  siRNA target sequence for Sytl5 (NM_177704.2,1466-1484).
cagacaagtcccgaaacaa

SEQ ID NO: 649735 - DNA, 19 bp, Mus musculus
  siRNA target sequence for Sytl5 (NM_177704.2,1488-1506).
gcgtaagaccaaaatcaga

SEQ ID NO: 649736 - DNA, 19 bp, Mus musculus
  siRNA target sequence for Sytl5 (NM_177704.2,1489-1507).
cgtaagaccaaaatcagaa

SEQ ID NO: 649737 - DNA, 19 bp, Mus musculus
  siRNA target sequence for Sytl5 (NM_177704.2,1508-1526).
cgggtaccaatccagaatt

SEQ ID NO: 649738 - DNA, 19 bp, Mus musculus
  siRNA target sequence for Sytl5 (NM_177704.2,1510-1528).
ggtaccaatccagaattca

SEQ ID NO: 649739 - DNA, 19 bp, Mus musculus
  siRNA target sequence for Sytl5 (NM_177704.2,1511-1529).
gtaccaatccagaattcaa

SEQ ID NO: 649740 - DNA, 19 bp, Mus musculus
  siRNA target sequence for Sytl5 (NM_177704.2,1519-1537).
ccagaattcaacgaaacat

SEQ ID NO: 649741 - DNA, 19 bp, Mus musculus
  siRNA target sequence for Sytl5 (NM_177704.2,1527-1545).
caacgaaacattaaagtat

SEQ ID NO: 649742 - DNA, 19 bp, Mus musculus
  siRNA target sequence for Sytl5 (NM_177704.2,1606-1624).
cggtttggacgcaacagtt

SEQ ID NO: 649743 - DNA, 19 bp, Mus musculus
  siRNA target sequence for Sytl5 (NM_177704.2,1607-1625).
ggtttggacgcaacagttt

SEQ ID NO: 649744 - DNA, 19 bp, Mus musculus
  siRNA target sequence for Sytl5 (NM_177704.2,1636-1654).
gtggagattgcttttgact

SEQ ID NO: 649745 - DNA, 19 bp, Mus musculus
  siRNA target sequence for Sytl5 (NM_177704.2,1717-1735).
cctgatattagccttcaat

SEQ ID NO: 649746 - DNA, 19 bp, Mus musculus
  siRNA target sequence for Sytl5 (NM_177704.2,1718-1736).
ctgatattagccttcaata

SEQ ID NO: 649747 - DNA, 19 bp, Mus musculus
  siRNA target sequence for Sytl5 (NM_177704.2,1737-1755).
caaaggagagctaaccatt

SEQ ID NO: 649748 - DNA, 19 bp, Mus musculus
  siRNA target sequence for Sytl5 (NM_177704.2,1741-1759).
ggagagctaaccattgttt

SEQ ID NO: 649749 - DNA, 19 bp, Mus musculus
  siRNA target sequence for Sytl5 (NM_177704.2,1742-1760).
gagagctaaccattgtttt

SEQ ID NO: 649750 - DNA, 19 bp, Mus musculus
  siRNA target sequence for Sytl5 (NM_177704.2,1751-1769).
ccattgttttgcgttatat

SEQ ID NO: 649751 - DNA, 19 bp, Mus musculus
  siRNA target sequence for Sytl5 (NM_177704.2,1752-1770).
cattgttttgcgttatatt

SEQ ID NO: 649752 - DNA, 19 bp, Mus musculus
  siRNA target sequence for Sytl5 (NM_177704.2,1775-1793).
cagaggagaacctaatatt

SEQ ID NO: 649753 - DNA, 19 bp, Mus musculus
  siRNA target sequence for Sytl5 (NM_177704.2,1807-1825).
cgtcaagaaaagaagatct

SEQ ID NO: 649754 - DNA, 19 bp, Mus musculus
  siRNA target sequence for Sytl5 (NM_177704.2,1857-1875).
catttctgggggaatactt

SEQ ID NO: 649755 - DNA, 19 bp, Mus musculus
  siRNA target sequence for Sytl5 (NM_177704.2,1862-1880).
ctgggggaatacttgaagt

SEQ ID NO: 649756 - DNA, 19 bp, Mus musculus
  siRNA target sequence for Sytl5 (NM_177704.2,1865-1883).
ggggaatacttgaagtgtt

SEQ ID NO: 649757 - DNA, 19 bp, Mus musculus
  siRNA target sequence for Sytl5 (NM_177704.2,1984-2002).
cacaaaactgctgttgtaa

SEQ ID NO: 649758 - DNA, 19 bp, Mus musculus
  siRNA target sequence for Sytl5 (NM_177704.2,2022-2040).
gtggaaccatacgttcata

SEQ ID NO: 649759 - DNA, 19 bp, Mus musculus
  siRNA target sequence for Sytl5 (NM_177704.2,2024-2042).
ggaaccatacgttcatatt

SEQ ID NO: 649760 - DNA, 19 bp, Mus musculus
  siRNA target sequence for Sytl5 (NM_177704.2,2028-2046).
ccatacgttcatattcagt

SEQ ID NO: 649761 - DNA, 19 bp, Mus musculus
  siRNA target sequence for Sytl5 (NM_177704.2,2048-2066).
gcctgtatcctcaggatat

SEQ ID NO: 649762 - DNA, 19 bp, Mus musculus
  siRNA target sequence for Sytl5 (NM_177704.2,2050-2068).
ctgtatcctcaggatataa

SEQ ID NO: 649763 - DNA, 19 bp, Mus musculus
  siRNA target sequence for Sytl5 (NM_177704.2,2128-2146).
ctaggaggtgttcgtttaa

SEQ ID NO: 649764 - DNA, 19 bp, Mus musculus
  siRNA target sequence for Sytl5 (NM_177704.2,2158-2176).
ggtatgagctacggtaaaa

SEQ ID NO: 649765 - DNA, 19 bp, Mus musculus
  siRNA target sequence for Sytl5 (NM_177704.2,2209-2227).
caacgcctttggcaaaaga

SEQ ID NO: 649766 - DNA, 19 bp, Mus musculus
  siRNA target sequence for Sytl5 (NM_177704.2,2235-2253).
caaccctgggacatctgta

SEQ ID NO: 649767 - DNA, 19 bp, Mus musculus
  siRNA target sequence for Tes (NM_011570.2,688-706).
gtctccatcaacacagtta

SEQ ID NO: 649768 - DNA, 19 bp, Mus musculus
  siRNA target sequence for Tes (NM_011570.2,693-711).
catcaacacagttacctat

SEQ ID NO: 649769 - DNA, 19 bp, Mus musculus
  siRNA target sequence for Tes (NM_011570.2,716-734).
gggctcccccagttcaaaa

SEQ ID NO: 649770 - DNA, 19 bp, Mus musculus
  siRNA target sequence for Tes (NM_011570.2,1489-1507).
cagcgagtaacgtacaaca

SEQ ID NO: 649771 - DNA, 19 bp, Mus musculus
  siRNA target sequence for Tes (NM_011570.2,1492-1510).
cgagtaacgtacaacaact

SEQ ID NO: 649772 - DNA, 19 bp, Mus musculus
  siRNA target sequence for Tes (NM_011570.2,1493-1511).
gagtaacgtacaacaactt

SEQ ID NO: 649773 - DNA, 19 bp, Mus musculus
  siRNA target sequence for Tes (NM_011570.2,1495-1513).
gtaacgtacaacaacttca

SEQ ID NO: 649774 - DNA, 19 bp, Mus musculus
  siRNA target sequence for Tnks (NM_175091.2,427-445).
ctttactgactcctctaaa

SEQ ID NO: 649775 - DNA, 19 bp, Mus musculus
  siRNA target sequence for Tnks (NM_175091.2,506-524).
caacagagttcggatagtt

SEQ ID NO: 649776 - DNA, 19 bp, Mus musculus
  siRNA target sequence for Tnks (NM_175091.2,579-597).
gtacctcttcataatgcat

SEQ ID NO: 649777 - DNA, 19 bp, Mus musculus
  siRNA target sequence for Tnks (NM_175091.2,719-737).
ctgttctctgttacttagt

SEQ ID NO: 649778 - DNA, 19 bp, Mus musculus
  siRNA target sequence for Tnks (NM_175091.2,721-739).
gttctctgttacttagtca

SEQ ID NO: 649779 - DNA, 19 bp, Mus musculus
  siRNA target sequence for Tnks (NM_175091.2,747-765).
gatccaaccttggtcaatt

SEQ ID NO: 649780 - DNA, 19 bp, Mus musculus
  siRNA target sequence for Tnks (NM_175091.2,870-888).
gacctggccaaagttaaaa

SEQ ID NO: 649781 - DNA, 19 bp, Mus musculus
  siRNA target sequence for Tnks (NM_175091.2,897-915).
gctttggaaatcattaact

SEQ ID NO: 649782 - DNA, 19 bp, Mus musculus
  siRNA target sequence for Tnks (NM_175091.2,964-982).
ccttgcatcccaaacgaaa

SEQ ID NO: 649783 - DNA, 19 bp, Mus musculus
  siRNA target sequence for Tnks (NM_175091.2,1011-1029).
ggagccaacgtcaacgaaa

SEQ ID NO: 649784 - DNA, 19 bp, Mus musculus
  siRNA target sequence for Tnks (NM_175091.2,1012-1030).
gagccaacgtcaacgaaaa

SEQ ID NO: 649785 - DNA, 19 bp, Mus musculus
  siRNA target sequence for Tnks (NM_175091.2,1014-1032).
gccaacgtcaacgaaaaga

SEQ ID NO: 649786 - DNA, 19 bp, Mus musculus
  siRNA target sequence for Tnks (NM_175091.2,1055-1073).
gcatgttgcagctgaaaga

SEQ ID NO: 649787 - DNA, 19 bp, Mus musculus
  siRNA target sequence for Tnks (NM_175091.2,1063-1081).
cagctgaaagagctcataa

SEQ ID NO: 649788 - DNA, 19 bp, Mus musculus
  siRNA target sequence for Tnks (NM_175091.2,1072-1090).
gagctcataatgatgtcat

SEQ ID NO: 649789 - DNA, 19 bp, Mus musculus
  siRNA target sequence for Tnks (NM_175091.2,1106-1124).
gcacggagcaaagatgaat

SEQ ID NO: 649790 - DNA, 19 bp, Mus musculus
  siRNA target sequence for Tnks (NM_175091.2,1121-1139).
gaatgcactggatagtctt

SEQ ID NO: 649791 - DNA, 19 bp, Mus musculus
  siRNA target sequence for Tnks (NM_175091.2,1316-1334).
cgtggactatcgtctctta

SEQ ID NO: 649792 - DNA, 19 bp, Mus musculus
  siRNA target sequence for Tnks (NM_175091.2,1378-1396).
gcagcccgcagaatgtgaa

SEQ ID NO: 649793 - DNA, 19 bp, Mus musculus
  siRNA target sequence for Tnks (NM_175091.2,1541-1559).
ctgctcctatggacactat

SEQ ID NO: 649794 - DNA, 19 bp, Mus musculus
  siRNA target sequence for Tnks (NM_175091.2,1583-1601).
gcacggggcttcagtcaat

SEQ ID NO: 649795 - DNA, 19 bp, Mus musculus
  siRNA target sequence for Tnks (NM_175091.2,1602-1620).
gtggccgacctgtggaaat

SEQ ID NO: 649796 - DNA, 19 bp, Mus musculus
  siRNA target sequence for Tnks (NM_175091.2,1605-1623).
gccgacctgtggaaattca

SEQ ID NO: 649797 - DNA, 19 bp, Mus musculus
  siRNA target sequence for Tnks (NM_175091.2,1642-1660).
cagccaagggaaaatacga

SEQ ID NO: 649798 - DNA, 19 bp, Mus musculus
  siRNA target sequence for Tnks (NM_175091.2,1644-1662).
gccaagggaaaatacgaaa

SEQ ID NO: 649799 - DNA, 19 bp, Mus musculus
  siRNA target sequence for Tnks (NM_175091.2,1666-1684).
gcaaactccttctaaaaca

SEQ ID NO: 649800 - DNA, 19 bp, Mus musculus
  siRNA target sequence for Tnks (NM_175091.2,1687-1705).
gagcagatccaactaagaa

SEQ ID NO: 649801 - DNA, 19 bp, Mus musculus
  siRNA target sequence for Tnks (NM_175091.2,1692-1710).
gatccaactaagaagaaca

SEQ ID NO: 649802 - DNA, 19 bp, Mus musculus
  siRNA target sequence for Tnks (NM_175091.2,1717-1735).
gaaatacacccctagatct

SEQ ID NO: 649803 - DNA, 19 bp, Mus musculus
  siRNA target sequence for Tnks (NM_175091.2,1900-1918).
cagcaggctacaataacct

SEQ ID NO: 649804 - DNA, 19 bp, Mus musculus
  siRNA target sequence for Tnks (NM_175091.2,2002-2020).
cgtcttatgggcatgttga

SEQ ID NO: 649805 - DNA, 19 bp, Mus musculus
  siRNA target sequence for Tnks (NM_175091.2,2005-2023).
cttatgggcatgttgacat

SEQ ID NO: 649806 - DNA, 19 bp, Mus musculus
  siRNA target sequence for Tnks (NM_175091.2,2019-2037).
gacatagcagcgttactga

SEQ ID NO: 649807 - DNA, 19 bp, Mus musculus
  siRNA target sequence for Tnks (NM_175091.2,2025-2043).
gcagcgttactgataaaat

SEQ ID NO: 649808 - DNA, 19 bp, Mus musculus
  siRNA target sequence for Tnks (NM_175091.2,2026-2044).
cagcgttactgataaaata

SEQ ID NO: 649809 - DNA, 19 bp, Mus musculus
  siRNA target sequence for Tnks (NM_175091.2,2028-2046).
gcgttactgataaaataca

SEQ ID NO: 649810 - DNA, 19 bp, Mus musculus
  siRNA target sequence for Tnks (NM_175091.2,2029-2047).
cgttactgataaaatacaa

SEQ ID NO: 649811 - DNA, 19 bp, Mus musculus
  siRNA target sequence for Tnks (NM_175091.2,2055-2073).
gtaaacgcaacggataagt

SEQ ID NO: 649812 - DNA, 19 bp, Mus musculus
  siRNA target sequence for Tnks (NM_175091.2,2066-2084).
ggataagtgggcctttact

SEQ ID NO: 649813 - DNA, 19 bp, Mus musculus
  siRNA target sequence for Tnks (NM_175091.2,2176-2194).
gtcagacacctttagatct

SEQ ID NO: 649814 - DNA, 19 bp, Mus musculus
  siRNA target sequence for Tnks (NM_175091.2,2213-2231).
ccgggctctgctgatagat

SEQ ID NO: 649815 - DNA, 19 bp, Mus musculus
  siRNA target sequence for Tnks (NM_175091.2,2246-2264).
ggccttacctacctgtttt

SEQ ID NO: 649816 - DNA, 19 bp, Mus musculus
  siRNA target sequence for Tnks (NM_175091.2,2247-2265).
gccttacctacctgtttta

SEQ ID NO: 649817 - DNA, 19 bp, Mus musculus
  siRNA target sequence for Tnks (NM_175091.2,2331-2349).
gctgccagcagcatagata

SEQ ID NO: 649818 - DNA, 19 bp, Mus musculus
  siRNA target sequence for Tnks (NM_175091.2,2410-2428).
ctgcgggtgcagaaaggaa

SEQ ID NO: 649819 - DNA, 19 bp, Mus musculus
  siRNA target sequence for Tnks (NM_175091.2,2495-2513).
cctgagggacatttttgaa

SEQ ID NO: 649820 - DNA, 19 bp, Mus musculus
  siRNA target sequence for Tnks (NM_175091.2,2540-2558).
ggctgatatgggtcatgaa

SEQ ID NO: 649821 - DNA, 19 bp, Mus musculus
  siRNA target sequence for Tnks (NM_175091.2,2564-2582).
gaaagaaataggcatcaat

SEQ ID NO: 649822 - DNA, 19 bp, Mus musculus
  siRNA target sequence for Tnks (NM_175091.2,2589-2607).
ggacaccgccacaagttga

SEQ ID NO: 649823 - DNA, 19 bp, Mus musculus
  siRNA target sequence for Tnks (NM_175091.2,2590-2608).
gacaccgccacaagttgat

SEQ ID NO: 649824 - DNA, 19 bp, Mus musculus
  siRNA target sequence for Tnks (NM_175091.2,2603-2621).
gttgatcaagggtgttgaa

SEQ ID NO: 649825 - DNA, 19 bp, Mus musculus
  siRNA target sequence for Tnks (NM_175091.2,2606-2624).
gatcaagggtgttgaaaga

SEQ ID NO: 649826 - DNA, 19 bp, Mus musculus
  siRNA target sequence for Tnks (NM_175091.2,2637-2655).
caacaaggaaccaatccat

SEQ ID NO: 649827 - DNA, 19 bp, Mus musculus
  siRNA target sequence for Tnks (NM_175091.2,2640-2658).
caaggaaccaatccatatt

SEQ ID NO: 649828 - DNA, 19 bp, Mus musculus
  siRNA target sequence for Tnks (NM_175091.2,2643-2661).
ggaaccaatccatatttga

SEQ ID NO: 649829 - DNA, 19 bp, Mus musculus
  siRNA target sequence for Tnks (NM_175091.2,2647-2665).
ccaatccatatttgacttt

SEQ ID NO: 649830 - DNA, 19 bp, Mus musculus
  siRNA target sequence for Tnks (NM_175091.2,2673-2691).
gtgaatcagggaactattt

SEQ ID NO: 649831 - DNA, 19 bp, Mus musculus
  siRNA target sequence for Tnks (NM_175091.2,2800-2818).
gatacaacgtcattcgaat

SEQ ID NO: 649832 - DNA, 19 bp, Mus musculus
  siRNA target sequence for Tnks (NM_175091.2,2807-2825).
cgtcattcgaattcagaaa

SEQ ID NO: 649833 - DNA, 19 bp, Mus musculus
  siRNA target sequence for Tnks (NM_175091.2,2921-2939).
cggttctcctttcattaat

SEQ ID NO: 649834 - DNA, 19 bp, Mus musculus
  siRNA target sequence for Tnks (NM_175091.2,2975-2993).
gtacattggagggatgttt

SEQ ID NO: 649835 - DNA, 19 bp, Mus musculus
  siRNA target sequence for Tnks (NM_175091.2,3012-3030).
gctgaaaactcctcaaaaa

SEQ ID NO: 649836 - DNA, 19 bp, Mus musculus
  siRNA target sequence for Tnks (NM_175091.2,3084-3102).
gacagatcatgttatatat

SEQ ID NO: 649837 - DNA, 19 bp, Mus musculus
  siRNA target sequence for Tnks (NM_175091.2,3103-3121).
gtcacagacaaatgctttt

SEQ ID NO: 649838 - DNA, 19 bp, Mus musculus
  siRNA target sequence for Tnks (NM_175091.2,3124-3142).
gtagagtgacccttggaaa

SEQ ID NO: 649839 - DNA, 19 bp, Mus musculus
  siRNA target sequence for Tnks (NM_175091.2,3221-3239).
caatgggctggcatatgct

SEQ ID NO: 649840 - DNA, 19 bp, Mus musculus
  siRNA target sequence for Tnks (NM_175091.2,3267-3285).
gcatatccagaatatctca

SEQ ID NO: 649841 - DNA, 19 bp, Mus musculus
  siRNA target sequence for Txn1 (NM_011660.2,177-195).
gtggaccttgcaaaatgat

SEQ ID NO: 649842 - DNA, 19 bp, Mus musculus
  siRNA target sequence for Txn1 (NM_011660.2,179-197).
ggaccttgcaaaatgatca

SEQ ID NO: 649843 - DNA, 19 bp, Mus musculus
  siRNA target sequence for Txn2 (NM_019913.3,204-222).
gctggtggtctaacagtaa

SEQ ID NO: 649844 - DNA, 19 bp, Mus musculus
  siRNA target sequence for Txn2 (NM_019913.3,205-223).
ctggtggtctaacagtaat

SEQ ID NO: 649845 - DNA, 19 bp, Mus musculus
  siRNA target sequence for Txn2 (NM_019913.3,258-276).
gtctgtttgacgaccttta

SEQ ID NO: 649846 - DNA, 19 bp, Mus musculus
  siRNA target sequence for Txn2 (NM_019913.3,262-280).
gtttgacgacctttaacgt

SEQ ID NO: 649847 - DNA, 19 bp, Mus musculus
  siRNA target sequence for Txn2 (NM_019913.3,317-335).
cagtgagacaccagttgtt

SEQ ID NO: 649848 - DNA, 19 bp, Mus musculus
  siRNA target sequence for Txn2 (NM_019913.3,319-337).
gtgagacaccagttgttgt

SEQ ID NO: 649849 - DNA, 19 bp, Mus musculus
  siRNA target sequence for Txn2 (NM_019913.3,328-346).
cagttgttgtggactttca

SEQ ID NO: 649850 - DNA, 19 bp, Mus musculus
  siRNA target sequence for Txn2 (NM_019913.3,454-472).
cagaccttgccattgaata

SEQ ID NO: 649851 - DNA, 19 bp, Mus musculus
  siRNA target sequence for Txndc1 (NM_028339.1,20-38).
cgcacttggggcgtcttat

SEQ ID NO: 649852 - DNA, 19 bp, Mus musculus
  siRNA target sequence for Txndc1 (NM_028339.1,24-42).
cttggggcgtcttatggtt

SEQ ID NO: 649853 - DNA, 19 bp, Mus musculus
  siRNA target sequence for Txndc1 (NM_028339.1,86-104).
cccacggacggcggaataa

SEQ ID NO: 649854 - DNA, 19 bp, Mus musculus
  siRNA target sequence for Txndc1 (NM_028339.1,110-128).
gcgtcctcaccgatgagaa

SEQ ID NO: 649855 - DNA, 19 bp, Mus musculus
  siRNA target sequence for Txndc1 (NM_028339.1,153-171).
gtggatgatagaattttat

SEQ ID NO: 649856 - DNA, 19 bp, Mus musculus
  siRNA target sequence for Txndc1 (NM_028339.1,224-242).
ccgagtggggagaagatct

SEQ ID NO: 649857 - DNA, 19 bp, Mus musculus
  siRNA target sequence for Txndc1 (NM_028339.1,284-302).
gactaagtggacggtttat

SEQ ID NO: 649858 - DNA, 19 bp, Mus musculus
  siRNA target sequence for Txndc1 (NM_028339.1,286-304).
ctaagtggacggtttatca

SEQ ID NO: 649859 - DNA, 19 bp, Mus musculus
  siRNA target sequence for Txndc1 (NM_028339.1,316-334).
ccttctatttatcattgta

SEQ ID NO: 649860 - DNA, 19 bp, Mus musculus
  siRNA target sequence for Txndc1 (NM_028339.1,317-335).
cttctatttatcattgtaa

SEQ ID NO: 649861 - DNA, 19 bp, Mus musculus
  siRNA target sequence for Txndc1 (NM_028339.1,369-387).
gactaagaaggacttcata

SEQ ID NO: 649862 - DNA, 19 bp, Mus musculus
  siRNA target sequence for Txndc1 (NM_028339.1,371-389).
ctaagaaggacttcataaa

SEQ ID NO: 649863 - DNA, 19 bp, Mus musculus
  siRNA target sequence for Txndc1 (NM_028339.1,379-397).
gacttcataaacttcgtaa

SEQ ID NO: 649864 - DNA, 19 bp, Mus musculus
  siRNA target sequence for Txndc1 (NM_028339.1,414-432).
gaatattgaacctatatca

SEQ ID NO: 649865 - DNA, 19 bp, Mus musculus
  siRNA target sequence for Txndc1 (NM_028339.1,443-461).
gtccaagttctgttctgat

SEQ ID NO: 649866 - DNA, 19 bp, Mus musculus
  siRNA target sequence for Txndc1 (NM_028339.1,449-467).
gttctgttctgatgactat

SEQ ID NO: 649867 - DNA, 19 bp, Mus musculus
  siRNA target sequence for Txndc1 (NM_028339.1,452-470).
ctgttctgatgactatgat

SEQ ID NO: 649868 - DNA, 19 bp, Mus musculus
  siRNA target sequence for Txndc1 (NM_028339.1,503-521).
ggactagccacagctattt

SEQ ID NO: 649869 - DNA, 19 bp, Mus musculus
  siRNA target sequence for Txndc1 (NM_028339.1,504-522).
gactagccacagctatttt

SEQ ID NO: 649870 - DNA, 19 bp, Mus musculus
  siRNA target sequence for Txndc1 (NM_028339.1,506-524).
ctagccacagctattttgt

SEQ ID NO: 649871 - DNA, 19 bp, Mus musculus
  siRNA target sequence for Txndc1 (NM_028339.1,541-559).
ccagcgtggggttcatact

SEQ ID NO: 649872 - DNA, 19 bp, Mus musculus
  siRNA target sequence for Txndc1 (NM_028339.1,542-560).
cagcgtggggttcatactt

SEQ ID NO: 649873 - DNA, 19 bp, Mus musculus
  siRNA target sequence for Txndc1 (NM_028339.1,595-613).
ctgctgggactttgtatga

SEQ ID NO: 649874 - DNA, 19 bp, Mus musculus
  siRNA target sequence for Txndc1 (NM_028339.1,597-615).
gctgggactttgtatgata

SEQ ID NO: 649875 - DNA, 19 bp, Mus musculus
  siRNA target sequence for Txndc4 (NM_029572.1,126-144).
ctgcggtcttcctgtcttt

SEQ ID NO: 649876 - DNA, 19 bp, Mus musculus
  siRNA target sequence for Txndc4 (NM_029572.1,169-187).
gctcctggtaacttcaatt

SEQ ID NO: 649877 - DNA, 19 bp, Mus musculus
  siRNA target sequence for Txndc4 (NM_029572.1,170-188).
ctcctggtaacttcaattt

SEQ ID NO: 649878 - DNA, 19 bp, Mus musculus
  siRNA target sequence for Txndc4 (NM_029572.1,206-224).
gaaatagcaagtcttgatt

SEQ ID NO: 649879 - DNA, 19 bp, Mus musculus
  siRNA target sequence for Txndc4 (NM_029572.1,216-234).
gtcttgattcagagaatat

SEQ ID NO: 649880 - DNA, 19 bp, Mus musculus
  siRNA target sequence for Txndc4 (NM_029572.1,254-272).
gctgatgttgctttagtaa

SEQ ID NO: 649881 - DNA, 19 bp, Mus musculus
  siRNA target sequence for Txndc4 (NM_029572.1,257-275).
gatgttgctttagtaaatt

SEQ ID NO: 649882 - DNA, 19 bp, Mus musculus
  siRNA target sequence for Txndc4 (NM_029572.1,291-309).
gtcgtttcagccagatgtt

SEQ ID NO: 649883 - DNA, 19 bp, Mus musculus
  siRNA target sequence for Txndc4 (NM_029572.1,325-343).
ggaagcatctgatgtcatt

SEQ ID NO: 649884 - DNA, 19 bp, Mus musculus
  siRNA target sequence for Txndc4 (NM_029572.1,326-344).
gaagcatctgatgtcatta

SEQ ID NO: 649885 - DNA, 19 bp, Mus musculus
  siRNA target sequence for Txndc4 (NM_029572.1,376-394).
gtttgccagagttgattgt

SEQ ID NO: 649886 - DNA, 19 bp, Mus musculus
  siRNA target sequence for Txndc4 (NM_029572.1,393-411).
gtgatcagcactctgatat

SEQ ID NO: 649887 - DNA, 19 bp, Mus musculus
  siRNA target sequence for Txndc4 (NM_029572.1,413-431).
gcccagaggtacaggataa

SEQ ID NO: 649888 - DNA, 19 bp, Mus musculus
  siRNA target sequence for Txndc4 (NM_029572.1,420-438).
ggtacaggataagcaaata

SEQ ID NO: 649889 - DNA, 19 bp, Mus musculus
  siRNA target sequence for Txndc4 (NM_029572.1,448-466).
gaaattatttcgtaatgga

SEQ ID NO: 649890 - DNA, 19 bp, Mus musculus
  siRNA target sequence for Txndc4 (NM_029572.1,509-527).
gcgcttgcagactacatca

SEQ ID NO: 649891 - DNA, 19 bp, Mus musculus
  siRNA target sequence for Txndc4 (NM_029572.1,545-563).
ccagtccacgagattcaga

SEQ ID NO: 649892 - DNA, 19 bp, Mus musculus
  siRNA target sequence for Txndc4 (NM_029572.1,553-571).
cgagattcagagtctagat

SEQ ID NO: 649893 - DNA, 19 bp, Mus musculus
  siRNA target sequence for Txndc4 (NM_029572.1,587-605).
gatcgcagtaagagaaata

SEQ ID NO: 649894 - DNA, 19 bp, Mus musculus
  siRNA target sequence for Txndc4 (NM_029572.1,600-618).
gaaatatcattggatactt

SEQ ID NO: 649895 - DNA, 19 bp, Mus musculus
  siRNA target sequence for Txndc4 (NM_029572.1,698-716).
gcttttggagatctttcaa

SEQ ID NO: 649896 - DNA, 19 bp, Mus musculus
  siRNA target sequence for Txndc4 (NM_029572.1,699-717).
cttttggagatctttcaaa

SEQ ID NO: 649897 - DNA, 19 bp, Mus musculus
  siRNA target sequence for Txndc4 (NM_029572.1,727-745).
gtacaacggagacaatgta

SEQ ID NO: 649898 - DNA, 19 bp, Mus musculus
  siRNA target sequence for Txndc4 (NM_029572.1,771-789).
cgccagacatggtgtactt

SEQ ID NO: 649899 - DNA, 19 bp, Mus musculus
  siRNA target sequence for Txndc4 (NM_029572.1,782-800).
gtgtacttgggatctatga

SEQ ID NO: 649900 - DNA, 19 bp, Mus musculus
  siRNA target sequence for Txndc4 (NM_029572.1,784-802).
gtacttgggatctatgaca

SEQ ID NO: 649901 - DNA, 19 bp, Mus musculus
  siRNA target sequence for Txndc4 (NM_029572.1,787-805).
cttgggatctatgacaaat

SEQ ID NO: 649902 - DNA, 19 bp, Mus musculus
  siRNA target sequence for Txndc4 (NM_029572.1,792-810).
gatctatgacaaattttga

SEQ ID NO: 649903 - DNA, 19 bp, Mus musculus
  siRNA target sequence for Txndc4 (NM_029572.1,816-834).
cttacaactggattcaaga

SEQ ID NO: 649904 - DNA, 19 bp, Mus musculus
  siRNA target sequence for Txndc4 (NM_029572.1,845-863).
cctcttgtccgagaaataa

SEQ ID NO: 649905 - DNA, 19 bp, Mus musculus
  siRNA target sequence for Txndc4 (NM_029572.1,853-871).
ccgagaaataacatttgaa

SEQ ID NO: 649906 - DNA, 19 bp, Mus musculus
  siRNA target sequence for Txndc4 (NM_029572.1,925-943).
gaaggatgatacagaaagt

SEQ ID NO: 649907 - DNA, 19 bp, Mus musculus
  siRNA target sequence for Txndc4 (NM_029572.1,928-946).
ggatgatacagaaagttta

SEQ ID NO: 649908 - DNA, 19 bp, Mus musculus
  siRNA target sequence for Txndc4 (NM_029572.1,971-989).
cggcagttgataagtgaaa

SEQ ID NO: 649909 - DNA, 19 bp, Mus musculus
  siRNA target sequence for Txndc4 (NM_029572.1,972-990).
ggcagttgataagtgaaaa

SEQ ID NO: 649910 - DNA, 19 bp, Mus musculus
  siRNA target sequence for Txndc4 (NM_029572.1,973-991).
gcagttgataagtgaaaaa

SEQ ID NO: 649911 - DNA, 19 bp, Mus musculus
  siRNA target sequence for Txndc4 (NM_029572.1,976-994).
gttgataagtgaaaaaggt

SEQ ID NO: 649912 - DNA, 19 bp, Mus musculus
  siRNA target sequence for Txndc4 (NM_029572.1,984-1002).
gtgaaaaaggtacaataaa

SEQ ID NO: 649913 - DNA, 19 bp, Mus musculus
  siRNA target sequence for Txndc4 (NM_029572.1,1078-1096).
catagccattgacagtttt

SEQ ID NO: 649914 - DNA, 19 bp, Mus musculus
  siRNA target sequence for Txndc4 (NM_029572.1,1143-1161).
gaaaactcaagcagtttgt

SEQ ID NO: 649915 - DNA, 19 bp, Mus musculus
  siRNA target sequence for Txndc4 (NM_029572.1,1178-1196).
ggaaaattacacagagaat

SEQ ID NO: 649916 - DNA, 19 bp, Mus musculus
  siRNA target sequence for Txndc4 (NM_029572.1,1291-1309).
gcccagcgagtataggtat

SEQ ID NO: 649917 - DNA, 19 bp, Mus musculus
  siRNA target sequence for Txndc4 (NM_029572.1,1294-1312).
cagcgagtataggtatact

SEQ ID NO: 649918 - DNA, 19 bp, Mus musculus
  siRNA target sequence for Txndc4 (NM_029572.1,1296-1314).
gcgagtataggtatacttt

SEQ ID NO: 649919 - DNA, 19 bp, Mus musculus
  siRNA target sequence for Txndc4 (NM_029572.1,1297-1315).
cgagtataggtatacttta

SEQ ID NO: 649920 - DNA, 19 bp, Mus musculus
  siRNA target sequence for Txndc4 (NM_029572.1,1298-1316).
gagtataggtatactttat

SEQ ID NO: 649921 - DNA, 19 bp, Mus musculus
  siRNA target sequence for Txnl (NM_016792.2,210-228).
ggagcgatccagatttcca

SEQ ID NO: 649922 - DNA, 19 bp, Mus musculus
  siRNA target sequence for Txnl (NM_016792.2,255-273).
gacttgccgtggtcaagtt

SEQ ID NO: 649923 - DNA, 19 bp, Mus musculus
  siRNA target sequence for Txnl (NM_016792.2,257-275).
cttgccgtggtcaagttca

SEQ ID NO: 649924 - DNA, 19 bp, Mus musculus
  siRNA target sequence for Txnl (NM_016792.2,313-331).
ggcgttcagctctatgagt

SEQ ID NO: 649925 - DNA, 19 bp, Mus musculus
  siRNA target sequence for Txnl (NM_016792.2,314-332).
gcgttcagctctatgagta

SEQ ID NO: 649926 - DNA, 19 bp, Mus musculus
  siRNA target sequence for Txnl (NM_016792.2,315-333).
cgttcagctctatgagtaa

SEQ ID NO: 649927 - DNA, 19 bp, Mus musculus
  siRNA target sequence for Txnl (NM_016792.2,321-339).
gctctatgagtaataagta

SEQ ID NO: 649928 - DNA, 19 bp, Mus musculus
  siRNA target sequence for Txnl (NM_016792.2,408-426).
cagcaacacctacgttttt

SEQ ID NO: 649929 - DNA, 19 bp, Mus musculus
  siRNA target sequence for Txnl (NM_016792.2,410-428).
gcaacacctacgtttttgt

SEQ ID NO: 649930 - DNA, 19 bp, Mus musculus
  siRNA target sequence for Txnl (NM_016792.2,445-463).
gagaatcgatcagtatcaa

SEQ ID NO: 649931 - DNA, 19 bp, Mus musculus
  siRNA target sequence for Txnl (NM_016792.2,545-563).
ccaaagggctatatggatt

SEQ ID NO: 649932 - DNA, 19 bp, Mus musculus
  siRNA target sequence for Txnl (NM_016792.2,546-564).
caaagggctatatggattt

SEQ ID NO: 649933 - DNA, 19 bp, Mus musculus
  siRNA target sequence for Txnl (NM_016792.2,560-578).
gatttaatgccttttatta

SEQ ID NO: 649934 - DNA, 19 bp, Mus musculus
  siRNA target sequence for Txnl (NM_016792.2,584-602).
gctggttgtgaatgtctta

SEQ ID NO: 649935 - DNA, 19 bp, Mus musculus
  siRNA target sequence for Txnl (NM_016792.2,611-629).
gatgagcacggctttgaca

SEQ ID NO: 649936 - DNA, 19 bp, Mus musculus
  siRNA target sequence for Txnl (NM_016792.2,669-687).
gtgatgagcagctccttat

SEQ ID NO: 649937 - DNA, 19 bp, Mus musculus
  siRNA target sequence for Txnl (NM_016792.2,671-689).
gatgagcagctccttatta

SEQ ID NO: 649938 - DNA, 19 bp, Mus musculus
  siRNA target sequence for Txnl (NM_016792.2,700-718).
caatcagcctgttaagctt

SEQ ID NO: 649939 - DNA, 19 bp, Mus musculus
  siRNA target sequence for Txnl (NM_016792.2,704-722).
cagcctgttaagctttatt

SEQ ID NO: 649940 - DNA, 19 bp, Mus musculus
  siRNA target sequence for Txnl (NM_016792.2,748-766).
cggtcagggtcctaaatat

SEQ ID NO: 649941 - DNA, 19 bp, Mus musculus
  siRNA target sequence for Txnl (NM_016792.2,750-768).
gtcagggtcctaaatatgt

SEQ ID NO: 649942 - DNA, 19 bp, Mus musculus
  siRNA target sequence for Txnl (NM_016792.2,785-803).
ctaccccgatctatggatt

SEQ ID NO: 649943 - DNA, 19 bp, Mus musculus
  siRNA target sequence for Txnl (NM_016792.2,873-891).
gcattgttcctcttcgtta

SEQ ID NO: 649944 - DNA, 19 bp, Mus musculus
  siRNA target sequence for Txnl (NM_016792.2,874-892).
cattgttcctcttcgttat

SEQ ID NO: 649945 - DNA, 19 bp, Mus musculus
  siRNA target sequence for Txnl (NM_016792.2,878-896).
gttcctcttcgttatgtta

SEQ ID NO: 649946 - DNA, 19 bp, Mus musculus
  siRNA target sequence for Txnl (NM_016792.2,881-899).
cctcttcgttatgttaaat

SEQ ID NO: 649947 - DNA, 19 bp, Mus musculus
  siRNA target sequence for Txnl (NM_016792.2,887-905).
cgttatgttaaatttcaga

SEQ ID NO: 649948 - DNA, 19 bp, Mus musculus
  siRNA target sequence for Txnl (NM_016792.2,908-926).
gtcaacagtgtaactttat

SEQ ID NO: 649949 - DNA, 19 bp, Mus musculus
  siRNA target sequence for Txnl (NM_016792.2,921-939).
ctttatttgttcagtctaa

SEQ ID NO: 649950 - DNA, 19 bp, Mus musculus
  siRNA target sequence for Txnl (NM_016792.2,995-1013).
gtccaggcaacaaatatga

SEQ ID NO: 649951 - DNA, 19 bp, Mus musculus
  siRNA target sequence for Txnl (NM_016792.2,1001-1019).
gcaacaaatatgaatgact

SEQ ID NO: 649952 - DNA, 19 bp, Mus musculus
  siRNA target sequence for Txnl2 (NM_023140.3,243-261).
cgaagctgttcctgaagta

SEQ ID NO: 649953 - DNA, 19 bp, Mus musculus
  siRNA target sequence for Txnl2 (NM_023140.3,603-621).
gctcaaaacgtactctaat

SEQ ID NO: 649954 - DNA, 19 bp, Mus musculus
  siRNA target sequence for Txnl2 (NM_023140.3,668-686).
gacttgacataattaagga

SEQ ID NO: 649955 - DNA, 19 bp, Mus musculus
  siRNA target sequence for Txnl2 (NM_023140.3,748-766).
ctcaaagtgctgaccaata

SEQ ID NO: 649956 - DNA, 19 bp, Mus musculus
  siRNA target sequence for Txnl2 (NM_023140.3,754-772).
gtgctgaccaataaagctt

SEQ ID NO: 649957 - DNA, 19 bp, Mus musculus
  siRNA target sequence for Txnl2 (NM_023140.3,773-791).
ccgtgatgctctttatgaa

SEQ ID NO: 649958 - DNA, 19 bp, Mus musculus
  siRNA target sequence for Txnl2 (NM_023140.3,774-792).
cgtgatgctctttatgaaa

SEQ ID NO: 649959 - DNA, 19 bp, Mus musculus
  siRNA target sequence for Txnl2 (NM_023140.3,815-833).
gtggattcagcaaacaaat

SEQ ID NO: 649960 - DNA, 19 bp, Mus musculus
  siRNA target sequence for Txnl2 (NM_023140.3,851-869).
gtactggggttgaatatga

SEQ ID NO: 649961 - DNA, 19 bp, Mus musculus
  siRNA target sequence for Txnl2 (NM_023140.3,895-913).
gaagtgcgtcagggattaa

SEQ ID NO: 649962 - DNA, 19 bp, Mus musculus
  siRNA target sequence for Txnl2 (NM_023140.3,901-919).
cgtcagggattaaaaacgt

SEQ ID NO: 649963 - DNA, 19 bp, Mus musculus
  siRNA target sequence for Txnl2 (NM_023140.3,902-920).
gtcagggattaaaaacgtt

SEQ ID NO: 649964 - DNA, 19 bp, Mus musculus
  siRNA target sequence for Txnl2 (NM_023140.3,1007-1025).
gtgaattgctgcctatact

SEQ ID NO: 649965 - DNA, 19 bp, Mus musculus
  siRNA target sequence for Zfp212 (NM_145576.1,967-985).
ggactccagcccgtacaaa

SEQ ID NO: 649966 - DNA, 19 bp, Mus musculus
  siRNA target sequence for Zfp212 (NM_145576.1,968-986).
gactccagcccgtacaaat

SEQ ID NO: 649967 - DNA, 19 bp, Mus musculus
  siRNA target sequence for Zfp212 (NM_145576.1,1224-1242).
gcaccagcccacaaatcca

SEQ ID NO: 649968 - DNA, 19 bp, Mus musculus
  siRNA target sequence for Zfp212 (NM_145576.1,1252-1270).
ctcaccgaacagcttagtt

SEQ ID NO: 649969 - DNA, 19 bp, Mus musculus
  siRNA target sequence for Zfp212 (NM_145576.1,1257-1275).
cgaacagcttagttgcttt

SEQ ID NO: 649970 - DNA, 19 bp, Mus musculus
  siRNA target sequence for Zfp212 (NM_145576.1,1258-1276).
gaacagcttagttgcttta

SEQ ID NO: 649971 - DNA, 19 bp, Mus musculus
  siRNA target sequence for Zfp212 (NM_145576.1,1261-1279).
cagcttagttgctttacct

SEQ ID NO: 649972 - DNA, 19 bp, Mus musculus
  siRNA target sequence for Zfp212 (NM_145576.1,1385-1403).
ggtgagcgaccctacagtt

SEQ ID NO: 649973 - DNA, 19 bp, Mus musculus
  siRNA target sequence for Zfp276 (NM_020497.1,319-337).
ctttttggacagtgcatta

SEQ ID NO: 649974 - DNA, 19 bp, Mus musculus
  siRNA target sequence for Zfp276 (NM_020497.1,604-622).
ctcggatgatcgggtaaaa

SEQ ID NO: 649975 - DNA, 19 bp, Mus musculus
  siRNA target sequence for Zfp276 (NM_020497.1,606-624).
cggatgatcgggtaaaaga

SEQ ID NO: 649976 - DNA, 19 bp, Mus musculus
  siRNA target sequence for Zfp276 (NM_020497.1,808-826).
caagcccggatggaagaaa

SEQ ID NO: 649977 - DNA, 19 bp, Mus musculus
  siRNA target sequence for Zfp276 (NM_020497.1,814-832).
cggatggaagaaaaagctt

SEQ ID NO: 649978 - DNA, 19 bp, Mus musculus
  siRNA target sequence for Zfp276 (NM_020497.1,902-920).
ggcgctgatggcatgaaga

SEQ ID NO: 649979 - DNA, 19 bp, Mus musculus
  siRNA target sequence for Zfp276 (NM_020497.1,903-921).
gcgctgatggcatgaagaa

SEQ ID NO: 649980 - DNA, 19 bp, Mus musculus
  siRNA target sequence for Zfp276 (NM_020497.1,972-990).
ctggctgcaacaaggtatt

SEQ ID NO: 649981 - DNA, 19 bp, Mus musculus
  siRNA target sequence for Zfp276 (NM_020497.1,975-993).
gctgcaacaaggtattcat

SEQ ID NO: 649982 - DNA, 19 bp, Mus musculus
  siRNA target sequence for Zfp276 (NM_020497.1,991-1009).
catgatcgaccgatacctt

SEQ ID NO: 649983 - DNA, 19 bp, Mus musculus
  siRNA target sequence for Zfp276 (NM_020497.1,1037-1055).
gaggtccgcaattacatct

SEQ ID NO: 649984 - DNA, 19 bp, Mus musculus
  siRNA target sequence for Zfp277 (NM_172575.1,477-495).
ggtattcctcagacagtaa

SEQ ID NO: 649985 - DNA, 19 bp, Mus musculus
  siRNA target sequence for Zfp330 (NM_145600.1,570-588).
ccagctgccaagttttaga

SEQ ID NO: 649986 - DNA, 19 bp, Mus musculus
  siRNA target sequence for Zfp330 (NM_145600.1,644-662).
cgctgtaaggcttgtttct

SEQ ID NO: 649987 - DNA, 19 bp, Mus musculus
  siRNA target sequence for Zfp330 (NM_145600.1,671-689).
catacaaggagcaaagtgt

SEQ ID NO: 649988 - DNA, 19 bp, Mus musculus
  siRNA target sequence for Zfp330 (NM_145600.1,722-740).
cctaaatgtgggcatgaaa

SEQ ID NO: 649989 - DNA, 19 bp, Mus musculus
  siRNA target sequence for Zfp330 (NM_145600.1,766-784).
gtcaacacgctccttgaaa

SEQ ID NO: 649990 - DNA, 19 bp, Mus musculus
  siRNA target sequence for Zfp330 (NM_145600.1,768-786).
caacacgctccttgaaatt

SEQ ID NO: 649991 - DNA, 19 bp, Mus musculus
  siRNA target sequence for Zfp330 (NM_145600.1,819-837).
cctcagggtatgatgctta

SEQ ID NO: 649992 - DNA, 19 bp, Mus musculus
  siRNA target sequence for Zfp330 (NM_145600.1,847-865).
cctgtcgtcggacaagtat

SEQ ID NO: 649993 - DNA, 19 bp, Mus musculus
  siRNA target sequence for Zfp330 (NM_145600.1,876-894).
gataccatgatgatgatga

SEQ ID NO: 649994 - DNA, 19 bp, Mus musculus
  siRNA target sequence for Zfp330 (NM_145600.1,948-966).
ctgagtcatcagatctgtt

SEQ ID NO: 649995 - DNA, 19 bp, Mus musculus
  siRNA target sequence for Zfp330 (NM_145600.1,959-977).
gatctgttcaataacttga

SEQ ID NO: 649996 - DNA, 19 bp, Mus musculus
  siRNA target sequence for Zfp330 (NM_145600.1,962-980).
ctgttcaataacttgaatt

SEQ ID NO: 649997 - DNA, 19 bp, Mus musculus
  siRNA target sequence for Zfp330 (NM_145600.1,964-982).
gttcaataacttgaattta

SEQ ID NO: 649998 - DNA, 19 bp, Mus musculus
  siRNA target sequence for Zfp330 (NM_145600.1,967-985).
caataacttgaatttagga

SEQ ID NO: 649999 - DNA, 19 bp, Mus musculus
  siRNA target sequence for Zfp363 (NM_026557.2,471-489).
ggctgtgtcacgataccaa

SEQ ID NO: 650000 - DNA, 19 bp, Mus musculus
  siRNA target sequence for Zfp363 (NM_026557.2,472-490).
gctgtgtcacgataccaat

SEQ ID NO: 650001 - DNA, 19 bp, Mus musculus
  siRNA target sequence for Zfp363 (NM_026557.2,503-521).
ctagatcgtttcaaagtca

SEQ ID NO: 650002 - DNA, 19 bp, Mus musculus
  siRNA target sequence for Zfp363 (NM_026557.2,612-630).
gtatttgccacctgtttga

SEQ ID NO: 650003 - DNA, 19 bp, Mus musculus
  siRNA target sequence for Zfp363 (NM_026557.2,732-750).
cgaatcttcgaggaaaaca

SEQ ID NO: 650004 - DNA, 19 bp, Mus musculus
  siRNA target sequence for Zfp363 (NM_026557.2,933-951).
ggtactggagacaactaga

SEQ ID NO: 650005 - DNA, 19 bp, Mus musculus
  siRNA target sequence for Zfp363 (NM_026557.2,937-955).
ctggagacaactagatact

SEQ ID NO: 650006 - DNA, 19 bp, Mus musculus
  siRNA target sequence for Zfp363 (NM_026557.2,939-957).
ggagacaactagatactga

SEQ ID NO: 650007 - DNA, 19 bp, Mus musculus
  siRNA target sequence for Zfp363 (NM_026557.2,972-990).
ccatgccatccgaatacca

SEQ ID NO: 650008 - DNA, 19 bp, Mus musculus
  siRNA target sequence for Zfp363 (NM_026557.2,1038-1056).
cagtccagttccatatctt

SEQ ID NO: 650009 - DNA, 19 bp, Mus musculus
  siRNA target sequence for 3100002M17Rik (NM_027016.1,65-83).
gtgaaccatctaaagaaga

SEQ ID NO: 650010 - DNA, 19 bp, Mus musculus
  siRNA target sequence for 3100002M17Rik (NM_027016.1,87-105).
ggctgtagccaaatatctt

SEQ ID NO: 650011 - DNA, 19 bp, Mus musculus
  siRNA target sequence for 3100002M17Rik (NM_027016.1,95-113).
ccaaatatcttcgattcaa

SEQ ID NO: 650012 - DNA, 19 bp, Mus musculus
  siRNA target sequence for 3100002M17Rik (NM_027016.1,107-125).
gattcaactgtccaacaaa

SEQ ID NO: 650013 - DNA, 19 bp, Mus musculus
  siRNA target sequence for 3100002M17Rik (NM_027016.1,141-159).
gggtcatcgggttgactat

SEQ ID NO: 650014 - DNA, 19 bp, Mus musculus
  siRNA target sequence for 3100002M17Rik (NM_027016.1,142-160).
ggtcatcgggttgactatt

SEQ ID NO: 650015 - DNA, 19 bp, Mus musculus
  siRNA target sequence for 3100002M17Rik (NM_027016.1,143-161).
gtcatcgggttgactattt

SEQ ID NO: 650016 - DNA, 19 bp, Mus musculus
  siRNA target sequence for 3100002M17Rik (NM_027016.1,223-241).
gaggacgctttatttacaa

SEQ ID NO: 650017 - DNA, 19 bp, Mus musculus
  siRNA target sequence for 3100002M17Rik (NM_027016.1,301-319).
gccctaaaagtaatgaaaa

SEQ ID NO: 650018 - DNA, 19 bp, Mus musculus
  siRNA target sequence for 3100002M17Rik (NM_027016.1,302-320).
ccctaaaagtaatgaaaat

SEQ ID NO: 650019 - DNA, 19 bp, Mus musculus
  siRNA target sequence for 3100002M17Rik (NM_027016.1,352-370).
gataaagggaaatcagaaa

SEQ ID NO: 650020 - DNA, 19 bp, Mus musculus
  siRNA target sequence for 3100002M17Rik (NM_027016.1,525-543).
caaacttgagccacatgat

SEQ ID NO: 650021 - DNA, 19 bp, Mus musculus
  siRNA target sequence for 3100002M17Rik (NM_027016.1,534-552).
gccacatgatgatcaagtt

SEQ ID NO: 650022 - DNA, 19 bp, Mus musculus
  siRNA target sequence for 3100002M17Rik (NM_027016.1,570-588).
ggtttttgtgtggatctat

SEQ ID NO: 650023 - DNA, 19 bp, Mus musculus
  siRNA target sequence for 3100002M17Rik (NM_027016.1,589-607).
gacccagttcacattaaaa

SEQ ID NO: 650024 - DNA, 19 bp, Mus musculus
  siRNA target sequence for 3100002M17Rik (NM_027016.1,683-701).
gagtaggtgtttattacct

SEQ ID NO: 650025 - DNA, 19 bp, Mus musculus
  siRNA target sequence for 3100002M17Rik (NM_027016.1,708-726).
gggcgcaggctgttttgta

SEQ ID NO: 650026 - DNA, 19 bp, Mus musculus
  siRNA target sequence for 3100002M17Rik (NM_027016.1,790-808).
ggaggaaggcaccactttt

SEQ ID NO: 650027 - DNA, 19 bp, Mus musculus
  siRNA target sequence for 3100002M17Rik (NM_027016.1,876-894).
gtacaaaggaccaaaagca

SEQ ID NO: 650028 - DNA, 19 bp, Mus musculus
  siRNA target sequence for 3100002M17Rik (NM_027016.1,1091-1109).
gcgggaacgggaatgattt

SEQ ID NO: 650029 - DNA, 19 bp, Mus musculus
  siRNA target sequence for 3100002M17Rik (NM_027016.1,1092-1110).
cgggaacgggaatgatttt

SEQ ID NO: 650030 - DNA, 19 bp, Mus musculus
  siRNA target sequence for 3100002M17Rik (NM_027016.1,1094-1112).
ggaacgggaatgattttga

SEQ ID NO: 650031 - DNA, 19 bp, Mus musculus
  siRNA target sequence for 4833405E05Rik (NM_175353.1,162-180).
cgcttgtatccgcaatcat

SEQ ID NO: 650032 - DNA, 19 bp, Mus musculus
  siRNA target sequence for 4833405E05Rik (NM_175353.1,257-275).
gggccgatgcggaaaaact

SEQ ID NO: 650033 - DNA, 19 bp, Mus musculus
  siRNA target sequence for 4833405E05Rik (NM_175353.1,259-277).
gccgatgcggaaaaactga

SEQ ID NO: 650034 - DNA, 19 bp, Mus musculus
  siRNA target sequence for 4833405E05Rik (NM_175353.1,260-278).
ccgatgcggaaaaactgaa

SEQ ID NO: 650035 - DNA, 19 bp, Mus musculus
  siRNA target sequence for 4833405E05Rik (NM_175353.1,285-303).
cgataccaaccgaaggttt

SEQ ID NO: 650036 - DNA, 19 bp, Mus musculus
  siRNA target sequence for 4833405E05Rik (NM_175353.1,324-342).
gataatccaaacagaagat

SEQ ID NO: 650037 - DNA, 19 bp, Mus musculus
  siRNA target sequence for 4833405E05Rik (NM_175353.1,353-371).
gtaggattcagcagagaaa

SEQ ID NO: 650038 - DNA, 19 bp, Mus musculus
  siRNA target sequence for 4833405E05Rik (NM_175353.1,377-395).
caaccgtagtagagaaatt

SEQ ID NO: 650039 - DNA, 19 bp, Mus musculus
  siRNA target sequence for 4833405E05Rik (NM_175353.1,380-398).
ccgtagtagagaaattaca

SEQ ID NO: 650040 - DNA, 19 bp, Mus musculus
  siRNA target sequence for 4833405E05Rik (NM_175353.1,382-400).
gtagtagagaaattacagt

SEQ ID NO: 650041 - DNA, 19 bp, Mus musculus
  siRNA target sequence for 4833405E05Rik (NM_175353.1,412-430).
gtgttggagatgtacagta

SEQ ID NO: 650042 - DNA, 19 bp, Mus musculus
  siRNA target sequence for 4833405E05Rik (NM_175353.1,458-476).
ggtattactccgcacttaa

SEQ ID NO: 650043 - DNA, 19 bp, Mus musculus
  siRNA target sequence for 4833405E05Rik (NM_175353.1,459-477).
gtattactccgcacttaaa

SEQ ID NO: 650044 - DNA, 19 bp, Mus musculus
  siRNA target sequence for 4833405E05Rik (NM_175353.1,468-486).
cgcacttaaaacaatggaa

SEQ ID NO: 650045 - DNA, 19 bp, Mus musculus
  siRNA target sequence for 4833405E05Rik (NM_175353.1,489-507).
gctagagaatgtgtacttt

SEQ ID NO: 650046 - DNA, 19 bp, Mus musculus
  siRNA target sequence for 4833405E05Rik (NM_175353.1,557-575).
ctaaactccgggaagacat

SEQ ID NO: 650047 - DNA, 19 bp, Mus musculus
  siRNA target sequence for 4833405E05Rik (NM_175353.1,721-739).
gggaaaaacatgcatgtaa

SEQ ID NO: 650048 - DNA, 19 bp, Mus musculus
  siRNA target sequence for 4833405E05Rik (NM_175353.1,779-797).
cgaagcatgcacttgaaga

SEQ ID NO: 650049 - DNA, 19 bp, Mus musculus
  siRNA target sequence for 4833405E05Rik (NM_175353.1,819-837).
ggtcttaactgttcaagat

SEQ ID NO: 650050 - DNA, 19 bp, Mus musculus
  siRNA target sequence for 4833405E05Rik (NM_175353.1,829-847).
gttcaagatctcgttgatt

SEQ ID NO: 650051 - DNA, 19 bp, Mus musculus
  siRNA target sequence for 4833405E05Rik (NM_175353.1,861-879).
ccgatgcttgcacatttat

SEQ ID NO: 650052 - DNA, 19 bp, Mus musculus
  siRNA target sequence for 4833405E05Rik (NM_175353.1,961-979).
cagtcgagtgtgcatgaaa

SEQ ID NO: 650053 - DNA, 19 bp, Mus musculus
  siRNA target sequence for 4833405E05Rik (NM_175353.1,965-983).
cgagtgtgcatgaaacagt

SEQ ID NO: 650054 - DNA, 19 bp, Mus musculus
  siRNA target sequence for 4833405E05Rik (NM_175353.1,966-984).
gagtgtgcatgaaacagtt

SEQ ID NO: 650055 - DNA, 19 bp, Mus musculus
  siRNA target sequence for 4833405E05Rik (NM_175353.1,982-1000).
gttgatggctatagaagat

SEQ ID NO: 650056 - DNA, 19 bp, Mus musculus
  siRNA target sequence for 4833405E05Rik (NM_175353.1,988-1006).
ggctatagaagatatttca

SEQ ID NO: 650057 - DNA, 19 bp, Mus musculus
  siRNA target sequence for 4833405E05Rik (NM_175353.1,998-1016).
gatatttcactcaaattgt

SEQ ID NO: 650058 - DNA, 19 bp, Mus musculus
  siRNA target sequence for 4833405E05Rik (NM_175353.1,1050-1068).
cgtgacccaaggattagta

SEQ ID NO: 650059 - DNA, 19 bp, Mus musculus
  siRNA target sequence for 4833405E05Rik (NM_175353.1,1094-1112).
ggaacatggccctctcaaa

SEQ ID NO: 650060 - DNA, 19 bp, Mus musculus
  siRNA target sequence for 4833405E05Rik (NM_175353.1,1098-1116).
catggccctctcaaagata

SEQ ID NO: 650061 - DNA, 19 bp, Mus musculus
  siRNA target sequence for 4833405E05Rik (NM_175353.1,1101-1119).
ggccctctcaaagataatt

SEQ ID NO: 650062 - DNA, 19 bp, Mus musculus
  siRNA target sequence for 4833405E05Rik (NM_175353.1,1104-1122).
cctctcaaagataattgct

SEQ ID NO: 650063 - DNA, 19 bp, Mus musculus
  siRNA target sequence for 4833405E05Rik (NM_175353.1,1174-1192).
ctgaagaatctcatcgtaa

SEQ ID NO: 650064 - DNA, 19 bp, Mus musculus
  siRNA target sequence for 4833405E05Rik (NM_175353.1,1179-1197).
gaatctcatcgtaattttt

SEQ ID NO: 650065 - DNA, 19 bp, Mus musculus
  siRNA target sequence for 4833405E05Rik (NM_175353.1,1239-1257).
ctttgaccttttattcgaa

SEQ ID NO: 650066 - DNA, 19 bp, Mus musculus
  siRNA target sequence for 4833405E05Rik (NM_175353.1,1245-1263).
ccttttattcgaaataaga

SEQ ID NO: 650067 - DNA, 19 bp, Mus musculus
  siRNA target sequence for 4833405E05Rik (NM_175353.1,1254-1272).
cgaaataagagatcaatat

SEQ ID NO: 650068 - DNA, 19 bp, Mus musculus
  siRNA target sequence for 4833405E05Rik (NM_175353.1,1351-1369).
ggcagtgaggaagaatata

SEQ ID NO: 650069 - DNA, 19 bp, Mus musculus
  siRNA target sequence for 4833405E05Rik (NM_175353.1,1405-1423).
gacctcgaaaagcaatctt

SEQ ID NO: 650070 - DNA, 19 bp, Mus musculus
  siRNA target sequence for 4833405E05Rik (NM_175353.1,1445-1463).
cccagtctgtgcctcttat

SEQ ID NO: 650071 - DNA, 19 bp, Mus musculus
  siRNA target sequence for 4833405E05Rik (NM_175353.1,1446-1464).
ccagtctgtgcctcttatt

SEQ ID NO: 650072 - DNA, 19 bp, Mus musculus
  siRNA target sequence for 4833405E05Rik (NM_175353.1,1449-1467).
gtctgtgcctcttatttat

SEQ ID NO: 650073 - DNA, 19 bp, Mus musculus
  siRNA target sequence for 4833405E05Rik (NM_175353.1,1521-1539).
ccgaagctcaacagaaata

SEQ ID NO: 650074 - DNA, 19 bp, Mus musculus
  siRNA target sequence for 4833405E05Rik (NM_175353.1,1548-1566).
gcttaggaaatcaaccaat

SEQ ID NO: 650075 - DNA, 19 bp, Mus musculus
  siRNA target sequence for 4833405E05Rik (NM_175353.1,1585-1603).
ctgagtagctgtttactga

SEQ ID NO: 650076 - DNA, 19 bp, Mus musculus
  siRNA target sequence for 4833405E05Rik (NM_175353.1,1634-1652).
cagagctggtgcaaattat

SEQ ID NO: 650077 - DNA, 19 bp, Mus musculus
  siRNA target sequence for 4833405E05Rik (NM_175353.1,1638-1656).
gctggtgcaaattatcata

SEQ ID NO: 650078 - DNA, 19 bp, Mus musculus
  siRNA target sequence for 4833405E05Rik (NM_175353.1,1695-1713).
ggactttataactaacatt

SEQ ID NO: 650079 - DNA, 19 bp, Mus musculus
  siRNA target sequence for 4833405E05Rik (NM_175353.1,1696-1714).
gactttataactaacatta

SEQ ID NO: 650080 - DNA, 19 bp, Mus musculus
  siRNA target sequence for 4833405E05Rik (NM_175353.1,1808-1826).
ccaaactcaatcaaaaaat

SEQ ID NO: 650081 - DNA, 19 bp, Mus musculus
  siRNA target sequence for 4833405E05Rik (NM_175353.1,1809-1827).
caaactcaatcaaaaaatt

SEQ ID NO: 650082 - DNA, 19 bp, Mus musculus
  siRNA target sequence for 4833405E05Rik (NM_175353.1,1879-1897).
gggagagcaagtggttatt

SEQ ID NO: 650083 - DNA, 19 bp, Mus musculus
  siRNA target sequence for 4833405E05Rik (NM_175353.1,1881-1899).
gagagcaagtggttattta

SEQ ID NO: 650084 - DNA, 19 bp, Mus musculus
  siRNA target sequence for 4833405E05Rik (NM_175353.1,1883-1901).
gagcaagtggttatttaat

SEQ ID NO: 650085 - DNA, 19 bp, Mus musculus
  siRNA target sequence for 4833405E05Rik (NM_175353.1,1886-1904).
caagtggttatttaatgga

SEQ ID NO: 650086 - DNA, 19 bp, Mus musculus
  siRNA target sequence for 4833405E05Rik (NM_175353.1,1891-1909).
ggttatttaatggatctta

SEQ ID NO: 650087 - DNA, 19 bp, Mus musculus
  siRNA target sequence for 4833405E05Rik (NM_175353.1,2019-2037).
gctactggacagtgagtta

SEQ ID NO: 650088 - DNA, 19 bp, Mus musculus
  siRNA target sequence for 4833405E05Rik (NM_175353.1,2020-2038).
ctactggacagtgagttaa

SEQ ID NO: 650089 - DNA, 19 bp, Mus musculus
  siRNA target sequence for 4833405E05Rik (NM_175353.1,2057-2075).
ccgtgcagcagtttaacct

SEQ ID NO: 650090 - DNA, 19 bp, Mus musculus
  siRNA target sequence for 4833405E05Rik (NM_175353.1,2067-2085).
gtttaacctcgatgtcata

SEQ ID NO: 650091 - DNA, 19 bp, Mus musculus
  siRNA target sequence for 4833405E05Rik (NM_175353.1,2167-2185).
cagctccttgacctgttta

SEQ ID NO: 650092 - DNA, 19 bp, Mus musculus
  siRNA target sequence for 4833405E05Rik (NM_175353.1,2172-2190).
ccttgacctgtttatggtt

SEQ ID NO: 650093 - DNA, 19 bp, Mus musculus
  siRNA target sequence for 4833405E05Rik (NM_175353.1,2173-2191).
cttgacctgtttatggttt

SEQ ID NO: 650094 - DNA, 19 bp, Mus musculus
  siRNA target sequence for 4833405E05Rik (NM_175353.1,2188-2206).
gtttgggattggtctactt

SEQ ID NO: 650095 - DNA, 19 bp, Mus musculus
  siRNA target sequence for 6330404A12Rik (NM_025696.1,715-733).
gcccagcacgtcttttgca

SEQ ID NO: 650096 - DNA, 19 bp, Mus musculus
  siRNA target sequence for 6330404A12Rik (NM_025696.1,738-756).
ccggggactcggctcataa

SEQ ID NO: 650097 - DNA, 19 bp, Mus musculus
  siRNA target sequence for 6330404A12Rik (NM_025696.1,741-759).
gggactcggctcataacca

SEQ ID NO: 650098 - DNA, 19 bp, Mus musculus
  siRNA target sequence for 6330404A12Rik (NM_025696.1,742-760).
ggactcggctcataaccaa

SEQ ID NO: 650099 - DNA, 19 bp, Mus musculus
  siRNA target sequence for 6330404A12Rik (NM_025696.1,810-828).
cgaagctctatgacttcaa

SEQ ID NO: 650100 - DNA, 19 bp, Mus musculus
  siRNA target sequence for 6330404A12Rik (NM_025696.1,876-894).
gcgccacctatgaaaaact

SEQ ID NO: 650101 - DNA, 19 bp, Mus musculus
  siRNA target sequence for 6330404A12Rik (NM_025696.1,877-895).
cgccacctatgaaaaactt

SEQ ID NO: 650102 - DNA, 19 bp, Mus musculus
  siRNA target sequence for 6330404A12Rik (NM_025696.1,878-896).
gccacctatgaaaaactta

SEQ ID NO: 650103 - DNA, 19 bp, Mus musculus
  siRNA target sequence for 6330404A12Rik (NM_025696.1,913-931).
gaagaccgtcctcagttat

SEQ ID NO: 650104 - DNA, 19 bp, Mus musculus
  siRNA target sequence for 6330404A12Rik (NM_025696.1,918-936).
ccgtcctcagttatctcta

SEQ ID NO: 650105 - DNA, 19 bp, Mus musculus
  siRNA target sequence for 6330404A12Rik (NM_025696.1,923-941).
ctcagttatctctatgtca

SEQ ID NO: 650106 - DNA, 19 bp, Mus musculus
  siRNA target sequence for 6330404A12Rik (NM_025696.1,1031-1049).
caaaagtaccggcttacat

SEQ ID NO: 650107 - DNA, 19 bp, Mus musculus
  siRNA target sequence for 6330404A12Rik (NM_025696.1,1107-1125).
gcttggaccaaaagcttta

SEQ ID NO: 650108 - DNA, 19 bp, Mus musculus
  siRNA target sequence for 6330404A12Rik (NM_025696.1,1112-1130).
gaccaaaagctttatagct

SEQ ID NO: 650109 - DNA, 19 bp, Mus musculus
  siRNA target sequence for 6330404A12Rik (NM_025696.1,1143-1161).
gcagacgatggcaactcat

SEQ ID NO: 650110 - DNA, 19 bp, Mus musculus
  siRNA target sequence for 6330404A12Rik (NM_025696.1,1243-1261).
gaggacggcagatggatat

SEQ ID NO: 650111 - DNA, 19 bp, Mus musculus
  siRNA target sequence for 6330404A12Rik (NM_025696.1,1349-1367).
gttgtccaggatgaatata

SEQ ID NO: 650112 - DNA, 19 bp, Mus musculus
  siRNA target sequence for 6330404A12Rik (NM_025696.1,1369-1387).
cttcattcaggtaacaata

SEQ ID NO: 650113 - DNA, 19 bp, Mus musculus
  siRNA target sequence for 6330404A12Rik (NM_025696.1,1408-1426).
cgtgtcgtatcgaagagaa

SEQ ID NO: 650114 - DNA, 19 bp, Mus musculus
  siRNA target sequence for 6330404A12Rik (NM_025696.1,1561-1579).
cacacgtgggatctacttt

SEQ ID NO: 650115 - DNA, 19 bp, Mus musculus
  siRNA target sequence for 6330404A12Rik (NM_025696.1,1773-1791).
gaagcccagtgcactgttt

SEQ ID NO: 650116 - DNA, 19 bp, Mus musculus
  siRNA target sequence for 6330404A12Rik (NM_025696.1,1886-1904).
gtggttgccacgggtaata

SEQ ID NO: 650117 - DNA, 19 bp, Mus musculus
  siRNA target sequence for 6330404A12Rik (NM_025696.1,1888-1906).
ggttgccacgggtaatatt

SEQ ID NO: 650118 - DNA, 19 bp, Mus musculus
  siRNA target sequence for 6330404A12Rik (NM_025696.1,1907-1925).
ggctccgaactctcctata

SEQ ID NO: 650119 - DNA, 19 bp, Mus musculus
  siRNA target sequence for 6330404A12Rik (NM_025696.1,1926-1944).
cggatatcggtgtgttcat

SEQ ID NO: 650120 - DNA, 19 bp, Mus musculus
  siRNA target sequence for 6330404A12Rik (NM_025696.1,1965-1983).
catggagacagatctttga

SEQ ID NO: 650121 - DNA, 19 bp, Mus musculus
  siRNA target sequence for 6330404A12Rik (NM_025696.1,2086-2104).
ccattcctgggacaagtat

SEQ ID NO: 650122 - DNA, 19 bp, Mus musculus
  siRNA target sequence for 6330404A12Rik (NM_025696.1,2091-2109).
cctgggacaagtatggttt

SEQ ID NO: 650123 - DNA, 19 bp, Mus musculus
  siRNA target sequence for 6330404A12Rik (NM_025696.1,2112-2130).
cattgctgcctcttttcgt

SEQ ID NO: 650124 - DNA, 19 bp, Mus musculus
  siRNA target sequence for 6330404A12Rik (NM_025696.1,2274-2292).
cttggcacctgctcaatca

SEQ ID NO: 650125 - DNA, 19 bp, Mus musculus
  siRNA target sequence for 6330404A12Rik (NM_025696.1,2304-2322).
gtgtcatgggggaaaggaa

SEQ ID NO: 650126 - DNA, 19 bp, Mus musculus
  siRNA target sequence for 6330404A12Rik (NM_025696.1,2306-2324).
gtcatgggggaaaggaaaa

SEQ ID NO: 650127 - DNA, 19 bp, Mus musculus
  siRNA target sequence for 6330404A12Rik (NM_025696.1,2308-2326).
catgggggaaaggaaaata

SEQ ID NO: 650128 - DNA, 19 bp, Mus musculus
  siRNA target sequence for 6330404A12Rik (NM_025696.1,2513-2531).
cttggtcaaagctacctta

SEQ ID NO: 650129 - DNA, 19 bp, Mus musculus
  siRNA target sequence for 6330404A12Rik (NM_025696.1,2681-2699).
cacaatgcaaccttcatca

SEQ ID NO: 650130 - DNA, 19 bp, Mus musculus
  siRNA target sequence for 6330404A12Rik (NM_025696.1,2683-2701).
caatgcaaccttcatcatt

SEQ ID NO: 650131 - DNA, 19 bp, Mus musculus
  siRNA target sequence for 6330404A12Rik (NM_025696.1,2841-2859).
cagcttatgcggagaacaa

SEQ ID NO: 650132 - DNA, 19 bp, Mus musculus
  siRNA target sequence for 6330404A12Rik (NM_025696.1,3007-3025).
cttctggtggtttggaaat

SEQ ID NO: 650133 - DNA, 19 bp, Mus musculus
  siRNA target sequence for 6330404A12Rik (NM_025696.1,3054-3072).
gcagcatctctttcacatt

SEQ ID NO: 650134 - DNA, 19 bp, Mus musculus
  siRNA target sequence for 6330404A12Rik (NM_025696.1,3130-3148).
ccaagacacaaaagagatt

SEQ ID NO: 650135 - DNA, 19 bp, Mus musculus
  siRNA target sequence for 6330404A12Rik (NM_025696.1,3143-3161).
gagattgcagtacatgaat

SEQ ID NO: 650136 - DNA, 19 bp, Mus musculus
  siRNA target sequence for 6330404A12Rik (NM_025696.1,3167-3185).
cagtcacagctcttatcgt

SEQ ID NO: 650137 - DNA, 19 bp, Mus musculus
  siRNA target sequence for 6330404A12Rik (NM_025696.1,3233-3251).
caagacattggcaatgtca

SEQ ID NO: 650138 - DNA, 19 bp, Mus musculus
  siRNA target sequence for 6330404A12Rik (NM_025696.1,3253-3271).
caagcgagctctgattaaa

SEQ ID NO: 650139 - DNA, 19 bp, Mus musculus
  siRNA target sequence for 6330404A12Rik (NM_025696.1,3313-3331).
cccgggtctccctacttca

SEQ ID NO: 650140 - DNA, 19 bp, Mus musculus
  siRNA target sequence for 6330404A12Rik (NM_025696.1,3347-3365).
ctcccacctaagaacttga

SEQ ID NO: 650141 - DNA, 19 bp, Mus musculus
  siRNA target sequence for 6330404A12Rik (NM_025696.1,3386-3404).
gaaggggatctcgaacaaa

SEQ ID NO: 650142 - DNA, 19 bp, Mus musculus
  siRNA target sequence for 6330404A12Rik (NM_025696.1,3390-3408).
gggatctcgaacaaattgt

SEQ ID NO: 650143 - DNA, 19 bp, Mus musculus
  siRNA target sequence for 6330404A12Rik (NM_025696.1,3391-3409).
ggatctcgaacaaattgta

SEQ ID NO: 650144 - DNA, 19 bp, Mus musculus
  siRNA target sequence for 6330404A12Rik (NM_025696.1,3401-3419).
caaattgtagagacactat

SEQ ID NO: 650145 - DNA, 19 bp, Mus musculus
  siRNA target sequence for 6330404A12Rik (NM_025696.1,3462-3480).
caggtgtccaggtcattgt

SEQ ID NO: 650146 - DNA, 19 bp, Mus musculus
  siRNA target sequence for 6330404A12Rik (NM_025696.1,3464-3482).
ggtgtccaggtcattgttt

SEQ ID NO: 650147 - DNA, 19 bp, Mus musculus
  siRNA target sequence for 6330404A12Rik (NM_025696.1,3534-3552).
gcagctctgccatgcttat

SEQ ID NO: 650148 - DNA, 19 bp, Mus musculus
  siRNA target sequence for 6330404A12Rik (NM_025696.1,3609-3627).
ggaaaatcccctggattaa

SEQ ID NO: 650149 - DNA, 19 bp, Mus musculus
  siRNA target sequence for 6330404A12Rik (NM_025696.1,3636-3654).
cccaagtccaacatgacaa

SEQ ID NO: 650150 - DNA, 19 bp, Mus musculus
  siRNA target sequence for 6330404A12Rik (NM_025696.1,3687-3705).
gtgagaatgcacccaaaat

SEQ ID NO: 650151 - DNA, 19 bp, Mus musculus
  siRNA target sequence for 6330404A12Rik (NM_025696.1,3755-3773).
gacacgcgggtcataggaa

SEQ ID NO: 650152 - DNA, 19 bp, Mus musculus
  siRNA target sequence for 6330404A12Rik (NM_025696.1,3760-3778).
gcgggtcataggaagcatt

SEQ ID NO: 650153 - DNA, 19 bp, Mus musculus
  siRNA target sequence for 6330587F24Rik (NM_172782.1,285-303).
gacaaagccactctaatct

SEQ ID NO: 650154 - DNA, 19 bp, Mus musculus
  siRNA target sequence for 6330587F24Rik (NM_172782.1,295-313).
ctctaatctggaatggaaa

SEQ ID NO: 650155 - DNA, 19 bp, Mus musculus
  siRNA target sequence for 6330587F24Rik (NM_172782.1,325-343).
ggctggaagcccttgctaa

SEQ ID NO: 650156 - DNA, 19 bp, Mus musculus
  siRNA target sequence for 6330587F24Rik (NM_172782.1,364-382).
ccagcgaattccagatcaa

SEQ ID NO: 650157 - DNA, 19 bp, Mus musculus
  siRNA target sequence for 6330587F24Rik (NM_172782.1,365-383).
cagcgaattccagatcaat

SEQ ID NO: 650158 - DNA, 19 bp, Mus musculus
  siRNA target sequence for 6330587F24Rik (NM_172782.1,369-387).
gaattccagatcaatatgt

SEQ ID NO: 650159 - DNA, 19 bp, Mus musculus
  siRNA target sequence for 6330587F24Rik (NM_172782.1,374-392).
ccagatcaatatgttagat

SEQ ID NO: 650160 - DNA, 19 bp, Mus musculus
  siRNA target sequence for 6330587F24Rik (NM_172782.1,375-393).
cagatcaatatgttagatt

SEQ ID NO: 650161 - DNA, 19 bp, Mus musculus
  siRNA target sequence for 6330587F24Rik (NM_172782.1,472-490).
gaaacaagcagcacttctt

SEQ ID NO: 650162 - DNA, 19 bp, Mus musculus
  siRNA target sequence for 6330587F24Rik (NM_172782.1,553-571).
gtgattgcttccgttttca

SEQ ID NO: 650163 - DNA, 19 bp, Mus musculus
  siRNA target sequence for 6330587F24Rik (NM_172782.1,570-588).
caagattgggctagtattt

SEQ ID NO: 650164 - DNA, 19 bp, Mus musculus
  siRNA target sequence for 9130017C17Rik (NM_027840.1,199-217).
gagaggacccataaaccaa

SEQ ID NO: 650165 - DNA, 19 bp, Mus musculus
  siRNA target sequence for 9130017C17Rik (NM_027840.1,293-311).
gatggccccagctctaact

SEQ ID NO: 650166 - DNA, 19 bp, Mus musculus
  siRNA target sequence for 9130017C17Rik (NM_027840.1,415-433).
gaggaaagtctccaagttt

SEQ ID NO: 650167 - DNA, 19 bp, Mus musculus
  siRNA target sequence for A030009B12Rik (NM_026588.1,295-313).
gaccgacttcaagaattaa

SEQ ID NO: 650168 - DNA, 19 bp, Mus musculus
  siRNA target sequence for A030009B12Rik (NM_026588.1,384-402).
cgtccagcaagctgtcatt

SEQ ID NO: 650169 - DNA, 19 bp, Mus musculus
  siRNA target sequence for A030009B12Rik (NM_026588.1,390-408).
gcaagctgtcatttatgaa

SEQ ID NO: 650170 - DNA, 19 bp, Mus musculus
  siRNA target sequence for A030009B12Rik (NM_026588.1,422-440).
ctgagaggcacctacatga

SEQ ID NO: 650171 - DNA, 19 bp, Mus musculus
  siRNA target sequence for A030009B12Rik (NM_026588.1,445-463).
caaaaactgcaggagaata

SEQ ID NO: 650172 - DNA, 19 bp, Mus musculus
  siRNA target sequence for A030009B12Rik (NM_026588.1,477-495).
ggatgatgttcaacgattt

SEQ ID NO: 650173 - DNA, 19 bp, Mus musculus
  siRNA target sequence for A030009B12Rik (NM_026588.1,520-538).
gcttccatgagaaggttta

SEQ ID NO: 650174 - DNA, 19 bp, Mus musculus
  siRNA target sequence for A030009B12Rik (NM_026588.1,524-542).
ccatgagaaggtttagtct

SEQ ID NO: 650175 - DNA, 19 bp, Mus musculus
  siRNA target sequence for A030009B12Rik (NM_026588.1,528-546).
gagaaggtttagtctactt

SEQ ID NO: 650176 - DNA, 19 bp, Mus musculus
  siRNA target sequence for A030009B12Rik (NM_026588.1,605-623).
cactgggtgacgtagtcaa

SEQ ID NO: 650177 - DNA, 19 bp, Mus musculus
  siRNA target sequence for A030009B12Rik (NM_026588.1,735-753).
caatgacacaatagcttta

SEQ ID NO: 650178 - DNA, 19 bp, Mus musculus
  siRNA target sequence for A030009B12Rik (NM_026588.1,757-775).
caagaaaaatgcaaaacgt

SEQ ID NO: 650179 - DNA, 19 bp, Mus musculus
  siRNA target sequence for A030009B12Rik (NM_026588.1,796-814).
gtggccggaaaagaagttt

SEQ ID NO: 650180 - DNA, 19 bp, Mus musculus
  siRNA target sequence for A030009B12Rik (NM_026588.1,798-816).
ggccggaaaagaagtttct

SEQ ID NO: 650181 - DNA, 19 bp, Mus musculus
  siRNA target sequence for A030009B12Rik (NM_026588.1,800-818).
ccggaaaagaagtttctga

SEQ ID NO: 650182 - DNA, 19 bp, Mus musculus
  siRNA target sequence for A030009B12Rik (NM_026588.1,864-882).
caacgaaagcttacttaca

SEQ ID NO: 650183 - DNA, 19 bp, Mus musculus
  siRNA target sequence for A030009B12Rik (NM_026588.1,867-885).
cgaaagcttacttacagaa

SEQ ID NO: 650184 - DNA, 19 bp, Mus musculus
  siRNA target sequence for A030009B12Rik (NM_026588.1,902-920).
cacagctctcggaaattga

SEQ ID NO: 650185 - DNA, 19 bp, Mus musculus
  siRNA target sequence for A030009B12Rik (NM_026588.1,928-946).
cacaaggaacttgtgaatt

SEQ ID NO: 650186 - DNA, 19 bp, Mus musculus
  siRNA target sequence for A030009B12Rik (NM_026588.1,964-982).
gacctccgggaccttttca

SEQ ID NO: 650187 - DNA, 19 bp, Mus musculus
  siRNA target sequence for A030009B12Rik (NM_026588.1,966-984).
cctccgggaccttttcatt

SEQ ID NO: 650188 - DNA, 19 bp, Mus musculus
  siRNA target sequence for A030009B12Rik (NM_026588.1,970-988).
cgggaccttttcattcaga

SEQ ID NO: 650189 - DNA, 19 bp, Mus musculus
  siRNA target sequence for A030009B12Rik (NM_026588.1,972-990).
ggaccttttcattcagata

SEQ ID NO: 650190 - DNA, 19 bp, Mus musculus
  siRNA target sequence for A030009B12Rik (NM_026588.1,1047-1065).
cagcacaaaagattatgtt

SEQ ID NO: 650191 - DNA, 19 bp, Mus musculus
  siRNA target sequence for A030009B12Rik (NM_026588.1,1052-1070).
caaaagattatgttaacaa

SEQ ID NO: 650192 - DNA, 19 bp, Mus musculus
  siRNA target sequence for A030009B12Rik (NM_026588.1,1087-1105).
ggactggctgtaaaataca

SEQ ID NO: 650193 - DNA, 19 bp, Mus musculus
  siRNA target sequence for A030009B12Rik (NM_026588.1,1147-1165).
ccacgctgtggctccaaat

SEQ ID NO: 650194 - DNA, 19 bp, Mus musculus
  siRNA target sequence for A730055F12Rik (NM_153080.1,158-176).
cgaggactggacactgaat

SEQ ID NO: 650195 - DNA, 19 bp, Mus musculus
  siRNA target sequence for A730055F12Rik (NM_153080.1,225-243).
gccatccgggctctaaaga

SEQ ID NO: 650196 - DNA, 19 bp, Mus musculus
  siRNA target sequence for A730055F12Rik (NM_153080.1,226-244).
ccatccgggctctaaagaa

SEQ ID NO: 650197 - DNA, 19 bp, Mus musculus
  siRNA target sequence for A730055F12Rik (NM_153080.1,363-381).
gacagcgttctggtcaaaa

SEQ ID NO: 650198 - DNA, 19 bp, Mus musculus
  siRNA target sequence for A730055F12Rik (NM_153080.1,409-427).
ctatcgtccaggacaaagt

SEQ ID NO: 650199 - DNA, 19 bp, Mus musculus
  siRNA target sequence for A730055F12Rik (NM_153080.1,578-596).
gagtgtcccagaaatggat

SEQ ID NO: 650200 - DNA, 19 bp, Mus musculus
  siRNA target sequence for A730055F12Rik (NM_153080.1,721-739).
cagccaattcagaacagat

SEQ ID NO: 650201 - DNA, 19 bp, Mus musculus
  siRNA target sequence for A730055F12Rik (NM_153080.1,771-789).
cggggaaacacaaaagtca

SEQ ID NO: 650202 - DNA, 19 bp, Mus musculus
  siRNA target sequence for A730055F12Rik (NM_153080.1,821-839).
gcaggaggattcttctgat

SEQ ID NO: 650203 - DNA, 19 bp, Mus musculus
  siRNA target sequence for A730055F12Rik (NM_153080.1,1035-1053).
ggagtactaagcgaagtta

SEQ ID NO: 650204 - DNA, 19 bp, Mus musculus
  siRNA target sequence for A730055F12Rik (NM_153080.1,1045-1063).
gcgaagttactgaagacaa

SEQ ID NO: 650205 - DNA, 19 bp, Mus musculus
  siRNA target sequence for A730055F12Rik (NM_153080.1,1205-1223).
gcagtgcaagccacaagat

SEQ ID NO: 650206 - DNA, 19 bp, Mus musculus
  siRNA target sequence for A730055F12Rik (NM_153080.1,1215-1233).
ccacaagatggttttgaca

SEQ ID NO: 650207 - DNA, 19 bp, Mus musculus
  siRNA target sequence for A730055F12Rik (NM_153080.1,1375-1393).
ctgtcatggacgacattga

SEQ ID NO: 650208 - DNA, 19 bp, Mus musculus
  siRNA target sequence for A730055F12Rik (NM_153080.1,1444-1462).
caagtgaagagttcgataa

SEQ ID NO: 650209 - DNA, 19 bp, Mus musculus
  siRNA target sequence for A730055F12Rik (NM_153080.1,1533-1551).
gcaccagcctcaaacactt

SEQ ID NO: 650210 - DNA, 19 bp, Mus musculus
  siRNA target sequence for Akap12 (NM_031185.1,286-304).
caagctcccacagaagaat

SEQ ID NO: 650211 - DNA, 19 bp, Mus musculus
  siRNA target sequence for Akap12 (NM_031185.1,462-480).
ccagttccacagttgttga

SEQ ID NO: 650212 - DNA, 19 bp, Mus musculus
  siRNA target sequence for Akap12 (NM_031185.1,465-483).
gttccacagttgttgaaga

SEQ ID NO: 650213 - DNA, 19 bp, Mus musculus
  siRNA target sequence for Akap12 (NM_031185.1,468-486).
ccacagttgttgaagatat

SEQ ID NO: 650214 - DNA, 19 bp, Mus musculus
  siRNA target sequence for Akap12 (NM_031185.1,502-520).
ggaggaaacaccggaaata

SEQ ID NO: 650215 - DNA, 19 bp, Mus musculus
  siRNA target sequence for Akap12 (NM_031185.1,503-521).
gaggaaacaccggaaataa

SEQ ID NO: 650216 - DNA, 19 bp, Mus musculus
  siRNA target sequence for Akap12 (NM_031185.1,513-531).
cggaaataatcgaacagat

SEQ ID NO: 650217 - DNA, 19 bp, Mus musculus
  siRNA target sequence for Akap12 (NM_031185.1,593-611).
gtcggcttcaagaaggtat

SEQ ID NO: 650218 - DNA, 19 bp, Mus musculus
  siRNA target sequence for Akap12 (NM_031185.1,595-613).
cggcttcaagaaggtattt

SEQ ID NO: 650219 - DNA, 19 bp, Mus musculus
  siRNA target sequence for Akap12 (NM_031185.1,596-614).
ggcttcaagaaggtattta

SEQ ID NO: 650220 - DNA, 19 bp, Mus musculus
  siRNA target sequence for Akap12 (NM_031185.1,597-615).
gcttcaagaaggtatttaa

SEQ ID NO: 650221 - DNA, 19 bp, Mus musculus
  siRNA target sequence for Akap12 (NM_031185.1,598-616).
cttcaagaaggtatttaaa

SEQ ID NO: 650222 - DNA, 19 bp, Mus musculus
  siRNA target sequence for Akap12 (NM_031185.1,763-781).
cggcgaatcagcatccaaa

SEQ ID NO: 650223 - DNA, 19 bp, Mus musculus
  siRNA target sequence for Akap12 (NM_031185.1,929-947).
cctaccaagcccctagaat

SEQ ID NO: 650224 - DNA, 19 bp, Mus musculus
  siRNA target sequence for Akap12 (NM_031185.1,1182-1200).
ggttgtcagccgactatga

SEQ ID NO: 650225 - DNA, 19 bp, Mus musculus
  siRNA target sequence for Akap12 (NM_031185.1,1413-1431).
ccttgccccctgagaaact

SEQ ID NO: 650226 - DNA, 19 bp, Mus musculus
  siRNA target sequence for Akap12 (NM_031185.1,1506-1524).
ctgggggtgaccatactca

SEQ ID NO: 650227 - DNA, 19 bp, Mus musculus
  siRNA target sequence for Akap12 (NM_031185.1,1565-1583).
caccccgaaggcattgtca

SEQ ID NO: 650228 - DNA, 19 bp, Mus musculus
  siRNA target sequence for Akap12 (NM_031185.1,1731-1749).
gagaataccaacacattca

SEQ ID NO: 650229 - DNA, 19 bp, Mus musculus
  siRNA target sequence for Akap12 (NM_031185.1,1926-1944).
gggcatccttcaaaaagat

SEQ ID NO: 650230 - DNA, 19 bp, Mus musculus
  siRNA target sequence for Akap12 (NM_031185.1,2133-2151).
gggaggcgttgatttgtgt

SEQ ID NO: 650231 - DNA, 19 bp, Mus musculus
  siRNA target sequence for Akap12 (NM_031185.1,2150-2168).
gtcggatcgtccaagaaga

SEQ ID NO: 650232 - DNA, 19 bp, Mus musculus
  siRNA target sequence for Akap12 (NM_031185.1,2179-2197).
ggcatcctcttcagatgat

SEQ ID NO: 650233 - DNA, 19 bp, Mus musculus
  siRNA target sequence for Akap12 (NM_031185.1,2242-2260).
ggaggctagcaaagacaaa

SEQ ID NO: 650234 - DNA, 19 bp, Mus musculus
  siRNA target sequence for Akap12 (NM_031185.1,2361-2379).
ccacctgggagtcatttaa

SEQ ID NO: 650235 - DNA, 19 bp, Mus musculus
  siRNA target sequence for Akap12 (NM_031185.1,2367-2385).
gggagtcatttaagagatt

SEQ ID NO: 650236 - DNA, 19 bp, Mus musculus
  siRNA target sequence for Akap12 (NM_031185.1,2387-2405).
gtcactccacgaaaaaaat

SEQ ID NO: 650237 - DNA, 19 bp, Mus musculus
  siRNA target sequence for Akap12 (NM_031185.1,2391-2409).
ctccacgaaaaaaatccaa

SEQ ID NO: 650238 - DNA, 19 bp, Mus musculus
  siRNA target sequence for Akap12 (NM_031185.1,2461-2479).
cgagatcgaaccaagtaga

SEQ ID NO: 650239 - DNA, 19 bp, Mus musculus
  siRNA target sequence for Akap12 (NM_031185.1,2471-2489).
ccaagtagagaggaatctt

SEQ ID NO: 650240 - DNA, 19 bp, Mus musculus
  siRNA target sequence for Akap12 (NM_031185.1,2482-2500).
ggaatcttgggtttccatt

SEQ ID NO: 650241 - DNA, 19 bp, Mus musculus
  siRNA target sequence for Akap12 (NM_031185.1,2574-2592).
ggccaggagagatcaatga

SEQ ID NO: 650242 - DNA, 19 bp, Mus musculus
  siRNA target sequence for Akap12 (NM_031185.1,2698-2716).
gctgaagggggctgtgtat

SEQ ID NO: 650243 - DNA, 19 bp, Mus musculus
  siRNA target sequence for Akap12 (NM_031185.1,2804-2822).
cggtccccttcgtggatat

SEQ ID NO: 650244 - DNA, 19 bp, Mus musculus
  siRNA target sequence for Akap12 (NM_031185.1,3027-3045).
cgctccgcgctgaagaact

SEQ ID NO: 650245 - DNA, 19 bp, Mus musculus
  siRNA target sequence for Akap12 (NM_031185.1,3028-3046).
gctccgcgctgaagaactt

SEQ ID NO: 650246 - DNA, 19 bp, Mus musculus
  siRNA target sequence for Akap12 (NM_031185.1,3029-3047).
ctccgcgctgaagaactta

SEQ ID NO: 650247 - DNA, 19 bp, Mus musculus
  siRNA target sequence for Akap12 (NM_031185.1,3545-3563).
gacagtgagacaaatggaa

SEQ ID NO: 650248 - DNA, 19 bp, Mus musculus
  siRNA target sequence for Akap12 (NM_031185.1,3694-3712).
gacggaggggccttcaaca

SEQ ID NO: 650249 - DNA, 19 bp, Mus musculus
  siRNA target sequence for Akap12 (NM_031185.1,3703-3721).
gccttcaacaccatctagt

SEQ ID NO: 650250 - DNA, 19 bp, Mus musculus
  siRNA target sequence for Akap12 (NM_031185.1,3912-3930).
ctggacccaacagtcaaaa

SEQ ID NO: 650251 - DNA, 19 bp, Mus musculus
  siRNA target sequence for Akap12 (NM_031185.1,3914-3932).
ggacccaacagtcaaaaga

SEQ ID NO: 650252 - DNA, 19 bp, Mus musculus
  siRNA target sequence for Akap12 (NM_031185.1,3943-3961).
gacacgtgacagtgaagta

SEQ ID NO: 650253 - DNA, 19 bp, Mus musculus
  siRNA target sequence for Akap12 (NM_031185.1,3978-3996).
gtcaggaaactgagagtaa

SEQ ID NO: 650254 - DNA, 19 bp, Mus musculus
  siRNA target sequence for Akap12 (NM_031185.1,4035-4053).
gaaccgacgttgaaaagga

SEQ ID NO: 650255 - DNA, 19 bp, Mus musculus
  siRNA target sequence for Akap12 (NM_031185.1,4236-4254).
gcatagaggttcaagttca

SEQ ID NO: 650256 - DNA, 19 bp, Mus musculus
  siRNA target sequence for Akap12 (NM_031185.1,4237-4255).
catagaggttcaagttcaa

SEQ ID NO: 650257 - DNA, 19 bp, Mus musculus
  siRNA target sequence for Akap12 (NM_031185.1,4262-4280).
gacacaccagtcactcaaa

SEQ ID NO: 650258 - DNA, 19 bp, Mus musculus
  siRNA target sequence for Akap12 (NM_031185.1,4284-4302).
ccgaagctgtgaaaaaggt

SEQ ID NO: 650259 - DNA, 19 bp, Mus musculus
  siRNA target sequence for Akap12 (NM_031185.1,4292-4310).
gtgaaaaaggtcgaagaaa

SEQ ID NO: 650260 - DNA, 19 bp, Mus musculus
  siRNA target sequence for Akap12 (NM_031185.1,4347-4365).
gtgcaggtgcgcaatcatt

SEQ ID NO: 650261 - DNA, 19 bp, Mus musculus
  siRNA target sequence for Akap12 (NM_031185.1,4456-4474).
gtccatcccaataatagta

SEQ ID NO: 650262 - DNA, 19 bp, Mus musculus
  siRNA target sequence for Akap12 (NM_031185.1,4459-4477).
catcccaataatagtaact

SEQ ID NO: 650263 - DNA, 19 bp, Mus musculus
  siRNA target sequence for Akap12 (NM_031185.1,4476-4494).
ctcctgctcctgaaagcat

SEQ ID NO: 650264 - DNA, 19 bp, Mus musculus
  siRNA target sequence for Akap12 (NM_031185.1,4484-4502).
cctgaaagcatcctacatt

SEQ ID NO: 650265 - DNA, 19 bp, Mus musculus
  siRNA target sequence for Akap12 (NM_031185.1,4538-4556).
cagagatcagatgaagata

SEQ ID NO: 650266 - DNA, 19 bp, Mus musculus
  siRNA target sequence for Akap12 (NM_031185.1,4620-4638).
gggctgaacctgagatctt

SEQ ID NO: 650267 - DNA, 19 bp, Mus musculus
  siRNA target sequence for Akap12 (NM_031185.1,4643-4661).
cttgagagtaagagcaata

SEQ ID NO: 650268 - DNA, 19 bp, Mus musculus
  siRNA target sequence for Akap12 (NM_031185.1,4650-4668).
gtaagagcaataagattgt

SEQ ID NO: 650269 - DNA, 19 bp, Mus musculus
  siRNA target sequence for Akap12 (NM_031185.1,4724-4742).
gaaacccacgcttctgatt

SEQ ID NO: 650270 - DNA, 19 bp, Mus musculus
  siRNA target sequence for Akap12 (NM_031185.1,4728-4746).
cccacgcttctgatttaca

SEQ ID NO: 650271 - DNA, 19 bp, Mus musculus
  siRNA target sequence for Akap12 (NM_031185.1,4730-4748).
cacgcttctgatttacaga

SEQ ID NO: 650272 - DNA, 19 bp, Mus musculus
  siRNA target sequence for Akap12 (NM_031185.1,4868-4886).
cttgcggtttctgatagtt

SEQ ID NO: 650273 - DNA, 19 bp, Mus musculus
  siRNA target sequence for Akap12 (NM_031185.1,4918-4936).
caccacgcttgcagttgaa

SEQ ID NO: 650274 - DNA, 19 bp, Mus musculus
  siRNA target sequence for Akap12 (NM_031185.1,4942-4960).
cagtgtcaaagaaagtgtt

SEQ ID NO: 650275 - DNA, 19 bp, Mus musculus
  siRNA target sequence for Akap12 (NM_031185.1,5041-5059).
ggcggatgcctctggaaat

SEQ ID NO: 650276 - DNA, 19 bp, Mus musculus
  siRNA target sequence for Akap12 (NM_031185.1,5043-5061).
cggatgcctctggaaatct

SEQ ID NO: 650277 - DNA, 19 bp, Mus musculus
  siRNA target sequence for Akap12 (NM_031185.1,5080-5098).
caccaacggaccaaagcta

SEQ ID NO: 650278 - DNA, 19 bp, Mus musculus
  siRNA target sequence for Ap1b1 (NM_007454.1,139-157).
caagaaaggggagatcttt

SEQ ID NO: 650279 - DNA, 19 bp, Mus musculus
  siRNA target sequence for Ap1b1 (NM_007454.1,441-459).
gctgcatccgagttgacaa

SEQ ID NO: 650280 - DNA, 19 bp, Mus musculus
  siRNA target sequence for Ap1b1 (NM_007454.1,589-607).
cttcctggacacgcttaaa

SEQ ID NO: 650281 - DNA, 19 bp, Mus musculus
  siRNA target sequence for Ap1b1 (NM_007454.1,687-705).
gtagcaacctgcttgactt

SEQ ID NO: 650282 - DNA, 19 bp, Mus musculus
  siRNA target sequence for Ap1b1 (NM_007454.1,731-749).
ctgacagcccttaatgagt

SEQ ID NO: 650283 - DNA, 19 bp, Mus musculus
  siRNA target sequence for Ap1b1 (NM_007454.1,921-939).
ccaaggacctggactacta

SEQ ID NO: 650284 - DNA, 19 bp, Mus musculus
  siRNA target sequence for Ap1b1 (NM_007454.1,1012-1030).
ggccctgcgcaacatcaat

SEQ ID NO: 650285 - DNA, 19 bp, Mus musculus
  siRNA target sequence for Ap1b1 (NM_007454.1,1014-1032).
ccctgcgcaacatcaatct

SEQ ID NO: 650286 - DNA, 19 bp, Mus musculus
  siRNA target sequence for Ap1b1 (NM_007454.1,1016-1034).
ctgcgcaacatcaatctca

SEQ ID NO: 650287 - DNA, 19 bp, Mus musculus
  siRNA target sequence for Ap1b1 (NM_007454.1,1018-1036).
gcgcaacatcaatctcatt

SEQ ID NO: 650288 - DNA, 19 bp, Mus musculus
  siRNA target sequence for Ap1b1 (NM_007454.1,1174-1192).
ggcagaactcaaagagtat

SEQ ID NO: 650289 - DNA, 19 bp, Mus musculus
  siRNA target sequence for Ap1b1 (NM_007454.1,1178-1196).
gaactcaaagagtatgcta

SEQ ID NO: 650290 - DNA, 19 bp, Mus musculus
  siRNA target sequence for Ap1b1 (NM_007454.1,1338-1356).
ccattgtggtcattaagga

SEQ ID NO: 650291 - DNA, 19 bp, Mus musculus
  siRNA target sequence for Ap1b1 (NM_007454.1,1667-1685).
cgggaccgtggctacatct

SEQ ID NO: 650292 - DNA, 19 bp, Mus musculus
  siRNA target sequence for Ap1b1 (NM_007454.1,1668-1686).
gggaccgtggctacatcta

SEQ ID NO: 650293 - DNA, 19 bp, Mus musculus
  siRNA target sequence for Ap1b1 (NM_007454.1,1768-1786).
ccttattgagcctacactt

SEQ ID NO: 650294 - DNA, 19 bp, Mus musculus
  siRNA target sequence for Ap1b1 (NM_007454.1,1782-1800).
cacttctggatgaactcat

SEQ ID NO: 650295 - DNA, 19 bp, Mus musculus
  siRNA target sequence for Ap1b1 (NM_007454.1,2103-2121).
gcctgattggagatagcaa

SEQ ID NO: 650296 - DNA, 19 bp, Mus musculus
  siRNA target sequence for Ap1b1 (NM_007454.1,2193-2211).
gcttaagtgacctctttga

SEQ ID NO: 650297 - DNA, 19 bp, Mus musculus
  siRNA target sequence for Ap1b1 (NM_007454.1,2230-2248).
caccctttcaggatcctat

SEQ ID NO: 650298 - DNA, 19 bp, Mus musculus
  siRNA target sequence for Ap1b1 (NM_007454.1,2321-2339).
caggctggctccatctcta

SEQ ID NO: 650299 - DNA, 19 bp, Mus musculus
  siRNA target sequence for Ap1b1 (NM_007454.1,2366-2384).
ctgcaggtcatgacagatt

SEQ ID NO: 650300 - DNA, 19 bp, Mus musculus
  siRNA target sequence for Ap1b1 (NM_007454.1,2368-2386).
gcaggtcatgacagatttt

SEQ ID NO: 650301 - DNA, 19 bp, Mus musculus
  siRNA target sequence for Ap1b1 (NM_007454.1,2388-2406).
ctatccagttcaatcgtaa

SEQ ID NO: 650302 - DNA, 19 bp, Mus musculus
  siRNA target sequence for Ap1b1 (NM_007454.1,2515-2533).
gatggagcctctaaacaat

SEQ ID NO: 650303 - DNA, 19 bp, Mus musculus
  siRNA target sequence for Ap1b1 (NM_007454.1,2518-2536).
ggagcctctaaacaatctt

SEQ ID NO: 650304 - DNA, 19 bp, Mus musculus
  siRNA target sequence for Ap1b1 (NM_007454.1,2777-2795).
caggatatgctctaccaat

SEQ ID NO: 650305 - DNA, 19 bp, Mus musculus
  siRNA target sequence for Ap1b1 (NM_007454.1,2891-2909).
gaggtgtcccagcatgtat

SEQ ID NO: 650306 - DNA, 19 bp, Mus musculus
  siRNA target sequence for Ap1g1 (NM_009677.2,367-385).
ctgaggaacgagaaatgat

SEQ ID NO: 650307 - DNA, 19 bp, Mus musculus
  siRNA target sequence for Ap1g1 (NM_009677.2,402-420).
gcaatccggtcctcattta

SEQ ID NO: 650308 - DNA, 19 bp, Mus musculus
  siRNA target sequence for Ap1g1 (NM_009677.2,407-425).
ccggtcctcatttagagaa

SEQ ID NO: 650309 - DNA, 19 bp, Mus musculus
  siRNA target sequence for Ap1g1 (NM_009677.2,448-466).
ggaatgtggcaaagttact

SEQ ID NO: 650310 - DNA, 19 bp, Mus musculus
  siRNA target sequence for Ap1g1 (NM_009677.2,449-467).
gaatgtggcaaagttacta

SEQ ID NO: 650311 - DNA, 19 bp, Mus musculus
  siRNA target sequence for Ap1g1 (NM_009677.2,453-471).
gtggcaaagttactatata

SEQ ID NO: 650312 - DNA, 19 bp, Mus musculus
  siRNA target sequence for Ap1g1 (NM_009677.2,521-539).
gctaatcgcctcacaaaaa

SEQ ID NO: 650313 - DNA, 19 bp, Mus musculus
  siRNA target sequence for Ap1g1 (NM_009677.2,522-540).
ctaatcgcctcacaaaaat

SEQ ID NO: 650314 - DNA, 19 bp, Mus musculus
  siRNA target sequence for Ap1g1 (NM_009677.2,548-566).
caaacgcattggctattta

SEQ ID NO: 650315 - DNA, 19 bp, Mus musculus
  siRNA target sequence for Ap1g1 (NM_009677.2,575-593).
gctattattagatgaaaga

SEQ ID NO: 650316 - DNA, 19 bp, Mus musculus
  siRNA target sequence for Ap1g1 (NM_009677.2,609-627).
ctcatgaccaactgtatca

SEQ ID NO: 650317 - DNA, 19 bp, Mus musculus
  siRNA target sequence for Ap1g1 (NM_009677.2,622-640).
gtatcaagaatgatcttaa

SEQ ID NO: 650318 - DNA, 19 bp, Mus musculus
  siRNA target sequence for Ap1g1 (NM_009677.2,659-677).
gcaggggctagcactttgt

SEQ ID NO: 650319 - DNA, 19 bp, Mus musculus
  siRNA target sequence for Ap1g1 (NM_009677.2,802-820).
ggaaggttcctgaacttat

SEQ ID NO: 650320 - DNA, 19 bp, Mus musculus
  siRNA target sequence for Ap1g1 (NM_009677.2,924-942).
gacatgctcgcacatttca

SEQ ID NO: 650321 - DNA, 19 bp, Mus musculus
  siRNA target sequence for Ap1g1 (NM_009677.2,926-944).
catgctcgcacatttcaga

SEQ ID NO: 650322 - DNA, 19 bp, Mus musculus
  siRNA target sequence for Ap1g1 (NM_009677.2,932-950).
cgcacatttcagaaagctt

SEQ ID NO: 650323 - DNA, 19 bp, Mus musculus
  siRNA target sequence for Ap1g1 (NM_009677.2,953-971).
gccccaattagttcgtatt

SEQ ID NO: 650324 - DNA, 19 bp, Mus musculus
  siRNA target sequence for Ap1g1 (NM_009677.2,956-974).
ccaattagttcgtattcta

SEQ ID NO: 650325 - DNA, 19 bp, Mus musculus
  siRNA target sequence for Ap1g1 (NM_009677.2,981-999).
ctcatcatgtccggatatt

SEQ ID NO: 650326 - DNA, 19 bp, Mus musculus
  siRNA target sequence for Ap1g1 (NM_009677.2,992-1010).
cggatattccccagaacat

SEQ ID NO: 650327 - DNA, 19 bp, Mus musculus
  siRNA target sequence for Ap1g1 (NM_009677.2,994-1012).
gatattccccagaacatga

SEQ ID NO: 650328 - DNA, 19 bp, Mus musculus
  siRNA target sequence for Ap1g1 (NM_009677.2,1033-1051).
cctttttgcaggtacgaat

SEQ ID NO: 650329 - DNA, 19 bp, Mus musculus
  siRNA target sequence for Ap1g1 (NM_009677.2,1034-1052).
ctttttgcaggtacgaatt

SEQ ID NO: 650330 - DNA, 19 bp, Mus musculus
  siRNA target sequence for Ap1g1 (NM_009677.2,1047-1065).
cgaattttgcggttattaa

SEQ ID NO: 650331 - DNA, 19 bp, Mus musculus
  siRNA target sequence for Ap1g1 (NM_009677.2,1055-1073).
gcggttattaagaatttta

SEQ ID NO: 650332 - DNA, 19 bp, Mus musculus
  siRNA target sequence for Ap1g1 (NM_009677.2,1058-1076).
gttattaagaattttagga

SEQ ID NO: 650333 - DNA, 19 bp, Mus musculus
  siRNA target sequence for Ap1g1 (NM_009677.2,1074-1092).
ggacggaatgacgatgatt

SEQ ID NO: 650334 - DNA, 19 bp, Mus musculus
  siRNA target sequence for Ap1g1 (NM_009677.2,1077-1095).
cggaatgacgatgattcaa

SEQ ID NO: 650335 - DNA, 19 bp, Mus musculus
  siRNA target sequence for Ap1g1 (NM_009677.2,1079-1097).
gaatgacgatgattcaagt

SEQ ID NO: 650336 - DNA, 19 bp, Mus musculus
  siRNA target sequence for Ap1g1 (NM_009677.2,1093-1111).
caagtgaagctatgaatga

SEQ ID NO: 650337 - DNA, 19 bp, Mus musculus
  siRNA target sequence for Ap1g1 (NM_009677.2,1096-1114).
gtgaagctatgaatgatat

SEQ ID NO: 650338 - DNA, 19 bp, Mus musculus
  siRNA target sequence for Ap1g1 (NM_009677.2,1138-1156).
cagagactagtaaaaatgt

SEQ ID NO: 650339 - DNA, 19 bp, Mus musculus
  siRNA target sequence for Ap1g1 (NM_009677.2,1159-1177).
gaaatgctattctgtatga

SEQ ID NO: 650340 - DNA, 19 bp, Mus musculus
  siRNA target sequence for Ap1g1 (NM_009677.2,1187-1205).
gactatcatggatattaaa

SEQ ID NO: 650341 - DNA, 19 bp, Mus musculus
  siRNA target sequence for Ap1g1 (NM_009677.2,1211-1229).
gagtggattgcgagttcta

SEQ ID NO: 650342 - DNA, 19 bp, Mus musculus
  siRNA target sequence for Ap1g1 (NM_009677.2,1220-1238).
gcgagttctagccataaat

SEQ ID NO: 650343 - DNA, 19 bp, Mus musculus
  siRNA target sequence for Ap1g1 (NM_009677.2,1221-1239).
cgagttctagccataaata

SEQ ID NO: 650344 - DNA, 19 bp, Mus musculus
  siRNA target sequence for Ap1g1 (NM_009677.2,1222-1240).
gagttctagccataaatat

SEQ ID NO: 650345 - DNA, 19 bp, Mus musculus
  siRNA target sequence for Ap1g1 (NM_009677.2,1242-1260).
cttggtcgattcttattga

SEQ ID NO: 650346 - DNA, 19 bp, Mus musculus
  siRNA target sequence for Ap1g1 (NM_009677.2,1245-1263).
ggtcgattcttattgaaca

SEQ ID NO: 650347 - DNA, 19 bp, Mus musculus
  siRNA target sequence for Ap1g1 (NM_009677.2,1249-1267).
gattcttattgaacaatga

SEQ ID NO: 650348 - DNA, 19 bp, Mus musculus
  siRNA target sequence for Ap1g1 (NM_009677.2,1374-1392).
ctggatgtctccataaaaa

SEQ ID NO: 650349 - DNA, 19 bp, Mus musculus
  siRNA target sequence for Ap1g1 (NM_009677.2,1376-1394).
ggatgtctccataaaaaga

SEQ ID NO: 650350 - DNA, 19 bp, Mus musculus
  siRNA target sequence for Ap1g1 (NM_009677.2,1546-1564).
ccaaacggtggcatataga

SEQ ID NO: 650351 - DNA, 19 bp, Mus musculus
  siRNA target sequence for Ap1g1 (NM_009677.2,1547-1565).
caaacggtggcatatagat

SEQ ID NO: 650352 - DNA, 19 bp, Mus musculus
  siRNA target sequence for Ap1g1 (NM_009677.2,1551-1569).
cggtggcatatagatacaa

SEQ ID NO: 650353 - DNA, 19 bp, Mus musculus
  siRNA target sequence for Ap1g1 (NM_009677.2,1552-1570).
ggtggcatatagatacaat

SEQ ID NO: 650354 - DNA, 19 bp, Mus musculus
  siRNA target sequence for Ap1g1 (NM_009677.2,1553-1571).
gtggcatatagatacaatt

SEQ ID NO: 650355 - DNA, 19 bp, Mus musculus
  siRNA target sequence for Ap1g1 (NM_009677.2,1583-1601).
gacaacggcaggaagttat

SEQ ID NO: 650356 - DNA, 19 bp, Mus musculus
  siRNA target sequence for Ap1g1 (NM_009677.2,1585-1603).
caacggcaggaagttatgt

SEQ ID NO: 650357 - DNA, 19 bp, Mus musculus
  siRNA target sequence for Ap1g1 (NM_009677.2,1615-1633).
cagttcctaacttgattca

SEQ ID NO: 650358 - DNA, 19 bp, Mus musculus
  siRNA target sequence for Ap1g1 (NM_009677.2,1621-1639).
ctaacttgattcagttaat

SEQ ID NO: 650359 - DNA, 19 bp, Mus musculus
  siRNA target sequence for Ap1g1 (NM_009677.2,1689-1707).
gcgattctcggtgactatt

SEQ ID NO: 650360 - DNA, 19 bp, Mus musculus
  siRNA target sequence for Ap1g1 (NM_009677.2,1691-1709).
gattctcggtgactattct

SEQ ID NO: 650361 - DNA, 19 bp, Mus musculus
  siRNA target sequence for Ap1g1 (NM_009677.2,1730-1748).
ggctgcgtggtgtataggt

SEQ ID NO: 650362 - DNA, 19 bp, Mus musculus
  siRNA target sequence for Ap1g1 (NM_009677.2,1735-1753).
cgtggtgtataggtgaata

SEQ ID NO: 650363 - DNA, 19 bp, Mus musculus
  siRNA target sequence for Ap1g1 (NM_009677.2,1736-1754).
gtggtgtataggtgaatat

SEQ ID NO: 650364 - DNA, 19 bp, Mus musculus
  siRNA target sequence for Ap1g1 (NM_009677.2,1820-1838).
gctggatattttagaaagt

SEQ ID NO: 650365 - DNA, 19 bp, Mus musculus
  siRNA target sequence for Ap1g1 (NM_009677.2,1833-1851).
gaaagtgtcctgatctcta

SEQ ID NO: 650366 - DNA, 19 bp, Mus musculus
  siRNA target sequence for Ap1g1 (NM_009677.2,1839-1857).
gtcctgatctctaatatgt

SEQ ID NO: 650367 - DNA, 19 bp, Mus musculus
  siRNA target sequence for Ap1g1 (NM_009677.2,1881-1899).
gctctcactgccattatga

SEQ ID NO: 650368 - DNA, 19 bp, Mus musculus
  siRNA target sequence for Ap1g1 (NM_009677.2,1911-1929).
cgattcacctgtactgtaa

SEQ ID NO: 650369 - DNA, 19 bp, Mus musculus
  siRNA target sequence for Ap1g1 (NM_009677.2,1998-2016).
gagtacaacgcacttttta

SEQ ID NO: 650370 - DNA, 19 bp, Mus musculus
  siRNA target sequence for Ap1g1 (NM_009677.2,2006-2024).
cgcactttttaagaagtat

SEQ ID NO: 650371 - DNA, 19 bp, Mus musculus
  siRNA target sequence for Ap1g1 (NM_009677.2,2038-2056).
ctgccctacttgaaagaat

SEQ ID NO: 650372 - DNA, 19 bp, Mus musculus
  siRNA target sequence for Ap1g1 (NM_009677.2,2066-2084).
ggaaaaagtgaccacaaat

SEQ ID NO: 650373 - DNA, 19 bp, Mus musculus
  siRNA target sequence for Ap1g1 (NM_009677.2,2092-2110).
cggagatcgtgcagacaaa

SEQ ID NO: 650374 - DNA, 19 bp, Mus musculus
  siRNA target sequence for Ap1g1 (NM_009677.2,2096-2114).
gatcgtgcagacaaatgga

SEQ ID NO: 650375 - DNA, 19 bp, Mus musculus
  siRNA target sequence for Ap1g1 (NM_009677.2,2168-2186).
cacaagccaggccaatgat

SEQ ID NO: 650376 - DNA, 19 bp, Mus musculus
  siRNA target sequence for Ap1g1 (NM_009677.2,2173-2191).
gccaggccaatgatctatt

SEQ ID NO: 650377 - DNA, 19 bp, Mus musculus
  siRNA target sequence for Ap1g1 (NM_009677.2,2192-2210).
ggatttgttgggaggaaat

SEQ ID NO: 650378 - DNA, 19 bp, Mus musculus
  siRNA target sequence for Ap1g1 (NM_009677.2,2201-2219).
gggaggaaatgacataaca

SEQ ID NO: 650379 - DNA, 19 bp, Mus musculus
  siRNA target sequence for Ap1g1 (NM_009677.2,2422-2440).
ccatcacagcgtacagtaa

SEQ ID NO: 650380 - DNA, 19 bp, Mus musculus
  siRNA target sequence for Ap1g1 (NM_009677.2,2437-2455).
gtaagaacggcttgaagat

SEQ ID NO: 650381 - DNA, 19 bp, Mus musculus
  siRNA target sequence for Ap1g1 (NM_009677.2,2482-2500).
ccaaccccagcgtaacagt

SEQ ID NO: 650382 - DNA, 19 bp, Mus musculus
  siRNA target sequence for Ap1g1 (NM_009677.2,2486-2504).
ccccagcgtaacagtgata

SEQ ID NO: 650383 - DNA, 19 bp, Mus musculus
  siRNA target sequence for Ap1g1 (NM_009677.2,2491-2509).
gcgtaacagtgataacgat

SEQ ID NO: 650384 - DNA, 19 bp, Mus musculus
  siRNA target sequence for Ap1g1 (NM_009677.2,2492-2510).
cgtaacagtgataacgata

SEQ ID NO: 650385 - DNA, 19 bp, Mus musculus
  siRNA target sequence for Ap1g1 (NM_009677.2,2633-2651).
gaccatcacacaagtcatt

SEQ ID NO: 650386 - DNA, 19 bp, Mus musculus
  siRNA target sequence for Ap1g1 (NM_009677.2,2639-2657).
cacacaagtcattaaagtt

SEQ ID NO: 650387 - DNA, 19 bp, Mus musculus
  siRNA target sequence for Ap1g1 (NM_009677.2,2687-2705).
gcggatcaagctcacatat

SEQ ID NO: 650388 - DNA, 19 bp, Mus musculus
  siRNA target sequence for Ap1g1 (NM_009677.2,2688-2706).
cggatcaagctcacatata

SEQ ID NO: 650389 - DNA, 19 bp, Mus musculus
  siRNA target sequence for Ap1g1 (NM_009677.2,2689-2707).
ggatcaagctcacatataa

SEQ ID NO: 650390 - DNA, 19 bp, Mus musculus
  siRNA target sequence for Ap1g1 (NM_009677.2,2690-2708).
gatcaagctcacatataat

SEQ ID NO: 650391 - DNA, 19 bp, Mus musculus
  siRNA target sequence for Ap1g1 (NM_009677.2,2716-2734).
gctcggcaatgcaagatct

SEQ ID NO: 650392 - DNA, 19 bp, Mus musculus
  siRNA target sequence for Ap1g1 (NM_009677.2,2717-2735).
ctcggcaatgcaagatcta

SEQ ID NO: 650393 - DNA, 19 bp, Mus musculus
  siRNA target sequence for Ap1g2 (NM_007455.1,37-55).
gacttcaggacctaatcga

SEQ ID NO: 650394 - DNA, 19 bp, Mus musculus
  siRNA target sequence for Ap1g2 (NM_007455.1,44-62).
ggacctaatcgaagagatt

SEQ ID NO: 650395 - DNA, 19 bp, Mus musculus
  siRNA target sequence for Ap1g2 (NM_007455.1,242-260).
cgcctcccccagattcaca

SEQ ID NO: 650396 - DNA, 19 bp, Mus musculus
  siRNA target sequence for Ap1g2 (NM_007455.1,283-301).
gggccatgcttctattgga

SEQ ID NO: 650397 - DNA, 19 bp, Mus musculus
  siRNA target sequence for Ap1g2 (NM_007455.1,566-584).
gcttcgtgagcgtcatcat

SEQ ID NO: 650398 - DNA, 19 bp, Mus musculus
  siRNA target sequence for Ap1g2 (NM_007455.1,789-807).
ggacggaaccatgaagaaa

SEQ ID NO: 650399 - DNA, 19 bp, Mus musculus
  siRNA target sequence for Ap1g2 (NM_007455.1,792-810).
cggaaccatgaagaaagta

SEQ ID NO: 650400 - DNA, 19 bp, Mus musculus
  siRNA target sequence for Ap1g2 (NM_007455.1,880-898).
ctgtcctgttggaaacagt

SEQ ID NO: 650401 - DNA, 19 bp, Mus musculus
  siRNA target sequence for Ap1g2 (NM_007455.1,1261-1279).
gcaagcgatggcacataga

SEQ ID NO: 650402 - DNA, 19 bp, Mus musculus
  siRNA target sequence for Ap1g2 (NM_007455.1,1627-1645).
gactccggggagacaacaa

SEQ ID NO: 650403 - DNA, 19 bp, Mus musculus
  siRNA target sequence for Ap1g2 (NM_007455.1,1632-1650).
cggggagacaacaatcgta

SEQ ID NO: 650404 - DNA, 19 bp, Mus musculus
  siRNA target sequence for Ap1g2 (NM_007455.1,1633-1651).
ggggagacaacaatcgtat

SEQ ID NO: 650405 - DNA, 19 bp, Mus musculus
  siRNA target sequence for Ap1g2 (NM_007455.1,1704-1722).
cgggctgtggagtataaca

SEQ ID NO: 650406 - DNA, 19 bp, Mus musculus
  siRNA target sequence for Ap1g2 (NM_007455.1,1789-1807).
gtgacccccacgttaaaga

SEQ ID NO: 650407 - DNA, 19 bp, Mus musculus
  siRNA target sequence for Ap1g2 (NM_007455.1,1879-1897).
ccaccaaactcttagatct

SEQ ID NO: 650408 - DNA, 19 bp, Mus musculus
  siRNA target sequence for Ap1g2 (NM_007455.1,1882-1900).
ccaaactcttagatctact

SEQ ID NO: 650409 - DNA, 19 bp, Mus musculus
  siRNA target sequence for Ap1g2 (NM_007455.1,1978-1996).
gggaagccttaattcatct

SEQ ID NO: 650410 - DNA, 19 bp, Mus musculus
  siRNA target sequence for Ap1m1 (NM_007456.1,224-242).
cccatggtggcgttcgttt

SEQ ID NO: 650411 - DNA, 19 bp, Mus musculus
  siRNA target sequence for Ap1m1 (NM_007456.1,229-247).
ggtggcgttcgtttcatgt

SEQ ID NO: 650412 - DNA, 19 bp, Mus musculus
  siRNA target sequence for Ap1m1 (NM_007456.1,239-257).
gtttcatgtggattaagca

SEQ ID NO: 650413 - DNA, 19 bp, Mus musculus
  siRNA target sequence for Ap1m1 (NM_007456.1,270-288).
cctggtcgccacttcaaaa

SEQ ID NO: 650414 - DNA, 19 bp, Mus musculus
  siRNA target sequence for Ap1m1 (NM_007456.1,271-289).
ctggtcgccacttcaaaaa

SEQ ID NO: 650415 - DNA, 19 bp, Mus musculus
  siRNA target sequence for Ap1m1 (NM_007456.1,274-292).
gtcgccacttcaaaaaaga

SEQ ID NO: 650416 - DNA, 19 bp, Mus musculus
  siRNA target sequence for Ap1m1 (NM_007456.1,550-568).
cgttcagaaggcatcaagt

SEQ ID NO: 650417 - DNA, 19 bp, Mus musculus
  siRNA target sequence for Ap1m1 (NM_007456.1,561-579).
catcaagtatcggaagaat

SEQ ID NO: 650418 - DNA, 19 bp, Mus musculus
  siRNA target sequence for Ap1m1 (NM_007456.1,814-832).
gagaacgaccgcactatct

SEQ ID NO: 650419 - DNA, 19 bp, Mus musculus
  siRNA target sequence for Ap1m1 (NM_007456.1,895-913).
cctttgatctggattgagt

SEQ ID NO: 650420 - DNA, 19 bp, Mus musculus
  siRNA target sequence for Ap1m1 (NM_007456.1,905-923).
ggattgagtccgtgattga

SEQ ID NO: 650421 - DNA, 19 bp, Mus musculus
  siRNA target sequence for Ap1m1 (NM_007456.1,932-950).
cccacagccgcattgagta

SEQ ID NO: 650422 - DNA, 19 bp, Mus musculus
  siRNA target sequence for Ap1m1 (NM_007456.1,981-999).
gcggtcaacagccaacaat

SEQ ID NO: 650423 - DNA, 19 bp, Mus musculus
  siRNA target sequence for Ap1m1 (NM_007456.1,983-1001).
ggtcaacagccaacaatgt

SEQ ID NO: 650424 - DNA, 19 bp, Mus musculus
  siRNA target sequence for Ap1m1 (NM_007456.1,984-1002).
gtcaacagccaacaatgta

SEQ ID NO: 650425 - DNA, 19 bp, Mus musculus
  siRNA target sequence for Ap1m1 (NM_007456.1,1020-1038).
ccccaacgatgctgattca

SEQ ID NO: 650426 - DNA, 19 bp, Mus musculus
  siRNA target sequence for Ap1m1 (NM_007456.1,1031-1049).
ctgattcacccaagttcaa

SEQ ID NO: 650427 - DNA, 19 bp, Mus musculus
  siRNA target sequence for Ap1m1 (NM_007456.1,1033-1051).
gattcacccaagttcaaga

SEQ ID NO: 650428 - DNA, 19 bp, Mus musculus
  siRNA target sequence for Ap1m1 (NM_007456.1,1246-1264).
gtgcgctacctgaaaatca

SEQ ID NO: 650429 - DNA, 19 bp, Mus musculus
  siRNA target sequence for Ap1m1 (NM_007456.1,1248-1266).
gcgctacctgaaaatcatt

SEQ ID NO: 650430 - DNA, 19 bp, Mus musculus
  siRNA target sequence for Ap1m1 (NM_007456.1,1287-1305).
cctgccctgggtacgatat

SEQ ID NO: 650431 - DNA, 19 bp, Mus musculus
  siRNA target sequence for Ap1m1 (NM_007456.1,1288-1306).
ctgccctgggtacgatata

SEQ ID NO: 650432 - DNA, 19 bp, Mus musculus
  siRNA target sequence for Ap1m1 (NM_007456.1,1291-1309).
ccctgggtacgatatatca

SEQ ID NO: 650433 - DNA, 19 bp, Mus musculus
  siRNA target sequence for Ap1m2 (NM_009678.1,64-82).
cggcctcggcagtcttcat

SEQ ID NO: 650434 - DNA, 19 bp, Mus musculus
  siRNA target sequence for Ap1m2 (NM_009678.1,103-121).
ctctgattagccgaaacta

SEQ ID NO: 650435 - DNA, 19 bp, Mus musculus
  siRNA target sequence for Ap1m2 (NM_009678.1,105-123).
ctgattagccgaaactaca

SEQ ID NO: 650436 - DNA, 19 bp, Mus musculus
  siRNA target sequence for Ap1m2 (NM_009678.1,107-125).
gattagccgaaactacaaa

SEQ ID NO: 650437 - DNA, 19 bp, Mus musculus
  siRNA target sequence for Ap1m2 (NM_009678.1,142-160).
cagagattgaccacttcat

SEQ ID NO: 650438 - DNA, 19 bp, Mus musculus
  siRNA target sequence for Ap1m2 (NM_009678.1,482-500).
gctggagactggcaaatct

SEQ ID NO: 650439 - DNA, 19 bp, Mus musculus
  siRNA target sequence for Ap1m2 (NM_009678.1,535-553).
ggcgctctgagggcattaa

SEQ ID NO: 650440 - DNA, 19 bp, Mus musculus
  siRNA target sequence for Ap1m2 (NM_009678.1,541-559).
ctgagggcattaagtacaa

SEQ ID NO: 650441 - DNA, 19 bp, Mus musculus
  siRNA target sequence for Ap1m2 (NM_009678.1,543-561).
gagggcattaagtacaaaa

SEQ ID NO: 650442 - DNA, 19 bp, Mus musculus
  siRNA target sequence for Ap1m2 (NM_009678.1,599-617).
ccttctggtcaatgctaat

SEQ ID NO: 650443 - DNA, 19 bp, Mus musculus
  siRNA target sequence for Ap1m2 (NM_009678.1,729-747).
ggccgcagcaagaacaagt

SEQ ID NO: 650444 - DNA, 19 bp, Mus musculus
  siRNA target sequence for Ap1m2 (NM_009678.1,809-827).
ccgaaccatctccttcata

SEQ ID NO: 650445 - DNA, 19 bp, Mus musculus
  siRNA target sequence for Ap1m2 (NM_009678.1,890-908).
ctggatcgagtcagtcatt

SEQ ID NO: 650446 - DNA, 19 bp, Mus musculus
  siRNA target sequence for Ap1m2 (NM_009678.1,892-910).
ggatcgagtcagtcattga

SEQ ID NO: 650447 - DNA, 19 bp, Mus musculus
  siRNA target sequence for Ap1m2 (NM_009678.1,896-914).
cgagtcagtcattgagaaa

SEQ ID NO: 650448 - DNA, 19 bp, Mus musculus
  siRNA target sequence for Ap1m2 (NM_009678.1,944-962).
gaaggccaagggtcagttt

SEQ ID NO: 650449 - DNA, 19 bp, Mus musculus
  siRNA target sequence for Ap1m2 (NM_009678.1,978-996).
gccaatggcgtggaaatct

SEQ ID NO: 650450 - DNA, 19 bp, Mus musculus
  siRNA target sequence for Ap1m2 (NM_009678.1,1020-1038).
gactctccgcgcttcaaga

SEQ ID NO: 650451 - DNA, 19 bp, Mus musculus
  siRNA target sequence for Ap1m2 (NM_009678.1,1080-1098).
gtcatctggagcatcaagt

SEQ ID NO: 650452 - DNA, 19 bp, Mus musculus
  siRNA target sequence for Ap1m2 (NM_009678.1,1105-1123).
ctgggggaaaggagtactt

SEQ ID NO: 650453 - DNA, 19 bp, Mus musculus
  siRNA target sequence for Ap1m2 (NM_009678.1,1108-1126).
ggggaaaggagtacttgat

SEQ ID NO: 650454 - DNA, 19 bp, Mus musculus
  siRNA target sequence for Ap1m2 (NM_009678.1,1180-1198).
cacccatcggggtcaagtt

SEQ ID NO: 650455 - DNA, 19 bp, Mus musculus
  siRNA target sequence for Ap1m2 (NM_009678.1,1187-1205).
cggggtcaagtttgagatt

SEQ ID NO: 650456 - DNA, 19 bp, Mus musculus
  siRNA target sequence for Ap1m2 (NM_009678.1,1225-1243).
gcatccaggtccgttacat

SEQ ID NO: 650457 - DNA, 19 bp, Mus musculus
  siRNA target sequence for Ap1m2 (NM_009678.1,1295-1313).
cacgcagagtggtgattat

SEQ ID NO: 650458 - DNA, 19 bp, Mus musculus
  siRNA target sequence for Ap1m2 (NM_009678.1,1297-1315).
cgcagagtggtgattatca

SEQ ID NO: 650459 - DNA, 19 bp, Mus musculus
  siRNA target sequence for Ap1m2 (NM_009678.1,1298-1316).
gcagagtggtgattatcaa

SEQ ID NO: 650460 - DNA, 19 bp, Mus musculus
  siRNA target sequence for Ap1m2 (NM_009678.1,1301-1319).
gagtggtgattatcaactt

SEQ ID NO: 650461 - DNA, 19 bp, Mus musculus
  siRNA target sequence for Ap1s1 (NM_007457.1,203-221).
gtggagggacctcaaagtt

SEQ ID NO: 650462 - DNA, 19 bp, Mus musculus
  siRNA target sequence for Ap1s1 (NM_007457.1,208-226).
gggacctcaaagttgtcta

SEQ ID NO: 650463 - DNA, 19 bp, Mus musculus
  siRNA target sequence for Ap1s1 (NM_007457.1,209-227).
ggacctcaaagttgtctat

SEQ ID NO: 650464 - DNA, 19 bp, Mus musculus
  siRNA target sequence for Ap1s1 (NM_007457.1,210-228).
gacctcaaagttgtctata

SEQ ID NO: 650465 - DNA, 19 bp, Mus musculus
  siRNA target sequence for Ap1s1 (NM_007457.1,215-233).
caaagttgtctataagaga

SEQ ID NO: 650466 - DNA, 19 bp, Mus musculus
  siRNA target sequence for Ap1s1 (NM_007457.1,230-248).
gagatacgccagtctctat

SEQ ID NO: 650467 - DNA, 19 bp, Mus musculus
  siRNA target sequence for Ap1s1 (NM_007457.1,296-314).
gctgatccaccgatacgta

SEQ ID NO: 650468 - DNA, 19 bp, Mus musculus
  siRNA target sequence for Ap1s2 (NM_026887.2,204-222).
cacaagagaacttgttcaa

SEQ ID NO: 650469 - DNA, 19 bp, Mus musculus
  siRNA target sequence for Ap1s2 (NM_026887.2,232-250).
gcacggaaacccaagatgt

SEQ ID NO: 650470 - DNA, 19 bp, Mus musculus
  siRNA target sequence for Ap1s2 (NM_026887.2,343-361).
ctgattaccctggaaataa

SEQ ID NO: 650471 - DNA, 19 bp, Mus musculus
  siRNA target sequence for Ap1s2 (NM_026887.2,363-381).
ccatcgttacgtggaatta

SEQ ID NO: 650472 - DNA, 19 bp, Mus musculus
  siRNA target sequence for Ap1s2 (NM_026887.2,375-393).
ggaattacttgacaagtat

SEQ ID NO: 650473 - DNA, 19 bp, Mus musculus
  siRNA target sequence for Ap1s2 (NM_026887.2,398-416).
gcagtgtatgtgaacttga

SEQ ID NO: 650474 - DNA, 19 bp, Mus musculus
  siRNA target sequence for Ap1s2 (NM_026887.2,399-417).
cagtgtatgtgaacttgat

SEQ ID NO: 650475 - DNA, 19 bp, Mus musculus
  siRNA target sequence for Ap1s2 (NM_026887.2,403-421).
gtatgtgaacttgatatca

SEQ ID NO: 650476 - DNA, 19 bp, Mus musculus
  siRNA target sequence for Ap1s2 (NM_026887.2,407-425).
gtgaacttgatatcatctt

SEQ ID NO: 650477 - DNA, 19 bp, Mus musculus
  siRNA target sequence for Ap1s2 (NM_026887.2,438-456).
ggcctattttattttggat

SEQ ID NO: 650478 - DNA, 19 bp, Mus musculus
  siRNA target sequence for Ap2a1 (NM_007458.1,237-255).
gtgggctcgccgtgttcat

SEQ ID NO: 650479 - DNA, 19 bp, Mus musculus
  siRNA target sequence for Ap2a1 (NM_007458.1,350-368).
gccttggatggctacagta

SEQ ID NO: 650480 - DNA, 19 bp, Mus musculus
  siRNA target sequence for Ap2a1 (NM_007458.1,351-369).
ccttggatggctacagtaa

SEQ ID NO: 650481 - DNA, 19 bp, Mus musculus
  siRNA target sequence for Ap2a1 (NM_007458.1,452-470).
ctaagctctaacaagtaca

SEQ ID NO: 650482 - DNA, 19 bp, Mus musculus
  siRNA target sequence for Ap2a1 (NM_007458.1,717-735).
gcctactgcgactctacaa

SEQ ID NO: 650483 - DNA, 19 bp, Mus musculus
  siRNA target sequence for Ap2a1 (NM_007458.1,932-950).
gacctccaggactacactt

SEQ ID NO: 650484 - DNA, 19 bp, Mus musculus
  siRNA target sequence for Ap2a1 (NM_007458.1,935-953).
ctccaggactacacttact

SEQ ID NO: 650485 - DNA, 19 bp, Mus musculus
  siRNA target sequence for Ap2a1 (NM_007458.1,1312-1330).
cattgatacagttattaat

SEQ ID NO: 650486 - DNA, 19 bp, Mus musculus
  siRNA target sequence for Ap2a1 (NM_007458.1,1991-2009).
gctacggtgctagaagaaa

SEQ ID NO: 650487 - DNA, 19 bp, Mus musculus
  siRNA target sequence for Ap2a1 (NM_007458.1,2076-2094).
cagccagtgccctagatga

SEQ ID NO: 650488 - DNA, 19 bp, Mus musculus
  siRNA target sequence for Ap2a1 (NM_007458.1,2424-2442).
cagatgaactgttgaataa

SEQ ID NO: 650489 - DNA, 19 bp, Mus musculus
  siRNA target sequence for Ap2a1 (NM_007458.1,2426-2444).
gatgaactgttgaataagt

SEQ ID NO: 650490 - DNA, 19 bp, Mus musculus
  siRNA target sequence for Ap2a1 (NM_007458.1,2443-2461).
gttcgtgtgtaagaatagt

SEQ ID NO: 650491 - DNA, 19 bp, Mus musculus
  siRNA target sequence for Ap2a1 (NM_007458.1,2527-2545).
ccgcatgtatctcttctat

SEQ ID NO: 650492 - DNA, 19 bp, Mus musculus
  siRNA target sequence for Ap2a1 (NM_007458.1,2664-2682).
cacaggtgcagcaagtact

SEQ ID NO: 650493 - DNA, 19 bp, Mus musculus
  siRNA target sequence for Ap2a1 (NM_007458.1,2778-2796).
cagtgaccatcaacaaatt

SEQ ID NO: 650494 - DNA, 19 bp, Mus musculus
  siRNA target sequence for Ap2a1 (NM_007458.1,2896-2914).
cccgatggatgctgaagtt

SEQ ID NO: 650495 - DNA, 19 bp, Mus musculus
  siRNA target sequence for Ap2a1 (NM_007458.1,2897-2915).
ccgatggatgctgaagtta

SEQ ID NO: 650496 - DNA, 19 bp, Mus musculus
  siRNA target sequence for Ap3m1 (NM_018829.2,1025-1043).
ccaacgcaaggcagctata

SEQ ID NO: 650497 - DNA, 19 bp, Mus musculus
  siRNA target sequence for Ap3m1 (NM_018829.2,1029-1047).
cgcaaggcagctatacatt

SEQ ID NO: 650498 - DNA, 19 bp, Mus musculus
  siRNA target sequence for Ap3m1 (NM_018829.2,1110-1128).
gtcttaaaggactagtaaa

SEQ ID NO: 650499 - DNA, 19 bp, Mus musculus
  siRNA target sequence for Ap3m1 (NM_018829.2,1118-1136).
ggactagtaaatttacagt

SEQ ID NO: 650500 - DNA, 19 bp, Mus musculus
  siRNA target sequence for Ap3m1 (NM_018829.2,1159-1177).
gaacccaaacctcaacata

SEQ ID NO: 650501 - DNA, 19 bp, Mus musculus
  siRNA target sequence for Ap3m1 (NM_018829.2,1163-1181).
ccaaacctcaacatacagt

SEQ ID NO: 650502 - DNA, 19 bp, Mus musculus
  siRNA target sequence for Ap3m1 (NM_018829.2,1169-1187).
ctcaacatacagttcaaga

SEQ ID NO: 650503 - DNA, 19 bp, Mus musculus
  siRNA target sequence for Ap3m1 (NM_018829.2,1231-1249).
catgtatggtgagaagtat

SEQ ID NO: 650504 - DNA, 19 bp, Mus musculus
  siRNA target sequence for Ap3m1 (NM_018829.2,1246-1264).
gtataagccatttaaagga

SEQ ID NO: 650505 - DNA, 19 bp, Mus musculus
  siRNA target sequence for Ap3m1 (NM_018829.2,1252-1270).
gccatttaaaggagtcaaa

SEQ ID NO: 650506 - DNA, 19 bp, Mus musculus
  siRNA target sequence for Ap3m1 (NM_018829.2,1254-1272).
catttaaaggagtcaaata

SEQ ID NO: 650507 - DNA, 19 bp, Mus musculus
  siRNA target sequence for Ap3s2 (NM_009682.2,34-52).
gcgattctggttttcaaca

SEQ ID NO: 650508 - DNA, 19 bp, Mus musculus
  siRNA target sequence for Ap3s2 (NM_009682.2,156-174).
caacatctgtaacttctta

SEQ ID NO: 650509 - DNA, 19 bp, Mus musculus
  siRNA target sequence for Ap3s2 (NM_009682.2,285-303).
ggacctcatccaggttttt

SEQ ID NO: 650510 - DNA, 19 bp, Mus musculus
  siRNA target sequence for Ap3s2 (NM_009682.2,307-325).
gagacactggataagtgtt

SEQ ID NO: 650511 - DNA, 19 bp, Mus musculus
  siRNA target sequence for Ap3s2 (NM_009682.2,309-327).
gacactggataagtgtttt

SEQ ID NO: 650512 - DNA, 19 bp, Mus musculus
  siRNA target sequence for Ap3s2 (NM_009682.2,313-331).
ctggataagtgttttgaga

SEQ ID NO: 650513 - DNA, 19 bp, Mus musculus
  siRNA target sequence for Ap3s2 (NM_009682.2,508-526).
gtgtccgctgtgaagaaca

SEQ ID NO: 650514 - DNA, 19 bp, Mus musculus
  siRNA target sequence for Ap3s2 (NM_009682.2,512-530).
ccgctgtgaagaacatcaa

SEQ ID NO: 650515 - DNA, 19 bp, Mus musculus
  siRNA target sequence for Ap3s2 (NM_009682.2,584-602).
ccaacctgtcccagtttgt

SEQ ID NO: 650516 - DNA, 19 bp, Mus musculus
  siRNA target sequence for Apba2 (NM_007461.1,547-565).
ccagctctgactatgtgaa

SEQ ID NO: 650517 - DNA, 19 bp, Mus musculus
  siRNA target sequence for Apba2 (NM_007461.1,550-568).
gctctgactatgtgaacaa

SEQ ID NO: 650518 - DNA, 19 bp, Mus musculus
  siRNA target sequence for Apba2 (NM_007461.1,615-633).
gagggtgtcacctactaca

SEQ ID NO: 650519 - DNA, 19 bp, Mus musculus
  siRNA target sequence for Apba2 (NM_007461.1,765-783).
gtgggccctcatactcata

SEQ ID NO: 650520 - DNA, 19 bp, Mus musculus
  siRNA target sequence for Apba2 (NM_007461.1,903-921).
gagagctaccaggactatt

SEQ ID NO: 650521 - DNA, 19 bp, Mus musculus
  siRNA target sequence for Apba2 (NM_007461.1,1334-1352).
caatgggcccactgacaat

SEQ ID NO: 650522 - DNA, 19 bp, Mus musculus
  siRNA target sequence for Apba2 (NM_007461.1,1339-1357).
ggcccactgacaataacaa

SEQ ID NO: 650523 - DNA, 19 bp, Mus musculus
  siRNA target sequence for Apba2 (NM_007461.1,1488-1506).
gagcgcaacccctccaaaa

SEQ ID NO: 650524 - DNA, 19 bp, Mus musculus
  siRNA target sequence for Apba2 (NM_007461.1,1501-1519).
ccaaaaacatccgaatgat

SEQ ID NO: 650525 - DNA, 19 bp, Mus musculus
  siRNA target sequence for Apba2 (NM_007461.1,1563-1581).
gctgctaagatcaagaaaa

SEQ ID NO: 650526 - DNA, 19 bp, Mus musculus
  siRNA target sequence for Apba2 (NM_007461.1,1617-1635).
gaagtagacctcttcattt

SEQ ID NO: 650527 - DNA, 19 bp, Mus musculus
  siRNA target sequence for Apba2 (NM_007461.1,1620-1638).
gtagacctcttcatttcga

SEQ ID NO: 650528 - DNA, 19 bp, Mus musculus
  siRNA target sequence for Apba2 (NM_007461.1,1641-1659).
cagaggatcaaggtcttaa

SEQ ID NO: 650529 - DNA, 19 bp, Mus musculus
  siRNA target sequence for Apba2 (NM_007461.1,1958-1976).
ggaatatagcgacatcata

SEQ ID NO: 650530 - DNA, 19 bp, Mus musculus
  siRNA target sequence for Apba2 (NM_007461.1,1959-1977).
gaatatagcgacatcataa

SEQ ID NO: 650531 - DNA, 19 bp, Mus musculus
  siRNA target sequence for Apba2 (NM_007461.1,2006-2024).
catccacttctcaaactca

SEQ ID NO: 650532 - DNA, 19 bp, Mus musculus
  siRNA target sequence for Apba2 (NM_007461.1,2233-2251).
cgtgccagggcatcatcaa

SEQ ID NO: 650533 - DNA, 19 bp, Mus musculus
  siRNA target sequence for Apba2 (NM_007461.1,2384-2402).
catgagagggggtattgca

SEQ ID NO: 650534 - DNA, 19 bp, Mus musculus
  siRNA target sequence for Apba2 (NM_007461.1,2565-2583).
gagaccccgctgtacatct

SEQ ID NO: 650535 - DNA, 19 bp, Mus musculus
  siRNA target sequence for Apba3 (NM_018758.1,1002-1020).
gaagtggacatctttatct

SEQ ID NO: 650536 - DNA, 19 bp, Mus musculus
  siRNA target sequence for Apba3 (NM_018758.1,1019-1037).
ctccaccaagcgtgtcaaa

SEQ ID NO: 650537 - DNA, 19 bp, Mus musculus
  siRNA target sequence for Apba3 (NM_018758.1,1021-1039).
ccaccaagcgtgtcaaagt

SEQ ID NO: 650538 - DNA, 19 bp, Mus musculus
  siRNA target sequence for Apba3 (NM_018758.1,1024-1042).
ccaagcgtgtcaaagtgtt

SEQ ID NO: 650539 - DNA, 19 bp, Mus musculus
  siRNA target sequence for Apba3 (NM_018758.1,1111-1129).
ggcctgtactggtcttgat

SEQ ID NO: 650540 - DNA, 19 bp, Mus musculus
  siRNA target sequence for Apba3 (NM_018758.1,1171-1189).
gccagcggcgactctacaa

SEQ ID NO: 650541 - DNA, 19 bp, Mus musculus
  siRNA target sequence for Apba3 (NM_018758.1,1173-1191).
cagcggcgactctacaaga

SEQ ID NO: 650542 - DNA, 19 bp, Mus musculus
  siRNA target sequence for Apba3 (NM_018758.1,1424-1442).
gggcgtcgcgctagttgaa

SEQ ID NO: 650543 - DNA, 19 bp, Mus musculus
  siRNA target sequence for Apba3 (NM_018758.1,1425-1443).
ggcgtcgcgctagttgaat

SEQ ID NO: 650544 - DNA, 19 bp, Mus musculus
  siRNA target sequence for Apba3 (NM_018758.1,1427-1445).
cgtcgcgctagttgaatca

SEQ ID NO: 650545 - DNA, 19 bp, Mus musculus
  siRNA target sequence for Apba3 (NM_018758.1,1604-1622).
cgaggtgcggcgactttca

SEQ ID NO: 650546 - DNA, 19 bp, Mus musculus
  siRNA target sequence for Apba3 (NM_018758.1,1605-1623).
gaggtgcggcgactttcat

SEQ ID NO: 650547 - DNA, 19 bp, Mus musculus
  siRNA target sequence for Apba3 (NM_018758.1,1621-1639).
catccgtgacgctgagtat

SEQ ID NO: 650548 - DNA, 19 bp, Mus musculus
  siRNA target sequence for Apba3 (NM_018758.1,1624-1642).
ccgtgacgctgagtattat

SEQ ID NO: 650549 - DNA, 19 bp, Mus musculus
  siRNA target sequence for Apba3 (NM_018758.1,1713-1731).
gaggatggaatcatttgta

SEQ ID NO: 650550 - DNA, 19 bp, Mus musculus
  siRNA target sequence for Apba3 (NM_018758.1,1772-1790).
cgttggacaccgcatcatt

SEQ ID NO: 650551 - DNA, 19 bp, Mus musculus
  siRNA target sequence for Apba3 (NM_018758.1,1913-1931).
ggaacaaccagtataccta

SEQ ID NO: 650552 - DNA, 19 bp, Mus musculus
  siRNA target sequence for Apba3 (NM_018758.1,1914-1932).
gaacaaccagtatacctat

SEQ ID NO: 650553 - DNA, 19 bp, Mus musculus
  siRNA target sequence for Bcap29 (NM_007530.2,274-292).
cggttgccagctttcttta

SEQ ID NO: 650554 - DNA, 19 bp, Mus musculus
  siRNA target sequence for Bcap29 (NM_007530.2,284-302).
ctttctttatgctgaaata

SEQ ID NO: 650555 - DNA, 19 bp, Mus musculus
  siRNA target sequence for Bcap29 (NM_007530.2,294-312).
gctgaaataggactcattt

SEQ ID NO: 650556 - DNA, 19 bp, Mus musculus
  siRNA target sequence for Bcap29 (NM_007530.2,411-429).
cttaccattataatactat

SEQ ID NO: 650557 - DNA, 19 bp, Mus musculus
  siRNA target sequence for Bcap29 (NM_007530.2,415-433).
ccattataatactattgat

SEQ ID NO: 650558 - DNA, 19 bp, Mus musculus
  siRNA target sequence for Bcap29 (NM_007530.2,447-465).
gatgccgtgagagaagtaa

SEQ ID NO: 650559 - DNA, 19 bp, Mus musculus
  siRNA target sequence for Bcap29 (NM_007530.2,450-468).
gccgtgagagaagtaagaa

SEQ ID NO: 650560 - DNA, 19 bp, Mus musculus
  siRNA target sequence for Bcap29 (NM_007530.2,459-477).
gaagtaagaaagtattcgt

SEQ ID NO: 650561 - DNA, 19 bp, Mus musculus
  siRNA target sequence for Bcap29 (NM_007530.2,475-493).
cgtccacgaatgttgtaga

SEQ ID NO: 650562 - DNA, 19 bp, Mus musculus
  siRNA target sequence for Bcap29 (NM_007530.2,478-496).
ccacgaatgttgtagagaa

SEQ ID NO: 650563 - DNA, 19 bp, Mus musculus
  siRNA target sequence for Bcap29 (NM_007530.2,609-627).
cgtctggttacgcttatta

SEQ ID NO: 650564 - DNA, 19 bp, Mus musculus
  siRNA target sequence for Bcap29 (NM_007530.2,649-667).
caaacaaaggagtgcttaa

SEQ ID NO: 650565 - DNA, 19 bp, Mus musculus
  siRNA target sequence for Bcap29 (NM_007530.2,754-772).
ctgaagaacaccttttgga

SEQ ID NO: 650566 - DNA, 19 bp, Mus musculus
  siRNA target sequence for Bcap29 (NM_007530.2,831-849).
gcttccgatgcccttttga

SEQ ID NO: 650567 - DNA, 19 bp, Mus musculus
  siRNA target sequence for Bcap29 (NM_007530.2,832-850).
cttccgatgcccttttgaa

SEQ ID NO: 650568 - DNA, 19 bp, Mus musculus
  siRNA target sequence for Bcap29 (NM_007530.2,855-873).
caaaatgatgtcatgacta

SEQ ID NO: 650569 - DNA, 19 bp, Mus musculus
  siRNA target sequence for Bcap29 (NM_007530.2,888-906).
gagagactttctaaagagt

SEQ ID NO: 650570 - DNA, 19 bp, Mus musculus
  siRNA target sequence for Bcap29 (NM_007530.2,936-954).
cttcagaaccgtttagaga

SEQ ID NO: 650571 - DNA, 19 bp, Mus musculus
  siRNA target sequence for Bcap31 (NM_012060.2,236-254).
gtgacctatggcaacactt

SEQ ID NO: 650572 - DNA, 19 bp, Mus musculus
  siRNA target sequence for Bcap31 (NM_012060.2,240-258).
cctatggcaacactttctt

SEQ ID NO: 650573 - DNA, 19 bp, Mus musculus
  siRNA target sequence for Bcap31 (NM_012060.2,302-320).
gtacgagagatcctgaaat

SEQ ID NO: 650574 - DNA, 19 bp, Mus musculus
  siRNA target sequence for Bcap31 (NM_012060.2,306-324).
gagagatcctgaaatacga

SEQ ID NO: 650575 - DNA, 19 bp, Mus musculus
  siRNA target sequence for Bcap31 (NM_012060.2,340-358).
ggtgaacctccagaacaat

SEQ ID NO: 650576 - DNA, 19 bp, Mus musculus
  siRNA target sequence for Bcap31 (NM_012060.2,374-392).
cacttccacatgaagcttt

SEQ ID NO: 650577 - DNA, 19 bp, Mus musculus
  siRNA target sequence for Bcap31 (NM_012060.2,403-421).
gaggaatctctatattgct

SEQ ID NO: 650578 - DNA, 19 bp, Mus musculus
  siRNA target sequence for Bcap31 (NM_012060.2,588-606).
ccgaggatggagacaagtt

SEQ ID NO: 650579 - DNA, 19 bp, Mus musculus
  siRNA target sequence for Bcap31 (NM_012060.2,604-622).
gttggatattgggaatact

SEQ ID NO: 650580 - DNA, 19 bp, Mus musculus
  siRNA target sequence for Bcap31 (NM_012060.2,615-633).
ggaatactgaaatgaagtt

SEQ ID NO: 650581 - DNA, 19 bp, Mus musculus
  siRNA target sequence for Bcap31 (NM_012060.2,661-679).
cctgaggaagctaaaagat

SEQ ID NO: 650582 - DNA, 19 bp, Mus musculus
  siRNA target sequence for Bcap31 (NM_012060.2,745-763).
gtctgagggccttaccaaa

SEQ ID NO: 650583 - DNA, 19 bp, Mus musculus
  siRNA target sequence for Bcap31 (NM_012060.2,751-769).
gggccttaccaaagaatat

SEQ ID NO: 650584 - DNA, 19 bp, Mus musculus
  siRNA target sequence for Bet1 (NM_009748.2,189-207).
ctatgccaatactggttat

SEQ ID NO: 650585 - DNA, 19 bp, Mus musculus
  siRNA target sequence for Bet1 (NM_009748.2,195-213).
caatactggttataatgct

SEQ ID NO: 650586 - DNA, 19 bp, Mus musculus
  siRNA target sequence for Bet1 (NM_009748.2,254-272).
gcaaagtaacggctataaa

SEQ ID NO: 650587 - DNA, 19 bp, Mus musculus
  siRNA target sequence for Bet1 (NM_009748.2,255-273).
caaagtaacggctataaaa

SEQ ID NO: 650588 - DNA, 19 bp, Mus musculus
  siRNA target sequence for Bet1 (NM_009748.2,334-352).
gattcacaatttgattcta

SEQ ID NO: 650589 - DNA, 19 bp, Mus musculus
  siRNA target sequence for Bet1 (NM_009748.2,358-376).
ggatttctaggtaaaacca

SEQ ID NO: 650590 - DNA, 19 bp, Mus musculus
  siRNA target sequence for Bet1 (NM_009748.2,404-422).
ggagccaaacaaaattgct

SEQ ID NO: 650591 - DNA, 19 bp, Mus musculus
  siRNA target sequence for Bet1 (NM_009748.2,405-423).
gagccaaacaaaattgcta

SEQ ID NO: 650592 - DNA, 19 bp, Mus musculus
  siRNA target sequence for Bet1 (NM_009748.2,413-431).
caaaattgctatgctatat

SEQ ID NO: 650593 - DNA, 19 bp, Mus musculus
  siRNA target sequence for Bet1 (NM_009748.2,426-444).
ctatatgatgctgttttca

SEQ ID NO: 650594 - DNA, 19 bp, Mus musculus
  siRNA target sequence for Bet1 (NM_009748.2,460-478).
gtcatttattggattatta

SEQ ID NO: 650595 - DNA, 19 bp, Mus musculus
  siRNA target sequence for C230081A13Rik (NM_172924.1,449-467).
cttgtaacacctttactga

SEQ ID NO: 650596 - DNA, 19 bp, Mus musculus
  siRNA target sequence for C230081A13Rik (NM_172924.1,476-494).
ggaaacctggcgaatgcaa

SEQ ID NO: 650597 - DNA, 19 bp, Mus musculus
  siRNA target sequence for C230081A13Rik (NM_172924.1,484-502).
ggcgaatgcaagaattgct

SEQ ID NO: 650598 - DNA, 19 bp, Mus musculus
  siRNA target sequence for C230081A13Rik (NM_172924.1,486-504).
cgaatgcaagaattgcttt

SEQ ID NO: 650599 - DNA, 19 bp, Mus musculus
  siRNA target sequence for C230081A13Rik (NM_172924.1,559-577).
cacggcagtgggaaaacta

SEQ ID NO: 650600 - DNA, 19 bp, Mus musculus
  siRNA target sequence for C230081A13Rik (NM_172924.1,561-579).
cggcagtgggaaaactaat

SEQ ID NO: 650601 - DNA, 19 bp, Mus musculus
  siRNA target sequence for C230081A13Rik (NM_172924.1,776-794).
gccagaaaccacttaacaa

SEQ ID NO: 650602 - DNA, 19 bp, Mus musculus
  siRNA target sequence for C230081A13Rik (NM_172924.1,778-796).
cagaaaccacttaacaaca

SEQ ID NO: 650603 - DNA, 19 bp, Mus musculus
  siRNA target sequence for C230081A13Rik (NM_172924.1,780-798).
gaaaccacttaacaacaat

SEQ ID NO: 650604 - DNA, 19 bp, Mus musculus
  siRNA target sequence for C230081A13Rik (NM_172924.1,785-803).
cacttaacaacaattctga

SEQ ID NO: 650605 - DNA, 19 bp, Mus musculus
  siRNA target sequence for C230081A13Rik (NM_172924.1,857-875).
gtgcacagaagatatccaa

SEQ ID NO: 650606 - DNA, 19 bp, Mus musculus
  siRNA target sequence for C230081A13Rik (NM_172924.1,859-877).
gcacagaagatatccaata

SEQ ID NO: 650607 - DNA, 19 bp, Mus musculus
  siRNA target sequence for C230081A13Rik (NM_172924.1,860-878).
cacagaagatatccaataa

SEQ ID NO: 650608 - DNA, 19 bp, Mus musculus
  siRNA target sequence for C230081A13Rik (NM_172924.1,887-905).
ggctaactgaagtgctaaa

SEQ ID NO: 650609 - DNA, 19 bp, Mus musculus
  siRNA target sequence for C230081A13Rik (NM_172924.1,930-948).
ccctccggtcagaggaaat

SEQ ID NO: 650610 - DNA, 19 bp, Mus musculus
  siRNA target sequence for C230081A13Rik (NM_172924.1,1000-1018).
cgatcgttggaaagaaaga

SEQ ID NO: 650611 - DNA, 19 bp, Mus musculus
  siRNA target sequence for C230081A13Rik (NM_172924.1,1001-1019).
gatcgttggaaagaaagat

SEQ ID NO: 650612 - DNA, 19 bp, Mus musculus
  siRNA target sequence for C230081A13Rik (NM_172924.1,1085-1103).
gcgccgaggtcatcagtaa

SEQ ID NO: 650613 - DNA, 19 bp, Mus musculus
  siRNA target sequence for C230081A13Rik (NM_172924.1,1159-1177).
gatgtgcttttcagtaaca

SEQ ID NO: 650614 - DNA, 19 bp, Mus musculus
  siRNA target sequence for C230081A13Rik (NM_172924.1,1246-1264).
gggcagcctcgctttgcta

SEQ ID NO: 650615 - DNA, 19 bp, Mus musculus
  siRNA target sequence for C230081A13Rik (NM_172924.1,1247-1265).
ggcagcctcgctttgctaa

SEQ ID NO: 650616 - DNA, 19 bp, Mus musculus
  siRNA target sequence for C230081A13Rik (NM_172924.1,1252-1270).
cctcgctttgctaacttca

SEQ ID NO: 650617 - DNA, 19 bp, Mus musculus
  siRNA target sequence for C230081A13Rik (NM_172924.1,1288-1306).
cctgttcgattctttgtga

SEQ ID NO: 650618 - DNA, 19 bp, Mus musculus
  siRNA target sequence for C230081A13Rik (NM_172924.1,1294-1312).
cgattctttgtgagcaaaa

SEQ ID NO: 650619 - DNA, 19 bp, Mus musculus
  siRNA target sequence for C230081A13Rik (NM_172924.1,1305-1323).
gagcaaaaagtggaatact

SEQ ID NO: 650620 - DNA, 19 bp, Mus musculus
  siRNA target sequence for C230081A13Rik (NM_172924.1,1322-1340).
ctatccccttacggaataa

SEQ ID NO: 650621 - DNA, 19 bp, Mus musculus
  siRNA target sequence for C230081A13Rik (NM_172924.1,1326-1344).
ccccttacggaataagtct

SEQ ID NO: 650622 - DNA, 19 bp, Mus musculus
  siRNA target sequence for C230081A13Rik (NM_172924.1,1507-1525).
gaaacagccagcagtttat

SEQ ID NO: 650623 - DNA, 19 bp, Mus musculus
  siRNA target sequence for C230081A13Rik (NM_172924.1,1558-1576).
ggtaacccaggaaattcta

SEQ ID NO: 650624 - DNA, 19 bp, Mus musculus
  siRNA target sequence for C230081A13Rik (NM_172924.1,1559-1577).
gtaacccaggaaattctaa

SEQ ID NO: 650625 - DNA, 19 bp, Mus musculus
  siRNA target sequence for C230081A13Rik (NM_172924.1,1652-1670).
ccaaaagctcggtgaaagt

SEQ ID NO: 650626 - DNA, 19 bp, Mus musculus
  siRNA target sequence for C230081A13Rik (NM_172924.1,1653-1671).
caaaagctcggtgaaagtt

SEQ ID NO: 650627 - DNA, 19 bp, Mus musculus
  siRNA target sequence for C230081A13Rik (NM_172924.1,1720-1738).
ggcaagattgcagtacata

SEQ ID NO: 650628 - DNA, 19 bp, Mus musculus
  siRNA target sequence for C230081A13Rik (NM_172924.1,1722-1740).
caagattgcagtacatact

SEQ ID NO: 650629 - DNA, 19 bp, Mus musculus
  siRNA target sequence for C230081A13Rik (NM_172924.1,1752-1770).
gagcaaagcttctacagat

SEQ ID NO: 650630 - DNA, 19 bp, Mus musculus
  siRNA target sequence for C230081A13Rik (NM_172924.1,1796-1814).
gcctcgtcccagtagaaga

SEQ ID NO: 650631 - DNA, 19 bp, Mus musculus
  siRNA target sequence for C230081A13Rik (NM_172924.1,1797-1815).
cctcgtcccagtagaagaa

SEQ ID NO: 650632 - DNA, 19 bp, Mus musculus
  siRNA target sequence for C230081A13Rik (NM_172924.1,1824-1842).
gccctaccgtgtggtaaat

SEQ ID NO: 650633 - DNA, 19 bp, Mus musculus
  siRNA target sequence for C230081A13Rik (NM_172924.1,1852-1870).
ccgctgtgtaagccatata

SEQ ID NO: 650634 - DNA, 19 bp, Mus musculus
  siRNA target sequence for C230081A13Rik (NM_172924.1,1908-1926).
cctggggcgacccaagata

SEQ ID NO: 650635 - DNA, 19 bp, Mus musculus
  siRNA target sequence for C230081A13Rik (NM_172924.1,1909-1927).
ctggggcgacccaagataa

SEQ ID NO: 650636 - DNA, 19 bp, Mus musculus
  siRNA target sequence for C230081A13Rik (NM_172924.1,1914-1932).
gcgacccaagataaaaggt

SEQ ID NO: 650637 - DNA, 19 bp, Mus musculus
  siRNA target sequence for C230081A13Rik (NM_172924.1,1915-1933).
cgacccaagataaaaggtt

SEQ ID NO: 650638 - DNA, 19 bp, Mus musculus
  siRNA target sequence for C230081A13Rik (NM_172924.1,1920-1938).
caagataaaaggttcatct

SEQ ID NO: 650639 - DNA, 19 bp, Mus musculus
  siRNA target sequence for C230081A13Rik (NM_172924.1,2045-2063).
gcaccagtccacgacaaaa

SEQ ID NO: 650640 - DNA, 19 bp, Mus musculus
  siRNA target sequence for C230081A13Rik (NM_172924.1,2048-2066).
ccagtccacgacaaaagat

SEQ ID NO: 650641 - DNA, 19 bp, Mus musculus
  siRNA target sequence for C230081A13Rik (NM_172924.1,2056-2074).
cgacaaaagatccctaaaa

SEQ ID NO: 650642 - DNA, 19 bp, Mus musculus
  siRNA target sequence for C230081A13Rik (NM_172924.1,2057-2075).
gacaaaagatccctaaaat

SEQ ID NO: 650643 - DNA, 19 bp, Mus musculus
  siRNA target sequence for C230081A13Rik (NM_172924.1,2067-2085).
ccctaaaatagaattaagt

SEQ ID NO: 650644 - DNA, 19 bp, Mus musculus
  siRNA target sequence for C230081A13Rik (NM_172924.1,2171-2189).
ctaaaaccatccctgttaa

SEQ ID NO: 650645 - DNA, 19 bp, Mus musculus
  siRNA target sequence for C230081A13Rik (NM_172924.1,2181-2199).
ccctgttaagtcacctaat

SEQ ID NO: 650646 - DNA, 19 bp, Mus musculus
  siRNA target sequence for C230081A13Rik (NM_172924.1,2183-2201).
ctgttaagtcacctaattt

SEQ ID NO: 650647 - DNA, 19 bp, Mus musculus
  siRNA target sequence for C230081A13Rik (NM_172924.1,2185-2203).
gttaagtcacctaatttgt

SEQ ID NO: 650648 - DNA, 19 bp, Mus musculus
  siRNA target sequence for C230081A13Rik (NM_172924.1,2192-2210).
cacctaatttgtctgaaat

SEQ ID NO: 650649 - DNA, 19 bp, Mus musculus
  siRNA target sequence for C230081A13Rik (NM_172924.1,2195-2213).
ctaatttgtctgaaataaa

SEQ ID NO: 650650 - DNA, 19 bp, Mus musculus
  siRNA target sequence for C230081A13Rik (NM_172924.1,2252-2270).
ccattatcatccatgatga

SEQ ID NO: 650651 - DNA, 19 bp, Mus musculus
  siRNA target sequence for C230081A13Rik (NM_172924.1,2262-2280).
ccatgatgagccatcctat

SEQ ID NO: 650652 - DNA, 19 bp, Mus musculus
  siRNA target sequence for C230081A13Rik (NM_172924.1,2277-2295).
ctatgcccggagttccaaa

SEQ ID NO: 650653 - DNA, 19 bp, Mus musculus
  siRNA target sequence for C230081A13Rik (NM_172924.1,2288-2306).
gttccaaaaatgccattaa

SEQ ID NO: 650654 - DNA, 19 bp, Mus musculus
  siRNA target sequence for C230081A13Rik (NM_172924.1,2301-2319).
cattaaagtccccattgtt

SEQ ID NO: 650655 - DNA, 19 bp, Mus musculus
  siRNA target sequence for C230081A13Rik (NM_172924.1,2311-2329).
cccattgttattaatccaa

SEQ ID NO: 650656 - DNA, 19 bp, Mus musculus
  siRNA target sequence for C230081A13Rik (NM_172924.1,2313-2331).
cattgttattaatccaaat

SEQ ID NO: 650657 - DNA, 19 bp, Mus musculus
  siRNA target sequence for C230081A13Rik (NM_172924.1,2327-2345).
caaatgcgtatgacaatct

SEQ ID NO: 650658 - DNA, 19 bp, Mus musculus
  siRNA target sequence for C230081A13Rik (NM_172924.1,2338-2356).
gacaatctcgccatctaca

SEQ ID NO: 650659 - DNA, 19 bp, Mus musculus
  siRNA target sequence for C230081A13Rik (NM_172924.1,2340-2358).
caatctcgccatctacaaa

SEQ ID NO: 650660 - DNA, 19 bp, Mus musculus
  siRNA target sequence for C230081A13Rik (NM_172924.1,2408-2426).
gcgtaataagccatactta

SEQ ID NO: 650661 - DNA, 19 bp, Mus musculus
  siRNA target sequence for C230081A13Rik (NM_172924.1,2443-2461).
gaaagcaaagtgtctgata

SEQ ID NO: 650662 - DNA, 19 bp, Mus musculus
  siRNA target sequence for C230081A13Rik (NM_172924.1,2491-2509).
caagctaaagggttttcca

SEQ ID NO: 650663 - DNA, 19 bp, Mus musculus
  siRNA target sequence for C230081A13Rik (NM_172924.1,2547-2565).
ggtgcaggagtttaacaat

SEQ ID NO: 650664 - DNA, 19 bp, Mus musculus
  siRNA target sequence for C230081A13Rik (NM_172924.1,2618-2636).
gctccccagcaaaaatcca

SEQ ID NO: 650665 - DNA, 19 bp, Mus musculus
  siRNA target sequence for C230081A13Rik (NM_172924.1,2726-2744).
caagcgccgtcctatgtca

SEQ ID NO: 650666 - DNA, 19 bp, Mus musculus
  siRNA target sequence for C230081A13Rik (NM_172924.1,2730-2748).
cgccgtcctatgtcagatt

SEQ ID NO: 650667 - DNA, 19 bp, Mus musculus
  siRNA target sequence for C230081A13Rik (NM_172924.1,2741-2759).
gtcagattgtggcatctat

SEQ ID NO: 650668 - DNA, 19 bp, Mus musculus
  siRNA target sequence for C230081A13Rik (NM_172924.1,2779-2797).
ccagaagcacctcaatcta

SEQ ID NO: 650669 - DNA, 19 bp, Mus musculus
  siRNA target sequence for C230081A13Rik (NM_172924.1,2845-2863).
gcagatactacaaaaagta

SEQ ID NO: 650670 - DNA, 19 bp, Mus musculus
  siRNA target sequence for C230081A13Rik (NM_172924.1,2879-2897).
cagtcagacccaaatctct

SEQ ID NO: 650671 - DNA, 19 bp, Mus musculus
  siRNA target sequence for C230081A13Rik (NM_172924.1,2881-2899).
gtcagacccaaatctcttt

SEQ ID NO: 650672 - DNA, 19 bp, Mus musculus
  siRNA target sequence for C230081A13Rik (NM_172924.1,2929-2947).
gcccatcagaccacagaaa

SEQ ID NO: 650673 - DNA, 19 bp, Mus musculus
  siRNA target sequence for C230081A13Rik (NM_172924.1,2948-2966).
gccctactgccaaaattca

SEQ ID NO: 650674 - DNA, 19 bp, Mus musculus
  siRNA target sequence for C230081A13Rik (NM_172924.1,2951-2969).
ctactgccaaaattcagaa

SEQ ID NO: 650675 - DNA, 19 bp, Mus musculus
  siRNA target sequence for C230081A13Rik (NM_172924.1,2996-3014).
ctcctccctccaaattagt

SEQ ID NO: 650676 - DNA, 19 bp, Mus musculus
  siRNA target sequence for C230081A13Rik (NM_172924.1,3071-3089).
ccccttaccatgcaagtaa

SEQ ID NO: 650677 - DNA, 19 bp, Mus musculus
  siRNA target sequence for C230081A13Rik (NM_172924.1,3082-3100).
gcaagtaacctgttgcaaa

SEQ ID NO: 650678 - DNA, 19 bp, Mus musculus
  siRNA target sequence for C230081A13Rik (NM_172924.1,3096-3114).
gcaaaggcattttaccaat

SEQ ID NO: 650679 - DNA, 19 bp, Mus musculus
  siRNA target sequence for C230081A13Rik (NM_172924.1,3097-3115).
caaaggcattttaccaatt

SEQ ID NO: 650680 - DNA, 19 bp, Mus musculus
  siRNA target sequence for C230081A13Rik (NM_172924.1,3129-3147).
cagtcctacccgatcaaca

SEQ ID NO: 650681 - DNA, 19 bp, Mus musculus
  siRNA target sequence for C230081A13Rik (NM_172924.1,3182-3200).
ggcgagccgctgatgcaaa

SEQ ID NO: 650682 - DNA, 19 bp, Mus musculus
  siRNA target sequence for C230081A13Rik (NM_172924.1,3183-3201).
gcgagccgctgatgcaaaa

SEQ ID NO: 650683 - DNA, 19 bp, Mus musculus
  siRNA target sequence for C230081A13Rik (NM_172924.1,3188-3206).
ccgctgatgcaaaacctaa

SEQ ID NO: 650684 - DNA, 19 bp, Mus musculus
  siRNA target sequence for C230081A13Rik (NM_172924.1,3381-3399).
gcgagaagcctgctatagt

SEQ ID NO: 650685 - DNA, 19 bp, Mus musculus
  siRNA target sequence for Cog1 (NM_013581.2,131-149).
ccgagatcgaacacaagaa

SEQ ID NO: 650686 - DNA, 19 bp, Mus musculus
  siRNA target sequence for Cog1 (NM_013581.2,253-271).
gtgcaggccaccgatcaat

SEQ ID NO: 650687 - DNA, 19 bp, Mus musculus
  siRNA target sequence for Cog1 (NM_013581.2,256-274).
caggccaccgatcaatact

SEQ ID NO: 650688 - DNA, 19 bp, Mus musculus
  siRNA target sequence for Cog1 (NM_013581.2,513-531).
ccccatcctctcgagattt

SEQ ID NO: 650689 - DNA, 19 bp, Mus musculus
  siRNA target sequence for Cog1 (NM_013581.2,564-582).
ccacttccggtcaactatt

SEQ ID NO: 650690 - DNA, 19 bp, Mus musculus
  siRNA target sequence for Cog1 (NM_013581.2,565-583).
cacttccggtcaactattt

SEQ ID NO: 650691 - DNA, 19 bp, Mus musculus
  siRNA target sequence for Cog1 (NM_013581.2,708-726).
ggccagaaaggcgactatt

SEQ ID NO: 650692 - DNA, 19 bp, Mus musculus
  siRNA target sequence for Cog1 (NM_013581.2,710-728).
ccagaaaggcgactattca

SEQ ID NO: 650693 - DNA, 19 bp, Mus musculus
  siRNA target sequence for Cog1 (NM_013581.2,760-778).
ggcatcaaggcccagattt

SEQ ID NO: 650694 - DNA, 19 bp, Mus musculus
  siRNA target sequence for Cog1 (NM_013581.2,817-835).
gcacatgcccttttctaca

SEQ ID NO: 650695 - DNA, 19 bp, Mus musculus
  siRNA target sequence for Cog1 (NM_013581.2,1106-1124).
ggatcggcaatctgcttat

SEQ ID NO: 650696 - DNA, 19 bp, Mus musculus
  siRNA target sequence for Cog1 (NM_013581.2,1304-1322).
gagaaggctttgaatccat

SEQ ID NO: 650697 - DNA, 19 bp, Mus musculus
  siRNA target sequence for Cog1 (NM_013581.2,1331-1349).
gctccaaagagcttctagt

SEQ ID NO: 650698 - DNA, 19 bp, Mus musculus
  siRNA target sequence for Cog1 (NM_013581.2,1363-1381).
gagctggagaccaacaact

SEQ ID NO: 650699 - DNA, 19 bp, Mus musculus
  siRNA target sequence for Cog1 (NM_013581.2,1402-1420).
cactttgagcagaacatgt

SEQ ID NO: 650700 - DNA, 19 bp, Mus musculus
  siRNA target sequence for Cog1 (NM_013581.2,1408-1426).
gagcagaacatgtctttct

SEQ ID NO: 650701 - DNA, 19 bp, Mus musculus
  siRNA target sequence for Cog1 (NM_013581.2,1469-1487).
cctgggtcagcgtagcaaa

SEQ ID NO: 650702 - DNA, 19 bp, Mus musculus
  siRNA target sequence for Cog1 (NM_013581.2,1570-1588).
gattctaagctgaaggtta

SEQ ID NO: 650703 - DNA, 19 bp, Mus musculus
  siRNA target sequence for Cog1 (NM_013581.2,1773-1791).
gctgtgcaccattgaagaa

SEQ ID NO: 650704 - DNA, 19 bp, Mus musculus
  siRNA target sequence for Cog1 (NM_013581.2,2063-2081).
ggagcacagcacttgtgaa

SEQ ID NO: 650705 - DNA, 19 bp, Mus musculus
  siRNA target sequence for Cog1 (NM_013581.2,2066-2084).
gcacagcacttgtgaaatt

SEQ ID NO: 650706 - DNA, 19 bp, Mus musculus
  siRNA target sequence for Cog1 (NM_013581.2,2067-2085).
cacagcacttgtgaaattt

SEQ ID NO: 650707 - DNA, 19 bp, Mus musculus
  siRNA target sequence for Cog1 (NM_013581.2,2071-2089).
gcacttgtgaaatttctga

SEQ ID NO: 650708 - DNA, 19 bp, Mus musculus
  siRNA target sequence for Cog1 (NM_013581.2,2282-2300).
gggttggaggccatgcttt

SEQ ID NO: 650709 - DNA, 19 bp, Mus musculus
  siRNA target sequence for Cog1 (NM_013581.2,2334-2352).
ctgcatggcccaagtcata

SEQ ID NO: 650710 - DNA, 19 bp, Mus musculus
  siRNA target sequence for Cog1 (NM_013581.2,2613-2631).
ggtgcagcggacttcagtt

SEQ ID NO: 650711 - DNA, 19 bp, Mus musculus
  siRNA target sequence for Cog1 (NM_013581.2,2629-2647).
gttctatttggcttggtta

SEQ ID NO: 650712 - DNA, 19 bp, Mus musculus
  siRNA target sequence for Cog1 (NM_013581.2,2672-2690).
cccggagcagcactttcaa

SEQ ID NO: 650713 - DNA, 19 bp, Mus musculus
  siRNA target sequence for Cog1 (NM_013581.2,2694-2712).
ccaggagccccataacata

SEQ ID NO: 650714 - DNA, 19 bp, Mus musculus
  siRNA target sequence for Cog1 (NM_013581.2,2779-2797).
gcgagggcaaccagtagaa

SEQ ID NO: 650715 - DNA, 19 bp, Mus musculus
  siRNA target sequence for Cog1 (NM_013581.2,2858-2876).
cgcatcctggctccttatt

SEQ ID NO: 650716 - DNA, 19 bp, Mus musculus
  siRNA target sequence for Cog1 (NM_013581.2,2860-2878).
catcctggctccttattca

SEQ ID NO: 650717 - DNA, 19 bp, Mus musculus
  siRNA target sequence for Cog1 (NM_013581.2,2908-2926).
cctgcaccttcattattca

SEQ ID NO: 650718 - DNA, 19 bp, Mus musculus
  siRNA target sequence for Cog2 (NM_029746.2,105-123).
gataaggacgagttcatga

SEQ ID NO: 650719 - DNA, 19 bp, Mus musculus
  siRNA target sequence for Cog2 (NM_029746.2,119-137).
catgaaggaggatttcgat

SEQ ID NO: 650720 - DNA, 19 bp, Mus musculus
  siRNA target sequence for Cog2 (NM_029746.2,135-153).
gatgtggaccactttgtgt

SEQ ID NO: 650721 - DNA, 19 bp, Mus musculus
  siRNA target sequence for Cog2 (NM_029746.2,192-210).
gacgacctggagctgtatt

SEQ ID NO: 650722 - DNA, 19 bp, Mus musculus
  siRNA target sequence for Cog2 (NM_029746.2,367-385).
ctgtcagtgaaggaattct

SEQ ID NO: 650723 - DNA, 19 bp, Mus musculus
  siRNA target sequence for Cog2 (NM_029746.2,390-408).
gtagatgaacgaatgtcta

SEQ ID NO: 650724 - DNA, 19 bp, Mus musculus
  siRNA target sequence for Cog2 (NM_029746.2,443-461).
gttgagacttatacaagtt

SEQ ID NO: 650725 - DNA, 19 bp, Mus musculus
  siRNA target sequence for Cog2 (NM_029746.2,450-468).
cttatacaagttattcgat

SEQ ID NO: 650726 - DNA, 19 bp, Mus musculus
  siRNA target sequence for Cog2 (NM_029746.2,476-494).
gaaaattgagaaaatctta

SEQ ID NO: 650727 - DNA, 19 bp, Mus musculus
  siRNA target sequence for Cog2 (NM_029746.2,497-515).
ctctcaaagttctaaagat

SEQ ID NO: 650728 - DNA, 19 bp, Mus musculus
  siRNA target sequence for Cog2 (NM_029746.2,499-517).
ctcaaagttctaaagatgt

SEQ ID NO: 650729 - DNA, 19 bp, Mus musculus
  siRNA target sequence for Cog2 (NM_029746.2,581-599).
gtttaaccagcttcagttt

SEQ ID NO: 650730 - DNA, 19 bp, Mus musculus
  siRNA target sequence for Cog2 (NM_029746.2,624-642).
ccccttttggacaaagtga

SEQ ID NO: 650731 - DNA, 19 bp, Mus musculus
  siRNA target sequence for Cog2 (NM_029746.2,635-653).
caaagtgagacctcgtata

SEQ ID NO: 650732 - DNA, 19 bp, Mus musculus
  siRNA target sequence for Cog2 (NM_029746.2,751-769).
cctatgccaccattgataa

SEQ ID NO: 650733 - DNA, 19 bp, Mus musculus
  siRNA target sequence for Cog2 (NM_029746.2,865-883).
gccttcagctcatgtacaa

SEQ ID NO: 650734 - DNA, 19 bp, Mus musculus
  siRNA target sequence for Cog2 (NM_029746.2,969-987).
gttcctggctatgatttct

SEQ ID NO: 650735 - DNA, 19 bp, Mus musculus
  siRNA target sequence for Cog2 (NM_029746.2,997-1015).
ctgtgtggccagaaatagt

SEQ ID NO: 650736 - DNA, 19 bp, Mus musculus
  siRNA target sequence for Cog2 (NM_029746.2,1065-1083).
gacgcctttcaccagaaat

SEQ ID NO: 650737 - DNA, 19 bp, Mus musculus
  siRNA target sequence for Cog2 (NM_029746.2,1087-1105).
ctgtgagcatggactttgt

SEQ ID NO: 650738 - DNA, 19 bp, Mus musculus
  siRNA target sequence for Cog2 (NM_029746.2,1164-1182).
cctgcctatcacaacttca

SEQ ID NO: 650739 - DNA, 19 bp, Mus musculus
  siRNA target sequence for Cog2 (NM_029746.2,1199-1217).
gcctgtttactttcagata

SEQ ID NO: 650740 - DNA, 19 bp, Mus musculus
  siRNA target sequence for Cog2 (NM_029746.2,1203-1221).
gtttactttcagataaggt

SEQ ID NO: 650741 - DNA, 19 bp, Mus musculus
  siRNA target sequence for Cog2 (NM_029746.2,1339-1357).
gctggtccgatgagatgtt

SEQ ID NO: 650742 - DNA, 19 bp, Mus musculus
  siRNA target sequence for Cog2 (NM_029746.2,1438-1456).
ctgtcaggcccgtttctaa

SEQ ID NO: 650743 - DNA, 19 bp, Mus musculus
  siRNA target sequence for Cog2 (NM_029746.2,1558-1576).
gcactcagctggtgtatgt

SEQ ID NO: 650744 - DNA, 19 bp, Mus musculus
  siRNA target sequence for Cog2 (NM_029746.2,1653-1671).
ggctttaagaatttttcgt

SEQ ID NO: 650745 - DNA, 19 bp, Mus musculus
  siRNA target sequence for Cog2 (NM_029746.2,1756-1774).
gtgagtcttgcttcagtta

SEQ ID NO: 650746 - DNA, 19 bp, Mus musculus
  siRNA target sequence for Cog2 (NM_029746.2,1762-1780).
cttgcttcagttatctcaa

SEQ ID NO: 650747 - DNA, 19 bp, Mus musculus
  siRNA target sequence for Cog2 (NM_029746.2,1803-1821).
ctttaccgcaggaccaata

SEQ ID NO: 650748 - DNA, 19 bp, Mus musculus
  siRNA target sequence for Cog2 (NM_029746.2,2135-2153).
cctgggagaacagatacaa

SEQ ID NO: 650749 - DNA, 19 bp, Mus musculus
  siRNA target sequence for Cog2 (NM_029746.2,2166-2184).
cagaccagcgacatcaaga

SEQ ID NO: 650750 - DNA, 19 bp, Mus musculus
  siRNA target sequence for Cog4 (NM_133973.1,71-89).
ggacactgctccgaaatct

SEQ ID NO: 650751 - DNA, 19 bp, Mus musculus
  siRNA target sequence for Cog4 (NM_133973.1,306-324).
cctgcagcctagctgaaaa

SEQ ID NO: 650752 - DNA, 19 bp, Mus musculus
  siRNA target sequence for Cog4 (NM_133973.1,468-486).
cagcccacattcatcgtta

SEQ ID NO: 650753 - DNA, 19 bp, Mus musculus
  siRNA target sequence for Cog4 (NM_133973.1,471-489).
cccacattcatcgttactt

SEQ ID NO: 650754 - DNA, 19 bp, Mus musculus
  siRNA target sequence for Cog4 (NM_133973.1,473-491).
cacattcatcgttacttgt

SEQ ID NO: 650755 - DNA, 19 bp, Mus musculus
  siRNA target sequence for Cog4 (NM_133973.1,594-612).
ccatagtcgcagagaagtt

SEQ ID NO: 650756 - DNA, 19 bp, Mus musculus
  siRNA target sequence for Cog4 (NM_133973.1,610-628).
gtttgctatcgctaccaaa

SEQ ID NO: 650757 - DNA, 19 bp, Mus musculus
  siRNA target sequence for Cog4 (NM_133973.1,621-639).
ctaccaaagaaggtgattt

SEQ ID NO: 650758 - DNA, 19 bp, Mus musculus
  siRNA target sequence for Cog4 (NM_133973.1,642-660).
cccaggtggagcgattctt

SEQ ID NO: 650759 - DNA, 19 bp, Mus musculus
  siRNA target sequence for Cog4 (NM_133973.1,644-662).
caggtggagcgattcttca

SEQ ID NO: 650760 - DNA, 19 bp, Mus musculus
  siRNA target sequence for Cog4 (NM_133973.1,647-665).
gtggagcgattcttcaaga

SEQ ID NO: 650761 - DNA, 19 bp, Mus musculus
  siRNA target sequence for Cog4 (NM_133973.1,650-668).
gagcgattcttcaagatct

SEQ ID NO: 650762 - DNA, 19 bp, Mus musculus
  siRNA target sequence for Cog4 (NM_133973.1,672-690).
cactgctgggtttacatga

SEQ ID NO: 650763 - DNA, 19 bp, Mus musculus
  siRNA target sequence for Cog4 (NM_133973.1,738-756).
gtaaggctgaggagaatct

SEQ ID NO: 650764 - DNA, 19 bp, Mus musculus
  siRNA target sequence for Cog4 (NM_133973.1,843-861).
cccgaattgtggaaactca

SEQ ID NO: 650765 - DNA, 19 bp, Mus musculus
  siRNA target sequence for Cog4 (NM_133973.1,868-886).
catcgtggagacttactat

SEQ ID NO: 650766 - DNA, 19 bp, Mus musculus
  siRNA target sequence for Cog4 (NM_133973.1,887-905).
ggaccagggcgactcttta

SEQ ID NO: 650767 - DNA, 19 bp, Mus musculus
  siRNA target sequence for Cog4 (NM_133973.1,897-915).
gactctttaccctgatcaa

SEQ ID NO: 650768 - DNA, 19 bp, Mus musculus
  siRNA target sequence for Cog4 (NM_133973.1,899-917).
ctctttaccctgatcaaat

SEQ ID NO: 650769 - DNA, 19 bp, Mus musculus
  siRNA target sequence for Cog4 (NM_133973.1,906-924).
ccctgatcaaatatcttca

SEQ ID NO: 650770 - DNA, 19 bp, Mus musculus
  siRNA target sequence for Cog4 (NM_133973.1,910-928).
gatcaaatatcttcaagta

SEQ ID NO: 650771 - DNA, 19 bp, Mus musculus
  siRNA target sequence for Cog4 (NM_133973.1,944-962).
gtggagaaggtcgtaaaca

SEQ ID NO: 650772 - DNA, 19 bp, Mus musculus
  siRNA target sequence for Cog4 (NM_133973.1,947-965).
gagaaggtcgtaaacaagt

SEQ ID NO: 650773 - DNA, 19 bp, Mus musculus
  siRNA target sequence for Cog4 (NM_133973.1,953-971).
gtcgtaaacaagttcatca

SEQ ID NO: 650774 - DNA, 19 bp, Mus musculus
  siRNA target sequence for Cog4 (NM_133973.1,998-1016).
cggctcgtccagagtaatt

SEQ ID NO: 650775 - DNA, 19 bp, Mus musculus
  siRNA target sequence for Cog4 (NM_133973.1,999-1017).
ggctcgtccagagtaattt

SEQ ID NO: 650776 - DNA, 19 bp, Mus musculus
  siRNA target sequence for Cog4 (NM_133973.1,1001-1019).
ctcgtccagagtaatttga

SEQ ID NO: 650777 - DNA, 19 bp, Mus musculus
  siRNA target sequence for Cog4 (NM_133973.1,1004-1022).
gtccagagtaatttgatga

SEQ ID NO: 650778 - DNA, 19 bp, Mus musculus
  siRNA target sequence for Cog4 (NM_133973.1,1087-1105).
gatgaatgcgcgaagtgaa

SEQ ID NO: 650779 - DNA, 19 bp, Mus musculus
  siRNA target sequence for Cog4 (NM_133973.1,1095-1113).
cgcgaagtgaactgtactt

SEQ ID NO: 650780 - DNA, 19 bp, Mus musculus
  siRNA target sequence for Cog4 (NM_133973.1,1096-1114).
gcgaagtgaactgtactta

SEQ ID NO: 650781 - DNA, 19 bp, Mus musculus
  siRNA target sequence for Cog4 (NM_133973.1,1129-1147).
gaggatcagcgcggatttt

SEQ ID NO: 650782 - DNA, 19 bp, Mus musculus
  siRNA target sequence for Cog4 (NM_133973.1,1131-1149).
ggatcagcgcggattttga

SEQ ID NO: 650783 - DNA, 19 bp, Mus musculus
  siRNA target sequence for Cog4 (NM_133973.1,1236-1254).
gtaccatgcaggagctaat

SEQ ID NO: 650784 - DNA, 19 bp, Mus musculus
  siRNA target sequence for Cog4 (NM_133973.1,1246-1264).
ggagctaattggcttctat

SEQ ID NO: 650785 - DNA, 19 bp, Mus musculus
  siRNA target sequence for Cog4 (NM_133973.1,1249-1267).
gctaattggcttctatatt

SEQ ID NO: 650786 - DNA, 19 bp, Mus musculus
  siRNA target sequence for Cog4 (NM_133973.1,1313-1331).
gctctggatacctatgaga

SEQ ID NO: 650787 - DNA, 19 bp, Mus musculus
  siRNA target sequence for Cog4 (NM_133973.1,1398-1416).
ctctgtccagctctaacat

SEQ ID NO: 650788 - DNA, 19 bp, Mus musculus
  siRNA target sequence for Cog4 (NM_133973.1,1422-1440).
gtctctgtgccatgatcaa

SEQ ID NO: 650789 - DNA, 19 bp, Mus musculus
  siRNA target sequence for Cog4 (NM_133973.1,1577-1595).
cagcagggcaagtttgaca

SEQ ID NO: 650790 - DNA, 19 bp, Mus musculus
  siRNA target sequence for Cog4 (NM_133973.1,1785-1803).
ctgctgtgtccaacaaatt

SEQ ID NO: 650791 - DNA, 19 bp, Mus musculus
  siRNA target sequence for Cog4 (NM_133973.1,1862-1880).
gtgcaaccttggatcaaca

SEQ ID NO: 650792 - DNA, 19 bp, Mus musculus
  siRNA target sequence for Cog4 (NM_133973.1,1865-1883).
caaccttggatcaacactt

SEQ ID NO: 650793 - DNA, 19 bp, Mus musculus
  siRNA target sequence for Cog4 (NM_133973.1,2001-2019).
gcctgtccccagtcatcta

SEQ ID NO: 650794 - DNA, 19 bp, Mus musculus
  siRNA target sequence for Cog4 (NM_133973.1,2203-2221).
ggctacaatccttaaccta

SEQ ID NO: 650795 - DNA, 19 bp, Mus musculus
  siRNA target sequence for Cog4 (NM_133973.1,2224-2242).
gcgggtgactgagatacta

SEQ ID NO: 650796 - DNA, 19 bp, Mus musculus
  siRNA target sequence for Cog4 (NM_133973.1,2226-2244).
gggtgactgagatactaga

SEQ ID NO: 650797 - DNA, 19 bp, Mus musculus
  siRNA target sequence for Cog4 (NM_133973.1,2228-2246).
gtgactgagatactagatt

SEQ ID NO: 650798 - DNA, 19 bp, Mus musculus
  siRNA target sequence for Cog6 (NM_026225.1,234-252).
gtttgcggactcgaagaaa

SEQ ID NO: 650799 - DNA, 19 bp, Mus musculus
  siRNA target sequence for Cog6 (NM_026225.1,238-256).
gcggactcgaagaaattta

SEQ ID NO: 650800 - DNA, 19 bp, Mus musculus
  siRNA target sequence for Cog6 (NM_026225.1,241-259).
gactcgaagaaatttacgt

SEQ ID NO: 650801 - DNA, 19 bp, Mus musculus
  siRNA target sequence for Cog6 (NM_026225.1,249-267).
gaaatttacgtggtgatat

SEQ ID NO: 650802 - DNA, 19 bp, Mus musculus
  siRNA target sequence for Cog6 (NM_026225.1,274-292).
cagaagcttagccatcaat

SEQ ID NO: 650803 - DNA, 19 bp, Mus musculus
  siRNA target sequence for Cog6 (NM_026225.1,366-384).
gcagctgttgtcaggatat

SEQ ID NO: 650804 - DNA, 19 bp, Mus musculus
  siRNA target sequence for Cog6 (NM_026225.1,415-433).
gactcaagatttaatagta

SEQ ID NO: 650805 - DNA, 19 bp, Mus musculus
  siRNA target sequence for Cog6 (NM_026225.1,460-478).
ccaaagactagagattaga

SEQ ID NO: 650806 - DNA, 19 bp, Mus musculus
  siRNA target sequence for Cog6 (NM_026225.1,512-530).
cagctgacttcggatgaaa

SEQ ID NO: 650807 - DNA, 19 bp, Mus musculus
  siRNA target sequence for Cog6 (NM_026225.1,515-533).
ctgacttcggatgaaatga

SEQ ID NO: 650808 - DNA, 19 bp, Mus musculus
  siRNA target sequence for Cog6 (NM_026225.1,517-535).
gacttcggatgaaatgagt

SEQ ID NO: 650809 - DNA, 19 bp, Mus musculus
  siRNA target sequence for Cog6 (NM_026225.1,560-578).
cccgttactgaggactttt

SEQ ID NO: 650810 - DNA, 19 bp, Mus musculus
  siRNA target sequence for Cog6 (NM_026225.1,594-612).
gagtgaaacagattcataa

SEQ ID NO: 650811 - DNA, 19 bp, Mus musculus
  siRNA target sequence for Cog6 (NM_026225.1,648-666).
cggcaggtttggagattat

SEQ ID NO: 650812 - DNA, 19 bp, Mus musculus
  siRNA target sequence for Cog6 (NM_026225.1,676-694).
ggccttgcttcaagaaact

SEQ ID NO: 650813 - DNA, 19 bp, Mus musculus
  siRNA target sequence for Cog6 (NM_026225.1,758-776).
gatgtgtctgcggtgttat

SEQ ID NO: 650814 - DNA, 19 bp, Mus musculus
  siRNA target sequence for Cog6 (NM_026225.1,800-818).
gacaggcctgtcttataca

SEQ ID NO: 650815 - DNA, 19 bp, Mus musculus
  siRNA target sequence for Cog6 (NM_026225.1,805-823).
gcctgtcttatacaagtat

SEQ ID NO: 650816 - DNA, 19 bp, Mus musculus
  siRNA target sequence for Cog6 (NM_026225.1,811-829).
cttatacaagtatacctta

SEQ ID NO: 650817 - DNA, 19 bp, Mus musculus
  siRNA target sequence for Cog6 (NM_026225.1,847-865).
ccgacgaagcactgttgtt

SEQ ID NO: 650818 - DNA, 19 bp, Mus musculus
  siRNA target sequence for Cog6 (NM_026225.1,858-876).
ctgttgttcgtgggtttat

SEQ ID NO: 650819 - DNA, 19 bp, Mus musculus
  siRNA target sequence for Cog6 (NM_026225.1,909-927).
cacctaggcccattgaaat

SEQ ID NO: 650820 - DNA, 19 bp, Mus musculus
  siRNA target sequence for Cog6 (NM_026225.1,1009-1027).
ggaagctctcttaaagcat

SEQ ID NO: 650821 - DNA, 19 bp, Mus musculus
  siRNA target sequence for Cog6 (NM_026225.1,1013-1031).
gctctcttaaagcatgtaa

SEQ ID NO: 650822 - DNA, 19 bp, Mus musculus
  siRNA target sequence for Cog6 (NM_026225.1,1034-1052).
gctcagggtgttaaagaaa

SEQ ID NO: 650823 - DNA, 19 bp, Mus musculus
  siRNA target sequence for Cog6 (NM_026225.1,1090-1108).
gtgtcggcctctaaaggtt

SEQ ID NO: 650824 - DNA, 19 bp, Mus musculus
  siRNA target sequence for Cog6 (NM_026225.1,1095-1113).
ggcctctaaaggttcgaat

SEQ ID NO: 650825 - DNA, 19 bp, Mus musculus
  siRNA target sequence for Cog6 (NM_026225.1,1096-1114).
gcctctaaaggttcgaatt

SEQ ID NO: 650826 - DNA, 19 bp, Mus musculus
  siRNA target sequence for Cog6 (NM_026225.1,1105-1123).
ggttcgaattgaacaagta

SEQ ID NO: 650827 - DNA, 19 bp, Mus musculus
  siRNA target sequence for Cog6 (NM_026225.1,1106-1124).
gttcgaattgaacaagtaa

SEQ ID NO: 650828 - DNA, 19 bp, Mus musculus
  siRNA target sequence for Cog6 (NM_026225.1,1110-1128).
gaattgaacaagtaatact

SEQ ID NO: 650829 - DNA, 19 bp, Mus musculus
  siRNA target sequence for Cog6 (NM_026225.1,1136-1154).
cctggggcagtgttgttat

SEQ ID NO: 650830 - DNA, 19 bp, Mus musculus
  siRNA target sequence for Cog6 (NM_026225.1,1139-1157).
ggggcagtgttgttatata

SEQ ID NO: 650831 - DNA, 19 bp, Mus musculus
  siRNA target sequence for Cog6 (NM_026225.1,1140-1158).
gggcagtgttgttatataa

SEQ ID NO: 650832 - DNA, 19 bp, Mus musculus
  siRNA target sequence for Cog6 (NM_026225.1,1142-1160).
gcagtgttgttatataaaa

SEQ ID NO: 650833 - DNA, 19 bp, Mus musculus
  siRNA target sequence for Cog6 (NM_026225.1,1164-1182).
ctaacctcctcaagtttta

SEQ ID NO: 650834 - DNA, 19 bp, Mus musculus
  siRNA target sequence for Cog6 (NM_026225.1,1195-1213).
cagtggcatcgttggaaat

SEQ ID NO: 650835 - DNA, 19 bp, Mus musculus
  siRNA target sequence for Cog6 (NM_026225.1,1220-1238).
gctactctactgacaacaa

SEQ ID NO: 650836 - DNA, 19 bp, Mus musculus
  siRNA target sequence for Cog6 (NM_026225.1,1285-1303).
gagtctccatgcgaataaa

SEQ ID NO: 650837 - DNA, 19 bp, Mus musculus
  siRNA target sequence for Cog6 (NM_026225.1,1287-1305).
gtctccatgcgaataaact

SEQ ID NO: 650838 - DNA, 19 bp, Mus musculus
  siRNA target sequence for Cog6 (NM_026225.1,1289-1307).
ctccatgcgaataaactga

SEQ ID NO: 650839 - DNA, 19 bp, Mus musculus
  siRNA target sequence for Cog6 (NM_026225.1,1369-1387).
cactttgctgcgggatatt

SEQ ID NO: 650840 - DNA, 19 bp, Mus musculus
  siRNA target sequence for Cog6 (NM_026225.1,1388-1406).
ctggcgtcgcatgattctt

SEQ ID NO: 650841 - DNA, 19 bp, Mus musculus
  siRNA target sequence for Cog6 (NM_026225.1,1390-1408).
ggcgtcgcatgattcttca

SEQ ID NO: 650842 - DNA, 19 bp, Mus musculus
  siRNA target sequence for Cog6 (NM_026225.1,1425-1443).
ctcggcaggctgactttgt

SEQ ID NO: 650843 - DNA, 19 bp, Mus musculus
  siRNA target sequence for Cog6 (NM_026225.1,1563-1581).
ccctggctctgttcgaatt

SEQ ID NO: 650844 - DNA, 19 bp, Mus musculus
  siRNA target sequence for Cog6 (NM_026225.1,1567-1585).
ggctctgttcgaattcaca

SEQ ID NO: 650845 - DNA, 19 bp, Mus musculus
  siRNA target sequence for Cog6 (NM_026225.1,1584-1602).
cagacaggcgcctagaaat

SEQ ID NO: 650846 - DNA, 19 bp, Mus musculus
  siRNA target sequence for Cog6 (NM_026225.1,1588-1606).
caggcgcctagaaatgctt

SEQ ID NO: 650847 - DNA, 19 bp, Mus musculus
  siRNA target sequence for Cog6 (NM_026225.1,1625-1643).
catctggacactcttatca

SEQ ID NO: 650848 - DNA, 19 bp, Mus musculus
  siRNA target sequence for Cog6 (NM_026225.1,1642-1660).
caatgagcaagcctcttat

SEQ ID NO: 650849 - DNA, 19 bp, Mus musculus
  siRNA target sequence for Cog6 (NM_026225.1,1646-1664).
gagcaagcctcttatgttt

SEQ ID NO: 650850 - DNA, 19 bp, Mus musculus
  siRNA target sequence for Cog6 (NM_026225.1,1649-1667).
caagcctcttatgttttaa

SEQ ID NO: 650851 - DNA, 19 bp, Mus musculus
  siRNA target sequence for Cog6 (NM_026225.1,1652-1670).
gcctcttatgttttaacta

SEQ ID NO: 650852 - DNA, 19 bp, Mus musculus
  siRNA target sequence for Cog6 (NM_026225.1,1654-1672).
ctcttatgttttaactaga

SEQ ID NO: 650853 - DNA, 19 bp, Mus musculus
  siRNA target sequence for Cog6 (NM_026225.1,1684-1702).
ctacatctacaacactata

SEQ ID NO: 650854 - DNA, 19 bp, Mus musculus
  siRNA target sequence for Cog6 (NM_026225.1,1696-1714).
cactatacagcaacataga

SEQ ID NO: 650855 - DNA, 19 bp, Mus musculus
  siRNA target sequence for Cog6 (NM_026225.1,1713-1731).
gacctgatcagggttcttt

SEQ ID NO: 650856 - DNA, 19 bp, Mus musculus
  siRNA target sequence for Cog6 (NM_026225.1,1912-1930).
gcatgcagccgtgatgaat

SEQ ID NO: 650857 - DNA, 19 bp, Mus musculus
  siRNA target sequence for Cog6 (NM_026225.1,1932-1950).
cagacaacgcatacaaaga

SEQ ID NO: 650858 - DNA, 19 bp, Mus musculus
  siRNA target sequence for Copb1 (NM_033370.2,144-162).
gccgagaacgtgtgctata

SEQ ID NO: 650859 - DNA, 19 bp, Mus musculus
  siRNA target sequence for Copb1 (NM_033370.2,147-165).
gagaacgtgtgctatacgt

SEQ ID NO: 650860 - DNA, 19 bp, Mus musculus
  siRNA target sequence for Copb1 (NM_033370.2,149-167).
gaacgtgtgctatacgtta

SEQ ID NO: 650861 - DNA, 19 bp, Mus musculus
  siRNA target sequence for Copb1 (NM_033370.2,152-170).
cgtgtgctatacgttaatt

SEQ ID NO: 650862 - DNA, 19 bp, Mus musculus
  siRNA target sequence for Copb1 (NM_033370.2,153-171).
gtgtgctatacgttaatta

SEQ ID NO: 650863 - DNA, 19 bp, Mus musculus
  siRNA target sequence for Copb1 (NM_033370.2,173-191).
cgtgccaatggattcagaa

SEQ ID NO: 650864 - DNA, 19 bp, Mus musculus
  siRNA target sequence for Copb1 (NM_033370.2,189-207).
gaacccccttcggaaatca

SEQ ID NO: 650865 - DNA, 19 bp, Mus musculus
  siRNA target sequence for Copb1 (NM_033370.2,195-213).
ccttcggaaatcagcttaa

SEQ ID NO: 650866 - DNA, 19 bp, Mus musculus
  siRNA target sequence for Copb1 (NM_033370.2,196-214).
cttcggaaatcagcttaaa

SEQ ID NO: 650867 - DNA, 19 bp, Mus musculus
  siRNA target sequence for Copb1 (NM_033370.2,199-217).
cggaaatcagcttaaaaaa

SEQ ID NO: 650868 - DNA, 19 bp, Mus musculus
  siRNA target sequence for Copb1 (NM_033370.2,231-249).
ggcgatgtgaagtcaaaga

SEQ ID NO: 650869 - DNA, 19 bp, Mus musculus
  siRNA target sequence for Copb1 (NM_033370.2,263-281).
gaaagtgatcattatgatt

SEQ ID NO: 650870 - DNA, 19 bp, Mus musculus
  siRNA target sequence for Copb1 (NM_033370.2,269-287).
gatcattatgattctgaat

SEQ ID NO: 650871 - DNA, 19 bp, Mus musculus
  siRNA target sequence for Copb1 (NM_033370.2,300-318).
cccggactcctgatgacaa

SEQ ID NO: 650872 - DNA, 19 bp, Mus musculus
  siRNA target sequence for Copb1 (NM_033370.2,342-360).
caggatcacaccatcaaaa

SEQ ID NO: 650873 - DNA, 19 bp, Mus musculus
  siRNA target sequence for Copb1 (NM_033370.2,345-363).
gatcacaccatcaaaaagt

SEQ ID NO: 650874 - DNA, 19 bp, Mus musculus
  siRNA target sequence for Copb1 (NM_033370.2,371-389).
ggtcttctgggagattgtt

SEQ ID NO: 650875 - DNA, 19 bp, Mus musculus
  siRNA target sequence for Copb1 (NM_033370.2,381-399).
gagattgttcctaaaacaa

SEQ ID NO: 650876 - DNA, 19 bp, Mus musculus
  siRNA target sequence for Copb1 (NM_033370.2,403-421).
cagatggaaggctcttaca

SEQ ID NO: 650877 - DNA, 19 bp, Mus musculus
  siRNA target sequence for Copb1 (NM_033370.2,412-430).
ggctcttacatgaaatgat

SEQ ID NO: 650878 - DNA, 19 bp, Mus musculus
  siRNA target sequence for Copb1 (NM_033370.2,461-479).
ccagcaccccaatgagttt

SEQ ID NO: 650879 - DNA, 19 bp, Mus musculus
  siRNA target sequence for Copb1 (NM_033370.2,462-480).
cagcaccccaatgagttta

SEQ ID NO: 650880 - DNA, 19 bp, Mus musculus
  siRNA target sequence for Copb1 (NM_033370.2,467-485).
ccccaatgagtttattcgt

SEQ ID NO: 650881 - DNA, 19 bp, Mus musculus
  siRNA target sequence for Copb1 (NM_033370.2,476-494).
gtttattcgtggatctact

SEQ ID NO: 650882 - DNA, 19 bp, Mus musculus
  siRNA target sequence for Copb1 (NM_033370.2,484-502).
gtggatctactcttcgttt

SEQ ID NO: 650883 - DNA, 19 bp, Mus musculus
  siRNA target sequence for Copb1 (NM_033370.2,498-516).
cgtttcctttgcaaattga

SEQ ID NO: 650884 - DNA, 19 bp, Mus musculus
  siRNA target sequence for Copb1 (NM_033370.2,523-541).
cagaattgctggaaccttt

SEQ ID NO: 650885 - DNA, 19 bp, Mus musculus
  siRNA target sequence for Copb1 (NM_033370.2,578-596).
cagctatgttaggagaaat

SEQ ID NO: 650886 - DNA, 19 bp, Mus musculus
  siRNA target sequence for Copb1 (NM_033370.2,652-670).
ctcctgaactgatacatga

SEQ ID NO: 650887 - DNA, 19 bp, Mus musculus
  siRNA target sequence for Copb1 (NM_033370.2,689-707).
ggatgcaagctgcaaaaga

SEQ ID NO: 650888 - DNA, 19 bp, Mus musculus
  siRNA target sequence for Copb1 (NM_033370.2,712-730).
catttatgatgctaattca

SEQ ID NO: 650889 - DNA, 19 bp, Mus musculus
  siRNA target sequence for Copb1 (NM_033370.2,740-758).
ggatcgagctttggattat

SEQ ID NO: 650890 - DNA, 19 bp, Mus musculus
  siRNA target sequence for Copb1 (NM_033370.2,741-759).
gatcgagctttggattatt

SEQ ID NO: 650891 - DNA, 19 bp, Mus musculus
  siRNA target sequence for Copb1 (NM_033370.2,747-765).
gctttggattatttaagta

SEQ ID NO: 650892 - DNA, 19 bp, Mus musculus
  siRNA target sequence for Copb1 (NM_033370.2,752-770).
ggattatttaagtacatgt

SEQ ID NO: 650893 - DNA, 19 bp, Mus musculus
  siRNA target sequence for Copb1 (NM_033370.2,753-771).
gattatttaagtacatgta

SEQ ID NO: 650894 - DNA, 19 bp, Mus musculus
  siRNA target sequence for Copb1 (NM_033370.2,763-781).
gtacatgtattgatcaagt

SEQ ID NO: 650895 - DNA, 19 bp, Mus musculus
  siRNA target sequence for Copb1 (NM_033370.2,806-824).
gttggttattgttgaacta

SEQ ID NO: 650896 - DNA, 19 bp, Mus musculus
  siRNA target sequence for Copb1 (NM_033370.2,810-828).
gttattgttgaactaattt

SEQ ID NO: 650897 - DNA, 19 bp, Mus musculus
  siRNA target sequence for Copb1 (NM_033370.2,833-851).
ggtctgtcatgctaatcca

SEQ ID NO: 650898 - DNA, 19 bp, Mus musculus
  siRNA target sequence for Copb1 (NM_033370.2,864-882).
cgcttcattcgctgtatct

SEQ ID NO: 650899 - DNA, 19 bp, Mus musculus
  siRNA target sequence for Copb1 (NM_033370.2,874-892).
gctgtatctataacttact

SEQ ID NO: 650900 - DNA, 19 bp, Mus musculus
  siRNA target sequence for Copb1 (NM_033370.2,887-905).
cttactgcagtcatctagt

SEQ ID NO: 650901 - DNA, 19 bp, Mus musculus
  siRNA target sequence for Copb1 (NM_033370.2,901-919).
ctagtcctgctgtaaaata

SEQ ID NO: 650902 - DNA, 19 bp, Mus musculus
  siRNA target sequence for Copb1 (NM_033370.2,952-970).
gtgcaccaactgcaataaa

SEQ ID NO: 650903 - DNA, 19 bp, Mus musculus
  siRNA target sequence for Copb1 (NM_033370.2,983-1001).
gtgttacattgatttaatt

SEQ ID NO: 650904 - DNA, 19 bp, Mus musculus
  siRNA target sequence for Copb1 (NM_033370.2,1007-1025).
ggagagtgataacaatgta

SEQ ID NO: 650905 - DNA, 19 bp, Mus musculus
  siRNA target sequence for Copb1 (NM_033370.2,1040-1058).
ggaccgcttggtggaatta

SEQ ID NO: 650906 - DNA, 19 bp, Mus musculus
  siRNA target sequence for Copb1 (NM_033370.2,1041-1059).
gaccgcttggtggaattaa

SEQ ID NO: 650907 - DNA, 19 bp, Mus musculus
  siRNA target sequence for Copb1 (NM_033370.2,1121-1139).
gagtacgccagacttagaa

SEQ ID NO: 650908 - DNA, 19 bp, Mus musculus
  siRNA target sequence for Copb1 (NM_033370.2,1123-1141).
gtacgccagacttagaagt

SEQ ID NO: 650909 - DNA, 19 bp, Mus musculus
  siRNA target sequence for Copb1 (NM_033370.2,1178-1196).
ctcatctaggaatgttgaa

SEQ ID NO: 650910 - DNA, 19 bp, Mus musculus
  siRNA target sequence for Copb1 (NM_033370.2,1180-1198).
catctaggaatgttgaaga

SEQ ID NO: 650911 - DNA, 19 bp, Mus musculus
  siRNA target sequence for Copb1 (NM_033370.2,1220-1238).
ggaagtaattaaaacaaat

SEQ ID NO: 650912 - DNA, 19 bp, Mus musculus
  siRNA target sequence for Copb1 (NM_033370.2,1251-1269).
catgaagacactgacaaat

SEQ ID NO: 650913 - DNA, 19 bp, Mus musculus
  siRNA target sequence for Copb1 (NM_033370.2,1306-1324).
ctgtccgatttccagatat

SEQ ID NO: 650914 - DNA, 19 bp, Mus musculus
  siRNA target sequence for Copb1 (NM_033370.2,1342-1360).
ctgtgttaatggaatttct

SEQ ID NO: 650915 - DNA, 19 bp, Mus musculus
  siRNA target sequence for Copb1 (NM_033370.2,1344-1362).
gtgttaatggaatttctca

SEQ ID NO: 650916 - DNA, 19 bp, Mus musculus
  siRNA target sequence for Copb1 (NM_033370.2,1413-1431).
gccattcagcgctttgaca

SEQ ID NO: 650917 - DNA, 19 bp, Mus musculus
  siRNA target sequence for Copb1 (NM_033370.2,1467-1485).
gtcttccatgctattaagt

SEQ ID NO: 650918 - DNA, 19 bp, Mus musculus
  siRNA target sequence for Copb1 (NM_033370.2,1585-1603).
gggagataccaattgtaga

SEQ ID NO: 650919 - DNA, 19 bp, Mus musculus
  siRNA target sequence for Copb1 (NM_033370.2,1589-1607).
gataccaattgtagaatca

SEQ ID NO: 650920 - DNA, 19 bp, Mus musculus
  siRNA target sequence for Copb1 (NM_033370.2,1662-1680).
cccgttcagaaattggtta

SEQ ID NO: 650921 - DNA, 19 bp, Mus musculus
  siRNA target sequence for Copb1 (NM_033370.2,1683-1701).
gagatgggcacctatgcta

SEQ ID NO: 650922 - DNA, 19 bp, Mus musculus
  siRNA target sequence for Copb1 (NM_033370.2,1770-1788).
ctcctggatggagatttct

SEQ ID NO: 650923 - DNA, 19 bp, Mus musculus
  siRNA target sequence for Copb1 (NM_033370.2,1823-1841).
gattgcattgcgctatgta

SEQ ID NO: 650924 - DNA, 19 bp, Mus musculus
  siRNA target sequence for Copb1 (NM_033370.2,1921-1939).
gaaaatcctctcttcctaa

SEQ ID NO: 650925 - DNA, 19 bp, Mus musculus
  siRNA target sequence for Copb1 (NM_033370.2,1936-1954).
ctaagaagccaattactga

SEQ ID NO: 650926 - DNA, 19 bp, Mus musculus
  siRNA target sequence for Copb1 (NM_033370.2,1940-1958).
gaagccaattactgatgat

SEQ ID NO: 650927 - DNA, 19 bp, Mus musculus
  siRNA target sequence for Copb1 (NM_033370.2,1956-1974).
gatgatgtagatcgaattt

SEQ ID NO: 650928 - DNA, 19 bp, Mus musculus
  siRNA target sequence for Copb1 (NM_033370.2,1979-1997).
gtgcctcaaggtcttatct

SEQ ID NO: 650929 - DNA, 19 bp, Mus musculus
  siRNA target sequence for Copb1 (NM_033370.2,1981-1999).
gcctcaaggtcttatctga

SEQ ID NO: 650930 - DNA, 19 bp, Mus musculus
  siRNA target sequence for Copb1 (NM_033370.2,1982-2000).
cctcaaggtcttatctgaa

SEQ ID NO: 650931 - DNA, 19 bp, Mus musculus
  siRNA target sequence for Copb1 (NM_033370.2,1983-2001).
ctcaaggtcttatctgaat

SEQ ID NO: 650932 - DNA, 19 bp, Mus musculus
  siRNA target sequence for Copb1 (NM_033370.2,2043-2061).
cagtctctttcccaaatgt

SEQ ID NO: 650933 - DNA, 19 bp, Mus musculus
  siRNA target sequence for Copb1 (NM_033370.2,2133-2151).
cctgatgaccccatttcct

SEQ ID NO: 650934 - DNA, 19 bp, Mus musculus
  siRNA target sequence for Copb1 (NM_033370.2,2134-2152).
ctgatgaccccatttcctt

SEQ ID NO: 650935 - DNA, 19 bp, Mus musculus
  siRNA target sequence for Copb1 (NM_033370.2,2156-2174).
gcaactaactgcgaagaat

SEQ ID NO: 650936 - DNA, 19 bp, Mus musculus
  siRNA target sequence for Copb1 (NM_033370.2,2160-2178).
ctaactgcgaagaatgaaa

SEQ ID NO: 650937 - DNA, 19 bp, Mus musculus
  siRNA target sequence for Copb1 (NM_033370.2,2216-2234).
ggcagcaatgggtaatact

SEQ ID NO: 650938 - DNA, 19 bp, Mus musculus
  siRNA target sequence for Copb1 (NM_033370.2,2256-2274).
cccctagcatccaaactta

SEQ ID NO: 650939 - DNA, 19 bp, Mus musculus
  siRNA target sequence for Copb1 (NM_033370.2,2259-2277).
ctagcatccaaacttaaca

SEQ ID NO: 650940 - DNA, 19 bp, Mus musculus
  siRNA target sequence for Copb1 (NM_033370.2,2297-2315).
cttctcggatccagtgtat

SEQ ID NO: 650941 - DNA, 19 bp, Mus musculus
  siRNA target sequence for Copb1 (NM_033370.2,2312-2330).
gtatgcagaagcctatgtt

SEQ ID NO: 650942 - DNA, 19 bp, Mus musculus
  siRNA target sequence for Copb1 (NM_033370.2,2323-2341).
cctatgttcatgtcaatca

SEQ ID NO: 650943 - DNA, 19 bp, Mus musculus
  siRNA target sequence for Copb1 (NM_033370.2,2416-2434).
ccactctaggggatctgaa

SEQ ID NO: 650944 - DNA, 19 bp, Mus musculus
  siRNA target sequence for Copb1 (NM_033370.2,2469-2487).
cctcatgactttgcaaata

SEQ ID NO: 650945 - DNA, 19 bp, Mus musculus
  siRNA target sequence for Copb1 (NM_033370.2,2482-2500).
caaatattaaagctaatgt

SEQ ID NO: 650946 - DNA, 19 bp, Mus musculus
  siRNA target sequence for Copb1 (NM_033370.2,2512-2530).
caacagaaaacggaataat

SEQ ID NO: 650947 - DNA, 19 bp, Mus musculus
  siRNA target sequence for Copb1 (NM_033370.2,2660-2678).
gatgtgggccgaatttgaa

SEQ ID NO: 650948 - DNA, 19 bp, Mus musculus
  siRNA target sequence for Copb1 (NM_033370.2,2669-2687).
cgaatttgaatgggaaaat

SEQ ID NO: 650949 - DNA, 19 bp, Mus musculus
  siRNA target sequence for Copb1 (NM_033370.2,2713-2731).
ctgacctgaatgactactt

SEQ ID NO: 650950 - DNA, 19 bp, Mus musculus
  siRNA target sequence for Copb1 (NM_033370.2,2742-2760).
ctcaagtcgaccaacatga

SEQ ID NO: 650951 - DNA, 19 bp, Mus musculus
  siRNA target sequence for Copb1 (NM_033370.2,2801-2819).
ctttatggcagccaatctt

SEQ ID NO: 650952 - DNA, 19 bp, Mus musculus
  siRNA target sequence for Copb1 (NM_033370.2,2807-2825).
ggcagccaatctttatgca

SEQ ID NO: 650953 - DNA, 19 bp, Mus musculus
  siRNA target sequence for Copb1 (NM_033370.2,2817-2835).
ctttatgcacgttctatat

SEQ ID NO: 650954 - DNA, 19 bp, Mus musculus
  siRNA target sequence for Copb1 (NM_033370.2,2898-2916).
gccgttactggccatataa

SEQ ID NO: 650955 - DNA, 19 bp, Mus musculus
  siRNA target sequence for Copb1 (NM_033370.2,2900-2918).
cgttactggccatataaga

SEQ ID NO: 650956 - DNA, 19 bp, Mus musculus
  siRNA target sequence for Copb1 (NM_033370.2,2901-2919).
gttactggccatataagaa

SEQ ID NO: 650957 - DNA, 19 bp, Mus musculus
  siRNA target sequence for Copb1 (NM_033370.2,2976-2994).
caaaagaagactagtctat

SEQ ID NO: 650958 - DNA, 19 bp, Mus musculus
  siRNA target sequence for Copb2 (NM_015827.1,96-114).
ctcttcgacttgacatcaa

SEQ ID NO: 650959 - DNA, 19 bp, Mus musculus
  siRNA target sequence for Copb2 (NM_015827.1,98-116).
cttcgacttgacatcaaga

SEQ ID NO: 650960 - DNA, 19 bp, Mus musculus
  siRNA target sequence for Copb2 (NM_015827.1,101-119).
cgacttgacatcaagagaa

SEQ ID NO: 650961 - DNA, 19 bp, Mus musculus
  siRNA target sequence for Copb2 (NM_015827.1,129-147).
ctaggtctgaccgagttaa

SEQ ID NO: 650962 - DNA, 19 bp, Mus musculus
  siRNA target sequence for Copb2 (NM_015827.1,141-159).
gagttaagagcgtggattt

SEQ ID NO: 650963 - DNA, 19 bp, Mus musculus
  siRNA target sequence for Copb2 (NM_015827.1,181-199).
gttggctagtctttacaat

SEQ ID NO: 650964 - DNA, 19 bp, Mus musculus
  siRNA target sequence for Copb2 (NM_015827.1,244-262).
gacgtttgaagtatgtgat

SEQ ID NO: 650965 - DNA, 19 bp, Mus musculus
  siRNA target sequence for Copb2 (NM_015827.1,312-330).
caggagcagacgatatgca

SEQ ID NO: 650966 - DNA, 19 bp, Mus musculus
  siRNA target sequence for Copb2 (NM_015827.1,328-346).
gcagatcagagtgttcaat

SEQ ID NO: 650967 - DNA, 19 bp, Mus musculus
  siRNA target sequence for Copb2 (NM_015827.1,329-347).
cagatcagagtgttcaatt

SEQ ID NO: 650968 - DNA, 19 bp, Mus musculus
  siRNA target sequence for Copb2 (NM_015827.1,331-349).
gatcagagtgttcaattat

SEQ ID NO: 650969 - DNA, 19 bp, Mus musculus
  siRNA target sequence for Copb2 (NM_015827.1,356-374).
ctggagagggtgcatatgt

SEQ ID NO: 650970 - DNA, 19 bp, Mus musculus
  siRNA target sequence for Copb2 (NM_015827.1,377-395).
gaagcacactcggattaca

SEQ ID NO: 650971 - DNA, 19 bp, Mus musculus
  siRNA target sequence for Copb2 (NM_015827.1,383-401).
cactcggattacattcgtt

SEQ ID NO: 650972 - DNA, 19 bp, Mus musculus
  siRNA target sequence for Copb2 (NM_015827.1,387-405).
cggattacattcgttgtat

SEQ ID NO: 650973 - DNA, 19 bp, Mus musculus
  siRNA target sequence for Copb2 (NM_015827.1,417-435).
ccacccagccgttcattct

SEQ ID NO: 650974 - DNA, 19 bp, Mus musculus
  siRNA target sequence for Copb2 (NM_015827.1,444-462).
gtgatgacatgcttattaa

SEQ ID NO: 650975 - DNA, 19 bp, Mus musculus
  siRNA target sequence for Copb2 (NM_015827.1,489-507).
cttgttcacaagtgtttga

SEQ ID NO: 650976 - DNA, 19 bp, Mus musculus
  siRNA target sequence for Copb2 (NM_015827.1,509-527).
ggacacacgcactacgtta

SEQ ID NO: 650977 - DNA, 19 bp, Mus musculus
  siRNA target sequence for Copb2 (NM_015827.1,510-528).
gacacacgcactacgttat

SEQ ID NO: 650978 - DNA, 19 bp, Mus musculus
  siRNA target sequence for Copb2 (NM_015827.1,523-541).
cgttatgcagattgtgata

SEQ ID NO: 650979 - DNA, 19 bp, Mus musculus
  siRNA target sequence for Copb2 (NM_015827.1,641-659).
catgaaaaaggcgtgaatt

SEQ ID NO: 650980 - DNA, 19 bp, Mus musculus
  siRNA target sequence for Copb2 (NM_015827.1,650-668).
ggcgtgaattgcattgact

SEQ ID NO: 650981 - DNA, 19 bp, Mus musculus
  siRNA target sequence for Copb2 (NM_015827.1,651-669).
gcgtgaattgcattgacta

SEQ ID NO: 650982 - DNA, 19 bp, Mus musculus
  siRNA target sequence for Copb2 (NM_015827.1,708-726).
cagatgaccggcttgttaa

SEQ ID NO: 650983 - DNA, 19 bp, Mus musculus
  siRNA target sequence for Copb2 (NM_015827.1,710-728).
gatgaccggcttgttaaaa

SEQ ID NO: 650984 - DNA, 19 bp, Mus musculus
  siRNA target sequence for Copb2 (NM_015827.1,713-731).
gaccggcttgttaaaatat

SEQ ID NO: 650985 - DNA, 19 bp, Mus musculus
  siRNA target sequence for Copb2 (NM_015827.1,770-788).
gggcatgcccagaatgtgt

SEQ ID NO: 650986 - DNA, 19 bp, Mus musculus
  siRNA target sequence for Copb2 (NM_015827.1,848-866).
gtgcgaatctggcattcta

SEQ ID NO: 650987 - DNA, 19 bp, Mus musculus
  siRNA target sequence for Copb2 (NM_015827.1,878-896).
cttgagagcacgctgaatt

SEQ ID NO: 650988 - DNA, 19 bp, Mus musculus
  siRNA target sequence for Copb2 (NM_015827.1,949-967).
cgctctgggctatgatgaa

SEQ ID NO: 650989 - DNA, 19 bp, Mus musculus
  siRNA target sequence for Copb2 (NM_015827.1,970-988).
gagcatcattgttaagctt

SEQ ID NO: 650990 - DNA, 19 bp, Mus musculus
  siRNA target sequence for Copb2 (NM_015827.1,1110-1128).
gattgccactggcagtaaa

SEQ ID NO: 650991 - DNA, 19 bp, Mus musculus
  siRNA target sequence for Copb2 (NM_015827.1,1132-1150).
catgggcagttgtgaaata

SEQ ID NO: 650992 - DNA, 19 bp, Mus musculus
  siRNA target sequence for Copb2 (NM_015827.1,1162-1180).
cattcagcacaatcctaat

SEQ ID NO: 650993 - DNA, 19 bp, Mus musculus
  siRNA target sequence for Copb2 (NM_015827.1,1202-1220).
ggtgatggggagtatatca

SEQ ID NO: 650994 - DNA, 19 bp, Mus musculus
  siRNA target sequence for Copb2 (NM_015827.1,1203-1221).
gtgatggggagtatatcat

SEQ ID NO: 650995 - DNA, 19 bp, Mus musculus
  siRNA target sequence for Copb2 (NM_015827.1,1208-1226).
ggggagtatatcatctaca

SEQ ID NO: 650996 - DNA, 19 bp, Mus musculus
  siRNA target sequence for Copb2 (NM_015827.1,1274-1292).
gcatgggcccacgattctt

SEQ ID NO: 650997 - DNA, 19 bp, Mus musculus
  siRNA target sequence for Copb2 (NM_015827.1,1282-1300).
ccacgattcttcagagtat

SEQ ID NO: 650998 - DNA, 19 bp, Mus musculus
  siRNA target sequence for Copb2 (NM_015827.1,1293-1311).
cagagtatgcaataagaga

SEQ ID NO: 650999 - DNA, 19 bp, Mus musculus
  siRNA target sequence for Copb2 (NM_015827.1,1310-1328).
gaaagcaacagtattgtaa

SEQ ID NO: 651000 - DNA, 19 bp, Mus musculus
  siRNA target sequence for Copb2 (NM_015827.1,1315-1333).
caacagtattgtaaagata

SEQ ID NO: 651001 - DNA, 19 bp, Mus musculus
  siRNA target sequence for Copb2 (NM_015827.1,1318-1336).
cagtattgtaaagatattt

SEQ ID NO: 651002 - DNA, 19 bp, Mus musculus
  siRNA target sequence for Copb2 (NM_015827.1,1427-1445).
ggcttagccttctatgact

SEQ ID NO: 651003 - DNA, 19 bp, Mus musculus
  siRNA target sequence for Copb2 (NM_015827.1,1446-1464).
gggagaatactgaactcat

SEQ ID NO: 651004 - DNA, 19 bp, Mus musculus
  siRNA target sequence for Copb2 (NM_015827.1,1460-1478).
ctcatccgcagaattgaaa

SEQ ID NO: 651005 - DNA, 19 bp, Mus musculus
  siRNA target sequence for Copb2 (NM_015827.1,1462-1480).
catccgcagaattgaaatt

SEQ ID NO: 651006 - DNA, 19 bp, Mus musculus
  siRNA target sequence for Copb2 (NM_015827.1,1481-1499).
cagcccaagcacatcttct

SEQ ID NO: 651007 - DNA, 19 bp, Mus musculus
  siRNA target sequence for Copb2 (NM_015827.1,1528-1546).
cgccaccgaggagtcattt

SEQ ID NO: 651008 - DNA, 19 bp, Mus musculus
  siRNA target sequence for Copb2 (NM_015827.1,1531-1549).
caccgaggagtcatttttt

SEQ ID NO: 651009 - DNA, 19 bp, Mus musculus
  siRNA target sequence for Copb2 (NM_015827.1,1593-1611).
cacatgagggagttactga

SEQ ID NO: 651010 - DNA, 19 bp, Mus musculus
  siRNA target sequence for Copb2 (NM_015827.1,1644-1662).
gtgaaattcaggaaattgt

SEQ ID NO: 651011 - DNA, 19 bp, Mus musculus
  siRNA target sequence for Copb2 (NM_015827.1,1685-1703).
gactgcttcatttacacaa

SEQ ID NO: 651012 - DNA, 19 bp, Mus musculus
  siRNA target sequence for Copb2 (NM_015827.1,1707-1725).
ctgtgaacagattaaacta

SEQ ID NO: 651013 - DNA, 19 bp, Mus musculus
  siRNA target sequence for Copb2 (NM_015827.1,1730-1748).
gtgggaggagagatagtca

SEQ ID NO: 651014 - DNA, 19 bp, Mus musculus
  siRNA target sequence for Copb2 (NM_015827.1,1762-1780).
ggacaggacaatgtatctt

SEQ ID NO: 651015 - DNA, 19 bp, Mus musculus
  siRNA target sequence for Copb2 (NM_015827.1,1778-1796).
cttctgggctatattccaa

SEQ ID NO: 651016 - DNA, 19 bp, Mus musculus
  siRNA target sequence for Copb2 (NM_015827.1,1816-1834).
gggggataaggaattgaat

SEQ ID NO: 651017 - DNA, 19 bp, Mus musculus
  siRNA target sequence for Copb2 (NM_015827.1,1818-1836).
gggataaggaattgaatat

SEQ ID NO: 651018 - DNA, 19 bp, Mus musculus
  siRNA target sequence for Copb2 (NM_015827.1,1883-1901).
gtcatgcggagggatttta

SEQ ID NO: 651019 - DNA, 19 bp, Mus musculus
  siRNA target sequence for Copb2 (NM_015827.1,1921-1939).
ccctaccatccccaaagaa

SEQ ID NO: 651020 - DNA, 19 bp, Mus musculus
  siRNA target sequence for Copb2 (NM_015827.1,1945-1963).
gaccagagttgcacacttt

SEQ ID NO: 651021 - DNA, 19 bp, Mus musculus
  siRNA target sequence for Copb2 (NM_015827.1,1950-1968).
gagttgcacactttttgga

SEQ ID NO: 651022 - DNA, 19 bp, Mus musculus
  siRNA target sequence for Copb2 (NM_015827.1,2007-2025).
cagatcctgaacatcgttt

SEQ ID NO: 651023 - DNA, 19 bp, Mus musculus
  siRNA target sequence for Copb2 (NM_015827.1,2045-2063).
ggagagttgaaaattgctt

SEQ ID NO: 651024 - DNA, 19 bp, Mus musculus
  siRNA target sequence for Copb2 (NM_015827.1,2046-2064).
gagagttgaaaattgctta

SEQ ID NO: 651025 - DNA, 19 bp, Mus musculus
  siRNA target sequence for Copb2 (NM_015827.1,2111-2129).
gctgaacttgccattagta

SEQ ID NO: 651026 - DNA, 19 bp, Mus musculus
  siRNA target sequence for Copb2 (NM_015827.1,2164-2182).
ccatgctcaggattatggt

SEQ ID NO: 651027 - DNA, 19 bp, Mus musculus
  siRNA target sequence for Copb2 (NM_015827.1,2205-2223).
cttctggaaatgctagtat

SEQ ID NO: 651028 - DNA, 19 bp, Mus musculus
  siRNA target sequence for Copb2 (NM_015827.1,2247-2265).
cggagagagacggcaaaaa

SEQ ID NO: 651029 - DNA, 19 bp, Mus musculus
  siRNA target sequence for Copb2 (NM_015827.1,2248-2266).
ggagagagacggcaaaaat

SEQ ID NO: 651030 - DNA, 19 bp, Mus musculus
  siRNA target sequence for Copb2 (NM_015827.1,2253-2271).
gagacggcaaaaataacgt

SEQ ID NO: 651031 - DNA, 19 bp, Mus musculus
  siRNA target sequence for Copb2 (NM_015827.1,2315-2333).
ctagagctcttgatcagaa

SEQ ID NO: 651032 - DNA, 19 bp, Mus musculus
  siRNA target sequence for Copb2 (NM_015827.1,2359-2377).
cctggcccgaacttactta

SEQ ID NO: 651033 - DNA, 19 bp, Mus musculus
  siRNA target sequence for Copb2 (NM_015827.1,2479-2497).
ccttttccctggattaaaa

SEQ ID NO: 651034 - DNA, 19 bp, Mus musculus
  siRNA target sequence for Copb2 (NM_015827.1,2565-2583).
ctcttgtcacgccaaatga

SEQ ID NO: 651035 - DNA, 19 bp, Mus musculus
  siRNA target sequence for Copb2 (NM_015827.1,2644-2662).
ggaacctgatggaaaacct

SEQ ID NO: 651036 - DNA, 19 bp, Mus musculus
  siRNA target sequence for Copb2 (NM_015827.1,2726-2744).
ctagaagttgatttggata

SEQ ID NO: 651037 - DNA, 19 bp, Mus musculus
  siRNA target sequence for Copb2 (NM_015827.1,2735-2753).
gatttggataacttggaat

SEQ ID NO: 651038 - DNA, 19 bp, Mus musculus
  siRNA target sequence for Cope (NM_021538.1,57-75).
gctccggagaggtagatga

SEQ ID NO: 651039 - DNA, 19 bp, Mus musculus
  siRNA target sequence for Cope (NM_021538.1,897-915).
ccaaggagaacgatttcga

SEQ ID NO: 651040 - DNA, 19 bp, Mus musculus
  siRNA target sequence for Cope (NM_021538.1,898-916).
caaggagaacgatttcgat

SEQ ID NO: 651041 - DNA, 19 bp, Mus musculus
  siRNA target sequence for Copg2 (NM_017478.2,96-114).
gtctggtagtggttccaat

SEQ ID NO: 651042 - DNA, 19 bp, Mus musculus
  siRNA target sequence for Copz1 (NM_019817.1,162-180).
ccatcggacggatagtgaa

SEQ ID NO: 651043 - DNA, 19 bp, Mus musculus
  siRNA target sequence for Copz2 (NM_019877.1,148-166).
ggctgtcttcatcttagat

SEQ ID NO: 651044 - DNA, 19 bp, Mus musculus
  siRNA target sequence for Copz2 (NM_019877.1,149-167).
gctgtcttcatcttagata

SEQ ID NO: 651045 - DNA, 19 bp, Mus musculus
  siRNA target sequence for Copz2 (NM_019877.1,193-211).
gtattatgacgacacattt

SEQ ID NO: 651046 - DNA, 19 bp, Mus musculus
  siRNA target sequence for Copz2 (NM_019877.1,229-247).
gatggttttcgagaaaaat

SEQ ID NO: 651047 - DNA, 19 bp, Mus musculus
  siRNA target sequence for Copz2 (NM_019877.1,233-251).
gttttcgagaaaaatgtct

SEQ ID NO: 651048 - DNA, 19 bp, Mus musculus
  siRNA target sequence for Copz2 (NM_019877.1,261-279).
ccagccgcaccgaaagtga

SEQ ID NO: 651049 - DNA, 19 bp, Mus musculus
  siRNA target sequence for Copz2 (NM_019877.1,262-280).
cagccgcaccgaaagtgaa

SEQ ID NO: 651050 - DNA, 19 bp, Mus musculus
  siRNA target sequence for Copz2 (NM_019877.1,264-282).
gccgcaccgaaagtgaaat

SEQ ID NO: 651051 - DNA, 19 bp, Mus musculus
  siRNA target sequence for Copz2 (NM_019877.1,265-283).
ccgcaccgaaagtgaaatt

SEQ ID NO: 651052 - DNA, 19 bp, Mus musculus
  siRNA target sequence for Copz2 (NM_019877.1,297-315).
gcatgactatcgtctacaa

SEQ ID NO: 651053 - DNA, 19 bp, Mus musculus
  siRNA target sequence for Copz2 (NM_019877.1,532-550).
gatccagaaagtgaatttt

SEQ ID NO: 651054 - DNA, 19 bp, Mus musculus
  siRNA target sequence for Copz2 (NM_019877.1,582-600).
gtgtggcccaggttcttca

SEQ ID NO: 651055 - DNA, 19 bp, Mus musculus
  siRNA target sequence for E430013M20Rik (NM_178672.3,768-786).
ctgctgctgtacatcagat

SEQ ID NO: 651056 - DNA, 19 bp, Mus musculus
  siRNA target sequence for E430013M20Rik (NM_178672.3,826-844).
gggtacgagaggagtgttt

SEQ ID NO: 651057 - DNA, 19 bp, Mus musculus
  siRNA target sequence for E430013M20Rik (NM_178672.3,873-891).
gctacagatctggcaaatt

SEQ ID NO: 651058 - DNA, 19 bp, Mus musculus
  siRNA target sequence for E430013M20Rik (NM_178672.3,1248-1266).
ctgcccatcaagatgagta

SEQ ID NO: 651059 - DNA, 19 bp, Mus musculus
  siRNA target sequence for Epim (NM_007941.1,422-440).
gggcaagctgaagtctatt

SEQ ID NO: 651060 - DNA, 19 bp, Mus musculus
  siRNA target sequence for Epim (NM_007941.1,424-442).
gcaagctgaagtctattga

SEQ ID NO: 651061 - DNA, 19 bp, Mus musculus
  siRNA target sequence for Epim (NM_007941.1,464-482).
gaatgggaaccgaacttca

SEQ ID NO: 651062 - DNA, 19 bp, Mus musculus
  siRNA target sequence for Epim (NM_007941.1,483-501).
gtggatctgcggatacgaa

SEQ ID NO: 651063 - DNA, 19 bp, Mus musculus
  siRNA target sequence for Epim (NM_007941.1,515-533).
ggtgctgtcacggaagttt

SEQ ID NO: 651064 - DNA, 19 bp, Mus musculus
  siRNA target sequence for Epim (NM_007941.1,534-552).
gtggacgtcatgacagaat

SEQ ID NO: 651065 - DNA, 19 bp, Mus musculus
  siRNA target sequence for Epim (NM_007941.1,539-557).
cgtcatgacagaatacaat

SEQ ID NO: 651066 - DNA, 19 bp, Mus musculus
  siRNA target sequence for Epim (NM_007941.1,572-590).
gttccgggagcgaagcaaa

SEQ ID NO: 651067 - DNA, 19 bp, Mus musculus
  siRNA target sequence for Epim (NM_007941.1,667-685).
ggaagccgtccatcttcat

SEQ ID NO: 651068 - DNA, 19 bp, Mus musculus
  siRNA target sequence for Epim (NM_007941.1,677-695).
catcttcatctcggatatt

SEQ ID NO: 651069 - DNA, 19 bp, Mus musculus
  siRNA target sequence for Epim (NM_007941.1,683-701).
catctcggatattatatca

SEQ ID NO: 651070 - DNA, 19 bp, Mus musculus
  siRNA target sequence for Epim (NM_007941.1,686-704).
ctcggatattatatcagat

SEQ ID NO: 651071 - DNA, 19 bp, Mus musculus
  siRNA target sequence for Epim (NM_007941.1,689-707).
ggatattatatcagattca

SEQ ID NO: 651072 - DNA, 19 bp, Mus musculus
  siRNA target sequence for Epim (NM_007941.1,715-733).
ctaggcaagctctcaatga

SEQ ID NO: 651073 - DNA, 19 bp, Mus musculus
  siRNA target sequence for Epim (NM_007941.1,738-756).
gagtcccgccacaaagaca

SEQ ID NO: 651074 - DNA, 19 bp, Mus musculus
  siRNA target sequence for Epim (NM_007941.1,742-760).
cccgccacaaagacatcat

SEQ ID NO: 651075 - DNA, 19 bp, Mus musculus
  siRNA target sequence for Epim (NM_007941.1,832-850).
gtgaaatggtcaacaacat

SEQ ID NO: 651076 - DNA, 19 bp, Mus musculus
  siRNA target sequence for Epim (NM_007941.1,861-879).
gtggtgaactctgtagatt

SEQ ID NO: 651077 - DNA, 19 bp, Mus musculus
  siRNA target sequence for Epim (NM_007941.1,904-922).
cgaagaaagccatcaaata

SEQ ID NO: 651078 - DNA, 19 bp, Mus musculus
  siRNA target sequence for Epim (NM_007941.1,938-956).
gcggaaaaagtggataatt

SEQ ID NO: 651079 - DNA, 19 bp, Mus musculus
  siRNA target sequence for Exo70 (NM_016857.1,229-247).
gtggagaagacgttatcct

SEQ ID NO: 651080 - DNA, 19 bp, Mus musculus
  siRNA target sequence for Exo70 (NM_016857.1,317-335).
caggtaggctggaagagta

SEQ ID NO: 651081 - DNA, 19 bp, Mus musculus
  siRNA target sequence for Exo70 (NM_016857.1,341-359).
gaagtatggccaaaatcca

SEQ ID NO: 651082 - DNA, 19 bp, Mus musculus
  siRNA target sequence for Exo70 (NM_016857.1,370-388).
gagtattttcaggacaata

SEQ ID NO: 651083 - DNA, 19 bp, Mus musculus
  siRNA target sequence for Exo70 (NM_016857.1,396-414).
cagcccagaactcaacaaa

SEQ ID NO: 651084 - DNA, 19 bp, Mus musculus
  siRNA target sequence for Exo70 (NM_016857.1,629-647).
gtcggaaccaagacttcat

SEQ ID NO: 651085 - DNA, 19 bp, Mus musculus
  siRNA target sequence for Exo70 (NM_016857.1,637-655).
caagacttcatgaatgtct

SEQ ID NO: 651086 - DNA, 19 bp, Mus musculus
  siRNA target sequence for Exo70 (NM_016857.1,696-714).
gggtctgaaggagcatttt

SEQ ID NO: 651087 - DNA, 19 bp, Mus musculus
  siRNA target sequence for Exo70 (NM_016857.1,706-724).
gagcattttcgcaaaagca

SEQ ID NO: 651088 - DNA, 19 bp, Mus musculus
  siRNA target sequence for Exo70 (NM_016857.1,1028-1046).
cctttgactccttgataca

SEQ ID NO: 651089 - DNA, 19 bp, Mus musculus
  siRNA target sequence for Exo70 (NM_016857.1,1429-1447).
gttcttggggacacataca

SEQ ID NO: 651090 - DNA, 19 bp, Mus musculus
  siRNA target sequence for Exo70 (NM_016857.1,1432-1450).
cttggggacacatacaata

SEQ ID NO: 651091 - DNA, 19 bp, Mus musculus
  siRNA target sequence for Exo70 (NM_016857.1,1437-1455).
ggacacatacaatattcct

SEQ ID NO: 651092 - DNA, 19 bp, Mus musculus
  siRNA target sequence for Exo70 (NM_016857.1,1438-1456).
gacacatacaatattcctt

SEQ ID NO: 651093 - DNA, 19 bp, Mus musculus
  siRNA target sequence for Exo70 (NM_016857.1,1440-1458).
cacatacaatattccttta

SEQ ID NO: 651094 - DNA, 19 bp, Mus musculus
  siRNA target sequence for Exo70 (NM_016857.1,1442-1460).
catacaatattcctttaga

SEQ ID NO: 651095 - DNA, 19 bp, Mus musculus
  siRNA target sequence for Exo70 (NM_016857.1,1547-1565).
gtaacctgcagctgaactt

SEQ ID NO: 651096 - DNA, 19 bp, Mus musculus
  siRNA target sequence for Exo70 (NM_016857.1,1604-1622).
gcgccatcttcctacacaa

SEQ ID NO: 651097 - DNA, 19 bp, Mus musculus
  siRNA target sequence for Exo70 (NM_016857.1,1615-1633).
ctacacaacaactacaatt

SEQ ID NO: 651098 - DNA, 19 bp, Mus musculus
  siRNA target sequence for Exo70 (NM_016857.1,1618-1636).
cacaacaactacaattaca

SEQ ID NO: 651099 - DNA, 19 bp, Mus musculus
  siRNA target sequence for Exo70 (NM_016857.1,1946-1964).
ctcagaaagacattgtcaa

SEQ ID NO: 651100 - DNA, 19 bp, Mus musculus
  siRNA target sequence for Exo70 (NM_016857.1,2000-2018).
gcgtgcccttcaccaaaaa

SEQ ID NO: 651101 - DNA, 19 bp, Mus musculus
  siRNA target sequence for Exo70 (NM_016857.1,2020-2038).
ccggagaaatacattaagt

SEQ ID NO: 651102 - DNA, 19 bp, Mus musculus
  siRNA target sequence for Gga1 (NM_145929.1,490-508).
gcagctcaacgaagacttt

SEQ ID NO: 651103 - DNA, 19 bp, Mus musculus
  siRNA target sequence for Gga1 (NM_145929.1,531-549).
gcttgctggcccacaagat

SEQ ID NO: 651104 - DNA, 19 bp, Mus musculus
  siRNA target sequence for Gga1 (NM_145929.1,763-781).
gcctgaggaggtgaagatt

SEQ ID NO: 651105 - DNA, 19 bp, Mus musculus
  siRNA target sequence for Gga1 (NM_145929.1,1518-1536).
gtgtggggtgggacaactt

SEQ ID NO: 651106 - DNA, 19 bp, Mus musculus
  siRNA target sequence for Gga1 (NM_145929.1,1879-1897).
gcccctggagtctatcaaa

SEQ ID NO: 651107 - DNA, 19 bp, Mus musculus
  siRNA target sequence for Gga1 (NM_145929.1,2033-2051).
cccatccggaacatcgttt

SEQ ID NO: 651108 - DNA, 19 bp, Mus musculus
  siRNA target sequence for Gga1 (NM_145929.1,2034-2052).
ccatccggaacatcgtttt

SEQ ID NO: 651109 - DNA, 19 bp, Mus musculus
  siRNA target sequence for Gga1 (NM_145929.1,2198-2216).
cgctacaagctcatcttca

SEQ ID NO: 651110 - DNA, 19 bp, Mus musculus
  siRNA target sequence for Gga3 (NM_173048.1,98-116).
gggaatatatcattggttt

SEQ ID NO: 651111 - DNA, 19 bp, Mus musculus
  siRNA target sequence for Gga3 (NM_173048.1,223-241).
gtgctggaggcgtgtatga

SEQ ID NO: 651112 - DNA, 19 bp, Mus musculus
  siRNA target sequence for Gga3 (NM_173048.1,229-247).
gaggcgtgtatgaagaact

SEQ ID NO: 651113 - DNA, 19 bp, Mus musculus
  siRNA target sequence for Gga3 (NM_173048.1,251-269).
gcaggagacttcataatga

SEQ ID NO: 651114 - DNA, 19 bp, Mus musculus
  siRNA target sequence for Gga3 (NM_173048.1,274-292).
gggaagttccggtttttga

SEQ ID NO: 651115 - DNA, 19 bp, Mus musculus
  siRNA target sequence for Gga3 (NM_173048.1,276-294).
gaagttccggtttttgaat

SEQ ID NO: 651116 - DNA, 19 bp, Mus musculus
  siRNA target sequence for Gga3 (NM_173048.1,307-325).
gtcgtctctccaaagtact

SEQ ID NO: 651117 - DNA, 19 bp, Mus musculus
  siRNA target sequence for Gga3 (NM_173048.1,361-379).
gtcatcgagttgcttttta

SEQ ID NO: 651118 - DNA, 19 bp, Mus musculus
  siRNA target sequence for Gga3 (NM_173048.1,392-410).
ccttgccggaagaagcaaa

SEQ ID NO: 651119 - DNA, 19 bp, Mus musculus
  siRNA target sequence for Gga3 (NM_173048.1,397-415).
ccggaagaagcaaagatca

SEQ ID NO: 651120 - DNA, 19 bp, Mus musculus
  siRNA target sequence for Gga3 (NM_173048.1,513-531).
caaaaaccccgtttttgat

SEQ ID NO: 651121 - DNA, 19 bp, Mus musculus
  siRNA target sequence for Gga3 (NM_173048.1,537-555).
ggagaaatccaagctttta

SEQ ID NO: 651122 - DNA, 19 bp, Mus musculus
  siRNA target sequence for Gga3 (NM_173048.1,598-616).
gccaacagactcatcaagt

SEQ ID NO: 651123 - DNA, 19 bp, Mus musculus
  siRNA target sequence for Gga3 (NM_173048.1,671-689).
cactggaggaggttaacaa

SEQ ID NO: 651124 - DNA, 19 bp, Mus musculus
  siRNA target sequence for Gga3 (NM_173048.1,778-796).
gatcgttgtgagaataaga

SEQ ID NO: 651125 - DNA, 19 bp, Mus musculus
  siRNA target sequence for Gga3 (NM_173048.1,795-813).
gaggcggacgctgtttaaa

SEQ ID NO: 651126 - DNA, 19 bp, Mus musculus
  siRNA target sequence for Gga3 (NM_173048.1,797-815).
ggcggacgctgtttaaact

SEQ ID NO: 651127 - DNA, 19 bp, Mus musculus
  siRNA target sequence for Gga3 (NM_173048.1,798-816).
gcggacgctgtttaaacta

SEQ ID NO: 651128 - DNA, 19 bp, Mus musculus
  siRNA target sequence for Gga3 (NM_173048.1,821-839).
gcgagacagaggacaatga

SEQ ID NO: 651129 - DNA, 19 bp, Mus musculus
  siRNA target sequence for Gga3 (NM_173048.1,829-847).
gaggacaatgacaacagtt

SEQ ID NO: 651130 - DNA, 19 bp, Mus musculus
  siRNA target sequence for Gga3 (NM_173048.1,881-899).
ccagggtcatcaactctta

SEQ ID NO: 651131 - DNA, 19 bp, Mus musculus
  siRNA target sequence for Gga3 (NM_173048.1,884-902).
gggtcatcaactcttacaa

SEQ ID NO: 651132 - DNA, 19 bp, Mus musculus
  siRNA target sequence for Gga3 (NM_173048.1,885-903).
ggtcatcaactcttacaaa

SEQ ID NO: 651133 - DNA, 19 bp, Mus musculus
  siRNA target sequence for Gga3 (NM_173048.1,886-904).
gtcatcaactcttacaaaa

SEQ ID NO: 651134 - DNA, 19 bp, Mus musculus
  siRNA target sequence for Gga3 (NM_173048.1,888-906).
catcaactcttacaaaact

SEQ ID NO: 651135 - DNA, 19 bp, Mus musculus
  siRNA target sequence for Gga3 (NM_173048.1,896-914).
cttacaaaactattattga

SEQ ID NO: 651136 - DNA, 19 bp, Mus musculus
  siRNA target sequence for Gga3 (NM_173048.1,972-990).
cagtcactgtggtaaccaa

SEQ ID NO: 651137 - DNA, 19 bp, Mus musculus
  siRNA target sequence for Gga3 (NM_173048.1,1257-1275).
gcacctgttccagaatgaa

SEQ ID NO: 651138 - DNA, 19 bp, Mus musculus
  siRNA target sequence for Gga3 (NM_173048.1,1357-1375).
ccagtttctacctcaagta

SEQ ID NO: 651139 - DNA, 19 bp, Mus musculus
  siRNA target sequence for Gga3 (NM_173048.1,1541-1559).
gcctagatgcccttgatca

SEQ ID NO: 651140 - DNA, 19 bp, Mus musculus
  siRNA target sequence for Gga3 (NM_173048.1,1800-1818).
cgtgacagcctatgataaa

SEQ ID NO: 651141 - DNA, 19 bp, Mus musculus
  siRNA target sequence for Gga3 (NM_173048.1,1803-1821).
gacagcctatgataaaaat

SEQ ID NO: 651142 - DNA, 19 bp, Mus musculus
  siRNA target sequence for Gga3 (NM_173048.1,1946-1964).
cagtgcccaagtcaatgaa

SEQ ID NO: 651143 - DNA, 19 bp, Mus musculus
  siRNA target sequence for Gga3 (NM_173048.1,1951-1969).
cccaagtcaatgaaagtga

SEQ ID NO: 651144 - DNA, 19 bp, Mus musculus
  siRNA target sequence for Gga3 (NM_173048.1,2073-2091).
ggtgcggcttcgatataaa

SEQ ID NO: 651145 - DNA, 19 bp, Mus musculus
  siRNA target sequence for Gga3 (NM_173048.1,2077-2095).
cggcttcgatataaactga

SEQ ID NO: 651146 - DNA, 19 bp, Mus musculus
  siRNA target sequence for Ipo11 (NM_029665.2,297-315).
gctgaatatttttacgaat

SEQ ID NO: 651147 - DNA, 19 bp, Mus musculus
  siRNA target sequence for Ipo11 (NM_029665.2,311-329).
cgaatcacacccttgatat

SEQ ID NO: 651148 - DNA, 19 bp, Mus musculus
  siRNA target sequence for Ipo11 (NM_029665.2,312-330).
gaatcacacccttgatata

SEQ ID NO: 651149 - DNA, 19 bp, Mus musculus
  siRNA target sequence for Ipo11 (NM_029665.2,647-665).
gcctggccgctgacagaaa

SEQ ID NO: 651150 - DNA, 19 bp, Mus musculus
  siRNA target sequence for Ipo11 (NM_029665.2,651-669).
ggccgctgacagaaagcta

SEQ ID NO: 651151 - DNA, 19 bp, Mus musculus
  siRNA target sequence for Ipo11 (NM_029665.2,652-670).
gccgctgacagaaagctat

SEQ ID NO: 651152 - DNA, 19 bp, Mus musculus
  siRNA target sequence for Ipo11 (NM_029665.2,653-671).
ccgctgacagaaagctatt

SEQ ID NO: 651153 - DNA, 19 bp, Mus musculus
  siRNA target sequence for Ipo11 (NM_029665.2,660-678).
cagaaagctattctatgat

SEQ ID NO: 651154 - DNA, 19 bp, Mus musculus
  siRNA target sequence for Ipo11 (NM_029665.2,666-684).
gctattctatgatttagct

SEQ ID NO: 651155 - DNA, 19 bp, Mus musculus
  siRNA target sequence for Ipo11 (NM_029665.2,667-685).
ctattctatgatttagctt

SEQ ID NO: 651156 - DNA, 19 bp, Mus musculus
  siRNA target sequence for Ipo11 (NM_029665.2,816-834).
gcggaagttaactgtgaat

SEQ ID NO: 651157 - DNA, 19 bp, Mus musculus
  siRNA target sequence for Ipo11 (NM_029665.2,870-888).
gggttttttacatggaata

SEQ ID NO: 651158 - DNA, 19 bp, Mus musculus
  siRNA target sequence for Ipo11 (NM_029665.2,915-933).
gtgcagcagaagtataggt

SEQ ID NO: 651159 - DNA, 19 bp, Mus musculus
  siRNA target sequence for Ipo11 (NM_029665.2,921-939).
cagaagtataggtacagat

SEQ ID NO: 651160 - DNA, 19 bp, Mus musculus
  siRNA target sequence for Ipo11 (NM_029665.2,923-941).
gaagtataggtacagataa

SEQ ID NO: 651161 - DNA, 19 bp, Mus musculus
  siRNA target sequence for Ipo11 (NM_029665.2,966-984).
gaccatcattctttttact

SEQ ID NO: 651162 - DNA, 19 bp, Mus musculus
  siRNA target sequence for Ipo11 (NM_029665.2,1009-1027).
caacaccccatttcattta

SEQ ID NO: 651163 - DNA, 19 bp, Mus musculus
  siRNA target sequence for Ipo11 (NM_029665.2,1043-1061).
ggtcactggaattttctgt

SEQ ID NO: 651164 - DNA, 19 bp, Mus musculus
  siRNA target sequence for Ipo11 (NM_029665.2,1081-1099).
gttggtgaaggcgttacat

SEQ ID NO: 651165 - DNA, 19 bp, Mus musculus
  siRNA target sequence for Ipo11 (NM_029665.2,1085-1103).
gtgaaggcgttacatttga

SEQ ID NO: 651166 - DNA, 19 bp, Mus musculus
  siRNA target sequence for Ipo11 (NM_029665.2,1097-1115).
catttgagcgattcattgt

SEQ ID NO: 651167 - DNA, 19 bp, Mus musculus
  siRNA target sequence for Ipo11 (NM_029665.2,1114-1132).
gtccagtgcatgaatctta

SEQ ID NO: 651168 - DNA, 19 bp, Mus musculus
  siRNA target sequence for Ipo11 (NM_029665.2,1116-1134).
ccagtgcatgaatcttatt

SEQ ID NO: 651169 - DNA, 19 bp, Mus musculus
  siRNA target sequence for Ipo11 (NM_029665.2,1117-1135).
cagtgcatgaatcttatta

SEQ ID NO: 651170 - DNA, 19 bp, Mus musculus
  siRNA target sequence for Ipo11 (NM_029665.2,1140-1158).
gattgtcaaaaattatgct

SEQ ID NO: 651171 - DNA, 19 bp, Mus musculus
  siRNA target sequence for Ipo11 (NM_029665.2,1156-1174).
gcttataagccatccaaaa

SEQ ID NO: 651172 - DNA, 19 bp, Mus musculus
  siRNA target sequence for Ipo11 (NM_029665.2,1157-1175).
cttataagccatccaaaaa

SEQ ID NO: 651173 - DNA, 19 bp, Mus musculus
  siRNA target sequence for Ipo11 (NM_029665.2,1201-1219).
cttgaagcccataagatta

SEQ ID NO: 651174 - DNA, 19 bp, Mus musculus
  siRNA target sequence for Ipo11 (NM_029665.2,1221-1239).
gatggcattcttcacatat

SEQ ID NO: 651175 - DNA, 19 bp, Mus musculus
  siRNA target sequence for Ipo11 (NM_029665.2,1240-1258).
cccacgttgacagagatat

SEQ ID NO: 651176 - DNA, 19 bp, Mus musculus
  siRNA target sequence for Ipo11 (NM_029665.2,1261-1279).
cgacgattagtctctcatt

SEQ ID NO: 651177 - DNA, 19 bp, Mus musculus
  siRNA target sequence for Ipo11 (NM_029665.2,1262-1280).
gacgattagtctctcatta

SEQ ID NO: 651178 - DNA, 19 bp, Mus musculus
  siRNA target sequence for Ipo11 (NM_029665.2,1264-1282).
cgattagtctctcattatt

SEQ ID NO: 651179 - DNA, 19 bp, Mus musculus
  siRNA target sequence for Ipo11 (NM_029665.2,1265-1283).
gattagtctctcattattt

SEQ ID NO: 651180 - DNA, 19 bp, Mus musculus
  siRNA target sequence for Ipo11 (NM_029665.2,1379-1397).
ggccttgcactgaagtatt

SEQ ID NO: 651181 - DNA, 19 bp, Mus musculus
  siRNA target sequence for Ipo11 (NM_029665.2,1381-1399).
ccttgcactgaagtattat

SEQ ID NO: 651182 - DNA, 19 bp, Mus musculus
  siRNA target sequence for Ipo11 (NM_029665.2,1388-1406).
ctgaagtattatttataga

SEQ ID NO: 651183 - DNA, 19 bp, Mus musculus
  siRNA target sequence for Ipo11 (NM_029665.2,1405-1423).
gatatattccacgaatata

SEQ ID NO: 651184 - DNA, 19 bp, Mus musculus
  siRNA target sequence for Ipo11 (NM_029665.2,1413-1431).
ccacgaatataatcaaact

SEQ ID NO: 651185 - DNA, 19 bp, Mus musculus
  siRNA target sequence for Ipo11 (NM_029665.2,1416-1434).
cgaatataatcaaactctt

SEQ ID NO: 651186 - DNA, 19 bp, Mus musculus
  siRNA target sequence for Ipo11 (NM_029665.2,1439-1457).
ctgtacttctagaaatgat

SEQ ID NO: 651187 - DNA, 19 bp, Mus musculus
  siRNA target sequence for Ipo11 (NM_029665.2,1444-1462).
cttctagaaatgatgcaaa

SEQ ID NO: 651188 - DNA, 19 bp, Mus musculus
  siRNA target sequence for Ipo11 (NM_029665.2,1472-1490).
gtccaaccaatgtagaaga

SEQ ID NO: 651189 - DNA, 19 bp, Mus musculus
  siRNA target sequence for Ipo11 (NM_029665.2,1474-1492).
ccaaccaatgtagaagata

SEQ ID NO: 651190 - DNA, 19 bp, Mus musculus
  siRNA target sequence for Ipo11 (NM_029665.2,1475-1493).
caaccaatgtagaagatat

SEQ ID NO: 651191 - DNA, 19 bp, Mus musculus
  siRNA target sequence for Ipo11 (NM_029665.2,1479-1497).
caatgtagaagatatgaat

SEQ ID NO: 651192 - DNA, 19 bp, Mus musculus
  siRNA target sequence for Ipo11 (NM_029665.2,1580-1598).
ggtttaaaacccaacttct

SEQ ID NO: 651193 - DNA, 19 bp, Mus musculus
  siRNA target sequence for Ipo11 (NM_029665.2,1590-1608).
ccaacttcttcccgaatta

SEQ ID NO: 651194 - DNA, 19 bp, Mus musculus
  siRNA target sequence for Ipo11 (NM_029665.2,1602-1620).
cgaattacaagtttctcat

SEQ ID NO: 651195 - DNA, 19 bp, Mus musculus
  siRNA target sequence for Ipo11 (NM_029665.2,1603-1621).
gaattacaagtttctcata

SEQ ID NO: 651196 - DNA, 19 bp, Mus musculus
  siRNA target sequence for Ipo11 (NM_029665.2,1612-1630).
gtttctcataataggtata

SEQ ID NO: 651197 - DNA, 19 bp, Mus musculus
  siRNA target sequence for Ipo11 (NM_029665.2,1698-1716).
gagacccatgctgtatgaa

SEQ ID NO: 651198 - DNA, 19 bp, Mus musculus
  siRNA target sequence for Ipo11 (NM_029665.2,1703-1721).
ccatgctgtatgaagcaat

SEQ ID NO: 651199 - DNA, 19 bp, Mus musculus
  siRNA target sequence for Ipo11 (NM_029665.2,1708-1726).
ctgtatgaagcaatctgta

SEQ ID NO: 651200 - DNA, 19 bp, Mus musculus
  siRNA target sequence for Ipo11 (NM_029665.2,1722-1740).
ctgtaacttgcttcaagat

SEQ ID NO: 651201 - DNA, 19 bp, Mus musculus
  siRNA target sequence for Ipo11 (NM_029665.2,1772-1790).
caactctgaagttaactgt

SEQ ID NO: 651202 - DNA, 19 bp, Mus musculus
  siRNA target sequence for Ipo11 (NM_029665.2,1782-1800).
gttaactgttgatgatttt

SEQ ID NO: 651203 - DNA, 19 bp, Mus musculus
  siRNA target sequence for Ipo11 (NM_029665.2,1872-1890).
ggttacagagtgtgataca

SEQ ID NO: 651204 - DNA, 19 bp, Mus musculus
  siRNA target sequence for Ipo11 (NM_029665.2,1873-1891).
gttacagagtgtgatacaa

SEQ ID NO: 651205 - DNA, 19 bp, Mus musculus
  siRNA target sequence for Ipo11 (NM_029665.2,1912-1930).
ctctcctgtgtgatcgaaa

SEQ ID NO: 651206 - DNA, 19 bp, Mus musculus
  siRNA target sequence for Ipo11 (NM_029665.2,1938-1956).
cgtgcagatccgaccatat

SEQ ID NO: 651207 - DNA, 19 bp, Mus musculus
  siRNA target sequence for Ipo11 (NM_029665.2,1959-1977).
ggggtgtttggtacagtat

SEQ ID NO: 651208 - DNA, 19 bp, Mus musculus
  siRNA target sequence for Ipo11 (NM_029665.2,1960-1978).
gggtgtttggtacagtatt

SEQ ID NO: 651209 - DNA, 19 bp, Mus musculus
  siRNA target sequence for Ipo11 (NM_029665.2,2025-2043).
cgctattctgacaacactt

SEQ ID NO: 651210 - DNA, 19 bp, Mus musculus
  siRNA target sequence for Ipo11 (NM_029665.2,2026-2044).
gctattctgacaacactta

SEQ ID NO: 651211 - DNA, 19 bp, Mus musculus
  siRNA target sequence for Ipo11 (NM_029665.2,2027-2045).
ctattctgacaacacttat

SEQ ID NO: 651212 - DNA, 19 bp, Mus musculus
  siRNA target sequence for Ipo11 (NM_029665.2,2049-2067).
ccttgttcagggattagga

SEQ ID NO: 651213 - DNA, 19 bp, Mus musculus
  siRNA target sequence for Ipo11 (NM_029665.2,2133-2151).
gcctccacatgtctatctt

SEQ ID NO: 651214 - DNA, 19 bp, Mus musculus
  siRNA target sequence for Ipo11 (NM_029665.2,2207-2225).
caccagagctgcttcgtat

SEQ ID NO: 651215 - DNA, 19 bp, Mus musculus
  siRNA target sequence for Ipo11 (NM_029665.2,2209-2227).
ccagagctgcttcgtatat

SEQ ID NO: 651216 - DNA, 19 bp, Mus musculus
  siRNA target sequence for Ipo11 (NM_029665.2,2210-2228).
cagagctgcttcgtatatt

SEQ ID NO: 651217 - DNA, 19 bp, Mus musculus
  siRNA target sequence for Ipo11 (NM_029665.2,2215-2233).
ctgcttcgtatatttcaga

SEQ ID NO: 651218 - DNA, 19 bp, Mus musculus
  siRNA target sequence for Ipo11 (NM_029665.2,2238-2256).
gtcacctcttcttgaatta

SEQ ID NO: 651219 - DNA, 19 bp, Mus musculus
  siRNA target sequence for Ipo11 (NM_029665.2,2292-2310).
caatggctatatcttttta

SEQ ID NO: 651220 - DNA, 19 bp, Mus musculus
  siRNA target sequence for Ipo11 (NM_029665.2,2318-2336).
cagaatttttacagacata

SEQ ID NO: 651221 - DNA, 19 bp, Mus musculus
  siRNA target sequence for Ipo11 (NM_029665.2,2344-2362).
ggtttgtgccagtcctttt

SEQ ID NO: 651222 - DNA, 19 bp, Mus musculus
  siRNA target sequence for Ipo11 (NM_029665.2,2345-2363).
gtttgtgccagtcctttta

SEQ ID NO: 651223 - DNA, 19 bp, Mus musculus
  siRNA target sequence for Ipo11 (NM_029665.2,2367-2385).
gctgctaccagagattact

SEQ ID NO: 651224 - DNA, 19 bp, Mus musculus
  siRNA target sequence for Ipo11 (NM_029665.2,2368-2386).
ctgctaccagagattacta

SEQ ID NO: 651225 - DNA, 19 bp, Mus musculus
  siRNA target sequence for Ipo11 (NM_029665.2,2370-2388).
gctaccagagattactaca

SEQ ID NO: 651226 - DNA, 19 bp, Mus musculus
  siRNA target sequence for Ipo11 (NM_029665.2,2457-2475).
gatgtttcagcgaattcta

SEQ ID NO: 651227 - DNA, 19 bp, Mus musculus
  siRNA target sequence for Ipo11 (NM_029665.2,2467-2485).
cgaattctaccctgtgttt

SEQ ID NO: 651228 - DNA, 19 bp, Mus musculus
  siRNA target sequence for Ipo11 (NM_029665.2,2551-2569).
cgagtcttactccagaata

SEQ ID NO: 651229 - DNA, 19 bp, Mus musculus
  siRNA target sequence for Ipo11 (NM_029665.2,2598-2616).
gatgggacacgagtttaat

SEQ ID NO: 651230 - DNA, 19 bp, Mus musculus
  siRNA target sequence for Ipo11 (NM_029665.2,2783-2801).
cagtggaggctcttcatga

SEQ ID NO: 651231 - DNA, 19 bp, Mus musculus
  siRNA target sequence for Ipo11 (NM_029665.2,2870-2888).
cgaaagtaacagaagatga

SEQ ID NO: 651232 - DNA, 19 bp, Mus musculus
  siRNA target sequence for Ipo11 (NM_029665.2,3038-3056).
cggtggacacagagattgt

SEQ ID NO: 651233 - DNA, 19 bp, Mus musculus
  siRNA target sequence for Ipo13 (NM_146152.2,728-746).
ctactacgaccccaatatt

SEQ ID NO: 651234 - DNA, 19 bp, Mus musculus
  siRNA target sequence for Ipo13 (NM_146152.2,738-756).
cccaatattgacaacaaga

SEQ ID NO: 651235 - DNA, 19 bp, Mus musculus
  siRNA target sequence for Ipo13 (NM_146152.2,842-860).
gcccgagatccagtacttt

SEQ ID NO: 651236 - DNA, 19 bp, Mus musculus
  siRNA target sequence for Ipo13 (NM_146152.2,909-927).
cccaccgaccagtatgaaa

SEQ ID NO: 651237 - DNA, 19 bp, Mus musculus
  siRNA target sequence for Ipo13 (NM_146152.2,913-931).
ccgaccagtatgaaagctt

SEQ ID NO: 651238 - DNA, 19 bp, Mus musculus
  siRNA target sequence for Ipo13 (NM_146152.2,915-933).
gaccagtatgaaagcttaa

SEQ ID NO: 651239 - DNA, 19 bp, Mus musculus
  siRNA target sequence for Ipo13 (NM_146152.2,967-985).
ccagcggctccaaaattgt

SEQ ID NO: 651240 - DNA, 19 bp, Mus musculus
  siRNA target sequence for Ipo13 (NM_146152.2,1048-1066).
catgtgctgtggcagatat

SEQ ID NO: 651241 - DNA, 19 bp, Mus musculus
  siRNA target sequence for Ipo13 (NM_146152.2,1146-1164).
ctgcccgaggagtttcaga

SEQ ID NO: 651242 - DNA, 19 bp, Mus musculus
  siRNA target sequence for Ipo13 (NM_146152.2,1633-1651).
cactcgtcaacatgatcat

SEQ ID NO: 651243 - DNA, 19 bp, Mus musculus
  siRNA target sequence for Ipo13 (NM_146152.2,1635-1653).
ctcgtcaacatgatcatgt

SEQ ID NO: 651244 - DNA, 19 bp, Mus musculus
  siRNA target sequence for Ipo13 (NM_146152.2,1843-1861).
ctgacgaggagtatggatt

SEQ ID NO: 651245 - DNA, 19 bp, Mus musculus
  siRNA target sequence for Ipo13 (NM_146152.2,1945-1963).
gggctgagctgcttagcaa

SEQ ID NO: 651246 - DNA, 19 bp, Mus musculus
  siRNA target sequence for Ipo13 (NM_146152.2,2191-2209).
ctgaccaccccgtcatgat

SEQ ID NO: 651247 - DNA, 19 bp, Mus musculus
  siRNA target sequence for Ipo13 (NM_146152.2,2196-2214).
caccccgtcatgatcaaca

SEQ ID NO: 651248 - DNA, 19 bp, Mus musculus
  siRNA target sequence for Ipo13 (NM_146152.2,2271-2289).
gtgtcgaccctcaaaaaga

SEQ ID NO: 651249 - DNA, 19 bp, Mus musculus
  siRNA target sequence for Ipo13 (NM_146152.2,2293-2311).
gccgagagtgcaagtatga

SEQ ID NO: 651250 - DNA, 19 bp, Mus musculus
  siRNA target sequence for Ipo13 (NM_146152.2,2501-2519).
ggcagaagagatacctaat

SEQ ID NO: 651251 - DNA, 19 bp, Mus musculus
  siRNA target sequence for Ipo13 (NM_146152.2,2544-2562).
cacatcttggggcttcttt

SEQ ID NO: 651252 - DNA, 19 bp, Mus musculus
  siRNA target sequence for Ipo13 (NM_146152.2,2556-2574).
cttctttccaacctcttta

SEQ ID NO: 651253 - DNA, 19 bp, Mus musculus
  siRNA target sequence for Ipo13 (NM_146152.2,2738-2756).
ggcggtatgcgccatcttt

SEQ ID NO: 651254 - DNA, 19 bp, Mus musculus
  siRNA target sequence for Ipo13 (NM_146152.2,2740-2758).
cggtatgcgccatctttga

SEQ ID NO: 651255 - DNA, 19 bp, Mus musculus
  siRNA target sequence for Ipo13 (NM_146152.2,2820-2838).
ctgggtcggatgtacagta

SEQ ID NO: 651256 - DNA, 19 bp, Mus musculus
  siRNA target sequence for Ipo13 (NM_146152.2,2981-2999).
ggatcatcctgatattgtt

SEQ ID NO: 651257 - DNA, 19 bp, Mus musculus
  siRNA target sequence for Ipo13 (NM_146152.2,2985-3003).
catcctgatattgttgatt

SEQ ID NO: 651258 - DNA, 19 bp, Mus musculus
  siRNA target sequence for Ipo13 (NM_146152.2,2988-3006).
cctgatattgttgattcat

SEQ ID NO: 651259 - DNA, 19 bp, Mus musculus
  siRNA target sequence for Ipo13 (NM_146152.2,3058-3076).
gtgagcgactggatgtcaa

SEQ ID NO: 651260 - DNA, 19 bp, Mus musculus
  siRNA target sequence for Ipo13 (NM_146152.2,3164-3182).
gcctcgatgtggggaaata

SEQ ID NO: 651261 - DNA, 19 bp, Mus musculus
  siRNA target sequence for Ipo13 (NM_146152.2,3166-3184).
ctcgatgtggggaaataga

SEQ ID NO: 651262 - DNA, 19 bp, Mus musculus
  siRNA target sequence for Ipo13 (NM_146152.2,3168-3186).
cgatgtggggaaatagagt

SEQ ID NO: 651263 - DNA, 19 bp, Mus musculus
  siRNA target sequence for Ipo13 (NM_146152.2,3265-3283).
gtagcctcatggactgttt

SEQ ID NO: 651264 - DNA, 19 bp, Mus musculus
  siRNA target sequence for Ipo13 (NM_146152.2,3420-3438).
cttcgtgagcgagtaaaca

SEQ ID NO: 651265 - DNA, 19 bp, Mus musculus
  siRNA target sequence for Ipo13 (NM_146152.2,3423-3441).
cgtgagcgagtaaacaaga

SEQ ID NO: 651266 - DNA, 19 bp, Mus musculus
  siRNA target sequence for Ipo4 (NM_024267.4,8-26).
ctgcgggtttggaacagat

SEQ ID NO: 651267 - DNA, 19 bp, Mus musculus
  siRNA target sequence for Ipo4 (NM_024267.4,306-324).
gctctcagccaccattttt

SEQ ID NO: 651268 - DNA, 19 bp, Mus musculus
  siRNA target sequence for Ipo4 (NM_024267.4,344-362).
gatggcctcagttcatgaa

SEQ ID NO: 651269 - DNA, 19 bp, Mus musculus
  siRNA target sequence for Ipo4 (NM_024267.4,444-462).
ccagcccgaggcattccat

SEQ ID NO: 651270 - DNA, 19 bp, Mus musculus
  siRNA target sequence for Ipo4 (NM_024267.4,520-538).
cccggagtgctcttctact

SEQ ID NO: 651271 - DNA, 19 bp, Mus musculus
  siRNA target sequence for Ipo4 (NM_024267.4,701-719).
cagagttgcccatcatcaa

SEQ ID NO: 651272 - DNA, 19 bp, Mus musculus
  siRNA target sequence for Ipo4 (NM_024267.4,815-833).
ctttcttggtcaaagtcaa

SEQ ID NO: 651273 - DNA, 19 bp, Mus musculus
  siRNA target sequence for Ipo4 (NM_024267.4,925-943).
gatcctgaagatcaagatt

SEQ ID NO: 651274 - DNA, 19 bp, Mus musculus
  siRNA target sequence for Ipo4 (NM_024267.4,1011-1029).
ggacatgctggcactacat

SEQ ID NO: 651275 - DNA, 19 bp, Mus musculus
  siRNA target sequence for Ipo4 (NM_024267.4,1014-1032).
catgctggcactacatctt

SEQ ID NO: 651276 - DNA, 19 bp, Mus musculus
  siRNA target sequence for Ipo4 (NM_024267.4,1176-1194).
gtacccactgctacagatt

SEQ ID NO: 651277 - DNA, 19 bp, Mus musculus
  siRNA target sequence for Ipo4 (NM_024267.4,1209-1227).
ggatgacccctcacagatt

SEQ ID NO: 651278 - DNA, 19 bp, Mus musculus
  siRNA target sequence for Ipo4 (NM_024267.4,1217-1235).
cctcacagattgttcgtaa

SEQ ID NO: 651279 - DNA, 19 bp, Mus musculus
  siRNA target sequence for Ipo4 (NM_024267.4,1218-1236).
ctcacagattgttcgtaat

SEQ ID NO: 651280 - DNA, 19 bp, Mus musculus
  siRNA target sequence for Ipo4 (NM_024267.4,1424-1442).
cctaccttccggagcttat

SEQ ID NO: 651281 - DNA, 19 bp, Mus musculus
  siRNA target sequence for Ipo4 (NM_024267.4,1429-1447).
cttccggagcttatggaat

SEQ ID NO: 651282 - DNA, 19 bp, Mus musculus
  siRNA target sequence for Ipo4 (NM_024267.4,1432-1450).
ccggagcttatggaatgta

SEQ ID NO: 651283 - DNA, 19 bp, Mus musculus
  siRNA target sequence for Ipo4 (NM_024267.4,1433-1451).
cggagcttatggaatgtat

SEQ ID NO: 651284 - DNA, 19 bp, Mus musculus
  siRNA target sequence for Ipo4 (NM_024267.4,1573-1591).
cttctccgggagttcttgt

SEQ ID NO: 651285 - DNA, 19 bp, Mus musculus
  siRNA target sequence for Ipo4 (NM_024267.4,1576-1594).
ctccgggagttcttgttga

SEQ ID NO: 651286 - DNA, 19 bp, Mus musculus
  siRNA target sequence for Ipo4 (NM_024267.4,1595-1613).
caggccacgaagactttca

SEQ ID NO: 651287 - DNA, 19 bp, Mus musculus
  siRNA target sequence for Ipo4 (NM_024267.4,1598-1616).
gccacgaagactttcatct

SEQ ID NO: 651288 - DNA, 19 bp, Mus musculus
  siRNA target sequence for Ipo4 (NM_024267.4,1705-1723).
cttgggctagggttatgca

SEQ ID NO: 651289 - DNA, 19 bp, Mus musculus
  siRNA target sequence for Ipo4 (NM_024267.4,1711-1729).
ctagggttatgcatccata

SEQ ID NO: 651290 - DNA, 19 bp, Mus musculus
  siRNA target sequence for Ipo4 (NM_024267.4,1715-1733).
ggttatgcatccatataga

SEQ ID NO: 651291 - DNA, 19 bp, Mus musculus
  siRNA target sequence for Ipo4 (NM_024267.4,1716-1734).
gttatgcatccatatagat

SEQ ID NO: 651292 - DNA, 19 bp, Mus musculus
  siRNA target sequence for Ipo4 (NM_024267.4,1764-1782).
cctgtttgcagccttatca

SEQ ID NO: 651293 - DNA, 19 bp, Mus musculus
  siRNA target sequence for Ipo4 (NM_024267.4,1772-1790).
cagccttatcagggttaat

SEQ ID NO: 651294 - DNA, 19 bp, Mus musculus
  siRNA target sequence for Ipo4 (NM_024267.4,1860-1878).
gggcattgtgccacagtat

SEQ ID NO: 651295 - DNA, 19 bp, Mus musculus
  siRNA target sequence for Ipo4 (NM_024267.4,1862-1880).
gcattgtgccacagtatga

SEQ ID NO: 651296 - DNA, 19 bp, Mus musculus
  siRNA target sequence for Ipo4 (NM_024267.4,2093-2111).
ccaccttcgatgaagtata

SEQ ID NO: 651297 - DNA, 19 bp, Mus musculus
  siRNA target sequence for Ipo4 (NM_024267.4,2119-2137).
ctggagtgccctcatatga

SEQ ID NO: 651298 - DNA, 19 bp, Mus musculus
  siRNA target sequence for Ipo4 (NM_024267.4,2255-2273).
gagtgatgccagcttacat

SEQ ID NO: 651299 - DNA, 19 bp, Mus musculus
  siRNA target sequence for Ipo4 (NM_024267.4,2271-2289).
catgcaggccgtgaaagta

SEQ ID NO: 651300 - DNA, 19 bp, Mus musculus
  siRNA target sequence for Ipo4 (NM_024267.4,2274-2292).
gcaggccgtgaaagtagaa

SEQ ID NO: 651301 - DNA, 19 bp, Mus musculus
  siRNA target sequence for Ipo4 (NM_024267.4,2275-2293).
caggccgtgaaagtagaaa

SEQ ID NO: 651302 - DNA, 19 bp, Mus musculus
  siRNA target sequence for Ipo4 (NM_024267.4,2581-2599).
ccattgttgctgtgtaaga

SEQ ID NO: 651303 - DNA, 19 bp, Mus musculus
  siRNA target sequence for Ipo4 (NM_024267.4,2706-2724).
ccctgtgctgttaaacaat

SEQ ID NO: 651304 - DNA, 19 bp, Mus musculus
  siRNA target sequence for Ipo4 (NM_024267.4,2748-2766).
gcggagcaatgccatcttt

SEQ ID NO: 651305 - DNA, 19 bp, Mus musculus
  siRNA target sequence for Ipo4 (NM_024267.4,2866-2884).
gatcgagtccgtgataaca

SEQ ID NO: 651306 - DNA, 19 bp, Mus musculus
  siRNA target sequence for Ipo4 (NM_024267.4,2869-2887).
cgagtccgtgataacatct

SEQ ID NO: 651307 - DNA, 19 bp, Mus musculus
  siRNA target sequence for Ipo4 (NM_024267.4,2894-2912).
ctcttgcccgtgtactgat

SEQ ID NO: 651308 - DNA, 19 bp, Mus musculus
  siRNA target sequence for Ipo4 (NM_024267.4,2991-3009).
ggagtggctcactataggt

SEQ ID NO: 651309 - DNA, 19 bp, Mus musculus
  siRNA target sequence for Kpna1 (NM_008465.2,190-208).
gttacaagaacaaatctct

SEQ ID NO: 651310 - DNA, 19 bp, Mus musculus
  siRNA target sequence for Kpna1 (NM_008465.2,271-289).
gagaagagcagttattcaa

SEQ ID NO: 651311 - DNA, 19 bp, Mus musculus
  siRNA target sequence for Kpna1 (NM_008465.2,276-294).
gagcagttattcaagagaa

SEQ ID NO: 651312 - DNA, 19 bp, Mus musculus
  siRNA target sequence for Kpna1 (NM_008465.2,338-356).
gtctgatggtggctttcat

SEQ ID NO: 651313 - DNA, 19 bp, Mus musculus
  siRNA target sequence for Kpna1 (NM_008465.2,357-375).
gaggcccagataaataaca

SEQ ID NO: 651314 - DNA, 19 bp, Mus musculus
  siRNA target sequence for Kpna1 (NM_008465.2,406-424).
ctgacatgactgatatgat

SEQ ID NO: 651315 - DNA, 19 bp, Mus musculus
  siRNA target sequence for Kpna1 (NM_008465.2,417-435).
gatatgatattctcgaata

SEQ ID NO: 651316 - DNA, 19 bp, Mus musculus
  siRNA target sequence for Kpna1 (NM_008465.2,456-474).
gcaacacagaagtttagga

SEQ ID NO: 651317 - DNA, 19 bp, Mus musculus
  siRNA target sequence for Kpna1 (NM_008465.2,467-485).
gtttaggaaactactttca

SEQ ID NO: 651318 - DNA, 19 bp, Mus musculus
  siRNA target sequence for Kpna1 (NM_008465.2,493-511).
ctaatcctccaattgatga

SEQ ID NO: 651319 - DNA, 19 bp, Mus musculus
  siRNA target sequence for Kpna1 (NM_008465.2,502-520).
caattgatgaagtcatcaa

SEQ ID NO: 651320 - DNA, 19 bp, Mus musculus
  siRNA target sequence for Kpna1 (NM_008465.2,594-612).
gcttgggtcctgacaaata

SEQ ID NO: 651321 - DNA, 19 bp, Mus musculus
  siRNA target sequence for Kpna1 (NM_008465.2,599-617).
ggtcctgacaaatattgct

SEQ ID NO: 651322 - DNA, 19 bp, Mus musculus
  siRNA target sequence for Kpna1 (NM_008465.2,600-618).
gtcctgacaaatattgctt

SEQ ID NO: 651323 - DNA, 19 bp, Mus musculus
  siRNA target sequence for Kpna1 (NM_008465.2,734-752).
caacattgctggagatagt

SEQ ID NO: 651324 - DNA, 19 bp, Mus musculus
  siRNA target sequence for Kpna1 (NM_008465.2,846-864).
gcagtatgggctttatcta

SEQ ID NO: 651325 - DNA, 19 bp, Mus musculus
  siRNA target sequence for Kpna1 (NM_008465.2,847-865).
cagtatgggctttatctaa

SEQ ID NO: 651326 - DNA, 19 bp, Mus musculus
  siRNA target sequence for Kpna1 (NM_008465.2,881-899).
gagcccacctccagaattt

SEQ ID NO: 651327 - DNA, 19 bp, Mus musculus
  siRNA target sequence for Kpna1 (NM_008465.2,920-938).
gaatgtcctttcttggtta

SEQ ID NO: 651328 - DNA, 19 bp, Mus musculus
  siRNA target sequence for Kpna1 (NM_008465.2,995-1013).
gtcagatggacccaatgat

SEQ ID NO: 651329 - DNA, 19 bp, Mus musculus
  siRNA target sequence for Kpna1 (NM_008465.2,999-1017).
gatggacccaatgataaaa

SEQ ID NO: 651330 - DNA, 19 bp, Mus musculus
  siRNA target sequence for Kpna1 (NM_008465.2,1003-1021).
gacccaatgataaaatcca

SEQ ID NO: 651331 - DNA, 19 bp, Mus musculus
  siRNA target sequence for Kpna1 (NM_008465.2,1056-1074).
gtggaacttctgatgcata

SEQ ID NO: 651332 - DNA, 19 bp, Mus musculus
  siRNA target sequence for Kpna1 (NM_008465.2,1058-1076).
ggaacttctgatgcataat

SEQ ID NO: 651333 - DNA, 19 bp, Mus musculus
  siRNA target sequence for Kpna1 (NM_008465.2,1062-1080).
cttctgatgcataatgact

SEQ ID NO: 651334 - DNA, 19 bp, Mus musculus
  siRNA target sequence for Kpna1 (NM_008465.2,1142-1160).
gacacaggtaattttgaat

SEQ ID NO: 651335 - DNA, 19 bp, Mus musculus
  siRNA target sequence for Kpna1 (NM_008465.2,1163-1181).
ctcagctcttcaaagttta

SEQ ID NO: 651336 - DNA, 19 bp, Mus musculus
  siRNA target sequence for Kpna1 (NM_008465.2,1195-1213).
gtagcccaaaggaatctat

SEQ ID NO: 651337 - DNA, 19 bp, Mus musculus
  siRNA target sequence for Kpna1 (NM_008465.2,1198-1216).
gcccaaaggaatctatcaa

SEQ ID NO: 651338 - DNA, 19 bp, Mus musculus
  siRNA target sequence for Kpna1 (NM_008465.2,1221-1239).
gaagcctgttggacaatct

SEQ ID NO: 651339 - DNA, 19 bp, Mus musculus
  siRNA target sequence for Kpna1 (NM_008465.2,1226-1244).
ctgttggacaatctctaat

SEQ ID NO: 651340 - DNA, 19 bp, Mus musculus
  siRNA target sequence for Kpna1 (NM_008465.2,1228-1246).
gttggacaatctctaatat

SEQ ID NO: 651341 - DNA, 19 bp, Mus musculus
  siRNA target sequence for Kpna1 (NM_008465.2,1232-1250).
gacaatctctaatattaca

SEQ ID NO: 651342 - DNA, 19 bp, Mus musculus
  siRNA target sequence for Kpna1 (NM_008465.2,1278-1296).
gtgatagatgctaacatgt

SEQ ID NO: 651343 - DNA, 19 bp, Mus musculus
  siRNA target sequence for Kpna1 (NM_008465.2,1299-1317).
ccagctcttattagtatat

SEQ ID NO: 651344 - DNA, 19 bp, Mus musculus
  siRNA target sequence for Kpna1 (NM_008465.2,1350-1368).
gctgcttgggccatcacaa

SEQ ID NO: 651345 - DNA, 19 bp, Mus musculus
  siRNA target sequence for Kpna1 (NM_008465.2,1351-1369).
ctgcttgggccatcacaaa

SEQ ID NO: 651346 - DNA, 19 bp, Mus musculus
  siRNA target sequence for Kpna1 (NM_008465.2,1384-1402).
gatcagctgagcagatcaa

SEQ ID NO: 651347 - DNA, 19 bp, Mus musculus
  siRNA target sequence for Kpna1 (NM_008465.2,1387-1405).
cagctgagcagatcaagta

SEQ ID NO: 651348 - DNA, 19 bp, Mus musculus
  siRNA target sequence for Kpna1 (NM_008465.2,1535-1553).
cggctcaggcattaatcct

SEQ ID NO: 651349 - DNA, 19 bp, Mus musculus
  siRNA target sequence for Kpna1 (NM_008465.2,1536-1554).
ggctcaggcattaatcctt

SEQ ID NO: 651350 - DNA, 19 bp, Mus musculus
  siRNA target sequence for Kpna1 (NM_008465.2,1537-1555).
gctcaggcattaatcctta

SEQ ID NO: 651351 - DNA, 19 bp, Mus musculus
  siRNA target sequence for Kpna1 (NM_008465.2,1561-1579).
ctttgattgaggaagcata

SEQ ID NO: 651352 - DNA, 19 bp, Mus musculus
  siRNA target sequence for Kpna1 (NM_008465.2,1691-1709).
cgcaccccaggttgatctt

SEQ ID NO: 651353 - DNA, 19 bp, Mus musculus
  siRNA target sequence for Kpna1 (NM_008465.2,1692-1710).
gcaccccaggttgatctta

SEQ ID NO: 651354 - DNA, 19 bp, Mus musculus
  siRNA target sequence for Kpna3 (NM_008466.2,98-116).
cgatgcgaagacacagaaa

SEQ ID NO: 651355 - DNA, 19 bp, Mus musculus
  siRNA target sequence for Kpna3 (NM_008466.2,99-117).
gatgcgaagacacagaaat

SEQ ID NO: 651356 - DNA, 19 bp, Mus musculus
  siRNA target sequence for Kpna3 (NM_008466.2,127-145).
gttgaactccggaagaaca

SEQ ID NO: 651357 - DNA, 19 bp, Mus musculus
  siRNA target sequence for Kpna3 (NM_008466.2,144-162).
caaaagagacgaacactta

SEQ ID NO: 651358 - DNA, 19 bp, Mus musculus
  siRNA target sequence for Kpna3 (NM_008466.2,149-167).
gagacgaacacttactgaa

SEQ ID NO: 651359 - DNA, 19 bp, Mus musculus
  siRNA target sequence for Kpna3 (NM_008466.2,151-169).
gacgaacacttactgaaaa

SEQ ID NO: 651360 - DNA, 19 bp, Mus musculus
  siRNA target sequence for Kpna3 (NM_008466.2,238-256).
gtaacactagaagctatat

SEQ ID NO: 651361 - DNA, 19 bp, Mus musculus
  siRNA target sequence for Kpna3 (NM_008466.2,304-322).
caggcagcaaggaaactat

SEQ ID NO: 651362 - DNA, 19 bp, Mus musculus
  siRNA target sequence for Kpna3 (NM_008466.2,306-324).
ggcagcaaggaaactatta

SEQ ID NO: 651363 - DNA, 19 bp, Mus musculus
  siRNA target sequence for Kpna3 (NM_008466.2,307-325).
gcagcaaggaaactattat

SEQ ID NO: 651364 - DNA, 19 bp, Mus musculus
  siRNA target sequence for Kpna3 (NM_008466.2,368-386).
ggattttaccaattctagt

SEQ ID NO: 651365 - DNA, 19 bp, Mus musculus
  siRNA target sequence for Kpna3 (NM_008466.2,382-400).
ctagtcaaatgtctagaaa

SEQ ID NO: 651366 - DNA, 19 bp, Mus musculus
  siRNA target sequence for Kpna3 (NM_008466.2,430-448).
gctgcttgggcactaacta

SEQ ID NO: 651367 - DNA, 19 bp, Mus musculus
  siRNA target sequence for Kpna3 (NM_008466.2,433-451).
gcttgggcactaactaata

SEQ ID NO: 651368 - DNA, 19 bp, Mus musculus
  siRNA target sequence for Kpna3 (NM_008466.2,434-452).
cttgggcactaactaatat

SEQ ID NO: 651369 - DNA, 19 bp, Mus musculus
  siRNA target sequence for Kpna3 (NM_008466.2,438-456).
ggcactaactaatatagca

SEQ ID NO: 651370 - DNA, 19 bp, Mus musculus
  siRNA target sequence for Kpna3 (NM_008466.2,439-457).
gcactaactaatatagcat

SEQ ID NO: 651371 - DNA, 19 bp, Mus musculus
  siRNA target sequence for Kpna3 (NM_008466.2,602-620).
gagattatgtcatatcact

SEQ ID NO: 651372 - DNA, 19 bp, Mus musculus
  siRNA target sequence for Kpna3 (NM_008466.2,689-707).
catgggtcattgtcaatct

SEQ ID NO: 651373 - DNA, 19 bp, Mus musculus
  siRNA target sequence for Kpna3 (NM_008466.2,753-771).
gattttgccagctttgtgt

SEQ ID NO: 651374 - DNA, 19 bp, Mus musculus
  siRNA target sequence for Kpna3 (NM_008466.2,780-798).
ctaccatacggacataaat

SEQ ID NO: 651375 - DNA, 19 bp, Mus musculus
  siRNA target sequence for Kpna3 (NM_008466.2,783-801).
ccatacggacataaatatt

SEQ ID NO: 651376 - DNA, 19 bp, Mus musculus
  siRNA target sequence for Kpna3 (NM_008466.2,788-806).
cggacataaatattcttgt

SEQ ID NO: 651377 - DNA, 19 bp, Mus musculus
  siRNA target sequence for Kpna3 (NM_008466.2,812-830).
ctgtttgggcgctgtcata

SEQ ID NO: 651378 - DNA, 19 bp, Mus musculus
  siRNA target sequence for Kpna3 (NM_008466.2,814-832).
gtttgggcgctgtcatact

SEQ ID NO: 651379 - DNA, 19 bp, Mus musculus
  siRNA target sequence for Kpna3 (NM_008466.2,840-858).
cgggggaaatgagcaaata

SEQ ID NO: 651380 - DNA, 19 bp, Mus musculus
  siRNA target sequence for Kpna3 (NM_008466.2,850-868).
gagcaaatacagatggtta

SEQ ID NO: 651381 - DNA, 19 bp, Mus musculus
  siRNA target sequence for Kpna3 (NM_008466.2,942-960).
cagagcggttgggaacata

SEQ ID NO: 651382 - DNA, 19 bp, Mus musculus
  siRNA target sequence for Kpna3 (NM_008466.2,944-962).
gagcggttgggaacatagt

SEQ ID NO: 651383 - DNA, 19 bp, Mus musculus
  siRNA target sequence for Kpna3 (NM_008466.2,946-964).
gcggttgggaacatagtga

SEQ ID NO: 651384 - DNA, 19 bp, Mus musculus
  siRNA target sequence for Kpna3 (NM_008466.2,1071-1089).
gttcctttccaatataaca

SEQ ID NO: 651385 - DNA, 19 bp, Mus musculus
  siRNA target sequence for Kpna3 (NM_008466.2,1127-1145).
ctgggttaatccctatgat

SEQ ID NO: 651386 - DNA, 19 bp, Mus musculus
  siRNA target sequence for Kpna3 (NM_008466.2,1129-1147).
gggttaatccctatgatta

SEQ ID NO: 651387 - DNA, 19 bp, Mus musculus
  siRNA target sequence for Kpna3 (NM_008466.2,1130-1148).
ggttaatccctatgattat

SEQ ID NO: 651388 - DNA, 19 bp, Mus musculus
  siRNA target sequence for Kpna3 (NM_008466.2,1131-1149).
gttaatccctatgattatt

SEQ ID NO: 651389 - DNA, 19 bp, Mus musculus
  siRNA target sequence for Kpna3 (NM_008466.2,1198-1216).
gcaattagcaacttaacga

SEQ ID NO: 651390 - DNA, 19 bp, Mus musculus
  siRNA target sequence for Kpna3 (NM_008466.2,1199-1217).
caattagcaacttaacgat

SEQ ID NO: 651391 - DNA, 19 bp, Mus musculus
  siRNA target sequence for Kpna3 (NM_008466.2,1214-1232).
cgataagtggcagaaaaga

SEQ ID NO: 651392 - DNA, 19 bp, Mus musculus
  siRNA target sequence for Kpna3 (NM_008466.2,1215-1233).
gataagtggcagaaaagat

SEQ ID NO: 651393 - DNA, 19 bp, Mus musculus
  siRNA target sequence for Kpna3 (NM_008466.2,1246-1264).
cttgtacagcagaacgtaa

SEQ ID NO: 651394 - DNA, 19 bp, Mus musculus
  siRNA target sequence for Kpna3 (NM_008466.2,1281-1299).
cttactgtcagtaaaagat

SEQ ID NO: 651395 - DNA, 19 bp, Mus musculus
  siRNA target sequence for Kpna3 (NM_008466.2,1308-1326).
ggtgcaggtggttctagat

SEQ ID NO: 651396 - DNA, 19 bp, Mus musculus
  siRNA target sequence for Kpna3 (NM_008466.2,1367-1385).
gcacaatagctgagatcat

SEQ ID NO: 651397 - DNA, 19 bp, Mus musculus
  siRNA target sequence for Kpna3 (NM_008466.2,1370-1388).
caatagctgagatcataga

SEQ ID NO: 651398 - DNA, 19 bp, Mus musculus
  siRNA target sequence for Kpna3 (NM_008466.2,1526-1544).
caacacaaggaggtactta

SEQ ID NO: 651399 - DNA, 19 bp, Mus musculus
  siRNA target sequence for Kpna3 (NM_008466.2,1529-1547).
cacaaggaggtacttacaa

SEQ ID NO: 651400 - DNA, 19 bp, Mus musculus
  siRNA target sequence for Kpna3 (NM_008466.2,1531-1549).
caaggaggtacttacaatt

SEQ ID NO: 651401 - DNA, 19 bp, Mus musculus
  siRNA target sequence for Kpna4 (NM_008467.2,298-316).
cggacaacgagaaattgga

SEQ ID NO: 651402 - DNA, 19 bp, Mus musculus
  siRNA target sequence for Kpna4 (NM_008467.2,317-335).
caaccaacggctcaagaat

SEQ ID NO: 651403 - DNA, 19 bp, Mus musculus
  siRNA target sequence for Kpna4 (NM_008467.2,320-338).
ccaacggctcaagaatttt

SEQ ID NO: 651404 - DNA, 19 bp, Mus musculus
  siRNA target sequence for Kpna4 (NM_008467.2,321-339).
caacggctcaagaatttta

SEQ ID NO: 651405 - DNA, 19 bp, Mus musculus
  siRNA target sequence for Kpna4 (NM_008467.2,324-342).
cggctcaagaattttaaga

SEQ ID NO: 651406 - DNA, 19 bp, Mus musculus
  siRNA target sequence for Kpna4 (NM_008467.2,325-343).
ggctcaagaattttaagaa

SEQ ID NO: 651407 - DNA, 19 bp, Mus musculus
  siRNA target sequence for Kpna4 (NM_008467.2,349-367).
gccgtgacttggagactat

SEQ ID NO: 651408 - DNA, 19 bp, Mus musculus
  siRNA target sequence for Kpna4 (NM_008467.2,351-369).
cgtgacttggagactatga

SEQ ID NO: 651409 - DNA, 19 bp, Mus musculus
  siRNA target sequence for Kpna4 (NM_008467.2,364-382).
ctatgagaagacaacgaaa

SEQ ID NO: 651410 - DNA, 19 bp, Mus musculus
  siRNA target sequence for Kpna4 (NM_008467.2,384-402).
gaagttgtagttgaattaa

SEQ ID NO: 651411 - DNA, 19 bp, Mus musculus
  siRNA target sequence for Kpna4 (NM_008467.2,387-405).
gttgtagttgaattaagga

SEQ ID NO: 651412 - DNA, 19 bp, Mus musculus
  siRNA target sequence for Kpna4 (NM_008467.2,415-433).
gagatgaacatctcttaaa

SEQ ID NO: 651413 - DNA, 19 bp, Mus musculus
  siRNA target sequence for Kpna4 (NM_008467.2,461-479).
ctgtgaagactccgatata

SEQ ID NO: 651414 - DNA, 19 bp, Mus musculus
  siRNA target sequence for Kpna4 (NM_008467.2,472-490).
ccgatatagatggtgatta

SEQ ID NO: 651415 - DNA, 19 bp, Mus musculus
  siRNA target sequence for Kpna4 (NM_008467.2,473-491).
cgatatagatggtgattat

SEQ ID NO: 651416 - DNA, 19 bp, Mus musculus
  siRNA target sequence for Kpna4 (NM_008467.2,474-492).
gatatagatggtgattata

SEQ ID NO: 651417 - DNA, 19 bp, Mus musculus
  siRNA target sequence for Kpna4 (NM_008467.2,484-502).
gtgattatagagtgcaaaa

SEQ ID NO: 651418 - DNA, 19 bp, Mus musculus
  siRNA target sequence for Kpna4 (NM_008467.2,497-515).
gcaaaatacctctctagaa

SEQ ID NO: 651419 - DNA, 19 bp, Mus musculus
  siRNA target sequence for Kpna4 (NM_008467.2,505-523).
cctctctagaagctattgt

SEQ ID NO: 651420 - DNA, 19 bp, Mus musculus
  siRNA target sequence for Kpna4 (NM_008467.2,508-526).
ctctagaagctattgttca

SEQ ID NO: 651421 - DNA, 19 bp, Mus musculus
  siRNA target sequence for Kpna4 (NM_008467.2,516-534).
gctattgttcaaaatgctt

SEQ ID NO: 651422 - DNA, 19 bp, Mus musculus
  siRNA target sequence for Kpna4 (NM_008467.2,634-652).
gaatattgcctattttagt

SEQ ID NO: 651423 - DNA, 19 bp, Mus musculus
  siRNA target sequence for Kpna4 (NM_008467.2,696-714).
gctgcgtgggctttgacaa

SEQ ID NO: 651424 - DNA, 19 bp, Mus musculus
  siRNA target sequence for Kpna4 (NM_008467.2,697-715).
ctgcgtgggctttgacaaa

SEQ ID NO: 651425 - DNA, 19 bp, Mus musculus
  siRNA target sequence for Kpna4 (NM_008467.2,699-717).
gcgtgggctttgacaaaca

SEQ ID NO: 651426 - DNA, 19 bp, Mus musculus
  siRNA target sequence for Kpna4 (NM_008467.2,700-718).
cgtgggctttgacaaacat

SEQ ID NO: 651427 - DNA, 19 bp, Mus musculus
  siRNA target sequence for Kpna4 (NM_008467.2,765-783).
gctgtgccacttttcttga

SEQ ID NO: 651428 - DNA, 19 bp, Mus musculus
  siRNA target sequence for Kpna4 (NM_008467.2,878-896).
gataagtcttggagttgta

SEQ ID NO: 651429 - DNA, 19 bp, Mus musculus
  siRNA target sequence for Kpna4 (NM_008467.2,914-932).
cataagtccatctattcct

SEQ ID NO: 651430 - DNA, 19 bp, Mus musculus
  siRNA target sequence for Kpna4 (NM_008467.2,921-939).
ccatctattcctataacat

SEQ ID NO: 651431 - DNA, 19 bp, Mus musculus
  siRNA target sequence for Kpna4 (NM_008467.2,959-977).
ggttatggtcaatttatgt

SEQ ID NO: 651432 - DNA, 19 bp, Mus musculus
  siRNA target sequence for Kpna4 (NM_008467.2,1027-1045).
cagctctttgtgtattaat

SEQ ID NO: 651433 - DNA, 19 bp, Mus musculus
  siRNA target sequence for Kpna4 (NM_008467.2,1059-1077).
gtaaatatcctggtagata

SEQ ID NO: 651434 - DNA, 19 bp, Mus musculus
  siRNA target sequence for Kpna4 (NM_008467.2,1108-1126).
ctggcaatgaacagataca

SEQ ID NO: 651435 - DNA, 19 bp, Mus musculus
  siRNA target sequence for Kpna4 (NM_008467.2,1373-1391).
ggttcaggcagtaattgat

SEQ ID NO: 651436 - DNA, 19 bp, Mus musculus
  siRNA target sequence for Kpna4 (NM_008467.2,1455-1473).
gctgcctgggccataagta

SEQ ID NO: 651437 - DNA, 19 bp, Mus musculus
  siRNA target sequence for Kpna4 (NM_008467.2,1456-1474).
ctgcctgggccataagtaa

SEQ ID NO: 651438 - DNA, 19 bp, Mus musculus
  siRNA target sequence for Kpna4 (NM_008467.2,1459-1477).
cctgggccataagtaactt

SEQ ID NO: 651439 - DNA, 19 bp, Mus musculus
  siRNA target sequence for Kpna4 (NM_008467.2,1460-1478).
ctgggccataagtaactta

SEQ ID NO: 651440 - DNA, 19 bp, Mus musculus
  siRNA target sequence for Kpna4 (NM_008467.2,1465-1483).
ccataagtaacttaacaat

SEQ ID NO: 651441 - DNA, 19 bp, Mus musculus
  siRNA target sequence for Kpna4 (NM_008467.2,1497-1515).
gaccaagtggcctatctta

SEQ ID NO: 651442 - DNA, 19 bp, Mus musculus
  siRNA target sequence for Kpna4 (NM_008467.2,1527-1545).
gttattccacctttttgca

SEQ ID NO: 651443 - DNA, 19 bp, Mus musculus
  siRNA target sequence for Kpna4 (NM_008467.2,1534-1552).
cacctttttgcaatttgct

SEQ ID NO: 651444 - DNA, 19 bp, Mus musculus
  siRNA target sequence for Kpna4 (NM_008467.2,1567-1585).
cacaagttgtgcaagtagt

SEQ ID NO: 651445 - DNA, 19 bp, Mus musculus
  siRNA target sequence for Kpna4 (NM_008467.2,1584-1602).
gtacttgatggactaagta

SEQ ID NO: 651446 - DNA, 19 bp, Mus musculus
  siRNA target sequence for Kpna4 (NM_008467.2,1587-1605).
cttgatggactaagtaata

SEQ ID NO: 651447 - DNA, 19 bp, Mus musculus
  siRNA target sequence for Kpna4 (NM_008467.2,1590-1608).
gatggactaagtaatatat

SEQ ID NO: 651448 - DNA, 19 bp, Mus musculus
  siRNA target sequence for Kpna4 (NM_008467.2,1593-1611).
ggactaagtaatatattaa

SEQ ID NO: 651449 - DNA, 19 bp, Mus musculus
  siRNA target sequence for Kpna4 (NM_008467.2,1637-1655).
catagccaatctcatagaa

SEQ ID NO: 651450 - DNA, 19 bp, Mus musculus
  siRNA target sequence for Kpna4 (NM_008467.2,1641-1659).
gccaatctcatagaagaat

SEQ ID NO: 651451 - DNA, 19 bp, Mus musculus
  siRNA target sequence for Kpna4 (NM_008467.2,1801-1819).
gtggaacatttggtttcaa

SEQ ID NO: 651452 - DNA, 19 bp, Mus musculus
  siRNA target sequence for Kpna4 (NM_008467.2,1803-1821).
ggaacatttggtttcaatt

SEQ ID NO: 651453 - DNA, 19 bp, Mus musculus
  siRNA target sequence for Kpna6 (NM_008468.1,19-37).
gacaattatcgaatgaaga

SEQ ID NO: 651454 - DNA, 19 bp, Mus musculus
  siRNA target sequence for Kpna6 (NM_008468.1,28-46).
cgaatgaagagctataaga

SEQ ID NO: 651455 - DNA, 19 bp, Mus musculus
  siRNA target sequence for Kpna6 (NM_008468.1,119-137).
gggaacaacaactttttaa

SEQ ID NO: 651456 - DNA, 19 bp, Mus musculus
  siRNA target sequence for Kpna6 (NM_008468.1,170-188).
ctgccatgtttgatagtct

SEQ ID NO: 651457 - DNA, 19 bp, Mus musculus
  siRNA target sequence for Kpna6 (NM_008468.1,181-199).
gatagtctgctgatggatt

SEQ ID NO: 651458 - DNA, 19 bp, Mus musculus
  siRNA target sequence for Kpna6 (NM_008468.1,185-203).
gtctgctgatggattccta

SEQ ID NO: 651459 - DNA, 19 bp, Mus musculus
  siRNA target sequence for Kpna6 (NM_008468.1,201-219).
ctacgtgagctctacaact

SEQ ID NO: 651460 - DNA, 19 bp, Mus musculus
  siRNA target sequence for Kpna6 (NM_008468.1,236-254).
cgagagagatggtagagat

SEQ ID NO: 651461 - DNA, 19 bp, Mus musculus
  siRNA target sequence for Kpna6 (NM_008468.1,324-342).
gccgagtcctccaatagat

SEQ ID NO: 651462 - DNA, 19 bp, Mus musculus
  siRNA target sequence for Kpna6 (NM_008468.1,326-344).
cgagtcctccaatagatga

SEQ ID NO: 651463 - DNA, 19 bp, Mus musculus
  siRNA target sequence for Kpna6 (NM_008468.1,327-345).
gagtcctccaatagatgaa

SEQ ID NO: 651464 - DNA, 19 bp, Mus musculus
  siRNA target sequence for Kpna6 (NM_008468.1,354-372).
cactccaggagtagttgat

SEQ ID NO: 651465 - DNA, 19 bp, Mus musculus
  siRNA target sequence for Kpna6 (NM_008468.1,395-413).
gaaatgagaattgtacatt

SEQ ID NO: 651466 - DNA, 19 bp, Mus musculus
  siRNA target sequence for Kpna6 (NM_008468.1,424-442).
gctgcctgggctctaacaa

SEQ ID NO: 651467 - DNA, 19 bp, Mus musculus
  siRNA target sequence for Kpna6 (NM_008468.1,425-443).
ctgcctgggctctaacaaa

SEQ ID NO: 651468 - DNA, 19 bp, Mus musculus
  siRNA target sequence for Kpna6 (NM_008468.1,429-447).
ctgggctctaacaaacatt

SEQ ID NO: 651469 - DNA, 19 bp, Mus musculus
  siRNA target sequence for Kpna6 (NM_008468.1,459-477).
gtctcagcagaccaaaatt

SEQ ID NO: 651470 - DNA, 19 bp, Mus musculus
  siRNA target sequence for Kpna6 (NM_008468.1,490-508).
ggagctgtccccattttta

SEQ ID NO: 651471 - DNA, 19 bp, Mus musculus
  siRNA target sequence for Kpna6 (NM_008468.1,498-516).
ccccatttttatagagtta

SEQ ID NO: 651472 - DNA, 19 bp, Mus musculus
  siRNA target sequence for Kpna6 (NM_008468.1,500-518).
ccatttttatagagttact

SEQ ID NO: 651473 - DNA, 19 bp, Mus musculus
  siRNA target sequence for Kpna6 (NM_008468.1,585-603).
ctcgctttgcagggattat

SEQ ID NO: 651474 - DNA, 19 bp, Mus musculus
  siRNA target sequence for Kpna6 (NM_008468.1,587-605).
cgctttgcagggattatgt

SEQ ID NO: 651475 - DNA, 19 bp, Mus musculus
  siRNA target sequence for Kpna6 (NM_008468.1,830-848).
ctgatggccccaatgagaa

SEQ ID NO: 651476 - DNA, 19 bp, Mus musculus
  siRNA target sequence for Kpna6 (NM_008468.1,884-902).
gattggtagagcttctgat

SEQ ID NO: 651477 - DNA, 19 bp, Mus musculus
  siRNA target sequence for Kpna6 (NM_008468.1,898-916).
ctgatgcacaacgattaca

SEQ ID NO: 651478 - DNA, 19 bp, Mus musculus
  siRNA target sequence for Kpna6 (NM_008468.1,900-918).
gatgcacaacgattacaaa

SEQ ID NO: 651479 - DNA, 19 bp, Mus musculus
  siRNA target sequence for Kpna6 (NM_008468.1,936-954).
gagagctgtgggtaatatt

SEQ ID NO: 651480 - DNA, 19 bp, Mus musculus
  siRNA target sequence for Kpna6 (NM_008468.1,973-991).
cagacccaggtcattctta

SEQ ID NO: 651481 - DNA, 19 bp, Mus musculus
  siRNA target sequence for Kpna6 (NM_008468.1,1061-1079).
gctggaccatttcaaacat

SEQ ID NO: 651482 - DNA, 19 bp, Mus musculus
  siRNA target sequence for Kpna6 (NM_008468.1,1085-1103).
ctggcaacagggctcaaat

SEQ ID NO: 651483 - DNA, 19 bp, Mus musculus
  siRNA target sequence for Kpna6 (NM_008468.1,1271-1289).
gtgacttgctgactgtaat

SEQ ID NO: 651484 - DNA, 19 bp, Mus musculus
  siRNA target sequence for Kpna6 (NM_008468.1,1317-1335).
caatggactagagaacatt

SEQ ID NO: 651485 - DNA, 19 bp, Mus musculus
  siRNA target sequence for Kpnb1 (NM_008379.2,224-242).
ctctttgacatcgaaagat

SEQ ID NO: 651486 - DNA, 19 bp, Mus musculus
  siRNA target sequence for Kpnb1 (NM_008379.2,269-287).
gaggtggctcgctattgat

SEQ ID NO: 651487 - DNA, 19 bp, Mus musculus
  siRNA target sequence for Kpnb1 (NM_008379.2,274-292).
ggctcgctattgatgctaa

SEQ ID NO: 651488 - DNA, 19 bp, Mus musculus
  siRNA target sequence for Kpnb1 (NM_008379.2,275-293).
gctcgctattgatgctaat

SEQ ID NO: 651489 - DNA, 19 bp, Mus musculus
  siRNA target sequence for Kpnb1 (NM_008379.2,278-296).
cgctattgatgctaatgct

SEQ ID NO: 651490 - DNA, 19 bp, Mus musculus
  siRNA target sequence for Kpnb1 (NM_008379.2,295-313).
ctcgacgggaagtcaagaa

SEQ ID NO: 651491 - DNA, 19 bp, Mus musculus
  siRNA target sequence for Kpnb1 (NM_008379.2,301-319).
gggaagtcaagaactatgt

SEQ ID NO: 651492 - DNA, 19 bp, Mus musculus
  siRNA target sequence for Kpnb1 (NM_008379.2,324-342).
cagacgttgggcacagaaa

SEQ ID NO: 651493 - DNA, 19 bp, Mus musculus
  siRNA target sequence for Kpnb1 (NM_008379.2,328-346).
cgttgggcacagaaacgta

SEQ ID NO: 651494 - DNA, 19 bp, Mus musculus
  siRNA target sequence for Kpnb1 (NM_008379.2,406-424).
gccagtggccagagctaat

SEQ ID NO: 651495 - DNA, 19 bp, Mus musculus
  siRNA target sequence for Kpnb1 (NM_008379.2,429-447).
cagctggtagccaatgtca

SEQ ID NO: 651496 - DNA, 19 bp, Mus musculus
  siRNA target sequence for Kpnb1 (NM_008379.2,479-497).
gtccacattggaagctatt

SEQ ID NO: 651497 - DNA, 19 bp, Mus musculus
  siRNA target sequence for Kpnb1 (NM_008379.2,482-500).
cacattggaagctattggt

SEQ ID NO: 651498 - DNA, 19 bp, Mus musculus
  siRNA target sequence for Kpnb1 (NM_008379.2,498-516).
ggttacatttgccaagata

SEQ ID NO: 651499 - DNA, 19 bp, Mus musculus
  siRNA target sequence for Kpnb1 (NM_008379.2,534-552).
caggataagtccaatgaga

SEQ ID NO: 651500 - DNA, 19 bp, Mus musculus
  siRNA target sequence for Kpnb1 (NM_008379.2,584-602).
ggaggagcctagtaacaat

SEQ ID NO: 651501 - DNA, 19 bp, Mus musculus
  siRNA target sequence for Kpnb1 (NM_008379.2,605-623).
gaagctggctgctaccaat

SEQ ID NO: 651502 - DNA, 19 bp, Mus musculus
  siRNA target sequence for Kpnb1 (NM_008379.2,639-657).
ctagagttcaccaaagcaa

SEQ ID NO: 651503 - DNA, 19 bp, Mus musculus
  siRNA target sequence for Kpnb1 (NM_008379.2,654-672).
gcaaactttgacaaagagt

SEQ ID NO: 651504 - DNA, 19 bp, Mus musculus
  siRNA target sequence for Kpnb1 (NM_008379.2,810-828).
gccctttttgcaatcacaa

SEQ ID NO: 651505 - DNA, 19 bp, Mus musculus
  siRNA target sequence for Kpnb1 (NM_008379.2,812-830).
cctttttgcaatcacaatt

SEQ ID NO: 651506 - DNA, 19 bp, Mus musculus
  siRNA target sequence for Kpnb1 (NM_008379.2,876-894).
gagttctggtccaatgtct

SEQ ID NO: 651507 - DNA, 19 bp, Mus musculus
  siRNA target sequence for Kpnb1 (NM_008379.2,954-972).
ccggagcacaccagcaaat

SEQ ID NO: 651508 - DNA, 19 bp, Mus musculus
  siRNA target sequence for Kpnb1 (NM_008379.2,955-973).
cggagcacaccagcaaatt

SEQ ID NO: 651509 - DNA, 19 bp, Mus musculus
  siRNA target sequence for Kpnb1 (NM_008379.2,956-974).
ggagcacaccagcaaattt

SEQ ID NO: 651510 - DNA, 19 bp, Mus musculus
  siRNA target sequence for Kpnb1 (NM_008379.2,1225-1243).
cagagcctaatcaactgaa

SEQ ID NO: 651511 - DNA, 19 bp, Mus musculus
  siRNA target sequence for Kpnb1 (NM_008379.2,1230-1248).
cctaatcaactgaaaccat

SEQ ID NO: 651512 - DNA, 19 bp, Mus musculus
  siRNA target sequence for Kpnb1 (NM_008379.2,1231-1249).
ctaatcaactgaaaccatt

SEQ ID NO: 651513 - DNA, 19 bp, Mus musculus
  siRNA target sequence for Kpnb1 (NM_008379.2,1236-1254).
caactgaaaccattagtca

SEQ ID NO: 651514 - DNA, 19 bp, Mus musculus
  siRNA target sequence for Kpnb1 (NM_008379.2,1259-1277).
ggctatgcccaccctaata

SEQ ID NO: 651515 - DNA, 19 bp, Mus musculus
  siRNA target sequence for Kpnb1 (NM_008379.2,1261-1279).
ctatgcccaccctaataga

SEQ ID NO: 651516 - DNA, 19 bp, Mus musculus
  siRNA target sequence for Kpnb1 (NM_008379.2,1265-1283).
gcccaccctaatagaacta

SEQ ID NO: 651517 - DNA, 19 bp, Mus musculus
  siRNA target sequence for Kpnb1 (NM_008379.2,1266-1284).
cccaccctaatagaactaa

SEQ ID NO: 651518 - DNA, 19 bp, Mus musculus
  siRNA target sequence for Kpnb1 (NM_008379.2,1267-1285).
ccaccctaatagaactaat

SEQ ID NO: 651519 - DNA, 19 bp, Mus musculus
  siRNA target sequence for Kpnb1 (NM_008379.2,1270-1288).
ccctaatagaactaatgaa

SEQ ID NO: 651520 - DNA, 19 bp, Mus musculus
  siRNA target sequence for Kpnb1 (NM_008379.2,1271-1289).
cctaatagaactaatgaaa

SEQ ID NO: 651521 - DNA, 19 bp, Mus musculus
  siRNA target sequence for Kpnb1 (NM_008379.2,1360-1378).
ccgccatcaacgatgtcta

SEQ ID NO: 651522 - DNA, 19 bp, Mus musculus
  siRNA target sequence for Kpnb1 (NM_008379.2,1478-1496).
gtatgaagctgcagatgta

SEQ ID NO: 651523 - DNA, 19 bp, Mus musculus
  siRNA target sequence for Kpnb1 (NM_008379.2,1509-1527).
gaagaaccagccacctatt

SEQ ID NO: 651524 - DNA, 19 bp, Mus musculus
  siRNA target sequence for Kpnb1 (NM_008379.2,1584-1602).
cccgatggacaccagaata

SEQ ID NO: 651525 - DNA, 19 bp, Mus musculus
  siRNA target sequence for Kpnb1 (NM_008379.2,1585-1603).
ccgatggacaccagaataa

SEQ ID NO: 651526 - DNA, 19 bp, Mus musculus
  siRNA target sequence for Kpnb1 (NM_008379.2,1625-1643).
gtctctcatggaaatcgta

SEQ ID NO: 651527 - DNA, 19 bp, Mus musculus
  siRNA target sequence for Kpnb1 (NM_008379.2,1787-1805).
ctgcgcgactcttcagaat

SEQ ID NO: 651528 - DNA, 19 bp, Mus musculus
  siRNA target sequence for Kpnb1 (NM_008379.2,1789-1807).
gcgcgactcttcagaatgt

SEQ ID NO: 651529 - DNA, 19 bp, Mus musculus
  siRNA target sequence for Kpnb1 (NM_008379.2,1790-1808).
cgcgactcttcagaatgtt

SEQ ID NO: 651530 - DNA, 19 bp, Mus musculus
  siRNA target sequence for Kpnb1 (NM_008379.2,1792-1810).
cgactcttcagaatgttct

SEQ ID NO: 651531 - DNA, 19 bp, Mus musculus
  siRNA target sequence for Kpnb1 (NM_008379.2,1814-1832).
gaaagtgcagcatcaagat

SEQ ID NO: 651532 - DNA, 19 bp, Mus musculus
  siRNA target sequence for Kpnb1 (NM_008379.2,1854-1872).
gtcatggcctccctgttaa

SEQ ID NO: 651533 - DNA, 19 bp, Mus musculus
  siRNA target sequence for Kpnb1 (NM_008379.2,1954-1972).
gtggtgaattcctcaagta

SEQ ID NO: 651534 - DNA, 19 bp, Mus musculus
  siRNA target sequence for Kpnb1 (NM_008379.2,1956-1974).
ggtgaattcctcaagtaca

SEQ ID NO: 651535 - DNA, 19 bp, Mus musculus
  siRNA target sequence for Kpnb1 (NM_008379.2,1957-1975).
gtgaattcctcaagtacat

SEQ ID NO: 651536 - DNA, 19 bp, Mus musculus
  siRNA target sequence for Kpnb1 (NM_008379.2,1994-2012).
cctgggcattggactgaaa

SEQ ID NO: 651537 - DNA, 19 bp, Mus musculus
  siRNA target sequence for Kpnb1 (NM_008379.2,1997-2015).
gggcattggactgaaaaat

SEQ ID NO: 651538 - DNA, 19 bp, Mus musculus
  siRNA target sequence for Kpnb1 (NM_008379.2,1998-2016).
ggcattggactgaaaaatt

SEQ ID NO: 651539 - DNA, 19 bp, Mus musculus
  siRNA target sequence for Kpnb1 (NM_008379.2,1999-2017).
gcattggactgaaaaatta

SEQ ID NO: 651540 - DNA, 19 bp, Mus musculus
  siRNA target sequence for Kpnb1 (NM_008379.2,2000-2018).
cattggactgaaaaattat

SEQ ID NO: 651541 - DNA, 19 bp, Mus musculus
  siRNA target sequence for Kpnb1 (NM_008379.2,2068-2086).
gccgagccctgcagtctaa

SEQ ID NO: 651542 - DNA, 19 bp, Mus musculus
  siRNA target sequence for Kpnb1 (NM_008379.2,2071-2089).
gagccctgcagtctaacat

SEQ ID NO: 651543 - DNA, 19 bp, Mus musculus
  siRNA target sequence for Kpnb1 (NM_008379.2,2234-2252).
ggttgtattgaatactcta

SEQ ID NO: 651544 - DNA, 19 bp, Mus musculus
  siRNA target sequence for Kpnb1 (NM_008379.2,2273-2291).
ggttgacaagtcagacttt

SEQ ID NO: 651545 - DNA, 19 bp, Mus musculus
  siRNA target sequence for Kpnb1 (NM_008379.2,2292-2310).
gacatggtggattatctga

SEQ ID NO: 651546 - DNA, 19 bp, Mus musculus
  siRNA target sequence for Kpnb1 (NM_008379.2,2294-2312).
catggtggattatctgaat

SEQ ID NO: 651547 - DNA, 19 bp, Mus musculus
  siRNA target sequence for Kpnb1 (NM_008379.2,2347-2365).
gaatcgtccagggattgaa

SEQ ID NO: 651548 - DNA, 19 bp, Mus musculus
  siRNA target sequence for Kpnb1 (NM_008379.2,2366-2384).
gggagatcaggaaaacgta

SEQ ID NO: 651549 - DNA, 19 bp, Mus musculus
  siRNA target sequence for Kpnb1 (NM_008379.2,2402-2420).
ggtacagcccagagtagaa

SEQ ID NO: 651550 - DNA, 19 bp, Mus musculus
  siRNA target sequence for Kpnb1 (NM_008379.2,2403-2421).
gtacagcccagagtagaat

SEQ ID NO: 651551 - DNA, 19 bp, Mus musculus
  siRNA target sequence for Kpnb1 (NM_008379.2,2408-2426).
gcccagagtagaatttatt

SEQ ID NO: 651552 - DNA, 19 bp, Mus musculus
  siRNA target sequence for Kpnb1 (NM_008379.2,2496-2514).
ctgataggggacttgtgta

SEQ ID NO: 651553 - DNA, 19 bp, Mus musculus
  siRNA target sequence for Kpnb3 (NM_023579.2,166-184).
gccgaggaggctagacaaa

SEQ ID NO: 651554 - DNA, 19 bp, Mus musculus
  siRNA target sequence for Kpnb3 (NM_023579.2,167-185).
ccgaggaggctagacaaat

SEQ ID NO: 651555 - DNA, 19 bp, Mus musculus
  siRNA target sequence for Kpnb3 (NM_023579.2,256-274).
gtccagactgccatcaaga

SEQ ID NO: 651556 - DNA, 19 bp, Mus musculus
  siRNA target sequence for Kpnb3 (NM_023579.2,263-281).
ctgccatcaagagtgaatt

SEQ ID NO: 651557 - DNA, 19 bp, Mus musculus
  siRNA target sequence for Kpnb3 (NM_023579.2,275-293).
gtgaattgctaatgatcat

SEQ ID NO: 651558 - DNA, 19 bp, Mus musculus
  siRNA target sequence for Kpnb3 (NM_023579.2,291-309).
cattcagatggaaacacaa

SEQ ID NO: 651559 - DNA, 19 bp, Mus musculus
  siRNA target sequence for Kpnb3 (NM_023579.2,470-488).
ggaactttcctggaatttt

SEQ ID NO: 651560 - DNA, 19 bp, Mus musculus
  siRNA target sequence for Kpnb3 (NM_023579.2,507-525).
ctatttggacgtcatcaaa

SEQ ID NO: 651561 - DNA, 19 bp, Mus musculus
  siRNA target sequence for Kpnb3 (NM_023579.2,516-534).
cgtcatcaaacggatgtta

SEQ ID NO: 651562 - DNA, 19 bp, Mus musculus
  siRNA target sequence for Kpnb3 (NM_023579.2,527-545).
ggatgttagttcagtgtat

SEQ ID NO: 651563 - DNA, 19 bp, Mus musculus
  siRNA target sequence for Kpnb3 (NM_023579.2,625-643).
gtcgctctgttcaaacact

SEQ ID NO: 651564 - DNA, 19 bp, Mus musculus
  siRNA target sequence for Kpnb3 (NM_023579.2,734-752).
cagacaccgtaccaaagta

SEQ ID NO: 651565 - DNA, 19 bp, Mus musculus
  siRNA target sequence for Kpnb3 (NM_023579.2,1016-1034).
ctggtgagagtgcattaga

SEQ ID NO: 651566 - DNA, 19 bp, Mus musculus
  siRNA target sequence for Kpnb3 (NM_023579.2,1388-1406).
cagcggctgccctcattaa

SEQ ID NO: 651567 - DNA, 19 bp, Mus musculus
  siRNA target sequence for Kpnb3 (NM_023579.2,1435-1453).
cttattccctacttggata

SEQ ID NO: 651568 - DNA, 19 bp, Mus musculus
  siRNA target sequence for Kpnb3 (NM_023579.2,2726-2744).
gtccaatgctccagtatgt

SEQ ID NO: 651569 - DNA, 19 bp, Mus musculus
  siRNA target sequence for Kpnb3 (NM_023579.2,3085-3103).
cttggcccaaacaatacca

SEQ ID NO: 651570 - DNA, 19 bp, Mus musculus
  siRNA target sequence for Lyst (NM_010748.1,186-204).
gcacggacagcaactcatt

SEQ ID NO: 651571 - DNA, 19 bp, Mus musculus
  siRNA target sequence for Lyst (NM_010748.1,201-219).
cattggcacgtgagtttct

SEQ ID NO: 651572 - DNA, 19 bp, Mus musculus
  siRNA target sequence for Lyst (NM_010748.1,205-223).
ggcacgtgagtttctgatt

SEQ ID NO: 651573 - DNA, 19 bp, Mus musculus
  siRNA target sequence for Lyst (NM_010748.1,207-225).
cacgtgagtttctgattga

SEQ ID NO: 651574 - DNA, 19 bp, Mus musculus
  siRNA target sequence for Lyst (NM_010748.1,210-228).
gtgagtttctgattgatgt

SEQ ID NO: 651575 - DNA, 19 bp, Mus musculus
  siRNA target sequence for Lyst (NM_010748.1,327-345).
gacgaggatttctgttact

SEQ ID NO: 651576 - DNA, 19 bp, Mus musculus
  siRNA target sequence for Lyst (NM_010748.1,329-347).
cgaggatttctgttactta

SEQ ID NO: 651577 - DNA, 19 bp, Mus musculus
  siRNA target sequence for Lyst (NM_010748.1,338-356).
ctgttacttaccaaactaa

SEQ ID NO: 651578 - DNA, 19 bp, Mus musculus
  siRNA target sequence for Lyst (NM_010748.1,340-358).
gttacttaccaaactaaat

SEQ ID NO: 651579 - DNA, 19 bp, Mus musculus
  siRNA target sequence for Lyst (NM_010748.1,348-366).
ccaaactaaattctatcat

SEQ ID NO: 651580 - DNA, 19 bp, Mus musculus
  siRNA target sequence for Lyst (NM_010748.1,476-494).
ccactgtcatctgatataa

SEQ ID NO: 651581 - DNA, 19 bp, Mus musculus
  siRNA target sequence for Lyst (NM_010748.1,477-495).
cactgtcatctgatataat

SEQ ID NO: 651582 - DNA, 19 bp, Mus musculus
  siRNA target sequence for Lyst (NM_010748.1,573-591).
gtcaggtttctgcaaaagt

SEQ ID NO: 651583 - DNA, 19 bp, Mus musculus
  siRNA target sequence for Lyst (NM_010748.1,575-593).
caggtttctgcaaaagtaa

SEQ ID NO: 651584 - DNA, 19 bp, Mus musculus
  siRNA target sequence for Lyst (NM_010748.1,610-628).
caggcgacagcgtaaaagt

SEQ ID NO: 651585 - DNA, 19 bp, Mus musculus
  siRNA target sequence for Lyst (NM_010748.1,621-639).
gtaaaagtacccatcgtta

SEQ ID NO: 651586 - DNA, 19 bp, Mus musculus
  siRNA target sequence for Lyst (NM_010748.1,627-645).
gtacccatcgttattctgt

SEQ ID NO: 651587 - DNA, 19 bp, Mus musculus
  siRNA target sequence for Lyst (NM_010748.1,631-649).
ccatcgttattctgtaaga

SEQ ID NO: 651588 - DNA, 19 bp, Mus musculus
  siRNA target sequence for Lyst (NM_010748.1,685-703).
cgaaggcaactcagatgaa

SEQ ID NO: 651589 - DNA, 19 bp, Mus musculus
  siRNA target sequence for Lyst (NM_010748.1,920-938).
ctcagtaacatgaataatt

SEQ ID NO: 651590 - DNA, 19 bp, Mus musculus
  siRNA target sequence for Lyst (NM_010748.1,922-940).
cagtaacatgaataattct

SEQ ID NO: 651591 - DNA, 19 bp, Mus musculus
  siRNA target sequence for Lyst (NM_010748.1,928-946).
catgaataattctcctttt

SEQ ID NO: 651592 - DNA, 19 bp, Mus musculus
  siRNA target sequence for Lyst (NM_010748.1,956-974).
catgttttgttatctctat

SEQ ID NO: 651593 - DNA, 19 bp, Mus musculus
  siRNA target sequence for Lyst (NM_010748.1,987-1005).
gtaagtttgacattgcttt

SEQ ID NO: 651594 - DNA, 19 bp, Mus musculus
  siRNA target sequence for Lyst (NM_010748.1,1021-1039).
cctagcactcagtgtagta

SEQ ID NO: 651595 - DNA, 19 bp, Mus musculus
  siRNA target sequence for Lyst (NM_010748.1,1128-1146).
cagaagagccggtagcttt

SEQ ID NO: 651596 - DNA, 19 bp, Mus musculus
  siRNA target sequence for Lyst (NM_010748.1,1171-1189).
cgtgctgcaccttatgtca

SEQ ID NO: 651597 - DNA, 19 bp, Mus musculus
  siRNA target sequence for Lyst (NM_010748.1,1439-1457).
gcttcaaatcccttttact

SEQ ID NO: 651598 - DNA, 19 bp, Mus musculus
  siRNA target sequence for Lyst (NM_010748.1,1459-1477).
cagtcaagccatggattta

SEQ ID NO: 651599 - DNA, 19 bp, Mus musculus
  siRNA target sequence for Lyst (NM_010748.1,1461-1479).
gtcaagccatggatttagt

SEQ ID NO: 651600 - DNA, 19 bp, Mus musculus
  siRNA target sequence for Lyst (NM_010748.1,1496-1514).
caccaaggatttaatctct

SEQ ID NO: 651601 - DNA, 19 bp, Mus musculus
  siRNA target sequence for Lyst (NM_010748.1,1588-1606).
gaaagctctgataaacagt

SEQ ID NO: 651602 - DNA, 19 bp, Mus musculus
  siRNA target sequence for Lyst (NM_010748.1,1592-1610).
gctctgataaacagtgtaa

SEQ ID NO: 651603 - DNA, 19 bp, Mus musculus
  siRNA target sequence for Lyst (NM_010748.1,1595-1613).
ctgataaacagtgtaataa

SEQ ID NO: 651604 - DNA, 19 bp, Mus musculus
  siRNA target sequence for Lyst (NM_010748.1,1682-1700).
caccggcgttgtgagtatt

SEQ ID NO: 651605 - DNA, 19 bp, Mus musculus
  siRNA target sequence for Lyst (NM_010748.1,1714-1732).
gcaccaccgcgatctttca

SEQ ID NO: 651606 - DNA, 19 bp, Mus musculus
  siRNA target sequence for Lyst (NM_010748.1,1998-2016).
ctttccagcagcatatact

SEQ ID NO: 651607 - DNA, 19 bp, Mus musculus
  siRNA target sequence for Lyst (NM_010748.1,2002-2020).
ccagcagcatatactgaat

SEQ ID NO: 651608 - DNA, 19 bp, Mus musculus
  siRNA target sequence for Lyst (NM_010748.1,2017-2035).
gaatgtcctgagcaaactt

SEQ ID NO: 651609 - DNA, 19 bp, Mus musculus
  siRNA target sequence for Lyst (NM_010748.1,2060-2078).
gagctatcaccgagaatta

SEQ ID NO: 651610 - DNA, 19 bp, Mus musculus
  siRNA target sequence for Lyst (NM_010748.1,2062-2080).
gctatcaccgagaattaaa

SEQ ID NO: 651611 - DNA, 19 bp, Mus musculus
  siRNA target sequence for Lyst (NM_010748.1,2063-2081).
ctatcaccgagaattaaaa

SEQ ID NO: 651612 - DNA, 19 bp, Mus musculus
  siRNA target sequence for Lyst (NM_010748.1,2112-2130).
ctgaccaactggctaagtt

SEQ ID NO: 651613 - DNA, 19 bp, Mus musculus
  siRNA target sequence for Lyst (NM_010748.1,2187-2205).
gtccttcctaccgatttca

SEQ ID NO: 651614 - DNA, 19 bp, Mus musculus
  siRNA target sequence for Lyst (NM_010748.1,2242-2260).
gtggaagtgggatgcatta

SEQ ID NO: 651615 - DNA, 19 bp, Mus musculus
  siRNA target sequence for Lyst (NM_010748.1,2244-2262).
ggaagtgggatgcattaga

SEQ ID NO: 651616 - DNA, 19 bp, Mus musculus
  siRNA target sequence for Lyst (NM_010748.1,2255-2273).
gcattagaggcttatcaga

SEQ ID NO: 651617 - DNA, 19 bp, Mus musculus
  siRNA target sequence for Lyst (NM_010748.1,2288-2306).
gaagacagattacataaca

SEQ ID NO: 651618 - DNA, 19 bp, Mus musculus
  siRNA target sequence for Lyst (NM_010748.1,2295-2313).
gattacataacattcagat

SEQ ID NO: 651619 - DNA, 19 bp, Mus musculus
  siRNA target sequence for Lyst (NM_010748.1,2300-2318).
cataacattcagattgcaa

SEQ ID NO: 651620 - DNA, 19 bp, Mus musculus
  siRNA target sequence for Lyst (NM_010748.1,2338-2356).
ccagaaaggcaatgtagtt

SEQ ID NO: 651621 - DNA, 19 bp, Mus musculus
  siRNA target sequence for Lyst (NM_010748.1,2341-2359).
gaaaggcaatgtagttgtt

SEQ ID NO: 651622 - DNA, 19 bp, Mus musculus
  siRNA target sequence for Lyst (NM_010748.1,2362-2380).
gtggaaattgtataattat

SEQ ID NO: 651623 - DNA, 19 bp, Mus musculus
  siRNA target sequence for Lyst (NM_010748.1,2396-2414).
ctccaaagaggagttgaat

SEQ ID NO: 651624 - DNA, 19 bp, Mus musculus
  siRNA target sequence for Lyst (NM_010748.1,2403-2421).
gaggagttgaattagtaca

SEQ ID NO: 651625 - DNA, 19 bp, Mus musculus
  siRNA target sequence for Lyst (NM_010748.1,2406-2424).
gagttgaattagtacatca

SEQ ID NO: 651626 - DNA, 19 bp, Mus musculus
  siRNA target sequence for Lyst (NM_010748.1,2466-2484).
gtagccaactgaaacagta

SEQ ID NO: 651627 - DNA, 19 bp, Mus musculus
  siRNA target sequence for Lyst (NM_010748.1,2525-2543).
cctgtcctacttaaatcca

SEQ ID NO: 651628 - DNA, 19 bp, Mus musculus
  siRNA target sequence for Lyst (NM_010748.1,2541-2559).
ccagggtaataagagattt

SEQ ID NO: 651629 - DNA, 19 bp, Mus musculus
  siRNA target sequence for Lyst (NM_010748.1,2544-2562).
gggtaataagagatttgtt

SEQ ID NO: 651630 - DNA, 19 bp, Mus musculus
  siRNA target sequence for Lyst (NM_010748.1,2545-2563).
ggtaataagagatttgttt

SEQ ID NO: 651631 - DNA, 19 bp, Mus musculus
  siRNA target sequence for Lyst (NM_010748.1,2568-2586).
gttgtaatggagtaaacca

SEQ ID NO: 651632 - DNA, 19 bp, Mus musculus
  siRNA target sequence for Lyst (NM_010748.1,2637-2655).
catttgaaactctgattgt

SEQ ID NO: 651633 - DNA, 19 bp, Mus musculus
  siRNA target sequence for Lyst (NM_010748.1,2674-2692).
gaaagatgctgcagttcta

SEQ ID NO: 651634 - DNA, 19 bp, Mus musculus
  siRNA target sequence for Lyst (NM_010748.1,2693-2711).
gacgtcgatgggttagaca

SEQ ID NO: 651635 - DNA, 19 bp, Mus musculus
  siRNA target sequence for Lyst (NM_010748.1,2717-2735).
caggagttgccgtccttaa

SEQ ID NO: 651636 - DNA, 19 bp, Mus musculus
  siRNA target sequence for Lyst (NM_010748.1,2719-2737).
ggagttgccgtccttaagt

SEQ ID NO: 651637 - DNA, 19 bp, Mus musculus
  siRNA target sequence for Lyst (NM_010748.1,2758-2776).
gcagcaagcttcttcagat

SEQ ID NO: 651638 - DNA, 19 bp, Mus musculus
  siRNA target sequence for Lyst (NM_010748.1,2759-2777).
cagcaagcttcttcagatt

SEQ ID NO: 651639 - DNA, 19 bp, Mus musculus
  siRNA target sequence for Lyst (NM_010748.1,2818-2836).
gcctgatccaaaaaaacga

SEQ ID NO: 651640 - DNA, 19 bp, Mus musculus
  siRNA target sequence for Lyst (NM_010748.1,2846-2864).
caccaggatgttcacataa

SEQ ID NO: 651641 - DNA, 19 bp, Mus musculus
  siRNA target sequence for Lyst (NM_010748.1,3053-3071).
catgcagcagacatttggt

SEQ ID NO: 651642 - DNA, 19 bp, Mus musculus
  siRNA target sequence for Lyst (NM_010748.1,3078-3096).
gtcgttggatctacatgtt

SEQ ID NO: 651643 - DNA, 19 bp, Mus musculus
  siRNA target sequence for Lyst (NM_010748.1,3080-3098).
cgttggatctacatgttga

SEQ ID NO: 651644 - DNA, 19 bp, Mus musculus
  siRNA target sequence for Lyst (NM_010748.1,3081-3099).
gttggatctacatgttgaa

SEQ ID NO: 651645 - DNA, 19 bp, Mus musculus
  siRNA target sequence for Lyst (NM_010748.1,3139-3157).
ccaagtgtgccatgaatta

SEQ ID NO: 651646 - DNA, 19 bp, Mus musculus
  siRNA target sequence for Lyst (NM_010748.1,3140-3158).
caagtgtgccatgaattaa

SEQ ID NO: 651647 - DNA, 19 bp, Mus musculus
  siRNA target sequence for Lyst (NM_010748.1,3147-3165).
gccatgaattaatatttat

SEQ ID NO: 651648 - DNA, 19 bp, Mus musculus
  siRNA target sequence for Lyst (NM_010748.1,3242-3260).
caagagctaatcaggatat

SEQ ID NO: 651649 - DNA, 19 bp, Mus musculus
  siRNA target sequence for Lyst (NM_010748.1,3245-3263).
gagctaatcaggatatctt

SEQ ID NO: 651650 - DNA, 19 bp, Mus musculus
  siRNA target sequence for Lyst (NM_010748.1,3280-3298).
gaagggagatgtatcatct

SEQ ID NO: 651651 - DNA, 19 bp, Mus musculus
  siRNA target sequence for Lyst (NM_010748.1,3378-3396).
caagtgcagagcagattgt

SEQ ID NO: 651652 - DNA, 19 bp, Mus musculus
  siRNA target sequence for Lyst (NM_010748.1,3391-3409).
gattgtggctactgaatct

SEQ ID NO: 651653 - DNA, 19 bp, Mus musculus
  siRNA target sequence for Lyst (NM_010748.1,3416-3434).
ggggaacgaaaggcattta

SEQ ID NO: 651654 - DNA, 19 bp, Mus musculus
  siRNA target sequence for Lyst (NM_010748.1,3417-3435).
gggaacgaaaggcatttat

SEQ ID NO: 651655 - DNA, 19 bp, Mus musculus
  siRNA target sequence for Lyst (NM_010748.1,3419-3437).
gaacgaaaggcatttatga

SEQ ID NO: 651656 - DNA, 19 bp, Mus musculus
  siRNA target sequence for Lyst (NM_010748.1,3427-3445).
ggcatttatgagtcaacaa

SEQ ID NO: 651657 - DNA, 19 bp, Mus musculus
  siRNA target sequence for Lyst (NM_010748.1,3428-3446).
gcatttatgagtcaacaaa

SEQ ID NO: 651658 - DNA, 19 bp, Mus musculus
  siRNA target sequence for Lyst (NM_010748.1,3553-3571).
gggcttgtctgtggaaaat

SEQ ID NO: 651659 - DNA, 19 bp, Mus musculus
  siRNA target sequence for Lyst (NM_010748.1,3623-3641).
gaattagcaaagcctttat

SEQ ID NO: 651660 - DNA, 19 bp, Mus musculus
  siRNA target sequence for Lyst (NM_010748.1,3659-3677).
gtagccctggggaatcatt

SEQ ID NO: 651661 - DNA, 19 bp, Mus musculus
  siRNA target sequence for Lyst (NM_010748.1,3742-3760).
gtcccagcccggagatttt

SEQ ID NO: 651662 - DNA, 19 bp, Mus musculus
  siRNA target sequence for Lyst (NM_010748.1,3745-3763).
ccagcccggagatttttca

SEQ ID NO: 651663 - DNA, 19 bp, Mus musculus
  siRNA target sequence for Lyst (NM_010748.1,3748-3766).
gcccggagatttttcagaa

SEQ ID NO: 651664 - DNA, 19 bp, Mus musculus
  siRNA target sequence for Lyst (NM_010748.1,3819-3837).
gctatgaagcggatagtga

SEQ ID NO: 651665 - DNA, 19 bp, Mus musculus
  siRNA target sequence for Lyst (NM_010748.1,3820-3838).
ctatgaagcggatagtgaa

SEQ ID NO: 651666 - DNA, 19 bp, Mus musculus
  siRNA target sequence for Lyst (NM_010748.1,3840-3858).
gcaatcctgaggatgttga

SEQ ID NO: 651667 - DNA, 19 bp, Mus musculus
  siRNA target sequence for Lyst (NM_010748.1,3862-3880).
ccaagacgatggagtagaa

SEQ ID NO: 651668 - DNA, 19 bp, Mus musculus
  siRNA target sequence for Lyst (NM_010748.1,3863-3881).
caagacgatggagtagaat

SEQ ID NO: 651669 - DNA, 19 bp, Mus musculus
  siRNA target sequence for Lyst (NM_010748.1,3866-3884).
gacgatggagtagaattaa

SEQ ID NO: 651670 - DNA, 19 bp, Mus musculus
  siRNA target sequence for Lyst (NM_010748.1,3906-3924).
gtggatcgattgtttcaaa

SEQ ID NO: 651671 - DNA, 19 bp, Mus musculus
  siRNA target sequence for Lyst (NM_010748.1,3908-3926).
ggatcgattgtttcaaaca

SEQ ID NO: 651672 - DNA, 19 bp, Mus musculus
  siRNA target sequence for Lyst (NM_010748.1,3909-3927).
gatcgattgtttcaaacaa

SEQ ID NO: 651673 - DNA, 19 bp, Mus musculus
  siRNA target sequence for Lyst (NM_010748.1,3912-3930).
cgattgtttcaaacaactt

SEQ ID NO: 651674 - DNA, 19 bp, Mus musculus
  siRNA target sequence for Lyst (NM_010748.1,3940-3958).
cctcactcacggggaaata

SEQ ID NO: 651675 - DNA, 19 bp, Mus musculus
  siRNA target sequence for Lyst (NM_010748.1,3941-3959).
ctcactcacggggaaataa

SEQ ID NO: 651676 - DNA, 19 bp, Mus musculus
  siRNA target sequence for Lyst (NM_010748.1,3943-3961).
cactcacggggaaataata

SEQ ID NO: 651677 - DNA, 19 bp, Mus musculus
  siRNA target sequence for Lyst (NM_010748.1,4002-4020).
ctagcaaagctaaacttga

SEQ ID NO: 651678 - DNA, 19 bp, Mus musculus
  siRNA target sequence for Lyst (NM_010748.1,4005-4023).
gcaaagctaaacttgatgt

SEQ ID NO: 651679 - DNA, 19 bp, Mus musculus
  siRNA target sequence for Lyst (NM_010748.1,4099-4117).
gggaactgtgaaaatcctt

SEQ ID NO: 651680 - DNA, 19 bp, Mus musculus
  siRNA target sequence for Lyst (NM_010748.1,4115-4133).
cttctaggcgggttcttga

SEQ ID NO: 651681 - DNA, 19 bp, Mus musculus
  siRNA target sequence for Lyst (NM_010748.1,4118-4136).
ctaggcgggttcttgaata

SEQ ID NO: 651682 - DNA, 19 bp, Mus musculus
  siRNA target sequence for Lyst (NM_010748.1,4121-4139).
ggcgggttcttgaatattt

SEQ ID NO: 651683 - DNA, 19 bp, Mus musculus
  siRNA target sequence for Lyst (NM_010748.1,4143-4161).
cacaaactaactctgattt

SEQ ID NO: 651684 - DNA, 19 bp, Mus musculus
  siRNA target sequence for Lyst (NM_010748.1,4176-4194).
gagtactggtggatctctt

SEQ ID NO: 651685 - DNA, 19 bp, Mus musculus
  siRNA target sequence for Lyst (NM_010748.1,4181-4199).
ctggtggatctcttggtat

SEQ ID NO: 651686 - DNA, 19 bp, Mus musculus
  siRNA target sequence for Lyst (NM_010748.1,4187-4205).
gatctcttggtatctttga

SEQ ID NO: 651687 - DNA, 19 bp, Mus musculus
  siRNA target sequence for Lyst (NM_010748.1,4219-4237).
gtgttcagaagacttaact

SEQ ID NO: 651688 - DNA, 19 bp, Mus musculus
  siRNA target sequence for Lyst (NM_010748.1,4266-4284).
ctccttgtacagaaattct

SEQ ID NO: 651689 - DNA, 19 bp, Mus musculus
  siRNA target sequence for Lyst (NM_010748.1,4288-4306).
ccttggtattcacaaaatt

SEQ ID NO: 651690 - DNA, 19 bp, Mus musculus
  siRNA target sequence for Lyst (NM_010748.1,4293-4311).
gtattcacaaaattgttga

SEQ ID NO: 651691 - DNA, 19 bp, Mus musculus
  siRNA target sequence for Lyst (NM_010748.1,4357-4375).
cctgcataccccgagttta

SEQ ID NO: 651692 - DNA, 19 bp, Mus musculus
  siRNA target sequence for Lyst (NM_010748.1,4358-4376).
ctgcataccccgagtttaa

SEQ ID NO: 651693 - DNA, 19 bp, Mus musculus
  siRNA target sequence for Lyst (NM_010748.1,4361-4379).
cataccccgagtttaagca

SEQ ID NO: 651694 - DNA, 19 bp, Mus musculus
  siRNA target sequence for Lyst (NM_010748.1,4403-4421).
cctgggattcttaacagta

SEQ ID NO: 651695 - DNA, 19 bp, Mus musculus
  siRNA target sequence for Lyst (NM_010748.1,4404-4422).
ctgggattcttaacagtaa

SEQ ID NO: 651696 - DNA, 19 bp, Mus musculus
  siRNA target sequence for Lyst (NM_010748.1,4419-4437).
gtaaagccttaggcttatt

SEQ ID NO: 651697 - DNA, 19 bp, Mus musculus
  siRNA target sequence for Lyst (NM_010748.1,4562-4580).
cacctgtcagaaggattta

SEQ ID NO: 651698 - DNA, 19 bp, Mus musculus
  siRNA target sequence for Lyst (NM_010748.1,4567-4585).
gtcagaaggatttagtgtt

SEQ ID NO: 651699 - DNA, 19 bp, Mus musculus
  siRNA target sequence for Lyst (NM_010748.1,4763-4781).
gacggctgtattcatttga

SEQ ID NO: 651700 - DNA, 19 bp, Mus musculus
  siRNA target sequence for Lyst (NM_010748.1,4765-4783).
cggctgtattcatttgatt

SEQ ID NO: 651701 - DNA, 19 bp, Mus musculus
  siRNA target sequence for Lyst (NM_010748.1,4766-4784).
ggctgtattcatttgattt

SEQ ID NO: 651702 - DNA, 19 bp, Mus musculus
  siRNA target sequence for Lyst (NM_010748.1,4770-4788).
gtattcatttgatttcact

SEQ ID NO: 651703 - DNA, 19 bp, Mus musculus
  siRNA target sequence for Lyst (NM_010748.1,4790-4808).
gggtccaaagcattgatga

SEQ ID NO: 651704 - DNA, 19 bp, Mus musculus
  siRNA target sequence for Lyst (NM_010748.1,4826-4844).
ccccacagtggcactttta

SEQ ID NO: 651705 - DNA, 19 bp, Mus musculus
  siRNA target sequence for Lyst (NM_010748.1,4855-4873).
gtgcatggactcaaatgat

SEQ ID NO: 651706 - DNA, 19 bp, Mus musculus
  siRNA target sequence for Lyst (NM_010748.1,4932-4950).
gcaaatggcaacacttagt

SEQ ID NO: 651707 - DNA, 19 bp, Mus musculus
  siRNA target sequence for Lyst (NM_010748.1,4933-4951).
caaatggcaacacttagta

SEQ ID NO: 651708 - DNA, 19 bp, Mus musculus
  siRNA target sequence for Lyst (NM_010748.1,4943-4961).
cacttagtacttacctata

SEQ ID NO: 651709 - DNA, 19 bp, Mus musculus
  siRNA target sequence for Lyst (NM_010748.1,5051-5069).
gtgctcccaagaaaaacaa

SEQ ID NO: 651710 - DNA, 19 bp, Mus musculus
  siRNA target sequence for Lyst (NM_010748.1,5100-5118).
gcatgattggtcattgctt

SEQ ID NO: 651711 - DNA, 19 bp, Mus musculus
  siRNA target sequence for Lyst (NM_010748.1,5101-5119).
catgattggtcattgctta

SEQ ID NO: 651712 - DNA, 19 bp, Mus musculus
  siRNA target sequence for Lyst (NM_010748.1,5115-5133).
gcttaacatcccaagaaga

SEQ ID NO: 651713 - DNA, 19 bp, Mus musculus
  siRNA target sequence for Lyst (NM_010748.1,5179-5197).
cttcaatggagctaaaatt

SEQ ID NO: 651714 - DNA, 19 bp, Mus musculus
  siRNA target sequence for Lyst (NM_010748.1,5202-5220).
cacaagaggcctttttcct

SEQ ID NO: 651715 - DNA, 19 bp, Mus musculus
  siRNA target sequence for Lyst (NM_010748.1,5276-5294).
gtcattgactactccaaat

SEQ ID NO: 651716 - DNA, 19 bp, Mus musculus
  siRNA target sequence for Lyst (NM_010748.1,5284-5302).
ctactccaaatacattaat

SEQ ID NO: 651717 - DNA, 19 bp, Mus musculus
  siRNA target sequence for Lyst (NM_010748.1,5357-5375).
gtggatgttggtctcttaa

SEQ ID NO: 651718 - DNA, 19 bp, Mus musculus
  siRNA target sequence for Lyst (NM_010748.1,5359-5377).
ggatgttggtctcttaatt

SEQ ID NO: 651719 - DNA, 19 bp, Mus musculus
  siRNA target sequence for Lyst (NM_010748.1,5415-5433).
ctcagtacaccatctatga

SEQ ID NO: 651720 - DNA, 19 bp, Mus musculus
  siRNA target sequence for Lyst (NM_010748.1,5447-5465).
ctcaagggccaagtgaaaa

SEQ ID NO: 651721 - DNA, 19 bp, Mus musculus
  siRNA target sequence for Lyst (NM_010748.1,5449-5467).
caagggccaagtgaaaact

SEQ ID NO: 651722 - DNA, 19 bp, Mus musculus
  siRNA target sequence for Lyst (NM_010748.1,5540-5558).
ctccaacctacggaatgta

SEQ ID NO: 651723 - DNA, 19 bp, Mus musculus
  siRNA target sequence for Lyst (NM_010748.1,5542-5560).
ccaacctacggaatgtaaa

SEQ ID NO: 651724 - DNA, 19 bp, Mus musculus
  siRNA target sequence for Lyst (NM_010748.1,5614-5632).
ctttgctagggttgttgaa

SEQ ID NO: 651725 - DNA, 19 bp, Mus musculus
  siRNA target sequence for Lyst (NM_010748.1,5618-5636).
gctagggttgttgaactta

SEQ ID NO: 651726 - DNA, 19 bp, Mus musculus
  siRNA target sequence for Lyst (NM_010748.1,5663-5681).
gcactgcgggttatactgt

SEQ ID NO: 651727 - DNA, 19 bp, Mus musculus
  siRNA target sequence for Lyst (NM_010748.1,5668-5686).
gcgggttatactgtcttta

SEQ ID NO: 651728 - DNA, 19 bp, Mus musculus
  siRNA target sequence for Lyst (NM_010748.1,5669-5687).
cgggttatactgtctttaa

SEQ ID NO: 651729 - DNA, 19 bp, Mus musculus
  siRNA target sequence for Lyst (NM_010748.1,5670-5688).
gggttatactgtctttaat

SEQ ID NO: 651730 - DNA, 19 bp, Mus musculus
  siRNA target sequence for Lyst (NM_010748.1,5671-5689).
ggttatactgtctttaatt

SEQ ID NO: 651731 - DNA, 19 bp, Mus musculus
  siRNA target sequence for Lyst (NM_010748.1,5672-5690).
gttatactgtctttaatta

SEQ ID NO: 651732 - DNA, 19 bp, Mus musculus
  siRNA target sequence for Lyst (NM_010748.1,5750-5768).
caagtgttggtcaaacaga

SEQ ID NO: 651733 - DNA, 19 bp, Mus musculus
  siRNA target sequence for Lyst (NM_010748.1,5811-5829).
gttgctgcggtgaagaagt

SEQ ID NO: 651734 - DNA, 19 bp, Mus musculus
  siRNA target sequence for Lyst (NM_010748.1,5814-5832).
gctgcggtgaagaagttat

SEQ ID NO: 651735 - DNA, 19 bp, Mus musculus
  siRNA target sequence for Lyst (NM_010748.1,5841-5859).
gtgagcatggagagttcaa

SEQ ID NO: 651736 - DNA, 19 bp, Mus musculus
  siRNA target sequence for Lyst (NM_010748.1,5880-5898).
ctataatccaagatgttaa

SEQ ID NO: 651737 - DNA, 19 bp, Mus musculus
  siRNA target sequence for Lyst (NM_010748.1,5918-5936).
cttgactggaagatatgga

SEQ ID NO: 651738 - DNA, 19 bp, Mus musculus
  siRNA target sequence for Lyst (NM_010748.1,5921-5939).
gactggaagatatggaata

SEQ ID NO: 651739 - DNA, 19 bp, Mus musculus
  siRNA target sequence for Lyst (NM_010748.1,6007-6025).
ccagcagcagtttaatatt

SEQ ID NO: 651740 - DNA, 19 bp, Mus musculus
  siRNA target sequence for Lyst (NM_010748.1,6116-6134).
ccccgagaagtttgtagat

SEQ ID NO: 651741 - DNA, 19 bp, Mus musculus
  siRNA target sequence for Lyst (NM_010748.1,6118-6136).
ccgagaagtttgtagatca

SEQ ID NO: 651742 - DNA, 19 bp, Mus musculus
  siRNA target sequence for Lyst (NM_010748.1,6119-6137).
cgagaagtttgtagatcat

SEQ ID NO: 651743 - DNA, 19 bp, Mus musculus
  siRNA target sequence for Lyst (NM_010748.1,6125-6143).
gtttgtagatcatttgtga

SEQ ID NO: 651744 - DNA, 19 bp, Mus musculus
  siRNA target sequence for Lyst (NM_010748.1,6168-6186).
ctcctccagacttggaatt

SEQ ID NO: 651745 - DNA, 19 bp, Mus musculus
  siRNA target sequence for Lyst (NM_010748.1,6182-6200).
gaattattgacagttattt

SEQ ID NO: 651746 - DNA, 19 bp, Mus musculus
  siRNA target sequence for Lyst (NM_010748.1,6216-6234).
ctgtacaccctcctactaa

SEQ ID NO: 651747 - DNA, 19 bp, Mus musculus
  siRNA target sequence for Lyst (NM_010748.1,6218-6236).
gtacaccctcctactaata

SEQ ID NO: 651748 - DNA, 19 bp, Mus musculus
  siRNA target sequence for Lyst (NM_010748.1,6221-6239).
caccctcctactaatactt

SEQ ID NO: 651749 - DNA, 19 bp, Mus musculus
  siRNA target sequence for Lyst (NM_010748.1,6223-6241).
ccctcctactaatacttat

SEQ ID NO: 651750 - DNA, 19 bp, Mus musculus
  siRNA target sequence for Lyst (NM_010748.1,6225-6243).
ctcctactaatacttatgt

SEQ ID NO: 651751 - DNA, 19 bp, Mus musculus
  siRNA target sequence for Lyst (NM_010748.1,6227-6245).
cctactaatacttatgttt

SEQ ID NO: 651752 - DNA, 19 bp, Mus musculus
  siRNA target sequence for Lyst (NM_010748.1,6246-6264).
gtcacaatcccacaaactt

SEQ ID NO: 651753 - DNA, 19 bp, Mus musculus
  siRNA target sequence for Lyst (NM_010748.1,6268-6286).
cttctctttgcacatagat

SEQ ID NO: 651754 - DNA, 19 bp, Mus musculus
  siRNA target sequence for Lyst (NM_010748.1,6320-6338).
gcgtacctgaggcattcta

SEQ ID NO: 651755 - DNA, 19 bp, Mus musculus
  siRNA target sequence for Lyst (NM_010748.1,6364-6382).
ccctggattcctggtaata

SEQ ID NO: 651756 - DNA, 19 bp, Mus musculus
  siRNA target sequence for Lyst (NM_010748.1,6365-6383).
cctggattcctggtaataa

SEQ ID NO: 651757 - DNA, 19 bp, Mus musculus
  siRNA target sequence for Lyst (NM_010748.1,6410-6428).
cctgaaggaaccagttctt

SEQ ID NO: 651758 - DNA, 19 bp, Mus musculus
  siRNA target sequence for Lyst (NM_010748.1,6458-6476).
cagatggttcgatctagaa

SEQ ID NO: 651759 - DNA, 19 bp, Mus musculus
  siRNA target sequence for Lyst (NM_010748.1,6460-6478).
gatggttcgatctagaagt

SEQ ID NO: 651760 - DNA, 19 bp, Mus musculus
  siRNA target sequence for Lyst (NM_010748.1,6463-6481).
ggttcgatctagaagtcta

SEQ ID NO: 651761 - DNA, 19 bp, Mus musculus
  siRNA target sequence for Lyst (NM_010748.1,6482-6500).
ccagcatttcctacttatt

SEQ ID NO: 651762 - DNA, 19 bp, Mus musculus
  siRNA target sequence for Lyst (NM_010748.1,6531-6549).
caagtttgggttttagtgt

SEQ ID NO: 651763 - DNA, 19 bp, Mus musculus
  siRNA target sequence for Lyst (NM_010748.1,6608-6626).
ccctacgcactgaaaacaa

SEQ ID NO: 651764 - DNA, 19 bp, Mus musculus
  siRNA target sequence for Lyst (NM_010748.1,6624-6642).
caagcaaagaggaagcatt

SEQ ID NO: 651765 - DNA, 19 bp, Mus musculus
  siRNA target sequence for Lyst (NM_010748.1,6656-6674).
gagtctgcaaagactgttt

SEQ ID NO: 651766 - DNA, 19 bp, Mus musculus
  siRNA target sequence for Lyst (NM_010748.1,6748-6766).
ggccagagtagatcacaaa

SEQ ID NO: 651767 - DNA, 19 bp, Mus musculus
  siRNA target sequence for Lyst (NM_010748.1,6751-6769).
cagagtagatcacaaagat

SEQ ID NO: 651768 - DNA, 19 bp, Mus musculus
  siRNA target sequence for Lyst (NM_010748.1,6753-6771).
gagtagatcacaaagatgt

SEQ ID NO: 651769 - DNA, 19 bp, Mus musculus
  siRNA target sequence for Lyst (NM_010748.1,6931-6949).
caggtggccaagtcttgtt

SEQ ID NO: 651770 - DNA, 19 bp, Mus musculus
  siRNA target sequence for Lyst (NM_010748.1,6939-6957).
caagtcttgttgataggaa

SEQ ID NO: 651771 - DNA, 19 bp, Mus musculus
  siRNA target sequence for Lyst (NM_010748.1,7023-7041).
gcacccacagtgtcattga

SEQ ID NO: 651772 - DNA, 19 bp, Mus musculus
  siRNA target sequence for Lyst (NM_010748.1,7024-7042).
cacccacagtgtcattgaa

SEQ ID NO: 651773 - DNA, 19 bp, Mus musculus
  siRNA target sequence for Lyst (NM_010748.1,7060-7078).
ctgctgtggattatatgaa

SEQ ID NO: 651774 - DNA, 19 bp, Mus musculus
  siRNA target sequence for Lyst (NM_010748.1,7062-7080).
gctgtggattatatgaact

SEQ ID NO: 651775 - DNA, 19 bp, Mus musculus
  siRNA target sequence for Lyst (NM_010748.1,7065-7083).
gtggattatatgaactctt

SEQ ID NO: 651776 - DNA, 19 bp, Mus musculus
  siRNA target sequence for Lyst (NM_010748.1,7067-7085).
ggattatatgaactcttaa

SEQ ID NO: 651777 - DNA, 19 bp, Mus musculus
  siRNA target sequence for Lyst (NM_010748.1,7129-7147).
gatggacaggattattcaa

SEQ ID NO: 651778 - DNA, 19 bp, Mus musculus
  siRNA target sequence for Lyst (NM_010748.1,7137-7155).
ggattattcaagcagatat

SEQ ID NO: 651779 - DNA, 19 bp, Mus musculus
  siRNA target sequence for Lyst (NM_010748.1,7188-7206).
ctatccagcaaggagtaat

SEQ ID NO: 651780 - DNA, 19 bp, Mus musculus
  siRNA target sequence for Lyst (NM_010748.1,7200-7218).
gagtaattaaactgttaca

SEQ ID NO: 651781 - DNA, 19 bp, Mus musculus
  siRNA target sequence for Lyst (NM_010748.1,7213-7231).
gttacatgcatacattaat

SEQ ID NO: 651782 - DNA, 19 bp, Mus musculus
  siRNA target sequence for Lyst (NM_010748.1,7267-7285).
gaaccgtggcttttcctta

SEQ ID NO: 651783 - DNA, 19 bp, Mus musculus
  siRNA target sequence for Lyst (NM_010748.1,7291-7309).
caaccagttgtatcttcat

SEQ ID NO: 651784 - DNA, 19 bp, Mus musculus
  siRNA target sequence for Lyst (NM_010748.1,7324-7342).
gttgttggagtgctttgtt

SEQ ID NO: 651785 - DNA, 19 bp, Mus musculus
  siRNA target sequence for Lyst (NM_010748.1,7362-7380).
cgattggcctggatgaaga

SEQ ID NO: 651786 - DNA, 19 bp, Mus musculus
  siRNA target sequence for Lyst (NM_010748.1,7437-7455).
ccgttctcggactaataga

SEQ ID NO: 651787 - DNA, 19 bp, Mus musculus
  siRNA target sequence for Lyst (NM_010748.1,7439-7457).
gttctcggactaatagaga

SEQ ID NO: 651788 - DNA, 19 bp, Mus musculus
  siRNA target sequence for Lyst (NM_010748.1,7456-7474).
gacctctctctatgacaat

SEQ ID NO: 651789 - DNA, 19 bp, Mus musculus
  siRNA target sequence for Lyst (NM_010748.1,7549-7567).
ggacaatggtctactctat

SEQ ID NO: 651790 - DNA, 19 bp, Mus musculus
  siRNA target sequence for Lyst (NM_010748.1,7552-7570).
caatggtctactctatgta

SEQ ID NO: 651791 - DNA, 19 bp, Mus musculus
  siRNA target sequence for Lyst (NM_010748.1,7556-7574).
ggtctactctatgtattat

SEQ ID NO: 651792 - DNA, 19 bp, Mus musculus
  siRNA target sequence for Lyst (NM_010748.1,7616-7634).
cctgtgaacgaatacaaat

SEQ ID NO: 651793 - DNA, 19 bp, Mus musculus
  siRNA target sequence for Lyst (NM_010748.1,7630-7648).
caaattgctcgcatgtgat

SEQ ID NO: 651794 - DNA, 19 bp, Mus musculus
  siRNA target sequence for Lyst (NM_010748.1,7789-7807).
ggccctgcagcttagagtt

SEQ ID NO: 651795 - DNA, 19 bp, Mus musculus
  siRNA target sequence for Lyst (NM_010748.1,8071-8089).
gcagaggctcaccatctta

SEQ ID NO: 651796 - DNA, 19 bp, Mus musculus
  siRNA target sequence for Lyst (NM_010748.1,8124-8142).
cagatattattgacatttt

SEQ ID NO: 651797 - DNA, 19 bp, Mus musculus
  siRNA target sequence for Lyst (NM_010748.1,8169-8187).
gcaagacctcagtttctca

SEQ ID NO: 651798 - DNA, 19 bp, Mus musculus
  siRNA target sequence for Lyst (NM_010748.1,8221-8239).
gcaaccttctgtatataat

SEQ ID NO: 651799 - DNA, 19 bp, Mus musculus
  siRNA target sequence for Lyst (NM_010748.1,8231-8249).
gtatataatccatttcaaa

SEQ ID NO: 651800 - DNA, 19 bp, Mus musculus
  siRNA target sequence for Lyst (NM_010748.1,8246-8264).
caaaaagaaatgttaacct

SEQ ID NO: 651801 - DNA, 19 bp, Mus musculus
  siRNA target sequence for Lyst (NM_010748.1,8252-8270).
gaaatgttaacctatctgt

SEQ ID NO: 651802 - DNA, 19 bp, Mus musculus
  siRNA target sequence for Lyst (NM_010748.1,8301-8319).
gtaaaactagcgtttctaa

SEQ ID NO: 651803 - DNA, 19 bp, Mus musculus
  siRNA target sequence for Lyst (NM_010748.1,8379-8397).
gattgctagcgcatatttt

SEQ ID NO: 651804 - DNA, 19 bp, Mus musculus
  siRNA target sequence for Lyst (NM_010748.1,8383-8401).
gctagcgcatattttgtct

SEQ ID NO: 651805 - DNA, 19 bp, Mus musculus
  siRNA target sequence for Lyst (NM_010748.1,8425-8443).
gaagcagatacttgagata

SEQ ID NO: 651806 - DNA, 19 bp, Mus musculus
  siRNA target sequence for Lyst (NM_010748.1,8428-8446).
gcagatacttgagatagtt

SEQ ID NO: 651807 - DNA, 19 bp, Mus musculus
  siRNA target sequence for Lyst (NM_010748.1,8431-8449).
gatacttgagatagttcat

SEQ ID NO: 651808 - DNA, 19 bp, Mus musculus
  siRNA target sequence for Lyst (NM_010748.1,8454-8472).
cagctcaccaggatatact

SEQ ID NO: 651809 - DNA, 19 bp, Mus musculus
  siRNA target sequence for Lyst (NM_010748.1,8504-8522).
ggagccaagttggttttgt

SEQ ID NO: 651810 - DNA, 19 bp, Mus musculus
  siRNA target sequence for Lyst (NM_010748.1,8551-8569).
ggatgagttaagtgaagaa

SEQ ID NO: 651811 - DNA, 19 bp, Mus musculus
  siRNA target sequence for Lyst (NM_010748.1,8555-8573).
gagttaagtgaagaagaaa

SEQ ID NO: 651812 - DNA, 19 bp, Mus musculus
  siRNA target sequence for Lyst (NM_010748.1,8726-8744).
cagaaaacggtgaacaaca

SEQ ID NO: 651813 - DNA, 19 bp, Mus musculus
  siRNA target sequence for Lyst (NM_010748.1,8761-8779).
ccagaggctcgatttcaaa

SEQ ID NO: 651814 - DNA, 19 bp, Mus musculus
  siRNA target sequence for Lyst (NM_010748.1,8762-8780).
cagaggctcgatttcaaat

SEQ ID NO: 651815 - DNA, 19 bp, Mus musculus
  siRNA target sequence for Lyst (NM_010748.1,8766-8784).
ggctcgatttcaaatccaa

SEQ ID NO: 651816 - DNA, 19 bp, Mus musculus
  siRNA target sequence for Lyst (NM_010748.1,8781-8799).
ccaaggatatatctaaaat

SEQ ID NO: 651817 - DNA, 19 bp, Mus musculus
  siRNA target sequence for Lyst (NM_010748.1,8832-8850).
cccaaggcattgaaaggaa

SEQ ID NO: 651818 - DNA, 19 bp, Mus musculus
  siRNA target sequence for Lyst (NM_010748.1,8869-8887).
cagagggatgtacaaagtt

SEQ ID NO: 651819 - DNA, 19 bp, Mus musculus
  siRNA target sequence for Lyst (NM_010748.1,8871-8889).
gagggatgtacaaagttga

SEQ ID NO: 651820 - DNA, 19 bp, Mus musculus
  siRNA target sequence for Lyst (NM_010748.1,8952-8970).
ggtatgacccaatctacta

SEQ ID NO: 651821 - DNA, 19 bp, Mus musculus
  siRNA target sequence for Lyst (NM_010748.1,8953-8971).
gtatgacccaatctactat

SEQ ID NO: 651822 - DNA, 19 bp, Mus musculus
  siRNA target sequence for Lyst (NM_010748.1,8957-8975).
gacccaatctactatccaa

SEQ ID NO: 651823 - DNA, 19 bp, Mus musculus
  siRNA target sequence for Lyst (NM_010748.1,9031-9049).
gagatgctatctaactatt

SEQ ID NO: 651824 - DNA, 19 bp, Mus musculus
  siRNA target sequence for Lyst (NM_010748.1,9041-9059).
ctaactattcccaataagt

SEQ ID NO: 651825 - DNA, 19 bp, Mus musculus
  siRNA target sequence for Lyst (NM_010748.1,9111-9129).
cttacctttttgaagataa

SEQ ID NO: 651826 - DNA, 19 bp, Mus musculus
  siRNA target sequence for Lyst (NM_010748.1,9184-9202).
cagagtgaatcgaagatgt

SEQ ID NO: 651827 - DNA, 19 bp, Mus musculus
  siRNA target sequence for Lyst (NM_010748.1,9186-9204).
gagtgaatcgaagatgtat

SEQ ID NO: 651828 - DNA, 19 bp, Mus musculus
  siRNA target sequence for Lyst (NM_010748.1,9188-9206).
gtgaatcgaagatgtatca

SEQ ID NO: 651829 - DNA, 19 bp, Mus musculus
  siRNA target sequence for Lyst (NM_010748.1,9190-9208).
gaatcgaagatgtatcagt

SEQ ID NO: 651830 - DNA, 19 bp, Mus musculus
  siRNA target sequence for Lyst (NM_010748.1,9205-9223).
cagtgttgcaccatctaga

SEQ ID NO: 651831 - DNA, 19 bp, Mus musculus
  siRNA target sequence for Lyst (NM_010748.1,9224-9242).
gagacagctggggaattgt

SEQ ID NO: 651832 - DNA, 19 bp, Mus musculus
  siRNA target sequence for Lyst (NM_010748.1,9233-9251).
ggggaattgttgttaggta

SEQ ID NO: 651833 - DNA, 19 bp, Mus musculus
  siRNA target sequence for Lyst (NM_010748.1,9234-9252).
gggaattgttgttaggtaa

SEQ ID NO: 651834 - DNA, 19 bp, Mus musculus
  siRNA target sequence for Lyst (NM_010748.1,9306-9324).
gcctccaaggggagttaga

SEQ ID NO: 651835 - DNA, 19 bp, Mus musculus
  siRNA target sequence for Lyst (NM_010748.1,9319-9337).
gttagagccggcatcattt

SEQ ID NO: 651836 - DNA, 19 bp, Mus musculus
  siRNA target sequence for Lyst (NM_010748.1,9323-9341).
gagccggcatcattttctt

SEQ ID NO: 651837 - DNA, 19 bp, Mus musculus
  siRNA target sequence for Lyst (NM_010748.1,9342-9360).
ggacatatgaggaaattaa

SEQ ID NO: 651838 - DNA, 19 bp, Mus musculus
  siRNA target sequence for Lyst (NM_010748.1,9373-9391).
gcgctggtggcaactaaga

SEQ ID NO: 651839 - DNA, 19 bp, Mus musculus
  siRNA target sequence for Lyst (NM_010748.1,9382-9400).
gcaactaagagataatgct

SEQ ID NO: 651840 - DNA, 19 bp, Mus musculus
  siRNA target sequence for Lyst (NM_010748.1,9390-9408).
gagataatgctgtagaaat

SEQ ID NO: 651841 - DNA, 19 bp, Mus musculus
  siRNA target sequence for Lyst (NM_010748.1,9431-9449).
ctcctattagcatttgaca

SEQ ID NO: 651842 - DNA, 19 bp, Mus musculus
  siRNA target sequence for Lyst (NM_010748.1,9489-9507).
caaataacctcccaaatct

SEQ ID NO: 651843 - DNA, 19 bp, Mus musculus
  siRNA target sequence for Lyst (NM_010748.1,9535-9553).
gacaaacctgtggtattct

SEQ ID NO: 651844 - DNA, 19 bp, Mus musculus
  siRNA target sequence for Lyst (NM_010748.1,9555-9573).
gacaaattaccaattttga

SEQ ID NO: 651845 - DNA, 19 bp, Mus musculus
  siRNA target sequence for Lyst (NM_010748.1,9606-9624).
ggtccttcaatgatctcat

SEQ ID NO: 651846 - DNA, 19 bp, Mus musculus
  siRNA target sequence for Lyst (NM_010748.1,9635-9653).
gtgttccccttcatccttt

SEQ ID NO: 651847 - DNA, 19 bp, Mus musculus
  siRNA target sequence for Lyst (NM_010748.1,9649-9667).
cctttctgactatgttagt

SEQ ID NO: 651848 - DNA, 19 bp, Mus musculus
  siRNA target sequence for Lyst (NM_010748.1,9680-9698).
ctcaatgatccatctatct

SEQ ID NO: 651849 - DNA, 19 bp, Mus musculus
  siRNA target sequence for Lyst (NM_010748.1,9706-9724).
cctatctaagcctatagct

SEQ ID NO: 651850 - DNA, 19 bp, Mus musculus
  siRNA target sequence for Lyst (NM_010748.1,9716-9734).
cctatagctgtgcagtata

SEQ ID NO: 651851 - DNA, 19 bp, Mus musculus
  siRNA target sequence for Lyst (NM_010748.1,9749-9767).
cgttacgttgacacataca

SEQ ID NO: 651852 - DNA, 19 bp, Mus musculus
  siRNA target sequence for Lyst (NM_010748.1,9750-9768).
gttacgttgacacatacaa

SEQ ID NO: 651853 - DNA, 19 bp, Mus musculus
  siRNA target sequence for Lyst (NM_010748.1,9886-9904).
caggatgccgcctttcact

SEQ ID NO: 651854 - DNA, 19 bp, Mus musculus
  siRNA target sequence for Lyst (NM_010748.1,9910-9928).
gtttctagcctatcaagat

SEQ ID NO: 651855 - DNA, 19 bp, Mus musculus
  siRNA target sequence for Lyst (NM_010748.1,9944-9962).
ccagaccgaacatttcatt

SEQ ID NO: 651856 - DNA, 19 bp, Mus musculus
  siRNA target sequence for Lyst (NM_010748.1,9947-9965).
gaccgaacatttcattcta

SEQ ID NO: 651857 - DNA, 19 bp, Mus musculus
  siRNA target sequence for Lyst (NM_010748.1,9949-9967).
ccgaacatttcattctaca

SEQ ID NO: 651858 - DNA, 19 bp, Mus musculus
  siRNA target sequence for Lyst (NM_010748.1,9980-9998).
cgcctctcctcctttgagt

SEQ ID NO: 651859 - DNA, 19 bp, Mus musculus
  siRNA target sequence for Lyst (NM_010748.1,10075-10093).
cttcggtgttcgtcagaat

SEQ ID NO: 651860 - DNA, 19 bp, Mus musculus
  siRNA target sequence for Lyst (NM_010748.1,10101-10119).
gggttaaccacgtcaatct

SEQ ID NO: 651861 - DNA, 19 bp, Mus musculus
  siRNA target sequence for Lyst (NM_010748.1,10102-10120).
ggttaaccacgtcaatctt

SEQ ID NO: 651862 - DNA, 19 bp, Mus musculus
  siRNA target sequence for Lyst (NM_010748.1,10142-10160).
cctcggctgttcatcctta

SEQ ID NO: 651863 - DNA, 19 bp, Mus musculus
  siRNA target sequence for Lyst (NM_010748.1,10143-10161).
ctcggctgttcatccttat

SEQ ID NO: 651864 - DNA, 19 bp, Mus musculus
  siRNA target sequence for Lyst (NM_010748.1,10206-10224).
gtcactggatcgacttagt

SEQ ID NO: 651865 - DNA, 19 bp, Mus musculus
  siRNA target sequence for Lyst (NM_010748.1,10208-10226).
cactggatcgacttagtgt

SEQ ID NO: 651866 - DNA, 19 bp, Mus musculus
  siRNA target sequence for Lyst (NM_010748.1,10243-10261).
ggggaaggcgtctgttcaa

SEQ ID NO: 651867 - DNA, 19 bp, Mus musculus
  siRNA target sequence for Lyst (NM_010748.1,10328-10346).
cagagacgggctttagaaa

SEQ ID NO: 651868 - DNA, 19 bp, Mus musculus
  siRNA target sequence for Lyst (NM_010748.1,10337-10355).
gctttagaaaccatgataa

SEQ ID NO: 651869 - DNA, 19 bp, Mus musculus
  siRNA target sequence for Lyst (NM_010748.1,10406-10424).
cgacctggagccaagctta

SEQ ID NO: 651870 - DNA, 19 bp, Mus musculus
  siRNA target sequence for Lyst (NM_010748.1,10407-10425).
gacctggagccaagcttaa

SEQ ID NO: 651871 - DNA, 19 bp, Mus musculus
  siRNA target sequence for Lyst (NM_010748.1,10706-10724).
ggtgtgagaagcatgaaca

SEQ ID NO: 651872 - DNA, 19 bp, Mus musculus
  siRNA target sequence for Lyst (NM_010748.1,10716-10734).
gcatgaacaacaccaatat

SEQ ID NO: 651873 - DNA, 19 bp, Mus musculus
  siRNA target sequence for Lyst (NM_010748.1,10736-10754).
cagtggtctgctatcctaa

SEQ ID NO: 651874 - DNA, 19 bp, Mus musculus
  siRNA target sequence for Lyst (NM_010748.1,10758-10776).
ggggatatgctgacaacat

SEQ ID NO: 651875 - DNA, 19 bp, Mus musculus
  siRNA target sequence for Lyst (NM_010748.1,10761-10779).
gatatgctgacaacatctt

SEQ ID NO: 651876 - DNA, 19 bp, Mus musculus
  siRNA target sequence for Lyst (NM_010748.1,10771-10789).
caacatcttacggttgaaa

SEQ ID NO: 651877 - DNA, 19 bp, Mus musculus
  siRNA target sequence for Lyst (NM_010748.1,10800-10818).
gtgagccaccaatcaactt

SEQ ID NO: 651878 - DNA, 19 bp, Mus musculus
  siRNA target sequence for Lyst (NM_010748.1,10804-10822).
gccaccaatcaacttcatt

SEQ ID NO: 651879 - DNA, 19 bp, Mus musculus
  siRNA target sequence for Lyst (NM_010748.1,10806-10824).
caccaatcaacttcattca

SEQ ID NO: 651880 - DNA, 19 bp, Mus musculus
  siRNA target sequence for Lyst (NM_010748.1,10938-10956).
gcacgccctcagaaattga

SEQ ID NO: 651881 - DNA, 19 bp, Mus musculus
  siRNA target sequence for Lyst (NM_010748.1,10993-11011).
ggagatcaccggcttatgt

SEQ ID NO: 651882 - DNA, 19 bp, Mus musculus
  siRNA target sequence for Lyst (NM_010748.1,11020-11038).
gccgtacagcgtgatgata

SEQ ID NO: 651883 - DNA, 19 bp, Mus musculus
  siRNA target sequence for Lyst (NM_010748.1,11021-11039).
ccgtacagcgtgatgataa

SEQ ID NO: 651884 - DNA, 19 bp, Mus musculus
  siRNA target sequence for Lyst (NM_010748.1,11051-11069).
gacgggacctgcatagtat

SEQ ID NO: 651885 - DNA, 19 bp, Mus musculus
  siRNA target sequence for Lyst (NM_010748.1,11080-11098).
caggctgtgctatgtacaa

SEQ ID NO: 651886 - DNA, 19 bp, Mus musculus
  siRNA target sequence for Lyst (NM_010748.1,11083-11101).
gctgtgctatgtacaaagt

SEQ ID NO: 651887 - DNA, 19 bp, Mus musculus
  siRNA target sequence for Lyst (NM_010748.1,11084-11102).
ctgtgctatgtacaaagtt

SEQ ID NO: 651888 - DNA, 19 bp, Mus musculus
  siRNA target sequence for Lyst (NM_010748.1,11305-11323).
cattgctgggggattagaa

SEQ ID NO: 651889 - DNA, 19 bp, Mus musculus
  siRNA target sequence for Lyst (NM_010748.1,11400-11418).
ccatcataagcctgacatt

SEQ ID NO: 651890 - DNA, 19 bp, Mus musculus
  siRNA target sequence for Lyst (NM_010748.1,11421-11439).
cctgtgatggccaccattt

SEQ ID NO: 651891 - DNA, 19 bp, Mus musculus
  siRNA target sequence for Mtx1 (NM_013604.1,65-83).
cggtggacctggatagtct

SEQ ID NO: 651892 - DNA, 19 bp, Mus musculus
  siRNA target sequence for Mtx1 (NM_013604.1,85-103).
gccgtgctgacctatacca

SEQ ID NO: 651893 - DNA, 19 bp, Mus musculus
  siRNA target sequence for Mtx1 (NM_013604.1,90-108).
gctgacctataccagattt

SEQ ID NO: 651894 - DNA, 19 bp, Mus musculus
  siRNA target sequence for Mtx1 (NM_013604.1,93-111).
gacctataccagatttaca

SEQ ID NO: 651895 - DNA, 19 bp, Mus musculus
  siRNA target sequence for Mtx1 (NM_013604.1,130-148).
cacaagaccagcaatcctt

SEQ ID NO: 651896 - DNA, 19 bp, Mus musculus
  siRNA target sequence for Mtx1 (NM_013604.1,222-240).
catcacccatcttcgtaaa

SEQ ID NO: 651897 - DNA, 19 bp, Mus musculus
  siRNA target sequence for Mtx1 (NM_013604.1,232-250).
cttcgtaaagagaagtata

SEQ ID NO: 651898 - DNA, 19 bp, Mus musculus
  siRNA target sequence for Mtx1 (NM_013604.1,328-346).
cctgtgctaatccatactt

SEQ ID NO: 651899 - DNA, 19 bp, Mus musculus
  siRNA target sequence for Mtx1 (NM_013604.1,334-352).
ctaatccatactttttgga

SEQ ID NO: 651900 - DNA, 19 bp, Mus musculus
  siRNA target sequence for Mtx1 (NM_013604.1,350-368).
ggatagacgccaagaacta

SEQ ID NO: 651901 - DNA, 19 bp, Mus musculus
  siRNA target sequence for Mtx1 (NM_013604.1,351-369).
gatagacgccaagaactat

SEQ ID NO: 651902 - DNA, 19 bp, Mus musculus
  siRNA target sequence for Mtx1 (NM_013604.1,472-490).
ctgtgtggcgagcacaaat

SEQ ID NO: 651903 - DNA, 19 bp, Mus musculus
  siRNA target sequence for Mtx1 (NM_013604.1,871-889).
ctgctcagtggcatcgttt

SEQ ID NO: 651904 - DNA, 19 bp, Mus musculus
  siRNA target sequence for Mtx1 (NM_013604.1,874-892).
ctcagtggcatcgtttcta

SEQ ID NO: 651905 - DNA, 19 bp, Mus musculus
  siRNA target sequence for Mtx2 (NM_016804.2,236-254).
ctgagaggggagcaaattt

SEQ ID NO: 651906 - DNA, 19 bp, Mus musculus
  siRNA target sequence for Mtx2 (NM_016804.2,278-296).
cttgctgtgcaggcatttt

SEQ ID NO: 651907 - DNA, 19 bp, Mus musculus
  siRNA target sequence for Mtx2 (NM_016804.2,282-300).
ctgtgcaggcatttttgca

SEQ ID NO: 651908 - DNA, 19 bp, Mus musculus
  siRNA target sequence for Mtx2 (NM_016804.2,291-309).
catttttgcagatgtgtaa

SEQ ID NO: 651909 - DNA, 19 bp, Mus musculus
  siRNA target sequence for Mtx2 (NM_016804.2,304-322).
gtgtaatctgcctgtcaaa

SEQ ID NO: 651910 - DNA, 19 bp, Mus musculus
  siRNA target sequence for Mtx2 (NM_016804.2,333-351).
gggcaaatgcggaatatat

SEQ ID NO: 651911 - DNA, 19 bp, Mus musculus
  siRNA target sequence for Mtx2 (NM_016804.2,335-353).
gcaaatgcggaatatatgt

SEQ ID NO: 651912 - DNA, 19 bp, Mus musculus
  siRNA target sequence for Mtx2 (NM_016804.2,402-420).
cagaacttggcccaatagt

SEQ ID NO: 651913 - DNA, 19 bp, Mus musculus
  siRNA target sequence for Mtx2 (NM_016804.2,411-429).
gcccaatagtccaatttgt

SEQ ID NO: 651914 - DNA, 19 bp, Mus musculus
  siRNA target sequence for Mtx2 (NM_016804.2,412-430).
cccaatagtccaatttgtt

SEQ ID NO: 651915 - DNA, 19 bp, Mus musculus
  siRNA target sequence for Mtx2 (NM_016804.2,413-431).
ccaatagtccaatttgtta

SEQ ID NO: 651916 - DNA, 19 bp, Mus musculus
  siRNA target sequence for Mtx2 (NM_016804.2,414-432).
caatagtccaatttgttaa

SEQ ID NO: 651917 - DNA, 19 bp, Mus musculus
  siRNA target sequence for Mtx2 (NM_016804.2,561-579).
cagtaggggagatcactat

SEQ ID NO: 651918 - DNA, 19 bp, Mus musculus
  siRNA target sequence for Mtx2 (NM_016804.2,566-584).
ggggagatcactattgcta

SEQ ID NO: 651919 - DNA, 19 bp, Mus musculus
  siRNA target sequence for Mtx2 (NM_016804.2,571-589).
gatcactattgctaggtat

SEQ ID NO: 651920 - DNA, 19 bp, Mus musculus
  siRNA target sequence for Mtx2 (NM_016804.2,617-635).
cacattttggcctatcaga

SEQ ID NO: 651921 - DNA, 19 bp, Mus musculus
  siRNA target sequence for Mtx2 (NM_016804.2,642-660).
gggaagtgaaacgtaagat

SEQ ID NO: 651922 - DNA, 19 bp, Mus musculus
  siRNA target sequence for Mtx2 (NM_016804.2,644-662).
gaagtgaaacgtaagatga

SEQ ID NO: 651923 - DNA, 19 bp, Mus musculus
  siRNA target sequence for Mtx2 (NM_016804.2,741-759).
gactgggaacacaaccata

SEQ ID NO: 651924 - DNA, 19 bp, Mus musculus
  siRNA target sequence for Mtx2 (NM_016804.2,756-774).
catacttcttcaataagca

SEQ ID NO: 651925 - DNA, 19 bp, Mus musculus
  siRNA target sequence for Mtx2 (NM_016804.2,766-784).
caataagcaacctactgaa

SEQ ID NO: 651926 - DNA, 19 bp, Mus musculus
  siRNA target sequence for Mtx2 (NM_016804.2,816-834).
ccattcttaccacacaatt

SEQ ID NO: 651927 - DNA, 19 bp, Mus musculus
  siRNA target sequence for Mtx2 (NM_016804.2,837-855).
ccagcgatgaactttctga

SEQ ID NO: 651928 - DNA, 19 bp, Mus musculus
  siRNA target sequence for Mtx2 (NM_016804.2,848-866).
ctttctgagaaggtgaaaa

SEQ ID NO: 651929 - DNA, 19 bp, Mus musculus
  siRNA target sequence for Mtx2 (NM_016804.2,874-892).
caacctcctggctttctgt

SEQ ID NO: 651930 - DNA, 19 bp, Mus musculus
  siRNA target sequence for Mtx2 (NM_016804.2,897-915).
gaattgaacagcactactt

SEQ ID NO: 651931 - DNA, 19 bp, Mus musculus
  siRNA target sequence for Mtx2 (NM_016804.2,926-944).
ggtaaaggcaggttgtctt

SEQ ID NO: 651932 - DNA, 19 bp, Mus musculus
  siRNA target sequence for Napa (NM_025898.1,134-152).
gaggctcatccaaaataga

SEQ ID NO: 651933 - DNA, 19 bp, Mus musculus
  siRNA target sequence for Napa (NM_025898.1,153-171).
ggaagcatgcgagatctat

SEQ ID NO: 651934 - DNA, 19 bp, Mus musculus
  siRNA target sequence for Napa (NM_025898.1,173-191).
ccagagcggcgaacatgtt

SEQ ID NO: 651935 - DNA, 19 bp, Mus musculus
  siRNA target sequence for Napa (NM_025898.1,176-194).
gagcggcgaacatgttcaa

SEQ ID NO: 651936 - DNA, 19 bp, Mus musculus
  siRNA target sequence for Napa (NM_025898.1,178-196).
gcggcgaacatgttcaaga

SEQ ID NO: 651937 - DNA, 19 bp, Mus musculus
  siRNA target sequence for Napa (NM_025898.1,179-197).
cggcgaacatgttcaagat

SEQ ID NO: 651938 - DNA, 19 bp, Mus musculus
  siRNA target sequence for Napa (NM_025898.1,298-316).
gctggcaatgctttcaaga

SEQ ID NO: 651939 - DNA, 19 bp, Mus musculus
  siRNA target sequence for Napa (NM_025898.1,325-343).
ccccaagaggccattaact

SEQ ID NO: 651940 - DNA, 19 bp, Mus musculus
  siRNA target sequence for Napa (NM_025898.1,327-345).
ccaagaggccattaactgt

SEQ ID NO: 651941 - DNA, 19 bp, Mus musculus
  siRNA target sequence for Napa (NM_025898.1,344-362).
gtctgatgagagcaattga

SEQ ID NO: 651942 - DNA, 19 bp, Mus musculus
  siRNA target sequence for Napa (NM_025898.1,356-374).
caattgagatctatacaga

SEQ ID NO: 651943 - DNA, 19 bp, Mus musculus
  siRNA target sequence for Napa (NM_025898.1,573-591).
gaaggctatcgacatctat

SEQ ID NO: 651944 - DNA, 19 bp, Mus musculus
  siRNA target sequence for Napa (NM_025898.1,638-656).
gcgccaaagactacttctt

SEQ ID NO: 651945 - DNA, 19 bp, Mus musculus
  siRNA target sequence for Napa (NM_025898.1,640-658).
gccaaagactacttcttca

SEQ ID NO: 651946 - DNA, 19 bp, Mus musculus
  siRNA target sequence for Napa (NM_025898.1,671-689).
gccacttctgcattgacat

SEQ ID NO: 651947 - DNA, 19 bp, Mus musculus
  siRNA target sequence for Napa (NM_025898.1,702-720).
gctcgctgttcagaagtat

SEQ ID NO: 651948 - DNA, 19 bp, Mus musculus
  siRNA target sequence for Napa (NM_025898.1,753-771).
ggaatgcaagctgatgaaa

SEQ ID NO: 651949 - DNA, 19 bp, Mus musculus
  siRNA target sequence for Napa (NM_025898.1,785-803).
cccatgaggaacagaatgt

SEQ ID NO: 651950 - DNA, 19 bp, Mus musculus
  siRNA target sequence for Napa (NM_025898.1,820-838).
gcggtgaaggaatatgact

SEQ ID NO: 651951 - DNA, 19 bp, Mus musculus
  siRNA target sequence for Napa (NM_025898.1,874-892).
cttctgcgcataaagaaga

SEQ ID NO: 651952 - DNA, 19 bp, Mus musculus
  siRNA target sequence for Napb (NM_019632.1,81-99).
gagaagcggtccagcttat

SEQ ID NO: 651953 - DNA, 19 bp, Mus musculus
  siRNA target sequence for Napb (NM_019632.1,148-166).
gttgttcggaggaaacaca

SEQ ID NO: 651954 - DNA, 19 bp, Mus musculus
  siRNA target sequence for Napb (NM_019632.1,173-191).
gaagaggcatgtgaaatgt

SEQ ID NO: 651955 - DNA, 19 bp, Mus musculus
  siRNA target sequence for Napb (NM_019632.1,190-208).
gtataccagagctgcaaat

SEQ ID NO: 651956 - DNA, 19 bp, Mus musculus
  siRNA target sequence for Napb (NM_019632.1,240-258).
cagggaatgcgttttgtca

SEQ ID NO: 651957 - DNA, 19 bp, Mus musculus
  siRNA target sequence for Napb (NM_019632.1,347-365).
cctcaagaggctatcaact

SEQ ID NO: 651958 - DNA, 19 bp, Mus musculus
  siRNA target sequence for Napb (NM_019632.1,433-451).
caccattgccgagatctat

SEQ ID NO: 651959 - DNA, 19 bp, Mus musculus
  siRNA target sequence for Napb (NM_019632.1,458-476).
gagctcgtggacattgaga

SEQ ID NO: 651960 - DNA, 19 bp, Mus musculus
  siRNA target sequence for Napb (NM_019632.1,469-487).
cattgagaaggctattgca

SEQ ID NO: 651961 - DNA, 19 bp, Mus musculus
  siRNA target sequence for Napb (NM_019632.1,475-493).
gaaggctattgcacactat

SEQ ID NO: 651962 - DNA, 19 bp, Mus musculus
  siRNA target sequence for Napb (NM_019632.1,478-496).
ggctattgcacactatgaa

SEQ ID NO: 651963 - DNA, 19 bp, Mus musculus
  siRNA target sequence for Napb (NM_019632.1,480-498).
ctattgcacactatgaaca

SEQ ID NO: 651964 - DNA, 19 bp, Mus musculus
  siRNA target sequence for Napb (NM_019632.1,494-512).
gaacaatctgctgattact

SEQ ID NO: 651965 - DNA, 19 bp, Mus musculus
  siRNA target sequence for Napb (NM_019632.1,638-656).
gataaccccttgttgaagt

SEQ ID NO: 651966 - DNA, 19 bp, Mus musculus
  siRNA target sequence for Napb (NM_019632.1,652-670).
gaagtacagtgcaaaggat

SEQ ID NO: 651967 - DNA, 19 bp, Mus musculus
  siRNA target sequence for Napb (NM_019632.1,662-680).
gcaaaggattacttcttca

SEQ ID NO: 651968 - DNA, 19 bp, Mus musculus
  siRNA target sequence for Napb (NM_019632.1,663-681).
caaaggattacttcttcaa

SEQ ID NO: 651969 - DNA, 19 bp, Mus musculus
  siRNA target sequence for Napb (NM_019632.1,765-783).
cggactccagagaatgtaa

SEQ ID NO: 651970 - DNA, 19 bp, Mus musculus
  siRNA target sequence for Napb (NM_019632.1,847-865).
gaaggagtttgactcaata

SEQ ID NO: 651971 - DNA, 19 bp, Mus musculus
  siRNA target sequence for Napb (NM_019632.1,850-868).
ggagtttgactcaatatca

SEQ ID NO: 651972 - DNA, 19 bp, Mus musculus
  siRNA target sequence for Napb (NM_019632.1,859-877).
ctcaatatcacgtttggat

SEQ ID NO: 651973 - DNA, 19 bp, Mus musculus
  siRNA target sequence for Napb (NM_019632.1,891-909).
ccatgttgcttcgtatcaa

SEQ ID NO: 651974 - DNA, 19 bp, Mus musculus
  siRNA target sequence for Nup37 (NM_027191.1,122-140).
ccgtggattgcgaagatta

SEQ ID NO: 651975 - DNA, 19 bp, Mus musculus
  siRNA target sequence for Nup37 (NM_027191.1,123-141).
cgtggattgcgaagattat

SEQ ID NO: 651976 - DNA, 19 bp, Mus musculus
  siRNA target sequence for Nup37 (NM_027191.1,142-160).
gtgcacgtggtagaattta

SEQ ID NO: 651977 - DNA, 19 bp, Mus musculus
  siRNA target sequence for Nup37 (NM_027191.1,196-214).
gcatatggcggcagtaatt

SEQ ID NO: 651978 - DNA, 19 bp, Mus musculus
  siRNA target sequence for Nup37 (NM_027191.1,197-215).
catatggcggcagtaatta

SEQ ID NO: 651979 - DNA, 19 bp, Mus musculus
  siRNA target sequence for Nup37 (NM_027191.1,256-274).
gacatcgaagggattcagt

SEQ ID NO: 651980 - DNA, 19 bp, Mus musculus
  siRNA target sequence for Nup37 (NM_027191.1,258-276).
catcgaagggattcagtat

SEQ ID NO: 651981 - DNA, 19 bp, Mus musculus
  siRNA target sequence for Nup37 (NM_027191.1,261-279).
cgaagggattcagtataaa

SEQ ID NO: 651982 - DNA, 19 bp, Mus musculus
  siRNA target sequence for Nup37 (NM_027191.1,266-284).
ggattcagtataaaacact

SEQ ID NO: 651983 - DNA, 19 bp, Mus musculus
  siRNA target sequence for Nup37 (NM_027191.1,267-285).
gattcagtataaaacacta

SEQ ID NO: 651984 - DNA, 19 bp, Mus musculus
  siRNA target sequence for Nup37 (NM_027191.1,358-376).
cctgtaatcaaattttgta

SEQ ID NO: 651985 - DNA, 19 bp, Mus musculus
  siRNA target sequence for Nup37 (NM_027191.1,453-471).
ccactcagacttcattaat

SEQ ID NO: 651986 - DNA, 19 bp, Mus musculus
  siRNA target sequence for Nup37 (NM_027191.1,456-474).
ctcagacttcattaatgat

SEQ ID NO: 651987 - DNA, 19 bp, Mus musculus
  siRNA target sequence for Nup37 (NM_027191.1,458-476).
cagacttcattaatgatct

SEQ ID NO: 651988 - DNA, 19 bp, Mus musculus
  siRNA target sequence for Nup37 (NM_027191.1,554-572).
gaaagcagacagctcattt

SEQ ID NO: 651989 - DNA, 19 bp, Mus musculus
  siRNA target sequence for Nup37 (NM_027191.1,605-623).
ggcatcccgaggaaacttt

SEQ ID NO: 651990 - DNA, 19 bp, Mus musculus
  siRNA target sequence for Nup37 (NM_027191.1,607-625).
catcccgaggaaactttca

SEQ ID NO: 651991 - DNA, 19 bp, Mus musculus
  siRNA target sequence for Nup37 (NM_027191.1,650-668).
gaacaatccggttttatga

SEQ ID NO: 651992 - DNA, 19 bp, Mus musculus
  siRNA target sequence for Nup37 (NM_027191.1,675-693).
ggctcagcaggcaatttta

SEQ ID NO: 651993 - DNA, 19 bp, Mus musculus
  siRNA target sequence for Nup37 (NM_027191.1,676-694).
gctcagcaggcaattttat

SEQ ID NO: 651994 - DNA, 19 bp, Mus musculus
  siRNA target sequence for Nup37 (NM_027191.1,704-722).
cagagcagacacccttaat

SEQ ID NO: 651995 - DNA, 19 bp, Mus musculus
  siRNA target sequence for Nup37 (NM_027191.1,706-724).
gagcagacacccttaatgt

SEQ ID NO: 651996 - DNA, 19 bp, Mus musculus
  siRNA target sequence for Nup37 (NM_027191.1,798-816).
cactcggtccagttatcct

SEQ ID NO: 651997 - DNA, 19 bp, Mus musculus
  siRNA target sequence for Nup37 (NM_027191.1,804-822).
gtccagttatcctcaagaa

SEQ ID NO: 651998 - DNA, 19 bp, Mus musculus
  siRNA target sequence for Nup37 (NM_027191.1,837-855).
catggaccgagcacactta

SEQ ID NO: 651999 - DNA, 19 bp, Mus musculus
  siRNA target sequence for Nup37 (NM_027191.1,844-862).
cgagcacacttatttaggt

SEQ ID NO: 652000 - DNA, 19 bp, Mus musculus
  siRNA target sequence for Nup37 (NM_027191.1,860-878).
ggtggtcggccattagtga

SEQ ID NO: 652001 - DNA, 19 bp, Mus musculus
  siRNA target sequence for Nup37 (NM_027191.1,861-879).
gtggtcggccattagtgaa

SEQ ID NO: 652002 - DNA, 19 bp, Mus musculus
  siRNA target sequence for Nup37 (NM_027191.1,863-881).
ggtcggccattagtgaaaa

SEQ ID NO: 652003 - DNA, 19 bp, Mus musculus
  siRNA target sequence for Nup37 (NM_027191.1,866-884).
cggccattagtgaaaactt

SEQ ID NO: 652004 - DNA, 19 bp, Mus musculus
  siRNA target sequence for Nup37 (NM_027191.1,868-886).
gccattagtgaaaacttgt

SEQ ID NO: 652005 - DNA, 19 bp, Mus musculus
  siRNA target sequence for Nup37 (NM_027191.1,869-887).
ccattagtgaaaacttgtt

SEQ ID NO: 652006 - DNA, 19 bp, Mus musculus
  siRNA target sequence for Nup37 (NM_027191.1,870-888).
cattagtgaaaacttgttt

SEQ ID NO: 652007 - DNA, 19 bp, Mus musculus
  siRNA target sequence for Nup37 (NM_027191.1,952-970).
cagcccgtcctcattggtt

SEQ ID NO: 652008 - DNA, 19 bp, Mus musculus
  siRNA target sequence for Nup37 (NM_027191.1,957-975).
cgtcctcattggttctgta

SEQ ID NO: 652009 - DNA, 19 bp, Mus musculus
  siRNA target sequence for Nup37 (NM_028334.1,235-253).
ctttgagagtggagattca

SEQ ID NO: 652010 - DNA, 19 bp, Mus musculus
  siRNA target sequence for Nup37 (NM_028334.1,1101-1119).
gcgaccacaagctcttgtt

SEQ ID NO: 652011 - DNA, 19 bp, Mus musculus
  siRNA target sequence for Nup50 (NM_016714.2,322-340).
ccagtgaggaagtcatgaa

SEQ ID NO: 652012 - DNA, 19 bp, Mus musculus
  siRNA target sequence for Nup50 (NM_016714.2,359-377).
ggcaaagcgcagaaacgtt

SEQ ID NO: 652013 - DNA, 19 bp, Mus musculus
  siRNA target sequence for Nup50 (NM_016714.2,374-392).
cgttggatttgaatctgat

SEQ ID NO: 652014 - DNA, 19 bp, Mus musculus
  siRNA target sequence for Nup50 (NM_016714.2,395-413).
cggaggagcctttaaaggt

SEQ ID NO: 652015 - DNA, 19 bp, Mus musculus
  siRNA target sequence for Nup50 (NM_016714.2,396-414).
ggaggagcctttaaaggtt

SEQ ID NO: 652016 - DNA, 19 bp, Mus musculus
  siRNA target sequence for Nup50 (NM_016714.2,523-541).
cgcccttctccaatgtaaa

SEQ ID NO: 652017 - DNA, 19 bp, Mus musculus
  siRNA target sequence for Nup50 (NM_016714.2,902-920).
cctttttggttcaacaaaa

SEQ ID NO: 652018 - DNA, 19 bp, Mus musculus
  siRNA target sequence for Nup50 (NM_016714.2,1027-1045).
caagtgcctcgtttagttt

SEQ ID NO: 652019 - DNA, 19 bp, Mus musculus
  siRNA target sequence for Nup50 (NM_016714.2,1042-1060).
gtttcggcaagaaaattga

SEQ ID NO: 652020 - DNA, 19 bp, Mus musculus
  siRNA target sequence for Nup50 (NM_016714.2,1091-1109).
ctccctaactgggttttca

SEQ ID NO: 652021 - DNA, 19 bp, Mus musculus
  siRNA target sequence for Nup50 (NM_016714.2,1093-1111).
ccctaactgggttttcatt

SEQ ID NO: 652022 - DNA, 19 bp, Mus musculus
  siRNA target sequence for Nup50 (NM_016714.2,1123-1141).
gctccagcttgtttggtaa

SEQ ID NO: 652023 - DNA, 19 bp, Mus musculus
  siRNA target sequence for Nup50 (NM_016714.2,1126-1144).
ccagcttgtttggtaaaga

SEQ ID NO: 652024 - DNA, 19 bp, Mus musculus
  siRNA target sequence for Nup50 (NM_016714.2,1266-1284).
gtagtggtgaccgaagtaa

SEQ ID NO: 652025 - DNA, 19 bp, Mus musculus
  siRNA target sequence for Nup50 (NM_016714.2,1357-1375).
gtgtggggaccctgcattt

SEQ ID NO: 652026 - DNA, 19 bp, Mus musculus
  siRNA target sequence for Nup50 (NM_016714.2,1432-1450).
gcaacatactgctgaatgt

SEQ ID NO: 652027 - DNA, 19 bp, Mus musculus
  siRNA target sequence for Nup50 (NM_016714.2,1433-1451).
caacatactgctgaatgtt

SEQ ID NO: 652028 - DNA, 19 bp, Mus musculus
  siRNA target sequence for Nup50 (NM_016714.2,1474-1492).
gcacccggacaggaaagaa

SEQ ID NO: 652029 - DNA, 19 bp, Mus musculus
  siRNA target sequence for Nup50 (NM_016714.2,1486-1504).
gaaagaacaacgtccttat

SEQ ID NO: 652030 - DNA, 19 bp, Mus musculus
  siRNA target sequence for Nxf2 (NM_031259.1,174-192).
caacgatatggtttaccat

SEQ ID NO: 652031 - DNA, 19 bp, Mus musculus
  siRNA target sequence for Nxf2 (NM_031259.1,178-196).
gatatggtttaccatacaa

SEQ ID NO: 652032 - DNA, 19 bp, Mus musculus
  siRNA target sequence for Nxf2 (NM_031259.1,206-224).
gagattctatcattcagaa

SEQ ID NO: 652033 - DNA, 19 bp, Mus musculus
  siRNA target sequence for Nxf2 (NM_031259.1,208-226).
gattctatcattcagaata

SEQ ID NO: 652034 - DNA, 19 bp, Mus musculus
  siRNA target sequence for Nxf2 (NM_031259.1,283-301).
ggagtcaatttgacagaaa

SEQ ID NO: 652035 - DNA, 19 bp, Mus musculus
  siRNA target sequence for Nxf2 (NM_031259.1,298-316).
gaaagaacaatcattttga

SEQ ID NO: 652036 - DNA, 19 bp, Mus musculus
  siRNA target sequence for Nxf2 (NM_031259.1,367-385).
gcagttatgatgaccaata

SEQ ID NO: 652037 - DNA, 19 bp, Mus musculus
  siRNA target sequence for Nxf2 (NM_031259.1,396-414).
gtgtgggatgatagtaaaa

SEQ ID NO: 652038 - DNA, 19 bp, Mus musculus
  siRNA target sequence for Nxf2 (NM_031259.1,450-468).
gaaactgaggagaaatggt

SEQ ID NO: 652039 - DNA, 19 bp, Mus musculus
  siRNA target sequence for Nxf2 (NM_031259.1,484-502).
ccagtggaagaaagtatga

SEQ ID NO: 652040 - DNA, 19 bp, Mus musculus
  siRNA target sequence for Nxf2 (NM_031259.1,545-563).
gcccttcatccctgttgat

SEQ ID NO: 652041 - DNA, 19 bp, Mus musculus
  siRNA target sequence for Nxf2 (NM_031259.1,546-564).
cccttcatccctgttgatt

SEQ ID NO: 652042 - DNA, 19 bp, Mus musculus
  siRNA target sequence for Nxf2 (NM_031259.1,558-576).
gttgatttccactatgaca

SEQ ID NO: 652043 - DNA, 19 bp, Mus musculus
  siRNA target sequence for Nxf2 (NM_031259.1,630-648).
gatgtcagctacaggattt

SEQ ID NO: 652044 - DNA, 19 bp, Mus musculus
  siRNA target sequence for Nxf2 (NM_031259.1,691-709).
ctgttgtgccctattctgt

SEQ ID NO: 652045 - DNA, 19 bp, Mus musculus
  siRNA target sequence for Nxf2 (NM_031259.1,700-718).
cctattctgtgcaaaacaa

SEQ ID NO: 652046 - DNA, 19 bp, Mus musculus
  siRNA target sequence for Nxf2 (NM_031259.1,710-728).
gcaaaacaagtttacatca

SEQ ID NO: 652047 - DNA, 19 bp, Mus musculus
  siRNA target sequence for Nxf2 (NM_031259.1,716-734).
caagtttacatcagaacaa

SEQ ID NO: 652048 - DNA, 19 bp, Mus musculus
  siRNA target sequence for Nxf2 (NM_031259.1,738-756).
gagtacataagggaatcta

SEQ ID NO: 652049 - DNA, 19 bp, Mus musculus
  siRNA target sequence for Nxf2 (NM_031259.1,786-804).
gctctggacctcgaaaagt

SEQ ID NO: 652050 - DNA, 19 bp, Mus musculus
  siRNA target sequence for Nxf2 (NM_031259.1,807-825).
cgatttgaccaggacttaa

SEQ ID NO: 652051 - DNA, 19 bp, Mus musculus
  siRNA target sequence for Nxf2 (NM_031259.1,840-858).
gacatgatgctgaatcgaa

SEQ ID NO: 652052 - DNA, 19 bp, Mus musculus
  siRNA target sequence for Nxf2 (NM_031259.1,874-892).
ccacactacagatcattca

SEQ ID NO: 652053 - DNA, 19 bp, Mus musculus
  siRNA target sequence for Nxf2 (NM_031259.1,875-893).
cacactacagatcattcaa

SEQ ID NO: 652054 - DNA, 19 bp, Mus musculus
  siRNA target sequence for Nxf2 (NM_031259.1,882-900).
cagatcattcaaagtgata

SEQ ID NO: 652055 - DNA, 19 bp, Mus musculus
  siRNA target sequence for Nxf2 (NM_031259.1,895-913).
gtgatatccctgaactgtt

SEQ ID NO: 652056 - DNA, 19 bp, Mus musculus
  siRNA target sequence for Nxf2 (NM_031259.1,998-1016).
gaacctctcccgaaataaa

SEQ ID NO: 652057 - DNA, 19 bp, Mus musculus
  siRNA target sequence for Nxf2 (NM_031259.1,1002-1020).
ctctcccgaaataaactga

SEQ ID NO: 652058 - DNA, 19 bp, Mus musculus
  siRNA target sequence for Nxf2 (NM_031259.1,1008-1026).
cgaaataaactgaagtcat

SEQ ID NO: 652059 - DNA, 19 bp, Mus musculus
  siRNA target sequence for Nxf2 (NM_031259.1,1103-1121).
cttggatcattttgagtat

SEQ ID NO: 652060 - DNA, 19 bp, Mus musculus
  siRNA target sequence for Nxf2 (NM_031259.1,1126-1144).
gtactattcatgacctatt

SEQ ID NO: 652061 - DNA, 19 bp, Mus musculus
  siRNA target sequence for Nxf2 (NM_031259.1,1442-1460).
cataaaaaatctagttcta

SEQ ID NO: 652062 - DNA, 19 bp, Mus musculus
  siRNA target sequence for Nxf2 (NM_031259.1,1570-1588).
gtgacccaaacctgaacaa

SEQ ID NO: 652063 - DNA, 19 bp, Mus musculus
  siRNA target sequence for Nxf2 (NM_031259.1,1655-1673).
gttgctgaagcacacaaaa

SEQ ID NO: 652064 - DNA, 19 bp, Mus musculus
  siRNA target sequence for Nxf2 (NM_031259.1,1677-1695).
gacatcgtgaactctctta

SEQ ID NO: 652065 - DNA, 19 bp, Mus musculus
  siRNA target sequence for Nxf2 (NM_031259.1,1685-1703).
gaactctcttagcttgtta

SEQ ID NO: 652066 - DNA, 19 bp, Mus musculus
  siRNA target sequence for Nxf2 (NM_031259.1,1856-1874).
cccttgcagcgattcaaga

SEQ ID NO: 652067 - DNA, 19 bp, Mus musculus
  siRNA target sequence for Nxf2 (NM_031259.1,1857-1875).
ccttgcagcgattcaagaa

SEQ ID NO: 652068 - DNA, 19 bp, Mus musculus
  siRNA target sequence for Nxf2 (NM_031259.1,1998-2016).
gaaatggtgaagtctttct

SEQ ID NO: 652069 - DNA, 19 bp, Mus musculus
  siRNA target sequence for Nxf2 (NM_031259.1,2021-2039).
gcagtctggaatgaaactt

SEQ ID NO: 652070 - DNA, 19 bp, Mus musculus
  siRNA target sequence for Nxf7 (NM_130888.1,24-42).
ggggtccttcagatacaca

SEQ ID NO: 652071 - DNA, 19 bp, Mus musculus
  siRNA target sequence for Nxf7 (NM_130888.1,112-130).
ggcaagaggaccgatcatt

SEQ ID NO: 652072 - DNA, 19 bp, Mus musculus
  siRNA target sequence for Nxf7 (NM_130888.1,113-131).
gcaagaggaccgatcatta

SEQ ID NO: 652073 - DNA, 19 bp, Mus musculus
  siRNA target sequence for Nxf7 (NM_130888.1,114-132).
caagaggaccgatcattat

SEQ ID NO: 652074 - DNA, 19 bp, Mus musculus
  siRNA target sequence for Nxf7 (NM_130888.1,147-165).
cacgattctgcctttcaaa

SEQ ID NO: 652075 - DNA, 19 bp, Mus musculus
  siRNA target sequence for Nxf7 (NM_130888.1,205-223).
ctctggaacccgtcagtaa

SEQ ID NO: 652076 - DNA, 19 bp, Mus musculus
  siRNA target sequence for Nxf7 (NM_130888.1,207-225).
ctggaacccgtcagtaaga

SEQ ID NO: 652077 - DNA, 19 bp, Mus musculus
  siRNA target sequence for Nxf7 (NM_130888.1,209-227).
ggaacccgtcagtaagaca

SEQ ID NO: 652078 - DNA, 19 bp, Mus musculus
  siRNA target sequence for Nxf7 (NM_130888.1,232-250).
ccttatgttgggcaacata

SEQ ID NO: 652079 - DNA, 19 bp, Mus musculus
  siRNA target sequence for Nxf7 (NM_130888.1,254-272).
gtagggaggaagagcatat

SEQ ID NO: 652080 - DNA, 19 bp, Mus musculus
  siRNA target sequence for Nxf7 (NM_130888.1,386-404).
gtgggaggaagtatgacaa

SEQ ID NO: 652081 - DNA, 19 bp, Mus musculus
  siRNA target sequence for Nxf7 (NM_130888.1,446-464).
ccttcacacctgtggattt

SEQ ID NO: 652082 - DNA, 19 bp, Mus musculus
  siRNA target sequence for Nxf7 (NM_130888.1,450-468).
cacacctgtggatttccat

SEQ ID NO: 652083 - DNA, 19 bp, Mus musculus
  siRNA target sequence for Nxf7 (NM_130888.1,459-477).
ggatttccattgtgacaaa

SEQ ID NO: 652084 - DNA, 19 bp, Mus musculus
  siRNA target sequence for Nxf7 (NM_130888.1,528-546).
ggatatcagctataagata

SEQ ID NO: 652085 - DNA, 19 bp, Mus musculus
  siRNA target sequence for Nxf7 (NM_130888.1,534-552).
cagctataagatacataat

SEQ ID NO: 652086 - DNA, 19 bp, Mus musculus
  siRNA target sequence for Nxf7 (NM_130888.1,547-565).
cataatgagtactttcaga

SEQ ID NO: 652087 - DNA, 19 bp, Mus musculus
  siRNA target sequence for Nxf7 (NM_130888.1,607-625).
gtgcagaatagattcacaa

SEQ ID NO: 652088 - DNA, 19 bp, Mus musculus
  siRNA target sequence for Nxf7 (NM_130888.1,609-627).
gcagaatagattcacaaaa

SEQ ID NO: 652089 - DNA, 19 bp, Mus musculus
  siRNA target sequence for Nxf7 (NM_130888.1,696-714).
caaaaagctccgctttgat

SEQ ID NO: 652090 - DNA, 19 bp, Mus musculus
  siRNA target sequence for Nxf7 (NM_130888.1,707-725).
gctttgatccagacttgat

SEQ ID NO: 652091 - DNA, 19 bp, Mus musculus
  siRNA target sequence for Nxf7 (NM_130888.1,735-753).
catccacatgatcctaaat

SEQ ID NO: 652092 - DNA, 19 bp, Mus musculus
  siRNA target sequence for Nxf7 (NM_130888.1,739-757).
cacatgatcctaaatcaca

SEQ ID NO: 652093 - DNA, 19 bp, Mus musculus
  siRNA target sequence for Nxf7 (NM_130888.1,770-788).
ctgccacccttcagatcat

SEQ ID NO: 652094 - DNA, 19 bp, Mus musculus
  siRNA target sequence for Nxf7 (NM_130888.1,854-872).
gcctgattgatgtggtaaa

SEQ ID NO: 652095 - DNA, 19 bp, Mus musculus
  siRNA target sequence for Nxf7 (NM_130888.1,856-874).
ctgattgatgtggtaaaga

SEQ ID NO: 652096 - DNA, 19 bp, Mus musculus
  siRNA target sequence for Nxf7 (NM_130888.1,877-895).
gcaccgcaactcaagatct

SEQ ID NO: 652097 - DNA, 19 bp, Mus musculus
  siRNA target sequence for Nxf7 (NM_130888.1,878-896).
caccgcaactcaagatctt

SEQ ID NO: 652098 - DNA, 19 bp, Mus musculus
  siRNA target sequence for Nxf7 (NM_130888.1,880-898).
ccgcaactcaagatcttga

SEQ ID NO: 652099 - DNA, 19 bp, Mus musculus
  siRNA target sequence for Nxf7 (NM_130888.1,901-919).
ctctccaaaaacatgctaa

SEQ ID NO: 652100 - DNA, 19 bp, Mus musculus
  siRNA target sequence for Nxf7 (NM_130888.1,1003-1021).
ccagaccgatcttcctata

SEQ ID NO: 652101 - DNA, 19 bp, Mus musculus
  siRNA target sequence for Nxf7 (NM_130888.1,1004-1022).
cagaccgatcttcctatat

SEQ ID NO: 652102 - DNA, 19 bp, Mus musculus
  siRNA target sequence for Nxf7 (NM_130888.1,1006-1024).
gaccgatcttcctatataa

SEQ ID NO: 652103 - DNA, 19 bp, Mus musculus
  siRNA target sequence for Nxf7 (NM_130888.1,1008-1026).
ccgatcttcctatataaga

SEQ ID NO: 652104 - DNA, 19 bp, Mus musculus
  siRNA target sequence for Nxf7 (NM_130888.1,1040-1058).
gttttccggagttgtcata

SEQ ID NO: 652105 - DNA, 19 bp, Mus musculus
  siRNA target sequence for Nxf7 (NM_130888.1,1059-1077).
cctggatggcaggaagtta

SEQ ID NO: 652106 - DNA, 19 bp, Mus musculus
  siRNA target sequence for Nxf7 (NM_130888.1,1100-1118).
ctcaagaacgcaagttaat

SEQ ID NO: 652107 - DNA, 19 bp, Mus musculus
  siRNA target sequence for Nxf7 (NM_130888.1,1122-1140).
gccctgcaaggacatcttt

SEQ ID NO: 652108 - DNA, 19 bp, Mus musculus
  siRNA target sequence for Nxf7 (NM_130888.1,1175-1193).
gattcctgcgagagtatta

SEQ ID NO: 652109 - DNA, 19 bp, Mus musculus
  siRNA target sequence for Nxf7 (NM_130888.1,1180-1198).
ctgcgagagtattacttga

SEQ ID NO: 652110 - DNA, 19 bp, Mus musculus
  siRNA target sequence for Nxf7 (NM_130888.1,1183-1201).
cgagagtattacttgatgt

SEQ ID NO: 652111 - DNA, 19 bp, Mus musculus
  siRNA target sequence for Nxf7 (NM_130888.1,1223-1241).
gtctcctgaacatttacca

SEQ ID NO: 652112 - DNA, 19 bp, Mus musculus
  siRNA target sequence for Nxf7 (NM_130888.1,1281-1299).
caatgatccagatctgaat

SEQ ID NO: 652113 - DNA, 19 bp, Mus musculus
  siRNA target sequence for Nxf7 (NM_130888.1,1285-1303).
gatccagatctgaatagca

SEQ ID NO: 652114 - DNA, 19 bp, Mus musculus
  siRNA target sequence for Nxf7 (NM_130888.1,1294-1312).
ctgaatagcatgtatgtct

SEQ ID NO: 652115 - DNA, 19 bp, Mus musculus
  siRNA target sequence for Nxf7 (NM_130888.1,1368-1386).
gctactgaagtacacaaaa

SEQ ID NO: 652116 - DNA, 19 bp, Mus musculus
  siRNA target sequence for Nxf7 (NM_130888.1,1377-1395).
gtacacaaaacaagatatt

SEQ ID NO: 652117 - DNA, 19 bp, Mus musculus
  siRNA target sequence for Nxf7 (NM_130888.1,1517-1535).
gcacccccaaggaatgtgt

SEQ ID NO: 652118 - DNA, 19 bp, Mus musculus
  siRNA target sequence for Nxf7 (NM_130888.1,1561-1579).
gctctccttggcagttcaa

SEQ ID NO: 652119 - DNA, 19 bp, Mus musculus
  siRNA target sequence for Nxf7 (NM_130888.1,1564-1582).
ctccttggcagttcaaaca

SEQ ID NO: 652120 - DNA, 19 bp, Mus musculus
  siRNA target sequence for Nxf7 (NM_130888.1,1567-1585).
cttggcagttcaaacatgt

SEQ ID NO: 652121 - DNA, 19 bp, Mus musculus
  siRNA target sequence for Nxf7 (NM_130888.1,1570-1588).
ggcagttcaaacatgtata

SEQ ID NO: 652122 - DNA, 19 bp, Mus musculus
  siRNA target sequence for Nxf7 (NM_130888.1,1571-1589).
gcagttcaaacatgtatat

SEQ ID NO: 652123 - DNA, 19 bp, Mus musculus
  siRNA target sequence for Nxf7 (NM_130888.1,1603-1621).
ctttttgtgaggaatccaa

SEQ ID NO: 652124 - DNA, 19 bp, Mus musculus
  siRNA target sequence for Nxf7 (NM_130888.1,1728-1746).
cacccagtcggggatgaaa

SEQ ID NO: 652125 - DNA, 19 bp, Mus musculus
  siRNA target sequence for Nxf7 (NM_130888.1,1730-1748).
cccagtcggggatgaaact

SEQ ID NO: 652126 - DNA, 19 bp, Mus musculus
  siRNA target sequence for Nxf7 (NM_130888.1,1734-1752).
gtcggggatgaaacttgaa

SEQ ID NO: 652127 - DNA, 19 bp, Mus musculus
  siRNA target sequence for Pex5 (NM_008995.1,38-56).
gtgccaacccgctgatgaa

SEQ ID NO: 652128 - DNA, 19 bp, Mus musculus
  siRNA target sequence for Pex5 (NM_008995.1,178-196).
gacgagttggtgtcagaat

SEQ ID NO: 652129 - DNA, 19 bp, Mus musculus
  siRNA target sequence for Pex5 (NM_008995.1,204-222).
ggaccagaatgcaactctt

SEQ ID NO: 652130 - DNA, 19 bp, Mus musculus
  siRNA target sequence for Pex5 (NM_008995.1,207-225).
ccagaatgcaactcttgta

SEQ ID NO: 652131 - DNA, 19 bp, Mus musculus
  siRNA target sequence for Pex5 (NM_008995.1,208-226).
cagaatgcaactcttgtat

SEQ ID NO: 652132 - DNA, 19 bp, Mus musculus
  siRNA target sequence for Pex5 (NM_008995.1,279-297).
gattgaacagtcaaacttt

SEQ ID NO: 652133 - DNA, 19 bp, Mus musculus
  siRNA target sequence for Pex5 (NM_008995.1,427-445).
gaattcatcgccgaagtta

SEQ ID NO: 652134 - DNA, 19 bp, Mus musculus
  siRNA target sequence for Pex5 (NM_008995.1,547-565).
gatcgatggtacgatgaat

SEQ ID NO: 652135 - DNA, 19 bp, Mus musculus
  siRNA target sequence for Pex5 (NM_008995.1,551-569).
gatggtacgatgaatatca

SEQ ID NO: 652136 - DNA, 19 bp, Mus musculus
  siRNA target sequence for Pex5 (NM_008995.1,588-606).
gcacacagccagtgacttt

SEQ ID NO: 652137 - DNA, 19 bp, Mus musculus
  siRNA target sequence for Pex5 (NM_008995.1,624-642).
ccccaaattggctaactct

SEQ ID NO: 652138 - DNA, 19 bp, Mus musculus
  siRNA target sequence for Pex5 (NM_008995.1,764-782).
cagaggcctgggttgatca

SEQ ID NO: 652139 - DNA, 19 bp, Mus musculus
  siRNA target sequence for Pex5 (NM_008995.1,771-789).
ctgggttgatcagtttaca

SEQ ID NO: 652140 - DNA, 19 bp, Mus musculus
  siRNA target sequence for Pex5 (NM_008995.1,835-853).
gccaagtcagctatagagt

SEQ ID NO: 652141 - DNA, 19 bp, Mus musculus
  siRNA target sequence for Pex5 (NM_008995.1,850-868).
gagtctgatgtcgatttct

SEQ ID NO: 652142 - DNA, 19 bp, Mus musculus
  siRNA target sequence for Pex5 (NM_008995.1,861-879).
cgatttctgggacaagtta

SEQ ID NO: 652143 - DNA, 19 bp, Mus musculus
  siRNA target sequence for Pex5 (NM_008995.1,926-944).
cctggctttctgactatga

SEQ ID NO: 652144 - DNA, 19 bp, Mus musculus
  siRNA target sequence for Pex5 (NM_008995.1,953-971).
catccgcttcctatgacaa

SEQ ID NO: 652145 - DNA, 19 bp, Mus musculus
  siRNA target sequence for Pex5 (NM_008995.1,1183-1201).
cggaggtgtctggaactaa

SEQ ID NO: 652146 - DNA, 19 bp, Mus musculus
  siRNA target sequence for Pex5 (NM_008995.1,1233-1251).
ggctgtgagctttaccaat

SEQ ID NO: 652147 - DNA, 19 bp, Mus musculus
  siRNA target sequence for Pex5 (NM_008995.1,1237-1255).
gtgagctttaccaatgagt

SEQ ID NO: 652148 - DNA, 19 bp, Mus musculus
  siRNA target sequence for Pex5 (NM_008995.1,1547-1565).
gtgttcgccccaatgacta

SEQ ID NO: 652149 - DNA, 19 bp, Mus musculus
  siRNA target sequence for Pex5 (NM_008995.1,1549-1567).
gttcgccccaatgactatt

SEQ ID NO: 652150 - DNA, 19 bp, Mus musculus
  siRNA target sequence for Pex5 (NM_008995.1,1552-1570).
cgccccaatgactatttga

SEQ ID NO: 652151 - DNA, 19 bp, Mus musculus
  siRNA target sequence for Pex5 (NM_008995.1,1553-1571).
gccccaatgactatttgat

SEQ ID NO: 652152 - DNA, 19 bp, Mus musculus
  siRNA target sequence for Pex5 (NM_008995.1,1635-1653).
ccgccgagcccttgaacta

SEQ ID NO: 652153 - DNA, 19 bp, Mus musculus
  siRNA target sequence for Pex5 (NM_008995.1,1819-1837).
ctgcgcttggcgttatcca

SEQ ID NO: 652154 - DNA, 19 bp, Mus musculus
  siRNA target sequence for Pex5 (NM_008995.1,1886-1904).
ctgccctcctagctatgtt

SEQ ID NO: 652155 - DNA, 19 bp, Mus musculus
  siRNA target sequence for Pex5 (NM_175933.1,507-525).
ccgactggtcccaagaatt

SEQ ID NO: 652156 - DNA, 19 bp, Mus musculus
  siRNA target sequence for Pex5 (NM_175933.1,509-527).
gactggtcccaagaattca

SEQ ID NO: 652157 - DNA, 19 bp, Mus musculus
  siRNA target sequence for Pex7 (NM_008822.1,206-224).
gggctgtggaactctatta

SEQ ID NO: 652158 - DNA, 19 bp, Mus musculus
  siRNA target sequence for Pex7 (NM_008822.1,209-227).
ctgtggaactctattagta

SEQ ID NO: 652159 - DNA, 19 bp, Mus musculus
  siRNA target sequence for Pex7 (NM_008822.1,211-229).
gtggaactctattagtatt

SEQ ID NO: 652160 - DNA, 19 bp, Mus musculus
  siRNA target sequence for Pex7 (NM_008822.1,214-232).
gaactctattagtattgga

SEQ ID NO: 652161 - DNA, 19 bp, Mus musculus
  siRNA target sequence for Pex7 (NM_008822.1,291-309).
gacgttacctggagtgaaa

SEQ ID NO: 652162 - DNA, 19 bp, Mus musculus
  siRNA target sequence for Pex7 (NM_008822.1,294-312).
gttacctggagtgaaaaca

SEQ ID NO: 652163 - DNA, 19 bp, Mus musculus
  siRNA target sequence for Pex7 (NM_008822.1,298-316).
cctggagtgaaaacaatga

SEQ ID NO: 652164 - DNA, 19 bp, Mus musculus
  siRNA target sequence for Pex7 (NM_008822.1,405-423).
cacacgcaggaggtgtata

SEQ ID NO: 652165 - DNA, 19 bp, Mus musculus
  siRNA target sequence for Pex7 (NM_008822.1,407-425).
cacgcaggaggtgtatagt

SEQ ID NO: 652166 - DNA, 19 bp, Mus musculus
  siRNA target sequence for Pex7 (NM_008822.1,410-428).
gcaggaggtgtatagtgtt

SEQ ID NO: 652167 - DNA, 19 bp, Mus musculus
  siRNA target sequence for Pex7 (NM_008822.1,414-432).
gaggtgtatagtgttgatt

SEQ ID NO: 652168 - DNA, 19 bp, Mus musculus
  siRNA target sequence for Pex7 (NM_008822.1,475-493).
gggatcaaactgtcaaagt

SEQ ID NO: 652169 - DNA, 19 bp, Mus musculus
  siRNA target sequence for Pex7 (NM_008822.1,533-551).
gggccatgagagtgtcatt

SEQ ID NO: 652170 - DNA, 19 bp, Mus musculus
  siRNA target sequence for Pex7 (NM_008822.1,534-552).
ggccatgagagtgtcattt

SEQ ID NO: 652171 - DNA, 19 bp, Mus musculus
  siRNA target sequence for Pex7 (NM_008822.1,535-553).
gccatgagagtgtcattta

SEQ ID NO: 652172 - DNA, 19 bp, Mus musculus
  siRNA target sequence for Pex7 (NM_008822.1,546-564).
gtcatttacagcacaatct

SEQ ID NO: 652173 - DNA, 19 bp, Mus musculus
  siRNA target sequence for Pex7 (NM_008822.1,726-744).
ggtgcggttgactgtagtt

SEQ ID NO: 652174 - DNA, 19 bp, Mus musculus
  siRNA target sequence for Pex7 (NM_008822.1,727-745).
gtgcggttgactgtagttt

SEQ ID NO: 652175 - DNA, 19 bp, Mus musculus
  siRNA target sequence for Pex7 (NM_008822.1,729-747).
gcggttgactgtagtttga

SEQ ID NO: 652176 - DNA, 19 bp, Mus musculus
  siRNA target sequence for Pex7 (NM_008822.1,807-825).
gctatcaggagggtgaaat

SEQ ID NO: 652177 - DNA, 19 bp, Mus musculus
  siRNA target sequence for Pex7 (NM_008822.1,808-826).
ctatcaggagggtgaaatt

SEQ ID NO: 652178 - DNA, 19 bp, Mus musculus
  siRNA target sequence for Pex7 (NM_008822.1,923-941).
ggagcatcacacagagttt

SEQ ID NO: 652179 - DNA, 19 bp, Mus musculus
  siRNA target sequence for Pex7 (NM_008822.1,987-1005).
gactgttcctgggatgaaa

SEQ ID NO: 652180 - DNA, 19 bp, Mus musculus
  siRNA target sequence for Pex7 (NM_008822.1,994-1012).
cctgggatgaaaccataaa

SEQ ID NO: 652181 - DNA, 19 bp, Mus musculus
  siRNA target sequence for Pex7 (NM_008822.1,999-1017).
gatgaaaccataaagatct

SEQ ID NO: 652182 - DNA, 19 bp, Mus musculus
  siRNA target sequence for Pex7 (NM_008822.1,1013-1031).
gatctatgaccctgtttgt

SEQ ID NO: 652183 - DNA, 19 bp, Mus musculus
  siRNA target sequence for Ranbp17 (NM_023146.1,86-104).
gggaccgatctcactgaaa

SEQ ID NO: 652184 - DNA, 19 bp, Mus musculus
  siRNA target sequence for Ranbp17 (NM_023146.1,88-106).
gaccgatctcactgaaaga

SEQ ID NO: 652185 - DNA, 19 bp, Mus musculus
  siRNA target sequence for Ranbp17 (NM_023146.1,90-108).
ccgatctcactgaaagaat

SEQ ID NO: 652186 - DNA, 19 bp, Mus musculus
  siRNA target sequence for Ranbp17 (NM_023146.1,91-109).
cgatctcactgaaagaata

SEQ ID NO: 652187 - DNA, 19 bp, Mus musculus
  siRNA target sequence for Ranbp17 (NM_023146.1,157-175).
cagcaagtgtcaactttta

SEQ ID NO: 652188 - DNA, 19 bp, Mus musculus
  siRNA target sequence for Ranbp17 (NM_023146.1,159-177).
gcaagtgtcaacttttact

SEQ ID NO: 652189 - DNA, 19 bp, Mus musculus
  siRNA target sequence for Ranbp17 (NM_023146.1,160-178).
caagtgtcaacttttacta

SEQ ID NO: 652190 - DNA, 19 bp, Mus musculus
  siRNA target sequence for Ranbp17 (NM_023146.1,165-183).
gtcaacttttactagaaca

SEQ ID NO: 652191 - DNA, 19 bp, Mus musculus
  siRNA target sequence for Ranbp17 (NM_023146.1,208-226).
ccttgcagcaacatgtctt

SEQ ID NO: 652192 - DNA, 19 bp, Mus musculus
  siRNA target sequence for Ranbp17 (NM_023146.1,212-230).
gcagcaacatgtctttcaa

SEQ ID NO: 652193 - DNA, 19 bp, Mus musculus
  siRNA target sequence for Ranbp17 (NM_023146.1,236-254).
gttacccgaatcaatcctt

SEQ ID NO: 652194 - DNA, 19 bp, Mus musculus
  siRNA target sequence for Ranbp17 (NM_023146.1,241-259).
ccgaatcaatcctttacct

SEQ ID NO: 652195 - DNA, 19 bp, Mus musculus
  siRNA target sequence for Ranbp17 (NM_023146.1,270-288).
ggatagacatcagaaacta

SEQ ID NO: 652196 - DNA, 19 bp, Mus musculus
  siRNA target sequence for Ranbp17 (NM_023146.1,350-368).
caagtcatcgctaaactca

SEQ ID NO: 652197 - DNA, 19 bp, Mus musculus
  siRNA target sequence for Ranbp17 (NM_023146.1,453-471).
cggtggaacactgcataat

SEQ ID NO: 652198 - DNA, 19 bp, Mus musculus
  siRNA target sequence for Ranbp17 (NM_023146.1,454-472).
ggtggaacactgcataata

SEQ ID NO: 652199 - DNA, 19 bp, Mus musculus
  siRNA target sequence for Ranbp17 (NM_023146.1,457-475).
ggaacactgcataatagga

SEQ ID NO: 652200 - DNA, 19 bp, Mus musculus
  siRNA target sequence for Ranbp17 (NM_023146.1,534-552).
cagcaaaacataggaaaat

SEQ ID NO: 652201 - DNA, 19 bp, Mus musculus
  siRNA target sequence for Ranbp17 (NM_023146.1,600-618).
cgtgttctctcctgaaaca

SEQ ID NO: 652202 - DNA, 19 bp, Mus musculus
  siRNA target sequence for Ranbp17 (NM_023146.1,619-637).
ggtgttggccaaaccttta

SEQ ID NO: 652203 - DNA, 19 bp, Mus musculus
  siRNA target sequence for Ranbp17 (NM_023146.1,620-638).
gtgttggccaaacctttaa

SEQ ID NO: 652204 - DNA, 19 bp, Mus musculus
  siRNA target sequence for Ranbp17 (NM_023146.1,734-752).
gaatctgcggacgatcttt

SEQ ID NO: 652205 - DNA, 19 bp, Mus musculus
  siRNA target sequence for Ranbp17 (NM_023146.1,861-879).
cactttcgtgcttagttca

SEQ ID NO: 652206 - DNA, 19 bp, Mus musculus
  siRNA target sequence for Ranbp17 (NM_023146.1,924-942).
ccaagtaccttggtaactt

SEQ ID NO: 652207 - DNA, 19 bp, Mus musculus
  siRNA target sequence for Ranbp17 (NM_023146.1,931-949).
ccttggtaacttaattaaa

SEQ ID NO: 652208 - DNA, 19 bp, Mus musculus
  siRNA target sequence for Ranbp17 (NM_023146.1,985-1003).
gtctgatcctggcaattat

SEQ ID NO: 652209 - DNA, 19 bp, Mus musculus
  siRNA target sequence for Ranbp17 (NM_023146.1,987-1005).
ctgatcctggcaattatca

SEQ ID NO: 652210 - DNA, 19 bp, Mus musculus
  siRNA target sequence for Ranbp17 (NM_023146.1,1016-1034).
cgatttttggctcgtttaa

SEQ ID NO: 652211 - DNA, 19 bp, Mus musculus
  siRNA target sequence for Ranbp17 (NM_023146.1,1025-1043).
gctcgtttaaagacaaact

SEQ ID NO: 652212 - DNA, 19 bp, Mus musculus
  siRNA target sequence for Ranbp17 (NM_023146.1,1042-1060).
ctatcagctgggagagtta

SEQ ID NO: 652213 - DNA, 19 bp, Mus musculus
  siRNA target sequence for Ranbp17 (NM_023146.1,1072-1090).
ggagtatgcggaagtgatt

SEQ ID NO: 652214 - DNA, 19 bp, Mus musculus
  siRNA target sequence for Ranbp17 (NM_023146.1,1079-1097).
gcggaagtgattggattaa

SEQ ID NO: 652215 - DNA, 19 bp, Mus musculus
  siRNA target sequence for Ranbp17 (NM_023146.1,1080-1098).
cggaagtgattggattaat

SEQ ID NO: 652216 - DNA, 19 bp, Mus musculus
  siRNA target sequence for Ranbp17 (NM_023146.1,1091-1109).
ggattaattgccaatttta

SEQ ID NO: 652217 - DNA, 19 bp, Mus musculus
  siRNA target sequence for Ranbp17 (NM_023146.1,1100-1118).
gccaattttactattacta

SEQ ID NO: 652218 - DNA, 19 bp, Mus musculus
  siRNA target sequence for Ranbp17 (NM_023146.1,1140-1158).
cccccaacagtgttcatta

SEQ ID NO: 652219 - DNA, 19 bp, Mus musculus
  siRNA target sequence for Ranbp17 (NM_023146.1,1183-1201).
ggtagcatccgttcctttt

SEQ ID NO: 652220 - DNA, 19 bp, Mus musculus
  siRNA target sequence for Ranbp17 (NM_023146.1,1187-1205).
gcatccgttccttttgtga

SEQ ID NO: 652221 - DNA, 19 bp, Mus musculus
  siRNA target sequence for Ranbp17 (NM_023146.1,1188-1206).
catccgttccttttgtgaa

SEQ ID NO: 652222 - DNA, 19 bp, Mus musculus
  siRNA target sequence for Ranbp17 (NM_023146.1,1209-1227).
cagctgaaccccacttgtt

SEQ ID NO: 652223 - DNA, 19 bp, Mus musculus
  siRNA target sequence for Ranbp17 (NM_023146.1,1219-1237).
ccacttgttagacacttat

SEQ ID NO: 652224 - DNA, 19 bp, Mus musculus
  siRNA target sequence for Ranbp17 (NM_023146.1,1276-1294).
ggaatctgttgccattgtt

SEQ ID NO: 652225 - DNA, 19 bp, Mus musculus
  siRNA target sequence for Ranbp17 (NM_023146.1,1365-1383).
cagttagcagatgtgaata

SEQ ID NO: 652226 - DNA, 19 bp, Mus musculus
  siRNA target sequence for Ranbp17 (NM_023146.1,1411-1429).
gctatttgaccaaaatgca

SEQ ID NO: 652227 - DNA, 19 bp, Mus musculus
  siRNA target sequence for Ranbp17 (NM_023146.1,1497-1515).
gtcttgcatggctgatcta

SEQ ID NO: 652228 - DNA, 19 bp, Mus musculus
  siRNA target sequence for Ranbp17 (NM_023146.1,1529-1547).
gttgtaggagggagactaa

SEQ ID NO: 652229 - DNA, 19 bp, Mus musculus
  siRNA target sequence for Ranbp17 (NM_023146.1,1538-1556).
gggagactaacatatacca

SEQ ID NO: 652230 - DNA, 19 bp, Mus musculus
  siRNA target sequence for Ranbp17 (NM_023146.1,1596-1614).
gccgtgtttttcagcttat

SEQ ID NO: 652231 - DNA, 19 bp, Mus musculus
  siRNA target sequence for Ranbp17 (NM_023146.1,1597-1615).
ccgtgtttttcagcttata

SEQ ID NO: 652232 - DNA, 19 bp, Mus musculus
  siRNA target sequence for Ranbp17 (NM_023146.1,1598-1616).
cgtgtttttcagcttatat

SEQ ID NO: 652233 - DNA, 19 bp, Mus musculus
  siRNA target sequence for Ranbp17 (NM_023146.1,1609-1627).
gcttatatctttaatggat

SEQ ID NO: 652234 - DNA, 19 bp, Mus musculus
  siRNA target sequence for Ranbp17 (NM_023146.1,1637-1655).
cctcactgcaccaatgaga

SEQ ID NO: 652235 - DNA, 19 bp, Mus musculus
  siRNA target sequence for Ranbp17 (NM_023146.1,1638-1656).
ctcactgcaccaatgagaa

SEQ ID NO: 652236 - DNA, 19 bp, Mus musculus
  siRNA target sequence for Ranbp17 (NM_023146.1,1681-1699).
cctggatcagtttcgtaaa

SEQ ID NO: 652237 - DNA, 19 bp, Mus musculus
  siRNA target sequence for Ranbp17 (NM_023146.1,1684-1702).
ggatcagtttcgtaaaaca

SEQ ID NO: 652238 - DNA, 19 bp, Mus musculus
  siRNA target sequence for Ranbp17 (NM_023146.1,1685-1703).
gatcagtttcgtaaaacat

SEQ ID NO: 652239 - DNA, 19 bp, Mus musculus
  siRNA target sequence for Ranbp17 (NM_023146.1,1735-1753).
ggtgtatgctcgtatgtca

SEQ ID NO: 652240 - DNA, 19 bp, Mus musculus
  siRNA target sequence for Ranbp17 (NM_023146.1,1743-1761).
ctcgtatgtcagaagtctt

SEQ ID NO: 652241 - DNA, 19 bp, Mus musculus
  siRNA target sequence for Ranbp17 (NM_023146.1,1759-1777).
cttaggaataacagatgat

SEQ ID NO: 652242 - DNA, 19 bp, Mus musculus
  siRNA target sequence for Ranbp17 (NM_023146.1,1790-1808).
gaaacattcatgacgaaaa

SEQ ID NO: 652243 - DNA, 19 bp, Mus musculus
  siRNA target sequence for Ranbp17 (NM_023146.1,1794-1812).
cattcatgacgaaaattgt

SEQ ID NO: 652244 - DNA, 19 bp, Mus musculus
  siRNA target sequence for Ranbp17 (NM_023146.1,1798-1816).
catgacgaaaattgttaca

SEQ ID NO: 652245 - DNA, 19 bp, Mus musculus
  siRNA target sequence for Ranbp17 (NM_023146.1,1882-1900).
gtcagttggctatatcctt

SEQ ID NO: 652246 - DNA, 19 bp, Mus musculus
  siRNA target sequence for Ranbp17 (NM_023146.1,1884-1902).
cagttggctatatcctttt

SEQ ID NO: 652247 - DNA, 19 bp, Mus musculus
  siRNA target sequence for Ranbp17 (NM_023146.1,1978-1996).
catcagtgaaacttacaat

SEQ ID NO: 652248 - DNA, 19 bp, Mus musculus
  siRNA target sequence for Ranbp17 (NM_023146.1,2121-2139).
cagtgttacaaatattcaa

SEQ ID NO: 652249 - DNA, 19 bp, Mus musculus
  siRNA target sequence for Ranbp17 (NM_023146.1,2123-2141).
gtgttacaaatattcaaca

SEQ ID NO: 652250 - DNA, 19 bp, Mus musculus
  siRNA target sequence for Ranbp17 (NM_023146.1,2176-2194).
gatcgggctggcaagagat

SEQ ID NO: 652251 - DNA, 19 bp, Mus musculus
  siRNA target sequence for Ranbp17 (NM_023146.1,2208-2226).
cctttgcactgaacacaaa

SEQ ID NO: 652252 - DNA, 19 bp, Mus musculus
  siRNA target sequence for Ranbp17 (NM_023146.1,2306-2324).
ggagaacccgcatgtacta

SEQ ID NO: 652253 - DNA, 19 bp, Mus musculus
  siRNA target sequence for Ranbp17 (NM_023146.1,2316-2334).
catgtactactccaatctt

SEQ ID NO: 652254 - DNA, 19 bp, Mus musculus
  siRNA target sequence for Ranbp17 (NM_023146.1,2325-2343).
ctccaatcttaaaactctt

SEQ ID NO: 652255 - DNA, 19 bp, Mus musculus
  siRNA target sequence for Ranbp17 (NM_023146.1,2362-2380).
caggtctcagcgtttgaat

SEQ ID NO: 652256 - DNA, 19 bp, Mus musculus
  siRNA target sequence for Ranbp17 (NM_023146.1,2365-2383).
gtctcagcgtttgaatttt

SEQ ID NO: 652257 - DNA, 19 bp, Mus musculus
  siRNA target sequence for Ranbp17 (NM_023146.1,2367-2385).
ctcagcgtttgaattttga

SEQ ID NO: 652258 - DNA, 19 bp, Mus musculus
  siRNA target sequence for Ranbp17 (NM_023146.1,2387-2405).
gtatcctctcctaatggaa

SEQ ID NO: 652259 - DNA, 19 bp, Mus musculus
  siRNA target sequence for Ranbp17 (NM_023146.1,2423-2441).
gccagcaaaatgatttgca

SEQ ID NO: 652260 - DNA, 19 bp, Mus musculus
  siRNA target sequence for Ranbp17 (NM_023146.1,2476-2494).
ctccaaagataagatttat

SEQ ID NO: 652261 - DNA, 19 bp, Mus musculus
  siRNA target sequence for Ranbp17 (NM_023146.1,2565-2583).
gctttggcgtcttcaagtt

SEQ ID NO: 652262 - DNA, 19 bp, Mus musculus
  siRNA target sequence for Ranbp17 (NM_023146.1,2584-2602).
gtatggggacaaccatttt

SEQ ID NO: 652263 - DNA, 19 bp, Mus musculus
  siRNA target sequence for Ranbp17 (NM_023146.1,2588-2606).
ggggacaaccattttgaca

SEQ ID NO: 652264 - DNA, 19 bp, Mus musculus
  siRNA target sequence for Ranbp17 (NM_023146.1,2823-2841).
gctgtacaagtttagacta

SEQ ID NO: 652265 - DNA, 19 bp, Mus musculus
  siRNA target sequence for Ranbp17 (NM_023146.1,2826-2844).
gtacaagtttagactacat

SEQ ID NO: 652266 - DNA, 19 bp, Mus musculus
  siRNA target sequence for Ranbp17 (NM_023146.1,2860-2878).
caagcacatagcaaaagaa

SEQ ID NO: 652267 - DNA, 19 bp, Mus musculus
  siRNA target sequence for Ranbp17 (NM_023146.1,2919-2937).
gtcagagactgttacattt

SEQ ID NO: 652268 - DNA, 19 bp, Mus musculus
  siRNA target sequence for Ranbp17 (NM_023146.1,3011-3029).
cggaaccagtggtcagtat

SEQ ID NO: 652269 - DNA, 19 bp, Mus musculus
  siRNA target sequence for Ranbp17 (NM_023146.1,3053-3071).
ctgctcaacgagaagtatt

SEQ ID NO: 652270 - DNA, 19 bp, Mus musculus
  siRNA target sequence for Ranbp17 (NM_023146.1,3080-3098).
ctgagggccagtctgataa

SEQ ID NO: 652271 - DNA, 19 bp, Mus musculus
  siRNA target sequence for Scamp3 (NM_011886.1,53-71).
ctccggcgagcttgacaat

SEQ ID NO: 652272 - DNA, 19 bp, Mus musculus
  siRNA target sequence for Scamp3 (NM_011886.1,132-150).
gtctacaacccctttgaga

SEQ ID NO: 652273 - DNA, 19 bp, Mus musculus
  siRNA target sequence for Scamp3 (NM_011886.1,425-443).
gcctcccctaccgtctttt

SEQ ID NO: 652274 - DNA, 19 bp, Mus musculus
  siRNA target sequence for Scamp3 (NM_011886.1,426-444).
cctcccctaccgtcttttt

SEQ ID NO: 652275 - DNA, 19 bp, Mus musculus
  siRNA target sequence for Scamp3 (NM_011886.1,436-454).
cgtctttttgccctgtaaa

SEQ ID NO: 652276 - DNA, 19 bp, Mus musculus
  siRNA target sequence for Scamp3 (NM_011886.1,482-500).
ggagataccccaagaattt

SEQ ID NO: 652277 - DNA, 19 bp, Mus musculus
  siRNA target sequence for Scamp3 (NM_011886.1,508-526).
cggtgtccaccatgtacta

SEQ ID NO: 652278 - DNA, 19 bp, Mus musculus
  siRNA target sequence for Scamp3 (NM_011886.1,689-707).
ggctttccggagtgatagt

SEQ ID NO: 652279 - DNA, 19 bp, Mus musculus
  siRNA target sequence for Scamp3 (NM_011886.1,690-708).
gctttccggagtgatagtt

SEQ ID NO: 652280 - DNA, 19 bp, Mus musculus
  siRNA target sequence for Scamp3 (NM_011886.1,696-714).
cggagtgatagttcattca

SEQ ID NO: 652281 - DNA, 19 bp, Mus musculus
  siRNA target sequence for Scamp3 (NM_011886.1,697-715).
ggagtgatagttcattcaa

SEQ ID NO: 652282 - DNA, 19 bp, Mus musculus
  siRNA target sequence for Scamp3 (NM_011886.1,700-718).
gtgatagttcattcaattt

SEQ ID NO: 652283 - DNA, 19 bp, Mus musculus
  siRNA target sequence for Scamp3 (NM_011886.1,743-761).
cgtccaggatgtgttcttt

SEQ ID NO: 652284 - DNA, 19 bp, Mus musculus
  siRNA target sequence for Scamp3 (NM_011886.1,940-958).
cgggtgccagctttcagaa

SEQ ID NO: 652285 - DNA, 19 bp, Mus musculus
  siRNA target sequence for Sec23a (NM_009147.1,5-23).
caacctatttggaatttat

SEQ ID NO: 652286 - DNA, 19 bp, Mus musculus
  siRNA target sequence for Sec23a (NM_009147.1,8-26).
cctatttggaatttatcca

SEQ ID NO: 652287 - DNA, 19 bp, Mus musculus
  siRNA target sequence for Sec23a (NM_009147.1,15-33).
ggaatttatccaacaaaat

SEQ ID NO: 652288 - DNA, 19 bp, Mus musculus
  siRNA target sequence for Sec23a (NM_009147.1,48-66).
ggtccggttcagttggaat

SEQ ID NO: 652289 - DNA, 19 bp, Mus musculus
  siRNA target sequence for Sec23a (NM_009147.1,51-69).
ccggttcagttggaatgtt

SEQ ID NO: 652290 - DNA, 19 bp, Mus musculus
  siRNA target sequence for Sec23a (NM_009147.1,52-70).
cggttcagttggaatgttt

SEQ ID NO: 652291 - DNA, 19 bp, Mus musculus
  siRNA target sequence for Sec23a (NM_009147.1,109-127).
ccagtggcagccctgttta

SEQ ID NO: 652292 - DNA, 19 bp, Mus musculus
  siRNA target sequence for Sec23a (NM_009147.1,191-209).
ccacttgccgtgcagtttt

SEQ ID NO: 652293 - DNA, 19 bp, Mus musculus
  siRNA target sequence for Sec23a (NM_009147.1,194-212).
cttgccgtgcagttttgaa

SEQ ID NO: 652294 - DNA, 19 bp, Mus musculus
  siRNA target sequence for Sec23a (NM_009147.1,215-233).
ctttatgccaagtggatta

SEQ ID NO: 652295 - DNA, 19 bp, Mus musculus
  siRNA target sequence for Sec23a (NM_009147.1,255-273).
ctttgtaccaagatcagtt

SEQ ID NO: 652296 - DNA, 19 bp, Mus musculus
  siRNA target sequence for Sec23a (NM_009147.1,287-305).
ctgggatatctgaattgaa

SEQ ID NO: 652297 - DNA, 19 bp, Mus musculus
  siRNA target sequence for Sec23a (NM_009147.1,387-405).
ggttgatacttgcatagaa

SEQ ID NO: 652298 - DNA, 19 bp, Mus musculus
  siRNA target sequence for Sec23a (NM_009147.1,467-485).
cagctttggttggacttat

SEQ ID NO: 652299 - DNA, 19 bp, Mus musculus
  siRNA target sequence for Sec23a (NM_009147.1,474-492).
ggttggacttattaccttt

SEQ ID NO: 652300 - DNA, 19 bp, Mus musculus
  siRNA target sequence for Sec23a (NM_009147.1,602-620).
ctaaagtacctgttactca

SEQ ID NO: 652301 - DNA, 19 bp, Mus musculus
  siRNA target sequence for Sec23a (NM_009147.1,737-755).
ggcctgtaccacaaggaaa

SEQ ID NO: 652302 - DNA, 19 bp, Mus musculus
  siRNA target sequence for Sec23a (NM_009147.1,830-848).
gctcggatcatgatgttca

SEQ ID NO: 652303 - DNA, 19 bp, Mus musculus
  siRNA target sequence for Sec23a (NM_009147.1,831-849).
ctcggatcatgatgttcat

SEQ ID NO: 652304 - DNA, 19 bp, Mus musculus
  siRNA target sequence for Sec23a (NM_009147.1,882-900).
gggagatgagctaaagaca

SEQ ID NO: 652305 - DNA, 19 bp, Mus musculus
  siRNA target sequence for Sec23a (NM_009147.1,953-971).
gggaactaagcattttgaa

SEQ ID NO: 652306 - DNA, 19 bp, Mus musculus
  siRNA target sequence for Sec23a (NM_009147.1,991-1009).
ctacaacggggcatgtcat

SEQ ID NO: 652307 - DNA, 19 bp, Mus musculus
  siRNA target sequence for Sec23a (NM_009147.1,1087-1105).
gtaatgggtgactctttca

SEQ ID NO: 652308 - DNA, 19 bp, Mus musculus
  siRNA target sequence for Sec23a (NM_009147.1,1093-1111).
ggtgactctttcaatactt

SEQ ID NO: 652309 - DNA, 19 bp, Mus musculus
  siRNA target sequence for Sec23a (NM_009147.1,1098-1116).
ctctttcaatacttcctta

SEQ ID NO: 652310 - DNA, 19 bp, Mus musculus
  siRNA target sequence for Sec23a (NM_009147.1,1112-1130).
ccttattcaagcaaacttt

SEQ ID NO: 652311 - DNA, 19 bp, Mus musculus
  siRNA target sequence for Sec23a (NM_009147.1,1140-1158).
cttcaccaaagatatacat

SEQ ID NO: 652312 - DNA, 19 bp, Mus musculus
  siRNA target sequence for Sec23a (NM_009147.1,1260-1278).
ggaccttgcgtgtctgaaa

SEQ ID NO: 652313 - DNA, 19 bp, Mus musculus
  siRNA target sequence for Sec23a (NM_009147.1,1261-1279).
gaccttgcgtgtctgaaaa

SEQ ID NO: 652314 - DNA, 19 bp, Mus musculus
  siRNA target sequence for Sec23a (NM_009147.1,1296-1314).
ggcacttgtcagtggaaaa

SEQ ID NO: 652315 - DNA, 19 bp, Mus musculus
  siRNA target sequence for Sec23a (NM_009147.1,1394-1412).
gacgaggtgcagtccaatt

SEQ ID NO: 652316 - DNA, 19 bp, Mus musculus
  siRNA target sequence for Sec23a (NM_009147.1,1397-1415).
gaggtgcagtccaatttgt

SEQ ID NO: 652317 - DNA, 19 bp, Mus musculus
  siRNA target sequence for Sec23a (NM_009147.1,1399-1417).
ggtgcagtccaatttgtga

SEQ ID NO: 652318 - DNA, 19 bp, Mus musculus
  siRNA target sequence for Sec23a (NM_009147.1,1453-1471).
cgagtgaccacaattgcta

SEQ ID NO: 652319 - DNA, 19 bp, Mus musculus
  siRNA target sequence for Sec23a (NM_009147.1,1549-1567).
gccaggctggcaatataca

SEQ ID NO: 652320 - DNA, 19 bp, Mus musculus
  siRNA target sequence for Sec23a (NM_009147.1,1585-1603).
gggccagacgtgctaagat

SEQ ID NO: 652321 - DNA, 19 bp, Mus musculus
  siRNA target sequence for Sec23a (NM_009147.1,1605-1623).
gttggacagacaactcatt

SEQ ID NO: 652322 - DNA, 19 bp, Mus musculus
  siRNA target sequence for Sec23a (NM_009147.1,1618-1636).
ctcattcgactgtgtcaaa

SEQ ID NO: 652323 - DNA, 19 bp, Mus musculus
  siRNA target sequence for Sec23a (NM_009147.1,1620-1638).
cattcgactgtgtcaaaaa

SEQ ID NO: 652324 - DNA, 19 bp, Mus musculus
  siRNA target sequence for Sec23a (NM_009147.1,1643-1661).
gagagtatcacaaagatga

SEQ ID NO: 652325 - DNA, 19 bp, Mus musculus
  siRNA target sequence for Sec23a (NM_009147.1,1670-1688).
cttccggttttcagaaaca

SEQ ID NO: 652326 - DNA, 19 bp, Mus musculus
  siRNA target sequence for Sec23a (NM_009147.1,1673-1691).
ccggttttcagaaacattt

SEQ ID NO: 652327 - DNA, 19 bp, Mus musculus
  siRNA target sequence for Sec23b (NM_019787.2,84-102).
gcaacgtatctggaattca

SEQ ID NO: 652328 - DNA, 19 bp, Mus musculus
  siRNA target sequence for Sec23b (NM_019787.2,85-103).
caacgtatctggaattcat

SEQ ID NO: 652329 - DNA, 19 bp, Mus musculus
  siRNA target sequence for Sec23b (NM_019787.2,88-106).
cgtatctggaattcattca

SEQ ID NO: 652330 - DNA, 19 bp, Mus musculus
  siRNA target sequence for Sec23b (NM_019787.2,123-141).
gatggtgtgcgtttcagtt

SEQ ID NO: 652331 - DNA, 19 bp, Mus musculus
  siRNA target sequence for Sec23b (NM_019787.2,199-217).
gtctcctcactcctttaaa

SEQ ID NO: 652332 - DNA, 19 bp, Mus musculus
  siRNA target sequence for Sec23b (NM_019787.2,268-286).
ggcctacctgcaaagctat

SEQ ID NO: 652333 - DNA, 19 bp, Mus musculus
  siRNA target sequence for Sec23b (NM_019787.2,269-287).
gcctacctgcaaagctatt

SEQ ID NO: 652334 - DNA, 19 bp, Mus musculus
  siRNA target sequence for Sec23b (NM_019787.2,271-289).
ctacctgcaaagctattct

SEQ ID NO: 652335 - DNA, 19 bp, Mus musculus
  siRNA target sequence for Sec23b (NM_019787.2,275-293).
ctgcaaagctattctcaat

SEQ ID NO: 652336 - DNA, 19 bp, Mus musculus
  siRNA target sequence for Sec23b (NM_019787.2,309-327).
gattaccgagcaaaactct

SEQ ID NO: 652337 - DNA, 19 bp, Mus musculus
  siRNA target sequence for Sec23b (NM_019787.2,328-346).
gggcctgcaatttctgttt

SEQ ID NO: 652338 - DNA, 19 bp, Mus musculus
  siRNA target sequence for Sec23b (NM_019787.2,359-377).
gttccctccagcatatgca

SEQ ID NO: 652339 - DNA, 19 bp, Mus musculus
  siRNA target sequence for Sec23b (NM_019787.2,379-397).
gcatatctgaggtgaatca

SEQ ID NO: 652340 - DNA, 19 bp, Mus musculus
  siRNA target sequence for Sec23b (NM_019787.2,380-398).
catatctgaggtgaatcaa

SEQ ID NO: 652341 - DNA, 19 bp, Mus musculus
  siRNA target sequence for Sec23b (NM_019787.2,415-433).
cccagttctccacaattga

SEQ ID NO: 652342 - DNA, 19 bp, Mus musculus
  siRNA target sequence for Sec23b (NM_019787.2,424-442).
ccacaattgagtacatgat

SEQ ID NO: 652343 - DNA, 19 bp, Mus musculus
  siRNA target sequence for Sec23b (NM_019787.2,647-665).
ccgagggaccaaggattta

SEQ ID NO: 652344 - DNA, 19 bp, Mus musculus
  siRNA target sequence for Sec23b (NM_019787.2,648-666).
cgagggaccaaggatttaa

SEQ ID NO: 652345 - DNA, 19 bp, Mus musculus
  siRNA target sequence for Sec23b (NM_019787.2,912-930).
gaggggactttcccaaata

SEQ ID NO: 652346 - DNA, 19 bp, Mus musculus
  siRNA target sequence for Sec23b (NM_019787.2,914-932).
ggggactttcccaaatact

SEQ ID NO: 652347 - DNA, 19 bp, Mus musculus
  siRNA target sequence for Sec23b (NM_019787.2,1001-1019).
gttgaagactcctattcgt

SEQ ID NO: 652348 - DNA, 19 bp, Mus musculus
  siRNA target sequence for Sec23b (NM_019787.2,1061-1079).
gaaggcaaccaagcattat

SEQ ID NO: 652349 - DNA, 19 bp, Mus musculus
  siRNA target sequence for Sec23b (NM_019787.2,1065-1083).
gcaaccaagcattatgaga

SEQ ID NO: 652350 - DNA, 19 bp, Mus musculus
  siRNA target sequence for Sec23b (NM_019787.2,1066-1084).
caaccaagcattatgagat

SEQ ID NO: 652351 - DNA, 19 bp, Mus musculus
  siRNA target sequence for Sec23b (NM_019787.2,1080-1098).
gagatgcttgctaatcgaa

SEQ ID NO: 652352 - DNA, 19 bp, Mus musculus
  siRNA target sequence for Sec23b (NM_019787.2,1110-1128).
ggccactgcattgatattt

SEQ ID NO: 652353 - DNA, 19 bp, Mus musculus
  siRNA target sequence for Sec23b (NM_019787.2,1111-1129).
gccactgcattgatattta

SEQ ID NO: 652354 - DNA, 19 bp, Mus musculus
  siRNA target sequence for Sec23b (NM_019787.2,1169-1187).
gtgctgtccaaatcttaca

SEQ ID NO: 652355 - DNA, 19 bp, Mus musculus
  siRNA target sequence for Sec23b (NM_019787.2,1196-1214).
catggtgatgggagattct

SEQ ID NO: 652356 - DNA, 19 bp, Mus musculus
  siRNA target sequence for Sec23b (NM_019787.2,1206-1224).
ggagattctttcaacactt

SEQ ID NO: 652357 - DNA, 19 bp, Mus musculus
  siRNA target sequence for Sec23b (NM_019787.2,1265-1283).
cttcaacggagatttcaga

SEQ ID NO: 652358 - DNA, 19 bp, Mus musculus
  siRNA target sequence for Sec23b (NM_019787.2,1293-1311).
ggtgctacgttggatgtaa

SEQ ID NO: 652359 - DNA, 19 bp, Mus musculus
  siRNA target sequence for Sec23b (NM_019787.2,1294-1312).
gtgctacgttggatgtaaa

SEQ ID NO: 652360 - DNA, 19 bp, Mus musculus
  siRNA target sequence for Sec23b (NM_019787.2,1296-1314).
gctacgttggatgtaaaga

SEQ ID NO: 652361 - DNA, 19 bp, Mus musculus
  siRNA target sequence for Sec23b (NM_019787.2,1316-1334).
ctctcgggaactgaagatt

SEQ ID NO: 652362 - DNA, 19 bp, Mus musculus
  siRNA target sequence for Sec23b (NM_019787.2,1351-1369).
catgcgtgtctctgaatgt

SEQ ID NO: 652363 - DNA, 19 bp, Mus musculus
  siRNA target sequence for Sec23b (NM_019787.2,1374-1392).
gggccatgcgtgtcagaaa

SEQ ID NO: 652364 - DNA, 19 bp, Mus musculus
  siRNA target sequence for Sec23b (NM_019787.2,1375-1393).
ggccatgcgtgtcagaaaa

SEQ ID NO: 652365 - DNA, 19 bp, Mus musculus
  siRNA target sequence for Sec23b (NM_019787.2,1434-1452).
ggcctggatccctcatcta

SEQ ID NO: 652366 - DNA, 19 bp, Mus musculus
  siRNA target sequence for Sec23b (NM_019787.2,1450-1468).
ctactcttggcatctactt

SEQ ID NO: 652367 - DNA, 19 bp, Mus musculus
  siRNA target sequence for Sec23b (NM_019787.2,1619-1637).
gcacatagaagcagcattt

SEQ ID NO: 652368 - DNA, 19 bp, Mus musculus
  siRNA target sequence for Sec23b (NM_019787.2,1720-1738).
ggctggatcggcaactcat

SEQ ID NO: 652369 - DNA, 19 bp, Mus musculus
  siRNA target sequence for Sec23b (NM_019787.2,1776-1794).
gaccctacgtctttcagat

SEQ ID NO: 652370 - DNA, 19 bp, Mus musculus
  siRNA target sequence for Sec23b (NM_019787.2,1779-1797).
cctacgtctttcagattgt

SEQ ID NO: 652371 - DNA, 19 bp, Mus musculus
  siRNA target sequence for Sec23b (NM_019787.2,1924-1942).
ctcagtccctcattatgat

SEQ ID NO: 652372 - DNA, 19 bp, Mus musculus
  siRNA target sequence for Sec23b (NM_019787.2,1944-1962).
cagcccattctctattctt

SEQ ID NO: 652373 - DNA, 19 bp, Mus musculus
  siRNA target sequence for Sec23b (NM_019787.2,1997-2015).
ggacagcagtagcattcta

SEQ ID NO: 652374 - DNA, 19 bp, Mus musculus
  siRNA target sequence for Sec23b (NM_019787.2,2187-2205).
ccaatgccacgttatatca

SEQ ID NO: 652375 - DNA, 19 bp, Mus musculus
  siRNA target sequence for Sec23b (NM_019787.2,2188-2206).
caatgccacgttatatcaa

SEQ ID NO: 652376 - DNA, 19 bp, Mus musculus
  siRNA target sequence for Sec23b (NM_019787.2,2257-2275).
catctcagacacacaataa

SEQ ID NO: 652377 - DNA, 19 bp, Mus musculus
  siRNA target sequence for Sec63 (NM_153055.2,153-171).
ccagaacgcggagcaaatt

SEQ ID NO: 652378 - DNA, 19 bp, Mus musculus
  siRNA target sequence for Sec63 (NM_153055.2,156-174).
gaacgcggagcaaattcga

SEQ ID NO: 652379 - DNA, 19 bp, Mus musculus
  siRNA target sequence for Sec63 (NM_153055.2,159-177).
cgcggagcaaattcgatta

SEQ ID NO: 652380 - DNA, 19 bp, Mus musculus
  siRNA target sequence for Sec63 (NM_153055.2,160-178).
gcggagcaaattcgattaa

SEQ ID NO: 652381 - DNA, 19 bp, Mus musculus
  siRNA target sequence for Sec63 (NM_153055.2,161-179).
cggagcaaattcgattaaa

SEQ ID NO: 652382 - DNA, 19 bp, Mus musculus
  siRNA target sequence for Sec63 (NM_153055.2,163-181).
gagcaaattcgattaaaga

SEQ ID NO: 652383 - DNA, 19 bp, Mus musculus
  siRNA target sequence for Sec63 (NM_153055.2,165-183).
gcaaattcgattaaagaat

SEQ ID NO: 652384 - DNA, 19 bp, Mus musculus
  siRNA target sequence for Sec63 (NM_153055.2,172-190).
cgattaaagaatatcagaa

SEQ ID NO: 652385 - DNA, 19 bp, Mus musculus
  siRNA target sequence for Sec63 (NM_153055.2,212-230).
ggtatcgtttacggttatt

SEQ ID NO: 652386 - DNA, 19 bp, Mus musculus
  siRNA target sequence for Sec63 (NM_153055.2,213-231).
gtatcgtttacggttatta

SEQ ID NO: 652387 - DNA, 19 bp, Mus musculus
  siRNA target sequence for Sec63 (NM_153055.2,284-302).
gatgggcactgttcttatt

SEQ ID NO: 652388 - DNA, 19 bp, Mus musculus
  siRNA target sequence for Sec63 (NM_153055.2,348-366).
caatccttatgaagtacta

SEQ ID NO: 652389 - DNA, 19 bp, Mus musculus
  siRNA target sequence for Sec63 (NM_153055.2,352-370).
ccttatgaagtactaaatt

SEQ ID NO: 652390 - DNA, 19 bp, Mus musculus
  siRNA target sequence for Sec63 (NM_153055.2,412-430).
cgcttgttgtcacttaaat

SEQ ID NO: 652391 - DNA, 19 bp, Mus musculus
  siRNA target sequence for Sec63 (NM_153055.2,413-431).
gcttgttgtcacttaaata

SEQ ID NO: 652392 - DNA, 19 bp, Mus musculus
  siRNA target sequence for Sec63 (NM_153055.2,417-435).
gttgtcacttaaatatcat

SEQ ID NO: 652393 - DNA, 19 bp, Mus musculus
  siRNA target sequence for Sec63 (NM_153055.2,448-466).
ggtgatgaagtcatgttca

SEQ ID NO: 652394 - DNA, 19 bp, Mus musculus
  siRNA target sequence for Sec63 (NM_153055.2,468-486).
gaggatagcaaaagcatat

SEQ ID NO: 652395 - DNA, 19 bp, Mus musculus
  siRNA target sequence for Sec63 (NM_153055.2,471-489).
gatagcaaaagcatatgca

SEQ ID NO: 652396 - DNA, 19 bp, Mus musculus
  siRNA target sequence for Sec63 (NM_153055.2,482-500).
catatgcagctttaacaga

SEQ ID NO: 652397 - DNA, 19 bp, Mus musculus
  siRNA target sequence for Sec63 (NM_153055.2,546-564).
gcctcaagctacaagcttt

SEQ ID NO: 652398 - DNA, 19 bp, Mus musculus
  siRNA target sequence for Sec63 (NM_153055.2,672-690).
gtggtatcggtcaatacga

SEQ ID NO: 652399 - DNA, 19 bp, Mus musculus
  siRNA target sequence for Sec63 (NM_153055.2,674-692).
ggtatcggtcaatacgata

SEQ ID NO: 652400 - DNA, 19 bp, Mus musculus
  siRNA target sequence for Sec63 (NM_153055.2,675-693).
gtatcggtcaatacgatat

SEQ ID NO: 652401 - DNA, 19 bp, Mus musculus
  siRNA target sequence for Sec63 (NM_153055.2,700-718).
gaccagattctaatacgta

SEQ ID NO: 652402 - DNA, 19 bp, Mus musculus
  siRNA target sequence for Sec63 (NM_153055.2,715-733).
cgtacaacacagatttata

SEQ ID NO: 652403 - DNA, 19 bp, Mus musculus
  siRNA target sequence for Sec63 (NM_153055.2,722-740).
cacagatttatacatactt

SEQ ID NO: 652404 - DNA, 19 bp, Mus musculus
  siRNA target sequence for Sec63 (NM_153055.2,752-770).
ctcgaaatatggatatgaa

SEQ ID NO: 652405 - DNA, 19 bp, Mus musculus
  siRNA target sequence for Sec63 (NM_153055.2,836-854).
gcaggccaacagataatat

SEQ ID NO: 652406 - DNA, 19 bp, Mus musculus
  siRNA target sequence for Sec63 (NM_153055.2,839-857).
ggccaacagataatatttt

SEQ ID NO: 652407 - DNA, 19 bp, Mus musculus
  siRNA target sequence for Sec63 (NM_153055.2,875-893).
gggaaattggcagcataaa

SEQ ID NO: 652408 - DNA, 19 bp, Mus musculus
  siRNA target sequence for Sec63 (NM_153055.2,876-894).
ggaaattggcagcataaat

SEQ ID NO: 652409 - DNA, 19 bp, Mus musculus
  siRNA target sequence for Sec63 (NM_153055.2,877-895).
gaaattggcagcataaatt

SEQ ID NO: 652410 - DNA, 19 bp, Mus musculus
  siRNA target sequence for Sec63 (NM_153055.2,934-952).
ctgaaggccagagttcttt

SEQ ID NO: 652411 - DNA, 19 bp, Mus musculus
  siRNA target sequence for Sec63 (NM_153055.2,959-977).
ctcatcttgctagaatgaa

SEQ ID NO: 652412 - DNA, 19 bp, Mus musculus
  siRNA target sequence for Sec63 (NM_153055.2,961-979).
catcttgctagaatgaaaa

SEQ ID NO: 652413 - DNA, 19 bp, Mus musculus
  siRNA target sequence for Sec63 (NM_153055.2,1054-1072).
gtaatctgccagctaataa

SEQ ID NO: 652414 - DNA, 19 bp, Mus musculus
  siRNA target sequence for Sec63 (NM_153055.2,1115-1133).
ctttggcatccttagaaaa

SEQ ID NO: 652415 - DNA, 19 bp, Mus musculus
  siRNA target sequence for Sec63 (NM_153055.2,1162-1180).
caggggctccagcagttta

SEQ ID NO: 652416 - DNA, 19 bp, Mus musculus
  siRNA target sequence for Sec63 (NM_153055.2,1165-1183).
gggctccagcagtttaagt

SEQ ID NO: 652417 - DNA, 19 bp, Mus musculus
  siRNA target sequence for Sec63 (NM_153055.2,1226-1244).
ggagagtttcgaatcataa

SEQ ID NO: 652418 - DNA, 19 bp, Mus musculus
  siRNA target sequence for Sec63 (NM_153055.2,1229-1247).
gagtttcgaatcataaaaa

SEQ ID NO: 652419 - DNA, 19 bp, Mus musculus
  siRNA target sequence for Sec63 (NM_153055.2,1266-1284).
ccaggatttggttagttta

SEQ ID NO: 652420 - DNA, 19 bp, Mus musculus
  siRNA target sequence for Sec63 (NM_153055.2,1298-1316).
gtcatagtctgctacactt

SEQ ID NO: 652421 - DNA, 19 bp, Mus musculus
  siRNA target sequence for Sec63 (NM_153055.2,1357-1375).
gggagtttcccgtatgtga

SEQ ID NO: 652422 - DNA, 19 bp, Mus musculus
  siRNA target sequence for Sec63 (NM_153055.2,1374-1392).
gaccatggacataaaatca

SEQ ID NO: 652423 - DNA, 19 bp, Mus musculus
  siRNA target sequence for Sec63 (NM_153055.2,1396-1414).
gtcttggatgatgaagata

SEQ ID NO: 652424 - DNA, 19 bp, Mus musculus
  siRNA target sequence for Sec63 (NM_153055.2,1438-1456).
ctagttacagtgttggtta

SEQ ID NO: 652425 - DNA, 19 bp, Mus musculus
  siRNA target sequence for Sec63 (NM_153055.2,1470-1488).
gaccatggctgaagtgttt

SEQ ID NO: 652426 - DNA, 19 bp, Mus musculus
  siRNA target sequence for Sec63 (NM_153055.2,1773-1791).
ggaagaaaccaatagagat

SEQ ID NO: 652427 - DNA, 19 bp, Mus musculus
  siRNA target sequence for Sec63 (NM_153055.2,1871-1889).
cagagtggcaagagttaca

SEQ ID NO: 652428 - DNA, 19 bp, Mus musculus
  siRNA target sequence for Sec63 (NM_153055.2,2096-2114).
ccggcaagcctggaaatta

SEQ ID NO: 652429 - DNA, 19 bp, Mus musculus
  siRNA target sequence for Sec63 (NM_153055.2,2097-2115).
cggcaagcctggaaattat

SEQ ID NO: 652430 - DNA, 19 bp, Mus musculus
  siRNA target sequence for Snag1 (NM_130796.1,179-197).
gcgctctacgactttaagt

SEQ ID NO: 652431 - DNA, 19 bp, Mus musculus
  siRNA target sequence for Snag1 (NM_130796.1,1001-1019).
ggcatgaagagctacatct

SEQ ID NO: 652432 - DNA, 19 bp, Mus musculus
  siRNA target sequence for Snag1 (NM_130796.1,1053-1071).
ccgtgcacaggcgctataa

SEQ ID NO: 652433 - DNA, 19 bp, Mus musculus
  siRNA target sequence for Snag1 (NM_130796.1,1064-1082).
cgctataagcacttcgatt

SEQ ID NO: 652434 - DNA, 19 bp, Mus musculus
  siRNA target sequence for Snag1 (NM_130796.1,1245-1263).
gcgacgtcttccagcattt

SEQ ID NO: 652435 - DNA, 19 bp, Mus musculus
  siRNA target sequence for Snag1 (NM_130796.1,1496-1514).
caggtgactggcttcaaga

SEQ ID NO: 652436 - DNA, 19 bp, Mus musculus
  siRNA target sequence for Snag1 (NM_130796.1,1582-1600).
cttctccgtgggtctgaat

SEQ ID NO: 652437 - DNA, 19 bp, Mus musculus
  siRNA target sequence for Snag1 (NM_130796.1,1687-1705).
ggacctgttagcactgtat

SEQ ID NO: 652438 - DNA, 19 bp, Mus musculus
  siRNA target sequence for Snag1 (NM_130796.1,1728-1746).
cagacatcatccatgttca

SEQ ID NO: 652439 - DNA, 19 bp, Mus musculus
  siRNA target sequence for Snag1 (NM_130796.1,1732-1750).
catcatccatgttcagaaa

SEQ ID NO: 652440 - DNA, 19 bp, Mus musculus
  siRNA target sequence for Snag1 (NM_130796.1,1747-1765).
gaaaggagctcttaccaaa

SEQ ID NO: 652441 - DNA, 19 bp, Mus musculus
  siRNA target sequence for Snag1 (NM_130796.1,1755-1773).
ctcttaccaaagtaaagga

SEQ ID NO: 652442 - DNA, 19 bp, Mus musculus
  siRNA target sequence for Snag1 (NM_130796.1,1801-1819).
gatggaggtccaaaaagct

SEQ ID NO: 652443 - DNA, 19 bp, Mus musculus
  siRNA target sequence for Snag1 (NM_130796.1,1829-1847).
caagaccgctgtaacacta

SEQ ID NO: 652444 - DNA, 19 bp, Mus musculus
  siRNA target sequence for Snag1 (NM_130796.1,1832-1850).
gaccgctgtaacactattt

SEQ ID NO: 652445 - DNA, 19 bp, Mus musculus
  siRNA target sequence for Snag1 (NM_130796.1,1835-1853).
cgctgtaacactatttcct

SEQ ID NO: 652446 - DNA, 19 bp, Mus musculus
  siRNA target sequence for Snag1 (NM_130796.1,1836-1854).
gctgtaacactatttcctt

SEQ ID NO: 652447 - DNA, 19 bp, Mus musculus
  siRNA target sequence for Snag1 (NM_130796.1,1857-1875).
ccacgttggccgagattca

SEQ ID NO: 652448 - DNA, 19 bp, Mus musculus
  siRNA target sequence for Snag1 (NM_130796.1,1858-1876).
cacgttggccgagattcat

SEQ ID NO: 652449 - DNA, 19 bp, Mus musculus
  siRNA target sequence for Snag1 (NM_130796.1,1860-1878).
cgttggccgagattcatca

SEQ ID NO: 652450 - DNA, 19 bp, Mus musculus
  siRNA target sequence for Snag1 (NM_130796.1,1882-1900).
ccatcaaattagagtaaga

SEQ ID NO: 652451 - DNA, 19 bp, Mus musculus
  siRNA target sequence for Snx1 (NM_019727.1,242-260).
caccgagggggaggatatt

SEQ ID NO: 652452 - DNA, 19 bp, Mus musculus
  siRNA target sequence for Snx1 (NM_019727.1,244-262).
ccgagggggaggatatttt

SEQ ID NO: 652453 - DNA, 19 bp, Mus musculus
  siRNA target sequence for Snx1 (NM_019727.1,248-266).
gggggaggatattttcact

SEQ ID NO: 652454 - DNA, 19 bp, Mus musculus
  siRNA target sequence for Snx1 (NM_019727.1,310-328).
catccctttttcctatcaa

SEQ ID NO: 652455 - DNA, 19 bp, Mus musculus
  siRNA target sequence for Snx1 (NM_019727.1,414-432).
ctggacagcacacagaata

SEQ ID NO: 652456 - DNA, 19 bp, Mus musculus
  siRNA target sequence for Snx1 (NM_019727.1,542-560).
ggatcagtttgatttgaca

SEQ ID NO: 652457 - DNA, 19 bp, Mus musculus
  siRNA target sequence for Snx1 (NM_019727.1,584-602).
gatcggggatggtatgaat

SEQ ID NO: 652458 - DNA, 19 bp, Mus musculus
  siRNA target sequence for Snx1 (NM_019727.1,758-776).
cgagaagagcctaatagga

SEQ ID NO: 652459 - DNA, 19 bp, Mus musculus
  siRNA target sequence for Snx1 (NM_019727.1,834-852).
cggagggctgctttggaaa

SEQ ID NO: 652460 - DNA, 19 bp, Mus musculus
  siRNA target sequence for Snx1 (NM_019727.1,838-856).
gggctgctttggaaaggta

SEQ ID NO: 652461 - DNA, 19 bp, Mus musculus
  siRNA target sequence for Snx1 (NM_019727.1,853-871).
ggtaccttcaaagaattgt

SEQ ID NO: 652462 - DNA, 19 bp, Mus musculus
  siRNA target sequence for Snx1 (NM_019727.1,857-875).
ccttcaaagaattgtgaat

SEQ ID NO: 652463 - DNA, 19 bp, Mus musculus
  siRNA target sequence for Snx1 (NM_019727.1,872-890).
gaatcatcccaccatgtta

SEQ ID NO: 652464 - DNA, 19 bp, Mus musculus
  siRNA target sequence for Snx1 (NM_019727.1,963-981).
ggcgctggtctccttaaga

SEQ ID NO: 652465 - DNA, 19 bp, Mus musculus
  siRNA target sequence for Snx1 (NM_019727.1,964-982).
gcgctggtctccttaagat

SEQ ID NO: 652466 - DNA, 19 bp, Mus musculus
  siRNA target sequence for Snx1 (NM_019727.1,966-984).
gctggtctccttaagatgt

SEQ ID NO: 652467 - DNA, 19 bp, Mus musculus
  siRNA target sequence for Snx1 (NM_019727.1,967-985).
ctggtctccttaagatgtt

SEQ ID NO: 652468 - DNA, 19 bp, Mus musculus
  siRNA target sequence for Snx1 (NM_019727.1,969-987).
ggtctccttaagatgttca

SEQ ID NO: 652469 - DNA, 19 bp, Mus musculus
  siRNA target sequence for Snx1 (NM_019727.1,972-990).
ctccttaagatgttcaaca

SEQ ID NO: 652470 - DNA, 19 bp, Mus musculus
  siRNA target sequence for Snx1 (NM_019727.1,1025-1043).
gatgaatgaatcagacatt

SEQ ID NO: 652471 - DNA, 19 bp, Mus musculus
  siRNA target sequence for Snx1 (NM_019727.1,1113-1131).
gagactctagtcaaccata

SEQ ID NO: 652472 - DNA, 19 bp, Mus musculus
  siRNA target sequence for Snx1 (NM_019727.1,1117-1135).
ctctagtcaaccataggaa

SEQ ID NO: 652473 - DNA, 19 bp, Mus musculus
  siRNA target sequence for Snx1 (NM_019727.1,1495-1513).
ctcgggtgactcagtatga

SEQ ID NO: 652474 - DNA, 19 bp, Mus musculus
  siRNA target sequence for Snx1 (NM_019727.1,1497-1515).
cgggtgactcagtatgaaa

SEQ ID NO: 652475 - DNA, 19 bp, Mus musculus
  siRNA target sequence for Snx1 (NM_019727.1,1508-1526).
gtatgaaagggactttgaa

SEQ ID NO: 652476 - DNA, 19 bp, Mus musculus
  siRNA target sequence for Snx12 (NM_018875.1,86-104).
gacactaggcgccttaact

SEQ ID NO: 652477 - DNA, 19 bp, Mus musculus
  siRNA target sequence for Snx12 (NM_018875.1,231-249).
caaacctacccatcttcaa

SEQ ID NO: 652478 - DNA, 19 bp, Mus musculus
  siRNA target sequence for Snx12 (NM_018875.1,271-289).
gcgacgctatagtgacttt

SEQ ID NO: 652479 - DNA, 19 bp, Mus musculus
  siRNA target sequence for Snx12 (NM_018875.1,273-291).
gacgctatagtgactttga

SEQ ID NO: 652480 - DNA, 19 bp, Mus musculus
  siRNA target sequence for Snx12 (NM_018875.1,275-293).
cgctatagtgactttgagt

SEQ ID NO: 652481 - DNA, 19 bp, Mus musculus
  siRNA target sequence for Snx12 (NM_018875.1,305-323).
gagctggagcgagatagta

SEQ ID NO: 652482 - DNA, 19 bp, Mus musculus
  siRNA target sequence for Snx12 (NM_018875.1,420-438).
ggcaaggcctcgaacagtt

SEQ ID NO: 652483 - DNA, 19 bp, Mus musculus
  siRNA target sequence for Snx12 (NM_018875.1,421-439).
gcaaggcctcgaacagttt

SEQ ID NO: 652484 - DNA, 19 bp, Mus musculus
  siRNA target sequence for Snx12 (NM_018875.1,422-440).
caaggcctcgaacagttta

SEQ ID NO: 652485 - DNA, 19 bp, Mus musculus
  siRNA target sequence for Snx12 (NM_018875.1,425-443).
ggcctcgaacagtttatta

SEQ ID NO: 652486 - DNA, 19 bp, Mus musculus
  siRNA target sequence for Snx12 (NM_018875.1,426-444).
gcctcgaacagtttattaa

SEQ ID NO: 652487 - DNA, 19 bp, Mus musculus
  siRNA target sequence for Snx12 (NM_018875.1,428-446).
ctcgaacagtttattaaca

SEQ ID NO: 652488 - DNA, 19 bp, Mus musculus
  siRNA target sequence for Snx12 (NM_018875.1,500-518).
caggaggaggcaattgata

SEQ ID NO: 652489 - DNA, 19 bp, Mus musculus
  siRNA target sequence for Snx12 (NM_018875.1,538-556).
ggtccttggggaaaaggat

SEQ ID NO: 652490 - DNA, 19 bp, Mus musculus
  siRNA target sequence for Snx2 (NM_026386.1,166-184).
gatatcagtgcaaactcta

SEQ ID NO: 652491 - DNA, 19 bp, Mus musculus
  siRNA target sequence for Snx2 (NM_026386.1,188-206).
gctccaaacctgtagaagt

SEQ ID NO: 652492 - DNA, 19 bp, Mus musculus
  siRNA target sequence for Snx2 (NM_026386.1,189-207).
ctccaaacctgtagaagtt

SEQ ID NO: 652493 - DNA, 19 bp, Mus musculus
  siRNA target sequence for Snx2 (NM_026386.1,191-209).
ccaaacctgtagaagttgt

SEQ ID NO: 652494 - DNA, 19 bp, Mus musculus
  siRNA target sequence for Snx2 (NM_026386.1,324-342).
cactcccaccacactcatt

SEQ ID NO: 652495 - DNA, 19 bp, Mus musculus
  siRNA target sequence for Snx2 (NM_026386.1,339-357).
cattgctcctagaatcgaa

SEQ ID NO: 652496 - DNA, 19 bp, Mus musculus
  siRNA target sequence for Snx2 (NM_026386.1,343-361).
gctcctagaatcgaatcaa

SEQ ID NO: 652497 - DNA, 19 bp, Mus musculus
  siRNA target sequence for Snx2 (NM_026386.1,344-362).
ctcctagaatcgaatcaaa

SEQ ID NO: 652498 - DNA, 19 bp, Mus musculus
  siRNA target sequence for Snx2 (NM_026386.1,346-364).
cctagaatcgaatcaaaga

SEQ ID NO: 652499 - DNA, 19 bp, Mus musculus
  siRNA target sequence for Snx2 (NM_026386.1,350-368).
gaatcgaatcaaagagtat

SEQ ID NO: 652500 - DNA, 19 bp, Mus musculus
  siRNA target sequence for Snx2 (NM_026386.1,354-372).
cgaatcaaagagtatctct

SEQ ID NO: 652501 - DNA, 19 bp, Mus musculus
  siRNA target sequence for Snx2 (NM_026386.1,392-410).
gatccagggacgagattga

SEQ ID NO: 652502 - DNA, 19 bp, Mus musculus
  siRNA target sequence for Snx2 (NM_026386.1,395-413).
ccagggacgagattgaaga

SEQ ID NO: 652503 - DNA, 19 bp, Mus musculus
  siRNA target sequence for Snx2 (NM_026386.1,396-414).
cagggacgagattgaagaa

SEQ ID NO: 652504 - DNA, 19 bp, Mus musculus
  siRNA target sequence for Snx2 (NM_026386.1,472-490).
ggtgatggcatgaatgctt

SEQ ID NO: 652505 - DNA, 19 bp, Mus musculus
  siRNA target sequence for Snx2 (NM_026386.1,473-491).
gtgatggcatgaatgctta

SEQ ID NO: 652506 - DNA, 19 bp, Mus musculus
  siRNA target sequence for Snx2 (NM_026386.1,495-513).
ggcatatagagtaacaaca

SEQ ID NO: 652507 - DNA, 19 bp, Mus musculus
  siRNA target sequence for Snx2 (NM_026386.1,521-539).
ctctttccatgttcagtaa

SEQ ID NO: 652508 - DNA, 19 bp, Mus musculus
  siRNA target sequence for Snx2 (NM_026386.1,534-552).
cagtaagagtgaattttca

SEQ ID NO: 652509 - DNA, 19 bp, Mus musculus
  siRNA target sequence for Snx2 (NM_026386.1,634-652).
cccgctccagaaaagagta

SEQ ID NO: 652510 - DNA, 19 bp, Mus musculus
  siRNA target sequence for Snx2 (NM_026386.1,659-677).
gtatgaccaaggtcaaagt

SEQ ID NO: 652511 - DNA, 19 bp, Mus musculus
  siRNA target sequence for Snx2 (NM_026386.1,665-683).
ccaaggtcaaagtaggtaa

SEQ ID NO: 652512 - DNA, 19 bp, Mus musculus
  siRNA target sequence for Snx2 (NM_026386.1,676-694).
gtaggtaaagaagattcat

SEQ ID NO: 652513 - DNA, 19 bp, Mus musculus
  siRNA target sequence for Snx2 (NM_026386.1,679-697).
ggtaaagaagattcatcat

SEQ ID NO: 652514 - DNA, 19 bp, Mus musculus
  siRNA target sequence for Snx2 (NM_026386.1,703-721).
gagtttgtagaaaaacgaa

SEQ ID NO: 652515 - DNA, 19 bp, Mus musculus
  siRNA target sequence for Snx2 (NM_026386.1,728-746).
cactggagaggtatcttca

SEQ ID NO: 652516 - DNA, 19 bp, Mus musculus
  siRNA target sequence for Snx2 (NM_026386.1,781-799).
cctgacttaaggcagtttt

SEQ ID NO: 652517 - DNA, 19 bp, Mus musculus
  siRNA target sequence for Snx2 (NM_026386.1,814-832).
ctgccgagagcagttaata

SEQ ID NO: 652518 - DNA, 19 bp, Mus musculus
  siRNA target sequence for Snx2 (NM_026386.1,878-896).
ctgccgacgctgtcaacaa

SEQ ID NO: 652519 - DNA, 19 bp, Mus musculus
  siRNA target sequence for Snx2 (NM_026386.1,880-898).
gccgacgctgtcaacaaaa

SEQ ID NO: 652520 - DNA, 19 bp, Mus musculus
  siRNA target sequence for Snx2 (NM_026386.1,881-899).
ccgacgctgtcaacaaaat

SEQ ID NO: 652521 - DNA, 19 bp, Mus musculus
  siRNA target sequence for Snx2 (NM_026386.1,885-903).
cgctgtcaacaaaatgaca

SEQ ID NO: 652522 - DNA, 19 bp, Mus musculus
  siRNA target sequence for Snx2 (NM_026386.1,921-939).
ggatgcatggtttgaagaa

SEQ ID NO: 652523 - DNA, 19 bp, Mus musculus
  siRNA target sequence for Snx2 (NM_026386.1,942-960).
gcaacagcaatttgagaat

SEQ ID NO: 652524 - DNA, 19 bp, Mus musculus
  siRNA target sequence for Snx2 (NM_026386.1,966-984).
ccagcaacttcggaaactt

SEQ ID NO: 652525 - DNA, 19 bp, Mus musculus
  siRNA target sequence for Snx2 (NM_026386.1,997-1015).
gaagccttggtctgtcata

SEQ ID NO: 652526 - DNA, 19 bp, Mus musculus
  siRNA target sequence for Snx2 (NM_026386.1,1001-1019).
ccttggtctgtcatagaaa

SEQ ID NO: 652527 - DNA, 19 bp, Mus musculus
  siRNA target sequence for Snx2 (NM_026386.1,1057-1075).
gctgccatgctaggtaatt

SEQ ID NO: 652528 - DNA, 19 bp, Mus musculus
  siRNA target sequence for Snx2 (NM_026386.1,1061-1079).
ccatgctaggtaattctga

SEQ ID NO: 652529 - DNA, 19 bp, Mus musculus
  siRNA target sequence for Snx2 (NM_026386.1,1131-1149).
gaagatagaccagttacat

SEQ ID NO: 652530 - DNA, 19 bp, Mus musculus
  siRNA target sequence for Snx2 (NM_026386.1,1134-1152).
gatagaccagttacatcaa

SEQ ID NO: 652531 - DNA, 19 bp, Mus musculus
  siRNA target sequence for Snx2 (NM_026386.1,1267-1285).
gaagatgctcaaattacct

SEQ ID NO: 652532 - DNA, 19 bp, Mus musculus
  siRNA target sequence for Snx2 (NM_026386.1,1287-1305).
gctcaaaaaacgtgaaact

SEQ ID NO: 652533 - DNA, 19 bp, Mus musculus
  siRNA target sequence for Snx2 (NM_026386.1,1348-1366).
caagctaaaaacgagataa

SEQ ID NO: 652534 - DNA, 19 bp, Mus musculus
  siRNA target sequence for Snx2 (NM_026386.1,1373-1391).
gggaggcgaaagtacaaca

SEQ ID NO: 652535 - DNA, 19 bp, Mus musculus
  siRNA target sequence for Snx2 (NM_026386.1,1374-1392).
ggaggcgaaagtacaacaa

SEQ ID NO: 652536 - DNA, 19 bp, Mus musculus
  siRNA target sequence for Snx2 (NM_026386.1,1410-1428).
gcagatctctaaaacaatt

SEQ ID NO: 652537 - DNA, 19 bp, Mus musculus
  siRNA target sequence for Snx2 (NM_026386.1,1413-1431).
gatctctaaaacaattcga

SEQ ID NO: 652538 - DNA, 19 bp, Mus musculus
  siRNA target sequence for Snx2 (NM_026386.1,1477-1495).
gctgttatcatcaagtact

SEQ ID NO: 652539 - DNA, 19 bp, Mus musculus
  siRNA target sequence for Snx2 (NM_026386.1,1478-1496).
ctgttatcatcaagtactt

SEQ ID NO: 652540 - DNA, 19 bp, Mus musculus
  siRNA target sequence for Snx2 (NM_026386.1,1488-1506).
caagtacttggagtcatta

SEQ ID NO: 652541 - DNA, 19 bp, Mus musculus
  siRNA target sequence for Snx2 (NM_026386.1,1491-1509).
gtacttggagtcattagta

SEQ ID NO: 652542 - DNA, 19 bp, Mus musculus
  siRNA target sequence for Snx2 (NM_026386.1,1497-1515).
ggagtcattagtacaaaca

SEQ ID NO: 652543 - DNA, 19 bp, Mus musculus
  siRNA target sequence for Snx2 (NM_026386.1,1514-1532).
cacagcaacagctgataaa

SEQ ID NO: 652544 - DNA, 19 bp, Mus musculus
  siRNA target sequence for Snx2 (NM_026386.1,1533-1551).
gtactgggaggcattccta

SEQ ID NO: 652545 - DNA, 19 bp, Mus musculus
  siRNA target sequence for Snx3 (NM_017472.2,450-468).
gagatcagggtcaagacaa

SEQ ID NO: 652546 - DNA, 19 bp, Mus musculus
  siRNA target sequence for Snx3 (NM_017472.2,486-504).
ctgaaggaatctactgtta

SEQ ID NO: 652547 - DNA, 19 bp, Mus musculus
  siRNA target sequence for Snx3 (NM_017472.2,613-631).
gaggagacgatggaatatt

SEQ ID NO: 652548 - DNA, 19 bp, Mus musculus
  siRNA target sequence for Snx3 (NM_017472.2,616-634).
gagacgatggaatatttga

SEQ ID NO: 652549 - DNA, 19 bp, Mus musculus
  siRNA target sequence for Snx3 (NM_017472.2,664-682).
ggctggaacagttcataaa

SEQ ID NO: 652550 - DNA, 19 bp, Mus musculus
  siRNA target sequence for Snx3 (NM_017472.2,717-735).
cgttgtcttcacatgtttt

SEQ ID NO: 652551 - DNA, 19 bp, Mus musculus
  siRNA target sequence for Snx3 (NM_017472.2,718-736).
gttgtcttcacatgttttt

SEQ ID NO: 652552 - DNA, 19 bp, Mus musculus
  siRNA target sequence for Snx3 (NM_017472.2,761-779).
ctatactccatctaaaata

SEQ ID NO: 652553 - DNA, 19 bp, Mus musculus
  siRNA target sequence for Snx3 (NM_017472.2,766-784).
ctccatctaaaataagaca

SEQ ID NO: 652554 - DNA, 19 bp, Mus musculus
  siRNA target sequence for Snx5 (NM_024225.2,144-162).
ggaccgcagcaagttaaga

SEQ ID NO: 652555 - DNA, 19 bp, Mus musculus
  siRNA target sequence for Snx5 (NM_024225.2,145-163).
gaccgcagcaagttaagat

SEQ ID NO: 652556 - DNA, 19 bp, Mus musculus
  siRNA target sequence for Snx5 (NM_024225.2,147-165).
ccgcagcaagttaagatct

SEQ ID NO: 652557 - DNA, 19 bp, Mus musculus
  siRNA target sequence for Snx5 (NM_024225.2,228-246).
gagagataaggtcaagttt

SEQ ID NO: 652558 - DNA, 19 bp, Mus musculus
  siRNA target sequence for Snx5 (NM_024225.2,296-314).
ctgttacaaggcaacatga

SEQ ID NO: 652559 - DNA, 19 bp, Mus musculus
  siRNA target sequence for Snx5 (NM_024225.2,327-345).
gctgcatgacactcttact

SEQ ID NO: 652560 - DNA, 19 bp, Mus musculus
  siRNA target sequence for Snx5 (NM_024225.2,334-352).
gacactcttactgaaacaa

SEQ ID NO: 652561 - DNA, 19 bp, Mus musculus
  siRNA target sequence for Snx5 (NM_024225.2,354-372).
ggattatgctggccttatt

SEQ ID NO: 652562 - DNA, 19 bp, Mus musculus
  siRNA target sequence for Snx5 (NM_024225.2,355-373).
gattatgctggccttatta

SEQ ID NO: 652563 - DNA, 19 bp, Mus musculus
  siRNA target sequence for Snx5 (NM_024225.2,446-464).
gatctatgacaaaagaaga

SEQ ID NO: 652564 - DNA, 19 bp, Mus musculus
  siRNA target sequence for Snx5 (NM_024225.2,496-514).
gagtatctcgctgtcttta

SEQ ID NO: 652565 - DNA, 19 bp, Mus musculus
  siRNA target sequence for Snx5 (NM_024225.2,521-539).
ctgtgtccacccatgaagt

SEQ ID NO: 652566 - DNA, 19 bp, Mus musculus
  siRNA target sequence for Snx5 (NM_024225.2,525-543).
gtccacccatgaagtcttt

SEQ ID NO: 652567 - DNA, 19 bp, Mus musculus
  siRNA target sequence for Snx5 (NM_024225.2,575-593).
gtaaagaccgcaactttca

SEQ ID NO: 652568 - DNA, 19 bp, Mus musculus
  siRNA target sequence for Snx5 (NM_024225.2,580-598).
gaccgcaactttcatgttt

SEQ ID NO: 652569 - DNA, 19 bp, Mus musculus
  siRNA target sequence for Snx5 (NM_024225.2,583-601).
cgcaactttcatgttttct

SEQ ID NO: 652570 - DNA, 19 bp, Mus musculus
  siRNA target sequence for Snx5 (NM_024225.2,584-602).
gcaactttcatgttttctt

SEQ ID NO: 652571 - DNA, 19 bp, Mus musculus
  siRNA target sequence for Snx5 (NM_024225.2,610-628).
gatcaggatctaagtgtta

SEQ ID NO: 652572 - DNA, 19 bp, Mus musculus
  siRNA target sequence for Snx5 (NM_024225.2,625-643).
gttagacggaagaatacca

SEQ ID NO: 652573 - DNA, 19 bp, Mus musculus
  siRNA target sequence for Snx5 (NM_024225.2,636-654).
gaataccaaggagatgttt

SEQ ID NO: 652574 - DNA, 19 bp, Mus musculus
  siRNA target sequence for Snx5 (NM_024225.2,683-701).
gcgccgatgaggtcctttt

SEQ ID NO: 652575 - DNA, 19 bp, Mus musculus
  siRNA target sequence for Snx5 (NM_024225.2,684-702).
cgccgatgaggtccttttt

SEQ ID NO: 652576 - DNA, 19 bp, Mus musculus
  siRNA target sequence for Snx5 (NM_024225.2,685-703).
gccgatgaggtcctttttt

SEQ ID NO: 652577 - DNA, 19 bp, Mus musculus
  siRNA target sequence for Snx5 (NM_024225.2,687-705).
cgatgaggtccttttttct

SEQ ID NO: 652578 - DNA, 19 bp, Mus musculus
  siRNA target sequence for Snx5 (NM_024225.2,739-757).
gagaagaatttccttatta

SEQ ID NO: 652579 - DNA, 19 bp, Mus musculus
  siRNA target sequence for Snx5 (NM_024225.2,777-795).
ggattcctgtgctaaagca

SEQ ID NO: 652580 - DNA, 19 bp, Mus musculus
  siRNA target sequence for Snx5 (NM_024225.2,880-898).
cccacagtcatcaaaaagt

SEQ ID NO: 652581 - DNA, 19 bp, Mus musculus
  siRNA target sequence for Snx5 (NM_024225.2,916-934).
gagctatttgaaaaactta

SEQ ID NO: 652582 - DNA, 19 bp, Mus musculus
  siRNA target sequence for Snx5 (NM_024225.2,980-998).
cagagctcctccgatacta

SEQ ID NO: 652583 - DNA, 19 bp, Mus musculus
  siRNA target sequence for Snx5 (NM_024225.2,992-1010).
gatactacatgctcaacat

SEQ ID NO: 652584 - DNA, 19 bp, Mus musculus
  siRNA target sequence for Snx5 (NM_024225.2,1029-1047).
cttgtatagacgtaccaaa

SEQ ID NO: 652585 - DNA, 19 bp, Mus musculus
  siRNA target sequence for Snx5 (NM_024225.2,1040-1058).
gtaccaaagccctaattga

SEQ ID NO: 652586 - DNA, 19 bp, Mus musculus
  siRNA target sequence for Snx5 (NM_024225.2,1048-1066).
gccctaattgactatgaga

SEQ ID NO: 652587 - DNA, 19 bp, Mus musculus
  siRNA target sequence for Snx5 (NM_024225.2,1050-1068).
cctaattgactatgagaat

SEQ ID NO: 652588 - DNA, 19 bp, Mus musculus
  siRNA target sequence for Snx5 (NM_024225.2,1137-1155).
ggaatgctgccagaagttt

SEQ ID NO: 652589 - DNA, 19 bp, Mus musculus
  siRNA target sequence for Snx5 (NM_024225.2,1206-1224).
gagagtggcagcatttcga

SEQ ID NO: 652590 - DNA, 19 bp, Mus musculus
  siRNA target sequence for Snx5 (NM_024225.2,1208-1226).
gagtggcagcatttcgaaa

SEQ ID NO: 652591 - DNA, 19 bp, Mus musculus
  siRNA target sequence for Snx5 (NM_024225.2,1216-1234).
gcatttcgaaagaacctaa

SEQ ID NO: 652592 - DNA, 19 bp, Mus musculus
  siRNA target sequence for Snx5 (NM_024225.2,1217-1235).
catttcgaaagaacctaat

SEQ ID NO: 652593 - DNA, 19 bp, Mus musculus
  siRNA target sequence for Snx5 (NM_024225.2,1222-1240).
cgaaagaacctaatcgaaa

SEQ ID NO: 652594 - DNA, 19 bp, Mus musculus
  siRNA target sequence for Snx5 (NM_024225.2,1223-1241).
gaaagaacctaatcgaaat

SEQ ID NO: 652595 - DNA, 19 bp, Mus musculus
  siRNA target sequence for Snx5 (NM_024225.2,1227-1245).
gaacctaatcgaaatgtct

SEQ ID NO: 652596 - DNA, 19 bp, Mus musculus
  siRNA target sequence for Snx5 (NM_024225.2,1288-1306).
cagagctgcatcgacttat

SEQ ID NO: 652597 - DNA, 19 bp, Mus musculus
  siRNA target sequence for Snx5 (NM_024225.2,1295-1313).
gcatcgacttattcaagaa

SEQ ID NO: 652598 - DNA, 19 bp, Mus musculus
  siRNA target sequence for Snx9 (NM_025664.2,163-181).
ccaaggctcgggtcatgta

SEQ ID NO: 652599 - DNA, 19 bp, Mus musculus
  siRNA target sequence for Snx9 (NM_025664.2,316-334).
ctgactacgtggaaatttt

SEQ ID NO: 652600 - DNA, 19 bp, Mus musculus
  siRNA target sequence for Snx9 (NM_025664.2,320-338).
ctacgtggaaattttacca

SEQ ID NO: 652601 - DNA, 19 bp, Mus musculus
  siRNA target sequence for Snx9 (NM_025664.2,326-344).
ggaaattttaccaaacgat

SEQ ID NO: 652602 - DNA, 19 bp, Mus musculus
  siRNA target sequence for Snx9 (NM_025664.2,345-363).
ggaaaagatccgttttctt

SEQ ID NO: 652603 - DNA, 19 bp, Mus musculus
  siRNA target sequence for Snx9 (NM_025664.2,373-391).
cagtagccgaccaagcttt

SEQ ID NO: 652604 - DNA, 19 bp, Mus musculus
  siRNA target sequence for Snx9 (NM_025664.2,409-427).
ctagcacagctcaaaccaa

SEQ ID NO: 652605 - DNA, 19 bp, Mus musculus
  siRNA target sequence for Snx9 (NM_025664.2,719-737).
catccagcggggaaacagt

SEQ ID NO: 652606 - DNA, 19 bp, Mus musculus
  siRNA target sequence for Snx9 (NM_025664.2,761-779).
gctgccccttaacaaattt

SEQ ID NO: 652607 - DNA, 19 bp, Mus musculus
  siRNA target sequence for Snx9 (NM_025664.2,764-782).
gccccttaacaaatttcct

SEQ ID NO: 652608 - DNA, 19 bp, Mus musculus
  siRNA target sequence for Snx9 (NM_025664.2,798-816).
ggcatggagcagtacttgt

SEQ ID NO: 652609 - DNA, 19 bp, Mus musculus
  siRNA target sequence for Snx9 (NM_025664.2,853-871).
ccatcatcgttggagatta

SEQ ID NO: 652610 - DNA, 19 bp, Mus musculus
  siRNA target sequence for Snx9 (NM_025664.2,891-909).
cctacctctacgtttgact

SEQ ID NO: 652611 - DNA, 19 bp, Mus musculus
  siRNA target sequence for Snx9 (NM_025664.2,918-936).
gctgatccccggaaaggtt

SEQ ID NO: 652612 - DNA, 19 bp, Mus musculus
  siRNA target sequence for Snx9 (NM_025664.2,924-942).
ccccggaaaggttccaaaa

SEQ ID NO: 652613 - DNA, 19 bp, Mus musculus
  siRNA target sequence for Snx9 (NM_025664.2,928-946).
ggaaaggttccaaaatgta

SEQ ID NO: 652614 - DNA, 19 bp, Mus musculus
  siRNA target sequence for Snx9 (NM_025664.2,947-965).
cggtctgaagagctacatt

SEQ ID NO: 652615 - DNA, 19 bp, Mus musculus
  siRNA target sequence for Snx9 (NM_025664.2,975-993).
ctaacacccactaacacta

SEQ ID NO: 652616 - DNA, 19 bp, Mus musculus
  siRNA target sequence for Snx9 (NM_025664.2,991-1009).
ctaaccgatctgtaaacca

SEQ ID NO: 652617 - DNA, 19 bp, Mus musculus
  siRNA target sequence for Snx9 (NM_025664.2,1000-1018).
ctgtaaaccacagatataa

SEQ ID NO: 652618 - DNA, 19 bp, Mus musculus
  siRNA target sequence for Snx9 (NM_025664.2,1010-1028).
cagatataagcactttgat

SEQ ID NO: 652619 - DNA, 19 bp, Mus musculus
  siRNA target sequence for Snx9 (NM_025664.2,1038-1056).
gagcgtctcctggttaagt

SEQ ID NO: 652620 - DNA, 19 bp, Mus musculus
  siRNA target sequence for Snx9 (NM_025664.2,1040-1058).
gcgtctcctggttaagttt

SEQ ID NO: 652621 - DNA, 19 bp, Mus musculus
  siRNA target sequence for Snx9 (NM_025664.2,1107-1125).
cgctttgaagaggaattta

SEQ ID NO: 652622 - DNA, 19 bp, Mus musculus
  siRNA target sequence for Snx9 (NM_025664.2,1180-1198).
cggtggtgtcagaaagtga

SEQ ID NO: 652623 - DNA, 19 bp, Mus musculus
  siRNA target sequence for Snx9 (NM_025664.2,1181-1199).
ggtggtgtcagaaagtgaa

SEQ ID NO: 652624 - DNA, 19 bp, Mus musculus
  siRNA target sequence for Snx9 (NM_025664.2,1277-1295).
ggtgggagtgatgatattt

SEQ ID NO: 652625 - DNA, 19 bp, Mus musculus
  siRNA target sequence for Snx9 (NM_025664.2,1278-1296).
gtgggagtgatgatatttt

SEQ ID NO: 652626 - DNA, 19 bp, Mus musculus
  siRNA target sequence for Snx9 (NM_025664.2,1281-1299).
ggagtgatgatattttcca

SEQ ID NO: 652627 - DNA, 19 bp, Mus musculus
  siRNA target sequence for Snx9 (NM_025664.2,1314-1332).
gctcctgacttggatttga

SEQ ID NO: 652628 - DNA, 19 bp, Mus musculus
  siRNA target sequence for Snx9 (NM_025664.2,1325-1343).
ggatttgatagaaatagaa

SEQ ID NO: 652629 - DNA, 19 bp, Mus musculus
  siRNA target sequence for Snx9 (NM_025664.2,1353-1371).
gacgctgtggggaagttca

SEQ ID NO: 652630 - DNA, 19 bp, Mus musculus
  siRNA target sequence for Snx9 (NM_025664.2,1444-1462).
ccttacccaaggagtatca

SEQ ID NO: 652631 - DNA, 19 bp, Mus musculus
  siRNA target sequence for Snx9 (NM_025664.2,1502-1520).
cagctccagcggttatcaa

SEQ ID NO: 652632 - DNA, 19 bp, Mus musculus
  siRNA target sequence for Snx9 (NM_025664.2,1522-1540).
gagagaccgaccttaacga

SEQ ID NO: 652633 - DNA, 19 bp, Mus musculus
  siRNA target sequence for Snx9 (NM_025664.2,1528-1546).
ccgaccttaacgatgcaat

SEQ ID NO: 652634 - DNA, 19 bp, Mus musculus
  siRNA target sequence for Snx9 (NM_025664.2,1532-1550).
ccttaacgatgcaatcaca

SEQ ID NO: 652635 - DNA, 19 bp, Mus musculus
  siRNA target sequence for Snx9 (NM_025664.2,1628-1646).
gtgcaaccatgagtacaaa

SEQ ID NO: 652636 - DNA, 19 bp, Mus musculus
  siRNA target sequence for Snx9 (NM_025664.2,1683-1701).
cacaagggagcaatagaaa

SEQ ID NO: 652637 - DNA, 19 bp, Mus musculus
  siRNA target sequence for Snx9 (NM_025664.2,1724-1742).
ggttgcaactagtaaaatt

SEQ ID NO: 652638 - DNA, 19 bp, Mus musculus
  siRNA target sequence for Snx9 (NM_025664.2,1725-1743).
gttgcaactagtaaaatta

SEQ ID NO: 652639 - DNA, 19 bp, Mus musculus
  siRNA target sequence for Snx9 (NM_025664.2,1774-1792).
gagttggcaccatgtctta

SEQ ID NO: 652640 - DNA, 19 bp, Mus musculus
  siRNA target sequence for Snx9 (NM_025664.2,1800-1818).
caagctgagatgaatcact

SEQ ID NO: 652641 - DNA, 19 bp, Mus musculus
  siRNA target sequence for Snx9 (NM_025664.2,1823-1841).
cagtaaccggatctatgat

SEQ ID NO: 652642 - DNA, 19 bp, Mus musculus
  siRNA target sequence for Snx9 (NM_025664.2,1825-1843).
gtaaccggatctatgatta

SEQ ID NO: 652643 - DNA, 19 bp, Mus musculus
  siRNA target sequence for Snx9 (NM_025664.2,1830-1848).
cggatctatgattacaaca

SEQ ID NO: 652644 - DNA, 19 bp, Mus musculus
  siRNA target sequence for Sorcs (NM_021377.1,356-374).
ggaacccgagaagattgaa

SEQ ID NO: 652645 - DNA, 19 bp, Mus musculus
  siRNA target sequence for Sorcs (NM_021377.1,571-589).
gcagcgtgattctcatttt

SEQ ID NO: 652646 - DNA, 19 bp, Mus musculus
  siRNA target sequence for Sorcs (NM_021377.1,590-608).
gacaaagctctatgactat

SEQ ID NO: 652647 - DNA, 19 bp, Mus musculus
  siRNA target sequence for Sorcs (NM_021377.1,592-610).
caaagctctatgactataa

SEQ ID NO: 652648 - DNA, 19 bp, Mus musculus
  siRNA target sequence for Sorcs (NM_021377.1,650-668).
cgattatgggactacctat

SEQ ID NO: 652649 - DNA, 19 bp, Mus musculus
  siRNA target sequence for Sorcs (NM_021377.1,657-675).
gggactacctatgaaaagt

SEQ ID NO: 652650 - DNA, 19 bp, Mus musculus
  siRNA target sequence for Sorcs (NM_021377.1,658-676).
ggactacctatgaaaagtt

SEQ ID NO: 652651 - DNA, 19 bp, Mus musculus
  siRNA target sequence for Sorcs (NM_021377.1,700-718).
caattttgagctatctcta

SEQ ID NO: 652652 - DNA, 19 bp, Mus musculus
  siRNA target sequence for Sorcs (NM_021377.1,887-905).
cagtcaagaccaaaagtta

SEQ ID NO: 652653 - DNA, 19 bp, Mus musculus
  siRNA target sequence for Sorcs (NM_021377.1,925-943).
gccgaagatggcagcttat

SEQ ID NO: 652654 - DNA, 19 bp, Mus musculus
  siRNA target sequence for Sorcs (NM_021377.1,952-970).
cagtggtaccaaataggtt

SEQ ID NO: 652655 - DNA, 19 bp, Mus musculus
  siRNA target sequence for Sorcs (NM_021377.1,1030-1048).
ctgtggatggtcactcaat

SEQ ID NO: 652656 - DNA, 19 bp, Mus musculus
  siRNA target sequence for Sorcs (NM_021377.1,1032-1050).
gtggatggtcactcaatat

SEQ ID NO: 652657 - DNA, 19 bp, Mus musculus
  siRNA target sequence for Sorcs (NM_021377.1,1041-1059).
cactcaatatacctaactt

SEQ ID NO: 652658 - DNA, 19 bp, Mus musculus
  siRNA target sequence for Sorcs (NM_021377.1,1043-1061).
ctcaatatacctaacttgt

SEQ ID NO: 652659 - DNA, 19 bp, Mus musculus
  siRNA target sequence for Sorcs (NM_021377.1,1053-1071).
ctaacttgtcggatgcaaa

SEQ ID NO: 652660 - DNA, 19 bp, Mus musculus
  siRNA target sequence for Sorcs (NM_021377.1,1115-1133).
cgacccggactctttgatt

SEQ ID NO: 652661 - DNA, 19 bp, Mus musculus
  siRNA target sequence for Sorcs (NM_021377.1,1120-1138).
cggactctttgattgttca

SEQ ID NO: 652662 - DNA, 19 bp, Mus musculus
  siRNA target sequence for Sorcs (NM_021377.1,1130-1148).
gattgttcaggacgattat

SEQ ID NO: 652663 - DNA, 19 bp, Mus musculus
  siRNA target sequence for Sorcs (NM_021377.1,1139-1157).
ggacgattatgtgtttgtt

SEQ ID NO: 652664 - DNA, 19 bp, Mus musculus
  siRNA target sequence for Sorcs (NM_021377.1,1409-1427).
cgtcatgattgacctttat

SEQ ID NO: 652665 - DNA, 19 bp, Mus musculus
  siRNA target sequence for Sorcs (NM_021377.1,1447-1465).
gaatgttcttggctaacaa

SEQ ID NO: 652666 - DNA, 19 bp, Mus musculus
  siRNA target sequence for Sorcs (NM_021377.1,1458-1476).
gctaacaagaagattgaca

SEQ ID NO: 652667 - DNA, 19 bp, Mus musculus
  siRNA target sequence for Sorcs (NM_021377.1,1593-1611).
caccttcacctgaaggttt

SEQ ID NO: 652668 - DNA, 19 bp, Mus musculus
  siRNA target sequence for Sorcs (NM_021377.1,1622-1640).
ctacacatccgggatcatt

SEQ ID NO: 652669 - DNA, 19 bp, Mus musculus
  siRNA target sequence for Sorcs (NM_021377.1,1648-1666).
gagacacagccccaagtat

SEQ ID NO: 652670 - DNA, 19 bp, Mus musculus
  siRNA target sequence for Sorcs (NM_021377.1,1650-1668).
gacacagccccaagtatta

SEQ ID NO: 652671 - DNA, 19 bp, Mus musculus
  siRNA target sequence for Sorcs (NM_021377.1,1652-1670).
cacagccccaagtattata

SEQ ID NO: 652672 - DNA, 19 bp, Mus musculus
  siRNA target sequence for Sorcs (NM_021377.1,1654-1672).
cagccccaagtattatagt

SEQ ID NO: 652673 - DNA, 19 bp, Mus musculus
  siRNA target sequence for Sorcs (NM_021377.1,1706-1724).
cagtgacatcagcatgttt

SEQ ID NO: 652674 - DNA, 19 bp, Mus musculus
  siRNA target sequence for Sorcs (NM_021377.1,1712-1730).
catcagcatgtttgtatct

SEQ ID NO: 652675 - DNA, 19 bp, Mus musculus
  siRNA target sequence for Sorcs (NM_021377.1,1801-1819).
gagtccttgttgctatgaa

SEQ ID NO: 652676 - DNA, 19 bp, Mus musculus
  siRNA target sequence for Sorcs (NM_021377.1,1834-1852).
caattcgacacctttggtt

SEQ ID NO: 652677 - DNA, 19 bp, Mus musculus
  siRNA target sequence for Sorcs (NM_021377.1,1839-1857).
cgacacctttggttgagtt

SEQ ID NO: 652678 - DNA, 19 bp, Mus musculus
  siRNA target sequence for Sorcs (NM_021377.1,1936-1954).
gagaagagacactaatcat

SEQ ID NO: 652679 - DNA, 19 bp, Mus musculus
  siRNA target sequence for Sorcs (NM_021377.1,2009-2027).
ctacaagtccatttttgat

SEQ ID NO: 652680 - DNA, 19 bp, Mus musculus
  siRNA target sequence for Sorcs (NM_021377.1,2056-2074).
cctggcagttgcatagtca

SEQ ID NO: 652681 - DNA, 19 bp, Mus musculus
  siRNA target sequence for Sorcs (NM_021377.1,2094-2112).
ggagccaagaggatataca

SEQ ID NO: 652682 - DNA, 19 bp, Mus musculus
  siRNA target sequence for Sorcs (NM_021377.1,2095-2113).
gagccaagaggatatacaa

SEQ ID NO: 652683 - DNA, 19 bp, Mus musculus
  siRNA target sequence for Sorcs (NM_021377.1,2182-2200).
gtacagaggcagactttga

SEQ ID NO: 652684 - DNA, 19 bp, Mus musculus
  siRNA target sequence for Sorcs (NM_021377.1,2211-2229).
ggctatgagagacatagta

SEQ ID NO: 652685 - DNA, 19 bp, Mus musculus
  siRNA target sequence for Sorcs (NM_021377.1,2212-2230).
gctatgagagacatagtaa

SEQ ID NO: 652686 - DNA, 19 bp, Mus musculus
  siRNA target sequence for Sorcs (NM_021377.1,2213-2231).
ctatgagagacatagtaat

SEQ ID NO: 652687 - DNA, 19 bp, Mus musculus
  siRNA target sequence for Sorcs (NM_021377.1,2284-2302).
gcagcttgggacagagtta

SEQ ID NO: 652688 - DNA, 19 bp, Mus musculus
  siRNA target sequence for Sorcs (NM_021377.1,2327-2345).
ggtggtctccaataattgt

SEQ ID NO: 652689 - DNA, 19 bp, Mus musculus
  siRNA target sequence for Sorcs (NM_021377.1,2328-2346).
gtggtctccaataattgta

SEQ ID NO: 652690 - DNA, 19 bp, Mus musculus
  siRNA target sequence for Sorcs (NM_021377.1,2330-2348).
ggtctccaataattgtact

SEQ ID NO: 652691 - DNA, 19 bp, Mus musculus
  siRNA target sequence for Sorcs (NM_021377.1,2333-2351).
ctccaataattgtactgat

SEQ ID NO: 652692 - DNA, 19 bp, Mus musculus
  siRNA target sequence for Sorcs (NM_021377.1,2406-2424).
cgtgggctgcggattgtca

SEQ ID NO: 652693 - DNA, 19 bp, Mus musculus
  siRNA target sequence for Sorcs (NM_021377.1,2573-2591).
cggtatcaagcacgtatat

SEQ ID NO: 652694 - DNA, 19 bp, Mus musculus
  siRNA target sequence for Sorcs (NM_021377.1,2575-2593).
gtatcaagcacgtatatca

SEQ ID NO: 652695 - DNA, 19 bp, Mus musculus
  siRNA target sequence for Sorcs (NM_021377.1,2579-2597).
caagcacgtatatcagaat

SEQ ID NO: 652696 - DNA, 19 bp, Mus musculus
  siRNA target sequence for Sorcs (NM_021377.1,2648-2666).
cagcgccgtcctgtactta

SEQ ID NO: 652697 - DNA, 19 bp, Mus musculus
  siRNA target sequence for Sorcs (NM_021377.1,2650-2668).
gcgccgtcctgtacttaca

SEQ ID NO: 652698 - DNA, 19 bp, Mus musculus
  siRNA target sequence for Sorcs (NM_021377.1,2651-2669).
cgccgtcctgtacttacat

SEQ ID NO: 652699 - DNA, 19 bp, Mus musculus
  siRNA target sequence for Sorcs (NM_021377.1,2654-2672).
cgtcctgtacttacatgta

SEQ ID NO: 652700 - DNA, 19 bp, Mus musculus
  siRNA target sequence for Sorcs (NM_021377.1,2655-2673).
gtcctgtacttacatgtaa

SEQ ID NO: 652701 - DNA, 19 bp, Mus musculus
  siRNA target sequence for Sorcs (NM_021377.1,2658-2676).
ctgtacttacatgtaactt

SEQ ID NO: 652702 - DNA, 19 bp, Mus musculus
  siRNA target sequence for Sorcs (NM_021377.1,2829-2847).
ggaagcatatcgttcaagt

SEQ ID NO: 652703 - DNA, 19 bp, Mus musculus
  siRNA target sequence for Sorcs (NM_021377.1,2830-2848).
gaagcatatcgttcaagtt

SEQ ID NO: 652704 - DNA, 19 bp, Mus musculus
  siRNA target sequence for Sorcs (NM_021377.1,2834-2852).
catatcgttcaagtttact

SEQ ID NO: 652705 - DNA, 19 bp, Mus musculus
  siRNA target sequence for Sorcs (NM_021377.1,2899-2917).
ccatactgcaagacacaaa

SEQ ID NO: 652706 - DNA, 19 bp, Mus musculus
  siRNA target sequence for Sorcs (NM_021377.1,2965-2983).
ctccgaacttggatgacta

SEQ ID NO: 652707 - DNA, 19 bp, Mus musculus
  siRNA target sequence for Sorcs (NM_021377.1,2968-2986).
cgaacttggatgactacaa

SEQ ID NO: 652708 - DNA, 19 bp, Mus musculus
  siRNA target sequence for Sorcs (NM_021377.1,3020-3038).
ccgagtcatcaaaaagtct

SEQ ID NO: 652709 - DNA, 19 bp, Mus musculus
  siRNA target sequence for Sorcs (NM_021377.1,3238-3256).
ctggcgtccaagttcttgt

SEQ ID NO: 652710 - DNA, 19 bp, Mus musculus
  siRNA target sequence for Sorcs (NM_021377.1,3313-3331).
gatctgccatgctgatgtt

SEQ ID NO: 652711 - DNA, 19 bp, Mus musculus
  siRNA target sequence for Sorcs (NM_021377.1,3358-3376).
ctgtattcgtcatctacaa

SEQ ID NO: 652712 - DNA, 19 bp, Mus musculus
  siRNA target sequence for Sorcs (NM_021377.1,3360-3378).
gtattcgtcatctacaagt

SEQ ID NO: 652713 - DNA, 19 bp, Mus musculus
  siRNA target sequence for Sorcs (NM_021377.1,3434-3452).
ctcatctctccgattgcaa

SEQ ID NO: 652714 - DNA, 19 bp, Mus musculus
  siRNA target sequence for Sorcs (NM_021377.1,3501-3519).
ggggcacagtttgcaattt

SEQ ID NO: 652715 - DNA, 19 bp, Mus musculus
  siRNA target sequence for Stx12 (NM_133887.2,99-117).
cctacggtcccttagacat

SEQ ID NO: 652716 - DNA, 19 bp, Mus musculus
  siRNA target sequence for Stx12 (NM_133887.2,205-223).
ccaagccactgctcagata

SEQ ID NO: 652717 - DNA, 19 bp, Mus musculus
  siRNA target sequence for Stx12 (NM_133887.2,206-224).
caagccactgctcagataa

SEQ ID NO: 652718 - DNA, 19 bp, Mus musculus
  siRNA target sequence for Stx12 (NM_133887.2,210-228).
ccactgctcagataaagaa

SEQ ID NO: 652719 - DNA, 19 bp, Mus musculus
  siRNA target sequence for Stx12 (NM_133887.2,211-229).
cactgctcagataaagaat

SEQ ID NO: 652720 - DNA, 19 bp, Mus musculus
  siRNA target sequence for Stx12 (NM_133887.2,289-307).
gttacagcactccacaaat

SEQ ID NO: 652721 - DNA, 19 bp, Mus musculus
  siRNA target sequence for Stx12 (NM_133887.2,310-328).
gctggccaaggaaacaaat

SEQ ID NO: 652722 - DNA, 19 bp, Mus musculus
  siRNA target sequence for Stx12 (NM_133887.2,424-442).
ctcgtcggccttaaacaat

SEQ ID NO: 652723 - DNA, 19 bp, Mus musculus
  siRNA target sequence for Stx12 (NM_133887.2,426-444).
cgtcggccttaaacaattt

SEQ ID NO: 652724 - DNA, 19 bp, Mus musculus
  siRNA target sequence for Stx12 (NM_133887.2,545-563).
cagctcgtctcatttgaca

SEQ ID NO: 652725 - DNA, 19 bp, Mus musculus
  siRNA target sequence for Stx12 (NM_133887.2,694-712).
gatatttaaagatttagct

SEQ ID NO: 652726 - DNA, 19 bp, Mus musculus
  siRNA target sequence for Stx12 (NM_133887.2,728-746).
caaggtgatctgatcgata

SEQ ID NO: 652727 - DNA, 19 bp, Mus musculus
  siRNA target sequence for Stx12 (NM_133887.2,732-750).
gtgatctgatcgatagcat

SEQ ID NO: 652728 - DNA, 19 bp, Mus musculus
  siRNA target sequence for Stx12 (NM_133887.2,793-811).
cactgatcagctacaaaga

SEQ ID NO: 652729 - DNA, 19 bp, Mus musculus
  siRNA target sequence for Stx12 (NM_133887.2,813-831).
ctgcttactatcagaaaaa

SEQ ID NO: 652730 - DNA, 19 bp, Mus musculus
  siRNA target sequence for Stx3 (NM_011502.1,224-242).
cacggacgaggttgagatt

SEQ ID NO: 652731 - DNA, 19 bp, Mus musculus
  siRNA target sequence for Stx3 (NM_011502.1,234-252).
gttgagattgccattgaca

SEQ ID NO: 652732 - DNA, 19 bp, Mus musculus
  siRNA target sequence for Stx3 (NM_011502.1,314-332).
gagattgagctcacatgaa

SEQ ID NO: 652733 - DNA, 19 bp, Mus musculus
  siRNA target sequence for Stx3 (NM_011502.1,325-343).
cacatgaaaccaaagatga

SEQ ID NO: 652734 - DNA, 19 bp, Mus musculus
  siRNA target sequence for Stx3 (NM_011502.1,447-465).
gcagaccttcggatacgaa

SEQ ID NO: 652735 - DNA, 19 bp, Mus musculus
  siRNA target sequence for Stx3 (NM_011502.1,448-466).
cagaccttcggatacgaaa

SEQ ID NO: 652736 - DNA, 19 bp, Mus musculus
  siRNA target sequence for Stx3 (NM_011502.1,503-521).
ggtgatgacaaagtacaat

SEQ ID NO: 652737 - DNA, 19 bp, Mus musculus
  siRNA target sequence for Stx3 (NM_011502.1,563-581).
ccaacggcagcttgaaatt

SEQ ID NO: 652738 - DNA, 19 bp, Mus musculus
  siRNA target sequence for Stx3 (NM_011502.1,564-582).
caacggcagcttgaaatta

SEQ ID NO: 652739 - DNA, 19 bp, Mus musculus
  siRNA target sequence for Stx3 (NM_011502.1,644-662).
cttcacttctgggatcatt

SEQ ID NO: 652740 - DNA, 19 bp, Mus musculus
  siRNA target sequence for Stx3 (NM_011502.1,705-723).
cggcacaaggacatcgtaa

SEQ ID NO: 652741 - DNA, 19 bp, Mus musculus
  siRNA target sequence for Stx3 (NM_011502.1,770-788).
cgccatgctggtggaaaat

SEQ ID NO: 652742 - DNA, 19 bp, Mus musculus
  siRNA target sequence for Stx3 (NM_011502.1,866-884).
caaaaaggcggtcaagtat

SEQ ID NO: 652743 - DNA, 19 bp, Mus musculus
  siRNA target sequence for Stx3 (NM_011502.1,920-938).
gatctgctgtattatcctt

SEQ ID NO: 652744 - DNA, 19 bp, Mus musculus
  siRNA target sequence for Stx3 (NM_011502.1,955-973).
ctaccattgggggcatatt

SEQ ID NO: 652745 - DNA, 19 bp, Mus musculus
  siRNA target sequence for Stx5a (NM_019829.3,663-681).
cctgcagagccgtcagaat

SEQ ID NO: 652746 - DNA, 19 bp, Mus musculus
  siRNA target sequence for Stx5a (NM_019829.3,667-685).
cagagccgtcagaatggaa

SEQ ID NO: 652747 - DNA, 19 bp, Mus musculus
  siRNA target sequence for Stx5a (NM_019829.3,672-690).
ccgtcagaatggaatccaa

SEQ ID NO: 652748 - DNA, 19 bp, Mus musculus
  siRNA target sequence for Stx5a (NM_019829.3,749-767).
ggcgcattgggaaagatct

SEQ ID NO: 652749 - DNA, 19 bp, Mus musculus
  siRNA target sequence for Stx5a (NM_019829.3,757-775).
gggaaagatctcagcaata

SEQ ID NO: 652750 - DNA, 19 bp, Mus musculus
  siRNA target sequence for Stx5a (NM_019829.3,813-831).
gcgcaagtccctctttgat

SEQ ID NO: 652751 - DNA, 19 bp, Mus musculus
  siRNA target sequence for Stx5a (NM_019829.3,815-833).
gcaagtccctctttgatga

SEQ ID NO: 652752 - DNA, 19 bp, Mus musculus
  siRNA target sequence for Stx5a (NM_019829.3,853-871).
gagctaacatacatcatca

SEQ ID NO: 652753 - DNA, 19 bp, Mus musculus
  siRNA target sequence for Stx5a (NM_019829.3,855-873).
gctaacatacatcatcaaa

SEQ ID NO: 652754 - DNA, 19 bp, Mus musculus
  siRNA target sequence for Stx5a (NM_019829.3,867-885).
catcaaacaggatatcaat

SEQ ID NO: 652755 - DNA, 19 bp, Mus musculus
  siRNA target sequence for Stx5a (NM_019829.3,882-900).
caatagcctcaacaaacaa

SEQ ID NO: 652756 - DNA, 19 bp, Mus musculus
  siRNA target sequence for Stx5a (NM_019829.3,888-906).
cctcaacaaacaaattgct

SEQ ID NO: 652757 - DNA, 19 bp, Mus musculus
  siRNA target sequence for Stx5a (NM_019829.3,1003-1021).
gcttctatgtccaatgact

SEQ ID NO: 652758 - DNA, 19 bp, Mus musculus
  siRNA target sequence for Stx5a (NM_019829.3,1004-1022).
cttctatgtccaatgactt

SEQ ID NO: 652759 - DNA, 19 bp, Mus musculus
  siRNA target sequence for Stx5a (NM_019829.3,1132-1150).
ggaggtggtcccataattt

SEQ ID NO: 652760 - DNA, 19 bp, Mus musculus
  siRNA target sequence for Stx5a (NM_019829.3,1133-1151).
gaggtggtcccataatttt

SEQ ID NO: 652761 - DNA, 19 bp, Mus musculus
  siRNA target sequence for Stx5a (NM_019829.3,1175-1193).
gggacgtggctattgacat

SEQ ID NO: 652762 - DNA, 19 bp, Mus musculus
  siRNA target sequence for Stx5a (NM_019829.3,1273-1291).
cagaacattgagtctacaa

SEQ ID NO: 652763 - DNA, 19 bp, Mus musculus
  siRNA target sequence for Stx5a (NM_019829.3,1278-1296).
cattgagtctacaatcgtt

SEQ ID NO: 652764 - DNA, 19 bp, Mus musculus
  siRNA target sequence for Stx5a (NM_019829.3,1323-1341).
ggcacacatggttaaagaa

SEQ ID NO: 652765 - DNA, 19 bp, Mus musculus
  siRNA target sequence for Stx5a (NM_019829.3,1450-1468).
cggtggctcatggtcaaaa

SEQ ID NO: 652766 - DNA, 19 bp, Mus musculus
  siRNA target sequence for Stx5a (NM_019829.3,1454-1472).
ggctcatggtcaaaatctt

SEQ ID NO: 652767 - DNA, 19 bp, Mus musculus
  siRNA target sequence for Stx6 (NM_021433.2,209-227).
cactgcccaaggattgttt

SEQ ID NO: 652768 - DNA, 19 bp, Mus musculus
  siRNA target sequence for Stx6 (NM_021433.2,396-414).
gcaactgaattgagcataa

SEQ ID NO: 652769 - DNA, 19 bp, Mus musculus
  siRNA target sequence for Stx6 (NM_021433.2,430-448).
caagtactcggcaaattgt

SEQ ID NO: 652770 - DNA, 19 bp, Mus musculus
  siRNA target sequence for Stx6 (NM_021433.2,743-761).
ggccgtcatgctagatgat

SEQ ID NO: 652771 - DNA, 19 bp, Mus musculus
  siRNA target sequence for Stx6 (NM_021433.2,744-762).
gccgtcatgctagatgatt

SEQ ID NO: 652772 - DNA, 19 bp, Mus musculus
  siRNA target sequence for Stx6 (NM_021433.2,745-763).
ccgtcatgctagatgattt

SEQ ID NO: 652773 - DNA, 19 bp, Mus musculus
  siRNA target sequence for Stx6 (NM_021433.2,747-765).
gtcatgctagatgatttct

SEQ ID NO: 652774 - DNA, 19 bp, Mus musculus
  siRNA target sequence for Stx6 (NM_021433.2,793-811).
gactggacaacgtgatgaa

SEQ ID NO: 652775 - DNA, 19 bp, Mus musculus
  siRNA target sequence for Stx6 (NM_021433.2,800-818).
caacgtgatgaagaaactt

SEQ ID NO: 652776 - DNA, 19 bp, Mus musculus
  siRNA target sequence for Stx7 (NM_016797.2,161-179).
caacgcatctcctctaaca

SEQ ID NO: 652777 - DNA, 19 bp, Mus musculus
  siRNA target sequence for Stx7 (NM_016797.2,280-298).
gcagcagtatactaaccaa

SEQ ID NO: 652778 - DNA, 19 bp, Mus musculus
  siRNA target sequence for Stx7 (NM_016797.2,302-320).
gcgaaagaaaccgataagt

SEQ ID NO: 652779 - DNA, 19 bp, Mus musculus
  siRNA target sequence for Stx7 (NM_016797.2,303-321).
cgaaagaaaccgataagta

SEQ ID NO: 652780 - DNA, 19 bp, Mus musculus
  siRNA target sequence for Stx7 (NM_016797.2,312-330).
ccgataagtacattaaaga

SEQ ID NO: 652781 - DNA, 19 bp, Mus musculus
  siRNA target sequence for Stx7 (NM_016797.2,408-426).
ccacatcgctgacaaactt

SEQ ID NO: 652782 - DNA, 19 bp, Mus musculus
  siRNA target sequence for Stx7 (NM_016797.2,493-511).
cagggtatcgggtggtttt

SEQ ID NO: 652783 - DNA, 19 bp, Mus musculus
  siRNA target sequence for Stx7 (NM_016797.2,601-619).
ggatgacctccgactcatt

SEQ ID NO: 652784 - DNA, 19 bp, Mus musculus
  siRNA target sequence for Stx7 (NM_016797.2,620-638).
catgagagagagtcttcaa

SEQ ID NO: 652785 - DNA, 19 bp, Mus musculus
  siRNA target sequence for Stx7 (NM_016797.2,653-671).
gctgatattatggacatta

SEQ ID NO: 652786 - DNA, 19 bp, Mus musculus
  siRNA target sequence for Stx7 (NM_016797.2,688-706).
cttggggatgatgattcat

SEQ ID NO: 652787 - DNA, 19 bp, Mus musculus
  siRNA target sequence for Stx7 (NM_016797.2,789-807).
caagagcggcagactatca

SEQ ID NO: 652788 - DNA, 19 bp, Mus musculus
  siRNA target sequence for Stx7 (NM_016797.2,800-818).
gactatcagcgcaaatcca

SEQ ID NO: 652789 - DNA, 19 bp, Mus musculus
  siRNA target sequence for Stx7 (NM_016797.2,806-824).
cagcgcaaatccaggaaaa

SEQ ID NO: 652790 - DNA, 19 bp, Mus musculus
  siRNA target sequence for Stx7 (NM_016797.2,808-826).
gcgcaaatccaggaaaact

SEQ ID NO: 652791 - DNA, 19 bp, Mus musculus
  siRNA target sequence for Stx7 (NM_016797.2,810-828).
gcaaatccaggaaaactct

SEQ ID NO: 652792 - DNA, 19 bp, Mus musculus
  siRNA target sequence for Stx7 (NM_016797.2,819-837).
ggaaaactctctgcattat

SEQ ID NO: 652793 - DNA, 19 bp, Mus musculus
  siRNA target sequence for Stx7 (NM_016797.2,825-843).
ctctctgcattatcatttt

SEQ ID NO: 652794 - DNA, 19 bp, Mus musculus
  siRNA target sequence for Stx7 (NM_016797.2,854-872).
gtcggaatcgtgatcatct

SEQ ID NO: 652795 - DNA, 19 bp, Mus musculus
  siRNA target sequence for Stx7 (NM_016797.2,877-895).
catcgtatggggactgaaa

SEQ ID NO: 652796 - DNA, 19 bp, Mus musculus
  siRNA target sequence for Stxbp2 (NM_011503.2,39-57).
ggcggtggtaggggaaaaa

SEQ ID NO: 652797 - DNA, 19 bp, Mus musculus
  siRNA target sequence for Stxbp2 (NM_011503.2,41-59).
cggtggtaggggaaaaaat

SEQ ID NO: 652798 - DNA, 19 bp, Mus musculus
  siRNA target sequence for Stxbp2 (NM_011503.2,42-60).
ggtggtaggggaaaaaatt

SEQ ID NO: 652799 - DNA, 19 bp, Mus musculus
  siRNA target sequence for Stxbp2 (NM_011503.2,43-61).
gtggtaggggaaaaaattt

SEQ ID NO: 652800 - DNA, 19 bp, Mus musculus
  siRNA target sequence for Stxbp2 (NM_011503.2,45-63).
ggtaggggaaaaaatttta

SEQ ID NO: 652801 - DNA, 19 bp, Mus musculus
  siRNA target sequence for Stxbp2 (NM_011503.2,70-88).
gtcatccggagcgttaaga

SEQ ID NO: 652802 - DNA, 19 bp, Mus musculus
  siRNA target sequence for Stxbp2 (NM_011503.2,138-156).
cttgtcatcctgttgtaaa

SEQ ID NO: 652803 - DNA, 19 bp, Mus musculus
  siRNA target sequence for Stxbp2 (NM_011503.2,389-407).
cgaaggcggtgaagacatt

SEQ ID NO: 652804 - DNA, 19 bp, Mus musculus
  siRNA target sequence for Stxbp2 (NM_011503.2,469-487).
catagcacctacaaccttt

SEQ ID NO: 652805 - DNA, 19 bp, Mus musculus
  siRNA target sequence for Stxbp2 (NM_011503.2,474-492).
cacctacaacctttactgt

SEQ ID NO: 652806 - DNA, 19 bp, Mus musculus
  siRNA target sequence for Stxbp2 (NM_011503.2,676-694).
ggcgagggcccagagaaaa

SEQ ID NO: 652807 - DNA, 19 bp, Mus musculus
  siRNA target sequence for Stxbp2 (NM_011503.2,695-713).
cacgctcacagctactcat

SEQ ID NO: 652808 - DNA, 19 bp, Mus musculus
  siRNA target sequence for Stxbp2 (NM_011503.2,701-719).
cacagctactcataatgga

SEQ ID NO: 652809 - DNA, 19 bp, Mus musculus
  siRNA target sequence for Stxbp2 (NM_011503.2,732-750).
ccccgtgtccccactatta

SEQ ID NO: 652810 - DNA, 19 bp, Mus musculus
  siRNA target sequence for Stxbp2 (NM_011503.2,734-752).
ccgtgtccccactattaca

SEQ ID NO: 652811 - DNA, 19 bp, Mus musculus
  siRNA target sequence for Stxbp2 (NM_011503.2,994-1012).
ctgtcccacatcctgaaaa

SEQ ID NO: 652812 - DNA, 19 bp, Mus musculus
  siRNA target sequence for Stxbp2 (NM_011503.2,1439-1457).
gctggtccccagtcatcaa

SEQ ID NO: 652813 - DNA, 19 bp, Mus musculus
  siRNA target sequence for Stxbp2 (NM_011503.2,1613-1631).
ctaggctcatcgtgtacat

SEQ ID NO: 652814 - DNA, 19 bp, Mus musculus
  siRNA target sequence for Stxbp2 (NM_011503.2,1616-1634).
ggctcatcgtgtacattgt

SEQ ID NO: 652815 - DNA, 19 bp, Mus musculus
  siRNA target sequence for Stxbp2 (NM_011503.2,1642-1660).
gtcgccatgtcggaaatga

SEQ ID NO: 652816 - DNA, 19 bp, Mus musculus
  siRNA target sequence for Stxbp2 (NM_011503.2,1714-1732).
ggctcttctcacatcctta

SEQ ID NO: 652817 - DNA, 19 bp, Mus musculus
  siRNA target sequence for Tnpo2 (NM_145390.1,951-969).
ctcatctggtccagttgat

SEQ ID NO: 652818 - DNA, 19 bp, Mus musculus
  siRNA target sequence for Tnpo2 (NM_145390.1,987-1005).
ggatgaagtactctgaaat

SEQ ID NO: 652819 - DNA, 19 bp, Mus musculus
  siRNA target sequence for Tnpo2 (NM_145390.1,988-1006).
gatgaagtactctgaaatt

SEQ ID NO: 652820 - DNA, 19 bp, Mus musculus
  siRNA target sequence for Tnpo2 (NM_145390.1,1290-1308).
ctgagtgggtggtcaaaga

SEQ ID NO: 652821 - DNA, 19 bp, Mus musculus
  siRNA target sequence for Tnpo2 (NM_145390.1,1354-1372).
gggaatggtgccctatcta

SEQ ID NO: 652822 - DNA, 19 bp, Mus musculus
  siRNA target sequence for Tnpo2 (NM_145390.1,2454-2472).
ggtgcacgtcccttaggaa

SEQ ID NO: 652823 - DNA, 19 bp, Mus musculus
  siRNA target sequence for Tnpo2 (NM_145390.1,2507-2525).
cgaggcatctgcatgatga

SEQ ID NO: 652824 - DNA, 19 bp, Mus musculus
  siRNA target sequence for Tnpo2 (NM_145390.1,2543-2561).
ggtgttgtgcaggacttta

SEQ ID NO: 652825 - DNA, 19 bp, Mus musculus
  siRNA target sequence for Vdp (NM_019490.1,247-265).
cgtagcttcctctacgtta

SEQ ID NO: 652826 - DNA, 19 bp, Mus musculus
  siRNA target sequence for Vdp (NM_019490.1,284-302).
gctgtacgtgcccttaaat

SEQ ID NO: 652827 - DNA, 19 bp, Mus musculus
  siRNA target sequence for Vdp (NM_019490.1,338-356).
caagctatggaacatctta

SEQ ID NO: 652828 - DNA, 19 bp, Mus musculus
  siRNA target sequence for Vdp (NM_019490.1,374-392).
gatcgttcggattctgaaa

SEQ ID NO: 652829 - DNA, 19 bp, Mus musculus
  siRNA target sequence for Vdp (NM_019490.1,377-395).
cgttcggattctgaaataa

SEQ ID NO: 652830 - DNA, 19 bp, Mus musculus
  siRNA target sequence for Vdp (NM_019490.1,378-396).
gttcggattctgaaataat

SEQ ID NO: 652831 - DNA, 19 bp, Mus musculus
  siRNA target sequence for Vdp (NM_019490.1,405-423).
ctttggacacactttataa

SEQ ID NO: 652832 - DNA, 19 bp, Mus musculus
  siRNA target sequence for Vdp (NM_019490.1,530-548).
gtcactctcctgttatctt

SEQ ID NO: 652833 - DNA, 19 bp, Mus musculus
  siRNA target sequence for Vdp (NM_019490.1,546-564).
ctttgttggaggagtttga

SEQ ID NO: 652834 - DNA, 19 bp, Mus musculus
  siRNA target sequence for Vdp (NM_019490.1,624-642).
ctcccgtgcagcagatcat

SEQ ID NO: 652835 - DNA, 19 bp, Mus musculus
  siRNA target sequence for Vdp (NM_019490.1,652-670).
ccccatgggtgtttcaaga

SEQ ID NO: 652836 - DNA, 19 bp, Mus musculus
  siRNA target sequence for Vdp (NM_019490.1,654-672).
ccatgggtgtttcaagatt

SEQ ID NO: 652837 - DNA, 19 bp, Mus musculus
  siRNA target sequence for Vdp (NM_019490.1,660-678).
gtgtttcaagattaatgga

SEQ ID NO: 652838 - DNA, 19 bp, Mus musculus
  siRNA target sequence for Vdp (NM_019490.1,708-726).
gcaacgatggcgtcttact

SEQ ID NO: 652839 - DNA, 19 bp, Mus musculus
  siRNA target sequence for Vdp (NM_019490.1,725-743).
ctactgcaggcattaacaa

SEQ ID NO: 652840 - DNA, 19 bp, Mus musculus
  siRNA target sequence for Vdp (NM_019490.1,760-778).
ccagaaaattgttgctttt

SEQ ID NO: 652841 - DNA, 19 bp, Mus musculus
  siRNA target sequence for Vdp (NM_019490.1,791-809).
gagcgactgctggacatta

SEQ ID NO: 652842 - DNA, 19 bp, Mus musculus
  siRNA target sequence for Vdp (NM_019490.1,793-811).
gcgactgctggacattatt

SEQ ID NO: 652843 - DNA, 19 bp, Mus musculus
  siRNA target sequence for Vdp (NM_019490.1,794-812).
cgactgctggacattatta

SEQ ID NO: 652844 - DNA, 19 bp, Mus musculus
  siRNA target sequence for Vdp (NM_019490.1,826-844).
cagtgacggaggtatagta

SEQ ID NO: 652845 - DNA, 19 bp, Mus musculus
  siRNA target sequence for Vdp (NM_019490.1,828-846).
gtgacggaggtatagtagt

SEQ ID NO: 652846 - DNA, 19 bp, Mus musculus
  siRNA target sequence for Vdp (NM_019490.1,836-854).
ggtatagtagtggaagatt

SEQ ID NO: 652847 - DNA, 19 bp, Mus musculus
  siRNA target sequence for Vdp (NM_019490.1,885-903).
ccaacaattccaatcaaaa

SEQ ID NO: 652848 - DNA, 19 bp, Mus musculus
  siRNA target sequence for Vdp (NM_019490.1,937-955).
gaaaccttggtttgaagtt

SEQ ID NO: 652849 - DNA, 19 bp, Mus musculus
  siRNA target sequence for Vdp (NM_019490.1,993-1011).
ccaatctacatttaatgct

SEQ ID NO: 652850 - DNA, 19 bp, Mus musculus
  siRNA target sequence for Vdp (NM_019490.1,1128-1146).
ctgggattcctgctgatat

SEQ ID NO: 652851 - DNA, 19 bp, Mus musculus
  siRNA target sequence for Vdp (NM_019490.1,1147-1165).
cctgacagagaccataaat

SEQ ID NO: 652852 - DNA, 19 bp, Mus musculus
  siRNA target sequence for Vdp (NM_019490.1,1148-1166).
ctgacagagaccataaata

SEQ ID NO: 652853 - DNA, 19 bp, Mus musculus
  siRNA target sequence for Vdp (NM_019490.1,1152-1170).
cagagaccataaatactgt

SEQ ID NO: 652854 - DNA, 19 bp, Mus musculus
  siRNA target sequence for Vdp (NM_019490.1,1185-1203).
gaggctgccaagtaaacca

SEQ ID NO: 652855 - DNA, 19 bp, Mus musculus
  siRNA target sequence for Vdp (NM_019490.1,1239-1257).
ccccacgaccggcaattgt

SEQ ID NO: 652856 - DNA, 19 bp, Mus musculus
  siRNA target sequence for Vdp (NM_019490.1,1240-1258).
cccacgaccggcaattgtt

SEQ ID NO: 652857 - DNA, 19 bp, Mus musculus
  siRNA target sequence for Vdp (NM_019490.1,1242-1260).
cacgaccggcaattgttgt

SEQ ID NO: 652858 - DNA, 19 bp, Mus musculus
  siRNA target sequence for Vdp (NM_019490.1,1308-1326).
gtgccgtgctctactgttt

SEQ ID NO: 652859 - DNA, 19 bp, Mus musculus
  siRNA target sequence for Vdp (NM_019490.1,1327-1345).
ccagtgcttcctgtataaa

SEQ ID NO: 652860 - DNA, 19 bp, Mus musculus
  siRNA target sequence for Vdp (NM_019490.1,1332-1350).
gcttcctgtataaaaacga

SEQ ID NO: 652861 - DNA, 19 bp, Mus musculus
  siRNA target sequence for Vdp (NM_019490.1,1627-1645).
gacaagagtcgggttgtta

SEQ ID NO: 652862 - DNA, 19 bp, Mus musculus
  siRNA target sequence for Vdp (NM_019490.1,1629-1647).
caagagtcgggttgttaat

SEQ ID NO: 652863 - DNA, 19 bp, Mus musculus
  siRNA target sequence for Vdp (NM_019490.1,1632-1650).
gagtcgggttgttaatgtt

SEQ ID NO: 652864 - DNA, 19 bp, Mus musculus
  siRNA target sequence for Vdp (NM_019490.1,1674-1692).
gtcctattgctgtaacaca

SEQ ID NO: 652865 - DNA, 19 bp, Mus musculus
  siRNA target sequence for Vdp (NM_019490.1,1709-1727).
gccaatgttccattcctta

SEQ ID NO: 652866 - DNA, 19 bp, Mus musculus
  siRNA target sequence for Vdp (NM_019490.1,1765-1783).
gttggtccaaggcttatgt

SEQ ID NO: 652867 - DNA, 19 bp, Mus musculus
  siRNA target sequence for Vdp (NM_019490.1,1787-1805).
cttcttttgggcatttcaa

SEQ ID NO: 652868 - DNA, 19 bp, Mus musculus
  siRNA target sequence for Vdp (NM_019490.1,1803-1821).
caatttatttcaacgataa

SEQ ID NO: 652869 - DNA, 19 bp, Mus musculus
  siRNA target sequence for Vdp (NM_019490.1,1895-1913).
gagaaactaggatttatta

SEQ ID NO: 652870 - DNA, 19 bp, Mus musculus
  siRNA target sequence for Vdp (NM_019490.1,1905-1923).
gatttattagcaaacatga

SEQ ID NO: 652871 - DNA, 19 bp, Mus musculus
  siRNA target sequence for Vdp (NM_019490.1,1960-1978).
ctttccgagtccagagtat

SEQ ID NO: 652872 - DNA, 19 bp, Mus musculus
  siRNA target sequence for Vdp (NM_019490.1,1964-1982).
ccgagtccagagtatatga

SEQ ID NO: 652873 - DNA, 19 bp, Mus musculus
  siRNA target sequence for Vdp (NM_019490.1,1965-1983).
cgagtccagagtatatgat

SEQ ID NO: 652874 - DNA, 19 bp, Mus musculus
  siRNA target sequence for Vdp (NM_019490.1,2001-2019).
caaagctggtgaaagaact

SEQ ID NO: 652875 - DNA, 19 bp, Mus musculus
  siRNA target sequence for Vdp (NM_019490.1,2015-2033).
gaactcgaaggtgttatta

SEQ ID NO: 652876 - DNA, 19 bp, Mus musculus
  siRNA target sequence for Vdp (NM_019490.1,2018-2036).
ctcgaaggtgttattacca

SEQ ID NO: 652877 - DNA, 19 bp, Mus musculus
  siRNA target sequence for Vdp (NM_019490.1,2113-2131).
cgtgactcactataagaat

SEQ ID NO: 652878 - DNA, 19 bp, Mus musculus
  siRNA target sequence for Vdp (NM_019490.1,2114-2132).
gtgactcactataagaata

SEQ ID NO: 652879 - DNA, 19 bp, Mus musculus
  siRNA target sequence for Vdp (NM_019490.1,2118-2136).
ctcactataagaatatgat

SEQ ID NO: 652880 - DNA, 19 bp, Mus musculus
  siRNA target sequence for Vdp (NM_019490.1,2248-2266).
gcacaaggaccagtacaat

SEQ ID NO: 652881 - DNA, 19 bp, Mus musculus
  siRNA target sequence for Vdp (NM_019490.1,2260-2278).
gtacaatctcctcaaagtt

SEQ ID NO: 652882 - DNA, 19 bp, Mus musculus
  siRNA target sequence for Vdp (NM_019490.1,2358-2376).
gtcggctgagggaagagat

SEQ ID NO: 652883 - DNA, 19 bp, Mus musculus
  siRNA target sequence for Vdp (NM_019490.1,2374-2392).
gatagaagagttaaaaagt

SEQ ID NO: 652884 - DNA, 19 bp, Mus musculus
  siRNA target sequence for Vdp (NM_019490.1,2429-2447).
gactcattgattgaaaatt

SEQ ID NO: 652885 - DNA, 19 bp, Mus musculus
  siRNA target sequence for Vdp (NM_019490.1,2512-2530).
cgagcaagttgcagagtta

SEQ ID NO: 652886 - DNA, 19 bp, Mus musculus
  siRNA target sequence for Vdp (NM_019490.1,2513-2531).
gagcaagttgcagagttaa

SEQ ID NO: 652887 - DNA, 19 bp, Mus musculus
  siRNA target sequence for Vdp (NM_019490.1,2546-2564).
gcattaaagtcccagttat

SEQ ID NO: 652888 - DNA, 19 bp, Mus musculus
  siRNA target sequence for Vdp (NM_019490.1,2682-2700).
ctaagaccacggatgtaga

SEQ ID NO: 652889 - DNA, 19 bp, Mus musculus
  siRNA target sequence for Vdp (NM_019490.1,2767-2785).
ggagaggaccgccattcaa

SEQ ID NO: 652890 - DNA, 19 bp, Mus musculus
  siRNA target sequence for Vdp (NM_019490.1,2768-2786).
gagaggaccgccattcaaa

SEQ ID NO: 652891 - DNA, 19 bp, Mus musculus
  siRNA target sequence for Vdp (NM_019490.1,2772-2790).
ggaccgccattcaaaagca

SEQ ID NO: 652892 - DNA, 19 bp, Mus musculus
  siRNA target sequence for Vdp (NM_019490.1,2822-2840).
ctgcaaaccgagaaagaca

SEQ ID NO: 652893 - DNA, 19 bp, Mus musculus
  siRNA target sequence for Vdp (NM_019490.1,2859-2877).
cggattctaagaaagaaca

SEQ ID NO: 652894 - DNA, 19 bp, Mus musculus
  siRNA target sequence for Vdp (NM_019490.1,2860-2878).
ggattctaagaaagaacaa

SEQ ID NO: 652895 - DNA, 19 bp, Mus musculus
  siRNA target sequence for Vdp (NM_019490.1,2865-2883).
ctaagaaagaacaagatga

SEQ ID NO: 652896 - DNA, 19 bp, Mus musculus
  siRNA target sequence for Vdp (NM_019490.1,2890-2908).
ggtgctgttagcagatcaa

SEQ ID NO: 652897 - DNA, 19 bp, Mus musculus
  siRNA target sequence for Vdp (NM_019490.1,2901-2919).
cagatcaagatcagaaaat

SEQ ID NO: 652898 - DNA, 19 bp, Mus musculus
  siRNA target sequence for Vps16 (NM_030559.1,220-238).
cttcgagtgctcaatgcta

SEQ ID NO: 652899 - DNA, 19 bp, Mus musculus
  siRNA target sequence for Vps16 (NM_030559.1,265-283).
ctcacctacacccaataca

SEQ ID NO: 652900 - DNA, 19 bp, Mus musculus
  siRNA target sequence for Vps16 (NM_030559.1,337-355).
cccctggctatccagatat

SEQ ID NO: 652901 - DNA, 19 bp, Mus musculus
  siRNA target sequence for Vps16 (NM_030559.1,451-469).
gatgtagcacgggctatta

SEQ ID NO: 652902 - DNA, 19 bp, Mus musculus
  siRNA target sequence for Vps16 (NM_030559.1,457-475).
gcacgggctattaatcaga

SEQ ID NO: 652903 - DNA, 19 bp, Mus musculus
  siRNA target sequence for Vps16 (NM_030559.1,458-476).
cacgggctattaatcagaa

SEQ ID NO: 652904 - DNA, 19 bp, Mus musculus
  siRNA target sequence for Vps16 (NM_030559.1,484-502).
gacacgcctggtgtttcat

SEQ ID NO: 652905 - DNA, 19 bp, Mus musculus
  siRNA target sequence for Vps16 (NM_030559.1,539-557).
gcactgaactggccattaa

SEQ ID NO: 652906 - DNA, 19 bp, Mus musculus
  siRNA target sequence for Vps16 (NM_030559.1,592-610).
gtacctcttctcctaaaga

SEQ ID NO: 652907 - DNA, 19 bp, Mus musculus
  siRNA target sequence for Vps16 (NM_030559.1,629-647).
cactgagcaaggctattga

SEQ ID NO: 652908 - DNA, 19 bp, Mus musculus
  siRNA target sequence for Vps16 (NM_030559.1,674-692).
cagtgttgctgcacctaaa

SEQ ID NO: 652909 - DNA, 19 bp, Mus musculus
  siRNA target sequence for Vps16 (NM_030559.1,706-724).
cgaggagactttttcatga

SEQ ID NO: 652910 - DNA, 19 bp, Mus musculus
  siRNA target sequence for Vps16 (NM_030559.1,863-881).
ccgctgaagagcgtattga

SEQ ID NO: 652911 - DNA, 19 bp, Mus musculus
  siRNA target sequence for Vps16 (NM_030559.1,918-936).
cttctacaaagccaagaat

SEQ ID NO: 652912 - DNA, 19 bp, Mus musculus
  siRNA target sequence for Vps16 (NM_030559.1,952-970).
gccacagaggatcaaatga

SEQ ID NO: 652913 - DNA, 19 bp, Mus musculus
  siRNA target sequence for Vps16 (NM_030559.1,1016-1034).
ggttcctagacctatctct

SEQ ID NO: 652914 - DNA, 19 bp, Mus musculus
  siRNA target sequence for Vps16 (NM_030559.1,1043-1061).
ctgtcaccactcttatcct

SEQ ID NO: 652915 - DNA, 19 bp, Mus musculus
  siRNA target sequence for Vps16 (NM_030559.1,1086-1104).
gcagctggcacgtgacttt

SEQ ID NO: 652916 - DNA, 19 bp, Mus musculus
  siRNA target sequence for Vps16 (NM_030559.1,1235-1253).
gcatgaaacagcataacaa

SEQ ID NO: 652917 - DNA, 19 bp, Mus musculus
  siRNA target sequence for Vps16 (NM_030559.1,1279-1297).
cgtgtgggccctgaacaaa

SEQ ID NO: 652918 - DNA, 19 bp, Mus musculus
  siRNA target sequence for Vps16 (NM_030559.1,1280-1298).
gtgtgggccctgaacaaaa

SEQ ID NO: 652919 - DNA, 19 bp, Mus musculus
  siRNA target sequence for Vps16 (NM_030559.1,1372-1390).
gagctgagcctcgttttgt

SEQ ID NO: 652920 - DNA, 19 bp, Mus musculus
  siRNA target sequence for Vps33a (NM_029929.2,117-135).
ctgggagcaaggcaatagt

SEQ ID NO: 652921 - DNA, 19 bp, Mus musculus
  siRNA target sequence for Vps33a (NM_029929.2,134-152).
gtgtgggatgagtacttaa

SEQ ID NO: 652922 - DNA, 19 bp, Mus musculus
  siRNA target sequence for Vps33a (NM_029929.2,136-154).
gtgggatgagtacttaaca

SEQ ID NO: 652923 - DNA, 19 bp, Mus musculus
  siRNA target sequence for Vps33a (NM_029929.2,172-190).
cgcacagtactcactacta

SEQ ID NO: 652924 - DNA, 19 bp, Mus musculus
  siRNA target sequence for Vps33a (NM_029929.2,173-191).
gcacagtactcactactaa

SEQ ID NO: 652925 - DNA, 19 bp, Mus musculus
  siRNA target sequence for Vps33a (NM_029929.2,174-192).
cacagtactcactactaaa

SEQ ID NO: 652926 - DNA, 19 bp, Mus musculus
  siRNA target sequence for Vps33a (NM_029929.2,183-201).
cactactaaaggaacatga

SEQ ID NO: 652927 - DNA, 19 bp, Mus musculus
  siRNA target sequence for Vps33a (NM_029929.2,240-258).
ccgcagctgatgtcaagaa

SEQ ID NO: 652928 - DNA, 19 bp, Mus musculus
  siRNA target sequence for Vps33a (NM_029929.2,245-263).
gctgatgtcaagaacatca

SEQ ID NO: 652929 - DNA, 19 bp, Mus musculus
  siRNA target sequence for Vps33a (NM_029929.2,248-266).
gatgtcaagaacatcattt

SEQ ID NO: 652930 - DNA, 19 bp, Mus musculus
  siRNA target sequence for Vps33a (NM_029929.2,295-313).
ggacataattgctgagaat

SEQ ID NO: 652931 - DNA, 19 bp, Mus musculus
  siRNA target sequence for Vps33a (NM_029929.2,336-354).
gccctaccagggatttcca

SEQ ID NO: 652932 - DNA, 19 bp, Mus musculus
  siRNA target sequence for Vps33a (NM_029929.2,338-356).
cctaccagggatttccata

SEQ ID NO: 652933 - DNA, 19 bp, Mus musculus
  siRNA target sequence for Vps33a (NM_029929.2,339-357).
ctaccagggatttccatat

SEQ ID NO: 652934 - DNA, 19 bp, Mus musculus
  siRNA target sequence for Vps33a (NM_029929.2,342-360).
ccagggatttccatatttt

SEQ ID NO: 652935 - DNA, 19 bp, Mus musculus
  siRNA target sequence for Vps33a (NM_029929.2,448-466).
cttggatctcattccattt

SEQ ID NO: 652936 - DNA, 19 bp, Mus musculus
  siRNA target sequence for Vps33a (NM_029929.2,490-508).
gtcagagggcgctttcaaa

SEQ ID NO: 652937 - DNA, 19 bp, Mus musculus
  siRNA target sequence for Vps33a (NM_029929.2,585-603).
gaactatcccccagatctt

SEQ ID NO: 652938 - DNA, 19 bp, Mus musculus
  siRNA target sequence for Vps33a (NM_029929.2,748-766).
ctcccagctcacgtatgaa

SEQ ID NO: 652939 - DNA, 19 bp, Mus musculus
  siRNA target sequence for Vps33a (NM_029929.2,779-797).
gagatttacggcattcaga

SEQ ID NO: 652940 - DNA, 19 bp, Mus musculus
  siRNA target sequence for Vps33a (NM_029929.2,1003-1021).
gcgacacaacgctaagaca

SEQ ID NO: 652941 - DNA, 19 bp, Mus musculus
  siRNA target sequence for Vps33a (NM_029929.2,1084-1102).
cgccaaccacacctcaatt

SEQ ID NO: 652942 - DNA, 19 bp, Mus musculus
  siRNA target sequence for Vps33a (NM_029929.2,1095-1113).
cctcaattgcagagttaat

SEQ ID NO: 652943 - DNA, 19 bp, Mus musculus
  siRNA target sequence for Vps33a (NM_029929.2,1098-1116).
caattgcagagttaatcaa

SEQ ID NO: 652944 - DNA, 19 bp, Mus musculus
  siRNA target sequence for Vps33a (NM_029929.2,1179-1197).
ggatagacactgataaggt

SEQ ID NO: 652945 - DNA, 19 bp, Mus musculus
  siRNA target sequence for Vps33a (NM_029929.2,1188-1206).
ctgataaggtcaacagtta

SEQ ID NO: 652946 - DNA, 19 bp, Mus musculus
  siRNA target sequence for Vps33a (NM_029929.2,1190-1208).
gataaggtcaacagttaca

SEQ ID NO: 652947 - DNA, 19 bp, Mus musculus
  siRNA target sequence for Vps33a (NM_029929.2,1216-1234).
ctgcattgcccaaaagcat

SEQ ID NO: 652948 - DNA, 19 bp, Mus musculus
  siRNA target sequence for Vps33a (NM_029929.2,1410-1428).
gaaacaattacccaacaat

SEQ ID NO: 652949 - DNA, 19 bp, Mus musculus
  siRNA target sequence for Vps33a (NM_029929.2,1422-1440).
caacaatccggaaaacact

SEQ ID NO: 652950 - DNA, 19 bp, Mus musculus
  siRNA target sequence for Vps33a (NM_029929.2,1447-1465).
ctggatggacgatgtcaat

SEQ ID NO: 652951 - DNA, 19 bp, Mus musculus
  siRNA target sequence for Vps33a (NM_029929.2,1449-1467).
ggatggacgatgtcaatga

SEQ ID NO: 652952 - DNA, 19 bp, Mus musculus
  siRNA target sequence for Vps33a (NM_029929.2,1474-1492).
ccccacagacatatcctat

SEQ ID NO: 652953 - DNA, 19 bp, Mus musculus
  siRNA target sequence for Vps33a (NM_029929.2,1739-1757).
ggaggcaccgagtatgtca

SEQ ID NO: 652954 - DNA, 19 bp, Mus musculus
  siRNA target sequence for Vps33a (NM_029929.2,1740-1758).
gaggcaccgagtatgtcat

SEQ ID NO: 652955 - DNA, 19 bp, Mus musculus
  siRNA target sequence for Vps33a (NM_029929.2,1761-1779).
cgaccactaaactgatgaa

SEQ ID NO: 652956 - DNA, 19 bp, Mus musculus
  siRNA target sequence for Vps33a (NM_029929.2,1762-1780).
gaccactaaactgatgaat

SEQ ID NO: 652957 - DNA, 19 bp, Mus musculus
  siRNA target sequence for Vps33b (NM_178070.2,362-380).
gagcttcccgacttctcta

SEQ ID NO: 652958 - DNA, 19 bp, Mus musculus
  siRNA target sequence for Vps33b (NM_178070.2,498-516).
ctatcctgaagcaacatga

SEQ ID NO: 652959 - DNA, 19 bp, Mus musculus
  siRNA target sequence for Vps33b (NM_178070.2,552-570).
ccctcagcgccaatgaaca

SEQ ID NO: 652960 - DNA, 19 bp, Mus musculus
  siRNA target sequence for Vps33b (NM_178070.2,584-602).
gtcagacctcgaatcaaga

SEQ ID NO: 652961 - DNA, 19 bp, Mus musculus
  siRNA target sequence for Vps33b (NM_178070.2,586-604).
cagacctcgaatcaagaat

SEQ ID NO: 652962 - DNA, 19 bp, Mus musculus
  siRNA target sequence for Vps33b (NM_178070.2,588-606).
gacctcgaatcaagaatat

SEQ ID NO: 652963 - DNA, 19 bp, Mus musculus
  siRNA target sequence for Vps33b (NM_178070.2,598-616).
caagaatatgcgctacatt

SEQ ID NO: 652964 - DNA, 19 bp, Mus musculus
  siRNA target sequence for Vps33b (NM_178070.2,792-810).
gcatggaactgccagaatt

SEQ ID NO: 652965 - DNA, 19 bp, Mus musculus
  siRNA target sequence for Vps33b (NM_178070.2,793-811).
catggaactgccagaattt

SEQ ID NO: 652966 - DNA, 19 bp, Mus musculus
  siRNA target sequence for Vps33b (NM_178070.2,836-854).
gatcagcgttggatcaaca

SEQ ID NO: 652967 - DNA, 19 bp, Mus musculus
  siRNA target sequence for Vps33b (NM_178070.2,927-945).
gtgcaaagatgtcatatga

SEQ ID NO: 652968 - DNA, 19 bp, Mus musculus
  siRNA target sequence for Vps33b (NM_178070.2,999-1017).
cagagattggacacatctt

SEQ ID NO: 652969 - DNA, 19 bp, Mus musculus
  siRNA target sequence for Vps33b (NM_178070.2,1056-1074).
gctcccaagtggtttacga

SEQ ID NO: 652970 - DNA, 19 bp, Mus musculus
  siRNA target sequence for Vps33b (NM_178070.2,1088-1106).
gacaccttccgaatcaagt

SEQ ID NO: 652971 - DNA, 19 bp, Mus musculus
  siRNA target sequence for Vps33b (NM_178070.2,1152-1170).
gcctgaaggtgctactcaa

SEQ ID NO: 652972 - DNA, 19 bp, Mus musculus
  siRNA target sequence for Vps33b (NM_178070.2,1205-1223).
gagcacttctccaatgtct

SEQ ID NO: 652973 - DNA, 19 bp, Mus musculus
  siRNA target sequence for Vps33b (NM_178070.2,1249-1267).
gaacttgcaggcccaatat

SEQ ID NO: 652974 - DNA, 19 bp, Mus musculus
  siRNA target sequence for Vps33b (NM_178070.2,1274-1292).
cggagaggcatggacataa

SEQ ID NO: 652975 - DNA, 19 bp, Mus musculus
  siRNA target sequence for Vps33b (NM_178070.2,1275-1293).
ggagaggcatggacataaa

SEQ ID NO: 652976 - DNA, 19 bp, Mus musculus
  siRNA target sequence for Vps33b (NM_178070.2,1367-1385).
ggggcttgtgaatcaatca

SEQ ID NO: 652977 - DNA, 19 bp, Mus musculus
  siRNA target sequence for Vps33b (NM_178070.2,1368-1386).
gggcttgtgaatcaatcat

SEQ ID NO: 652978 - DNA, 19 bp, Mus musculus
  siRNA target sequence for Vps33b (NM_178070.2,1370-1388).
gcttgtgaatcaatcatga

SEQ ID NO: 652979 - DNA, 19 bp, Mus musculus
  siRNA target sequence for Vps33b (NM_178070.2,1371-1389).
cttgtgaatcaatcatgaa

SEQ ID NO: 652980 - DNA, 19 bp, Mus musculus
  siRNA target sequence for Vps33b (NM_178070.2,1465-1483).
gagcactagctacattgaa

SEQ ID NO: 652981 - DNA, 19 bp, Mus musculus
  siRNA target sequence for Vps33b (NM_178070.2,1467-1485).
gcactagctacattgaaga

SEQ ID NO: 652982 - DNA, 19 bp, Mus musculus
  siRNA target sequence for Vps33b (NM_178070.2,1546-1564).
cactgagaatggtttgata

SEQ ID NO: 652983 - DNA, 19 bp, Mus musculus
  siRNA target sequence for Vps33b (NM_178070.2,1556-1574).
ggtttgatacccaaggatt

SEQ ID NO: 652984 - DNA, 19 bp, Mus musculus
  siRNA target sequence for Vps33b (NM_178070.2,1557-1575).
gtttgatacccaaggatta

SEQ ID NO: 652985 - DNA, 19 bp, Mus musculus
  siRNA target sequence for Vps33b (NM_178070.2,1571-1589).
gattatcggtccctgaaaa

SEQ ID NO: 652986 - DNA, 19 bp, Mus musculus
  siRNA target sequence for Vps33b (NM_178070.2,1687-1705).
cacagcagtagagagtaaa

SEQ ID NO: 652987 - DNA, 19 bp, Mus musculus
  siRNA target sequence for Vps33b (NM_178070.2,1689-1707).
cagcagtagagagtaaagt

SEQ ID NO: 652988 - DNA, 19 bp, Mus musculus
  siRNA target sequence for Vps33b (NM_178070.2,1691-1709).
gcagtagagagtaaagtga

SEQ ID NO: 652989 - DNA, 19 bp, Mus musculus
  siRNA target sequence for Vps33b (NM_178070.2,1729-1747).
ggctgcagggaaaatcact

SEQ ID NO: 652990 - DNA, 19 bp, Mus musculus
  siRNA target sequence for Vps33b (NM_178070.2,1768-1786).
caagaggagcaattttcgt

SEQ ID NO: 652991 - DNA, 19 bp, Mus musculus
  siRNA target sequence for Vps33b (NM_178070.2,1785-1803).
gtgccatcagcaaaaagct

SEQ ID NO: 652992 - DNA, 19 bp, Mus musculus
  siRNA target sequence for Vps33b (NM_178070.2,1794-1812).
gcaaaaagctgaatttgat

SEQ ID NO: 652993 - DNA, 19 bp, Mus musculus
  siRNA target sequence for Vps33b (NM_178070.2,1848-1866).
cccgagacatggcttatgt

SEQ ID NO: 652994 - DNA, 19 bp, Mus musculus
  siRNA target sequence for Vps33b (NM_178070.2,1850-1868).
cgagacatggcttatgtct

SEQ ID NO: 652995 - DNA, 19 bp, Mus musculus
  siRNA target sequence for Vps33b (NM_178070.2,1887-1905).
ctctgagctgccgaatcat

SEQ ID NO: 652996 - DNA, 19 bp, Mus musculus
  siRNA target sequence for Vps33b (NM_178070.2,1929-1947).
gttggcagggccttgatga

SEQ ID NO: 652997 - DNA, 19 bp, Mus musculus
  siRNA target sequence for Vps33b (NM_178070.2,1949-1967).
gtggtacggctgctaaact

SEQ ID NO: 652998 - DNA, 19 bp, Mus musculus
  siRNA target sequence for Vps33b (NM_178070.2,1960-1978).
gctaaactgcagtgagttt

SEQ ID NO: 652999 - DNA, 19 bp, Mus musculus
  siRNA target sequence for Vps33b (NM_178070.2,2123-2141).
ctgacaactgctgttacaa

SEQ ID NO: 653000 - DNA, 19 bp, Mus musculus
  siRNA target sequence for Vps33b (NM_178070.2,2162-2180).
gccatgagtgaggtgaaat

SEQ ID NO: 653001 - DNA, 19 bp, Mus musculus
  siRNA target sequence for Vps35 (NM_022997.2,237-255).
ctgtcaccaaagagttact

SEQ ID NO: 653002 - DNA, 19 bp, Mus musculus
  siRNA target sequence for Vps35 (NM_022997.2,300-318).
gtctacctgactgatgaat

SEQ ID NO: 653003 - DNA, 19 bp, Mus musculus
  siRNA target sequence for Vps35 (NM_022997.2,306-324).
ctgactgatgaatttgcta

SEQ ID NO: 653004 - DNA, 19 bp, Mus musculus
  siRNA target sequence for Vps35 (NM_022997.2,360-378).
cagtacgcgggaaacatta

SEQ ID NO: 653005 - DNA, 19 bp, Mus musculus
  siRNA target sequence for Vps35 (NM_022997.2,362-380).
gtacgcgggaaacattatt

SEQ ID NO: 653006 - DNA, 19 bp, Mus musculus
  siRNA target sequence for Vps35 (NM_022997.2,401-419).
cacagttggagttgtatat

SEQ ID NO: 653007 - DNA, 19 bp, Mus musculus
  siRNA target sequence for Vps35 (NM_022997.2,403-421).
cagttggagttgtatatgt

SEQ ID NO: 653008 - DNA, 19 bp, Mus musculus
  siRNA target sequence for Vps35 (NM_022997.2,405-423).
gttggagttgtatatgtca

SEQ ID NO: 653009 - DNA, 19 bp, Mus musculus
  siRNA target sequence for Vps35 (NM_022997.2,411-429).
gttgtatatgtcaagtcat

SEQ ID NO: 653010 - DNA, 19 bp, Mus musculus
  siRNA target sequence for Vps35 (NM_022997.2,432-450).
cctcaatccaggaaagata

SEQ ID NO: 653011 - DNA, 19 bp, Mus musculus
  siRNA target sequence for Vps35 (NM_022997.2,433-451).
ctcaatccaggaaagatat

SEQ ID NO: 653012 - DNA, 19 bp, Mus musculus
  siRNA target sequence for Vps35 (NM_022997.2,499-517).
ggggtttgtttcttcgaaa

SEQ ID NO: 653013 - DNA, 19 bp, Mus musculus
  siRNA target sequence for Vps35 (NM_022997.2,530-548).
gtgtactaggaacatttta

SEQ ID NO: 653014 - DNA, 19 bp, Mus musculus
  siRNA target sequence for Vps35 (NM_022997.2,586-604).
gtgatatcagtgattccat

SEQ ID NO: 653015 - DNA, 19 bp, Mus musculus
  siRNA target sequence for Vps35 (NM_022997.2,595-613).
gtgattccatggattttgt

SEQ ID NO: 653016 - DNA, 19 bp, Mus musculus
  siRNA target sequence for Vps35 (NM_022997.2,667-685).
gacatagtcgagatagaga

SEQ ID NO: 653017 - DNA, 19 bp, Mus musculus
  siRNA target sequence for Vps35 (NM_022997.2,748-766).
gtcagttggaaggtgtaaa

SEQ ID NO: 653018 - DNA, 19 bp, Mus musculus
  siRNA target sequence for Vps35 (NM_022997.2,760-778).
gtgtaaatgtggaacgtta

SEQ ID NO: 653019 - DNA, 19 bp, Mus musculus
  siRNA target sequence for Vps35 (NM_022997.2,768-786).
gtggaacgttacaaacaga

SEQ ID NO: 653020 - DNA, 19 bp, Mus musculus
  siRNA target sequence for Vps35 (NM_022997.2,770-788).
ggaacgttacaaacagatt

SEQ ID NO: 653021 - DNA, 19 bp, Mus musculus
  siRNA target sequence for Vps35 (NM_022997.2,834-852).
ctggctcaggagtatctca

SEQ ID NO: 653022 - DNA, 19 bp, Mus musculus
  siRNA target sequence for Vps35 (NM_022997.2,857-875).
gtgcatcattcaggttttt

SEQ ID NO: 653023 - DNA, 19 bp, Mus musculus
  siRNA target sequence for Vps35 (NM_022997.2,916-934).
gagcttgtgctgaattaca

SEQ ID NO: 653024 - DNA, 19 bp, Mus musculus
  siRNA target sequence for Vps35 (NM_022997.2,1013-1031).
cggaattccagctgagatt

SEQ ID NO: 653025 - DNA, 19 bp, Mus musculus
  siRNA target sequence for Vps35 (NM_022997.2,1014-1032).
ggaattccagctgagatta

SEQ ID NO: 653026 - DNA, 19 bp, Mus musculus
  siRNA target sequence for Vps35 (NM_022997.2,1015-1033).
gaattccagctgagattaa

SEQ ID NO: 653027 - DNA, 19 bp, Mus musculus
  siRNA target sequence for Vps35 (NM_022997.2,1020-1038).
ccagctgagattaaacttt

SEQ ID NO: 653028 - DNA, 19 bp, Mus musculus
  siRNA target sequence for Vps35 (NM_022997.2,1021-1039).
cagctgagattaaactttt

SEQ ID NO: 653029 - DNA, 19 bp, Mus musculus
  siRNA target sequence for Vps35 (NM_022997.2,1092-1110).
ccatcagaggatgttgtat

SEQ ID NO: 653030 - DNA, 19 bp, Mus musculus
  siRNA target sequence for Vps35 (NM_022997.2,1123-1141).
ctctcattaatcttgctat

SEQ ID NO: 653031 - DNA, 19 bp, Mus musculus
  siRNA target sequence for Vps35 (NM_022997.2,1159-1177).
gtgtggactacgtcgataa

SEQ ID NO: 653032 - DNA, 19 bp, Mus musculus
  siRNA target sequence for Vps35 (NM_022997.2,1163-1181).
ggactacgtcgataaagtt

SEQ ID NO: 653033 - DNA, 19 bp, Mus musculus
  siRNA target sequence for Vps35 (NM_022997.2,1166-1184).
ctacgtcgataaagttcta

SEQ ID NO: 653034 - DNA, 19 bp, Mus musculus
  siRNA target sequence for Vps35 (NM_022997.2,1169-1187).
cgtcgataaagttctagaa

SEQ ID NO: 653035 - DNA, 19 bp, Mus musculus
  siRNA target sequence for Vps35 (NM_022997.2,1172-1190).
cgataaagttctagaaaca

SEQ ID NO: 653036 - DNA, 19 bp, Mus musculus
  siRNA target sequence for Vps35 (NM_022997.2,1192-1210).
cagtggagatattcaataa

SEQ ID NO: 653037 - DNA, 19 bp, Mus musculus
  siRNA target sequence for Vps35 (NM_022997.2,1196-1214).
ggagatattcaataagctt

SEQ ID NO: 653038 - DNA, 19 bp, Mus musculus
  siRNA target sequence for Vps35 (NM_022997.2,1197-1215).
gagatattcaataagctta

SEQ ID NO: 653039 - DNA, 19 bp, Mus musculus
  siRNA target sequence for Vps35 (NM_022997.2,1234-1252).
ccagtagtgcagtttcaaa

SEQ ID NO: 653040 - DNA, 19 bp, Mus musculus
  siRNA target sequence for Vps35 (NM_022997.2,1254-1272).
gagcttaccagacttttga

SEQ ID NO: 653041 - DNA, 19 bp, Mus musculus
  siRNA target sequence for Vps35 (NM_022997.2,1257-1275).
cttaccagacttttgaaga

SEQ ID NO: 653042 - DNA, 19 bp, Mus musculus
  siRNA target sequence for Vps35 (NM_022997.2,1279-1297).
ctgttgatacttacaacaa

SEQ ID NO: 653043 - DNA, 19 bp, Mus musculus
  siRNA target sequence for Vps35 (NM_022997.2,1281-1299).
gttgatacttacaacaata

SEQ ID NO: 653044 - DNA, 19 bp, Mus musculus
  siRNA target sequence for Vps35 (NM_022997.2,1284-1302).
gatacttacaacaatatct

SEQ ID NO: 653045 - DNA, 19 bp, Mus musculus
  siRNA target sequence for Vps35 (NM_022997.2,1308-1326).
gtattaaagttaaagcatt

SEQ ID NO: 653046 - DNA, 19 bp, Mus musculus
  siRNA target sequence for Vps35 (NM_022997.2,1331-1349).
cccactttttgagtacttt

SEQ ID NO: 653047 - DNA, 19 bp, Mus musculus
  siRNA target sequence for Vps35 (NM_022997.2,1350-1368).
gactacgagtccagaaaga

SEQ ID NO: 653048 - DNA, 19 bp, Mus musculus
  siRNA target sequence for Vps35 (NM_022997.2,1375-1393).
gctgttatgtgcttagtaa

SEQ ID NO: 653049 - DNA, 19 bp, Mus musculus
  siRNA target sequence for Vps35 (NM_022997.2,1376-1394).
ctgttatgtgcttagtaat

SEQ ID NO: 653050 - DNA, 19 bp, Mus musculus
  siRNA target sequence for Vps35 (NM_022997.2,1390-1408).
gtaatgttctggattataa

SEQ ID NO: 653051 - DNA, 19 bp, Mus musculus
  siRNA target sequence for Vps35 (NM_022997.2,1428-1446).
gaccaggtagattccataa

SEQ ID NO: 653052 - DNA, 19 bp, Mus musculus
  siRNA target sequence for Vps35 (NM_022997.2,1434-1452).
gtagattccataatgaatt

SEQ ID NO: 653053 - DNA, 19 bp, Mus musculus
  siRNA target sequence for Vps35 (NM_022997.2,1531-1549).
gccttgttggccgatttat

SEQ ID NO: 653054 - DNA, 19 bp, Mus musculus
  siRNA target sequence for Vps35 (NM_022997.2,1532-1550).
ccttgttggccgatttatt

SEQ ID NO: 653055 - DNA, 19 bp, Mus musculus
  siRNA target sequence for Vps35 (NM_022997.2,1569-1587).
gatcctgaccagcagtatt

SEQ ID NO: 653056 - DNA, 19 bp, Mus musculus
  siRNA target sequence for Vps35 (NM_022997.2,1573-1591).
ctgaccagcagtatttgat

SEQ ID NO: 653057 - DNA, 19 bp, Mus musculus
  siRNA target sequence for Vps35 (NM_022997.2,1595-1613).
gaatacggcacgaaaacat

SEQ ID NO: 653058 - DNA, 19 bp, Mus musculus
  siRNA target sequence for Vps35 (NM_022997.2,1652-1670).
gccacctttggtatttgca

SEQ ID NO: 653059 - DNA, 19 bp, Mus musculus
  siRNA target sequence for Vps35 (NM_022997.2,1683-1701).
gcttttcgatacaaagaga

SEQ ID NO: 653060 - DNA, 19 bp, Mus musculus
  siRNA target sequence for Vps35 (NM_022997.2,1716-1734).
gacaagtgggaaaagaaat

SEQ ID NO: 653061 - DNA, 19 bp, Mus musculus
  siRNA target sequence for Vps35 (NM_022997.2,1750-1768).
catttgctcaccagactat

SEQ ID NO: 653062 - DNA, 19 bp, Mus musculus
  siRNA target sequence for Vps35 (NM_022997.2,1867-1885).
cagtagcatatgaatttat

SEQ ID NO: 653063 - DNA, 19 bp, Mus musculus
  siRNA target sequence for Vps35 (NM_022997.2,1886-1904).
gtcccaggcattttctcta

SEQ ID NO: 653064 - DNA, 19 bp, Mus musculus
  siRNA target sequence for Vps35 (NM_022997.2,2104-2122).
gccgaaacacagacaaaaa

SEQ ID NO: 653065 - DNA, 19 bp, Mus musculus
  siRNA target sequence for Vps35 (NM_022997.2,2171-2189).
ggcactaaaaatagcaaat

SEQ ID NO: 653066 - DNA, 19 bp, Mus musculus
  siRNA target sequence for Vps35 (NM_022997.2,2195-2213).
catggacccctctctacaa

SEQ ID NO: 653067 - DNA, 19 bp, Mus musculus
  siRNA target sequence for Vps35 (NM_022997.2,2198-2216).
ggacccctctctacaagtt

SEQ ID NO: 653068 - DNA, 19 bp, Mus musculus
  siRNA target sequence for Vps35 (NM_022997.2,2235-2253).
ctgaacaggtacatctatt

SEQ ID NO: 653069 - DNA, 19 bp, Mus musculus
  siRNA target sequence for Vps35 (NM_022997.2,2242-2260).
ggtacatctatttctatga

SEQ ID NO: 653070 - DNA, 19 bp, Mus musculus
  siRNA target sequence for Vps35 (NM_022997.2,2275-2293).
cggtaaccattcaagtctt

SEQ ID NO: 653071 - DNA, 19 bp, Mus musculus
  siRNA target sequence for Vps35 (NM_022997.2,2422-2440).
ctgaggggccaatctatga

SEQ ID NO: 653072 - DNA, 19 bp, Mus musculus
  siRNA target sequence for Vps39 (NM_147153.2,143-161).
cggtgccgatcctggaaaa

SEQ ID NO: 653073 - DNA, 19 bp, Mus musculus
  siRNA target sequence for Vps39 (NM_147153.2,147-165).
gccgatcctggaaaagctt

SEQ ID NO: 653074 - DNA, 19 bp, Mus musculus
  siRNA target sequence for Vps39 (NM_147153.2,218-236).
ccaagcaagggcatcttct

SEQ ID NO: 653075 - DNA, 19 bp, Mus musculus
  siRNA target sequence for Vps39 (NM_147153.2,283-301).
cctgaaagcggcagttgta

SEQ ID NO: 653076 - DNA, 19 bp, Mus musculus
  siRNA target sequence for Vps39 (NM_147153.2,303-321).
caggtttgaggtaacacta

SEQ ID NO: 653077 - DNA, 19 bp, Mus musculus
  siRNA target sequence for Vps39 (NM_147153.2,364-382).
catgtggtttcccagttta

SEQ ID NO: 653078 - DNA, 19 bp, Mus musculus
  siRNA target sequence for Vps39 (NM_147153.2,391-409).
gtcagcttgttagaaaaca

SEQ ID NO: 653079 - DNA, 19 bp, Mus musculus
  siRNA target sequence for Vps39 (NM_147153.2,399-417).
gttagaaaacaacatttat

SEQ ID NO: 653080 - DNA, 19 bp, Mus musculus
  siRNA target sequence for Vps39 (NM_147153.2,430-448).
ctgacatttcaacaaatca

SEQ ID NO: 653081 - DNA, 19 bp, Mus musculus
  siRNA target sequence for Vps39 (NM_147153.2,589-607).
gaactgcagggagacttta

SEQ ID NO: 653082 - DNA, 19 bp, Mus musculus
  siRNA target sequence for Vps39 (NM_147153.2,630-648).
catggcatggtgtgaaaat

SEQ ID NO: 653083 - DNA, 19 bp, Mus musculus
  siRNA target sequence for Vps39 (NM_147153.2,633-651).
ggcatggtgtgaaaattct

SEQ ID NO: 653084 - DNA, 19 bp, Mus musculus
  siRNA target sequence for Vps39 (NM_147153.2,634-652).
gcatggtgtgaaaattcta

SEQ ID NO: 653085 - DNA, 19 bp, Mus musculus
  siRNA target sequence for Vps39 (NM_147153.2,650-668).
ctatctgcgttggtttcaa

SEQ ID NO: 653086 - DNA, 19 bp, Mus musculus
  siRNA target sequence for Vps39 (NM_147153.2,662-680).
gtttcaagagagactatta

SEQ ID NO: 653087 - DNA, 19 bp, Mus musculus
  siRNA target sequence for Vps39 (NM_147153.2,779-797).
ctgtgggtcaggatgatct

SEQ ID NO: 653088 - DNA, 19 bp, Mus musculus
  siRNA target sequence for Vps39 (NM_147153.2,952-970).
caaagcattgagttgcaaa

SEQ ID NO: 653089 - DNA, 19 bp, Mus musculus
  siRNA target sequence for Vps39 (NM_147153.2,966-984).
gcaaaggcctcgcttcatt

SEQ ID NO: 653090 - DNA, 19 bp, Mus musculus
  siRNA target sequence for Vps39 (NM_147153.2,967-985).
caaaggcctcgcttcatta

SEQ ID NO: 653091 - DNA, 19 bp, Mus musculus
  siRNA target sequence for Vps39 (NM_147153.2,986-1004).
catcagggggatcaaacat

SEQ ID NO: 653092 - DNA, 19 bp, Mus musculus
  siRNA target sequence for Vps39 (NM_147153.2,989-1007).
cagggggatcaaacattat

SEQ ID NO: 653093 - DNA, 19 bp, Mus musculus
  siRNA target sequence for Vps39 (NM_147153.2,991-1009).
gggggatcaaacattatct

SEQ ID NO: 653094 - DNA, 19 bp, Mus musculus
  siRNA target sequence for Vps39 (NM_147153.2,992-1010).
ggggatcaaacattatcta

SEQ ID NO: 653095 - DNA, 19 bp, Mus musculus
  siRNA target sequence for Vps39 (NM_147153.2,993-1011).
gggatcaaacattatctat

SEQ ID NO: 653096 - DNA, 19 bp, Mus musculus
  siRNA target sequence for Vps39 (NM_147153.2,1014-1032).
ggccagcaatcattttgtt

SEQ ID NO: 653097 - DNA, 19 bp, Mus musculus
  siRNA target sequence for Vps39 (NM_147153.2,1107-1125).
gcagctcgcggagatgaaa

SEQ ID NO: 653098 - DNA, 19 bp, Mus musculus
  siRNA target sequence for Vps39 (NM_147153.2,1110-1128).
gctcgcggagatgaaagat

SEQ ID NO: 653099 - DNA, 19 bp, Mus musculus
  siRNA target sequence for Vps39 (NM_147153.2,1194-1212).
ctgccagaagcgctttgat

SEQ ID NO: 653100 - DNA, 19 bp, Mus musculus
  siRNA target sequence for Vps39 (NM_147153.2,1221-1239).
gcaggtctttgctaaactt

SEQ ID NO: 653101 - DNA, 19 bp, Mus musculus
  siRNA target sequence for Vps39 (NM_147153.2,1356-1374).
ggctcacttagctctcatt

SEQ ID NO: 653102 - DNA, 19 bp, Mus musculus
  siRNA target sequence for Vps39 (NM_147153.2,1358-1376).
ctcacttagctctcattga

SEQ ID NO: 653103 - DNA, 19 bp, Mus musculus
  siRNA target sequence for Vps39 (NM_147153.2,1393-1411).
cggagccagttggtaaaga

SEQ ID NO: 653104 - DNA, 19 bp, Mus musculus
  siRNA target sequence for Vps39 (NM_147153.2,1459-1477).
ggcactcccaccatcaagt

SEQ ID NO: 653105 - DNA, 19 bp, Mus musculus
  siRNA target sequence for Vps39 (NM_147153.2,1656-1674).
gaaggggctccatgagaaa

SEQ ID NO: 653106 - DNA, 19 bp, Mus musculus
  siRNA target sequence for Vps39 (NM_147153.2,1825-1843).
gatggcctgaagatattca

SEQ ID NO: 653107 - DNA, 19 bp, Mus musculus
  siRNA target sequence for Vps39 (NM_147153.2,1874-1892).
cacgagatcgagtactcaa

SEQ ID NO: 653108 - DNA, 19 bp, Mus musculus
  siRNA target sequence for Vps39 (NM_147153.2,1877-1895).
gagatcgagtactcaactt

SEQ ID NO: 653109 - DNA, 19 bp, Mus musculus
  siRNA target sequence for Vps39 (NM_147153.2,1879-1897).
gatcgagtactcaacttct

SEQ ID NO: 653110 - DNA, 19 bp, Mus musculus
  siRNA target sequence for Vps39 (NM_147153.2,1882-1900).
cgagtactcaacttcttga

SEQ ID NO: 653111 - DNA, 19 bp, Mus musculus
  siRNA target sequence for Vps39 (NM_147153.2,1914-1932).
ggctctagccattccttat

SEQ ID NO: 653112 - DNA, 19 bp, Mus musculus
  siRNA target sequence for Vps39 (NM_147153.2,1916-1934).
ctctagccattccttatct

SEQ ID NO: 653113 - DNA, 19 bp, Mus musculus
  siRNA target sequence for Vps39 (NM_147153.2,2163-2181).
ctgtgattttccctttgat

SEQ ID NO: 653114 - DNA, 19 bp, Mus musculus
  siRNA target sequence for Vps39 (NM_147153.2,2381-2399).
gcctggggccaatcaaact

SEQ ID NO: 653115 - DNA, 19 bp, Mus musculus
  siRNA target sequence for Vps39 (NM_147153.2,2451-2469).
gctgcactacagcaaatta

SEQ ID NO: 653116 - DNA, 19 bp, Mus musculus
  siRNA target sequence for Vps39 (NM_147153.2,2455-2473).
cactacagcaaattagaca

SEQ ID NO: 653117 - DNA, 19 bp, Mus musculus
  siRNA target sequence for Vps39 (NM_147153.2,2520-2538).
catacgcatctttctagaa

SEQ ID NO: 653118 - DNA, 19 bp, Mus musculus
  siRNA target sequence for Vps39 (NM_147153.2,2570-2588).
ggttcaatcaagtgcttaa

SEQ ID NO: 653119 - DNA, 19 bp, Mus musculus
  siRNA target sequence for Vps39 (NM_147153.2,2574-2592).
caatcaagtgcttaagaat

SEQ ID NO: 653120 - DNA, 19 bp, Mus musculus
  siRNA target sequence for Vps39 (NM_147153.2,2697-2715).
gattgggaacagtgcattt

SEQ ID NO: 653121 - DNA, 19 bp, Mus musculus
  siRNA target sequence for Vps39 (NM_178851.1,251-269).
ggaaggatgttggttgtaa

SEQ ID NO: 653122 - DNA, 19 bp, Mus musculus
  siRNA target sequence for Vps45 (NM_013841.1,717-735).
gaagcagtatatttccaaa

SEQ ID NO: 653123 - DNA, 19 bp, Mus musculus
  siRNA target sequence for Vps45 (NM_013841.1,765-783).
ggtacttctcatggataaa

SEQ ID NO: 653124 - DNA, 19 bp, Mus musculus
  siRNA target sequence for Vps45 (NM_013841.1,784-802).
gaaacgactggtatagtga

SEQ ID NO: 653125 - DNA, 19 bp, Mus musculus
  siRNA target sequence for Vps45 (NM_013841.1,788-806).
cgactggtatagtgagtat

SEQ ID NO: 653126 - DNA, 19 bp, Mus musculus
  siRNA target sequence for Vps45 (NM_013841.1,846-864).
cctcttcgaacgaattgat

SEQ ID NO: 653127 - DNA, 19 bp, Mus musculus
  siRNA target sequence for Vps45 (NM_013841.1,847-865).
ctcttcgaacgaattgatt

SEQ ID NO: 653128 - DNA, 19 bp, Mus musculus
  siRNA target sequence for Vps45 (NM_013841.1,849-867).
cttcgaacgaattgattct

SEQ ID NO: 653129 - DNA, 19 bp, Mus musculus
  siRNA target sequence for Vps45 (NM_013841.1,852-870).
cgaacgaattgattctcaa

SEQ ID NO: 653130 - DNA, 19 bp, Mus musculus
  siRNA target sequence for Vps45 (NM_013841.1,853-871).
gaacgaattgattctcaaa

SEQ ID NO: 653131 - DNA, 19 bp, Mus musculus
  siRNA target sequence for Vps45 (NM_013841.1,885-903).
gaaacacctaaaagcaatt

SEQ ID NO: 653132 - DNA, 19 bp, Mus musculus
  siRNA target sequence for Vps45 (NM_013841.1,920-938).
caaaggagaatgtggaata

SEQ ID NO: 653133 - DNA, 19 bp, Mus musculus
  siRNA target sequence for Vps45 (NM_013841.1,959-977).
gacccaagtacagcatata

SEQ ID NO: 653134 - DNA, 19 bp, Mus musculus
  siRNA target sequence for Vps45 (NM_013841.1,961-979).
cccaagtacagcatatatt

SEQ ID NO: 653135 - DNA, 19 bp, Mus musculus
  siRNA target sequence for Vps45 (NM_013841.1,1055-1073).
ctgaagttcaggaatttta

SEQ ID NO: 653136 - DNA, 19 bp, Mus musculus
  siRNA target sequence for Vps45 (NM_013841.1,1087-1105).
gcggtgaatccacatttgt

SEQ ID NO: 653137 - DNA, 19 bp, Mus musculus
  siRNA target sequence for Vps45 (NM_013841.1,1088-1106).
cggtgaatccacatttgtt

SEQ ID NO: 653138 - DNA, 19 bp, Mus musculus
  siRNA target sequence for Vps45 (NM_013841.1,1209-1227).
gtgccccatgattcgttat

SEQ ID NO: 653139 - DNA, 19 bp, Mus musculus
  siRNA target sequence for Vps45 (NM_013841.1,1211-1229).
gccccatgattcgttatca

SEQ ID NO: 653140 - DNA, 19 bp, Mus musculus
  siRNA target sequence for Vps45 (NM_013841.1,1257-1275).
gggagaatgtgttaagcaa

SEQ ID NO: 653141 - DNA, 19 bp, Mus musculus
  siRNA target sequence for Vps45 (NM_013841.1,1267-1285).
gttaagcaagtgataagta

SEQ ID NO: 653142 - DNA, 19 bp, Mus musculus
  siRNA target sequence for Vps45 (NM_013841.1,1283-1301).
gtaaagagtacgaactctt

SEQ ID NO: 653143 - DNA, 19 bp, Mus musculus
  siRNA target sequence for Vps45 (NM_013841.1,1288-1306).
gagtacgaactctttgaat

SEQ ID NO: 653144 - DNA, 19 bp, Mus musculus
  siRNA target sequence for Vps45 (NM_013841.1,1374-1392).
gctcaaccagtggacatat

SEQ ID NO: 653145 - DNA, 19 bp, Mus musculus
  siRNA target sequence for Vps45 (NM_013841.1,1397-1415).
ccatggtccatgaactact

SEQ ID NO: 653146 - DNA, 19 bp, Mus musculus
  siRNA target sequence for Vps45 (NM_013841.1,1456-1474).
ggaatcagcaaagacttaa

SEQ ID NO: 653147 - DNA, 19 bp, Mus musculus
  siRNA target sequence for Vps45 (NM_013841.1,1482-1500).
ggtcctgtccgctgaaaat

SEQ ID NO: 653148 - DNA, 19 bp, Mus musculus
  siRNA target sequence for Vps45 (NM_013841.1,1485-1503).
cctgtccgctgaaaatgat

SEQ ID NO: 653149 - DNA, 19 bp, Mus musculus
  siRNA target sequence for Vps45 (NM_013841.1,1537-1555).
gccgagattggtagcaata

SEQ ID NO: 653150 - DNA, 19 bp, Mus musculus
  siRNA target sequence for Vps45 (NM_013841.1,1538-1556).
ccgagattggtagcaatat

SEQ ID NO: 653151 - DNA, 19 bp, Mus musculus
  siRNA target sequence for Vps45 (NM_013841.1,1539-1557).
cgagattggtagcaatata

SEQ ID NO: 653152 - DNA, 19 bp, Mus musculus
  siRNA target sequence for Vps45 (NM_013841.1,1540-1558).
gagattggtagcaatataa

SEQ ID NO: 653153 - DNA, 19 bp, Mus musculus
  siRNA target sequence for Vps45 (NM_013841.1,1602-1620).
gcaaaagctggaatccata

SEQ ID NO: 653154 - DNA, 19 bp, Mus musculus
  siRNA target sequence for Vps45 (NM_013841.1,1651-1669).
ccacagttcaaaaagatgt

SEQ ID NO: 653155 - DNA, 19 bp, Mus musculus
  siRNA target sequence for Vps45 (NM_013841.1,1816-1834).
ctgcagaatccgaaagtca

SEQ ID NO: 653156 - DNA, 19 bp, Mus musculus
  siRNA target sequence for Vps45 (NM_013841.1,1849-1867).
gttcgcctggtgatgcttt

SEQ ID NO: 653157 - DNA, 19 bp, Mus musculus
  siRNA target sequence for Vps45 (NM_013841.1,1860-1878).
gatgctttatgctctacat

SEQ ID NO: 653158 - DNA, 19 bp, Mus musculus
  siRNA target sequence for Vps45 (NM_013841.1,1959-1977).
gcttgtgtcggcagttgtt

SEQ ID NO: 653159 - DNA, 19 bp, Mus musculus
  siRNA target sequence for Vps45 (NM_013841.1,2026-2044).
gatgctgtggctattacca

SEQ ID NO: 653160 - DNA, 19 bp, Mus musculus
  siRNA target sequence for Vps45 (NM_013841.1,2036-2054).
ctattaccaagcagtttct

SEQ ID NO: 653161 - DNA, 19 bp, Mus musculus
  siRNA target sequence for Vps45 (NM_013841.1,2060-2078).
gactgaagggagtggaaaa

SEQ ID NO: 653162 - DNA, 19 bp, Mus musculus
  siRNA target sequence for Vps45 (NM_013841.1,2194-2212).
caggatatcatcgtgttta

SEQ ID NO: 653163 - DNA, 19 bp, Mus musculus
  siRNA target sequence for Vps45 (NM_013841.1,2196-2214).
ggatatcatcgtgtttatt

SEQ ID NO: 653164 - DNA, 19 bp, Mus musculus
  siRNA target sequence for Vps45 (NM_013841.1,2197-2215).
gatatcatcgtgtttatta

SEQ ID NO: 653165 - DNA, 19 bp, Mus musculus
  siRNA target sequence for Vps45 (NM_013841.1,2202-2220).
catcgtgtttattattgga

SEQ ID NO: 653166 - DNA, 19 bp, Mus musculus
  siRNA target sequence for Vps45 (NM_013841.1,2240-2258).
ctctgacagtctataacct

SEQ ID NO: 653167 - DNA, 19 bp, Mus musculus
  siRNA target sequence for Vti1a (NM_016862.2,183-201).
ggctccctcccgatgagaa

SEQ ID NO: 653168 - DNA, 19 bp, Mus musculus
  siRNA target sequence for Vti1a (NM_016862.2,191-209).
cccgatgagaagaagcaaa

SEQ ID NO: 653169 - DNA, 19 bp, Mus musculus
  siRNA target sequence for Vti1a (NM_016862.2,293-311).
caaagtcgaggaatgtata

SEQ ID NO: 653170 - DNA, 19 bp, Mus musculus
  siRNA target sequence for Vti1a (NM_016862.2,297-315).
gtcgaggaatgtatagcaa

SEQ ID NO: 653171 - DNA, 19 bp, Mus musculus
  siRNA target sequence for Vti1a (NM_016862.2,353-371).
gaaacggattttaaaaggt

SEQ ID NO: 653172 - DNA, 19 bp, Mus musculus
  siRNA target sequence for Vti1a (NM_016862.2,561-579).
gtcatgacagagaaaagat

SEQ ID NO: 653173 - DNA, 19 bp, Mus musculus
  siRNA target sequence for Vti1a (NM_016862.2,645-663).
cggggatgctgcgaagaat

SEQ ID NO: 653174 - DNA, 19 bp, Mus musculus
  siRNA target sequence for Vti1a (NM_016862.2,648-666).
ggatgctgcgaagaatcat

SEQ ID NO: 653175 - DNA, 19 bp, Mus musculus
  siRNA target sequence for Vti1a (NM_016862.2,675-693).
gtatcctgctcgtcatctt

SEQ ID NO: 653176 - DNA, 19 bp, Mus musculus
  siRNA target sequence for Vti1a (NM_016862.2,723-741).
cggccatcgcgtttttcgt

SEQ ID NO: 653177 - DNA, 19 bp, Mus musculus
  siRNA target sequence for Vti1b (NM_016800.2,71-89).
cctcctccgagcatttcga

SEQ ID NO: 653178 - DNA, 19 bp, Mus musculus
  siRNA target sequence for Vti1b (NM_016800.2,180-198).
gaagctggtcagagatttt

SEQ ID NO: 653179 - DNA, 19 bp, Mus musculus
  siRNA target sequence for Vti1b (NM_016800.2,183-201).
gctggtcagagattttgat

SEQ ID NO: 653180 - DNA, 19 bp, Mus musculus
  siRNA target sequence for Vti1b (NM_016800.2,186-204).
ggtcagagattttgatgaa

SEQ ID NO: 653181 - DNA, 19 bp, Mus musculus
  siRNA target sequence for Vti1b (NM_016800.2,187-205).
gtcagagattttgatgaaa

SEQ ID NO: 653182 - DNA, 19 bp, Mus musculus
  siRNA target sequence for Vti1b (NM_016800.2,243-261).
ggaagaactacgatatgca

SEQ ID NO: 653183 - DNA, 19 bp, Mus musculus
  siRNA target sequence for Vti1b (NM_016800.2,254-272).
gatatgcacccctgacttt

SEQ ID NO: 653184 - DNA, 19 bp, Mus musculus
  siRNA target sequence for Vti1b (NM_016800.2,274-292).
cgtaaccccatgatgtcta

SEQ ID NO: 653185 - DNA, 19 bp, Mus musculus
  siRNA target sequence for Vti1b (NM_016800.2,275-293).
gtaaccccatgatgtctaa

SEQ ID NO: 653186 - DNA, 19 bp, Mus musculus
  siRNA target sequence for Vti1b (NM_016800.2,328-346).
caccgtgaggtgagaagta

SEQ ID NO: 653187 - DNA, 19 bp, Mus musculus
  siRNA target sequence for Vti1b (NM_016800.2,330-348).
ccgtgaggtgagaagtaca

SEQ ID NO: 653188 - DNA, 19 bp, Mus musculus
  siRNA target sequence for Vti1b (NM_016800.2,371-389).
gccgaggagacctgaagta

SEQ ID NO: 653189 - DNA, 19 bp, Mus musculus
  siRNA target sequence for Vti1b (NM_016800.2,372-390).
ccgaggagacctgaagtat

SEQ ID NO: 653190 - DNA, 19 bp, Mus musculus
  siRNA target sequence for Vti1b (NM_016800.2,382-400).
ctgaagtatggcacgtata

SEQ ID NO: 653191 - DNA, 19 bp, Mus musculus
  siRNA target sequence for Vti1b (NM_016800.2,474-492).
ccgggctacccaaagcatt

SEQ ID NO: 653192 - DNA, 19 bp, Mus musculus
  siRNA target sequence for Vti1b (NM_016800.2,502-520).
catcggattgccacagaaa

SEQ ID NO: 653193 - DNA, 19 bp, Mus musculus
  siRNA target sequence for Vti1b (NM_016800.2,507-525).
gattgccacagaaactgat

SEQ ID NO: 653194 - DNA, 19 bp, Mus musculus
  siRNA target sequence for Vti1b (NM_016800.2,593-611).
gactggtaaatacaaatga

SEQ ID NO: 653195 - DNA, 19 bp, Mus musculus
  siRNA target sequence for Vti1b (NM_016800.2,644-662).
caatgtccagaaaagtgat

SEQ ID NO: 653196 - DNA, 19 bp, Mus musculus
  siRNA target sequence for Vti1b (NM_016800.2,712-730).
ctggtcggtctggtgtatt

SEQ ID NO: 653197 - DNA, 19 bp, Mus musculus
  siRNA target sequence for Vti1b (NM_016800.2,715-733).
gtcggtctggtgtattaca

SEQ ID NO: 653198 - DNA, 19 bp, Mus musculus
  siRNA target sequence for Vti1b (NM_016800.2,717-735).
cggtctggtgtattacaaa

SEQ ID NO: 653199 - DNA, 19 bp, Mus musculus
  siRNA target sequence for Vti1b (NM_016800.2,718-736).
ggtctggtgtattacaaat

SEQ ID NO: 653200 - DNA, 19 bp, Mus musculus
  siRNA target sequence for Xpo4 (NM_020506.1,74-92).
caccttccatggtcagtaa

SEQ ID NO: 653201 - DNA, 19 bp, Mus musculus
  siRNA target sequence for Xpo4 (NM_020506.1,112-130).
gagcacatattcctatcat

SEQ ID NO: 653202 - DNA, 19 bp, Mus musculus
  siRNA target sequence for Xpo4 (NM_020506.1,135-153).
gaagtccaaatcaccattt

SEQ ID NO: 653203 - DNA, 19 bp, Mus musculus
  siRNA target sequence for Xpo4 (NM_020506.1,138-156).
gtccaaatcaccatttgca

SEQ ID NO: 653204 - DNA, 19 bp, Mus musculus
  siRNA target sequence for Xpo4 (NM_020506.1,179-197).
ccagtaaagtggactatgt

SEQ ID NO: 653205 - DNA, 19 bp, Mus musculus
  siRNA target sequence for Xpo4 (NM_020506.1,205-223).
caagctgccacagctataa

SEQ ID NO: 653206 - DNA, 19 bp, Mus musculus
  siRNA target sequence for Xpo4 (NM_020506.1,292-310).
ctcacctatgtcttgcaaa

SEQ ID NO: 653207 - DNA, 19 bp, Mus musculus
  siRNA target sequence for Xpo4 (NM_020506.1,311-329).
ggcctaacctccaaaagta

SEQ ID NO: 653208 - DNA, 19 bp, Mus musculus
  siRNA target sequence for Xpo4 (NM_020506.1,312-330).
gcctaacctccaaaagtat

SEQ ID NO: 653209 - DNA, 19 bp, Mus musculus
  siRNA target sequence for Xpo4 (NM_020506.1,314-332).
ctaacctccaaaagtatgt

SEQ ID NO: 653210 - DNA, 19 bp, Mus musculus
  siRNA target sequence for Xpo4 (NM_020506.1,327-345).
gtatgttcgggaacagatt

SEQ ID NO: 653211 - DNA, 19 bp, Mus musculus
  siRNA target sequence for Xpo4 (NM_020506.1,418-436).
gaagtcagccagttgataa

SEQ ID NO: 653212 - DNA, 19 bp, Mus musculus
  siRNA target sequence for Xpo4 (NM_020506.1,423-441).
cagccagttgataagtagt

SEQ ID NO: 653213 - DNA, 19 bp, Mus musculus
  siRNA target sequence for Xpo4 (NM_020506.1,461-479).
ctctggcctgttctattct

SEQ ID NO: 653214 - DNA, 19 bp, Mus musculus
  siRNA target sequence for Xpo4 (NM_020506.1,465-483).
ggcctgttctattctaact

SEQ ID NO: 653215 - DNA, 19 bp, Mus musculus
  siRNA target sequence for Xpo4 (NM_020506.1,484-502).
gctctattgagtgaatttt

SEQ ID NO: 653216 - DNA, 19 bp, Mus musculus
  siRNA target sequence for Xpo4 (NM_020506.1,583-601).
cttcggcagatcttcatgt

SEQ ID NO: 653217 - DNA, 19 bp, Mus musculus
  siRNA target sequence for Xpo4 (NM_020506.1,805-823).
cttctggacagcagagtta

SEQ ID NO: 653218 - DNA, 19 bp, Mus musculus
  siRNA target sequence for Xpo4 (NM_020506.1,818-836).
gagttatggagctcttctt

SEQ ID NO: 653219 - DNA, 19 bp, Mus musculus
  siRNA target sequence for Xpo4 (NM_020506.1,941-959).
gatcccaggttgattatct

SEQ ID NO: 653220 - DNA, 19 bp, Mus musculus
  siRNA target sequence for Xpo4 (NM_020506.1,975-993).
gggcttgctcaacactatt

SEQ ID NO: 653221 - DNA, 19 bp, Mus musculus
  siRNA target sequence for Xpo4 (NM_020506.1,976-994).
ggcttgctcaacactatta

SEQ ID NO: 653222 - DNA, 19 bp, Mus musculus
  siRNA target sequence for Xpo4 (NM_020506.1,977-995).
gcttgctcaacactattaa

SEQ ID NO: 653223 - DNA, 19 bp, Mus musculus
  siRNA target sequence for Xpo4 (NM_020506.1,978-996).
cttgctcaacactattaat

SEQ ID NO: 653224 - DNA, 19 bp, Mus musculus
  siRNA target sequence for Xpo4 (NM_020506.1,981-999).
gctcaacactattaatgga

SEQ ID NO: 653225 - DNA, 19 bp, Mus musculus
  siRNA target sequence for Xpo4 (NM_020506.1,982-1000).
ctcaacactattaatggaa

SEQ ID NO: 653226 - DNA, 19 bp, Mus musculus
  siRNA target sequence for Xpo4 (NM_020506.1,984-1002).
caacactattaatggaatt

SEQ ID NO: 653227 - DNA, 19 bp, Mus musculus
  siRNA target sequence for Xpo4 (NM_020506.1,1060-1078).
gtgttccctcggaatgttt

SEQ ID NO: 653228 - DNA, 19 bp, Mus musculus
  siRNA target sequence for Xpo4 (NM_020506.1,1154-1172).
gtgctgcgttggaagaagt

SEQ ID NO: 653229 - DNA, 19 bp, Mus musculus
  siRNA target sequence for Xpo4 (NM_020506.1,1235-1253).
ctttggtccgagatgacaa

SEQ ID NO: 653230 - DNA, 19 bp, Mus musculus
  siRNA target sequence for Xpo4 (NM_020506.1,1240-1258).
gtccgagatgacaagcatt

SEQ ID NO: 653231 - DNA, 19 bp, Mus musculus
  siRNA target sequence for Xpo4 (NM_020506.1,1244-1262).
gagatgacaagcatttcca

SEQ ID NO: 653232 - DNA, 19 bp, Mus musculus
  siRNA target sequence for Xpo4 (NM_020506.1,1246-1264).
gatgacaagcatttccata

SEQ ID NO: 653233 - DNA, 19 bp, Mus musculus
  siRNA target sequence for Xpo4 (NM_020506.1,1285-1303).
gcagttcaggtgttcaatt

SEQ ID NO: 653234 - DNA, 19 bp, Mus musculus
  siRNA target sequence for Xpo4 (NM_020506.1,1288-1306).
gttcaggtgttcaattcct

SEQ ID NO: 653235 - DNA, 19 bp, Mus musculus
  siRNA target sequence for Xpo4 (NM_020506.1,1291-1309).
caggtgttcaattcctata

SEQ ID NO: 653236 - DNA, 19 bp, Mus musculus
  siRNA target sequence for Xpo4 (NM_020506.1,1293-1311).
ggtgttcaattcctatatt

SEQ ID NO: 653237 - DNA, 19 bp, Mus musculus
  siRNA target sequence for Xpo4 (NM_020506.1,1296-1314).
gttcaattcctatattcaa

SEQ ID NO: 653238 - DNA, 19 bp, Mus musculus
  siRNA target sequence for Xpo4 (NM_020506.1,1404-1422).
ggatgatcgtgatcagttt

SEQ ID NO: 653239 - DNA, 19 bp, Mus musculus
  siRNA target sequence for Xpo4 (NM_020506.1,1481-1499).
ctcttctgacaagtttatt

SEQ ID NO: 653240 - DNA, 19 bp, Mus musculus
  siRNA target sequence for Xpo4 (NM_020506.1,1539-1557).
gcatcagcaacaattcctt

SEQ ID NO: 653241 - DNA, 19 bp, Mus musculus
  siRNA target sequence for Xpo4 (NM_020506.1,1567-1585).
ggatcaagcaccattgaca

SEQ ID NO: 653242 - DNA, 19 bp, Mus musculus
  siRNA target sequence for Xpo4 (NM_020506.1,1571-1589).
caagcaccattgacaacaa

SEQ ID NO: 653243 - DNA, 19 bp, Mus musculus
  siRNA target sequence for Xpo4 (NM_020506.1,1599-1617).
cgatctttacgaggatatt

SEQ ID NO: 653244 - DNA, 19 bp, Mus musculus
  siRNA target sequence for Xpo4 (NM_020506.1,1603-1621).
ctttacgaggatattcact

SEQ ID NO: 653245 - DNA, 19 bp, Mus musculus
  siRNA target sequence for Xpo4 (NM_020506.1,1618-1636).
cactggcttattctagtta

SEQ ID NO: 653246 - DNA, 19 bp, Mus musculus
  siRNA target sequence for Xpo4 (NM_020506.1,1620-1638).
ctggcttattctagttaca

SEQ ID NO: 653247 - DNA, 19 bp, Mus musculus
  siRNA target sequence for Xpo4 (NM_020506.1,1644-1662).
cctcttagctgatgatact

SEQ ID NO: 653248 - DNA, 19 bp, Mus musculus
  siRNA target sequence for Xpo4 (NM_020506.1,1665-1683).
gggagagactccgctaata

SEQ ID NO: 653249 - DNA, 19 bp, Mus musculus
  siRNA target sequence for Xpo4 (NM_020506.1,1699-1717).
gaatattccattaagcatt

SEQ ID NO: 653250 - DNA, 19 bp, Mus musculus
  siRNA target sequence for Xpo4 (NM_020506.1,1833-1851).
gctaagagtctcagaagtt

SEQ ID NO: 653251 - DNA, 19 bp, Mus musculus
  siRNA target sequence for Xpo4 (NM_020506.1,1871-1889).
cagatctcactcatctact

SEQ ID NO: 653252 - DNA, 19 bp, Mus musculus
  siRNA target sequence for Xpo4 (NM_020506.1,1873-1891).
gatctcactcatctactaa

SEQ ID NO: 653253 - DNA, 19 bp, Mus musculus
  siRNA target sequence for Xpo4 (NM_020506.1,1893-1911).
ccctcagatgggcaaagat

SEQ ID NO: 653254 - DNA, 19 bp, Mus musculus
  siRNA target sequence for Xpo4 (NM_020506.1,1899-1917).
gatgggcaaagatattgtt

SEQ ID NO: 653255 - DNA, 19 bp, Mus musculus
  siRNA target sequence for Xpo4 (NM_020506.1,1904-1922).
gcaaagatattgtttggtt

SEQ ID NO: 653256 - DNA, 19 bp, Mus musculus
  siRNA target sequence for Xpo4 (NM_020506.1,1986-2004).
gccattgagcacagcattt

SEQ ID NO: 653257 - DNA, 19 bp, Mus musculus
  siRNA target sequence for Xpo4 (NM_020506.1,2000-2018).
catttggagcggatacaga

SEQ ID NO: 653258 - DNA, 19 bp, Mus musculus
  siRNA target sequence for Xpo4 (NM_020506.1,2039-2057).
gctacctcttacaaaaggt

SEQ ID NO: 653259 - DNA, 19 bp, Mus musculus
  siRNA target sequence for Xpo4 (NM_020506.1,2089-2107).
caggacctcgcgaatgaca

SEQ ID NO: 653260 - DNA, 19 bp, Mus musculus
  siRNA target sequence for Xpo4 (NM_020506.1,2115-2133).
gctccttgtcactttggta

SEQ ID NO: 653261 - DNA, 19 bp, Mus musculus
  siRNA target sequence for Xpo4 (NM_020506.1,2141-2159).
gagaaagggcaaacttagt

SEQ ID NO: 653262 - DNA, 19 bp, Mus musculus
  siRNA target sequence for Xpo4 (NM_020506.1,2143-2161).
gaaagggcaaacttagtaa

SEQ ID NO: 653263 - DNA, 19 bp, Mus musculus
  siRNA target sequence for Xpo4 (NM_020506.1,2147-2165).
gggcaaacttagtaattca

SEQ ID NO: 653264 - DNA, 19 bp, Mus musculus
  siRNA target sequence for Xpo4 (NM_020506.1,2149-2167).
gcaaacttagtaattcagt

SEQ ID NO: 653265 - DNA, 19 bp, Mus musculus
  siRNA target sequence for Xpo4 (NM_020506.1,2185-2203).
ctagcaaagcagtttgcaa

SEQ ID NO: 653266 - DNA, 19 bp, Mus musculus
  siRNA target sequence for Xpo4 (NM_020506.1,2204-2222).
gccgaagcccacctcttaa

SEQ ID NO: 653267 - DNA, 19 bp, Mus musculus
  siRNA target sequence for Xpo4 (NM_020506.1,2206-2224).
cgaagcccacctcttaact

SEQ ID NO: 653268 - DNA, 19 bp, Mus musculus
  siRNA target sequence for Xpo4 (NM_020506.1,2273-2291).
gaggctttgcacatatgga

SEQ ID NO: 653269 - DNA, 19 bp, Mus musculus
  siRNA target sequence for Xpo4 (NM_020506.1,2345-2363).
ggttcctgagagtgatcaa

SEQ ID NO: 653270 - DNA, 19 bp, Mus musculus
  siRNA target sequence for Xpo4 (NM_020506.1,2354-2372).
gagtgatcaaccaagagaa

SEQ ID NO: 653271 - DNA, 19 bp, Mus musculus
  siRNA target sequence for Xpo4 (NM_020506.1,2454-2472).
cacccagatcgacaatgta

SEQ ID NO: 653272 - DNA, 19 bp, Mus musculus
  siRNA target sequence for Xpo4 (NM_020506.1,2464-2482).
gacaatgtagccatccttt

SEQ ID NO: 653273 - DNA, 19 bp, Mus musculus
  siRNA target sequence for Xpo4 (NM_020506.1,2466-2484).
caatgtagccatccttttt

SEQ ID NO: 653274 - DNA, 19 bp, Mus musculus
  siRNA target sequence for Xpo4 (NM_020506.1,2518-2536).
ggtttaatggaagtttaca

SEQ ID NO: 653275 - DNA, 19 bp, Mus musculus
  siRNA target sequence for Xpo4 (NM_020506.1,2543-2561).
ctccagaaactgtcaatct

SEQ ID NO: 653276 - DNA, 19 bp, Mus musculus
  siRNA target sequence for Xpo4 (NM_020506.1,2546-2564).
cagaaactgtcaatctcat

SEQ ID NO: 653277 - DNA, 19 bp, Mus musculus
  siRNA target sequence for Xpo4 (NM_020506.1,2548-2566).
gaaactgtcaatctcatta

SEQ ID NO: 653278 - DNA, 19 bp, Mus musculus
  siRNA target sequence for Xpo4 (NM_020506.1,2552-2570).
ctgtcaatctcattataga

SEQ ID NO: 653279 - DNA, 19 bp, Mus musculus
  siRNA target sequence for Xpo4 (NM_020506.1,2556-2574).
caatctcattatagaagtt

SEQ ID NO: 653280 - DNA, 19 bp, Mus musculus
  siRNA target sequence for Xpo4 (NM_020506.1,2581-2599).
gaagttgcacataaacaaa

SEQ ID NO: 653281 - DNA, 19 bp, Mus musculus
  siRNA target sequence for Xpo4 (NM_020506.1,2587-2605).
gcacataaacaaatatgct

SEQ ID NO: 653282 - DNA, 19 bp, Mus musculus
  siRNA target sequence for Xpo4 (NM_020506.1,2645-2663).
gccttactttgttacaagt

SEQ ID NO: 653283 - DNA, 19 bp, Mus musculus
  siRNA target sequence for Xpo4 (NM_020506.1,2772-2790).
ggagttcatcgactttagt

SEQ ID NO: 653284 - DNA, 19 bp, Mus musculus
  siRNA target sequence for Xpo4 (NM_020506.1,2849-2867).
cggcagctgatgtcgtttt

SEQ ID NO: 653285 - DNA, 19 bp, Mus musculus
  siRNA target sequence for Xpo4 (NM_020506.1,2850-2868).
ggcagctgatgtcgtttta

SEQ ID NO: 653286 - DNA, 19 bp, Mus musculus
  siRNA target sequence for Xpo4 (NM_020506.1,2851-2869).
gcagctgatgtcgttttat

SEQ ID NO: 653287 - DNA, 19 bp, Mus musculus
  siRNA target sequence for Xpo4 (NM_020506.1,2881-2899).
ctaattctgcccttaatgt

SEQ ID NO: 653288 - DNA, 19 bp, Mus musculus
  siRNA target sequence for Xpo4 (NM_020506.1,2905-2923).
gatcttttgaagtttccaa

SEQ ID NO: 653289 - DNA, 19 bp, Mus musculus
  siRNA target sequence for Xpo4 (NM_020506.1,2920-2938).
ccaaccctttgtaatcaat

SEQ ID NO: 653290 - DNA, 19 bp, Mus musculus
  siRNA target sequence for Xpo4 (NM_020506.1,2921-2939).
caaccctttgtaatcaata

SEQ ID NO: 653291 - DNA, 19 bp, Mus musculus
  siRNA target sequence for Xpo4 (NM_020506.1,2930-2948).
gtaatcaatattacaaact

SEQ ID NO: 653292 - DNA, 19 bp, Mus musculus
  siRNA target sequence for Xpo4 (NM_020506.1,3078-3096).
cgaggccttgacaccatta

SEQ ID NO: 653293 - DNA, 19 bp, Mus musculus
  siRNA target sequence for Xpo4 (NM_020506.1,3081-3099).
ggccttgacaccattagct

SEQ ID NO: 653294 - DNA, 19 bp, Mus musculus
  siRNA target sequence for Xpo4 (NM_020506.1,3125-3143).
cggattcaccactttttct

SEQ ID NO: 653295 - DNA, 19 bp, Mus musculus
  siRNA target sequence for Xpo4 (NM_020506.1,3145-3163).
gcaacacgacacttcctta

SEQ ID NO: 653296 - DNA, 19 bp, Mus musculus
  siRNA target sequence for Xpo4 (NM_020506.1,3146-3164).
caacacgacacttccttaa

SEQ ID NO: 653297 - DNA, 19 bp, Mus musculus
  siRNA target sequence for Xpo4 (NM_020506.1,3159-3177).
ccttaagctggtttttgat

SEQ ID NO: 653298 - DNA, 19 bp, Mus musculus
  siRNA target sequence for Xpo4 (NM_020506.1,3175-3193).
gatatgctggtcttgcaaa

SEQ ID NO: 653299 - DNA, 19 bp, Mus musculus
  siRNA target sequence for Xpo4 (NM_020506.1,3218-3236).
cagcaggcgaagcattcta

SEQ ID NO: 653300 - DNA, 19 bp, Mus musculus
  siRNA target sequence for Xpo4 (NM_020506.1,3248-3266).
gtttgcaccaggctgaata

SEQ ID NO: 653301 - DNA, 19 bp, Mus musculus
  siRNA target sequence for Xpo4 (NM_020506.1,3308-3326).
cagtcatttaccagagatt

SEQ ID NO: 653302 - DNA, 19 bp, Mus musculus
  siRNA target sequence for Xpo4 (NM_020506.1,3312-3330).
catttaccagagattagca

SEQ ID NO: 653303 - DNA, 19 bp, Mus musculus
  siRNA target sequence for Xpo4 (NM_020506.1,3393-3411).
ggccttcctaaagagttta

SEQ ID NO: 653304 - DNA, 19 bp, Mus musculus
  siRNA target sequence for Xpo4 (NM_020506.1,3395-3413).
ccttcctaaagagtttaga

SEQ ID NO: 653305 - DNA, 19 bp, Mus musculus
  siRNA target sequence for Xpo4 (NM_020506.1,3433-3451).
ggtggtctcctttgtgtaa

SEQ ID NO: 653306 - DNA, 19 bp, Mus musculus
  siRNA target sequence for Xpo4 (NM_020506.1,3434-3452).
gtggtctcctttgtgtaaa

SEQ ID NO: 653307 - DNA, 19 bp, Mus musculus
  siRNA target sequence for Xpo4 (NM_020506.1,3436-3454).
ggtctcctttgtgtaaaat

SEQ ID NO: 653308 - DNA, 19 bp, Mus musculus
  siRNA target sequence for Xpo6 (NM_028816.2,549-567).
gatgacggaatttttccat

SEQ ID NO: 653309 - DNA, 19 bp, Mus musculus
  siRNA target sequence for Xpo6 (NM_028816.2,564-582).
ccatgactgcacaaccaat

SEQ ID NO: 653310 - DNA, 19 bp, Mus musculus
  siRNA target sequence for Xpo6 (NM_028816.2,597-615).
gatagaggagcttcttaat

SEQ ID NO: 653311 - DNA, 19 bp, Mus musculus
  siRNA target sequence for Xpo6 (NM_028816.2,601-619).
gaggagcttcttaataact

SEQ ID NO: 653312 - DNA, 19 bp, Mus musculus
  siRNA target sequence for Xpo6 (NM_028816.2,603-621).
ggagcttcttaataacttt

SEQ ID NO: 653313 - DNA, 19 bp, Mus musculus
  siRNA target sequence for Xpo6 (NM_028816.2,641-659).
ggagattctgcttatattt

SEQ ID NO: 653314 - DNA, 19 bp, Mus musculus
  siRNA target sequence for Xpo6 (NM_028816.2,665-683).
ccagcacaaggaatgacta

SEQ ID NO: 653315 - DNA, 19 bp, Mus musculus
  siRNA target sequence for Xpo6 (NM_028816.2,666-684).
cagcacaaggaatgactat

SEQ ID NO: 653316 - DNA, 19 bp, Mus musculus
  siRNA target sequence for Xpo6 (NM_028816.2,679-697).
gactatgtaatgatgtaca

SEQ ID NO: 653317 - DNA, 19 bp, Mus musculus
  siRNA target sequence for Xpo6 (NM_028816.2,740-758).
gggtcccatctcaggataa

SEQ ID NO: 653318 - DNA, 19 bp, Mus musculus
  siRNA target sequence for Xpo6 (NM_028816.2,742-760).
gtcccatctcaggataaga

SEQ ID NO: 653319 - DNA, 19 bp, Mus musculus
  siRNA target sequence for Xpo6 (NM_028816.2,749-767).
ctcaggataagatggaaat

SEQ ID NO: 653320 - DNA, 19 bp, Mus musculus
  siRNA target sequence for Xpo6 (NM_028816.2,773-791).
gctgcttgcccaaacttct

SEQ ID NO: 653321 - DNA, 19 bp, Mus musculus
  siRNA target sequence for Xpo6 (NM_028816.2,795-813).
ggctcaccataaaacctta

SEQ ID NO: 653322 - DNA, 19 bp, Mus musculus
  siRNA target sequence for Xpo6 (NM_028816.2,815-833).
cttactttattcggaataa

SEQ ID NO: 653323 - DNA, 19 bp, Mus musculus
  siRNA target sequence for Xpo6 (NM_028816.2,828-846).
gaataaactctgcaaagtt

SEQ ID NO: 653324 - DNA, 19 bp, Mus musculus
  siRNA target sequence for Xpo6 (NM_028816.2,839-857).
gcaaagttatcgttgatat

SEQ ID NO: 653325 - DNA, 19 bp, Mus musculus
  siRNA target sequence for Xpo6 (NM_028816.2,853-871).
gatattggacgccaagatt

SEQ ID NO: 653326 - DNA, 19 bp, Mus musculus
  siRNA target sequence for Xpo6 (NM_028816.2,865-883).
caagattggcccatgttct

SEQ ID NO: 653327 - DNA, 19 bp, Mus musculus
  siRNA target sequence for Xpo6 (NM_028816.2,1070-1088).
caggtatcttggaaactgt

SEQ ID NO: 653328 - DNA, 19 bp, Mus musculus
  siRNA target sequence for Xpo6 (NM_028816.2,1092-1110).
ggacaaacacagtgttact

SEQ ID NO: 653329 - DNA, 19 bp, Mus musculus
  siRNA target sequence for Xpo6 (NM_028816.2,1131-1149).
cccgacgtcaggagaaagt

SEQ ID NO: 653330 - DNA, 19 bp, Mus musculus
  siRNA target sequence for Xpo6 (NM_028816.2,1148-1166).
gtggtgatttactgagtaa

SEQ ID NO: 653331 - DNA, 19 bp, Mus musculus
  siRNA target sequence for Xpo6 (NM_028816.2,1221-1239).
ggatgtggagagtgagtat

SEQ ID NO: 653332 - DNA, 19 bp, Mus musculus
  siRNA target sequence for Xpo6 (NM_028816.2,1269-1287).
ccacctcttcagttggatt

SEQ ID NO: 653333 - DNA, 19 bp, Mus musculus
  siRNA target sequence for Xpo6 (NM_028816.2,1329-1347).
cttccactttgctcgattt

SEQ ID NO: 653334 - DNA, 19 bp, Mus musculus
  siRNA target sequence for Xpo6 (NM_028816.2,1440-1458).
ggccatgtcctgcatcaat

SEQ ID NO: 653335 - DNA, 19 bp, Mus musculus
  siRNA target sequence for Xpo6 (NM_028816.2,1476-1494).
ctgtgtgcctatggaattt

SEQ ID NO: 653336 - DNA, 19 bp, Mus musculus
  siRNA target sequence for Xpo6 (NM_028816.2,1503-1521).
cttattgcgaatgtttcaa

SEQ ID NO: 653337 - DNA, 19 bp, Mus musculus
  siRNA target sequence for Xpo6 (NM_028816.2,1526-1544).
ccttctacctcctgcaaaa

SEQ ID NO: 653338 - DNA, 19 bp, Mus musculus
  siRNA target sequence for Xpo6 (NM_028816.2,1527-1545).
cttctacctcctgcaaaaa

SEQ ID NO: 653339 - DNA, 19 bp, Mus musculus
  siRNA target sequence for Xpo6 (NM_028816.2,1591-1609).
gaactcgatgagagttaca

SEQ ID NO: 653340 - DNA, 19 bp, Mus musculus
  siRNA target sequence for Xpo6 (NM_028816.2,1644-1662).
gagtgttcacctaagaaga

SEQ ID NO: 653341 - DNA, 19 bp, Mus musculus
  siRNA target sequence for Xpo6 (NM_028816.2,1646-1664).
gtgttcacctaagaagaat

SEQ ID NO: 653342 - DNA, 19 bp, Mus musculus
  siRNA target sequence for Xpo6 (NM_028816.2,1710-1728).
gttcaagtacacgtttcat

SEQ ID NO: 653343 - DNA, 19 bp, Mus musculus
  siRNA target sequence for Xpo6 (NM_028816.2,1741-1759).
gaaggttacttctcttgtt

SEQ ID NO: 653344 - DNA, 19 bp, Mus musculus
  siRNA target sequence for Xpo6 (NM_028816.2,1782-1800).
ggactatctgacaagtaaa

SEQ ID NO: 653345 - DNA, 19 bp, Mus musculus
  siRNA target sequence for Xpo6 (NM_028816.2,1866-1884).
gcttacagaggtgttgaat

SEQ ID NO: 653346 - DNA, 19 bp, Mus musculus
  siRNA target sequence for Xpo6 (NM_028816.2,2076-2094).
gggattacagcaatttgta

SEQ ID NO: 653347 - DNA, 19 bp, Mus musculus
  siRNA target sequence for Xpo6 (NM_028816.2,2078-2096).
gattacagcaatttgtagt

SEQ ID NO: 653348 - DNA, 19 bp, Mus musculus
  siRNA target sequence for Xpo6 (NM_028816.2,2083-2101).
cagcaatttgtagttactt

SEQ ID NO: 653349 - DNA, 19 bp, Mus musculus
  siRNA target sequence for Xpo6 (NM_028816.2,2190-2208).
ggctgtgggccgattagct

SEQ ID NO: 653350 - DNA, 19 bp, Mus musculus
  siRNA target sequence for Xpo6 (NM_028816.2,2197-2215).
ggccgattagctgaatact

SEQ ID NO: 653351 - DNA, 19 bp, Mus musculus
  siRNA target sequence for Xpo6 (NM_028816.2,2229-2247).
gtttgctgcaaggttcaat

SEQ ID NO: 653352 - DNA, 19 bp, Mus musculus
  siRNA target sequence for Xpo6 (NM_028816.2,2266-2284).
gagaggttggtcaaagtta

SEQ ID NO: 653353 - DNA, 19 bp, Mus musculus
  siRNA target sequence for Xpo6 (NM_028816.2,2268-2286).
gaggttggtcaaagttact

SEQ ID NO: 653354 - DNA, 19 bp, Mus musculus
  siRNA target sequence for Xpo6 (NM_028816.2,2274-2292).
ggtcaaagttactctgtat

SEQ ID NO: 653355 - DNA, 19 bp, Mus musculus
  siRNA target sequence for Xpo6 (NM_028816.2,2301-2319).
gataaaactgtacaacatt

SEQ ID NO: 653356 - DNA, 19 bp, Mus musculus
  siRNA target sequence for Xpo6 (NM_028816.2,2564-2582).
ccgtgcggcctgtctttct

SEQ ID NO: 653357 - DNA, 19 bp, Mus musculus
  siRNA target sequence for Xpo6 (NM_028816.2,2566-2584).
gtgcggcctgtctttctga

SEQ ID NO: 653358 - DNA, 19 bp, Mus musculus
  siRNA target sequence for Xpo6 (NM_028816.2,2610-2628).
gttcaacagcatcattgat

SEQ ID NO: 653359 - DNA, 19 bp, Mus musculus
  siRNA target sequence for Xpo6 (NM_028816.2,2631-2649).
ctctgcccagcgtctaaca

SEQ ID NO: 653360 - DNA, 19 bp, Mus musculus
  siRNA target sequence for Xpo6 (NM_028816.2,2636-2654).
cccagcgtctaacagataa

SEQ ID NO: 653361 - DNA, 19 bp, Mus musculus
  siRNA target sequence for Xpo6 (NM_028816.2,2667-2685).
ggtttgccgtgcactttct

SEQ ID NO: 653362 - DNA, 19 bp, Mus musculus
  siRNA target sequence for Xpo6 (NM_028816.2,2668-2686).
gtttgccgtgcactttcta

SEQ ID NO: 653363 - DNA, 19 bp, Mus musculus
  siRNA target sequence for Xpo6 (NM_028816.2,2697-2715).
ccttccatggccaaatctt

SEQ ID NO: 653364 - DNA, 19 bp, Mus musculus
  siRNA target sequence for Xpo6 (NM_028816.2,2873-2891).
gtgtcttggaagatatcgt

SEQ ID NO: 653365 - DNA, 19 bp, Mus musculus
  siRNA target sequence for Xpo6 (NM_028816.2,2881-2899).
gaagatatcgtggagaata

SEQ ID NO: 653366 - DNA, 19 bp, Mus musculus
  siRNA target sequence for Xpo6 (NM_028816.2,2884-2902).
gatatcgtggagaatattt

SEQ ID NO: 653367 - DNA, 19 bp, Mus musculus
  siRNA target sequence for Xpo6 (NM_028816.2,3044-3062).
gaggccttcgagtacagat

SEQ ID NO: 653368 - DNA, 19 bp, Mus musculus
  siRNA target sequence for Xpo6 (NM_028816.2,3071-3089).
cgttcacagagcagatcat

SEQ ID NO: 653369 - DNA, 19 bp, Mus musculus
  siRNA target sequence for Xpo6 (NM_028816.2,3161-3179).
gccgggtggtggagaagtt

SEQ ID NO: 653370 - DNA, 19 bp, Mus musculus
  siRNA target sequence for Xpo6 (NM_028816.2,3346-3364).
cacaactggcggtacttct

SEQ ID NO: 653371 - DNA, 19 bp, Mus musculus
  siRNA target sequence for Xpo6 (NM_028816.2,3476-3494).
ctgacatccacctgttcaa

SEQ ID NO: 653372 - DNA, 19 bp, Mus musculus
  siRNA target sequence for Xpo6 (NM_028816.2,3480-3498).
catccacctgttcaaacaa

SEQ ID NO: 653373 - DNA, 19 bp, Mus musculus
  siRNA target sequence for Xpo6 (NM_028816.2,3483-3501).
ccacctgttcaaacaaaat

SEQ ID NO: 653374 - DNA, 19 bp, Mus musculus
  siRNA target sequence for Xpo6 (NM_028816.2,3538-3556).
ctataccacaaaaagatct

SEQ ID NO: 653375 - DNA, 19 bp, Mus musculus
  siRNA target sequence for Xpo6 (NM_028816.2,3595-3613).
ctccaggtcctggttcata

SEQ ID NO: 653376 - DNA, 19 bp, Mus musculus
  siRNA target sequence for Xpo6 (NM_028816.2,3643-3661).
ggcattgccatttacaaca

SEQ ID NO: 653377 - DNA, 19 bp, Mus musculus
  siRNA target sequence for Xpo6 (NM_028816.2,3807-3825).
gcacaggctggtaaatgat

SEQ ID NO: 653378 - DNA, 19 bp, Mus musculus
  siRNA target sequence for Xpo7 (NM_023045.1,25-43).
gcctggcccaactagagaa

SEQ ID NO: 653379 - DNA, 19 bp, Mus musculus
  siRNA target sequence for Xpo7 (NM_023045.1,26-44).
cctggcccaactagagaat

SEQ ID NO: 653380 - DNA, 19 bp, Mus musculus
  siRNA target sequence for Xpo7 (NM_023045.1,243-261).
ctggagcagcggatagata

SEQ ID NO: 653381 - DNA, 19 bp, Mus musculus
  siRNA target sequence for Xpo7 (NM_023045.1,254-272).
gatagatatccggaactat

SEQ ID NO: 653382 - DNA, 19 bp, Mus musculus
  siRNA target sequence for Xpo7 (NM_023045.1,265-283).
ggaactatgtgctcaacta

SEQ ID NO: 653383 - DNA, 19 bp, Mus musculus
  siRNA target sequence for Xpo7 (NM_023045.1,336-354).
ctgtatgccaggatcacaa

SEQ ID NO: 653384 - DNA, 19 bp, Mus musculus
  siRNA target sequence for Xpo7 (NM_023045.1,392-410).
cttcagaaacgcaatcaca

SEQ ID NO: 653385 - DNA, 19 bp, Mus musculus
  siRNA target sequence for Xpo7 (NM_023045.1,448-466).
gcatcattggcgtcacaat

SEQ ID NO: 653386 - DNA, 19 bp, Mus musculus
  siRNA target sequence for Xpo7 (NM_023045.1,449-467).
catcattggcgtcacaatt

SEQ ID NO: 653387 - DNA, 19 bp, Mus musculus
  siRNA target sequence for Xpo7 (NM_023045.1,452-470).
cattggcgtcacaatttta

SEQ ID NO: 653388 - DNA, 19 bp, Mus musculus
  siRNA target sequence for Xpo7 (NM_023045.1,457-475).
gcgtcacaattttatctca

SEQ ID NO: 653389 - DNA, 19 bp, Mus musculus
  siRNA target sequence for Xpo7 (NM_023045.1,476-494).
gctcaccaatgaaattaat

SEQ ID NO: 653390 - DNA, 19 bp, Mus musculus
  siRNA target sequence for Xpo7 (NM_023045.1,514-532).
ctttaaccaaacacagaaa

SEQ ID NO: 653391 - DNA, 19 bp, Mus musculus
  siRNA target sequence for Xpo7 (NM_023045.1,575-593).
cacactttcctgcaattta

SEQ ID NO: 653392 - DNA, 19 bp, Mus musculus
  siRNA target sequence for Xpo7 (NM_023045.1,583-601).
cctgcaatttactaaaaca

SEQ ID NO: 653393 - DNA, 19 bp, Mus musculus
  siRNA target sequence for Xpo7 (NM_023045.1,603-621).
gcatcaggaaagaatctga

SEQ ID NO: 653394 - DNA, 19 bp, Mus musculus
  siRNA target sequence for Xpo7 (NM_023045.1,614-632).
gaatctgaacttgaatgat

SEQ ID NO: 653395 - DNA, 19 bp, Mus musculus
  siRNA target sequence for Xpo7 (NM_023045.1,618-636).
ctgaacttgaatgatgaaa

SEQ ID NO: 653396 - DNA, 19 bp, Mus musculus
  siRNA target sequence for Xpo7 (NM_023045.1,620-638).
gaacttgaatgatgaaagt

SEQ ID NO: 653397 - DNA, 19 bp, Mus musculus
  siRNA target sequence for Xpo7 (NM_023045.1,641-659).
gcatggcttgctaatgcaa

SEQ ID NO: 653398 - DNA, 19 bp, Mus musculus
  siRNA target sequence for Xpo7 (NM_023045.1,693-711).
gattttatcggcacatcta

SEQ ID NO: 653399 - DNA, 19 bp, Mus musculus
  siRNA target sequence for Xpo7 (NM_023045.1,827-845).
ctcgttctcacctttggta

SEQ ID NO: 653400 - DNA, 19 bp, Mus musculus
  siRNA target sequence for Xpo7 (NM_023045.1,829-847).
cgttctcacctttggtatt

SEQ ID NO: 653401 - DNA, 19 bp, Mus musculus
  siRNA target sequence for Xpo7 (NM_023045.1,842-860).
ggtattgtcctgcttagta

SEQ ID NO: 653402 - DNA, 19 bp, Mus musculus
  siRNA target sequence for Xpo7 (NM_023045.1,848-866).
gtcctgcttagtacagatt

SEQ ID NO: 653403 - DNA, 19 bp, Mus musculus
  siRNA target sequence for Xpo7 (NM_023045.1,873-891).
gtccggagatccctattta

SEQ ID NO: 653404 - DNA, 19 bp, Mus musculus
  siRNA target sequence for Xpo7 (NM_023045.1,876-894).
cggagatccctatttaaca

SEQ ID NO: 653405 - DNA, 19 bp, Mus musculus
  siRNA target sequence for Xpo7 (NM_023045.1,877-895).
ggagatccctatttaacaa

SEQ ID NO: 653406 - DNA, 19 bp, Mus musculus
  siRNA target sequence for Xpo7 (NM_023045.1,878-896).
gagatccctatttaacaat

SEQ ID NO: 653407 - DNA, 19 bp, Mus musculus
  siRNA target sequence for Xpo7 (NM_023045.1,927-945).
gttgatggtgttaaacgaa

SEQ ID NO: 653408 - DNA, 19 bp, Mus musculus
  siRNA target sequence for Xpo7 (NM_023045.1,950-968).
ggaaaatccacagagttta

SEQ ID NO: 653409 - DNA, 19 bp, Mus musculus
  siRNA target sequence for Xpo7 (NM_023045.1,964-982).
gtttatcagacccaaacaa

SEQ ID NO: 653410 - DNA, 19 bp, Mus musculus
  siRNA target sequence for Xpo7 (NM_023045.1,976-994).
caaacaattaccatgagtt

SEQ ID NO: 653411 - DNA, 19 bp, Mus musculus
  siRNA target sequence for Xpo7 (NM_023045.1,1000-1018).
gactactggctcggttaaa

SEQ ID NO: 653412 - DNA, 19 bp, Mus musculus
  siRNA target sequence for Xpo7 (NM_023045.1,1002-1020).
ctactggctcggttaaaga

SEQ ID NO: 653413 - DNA, 19 bp, Mus musculus
  siRNA target sequence for Xpo7 (NM_023045.1,1005-1023).
ctggctcggttaaagagta

SEQ ID NO: 653414 - DNA, 19 bp, Mus musculus
  siRNA target sequence for Xpo7 (NM_023045.1,1008-1026).
gctcggttaaagagtaact

SEQ ID NO: 653415 - DNA, 19 bp, Mus musculus
  siRNA target sequence for Xpo7 (NM_023045.1,1009-1027).
ctcggttaaagagtaacta

SEQ ID NO: 653416 - DNA, 19 bp, Mus musculus
  siRNA target sequence for Xpo7 (NM_023045.1,1052-1070).
ggaaaactaccctgatgtt

SEQ ID NO: 653417 - DNA, 19 bp, Mus musculus
  siRNA target sequence for Xpo7 (NM_023045.1,1053-1071).
gaaaactaccctgatgtta

SEQ ID NO: 653418 - DNA, 19 bp, Mus musculus
  siRNA target sequence for Xpo7 (NM_023045.1,1063-1081).
ctgatgttatccgattgat

SEQ ID NO: 653419 - DNA, 19 bp, Mus musculus
  siRNA target sequence for Xpo7 (NM_023045.1,1074-1092).
cgattgatagccaacttca

SEQ ID NO: 653420 - DNA, 19 bp, Mus musculus
  siRNA target sequence for Xpo7 (NM_023045.1,1166-1184).
ggcagcctctgtaccatat

SEQ ID NO: 653421 - DNA, 19 bp, Mus musculus
  siRNA target sequence for Xpo7 (NM_023045.1,1168-1186).
cagcctctgtaccatatgt

SEQ ID NO: 653422 - DNA, 19 bp, Mus musculus
  siRNA target sequence for Xpo7 (NM_023045.1,1170-1188).
gcctctgtaccatatgtca

SEQ ID NO: 653423 - DNA, 19 bp, Mus musculus
  siRNA target sequence for Xpo7 (NM_023045.1,1171-1189).
cctctgtaccatatgtcaa

SEQ ID NO: 653424 - DNA, 19 bp, Mus musculus
  siRNA target sequence for Xpo7 (NM_023045.1,1172-1190).
ctctgtaccatatgtcaaa

SEQ ID NO: 653425 - DNA, 19 bp, Mus musculus
  siRNA target sequence for Xpo7 (NM_023045.1,1200-1218).
ccccatatgctggaaacat

SEQ ID NO: 653426 - DNA, 19 bp, Mus musculus
  siRNA target sequence for Xpo7 (NM_023045.1,1201-1219).
cccatatgctggaaacata

SEQ ID NO: 653427 - DNA, 19 bp, Mus musculus
  siRNA target sequence for Xpo7 (NM_023045.1,1202-1220).
ccatatgctggaaacatat

SEQ ID NO: 653428 - DNA, 19 bp, Mus musculus
  siRNA target sequence for Xpo7 (NM_023045.1,1203-1221).
catatgctggaaacatata

SEQ ID NO: 653429 - DNA, 19 bp, Mus musculus
  siRNA target sequence for Xpo7 (NM_023045.1,1349-1367).
catcgggcgttgtgagtat

SEQ ID NO: 653430 - DNA, 19 bp, Mus musculus
  siRNA target sequence for Xpo7 (NM_023045.1,1353-1371).
gggcgttgtgagtatgaga

SEQ ID NO: 653431 - DNA, 19 bp, Mus musculus
  siRNA target sequence for Xpo7 (NM_023045.1,1354-1372).
ggcgttgtgagtatgagaa

SEQ ID NO: 653432 - DNA, 19 bp, Mus musculus
  siRNA target sequence for Xpo7 (NM_023045.1,1381-1399).
cgctccttgtgcagctatt

SEQ ID NO: 653433 - DNA, 19 bp, Mus musculus
  siRNA target sequence for Xpo7 (NM_023045.1,1411-1429).
cccagtcgtaccaagaact

SEQ ID NO: 653434 - DNA, 19 bp, Mus musculus
  siRNA target sequence for Xpo7 (NM_023045.1,1479-1497).
cgactgacgtggttagtct

SEQ ID NO: 653435 - DNA, 19 bp, Mus musculus
  siRNA target sequence for Xpo7 (NM_023045.1,1480-1498).
gactgacgtggttagtcta

SEQ ID NO: 653436 - DNA, 19 bp, Mus musculus
  siRNA target sequence for Xpo7 (NM_023045.1,1482-1500).
ctgacgtggttagtctata

SEQ ID NO: 653437 - DNA, 19 bp, Mus musculus
  siRNA target sequence for Xpo7 (NM_023045.1,1486-1504).
cgtggttagtctatatcat

SEQ ID NO: 653438 - DNA, 19 bp, Mus musculus
  siRNA target sequence for Xpo7 (NM_023045.1,1487-1505).
gtggttagtctatatcatt

SEQ ID NO: 653439 - DNA, 19 bp, Mus musculus
  siRNA target sequence for Xpo7 (NM_023045.1,1514-1532).
gattggtggccgagtttct

SEQ ID NO: 653440 - DNA, 19 bp, Mus musculus
  siRNA target sequence for Xpo7 (NM_023045.1,1579-1597).
gtcgggtgctccagcttat

SEQ ID NO: 653441 - DNA, 19 bp, Mus musculus
  siRNA target sequence for Xpo7 (NM_023045.1,1581-1599).
cgggtgctccagcttatga

SEQ ID NO: 653442 - DNA, 19 bp, Mus musculus
  siRNA target sequence for Xpo7 (NM_023045.1,1582-1600).
gggtgctccagcttatgaa

SEQ ID NO: 653443 - DNA, 19 bp, Mus musculus
  siRNA target sequence for Xpo7 (NM_023045.1,1593-1611).
cttatgaacctgacagatt

SEQ ID NO: 653444 - DNA, 19 bp, Mus musculus
  siRNA target sequence for Xpo7 (NM_023045.1,1616-1634).
cttggctcaggctggtaat

SEQ ID NO: 653445 - DNA, 19 bp, Mus musculus
  siRNA target sequence for Xpo7 (NM_023045.1,1673-1691).
gtttcgtaagatctacatt

SEQ ID NO: 653446 - DNA, 19 bp, Mus musculus
  siRNA target sequence for Xpo7 (NM_023045.1,1695-1713).
gatcaggtgcagaaatcct

SEQ ID NO: 653447 - DNA, 19 bp, Mus musculus
  siRNA target sequence for Xpo7 (NM_023045.1,1726-1744).
gccgactctcagaagttct

SEQ ID NO: 653448 - DNA, 19 bp, Mus musculus
  siRNA target sequence for Xpo7 (NM_023045.1,1791-1809).
gtcatcaccaacttgaagt

SEQ ID NO: 653449 - DNA, 19 bp, Mus musculus
  siRNA target sequence for Xpo7 (NM_023045.1,1862-1880).
cctctccatcggatacagt

SEQ ID NO: 653450 - DNA, 19 bp, Mus musculus
  siRNA target sequence for Xpo7 (NM_023045.1,1863-1881).
ctctccatcggatacagta

SEQ ID NO: 653451 - DNA, 19 bp, Mus musculus
  siRNA target sequence for Xpo7 (NM_023045.1,1873-1891).
gatacagtagcgtaaggaa

SEQ ID NO: 653452 - DNA, 19 bp, Mus musculus
  siRNA target sequence for Xpo7 (NM_023045.1,1879-1897).
gtagcgtaaggaagttagt

SEQ ID NO: 653453 - DNA, 19 bp, Mus musculus
  siRNA target sequence for Xpo7 (NM_023045.1,1882-1900).
gcgtaaggaagttagtgaa

SEQ ID NO: 653454 - DNA, 19 bp, Mus musculus
  siRNA target sequence for Xpo7 (NM_023045.1,1932-1950).
cacacgagcgagcactttt

SEQ ID NO: 653455 - DNA, 19 bp, Mus musculus
  siRNA target sequence for Xpo7 (NM_023045.1,1934-1952).
cacgagcgagcacttttca

SEQ ID NO: 653456 - DNA, 19 bp, Mus musculus
  siRNA target sequence for Xpo7 (NM_023045.1,1937-1955).
gagcgagcacttttcattt

SEQ ID NO: 653457 - DNA, 19 bp, Mus musculus
  siRNA target sequence for Xpo7 (NM_023045.1,2030-2048).
cctcatggtggatttagga

SEQ ID NO: 653458 - DNA, 19 bp, Mus musculus
  siRNA target sequence for Xpo7 (NM_023045.1,2125-2143).
ctaacagcttcaatgaaca

SEQ ID NO: 653459 - DNA, 19 bp, Mus musculus
  siRNA target sequence for Xpo7 (NM_023045.1,2324-2342).
gctgatggctgaattagtt

SEQ ID NO: 653460 - DNA, 19 bp, Mus musculus
  siRNA target sequence for Xpo7 (NM_023045.1,2327-2345).
gatggctgaattagttcat

SEQ ID NO: 653461 - DNA, 19 bp, Mus musculus
  siRNA target sequence for Xpo7 (NM_023045.1,2331-2349).
gctgaattagttcataaca

SEQ ID NO: 653462 - DNA, 19 bp, Mus musculus
  siRNA target sequence for Xpo7 (NM_023045.1,2350-2368).
gatctcagcgactccaatt

SEQ ID NO: 653463 - DNA, 19 bp, Mus musculus
  siRNA target sequence for Xpo7 (NM_023045.1,2353-2371).
ctcagcgactccaatttga

SEQ ID NO: 653464 - DNA, 19 bp, Mus musculus
  siRNA target sequence for Xpo7 (NM_023045.1,2357-2375).
gcgactccaatttgatgtt

SEQ ID NO: 653465 - DNA, 19 bp, Mus musculus
  siRNA target sequence for Xpo7 (NM_023045.1,2361-2379).
ctccaatttgatgtttcat

SEQ ID NO: 653466 - DNA, 19 bp, Mus musculus
  siRNA target sequence for Xpo7 (NM_023045.1,2377-2395).
catctcccaatggtatctt

SEQ ID NO: 653467 - DNA, 19 bp, Mus musculus
  siRNA target sequence for Xpo7 (NM_023045.1,2380-2398).
ctcccaatggtatcttact

SEQ ID NO: 653468 - DNA, 19 bp, Mus musculus
  siRNA target sequence for Xpo7 (NM_023045.1,2596-2614).
ccctacagaccttcatcaa

SEQ ID NO: 653469 - DNA, 19 bp, Mus musculus
  siRNA target sequence for Xpo7 (NM_023045.1,2597-2615).
cctacagaccttcatcaaa

SEQ ID NO: 653470 - DNA, 19 bp, Mus musculus
  siRNA target sequence for Xpo7 (NM_023045.1,2661-2679).
ctcagccagtcttactact

SEQ ID NO: 653471 - DNA, 19 bp, Mus musculus
  siRNA target sequence for Xpo7 (NM_023045.1,2702-2720).
ggaccatatgaactttatt

SEQ ID NO: 653472 - DNA, 19 bp, Mus musculus
  siRNA target sequence for Xpo7 (NM_023045.1,2730-2748).
gaacctcatgtcatcatgt

SEQ ID NO: 653473 - DNA, 19 bp, Mus musculus
  siRNA target sequence for Xpo7 (NM_023045.1,2733-2751).
cctcatgtcatcatgtaca

SEQ ID NO: 653474 - DNA, 19 bp, Mus musculus
  siRNA target sequence for Xpo7 (NM_023045.1,2747-2765).
gtacatcctctcttctatt

SEQ ID NO: 653475 - DNA, 19 bp, Mus musculus
  siRNA target sequence for Xpo7 (NM_023045.1,2781-2799).
gcacttgacaccatggtat

SEQ ID NO: 653476 - DNA, 19 bp, Mus musculus
  siRNA target sequence for Xpo7 (NM_023045.1,2812-2830).
gttcctgcctagaccatat

SEQ ID NO: 653477 - DNA, 19 bp, Mus musculus
  siRNA target sequence for Xpo7 (NM_023045.1,2855-2873).
gtcacggagcaccaagaaa

SEQ ID NO: 653478 - DNA, 19 bp, Mus musculus
  siRNA target sequence for Xpo7 (NM_023045.1,2859-2877).
cggagcaccaagaaaagga

SEQ ID NO: 653479 - DNA, 19 bp, Mus musculus
  siRNA target sequence for Xpo7 (NM_023045.1,2901-2919).
gactgctttctgcatatca

SEQ ID NO: 653480 - DNA, 19 bp, Mus musculus
  siRNA target sequence for Xpo7 (NM_023045.1,2959-2977).
cggtgctgaacatcattat

SEQ ID NO: 653481 - DNA, 19 bp, Mus musculus
  siRNA target sequence for Xpo7 (NM_023045.1,2966-2984).
gaacatcattatctttgaa

SEQ ID NO: 653482 - DNA, 19 bp, Mus musculus
  siRNA target sequence for Xpo7 (NM_023045.1,2993-3011).
gaatcagtggtctatgtct

SEQ ID NO: 653483 - DNA, 19 bp, Mus musculus
  siRNA target sequence for Xpo7 (NM_023045.1,3013-3031).
gacccctgcttggcttaat

SEQ ID NO: 653484 - DNA, 19 bp, Mus musculus
  siRNA target sequence for Xpo7 (NM_023045.1,3026-3044).
cttaatactgcttaatgaa

SEQ ID NO: 653485 - DNA, 19 bp, Mus musculus
  siRNA target sequence for Xpo7 (NM_023045.1,3139-3157).
gcattgaacggaatcttct

SEQ ID NO: 653486 - DNA, 19 bp, Mus musculus
  siRNA target sequence for Xpo7 (NM_023045.1,3147-3165).
cggaatcttctgacgaaaa

SEQ ID NO: 653487 - DNA, 19 bp, Mus musculus
  siRNA target sequence for Xpo7 (NM_023045.1,3205-3223).
gagaggtcaacgactcaat

SEQ ID NO: 653488 - DNA, 19 bp, Mus musculus
  siRNA target sequence for Xpo7 (NM_023045.1,3207-3225).
gaggtcaacgactcaatga

SEQ ID NO: 653489 - DNA, 19 bp, Mus musculus
  siRNA target sequence for Xpo7 (NM_023045.1,3210-3228).
gtcaacgactcaatgaaga

SEQ ID NO: 653490 - DNA, 19 bp, Mus musculus
  siRNA target sequence for Xpo7 (NM_023045.1,3212-3230).
caacgactcaatgaagaat

SEQ ID NO: 653491 - DNA, 19 bp, Mus musculus
  siRNA target sequence for Xpo7 (NM_023045.1,3240-3258).
ggagtgaatagcaatgaca

SEQ ID NO: 653492 - DNA, 19 bp, Mus musculus
  siRNA target sequence for Xpo7 (NM_023045.1,3241-3259).
gagtgaatagcaatgacat

SEQ ID NO: 653493 - DNA, 19 bp, Mus musculus
  siRNA target sequence for 1110015E18Rik (NM_026536.1,116-134).
catgtgactccagatactt

SEQ ID NO: 653494 - DNA, 19 bp, Mus musculus
  siRNA target sequence for 1110015E18Rik (NM_026536.1,128-146).
gatacttctgggaatggtt

SEQ ID NO: 653495 - DNA, 19 bp, Mus musculus
  siRNA target sequence for 1110015E18Rik (NM_026536.1,137-155).
gggaatggttgaatacagt

SEQ ID NO: 653496 - DNA, 19 bp, Mus musculus
  siRNA target sequence for 1110015E18Rik (NM_026536.1,143-161).
ggttgaatacagtgtttaa

SEQ ID NO: 653497 - DNA, 19 bp, Mus musculus
  siRNA target sequence for 1110015E18Rik (NM_026536.1,144-162).
gttgaatacagtgtttaat

SEQ ID NO: 653498 - DNA, 19 bp, Mus musculus
  siRNA target sequence for 1110015E18Rik (NM_026536.1,296-314).
gctctatagacagatacaa

SEQ ID NO: 653499 - DNA, 19 bp, Mus musculus
  siRNA target sequence for 1110015E18Rik (NM_026536.1,308-326).
gatacaagattcaagcaat

SEQ ID NO: 653500 - DNA, 19 bp, Mus musculus
  siRNA target sequence for 1110015E18Rik (NM_026536.1,312-330).
caagattcaagcaattgat

SEQ ID NO: 653501 - DNA, 19 bp, Mus musculus
  siRNA target sequence for 1110015E18Rik (NM_026536.1,328-346).
gatgccaccgattcttgta

SEQ ID NO: 653502 - DNA, 19 bp, Mus musculus
  siRNA target sequence for 1110015E18Rik (NM_026536.1,331-349).
gccaccgattcttgtatca

SEQ ID NO: 653503 - DNA, 19 bp, Mus musculus
  siRNA target sequence for 1110015E18Rik (NM_026536.1,332-350).
ccaccgattcttgtatcat

SEQ ID NO: 653504 - DNA, 19 bp, Mus musculus
  siRNA target sequence for 1110015E18Rik (NM_026536.1,376-394).
ggcctagagcatgttgaaa

SEQ ID NO: 653505 - DNA, 19 bp, Mus musculus
  siRNA target sequence for 1110015E18Rik (NM_026536.1,377-395).
gcctagagcatgttgaaaa

SEQ ID NO: 653506 - DNA, 19 bp, Mus musculus
  siRNA target sequence for 1110015E18Rik (NM_026536.1,378-396).
cctagagcatgttgaaaaa

SEQ ID NO: 653507 - DNA, 19 bp, Mus musculus
  siRNA target sequence for 1110015E18Rik (NM_026536.1,384-402).
gcatgttgaaaaaataaca

SEQ ID NO: 653508 - DNA, 19 bp, Mus musculus
  siRNA target sequence for 1110015E18Rik (NM_026536.1,403-421).
ctatgcaagtgtcattata

SEQ ID NO: 653509 - DNA, 19 bp, Mus musculus
  siRNA target sequence for 1110015E18Rik (NM_026536.1,413-431).
gtcattatattgaagataa

SEQ ID NO: 653510 - DNA, 19 bp, Mus musculus
  siRNA target sequence for 1110015E18Rik (NM_026536.1,438-456).
gcagaggcttagtcaactt

SEQ ID NO: 653511 - DNA, 19 bp, Mus musculus
  siRNA target sequence for 1110015E18Rik (NM_026536.1,441-459).
gaggcttagtcaacttgaa

SEQ ID NO: 653512 - DNA, 19 bp, Mus musculus
  siRNA target sequence for 1110015E18Rik (NM_026536.1,474-492).
cctattggaactggaaata

SEQ ID NO: 653513 - DNA, 19 bp, Mus musculus
  siRNA target sequence for 1110015E18Rik (NM_026536.1,475-493).
ctattggaactggaaataa

SEQ ID NO: 653514 - DNA, 19 bp, Mus musculus
  siRNA target sequence for 1110015E18Rik (NM_026536.1,601-619).
cttgcccaagtctttaaga

SEQ ID NO: 653515 - DNA, 19 bp, Mus musculus
  siRNA target sequence for Atp5f1 (NM_009725.1,248-266).
ctgaggacttagcttgtat

SEQ ID NO: 653516 - DNA, 19 bp, Mus musculus
  siRNA target sequence for Atp5j (NM_016755.2,401-419).
gcatttgaagaggaacatt

SEQ ID NO: 653517 - DNA, 19 bp, Mus musculus
  siRNA target sequence for Atp5j (NM_016755.2,410-428).
gaggaacattggtgttaca

SEQ ID NO: 653518 - DNA, 19 bp, Mus musculus
  siRNA target sequence for Atp5j (NM_016755.2,468-486).
ctcttcgtggacaagataa

SEQ ID NO: 653519 - DNA, 19 bp, Mus musculus
  siRNA target sequence for Atp5j (NM_016755.2,482-500).
gataagagagtacaaatca

SEQ ID NO: 653520 - DNA, 19 bp, Mus musculus
  siRNA target sequence for Atp5j2 (NM_020582.1,205-223).
gaccggtattacaacaagt

SEQ ID NO: 653521 - DNA, 19 bp, Mus musculus
  siRNA target sequence for Atp5j2 (NM_020582.1,208-226).
cggtattacaacaagtaca

SEQ ID NO: 653522 - DNA, 19 bp, Mus musculus
  siRNA target sequence for Atp5j2 (NM_020582.1,209-227).
ggtattacaacaagtacat

SEQ ID NO: 653523 - DNA, 19 bp, Mus musculus
  siRNA target sequence for Atp5k (NM_007507.1,185-203).
gagttgaaacggattgaga

SEQ ID NO: 653524 - DNA, 19 bp, Mus musculus
  siRNA target sequence for Atp6v0a1 (NM_016920.1,177-195).
gacgctggcccagctattt

SEQ ID NO: 653525 - DNA, 19 bp, Mus musculus
  siRNA target sequence for Atp6v0a1 (NM_016920.1,240-258).
gcttgggaaggtccaattt

SEQ ID NO: 653526 - DNA, 19 bp, Mus musculus
  siRNA target sequence for Atp6v0a1 (NM_016920.1,249-267).
ggtccaatttcgggattta

SEQ ID NO: 653527 - DNA, 19 bp, Mus musculus
  siRNA target sequence for Atp6v0a1 (NM_016920.1,250-268).
gtccaatttcgggatttaa

SEQ ID NO: 653528 - DNA, 19 bp, Mus musculus
  siRNA target sequence for Atp6v0a1 (NM_016920.1,320-338).
gtgaagaaatggatcgaaa

SEQ ID NO: 653529 - DNA, 19 bp, Mus musculus
  siRNA target sequence for Atp6v0a1 (NM_016920.1,343-361).
cgatttgttgagaaagaga

SEQ ID NO: 653530 - DNA, 19 bp, Mus musculus
  siRNA target sequence for Atp6v0a1 (NM_016920.1,344-362).
gatttgttgagaaagagat

SEQ ID NO: 653531 - DNA, 19 bp, Mus musculus
  siRNA target sequence for Atp6v0a1 (NM_016920.1,371-389).
ctaacatcccaattatgga

SEQ ID NO: 653532 - DNA, 19 bp, Mus musculus
  siRNA target sequence for Atp6v0a1 (NM_016920.1,422-440).
gggacatgatcgacttaga

SEQ ID NO: 653533 - DNA, 19 bp, Mus musculus
  siRNA target sequence for Atp6v0a1 (NM_016920.1,443-461).
ccaatttcgagaagattga

SEQ ID NO: 653534 - DNA, 19 bp, Mus musculus
  siRNA target sequence for Atp6v0a1 (NM_016920.1,514-532).
ctggaactgactgaattaa

SEQ ID NO: 653535 - DNA, 19 bp, Mus musculus
  siRNA target sequence for Atp6v0a1 (NM_016920.1,740-758).
gacaagctgaaatcgaaaa

SEQ ID NO: 653536 - DNA, 19 bp, Mus musculus
  siRNA target sequence for Atp6v0a1 (NM_016920.1,840-858).
cagggtcaagaaaatctgt

SEQ ID NO: 653537 - DNA, 19 bp, Mus musculus
  siRNA target sequence for Atp6v0a1 (NM_016920.1,919-937).
gcttccggagtcaatacca

SEQ ID NO: 653538 - DNA, 19 bp, Mus musculus
  siRNA target sequence for Atp6v0a1 (NM_016920.1,938-956).
ggatcgacgacctccaaat

SEQ ID NO: 653539 - DNA, 19 bp, Mus musculus
  siRNA target sequence for Atp6v0a1 (NM_016920.1,942-960).
cgacgacctccaaatggtt

SEQ ID NO: 653540 - DNA, 19 bp, Mus musculus
  siRNA target sequence for Atp6v0a1 (NM_016920.1,1221-1239).
ccagacaccgccgacatat

SEQ ID NO: 653541 - DNA, 19 bp, Mus musculus
  siRNA target sequence for Atp6v0a1 (NM_016920.1,1222-1240).
cagacaccgccgacatata

SEQ ID NO: 653542 - DNA, 19 bp, Mus musculus
  siRNA target sequence for Atp6v0a1 (NM_016920.1,1224-1242).
gacaccgccgacatataat

SEQ ID NO: 653543 - DNA, 19 bp, Mus musculus
  siRNA target sequence for Atp6v0a1 (NM_016920.1,1226-1244).
caccgccgacatataataa

SEQ ID NO: 653544 - DNA, 19 bp, Mus musculus
  siRNA target sequence for Atp6v0a1 (NM_016920.1,1228-1246).
ccgccgacatataataaaa

SEQ ID NO: 653545 - DNA, 19 bp, Mus musculus
  siRNA target sequence for Atp6v0a1 (NM_016920.1,1231-1249).
ccgacatataataaaacca

SEQ ID NO: 653546 - DNA, 19 bp, Mus musculus
  siRNA target sequence for Atp6v0a1 (NM_016920.1,1232-1250).
cgacatataataaaaccaa

SEQ ID NO: 653547 - DNA, 19 bp, Mus musculus
  siRNA target sequence for Atp6v0a1 (NM_016920.1,1259-1277).
cgcacggcttccagaacat

SEQ ID NO: 653548 - DNA, 19 bp, Mus musculus
  siRNA target sequence for Atp6v0a1 (NM_016920.1,1260-1278).
gcacggcttccagaacata

SEQ ID NO: 653549 - DNA, 19 bp, Mus musculus
  siRNA target sequence for Atp6v0a1 (NM_016920.1,1263-1281).
cggcttccagaacatagta

SEQ ID NO: 653550 - DNA, 19 bp, Mus musculus
  siRNA target sequence for Atp6v0a1 (NM_016920.1,1296-1314).
cggcacttaccgagagatt

SEQ ID NO: 653551 - DNA, 19 bp, Mus musculus
  siRNA target sequence for Atp6v0a1 (NM_016920.1,1297-1315).
ggcacttaccgagagatta

SEQ ID NO: 653552 - DNA, 19 bp, Mus musculus
  siRNA target sequence for Atp6v0a1 (NM_016920.1,1298-1316).
gcacttaccgagagattaa

SEQ ID NO: 653553 - DNA, 19 bp, Mus musculus
  siRNA target sequence for Atp6v0a1 (NM_016920.1,1358-1376).
ctgtgatgttcggagattt

SEQ ID NO: 653554 - DNA, 19 bp, Mus musculus
  siRNA target sequence for Atp6v0a1 (NM_016920.1,1449-1467).
gcacgagaatgagatgttt

SEQ ID NO: 653555 - DNA, 19 bp, Mus musculus
  siRNA target sequence for Atp6v0a1 (NM_016920.1,1450-1468).
cacgagaatgagatgttta

SEQ ID NO: 653556 - DNA, 19 bp, Mus musculus
  siRNA target sequence for Atp6v0a1 (NM_016920.1,1453-1471).
gagaatgagatgtttagca

SEQ ID NO: 653557 - DNA, 19 bp, Mus musculus
  siRNA target sequence for Atp6v0a1 (NM_016920.1,1487-1505).
ggtacattattcttctgat

SEQ ID NO: 653558 - DNA, 19 bp, Mus musculus
  siRNA target sequence for Atp6v0a1 (NM_016920.1,1553-1571).
ccaagtctctgaatatctt

SEQ ID NO: 653559 - DNA, 19 bp, Mus musculus
  siRNA target sequence for Atp6v0a1 (NM_016920.1,1583-1601).
ggagtgtacggccaatgtt

SEQ ID NO: 653560 - DNA, 19 bp, Mus musculus
  siRNA target sequence for Atp6v0a1 (NM_016920.1,1661-1679).
ccgctatccctggagtttt

SEQ ID NO: 653561 - DNA, 19 bp, Mus musculus
  siRNA target sequence for Atp6v0a1 (NM_016920.1,1708-1726).
ccgatttggaacattgcaa

SEQ ID NO: 653562 - DNA, 19 bp, Mus musculus
  siRNA target sequence for Atp6v0a1 (NM_016920.1,1810-1828).
ctgagccttttcaaccata

SEQ ID NO: 653563 - DNA, 19 bp, Mus musculus
  siRNA target sequence for Atp6v0a1 (NM_016920.1,1814-1832).
gccttttcaaccatatcta

SEQ ID NO: 653564 - DNA, 19 bp, Mus musculus
  siRNA target sequence for Atp6v0a1 (NM_016920.1,1851-1869).
catctactttggctttatt

SEQ ID NO: 653565 - DNA, 19 bp, Mus musculus
  siRNA target sequence for Atp6v0a1 (NM_016920.1,1881-1899).
cttcatgtcctcgttgttt

SEQ ID NO: 653566 - DNA, 19 bp, Mus musculus
  siRNA target sequence for Atp6v0a1 (NM_016920.1,1971-1989).
cctcctgatccacttcata

SEQ ID NO: 653567 - DNA, 19 bp, Mus musculus
  siRNA target sequence for Atp6v0a1 (NM_016920.1,1975-1993).
ctgatccacttcataaaca

SEQ ID NO: 653568 - DNA, 19 bp, Mus musculus
  siRNA target sequence for Atp6v0a1 (NM_016920.1,2041-2059).
ggacagaaaggaattcagt

SEQ ID NO: 653569 - DNA, 19 bp, Mus musculus
  siRNA target sequence for Atp6v0a1 (NM_016920.1,2093-2111).
cttggatgcttctgtttaa

SEQ ID NO: 653570 - DNA, 19 bp, Mus musculus
  siRNA target sequence for Atp6v0a1 (NM_016920.1,2462-2480).
ggggtctagggctgttttt

SEQ ID NO: 653571 - DNA, 19 bp, Mus musculus
  siRNA target sequence for Atp6v0a1 (NM_016920.1,2637-2655).
cattcgggaagggaagttt

SEQ ID NO: 653572 - DNA, 19 bp, Mus musculus
  siRNA target sequence for Atp6v0a2 (NM_011596.1,345-363).
gagaagtcaccaagaacaa

SEQ ID NO: 653573 - DNA, 19 bp, Mus musculus
  siRNA target sequence for Atp6v0a2 (NM_011596.1,451-469).
gtttgagcccacgtatgaa

SEQ ID NO: 653574 - DNA, 19 bp, Mus musculus
  siRNA target sequence for Atp6v0a2 (NM_011596.1,457-475).
gcccacgtatgaagagttt

SEQ ID NO: 653575 - DNA, 19 bp, Mus musculus
  siRNA target sequence for Atp6v0a2 (NM_011596.1,470-488).
gagtttcccgccttagaga

SEQ ID NO: 653576 - DNA, 19 bp, Mus musculus
  siRNA target sequence for Atp6v0a2 (NM_011596.1,529-547).
cgccaagctgggattcgtt

SEQ ID NO: 653577 - DNA, 19 bp, Mus musculus
  siRNA target sequence for Atp6v0a2 (NM_011596.1,567-585).
gcagagttgaagcatttga

SEQ ID NO: 653578 - DNA, 19 bp, Mus musculus
  siRNA target sequence for Atp6v0a2 (NM_011596.1,660-678).
ctgaaacgggtgaagtcat

SEQ ID NO: 653579 - DNA, 19 bp, Mus musculus
  siRNA target sequence for Atp6v0a2 (NM_011596.1,688-706).
cgtgttcctgatttccttt

SEQ ID NO: 653580 - DNA, 19 bp, Mus musculus
  siRNA target sequence for Atp6v0a2 (NM_011596.1,723-741).
gccacaaggttaagaagat

SEQ ID NO: 653581 - DNA, 19 bp, Mus musculus
  siRNA target sequence for Atp6v0a2 (NM_011596.1,725-743).
cacaaggttaagaagatat

SEQ ID NO: 653582 - DNA, 19 bp, Mus musculus
  siRNA target sequence for Atp6v0a2 (NM_011596.1,761-779).
cacatctacccgtatccaa

SEQ ID NO: 653583 - DNA, 19 bp, Mus musculus
  siRNA target sequence for Atp6v0a2 (NM_011596.1,822-840).
ctcggatccaagaccttta

SEQ ID NO: 653584 - DNA, 19 bp, Mus musculus
  siRNA target sequence for Atp6v0a2 (NM_011596.1,1090-1108).
gaacacaatccctacgaaa

SEQ ID NO: 653585 - DNA, 19 bp, Mus musculus
  siRNA target sequence for Atp6v0a2 (NM_011596.1,1093-1111).
cacaatccctacgaaagaa

SEQ ID NO: 653586 - DNA, 19 bp, Mus musculus
  siRNA target sequence for Atp6v0a2 (NM_011596.1,1124-1142).
ctgatccgcaccaacaaat

SEQ ID NO: 653587 - DNA, 19 bp, Mus musculus
  siRNA target sequence for Atp6v0a2 (NM_011596.1,1129-1147).
ccgcaccaacaaattcact

SEQ ID NO: 653588 - DNA, 19 bp, Mus musculus
  siRNA target sequence for Atp6v0a2 (NM_011596.1,1266-1284).
ggcacggctttgtcatgtt

SEQ ID NO: 653589 - DNA, 19 bp, Mus musculus
  siRNA target sequence for Atp6v0a2 (NM_011596.1,1292-1310).
gccctcttactggtgttaa

SEQ ID NO: 653590 - DNA, 19 bp, Mus musculus
  siRNA target sequence for Atp6v0a2 (NM_011596.1,1293-1311).
ccctcttactggtgttaaa

SEQ ID NO: 653591 - DNA, 19 bp, Mus musculus
  siRNA target sequence for Atp6v0a2 (NM_011596.1,1294-1312).
cctcttactggtgttaaat

SEQ ID NO: 653592 - DNA, 19 bp, Mus musculus
  siRNA target sequence for Atp6v0a2 (NM_011596.1,1516-1534).
gaagatggtactttggaat

SEQ ID NO: 653593 - DNA, 19 bp, Mus musculus
  siRNA target sequence for Atp6v0a2 (NM_011596.1,1575-1593).
cgaatatccctggagtttt

SEQ ID NO: 653594 - DNA, 19 bp, Mus musculus
  siRNA target sequence for Atp6v0a2 (NM_011596.1,1715-1733).
ggtgttgttctgggaatat

SEQ ID NO: 653595 - DNA, 19 bp, Mus musculus
  siRNA target sequence for Atp6v0a2 (NM_011596.1,1716-1734).
gtgttgttctgggaatatt

SEQ ID NO: 653596 - DNA, 19 bp, Mus musculus
  siRNA target sequence for Atp6v0a2 (NM_011596.1,1889-1907).
ctgatcgagttcattaaca

SEQ ID NO: 653597 - DNA, 19 bp, Mus musculus
  siRNA target sequence for Atp6v0a2 (NM_011596.1,2000-2018).
cccgtgctcttcttaggaa

SEQ ID NO: 653598 - DNA, 19 bp, Mus musculus
  siRNA target sequence for Atp6v0a2 (NM_011596.1,2011-2029).
cttaggaaagccgcttttt

SEQ ID NO: 653599 - DNA, 19 bp, Mus musculus
  siRNA target sequence for Atp6v0a2 (NM_011596.1,2068-2086).
gagccggagcggttacaca

SEQ ID NO: 653600 - DNA, 19 bp, Mus musculus
  siRNA target sequence for Atp6v0a2 (NM_011596.1,2125-2143).
gggcaaccaggacatagaa

SEQ ID NO: 653601 - DNA, 19 bp, Mus musculus
  siRNA target sequence for Atp6v0a2 (NM_011596.1,2180-2198).
gtgacgtgtgaggagttta

SEQ ID NO: 653602 - DNA, 19 bp, Mus musculus
  siRNA target sequence for Atp6v0a2 (NM_011596.1,2184-2202).
cgtgtgaggagtttaactt

SEQ ID NO: 653603 - DNA, 19 bp, Mus musculus
  siRNA target sequence for Atp6v0a2 (NM_011596.1,2477-2495).
cactgggtagaatttcaga

SEQ ID NO: 653604 - DNA, 19 bp, Mus musculus
  siRNA target sequence for Atp6v0a2 (NM_011596.1,2551-2569).
ctcctccaagttcagtaat

SEQ ID NO: 653605 - DNA, 19 bp, Mus musculus
  siRNA target sequence for Atp6v0a2 (NM_011596.1,2554-2572).
ctccaagttcagtaatgat

SEQ ID NO: 653606 - DNA, 19 bp, Mus musculus
  siRNA target sequence for Slc30a6 (NM_144798.2,38-56).
ggggacgattcatctcttt

SEQ ID NO: 653607 - DNA, 19 bp, Mus musculus
  siRNA target sequence for Slc30a6 (NM_144798.2,43-61).
cgattcatctctttcgaaa

SEQ ID NO: 653608 - DNA, 19 bp, Mus musculus
  siRNA target sequence for Slc30a6 (NM_144798.2,57-75).
cgaaagccacagagatctt

SEQ ID NO: 653609 - DNA, 19 bp, Mus musculus
  siRNA target sequence for Slc30a6 (NM_144798.2,82-100).
gaaagttactacaggaatt

SEQ ID NO: 653610 - DNA, 19 bp, Mus musculus
  siRNA target sequence for Slc30a6 (NM_144798.2,200-218).
caacagcatcgcattaact

SEQ ID NO: 653611 - DNA, 19 bp, Mus musculus
  siRNA target sequence for Slc30a6 (NM_144798.2,209-227).
cgcattaactgcctatact

SEQ ID NO: 653612 - DNA, 19 bp, Mus musculus
  siRNA target sequence for Slc30a6 (NM_144798.2,236-254).
catctttgatctctttagt

SEQ ID NO: 653613 - DNA, 19 bp, Mus musculus
  siRNA target sequence for Slc30a6 (NM_144798.2,282-300).
gtaatgatgaggaaaccta

SEQ ID NO: 653614 - DNA, 19 bp, Mus musculus
  siRNA target sequence for Slc30a6 (NM_144798.2,298-316).
ctagccctgtctattcatt

SEQ ID NO: 653615 - DNA, 19 bp, Mus musculus
  siRNA target sequence for Slc30a6 (NM_144798.2,319-337).
ggtttgaaagattagaagt

SEQ ID NO: 653616 - DNA, 19 bp, Mus musculus
  siRNA target sequence for Slc30a6 (NM_144798.2,355-373).
ctactgtcttggcacaatt

SEQ ID NO: 653617 - DNA, 19 bp, Mus musculus
  siRNA target sequence for Slc30a6 (NM_144798.2,375-393).
ggagccctctttatactaa

SEQ ID NO: 653618 - DNA, 19 bp, Mus musculus
  siRNA target sequence for Slc30a6 (NM_144798.2,379-397).
ccctctttatactaaaaga

SEQ ID NO: 653619 - DNA, 19 bp, Mus musculus
  siRNA target sequence for Slc30a6 (NM_144798.2,383-401).
ctttatactaaaagaaagt

SEQ ID NO: 653620 - DNA, 19 bp, Mus musculus
  siRNA target sequence for Slc30a6 (NM_144798.2,434-452).
cacgggaagattgttagtt

SEQ ID NO: 653621 - DNA, 19 bp, Mus musculus
  siRNA target sequence for Slc30a6 (NM_144798.2,442-460).
gattgttagttggtacttt

SEQ ID NO: 653622 - DNA, 19 bp, Mus musculus
  siRNA target sequence for Slc30a6 (NM_144798.2,480-498).
ctgttcacgatgctttcta

SEQ ID NO: 653623 - DNA, 19 bp, Mus musculus
  siRNA target sequence for Slc30a6 (NM_144798.2,623-641).
ccgcatgaatccgtttgtt

SEQ ID NO: 653624 - DNA, 19 bp, Mus musculus
  siRNA target sequence for Slc30a6 (NM_144798.2,625-643).
gcatgaatccgtttgttct

SEQ ID NO: 653625 - DNA, 19 bp, Mus musculus
  siRNA target sequence for Slc30a6 (NM_144798.2,629-647).
gaatccgtttgttctgatt

SEQ ID NO: 653626 - DNA, 19 bp, Mus musculus
  siRNA target sequence for Slc30a6 (NM_144798.2,803-821).
gacaacaccacctcatgtt

SEQ ID NO: 653627 - DNA, 19 bp, Mus musculus
  siRNA target sequence for Slc30a6 (NM_144798.2,805-823).
caacaccacctcatgttat

SEQ ID NO: 653628 - DNA, 19 bp, Mus musculus
  siRNA target sequence for Slc30a6 (NM_144798.2,830-848).
gttggacaaactgattaga

SEQ ID NO: 653629 - DNA, 19 bp, Mus musculus
  siRNA target sequence for Slc30a6 (NM_144798.2,879-897).
gtccgaaatgaacactttt

SEQ ID NO: 653630 - DNA, 19 bp, Mus musculus
  siRNA target sequence for Slc30a6 (NM_144798.2,948-966).
cgagatgcgaacgaacaaa

SEQ ID NO: 653631 - DNA, 19 bp, Mus musculus
  siRNA target sequence for Slc30a6 (NM_144798.2,949-967).
gagatgcgaacgaacaaat

SEQ ID NO: 653632 - DNA, 19 bp, Mus musculus
  siRNA target sequence for Slc30a6 (NM_144798.2,1012-1030).
cgctgactgttcagatctt

SEQ ID NO: 653633 - DNA, 19 bp, Mus musculus
  siRNA target sequence for Slc30a6 (NM_144798.2,1074-1092).
gcgcccaacgtcctaaact

SEQ ID NO: 653634 - DNA, 19 bp, Mus musculus
  siRNA target sequence for Slc30a6 (NM_144798.2,1075-1093).
cgcccaacgtcctaaactt

SEQ ID NO: 653635 - DNA, 19 bp, Mus musculus
  siRNA target sequence for Slc30a6 (NM_144798.2,1182-1200).
ccacctccggagttttcat

SEQ ID NO: 653636 - DNA, 19 bp, Mus musculus
  siRNA target sequence for Slc30a6 (NM_144798.2,1183-1201).
cacctccggagttttcatt

SEQ ID NO: 653637 - DNA, 19 bp, Mus musculus
  siRNA target sequence for Slc30a6 (NM_144798.2,1188-1206).
ccggagttttcatttaata

SEQ ID NO: 653638 - DNA, 19 bp, Mus musculus
  siRNA target sequence for Slc30a6 (NM_144798.2,1220-1238).
cgtgagcccggttattctt

SEQ ID NO: 653639 - DNA, 19 bp, Mus musculus
  siRNA target sequence for Slc30a6 (NM_144798.2,1225-1243).
gcccggttattcttctgaa

SEQ ID NO: 653640 - DNA, 19 bp, Mus musculus
  siRNA target sequence for Slc30a6 (NM_144798.2,1248-1266).
cagacaaggccatatagtt

SEQ ID NO: 653641 - DNA, 19 bp, Mus musculus
  siRNA target sequence for Slc30a6 (NM_144798.2,1366-1384).
cacatataccaagtagata

SEQ ID NO: 653642 - DNA, 19 bp, Mus musculus
  siRNA target sequence for Rhbg (NM_021375.2,293-311).
gcagtgtgggctttacctt

SEQ ID NO: 653643 - DNA, 19 bp, Mus musculus
  siRNA target sequence for Rhbg (NM_021375.2,521-539).
gcgtcaacgagtttatact

SEQ ID NO: 653644 - DNA, 19 bp, Mus musculus
  siRNA target sequence for Rhbg (NM_021375.2,566-584).
ctggagggtccatgacaat

SEQ ID NO: 653645 - DNA, 19 bp, Mus musculus
  siRNA target sequence for Rhbg (NM_021375.2,569-587).
gagggtccatgacaattca

SEQ ID NO: 653646 - DNA, 19 bp, Mus musculus
  siRNA target sequence for Rhbg (NM_021375.2,664-682).
cagagctctgtctacaact

SEQ ID NO: 653647 - DNA, 19 bp, Mus musculus
  siRNA target sequence for Rhbg (NM_021375.2,775-793).
cggaccgtggtcaacacat

SEQ ID NO: 653648 - DNA, 19 bp, Mus musculus
  siRNA target sequence for Rhbg (NM_021375.2,776-794).
ggaccgtggtcaacacata

SEQ ID NO: 653649 - DNA, 19 bp, Mus musculus
  siRNA target sequence for Rhbg (NM_021375.2,779-797).
ccgtggtcaacacatacta

SEQ ID NO: 653650 - DNA, 19 bp, Mus musculus
  siRNA target sequence for Rhbg (NM_021375.2,808-826).
gcaagcaccctcagtactt

SEQ ID NO: 653651 - DNA, 19 bp, Mus musculus
  siRNA target sequence for Rhbg (NM_021375.2,809-827).
caagcaccctcagtacttt

SEQ ID NO: 653652 - DNA, 19 bp, Mus musculus
  siRNA target sequence for Rhbg (NM_021375.2,983-1001).
ccacactggggtataagtt

SEQ ID NO: 653653 - DNA, 19 bp, Mus musculus
  siRNA target sequence for Rhbg (NM_021375.2,986-1004).
cactggggtataagttctt

SEQ ID NO: 653654 - DNA, 19 bp, Mus musculus
  siRNA target sequence for Rhbg (NM_021375.2,999-1017).
gttctttacgcctatcctt

SEQ ID NO: 653655 - DNA, 19 bp, Mus musculus
  siRNA target sequence for Rhbg (NM_021375.2,1119-1137).
cacccacgaagcttatgga

SEQ ID NO: 653656 - DNA, 19 bp, Mus musculus
  siRNA target sequence for Rhbg (NM_021375.2,1190-1208).
cgtctcaggccgtgtatca

SEQ ID NO: 653657 - DNA, 19 bp, Mus musculus
  siRNA target sequence for Rhbg (NM_021375.2,1210-1228).
ctcttcggaatgtttgtca

SEQ ID NO: 653658 - DNA, 19 bp, Mus musculus
  siRNA target sequence for Rhced (NM_011270.2,159-177).
caagtcctccggaatttga

SEQ ID NO: 653659 - DNA, 19 bp, Mus musculus
  siRNA target sequence for Rhced (NM_011270.2,273-291).
ggggtgcagggaacaatct

SEQ ID NO: 653660 - DNA, 19 bp, Mus musculus
  siRNA target sequence for Rhced (NM_011270.2,274-292).
gggtgcagggaacaatctt

SEQ ID NO: 653661 - DNA, 19 bp, Mus musculus
  siRNA target sequence for Rhced (NM_011270.2,315-333).
gtcctccaatggaacaaga

SEQ ID NO: 653662 - DNA, 19 bp, Mus musculus
  siRNA target sequence for Rhced (NM_011270.2,482-500).
cgacgagaaggtcttcaaa

SEQ ID NO: 653663 - DNA, 19 bp, Mus musculus
  siRNA target sequence for Rhced (NM_011270.2,483-501).
gacgagaaggtcttcaaaa

SEQ ID NO: 653664 - DNA, 19 bp, Mus musculus
  siRNA target sequence for Rhced (NM_011270.2,486-504).
gagaaggtcttcaaaatga

SEQ ID NO: 653665 - DNA, 19 bp, Mus musculus
  siRNA target sequence for Rhced (NM_011270.2,544-562).
cctattttgggctaactgt

SEQ ID NO: 653666 - DNA, 19 bp, Mus musculus
  siRNA target sequence for Rhced (NM_011270.2,887-905).
gatttcttcaccttggatt

SEQ ID NO: 653667 - DNA, 19 bp, Mus musculus
  siRNA target sequence for Rhced (NM_011270.2,921-939).
ctcatagctgggttgatct

SEQ ID NO: 653668 - DNA, 19 bp, Mus musculus
  siRNA target sequence for Rhced (NM_011270.2,958-976).
gtccacgggcgtgtttgaa

SEQ ID NO: 653669 - DNA, 19 bp, Mus musculus
  siRNA target sequence for Rhced (NM_011270.2,1035-1053).
ggagcacttacctactact

SEQ ID NO: 653670 - DNA, 19 bp, Mus musculus
  siRNA target sequence for Rhced (NM_011270.2,1103-1121).
ccagacggtcactcacatt

SEQ ID NO: 653671 - DNA, 19 bp, Mus musculus
  siRNA target sequence for Rhced (NM_011270.2,1213-1231).
cggccaagtattttgatga

SEQ ID NO: 653672 - DNA, 19 bp, Mus musculus
  siRNA target sequence for Rhced (NM_011270.2,1254-1272).
cacttggcggttggatttt

SEQ ID NO: 653673 - DNA, 19 bp, Mus musculus
  siRNA target sequence for Rhcg (NM_019799.1,276-294).
gacgttgagaacgagtttt

SEQ ID NO: 653674 - DNA, 19 bp, Mus musculus
  siRNA target sequence for Rhcg (NM_019799.1,385-403).
gcgctgtaggcttcaactt

SEQ ID NO: 653675 - DNA, 19 bp, Mus musculus
  siRNA target sequence for Rhcg (NM_019799.1,444-462).
cagggatggttccattact

SEQ ID NO: 653676 - DNA, 19 bp, Mus musculus
  siRNA target sequence for Rhcg (NM_019799.1,446-464).
gggatggttccattacttt

SEQ ID NO: 653677 - DNA, 19 bp, Mus musculus
  siRNA target sequence for Rhcg (NM_019799.1,448-466).
gatggttccattactttga

SEQ ID NO: 653678 - DNA, 19 bp, Mus musculus
  siRNA target sequence for Rhcg (NM_019799.1,483-501).
ctgagcgtcgagaacatca

SEQ ID NO: 653679 - DNA, 19 bp, Mus musculus
  siRNA target sequence for Rhcg (NM_019799.1,567-585).
ccgatgcagctgctcatta

SEQ ID NO: 653680 - DNA, 19 bp, Mus musculus
  siRNA target sequence for Rhcg (NM_019799.1,568-586).
cgatgcagctgctcattat

SEQ ID NO: 653681 - DNA, 19 bp, Mus musculus
  siRNA target sequence for Rhcg (NM_019799.1,654-672).
gatgcagggggctctatga

SEQ ID NO: 653682 - DNA, 19 bp, Mus musculus
  siRNA target sequence for Rhcg (NM_019799.1,776-794).
ggaccttttcgccatgatt

SEQ ID NO: 653683 - DNA, 19 bp, Mus musculus
  siRNA target sequence for Rhcg (NM_019799.1,867-885).
cgagcagccctcaatacct

SEQ ID NO: 653684 - DNA, 19 bp, Mus musculus
  siRNA target sequence for Rhcg (NM_019799.1,868-886).
gagcagccctcaataccta

SEQ ID NO: 653685 - DNA, 19 bp, Mus musculus
  siRNA target sequence for Rhcg (NM_019799.1,909-927).
ctaaccacagtgacagtat

SEQ ID NO: 653686 - DNA, 19 bp, Mus musculus
  siRNA target sequence for Rhcg (NM_019799.1,1006-1024).
gcacagctgcggagatgat

SEQ ID NO: 653687 - DNA, 19 bp, Mus musculus
  siRNA target sequence for Rhcg (NM_019799.1,1044-1062).
ctcatcgtggggttcttct

SEQ ID NO: 653688 - DNA, 19 bp, Mus musculus
  siRNA target sequence for Rhcg (NM_019799.1,1073-1091).
ctccaccctaggatttgca

SEQ ID NO: 653689 - DNA, 19 bp, Mus musculus
  siRNA target sequence for Rhcg (NM_019799.1,1079-1097).
cctaggatttgcataccta

SEQ ID NO: 653690 - DNA, 19 bp, Mus musculus
  siRNA target sequence for Rhcg (NM_019799.1,1080-1098).
ctaggatttgcatacctaa

SEQ ID NO: 653691 - DNA, 19 bp, Mus musculus
  siRNA target sequence for Rhcg (NM_019799.1,1157-1175).
cggcattcctggcatcata

SEQ ID NO: 653692 - DNA, 19 bp, Mus musculus
  siRNA target sequence for Rhcg (NM_019799.1,1234-1252).
cagggatagtccattcctt

SEQ ID NO: 653693 - DNA, 19 bp, Mus musculus
  siRNA target sequence for Rhcg (NM_019799.1,1250-1268).
cttcggcttcgggagttat

SEQ ID NO: 653694 - DNA, 19 bp, Mus musculus
  siRNA target sequence for Rhcg (NM_019799.1,1255-1273).
gcttcgggagttataagat

SEQ ID NO: 653695 - DNA, 19 bp, Mus musculus
  siRNA target sequence for Rhcg (NM_019799.1,1293-1311).
cagggcaggtcccagatat

SEQ ID NO: 653696 - DNA, 19 bp, Mus musculus
  siRNA target sequence for Rhcg (NM_019799.1,1448-1466).
ggtgaacactgtctacatt

SEQ ID NO: 653697 - DNA, 19 bp, Mus musculus
  siRNA target sequence for Rhcg (NM_019799.1,1469-1487).
cgaggaccttgctcacaaa

SEQ ID NO: 653698 - DNA, 19 bp, Mus musculus
  siRNA target sequence for Rhcg (NM_019799.1,1476-1494).
cttgctcacaaacattcta

SEQ ID NO: 653699 - DNA, 19 bp, Mus musculus
  siRNA target sequence for Rhcg (NM_019799.1,1564-1582).
cgacacctccagtatcctt

SEQ ID NO: 653700 - DNA, 19 bp, Mus musculus
  siRNA target sequence for Rhcg (NM_019799.1,1569-1587).
cctccagtatccttagcaa

SEQ ID NO: 653701 - DNA, 19 bp, Mus musculus
  siRNA target sequence for Slc22a1 (NM_009202.2,203-221).
ggagcacgttggagagttt

SEQ ID NO: 653702 - DNA, 19 bp, Mus musculus
  siRNA target sequence for Slc22a1 (NM_009202.2,670-688).
ccctggttgtgggttacat

SEQ ID NO: 653703 - DNA, 19 bp, Mus musculus
  siRNA target sequence for Slc22a1 (NM_009202.2,671-689).
cctggttgtgggttacatt

SEQ ID NO: 653704 - DNA, 19 bp, Mus musculus
  siRNA target sequence for Slc22a1 (NM_009202.2,743-761).
cctgtctggcgtgttaaca

SEQ ID NO: 653705 - DNA, 19 bp, Mus musculus
  siRNA target sequence for Slc22a1 (NM_009202.2,762-780).
gcggtggccccagactata

SEQ ID NO: 653706 - DNA, 19 bp, Mus musculus
  siRNA target sequence for Slc22a1 (NM_009202.2,764-782).
ggtggccccagactataca

SEQ ID NO: 653707 - DNA, 19 bp, Mus musculus
  siRNA target sequence for Slc22a1 (NM_009202.2,847-865).
ccttgatcacagagtttgt

SEQ ID NO: 653708 - DNA, 19 bp, Mus musculus
  siRNA target sequence for Slc22a1 (NM_009202.2,1066-1084).
ccactcaagcggtaaggat

SEQ ID NO: 653709 - DNA, 19 bp, Mus musculus
  siRNA target sequence for Slc22a1 (NM_009202.2,1067-1085).
cactcaagcggtaaggata

SEQ ID NO: 653710 - DNA, 19 bp, Mus musculus
  siRNA target sequence for Slc22a1 (NM_009202.2,1069-1087).
ctcaagcggtaaggataat

SEQ ID NO: 653711 - DNA, 19 bp, Mus musculus
  siRNA target sequence for Slc22a1 (NM_009202.2,1082-1100).
gataatggagcaaattgca

SEQ ID NO: 653712 - DNA, 19 bp, Mus musculus
  siRNA target sequence for Slc22a1 (NM_009202.2,1166-1184).
gaggcggagtccttcgttt

SEQ ID NO: 653713 - DNA, 19 bp, Mus musculus
  siRNA target sequence for Slc22a1 (NM_009202.2,1220-1238).
caccctcatcctgatgtat

SEQ ID NO: 653714 - DNA, 19 bp, Mus musculus
  siRNA target sequence for Slc22a1 (NM_009202.2,1224-1242).
ctcatcctgatgtatctat

SEQ ID NO: 653715 - DNA, 19 bp, Mus musculus
  siRNA target sequence for Slc22a1 (NM_009202.2,1305-1323).
ctctacctggacttctttt

SEQ ID NO: 653716 - DNA, 19 bp, Mus musculus
  siRNA target sequence for Slc22a1 (NM_009202.2,1394-1412).
cccaatagcggcatcaaat

SEQ ID NO: 653717 - DNA, 19 bp, Mus musculus
  siRNA target sequence for Slc22a1 (NM_009202.2,1461-1479).
ctgcattggttgaatgtga

SEQ ID NO: 653718 - DNA, 19 bp, Mus musculus
  siRNA target sequence for Slc22a2 (NM_013667.1,95-113).
gccgaccgtggatgatatt

SEQ ID NO: 653719 - DNA, 19 bp, Mus musculus
  siRNA target sequence for Slc22a2 (NM_013667.1,97-115).
cgaccgtggatgatattct

SEQ ID NO: 653720 - DNA, 19 bp, Mus musculus
  siRNA target sequence for Slc22a2 (NM_013667.1,104-122).
ggatgatattctagaacat

SEQ ID NO: 653721 - DNA, 19 bp, Mus musculus
  siRNA target sequence for Slc22a2 (NM_013667.1,127-145).
gggaattccaccttttcca

SEQ ID NO: 653722 - DNA, 19 bp, Mus musculus
  siRNA target sequence for Slc22a2 (NM_013667.1,539-557).
ggacctgtttcagtcatta

SEQ ID NO: 653723 - DNA, 19 bp, Mus musculus
  siRNA target sequence for Slc22a2 (NM_013667.1,543-561).
ctgtttcagtcattagtga

SEQ ID NO: 653724 - DNA, 19 bp, Mus musculus
  siRNA target sequence for Slc22a2 (NM_013667.1,644-662).
cctcatcaatgctatctct

SEQ ID NO: 653725 - DNA, 19 bp, Mus musculus
  siRNA target sequence for Slc22a2 (NM_013667.1,665-683).
ggttctcatggcgatttca

SEQ ID NO: 653726 - DNA, 19 bp, Mus musculus
  siRNA target sequence for Slc22a2 (NM_013667.1,674-692).
ggcgatttcacccaactat

SEQ ID NO: 653727 - DNA, 19 bp, Mus musculus
  siRNA target sequence for Slc22a2 (NM_013667.1,745-763).
ggttaattggctatatcct

SEQ ID NO: 653728 - DNA, 19 bp, Mus musculus
  siRNA target sequence for Slc22a2 (NM_013667.1,754-772).
gctatatcctgattacaga

SEQ ID NO: 653729 - DNA, 19 bp, Mus musculus
  siRNA target sequence for Slc22a2 (NM_013667.1,755-773).
ctatatcctgattacagaa

SEQ ID NO: 653730 - DNA, 19 bp, Mus musculus
  siRNA target sequence for Slc22a2 (NM_013667.1,785-803).
gggctatcgcagaacagta

SEQ ID NO: 653731 - DNA, 19 bp, Mus musculus
  siRNA target sequence for Slc22a2 (NM_013667.1,796-814).
gaacagtagggatttgtta

SEQ ID NO: 653732 - DNA, 19 bp, Mus musculus
  siRNA target sequence for Slc22a2 (NM_013667.1,801-819).
gtagggatttgttaccaaa

SEQ ID NO: 653733 - DNA, 19 bp, Mus musculus
  siRNA target sequence for Slc22a2 (NM_013667.1,962-980).
gatctcccagaacaaaaat

SEQ ID NO: 653734 - DNA, 19 bp, Mus musculus
  siRNA target sequence for Slc22a2 (NM_013667.1,1065-1083).
gaggatactggcatgaaat

SEQ ID NO: 653735 - DNA, 19 bp, Mus musculus
  siRNA target sequence for Slc22a2 (NM_013667.1,1068-1086).
gatactggcatgaaattga

SEQ ID NO: 653736 - DNA, 19 bp, Mus musculus
  siRNA target sequence for Slc22a2 (NM_013667.1,1106-1124).
ggtcagaacccctcagata

SEQ ID NO: 653737 - DNA, 19 bp, Mus musculus
  siRNA target sequence for Slc22a2 (NM_013667.1,1107-1125).
gtcagaacccctcagataa

SEQ ID NO: 653738 - DNA, 19 bp, Mus musculus
  siRNA target sequence for Slc22a2 (NM_013667.1,1131-1149).
catacgttgatcttgatgt

SEQ ID NO: 653739 - DNA, 19 bp, Mus musculus
  siRNA target sequence for Slc22a2 (NM_013667.1,1135-1153).
cgttgatcttgatgtacaa

SEQ ID NO: 653740 - DNA, 19 bp, Mus musculus
  siRNA target sequence for Slc22a2 (NM_013667.1,1343-1361).
ctgcctagcttcggttttt

SEQ ID NO: 653741 - DNA, 19 bp, Mus musculus
  siRNA target sequence for Slc22a2 (NM_013667.1,1423-1441).
ccatagcctacgaaatggt

SEQ ID NO: 653742 - DNA, 19 bp, Mus musculus
  siRNA target sequence for Slc22a2 (NM_013667.1,1494-1512).
cttgtctgctcctctatgt

SEQ ID NO: 653743 - DNA, 19 bp, Mus musculus
  siRNA target sequence for Slc22a2 (NM_013667.1,1574-1592).
gttcccgctggtcgtattt

SEQ ID NO: 653744 - DNA, 19 bp, Mus musculus
  siRNA target sequence for Slc22a2 (NM_013667.1,1612-1630).
ctgggggacttgtgctatt

SEQ ID NO: 653745 - DNA, 19 bp, Mus musculus
  siRNA target sequence for Slc22a2 (NM_013667.1,1615-1633).
ggggacttgtgctattgct

SEQ ID NO: 653746 - DNA, 19 bp, Mus musculus
  siRNA target sequence for Slc22a2 (NM_013667.1,1717-1735).
gaatttacctccaagttaa

SEQ ID NO: 653747 - DNA, 19 bp, Mus musculus
  siRNA target sequence for A230035L05Rik (NM_177388.2,293-311).
gagtggaggaggttttgta

SEQ ID NO: 653748 - DNA, 19 bp, Mus musculus
  siRNA target sequence for A230035L05Rik (NM_177388.2,312-330).
gattggactttaaatttaa

SEQ ID NO: 653749 - DNA, 19 bp, Mus musculus
  siRNA target sequence for A230035L05Rik (NM_177388.2,334-352).
caattcaatctgacaagtt

SEQ ID NO: 653750 - DNA, 19 bp, Mus musculus
  siRNA target sequence for A230035L05Rik (NM_177388.2,347-365).
caagtttttgaacttactt

SEQ ID NO: 653751 - DNA, 19 bp, Mus musculus
  siRNA target sequence for A230035L05Rik (NM_177388.2,407-425).
caggcataaaaaagtaaat

SEQ ID NO: 653752 - DNA, 19 bp, Mus musculus
  siRNA target sequence for A230035L05Rik (NM_177388.2,559-577).
gccccaagtacgatgacta

SEQ ID NO: 653753 - DNA, 19 bp, Mus musculus
  siRNA target sequence for A230035L05Rik (NM_177388.2,560-578).
ccccaagtacgatgactat

SEQ ID NO: 653754 - DNA, 19 bp, Mus musculus
  siRNA target sequence for A230035L05Rik (NM_177388.2,649-667).
ccagcgagggcgatgatgt

SEQ ID NO: 653755 - DNA, 19 bp, Mus musculus
  siRNA target sequence for A230035L05Rik (NM_177388.2,772-790).
gcatggttttggacatagt

SEQ ID NO: 653756 - DNA, 19 bp, Mus musculus
  siRNA target sequence for A230035L05Rik (NM_177388.2,794-812).
gcactgggaggtgttcaaa

SEQ ID NO: 653757 - DNA, 19 bp, Mus musculus
  siRNA target sequence for A230035L05Rik (NM_177388.2,797-815).
ctgggaggtgttcaaaaat

SEQ ID NO: 653758 - DNA, 19 bp, Mus musculus
  siRNA target sequence for A230035L05Rik (NM_177388.2,875-893).
gacgctggcttctcgatta

SEQ ID NO: 653759 - DNA, 19 bp, Mus musculus
  siRNA target sequence for A230035L05Rik (NM_177388.2,878-896).
gctggcttctcgattatct

SEQ ID NO: 653760 - DNA, 19 bp, Mus musculus
  siRNA target sequence for A230035L05Rik (NM_177388.2,879-897).
ctggcttctcgattatcta

SEQ ID NO: 653761 - DNA, 19 bp, Mus musculus
  siRNA target sequence for A230035L05Rik (NM_177388.2,929-947).
cattgagaagtggaatcta

SEQ ID NO: 653762 - DNA, 19 bp, Mus musculus
  siRNA target sequence for A230035L05Rik (NM_177388.2,955-973).
gcaacttggctttaaagca

SEQ ID NO: 653763 - DNA, 19 bp, Mus musculus
  siRNA target sequence for A230035L05Rik (NM_177388.2,1115-1133).
gcagggaataataatggtt

SEQ ID NO: 653764 - DNA, 19 bp, Mus musculus
  siRNA target sequence for A230035L05Rik (NM_177388.2,1186-1204).
cacccattgctgctagttt

SEQ ID NO: 653765 - DNA, 19 bp, Mus musculus
  siRNA target sequence for A230035L05Rik (NM_177388.2,1190-1208).
cattgctgctagttttggt

SEQ ID NO: 653766 - DNA, 19 bp, Mus musculus
  siRNA target sequence for A230035L05Rik (NM_177388.2,1214-1232).
gataactctcgccatatta

SEQ ID NO: 653767 - DNA, 19 bp, Mus musculus
  siRNA target sequence for A230035L05Rik (NM_177388.2,1223-1241).
cgccatattagcttggata

SEQ ID NO: 653768 - DNA, 19 bp, Mus musculus
  siRNA target sequence for A230035L05Rik (NM_177388.2,1224-1242).
gccatattagcttggataa

SEQ ID NO: 653769 - DNA, 19 bp, Mus musculus
  siRNA target sequence for A230035L05Rik (NM_177388.2,1237-1255).
ggataagtcagggtttgta

SEQ ID NO: 653770 - DNA, 19 bp, Mus musculus
  siRNA target sequence for A230035L05Rik (NM_177388.2,1263-1281).
cttgagacatattattaca

SEQ ID NO: 653771 - DNA, 19 bp, Mus musculus
  siRNA target sequence for A230035L05Rik (NM_177388.2,1441-1459).
ctgtatctgacccaaactt

SEQ ID NO: 653772 - DNA, 19 bp, Mus musculus
  siRNA target sequence for A230035L05Rik (NM_177388.2,1461-1479).
gttgggattgttgtttaca

SEQ ID NO: 653773 - DNA, 19 bp, Mus musculus
  siRNA target sequence for A230035L05Rik (NM_177388.2,1473-1491).
gtttacacgccagttatca

SEQ ID NO: 653774 - DNA, 19 bp, Mus musculus
  siRNA target sequence for A230035L05Rik (NM_177388.2,1537-1555).
ctacctacctccatttaca

SEQ ID NO: 653775 - DNA, 19 bp, Mus musculus
  siRNA target sequence for A230035L05Rik (NM_177388.2,1620-1638).
ggttcaggagtgaacaata

SEQ ID NO: 653776 - DNA, 19 bp, Mus musculus
  siRNA target sequence for A230035L05Rik (NM_177388.2,1621-1639).
gttcaggagtgaacaataa

SEQ ID NO: 653777 - DNA, 19 bp, Mus musculus
  siRNA target sequence for A230035L05Rik (NM_177388.2,1726-1744).
ctctgactgtagtctttgt

SEQ ID NO: 653778 - DNA, 19 bp, Mus musculus
  siRNA target sequence for C820002P14Rik (NM_172816.1,348-366).
gagaacttatcttgtgaat

SEQ ID NO: 653779 - DNA, 19 bp, Mus musculus
  siRNA target sequence for C820002P14Rik (NM_172816.1,353-371).
cttatcttgtgaatgatca

SEQ ID NO: 653780 - DNA, 19 bp, Mus musculus
  siRNA target sequence for C820002P14Rik (NM_172816.1,393-411).
ccctctagacagagaactt

SEQ ID NO: 653781 - DNA, 19 bp, Mus musculus
  siRNA target sequence for C820002P14Rik (NM_172816.1,552-570).
ctgtgctgcttcagcaata

SEQ ID NO: 653782 - DNA, 19 bp, Mus musculus
  siRNA target sequence for C820002P14Rik (NM_172816.1,556-574).
gctgcttcagcaatatgct

SEQ ID NO: 653783 - DNA, 19 bp, Mus musculus
  siRNA target sequence for C820002P14Rik (NM_172816.1,565-583).
gcaatatgcttcatcttta

SEQ ID NO: 653784 - DNA, 19 bp, Mus musculus
  siRNA target sequence for C820002P14Rik (NM_172816.1,635-653).
ctgatgcggctcatctctt

SEQ ID NO: 653785 - DNA, 19 bp, Mus musculus
  siRNA target sequence for C820002P14Rik (NM_172816.1,637-655).
gatgcggctcatctcttaa

SEQ ID NO: 653786 - DNA, 19 bp, Mus musculus
  siRNA target sequence for C820002P14Rik (NM_172816.1,641-659).
cggctcatctcttaattga

SEQ ID NO: 653787 - DNA, 19 bp, Mus musculus
  siRNA target sequence for C820002P14Rik (NM_172816.1,814-832).
gcctgtgagcgccttttgt

SEQ ID NO: 653788 - DNA, 19 bp, Mus musculus
  siRNA target sequence for C820002P14Rik (NM_172816.1,815-833).
cctgtgagcgccttttgta

SEQ ID NO: 653789 - DNA, 19 bp, Mus musculus
  siRNA target sequence for C820002P14Rik (NM_172816.1,816-834).
ctgtgagcgccttttgtat

SEQ ID NO: 653790 - DNA, 19 bp, Mus musculus
  siRNA target sequence for C820002P14Rik (NM_172816.1,850-868).
caagcaggtatcatgatca

SEQ ID NO: 653791 - DNA, 19 bp, Mus musculus
  siRNA target sequence for C820002P14Rik (NM_172816.1,856-874).
ggtatcatgatcactgttt

SEQ ID NO: 653792 - DNA, 19 bp, Mus musculus
  siRNA target sequence for C820002P14Rik (NM_172816.1,884-902).
cagtggcagccaacattgt

SEQ ID NO: 653793 - DNA, 19 bp, Mus musculus
  siRNA target sequence for C820002P14Rik (NM_172816.1,892-910).
gccaacattgtactaacta

SEQ ID NO: 653794 - DNA, 19 bp, Mus musculus
  siRNA target sequence for C820002P14Rik (NM_172816.1,893-911).
ccaacattgtactaactat

SEQ ID NO: 653795 - DNA, 19 bp, Mus musculus
  siRNA target sequence for C820002P14Rik (NM_172816.1,988-1006).
catgccctgggggatgtat

SEQ ID NO: 653796 - DNA, 19 bp, Mus musculus
  siRNA target sequence for C820002P14Rik (NM_172816.1,992-1010).
ccctgggggatgtatttca

SEQ ID NO: 653797 - DNA, 19 bp, Mus musculus
  siRNA target sequence for C820002P14Rik (NM_172816.1,1047-1065).
ctttaagcctgactacaaa

SEQ ID NO: 653798 - DNA, 19 bp, Mus musculus
  siRNA target sequence for C820002P14Rik (NM_172816.1,1053-1071).
gcctgactacaaaattgct

SEQ ID NO: 653799 - DNA, 19 bp, Mus musculus
  siRNA target sequence for C820002P14Rik (NM_172816.1,1111-1129).
gccagcaccgtcatgatct

SEQ ID NO: 653800 - DNA, 19 bp, Mus musculus
  siRNA target sequence for C820002P14Rik (NM_172816.1,1115-1133).
gcaccgtcatgatcttaaa

SEQ ID NO: 653801 - DNA, 19 bp, Mus musculus
  siRNA target sequence for C820002P14Rik (NM_172816.1,1116-1134).
caccgtcatgatcttaaaa

SEQ ID NO: 653802 - DNA, 19 bp, Mus musculus
  siRNA target sequence for C820002P14Rik (NM_172816.1,1118-1136).
ccgtcatgatcttaaaaga

SEQ ID NO: 653803 - DNA, 19 bp, Mus musculus
  siRNA target sequence for C820002P14Rik (NM_172816.1,1120-1138).
gtcatgatcttaaaagact

SEQ ID NO: 653804 - DNA, 19 bp, Mus musculus
  siRNA target sequence for C820002P14Rik (NM_172816.1,1135-1153).
gacttctccatcttactca

SEQ ID NO: 653805 - DNA, 19 bp, Mus musculus
  siRNA target sequence for C820002P14Rik (NM_172816.1,1197-1215).
gatcatcctcgcagttgat

SEQ ID NO: 653806 - DNA, 19 bp, Mus musculus
  siRNA target sequence for C820002P14Rik (NM_172816.1,1254-1272).
gactgtgaaccaagtgatt

SEQ ID NO: 653807 - DNA, 19 bp, Mus musculus
  siRNA target sequence for C820002P14Rik (NM_172816.1,1314-1332).
gtctgtgcggacaggaatt

SEQ ID NO: 653808 - DNA, 19 bp, Mus musculus
  siRNA target sequence for C820002P14Rik (NM_172816.1,1366-1384).
cttaccattcagatagaat

SEQ ID NO: 653809 - DNA, 19 bp, Mus musculus
  siRNA target sequence for Sfxn1 (NM_027324.2,86-104).
ggaagtgccacccaacatt

SEQ ID NO: 653810 - DNA, 19 bp, Mus musculus
  siRNA target sequence for Sfxn1 (NM_027324.2,87-105).
gaagtgccacccaacatta

SEQ ID NO: 653811 - DNA, 19 bp, Mus musculus
  siRNA target sequence for Sfxn1 (NM_027324.2,90-108).
gtgccacccaacattaaca

SEQ ID NO: 653812 - DNA, 19 bp, Mus musculus
  siRNA target sequence for Sfxn1 (NM_027324.2,125-143).
ggaccagagcacgttcatt

SEQ ID NO: 653813 - DNA, 19 bp, Mus musculus
  siRNA target sequence for Sfxn1 (NM_027324.2,145-163).
gccgagccagtcacttctt

SEQ ID NO: 653814 - DNA, 19 bp, Mus musculus
  siRNA target sequence for Sfxn1 (NM_027324.2,147-165).
cgagccagtcacttcttca

SEQ ID NO: 653815 - DNA, 19 bp, Mus musculus
  siRNA target sequence for Sfxn1 (NM_027324.2,174-192).
gatcccagaaatatccttt

SEQ ID NO: 653816 - DNA, 19 bp, Mus musculus
  siRNA target sequence for Sfxn1 (NM_027324.2,196-214).
cgaacgaacagctagagaa

SEQ ID NO: 653817 - DNA, 19 bp, Mus musculus
  siRNA target sequence for Sfxn1 (NM_027324.2,197-215).
gaacgaacagctagagaat

SEQ ID NO: 653818 - DNA, 19 bp, Mus musculus
  siRNA target sequence for Sfxn1 (NM_027324.2,236-254).
ctacaggcaaggaatcgtt

SEQ ID NO: 653819 - DNA, 19 bp, Mus musculus
  siRNA target sequence for Sfxn1 (NM_027324.2,318-336).
cctgacaccggtgaaaaga

SEQ ID NO: 653820 - DNA, 19 bp, Mus musculus
  siRNA target sequence for Sfxn1 (NM_027324.2,321-339).
gacaccggtgaaaagatga

SEQ ID NO: 653821 - DNA, 19 bp, Mus musculus
  siRNA target sequence for Sfxn1 (NM_027324.2,360-378).
gctcaggtcccgatgaaca

SEQ ID NO: 653822 - DNA, 19 bp, Mus musculus
  siRNA target sequence for Sfxn1 (NM_027324.2,361-379).
ctcaggtcccgatgaacat

SEQ ID NO: 653823 - DNA, 19 bp, Mus musculus
  siRNA target sequence for Sfxn1 (NM_027324.2,429-447).
cttttctggcagtggataa

SEQ ID NO: 653824 - DNA, 19 bp, Mus musculus
  siRNA target sequence for Sfxn1 (NM_027324.2,494-512).
cgctcccctcactgtgaat

SEQ ID NO: 653825 - DNA, 19 bp, Mus musculus
  siRNA target sequence for Sfxn1 (NM_027324.2,496-514).
ctcccctcactgtgaatga

SEQ ID NO: 653826 - DNA, 19 bp, Mus musculus
  siRNA target sequence for Sfxn1 (NM_027324.2,515-533).
gctgggaacggcttatgtt

SEQ ID NO: 653827 - DNA, 19 bp, Mus musculus
  siRNA target sequence for Sfxn1 (NM_027324.2,518-536).
gggaacggcttatgtttct

SEQ ID NO: 653828 - DNA, 19 bp, Mus musculus
  siRNA target sequence for Sfxn1 (NM_027324.2,567-585).
ggactcaatgccttaacca

SEQ ID NO: 653829 - DNA, 19 bp, Mus musculus
  siRNA target sequence for Sfxn1 (NM_027324.2,587-605).
gcgtgtctccccactgata

SEQ ID NO: 653830 - DNA, 19 bp, Mus musculus
  siRNA target sequence for Sfxn1 (NM_027324.2,598-616).
cactgataggacgttttgt

SEQ ID NO: 653831 - DNA, 19 bp, Mus musculus
  siRNA target sequence for Sfxn1 (NM_027324.2,807-825).
cctccgtttatcatgaaca

SEQ ID NO: 653832 - DNA, 19 bp, Mus musculus
  siRNA target sequence for Sfxn1 (NM_027324.2,863-881).
gatgagtgcgccaatccaa

SEQ ID NO: 653833 - DNA, 19 bp, Mus musculus
  siRNA target sequence for Sfxn1 (NM_027324.2,884-902).
cacgttggttggcttttgt

SEQ ID NO: 653834 - DNA, 19 bp, Mus musculus
  siRNA target sequence for Sfxn1 (NM_027324.2,1017-1035).
cggcgtgtgtactttaaca

SEQ ID NO: 653835 - DNA, 19 bp, Mus musculus
  siRNA target sequence for Sfxn1 (NM_027324.2,1018-1036).
ggcgtgtgtactttaacaa

SEQ ID NO: 653836 - DNA, 19 bp, Mus musculus
  siRNA target sequence for Sfxn2 (NM_053196.2,120-138).
cggatctgtctggctttaa

SEQ ID NO: 653837 - DNA, 19 bp, Mus musculus
  siRNA target sequence for Sfxn2 (NM_053196.2,179-197).
cgcgtgaagcactttttta

SEQ ID NO: 653838 - DNA, 19 bp, Mus musculus
  siRNA target sequence for Sfxn2 (NM_053196.2,474-492).
gggtgaaccagtcctttaa

SEQ ID NO: 653839 - DNA, 19 bp, Mus musculus
  siRNA target sequence for Sfxn2 (NM_053196.2,559-577).
ctacttcacagctactact

SEQ ID NO: 653840 - DNA, 19 bp, Mus musculus
  siRNA target sequence for Sfxn2 (NM_053196.2,562-580).
cttcacagctactactact

SEQ ID NO: 653841 - DNA, 19 bp, Mus musculus
  siRNA target sequence for Sfxn2 (NM_053196.2,669-687).
ccgctaactgtgtcaatat

SEQ ID NO: 653842 - DNA, 19 bp, Mus musculus
  siRNA target sequence for Sfxn2 (NM_053196.2,678-696).
gtgtcaatatcccaatgat

SEQ ID NO: 653843 - DNA, 19 bp, Mus musculus
  siRNA target sequence for Sfxn2 (NM_053196.2,697-715).
gcgacagcaggaactcatt

SEQ ID NO: 653844 - DNA, 19 bp, Mus musculus
  siRNA target sequence for Sfxn2 (NM_053196.2,699-717).
gacagcaggaactcattca

SEQ ID NO: 653845 - DNA, 19 bp, Mus musculus
  siRNA target sequence for Sfxn2 (NM_053196.2,783-801).
gcatcgcacaagtggttat

SEQ ID NO: 653846 - DNA, 19 bp, Mus musculus
  siRNA target sequence for Sfxn2 (NM_053196.2,787-805).
cgcacaagtggttatctct

SEQ ID NO: 653847 - DNA, 19 bp, Mus musculus
  siRNA target sequence for Sfxn2 (NM_053196.2,1030-1048).
ggccaagtatggagaacaa

SEQ ID NO: 653848 - DNA, 19 bp, Mus musculus
  siRNA target sequence for Sfxn2 (NM_053196.2,1051-1069).
cctctttgtctactttaat

SEQ ID NO: 653849 - DNA, 19 bp, Mus musculus
  siRNA target sequence for Sfxn2 (NM_053196.2,1052-1070).
ctctttgtctactttaata

SEQ ID NO: 653850 - DNA, 19 bp, Mus musculus
  siRNA target sequence for Sfxn3 (NM_053197.2,224-242).
ggtgacctgcccttaaata

SEQ ID NO: 653851 - DNA, 19 bp, Mus musculus
  siRNA target sequence for Sfxn3 (NM_053197.2,225-243).
gtgacctgcccttaaatat

SEQ ID NO: 653852 - DNA, 19 bp, Mus musculus
  siRNA target sequence for Sfxn3 (NM_053197.2,227-245).
gacctgcccttaaatatca

SEQ ID NO: 653853 - DNA, 19 bp, Mus musculus
  siRNA target sequence for Sfxn3 (NM_053197.2,262-280).
gtgggaccaaagcacattt

SEQ ID NO: 653854 - DNA, 19 bp, Mus musculus
  siRNA target sequence for Sfxn3 (NM_053197.2,264-282).
gggaccaaagcacatttct

SEQ ID NO: 653855 - DNA, 19 bp, Mus musculus
  siRNA target sequence for Sfxn3 (NM_053197.2,265-283).
ggaccaaagcacatttcta

SEQ ID NO: 653856 - DNA, 19 bp, Mus musculus
  siRNA target sequence for Sfxn3 (NM_053197.2,426-444).
gagccaaatacgtgtatga

SEQ ID NO: 653857 - DNA, 19 bp, Mus musculus
  siRNA target sequence for Sfxn3 (NM_053197.2,428-446).
gccaaatacgtgtatgact

SEQ ID NO: 653858 - DNA, 19 bp, Mus musculus
  siRNA target sequence for Sfxn3 (NM_053197.2,481-499).
cttgattggccgtatgtca

SEQ ID NO: 653859 - DNA, 19 bp, Mus musculus
  siRNA target sequence for Sfxn3 (NM_053197.2,583-601).
ggtcaatcagtccttcaat

SEQ ID NO: 653860 - DNA, 19 bp, Mus musculus
  siRNA target sequence for Sfxn3 (NM_053197.2,899-917).
caggtggtgatatcaagaa

SEQ ID NO: 653861 - DNA, 19 bp, Mus musculus
  siRNA target sequence for Sfxn3 (NM_053197.2,1031-1049).
gtaggcttctgcttggtat

SEQ ID NO: 653862 - DNA, 19 bp, Mus musculus
  siRNA target sequence for Sfxn3 (NM_053197.2,1152-1170).
gcatcgatgtggtttacta

SEQ ID NO: 653863 - DNA, 19 bp, Mus musculus
  siRNA target sequence for Sfxn4 (NM_053198.1,64-82).
ccgaacgccaagccttttt

SEQ ID NO: 653864 - DNA, 19 bp, Mus musculus
  siRNA target sequence for Sfxn4 (NM_053198.1,136-154).
caattggaagcatagaaaa

SEQ ID NO: 653865 - DNA, 19 bp, Mus musculus
  siRNA target sequence for Sfxn4 (NM_053198.1,200-218).
cctggataaccaagtgatt

SEQ ID NO: 653866 - DNA, 19 bp, Mus musculus
  siRNA target sequence for Sfxn4 (NM_053198.1,225-243).
gcatggaataagagtcttt

SEQ ID NO: 653867 - DNA, 19 bp, Mus musculus
  siRNA target sequence for Sfxn4 (NM_053198.1,269-287).
gttgatcccccatcttttt

SEQ ID NO: 653868 - DNA, 19 bp, Mus musculus
  siRNA target sequence for Sfxn4 (NM_053198.1,272-290).
gatcccccatctttttcga

SEQ ID NO: 653869 - DNA, 19 bp, Mus musculus
  siRNA target sequence for Sfxn4 (NM_053198.1,338-356).
gatgccagacactggaata

SEQ ID NO: 653870 - DNA, 19 bp, Mus musculus
  siRNA target sequence for Sfxn4 (NM_053198.1,351-369).
ggaataaagtccatcattt

SEQ ID NO: 653871 - DNA, 19 bp, Mus musculus
  siRNA target sequence for Sfxn4 (NM_053198.1,391-409).
gatacaccacagcctttaa

SEQ ID NO: 653872 - DNA, 19 bp, Mus musculus
  siRNA target sequence for Sfxn4 (NM_053198.1,421-439).
gaaatgccagttatagtca

SEQ ID NO: 653873 - DNA, 19 bp, Mus musculus
  siRNA target sequence for Sfxn4 (NM_053198.1,441-459).
ggaccagtagagagaacat

SEQ ID NO: 653874 - DNA, 19 bp, Mus musculus
  siRNA target sequence for Sfxn4 (NM_053198.1,559-577).
ccttgccaatcgtctttct

SEQ ID NO: 653875 - DNA, 19 bp, Mus musculus
  siRNA target sequence for Sfxn4 (NM_053198.1,580-598).
cccaagtcagtggaatgaa

SEQ ID NO: 653876 - DNA, 19 bp, Mus musculus
  siRNA target sequence for Sfxn4 (NM_053198.1,581-599).
ccaagtcagtggaatgaat

SEQ ID NO: 653877 - DNA, 19 bp, Mus musculus
  siRNA target sequence for Sfxn4 (NM_053198.1,606-624).
gcatcccgcagttttgaaa

SEQ ID NO: 653878 - DNA, 19 bp, Mus musculus
  siRNA target sequence for Sfxn4 (NM_053198.1,685-703).
ctggaagaaaggctattaa

SEQ ID NO: 653879 - DNA, 19 bp, Mus musculus
  siRNA target sequence for Sfxn4 (NM_053198.1,815-833).
cgtgatcctgagaatgagt

SEQ ID NO: 653880 - DNA, 19 bp, Mus musculus
  siRNA target sequence for Sfxn4 (NM_053198.1,832-850).
gttccacattctttatgat

SEQ ID NO: 653881 - DNA, 19 bp, Mus musculus
  siRNA target sequence for Sfxn5 (NM_178639.2,127-145).
gtcgcttcaggcacttctt

SEQ ID NO: 653882 - DNA, 19 bp, Mus musculus
  siRNA target sequence for Sfxn5 (NM_178639.2,136-154).
ggcacttcttggacatcat

SEQ ID NO: 653883 - DNA, 19 bp, Mus musculus
  siRNA target sequence for Sfxn5 (NM_178639.2,155-173).
cgatcctcgaacactcttt

SEQ ID NO: 653884 - DNA, 19 bp, Mus musculus
  siRNA target sequence for Sfxn5 (NM_178639.2,159-177).
cctcgaacactctttgtca

SEQ ID NO: 653885 - DNA, 19 bp, Mus musculus
  siRNA target sequence for Sfxn5 (NM_178639.2,234-252).
ctgcgcccaggagttacaa

SEQ ID NO: 653886 - DNA, 19 bp, Mus musculus
  siRNA target sequence for Sfxn5 (NM_178639.2,236-254).
gcgcccaggagttacaaat

SEQ ID NO: 653887 - DNA, 19 bp, Mus musculus
  siRNA target sequence for Sfxn5 (NM_178639.2,352-370).
ctttcgggacgccaattgt

SEQ ID NO: 653888 - DNA, 19 bp, Mus musculus
  siRNA target sequence for Sfxn5 (NM_178639.2,598-616).
gccttctcgtgcagagatt

SEQ ID NO: 653889 - DNA, 19 bp, Mus musculus
  siRNA target sequence for Sfxn5 (NM_178639.2,633-651).
gtagccagtgccaatatct

SEQ ID NO: 653890 - DNA, 19 bp, Mus musculus
  siRNA target sequence for Sfxn5 (NM_178639.2,680-698).
gttagaggaaggaattgat

SEQ ID NO: 653891 - DNA, 19 bp, Mus musculus
  siRNA target sequence for Sfxn5 (NM_178639.2,720-738).
ctcgtgggctcctcaaaga

SEQ ID NO: 653892 - DNA, 19 bp, Mus musculus
  siRNA target sequence for Sfxn5 (NM_178639.2,722-740).
cgtgggctcctcaaagatt

SEQ ID NO: 653893 - DNA, 19 bp, Mus musculus
  siRNA target sequence for Sfxn5 (NM_178639.2,945-963).
cagatgtcagagattgaaa

SEQ ID NO: 653894 - DNA, 19 bp, Mus musculus
  siRNA target sequence for Sfxn5 (NM_178639.2,1003-1021).
gccggacagtggtgtacaa

SEQ ID NO: 653895 - DNA, 19 bp, Mus musculus
  siRNA target sequence for Sfxn5 (NM_178639.2,1004-1022).
ccggacagtggtgtacaat

SEQ ID NO: 653896 - DNA, 19 bp, Mus musculus
  siRNA target sequence for Sfxn5 (NM_178639.2,1005-1023).
cggacagtggtgtacaata

SEQ ID NO: 653897 - DNA, 19 bp, Mus musculus
  siRNA target sequence for Sfxn5 (NM_178639.2,1006-1024).
ggacagtggtgtacaataa

SEQ ID NO: 653898 - DNA, 19 bp, Mus musculus
  siRNA target sequence for Slc30a1 (NM_009579.2,408-426).
ctcacgccacgcagaagaa

SEQ ID NO: 653899 - DNA, 19 bp, Mus musculus
  siRNA target sequence for Slc30a1 (NM_009579.2,410-428).
cacgccacgcagaagaaca

SEQ ID NO: 653900 - DNA, 19 bp, Mus musculus
  siRNA target sequence for Slc30a1 (NM_009579.2,850-868).
cccagtggatgtacaagta

SEQ ID NO: 653901 - DNA, 19 bp, Mus musculus
  siRNA target sequence for Slc30a1 (NM_009579.2,880-898).
catccaggagtctgacaat

SEQ ID NO: 653902 - DNA, 19 bp, Mus musculus
  siRNA target sequence for Slc30a1 (NM_009579.2,931-949).
gaatatgcgaggagtgttt

SEQ ID NO: 653903 - DNA, 19 bp, Mus musculus
  siRNA target sequence for Slc30a1 (NM_009579.2,1018-1036).
ctggaagggttgtactgaa

SEQ ID NO: 653904 - DNA, 19 bp, Mus musculus
  siRNA target sequence for Slc30a1 (NM_009579.2,1064-1082).
cctgatccctgcaaatcgt

SEQ ID NO: 653905 - DNA, 19 bp, Mus musculus
  siRNA target sequence for Slc30a1 (NM_009579.2,1075-1093).
caaatcgtctgtagagata

SEQ ID NO: 653906 - DNA, 19 bp, Mus musculus
  siRNA target sequence for Slc30a1 (NM_009579.2,1151-1169).
gacccaaccctttgtatta

SEQ ID NO: 653907 - DNA, 19 bp, Mus musculus
  siRNA target sequence for Slc30a1 (NM_009579.2,1153-1171).
cccaaccctttgtattata

SEQ ID NO: 653908 - DNA, 19 bp, Mus musculus
  siRNA target sequence for Slc30a1 (NM_009579.2,1235-1253).
caaactgtccctaagcaaa

SEQ ID NO: 653909 - DNA, 19 bp, Mus musculus
  siRNA target sequence for Slc30a1 (NM_009579.2,1241-1259).
gtccctaagcaaatcgata

SEQ ID NO: 653910 - DNA, 19 bp, Mus musculus
  siRNA target sequence for Slc30a1 (NM_009579.2,1244-1262).
cctaagcaaatcgatatca

SEQ ID NO: 653911 - DNA, 19 bp, Mus musculus
  siRNA target sequence for Slc30a1 (NM_009579.2,1245-1263).
ctaagcaaatcgatatcaa

SEQ ID NO: 653912 - DNA, 19 bp, Mus musculus
  siRNA target sequence for Slc30a1 (NM_009579.2,1250-1268).
caaatcgatatcaaacact

SEQ ID NO: 653913 - DNA, 19 bp, Mus musculus
  siRNA target sequence for Slc30a1 (NM_009579.2,1351-1369).
cgccactgcccacataaaa

SEQ ID NO: 653914 - DNA, 19 bp, Mus musculus
  siRNA target sequence for Slc30a1 (NM_009579.2,1352-1370).
gccactgcccacataaaat

SEQ ID NO: 653915 - DNA, 19 bp, Mus musculus
  siRNA target sequence for Slc30a1 (NM_009579.2,1354-1372).
cactgcccacataaaatgt

SEQ ID NO: 653916 - DNA, 19 bp, Mus musculus
  siRNA target sequence for Slc30a1 (NM_009579.2,1401-1419).
ccaagaccattaaagatgt

SEQ ID NO: 653917 - DNA, 19 bp, Mus musculus
  siRNA target sequence for Slc30a1 (NM_009579.2,1466-1484).
gctagcgtcggctctaagt

SEQ ID NO: 653918 - DNA, 19 bp, Mus musculus
  siRNA target sequence for Slc30a1 (NM_009579.2,1580-1598).
gagaaggcgccaacagtta

SEQ ID NO: 653919 - DNA, 19 bp, Mus musculus
  siRNA target sequence for Slc30a1 (NM_009579.2,1585-1603).
ggcgccaacagttagcatt

SEQ ID NO: 653920 - DNA, 19 bp, Mus musculus
  siRNA target sequence for Slc30a1 (NM_009579.2,1586-1604).
gcgccaacagttagcattt

SEQ ID NO: 653921 - DNA, 19 bp, Mus musculus
  siRNA target sequence for Slc30a1 (NM_009579.2,1599-1617).
gcatttcttgtttagaact

SEQ ID NO: 653922 - DNA, 19 bp, Mus musculus
  siRNA target sequence for Slc30a1 (NM_009579.2,1705-1723).
caaacagcccgaatcatct

SEQ ID NO: 653923 - DNA, 19 bp, Mus musculus
  siRNA target sequence for Slc30a3 (NM_011773.1,223-241).
ctgcgattgaagagtcttt

SEQ ID NO: 653924 - DNA, 19 bp, Mus musculus
  siRNA target sequence for Slc30a3 (NM_011773.1,226-244).
cgattgaagagtcttttca

SEQ ID NO: 653925 - DNA, 19 bp, Mus musculus
  siRNA target sequence for Slc30a3 (NM_011773.1,462-480).
ccacttgctagcagacata

SEQ ID NO: 653926 - DNA, 19 bp, Mus musculus
  siRNA target sequence for Slc30a3 (NM_011773.1,642-660).
cctgcttcatagtgactat

SEQ ID NO: 653927 - DNA, 19 bp, Mus musculus
  siRNA target sequence for Slc30a3 (NM_011773.1,893-911).
cagcctcgatcctcatcta

SEQ ID NO: 653928 - DNA, 19 bp, Mus musculus
  siRNA target sequence for Slc30a3 (NM_011773.1,895-913).
gcctcgatcctcatctact

SEQ ID NO: 653929 - DNA, 19 bp, Mus musculus
  siRNA target sequence for Slc30a3 (NM_011773.1,896-914).
cctcgatcctcatctactt

SEQ ID NO: 653930 - DNA, 19 bp, Mus musculus
  siRNA target sequence for Slc30a3 (NM_011773.1,1112-1130).
gggccctgacgcttactta

SEQ ID NO: 653931 - DNA, 19 bp, Mus musculus
  siRNA target sequence for Slc30a4 (NM_011774.1,60-78).
gcgtggaagcgcctcaaat

SEQ ID NO: 653932 - DNA, 19 bp, Mus musculus
  siRNA target sequence for Slc30a4 (NM_011774.1,96-114).
gacacgccgctgttcttaa

SEQ ID NO: 653933 - DNA, 19 bp, Mus musculus
  siRNA target sequence for Slc30a4 (NM_011774.1,98-116).
cacgccgctgttcttaaat

SEQ ID NO: 653934 - DNA, 19 bp, Mus musculus
  siRNA target sequence for Slc30a4 (NM_011774.1,100-118).
cgccgctgttcttaaatga

SEQ ID NO: 653935 - DNA, 19 bp, Mus musculus
  siRNA target sequence for Slc30a4 (NM_011774.1,158-176).
ggggctttcgcgctttaat

SEQ ID NO: 653936 - DNA, 19 bp, Mus musculus
  siRNA target sequence for Slc30a4 (NM_011774.1,159-177).
gggctttcgcgctttaata

SEQ ID NO: 653937 - DNA, 19 bp, Mus musculus
  siRNA target sequence for Slc30a4 (NM_011774.1,160-178).
ggctttcgcgctttaataa

SEQ ID NO: 653938 - DNA, 19 bp, Mus musculus
  siRNA target sequence for Slc30a4 (NM_011774.1,161-179).
gctttcgcgctttaataaa

SEQ ID NO: 653939 - DNA, 19 bp, Mus musculus
  siRNA target sequence for Slc30a4 (NM_011774.1,255-273).
gccgacgatgactccttat

SEQ ID NO: 653940 - DNA, 19 bp, Mus musculus
  siRNA target sequence for Slc30a4 (NM_011774.1,256-274).
ccgacgatgactccttatt

SEQ ID NO: 653941 - DNA, 19 bp, Mus musculus
  siRNA target sequence for Slc30a4 (NM_011774.1,275-293).
ggaccaggacttaccttta

SEQ ID NO: 653942 - DNA, 19 bp, Mus musculus
  siRNA target sequence for Slc30a4 (NM_011774.1,276-294).
gaccaggacttacctttaa

SEQ ID NO: 653943 - DNA, 19 bp, Mus musculus
  siRNA target sequence for Slc30a4 (NM_011774.1,435-453).
ggtggatacatggcaaata

SEQ ID NO: 653944 - DNA, 19 bp, Mus musculus
  siRNA target sequence for Slc30a4 (NM_011774.1,438-456).
ggatacatggcaaatagct

SEQ ID NO: 653945 - DNA, 19 bp, Mus musculus
  siRNA target sequence for Slc30a4 (NM_011774.1,448-466).
caaatagcttagcaattat

SEQ ID NO: 653946 - DNA, 19 bp, Mus musculus
  siRNA target sequence for Slc30a4 (NM_011774.1,471-489).
gatgcactccatatgctaa

SEQ ID NO: 653947 - DNA, 19 bp, Mus musculus
  siRNA target sequence for Slc30a4 (NM_011774.1,573-591).
catcgcctagaggttttgt

SEQ ID NO: 653948 - DNA, 19 bp, Mus musculus
  siRNA target sequence for Slc30a4 (NM_011774.1,585-603).
gttttgtcggccatgatca

SEQ ID NO: 653949 - DNA, 19 bp, Mus musculus
  siRNA target sequence for Slc30a4 (NM_011774.1,592-610).
cggccatgatcagtgtaat

SEQ ID NO: 653950 - DNA, 19 bp, Mus musculus
  siRNA target sequence for Slc30a4 (NM_011774.1,595-613).
ccatgatcagtgtaatgct

SEQ ID NO: 653951 - DNA, 19 bp, Mus musculus
  siRNA target sequence for Slc30a4 (NM_011774.1,654-672).
cagagaaccatccatatga

SEQ ID NO: 653952 - DNA, 19 bp, Mus musculus
  siRNA target sequence for Slc30a4 (NM_011774.1,658-676).
gaaccatccatatgaacta

SEQ ID NO: 653953 - DNA, 19 bp, Mus musculus
  siRNA target sequence for Slc30a4 (NM_011774.1,661-679).
ccatccatatgaactatga

SEQ ID NO: 653954 - DNA, 19 bp, Mus musculus
  siRNA target sequence for Slc30a4 (NM_011774.1,886-904).
gagacttggtacaaagtgt

SEQ ID NO: 653955 - DNA, 19 bp, Mus musculus
  siRNA target sequence for Slc30a4 (NM_011774.1,918-936).
gctgcatacatcatacgat

SEQ ID NO: 653956 - DNA, 19 bp, Mus musculus
  siRNA target sequence for Slc30a4 (NM_011774.1,919-937).
ctgcatacatcatacgatt

SEQ ID NO: 653957 - DNA, 19 bp, Mus musculus
  siRNA target sequence for Slc30a4 (NM_011774.1,922-940).
catacatcatacgattcaa

SEQ ID NO: 653958 - DNA, 19 bp, Mus musculus
  siRNA target sequence for Slc30a4 (NM_011774.1,960-978).
gatcccatctgtacgtata

SEQ ID NO: 653959 - DNA, 19 bp, Mus musculus
  siRNA target sequence for Slc30a4 (NM_011774.1,963-981).
cccatctgtacgtatatat

SEQ ID NO: 653960 - DNA, 19 bp, Mus musculus
  siRNA target sequence for Slc30a4 (NM_011774.1,964-982).
ccatctgtacgtatatatt

SEQ ID NO: 653961 - DNA, 19 bp, Mus musculus
  siRNA target sequence for Slc30a4 (NM_011774.1,965-983).
catctgtacgtatatattt

SEQ ID NO: 653962 - DNA, 19 bp, Mus musculus
  siRNA target sequence for Slc30a4 (NM_011774.1,1001-1019).
cacaacgtttcgcatcata

SEQ ID NO: 653963 - DNA, 19 bp, Mus musculus
  siRNA target sequence for Slc30a4 (NM_011774.1,1047-1065).
ggtgtaccaagccatttga

SEQ ID NO: 653964 - DNA, 19 bp, Mus musculus
  siRNA target sequence for Slc30a4 (NM_011774.1,1068-1086).
gtagattatatcaaagagt

SEQ ID NO: 653965 - DNA, 19 bp, Mus musculus
  siRNA target sequence for Slc30a4 (NM_011774.1,1085-1103).
gtcgttgatgaaaatagaa

SEQ ID NO: 653966 - DNA, 19 bp, Mus musculus
  siRNA target sequence for Slc30a4 (NM_011774.1,1209-1227).
gaagtacagtccaaagcta

SEQ ID NO: 653967 - DNA, 19 bp, Mus musculus
  siRNA target sequence for Slc30a4 (NM_011774.1,1224-1242).
gctaagcatttattactga

SEQ ID NO: 653968 - DNA, 19 bp, Mus musculus
  siRNA target sequence for Slc30a4 (NM_011774.1,1303-1321).
gaacttgtgcaaattgtca

SEQ ID NO: 653969 - DNA, 19 bp, Mus musculus
  siRNA target sequence for Slc30a5 (NM_022885.1,113-131).
ctggatttctatatggatt

SEQ ID NO: 653970 - DNA, 19 bp, Mus musculus
  siRNA target sequence for Slc30a5 (NM_022885.1,222-240).
ggacacacccaataacaga

SEQ ID NO: 653971 - DNA, 19 bp, Mus musculus
  siRNA target sequence for Slc30a5 (NM_022885.1,242-260).
caactccgggctatgaaca

SEQ ID NO: 653972 - DNA, 19 bp, Mus musculus
  siRNA target sequence for Slc30a5 (NM_022885.1,328-346).
cattttgtcggccaacatt

SEQ ID NO: 653973 - DNA, 19 bp, Mus musculus
  siRNA target sequence for Slc30a5 (NM_022885.1,373-391).
gaaaggtacccttattgga

SEQ ID NO: 653974 - DNA, 19 bp, Mus musculus
  siRNA target sequence for Slc30a5 (NM_022885.1,405-423).
gaacaccactctatcactt

SEQ ID NO: 653975 - DNA, 19 bp, Mus musculus
  siRNA target sequence for Slc30a5 (NM_022885.1,408-426).
caccactctatcacttcat

SEQ ID NO: 653976 - DNA, 19 bp, Mus musculus
  siRNA target sequence for Slc30a5 (NM_022885.1,454-472).
gtcggtgcctaggttcatt

SEQ ID NO: 653977 - DNA, 19 bp, Mus musculus
  siRNA target sequence for Slc30a5 (NM_022885.1,456-474).
cggtgcctaggttcattaa

SEQ ID NO: 653978 - DNA, 19 bp, Mus musculus
  siRNA target sequence for Slc30a5 (NM_022885.1,504-522).
gcgactctaggcagatctt

SEQ ID NO: 653979 - DNA, 19 bp, Mus musculus
  siRNA target sequence for Slc30a5 (NM_022885.1,609-627).
gatttcacatgctctttga

SEQ ID NO: 653980 - DNA, 19 bp, Mus musculus
  siRNA target sequence for Slc30a5 (NM_022885.1,701-719).
gggtatggccgaatagaga

SEQ ID NO: 653981 - DNA, 19 bp, Mus musculus
  siRNA target sequence for Slc30a5 (NM_022885.1,702-720).
ggtatggccgaatagagat

SEQ ID NO: 653982 - DNA, 19 bp, Mus musculus
  siRNA target sequence for Slc30a5 (NM_022885.1,707-725).
ggccgaatagagattctct

SEQ ID NO: 653983 - DNA, 19 bp, Mus musculus
  siRNA target sequence for Slc30a5 (NM_022885.1,804-822).
ctccggaactagacacaaa

SEQ ID NO: 653984 - DNA, 19 bp, Mus musculus
  siRNA target sequence for Slc30a5 (NM_022885.1,806-824).
ccggaactagacacaaaca

SEQ ID NO: 653985 - DNA, 19 bp, Mus musculus
  siRNA target sequence for Slc30a5 (NM_022885.1,840-858).
ccgtcggagggctgatagt

SEQ ID NO: 653986 - DNA, 19 bp, Mus musculus
  siRNA target sequence for Slc30a5 (NM_022885.1,841-859).
cgtcggagggctgatagta

SEQ ID NO: 653987 - DNA, 19 bp, Mus musculus
  siRNA target sequence for Slc30a5 (NM_022885.1,842-860).
gtcggagggctgatagtaa

SEQ ID NO: 653988 - DNA, 19 bp, Mus musculus
  siRNA target sequence for Slc30a5 (NM_022885.1,848-866).
gggctgatagtaaacctta

SEQ ID NO: 653989 - DNA, 19 bp, Mus musculus
  siRNA target sequence for Slc30a5 (NM_022885.1,850-868).
gctgatagtaaaccttatt

SEQ ID NO: 653990 - DNA, 19 bp, Mus musculus
  siRNA target sequence for Slc30a5 (NM_022885.1,853-871).
gatagtaaaccttattggt

SEQ ID NO: 653991 - DNA, 19 bp, Mus musculus
  siRNA target sequence for Slc30a5 (NM_022885.1,933-951).
ctgatcacggccattcaca

SEQ ID NO: 653992 - DNA, 19 bp, Mus musculus
  siRNA target sequence for Slc30a5 (NM_022885.1,1017-1035).
cgaacatgaggggtgtatt

SEQ ID NO: 653993 - DNA, 19 bp, Mus musculus
  siRNA target sequence for Slc30a5 (NM_022885.1,1062-1080).
gcagcatcggcgtgattgt

SEQ ID NO: 653994 - DNA, 19 bp, Mus musculus
  siRNA target sequence for Slc30a5 (NM_022885.1,1091-1109).
ctcatagagcagtttggat

SEQ ID NO: 653995 - DNA, 19 bp, Mus musculus
  siRNA target sequence for Slc30a5 (NM_022885.1,1099-1117).
gcagtttggatggttcatt

SEQ ID NO: 653996 - DNA, 19 bp, Mus musculus
  siRNA target sequence for Slc30a5 (NM_022885.1,1162-1180).
cagtgtgatcccactgatt

SEQ ID NO: 653997 - DNA, 19 bp, Mus musculus
  siRNA target sequence for Slc30a5 (NM_022885.1,1168-1186).
gatcccactgattaaagat

SEQ ID NO: 653998 - DNA, 19 bp, Mus musculus
  siRNA target sequence for Slc30a5 (NM_022885.1,1261-1279).
gaaaattgagggattaata

SEQ ID NO: 653999 - DNA, 19 bp, Mus musculus
  siRNA target sequence for Slc30a5 (NM_022885.1,1281-1299).
cataccgagaccctcattt

SEQ ID NO: 654000 - DNA, 19 bp, Mus musculus
  siRNA target sequence for Slc30a5 (NM_022885.1,1303-1321).
gcgccattctgccagtatt

SEQ ID NO: 654001 - DNA, 19 bp, Mus musculus
  siRNA target sequence for Slc30a5 (NM_022885.1,1317-1335).
gtattgtagcgggaacaat

SEQ ID NO: 654002 - DNA, 19 bp, Mus musculus
  siRNA target sequence for Slc30a5 (NM_022885.1,1326-1344).
cgggaacaattcatataca

SEQ ID NO: 654003 - DNA, 19 bp, Mus musculus
  siRNA target sequence for Slc30a5 (NM_022885.1,1382-1400).
caggttacagggatactta

SEQ ID NO: 654004 - DNA, 19 bp, Mus musculus
  siRNA target sequence for Slc30a5 (NM_022885.1,1384-1402).
ggttacagggatacttaaa

SEQ ID NO: 654005 - DNA, 19 bp, Mus musculus
  siRNA target sequence for Slc30a5 (NM_022885.1,1467-1485).
gcctgagtactggatttca

SEQ ID NO: 654006 - DNA, 19 bp, Mus musculus
  siRNA target sequence for Slc30a5 (NM_022885.1,1468-1486).
cctgagtactggatttcat

SEQ ID NO: 654007 - DNA, 19 bp, Mus musculus
  siRNA target sequence for Slc30a5 (NM_022885.1,1471-1489).
gagtactggatttcatgat

SEQ ID NO: 654008 - DNA, 19 bp, Mus musculus
  siRNA target sequence for Slc30a5 (NM_022885.1,1473-1491).
gtactggatttcatgatgt

SEQ ID NO: 654009 - DNA, 19 bp, Mus musculus
  siRNA target sequence for Slc30a5 (NM_022885.1,1530-1548).
gcaaagatggcacttacat

SEQ ID NO: 654010 - DNA, 19 bp, Mus musculus
  siRNA target sequence for Slc30a9 (NM_178651.2,243-261).
ggatggaagaatgtaatga

SEQ ID NO: 654011 - DNA, 19 bp, Mus musculus
  siRNA target sequence for Slc30a9 (NM_178651.2,248-266).
gaagaatgtaatgacattt

SEQ ID NO: 654012 - DNA, 19 bp, Mus musculus
  siRNA target sequence for Slc30a9 (NM_178651.2,251-269).
gaatgtaatgacatttgaa

SEQ ID NO: 654013 - DNA, 19 bp, Mus musculus
  siRNA target sequence for Slc30a9 (NM_178651.2,291-309).
gacattcacccacatttat

SEQ ID NO: 654014 - DNA, 19 bp, Mus musculus
  siRNA target sequence for Slc30a9 (NM_178651.2,326-344).
caagttgtactctacgaat

SEQ ID NO: 654015 - DNA, 19 bp, Mus musculus
  siRNA target sequence for Slc30a9 (NM_178651.2,384-402).
gacaaagtcccatcactta

SEQ ID NO: 654016 - DNA, 19 bp, Mus musculus
  siRNA target sequence for Slc30a9 (NM_178651.2,390-408).
gtcccatcacttacacaaa

SEQ ID NO: 654017 - DNA, 19 bp, Mus musculus
  siRNA target sequence for Slc30a9 (NM_178651.2,399-417).
cttacacaaacagtagaaa

SEQ ID NO: 654018 - DNA, 19 bp, Mus musculus
  siRNA target sequence for Slc30a9 (NM_178651.2,469-487).
gagtcaaagcagtccttaa

SEQ ID NO: 654019 - DNA, 19 bp, Mus musculus
  siRNA target sequence for Slc30a9 (NM_178651.2,471-489).
gtcaaagcagtccttaaga

SEQ ID NO: 654020 - DNA, 19 bp, Mus musculus
  siRNA target sequence for Slc30a9 (NM_178651.2,501-519).
ggatcaaaatacactaaga

SEQ ID NO: 654021 - DNA, 19 bp, Mus musculus
  siRNA target sequence for Slc30a9 (NM_178651.2,502-520).
gatcaaaatacactaagaa

SEQ ID NO: 654022 - DNA, 19 bp, Mus musculus
  siRNA target sequence for Slc30a9 (NM_178651.2,530-548).
cactggagtgagagcaata

SEQ ID NO: 654023 - DNA, 19 bp, Mus musculus
  siRNA target sequence for Slc30a9 (NM_178651.2,660-678).
gcaaaagctttggaagttt

SEQ ID NO: 654024 - DNA, 19 bp, Mus musculus
  siRNA target sequence for Slc30a9 (NM_178651.2,716-734).
gcgtaaagaagcagaaata

SEQ ID NO: 654025 - DNA, 19 bp, Mus musculus
  siRNA target sequence for Slc30a9 (NM_178651.2,742-760).
gagaacggctatttagaaa

SEQ ID NO: 654026 - DNA, 19 bp, Mus musculus
  siRNA target sequence for Slc30a9 (NM_178651.2,762-780).
caaagaatattaagagaat

SEQ ID NO: 654027 - DNA, 19 bp, Mus musculus
  siRNA target sequence for Slc30a9 (NM_178651.2,775-793).
gagaatatggtgatttctt

SEQ ID NO: 654028 - DNA, 19 bp, Mus musculus
  siRNA target sequence for Slc30a9 (NM_178651.2,819-837).
gcggtctcagtgttcctta

SEQ ID NO: 654029 - DNA, 19 bp, Mus musculus
  siRNA target sequence for Slc30a9 (NM_178651.2,879-897).
ggcttaaactgcttcttta

SEQ ID NO: 654030 - DNA, 19 bp, Mus musculus
  siRNA target sequence for Slc30a9 (NM_178651.2,880-898).
gcttaaactgcttctttaa

SEQ ID NO: 654031 - DNA, 19 bp, Mus musculus
  siRNA target sequence for Slc30a9 (NM_178651.2,919-937).
cgggttcagcaagtatgtt

SEQ ID NO: 654032 - DNA, 19 bp, Mus musculus
  siRNA target sequence for Slc30a9 (NM_178651.2,921-939).
ggttcagcaagtatgttct

SEQ ID NO: 654033 - DNA, 19 bp, Mus musculus
  siRNA target sequence for Slc30a9 (NM_178651.2,931-949).
gtatgttctcagaagctat

SEQ ID NO: 654034 - DNA, 19 bp, Mus musculus
  siRNA target sequence for Slc30a9 (NM_178651.2,940-958).
cagaagctatacactcatt

SEQ ID NO: 654035 - DNA, 19 bp, Mus musculus
  siRNA target sequence for Slc30a9 (NM_178651.2,942-960).
gaagctatacactcattat

SEQ ID NO: 654036 - DNA, 19 bp, Mus musculus
  siRNA target sequence for Slc30a9 (NM_178651.2,946-964).
ctatacactcattatctga

SEQ ID NO: 654037 - DNA, 19 bp, Mus musculus
  siRNA target sequence for Slc30a9 (NM_178651.2,951-969).
cactcattatctgatactt

SEQ ID NO: 654038 - DNA, 19 bp, Mus musculus
  siRNA target sequence for Slc30a9 (NM_178651.2,953-971).
ctcattatctgatacttgt

SEQ ID NO: 654039 - DNA, 19 bp, Mus musculus
  siRNA target sequence for Slc30a9 (NM_178651.2,987-1005).
gcactgggcatcagcaaat

SEQ ID NO: 654040 - DNA, 19 bp, Mus musculus
  siRNA target sequence for Slc30a9 (NM_178651.2,998-1016).
cagcaaatctgttcaaaca

SEQ ID NO: 654041 - DNA, 19 bp, Mus musculus
  siRNA target sequence for Slc30a9 (NM_178651.2,1029-1047).
cacccgtacggcttttcaa

SEQ ID NO: 654042 - DNA, 19 bp, Mus musculus
  siRNA target sequence for Slc30a9 (NM_178651.2,1031-1049).
cccgtacggcttttcaaat

SEQ ID NO: 654043 - DNA, 19 bp, Mus musculus
  siRNA target sequence for Slc30a9 (NM_178651.2,1032-1050).
ccgtacggcttttcaaata

SEQ ID NO: 654044 - DNA, 19 bp, Mus musculus
  siRNA target sequence for Slc30a9 (NM_178651.2,1033-1051).
cgtacggcttttcaaatat

SEQ ID NO: 654045 - DNA, 19 bp, Mus musculus
  siRNA target sequence for Slc30a9 (NM_178651.2,1053-1071).
cgctatatttcttcattga

SEQ ID NO: 654046 - DNA, 19 bp, Mus musculus
  siRNA target sequence for Slc30a9 (NM_178651.2,1077-1095).
ggtgttggtattttcatga

SEQ ID NO: 654047 - DNA, 19 bp, Mus musculus
  siRNA target sequence for Slc30a9 (NM_178651.2,1078-1096).
gtgttggtattttcatgat

SEQ ID NO: 654048 - DNA, 19 bp, Mus musculus
  siRNA target sequence for Slc30a9 (NM_178651.2,1100-1118).
cgcaggactctcttggtat

SEQ ID NO: 654049 - DNA, 19 bp, Mus musculus
  siRNA target sequence for Slc30a9 (NM_178651.2,1123-1141).
gaatcatgggattacttca

SEQ ID NO: 654050 - DNA, 19 bp, Mus musculus
  siRNA target sequence for Slc30a9 (NM_178651.2,1160-1178).
cctgctatgggcatattgt

SEQ ID NO: 654051 - DNA, 19 bp, Mus musculus
  siRNA target sequence for Slc30a9 (NM_178651.2,1253-1271).
ggccaagggcacgacattt

SEQ ID NO: 654052 - DNA, 19 bp, Mus musculus
  siRNA target sequence for Slc30a9 (NM_178651.2,1254-1272).
gccaagggcacgacatttt

SEQ ID NO: 654053 - DNA, 19 bp, Mus musculus
  siRNA target sequence for Slc30a9 (NM_178651.2,1260-1278).
ggcacgacattttataagt

SEQ ID NO: 654054 - DNA, 19 bp, Mus musculus
  siRNA target sequence for Slc30a9 (NM_178651.2,1261-1279).
gcacgacattttataagta

SEQ ID NO: 654055 - DNA, 19 bp, Mus musculus
  siRNA target sequence for Slc30a9 (NM_178651.2,1262-1280).
cacgacattttataagtat

SEQ ID NO: 654056 - DNA, 19 bp, Mus musculus
  siRNA target sequence for Slc30a9 (NM_178651.2,1264-1282).
cgacattttataagtatgt

SEQ ID NO: 654057 - DNA, 19 bp, Mus musculus
  siRNA target sequence for Slc30a9 (NM_178651.2,1294-1312).
gtgatccgagtacaaatgt

SEQ ID NO: 654058 - DNA, 19 bp, Mus musculus
  siRNA target sequence for Slc30a9 (NM_178651.2,1336-1354).
ctgtcttaggagtgataat

SEQ ID NO: 654059 - DNA, 19 bp, Mus musculus
  siRNA target sequence for Slc30a9 (NM_178651.2,1370-1388).
gggccttacctccataaca

SEQ ID NO: 654060 - DNA, 19 bp, Mus musculus
  siRNA target sequence for Slc30a9 (NM_178651.2,1421-1439).
gggtgtaggcaccttacta

SEQ ID NO: 654061 - DNA, 19 bp, Mus musculus
  siRNA target sequence for Slc30a9 (NM_178651.2,1453-1471).
cattcctcatctataccaa

SEQ ID NO: 654062 - DNA, 19 bp, Mus musculus
  siRNA target sequence for Slc30a9 (NM_178651.2,1536-1554).
gagagcgacccgtcagtaa

SEQ ID NO: 654063 - DNA, 19 bp, Mus musculus
  siRNA target sequence for Slc30a9 (NM_178651.2,1547-1565).
gtcagtaagggcaatccat

SEQ ID NO: 654064 - DNA, 19 bp, Mus musculus
  siRNA target sequence for Slc30a9 (NM_178651.2,1555-1573).
gggcaatccatgatgttaa

SEQ ID NO: 654065 - DNA, 19 bp, Mus musculus
  siRNA target sequence for Slc30a9 (NM_178651.2,1632-1650).
cgagttgttacgagatcat

SEQ ID NO: 654066 - DNA, 19 bp, Mus musculus
  siRNA target sequence for Slc30a9 (NM_178651.2,1633-1651).
gagttgttacgagatcata

SEQ ID NO: 654067 - DNA, 19 bp, Mus musculus
  siRNA target sequence for Slc30a9 (NM_178651.2,1635-1653).
gttgttacgagatcatatt

SEQ ID NO: 654068 - DNA, 19 bp, Mus musculus
  siRNA target sequence for Slc30a9 (NM_178651.2,1662-1680).
caagattttgaccaaatga

SEQ ID NO: 654069 - DNA, 19 bp, Mus musculus
  siRNA target sequence for Slc30a9 (NM_178651.2,1819-1837).
ggcacgtagaccttgagat

SEQ ID NO: 654070 - DNA, 19 bp, Mus musculus
  siRNA target sequence for Slc41a1 (NM_173865.1,1267-1285).
ggagacctccttttccatt

SEQ ID NO: 654071 - DNA, 19 bp, Mus musculus
  siRNA target sequence for Slc41a1 (NM_173865.1,1473-1491).
ccaacattggacaaatgga

SEQ ID NO: 654072 - DNA, 19 bp, Mus musculus
  siRNA target sequence for Slc41a1 (NM_173865.1,1502-1520).
gagctctggcggatgatca

SEQ ID NO: 654073 - DNA, 19 bp, Mus musculus
  siRNA target sequence for Slc41a1 (NM_173865.1,1512-1530).
ggatgatcacggggaatat

SEQ ID NO: 654074 - DNA, 19 bp, Mus musculus
  siRNA target sequence for Slc41a1 (NM_173865.1,1711-1729).
cattgggtctcgaaagatt

SEQ ID NO: 654075 - DNA, 19 bp, Mus musculus
  siRNA target sequence for Slc41a1 (NM_173865.1,1837-1855).
gcactggcgatacatctat

SEQ ID NO: 654076 - DNA, 19 bp, Mus musculus
  siRNA target sequence for Slc41a1 (NM_173865.1,1923-1941).
ccacaagggaggtgttgta

SEQ ID NO: 654077 - DNA, 19 bp, Mus musculus
  siRNA target sequence for Slc41a1 (NM_173865.1,1924-1942).
cacaagggaggtgttgtat

SEQ ID NO: 654078 - DNA, 19 bp, Mus musculus
  siRNA target sequence for Slc41a1 (NM_173865.1,2011-2029).
cgtctcggaccccaacttt

SEQ ID NO: 654079 - DNA, 19 bp, Mus musculus
  siRNA target sequence for Slc41a1 (NM_173865.1,2044-2062).
cttcacacctgtgattaat

SEQ ID NO: 654080 - DNA, 19 bp, Mus musculus
  siRNA target sequence for Slc41a1 (NM_173865.1,2188-2206).
cttcagccctgatgtgaat

SEQ ID NO: 654081 - DNA, 19 bp, Mus musculus
  siRNA target sequence for Slc41a1 (NM_173865.1,2191-2209).
cagccctgatgtgaattca

SEQ ID NO: 654082 - DNA, 19 bp, Mus musculus
  siRNA target sequence for Slc41a1 (NM_173865.1,2405-2423).
ctggaccccgacaacttct

SEQ ID NO: 654083 - DNA, 19 bp, Mus musculus
  siRNA target sequence for p (NM_021879.1,2380-2398).
gagccaagaccctgaaatt

SEQ ID NO: 654084 - DNA, 19 bp, Mus musculus
  siRNA target sequence for p (NM_021879.1,2470-2488).
cggagcatccacaaatgtt

SEQ ID NO: 654085 - DNA, 19 bp, Mus musculus
  siRNA target sequence for p (NM_021879.1,2474-2492).
gcatccacaaatgttgttt

SEQ ID NO: 654086 - DNA, 19 bp, Mus musculus
  siRNA target sequence for p (NM_021879.1,2512-2530).
gcatgggtatggattctct

SEQ ID NO: 654087 - DNA, 19 bp, Mus musculus
  siRNA target sequence for p (NM_021879.1,2513-2531).
catgggtatggattctctt

SEQ ID NO: 654088 - DNA, 19 bp, Mus musculus
  siRNA target sequence for p (NM_021879.1,2517-2535).
ggtatggattctctttcat

SEQ ID NO: 654089 - DNA, 19 bp, Mus musculus
  siRNA target sequence for ank (NM_020332.2,637-655).
gatagcctacagtgactta

SEQ ID NO: 654090 - DNA, 19 bp, Mus musculus
  siRNA target sequence for ank (NM_020332.2,650-668).
gacttagggtactacatca

SEQ ID NO: 654091 - DNA, 19 bp, Mus musculus
  siRNA target sequence for ank (NM_020332.2,657-675).
ggtactacatcatcaacaa

SEQ ID NO: 654092 - DNA, 19 bp, Mus musculus
  siRNA target sequence for ank (NM_020332.2,692-710).
gagtctgtggggagcaaaa

SEQ ID NO: 654093 - DNA, 19 bp, Mus musculus
  siRNA target sequence for ank (NM_020332.2,731-749).
ctcgctgccttccctttta

SEQ ID NO: 654094 - DNA, 19 bp, Mus musculus
  siRNA target sequence for ank (NM_020332.2,735-753).
ctgccttcccttttatgga

SEQ ID NO: 654095 - DNA, 19 bp, Mus musculus
  siRNA target sequence for ank (NM_020332.2,819-837).
cctcaatctcagatgtcat

SEQ ID NO: 654096 - DNA, 19 bp, Mus musculus
  siRNA target sequence for ank (NM_020332.2,1012-1030).
ggggggtgatgcaaccata

SEQ ID NO: 654097 - DNA, 19 bp, Mus musculus
  siRNA target sequence for ank (NM_020332.2,1013-1031).
gggggtgatgcaaccataa

SEQ ID NO: 654098 - DNA, 19 bp, Mus musculus
  siRNA target sequence for ank (NM_020332.2,1015-1033).
gggtgatgcaaccataaga

SEQ ID NO: 654099 - DNA, 19 bp, Mus musculus
  siRNA target sequence for ank (NM_020332.2,1016-1034).
ggtgatgcaaccataagaa

SEQ ID NO: 654100 - DNA, 19 bp, Mus musculus
  siRNA target sequence for ank (NM_020332.2,1072-1090).
ggccacgcagcgaatcagt

SEQ ID NO: 654101 - DNA, 19 bp, Mus musculus
  siRNA target sequence for ank (NM_020332.2,1173-1191).
cctaccccgtgggtcatat

SEQ ID NO: 654102 - DNA, 19 bp, Mus musculus
  siRNA target sequence for ank (NM_020332.2,1287-1305).
cctcagcccacatcaagaa

SEQ ID NO: 654103 - DNA, 19 bp, Mus musculus
  siRNA target sequence for ank (NM_020332.2,1330-1348).
gtcgctgacgctctgtttt

SEQ ID NO: 654104 - DNA, 19 bp, Mus musculus
  siRNA target sequence for ank (NM_020332.2,1332-1350).
cgctgacgctctgttttgt

SEQ ID NO: 654105 - DNA, 19 bp, Mus musculus
  siRNA target sequence for ank (NM_020332.2,1334-1352).
ctgacgctctgttttgtca

SEQ ID NO: 654106 - DNA, 19 bp, Mus musculus
  siRNA target sequence for ank (NM_020332.2,1338-1356).
cgctctgttttgtcatgtt

SEQ ID NO: 654107 - DNA, 19 bp, Mus musculus
  siRNA target sequence for ank (NM_020332.2,1372-1390).
ctctgagaagattctgata

SEQ ID NO: 654108 - DNA, 19 bp, Mus musculus
  siRNA target sequence for ank (NM_020332.2,1374-1392).
ctgagaagattctgataga

SEQ ID NO: 654109 - DNA, 19 bp, Mus musculus
  siRNA target sequence for ank (NM_020332.2,1634-1652).
gggtttgtgggagaatcta

SEQ ID NO: 654110 - DNA, 19 bp, Mus musculus
  siRNA target sequence for ank (NM_020332.2,1670-1688).
gcatgctatgtctatcgaa

SEQ ID NO: 654111 - DNA, 19 bp, Mus musculus
  siRNA target sequence for ank (NM_020332.2,1671-1689).
catgctatgtctatcgaaa

SEQ ID NO: 654112 - DNA, 19 bp, Mus musculus
  siRNA target sequence for ank (NM_020332.2,1674-1692).
gctatgtctatcgaaaaca

SEQ ID NO: 654113 - DNA, 19 bp, Mus musculus
  siRNA target sequence for Slco2a1 (NM_033314.1,68-86).
gctcccgctcggtcttcaa

SEQ ID NO: 654114 - DNA, 19 bp, Mus musculus
  siRNA target sequence for Slco2a1 (NM_033314.1,71-89).
cccgctcggtcttcaacaa

SEQ ID NO: 654115 - DNA, 19 bp, Mus musculus
  siRNA target sequence for Slco2a1 (NM_033314.1,96-114).
ggtcttcgtgctttgtcat

SEQ ID NO: 654116 - DNA, 19 bp, Mus musculus
  siRNA target sequence for Slco2a1 (NM_033314.1,239-257).
gcaacgctatcctcatcat

SEQ ID NO: 654117 - DNA, 19 bp, Mus musculus
  siRNA target sequence for Slco2a1 (NM_033314.1,361-379).
ctgtcagaaccctatcagt

SEQ ID NO: 654118 - DNA, 19 bp, Mus musculus
  siRNA target sequence for Slco2a1 (NM_033314.1,421-439).
gacctctgtcagaagcatt

SEQ ID NO: 654119 - DNA, 19 bp, Mus musculus
  siRNA target sequence for Slco2a1 (NM_033314.1,445-463).
ggcctgctccccagtaagt

SEQ ID NO: 654120 - DNA, 19 bp, Mus musculus
  siRNA target sequence for Slco2a1 (NM_033314.1,605-623).
ccaactcgcctctgtatat

SEQ ID NO: 654121 - DNA, 19 bp, Mus musculus
  siRNA target sequence for Slco2a1 (NM_033314.1,618-636).
gtatatctccatcttattt

SEQ ID NO: 654122 - DNA, 19 bp, Mus musculus
  siRNA target sequence for Slco2a1 (NM_033314.1,913-931).
ggctccctgatggatttca

SEQ ID NO: 654123 - DNA, 19 bp, Mus musculus
  siRNA target sequence for Slco2a1 (NM_033314.1,1081-1099).
gcctatgccaacttactca

SEQ ID NO: 654124 - DNA, 19 bp, Mus musculus
  siRNA target sequence for Slco2a1 (NM_033314.1,1083-1101).
ctatgccaacttactcatt

SEQ ID NO: 654125 - DNA, 19 bp, Mus musculus
  siRNA target sequence for Slco2a1 (NM_033314.1,1153-1171).
ctcatgaagcgttttgttt

SEQ ID NO: 654126 - DNA, 19 bp, Mus musculus
  siRNA target sequence for Slco2a1 (NM_033314.1,1442-1460).
cagcttctaagcaaccaat

SEQ ID NO: 654127 - DNA, 19 bp, Mus musculus
  siRNA target sequence for Slco2a1 (NM_033314.1,1453-1471).
caaccaatctatttgaact

SEQ ID NO: 654128 - DNA, 19 bp, Mus musculus
  siRNA target sequence for Slc22a6 (NM_008766.2,735-753).
ggaaggtgctgatcttgaa

SEQ ID NO: 654129 - DNA, 19 bp, Mus musculus
  siRNA target sequence for Slc22a6 (NM_008766.2,827-845).
ctcctctcgggcatgtctt

SEQ ID NO: 654130 - DNA, 19 bp, Mus musculus
  siRNA target sequence for Slc22a6 (NM_008766.2,843-861).
ctttggctagcattgcaat

SEQ ID NO: 654131 - DNA, 19 bp, Mus musculus
  siRNA target sequence for Slc22a6 (NM_008766.2,848-866).
gctagcattgcaatcaact

SEQ ID NO: 654132 - DNA, 19 bp, Mus musculus
  siRNA target sequence for Slc22a6 (NM_008766.2,884-902).
gagtggatgcctattcaca

SEQ ID NO: 654133 - DNA, 19 bp, Mus musculus
  siRNA target sequence for Slc22a6 (NM_008766.2,910-928).
ctatgtgggcaccttgatt

SEQ ID NO: 654134 - DNA, 19 bp, Mus musculus
  siRNA target sequence for Slc22a6 (NM_008766.2,921-939).
ccttgattggctatgtcta

SEQ ID NO: 654135 - DNA, 19 bp, Mus musculus
  siRNA target sequence for Slc22a6 (NM_008766.2,1126-1144).
ccgcatcaacgggaaacaa

SEQ ID NO: 654136 - DNA, 19 bp, Mus musculus
  siRNA target sequence for Slc22a6 (NM_008766.2,1128-1146).
gcatcaacgggaaacaaga

SEQ ID NO: 654137 - DNA, 19 bp, Mus musculus
  siRNA target sequence for Slc22a6 (NM_008766.2,1129-1147).
catcaacgggaaacaagaa

SEQ ID NO: 654138 - DNA, 19 bp, Mus musculus
  siRNA target sequence for Slc22a6 (NM_008766.2,1150-1168).
gggggctaagctgagtata

SEQ ID NO: 654139 - DNA, 19 bp, Mus musculus
  siRNA target sequence for Slc22a6 (NM_008766.2,1152-1170).
gggctaagctgagtataga

SEQ ID NO: 654140 - DNA, 19 bp, Mus musculus
  siRNA target sequence for Slc22a6 (NM_008766.2,1285-1303).
gtggtttgccactagcttt

SEQ ID NO: 654141 - DNA, 19 bp, Mus musculus
  siRNA target sequence for Slc22a6 (NM_008766.2,1340-1358).
ggggtcagcatgtacctta

SEQ ID NO: 654142 - DNA, 19 bp, Mus musculus
  siRNA target sequence for Slc22a6 (NM_008766.2,1341-1359).
gggtcagcatgtaccttat

SEQ ID NO: 654143 - DNA, 19 bp, Mus musculus
  siRNA target sequence for Slc22a6 (NM_008766.2,1402-1420).
gtgcttcctagtcatcaat

SEQ ID NO: 654144 - DNA, 19 bp, Mus musculus
  siRNA target sequence for Slc22a6 (NM_008766.2,1467-1485).
gcatctgtatcctagtgaa

SEQ ID NO: 654145 - DNA, 19 bp, Mus musculus
  siRNA target sequence for Slc22a6 (NM_008766.2,1468-1486).
catctgtatcctagtgaat

SEQ ID NO: 654146 - DNA, 19 bp, Mus musculus
  siRNA target sequence for Slc22a6 (NM_008766.2,1496-1514).
ccgaggggccatacaatca

SEQ ID NO: 654147 - DNA, 19 bp, Mus musculus
  siRNA target sequence for Slc22a6 (NM_008766.2,1497-1515).
cgaggggccatacaatcat

SEQ ID NO: 654148 - DNA, 19 bp, Mus musculus
  siRNA target sequence for Slc22a6 (NM_008766.2,1498-1516).
gaggggccatacaatcatt

SEQ ID NO: 654149 - DNA, 19 bp, Mus musculus
  siRNA target sequence for Slc22a6 (NM_008766.2,1589-1607).
gagctgtaccccacaatga

SEQ ID NO: 654150 - DNA, 19 bp, Mus musculus
  siRNA target sequence for Slc22a6 (NM_008766.2,1591-1609).
gctgtaccccacaatgatt

SEQ ID NO: 654151 - DNA, 19 bp, Mus musculus
  siRNA target sequence for Slc22a6 (NM_008766.2,1701-1719).
ccatacctctcttcatctt

SEQ ID NO: 654152 - DNA, 19 bp, Mus musculus
  siRNA target sequence for Slc22a7 (NM_144856.1,129-147).
cctgctcccgatgcatttt

SEQ ID NO: 654153 - DNA, 19 bp, Mus musculus
  siRNA target sequence for Slc22a7 (NM_144856.1,325-343).
ggaacagaggtgtacaact

SEQ ID NO: 654154 - DNA, 19 bp, Mus musculus
  siRNA target sequence for Slc22a7 (NM_144856.1,394-412).
gagtacgaccgctcagaat

SEQ ID NO: 654155 - DNA, 19 bp, Mus musculus
  siRNA target sequence for Slc22a7 (NM_144856.1,399-417).
cgaccgctcagaattctct

SEQ ID NO: 654156 - DNA, 19 bp, Mus musculus
  siRNA target sequence for Slc22a7 (NM_144856.1,400-418).
gaccgctcagaattctctt

SEQ ID NO: 654157 - DNA, 19 bp, Mus musculus
  siRNA target sequence for Slc22a7 (NM_144856.1,460-478).
ggcctgaacaaagttacat

SEQ ID NO: 654158 - DNA, 19 bp, Mus musculus
  siRNA target sequence for Slc22a7 (NM_144856.1,512-530).
ctgtggtgtacggatactt

SEQ ID NO: 654159 - DNA, 19 bp, Mus musculus
  siRNA target sequence for Slc22a7 (NM_144856.1,514-532).
gtggtgtacggatacttgt

SEQ ID NO: 654160 - DNA, 19 bp, Mus musculus
  siRNA target sequence for Slc22a7 (NM_144856.1,602-620).
ctgcagcctcggtcaacta

SEQ ID NO: 654161 - DNA, 19 bp, Mus musculus
  siRNA target sequence for Slc22a7 (NM_144856.1,658-676).
gccctggctggttttacca

SEQ ID NO: 654162 - DNA, 19 bp, Mus musculus
  siRNA target sequence for Slc22a7 (NM_144856.1,663-681).
ggctggttttaccatcatt

SEQ ID NO: 654163 - DNA, 19 bp, Mus musculus
  siRNA target sequence for Slc22a7 (NM_144856.1,665-683).
ctggttttaccatcattgt

SEQ ID NO: 654164 - DNA, 19 bp, Mus musculus
  siRNA target sequence for Slc22a7 (NM_144856.1,1102-1120).
ggagtgaacttttcttact

SEQ ID NO: 654165 - DNA, 19 bp, Mus musculus
  siRNA target sequence for Slc22a7 (NM_144856.1,1192-1210).
gaggtgccttccaaaatta

SEQ ID NO: 654166 - DNA, 19 bp, Mus musculus
  siRNA target sequence for Slc22a7 (NM_144856.1,1202-1220).
ccaaaattacggtcttctt

SEQ ID NO: 654167 - DNA, 19 bp, Mus musculus
  siRNA target sequence for Slc22a7 (NM_144856.1,1506-1524).
gctgttactgcccaaactt

SEQ ID NO: 654168 - DNA, 19 bp, Mus musculus
  siRNA target sequence for Slc22a7 (NM_144856.1,1639-1657).
gacagatccgggactgaat

SEQ ID NO: 654169 - DNA, 19 bp, Mus musculus
  siRNA target sequence for Slc22a7 (NM_144856.1,1641-1659).
cagatccgggactgaatta

SEQ ID NO: 654170 - DNA, 19 bp, Mus musculus
  siRNA target sequence for Slco1a1 (NM_013797.1,173-191).
gaaaaaggttgcaacacaa

SEQ ID NO: 654171 - DNA, 19 bp, Mus musculus
  siRNA target sequence for Slco1a1 (NM_013797.1,244-262).
catacctagccaaatcact

SEQ ID NO: 654172 - DNA, 19 bp, Mus musculus
  siRNA target sequence for Slco1a1 (NM_013797.1,248-266).
cctagccaaatcactatca

SEQ ID NO: 654173 - DNA, 19 bp, Mus musculus
  siRNA target sequence for Slco1a1 (NM_013797.1,767-785).
gattgttggcccgattatt

SEQ ID NO: 654174 - DNA, 19 bp, Mus musculus
  siRNA target sequence for Slco1a1 (NM_013797.1,996-1014).
gatgtgactaaatatgaga

SEQ ID NO: 654175 - DNA, 19 bp, Mus musculus
  siRNA target sequence for Slco1a1 (NM_013797.1,1149-1167).
ggatttgccagtacattta

SEQ ID NO: 654176 - DNA, 19 bp, Mus musculus
  siRNA target sequence for Slco1a1 (NM_013797.1,1227-1245).
ctcataggtgtttatagct

SEQ ID NO: 654177 - DNA, 19 bp, Mus musculus
  siRNA target sequence for Slco1a1 (NM_013797.1,1335-1353).
ggcctgtccttatctgaat

SEQ ID NO: 654178 - DNA, 19 bp, Mus musculus
  siRNA target sequence for Slco1a1 (NM_013797.1,1338-1356).
ctgtccttatctgaatatt

SEQ ID NO: 654179 - DNA, 19 bp, Mus musculus
  siRNA target sequence for Slco1a1 (NM_013797.1,2000-2018).
ccccgcagtcttcattcta

SEQ ID NO: 654180 - DNA, 19 bp, Mus musculus
  siRNA target sequence for Slco1a1 (NM_013797.1,2001-2019).
cccgcagtcttcattctaa

SEQ ID NO: 654181 - DNA, 19 bp, Mus musculus
  siRNA target sequence for Slco1a1 (NM_013797.1,2002-2020).
ccgcagtcttcattctaat

SEQ ID NO: 654182 - DNA, 19 bp, Mus musculus
  siRNA target sequence for Slco1a4 (NM_030687.1,584-602).
gggtgtttcttaatatcga

SEQ ID NO: 654183 - DNA, 19 bp, Mus musculus
  siRNA target sequence for Slco1a4 (NM_030687.1,585-603).
ggtgtttcttaatatcgat

SEQ ID NO: 654184 - DNA, 19 bp, Mus musculus
  siRNA target sequence for Slco1a4 (NM_030687.1,1280-1298).
gcctttatcaattcattta

SEQ ID NO: 654185 - DNA, 19 bp, Mus musculus
  siRNA target sequence for Slco1a4 (NM_030687.1,1299-1317).
ccttcatgcctaagtatct

SEQ ID NO: 654186 - DNA, 19 bp, Mus musculus
  siRNA target sequence for Slco1a4 (NM_030687.1,1360-1378).
catgggtctttacatgtta

SEQ ID NO: 654187 - DNA, 19 bp, Mus musculus
  siRNA target sequence for Slco1a4 (NM_030687.1,1390-1408).
cctcggatatttaattggt

SEQ ID NO: 654188 - DNA, 19 bp, Mus musculus
  siRNA target sequence for Slco1a4 (NM_030687.1,1490-1508).
ctgtcttttgttagctata

SEQ ID NO: 654189 - DNA, 19 bp, Mus musculus
  siRNA target sequence for Slco1a4 (NM_030687.1,1492-1510).
gtcttttgttagctatata

SEQ ID NO: 654190 - DNA, 19 bp, Mus musculus
  siRNA target sequence for Slco1a4 (NM_030687.1,1954-1972).
gagaatattaggtggtatt

SEQ ID NO: 654191 - DNA, 19 bp, Mus musculus
  siRNA target sequence for Slco1a4 (NM_030687.1,2259-2277).
gtcctacgatgcagaatga

SEQ ID NO: 654192 - DNA, 19 bp, Mus musculus
  siRNA target sequence for 1810013D05Rik (NM_028051.1,428-446).
gttgtttggtctatatgga

SEQ ID NO: 654193 - DNA, 19 bp, Mus musculus
  siRNA target sequence for 1810013D05Rik (NM_028051.1,655-673).
gtgaccaggaggaatcaaa

SEQ ID NO: 654194 - DNA, 19 bp, Mus musculus
  siRNA target sequence for 1810013D05Rik (NM_028051.1,761-779).
gaatgaggattgtctgaat

SEQ ID NO: 654195 - DNA, 19 bp, Mus musculus
  siRNA target sequence for 1810013D05Rik (NM_028051.1,788-806).
gctgctggtcaattttgga

SEQ ID NO: 654196 - DNA, 19 bp, Mus musculus
  siRNA target sequence for 1810013D05Rik (NM_028051.1,851-869).
gtgcccagccctgctttat

SEQ ID NO: 654197 - DNA, 19 bp, Mus musculus
  siRNA target sequence for 1810013D05Rik (NM_028051.1,859-877).
ccctgctttatcagattga

SEQ ID NO: 654198 - DNA, 19 bp, Mus musculus
  siRNA target sequence for 1810013D05Rik (NM_028051.1,878-896).
cagccgtgtttgcatcaaa

SEQ ID NO: 654199 - DNA, 19 bp, Mus musculus
  siRNA target sequence for 1810013D05Rik (NM_028051.1,1264-1282).
gggatcttggagaaccaaa

SEQ ID NO: 654200 - DNA, 19 bp, Mus musculus
  siRNA target sequence for 1810013D05Rik (NM_028051.1,1481-1499).
cgacgggctggcattaggt

SEQ ID NO: 654201 - DNA, 19 bp, Mus musculus
  siRNA target sequence for 1810013D05Rik (NM_028051.1,1568-1586).
ccacgaactgggtgacttt

SEQ ID NO: 654202 - DNA, 19 bp, Mus musculus
  siRNA target sequence for 1810013D05Rik (NM_028051.1,1596-1614).
cttcaggaagggttatcct

SEQ ID NO: 654203 - DNA, 19 bp, Mus musculus
  siRNA target sequence for 1810013D05Rik (NM_028051.1,1729-1747).
ccacggctggggttttcct

SEQ ID NO: 654204 - DNA, 19 bp, Mus musculus
  siRNA target sequence for 1810074D23Rik (NM_027216.2,179-197).
ggcagctctcgtgttcata

SEQ ID NO: 654205 - DNA, 19 bp, Mus musculus
  siRNA target sequence for 1810074D23Rik (NM_027216.2,180-198).
gcagctctcgtgttcatat

SEQ ID NO: 654206 - DNA, 19 bp, Mus musculus
  siRNA target sequence for 1810074D23Rik (NM_027216.2,181-199).
cagctctcgtgttcatatt

SEQ ID NO: 654207 - DNA, 19 bp, Mus musculus
  siRNA target sequence for 1810074D23Rik (NM_027216.2,183-201).
gctctcgtgttcatattct

SEQ ID NO: 654208 - DNA, 19 bp, Mus musculus
  siRNA target sequence for 1810074D23Rik (NM_027216.2,206-224).
cgggcagaggcggatctta

SEQ ID NO: 654209 - DNA, 19 bp, Mus musculus
  siRNA target sequence for 1810074D23Rik (NM_027216.2,446-464).
gatgccaacagcaacgaaa

SEQ ID NO: 654210 - DNA, 19 bp, Mus musculus
  siRNA target sequence for 1810074D23Rik (NM_027216.2,538-556).
cagccctggcgctgaactt

SEQ ID NO: 654211 - DNA, 19 bp, Mus musculus
  siRNA target sequence for 1810074D23Rik (NM_027216.2,608-626).
cttcccggagagtgaactt

SEQ ID NO: 654212 - DNA, 19 bp, Mus musculus
  siRNA target sequence for 1810074D23Rik (NM_027216.2,613-631).
cggagagtgaactttccat

SEQ ID NO: 654213 - DNA, 19 bp, Mus musculus
  siRNA target sequence for 1810074D23Rik (NM_027216.2,646-664).
gtgagaatggcgaggtata

SEQ ID NO: 654214 - DNA, 19 bp, Mus musculus
  siRNA target sequence for 1810074D23Rik (NM_027216.2,757-775).
gctggaggaggattgcttt

SEQ ID NO: 654215 - DNA, 19 bp, Mus musculus
  siRNA target sequence for 1810074D23Rik (NM_027216.2,881-899).
gaatctggccattggaatt

SEQ ID NO: 654216 - DNA, 19 bp, Mus musculus
  siRNA target sequence for 1810074D23Rik (NM_027216.2,895-913).
gaattgggatccagaattt

SEQ ID NO: 654217 - DNA, 19 bp, Mus musculus
  siRNA target sequence for 1810074D23Rik (NM_027216.2,945-963).
cgtggagcaggcttctcta

SEQ ID NO: 654218 - DNA, 19 bp, Mus musculus
  siRNA target sequence for 2900042E17Rik (NM_172653.2,205-223).
cagtgcaggatgctgaaaa

SEQ ID NO: 654219 - DNA, 19 bp, Mus musculus
  siRNA target sequence for 2900042E17Rik (NM_172653.2,317-335).
gggccttggagagatcaaa

SEQ ID NO: 654220 - DNA, 19 bp, Mus musculus
  siRNA target sequence for 2900042E17Rik (NM_172653.2,329-347).
gatcaaagtcgttgagatt

SEQ ID NO: 654221 - DNA, 19 bp, Mus musculus
  siRNA target sequence for 2900042E17Rik (NM_172653.2,332-350).
caaagtcgttgagattaat

SEQ ID NO: 654222 - DNA, 19 bp, Mus musculus
  siRNA target sequence for 2900042E17Rik (NM_172653.2,424-442).
cgcatacccaccagcattt

SEQ ID NO: 654223 - DNA, 19 bp, Mus musculus
  siRNA target sequence for 2900042E17Rik (NM_172653.2,431-449).
ccaccagcattttcacaat

SEQ ID NO: 654224 - DNA, 19 bp, Mus musculus
  siRNA target sequence for 2900042E17Rik (NM_172653.2,625-643).
ctactcgtcacgttcataa

SEQ ID NO: 654225 - DNA, 19 bp, Mus musculus
  siRNA target sequence for 2900042E17Rik (NM_172653.2,628-646).
ctcgtcacgttcataatga

SEQ ID NO: 654226 - DNA, 19 bp, Mus musculus
  siRNA target sequence for 2900042E17Rik (NM_172653.2,630-648).
cgtcacgttcataatgact

SEQ ID NO: 654227 - DNA, 19 bp, Mus musculus
  siRNA target sequence for 2900042E17Rik (NM_172653.2,687-705).
ccttcaccagagaccaata

SEQ ID NO: 654228 - DNA, 19 bp, Mus musculus
  siRNA target sequence for 2900042E17Rik (NM_172653.2,774-792).
gaaaactcggaggttaata

SEQ ID NO: 654229 - DNA, 19 bp, Mus musculus
  siRNA target sequence for 2900042E17Rik (NM_172653.2,823-841).
gtgaacaatatgagcataa

SEQ ID NO: 654230 - DNA, 19 bp, Mus musculus
  siRNA target sequence for 2900042E17Rik (NM_172653.2,836-854).
gcataaccgggttcacaaa

SEQ ID NO: 654231 - DNA, 19 bp, Mus musculus
  siRNA target sequence for 2900042E17Rik (NM_172653.2,851-869).
caaacttgaccgtgtacat

SEQ ID NO: 654232 - DNA, 19 bp, Mus musculus
  siRNA target sequence for 2900042E17Rik (NM_172653.2,960-978).
gaacttcgacatactagaa

SEQ ID NO: 654233 - DNA, 19 bp, Mus musculus
  siRNA target sequence for 2900042E17Rik (NM_172653.2,980-998).
gcgagaagcaccacatgtt

SEQ ID NO: 654234 - DNA, 19 bp, Mus musculus
  siRNA target sequence for 2900042E17Rik (NM_172653.2,981-999).
cgagaagcaccacatgtta

SEQ ID NO: 654235 - DNA, 19 bp, Mus musculus
  siRNA target sequence for 2900042E17Rik (NM_172653.2,1049-1067).
cgaccgccagcatgaatgt

SEQ ID NO: 654236 - DNA, 19 bp, Mus musculus
  siRNA target sequence for 2900042E17Rik (NM_172653.2,1050-1068).
gaccgccagcatgaatgtt

SEQ ID NO: 654237 - DNA, 19 bp, Mus musculus
  siRNA target sequence for 2900042E17Rik (NM_172653.2,1070-1088).
gaacgtcactcagttgtta

SEQ ID NO: 654238 - DNA, 19 bp, Mus musculus
  siRNA target sequence for 2900042E17Rik (NM_172653.2,1116-1134).
cccatctcaccggatctat

SEQ ID NO: 654239 - DNA, 19 bp, Mus musculus
  siRNA target sequence for 2900042E17Rik (NM_172653.2,1128-1146).
gatctattcacgtaccttt

SEQ ID NO: 654240 - DNA, 19 bp, Mus musculus
  siRNA target sequence for 2900042E17Rik (NM_172653.2,1147-1165).
gccctgcattgctgtatca

SEQ ID NO: 654241 - DNA, 19 bp, Mus musculus
  siRNA target sequence for 2900042E17Rik (NM_172653.2,1149-1167).
cctgcattgctgtatcaga

SEQ ID NO: 654242 - DNA, 19 bp, Mus musculus
  siRNA target sequence for 2900042E17Rik (NM_172653.2,1150-1168).
ctgcattgctgtatcagat

SEQ ID NO: 654243 - DNA, 19 bp, Mus musculus
  siRNA target sequence for 2900042E17Rik (NM_172653.2,1164-1182).
cagatcgacagcagacttt

SEQ ID NO: 654244 - DNA, 19 bp, Mus musculus
  siRNA target sequence for 2900042E17Rik (NM_172653.2,1174-1192).
gcagactttgtattgaaca

SEQ ID NO: 654245 - DNA, 19 bp, Mus musculus
  siRNA target sequence for 2900042E17Rik (NM_172653.2,1274-1292).
gtggatctgtggcatcata

SEQ ID NO: 654246 - DNA, 19 bp, Mus musculus
  siRNA target sequence for 2900042E17Rik (NM_172653.2,1277-1295).
gatctgtggcatcatatct

SEQ ID NO: 654247 - DNA, 19 bp, Mus musculus
  siRNA target sequence for 2900042E17Rik (NM_172653.2,1390-1408).
cactagcagtaggaacaat

SEQ ID NO: 654248 - DNA, 19 bp, Mus musculus
  siRNA target sequence for 2900042E17Rik (NM_172653.2,1478-1496).
gcacggacatggtcattca

SEQ ID NO: 654249 - DNA, 19 bp, Mus musculus
  siRNA target sequence for 2900042E17Rik (NM_172653.2,1495-1513).
cacatgggcatgaatctaa

SEQ ID NO: 654250 - DNA, 19 bp, Mus musculus
  siRNA target sequence for 2900042E17Rik (NM_172653.2,1517-1535).
gtttttggaagaatatgat

SEQ ID NO: 654251 - DNA, 19 bp, Mus musculus
  siRNA target sequence for 2900042E17Rik (NM_172653.2,1557-1575).
gcgctaggaggcatttact

SEQ ID NO: 654252 - DNA, 19 bp, Mus musculus
  siRNA target sequence for 2900042E17Rik (NM_172653.2,1558-1576).
cgctaggaggcatttactt

SEQ ID NO: 654253 - DNA, 19 bp, Mus musculus
  siRNA target sequence for 2900042E17Rik (NM_172653.2,1559-1577).
gctaggaggcatttactta

SEQ ID NO: 654254 - DNA, 19 bp, Mus musculus
  siRNA target sequence for 2900042E17Rik (NM_172653.2,1564-1582).
gaggcatttacttactgtt

SEQ ID NO: 654255 - DNA, 19 bp, Mus musculus
  siRNA target sequence for 2900042E17Rik (NM_172653.2,1593-1611).
cactgcattcgaatgttta

SEQ ID NO: 654256 - DNA, 19 bp, Mus musculus
  siRNA target sequence for 2900042E17Rik (NM_172653.2,1597-1615).
gcattcgaatgtttaagca

SEQ ID NO: 654257 - DNA, 19 bp, Mus musculus
  siRNA target sequence for 2900042E17Rik (NM_172653.2,1772-1790).
ctctgaagaccggcttaat

SEQ ID NO: 654258 - DNA, 19 bp, Mus musculus
  siRNA target sequence for 2900042E17Rik (NM_172653.2,1774-1792).
ctgaagaccggcttaatga

SEQ ID NO: 654259 - DNA, 19 bp, Mus musculus
  siRNA target sequence for 2900042E17Rik (NM_172653.2,1776-1794).
gaagaccggcttaatgaga

SEQ ID NO: 654260 - DNA, 19 bp, Mus musculus
  siRNA target sequence for 2900042E17Rik (NM_172653.2,1793-1811).
gactgaactgacggattta

SEQ ID NO: 654261 - DNA, 19 bp, Mus musculus
  siRNA target sequence for 2900042E17Rik (NM_172653.2,1824-1842).
gaatcccctcctaaaaatt

SEQ ID NO: 654262 - DNA, 19 bp, Mus musculus
  siRNA target sequence for 2900042E17Rik (NM_172653.2,1891-1909).
gactgcacaccattcatga

SEQ ID NO: 654263 - DNA, 19 bp, Mus musculus
  siRNA target sequence for 2900042E17Rik (NM_172653.2,1917-1935).
gtccacgtgacctcacata

SEQ ID NO: 654264 - DNA, 19 bp, Mus musculus
  siRNA target sequence for 2900042E17Rik (NM_172653.2,2205-2223).
gattttgcagttcttctaa

SEQ ID NO: 654265 - DNA, 19 bp, Mus musculus
  siRNA target sequence for 2900042E17Rik (NM_172653.2,2227-2245).
caggcatgaccgtaaagca

SEQ ID NO: 654266 - DNA, 19 bp, Mus musculus
  siRNA target sequence for 2900042E17Rik (NM_172653.2,2234-2252).
gaccgtaaagcaagcaatt

SEQ ID NO: 654267 - DNA, 19 bp, Mus musculus
  siRNA target sequence for 2900042E17Rik (NM_172653.2,2236-2254).
ccgtaaagcaagcaattgt

SEQ ID NO: 654268 - DNA, 19 bp, Mus musculus
  siRNA target sequence for 2900042E17Rik (NM_172653.2,2238-2256).
gtaaagcaagcaattgtgt

SEQ ID NO: 654269 - DNA, 19 bp, Mus musculus
  siRNA target sequence for 2900042E17Rik (NM_172653.2,2303-2321).
cacggcagtcggtcagtat

SEQ ID NO: 654270 - DNA, 19 bp, Mus musculus
  siRNA target sequence for 2900042E17Rik (NM_172653.2,2314-2332).
gtcagtatgccaacaacat

SEQ ID NO: 654271 - DNA, 19 bp, Mus musculus
  siRNA target sequence for 2900042E17Rik (NM_172653.2,2443-2461).
gtccagttgggcagttcat

SEQ ID NO: 654272 - DNA, 19 bp, Mus musculus
  siRNA target sequence for 2900042E17Rik (NM_172653.2,2446-2464).
cagttgggcagttcattct

SEQ ID NO: 654273 - DNA, 19 bp, Mus musculus
  siRNA target sequence for 2900042E17Rik (NM_172653.2,2492-2510).
cgccatcatgctggttatt

SEQ ID NO: 654274 - DNA, 19 bp, Mus musculus
  siRNA target sequence for 2900042E17Rik (NM_172653.2,2511-2529).
gccctctatgaagacaaaa

SEQ ID NO: 654275 - DNA, 19 bp, Mus musculus
  siRNA target sequence for Slc39a14 (NM_144808.1,300-318).
gttggtgctgtttggtata

SEQ ID NO: 654276 - DNA, 19 bp, Mus musculus
  siRNA target sequence for Slc39a14 (NM_144808.1,304-322).
gtgctgtttggtatatgga

SEQ ID NO: 654277 - DNA, 19 bp, Mus musculus
  siRNA target sequence for Slc39a14 (NM_144808.1,403-421).
cgctatggaaagaatgaca

SEQ ID NO: 654278 - DNA, 19 bp, Mus musculus
  siRNA target sequence for Slc39a14 (NM_144808.1,637-655).
caggcctgcacctcagaaa

SEQ ID NO: 654279 - DNA, 19 bp, Mus musculus
  siRNA target sequence for Slc39a14 (NM_144808.1,693-711).
gaagccaagcgccattgaa

SEQ ID NO: 654280 - DNA, 19 bp, Mus musculus
  siRNA target sequence for Slc39a14 (NM_144808.1,729-747).
cctcagtgtctcactgatt

SEQ ID NO: 654281 - DNA, 19 bp, Mus musculus
  siRNA target sequence for Slc39a14 (NM_144808.1,730-748).
ctcagtgtctcactgatta

SEQ ID NO: 654282 - DNA, 19 bp, Mus musculus
  siRNA target sequence for Slc39a14 (NM_144808.1,734-752).
gtgtctcactgattaacct

SEQ ID NO: 654283 - DNA, 19 bp, Mus musculus
  siRNA target sequence for Slc39a14 (NM_144808.1,785-803).
gcacggagaaagcgttttt

SEQ ID NO: 654284 - DNA, 19 bp, Mus musculus
  siRNA target sequence for Slc39a14 (NM_144808.1,1005-1023).
ccatcacgggcataaccat

SEQ ID NO: 654285 - DNA, 19 bp, Mus musculus
  siRNA target sequence for Slc39a14 (NM_144808.1,1009-1027).
cacgggcataaccatttta

SEQ ID NO: 654286 - DNA, 19 bp, Mus musculus
  siRNA target sequence for Slc39a14 (NM_144808.1,1012-1030).
gggcataaccattttacct

SEQ ID NO: 654287 - DNA, 19 bp, Mus musculus
  siRNA target sequence for Slc39a14 (NM_144808.1,1154-1172).
cggacgagaaggtcattgt

SEQ ID NO: 654288 - DNA, 19 bp, Mus musculus
  siRNA target sequence for Slc39a14 (NM_144808.1,1231-1249).
ggggtccgctactctgata

SEQ ID NO: 654289 - DNA, 19 bp, Mus musculus
  siRNA target sequence for Slc39a14 (NM_144808.1,1232-1250).
gggtccgctactctgatat

SEQ ID NO: 654290 - DNA, 19 bp, Mus musculus
  siRNA target sequence for Slc39a14 (NM_144808.1,1302-1320).
cgatggcctggctattggt

SEQ ID NO: 654291 - DNA, 19 bp, Mus musculus
  siRNA target sequence for Slc39a14 (NM_144808.1,1441-1459).
caggctctcttcttcaact

SEQ ID NO: 654292 - DNA, 19 bp, Mus musculus
  siRNA target sequence for Slc39a14 (NM_144808.1,1547-1565).
ctggaggaatgttcttgta

SEQ ID NO: 654293 - DNA, 19 bp, Mus musculus
  siRNA target sequence for Slc39a14 (NM_144808.1,1550-1568).
gaggaatgttcttgtatat

SEQ ID NO: 654294 - DNA, 19 bp, Mus musculus
  siRNA target sequence for Slc39a14 (NM_144808.1,1692-1710).
ggtcctcacaatgtattca

SEQ ID NO: 654295 - DNA, 19 bp, Mus musculus
  siRNA target sequence for Slc39a3 (NM_134135.1,420-438).
gggagcggcctccctttat

SEQ ID NO: 654296 - DNA, 19 bp, Mus musculus
  siRNA target sequence for Slc39a3 (NM_134135.1,421-439).
ggagcggcctccctttata

SEQ ID NO: 654297 - DNA, 19 bp, Mus musculus
  siRNA target sequence for Slc39a3 (NM_134135.1,687-705).
gtgtggtcagcctgtttgt

SEQ ID NO: 654298 - DNA, 19 bp, Mus musculus
  siRNA target sequence for Slc39a3 (NM_134135.1,909-927).
gtggcaccttcctgtttgt

SEQ ID NO: 654299 - DNA, 19 bp, Mus musculus
  siRNA target sequence for Slc39a3 (NM_134135.1,1020-1038).
ccggaatggtctttctcaa

SEQ ID NO: 654300 - DNA, 19 bp, Mus musculus
  siRNA target sequence for Slc39a6 (NM_139143.1,793-811).
gttgaatgcaacggaattt

SEQ ID NO: 654301 - DNA, 19 bp, Mus musculus
  siRNA target sequence for Slc39a6 (NM_139143.1,822-840).
gcccagccatcatcaatca

SEQ ID NO: 654302 - DNA, 19 bp, Mus musculus
  siRNA target sequence for Slc39a6 (NM_139143.1,849-867).
ctcgggcttgtctgattca

SEQ ID NO: 654303 - DNA, 19 bp, Mus musculus
  siRNA target sequence for Slc39a6 (NM_139143.1,853-871).
ggcttgtctgattcataca

SEQ ID NO: 654304 - DNA, 19 bp, Mus musculus
  siRNA target sequence for Slc39a6 (NM_139143.1,900-918).
caaagacctattctttaca

SEQ ID NO: 654305 - DNA, 19 bp, Mus musculus
  siRNA target sequence for Slc39a6 (NM_139143.1,944-962).
gccatttccatcatcagtt

SEQ ID NO: 654306 - DNA, 19 bp, Mus musculus
  siRNA target sequence for Slc39a6 (NM_139143.1,969-987).
ctctgctgggagtcatctt

SEQ ID NO: 654307 - DNA, 19 bp, Mus musculus
  siRNA target sequence for Slc39a6 (NM_139143.1,1065-1083).
gcgatgctctgttacatct

SEQ ID NO: 654308 - DNA, 19 bp, Mus musculus
  siRNA target sequence for Slc39a6 (NM_139143.1,1066-1084).
cgatgctctgttacatctt

SEQ ID NO: 654309 - DNA, 19 bp, Mus musculus
  siRNA target sequence for Slc39a6 (NM_139143.1,1169-1187).
cacctgtcggctcagaata

SEQ ID NO: 654310 - DNA, 19 bp, Mus musculus
  siRNA target sequence for Slc39a6 (NM_139143.1,1174-1192).
gtcggctcagaatatagaa

SEQ ID NO: 654311 - DNA, 19 bp, Mus musculus
  siRNA target sequence for Slc39a6 (NM_139143.1,1176-1194).
cggctcagaatatagaaga

SEQ ID NO: 654312 - DNA, 19 bp, Mus musculus
  siRNA target sequence for Slc39a6 (NM_139143.1,1230-1248).
cggctctagggggcttata

SEQ ID NO: 654313 - DNA, 19 bp, Mus musculus
  siRNA target sequence for Slc39a6 (NM_139143.1,1231-1249).
ggctctagggggcttatat

SEQ ID NO: 654314 - DNA, 19 bp, Mus musculus
  siRNA target sequence for Slc39a6 (NM_139143.1,1232-1250).
gctctagggggcttatatt

SEQ ID NO: 654315 - DNA, 19 bp, Mus musculus
  siRNA target sequence for Slc39a6 (NM_139143.1,1233-1251).
ctctagggggcttatattt

SEQ ID NO: 654316 - DNA, 19 bp, Mus musculus
  siRNA target sequence for Slc39a6 (NM_139143.1,1274-1292).
ctcacactgatcaagcaat

SEQ ID NO: 654317 - DNA, 19 bp, Mus musculus
  siRNA target sequence for Slc39a6 (NM_139143.1,1278-1296).
cactgatcaagcaatttaa

SEQ ID NO: 654318 - DNA, 19 bp, Mus musculus
  siRNA target sequence for Slc39a6 (NM_139143.1,1413-1431).
gggaacgacctgaaagcta

SEQ ID NO: 654319 - DNA, 19 bp, Mus musculus
  siRNA target sequence for Slc39a6 (NM_139143.1,1414-1432).
ggaacgacctgaaagctat

SEQ ID NO: 654320 - DNA, 19 bp, Mus musculus
  siRNA target sequence for Slc39a6 (NM_139143.1,1757-1775).
ggcgacgggctgcacaatt

SEQ ID NO: 654321 - DNA, 19 bp, Mus musculus
  siRNA target sequence for Slc39a6 (NM_139143.1,1762-1780).
cgggctgcacaatttcagt

SEQ ID NO: 654322 - DNA, 19 bp, Mus musculus
  siRNA target sequence for Slc39a6 (NM_139143.1,1965-1983).
gaatggcaacagggatatt

SEQ ID NO: 654323 - DNA, 19 bp, Mus musculus
  siRNA target sequence for Slc39a6 (NM_139143.1,1978-1996).
gatattcatcgggcattat

SEQ ID NO: 654324 - DNA, 19 bp, Mus musculus
  siRNA target sequence for Slc39a6 (NM_139143.1,1987-2005).
cgggcattatgcagaaaat

SEQ ID NO: 654325 - DNA, 19 bp, Mus musculus
  siRNA target sequence for Slc39a6 (NM_139143.1,1989-2007).
ggcattatgcagaaaatgt

SEQ ID NO: 654326 - DNA, 19 bp, Mus musculus
  siRNA target sequence for Slc39a6 (NM_139143.1,2027-2045).
ctcactgccggcttgttca

SEQ ID NO: 654327 - DNA, 19 bp, Mus musculus
  siRNA target sequence for Slc39a6 (NM_139143.1,2031-2049).
ctgccggcttgttcatgta

SEQ ID NO: 654328 - DNA, 19 bp, Mus musculus
  siRNA target sequence for Slc39a6 (NM_139143.1,2034-2052).
ccggcttgttcatgtatgt

SEQ ID NO: 654329 - DNA, 19 bp, Mus musculus
  siRNA target sequence for Slc39a6 (NM_139143.1,2109-2127).
gcagccgttggggatattt

SEQ ID NO: 654330 - DNA, 19 bp, Mus musculus
  siRNA target sequence for Slc39a6 (NM_139143.1,2112-2130).
gccgttggggatatttctt

SEQ ID NO: 654331 - DNA, 19 bp, Mus musculus
  siRNA target sequence for Slc39a6 (NM_139143.1,2150-2168).
cttctcggttttggaatta

SEQ ID NO: 654332 - DNA, 19 bp, Mus musculus
  siRNA target sequence for Slc39a6 (NM_139143.1,2155-2173).
cggttttggaattatgtta

SEQ ID NO: 654333 - DNA, 19 bp, Mus musculus
  siRNA target sequence for Slc39a7 (NM_008202.1,510-528).
ccacggccacactcatgaa

SEQ ID NO: 654334 - DNA, 19 bp, Mus musculus
  siRNA target sequence for Slc39a7 (NM_008202.1,511-529).
cacggccacactcatgaaa

SEQ ID NO: 654335 - DNA, 19 bp, Mus musculus
  siRNA target sequence for Slc39a7 (NM_008202.1,792-810).
cccagtagaatctaactct

SEQ ID NO: 654336 - DNA, 19 bp, Mus musculus
  siRNA target sequence for Slc39a7 (NM_008202.1,899-917).
ccttggaacctcattctca

SEQ ID NO: 654337 - DNA, 19 bp, Mus musculus
  siRNA target sequence for Slc39a7 (NM_008202.1,1118-1136).
gacatgagtgttcttcaaa

SEQ ID NO: 654338 - DNA, 19 bp, Mus musculus
  siRNA target sequence for Slc39a7 (NM_008202.1,1295-1313).
ctgacttggcacacaactt

SEQ ID NO: 654339 - DNA, 19 bp, Mus musculus
  siRNA target sequence for Slc39a8 (NM_026228.2,719-737).
ccctgggaggatgtaagaa

SEQ ID NO: 654340 - DNA, 19 bp, Mus musculus
  siRNA target sequence for Slc39a8 (NM_026228.2,780-798).
gattcctgtcagtgacaat

SEQ ID NO: 654341 - DNA, 19 bp, Mus musculus
  siRNA target sequence for Slc39a8 (NM_026228.2,826-844).
gattttaacccccttgata

SEQ ID NO: 654342 - DNA, 19 bp, Mus musculus
  siRNA target sequence for Slc39a8 (NM_026228.2,838-856).
cttgataaagaagtcttat

SEQ ID NO: 654343 - DNA, 19 bp, Mus musculus
  siRNA target sequence for Slc39a8 (NM_026228.2,850-868).
gtcttatttccccaagatt

SEQ ID NO: 654344 - DNA, 19 bp, Mus musculus
  siRNA target sequence for Slc39a8 (NM_026228.2,913-931).
cgccattttccagcttatt

SEQ ID NO: 654345 - DNA, 19 bp, Mus musculus
  siRNA target sequence for Slc39a8 (NM_026228.2,916-934).
cattttccagcttattcca

SEQ ID NO: 654346 - DNA, 19 bp, Mus musculus
  siRNA target sequence for Slc39a8 (NM_026228.2,954-972).
ccaaaattgacaattacgt

SEQ ID NO: 654347 - DNA, 19 bp, Mus musculus
  siRNA target sequence for Slc39a8 (NM_026228.2,955-973).
caaaattgacaattacgtt

SEQ ID NO: 654348 - DNA, 19 bp, Mus musculus
  siRNA target sequence for Slc39a8 (NM_026228.2,976-994).
gaaagcagttgctgtgttt

SEQ ID NO: 654349 - DNA, 19 bp, Mus musculus
  siRNA target sequence for Slc39a8 (NM_026228.2,995-1013).
ggtggattttacatgcttt

SEQ ID NO: 654350 - DNA, 19 bp, Mus musculus
  siRNA target sequence for Slc39a8 (NM_026228.2,996-1014).
gtggattttacatgctttt

SEQ ID NO: 654351 - DNA, 19 bp, Mus musculus
  siRNA target sequence for Slc39a8 (NM_026228.2,1019-1037).
gtcgagagaacacttaaga

SEQ ID NO: 654352 - DNA, 19 bp, Mus musculus
  siRNA target sequence for Slc39a8 (NM_026228.2,1029-1047).
cacttaagatgctactgaa

SEQ ID NO: 654353 - DNA, 19 bp, Mus musculus
  siRNA target sequence for Slc39a8 (NM_026228.2,1056-1074).
gccagaatgaccatactca

SEQ ID NO: 654354 - DNA, 19 bp, Mus musculus
  siRNA target sequence for Slc39a8 (NM_026228.2,1071-1089).
ctcacttcaggaatgatga

SEQ ID NO: 654355 - DNA, 19 bp, Mus musculus
  siRNA target sequence for Slc39a8 (NM_026228.2,1075-1093).
cttcaggaatgatgacttt

SEQ ID NO: 654356 - DNA, 19 bp, Mus musculus
  siRNA target sequence for Slc39a8 (NM_026228.2,1115-1133).
caacccaaaacgttaccat

SEQ ID NO: 654357 - DNA, 19 bp, Mus musculus
  siRNA target sequence for Slc39a8 (NM_026228.2,1144-1162).
caacggtgtgacttgctat

SEQ ID NO: 654358 - DNA, 19 bp, Mus musculus
  siRNA target sequence for Slc39a8 (NM_026228.2,1305-1323).
ggatgatcacgctttgtga

SEQ ID NO: 654359 - DNA, 19 bp, Mus musculus
  siRNA target sequence for Slc39a8 (NM_026228.2,1306-1324).
gatgatcacgctttgtgat

SEQ ID NO: 654360 - DNA, 19 bp, Mus musculus
  siRNA target sequence for Slc39a8 (NM_026228.2,1320-1338).
gtgatgccctccacaattt

SEQ ID NO: 654361 - DNA, 19 bp, Mus musculus
  siRNA target sequence for Slc39a8 (NM_026228.2,1351-1369).
ggcgattggggcatcttgt

SEQ ID NO: 654362 - DNA, 19 bp, Mus musculus
  siRNA target sequence for Slc39a8 (NM_026228.2,1352-1370).
gcgattggggcatcttgta

SEQ ID NO: 654363 - DNA, 19 bp, Mus musculus
  siRNA target sequence for Slc39a8 (NM_026228.2,1354-1372).
gattggggcatcttgtact

SEQ ID NO: 654364 - DNA, 19 bp, Mus musculus
  siRNA target sequence for Slc39a8 (NM_026228.2,1358-1376).
ggggcatcttgtactttgt

SEQ ID NO: 654365 - DNA, 19 bp, Mus musculus
  siRNA target sequence for Slc39a8 (NM_026228.2,1420-1438).
ggagtttcctcatgagtta

SEQ ID NO: 654366 - DNA, 19 bp, Mus musculus
  siRNA target sequence for Slc39a8 (NM_026228.2,1518-1536).
gctacgtgggactagcttt

SEQ ID NO: 654367 - DNA, 19 bp, Mus musculus
  siRNA target sequence for Slc39a8 (NM_026228.2,1555-1573).
caattttgctcccaatatt

SEQ ID NO: 654368 - DNA, 19 bp, Mus musculus
  siRNA target sequence for Slc39a8 (NM_026228.2,1674-1692).
cggatttcaccttcttcat

SEQ ID NO: 654369 - DNA, 19 bp, Mus musculus
  siRNA target sequence for Slc39a8 (NM_026228.2,1752-1770).
caggagacatcgaattgca

SEQ ID NO: 654370 - DNA, 19 bp, Mus musculus
  siRNA target sequence for Slc22a3 (NM_011395.1,513-531).
cagcccgactactattggt

SEQ ID NO: 654371 - DNA, 19 bp, Mus musculus
  siRNA target sequence for Slc22a3 (NM_011395.1,663-681).
ctggaagccactaatacca

SEQ ID NO: 654372 - DNA, 19 bp, Mus musculus
  siRNA target sequence for Slc22a3 (NM_011395.1,781-799).
ccatcgtcagccagtttga

SEQ ID NO: 654373 - DNA, 19 bp, Mus musculus
  siRNA target sequence for Slc22a3 (NM_011395.1,883-901).
gctatgcagcggacagata

SEQ ID NO: 654374 - DNA, 19 bp, Mus musculus
  siRNA target sequence for Slc22a3 (NM_011395.1,884-902).
ctatgcagcggacagatat

SEQ ID NO: 654375 - DNA, 19 bp, Mus musculus
  siRNA target sequence for Slc22a3 (NM_011395.1,898-916).
gatatggcaggctcatcat

SEQ ID NO: 654376 - DNA, 19 bp, Mus musculus
  siRNA target sequence for Slc22a3 (NM_011395.1,903-921).
ggcaggctcatcatttact

SEQ ID NO: 654377 - DNA, 19 bp, Mus musculus
  siRNA target sequence for Slc22a3 (NM_011395.1,904-922).
gcaggctcatcatttactt

SEQ ID NO: 654378 - DNA, 19 bp, Mus musculus
  siRNA target sequence for Slc22a3 (NM_011395.1,905-923).
caggctcatcatttactta

SEQ ID NO: 654379 - DNA, 19 bp, Mus musculus
  siRNA target sequence for Slc22a3 (NM_011395.1,960-978).
gtggcatttgcgccaaatt

SEQ ID NO: 654380 - DNA, 19 bp, Mus musculus
  siRNA target sequence for Slc22a3 (NM_011395.1,962-980).
ggcatttgcgccaaatttt

SEQ ID NO: 654381 - DNA, 19 bp, Mus musculus
  siRNA target sequence for Slc22a3 (NM_011395.1,963-981).
gcatttgcgccaaattttt

SEQ ID NO: 654382 - DNA, 19 bp, Mus musculus
  siRNA target sequence for Slc22a3 (NM_011395.1,1046-1064).
cgtgatcgtgacagaaata

SEQ ID NO: 654383 - DNA, 19 bp, Mus musculus
  siRNA target sequence for Slc22a3 (NM_011395.1,1049-1067).
gatcgtgacagaaatagtt

SEQ ID NO: 654384 - DNA, 19 bp, Mus musculus
  siRNA target sequence for Slc22a3 (NM_011395.1,1057-1075).
cagaaatagttggttcaaa

SEQ ID NO: 654385 - DNA, 19 bp, Mus musculus
  siRNA target sequence for Slc22a3 (NM_011395.1,1093-1111).
gaatcgtgatccagatgtt

SEQ ID NO: 654386 - DNA, 19 bp, Mus musculus
  siRNA target sequence for Slc22a3 (NM_011395.1,1115-1133).
caccctcgggatcattatt

SEQ ID NO: 654387 - DNA, 19 bp, Mus musculus
  siRNA target sequence for Slc22a3 (NM_011395.1,1117-1135).
ccctcgggatcattattct

SEQ ID NO: 654388 - DNA, 19 bp, Mus musculus
  siRNA target sequence for Slc22a3 (NM_011395.1,1118-1136).
cctcgggatcattattctt

SEQ ID NO: 654389 - DNA, 19 bp, Mus musculus
  siRNA target sequence for Slc22a3 (NM_011395.1,1311-1329).
ggaaaacacctctcatcaa

SEQ ID NO: 654390 - DNA, 19 bp, Mus musculus
  siRNA target sequence for Slc22a3 (NM_011395.1,1364-1382).
cagtaacccatcctgttta

SEQ ID NO: 654391 - DNA, 19 bp, Mus musculus
  siRNA target sequence for Slc22a3 (NM_011395.1,1366-1384).
gtaacccatcctgtttaga

SEQ ID NO: 654392 - DNA, 19 bp, Mus musculus
  siRNA target sequence for Slc22a3 (NM_011395.1,1389-1407).
gtgagaactccccaaatga

SEQ ID NO: 654393 - DNA, 19 bp, Mus musculus
  siRNA target sequence for Slc22a3 (NM_011395.1,1398-1416).
ccccaaatgaggaaatgca

SEQ ID NO: 654394 - DNA, 19 bp, Mus musculus
  siRNA target sequence for Slc22a3 (NM_011395.1,1414-1432).
gcacgctcatccttatgtt

SEQ ID NO: 654395 - DNA, 19 bp, Mus musculus
  siRNA target sequence for Slc22a3 (NM_011395.1,1415-1433).
cacgctcatccttatgttt

SEQ ID NO: 654396 - DNA, 19 bp, Mus musculus
  siRNA target sequence for Slc22a3 (NM_011395.1,1494-1512).
ggcaacctctacatagact

SEQ ID NO: 654397 - DNA, 19 bp, Mus musculus
  siRNA target sequence for Slc22a3 (NM_011395.1,1495-1513).
gcaacctctacatagactt

SEQ ID NO: 654398 - DNA, 19 bp, Mus musculus
  siRNA target sequence for Slc22a3 (NM_011395.1,1535-1553).
gctgcccggagctctctta

SEQ ID NO: 654399 - DNA, 19 bp, Mus musculus
  siRNA target sequence for Slc22a3 (NM_011395.1,1536-1554).
ctgcccggagctctcttaa

SEQ ID NO: 654400 - DNA, 19 bp, Mus musculus
  siRNA target sequence for Slc22a3 (NM_011395.1,1541-1559).
cggagctctcttaatcctt

SEQ ID NO: 654401 - DNA, 19 bp, Mus musculus
  siRNA target sequence for Slc22a3 (NM_011395.1,1590-1608).
ccctttgcggcaagcaata

SEQ ID NO: 654402 - DNA, 19 bp, Mus musculus
  siRNA target sequence for Slc22a3 (NM_011395.1,1591-1609).
cctttgcggcaagcaatat

SEQ ID NO: 654403 - DNA, 19 bp, Mus musculus
  siRNA target sequence for Slc22a3 (NM_011395.1,1592-1610).
ctttgcggcaagcaatata

SEQ ID NO: 654404 - DNA, 19 bp, Mus musculus
  siRNA target sequence for Slc22a3 (NM_011395.1,1627-1645).
gtctggtcactgcattttt

SEQ ID NO: 654405 - DNA, 19 bp, Mus musculus
  siRNA target sequence for Slc22a3 (NM_011395.1,1631-1649).
ggtcactgcatttttacca

SEQ ID NO: 654406 - DNA, 19 bp, Mus musculus
  siRNA target sequence for Slc22a3 (NM_011395.1,1715-1733).
cgaaattgtttatttggta

SEQ ID NO: 654407 - DNA, 19 bp, Mus musculus
  siRNA target sequence for Slc22a3 (NM_011395.1,1716-1734).
gaaattgtttatttggtaa

SEQ ID NO: 654408 - DNA, 19 bp, Mus musculus
  siRNA target sequence for Slc22a3 (NM_011395.1,1742-1760).
gttgtacccaacgacatta

SEQ ID NO: 654409 - DNA, 19 bp, Mus musculus
  siRNA target sequence for Slc22a3 (NM_011395.1,1833-1851).
cggctggcagctatatggt

SEQ ID NO: 654410 - DNA, 19 bp, Mus musculus
  siRNA target sequence for Slc22a3 (NM_011395.1,1834-1852).
ggctggcagctatatggtt

SEQ ID NO: 654411 - DNA, 19 bp, Mus musculus
  siRNA target sequence for Slc22a3 (NM_011395.1,1835-1853).
gctggcagctatatggtta

SEQ ID NO: 654412 - DNA, 19 bp, Mus musculus
  siRNA target sequence for Slc22a3 (NM_011395.1,1838-1856).
ggcagctatatggttagaa

SEQ ID NO: 654413 - DNA, 19 bp, Mus musculus
  siRNA target sequence for Slc22a3 (NM_011395.1,1840-1858).
cagctatatggttagaact

SEQ ID NO: 654414 - DNA, 19 bp, Mus musculus
  siRNA target sequence for Slc22a3 (NM_011395.1,1896-1914).
ggtggcctcgtgatgcttt

SEQ ID NO: 654415 - DNA, 19 bp, Mus musculus
  siRNA target sequence for Slc22a3 (NM_011395.1,1897-1915).
gtggcctcgtgatgctttt

SEQ ID NO: 654416 - DNA, 19 bp, Mus musculus
  siRNA target sequence for Slc22a3 (NM_011395.1,1948-1966).
cggtggaagacgtagaaaa

SEQ ID NO: 654417 - DNA, 19 bp, Mus musculus
  siRNA target sequence for Slc22a4 (NM_019687.2,747-765).
cgtggtggccttcatacta

SEQ ID NO: 654418 - DNA, 19 bp, Mus musculus
  siRNA target sequence for Slc22a4 (NM_019687.2,798-816).
catcttctccacattagga

SEQ ID NO: 654419 - DNA, 19 bp, Mus musculus
  siRNA target sequence for Slc22a4 (NM_019687.2,1037-1055).
cgccagcagggatattcga

SEQ ID NO: 654420 - DNA, 19 bp, Mus musculus
  siRNA target sequence for Slc22a4 (NM_019687.2,1038-1056).
gccagcagggatattcgat

SEQ ID NO: 654421 - DNA, 19 bp, Mus musculus
  siRNA target sequence for Slc22a4 (NM_019687.2,1086-1104).
gaagcagcagaaagtcata

SEQ ID NO: 654422 - DNA, 19 bp, Mus musculus
  siRNA target sequence for Slc22a4 (NM_019687.2,1116-1134).
gttcaggactcggaacatt

SEQ ID NO: 654423 - DNA, 19 bp, Mus musculus
  siRNA target sequence for Slc22a4 (NM_019687.2,1203-1221).
caatgttcctaatttacat

SEQ ID NO: 654424 - DNA, 19 bp, Mus musculus
  siRNA target sequence for Slc22a4 (NM_019687.2,1245-1263).
cctctctggcctgattgaa

SEQ ID NO: 654425 - DNA, 19 bp, Mus musculus
  siRNA target sequence for Slc22a4 (NM_019687.2,1261-1279).
gaagttccagcttacttca

SEQ ID NO: 654426 - DNA, 19 bp, Mus musculus
  siRNA target sequence for Slc22a4 (NM_019687.2,1305-1323).
gccacggagatatattata

SEQ ID NO: 654427 - DNA, 19 bp, Mus musculus
  siRNA target sequence for Slc22a4 (NM_019687.2,1346-1364).
gaggtgtgcttctcttgat

SEQ ID NO: 654428 - DNA, 19 bp, Mus musculus
  siRNA target sequence for Slc22a4 (NM_019687.2,1372-1390).
gtacctgaagattataact

SEQ ID NO: 654429 - DNA, 19 bp, Mus musculus
  siRNA target sequence for Slc22a4 (NM_019687.2,1439-1457).
ccttctccatgttgtatgt

SEQ ID NO: 654430 - DNA, 19 bp, Mus musculus
  siRNA target sequence for Slc22a4 (NM_019687.2,1539-1557).
cattgccccctatttcgtt

SEQ ID NO: 654431 - DNA, 19 bp, Mus musculus
  siRNA target sequence for Slc22a4 (NM_019687.2,1544-1562).
ccccctatttcgtttacct

SEQ ID NO: 654432 - DNA, 19 bp, Mus musculus
  siRNA target sequence for Slc22a4 (NM_019687.2,1621-1639).
ggaatcatcacgctttttt

SEQ ID NO: 654433 - DNA, 19 bp, Mus musculus
  siRNA target sequence for Slc22a4 (NM_019687.2,1622-1640).
gaatcatcacgcttttttt

SEQ ID NO: 654434 - DNA, 19 bp, Mus musculus
  siRNA target sequence for Slc22a4 (NM_019687.2,1632-1650).
gctttttttccctgaaagt

SEQ ID NO: 654435 - DNA, 19 bp, Mus musculus
  siRNA target sequence for Slc22a4 (NM_019687.2,1749-1767).
ccccaaggttctaataact

SEQ ID NO: 654436 - DNA, 19 bp, Mus musculus
  siRNA target sequence for Slc22a5 (NM_011396.2,581-599).
ctgatgggctccttcattt

SEQ ID NO: 654437 - DNA, 19 bp, Mus musculus
  siRNA target sequence for Slc22a5 (NM_011396.2,583-601).
gatgggctccttcatttca

SEQ ID NO: 654438 - DNA, 19 bp, Mus musculus
  siRNA target sequence for Slc22a5 (NM_011396.2,626-644).
cgcaagaatgtgctgtttt

SEQ ID NO: 654439 - DNA, 19 bp, Mus musculus
  siRNA target sequence for Slc22a5 (NM_011396.2,1057-1075).
cttcgatccaagtgagtta

SEQ ID NO: 654440 - DNA, 19 bp, Mus musculus
  siRNA target sequence for Slc22a5 (NM_011396.2,1060-1078).
cgatccaagtgagttacaa

SEQ ID NO: 654441 - DNA, 19 bp, Mus musculus
  siRNA target sequence for Slc22a5 (NM_011396.2,1065-1083).
caagtgagttacaagactt

SEQ ID NO: 654442 - DNA, 19 bp, Mus musculus
  siRNA target sequence for Slc22a5 (NM_011396.2,1293-1311).
ggctgttgttgcagtactt

SEQ ID NO: 654443 - DNA, 19 bp, Mus musculus
  siRNA target sequence for Slc22a5 (NM_011396.2,1376-1394).
ctggtgccttcagaattgt

SEQ ID NO: 654444 - DNA, 19 bp, Mus musculus
  siRNA target sequence for Slc22a5 (NM_011396.2,1580-1598).
gatcgcttcctgccttata

SEQ ID NO: 654445 - DNA, 19 bp, Mus musculus
  siRNA target sequence for Slc22a5 (NM_011396.2,1628-1646).
gctatcctcaccttgttct

SEQ ID NO: 654446 - DNA, 19 bp, Mus musculus
  siRNA target sequence for Slc22a5 (NM_011396.2,1629-1647).
ctatcctcaccttgttctt

SEQ ID NO: 654447 - DNA, 19 bp, Mus musculus
  siRNA target sequence for Slc22a5 (NM_011396.2,1666-1684).
ccctctcccagataccatt

SEQ ID NO: 654448 - DNA, 19 bp, Mus musculus
  siRNA target sequence for Slc22a5 (NM_011396.2,1693-1711).
gctaagggtcaaaggaata

SEQ ID NO: 654449 - DNA, 19 bp, Mus musculus
  siRNA target sequence for Slc22a5 (NM_011396.2,1700-1718).
gtcaaaggaataaaacagt

SEQ ID NO: 654450 - DNA, 19 bp, Mus musculus
  siRNA target sequence for Slc22a8 (NM_031194.2,362-380).
gaatagccaaccacaactt

SEQ ID NO: 654451 - DNA, 19 bp, Mus musculus
  siRNA target sequence for Slc22a8 (NM_031194.2,562-580).
gatggctggatctacaaca

SEQ ID NO: 654452 - DNA, 19 bp, Mus musculus
  siRNA target sequence for Slc22a8 (NM_031194.2,615-633).
ggtatgcggctccaacaaa

SEQ ID NO: 654453 - DNA, 19 bp, Mus musculus
  siRNA target sequence for Slc22a8 (NM_031194.2,788-806).
gcctcactgtctatatgat

SEQ ID NO: 654454 - DNA, 19 bp, Mus musculus
  siRNA target sequence for Slc22a8 (NM_031194.2,1285-1303).
ggctttgcctactacagtt

SEQ ID NO: 654455 - DNA, 19 bp, Mus musculus
  siRNA target sequence for Slc22a8 (NM_031194.2,1305-1323).
ggctatgggagtagaagaa

SEQ ID NO: 654456 - DNA, 19 bp, Mus musculus
  siRNA target sequence for Slc22a8 (NM_031194.2,1307-1325).
ctatgggagtagaagaatt

SEQ ID NO: 654457 - DNA, 19 bp, Mus musculus
  siRNA target sequence for Slc22a8 (NM_031194.2,1375-1393).
cccgccaagttcatcacaa

SEQ ID NO: 654458 - DNA, 19 bp, Mus musculus
  siRNA target sequence for Slc22a8 (NM_031194.2,1389-1407).
cacaatcctctccataagt

SEQ ID NO: 654459 - DNA, 19 bp, Mus musculus
  siRNA target sequence for Slc22a8 (NM_031194.2,1604-1622).
caggtatgggtatcagtaa

SEQ ID NO: 654460 - DNA, 19 bp, Mus musculus
  siRNA target sequence for Slc22a8 (NM_031194.2,1607-1625).
gtatgggtatcagtaacat

SEQ ID NO: 654461 - DNA, 19 bp, Mus musculus
  siRNA target sequence for Slc22a8 (NM_031194.2,1628-1646).
gggctcgagtgggaagtat

SEQ ID NO: 654462 - DNA, 19 bp, Mus musculus
  siRNA target sequence for Slc22a8 (NM_031194.2,1630-1648).
gctcgagtgggaagtatga

SEQ ID NO: 654463 - DNA, 19 bp, Mus musculus
  siRNA target sequence for Slc22a8 (NM_031194.2,1631-1649).
ctcgagtgggaagtatgat

SEQ ID NO: 654464 - DNA, 19 bp, Mus musculus
  siRNA target sequence for Slc22a8 (NM_031194.2,1684-1702).
cccttcatccctaatgtca

SEQ ID NO: 654465 - DNA, 19 bp, Mus musculus
  siRNA target sequence for Slc22a8 (NM_031194.2,1685-1703).
ccttcatccctaatgtcat

SEQ ID NO: 654466 - DNA, 19 bp, Mus musculus
  siRNA target sequence for Slc22a8 (NM_031194.2,1765-1783).
cggcccttaccagaaacta

SEQ ID NO: 654467 - DNA, 19 bp, Mus musculus
  siRNA target sequence for Slc22a8 (NM_031194.2,1803-1821).
gtaccagcaaaccaagaaa

SEQ ID NO: 654468 - DNA, 19 bp, Mus musculus
  siRNA target sequence for Slc22a8 (NM_031194.2,1806-1824).
ccagcaaaccaagaaaaca

SEQ ID NO: 654469 - DNA, 19 bp, Mus musculus
  siRNA target sequence for Slc22a9 (NM_019723.1,672-690).
ggtcgcaagaatatcttgt

SEQ ID NO: 654470 - DNA, 19 bp, Mus musculus
  siRNA target sequence for Slc22a9 (NM_019723.1,777-795).
gttggaatgggacatatat

SEQ ID NO: 654471 - DNA, 19 bp, Mus musculus
  siRNA target sequence for Slc22a9 (NM_019723.1,950-968).
gctggcaattactttacca

SEQ ID NO: 654472 - DNA, 19 bp, Mus musculus
  siRNA target sequence for Slc22a9 (NM_019723.1,1110-1128).
gatccaagcgagaccaata

SEQ ID NO: 654473 - DNA, 19 bp, Mus musculus
  siRNA target sequence for Slc22a9 (NM_019723.1,1113-1131).
ccaagcgagaccaataaat

SEQ ID NO: 654474 - DNA, 19 bp, Mus musculus
  siRNA target sequence for Slc22a9 (NM_019723.1,1114-1132).
caagcgagaccaataaatt

SEQ ID NO: 654475 - DNA, 19 bp, Mus musculus
  siRNA target sequence for Slc22a9 (NM_019723.1,1117-1135).
gcgagaccaataaattaca

SEQ ID NO: 654476 - DNA, 19 bp, Mus musculus
  siRNA target sequence for Slc22a9 (NM_019723.1,1118-1136).
cgagaccaataaattacaa

SEQ ID NO: 654477 - DNA, 19 bp, Mus musculus
  siRNA target sequence for Slc22a9 (NM_019723.1,1179-1197).
ctggtccgaacaccaaata

SEQ ID NO: 654478 - DNA, 19 bp, Mus musculus
  siRNA target sequence for Slc22a9 (NM_019723.1,1182-1200).
gtccgaacaccaaatatca

SEQ ID NO: 654479 - DNA, 19 bp, Mus musculus
  siRNA target sequence for Slc22a9 (NM_019723.1,1414-1432).
gtgtccttctcttagtaca

SEQ ID NO: 654480 - DNA, 19 bp, Mus musculus
  siRNA target sequence for Slc22a9 (NM_019723.1,1437-1455).
gtgccttcagacctacatt

SEQ ID NO: 654481 - DNA, 19 bp, Mus musculus
  siRNA target sequence for Slc22a9 (NM_019723.1,1440-1458).
ccttcagacctacattact

SEQ ID NO: 654482 - DNA, 19 bp, Mus musculus
  siRNA target sequence for Slc22a9 (NM_019723.1,1446-1464).
gacctacattacttgtcta

SEQ ID NO: 654483 - DNA, 19 bp, Mus musculus
  siRNA target sequence for Slc22a9 (NM_019723.1,1449-1467).
ctacattacttgtctacta

SEQ ID NO: 654484 - DNA, 19 bp, Mus musculus
  siRNA target sequence for Slc22a9 (NM_019723.1,1687-1705).
ctatcatcactttattctt

SEQ ID NO: 654485 - DNA, 19 bp, Mus musculus
  siRNA target sequence for Slc22a9 (NM_019723.1,1739-1757).
cattgacgagatgcaaaaa

SEQ ID NO: 654486 - DNA, 19 bp, Mus musculus
  siRNA target sequence for Slc22a9 (NM_019723.1,1798-1816).
ggtccccgaaggagtctaa

SEQ ID NO: 654487 - DNA, 19 bp, Mus musculus
  siRNA target sequence for Slc22a9 (NM_019723.1,1802-1820).
cccgaaggagtctaaagga

SEQ ID NO: 654488 - DNA, 19 bp, Mus musculus
  siRNA target sequence for Slc22a9 (NM_019723.1,1803-1821).
ccgaaggagtctaaaggaa

SEQ ID NO: 654489 - DNA, 19 bp, Mus musculus
  siRNA target sequence for Slc22a9 (NM_019723.1,1837-1855).
cccgaacctccgaacctaa

SEQ ID NO: 654490 - DNA, 19 bp, Mus musculus
  siRNA target sequence for Slc22a9 (NM_019723.1,1838-1856).
ccgaacctccgaacctaaa

SEQ ID NO: 654491 - DNA, 19 bp, Mus musculus
  siRNA target sequence for Slc17a6 (NM_080853.2,880-898).
ccaccgcggaggcaaagtt

SEQ ID NO: 654492 - DNA, 19 bp, Mus musculus
  siRNA target sequence for Slc17a6 (NM_080853.2,881-899).
caccgcggaggcaaagtta

SEQ ID NO: 654493 - DNA, 19 bp, Mus musculus
  siRNA target sequence for Slc17a6 (NM_080853.2,884-902).
cgcggaggcaaagttatca

SEQ ID NO: 654494 - DNA, 19 bp, Mus musculus
  siRNA target sequence for Slc17a6 (NM_080853.2,885-903).
gcggaggcaaagttatcaa

SEQ ID NO: 654495 - DNA, 19 bp, Mus musculus
  siRNA target sequence for Slc17a6 (NM_080853.2,905-923).
gagaaagccaaatttaact

SEQ ID NO: 654496 - DNA, 19 bp, Mus musculus
  siRNA target sequence for Slc17a6 (NM_080853.2,957-975).
cgttcttctggggctatat

SEQ ID NO: 654497 - DNA, 19 bp, Mus musculus
  siRNA target sequence for Slc17a6 (NM_080853.2,982-1000).
ccagattccaggaggatat

SEQ ID NO: 654498 - DNA, 19 bp, Mus musculus
  siRNA target sequence for Slc17a6 (NM_080853.2,1080-1098).
ctgcagccagagtgcatta

SEQ ID NO: 654499 - DNA, 19 bp, Mus musculus
  siRNA target sequence for Slc17a6 (NM_080853.2,1085-1103).
gccagagtgcattatggat

SEQ ID NO: 654500 - DNA, 19 bp, Mus musculus
  siRNA target sequence for Slc17a6 (NM_080853.2,1100-1118).
ggatgtgtcatctttgtta

SEQ ID NO: 654501 - DNA, 19 bp, Mus musculus
  siRNA target sequence for Slc17a6 (NM_080853.2,1106-1124).
gtcatctttgttaggatat

SEQ ID NO: 654502 - DNA, 19 bp, Mus musculus
  siRNA target sequence for Slc17a6 (NM_080853.2,1111-1129).
ctttgttaggatattgcaa

SEQ ID NO: 654503 - DNA, 19 bp, Mus musculus
  siRNA target sequence for Slc17a6 (NM_080853.2,1258-1276).
gcccttagctggtatcctt

SEQ ID NO: 654504 - DNA, 19 bp, Mus musculus
  siRNA target sequence for Slc17a6 (NM_080853.2,1287-1305).
ctggatggtcgtcagtatt

SEQ ID NO: 654505 - DNA, 19 bp, Mus musculus
  siRNA target sequence for Slc17a6 (NM_080853.2,1289-1307).
ggatggtcgtcagtatttt

SEQ ID NO: 654506 - DNA, 19 bp, Mus musculus
  siRNA target sequence for Slc17a6 (NM_080853.2,1290-1308).
gatggtcgtcagtatttta

SEQ ID NO: 654507 - DNA, 19 bp, Mus musculus
  siRNA target sequence for Slc17a6 (NM_080853.2,1293-1311).
ggtcgtcagtattttatgt

SEQ ID NO: 654508 - DNA, 19 bp, Mus musculus
  siRNA target sequence for Slc17a6 (NM_080853.2,1325-1343).
ggcatggtctggtacatgt

SEQ ID NO: 654509 - DNA, 19 bp, Mus musculus
  siRNA target sequence for Slc17a6 (NM_080853.2,1373-1391).
gcaaagcatcctaccatta

SEQ ID NO: 654510 - DNA, 19 bp, Mus musculus
  siRNA target sequence for Slc17a6 (NM_080853.2,1378-1396).
gcatcctaccattacagat

SEQ ID NO: 654511 - DNA, 19 bp, Mus musculus
  siRNA target sequence for Slc17a6 (NM_080853.2,1383-1401).
ctaccattacagatgaaga

SEQ ID NO: 654512 - DNA, 19 bp, Mus musculus
  siRNA target sequence for Slc17a6 (NM_080853.2,1448-1466).
ggtgcaatggaaaaattta

SEQ ID NO: 654513 - DNA, 19 bp, Mus musculus
  siRNA target sequence for Slc17a6 (NM_080853.2,1449-1467).
gtgcaatggaaaaatttaa

SEQ ID NO: 654514 - DNA, 19 bp, Mus musculus
  siRNA target sequence for Slc17a6 (NM_080853.2,1498-1516).
gcccgtctacgcgataatt

SEQ ID NO: 654515 - DNA, 19 bp, Mus musculus
  siRNA target sequence for Slc17a6 (NM_080853.2,1500-1518).
ccgtctacgcgataattgt

SEQ ID NO: 654516 - DNA, 19 bp, Mus musculus
  siRNA target sequence for Slc17a6 (NM_080853.2,1501-1519).
cgtctacgcgataattgtt

SEQ ID NO: 654517 - DNA, 19 bp, Mus musculus
  siRNA target sequence for Slc17a6 (NM_080853.2,1669-1687).
gcaaattgcagatttccta

SEQ ID NO: 654518 - DNA, 19 bp, Mus musculus
  siRNA target sequence for Slc17a6 (NM_080853.2,1670-1688).
caaattgcagatttcctaa

SEQ ID NO: 654519 - DNA, 19 bp, Mus musculus
  siRNA target sequence for Slc17a6 (NM_080853.2,1707-1725).
caacaactacagtgagaaa

SEQ ID NO: 654520 - DNA, 19 bp, Mus musculus
  siRNA target sequence for Slc17a6 (NM_080853.2,1829-1847).
ggattcagtggatttgcta

SEQ ID NO: 654521 - DNA, 19 bp, Mus musculus
  siRNA target sequence for Slc17a6 (NM_080853.2,1830-1848).
gattcagtggatttgctat

SEQ ID NO: 654522 - DNA, 19 bp, Mus musculus
  siRNA target sequence for Slc17a6 (NM_080853.2,1853-1871).
ggtttcaatgttaatcact

SEQ ID NO: 654523 - DNA, 19 bp, Mus musculus
  siRNA target sequence for Slc17a6 (NM_080853.2,1884-1902).
caagatatgccagtatctt

SEQ ID NO: 654524 - DNA, 19 bp, Mus musculus
  siRNA target sequence for Slc17a6 (NM_080853.2,1887-1905).
gatatgccagtatcttaat

SEQ ID NO: 654525 - DNA, 19 bp, Mus musculus
  siRNA target sequence for Slc17a6 (NM_080853.2,1939-1957).
gatggtttgccctatcatt

SEQ ID NO: 654526 - DNA, 19 bp, Mus musculus
  siRNA target sequence for Slc17a6 (NM_080853.2,1942-1960).
ggtttgccctatcattgtt

SEQ ID NO: 654527 - DNA, 19 bp, Mus musculus
  siRNA target sequence for Slc17a6 (NM_080853.2,1961-1979).
ggtgcaatgacaaagaata

SEQ ID NO: 654528 - DNA, 19 bp, Mus musculus
  siRNA target sequence for Slc17a6 (NM_080853.2,2027-2045).
cactatggtggagtcatat

SEQ ID NO: 654529 - DNA, 19 bp, Mus musculus
  siRNA target sequence for Slc17a6 (NM_080853.2,2029-2047).
ctatggtggagtcatattt

SEQ ID NO: 654530 - DNA, 19 bp, Mus musculus
  siRNA target sequence for Slc17a6 (NM_080853.2,2276-2294).
caagacgcgtacacctata

SEQ ID NO: 654531 - DNA, 19 bp, Mus musculus
  siRNA target sequence for Slc17a6 (NM_080853.2,2290-2308).
ctataaggaccgagatgat

SEQ ID NO: 654532 - DNA, 19 bp, Mus musculus
  siRNA target sequence for Slc17a6 (NM_080853.2,2296-2314).
ggaccgagatgattattca

SEQ ID NO: 654533 - DNA, 19 bp, Mus musculus
  siRNA target sequence for Slc17a6 (NM_080853.2,2297-2315).
gaccgagatgattattcat

SEQ ID NO: 654534 - DNA, 19 bp, Mus musculus
  siRNA target sequence for Apoa2 (NM_013474.1,109-127).
cctggaaggagctttggtt

SEQ ID NO: 654535 - DNA, 19 bp, Mus musculus
  siRNA target sequence for Apoa2 (NM_013474.1,110-128).
ctggaaggagctttggtta

SEQ ID NO: 654536 - DNA, 19 bp, Mus musculus
  siRNA target sequence for Apoa2 (NM_013474.1,292-310).
caggtcagcaggaactagt

SEQ ID NO: 654537 - DNA, 19 bp, Mus musculus
  siRNA target sequence for Apoa2 (NM_013474.1,303-321).
gaactagtctggtgaactt

SEQ ID NO: 654538 - DNA, 19 bp, Mus musculus
  siRNA target sequence for Apoc1 (NM_007469.2,189-207).
cggatttgtccggaacatt

SEQ ID NO: 654539 - DNA, 19 bp, Mus musculus
  siRNA target sequence for Apoc1 (NM_007469.2,208-226).
ggagagcataccggataaa

SEQ ID NO: 654540 - DNA, 19 bp, Mus musculus
  siRNA target sequence for Apoc1 (NM_007469.2,213-231).
gcataccggataaactgaa

SEQ ID NO: 654541 - DNA, 19 bp, Mus musculus
  siRNA target sequence for Apoc1 (NM_007469.2,336-354).
gcaaagtgaaggagaagtt

SEQ ID NO: 654542 - DNA, 19 bp, Mus musculus
  siRNA target sequence for Apoc2 (NM_009695.2,360-378).
gtgcagggctccctcttaa

SEQ ID NO: 654543 - DNA, 19 bp, Mus musculus
  siRNA target sequence for Apoc2 (NM_009695.2,362-380).
gcagggctccctcttaagt

SEQ ID NO: 654544 - DNA, 19 bp, Mus musculus
  siRNA target sequence for Apoc2 (NM_009695.2,363-381).
cagggctccctcttaagtt

SEQ ID NO: 654545 - DNA, 19 bp, Mus musculus
  siRNA target sequence for Apoc2 (NM_009695.2,411-429).
gacctgtaccagaagacat

SEQ ID NO: 654546 - DNA, 19 bp, Mus musculus
  siRNA target sequence for Apoc2 (NM_009695.2,490-508).
gcacttacgcaggcatttt

SEQ ID NO: 654547 - DNA, 19 bp, Mus musculus
  siRNA target sequence for Apoc2 (NM_009695.2,491-509).
cacttacgcaggcattttt

SEQ ID NO: 654548 - DNA, 19 bp, Mus musculus
  siRNA target sequence for Apoc3 (NM_023114.2,180-198).
gtccaggatgcgctaagta

SEQ ID NO: 654549 - DNA, 19 bp, Mus musculus
  siRNA target sequence for Apoc3 (NM_023114.2,200-218).
cgtgcaggagtccgatata

SEQ ID NO: 654550 - DNA, 19 bp, Mus musculus
  siRNA target sequence for Apoc3 (NM_023114.2,267-285).
ggctactggagcaagttta

SEQ ID NO: 654551 - DNA, 19 bp, Mus musculus
  siRNA target sequence for Apoc3 (NM_023114.2,269-287).
ctactggagcaagtttact

SEQ ID NO: 654552 - DNA, 19 bp, Mus musculus
  siRNA target sequence for Apoc3 (NM_023114.2,330-348).
ccaactccagctattgagt

SEQ ID NO: 654553 - DNA, 19 bp, Mus musculus
  siRNA target sequence for Apom (NM_018816.1,63-81).
ctctatggccttctcttta

SEQ ID NO: 654554 - DNA, 19 bp, Mus musculus
  siRNA target sequence for Apom (NM_018816.1,222-240).
ccggtggacaatattgtct

SEQ ID NO: 654555 - DNA, 19 bp, Mus musculus
  siRNA target sequence for Apom (NM_018816.1,223-241).
cggtggacaatattgtctt

SEQ ID NO: 654556 - DNA, 19 bp, Mus musculus
  siRNA target sequence for Apom (NM_018816.1,285-303).
gctaccatccgcacgaaaa

SEQ ID NO: 654557 - DNA, 19 bp, Mus musculus
  siRNA target sequence for Apom (NM_018816.1,382-400).
gcccagacatgaaaacaga

SEQ ID NO: 654558 - DNA, 19 bp, Mus musculus
  siRNA target sequence for Apom (NM_018816.1,461-479).
gcgctttctcctctacaat

SEQ ID NO: 654559 - DNA, 19 bp, Mus musculus
  siRNA target sequence for Brdt (NM_054054.1,358-376).
cgacaaacagctattgtta

SEQ ID NO: 654560 - DNA, 19 bp, Mus musculus
  siRNA target sequence for Brdt (NM_054054.1,359-377).
gacaaacagctattgttaa

SEQ ID NO: 654561 - DNA, 19 bp, Mus musculus
  siRNA target sequence for Brdt (NM_054054.1,382-400).
cctccaccagagtacataa

SEQ ID NO: 654562 - DNA, 19 bp, Mus musculus
  siRNA target sequence for Brdt (NM_054054.1,383-401).
ctccaccagagtacataaa

SEQ ID NO: 654563 - DNA, 19 bp, Mus musculus
  siRNA target sequence for Brdt (NM_054054.1,389-407).
cagagtacataaacactaa

SEQ ID NO: 654564 - DNA, 19 bp, Mus musculus
  siRNA target sequence for Brdt (NM_054054.1,503-521).
cggtggacgccgtgaaact

SEQ ID NO: 654565 - DNA, 19 bp, Mus musculus
  siRNA target sequence for Brdt (NM_054054.1,505-523).
gtggacgccgtgaaactaa

SEQ ID NO: 654566 - DNA, 19 bp, Mus musculus
  siRNA target sequence for Brdt (NM_054054.1,520-538).
ctaaagctgcctgactatt

SEQ ID NO: 654567 - DNA, 19 bp, Mus musculus
  siRNA target sequence for Brdt (NM_054054.1,532-550).
gactattacaccatcataa

SEQ ID NO: 654568 - DNA, 19 bp, Mus musculus
  siRNA target sequence for Brdt (NM_054054.1,534-552).
ctattacaccatcataaaa

SEQ ID NO: 654569 - DNA, 19 bp, Mus musculus
  siRNA target sequence for Brdt (NM_054054.1,546-564).
cataaaaaccccaatggat

SEQ ID NO: 654570 - DNA, 19 bp, Mus musculus
  siRNA target sequence for Brdt (NM_054054.1,582-600).
gcggttggaaaataagtat

SEQ ID NO: 654571 - DNA, 19 bp, Mus musculus
  siRNA target sequence for Brdt (NM_054054.1,583-601).
cggttggaaaataagtatt

SEQ ID NO: 654572 - DNA, 19 bp, Mus musculus
  siRNA target sequence for Brdt (NM_054054.1,584-602).
ggttggaaaataagtatta

SEQ ID NO: 654573 - DNA, 19 bp, Mus musculus
  siRNA target sequence for Brdt (NM_054054.1,611-629).
cttccgaatgcatagaaga

SEQ ID NO: 654574 - DNA, 19 bp, Mus musculus
  siRNA target sequence for Brdt (NM_054054.1,614-632).
ccgaatgcatagaagactt

SEQ ID NO: 654575 - DNA, 19 bp, Mus musculus
  siRNA target sequence for Brdt (NM_054054.1,809-827).
cctctgctaaggaacaaat

SEQ ID NO: 654576 - DNA, 19 bp, Mus musculus
  siRNA target sequence for Brdt (NM_054054.1,838-856).
gcggcagagaatgtcttta

SEQ ID NO: 654577 - DNA, 19 bp, Mus musculus
  siRNA target sequence for Brdt (NM_054054.1,852-870).
ctttaagcggcaagagatt

SEQ ID NO: 654578 - DNA, 19 bp, Mus musculus
  siRNA target sequence for Brdt (NM_054054.1,941-959).
cgcagtctctggtccaaat

SEQ ID NO: 654579 - DNA, 19 bp, Mus musculus
  siRNA target sequence for Brdt (NM_054054.1,945-963).
gtctctggtccaaattaca

SEQ ID NO: 654580 - DNA, 19 bp, Mus musculus
  siRNA target sequence for Brdt (NM_054054.1,947-965).
ctctggtccaaattacaaa

SEQ ID NO: 654581 - DNA, 19 bp, Mus musculus
  siRNA target sequence for Brdt (NM_054054.1,1027-1045).
gaatctcctccgacactta

SEQ ID NO: 654582 - DNA, 19 bp, Mus musculus
  siRNA target sequence for Brdt (NM_054054.1,1103-1121).
cagactctcagcaacaaca

SEQ ID NO: 654583 - DNA, 19 bp, Mus musculus
  siRNA target sequence for Brdt (NM_054054.1,1140-1158).
caaagtaacggagcaatta

SEQ ID NO: 654584 - DNA, 19 bp, Mus musculus
  siRNA target sequence for Brdt (NM_054054.1,1161-1179).
gcactgcagcgagattctt

SEQ ID NO: 654585 - DNA, 19 bp, Mus musculus
  siRNA target sequence for Brdt (NM_054054.1,1162-1180).
cactgcagcgagattctta

SEQ ID NO: 654586 - DNA, 19 bp, Mus musculus
  siRNA target sequence for Brdt (NM_054054.1,1164-1182).
ctgcagcgagattcttaaa

SEQ ID NO: 654587 - DNA, 19 bp, Mus musculus
  siRNA target sequence for Brdt (NM_054054.1,1166-1184).
gcagcgagattcttaaaga

SEQ ID NO: 654588 - DNA, 19 bp, Mus musculus
  siRNA target sequence for Brdt (NM_054054.1,1167-1185).
cagcgagattcttaaagaa

SEQ ID NO: 654589 - DNA, 19 bp, Mus musculus
  siRNA target sequence for Brdt (NM_054054.1,1247-1265).
ctttgggactccacaacta

SEQ ID NO: 654590 - DNA, 19 bp, Mus musculus
  siRNA target sequence for Brdt (NM_054054.1,1251-1269).
gggactccacaactactat

SEQ ID NO: 654591 - DNA, 19 bp, Mus musculus
  siRNA target sequence for Brdt (NM_054054.1,1253-1271).
gactccacaactactatga

SEQ ID NO: 654592 - DNA, 19 bp, Mus musculus
  siRNA target sequence for Brdt (NM_054054.1,1360-1378).
gtcagactgatgttcatga

SEQ ID NO: 654593 - DNA, 19 bp, Mus musculus
  siRNA target sequence for Brdt (NM_054054.1,1380-1398).
ctgttacaagtataatcct

SEQ ID NO: 654594 - DNA, 19 bp, Mus musculus
  siRNA target sequence for Brdt (NM_054054.1,1426-1444).
cggacccttcaggatgttt

SEQ ID NO: 654595 - DNA, 19 bp, Mus musculus
  siRNA target sequence for Brdt (NM_054054.1,1464-1482).
gattcccgatgaacctatt

SEQ ID NO: 654596 - DNA, 19 bp, Mus musculus
  siRNA target sequence for Brdt (NM_054054.1,1468-1486).
cccgatgaacctattgaga

SEQ ID NO: 654597 - DNA, 19 bp, Mus musculus
  siRNA target sequence for Brdt (NM_054054.1,1492-1510).
catgcatgccaccttacaa

SEQ ID NO: 654598 - DNA, 19 bp, Mus musculus
  siRNA target sequence for Brdt (NM_054054.1,1560-1578).
gggggacgcctcttctgaa

SEQ ID NO: 654599 - DNA, 19 bp, Mus musculus
  siRNA target sequence for Brdt (NM_054054.1,1623-1641).
gcagcttaatgctgttcat

SEQ ID NO: 654600 - DNA, 19 bp, Mus musculus
  siRNA target sequence for Brdt (NM_054054.1,1661-1679).
cccaagttccattacgtaa

SEQ ID NO: 654601 - DNA, 19 bp, Mus musculus
  siRNA target sequence for Brdt (NM_054054.1,1670-1688).
cattacgtaagctgaagaa

SEQ ID NO: 654602 - DNA, 19 bp, Mus musculus
  siRNA target sequence for Brdt (NM_054054.1,1712-1730).
cgccaaaaaggaaaaaggt

SEQ ID NO: 654603 - DNA, 19 bp, Mus musculus
  siRNA target sequence for Brdt (NM_054054.1,1782-1800).
ggagaaggccaaaatcaat

SEQ ID NO: 654604 - DNA, 19 bp, Mus musculus
  siRNA target sequence for Brdt (NM_054054.1,1886-1904).
gcttggacataaacaaact

SEQ ID NO: 654605 - DNA, 19 bp, Mus musculus
  siRNA target sequence for Brdt (NM_054054.1,1914-1932).
caagcttggtcgaatagtt

SEQ ID NO: 654606 - DNA, 19 bp, Mus musculus
  siRNA target sequence for Brdt (NM_054054.1,1921-1939).
ggtcgaatagttcacataa

SEQ ID NO: 654607 - DNA, 19 bp, Mus musculus
  siRNA target sequence for Brdt (NM_054054.1,1922-1940).
gtcgaatagttcacataat

SEQ ID NO: 654608 - DNA, 19 bp, Mus musculus
  siRNA target sequence for Brdt (NM_054054.1,2144-2162).
ggttgctggacgtcaacaa

SEQ ID NO: 654609 - DNA, 19 bp, Mus musculus
  siRNA target sequence for Brdt (NM_054054.1,2145-2163).
gttgctggacgtcaacaat

SEQ ID NO: 654610 - DNA, 19 bp, Mus musculus
  siRNA target sequence for Brdt (NM_054054.1,2174-2192).
gtaggaaacggcaaacgaa

SEQ ID NO: 654611 - DNA, 19 bp, Mus musculus
  siRNA target sequence for Brdt (NM_054054.1,2189-2207).
cgaaacgtccagcaaaagt

SEQ ID NO: 654612 - DNA, 19 bp, Mus musculus
  siRNA target sequence for Brdt (NM_054054.1,2443-2461).
ggagtaaaacagaatgatt

SEQ ID NO: 654613 - DNA, 19 bp, Mus musculus
  siRNA target sequence for Brdt (NM_054054.1,2660-2678).
gtgattgcaagcgagtatt

SEQ ID NO: 654614 - DNA, 19 bp, Mus musculus
  siRNA target sequence for Brdt (NM_054054.1,2749-2767).
gcgcagaaggatataaaga

SEQ ID NO: 654615 - DNA, 19 bp, Mus musculus
  siRNA target sequence for Brdt (NM_054054.1,2772-2790).
gaatgcagactcttggaaa

SEQ ID NO: 654616 - DNA, 19 bp, Mus musculus
  siRNA target sequence for Brdt (NM_054054.1,2777-2795).
cagactcttggaaaagttt

SEQ ID NO: 654617 - DNA, 19 bp, Mus musculus
  siRNA target sequence for Brdt (NM_054054.1,2802-2820).
gccagtgaaagcatcaagt

SEQ ID NO: 654618 - DNA, 19 bp, Mus musculus
  siRNA target sequence for Brdt (NM_054054.1,2967-2985).
gcctggaagtggattgact

SEQ ID NO: 654619 - DNA, 19 bp, Mus musculus
  siRNA target sequence for Brdt (NM_054054.1,2986-3004).
ctagaatctttatcaagta

SEQ ID NO: 654620 - DNA, 19 bp, Mus musculus
  siRNA target sequence for Brdt (NM_054054.1,2999-3017).
caagtaaagtgcaagataa

SEQ ID NO: 654621 - DNA, 19 bp, Mus musculus
  siRNA target sequence for Brdt (NM_054054.1,3009-3027).
gcaagataagtctcttgaa

SEQ ID NO: 654622 - DNA, 19 bp, Mus musculus
  siRNA target sequence for Brdt (NM_054054.1,3150-3168).
gggtaccattgatatgact

SEQ ID NO: 654623 - DNA, 19 bp, Mus musculus
  siRNA target sequence for Brdt (NM_054054.1,3165-3183).
gactcttcaaagtgacatt

SEQ ID NO: 654624 - DNA, 19 bp, Mus musculus
  siRNA target sequence for Brdt (NM_054054.1,3167-3185).
ctcttcaaagtgacattat

SEQ ID NO: 654625 - DNA, 19 bp, Mus musculus
  siRNA target sequence for Brdt (NM_054054.1,3172-3190).
caaagtgacattatgacaa

SEQ ID NO: 654626 - DNA, 19 bp, Mus musculus
  siRNA target sequence for Brdt (NM_054054.1,3180-3198).
cattatgacaatgtttgaa

SEQ ID NO: 654627 - DNA, 19 bp, Mus musculus
  siRNA target sequence for Nolc1 (NM_053086.1,1034-1052).
cagtgacgattctgattca

SEQ ID NO: 654628 - DNA, 19 bp, Mus musculus
  siRNA target sequence for Nolc1 (NM_053086.1,1038-1056).
gacgattctgattcaagtt

SEQ ID NO: 654629 - DNA, 19 bp, Mus musculus
  siRNA target sequence for Nolc1 (NM_053086.1,1040-1058).
cgattctgattcaagttct

SEQ ID NO: 654630 - DNA, 19 bp, Mus musculus
  siRNA target sequence for Saa3 (NM_011315.1,6-24).
gccttccattgccatcatt

SEQ ID NO: 654631 - DNA, 19 bp, Mus musculus
  siRNA target sequence for Saa3 (NM_011315.1,206-224).
gagcctgggctgctaaagt

SEQ ID NO: 654632 - DNA, 19 bp, Mus musculus
  siRNA target sequence for Saa3 (NM_011315.1,209-227).
cctgggctgctaaagtcat

SEQ ID NO: 654633 - DNA, 19 bp, Mus musculus
  siRNA target sequence for Saa3 (NM_011315.1,346-364).
gctggcctgcctaaaagat

SEQ ID NO: 654634 - DNA, 19 bp, Mus musculus
  siRNA target sequence for Saa4 (NM_011316.2,211-229).
ggctggtattcattcttca

SEQ ID NO: 654635 - DNA, 19 bp, Mus musculus
  siRNA target sequence for Saa4 (NM_011316.2,279-297).
cctagaagctaattaccaa

SEQ ID NO: 654636 - DNA, 19 bp, Mus musculus
  siRNA target sequence for Saa4 (NM_011316.2,295-313).
caaaatgcagaccaatact

SEQ ID NO: 654637 - DNA, 19 bp, Mus musculus
  siRNA target sequence for Saa4 (NM_011316.2,358-376).
ggcatctgggctgctaaaa

SEQ ID NO: 654638 - DNA, 19 bp, Mus musculus
  siRNA target sequence for Saa4 (NM_011316.2,360-378).
catctgggctgctaaaata

SEQ ID NO: 654639 - DNA, 19 bp, Mus musculus
  siRNA target sequence for Saa4 (NM_011316.2,406-424).
ggcctcctaaaccgatatt

SEQ ID NO: 654640 - DNA, 19 bp, Mus musculus
  siRNA target sequence for Saa4 (NM_011316.2,407-425).
gcctcctaaaccgatatta

SEQ ID NO: 654641 - DNA, 19 bp, Mus musculus
  siRNA target sequence for Saa4 (NM_011316.2,408-426).
cctcctaaaccgatattat

SEQ ID NO: 654642 - DNA, 19 bp, Mus musculus
  siRNA target sequence for Saa4 (NM_011316.2,409-427).
ctcctaaaccgatattatt

SEQ ID NO: 654643 - DNA, 19 bp, Mus musculus
  siRNA target sequence for Saa4 (NM_011316.2,411-429).
cctaaaccgatattatttt

SEQ ID NO: 654644 - DNA, 19 bp, Mus musculus
  siRNA target sequence for Saa4 (NM_011316.2,431-449).
gaatcaggaaccatggatt

SEQ ID NO: 654645 - DNA, 19 bp, Mus musculus
  siRNA target sequence for Slc35a3 (NM_144902.2,223-241).
gccaacctaaaatatcttt

SEQ ID NO: 654646 - DNA, 19 bp, Mus musculus
  siRNA target sequence for Slc35a3 (NM_144902.2,280-298).
ctaacgatgcggtattcta

SEQ ID NO: 654647 - DNA, 19 bp, Mus musculus
  siRNA target sequence for Slc35a3 (NM_144902.2,288-306).
gcggtattctaggacttta

SEQ ID NO: 654648 - DNA, 19 bp, Mus musculus
  siRNA target sequence for Slc35a3 (NM_144902.2,291-309).
gtattctaggactttaaaa

SEQ ID NO: 654649 - DNA, 19 bp, Mus musculus
  siRNA target sequence for Slc35a3 (NM_144902.2,341-359).
cagtggttgtggctgaatt

SEQ ID NO: 654650 - DNA, 19 bp, Mus musculus
  siRNA target sequence for Slc35a3 (NM_144902.2,414-432).
gagagcactgaatagagta

SEQ ID NO: 654651 - DNA, 19 bp, Mus musculus
  siRNA target sequence for Slc35a3 (NM_144902.2,428-446).
gagtactgcatgatgaaat

SEQ ID NO: 654652 - DNA, 19 bp, Mus musculus
  siRNA target sequence for Slc35a3 (NM_144902.2,479-497).
ctatcccgtcagggatata

SEQ ID NO: 654653 - DNA, 19 bp, Mus musculus
  siRNA target sequence for Slc35a3 (NM_144902.2,483-501).
cccgtcagggatatatact

SEQ ID NO: 654654 - DNA, 19 bp, Mus musculus
  siRNA target sequence for Slc35a3 (NM_144902.2,491-509).
ggatatatactcttcagaa

SEQ ID NO: 654655 - DNA, 19 bp, Mus musculus
  siRNA target sequence for Slc35a3 (NM_144902.2,502-520).
cttcagaacaacttactct

SEQ ID NO: 654656 - DNA, 19 bp, Mus musculus
  siRNA target sequence for Slc35a3 (NM_144902.2,563-581).
catatcagttgaaaatact

SEQ ID NO: 654657 - DNA, 19 bp, Mus musculus
  siRNA target sequence for Slc35a3 (NM_144902.2,570-588).
gttgaaaatacttacaaca

SEQ ID NO: 654658 - DNA, 19 bp, Mus musculus
  siRNA target sequence for Slc35a3 (NM_144902.2,580-598).
cttacaacagcattatttt

SEQ ID NO: 654659 - DNA, 19 bp, Mus musculus
  siRNA target sequence for Slc35a3 (NM_144902.2,599-617).
ctgtgtctatgcttggtaa

SEQ ID NO: 654660 - DNA, 19 bp, Mus musculus
  siRNA target sequence for Slc35a3 (NM_144902.2,603-621).
gtctatgcttggtaaaaaa

SEQ ID NO: 654661 - DNA, 19 bp, Mus musculus
  siRNA target sequence for Slc35a3 (NM_144902.2,609-627).
gcttggtaaaaaattaggt

SEQ ID NO: 654662 - DNA, 19 bp, Mus musculus
  siRNA target sequence for Slc35a3 (NM_144902.2,636-654).
gtggctctccctagtaatt

SEQ ID NO: 654663 - DNA, 19 bp, Mus musculus
  siRNA target sequence for Slc35a3 (NM_144902.2,638-656).
ggctctccctagtaattct

SEQ ID NO: 654664 - DNA, 19 bp, Mus musculus
  siRNA target sequence for Slc35a3 (NM_144902.2,640-658).
ctctccctagtaattctga

SEQ ID NO: 654665 - DNA, 19 bp, Mus musculus
  siRNA target sequence for Slc35a3 (NM_144902.2,657-675).
gatggcaggagttgctttt

SEQ ID NO: 654666 - DNA, 19 bp, Mus musculus
  siRNA target sequence for Slc35a3 (NM_144902.2,839-857).
ggaacattcaacttggttt

SEQ ID NO: 654667 - DNA, 19 bp, Mus musculus
  siRNA target sequence for Slc35a3 (NM_144902.2,843-861).
cattcaacttggtttcttt

SEQ ID NO: 654668 - DNA, 19 bp, Mus musculus
  siRNA target sequence for Slc35a3 (NM_144902.2,862-880).
ggaagtatatttggattaa

SEQ ID NO: 654669 - DNA, 19 bp, Mus musculus
  siRNA target sequence for Slc35a3 (NM_144902.2,875-893).
gattaatgggtgtatacgt

SEQ ID NO: 654670 - DNA, 19 bp, Mus musculus
  siRNA target sequence for Slc35a3 (NM_144902.2,882-900).
gggtgtatacgtttatgat

SEQ ID NO: 654671 - DNA, 19 bp, Mus musculus
  siRNA target sequence for Slc35a3 (NM_144902.2,909-927).
ggtctcaaagaatggattt

SEQ ID NO: 654672 - DNA, 19 bp, Mus musculus
  siRNA target sequence for Slc35a3 (NM_144902.2,973-991).
gcacttggaggccttgtaa

SEQ ID NO: 654673 - DNA, 19 bp, Mus musculus
  siRNA target sequence for Slc35a5 (NM_028756.2,288-306).
gatcttcttaaggcaatta

SEQ ID NO: 654674 - DNA, 19 bp, Mus musculus
  siRNA target sequence for Slc35a5 (NM_028756.2,291-309).
cttcttaaggcaattaaaa

SEQ ID NO: 654675 - DNA, 19 bp, Mus musculus
  siRNA target sequence for Slc35a5 (NM_028756.2,355-373).
ccaccaacgctgtacacat

SEQ ID NO: 654676 - DNA, 19 bp, Mus musculus
  siRNA target sequence for Slc35a5 (NM_028756.2,356-374).
caccaacgctgtacacatt

SEQ ID NO: 654677 - DNA, 19 bp, Mus musculus
  siRNA target sequence for Slc35a5 (NM_028756.2,376-394).
ctgctaggcattatattca

SEQ ID NO: 654678 - DNA, 19 bp, Mus musculus
  siRNA target sequence for Slc35a5 (NM_028756.2,404-422).
gttcaagtcgaatcttact

SEQ ID NO: 654679 - DNA, 19 bp, Mus musculus
  siRNA target sequence for Slc35a5 (NM_028756.2,410-428).
gtcgaatcttactggtaaa

SEQ ID NO: 654680 - DNA, 19 bp, Mus musculus
  siRNA target sequence for Slc35a5 (NM_028756.2,412-430).
cgaatcttactggtaaaat

SEQ ID NO: 654681 - DNA, 19 bp, Mus musculus
  siRNA target sequence for Slc35a5 (NM_028756.2,417-435).
cttactggtaaaatactct

SEQ ID NO: 654682 - DNA, 19 bp, Mus musculus
  siRNA target sequence for Slc35a5 (NM_028756.2,498-516).
gaagctgattctctgtata

SEQ ID NO: 654683 - DNA, 19 bp, Mus musculus
  siRNA target sequence for Slc35a5 (NM_028756.2,520-538).
gtgtcactctgtgttataa

SEQ ID NO: 654684 - DNA, 19 bp, Mus musculus
  siRNA target sequence for Slc35a5 (NM_028756.2,524-542).
cactctgtgttataaagaa

SEQ ID NO: 654685 - DNA, 19 bp, Mus musculus
  siRNA target sequence for Slc35a5 (NM_028756.2,685-703).
gctgttatcttctcgaatt

SEQ ID NO: 654686 - DNA, 19 bp, Mus musculus
  siRNA target sequence for Slc35a5 (NM_028756.2,688-706).
gttatcttctcgaatttta

SEQ ID NO: 654687 - DNA, 19 bp, Mus musculus
  siRNA target sequence for Slc35a5 (NM_028756.2,699-717).
gaattttagcattataaca

SEQ ID NO: 654688 - DNA, 19 bp, Mus musculus
  siRNA target sequence for Slc35a5 (NM_028756.2,845-863).
caggacatggatttcatca

SEQ ID NO: 654689 - DNA, 19 bp, Mus musculus
  siRNA target sequence for Slc35a5 (NM_028756.2,912-930).
ctgttccctaagagacaat

SEQ ID NO: 654690 - DNA, 19 bp, Mus musculus
  siRNA target sequence for Slc35a5 (NM_028756.2,1007-1025).
gcttgggccacgttctgat

SEQ ID NO: 654691 - DNA, 19 bp, Mus musculus
  siRNA target sequence for Slc35a5 (NM_028756.2,1008-1026).
cttgggccacgttctgatt

SEQ ID NO: 654692 - DNA, 19 bp, Mus musculus
  siRNA target sequence for Slc35a5 (NM_028756.2,1014-1032).
ccacgttctgattatagtt

SEQ ID NO: 654693 - DNA, 19 bp, Mus musculus
  siRNA target sequence for Slc35a5 (NM_028756.2,1017-1035).
cgttctgattatagttcaa

SEQ ID NO: 654694 - DNA, 19 bp, Mus musculus
  siRNA target sequence for Slc35a5 (NM_028756.2,1021-1039).
ctgattatagttcaatgtt

SEQ ID NO: 654695 - DNA, 19 bp, Mus musculus
  siRNA target sequence for Slc35a5 (NM_028756.2,1046-1064).
cttcaatggccaatatcta

SEQ ID NO: 654696 - DNA, 19 bp, Mus musculus
  siRNA target sequence for Slc35a5 (NM_028756.2,1049-1067).
caatggccaatatctataa

SEQ ID NO: 654697 - DNA, 19 bp, Mus musculus
  siRNA target sequence for Slc35a5 (NM_028756.2,1054-1072).
gccaatatctataatgaga

SEQ ID NO: 654698 - DNA, 19 bp, Mus musculus
  siRNA target sequence for Slc35a5 (NM_028756.2,1181-1199).
gtaaccgtgaccagattca

SEQ ID NO: 654699 - DNA, 19 bp, Mus musculus
  siRNA target sequence for Slc35a5 (NM_028756.2,1220-1238).
gccacaatgcattttcagt

SEQ ID NO: 654700 - DNA, 19 bp, Mus musculus
  siRNA target sequence for Slc35a5 (NM_028756.2,1221-1239).
ccacaatgcattttcagta

SEQ ID NO: 654701 - DNA, 19 bp, Mus musculus
  siRNA target sequence for Slc35a5 (NM_028756.2,1235-1253).
cagtagtccttattttcgt

SEQ ID NO: 654702 - DNA, 19 bp, Mus musculus
  siRNA target sequence for Slc35a5 (NM_028756.2,1259-1277).
ccttccagggcctttcagt

SEQ ID NO: 654703 - DNA, 19 bp, Mus musculus
  siRNA target sequence for Slc35a5 (NM_028756.2,1274-1292).
cagtggcttttatcttgaa

SEQ ID NO: 654704 - DNA, 19 bp, Mus musculus
  siRNA target sequence for Slc35a5 (NM_028756.2,1296-1314).
cttagataacatgtttcat

SEQ ID NO: 654705 - DNA, 19 bp, Mus musculus
  siRNA target sequence for Slc35a5 (NM_028756.2,1358-1376).
ccgtcctggtctttgactt

SEQ ID NO: 654706 - DNA, 19 bp, Mus musculus
  siRNA target sequence for Slc35a5 (NM_028756.2,1412-1430).
cagttctcctctccatatt

SEQ ID NO: 654707 - DNA, 19 bp, Mus musculus
  siRNA target sequence for Slc35a5 (NM_028756.2,1414-1432).
gttctcctctccatattta

SEQ ID NO: 654708 - DNA, 19 bp, Mus musculus
  siRNA target sequence for Slc35a5 (NM_028756.2,1543-1561).
gaaagacttaccaaactca

SEQ ID NO: 654709 - DNA, 19 bp, Mus musculus
  siRNA target sequence for Slc35a5 (NM_028756.2,1572-1590).
ctcagatgacgacacttta

SEQ ID NO: 654710 - DNA, 19 bp, Mus musculus
  siRNA target sequence for Slc5a1 (NM_019810.2,350-368).
cgggctgtgggccatgttt

SEQ ID NO: 654711 - DNA, 19 bp, Mus musculus
  siRNA target sequence for Slc5a1 (NM_019810.2,351-369).
gggctgtgggccatgtttt

SEQ ID NO: 654712 - DNA, 19 bp, Mus musculus
  siRNA target sequence for Slc5a1 (NM_019810.2,458-476).
cattggaagtggtcacttt

SEQ ID NO: 654713 - DNA, 19 bp, Mus musculus
  siRNA target sequence for Slc5a1 (NM_019810.2,532-550).
ggaacgccttggttttggt

SEQ ID NO: 654714 - DNA, 19 bp, Mus musculus
  siRNA target sequence for Slc5a1 (NM_019810.2,637-655).
gcaagagaattcagatcta

SEQ ID NO: 654715 - DNA, 19 bp, Mus musculus
  siRNA target sequence for Slc5a1 (NM_019810.2,718-736).
gggctatattcatcaatct

SEQ ID NO: 654716 - DNA, 19 bp, Mus musculus
  siRNA target sequence for Slc5a1 (NM_019810.2,719-737).
ggctatattcatcaatcta

SEQ ID NO: 654717 - DNA, 19 bp, Mus musculus
  siRNA target sequence for Slc5a1 (NM_019810.2,739-757).
ccttgggcctggatatata

SEQ ID NO: 654718 - DNA, 19 bp, Mus musculus
  siRNA target sequence for Slc5a1 (NM_019810.2,770-788).
catcctgctagcaatcact

SEQ ID NO: 654719 - DNA, 19 bp, Mus musculus
  siRNA target sequence for Slc5a1 (NM_019810.2,780-798).
gcaatcactgccctttata

SEQ ID NO: 654720 - DNA, 19 bp, Mus musculus
  siRNA target sequence for Slc5a1 (NM_019810.2,815-833).
ggcagctgtaatttacaca

SEQ ID NO: 654721 - DNA, 19 bp, Mus musculus
  siRNA target sequence for Slc5a1 (NM_019810.2,939-957).
gctattccaactaaggttt

SEQ ID NO: 654722 - DNA, 19 bp, Mus musculus
  siRNA target sequence for Slc5a1 (NM_019810.2,953-971).
ggtttctaacggaaatttt

SEQ ID NO: 654723 - DNA, 19 bp, Mus musculus
  siRNA target sequence for Slc5a1 (NM_019810.2,954-972).
gtttctaacggaaatttta

SEQ ID NO: 654724 - DNA, 19 bp, Mus musculus
  siRNA target sequence for Slc5a1 (NM_019810.2,1047-1065).
ccgtggcctgggctcattt

SEQ ID NO: 654725 - DNA, 19 bp, Mus musculus
  siRNA target sequence for Slc5a1 (NM_019810.2,1048-1066).
cgtggcctgggctcatttt

SEQ ID NO: 654726 - DNA, 19 bp, Mus musculus
  siRNA target sequence for Slc5a1 (NM_019810.2,1049-1067).
gtggcctgggctcattttt

SEQ ID NO: 654727 - DNA, 19 bp, Mus musculus
  siRNA target sequence for Slc5a1 (NM_019810.2,1126-1144).
gcctctcggccaagaacat

SEQ ID NO: 654728 - DNA, 19 bp, Mus musculus
  siRNA target sequence for Slc5a1 (NM_019810.2,1223-1241).
gatcagccggattctatat

SEQ ID NO: 654729 - DNA, 19 bp, Mus musculus
  siRNA target sequence for Slc5a1 (NM_019810.2,1226-1244).
cagccggattctatataca

SEQ ID NO: 654730 - DNA, 19 bp, Mus musculus
  siRNA target sequence for Slc5a1 (NM_019810.2,1229-1247).
ccggattctatatacagaa

SEQ ID NO: 654731 - DNA, 19 bp, Mus musculus
  siRNA target sequence for Slc5a1 (NM_019810.2,1230-1248).
cggattctatatacagaaa

SEQ ID NO: 654732 - DNA, 19 bp, Mus musculus
  siRNA target sequence for Slc5a1 (NM_019810.2,1231-1249).
ggattctatatacagaaaa

SEQ ID NO: 654733 - DNA, 19 bp, Mus musculus
  siRNA target sequence for Slc5a1 (NM_019810.2,1337-1355).
ggaactcatgcctaatgga

SEQ ID NO: 654734 - DNA, 19 bp, Mus musculus
  siRNA target sequence for Slc5a1 (NM_019810.2,1710-1728).
ggaatctcccgtatgatca

SEQ ID NO: 654735 - DNA, 19 bp, Mus musculus
  siRNA target sequence for Slc5a1 (NM_019810.2,1718-1736).
ccgtatgatcactgagttt

SEQ ID NO: 654736 - DNA, 19 bp, Mus musculus
  siRNA target sequence for Slc5a1 (NM_019810.2,1789-1807).
gtggggtccactatttgta

SEQ ID NO: 654737 - DNA, 19 bp, Mus musculus
  siRNA target sequence for Slc5a1 (NM_019810.2,1792-1810).
gggtccactatttgtactt

SEQ ID NO: 654738 - DNA, 19 bp, Mus musculus
  siRNA target sequence for Slc5a1 (NM_019810.2,1793-1811).
ggtccactatttgtacttt

SEQ ID NO: 654739 - DNA, 19 bp, Mus musculus
  siRNA target sequence for Slc5a1 (NM_019810.2,1978-1996).
ccaaggacacaattgaaat

SEQ ID NO: 654740 - DNA, 19 bp, Mus musculus
  siRNA target sequence for Slc5a1 (NM_019810.2,1979-1997).
caaggacacaattgaaata

SEQ ID NO: 654741 - DNA, 19 bp, Mus musculus
  siRNA target sequence for Slc5a1 (NM_019810.2,2029-2047).
gcttcaggagagcatatga

SEQ ID NO: 654742 - DNA, 19 bp, Mus musculus
  siRNA target sequence for Slc5a1 (NM_019810.2,2160-2178).
gtgaacatcaacggtatta

SEQ ID NO: 654743 - DNA, 19 bp, Mus musculus
  siRNA target sequence for Nup160 (NM_021512.1,720-738).
gcactttcgggaattcaca

SEQ ID NO: 654744 - DNA, 19 bp, Mus musculus
  siRNA target sequence for Nup160 (NM_021512.1,767-785).
cgtttggaacggtgaagta

SEQ ID NO: 654745 - DNA, 19 bp, Mus musculus
  siRNA target sequence for Nup160 (NM_021512.1,794-812).
gcgctggtggcttctatta

SEQ ID NO: 654746 - DNA, 19 bp, Mus musculus
  siRNA target sequence for Nup160 (NM_021512.1,795-813).
cgctggtggcttctattat

SEQ ID NO: 654747 - DNA, 19 bp, Mus musculus
  siRNA target sequence for Nup160 (NM_021512.1,906-924).
ggacttaaatttgttgaat

SEQ ID NO: 654748 - DNA, 19 bp, Mus musculus
  siRNA target sequence for Nup160 (NM_021512.1,907-925).
gacttaaatttgttgaata

SEQ ID NO: 654749 - DNA, 19 bp, Mus musculus
  siRNA target sequence for Nup160 (NM_021512.1,929-947).
ctgttcgcctaaaattcca

SEQ ID NO: 654750 - DNA, 19 bp, Mus musculus
  siRNA target sequence for Nup160 (NM_021512.1,934-952).
cgcctaaaattccaaaatt

SEQ ID NO: 654751 - DNA, 19 bp, Mus musculus
  siRNA target sequence for Nup160 (NM_021512.1,935-953).
gcctaaaattccaaaatta

SEQ ID NO: 654752 - DNA, 19 bp, Mus musculus
  siRNA target sequence for Nup160 (NM_021512.1,937-955).
ctaaaattccaaaattaca

SEQ ID NO: 654753 - DNA, 19 bp, Mus musculus
  siRNA target sequence for Nup160 (NM_021512.1,945-963).
ccaaaattacaacatctta

SEQ ID NO: 654754 - DNA, 19 bp, Mus musculus
  siRNA target sequence for Nup160 (NM_021512.1,987-1005).
gactcagaatcatgtgata

SEQ ID NO: 654755 - DNA, 19 bp, Mus musculus
  siRNA target sequence for Nup160 (NM_021512.1,991-1009).
cagaatcatgtgataatct

SEQ ID NO: 654756 - DNA, 19 bp, Mus musculus
  siRNA target sequence for Nup160 (NM_021512.1,1024-1042).
cagacagtgcacagattaa

SEQ ID NO: 654757 - DNA, 19 bp, Mus musculus
  siRNA target sequence for Nup160 (NM_021512.1,1026-1044).
gacagtgcacagattaatt

SEQ ID NO: 654758 - DNA, 19 bp, Mus musculus
  siRNA target sequence for Nup160 (NM_021512.1,1028-1046).
cagtgcacagattaatttt

SEQ ID NO: 654759 - DNA, 19 bp, Mus musculus
  siRNA target sequence for Nup160 (NM_021512.1,1032-1050).
gcacagattaattttacca

SEQ ID NO: 654760 - DNA, 19 bp, Mus musculus
  siRNA target sequence for Nup160 (NM_021512.1,1049-1067).
cacacccttcccgtatgta

SEQ ID NO: 654761 - DNA, 19 bp, Mus musculus
  siRNA target sequence for Nup160 (NM_021512.1,1054-1072).
ccttcccgtatgtacagaa

SEQ ID NO: 654762 - DNA, 19 bp, Mus musculus
  siRNA target sequence for Nup160 (NM_021512.1,1093-1111).
cagatgcagtccatattta

SEQ ID NO: 654763 - DNA, 19 bp, Mus musculus
  siRNA target sequence for Nup160 (NM_021512.1,1114-1132).
gacattggaaaagttgatt

SEQ ID NO: 654764 - DNA, 19 bp, Mus musculus
  siRNA target sequence for Nup160 (NM_021512.1,1141-1159).
ccttgcaactctcagttaa

SEQ ID NO: 654765 - DNA, 19 bp, Mus musculus
  siRNA target sequence for Nup160 (NM_021512.1,1146-1164).
caactctcagttaattcca

SEQ ID NO: 654766 - DNA, 19 bp, Mus musculus
  siRNA target sequence for Nup160 (NM_021512.1,1255-1273).
ggcggcatcttcgttctta

SEQ ID NO: 654767 - DNA, 19 bp, Mus musculus
  siRNA target sequence for Nup160 (NM_021512.1,1256-1274).
gcggcatcttcgttcttaa

SEQ ID NO: 654768 - DNA, 19 bp, Mus musculus
  siRNA target sequence for Nup160 (NM_021512.1,1259-1277).
gcatcttcgttcttaagct

SEQ ID NO: 654769 - DNA, 19 bp, Mus musculus
  siRNA target sequence for Nup160 (NM_021512.1,1288-1306).
gacgtacctgggatagcat

SEQ ID NO: 654770 - DNA, 19 bp, Mus musculus
  siRNA target sequence for Nup160 (NM_021512.1,1333-1351).
gtgatgcagcgattactca

SEQ ID NO: 654771 - DNA, 19 bp, Mus musculus
  siRNA target sequence for Nup160 (NM_021512.1,1405-1423).
ctgagtctcgctgttcatt

SEQ ID NO: 654772 - DNA, 19 bp, Mus musculus
  siRNA target sequence for Nup160 (NM_021512.1,1452-1470).
cctgtgtcaggatcataaa

SEQ ID NO: 654773 - DNA, 19 bp, Mus musculus
  siRNA target sequence for Nup160 (NM_021512.1,1471-1489).
cttcggatgtggtcttaca

SEQ ID NO: 654774 - DNA, 19 bp, Mus musculus
  siRNA target sequence for Nup160 (NM_021512.1,1561-1579).
gcaggaacaggacataaat

SEQ ID NO: 654775 - DNA, 19 bp, Mus musculus
  siRNA target sequence for Nup160 (NM_021512.1,1562-1580).
caggaacaggacataaatt

SEQ ID NO: 654776 - DNA, 19 bp, Mus musculus
  siRNA target sequence for Nup160 (NM_021512.1,1605-1623).
ggggctctacctaggaata

SEQ ID NO: 654777 - DNA, 19 bp, Mus musculus
  siRNA target sequence for Nup160 (NM_021512.1,1606-1624).
gggctctacctaggaatat

SEQ ID NO: 654778 - DNA, 19 bp, Mus musculus
  siRNA target sequence for Nup160 (NM_021512.1,1607-1625).
ggctctacctaggaatata

SEQ ID NO: 654779 - DNA, 19 bp, Mus musculus
  siRNA target sequence for Nup160 (NM_021512.1,1609-1627).
ctctacctaggaatatata

SEQ ID NO: 654780 - DNA, 19 bp, Mus musculus
  siRNA target sequence for Nup160 (NM_021512.1,1646-1664).
gacagttctgcgttttcca

SEQ ID NO: 654781 - DNA, 19 bp, Mus musculus
  siRNA target sequence for Nup160 (NM_021512.1,1678-1696).
gagaataatcgctatagtt

SEQ ID NO: 654782 - DNA, 19 bp, Mus musculus
  siRNA target sequence for Nup160 (NM_021512.1,1688-1706).
gctatagtttagatcacat

SEQ ID NO: 654783 - DNA, 19 bp, Mus musculus
  siRNA target sequence for Nup160 (NM_021512.1,1689-1707).
ctatagtttagatcacatt

SEQ ID NO: 654784 - DNA, 19 bp, Mus musculus
  siRNA target sequence for Nup160 (NM_021512.1,1728-1746).
ggagacactagtcgatttt

SEQ ID NO: 654785 - DNA, 19 bp, Mus musculus
  siRNA target sequence for Nup160 (NM_021512.1,1738-1756).
gtcgattttgccttaacct

SEQ ID NO: 654786 - DNA, 19 bp, Mus musculus
  siRNA target sequence for Nup160 (NM_021512.1,1840-1858).
cagtggaatccagtgttta

SEQ ID NO: 654787 - DNA, 19 bp, Mus musculus
  siRNA target sequence for Nup160 (NM_021512.1,1917-1935).
gtatttgcggagccttttt

SEQ ID NO: 654788 - DNA, 19 bp, Mus musculus
  siRNA target sequence for Nup160 (NM_021512.1,2001-2019).
gaggaacttggatctttca

SEQ ID NO: 654789 - DNA, 19 bp, Mus musculus
  siRNA target sequence for Nup160 (NM_021512.1,2007-2025).
cttggatctttcatggaat

SEQ ID NO: 654790 - DNA, 19 bp, Mus musculus
  siRNA target sequence for Nup160 (NM_021512.1,2072-2090).
gaagtgtgacggagtatga

SEQ ID NO: 654791 - DNA, 19 bp, Mus musculus
  siRNA target sequence for Nup160 (NM_021512.1,2077-2095).
gtgacggagtatgaattct

SEQ ID NO: 654792 - DNA, 19 bp, Mus musculus
  siRNA target sequence for Nup160 (NM_021512.1,2100-2118).
ggatgaattccgcacttta

SEQ ID NO: 654793 - DNA, 19 bp, Mus musculus
  siRNA target sequence for Nup160 (NM_021512.1,2147-2165).
cctgcgttctccagtatca

SEQ ID NO: 654794 - DNA, 19 bp, Mus musculus
  siRNA target sequence for Nup160 (NM_021512.1,2250-2268).
cctggtgccatcttcctta

SEQ ID NO: 654795 - DNA, 19 bp, Mus musculus
  siRNA target sequence for Nup160 (NM_021512.1,2256-2274).
gccatcttccttagtagat

SEQ ID NO: 654796 - DNA, 19 bp, Mus musculus
  siRNA target sequence for Nup160 (NM_021512.1,2258-2276).
catcttccttagtagatca

SEQ ID NO: 654797 - DNA, 19 bp, Mus musculus
  siRNA target sequence for Nup160 (NM_021512.1,2264-2282).
ccttagtagatcatttata

SEQ ID NO: 654798 - DNA, 19 bp, Mus musculus
  siRNA target sequence for Nup160 (NM_021512.1,2292-2310).
cgatgagcaccttttgaca

SEQ ID NO: 654799 - DNA, 19 bp, Mus musculus
  siRNA target sequence for Nup160 (NM_021512.1,2311-2329).
gaggatgagacgaccatat

SEQ ID NO: 654800 - DNA, 19 bp, Mus musculus
  siRNA target sequence for Nup160 (NM_021512.1,2313-2331).
ggatgagacgaccatatca

SEQ ID NO: 654801 - DNA, 19 bp, Mus musculus
  siRNA target sequence for Nup160 (NM_021512.1,2319-2337).
gacgaccatatcagatgat

SEQ ID NO: 654802 - DNA, 19 bp, Mus musculus
  siRNA target sequence for Nup160 (NM_021512.1,2344-2362).
gtggcacgggacgtcttat

SEQ ID NO: 654803 - DNA, 19 bp, Mus musculus
  siRNA target sequence for Nup160 (NM_021512.1,2346-2364).
ggcacgggacgtcttatgt

SEQ ID NO: 654804 - DNA, 19 bp, Mus musculus
  siRNA target sequence for Nup160 (NM_021512.1,2348-2366).
cacgggacgtcttatgtct

SEQ ID NO: 654805 - DNA, 19 bp, Mus musculus
  siRNA target sequence for Nup160 (NM_021512.1,2350-2368).
cgggacgtcttatgtctta

SEQ ID NO: 654806 - DNA, 19 bp, Mus musculus
  siRNA target sequence for Nup160 (NM_021512.1,2351-2369).
gggacgtcttatgtcttat

SEQ ID NO: 654807 - DNA, 19 bp, Mus musculus
  siRNA target sequence for Nup160 (NM_021512.1,2352-2370).
ggacgtcttatgtcttata

SEQ ID NO: 654808 - DNA, 19 bp, Mus musculus
  siRNA target sequence for Nup160 (NM_021512.1,2353-2371).
gacgtcttatgtcttataa

SEQ ID NO: 654809 - DNA, 19 bp, Mus musculus
  siRNA target sequence for Nup160 (NM_021512.1,2509-2527).
gtgatggaagacatttgta

SEQ ID NO: 654810 - DNA, 19 bp, Mus musculus
  siRNA target sequence for Nup160 (NM_021512.1,2511-2529).
gatggaagacatttgtagt

SEQ ID NO: 654811 - DNA, 19 bp, Mus musculus
  siRNA target sequence for Nup160 (NM_021512.1,2525-2543).
gtagtaaactgcaagagat

SEQ ID NO: 654812 - DNA, 19 bp, Mus musculus
  siRNA target sequence for Nup160 (NM_021512.1,2556-2574).
ccatgccattggacttctt

SEQ ID NO: 654813 - DNA, 19 bp, Mus musculus
  siRNA target sequence for Nup160 (NM_021512.1,2572-2590).
cttatacgggaaatggatt

SEQ ID NO: 654814 - DNA, 19 bp, Mus musculus
  siRNA target sequence for Nup160 (NM_021512.1,2640-2658).
gaacgttcgaatgaatctt

SEQ ID NO: 654815 - DNA, 19 bp, Mus musculus
  siRNA target sequence for Nup160 (NM_021512.1,2656-2674).
ctttcccagctctatggta

SEQ ID NO: 654816 - DNA, 19 bp, Mus musculus
  siRNA target sequence for Nup160 (NM_021512.1,2675-2693).
gtagcacagcaggatatat

SEQ ID NO: 654817 - DNA, 19 bp, Mus musculus
  siRNA target sequence for Nup160 (NM_021512.1,2697-2715).
gtgtcgaggtgtgtataaa

SEQ ID NO: 654818 - DNA, 19 bp, Mus musculus
  siRNA target sequence for Nup160 (NM_021512.1,2699-2717).
gtcgaggtgtgtataaaat

SEQ ID NO: 654819 - DNA, 19 bp, Mus musculus
  siRNA target sequence for Nup160 (NM_021512.1,2741-2759).
gccgagacctcttgatctt

SEQ ID NO: 654820 - DNA, 19 bp, Mus musculus
  siRNA target sequence for Nup160 (NM_021512.1,2757-2775).
cttgcagcagctattaaca

SEQ ID NO: 654821 - DNA, 19 bp, Mus musculus
  siRNA target sequence for Nup160 (NM_021512.1,2801-2819).
gagctggtcagctctttca

SEQ ID NO: 654822 - DNA, 19 bp, Mus musculus
  siRNA target sequence for Nup160 (NM_021512.1,2849-2867).
ctcccctgctcttgtctta

SEQ ID NO: 654823 - DNA, 19 bp, Mus musculus
  siRNA target sequence for Nup160 (NM_021512.1,2919-2937).
cacactggagtctaatcta

SEQ ID NO: 654824 - DNA, 19 bp, Mus musculus
  siRNA target sequence for Nup160 (NM_021512.1,2921-2939).
cactggagtctaatctaca

SEQ ID NO: 654825 - DNA, 19 bp, Mus musculus
  siRNA target sequence for Nup160 (NM_021512.1,2925-2943).
ggagtctaatctacaacat

SEQ ID NO: 654826 - DNA, 19 bp, Mus musculus
  siRNA target sequence for Nup160 (NM_021512.1,2926-2944).
gagtctaatctacaacatt

SEQ ID NO: 654827 - DNA, 19 bp, Mus musculus
  siRNA target sequence for Nup160 (NM_021512.1,2946-2964).
gtcagttctggaactaact

SEQ ID NO: 654828 - DNA, 19 bp, Mus musculus
  siRNA target sequence for Nup160 (NM_021512.1,2950-2968).
gttctggaactaactgatt

SEQ ID NO: 654829 - DNA, 19 bp, Mus musculus
  siRNA target sequence for Nup160 (NM_021512.1,2972-2990).
gtgccttaatggcaaataa

SEQ ID NO: 654830 - DNA, 19 bp, Mus musculus
  siRNA target sequence for Nup160 (NM_021512.1,2975-2993).
ccttaatggcaaataaact

SEQ ID NO: 654831 - DNA, 19 bp, Mus musculus
  siRNA target sequence for Nup160 (NM_021512.1,2983-3001).
gcaaataaactggtatcta

SEQ ID NO: 654832 - DNA, 19 bp, Mus musculus
  siRNA target sequence for Nup160 (NM_021512.1,2999-3017).
ctagccctcagacaattat

SEQ ID NO: 654833 - DNA, 19 bp, Mus musculus
  siRNA target sequence for Nup160 (NM_021512.1,3101-3119).
gattgaattggcctgaaat

SEQ ID NO: 654834 - DNA, 19 bp, Mus musculus
  siRNA target sequence for Nup160 (NM_021512.1,3125-3143).
ctgcagttactggttattt

SEQ ID NO: 654835 - DNA, 19 bp, Mus musculus
  siRNA target sequence for Nup160 (NM_021512.1,3127-3145).
gcagttactggttatttgt

SEQ ID NO: 654836 - DNA, 19 bp, Mus musculus
  siRNA target sequence for Nup160 (NM_021512.1,3137-3155).
gttatttgttgcagctttt

SEQ ID NO: 654837 - DNA, 19 bp, Mus musculus
  siRNA target sequence for Nup160 (NM_021512.1,3178-3196).
ctctttctagaatgtttga

SEQ ID NO: 654838 - DNA, 19 bp, Mus musculus
  siRNA target sequence for Nup160 (NM_021512.1,3200-3218).
ggaattgccagtatgtaca

SEQ ID NO: 654839 - DNA, 19 bp, Mus musculus
  siRNA target sequence for Nup160 (NM_021512.1,3201-3219).
gaattgccagtatgtacaa

SEQ ID NO: 654840 - DNA, 19 bp, Mus musculus
  siRNA target sequence for Nup160 (NM_021512.1,3206-3224).
gccagtatgtacaattgca

SEQ ID NO: 654841 - DNA, 19 bp, Mus musculus
  siRNA target sequence for Nup160 (NM_021512.1,3214-3232).
gtacaattgcaggattata

SEQ ID NO: 654842 - DNA, 19 bp, Mus musculus
  siRNA target sequence for Nup160 (NM_021512.1,3248-3266).
cctggtgtcaagtcaatgt

SEQ ID NO: 654843 - DNA, 19 bp, Mus musculus
  siRNA target sequence for Nup160 (NM_021512.1,3249-3267).
ctggtgtcaagtcaatgtt

SEQ ID NO: 654844 - DNA, 19 bp, Mus musculus
  siRNA target sequence for Nup160 (NM_021512.1,3269-3287).
ggtcttgtcgctttatgct

SEQ ID NO: 654845 - DNA, 19 bp, Mus musculus
  siRNA target sequence for Nup160 (NM_021512.1,3420-3438).
ccccaagttgcagtattat

SEQ ID NO: 654846 - DNA, 19 bp, Mus musculus
  siRNA target sequence for Nup160 (NM_021512.1,3423-3441).
caagttgcagtattatgat

SEQ ID NO: 654847 - DNA, 19 bp, Mus musculus
  siRNA target sequence for Nup160 (NM_021512.1,3429-3447).
gcagtattatgataaggtt

SEQ ID NO: 654848 - DNA, 19 bp, Mus musculus
  siRNA target sequence for Nup160 (NM_021512.1,3430-3448).
cagtattatgataaggttt

SEQ ID NO: 654849 - DNA, 19 bp, Mus musculus
  siRNA target sequence for Nup160 (NM_021512.1,3432-3450).
gtattatgataaggtttta

SEQ ID NO: 654850 - DNA, 19 bp, Mus musculus
  siRNA target sequence for Nup160 (NM_021512.1,3492-3510).
gcttgctacatcagcaatt

SEQ ID NO: 654851 - DNA, 19 bp, Mus musculus
  siRNA target sequence for Nup160 (NM_021512.1,3493-3511).
cttgctacatcagcaatta

SEQ ID NO: 654852 - DNA, 19 bp, Mus musculus
  siRNA target sequence for Nup160 (NM_021512.1,3584-3602).
gtcataatagccaagcata

SEQ ID NO: 654853 - DNA, 19 bp, Mus musculus
  siRNA target sequence for Nup160 (NM_021512.1,3632-3650).
gcaggcagttagactgttt

SEQ ID NO: 654854 - DNA, 19 bp, Mus musculus
  siRNA target sequence for Nup160 (NM_021512.1,3690-3708).
gcaggatcttgtagagttt

SEQ ID NO: 654855 - DNA, 19 bp, Mus musculus
  siRNA target sequence for Nup160 (NM_021512.1,3700-3718).
gtagagtttccctatgtga

SEQ ID NO: 654856 - DNA, 19 bp, Mus musculus
  siRNA target sequence for Nup160 (NM_021512.1,3711-3729).
ctatgtgaatctgcataat

SEQ ID NO: 654857 - DNA, 19 bp, Mus musculus
  siRNA target sequence for Nup160 (NM_021512.1,3732-3750).
ggttgtaggaataattgaa

SEQ ID NO: 654858 - DNA, 19 bp, Mus musculus
  siRNA target sequence for Nup160 (NM_021512.1,3769-3787).
gaccttatgactcacaatt

SEQ ID NO: 654859 - DNA, 19 bp, Mus musculus
  siRNA target sequence for Nup160 (NM_021512.1,3811-3829).
cacatttaccgccataatt

SEQ ID NO: 654860 - DNA, 19 bp, Mus musculus
  siRNA target sequence for Nup160 (NM_021512.1,3822-3840).
ccataattaccgaaaagct

SEQ ID NO: 654861 - DNA, 19 bp, Mus musculus
  siRNA target sequence for Nup160 (NM_021512.1,3876-3894).
cagagaggtacgaactctt

SEQ ID NO: 654862 - DNA, 19 bp, Mus musculus
  siRNA target sequence for Nup160 (NM_021512.1,3890-3908).
ctcttcggggacttgagaa

SEQ ID NO: 654863 - DNA, 19 bp, Mus musculus
  siRNA target sequence for Nup160 (NM_021512.1,3904-3922).
gagaagcaaggcaactgtt

SEQ ID NO: 654864 - DNA, 19 bp, Mus musculus
  siRNA target sequence for Nup160 (NM_021512.1,3920-3938).
gttacctagccgctatcaa

SEQ ID NO: 654865 - DNA, 19 bp, Mus musculus
  siRNA target sequence for Nup160 (NM_021512.1,3924-3942).
cctagccgctatcaattgt

SEQ ID NO: 654866 - DNA, 19 bp, Mus musculus
  siRNA target sequence for Nup160 (NM_021512.1,3925-3943).
ctagccgctatcaattgtt

SEQ ID NO: 654867 - DNA, 19 bp, Mus musculus
  siRNA target sequence for Nup160 (NM_021512.1,3948-3966).
gcttattcgtccagagtat

SEQ ID NO: 654868 - DNA, 19 bp, Mus musculus
  siRNA target sequence for Nup160 (NM_021512.1,4019-4037).
ctcctaagcggaatcatga

SEQ ID NO: 654869 - DNA, 19 bp, Mus musculus
  siRNA target sequence for Nup160 (NM_021512.1,4056-4074).
cccaaccaatcggcaaatt

SEQ ID NO: 654870 - DNA, 19 bp, Mus musculus
  siRNA target sequence for Nup160 (NM_021512.1,4058-4076).
caaccaatcggcaaattga

SEQ ID NO: 654871 - DNA, 19 bp, Mus musculus
  siRNA target sequence for Nup160 (NM_021512.1,4061-4079).
ccaatcggcaaattgaaat

SEQ ID NO: 654872 - DNA, 19 bp, Mus musculus
  siRNA target sequence for Nup160 (NM_021512.1,4062-4080).
caatcggcaaattgaaatt

SEQ ID NO: 654873 - DNA, 19 bp, Mus musculus
  siRNA target sequence for Nup160 (NM_021512.1,4090-4108).
gaagatctcgagaaagaat

SEQ ID NO: 654874 - DNA, 19 bp, Mus musculus
  siRNA target sequence for Nup160 (NM_021512.1,4164-4182).
cattgcaggaagttcatca

SEQ ID NO: 654875 - DNA, 19 bp, Mus musculus
  siRNA target sequence for Nup160 (NM_021512.1,4221-4239).
ctttgatactgccatatca

SEQ ID NO: 654876 - DNA, 19 bp, Mus musculus
  siRNA target sequence for Nup160 (NM_021512.1,4288-4306).
gctttcaagtgcattaagt

SEQ ID NO: 654877 - DNA, 19 bp, Mus musculus
  siRNA target sequence for Nup160 (NM_021512.1,4344-4362).
gtcctggctagcaaccaat

SEQ ID NO: 654878 - DNA, 19 bp, Mus musculus
  siRNA target sequence for Nup160 (NM_021512.1,4415-4433).
ggaggctattgtcaactta

SEQ ID NO: 654879 - DNA, 19 bp, Mus musculus
  siRNA target sequence for Nup160 (NM_021512.1,4452-4470).
ccagaataacttgtatcat

SEQ ID NO: 654880 - DNA, 19 bp, Mus musculus
  siRNA target sequence for Nup160 (NM_021512.1,4468-4486).
catcattgtgtgattaaca

SEQ ID NO: 654881 - DNA, 19 bp, Mus musculus
  siRNA target sequence for Nup160 (NM_021512.1,4471-4489).
cattgtgtgattaacaagt

SEQ ID NO: 654882 - DNA, 19 bp, Mus musculus
  siRNA target sequence for Nup160 (NM_021512.1,4477-4495).
gtgattaacaagttgttgt

SEQ ID NO: 654883 - DNA, 19 bp, Mus musculus
  siRNA target sequence for Nup160 (NM_021512.1,4501-4519).
ggagttcctctgcctaatt

SEQ ID NO: 654884 - DNA, 19 bp, Mus musculus
  siRNA target sequence for Nup160 (NM_021512.1,4510-4528).
ctgcctaattggcttataa

SEQ ID NO: 654885 - DNA, 19 bp, Mus musculus
  siRNA target sequence for Nup160 (NM_021512.1,4578-4596).
ctatgaccttttagaagaa

SEQ ID NO: 654886 - DNA, 19 bp, Mus musculus
  siRNA target sequence for Nup160 (NM_021512.1,4608-4626).
ggtctctgaatatgtagat

SEQ ID NO: 654887 - DNA, 19 bp, Mus musculus
  siRNA target sequence for Nup160 (NM_021512.1,4637-4655).
gaaaaggacatcagtactt

SEQ ID NO: 654888 - DNA, 19 bp, Mus musculus
  siRNA target sequence for Nup160 (NM_021512.1,4643-4661).
gacatcagtactttggaat

SEQ ID NO: 654889 - DNA, 19 bp, Mus musculus
  siRNA target sequence for Nup160 (NM_021512.1,4648-4666).
cagtactttggaattgagt

SEQ ID NO: 654890 - DNA, 19 bp, Mus musculus
  siRNA target sequence for Nup160 (NM_021512.1,4678-4696).
gcaacagccccgatggtat

SEQ ID NO: 654891 - DNA, 19 bp, Mus musculus
  siRNA target sequence for Nup160 (NM_021512.1,4692-4710).
ggtatggctcccatactct

SEQ ID NO: 654892 - DNA, 19 bp, Mus musculus
  siRNA target sequence for Nup160 (NM_021512.1,4697-4715).
ggctcccatactcttctat

SEQ ID NO: 654893 - DNA, 19 bp, Mus musculus
  siRNA target sequence for Nup160 (NM_021512.1,4698-4716).
gctcccatactcttctatt

SEQ ID NO: 654894 - DNA, 19 bp, Mus musculus
  siRNA target sequence for Nup160 (NM_021512.1,4750-4768).
gccaacagtcacaacatta

SEQ ID NO: 654895 - DNA, 19 bp, Mus musculus
  siRNA target sequence for Nup160 (NM_021512.1,4821-4839).
caaggcaacgcgagattta

SEQ ID NO: 654896 - DNA, 19 bp, Mus musculus
  siRNA target sequence for Nup160 (NM_021512.1,4825-4843).
gcaacgcgagatttactgt

SEQ ID NO: 654897 - DNA, 19 bp, Mus musculus
  siRNA target sequence for Nup160 (NM_021512.1,4826-4844).
caacgcgagatttactgta

SEQ ID NO: 654898 - DNA, 19 bp, Mus musculus
  siRNA target sequence for Bet1l (NM_018742.3,170-188).
ggaccagaaccgttactta

SEQ ID NO: 654899 - DNA, 19 bp, Mus musculus
  siRNA target sequence for Bet1l (NM_018742.3,298-316).
gtatggctgtggtcttaat

SEQ ID NO: 654900 - DNA, 19 bp, Mus musculus
  siRNA target sequence for 0610009B22Rik (NM_025319.1,252-270).
ctcgtcgacgaaaacatgt

SEQ ID NO: 654901 - DNA, 19 bp, Mus musculus
  siRNA target sequence for 0610009B22Rik (NM_025319.1,346-364).
ggcacatgcggctcatcat

SEQ ID NO: 654902 - DNA, 19 bp, Mus musculus
  siRNA target sequence for 0610009B22Rik (NM_025319.1,381-399).
cacgaggatggcatcaaga

SEQ ID NO: 654903 - DNA, 19 bp, Mus musculus
  siRNA target sequence for 0610009B22Rik (NM_025319.1,409-427).
ctgacgtctacgacttata

SEQ ID NO: 654904 - DNA, 19 bp, Mus musculus
  siRNA target sequence for 0610009B22Rik (NM_025319.1,411-429).
gacgtctacgacttataca

SEQ ID NO: 654905 - DNA, 19 bp, Mus musculus
  siRNA target sequence for 0610009B22Rik (NM_025319.1,414-432).
gtctacgacttatacatca

SEQ ID NO: 654906 - DNA, 19 bp, Mus musculus
  siRNA target sequence for 0610009B22Rik (NM_025319.1,416-434).
ctacgacttatacatcaaa

SEQ ID NO: 654907 - DNA, 19 bp, Mus musculus
  siRNA target sequence for 0610009B22Rik (NM_025319.1,488-506).
cgaaagaaaagttcagttt

SEQ ID NO: 654908 - DNA, 19 bp, Mus musculus
  siRNA target sequence for Trappc2 (NM_025432.1,304-322).
gatttattatgcttcatga

SEQ ID NO: 654909 - DNA, 19 bp, Mus musculus
  siRNA target sequence for Hba-a1 (NM_008218.1,40-58).
ctctctggggaagacaaaa

SEQ ID NO: 654910 - DNA, 19 bp, Mus musculus
  siRNA target sequence for Hba-x (NM_010405.2,238-256).
cacggcttcaagatcatga

SEQ ID NO: 654911 - DNA, 19 bp, Mus musculus
  siRNA target sequence for Hba-x (NM_010405.2,262-280).
gtaggggatgcggttaaga

SEQ ID NO: 654912 - DNA, 19 bp, Mus musculus
  siRNA target sequence for Hbb-y (NM_008221.2,102-120).
gtggagtaaggtcaatgtt

SEQ ID NO: 654913 - DNA, 19 bp, Mus musculus
  siRNA target sequence for Hbb-y (NM_008221.2,104-122).
ggagtaaggtcaatgttga

SEQ ID NO: 654914 - DNA, 19 bp, Mus musculus
  siRNA target sequence for Hbb-y (NM_008221.2,166-184).
ccatggacccatagatttt

SEQ ID NO: 654915 - DNA, 19 bp, Mus musculus
  siRNA target sequence for Hbb-y (NM_008221.2,167-185).
catggacccatagattttt

SEQ ID NO: 654916 - DNA, 19 bp, Mus musculus
  siRNA target sequence for Hbb-y (NM_008221.2,170-188).
ggacccatagattttttga

SEQ ID NO: 654917 - DNA, 19 bp, Mus musculus
  siRNA target sequence for Hbb-y (NM_008221.2,255-273).
gaaggtgctgactgctttt

SEQ ID NO: 654918 - DNA, 19 bp, Mus musculus
  siRNA target sequence for Hbb-y (NM_008221.2,407-425).
gtcacttcggcaatgaatt

SEQ ID NO: 654919 - DNA, 19 bp, Mus musculus
  siRNA target sequence for Hbb-y (NM_008221.2,409-427).
cacttcggcaatgaattca

SEQ ID NO: 654920 - DNA, 19 bp, Mus musculus
  siRNA target sequence for Hbb-y (NM_008221.2,411-429).
cttcggcaatgaattcaca

SEQ ID NO: 654921 - DNA, 19 bp, Mus musculus
  siRNA target sequence for Mb (NM_013593.2,249-267).
gtcctcatcggtctgttta

SEQ ID NO: 654922 - DNA, 19 bp, Mus musculus
  siRNA target sequence for Mb (NM_013593.2,252-270).
ctcatcggtctgtttaaga

SEQ ID NO: 654923 - DNA, 19 bp, Mus musculus
  siRNA target sequence for Mb (NM_013593.2,468-486).
gtcaagtacctggagttta

SEQ ID NO: 654924 - DNA, 19 bp, Mus musculus
  siRNA target sequence for Mb (NM_013593.2,473-491).
gtacctggagtttatctca

SEQ ID NO: 654925 - DNA, 19 bp, Mus musculus
  siRNA target sequence for Ngb (NM_022414.2,396-414).
gcctctcttccagtacaat

SEQ ID NO: 654926 - DNA, 19 bp, Mus musculus
  siRNA target sequence for Ngb (NM_022414.2,608-626).
gcgagtccctgctctacat

SEQ ID NO: 654927 - DNA, 19 bp, Mus musculus
  siRNA target sequence for Ngb (NM_022414.2,639-657).
cctgggtcccgactttaca

SEQ ID NO: 654928 - DNA, 19 bp, Mus musculus
  siRNA target sequence for Slc29a1 (NM_022880.1,265-283).
gctcccctggaattttttt

SEQ ID NO: 654929 - DNA, 19 bp, Mus musculus
  siRNA target sequence for Slc29a1 (NM_022880.1,289-307).
cgcaaccaagtatttcaca

SEQ ID NO: 654930 - DNA, 19 bp, Mus musculus
  siRNA target sequence for Slc29a1 (NM_022880.1,290-308).
gcaaccaagtatttcacaa

SEQ ID NO: 654931 - DNA, 19 bp, Mus musculus
  siRNA target sequence for Slc29a1 (NM_022880.1,334-352).
gtcctcggacactgatcaa

SEQ ID NO: 654932 - DNA, 19 bp, Mus musculus
  siRNA target sequence for Slc29a1 (NM_022880.1,337-355).
ctcggacactgatcaatca

SEQ ID NO: 654933 - DNA, 19 bp, Mus musculus
  siRNA target sequence for Slc29a1 (NM_022880.1,411-429).
ctctcagtgccatcttcaa

SEQ ID NO: 654934 - DNA, 19 bp, Mus musculus
  siRNA target sequence for Slc29a1 (NM_022880.1,413-431).
ctcagtgccatcttcaaca

SEQ ID NO: 654935 - DNA, 19 bp, Mus musculus
  siRNA target sequence for Slc29a1 (NM_022880.1,494-512).
catcagcggatctctcaat

SEQ ID NO: 654936 - DNA, 19 bp, Mus musculus
  siRNA target sequence for Slc29a1 (NM_022880.1,622-640).
caagattgtgctcatcaat

SEQ ID NO: 654937 - DNA, 19 bp, Mus musculus
  siRNA target sequence for Slc29a1 (NM_022880.1,631-649).
gctcatcaattcatttggt

SEQ ID NO: 654938 - DNA, 19 bp, Mus musculus
  siRNA target sequence for Slc29a1 (NM_022880.1,931-949).
caagttggatctcataaga

SEQ ID NO: 654939 - DNA, 19 bp, Mus musculus
  siRNA target sequence for Slc29a1 (NM_022880.1,1023-1041).
ctatcaaagccatacttaa

SEQ ID NO: 654940 - DNA, 19 bp, Mus musculus
  siRNA target sequence for Slc29a1 (NM_022880.1,1027-1045).
caaagccatacttaagagt

SEQ ID NO: 654941 - DNA, 19 bp, Mus musculus
  siRNA target sequence for Slc29a1 (NM_022880.1,1031-1049).
gccatacttaagagtatct

SEQ ID NO: 654942 - DNA, 19 bp, Mus musculus
  siRNA target sequence for Slc29a1 (NM_022880.1,1075-1093).
catcttcacggttaccatt

SEQ ID NO: 654943 - DNA, 19 bp, Mus musculus
  siRNA target sequence for Slc29a1 (NM_022880.1,1150-1168).
ctggaaaagctacttcatt

SEQ ID NO: 654944 - DNA, 19 bp, Mus musculus
  siRNA target sequence for Slc29a1 (NM_022880.1,1170-1188).
ccgtggcctgtttcttgaa

SEQ ID NO: 654945 - DNA, 19 bp, Mus musculus
  siRNA target sequence for Slc29a1 (NM_022880.1,1179-1197).
gtttcttgaatttcaatgt

SEQ ID NO: 654946 - DNA, 19 bp, Mus musculus
  siRNA target sequence for Slc29a1 (NM_022880.1,1274-1292).
gtcgcctcgaggattgtgt

SEQ ID NO: 654947 - DNA, 19 bp, Mus musculus
  siRNA target sequence for Slc29a1 (NM_022880.1,1276-1294).
cgcctcgaggattgtgttt

SEQ ID NO: 654948 - DNA, 19 bp, Mus musculus
  siRNA target sequence for Slc29a1 (NM_022880.1,1277-1295).
gcctcgaggattgtgttta

SEQ ID NO: 654949 - DNA, 19 bp, Mus musculus
  siRNA target sequence for Slc29a1 (NM_022880.1,1278-1296).
cctcgaggattgtgtttat

SEQ ID NO: 654950 - DNA, 19 bp, Mus musculus
  siRNA target sequence for Slc29a1 (NM_022880.1,1346-1364).
cggcaccacttcgtcttta

SEQ ID NO: 654951 - DNA, 19 bp, Mus musculus
  siRNA target sequence for Slc29a1 (NM_022880.1,1351-1369).
ccacttcgtctttaagcat

SEQ ID NO: 654952 - DNA, 19 bp, Mus musculus
  siRNA target sequence for Slc29a1 (NM_022880.1,1475-1493).
gagacagcaggaaacatca

SEQ ID NO: 654953 - DNA, 19 bp, Mus musculus
  siRNA target sequence for Slc29a2 (NM_007854.1,202-220).
gcgtccgtctggttcatca

SEQ ID NO: 654954 - DNA, 19 bp, Mus musculus
  siRNA target sequence for Slc29a2 (NM_007854.1,204-222).
gtccgtctggttcatcaat

SEQ ID NO: 654955 - DNA, 19 bp, Mus musculus
  siRNA target sequence for Slc29a2 (NM_007854.1,382-400).
gctcttggatacttcatca

SEQ ID NO: 654956 - DNA, 19 bp, Mus musculus
  siRNA target sequence for Slc29a2 (NM_007854.1,683-701).
cggcgctgtgccttgtgtt

SEQ ID NO: 654957 - DNA, 19 bp, Mus musculus
  siRNA target sequence for Slc29a3 (NM_023596.2,95-113).
cagagccccgagtaaccat

SEQ ID NO: 654958 - DNA, 19 bp, Mus musculus
  siRNA target sequence for Slc29a3 (NM_023596.2,100-118).
ccccgagtaaccatcaaga

SEQ ID NO: 654959 - DNA, 19 bp, Mus musculus
  siRNA target sequence for Slc29a3 (NM_023596.2,134-152).
cctgctggggaaactacta

SEQ ID NO: 654960 - DNA, 19 bp, Mus musculus
  siRNA target sequence for Slc29a3 (NM_023596.2,198-216).
ggtgcctacatcatcttct

SEQ ID NO: 654961 - DNA, 19 bp, Mus musculus
  siRNA target sequence for Slc29a3 (NM_023596.2,269-287).
ggagtactgggcatataaa

SEQ ID NO: 654962 - DNA, 19 bp, Mus musculus
  siRNA target sequence for Slc29a3 (NM_023596.2,406-424).
ctaacttcctgcttgtcaa

SEQ ID NO: 654963 - DNA, 19 bp, Mus musculus
  siRNA target sequence for Slc29a3 (NM_023596.2,476-494).
catcttcgtggttatgatt

SEQ ID NO: 654964 - DNA, 19 bp, Mus musculus
  siRNA target sequence for Slc29a3 (NM_023596.2,551-569).
cgcgtgcatggccatcatt

SEQ ID NO: 654965 - DNA, 19 bp, Mus musculus
  siRNA target sequence for Slc29a3 (NM_023596.2,552-570).
gcgtgcatggccatcatta

SEQ ID NO: 654966 - DNA, 19 bp, Mus musculus
  siRNA target sequence for Slc29a3 (NM_023596.2,632-650).
gaatgcccaggcactgata

SEQ ID NO: 654967 - DNA, 19 bp, Mus musculus
  siRNA target sequence for Slc29a3 (NM_023596.2,770-788).
gctctgtatgggactctat

SEQ ID NO: 654968 - DNA, 19 bp, Mus musculus
  siRNA target sequence for Slc29a3 (NM_023596.2,773-791).
ctgtatgggactctatcta

SEQ ID NO: 654969 - DNA, 19 bp, Mus musculus
  siRNA target sequence for Slc29a3 (NM_023596.2,807-825).
gagtatgccaggtactaca

SEQ ID NO: 654970 - DNA, 19 bp, Mus musculus
  siRNA target sequence for Slc29a3 (NM_023596.2,837-855).
gccccagttcgagtgtttt

SEQ ID NO: 654971 - DNA, 19 bp, Mus musculus
  siRNA target sequence for Slc29a3 (NM_023596.2,839-857).
cccagttcgagtgttttct

SEQ ID NO: 654972 - DNA, 19 bp, Mus musculus
  siRNA target sequence for Slc29a3 (NM_023596.2,976-994).
gcgcagtttccctctactt

SEQ ID NO: 654973 - DNA, 19 bp, Mus musculus
  siRNA target sequence for Slc29a3 (NM_023596.2,977-995).
cgcagtttccctctacttt

SEQ ID NO: 654974 - DNA, 19 bp, Mus musculus
  siRNA target sequence for Slc29a3 (NM_023596.2,1018-1036).
ccatctccaccaatatcca

SEQ ID NO: 654975 - DNA, 19 bp, Mus musculus
  siRNA target sequence for Slc29a3 (NM_023596.2,1393-1411).
gtgttgtgatgttgttcta

SEQ ID NO: 654976 - DNA, 19 bp, Mus musculus
  siRNA target sequence for Slc29a3 (NM_023596.2,1395-1413).
gttgtgatgttgttctata

SEQ ID NO: 654977 - DNA, 19 bp, Mus musculus
  siRNA target sequence for Slc29a3 (NM_023596.2,1398-1416).
gtgatgttgttctatatgt

SEQ ID NO: 654978 - DNA, 19 bp, Mus musculus
  siRNA target sequence for Slc29a3 (NM_023596.2,1449-1467).
gccctgcttgaacacttta

SEQ ID NO: 654979 - DNA, 19 bp, Mus musculus
  siRNA target sequence for Slc29a3 (NM_023596.2,1450-1468).
ccctgcttgaacactttat

SEQ ID NO: 654980 - DNA, 19 bp, Mus musculus
  siRNA target sequence for Pln (NM_023129.3,279-297).
ctccagaacctatttatca

SEQ ID NO: 654981 - DNA, 19 bp, Mus musculus
  siRNA target sequence for Pln (NM_023129.3,282-300).
cagaacctatttatcaatt

SEQ ID NO: 654982 - DNA, 19 bp, Mus musculus
  siRNA target sequence for 1110001N06Rik (NM_028866.2,16-34).
ggctctcctccacgatttt

SEQ ID NO: 654983 - DNA, 19 bp, Mus musculus
  siRNA target sequence for 1110001N06Rik (NM_028866.2,17-35).
gctctcctccacgattttt

SEQ ID NO: 654984 - DNA, 19 bp, Mus musculus
  siRNA target sequence for 1110001N06Rik (NM_028866.2,20-38).
ctcctccacgatttttcca

SEQ ID NO: 654985 - DNA, 19 bp, Mus musculus
  siRNA target sequence for 1110001N06Rik (NM_028866.2,22-40).
cctccacgatttttccata

SEQ ID NO: 654986 - DNA, 19 bp, Mus musculus
  siRNA target sequence for 1110001N06Rik (NM_028866.2,23-41).
ctccacgatttttccatat

SEQ ID NO: 654987 - DNA, 19 bp, Mus musculus
  siRNA target sequence for 1110001N06Rik (NM_028866.2,58-76).
caggctccccgacaattat

SEQ ID NO: 654988 - DNA, 19 bp, Mus musculus
  siRNA target sequence for 1110001N06Rik (NM_028866.2,60-78).
ggctccccgacaattattt

SEQ ID NO: 654989 - DNA, 19 bp, Mus musculus
  siRNA target sequence for 1110001N06Rik (NM_028866.2,62-80).
ctccccgacaattatttta

SEQ ID NO: 654990 - DNA, 19 bp, Mus musculus
  siRNA target sequence for 1110001N06Rik (NM_028866.2,64-82).
ccccgacaattattttata

SEQ ID NO: 654991 - DNA, 19 bp, Mus musculus
  siRNA target sequence for 1110001N06Rik (NM_028866.2,125-143).
cctttgatggaaaacgaat

SEQ ID NO: 654992 - DNA, 19 bp, Mus musculus
  siRNA target sequence for 1110001N06Rik (NM_028866.2,151-169).
gctgtaaaccgaaaaacca

SEQ ID NO: 654993 - DNA, 19 bp, Mus musculus
  siRNA target sequence for 1110001N06Rik (NM_028866.2,152-170).
ctgtaaaccgaaaaaccat

SEQ ID NO: 654994 - DNA, 19 bp, Mus musculus
  siRNA target sequence for 1110001N06Rik (NM_028866.2,230-248).
gagatatgcgggcaattca

SEQ ID NO: 654995 - DNA, 19 bp, Mus musculus
  siRNA target sequence for 1110001N06Rik (NM_028866.2,247-265).
cagccggatgcaggttatt

SEQ ID NO: 654996 - DNA, 19 bp, Mus musculus
  siRNA target sequence for 1110001N06Rik (NM_028866.2,249-267).
gccggatgcaggttattat

SEQ ID NO: 654997 - DNA, 19 bp, Mus musculus
  siRNA target sequence for 1110001N06Rik (NM_028866.2,250-268).
ccggatgcaggttattata

SEQ ID NO: 654998 - DNA, 19 bp, Mus musculus
  siRNA target sequence for 1110001N06Rik (NM_028866.2,251-269).
cggatgcaggttattataa

SEQ ID NO: 654999 - DNA, 19 bp, Mus musculus
  siRNA target sequence for 1110001N06Rik (NM_028866.2,252-270).
ggatgcaggttattataat

SEQ ID NO: 655000 - DNA, 19 bp, Mus musculus
  siRNA target sequence for 1110001N06Rik (NM_028866.2,257-275).
caggttattataatgatct

SEQ ID NO: 655001 - DNA, 19 bp, Mus musculus
  siRNA target sequence for 1110001N06Rik (NM_028866.2,283-301).
ccaataggaatgttgaata

SEQ ID NO: 655002 - DNA, 19 bp, Mus musculus
  siRNA target sequence for 1110001N06Rik (NM_028866.2,284-302).
caataggaatgttgaataa

SEQ ID NO: 655003 - DNA, 19 bp, Mus musculus
  siRNA target sequence for 1110001N06Rik (NM_028866.2,289-307).
ggaatgttgaataatccta

SEQ ID NO: 655004 - DNA, 19 bp, Mus musculus
  siRNA target sequence for 1110001N06Rik (NM_028866.2,316-334).
gtaacaacaaaatttgtta

SEQ ID NO: 655005 - DNA, 19 bp, Mus musculus
  siRNA target sequence for 1110001N06Rik (NM_028866.2,465-483).
catattgcaggctcatgat

SEQ ID NO: 655006 - DNA, 19 bp, Mus musculus
  siRNA target sequence for 1110001N06Rik (NM_028866.2,487-505).
cctgtgagggccatgactt

SEQ ID NO: 655007 - DNA, 19 bp, Mus musculus
  siRNA target sequence for 1110001N06Rik (NM_028866.2,525-543).
gatgttgacagcagatcat

SEQ ID NO: 655008 - DNA, 19 bp, Mus musculus
  siRNA target sequence for 1110001N06Rik (NM_028866.2,636-654).
cacggataataaatttgct

SEQ ID NO: 655009 - DNA, 19 bp, Mus musculus
  siRNA target sequence for 1110001N06Rik (NM_028866.2,777-795).
cgtttcaggaagtaaagat

SEQ ID NO: 655010 - DNA, 19 bp, Mus musculus
  siRNA target sequence for 1110001N06Rik (NM_028866.2,799-817).
cagcagccaatcaagttct

SEQ ID NO: 655011 - DNA, 19 bp, Mus musculus
  siRNA target sequence for 1110001N06Rik (NM_028866.2,848-866).
cactccacgcccacaagaa

SEQ ID NO: 655012 - DNA, 19 bp, Mus musculus
  siRNA target sequence for 1110001N06Rik (NM_028866.2,1055-1073).
ctgacggctctctgttatt

SEQ ID NO: 655013 - DNA, 19 bp, Mus musculus
  siRNA target sequence for 1110001N06Rik (NM_028866.2,1211-1229).
gaaaccggccaggtgataa

SEQ ID NO: 655014 - DNA, 19 bp, Mus musculus
  siRNA target sequence for 1110001N06Rik (NM_028866.2,1234-1252).
cgagatcgatataatctga

SEQ ID NO: 655015 - DNA, 19 bp, Mus musculus
  siRNA target sequence for 1110001N06Rik (NM_028866.2,1235-1253).
gagatcgatataatctgaa

SEQ ID NO: 655016 - DNA, 19 bp, Mus musculus
  siRNA target sequence for 1110001N06Rik (NM_028866.2,1240-1258).
cgatataatctgaaccttt

SEQ ID NO: 655017 - DNA, 19 bp, Mus musculus
  siRNA target sequence for 1110001N06Rik (NM_028866.2,1291-1309).
gatgacctggagcctaata

SEQ ID NO: 655018 - DNA, 19 bp, Mus musculus
  siRNA target sequence for 1110001N06Rik (NM_028866.2,1334-1352).
gaataccagaacaactgaa

SEQ ID NO: 655019 - DNA, 19 bp, Mus musculus
  siRNA target sequence for 1110001N06Rik (NM_028866.2,1427-1445).
ggggaatggaggaagtaat

SEQ ID NO: 655020 - DNA, 19 bp, Mus musculus
  siRNA target sequence for 1110001N06Rik (NM_028866.2,1437-1455).
ggaagtaatgcaaaaggat

SEQ ID NO: 655021 - DNA, 19 bp, Mus musculus
  siRNA target sequence for 1110001N06Rik (NM_028866.2,1539-1557).
cccaattcctgctccaaat

SEQ ID NO: 655022 - DNA, 19 bp, Mus musculus
  siRNA target sequence for 1110001N06Rik (NM_028866.2,1541-1559).
caattcctgctccaaatga

SEQ ID NO: 655023 - DNA, 19 bp, Mus musculus
  siRNA target sequence for 1110001N06Rik (NM_028866.2,1626-1644).
gcaagaaatggccacatta

SEQ ID NO: 655024 - DNA, 19 bp, Mus musculus
  siRNA target sequence for 1110001N06Rik (NM_028866.2,1630-1648).
gaaatggccacattacagt

SEQ ID NO: 655025 - DNA, 19 bp, Mus musculus
  siRNA target sequence for 1110001N06Rik (NM_028866.2,1652-1670).
ccaacccgcagcttttaga

SEQ ID NO: 655026 - DNA, 19 bp, Mus musculus
  siRNA target sequence for 1110001N06Rik (NM_028866.2,1660-1678).
cagcttttagagcaactta

SEQ ID NO: 655027 - DNA, 19 bp, Mus musculus
  siRNA target sequence for 1110001N06Rik (NM_028866.2,1769-1787).
gtcagggtccgatatctca

SEQ ID NO: 655028 - DNA, 19 bp, Mus musculus
  siRNA target sequence for 1110001N06Rik (NM_028866.2,1773-1791).
gggtccgatatctcagatt

SEQ ID NO: 655029 - DNA, 19 bp, Mus musculus
  siRNA target sequence for 1110001N06Rik (NM_028866.2,1784-1802).
ctcagattcctcaaggttt

SEQ ID NO: 655030 - DNA, 19 bp, Mus musculus
  siRNA target sequence for 1110001N06Rik (NM_028866.2,2076-2094).
cggacctcaaggtagttct

SEQ ID NO: 655031 - DNA, 19 bp, Mus musculus
  siRNA target sequence for 1110001N06Rik (NM_028866.2,2198-2216).
cacccggtactcaaggaat

SEQ ID NO: 655032 - DNA, 19 bp, Mus musculus
  siRNA target sequence for 1110001N06Rik (NM_028866.2,2345-2363).
caggacctcgggagaatca

SEQ ID NO: 655033 - DNA, 19 bp, Mus musculus
  siRNA target sequence for 1110001N06Rik (NM_028866.2,2371-2389).
gctcctcaagggttaatga

SEQ ID NO: 655034 - DNA, 19 bp, Mus musculus
  siRNA target sequence for 1110001N06Rik (NM_028866.2,2372-2390).
ctcctcaagggttaatgat

SEQ ID NO: 655035 - DNA, 19 bp, Mus musculus
  siRNA target sequence for 1110001N06Rik (NM_028866.2,2500-2518).
ccaccacagggctcaatgt

SEQ ID NO: 655036 - DNA, 19 bp, Mus musculus
  siRNA target sequence for 1110001N06Rik (NM_028866.2,2501-2519).
caccacagggctcaatgtt

SEQ ID NO: 655037 - DNA, 19 bp, Mus musculus
  siRNA target sequence for 1110001N06Rik (NM_028866.2,3274-3292).
cgcagggaagagagcttta

SEQ ID NO: 655038 - DNA, 19 bp, Mus musculus
  siRNA target sequence for 1110001N06Rik (NM_028866.2,3332-3350).
caagaggaagggacaactt

SEQ ID NO: 655039 - DNA, 19 bp, Mus musculus
  siRNA target sequence for 1110001N06Rik (NM_028866.2,3840-3858).
cggataccacagagatgaa

SEQ ID NO: 655040 - DNA, 19 bp, Mus musculus
  siRNA target sequence for 1110001N06Rik (NM_028866.2,3920-3938).
ggggtagagggagtaacat

SEQ ID NO: 655041 - DNA, 19 bp, Mus musculus
  siRNA target sequence for 1110001N06Rik (NM_028866.2,3922-3940).
ggtagagggagtaacatga

SEQ ID NO: 655042 - DNA, 19 bp, Mus musculus
  siRNA target sequence for 1110001N06Rik (NM_028866.2,3923-3941).
gtagagggagtaacatgaa

SEQ ID NO: 655043 - DNA, 19 bp, Mus musculus
  siRNA target sequence for 1110001N06Rik (NM_028866.2,3952-3970).
ccaaggcgaggcacttcaa

SEQ ID NO: 655044 - DNA, 19 bp, Mus musculus
  siRNA target sequence for 1200003O06Rik (NM_025813.1,202-220).
cttggcttcggcagctatt

SEQ ID NO: 655045 - DNA, 19 bp, Mus musculus
  siRNA target sequence for 1200003O06Rik (NM_025813.1,215-233).
gctatttctgctatgacaa

SEQ ID NO: 655046 - DNA, 19 bp, Mus musculus
  siRNA target sequence for 1200003O06Rik (NM_025813.1,271-289).
caagtgaacaccacgaaat

SEQ ID NO: 655047 - DNA, 19 bp, Mus musculus
  siRNA target sequence for 1200003O06Rik (NM_025813.1,297-315).
gctgtatgcctggtattct

SEQ ID NO: 655048 - DNA, 19 bp, Mus musculus
  siRNA target sequence for 1200003O06Rik (NM_025813.1,314-332).
cttggcccaatgtagtttt

SEQ ID NO: 655049 - DNA, 19 bp, Mus musculus
  siRNA target sequence for 1200003O06Rik (NM_025813.1,376-394).
cgatggggcacagttattt

SEQ ID NO: 655050 - DNA, 19 bp, Mus musculus
  siRNA target sequence for 1200003O06Rik (NM_025813.1,377-395).
gatggggcacagttatttt

SEQ ID NO: 655051 - DNA, 19 bp, Mus musculus
  siRNA target sequence for 1200003O06Rik (NM_025813.1,382-400).
ggcacagttatttttagct

SEQ ID NO: 655052 - DNA, 19 bp, Mus musculus
  siRNA target sequence for 1200003O06Rik (NM_025813.1,410-428).
gcatcggacaggttatatt

SEQ ID NO: 655053 - DNA, 19 bp, Mus musculus
  siRNA target sequence for 1200003O06Rik (NM_025813.1,414-432).
cggacaggttatatttgct

SEQ ID NO: 655054 - DNA, 19 bp, Mus musculus
  siRNA target sequence for 1200003O06Rik (NM_025813.1,430-448).
gctctgggtggtatattta

SEQ ID NO: 655055 - DNA, 19 bp, Mus musculus
  siRNA target sequence for 1200003O06Rik (NM_025813.1,435-453).
gggtggtatatttaatgca

SEQ ID NO: 655056 - DNA, 19 bp, Mus musculus
  siRNA target sequence for 1200003O06Rik (NM_025813.1,436-454).
ggtggtatatttaatgcat

SEQ ID NO: 655057 - DNA, 19 bp, Mus musculus
  siRNA target sequence for 1200003O06Rik (NM_025813.1,466-484).
gagcttgggaggtttgtgt

SEQ ID NO: 655058 - DNA, 19 bp, Mus musculus
  siRNA target sequence for 1200003O06Rik (NM_025813.1,508-526).
gcagttgcccagaatacat

SEQ ID NO: 655059 - DNA, 19 bp, Mus musculus
  siRNA target sequence for 1200003O06Rik (NM_025813.1,509-527).
cagttgcccagaatacata

SEQ ID NO: 655060 - DNA, 19 bp, Mus musculus
  siRNA target sequence for 1200003O06Rik (NM_025813.1,677-695).
ccctgggcgtgacacttat

SEQ ID NO: 655061 - DNA, 19 bp, Mus musculus
  siRNA target sequence for 1200003O06Rik (NM_025813.1,679-697).
ctgggcgtgacacttatga

SEQ ID NO: 655062 - DNA, 19 bp, Mus musculus
  siRNA target sequence for 1200003O06Rik (NM_025813.1,681-699).
gggcgtgacacttatgatt

SEQ ID NO: 655063 - DNA, 19 bp, Mus musculus
  siRNA target sequence for 1200003O06Rik (NM_025813.1,691-709).
cttatgattgggtgtataa

SEQ ID NO: 655064 - DNA, 19 bp, Mus musculus
  siRNA target sequence for 1200003O06Rik (NM_025813.1,700-718).
gggtgtataacgtgcattt

SEQ ID NO: 655065 - DNA, 19 bp, Mus musculus
  siRNA target sequence for 1200003O06Rik (NM_025813.1,701-719).
ggtgtataacgtgcatttt

SEQ ID NO: 655066 - DNA, 19 bp, Mus musculus
  siRNA target sequence for 1200003O06Rik (NM_025813.1,710-728).
cgtgcattttttcactaat

SEQ ID NO: 655067 - DNA, 19 bp, Mus musculus
  siRNA target sequence for 1200003O06Rik (NM_025813.1,731-749).
gtgctttggctcttgctta

SEQ ID NO: 655068 - DNA, 19 bp, Mus musculus
  siRNA target sequence for 1200003O06Rik (NM_025813.1,733-751).
gctttggctcttgcttatt

SEQ ID NO: 655069 - DNA, 19 bp, Mus musculus
  siRNA target sequence for 1200003O06Rik (NM_025813.1,797-815).
caggtgaagtcattaagct

SEQ ID NO: 655070 - DNA, 19 bp, Mus musculus
  siRNA target sequence for 1200003O06Rik (NM_025813.1,897-915).
catcgggctgggcaaagtt

SEQ ID NO: 655071 - DNA, 19 bp, Mus musculus
  siRNA target sequence for 1200003O06Rik (NM_025813.1,918-936).
cttcatggagaaattcaga

SEQ ID NO: 655072 - DNA, 19 bp, Mus musculus
  siRNA target sequence for 1200003O06Rik (NM_025813.1,945-963).
ccagtcagcaagtgcaatt

SEQ ID NO: 655073 - DNA, 19 bp, Mus musculus
  siRNA target sequence for 1200003O06Rik (NM_025813.1,946-964).
cagtcagcaagtgcaatta

SEQ ID NO: 655074 - DNA, 19 bp, Mus musculus
  siRNA target sequence for 1200003O06Rik (NM_025813.1,952-970).
gcaagtgcaattaacagta

SEQ ID NO: 655075 - DNA, 19 bp, Mus musculus
  siRNA target sequence for 1200003O06Rik (NM_025813.1,953-971).
caagtgcaattaacagtat

SEQ ID NO: 655076 - DNA, 19 bp, Mus musculus
  siRNA target sequence for 1200003O06Rik (NM_025813.1,966-984).
cagtatcgtgtatatcata

SEQ ID NO: 655077 - DNA, 19 bp, Mus musculus
  siRNA target sequence for 1200003O06Rik (NM_025813.1,1009-1027).
ggactcttggtggataaaa

SEQ ID NO: 655078 - DNA, 19 bp, Mus musculus
  siRNA target sequence for 1200003O06Rik (NM_025813.1,1021-1039).
gataaaacaggcaagaaca

SEQ ID NO: 655079 - DNA, 19 bp, Mus musculus
  siRNA target sequence for 1200003O06Rik (NM_025813.1,1110-1128).
cccatggattgctatgtgt

SEQ ID NO: 655080 - DNA, 19 bp, Mus musculus
  siRNA target sequence for 1200003O06Rik (NM_025813.1,1169-1187).
ggccaatggtggcattcat

SEQ ID NO: 655081 - DNA, 19 bp, Mus musculus
  siRNA target sequence for 1200003O06Rik (NM_025813.1,1170-1188).
gccaatggtggcattcata

SEQ ID NO: 655082 - DNA, 19 bp, Mus musculus
  siRNA target sequence for 1200003O06Rik (NM_025813.1,1204-1222).
ctggggactgcatatggat

SEQ ID NO: 655083 - DNA, 19 bp, Mus musculus
  siRNA target sequence for 1200003O06Rik (NM_025813.1,1220-1238).
gattcatgcagtctattca

SEQ ID NO: 655084 - DNA, 19 bp, Mus musculus
  siRNA target sequence for 1200003O06Rik (NM_025813.1,1303-1321).
ctgctggaggtgttcttca

SEQ ID NO: 655085 - DNA, 19 bp, Mus musculus
  siRNA target sequence for 1200003O06Rik (NM_025813.1,1305-1323).
gctggaggtgttcttcatt

SEQ ID NO: 655086 - DNA, 19 bp, Mus musculus
  siRNA target sequence for 1200003O06Rik (NM_025813.1,1384-1402).
ggagggaatctaaattatt

SEQ ID NO: 655087 - DNA, 19 bp, Mus musculus
  siRNA target sequence for 1200013I08Rik (NM_028774.1,322-340).
ggatccgtctagatctaga

SEQ ID NO: 655088 - DNA, 19 bp, Mus musculus
  siRNA target sequence for 1200013I08Rik (NM_028774.1,323-341).
gatccgtctagatctagat

SEQ ID NO: 655089 - DNA, 19 bp, Mus musculus
  siRNA target sequence for 1200013I08Rik (NM_028774.1,411-429).
gagaagaagcctattatca

SEQ ID NO: 655090 - DNA, 19 bp, Mus musculus
  siRNA target sequence for 1200013I08Rik (NM_028774.1,413-431).
gaagaagcctattatcagt

SEQ ID NO: 655091 - DNA, 19 bp, Mus musculus
  siRNA target sequence for 1200013I08Rik (NM_028774.1,419-437).
gcctattatcagtttatta

SEQ ID NO: 655092 - DNA, 19 bp, Mus musculus
  siRNA target sequence for 1200013I08Rik (NM_028774.1,421-439).
ctattatcagtttattaat

SEQ ID NO: 655093 - DNA, 19 bp, Mus musculus
  siRNA target sequence for 1200013I08Rik (NM_028774.1,452-470).
gaagattatcggctaatga

SEQ ID NO: 655094 - DNA, 19 bp, Mus musculus
  siRNA target sequence for 1200013I08Rik (NM_028774.1,488-506).
ggcacccctggagaaataa

SEQ ID NO: 655095 - DNA, 19 bp, Mus musculus
  siRNA target sequence for 1200013I08Rik (NM_028774.1,518-536).
ctgcagcagcgcttagaga

SEQ ID NO: 655096 - DNA, 19 bp, Mus musculus
  siRNA target sequence for 1200013I08Rik (NM_028774.1,603-621).
gccttagagcacattcaga

SEQ ID NO: 655097 - DNA, 19 bp, Mus musculus
  siRNA target sequence for 1200013I08Rik (NM_028774.1,632-650).
ctgctgcgatggctgaata

SEQ ID NO: 655098 - DNA, 19 bp, Mus musculus
  siRNA target sequence for 1200013I08Rik (NM_028774.1,635-653).
ctgcgatggctgaatacct

SEQ ID NO: 655099 - DNA, 19 bp, Mus musculus
  siRNA target sequence for 1200013I08Rik (NM_028774.1,637-655).
gcgatggctgaataccttt

SEQ ID NO: 655100 - DNA, 19 bp, Mus musculus
  siRNA target sequence for 1200013I08Rik (NM_028774.1,656-674).
cggcgcactgggaatgtga

SEQ ID NO: 655101 - DNA, 19 bp, Mus musculus
  siRNA target sequence for 1200013I08Rik (NM_028774.1,673-691).
gactcgaagcggacagaat

SEQ ID NO: 655102 - DNA, 19 bp, Mus musculus
  siRNA target sequence for 1200013I08Rik (NM_028774.1,708-726).
gggccgtgagtcgaacaaa

SEQ ID NO: 655103 - DNA, 19 bp, Mus musculus
  siRNA target sequence for 1200013I08Rik (NM_028774.1,747-765).
ggtttagcctggaaatcca

SEQ ID NO: 655104 - DNA, 19 bp, Mus musculus
  siRNA target sequence for 1200013I08Rik (NM_028774.1,821-839).
cctctgtcaggtgttaaca

SEQ ID NO: 655105 - DNA, 19 bp, Mus musculus
  siRNA target sequence for 1200013I08Rik (NM_028774.1,953-971).
gtgcaagggtcatttgcaa

SEQ ID NO: 655106 - DNA, 19 bp, Mus musculus
  siRNA target sequence for 1200013I08Rik (NM_028774.1,968-986).
gcaactctgggaaggttaa

SEQ ID NO: 655107 - DNA, 19 bp, Mus musculus
  siRNA target sequence for 1200013I08Rik (NM_028774.1,1026-1044).
gtgcccctcgcactaatgt

SEQ ID NO: 655108 - DNA, 19 bp, Mus musculus
  siRNA target sequence for 1200013I08Rik (NM_028774.1,1028-1046).
gcccctcgcactaatgtta

SEQ ID NO: 655109 - DNA, 19 bp, Mus musculus
  siRNA target sequence for 1200013I08Rik (NM_028774.1,1029-1047).
cccctcgcactaatgttat

SEQ ID NO: 655110 - DNA, 19 bp, Mus musculus
  siRNA target sequence for 1200013I08Rik (NM_028774.1,1126-1144).
ggaaaacggggctagaagt

SEQ ID NO: 655111 - DNA, 19 bp, Mus musculus
  siRNA target sequence for 1200013I08Rik (NM_028774.1,1127-1145).
gaaaacggggctagaagta

SEQ ID NO: 655112 - DNA, 19 bp, Mus musculus
  siRNA target sequence for 1200013I08Rik (NM_028774.1,1132-1150).
cggggctagaagtaatgtt

SEQ ID NO: 655113 - DNA, 19 bp, Mus musculus
  siRNA target sequence for 1200013I08Rik (NM_028774.1,1133-1151).
ggggctagaagtaatgtta

SEQ ID NO: 655114 - DNA, 19 bp, Mus musculus
  siRNA target sequence for 1200013I08Rik (NM_028774.1,1135-1153).
ggctagaagtaatgttaca

SEQ ID NO: 655115 - DNA, 19 bp, Mus musculus
  siRNA target sequence for 1200013I08Rik (NM_028774.1,1169-1187).
caaagattagagccaataa

SEQ ID NO: 655116 - DNA, 19 bp, Mus musculus
  siRNA target sequence for 1200013I08Rik (NM_028774.1,1173-1191).
gattagagccaataagatt

SEQ ID NO: 655117 - DNA, 19 bp, Mus musculus
  siRNA target sequence for 1200013I08Rik (NM_028774.1,1222-1240).
ccccattcagagacagaat

SEQ ID NO: 655118 - DNA, 19 bp, Mus musculus
  siRNA target sequence for 1200013I08Rik (NM_028774.1,1292-1310).
ggtagaaacaggtctgtta

SEQ ID NO: 655119 - DNA, 19 bp, Mus musculus
  siRNA target sequence for 1200013I08Rik (NM_028774.1,1319-1337).
ggtgtaacgcgggtctttt

SEQ ID NO: 655120 - DNA, 19 bp, Mus musculus
  siRNA target sequence for 1200013I08Rik (NM_028774.1,1326-1344).
cgcgggtctttttagaaca

SEQ ID NO: 655121 - DNA, 19 bp, Mus musculus
  siRNA target sequence for 1200013I08Rik (NM_028774.1,1389-1407).
caagacttgtgtcaagaat

SEQ ID NO: 655122 - DNA, 19 bp, Mus musculus
  siRNA target sequence for 1200013I08Rik (NM_028774.1,1492-1510).
gattcggcctggagaaact

SEQ ID NO: 655123 - DNA, 19 bp, Mus musculus
  siRNA target sequence for 1200013I08Rik (NM_028774.1,1514-1532).
gatagggatagcattgcaa

SEQ ID NO: 655124 - DNA, 19 bp, Mus musculus
  siRNA target sequence for 1200013I08Rik (NM_028774.1,1586-1604).
gggggcttccacagaacta

SEQ ID NO: 655125 - DNA, 19 bp, Mus musculus
  siRNA target sequence for 1200013I08Rik (NM_028774.1,1597-1615).
cagaactatctctcactta

SEQ ID NO: 655126 - DNA, 19 bp, Mus musculus
  siRNA target sequence for 1200013I08Rik (NM_028774.1,1659-1677).
ctcttcgcaggatttctga

SEQ ID NO: 655127 - DNA, 19 bp, Mus musculus
  siRNA target sequence for 1200013I08Rik (NM_028774.1,1702-1720).
cgtggctcttcggtcaatt

SEQ ID NO: 655128 - DNA, 19 bp, Mus musculus
  siRNA target sequence for 1200013I08Rik (NM_028774.1,1703-1721).
gtggctcttcggtcaattt

SEQ ID NO: 655129 - DNA, 19 bp, Mus musculus
  siRNA target sequence for 1200013I08Rik (NM_028774.1,1705-1723).
ggctcttcggtcaatttta

SEQ ID NO: 655130 - DNA, 19 bp, Mus musculus
  siRNA target sequence for 1200013I08Rik (NM_028774.1,1706-1724).
gctcttcggtcaattttaa

SEQ ID NO: 655131 - DNA, 19 bp, Mus musculus
  siRNA target sequence for 1200013I08Rik (NM_028774.1,1716-1734).
caattttaaggcagatcat

SEQ ID NO: 655132 - DNA, 19 bp, Mus musculus
  siRNA target sequence for 1200013I08Rik (NM_028774.1,1779-1797).
cgtcagagaatcaaagcaa

SEQ ID NO: 655133 - DNA, 19 bp, Mus musculus
  siRNA target sequence for 1200013I08Rik (NM_028774.1,1812-1830).
cagaggtgtacctagaact

SEQ ID NO: 655134 - DNA, 19 bp, Mus musculus
  siRNA target sequence for 1200013I08Rik (NM_028774.1,1819-1837).
gtacctagaactgagtaat

SEQ ID NO: 655135 - DNA, 19 bp, Mus musculus
  siRNA target sequence for 1200013I08Rik (NM_028774.1,1822-1840).
cctagaactgagtaatgga

SEQ ID NO: 655136 - DNA, 19 bp, Mus musculus
  siRNA target sequence for 1200013I08Rik (NM_028774.1,1900-1918).
ggacggtgctgaaatgcta

SEQ ID NO: 655137 - DNA, 19 bp, Mus musculus
  siRNA target sequence for 1200013I08Rik (NM_028774.1,1949-1967).
cgccccagtggcagtagaa

SEQ ID NO: 655138 - DNA, 19 bp, Mus musculus
  siRNA target sequence for 1200013I08Rik (NM_028774.1,1986-2004).
gggcggacagcgtagttga

SEQ ID NO: 655139 - DNA, 19 bp, Mus musculus
  siRNA target sequence for 1200013I08Rik (NM_028774.1,2033-2051).
gctcacttcttcttactga

SEQ ID NO: 655140 - DNA, 19 bp, Mus musculus
  siRNA target sequence for 1200013I08Rik (NM_028774.1,2059-2077).
cgatgatgatccaattcgt

SEQ ID NO: 655141 - DNA, 19 bp, Mus musculus
  siRNA target sequence for 1200013I08Rik (NM_028774.1,2066-2084).
gatccaattcgtggtttaa

SEQ ID NO: 655142 - DNA, 19 bp, Mus musculus
  siRNA target sequence for 1200013I08Rik (NM_028774.1,2131-2149).
cggggttgacagtgagtta

SEQ ID NO: 655143 - DNA, 19 bp, Mus musculus
  siRNA target sequence for 1200013I08Rik (NM_028774.1,2135-2153).
gttgacagtgagttaggta

SEQ ID NO: 655144 - DNA, 19 bp, Mus musculus
  siRNA target sequence for 1200013I08Rik (NM_028774.1,2211-2229).
cttgtctgcacgagtttca

SEQ ID NO: 655145 - DNA, 19 bp, Mus musculus
  siRNA target sequence for 1200013I08Rik (NM_028774.1,2214-2232).
gtctgcacgagtttcacat

SEQ ID NO: 655146 - DNA, 19 bp, Mus musculus
  siRNA target sequence for 1200013I08Rik (NM_028774.1,2219-2237).
cacgagtttcacattcact

SEQ ID NO: 655147 - DNA, 19 bp, Mus musculus
  siRNA target sequence for 1200013I08Rik (NM_028774.1,2224-2242).
gtttcacattcactgtatt

SEQ ID NO: 655148 - DNA, 19 bp, Mus musculus
  siRNA target sequence for 1200015A19Rik (NM_026388.1,472-490).
ctccgaagtcgctcaacaa

SEQ ID NO: 655149 - DNA, 19 bp, Mus musculus
  siRNA target sequence for 1200015A19Rik (NM_026388.1,769-787).
ggctcatgtccttcatcaa

SEQ ID NO: 655150 - DNA, 19 bp, Mus musculus
  siRNA target sequence for 1200015A19Rik (NM_026388.1,776-794).
gtccttcatcaacaatgaa

SEQ ID NO: 655151 - DNA, 19 bp, Mus musculus
  siRNA target sequence for 1200015A19Rik (NM_026388.1,812-830).
catgaccaggggcaagata

SEQ ID NO: 655152 - DNA, 19 bp, Mus musculus
  siRNA target sequence for 1700012P16Rik (NM_053266.1,543-561).
gagccgtgcaggaccattt

SEQ ID NO: 655153 - DNA, 19 bp, Mus musculus
  siRNA target sequence for 1700012P16Rik (NM_053266.1,738-756).
ggatctccttcgctgtaaa

SEQ ID NO: 655154 - DNA, 19 bp, Mus musculus
  siRNA target sequence for 1700012P16Rik (NM_053266.1,820-838).
gccgacagtaccaccaaat

SEQ ID NO: 655155 - DNA, 19 bp, Mus musculus
  siRNA target sequence for 1700012P16Rik (NM_053266.1,822-840).
cgacagtaccaccaaatga

SEQ ID NO: 655156 - DNA, 19 bp, Mus musculus
  siRNA target sequence for 1700012P16Rik (NM_053266.1,924-942).
cggagtcggaagatcctaa

SEQ ID NO: 655157 - DNA, 19 bp, Mus musculus
  siRNA target sequence for 1700012P16Rik (NM_053266.1,925-943).
ggagtcggaagatcctaat

SEQ ID NO: 655158 - DNA, 19 bp, Mus musculus
  siRNA target sequence for 1700012P16Rik (NM_053266.1,926-944).
gagtcggaagatcctaatt

SEQ ID NO: 655159 - DNA, 19 bp, Mus musculus
  siRNA target sequence for 1700012P16Rik (NM_053266.1,930-948).
cggaagatcctaattacaa

SEQ ID NO: 655160 - DNA, 19 bp, Mus musculus
  siRNA target sequence for 1700012P16Rik (NM_053266.1,939-957).
ctaattacaacgtgtgtaa

SEQ ID NO: 655161 - DNA, 19 bp, Mus musculus
  siRNA target sequence for 1700012P16Rik (NM_053266.1,1029-1047).
ctcggatggtcgctttaga

SEQ ID NO: 655162 - DNA, 19 bp, Mus musculus
  siRNA target sequence for 1700012P16Rik (NM_053266.1,1095-1113).
gtccatccaaccttgtaaa

SEQ ID NO: 655163 - DNA, 19 bp, Mus musculus
  siRNA target sequence for 1700012P16Rik (NM_053266.1,1179-1197).
ggctctcaggcctcgaaaa

SEQ ID NO: 655164 - DNA, 19 bp, Mus musculus
  siRNA target sequence for 1700012P16Rik (NM_053266.1,1185-1203).
caggcctcgaaaaaattaa

SEQ ID NO: 655165 - DNA, 19 bp, Mus musculus
  siRNA target sequence for 1700012P16Rik (NM_053266.1,1188-1206).
gcctcgaaaaaattaagca

SEQ ID NO: 655166 - DNA, 19 bp, Mus musculus
  siRNA target sequence for 1700012P16Rik (NM_053266.1,1189-1207).
cctcgaaaaaattaagcaa

SEQ ID NO: 655167 - DNA, 19 bp, Mus musculus
  siRNA target sequence for 1700012P16Rik (NM_053266.1,1400-1418).
gctgcagacttcatcaagt

SEQ ID NO: 655168 - DNA, 19 bp, Mus musculus
  siRNA target sequence for 1700012P16Rik (NM_053266.1,1403-1421).
gcagacttcatcaagttca

SEQ ID NO: 655169 - DNA, 19 bp, Mus musculus
  siRNA target sequence for 1700012P16Rik (NM_053266.1,1509-1527).
gggagcgagcctatttctt

SEQ ID NO: 655170 - DNA, 19 bp, Mus musculus
  siRNA target sequence for 1700012P16Rik (NM_053266.1,1578-1596).
cggtgtccaaggagtacaa

SEQ ID NO: 655171 - DNA, 19 bp, Mus musculus
  siRNA target sequence for 1700012P16Rik (NM_053266.1,1686-1704).
ggggactgcggaagtatct

SEQ ID NO: 655172 - DNA, 19 bp, Mus musculus
  siRNA target sequence for 1700012P16Rik (NM_053266.1,1736-1754).
caaccattccccaatgcaa

SEQ ID NO: 655173 - DNA, 19 bp, Mus musculus
  siRNA target sequence for 1700012P16Rik (NM_053266.1,1801-1819).
gagcttatgggagaagtta

SEQ ID NO: 655174 - DNA, 19 bp, Mus musculus
  siRNA target sequence for 1700012P16Rik (NM_053266.1,1804-1822).
cttatgggagaagttaaga

SEQ ID NO: 655175 - DNA, 19 bp, Mus musculus
  siRNA target sequence for 1700012P16Rik (NM_053266.1,1851-1869).
ccatcgccatcgatgagat

SEQ ID NO: 655176 - DNA, 19 bp, Mus musculus
  siRNA target sequence for 1700012P16Rik (NM_053266.1,1862-1880).
gatgagattacggatatca

SEQ ID NO: 655177 - DNA, 19 bp, Mus musculus
  siRNA target sequence for 1700012P16Rik (NM_053266.1,1973-1991).
gccaaatccgggaatgaga

SEQ ID NO: 655178 - DNA, 19 bp, Mus musculus
  siRNA target sequence for 1700012P16Rik (NM_053266.1,1974-1992).
ccaaatccgggaatgagat

SEQ ID NO: 655179 - DNA, 19 bp, Mus musculus
  siRNA target sequence for 1700012P16Rik (NM_053266.1,1975-1993).
caaatccgggaatgagata

SEQ ID NO: 655180 - DNA, 19 bp, Mus musculus
  siRNA target sequence for 1700012P16Rik (NM_053266.1,2013-2031).
gtctcaagaagttcagtat

SEQ ID NO: 655181 - DNA, 19 bp, Mus musculus
  siRNA target sequence for 1700012P16Rik (NM_053266.1,2017-2035).
caagaagttcagtatcgat

SEQ ID NO: 655182 - DNA, 19 bp, Mus musculus
  siRNA target sequence for 1700012P16Rik (NM_053266.1,2117-2135).
gccagggcagcctcatgtt

SEQ ID NO: 655183 - DNA, 19 bp, Mus musculus
  siRNA target sequence for 1700012P16Rik (NM_053266.1,2157-2175).
ccgtgcgctgtatcattca

SEQ ID NO: 655184 - DNA, 19 bp, Mus musculus
  siRNA target sequence for 1700012P16Rik (NM_053266.1,2184-2202).
ggctgtgcgcccagaagtt

SEQ ID NO: 655185 - DNA, 19 bp, Mus musculus
  siRNA target sequence for 1700012P16Rik (NM_053266.1,2185-2203).
gctgtgcgcccagaagtta

SEQ ID NO: 655186 - DNA, 19 bp, Mus musculus
  siRNA target sequence for 1700012P16Rik (NM_053266.1,2186-2204).
ctgtgcgcccagaagttaa

SEQ ID NO: 655187 - DNA, 19 bp, Mus musculus
  siRNA target sequence for 1700012P16Rik (NM_053266.1,2296-2314).
cgagctggacagtcagtat

SEQ ID NO: 655188 - DNA, 19 bp, Mus musculus
  siRNA target sequence for 1700012P16Rik (NM_053266.1,2366-2384).
ctcaggaggttcttcgaat

SEQ ID NO: 655189 - DNA, 19 bp, Mus musculus
  siRNA target sequence for 1700012P16Rik (NM_053266.1,2370-2388).
ggaggttcttcgaatcctt

SEQ ID NO: 655190 - DNA, 19 bp, Mus musculus
  siRNA target sequence for 1700012P16Rik (NM_053266.1,2390-2408).
gaggaaatagactcgttta

SEQ ID NO: 655191 - DNA, 19 bp, Mus musculus
  siRNA target sequence for 1700012P16Rik (NM_053266.1,2393-2411).
gaaatagactcgtttatgt

SEQ ID NO: 655192 - DNA, 19 bp, Mus musculus
  siRNA target sequence for 1700012P16Rik (NM_053266.1,2485-2503).
gacgacgcacctcaataca

SEQ ID NO: 655193 - DNA, 19 bp, Mus musculus
  siRNA target sequence for 1700012P16Rik (NM_053266.1,2487-2505).
cgacgcacctcaatacact

SEQ ID NO: 655194 - DNA, 19 bp, Mus musculus
  siRNA target sequence for 1700012P16Rik (NM_053266.1,2533-2551).
gatcgtgacccagatgtat

SEQ ID NO: 655195 - DNA, 19 bp, Mus musculus
  siRNA target sequence for 1700012P16Rik (NM_053266.1,2537-2555).
gtgacccagatgtatgact

SEQ ID NO: 655196 - DNA, 19 bp, Mus musculus
  siRNA target sequence for 1700012P16Rik (NM_053266.1,2564-2582).
gccttcctagcgaaactgt

SEQ ID NO: 655197 - DNA, 19 bp, Mus musculus
  siRNA target sequence for 1700012P16Rik (NM_053266.1,2621-2639).
cacttccccacgctgaaat

SEQ ID NO: 655198 - DNA, 19 bp, Mus musculus
  siRNA target sequence for 1700012P16Rik (NM_053266.1,2658-2676).
gcgacgggctcaactacat

SEQ ID NO: 655199 - DNA, 19 bp, Mus musculus
  siRNA target sequence for 1700012P16Rik (NM_053266.1,2712-2730).
ggcgcctgtcggatttcaa

SEQ ID NO: 655200 - DNA, 19 bp, Mus musculus
  siRNA target sequence for 1700012P16Rik (NM_053266.1,2714-2732).
cgcctgtcggatttcaagt

SEQ ID NO: 655201 - DNA, 19 bp, Mus musculus
  siRNA target sequence for 1700012P16Rik (NM_053266.1,2864-2882).
ggcgtcccggacttctaca

SEQ ID NO: 655202 - DNA, 19 bp, Mus musculus
  siRNA target sequence for 1700012P16Rik (NM_053266.1,2865-2883).
gcgtcccggacttctacaa

SEQ ID NO: 655203 - DNA, 19 bp, Mus musculus
  siRNA target sequence for 1700012P16Rik (NM_053266.1,2892-2910).
ggagcagttaccccaaata

SEQ ID NO: 655204 - DNA, 19 bp, Mus musculus
  siRNA target sequence for 1700129L13Rik (NM_026462.1,94-112).
gctctgcctgcaactaaga

SEQ ID NO: 655205 - DNA, 19 bp, Mus musculus
  siRNA target sequence for 1700129L13Rik (NM_026462.1,95-113).
ctctgcctgcaactaagat

SEQ ID NO: 655206 - DNA, 19 bp, Mus musculus
  siRNA target sequence for 1700129L13Rik (NM_026462.1,97-115).
ctgcctgcaactaagatca

SEQ ID NO: 655207 - DNA, 19 bp, Mus musculus
  siRNA target sequence for 1700129L13Rik (NM_026462.1,152-170).
ctaaagagacaccttcaaa

SEQ ID NO: 655208 - DNA, 19 bp, Mus musculus
  siRNA target sequence for 1700129L13Rik (NM_026462.1,240-258).
gagccagttttatttgcta

SEQ ID NO: 655209 - DNA, 19 bp, Mus musculus
  siRNA target sequence for 1700129L13Rik (NM_026462.1,749-767).
ggcttcaaggtaacagtaa

SEQ ID NO: 655210 - DNA, 19 bp, Mus musculus
  siRNA target sequence for 1700129L13Rik (NM_026462.1,751-769).
cttcaaggtaacagtaaga

SEQ ID NO: 655211 - DNA, 19 bp, Mus musculus
  siRNA target sequence for 1810073M23Rik (NM_133352.1,166-184).
gcacgaacacacgtatcaa

SEQ ID NO: 655212 - DNA, 19 bp, Mus musculus
  siRNA target sequence for 1810073M23Rik (NM_133352.1,169-187).
cgaacacacgtatcaagat

SEQ ID NO: 655213 - DNA, 19 bp, Mus musculus
  siRNA target sequence for 1810073M23Rik (NM_133352.1,170-188).
gaacacacgtatcaagata

SEQ ID NO: 655214 - DNA, 19 bp, Mus musculus
  siRNA target sequence for 1810073M23Rik (NM_133352.1,191-209).
gaagaagttgttttatgga

SEQ ID NO: 655215 - DNA, 19 bp, Mus musculus
  siRNA target sequence for 1810073M23Rik (NM_133352.1,229-247).
ccacaatcgccaagaaaca

SEQ ID NO: 655216 - DNA, 19 bp, Mus musculus
  siRNA target sequence for 1810073M23Rik (NM_133352.1,278-296).
gggtcaaaaaaaagtatca

SEQ ID NO: 655217 - DNA, 19 bp, Mus musculus
  siRNA target sequence for 1810073M23Rik (NM_133352.1,297-315).
gtcattaccatgaaacttt

SEQ ID NO: 655218 - DNA, 19 bp, Mus musculus
  siRNA target sequence for 1810073M23Rik (NM_133352.1,329-347).
caaggagttgaattagaat

SEQ ID NO: 655219 - DNA, 19 bp, Mus musculus
  siRNA target sequence for 1810073M23Rik (NM_133352.1,353-371).
ggcctggacattaaattta

SEQ ID NO: 655220 - DNA, 19 bp, Mus musculus
  siRNA target sequence for 1810073M23Rik (NM_133352.1,382-400).
gatgccaggcacttactgt

SEQ ID NO: 655221 - DNA, 19 bp, Mus musculus
  siRNA target sequence for 1810073M23Rik (NM_133352.1,387-405).
caggcacttactgtgaaat

SEQ ID NO: 655222 - DNA, 19 bp, Mus musculus
  siRNA target sequence for 1810073M23Rik (NM_133352.1,390-408).
gcacttactgtgaaattga

SEQ ID NO: 655223 - DNA, 19 bp, Mus musculus
  siRNA target sequence for 1810073M23Rik (NM_133352.1,424-442).
gagagatgcgtttgtgtat

SEQ ID NO: 655224 - DNA, 19 bp, Mus musculus
  siRNA target sequence for 1810073M23Rik (NM_133352.1,428-446).
gatgcgtttgtgtatgcta

SEQ ID NO: 655225 - DNA, 19 bp, Mus musculus
  siRNA target sequence for 1810073M23Rik (NM_133352.1,432-450).
cgtttgtgtatgctatcaa

SEQ ID NO: 655226 - DNA, 19 bp, Mus musculus
  siRNA target sequence for 1810073M23Rik (NM_133352.1,443-461).
gctatcaagaatcactatt

SEQ ID NO: 655227 - DNA, 19 bp, Mus musculus
  siRNA target sequence for 1810073M23Rik (NM_133352.1,448-466).
caagaatcactattggtat

SEQ ID NO: 655228 - DNA, 19 bp, Mus musculus
  siRNA target sequence for 1810073M23Rik (NM_133352.1,462-480).
ggtatcagatgtacataga

SEQ ID NO: 655229 - DNA, 19 bp, Mus musculus
  siRNA target sequence for 1810073M23Rik (NM_133352.1,469-487).
gatgtacatagatgactta

SEQ ID NO: 655230 - DNA, 19 bp, Mus musculus
  siRNA target sequence for 1810073M23Rik (NM_133352.1,475-493).
catagatgacttaccaata

SEQ ID NO: 655231 - DNA, 19 bp, Mus musculus
  siRNA target sequence for 1810073M23Rik (NM_133352.1,535-553).
ctatctttggacctacaaa

SEQ ID NO: 655232 - DNA, 19 bp, Mus musculus
  siRNA target sequence for 1810073M23Rik (NM_133352.1,543-561).
ggacctacaaaaaacttga

SEQ ID NO: 655233 - DNA, 19 bp, Mus musculus
  siRNA target sequence for 1810073M23Rik (NM_133352.1,566-584).
ggctttaatggaaatcgaa

SEQ ID NO: 655234 - DNA, 19 bp, Mus musculus
  siRNA target sequence for 1810073M23Rik (NM_133352.1,576-594).
gaaatcgaattgttgatgt

SEQ ID NO: 655235 - DNA, 19 bp, Mus musculus
  siRNA target sequence for 1810073M23Rik (NM_133352.1,622-640).
gctggttccaaatactaaa

SEQ ID NO: 655236 - DNA, 19 bp, Mus musculus
  siRNA target sequence for 1810073M23Rik (NM_133352.1,646-664).
gatgtcatattcggtaaaa

SEQ ID NO: 655237 - DNA, 19 bp, Mus musculus
  siRNA target sequence for 1810073M23Rik (NM_133352.1,651-669).
catattcggtaaaatggaa

SEQ ID NO: 655238 - DNA, 19 bp, Mus musculus
  siRNA target sequence for 1810073M23Rik (NM_133352.1,666-684).
ggaaaaaatcggatgtaaa

SEQ ID NO: 655239 - DNA, 19 bp, Mus musculus
  siRNA target sequence for 1810073M23Rik (NM_133352.1,667-685).
gaaaaaatcggatgtaaaa

SEQ ID NO: 655240 - DNA, 19 bp, Mus musculus
  siRNA target sequence for 1810073M23Rik (NM_133352.1,689-707).
gaagatcgattcgataaat

SEQ ID NO: 655241 - DNA, 19 bp, Mus musculus
  siRNA target sequence for 1810073M23Rik (NM_133352.1,696-714).
gattcgataaatatcttga

SEQ ID NO: 655242 - DNA, 19 bp, Mus musculus
  siRNA target sequence for 1810073M23Rik (NM_133352.1,731-749).
cataggattcactggtttt

SEQ ID NO: 655243 - DNA, 19 bp, Mus musculus
  siRNA target sequence for 1810073M23Rik (NM_133352.1,736-754).
gattcactggttttcaatt

SEQ ID NO: 655244 - DNA, 19 bp, Mus musculus
  siRNA target sequence for 1810073M23Rik (NM_133352.1,781-799).
cttagtgggattagtttca

SEQ ID NO: 655245 - DNA, 19 bp, Mus musculus
  siRNA target sequence for 1810073M23Rik (NM_133352.1,794-812).
gtttcaatgattttaatga

SEQ ID NO: 655246 - DNA, 19 bp, Mus musculus
  siRNA target sequence for 1810073M23Rik (NM_133352.1,827-845).
gattatgcccgatacagta

SEQ ID NO: 655247 - DNA, 19 bp, Mus musculus
  siRNA target sequence for 1810073M23Rik (NM_133352.1,835-853).
ccgatacagtaaagaagaa

SEQ ID NO: 655248 - DNA, 19 bp, Mus musculus
  siRNA target sequence for 1810073M23Rik (NM_133352.1,930-948).
caagtcaccctctgatctt

SEQ ID NO: 655249 - DNA, 19 bp, Mus musculus
  siRNA target sequence for 1810073M23Rik (NM_133352.1,1048-1066).
gctcagcacagccatattt

SEQ ID NO: 655250 - DNA, 19 bp, Mus musculus
  siRNA target sequence for 1810073M23Rik (NM_133352.1,1053-1071).
gcacagccatatttgtcta

SEQ ID NO: 655251 - DNA, 19 bp, Mus musculus
  siRNA target sequence for 1810073M23Rik (NM_133352.1,1054-1072).
cacagccatatttgtctat

SEQ ID NO: 655252 - DNA, 19 bp, Mus musculus
  siRNA target sequence for 1810073M23Rik (NM_133352.1,1084-1102).
gccagtgaacgggtacttt

SEQ ID NO: 655253 - DNA, 19 bp, Mus musculus
  siRNA target sequence for 1810073M23Rik (NM_133352.1,1137-1155).
gatggataaagcagatgtt

SEQ ID NO: 655254 - DNA, 19 bp, Mus musculus
  siRNA target sequence for 1810073M23Rik (NM_133352.1,1196-1214).
gcattcttcatcaacttta

SEQ ID NO: 655255 - DNA, 19 bp, Mus musculus
  siRNA target sequence for 1810073M23Rik (NM_133352.1,1197-1215).
cattcttcatcaactttat

SEQ ID NO: 655256 - DNA, 19 bp, Mus musculus
  siRNA target sequence for 1810073M23Rik (NM_133352.1,1265-1283).
gccgtttgttgcatctgtt

SEQ ID NO: 655257 - DNA, 19 bp, Mus musculus
  siRNA target sequence for 1810073M23Rik (NM_133352.1,1317-1335).
caatactgggtcgaaatct

SEQ ID NO: 655258 - DNA, 19 bp, Mus musculus
  siRNA target sequence for 1810073M23Rik (NM_133352.1,1351-1369).
cttcccttgtcgtgtcaat

SEQ ID NO: 655259 - DNA, 19 bp, Mus musculus
  siRNA target sequence for 1810073M23Rik (NM_133352.1,1379-1397).
cgtcccatcccggagaaaa

SEQ ID NO: 655260 - DNA, 19 bp, Mus musculus
  siRNA target sequence for 1810073M23Rik (NM_133352.1,1380-1398).
gtcccatcccggagaaaaa

SEQ ID NO: 655261 - DNA, 19 bp, Mus musculus
  siRNA target sequence for 1810073M23Rik (NM_133352.1,1382-1400).
cccatcccggagaaaaaat

SEQ ID NO: 655262 - DNA, 19 bp, Mus musculus
  siRNA target sequence for 1810073M23Rik (NM_133352.1,1387-1405).
cccggagaaaaaatggttt

SEQ ID NO: 655263 - DNA, 19 bp, Mus musculus
  siRNA target sequence for 1810073M23Rik (NM_133352.1,1388-1406).
ccggagaaaaaatggttta

SEQ ID NO: 655264 - DNA, 19 bp, Mus musculus
  siRNA target sequence for 1810073M23Rik (NM_133352.1,1408-1426).
ggagcctgcagttattgtt

SEQ ID NO: 655265 - DNA, 19 bp, Mus musculus
  siRNA target sequence for 1810073M23Rik (NM_133352.1,1429-1447).
cctgggaggaattttacct

SEQ ID NO: 655266 - DNA, 19 bp, Mus musculus
  siRNA target sequence for 1810073M23Rik (NM_133352.1,1446-1464).
cttttggatcaatctttat

SEQ ID NO: 655267 - DNA, 19 bp, Mus musculus
  siRNA target sequence for 1810073M23Rik (NM_133352.1,1455-1473).
caatctttattgaaatgta

SEQ ID NO: 655268 - DNA, 19 bp, Mus musculus
  siRNA target sequence for 1810073M23Rik (NM_133352.1,1488-1506).
ccttctgggcatataagat

SEQ ID NO: 655269 - DNA, 19 bp, Mus musculus
  siRNA target sequence for 1810073M23Rik (NM_133352.1,1494-1512).
gggcatataagatctacta

SEQ ID NO: 655270 - DNA, 19 bp, Mus musculus
  siRNA target sequence for 1810073M23Rik (NM_133352.1,1595-1613).
ctaaacgcagaggattaca

SEQ ID NO: 655271 - DNA, 19 bp, Mus musculus
  siRNA target sequence for 1810073M23Rik (NM_133352.1,1647-1665).
cgaccgcgatctacgttta

SEQ ID NO: 655272 - DNA, 19 bp, Mus musculus
  siRNA target sequence for 1810073M23Rik (NM_133352.1,1650-1668).
ccgcgatctacgtttacat

SEQ ID NO: 655273 - DNA, 19 bp, Mus musculus
  siRNA target sequence for 1810073M23Rik (NM_133352.1,1652-1670).
gcgatctacgtttacatgt

SEQ ID NO: 655274 - DNA, 19 bp, Mus musculus
  siRNA target sequence for 1810073M23Rik (NM_133352.1,1653-1671).
cgatctacgtttacatgta

SEQ ID NO: 655275 - DNA, 19 bp, Mus musculus
  siRNA target sequence for 1810073M23Rik (NM_133352.1,1690-1708).
cttcaaaaccaagatgtat

SEQ ID NO: 655276 - DNA, 19 bp, Mus musculus
  siRNA target sequence for 1810073M23Rik (NM_133352.1,1698-1716).
ccaagatgtatggcttatt

SEQ ID NO: 655277 - DNA, 19 bp, Mus musculus
  siRNA target sequence for 1810073M23Rik (NM_133352.1,1699-1717).
caagatgtatggcttattt

SEQ ID NO: 655278 - DNA, 19 bp, Mus musculus
  siRNA target sequence for 1810073M23Rik (NM_133352.1,1702-1720).
gatgtatggcttatttcaa

SEQ ID NO: 655279 - DNA, 19 bp, Mus musculus
  siRNA target sequence for 1810073M23Rik (NM_133352.1,1736-1754).
ggctacatggcggtgttta

SEQ ID NO: 655280 - DNA, 19 bp, Mus musculus
  siRNA target sequence for 1810073M23Rik (NM_133352.1,1755-1773).
gcacagccttggggataat

SEQ ID NO: 655281 - DNA, 19 bp, Mus musculus
  siRNA target sequence for 1810073M23Rik (NM_133352.1,1776-1794).
gtggagcaatcggttacat

SEQ ID NO: 655282 - DNA, 19 bp, Mus musculus
  siRNA target sequence for 1810073M23Rik (NM_133352.1,1795-1813).
gggaacaagtgcctttgtt

SEQ ID NO: 655283 - DNA, 19 bp, Mus musculus
  siRNA target sequence for 1810073M23Rik (NM_133352.1,1803-1821).
gtgcctttgttcgaaaaat

SEQ ID NO: 655284 - DNA, 19 bp, Mus musculus
  siRNA target sequence for 1810073M23Rik (NM_133352.1,1805-1823).
gcctttgttcgaaaaatct

SEQ ID NO: 655285 - DNA, 19 bp, Mus musculus
  siRNA target sequence for 1810073M23Rik (NM_133352.1,1807-1825).
ctttgttcgaaaaatctat

SEQ ID NO: 655286 - DNA, 19 bp, Mus musculus
  siRNA target sequence for 1810073M23Rik (NM_133352.1,1811-1829).
gttcgaaaaatctatacta

SEQ ID NO: 655287 - DNA, 19 bp, Mus musculus
  siRNA target sequence for 1810073M23Rik (NM_133352.1,1822-1840).
ctatactaatgtgaaaatt

SEQ ID NO: 655288 - DNA, 19 bp, Mus musculus
  siRNA target sequence for 2210009G21Rik (NM_028834.1,143-161).
gaaatttgccgttaaatgt

SEQ ID NO: 655289 - DNA, 19 bp, Mus musculus
  siRNA target sequence for 2210009G21Rik (NM_028834.1,172-190).
cagtcctggtggatcttca

SEQ ID NO: 655290 - DNA, 19 bp, Mus musculus
  siRNA target sequence for 2210009G21Rik (NM_028834.1,197-215).
gccacaaggttcaaacaga

SEQ ID NO: 655291 - DNA, 19 bp, Mus musculus
  siRNA target sequence for 2210009G21Rik (NM_028834.1,274-292).
ccattgattccagagttaa

SEQ ID NO: 655292 - DNA, 19 bp, Mus musculus
  siRNA target sequence for 2210009G21Rik (NM_028834.1,293-311).
ggagtatgtgggcatttat

SEQ ID NO: 655293 - DNA, 19 bp, Mus musculus
  siRNA target sequence for 2210009G21Rik (NM_028834.1,356-374).
cttgtccttaaaaggttat

SEQ ID NO: 655294 - DNA, 19 bp, Mus musculus
  siRNA target sequence for 2210009G21Rik (NM_028834.1,409-427).
ggatacaccttcactgtat

SEQ ID NO: 655295 - DNA, 19 bp, Mus musculus
  siRNA target sequence for 2210009G21Rik (NM_028834.1,434-452).
ctcccagaatactgaactt

SEQ ID NO: 655296 - DNA, 19 bp, Mus musculus
  siRNA target sequence for 2210009G21Rik (NM_028834.1,481-499).
gtgttagtcagcttgcatt

SEQ ID NO: 655297 - DNA, 19 bp, Mus musculus
  siRNA target sequence for 2210009G21Rik (NM_028834.1,549-567).
ctccatggagtgtctgatt

SEQ ID NO: 655298 - DNA, 19 bp, Mus musculus
  siRNA target sequence for 2210009G21Rik (NM_028834.1,632-650).
ggaaattgtgagaagaact

SEQ ID NO: 655299 - DNA, 19 bp, Mus musculus
  siRNA target sequence for 2210009G21Rik (NM_028834.1,633-651).
gaaattgtgagaagaacta

SEQ ID NO: 655300 - DNA, 19 bp, Mus musculus
  siRNA target sequence for 2210009G21Rik (NM_028834.1,639-657).
gtgagaagaactaaatcaa

SEQ ID NO: 655301 - DNA, 19 bp, Mus musculus
  siRNA target sequence for 2210009G21Rik (NM_028834.1,692-710).
ggacctcgtgggaagatct

SEQ ID NO: 655302 - DNA, 19 bp, Mus musculus
  siRNA target sequence for 2210009G21Rik (NM_028834.1,693-711).
gacctcgtgggaagatcta

SEQ ID NO: 655303 - DNA, 19 bp, Mus musculus
  siRNA target sequence for 2210009G21Rik (NM_028834.1,695-713).
cctcgtgggaagatctagt

SEQ ID NO: 655304 - DNA, 19 bp, Mus musculus
  siRNA target sequence for 2210009G21Rik (NM_028834.1,781-799).
gtcaagcacaagatgacat

SEQ ID NO: 655305 - DNA, 19 bp, Mus musculus
  siRNA target sequence for 2210009G21Rik (NM_028834.1,818-836).
ccaggagcttcctgttcaa

SEQ ID NO: 655306 - DNA, 19 bp, Mus musculus
  siRNA target sequence for 2210009G21Rik (NM_028834.1,928-946).
gcaggagccctgcgtataa

SEQ ID NO: 655307 - DNA, 19 bp, Mus musculus
  siRNA target sequence for 2210009G21Rik (NM_028834.1,931-949).
ggagccctgcgtataacta

SEQ ID NO: 655308 - DNA, 19 bp, Mus musculus
  siRNA target sequence for 2210009G21Rik (NM_028834.1,932-950).
gagccctgcgtataactat

SEQ ID NO: 655309 - DNA, 19 bp, Mus musculus
  siRNA target sequence for 2210009G21Rik (NM_028834.1,936-954).
cctgcgtataactatgagt

SEQ ID NO: 655310 - DNA, 19 bp, Mus musculus
  siRNA target sequence for 2210009G21Rik (NM_028834.1,1038-1056).
gaccaccgcaggagagttt

SEQ ID NO: 655311 - DNA, 19 bp, Mus musculus
  siRNA target sequence for 2210009G21Rik (NM_028834.1,1040-1058).
ccaccgcaggagagtttct

SEQ ID NO: 655312 - DNA, 19 bp, Mus musculus
  siRNA target sequence for 2210009G21Rik (NM_028834.1,1048-1066).
ggagagtttctcttggaaa

SEQ ID NO: 655313 - DNA, 19 bp, Mus musculus
  siRNA target sequence for 2210009G21Rik (NM_028834.1,1196-1214).
gctacatgctttggaaaat

SEQ ID NO: 655314 - DNA, 19 bp, Mus musculus
  siRNA target sequence for 2210009G21Rik (NM_028834.1,1265-1283).
cgactcagctgcaattact

SEQ ID NO: 655315 - DNA, 19 bp, Mus musculus
  siRNA target sequence for 2210009G21Rik (NM_028834.1,1273-1291).
ctgcaattactgaacaatt

SEQ ID NO: 655316 - DNA, 19 bp, Mus musculus
  siRNA target sequence for 2210013K02Rik (NM_023712.1,515-533).
gccattcgaccctcatagt

SEQ ID NO: 655317 - DNA, 19 bp, Mus musculus
  siRNA target sequence for 2210013K02Rik (NM_023712.1,582-600).
cgtggcaggggttcttaca

SEQ ID NO: 655318 - DNA, 19 bp, Mus musculus
  siRNA target sequence for 2210013K02Rik (NM_023712.1,601-619).
gacatcgagcagttcttta

SEQ ID NO: 655319 - DNA, 19 bp, Mus musculus
  siRNA target sequence for 2210013K02Rik (NM_023712.1,621-639).
catcggagatggtagtact

SEQ ID NO: 655320 - DNA, 19 bp, Mus musculus
  siRNA target sequence for 2210013K02Rik (NM_023712.1,703-721).
ggtgacaggtacaatcgaa

SEQ ID NO: 655321 - DNA, 19 bp, Mus musculus
  siRNA target sequence for 2210013K02Rik (NM_023712.1,704-722).
gtgacaggtacaatcgaaa

SEQ ID NO: 655322 - DNA, 19 bp, Mus musculus
  siRNA target sequence for 2210013K02Rik (NM_023712.1,832-850).
gtcggggaggccagttact

SEQ ID NO: 655323 - DNA, 19 bp, Mus musculus
  siRNA target sequence for 2210013K02Rik (NM_023712.1,899-917).
ggagtcggatgctcagtat

SEQ ID NO: 655324 - DNA, 19 bp, Mus musculus
  siRNA target sequence for 2210013K02Rik (NM_023712.1,1487-1505).
gcatcgtggccacctatat

SEQ ID NO: 655325 - DNA, 19 bp, Mus musculus
  siRNA target sequence for 2210013K02Rik (NM_023712.1,1491-1509).
cgtggccacctatattttt

SEQ ID NO: 655326 - DNA, 19 bp, Mus musculus
  siRNA target sequence for 2210013K02Rik (NM_023712.1,1492-1510).
gtggccacctatattttta

SEQ ID NO: 655327 - DNA, 19 bp, Mus musculus
  siRNA target sequence for 2210013K02Rik (NM_023712.1,1652-1670).
cttacctcattggtctaat

SEQ ID NO: 655328 - DNA, 19 bp, Mus musculus
  siRNA target sequence for 2210013K02Rik (NM_023712.1,1656-1674).
cctcattggtctaatctct

SEQ ID NO: 655329 - DNA, 19 bp, Mus musculus
  siRNA target sequence for 2210013K02Rik (NM_023712.1,1785-1803).
gggcaccgccatgttcatt

SEQ ID NO: 655330 - DNA, 19 bp, Mus musculus
  siRNA target sequence for 2210013K02Rik (NM_023712.1,1790-1808).
ccgccatgttcattgaaga

SEQ ID NO: 655331 - DNA, 19 bp, Mus musculus
  siRNA target sequence for 2210013K02Rik (NM_023712.1,1791-1809).
cgccatgttcattgaagat

SEQ ID NO: 655332 - DNA, 19 bp, Mus musculus
  siRNA target sequence for 2210013K02Rik (NM_023712.1,1863-1881).
ctcagatgaccggattgta

SEQ ID NO: 655333 - DNA, 19 bp, Mus musculus
  siRNA target sequence for 2810423E13Rik (NM_028140.2,217-235).
gaatggagcgagatagaaa

SEQ ID NO: 655334 - DNA, 19 bp, Mus musculus
  siRNA target sequence for 2810423E13Rik (NM_028140.2,238-256).
caagagcattacaagagta

SEQ ID NO: 655335 - DNA, 19 bp, Mus musculus
  siRNA target sequence for 2810423E13Rik (NM_028140.2,268-286).
gtgaggattctctacctta

SEQ ID NO: 655336 - DNA, 19 bp, Mus musculus
  siRNA target sequence for 2810423E13Rik (NM_028140.2,306-324).
gggtttttctattgtgata

SEQ ID NO: 655337 - DNA, 19 bp, Mus musculus
  siRNA target sequence for 2810423E13Rik (NM_028140.2,307-325).
ggtttttctattgtgataa

SEQ ID NO: 655338 - DNA, 19 bp, Mus musculus
  siRNA target sequence for 2810423E13Rik (NM_028140.2,335-353).
ggccatatcttcaaaagat

SEQ ID NO: 655339 - DNA, 19 bp, Mus musculus
  siRNA target sequence for 2810423E13Rik (NM_028140.2,383-401).
gctgggttattgcttcata

SEQ ID NO: 655340 - DNA, 19 bp, Mus musculus
  siRNA target sequence for 2810423E13Rik (NM_028140.2,384-402).
ctgggttattgcttcatat

SEQ ID NO: 655341 - DNA, 19 bp, Mus musculus
  siRNA target sequence for 2810423E13Rik (NM_028140.2,387-405).
ggttattgcttcatatagt

SEQ ID NO: 655342 - DNA, 19 bp, Mus musculus
  siRNA target sequence for 2810423E13Rik (NM_028140.2,417-435).
ggtagcttcacctctattt

SEQ ID NO: 655343 - DNA, 19 bp, Mus musculus
  siRNA target sequence for 2810423E13Rik (NM_028140.2,427-445).
cctctatttggcttatggt

SEQ ID NO: 655344 - DNA, 19 bp, Mus musculus
  siRNA target sequence for 2810423E13Rik (NM_028140.2,458-476).
cgagaaaagaacctcttat

SEQ ID NO: 655345 - DNA, 19 bp, Mus musculus
  siRNA target sequence for 2810423E13Rik (NM_028140.2,461-479).
gaaaagaacctcttatcgt

SEQ ID NO: 655346 - DNA, 19 bp, Mus musculus
  siRNA target sequence for 2810423E13Rik (NM_028140.2,532-550).
ccagctgctcataataaat

SEQ ID NO: 655347 - DNA, 19 bp, Mus musculus
  siRNA target sequence for 2810423E13Rik (NM_028140.2,535-553).
gctgctcataataaatact

SEQ ID NO: 655348 - DNA, 19 bp, Mus musculus
  siRNA target sequence for 2810423E13Rik (NM_028140.2,601-619).
gccgttgtccgatcataca

SEQ ID NO: 655349 - DNA, 19 bp, Mus musculus
  siRNA target sequence for 2810423E13Rik (NM_028140.2,602-620).
ccgttgtccgatcatacat

SEQ ID NO: 655350 - DNA, 19 bp, Mus musculus
  siRNA target sequence for 2810423E13Rik (NM_028140.2,603-621).
cgttgtccgatcatacatt

SEQ ID NO: 655351 - DNA, 19 bp, Mus musculus
  siRNA target sequence for 2810423E13Rik (NM_028140.2,743-761).
gtgtgacgtgggacatcat

SEQ ID NO: 655352 - DNA, 19 bp, Mus musculus
  siRNA target sequence for 2810423E13Rik (NM_028140.2,806-824).
ccttcctgggaattctaaa

SEQ ID NO: 655353 - DNA, 19 bp, Mus musculus
  siRNA target sequence for 2810423E13Rik (NM_028140.2,811-829).
ctgggaattctaaacatta

SEQ ID NO: 655354 - DNA, 19 bp, Mus musculus
  siRNA target sequence for 2810423E13Rik (NM_028140.2,813-831).
gggaattctaaacattatt

SEQ ID NO: 655355 - DNA, 19 bp, Mus musculus
  siRNA target sequence for 2810423E13Rik (NM_028140.2,873-891).
gggacgtcagtgtaagagt

SEQ ID NO: 655356 - DNA, 19 bp, Mus musculus
  siRNA target sequence for 2810423E13Rik (NM_028140.2,884-902).
gtaagagtgtgaattttca

SEQ ID NO: 655357 - DNA, 19 bp, Mus musculus
  siRNA target sequence for 2810423E13Rik (NM_028140.2,888-906).
gagtgtgaattttcaagaa

SEQ ID NO: 655358 - DNA, 19 bp, Mus musculus
  siRNA target sequence for 2810423E13Rik (NM_028140.2,955-973).
gctgttgtggctaccaata

SEQ ID NO: 655359 - DNA, 19 bp, Mus musculus
  siRNA target sequence for 2810423E13Rik (NM_028140.2,963-981).
ggctaccaatattgtgttt

SEQ ID NO: 655360 - DNA, 19 bp, Mus musculus
  siRNA target sequence for 2810423E13Rik (NM_028140.2,1025-1043).
ccccactaacactggatat

SEQ ID NO: 655361 - DNA, 19 bp, Mus musculus
  siRNA target sequence for 2810423E13Rik (NM_028140.2,1027-1045).
ccactaacactggatatgt

SEQ ID NO: 655362 - DNA, 19 bp, Mus musculus
  siRNA target sequence for 2810423E13Rik (NM_028140.2,1028-1046).
cactaacactggatatgta

SEQ ID NO: 655363 - DNA, 19 bp, Mus musculus
  siRNA target sequence for 2810423E13Rik (NM_028140.2,1067-1085).
ctgtgctctatgatggaat

SEQ ID NO: 655364 - DNA, 19 bp, Mus musculus
  siRNA target sequence for 2810423E13Rik (NM_028140.2,1103-1121).
gagttgaggcagttcttgt

SEQ ID NO: 655365 - DNA, 19 bp, Mus musculus
  siRNA target sequence for 2810423E13Rik (NM_028140.2,1120-1138).
gtcttcatgggggttaaat

SEQ ID NO: 655366 - DNA, 19 bp, Mus musculus
  siRNA target sequence for 2810423E13Rik (NM_028140.2,1125-1143).
catgggggttaaattactt

SEQ ID NO: 655367 - DNA, 19 bp, Mus musculus
  siRNA target sequence for 2810423E13Rik (NM_028140.2,1152-1170).
gattggcgagcgtgctatt

SEQ ID NO: 655368 - DNA, 19 bp, Mus musculus
  siRNA target sequence for 2810423E13Rik (NM_028140.2,1192-1210).
gtatgggtcggcttcttta

SEQ ID NO: 655369 - DNA, 19 bp, Mus musculus
  siRNA target sequence for 2810423E13Rik (NM_028140.2,1196-1214).
gggtcggcttctttatctt

SEQ ID NO: 655370 - DNA, 19 bp, Mus musculus
  siRNA target sequence for 2810423E13Rik (NM_028140.2,1271-1289).
caacccctaatactacatt

SEQ ID NO: 655371 - DNA, 19 bp, Mus musculus
  siRNA target sequence for 2810423E13Rik (NM_028140.2,1346-1364).
caactgggtgcccaattga

SEQ ID NO: 655372 - DNA, 19 bp, Mus musculus
  siRNA target sequence for 2810423E13Rik (NM_028140.2,1377-1395).
cctgtacaccccagtgatt

SEQ ID NO: 655373 - DNA, 19 bp, Mus musculus
  siRNA target sequence for 2810423E13Rik (NM_028140.2,1380-1398).
gtacaccccagtgattcat

SEQ ID NO: 655374 - DNA, 19 bp, Mus musculus
  siRNA target sequence for 2810423E13Rik (NM_028140.2,1452-1470).
cagtgtcatgtcctataca

SEQ ID NO: 655375 - DNA, 19 bp, Mus musculus
  siRNA target sequence for 2810423E13Rik (NM_028140.2,1461-1479).
gtcctatacattatactca

SEQ ID NO: 655376 - DNA, 19 bp, Mus musculus
  siRNA target sequence for 2810423E13Rik (NM_028140.2,1463-1481).
cctatacattatactcaaa

SEQ ID NO: 655377 - DNA, 19 bp, Mus musculus
  siRNA target sequence for 2810423E13Rik (NM_028140.2,1469-1487).
cattatactcaaaagttct

SEQ ID NO: 655378 - DNA, 19 bp, Mus musculus
  siRNA target sequence for 2810423E13Rik (NM_028140.2,1571-1589).
gccatgtgtacacttactt

SEQ ID NO: 655379 - DNA, 19 bp, Mus musculus
  siRNA target sequence for 2810423E13Rik (NM_028140.2,1630-1648).
gtgctcaccatcttgctaa

SEQ ID NO: 655380 - DNA, 19 bp, Mus musculus
  siRNA target sequence for 2810423E13Rik (NM_028140.2,1632-1650).
gctcaccatcttgctaata

SEQ ID NO: 655381 - DNA, 19 bp, Mus musculus
  siRNA target sequence for 2810423E13Rik (NM_028140.2,1675-1693).
gccttttctgtcagatata

SEQ ID NO: 655382 - DNA, 19 bp, Mus musculus
  siRNA target sequence for 2900046G09Rik (NM_133778.1,345-363).
gatcgtccctgcatggtat

SEQ ID NO: 655383 - DNA, 19 bp, Mus musculus
  siRNA target sequence for 2900046G09Rik (NM_133778.1,414-432).
gccgtgtggctcaccttat

SEQ ID NO: 655384 - DNA, 19 bp, Mus musculus
  siRNA target sequence for 2900046G09Rik (NM_133778.1,415-433).
ccgtgtggctcaccttatt

SEQ ID NO: 655385 - DNA, 19 bp, Mus musculus
  siRNA target sequence for 2900046G09Rik (NM_133778.1,417-435).
gtgtggctcaccttattga

SEQ ID NO: 655386 - DNA, 19 bp, Mus musculus
  siRNA target sequence for 2900046G09Rik (NM_133778.1,419-437).
gtggctcaccttattgaat

SEQ ID NO: 655387 - DNA, 19 bp, Mus musculus
  siRNA target sequence for 2900046G09Rik (NM_133778.1,545-563).
gtggccgagcagtttgcta

SEQ ID NO: 655388 - DNA, 19 bp, Mus musculus
  siRNA target sequence for 2900046G09Rik (NM_133778.1,547-565).
ggccgagcagtttgctatt

SEQ ID NO: 655389 - DNA, 19 bp, Mus musculus
  siRNA target sequence for 2900046G09Rik (NM_133778.1,550-568).
cgagcagtttgctattgca

SEQ ID NO: 655390 - DNA, 19 bp, Mus musculus
  siRNA target sequence for 2900046G09Rik (NM_133778.1,608-626).
gactccaccgatgattctt

SEQ ID NO: 655391 - DNA, 19 bp, Mus musculus
  siRNA target sequence for 2900046G09Rik (NM_133778.1,929-947).
gcccaggactccctttaca

SEQ ID NO: 655392 - DNA, 19 bp, Mus musculus
  siRNA target sequence for 2900046G09Rik (NM_133778.1,1083-1101).
gggtggtatccttagatga

SEQ ID NO: 655393 - DNA, 19 bp, Mus musculus
  siRNA target sequence for 4921507P07Rik (NM_027564.1,218-236).
gagctgacattctgtcaaa

SEQ ID NO: 655394 - DNA, 19 bp, Mus musculus
  siRNA target sequence for 4921507P07Rik (NM_027564.1,229-247).
ctgtcaaacaccttttact

SEQ ID NO: 655395 - DNA, 19 bp, Mus musculus
  siRNA target sequence for 4921507P07Rik (NM_027564.1,256-274).
ctgcacaccccgtacgaaa

SEQ ID NO: 655396 - DNA, 19 bp, Mus musculus
  siRNA target sequence for 4921507P07Rik (NM_027564.1,259-277).
cacaccccgtacgaaacaa

SEQ ID NO: 655397 - DNA, 19 bp, Mus musculus
  siRNA target sequence for 4921507P07Rik (NM_027564.1,261-279).
caccccgtacgaaacaact

SEQ ID NO: 655398 - DNA, 19 bp, Mus musculus
  siRNA target sequence for 4921507P07Rik (NM_027564.1,263-281).
ccccgtacgaaacaactat

SEQ ID NO: 655399 - DNA, 19 bp, Mus musculus
  siRNA target sequence for 4921507P07Rik (NM_027564.1,264-282).
cccgtacgaaacaactatt

SEQ ID NO: 655400 - DNA, 19 bp, Mus musculus
  siRNA target sequence for 4921507P07Rik (NM_027564.1,347-365).
ggtggggtgccgatagaga

SEQ ID NO: 655401 - DNA, 19 bp, Mus musculus
  siRNA target sequence for 4921507P07Rik (NM_027564.1,487-505).
ctccccattgagcagtatt

SEQ ID NO: 655402 - DNA, 19 bp, Mus musculus
  siRNA target sequence for 4921507P07Rik (NM_027564.1,498-516).
gcagtattactatatgaca

SEQ ID NO: 655403 - DNA, 19 bp, Mus musculus
  siRNA target sequence for 4921507P07Rik (NM_027564.1,556-574).
ctacccaaaccacctaatt

SEQ ID NO: 655404 - DNA, 19 bp, Mus musculus
  siRNA target sequence for 4921507P07Rik (NM_027564.1,569-587).
ctaattcagcagtaaaaga

SEQ ID NO: 655405 - DNA, 19 bp, Mus musculus
  siRNA target sequence for 4921507P07Rik (NM_027564.1,593-611).
gctcaccgtatccaattga

SEQ ID NO: 655406 - DNA, 19 bp, Mus musculus
  siRNA target sequence for 4921507P07Rik (NM_027564.1,594-612).
ctcaccgtatccaattgaa

SEQ ID NO: 655407 - DNA, 19 bp, Mus musculus
  siRNA target sequence for 4921507P07Rik (NM_027564.1,596-614).
caccgtatccaattgaaca

SEQ ID NO: 655408 - DNA, 19 bp, Mus musculus
  siRNA target sequence for 4921507P07Rik (NM_027564.1,645-663).
cgtgtttccgacctttaca

SEQ ID NO: 655409 - DNA, 19 bp, Mus musculus
  siRNA target sequence for 4921507P07Rik (NM_027564.1,646-664).
gtgtttccgacctttacat

SEQ ID NO: 655410 - DNA, 19 bp, Mus musculus
  siRNA target sequence for 4921507P07Rik (NM_027564.1,764-782).
gaggtaacccttacagata

SEQ ID NO: 655411 - DNA, 19 bp, Mus musculus
  siRNA target sequence for 4921507P07Rik (NM_027564.1,767-785).
gtaacccttacagatatga

SEQ ID NO: 655412 - DNA, 19 bp, Mus musculus
  siRNA target sequence for 4921507P07Rik (NM_027564.1,779-797).
gatatgaactgctcgattt

SEQ ID NO: 655413 - DNA, 19 bp, Mus musculus
  siRNA target sequence for 4921507P07Rik (NM_027564.1,799-817).
cccatggattcaaagaaaa

SEQ ID NO: 655414 - DNA, 19 bp, Mus musculus
  siRNA target sequence for 4921507P07Rik (NM_027564.1,831-849).
gccaggtcagggtgtatat

SEQ ID NO: 655415 - DNA, 19 bp, Mus musculus
  siRNA target sequence for 4921507P07Rik (NM_027564.1,832-850).
ccaggtcagggtgtatatt

SEQ ID NO: 655416 - DNA, 19 bp, Mus musculus
  siRNA target sequence for 4921507P07Rik (NM_027564.1,836-854).
gtcagggtgtatattatga

SEQ ID NO: 655417 - DNA, 19 bp, Mus musculus
  siRNA target sequence for 4921507P07Rik (NM_027564.1,838-856).
cagggtgtatattatgatt

SEQ ID NO: 655418 - DNA, 19 bp, Mus musculus
  siRNA target sequence for 4921507P07Rik (NM_027564.1,840-858).
gggtgtatattatgatttt

SEQ ID NO: 655419 - DNA, 19 bp, Mus musculus
  siRNA target sequence for 4921507P07Rik (NM_027564.1,891-909).
ctaccccaaacctcctaaa

SEQ ID NO: 655420 - DNA, 19 bp, Mus musculus
  siRNA target sequence for 4921507P07Rik (NM_027564.1,895-913).
cccaaacctcctaaaacct

SEQ ID NO: 655421 - DNA, 19 bp, Mus musculus
  siRNA target sequence for 4921507P07Rik (NM_027564.1,897-915).
caaacctcctaaaaccttt

SEQ ID NO: 655422 - DNA, 19 bp, Mus musculus
  siRNA target sequence for 4921507P07Rik (NM_027564.1,956-974).
ctgcaaaggacgctaatat

SEQ ID NO: 655423 - DNA, 19 bp, Mus musculus
  siRNA target sequence for 4921507P07Rik (NM_027564.1,959-977).
caaaggacgctaatataca

SEQ ID NO: 655424 - DNA, 19 bp, Mus musculus
  siRNA target sequence for 4921507P07Rik (NM_027564.1,999-1017).
ctggctcacttcatatgct

SEQ ID NO: 655425 - DNA, 19 bp, Mus musculus
  siRNA target sequence for 4921507P07Rik (NM_027564.1,1040-1058).
ctatgagcccccttgaact

SEQ ID NO: 655426 - DNA, 19 bp, Mus musculus
  siRNA target sequence for 4921507P07Rik (NM_027564.1,1048-1066).
ccccttgaactggatgatt

SEQ ID NO: 655427 - DNA, 19 bp, Mus musculus
  siRNA target sequence for 4921507P07Rik (NM_027564.1,1049-1067).
cccttgaactggatgatta

SEQ ID NO: 655428 - DNA, 19 bp, Mus musculus
  siRNA target sequence for 4921507P07Rik (NM_027564.1,1090-1108).
ctaactggacagataggat

SEQ ID NO: 655429 - DNA, 19 bp, Mus musculus
  siRNA target sequence for 4921507P07Rik (NM_027564.1,1119-1137).
gcctcaagaaaaattccat

SEQ ID NO: 655430 - DNA, 19 bp, Mus musculus
  siRNA target sequence for 4921507P07Rik (NM_027564.1,1134-1152).
ccatcctgccttaaaaact

SEQ ID NO: 655431 - DNA, 19 bp, Mus musculus
  siRNA target sequence for 4921507P07Rik (NM_027564.1,1172-1190).
gaattgcccgacttactca

SEQ ID NO: 655432 - DNA, 19 bp, Mus musculus
  siRNA target sequence for 4921507P07Rik (NM_027564.1,1206-1224).
ggaggctacagtgcaaata

SEQ ID NO: 655433 - DNA, 19 bp, Mus musculus
  siRNA target sequence for 4921507P07Rik (NM_027564.1,1240-1258).
gactgtacccctagagttt

SEQ ID NO: 655434 - DNA, 19 bp, Mus musculus
  siRNA target sequence for 4921507P07Rik (NM_027564.1,1323-1341).
gtctggaataacccataaa

SEQ ID NO: 655435 - DNA, 19 bp, Mus musculus
  siRNA target sequence for 4921507P07Rik (NM_027564.1,1325-1343).
ctggaataacccataaaaa

SEQ ID NO: 655436 - DNA, 19 bp, Mus musculus
  siRNA target sequence for 4921507P07Rik (NM_027564.1,1328-1346).
gaataacccataaaaacca

SEQ ID NO: 655437 - DNA, 19 bp, Mus musculus
  siRNA target sequence for 4921507P07Rik (NM_027564.1,1394-1412).
gtccactcccaacttgtta

SEQ ID NO: 655438 - DNA, 19 bp, Mus musculus
  siRNA target sequence for 4921507P07Rik (NM_027564.1,1397-1415).
cactcccaacttgttatga

SEQ ID NO: 655439 - DNA, 19 bp, Mus musculus
  siRNA target sequence for 4921507P07Rik (NM_027564.1,1399-1417).
ctcccaacttgttatgaat

SEQ ID NO: 655440 - DNA, 19 bp, Mus musculus
  siRNA target sequence for 4921507P07Rik (NM_027564.1,1403-1421).
caacttgttatgaatcaaa

SEQ ID NO: 655441 - DNA, 19 bp, Mus musculus
  siRNA target sequence for 4921507P07Rik (NM_027564.1,1414-1432).
gaatcaaaagacttgacta

SEQ ID NO: 655442 - DNA, 19 bp, Mus musculus
  siRNA target sequence for 4921507P07Rik (NM_027564.1,1435-1453).
ctctatgacgtacaatcat

SEQ ID NO: 655443 - DNA, 19 bp, Mus musculus
  siRNA target sequence for 4921507P07Rik (NM_027564.1,1437-1455).
ctatgacgtacaatcattt

SEQ ID NO: 655444 - DNA, 19 bp, Mus musculus
  siRNA target sequence for 4921507P07Rik (NM_027564.1,1441-1459).
gacgtacaatcatttccaa

SEQ ID NO: 655445 - DNA, 19 bp, Mus musculus
  siRNA target sequence for 4921507P07Rik (NM_027564.1,1530-1548).
ctgctctaagtcaaaccat

SEQ ID NO: 655446 - DNA, 19 bp, Mus musculus
  siRNA target sequence for 4921507P07Rik (NM_027564.1,1545-1563).
ccattacattgactatgaa

SEQ ID NO: 655447 - DNA, 19 bp, Mus musculus
  siRNA target sequence for 4921507P07Rik (NM_027564.1,1555-1573).
gactatgaaccacttaagt

SEQ ID NO: 655448 - DNA, 19 bp, Mus musculus
  siRNA target sequence for 4921507P07Rik (NM_027564.1,1557-1575).
ctatgaaccacttaagtct

SEQ ID NO: 655449 - DNA, 19 bp, Mus musculus
  siRNA target sequence for 4921507P07Rik (NM_027564.1,1609-1627).
cctgttcgcctcagtaagt

SEQ ID NO: 655450 - DNA, 19 bp, Mus musculus
  siRNA target sequence for 4921507P07Rik (NM_027564.1,1612-1630).
gttcgcctcagtaagtcta

SEQ ID NO: 655451 - DNA, 19 bp, Mus musculus
  siRNA target sequence for 4921507P07Rik (NM_027564.1,1615-1633).
cgcctcagtaagtctaata

SEQ ID NO: 655452 - DNA, 19 bp, Mus musculus
  siRNA target sequence for 4921507P07Rik (NM_027564.1,1620-1638).
cagtaagtctaatattctt

SEQ ID NO: 655453 - DNA, 19 bp, Mus musculus
  siRNA target sequence for 4921507P07Rik (NM_027564.1,1622-1640).
gtaagtctaatattcttca

SEQ ID NO: 655454 - DNA, 19 bp, Mus musculus
  siRNA target sequence for 4921507P07Rik (NM_027564.1,1651-1669).
gatacggctgatttcactt

SEQ ID NO: 655455 - DNA, 19 bp, Mus musculus
  siRNA target sequence for 4921507P07Rik (NM_027564.1,1655-1673).
cggctgatttcacttttga

SEQ ID NO: 655456 - DNA, 19 bp, Mus musculus
  siRNA target sequence for 4921507P07Rik (NM_027564.1,1693-1711).
gaatttttgggcatgaaca

SEQ ID NO: 655457 - DNA, 19 bp, Mus musculus
  siRNA target sequence for 4921507P07Rik (NM_027564.1,1733-1751).
gacctcttttagattggat

SEQ ID NO: 655458 - DNA, 19 bp, Mus musculus
  siRNA target sequence for 4921507P07Rik (NM_027564.1,1762-1780).
ggagtgcccaagcatcatt

SEQ ID NO: 655459 - DNA, 19 bp, Mus musculus
  siRNA target sequence for 4921507P07Rik (NM_027564.1,1823-1841).
cacagaagcgtctgcataa

SEQ ID NO: 655460 - DNA, 19 bp, Mus musculus
  siRNA target sequence for 4921507P07Rik (NM_027564.1,1890-1908).
gatgagacatcaatttttt

SEQ ID NO: 655461 - DNA, 19 bp, Mus musculus
  siRNA target sequence for 4921507P07Rik (NM_027564.1,1909-1927).
ggctacaatggccatcatt

SEQ ID NO: 655462 - DNA, 19 bp, Mus musculus
  siRNA target sequence for 4921507P07Rik (NM_027564.1,1910-1928).
gctacaatggccatcattt

SEQ ID NO: 655463 - DNA, 19 bp, Mus musculus
  siRNA target sequence for 4930429G18Rik (NM_030180.1,80-98).
cagacttcattgacttcaa

SEQ ID NO: 655464 - DNA, 19 bp, Mus musculus
  siRNA target sequence for 4930429G18Rik (NM_030180.1,131-149).
ctagagttccccagtacaa

SEQ ID NO: 655465 - DNA, 19 bp, Mus musculus
  siRNA target sequence for 4930429G18Rik (NM_030180.1,198-216).
cttccacgagagatgttat

SEQ ID NO: 655466 - DNA, 19 bp, Mus musculus
  siRNA target sequence for 4930429G18Rik (NM_030180.1,219-237).
gttcccaggatagaagttt

SEQ ID NO: 655467 - DNA, 19 bp, Mus musculus
  siRNA target sequence for 4930429G18Rik (NM_030180.1,310-328).
gcactgtcgctgggtaaaa

SEQ ID NO: 655468 - DNA, 19 bp, Mus musculus
  siRNA target sequence for 4930429G18Rik (NM_030180.1,313-331).
ctgtcgctgggtaaaacaa

SEQ ID NO: 655469 - DNA, 19 bp, Mus musculus
  siRNA target sequence for 4930429G18Rik (NM_030180.1,450-468).
ggctggctgagccagatat

SEQ ID NO: 655470 - DNA, 19 bp, Mus musculus
  siRNA target sequence for 4930429G18Rik (NM_030180.1,485-503).
ccccaagtgacagatatta

SEQ ID NO: 655471 - DNA, 19 bp, Mus musculus
  siRNA target sequence for 4930429G18Rik (NM_030180.1,488-506).
caagtgacagatattaggt

SEQ ID NO: 655472 - DNA, 19 bp, Mus musculus
  siRNA target sequence for 4930429G18Rik (NM_030180.1,527-545).
gtcaatttggggacttctt

SEQ ID NO: 655473 - DNA, 19 bp, Mus musculus
  siRNA target sequence for 4930429G18Rik (NM_030180.1,554-572).
gattcttgggtaaatgtca

SEQ ID NO: 655474 - DNA, 19 bp, Mus musculus
  siRNA target sequence for 4930429G18Rik (NM_030180.1,665-683).
gaaagaagtcctatccttt

SEQ ID NO: 655475 - DNA, 19 bp, Mus musculus
  siRNA target sequence for 4930429G18Rik (NM_030180.1,767-785).
cacactgcctattctgatt

SEQ ID NO: 655476 - DNA, 19 bp, Mus musculus
  siRNA target sequence for 4930429G18Rik (NM_030180.1,977-995).
gaaaccgggcaccattgtt

SEQ ID NO: 655477 - DNA, 19 bp, Mus musculus
  siRNA target sequence for 4930429G18Rik (NM_030180.1,1108-1126).
ggcaggggagccctataga

SEQ ID NO: 655478 - DNA, 19 bp, Mus musculus
  siRNA target sequence for 4930429G18Rik (NM_030180.1,1185-1203).
ctccccaaggggtcaagta

SEQ ID NO: 655479 - DNA, 19 bp, Mus musculus
  siRNA target sequence for 4930429G18Rik (NM_030180.1,1187-1205).
ccccaaggggtcaagtaca

SEQ ID NO: 655480 - DNA, 19 bp, Mus musculus
  siRNA target sequence for 4930429G18Rik (NM_030180.1,1323-1341).
gcaagcctcagctaaccta

SEQ ID NO: 655481 - DNA, 19 bp, Mus musculus
  siRNA target sequence for 4930429G18Rik (NM_030180.1,1391-1409).
cagtcctgggggaatcttt

SEQ ID NO: 655482 - DNA, 19 bp, Mus musculus
  siRNA target sequence for 4930429G18Rik (NM_030180.1,1395-1413).
cctgggggaatcttttcca

SEQ ID NO: 655483 - DNA, 19 bp, Mus musculus
  siRNA target sequence for 4930429G18Rik (NM_030180.1,1472-1490).
gtaccccttaggtcaactt

SEQ ID NO: 655484 - DNA, 19 bp, Mus musculus
  siRNA target sequence for 4930429G18Rik (NM_030180.1,1521-1539).
cacctggtccacgaagaat

SEQ ID NO: 655485 - DNA, 19 bp, Mus musculus
  siRNA target sequence for 4930429G18Rik (NM_030180.1,1526-1544).
ggtccacgaagaatagaca

SEQ ID NO: 655486 - DNA, 19 bp, Mus musculus
  siRNA target sequence for 4930429G18Rik (NM_030180.1,1602-1620).
gcccaggagaggaaagaat

SEQ ID NO: 655487 - DNA, 19 bp, Mus musculus
  siRNA target sequence for 4930429G18Rik (NM_030180.1,1608-1626).
gagaggaaagaattatgtt

SEQ ID NO: 655488 - DNA, 19 bp, Mus musculus
  siRNA target sequence for 5830472M02Rik (NM_029512.1,121-139).
ggcctcactctccgaaaat

SEQ ID NO: 655489 - DNA, 19 bp, Mus musculus
  siRNA target sequence for 5830472M02Rik (NM_029512.1,180-198).
gctccctgacagaagactt

SEQ ID NO: 655490 - DNA, 19 bp, Mus musculus
  siRNA target sequence for 5830472M02Rik (NM_029512.1,342-360).
cccgaaagtttgattatga

SEQ ID NO: 655491 - DNA, 19 bp, Mus musculus
  siRNA target sequence for 5830472M02Rik (NM_029512.1,441-459).
ccctgaaagacgttctcaa

SEQ ID NO: 655492 - DNA, 19 bp, Mus musculus
  siRNA target sequence for 5830472M02Rik (NM_029512.1,455-473).
ctcaactctggattcctta

SEQ ID NO: 655493 - DNA, 19 bp, Mus musculus
  siRNA target sequence for 5830472M02Rik (NM_029512.1,532-550).
gcttccccattcggataaa

SEQ ID NO: 655494 - DNA, 19 bp, Mus musculus
  siRNA target sequence for 5830472M02Rik (NM_029512.1,533-551).
cttccccattcggataaaa

SEQ ID NO: 655495 - DNA, 19 bp, Mus musculus
  siRNA target sequence for 5830472M02Rik (NM_029512.1,536-554).
ccccattcggataaaagca

SEQ ID NO: 655496 - DNA, 19 bp, Mus musculus
  siRNA target sequence for 5830472M02Rik (NM_029512.1,545-563).
gataaaagcagttcacata

SEQ ID NO: 655497 - DNA, 19 bp, Mus musculus
  siRNA target sequence for 5830472M02Rik (NM_029512.1,566-584).
gaacgaacctcggatattt

SEQ ID NO: 655498 - DNA, 19 bp, Mus musculus
  siRNA target sequence for 5830472M02Rik (NM_181734.1,520-538).
ccgaccagacagatggata

SEQ ID NO: 655499 - DNA, 19 bp, Mus musculus
  siRNA target sequence for 5830472M02Rik (NM_181734.1,570-588).
gagccgtatacttgacatt

SEQ ID NO: 655500 - DNA, 19 bp, Mus musculus
  siRNA target sequence for 5830472M02Rik (NM_181734.1,573-591).
ccgtatacttgacattaga

SEQ ID NO: 655501 - DNA, 19 bp, Mus musculus
  siRNA target sequence for 5830472M02Rik (NM_181734.1,575-593).
gtatacttgacattagaaa

SEQ ID NO: 655502 - DNA, 19 bp, Mus musculus
  siRNA target sequence for 5830472M02Rik (NM_181734.1,585-603).
cattagaaaaactcattca

SEQ ID NO: 655503 - DNA, 19 bp, Mus musculus
  siRNA target sequence for 5830472M02Rik (NM_181734.1,622-640).
gaacgggattgttatcctt

SEQ ID NO: 655504 - DNA, 19 bp, Mus musculus
  siRNA target sequence for 5830472M02Rik (NM_181734.1,649-667).
caagggagtgagcttatca

SEQ ID NO: 655505 - DNA, 19 bp, Mus musculus
  siRNA target sequence for 5830472M02Rik (NM_181734.1,652-670).
gggagtgagcttatcaaaa

SEQ ID NO: 655506 - DNA, 19 bp, Mus musculus
  siRNA target sequence for 5830472M02Rik (NM_181734.1,684-702).
ggccttttatagccaaaaa

SEQ ID NO: 655507 - DNA, 19 bp, Mus musculus
  siRNA target sequence for 5830472M02Rik (NM_181734.1,781-799).
gggcattttcgccatcata

SEQ ID NO: 655508 - DNA, 19 bp, Mus musculus
  siRNA target sequence for 5830472M02Rik (NM_181734.1,782-800).
ggcattttcgccatcataa

SEQ ID NO: 655509 - DNA, 19 bp, Mus musculus
  siRNA target sequence for 5830472M02Rik (NM_181734.1,783-801).
gcattttcgccatcataaa

SEQ ID NO: 655510 - DNA, 19 bp, Mus musculus
  siRNA target sequence for 5830472M02Rik (NM_181734.1,784-802).
cattttcgccatcataaaa

SEQ ID NO: 655511 - DNA, 19 bp, Mus musculus
  siRNA target sequence for 9130422G05Rik (NM_025782.2,2503-2521).
catcagactttatcatcat

SEQ ID NO: 655512 - DNA, 19 bp, Mus musculus
  siRNA target sequence for 9130422G05Rik (NM_025782.2,2516-2534).
catcatggaagatagactt

SEQ ID NO: 655513 - DNA, 19 bp, Mus musculus
  siRNA target sequence for 9130422G05Rik (NM_025782.2,2571-2589).
cacatggggaacaatttaa

SEQ ID NO: 655514 - DNA, 19 bp, Mus musculus
  siRNA target sequence for 9130422G05Rik (NM_025782.2,2577-2595).
gggaacaatttaaatccat

SEQ ID NO: 655515 - DNA, 19 bp, Mus musculus
  siRNA target sequence for 9130422G05Rik (NM_025782.2,2644-2662).
gagctcttctgtgtattga

SEQ ID NO: 655516 - DNA, 19 bp, Mus musculus
  siRNA target sequence for 9130422G05Rik (NM_025782.2,2675-2693).
ggttcttagccttaaccat

SEQ ID NO: 655517 - DNA, 19 bp, Mus musculus
  siRNA target sequence for 9130422G05Rik (NM_025782.2,2772-2790).
ctgcgacaggactttgtgt

SEQ ID NO: 655518 - DNA, 19 bp, Mus musculus
  siRNA target sequence for 9130422G05Rik (NM_025782.2,2806-2824).
gctgccttactgtgtttaa

SEQ ID NO: 655519 - DNA, 19 bp, Mus musculus
  siRNA target sequence for 9230102I19Rik (NM_029959.1,116-134).
cctggtacctcgattccat

SEQ ID NO: 655520 - DNA, 19 bp, Mus musculus
  siRNA target sequence for 9230102I19Rik (NM_029959.1,117-135).
ctggtacctcgattccata

SEQ ID NO: 655521 - DNA, 19 bp, Mus musculus
  siRNA target sequence for 9230102I19Rik (NM_029959.1,127-145).
gattccatagcctcagata

SEQ ID NO: 655522 - DNA, 19 bp, Mus musculus
  siRNA target sequence for 9230102I19Rik (NM_029959.1,147-165).
catgactcgcattgaagaa

SEQ ID NO: 655523 - DNA, 19 bp, Mus musculus
  siRNA target sequence for 9230102I19Rik (NM_029959.1,150-168).
gactcgcattgaagaaaat

SEQ ID NO: 655524 - DNA, 19 bp, Mus musculus
  siRNA target sequence for 9230102I19Rik (NM_029959.1,191-209).
ggaacatcaagctcttaaa

SEQ ID NO: 655525 - DNA, 19 bp, Mus musculus
  siRNA target sequence for 9230102I19Rik (NM_029959.1,240-258).
catgttgcaaggagaatgt

SEQ ID NO: 655526 - DNA, 19 bp, Mus musculus
  siRNA target sequence for 9230102I19Rik (NM_029959.1,243-261).
gttgcaaggagaatgtgta

SEQ ID NO: 655527 - DNA, 19 bp, Mus musculus
  siRNA target sequence for 9230102I19Rik (NM_029959.1,276-294).
ctgtgaaaagactaagaat

SEQ ID NO: 655528 - DNA, 19 bp, Mus musculus
  siRNA target sequence for 9230102I19Rik (NM_029959.1,313-331).
gcctatgaggggaaaaaca

SEQ ID NO: 655529 - DNA, 19 bp, Mus musculus
  siRNA target sequence for 9230102I19Rik (NM_029959.1,348-366).
gaccgactacagcatgtat

SEQ ID NO: 655530 - DNA, 19 bp, Mus musculus
  siRNA target sequence for 9230102I19Rik (NM_029959.1,431-449).
gctccatactgcttgacaa

SEQ ID NO: 655531 - DNA, 19 bp, Mus musculus
  siRNA target sequence for 9230102I19Rik (NM_029959.1,450-468).
gactcatcagagagaattt

SEQ ID NO: 655532 - DNA, 19 bp, Mus musculus
  siRNA target sequence for 9230102I19Rik (NM_029959.1,469-487).
gaaaacatctgcaatctat

SEQ ID NO: 655533 - DNA, 19 bp, Mus musculus
  siRNA target sequence for 9230102I19Rik (NM_029959.1,490-508).
gggctggactcacaaaata

SEQ ID NO: 655534 - DNA, 19 bp, Mus musculus
  siRNA target sequence for 9230106L18Rik (NM_033145.1,42-60).
gcaatgtctgcggattctt

SEQ ID NO: 655535 - DNA, 19 bp, Mus musculus
  siRNA target sequence for 9230106L18Rik (NM_033145.1,141-159).
ctgttgcttctgaccaaaa

SEQ ID NO: 655536 - DNA, 19 bp, Mus musculus
  siRNA target sequence for 9230106L18Rik (NM_033145.1,225-243).
ctgtgaaagccgtgtacaa

SEQ ID NO: 655537 - DNA, 19 bp, Mus musculus
  siRNA target sequence for 9230106L18Rik (NM_033145.1,251-269).
ggaagttgtgtgacagaaa

SEQ ID NO: 655538 - DNA, 19 bp, Mus musculus
  siRNA target sequence for 9230106L18Rik (NM_033145.1,516-534).
ggtgtgctgagctcttgaa

SEQ ID NO: 655539 - DNA, 19 bp, Mus musculus
  siRNA target sequence for 9230112J07Rik (NM_178036.2,416-434).
cgtacggcctggtatacct

SEQ ID NO: 655540 - DNA, 19 bp, Mus musculus
  siRNA target sequence for 9230112J07Rik (NM_178036.2,504-522).
cctgagtctgcgagaattt

SEQ ID NO: 655541 - DNA, 19 bp, Mus musculus
  siRNA target sequence for 9430071P14Rik (NM_177200.2,126-144).
cagagcccgtgacaatcat

SEQ ID NO: 655542 - DNA, 19 bp, Mus musculus
  siRNA target sequence for 9430071P14Rik (NM_177200.2,128-146).
gagcccgtgacaatcatca

SEQ ID NO: 655543 - DNA, 19 bp, Mus musculus
  siRNA target sequence for 9430071P14Rik (NM_177200.2,292-310).
ggccatggagatcatgtta

SEQ ID NO: 655544 - DNA, 19 bp, Mus musculus
  siRNA target sequence for 9430071P14Rik (NM_177200.2,295-313).
catggagatcatgttaata

SEQ ID NO: 655545 - DNA, 19 bp, Mus musculus
  siRNA target sequence for 9430071P14Rik (NM_177200.2,326-344).
cctgttatccgatgtgaat

SEQ ID NO: 655546 - DNA, 19 bp, Mus musculus
  siRNA target sequence for 9430071P14Rik (NM_177200.2,374-392).
gtcaccacgatggtgtttt

SEQ ID NO: 655547 - DNA, 19 bp, Mus musculus
  siRNA target sequence for 9430071P14Rik (NM_177200.2,569-587).
catgctcaagggttaatca

SEQ ID NO: 655548 - DNA, 19 bp, Mus musculus
  siRNA target sequence for 9430071P14Rik (NM_177200.2,572-590).
gctcaagggttaatcataa

SEQ ID NO: 655549 - DNA, 19 bp, Mus musculus
  siRNA target sequence for 9430071P14Rik (NM_177200.2,573-591).
ctcaagggttaatcataaa

SEQ ID NO: 655550 - DNA, 19 bp, Mus musculus
  siRNA target sequence for 9430071P14Rik (NM_177200.2,575-593).
caagggttaatcataaaga

SEQ ID NO: 655551 - DNA, 19 bp, Mus musculus
  siRNA target sequence for 9430071P14Rik (NM_177200.2,766-784).
caagtttatccctgaatct

SEQ ID NO: 655552 - DNA, 19 bp, Mus musculus
  siRNA target sequence for 9430071P14Rik (NM_177200.2,918-936).
cagatctactagattctaa

SEQ ID NO: 655553 - DNA, 19 bp, Mus musculus
  siRNA target sequence for 9430071P14Rik (NM_177200.2,920-938).
gatctactagattctaaat

SEQ ID NO: 655554 - DNA, 19 bp, Mus musculus
  siRNA target sequence for 9430071P14Rik (NM_177200.2,967-985).
catatggctgggaatttct

SEQ ID NO: 655555 - DNA, 19 bp, Mus musculus
  siRNA target sequence for 9430071P14Rik (NM_177200.2,1037-1055).
ctggtctgcggttcaaagt

SEQ ID NO: 655556 - DNA, 19 bp, Mus musculus
  siRNA target sequence for 9430071P14Rik (NM_177200.2,1112-1130).
ccctgctattgccacatat

SEQ ID NO: 655557 - DNA, 19 bp, Mus musculus
  siRNA target sequence for 9430071P14Rik (NM_177200.2,1117-1135).
ctattgccacatatttgca

SEQ ID NO: 655558 - DNA, 19 bp, Mus musculus
  siRNA target sequence for 9630060C05Rik (NM_172892.1,701-719).
cgaggaagctgctattggt

SEQ ID NO: 655559 - DNA, 19 bp, Mus musculus
  siRNA target sequence for 9630060C05Rik (NM_172892.1,901-919).
gtggcggctgagtacttca

SEQ ID NO: 655560 - DNA, 19 bp, Mus musculus
  siRNA target sequence for 9630060C05Rik (NM_172892.1,964-982).
gctgtggagaagtggaatt

SEQ ID NO: 655561 - DNA, 19 bp, Mus musculus
  siRNA target sequence for 9630060C05Rik (NM_172892.1,965-983).
ctgtggagaagtggaattt

SEQ ID NO: 655562 - DNA, 19 bp, Mus musculus
  siRNA target sequence for 9630060C05Rik (NM_172892.1,998-1016).
ccctgcgcatggtcttgat

SEQ ID NO: 655563 - DNA, 19 bp, Mus musculus
  siRNA target sequence for 9630060C05Rik (NM_172892.1,1194-1212).
gctcatgggtcttgatgta

SEQ ID NO: 655564 - DNA, 19 bp, Mus musculus
  siRNA target sequence for 9630060C05Rik (NM_172892.1,1195-1213).
ctcatgggtcttgatgtaa

SEQ ID NO: 655565 - DNA, 19 bp, Mus musculus
  siRNA target sequence for 9630060C05Rik (NM_172892.1,1201-1219).
ggtcttgatgtaaacaaca

SEQ ID NO: 655566 - DNA, 19 bp, Mus musculus
  siRNA target sequence for 9630060C05Rik (NM_172892.1,1226-1244).
cgtccatggaactcatctt

SEQ ID NO: 655567 - DNA, 19 bp, Mus musculus
  siRNA target sequence for 9630060C05Rik (NM_172892.1,1309-1327).
gtgcccatggtcaccaaat

SEQ ID NO: 655568 - DNA, 19 bp, Mus musculus
  siRNA target sequence for 9630060C05Rik (NM_172892.1,1312-1330).
cccatggtcaccaaatcca

SEQ ID NO: 655569 - DNA, 19 bp, Mus musculus
  siRNA target sequence for 9630060C05Rik (NM_172892.1,1318-1336).
gtcaccaaatccatcaaca

SEQ ID NO: 655570 - DNA, 19 bp, Mus musculus
  siRNA target sequence for 9630060C05Rik (NM_172892.1,1674-1692).
cctgggctgcaacttcaaa

SEQ ID NO: 655571 - DNA, 19 bp, Mus musculus
  siRNA target sequence for 9630060C05Rik (NM_172892.1,1801-1819).
gtgaccgcctttttcttca

SEQ ID NO: 655572 - DNA, 19 bp, Mus musculus
  siRNA target sequence for 9630060C05Rik (NM_172892.1,1868-1886).
gctgggattctttctttga

SEQ ID NO: 655573 - DNA, 19 bp, Mus musculus
  siRNA target sequence for 9630060C05Rik (NM_172892.1,2207-2225).
ccattgtcacggagtttgt

SEQ ID NO: 655574 - DNA, 19 bp, Mus musculus
  siRNA target sequence for 9630060C05Rik (NM_172892.1,2276-2294).
ccgaaacgctgcacatcaa

SEQ ID NO: 655575 - DNA, 19 bp, Mus musculus
  siRNA target sequence for 9630060C05Rik (NM_172892.1,2277-2295).
cgaaacgctgcacatcaat

SEQ ID NO: 655576 - DNA, 19 bp, Mus musculus
  siRNA target sequence for 9630060C05Rik (NM_172892.1,2306-2324).
ccctggtccccgttaccat

SEQ ID NO: 655577 - DNA, 19 bp, Mus musculus
  siRNA target sequence for 9630060C05Rik (NM_172892.1,2420-2438).
ccggtctgggagtcaatgt

SEQ ID NO: 655578 - DNA, 19 bp, Mus musculus
  siRNA target sequence for 9630060C05Rik (NM_172892.1,2423-2441).
gtctgggagtcaatgtcat

SEQ ID NO: 655579 - DNA, 19 bp, Mus musculus
  siRNA target sequence for 9630060C05Rik (NM_172892.1,2454-2472).
cgtgatggtggccatcaat

SEQ ID NO: 655580 - DNA, 19 bp, Mus musculus
  siRNA target sequence for 9630060C05Rik (NM_172892.1,2457-2475).
gatggtggccatcaatact

SEQ ID NO: 655581 - DNA, 19 bp, Mus musculus
  siRNA target sequence for A330019N05Rik (NM_175448.2,612-630).
gcctctctcctgagacttt

SEQ ID NO: 655582 - DNA, 19 bp, Mus musculus
  siRNA target sequence for A330019N05Rik (NM_175448.2,735-753).
gcacagatgacgctttcat

SEQ ID NO: 655583 - DNA, 19 bp, Mus musculus
  siRNA target sequence for A330019N05Rik (NM_175448.2,738-756).
cagatgacgctttcatctt

SEQ ID NO: 655584 - DNA, 19 bp, Mus musculus
  siRNA target sequence for A330019N05Rik (NM_175448.2,763-781).
cttgagggccaggaaattt

SEQ ID NO: 655585 - DNA, 19 bp, Mus musculus
  siRNA target sequence for A330019N05Rik (NM_175448.2,766-784).
gagggccaggaaatttcat

SEQ ID NO: 655586 - DNA, 19 bp, Mus musculus
  siRNA target sequence for A330019N05Rik (NM_175448.2,768-786).
gggccaggaaatttcatca

SEQ ID NO: 655587 - DNA, 19 bp, Mus musculus
  siRNA target sequence for A330019N05Rik (NM_175448.2,982-1000).
gtacacactggtggatatt

SEQ ID NO: 655588 - DNA, 19 bp, Mus musculus
  siRNA target sequence for A330019N05Rik (NM_175448.2,1003-1021).
gcgtgccatcttactttct

SEQ ID NO: 655589 - DNA, 19 bp, Mus musculus
  siRNA target sequence for A330019N05Rik (NM_175448.2,1004-1022).
cgtgccatcttactttctt

SEQ ID NO: 655590 - DNA, 19 bp, Mus musculus
  siRNA target sequence for A330019N05Rik (NM_175448.2,1052-1070).
caagtaaatggatttgttt

SEQ ID NO: 655591 - DNA, 19 bp, Mus musculus
  siRNA target sequence for A330019N05Rik (NM_175448.2,1110-1128).
ctaagcttacaccaaacat

SEQ ID NO: 655592 - DNA, 19 bp, Mus musculus
  siRNA target sequence for A330019N05Rik (NM_175448.2,1126-1144).
catgctgcgacttgcaatt

SEQ ID NO: 655593 - DNA, 19 bp, Mus musculus
  siRNA target sequence for A330019N05Rik (NM_175448.2,1129-1147).
gctgcgacttgcaattgaa

SEQ ID NO: 655594 - DNA, 19 bp, Mus musculus
  siRNA target sequence for A330019N05Rik (NM_175448.2,1159-1177).
cagcttcccagcaagattt

SEQ ID NO: 655595 - DNA, 19 bp, Mus musculus
  siRNA target sequence for A330019N05Rik (NM_175448.2,1182-1200).
gaattcattttgtcaatca

SEQ ID NO: 655596 - DNA, 19 bp, Mus musculus
  siRNA target sequence for A330019N05Rik (NM_175448.2,1193-1211).
gtcaatcaaccttggtata

SEQ ID NO: 655597 - DNA, 19 bp, Mus musculus
  siRNA target sequence for A330019N05Rik (NM_175448.2,1252-1270).
gaagactcggaaaaggata

SEQ ID NO: 655598 - DNA, 19 bp, Mus musculus
  siRNA target sequence for A330019N05Rik (NM_175448.2,1296-1314).
gtctacaccaactaattca

SEQ ID NO: 655599 - DNA, 19 bp, Mus musculus
  siRNA target sequence for A330019N05Rik (NM_175448.2,1344-1362).
gaatgttgcccccatatga

SEQ ID NO: 655600 - DNA, 19 bp, Mus musculus
  siRNA target sequence for A330019N05Rik (NM_175448.2,1387-1405).
gctagaccatgagtatgat

SEQ ID NO: 655601 - DNA, 19 bp, Mus musculus
  siRNA target sequence for A330019N05Rik (NM_175448.2,1508-1526).
cctacagcactgaaacgaa

SEQ ID NO: 655602 - DNA, 19 bp, Mus musculus
  siRNA target sequence for A330019N05Rik (NM_175448.2,1509-1527).
ctacagcactgaaacgaat

SEQ ID NO: 655603 - DNA, 19 bp, Mus musculus
  siRNA target sequence for A330019N05Rik (NM_175448.2,1517-1535).
ctgaaacgaatggataaaa

SEQ ID NO: 655604 - DNA, 19 bp, Mus musculus
  siRNA target sequence for A330019N05Rik (NM_175448.2,1519-1537).
gaaacgaatggataaaagt

SEQ ID NO: 655605 - DNA, 19 bp, Mus musculus
  siRNA target sequence for A530053G22Rik (NM_177329.2,140-158).
ggaacccttacagttttca

SEQ ID NO: 655606 - DNA, 19 bp, Mus musculus
  siRNA target sequence for A530053G22Rik (NM_177329.2,176-194).
ctacctagcaagtaaatct

SEQ ID NO: 655607 - DNA, 19 bp, Mus musculus
  siRNA target sequence for A530053G22Rik (NM_177329.2,197-215).
gggtgcaatagcagaaaat

SEQ ID NO: 655608 - DNA, 19 bp, Mus musculus
  siRNA target sequence for A530053G22Rik (NM_177329.2,236-254).
gcgtgaagttcagtttttt

SEQ ID NO: 655609 - DNA, 19 bp, Mus musculus
  siRNA target sequence for A530053G22Rik (NM_177329.2,237-255).
cgtgaagttcagtttttta

SEQ ID NO: 655610 - DNA, 19 bp, Mus musculus
  siRNA target sequence for A630033C23Rik (NM_172841.1,768-786).
gcctcctgccggcagaatt

SEQ ID NO: 655611 - DNA, 19 bp, Mus musculus
  siRNA target sequence for A630033C23Rik (NM_172841.1,769-787).
cctcctgccggcagaattt

SEQ ID NO: 655612 - DNA, 19 bp, Mus musculus
  siRNA target sequence for A630033C23Rik (NM_172841.1,773-791).
ctgccggcagaatttcagt

SEQ ID NO: 655613 - DNA, 19 bp, Mus musculus
  siRNA target sequence for A630033C23Rik (NM_172841.1,855-873).
catctaggacggaacttga

SEQ ID NO: 655614 - DNA, 19 bp, Mus musculus
  siRNA target sequence for A630033C23Rik (NM_172841.1,910-928).
gcactacaacggaactcat

SEQ ID NO: 655615 - DNA, 19 bp, Mus musculus
  siRNA target sequence for A630033C23Rik (NM_172841.1,944-962).
gatggaccccagcaaaact

SEQ ID NO: 655616 - DNA, 19 bp, Mus musculus
  siRNA target sequence for A630033C23Rik (NM_172841.1,1063-1081).
ctttcatccaggcgttaat

SEQ ID NO: 655617 - DNA, 19 bp, Mus musculus
  siRNA target sequence for A630033C23Rik (NM_172841.1,1125-1143).
cgctatagcttgaagagtt

SEQ ID NO: 655618 - DNA, 19 bp, Mus musculus
  siRNA target sequence for A630033C23Rik (NM_172841.1,1165-1183).
gctgctttgatataggaaa

SEQ ID NO: 655619 - DNA, 19 bp, Mus musculus
  siRNA target sequence for A630033C23Rik (NM_172841.1,1283-1301).
cttcgctttacctcacttt

SEQ ID NO: 655620 - DNA, 19 bp, Mus musculus
  siRNA target sequence for A630033C23Rik (NM_172841.1,1306-1324).
cacccccctatcaaatcca

SEQ ID NO: 655621 - DNA, 19 bp, Mus musculus
  siRNA target sequence for A630033C23Rik (NM_172841.1,1349-1367).
cgatggcctttgtcagaat

SEQ ID NO: 655622 - DNA, 19 bp, Mus musculus
  siRNA target sequence for A630033C23Rik (NM_172841.1,1432-1450).
ggatctacgtggctttatt

SEQ ID NO: 655623 - DNA, 19 bp, Mus musculus
  siRNA target sequence for A630033C23Rik (NM_172841.1,1436-1454).
ctacgtggctttattcgtt

SEQ ID NO: 655624 - DNA, 19 bp, Mus musculus
  siRNA target sequence for A630033C23Rik (NM_172841.1,1479-1497).
ggctctacaccgatttaca

SEQ ID NO: 655625 - DNA, 19 bp, Mus musculus
  siRNA target sequence for A630033C23Rik (NM_172841.1,1499-1517).
cctgggaccaacctattta

SEQ ID NO: 655626 - DNA, 19 bp, Mus musculus
  siRNA target sequence for A630033C23Rik (NM_172841.1,1502-1520).
gggaccaacctatttagat

SEQ ID NO: 655627 - DNA, 19 bp, Mus musculus
  siRNA target sequence for A630033C23Rik (NM_172841.1,1527-1545).
gtcaagaaagacaatgcat

SEQ ID NO: 655628 - DNA, 19 bp, Mus musculus
  siRNA target sequence for A630033C23Rik (NM_172841.1,1694-1712).
gagtggattccttctttgt

SEQ ID NO: 655629 - DNA, 19 bp, Mus musculus
  siRNA target sequence for A630033C23Rik (NM_172841.1,1731-1749).
gtgatattcccaatgttta

SEQ ID NO: 655630 - DNA, 19 bp, Mus musculus
  siRNA target sequence for A630033C23Rik (NM_172841.1,1739-1757).
cccaatgtttacttttcca

SEQ ID NO: 655631 - DNA, 19 bp, Mus musculus
  siRNA target sequence for A630033C23Rik (NM_172841.1,1740-1758).
ccaatgtttacttttccaa

SEQ ID NO: 655632 - DNA, 19 bp, Mus musculus
  siRNA target sequence for A630033C23Rik (NM_172841.1,1767-1785).
ccacctcgacacaagaaaa

SEQ ID NO: 655633 - DNA, 19 bp, Mus musculus
  siRNA target sequence for A630033C23Rik (NM_172841.1,1768-1786).
cacctcgacacaagaaaaa

SEQ ID NO: 655634 - DNA, 19 bp, Mus musculus
  siRNA target sequence for A630033C23Rik (NM_172841.1,1798-1816).
ctgccgatgtcgttatcga

SEQ ID NO: 655635 - DNA, 19 bp, Mus musculus
  siRNA target sequence for A630033C23Rik (NM_172841.1,1917-1935).
gctgtcaggatcttaagca

SEQ ID NO: 655636 - DNA, 19 bp, Mus musculus
  siRNA target sequence for A630033C23Rik (NM_172841.1,2015-2033).
gttcatcgagtcacagttt

SEQ ID NO: 655637 - DNA, 19 bp, Mus musculus
  siRNA target sequence for A630033C23Rik (NM_172841.1,2083-2101).
ccagtgccggtgttggtat

SEQ ID NO: 655638 - DNA, 19 bp, Mus musculus
  siRNA target sequence for A630033C23Rik (NM_172841.1,2105-2123).
cctgggaggctacatcata

SEQ ID NO: 655639 - DNA, 19 bp, Mus musculus
  siRNA target sequence for A630033C23Rik (NM_172841.1,2106-2124).
ctgggaggctacatcataa

SEQ ID NO: 655640 - DNA, 19 bp, Mus musculus
  siRNA target sequence for A630033C23Rik (NM_172841.1,2108-2126).
gggaggctacatcataaaa

SEQ ID NO: 655641 - DNA, 19 bp, Mus musculus
  siRNA target sequence for A630033C23Rik (NM_172841.1,2109-2127).
ggaggctacatcataaaaa

SEQ ID NO: 655642 - DNA, 19 bp, Mus musculus
  siRNA target sequence for A630033C23Rik (NM_172841.1,2132-2150).
gaagcttggtgcaagagaa

SEQ ID NO: 655643 - DNA, 19 bp, Mus musculus
  siRNA target sequence for A630033C23Rik (NM_172841.1,2214-2232).
gttggctgtgaaagcatta

SEQ ID NO: 655644 - DNA, 19 bp, Mus musculus
  siRNA target sequence for A630033C23Rik (NM_172841.1,2218-2236).
gctgtgaaagcattaatct

SEQ ID NO: 655645 - DNA, 19 bp, Mus musculus
  siRNA target sequence for A630033C23Rik (NM_172841.1,2323-2341).
gctgtaaaatacacgaata

SEQ ID NO: 655646 - DNA, 19 bp, Mus musculus
  siRNA target sequence for A630033C23Rik (NM_172841.1,2396-2414).
ctgcattaacagtggtaat

SEQ ID NO: 655647 - DNA, 19 bp, Mus musculus
  siRNA target sequence for A630033C23Rik (NM_172841.1,2398-2416).
gcattaacagtggtaatct

SEQ ID NO: 655648 - DNA, 19 bp, Mus musculus
  siRNA target sequence for A630033C23Rik (NM_172841.1,2399-2417).
cattaacagtggtaatctt

SEQ ID NO: 655649 - DNA, 19 bp, Mus musculus
  siRNA target sequence for A630033C23Rik (NM_172841.1,2434-2452).
gacgccctacgttgttctt

SEQ ID NO: 655650 - DNA, 19 bp, Mus musculus
  siRNA target sequence for A630033C23Rik (NM_172841.1,2436-2454).
cgccctacgttgttcttct

SEQ ID NO: 655651 - DNA, 19 bp, Mus musculus
  siRNA target sequence for A630033C23Rik (NM_172841.1,2437-2455).
gccctacgttgttcttcta

SEQ ID NO: 655652 - DNA, 19 bp, Mus musculus
  siRNA target sequence for A630033C23Rik (NM_172841.1,2438-2456).
ccctacgttgttcttctat

SEQ ID NO: 655653 - DNA, 19 bp, Mus musculus
  siRNA target sequence for A630033C23Rik (NM_172841.1,2565-2583).
cctctcccgagacaaaaaa

SEQ ID NO: 655654 - DNA, 19 bp, Mus musculus
  siRNA target sequence for A630033C23Rik (NM_172841.1,2566-2584).
ctctcccgagacaaaaaat

SEQ ID NO: 655655 - DNA, 19 bp, Mus musculus
  siRNA target sequence for A630033C23Rik (NM_172841.1,2588-2606).
gcagggctattacttttgt

SEQ ID NO: 655656 - DNA, 19 bp, Mus musculus
  siRNA target sequence for A630033C23Rik (NM_172841.1,2591-2609).
gggctattacttttgtcaa

SEQ ID NO: 655657 - DNA, 19 bp, Mus musculus
  siRNA target sequence for A630033C23Rik (NM_172841.1,2592-2610).
ggctattacttttgtcaaa

SEQ ID NO: 655658 - DNA, 19 bp, Mus musculus
  siRNA target sequence for AI159731 (NM_145551.2,153-171).
gggctacatacctatgaca

SEQ ID NO: 655659 - DNA, 19 bp, Mus musculus
  siRNA target sequence for AI159731 (NM_145551.2,176-194).
ggtggtggtcatctatttt

SEQ ID NO: 655660 - DNA, 19 bp, Mus musculus
  siRNA target sequence for AI159731 (NM_145551.2,180-198).
gtggtcatctattttgtct

SEQ ID NO: 655661 - DNA, 19 bp, Mus musculus
  siRNA target sequence for AI159731 (NM_145551.2,182-200).
ggtcatctattttgtcttt

SEQ ID NO: 655662 - DNA, 19 bp, Mus musculus
  siRNA target sequence for AI159731 (NM_145551.2,204-222).
cttgctgtgggaatttggt

SEQ ID NO: 655663 - DNA, 19 bp, Mus musculus
  siRNA target sequence for AI159731 (NM_145551.2,244-262).
ggaccgttggtggctattt

SEQ ID NO: 655664 - DNA, 19 bp, Mus musculus
  siRNA target sequence for AI159731 (NM_145551.2,290-308).
gccaattggagcatctcta

SEQ ID NO: 655665 - DNA, 19 bp, Mus musculus
  siRNA target sequence for AI159731 (NM_145551.2,291-309).
ccaattggagcatctctaa

SEQ ID NO: 655666 - DNA, 19 bp, Mus musculus
  siRNA target sequence for AI159731 (NM_145551.2,292-310).
caattggagcatctctaat

SEQ ID NO: 655667 - DNA, 19 bp, Mus musculus
  siRNA target sequence for AI159731 (NM_145551.2,321-339).
gtgggcagtggcttattta

SEQ ID NO: 655668 - DNA, 19 bp, Mus musculus
  siRNA target sequence for AI159731 (NM_145551.2,474-492).
cagtacctgaagaaacgat

SEQ ID NO: 655669 - DNA, 19 bp, Mus musculus
  siRNA target sequence for AI159731 (NM_145551.2,553-571).
ccaagatatcgactgatat

SEQ ID NO: 655670 - DNA, 19 bp, Mus musculus
  siRNA target sequence for AI159731 (NM_145551.2,600-618).
gccttgggctggaatctct

SEQ ID NO: 655671 - DNA, 19 bp, Mus musculus
  siRNA target sequence for AI159731 (NM_145551.2,601-619).
ccttgggctggaatctcta

SEQ ID NO: 655672 - DNA, 19 bp, Mus musculus
  siRNA target sequence for AI159731 (NM_145551.2,602-620).
cttgggctggaatctctat

SEQ ID NO: 655673 - DNA, 19 bp, Mus musculus
  siRNA target sequence for AI159731 (NM_145551.2,1014-1032).
gtgctagggggctacctaa

SEQ ID NO: 655674 - DNA, 19 bp, Mus musculus
  siRNA target sequence for AI159731 (NM_145551.2,1017-1035).
ctagggggctacctaaaga

SEQ ID NO: 655675 - DNA, 19 bp, Mus musculus
  siRNA target sequence for AI159731 (NM_145551.2,1277-1295).
caccctgtttgccatagat

SEQ ID NO: 655676 - DNA, 19 bp, Mus musculus
  siRNA target sequence for AI159731 (NM_145551.2,1525-1543).
ccttctggggcctcatgtt

SEQ ID NO: 655677 - DNA, 19 bp, Mus musculus
  siRNA target sequence for AI159731 (NM_145551.2,1546-1564).
gcctggtcgtcggaatact

SEQ ID NO: 655678 - DNA, 19 bp, Mus musculus
  siRNA target sequence for AI159731 (NM_145551.2,1556-1574).
cggaatactgcgtatgatt

SEQ ID NO: 655679 - DNA, 19 bp, Mus musculus
  siRNA target sequence for AI159731 (NM_145551.2,1558-1576).
gaatactgcgtatgattct

SEQ ID NO: 655680 - DNA, 19 bp, Mus musculus
  siRNA target sequence for AI159731 (NM_145551.2,1674-1692).
ggactgaccgcgatcatca

SEQ ID NO: 655681 - DNA, 19 bp, Mus musculus
  siRNA target sequence for AI159731 (NM_145551.2,1675-1693).
gactgaccgcgatcatcat

SEQ ID NO: 655682 - DNA, 19 bp, Mus musculus
  siRNA target sequence for AI159731 (NM_145551.2,1684-1702).
cgatcatcattgtcgtaat

SEQ ID NO: 655683 - DNA, 19 bp, Mus musculus
  siRNA target sequence for AI159731 (NM_145551.2,1695-1713).
gtcgtaatcagcttcttca

SEQ ID NO: 655684 - DNA, 19 bp, Mus musculus
  siRNA target sequence for AI159731 (NM_145551.2,1762-1780).
ggaactgtgccgtatctga

SEQ ID NO: 655685 - DNA, 19 bp, Mus musculus
  siRNA target sequence for AI159731 (NM_145551.2,2059-2077).
gacgtgtctgcaacatcaa

SEQ ID NO: 655686 - DNA, 19 bp, Mus musculus
  siRNA target sequence for AI159731 (NM_145551.2,2088-2106).
ctgctagccatcaacatct

SEQ ID NO: 655687 - DNA, 19 bp, Mus musculus
  siRNA target sequence for AI159731 (NM_145551.2,2090-2108).
gctagccatcaacatcttt

SEQ ID NO: 655688 - DNA, 19 bp, Mus musculus
  siRNA target sequence for AI648912 (NM_133980.1,663-681).
ccaatgtcctgatttcaga

SEQ ID NO: 655689 - DNA, 19 bp, Mus musculus
  siRNA target sequence for AI648912 (NM_133980.1,816-834).
ccgtcttactgctcttctt

SEQ ID NO: 655690 - DNA, 19 bp, Mus musculus
  siRNA target sequence for AI648912 (NM_133980.1,993-1011).
ggaacgccttggacctttt

SEQ ID NO: 655691 - DNA, 19 bp, Mus musculus
  siRNA target sequence for AI648912 (NM_133980.1,997-1015).
cgccttggaccttttcaga

SEQ ID NO: 655692 - DNA, 19 bp, Mus musculus
  siRNA target sequence for Ambp (NM_007443.1,190-208).
cagtgagtcccggatctat

SEQ ID NO: 655693 - DNA, 19 bp, Mus musculus
  siRNA target sequence for Ambp (NM_007443.1,194-212).
gagtcccggatctatggaa

SEQ ID NO: 655694 - DNA, 19 bp, Mus musculus
  siRNA target sequence for Ambp (NM_007443.1,200-218).
cggatctatggaaaatggt

SEQ ID NO: 655695 - DNA, 19 bp, Mus musculus
  siRNA target sequence for Ambp (NM_007443.1,246-264).
cgtggctgagccgcattaa

SEQ ID NO: 655696 - DNA, 19 bp, Mus musculus
  siRNA target sequence for Ambp (NM_007443.1,249-267).
ggctgagccgcattaagga

SEQ ID NO: 655697 - DNA, 19 bp, Mus musculus
  siRNA target sequence for Ambp (NM_007443.1,255-273).
gccgcattaaggacaagat

SEQ ID NO: 655698 - DNA, 19 bp, Mus musculus
  siRNA target sequence for Ambp (NM_007443.1,387-405).
cggacatcgatggaaagtt

SEQ ID NO: 655699 - DNA, 19 bp, Mus musculus
  siRNA target sequence for Ambp (NM_007443.1,407-425).
ctctaccacaaatccaaat

SEQ ID NO: 655700 - DNA, 19 bp, Mus musculus
  siRNA target sequence for Ambp (NM_007443.1,415-433).
caaatccaaatggaacata

SEQ ID NO: 655701 - DNA, 19 bp, Mus musculus
  siRNA target sequence for Ambp (NM_007443.1,420-438).
ccaaatggaacataacctt

SEQ ID NO: 655702 - DNA, 19 bp, Mus musculus
  siRNA target sequence for Ambp (NM_007443.1,430-448).
cataaccttggaatcctat

SEQ ID NO: 655703 - DNA, 19 bp, Mus musculus
  siRNA target sequence for Ambp (NM_007443.1,457-475).
caccaactatgacgaatat

SEQ ID NO: 655704 - DNA, 19 bp, Mus musculus
  siRNA target sequence for Ambp (NM_007443.1,469-487).
cgaatatgccattttcctt

SEQ ID NO: 655705 - DNA, 19 bp, Mus musculus
  siRNA target sequence for Ambp (NM_007443.1,731-749).
gggactgagccactaataa

SEQ ID NO: 655706 - DNA, 19 bp, Mus musculus
  siRNA target sequence for Ambp (NM_007443.1,809-827).
gggatgcaagagaggtatt

SEQ ID NO: 655707 - DNA, 19 bp, Mus musculus
  siRNA target sequence for Ambp (NM_007443.1,810-828).
ggatgcaagagaggtatta

SEQ ID NO: 655708 - DNA, 19 bp, Mus musculus
  siRNA target sequence for Ambp (NM_007443.1,848-866).
gcctgcgagacctttcaat

SEQ ID NO: 655709 - DNA, 19 bp, Mus musculus
  siRNA target sequence for Ambp (NM_007443.1,849-867).
cctgcgagacctttcaata

SEQ ID NO: 655710 - DNA, 19 bp, Mus musculus
  siRNA target sequence for Ambp (NM_007443.1,850-868).
ctgcgagacctttcaatat

SEQ ID NO: 655711 - DNA, 19 bp, Mus musculus
  siRNA target sequence for Ambp (NM_007443.1,968-986).
ccctgccgagccttcataa

SEQ ID NO: 655712 - DNA, 19 bp, Mus musculus
  siRNA target sequence for Ambp (NM_007443.1,1010-1028).
caagggaagtgcatccaat

SEQ ID NO: 655713 - DNA, 19 bp, Mus musculus
  siRNA target sequence for Ambp (NM_007443.1,1050-1068).
gcaacggcaacaaattcta

SEQ ID NO: 655714 - DNA, 19 bp, Mus musculus
  siRNA target sequence for Ambp (NM_007443.1,1109-1127).
gatgggtacgaggaactaa

SEQ ID NO: 655715 - DNA, 19 bp, Mus musculus
  siRNA target sequence for Ap2m1 (NM_009679.1,1114-1132).
ccgactccattgaacacaa

SEQ ID NO: 655716 - DNA, 19 bp, Mus musculus
  siRNA target sequence for Ap2m1 (NM_009679.1,1383-1401).
cgaccatgatgtcatcaaa

SEQ ID NO: 655717 - DNA, 19 bp, Mus musculus
  siRNA target sequence for Ap2m1 (NM_009679.1,1384-1402).
gaccatgatgtcatcaaat

SEQ ID NO: 655718 - DNA, 19 bp, Mus musculus
  siRNA target sequence for Ap2m1 (NM_009679.1,1398-1416).
caaatgggtgcgatacatt

SEQ ID NO: 655719 - DNA, 19 bp, Mus musculus
  siRNA target sequence for Aqp2 (NM_009699.2,385-403).
gccatcctccatgagatta

SEQ ID NO: 655720 - DNA, 19 bp, Mus musculus
  siRNA target sequence for Aqp2 (NM_009699.2,724-742).
ggttccctcctctacaact

SEQ ID NO: 655721 - DNA, 19 bp, Mus musculus
  siRNA target sequence for Aqp5 (NM_009701.1,694-712).
catcaatccggccattact

SEQ ID NO: 655722 - DNA, 19 bp, Mus musculus
  siRNA target sequence for Aqp5 (NM_009701.1,743-761).
ctgctccgagccatcttct

SEQ ID NO: 655723 - DNA, 19 bp, Mus musculus
  siRNA target sequence for Aqp5 (NM_009701.1,884-902).
gccgtggtggtggagttaa

SEQ ID NO: 655724 - DNA, 19 bp, Mus musculus
  siRNA target sequence for Aqp5 (NM_009701.1,885-903).
ccgtggtggtggagttaat

SEQ ID NO: 655725 - DNA, 19 bp, Mus musculus
  siRNA target sequence for Aqp5 (NM_009701.1,1013-1031).
cttgtggggatctacttca

SEQ ID NO: 655726 - DNA, 19 bp, Mus musculus
  siRNA target sequence for Aqp5 (NM_009701.1,1232-1250).
gaggactgggaagatcata

SEQ ID NO: 655727 - DNA, 19 bp, Mus musculus
  siRNA target sequence for Aqp6 (NM_175087.2,24-42).
gtgtagcagggcttacctt

SEQ ID NO: 655728 - DNA, 19 bp, Mus musculus
  siRNA target sequence for Aqp6 (NM_175087.2,66-84).
catcagcaaggcgcttttt

SEQ ID NO: 655729 - DNA, 19 bp, Mus musculus
  siRNA target sequence for Aqp6 (NM_175087.2,98-116).
ccacggggctgtacgtttt

SEQ ID NO: 655730 - DNA, 19 bp, Mus musculus
  siRNA target sequence for Aqp6 (NM_175087.2,171-189).
gatcgccatcaccttcaat

SEQ ID NO: 655731 - DNA, 19 bp, Mus musculus
  siRNA target sequence for Aqp6 (NM_175087.2,268-286).
ctcgtgggatcccatatct

SEQ ID NO: 655732 - DNA, 19 bp, Mus musculus
  siRNA target sequence for Aqp6 (NM_175087.2,293-311).
ctcgggctatggcctatat

SEQ ID NO: 655733 - DNA, 19 bp, Mus musculus
  siRNA target sequence for Aqp6 (NM_175087.2,360-378).
ggtaactccaggaggtatt

SEQ ID NO: 655734 - DNA, 19 bp, Mus musculus
  siRNA target sequence for Aqp6 (NM_175087.2,403-421).
gtccacaacagcacatcaa

SEQ ID NO: 655735 - DNA, 19 bp, Mus musculus
  siRNA target sequence for Aqp6 (NM_175087.2,510-528).
gtccccagctgccatgatt

SEQ ID NO: 655736 - DNA, 19 bp, Mus musculus
  siRNA target sequence for Aqp6 (NM_175087.2,603-621).
cggccctgccgtcattgtt

SEQ ID NO: 655737 - DNA, 19 bp, Mus musculus
  siRNA target sequence for Aqp6 (NM_175087.2,631-649).
gcagtccattggatcttct

SEQ ID NO: 655738 - DNA, 19 bp, Mus musculus
  siRNA target sequence for Aqp6 (NM_175087.2,679-697).
gcttcgctgatctacaact

SEQ ID NO: 655739 - DNA, 19 bp, Mus musculus
  siRNA target sequence for Aqp6 (NM_175087.2,680-698).
cttcgctgatctacaactt

SEQ ID NO: 655740 - DNA, 19 bp, Mus musculus
  siRNA target sequence for Aqp6 (NM_175087.2,683-701).
cgctgatctacaactttat

SEQ ID NO: 655741 - DNA, 19 bp, Mus musculus
  siRNA target sequence for Aqp6 (NM_175087.2,813-831).
ctctgaggacacagaatgt

SEQ ID NO: 655742 - DNA, 19 bp, Mus musculus
  siRNA target sequence for Aqp6 (NM_175087.2,849-867).
ggaggctgtccggtcattt

SEQ ID NO: 655743 - DNA, 19 bp, Mus musculus
  siRNA target sequence for Aqp6 (NM_175087.2,850-868).
gaggctgtccggtcatttt

SEQ ID NO: 655744 - DNA, 19 bp, Mus musculus
  siRNA target sequence for Aqp6 (NM_175087.2,854-872).
ctgtccggtcattttcatt

SEQ ID NO: 655745 - DNA, 19 bp, Mus musculus
  siRNA target sequence for Aqp6 (NM_175087.2,856-874).
gtccggtcattttcattca

SEQ ID NO: 655746 - DNA, 19 bp, Mus musculus
  siRNA target sequence for Aqp7 (NM_007473.3,290-308).
gtgctggagaccatacaat

SEQ ID NO: 655747 - DNA, 19 bp, Mus musculus
  siRNA target sequence for Aqp7 (NM_007473.3,391-409).
cgtggctcacatggtttta

SEQ ID NO: 655748 - DNA, 19 bp, Mus musculus
  siRNA target sequence for Aqp7 (NM_007473.3,403-421).
ggttttaggagaaaactct

SEQ ID NO: 655749 - DNA, 19 bp, Mus musculus
  siRNA target sequence for Aqp7 (NM_007473.3,426-444).
gctatctcggtgtcaactt

SEQ ID NO: 655750 - DNA, 19 bp, Mus musculus
  siRNA target sequence for Aqp7 (NM_007473.3,545-563).
cgaatgacctggaagaagt

SEQ ID NO: 655751 - DNA, 19 bp, Mus musculus
  siRNA target sequence for Aqp7 (NM_007473.3,608-626).
gcagctaccacctacttaa

SEQ ID NO: 655752 - DNA, 19 bp, Mus musculus
  siRNA target sequence for Aqp7 (NM_007473.3,609-627).
cagctaccacctacttaat

SEQ ID NO: 655753 - DNA, 19 bp, Mus musculus
  siRNA target sequence for Aqp7 (NM_007473.3,682-700).
caaggccactgcaaacatt

SEQ ID NO: 655754 - DNA, 19 bp, Mus musculus
  siRNA target sequence for Aqp7 (NM_007473.3,697-715).
catttttgccacctatctt

SEQ ID NO: 655755 - DNA, 19 bp, Mus musculus
  siRNA target sequence for Aqp7 (NM_007473.3,708-726).
cctatcttcctgaatacat

SEQ ID NO: 655756 - DNA, 19 bp, Mus musculus
  siRNA target sequence for Aqp7 (NM_007473.3,808-826).
gaacagtccagcacttcaa

SEQ ID NO: 655757 - DNA, 19 bp, Mus musculus
  siRNA target sequence for Aqp7 (NM_007473.3,872-890).
gtgtcgctaggcatgaact

SEQ ID NO: 655758 - DNA, 19 bp, Mus musculus
  siRNA target sequence for Aqp7 (NM_007473.3,883-901).
catgaactccggatatgca

SEQ ID NO: 655759 - DNA, 19 bp, Mus musculus
  siRNA target sequence for Aqp7 (NM_007473.3,924-942).
ctccccggttgttcacttt

SEQ ID NO: 655760 - DNA, 19 bp, Mus musculus
  siRNA target sequence for Aqp7 (NM_007473.3,927-945).
cccggttgttcactttcat

SEQ ID NO: 655761 - DNA, 19 bp, Mus musculus
  siRNA target sequence for Aqp7 (NM_007473.3,928-946).
ccggttgttcactttcatt

SEQ ID NO: 655762 - DNA, 19 bp, Mus musculus
  siRNA target sequence for Aqp7 (NM_007473.3,1021-1039).
cgcctacctaggtggtatt

SEQ ID NO: 655763 - DNA, 19 bp, Mus musculus
  siRNA target sequence for Aqp7 (NM_007473.3,1023-1041).
cctacctaggtggtattgt

SEQ ID NO: 655764 - DNA, 19 bp, Mus musculus
  siRNA target sequence for Aqp7 (NM_007473.3,1024-1042).
ctacctaggtggtattgta

SEQ ID NO: 655765 - DNA, 19 bp, Mus musculus
  siRNA target sequence for Aqp7 (NM_007473.3,1079-1097).
cctcagagactggagaatt

SEQ ID NO: 655766 - DNA, 19 bp, Mus musculus
  siRNA target sequence for Aqp7 (NM_007473.3,1139-1157).
gcagcttctgcaaacataa

SEQ ID NO: 655767 - DNA, 19 bp, Mus musculus
  siRNA target sequence for AU045326 (NM_133847.2,301-319).
ctgtctaacatgtaaagga

SEQ ID NO: 655768 - DNA, 19 bp, Mus musculus
  siRNA target sequence for AU045326 (NM_133847.2,336-354).
ctggagtcgcgccaatcaa

SEQ ID NO: 655769 - DNA, 19 bp, Mus musculus
  siRNA target sequence for AU045326 (NM_133847.2,338-356).
ggagtcgcgccaatcaatt

SEQ ID NO: 655770 - DNA, 19 bp, Mus musculus
  siRNA target sequence for AU045326 (NM_133847.2,339-357).
gagtcgcgccaatcaattt

SEQ ID NO: 655771 - DNA, 19 bp, Mus musculus
  siRNA target sequence for AU045326 (NM_133847.2,348-366).
caatcaatttccaccaaaa

SEQ ID NO: 655772 - DNA, 19 bp, Mus musculus
  siRNA target sequence for AU045326 (NM_133847.2,405-423).
ctcggacccagcttcctta

SEQ ID NO: 655773 - DNA, 19 bp, Mus musculus
  siRNA target sequence for AU045326 (NM_133847.2,419-437).
ccttacgagtactactcat

SEQ ID NO: 655774 - DNA, 19 bp, Mus musculus
  siRNA target sequence for AU045326 (NM_133847.2,420-438).
cttacgagtactactcatt

SEQ ID NO: 655775 - DNA, 19 bp, Mus musculus
  siRNA target sequence for AU045326 (NM_133847.2,445-463).
ctgccagcccatcaagata

SEQ ID NO: 655776 - DNA, 19 bp, Mus musculus
  siRNA target sequence for AU045326 (NM_133847.2,557-575).
gaagttctatgcaaccaat

SEQ ID NO: 655777 - DNA, 19 bp, Mus musculus
  siRNA target sequence for AU045326 (NM_133847.2,572-590).
caatctaacaagccaataa

SEQ ID NO: 655778 - DNA, 19 bp, Mus musculus
  siRNA target sequence for AU045326 (NM_133847.2,576-594).
ctaacaagccaataacctt

SEQ ID NO: 655779 - DNA, 19 bp, Mus musculus
  siRNA target sequence for AU045326 (NM_133847.2,616-634).
ggtggccgagcgaatcaca

SEQ ID NO: 655780 - DNA, 19 bp, Mus musculus
  siRNA target sequence for AU045326 (NM_133847.2,622-640).
cgagcgaatcacagaagaa

SEQ ID NO: 655781 - DNA, 19 bp, Mus musculus
  siRNA target sequence for AU045326 (NM_133847.2,626-644).
cgaatcacagaagaatact

SEQ ID NO: 655782 - DNA, 19 bp, Mus musculus
  siRNA target sequence for AU045326 (NM_133847.2,774-792).
cggatgtcaacaagatcta

SEQ ID NO: 655783 - DNA, 19 bp, Mus musculus
  siRNA target sequence for AU045326 (NM_133847.2,797-815).
cacaatcacctctcattca

SEQ ID NO: 655784 - DNA, 19 bp, Mus musculus
  siRNA target sequence for AU045326 (NM_133847.2,961-979).
ctccttaccccaagaaatt

SEQ ID NO: 655785 - DNA, 19 bp, Mus musculus
  siRNA target sequence for AU045326 (NM_133847.2,1026-1044).
gggaggaaagtgacatcaa

SEQ ID NO: 655786 - DNA, 19 bp, Mus musculus
  siRNA target sequence for AU045326 (NM_133847.2,1027-1045).
ggaggaaagtgacatcaaa

SEQ ID NO: 655787 - DNA, 19 bp, Mus musculus
  siRNA target sequence for AU045326 (NM_133847.2,1028-1046).
gaggaaagtgacatcaaat

SEQ ID NO: 655788 - DNA, 19 bp, Mus musculus
  siRNA target sequence for AU045326 (NM_133847.2,1085-1103).
gtgcagatccactggtttt

SEQ ID NO: 655789 - DNA, 19 bp, Mus musculus
  siRNA target sequence for AU045326 (NM_133847.2,1420-1438).
gttcatgggggtatttggt

SEQ ID NO: 655790 - DNA, 19 bp, Mus musculus
  siRNA target sequence for AU045326 (NM_133847.2,1453-1471).
ccgtctctaccgaactcta

SEQ ID NO: 655791 - DNA, 19 bp, Mus musculus
  siRNA target sequence for AU045326 (NM_133847.2,1454-1472).
cgtctctaccgaactctaa

SEQ ID NO: 655792 - DNA, 19 bp, Mus musculus
  siRNA target sequence for AU045326 (NM_133847.2,1455-1473).
gtctctaccgaactctaaa

SEQ ID NO: 655793 - DNA, 19 bp, Mus musculus
  siRNA target sequence for AU045326 (NM_133847.2,1676-1694).
cgcaagcagccatatgaca

SEQ ID NO: 655794 - DNA, 19 bp, Mus musculus
  siRNA target sequence for AU045326 (NM_133847.2,1733-1751).
gaacaacggtggtacatga

SEQ ID NO: 655795 - DNA, 19 bp, Mus musculus
  siRNA target sequence for AU045326 (NM_133847.2,1743-1761).
ggtacatgaaccgatttgt

SEQ ID NO: 655796 - DNA, 19 bp, Mus musculus
  siRNA target sequence for AU045326 (NM_133847.2,1789-1807).
ctttggtgccatgttcatt

SEQ ID NO: 655797 - DNA, 19 bp, Mus musculus
  siRNA target sequence for AU045326 (NM_133847.2,1868-1886).
ctgttcctcgttttcatca

SEQ ID NO: 655798 - DNA, 19 bp, Mus musculus
  siRNA target sequence for AU045326 (NM_133847.2,1914-1932).
gcatagtcatggtgtactt

SEQ ID NO: 655799 - DNA, 19 bp, Mus musculus
  siRNA target sequence for AU045326 (NM_133847.2,1983-2001).
cagggggatctgcattcta

SEQ ID NO: 655800 - DNA, 19 bp, Mus musculus
  siRNA target sequence for AU045326 (NM_133847.2,2006-2024).
ctggtctatgccatctttt

SEQ ID NO: 655801 - DNA, 19 bp, Mus musculus
  siRNA target sequence for AU045326 (NM_133847.2,2009-2027).
gtctatgccatcttttatt

SEQ ID NO: 655802 - DNA, 19 bp, Mus musculus
  siRNA target sequence for AU045326 (NM_133847.2,2134-2152).
ctacgcagcctacatgttt

SEQ ID NO: 655803 - DNA, 19 bp, Mus musculus
  siRNA target sequence for AU045326 (NM_133847.2,2146-2164).
catgtttgtccgcaagata

SEQ ID NO: 655804 - DNA, 19 bp, Mus musculus
  siRNA target sequence for AU045326 (NM_133847.2,2149-2167).
gtttgtccgcaagatatat

SEQ ID NO: 655805 - DNA, 19 bp, Mus musculus
  siRNA target sequence for AW261723 (NM_134069.2,157-175).
gaaagtcccgagtttatgt

SEQ ID NO: 655806 - DNA, 19 bp, Mus musculus
  siRNA target sequence for AW261723 (NM_134069.2,226-244).
gatggcgcagaattctatt

SEQ ID NO: 655807 - DNA, 19 bp, Mus musculus
  siRNA target sequence for AW261723 (NM_134069.2,229-247).
ggcgcagaattctattata

SEQ ID NO: 655808 - DNA, 19 bp, Mus musculus
  siRNA target sequence for AW261723 (NM_134069.2,230-248).
gcgcagaattctattataa

SEQ ID NO: 655809 - DNA, 19 bp, Mus musculus
  siRNA target sequence for AW261723 (NM_134069.2,314-332).
cagcttcctgcgggtttaa

SEQ ID NO: 655810 - DNA, 19 bp, Mus musculus
  siRNA target sequence for AW261723 (NM_134069.2,354-372).
caaagcatcttcctataaa

SEQ ID NO: 655811 - DNA, 19 bp, Mus musculus
  siRNA target sequence for AW261723 (NM_134069.2,462-480).
gatacttggcagggaaaat

SEQ ID NO: 655812 - DNA, 19 bp, Mus musculus
  siRNA target sequence for AW261723 (NM_134069.2,512-530).
cttggatcttcattactca

SEQ ID NO: 655813 - DNA, 19 bp, Mus musculus
  siRNA target sequence for AW261723 (NM_134069.2,551-569).
gccaatcttggactagttt

SEQ ID NO: 655814 - DNA, 19 bp, Mus musculus
  siRNA target sequence for AW261723 (NM_134069.2,552-570).
ccaatcttggactagtttt

SEQ ID NO: 655815 - DNA, 19 bp, Mus musculus
  siRNA target sequence for AW261723 (NM_134069.2,553-571).
caatcttggactagttttt

SEQ ID NO: 655816 - DNA, 19 bp, Mus musculus
  siRNA target sequence for AW261723 (NM_134069.2,577-595).
ggcaactcgagcagttcaa

SEQ ID NO: 655817 - DNA, 19 bp, Mus musculus
  siRNA target sequence for AW261723 (NM_134069.2,686-704).
gccttgtcaggaatgacat

SEQ ID NO: 655818 - DNA, 19 bp, Mus musculus
  siRNA target sequence for AW261723 (NM_134069.2,702-720).
cattgggaatctttactgt

SEQ ID NO: 655819 - DNA, 19 bp, Mus musculus
  siRNA target sequence for AW261723 (NM_134069.2,814-832).
gttcattctgatttatgat

SEQ ID NO: 655820 - DNA, 19 bp, Mus musculus
  siRNA target sequence for AW261723 (NM_134069.2,841-859).
ctctcacccatggataagt

SEQ ID NO: 655821 - DNA, 19 bp, Mus musculus
  siRNA target sequence for AW261723 (NM_134069.2,853-871).
gataagtggcccagaaaga

SEQ ID NO: 655822 - DNA, 19 bp, Mus musculus
  siRNA target sequence for AW261723 (NM_134069.2,858-876).
gtggcccagaaagagaata

SEQ ID NO: 655823 - DNA, 19 bp, Mus musculus
  siRNA target sequence for AW261723 (NM_134069.2,916-934).
gcagccacttcccatcaaa

SEQ ID NO: 655824 - DNA, 19 bp, Mus musculus
  siRNA target sequence for AW261723 (NM_134069.2,984-1002).
cccatcagtggcttgttaa

SEQ ID NO: 655825 - DNA, 19 bp, Mus musculus
  siRNA target sequence for AW261723 (NM_134069.2,998-1016).
gttaacacctttataatgt

SEQ ID NO: 655826 - DNA, 19 bp, Mus musculus
  siRNA target sequence for AW261723 (NM_134069.2,1125-1143).
ggctggcagattttctact

SEQ ID NO: 655827 - DNA, 19 bp, Mus musculus
  siRNA target sequence for AW261723 (NM_134069.2,1221-1239).
cggctctgccctatatcca

SEQ ID NO: 655828 - DNA, 19 bp, Mus musculus
  siRNA target sequence for AW261723 (NM_134069.2,1237-1255).
ccaatccagctatattaca

SEQ ID NO: 655829 - DNA, 19 bp, Mus musculus
  siRNA target sequence for AW261723 (NM_134069.2,1284-1302).
gactgtgccctctatctca

SEQ ID NO: 655830 - DNA, 19 bp, Mus musculus
  siRNA target sequence for AW261723 (NM_134069.2,1301-1319).
caggcaggaatctatatta

SEQ ID NO: 655831 - DNA, 19 bp, Mus musculus
  siRNA target sequence for AW261723 (NM_134069.2,1303-1321).
ggcaggaatctatattaat

SEQ ID NO: 655832 - DNA, 19 bp, Mus musculus
  siRNA target sequence for AW261723 (NM_134069.2,1439-1457).
gaattcgggtggaggaatt

SEQ ID NO: 655833 - DNA, 19 bp, Mus musculus
  siRNA target sequence for AW261723 (NM_134069.2,1444-1462).
cgggtggaggaatttcttt

SEQ ID NO: 655834 - DNA, 19 bp, Mus musculus
  siRNA target sequence for AW261723 (NM_134069.2,1484-1502).
ctacttggcttaatcatct

SEQ ID NO: 655835 - DNA, 19 bp, Mus musculus
  siRNA target sequence for AW556797 (NM_134100.2,204-222).
gactgcctatttgtctttt

SEQ ID NO: 655836 - DNA, 19 bp, Mus musculus
  siRNA target sequence for AW556797 (NM_134100.2,327-345).
cttctatcaagtctacttt

SEQ ID NO: 655837 - DNA, 19 bp, Mus musculus
  siRNA target sequence for AW556797 (NM_134100.2,374-392).
ctccctacctgtataaact

SEQ ID NO: 655838 - DNA, 19 bp, Mus musculus
  siRNA target sequence for AW556797 (NM_134100.2,376-394).
ccctacctgtataaactct

SEQ ID NO: 655839 - DNA, 19 bp, Mus musculus
  siRNA target sequence for AW556797 (NM_134100.2,378-396).
ctacctgtataaactctat

SEQ ID NO: 655840 - DNA, 19 bp, Mus musculus
  siRNA target sequence for AW556797 (NM_134100.2,499-517).
ctgggtcgtaagaagtctt

SEQ ID NO: 655841 - DNA, 19 bp, Mus musculus
  siRNA target sequence for AW556797 (NM_134100.2,542-560).
ctctatgttgcataaccaa

SEQ ID NO: 655842 - DNA, 19 bp, Mus musculus
  siRNA target sequence for AW556797 (NM_134100.2,765-783).
ggccgtggctagttggata

SEQ ID NO: 655843 - DNA, 19 bp, Mus musculus
  siRNA target sequence for AW556797 (NM_134100.2,839-857).
gggccttggctctacgaaa

SEQ ID NO: 655844 - DNA, 19 bp, Mus musculus
  siRNA target sequence for AW556797 (NM_134100.2,1227-1245).
cattgcctttttacttatt

SEQ ID NO: 655845 - DNA, 19 bp, Mus musculus
  siRNA target sequence for AW556797 (NM_134100.2,1386-1404).
cgacagcgatcggaaaaca

SEQ ID NO: 655846 - DNA, 19 bp, Mus musculus
  siRNA target sequence for AW556797 (NM_134100.2,1527-1545).
gccctacgcccctgaactt

SEQ ID NO: 655847 - DNA, 19 bp, Mus musculus
  siRNA target sequence for AW556797 (NM_134100.2,1528-1546).
ccctacgcccctgaacttt

SEQ ID NO: 655848 - DNA, 19 bp, Mus musculus
  siRNA target sequence for B130050I23Rik (NM_153536.2,316-334).
cccagatgagctagaacta

SEQ ID NO: 655849 - DNA, 19 bp, Mus musculus
  siRNA target sequence for B130050I23Rik (NM_153536.2,318-336).
cagatgagctagaactact

SEQ ID NO: 655850 - DNA, 19 bp, Mus musculus
  siRNA target sequence for B130050I23Rik (NM_153536.2,382-400).
gtccatgcgctccatgaat

SEQ ID NO: 655851 - DNA, 19 bp, Mus musculus
  siRNA target sequence for B130050I23Rik (NM_153536.2,618-636).
cagatatgcccgtcaaaaa

SEQ ID NO: 655852 - DNA, 19 bp, Mus musculus
  siRNA target sequence for B130050I23Rik (NM_153536.2,661-679).
gtcctccccatgtgagaaa

SEQ ID NO: 655853 - DNA, 19 bp, Mus musculus
  siRNA target sequence for B130050I23Rik (NM_153536.2,933-951).
ccgagctgggactctgtat

SEQ ID NO: 655854 - DNA, 19 bp, Mus musculus
  siRNA target sequence for B130050I23Rik (NM_153536.2,980-998).
cagcttccggacctgaata

SEQ ID NO: 655855 - DNA, 19 bp, Mus musculus
  siRNA target sequence for B130050I23Rik (NM_153536.2,1088-1106).
gccacccgggtctttgata

SEQ ID NO: 655856 - DNA, 19 bp, Mus musculus
  siRNA target sequence for B130050I23Rik (NM_153536.2,1089-1107).
ccacccgggtctttgatat

SEQ ID NO: 655857 - DNA, 19 bp, Mus musculus
  siRNA target sequence for B130050I23Rik (NM_153536.2,1271-1289).
gcttatcaggtcaagtaca

SEQ ID NO: 655858 - DNA, 19 bp, Mus musculus
  siRNA target sequence for B130050I23Rik (NM_153536.2,1272-1290).
cttatcaggtcaagtacaa

SEQ ID NO: 655859 - DNA, 19 bp, Mus musculus
  siRNA target sequence for B130050I23Rik (NM_153536.2,1280-1298).
gtcaagtacaaccctaaaa

SEQ ID NO: 655860 - DNA, 19 bp, Mus musculus
  siRNA target sequence for B130050I23Rik (NM_153536.2,1319-1337).
gagtacgcagctatgaaga

SEQ ID NO: 655861 - DNA, 19 bp, Mus musculus
  siRNA target sequence for B130050I23Rik (NM_153536.2,1324-1342).
cgcagctatgaagagtaaa

SEQ ID NO: 655862 - DNA, 19 bp, Mus musculus
  siRNA target sequence for B130050I23Rik (NM_153536.2,1351-1369).
ggagcagatcgagatcaaa

SEQ ID NO: 655863 - DNA, 19 bp, Mus musculus
  siRNA target sequence for B130050I23Rik (NM_153536.2,1394-1412).
ctcaaacagcggattgaga

SEQ ID NO: 655864 - DNA, 19 bp, Mus musculus
  siRNA target sequence for B130050I23Rik (NM_153536.2,1404-1422).
ggattgagaccctagagaa

SEQ ID NO: 655865 - DNA, 19 bp, Mus musculus
  siRNA target sequence for BC011467 (NM_153060.1,98-116).
cctcgtgcatggatcttct

SEQ ID NO: 655866 - DNA, 19 bp, Mus musculus
  siRNA target sequence for BC011467 (NM_153060.1,99-117).
ctcgtgcatggatcttcta

SEQ ID NO: 655867 - DNA, 19 bp, Mus musculus
  siRNA target sequence for BC011467 (NM_153060.1,336-354).
gtcctgggtggcatgttct

SEQ ID NO: 655868 - DNA, 19 bp, Mus musculus
  siRNA target sequence for BC011467 (NM_153060.1,427-445).
ctcctgcatccgtgaaagt

SEQ ID NO: 655869 - DNA, 19 bp, Mus musculus
  siRNA target sequence for BC011467 (NM_153060.1,429-447).
cctgcatccgtgaaagtct

SEQ ID NO: 655870 - DNA, 19 bp, Mus musculus
  siRNA target sequence for BC014805 (NM_146232.1,305-323).
catcacgatgcctcatgta

SEQ ID NO: 655871 - DNA, 19 bp, Mus musculus
  siRNA target sequence for BC014805 (NM_146232.1,308-326).
cacgatgcctcatgtaata

SEQ ID NO: 655872 - DNA, 19 bp, Mus musculus
  siRNA target sequence for BC014805 (NM_146232.1,310-328).
cgatgcctcatgtaatatt

SEQ ID NO: 655873 - DNA, 19 bp, Mus musculus
  siRNA target sequence for BC014805 (NM_146232.1,314-332).
gcctcatgtaatattggaa

SEQ ID NO: 655874 - DNA, 19 bp, Mus musculus
  siRNA target sequence for BC014805 (NM_146232.1,315-333).
cctcatgtaatattggaaa

SEQ ID NO: 655875 - DNA, 19 bp, Mus musculus
  siRNA target sequence for BC014805 (NM_146232.1,316-334).
ctcatgtaatattggaaaa

SEQ ID NO: 655876 - DNA, 19 bp, Mus musculus
  siRNA target sequence for BC014805 (NM_146232.1,335-353).
cttcactgcagctaacctt

SEQ ID NO: 655877 - DNA, 19 bp, Mus musculus
  siRNA target sequence for BC014805 (NM_146232.1,360-378).
cgctgctgggttcacatta

SEQ ID NO: 655878 - DNA, 19 bp, Mus musculus
  siRNA target sequence for BC014805 (NM_146232.1,362-380).
ctgctgggttcacattatt

SEQ ID NO: 655879 - DNA, 19 bp, Mus musculus
  siRNA target sequence for BC014805 (NM_146232.1,367-385).
gggttcacattattgacaa

SEQ ID NO: 655880 - DNA, 19 bp, Mus musculus
  siRNA target sequence for BC014805 (NM_146232.1,368-386).
ggttcacattattgacaat

SEQ ID NO: 655881 - DNA, 19 bp, Mus musculus
  siRNA target sequence for BC014805 (NM_146232.1,383-401).
caatgacaccaactctaat

SEQ ID NO: 655882 - DNA, 19 bp, Mus musculus
  siRNA target sequence for BC014805 (NM_146232.1,387-405).
gacaccaactctaataata

SEQ ID NO: 655883 - DNA, 19 bp, Mus musculus
  siRNA target sequence for BC014805 (NM_146232.1,392-410).
caactctaataataacagt

SEQ ID NO: 655884 - DNA, 19 bp, Mus musculus
  siRNA target sequence for BC014805 (NM_146232.1,505-523).
ggcatcttctacaatttaa

SEQ ID NO: 655885 - DNA, 19 bp, Mus musculus
  siRNA target sequence for BC014805 (NM_146232.1,506-524).
gcatcttctacaatttaat

SEQ ID NO: 655886 - DNA, 19 bp, Mus musculus
  siRNA target sequence for BC014805 (NM_146232.1,510-528).
cttctacaatttaatggat

SEQ ID NO: 655887 - DNA, 19 bp, Mus musculus
  siRNA target sequence for BC014805 (NM_146232.1,683-701).
cgtgttggcaggacatttt

SEQ ID NO: 655888 - DNA, 19 bp, Mus musculus
  siRNA target sequence for BC014805 (NM_146232.1,831-849).
ctgacagggctttgtatca

SEQ ID NO: 655889 - DNA, 19 bp, Mus musculus
  siRNA target sequence for BC014805 (NM_146232.1,996-1014).
caccttcagctggcaatat

SEQ ID NO: 655890 - DNA, 19 bp, Mus musculus
  siRNA target sequence for BC014805 (NM_146232.1,1020-1038).
ccaatatttgtcttgctta

SEQ ID NO: 655891 - DNA, 19 bp, Mus musculus
  siRNA target sequence for BC014805 (NM_146232.1,1021-1039).
caatatttgtcttgcttat

SEQ ID NO: 655892 - DNA, 19 bp, Mus musculus
  siRNA target sequence for BC014805 (NM_146232.1,1173-1191).
gttgtaagaaccatcatga

SEQ ID NO: 655893 - DNA, 19 bp, Mus musculus
  siRNA target sequence for BC014805 (NM_146232.1,1193-1211).
ggatgagattgcaatacca

SEQ ID NO: 655894 - DNA, 19 bp, Mus musculus
  siRNA target sequence for BC014805 (NM_146232.1,1272-1290).
ctcctgtgccttttgagat

SEQ ID NO: 655895 - DNA, 19 bp, Mus musculus
  siRNA target sequence for BC014805 (NM_146232.1,1279-1297).
gccttttgagatttctaca

SEQ ID NO: 655896 - DNA, 19 bp, Mus musculus
  siRNA target sequence for BC014805 (NM_146232.1,1305-1323).
cctactgtagggatcaaca

SEQ ID NO: 655897 - DNA, 19 bp, Mus musculus
  siRNA target sequence for BC014805 (NM_146232.1,1306-1324).
ctactgtagggatcaacat

SEQ ID NO: 655898 - DNA, 19 bp, Mus musculus
  siRNA target sequence for BC014805 (NM_146232.1,1352-1370).
cttcctaacccaaagtctt

SEQ ID NO: 655899 - DNA, 19 bp, Mus musculus
  siRNA target sequence for BC014805 (NM_146232.1,1401-1419).
cttggagggtttttactga

SEQ ID NO: 655900 - DNA, 19 bp, Mus musculus
  siRNA target sequence for BC014805 (NM_146232.1,1405-1423).
gagggtttttactgaatta

SEQ ID NO: 655901 - DNA, 19 bp, Mus musculus
  siRNA target sequence for BC014805 (NM_146232.1,1545-1563).
ggaagttctgctatgattt

SEQ ID NO: 655902 - DNA, 19 bp, Mus musculus
  siRNA target sequence for BC014805 (NM_146232.1,1546-1564).
gaagttctgctatgattta

SEQ ID NO: 655903 - DNA, 19 bp, Mus musculus
  siRNA target sequence for BC025462 (NM_145946.1,91-109).
ctagcaacagataaaacta

SEQ ID NO: 655904 - DNA, 19 bp, Mus musculus
  siRNA target sequence for BC025462 (NM_145946.1,251-269).
gagcccttaggagatacaa

SEQ ID NO: 655905 - DNA, 19 bp, Mus musculus
  siRNA target sequence for BC025462 (NM_145946.1,254-272).
cccttaggagatacaagat

SEQ ID NO: 655906 - DNA, 19 bp, Mus musculus
  siRNA target sequence for BC025462 (NM_145946.1,256-274).
cttaggagatacaagatat

SEQ ID NO: 655907 - DNA, 19 bp, Mus musculus
  siRNA target sequence for BC025462 (NM_145946.1,305-323).
gagatttgcagcaagatgt

SEQ ID NO: 655908 - DNA, 19 bp, Mus musculus
  siRNA target sequence for BC025462 (NM_145946.1,325-343).
gcatcagagatcataggat

SEQ ID NO: 655909 - DNA, 19 bp, Mus musculus
  siRNA target sequence for BC025462 (NM_145946.1,326-344).
catcagagatcataggatt

SEQ ID NO: 655910 - DNA, 19 bp, Mus musculus
  siRNA target sequence for BC025462 (NM_145946.1,331-349).
gagatcataggattactaa

SEQ ID NO: 655911 - DNA, 19 bp, Mus musculus
  siRNA target sequence for BC025462 (NM_145946.1,371-389).
caggcccattacttgttga

SEQ ID NO: 655912 - DNA, 19 bp, Mus musculus
  siRNA target sequence for BC025462 (NM_145946.1,374-392).
gcccattacttgttgactt

SEQ ID NO: 655913 - DNA, 19 bp, Mus musculus
  siRNA target sequence for BC025462 (NM_145946.1,419-437).
gagaggaccgcctagtgaa

SEQ ID NO: 655914 - DNA, 19 bp, Mus musculus
  siRNA target sequence for BC025462 (NM_145946.1,424-442).
gaccgcctagtgaatggaa

SEQ ID NO: 655915 - DNA, 19 bp, Mus musculus
  siRNA target sequence for BC025462 (NM_145946.1,426-444).
ccgcctagtgaatggaaaa

SEQ ID NO: 655916 - DNA, 19 bp, Mus musculus
  siRNA target sequence for BC025462 (NM_145946.1,427-445).
cgcctagtgaatggaaaat

SEQ ID NO: 655917 - DNA, 19 bp, Mus musculus
  siRNA target sequence for BC025462 (NM_145946.1,430-448).
ctagtgaatggaaaatctt

SEQ ID NO: 655918 - DNA, 19 bp, Mus musculus
  siRNA target sequence for BC025462 (NM_145946.1,646-664).
ctcgtggtggccaaagtgt

SEQ ID NO: 655919 - DNA, 19 bp, Mus musculus
  siRNA target sequence for BC025462 (NM_145946.1,661-679).
gtgttgacgatgttctcaa

SEQ ID NO: 655920 - DNA, 19 bp, Mus musculus
  siRNA target sequence for BC025462 (NM_145946.1,669-687).
gatgttctcaaagttgaat

SEQ ID NO: 655921 - DNA, 19 bp, Mus musculus
  siRNA target sequence for BC025462 (NM_145946.1,672-690).
gttctcaaagttgaatctt

SEQ ID NO: 655922 - DNA, 19 bp, Mus musculus
  siRNA target sequence for BC025462 (NM_145946.1,752-770).
gtgttctggacggaatcat

SEQ ID NO: 655923 - DNA, 19 bp, Mus musculus
  siRNA target sequence for BC025462 (NM_145946.1,867-885).
cgtggaaggcaccgttatt

SEQ ID NO: 655924 - DNA, 19 bp, Mus musculus
  siRNA target sequence for BC025462 (NM_145946.1,880-898).
gttattctgcacatcgtat

SEQ ID NO: 655925 - DNA, 19 bp, Mus musculus
  siRNA target sequence for BC025462 (NM_145946.1,960-978).
gcagggggatcccagtaaa

SEQ ID NO: 655926 - DNA, 19 bp, Mus musculus
  siRNA target sequence for BC025462 (NM_145946.1,961-979).
cagggggatcccagtaaat

SEQ ID NO: 655927 - DNA, 19 bp, Mus musculus
  siRNA target sequence for BC025462 (NM_145946.1,1008-1026).
cctctctctcacgagaata

SEQ ID NO: 655928 - DNA, 19 bp, Mus musculus
  siRNA target sequence for BC025462 (NM_145946.1,1019-1037).
cgagaatacagagatttga

SEQ ID NO: 655929 - DNA, 19 bp, Mus musculus
  siRNA target sequence for BC025462 (NM_145946.1,1098-1116).
cctccaaggctccaagttt

SEQ ID NO: 655930 - DNA, 19 bp, Mus musculus
  siRNA target sequence for BC025462 (NM_145946.1,1171-1189).
gtgaggaacagacttgttt

SEQ ID NO: 655931 - DNA, 19 bp, Mus musculus
  siRNA target sequence for BC025462 (NM_145946.1,1209-1227).
cacctttaattcttcagaa

SEQ ID NO: 655932 - DNA, 19 bp, Mus musculus
  siRNA target sequence for BC026439 (NM_172378.1,498-516).
gtatgatcatccttctcaa

SEQ ID NO: 655933 - DNA, 19 bp, Mus musculus
  siRNA target sequence for BC026439 (NM_172378.1,509-527).
cttctcaacattttatcct

SEQ ID NO: 655934 - DNA, 19 bp, Mus musculus
  siRNA target sequence for BC026439 (NM_172378.1,529-547).
ggtgttatcccctcatgat

SEQ ID NO: 655935 - DNA, 19 bp, Mus musculus
  siRNA target sequence for BC026439 (NM_172378.1,542-560).
catgatgtcctggagaatt

SEQ ID NO: 655936 - DNA, 19 bp, Mus musculus
  siRNA target sequence for BC026439 (NM_172378.1,578-596).
gctcatcactgtagtataa

SEQ ID NO: 655937 - DNA, 19 bp, Mus musculus
  siRNA target sequence for BC026439 (NM_172378.1,598-616).
ccttgacaattcaagatct

SEQ ID NO: 655938 - DNA, 19 bp, Mus musculus
  siRNA target sequence for BC026439 (NM_172378.1,604-622).
caattcaagatctgaagtt

SEQ ID NO: 655939 - DNA, 19 bp, Mus musculus
  siRNA target sequence for BC026439 (NM_172378.1,642-660).
ctactgaagatttgatgaa

SEQ ID NO: 655940 - DNA, 19 bp, Mus musculus
  siRNA target sequence for BC026439 (NM_172378.1,671-689).
ccaatgggcccaaatcaga

SEQ ID NO: 655941 - DNA, 19 bp, Mus musculus
  siRNA target sequence for BC026439 (NM_172378.1,672-690).
caatgggcccaaatcagaa

SEQ ID NO: 655942 - DNA, 19 bp, Mus musculus
  siRNA target sequence for BC026439 (NM_172378.1,698-716).
caatgccgacgctttaggt

SEQ ID NO: 655943 - DNA, 19 bp, Mus musculus
  siRNA target sequence for BC026439 (NM_172378.1,718-736).
cacccaatggcaattttta

SEQ ID NO: 655944 - DNA, 19 bp, Mus musculus
  siRNA target sequence for BC026439 (NM_172378.1,720-738).
cccaatggcaatttttaga

SEQ ID NO: 655945 - DNA, 19 bp, Mus musculus
  siRNA target sequence for BC026439 (NM_172378.1,726-744).
ggcaatttttagattccaa

SEQ ID NO: 655946 - DNA, 19 bp, Mus musculus
  siRNA target sequence for BC026439 (NM_172378.1,737-755).
gattccaacatatcaactt

SEQ ID NO: 655947 - DNA, 19 bp, Mus musculus
  siRNA target sequence for BC026439 (NM_172378.1,741-759).
ccaacatatcaacttttaa

SEQ ID NO: 655948 - DNA, 19 bp, Mus musculus
  siRNA target sequence for BC026439 (NM_172378.1,775-793).
gactgagccgtgtctagat

SEQ ID NO: 655949 - DNA, 19 bp, Mus musculus
  siRNA target sequence for BC026439 (NM_172378.1,841-859).
gtgggatttagtatgtgat

SEQ ID NO: 655950 - DNA, 19 bp, Mus musculus
  siRNA target sequence for BC026439 (NM_172378.1,891-909).
cgtctttggcaggacattt

SEQ ID NO: 655951 - DNA, 19 bp, Mus musculus
  siRNA target sequence for BC026439 (NM_172378.1,910-928).
ggtatcttgtcctctatct

SEQ ID NO: 655952 - DNA, 19 bp, Mus musculus
  siRNA target sequence for BC026439 (NM_172378.1,918-936).
gtcctctatctggcattat

SEQ ID NO: 655953 - DNA, 19 bp, Mus musculus
  siRNA target sequence for BC026439 (NM_172378.1,954-972).
ggaagccattgttgatgta

SEQ ID NO: 655954 - DNA, 19 bp, Mus musculus
  siRNA target sequence for BC026439 (NM_172378.1,1008-1026).
gtgcctttgcccccaattt

SEQ ID NO: 655955 - DNA, 19 bp, Mus musculus
  siRNA target sequence for BC026439 (NM_172378.1,1010-1028).
gcctttgcccccaatttct

SEQ ID NO: 655956 - DNA, 19 bp, Mus musculus
  siRNA target sequence for BC026439 (NM_172378.1,1019-1037).
cccaatttctccgtttact

SEQ ID NO: 655957 - DNA, 19 bp, Mus musculus
  siRNA target sequence for BC026439 (NM_172378.1,1021-1039).
caatttctccgtttactgt

SEQ ID NO: 655958 - DNA, 19 bp, Mus musculus
  siRNA target sequence for BC026439 (NM_172378.1,1067-1085).
caaagtactattttgatca

SEQ ID NO: 655959 - DNA, 19 bp, Mus musculus
  siRNA target sequence for BC026439 (NM_172378.1,1123-1141).
gtggcaccccacaatcata

SEQ ID NO: 655960 - DNA, 19 bp, Mus musculus
  siRNA target sequence for BC026439 (NM_172378.1,1149-1167).
gtggactgttcaacagtat

SEQ ID NO: 655961 - DNA, 19 bp, Mus musculus
  siRNA target sequence for BC026439 (NM_172378.1,1184-1202).
gggggactagcctatgtga

SEQ ID NO: 655962 - DNA, 19 bp, Mus musculus
  siRNA target sequence for BC026439 (NM_172378.1,1185-1203).
ggggactagcctatgtgat

SEQ ID NO: 655963 - DNA, 19 bp, Mus musculus
  siRNA target sequence for BC026439 (NM_172378.1,1186-1204).
gggactagcctatgtgatt

SEQ ID NO: 655964 - DNA, 19 bp, Mus musculus
  siRNA target sequence for BC026439 (NM_172378.1,1187-1205).
ggactagcctatgtgattt

SEQ ID NO: 655965 - DNA, 19 bp, Mus musculus
  siRNA target sequence for BC026439 (NM_172378.1,1206-1224).
cggattggcacttacttca

SEQ ID NO: 655966 - DNA, 19 bp, Mus musculus
  siRNA target sequence for BC026439 (NM_172378.1,1207-1225).
ggattggcacttacttcaa

SEQ ID NO: 655967 - DNA, 19 bp, Mus musculus
  siRNA target sequence for BC026439 (NM_172378.1,1288-1306).
ccggtggctcataatcact

SEQ ID NO: 655968 - DNA, 19 bp, Mus musculus
  siRNA target sequence for BC026439 (NM_172378.1,1327-1345).
gaaggaactccagagaatt

SEQ ID NO: 655969 - DNA, 19 bp, Mus musculus
  siRNA target sequence for BC026439 (NM_172378.1,1339-1357).
gagaattgcctccatcaat

SEQ ID NO: 655970 - DNA, 19 bp, Mus musculus
  siRNA target sequence for BC026439 (NM_172378.1,1363-1381).
gaaaggcattgcacaaaat

SEQ ID NO: 655971 - DNA, 19 bp, Mus musculus
  siRNA target sequence for BC026439 (NM_172378.1,1367-1385).
ggcattgcacaaaatctaa

SEQ ID NO: 655972 - DNA, 19 bp, Mus musculus
  siRNA target sequence for BC026439 (NM_172378.1,1393-1411).
ggacttgcgatccaaactt

SEQ ID NO: 655973 - DNA, 19 bp, Mus musculus
  siRNA target sequence for BC026439 (NM_172378.1,1394-1412).
gacttgcgatccaaactta

SEQ ID NO: 655974 - DNA, 19 bp, Mus musculus
  siRNA target sequence for BC026439 (NM_172378.1,1399-1417).
gcgatccaaacttaagaaa

SEQ ID NO: 655975 - DNA, 19 bp, Mus musculus
  siRNA target sequence for BC026439 (NM_172378.1,1404-1422).
ccaaacttaagaaagatgt

SEQ ID NO: 655976 - DNA, 19 bp, Mus musculus
  siRNA target sequence for BC026439 (NM_172378.1,1470-1488).
ccttgatacgtaaaatagt

SEQ ID NO: 655977 - DNA, 19 bp, Mus musculus
  siRNA target sequence for BC026439 (NM_172378.1,1494-1512).
cgaattccagtttactttt

SEQ ID NO: 655978 - DNA, 19 bp, Mus musculus
  siRNA target sequence for BC026439 (NM_172378.1,1573-1591).
gttcttgacccagattttt

SEQ ID NO: 655979 - DNA, 19 bp, Mus musculus
  siRNA target sequence for BC026439 (NM_172378.1,1600-1618).
gatagacgtgcccagtaaa

SEQ ID NO: 655980 - DNA, 19 bp, Mus musculus
  siRNA target sequence for BC026439 (NM_172378.1,1614-1632).
gtaaatcactcacatattt

SEQ ID NO: 655981 - DNA, 19 bp, Mus musculus
  siRNA target sequence for BC026439 (NM_172378.1,1646-1664).
gtaagccgtcgtcctttaa

SEQ ID NO: 655982 - DNA, 19 bp, Mus musculus
  siRNA target sequence for BC026439 (NM_172378.1,1651-1669).
ccgtcgtcctttaattgct

SEQ ID NO: 655983 - DNA, 19 bp, Mus musculus
  siRNA target sequence for BC026439 (NM_172378.1,1652-1670).
cgtcgtcctttaattgctt

SEQ ID NO: 655984 - DNA, 19 bp, Mus musculus
  siRNA target sequence for BC026439 (NM_172378.1,1653-1671).
gtcgtcctttaattgcttt

SEQ ID NO: 655985 - DNA, 19 bp, Mus musculus
  siRNA target sequence for BC026439 (NM_172378.1,1686-1704).
ctggaagttgtattaccat

SEQ ID NO: 655986 - DNA, 19 bp, Mus musculus
  siRNA target sequence for BC026439 (NM_172378.1,1733-1751).
gtcctgcgtactattattt

SEQ ID NO: 655987 - DNA, 19 bp, Mus musculus
  siRNA target sequence for BC026439 (NM_172378.1,1736-1754).
ctgcgtactattattttca

SEQ ID NO: 655988 - DNA, 19 bp, Mus musculus
  siRNA target sequence for BC026439 (NM_172378.1,1738-1756).
gcgtactattattttcatt

SEQ ID NO: 655989 - DNA, 19 bp, Mus musculus
  siRNA target sequence for BC026439 (NM_172378.1,1775-1793).
gcagctttcacttgtataa

SEQ ID NO: 655990 - DNA, 19 bp, Mus musculus
  siRNA target sequence for BC026439 (NM_172378.1,1778-1796).
gctttcacttgtataagca

SEQ ID NO: 655991 - DNA, 19 bp, Mus musculus
  siRNA target sequence for BC026439 (NM_172378.1,1795-1813).
cacaacctacatcaatgaa

SEQ ID NO: 655992 - DNA, 19 bp, Mus musculus
  siRNA target sequence for BC026439 (NM_172378.1,1797-1815).
caacctacatcaatgaact

SEQ ID NO: 655993 - DNA, 19 bp, Mus musculus
  siRNA target sequence for BC026439 (NM_172378.1,1831-1849).
caggtcaactctaaatggt

SEQ ID NO: 655994 - DNA, 19 bp, Mus musculus
  siRNA target sequence for BC026439 (NM_172378.1,1836-1854).
caactctaaatggtgtttt

SEQ ID NO: 655995 - DNA, 19 bp, Mus musculus
  siRNA target sequence for BC026439 (NM_172378.1,1892-1910).
ctaacacttgctactagaa

SEQ ID NO: 655996 - DNA, 19 bp, Mus musculus
  siRNA target sequence for BC026439 (NM_172378.1,1952-1970).
cccatcgtggcaacaatca

SEQ ID NO: 655997 - DNA, 19 bp, Mus musculus
  siRNA target sequence for BC026439 (NM_172378.1,1965-1983).
caatcagcatcctctttct

SEQ ID NO: 655998 - DNA, 19 bp, Mus musculus
  siRNA target sequence for BC026439 (NM_172378.1,2004-2022).
cacatactgacattatcaa

SEQ ID NO: 655999 - DNA, 19 bp, Mus musculus
  siRNA target sequence for BC026439 (NM_172378.1,2043-2061).
gattgatgagcaaaaacat

SEQ ID NO: 656000 - DNA, 19 bp, Mus musculus
  siRNA target sequence for BC027556 (NM_153558.1,219-237).
gagaccacagttgtattct

SEQ ID NO: 656001 - DNA, 19 bp, Mus musculus
  siRNA target sequence for BC027556 (NM_153558.1,246-264).
ggtcattgccgtgagttta

SEQ ID NO: 656002 - DNA, 19 bp, Mus musculus
  siRNA target sequence for BC027556 (NM_153558.1,249-267).
cattgccgtgagtttaaat

SEQ ID NO: 656003 - DNA, 19 bp, Mus musculus
  siRNA target sequence for BC027556 (NM_153558.1,253-271).
gccgtgagtttaaattcgt

SEQ ID NO: 656004 - DNA, 19 bp, Mus musculus
  siRNA target sequence for BC027556 (NM_153558.1,295-313).
gcaaatacaccgcttttca

SEQ ID NO: 656005 - DNA, 19 bp, Mus musculus
  siRNA target sequence for BC027556 (NM_153558.1,489-507).
ctccgactggaaaacatgt

SEQ ID NO: 656006 - DNA, 19 bp, Mus musculus
  siRNA target sequence for BC027556 (NM_153558.1,491-509).
ccgactggaaaacatgttt

SEQ ID NO: 656007 - DNA, 19 bp, Mus musculus
  siRNA target sequence for BC027556 (NM_153558.1,518-536).
gatcggagataaatgtgtt

SEQ ID NO: 656008 - DNA, 19 bp, Mus musculus
  siRNA target sequence for BC027556 (NM_153558.1,521-539).
cggagataaatgtgttgaa

SEQ ID NO: 656009 - DNA, 19 bp, Mus musculus
  siRNA target sequence for BC049989 (NM_173762.3,71-89).
gagaagccacccacattta

SEQ ID NO: 656010 - DNA, 19 bp, Mus musculus
  siRNA target sequence for BC049989 (NM_173762.3,81-99).
ccacatttactggaaaaca

SEQ ID NO: 656011 - DNA, 19 bp, Mus musculus
  siRNA target sequence for BC049989 (NM_173762.3,98-116).
cagataaaaacgctattta

SEQ ID NO: 656012 - DNA, 19 bp, Mus musculus
  siRNA target sequence for BC049989 (NM_173762.3,120-138).
gagcgatgggggtaaatct

SEQ ID NO: 656013 - DNA, 19 bp, Mus musculus
  siRNA target sequence for BC049989 (NM_173762.3,122-140).
gcgatgggggtaaatcttt

SEQ ID NO: 656014 - DNA, 19 bp, Mus musculus
  siRNA target sequence for BC049989 (NM_173762.3,127-145).
gggggtaaatctttccaat

SEQ ID NO: 656015 - DNA, 19 bp, Mus musculus
  siRNA target sequence for BC049989 (NM_173762.3,128-146).
ggggtaaatctttccaatt

SEQ ID NO: 656016 - DNA, 19 bp, Mus musculus
  siRNA target sequence for BC049989 (NM_173762.3,129-147).
gggtaaatctttccaattt

SEQ ID NO: 656017 - DNA, 19 bp, Mus musculus
  siRNA target sequence for BC049989 (NM_173762.3,169-187).
gaaaccacgaagaatgtgt

SEQ ID NO: 656018 - DNA, 19 bp, Mus musculus
  siRNA target sequence for BC049989 (NM_173762.3,229-247).
ggctacaatggtactatat

SEQ ID NO: 656019 - DNA, 19 bp, Mus musculus
  siRNA target sequence for BC049989 (NM_173762.3,342-360).
ccaaaggataaagaagttt

SEQ ID NO: 656020 - DNA, 19 bp, Mus musculus
  siRNA target sequence for BC049989 (NM_173762.3,376-394).
ctcctacgagtttcttaca

SEQ ID NO: 656021 - DNA, 19 bp, Mus musculus
  siRNA target sequence for BC049989 (NM_173762.3,463-481).
cgggaagacaccaatagga

SEQ ID NO: 656022 - DNA, 19 bp, Mus musculus
  siRNA target sequence for BC049989 (NM_173762.3,469-487).
gacaccaataggactgtat

SEQ ID NO: 656023 - DNA, 19 bp, Mus musculus
  siRNA target sequence for BC049989 (NM_173762.3,473-491).
ccaataggactgtatatgt

SEQ ID NO: 656024 - DNA, 19 bp, Mus musculus
  siRNA target sequence for BC049989 (NM_173762.3,501-519).
cacagaagaagtggtttat

SEQ ID NO: 656025 - DNA, 19 bp, Mus musculus
  siRNA target sequence for BC049989 (NM_173762.3,523-541).
gcagaaatggctttgaaat

SEQ ID NO: 656026 - DNA, 19 bp, Mus musculus
  siRNA target sequence for BC049989 (NM_173762.3,542-560).
ggctcgcaacaggagaaaa

SEQ ID NO: 656027 - DNA, 19 bp, Mus musculus
  siRNA target sequence for BC049989 (NM_173762.3,543-561).
gctcgcaacaggagaaaaa

SEQ ID NO: 656028 - DNA, 19 bp, Mus musculus
  siRNA target sequence for BC049989 (NM_173762.3,544-562).
ctcgcaacaggagaaaaaa

SEQ ID NO: 656029 - DNA, 19 bp, Mus musculus
  siRNA target sequence for BC049989 (NM_173762.3,566-584).
gacattatggaataaccaa

SEQ ID NO: 656030 - DNA, 19 bp, Mus musculus
  siRNA target sequence for BC049989 (NM_173762.3,599-617).
gcagtcgttctcatacgat

SEQ ID NO: 656031 - DNA, 19 bp, Mus musculus
  siRNA target sequence for BC049989 (NM_173762.3,600-618).
cagtcgttctcatacgatt

SEQ ID NO: 656032 - DNA, 19 bp, Mus musculus
  siRNA target sequence for BC049989 (NM_173762.3,602-620).
gtcgttctcatacgatttt

SEQ ID NO: 656033 - DNA, 19 bp, Mus musculus
  siRNA target sequence for BC049989 (NM_173762.3,604-622).
cgttctcatacgattttta

SEQ ID NO: 656034 - DNA, 19 bp, Mus musculus
  siRNA target sequence for BC049989 (NM_173762.3,608-626).
ctcatacgatttttaggat

SEQ ID NO: 656035 - DNA, 19 bp, Mus musculus
  siRNA target sequence for BC049989 (NM_173762.3,665-683).
gcgatggctccgtcaaagt

SEQ ID NO: 656036 - DNA, 19 bp, Mus musculus
  siRNA target sequence for BC049989 (NM_173762.3,667-685).
gatggctccgtcaaagtgt

SEQ ID NO: 656037 - DNA, 19 bp, Mus musculus
  siRNA target sequence for BC049989 (NM_173762.3,740-758).
ctgaaggtgtgcgattgaa

SEQ ID NO: 656038 - DNA, 19 bp, Mus musculus
  siRNA target sequence for BC049989 (NM_173762.3,829-847).
gttgggggtttcataaatt

SEQ ID NO: 656039 - DNA, 19 bp, Mus musculus
  siRNA target sequence for BC049989 (NM_173762.3,849-867).
ccgagatagcaaattgaca

SEQ ID NO: 656040 - DNA, 19 bp, Mus musculus
  siRNA target sequence for BC049989 (NM_173762.3,857-875).
gcaaattgacacgaattct

SEQ ID NO: 656041 - DNA, 19 bp, Mus musculus
  siRNA target sequence for BC049989 (NM_173762.3,858-876).
caaattgacacgaattctt

SEQ ID NO: 656042 - DNA, 19 bp, Mus musculus
  siRNA target sequence for BC049989 (NM_173762.3,868-886).
cgaattcttcagaattcct

SEQ ID NO: 656043 - DNA, 19 bp, Mus musculus
  siRNA target sequence for BC049989 (NM_173762.3,898-916).
gccaagacgcgcatcatct

SEQ ID NO: 656044 - DNA, 19 bp, Mus musculus
  siRNA target sequence for BC049989 (NM_173762.3,987-1005).
gaagaatactccttacgtt

SEQ ID NO: 656045 - DNA, 19 bp, Mus musculus
  siRNA target sequence for BC049989 (NM_173762.3,990-1008).
gaatactccttacgttaat

SEQ ID NO: 656046 - DNA, 19 bp, Mus musculus
  siRNA target sequence for BC049989 (NM_173762.3,1024-1042).
gaagctctcttgaaaagat

SEQ ID NO: 656047 - DNA, 19 bp, Mus musculus
  siRNA target sequence for BC049989 (NM_173762.3,1051-1069).
gaaatagcggatcttagaa

SEQ ID NO: 656048 - DNA, 19 bp, Mus musculus
  siRNA target sequence for BC049989 (NM_173762.3,1072-1090).
caattagaggaggtaaata

SEQ ID NO: 656049 - DNA, 19 bp, Mus musculus
  siRNA target sequence for BC049989 (NM_173762.3,1135-1153).
cttctggatgaaaaagact

SEQ ID NO: 656050 - DNA, 19 bp, Mus musculus
  siRNA target sequence for BC049989 (NM_173762.3,1201-1219).
ctggtgacgtcatcttcta

SEQ ID NO: 656051 - DNA, 19 bp, Mus musculus
  siRNA target sequence for BC049989 (NM_173762.3,1265-1283).
cttggtgctatggcaaaat

SEQ ID NO: 656052 - DNA, 19 bp, Mus musculus
  siRNA target sequence for BC049989 (NM_173762.3,1268-1286).
ggtgctatggcaaaatgaa

SEQ ID NO: 656053 - DNA, 19 bp, Mus musculus
  siRNA target sequence for BC049989 (NM_173762.3,1315-1333).
gtcccgacaagcataacaa

SEQ ID NO: 656054 - DNA, 19 bp, Mus musculus
  siRNA target sequence for BC049989 (NM_173762.3,1317-1335).
cccgacaagcataacaaca

SEQ ID NO: 656055 - DNA, 19 bp, Mus musculus
  siRNA target sequence for BC049989 (NM_173762.3,1318-1336).
ccgacaagcataacaacaa

SEQ ID NO: 656056 - DNA, 19 bp, Mus musculus
  siRNA target sequence for BC049989 (NM_173762.3,1320-1338).
gacaagcataacaacaaga

SEQ ID NO: 656057 - DNA, 19 bp, Mus musculus
  siRNA target sequence for BC049989 (NM_173762.3,1326-1344).
cataacaacaagaaaacgt

SEQ ID NO: 656058 - DNA, 19 bp, Mus musculus
  siRNA target sequence for BC049989 (NM_173762.3,1402-1420).
gcctcttccgagtttgaaa

SEQ ID NO: 656059 - DNA, 19 bp, Mus musculus
  siRNA target sequence for BC049989 (NM_173762.3,1403-1421).
cctcttccgagtttgaaat

SEQ ID NO: 656060 - DNA, 19 bp, Mus musculus
  siRNA target sequence for BC049989 (NM_173762.3,1409-1427).
ccgagtttgaaatgttgaa

SEQ ID NO: 656061 - DNA, 19 bp, Mus musculus
  siRNA target sequence for BC049989 (NM_173762.3,1410-1428).
cgagtttgaaatgttgaat

SEQ ID NO: 656062 - DNA, 19 bp, Mus musculus
  siRNA target sequence for BC049989 (NM_173762.3,1475-1493).
cgctcctaagcgaggaaaa

SEQ ID NO: 656063 - DNA, 19 bp, Mus musculus
  siRNA target sequence for BC049989 (NM_173762.3,1476-1494).
gctcctaagcgaggaaaat

SEQ ID NO: 656064 - DNA, 19 bp, Mus musculus
  siRNA target sequence for BC049989 (NM_173762.3,1479-1497).
cctaagcgaggaaaatgta

SEQ ID NO: 656065 - DNA, 19 bp, Mus musculus
  siRNA target sequence for BC049989 (NM_173762.3,1502-1520).
gtgagttgaactcacttaa

SEQ ID NO: 656066 - DNA, 19 bp, Mus musculus
  siRNA target sequence for BC049989 (NM_173762.3,1514-1532).
cacttaatgctcaatataa

SEQ ID NO: 656067 - DNA, 19 bp, Mus musculus
  siRNA target sequence for BC049989 (NM_173762.3,1668-1686).
gcatgaagtttccaactta

SEQ ID NO: 656068 - DNA, 19 bp, Mus musculus
  siRNA target sequence for BC049989 (NM_173762.3,1675-1693).
gtttccaacttaaagaatt

SEQ ID NO: 656069 - DNA, 19 bp, Mus musculus
  siRNA target sequence for BC049989 (NM_173762.3,1704-1722).
cgcagaagaatataatcaa

SEQ ID NO: 656070 - DNA, 19 bp, Mus musculus
  siRNA target sequence for BC049989 (NM_173762.3,1735-1753).
gacctaagttcaaaagtga

SEQ ID NO: 656071 - DNA, 19 bp, Mus musculus
  siRNA target sequence for BC049989 (NM_173762.3,1788-1806).
cctgcaggaatacatagat

SEQ ID NO: 656072 - DNA, 19 bp, Mus musculus
  siRNA target sequence for BC049989 (NM_173762.3,1830-1848).
gatagacctgtcatacaca

SEQ ID NO: 656073 - DNA, 19 bp, Mus musculus
  siRNA target sequence for BC049989 (NM_173762.3,1912-1930).
cttgacgctaagaaagagt

SEQ ID NO: 656074 - DNA, 19 bp, Mus musculus
  siRNA target sequence for BC049989 (NM_173762.3,1927-1945).
gagtcagccttccttagaa

SEQ ID NO: 656075 - DNA, 19 bp, Mus musculus
  siRNA target sequence for BC049989 (NM_173762.3,2065-2083).
ctggataaggaattacagt

SEQ ID NO: 656076 - DNA, 19 bp, Mus musculus
  siRNA target sequence for BC049989 (NM_173762.3,2122-2140).
gatggcaaaggtttactgt

SEQ ID NO: 656077 - DNA, 19 bp, Mus musculus
  siRNA target sequence for BC049989 (NM_173762.3,2126-2144).
gcaaaggtttactgtctaa

SEQ ID NO: 656078 - DNA, 19 bp, Mus musculus
  siRNA target sequence for BC049989 (NM_173762.3,2154-2172).
ggagaaaaggattactgat

SEQ ID NO: 656079 - DNA, 19 bp, Mus musculus
  siRNA target sequence for BC049989 (NM_173762.3,2163-2181).
gattactgatctccaaaaa

SEQ ID NO: 656080 - DNA, 19 bp, Mus musculus
  siRNA target sequence for BC049989 (NM_173762.3,2170-2188).
gatctccaaaaagaactaa

SEQ ID NO: 656081 - DNA, 19 bp, Mus musculus
  siRNA target sequence for BC049989 (NM_173762.3,2232-2250).
cttgctgtcggagttgaaa

SEQ ID NO: 656082 - DNA, 19 bp, Mus musculus
  siRNA target sequence for BC049989 (NM_173762.3,2238-2256).
gtcggagttgaaatcttta

SEQ ID NO: 656083 - DNA, 19 bp, Mus musculus
  siRNA target sequence for BC049989 (NM_173762.3,2305-2323).
gagctccatataataacca

SEQ ID NO: 656084 - DNA, 19 bp, Mus musculus
  siRNA target sequence for BC049989 (NM_173762.3,2345-2363).
ctgaaatggctcataaaga

SEQ ID NO: 656085 - DNA, 19 bp, Mus musculus
  siRNA target sequence for BC049989 (NM_173762.3,2622-2640).
gcttgagcagaaaacagtt

SEQ ID NO: 656086 - DNA, 19 bp, Mus musculus
  siRNA target sequence for BC049989 (NM_173762.3,2643-2661).
gggtcaagaaaggctaaat

SEQ ID NO: 656087 - DNA, 19 bp, Mus musculus
  siRNA target sequence for BC049989 (NM_173762.3,2644-2662).
ggtcaagaaaggctaaata

SEQ ID NO: 656088 - DNA, 19 bp, Mus musculus
  siRNA target sequence for BC049989 (NM_173762.3,2645-2663).
gtcaagaaaggctaaataa

SEQ ID NO: 656089 - DNA, 19 bp, Mus musculus
  siRNA target sequence for BC049989 (NM_173762.3,2670-2688).
ggcgctgagagaagagtta

SEQ ID NO: 656090 - DNA, 19 bp, Mus musculus
  siRNA target sequence for BC049989 (NM_173762.3,2776-2794).
gccttaacccaagaaaaga

SEQ ID NO: 656091 - DNA, 19 bp, Mus musculus
  siRNA target sequence for BC049989 (NM_173762.3,2857-2875).
caggacactgtgaacatga

SEQ ID NO: 656092 - DNA, 19 bp, Mus musculus
  siRNA target sequence for BC049989 (NM_173762.3,2923-2941).
caacaccaagaaacaatta

SEQ ID NO: 656093 - DNA, 19 bp, Mus musculus
  siRNA target sequence for BC049989 (NM_173762.3,2965-2983).
gaggaactatccgataatt

SEQ ID NO: 656094 - DNA, 19 bp, Mus musculus
  siRNA target sequence for BC049989 (NM_173762.3,2975-2993).
ccgataatttgcatgtaaa

SEQ ID NO: 656095 - DNA, 19 bp, Mus musculus
  siRNA target sequence for BC049989 (NM_173762.3,3038-3056).
gcatagatgaacagaatga

SEQ ID NO: 656096 - DNA, 19 bp, Mus musculus
  siRNA target sequence for BC049989 (NM_173762.3,3057-3075).
gagtgcccacacattgctt

SEQ ID NO: 656097 - DNA, 19 bp, Mus musculus
  siRNA target sequence for BC049989 (NM_173762.3,3077-3095).
gtggtggtaaggacaatga

SEQ ID NO: 656098 - DNA, 19 bp, Mus musculus
  siRNA target sequence for BC049989 (NM_173762.3,3156-3174).
gacactggaaagtgttaga

SEQ ID NO: 656099 - DNA, 19 bp, Mus musculus
  siRNA target sequence for BC049989 (NM_173762.3,3207-3225).
ggaaaatatcgaaatgagt

SEQ ID NO: 656100 - DNA, 19 bp, Mus musculus
  siRNA target sequence for BC049989 (NM_173762.3,3237-3255).
ggaagagttaagaattctt

SEQ ID NO: 656101 - DNA, 19 bp, Mus musculus
  siRNA target sequence for BC049989 (NM_173762.3,3332-3350).
ccaggacgcaggaaagatt

SEQ ID NO: 656102 - DNA, 19 bp, Mus musculus
  siRNA target sequence for BC049989 (NM_173762.3,3408-3426).
gcaacttcttagtacacaa

SEQ ID NO: 656103 - DNA, 19 bp, Mus musculus
  siRNA target sequence for BC049989 (NM_173762.3,3633-3651).
gaagcaacttaaagaatat

SEQ ID NO: 656104 - DNA, 19 bp, Mus musculus
  siRNA target sequence for BC049989 (NM_173762.3,3637-3655).
caacttaaagaatatgcaa

SEQ ID NO: 656105 - DNA, 19 bp, Mus musculus
  siRNA target sequence for BC049989 (NM_173762.3,3699-3717).
cattgcccacgcgaatcta

SEQ ID NO: 656106 - DNA, 19 bp, Mus musculus
  siRNA target sequence for BC049989 (NM_173762.3,3704-3722).
cccacgcgaatctaaaaga

SEQ ID NO: 656107 - DNA, 19 bp, Mus musculus
  siRNA target sequence for BC049989 (NM_173762.3,3706-3724).
cacgcgaatctaaaagagt

SEQ ID NO: 656108 - DNA, 19 bp, Mus musculus
  siRNA target sequence for BC049989 (NM_173762.3,3878-3896).
ggcacagtgcagaaaaagt

SEQ ID NO: 656109 - DNA, 19 bp, Mus musculus
  siRNA target sequence for BC049989 (NM_173762.3,3945-3963).
gacaatggagggcatagaa

SEQ ID NO: 656110 - DNA, 19 bp, Mus musculus
  siRNA target sequence for BC049989 (NM_173762.3,3947-3965).
caatggagggcatagaaat

SEQ ID NO: 656111 - DNA, 19 bp, Mus musculus
  siRNA target sequence for BC049989 (NM_173762.3,4103-4121).
gaactttggctaatcatct

SEQ ID NO: 656112 - DNA, 19 bp, Mus musculus
  siRNA target sequence for BC049989 (NM_173762.3,4106-4124).
ctttggctaatcatctaga

SEQ ID NO: 656113 - DNA, 19 bp, Mus musculus
  siRNA target sequence for BC049989 (NM_173762.3,4110-4128).
ggctaatcatctagaaact

SEQ ID NO: 656114 - DNA, 19 bp, Mus musculus
  siRNA target sequence for BC049989 (NM_173762.3,4148-4166).
ctcgttgttgcctgaaaga

SEQ ID NO: 656115 - DNA, 19 bp, Mus musculus
  siRNA target sequence for BC049989 (NM_173762.3,4176-4194).
caagattgacaccctaata

SEQ ID NO: 656116 - DNA, 19 bp, Mus musculus
  siRNA target sequence for BC049989 (NM_173762.3,4227-4245).
cagtgtgcgaggacaacta

SEQ ID NO: 656117 - DNA, 19 bp, Mus musculus
  siRNA target sequence for BC049989 (NM_173762.3,4299-4317).
ggaagaacttactaggaaa

SEQ ID NO: 656118 - DNA, 19 bp, Mus musculus
  siRNA target sequence for BC049989 (NM_173762.3,4411-4429).
gacaggctgcggctgaata

SEQ ID NO: 656119 - DNA, 19 bp, Mus musculus
  siRNA target sequence for BC049989 (NM_173762.3,4415-4433).
ggctgcggctgaatacaca

SEQ ID NO: 656120 - DNA, 19 bp, Mus musculus
  siRNA target sequence for BC049989 (NM_173762.3,4416-4434).
gctgcggctgaatacacaa

SEQ ID NO: 656121 - DNA, 19 bp, Mus musculus
  siRNA target sequence for BC049989 (NM_173762.3,4505-4523).
ctcttcacgtggaaagtga

SEQ ID NO: 656122 - DNA, 19 bp, Mus musculus
  siRNA target sequence for BC049989 (NM_173762.3,4575-4593).
gaacaaagagtatgaatgt

SEQ ID NO: 656123 - DNA, 19 bp, Mus musculus
  siRNA target sequence for BC049989 (NM_173762.3,4592-4610).
gtcttgcaatgaagactat

SEQ ID NO: 656124 - DNA, 19 bp, Mus musculus
  siRNA target sequence for BC049989 (NM_173762.3,4634-4652).
gtgaaatggaccacttgaa

SEQ ID NO: 656125 - DNA, 19 bp, Mus musculus
  siRNA target sequence for BC049989 (NM_173762.3,4710-4728).
cttgactcaaagacttcat

SEQ ID NO: 656126 - DNA, 19 bp, Mus musculus
  siRNA target sequence for BC049989 (NM_173762.3,4840-4858).
gtaactaaaggtatggaaa

SEQ ID NO: 656127 - DNA, 19 bp, Mus musculus
  siRNA target sequence for BC049989 (NM_173762.3,4910-4928).
ctatcaacaagctcagaaa

SEQ ID NO: 656128 - DNA, 19 bp, Mus musculus
  siRNA target sequence for BC049989 (NM_173762.3,4970-4988).
gggacctaaagcacacaaa

SEQ ID NO: 656129 - DNA, 19 bp, Mus musculus
  siRNA target sequence for BC049989 (NM_173762.3,4971-4989).
ggacctaaagcacacaaat

SEQ ID NO: 656130 - DNA, 19 bp, Mus musculus
  siRNA target sequence for BC049989 (NM_173762.3,5154-5172).
gactcagcaacttaacgaa

SEQ ID NO: 656131 - DNA, 19 bp, Mus musculus
  siRNA target sequence for BC049989 (NM_173762.3,5156-5174).
ctcagcaacttaacgaaaa

SEQ ID NO: 656132 - DNA, 19 bp, Mus musculus
  siRNA target sequence for BC049989 (NM_173762.3,5160-5178).
gcaacttaacgaaaacctt

SEQ ID NO: 656133 - DNA, 19 bp, Mus musculus
  siRNA target sequence for BC049989 (NM_173762.3,5161-5179).
caacttaacgaaaacctta

SEQ ID NO: 656134 - DNA, 19 bp, Mus musculus
  siRNA target sequence for BC049989 (NM_173762.3,5189-5207).
cacttgtcactaaggaaaa

SEQ ID NO: 656135 - DNA, 19 bp, Mus musculus
  siRNA target sequence for BC049989 (NM_173762.3,5202-5220).
ggaaaatgatagcctaaaa

SEQ ID NO: 656136 - DNA, 19 bp, Mus musculus
  siRNA target sequence for BC049989 (NM_173762.3,5283-5301).
ggcaagggatctggaaaat

SEQ ID NO: 656137 - DNA, 19 bp, Mus musculus
  siRNA target sequence for BC049989 (NM_173762.3,5321-5339).
ctcacatgaatctaaaaga

SEQ ID NO: 656138 - DNA, 19 bp, Mus musculus
  siRNA target sequence for BC049989 (NM_173762.3,5359-5377).
cgactcatggagactatgt

SEQ ID NO: 656139 - DNA, 19 bp, Mus musculus
  siRNA target sequence for BC049989 (NM_173762.3,5468-5486).
gtgagcgtcaacgtgttaa

SEQ ID NO: 656140 - DNA, 19 bp, Mus musculus
  siRNA target sequence for BC049989 (NM_173762.3,5470-5488).
gagcgtcaacgtgttaagt

SEQ ID NO: 656141 - DNA, 19 bp, Mus musculus
  siRNA target sequence for BC049989 (NM_173762.3,5472-5490).
gcgtcaacgtgttaagtta

SEQ ID NO: 656142 - DNA, 19 bp, Mus musculus
  siRNA target sequence for BC049989 (NM_173762.3,5473-5491).
cgtcaacgtgttaagttaa

SEQ ID NO: 656143 - DNA, 19 bp, Mus musculus
  siRNA target sequence for BC049989 (NM_173762.3,5534-5552).
gcttaactctgagtaagat

SEQ ID NO: 656144 - DNA, 19 bp, Mus musculus
  siRNA target sequence for BC049989 (NM_173762.3,5535-5553).
cttaactctgagtaagata

SEQ ID NO: 656145 - DNA, 19 bp, Mus musculus
  siRNA target sequence for BC049989 (NM_173762.3,5540-5558).
ctctgagtaagatagagat

SEQ ID NO: 656146 - DNA, 19 bp, Mus musculus
  siRNA target sequence for BC049989 (NM_173762.3,5576-5594).
ctcagaagattcatgagaa

SEQ ID NO: 656147 - DNA, 19 bp, Mus musculus
  siRNA target sequence for BC049989 (NM_173762.3,5831-5849).
cagaaatggctaatgatta

SEQ ID NO: 656148 - DNA, 19 bp, Mus musculus
  siRNA target sequence for BC049989 (NM_173762.3,5851-5869).
gagtgcttgaataaagtct

SEQ ID NO: 656149 - DNA, 19 bp, Mus musculus
  siRNA target sequence for BC049989 (NM_173762.3,5907-5925).
gctgtcagttactgtaaga

SEQ ID NO: 656150 - DNA, 19 bp, Mus musculus
  siRNA target sequence for BC049989 (NM_173762.3,5908-5926).
ctgtcagttactgtaagaa

SEQ ID NO: 656151 - DNA, 19 bp, Mus musculus
  siRNA target sequence for BC049989 (NM_173762.3,6077-6095).
ccatcaataaacgtgaaat

SEQ ID NO: 656152 - DNA, 19 bp, Mus musculus
  siRNA target sequence for BC049989 (NM_173762.3,6479-6497).
ccaaagacttggatcagta

SEQ ID NO: 656153 - DNA, 19 bp, Mus musculus
  siRNA target sequence for BC049989 (NM_173762.3,6746-6764).
cgaccgccaaggaattcga

SEQ ID NO: 656154 - DNA, 19 bp, Mus musculus
  siRNA target sequence for BC049989 (NM_173762.3,6747-6765).
gaccgccaaggaattcgat

SEQ ID NO: 656155 - DNA, 19 bp, Mus musculus
  siRNA target sequence for BC049989 (NM_173762.3,6749-6767).
ccgccaaggaattcgataa

SEQ ID NO: 656156 - DNA, 19 bp, Mus musculus
  siRNA target sequence for BC049989 (NM_173762.3,6751-6769).
gccaaggaattcgataaga

SEQ ID NO: 656157 - DNA, 19 bp, Mus musculus
  siRNA target sequence for BC049989 (NM_173762.3,6752-6770).
ccaaggaattcgataagaa

SEQ ID NO: 656158 - DNA, 19 bp, Mus musculus
  siRNA target sequence for BC049989 (NM_173762.3,6753-6771).
caaggaattcgataagaaa

SEQ ID NO: 656159 - DNA, 19 bp, Mus musculus
  siRNA target sequence for BC049989 (NM_173762.3,7196-7214).
ctcagtgcagggcacaaaa

SEQ ID NO: 656160 - DNA, 19 bp, Mus musculus
  siRNA target sequence for BC049989 (NM_173762.3,7222-7240).
gatcctgtgccaaaagatt

SEQ ID NO: 656161 - DNA, 19 bp, Mus musculus
  siRNA target sequence for BC049989 (NM_173762.3,7289-7307).
ctcacccgatccgctattt

SEQ ID NO: 656162 - DNA, 19 bp, Mus musculus
  siRNA target sequence for Bk (NM_138649.1,223-241).
gagggcttgctttctagaa

SEQ ID NO: 656163 - DNA, 19 bp, Mus musculus
  siRNA target sequence for Bk (NM_138649.1,379-397).
gccagccggagcaatgaca

SEQ ID NO: 656164 - DNA, 19 bp, Mus musculus
  siRNA target sequence for Bk (NM_138649.1,380-398).
ccagccggagcaatgacaa

SEQ ID NO: 656165 - DNA, 19 bp, Mus musculus
  siRNA target sequence for Bk (NM_138649.1,548-566).
ccccactcatcgacatcaa

SEQ ID NO: 656166 - DNA, 19 bp, Mus musculus
  siRNA target sequence for Bk (NM_138649.1,549-567).
cccactcatcgacatcaaa

SEQ ID NO: 656167 - DNA, 19 bp, Mus musculus
  siRNA target sequence for Bk (NM_138649.1,632-650).
cctacacgcccgatgacta

SEQ ID NO: 656168 - DNA, 19 bp, Mus musculus
  siRNA target sequence for Bk (NM_138649.1,678-696).
ctccctcgactccaatctt

SEQ ID NO: 656169 - DNA, 19 bp, Mus musculus
  siRNA target sequence for Bk (NM_138649.1,680-698).
ccctcgactccaatcttga

SEQ ID NO: 656170 - DNA, 19 bp, Mus musculus
  siRNA target sequence for Bk (NM_138649.1,681-699).
cctcgactccaatcttgat

SEQ ID NO: 656171 - DNA, 19 bp, Mus musculus
  siRNA target sequence for Bk (NM_138649.1,898-916).
ctgcctgaccagaagaact

SEQ ID NO: 656172 - DNA, 19 bp, Mus musculus
  siRNA target sequence for Bk (NM_138649.1,918-936).
caagcagacgggagtcaaa

SEQ ID NO: 656173 - DNA, 19 bp, Mus musculus
  siRNA target sequence for Bk (NM_138649.1,1128-1146).
gatccccagttctcagaat

SEQ ID NO: 656174 - DNA, 19 bp, Mus musculus
  siRNA target sequence for Bk (NM_138649.1,1131-1149).
ccccagttctcagaatgaa

SEQ ID NO: 656175 - DNA, 19 bp, Mus musculus
  siRNA target sequence for Bk (NM_138649.1,1202-1220).
gactgaacgtggacatcat

SEQ ID NO: 656176 - DNA, 19 bp, Mus musculus
  siRNA target sequence for Bk (NM_138649.1,1293-1311).
cggactcaagcttgtgaaa

SEQ ID NO: 656177 - DNA, 19 bp, Mus musculus
  siRNA target sequence for Bk (NM_138649.1,1297-1315).
ctcaagcttgtgaaaacta

SEQ ID NO: 656178 - DNA, 19 bp, Mus musculus
  siRNA target sequence for Bk (NM_138649.1,1329-1347).
cttacgaggcacaattgat

SEQ ID NO: 656179 - DNA, 19 bp, Mus musculus
  siRNA target sequence for Bk (NM_138649.1,1336-1354).
ggcacaattgatccttttt

SEQ ID NO: 656180 - DNA, 19 bp, Mus musculus
  siRNA target sequence for Bk (NM_138649.1,1396-1414).
gaaaacgccagcctagtat

SEQ ID NO: 656181 - DNA, 19 bp, Mus musculus
  siRNA target sequence for Bk (NM_138649.1,1401-1419).
cgccagcctagtattcaca

SEQ ID NO: 656182 - DNA, 19 bp, Mus musculus
  siRNA target sequence for Bk (NM_138649.1,1418-1436).
cagtgttcggccacaacat

SEQ ID NO: 656183 - DNA, 19 bp, Mus musculus
  siRNA target sequence for Bk (NM_138649.1,1422-1440).
gttcggccacaacatgaaa

SEQ ID NO: 656184 - DNA, 19 bp, Mus musculus
  siRNA target sequence for Bk (NM_138649.1,1468-1486).
gtcatcggccagtattcct

SEQ ID NO: 656185 - DNA, 19 bp, Mus musculus
  siRNA target sequence for Bk (NM_138649.1,1534-1552).
cgcactgctgtggaacaat

SEQ ID NO: 656186 - DNA, 19 bp, Mus musculus
  siRNA target sequence for C330017E21Rik (NM_172658.1,30-48).
gcagggctccaaaggaata

SEQ ID NO: 656187 - DNA, 19 bp, Mus musculus
  siRNA target sequence for C330017E21Rik (NM_172658.1,34-52).
ggctccaaaggaatagaga

SEQ ID NO: 656188 - DNA, 19 bp, Mus musculus
  siRNA target sequence for C330017E21Rik (NM_172658.1,158-176).
cgcagcctcgggaatctga

SEQ ID NO: 656189 - DNA, 19 bp, Mus musculus
  siRNA target sequence for C330017E21Rik (NM_172658.1,359-377).
ccctaacgcaaggtattgt

SEQ ID NO: 656190 - DNA, 19 bp, Mus musculus
  siRNA target sequence for C330017E21Rik (NM_172658.1,360-378).
cctaacgcaaggtattgta

SEQ ID NO: 656191 - DNA, 19 bp, Mus musculus
  siRNA target sequence for C330017E21Rik (NM_172658.1,365-383).
cgcaaggtattgtagtaaa

SEQ ID NO: 656192 - DNA, 19 bp, Mus musculus
  siRNA target sequence for C330017E21Rik (NM_172658.1,379-397).
gtaaacggcctggtaaaca

SEQ ID NO: 656193 - DNA, 19 bp, Mus musculus
  siRNA target sequence for C330017E21Rik (NM_172658.1,385-403).
ggcctggtaaacattagca

SEQ ID NO: 656194 - DNA, 19 bp, Mus musculus
  siRNA target sequence for C330017E21Rik (NM_172658.1,386-404).
gcctggtaaacattagcat

SEQ ID NO: 656195 - DNA, 19 bp, Mus musculus
  siRNA target sequence for C330017E21Rik (NM_172658.1,410-428).
ccattgagaagcgttatga

SEQ ID NO: 656196 - DNA, 19 bp, Mus musculus
  siRNA target sequence for C330017E21Rik (NM_172658.1,421-439).
cgttatgaaatgaaaagct

SEQ ID NO: 656197 - DNA, 19 bp, Mus musculus
  siRNA target sequence for C330017E21Rik (NM_172658.1,465-483).
ctacgacatctccttttgt

SEQ ID NO: 656198 - DNA, 19 bp, Mus musculus
  siRNA target sequence for C330017E21Rik (NM_172658.1,484-502).
gtgttatctctatttgtgt

SEQ ID NO: 656199 - DNA, 19 bp, Mus musculus
  siRNA target sequence for C330017E21Rik (NM_172658.1,532-550).
cgctggctcgcctttgcat

SEQ ID NO: 656200 - DNA, 19 bp, Mus musculus
  siRNA target sequence for C330017E21Rik (NM_172658.1,537-555).
gctcgcctttgcatccttt

SEQ ID NO: 656201 - DNA, 19 bp, Mus musculus
  siRNA target sequence for C330017E21Rik (NM_172658.1,542-560).
cctttgcatcctttatgat

SEQ ID NO: 656202 - DNA, 19 bp, Mus musculus
  siRNA target sequence for C330017E21Rik (NM_172658.1,565-583).
ctgggagcgctggtgtttt

SEQ ID NO: 656203 - DNA, 19 bp, Mus musculus
  siRNA target sequence for C330017E21Rik (NM_172658.1,568-586).
ggagcgctggtgttttcct

SEQ ID NO: 656204 - DNA, 19 bp, Mus musculus
  siRNA target sequence for C330017E21Rik (NM_172658.1,569-587).
gagcgctggtgttttcctt

SEQ ID NO: 656205 - DNA, 19 bp, Mus musculus
  siRNA target sequence for C330017E21Rik (NM_172658.1,631-649).
gaagatacgtgcttaacaa

SEQ ID NO: 656206 - DNA, 19 bp, Mus musculus
  siRNA target sequence for C330017E21Rik (NM_172658.1,651-669).
gaacagtaccagatgttca

SEQ ID NO: 656207 - DNA, 19 bp, Mus musculus
  siRNA target sequence for C330017E21Rik (NM_172658.1,684-702).
gctttctaactacttctat

SEQ ID NO: 656208 - DNA, 19 bp, Mus musculus
  siRNA target sequence for C330017E21Rik (NM_172658.1,761-779).
ggacagcctttattgatga

SEQ ID NO: 656209 - DNA, 19 bp, Mus musculus
  siRNA target sequence for C330017E21Rik (NM_172658.1,814-832).
ggtattggctattctatgt

SEQ ID NO: 656210 - DNA, 19 bp, Mus musculus
  siRNA target sequence for C330017E21Rik (NM_172658.1,822-840).
ctattctatgtcaatccta

SEQ ID NO: 656211 - DNA, 19 bp, Mus musculus
  siRNA target sequence for C330017E21Rik (NM_172658.1,838-856).
ctaggccctgccattggat

SEQ ID NO: 656212 - DNA, 19 bp, Mus musculus
  siRNA target sequence for C330017E21Rik (NM_172658.1,871-889).
cagctgttgacaatgtaca

SEQ ID NO: 656213 - DNA, 19 bp, Mus musculus
  siRNA target sequence for C330017E21Rik (NM_172658.1,879-897).
gacaatgtacattgatatt

SEQ ID NO: 656214 - DNA, 19 bp, Mus musculus
  siRNA target sequence for C330017E21Rik (NM_172658.1,954-972).
gtggattggattcctttta

SEQ ID NO: 656215 - DNA, 19 bp, Mus musculus
  siRNA target sequence for C330017E21Rik (NM_172658.1,1031-1049).
cagggacagcaaaaattca

SEQ ID NO: 656216 - DNA, 19 bp, Mus musculus
  siRNA target sequence for C330017E21Rik (NM_172658.1,1064-1082).
cccagactcatcaaaataa

SEQ ID NO: 656217 - DNA, 19 bp, Mus musculus
  siRNA target sequence for C330017E21Rik (NM_172658.1,1066-1084).
cagactcatcaaaataata

SEQ ID NO: 656218 - DNA, 19 bp, Mus musculus
  siRNA target sequence for C330017E21Rik (NM_172658.1,1068-1086).
gactcatcaaaataatagt

SEQ ID NO: 656219 - DNA, 19 bp, Mus musculus
  siRNA target sequence for C330017E21Rik (NM_172658.1,1095-1113).
ccaacatacggatgaaaat

SEQ ID NO: 656220 - DNA, 19 bp, Mus musculus
  siRNA target sequence for C330017E21Rik (NM_172658.1,1096-1114).
caacatacggatgaaaatt

SEQ ID NO: 656221 - DNA, 19 bp, Mus musculus
  siRNA target sequence for C330017E21Rik (NM_172658.1,1220-1238).
cgggatttgccacattttt

SEQ ID NO: 656222 - DNA, 19 bp, Mus musculus
  siRNA target sequence for C330017E21Rik (NM_172658.1,1221-1239).
gggatttgccacattttta

SEQ ID NO: 656223 - DNA, 19 bp, Mus musculus
  siRNA target sequence for C330017E21Rik (NM_172658.1,1228-1246).
gccacatttttacctaaat

SEQ ID NO: 656224 - DNA, 19 bp, Mus musculus
  siRNA target sequence for C330017E21Rik (NM_172658.1,1230-1248).
cacatttttacctaaattt

SEQ ID NO: 656225 - DNA, 19 bp, Mus musculus
  siRNA target sequence for C330017E21Rik (NM_172658.1,1318-1336).
gctgctcttggtcaaatct

SEQ ID NO: 656226 - DNA, 19 bp, Mus musculus
  siRNA target sequence for C330017E21Rik (NM_172658.1,1415-1433).
cacttgtgctgagttttgt

SEQ ID NO: 656227 - DNA, 19 bp, Mus musculus
  siRNA target sequence for C330017E21Rik (NM_172658.1,1417-1435).
cttgtgctgagttttgtat

SEQ ID NO: 656228 - DNA, 19 bp, Mus musculus
  siRNA target sequence for C330017E21Rik (NM_172658.1,1420-1438).
gtgctgagttttgtattta

SEQ ID NO: 656229 - DNA, 19 bp, Mus musculus
  siRNA target sequence for C330017E21Rik (NM_172658.1,1468-1486).
gctggtgtgtctgaatcat

SEQ ID NO: 656230 - DNA, 19 bp, Mus musculus
  siRNA target sequence for C330017E21Rik (NM_172658.1,1471-1489).
ggtgtgtctgaatcatata

SEQ ID NO: 656231 - DNA, 19 bp, Mus musculus
  siRNA target sequence for C330017E21Rik (NM_172658.1,1472-1490).
gtgtgtctgaatcatataa

SEQ ID NO: 656232 - DNA, 19 bp, Mus musculus
  siRNA target sequence for C330017E21Rik (NM_172658.1,1498-1516).
ggagaaatggggaatttga

SEQ ID NO: 656233 - DNA, 19 bp, Mus musculus
  siRNA target sequence for C330017E21Rik (NM_172658.1,1542-1560).
ctgtttgcggtcctactat

SEQ ID NO: 656234 - DNA, 19 bp, Mus musculus
  siRNA target sequence for C330017E21Rik (NM_172658.1,1544-1562).
gtttgcggtcctactatta

SEQ ID NO: 656235 - DNA, 19 bp, Mus musculus
  siRNA target sequence for C330017E21Rik (NM_172658.1,1577-1595).
gtgatggaatccagtattt

SEQ ID NO: 656236 - DNA, 19 bp, Mus musculus
  siRNA target sequence for C330017E21Rik (NM_172658.1,1602-1620).
ctgctttgcaggttgttta

SEQ ID NO: 656237 - DNA, 19 bp, Mus musculus
  siRNA target sequence for C330017E21Rik (NM_172658.1,1612-1630).
ggttgtttaaactcagttt

SEQ ID NO: 656238 - DNA, 19 bp, Mus musculus
  siRNA target sequence for C330017E21Rik (NM_172658.1,1664-1682).
cctgtatagaaaggaaaat

SEQ ID NO: 656239 - DNA, 19 bp, Mus musculus
  siRNA target sequence for C330017E21Rik (NM_172658.1,1730-1748).
gtagaactcggtgttcaaa

SEQ ID NO: 656240 - DNA, 19 bp, Mus musculus
  siRNA target sequence for C330017E21Rik (NM_172658.1,1733-1751).
gaactcggtgttcaaactt

SEQ ID NO: 656241 - DNA, 19 bp, Mus musculus
  siRNA target sequence for C330017E21Rik (NM_172658.1,1823-1841).
ctatattaaggtgtgttaa

SEQ ID NO: 656242 - DNA, 19 bp, Mus musculus
  siRNA target sequence for C330017E21Rik (NM_172658.1,1862-1880).
cattgggagtgcagttcat

SEQ ID NO: 656243 - DNA, 19 bp, Mus musculus
  siRNA target sequence for C330017E21Rik (NM_172658.1,1878-1896).
catgcttcttcgattgcta

SEQ ID NO: 656244 - DNA, 19 bp, Mus musculus
  siRNA target sequence for C330017E21Rik (NM_172658.1,1901-1919).
caatacctgggccaattat

SEQ ID NO: 656245 - DNA, 19 bp, Mus musculus
  siRNA target sequence for C330017E21Rik (NM_172658.1,1946-1964).
gtgttctgtgggatgtcaa

SEQ ID NO: 656246 - DNA, 19 bp, Mus musculus
  siRNA target sequence for C330017E21Rik (NM_172658.1,1960-1978).
gtcaatgaatgtggaataa

SEQ ID NO: 656247 - DNA, 19 bp, Mus musculus
  siRNA target sequence for C330017E21Rik (NM_172658.1,1982-2000).
gagcatgttggatttatga

SEQ ID NO: 656248 - DNA, 19 bp, Mus musculus
  siRNA target sequence for C330017E21Rik (NM_172658.1,1985-2003).
catgttggatttatgataa

SEQ ID NO: 656249 - DNA, 19 bp, Mus musculus
  siRNA target sequence for C330017E21Rik (NM_172658.1,1988-2006).
gttggatttatgataacat

SEQ ID NO: 656250 - DNA, 19 bp, Mus musculus
  siRNA target sequence for C330017E21Rik (NM_172658.1,2017-2035).
catatgctggtagctataa

SEQ ID NO: 656251 - DNA, 19 bp, Mus musculus
  siRNA target sequence for C330017E21Rik (NM_172658.1,2022-2040).
gctggtagctataagtgtt

SEQ ID NO: 656252 - DNA, 19 bp, Mus musculus
  siRNA target sequence for C330017E21Rik (NM_172658.1,2023-2041).
ctggtagctataagtgtta

SEQ ID NO: 656253 - DNA, 19 bp, Mus musculus
  siRNA target sequence for C330017E21Rik (NM_172658.1,2026-2044).
gtagctataagtgttactt

SEQ ID NO: 656254 - DNA, 19 bp, Mus musculus
  siRNA target sequence for C330017E21Rik (NM_172658.1,2029-2047).
gctataagtgttacttgta

SEQ ID NO: 656255 - DNA, 19 bp, Mus musculus
  siRNA target sequence for C330017E21Rik (NM_172658.1,2030-2048).
ctataagtgttacttgtaa

SEQ ID NO: 656256 - DNA, 19 bp, Mus musculus
  siRNA target sequence for C330017E21Rik (NM_172658.1,2045-2063).
gtaaagttatcaccatatt

SEQ ID NO: 656257 - DNA, 19 bp, Mus musculus
  siRNA target sequence for C330017E21Rik (NM_172658.1,2072-2090).
gacttgcgattgttctcta

SEQ ID NO: 656258 - DNA, 19 bp, Mus musculus
  siRNA target sequence for C330017E21Rik (NM_172658.1,2074-2092).
cttgcgattgttctctata

SEQ ID NO: 656259 - DNA, 19 bp, Mus musculus
  siRNA target sequence for C330017E21Rik (NM_172658.1,2104-2122).
ccaggaacagaggtatcat

SEQ ID NO: 656260 - DNA, 19 bp, Mus musculus
  siRNA target sequence for C330017E21Rik (NM_172658.1,2105-2123).
caggaacagaggtatcatt

SEQ ID NO: 656261 - DNA, 19 bp, Mus musculus
  siRNA target sequence for C330017E21Rik (NM_172658.1,2137-2155).
gtcattgtgtctactattt

SEQ ID NO: 656262 - DNA, 19 bp, Mus musculus
  siRNA target sequence for C330017E21Rik (NM_172658.1,2156-2174).
cggtcgaagaggatctaga

SEQ ID NO: 656263 - DNA, 19 bp, Mus musculus
  siRNA target sequence for C330017E21Rik (NM_172658.1,2160-2178).
cgaagaggatctagacaaa

SEQ ID NO: 656264 - DNA, 19 bp, Mus musculus
  siRNA target sequence for C730032N17Rik (NM_144836.1,262-280).
ggaatcaaggactttagta

SEQ ID NO: 656265 - DNA, 19 bp, Mus musculus
  siRNA target sequence for C730032N17Rik (NM_144836.1,346-364).
ggaatcatactgacgttaa

SEQ ID NO: 656266 - DNA, 19 bp, Mus musculus
  siRNA target sequence for C730032N17Rik (NM_144836.1,347-365).
gaatcatactgacgttaat

SEQ ID NO: 656267 - DNA, 19 bp, Mus musculus
  siRNA target sequence for C730032N17Rik (NM_144836.1,360-378).
gttaataccaagtggatat

SEQ ID NO: 656268 - DNA, 19 bp, Mus musculus
  siRNA target sequence for C730032N17Rik (NM_144836.1,374-392).
gatatttagcggggatatt

SEQ ID NO: 656269 - DNA, 19 bp, Mus musculus
  siRNA target sequence for C730032N17Rik (NM_144836.1,463-481).
gctgactttggggtgattt

SEQ ID NO: 656270 - DNA, 19 bp, Mus musculus
  siRNA target sequence for C730032N17Rik (NM_144836.1,530-548).
ggactggtcagttcacaat

SEQ ID NO: 656271 - DNA, 19 bp, Mus musculus
  siRNA target sequence for C730032N17Rik (NM_144836.1,531-549).
gactggtcagttcacaatt

SEQ ID NO: 656272 - DNA, 19 bp, Mus musculus
  siRNA target sequence for C730032N17Rik (NM_144836.1,613-631).
gcgtttgggtccttcatca

SEQ ID NO: 656273 - DNA, 19 bp, Mus musculus
  siRNA target sequence for C730032N17Rik (NM_144836.1,614-632).
cgtttgggtccttcatcat

SEQ ID NO: 656274 - DNA, 19 bp, Mus musculus
  siRNA target sequence for C730032N17Rik (NM_144836.1,662-680).
cactgggctggccttttat

SEQ ID NO: 656275 - DNA, 19 bp, Mus musculus
  siRNA target sequence for C730032N17Rik (NM_144836.1,723-741).
gtggttcacggtgatttat

SEQ ID NO: 656276 - DNA, 19 bp, Mus musculus
  siRNA target sequence for C730032N17Rik (NM_144836.1,726-744).
gttcacggtgatttatgat

SEQ ID NO: 656277 - DNA, 19 bp, Mus musculus
  siRNA target sequence for C730032N17Rik (NM_144836.1,750-768).
catgcatcacccatgcata

SEQ ID NO: 656278 - DNA, 19 bp, Mus musculus
  siRNA target sequence for C730032N17Rik (NM_144836.1,827-845).
gaaggtctgtccccataaa

SEQ ID NO: 656279 - DNA, 19 bp, Mus musculus
  siRNA target sequence for C730032N17Rik (NM_144836.1,906-924).
gctttgcaccataatcata

SEQ ID NO: 656280 - DNA, 19 bp, Mus musculus
  siRNA target sequence for C730032N17Rik (NM_144836.1,911-929).
gcaccataatcataacata

SEQ ID NO: 656281 - DNA, 19 bp, Mus musculus
  siRNA target sequence for C730032N17Rik (NM_144836.1,915-933).
cataatcataacataccta

SEQ ID NO: 656282 - DNA, 19 bp, Mus musculus
  siRNA target sequence for C730032N17Rik (NM_144836.1,947-965).
gcacagtgctgcacgttaa

SEQ ID NO: 656283 - DNA, 19 bp, Mus musculus
  siRNA target sequence for C730032N17Rik (NM_144836.1,950-968).
cagtgctgcacgttaacat

SEQ ID NO: 656284 - DNA, 19 bp, Mus musculus
  siRNA target sequence for C730032N17Rik (NM_144836.1,952-970).
gtgctgcacgttaacatca

SEQ ID NO: 656285 - DNA, 19 bp, Mus musculus
  siRNA target sequence for C730032N17Rik (NM_144836.1,1006-1024).
gctgcctcaagctgtacaa

SEQ ID NO: 656286 - DNA, 19 bp, Mus musculus
  siRNA target sequence for C730032N17Rik (NM_144836.1,1061-1079).
ggaatcttctcagcttaat

SEQ ID NO: 656287 - DNA, 19 bp, Mus musculus
  siRNA target sequence for C730032N17Rik (NM_144836.1,1080-1098).
cacagttcgaaaactcttt

SEQ ID NO: 656288 - DNA, 19 bp, Mus musculus
  siRNA target sequence for C730032N17Rik (NM_144836.1,1158-1176).
cagttacatagcaaccatt

SEQ ID NO: 656289 - DNA, 19 bp, Mus musculus
  siRNA target sequence for C730032N17Rik (NM_144836.1,1216-1234).
gactcagggttcatcatca

SEQ ID NO: 656290 - DNA, 19 bp, Mus musculus
  siRNA target sequence for C730032N17Rik (NM_144836.1,1246-1264).
gttgcccccagatatgcaa

SEQ ID NO: 656291 - DNA, 19 bp, Mus musculus
  siRNA target sequence for C730032N17Rik (NM_144836.1,1297-1315).
cttactgcagggatcatct

SEQ ID NO: 656292 - DNA, 19 bp, Mus musculus
  siRNA target sequence for C730032N17Rik (NM_144836.1,1320-1338).
cactaccaccggattcctt

SEQ ID NO: 656293 - DNA, 19 bp, Mus musculus
  siRNA target sequence for C730032N17Rik (NM_144836.1,1343-1361).
gtcaggttgggcatgttat

SEQ ID NO: 656294 - DNA, 19 bp, Mus musculus
  siRNA target sequence for C730032N17Rik (NM_144836.1,1347-1365).
ggttgggcatgttattgaa

SEQ ID NO: 656295 - DNA, 19 bp, Mus musculus
  siRNA target sequence for C730048C13Rik (NM_177002.2,1157-1175).
gttgtggaagcaagtatga

SEQ ID NO: 656296 - DNA, 19 bp, Mus musculus
  siRNA target sequence for C730048C13Rik (NM_177002.2,1290-1308).
ctatttttggcctatcact

SEQ ID NO: 656297 - DNA, 19 bp, Mus musculus
  siRNA target sequence for C730048C13Rik (NM_177002.2,1526-1544).
gcagcactttcttctctat

SEQ ID NO: 656298 - DNA, 19 bp, Mus musculus
  siRNA target sequence for D11Ertd18e (NM_026740.1,184-202).
ctcaccacacagtaccttt

SEQ ID NO: 656299 - DNA, 19 bp, Mus musculus
  siRNA target sequence for D11Ertd18e (NM_026740.1,216-234).
cacggagctcggctacaat

SEQ ID NO: 656300 - DNA, 19 bp, Mus musculus
  siRNA target sequence for D11Ertd18e (NM_026740.1,269-287).
gcgcggatcccctcatgaa

SEQ ID NO: 656301 - DNA, 19 bp, Mus musculus
  siRNA target sequence for D11Ertd18e (NM_026740.1,310-328).
cactggaccctctacatga

SEQ ID NO: 656302 - DNA, 19 bp, Mus musculus
  siRNA target sequence for D11Ertd18e (NM_026740.1,441-459).
ggccgtggtgtccatcttt

SEQ ID NO: 656303 - DNA, 19 bp, Mus musculus
  siRNA target sequence for D11Ertd18e (NM_026740.1,726-744).
ggctctatacgcagcattt

SEQ ID NO: 656304 - DNA, 19 bp, Mus musculus
  siRNA target sequence for D11Ertd18e (NM_026740.1,735-753).
cgcagcattttgttttggt

SEQ ID NO: 656305 - DNA, 19 bp, Mus musculus
  siRNA target sequence for D11Ertd18e (NM_026740.1,795-813).
ccgccatcatcgatccatt

SEQ ID NO: 656306 - DNA, 19 bp, Mus musculus
  siRNA target sequence for D11Ertd18e (NM_026740.1,888-906).
ggtggttactgtgcatttt

SEQ ID NO: 656307 - DNA, 19 bp, Mus musculus
  siRNA target sequence for D11Ertd18e (NM_026740.1,901-919).
cattttggggctcaagata

SEQ ID NO: 656308 - DNA, 19 bp, Mus musculus
  siRNA target sequence for D11Ertd18e (NM_026740.1,1022-1040).
gcctaaggcttctgcaatt

SEQ ID NO: 656309 - DNA, 19 bp, Mus musculus
  siRNA target sequence for D11Ertd18e (NM_026740.1,1346-1364).
gagctggcctcctcttcat

SEQ ID NO: 656310 - DNA, 19 bp, Mus musculus
  siRNA target sequence for D11Ertd18e (NM_026740.1,1381-1399).
ggggtactggaaaaggtta

SEQ ID NO: 656311 - DNA, 19 bp, Mus musculus
  siRNA target sequence for D11Ertd18e (NM_026740.1,1382-1400).
gggtactggaaaaggttaa

SEQ ID NO: 656312 - DNA, 19 bp, Mus musculus
  siRNA target sequence for D630002G06 (NM_172776.1,883-901).
gtgctcctaatattggatt

SEQ ID NO: 656313 - DNA, 19 bp, Mus musculus
  siRNA target sequence for D630002G06 (NM_172776.1,1115-1133).
ggagattgtgagaacaagt

SEQ ID NO: 656314 - DNA, 19 bp, Mus musculus
  siRNA target sequence for D630002G06 (NM_172776.1,1152-1170).
gcagcaaagactaaacctt

SEQ ID NO: 656315 - DNA, 19 bp, Mus musculus
  siRNA target sequence for D630002G06 (NM_172776.1,1162-1180).
ctaaaccttctctaagaga

SEQ ID NO: 656316 - DNA, 19 bp, Mus musculus
  siRNA target sequence for D630002G06 (NM_172776.1,1199-1217).
cctacgtaagcggatatgt

SEQ ID NO: 656317 - DNA, 19 bp, Mus musculus
  siRNA target sequence for D630002G06 (NM_172776.1,1329-1347).
gccatactagtcagtgtta

SEQ ID NO: 656318 - DNA, 19 bp, Mus musculus
  siRNA target sequence for D630002G06 (NM_172776.1,1330-1348).
ccatactagtcagtgttat

SEQ ID NO: 656319 - DNA, 19 bp, Mus musculus
  siRNA target sequence for D630002G06 (NM_172776.1,1566-1584).
gctctaggagtcattggat

SEQ ID NO: 656320 - DNA, 19 bp, Mus musculus
  siRNA target sequence for D630002G06 (NM_172776.1,1567-1585).
ctctaggagtcattggatt

SEQ ID NO: 656321 - DNA, 19 bp, Mus musculus
  siRNA target sequence for D630002G06 (NM_172776.1,1625-1643).
gctggtagcgacatactat

SEQ ID NO: 656322 - DNA, 19 bp, Mus musculus
  siRNA target sequence for D630002G06 (NM_172776.1,1685-1703).
caatgcgtttactgtgttt

SEQ ID NO: 656323 - DNA, 19 bp, Mus musculus
  siRNA target sequence for D630002G06 (NM_172776.1,1787-1805).
gagggaggatcccatcatt

SEQ ID NO: 656324 - DNA, 19 bp, Mus musculus
  siRNA target sequence for D630043A20Rik (NM_144785.1,93-111).
caggaccttataattcaaa

SEQ ID NO: 656325 - DNA, 19 bp, Mus musculus
  siRNA target sequence for D630043A20Rik (NM_144785.1,122-140).
ggggaggttccagattctt

SEQ ID NO: 656326 - DNA, 19 bp, Mus musculus
  siRNA target sequence for D630043A20Rik (NM_144785.1,132-150).
cagattcttcacatgatat

SEQ ID NO: 656327 - DNA, 19 bp, Mus musculus
  siRNA target sequence for D630043A20Rik (NM_144785.1,175-193).
cggctcctcacactctttt

SEQ ID NO: 656328 - DNA, 19 bp, Mus musculus
  siRNA target sequence for D630043A20Rik (NM_144785.1,390-408).
ggcaccttccccactgtaa

SEQ ID NO: 656329 - DNA, 19 bp, Mus musculus
  siRNA target sequence for D630043A20Rik (NM_144785.1,392-410).
caccttccccactgtaaca

SEQ ID NO: 656330 - DNA, 19 bp, Mus musculus
  siRNA target sequence for D630043A20Rik (NM_144785.1,525-543).
gctaaatttatatacatga

SEQ ID NO: 656331 - DNA, 19 bp, Mus musculus
  siRNA target sequence for D630043A20Rik (NM_144785.1,544-562).
ctggtatctttataggata

SEQ ID NO: 656332 - DNA, 19 bp, Mus musculus
  siRNA target sequence for D630043A20Rik (NM_144785.1,546-564).
ggtatctttataggatata

SEQ ID NO: 656333 - DNA, 19 bp, Mus musculus
  siRNA target sequence for D630043A20Rik (NM_144785.1,547-565).
gtatctttataggatatat

SEQ ID NO: 656334 - DNA, 19 bp, Mus musculus
  siRNA target sequence for D630043A20Rik (NM_144785.1,566-584).
catgggtggccacttatca

SEQ ID NO: 656335 - DNA, 19 bp, Mus musculus
  siRNA target sequence for D630043A20Rik (NM_144785.1,605-623).
cattttcacgtgctcttta

SEQ ID NO: 656336 - DNA, 19 bp, Mus musculus
  siRNA target sequence for D630043A20Rik (NM_144785.1,611-629).
cacgtgctctttactgaaa

SEQ ID NO: 656337 - DNA, 19 bp, Mus musculus
  siRNA target sequence for D630043A20Rik (NM_144785.1,691-709).
gattcctgtcagggatttt

SEQ ID NO: 656338 - DNA, 19 bp, Mus musculus
  siRNA target sequence for D630043A20Rik (NM_144785.1,834-852).
ctggcttttgcttttcgaa

SEQ ID NO: 656339 - DNA, 19 bp, Mus musculus
  siRNA target sequence for D630043A20Rik (NM_144785.1,880-898).
ctgttccaatgttcttact

SEQ ID NO: 656340 - DNA, 19 bp, Mus musculus
  siRNA target sequence for D630043A20Rik (NM_144785.1,886-904).
caatgttcttactccttat

SEQ ID NO: 656341 - DNA, 19 bp, Mus musculus
  siRNA target sequence for D630043A20Rik (NM_144785.1,987-1005).
gctgcatgcgtaaatagaa

SEQ ID NO: 656342 - DNA, 19 bp, Mus musculus
  siRNA target sequence for D630043A20Rik (NM_144785.1,988-1006).
ctgcatgcgtaaatagaat

SEQ ID NO: 656343 - DNA, 19 bp, Mus musculus
  siRNA target sequence for D630043A20Rik (NM_144785.1,990-1008).
gcatgcgtaaatagaataa

SEQ ID NO: 656344 - DNA, 19 bp, Mus musculus
  siRNA target sequence for D630043A20Rik (NM_144785.1,994-1012).
gcgtaaatagaataaagaa

SEQ ID NO: 656345 - DNA, 19 bp, Mus musculus
  siRNA target sequence for D630043A20Rik (NM_144785.1,1035-1053).
gaggttgtgaaaactatca

SEQ ID NO: 656346 - DNA, 19 bp, Mus musculus
  siRNA target sequence for D630043A20Rik (NM_144785.1,1087-1105).
cctccccactggacttgtt

SEQ ID NO: 656347 - DNA, 19 bp, Mus musculus
  siRNA target sequence for D630043A20Rik (NM_144785.1,1103-1121).
gttccgtacacctaacctt

SEQ ID NO: 656348 - DNA, 19 bp, Mus musculus
  siRNA target sequence for D630043A20Rik (NM_144785.1,1129-1147).
ggatctgtctcctatcctt

SEQ ID NO: 656349 - DNA, 19 bp, Mus musculus
  siRNA target sequence for D630043A20Rik (NM_144785.1,1196-1214).
ccaatacctaagcaataat

SEQ ID NO: 656350 - DNA, 19 bp, Mus musculus
  siRNA target sequence for D630043A20Rik (NM_144785.1,1258-1276).
ccaatgttcttggaaattt

SEQ ID NO: 656351 - DNA, 19 bp, Mus musculus
  siRNA target sequence for D630043A20Rik (NM_144785.1,1297-1315).
gcagaatgacgcaactgat

SEQ ID NO: 656352 - DNA, 19 bp, Mus musculus
  siRNA target sequence for D630043A20Rik (NM_144785.1,1298-1316).
cagaatgacgcaactgatt

SEQ ID NO: 656353 - DNA, 19 bp, Mus musculus
  siRNA target sequence for D630043A20Rik (NM_144785.1,1300-1318).
gaatgacgcaactgatttt

SEQ ID NO: 656354 - DNA, 19 bp, Mus musculus
  siRNA target sequence for D630043A20Rik (NM_144785.1,1379-1397).
cctgcgtgtatttttgtca

SEQ ID NO: 656355 - DNA, 19 bp, Mus musculus
  siRNA target sequence for D630043A20Rik (NM_144785.1,1383-1401).
cgtgtatttttgtcaacat

SEQ ID NO: 656356 - DNA, 19 bp, Mus musculus
  siRNA target sequence for D630043A20Rik (NM_144785.1,1424-1442).
ctctataacgagtactctt

SEQ ID NO: 656357 - DNA, 19 bp, Mus musculus
  siRNA target sequence for D630043A20Rik (NM_144785.1,1458-1476).
ctagtccccaccataatca

SEQ ID NO: 656358 - DNA, 19 bp, Mus musculus
  siRNA target sequence for D630043A20Rik (NM_144785.1,1524-1542).
gcgctgtctcctctactta

SEQ ID NO: 656359 - DNA, 19 bp, Mus musculus
  siRNA target sequence for D630043A20Rik (NM_144785.1,1525-1543).
cgctgtctcctctacttat

SEQ ID NO: 656360 - DNA, 19 bp, Mus musculus
  siRNA target sequence for D630043A20Rik (NM_144785.1,1577-1595).
gatcatctatgggattctt

SEQ ID NO: 656361 - DNA, 19 bp, Mus musculus
  siRNA target sequence for D930036F22Rik (NM_177171.3,311-329).
ctcttgctagcaacaaaca

SEQ ID NO: 656362 - DNA, 19 bp, Mus musculus
  siRNA target sequence for D930036F22Rik (NM_177171.3,433-451).
ggccatcctttatagtgtt

SEQ ID NO: 656363 - DNA, 19 bp, Mus musculus
  siRNA target sequence for D930036F22Rik (NM_177171.3,467-485).
gtttatgagacgatcgata

SEQ ID NO: 656364 - DNA, 19 bp, Mus musculus
  siRNA target sequence for D930036F22Rik (NM_177171.3,473-491).
gagacgatcgataaatgta

SEQ ID NO: 656365 - DNA, 19 bp, Mus musculus
  siRNA target sequence for D930036F22Rik (NM_177171.3,475-493).
gacgatcgataaatgtaat

SEQ ID NO: 656366 - DNA, 19 bp, Mus musculus
  siRNA target sequence for D930036F22Rik (NM_177171.3,477-495).
cgatcgataaatgtaatga

SEQ ID NO: 656367 - DNA, 19 bp, Mus musculus
  siRNA target sequence for D930036F22Rik (NM_177171.3,478-496).
gatcgataaatgtaatgat

SEQ ID NO: 656368 - DNA, 19 bp, Mus musculus
  siRNA target sequence for D930036F22Rik (NM_177171.3,481-499).
cgataaatgtaatgatctt

SEQ ID NO: 656369 - DNA, 19 bp, Mus musculus
  siRNA target sequence for D930036F22Rik (NM_177171.3,562-580).
gggttccttgtacaagaaa

SEQ ID NO: 656370 - DNA, 19 bp, Mus musculus
  siRNA target sequence for D930036F22Rik (NM_177171.3,564-582).
gttccttgtacaagaaatt

SEQ ID NO: 656371 - DNA, 19 bp, Mus musculus
  siRNA target sequence for D930036F22Rik (NM_177171.3,676-694).
gctgagtctgcagagtata

SEQ ID NO: 656372 - DNA, 19 bp, Mus musculus
  siRNA target sequence for D930036F22Rik (NM_177171.3,723-741).
cgtgccacagggacgttta

SEQ ID NO: 656373 - DNA, 19 bp, Mus musculus
  siRNA target sequence for D930036F22Rik (NM_177171.3,726-744).
gccacagggacgtttacaa

SEQ ID NO: 656374 - DNA, 19 bp, Mus musculus
  siRNA target sequence for D930036F22Rik (NM_177171.3,750-768).
cccggtcctgcttaacaga

SEQ ID NO: 656375 - DNA, 19 bp, Mus musculus
  siRNA target sequence for D930036F22Rik (NM_177171.3,860-878).
gtggccacactatgtttta

SEQ ID NO: 656376 - DNA, 19 bp, Mus musculus
  siRNA target sequence for D930036F22Rik (NM_177171.3,902-920).
gacgtgcggatatcagttt

SEQ ID NO: 656377 - DNA, 19 bp, Mus musculus
  siRNA target sequence for D930036F22Rik (NM_177171.3,904-922).
cgtgcggatatcagtttca

SEQ ID NO: 656378 - DNA, 19 bp, Mus musculus
  siRNA target sequence for D930036F22Rik (NM_177171.3,905-923).
gtgcggatatcagtttcaa

SEQ ID NO: 656379 - DNA, 19 bp, Mus musculus
  siRNA target sequence for D930036F22Rik (NM_177171.3,1068-1086).
gagccagtggagatatgct

SEQ ID NO: 656380 - DNA, 19 bp, Mus musculus
  siRNA target sequence for D930036F22Rik (NM_177171.3,1076-1094).
ggagatatgctgaaaggaa

SEQ ID NO: 656381 - DNA, 19 bp, Mus musculus
  siRNA target sequence for D930036F22Rik (NM_177171.3,1114-1132).
cgttcgagtcggagttact

SEQ ID NO: 656382 - DNA, 19 bp, Mus musculus
  siRNA target sequence for D930036F22Rik (NM_177171.3,1141-1159).
cgtggtatttgtttcaaca

SEQ ID NO: 656383 - DNA, 19 bp, Mus musculus
  siRNA target sequence for D930036F22Rik (NM_177171.3,1371-1389).
ggaggctaaagaaagttat

SEQ ID NO: 656384 - DNA, 19 bp, Mus musculus
  siRNA target sequence for D930036F22Rik (NM_177171.3,1374-1392).
ggctaaagaaagttatgga

SEQ ID NO: 656385 - DNA, 19 bp, Mus musculus
  siRNA target sequence for D930036F22Rik (NM_177171.3,1395-1413).
ccgcattgagtgatggtaa

SEQ ID NO: 656386 - DNA, 19 bp, Mus musculus
  siRNA target sequence for D930036F22Rik (NM_177171.3,1396-1414).
cgcattgagtgatggtaat

SEQ ID NO: 656387 - DNA, 19 bp, Mus musculus
  siRNA target sequence for D930036F22Rik (NM_177171.3,1573-1591).
ggttctgcaccctagcatt

SEQ ID NO: 656388 - DNA, 19 bp, Mus musculus
  siRNA target sequence for D930036F22Rik (NM_177171.3,1651-1669).
cctgacacctctcttagat

SEQ ID NO: 656389 - DNA, 19 bp, Mus musculus
  siRNA target sequence for D930036F22Rik (NM_177171.3,1679-1697).
gaacggctcgcaatactca

SEQ ID NO: 656390 - DNA, 19 bp, Mus musculus
  siRNA target sequence for D930036F22Rik (NM_177171.3,1685-1703).
ctcgcaatactcaagtctt

SEQ ID NO: 656391 - DNA, 19 bp, Mus musculus
  siRNA target sequence for D930036F22Rik (NM_177171.3,1784-1802).
catggaaagggcaagatta

SEQ ID NO: 656392 - DNA, 19 bp, Mus musculus
  siRNA target sequence for D930036F22Rik (NM_177171.3,1793-1811).
ggcaagattatcatgacaa

SEQ ID NO: 656393 - DNA, 19 bp, Mus musculus
  siRNA target sequence for D930036F22Rik (NM_177171.3,1795-1813).
caagattatcatgacaata

SEQ ID NO: 656394 - DNA, 19 bp, Mus musculus
  siRNA target sequence for D930036F22Rik (NM_177171.3,1974-1992).
cgtcccccagagatctaga

SEQ ID NO: 656395 - DNA, 19 bp, Mus musculus
  siRNA target sequence for D930036F22Rik (NM_177171.3,1975-1993).
gtcccccagagatctagaa

SEQ ID NO: 656396 - DNA, 19 bp, Mus musculus
  siRNA target sequence for D930036F22Rik (NM_177171.3,2006-2024).
cgaggagactcgtttacct

SEQ ID NO: 656397 - DNA, 19 bp, Mus musculus
  siRNA target sequence for D930036F22Rik (NM_177171.3,2200-2218).
gaaaacaccgtcaatagtt

SEQ ID NO: 656398 - DNA, 19 bp, Mus musculus
  siRNA target sequence for D930036F22Rik (NM_177171.3,2208-2226).
cgtcaatagtttatagaca

SEQ ID NO: 656399 - DNA, 19 bp, Mus musculus
  siRNA target sequence for D930036F22Rik (NM_177171.3,2223-2241).
gacagagactttatgaact

SEQ ID NO: 656400 - DNA, 19 bp, Mus musculus
  siRNA target sequence for D930036F22Rik (NM_177171.3,2229-2247).
gactttatgaactactaat

SEQ ID NO: 656401 - DNA, 19 bp, Mus musculus
  siRNA target sequence for D930036F22Rik (NM_177171.3,2274-2292).
ggaacctctgtgttatcct

SEQ ID NO: 656402 - DNA, 19 bp, Mus musculus
  siRNA target sequence for D930036F22Rik (NM_177171.3,2372-2390).
ccggatgacctcttgatat

SEQ ID NO: 656403 - DNA, 19 bp, Mus musculus
  siRNA target sequence for D930036F22Rik (NM_177171.3,2373-2391).
cggatgacctcttgatatt

SEQ ID NO: 656404 - DNA, 19 bp, Mus musculus
  siRNA target sequence for D930036F22Rik (NM_177171.3,2408-2426).
gagaccgaccataggttta

SEQ ID NO: 656405 - DNA, 19 bp, Mus musculus
  siRNA target sequence for D930036F22Rik (NM_177171.3,2461-2479).
ctgtggaagtctagaatat

SEQ ID NO: 656406 - DNA, 19 bp, Mus musculus
  siRNA target sequence for D930036F22Rik (NM_177171.3,2463-2481).
gtggaagtctagaatatga

SEQ ID NO: 656407 - DNA, 19 bp, Mus musculus
  siRNA target sequence for D930036F22Rik (NM_177171.3,2543-2561).
gcactgtctgtgattagct

SEQ ID NO: 656408 - DNA, 19 bp, Mus musculus
  siRNA target sequence for D930036F22Rik (NM_177171.3,2630-2648).
cagcttttgaacagcataa

SEQ ID NO: 656409 - DNA, 19 bp, Mus musculus
  siRNA target sequence for D930036F22Rik (NM_177171.3,2676-2694).
ccgttcagttgcatgttgt

SEQ ID NO: 656410 - DNA, 19 bp, Mus musculus
  siRNA target sequence for D930036F22Rik (NM_177171.3,2690-2708).
gttgtttctgccatttcca

SEQ ID NO: 656411 - DNA, 19 bp, Mus musculus
  siRNA target sequence for D930036F22Rik (NM_177171.3,2699-2717).
gccatttccaacttactga

SEQ ID NO: 656412 - DNA, 19 bp, Mus musculus
  siRNA target sequence for D930036F22Rik (NM_177171.3,2879-2897).
gctgggttagctcaactta

SEQ ID NO: 656413 - DNA, 19 bp, Mus musculus
  siRNA target sequence for D930036F22Rik (NM_177171.3,2883-2901).
ggttagctcaacttagctt

SEQ ID NO: 656414 - DNA, 19 bp, Mus musculus
  siRNA target sequence for D930036F22Rik (NM_177171.3,2891-2909).
caacttagcttcgacaaat

SEQ ID NO: 656415 - DNA, 19 bp, Mus musculus
  siRNA target sequence for D930036F22Rik (NM_177171.3,2894-2912).
cttagcttcgacaaattga

SEQ ID NO: 656416 - DNA, 19 bp, Mus musculus
  siRNA target sequence for D930036F22Rik (NM_177171.3,2990-3008).
gggcctcagcacttgagtt

SEQ ID NO: 656417 - DNA, 19 bp, Mus musculus
  siRNA target sequence for D930036F22Rik (NM_177171.3,3102-3120).
ctgcgggtgcactctatca

SEQ ID NO: 656418 - DNA, 19 bp, Mus musculus
  siRNA target sequence for D930036F22Rik (NM_177171.3,3144-3162).
cactcatcgtcatgttgtt

SEQ ID NO: 656419 - DNA, 19 bp, Mus musculus
  siRNA target sequence for D930036F22Rik (NM_177171.3,3151-3169).
cgtcatgttgttgctaaat

SEQ ID NO: 656420 - DNA, 19 bp, Mus musculus
  siRNA target sequence for D930036F22Rik (NM_177171.3,3177-3195).
caactcatgcgcaagttca

SEQ ID NO: 656421 - DNA, 19 bp, Mus musculus
  siRNA target sequence for D930036F22Rik (NM_177171.3,3247-3265).
gctacaaggtagcaatact

SEQ ID NO: 656422 - DNA, 19 bp, Mus musculus
  siRNA target sequence for D930036F22Rik (NM_177171.3,3248-3266).
ctacaaggtagcaatactt

SEQ ID NO: 656423 - DNA, 19 bp, Mus musculus
  siRNA target sequence for D930036F22Rik (NM_177171.3,3615-3633).
gagagaccgacgaaagctt

SEQ ID NO: 656424 - DNA, 19 bp, Mus musculus
  siRNA target sequence for D930036F22Rik (NM_177171.3,3631-3649).
cttgtgccaggatatcaga

SEQ ID NO: 656425 - DNA, 19 bp, Mus musculus
  siRNA target sequence for D930036F22Rik (NM_177171.3,3648-3666).
gagagacattgcatcatat

SEQ ID NO: 656426 - DNA, 19 bp, Mus musculus
  siRNA target sequence for D930036F22Rik (NM_177171.3,3702-3720).
ggctgaagctttgtaaaga

SEQ ID NO: 656427 - DNA, 19 bp, Mus musculus
  siRNA target sequence for D930036F22Rik (NM_177171.3,3728-3746).
gccgcatccgctgacttta

SEQ ID NO: 656428 - DNA, 19 bp, Mus musculus
  siRNA target sequence for D930036F22Rik (NM_177171.3,3730-3748).
cgcatccgctgactttaca

SEQ ID NO: 656429 - DNA, 19 bp, Mus musculus
  siRNA target sequence for D930036F22Rik (NM_177171.3,3832-3850).
gccacaccctttcagtaat

SEQ ID NO: 656430 - DNA, 19 bp, Mus musculus
  siRNA target sequence for D930036F22Rik (NM_177171.3,3926-3944).
gctcattttgacattgctt

SEQ ID NO: 656431 - DNA, 19 bp, Mus musculus
  siRNA target sequence for D930036F22Rik (NM_177171.3,3965-3983).
cgtgattcaagaaatgatt

SEQ ID NO: 656432 - DNA, 19 bp, Mus musculus
  siRNA target sequence for D930036F22Rik (NM_177171.3,4070-4088).
gacacactcttggtagtta

SEQ ID NO: 656433 - DNA, 19 bp, Mus musculus
  siRNA target sequence for D930036F22Rik (NM_177171.3,4090-4108).
ccgacggtttgcagatatt

SEQ ID NO: 656434 - DNA, 19 bp, Mus musculus
  siRNA target sequence for D930036F22Rik (NM_177171.3,4120-4138).
gtttccgggtcatgtgatt

SEQ ID NO: 656435 - DNA, 19 bp, Mus musculus
  siRNA target sequence for D930036F22Rik (NM_177171.3,4135-4153).
gattctggaacagtatcaa

SEQ ID NO: 656436 - DNA, 19 bp, Mus musculus
  siRNA target sequence for D930036F22Rik (NM_177171.3,4248-4266).
caagtggggttgttagtga

SEQ ID NO: 656437 - DNA, 19 bp, Mus musculus
  siRNA target sequence for D930036F22Rik (NM_177171.3,4284-4302).
gagttcatcagctacttgt

SEQ ID NO: 656438 - DNA, 19 bp, Mus musculus
  siRNA target sequence for D930036F22Rik (NM_177171.3,4305-4323).
cttccctgacgaagattca

SEQ ID NO: 656439 - DNA, 19 bp, Mus musculus
  siRNA target sequence for D930036F22Rik (NM_177171.3,4453-4471).
cttgaagactactgttaat

SEQ ID NO: 656440 - DNA, 19 bp, Mus musculus
  siRNA target sequence for D930036F22Rik (NM_177171.3,4456-4474).
gaagactactgttaattct

SEQ ID NO: 656441 - DNA, 19 bp, Mus musculus
  siRNA target sequence for D930036F22Rik (NM_177171.3,4541-4559).
gccacgctaagcaaactct

SEQ ID NO: 656442 - DNA, 19 bp, Mus musculus
  siRNA target sequence for D930036F22Rik (NM_177171.3,4576-4594).
ggattttgctctcttaact

SEQ ID NO: 656443 - DNA, 19 bp, Mus musculus
  siRNA target sequence for D930036F22Rik (NM_177171.3,4577-4595).
gattttgctctcttaactt

SEQ ID NO: 656444 - DNA, 19 bp, Mus musculus
  siRNA target sequence for D930036F22Rik (NM_177171.3,4754-4772).
gaaggcggtgccaatctct

SEQ ID NO: 656445 - DNA, 19 bp, Mus musculus
  siRNA target sequence for D930036F22Rik (NM_177171.3,4798-4816).
gtgccagggctcatcatca

SEQ ID NO: 656446 - DNA, 19 bp, Mus musculus
  siRNA target sequence for D930036F22Rik (NM_177171.3,5003-5021).
caggacttgggtattgaat

SEQ ID NO: 656447 - DNA, 19 bp, Mus musculus
  siRNA target sequence for D930036F22Rik (NM_177171.3,5011-5029).
gggtattgaattgctaaat

SEQ ID NO: 656448 - DNA, 19 bp, Mus musculus
  siRNA target sequence for D930036F22Rik (NM_177171.3,5013-5031).
gtattgaattgctaaatgt

SEQ ID NO: 656449 - DNA, 19 bp, Mus musculus
  siRNA target sequence for D930036F22Rik (NM_177171.3,5030-5048).
gtactacaccgagtaattt

SEQ ID NO: 656450 - DNA, 19 bp, Mus musculus
  siRNA target sequence for D930036F22Rik (NM_177171.3,5033-5051).
ctacaccgagtaattttga

SEQ ID NO: 656451 - DNA, 19 bp, Mus musculus
  siRNA target sequence for D930036F22Rik (NM_177171.3,5219-5237).
ctcgtacctgggaagtctt

SEQ ID NO: 656452 - DNA, 19 bp, Mus musculus
  siRNA target sequence for D930036F22Rik (NM_177171.3,5280-5298).
gacagctcccagaactgaa

SEQ ID NO: 656453 - DNA, 19 bp, Mus musculus
  siRNA target sequence for D930036F22Rik (NM_177171.3,5420-5438).
cctgaaggcagcatctcaa

SEQ ID NO: 656454 - DNA, 19 bp, Mus musculus
  siRNA target sequence for D930036F22Rik (NM_177171.3,5421-5439).
ctgaaggcagcatctcaat

SEQ ID NO: 656455 - DNA, 19 bp, Mus musculus
  siRNA target sequence for D930036F22Rik (NM_177171.3,5444-5462).
cctacagtattgtacctta

SEQ ID NO: 656456 - DNA, 19 bp, Mus musculus
  siRNA target sequence for D930036F22Rik (NM_177171.3,5448-5466).
cagtattgtaccttaccat

SEQ ID NO: 656457 - DNA, 19 bp, Mus musculus
  siRNA target sequence for D930036F22Rik (NM_177171.3,5478-5496).
gggaaacggctgtgaagtt

SEQ ID NO: 656458 - DNA, 19 bp, Mus musculus
  siRNA target sequence for D930036F22Rik (NM_177171.3,5605-5623).
cctcctccaaagtgcatta

SEQ ID NO: 656459 - DNA, 19 bp, Mus musculus
  siRNA target sequence for D930036F22Rik (NM_177171.3,5609-5627).
ctccaaagtgcattagcaa

SEQ ID NO: 656460 - DNA, 19 bp, Mus musculus
  siRNA target sequence for D930036F22Rik (NM_177171.3,5661-5679).
cacaagaacctgatgaagt

SEQ ID NO: 656461 - DNA, 19 bp, Mus musculus
  siRNA target sequence for D930036F22Rik (NM_177171.3,5687-5705).
cttactgccgtcacagtat

SEQ ID NO: 656462 - DNA, 19 bp, Mus musculus
  siRNA target sequence for D930036F22Rik (NM_177171.3,5693-5711).
gccgtcacagtatttattt

SEQ ID NO: 656463 - DNA, 19 bp, Mus musculus
  siRNA target sequence for D930036F22Rik (NM_177171.3,5750-5768).
cagaatcgctgcattgaaa

SEQ ID NO: 656464 - DNA, 19 bp, Mus musculus
  siRNA target sequence for D930036F22Rik (NM_177171.3,5752-5770).
gaatcgctgcattgaaaaa

SEQ ID NO: 656465 - DNA, 19 bp, Mus musculus
  siRNA target sequence for D930036F22Rik (NM_177171.3,5795-5813).
gactctgtggtgcaaatga

SEQ ID NO: 656466 - DNA, 19 bp, Mus musculus
  siRNA target sequence for D930036F22Rik (NM_177171.3,5828-5846).
ctccactccatttttcagt

SEQ ID NO: 656467 - DNA, 19 bp, Mus musculus
  siRNA target sequence for D930036F22Rik (NM_177171.3,5830-5848).
ccactccatttttcagtat

SEQ ID NO: 656468 - DNA, 19 bp, Mus musculus
  siRNA target sequence for D930036F22Rik (NM_177171.3,6108-6126).
gtctgcacgactttgcttt

SEQ ID NO: 656469 - DNA, 19 bp, Mus musculus
  siRNA target sequence for D930036F22Rik (NM_177171.3,6152-6170).
cggtactcgtctgtgttta

SEQ ID NO: 656470 - DNA, 19 bp, Mus musculus
  siRNA target sequence for D930036F22Rik (NM_177171.3,6153-6171).
ggtactcgtctgtgtttaa

SEQ ID NO: 656471 - DNA, 19 bp, Mus musculus
  siRNA target sequence for D930036F22Rik (NM_177171.3,6154-6172).
gtactcgtctgtgtttaaa

SEQ ID NO: 656472 - DNA, 19 bp, Mus musculus
  siRNA target sequence for D930036F22Rik (NM_177171.3,6157-6175).
ctcgtctgtgtttaaaaga

SEQ ID NO: 656473 - DNA, 19 bp, Mus musculus
  siRNA target sequence for D930036F22Rik (NM_177171.3,6246-6264).
gagtggatccgccttctaa

SEQ ID NO: 656474 - DNA, 19 bp, Mus musculus
  siRNA target sequence for D930036F22Rik (NM_177171.3,6250-6268).
ggatccgccttctaagcat

SEQ ID NO: 656475 - DNA, 19 bp, Mus musculus
  siRNA target sequence for Doc2a (NM_010069.1,977-995).
gcatgctgcactgtagaat

SEQ ID NO: 656476 - DNA, 19 bp, Mus musculus
  siRNA target sequence for Doc2a (NM_010069.1,1036-1054).
ctggctgacccctatgtaa

SEQ ID NO: 656477 - DNA, 19 bp, Mus musculus
  siRNA target sequence for Doc2a (NM_010069.1,1077-1095).
ctgcaaggccaataagcta

SEQ ID NO: 656478 - DNA, 19 bp, Mus musculus
  siRNA target sequence for Doc2a (NM_010069.1,1080-1098).
caaggccaataagctaaaa

SEQ ID NO: 656479 - DNA, 19 bp, Mus musculus
  siRNA target sequence for Doc2a (NM_010069.1,1084-1102).
gccaataagctaaaaacca

SEQ ID NO: 656480 - DNA, 19 bp, Mus musculus
  siRNA target sequence for Doc2a (NM_010069.1,1085-1103).
ccaataagctaaaaaccaa

SEQ ID NO: 656481 - DNA, 19 bp, Mus musculus
  siRNA target sequence for Doc2a (NM_010069.1,1154-1172).
gcgggatcacggatgatga

SEQ ID NO: 656482 - DNA, 19 bp, Mus musculus
  siRNA target sequence for Doc2a (NM_010069.1,1277-1295).
cacagaagaagcattttaa

SEQ ID NO: 656483 - DNA, 19 bp, Mus musculus
  siRNA target sequence for Doc2a (NM_010069.1,1348-1366).
gcgctgaggggcatatcct

SEQ ID NO: 656484 - DNA, 19 bp, Mus musculus
  siRNA target sequence for Doc2a (NM_010069.1,1602-1620).
gacactaaatccggaattt

SEQ ID NO: 656485 - DNA, 19 bp, Mus musculus
  siRNA target sequence for Doc2a (NM_010069.1,1604-1622).
cactaaatccggaatttaa

SEQ ID NO: 656486 - DNA, 19 bp, Mus musculus
  siRNA target sequence for Doc2a (NM_010069.1,1770-1788).
ctggaatgactgtctacat

SEQ ID NO: 656487 - DNA, 19 bp, Mus musculus
  siRNA target sequence for Doc2b (NM_007873.1,249-267).
gcagatctccgattatttt

SEQ ID NO: 656488 - DNA, 19 bp, Mus musculus
  siRNA target sequence for Doc2b (NM_007873.1,685-703).
gcaaataagctcagaacaa

SEQ ID NO: 656489 - DNA, 19 bp, Mus musculus
  siRNA target sequence for Doc2b (NM_007873.1,735-753).
gaacgagaccctcacttat

SEQ ID NO: 656490 - DNA, 19 bp, Mus musculus
  siRNA target sequence for Doc2b (NM_007873.1,874-892).
cccaatcacaccaagacat

SEQ ID NO: 656491 - DNA, 19 bp, Mus musculus
  siRNA target sequence for Doc2b (NM_007873.1,875-893).
ccaatcacaccaagacatt

SEQ ID NO: 656492 - DNA, 19 bp, Mus musculus
  siRNA target sequence for Doc2b (NM_007873.1,1212-1230).
ggtcactgtctgggattat

SEQ ID NO: 656493 - DNA, 19 bp, Mus musculus
  siRNA target sequence for Doc2g (NM_021791.2,165-183).
cccatccgcctcatttcca

SEQ ID NO: 656494 - DNA, 19 bp, Mus musculus
  siRNA target sequence for Doc2g (NM_021791.2,166-184).
ccatccgcctcatttccaa

SEQ ID NO: 656495 - DNA, 19 bp, Mus musculus
  siRNA target sequence for Doc2g (NM_021791.2,171-189).
cgcctcatttccaactact

SEQ ID NO: 656496 - DNA, 19 bp, Mus musculus
  siRNA target sequence for Doc2g (NM_021791.2,172-190).
gcctcatttccaactactt

SEQ ID NO: 656497 - DNA, 19 bp, Mus musculus
  siRNA target sequence for Doc2g (NM_021791.2,325-343).
ccctaggcaccctagaatt

SEQ ID NO: 656498 - DNA, 19 bp, Mus musculus
  siRNA target sequence for Doc2g (NM_021791.2,747-765).
gctcgtggcatgtctctat

SEQ ID NO: 656499 - DNA, 19 bp, Mus musculus
  siRNA target sequence for Epb4.1l4b (NM_019427.1,792-810).
cgtggacctgccgaaacat

SEQ ID NO: 656500 - DNA, 19 bp, Mus musculus
  siRNA target sequence for Epb4.1l4b (NM_019427.1,811-829).
gccaaaggccaggatttgt

SEQ ID NO: 656501 - DNA, 19 bp, Mus musculus
  siRNA target sequence for Epb4.1l4b (NM_019427.1,812-830).
ccaaaggccaggatttgtt

SEQ ID NO: 656502 - DNA, 19 bp, Mus musculus
  siRNA target sequence for Epb4.1l4b (NM_019427.1,922-940).
cacgcgaaacccataaaga

SEQ ID NO: 656503 - DNA, 19 bp, Mus musculus
  siRNA target sequence for Epb4.1l4b (NM_019427.1,926-944).
cgaaacccataaagaaaca

SEQ ID NO: 656504 - DNA, 19 bp, Mus musculus
  siRNA target sequence for Epb4.1l4b (NM_019427.1,969-987).
cttgcactttcgagtcaaa

SEQ ID NO: 656505 - DNA, 19 bp, Mus musculus
  siRNA target sequence for Epb4.1l4b (NM_019427.1,973-991).
cactttcgagtcaaatact

SEQ ID NO: 656506 - DNA, 19 bp, Mus musculus
  siRNA target sequence for Epb4.1l4b (NM_019427.1,975-993).
ctttcgagtcaaatactat

SEQ ID NO: 656507 - DNA, 19 bp, Mus musculus
  siRNA target sequence for Epb4.1l4b (NM_019427.1,979-997).
cgagtcaaatactattctt

SEQ ID NO: 656508 - DNA, 19 bp, Mus musculus
  siRNA target sequence for Epb4.1l4b (NM_019427.1,1008-1026).
caaccttcgagaggaattt

SEQ ID NO: 656509 - DNA, 19 bp, Mus musculus
  siRNA target sequence for Epb4.1l4b (NM_019427.1,1011-1029).
ccttcgagaggaatttaca

SEQ ID NO: 656510 - DNA, 19 bp, Mus musculus
  siRNA target sequence for Epb4.1l4b (NM_019427.1,1012-1030).
cttcgagaggaatttacaa

SEQ ID NO: 656511 - DNA, 19 bp, Mus musculus
  siRNA target sequence for Epb4.1l4b (NM_019427.1,1186-1204).
cggttcatcccaaatcaga

SEQ ID NO: 656512 - DNA, 19 bp, Mus musculus
  siRNA target sequence for Epb4.1l4b (NM_019427.1,1210-1228).
gccatggagttcgatatct

SEQ ID NO: 656513 - DNA, 19 bp, Mus musculus
  siRNA target sequence for Epb4.1l4b (NM_019427.1,1211-1229).
ccatggagttcgatatctt

SEQ ID NO: 656514 - DNA, 19 bp, Mus musculus
  siRNA target sequence for Epb4.1l4b (NM_019427.1,1271-1289).
cggaactctcctatctgaa

SEQ ID NO: 656515 - DNA, 19 bp, Mus musculus
  siRNA target sequence for Epb4.1l4b (NM_019427.1,1316-1334).
gagtggacatgcatgttgt

SEQ ID NO: 656516 - DNA, 19 bp, Mus musculus
  siRNA target sequence for Epb4.1l4b (NM_019427.1,1371-1389).
gaccccgacaggcatatta

SEQ ID NO: 656517 - DNA, 19 bp, Mus musculus
  siRNA target sequence for Epb4.1l4b (NM_019427.1,1373-1391).
ccccgacaggcatattaat

SEQ ID NO: 656518 - DNA, 19 bp, Mus musculus
  siRNA target sequence for Epb4.1l4b (NM_019427.1,1375-1393).
ccgacaggcatattaatct

SEQ ID NO: 656519 - DNA, 19 bp, Mus musculus
  siRNA target sequence for Epb4.1l4b (NM_019427.1,1376-1394).
cgacaggcatattaatctt

SEQ ID NO: 656520 - DNA, 19 bp, Mus musculus
  siRNA target sequence for Epb4.1l4b (NM_019427.1,1392-1410).
ctttgaaggagctaacaaa

SEQ ID NO: 656521 - DNA, 19 bp, Mus musculus
  siRNA target sequence for Epb4.1l4b (NM_019427.1,1427-1445).
ggcctaagatcaccaaaat

SEQ ID NO: 656522 - DNA, 19 bp, Mus musculus
  siRNA target sequence for Epb4.1l4b (NM_019427.1,1622-1640).
ccgccagatctgacttcat

SEQ ID NO: 656523 - DNA, 19 bp, Mus musculus
  siRNA target sequence for Epb4.1l4b (NM_019427.1,1665-1683).
cagtggacggacggaatat

SEQ ID NO: 656524 - DNA, 19 bp, Mus musculus
  siRNA target sequence for Epb4.1l4b (NM_019427.1,1667-1685).
gtggacggacggaatatca

SEQ ID NO: 656525 - DNA, 19 bp, Mus musculus
  siRNA target sequence for Epb4.1l4b (NM_019427.1,1823-1841).
ctgaagtccacaattacca

SEQ ID NO: 656526 - DNA, 19 bp, Mus musculus
  siRNA target sequence for Epb4.1l4b (NM_019427.1,1897-1915).
ccaaatgtcagtaaccatt

SEQ ID NO: 656527 - DNA, 19 bp, Mus musculus
  siRNA target sequence for Epb4.1l4b (NM_019427.1,1951-1969).
gacaggccacactggaaaa

SEQ ID NO: 656528 - DNA, 19 bp, Mus musculus
  siRNA target sequence for Epb4.1l4b (NM_019427.1,2051-2069).
cgtaccgggacaaactcat

SEQ ID NO: 656529 - DNA, 19 bp, Mus musculus
  siRNA target sequence for Epdd1 (NM_178244.2,7-25).
gactttattggccatatat

SEQ ID NO: 656530 - DNA, 19 bp, Mus musculus
  siRNA target sequence for Epdd1 (NM_178244.2,42-60).
ggtcttctatggtctgtat

SEQ ID NO: 656531 - DNA, 19 bp, Mus musculus
  siRNA target sequence for Epdd1 (NM_178244.2,53-71).
gtctgtatcaagcagtaat

SEQ ID NO: 656532 - DNA, 19 bp, Mus musculus
  siRNA target sequence for Epdd1 (NM_178244.2,78-96).
cagagctgtgatattcaat

SEQ ID NO: 656533 - DNA, 19 bp, Mus musculus
  siRNA target sequence for Epdd1 (NM_178244.2,80-98).
gagctgtgatattcaatga

SEQ ID NO: 656534 - DNA, 19 bp, Mus musculus
  siRNA target sequence for Epdd1 (NM_178244.2,82-100).
gctgtgatattcaatgact

SEQ ID NO: 656535 - DNA, 19 bp, Mus musculus
  siRNA target sequence for Epdd1 (NM_178244.2,93-111).
caatgactctcttctgtat

SEQ ID NO: 656536 - DNA, 19 bp, Mus musculus
  siRNA target sequence for Epdd1 (NM_178244.2,173-191).
gctggttgaaggttgtgat

SEQ ID NO: 656537 - DNA, 19 bp, Mus musculus
  siRNA target sequence for Epdd1 (NM_178244.2,194-212).
gctccctcttgatcgttta

SEQ ID NO: 656538 - DNA, 19 bp, Mus musculus
  siRNA target sequence for Epdd1 (NM_178244.2,195-213).
ctccctcttgatcgtttat

SEQ ID NO: 656539 - DNA, 19 bp, Mus musculus
  siRNA target sequence for Epdd1 (NM_178244.2,197-215).
ccctcttgatcgtttatga

SEQ ID NO: 656540 - DNA, 19 bp, Mus musculus
  siRNA target sequence for Epdd1 (NM_178244.2,641-659).
catgggaggatgatgacat

SEQ ID NO: 656541 - DNA, 19 bp, Mus musculus
  siRNA target sequence for Lcn2 (NM_008491.1,194-212).
ggcaatgcggtccagaaaa

SEQ ID NO: 656542 - DNA, 19 bp, Mus musculus
  siRNA target sequence for Lcn2 (NM_008491.1,216-234).
cagaaggcagctttacgat

SEQ ID NO: 656543 - DNA, 19 bp, Mus musculus
  siRNA target sequence for Lcn2 (NM_008491.1,221-239).
ggcagctttacgatgtaca

SEQ ID NO: 656544 - DNA, 19 bp, Mus musculus
  siRNA target sequence for Lcn2 (NM_008491.1,232-250).
gatgtacagcaccatctat

SEQ ID NO: 656545 - DNA, 19 bp, Mus musculus
  siRNA target sequence for Lcn2 (NM_008491.1,243-261).
ccatctatgagctacaaga

SEQ ID NO: 656546 - DNA, 19 bp, Mus musculus
  siRNA target sequence for Lcn2 (NM_008491.1,318-336).
gctactggatcagaacatt

SEQ ID NO: 656547 - DNA, 19 bp, Mus musculus
  siRNA target sequence for Lcn2 (NM_008491.1,436-454).
ccagttcgccatggtattt

SEQ ID NO: 656548 - DNA, 19 bp, Mus musculus
  siRNA target sequence for Lcn2 (NM_008491.1,437-455).
cagttcgccatggtatttt

SEQ ID NO: 656549 - DNA, 19 bp, Mus musculus
  siRNA target sequence for Lcn2 (NM_008491.1,465-483).
cttctgaaaacaagcaata

SEQ ID NO: 656550 - DNA, 19 bp, Mus musculus
  siRNA target sequence for Lcn2 (NM_008491.1,525-543).
ctgaactgaaggaacgttt

SEQ ID NO: 656551 - DNA, 19 bp, Mus musculus
  siRNA target sequence for Lcn2 (NM_008491.1,569-587).
ctcaaggacgacaacatca

SEQ ID NO: 656552 - DNA, 19 bp, Mus musculus
  siRNA target sequence for Lcn2 (NM_008491.1,603-621).
ccgaccaatgcattgacaa

SEQ ID NO: 656553 - DNA, 19 bp, Mus musculus
  siRNA target sequence for Lcn5 (NM_007947.1,14-32).
cagtggtgaaggatttcga

SEQ ID NO: 656554 - DNA, 19 bp, Mus musculus
  siRNA target sequence for Lcn5 (NM_007947.1,25-43).
gatttcgacgtaaacaagt

SEQ ID NO: 656555 - DNA, 19 bp, Mus musculus
  siRNA target sequence for Lcn5 (NM_007947.1,30-48).
cgacgtaaacaagttttta

SEQ ID NO: 656556 - DNA, 19 bp, Mus musculus
  siRNA target sequence for Lcn5 (NM_007947.1,158-176).
ctctgaccaccacctatta

SEQ ID NO: 656557 - DNA, 19 bp, Mus musculus
  siRNA target sequence for Lcn5 (NM_007947.1,162-180).
gaccaccacctattacaat

SEQ ID NO: 656558 - DNA, 19 bp, Mus musculus
  siRNA target sequence for Lcn5 (NM_007947.1,223-241).
gacggttcagcgaagtaca

SEQ ID NO: 656559 - DNA, 19 bp, Mus musculus
  siRNA target sequence for Lcn5 (NM_007947.1,240-258).
caaggtcaccagaatatca

SEQ ID NO: 656560 - DNA, 19 bp, Mus musculus
  siRNA target sequence for Lcn5 (NM_007947.1,299-317).
cgtatactgtgattgatat

SEQ ID NO: 656561 - DNA, 19 bp, Mus musculus
  siRNA target sequence for Lcn5 (NM_007947.1,343-361).
catcgagccatgaaactgt

SEQ ID NO: 656562 - DNA, 19 bp, Mus musculus
  siRNA target sequence for Lcn5 (NM_007947.1,366-384).
ccggagcttggacaacaat

SEQ ID NO: 656563 - DNA, 19 bp, Mus musculus
  siRNA target sequence for Lcn5 (NM_007947.1,385-403).
ggggaagctctgaataatt

SEQ ID NO: 656564 - DNA, 19 bp, Mus musculus
  siRNA target sequence for Lcn5 (NM_007947.1,454-472).
ctcaagcatgacttaacct

SEQ ID NO: 656565 - DNA, 19 bp, Mus musculus
  siRNA target sequence for Lcn5 (NM_007947.1,471-489).
ctgtgtgaacgcattgcaa

SEQ ID NO: 656566 - DNA, 19 bp, Mus musculus
  siRNA target sequence for Lgi3 (NM_145219.2,458-476).
ccgttgttgcagttcttgt

SEQ ID NO: 656567 - DNA, 19 bp, Mus musculus
  siRNA target sequence for Lgi3 (NM_145219.2,459-477).
cgttgttgcagttcttgtt

SEQ ID NO: 656568 - DNA, 19 bp, Mus musculus
  siRNA target sequence for Lgi3 (NM_145219.2,616-634).
cctttctctggccaacaat

SEQ ID NO: 656569 - DNA, 19 bp, Mus musculus
  siRNA target sequence for Lgi3 (NM_145219.2,617-635).
ctttctctggccaacaata

SEQ ID NO: 656570 - DNA, 19 bp, Mus musculus
  siRNA target sequence for Lgi3 (NM_145219.2,621-639).
ctctggccaacaataacct

SEQ ID NO: 656571 - DNA, 19 bp, Mus musculus
  siRNA target sequence for Lgi3 (NM_145219.2,673-691).
ggacatcctgagtgactta

SEQ ID NO: 656572 - DNA, 19 bp, Mus musculus
  siRNA target sequence for Lgi3 (NM_145219.2,700-718).
gggcaacgcacttaactgt

SEQ ID NO: 656573 - DNA, 19 bp, Mus musculus
  siRNA target sequence for Lgi3 (NM_145219.2,845-863).
gactgcatcaccactgatt

SEQ ID NO: 656574 - DNA, 19 bp, Mus musculus
  siRNA target sequence for Lgi3 (NM_145219.2,849-867).
gcatcaccactgattttgt

SEQ ID NO: 656575 - DNA, 19 bp, Mus musculus
  siRNA target sequence for Lgi3 (NM_145219.2,902-920).
gcggaacctttcctttact

SEQ ID NO: 656576 - DNA, 19 bp, Mus musculus
  siRNA target sequence for Lgi3 (NM_145219.2,904-922).
ggaacctttcctttactct

SEQ ID NO: 656577 - DNA, 19 bp, Mus musculus
  siRNA target sequence for Lgi3 (NM_145219.2,996-1014).
gacagcttcgagactatga

SEQ ID NO: 656578 - DNA, 19 bp, Mus musculus
  siRNA target sequence for Lgi3 (NM_145219.2,1273-1291).
gcaccagaatggcttctat

SEQ ID NO: 656579 - DNA, 19 bp, Mus musculus
  siRNA target sequence for Lgi3 (NM_145219.2,1353-1371).
gcaaaccacggttaattgt

SEQ ID NO: 656580 - DNA, 19 bp, Mus musculus
  siRNA target sequence for Lgi3 (NM_145219.2,1384-1402).
gcaagcacctgtcatctat

SEQ ID NO: 656581 - DNA, 19 bp, Mus musculus
  siRNA target sequence for Lgi3 (NM_145219.2,1410-1428).
gtcgttctcagaaacagtt

SEQ ID NO: 656582 - DNA, 19 bp, Mus musculus
  siRNA target sequence for Lgi3 (NM_145219.2,1463-1481).
gcccaggccgtgaaacact

SEQ ID NO: 656583 - DNA, 19 bp, Mus musculus
  siRNA target sequence for Lgi3 (NM_145219.2,1464-1482).
cccaggccgtgaaacactt

SEQ ID NO: 656584 - DNA, 19 bp, Mus musculus
  siRNA target sequence for Lgi3 (NM_145219.2,1465-1483).
ccaggccgtgaaacacttt

SEQ ID NO: 656585 - DNA, 19 bp, Mus musculus
  siRNA target sequence for Lgi3 (NM_145219.2,1507-1525).
gtgccttagccgctacatt

SEQ ID NO: 656586 - DNA, 19 bp, Mus musculus
  siRNA target sequence for Lgi3 (NM_145219.2,1549-1567).
ggaaggtacccgtttctct

SEQ ID NO: 656587 - DNA, 19 bp, Mus musculus
  siRNA target sequence for Lgi3 (NM_145219.2,1682-1700).
gatgaggggcgacagaaat

SEQ ID NO: 656588 - DNA, 19 bp, Mus musculus
  siRNA target sequence for Mg29 (NM_008596.1,333-351).
gggtcctgcggctcttaca

SEQ ID NO: 656589 - DNA, 19 bp, Mus musculus
  siRNA target sequence for Mg29 (NM_008596.1,537-555).
gtgacccttggcatctttt

SEQ ID NO: 656590 - DNA, 19 bp, Mus musculus
  siRNA target sequence for Mg29 (NM_008596.1,591-609).
ctgcgcttccacaaactct

SEQ ID NO: 656591 - DNA, 19 bp, Mus musculus
  siRNA target sequence for Mg29 (NM_008596.1,625-643).
gcttcccgttggtggattt

SEQ ID NO: 656592 - DNA, 19 bp, Mus musculus
  siRNA target sequence for Mg29 (NM_008596.1,629-647).
cccgttggtggatttctgt

SEQ ID NO: 656593 - DNA, 19 bp, Mus musculus
  siRNA target sequence for Mg29 (NM_008596.1,864-882).
ggaaactgttggtttgtgt

SEQ ID NO: 656594 - DNA, 19 bp, Mus musculus
  siRNA target sequence for Mtac2d1 (NM_028924.1,890-908).
gtctctatggtgaaacaga

SEQ ID NO: 656595 - DNA, 19 bp, Mus musculus
  siRNA target sequence for Mtac2d1 (NM_028924.1,949-967).
gcctcaagtagccaaaata

SEQ ID NO: 656596 - DNA, 19 bp, Mus musculus
  siRNA target sequence for Mtac2d1 (NM_028924.1,959-977).
gccaaaataccattggtat

SEQ ID NO: 656597 - DNA, 19 bp, Mus musculus
  siRNA target sequence for Mtac2d1 (NM_028924.1,973-991).
ggtatccctccattgactt

SEQ ID NO: 656598 - DNA, 19 bp, Mus musculus
  siRNA target sequence for Mtac2d1 (NM_028924.1,1005-1023).
gcctcaagttggctgtaat

SEQ ID NO: 656599 - DNA, 19 bp, Mus musculus
  siRNA target sequence for Mtac2d1 (NM_028924.1,1015-1033).
ggctgtaatgaagattatt

SEQ ID NO: 656600 - DNA, 19 bp, Mus musculus
  siRNA target sequence for Mtac2d1 (NM_028924.1,1082-1100).
ccaggtttaaattatctta

SEQ ID NO: 656601 - DNA, 19 bp, Mus musculus
  siRNA target sequence for Mtac2d1 (NM_028924.1,1083-1101).
caggtttaaattatcttat

SEQ ID NO: 656602 - DNA, 19 bp, Mus musculus
  siRNA target sequence for Mtac2d1 (NM_028924.1,1085-1103).
ggtttaaattatcttatat

SEQ ID NO: 656603 - DNA, 19 bp, Mus musculus
  siRNA target sequence for Mtac2d1 (NM_028924.1,1107-1125).
gcctaggacacaaggaatt

SEQ ID NO: 656604 - DNA, 19 bp, Mus musculus
  siRNA target sequence for Mtac2d1 (NM_028924.1,1163-1181).
catcttttggagatcaaaa

SEQ ID NO: 656605 - DNA, 19 bp, Mus musculus
  siRNA target sequence for Mtac2d1 (NM_028924.1,1182-1200).
gacagaactttgtagttca

SEQ ID NO: 656606 - DNA, 19 bp, Mus musculus
  siRNA target sequence for Mtac2d1 (NM_028924.1,1206-1224).
ccatggacccagctatgat

SEQ ID NO: 656607 - DNA, 19 bp, Mus musculus
  siRNA target sequence for Mtac2d1 (NM_028924.1,1213-1231).
cccagctatgatgtgtata

SEQ ID NO: 656608 - DNA, 19 bp, Mus musculus
  siRNA target sequence for Mtac2d1 (NM_028924.1,1218-1236).
ctatgatgtgtataatcca

SEQ ID NO: 656609 - DNA, 19 bp, Mus musculus
  siRNA target sequence for Mtac2d1 (NM_028924.1,1225-1243).
gtgtataatccatgctata

SEQ ID NO: 656610 - DNA, 19 bp, Mus musculus
  siRNA target sequence for Mtac2d1 (NM_028924.1,1238-1256).
gctatatgtatcaacactt

SEQ ID NO: 656611 - DNA, 19 bp, Mus musculus
  siRNA target sequence for Mtac2d1 (NM_028924.1,1254-1272).
cttttcacctgatttaagt

SEQ ID NO: 656612 - DNA, 19 bp, Mus musculus
  siRNA target sequence for Mtac2d1 (NM_028924.1,1275-1293).
gcgctttcttcctcattgt

SEQ ID NO: 656613 - DNA, 19 bp, Mus musculus
  siRNA target sequence for Mtac2d1 (NM_028924.1,1277-1295).
gctttcttcctcattgtga

SEQ ID NO: 656614 - DNA, 19 bp, Mus musculus
  siRNA target sequence for Mtac2d1 (NM_028924.1,1292-1310).
gtgaaacaaaacagttata

SEQ ID NO: 656615 - DNA, 19 bp, Mus musculus
  siRNA target sequence for Mtac2d1 (NM_028924.1,1303-1321).
cagttatatggatctgttt

SEQ ID NO: 656616 - DNA, 19 bp, Mus musculus
  siRNA target sequence for Mtac2d1 (NM_028924.1,1312-1330).
ggatctgtttgtgatttaa

SEQ ID NO: 656617 - DNA, 19 bp, Mus musculus
  siRNA target sequence for Mtac2d1 (NM_028924.1,1359-1377).
gctaagcaaatctatgctt

SEQ ID NO: 656618 - DNA, 19 bp, Mus musculus
  siRNA target sequence for Mtac2d1 (NM_028924.1,1364-1382).
gcaaatctatgcttgatct

SEQ ID NO: 656619 - DNA, 19 bp, Mus musculus
  siRNA target sequence for Mtac2d1 (NM_028924.1,1365-1383).
caaatctatgcttgatctt

SEQ ID NO: 656620 - DNA, 19 bp, Mus musculus
  siRNA target sequence for Mtac2d1 (NM_028924.1,1408-1426).
cagagacatgactcatttt

SEQ ID NO: 656621 - DNA, 19 bp, Mus musculus
  siRNA target sequence for Mtac2d1 (NM_028924.1,1432-1450).
gttcctagtagttcttctt

SEQ ID NO: 656622 - DNA, 19 bp, Mus musculus
  siRNA target sequence for Mtac2d1 (NM_028924.1,1435-1453).
cctagtagttcttcttcaa

SEQ ID NO: 656623 - DNA, 19 bp, Mus musculus
  siRNA target sequence for Mtac2d1 (NM_028924.1,1476-1494).
cagaagcctggatacaatt

SEQ ID NO: 656624 - DNA, 19 bp, Mus musculus
  siRNA target sequence for Mtac2d1 (NM_028924.1,1564-1582).
cagatctggatcacagttt

SEQ ID NO: 656625 - DNA, 19 bp, Mus musculus
  siRNA target sequence for Mtac2d1 (NM_028924.1,1579-1597).
gttttgcagtgcagagata

SEQ ID NO: 656626 - DNA, 19 bp, Mus musculus
  siRNA target sequence for Mtac2d1 (NM_028924.1,1584-1602).
gcagtgcagagatataagt

SEQ ID NO: 656627 - DNA, 19 bp, Mus musculus
  siRNA target sequence for Mtac2d1 (NM_028924.1,1585-1603).
cagtgcagagatataagtt

SEQ ID NO: 656628 - DNA, 19 bp, Mus musculus
  siRNA target sequence for Mtac2d1 (NM_028924.1,1625-1643).
ctcccacaatttctataaa

SEQ ID NO: 656629 - DNA, 19 bp, Mus musculus
  siRNA target sequence for Mtac2d1 (NM_028924.1,1696-1714).
ggttccaatgctattgaat

SEQ ID NO: 656630 - DNA, 19 bp, Mus musculus
  siRNA target sequence for Mtac2d1 (NM_028924.1,1720-1738).
gaaacatttgtatttgcta

SEQ ID NO: 656631 - DNA, 19 bp, Mus musculus
  siRNA target sequence for Mtac2d1 (NM_028924.1,1762-1780).
gtgagacttgcatttaaga

SEQ ID NO: 656632 - DNA, 19 bp, Mus musculus
  siRNA target sequence for Mtac2d1 (NM_028924.1,1764-1782).
gagacttgcatttaagatt

SEQ ID NO: 656633 - DNA, 19 bp, Mus musculus
  siRNA target sequence for Mtac2d1 (NM_028924.1,1825-1843).
ctttcactcagaactctta

SEQ ID NO: 656634 - DNA, 19 bp, Mus musculus
  siRNA target sequence for Mtac2d1 (NM_028924.1,1858-1876).
gagtactcgttggaaataa

SEQ ID NO: 656635 - DNA, 19 bp, Mus musculus
  siRNA target sequence for Mtac2d1 (NM_028924.1,1860-1878).
gtactcgttggaaataata

SEQ ID NO: 656636 - DNA, 19 bp, Mus musculus
  siRNA target sequence for Mtac2d1 (NM_028924.1,1912-1930).
cttgaactggggacttgtt

SEQ ID NO: 656637 - DNA, 19 bp, Mus musculus
  siRNA target sequence for Mtac2d1 (NM_028924.1,1946-1964).
gcaggattcagctgcaaat

SEQ ID NO: 656638 - DNA, 19 bp, Mus musculus
  siRNA target sequence for Mtac2d1 (NM_028924.1,1949-1967).
ggattcagctgcaaattct

SEQ ID NO: 656639 - DNA, 19 bp, Mus musculus
  siRNA target sequence for Mtac2d1 (NM_028924.1,1975-1993).
caataccttccaagttcat

SEQ ID NO: 656640 - DNA, 19 bp, Mus musculus
  siRNA target sequence for Mtac2d1 (NM_028924.1,2020-2038).
gtgaaagtggggatgttta

SEQ ID NO: 656641 - DNA, 19 bp, Mus musculus
  siRNA target sequence for Mtac2d1 (NM_028924.1,2039-2057).
gctcaggagagctgattta

SEQ ID NO: 656642 - DNA, 19 bp, Mus musculus
  siRNA target sequence for Mtac2d1 (NM_028924.1,2042-2060).
caggagagctgatttacaa

SEQ ID NO: 656643 - DNA, 19 bp, Mus musculus
  siRNA target sequence for Mtac2d1 (NM_028924.1,2044-2062).
ggagagctgatttacaaga

SEQ ID NO: 656644 - DNA, 19 bp, Mus musculus
  siRNA target sequence for Mtac2d1 (NM_028924.1,2125-2143).
ccacttatacagactgaaa

SEQ ID NO: 656645 - DNA, 19 bp, Mus musculus
  siRNA target sequence for Mtac2d1 (NM_028924.1,2203-2221).
gtaggccagctctggataa

SEQ ID NO: 656646 - DNA, 19 bp, Mus musculus
  siRNA target sequence for Mtac2d1 (NM_028924.1,2216-2234).
ggataagtgaagacagtaa

SEQ ID NO: 656647 - DNA, 19 bp, Mus musculus
  siRNA target sequence for Mtac2d1 (NM_028924.1,2217-2235).
gataagtgaagacagtaat

SEQ ID NO: 656648 - DNA, 19 bp, Mus musculus
  siRNA target sequence for Mtac2d1 (NM_028924.1,2248-2266).
gtgaatcaatggaaagaga

SEQ ID NO: 656649 - DNA, 19 bp, Mus musculus
  siRNA target sequence for Mtac2d1 (NM_028924.1,2254-2272).
caatggaaagagaccatta

SEQ ID NO: 656650 - DNA, 19 bp, Mus musculus
  siRNA target sequence for Mtac2d1 (NM_028924.1,2259-2277).
gaaagagaccattacaaat

SEQ ID NO: 656651 - DNA, 19 bp, Mus musculus
  siRNA target sequence for Orm1 (NM_008768.1,36-54).
gcgctgcacacggttctta

SEQ ID NO: 656652 - DNA, 19 bp, Mus musculus
  siRNA target sequence for Orm1 (NM_008768.1,37-55).
cgctgcacacggttcttat

SEQ ID NO: 656653 - DNA, 19 bp, Mus musculus
  siRNA target sequence for Orm1 (NM_008768.1,39-57).
ctgcacacggttcttatca

SEQ ID NO: 656654 - DNA, 19 bp, Mus musculus
  siRNA target sequence for Orm1 (NM_008768.1,41-59).
gcacacggttcttatcata

SEQ ID NO: 656655 - DNA, 19 bp, Mus musculus
  siRNA target sequence for Orm1 (NM_008768.1,42-60).
cacacggttcttatcatat

SEQ ID NO: 656656 - DNA, 19 bp, Mus musculus
  siRNA target sequence for Orm1 (NM_008768.1,197-215).
gtacaggcaggcaattcaa

SEQ ID NO: 656657 - DNA, 19 bp, Mus musculus
  siRNA target sequence for Orm1 (NM_008768.1,251-269).
cttgataaacgacacaata

SEQ ID NO: 656658 - DNA, 19 bp, Mus musculus
  siRNA target sequence for Orm1 (NM_008768.1,270-288).
gagcttcgggagtctcaaa

SEQ ID NO: 656659 - DNA, 19 bp, Mus musculus
  siRNA target sequence for Orm1 (NM_008768.1,272-290).
gcttcgggagtctcaaaca

SEQ ID NO: 656660 - DNA, 19 bp, Mus musculus
  siRNA target sequence for Orm1 (NM_008768.1,273-291).
cttcgggagtctcaaacaa

SEQ ID NO: 656661 - DNA, 19 bp, Mus musculus
  siRNA target sequence for Orm1 (NM_008768.1,379-397).
cctttgcccaccttatagt

SEQ ID NO: 656662 - DNA, 19 bp, Mus musculus
  siRNA target sequence for Orm2 (NM_011016.1,6-24).
ggcactgcacatgattctt

SEQ ID NO: 656663 - DNA, 19 bp, Mus musculus
  siRNA target sequence for Orm2 (NM_011016.1,184-202).
caaaagacgcagatggtat

SEQ ID NO: 656664 - DNA, 19 bp, Mus musculus
  siRNA target sequence for Orm2 (NM_011016.1,189-207).
gacgcagatggtatttttt

SEQ ID NO: 656665 - DNA, 19 bp, Mus musculus
  siRNA target sequence for Orm2 (NM_011016.1,241-259).
gagcttcgagagtatcaca

SEQ ID NO: 656666 - DNA, 19 bp, Mus musculus
  siRNA target sequence for Orm2 (NM_011016.1,334-352).
gtaggaggagtaaaaatct

SEQ ID NO: 656667 - DNA, 19 bp, Mus musculus
  siRNA target sequence for Orm2 (NM_011016.1,358-376).
gacctgatagtcttgaaga

SEQ ID NO: 656668 - DNA, 19 bp, Mus musculus
  siRNA target sequence for Pbsn (NM_017471.1,100-118).
gacgggccttggcaaacaa

SEQ ID NO: 656669 - DNA, 19 bp, Mus musculus
  siRNA target sequence for Pbsn (NM_017471.1,102-120).
cgggccttggcaaacaatt

SEQ ID NO: 656670 - DNA, 19 bp, Mus musculus
  siRNA target sequence for Pbsn (NM_017471.1,106-124).
ccttggcaaacaatttact

SEQ ID NO: 656671 - DNA, 19 bp, Mus musculus
  siRNA target sequence for Pbsn (NM_017471.1,127-145).
gctgccagtaccatggaaa

SEQ ID NO: 656672 - DNA, 19 bp, Mus musculus
  siRNA target sequence for Pbsn (NM_017471.1,132-150).
cagtaccatggaaaagata

SEQ ID NO: 656673 - DNA, 19 bp, Mus musculus
  siRNA target sequence for Pbsn (NM_017471.1,177-195).
cttccgtcacattttgtgt

SEQ ID NO: 656674 - DNA, 19 bp, Mus musculus
  siRNA target sequence for Pbsn (NM_017471.1,211-229).
caagtctacctctattttt

SEQ ID NO: 656675 - DNA, 19 bp, Mus musculus
  siRNA target sequence for Pbsn (NM_017471.1,242-260).
ggactaagtgccaactgta

SEQ ID NO: 656676 - DNA, 19 bp, Mus musculus
  siRNA target sequence for Pbsn (NM_017471.1,243-261).
gactaagtgccaactgtat

SEQ ID NO: 656677 - DNA, 19 bp, Mus musculus
  siRNA target sequence for Pbsn (NM_017471.1,245-263).
ctaagtgccaactgtataa

SEQ ID NO: 656678 - DNA, 19 bp, Mus musculus
  siRNA target sequence for Pbsn (NM_017471.1,252-270).
ccaactgtataaagtcata

SEQ ID NO: 656679 - DNA, 19 bp, Mus musculus
  siRNA target sequence for Pbsn (NM_017471.1,256-274).
ctgtataaagtcataggaa

SEQ ID NO: 656680 - DNA, 19 bp, Mus musculus
  siRNA target sequence for Pbsn (NM_017471.1,311-329).
ggagcatagcattcatgtt

SEQ ID NO: 656681 - DNA, 19 bp, Mus musculus
  siRNA target sequence for Pbsn (NM_017471.1,314-332).
gcatagcattcatgttaaa

SEQ ID NO: 656682 - DNA, 19 bp, Mus musculus
  siRNA target sequence for Pbsn (NM_017471.1,333-351).
gatggtaaatgagaagata

SEQ ID NO: 656683 - DNA, 19 bp, Mus musculus
  siRNA target sequence for Pbsn (NM_017471.1,337-355).
gtaaatgagaagatattgt

SEQ ID NO: 656684 - DNA, 19 bp, Mus musculus
  siRNA target sequence for Pbsn (NM_017471.1,447-465).
gacggagttcatgaactta

SEQ ID NO: 656685 - DNA, 19 bp, Mus musculus
  siRNA target sequence for Pbsn (NM_017471.1,449-467).
cggagttcatgaacttagt

SEQ ID NO: 656686 - DNA, 19 bp, Mus musculus
  siRNA target sequence for Pbsn (NM_017471.1,477-495).
gggcattgaggaagagaat

SEQ ID NO: 656687 - DNA, 19 bp, Mus musculus
  siRNA target sequence for Pbsn (NM_017471.1,479-497).
gcattgaggaagagaatgt

SEQ ID NO: 656688 - DNA, 19 bp, Mus musculus
  siRNA target sequence for Pnma2 (NM_175498.2,471-489).
ctggaggagtggtgtaaga

SEQ ID NO: 656689 - DNA, 19 bp, Mus musculus
  siRNA target sequence for Pnma2 (NM_175498.2,602-620).
ccggctactaggcaagata

SEQ ID NO: 656690 - DNA, 19 bp, Mus musculus
  siRNA target sequence for Pnma2 (NM_175498.2,603-621).
cggctactaggcaagatat

SEQ ID NO: 656691 - DNA, 19 bp, Mus musculus
  siRNA target sequence for Pnma2 (NM_175498.2,604-622).
ggctactaggcaagatatt

SEQ ID NO: 656692 - DNA, 19 bp, Mus musculus
  siRNA target sequence for Pnma2 (NM_175498.2,635-653).
caacaccagtgttgtctta

SEQ ID NO: 656693 - DNA, 19 bp, Mus musculus
  siRNA target sequence for Pnma2 (NM_175498.2,769-787).
gactgaacctctttctaga

SEQ ID NO: 656694 - DNA, 19 bp, Mus musculus
  siRNA target sequence for Pnma2 (NM_175498.2,815-833).
gttccgagcccttaagcat

SEQ ID NO: 656695 - DNA, 19 bp, Mus musculus
  siRNA target sequence for Pnma2 (NM_175498.2,860-878).
ctgcacgtcccctgagtta

SEQ ID NO: 656696 - DNA, 19 bp, Mus musculus
  siRNA target sequence for Pnma2 (NM_175498.2,862-880).
gcacgtcccctgagttatt

SEQ ID NO: 656697 - DNA, 19 bp, Mus musculus
  siRNA target sequence for Pnma2 (NM_175498.2,873-891).
gagttattggcccatttga

SEQ ID NO: 656698 - DNA, 19 bp, Mus musculus
  siRNA target sequence for Pnma2 (NM_175498.2,930-948).
cctgtgaagtactgtaaga

SEQ ID NO: 656699 - DNA, 19 bp, Mus musculus
  siRNA target sequence for Pnma2 (NM_175498.2,938-956).
gtactgtaagatgagaata

SEQ ID NO: 656700 - DNA, 19 bp, Mus musculus
  siRNA target sequence for Pnma2 (NM_175498.2,1100-1118).
ggacctcatgcacatagta

SEQ ID NO: 656701 - DNA, 19 bp, Mus musculus
  siRNA target sequence for Pnma2 (NM_175498.2,1201-1219).
cctcacaggtaaaatacct

SEQ ID NO: 656702 - DNA, 19 bp, Mus musculus
  siRNA target sequence for Pnma2 (NM_175498.2,1202-1220).
ctcacaggtaaaataccta

SEQ ID NO: 656703 - DNA, 19 bp, Mus musculus
  siRNA target sequence for Pnma2 (NM_175498.2,1524-1542).
ggctgctggaacaattcaa

SEQ ID NO: 656704 - DNA, 19 bp, Mus musculus
  siRNA target sequence for Sec14l1 (NM_028777.1,155-173).
ccccagtgcgggtgtataa

SEQ ID NO: 656705 - DNA, 19 bp, Mus musculus
  siRNA target sequence for Sec14l1 (NM_028777.1,156-174).
cccagtgcgggtgtataaa

SEQ ID NO: 656706 - DNA, 19 bp, Mus musculus
  siRNA target sequence for Sec14l1 (NM_028777.1,158-176).
cagtgcgggtgtataaaca

SEQ ID NO: 656707 - DNA, 19 bp, Mus musculus
  siRNA target sequence for Sec14l1 (NM_028777.1,175-193).
catccctttgagttaatta

SEQ ID NO: 656708 - DNA, 19 bp, Mus musculus
  siRNA target sequence for Sec14l1 (NM_028777.1,207-225).
gaggaggtttcctacatgt

SEQ ID NO: 656709 - DNA, 19 bp, Mus musculus
  siRNA target sequence for Sec14l1 (NM_028777.1,305-323).
ggcgctgcaagctggatat

SEQ ID NO: 656710 - DNA, 19 bp, Mus musculus
  siRNA target sequence for Sec14l1 (NM_028777.1,306-324).
gcgctgcaagctggatata

SEQ ID NO: 656711 - DNA, 19 bp, Mus musculus
  siRNA target sequence for Sec14l1 (NM_028777.1,328-346).
gcgcccaggctgttgaaga

SEQ ID NO: 656712 - DNA, 19 bp, Mus musculus
  siRNA target sequence for Sec14l1 (NM_028777.1,351-369).
cgcaggagtcgattacgtt

SEQ ID NO: 656713 - DNA, 19 bp, Mus musculus
  siRNA target sequence for Sec14l1 (NM_028777.1,352-370).
gcaggagtcgattacgttt

SEQ ID NO: 656714 - DNA, 19 bp, Mus musculus
  siRNA target sequence for Sec14l1 (NM_028777.1,353-371).
caggagtcgattacgttta

SEQ ID NO: 656715 - DNA, 19 bp, Mus musculus
  siRNA target sequence for Sec14l1 (NM_028777.1,355-373).
ggagtcgattacgtttatt

SEQ ID NO: 656716 - DNA, 19 bp, Mus musculus
  siRNA target sequence for Sec14l1 (NM_028777.1,356-374).
gagtcgattacgtttattt

SEQ ID NO: 656717 - DNA, 19 bp, Mus musculus
  siRNA target sequence for Sec14l1 (NM_028777.1,479-497).
cggttcaccctgagaatga

SEQ ID NO: 656718 - DNA, 19 bp, Mus musculus
  siRNA target sequence for Sec14l1 (NM_028777.1,521-539).
ctgcaagtttagatatcaa

SEQ ID NO: 656719 - DNA, 19 bp, Mus musculus
  siRNA target sequence for Sec14l1 (NM_028777.1,523-541).
gcaagtttagatatcaaat

SEQ ID NO: 656720 - DNA, 19 bp, Mus musculus
  siRNA target sequence for Sec14l1 (NM_028777.1,577-595).
gccatgaaacattatacaa

SEQ ID NO: 656721 - DNA, 19 bp, Mus musculus
  siRNA target sequence for Sec14l1 (NM_028777.1,691-709).
gtgggaccctcagaaacat

SEQ ID NO: 656722 - DNA, 19 bp, Mus musculus
  siRNA target sequence for Sec14l1 (NM_028777.1,697-715).
ccctcagaaacatgttcat

SEQ ID NO: 656723 - DNA, 19 bp, Mus musculus
  siRNA target sequence for Sec14l1 (NM_028777.1,699-717).
ctcagaaacatgttcatca

SEQ ID NO: 656724 - DNA, 19 bp, Mus musculus
  siRNA target sequence for Sec14l1 (NM_028777.1,831-849).
gggaacccctgacgataaa

SEQ ID NO: 656725 - DNA, 19 bp, Mus musculus
  siRNA target sequence for Sec14l1 (NM_028777.1,832-850).
ggaacccctgacgataaat

SEQ ID NO: 656726 - DNA, 19 bp, Mus musculus
  siRNA target sequence for Sec14l1 (NM_028777.1,833-851).
gaacccctgacgataaatt

SEQ ID NO: 656727 - DNA, 19 bp, Mus musculus
  siRNA target sequence for Sec14l1 (NM_028777.1,836-854).
cccctgacgataaattaga

SEQ ID NO: 656728 - DNA, 19 bp, Mus musculus
  siRNA target sequence for Sec14l1 (NM_028777.1,837-855).
ccctgacgataaattagat

SEQ ID NO: 656729 - DNA, 19 bp, Mus musculus
  siRNA target sequence for Sec14l1 (NM_028777.1,853-871).
gatgccgactacatcaaga

SEQ ID NO: 656730 - DNA, 19 bp, Mus musculus
  siRNA target sequence for Sec14l1 (NM_028777.1,856-874).
gccgactacatcaagagat

SEQ ID NO: 656731 - DNA, 19 bp, Mus musculus
  siRNA target sequence for Sec14l1 (NM_028777.1,857-875).
ccgactacatcaagagata

SEQ ID NO: 656732 - DNA, 19 bp, Mus musculus
  siRNA target sequence for Sec14l1 (NM_028777.1,859-877).
gactacatcaagagatact

SEQ ID NO: 656733 - DNA, 19 bp, Mus musculus
  siRNA target sequence for Sec14l1 (NM_028777.1,1054-1072).
cagcaccaggtggattaca

SEQ ID NO: 656734 - DNA, 19 bp, Mus musculus
  siRNA target sequence for Sec14l1 (NM_028777.1,1218-1236).
ggccctactgcgatacgtt

SEQ ID NO: 656735 - DNA, 19 bp, Mus musculus
  siRNA target sequence for Sec14l1 (NM_028777.1,1222-1240).
ctactgcgatacgttcttt

SEQ ID NO: 656736 - DNA, 19 bp, Mus musculus
  siRNA target sequence for Sec14l1 (NM_028777.1,1227-1245).
gcgatacgttctttccata

SEQ ID NO: 656737 - DNA, 19 bp, Mus musculus
  siRNA target sequence for Sec14l1 (NM_028777.1,1472-1490).
cgctggttagtccatttat

SEQ ID NO: 656738 - DNA, 19 bp, Mus musculus
  siRNA target sequence for Sec14l1 (NM_028777.1,1515-1533).
cctcatttatgcaggaaat

SEQ ID NO: 656739 - DNA, 19 bp, Mus musculus
  siRNA target sequence for Sec14l1 (NM_028777.1,1555-1573).
ctgctggattacatcgata

SEQ ID NO: 656740 - DNA, 19 bp, Mus musculus
  siRNA target sequence for Sec14l1 (NM_028777.1,1561-1579).
gattacatcgataaagaga

SEQ ID NO: 656741 - DNA, 19 bp, Mus musculus
  siRNA target sequence for Sec14l1 (NM_028777.1,1636-1654).
gtccccaaatccttgtaca

SEQ ID NO: 656742 - DNA, 19 bp, Mus musculus
  siRNA target sequence for Sec14l1 (NM_028777.1,1713-1731).
gtctgccagcgtgttcaaa

SEQ ID NO: 656743 - DNA, 19 bp, Mus musculus
  siRNA target sequence for Sec14l1 (NM_028777.1,1735-1753).
gctccacatgagattctca

SEQ ID NO: 656744 - DNA, 19 bp, Mus musculus
  siRNA target sequence for Sec14l1 (NM_028777.1,1807-1825).
ggggacatcgtctttaaca

SEQ ID NO: 656745 - DNA, 19 bp, Mus musculus
  siRNA target sequence for Sec14l1 (NM_028777.1,1808-1826).
gggacatcgtctttaacat

SEQ ID NO: 656746 - DNA, 19 bp, Mus musculus
  siRNA target sequence for Sec14l1 (NM_028777.1,1809-1827).
ggacatcgtctttaacatt

SEQ ID NO: 656747 - DNA, 19 bp, Mus musculus
  siRNA target sequence for Sec14l1 (NM_028777.1,1810-1828).
gacatcgtctttaacattt

SEQ ID NO: 656748 - DNA, 19 bp, Mus musculus
  siRNA target sequence for Sec14l1 (NM_028777.1,1908-1926).
cgtgcagctgatagacaaa

SEQ ID NO: 656749 - DNA, 19 bp, Mus musculus
  siRNA target sequence for Sec14l1 (NM_028777.1,2015-2033).
ggtggccaggcttctacat

SEQ ID NO: 656750 - DNA, 19 bp, Mus musculus
  siRNA target sequence for Sec14l1 (NM_028777.1,2123-2141).
cccacaagtgcaaagtcat

SEQ ID NO: 656751 - DNA, 19 bp, Mus musculus
  siRNA target sequence for Sec14l1 (NM_028777.1,2155-2173).
gtgatcggctctgaagatt

SEQ ID NO: 656752 - DNA, 19 bp, Mus musculus
  siRNA target sequence for Sec14l1 (NM_028777.1,2256-2274).
gcaatccagctccatgatt

SEQ ID NO: 656753 - DNA, 19 bp, Mus musculus
  siRNA target sequence for Slc11a1 (NM_013612.1,217-235).
gcgcagaccagggtacatt

SEQ ID NO: 656754 - DNA, 19 bp, Mus musculus
  siRNA target sequence for Slc11a1 (NM_013612.1,297-315).
gacccgggaaacattgagt

SEQ ID NO: 656755 - DNA, 19 bp, Mus musculus
  siRNA target sequence for Slc11a1 (NM_013612.1,370-388).
gggcgactgtgctaggttt

SEQ ID NO: 656756 - DNA, 19 bp, Mus musculus
  siRNA target sequence for Slc11a1 (NM_013612.1,542-560).
gacggctatctccttcaat

SEQ ID NO: 656757 - DNA, 19 bp, Mus musculus
  siRNA target sequence for Slc11a1 (NM_013612.1,674-692).
cggtctcctcattaccata

SEQ ID NO: 656758 - DNA, 19 bp, Mus musculus
  siRNA target sequence for Slc11a1 (NM_013612.1,676-694).
gtctcctcattaccataat

SEQ ID NO: 656759 - DNA, 19 bp, Mus musculus
  siRNA target sequence for Slc11a1 (NM_013612.1,701-719).
gaccttcggctatgagtat

SEQ ID NO: 656760 - DNA, 19 bp, Mus musculus
  siRNA target sequence for Slc11a1 (NM_013612.1,703-721).
ccttcggctatgagtatgt

SEQ ID NO: 656761 - DNA, 19 bp, Mus musculus
  siRNA target sequence for Slc11a1 (NM_013612.1,909-927).
cgagaagccaacatgtact

SEQ ID NO: 656762 - DNA, 19 bp, Mus musculus
  siRNA target sequence for Slc11a1 (NM_013612.1,910-928).
gagaagccaacatgtactt

SEQ ID NO: 656763 - DNA, 19 bp, Mus musculus
  siRNA target sequence for Slc11a1 (NM_013612.1,980-998).
cgtcatggctgtttttggt

SEQ ID NO: 656764 - DNA, 19 bp, Mus musculus
  siRNA target sequence for Slc11a1 (NM_013612.1,1054-1072).
gcctccagaactatgctaa

SEQ ID NO: 656765 - DNA, 19 bp, Mus musculus
  siRNA target sequence for Slc11a1 (NM_013612.1,1059-1077).
cagaactatgctaagatct

SEQ ID NO: 656766 - DNA, 19 bp, Mus musculus
  siRNA target sequence for Slc11a1 (NM_013612.1,1127-1145).
gatcctaggctgtctcttt

SEQ ID NO: 656767 - DNA, 19 bp, Mus musculus
  siRNA target sequence for Slc11a1 (NM_013612.1,1577-1595).
ggctctgttcgcaataggt

SEQ ID NO: 656768 - DNA, 19 bp, Mus musculus
  siRNA target sequence for Slc11a1 (NM_013612.1,1579-1597).
ctctgttcgcaataggtta

SEQ ID NO: 656769 - DNA, 19 bp, Mus musculus
  siRNA target sequence for Slc11a2 (NM_008732.1,238-256).
gaggagtactcttgtttta

SEQ ID NO: 656770 - DNA, 19 bp, Mus musculus
  siRNA target sequence for Slc11a2 (NM_008732.1,248-266).
cttgttttagctttcgtaa

SEQ ID NO: 656771 - DNA, 19 bp, Mus musculus
  siRNA target sequence for Slc11a2 (NM_008732.1,251-269).
gttttagctttcgtaaact

SEQ ID NO: 656772 - DNA, 19 bp, Mus musculus
  siRNA target sequence for Slc11a2 (NM_008732.1,316-334).
gacccaggaaacatcgaat

SEQ ID NO: 656773 - DNA, 19 bp, Mus musculus
  siRNA target sequence for Slc11a2 (NM_008732.1,323-341).
gaaacatcgaatctgattt

SEQ ID NO: 656774 - DNA, 19 bp, Mus musculus
  siRNA target sequence for Slc11a2 (NM_008732.1,353-371).
cagtggctggatttaagct

SEQ ID NO: 656775 - DNA, 19 bp, Mus musculus
  siRNA target sequence for Slc11a2 (NM_008732.1,516-534).
ggtggagttggcaatcatt

SEQ ID NO: 656776 - DNA, 19 bp, Mus musculus
  siRNA target sequence for Slc11a2 (NM_008732.1,520-538).
gagttggcaatcattggtt

SEQ ID NO: 656777 - DNA, 19 bp, Mus musculus
  siRNA target sequence for Slc11a2 (NM_008732.1,563-581).
cagccatcgccatcaatct

SEQ ID NO: 656778 - DNA, 19 bp, Mus musculus
  siRNA target sequence for Slc11a2 (NM_008732.1,624-642).
caccatcgcagacactttt

SEQ ID NO: 656779 - DNA, 19 bp, Mus musculus
  siRNA target sequence for Slc11a2 (NM_008732.1,630-648).
cgcagacacttttgtgttt

SEQ ID NO: 656780 - DNA, 19 bp, Mus musculus
  siRNA target sequence for Slc11a2 (NM_008732.1,714-732).
ggccctcacgtttggatat

SEQ ID NO: 656781 - DNA, 19 bp, Mus musculus
  siRNA target sequence for Slc11a2 (NM_008732.1,716-734).
ccctcacgtttggatatga

SEQ ID NO: 656782 - DNA, 19 bp, Mus musculus
  siRNA target sequence for Slc11a2 (NM_008732.1,718-736).
ctcacgtttggatatgagt

SEQ ID NO: 656783 - DNA, 19 bp, Mus musculus
  siRNA target sequence for Slc11a2 (NM_008732.1,722-740).
cgtttggatatgagtacat

SEQ ID NO: 656784 - DNA, 19 bp, Mus musculus
  siRNA target sequence for Slc11a2 (NM_008732.1,728-746).
gatatgagtacattacagt

SEQ ID NO: 656785 - DNA, 19 bp, Mus musculus
  siRNA target sequence for Slc11a2 (NM_008732.1,925-943).
gtgcgggaagccaataagt

SEQ ID NO: 656786 - DNA, 19 bp, Mus musculus
  siRNA target sequence for Slc11a2 (NM_008732.1,959-977).
cctgcatcgcgctctttgt

SEQ ID NO: 656787 - DNA, 19 bp, Mus musculus
  siRNA target sequence for Slc11a2 (NM_008732.1,960-978).
ctgcatcgcgctctttgtt

SEQ ID NO: 656788 - DNA, 19 bp, Mus musculus
  siRNA target sequence for Slc11a2 (NM_008732.1,1008-1026).
cgtctttgctgaagcattt

SEQ ID NO: 656789 - DNA, 19 bp, Mus musculus
  siRNA target sequence for Slc11a2 (NM_008732.1,1015-1033).
gctgaagcattttttgaga

SEQ ID NO: 656790 - DNA, 19 bp, Mus musculus
  siRNA target sequence for Slc11a2 (NM_008732.1,1048-1066).
gtggttgaagtctgcaaaa

SEQ ID NO: 656791 - DNA, 19 bp, Mus musculus
  siRNA target sequence for Slc11a2 (NM_008732.1,1050-1068).
ggttgaagtctgcaaaaat

SEQ ID NO: 656792 - DNA, 19 bp, Mus musculus
  siRNA target sequence for Slc11a2 (NM_008732.1,1359-1377).
gcacctaacggggatgaat

SEQ ID NO: 656793 - DNA, 19 bp, Mus musculus
  siRNA target sequence for Slc11a2 (NM_008732.1,1363-1381).
ctaacggggatgaatgact

SEQ ID NO: 656794 - DNA, 19 bp, Mus musculus
  siRNA target sequence for Slc11a2 (NM_008732.1,1452-1470).
gccagtgatgagtgagttt

SEQ ID NO: 656795 - DNA, 19 bp, Mus musculus
  siRNA target sequence for Slc11a2 (NM_008732.1,1536-1554).
gtactttgtagtggtttat

SEQ ID NO: 656796 - DNA, 19 bp, Mus musculus
  siRNA target sequence for Slc11a2 (NM_008732.1,1568-1586).
ggcatgtggcactctatgt

SEQ ID NO: 656797 - DNA, 19 bp, Mus musculus
  siRNA target sequence for Slc11a2 (NM_008732.1,1597-1615).
gtggttagcgtggcttatt

SEQ ID NO: 656798 - DNA, 19 bp, Mus musculus
  siRNA target sequence for Slc11a2 (NM_008732.1,1600-1618).
gttagcgtggcttatttga

SEQ ID NO: 656799 - DNA, 19 bp, Mus musculus
  siRNA target sequence for Slc11a2 (NM_008732.1,1640-1658).
ggcagtgtttgattgcatt

SEQ ID NO: 656800 - DNA, 19 bp, Mus musculus
  siRNA target sequence for Slc11a2 (NM_008732.1,1706-1724).
ccgctcagcctgaactcta

SEQ ID NO: 656801 - DNA, 19 bp, Mus musculus
  siRNA target sequence for Slc11a2 (NM_008732.1,1707-1725).
cgctcagcctgaactctat

SEQ ID NO: 656802 - DNA, 19 bp, Mus musculus
  siRNA target sequence for Slc11a2 (NM_008732.1,1715-1733).
ctgaactctatcttctgaa

SEQ ID NO: 656803 - DNA, 19 bp, Mus musculus
  siRNA target sequence for Slc15a3 (NM_023044.1,663-681).
ctcaacagcttgaacttca

SEQ ID NO: 656804 - DNA, 19 bp, Mus musculus
  siRNA target sequence for Slc15a3 (NM_023044.1,955-973).
gcgcgaccaccctctactt

SEQ ID NO: 656805 - DNA, 19 bp, Mus musculus
  siRNA target sequence for Slc15a3 (NM_023044.1,1138-1156).
ctttcatcgagcagaacat

SEQ ID NO: 656806 - DNA, 19 bp, Mus musculus
  siRNA target sequence for Slc15a3 (NM_023044.1,1149-1167).
cagaacatcagcttcctat

SEQ ID NO: 656807 - DNA, 19 bp, Mus musculus
  siRNA target sequence for Slc15a3 (NM_023044.1,1196-1214).
gggcctggcattcttcatt

SEQ ID NO: 656808 - DNA, 19 bp, Mus musculus
  siRNA target sequence for Slc15a3 (NM_023044.1,1197-1215).
ggcctggcattcttcattt

SEQ ID NO: 656809 - DNA, 19 bp, Mus musculus
  siRNA target sequence for Slc15a3 (NM_023044.1,1444-1462).
cccttgtgccttattggat

SEQ ID NO: 656810 - DNA, 19 bp, Mus musculus
  siRNA target sequence for Slc15a3 (NM_023044.1,1449-1467).
gtgccttattggatggtat

SEQ ID NO: 656811 - DNA, 19 bp, Mus musculus
  siRNA target sequence for Slc15a3 (NM_023044.1,1452-1470).
ccttattggatggtatatt

SEQ ID NO: 656812 - DNA, 19 bp, Mus musculus
  siRNA target sequence for Slc15a3 (NM_023044.1,1561-1579).
gatcagatagcagtaacta

SEQ ID NO: 656813 - DNA, 19 bp, Mus musculus
  siRNA target sequence for Slc15a3 (NM_023044.1,1598-1616).
gctcctactggccaatgtt

SEQ ID NO: 656814 - DNA, 19 bp, Mus musculus
  siRNA target sequence for Slc15a3 (NM_023044.1,1880-1898).
cggggtcagtgagatcttt

SEQ ID NO: 656815 - DNA, 19 bp, Mus musculus
  siRNA target sequence for Slc15a3 (NM_023044.1,1943-1961).
ctccatgcagggtgcaatt

SEQ ID NO: 656816 - DNA, 19 bp, Mus musculus
  siRNA target sequence for Slc15a3 (NM_023044.1,1945-1963).
ccatgcagggtgcaattat

SEQ ID NO: 656817 - DNA, 19 bp, Mus musculus
  siRNA target sequence for Slc15a3 (NM_023044.1,1956-1974).
gcaattatgggcatcttct

SEQ ID NO: 656818 - DNA, 19 bp, Mus musculus
  siRNA target sequence for Slc15a3 (NM_023044.1,2015-2033).
ggtggccctactgtctttt

SEQ ID NO: 656819 - DNA, 19 bp, Mus musculus
  siRNA target sequence for Slc15a3 (NM_023044.1,2018-2036).
ggccctactgtcttttcct

SEQ ID NO: 656820 - DNA, 19 bp, Mus musculus
  siRNA target sequence for Slc15a3 (NM_023044.1,2085-2103).
cagatggaccgttacttct

SEQ ID NO: 656821 - DNA, 19 bp, Mus musculus
  siRNA target sequence for Slc18a1 (NM_153054.1,550-568).
gtatgcgacagagttcaaa

SEQ ID NO: 656822 - DNA, 19 bp, Mus musculus
  siRNA target sequence for Slc18a1 (NM_153054.1,554-572).
gcgacagagttcaaagaca

SEQ ID NO: 656823 - DNA, 19 bp, Mus musculus
  siRNA target sequence for Slc18a1 (NM_153054.1,555-573).
cgacagagttcaaagacat

SEQ ID NO: 656824 - DNA, 19 bp, Mus musculus
  siRNA target sequence for Slc18a1 (NM_153054.1,560-578).
gagttcaaagacatcaact

SEQ ID NO: 656825 - DNA, 19 bp, Mus musculus
  siRNA target sequence for Slc18a1 (NM_153054.1,664-682).
caccaccatgactgtagaa

SEQ ID NO: 656826 - DNA, 19 bp, Mus musculus
  siRNA target sequence for Slc18a1 (NM_153054.1,803-821).
gtccggattgggattctat

SEQ ID NO: 656827 - DNA, 19 bp, Mus musculus
  siRNA target sequence for Slc18a1 (NM_153054.1,863-881).
gtaggacctcttactaaca

SEQ ID NO: 656828 - DNA, 19 bp, Mus musculus
  siRNA target sequence for Slc18a1 (NM_153054.1,889-907).
ctatcacatccccatgttt

SEQ ID NO: 656829 - DNA, 19 bp, Mus musculus
  siRNA target sequence for Slc18a1 (NM_153054.1,960-978).
cctatgccctgctgtttgt

SEQ ID NO: 656830 - DNA, 19 bp, Mus musculus
  siRNA target sequence for Slc18a1 (NM_153054.1,995-1013).
ggcattggatcttcatttt

SEQ ID NO: 656831 - DNA, 19 bp, Mus musculus
  siRNA target sequence for Slc18a1 (NM_153054.1,1044-1062).
gtgtctatacggataacta

SEQ ID NO: 656832 - DNA, 19 bp, Mus musculus
  siRNA target sequence for Slc18a1 (NM_153054.1,1134-1152).
gaagtgtgatgtatgaatt

SEQ ID NO: 656833 - DNA, 19 bp, Mus musculus
  siRNA target sequence for Slc18a1 (NM_153054.1,1222-1240).
catcctatggccttcgaaa

SEQ ID NO: 656834 - DNA, 19 bp, Mus musculus
  siRNA target sequence for Slc18a1 (NM_153054.1,1442-1460).
ctcattggcacgaaccttt

SEQ ID NO: 656835 - DNA, 19 bp, Mus musculus
  siRNA target sequence for Slc18a1 (NM_153054.1,1444-1462).
cattggcacgaaccttttt

SEQ ID NO: 656836 - DNA, 19 bp, Mus musculus
  siRNA target sequence for Slc18a1 (NM_153054.1,1463-1481).
ggtgtgttggccaacaaga

SEQ ID NO: 656837 - DNA, 19 bp, Mus musculus
  siRNA target sequence for Slc18a1 (NM_153054.1,1509-1527).
gaatggtagctgtaggtat

SEQ ID NO: 656838 - DNA, 19 bp, Mus musculus
  siRNA target sequence for Slc18a1 (NM_153054.1,1788-1806).
gaactatcaacatcatcta

SEQ ID NO: 656839 - DNA, 19 bp, Mus musculus
  siRNA target sequence for Slc22al2 (NM_009203.2,452-470).
ccttggacccgatgttctt

SEQ ID NO: 656840 - DNA, 19 bp, Mus musculus
  siRNA target sequence for Slc22al2 (NM_009203.2,745-763).
gccatgcctcagataggtt

SEQ ID NO: 656841 - DNA, 19 bp, Mus musculus
  siRNA target sequence for Slc22al2 (NM_009203.2,1367-1385).
gcaagccctaggaagcaat

SEQ ID NO: 656842 - DNA, 19 bp, Mus musculus
  siRNA target sequence for Slc22al2 (NM_009203.2,1368-1386).
caagccctaggaagcaata

SEQ ID NO: 656843 - DNA, 19 bp, Mus musculus
  siRNA target sequence for Slc22al2 (NM_009203.2,1371-1389).
gccctaggaagcaatatct

SEQ ID NO: 656844 - DNA, 19 bp, Mus musculus
  siRNA target sequence for Slc22al2 (NM_009203.2,1372-1390).
ccctaggaagcaatatctt

SEQ ID NO: 656845 - DNA, 19 bp, Mus musculus
  siRNA target sequence for Slc22al2 (NM_009203.2,1694-1712).
catgctagggcctttggta

SEQ ID NO: 656846 - DNA, 19 bp, Mus musculus
  siRNA target sequence for Slc22al2 (NM_009203.2,1799-1817).
gcctgagaccaagaactta

SEQ ID NO: 656847 - DNA, 19 bp, Mus musculus
  siRNA target sequence for Slc23a3 (NM_194333.1,70-88).
ccattccacttctatctga

SEQ ID NO: 656848 - DNA, 19 bp, Mus musculus
  siRNA target sequence for Slc23a3 (NM_194333.1,370-388).
gcagcaggctacctctaat

SEQ ID NO: 656849 - DNA, 19 bp, Mus musculus
  siRNA target sequence for Slc23a3 (NM_194333.1,373-391).
gcaggctacctctaatcca

SEQ ID NO: 656850 - DNA, 19 bp, Mus musculus
  siRNA target sequence for Slc23a3 (NM_194333.1,392-410).
ggctccgtccctagagttt

SEQ ID NO: 656851 - DNA, 19 bp, Mus musculus
  siRNA target sequence for Slc23a3 (NM_194333.1,394-412).
ctccgtccctagagtttct

SEQ ID NO: 656852 - DNA, 19 bp, Mus musculus
  siRNA target sequence for Slc23a3 (NM_194333.1,397-415).
cgtccctagagtttcttat

SEQ ID NO: 656853 - DNA, 19 bp, Mus musculus
  siRNA target sequence for Slc23a3 (NM_194333.1,486-504).
ctgcccctgtgtagtttga

SEQ ID NO: 656854 - DNA, 19 bp, Mus musculus
  siRNA target sequence for Slc23a3 (NM_194333.1,578-596).
gctgctgcagggcactata

SEQ ID NO: 656855 - DNA, 19 bp, Mus musculus
  siRNA target sequence for Slc23a3 (NM_194333.1,581-599).
gctgcagggcactatagga

SEQ ID NO: 656856 - DNA, 19 bp, Mus musculus
  siRNA target sequence for Slc23a3 (NM_194333.1,935-953).
ctcggatgcaccttggttt

SEQ ID NO: 656857 - DNA, 19 bp, Mus musculus
  siRNA target sequence for Slc23a3 (NM_194333.1,1043-1061).
cagctccttgggttgctat

SEQ ID NO: 656858 - DNA, 19 bp, Mus musculus
  siRNA target sequence for Slc23a3 (NM_194333.1,1204-1222).
gcacagtgagtctttttca

SEQ ID NO: 656859 - DNA, 19 bp, Mus musculus
  siRNA target sequence for Slc23a3 (NM_194333.1,1245-1263).
cacctagtggggttgttct

SEQ ID NO: 656860 - DNA, 19 bp, Mus musculus
  siRNA target sequence for Slc23a3 (NM_194333.1,1502-1520).
gagccccctggatatgttt

SEQ ID NO: 656861 - DNA, 19 bp, Mus musculus
  siRNA target sequence for Slc23a3 (NM_194333.1,1566-1584).
ggctttctcctagaaaaca

SEQ ID NO: 656862 - DNA, 19 bp, Mus musculus
  siRNA target sequence for Slc23a3 (NM_194333.1,1572-1590).
ctcctagaaaacactatat

SEQ ID NO: 656863 - DNA, 19 bp, Mus musculus
  siRNA target sequence for Slc23a3 (NM_194333.1,1574-1592).
cctagaaaacactatatct

SEQ ID NO: 656864 - DNA, 19 bp, Mus musculus
  siRNA target sequence for Slc23a3 (NM_194333.1,1625-1643).
gctgccaacttctttcact

SEQ ID NO: 656865 - DNA, 19 bp, Mus musculus
  siRNA target sequence for Slc23a3 (NM_194333.1,1640-1658).
cactgcccaagaaattcaa

SEQ ID NO: 656866 - DNA, 19 bp, Mus musculus
  siRNA target sequence for Slc23a3 (NM_194333.1,1817-1835).
cgacttgttgcctaactct

SEQ ID NO: 656867 - DNA, 19 bp, Mus musculus
  siRNA target sequence for Slc23a3 (NM_194333.1,1828-1846).
ctaactctggggaatcgta

SEQ ID NO: 656868 - DNA, 19 bp, Mus musculus
  siRNA target sequence for Slc37a3 (NM_028123.1,106-124).
cctggccacgatttttgca

SEQ ID NO: 656869 - DNA, 19 bp, Mus musculus
  siRNA target sequence for Slc37a3 (NM_028123.1,177-195).
ctcacgttcttcagctatt

SEQ ID NO: 656870 - DNA, 19 bp, Mus musculus
  siRNA target sequence for Slc37a3 (NM_028123.1,179-197).
cacgttcttcagctattca

SEQ ID NO: 656871 - DNA, 19 bp, Mus musculus
  siRNA target sequence for Slc37a3 (NM_028123.1,200-218).
gctccatgcgtcaagaaaa

SEQ ID NO: 656872 - DNA, 19 bp, Mus musculus
  siRNA target sequence for Slc37a3 (NM_028123.1,201-219).
ctccatgcgtcaagaaaaa

SEQ ID NO: 656873 - DNA, 19 bp, Mus musculus
  siRNA target sequence for Slc37a3 (NM_028123.1,226-244).
gcaatgtgaaagtcagtat

SEQ ID NO: 656874 - DNA, 19 bp, Mus musculus
  siRNA target sequence for Slc37a3 (NM_028123.1,231-249).
gtgaaagtcagtatctcta

SEQ ID NO: 656875 - DNA, 19 bp, Mus musculus
  siRNA target sequence for Slc37a3 (NM_028123.1,304-322).
ggagcagcaaccatctatt

SEQ ID NO: 656876 - DNA, 19 bp, Mus musculus
  siRNA target sequence for Slc37a3 (NM_028123.1,305-323).
gagcagcaaccatctattt

SEQ ID NO: 656877 - DNA, 19 bp, Mus musculus
  siRNA target sequence for Slc37a3 (NM_028123.1,354-372).
ggaacactagatactgttt

SEQ ID NO: 656878 - DNA, 19 bp, Mus musculus
  siRNA target sequence for Slc37a3 (NM_028123.1,355-373).
gaacactagatactgtttt

SEQ ID NO: 656879 - DNA, 19 bp, Mus musculus
  siRNA target sequence for Slc37a3 (NM_028123.1,358-376).
cactagatactgtttttct

SEQ ID NO: 656880 - DNA, 19 bp, Mus musculus
  siRNA target sequence for Slc37a3 (NM_028123.1,398-416).
cttcatcagcggcatcata

SEQ ID NO: 656881 - DNA, 19 bp, Mus musculus
  siRNA target sequence for Slc37a3 (NM_028123.1,434-452).
gcgatgggttctgtctttt

SEQ ID NO: 656882 - DNA, 19 bp, Mus musculus
  siRNA target sequence for Slc37a3 (NM_028123.1,466-484).
ctgcattcgtggtgtttgt

SEQ ID NO: 656883 - DNA, 19 bp, Mus musculus
  siRNA target sequence for Slc37a3 (NM_028123.1,468-486).
gcattcgtggtgtttgtct

SEQ ID NO: 656884 - DNA, 19 bp, Mus musculus
  siRNA target sequence for Slc37a3 (NM_028123.1,499-517).
cggaatggctgcacttcta

SEQ ID NO: 656885 - DNA, 19 bp, Mus musculus
  siRNA target sequence for Slc37a3 (NM_028123.1,535-553).
gcggtctgtggattgtgaa

SEQ ID NO: 656886 - DNA, 19 bp, Mus musculus
  siRNA target sequence for Slc37a3 (NM_028123.1,655-673).
gtgcttcggtgggcaatat

SEQ ID NO: 656887 - DNA, 19 bp, Mus musculus
  siRNA target sequence for Slc37a3 (NM_028123.1,657-675).
gcttcggtgggcaatattt

SEQ ID NO: 656888 - DNA, 19 bp, Mus musculus
  siRNA target sequence for Slc37a3 (NM_028123.1,658-676).
cttcggtgggcaatatttt

SEQ ID NO: 656889 - DNA, 19 bp, Mus musculus
  siRNA target sequence for Slc37a3 (NM_028123.1,697-715).
cggttctccagtatggtta

SEQ ID NO: 656890 - DNA, 19 bp, Mus musculus
  siRNA target sequence for Slc37a3 (NM_028123.1,702-720).
ctccagtatggttatgagt

SEQ ID NO: 656891 - DNA, 19 bp, Mus musculus
  siRNA target sequence for Slc37a3 (NM_028123.1,832-850).
gctcggaagaagattcaca

SEQ ID NO: 656892 - DNA, 19 bp, Mus musculus
  siRNA target sequence for Slc37a3 (NM_028123.1,930-948).
caagtgaaggccataagct

SEQ ID NO: 656893 - DNA, 19 bp, Mus musculus
  siRNA target sequence for Slc37a3 (NM_028123.1,1003-1021).
gcctgaagctagtgaacta

SEQ ID NO: 656894 - DNA, 19 bp, Mus musculus
  siRNA target sequence for Slc37a3 (NM_028123.1,1005-1023).
ctgaagctagtgaactact

SEQ ID NO: 656895 - DNA, 19 bp, Mus musculus
  siRNA target sequence for Slc37a3 (NM_028123.1,1083-1101).
gctgacaagctgtccattt

SEQ ID NO: 656896 - DNA, 19 bp, Mus musculus
  siRNA target sequence for Slc37a3 (NM_028123.1,1086-1104).
gacaagctgtccatttggt

SEQ ID NO: 656897 - DNA, 19 bp, Mus musculus
  siRNA target sequence for Slc37a3 (NM_028123.1,1106-1124).
cgacgtcggaggtatcata

SEQ ID NO: 656898 - DNA, 19 bp, Mus musculus
  siRNA target sequence for Slc37a3 (NM_028123.1,1225-1243).
gccgctctccaaacaataa

SEQ ID NO: 656899 - DNA, 19 bp, Mus musculus
  siRNA target sequence for Slc37a3 (NM_028123.1,1227-1245).
cgctctccaaacaataagt

SEQ ID NO: 656900 - DNA, 19 bp, Mus musculus
  siRNA target sequence for Slc37a3 (NM_028123.1,1246-1264).
ccatcaatgcgcttctgat

SEQ ID NO: 656901 - DNA, 19 bp, Mus musculus
  siRNA target sequence for Slc37a3 (NM_028123.1,1256-1274).
gcttctgatgaccattaca

SEQ ID NO: 656902 - DNA, 19 bp, Mus musculus
  siRNA target sequence for Slc37a3 (NM_028123.1,1265-1283).
gaccattacagggtttttt

SEQ ID NO: 656903 - DNA, 19 bp, Mus musculus
  siRNA target sequence for Slc37a3 (NM_028123.1,1288-1306).
gcggaccatccaatatggt

SEQ ID NO: 656904 - DNA, 19 bp, Mus musculus
  siRNA target sequence for Slc37a3 (NM_028123.1,1304-1322).
ggttagctctgctatttct

SEQ ID NO: 656905 - DNA, 19 bp, Mus musculus
  siRNA target sequence for Slc37a3 (NM_028123.1,1391-1409).
cgatggaacagggagtatt

SEQ ID NO: 656906 - DNA, 19 bp, Mus musculus
  siRNA target sequence for Slc37a3 (NM_028123.1,1459-1477).
gatggatgtgggttttcta

SEQ ID NO: 656907 - DNA, 19 bp, Mus musculus
  siRNA target sequence for Slc37a3 (NM_028123.1,1463-1481).
gatgtgggttttctacttt

SEQ ID NO: 656908 - DNA, 19 bp, Mus musculus
  siRNA target sequence for Slc37a3 (NM_028123.1,1511-1529).
gtttatcttgccgttaata

SEQ ID NO: 656909 - DNA, 19 bp, Mus musculus
  siRNA target sequence for Slc37a3 (NM_028123.1,1561-1579).
gacaagctcactcacttaa

SEQ ID NO: 656910 - DNA, 19 bp, Mus musculus
  siRNA target sequence for Slc37a3 (NM_028123.1,1566-1584).
gctcactcacttaatgaat

SEQ ID NO: 656911 - DNA, 19 bp, Mus musculus
  siRNA target sequence for Slc5a10 (NM_146198.1,491-509).
cttgttcgccagcaatgtt

SEQ ID NO: 656912 - DNA, 19 bp, Mus musculus
  siRNA target sequence for Slc5a10 (NM_146198.1,610-628).
cctgggtcttccttcctat

SEQ ID NO: 656913 - DNA, 19 bp, Mus musculus
  siRNA target sequence for Slc5a10 (NM_146198.1,650-668).
cacgatgccagaatatcta

SEQ ID NO: 656914 - DNA, 19 bp, Mus musculus
  siRNA target sequence for Slc5a10 (NM_146198.1,709-727).
ctgtgctctacctgttcat

SEQ ID NO: 656915 - DNA, 19 bp, Mus musculus
  siRNA target sequence for Slc5a10 (NM_146198.1,711-729).
gtgctctacctgttcatct

SEQ ID NO: 656916 - DNA, 19 bp, Mus musculus
  siRNA target sequence for Slc5a10 (NM_146198.1,743-761).
gatctcggtcgacatgtat

SEQ ID NO: 656917 - DNA, 19 bp, Mus musculus
  siRNA target sequence for Slc5a10 (NM_146198.1,859-877).
gtctggccgctgtgatcta

SEQ ID NO: 656918 - DNA, 19 bp, Mus musculus
  siRNA target sequence for Slc5a10 (NM_146198.1,1346-1364).
catcgcgtaccccaaactt

SEQ ID NO: 656919 - DNA, 19 bp, Mus musculus
  siRNA target sequence for Slc5a10 (NM_146198.1,1387-1405).
gactccgtgggctcatgat

SEQ ID NO: 656920 - DNA, 19 bp, Mus musculus
  siRNA target sequence for Slc5a10 (NM_146198.1,1497-1515).
cggccacgggcatctgaaa

SEQ ID NO: 656921 - DNA, 19 bp, Mus musculus
  siRNA target sequence for Slc5a10 (NM_146198.1,1597-1615).
gccagggagggcagctttt

SEQ ID NO: 656922 - DNA, 19 bp, Mus musculus
  siRNA target sequence for Slc5a10 (NM_146198.1,1599-1617).
cagggagggcagcttttca

SEQ ID NO: 656923 - DNA, 19 bp, Mus musculus
  siRNA target sequence for Slc5a10 (NM_146198.1,1685-1703).
ctggaagcgtaccaatgaa

SEQ ID NO: 656924 - DNA, 19 bp, Mus musculus
  siRNA target sequence for Slc5a10 (NM_146198.1,1687-1705).
ggaagcgtaccaatgaaaa

SEQ ID NO: 656925 - DNA, 19 bp, Mus musculus
  siRNA target sequence for Slc5a10 (NM_146198.1,2177-2195).
caaagcggaacctgtcata

SEQ ID NO: 656926 - DNA, 19 bp, Mus musculus
  siRNA target sequence for Slc5a10 (NM_146198.1,2181-2199).
gcggaacctgtcatagttt

SEQ ID NO: 656927 - DNA, 19 bp, Mus musculus
  siRNA target sequence for Slc5a2 (NM_133254.2,42-60).
gaaggtcctgattgataat

SEQ ID NO: 656928 - DNA, 19 bp, Mus musculus
  siRNA target sequence for Slc5a2 (NM_133254.2,45-63).
ggtcctgattgataatcct

SEQ ID NO: 656929 - DNA, 19 bp, Mus musculus
  siRNA target sequence for Slc5a2 (NM_133254.2,109-127).
gttggcttgtggtctatgt

SEQ ID NO: 656930 - DNA, 19 bp, Mus musculus
  siRNA target sequence for Slc5a2 (NM_133254.2,120-138).
gtctatgttcagaaccaat

SEQ ID NO: 656931 - DNA, 19 bp, Mus musculus
  siRNA target sequence for Slc5a2 (NM_133254.2,270-288).
cttggcggtggctggattt

SEQ ID NO: 656932 - DNA, 19 bp, Mus musculus
  siRNA target sequence for Slc5a2 (NM_133254.2,350-368).
ccgctggtgtgatcacaat

SEQ ID NO: 656933 - DNA, 19 bp, Mus musculus
  siRNA target sequence for Slc5a2 (NM_133254.2,422-440).
ccgtgctctcgcttttttt

SEQ ID NO: 656934 - DNA, 19 bp, Mus musculus
  siRNA target sequence for Slc5a2 (NM_133254.2,424-442).
gtgctctcgctttttttgt

SEQ ID NO: 656935 - DNA, 19 bp, Mus musculus
  siRNA target sequence for Slc5a2 (NM_133254.2,429-447).
ctcgctttttttgtacatt

SEQ ID NO: 656936 - DNA, 19 bp, Mus musculus
  siRNA target sequence for Slc5a2 (NM_133254.2,474-492).
ctctggggcagtattcatt

SEQ ID NO: 656937 - DNA, 19 bp, Mus musculus
  siRNA target sequence for Slc5a2 (NM_133254.2,541-559).
ggcatcaccatgatttata

SEQ ID NO: 656938 - DNA, 19 bp, Mus musculus
  siRNA target sequence for Slc5a2 (NM_133254.2,543-561).
catcaccatgatttatact

SEQ ID NO: 656939 - DNA, 19 bp, Mus musculus
  siRNA target sequence for Slc5a2 (NM_133254.2,572-590).
ggctggcggcactgatgta

SEQ ID NO: 656940 - DNA, 19 bp, Mus musculus
  siRNA target sequence for Slc5a2 (NM_133254.2,574-592).
ctggcggcactgatgtaca

SEQ ID NO: 656941 - DNA, 19 bp, Mus musculus
  siRNA target sequence for Slc5a2 (NM_133254.2,603-621).
gcagaccttcgtcattctt

SEQ ID NO: 656942 - DNA, 19 bp, Mus musculus
  siRNA target sequence for Slc5a2 (NM_133254.2,633-651).
catcctcactggttatgct

SEQ ID NO: 656943 - DNA, 19 bp, Mus musculus
  siRNA target sequence for Slc5a2 (NM_133254.2,639-657).
cactggttatgctttccat

SEQ ID NO: 656944 - DNA, 19 bp, Mus musculus
  siRNA target sequence for Slc5a2 (NM_133254.2,674-692).
cgggtctcttcgacaaata

SEQ ID NO: 656945 - DNA, 19 bp, Mus musculus
  siRNA target sequence for Slc5a2 (NM_133254.2,677-695).
gtctcttcgacaaatacct

SEQ ID NO: 656946 - DNA, 19 bp, Mus musculus
  siRNA target sequence for Slc5a2 (NM_133254.2,850-868).
gtctcgggctggtattggt

SEQ ID NO: 656947 - DNA, 19 bp, Mus musculus
  siRNA target sequence for Slc5a2 (NM_133254.2,867-885).
gtgcagcgatcaggtaata

SEQ ID NO: 656948 - DNA, 19 bp, Mus musculus
  siRNA target sequence for Slc5a2 (NM_133254.2,1238-1256).
cccgtgcaggtgataagga

SEQ ID NO: 656949 - DNA, 19 bp, Mus musculus
  siRNA target sequence for Slc5a2 (NM_133254.2,1660-1678).
ctccatcgcctggttttca

SEQ ID NO: 656950 - DNA, 19 bp, Mus musculus
  siRNA target sequence for Slc5a4b (NM_023219.1,137-155).
gtgccagtgcgcattcaga

SEQ ID NO: 656951 - DNA, 19 bp, Mus musculus
  siRNA target sequence for Slc5a4b (NM_023219.1,390-408).
ggaatgccctgcttatggt

SEQ ID NO: 656952 - DNA, 19 bp, Mus musculus
  siRNA target sequence for Slc5a4b (NM_023219.1,551-569).
caaacttccgcaatcatat

SEQ ID NO: 656953 - DNA, 19 bp, Mus musculus
  siRNA target sequence for Slc5a4b (NM_023219.1,573-591).
ccggagccatattcattca

SEQ ID NO: 656954 - DNA, 19 bp, Mus musculus
  siRNA target sequence for Slc5a4b (NM_023219.1,638-656).
gctatcactgctttttaca

SEQ ID NO: 656955 - DNA, 19 bp, Mus musculus
  siRNA target sequence for Slc5a4b (NM_023219.1,736-754).
catggggtttgcatttgct

SEQ ID NO: 656956 - DNA, 19 bp, Mus musculus
  siRNA target sequence for Slc5a4b (NM_023219.1,912-930).
cgggactgatatttggaat

SEQ ID NO: 656957 - DNA, 19 bp, Mus musculus
  siRNA target sequence for Slc5a4b (NM_023219.1,1539-1557).
cattctgggggctaatggt

SEQ ID NO: 656958 - DNA, 19 bp, Mus musculus
  siRNA target sequence for Slc5a4b (NM_023219.1,1582-1600).
cctgatcgctgagtttgta

SEQ ID NO: 656959 - DNA, 19 bp, Mus musculus
  siRNA target sequence for Slc5a4b (NM_023219.1,1618-1636).
cgtggctcccagtaactgt

SEQ ID NO: 656960 - DNA, 19 bp, Mus musculus
  siRNA target sequence for Slc5a4b (NM_023219.1,1674-1692).
ccatcatactcttctttgt

SEQ ID NO: 656961 - DNA, 19 bp, Mus musculus
  siRNA target sequence for Slc5a4b (NM_023219.1,1687-1705).
ctttgtgtccataatagta

SEQ ID NO: 656962 - DNA, 19 bp, Mus musculus
  siRNA target sequence for Slc5a4b (NM_023219.1,1709-1727).
ctgggagtctccttcctaa

SEQ ID NO: 656963 - DNA, 19 bp, Mus musculus
  siRNA target sequence for Slc5a4b (NM_023219.1,1729-1747).
ggagccgattcctgatgtt

SEQ ID NO: 656964 - DNA, 19 bp, Mus musculus
  siRNA target sequence for Slc5a4b (NM_023219.1,1757-1775).
cgcctatgctggagtcttt

SEQ ID NO: 656965 - DNA, 19 bp, Mus musculus
  siRNA target sequence for Slc5a6 (NM_177870.2,502-520).
ggctatttctaccttttct

SEQ ID NO: 656966 - DNA, 19 bp, Mus musculus
  siRNA target sequence for Slc5a6 (NM_177870.2,716-734).
gagatcttccgatttggaa

SEQ ID NO: 656967 - DNA, 19 bp, Mus musculus
  siRNA target sequence for Slc5a6 (NM_177870.2,725-743).
cgatttggaacccagtatt

SEQ ID NO: 656968 - DNA, 19 bp, Mus musculus
  siRNA target sequence for Slc5a6 (NM_177870.2,847-865).
gctccgcttcaataaagca

SEQ ID NO: 656969 - DNA, 19 bp, Mus musculus
  siRNA target sequence for Slc5a6 (NM_177870.2,880-898).
gactgtgaccttcatcttt

SEQ ID NO: 656970 - DNA, 19 bp, Mus musculus
  siRNA target sequence for Slc5a6 (NM_177870.2,956-974).
gtgactggatttgatttat

SEQ ID NO: 656971 - DNA, 19 bp, Mus musculus
  siRNA target sequence for Slc5a6 (NM_177870.2,995-1013).
ggaattgtctgcaacatct

SEQ ID NO: 656972 - DNA, 19 bp, Mus musculus
  siRNA target sequence for Slc5a6 (NM_177870.2,1161-1179).
gcctcatctctgggattaa

SEQ ID NO: 656973 - DNA, 19 bp, Mus musculus
  siRNA target sequence for Slc5a6 (NM_177870.2,1192-1210).
cccctttgtgcgtcatact

SEQ ID NO: 656974 - DNA, 19 bp, Mus musculus
  siRNA target sequence for Slc5a6 (NM_177870.2,1193-1211).
ccctttgtgcgtcatactt

SEQ ID NO: 656975 - DNA, 19 bp, Mus musculus
  siRNA target sequence for Slc5a6 (NM_177870.2,1194-1212).
cctttgtgcgtcatacttt

SEQ ID NO: 656976 - DNA, 19 bp, Mus musculus
  siRNA target sequence for Slc5a6 (NM_177870.2,1384-1402).
ggtcatgtttgcctattat

SEQ ID NO: 656977 - DNA, 19 bp, Mus musculus
  siRNA target sequence for Slc5a6 (NM_177870.2,1385-1403).
gtcatgtttgcctattata

SEQ ID NO: 656978 - DNA, 19 bp, Mus musculus
  siRNA target sequence for Slc5a6 (NM_177870.2,1437-1455).
cagcccctgaccagttagt

SEQ ID NO: 656979 - DNA, 19 bp, Mus musculus
  siRNA target sequence for Slc5a6 (NM_177870.2,1445-1463).
gaccagttagtcctctatt

SEQ ID NO: 656980 - DNA, 19 bp, Mus musculus
  siRNA target sequence for Slc5a6 (NM_177870.2,1674-1692).
gcctgggaatggcctatat

SEQ ID NO: 656981 - DNA, 19 bp, Mus musculus
  siRNA target sequence for Slc5a6 (NM_177870.2,1675-1693).
cctgggaatggcctatatt

SEQ ID NO: 656982 - DNA, 19 bp, Mus musculus
  siRNA target sequence for Slc5a6 (NM_177870.2,1676-1694).
ctgggaatggcctatattt

SEQ ID NO: 656983 - DNA, 19 bp, Mus musculus
  siRNA target sequence for Slc5a6 (NM_177870.2,1994-2012).
ggactgcagcacttctatt

SEQ ID NO: 656984 - DNA, 19 bp, Mus musculus
  siRNA target sequence for Slc5a6 (NM_177870.2,2013-2031).
ccctgtcctatttatggta

SEQ ID NO: 656985 - DNA, 19 bp, Mus musculus
  siRNA target sequence for Slc5a6 (NM_177870.2,2046-2064).
ccaccacagtcattgtagt

SEQ ID NO: 656986 - DNA, 19 bp, Mus musculus
  siRNA target sequence for Slc5a7 (NM_022025.2,413-431).
gactggtagctattatcct

SEQ ID NO: 656987 - DNA, 19 bp, Mus musculus
  siRNA target sequence for Slc5a7 (NM_022025.2,430-448).
ctcttctacctccttatat

SEQ ID NO: 656988 - DNA, 19 bp, Mus musculus
  siRNA target sequence for Slc5a7 (NM_022025.2,464-482).
gggctgcatggaaaaccaa

SEQ ID NO: 656989 - DNA, 19 bp, Mus musculus
  siRNA target sequence for Slc5a7 (NM_022025.2,465-483).
ggctgcatggaaaaccaaa

SEQ ID NO: 656990 - DNA, 19 bp, Mus musculus
  siRNA target sequence for Slc5a7 (NM_022025.2,466-484).
gctgcatggaaaaccaaaa

SEQ ID NO: 656991 - DNA, 19 bp, Mus musculus
  siRNA target sequence for Slc5a7 (NM_022025.2,504-522).
gcgcagtgaagccatcata

SEQ ID NO: 656992 - DNA, 19 bp, Mus musculus
  siRNA target sequence for Slc5a7 (NM_022025.2,530-548).
gccgtgacattggtttgtt

SEQ ID NO: 656993 - DNA, 19 bp, Mus musculus
  siRNA target sequence for Slc5a7 (NM_022025.2,646-664).
gctcaggcacccattggat

SEQ ID NO: 656994 - DNA, 19 bp, Mus musculus
  siRNA target sequence for Slc5a7 (NM_022025.2,649-667).
caggcacccattggatatt

SEQ ID NO: 656995 - DNA, 19 bp, Mus musculus
  siRNA target sequence for Slc5a7 (NM_022025.2,651-669).
ggcacccattggatattct

SEQ ID NO: 656996 - DNA, 19 bp, Mus musculus
  siRNA target sequence for Slc5a7 (NM_022025.2,661-679).
ggatattctctgagtctaa

SEQ ID NO: 656997 - DNA, 19 bp, Mus musculus
  siRNA target sequence for Slc5a7 (NM_022025.2,691-709).
ctgttttttgcgaaaccta

SEQ ID NO: 656998 - DNA, 19 bp, Mus musculus
  siRNA target sequence for Slc5a7 (NM_022025.2,712-730).
cgttccaagggatatgtga

SEQ ID NO: 656999 - DNA, 19 bp, Mus musculus
  siRNA target sequence for Slc5a7 (NM_022025.2,716-734).
ccaagggatatgtgactat

SEQ ID NO: 657000 - DNA, 19 bp, Mus musculus
  siRNA target sequence for Slc5a7 (NM_022025.2,720-738).
gggatatgtgactatgtta

SEQ ID NO: 657001 - DNA, 19 bp, Mus musculus
  siRNA target sequence for Slc5a7 (NM_022025.2,731-749).
ctatgttagacccatttca

SEQ ID NO: 657002 - DNA, 19 bp, Mus musculus
  siRNA target sequence for Slc5a7 (NM_022025.2,741-759).
cccatttcaacagatctat

SEQ ID NO: 657003 - DNA, 19 bp, Mus musculus
  siRNA target sequence for Slc5a7 (NM_022025.2,794-812).
cactgatgggagagatgtt

SEQ ID NO: 657004 - DNA, 19 bp, Mus musculus
  siRNA target sequence for Slc5a7 (NM_022025.2,816-834).
ggctgcagcaattttctct

SEQ ID NO: 657005 - DNA, 19 bp, Mus musculus
  siRNA target sequence for Slc5a7 (NM_022025.2,934-952).
ctctactctgtggcatata

SEQ ID NO: 657006 - DNA, 19 bp, Mus musculus
  siRNA target sequence for Slc5a7 (NM_022025.2,936-954).
ctactctgtggcatatact

SEQ ID NO: 657007 - DNA, 19 bp, Mus musculus
  siRNA target sequence for Slc5a7 (NM_022025.2,939-957).
ctctgtggcatatactgat

SEQ ID NO: 657008 - DNA, 19 bp, Mus musculus
  siRNA target sequence for Slc5a7 (NM_022025.2,953-971).
ctgatgttgtccagctatt

SEQ ID NO: 657009 - DNA, 19 bp, Mus musculus
  siRNA target sequence for Slc5a7 (NM_022025.2,955-973).
gatgttgtccagctattct

SEQ ID NO: 657010 - DNA, 19 bp, Mus musculus
  siRNA target sequence for Slc5a7 (NM_022025.2,961-979).
gtccagctattctgcattt

SEQ ID NO: 657011 - DNA, 19 bp, Mus musculus
  siRNA target sequence for Slc5a7 (NM_022025.2,964-982).
cagctattctgcattttta

SEQ ID NO: 657012 - DNA, 19 bp, Mus musculus
  siRNA target sequence for Slc5a7 (NM_022025.2,966-984).
gctattctgcatttttata

SEQ ID NO: 657013 - DNA, 19 bp, Mus musculus
  siRNA target sequence for Slc5a7 (NM_022025.2,1049-1067).
ctgtgcatgctaaatacca

SEQ ID NO: 657014 - DNA, 19 bp, Mus musculus
  siRNA target sequence for Slc5a7 (NM_022025.2,1077-1095).
gctgggaaccattgaatca

SEQ ID NO: 657015 - DNA, 19 bp, Mus musculus
  siRNA target sequence for Slc5a7 (NM_022025.2,1080-1098).
gggaaccattgaatcagtt

SEQ ID NO: 657016 - DNA, 19 bp, Mus musculus
  siRNA target sequence for Slc5a7 (NM_022025.2,1085-1103).
ccattgaatcagttgaagt

SEQ ID NO: 657017 - DNA, 19 bp, Mus musculus
  siRNA target sequence for Slc5a7 (NM_022025.2,1102-1120).
gtctacacctggcttgata

SEQ ID NO: 657018 - DNA, 19 bp, Mus musculus
  siRNA target sequence for Slc5a7 (NM_022025.2,1450-1468).
ctgtcggcgagttctatgt

SEQ ID NO: 657019 - DNA, 19 bp, Mus musculus
  siRNA target sequence for Slc5a7 (NM_022025.2,1452-1470).
gtcggcgagttctatgttt

SEQ ID NO: 657020 - DNA, 19 bp, Mus musculus
  siRNA target sequence for Slc5a7 (NM_022025.2,1463-1481).
ctatgtttgctcggaatat

SEQ ID NO: 657021 - DNA, 19 bp, Mus musculus
  siRNA target sequence for Slc5a7 (NM_022025.2,1508-1526).
catcagacaaggaaattgt

SEQ ID NO: 657022 - DNA, 19 bp, Mus musculus
  siRNA target sequence for Slc5a7 (NM_022025.2,1622-1640).
ctgaccttgtctacatcat

SEQ ID NO: 657023 - DNA, 19 bp, Mus musculus
  siRNA target sequence for Slc5a7 (NM_022025.2,1693-1711).
ggggcagttgctggttata

SEQ ID NO: 657024 - DNA, 19 bp, Mus musculus
  siRNA target sequence for Slc5a7 (NM_022025.2,1694-1712).
gggcagttgctggttatat

SEQ ID NO: 657025 - DNA, 19 bp, Mus musculus
  siRNA target sequence for Slc5a7 (NM_022025.2,1717-1735).
ggactattcctgagaatta

SEQ ID NO: 657026 - DNA, 19 bp, Mus musculus
  siRNA target sequence for Slc5a7 (NM_022025.2,1738-1756).
ggaggagagccatatctat

SEQ ID NO: 657027 - DNA, 19 bp, Mus musculus
  siRNA target sequence for Slc5a7 (NM_022025.2,1739-1757).
gaggagagccatatctata

SEQ ID NO: 657028 - DNA, 19 bp, Mus musculus
  siRNA target sequence for Slc5a7 (NM_022025.2,1741-1759).
ggagagccatatctatact

SEQ ID NO: 657029 - DNA, 19 bp, Mus musculus
  siRNA target sequence for Slc5a7 (NM_022025.2,1742-1760).
gagagccatatctatactt

SEQ ID NO: 657030 - DNA, 19 bp, Mus musculus
  siRNA target sequence for Slc5a7 (NM_022025.2,1776-1794).
ctaccctggttattactct

SEQ ID NO: 657031 - DNA, 19 bp, Mus musculus
  siRNA target sequence for Slc5a7 (NM_022025.2,1793-1811).
ctgacaagaatggtatata

SEQ ID NO: 657032 - DNA, 19 bp, Mus musculus
  siRNA target sequence for Slc5a7 (NM_022025.2,1795-1813).
gacaagaatggtatataca

SEQ ID NO: 657033 - DNA, 19 bp, Mus musculus
  siRNA target sequence for Slc5a7 (NM_022025.2,1797-1815).
caagaatggtatatacaat

SEQ ID NO: 657034 - DNA, 19 bp, Mus musculus
  siRNA target sequence for Slc5a7 (NM_022025.2,1816-1834).
cagaggttcccatttaaaa

SEQ ID NO: 657035 - DNA, 19 bp, Mus musculus
  siRNA target sequence for Slc5a7 (NM_022025.2,1818-1836).
gaggttcccatttaaaact

SEQ ID NO: 657036 - DNA, 19 bp, Mus musculus
  siRNA target sequence for Slc5a7 (NM_022025.2,1820-1838).
ggttcccatttaaaactct

SEQ ID NO: 657037 - DNA, 19 bp, Mus musculus
  siRNA target sequence for Slc5a7 (NM_022025.2,1851-1869).
ctcattctttaccaacatt

SEQ ID NO: 657038 - DNA, 19 bp, Mus musculus
  siRNA target sequence for Slc5a7 (NM_022025.2,1877-1895).
cttatctagccaagtatct

SEQ ID NO: 657039 - DNA, 19 bp, Mus musculus
  siRNA target sequence for Slc5a7 (NM_022025.2,1910-1928).
ccttgcctccaaaattaga

SEQ ID NO: 657040 - DNA, 19 bp, Mus musculus
  siRNA target sequence for Slc5a7 (NM_022025.2,1968-1986).
catggacaagaccattcta

SEQ ID NO: 657041 - DNA, 19 bp, Mus musculus
  siRNA target sequence for Slc5a7 (NM_022025.2,1977-1995).
gaccattctagtcagaaat

SEQ ID NO: 657042 - DNA, 19 bp, Mus musculus
  siRNA target sequence for Slc5a7 (NM_022025.2,1979-1997).
ccattctagtcagaaatga

SEQ ID NO: 657043 - DNA, 19 bp, Mus musculus
  siRNA target sequence for Slc5a7 (NM_022025.2,2043-2061).
cctaaccctcagttcaact

SEQ ID NO: 657044 - DNA, 19 bp, Mus musculus
  siRNA target sequence for Slc5a7 (NM_022025.2,2044-2062).
ctaaccctcagttcaactt

SEQ ID NO: 657045 - DNA, 19 bp, Mus musculus
  siRNA target sequence for Slc5a7 (NM_022025.2,2054-2072).
gttcaactttcaccaataa

SEQ ID NO: 657046 - DNA, 19 bp, Mus musculus
  siRNA target sequence for Slc5a7 (NM_022025.2,2057-2075).
caactttcaccaataagga

SEQ ID NO: 657047 - DNA, 19 bp, Mus musculus
  siRNA target sequence for Slc5a7 (NM_022025.2,2114-2132).
ggactgaagataacttaca

SEQ ID NO: 657048 - DNA, 19 bp, Mus musculus
  siRNA target sequence for Slc5a7 (NM_022025.2,2115-2133).
gactgaagataacttacaa

SEQ ID NO: 657049 - DNA, 19 bp, Mus musculus
  siRNA target sequence for Slc5a8 (NM_145423.1,508-526).
cgttttggggcgatattca

SEQ ID NO: 657050 - DNA, 19 bp, Mus musculus
  siRNA target sequence for Slc5a8 (NM_145423.1,516-534).
ggcgatattcagcatcttt

SEQ ID NO: 657051 - DNA, 19 bp, Mus musculus
  siRNA target sequence for Slc5a8 (NM_145423.1,531-549).
ctttgtcatcacctacttt

SEQ ID NO: 657052 - DNA, 19 bp, Mus musculus
  siRNA target sequence for Slc5a8 (NM_145423.1,576-594).
cttccttccagtgttctat

SEQ ID NO: 657053 - DNA, 19 bp, Mus musculus
  siRNA target sequence for Slc5a8 (NM_145423.1,621-639).
gtatttggaacttcgattt

SEQ ID NO: 657054 - DNA, 19 bp, Mus musculus
  siRNA target sequence for Slc5a8 (NM_145423.1,627-645).
ggaacttcgatttaatcga

SEQ ID NO: 657055 - DNA, 19 bp, Mus musculus
  siRNA target sequence for Slc5a8 (NM_145423.1,628-646).
gaacttcgatttaatcgat

SEQ ID NO: 657056 - DNA, 19 bp, Mus musculus
  siRNA target sequence for Slc5a8 (NM_145423.1,670-688).
ctcttcatcgttcaaacaa

SEQ ID NO: 657057 - DNA, 19 bp, Mus musculus
  siRNA target sequence for Slc5a8 (NM_145423.1,672-690).
cttcatcgttcaaacaatt

SEQ ID NO: 657058 - DNA, 19 bp, Mus musculus
  siRNA target sequence for Slc5a8 (NM_145423.1,691-709).
ctgtacactggaattgtga

SEQ ID NO: 657059 - DNA, 19 bp, Mus musculus
  siRNA target sequence for Slc5a8 (NM_145423.1,693-711).
gtacactggaattgtgatt

SEQ ID NO: 657060 - DNA, 19 bp, Mus musculus
  siRNA target sequence for Slc5a8 (NM_145423.1,696-714).
cactggaattgtgatttat

SEQ ID NO: 657061 - DNA, 19 bp, Mus musculus
  siRNA target sequence for Slc5a8 (NM_145423.1,719-737).
ctgctctggctttgaatca

SEQ ID NO: 657062 - DNA, 19 bp, Mus musculus
  siRNA target sequence for Slc5a8 (NM_145423.1,722-740).
ctctggctttgaatcaagt

SEQ ID NO: 657063 - DNA, 19 bp, Mus musculus
  siRNA target sequence for Slc5a8 (NM_145423.1,726-744).
ggctttgaatcaagttaca

SEQ ID NO: 657064 - DNA, 19 bp, Mus musculus
  siRNA target sequence for Slc5a8 (NM_145423.1,732-750).
gaatcaagttacaggattt

SEQ ID NO: 657065 - DNA, 19 bp, Mus musculus
  siRNA target sequence for Slc5a8 (NM_145423.1,779-797).
gggtggtctgcacattcta

SEQ ID NO: 657066 - DNA, 19 bp, Mus musculus
  siRNA target sequence for Slc5a8 (NM_145423.1,781-799).
gtggtctgcacattctact

SEQ ID NO: 657067 - DNA, 19 bp, Mus musculus
  siRNA target sequence for Slc5a8 (NM_145423.1,800-818).
gcacactgggcggtcttaa

SEQ ID NO: 657068 - DNA, 19 bp, Mus musculus
  siRNA target sequence for Slc5a8 (NM_145423.1,801-819).
cacactgggcggtcttaaa

SEQ ID NO: 657069 - DNA, 19 bp, Mus musculus
  siRNA target sequence for Slc5a8 (NM_145423.1,852-870).
gatcatggtggctggattt

SEQ ID NO: 657070 - DNA, 19 bp, Mus musculus
  siRNA target sequence for Slc5a8 (NM_145423.1,865-883).
ggatttgcatccgtaatta

SEQ ID NO: 657071 - DNA, 19 bp, Mus musculus
  siRNA target sequence for Slc5a8 (NM_145423.1,888-906).
ggcatcaataactcaacat

SEQ ID NO: 657072 - DNA, 19 bp, Mus musculus
  siRNA target sequence for Slc5a8 (NM_145423.1,901-919).
caacatggcatcaataaga

SEQ ID NO: 657073 - DNA, 19 bp, Mus musculus
  siRNA target sequence for Slc5a8 (NM_145423.1,904-922).
catggcatcaataagattt

SEQ ID NO: 657074 - DNA, 19 bp, Mus musculus
  siRNA target sequence for Slc5a8 (NM_145423.1,907-925).
ggcatcaataagattttaa

SEQ ID NO: 657075 - DNA, 19 bp, Mus musculus
  siRNA target sequence for Slc5a8 (NM_145423.1,940-958).
ggtggaagattaaacttct

SEQ ID NO: 657076 - DNA, 19 bp, Mus musculus
  siRNA target sequence for Slc5a8 (NM_145423.1,992-1010).
cgttctggacaattgtcat

SEQ ID NO: 657077 - DNA, 19 bp, Mus musculus
  siRNA target sequence for Slc5a8 (NM_145423.1,1178-1196).
ccagataccgtgaatgtga

SEQ ID NO: 657078 - DNA, 19 bp, Mus musculus
  siRNA target sequence for Slc5a8 (NM_145423.1,1179-1197).
cagataccgtgaatgtgat

SEQ ID NO: 657079 - DNA, 19 bp, Mus musculus
  siRNA target sequence for Slc5a8 (NM_145423.1,1193-1211).
gtgatccctggacatctaa

SEQ ID NO: 657080 - DNA, 19 bp, Mus musculus
  siRNA target sequence for Slc5a8 (NM_145423.1,1220-1238).
cagcgattgaccagcttat

SEQ ID NO: 657081 - DNA, 19 bp, Mus musculus
  siRNA target sequence for Slc5a8 (NM_145423.1,1274-1292).
ctggtgttcccggactttt

SEQ ID NO: 657082 - DNA, 19 bp, Mus musculus
  siRNA target sequence for Slc5a8 (NM_145423.1,1325-1343).
cagtgtcctccagtatcaa

SEQ ID NO: 657083 - DNA, 19 bp, Mus musculus
  siRNA target sequence for Slc5a8 (NM_145423.1,1362-1380).
cgtggaagatctcatcaaa

SEQ ID NO: 657084 - DNA, 19 bp, Mus musculus
  siRNA target sequence for Slc5a8 (NM_145423.1,1404-1422).
gaagtctctgtcttggatt

SEQ ID NO: 657085 - DNA, 19 bp, Mus musculus
  siRNA target sequence for Slc5a8 (NM_145423.1,1482-1500).
gctgatgggagccttgtta

SEQ ID NO: 657086 - DNA, 19 bp, Mus musculus
  siRNA target sequence for Slc5a8 (NM_145423.1,1685-1703).
cattgccccttgaaaccta

SEQ ID NO: 657087 - DNA, 19 bp, Mus musculus
  siRNA target sequence for Slc5a8 (NM_145423.1,1726-1744).
gggtcggactggatgtcaa

SEQ ID NO: 657088 - DNA, 19 bp, Mus musculus
  siRNA target sequence for Slc5a8 (NM_145423.1,1763-1781).
ctactagcgcttttcaaat

SEQ ID NO: 657089 - DNA, 19 bp, Mus musculus
  siRNA target sequence for Slc5a8 (NM_145423.1,1766-1784).
ctagcgcttttcaaataca

SEQ ID NO: 657090 - DNA, 19 bp, Mus musculus
  siRNA target sequence for Slc5a8 (NM_145423.1,1770-1788).
cgcttttcaaatacataat

SEQ ID NO: 657091 - DNA, 19 bp, Mus musculus
  siRNA target sequence for Slc5a8 (NM_145423.1,1809-1827).
ggacaattggtattcatta

SEQ ID NO: 657092 - DNA, 19 bp, Mus musculus
  siRNA target sequence for Slc5a8 (NM_145423.1,1867-1885).
ctgtttgtggggatactta

SEQ ID NO: 657093 - DNA, 19 bp, Mus musculus
  siRNA target sequence for Slc5a8 (NM_145423.1,1876-1894).
gggatacttatcagcttat

SEQ ID NO: 657094 - DNA, 19 bp, Mus musculus
  siRNA target sequence for Slc5a8 (NM_145423.1,1878-1896).
gatacttatcagcttatca

SEQ ID NO: 657095 - DNA, 19 bp, Mus musculus
  siRNA target sequence for Slc5a8 (NM_145423.1,1925-1943).
cccgattcttactaaccaa

SEQ ID NO: 657096 - DNA, 19 bp, Mus musculus
  siRNA target sequence for Slc5a8 (NM_145423.1,1926-1944).
ccgattcttactaaccaaa

SEQ ID NO: 657097 - DNA, 19 bp, Mus musculus
  siRNA target sequence for Slc5a8 (NM_145423.1,1936-1954).
ctaaccaaacaggactttt

SEQ ID NO: 657098 - DNA, 19 bp, Mus musculus
  siRNA target sequence for Slc5a8 (NM_145423.1,1950-1968).
ctttttatccaattttgat

SEQ ID NO: 657099 - DNA, 19 bp, Mus musculus
  siRNA target sequence for Slco1a5 (NM_130861.1,247-265).
cgatatccccacatctata

SEQ ID NO: 657100 - DNA, 19 bp, Mus musculus
  siRNA target sequence for Slco1a5 (NM_130861.1,1076-1094).
cagataaacgcatttatca

SEQ ID NO: 657101 - DNA, 19 bp, Mus musculus
  siRNA target sequence for Slco1a5 (NM_130861.1,1078-1096).
gataaacgcatttatcaat

SEQ ID NO: 657102 - DNA, 19 bp, Mus musculus
  siRNA target sequence for Slco1a5 (NM_130861.1,1644-1662).
cggtaattggcagtttcat

SEQ ID NO: 657103 - DNA, 19 bp, Mus musculus
  siRNA target sequence for Slco1a5 (NM_130861.1,1652-1670).
ggcagtttcatctattcga

SEQ ID NO: 657104 - DNA, 19 bp, Mus musculus
  siRNA target sequence for Slco1a5 (NM_130861.1,1653-1671).
gcagtttcatctattcgat

SEQ ID NO: 657105 - DNA, 19 bp, Mus musculus
  siRNA target sequence for Slco1a5 (NM_130861.1,1745-1763).
cacgcattttgcacaagaa

SEQ ID NO: 657106 - DNA, 19 bp, Mus musculus
  siRNA target sequence for Slco1a5 (NM_130861.1,1747-1765).
cgcattttgcacaagaata

SEQ ID NO: 657107 - DNA, 19 bp, Mus musculus
  siRNA target sequence for Slco1a5 (NM_130861.1,1748-1766).
gcattttgcacaagaatat

SEQ ID NO: 657108 - DNA, 19 bp, Mus musculus
  siRNA target sequence for Slco1a5 (NM_130861.1,1773-1791).
gcatccctgcacccattta

SEQ ID NO: 657109 - DNA, 19 bp, Mus musculus
  siRNA target sequence for Slco1a5 (NM_130861.1,1854-1872).
gagcctgtaggatgtacaa

SEQ ID NO: 657110 - DNA, 19 bp, Mus musculus
  siRNA target sequence for Slco1a5 (NM_130861.1,1858-1876).
ctgtaggatgtacaatata

SEQ ID NO: 657111 - DNA, 19 bp, Mus musculus
  siRNA target sequence for Slco1a5 (NM_130861.1,1887-1905).
ggcgcatttatctagtgtt

SEQ ID NO: 657112 - DNA, 19 bp, Mus musculus
  siRNA target sequence for Slco1a5 (NM_130861.1,1976-1994).
ctccctggggaaatgtact

SEQ ID NO: 657113 - DNA, 19 bp, Mus musculus
  siRNA target sequence for Slco1a5 (NM_130861.1,1990-2008).
gtactcttctgaaactgaa

SEQ ID NO: 657114 - DNA, 19 bp, Mus musculus
  siRNA target sequence for Slco1a6 (NM_023718.1,287-305).
ggagtttacatgagtacta

SEQ ID NO: 657115 - DNA, 19 bp, Mus musculus
  siRNA target sequence for Slco1a6 (NM_023718.1,288-306).
gagtttacatgagtactat

SEQ ID NO: 657116 - DNA, 19 bp, Mus musculus
  siRNA target sequence for Slco1a6 (NM_023718.1,300-318).
gtactatgctcacacaatt

SEQ ID NO: 657117 - DNA, 19 bp, Mus musculus
  siRNA target sequence for Slco1a6 (NM_023718.1,706-724).
gcctttaggtatttcctat

SEQ ID NO: 657118 - DNA, 19 bp, Mus musculus
  siRNA target sequence for Slco1a6 (NM_023718.1,798-816).
caatacttggatatttgat

SEQ ID NO: 657119 - DNA, 19 bp, Mus musculus
  siRNA target sequence for Slco1a6 (NM_023718.1,1088-1106).
gaattcttccttatgatga

SEQ ID NO: 657120 - DNA, 19 bp, Mus musculus
  siRNA target sequence for Slco1a6 (NM_023718.1,1112-1130).
ctcttctgtaaccctattt

SEQ ID NO: 657121 - DNA, 19 bp, Mus musculus
  siRNA target sequence for Slco1a6 (NM_023718.1,1169-1187).
ggagttgccaatattgtga

SEQ ID NO: 657122 - DNA, 19 bp, Mus musculus
  siRNA target sequence for Slco1a6 (NM_023718.1,1170-1188).
gagttgccaatattgtgat

SEQ ID NO: 657123 - DNA, 19 bp, Mus musculus
  siRNA target sequence for Slco1a6 (NM_023718.1,1175-1193).
gccaatattgtgatttaca

SEQ ID NO: 657124 - DNA, 19 bp, Mus musculus
  siRNA target sequence for Slco1a6 (NM_023718.1,1176-1194).
ccaatattgtgatttacaa

SEQ ID NO: 657125 - DNA, 19 bp, Mus musculus
  siRNA target sequence for Slco1a6 (NM_023718.1,1274-1292).
gtatctgctggatatttaa

SEQ ID NO: 657126 - DNA, 19 bp, Mus musculus
  siRNA target sequence for Slco1a6 (NM_023718.1,1363-1381).
catgtctgagtgcctttta

SEQ ID NO: 657127 - DNA, 19 bp, Mus musculus
  siRNA target sequence for Slco1a6 (NM_023718.1,1405-1423).
ctgtgataccactccaatt

SEQ ID NO: 657128 - DNA, 19 bp, Mus musculus
  siRNA target sequence for Slco1a6 (NM_023718.1,1418-1436).
ccaattgccggcttaacta

SEQ ID NO: 657129 - DNA, 19 bp, Mus musculus
  siRNA target sequence for Slco1a6 (NM_023718.1,1449-1467).
gaattcagcagtcttttga

SEQ ID NO: 657130 - DNA, 19 bp, Mus musculus
  siRNA target sequence for Slco1a6 (NM_023718.1,1747-1765).
ctactcgttagcaaccata

SEQ ID NO: 657131 - DNA, 19 bp, Mus musculus
  siRNA target sequence for Slco1a6 (NM_023718.1,1843-1861).
gagactatttgctggtatt

SEQ ID NO: 657132 - DNA, 19 bp, Mus musculus
  siRNA target sequence for Slco1a6 (NM_023718.1,1950-1968).
cctatgaagtcagtagttt

SEQ ID NO: 657133 - DNA, 19 bp, Mus musculus
  siRNA target sequence for Slco1a6 (NM_023718.1,1965-1983).
gtttcaggcgcctctatct

SEQ ID NO: 657134 - DNA, 19 bp, Mus musculus
  siRNA target sequence for Slco1a6 (NM_023718.1,2135-2153).
gacatgcacaaaagttcta

SEQ ID NO: 657135 - DNA, 19 bp, Mus musculus
  siRNA target sequence for Slco1b2 (NM_020495.1,262-280).
gcgatggattcaggatatt

SEQ ID NO: 657136 - DNA, 19 bp, Mus musculus
  siRNA target sequence for Slco1b2 (NM_020495.1,291-309).
ctctcattcagctacatat

SEQ ID NO: 657137 - DNA, 19 bp, Mus musculus
  siRNA target sequence for Slco1b2 (NM_020495.1,295-313).
cattcagctacatatgcaa

SEQ ID NO: 657138 - DNA, 19 bp, Mus musculus
  siRNA target sequence for Slco1b2 (NM_020495.1,314-332).
ggcactaggtggagtcatt

SEQ ID NO: 657139 - DNA, 19 bp, Mus musculus
  siRNA target sequence for Slco1b2 (NM_020495.1,315-333).
gcactaggtggagtcatta

SEQ ID NO: 657140 - DNA, 19 bp, Mus musculus
  siRNA target sequence for Slco1b2 (NM_020495.1,316-334).
cactaggtggagtcattat

SEQ ID NO: 657141 - DNA, 19 bp, Mus musculus
  siRNA target sequence for Slco1b2 (NM_020495.1,321-339).
ggtggagtcattatgaaaa

SEQ ID NO: 657142 - DNA, 19 bp, Mus musculus
  siRNA target sequence for Slco1b2 (NM_020495.1,324-342).
ggagtcattatgaaaagtt

SEQ ID NO: 657143 - DNA, 19 bp, Mus musculus
  siRNA target sequence for Slco1b2 (NM_020495.1,344-362).
catcactcaaatagaaaga

SEQ ID NO: 657144 - DNA, 19 bp, Mus musculus
  siRNA target sequence for Slco1b2 (NM_020495.1,369-387).
gacataccatcttccattt

SEQ ID NO: 657145 - DNA, 19 bp, Mus musculus
  siRNA target sequence for Slco1b2 (NM_020495.1,382-400).
ccatttccggtttgattga

SEQ ID NO: 657146 - DNA, 19 bp, Mus musculus
  siRNA target sequence for Slco1b2 (NM_020495.1,383-401).
catttccggtttgattgat

SEQ ID NO: 657147 - DNA, 19 bp, Mus musculus
  siRNA target sequence for Slco1b2 (NM_020495.1,468-486).
cgaccaaagctgattggaa

SEQ ID NO: 657148 - DNA, 19 bp, Mus musculus
  siRNA target sequence for Slco1b2 (NM_020495.1,484-502).
gaactggttgcttcatcat

SEQ ID NO: 657149 - DNA, 19 bp, Mus musculus
  siRNA target sequence for Slco1b2 (NM_020495.1,500-518).
catgggcattgggagtatt

SEQ ID NO: 657150 - DNA, 19 bp, Mus musculus
  siRNA target sequence for Slco1b2 (NM_020495.1,523-541).
ctgcgttgccacatttctt

SEQ ID NO: 657151 - DNA, 19 bp, Mus musculus
  siRNA target sequence for Slco1b2 (NM_020495.1,526-544).
cgttgccacatttcttcat

SEQ ID NO: 657152 - DNA, 19 bp, Mus musculus
  siRNA target sequence for Slco1b2 (NM_020495.1,573-591).
gacatcagttctctacata

SEQ ID NO: 657153 - DNA, 19 bp, Mus musculus
  siRNA target sequence for Slco1b2 (NM_020495.1,595-613).
ccacgttgacctgtttagt

SEQ ID NO: 657154 - DNA, 19 bp, Mus musculus
  siRNA target sequence for Slco1b2 (NM_020495.1,598-616).
cgttgacctgtttagtcaa

SEQ ID NO: 657155 - DNA, 19 bp, Mus musculus
  siRNA target sequence for Slco1b2 (NM_020495.1,602-620).
gacctgtttagtcaatcaa

SEQ ID NO: 657156 - DNA, 19 bp, Mus musculus
  siRNA target sequence for Slco1b2 (NM_020495.1,605-623).
ctgtttagtcaatcaaact

SEQ ID NO: 657157 - DNA, 19 bp, Mus musculus
  siRNA target sequence for Slco1b2 (NM_020495.1,640-658).
cctcacctgagataatgga

SEQ ID NO: 657158 - DNA, 19 bp, Mus musculus
  siRNA target sequence for Slco1b2 (NM_020495.1,669-687).
gaaaaggggtccaactcat

SEQ ID NO: 657159 - DNA, 19 bp, Mus musculus
  siRNA target sequence for Slco1b2 (NM_020495.1,685-703).
catacacctggatttatgt

SEQ ID NO: 657160 - DNA, 19 bp, Mus musculus
  siRNA target sequence for Slco1b2 (NM_020495.1,752-770).
cctaggagtttcctacatt

SEQ ID NO: 657161 - DNA, 19 bp, Mus musculus
  siRNA target sequence for Slco1b2 (NM_020495.1,841-859).
caatccttggctttatcat

SEQ ID NO: 657162 - DNA, 19 bp, Mus musculus
  siRNA target sequence for Slco1b2 (NM_020495.1,865-883).
ctgtgtttgctaagctata

SEQ ID NO: 657163 - DNA, 19 bp, Mus musculus
  siRNA target sequence for Slco1b2 (NM_020495.1,869-887).
gtttgctaagctatacgta

SEQ ID NO: 657164 - DNA, 19 bp, Mus musculus
  siRNA target sequence for Slco1b2 (NM_020495.1,884-902).
cgtagacgttggatatgta

SEQ ID NO: 657165 - DNA, 19 bp, Mus musculus
  siRNA target sequence for Slco1b2 (NM_020495.1,908-926).
gagaagtgtccgcataact

SEQ ID NO: 657166 - DNA, 19 bp, Mus musculus
  siRNA target sequence for Slco1b2 (NM_020495.1,953-971).
ctggtggctcggcttcatt

SEQ ID NO: 657167 - DNA, 19 bp, Mus musculus
  siRNA target sequence for Slco1b2 (NM_020495.1,955-973).
ggtggctcggcttcattgt

SEQ ID NO: 657168 - DNA, 19 bp, Mus musculus
  siRNA target sequence for Slco1b2 (NM_020495.1,958-976).
ggctcggcttcattgtgaa

SEQ ID NO: 657169 - DNA, 19 bp, Mus musculus
  siRNA target sequence for Slco1b2 (NM_020495.1,968-986).
cattgtgaatggactacta

SEQ ID NO: 657170 - DNA, 19 bp, Mus musculus
  siRNA target sequence for Slco1b2 (NM_020495.1,984-1002).
ctatgcatcatttgttcta

SEQ ID NO: 657171 - DNA, 19 bp, Mus musculus
  siRNA target sequence for Slco1b2 (NM_020495.1,1063-1081).
catctcttcatgtactcaa

SEQ ID NO: 657172 - DNA, 19 bp, Mus musculus
  siRNA target sequence for Slco1b2 (NM_020495.1,1094-1112).
caagaatcccgtgactaat

SEQ ID NO: 657173 - DNA, 19 bp, Mus musculus
  siRNA target sequence for Slco1b2 (NM_020495.1,1097-1115).
gaatcccgtgactaatcca

SEQ ID NO: 657174 - DNA, 19 bp, Mus musculus
  siRNA target sequence for Slco1b2 (NM_020495.1,1103-1121).
cgtgactaatccaacaaca

SEQ ID NO: 657175 - DNA, 19 bp, Mus musculus
  siRNA target sequence for Slco1b2 (NM_020495.1,1141-1159).
ccaacctgactggttttct

SEQ ID NO: 657176 - DNA, 19 bp, Mus musculus
  siRNA target sequence for Slco1b2 (NM_020495.1,1183-1201).
ccaatgaacaatatgtcat

SEQ ID NO: 657177 - DNA, 19 bp, Mus musculus
  siRNA target sequence for Slco1b2 (NM_020495.1,1191-1209).
caatatgtcatattcttga

SEQ ID NO: 657178 - DNA, 19 bp, Mus musculus
  siRNA target sequence for Slco1b2 (NM_020495.1,1197-1215).
gtcatattcttgatactga

SEQ ID NO: 657179 - DNA, 19 bp, Mus musculus
  siRNA target sequence for Slco1b2 (NM_020495.1,1212-1230).
ctgacgttgctacaaatca

SEQ ID NO: 657180 - DNA, 19 bp, Mus musculus
  siRNA target sequence for Slco1b2 (NM_020495.1,1294-1312).
catcgcaggccaactttct

SEQ ID NO: 657181 - DNA, 19 bp, Mus musculus
  siRNA target sequence for Slco1b2 (NM_020495.1,1298-1316).
gcaggccaactttctgtta

SEQ ID NO: 657182 - DNA, 19 bp, Mus musculus
  siRNA target sequence for Slco1b2 (NM_020495.1,1313-1331).
gttaggagttataaccata

SEQ ID NO: 657183 - DNA, 19 bp, Mus musculus
  siRNA target sequence for Slco1b2 (NM_020495.1,1398-1416).
ggaatcactaagtttgtgt

SEQ ID NO: 657184 - DNA, 19 bp, Mus musculus
  siRNA target sequence for Slco1b2 (NM_020495.1,1493-1511).
cctaaccttgacctatgat

SEQ ID NO: 657185 - DNA, 19 bp, Mus musculus
  siRNA target sequence for Slco1b2 (NM_020495.1,1520-1538).
cccagtggactctcacata

SEQ ID NO: 657186 - DNA, 19 bp, Mus musculus
  siRNA target sequence for Slco1b2 (NM_020495.1,1542-1560).
gtcccactttcttattgca

SEQ ID NO: 657187 - DNA, 19 bp, Mus musculus
  siRNA target sequence for Slco1b2 (NM_020495.1,1562-1580).
ctcggactgcatttgtgat

SEQ ID NO: 657188 - DNA, 19 bp, Mus musculus
  siRNA target sequence for Slco1b2 (NM_020495.1,1564-1582).
cggactgcatttgtgataa

SEQ ID NO: 657189 - DNA, 19 bp, Mus musculus
  siRNA target sequence for Slco1b2 (NM_020495.1,1638-1656).
ctggcaggatgcaaatcat

SEQ ID NO: 657190 - DNA, 19 bp, Mus musculus
  siRNA target sequence for Slco1b2 (NM_020495.1,1640-1658).
ggcaggatgcaaatcattt

SEQ ID NO: 657191 - DNA, 19 bp, Mus musculus
  siRNA target sequence for Slco1b2 (NM_020495.1,1659-1677).
cgtggtgataagaaactga

SEQ ID NO: 657192 - DNA, 19 bp, Mus musculus
  siRNA target sequence for Slco1b2 (NM_020495.1,1663-1681).
gtgataagaaactgatgaa

SEQ ID NO: 657193 - DNA, 19 bp, Mus musculus
  siRNA target sequence for Slco1b2 (NM_020495.1,1665-1683).
gataagaaactgatgaata

SEQ ID NO: 657194 - DNA, 19 bp, Mus musculus
  siRNA target sequence for Slco1b2 (NM_020495.1,1676-1694).
gatgaatatagaattctat

SEQ ID NO: 657195 - DNA, 19 bp, Mus musculus
  siRNA target sequence for Slco1b2 (NM_020495.1,1806-1824).
caagtcattatatcttttt

SEQ ID NO: 657196 - DNA, 19 bp, Mus musculus
  siRNA target sequence for Slco1b2 (NM_020495.1,1836-1854).
ggaagcacttctcttatgt

SEQ ID NO: 657197 - DNA, 19 bp, Mus musculus
  siRNA target sequence for Slco1b2 (NM_020495.1,1840-1858).
gcacttctcttatgttgat

SEQ ID NO: 657198 - DNA, 19 bp, Mus musculus
  siRNA target sequence for Slco1b2 (NM_020495.1,1841-1859).
cacttctcttatgttgatt

SEQ ID NO: 657199 - DNA, 19 bp, Mus musculus
  siRNA target sequence for Slco1b2 (NM_020495.1,1867-1885).
ggagtgtccaacctgaatt

SEQ ID NO: 657200 - DNA, 19 bp, Mus musculus
  siRNA target sequence for Slco1b2 (NM_020495.1,1950-1968).
gtctattatggggcattaa

SEQ ID NO: 657201 - DNA, 19 bp, Mus musculus
  siRNA target sequence for Slco1b2 (NM_020495.1,1952-1970).
ctattatggggcattaatt

SEQ ID NO: 657202 - DNA, 19 bp, Mus musculus
  siRNA target sequence for Slco1b2 (NM_020495.1,1962-1980).
gcattaattgacagaacat

SEQ ID NO: 657203 - DNA, 19 bp, Mus musculus
  siRNA target sequence for Slco1b2 (NM_020495.1,2016-2034).
ggagcatgcaggctatata

SEQ ID NO: 657204 - DNA, 19 bp, Mus musculus
  siRNA target sequence for Slco1b2 (NM_020495.1,2017-2035).
gagcatgcaggctatataa

SEQ ID NO: 657205 - DNA, 19 bp, Mus musculus
  siRNA target sequence for Slco1b2 (NM_020495.1,2027-2045).
gctatataactcgagatta

SEQ ID NO: 657206 - DNA, 19 bp, Mus musculus
  siRNA target sequence for Slco1b2 (NM_020495.1,2028-2046).
ctatataactcgagattat

SEQ ID NO: 657207 - DNA, 19 bp, Mus musculus
  siRNA target sequence for Slco1b2 (NM_020495.1,2038-2056).
cgagattatttggaatgat

SEQ ID NO: 657208 - DNA, 19 bp, Mus musculus
  siRNA target sequence for Slco1b2 (NM_020495.1,2041-2059).
gattatttggaatgatcta

SEQ ID NO: 657209 - DNA, 19 bp, Mus musculus
  siRNA target sequence for Slco1b2 (NM_020495.1,2063-2081).
gggtttgagtatagcttta

SEQ ID NO: 657210 - DNA, 19 bp, Mus musculus
  siRNA target sequence for Slco1b2 (NM_020495.1,2064-2082).
ggtttgagtatagctttaa

SEQ ID NO: 657211 - DNA, 19 bp, Mus musculus
  siRNA target sequence for Slco1b2 (NM_020495.1,2069-2087).
gagtatagctttaaagact

SEQ ID NO: 657212 - DNA, 19 bp, Mus musculus
  siRNA target sequence for Slco1b2 (NM_020495.1,2084-2102).
gactccaatacttctttta

SEQ ID NO: 657213 - DNA, 19 bp, Mus musculus
  siRNA target sequence for Slco1b2 (NM_020495.1,2097-2115).
cttttatatgttgcattaa

SEQ ID NO: 657214 - DNA, 19 bp, Mus musculus
  siRNA target sequence for Slco1b2 (NM_020495.1,2106-2124).
gttgcattaatttatgtta

SEQ ID NO: 657215 - DNA, 19 bp, Mus musculus
  siRNA target sequence for Slco1b2 (NM_020495.1,2195-2213).
cccagaacctgtaaataat

SEQ ID NO: 657216 - DNA, 19 bp, Mus musculus
  siRNA target sequence for Slco1b2 (NM_020495.1,2196-2214).
ccagaacctgtaaataata

SEQ ID NO: 657217 - DNA, 19 bp, Mus musculus
  siRNA target sequence for Slco1b2 (NM_020495.1,2197-2215).
cagaacctgtaaataataa

SEQ ID NO: 657218 - DNA, 19 bp, Mus musculus
  siRNA target sequence for Slco1b2 (NM_020495.1,2202-2220).
cctgtaaataataatggat

SEQ ID NO: 657219 - DNA, 19 bp, Mus musculus
  siRNA target sequence for Slco1b2 (NM_020495.1,2227-2245).
gtgtaccttctgatgaaaa

SEQ ID NO: 657220 - DNA, 19 bp, Mus musculus
  siRNA target sequence for Slco1b2 (NM_178235.1,875-893).
gatatgtagacctgagttt

SEQ ID NO: 657221 - DNA, 19 bp, Mus musculus
  siRNA target sequence for Slco1c1 (NM_021471.1,242-260).
gcccatttgttccacaaaa

SEQ ID NO: 657222 - DNA, 19 bp, Mus musculus
  siRNA target sequence for Slco1c1 (NM_021471.1,275-293).
gccggagggccatccttta

SEQ ID NO: 657223 - DNA, 19 bp, Mus musculus
  siRNA target sequence for Slco1c1 (NM_021471.1,279-297).
gagggccatcctttacagt

SEQ ID NO: 657224 - DNA, 19 bp, Mus musculus
  siRNA target sequence for Slco1c1 (NM_021471.1,355-373).
gggtgccctgtcgtttgtt

SEQ ID NO: 657225 - DNA, 19 bp, Mus musculus
  siRNA target sequence for Slco1c1 (NM_021471.1,356-374).
ggtgccctgtcgtttgttt

SEQ ID NO: 657226 - DNA, 19 bp, Mus musculus
  siRNA target sequence for Slco1c1 (NM_021471.1,357-375).
gtgccctgtcgtttgttta

SEQ ID NO: 657227 - DNA, 19 bp, Mus musculus
  siRNA target sequence for Slco1c1 (NM_021471.1,359-377).
gccctgtcgtttgtttact

SEQ ID NO: 657228 - DNA, 19 bp, Mus musculus
  siRNA target sequence for Slco1c1 (NM_021471.1,411-429).
gcaccgtgactcagataga

SEQ ID NO: 657229 - DNA, 19 bp, Mus musculus
  siRNA target sequence for Slco1c1 (NM_021471.1,450-468).
cctctctggtgggaataat

SEQ ID NO: 657230 - DNA, 19 bp, Mus musculus
  siRNA target sequence for Slco1c1 (NM_021471.1,451-469).
ctctctggtgggaataatt

SEQ ID NO: 657231 - DNA, 19 bp, Mus musculus
  siRNA target sequence for Slco1c1 (NM_021471.1,488-506).
gggaatctcctggtcataa

SEQ ID NO: 657232 - DNA, 19 bp, Mus musculus
  siRNA target sequence for Slco1c1 (NM_021471.1,497-515).
ctggtcataacgtttgtta

SEQ ID NO: 657233 - DNA, 19 bp, Mus musculus
  siRNA target sequence for Slco1c1 (NM_021471.1,622-640).
gtacagctatgagaaatat

SEQ ID NO: 657234 - DNA, 19 bp, Mus musculus
  siRNA target sequence for Slco1c1 (NM_021471.1,652-670).
cccgtcctccaatgttact

SEQ ID NO: 657235 - DNA, 19 bp, Mus musculus
  siRNA target sequence for Slco1c1 (NM_021471.1,718-736).
ctcaatcctggggaaatca

SEQ ID NO: 657236 - DNA, 19 bp, Mus musculus
  siRNA target sequence for Slco1c1 (NM_021471.1,853-871).
cgcctatctggatgacttt

SEQ ID NO: 657237 - DNA, 19 bp, Mus musculus
  siRNA target sequence for Slco1c1 (NM_021471.1,908-926).
gtgcagacagtggcaatta

SEQ ID NO: 657238 - DNA, 19 bp, Mus musculus
  siRNA target sequence for Slco1c1 (NM_021471.1,913-931).
gacagtggcaattatagga

SEQ ID NO: 657239 - DNA, 19 bp, Mus musculus
  siRNA target sequence for Slco1c1 (NM_021471.1,921-939).
caattataggacccatttt

SEQ ID NO: 657240 - DNA, 19 bp, Mus musculus
  siRNA target sequence for Slco1c1 (NM_021471.1,943-961).
cttccttttgggctcatta

SEQ ID NO: 657241 - DNA, 19 bp, Mus musculus
  siRNA target sequence for Slco1c1 (NM_021471.1,957-975).
cattatgcgcaaaactgta

SEQ ID NO: 657242 - DNA, 19 bp, Mus musculus
  siRNA target sequence for Slco1c1 (NM_021471.1,963-981).
gcgcaaaactgtatgttga

SEQ ID NO: 657243 - DNA, 19 bp, Mus musculus
  siRNA target sequence for Slco1c1 (NM_021471.1,964-982).
cgcaaaactgtatgttgat

SEQ ID NO: 657244 - DNA, 19 bp, Mus musculus
  siRNA target sequence for Slco1c1 (NM_021471.1,966-984).
caaaactgtatgttgatat

SEQ ID NO: 657245 - DNA, 19 bp, Mus musculus
  siRNA target sequence for Slco1c1 (NM_021471.1,992-1010).
gtgaatctagaccatataa

SEQ ID NO: 657246 - DNA, 19 bp, Mus musculus
  siRNA target sequence for Slco1c1 (NM_021471.1,994-1012).
gaatctagaccatataaca

SEQ ID NO: 657247 - DNA, 19 bp, Mus musculus
  siRNA target sequence for Slco1c1 (NM_021471.1,1045-1063).
ctggtggcttggttaccta

SEQ ID NO: 657248 - DNA, 19 bp, Mus musculus
  siRNA target sequence for Slco1c1 (NM_021471.1,1047-1065).
ggtggcttggttacctaat

SEQ ID NO: 657249 - DNA, 19 bp, Mus musculus
  siRNA target sequence for Slco1c1 (NM_021471.1,1051-1069).
gcttggttacctaatagct

SEQ ID NO: 657250 - DNA, 19 bp, Mus musculus
  siRNA target sequence for Slco1c1 (NM_021471.1,1184-1202).
gaccctattcactaccaaa

SEQ ID NO: 657251 - DNA, 19 bp, Mus musculus
  siRNA target sequence for Slco1c1 (NM_021471.1,1206-1224).
cccctggagacgataaaat

SEQ ID NO: 657252 - DNA, 19 bp, Mus musculus
  siRNA target sequence for Slco1c1 (NM_021471.1,1208-1226).
cctggagacgataaaatga

SEQ ID NO: 657253 - DNA, 19 bp, Mus musculus
  siRNA target sequence for Slco1c1 (NM_021471.1,1256-1274).
ccatcattgaagactcttt

SEQ ID NO: 657254 - DNA, 19 bp, Mus musculus
  siRNA target sequence for Slco1c1 (NM_021471.1,1278-1296).
gaaatccagtatacatctt

SEQ ID NO: 657255 - DNA, 19 bp, Mus musculus
  siRNA target sequence for Slco1c1 (NM_021471.1,1283-1301).
ccagtatacatcttatact

SEQ ID NO: 657256 - DNA, 19 bp, Mus musculus
  siRNA target sequence for Slco1c1 (NM_021471.1,1312-1330).
caccgttcagttcaattct

SEQ ID NO: 657257 - DNA, 19 bp, Mus musculus
  siRNA target sequence for Slco1c1 (NM_021471.1,1314-1332).
ccgttcagttcaattctct

SEQ ID NO: 657258 - DNA, 19 bp, Mus musculus
  siRNA target sequence for Slco1c1 (NM_021471.1,1315-1333).
cgttcagttcaattctcta

SEQ ID NO: 657259 - DNA, 19 bp, Mus musculus
  siRNA target sequence for Slco1c1 (NM_021471.1,1339-1357).
catggtcacatataaacca

SEQ ID NO: 657260 - DNA, 19 bp, Mus musculus
  siRNA target sequence for Slco1c1 (NM_021471.1,1342-1360).
ggtcacatataaaccaaaa

SEQ ID NO: 657261 - DNA, 19 bp, Mus musculus
  siRNA target sequence for Slco1c1 (NM_021471.1,1428-1446).
ctgcagtggcccttggaat

SEQ ID NO: 657262 - DNA, 19 bp, Mus musculus
  siRNA target sequence for Slco1c1 (NM_021471.1,1452-1470).
ctgggggaatagttatgaa

SEQ ID NO: 657263 - DNA, 19 bp, Mus musculus
  siRNA target sequence for Slco1c1 (NM_021471.1,1455-1473).
ggggaatagttatgaaaaa

SEQ ID NO: 657264 - DNA, 19 bp, Mus musculus
  siRNA target sequence for Slco1c1 (NM_021471.1,1491-1509).
gtgaagctacaaaactcta

SEQ ID NO: 657265 - DNA, 19 bp, Mus musculus
  siRNA target sequence for Slco1c1 (NM_021471.1,1597-1615).
ctcctaccaaggaaccaaa

SEQ ID NO: 657266 - DNA, 19 bp, Mus musculus
  siRNA target sequence for Slco1c1 (NM_021471.1,1611-1629).
ccaaacctgtctcttatca

SEQ ID NO: 657267 - DNA, 19 bp, Mus musculus
  siRNA target sequence for Slco1c1 (NM_021471.1,1628-1646).
catgaacgagctctctttt

SEQ ID NO: 657268 - DNA, 19 bp, Mus musculus
  siRNA target sequence for Slco1c1 (NM_021471.1,1634-1652).
cgagctctcttttcagatt

SEQ ID NO: 657269 - DNA, 19 bp, Mus musculus
  siRNA target sequence for Slco1c1 (NM_021471.1,1701-1719).
gggacaatgggattaccta

SEQ ID NO: 657270 - DNA, 19 bp, Mus musculus
  siRNA target sequence for Slco1c1 (NM_021471.1,1702-1720).
ggacaatgggattacctat

SEQ ID NO: 657271 - DNA, 19 bp, Mus musculus
  siRNA target sequence for Slco1c1 (NM_021471.1,1752-1770).
ccagccggagtggaaagaa

SEQ ID NO: 657272 - DNA, 19 bp, Mus musculus
  siRNA target sequence for Slco1c1 (NM_021471.1,1789-1807).
cacttgtgtgggatttgca

SEQ ID NO: 657273 - DNA, 19 bp, Mus musculus
  siRNA target sequence for Slco1c1 (NM_021471.1,1840-1858).
gggcaggtgtcagaaagat

SEQ ID NO: 657274 - DNA, 19 bp, Mus musculus
  siRNA target sequence for Slco1c1 (NM_021471.1,1841-1859).
ggcaggtgtcagaaagata

SEQ ID NO: 657275 - DNA, 19 bp, Mus musculus
  siRNA target sequence for Slco1c1 (NM_021471.1,1846-1864).
gtgtcagaaagataatgga

SEQ ID NO: 657276 - DNA, 19 bp, Mus musculus
  siRNA target sequence for Slco1c1 (NM_021471.1,1903-1921).
catcacatcatatacatta

SEQ ID NO: 657277 - DNA, 19 bp, Mus musculus
  siRNA target sequence for Slco1c1 (NM_021471.1,1928-1946).
ggtggcatacctggatata

SEQ ID NO: 657278 - DNA, 19 bp, Mus musculus
  siRNA target sequence for Slco1c1 (NM_021471.1,1931-1949).
ggcatacctggatatatat

SEQ ID NO: 657279 - DNA, 19 bp, Mus musculus
  siRNA target sequence for Slco1c1 (NM_021471.1,1937-1955).
cctggatatatattactct

SEQ ID NO: 657280 - DNA, 19 bp, Mus musculus
  siRNA target sequence for Slco1c1 (NM_021471.1,1938-1956).
ctggatatatattactctt

SEQ ID NO: 657281 - DNA, 19 bp, Mus musculus
  siRNA target sequence for Slco1c1 (NM_021471.1,1962-1980).
gcattcaaccacaacttaa

SEQ ID NO: 657282 - DNA, 19 bp, Mus musculus
  siRNA target sequence for Slco1c1 (NM_021471.1,1967-1985).
caaccacaacttaagtctt

SEQ ID NO: 657283 - DNA, 19 bp, Mus musculus
  siRNA target sequence for Slco1c1 (NM_021471.1,2002-2020).
caccttagcagtaagagtt

SEQ ID NO: 657284 - DNA, 19 bp, Mus musculus
  siRNA target sequence for Slco1c1 (NM_021471.1,2063-2081).
gacacttcatgcctcaaat

SEQ ID NO: 657285 - DNA, 19 bp, Mus musculus
  siRNA target sequence for Slco1c1 (NM_021471.1,2073-2091).
gcctcaaatggggatttaa

SEQ ID NO: 657286 - DNA, 19 bp, Mus musculus
  siRNA target sequence for Slco1c1 (NM_021471.1,2075-2093).
ctcaaatggggatttaaga

SEQ ID NO: 657287 - DNA, 19 bp, Mus musculus
  siRNA target sequence for Slco1c1 (NM_021471.1,2131-2149).
ccacgctttcagacacata

SEQ ID NO: 657288 - DNA, 19 bp, Mus musculus
  siRNA target sequence for Slco1c1 (NM_021471.1,2132-2150).
cacgctttcagacacatat

SEQ ID NO: 657289 - DNA, 19 bp, Mus musculus
  siRNA target sequence for Slco1c1 (NM_021471.1,2144-2162).
cacatatacctgggattaa

SEQ ID NO: 657290 - DNA, 19 bp, Mus musculus
  siRNA target sequence for Slco1c1 (NM_021471.1,2191-2209).
cctaagcatggctgtactt

SEQ ID NO: 657291 - DNA, 19 bp, Mus musculus
  siRNA target sequence for Slco1c1 (NM_021471.1,2321-2339).
ggattgcagcccaagtact

SEQ ID NO: 657292 - DNA, 19 bp, Mus musculus
  siRNA target sequence for Slco2b1 (NM_175316.2,119-137).
caatgggcacagaagatat

SEQ ID NO: 657293 - DNA, 19 bp, Mus musculus
  siRNA target sequence for Slco2b1 (NM_175316.2,196-214).
gggatgttccacaacatca

SEQ ID NO: 657294 - DNA, 19 bp, Mus musculus
  siRNA target sequence for Slco2b1 (NM_175316.2,358-376).
gggaatgtatccttgatct

SEQ ID NO: 657295 - DNA, 19 bp, Mus musculus
  siRNA target sequence for Slco2b1 (NM_175316.2,629-647).
ccatggtggggatcatgtt

SEQ ID NO: 657296 - DNA, 19 bp, Mus musculus
  siRNA target sequence for Slco2b1 (NM_175316.2,742-760).
ctctacattgggatcttgt

SEQ ID NO: 657297 - DNA, 19 bp, Mus musculus
  siRNA target sequence for Slco2b1 (NM_175316.2,807-825).
cctcatgctacgcctttat

SEQ ID NO: 657298 - DNA, 19 bp, Mus musculus
  siRNA target sequence for Slco2b1 (NM_175316.2,818-836).
gcctttatgtggacattga

SEQ ID NO: 657299 - DNA, 19 bp, Mus musculus
  siRNA target sequence for Slco2b1 (NM_175316.2,855-873).
catcaacttgactccaaaa

SEQ ID NO: 657300 - DNA, 19 bp, Mus musculus
  siRNA target sequence for Slco2b1 (NM_175316.2,969-987).
gatgcccaaggagaaacat

SEQ ID NO: 657301 - DNA, 19 bp, Mus musculus
  siRNA target sequence for Slco2b1 (NM_175316.2,1060-1078).
cagcacgagcctttaaaga

SEQ ID NO: 657302 - DNA, 19 bp, Mus musculus
  siRNA target sequence for Slco2b1 (NM_175316.2,1115-1133).
ctttggtccagtttgtcaa

SEQ ID NO: 657303 - DNA, 19 bp, Mus musculus
  siRNA target sequence for Slco2b1 (NM_175316.2,1232-1250).
ccaccttcctgcctaagtt

SEQ ID NO: 657304 - DNA, 19 bp, Mus musculus
  siRNA target sequence for Slco2b1 (NM_175316.2,1430-1448).
gcgtgccgctcttcttcat

SEQ ID NO: 657305 - DNA, 19 bp, Mus musculus
  siRNA target sequence for Slco2b1 (NM_175316.2,1431-1449).
cgtgccgctcttcttcatt

SEQ ID NO: 657306 - DNA, 19 bp, Mus musculus
  siRNA target sequence for Slco2b1 (NM_175316.2,1451-1469).
gctgctctacccatcaaat

SEQ ID NO: 657307 - DNA, 19 bp, Mus musculus
  siRNA target sequence for Slco2b1 (NM_175316.2,1455-1473).
ctctacccatcaaattgca

SEQ ID NO: 657308 - DNA, 19 bp, Mus musculus
  siRNA target sequence for Slco2b1 (NM_175316.2,1542-1560).
ctgccaatcagatgacttt

SEQ ID NO: 657309 - DNA, 19 bp, Mus musculus
  siRNA target sequence for Slco2b1 (NM_175316.2,1853-1871).
cagtggggatgcagttcat

SEQ ID NO: 657310 - DNA, 19 bp, Mus musculus
  siRNA target sequence for Slco2b1 (NM_175316.2,1998-2016).
gctccgaaaccgattcata

SEQ ID NO: 657311 - DNA, 19 bp, Mus musculus
  siRNA target sequence for Slco3a1 (NM_023908.1,359-377).
gcgctgattctcttcgtaa

SEQ ID NO: 657312 - DNA, 19 bp, Mus musculus
  siRNA target sequence for Slco3a1 (NM_023908.1,412-430).
catcggctgtggtggaatt

SEQ ID NO: 657313 - DNA, 19 bp, Mus musculus
  siRNA target sequence for Slco3a1 (NM_023908.1,416-434).
ggctgtggtggaattgtca

SEQ ID NO: 657314 - DNA, 19 bp, Mus musculus
  siRNA target sequence for Slco3a1 (NM_023908.1,569-587).
cccgacccggacctaatct

SEQ ID NO: 657315 - DNA, 19 bp, Mus musculus
  siRNA target sequence for Slco3a1 (NM_023908.1,596-614).
cggacagccacgaacatga

SEQ ID NO: 657316 - DNA, 19 bp, Mus musculus
  siRNA target sequence for Slco3a1 (NM_023908.1,597-615).
ggacagccacgaacatgat

SEQ ID NO: 657317 - DNA, 19 bp, Mus musculus
  siRNA target sequence for Slco3a1 (NM_023908.1,600-618).
cagccacgaacatgatgta

SEQ ID NO: 657318 - DNA, 19 bp, Mus musculus
  siRNA target sequence for Slco3a1 (NM_023908.1,674-692).
cccctgggggtctcctata

SEQ ID NO: 657319 - DNA, 19 bp, Mus musculus
  siRNA target sequence for Slco3a1 (NM_023908.1,675-693).
ccctgggggtctcctatat

SEQ ID NO: 657320 - DNA, 19 bp, Mus musculus
  siRNA target sequence for Slco3a1 (NM_023908.1,715-733).
ggactcctcgctctacata

SEQ ID NO: 657321 - DNA, 19 bp, Mus musculus
  siRNA target sequence for Slco3a1 (NM_023908.1,745-763).
cacgatgttggtatttgga

SEQ ID NO: 657322 - DNA, 19 bp, Mus musculus
  siRNA target sequence for Slco3a1 (NM_023908.1,765-783).
cagcctgtggatttattct

SEQ ID NO: 657323 - DNA, 19 bp, Mus musculus
  siRNA target sequence for Slco3a1 (NM_023908.1,789-807).
ctttctgtaccaagatcta

SEQ ID NO: 657324 - DNA, 19 bp, Mus musculus
  siRNA target sequence for Slco3a1 (NM_023908.1,900-918).
gcggtgccttgctcttctt

SEQ ID NO: 657325 - DNA, 19 bp, Mus musculus
  siRNA target sequence for Slco3a1 (NM_023908.1,1445-1463).
gttcgctacggaaacaact

SEQ ID NO: 657326 - DNA, 19 bp, Mus musculus
  siRNA target sequence for Slco3a1 (NM_023908.1,1477-1495).
ggcccttgacccttactct

SEQ ID NO: 657327 - DNA, 19 bp, Mus musculus
  siRNA target sequence for Slco3a1 (NM_023908.1,1929-1947).
gtgtcctctacgacaatgt

SEQ ID NO: 657328 - DNA, 19 bp, Mus musculus
  siRNA target sequence for Slco3a1 (NM_023908.1,2022-2040).
ggcagtgcctgcggaaaaa

SEQ ID NO: 657329 - DNA, 19 bp, Mus musculus
  siRNA target sequence for Slco3a1 (NM_023908.1,2026-2044).
gtgcctgcggaaaaactat

SEQ ID NO: 657330 - DNA, 19 bp, Mus musculus
  siRNA target sequence for Slco3a1 (NM_023908.1,2077-2095).
gagcaccagtgagttcttt

SEQ ID NO: 657331 - DNA, 19 bp, Mus musculus
  siRNA target sequence for Slco3a1 (NM_023908.1,2103-2121).
ctctgaccctagacaatct

SEQ ID NO: 657332 - DNA, 19 bp, Mus musculus
  siRNA target sequence for Slco3a1 (NM_023908.1,2138-2156).
cccgcacaccagacacata

SEQ ID NO: 657333 - DNA, 19 bp, Mus musculus
  siRNA target sequence for Slco3a1 (NM_023908.1,2153-2171).
cataggacaaaatttatct

SEQ ID NO: 657334 - DNA, 19 bp, Mus musculus
  siRNA target sequence for Slco4a1 (NM_148933.1,320-338).
gcgatgggggacacacatt

SEQ ID NO: 657335 - DNA, 19 bp, Mus musculus
  siRNA target sequence for Slco4a1 (NM_148933.1,321-339).
cgatgggggacacacattt

SEQ ID NO: 657336 - DNA, 19 bp, Mus musculus
  siRNA target sequence for Slco4a1 (NM_148933.1,347-365).
ctcccgaagcacctcttta

SEQ ID NO: 657337 - DNA, 19 bp, Mus musculus
  siRNA target sequence for Slco4a1 (NM_148933.1,349-367).
cccgaagcacctctttact

SEQ ID NO: 657338 - DNA, 19 bp, Mus musculus
  siRNA target sequence for Slco4a1 (NM_148933.1,350-368).
ccgaagcacctctttacta

SEQ ID NO: 657339 - DNA, 19 bp, Mus musculus
  siRNA target sequence for Slco4a1 (NM_148933.1,516-534).
cccgtgaggtgcagtatgt

SEQ ID NO: 657340 - DNA, 19 bp, Mus musculus
  siRNA target sequence for Slco4a1 (NM_148933.1,850-868).
cggctccctggtatttgca

SEQ ID NO: 657341 - DNA, 19 bp, Mus musculus
  siRNA target sequence for Slco4a1 (NM_148933.1,927-945).
ggacgtgcctgactaatca

SEQ ID NO: 657342 - DNA, 19 bp, Mus musculus
  siRNA target sequence for Slco4a1 (NM_148933.1,946-964).
gagtcatgtggagtgtaaa

SEQ ID NO: 657343 - DNA, 19 bp, Mus musculus
  siRNA target sequence for Slco4a1 (NM_148933.1,948-966).
gtcatgtggagtgtaaaga

SEQ ID NO: 657344 - DNA, 19 bp, Mus musculus
  siRNA target sequence for Slco4a1 (NM_148933.1,1070-1088).
gatgagaacgtcaagtcaa

SEQ ID NO: 657345 - DNA, 19 bp, Mus musculus
  siRNA target sequence for Slco4a1 (NM_148933.1,1078-1096).
cgtcaagtcaagttactca

SEQ ID NO: 657346 - DNA, 19 bp, Mus musculus
  siRNA target sequence for Slco4a1 (NM_148933.1,1161-1179).
gaggagccatgctaaacgt

SEQ ID NO: 657347 - DNA, 19 bp, Mus musculus
  siRNA target sequence for Slco4a1 (NM_148933.1,1166-1184).
gccatgctaaacgtttaca

SEQ ID NO: 657348 - DNA, 19 bp, Mus musculus
  siRNA target sequence for Slco4a1 (NM_148933.1,1168-1186).
catgctaaacgtttacaca

SEQ ID NO: 657349 - DNA, 19 bp, Mus musculus
  siRNA target sequence for Slco4a1 (NM_148933.1,1326-1344).
cccagcgctacgttgttat

SEQ ID NO: 657350 - DNA, 19 bp, Mus musculus
  siRNA target sequence for Slco4a1 (NM_148933.1,1328-1346).
cagcgctacgttgttatga

SEQ ID NO: 657351 - DNA, 19 bp, Mus musculus
  siRNA target sequence for Slco4a1 (NM_148933.1,1330-1348).
gcgctacgttgttatgaga

SEQ ID NO: 657352 - DNA, 19 bp, Mus musculus
  siRNA target sequence for Slco4a1 (NM_148933.1,1524-1542).
cattcggtcccaagttctt

SEQ ID NO: 657353 - DNA, 19 bp, Mus musculus
  siRNA target sequence for Slco4a1 (NM_148933.1,1820-1838).
gcttgcaacgccatctact

SEQ ID NO: 657354 - DNA, 19 bp, Mus musculus
  siRNA target sequence for Slco4a1 (NM_148933.1,1875-1893).
cagatggcaccatgtacta

SEQ ID NO: 657355 - DNA, 19 bp, Mus musculus
  siRNA target sequence for Slco4a1 (NM_148933.1,2057-2075).
gttctcgtgttcgttgtaa

SEQ ID NO: 657356 - DNA, 19 bp, Mus musculus
  siRNA target sequence for Slco4a1 (NM_148933.1,2060-2078).
ctcgtgttcgttgtaatta

SEQ ID NO: 657357 - DNA, 19 bp, Mus musculus
  siRNA target sequence for Slco4a1 (NM_148933.1,2063-2081).
gtgttcgttgtaattatct

SEQ ID NO: 657358 - DNA, 19 bp, Mus musculus
  siRNA target sequence for Slco4a1 (NM_148933.1,2065-2083).
gttcgttgtaattatcttt

SEQ ID NO: 657359 - DNA, 19 bp, Mus musculus
  siRNA target sequence for Slco4a1 (NM_148933.1,2129-2147).
gtcagtgatcggcaaagat

SEQ ID NO: 657360 - DNA, 19 bp, Mus musculus
  siRNA target sequence for Slco4a1 (NM_148933.1,2165-2183).
cagtggatcgtcgtaagaa

SEQ ID NO: 657361 - DNA, 19 bp, Mus musculus
  siRNA target sequence for Slco4a1 (NM_148933.1,2167-2185).
gtggatcgtcgtaagaaca

SEQ ID NO: 657362 - DNA, 19 bp, Mus musculus
  siRNA target sequence for Slco4a1 (NM_148933.1,2170-2188).
gatcgtcgtaagaacacta

SEQ ID NO: 657363 - DNA, 19 bp, Mus musculus
  siRNA target sequence for Slco4a1 (NM_148933.1,2274-2292).
cctgcttcgtgtatgagaa

SEQ ID NO: 657364 - DNA, 19 bp, Mus musculus
  siRNA target sequence for Slco4a1 (NM_148933.1,2277-2295).
gcttcgtgtatgagaatga

SEQ ID NO: 657365 - DNA, 19 bp, Mus musculus
  siRNA target sequence for Slco4a1 (NM_148933.1,2278-2296).
cttcgtgtatgagaatgaa

SEQ ID NO: 657366 - DNA, 19 bp, Mus musculus
  siRNA target sequence for Slco6b1 (NM_026413.1,101-119).
cttggtgtaacctatattt

SEQ ID NO: 657367 - DNA, 19 bp, Mus musculus
  siRNA target sequence for Slco6b1 (NM_026413.1,105-123).
gtgtaacctatatttatga

SEQ ID NO: 657368 - DNA, 19 bp, Mus musculus
  siRNA target sequence for Slco6b1 (NM_026413.1,107-125).
gtaacctatatttatgaca

SEQ ID NO: 657369 - DNA, 19 bp, Mus musculus
  siRNA target sequence for Slco6b1 (NM_026413.1,122-140).
gacaacatttccacataca

SEQ ID NO: 657370 - DNA, 19 bp, Mus musculus
  siRNA target sequence for Slco6b1 (NM_026413.1,144-162).
ctggcatctatttaggtat

SEQ ID NO: 657371 - DNA, 19 bp, Mus musculus
  siRNA target sequence for Slco6b1 (NM_026413.1,164-182).
gcggatgctgcatttgtat

SEQ ID NO: 657372 - DNA, 19 bp, Mus musculus
  siRNA target sequence for Slco6b1 (NM_026413.1,206-224).
gtaggatctccaaacctta

SEQ ID NO: 657373 - DNA, 19 bp, Mus musculus
  siRNA target sequence for Slco6b1 (NM_026413.1,243-261).
gttcggaggaagaggtaaa

SEQ ID NO: 657374 - DNA, 19 bp, Mus musculus
  siRNA target sequence for Slco6b1 (NM_026413.1,256-274).
ggtaaatgacaactttctt

SEQ ID NO: 657375 - DNA, 19 bp, Mus musculus
  siRNA target sequence for Slco6b1 (NM_026413.1,277-295).
gtggcagttcaattggttt

SEQ ID NO: 657376 - DNA, 19 bp, Mus musculus
  siRNA target sequence for Slco6b1 (NM_026413.1,317-335).
ctgctcgcatggttcacat

SEQ ID NO: 657377 - DNA, 19 bp, Mus musculus
  siRNA target sequence for Slco6b1 (NM_026413.1,319-337).
gctcgcatggttcacattt

SEQ ID NO: 657378 - DNA, 19 bp, Mus musculus
  siRNA target sequence for Slco6b1 (NM_026413.1,320-338).
ctcgcatggttcacatttt

SEQ ID NO: 657379 - DNA, 19 bp, Mus musculus
  siRNA target sequence for Slco6b1 (NM_026413.1,427-445).
gcttaagaatatgaaatat

SEQ ID NO: 657380 - DNA, 19 bp, Mus musculus
  siRNA target sequence for Slco6b1 (NM_026413.1,531-549).
cagaggccttggctactat

SEQ ID NO: 657381 - DNA, 19 bp, Mus musculus
  siRNA target sequence for Slco6b1 (NM_026413.1,535-553).
ggccttggctactattgga

SEQ ID NO: 657382 - DNA, 19 bp, Mus musculus
  siRNA target sequence for Slco6b1 (NM_026413.1,558-576).
cagaatttttgcccaaata

SEQ ID NO: 657383 - DNA, 19 bp, Mus musculus
  siRNA target sequence for Slco6b1 (NM_026413.1,619-637).
gctcacaggaattatttta

SEQ ID NO: 657384 - DNA, 19 bp, Mus musculus
  siRNA target sequence for Slco6b1 (NM_026413.1,680-698).
gtttccaagttgaaaatgt

SEQ ID NO: 657385 - DNA, 19 bp, Mus musculus
  siRNA target sequence for Slco6b1 (NM_026413.1,688-706).
gttgaaaatgtcttctaga

SEQ ID NO: 657386 - DNA, 19 bp, Mus musculus
  siRNA target sequence for Slco6b1 (NM_026413.1,705-723).
gaagccaaatgaaatttat

SEQ ID NO: 657387 - DNA, 19 bp, Mus musculus
  siRNA target sequence for Slco6b1 (NM_026413.1,801-819).
gaatcactgccaattatga

SEQ ID NO: 657388 - DNA, 19 bp, Mus musculus
  siRNA target sequence for Slco6b1 (NM_026413.1,951-969).
cttctaaacacctagacta

SEQ ID NO: 657389 - DNA, 19 bp, Mus musculus
  siRNA target sequence for Slco6b1 (NM_026413.1,954-972).
ctaaacacctagactatga

SEQ ID NO: 657390 - DNA, 19 bp, Mus musculus
  siRNA target sequence for Slco6b1 (NM_026413.1,1012-1030).
ggcaaatgcagattctgaa

SEQ ID NO: 657391 - DNA, 19 bp, Mus musculus
  siRNA target sequence for Slco6b1 (NM_026413.1,1043-1061).
gatgccacttctggaaaat

SEQ ID NO: 657392 - DNA, 19 bp, Mus musculus
  siRNA target sequence for Slco6b1 (NM_026413.1,1128-1146).
gttcagctagtataccaat

SEQ ID NO: 657393 - DNA, 19 bp, Mus musculus
  siRNA target sequence for Slco6b1 (NM_026413.1,1143-1161).
caatcaccttgattatcct

SEQ ID NO: 657394 - DNA, 19 bp, Mus musculus
  siRNA target sequence for Slco6b1 (NM_026413.1,1195-1213).
catagctgtgacctataca

SEQ ID NO: 657395 - DNA, 19 bp, Mus musculus
  siRNA target sequence for Slco6b1 (NM_026413.1,1207-1225).
ctatacaactttgagatta

SEQ ID NO: 657396 - DNA, 19 bp, Mus musculus
  siRNA target sequence for Slco6b1 (NM_026413.1,1263-1281).
cagcaagtcgttcttgtat

SEQ ID NO: 657397 - DNA, 19 bp, Mus musculus
  siRNA target sequence for Slco6b1 (NM_026413.1,1323-1341).
ggatctataataagttaaa

SEQ ID NO: 657398 - DNA, 19 bp, Mus musculus
  siRNA target sequence for Sv2a (NM_022030.2,529-547).
cagagtccaggatgagtat

SEQ ID NO: 657399 - DNA, 19 bp, Mus musculus
  siRNA target sequence for Sv2a (NM_022030.2,603-621).
cccctgcggacggctatta

SEQ ID NO: 657400 - DNA, 19 bp, Mus musculus
  siRNA target sequence for Sv2a (NM_022030.2,675-693).
ccgagggccacgatgaaga

SEQ ID NO: 657401 - DNA, 19 bp, Mus musculus
  siRNA target sequence for Sv2a (NM_022030.2,676-694).
cgagggccacgatgaagat

SEQ ID NO: 657402 - DNA, 19 bp, Mus musculus
  siRNA target sequence for Sv2a (NM_022030.2,838-856).
ggcgcagcggcgtaaagat

SEQ ID NO: 657403 - DNA, 19 bp, Mus musculus
  siRNA target sequence for Sv2a (NM_022030.2,870-888).
ctcagcagtatgaaaccat

SEQ ID NO: 657404 - DNA, 19 bp, Mus musculus
  siRNA target sequence for Sv2a (NM_022030.2,1180-1198).
ccagggttatggaaccttt

SEQ ID NO: 657405 - DNA, 19 bp, Mus musculus
  siRNA target sequence for Sv2a (NM_022030.2,1184-1202).
ggttatggaacctttctct

SEQ ID NO: 657406 - DNA, 19 bp, Mus musculus
  siRNA target sequence for Sv2a (NM_022030.2,1236-1254).
gttccatccccatagtctt

SEQ ID NO: 657407 - DNA, 19 bp, Mus musculus
  siRNA target sequence for Sv2a (NM_022030.2,1324-1342).
gatgatcggtggagtgtat

SEQ ID NO: 657408 - DNA, 19 bp, Mus musculus
  siRNA target sequence for Sv2a (NM_022030.2,1498-1516).
ccgcttcttcctagagaat

SEQ ID NO: 657409 - DNA, 19 bp, Mus musculus
  siRNA target sequence for Sv2a (NM_022030.2,1604-1622).
gtgacccacattaaaacga

SEQ ID NO: 657410 - DNA, 19 bp, Mus musculus
  siRNA target sequence for Sv2a (NM_022030.2,1606-1624).
gacccacattaaaacgatt

SEQ ID NO: 657411 - DNA, 19 bp, Mus musculus
  siRNA target sequence for Sv2a (NM_022030.2,1609-1627).
ccacattaaaacgattcat

SEQ ID NO: 657412 - DNA, 19 bp, Mus musculus
  siRNA target sequence for Sv2a (NM_022030.2,1735-1753).
ctgcttcagtccagagtat

SEQ ID NO: 657413 - DNA, 19 bp, Mus musculus
  siRNA target sequence for Sv2a (NM_022030.2,1792-1810).
catgtctttcagctactat

SEQ ID NO: 657414 - DNA, 19 bp, Mus musculus
  siRNA target sequence for Sv2a (NM_022030.2,1797-1815).
ctttcagctactatggttt

SEQ ID NO: 657415 - DNA, 19 bp, Mus musculus
  siRNA target sequence for Sv2a (NM_022030.2,1865-1883).
gcagcccgaaccaaagtgt

SEQ ID NO: 657416 - DNA, 19 bp, Mus musculus
  siRNA target sequence for Sv2a (NM_022030.2,1898-1916).
gtggagcatgtgacgttta

SEQ ID NO: 657417 - DNA, 19 bp, Mus musculus
  siRNA target sequence for Sv2a (NM_022030.2,1901-1919).
gagcatgtgacgtttaact

SEQ ID NO: 657418 - DNA, 19 bp, Mus musculus
  siRNA target sequence for Sv2a (NM_022030.2,1904-1922).
catgtgacgtttaacttca

SEQ ID NO: 657419 - DNA, 19 bp, Mus musculus
  siRNA target sequence for Sv2a (NM_022030.2,1943-1961).
cgagggggacagtacttca

SEQ ID NO: 657420 - DNA, 19 bp, Mus musculus
  siRNA target sequence for Sv2a (NM_022030.2,1944-1962).
gagggggacagtacttcaa

SEQ ID NO: 657421 - DNA, 19 bp, Mus musculus
  siRNA target sequence for Sv2a (NM_022030.2,2012-2030).
ctgtttgaggagtgttact

SEQ ID NO: 657422 - DNA, 19 bp, Mus musculus
  siRNA target sequence for Sv2a (NM_022030.2,2020-2038).
ggagtgttactttgaagat

SEQ ID NO: 657423 - DNA, 19 bp, Mus musculus
  siRNA target sequence for Sv2a (NM_022030.2,2063-2081).
cgcaactgcacgttcatca

SEQ ID NO: 657424 - DNA, 19 bp, Mus musculus
  siRNA target sequence for Sv2a (NM_022030.2,2064-2082).
gcaactgcacgttcatcaa

SEQ ID NO: 657425 - DNA, 19 bp, Mus musculus
  siRNA target sequence for Sv2a (NM_022030.2,2100-2118).
ctgacctatttgagtacaa

SEQ ID NO: 657426 - DNA, 19 bp, Mus musculus
  siRNA target sequence for Sv2a (NM_022030.2,2102-2120).
gacctatttgagtacaagt

SEQ ID NO: 657427 - DNA, 19 bp, Mus musculus
  siRNA target sequence for Sv2a (NM_022030.2,2145-2163).
gcacgttcctgcacaataa

SEQ ID NO: 657428 - DNA, 19 bp, Mus musculus
  siRNA target sequence for Sv2a (NM_022030.2,2148-2166).
cgttcctgcacaataagga

SEQ ID NO: 657429 - DNA, 19 bp, Mus musculus
  siRNA target sequence for Sv2a (NM_022030.2,2202-2220).
gtgcctacatggtgtactt

SEQ ID NO: 657430 - DNA, 19 bp, Mus musculus
  siRNA target sequence for Sv2b (NM_153579.3,167-185).
caggtatcgggacaactat

SEQ ID NO: 657431 - DNA, 19 bp, Mus musculus
  siRNA target sequence for Sv2b (NM_153579.3,169-187).
ggtatcgggacaactatga

SEQ ID NO: 657432 - DNA, 19 bp, Mus musculus
  siRNA target sequence for Sv2b (NM_153579.3,247-265).
cacagagcgatgttacaga

SEQ ID NO: 657433 - DNA, 19 bp, Mus musculus
  siRNA target sequence for Sv2b (NM_153579.3,426-444).
ctggctcaccaatatgaga

SEQ ID NO: 657434 - DNA, 19 bp, Mus musculus
  siRNA target sequence for Sv2b (NM_153579.3,434-452).
ccaatatgagaccatcatt

SEQ ID NO: 657435 - DNA, 19 bp, Mus musculus
  siRNA target sequence for Sv2b (NM_153579.3,523-541).
gagtggaaatatttgtagt

SEQ ID NO: 657436 - DNA, 19 bp, Mus musculus
  siRNA target sequence for Sv2b (NM_153579.3,583-601).
ccagttccaagaaaggaat

SEQ ID NO: 657437 - DNA, 19 bp, Mus musculus
  siRNA target sequence for Sv2b (NM_153579.3,794-812).
gggctccctgccaattgtt

SEQ ID NO: 657438 - DNA, 19 bp, Mus musculus
  siRNA target sequence for Sv2b (NM_153579.3,797-815).
ctccctgccaattgttttt

SEQ ID NO: 657439 - DNA, 19 bp, Mus musculus
  siRNA target sequence for Sv2b (NM_153579.3,830-848).
gttcttatcacgagagaaa

SEQ ID NO: 657440 - DNA, 19 bp, Mus musculus
  siRNA target sequence for Sv2b (NM_153579.3,947-965).
cttcagcatggggactaat

SEQ ID NO: 657441 - DNA, 19 bp, Mus musculus
  siRNA target sequence for Sv2b (NM_153579.3,1093-1111).
cctggatgattctcaaaca

SEQ ID NO: 657442 - DNA, 19 bp, Mus musculus
  siRNA target sequence for Sv2b (NM_153579.3,1096-1114).
ggatgattctcaaacaagt

SEQ ID NO: 657443 - DNA, 19 bp, Mus musculus
  siRNA target sequence for Sv2b (NM_153579.3,1104-1122).
ctcaaacaagtccatgata

SEQ ID NO: 657444 - DNA, 19 bp, Mus musculus
  siRNA target sequence for Sv2b (NM_153579.3,1106-1124).
caaacaagtccatgataca

SEQ ID NO: 657445 - DNA, 19 bp, Mus musculus
  siRNA target sequence for Sv2b (NM_153579.3,1163-1181).
ggtttcccacatcaaaact

SEQ ID NO: 657446 - DNA, 19 bp, Mus musculus
  siRNA target sequence for Sv2b (NM_153579.3,1248-1266).
gtcaggttcatgaccattt

SEQ ID NO: 657447 - DNA, 19 bp, Mus musculus
  siRNA target sequence for Sv2b (NM_153579.3,1346-1364).
gttcaccatggccttaagt

SEQ ID NO: 657448 - DNA, 19 bp, Mus musculus
  siRNA target sequence for Sv2b (NM_153579.3,1351-1369).
ccatggccttaagttacta

SEQ ID NO: 657449 - DNA, 19 bp, Mus musculus
  siRNA target sequence for Sv2b (NM_153579.3,1402-1420).
gctatttccaggatgaaga

SEQ ID NO: 657450 - DNA, 19 bp, Mus musculus
  siRNA target sequence for Sv2b (NM_153579.3,1461-1479).
catggcgccacgatcaact

SEQ ID NO: 657451 - DNA, 19 bp, Mus musculus
  siRNA target sequence for Sv2b (NM_153579.3,1467-1485).
gccacgatcaactttacca

SEQ ID NO: 657452 - DNA, 19 bp, Mus musculus
  siRNA target sequence for Sv2b (NM_153579.3,1515-1533).
cttgtgaacgataagttca

SEQ ID NO: 657453 - DNA, 19 bp, Mus musculus
  siRNA target sequence for Sv2b (NM_153579.3,1518-1536).
gtgaacgataagttcataa

SEQ ID NO: 657454 - DNA, 19 bp, Mus musculus
  siRNA target sequence for Sv2b (NM_153579.3,1566-1584).
gacacattctttgacaaat

SEQ ID NO: 657455 - DNA, 19 bp, Mus musculus
  siRNA target sequence for Sv2b (NM_153579.3,1570-1588).
cattctttgacaaatgcta

SEQ ID NO: 657456 - DNA, 19 bp, Mus musculus
  siRNA target sequence for Sv2b (NM_153579.3,1596-1614).
gatgtgacatccacagata

SEQ ID NO: 657457 - DNA, 19 bp, Mus musculus
  siRNA target sequence for Sv2b (NM_153579.3,1601-1619).
gacatccacagatacgtat

SEQ ID NO: 657458 - DNA, 19 bp, Mus musculus
  siRNA target sequence for Sv2b (NM_153579.3,1606-1624).
ccacagatacgtatttcaa

SEQ ID NO: 657459 - DNA, 19 bp, Mus musculus
  siRNA target sequence for Sv2b (NM_153579.3,1638-1656).
gaatcgaccaccttctaca

SEQ ID NO: 657460 - DNA, 19 bp, Mus musculus
  siRNA target sequence for Sv2b (NM_153579.3,1685-1703).
caactgtcggtttatcaat

SEQ ID NO: 657461 - DNA, 19 bp, Mus musculus
  siRNA target sequence for Sv2b (NM_153579.3,1749-1767).
gaggacaatgattttctga

SEQ ID NO: 657462 - DNA, 19 bp, Mus musculus
  siRNA target sequence for Sv2b (NM_153579.3,1800-1818).
gtcttgcctgggaacataa

SEQ ID NO: 657463 - DNA, 19 bp, Mus musculus
  siRNA target sequence for Sv2b (NM_153579.3,1802-1820).
cttgcctgggaacataatt

SEQ ID NO: 657464 - DNA, 19 bp, Mus musculus
  siRNA target sequence for Sv2b (NM_153579.3,1826-1844).
cctgctcatggacagaatt

SEQ ID NO: 657465 - DNA, 19 bp, Mus musculus
  siRNA target sequence for Sv2b (NM_153579.3,1830-1848).
ctcatggacagaattggaa

SEQ ID NO: 657466 - DNA, 19 bp, Mus musculus
  siRNA target sequence for Sv2b (NM_153579.3,2045-2063).
caacggactgtgcaagttt

SEQ ID NO: 657467 - DNA, 19 bp, Mus musculus
  siRNA target sequence for Sv2b (NM_153579.3,2095-2113).
cttttgttgggataaccaa

SEQ ID NO: 657468 - DNA, 19 bp, Mus musculus
  siRNA target sequence for Sv2b (NM_153579.3,2158-2176).
gcctgattgcccttcgatt

SEQ ID NO: 657469 - DNA, 19 bp, Mus musculus
  siRNA target sequence for Synpr (NM_028052.2,238-256).
gcacctttcgggcattgaa

SEQ ID NO: 657470 - DNA, 19 bp, Mus musculus
  siRNA target sequence for Synpr (NM_028052.2,276-294).
cgagctctggagttgcttt

SEQ ID NO: 657471 - DNA, 19 bp, Mus musculus
  siRNA target sequence for Synpr (NM_028052.2,277-295).
gagctctggagttgctttt

SEQ ID NO: 657472 - DNA, 19 bp, Mus musculus
  siRNA target sequence for Synpr (NM_028052.2,419-437).
gcaacaggtgacctttgaa

SEQ ID NO: 657473 - DNA, 19 bp, Mus musculus
  siRNA target sequence for Synpr (NM_028052.2,552-570).
gccacggtcgtgtacattt

SEQ ID NO: 657474 - DNA, 19 bp, Mus musculus
  siRNA target sequence for Synpr (NM_028052.2,553-571).
ccacggtcgtgtacatttt

SEQ ID NO: 657475 - DNA, 19 bp, Mus musculus
  siRNA target sequence for Synpr (NM_028052.2,556-574).
cggtcgtgtacattttctt

SEQ ID NO: 657476 - DNA, 19 bp, Mus musculus
  siRNA target sequence for Synpr (NM_028052.2,607-625).
cactcattgactttatcgt

SEQ ID NO: 657477 - DNA, 19 bp, Mus musculus
  siRNA target sequence for Synpr (NM_028052.2,777-795).
cctgtcatgtccagcttaa

SEQ ID NO: 657478 - DNA, 19 bp, Mus musculus
  siRNA target sequence for Synpr (NM_028052.2,780-798).
gtcatgtccagcttaaaca

SEQ ID NO: 657479 - DNA, 19 bp, Mus musculus
  siRNA target sequence for Synpr (NM_028052.2,804-822).
gtggtcttcgggtttttga

SEQ ID NO: 657480 - DNA, 19 bp, Mus musculus
  siRNA target sequence for Synpr (NM_028052.2,809-827).
cttcgggtttttgaatttt

SEQ ID NO: 657481 - DNA, 19 bp, Mus musculus
  siRNA target sequence for Synpr (NM_028052.2,881-899).
ctctggacagagatacctt

SEQ ID NO: 657482 - DNA, 19 bp, Mus musculus
  siRNA target sequence for Synpr (NM_028052.2,1000-1018).
ggccaacttccgatgagtt

SEQ ID NO: 657483 - DNA, 19 bp, Mus musculus
  siRNA target sequence for Synpr (NM_028052.2,1001-1019).
gccaacttccgatgagttt

SEQ ID NO: 657484 - DNA, 19 bp, Mus musculus
  siRNA target sequence for Synpr (NM_028052.2,1039-1057).
ccacttcctttaacaatca

SEQ ID NO: 657485 - DNA, 19 bp, Mus musculus
  siRNA target sequence for Sypl (NM_013635.2,194-212).
ctaaagttggtgtcaataa

SEQ ID NO: 657486 - DNA, 19 bp, Mus musculus
  siRNA target sequence for Sypl (NM_013635.2,456-474).
gatcgactttattgttact

SEQ ID NO: 657487 - DNA, 19 bp, Mus musculus
  siRNA target sequence for Sypl (NM_013635.2,459-477).
cgactttattgttactctt

SEQ ID NO: 657488 - DNA, 19 bp, Mus musculus
  siRNA target sequence for Sypl (NM_013635.2,593-611).
caggagtgtcatgttactt

SEQ ID NO: 657489 - DNA, 19 bp, Mus musculus
  siRNA target sequence for Sypl (NM_013635.2,717-735).
cttacacagtccgtcaaat

SEQ ID NO: 657490 - DNA, 19 bp, Mus musculus
  siRNA target sequence for Sypl (NM_013635.2,721-739).
cacagtccgtcaaatacgt

SEQ ID NO: 657491 - DNA, 19 bp, Mus musculus
  siRNA target sequence for Syt1 (NM_009306.2,352-370).
ctgaagcagaagtttatga

SEQ ID NO: 657492 - DNA, 19 bp, Mus musculus
  siRNA target sequence for Syt1 (NM_009306.2,354-372).
gaagcagaagtttatgaat

SEQ ID NO: 657493 - DNA, 19 bp, Mus musculus
  siRNA target sequence for Syt1 (NM_009306.2,464-482).
gtaagaaatgtttgttcaa

SEQ ID NO: 657494 - DNA, 19 bp, Mus musculus
  siRNA target sequence for Syt1 (NM_009306.2,537-555).
gaaagacgtgaaagactta

SEQ ID NO: 657495 - DNA, 19 bp, Mus musculus
  siRNA target sequence for Syt1 (NM_009306.2,656-674).
gaaagcttcaatattcact

SEQ ID NO: 657496 - DNA, 19 bp, Mus musculus
  siRNA target sequence for Syt1 (NM_009306.2,787-805).
cccgacaaaaagaagaagt

SEQ ID NO: 657497 - DNA, 19 bp, Mus musculus
  siRNA target sequence for Syt1 (NM_009306.2,830-848).
ccctcaatccagtcttcaa

SEQ ID NO: 657498 - DNA, 19 bp, Mus musculus
  siRNA target sequence for Syt1 (NM_009306.2,831-849).
cctcaatccagtcttcaat

SEQ ID NO: 657499 - DNA, 19 bp, Mus musculus
  siRNA target sequence for Syt1 (NM_009306.2,834-852).
caatccagtcttcaatgaa

SEQ ID NO: 657500 - DNA, 19 bp, Mus musculus
  siRNA target sequence for Syt1 (NM_009306.2,867-885).
ggtgccatactcggaatta

SEQ ID NO: 657501 - DNA, 19 bp, Mus musculus
  siRNA target sequence for Syt1 (NM_009306.2,1088-1106).
gcaagctgactgttgtcat

SEQ ID NO: 657502 - DNA, 19 bp, Mus musculus
  siRNA target sequence for Syt1 (NM_009306.2,1089-1107).
caagctgactgttgtcatt

SEQ ID NO: 657503 - DNA, 19 bp, Mus musculus
  siRNA target sequence for Syt1 (NM_009306.2,1146-1164).
cttatctgatccctatgta

SEQ ID NO: 657504 - DNA, 19 bp, Mus musculus
  siRNA target sequence for Syt1 (NM_009306.2,1343-1361).
ccatcggcaaagtctttgt

SEQ ID NO: 657505 - DNA, 19 bp, Mus musculus
  siRNA target sequence for Syt10 (NM_018803.1,96-114).
caagtgttcgggcatcttt

SEQ ID NO: 657506 - DNA, 19 bp, Mus musculus
  siRNA target sequence for Syt10 (NM_018803.1,143-161).
gtggcacagatatttcagt

SEQ ID NO: 657507 - DNA, 19 bp, Mus musculus
  siRNA target sequence for Syt10 (NM_018803.1,164-182).
gcctgttagcggttgttgt

SEQ ID NO: 657508 - DNA, 19 bp, Mus musculus
  siRNA target sequence for Syt10 (NM_018803.1,165-183).
cctgttagcggttgttgta

SEQ ID NO: 657509 - DNA, 19 bp, Mus musculus
  siRNA target sequence for Syt10 (NM_018803.1,166-184).
ctgttagcggttgttgtaa

SEQ ID NO: 657510 - DNA, 19 bp, Mus musculus
  siRNA target sequence for Syt10 (NM_018803.1,204-222).
gctggttgtctcccttttt

SEQ ID NO: 657511 - DNA, 19 bp, Mus musculus
  siRNA target sequence for Syt10 (NM_018803.1,286-304).
cttccacaaagcatctcaa

SEQ ID NO: 657512 - DNA, 19 bp, Mus musculus
  siRNA target sequence for Syt10 (NM_018803.1,300-318).
ctcaagtgctccaactgaa

SEQ ID NO: 657513 - DNA, 19 bp, Mus musculus
  siRNA target sequence for Syt10 (NM_018803.1,310-328).
ccaactgaagtttttgaga

SEQ ID NO: 657514 - DNA, 19 bp, Mus musculus
  siRNA target sequence for Syt10 (NM_018803.1,376-394).
gccattgagcctgcaataa

SEQ ID NO: 657515 - DNA, 19 bp, Mus musculus
  siRNA target sequence for Syt10 (NM_018803.1,377-395).
ccattgagcctgcaataaa

SEQ ID NO: 657516 - DNA, 19 bp, Mus musculus
  siRNA target sequence for Syt10 (NM_018803.1,427-445).
gaagtgcagacagctttaa

SEQ ID NO: 657517 - DNA, 19 bp, Mus musculus
  siRNA target sequence for Syt10 (NM_018803.1,440-458).
ctttaaaggagcacttgat

SEQ ID NO: 657518 - DNA, 19 bp, Mus musculus
  siRNA target sequence for Syt10 (NM_018803.1,469-487).
cgagtgcaaaggcaaacaa

SEQ ID NO: 657519 - DNA, 19 bp, Mus musculus
  siRNA target sequence for Syt10 (NM_018803.1,529-547).
cacctaccaaggcaaatga

SEQ ID NO: 657520 - DNA, 19 bp, Mus musculus
  siRNA target sequence for Syt10 (NM_018803.1,535-553).
ccaaggcaaatgaatgtct

SEQ ID NO: 657521 - DNA, 19 bp, Mus musculus
  siRNA target sequence for Syt10 (NM_018803.1,550-568).
gtctccagcgtcgacttta

SEQ ID NO: 657522 - DNA, 19 bp, Mus musculus
  siRNA target sequence for Syt10 (NM_018803.1,576-594).
cactgaacccatcttacaa

SEQ ID NO: 657523 - DNA, 19 bp, Mus musculus
  siRNA target sequence for Syt10 (NM_018803.1,611-629).
cgagcatcgggaggataaa

SEQ ID NO: 657524 - DNA, 19 bp, Mus musculus
  siRNA target sequence for Syt10 (NM_018803.1,612-630).
gagcatcgggaggataaaa

SEQ ID NO: 657525 - DNA, 19 bp, Mus musculus
  siRNA target sequence for Syt10 (NM_018803.1,658-676).
gactccgagggcaacagaa

SEQ ID NO: 657526 - DNA, 19 bp, Mus musculus
  siRNA target sequence for Syt10 (NM_018803.1,708-726).
ctttgcgctccagtatgat

SEQ ID NO: 657527 - DNA, 19 bp, Mus musculus
  siRNA target sequence for Syt10 (NM_018803.1,736-754).
gaactcctagttgttaaaa

SEQ ID NO: 657528 - DNA, 19 bp, Mus musculus
  siRNA target sequence for Syt10 (NM_018803.1,739-757).
ctcctagttgttaaaatta

SEQ ID NO: 657529 - DNA, 19 bp, Mus musculus
  siRNA target sequence for Syt10 (NM_018803.1,748-766).
gttaaaattatcaaagctt

SEQ ID NO: 657530 - DNA, 19 bp, Mus musculus
  siRNA target sequence for Syt10 (NM_018803.1,769-787).
gatctcccagctaaagatt

SEQ ID NO: 657531 - DNA, 19 bp, Mus musculus
  siRNA target sequence for Syt10 (NM_018803.1,772-790).
ctcccagctaaagatttca

SEQ ID NO: 657532 - DNA, 19 bp, Mus musculus
  siRNA target sequence for Syt10 (NM_018803.1,856-874).
cgcgtgcaccggaagactt

SEQ ID NO: 657533 - DNA, 19 bp, Mus musculus
  siRNA target sequence for Syt10 (NM_018803.1,1042-1060).
gccacagtatggaaagata

SEQ ID NO: 657534 - DNA, 19 bp, Mus musculus
  siRNA target sequence for Syt10 (NM_018803.1,1043-1061).
ccacagtatggaaagatat

SEQ ID NO: 657535 - DNA, 19 bp, Mus musculus
  siRNA target sequence for Syt10 (NM_018803.1,1046-1064).
cagtatggaaagatatcca

SEQ ID NO: 657536 - DNA, 19 bp, Mus musculus
  siRNA target sequence for Syt10 (NM_018803.1,1063-1081).
cactgtgctaccacagaaa

SEQ ID NO: 657537 - DNA, 19 bp, Mus musculus
  siRNA target sequence for Syt10 (NM_018803.1,1182-1200).
catcactgggtcatcagat

SEQ ID NO: 657538 - DNA, 19 bp, Mus musculus
  siRNA target sequence for Syt10 (NM_018803.1,1224-1242).
gtgtgagggccgaagactt

SEQ ID NO: 657539 - DNA, 19 bp, Mus musculus
  siRNA target sequence for Syt10 (NM_018803.1,1226-1244).
gtgagggccgaagacttaa

SEQ ID NO: 657540 - DNA, 19 bp, Mus musculus
  siRNA target sequence for Syt10 (NM_018803.1,1228-1246).
gagggccgaagacttaaaa

SEQ ID NO: 657541 - DNA, 19 bp, Mus musculus
  siRNA target sequence for Syt10 (NM_018803.1,1230-1248).
gggccgaagacttaaaaaa

SEQ ID NO: 657542 - DNA, 19 bp, Mus musculus
  siRNA target sequence for Syt10 (NM_018803.1,1249-1267).
cggaaaacaactacaaaga

SEQ ID NO: 657543 - DNA, 19 bp, Mus musculus
  siRNA target sequence for Syt10 (NM_018803.1,1274-1292).
ctctcaatcccgtgtacaa

SEQ ID NO: 657544 - DNA, 19 bp, Mus musculus
  siRNA target sequence for Syt10 (NM_018803.1,1294-1312).
gaagccattatcttcgata

SEQ ID NO: 657545 - DNA, 19 bp, Mus musculus
  siRNA target sequence for Syt10 (NM_018803.1,1346-1364).
gcattgcagtcatggatta

SEQ ID NO: 657546 - DNA, 19 bp, Mus musculus
  siRNA target sequence for Syt10 (NM_018803.1,1515-1533).
caccagctttgatagtcaa

SEQ ID NO: 657547 - DNA, 19 bp, Mus musculus
  siRNA target sequence for Syt12 (NM_134164.2,242-260).
ggacgtgacagaatatcat

SEQ ID NO: 657548 - DNA, 19 bp, Mus musculus
  siRNA target sequence for Syt12 (NM_134164.2,258-276).
catctgagcgtcatcaaga

SEQ ID NO: 657549 - DNA, 19 bp, Mus musculus
  siRNA target sequence for Syt12 (NM_134164.2,388-406).
ccccgttccctaattacga

SEQ ID NO: 657550 - DNA, 19 bp, Mus musculus
  siRNA target sequence for Syt12 (NM_134164.2,461-479).
gcgggtccctccttggaat

SEQ ID NO: 657551 - DNA, 19 bp, Mus musculus
  siRNA target sequence for Syt12 (NM_134164.2,594-612).
gacttagccccctatggta

SEQ ID NO: 657552 - DNA, 19 bp, Mus musculus
  siRNA target sequence for Syt12 (NM_134164.2,629-647).
gtcggctgactctctgaat

SEQ ID NO: 657553 - DNA, 19 bp, Mus musculus
  siRNA target sequence for Syt12 (NM_134164.2,704-722).
ggtgagcatggactatgat

SEQ ID NO: 657554 - DNA, 19 bp, Mus musculus
  siRNA target sequence for Syt12 (NM_134164.2,737-755).
cctccacgtggcagtacta

SEQ ID NO: 657555 - DNA, 19 bp, Mus musculus
  siRNA target sequence for Syt12 (NM_134164.2,740-758).
ccacgtggcagtactacaa

SEQ ID NO: 657556 - DNA, 19 bp, Mus musculus
  siRNA target sequence for Syt12 (NM_134164.2,927-945).
gagaagagccttagatttt

SEQ ID NO: 657557 - DNA, 19 bp, Mus musculus
  siRNA target sequence for Syt12 (NM_134164.2,963-981).
gaggatgagcggaatgtga

SEQ ID NO: 657558 - DNA, 19 bp, Mus musculus
  siRNA target sequence for Syt12 (NM_134164.2,1416-1434).
ggcatgggcaccacacatt

SEQ ID NO: 657559 - DNA, 19 bp, Mus musculus
  siRNA target sequence for Syt13 (NM_030725.2,304-322).
ccccgacctctccttaagt

SEQ ID NO: 657560 - DNA, 19 bp, Mus musculus
  siRNA target sequence for Syt13 (NM_030725.2,305-323).
cccgacctctccttaagtt

SEQ ID NO: 657561 - DNA, 19 bp, Mus musculus
  siRNA target sequence for Syt13 (NM_030725.2,594-612).
ccagaagaaggctgagtta

SEQ ID NO: 657562 - DNA, 19 bp, Mus musculus
  siRNA target sequence for Syt13 (NM_030725.2,1148-1166).
ccgtgtggaacgagatgat

SEQ ID NO: 657563 - DNA, 19 bp, Mus musculus
  siRNA target sequence for Syt13 (NM_030725.2,1154-1172).
ggaacgagatgatcatgtt

SEQ ID NO: 657564 - DNA, 19 bp, Mus musculus
  siRNA target sequence for Syt14l (NM_172804.1,1610-1628).
gcttttggagcctatctca

SEQ ID NO: 657565 - DNA, 19 bp, Mus musculus
  siRNA target sequence for Syt14l (NM_172804.1,1636-1654).
gtgacctcgatgtcatctt

SEQ ID NO: 657566 - DNA, 19 bp, Mus musculus
  siRNA target sequence for Syt14l (NM_172804.1,1725-1743).
cgaagtggtgtcaactctt

SEQ ID NO: 657567 - DNA, 19 bp, Mus musculus
  siRNA target sequence for Syt14l (NM_172804.1,1781-1799).
gaggggtaagacgaacata

SEQ ID NO: 657568 - DNA, 19 bp, Mus musculus
  siRNA target sequence for Syt14l (NM_172804.1,1785-1803).
ggtaagacgaacatacaga

SEQ ID NO: 657569 - DNA, 19 bp, Mus musculus
  siRNA target sequence for Syt14l (NM_172804.1,1995-2013).
gagccaagaagtaatctga

SEQ ID NO: 657570 - DNA, 19 bp, Mus musculus
  siRNA target sequence for Syt14l (NM_172804.1,2111-2129).
ggtgggactgtcctacaat

SEQ ID NO: 657571 - DNA, 19 bp, Mus musculus
  siRNA target sequence for Syt14l (NM_172804.1,2130-2148).
gccacaacagggcgattat

SEQ ID NO: 657572 - DNA, 19 bp, Mus musculus
  siRNA target sequence for Syt14l (NM_172804.1,2132-2150).
cacaacagggcgattatct

SEQ ID NO: 657573 - DNA, 19 bp, Mus musculus
  siRNA target sequence for Syt14l (NM_172804.1,2134-2152).
caacagggcgattatctgt

SEQ ID NO: 657574 - DNA, 19 bp, Mus musculus
  siRNA target sequence for Syt14l (NM_172804.1,2142-2160).
cgattatctgtggaaatga

SEQ ID NO: 657575 - DNA, 19 bp, Mus musculus
  siRNA target sequence for Syt14l (NM_172804.1,2195-2213).
ccgagctcctgacacatat

SEQ ID NO: 657576 - DNA, 19 bp, Mus musculus
  siRNA target sequence for Syt14l (NM_172804.1,2205-2223).
gacacatatggaaaactct

SEQ ID NO: 657577 - DNA, 19 bp, Mus musculus
  siRNA target sequence for Syt14l (NM_172804.1,2346-2364).
gtcaccttgatgatttcca

SEQ ID NO: 657578 - DNA, 19 bp, Mus musculus
  siRNA target sequence for Syt14l (NM_172804.1,2377-2395).
gcactatgaagcgtaaaga

SEQ ID NO: 657579 - DNA, 19 bp, Mus musculus
  siRNA target sequence for Syt15 (NM_176931.1,21-39).
cctgataggaggcatcatt

SEQ ID NO: 657580 - DNA, 19 bp, Mus musculus
  siRNA target sequence for Syt15 (NM_176931.1,166-184).
gacaggctctaccagtatt

SEQ ID NO: 657581 - DNA, 19 bp, Mus musculus
  siRNA target sequence for Syt15 (NM_176931.1,168-186).
caggctctaccagtattct

SEQ ID NO: 657582 - DNA, 19 bp, Mus musculus
  siRNA target sequence for Syt15 (NM_176931.1,683-701).
ccgtgtaccatgtaaacaa

SEQ ID NO: 657583 - DNA, 19 bp, Mus musculus
  siRNA target sequence for Syt15 (NM_176931.1,685-703).
gtgtaccatgtaaacaaga

SEQ ID NO: 657584 - DNA, 19 bp, Mus musculus
  siRNA target sequence for Syt15 (NM_176931.1,730-748).
gtgctattcccattgaaga

SEQ ID NO: 657585 - DNA, 19 bp, Mus musculus
  siRNA target sequence for Syt15 (NM_176931.1,764-782).
gggaccaccaccgtatcat

SEQ ID NO: 657586 - DNA, 19 bp, Mus musculus
  siRNA target sequence for Syt15 (NM_176931.1,821-839).
cggagtttggtgatatcca

SEQ ID NO: 657587 - DNA, 19 bp, Mus musculus
  siRNA target sequence for Syt15 (NM_176931.1,1010-1028).
ccgtcaaccctgtgtacaa

SEQ ID NO: 657588 - DNA, 19 bp, Mus musculus
  siRNA target sequence for Syt15 (NM_176931.1,1011-1029).
cgtcaaccctgtgtacaat

SEQ ID NO: 657589 - DNA, 19 bp, Mus musculus
  siRNA target sequence for Syt15 (NM_176931.1,1100-1118).
ccacagaagggaacagtaa

SEQ ID NO: 657590 - DNA, 19 bp, Mus musculus
  siRNA target sequence for Syt15 (NM_176931.1,1150-1168).
gttggggccactcaattgt

SEQ ID NO: 657591 - DNA, 19 bp, Mus musculus
  siRNA target sequence for Syt2 (NM_009307.2,813-831).
gcaaattgcagttttctct

SEQ ID NO: 657592 - DNA, 19 bp, Mus musculus
  siRNA target sequence for Syt2 (NM_009307.2,988-1006).
gctgaacccagccttcaat

SEQ ID NO: 657593 - DNA, 19 bp, Mus musculus
  siRNA target sequence for Syt2 (NM_009307.2,1053-1071).
ccctggtgatggcaatcta

SEQ ID NO: 657594 - DNA, 19 bp, Mus musculus
  siRNA target sequence for Syt2 (NM_009307.2,1245-1263).
ggaagctcaccgtctgtat

SEQ ID NO: 657595 - DNA, 19 bp, Mus musculus
  siRNA target sequence for Syt3 (NM_016663.2,309-327).
gggtccggatgcagatatt

SEQ ID NO: 657596 - DNA, 19 bp, Mus musculus
  siRNA target sequence for Syt3 (NM_016663.2,310-328).
ggtccggatgcagatattt

SEQ ID NO: 657597 - DNA, 19 bp, Mus musculus
  siRNA target sequence for Syt3 (NM_016663.2,660-678).
ggacatggactcatatcca

SEQ ID NO: 657598 - DNA, 19 bp, Mus musculus
  siRNA target sequence for Syt3 (NM_016663.2,699-717).
ggtagctgctggagtcaaa

SEQ ID NO: 657599 - DNA, 19 bp, Mus musculus
  siRNA target sequence for Syt3 (NM_016663.2,948-966).
gccgggtggagaggaaaaa

SEQ ID NO: 657600 - DNA, 19 bp, Mus musculus
  siRNA target sequence for Syt3 (NM_016663.2,972-990).
gctcatcggtcagatcaaa

SEQ ID NO: 657601 - DNA, 19 bp, Mus musculus
  siRNA target sequence for Syt3 (NM_016663.2,1059-1077).
ctgtggccgcatcagtttt

SEQ ID NO: 657602 - DNA, 19 bp, Mus musculus
  siRNA target sequence for Syt3 (NM_016663.2,1195-1213).
cctgatcgcaaaaagaagt

SEQ ID NO: 657603 - DNA, 19 bp, Mus musculus
  siRNA target sequence for Syt3 (NM_016663.2,1309-1327).
cacttcagcgtctatgact

SEQ ID NO: 657604 - DNA, 19 bp, Mus musculus
  siRNA target sequence for Syt3 (NM_016663.2,1334-1352).
gcttctcgcggcatgatct

SEQ ID NO: 657605 - DNA, 19 bp, Mus musculus
  siRNA target sequence for Syt3 (NM_016663.2,1338-1356).
ctcgcggcatgatctcatt

SEQ ID NO: 657606 - DNA, 19 bp, Mus musculus
  siRNA target sequence for Syt3 (NM_016663.2,1526-1544).
cctctaacctcaaagcaat

SEQ ID NO: 657607 - DNA, 19 bp, Mus musculus
  siRNA target sequence for Syt3 (NM_016663.2,1896-1914).
gggtggcaaaggattgtca

SEQ ID NO: 657608 - DNA, 19 bp, Mus musculus
  siRNA target sequence for Syt6 (NM_018800.1,178-196).
ctcctcgccgtggtagtta

SEQ ID NO: 657609 - DNA, 19 bp, Mus musculus
  siRNA target sequence for Syt6 (NM_018800.1,180-198).
cctcgccgtggtagttatt

SEQ ID NO: 657610 - DNA, 19 bp, Mus musculus
  siRNA target sequence for Syt6 (NM_018800.1,184-202).
gccgtggtagttattgtgt

SEQ ID NO: 657611 - DNA, 19 bp, Mus musculus
  siRNA target sequence for Syt6 (NM_018800.1,597-615).
cgagcagcccaccagtatt

SEQ ID NO: 657612 - DNA, 19 bp, Mus musculus
  siRNA target sequence for Syt6 (NM_018800.1,608-626).
ccagtattggccgtatcaa

SEQ ID NO: 657613 - DNA, 19 bp, Mus musculus
  siRNA target sequence for Syt6 (NM_018800.1,620-638).
gtatcaagcctgagcttta

SEQ ID NO: 657614 - DNA, 19 bp, Mus musculus
  siRNA target sequence for Syt6 (NM_018800.1,708-726).
cagcctccgctatgactat

SEQ ID NO: 657615 - DNA, 19 bp, Mus musculus
  siRNA target sequence for Syt6 (NM_018800.1,710-728).
gcctccgctatgactatga

SEQ ID NO: 657616 - DNA, 19 bp, Mus musculus
  siRNA target sequence for Syt6 (NM_018800.1,780-798).
ggacttttgcggaagttct

SEQ ID NO: 657617 - DNA, 19 bp, Mus musculus
  siRNA target sequence for Syt6 (NM_018800.1,794-812).
gttctgacccttatgttaa

SEQ ID NO: 657618 - DNA, 19 bp, Mus musculus
  siRNA target sequence for Syt6 (NM_018800.1,996-1014).
catcctggacaatctcttt

SEQ ID NO: 657619 - DNA, 19 bp, Mus musculus
  siRNA target sequence for Syt6 (NM_018800.1,1056-1074).
catccagtacgctactagt

SEQ ID NO: 657620 - DNA, 19 bp, Mus musculus
  siRNA target sequence for Syt6 (NM_018800.1,1059-1077).
ccagtacgctactagtgaa

SEQ ID NO: 657621 - DNA, 19 bp, Mus musculus
  siRNA target sequence for Syt6 (NM_018800.1,1060-1078).
cagtacgctactagtgaaa

SEQ ID NO: 657622 - DNA, 19 bp, Mus musculus
  siRNA target sequence for Syt6 (NM_018800.1,1062-1080).
gtacgctactagtgaaagt

SEQ ID NO: 657623 - DNA, 19 bp, Mus musculus
  siRNA target sequence for Syt6 (NM_018800.1,1084-1102).
gacttgggagagatcatgt

SEQ ID NO: 657624 - DNA, 19 bp, Mus musculus
  siRNA target sequence for Syt6 (NM_018800.1,1152-1170).
caagtgtcgaaatctcaaa

SEQ ID NO: 657625 - DNA, 19 bp, Mus musculus
  siRNA target sequence for Syt6 (NM_018800.1,1225-1243).
gatggacggaggctgaaaa

SEQ ID NO: 657626 - DNA, 19 bp, Mus musculus
  siRNA target sequence for Syt6 (NM_018800.1,1228-1246).
ggacggaggctgaaaaaga

SEQ ID NO: 657627 - DNA, 19 bp, Mus musculus
  siRNA target sequence for Syt6 (NM_018800.1,1395-1413).
ctgtagagtggggatcaat

SEQ ID NO: 657628 - DNA, 19 bp, Mus musculus
  siRNA target sequence for Syt7 (NM_018801.1,55-73).
ctggtctctgcaatcatca

SEQ ID NO: 657629 - DNA, 19 bp, Mus musculus
  siRNA target sequence for Syt7 (NM_018801.1,135-153).
gggcaaacgctacaagaat

SEQ ID NO: 657630 - DNA, 19 bp, Mus musculus
  siRNA target sequence for Syt7 (NM_018801.1,136-154).
ggcaaacgctacaagaatt

SEQ ID NO: 657631 - DNA, 19 bp, Mus musculus
  siRNA target sequence for Syt7 (NM_018801.1,570-588).
ggtgaagcggaagaatcta

SEQ ID NO: 657632 - DNA, 19 bp, Mus musculus
  siRNA target sequence for Syt7 (NM_018801.1,571-589).
gtgaagcggaagaatctaa

SEQ ID NO: 657633 - DNA, 19 bp, Mus musculus
  siRNA target sequence for Syt7 (NM_018801.1,599-617).
ggaatgagacctttctatt

SEQ ID NO: 657634 - DNA, 19 bp, Mus musculus
  siRNA target sequence for Syt7 (NM_018801.1,623-641).
ggtttccctacgagaaagt

SEQ ID NO: 657635 - DNA, 19 bp, Mus musculus
  siRNA target sequence for Syt7 (NM_018801.1,755-773).
ccttctggaaggatctgaa

SEQ ID NO: 657636 - DNA, 19 bp, Mus musculus
  siRNA target sequence for Syt7 (NM_018801.1,1042-1060).
gagaccacgatcatcatca

SEQ ID NO: 657637 - DNA, 19 bp, Mus musculus
  siRNA target sequence for Syt7 (NM_018801.1,1093-1111).
gacgtcatcggcaagatct

SEQ ID NO: 657638 - DNA, 19 bp, Mus musculus
  siRNA target sequence for Syt7 (NM_018801.1,1127-1145).
gcggaccaggtgaagtgaa

SEQ ID NO: 657639 - DNA, 19 bp, Mus musculus
  siRNA target sequence for Syt7 (NM_018801.1,1132-1150).
ccaggtgaagtgaaacact

SEQ ID NO: 657640 - DNA, 19 bp, Mus musculus
  siRNA target sequence for Syt8 (NM_018802.2,254-272).
cacctctgccccacttgat

SEQ ID NO: 657641 - DNA, 19 bp, Mus musculus
  siRNA target sequence for Syt8 (NM_018802.2,342-360).
cctcgctggaccctcttta

SEQ ID NO: 657642 - DNA, 19 bp, Mus musculus
  siRNA target sequence for Syt8 (NM_018802.2,373-391).
ctgctggagtcctcttagt

SEQ ID NO: 657643 - DNA, 19 bp, Mus musculus
  siRNA target sequence for Syt8 (NM_018802.2,442-460).
ggaagcaacccaaggataa

SEQ ID NO: 657644 - DNA, 19 bp, Mus musculus
  siRNA target sequence for Syt8 (NM_018802.2,474-492).
ctgggcagtgcccgtaata

SEQ ID NO: 657645 - DNA, 19 bp, Mus musculus
  siRNA target sequence for Syt8 (NM_018802.2,477-495).
ggcagtgcccgtaatagca

SEQ ID NO: 657646 - DNA, 19 bp, Mus musculus
  siRNA target sequence for Syt8 (NM_018802.2,575-593).
gctgtcactagagtatgat

SEQ ID NO: 657647 - DNA, 19 bp, Mus musculus
  siRNA target sequence for Syt8 (NM_018802.2,576-594).
ctgtcactagagtatgatt

SEQ ID NO: 657648 - DNA, 19 bp, Mus musculus
  siRNA target sequence for Syt8 (NM_018802.2,728-746).
gacgctctctcccatgttt

SEQ ID NO: 657649 - DNA, 19 bp, Mus musculus
  siRNA target sequence for Syt8 (NM_018802.2,815-833).
ggacttcaagcggttttca

SEQ ID NO: 657650 - DNA, 19 bp, Mus musculus
  siRNA target sequence for Syt8 (NM_018802.2,818-836).
cttcaagcggttttcagaa

SEQ ID NO: 657651 - DNA, 19 bp, Mus musculus
  siRNA target sequence for Syt8 (NM_018802.2,871-889).
gcaccgtggaccttcaaca

SEQ ID NO: 657652 - DNA, 19 bp, Mus musculus
  siRNA target sequence for Syt8 (NM_018802.2,872-890).
caccgtggaccttcaacat

SEQ ID NO: 657653 - DNA, 19 bp, Mus musculus
  siRNA target sequence for Syt8 (NM_018802.2,874-892).
ccgtggaccttcaacatgt

SEQ ID NO: 657654 - DNA, 19 bp, Mus musculus
  siRNA target sequence for Syt8 (NM_018802.2,1039-1057).
cagaggcctacgtgaagat

SEQ ID NO: 657655 - DNA, 19 bp, Mus musculus
  siRNA target sequence for Syt8 (NM_018802.2,1050-1068).
gtgaagatccagcttatgt

SEQ ID NO: 657656 - DNA, 19 bp, Mus musculus
  siRNA target sequence for Syt8 (NM_018802.2,1052-1070).
gaagatccagcttatgtta

SEQ ID NO: 657657 - DNA, 19 bp, Mus musculus
  siRNA target sequence for Syt8 (NM_018802.2,1117-1135).
cgactaccccctacttcaa

SEQ ID NO: 657658 - DNA, 19 bp, Mus musculus
  siRNA target sequence for Tm9sf1 (NM_028780.2,485-503).
gtttgccagtcctgatact

SEQ ID NO: 657659 - DNA, 19 bp, Mus musculus
  siRNA target sequence for Tm9sf1 (NM_028780.2,560-578).
gcgaccctgtcattctata

SEQ ID NO: 657660 - DNA, 19 bp, Mus musculus
  siRNA target sequence for Tm9sf1 (NM_028780.2,561-579).
cgaccctgtcattctatat

SEQ ID NO: 657661 - DNA, 19 bp, Mus musculus
  siRNA target sequence for Tm9sf1 (NM_028780.2,612-630).
ggaaacttaccactactat

SEQ ID NO: 657662 - DNA, 19 bp, Mus musculus
  siRNA target sequence for Tm9sf1 (NM_028780.2,657-675).
gatccgccacaaaagtctt

SEQ ID NO: 657663 - DNA, 19 bp, Mus musculus
  siRNA target sequence for Tm9sf1 (NM_028780.2,660-678).
ccgccacaaaagtcttagt

SEQ ID NO: 657664 - DNA, 19 bp, Mus musculus
  siRNA target sequence for Tm9sf1 (NM_028780.2,661-679).
cgccacaaaagtcttagtt

SEQ ID NO: 657665 - DNA, 19 bp, Mus musculus
  siRNA target sequence for Tm9sf1 (NM_028780.2,662-680).
gccacaaaagtcttagttt

SEQ ID NO: 657666 - DNA, 19 bp, Mus musculus
  siRNA target sequence for Tm9sf1 (NM_028780.2,700-718).
gaccgaatggccgaatctt

SEQ ID NO: 657667 - DNA, 19 bp, Mus musculus
  siRNA target sequence for Tm9sf1 (NM_028780.2,703-721).
cgaatggccgaatctttgt

SEQ ID NO: 657668 - DNA, 19 bp, Mus musculus
  siRNA target sequence for Tm9sf1 (NM_028780.2,704-722).
gaatggccgaatctttgta

SEQ ID NO: 657669 - DNA, 19 bp, Mus musculus
  siRNA target sequence for Tm9sf1 (NM_028780.2,897-915).
gccacatagccacaagata

SEQ ID NO: 657670 - DNA, 19 bp, Mus musculus
  siRNA target sequence for Tm9sf1 (NM_028780.2,951-969).
ccatggagatcgaattata

SEQ ID NO: 657671 - DNA, 19 bp, Mus musculus
  siRNA target sequence for Tm9sf1 (NM_028780.2,1015-1033).
gggctgcggtctgatgaat

SEQ ID NO: 657672 - DNA, 19 bp, Mus musculus
  siRNA target sequence for Tm9sf1 (NM_028780.2,1016-1034).
ggctgcggtctgatgaatt

SEQ ID NO: 657673 - DNA, 19 bp, Mus musculus
  siRNA target sequence for Tm9sf1 (NM_028780.2,1130-1148).
ctcgaaccctggaaatcca

SEQ ID NO: 657674 - DNA, 19 bp, Mus musculus
  siRNA target sequence for Tm9sf1 (NM_028780.2,1132-1150).
cgaaccctggaaatccatt

SEQ ID NO: 657675 - DNA, 19 bp, Mus musculus
  siRNA target sequence for Tm9sf1 (NM_028780.2,1147-1165).
cattggttgtccatcatca

SEQ ID NO: 657676 - DNA, 19 bp, Mus musculus
  siRNA target sequence for Tm9sf1 (NM_028780.2,1167-1185).
ctccatggtgcttgtgttt

SEQ ID NO: 657677 - DNA, 19 bp, Mus musculus
  siRNA target sequence for Tm9sf1 (NM_028780.2,1277-1295).
gctctagtgacgactttga

SEQ ID NO: 657678 - DNA, 19 bp, Mus musculus
  siRNA target sequence for Tm9sf1 (NM_028780.2,1290-1308).
ctttgaccagggcgataat

SEQ ID NO: 657679 - DNA, 19 bp, Mus musculus
  siRNA target sequence for Tm9sf1 (NM_028780.2,1300-1318).
ggcgataatggctggaaaa

SEQ ID NO: 657680 - DNA, 19 bp, Mus musculus
  siRNA target sequence for Tm9sf1 (NM_028780.2,1302-1320).
cgataatggctggaaaatt

SEQ ID NO: 657681 - DNA, 19 bp, Mus musculus
  siRNA target sequence for Tm9sf1 (NM_028780.2,1303-1321).
gataatggctggaaaatta

SEQ ID NO: 657682 - DNA, 19 bp, Mus musculus
  siRNA target sequence for Tm9sf1 (NM_028780.2,1313-1331).
ggaaaattatccatacaga

SEQ ID NO: 657683 - DNA, 19 bp, Mus musculus
  siRNA target sequence for Tm9sf1 (NM_028780.2,1405-1423).
ggcactggcattattgtca

SEQ ID NO: 657684 - DNA, 19 bp, Mus musculus
  siRNA target sequence for Tm9sf1 (NM_028780.2,1406-1424).
gcactggcattattgtcat

SEQ ID NO: 657685 - DNA, 19 bp, Mus musculus
  siRNA target sequence for Tm9sf1 (NM_028780.2,1426-1444).
gcgttgcttggcatgttca

SEQ ID NO: 657686 - DNA, 19 bp, Mus musculus
  siRNA target sequence for Tm9sf1 (NM_028780.2,1427-1445).
cgttgcttggcatgttcaa

SEQ ID NO: 657687 - DNA, 19 bp, Mus musculus
  siRNA target sequence for Tm9sf1 (NM_028780.2,1472-1490).
cagcagcgatcttgttgta

SEQ ID NO: 657688 - DNA, 19 bp, Mus musculus
  siRNA target sequence for Tm9sf1 (NM_028780.2,1527-1545).
ccacttctaccggcaaatt

SEQ ID NO: 657689 - DNA, 19 bp, Mus musculus
  siRNA target sequence for Tm9sf1 (NM_028780.2,1555-1573).
cgttgggtgtggaacatca

SEQ ID NO: 657690 - DNA, 19 bp, Mus musculus
  siRNA target sequence for Tm9sf1 (NM_028780.2,1752-1770).
caacgctagtccctttgat

SEQ ID NO: 657691 - DNA, 19 bp, Mus musculus
  siRNA target sequence for Tm9sf1 (NM_028780.2,1771-1789).
gcaccttgtcgcacaaaga

SEQ ID NO: 657692 - DNA, 19 bp, Mus musculus
  siRNA target sequence for Tm9sf1 (NM_028780.2,1775-1793).
cttgtcgcacaaagaatat

SEQ ID NO: 657693 - DNA, 19 bp, Mus musculus
  siRNA target sequence for Tm9sf1 (NM_028780.2,1810-1828).
ccccagccctggtacaagt

SEQ ID NO: 657694 - DNA, 19 bp, Mus musculus
  siRNA target sequence for Tm9sf1 (NM_028780.2,1813-1831).
cagccctggtacaagtcta

SEQ ID NO: 657695 - DNA, 19 bp, Mus musculus
  siRNA target sequence for Tm9sf1 (NM_028780.2,1882-1900).
gtggagctgtactacatct

SEQ ID NO: 657696 - DNA, 19 bp, Mus musculus
  siRNA target sequence for Tm9sf1 (NM_028780.2,1884-1902).
ggagctgtactacatcttt

SEQ ID NO: 657697 - DNA, 19 bp, Mus musculus
  siRNA target sequence for Tm9sf1 (NM_028780.2,1935-1953).
gtacggcatcctcttcttt

SEQ ID NO: 657698 - DNA, 19 bp, Mus musculus
  siRNA target sequence for Tm9sf1 (NM_028780.2,2226-2244).
gttcatccgttatatctat

SEQ ID NO: 657699 - DNA, 19 bp, Mus musculus
  siRNA target sequence for Tm9sf1 (NM_028780.2,2229-2247).
catccgttatatctatgtt

SEQ ID NO: 657700 - DNA, 19 bp, Mus musculus
  siRNA target sequence for Tm9sf1 (NM_028780.2,2234-2252).
gttatatctatgttaacct

SEQ ID NO: 657701 - DNA, 19 bp, Mus musculus
  siRNA target sequence for Tm9sf2 (NM_080556.2,345-363).
cgagtgcaaggctgatata

SEQ ID NO: 657702 - DNA, 19 bp, Mus musculus
  siRNA target sequence for Tm9sf2 (NM_080556.2,412-430).
gaatatacagcgtttgact

SEQ ID NO: 657703 - DNA, 19 bp, Mus musculus
  siRNA target sequence for Tm9sf2 (NM_080556.2,448-466).
ggaaaacgcccatctgaaa

SEQ ID NO: 657704 - DNA, 19 bp, Mus musculus
  siRNA target sequence for Tm9sf2 (NM_080556.2,449-467).
gaaaacgcccatctgaaaa

SEQ ID NO: 657705 - DNA, 19 bp, Mus musculus
  siRNA target sequence for Tm9sf2 (NM_080556.2,499-517).
gaaccctcaccgtataagt

SEQ ID NO: 657706 - DNA, 19 bp, Mus musculus
  siRNA target sequence for Tm9sf2 (NM_080556.2,502-520).
ccctcaccgtataagttta

SEQ ID NO: 657707 - DNA, 19 bp, Mus musculus
  siRNA target sequence for Tm9sf2 (NM_080556.2,506-524).
caccgtataagtttacgtt

SEQ ID NO: 657708 - DNA, 19 bp, Mus musculus
  siRNA target sequence for Tm9sf2 (NM_080556.2,508-526).
ccgtataagtttacgttta

SEQ ID NO: 657709 - DNA, 19 bp, Mus musculus
  siRNA target sequence for Tm9sf2 (NM_080556.2,509-527).
cgtataagtttacgtttaa

SEQ ID NO: 657710 - DNA, 19 bp, Mus musculus
  siRNA target sequence for Tm9sf2 (NM_080556.2,510-528).
gtataagtttacgtttaat

SEQ ID NO: 657711 - DNA, 19 bp, Mus musculus
  siRNA target sequence for Tm9sf2 (NM_080556.2,546-564).
gctcgtttgtacgaaaaca

SEQ ID NO: 657712 - DNA, 19 bp, Mus musculus
  siRNA target sequence for Tm9sf2 (NM_080556.2,547-565).
ctcgtttgtacgaaaacat

SEQ ID NO: 657713 - DNA, 19 bp, Mus musculus
  siRNA target sequence for Tm9sf2 (NM_080556.2,550-568).
gtttgtacgaaaacataca

SEQ ID NO: 657714 - DNA, 19 bp, Mus musculus
  siRNA target sequence for Tm9sf2 (NM_080556.2,557-575).
cgaaaacatacaatacaga

SEQ ID NO: 657715 - DNA, 19 bp, Mus musculus
  siRNA target sequence for Tm9sf2 (NM_080556.2,718-736).
cccattggctgttacatta

SEQ ID NO: 657716 - DNA, 19 bp, Mus musculus
  siRNA target sequence for Tm9sf2 (NM_080556.2,724-742).
ggctgttacattacagata

SEQ ID NO: 657717 - DNA, 19 bp, Mus musculus
  siRNA target sequence for Tm9sf2 (NM_080556.2,725-743).
gctgttacattacagataa

SEQ ID NO: 657718 - DNA, 19 bp, Mus musculus
  siRNA target sequence for Tm9sf2 (NM_080556.2,726-744).
ctgttacattacagataaa

SEQ ID NO: 657719 - DNA, 19 bp, Mus musculus
  siRNA target sequence for Tm9sf2 (NM_080556.2,854-872).
ggtctatgggagcaagatt

SEQ ID NO: 657720 - DNA, 19 bp, Mus musculus
  siRNA target sequence for Tm9sf2 (NM_080556.2,855-873).
gtctatgggagcaagatta

SEQ ID NO: 657721 - DNA, 19 bp, Mus musculus
  siRNA target sequence for Tm9sf2 (NM_080556.2,869-887).
gattagtggctgctaaact

SEQ ID NO: 657722 - DNA, 19 bp, Mus musculus
  siRNA target sequence for Tm9sf2 (NM_080556.2,878-896).
ctgctaaacttgaaccaaa

SEQ ID NO: 657723 - DNA, 19 bp, Mus musculus
  siRNA target sequence for Tm9sf2 (NM_080556.2,903-921).
caagcatacccacatagat

SEQ ID NO: 657724 - DNA, 19 bp, Mus musculus
  siRNA target sequence for Tm9sf2 (NM_080556.2,935-953).
ctggacctgccatggatat

SEQ ID NO: 657725 - DNA, 19 bp, Mus musculus
  siRNA target sequence for Tm9sf2 (NM_080556.2,937-955).
ggacctgccatggatataa

SEQ ID NO: 657726 - DNA, 19 bp, Mus musculus
  siRNA target sequence for Tm9sf2 (NM_080556.2,975-993).
gatcaaaattgcctatact

SEQ ID NO: 657727 - DNA, 19 bp, Mus musculus
  siRNA target sequence for Tm9sf2 (NM_080556.2,978-996).
caaaattgcctatacttat

SEQ ID NO: 657728 - DNA, 19 bp, Mus musculus
  siRNA target sequence for Tm9sf2 (NM_080556.2,985-1003).
gcctatacttattctatta

SEQ ID NO: 657729 - DNA, 19 bp, Mus musculus
  siRNA target sequence for Tm9sf2 (NM_080556.2,987-1005).
ctatacttattctattagt

SEQ ID NO: 657730 - DNA, 19 bp, Mus musculus
  siRNA target sequence for Tm9sf2 (NM_080556.2,1033-1051).
gcgtctaggtgggactata

SEQ ID NO: 657731 - DNA, 19 bp, Mus musculus
  siRNA target sequence for Tm9sf2 (NM_080556.2,1034-1052).
cgtctaggtgggactatat

SEQ ID NO: 657732 - DNA, 19 bp, Mus musculus
  siRNA target sequence for Tm9sf2 (NM_080556.2,1037-1055).
ctaggtgggactatattct

SEQ ID NO: 657733 - DNA, 19 bp, Mus musculus
  siRNA target sequence for Tm9sf2 (NM_080556.2,1075-1093).
catattcagtggtttagca

SEQ ID NO: 657734 - DNA, 19 bp, Mus musculus
  siRNA target sequence for Tm9sf2 (NM_080556.2,1081-1099).
cagtggtttagcataatga

SEQ ID NO: 657735 - DNA, 19 bp, Mus musculus
  siRNA target sequence for Tm9sf2 (NM_080556.2,1108-1126).
gttattgtcctcttcttat

SEQ ID NO: 657736 - DNA, 19 bp, Mus musculus
  siRNA target sequence for Tm9sf2 (NM_080556.2,1129-1147).
ggaatggtagctatgatta

SEQ ID NO: 657737 - DNA, 19 bp, Mus musculus
  siRNA target sequence for Tm9sf2 (NM_080556.2,1149-1167).
gttacgcacgctacataaa

SEQ ID NO: 657738 - DNA, 19 bp, Mus musculus
  siRNA target sequence for Tm9sf2 (NM_080556.2,1153-1171).
cgcacgctacataaagata

SEQ ID NO: 657739 - DNA, 19 bp, Mus musculus
  siRNA target sequence for Tm9sf2 (NM_080556.2,1154-1172).
gcacgctacataaagatat

SEQ ID NO: 657740 - DNA, 19 bp, Mus musculus
  siRNA target sequence for Tm9sf2 (NM_080556.2,1369-1387).
cgaggagccctgatgacat

SEQ ID NO: 657741 - DNA, 19 bp, Mus musculus
  siRNA target sequence for Tm9sf2 (NM_080556.2,1438-1456).
gccagattctacaaatcct

SEQ ID NO: 657742 - DNA, 19 bp, Mus musculus
  siRNA target sequence for Tm9sf2 (NM_080556.2,1439-1457).
ccagattctacaaatcctt

SEQ ID NO: 657743 - DNA, 19 bp, Mus musculus
  siRNA target sequence for Tm9sf2 (NM_080556.2,1637-1655).
cgtttattggtgcatactt

SEQ ID NO: 657744 - DNA, 19 bp, Mus musculus
  siRNA target sequence for Tm9sf2 (NM_080556.2,1638-1656).
gtttattggtgcatacttt

SEQ ID NO: 657745 - DNA, 19 bp, Mus musculus
  siRNA target sequence for Tm9sf2 (NM_080556.2,1646-1664).
gtgcatactttggctttaa

SEQ ID NO: 657746 - DNA, 19 bp, Mus musculus
  siRNA target sequence for Tm9sf2 (NM_080556.2,1684-1702).
ccagttcgaaccaatcaga

SEQ ID NO: 657747 - DNA, 19 bp, Mus musculus
  siRNA target sequence for Tm9sf2 (NM_080556.2,1717-1735).
cctgagcagtcgttctaca

SEQ ID NO: 657748 - DNA, 19 bp, Mus musculus
  siRNA target sequence for Tm9sf2 (NM_080556.2,1720-1738).
gagcagtcgttctacacaa

SEQ ID NO: 657749 - DNA, 19 bp, Mus musculus
  siRNA target sequence for Tm9sf2 (NM_080556.2,1774-1792).
ccttttggctgcatcttta

SEQ ID NO: 657750 - DNA, 19 bp, Mus musculus
  siRNA target sequence for Tm9sf2 (NM_080556.2,1826-1844).
cccaccagatgtattacat

SEQ ID NO: 657751 - DNA, 19 bp, Mus musculus
  siRNA target sequence for Tm9sf2 (NM_080556.2,1828-1846).
caccagatgtattacatgt

SEQ ID NO: 657752 - DNA, 19 bp, Mus musculus
  siRNA target sequence for Tm9sf2 (NM_080556.2,1889-1907).
gttccgaagcaactatact

SEQ ID NO: 657753 - DNA, 19 bp, Mus musculus
  siRNA target sequence for Tm9sf2 (NM_080556.2,1892-1910).
ccgaagcaactatacttct

SEQ ID NO: 657754 - DNA, 19 bp, Mus musculus
  siRNA target sequence for Tm9sf2 (NM_080556.2,1898-1916).
caactatacttctttgcta

SEQ ID NO: 657755 - DNA, 19 bp, Mus musculus
  siRNA target sequence for Tm9sf2 (NM_080556.2,1948-1966).
cagtggcgttccttcctta

SEQ ID NO: 657756 - DNA, 19 bp, Mus musculus
  siRNA target sequence for Tm9sf2 (NM_080556.2,1970-1988).
gcggcttcacagctgttta

SEQ ID NO: 657757 - DNA, 19 bp, Mus musculus
  siRNA target sequence for Tm9sf2 (NM_080556.2,1972-1990).
ggcttcacagctgtttact

SEQ ID NO: 657758 - DNA, 19 bp, Mus musculus
  siRNA target sequence for Tm9sf2 (NM_080556.2,2034-2052).
cacggggacagcaagtaca

SEQ ID NO: 657759 - DNA, 19 bp, Mus musculus
  siRNA target sequence for Tm9sf2 (NM_080556.2,2036-2054).
cggggacagcaagtacaat

SEQ ID NO: 657760 - DNA, 19 bp, Mus musculus
  siRNA target sequence for Tm9sf2 (NM_080556.2,2055-2073).
cctgtacttcggttatact

SEQ ID NO: 657761 - DNA, 19 bp, Mus musculus
  siRNA target sequence for Tm9sf2 (NM_080556.2,2056-2074).
ctgtacttcggttatacta

SEQ ID NO: 657762 - DNA, 19 bp, Mus musculus
  siRNA target sequence for Tm9sf2 (NM_080556.2,2066-2084).
gttatactatgataatggt

SEQ ID NO: 657763 - DNA, 19 bp, Mus musculus
  siRNA target sequence for Tm9sf2 (NM_080556.2,2072-2090).
ctatgataatggttttgat

SEQ ID NO: 657764 - DNA, 19 bp, Mus musculus
  siRNA target sequence for Tmc6 (NM_145439.1,210-228).
cccagcccctatgaagaaa

SEQ ID NO: 657765 - DNA, 19 bp, Mus musculus
  siRNA target sequence for Tmc6 (NM_145439.1,212-230).
cagcccctatgaagaaagt

SEQ ID NO: 657766 - DNA, 19 bp, Mus musculus
  siRNA target sequence for Tmc6 (NM_145439.1,214-232).
gcccctatgaagaaagtga

SEQ ID NO: 657767 - DNA, 19 bp, Mus musculus
  siRNA target sequence for Tmc6 (NM_145439.1,332-350).
gaccctcccaggacttgaa

SEQ ID NO: 657768 - DNA, 19 bp, Mus musculus
  siRNA target sequence for Tmc6 (NM_145439.1,668-686).
gcgctgtcttcgagagaaa

SEQ ID NO: 657769 - DNA, 19 bp, Mus musculus
  siRNA target sequence for Tmc6 (NM_145439.1,745-763).
gctgtagccggctcagata

SEQ ID NO: 657770 - DNA, 19 bp, Mus musculus
  siRNA target sequence for Tmc6 (NM_145439.1,1141-1159).
gcagcctgccctataacat

SEQ ID NO: 657771 - DNA, 19 bp, Mus musculus
  siRNA target sequence for Tmc6 (NM_145439.1,1645-1663).
cccctgtgttggaggtata

SEQ ID NO: 657772 - DNA, 19 bp, Mus musculus
  siRNA target sequence for Tmc6 (NM_145439.1,1795-1813).
gcttcatggtcgtggattt

SEQ ID NO: 657773 - DNA, 19 bp, Mus musculus
  siRNA target sequence for Tmc6 (NM_145439.1,1823-1841).
gctcttggactcccttttt

SEQ ID NO: 657774 - DNA, 19 bp, Mus musculus
  siRNA target sequence for Tmc6 (NM_145439.1,1890-1908).
cagaagcctgagtttgaca

SEQ ID NO: 657775 - DNA, 19 bp, Mus musculus
  siRNA target sequence for Tmc6 (NM_145439.1,1998-2016).
ctccggctgctcttccttt

SEQ ID NO: 657776 - DNA, 19 bp, Mus musculus
  siRNA target sequence for Tmc6 (NM_145439.1,2295-2313).
ctggtggagaacactttct

SEQ ID NO: 657777 - DNA, 19 bp, Mus musculus
  siRNA target sequence for Tmc6 (NM_181321.2,1065-1083).
cctgccttggccaagaact

SEQ ID NO: 657778 - DNA, 19 bp, Mus musculus
  siRNA target sequence for Ttpa (NM_015767.1,206-224).
ctggcctggcgcttaatga

SEQ ID NO: 657779 - DNA, 19 bp, Mus musculus
  siRNA target sequence for Ttpa (NM_015767.1,208-226).
ggcctggcgcttaatgaaa

SEQ ID NO: 657780 - DNA, 19 bp, Mus musculus
  siRNA target sequence for Ttpa (NM_015767.1,209-227).
gcctggcgcttaatgaaaa

SEQ ID NO: 657781 - DNA, 19 bp, Mus musculus
  siRNA target sequence for Ttpa (NM_015767.1,210-228).
cctggcgcttaatgaaaaa

SEQ ID NO: 657782 - DNA, 19 bp, Mus musculus
  siRNA target sequence for Ttpa (NM_015767.1,213-231).
ggcgcttaatgaaaaacta

SEQ ID NO: 657783 - DNA, 19 bp, Mus musculus
  siRNA target sequence for Ttpa (NM_015767.1,214-232).
gcgcttaatgaaaaactat

SEQ ID NO: 657784 - DNA, 19 bp, Mus musculus
  siRNA target sequence for Ttpa (NM_015767.1,215-233).
cgcttaatgaaaaactatt

SEQ ID NO: 657785 - DNA, 19 bp, Mus musculus
  siRNA target sequence for Ttpa (NM_015767.1,269-287).
gatctacgccctagaagta

SEQ ID NO: 657786 - DNA, 19 bp, Mus musculus
  siRNA target sequence for Ttpa (NM_015767.1,323-341).
ctcaggtcccgggattcta

SEQ ID NO: 657787 - DNA, 19 bp, Mus musculus
  siRNA target sequence for Ttpa (NM_015767.1,325-343).
caggtcccgggattctact

SEQ ID NO: 657788 - DNA, 19 bp, Mus musculus
  siRNA target sequence for Ttpa (NM_015767.1,344-362).
ggcagtagagttctcattt

SEQ ID NO: 657789 - DNA, 19 bp, Mus musculus
  siRNA target sequence for Ttpa (NM_015767.1,345-363).
gcagtagagttctcattta

SEQ ID NO: 657790 - DNA, 19 bp, Mus musculus
  siRNA target sequence for Ttpa (NM_015767.1,356-374).
ctcatttacagaattgcat

SEQ ID NO: 657791 - DNA, 19 bp, Mus musculus
  siRNA target sequence for Ttpa (NM_015767.1,413-431).
cgtgtaagtctgatcacat

SEQ ID NO: 657792 - DNA, 19 bp, Mus musculus
  siRNA target sequence for Ttpa (NM_015767.1,427-445).
cacatcagagctcattgta

SEQ ID NO: 657793 - DNA, 19 bp, Mus musculus
  siRNA target sequence for Ttpa (NM_015767.1,459-477).
ctcaacgcaatggagttaa

SEQ ID NO: 657794 - DNA, 19 bp, Mus musculus
  siRNA target sequence for Ttpa (NM_015767.1,501-519).
ggcaggtttctcatgcttt

SEQ ID NO: 657795 - DNA, 19 bp, Mus musculus
  siRNA target sequence for Ttpa (NM_015767.1,520-538).
ccaaattaccccatctgta

SEQ ID NO: 657796 - DNA, 19 bp, Mus musculus
  siRNA target sequence for Ttpa (NM_015767.1,544-562).
gaagattgctgctgtactt

SEQ ID NO: 657797 - DNA, 19 bp, Mus musculus
  siRNA target sequence for Ttpa (NM_015767.1,547-565).
gattgctgctgtacttaca

SEQ ID NO: 657798 - DNA, 19 bp, Mus musculus
  siRNA target sequence for Ttpa (NM_015767.1,555-573).
ctgtacttacagattcctt

SEQ ID NO: 657799 - DNA, 19 bp, Mus musculus
  siRNA target sequence for Ttpa (NM_015767.1,584-602).
gttcgtgggatccatttga

SEQ ID NO: 657800 - DNA, 19 bp, Mus musculus
  siRNA target sequence for Ttpa (NM_015767.1,587-605).
cgtgggatccatttgataa

SEQ ID NO: 657801 - DNA, 19 bp, Mus musculus
  siRNA target sequence for Ttpa (NM_015767.1,664-682).
gattaaggaccggattcat

SEQ ID NO: 657802 - DNA, 19 bp, Mus musculus
  siRNA target sequence for Ttpa (NM_015767.1,680-698).
catctgcacgggaacaact

SEQ ID NO: 657803 - DNA, 19 bp, Mus musculus
  siRNA target sequence for Ttpa (NM_015767.1,683-701).
ctgcacgggaacaactaca

SEQ ID NO: 657804 - DNA, 19 bp, Mus musculus
  siRNA target sequence for Ttpa (NM_015767.1,688-706).
cgggaacaactacaaatca

SEQ ID NO: 657805 - DNA, 19 bp, Mus musculus
  siRNA target sequence for Ttpa (NM_015767.1,689-707).
gggaacaactacaaatcaa

SEQ ID NO: 657806 - DNA, 19 bp, Mus musculus
  siRNA target sequence for Ttpa (NM_015767.1,741-759).
gggaatatggcggtaaaga

SEQ ID NO: 657807 - DNA, 19 bp, Mus musculus
  siRNA target sequence for Ttpa (NM_015767.1,743-761).
gaatatggcggtaaagagt

SEQ ID NO: 657808 - DNA, 19 bp, Mus musculus
  siRNA target sequence for Ttpa (NM_015767.1,780-798).
gtcaggagtggacaaattt

SEQ ID NO: 657809 - DNA, 19 bp, Mus musculus
  siRNA target sequence for Ttpa (NM_015767.1,782-800).
caggagtggacaaatttta

SEQ ID NO: 657810 - DNA, 19 bp, Mus musculus
  siRNA target sequence for Ttpa (NM_015767.1,784-802).
ggagtggacaaattttata

SEQ ID NO: 657811 - DNA, 19 bp, Mus musculus
  siRNA target sequence for Vglut3 (NM_182959.2,368-386).
gccatttaaagcatttgat

SEQ ID NO: 657812 - DNA, 19 bp, Mus musculus
  siRNA target sequence for Vglut3 (NM_182959.2,369-387).
ccatttaaagcatttgata

SEQ ID NO: 657813 - DNA, 19 bp, Mus musculus
  siRNA target sequence for Vglut3 (NM_182959.2,379-397).
catttgataccttcaaaga

SEQ ID NO: 657814 - DNA, 19 bp, Mus musculus
  siRNA target sequence for Vglut3 (NM_182959.2,446-464).
ctcgctgggcatcttacaa

SEQ ID NO: 657815 - DNA, 19 bp, Mus musculus
  siRNA target sequence for Vglut3 (NM_182959.2,620-638).
ccccaaacggtacatcatt

SEQ ID NO: 657816 - DNA, 19 bp, Mus musculus
  siRNA target sequence for Vglut3 (NM_182959.2,716-734).
caacaatagcactgtgtat

SEQ ID NO: 657817 - DNA, 19 bp, Mus musculus
  siRNA target sequence for Vglut3 (NM_182959.2,840-858).
cccggtggcttcatttcaa

SEQ ID NO: 657818 - DNA, 19 bp, Mus musculus
  siRNA target sequence for Vglut3 (NM_182959.2,843-861).
ggtggcttcatttcaaaca

SEQ ID NO: 657819 - DNA, 19 bp, Mus musculus
  siRNA target sequence for Vglut3 (NM_182959.2,844-862).
gtggcttcatttcaaacaa

SEQ ID NO: 657820 - DNA, 19 bp, Mus musculus
  siRNA target sequence for Vglut3 (NM_182959.2,846-864).
ggcttcatttcaaacaagt

SEQ ID NO: 657821 - DNA, 19 bp, Mus musculus
  siRNA target sequence for Vglut3 (NM_182959.2,885-903).
ggagccgccatcttcttga

SEQ ID NO: 657822 - DNA, 19 bp, Mus musculus
  siRNA target sequence for Vglut3 (NM_182959.2,888-906).
gccgccatcttcttgacat

SEQ ID NO: 657823 - DNA, 19 bp, Mus musculus
  siRNA target sequence for Vglut3 (NM_182959.2,904-922).
catcaactctgaacatgtt

SEQ ID NO: 657824 - DNA, 19 bp, Mus musculus
  siRNA target sequence for Vglut3 (NM_182959.2,907-925).
caactctgaacatgtttat

SEQ ID NO: 657825 - DNA, 19 bp, Mus musculus
  siRNA target sequence for Vglut3 (NM_182959.2,931-949).
ctgcggcgagggtgcatta

SEQ ID NO: 657826 - DNA, 19 bp, Mus musculus
  siRNA target sequence for Vglut3 (NM_182959.2,957-975).
gtcatgggtgtgaggattt

SEQ ID NO: 657827 - DNA, 19 bp, Mus musculus
  siRNA target sequence for Vglut3 (NM_182959.2,1111-1129).
ctcttgcaggggtattggt

SEQ ID NO: 657828 - DNA, 19 bp, Mus musculus
  siRNA target sequence for Vglut3 (NM_182959.2,1120-1138).
gggtattggtgcagtacat

SEQ ID NO: 657829 - DNA, 19 bp, Mus musculus
  siRNA target sequence for Vglut3 (NM_182959.2,1121-1139).
ggtattggtgcagtacatt

SEQ ID NO: 657830 - DNA, 19 bp, Mus musculus
  siRNA target sequence for Vglut3 (NM_182959.2,1166-1184).
cggtatgtttgggattatt

SEQ ID NO: 657831 - DNA, 19 bp, Mus musculus
  siRNA target sequence for Vglut3 (NM_182959.2,1176-1194).
gggattatttggtatatgt

SEQ ID NO: 657832 - DNA, 19 bp, Mus musculus
  siRNA target sequence for Vglut3 (NM_182959.2,1198-1216).
ggctgctgcaggcttatga

SEQ ID NO: 657833 - DNA, 19 bp, Mus musculus
  siRNA target sequence for Vglut3 (NM_182959.2,1222-1240).
cggcagctcacccaacaat

SEQ ID NO: 657834 - DNA, 19 bp, Mus musculus
  siRNA target sequence for Vglut3 (NM_182959.2,1223-1241).
ggcagctcacccaacaata

SEQ ID NO: 657835 - DNA, 19 bp, Mus musculus
  siRNA target sequence for Vglut3 (NM_182959.2,1224-1242).
gcagctcacccaacaatat

SEQ ID NO: 657836 - DNA, 19 bp, Mus musculus
  siRNA target sequence for Vglut3 (NM_182959.2,1227-1245).
gctcacccaacaatatcca

SEQ ID NO: 657837 - DNA, 19 bp, Mus musculus
  siRNA target sequence for Vglut3 (NM_182959.2,1228-1246).
ctcacccaacaatatccaa

SEQ ID NO: 657838 - DNA, 19 bp, Mus musculus
  siRNA target sequence for Vglut3 (NM_182959.2,1259-1277).
ctacatagagacaagcata

SEQ ID NO: 657839 - DNA, 19 bp, Mus musculus
  siRNA target sequence for Vglut3 (NM_182959.2,1297-1315).
ccagtctgagcaaattcaa

SEQ ID NO: 657840 - DNA, 19 bp, Mus musculus
  siRNA target sequence for Vglut3 (NM_182959.2,1394-1412).
ctatttgctcctgataagt

SEQ ID NO: 657841 - DNA, 19 bp, Mus musculus
  siRNA target sequence for Vglut3 (NM_182959.2,1436-1454).
ctttggatttgcaataagt

SEQ ID NO: 657842 - DNA, 19 bp, Mus musculus
  siRNA target sequence for Vglut3 (NM_182959.2,1479-1497).
ccacacatggtgatgacaa

SEQ ID NO: 657843 - DNA, 19 bp, Mus musculus
  siRNA target sequence for Vglut3 (NM_182959.2,1513-1531).
gaggacaactggctgatta

SEQ ID NO: 657844 - DNA, 19 bp, Mus musculus
  siRNA target sequence for Vglut3 (NM_182959.2,1515-1533).
ggacaactggctgattatt

SEQ ID NO: 657845 - DNA, 19 bp, Mus musculus
  siRNA target sequence for Vglut3 (NM_182959.2,1748-1766).
cctcatggggatctcaaat

SEQ ID NO: 657846 - DNA, 19 bp, Mus musculus
  siRNA target sequence for Vglut3 (NM_182959.2,1751-1769).
catggggatctcaaatggt

SEQ ID NO: 657847 - DNA, 19 bp, Mus musculus
  siRNA target sequence for Vglut3 (NM_182959.2,1775-1793).
gaccctctctggaatggtt

SEQ ID NO: 657848 - DNA, 19 bp, Mus musculus
  siRNA target sequence for Vglut3 (NM_182959.2,1955-1973).
ggacaaatgtggaatcatt

SEQ ID NO: 657849 - DNA, 19 bp, Mus musculus
  siRNA target sequence for Vglut3 (NM_182959.2,2006-2024).
caaccacgagactttcgta

SEQ ID NO: 657850 - DNA, 19 bp, Mus musculus
  siRNA target sequence for Vglut3 (NM_182959.2,2030-2048).
cagaaagaagatgtcttat

SEQ ID NO: 657851 - DNA, 19 bp, Mus musculus
  siRNA target sequence for Vglut3 (NM_182959.2,2090-2108).
gagacaacagagagaatct

SEQ ID NO: 657852 - DNA, 19 bp, Mus musculus
  siRNA target sequence for Zfp316 (NM_017467.1,1152-1170).
gcaagcgcttcgtctacaa

SEQ ID NO: 657853 - DNA, 19 bp, Mus musculus
  siRNA target sequence for Zfp316 (NM_017467.1,2786-2804).
ctcctcacgcacatgaaga

SEQ ID NO: 657854 - DNA, 19 bp, Mus musculus
  siRNA target sequence for Clp1 (NM_138753.1,822-840).
cgaatgcctgtccagaatt

SEQ ID NO: 657855 - DNA, 19 bp, Mus musculus
  siRNA target sequence for Clp1 (NM_138753.1,1046-1064).
cggagacgcccctcaaaga

SEQ ID NO: 657856 - DNA, 19 bp, Mus musculus
  siRNA target sequence for Clp1 (NM_138753.1,1047-1065).
ggagacgcccctcaaagaa

SEQ ID NO: 657857 - DNA, 19 bp, Mus musculus
  siRNA target sequence for Clp1 (NM_138753.1,1149-1167).
gggttcgagccgagatgtt

SEQ ID NO: 657858 - DNA, 19 bp, Mus musculus
  siRNA target sequence for Clp1 (NM_138753.1,1181-1199).
ccagttgcgccctataaca

SEQ ID NO: 657859 - DNA, 19 bp, Mus musculus
  siRNA target sequence for Clp1 (NM_138753.1,1293-1311).
ccagcgatgaggattttgt

SEQ ID NO: 657860 - DNA, 19 bp, Mus musculus
  siRNA target sequence for Clp1 (NM_138753.1,1435-1453).
caagcaggagctcatcaaa

SEQ ID NO: 657861 - DNA, 19 bp, Mus musculus
  siRNA target sequence for Clp1 (NM_138753.1,1482-1500).
cccgcaaggaggacgaaaa

SEQ ID NO: 657862 - DNA, 19 bp, Mus musculus
  siRNA target sequence for Clp1 (NM_138753.1,1483-1501).
ccgcaaggaggacgaaaat

SEQ ID NO: 657863 - DNA, 19 bp, Mus musculus
  siRNA target sequence for Clp1 (NM_138753.1,1484-1502).
cgcaaggaggacgaaaata

SEQ ID NO: 657864 - DNA, 19 bp, Mus musculus
  siRNA target sequence for Clp1 (NM_138753.1,1506-1524).
ggctgcggctggaaagcaa

SEQ ID NO: 657865 - DNA, 19 bp, Mus musculus
  siRNA target sequence for 4932441K18 (NM_178935.2,215-233).
gcagacatggtatgtaact

SEQ ID NO: 657866 - DNA, 19 bp, Mus musculus
  siRNA target sequence for 4932441K18 (NM_178935.2,234-252).
ctcaagcaaatgatattct

SEQ ID NO: 657867 - DNA, 19 bp, Mus musculus
  siRNA target sequence for 4932441K18 (NM_178935.2,314-332).
ggcagtgactttattacaa

SEQ ID NO: 657868 - DNA, 19 bp, Mus musculus
  siRNA target sequence for 4932441K18 (NM_178935.2,320-338).
gactttattacaaagaaca

SEQ ID NO: 657869 - DNA, 19 bp, Mus musculus
  siRNA target sequence for 4932441K18 (NM_178935.2,699-717).
gggaacttcagcgtcataa

SEQ ID NO: 657870 - DNA, 19 bp, Mus musculus
  siRNA target sequence for 4932441K18 (NM_178935.2,700-718).
ggaacttcagcgtcataat

SEQ ID NO: 657871 - DNA, 19 bp, Mus musculus
  siRNA target sequence for 4932441K18 (NM_178935.2,701-719).
gaacttcagcgtcataata

SEQ ID NO: 657872 - DNA, 19 bp, Mus musculus
  siRNA target sequence for 4932441K18 (NM_178935.2,704-722).
cttcagcgtcataataaga

SEQ ID NO: 657873 - DNA, 19 bp, Mus musculus
  siRNA target sequence for 4932441K18 (NM_178935.2,710-728).
cgtcataataagaccttaa

SEQ ID NO: 657874 - DNA, 19 bp, Mus musculus
  siRNA target sequence for 4932441K18 (NM_178935.2,711-729).
gtcataataagaccttaaa

SEQ ID NO: 657875 - DNA, 19 bp, Mus musculus
  siRNA target sequence for 4932441K18 (NM_178935.2,793-811).
ccagataactctaaatgaa

SEQ ID NO: 657876 - DNA, 19 bp, Mus musculus
  siRNA target sequence for 4932441K18 (NM_178935.2,858-876).
gacaggagaacattgaact

SEQ ID NO: 657877 - DNA, 19 bp, Mus musculus
  siRNA target sequence for 4932441K18 (NM_178935.2,938-956).
gtattcaaacacaaggaat

SEQ ID NO: 657878 - DNA, 19 bp, Mus musculus
  siRNA target sequence for 4932441K18 (NM_178935.2,1038-1056).
gagagtttttattaaaaga

SEQ ID NO: 657879 - DNA, 19 bp, Mus musculus
  siRNA target sequence for 4932441K18 (NM_178935.2,1062-1080).
cagaatccaggcacaaata

SEQ ID NO: 657880 - DNA, 19 bp, Mus musculus
  siRNA target sequence for 4932441K18 (NM_178935.2,1096-1114).
gcaagaagtacaactaaaa

SEQ ID NO: 657881 - DNA, 19 bp, Mus musculus
  siRNA target sequence for 4932441K18 (NM_178935.2,1125-1143).
ctctttatatggataaatt

SEQ ID NO: 657882 - DNA, 19 bp, Mus musculus
  siRNA target sequence for 4932441K18 (NM_178935.2,1158-1176).
ctactatggcaaaaagcaa

SEQ ID NO: 657883 - DNA, 19 bp, Mus musculus
  siRNA target sequence for 4932441K18 (NM_178935.2,1260-1278).
gtaccaaatgggaaaacaa

SEQ ID NO: 657884 - DNA, 19 bp, Mus musculus
  siRNA target sequence for 4932441K18 (NM_178935.2,1328-1346).
gagtacaaggcttttcaaa

SEQ ID NO: 657885 - DNA, 19 bp, Mus musculus
  siRNA target sequence for 4932441K18 (NM_178935.2,1330-1348).
gtacaaggcttttcaaata

SEQ ID NO: 657886 - DNA, 19 bp, Mus musculus
  siRNA target sequence for 4932441K18 (NM_178935.2,1580-1598).
gcacaaaagccctcatctt

SEQ ID NO: 657887 - DNA, 19 bp, Mus musculus
  siRNA target sequence for Bhlhb5 (NM_021560.2,1034-1052).
cgttgcgcctcaacatcaa

SEQ ID NO: 657888 - DNA, 19 bp, Mus musculus
  siRNA target sequence for Bhlhb5 (NM_021560.2,1390-1408).
gagaagtgtgccctattca

SEQ ID NO: 657889 - DNA, 19 bp, Mus musculus
  siRNA target sequence for Hes7 (NM_033041.1,9-27).
ccgggagcgagctgagaat

SEQ ID NO: 657890 - DNA, 19 bp, Mus musculus
  siRNA target sequence for Hes7 (NM_033041.1,10-28).
cgggagcgagctgagaata

SEQ ID NO: 657891 - DNA, 19 bp, Mus musculus
  siRNA target sequence for Hes7 (NM_033041.1,444-462).
ccccgcttcaccaatcctt

SEQ ID NO: 657892 - DNA, 19 bp, Mus musculus
  siRNA target sequence for Rbbp7 (NM_009031.2,426-444).
ctagtgctgggcactcata

SEQ ID NO: 657893 - DNA, 19 bp, Mus musculus
  siRNA target sequence for Rbbp7 (NM_009031.2,559-577).
ctgtaacagggaaaattga

SEQ ID NO: 657894 - DNA, 19 bp, Mus musculus
  siRNA target sequence for Rbbp7 (NM_009031.2,561-579).
gtaacagggaaaattgaat

SEQ ID NO: 657895 - DNA, 19 bp, Mus musculus
  siRNA target sequence for Rbbp7 (NM_009031.2,609-627).
gtgaatcgtgctcgttata

SEQ ID NO: 657896 - DNA, 19 bp, Mus musculus
  siRNA target sequence for Abt1 (NM_013924.1,168-186).
gtagttccggggattgtgt

SEQ ID NO: 657897 - DNA, 19 bp, Mus musculus
  siRNA target sequence for Abt1 (NM_013924.1,252-270).
gaggtgggacgcgttttct

SEQ ID NO: 657898 - DNA, 19 bp, Mus musculus
  siRNA target sequence for Abt1 (NM_013924.1,448-466).
gcagccccttccgttatga

SEQ ID NO: 657899 - DNA, 19 bp, Mus musculus
  siRNA target sequence for Abt1 (NM_013924.1,468-486).
ctgtggaacctcaagtatt

SEQ ID NO: 657900 - DNA, 19 bp, Mus musculus
  siRNA target sequence for Abt1 (NM_013924.1,473-491).
gaacctcaagtatttgcat

SEQ ID NO: 657901 - DNA, 19 bp, Mus musculus
  siRNA target sequence for Abt1 (NM_013924.1,479-497).
caagtatttgcatcgtttt

SEQ ID NO: 657902 - DNA, 19 bp, Mus musculus
  siRNA target sequence for Abt1 (NM_013924.1,562-580).
cagaggtcgcccaagcaaa

SEQ ID NO: 657903 - DNA, 19 bp, Mus musculus
  siRNA target sequence for Abt1 (NM_013924.1,566-584).
ggtcgcccaagcaaagaga

SEQ ID NO: 657904 - DNA, 19 bp, Mus musculus
  siRNA target sequence for Abt1 (NM_013924.1,593-611).
cttctatcttcgaaacgta

SEQ ID NO: 657905 - DNA, 19 bp, Mus musculus
  siRNA target sequence for Abt1 (NM_013924.1,645-663).
gatgctactcggccaaata

SEQ ID NO: 657906 - DNA, 19 bp, Mus musculus
  siRNA target sequence for Abt1 (NM_013924.1,648-666).
gctactcggccaaatagct

SEQ ID NO: 657907 - DNA, 19 bp, Mus musculus
  siRNA target sequence for Abt1 (NM_013924.1,786-804).
gggctccttgccaagatct

SEQ ID NO: 657908 - DNA, 19 bp, Mus musculus
  siRNA target sequence for Abt1 (NM_013924.1,787-805).
ggctccttgccaagatctt

SEQ ID NO: 657909 - DNA, 19 bp, Mus musculus
  siRNA target sequence for Gtf2b (NM_145546.1,31-49).
gtcgaccagccgtttggat

SEQ ID NO: 657910 - DNA, 19 bp, Mus musculus
  siRNA target sequence for Gtf2b (NM_145546.1,72-90).
cgaatcatccagatgcaat

SEQ ID NO: 657911 - DNA, 19 bp, Mus musculus
  siRNA target sequence for Gtf2b (NM_145546.1,73-91).
gaatcatccagatgcaatt

SEQ ID NO: 657912 - DNA, 19 bp, Mus musculus
  siRNA target sequence for Gtf2b (NM_145546.1,81-99).
cagatgcaattttagttga

SEQ ID NO: 657913 - DNA, 19 bp, Mus musculus
  siRNA target sequence for Gtf2b (NM_145546.1,129-147).
ccgaatgtggcctagttgt

SEQ ID NO: 657914 - DNA, 19 bp, Mus musculus
  siRNA target sequence for Gtf2b (NM_145546.1,130-148).
cgaatgtggcctagttgta

SEQ ID NO: 657915 - DNA, 19 bp, Mus musculus
  siRNA target sequence for Gtf2b (NM_145546.1,150-168).
gggaccgagttattgatgt

SEQ ID NO: 657916 - DNA, 19 bp, Mus musculus
  siRNA target sequence for Gtf2b (NM_145546.1,288-306).
caggagctgcaagttttga

SEQ ID NO: 657917 - DNA, 19 bp, Mus musculus
  siRNA target sequence for Gtf2b (NM_145546.1,294-312).
ctgcaagttttgatgagtt

SEQ ID NO: 657918 - DNA, 19 bp, Mus musculus
  siRNA target sequence for Gtf2b (NM_145546.1,308-326).
gagtttggcaattctaagt

SEQ ID NO: 657919 - DNA, 19 bp, Mus musculus
  siRNA target sequence for Gtf2b (NM_145546.1,310-328).
gtttggcaattctaagtat

SEQ ID NO: 657920 - DNA, 19 bp, Mus musculus
  siRNA target sequence for Gtf2b (NM_145546.1,314-332).
ggcaattctaagtatcaga

SEQ ID NO: 657921 - DNA, 19 bp, Mus musculus
  siRNA target sequence for Gtf2b (NM_145546.1,315-333).
gcaattctaagtatcagaa

SEQ ID NO: 657922 - DNA, 19 bp, Mus musculus
  siRNA target sequence for Gtf2b (NM_145546.1,409-427).
caacctccctcgcaatata

SEQ ID NO: 657923 - DNA, 19 bp, Mus musculus
  siRNA target sequence for Gtf2b (NM_145546.1,412-430).
cctccctcgcaatatagtt

SEQ ID NO: 657924 - DNA, 19 bp, Mus musculus
  siRNA target sequence for Gtf2b (NM_145546.1,415-433).
ccctcgcaatatagttgat

SEQ ID NO: 657925 - DNA, 19 bp, Mus musculus
  siRNA target sequence for Gtf2b (NM_145546.1,428-446).
gttgatcgaacaaataatt

SEQ ID NO: 657926 - DNA, 19 bp, Mus musculus
  siRNA target sequence for Gtf2b (NM_145546.1,431-449).
gatcgaacaaataatttat

SEQ ID NO: 657927 - DNA, 19 bp, Mus musculus
  siRNA target sequence for Gtf2b (NM_145546.1,517-535).
gtacatcgcctgtagacaa

SEQ ID NO: 657928 - DNA, 19 bp, Mus musculus
  siRNA target sequence for Gtf2b (NM_145546.1,539-557).
ggcgttcccaggacattta

SEQ ID NO: 657929 - DNA, 19 bp, Mus musculus
  siRNA target sequence for Gtf2b (NM_145546.1,540-558).
gcgttcccaggacatttaa

SEQ ID NO: 657930 - DNA, 19 bp, Mus musculus
  siRNA target sequence for Gtf2b (NM_145546.1,541-559).
cgttcccaggacatttaaa

SEQ ID NO: 657931 - DNA, 19 bp, Mus musculus
  siRNA target sequence for Gtf2b (NM_145546.1,547-565).
caggacatttaaagaaata

SEQ ID NO: 657932 - DNA, 19 bp, Mus musculus
  siRNA target sequence for Gtf2b (NM_145546.1,569-587).
gctgtgtctcgaatctcta

SEQ ID NO: 657933 - DNA, 19 bp, Mus musculus
  siRNA target sequence for Gtf2b (NM_145546.1,570-588).
ctgtgtctcgaatctctaa

SEQ ID NO: 657934 - DNA, 19 bp, Mus musculus
  siRNA target sequence for Gtf2b (NM_145546.1,572-590).
gtgtctcgaatctctaaga

SEQ ID NO: 657935 - DNA, 19 bp, Mus musculus
  siRNA target sequence for Gtf2b (NM_145546.1,574-592).
gtctcgaatctctaagaaa

SEQ ID NO: 657936 - DNA, 19 bp, Mus musculus
  siRNA target sequence for Gtf2b (NM_145546.1,576-594).
ctcgaatctctaagaaaga

SEQ ID NO: 657937 - DNA, 19 bp, Mus musculus
  siRNA target sequence for Gtf2b (NM_145546.1,600-618).
gccgctgttttaaactgat

SEQ ID NO: 657938 - DNA, 19 bp, Mus musculus
  siRNA target sequence for Gtf2b (NM_145546.1,601-619).
ccgctgttttaaactgatt

SEQ ID NO: 657939 - DNA, 19 bp, Mus musculus
  siRNA target sequence for Gtf2b (NM_145546.1,712-730).
gatggcagctacacacata

SEQ ID NO: 657940 - DNA, 19 bp, Mus musculus
  siRNA target sequence for Gtf2b (NM_145546.1,786-804).
cggcagcagctatttacat

SEQ ID NO: 657941 - DNA, 19 bp, Mus musculus
  siRNA target sequence for Gtf2b (NM_145546.1,838-856).
gaaagaaatcggggatatt

SEQ ID NO: 657942 - DNA, 19 bp, Mus musculus
  siRNA target sequence for Gtf2b (NM_145546.1,857-875).
gctggtgttgctgatgtta

SEQ ID NO: 657943 - DNA, 19 bp, Mus musculus
  siRNA target sequence for Gtf2b (NM_145546.1,927-945).
cttcagacttcaagtttga

SEQ ID NO: 657944 - DNA, 19 bp, Mus musculus
  siRNA target sequence for Gtf2e2 (NM_026584.2,112-130).
gagatcgagagctgttcaa

SEQ ID NO: 657945 - DNA, 19 bp, Mus musculus
  siRNA target sequence for Gtf2e2 (NM_026584.2,114-132).
gatcgagagctgttcaaaa

SEQ ID NO: 657946 - DNA, 19 bp, Mus musculus
  siRNA target sequence for Gtf2e2 (NM_026584.2,264-282).
cataacaatggatcattta

SEQ ID NO: 657947 - DNA, 19 bp, Mus musculus
  siRNA target sequence for Gtf2e2 (NM_026584.2,300-318).
ggaagctctggatataagt

SEQ ID NO: 657948 - DNA, 19 bp, Mus musculus
  siRNA target sequence for Gtf2e2 (NM_026584.2,301-319).
gaagctctggatataagtt

SEQ ID NO: 657949 - DNA, 19 bp, Mus musculus
  siRNA target sequence for Gtf2e2 (NM_026584.2,320-338).
cggtgttcttgctaagatt

SEQ ID NO: 657950 - DNA, 19 bp, Mus musculus
  siRNA target sequence for Gtf2e2 (NM_026584.2,327-345).
cttgctaagattgtgaatt

SEQ ID NO: 657951 - DNA, 19 bp, Mus musculus
  siRNA target sequence for Gtf2e2 (NM_026584.2,330-348).
gctaagattgtgaattata

SEQ ID NO: 657952 - DNA, 19 bp, Mus musculus
  siRNA target sequence for Gtf2e2 (NM_026584.2,331-349).
ctaagattgtgaattatat

SEQ ID NO: 657953 - DNA, 19 bp, Mus musculus
  siRNA target sequence for Gtf2e2 (NM_026584.2,382-400).
ctctaacgttggaagagat

SEQ ID NO: 657954 - DNA, 19 bp, Mus musculus
  siRNA target sequence for Gtf2e2 (NM_026584.2,457-475).
cggaggctttagtcaacaa

SEQ ID NO: 657955 - DNA, 19 bp, Mus musculus
  siRNA target sequence for Gtf2e2 (NM_026584.2,458-476).
ggaggctttagtcaacaat

SEQ ID NO: 657956 - DNA, 19 bp, Mus musculus
  siRNA target sequence for Gtf2e2 (NM_026584.2,462-480).
gctttagtcaacaatccta

SEQ ID NO: 657957 - DNA, 19 bp, Mus musculus
  siRNA target sequence for Gtf2e2 (NM_026584.2,463-481).
ctttagtcaacaatcctaa

SEQ ID NO: 657958 - DNA, 19 bp, Mus musculus
  siRNA target sequence for Gtf2e2 (NM_026584.2,473-491).
caatcctaaaattgaagta

SEQ ID NO: 657959 - DNA, 19 bp, Mus musculus
  siRNA target sequence for Gtf2e2 (NM_026584.2,517-535).
ctaagtacaacttgaaaga

SEQ ID NO: 657960 - DNA, 19 bp, Mus musculus
  siRNA target sequence for Gtf2e2 (NM_026584.2,544-562).
ccctgcttaggcttttaga

SEQ ID NO: 657961 - DNA, 19 bp, Mus musculus
  siRNA target sequence for Gtf2e2 (NM_026584.2,548-566).
gcttaggcttttagacaat

SEQ ID NO: 657962 - DNA, 19 bp, Mus musculus
  siRNA target sequence for Gtf2e2 (NM_026584.2,575-593).
gcggggactaggaggaatt

SEQ ID NO: 657963 - DNA, 19 bp, Mus musculus
  siRNA target sequence for Gtf2e2 (NM_026584.2,577-595).
ggggactaggaggaattct

SEQ ID NO: 657964 - DNA, 19 bp, Mus musculus
  siRNA target sequence for Gtf2e2 (NM_026584.2,580-598).
gactaggaggaattctctt

SEQ ID NO: 657965 - DNA, 19 bp, Mus musculus
  siRNA target sequence for Gtf2e2 (NM_026584.2,806-824).
gaagcgacagggtatttct

SEQ ID NO: 657966 - DNA, 19 bp, Mus musculus
  siRNA target sequence for Gtf2e2 (NM_026584.2,901-919).
ggtttaagactcacaatga

SEQ ID NO: 657967 - DNA, 19 bp, Mus musculus
  siRNA target sequence for Gtf2e2 (NM_026584.2,902-920).
gtttaagactcacaatgaa

SEQ ID NO: 657968 - DNA, 19 bp, Mus musculus
  siRNA target sequence for Gtf2e2 (NM_026584.2,930-948).
ggagtgctgaaggattact

SEQ ID NO: 657969 - DNA, 19 bp, Mus musculus
  siRNA target sequence for Mlr1 (NM_172153.1,418-436).
gtcccacactgataagatt

SEQ ID NO: 657970 - DNA, 19 bp, Mus musculus
  siRNA target sequence for Mlr1 (NM_172153.1,420-438).
cccacactgataagattga

SEQ ID NO: 657971 - DNA, 19 bp, Mus musculus
  siRNA target sequence for Mlr1 (NM_172153.1,458-476).
ctaaatgcactctttcgaa

SEQ ID NO: 657972 - DNA, 19 bp, Mus musculus
  siRNA target sequence for Mlr1 (NM_172153.1,513-531).
ccttagttgctcaggaatt

SEQ ID NO: 657973 - DNA, 19 bp, Mus musculus
  siRNA target sequence for Mlr1 (NM_172153.1,514-532).
cttagttgctcaggaatta

SEQ ID NO: 657974 - DNA, 19 bp, Mus musculus
  siRNA target sequence for Mlr1 (NM_172153.1,544-562).
gatacgtcagtttgcaatt

SEQ ID NO: 657975 - DNA, 19 bp, Mus musculus
  siRNA target sequence for Mlr1 (NM_172153.1,548-566).
cgtcagtttgcaattgagt

SEQ ID NO: 657976 - DNA, 19 bp, Mus musculus
  siRNA target sequence for Mlr1 (NM_172153.1,558-576).
caattgagtacatctcaaa

SEQ ID NO: 657977 - DNA, 19 bp, Mus musculus
  siRNA target sequence for Mlr1 (NM_172153.1,571-589).
ctcaaaaagcggtaaaatt

SEQ ID NO: 657978 - DNA, 19 bp, Mus musculus
  siRNA target sequence for Mlr1 (NM_172153.1,573-591).
caaaaagcggtaaaattca

SEQ ID NO: 657979 - DNA, 19 bp, Mus musculus
  siRNA target sequence for Mlr1 (NM_172153.1,579-597).
gcggtaaaattcaagaaaa

SEQ ID NO: 657980 - DNA, 19 bp, Mus musculus
  siRNA target sequence for Mlr1 (NM_172153.1,615-633).
gagcaagtctcgtgtgtaa

SEQ ID NO: 657981 - DNA, 19 bp, Mus musculus
  siRNA target sequence for Mlr1 (NM_172153.1,617-635).
gcaagtctcgtgtgtaaaa

SEQ ID NO: 657982 - DNA, 19 bp, Mus musculus
  siRNA target sequence for Mlr1 (NM_172153.1,621-639).
gtctcgtgtgtaaaagtat

SEQ ID NO: 657983 - DNA, 19 bp, Mus musculus
  siRNA target sequence for Mlr1 (NM_172153.1,625-643).
cgtgtgtaaaagtatccaa

SEQ ID NO: 657984 - DNA, 19 bp, Mus musculus
  siRNA target sequence for Mlr1 (NM_172153.1,730-748).
gcaaggggatggagtgtta

SEQ ID NO: 657985 - DNA, 19 bp, Mus musculus
  siRNA target sequence for Mlr1 (NM_172153.1,778-796).
gtctgaagagtcatccata

SEQ ID NO: 657986 - DNA, 19 bp, Mus musculus
  siRNA target sequence for Mlr1 (NM_172153.1,827-845).
gggagactacacagaaaca

SEQ ID NO: 657987 - DNA, 19 bp, Mus musculus
  siRNA target sequence for Mlr1 (NM_172153.1,884-902).
ggtttgctctcaaaagctt

SEQ ID NO: 657988 - DNA, 19 bp, Mus musculus
  siRNA target sequence for Mlr1 (NM_172153.1,889-907).
gctctcaaaagctttgaaa

SEQ ID NO: 657989 - DNA, 19 bp, Mus musculus
  siRNA target sequence for Mlr1 (NM_172153.1,920-938).
ggagcactggacataaata

SEQ ID NO: 657990 - DNA, 19 bp, Mus musculus
  siRNA target sequence for Mlr1 (NM_172153.1,956-974).
ggcatacctcaaaaaactt

SEQ ID NO: 657991 - DNA, 19 bp, Mus musculus
  siRNA target sequence for Mlr1 (NM_172153.1,957-975).
gcatacctcaaaaaacttt

SEQ ID NO: 657992 - DNA, 19 bp, Mus musculus
  siRNA target sequence for Mlr1 (NM_172153.1,963-981).
ctcaaaaaactttacttct

SEQ ID NO: 657993 - DNA, 19 bp, Mus musculus
  siRNA target sequence for Mlr1 (NM_172153.1,1002-1020).
cagggaagcctgcatcttt

SEQ ID NO: 657994 - DNA, 19 bp, Mus musculus
  siRNA target sequence for Mlr1 (NM_172153.1,1027-1045).
caaaactcgagatttcaat

SEQ ID NO: 657995 - DNA, 19 bp, Mus musculus
  siRNA target sequence for Mlr1 (NM_172153.1,1034-1052).
cgagatttcaatgatagtt

SEQ ID NO: 657996 - DNA, 19 bp, Mus musculus
  siRNA target sequence for Mlr1 (NM_172153.1,1035-1053).
gagatttcaatgatagtta

SEQ ID NO: 657997 - DNA, 19 bp, Mus musculus
  siRNA target sequence for Mlr1 (NM_172153.1,1042-1060).
caatgatagttactcatat

SEQ ID NO: 657998 - DNA, 19 bp, Mus musculus
  siRNA target sequence for Mlr1 (NM_172153.1,1077-1095).
cttgtgctgtgctgcaaaa

SEQ ID NO: 657999 - DNA, 19 bp, Mus musculus
  siRNA target sequence for Mlr1 (NM_172153.1,1124-1142).
gagcgcacagaaaaaagta

SEQ ID NO: 658000 - DNA, 19 bp, Mus musculus
  siRNA target sequence for Mlr1 (NM_172153.1,1269-1287).
caaatcctcctgtacagtt

SEQ ID NO: 658001 - DNA, 19 bp, Mus musculus
  siRNA target sequence for Mlr1 (NM_172153.1,1274-1292).
cctcctgtacagttaaaaa

SEQ ID NO: 658002 - DNA, 19 bp, Mus musculus
  siRNA target sequence for Mlr1 (NM_172153.1,1295-1313).
cctcagctacgagtaaatt

SEQ ID NO: 658003 - DNA, 19 bp, Mus musculus
  siRNA target sequence for Mlr1 (NM_172153.1,1304-1322).
cgagtaaattcggtttcaa

SEQ ID NO: 658004 - DNA, 19 bp, Mus musculus
  siRNA target sequence for Mlr1 (NM_172153.1,1305-1323).
gagtaaattcggtttcaaa

SEQ ID NO: 658005 - DNA, 19 bp, Mus musculus
  siRNA target sequence for Mlr1 (NM_172153.1,1344-1362).
gtctgctggatgtcatgta

SEQ ID NO: 658006 - DNA, 19 bp, Mus musculus
  siRNA target sequence for Mlr1 (NM_172153.1,1428-1446).
ctaaacagaacaaactaga

SEQ ID NO: 658007 - DNA, 19 bp, Mus musculus
  siRNA target sequence for Mlr1 (NM_172153.1,1447-1465).
ctgttctgggcctgtaact

SEQ ID NO: 658008 - DNA, 19 bp, Mus musculus
  siRNA target sequence for Mlr1 (NM_172153.1,1449-1467).
gttctgggcctgtaactca

SEQ ID NO: 658009 - DNA, 19 bp, Mus musculus
  siRNA target sequence for Mlr1 (NM_172153.1,1498-1516).
ggacctctctcctttgtgt

SEQ ID NO: 658010 - DNA, 19 bp, Mus musculus
  siRNA target sequence for Mlr1 (NM_172153.1,1568-1586).
ggactggaccggaaagata

SEQ ID NO: 658011 - DNA, 19 bp, Mus musculus
  siRNA target sequence for Mlr1 (NM_172153.1,1611-1629).
gccgctatcgacagtatga

SEQ ID NO: 658012 - DNA, 19 bp, Mus musculus
  siRNA target sequence for Mlr1 (NM_172153.1,1612-1630).
ccgctatcgacagtatgat

SEQ ID NO: 658013 - DNA, 19 bp, Mus musculus
  siRNA target sequence for Mlr1 (NM_172153.1,1615-1633).
ctatcgacagtatgatcat

SEQ ID NO: 658014 - DNA, 19 bp, Mus musculus
  siRNA target sequence for Mlr1 (NM_172153.1,1620-1638).
gacagtatgatcatgaaat

SEQ ID NO: 658015 - DNA, 19 bp, Mus musculus
  siRNA target sequence for Mlr1 (NM_172153.1,1649-1667).
gccattgcaatggtaatga

SEQ ID NO: 658016 - DNA, 19 bp, Mus musculus
  siRNA target sequence for Mlr1 (NM_172153.1,1708-1726).
ggtacctcacagcacttta

SEQ ID NO: 658017 - DNA, 19 bp, Mus musculus
  siRNA target sequence for Mlr1 (NM_172153.1,1713-1731).
ctcacagcactttagaata

SEQ ID NO: 658018 - DNA, 19 bp, Mus musculus
  siRNA target sequence for Mlr1 (NM_172153.1,1795-1813).
cactgggttatatatgaca

SEQ ID NO: 658019 - DNA, 19 bp, Mus musculus
  siRNA target sequence for Mlr1 (NM_172153.1,1799-1817).
gggttatatatgacagatt

SEQ ID NO: 658020 - DNA, 19 bp, Mus musculus
  siRNA target sequence for Mlr1 (NM_172153.1,1801-1819).
gttatatatgacagattca

SEQ ID NO: 658021 - DNA, 19 bp, Mus musculus
  siRNA target sequence for Mlr1 (NM_178142.2,157-175).
gtgtaggttttgagagtat

SEQ ID NO: 658022 - DNA, 19 bp, Mus musculus
  siRNA target sequence for Mlr1 (NM_178142.2,204-222).
cgaagagacctcagtttat

SEQ ID NO: 658023 - DNA, 19 bp, Mus musculus
  siRNA target sequence for Mlr1 (NM_178142.2,780-798).
gctggcatgctacaaatga

SEQ ID NO: 658024 - DNA, 19 bp, Mus musculus
  siRNA target sequence for Mlr1 (NM_178142.2,783-801).
ggcatgctacaaatgaaaa

SEQ ID NO: 658025 - DNA, 19 bp, Mus musculus
  siRNA target sequence for Mlr1 (NM_178142.2,844-862).
gcccattgagccccattaa

SEQ ID NO: 658026 - DNA, 19 bp, Mus musculus
  siRNA target sequence for Mlr1 (NM_178142.2,846-864).
ccattgagccccattaaga

SEQ ID NO: 658027 - DNA, 19 bp, Mus musculus
  siRNA target sequence for Mlr1 (NM_178142.2,879-897).
cctattgaatggaatctaa

SEQ ID NO: 658028 - DNA, 19 bp, Mus musculus
  siRNA target sequence for Mlr1 (NM_178142.2,912-930).
gcaagctgtacagttcata

SEQ ID NO: 658029 - DNA, 19 bp, Mus musculus
  siRNA target sequence for Mlr1 (NM_178142.2,916-934).
gctgtacagttcataacca

SEQ ID NO: 658030 - DNA, 19 bp, Mus musculus
  siRNA target sequence for Mlr1 (NM_178142.2,917-935).
ctgtacagttcataaccaa

SEQ ID NO: 658031 - DNA, 19 bp, Mus musculus
  siRNA target sequence for Mlr1 (NM_178142.2,927-945).
cataaccaaaatctcaaaa

SEQ ID NO: 658032 - DNA, 19 bp, Mus musculus
  siRNA target sequence for Supt3h (NM_178652.1,271-289).
gcagctagcccgatgtcta

SEQ ID NO: 658033 - DNA, 19 bp, Mus musculus
  siRNA target sequence for Supt3h (NM_178652.1,274-292).
gctagcccgatgtctacta

SEQ ID NO: 658034 - DNA, 19 bp, Mus musculus
  siRNA target sequence for Supt3h (NM_178652.1,296-314).
cttcaagtagtggaagaaa

SEQ ID NO: 658035 - DNA, 19 bp, Mus musculus
  siRNA target sequence for Supt3h (NM_178652.1,340-358).
gccgagttgcagagtatga

SEQ ID NO: 658036 - DNA, 19 bp, Mus musculus
  siRNA target sequence for Supt3h (NM_178652.1,341-359).
ccgagttgcagagtatgat

SEQ ID NO: 658037 - DNA, 19 bp, Mus musculus
  siRNA target sequence for Supt3h (NM_178652.1,420-438).
ggttcatacacaactaatt

SEQ ID NO: 658038 - DNA, 19 bp, Mus musculus
  siRNA target sequence for Supt3h (NM_178652.1,421-439).
gttcatacacaactaatta

SEQ ID NO: 658039 - DNA, 19 bp, Mus musculus
  siRNA target sequence for Supt3h (NM_178652.1,632-650).
gtggcagcagcggtacaaa

SEQ ID NO: 658040 - DNA, 19 bp, Mus musculus
  siRNA target sequence for Supt3h (NM_178652.1,667-685).
gctcaggacttgatcaact

SEQ ID NO: 658041 - DNA, 19 bp, Mus musculus
  siRNA target sequence for Supt3h (NM_178652.1,670-688).
caggacttgatcaactcta

SEQ ID NO: 658042 - DNA, 19 bp, Mus musculus
  siRNA target sequence for Supt3h (NM_178652.1,729-747).
cgagcttgatgatgtcaaa

SEQ ID NO: 658043 - DNA, 19 bp, Mus musculus
  siRNA target sequence for Supt3h (NM_178652.1,775-793).
cagactcgtactatggatt

SEQ ID NO: 658044 - DNA, 19 bp, Mus musculus
  siRNA target sequence for Supt3h (NM_178652.1,785-803).
ctatggattcagctcaata

SEQ ID NO: 658045 - DNA, 19 bp, Mus musculus
  siRNA target sequence for Supt3h (NM_178652.1,817-835).
gaaagccgacagttaagtt

SEQ ID NO: 658046 - DNA, 19 bp, Mus musculus
  siRNA target sequence for Supt3h (NM_178652.1,875-893).
gcagcagcatggagataaa

SEQ ID NO: 658047 - DNA, 19 bp, Mus musculus
  siRNA target sequence for Supt3h (NM_178652.1,921-939).
ggcatatctggcatacgaa

SEQ ID NO: 658048 - DNA, 19 bp, Mus musculus
  siRNA target sequence for Supt3h (NM_178652.1,922-940).
gcatatctggcatacgaaa

SEQ ID NO: 658049 - DNA, 19 bp, Mus musculus
  siRNA target sequence for Supt3h (NM_178652.1,1054-1072).
gctgaggggtcctcatgtt

SEQ ID NO: 658050 - DNA, 19 bp, Mus musculus
  siRNA target sequence for Supt3h (NM_178652.1,1055-1073).
ctgaggggtcctcatgttt

SEQ ID NO: 658051 - DNA, 19 bp, Mus musculus
  siRNA target sequence for Supt3h (NM_178652.1,1301-1319).
gacgctacggccacaagat

SEQ ID NO: 658052 - DNA, 19 bp, Mus musculus
  siRNA target sequence for Taf7 (NM_011901.1,378-396).
gggcgtcacggcattgtca

SEQ ID NO: 658053 - DNA, 19 bp, Mus musculus
  siRNA target sequence for Taf7 (NM_011901.1,418-436).
ctgcaaaattggtcgattt

SEQ ID NO: 658054 - DNA, 19 bp, Mus musculus
  siRNA target sequence for Taf7 (NM_011901.1,444-462).
gttacggaaagcttgaaaa

SEQ ID NO: 658055 - DNA, 19 bp, Mus musculus
  siRNA target sequence for Taf7 (NM_011901.1,454-472).
gcttgaaaaccatcgataa

SEQ ID NO: 658056 - DNA, 19 bp, Mus musculus
  siRNA target sequence for Taf7 (NM_011901.1,464-482).
catcgataagaaaaccttt

SEQ ID NO: 658057 - DNA, 19 bp, Mus musculus
  siRNA target sequence for Taf7 (NM_011901.1,520-538).
cagtagatggtgacctata

SEQ ID NO: 658058 - DNA, 19 bp, Mus musculus
  siRNA target sequence for Taf7 (NM_011901.1,565-583).
ctgctgatcccaaagcaaa

SEQ ID NO: 658059 - DNA, 19 bp, Mus musculus
  siRNA target sequence for Taf7 (NM_011901.1,706-724).
cggatgtggaaaaagaagt

SEQ ID NO: 658060 - DNA, 19 bp, Mus musculus
  siRNA target sequence for Taf7 (NM_011901.1,760-778).
gtactcgttgggagataat

SEQ ID NO: 658061 - DNA, 19 bp, Mus musculus
  siRNA target sequence for Taf7 (NM_011901.1,881-899).
gcttcgagagatattcaat

SEQ ID NO: 658062 - DNA, 19 bp, Mus musculus
  siRNA target sequence for Taf7 (NM_011901.1,998-1016).
cgagcaacaccaagaaaat

SEQ ID NO: 658063 - DNA, 19 bp, Mus musculus
  siRNA target sequence for Taf7 (NM_011901.1,1021-1039).
gaaccaatcagttggttat

SEQ ID NO: 658064 - DNA, 19 bp, Mus musculus
  siRNA target sequence for Taf7 (NM_011901.1,1052-1070).
gcagatagataacatgaaa

SEQ ID NO: 658065 - DNA, 19 bp, Mus musculus
  siRNA target sequence for Taf7 (NM_011901.1,1099-1117).
caaagcgccaggaagatct

SEQ ID NO: 658066 - DNA, 19 bp, Mus musculus
  siRNA target sequence for Taf7 (NM_011901.1,1116-1134).
ctcattatgaaggtagaaa

SEQ ID NO: 658067 - DNA, 19 bp, Mus musculus
  siRNA target sequence for Taf7 (NM_011901.1,1167-1185).
ctggatgagctcaaacaaa

SEQ ID NO: 658068 - DNA, 19 bp, Mus musculus
  siRNA target sequence for Taf7 (NM_011901.1,1169-1187).
ggatgagctcaaacaaaaa

SEQ ID NO: 658069 - DNA, 19 bp, Mus musculus
  siRNA target sequence for Gtf2a1 (NM_031391.1,18-36).
ggcgaactcggcaaacaca

SEQ ID NO: 658070 - DNA, 19 bp, Mus musculus
  siRNA target sequence for Gtf2a1 (NM_031391.1,19-37).
gcgaactcggcaaacacaa

SEQ ID NO: 658071 - DNA, 19 bp, Mus musculus
  siRNA target sequence for Gtf2a1 (NM_031391.1,20-38).
cgaactcggcaaacacaaa

SEQ ID NO: 658072 - DNA, 19 bp, Mus musculus
  siRNA target sequence for Gtf2a1 (NM_031391.1,39-57).
caccgtgcctaaattgtat

SEQ ID NO: 658073 - DNA, 19 bp, Mus musculus
  siRNA target sequence for Gtf2a1 (NM_031391.1,124-142).
caagtcctgatggaactaa

SEQ ID NO: 658074 - DNA, 19 bp, Mus musculus
  siRNA target sequence for Gtf2a1 (NM_031391.1,168-186).
gcagtctagggcagtagat

SEQ ID NO: 658075 - DNA, 19 bp, Mus musculus
  siRNA target sequence for Gtf2a1 (NM_031391.1,173-191).
ctagggcagtagatggatt

SEQ ID NO: 658076 - DNA, 19 bp, Mus musculus
  siRNA target sequence for Gtf2a1 (NM_031391.1,386-404).
ctaagttgctacaacatat

SEQ ID NO: 658077 - DNA, 19 bp, Mus musculus
  siRNA target sequence for Gtf2a1 (NM_031391.1,464-482).
gagtgactccggttcaaca

SEQ ID NO: 658078 - DNA, 19 bp, Mus musculus
  siRNA target sequence for Gtf2a1 (NM_031391.1,472-490).
ccggttcaacagctactaa

SEQ ID NO: 658079 - DNA, 19 bp, Mus musculus
  siRNA target sequence for Gtf2a1 (NM_031391.1,474-492).
ggttcaacagctactaaca

SEQ ID NO: 658080 - DNA, 19 bp, Mus musculus
  siRNA target sequence for Gtf2a1 (NM_031391.1,475-493).
gttcaacagctactaacaa

SEQ ID NO: 658081 - DNA, 19 bp, Mus musculus
  siRNA target sequence for Gtf2a1 (NM_031391.1,478-496).
caacagctactaacaaatt

SEQ ID NO: 658082 - DNA, 19 bp, Mus musculus
  siRNA target sequence for Gtf2a1 (NM_031391.1,526-544).
gccaatggtgcccagtata

SEQ ID NO: 658083 - DNA, 19 bp, Mus musculus
  siRNA target sequence for Gtf2a1 (NM_031391.1,527-545).
ccaatggtgcccagtatat

SEQ ID NO: 658084 - DNA, 19 bp, Mus musculus
  siRNA target sequence for Gtf2a1 (NM_031391.1,568-586).
gttctacaacaacaagtta

SEQ ID NO: 658085 - DNA, 19 bp, Mus musculus
  siRNA target sequence for Gtf2a1 (NM_031391.1,824-842).
cgttggtgctgcaagttga

SEQ ID NO: 658086 - DNA, 19 bp, Mus musculus
  siRNA target sequence for Gtf2a1 (NM_031391.1,825-843).
gttggtgctgcaagttgat

SEQ ID NO: 658087 - DNA, 19 bp, Mus musculus
  siRNA target sequence for Gtf2a1 (NM_031391.1,844-862).
ggaacaggggatacatctt

SEQ ID NO: 658088 - DNA, 19 bp, Mus musculus
  siRNA target sequence for Gtf2a1 (NM_031391.1,1039-1057).
gataagatacacagaagta

SEQ ID NO: 658089 - DNA, 19 bp, Mus musculus
  siRNA target sequence for Gtf2a1 (NM_031391.1,1104-1122).
cggaagagattatatattt

SEQ ID NO: 658090 - DNA, 19 bp, Mus musculus
  siRNA target sequence for Gtf2a1 (NM_175335.1,417-435).
cagcaccacaagttattgt

SEQ ID NO: 658091 - DNA, 19 bp, Mus musculus
  siRNA target sequence for Gtf2a1lf (NM_023630.1,112-130).
cgaggagcaggtgttgaaa

SEQ ID NO: 658092 - DNA, 19 bp, Mus musculus
  siRNA target sequence for Gtf2a1lf (NM_023630.1,145-163).
ctgggaaaccaaagtgtta

SEQ ID NO: 658093 - DNA, 19 bp, Mus musculus
  siRNA target sequence for Gtf2a1lf (NM_023630.1,149-167).
gaaaccaaagtgttacaat

SEQ ID NO: 658094 - DNA, 19 bp, Mus musculus
  siRNA target sequence for Gtf2a1lf (NM_023630.1,153-171).
ccaaagtgttacaatctaa

SEQ ID NO: 658095 - DNA, 19 bp, Mus musculus
  siRNA target sequence for Gtf2a1lf (NM_023630.1,154-172).
caaagtgttacaatctaaa

SEQ ID NO: 658096 - DNA, 19 bp, Mus musculus
  siRNA target sequence for Gtf2a1lf (NM_023630.1,327-345).
ccaactgtggtgcaaactt

SEQ ID NO: 658097 - DNA, 19 bp, Mus musculus
  siRNA target sequence for Gtf2a1lf (NM_023630.1,396-414).
cggcatctggtcaccttta

SEQ ID NO: 658098 - DNA, 19 bp, Mus musculus
  siRNA target sequence for Gtf2a1lf (NM_023630.1,404-422).
ggtcacctttacaaagtca

SEQ ID NO: 658099 - DNA, 19 bp, Mus musculus
  siRNA target sequence for Gtf2a1lf (NM_023630.1,405-423).
gtcacctttacaaagtcaa

SEQ ID NO: 658100 - DNA, 19 bp, Mus musculus
  siRNA target sequence for Gtf2a1lf (NM_023630.1,499-517).
gctcgggcagcctttagta

SEQ ID NO: 658101 - DNA, 19 bp, Mus musculus
  siRNA target sequence for Gtf2a1lf (NM_023630.1,500-518).
ctcgggcagcctttagtaa

SEQ ID NO: 658102 - DNA, 19 bp, Mus musculus
  siRNA target sequence for Gtf2a1lf (NM_023630.1,504-522).
ggcagcctttagtaataca

SEQ ID NO: 658103 - DNA, 19 bp, Mus musculus
  siRNA target sequence for Gtf2a1lf (NM_023630.1,885-903).
gccttaaagacagtatata

SEQ ID NO: 658104 - DNA, 19 bp, Mus musculus
  siRNA target sequence for Gtf2a1lf (NM_023630.1,961-979).
gtcagagaagaattgtact

SEQ ID NO: 658105 - DNA, 19 bp, Mus musculus
  siRNA target sequence for Gtf2a1lf (NM_023630.1,1001-1019).
cgggtaaccgatgatgata

SEQ ID NO: 658106 - DNA, 19 bp, Mus musculus
  siRNA target sequence for Gtf2a1lf (NM_023630.1,1002-1020).
gggtaaccgatgatgatat

SEQ ID NO: 658107 - DNA, 19 bp, Mus musculus
  siRNA target sequence for Gtf2a1lf (NM_023630.1,1003-1021).
ggtaaccgatgatgatatt

SEQ ID NO: 658108 - DNA, 19 bp, Mus musculus
  siRNA target sequence for Gtf2a1lf (NM_023630.1,1004-1022).
gtaaccgatgatgatatta

SEQ ID NO: 658109 - DNA, 19 bp, Mus musculus
  siRNA target sequence for Gtf2a1lf (NM_023630.1,1040-1058).
gatggaaccggcgataact

SEQ ID NO: 658110 - DNA, 19 bp, Mus musculus
  siRNA target sequence for Gtf2a1lf (NM_023630.1,1048-1066).
cggcgataactcttctact

SEQ ID NO: 658111 - DNA, 19 bp, Mus musculus
  siRNA target sequence for Gtf2a1lf (NM_023630.1,1153-1171).
ggacagcgtatcgaatgaa

SEQ ID NO: 658112 - DNA, 19 bp, Mus musculus
  siRNA target sequence for Gtf2a1lf (NM_023630.1,1156-1174).
cagcgtatcgaatgaagat

SEQ ID NO: 658113 - DNA, 19 bp, Mus musculus
  siRNA target sequence for Gtf2a1lf (NM_023630.1,1159-1177).
cgtatcgaatgaagattca

SEQ ID NO: 658114 - DNA, 19 bp, Mus musculus
  siRNA target sequence for Gtf2a1lf (NM_023630.1,1160-1178).
gtatcgaatgaagattcaa

SEQ ID NO: 658115 - DNA, 19 bp, Mus musculus
  siRNA target sequence for Gtf2a1lf (NM_023630.1,1193-1211).
gacaacgaggaccatcaaa

SEQ ID NO: 658116 - DNA, 19 bp, Mus musculus
  siRNA target sequence for Gtf2a1lf (NM_023630.1,1195-1213).
caacgaggaccatcaaata

SEQ ID NO: 658117 - DNA, 19 bp, Mus musculus
  siRNA target sequence for Gtf2a1lf (NM_023630.1,1268-1286).
gtgccagacctgtttgata

SEQ ID NO: 658118 - DNA, 19 bp, Mus musculus
  siRNA target sequence for Gtf2a1lf (NM_023630.1,1329-1347).
gcaagaacagatggaaatt

SEQ ID NO: 658119 - DNA, 19 bp, Mus musculus
  siRNA target sequence for Gtf2a1lf (NM_023630.1,1377-1395).
gagggagagactacgtatt

SEQ ID NO: 658120 - DNA, 19 bp, Mus musculus
  siRNA target sequence for Supt5h (NM_013676.1,240-258).
gccatgggggcttcatttt

SEQ ID NO: 658121 - DNA, 19 bp, Mus musculus
  siRNA target sequence for Supt5h (NM_013676.1,241-259).
ccatgggggcttcatttta

SEQ ID NO: 658122 - DNA, 19 bp, Mus musculus
  siRNA target sequence for Supt5h (NM_013676.1,348-366).
cctccaatattgataacgt

SEQ ID NO: 658123 - DNA, 19 bp, Mus musculus
  siRNA target sequence for Supt5h (NM_013676.1,349-367).
ctccaatattgataacgtt

SEQ ID NO: 658124 - DNA, 19 bp, Mus musculus
  siRNA target sequence for Supt5h (NM_013676.1,395-413).
cgtcgtctgcagaatctct

SEQ ID NO: 658125 - DNA, 19 bp, Mus musculus
  siRNA target sequence for Supt5h (NM_013676.1,437-455).
ctgggcgagtattacatga

SEQ ID NO: 658126 - DNA, 19 bp, Mus musculus
  siRNA target sequence for Supt5h (NM_013676.1,442-460).
cgagtattacatgaagaaa

SEQ ID NO: 658127 - DNA, 19 bp, Mus musculus
  siRNA target sequence for Supt5h (NM_013676.1,443-461).
gagtattacatgaagaaat

SEQ ID NO: 658128 - DNA, 19 bp, Mus musculus
  siRNA target sequence for Supt5h (NM_013676.1,593-611).
gaacgagccacggcaattt

SEQ ID NO: 658129 - DNA, 19 bp, Mus musculus
  siRNA target sequence for Supt5h (NM_013676.1,596-614).
cgagccacggcaatttcct

SEQ ID NO: 658130 - DNA, 19 bp, Mus musculus
  siRNA target sequence for Supt5h (NM_013676.1,597-615).
gagccacggcaatttcctt

SEQ ID NO: 658131 - DNA, 19 bp, Mus musculus
  siRNA target sequence for Supt5h (NM_013676.1,612-630).
ccttgatgcggaaattcat

SEQ ID NO: 658132 - DNA, 19 bp, Mus musculus
  siRNA target sequence for Supt5h (NM_013676.1,782-800).
cagcagatggtgcctatta

SEQ ID NO: 658133 - DNA, 19 bp, Mus musculus
  siRNA target sequence for Supt5h (NM_013676.1,871-889).
caagcgaggcatctacaaa

SEQ ID NO: 658134 - DNA, 19 bp, Mus musculus
  siRNA target sequence for Supt5h (NM_013676.1,874-892).
gcgaggcatctacaaagat

SEQ ID NO: 658135 - DNA, 19 bp, Mus musculus
  siRNA target sequence for Supt5h (NM_013676.1,961-979).
cgactacgaccgcatcaaa

SEQ ID NO: 658136 - DNA, 19 bp, Mus musculus
  siRNA target sequence for Supt5h (NM_013676.1,1162-1180).
gtctgctgtgattacagaa

SEQ ID NO: 658137 - DNA, 19 bp, Mus musculus
  siRNA target sequence for Supt5h (NM_013676.1,1452-1470).
gggaccacgtaaaagtgat

SEQ ID NO: 658138 - DNA, 19 bp, Mus musculus
  siRNA target sequence for Supt5h (NM_013676.1,1486-1504).
gggtgacacaggtctcatt

SEQ ID NO: 658139 - DNA, 19 bp, Mus musculus
  siRNA target sequence for Supt5h (NM_013676.1,1546-1564).
caccatgcatgagttgaaa

SEQ ID NO: 658140 - DNA, 19 bp, Mus musculus
  siRNA target sequence for Supt5h (NM_013676.1,1698-1716).
ccttccaggttctcaacat

SEQ ID NO: 658141 - DNA, 19 bp, Mus musculus
  siRNA target sequence for Supt5h (NM_013676.1,1790-1808).
gactcggatcagaacaaca

SEQ ID NO: 658142 - DNA, 19 bp, Mus musculus
  siRNA target sequence for Supt5h (NM_013676.1,1863-1881).
gtgagatccgccatctgta

SEQ ID NO: 658143 - DNA, 19 bp, Mus musculus
  siRNA target sequence for Supt5h (NM_013676.1,1982-2000).
cgggatgtgaccaatttaa

SEQ ID NO: 658144 - DNA, 19 bp, Mus musculus
  siRNA target sequence for Supt5h (NM_013676.1,1984-2002).
ggatgtgaccaatttaact

SEQ ID NO: 658145 - DNA, 19 bp, Mus musculus
  siRNA target sequence for Supt5h (NM_013676.1,2203-2221).
gtccacggccagagtagaa

SEQ ID NO: 658146 - DNA, 19 bp, Mus musculus
  siRNA target sequence for Supt5h (NM_013676.1,2205-2223).
ccacggccagagtagaact

SEQ ID NO: 658147 - DNA, 19 bp, Mus musculus
  siRNA target sequence for Supt5h (NM_013676.1,2291-2309).
ggtggcatgacctctacat

SEQ ID NO: 658148 - DNA, 19 bp, Mus musculus
  siRNA target sequence for Supt5h (NM_013676.1,2332-2350).
ctctcagacacccatgtat

SEQ ID NO: 658149 - DNA, 19 bp, Mus musculus
  siRNA target sequence for Supt5h (NM_013676.1,2358-2376).
gctcccgaacacctatgta

SEQ ID NO: 658150 - DNA, 19 bp, Mus musculus
  siRNA target sequence for Supt5h (NM_013676.1,2359-2377).
ctcccgaacacctatgtat

SEQ ID NO: 658151 - DNA, 19 bp, Mus musculus
  siRNA target sequence for Supt5h (NM_013676.1,2403-2421).
gcagccgcactccacatta

SEQ ID NO: 658152 - DNA, 19 bp, Mus musculus
  siRNA target sequence for Supt5h (NM_013676.1,2404-2422).
cagccgcactccacattat

SEQ ID NO: 658153 - DNA, 19 bp, Mus musculus
  siRNA target sequence for Supt5h (NM_013676.1,2510-2528).
gctgaggaggaatacgaat

SEQ ID NO: 658154 - DNA, 19 bp, Mus musculus
  siRNA target sequence for Supt5h (NM_013676.1,2511-2529).
ctgaggaggaatacgaata

SEQ ID NO: 658155 - DNA, 19 bp, Mus musculus
  siRNA target sequence for Supt5h (NM_013676.1,2927-2945).
ggcattgagcagaactcta

SEQ ID NO: 658156 - DNA, 19 bp, Mus musculus
  siRNA target sequence for Supt5h (NM_013676.1,2952-2970).
gggtgaccactgatatcca

SEQ ID NO: 658157 - DNA, 19 bp, Mus musculus
  siRNA target sequence for Supt5h (NM_013676.1,3087-3105).
gcatctccagtgaacatct

SEQ ID NO: 658158 - DNA, 19 bp, Mus musculus
  siRNA target sequence for Supt5h (NM_013676.1,3175-3193).
ggtcctactgagcattgat

SEQ ID NO: 658159 - DNA, 19 bp, Mus musculus
  siRNA target sequence for 1810056O20Rik (NM_175277.2,87-105).
ctgtgcgcagcgaatgttt

SEQ ID NO: 658160 - DNA, 19 bp, Mus musculus
  siRNA target sequence for 1810056O20Rik (NM_175277.2,116-134).
cggagggggaactcaaagt

SEQ ID NO: 658161 - DNA, 19 bp, Mus musculus
  siRNA target sequence for 1810056O20Rik (NM_175277.2,118-136).
gagggggaactcaaagtga

SEQ ID NO: 658162 - DNA, 19 bp, Mus musculus
  siRNA target sequence for 1810056O20Rik (NM_175277.2,161-179).
ctcgagccacagctattca

SEQ ID NO: 658163 - DNA, 19 bp, Mus musculus
  siRNA target sequence for 1810056O20Rik (NM_175277.2,208-226).
gccatgtatgaaattaaaa

SEQ ID NO: 658164 - DNA, 19 bp, Mus musculus
  siRNA target sequence for 1810056O20Rik (NM_175277.2,228-246).
cgaatcggaagaatttaaa

SEQ ID NO: 658165 - DNA, 19 bp, Mus musculus
  siRNA target sequence for 1810056O20Rik (NM_175277.2,279-297).
caatcaggcactaaaagaa

SEQ ID NO: 658166 - DNA, 19 bp, Mus musculus
  siRNA target sequence for 1810056O20Rik (NM_175277.2,313-331).
cacggccttcggatcttca

SEQ ID NO: 658167 - DNA, 19 bp, Mus musculus
  siRNA target sequence for 1110006I11Rik (NM_026732.2,214-232).
gggcagcaccccataccat

SEQ ID NO: 658168 - DNA, 19 bp, Mus musculus
  siRNA target sequence for 1110006I11Rik (NM_026732.2,246-264).
gcatccacgtctataacaa

SEQ ID NO: 658169 - DNA, 19 bp, Mus musculus
  siRNA target sequence for 1110006I11Rik (NM_026732.2,415-433).
ccctgtggggactcgaatt

SEQ ID NO: 658170 - DNA, 19 bp, Mus musculus
  siRNA target sequence for 1110006I11Rik (NM_026732.2,416-434).
cctgtggggactcgaatta

SEQ ID NO: 658171 - DNA, 19 bp, Mus musculus
  siRNA target sequence for 1110006I11Rik (NM_026732.2,417-435).
ctgtggggactcgaattaa

SEQ ID NO: 658172 - DNA, 19 bp, Mus musculus
  siRNA target sequence for 1110006I11Rik (NM_026732.2,419-437).
gtggggactcgaattaaaa

SEQ ID NO: 658173 - DNA, 19 bp, Mus musculus
  siRNA target sequence for 1110006I11Rik (NM_026732.2,421-439).
ggggactcgaattaaaata

SEQ ID NO: 658174 - DNA, 19 bp, Mus musculus
  siRNA target sequence for 1110006I11Rik (NM_026732.2,424-442).
gactcgaattaaaatacct

SEQ ID NO: 658175 - DNA, 19 bp, Mus musculus
  siRNA target sequence for 1110006I11Rik (NM_026732.2,426-444).
ctcgaattaaaatacctat

SEQ ID NO: 658176 - DNA, 19 bp, Mus musculus
  siRNA target sequence for 1110006I11Rik (NM_026732.2,465-483).
gggaaggagagtattccaa

SEQ ID NO: 658177 - DNA, 19 bp, Mus musculus
  siRNA target sequence for 1110006I11Rik (NM_026732.2,492-510).
ccatcgctcagaactttgt

SEQ ID NO: 658178 - DNA, 19 bp, Mus musculus
  siRNA target sequence for 2010004J23Rik (NM_024212.2,587-605).
ggaatgacatcaaaaaggt

SEQ ID NO: 658179 - DNA, 19 bp, Mus musculus
  siRNA target sequence for 2010004J23Rik (NM_024212.2,869-887).
cttccctcaagagtaacta

SEQ ID NO: 658180 - DNA, 19 bp, Mus musculus
  siRNA target sequence for 2010004J23Rik (NM_024212.2,872-890).
ccctcaagagtaactataa

SEQ ID NO: 658181 - DNA, 19 bp, Mus musculus
  siRNA target sequence for 2010005E08Rik (NM_026591.1,291-309).
ggttccatagcagacaaaa

SEQ ID NO: 658182 - DNA, 19 bp, Mus musculus
  siRNA target sequence for 2010005E08Rik (NM_026591.1,366-384).
gaagactggcacctattct

SEQ ID NO: 658183 - DNA, 19 bp, Mus musculus
  siRNA target sequence for 2010005E08Rik (NM_026591.1,424-442).
ggaagcaaggcaaagtagt

SEQ ID NO: 658184 - DNA, 19 bp, Mus musculus
  siRNA target sequence for 2010005E08Rik (NM_026591.1,488-506).
cacgcattaccgatacatt

SEQ ID NO: 658185 - DNA, 19 bp, Mus musculus
  siRNA target sequence for 2010005E08Rik (NM_026591.1,639-657).
cgtgttcgagtctctacaa

SEQ ID NO: 658186 - DNA, 19 bp, Mus musculus
  siRNA target sequence for 2010005E08Rik (NM_026591.1,642-660).
gttcgagtctctacaagat

SEQ ID NO: 658187 - DNA, 19 bp, Mus musculus
  siRNA target sequence for 2010005E08Rik (NM_026591.1,769-787).
cttatgtgccccgactaaa

SEQ ID NO: 658188 - DNA, 19 bp, Mus musculus
  siRNA target sequence for 2010005E08Rik (NM_026591.1,776-794).
gccccgactaaagacatta

SEQ ID NO: 658189 - DNA, 19 bp, Mus musculus
  siRNA target sequence for 2010005E08Rik (NM_026591.1,778-796).
cccgactaaagacattaga

SEQ ID NO: 658190 - DNA, 19 bp, Mus musculus
  siRNA target sequence for 2010005E08Rik (NM_026591.1,779-797).
ccgactaaagacattagaa

SEQ ID NO: 658191 - DNA, 19 bp, Mus musculus
  siRNA target sequence for 2010005E08Rik (NM_026591.1,834-852).
cgaagattcaagaaagttt

SEQ ID NO: 658192 - DNA, 19 bp, Mus musculus
  siRNA target sequence for 2410005K20Rik (NM_025546.1,109-127).
ccccgaccgctcttttaca

SEQ ID NO: 658193 - DNA, 19 bp, Mus musculus
  siRNA target sequence for 2410005K20Rik (NM_025546.1,174-192).
cgctcaaagtccaaaaaaa

SEQ ID NO: 658194 - DNA, 19 bp, Mus musculus
  siRNA target sequence for 2410005K20Rik (NM_025546.1,209-227).
gttgagtgggagcgaaaat

SEQ ID NO: 658195 - DNA, 19 bp, Mus musculus
  siRNA target sequence for 2410005K20Rik (NM_025546.1,214-232).
gtgggagcgaaaatttatt

SEQ ID NO: 658196 - DNA, 19 bp, Mus musculus
  siRNA target sequence for 2410005K20Rik (NM_025546.1,305-323).
ctccgaatcctcagatgta

SEQ ID NO: 658197 - DNA, 19 bp, Mus musculus
  siRNA target sequence for 2410005K20Rik (NM_025546.1,308-326).
cgaatcctcagatgtatgt

SEQ ID NO: 658198 - DNA, 19 bp, Mus musculus
  siRNA target sequence for 2410005K20Rik (NM_025546.1,369-387).
ggtttctataaaaagcttt

SEQ ID NO: 658199 - DNA, 19 bp, Mus musculus
  siRNA target sequence for 2410005K20Rik (NM_025546.1,370-388).
gtttctataaaaagctttt

SEQ ID NO: 658200 - DNA, 19 bp, Mus musculus
  siRNA target sequence for 2410005K20Rik (NM_025546.1,396-414).
cacggagttaacactatct

SEQ ID NO: 658201 - DNA, 19 bp, Mus musculus
  siRNA target sequence for 2410005K20Rik (NM_025546.1,398-416).
cggagttaacactatctct

SEQ ID NO: 658202 - DNA, 19 bp, Mus musculus
  siRNA target sequence for 2410005K20Rik (NM_025546.1,473-491).
ccgcctcctgggtagcttt

SEQ ID NO: 658203 - DNA, 19 bp, Mus musculus
  siRNA target sequence for 2410005K20Rik (NM_025546.1,483-501).
ggtagctttgaagtcttta

SEQ ID NO: 658204 - DNA, 19 bp, Mus musculus
  siRNA target sequence for 2410005K20Rik (NM_025546.1,484-502).
gtagctttgaagtctttat

SEQ ID NO: 658205 - DNA, 19 bp, Mus musculus
  siRNA target sequence for 2410005K20Rik (NM_025546.1,524-542).
gcatttgccctcacacata

SEQ ID NO: 658206 - DNA, 19 bp, Mus musculus
  siRNA target sequence for 2410005K20Rik (NM_025546.1,539-557).
catagggaggcatttttat

SEQ ID NO: 658207 - DNA, 19 bp, Mus musculus
  siRNA target sequence for 2410005K20Rik (NM_025546.1,599-617).
gaatctgtccaaagagatt

SEQ ID NO: 658208 - DNA, 19 bp, Mus musculus
  siRNA target sequence for 2410005K20Rik (NM_025546.1,614-632).
gattaaccgatgtatcaca

SEQ ID NO: 658209 - DNA, 19 bp, Mus musculus
  siRNA target sequence for 2410005K20Rik (NM_025546.1,633-651).
gggaccgtcttaaacatct

SEQ ID NO: 658210 - DNA, 19 bp, Mus musculus
  siRNA target sequence for 2410005K20Rik (NM_025546.1,668-686).
cagtacgatccgtattggt

SEQ ID NO: 658211 - DNA, 19 bp, Mus musculus
  siRNA target sequence for 2410005K20Rik (NM_025546.1,769-787).
ggcagagtgtgaaactgtt

SEQ ID NO: 658212 - DNA, 19 bp, Mus musculus
  siRNA target sequence for 2410005K20Rik (NM_025546.1,861-879).
gtttccctccgtagtttga

SEQ ID NO: 658213 - DNA, 19 bp, Mus musculus
  siRNA target sequence for 2410005K20Rik (NM_025546.1,959-977).
gaaggctacatctctttta

SEQ ID NO: 658214 - DNA, 19 bp, Mus musculus
  siRNA target sequence for 2410005K20Rik (NM_025546.1,1039-1057).
ccaacaaggcgcacaaaaa

SEQ ID NO: 658215 - DNA, 19 bp, Mus musculus
  siRNA target sequence for 2410005K20Rik (NM_025546.1,1048-1066).
cgcacaaaaagcagaaagt

SEQ ID NO: 658216 - DNA, 19 bp, Mus musculus
  siRNA target sequence for 2410005K20Rik (NM_025546.1,1189-1207).
gtacacctaagggtaagaa

SEQ ID NO: 658217 - DNA, 19 bp, Mus musculus
  siRNA target sequence for 2410005K20Rik (NM_025546.1,1194-1212).
cctaagggtaagaaaagga

SEQ ID NO: 658218 - DNA, 19 bp, Mus musculus
  siRNA target sequence for 3100001N19Rik (NM_025974.1,233-251).
gaagtatgtccgaaaagct

SEQ ID NO: 658219 - DNA, 19 bp, Mus musculus
  siRNA target sequence for 3100001N19Rik (NM_025974.1,253-271).
gggagaaggcggatatcaa

SEQ ID NO: 658220 - DNA, 19 bp, Mus musculus
  siRNA target sequence for 3100001N19Rik (NM_025974.1,255-273).
gagaaggcggatatcaata

SEQ ID NO: 658221 - DNA, 19 bp, Mus musculus
  siRNA target sequence for 3100001N19Rik (NM_025974.1,260-278).
ggcggatatcaatacgaaa

SEQ ID NO: 658222 - DNA, 19 bp, Mus musculus
  siRNA target sequence for 3100001N19Rik (NM_025974.1,261-279).
gcggatatcaatacgaaat

SEQ ID NO: 658223 - DNA, 19 bp, Mus musculus
  siRNA target sequence for 3100001N19Rik (NM_025974.1,337-355).
cagactttgatcgtttcaa

SEQ ID NO: 658224 - DNA, 19 bp, Mus musculus
  siRNA target sequence for 4833424P18Rik (NM_029017.1,48-66).
cagtctagtgggtatttgt

SEQ ID NO: 658225 - DNA, 19 bp, Mus musculus
  siRNA target sequence for 4833424P18Rik (NM_029017.1,92-110).
cagcttgttccctagtaaa

SEQ ID NO: 658226 - DNA, 19 bp, Mus musculus
  siRNA target sequence for 4833424P18Rik (NM_029017.1,132-150).
gggttgcaggtcttctctt

SEQ ID NO: 658227 - DNA, 19 bp, Mus musculus
  siRNA target sequence for 4833424P18Rik (NM_029017.1,143-161).
cttctcttagtttgttaca

SEQ ID NO: 658228 - DNA, 19 bp, Mus musculus
  siRNA target sequence for 4833424P18Rik (NM_029017.1,170-188).
caccacatgtcacatcttt

SEQ ID NO: 658229 - DNA, 19 bp, Mus musculus
  siRNA target sequence for 4833424P18Rik (NM_029017.1,205-223).
cttcataccacgttgtcaa

SEQ ID NO: 658230 - DNA, 19 bp, Mus musculus
  siRNA target sequence for 4833424P18Rik (NM_029017.1,312-330).
gaggaacaaaagtaacgaa

SEQ ID NO: 658231 - DNA, 19 bp, Mus musculus
  siRNA target sequence for 4833424P18Rik (NM_029017.1,318-336).
caaaagtaacgaagactta

SEQ ID NO: 658232 - DNA, 19 bp, Mus musculus
  siRNA target sequence for 4833424P18Rik (NM_029017.1,327-345).
cgaagacttacataagctt

SEQ ID NO: 658233 - DNA, 19 bp, Mus musculus
  siRNA target sequence for 4833424P18Rik (NM_029017.1,333-351).
cttacataagctttggtat

SEQ ID NO: 658234 - DNA, 19 bp, Mus musculus
  siRNA target sequence for 4833424P18Rik (NM_029017.1,425-443).
gtccggagcgcttagaaaa

SEQ ID NO: 658235 - DNA, 19 bp, Mus musculus
  siRNA target sequence for 4833424P18Rik (NM_029017.1,445-463).
gtcgttgattccatggata

SEQ ID NO: 658236 - DNA, 19 bp, Mus musculus
  siRNA target sequence for 4833424P18Rik (NM_029017.1,455-473).
ccatggataacgtagataa

SEQ ID NO: 658237 - DNA, 19 bp, Mus musculus
  siRNA target sequence for 4833424P18Rik (NM_029017.1,565-583).
cgaattgtctggcacaaat

SEQ ID NO: 658238 - DNA, 19 bp, Mus musculus
  siRNA target sequence for 4833424P18Rik (NM_029017.1,566-584).
gaattgtctggcacaaatt

SEQ ID NO: 658239 - DNA, 19 bp, Mus musculus
  siRNA target sequence for 4833424P18Rik (NM_029017.1,595-613).
cctataccttggtacctaa

SEQ ID NO: 658240 - DNA, 19 bp, Mus musculus
  siRNA target sequence for 4833424P18Rik (NM_029017.1,658-676).
gatcgctttatcagactaa

SEQ ID NO: 658241 - DNA, 19 bp, Mus musculus
  siRNA target sequence for 4833424P18Rik (NM_029017.1,661-679).
cgctttatcagactaagaa

SEQ ID NO: 658242 - DNA, 19 bp, Mus musculus
  siRNA target sequence for 4930517K11Rik (NM_026594.1,267-285).
gtcccattccacaatggat

SEQ ID NO: 658243 - DNA, 19 bp, Mus musculus
  siRNA target sequence for 4930517K11Rik (NM_026594.1,299-317).
ggcaataaaatcatgtaca

SEQ ID NO: 658244 - DNA, 19 bp, Mus musculus
  siRNA target sequence for 4930517K11Rik (NM_026594.1,300-318).
gcaataaaatcatgtacaa

SEQ ID NO: 658245 - DNA, 19 bp, Mus musculus
  siRNA target sequence for 4930517K11Rik (NM_026594.1,332-350).
cattggagacgaaccaaat

SEQ ID NO: 658246 - DNA, 19 bp, Mus musculus
  siRNA target sequence for 9930017A07Rik (NM_172564.1,258-276).
gccctgtgtccttactaca

SEQ ID NO: 658247 - DNA, 19 bp, Mus musculus
  siRNA target sequence for 9930017A07Rik (NM_172564.1,422-440).
ggatctggaatcttgcatt

SEQ ID NO: 658248 - DNA, 19 bp, Mus musculus
  siRNA target sequence for 9930017A07Rik (NM_172564.1,528-546).
gctgagtctaccaacagta

SEQ ID NO: 658249 - DNA, 19 bp, Mus musculus
  siRNA target sequence for 9930017A07Rik (NM_172564.1,529-547).
ctgagtctaccaacagtat

SEQ ID NO: 658250 - DNA, 19 bp, Mus musculus
  siRNA target sequence for 9930017A07Rik (NM_172564.1,569-587).
ggaacccgaagccttagat

SEQ ID NO: 658251 - DNA, 19 bp, Mus musculus
  siRNA target sequence for 9930017A07Rik (NM_172564.1,570-588).
gaacccgaagccttagata

SEQ ID NO: 658252 - DNA, 19 bp, Mus musculus
  siRNA target sequence for 9930017A07Rik (NM_172564.1,573-591).
cccgaagccttagatataa

SEQ ID NO: 658253 - DNA, 19 bp, Mus musculus
  siRNA target sequence for 9930017A07Rik (NM_172564.1,579-597).
gccttagatataaagtaca

SEQ ID NO: 658254 - DNA, 19 bp, Mus musculus
  siRNA target sequence for 9930017A07Rik (NM_172564.1,580-598).
ccttagatataaagtacat

SEQ ID NO: 658255 - DNA, 19 bp, Mus musculus
  siRNA target sequence for 9930017A07Rik (NM_172564.1,605-623).
gacctccaccagatcaaga

SEQ ID NO: 658256 - DNA, 19 bp, Mus musculus
  siRNA target sequence for 9930017A07Rik (NM_172564.1,656-674).
gtgtgccaccccaccattt

SEQ ID NO: 658257 - DNA, 19 bp, Mus musculus
  siRNA target sequence for 9930017A07Rik (NM_172564.1,899-917).
gggcagcagggtctctata

SEQ ID NO: 658258 - DNA, 19 bp, Mus musculus
  siRNA target sequence for 9930017A07Rik (NM_172564.1,901-919).
gcagcagggtctctatact

SEQ ID NO: 658259 - DNA, 19 bp, Mus musculus
  siRNA target sequence for 9930017A07Rik (NM_172564.1,995-1013).
ctatccgtcatcttctaga

SEQ ID NO: 658260 - DNA, 19 bp, Mus musculus
  siRNA target sequence for 9930017A07Rik (NM_172564.1,1290-1308).
gtccagtctagggttacat

SEQ ID NO: 658261 - DNA, 19 bp, Mus musculus
  siRNA target sequence for 9930017A07Rik (NM_172564.1,1292-1310).
ccagtctagggttacatct

SEQ ID NO: 658262 - DNA, 19 bp, Mus musculus
  siRNA target sequence for 9930017A07Rik (NM_172564.1,1320-1338).
ctctgtcaagccattaaga

SEQ ID NO: 658263 - DNA, 19 bp, Mus musculus
  siRNA target sequence for 9930017A07Rik (NM_172564.1,1346-1364).
caagactctgccagatgtt

SEQ ID NO: 658264 - DNA, 19 bp, Mus musculus
  siRNA target sequence for 9930017A07Rik (NM_172564.1,1422-1440).
gtgatggacacatcaaagt

SEQ ID NO: 658265 - DNA, 19 bp, Mus musculus
  siRNA target sequence for 9930017A07Rik (NM_172564.1,1432-1450).
catcaaagtattggtttaa

SEQ ID NO: 658266 - DNA, 19 bp, Mus musculus
  siRNA target sequence for 9930017A07Rik (NM_172564.1,1648-1666).
ccaaaggagtacatctgaa

SEQ ID NO: 658267 - DNA, 19 bp, Mus musculus
  siRNA target sequence for 9930017A07Rik (NM_172564.1,1952-1970).
cactgtcgtccacttcaaa

SEQ ID NO: 658268 - DNA, 19 bp, Mus musculus
  siRNA target sequence for 9930017A07Rik (NM_172564.1,1954-1972).
ctgtcgtccacttcaaagt

SEQ ID NO: 658269 - DNA, 19 bp, Mus musculus
  siRNA target sequence for 9930017A07Rik (NM_172564.1,1975-1993).
ctgaacagggcattactct

SEQ ID NO: 658270 - DNA, 19 bp, Mus musculus
  siRNA target sequence for AI591529 (NM_133841.1,549-567).
ctgctgctatactgaatca

SEQ ID NO: 658271 - DNA, 19 bp, Mus musculus
  siRNA target sequence for AI591529 (NM_133841.1,702-720).
ggccacagccgatatctta

SEQ ID NO: 658272 - DNA, 19 bp, Mus musculus
  siRNA target sequence for AI591529 (NM_133841.1,707-725).
cagccgatatcttatacga

SEQ ID NO: 658273 - DNA, 19 bp, Mus musculus
  siRNA target sequence for D11Ertd175e (NM_026631.1,103-121).
cgaggagcgcacgtacaaa

SEQ ID NO: 658274 - DNA, 19 bp, Mus musculus
  siRNA target sequence for D11Ertd175e (NM_026631.1,234-252).
gggtgaaggaggttcagaa

SEQ ID NO: 658275 - DNA, 19 bp, Mus musculus
  siRNA target sequence for D11Ertd175e (NM_026631.1,242-260).
gaggttcagaaatttgtca

SEQ ID NO: 658276 - DNA, 19 bp, Mus musculus
  siRNA target sequence for D11Ertd175e (NM_026631.1,269-287).
gagaaagggatcatggttt

SEQ ID NO: 658277 - DNA, 19 bp, Mus musculus
  siRNA target sequence for D11Ertd175e (NM_026631.1,430-448).
ggtgaagccccatgaagaa

SEQ ID NO: 658278 - DNA, 19 bp, Mus musculus
  siRNA target sequence for Dap3 (NM_022994.1,564-582).
ctgccatgctgttcatttt

SEQ ID NO: 658279 - DNA, 19 bp, Mus musculus
  siRNA target sequence for Dap3 (NM_022994.1,625-643).
catctttgggtaaaaaact

SEQ ID NO: 658280 - DNA, 19 bp, Mus musculus
  siRNA target sequence for Dap3 (NM_022994.1,669-687).
caacaaacagcgctttgat

SEQ ID NO: 658281 - DNA, 19 bp, Mus musculus
  siRNA target sequence for Dap3 (NM_022994.1,738-756).
gcgcttcctgagtcagata

SEQ ID NO: 658282 - DNA, 19 bp, Mus musculus
  siRNA target sequence for Dap3 (NM_022994.1,739-757).
cgcttcctgagtcagataa

SEQ ID NO: 658283 - DNA, 19 bp, Mus musculus
  siRNA target sequence for Dap3 (NM_022994.1,749-767).
gtcagataaaagttcaaga

SEQ ID NO: 658284 - DNA, 19 bp, Mus musculus
  siRNA target sequence for Dap3 (NM_022994.1,760-778).
gttcaagagaagtatgttt

SEQ ID NO: 658285 - DNA, 19 bp, Mus musculus
  siRNA target sequence for Dap3 (NM_022994.1,766-784).
gagaagtatgtttggaata

SEQ ID NO: 658286 - DNA, 19 bp, Mus musculus
  siRNA target sequence for Dap3 (NM_022994.1,1011-1029).
ctcccttgtccacaatcta

SEQ ID NO: 658287 - DNA, 19 bp, Mus musculus
  siRNA target sequence for Dap3 (NM_022994.1,1179-1197).
cctcattcccaactataat

SEQ ID NO: 658288 - DNA, 19 bp, Mus musculus
  siRNA target sequence for Dap3 (NM_022994.1,1198-1216).
ccaaaggagtttgaaagtt

SEQ ID NO: 658289 - DNA, 19 bp, Mus musculus
  siRNA target sequence for Dap3 (NM_022994.1,1236-1254).
gaacaactggcttcaacat

SEQ ID NO: 658290 - DNA, 19 bp, Mus musculus
  siRNA target sequence for Dap3 (NM_022994.1,1288-1306).
ctgaggttcctgagtaact

SEQ ID NO: 658291 - DNA, 19 bp, Mus musculus
  siRNA target sequence for E030011D16Rik (NM_175001.1,92-110).
gcagacgctgcgggtttta

SEQ ID NO: 658292 - DNA, 19 bp, Mus musculus
  siRNA target sequence for E030011D16Rik (NM_175001.1,130-148).
cgagtgcttctcttgacat

SEQ ID NO: 658293 - DNA, 19 bp, Mus musculus
  siRNA target sequence for E030011D16Rik (NM_175001.1,210-228).
cggagaccagcggaaattt

SEQ ID NO: 658294 - DNA, 19 bp, Mus musculus
  siRNA target sequence for E030011D16Rik (NM_175001.1,211-229).
ggagaccagcggaaattta

SEQ ID NO: 658295 - DNA, 19 bp, Mus musculus
  siRNA target sequence for E030011D16Rik (NM_175001.1,230-248).
ccattgtcggagacaaata

SEQ ID NO: 658296 - DNA, 19 bp, Mus musculus
  siRNA target sequence for E030011D16Rik (NM_175001.1,231-249).
cattgtcggagacaaataa

SEQ ID NO: 658297 - DNA, 19 bp, Mus musculus
  siRNA target sequence for E030011D16Rik (NM_175001.1,235-253).
gtcggagacaaataaaata

SEQ ID NO: 658298 - DNA, 19 bp, Mus musculus
  siRNA target sequence for E030011D16Rik (NM_175001.1,237-255).
cggagacaaataaaataca

SEQ ID NO: 658299 - DNA, 19 bp, Mus musculus
  siRNA target sequence for E030011D16Rik (NM_175001.1,272-290).
gtacctggcaaagatgata

SEQ ID NO: 658300 - DNA, 19 bp, Mus musculus
  siRNA target sequence for E030011D16Rik (NM_175001.1,319-337).
cgcagctggagttcaatga

SEQ ID NO: 658301 - DNA, 19 bp, Mus musculus
  siRNA target sequence for E030011D16Rik (NM_175001.1,344-362).
gggggctcaaatcattaaa

SEQ ID NO: 658302 - DNA, 19 bp, Mus musculus
  siRNA target sequence for E030011D16Rik (NM_175001.1,389-407).
ggcagtgagagaccataat

SEQ ID NO: 658303 - DNA, 19 bp, Mus musculus
  siRNA target sequence for E030011D16Rik (NM_175001.1,391-409).
cagtgagagaccataatgt

SEQ ID NO: 658304 - DNA, 19 bp, Mus musculus
  siRNA target sequence for E030011D16Rik (NM_175001.1,402-420).
cataatgtggaattcagat

SEQ ID NO: 658305 - DNA, 19 bp, Mus musculus
  siRNA target sequence for E030011D16Rik (NM_175001.1,416-434).
cagatccaacttacacata

SEQ ID NO: 658306 - DNA, 19 bp, Mus musculus
  siRNA target sequence for E030011D16Rik (NM_175001.1,467-485).
gaagcgcatccgttaccat

SEQ ID NO: 658307 - DNA, 19 bp, Mus musculus
  siRNA target sequence for E030011D16Rik (NM_175001.1,490-508).
gaggtcgctttggcattat

SEQ ID NO: 658308 - DNA, 19 bp, Mus musculus
  siRNA target sequence for E030011D16Rik (NM_175001.1,493-511).
gtcgctttggcattatgga

SEQ ID NO: 658309 - DNA, 19 bp, Mus musculus
  siRNA target sequence for E030011D16Rik (NM_175001.1,518-536).
ctattgccactattttgta

SEQ ID NO: 658310 - DNA, 19 bp, Mus musculus
  siRNA target sequence for E030011D16Rik (NM_175001.1,588-606).
gaccacgccaaggactata

SEQ ID NO: 658311 - DNA, 19 bp, Mus musculus
  siRNA target sequence for E030011D16Rik (NM_175001.1,625-643).
ggaccatcatccatactct

SEQ ID NO: 658312 - DNA, 19 bp, Mus musculus
  siRNA target sequence for E030011D16Rik (NM_175001.1,626-644).
gaccatcatccatactcta

SEQ ID NO: 658313 - DNA, 19 bp, Mus musculus
  siRNA target sequence for Gadd45a (NM_007836.1,254-272).
cggagtcagcgcaccatta

SEQ ID NO: 658314 - DNA, 19 bp, Mus musculus
  siRNA target sequence for Gadd45a (NM_007836.1,411-429).
gcgagaacgacatcaacat

SEQ ID NO: 658315 - DNA, 19 bp, Mus musculus
  siRNA target sequence for Gadd45a (NM_007836.1,541-559).
ggtgacgaacccacattca

SEQ ID NO: 658316 - DNA, 19 bp, Mus musculus
  siRNA target sequence for Gadd45a (NM_007836.1,575-593).
cctgccttaagtcaactta

SEQ ID NO: 658317 - DNA, 19 bp, Mus musculus
  siRNA target sequence for Gadd45a (NM_007836.1,576-594).
ctgccttaagtcaacttat

SEQ ID NO: 658318 - DNA, 19 bp, Mus musculus
  siRNA target sequence for Gadd45a (NM_007836.1,578-596).
gccttaagtcaacttattt

SEQ ID NO: 658319 - DNA, 19 bp, Mus musculus
  siRNA target sequence for Gadd45a (NM_007836.1,630-648).
gggtgcccgtgattaatct

SEQ ID NO: 658320 - DNA, 19 bp, Mus musculus
  siRNA target sequence for Gadd45b (NM_008655.1,251-269).
gcgacaacgcggttcagaa

SEQ ID NO: 658321 - DNA, 19 bp, Mus musculus
  siRNA target sequence for Gadd45b (NM_008655.1,586-604).
ctggtcacgaactgtcata

SEQ ID NO: 658322 - DNA, 19 bp, Mus musculus
  siRNA target sequence for Gadd45b (NM_008655.1,588-606).
ggtcacgaactgtcataca

SEQ ID NO: 658323 - DNA, 19 bp, Mus musculus
  siRNA target sequence for Gadd45b (NM_008655.1,657-675).
gagcagaggcaataaccaa

SEQ ID NO: 658324 - DNA, 19 bp, Mus musculus
  siRNA target sequence for Gadd45b (NM_008655.1,673-691).
caatgggtcccctatatct

SEQ ID NO: 658325 - DNA, 19 bp, Mus musculus
  siRNA target sequence for Gadd45g (NM_011817.1,230-248).
ccgccaaagtcctgaatgt

SEQ ID NO: 658326 - DNA, 19 bp, Mus musculus
  siRNA target sequence for Gadd45g (NM_011817.1,350-368).
gtgagaacgacattgatat

SEQ ID NO: 658327 - DNA, 19 bp, Mus musculus
  siRNA target sequence for Gadd45g (NM_011817.1,434-452).
cgggagacctgcattgcat

SEQ ID NO: 658328 - DNA, 19 bp, Mus musculus
  siRNA target sequence for Gadd45g (NM_011817.1,445-463).
cattgcatcctcatttcga

SEQ ID NO: 658329 - DNA, 19 bp, Mus musculus
  siRNA target sequence for Gadd45g (NM_011817.1,453-471).
cctcatttcgaatcctaat

SEQ ID NO: 658330 - DNA, 19 bp, Mus musculus
  siRNA target sequence for Gdap3 (NM_010270.1,173-191).
ccttggccaagaagaaaga

SEQ ID NO: 658331 - DNA, 19 bp, Mus musculus
  siRNA target sequence for Gdap3 (NM_010270.1,237-255).
gggcaacctccgtttcctt

SEQ ID NO: 658332 - DNA, 19 bp, Mus musculus
  siRNA target sequence for Gdap3 (NM_010270.1,247-265).
cgtttccttggcctttaca

SEQ ID NO: 658333 - DNA, 19 bp, Mus musculus
  siRNA target sequence for Hus1b (NM_153072.1,21-39).
caccagcaagcgttttata

SEQ ID NO: 658334 - DNA, 19 bp, Mus musculus
  siRNA target sequence for Hus1b (NM_153072.1,203-221).
gtgcctcgcaggagttcaa

SEQ ID NO: 658335 - DNA, 19 bp, Mus musculus
  siRNA target sequence for Hus1b (NM_153072.1,371-389).
gtgctgtggtccacgattt

SEQ ID NO: 658336 - DNA, 19 bp, Mus musculus
  siRNA target sequence for Hus1b (NM_153072.1,449-467).
gctctgatgtgagtgttta

SEQ ID NO: 658337 - DNA, 19 bp, Mus musculus
  siRNA target sequence for Hus1b (NM_153072.1,450-468).
ctctgatgtgagtgtttat

SEQ ID NO: 658338 - DNA, 19 bp, Mus musculus
  siRNA target sequence for Hus1b (NM_153072.1,547-565).
ctcaatggcagaatgaact

SEQ ID NO: 658339 - DNA, 19 bp, Mus musculus
  siRNA target sequence for Hus1b (NM_153072.1,584-602).
gagtgactattaaaagcta

SEQ ID NO: 658340 - DNA, 19 bp, Mus musculus
  siRNA target sequence for Hus1b (NM_153072.1,675-693).
gcaagtgcgggtggataat

SEQ ID NO: 658341 - DNA, 19 bp, Mus musculus
  siRNA target sequence for Hus1b (NM_153072.1,676-694).
caagtgcgggtggataata

SEQ ID NO: 658342 - DNA, 19 bp, Mus musculus
  siRNA target sequence for Hus1b (NM_153072.1,679-697).
gtgcgggtggataatagga

SEQ ID NO: 658343 - DNA, 19 bp, Mus musculus
  siRNA target sequence for Hus1b (NM_153072.1,733-751).
cccacaatggccttatgta

SEQ ID NO: 658344 - DNA, 19 bp, Mus musculus
  siRNA target sequence for Hus1b (NM_153072.1,734-752).
ccacaatggccttatgtaa

SEQ ID NO: 658345 - DNA, 19 bp, Mus musculus
  siRNA target sequence for Hus1b (NM_153072.1,735-753).
cacaatggccttatgtaat

SEQ ID NO: 658346 - DNA, 19 bp, Mus musculus
  siRNA target sequence for Hus1b (NM_153072.1,786-804).
ggttcatgaagatatttct

SEQ ID NO: 658347 - DNA, 19 bp, Mus musculus
  siRNA target sequence for Lactb (NM_030717.1,465-483).
catcgtggttggagtttct

SEQ ID NO: 658348 - DNA, 19 bp, Mus musculus
  siRNA target sequence for Lactb (NM_030717.1,476-494).
gagtttctgtagatggaaa

SEQ ID NO: 658349 - DNA, 19 bp, Mus musculus
  siRNA target sequence for Lactb (NM_030717.1,554-572).
cagaaacggtcatgagaat

SEQ ID NO: 658350 - DNA, 19 bp, Mus musculus
  siRNA target sequence for Lactb (NM_030717.1,707-725).
ctgtcacaacaagattact

SEQ ID NO: 658351 - DNA, 19 bp, Mus musculus
  siRNA target sequence for Lactb (NM_030717.1,740-758).
gtggaattcgtcattatga

SEQ ID NO: 658352 - DNA, 19 bp, Mus musculus
  siRNA target sequence for Lactb (NM_030717.1,742-760).
ggaattcgtcattatgaaa

SEQ ID NO: 658353 - DNA, 19 bp, Mus musculus
  siRNA target sequence for Lactb (NM_030717.1,743-761).
gaattcgtcattatgaaaa

SEQ ID NO: 658354 - DNA, 19 bp, Mus musculus
  siRNA target sequence for Lactb (NM_030717.1,791-809).
cttataaagccctgaagat

SEQ ID NO: 658355 - DNA, 19 bp, Mus musculus
  siRNA target sequence for Lactb (NM_030717.1,966-984).
cgaacaaggcgaattgtat

SEQ ID NO: 658356 - DNA, 19 bp, Mus musculus
  siRNA target sequence for Lactb (NM_030717.1,967-985).
gaacaaggcgaattgtatt

SEQ ID NO: 658357 - DNA, 19 bp, Mus musculus
  siRNA target sequence for Lactb (NM_030717.1,975-993).
cgaattgtatttgaaagaa

SEQ ID NO: 658358 - DNA, 19 bp, Mus musculus
  siRNA target sequence for Lactb (NM_030717.1,1007-1025).
caattgaatcactaagatt

SEQ ID NO: 658359 - DNA, 19 bp, Mus musculus
  siRNA target sequence for Lactb (NM_030717.1,1054-1072).
cctggtagtcagtttttgt

SEQ ID NO: 658360 - DNA, 19 bp, Mus musculus
  siRNA target sequence for Lactb (NM_030717.1,1055-1073).
ctggtagtcagtttttgta

SEQ ID NO: 658361 - DNA, 19 bp, Mus musculus
  siRNA target sequence for Lactb (NM_030717.1,1065-1083).
gtttttgtattcaacgttt

SEQ ID NO: 658362 - DNA, 19 bp, Mus musculus
  siRNA target sequence for Lactb (NM_030717.1,1076-1094).
caacgtttggctatactct

SEQ ID NO: 658363 - DNA, 19 bp, Mus musculus
  siRNA target sequence for Lactb (NM_030717.1,1191-1209).
ggaaaacgagccagtgatt

SEQ ID NO: 658364 - DNA, 19 bp, Mus musculus
  siRNA target sequence for Lactb (NM_030717.1,1192-1210).
gaaaacgagccagtgattt

SEQ ID NO: 658365 - DNA, 19 bp, Mus musculus
  siRNA target sequence for Lactb (NM_030717.1,1198-1216).
gagccagtgatttacaaca

SEQ ID NO: 658366 - DNA, 19 bp, Mus musculus
  siRNA target sequence for Lactb (NM_030717.1,1220-1238).
caagattttacgtgtacaa

SEQ ID NO: 658367 - DNA, 19 bp, Mus musculus
  siRNA target sequence for Lactb (NM_030717.1,1223-1241).
gattttacgtgtacaataa

SEQ ID NO: 658368 - DNA, 19 bp, Mus musculus
  siRNA target sequence for Lactb (NM_030717.1,1269-1287).
cgtggataactcctataaa

SEQ ID NO: 658369 - DNA, 19 bp, Mus musculus
  siRNA target sequence for Lactb (NM_030717.1,1317-1335).
gggtgacctcctgaaattt

SEQ ID NO: 658370 - DNA, 19 bp, Mus musculus
  siRNA target sequence for Lactb (NM_030717.1,1493-1511).
cgtggggtgtggtagagaa

SEQ ID NO: 658371 - DNA, 19 bp, Mus musculus
  siRNA target sequence for Lactb (NM_030717.1,1543-1561).
cggcactacgcctcacata

SEQ ID NO: 658372 - DNA, 19 bp, Mus musculus
  siRNA target sequence for Lactb (NM_030717.1,1545-1563).
gcactacgcctcacatact

SEQ ID NO: 658373 - DNA, 19 bp, Mus musculus
  siRNA target sequence for Lactb (NM_030717.1,1614-1632).
ggactcagaggccgtaaat

SEQ ID NO: 658374 - DNA, 19 bp, Mus musculus
  siRNA target sequence for Lactb (NM_030717.1,1615-1633).
gactcagaggccgtaaata

SEQ ID NO: 658375 - DNA, 19 bp, Mus musculus
  siRNA target sequence for Lactb (NM_030717.1,1619-1637).
cagaggccgtaaataacaa

SEQ ID NO: 658376 - DNA, 19 bp, Mus musculus
  siRNA target sequence for Lactb (NM_030717.1,1643-1661).
ccccacgaggaataatcgt

SEQ ID NO: 658377 - DNA, 19 bp, Mus musculus
  siRNA target sequence for Lactb (NM_030717.1,1649-1667).
gaggaataatcgtctctat

SEQ ID NO: 658378 - DNA, 19 bp, Mus musculus
  siRNA target sequence for Lactb (NM_030717.1,1651-1669).
ggaataatcgtctctatca

SEQ ID NO: 658379 - DNA, 19 bp, Mus musculus
  siRNA target sequence for Lactb (NM_030717.1,1652-1670).
gaataatcgtctctatcat

SEQ ID NO: 658380 - DNA, 19 bp, Mus musculus
  siRNA target sequence for Lactb (NM_030717.1,1681-1699).
cagtctgtggggctcaata

SEQ ID NO: 658381 - DNA, 19 bp, Mus musculus
  siRNA target sequence for Lactb (NM_030717.1,1710-1728).
gaagatcgctctggaattt

SEQ ID NO: 658382 - DNA, 19 bp, Mus musculus
  siRNA target sequence for Lactb (NM_030717.1,1713-1731).
gatcgctctggaatttgat

SEQ ID NO: 658383 - DNA, 19 bp, Mus musculus
  siRNA target sequence for Lactb (NM_030717.1,1716-1734).
cgctctggaatttgataaa

SEQ ID NO: 658384 - DNA, 19 bp, Mus musculus
  siRNA target sequence for Mrp63 (NM_026401.1,165-183).
gcgtaccgtgtctttccaa

SEQ ID NO: 658385 - DNA, 19 bp, Mus musculus
  siRNA target sequence for Mrp63 (NM_026401.1,238-256).
ctcagcatgccctacatga

SEQ ID NO: 658386 - DNA, 19 bp, Mus musculus
  siRNA target sequence for Mrp63 (NM_026401.1,339-357).
ccctaagcatagatacatt

SEQ ID NO: 658387 - DNA, 19 bp, Mus musculus
  siRNA target sequence for Mrpl11 (NM_025553.1,99-117).
ccactcggaccctcaagaa

SEQ ID NO: 658388 - DNA, 19 bp, Mus musculus
  siRNA target sequence for Mrpl11 (NM_025553.1,151-169).
gcgagcaggccaagctatt

SEQ ID NO: 658389 - DNA, 19 bp, Mus musculus
  siRNA target sequence for Mrpl11 (NM_025553.1,198-216).
gtcagcgaggtgtctctat

SEQ ID NO: 658390 - DNA, 19 bp, Mus musculus
  siRNA target sequence for Mrpl11 (NM_025553.1,200-218).
cagcgaggtgtctctatca

SEQ ID NO: 658391 - DNA, 19 bp, Mus musculus
  siRNA target sequence for Mrpl11 (NM_025553.1,267-285).
gcattcccctgcctacaaa

SEQ ID NO: 658392 - DNA, 19 bp, Mus musculus
  siRNA target sequence for Mrpl11 (NM_025553.1,268-286).
cattcccctgcctacaaaa

SEQ ID NO: 658393 - DNA, 19 bp, Mus musculus
  siRNA target sequence for Mrpl11 (NM_025553.1,275-293).
ctgcctacaaaaattttta

SEQ ID NO: 658394 - DNA, 19 bp, Mus musculus
  siRNA target sequence for Mrpl11 (NM_025553.1,277-295).
gcctacaaaaatttttata

SEQ ID NO: 658395 - DNA, 19 bp, Mus musculus
  siRNA target sequence for Mrpl11 (NM_025553.1,327-345).
ggcagcccactgtttctta

SEQ ID NO: 658396 - DNA, 19 bp, Mus musculus
  siRNA target sequence for Mrpl11 (NM_025553.1,417-435).
gtttgaagcacgtatatga

SEQ ID NO: 658397 - DNA, 19 bp, Mus musculus
  siRNA target sequence for Mrpl11 (NM_025553.1,421-439).
gaagcacgtatatgagatt

SEQ ID NO: 658398 - DNA, 19 bp, Mus musculus
  siRNA target sequence for Mrpl11 (NM_025553.1,465-483).
cttttgccatgcaagatgt

SEQ ID NO: 658399 - DNA, 19 bp, Mus musculus
  siRNA target sequence for Mrpl11 (NM_025553.1,583-601).
gaaggaacgagctgtgttt

SEQ ID NO: 658400 - DNA, 19 bp, Mus musculus
  siRNA target sequence for Mrpl12 (NM_027204.2,91-109).
gccttgccaggcaacagat

SEQ ID NO: 658401 - DNA, 19 bp, Mus musculus
  siRNA target sequence for Mrpl12 (NM_027204.2,533-551).
cctgccccaggaaatcaaa

SEQ ID NO: 658402 - DNA, 19 bp, Mus musculus
  siRNA target sequence for Mrpl12 (NM_027204.2,567-585).
gctgaggccgagaagatca

SEQ ID NO: 658403 - DNA, 19 bp, Mus musculus
  siRNA target sequence for Mrpl13 (NM_026759.2,72-90).
gctcgaatgtggtatctct

SEQ ID NO: 658404 - DNA, 19 bp, Mus musculus
  siRNA target sequence for Mrpl13 (NM_026759.2,104-122).
gcagccccctggcaaactt

SEQ ID NO: 658405 - DNA, 19 bp, Mus musculus
  siRNA target sequence for Mrpl13 (NM_026759.2,116-134).
caaacttgcggttatagca

SEQ ID NO: 658406 - DNA, 19 bp, Mus musculus
  siRNA target sequence for Mrpl13 (NM_026759.2,137-155).
caacaaactgcaaggatta

SEQ ID NO: 658407 - DNA, 19 bp, Mus musculus
  siRNA target sequence for Mrpl13 (NM_026759.2,140-158).
caaactgcaaggattaaat

SEQ ID NO: 658408 - DNA, 19 bp, Mus musculus
  siRNA target sequence for Mrpl13 (NM_026759.2,192-210).
gaccacgttgtcataataa

SEQ ID NO: 658409 - DNA, 19 bp, Mus musculus
  siRNA target sequence for Mrpl13 (NM_026759.2,195-213).
cacgttgtcataataaaca

SEQ ID NO: 658410 - DNA, 19 bp, Mus musculus
  siRNA target sequence for Mrpl13 (NM_026759.2,197-215).
cgttgtcataataaacaca

SEQ ID NO: 658411 - DNA, 19 bp, Mus musculus
  siRNA target sequence for Mrpl13 (NM_026759.2,203-221).
cataataaacacaagacat

SEQ ID NO: 658412 - DNA, 19 bp, Mus musculus
  siRNA target sequence for Mrpl13 (NM_026759.2,278-296).
cccaggcggctttagacaa

SEQ ID NO: 658413 - DNA, 19 bp, Mus musculus
  siRNA target sequence for Mrpl13 (NM_026759.2,282-300).
ggcggctttagacaagtaa

SEQ ID NO: 658414 - DNA, 19 bp, Mus musculus
  siRNA target sequence for Mrpl13 (NM_026759.2,324-342).
gaccccgtggcgattgtga

SEQ ID NO: 658415 - DNA, 19 bp, Mus musculus
  siRNA target sequence for Mrpl13 (NM_026759.2,326-344).
ccccgtggcgattgtgaaa

SEQ ID NO: 658416 - DNA, 19 bp, Mus musculus
  siRNA target sequence for Mrpl13 (NM_026759.2,327-345).
cccgtggcgattgtgaaat

SEQ ID NO: 658417 - DNA, 19 bp, Mus musculus
  siRNA target sequence for Mrpl13 (NM_026759.2,328-346).
ccgtggcgattgtgaaatt

SEQ ID NO: 658418 - DNA, 19 bp, Mus musculus
  siRNA target sequence for Mrpl13 (NM_026759.2,420-438).
gaggatattccggaagata

SEQ ID NO: 658419 - DNA, 19 bp, Mus musculus
  siRNA target sequence for Mrpl13 (NM_026759.2,422-440).
ggatattccggaagatatt

SEQ ID NO: 658420 - DNA, 19 bp, Mus musculus
  siRNA target sequence for Mrpl13 (NM_026759.2,429-447).
ccggaagatattcttaaga

SEQ ID NO: 658421 - DNA, 19 bp, Mus musculus
  siRNA target sequence for Mrpl13 (NM_026759.2,430-448).
cggaagatattcttaagaa

SEQ ID NO: 658422 - DNA, 19 bp, Mus musculus
  siRNA target sequence for Mrpl13 (NM_026759.2,536-554).
gtggactccacctgatgat

SEQ ID NO: 658423 - DNA, 19 bp, Mus musculus
  siRNA target sequence for Mrpl13 (NM_026759.2,539-557).
gactccacctgatgatttt

SEQ ID NO: 658424 - DNA, 19 bp, Mus musculus
  siRNA target sequence for Mrpl15 (NM_025300.2,186-204).
gtgtggcagaggccataaa

SEQ ID NO: 658425 - DNA, 19 bp, Mus musculus
  siRNA target sequence for Mrpl15 (NM_025300.2,247-265).
ggagggcagactccatttt

SEQ ID NO: 658426 - DNA, 19 bp, Mus musculus
  siRNA target sequence for Mrpl15 (NM_025300.2,248-266).
gagggcagactccatttta

SEQ ID NO: 658427 - DNA, 19 bp, Mus musculus
  siRNA target sequence for Mrpl15 (NM_025300.2,267-285).
catacgaatcccaaaatat

SEQ ID NO: 658428 - DNA, 19 bp, Mus musculus
  siRNA target sequence for Mrpl15 (NM_025300.2,271-289).
cgaatcccaaaatatggat

SEQ ID NO: 658429 - DNA, 19 bp, Mus musculus
  siRNA target sequence for Mrpl15 (NM_025300.2,272-290).
gaatcccaaaatatggatt

SEQ ID NO: 658430 - DNA, 19 bp, Mus musculus
  siRNA target sequence for Mrpl15 (NM_025300.2,341-359).
gactacagtatctcattga

SEQ ID NO: 658431 - DNA, 19 bp, Mus musculus
  siRNA target sequence for Mrpl15 (NM_025300.2,348-366).
gtatctcattgatttaggt

SEQ ID NO: 658432 - DNA, 19 bp, Mus musculus
  siRNA target sequence for Mrpl15 (NM_025300.2,432-450).
gccgcttaagagggattat

SEQ ID NO: 658433 - DNA, 19 bp, Mus musculus
  siRNA target sequence for Mrpl15 (NM_025300.2,435-453).
gcttaagagggattatgga

SEQ ID NO: 658434 - DNA, 19 bp, Mus musculus
  siRNA target sequence for Mrpl15 (NM_025300.2,466-484).
gaagagggtgctgatactt

SEQ ID NO: 658435 - DNA, 19 bp, Mus musculus
  siRNA target sequence for Mrpl15 (NM_025300.2,471-489).
gggtgctgatacttttcaa

SEQ ID NO: 658436 - DNA, 19 bp, Mus musculus
  siRNA target sequence for Mrpl15 (NM_025300.2,587-605).
gaagtctagggcacttgat

SEQ ID NO: 658437 - DNA, 19 bp, Mus musculus
  siRNA target sequence for Mrpl15 (NM_025300.2,625-643).
ggattttcggcaagatact

SEQ ID NO: 658438 - DNA, 19 bp, Mus musculus
  siRNA target sequence for Mrpl15 (NM_025300.2,632-650).
cggcaagatactcaataca

SEQ ID NO: 658439 - DNA, 19 bp, Mus musculus
  siRNA target sequence for Mrpl15 (NM_025300.2,635-653).
caagatactcaatacacat

SEQ ID NO: 658440 - DNA, 19 bp, Mus musculus
  siRNA target sequence for Mrpl16 (NM_025606.2,89-107).
ctcctgcggatgcactttt

SEQ ID NO: 658441 - DNA, 19 bp, Mus musculus
  siRNA target sequence for Mrpl16 (NM_025606.2,91-109).
cctgcggatgcacttttca

SEQ ID NO: 658442 - DNA, 19 bp, Mus musculus
  siRNA target sequence for Mrpl16 (NM_025606.2,95-113).
cggatgcacttttcagatt

SEQ ID NO: 658443 - DNA, 19 bp, Mus musculus
  siRNA target sequence for Mrpl16 (NM_025606.2,97-115).
gatgcacttttcagattct

SEQ ID NO: 658444 - DNA, 19 bp, Mus musculus
  siRNA target sequence for Mrpl16 (NM_025606.2,158-176).
ccagttccaacttttgaaa

SEQ ID NO: 658445 - DNA, 19 bp, Mus musculus
  siRNA target sequence for Mrpl16 (NM_025606.2,188-206).
cctgaaaggtccaagctta

SEQ ID NO: 658446 - DNA, 19 bp, Mus musculus
  siRNA target sequence for Mrpl16 (NM_025606.2,189-207).
ctgaaaggtccaagcttaa

SEQ ID NO: 658447 - DNA, 19 bp, Mus musculus
  siRNA target sequence for Mrpl16 (NM_025606.2,191-209).
gaaaggtccaagcttaaat

SEQ ID NO: 658448 - DNA, 19 bp, Mus musculus
  siRNA target sequence for Mrpl16 (NM_025606.2,195-213).
ggtccaagcttaaatttgt

SEQ ID NO: 658449 - DNA, 19 bp, Mus musculus
  siRNA target sequence for Mrpl16 (NM_025606.2,223-241).
cccacttgtgccaaaagta

SEQ ID NO: 658450 - DNA, 19 bp, Mus musculus
  siRNA target sequence for Mrpl16 (NM_025606.2,246-264).
gagaacctaaaaatttgaa

SEQ ID NO: 658451 - DNA, 19 bp, Mus musculus
  siRNA target sequence for Mrpl16 (NM_025606.2,268-286).
catacgagggccttcaact

SEQ ID NO: 658452 - DNA, 19 bp, Mus musculus
  siRNA target sequence for Mrpl16 (NM_025606.2,325-343).
ggcacttggcggtggttat

SEQ ID NO: 658453 - DNA, 19 bp, Mus musculus
  siRNA target sequence for Mrpl16 (NM_025606.2,327-345).
cacttggcggtggttatct

SEQ ID NO: 658454 - DNA, 19 bp, Mus musculus
  siRNA target sequence for Mrpl16 (NM_025606.2,347-365).
cattggggccattttgaaa

SEQ ID NO: 658455 - DNA, 19 bp, Mus musculus
  siRNA target sequence for Mrpl16 (NM_025606.2,378-396).
caatcaaccgctttatgga

SEQ ID NO: 658456 - DNA, 19 bp, Mus musculus
  siRNA target sequence for Mrpl16 (NM_025606.2,520-538).
gactggctgcctagtagta

SEQ ID NO: 658457 - DNA, 19 bp, Mus musculus
  siRNA target sequence for Mrpl16 (NM_025606.2,522-540).
ctggctgcctagtagtaga

SEQ ID NO: 658458 - DNA, 19 bp, Mus musculus
  siRNA target sequence for Mrpl16 (NM_025606.2,525-543).
gctgcctagtagtagagat

SEQ ID NO: 658459 - DNA, 19 bp, Mus musculus
  siRNA target sequence for Mrpl16 (NM_025606.2,544-562).
gggtggacggtgtgaattt

SEQ ID NO: 658460 - DNA, 19 bp, Mus musculus
  siRNA target sequence for Mrpl16 (NM_025606.2,546-564).
gtggacggtgtgaatttga

SEQ ID NO: 658461 - DNA, 19 bp, Mus musculus
  siRNA target sequence for Mrpl16 (NM_025606.2,549-567).
gacggtgtgaatttgaaga

SEQ ID NO: 658462 - DNA, 19 bp, Mus musculus
  siRNA target sequence for Mrpl16 (NM_025606.2,555-573).
gtgaatttgaagaggtaaa

SEQ ID NO: 658463 - DNA, 19 bp, Mus musculus
  siRNA target sequence for Mrpl16 (NM_025606.2,586-604).
ccaagttgctcacaagtta

SEQ ID NO: 658464 - DNA, 19 bp, Mus musculus
  siRNA target sequence for Mrpl16 (NM_025606.2,619-637).
ggctgtgagccgtaagact

SEQ ID NO: 658465 - DNA, 19 bp, Mus musculus
  siRNA target sequence for Mrpl16 (NM_025606.2,643-661).
gaggatgcaccaaaatcaa

SEQ ID NO: 658466 - DNA, 19 bp, Mus musculus
  siRNA target sequence for Mrpl17 (NM_025301.1,255-273).
ggagaagctcatcgattat

SEQ ID NO: 658467 - DNA, 19 bp, Mus musculus
  siRNA target sequence for Mrpl17 (NM_025301.1,258-276).
gaagctcatcgattatgga

SEQ ID NO: 658468 - DNA, 19 bp, Mus musculus
  siRNA target sequence for Mrpl17 (NM_025301.1,447-465).
gatggcggtgatagaatat

SEQ ID NO: 658469 - DNA, 19 bp, Mus musculus
  siRNA target sequence for Mrpl17 (NM_025301.1,503-521).
gagacagcaaccttactct

SEQ ID NO: 658470 - DNA, 19 bp, Mus musculus
  siRNA target sequence for Mrpl19 (NM_026490.1,29-47).
ggcctccatggcagaaagt

SEQ ID NO: 658471 - DNA, 19 bp, Mus musculus
  siRNA target sequence for Mrpl19 (NM_026490.1,280-298).
gaacaaaccctctgaaatt

SEQ ID NO: 658472 - DNA, 19 bp, Mus musculus
  siRNA target sequence for Mrpl19 (NM_026490.1,289-307).
ctctgaaatttaagataga

SEQ ID NO: 658473 - DNA, 19 bp, Mus musculus
  siRNA target sequence for Mrpl19 (NM_026490.1,343-361).
cgattccagagttctatgt

SEQ ID NO: 658474 - DNA, 19 bp, Mus musculus
  siRNA target sequence for Mrpl19 (NM_026490.1,353-371).
gttctatgttggaagcata

SEQ ID NO: 658475 - DNA, 19 bp, Mus musculus
  siRNA target sequence for Mrpl19 (NM_026490.1,393-411).
ccctatgccagtggaaaaa

SEQ ID NO: 658476 - DNA, 19 bp, Mus musculus
  siRNA target sequence for Mrpl19 (NM_026490.1,473-491).
cctcaggaacacgattgaa

SEQ ID NO: 658477 - DNA, 19 bp, Mus musculus
  siRNA target sequence for Mrpl19 (NM_026490.1,616-634).
gcacctttgacgtgaacat

SEQ ID NO: 658478 - DNA, 19 bp, Mus musculus
  siRNA target sequence for Mrpl19 (NM_026490.1,619-637).
cctttgacgtgaacatgaa

SEQ ID NO: 658479 - DNA, 19 bp, Mus musculus
  siRNA target sequence for Mrpl19 (NM_026490.1,658-676).
gccaggaagtgcctgttaa

SEQ ID NO: 658480 - DNA, 19 bp, Mus musculus
  siRNA target sequence for Mrpl19 (NM_026490.1,670-688).
ctgttaacaagctgaaagt

SEQ ID NO: 658481 - DNA, 19 bp, Mus musculus
  siRNA target sequence for Mrpl19 (NM_026490.1,672-690).
gttaacaagctgaaagtta

SEQ ID NO: 658482 - DNA, 19 bp, Mus musculus
  siRNA target sequence for Mrpl19 (NM_026490.1,726-744).
cgtccaaacttcaacatta

SEQ ID NO: 658483 - DNA, 19 bp, Mus musculus
  siRNA target sequence for Mrpl19 (NM_026490.1,727-745).
gtccaaacttcaacattaa

SEQ ID NO: 658484 - DNA, 19 bp, Mus musculus
  siRNA target sequence for Mrpl2 (NM_025302.2,202-220).
cttaccgcccagtgcatat

SEQ ID NO: 658485 - DNA, 19 bp, Mus musculus
  siRNA target sequence for Mrpl2 (NM_025302.2,206-224).
ccgcccagtgcatatgtct

SEQ ID NO: 658486 - DNA, 19 bp, Mus musculus
  siRNA target sequence for Mrpl2 (NM_025302.2,261-279).
cgtaccaagtacacagtta

SEQ ID NO: 658487 - DNA, 19 bp, Mus musculus
  siRNA target sequence for Mrpl2 (NM_025302.2,276-294).
gttaaaccagtgaagatga

SEQ ID NO: 658488 - DNA, 19 bp, Mus musculus
  siRNA target sequence for Mrpl2 (NM_025302.2,325-343).
gcatccgagtgcatggtat

SEQ ID NO: 658489 - DNA, 19 bp, Mus musculus
  siRNA target sequence for Mrpl2 (NM_025302.2,348-366).
ggaggccacaaacagaatt

SEQ ID NO: 658490 - DNA, 19 bp, Mus musculus
  siRNA target sequence for Mrpl2 (NM_025302.2,388-406).
ggttccggccagaaaagga

SEQ ID NO: 658491 - DNA, 19 bp, Mus musculus
  siRNA target sequence for Mrpl2 (NM_025302.2,389-407).
gttccggccagaaaaggaa

SEQ ID NO: 658492 - DNA, 19 bp, Mus musculus
  siRNA target sequence for Mrpl2 (NM_025302.2,544-562).
caatcctgaactctaatca

SEQ ID NO: 658493 - DNA, 19 bp, Mus musculus
  siRNA target sequence for Mrpl2 (NM_025302.2,773-791).
gtcatgcactgcaactgta

SEQ ID NO: 658494 - DNA, 19 bp, Mus musculus
  siRNA target sequence for Mrpl2 (NM_025302.2,792-810).
ggccgagtatccaacgtta

SEQ ID NO: 658495 - DNA, 19 bp, Mus musculus
  siRNA target sequence for Mrpl2 (NM_025302.2,793-811).
gccgagtatccaacgttaa

SEQ ID NO: 658496 - DNA, 19 bp, Mus musculus
  siRNA target sequence for Mrpl2 (NM_025302.2,798-816).
gtatccaacgttaaccata

SEQ ID NO: 658497 - DNA, 19 bp, Mus musculus
  siRNA target sequence for Mrpl2 (NM_025302.2,924-942).
ctaccacccatgaagagtt

SEQ ID NO: 658498 - DNA, 19 bp, Mus musculus
  siRNA target sequence for Mrpl2 (NM_025302.2,928-946).
cacccatgaagagttatgt

SEQ ID NO: 658499 - DNA, 19 bp, Mus musculus
  siRNA target sequence for Mrpl28 (NM_024227.2,140-158).
cgccgaccccggtacacta

SEQ ID NO: 658500 - DNA, 19 bp, Mus musculus
  siRNA target sequence for Mrpl28 (NM_024227.2,143-161).
cgaccccggtacactacaa

SEQ ID NO: 658501 - DNA, 19 bp, Mus musculus
  siRNA target sequence for Mrpl28 (NM_024227.2,144-162).
gaccccggtacactacaaa

SEQ ID NO: 658502 - DNA, 19 bp, Mus musculus
  siRNA target sequence for Mrpl28 (NM_024227.2,435-453).
cgatgaggcctatggattt

SEQ ID NO: 658503 - DNA, 19 bp, Mus musculus
  siRNA target sequence for Mrpl28 (NM_024227.2,443-461).
cctatggatttgacttcta

SEQ ID NO: 658504 - DNA, 19 bp, Mus musculus
  siRNA target sequence for Mrpl28 (NM_024227.2,449-467).
gatttgacttctatattct

SEQ ID NO: 658505 - DNA, 19 bp, Mus musculus
  siRNA target sequence for Mrpl3 (NM_053159.2,274-292).
ctccacagcaagagtagta

SEQ ID NO: 658506 - DNA, 19 bp, Mus musculus
  siRNA target sequence for Mrpl3 (NM_053159.2,290-308).
gtacttggtgggatgaaca

SEQ ID NO: 658507 - DNA, 19 bp, Mus musculus
  siRNA target sequence for Mrpl3 (NM_053159.2,297-315).
gtgggatgaacatctttct

SEQ ID NO: 658508 - DNA, 19 bp, Mus musculus
  siRNA target sequence for Mrpl3 (NM_053159.2,340-358).
caactggtctccgatgaaa

SEQ ID NO: 658509 - DNA, 19 bp, Mus musculus
  siRNA target sequence for Mrpl3 (NM_053159.2,369-387).
gctgacaagtaaactgaat

SEQ ID NO: 658510 - DNA, 19 bp, Mus musculus
  siRNA target sequence for Mrpl3 (NM_053159.2,463-481).
ctaggcatgatgcctttat

SEQ ID NO: 658511 - DNA, 19 bp, Mus musculus
  siRNA target sequence for Mrpl3 (NM_053159.2,482-500).
ggaccaaggatggtcaaaa

SEQ ID NO: 658512 - DNA, 19 bp, Mus musculus
  siRNA target sequence for Mrpl3 (NM_053159.2,512-530).
cattactacaggtacaaga

SEQ ID NO: 658513 - DNA, 19 bp, Mus musculus
  siRNA target sequence for Mrpl3 (NM_053159.2,551-569).
ctcccaaggaagaccataa

SEQ ID NO: 658514 - DNA, 19 bp, Mus musculus
  siRNA target sequence for Mrpl3 (NM_053159.2,558-576).
ggaagaccataatggaaaa

SEQ ID NO: 658515 - DNA, 19 bp, Mus musculus
  siRNA target sequence for Mrpl3 (NM_053159.2,609-627).
gtcacgcttctataaacct

SEQ ID NO: 658516 - DNA, 19 bp, Mus musculus
  siRNA target sequence for Mrpl3 (NM_053159.2,625-643).
cctgactctagattggaat

SEQ ID NO: 658517 - DNA, 19 bp, Mus musculus
  siRNA target sequence for Mrpl3 (NM_053159.2,659-677).
gactgccaccaaaacagat

SEQ ID NO: 658518 - DNA, 19 bp, Mus musculus
  siRNA target sequence for Mrpl3 (NM_053159.2,696-714).
gacagataacgctgtaatt

SEQ ID NO: 658519 - DNA, 19 bp, Mus musculus
  siRNA target sequence for Mrpl3 (NM_053159.2,698-716).
cagataacgctgtaattaa

SEQ ID NO: 658520 - DNA, 19 bp, Mus musculus
  siRNA target sequence for Mrpl3 (NM_053159.2,717-735).
gccagggacccctctttat

SEQ ID NO: 658521 - DNA, 19 bp, Mus musculus
  siRNA target sequence for Mrpl3 (NM_053159.2,744-762).
ctttcgccctggacagtat

SEQ ID NO: 658522 - DNA, 19 bp, Mus musculus
  siRNA target sequence for Mrpl3 (NM_053159.2,773-791).
cagccaaaactattggtaa

SEQ ID NO: 658523 - DNA, 19 bp, Mus musculus
  siRNA target sequence for Mrpl3 (NM_053159.2,777-795).
caaaactattggtaaaggt

SEQ ID NO: 658524 - DNA, 19 bp, Mus musculus
  siRNA target sequence for Mrpl3 (NM_053159.2,799-817).
cagggcgtcatgaaaagat

SEQ ID NO: 658525 - DNA, 19 bp, Mus musculus
  siRNA target sequence for Mrpl3 (NM_053159.2,838-856).
gcttctcatggtcaaacaa

SEQ ID NO: 658526 - DNA, 19 bp, Mus musculus
  siRNA target sequence for Mrpl3 (NM_053159.2,867-885).
gagacctggcgctatctca

SEQ ID NO: 658527 - DNA, 19 bp, Mus musculus
  siRNA target sequence for Mrpl3 (NM_053159.2,953-971).
cagtgtatggactgaaagt

SEQ ID NO: 658528 - DNA, 19 bp, Mus musculus
  siRNA target sequence for Mrpl3 (NM_053159.2,955-973).
gtgtatggactgaaagtgt

SEQ ID NO: 658529 - DNA, 19 bp, Mus musculus
  siRNA target sequence for Mrpl3 (NM_053159.2,986-1004).
ccaagcacaacataatcta

SEQ ID NO: 658530 - DNA, 19 bp, Mus musculus
  siRNA target sequence for Mrpl3 (NM_053159.2,987-1005).
caagcacaacataatctat

SEQ ID NO: 658531 - DNA, 19 bp, Mus musculus
  siRNA target sequence for Mrpl3 (NM_053159.2,1016-1034).
ctgtgcctggacataaaaa

SEQ ID NO: 658532 - DNA, 19 bp, Mus musculus
  siRNA target sequence for Mrpl3 (NM_053159.2,1021-1039).
cctggacataaaaattgct

SEQ ID NO: 658533 - DNA, 19 bp, Mus musculus
  siRNA target sequence for Mrpl3 (NM_053159.2,1022-1040).
ctggacataaaaattgctt

SEQ ID NO: 658534 - DNA, 19 bp, Mus musculus
  siRNA target sequence for Mrpl3 (NM_053159.2,1058-1076).
ctacactgcctgcatacaa

SEQ ID NO: 658535 - DNA, 19 bp, Mus musculus
  siRNA target sequence for Mrpl30 (NM_027098.1,242-260).
caaatttaccaaatcaaga

SEQ ID NO: 658536 - DNA, 19 bp, Mus musculus
  siRNA target sequence for Mrpl30 (NM_027098.1,256-274).
caagaattccagataaagt

SEQ ID NO: 658537 - DNA, 19 bp, Mus musculus
  siRNA target sequence for Mrpl32 (NM_029271.1,380-398).
cctttgtggatattgctat

SEQ ID NO: 658538 - DNA, 19 bp, Mus musculus
  siRNA target sequence for Mrpl32 (NM_029271.1,469-487).
ctccttccgttgagactat

SEQ ID NO: 658539 - DNA, 19 bp, Mus musculus
  siRNA target sequence for Mrpl33 (NM_025796.1,163-181).
cactatgatccaatagtga

SEQ ID NO: 658540 - DNA, 19 bp, Mus musculus
  siRNA target sequence for Mrpl35 (NM_025430.1,114-132).
ccaggaatgcctgtcttaa

SEQ ID NO: 658541 - DNA, 19 bp, Mus musculus
  siRNA target sequence for Mrpl35 (NM_025430.1,115-133).
caggaatgcctgtcttaat

SEQ ID NO: 658542 - DNA, 19 bp, Mus musculus
  siRNA target sequence for Mrpl35 (NM_025430.1,118-136).
gaatgcctgtcttaattct

SEQ ID NO: 658543 - DNA, 19 bp, Mus musculus
  siRNA target sequence for Mrpl35 (NM_025430.1,138-156).
cactgtgcaccattcattt

SEQ ID NO: 658544 - DNA, 19 bp, Mus musculus
  siRNA target sequence for Mrpl35 (NM_025430.1,235-253).
cacaacagtccttaataga

SEQ ID NO: 658545 - DNA, 19 bp, Mus musculus
  siRNA target sequence for Mrpl35 (NM_025430.1,287-305).
ccagtcagagctctaacat

SEQ ID NO: 658546 - DNA, 19 bp, Mus musculus
  siRNA target sequence for Mrpl35 (NM_025430.1,288-306).
cagtcagagctctaacata

SEQ ID NO: 658547 - DNA, 19 bp, Mus musculus
  siRNA target sequence for Mrpl35 (NM_025430.1,358-376).
cttcctccgacttcattct

SEQ ID NO: 658548 - DNA, 19 bp, Mus musculus
  siRNA target sequence for Mrpl35 (NM_025430.1,442-460).
gaagcgcttgagggaattt

SEQ ID NO: 658549 - DNA, 19 bp, Mus musculus
  siRNA target sequence for Mrpl35 (NM_025430.1,446-464).
cgcttgagggaatttgtgt

SEQ ID NO: 658550 - DNA, 19 bp, Mus musculus
  siRNA target sequence for Mrpl35 (NM_025430.1,471-489).
gcaagacccagagtaaact

SEQ ID NO: 658551 - DNA, 19 bp, Mus musculus
  siRNA target sequence for Mrpl35 (NM_025430.1,481-499).
gagtaaactcctggataaa

SEQ ID NO: 658552 - DNA, 19 bp, Mus musculus
  siRNA target sequence for Mrpl35 (NM_025430.1,483-501).
gtaaactcctggataaaat

SEQ ID NO: 658553 - DNA, 19 bp, Mus musculus
  siRNA target sequence for Mrpl35 (NM_025430.1,494-512).
gataaaatgacgacatctt

SEQ ID NO: 658554 - DNA, 19 bp, Mus musculus
  siRNA target sequence for Mrpl35 (NM_025430.1,531-549).
ggtacgctggcgatcctta

SEQ ID NO: 658555 - DNA, 19 bp, Mus musculus
  siRNA target sequence for Mrpl35 (NM_025430.1,559-577).
ccacgatcgaacaaaccta

SEQ ID NO: 658556 - DNA, 19 bp, Mus musculus
  siRNA target sequence for Mrpl36 (NM_053163.1,276-294).
gccctcgctgggcttcaaa

SEQ ID NO: 658557 - DNA, 19 bp, Mus musculus
  siRNA target sequence for Mrpl36 (NM_053163.1,344-362).
ggcgtgggcgctggtttat

SEQ ID NO: 658558 - DNA, 19 bp, Mus musculus
  siRNA target sequence for Mrpl36 (NM_053163.1,347-365).
gtgggcgctggtttatcct

SEQ ID NO: 658559 - DNA, 19 bp, Mus musculus
  siRNA target sequence for Mrpl36 (NM_053163.1,372-390).
gaccaaccccaagcataaa

SEQ ID NO: 658560 - DNA, 19 bp, Mus musculus
  siRNA target sequence for Mrpl36 (NM_053163.1,374-392).
ccaaccccaagcataaaca

SEQ ID NO: 658561 - DNA, 19 bp, Mus musculus
  siRNA target sequence for Mrpl39 (NM_017404.2,148-166).
gagaaaagcaggcagttat

SEQ ID NO: 658562 - DNA, 19 bp, Mus musculus
  siRNA target sequence for Mrpl39 (NM_017404.2,182-200).
cggagaagatcgaagttaa

SEQ ID NO: 658563 - DNA, 19 bp, Mus musculus
  siRNA target sequence for Mrpl39 (NM_017404.2,186-204).
gaagatcgaagttaagcat

SEQ ID NO: 658564 - DNA, 19 bp, Mus musculus
  siRNA target sequence for Mrpl39 (NM_017404.2,201-219).
gcatgttgggaaaactgat

SEQ ID NO: 658565 - DNA, 19 bp, Mus musculus
  siRNA target sequence for Mrpl39 (NM_017404.2,227-245).
ctgtcttcgtgatgaataa

SEQ ID NO: 658566 - DNA, 19 bp, Mus musculus
  siRNA target sequence for Mrpl39 (NM_017404.2,235-253).
gtgatgaataaaaacatct

SEQ ID NO: 658567 - DNA, 19 bp, Mus musculus
  siRNA target sequence for Mrpl39 (NM_017404.2,326-344).
gacaaccgtgggacatgta

SEQ ID NO: 658568 - DNA, 19 bp, Mus musculus
  siRNA target sequence for Mrpl39 (NM_017404.2,328-346).
caaccgtgggacatgtata

SEQ ID NO: 658569 - DNA, 19 bp, Mus musculus
  siRNA target sequence for Mrpl39 (NM_017404.2,367-385).
gagatcaaatttcttactt

SEQ ID NO: 658570 - DNA, 19 bp, Mus musculus
  siRNA target sequence for Mrpl39 (NM_017404.2,417-435).
ggcgtattggcgttcttgt

SEQ ID NO: 658571 - DNA, 19 bp, Mus musculus
  siRNA target sequence for Mrpl39 (NM_017404.2,445-463).
ctgggctgtgtaatcgaaa

SEQ ID NO: 658572 - DNA, 19 bp, Mus musculus
  siRNA target sequence for Mrpl39 (NM_017404.2,464-482).
gggcattcaaagatgacta

SEQ ID NO: 658573 - DNA, 19 bp, Mus musculus
  siRNA target sequence for Mrpl39 (NM_017404.2,465-483).
ggcattcaaagatgactat

SEQ ID NO: 658574 - DNA, 19 bp, Mus musculus
  siRNA target sequence for Mrpl39 (NM_017404.2,467-485).
cattcaaagatgactatgt

SEQ ID NO: 658575 - DNA, 19 bp, Mus musculus
  siRNA target sequence for Mrpl39 (NM_017404.2,541-559).
gatgtcactttggataaga

SEQ ID NO: 658576 - DNA, 19 bp, Mus musculus
  siRNA target sequence for Mrpl39 (NM_017404.2,610-628).
gatgcccatgctttaatat

SEQ ID NO: 658577 - DNA, 19 bp, Mus musculus
  siRNA target sequence for Mrpl39 (NM_017404.2,613-631).
gcccatgctttaatatata

SEQ ID NO: 658578 - DNA, 19 bp, Mus musculus
  siRNA target sequence for Mrpl39 (NM_017404.2,633-651).
ggaccttccctttgaaact

SEQ ID NO: 658579 - DNA, 19 bp, Mus musculus
  siRNA target sequence for Mrpl39 (NM_017404.2,668-686).
gagtggcgctggaaatatt

SEQ ID NO: 658580 - DNA, 19 bp, Mus musculus
  siRNA target sequence for Mrpl39 (NM_017404.2,672-690).
ggcgctggaaatatttcaa

SEQ ID NO: 658581 - DNA, 19 bp, Mus musculus
  siRNA target sequence for Mrpl39 (NM_017404.2,769-787).
ggtgacttcattgatgtaa

SEQ ID NO: 658582 - DNA, 19 bp, Mus musculus
  siRNA target sequence for Mrpl39 (NM_017404.2,796-814).
ccccttattccgagaacaa

SEQ ID NO: 658583 - DNA, 19 bp, Mus musculus
  siRNA target sequence for Mrpl39 (NM_017404.2,798-816).
ccttattccgagaacaagt

SEQ ID NO: 658584 - DNA, 19 bp, Mus musculus
  siRNA target sequence for Mrpl39 (NM_017404.2,837-855).
gtcagcggtccacaatctt

SEQ ID NO: 658585 - DNA, 19 bp, Mus musculus
  siRNA target sequence for Mrpl39 (NM_017404.2,839-857).
cagcggtccacaatcttaa

SEQ ID NO: 658586 - DNA, 19 bp, Mus musculus
  siRNA target sequence for Mrpl39 (NM_017404.2,870-888).
gaacctcattcgcagattt

SEQ ID NO: 658587 - DNA, 19 bp, Mus musculus
  siRNA target sequence for Mrpl39 (NM_017404.2,909-927).
gcacttgagagcacagttt

SEQ ID NO: 658588 - DNA, 19 bp, Mus musculus
  siRNA target sequence for Mrpl39 (NM_017404.2,915-933).
gagagcacagtttacaata

SEQ ID NO: 658589 - DNA, 19 bp, Mus musculus
  siRNA target sequence for Mrpl39 (NM_017404.2,937-955).
gacaagctagtggaaagat

SEQ ID NO: 658590 - DNA, 19 bp, Mus musculus
  siRNA target sequence for Mrpl39 (NM_017404.2,939-957).
caagctagtggaaagatct

SEQ ID NO: 658591 - DNA, 19 bp, Mus musculus
  siRNA target sequence for Mrpl39 (NM_017404.2,956-974).
ctcggaaaatggtaactga

SEQ ID NO: 658592 - DNA, 19 bp, Mus musculus
  siRNA target sequence for Mrpl4 (NM_023167.1,330-348).
gcaagccctggcaacagaa

SEQ ID NO: 658593 - DNA, 19 bp, Mus musculus
  siRNA target sequence for Mrpl4 (NM_023167.1,423-441).
ggggtcctacaagttacta

SEQ ID NO: 658594 - DNA, 19 bp, Mus musculus
  siRNA target sequence for Mrpl4 (NM_023167.1,425-443).
ggtcctacaagttactact

SEQ ID NO: 658595 - DNA, 19 bp, Mus musculus
  siRNA target sequence for Mrpl4 (NM_023167.1,426-444).
gtcctacaagttactacta

SEQ ID NO: 658596 - DNA, 19 bp, Mus musculus
  siRNA target sequence for Mrpl4 (NM_023167.1,428-446).
cctacaagttactactaca

SEQ ID NO: 658597 - DNA, 19 bp, Mus musculus
  siRNA target sequence for Mrpl4 (NM_023167.1,429-447).
ctacaagttactactacat

SEQ ID NO: 658598 - DNA, 19 bp, Mus musculus
  siRNA target sequence for Mrpl4 (NM_023167.1,432-450).
caagttactactacatgtt

SEQ ID NO: 658599 - DNA, 19 bp, Mus musculus
  siRNA target sequence for Mrpl4 (NM_023167.1,601-619).
cgtgctccttgtagactta

SEQ ID NO: 658600 - DNA, 19 bp, Mus musculus
  siRNA target sequence for Mrpl4 (NM_023167.1,604-622).
gctccttgtagacttaaca

SEQ ID NO: 658601 - DNA, 19 bp, Mus musculus
  siRNA target sequence for Mrpl4 (NM_023167.1,607-625).
ccttgtagacttaacacat

SEQ ID NO: 658602 - DNA, 19 bp, Mus musculus
  siRNA target sequence for Mrpl40 (NM_010922.1,279-297).
ggtagaccccagaaaggat

SEQ ID NO: 658603 - DNA, 19 bp, Mus musculus
  siRNA target sequence for Mrpl40 (NM_010922.1,327-345).
gatccgaaaactggaaaaa

SEQ ID NO: 658604 - DNA, 19 bp, Mus musculus
  siRNA target sequence for Mrpl40 (NM_010922.1,350-368).
cccaagaactgattcctat

SEQ ID NO: 658605 - DNA, 19 bp, Mus musculus
  siRNA target sequence for Mrpl40 (NM_010922.1,351-369).
ccaagaactgattcctatt

SEQ ID NO: 658606 - DNA, 19 bp, Mus musculus
  siRNA target sequence for Mrpl40 (NM_010922.1,358-376).
ctgattcctattgaagatt

SEQ ID NO: 658607 - DNA, 19 bp, Mus musculus
  siRNA target sequence for Mrpl40 (NM_010922.1,390-408).
gaggttcttggataaatca

SEQ ID NO: 658608 - DNA, 19 bp, Mus musculus
  siRNA target sequence for Mrpl40 (NM_010922.1,650-668).
caccacctatctctaacta

SEQ ID NO: 658609 - DNA, 19 bp, Mus musculus
  siRNA target sequence for Mrpl40 (NM_010922.1,715-733).
caagtagaattcaaaagat

SEQ ID NO: 658610 - DNA, 19 bp, Mus musculus
  siRNA target sequence for Mrpl43 (NM_053164.2,62-80).
gaccagcgtcctccataat

SEQ ID NO: 658611 - DNA, 19 bp, Mus musculus
  siRNA target sequence for Mrpl43 (NM_053164.2,205-223).
caggagtcgtagtatacgt

SEQ ID NO: 658612 - DNA, 19 bp, Mus musculus
  siRNA target sequence for Mrpl43 (NM_053164.2,236-254).
gtgcgccatgccacgaata

SEQ ID NO: 658613 - DNA, 19 bp, Mus musculus
  siRNA target sequence for Mrpl43 (NM_053164.2,238-256).
gcgccatgccacgaatagt

SEQ ID NO: 658614 - DNA, 19 bp, Mus musculus
  siRNA target sequence for Mrpl43 (NM_053164.2,274-292).
gggctgtgcgcgaggaaaa

SEQ ID NO: 658615 - DNA, 19 bp, Mus musculus
  siRNA target sequence for Mrpl43 (NM_053164.2,277-295).
ctgtgcgcgaggaaaacgt

SEQ ID NO: 658616 - DNA, 19 bp, Mus musculus
  siRNA target sequence for Mrpl43 (NM_053164.2,419-437).
gcaccccttcaccaacaaa

SEQ ID NO: 658617 - DNA, 19 bp, Mus musculus
  siRNA target sequence for Mrpl45 (NM_025927.2,39-57).
ggggcttgtcctccttata

SEQ ID NO: 658618 - DNA, 19 bp, Mus musculus
  siRNA target sequence for Mrpl45 (NM_025927.2,97-115).
gactcagtccacaactgta

SEQ ID NO: 658619 - DNA, 19 bp, Mus musculus
  siRNA target sequence for Mrpl45 (NM_025927.2,103-121).
gtccacaactgtagttcaa

SEQ ID NO: 658620 - DNA, 19 bp, Mus musculus
  siRNA target sequence for Mrpl45 (NM_025927.2,105-123).
ccacaactgtagttcaagt

SEQ ID NO: 658621 - DNA, 19 bp, Mus musculus
  siRNA target sequence for Mrpl45 (NM_025927.2,108-126).
caactgtagttcaagttaa

SEQ ID NO: 658622 - DNA, 19 bp, Mus musculus
  siRNA target sequence for Mrpl45 (NM_025927.2,113-131).
gtagttcaagttaaaacca

SEQ ID NO: 658623 - DNA, 19 bp, Mus musculus
  siRNA target sequence for Mrpl45 (NM_025927.2,231-249).
ggttggagcgccctataca

SEQ ID NO: 658624 - DNA, 19 bp, Mus musculus
  siRNA target sequence for Mrpl45 (NM_025927.2,253-271).
ggcctgtacagctggtata

SEQ ID NO: 658625 - DNA, 19 bp, Mus musculus
  siRNA target sequence for Mrpl45 (NM_025927.2,254-272).
gcctgtacagctggtatat

SEQ ID NO: 658626 - DNA, 19 bp, Mus musculus
  siRNA target sequence for Mrpl45 (NM_025927.2,258-276).
gtacagctggtatatttga

SEQ ID NO: 658627 - DNA, 19 bp, Mus musculus
  siRNA target sequence for Mrpl45 (NM_025927.2,295-313).
gggtgatgctcgaatgtca

SEQ ID NO: 658628 - DNA, 19 bp, Mus musculus
  siRNA target sequence for Mrpl45 (NM_025927.2,296-314).
ggtgatgctcgaatgtcat

SEQ ID NO: 658629 - DNA, 19 bp, Mus musculus
  siRNA target sequence for Mrpl45 (NM_025927.2,302-320).
gctcgaatgtcatctcttt

SEQ ID NO: 658630 - DNA, 19 bp, Mus musculus
  siRNA target sequence for Mrpl45 (NM_025927.2,305-323).
cgaatgtcatctctttcaa

SEQ ID NO: 658631 - DNA, 19 bp, Mus musculus
  siRNA target sequence for Mrpl45 (NM_025927.2,340-358).
gagaactgagcgattgaga

SEQ ID NO: 658632 - DNA, 19 bp, Mus musculus
  siRNA target sequence for Mrpl45 (NM_025927.2,342-360).
gaactgagcgattgagaaa

SEQ ID NO: 658633 - DNA, 19 bp, Mus musculus
  siRNA target sequence for Mrpl45 (NM_025927.2,376-394).
gctggcaatccgaaagata

SEQ ID NO: 658634 - DNA, 19 bp, Mus musculus
  siRNA target sequence for Mrpl45 (NM_025927.2,377-395).
ctggcaatccgaaagataa

SEQ ID NO: 658635 - DNA, 19 bp, Mus musculus
  siRNA target sequence for Mrpl45 (NM_025927.2,379-397).
ggcaatccgaaagataaga

SEQ ID NO: 658636 - DNA, 19 bp, Mus musculus
  siRNA target sequence for Mrpl45 (NM_025927.2,381-399).
caatccgaaagataagaga

SEQ ID NO: 658637 - DNA, 19 bp, Mus musculus
  siRNA target sequence for Mrpl45 (NM_025927.2,425-443).
gacttccctgaaaaagcta

SEQ ID NO: 658638 - DNA, 19 bp, Mus musculus
  siRNA target sequence for Mrpl45 (NM_025927.2,430-448).
ccctgaaaaagctaaggat

SEQ ID NO: 658639 - DNA, 19 bp, Mus musculus
  siRNA target sequence for Mrpl45 (NM_025927.2,431-449).
cctgaaaaagctaaggata

SEQ ID NO: 658640 - DNA, 19 bp, Mus musculus
  siRNA target sequence for Mrpl45 (NM_025927.2,432-450).
ctgaaaaagctaaggatat

SEQ ID NO: 658641 - DNA, 19 bp, Mus musculus
  siRNA target sequence for Mrpl45 (NM_025927.2,434-452).
gaaaaagctaaggatattt

SEQ ID NO: 658642 - DNA, 19 bp, Mus musculus
  siRNA target sequence for Mrpl45 (NM_025927.2,464-482).
cacctttgtctaaacaact

SEQ ID NO: 658643 - DNA, 19 bp, Mus musculus
  siRNA target sequence for Mrpl45 (NM_025927.2,485-503).
gaccatgaccggcttcata

SEQ ID NO: 658644 - DNA, 19 bp, Mus musculus
  siRNA target sequence for Mrpl45 (NM_025927.2,494-512).
cggcttcataccttggtaa

SEQ ID NO: 658645 - DNA, 19 bp, Mus musculus
  siRNA target sequence for Mrpl45 (NM_025927.2,508-526).
ggtaaccgaacactgtttt

SEQ ID NO: 658646 - DNA, 19 bp, Mus musculus
  siRNA target sequence for Mrpl45 (NM_025927.2,568-586).
gggctttgtggaatctcta

SEQ ID NO: 658647 - DNA, 19 bp, Mus musculus
  siRNA target sequence for Mrpl45 (NM_025927.2,676-694).
gcagactttggccatttat

SEQ ID NO: 658648 - DNA, 19 bp, Mus musculus
  siRNA target sequence for Mrpl45 (NM_025927.2,695-713).
gatcggtttggcagattga

SEQ ID NO: 658649 - DNA, 19 bp, Mus musculus
  siRNA target sequence for Mrpl51 (NM_025595.1,522-540).
cgacatgggaagtacagat

SEQ ID NO: 658650 - DNA, 19 bp, Mus musculus
  siRNA target sequence for Mrpl53 (NM_026744.1,213-231).
gatgggtatcggctgatta

SEQ ID NO: 658651 - DNA, 19 bp, Mus musculus
  siRNA target sequence for Mrpl53 (NM_026744.1,246-264).
ctcaccactcaggaaatgt

SEQ ID NO: 658652 - DNA, 19 bp, Mus musculus
  siRNA target sequence for Mrpl53 (NM_026744.1,248-266).
caccactcaggaaatgtta

SEQ ID NO: 658653 - DNA, 19 bp, Mus musculus
  siRNA target sequence for Mrpl53 (NM_026744.1,251-269).
cactcaggaaatgttaagt

SEQ ID NO: 658654 - DNA, 19 bp, Mus musculus
  siRNA target sequence for Mrpl9 (NM_030116.1,136-154).
gacttcagtctctctcatt

SEQ ID NO: 658655 - DNA, 19 bp, Mus musculus
  siRNA target sequence for Mrpl9 (NM_030116.1,138-156).
cttcagtctctctcattat

SEQ ID NO: 658656 - DNA, 19 bp, Mus musculus
  siRNA target sequence for Mrpl9 (NM_030116.1,229-247).
cggcgtcaccgcgtgtata

SEQ ID NO: 658657 - DNA, 19 bp, Mus musculus
  siRNA target sequence for Mrpl9 (NM_030116.1,230-248).
ggcgtcaccgcgtgtataa

SEQ ID NO: 658658 - DNA, 19 bp, Mus musculus
  siRNA target sequence for Mrpl9 (NM_030116.1,232-250).
cgtcaccgcgtgtataagt

SEQ ID NO: 658659 - DNA, 19 bp, Mus musculus
  siRNA target sequence for Mrpl9 (NM_030116.1,303-321).
gcagtctgtggacgaaatt

SEQ ID NO: 658660 - DNA, 19 bp, Mus musculus
  siRNA target sequence for Mrpl9 (NM_030116.1,306-324).
gtctgtggacgaaattgga

SEQ ID NO: 658661 - DNA, 19 bp, Mus musculus
  siRNA target sequence for Mrpl9 (NM_030116.1,400-418).
gcttctcctgaaaatagga

SEQ ID NO: 658662 - DNA, 19 bp, Mus musculus
  siRNA target sequence for Mrpl9 (NM_030116.1,401-419).
cttctcctgaaaataggaa

SEQ ID NO: 658663 - DNA, 19 bp, Mus musculus
  siRNA target sequence for Mrpl9 (NM_030116.1,440-458).
cgctgagacgcgaaggaaa

SEQ ID NO: 658664 - DNA, 19 bp, Mus musculus
  siRNA target sequence for Mrpl9 (NM_030116.1,485-503).
gagaggcgacagtgaagtt

SEQ ID NO: 658665 - DNA, 19 bp, Mus musculus
  siRNA target sequence for Mrps11 (NM_026498.1,139-157).
gcattgccccagctaagaa

SEQ ID NO: 658666 - DNA, 19 bp, Mus musculus
  siRNA target sequence for Mrps11 (NM_026498.1,140-158).
cattgccccagctaagaat

SEQ ID NO: 658667 - DNA, 19 bp, Mus musculus
  siRNA target sequence for Mrps11 (NM_026498.1,145-163).
ccccagctaagaatatcca

SEQ ID NO: 658668 - DNA, 19 bp, Mus musculus
  siRNA target sequence for Mrps11 (NM_026498.1,166-184).
ccggagccccgagattaga

SEQ ID NO: 658669 - DNA, 19 bp, Mus musculus
  siRNA target sequence for Mrps11 (NM_026498.1,167-185).
cggagccccgagattagaa

SEQ ID NO: 658670 - DNA, 19 bp, Mus musculus
  siRNA target sequence for Mrps11 (NM_026498.1,169-187).
gagccccgagattagaaga

SEQ ID NO: 658671 - DNA, 19 bp, Mus musculus
  siRNA target sequence for Mrps11 (NM_026498.1,278-296).
gtgggcagggatgaagttt

SEQ ID NO: 658672 - DNA, 19 bp, Mus musculus
  siRNA target sequence for Mrps11 (NM_026498.1,302-320).
cgtcccaattgcacacatt

SEQ ID NO: 658673 - DNA, 19 bp, Mus musculus
  siRNA target sequence for Mrps11 (NM_026498.1,303-321).
gtcccaattgcacacatta

SEQ ID NO: 658674 - DNA, 19 bp, Mus musculus
  siRNA target sequence for Mrps11 (NM_026498.1,452-470).
catagctgccgcagcaaaa

SEQ ID NO: 658675 - DNA, 19 bp, Mus musculus
  siRNA target sequence for Mrps11 (NM_026498.1,562-580).
gtctggaagtgatctcaat

SEQ ID NO: 658676 - DNA, 19 bp, Mus musculus
  siRNA target sequence for Mrps11 (NM_026498.1,564-582).
ctggaagtgatctcaatca

SEQ ID NO: 658677 - DNA, 19 bp, Mus musculus
  siRNA target sequence for Mrps11 (NM_026498.1,566-584).
ggaagtgatctcaatcaca

SEQ ID NO: 658678 - DNA, 19 bp, Mus musculus
  siRNA target sequence for Mrps15 (NM_025544.1,308-326).
cctcctctgcgttcatcaa

SEQ ID NO: 658679 - DNA, 19 bp, Mus musculus
  siRNA target sequence for Mrps15 (NM_025544.1,309-327).
ctcctctgcgttcatcaaa

SEQ ID NO: 658680 - DNA, 19 bp, Mus musculus
  siRNA target sequence for Mrps15 (NM_025544.1,311-329).
cctctgcgttcatcaaaga

SEQ ID NO: 658681 - DNA, 19 bp, Mus musculus
  siRNA target sequence for Mrps15 (NM_025544.1,312-330).
ctctgcgttcatcaaagaa

SEQ ID NO: 658682 - DNA, 19 bp, Mus musculus
  siRNA target sequence for Mrps15 (NM_025544.1,314-332).
ctgcgttcatcaaagaata

SEQ ID NO: 658683 - DNA, 19 bp, Mus musculus
  siRNA target sequence for Mrps15 (NM_025544.1,351-369).
catagagaaggttgatgat

SEQ ID NO: 658684 - DNA, 19 bp, Mus musculus
  siRNA target sequence for Mrps15 (NM_025544.1,430-448).
caagaacaattgatgaaca

SEQ ID NO: 658685 - DNA, 19 bp, Mus musculus
  siRNA target sequence for Mrps15 (NM_025544.1,506-524).
ctgtcaggatccgcaatta

SEQ ID NO: 658686 - DNA, 19 bp, Mus musculus
  siRNA target sequence for Mrps15 (NM_025544.1,510-528).
caggatccgcaattatgaa

SEQ ID NO: 658687 - DNA, 19 bp, Mus musculus
  siRNA target sequence for Mrps15 (NM_025544.1,512-530).
ggatccgcaattatgaaga

SEQ ID NO: 658688 - DNA, 19 bp, Mus musculus
  siRNA target sequence for Mrps15 (NM_025544.1,584-602).
gcatcgaccggaggaaaaa

SEQ ID NO: 658689 - DNA, 19 bp, Mus musculus
  siRNA target sequence for Mrps15 (NM_025544.1,618-636).
ccgtcagaccaactatgat

SEQ ID NO: 658690 - DNA, 19 bp, Mus musculus
  siRNA target sequence for Mrps15 (NM_025544.1,620-638).
gtcagaccaactatgatgt

SEQ ID NO: 658691 - DNA, 19 bp, Mus musculus
  siRNA target sequence for Mrps15 (NM_025544.1,661-679).
ctaggggtggaatatacct

SEQ ID NO: 658692 - DNA, 19 bp, Mus musculus
  siRNA target sequence for Mrps15 (NM_025544.1,677-695).
ccttaccccctctgcattt

SEQ ID NO: 658693 - DNA, 19 bp, Mus musculus
  siRNA target sequence for Mrps17 (NM_025450.1,338-356).
gtggggaaggtgattggta

SEQ ID NO: 658694 - DNA, 19 bp, Mus musculus
  siRNA target sequence for Mrps17 (NM_025450.1,349-367).
gattggtacagccatgata

SEQ ID NO: 658695 - DNA, 19 bp, Mus musculus
  siRNA target sequence for Mrps17 (NM_025450.1,364-382).
gataaaaacggctaaagta

SEQ ID NO: 658696 - DNA, 19 bp, Mus musculus
  siRNA target sequence for Mrps17 (NM_025450.1,384-402).
gagcgaccagacttgtttt

SEQ ID NO: 658697 - DNA, 19 bp, Mus musculus
  siRNA target sequence for Mrps17 (NM_025450.1,387-405).
cgaccagacttgttttgga

SEQ ID NO: 658698 - DNA, 19 bp, Mus musculus
  siRNA target sequence for Mrps17 (NM_025450.1,388-406).
gaccagacttgttttggat

SEQ ID NO: 658699 - DNA, 19 bp, Mus musculus
  siRNA target sequence for Mrps17 (NM_025450.1,409-427).
ctacttactgaagtacttt

SEQ ID NO: 658700 - DNA, 19 bp, Mus musculus
  siRNA target sequence for Mrps17 (NM_025450.1,513-531).
cacgatcgaagcatgtgaa

SEQ ID NO: 658701 - DNA, 19 bp, Mus musculus
  siRNA target sequence for Mrps17 (NM_025450.1,536-554).
gaactggctgagatcatct

SEQ ID NO: 658702 - DNA, 19 bp, Mus musculus
  siRNA target sequence for Mrps18a (NM_026768.1,147-165).
gaagacgactgtaattgaa

SEQ ID NO: 658703 - DNA, 19 bp, Mus musculus
  siRNA target sequence for Mrps18a (NM_026768.1,288-306).
gttcatccggccttatgga

SEQ ID NO: 658704 - DNA, 19 bp, Mus musculus
  siRNA target sequence for Mrps18a (NM_026768.1,340-358).
cgggaagaacaccgaaaaa

SEQ ID NO: 658705 - DNA, 19 bp, Mus musculus
  siRNA target sequence for Mrps18a (NM_026768.1,341-359).
gggaagaacaccgaaaaat

SEQ ID NO: 658706 - DNA, 19 bp, Mus musculus
  siRNA target sequence for Mrps18a (NM_026768.1,385-403).
cgagcaggtctgttaccaa

SEQ ID NO: 658707 - DNA, 19 bp, Mus musculus
  siRNA target sequence for Mrps18a (NM_026768.1,389-407).
caggtctgttaccaaatca

SEQ ID NO: 658708 - DNA, 19 bp, Mus musculus
  siRNA target sequence for Mrps18a (NM_026768.1,391-409).
ggtctgttaccaaatcaca

SEQ ID NO: 658709 - DNA, 19 bp, Mus musculus
  siRNA target sequence for Mrps18a (NM_026768.1,427-445).
ggatgcttaccaaaggata

SEQ ID NO: 658710 - DNA, 19 bp, Mus musculus
  siRNA target sequence for Mrps18a (NM_026768.1,486-504).
gtccgtcaagcccatctat

SEQ ID NO: 658711 - DNA, 19 bp, Mus musculus
  siRNA target sequence for Mrps18a (NM_026768.1,488-506).
ccgtcaagcccatctataa

SEQ ID NO: 658712 - DNA, 19 bp, Mus musculus
  siRNA target sequence for Mrps18a (NM_026768.1,489-507).
cgtcaagcccatctataaa

SEQ ID NO: 658713 - DNA, 19 bp, Mus musculus
  siRNA target sequence for Mrps18a (NM_026768.1,586-604).
cctctgaagatgatgcatt

SEQ ID NO: 658714 - DNA, 19 bp, Mus musculus
  siRNA target sequence for Mrps18b (NM_025878.1,39-57).
gctggttcctacactctta

SEQ ID NO: 658715 - DNA, 19 bp, Mus musculus
  siRNA target sequence for Mrps18b (NM_025878.1,43-61).
gttcctacactcttacgaa

SEQ ID NO: 658716 - DNA, 19 bp, Mus musculus
  siRNA target sequence for Mrps18b (NM_025878.1,54-72).
cttacgaagttcctatgta

SEQ ID NO: 658717 - DNA, 19 bp, Mus musculus
  siRNA target sequence for Mrps18b (NM_025878.1,167-185).
ggaagtacctggattcaga

SEQ ID NO: 658718 - DNA, 19 bp, Mus musculus
  siRNA target sequence for Mrps18b (NM_025878.1,168-186).
gaagtacctggattcagaa

SEQ ID NO: 658719 - DNA, 19 bp, Mus musculus
  siRNA target sequence for Mrps18b (NM_025878.1,262-280).
cagcggacccgaaagacat

SEQ ID NO: 658720 - DNA, 19 bp, Mus musculus
  siRNA target sequence for Mrps18b (NM_025878.1,265-283).
cggacccgaaagacatgta

SEQ ID NO: 658721 - DNA, 19 bp, Mus musculus
  siRNA target sequence for Mrps18b (NM_025878.1,267-285).
gacccgaaagacatgtatt

SEQ ID NO: 658722 - DNA, 19 bp, Mus musculus
  siRNA target sequence for Mrps18b (NM_025878.1,270-288).
ccgaaagacatgtattcgt

SEQ ID NO: 658723 - DNA, 19 bp, Mus musculus
  siRNA target sequence for Mrps18b (NM_025878.1,271-289).
cgaaagacatgtattcgta

SEQ ID NO: 658724 - DNA, 19 bp, Mus musculus
  siRNA target sequence for Mrps18b (NM_025878.1,278-296).
catgtattcgtaacaataa

SEQ ID NO: 658725 - DNA, 19 bp, Mus musculus
  siRNA target sequence for Mrps18b (NM_025878.1,317-335).
caatctgccgggatcacaa

SEQ ID NO: 658726 - DNA, 19 bp, Mus musculus
  siRNA target sequence for Mrps2 (NM_080452.2,122-140).
cctgcggagcagaatggta

SEQ ID NO: 658727 - DNA, 19 bp, Mus musculus
  siRNA target sequence for Mrps2 (NM_080452.2,180-198).
cccaggatggcgacgattt

SEQ ID NO: 658728 - DNA, 19 bp, Mus musculus
  siRNA target sequence for Mrps2 (NM_080452.2,200-218).
cagagcaggatcctagata

SEQ ID NO: 658729 - DNA, 19 bp, Mus musculus
  siRNA target sequence for Mrps2 (NM_080452.2,309-327).
ctggttgccgccataggtt

SEQ ID NO: 658730 - DNA, 19 bp, Mus musculus
  siRNA target sequence for Mrps2 (NM_080452.2,311-329).
ggttgccgccataggttta

SEQ ID NO: 658731 - DNA, 19 bp, Mus musculus
  siRNA target sequence for Mrps2 (NM_080452.2,312-330).
gttgccgccataggtttat

SEQ ID NO: 658732 - DNA, 19 bp, Mus musculus
  siRNA target sequence for Mrps2 (NM_080452.2,315-333).
gccgccataggtttatgga

SEQ ID NO: 658733 - DNA, 19 bp, Mus musculus
  siRNA target sequence for Mrps2 (NM_080452.2,353-371).
cgcctgggccaagatatca

SEQ ID NO: 658734 - DNA, 19 bp, Mus musculus
  siRNA target sequence for Mrps2 (NM_080452.2,379-397).
ggatcagacagccttgaat

SEQ ID NO: 658735 - DNA, 19 bp, Mus musculus
  siRNA target sequence for Mrps2 (NM_080452.2,438-456).
gcaagggcatcattctgtt

SEQ ID NO: 658736 - DNA, 19 bp, Mus musculus
  siRNA target sequence for Mrps2 (NM_080452.2,439-457).
caagggcatcattctgttt

SEQ ID NO: 658737 - DNA, 19 bp, Mus musculus
  siRNA target sequence for Mrps2 (NM_080452.2,588-606).
gcctaccagacctcatcat

SEQ ID NO: 658738 - DNA, 19 bp, Mus musculus
  siRNA target sequence for Mrps2 (NM_080452.2,616-634).
cacactcaacaatgtcttt

SEQ ID NO: 658739 - DNA, 19 bp, Mus musculus
  siRNA target sequence for Mrps2 (NM_080452.2,876-894).
catctcctgtgcctgataa

SEQ ID NO: 658740 - DNA, 19 bp, Mus musculus
  siRNA target sequence for Mrps22 (NM_025485.1,192-210).
ccggtagctcagaagtcaa

SEQ ID NO: 658741 - DNA, 19 bp, Mus musculus
  siRNA target sequence for Mrps22 (NM_025485.1,241-259).
gaggatcctcaccaagatt

SEQ ID NO: 658742 - DNA, 19 bp, Mus musculus
  siRNA target sequence for Mrps22 (NM_025485.1,244-262).
gatcctcaccaagattaca

SEQ ID NO: 658743 - DNA, 19 bp, Mus musculus
  siRNA target sequence for Mrps22 (NM_025485.1,310-328).
gccaccaacctataagtta

SEQ ID NO: 658744 - DNA, 19 bp, Mus musculus
  siRNA target sequence for Mrps22 (NM_025485.1,311-329).
ccaccaacctataagttaa

SEQ ID NO: 658745 - DNA, 19 bp, Mus musculus
  siRNA target sequence for Mrps22 (NM_025485.1,314-332).
ccaacctataagttaatga

SEQ ID NO: 658746 - DNA, 19 bp, Mus musculus
  siRNA target sequence for Mrps22 (NM_025485.1,343-361).
gttggaagaggctactaga

SEQ ID NO: 658747 - DNA, 19 bp, Mus musculus
  siRNA target sequence for Mrps22 (NM_025485.1,373-391).
ggcagctaaagtacgatta

SEQ ID NO: 658748 - DNA, 19 bp, Mus musculus
  siRNA target sequence for Mrps22 (NM_025485.1,374-392).
gcagctaaagtacgattaa

SEQ ID NO: 658749 - DNA, 19 bp, Mus musculus
  siRNA target sequence for Mrps22 (NM_025485.1,375-393).
cagctaaagtacgattaaa

SEQ ID NO: 658750 - DNA, 19 bp, Mus musculus
  siRNA target sequence for Mrps22 (NM_025485.1,377-395).
gctaaagtacgattaaaga

SEQ ID NO: 658751 - DNA, 19 bp, Mus musculus
  siRNA target sequence for Mrps22 (NM_025485.1,378-396).
ctaaagtacgattaaagat

SEQ ID NO: 658752 - DNA, 19 bp, Mus musculus
  siRNA target sequence for Mrps22 (NM_025485.1,421-439).
gccaataaatgacgtatta

SEQ ID NO: 658753 - DNA, 19 bp, Mus musculus
  siRNA target sequence for Mrps22 (NM_025485.1,434-452).
gtattagctgaggataaga

SEQ ID NO: 658754 - DNA, 19 bp, Mus musculus
  siRNA target sequence for Mrps22 (NM_025485.1,509-527).
ccacatcgggaacgtttta

SEQ ID NO: 658755 - DNA, 19 bp, Mus musculus
  siRNA target sequence for Mrps22 (NM_025485.1,517-535).
ggaacgttttattgttgtt

SEQ ID NO: 658756 - DNA, 19 bp, Mus musculus
  siRNA target sequence for Mrps22 (NM_025485.1,585-603).
gagtgatacaaatttattt

SEQ ID NO: 658757 - DNA, 19 bp, Mus musculus
  siRNA target sequence for Mrps22 (NM_025485.1,607-625).
gaaagaaggtcgtagagtt

SEQ ID NO: 658758 - DNA, 19 bp, Mus musculus
  siRNA target sequence for Mrps22 (NM_025485.1,621-639).
gagttttgccaccagtaat

SEQ ID NO: 658759 - DNA, 19 bp, Mus musculus
  siRNA target sequence for Mrps22 (NM_025485.1,623-641).
gttttgccaccagtaattt

SEQ ID NO: 658760 - DNA, 19 bp, Mus musculus
  siRNA target sequence for Mrps22 (NM_025485.1,628-646).
gccaccagtaattttcaaa

SEQ ID NO: 658761 - DNA, 19 bp, Mus musculus
  siRNA target sequence for Mrps22 (NM_025485.1,721-739).
gccagattccgctgagtat
